United States Patent Application Publication US 2014/0004565 A1 - sequence listing, part 11

SEQ ID NO: 142478 - RNA, 19 nt, Artificial Sequence
  Description of Artificial Sequence: Synthetic oligonucleotide
ggcggucgagguggcgugg

SEQ ID NO: 142479 - RNA, 19 nt, Artificial Sequence
  Description of Artificial Sequence: Synthetic oligonucleotide
gcggucgagguggcguggg

SEQ ID NO: 142480 - RNA, 19 nt, Artificial Sequence
  Description of Artificial Sequence: Synthetic oligonucleotide
gcccucgaacaugaacaac

SEQ ID NO: 142481 - RNA, 19 nt, Artificial Sequence
  Description of Artificial Sequence: Synthetic oligonucleotide
acacaccaauuggguuuga

SEQ ID NO: 142482 - RNA, 19 nt, Artificial Sequence
  Description of Artificial Sequence: Synthetic oligonucleotide
ccugacgcuuaaauggcau

SEQ ID NO: 142483 - RNA, 19 nt, Artificial Sequence
  Description of Artificial Sequence: Synthetic oligonucleotide
gccugacgcuuaaauggca

SEQ ID NO: 142484 - RNA, 19 nt, Artificial Sequence
  Description of Artificial Sequence: Synthetic oligonucleotide
cgaucgguccccgccgagg

SEQ ID NO: 142485 - RNA, 19 nt, Artificial Sequence
  Description of Artificial Sequence: Synthetic oligonucleotide
cguaucugguagugauuga

SEQ ID NO: 142486 - RNA, 19 nt, Artificial Sequence
  Description of Artificial Sequence: Synthetic oligonucleotide
ccgugugauucuuuuacuu

SEQ ID NO: 142487 - RNA, 19 nt, Artificial Sequence
  Description of Artificial Sequence: Synthetic oligonucleotide
ggguugcauacuguauaua

SEQ ID NO: 142488 - RNA, 19 nt, Artificial Sequence
  Description of Artificial Sequence: Synthetic oligonucleotide
cugcgccuccucggcgcgg

SEQ ID NO: 142489 - RNA, 19 nt, Artificial Sequence
  Description of Artificial Sequence: Synthetic oligonucleotide
cgcgggucagaccggcccc

SEQ ID NO: 142490 - RNA, 19 nt, Artificial Sequence
  Description of Artificial Sequence: Synthetic oligonucleotide
ucgccgccgccgccgccgu

SEQ ID NO: 142491 - RNA, 19 nt, Artificial Sequence
  Description of Artificial Sequence: Synthetic oligonucleotide
gccucagaugucgccgauc

SEQ ID NO: 142492 - RNA, 19 nt, Artificial Sequence
  Description of Artificial Sequence: Synthetic oligonucleotide
ccgugugauccauagccau

SEQ ID NO: 142493 - RNA, 19 nt, Artificial Sequence
  Description of Artificial Sequence: Synthetic oligonucleotide
cgcuaaccauuacaacgga

SEQ ID NO: 142494 - RNA, 19 nt, Artificial Sequence
  Description of Artificial Sequence: Synthetic oligonucleotide
ccgccgaguagacgaucuc

SEQ ID NO: 142495 - RNA, 19 nt, Artificial Sequence
  Description of Artificial Sequence: Synthetic oligonucleotide
guguaucucuagagcccau

SEQ ID NO: 142496 - RNA, 19 nt, Artificial Sequence
  Description of Artificial Sequence: Synthetic oligonucleotide
ggcgcgggucagaccggcc

SEQ ID NO: 142497 - RNA, 19 nt, Artificial Sequence
  Description of Artificial Sequence: Synthetic oligonucleotide
gcgggucagaccggcccca

SEQ ID NO: 142498 - RNA, 19 nt, Artificial Sequence
  Description of Artificial Sequence: Synthetic oligonucleotide
cgacuugguaaaggcaaua

SEQ ID NO: 142499 - RNA, 19 nt, Artificial Sequence
  Description of Artificial Sequence: Synthetic oligonucleotide
ggaacccgagggacuuccu

SEQ ID NO: 142500 - RNA, 19 nt, Artificial Sequence
  Description of Artificial Sequence: Synthetic oligonucleotide
cgccgaguagacgaucucu

SEQ ID NO: 142501 - RNA, 19 nt, Artificial Sequence
  Description of Artificial Sequence: Synthetic oligonucleotide
cggcgcgggucagaccggc

SEQ ID NO: 142502 - RNA, 19 nt, Artificial Sequence
  Description of Artificial Sequence: Synthetic oligonucleotide
gcuccccgccugaggcguc

SEQ ID NO: 142503 - RNA, 19 nt, Artificial Sequence
  Description of Artificial Sequence: Synthetic oligonucleotide
cggucgagguggcguggga

SEQ ID NO: 142504 - RNA, 19 nt, Artificial Sequence
  Description of Artificial Sequence: Synthetic oligonucleotide
ccuggccgugugauucuuu

SEQ ID NO: 142505 - RNA, 19 nt, Artificial Sequence
  Description of Artificial Sequence: Synthetic oligonucleotide
gcgggcugaggggacgcuu

SEQ ID NO: 142506 - RNA, 19 nt, Artificial Sequence
  Description of Artificial Sequence: Synthetic oligonucleotide
cccgagggacuuccuccau

SEQ ID NO: 142507 - RNA, 19 nt, Artificial Sequence
  Description of Artificial Sequence: Synthetic oligonucleotide
ccgccgcuaccuccuucau

SEQ ID NO: 142508 - RNA, 19 nt, Artificial Sequence
  Description of Artificial Sequence: Synthetic oligonucleotide
cgccgccgccgccgccguc

SEQ ID NO: 142509 - RNA, 19 nt, Artificial Sequence
  Description of Artificial Sequence: Synthetic oligonucleotide
gauuacacaaccuaaaggg

SEQ ID NO: 142510 - RNA, 19 nt, Artificial Sequence
  Description of Artificial Sequence: Synthetic oligonucleotide
aaguaauuaccucagaaga

SEQ ID NO: 142511 - RNA, 19 nt, Artificial Sequence
  Description of Artificial Sequence: Synthetic oligonucleotide
gaauguaucucccugauac

SEQ ID NO: 142512 - RNA, 19 nt, Artificial Sequence
  Description of Artificial Sequence: Synthetic oligonucleotide
aguuacaguacauugugcg

SEQ ID NO: 142513 - RNA, 19 nt, Artificial Sequence
  Description of Artificial Sequence: Synthetic oligonucleotide
aagccaaucguucucguac

SEQ ID NO: 142514 - RNA, 19 nt, Artificial Sequence
  Description of Artificial Sequence: Synthetic oligonucleotide
uguauuuuagucauagggu

SEQ ID NO: 142515 - RNA, 19 nt, Artificial Sequence
  Description of Artificial Sequence: Synthetic oligonucleotide
uuaaauucgccuugcauag

SEQ ID NO: 142516 - RNA, 19 nt, Artificial Sequence
  Description of Artificial Sequence: Synthetic oligonucleotide
cuugauaccauguucuucc

SEQ ID NO: 142517 - RNA, 19 nt, Artificial Sequence
  Description of Artificial Sequence: Synthetic oligonucleotide
uaccauuacagucacaucu

SEQ ID NO: 142518 - RNA, 19 nt, Artificial Sequence
  Description of Artificial Sequence: Synthetic oligonucleotide
uguacugugaaacaccacu

SEQ ID NO: 142519 - RNA, 19 nt, Artificial Sequence
  Description of Artificial Sequence: Synthetic oligonucleotide
ugacuuauuaaaagagacg

SEQ ID NO: 142520 - RNA, 19 nt, Artificial Sequence
  Description of Artificial Sequence: Synthetic oligonucleotide
ugugaaacaccacucagug

SEQ ID NO: 142521 - RNA, 19 nt, Artificial Sequence
  Description of Artificial Sequence: Synthetic oligonucleotide
aaaagaucaucacugcuga

SEQ ID NO: 142522 - RNA, 19 nt, Artificial Sequence
  Description of Artificial Sequence: Synthetic oligonucleotide
aaauucgccuugcauaguc

SEQ ID NO: 142523 - RNA, 19 nt, Artificial Sequence
  Description of Artificial Sequence: Synthetic oligonucleotide
aacacuguguuaaauucgc

SEQ ID NO: 142524 - RNA, 19 nt, Artificial Sequence
  Description of Artificial Sequence: Synthetic oligonucleotide
cacaguuaacccuacaccg

SEQ ID NO: 142525 - RNA, 19 nt, Artificial Sequence
  Description of Artificial Sequence: Synthetic oligonucleotide
aguuauaugcuaugucugg

SEQ ID NO: 142526 - RNA, 19 nt, Artificial Sequence
  Description of Artificial Sequence: Synthetic oligonucleotide
uacaugaaagcccacgaca

SEQ ID NO: 142527 - RNA, 19 nt, Artificial Sequence
  Description of Artificial Sequence: Synthetic oligonucleotide
uacaccgucguucuaaucu

SEQ ID NO: 142528 - RNA, 19 nt, Artificial Sequence
  Description of Artificial Sequence: Synthetic oligonucleotide
uuacacaaccuaaagggga

SEQ ID NO: 142529 - RNA, 19 nt, Artificial Sequence
  Description of Artificial Sequence: Synthetic oligonucleotide
uugugaauaucucugcaca

SEQ ID NO: 142530 - RNA, 19 nt, Artificial Sequence
  Description of Artificial Sequence: Synthetic oligonucleotide
cauaagacagcuugaaaac

SEQ ID NO: 142531 - RNA, 19 nt, Artificial Sequence
  Description of Artificial Sequence: Synthetic oligonucleotide
cacgaauugccuuauaaac

SEQ ID NO: 142532 - RNA, 19 nt, Artificial Sequence
  Description of Artificial Sequence: Synthetic oligonucleotide
ugucuaugaauguaguucu

SEQ ID NO: 142533 - RNA, 19 nt, Artificial Sequence
  Description of Artificial Sequence: Synthetic oligonucleotide
uucgucaccgacaacguug

SEQ ID NO: 142534 - RNA, 19 nt, Artificial Sequence
  Description of Artificial Sequence: Synthetic oligonucleotide
cuuguccuaacaaagccgc

SEQ ID NO: 142535 - RNA, 19 nt, Artificial Sequence
  Description of Artificial Sequence: Synthetic oligonucleotide
uugauaugacuucagggcu

SEQ ID NO: 142536 - RNA, 19 nt, Artificial Sequence
  Description of Artificial Sequence: Synthetic oligonucleotide
caaucguucucguacaagc

SEQ ID NO: 142537 - RNA, 19 nt, Artificial Sequence
  Description of Artificial Sequence: Synthetic oligonucleotide
ugauuaggcacaguuaacc

SEQ ID NO: 142538 - RNA, 19 nt, Artificial Sequence
  Description of Artificial Sequence: Synthetic oligonucleotide
aaaggaguaaauacaguug

SEQ ID NO: 142539 - RNA, 19 nt, Artificial Sequence
  Description of Artificial Sequence: Synthetic oligonucleotide
acugccuaccacuuugggc

SEQ ID NO: 142540 - RNA, 19 nt, Artificial Sequence
  Description of Artificial Sequence: Synthetic oligonucleotide
aacuuauguuaugaacagc

SEQ ID NO: 142541 - RNA, 19 nt, Artificial Sequence
  Description of Artificial Sequence: Synthetic oligonucleotide
aguaagacuguggcuaucc

SEQ ID NO: 142542 - RNA, 19 nt, Artificial Sequence
  Description of Artificial Sequence: Synthetic oligonucleotide
uacacaaccuaaaggggag

SEQ ID NO: 142543 - RNA, 19 nt, Artificial Sequence
  Description of Artificial Sequence: Synthetic oligonucleotide
uaggcauucucauaguaga

SEQ ID NO: 142544 - RNA, 19 nt, Artificial Sequence
  Description of Artificial Sequence: Synthetic oligonucleotide
aacguugugaauaucucug

SEQ ID NO: 142545 - RNA, 19 nt, Artificial Sequence
  Description of Artificial Sequence: Synthetic oligonucleotide
uugucuaugaauguaguuc

SEQ ID NO: 142546 - RNA, 19 nt, Artificial Sequence
  Description of Artificial Sequence: Synthetic oligonucleotide
uuagguaugcaccccacgu

SEQ ID NO: 142547 - RNA, 19 nt, Artificial Sequence
  Description of Artificial Sequence: Synthetic oligonucleotide
uuuagguaugcaccccacg

SEQ ID NO: 142548 - RNA, 19 nt, Artificial Sequence
  Description of Artificial Sequence: Synthetic oligonucleotide
gacgaagcuacacagguca

SEQ ID NO: 142549 - RNA, 19 nt, Artificial Sequence
  Description of Artificial Sequence: Synthetic oligonucleotide
guuaaauucgccuugcaua

SEQ ID NO: 142550 - RNA, 19 nt, Artificial Sequence
  Description of Artificial Sequence: Synthetic oligonucleotide
uggaacguugucauaguca

SEQ ID NO: 142551 - RNA, 19 nt, Artificial Sequence
  Description of Artificial Sequence: Synthetic oligonucleotide
aaggcuuguccuaacaaag

SEQ ID NO: 142552 - RNA, 19 nt, Artificial Sequence
  Description of Artificial Sequence: Synthetic oligonucleotide
ugcgauuacagaauauaaa

SEQ ID NO: 142553 - RNA, 19 nt, Artificial Sequence
  Description of Artificial Sequence: Synthetic oligonucleotide
aauacaguuguuggaacgu

SEQ ID NO: 142554 - RNA, 19 nt, Artificial Sequence
  Description of Artificial Sequence: Synthetic oligonucleotide
uauuuuagucauaggguaa

SEQ ID NO: 142555 - RNA, 19 nt, Artificial Sequence
  Description of Artificial Sequence: Synthetic oligonucleotide
uguuaaauucgccuugcau

SEQ ID NO: 142556 - RNA, 19 nt, Artificial Sequence
  Description of Artificial Sequence: Synthetic oligonucleotide
agcguuuggacccaguaca

SEQ ID NO: 142557 - RNA, 19 nt, Artificial Sequence
  Description of Artificial Sequence: Synthetic oligonucleotide
uaaaggggagaucuagcug

SEQ ID NO: 142558 - RNA, 19 nt, Artificial Sequence
  Description of Artificial Sequence: Synthetic oligonucleotide
guuucgagagucuuucaag

SEQ ID NO: 142559 - RNA, 19 nt, Artificial Sequence
  Description of Artificial Sequence: Synthetic oligonucleotide
acauugugcgauuacagaa

SEQ ID NO: 142560 - RNA, 19 nt, Artificial Sequence
  Description of Artificial Sequence: Synthetic oligonucleotide
gauggaaccguccauucca

SEQ ID NO: 142561 - RNA, 19 nt, Artificial Sequence
  Description of Artificial Sequence: Synthetic oligonucleotide
ucauugaucuucacgccca

SEQ ID NO: 142562 - RNA, 19 nt, Artificial Sequence
  Description of Artificial Sequence: Synthetic oligonucleotide
ugauaugacuucagggcug

SEQ ID NO: 142563 - RNA, 19 nt, Artificial Sequence
  Description of Artificial Sequence: Synthetic oligonucleotide
acguugugaauaucucugc

SEQ ID NO: 142564 - RNA, 19 nt, Artificial Sequence
  Description of Artificial Sequence: Synthetic oligonucleotide
acacuaggcaaacacacgu

SEQ ID NO: 142565 - RNA, 19 nt, Artificial Sequence
  Description of Artificial Sequence: Synthetic oligonucleotide
auuacacaaccuaaagggg

SEQ ID NO: 142566 - RNA, 19 nt, Artificial Sequence
  Description of Artificial Sequence: Synthetic oligonucleotide
aaguuggccuuguugauau

SEQ ID NO: 142567 - RNA, 19 nt, Artificial Sequence
  Description of Artificial Sequence: Synthetic oligonucleotide
aguacaugaaagcccacga

SEQ ID NO: 142568 - RNA, 19 nt, Artificial Sequence
  Description of Artificial Sequence: Synthetic oligonucleotide
aguaauuaccucagaagag

SEQ ID NO: 142569 - RNA, 19 nt, Artificial Sequence
  Description of Artificial Sequence: Synthetic oligonucleotide
auuaggcacaguuaacccu

SEQ ID NO: 142570 - RNA, 19 nt, Artificial Sequence
  Description of Artificial Sequence: Synthetic oligonucleotide
uuuaccggggcaguaaggc

SEQ ID NO: 142571 - RNA, 19 nt, Artificial Sequence
  Description of Artificial Sequence: Synthetic oligonucleotide
uacauugugcgauuacaga

SEQ ID NO: 142572 - RNA, 19 nt, Artificial Sequence
  Description of Artificial Sequence: Synthetic oligonucleotide
uuuuaccggggcaguaagg

SEQ ID NO: 142573 - RNA, 19 nt, Artificial Sequence
  Description of Artificial Sequence: Synthetic oligonucleotide
caucuaagccaauaccagc

SEQ ID NO: 142574 - RNA, 19 nt, Artificial Sequence
  Description of Artificial Sequence: Synthetic oligonucleotide
guugucucgggauggaacc

SEQ ID NO: 142575 - RNA, 19 nt, Artificial Sequence
  Description of Artificial Sequence: Synthetic oligonucleotide
uuaggcacaguuaacccua

SEQ ID NO: 142576 - RNA, 19 nt, Artificial Sequence
  Description of Artificial Sequence: Synthetic oligonucleotide
ggacauaugacuuauuaaa

SEQ ID NO: 142577 - RNA, 19 nt, Artificial Sequence
  Description of Artificial Sequence: Synthetic oligonucleotide
guauuuuagucauagggua

SEQ ID NO: 142578 - RNA, 19 nt, Artificial Sequence
  Description of Artificial Sequence: Synthetic oligonucleotide
gauaugacuucagggcugg

SEQ ID NO: 142579 - RNA, 19 nt, Artificial Sequence
  Description of Artificial Sequence: Synthetic oligonucleotide
aauugccuuauaaacuuga

SEQ ID NO: 142580 - RNA, 19 nt, Artificial Sequence
  Description of Artificial Sequence: Synthetic oligonucleotide
uuauaugcuaugucuggaa

SEQ ID NO: 142581 - RNA, 19 nt, Artificial Sequence
  Description of Artificial Sequence: Synthetic oligonucleotide
ucuaguuccgagaggaguu

SEQ ID NO: 142582 - RNA, 19 nt, Artificial Sequence
  Description of Artificial Sequence: Synthetic oligonucleotide
uggacauaugacuuauuaa

SEQ ID NO: 142583 - RNA, 19 nt, Artificial Sequence
  Description of Artificial Sequence: Synthetic oligonucleotide
aggagaauggaccguacca

SEQ ID NO: 142584 - RNA, 19 nt, Artificial Sequence
  Description of Artificial Sequence: Synthetic oligonucleotide
guagccccaauucagcgag

SEQ ID NO: 142585 - RNA, 19 nt, Artificial Sequence
  Description of Artificial Sequence: Synthetic oligonucleotide
cucggggcgaccuucagag

SEQ ID NO: 142586 - RNA, 19 nt, Artificial Sequence
  Description of Artificial Sequence: Synthetic oligonucleotide
aauggaccguaccauuaca

SEQ ID NO: 142587 - RNA, 19 nt, Artificial Sequence
  Description of Artificial Sequence: Synthetic oligonucleotide
uguucguggacugagcagu

SEQ ID NO: 142588 - RNA, 19 nt, Artificial Sequence
  Description of Artificial Sequence: Synthetic oligonucleotide
uucgagagucuuucaaggc

SEQ ID NO: 142589 - RNA, 19 nt, Artificial Sequence
  Description of Artificial Sequence: Synthetic oligonucleotide
agaaguguacugugaaaca

SEQ ID NO: 142590 - RNA, 19 nt, Artificial Sequence
  Description of Artificial Sequence: Synthetic oligonucleotide
aaacaccacucagugcuac

SEQ ID NO: 142591 - RNA, 19 nt, Artificial Sequence
  Description of Artificial Sequence: Synthetic oligonucleotide
auaggguaauugcucuuuc

SEQ ID NO: 142592 - RNA, 19 nt, Artificial Sequence
  Description of Artificial Sequence: Synthetic oligonucleotide
uuggacaggcgccaagagc

SEQ ID NO: 142593 - RNA, 19 nt, Artificial Sequence
  Description of Artificial Sequence: Synthetic oligonucleotide
auuaccucagaagaguuau

SEQ ID NO: 142594 - RNA, 19 nt, Artificial Sequence
  Description of Artificial Sequence: Synthetic oligonucleotide
uaaaagagacgaagcuaca

SEQ ID NO: 142595 - RNA, 19 nt, Artificial Sequence
  Description of Artificial Sequence: Synthetic oligonucleotide
gacgcuccaaccacuaggg

SEQ ID NO: 142596 - RNA, 19 nt, Artificial Sequence
  Description of Artificial Sequence: Synthetic oligonucleotide
uugcuaacauucccuagcu

SEQ ID NO: 142597 - RNA, 19 nt, Artificial Sequence
  Description of Artificial Sequence: Synthetic oligonucleotide
uguccucaacuuuccaucc

SEQ ID NO: 142598 - RNA, 19 nt, Artificial Sequence
  Description of Artificial Sequence: Synthetic oligonucleotide
ugugcgauuacagaauaua

SEQ ID NO: 142599 - RNA, 19 nt, Artificial Sequence
  Description of Artificial Sequence: Synthetic oligonucleotide
aacccuacaccgucguucu

SEQ ID NO: 142600 - RNA, 19 nt, Artificial Sequence
  Description of Artificial Sequence: Synthetic oligonucleotide
ggaacguugucauagucac

SEQ ID NO: 142601 - RNA, 19 nt, Artificial Sequence
  Description of Artificial Sequence: Synthetic oligonucleotide
aguacauugugcgauuaca

SEQ ID NO: 142602 - RNA, 19 nt, Artificial Sequence
  Description of Artificial Sequence: Synthetic oligonucleotide
agaacgcuucgucaccgac

SEQ ID NO: 142603 - RNA, 19 nt, Artificial Sequence
  Description of Artificial Sequence: Synthetic oligonucleotide
auaugcuaugucuggaaaa

SEQ ID NO: 142604 - RNA, 19 nt, Artificial Sequence
  Description of Artificial Sequence: Synthetic oligonucleotide
auaagcugaugggaggagg

SEQ ID NO: 142605 - RNA, 19 nt, Artificial Sequence
  Description of Artificial Sequence: Synthetic oligonucleotide
uacucgguagccccaauuc

SEQ ID NO: 142606 - RNA, 19 nt, Artificial Sequence
  Description of Artificial Sequence: Synthetic oligonucleotide
cucgguagccccaauucag

SEQ ID NO: 142607 - RNA, 19 nt, Artificial Sequence
  Description of Artificial Sequence: Synthetic oligonucleotide
uaauuaccucagaagaguu

SEQ ID NO: 142608 - RNA, 19 nt, Artificial Sequence
  Description of Artificial Sequence: Synthetic oligonucleotide
guacauugugcgauuacag

SEQ ID NO: 142609 - RNA, 19 nt, Artificial Sequence
  Description of Artificial Sequence: Synthetic oligonucleotide
uuaaucuugugagaaccaa

SEQ ID NO: 142610 - RNA, 19 nt, Artificial Sequence
  Description of Artificial Sequence: Synthetic oligonucleotide
acaccgucguucuaaucuc

SEQ ID NO: 142611 - RNA, 19 nt, Artificial Sequence
  Description of Artificial Sequence: Synthetic oligonucleotide
uuuuagguaugcaccccac

SEQ ID NO: 142612 - RNA, 19 nt, Artificial Sequence
  Description of Artificial Sequence: Synthetic oligonucleotide
cauuuguuguugucucggg

SEQ ID NO: 142613 - RNA, 19 nt, Artificial Sequence
  Description of Artificial Sequence: Synthetic oligonucleotide
aauuggcacgaauugccuu

SEQ ID NO: 142614 - RNA, 19 nt, Artificial Sequence
  Description of Artificial Sequence: Synthetic oligonucleotide
accguaccauuacagucac

SEQ ID NO: 142615 - RNA, 19 nt, Artificial Sequence
  Description of Artificial Sequence: Synthetic oligonucleotide
gaauggaccguaccauuac

SEQ ID NO: 142616 - RNA, 19 nt, Artificial Sequence
  Description of Artificial Sequence: Synthetic oligonucleotide
agcgagcaaucucccagcc

SEQ ID NO: 142617 - RNA, 19 nt, Artificial Sequence
  Description of Artificial Sequence: Synthetic oligonucleotide
ucguggacugagcaguuac

SEQ ID NO: 142618 - RNA, 19 nt, Artificial Sequence
  Description of Artificial Sequence: Synthetic oligonucleotide
aggguggauaccaauagug

SEQ ID NO: 142619 - RNA, 19 nt, Artificial Sequence
  Description of Artificial Sequence: Synthetic oligonucleotide
caugaaagcccacgacacg

SEQ ID NO: 142620 - RNA, 19 nt, Artificial Sequence
  Description of Artificial Sequence: Synthetic oligonucleotide
ugucucuaagccaaucguu

SEQ ID NO: 142621 - RNA, 19 nt, Artificial Sequence
  Description of Artificial Sequence: Synthetic oligonucleotide
guuuuaccggggcaguaag

SEQ ID NO: 142622 - RNA, 19 nt, Artificial Sequence
  Description of Artificial Sequence: Synthetic oligonucleotide
cugcguucaauaauaauaa

SEQ ID NO: 142623 - RNA, 19 nt, Artificial Sequence
  Description of Artificial Sequence: Synthetic oligonucleotide
acgaauugccuuauaaacu

SEQ ID NO: 142624 - RNA, 19 nt, Artificial Sequence
  Description of Artificial Sequence: Synthetic oligonucleotide
aagcaacauaggacgcucc

SEQ ID NO: 142625 - RNA, 19 nt, Artificial Sequence
  Description of Artificial Sequence: Synthetic oligonucleotide
ugauugcuaacauucccua

SEQ ID NO: 142626 - RNA, 19 nt, Artificial Sequence
  Description of Artificial Sequence: Synthetic oligonucleotide
ucugagcgagcaaucuccc

SEQ ID NO: 142627 - RNA, 19 nt, Artificial Sequence
  Description of Artificial Sequence: Synthetic oligonucleotide
ucguucucguacaagcauc

SEQ ID NO: 142628 - RNA, 19 nt, Artificial Sequence
  Description of Artificial Sequence: Synthetic oligonucleotide
agauccgacaguugaucug

SEQ ID NO: 142629 - RNA, 19 nt, Artificial Sequence
  Description of Artificial Sequence: Synthetic oligonucleotide
gaccccaucuaguuccgag

SEQ ID NO: 142630 - RNA, 19 nt, Artificial Sequence
  Description of Artificial Sequence: Synthetic oligonucleotide
caguacaugaaagcccacg

SEQ ID NO: 142631 - RNA, 19 nt, Artificial Sequence
  Description of Artificial Sequence: Synthetic oligonucleotide
accuaaaggggagaucuag

SEQ ID NO: 142632 - RNA, 19 nt, Artificial Sequence
  Description of Artificial Sequence: Synthetic oligonucleotide
ugacuucagggcuggacca

SEQ ID NO: 142633 - RNA, 19 nt, Artificial Sequence
  Description of Artificial Sequence: Synthetic oligonucleotide
uccaccugcguucaauaau

SEQ ID NO: 142634 - RNA, 19 nt, Artificial Sequence
  Description of Artificial Sequence: Synthetic oligonucleotide
uaacccuacaccgucguuc

SEQ ID NO: 142635 - RNA, 19 nt, Artificial Sequence
  Description of Artificial Sequence: Synthetic oligonucleotide
augaaagcccacgacacgu

SEQ ID NO: 142636 - RNA, 19 nt, Artificial Sequence
  Description of Artificial Sequence: Synthetic oligonucleotide
auuggcacgaauugccuua

SEQ ID NO: 142637 - RNA, 19 nt, Artificial Sequence
  Description of Artificial Sequence: Synthetic oligonucleotide
ucgguagccccaauucagc

SEQ ID NO: 142638 - RNA, 19 nt, Artificial Sequence
  Description of Artificial Sequence: Synthetic oligonucleotide
aaucguucucguacaagca

SEQ ID NO: 142639 - RNA, 19 nt, Artificial Sequence
  Description of Artificial Sequence: Synthetic oligonucleotide
aggcuuguccuaacaaagc

SEQ ID NO: 142640 - RNA, 19 nt, Artificial Sequence
  Description of Artificial Sequence: Synthetic oligonucleotide
uggauaccaauagugcugu

SEQ ID NO: 142641 - RNA, 19 nt, Artificial Sequence
  Description of Artificial Sequence: Synthetic oligonucleotide
uaccggggcaguaaggcaa

SEQ ID NO: 142642 - RNA, 19 nt, Artificial Sequence
  Description of Artificial Sequence: Synthetic oligonucleotide
cuuaaucuugugagaacca

SEQ ID NO: 142643 - RNA, 19 nt, Artificial Sequence
  Description of Artificial Sequence: Synthetic oligonucleotide
auugugcgauuacagaaua

SEQ ID NO: 142644 - RNA, 19 nt, Artificial Sequence
  Description of Artificial Sequence: Synthetic oligonucleotide
ggcuuguccuaacaaagcc

SEQ ID NO: 142645 - RNA, 19 nt, Artificial Sequence
  Description of Artificial Sequence: Synthetic oligonucleotide
aguggcgaugagaaaccgc

SEQ ID NO: 142646 - RNA, 19 nt, Artificial Sequence
  Description of Artificial Sequence: Synthetic oligonucleotide
uacuccaaaggaguaaaua

SEQ ID NO: 142647 - RNA, 19 nt, Artificial Sequence
  Description of Artificial Sequence: Synthetic oligonucleotide
agccccaauucagcgagcc

SEQ ID NO: 142648 - RNA, 19 nt, Artificial Sequence
  Description of Artificial Sequence: Synthetic oligonucleotide
cugccuaccacuuugggcu

SEQ ID NO: 142649 - RNA, 19 nt, Artificial Sequence
  Description of Artificial Sequence: Synthetic oligonucleotide
ugccgaaugucugucugag

SEQ ID NO: 142650 - RNA, 19 nt, Artificial Sequence
  Description of Artificial Sequence: Synthetic oligonucleotide
aaaccgcucugcugaauaa

SEQ ID NO: 142651 - RNA, 19 nt, Artificial Sequence
  Description of Artificial Sequence: Synthetic oligonucleotide
ucgucaccgacaacguugu

SEQ ID NO: 142652 - RNA, 19 nt, Artificial Sequence
  Description of Artificial Sequence: Synthetic oligonucleotide
acauaagcugaugggagga

SEQ ID NO: 142653 - RNA, 19 nt, Artificial Sequence
  Description of Artificial Sequence: Synthetic oligonucleotide
aagccaauaccagcaagaa

SEQ ID NO: 142654 - RNA, 19 nt, Artificial Sequence
  Description of Artificial Sequence: Synthetic oligonucleotide
accgacaacguugugaaua

SEQ ID NO: 142655 - RNA, 19 nt, Artificial Sequence
  Description of Artificial Sequence: Synthetic oligonucleotide
ugucaccaauagcauagau

SEQ ID NO: 142656 - RNA, 19 nt, Artificial Sequence
  Description of Artificial Sequence: Synthetic oligonucleotide
guucacacacguuccuccc

SEQ ID NO: 142657 - RNA, 19 nt, Artificial Sequence
  Description of Artificial Sequence: Synthetic oligonucleotide
agaacucggggcgaccuuc

SEQ ID NO: 142658 - RNA, 19 nt, Artificial Sequence
  Description of Artificial Sequence: Synthetic oligonucleotide
caguuaacccuacaccguc

SEQ ID NO: 142659 - RNA, 19 nt, Artificial Sequence
  Description of Artificial Sequence: Synthetic oligonucleotide
caggagaauggaccguacc

SEQ ID NO: 142660 - RNA, 19 nt, Artificial Sequence
  Description of Artificial Sequence: Synthetic oligonucleotide
aguuaacccuacaccgucg

SEQ ID NO: 142661 - RNA, 19 nt, Artificial Sequence
  Description of Artificial Sequence: Synthetic oligonucleotide
caggccacaacagccauac

SEQ ID NO: 142662 - RNA, 19 nt, Artificial Sequence
  Description of Artificial Sequence: Synthetic oligonucleotide
aauuaccucagaagaguua

SEQ ID NO: 142663 - RNA, 19 nt, Artificial Sequence
  Description of Artificial Sequence: Synthetic oligonucleotide
aauuggaguuacaguacau

SEQ ID NO: 142664 - RNA, 19 nt, Artificial Sequence
  Description of Artificial Sequence: Synthetic oligonucleotide
guuauaugcuaugucugga

SEQ ID NO: 142665 - RNA, 19 nt, Artificial Sequence
  Description of Artificial Sequence: Synthetic oligonucleotide
ggcgccaagagcccaagag

SEQ ID NO: 142666 - RNA, 19 nt, Artificial Sequence
  Description of Artificial Sequence: Synthetic oligonucleotide
cuguucguggacugagcag

SEQ ID NO: 142667 - RNA, 19 nt, Artificial Sequence
  Description of Artificial Sequence: Synthetic oligonucleotide
gucguucuaaucucagaga

SEQ ID NO: 142668 - RNA, 19 nt, Artificial Sequence
  Description of Artificial Sequence: Synthetic oligonucleotide
cuaaaggggagaucuagcu

SEQ ID NO: 142669 - RNA, 19 nt, Artificial Sequence
  Description of Artificial Sequence: Synthetic oligonucleotide
ccugcguucaauaauaaua

SEQ ID NO: 142670 - RNA, 19 nt, Artificial Sequence
  Description of Artificial Sequence: Synthetic oligonucleotide
ugcguucaauaauaauaau

SEQ ID NO: 142671 - RNA, 19 nt, Artificial Sequence
  Description of Artificial Sequence: Synthetic oligonucleotide
auggaccguaccauuacag

SEQ ID NO: 142672 - RNA, 19 nt, Artificial Sequence
  Description of Artificial Sequence: Synthetic oligonucleotide
ucaggagaauggaccguac

SEQ ID NO: 142673 - RNA, 19 nt, Artificial Sequence
  Description of Artificial Sequence: Synthetic oligonucleotide
ucucgggauggaaccgucc

SEQ ID NO: 142674 - RNA, 19 nt, Artificial Sequence
  Description of Artificial Sequence: Synthetic oligonucleotide
caacuuuccauccauaguu

SEQ ID NO: 142675 - RNA, 19 nt, Artificial Sequence
  Description of Artificial Sequence: Synthetic oligonucleotide
cacggcaugcuuuuagaca

SEQ ID NO: 142676 - RNA, 19 nt, Artificial Sequence
  Description of Artificial Sequence: Synthetic oligonucleotide
gagccgaugugauucugca

SEQ ID NO: 142677 - RNA, 19 nt, Artificial Sequence
  Description of Artificial Sequence: Synthetic oligonucleotide
agguagcguggccuuuccc

SEQ ID NO: 142678 - RNA, 19 nt, Artificial Sequence
  Description of Artificial Sequence: Synthetic oligonucleotide
ggaccguaccauuacaguc

SEQ ID NO: 142679 - RNA, 19 nt, Artificial Sequence
  Description of Artificial Sequence: Synthetic oligonucleotide
cuuggacaggcgccaagag

SEQ ID NO: 142680 - RNA, 19 nt, Artificial Sequence
  Description of Artificial Sequence: Synthetic oligonucleotide
uagguaugcaccccacguu

SEQ ID NO: 142681 - RNA, 19 nt, Artificial Sequence
  Description of Artificial Sequence: Synthetic oligonucleotide
caagagccugaacuucacc

SEQ ID NO: 142682 - RNA, 19 nt, Artificial Sequence
  Description of Artificial Sequence: Synthetic oligonucleotide
acaguaagacuguggcuau

SEQ ID NO: 142683 - RNA, 19 nt, Artificial Sequence
  Description of Artificial Sequence: Synthetic oligonucleotide
gucaccgacaacguuguga

SEQ ID NO: 142684 - RNA, 19 nt, Artificial Sequence
  Description of Artificial Sequence: Synthetic oligonucleotide
gugaauaucucugcacaga

SEQ ID NO: 142685 - RNA, 19 nt, Artificial Sequence
  Description of Artificial Sequence: Synthetic oligonucleotide
uugugcgauuacagaauau

SEQ ID NO: 142686 - RNA, 19 nt, Artificial Sequence
  Description of Artificial Sequence: Synthetic oligonucleotide
auagaacucggggcgaccu

SEQ ID NO: 142687 - RNA, 19 nt, Artificial Sequence
  Description of Artificial Sequence: Synthetic oligonucleotide
cgucguucuaaucucagag

SEQ ID NO: 142688 - RNA, 19 nt, Artificial Sequence
  Description of Artificial Sequence: Synthetic oligonucleotide
cugauugcuaacauucccu

SEQ ID NO: 142689 - RNA, 19 nt, Artificial Sequence
  Description of Artificial Sequence: Synthetic oligonucleotide
acaguuaacccuacaccgu

SEQ ID NO: 142690 - RNA, 19 nt, Artificial Sequence
  Description of Artificial Sequence: Synthetic oligonucleotide
ccuaaaggggagaucuagc

SEQ ID NO: 142691 - RNA, 19 nt, Artificial Sequence
  Description of Artificial Sequence: Synthetic oligonucleotide
guacugugaaacaccacuc

SEQ ID NO: 142692 - RNA, 19 nt, Artificial Sequence
  Description of Artificial Sequence: Synthetic oligonucleotide
ccugauacacugccgaaug

SEQ ID NO: 142693 - RNA, 19 nt, Artificial Sequence
  Description of Artificial Sequence: Synthetic oligonucleotide
uaguaucacugaccccaug

SEQ ID NO: 142694 - RNA, 19 nt, Artificial Sequence
  Description of Artificial Sequence: Synthetic oligonucleotide
cagcguuuggacccaguac

SEQ ID NO: 142695 - RNA, 19 nt, Artificial Sequence
  Description of Artificial Sequence: Synthetic oligonucleotide
cauaagcugaugggaggag

SEQ ID NO: 142696 - RNA, 19 nt, Artificial Sequence
  Description of Artificial Sequence: Synthetic oligonucleotide
cagcgagccgaugugauuc

SEQ ID NO: 142697 - RNA, 19 nt, Artificial Sequence
  Description of Artificial Sequence: Synthetic oligonucleotide
agacgaagcuacacagguc

SEQ ID NO: 142698 - RNA, 19 nt, Artificial Sequence
  Description of Artificial Sequence: Synthetic oligonucleotide
auacacugccgaaugucug

SEQ ID NO: 142699 - RNA, 19 nt, Artificial Sequence
  Description of Artificial Sequence: Synthetic oligonucleotide
guagcguggccuuucccca

SEQ ID NO: 142700 - RNA, 19 nt, Artificial Sequence
  Description of Artificial Sequence: Synthetic oligonucleotide
gauccgacaguugaucugu

SEQ ID NO: 142701 - RNA, 19 nt, Artificial Sequence
  Description of Artificial Sequence: Synthetic oligonucleotide
guuccgagaggaguuggug

SEQ ID NO: 142702 - RNA, 19 nt, Artificial Sequence
  Description of Artificial Sequence: Synthetic oligonucleotide
cacuguucguggacugagc

SEQ ID NO: 142703 - RNA, 19 nt, Artificial Sequence
  Description of Artificial Sequence: Synthetic oligonucleotide
aguuacccugagucggccu

SEQ ID NO: 142704 - RNA, 19 nt, Artificial Sequence
  Description of Artificial Sequence: Synthetic oligonucleotide
acacguucccugagguggc

SEQ ID NO: 142705 - RNA, 19 nt, Artificial Sequence
  Description of Artificial Sequence: Synthetic oligonucleotide
accugcguucaauaauaau

SEQ ID NO: 142706 - RNA, 19 nt, Artificial Sequence
  Description of Artificial Sequence: Synthetic oligonucleotide
cgcuucgucaccgacaacg

SEQ ID NO: 142707 - RNA, 19 nt, Artificial Sequence
  Description of Artificial Sequence: Synthetic oligonucleotide
ucccagaccccaucuaguu

SEQ ID NO: 142708 - RNA, 19 nt, Artificial Sequence
  Description of Artificial Sequence: Synthetic oligonucleotide
ggcacgaauugccuuauaa

SEQ ID NO: 142709 - RNA, 19 nt, Artificial Sequence
  Description of Artificial Sequence: Synthetic oligonucleotide
gugcgauuacagaauauaa

SEQ ID NO: 142710 - RNA, 19 nt, Artificial Sequence
  Description of Artificial Sequence: Synthetic oligonucleotide
cuaguuccgagaggaguug

SEQ ID NO: 142711 - RNA, 19 nt, Artificial Sequence
  Description of Artificial Sequence: Synthetic oligonucleotide
ugagucggccugguguccc

SEQ ID NO: 142712 - RNA, 19 nt, Artificial Sequence
  Description of Artificial Sequence: Synthetic oligonucleotide
uaggacgcuccaaccacua

SEQ ID NO: 142713 - RNA, 19 nt, Artificial Sequence
  Description of Artificial Sequence: Synthetic oligonucleotide
guaagacuguggcuaucca

SEQ ID NO: 142714 - RNA, 19 nt, Artificial Sequence
  Description of Artificial Sequence: Synthetic oligonucleotide
cauugaucuucacgcccac

SEQ ID NO: 142715 - RNA, 19 nt, Artificial Sequence
  Description of Artificial Sequence: Synthetic oligonucleotide
auucagcgagccgauguga

SEQ ID NO: 142716 - RNA, 19 nt, Artificial Sequence
  Description of Artificial Sequence: Synthetic oligonucleotide
agaauggaccguaccauua

SEQ ID NO: 142717 - RNA, 19 nt, Artificial Sequence
  Description of Artificial Sequence: Synthetic oligonucleotide
uaaauucgccuugcauagu

SEQ ID NO: 142718 - RNA, 19 nt, Artificial Sequence
  Description of Artificial Sequence: Synthetic oligonucleotide
cuucaccuagaugugggca

SEQ ID NO: 142719 - RNA, 19 nt, Artificial Sequence
  Description of Artificial Sequence: Synthetic oligonucleotide
uagcguggccuuuccccag

SEQ ID NO: 142720 - RNA, 19 nt, Artificial Sequence
  Description of Artificial Sequence: Synthetic oligonucleotide
cauagaacucggggcgacc

SEQ ID NO: 142721 - RNA, 19 nt, Artificial Sequence
  Description of Artificial Sequence: Synthetic oligonucleotide
cugaguccgucaaggugac

SEQ ID NO: 142722 - RNA, 19 nt, Artificial Sequence
  Description of Artificial Sequence: Synthetic oligonucleotide
cauugugcgauuacagaau

SEQ ID NO: 142723 - RNA, 19 nt, Artificial Sequence
  Description of Artificial Sequence: Synthetic oligonucleotide
gagaucuagcugaacagau

SEQ ID NO: 142724 - RNA, 19 nt, Artificial Sequence
  Description of Artificial Sequence: Synthetic oligonucleotide
gcacgaauugccuuauaaa

SEQ ID NO: 142725 - RNA, 19 nt, Artificial Sequence
  Description of Artificial Sequence: Synthetic oligonucleotide
cguucacacacguuccucc

SEQ ID NO: 142726 - RNA, 19 nt, Artificial Sequence
  Description of Artificial Sequence: Synthetic oligonucleotide
uucacgcccacugucucua

SEQ ID NO: 142727 - RNA, 19 nt, Artificial Sequence
  Description of Artificial Sequence: Synthetic oligonucleotide
uccggacgcgccuuccgcu

SEQ ID NO: 142728 - RNA, 19 nt, Artificial Sequence
  Description of Artificial Sequence: Synthetic oligonucleotide
guguuaaauucgccuugca

SEQ ID NO: 142729 - RNA, 19 nt, Artificial Sequence
  Description of Artificial Sequence: Synthetic oligonucleotide
caguggcgaugagaaaccg

SEQ ID NO: 142730 - RNA, 19 nt, Artificial Sequence
  Description of Artificial Sequence: Synthetic oligonucleotide
guuaacccuacaccgucgu

SEQ ID NO: 142731 - RNA, 19 nt, Artificial Sequence
  Description of Artificial Sequence: Synthetic oligonucleotide
accgucguucuaaucucag

SEQ ID NO: 142732 - RNA, 19 nt, Artificial Sequence
  Description of Artificial Sequence: Synthetic oligonucleotide
acacguucauugucuugaa

SEQ ID NO: 142733 - RNA, 19 nt, Artificial Sequence
  Description of Artificial Sequence: Synthetic oligonucleotide
gguagccccaauucagcga

SEQ ID NO: 142734 - RNA, 19 nt, Artificial Sequence
  Description of Artificial Sequence: Synthetic oligonucleotide
accccacguucacacacgu

SEQ ID NO: 142735 - RNA, 19 nt, Artificial Sequence
  Description of Artificial Sequence: Synthetic oligonucleotide
auacaguuguuggaacguu

SEQ ID NO: 142736 - RNA, 19 nt, Artificial Sequence
  Description of Artificial Sequence: Synthetic oligonucleotide
gggcuuaaccucagcagcc

SEQ ID NO: 142737 - RNA, 19 nt, Artificial Sequence
  Description of Artificial Sequence: Synthetic oligonucleotide
ccccaucuaguuccgagag

SEQ ID NO: 142738 - RNA, 19 nt, Artificial Sequence
  Description of Artificial Sequence: Synthetic oligonucleotide
cagguagcguggccuuucc

SEQ ID NO: 142739 - RNA, 19 nt, Artificial Sequence
  Description of Artificial Sequence: Synthetic oligonucleotide
aggggagaucuagcugaac

SEQ ID NO: 142740 - RNA, 19 nt, Artificial Sequence
  Description of Artificial Sequence: Synthetic oligonucleotide
acgacacguucauugucuu

SEQ ID NO: 142741 - RNA, 19 nt, Artificial Sequence
  Description of Artificial Sequence: Synthetic oligonucleotide
cuugucuaugaauguaguu

SEQ ID NO: 142742 - RNA, 19 nt, Artificial Sequence
  Description of Artificial Sequence: Synthetic oligonucleotide
cuacaccgucguucuaauc

SEQ ID NO: 142743 - RNA, 19 nt, Artificial Sequence
  Description of Artificial Sequence: Synthetic oligonucleotide
guccucaacuuuccaucca

SEQ ID NO: 142744 - RNA, 19 nt, Artificial Sequence
  Description of Artificial Sequence: Synthetic oligonucleotide
gaccuucagagccauucau

SEQ ID NO: 142745 - RNA, 19 nt, Artificial Sequence
  Description of Artificial Sequence: Synthetic oligonucleotide
uggaaccguccauuccaau

SEQ ID NO: 142746 - RNA, 19 nt, Artificial Sequence
  Description of Artificial Sequence: Synthetic oligonucleotide
caguuacccugagucggcc

SEQ ID NO: 142747 - RNA, 19 nt, Artificial Sequence
  Description of Artificial Sequence: Synthetic oligonucleotide
augucccggucaaauccuc

SEQ ID NO: 142748 - RNA, 19 nt, Artificial Sequence
  Description of Artificial Sequence: Synthetic oligonucleotide
gucuaugaauguaguucuc

SEQ ID NO: 142749 - RNA, 19 nt, Artificial Sequence
  Description of Artificial Sequence: Synthetic oligonucleotide
aguuccgagaggaguuggu

SEQ ID NO: 142750 - RNA, 19 nt, Artificial Sequence
  Description of Artificial Sequence: Synthetic oligonucleotide
gucauagaacucggggcga

SEQ ID NO: 142751 - RNA, 19 nt, Artificial Sequence
  Description of Artificial Sequence: Synthetic oligonucleotide
augucaccaauagcauaga

SEQ ID NO: 142752 - RNA, 19 nt, Artificial Sequence
  Description of Artificial Sequence: Synthetic oligonucleotide
aggguuuuaccggggcagu

SEQ ID NO: 142753 - RNA, 19 nt, Artificial Sequence
  Description of Artificial Sequence: Synthetic oligonucleotide
cagauccgacaguugaucu

SEQ ID NO: 142754 - RNA, 19 nt, Artificial Sequence
  Description of Artificial Sequence: Synthetic oligonucleotide
ccacuaagauaaucacaac

SEQ ID NO: 142755 - RNA, 19 nt, Artificial Sequence
  Description of Artificial Sequence: Synthetic oligonucleotide
aaccuaaaggggagaucua

SEQ ID NO: 142756 - RNA, 19 nt, Artificial Sequence
  Description of Artificial Sequence: Synthetic oligonucleotide
agcguggccuuuccccagu

SEQ ID NO: 142757 - RNA, 19 nt, Artificial Sequence
  Description of Artificial Sequence: Synthetic oligonucleotide
caugucccggucaaauccu

SEQ ID NO: 142758 - RNA, 19 nt, Artificial Sequence
  Description of Artificial Sequence: Synthetic oligonucleotide
caaagcaacauaggacgcu

SEQ ID NO: 142759 - RNA, 19 nt, Artificial Sequence
  Description of Artificial Sequence: Synthetic oligonucleotide
caccagggcuuaaccucag

SEQ ID NO: 142760 - RNA, 19 nt, Artificial Sequence
  Description of Artificial Sequence: Synthetic oligonucleotide
cccaucuaguuccgagagg

SEQ ID NO: 142761 - RNA, 19 nt, Artificial Sequence
  Description of Artificial Sequence: Synthetic oligonucleotide
ggccuguagucuuggcggc

SEQ ID NO: 142762 - RNA, 19 nt, Artificial Sequence
  Description of Artificial Sequence: Synthetic oligonucleotide
ucggggcgaccuucagagc

SEQ ID NO: 142763 - RNA, 19 nt, Artificial Sequence
  Description of Artificial Sequence: Synthetic oligonucleotide
ccaaucguucucguacaag

SEQ ID NO: 142764 - RNA, 19 nt, Artificial Sequence
  Description of Artificial Sequence: Synthetic oligonucleotide
caccgucguucuaaucuca

SEQ ID NO: 142765 - RNA, 19 nt, Artificial Sequence
  Description of Artificial Sequence: Synthetic oligonucleotide
accggggcaguaaggcaag

SEQ ID NO: 142766 - RNA, 19 nt, Artificial Sequence
  Description of Artificial Sequence: Synthetic oligonucleotide
uucguggacugagcaguua

SEQ ID NO: 142767 - RNA, 19 nt, Artificial Sequence
  Description of Artificial Sequence: Synthetic oligonucleotide
gaaacaccacucagugcua

SEQ ID NO: 142768 - RNA, 19 nt, Artificial Sequence
  Description of Artificial Sequence: Synthetic oligonucleotide
gguuuuaccggggcaguaa

SEQ ID NO: 142769 - RNA, 19 nt, Artificial Sequence
  Description of Artificial Sequence: Synthetic oligonucleotide
gaacucggggcgaccuuca

SEQ ID NO: 142770 - RNA, 19 nt, Artificial Sequence
  Description of Artificial Sequence: Synthetic oligonucleotide
ccaccugcguucaauaaua

SEQ ID NO: 142771 - RNA, 19 nt, Artificial Sequence
  Description of Artificial Sequence: Synthetic oligonucleotide
gccccaauucagcgagccg

SEQ ID NO: 142772 - RNA, 19 nt, Artificial Sequence
  Description of Artificial Sequence: Synthetic oligonucleotide
gccacccuccuccggacgc

SEQ ID NO: 142773 - RNA, 19 nt, Artificial Sequence
  Description of Artificial Sequence: Synthetic oligonucleotide
auggaaccguccauuccaa

SEQ ID NO: 142774 - RNA, 19 nt, Artificial Sequence
  Description of Artificial Sequence: Synthetic oligonucleotide
ugccuaccacuuugggcuu

SEQ ID NO: 142775 - RNA, 19 nt, Artificial Sequence
  Description of Artificial Sequence: Synthetic oligonucleotide
ccauuccacuaagauaauc

SEQ ID NO: 142776 - RNA, 19 nt, Artificial Sequence
  Description of Artificial Sequence: Synthetic oligonucleotide
ccccaauucagcgagccga

SEQ ID NO: 142777 - RNA, 19 nt, Artificial Sequence
  Description of Artificial Sequence: Synthetic oligonucleotide
ugaguccgucaaggugacc

SEQ ID NO: 142778 - RNA, 19 nt, Artificial Sequence
  Description of Artificial Sequence: Synthetic oligonucleotide
cuaagccaaucguucucgu

SEQ ID NO: 142779 - RNA, 19 nt, Artificial Sequence
  Description of Artificial Sequence: Synthetic oligonucleotide
cugauacacugccgaaugu

SEQ ID NO: 142780 - RNA, 19 nt, Artificial Sequence
  Description of Artificial Sequence: Synthetic oligonucleotide
caccugcguucaauaauaa

SEQ ID NO: 142781 - RNA, 19 nt, Artificial Sequence
  Description of Artificial Sequence: Synthetic oligonucleotide
uggcacgaauugccuuaua

SEQ ID NO: 142782 - RNA, 19 nt, Artificial Sequence
  Description of Artificial Sequence: Synthetic oligonucleotide
cagaacgcuucgucaccga

SEQ ID NO: 142783 - RNA, 19 nt, Artificial Sequence
  Description of Artificial Sequence: Synthetic oligonucleotide
cgaauugccuuauaaacuu

SEQ ID NO: 142784 - RNA, 19 nt, Artificial Sequence
  Description of Artificial Sequence: Synthetic oligonucleotide
cucccagaccccaucuagu

SEQ ID NO: 142785 - RNA, 19 nt, Artificial Sequence
  Description of Artificial Sequence: Synthetic oligonucleotide
caggcgccaagagcccaag

SEQ ID NO: 142786 - RNA, 19 nt, Artificial Sequence
  Description of Artificial Sequence: Synthetic oligonucleotide
caacuuuaauuggcacgaa

SEQ ID NO: 142787 - RNA, 19 nt, Artificial Sequence
  Description of Artificial Sequence: Synthetic oligonucleotide
gcaguggccuguagucuug

SEQ ID NO: 142788 - RNA, 19 nt, Artificial Sequence
  Description of Artificial Sequence: Synthetic oligonucleotide
ggacaggcgccaagagccc

SEQ ID NO: 142789 - RNA, 19 nt, Artificial Sequence
  Description of Artificial Sequence: Synthetic oligonucleotide
cuacucgguagccccaauu

SEQ ID NO: 142790 - RNA, 19 nt, Artificial Sequence
  Description of Artificial Sequence: Synthetic oligonucleotide
ccuuggacaggcgccaaga

SEQ ID NO: 142791 - RNA, 19 nt, Artificial Sequence
  Description of Artificial Sequence: Synthetic oligonucleotide
uccaaccacuaggguuuua

SEQ ID NO: 142792 - RNA, 19 nt, Artificial Sequence
  Description of Artificial Sequence: Synthetic oligonucleotide
cccagucaugcuuaacugu

SEQ ID NO: 142793 - RNA, 19 nt, Artificial Sequence
  Description of Artificial Sequence: Synthetic oligonucleotide
ccgucguucuaaucucaga

SEQ ID NO: 142794 - RNA, 19 nt, Artificial Sequence
  Description of Artificial Sequence: Synthetic oligonucleotide
ccagguagcguggccuuuc

SEQ ID NO: 142795 - RNA, 19 nt, Artificial Sequence
  Description of Artificial Sequence: Synthetic oligonucleotide
cuccagcguuuggacccag

SEQ ID NO: 142796 - RNA, 19 nt, Artificial Sequence
  Description of Artificial Sequence: Synthetic oligonucleotide
ccaauucagcgagccgaug

SEQ ID NO: 142797 - RNA, 19 nt, Artificial Sequence
  Description of Artificial Sequence: Synthetic oligonucleotide
ccggacgcgccuuccgcug

SEQ ID NO: 142798 - RNA, 19 nt, Artificial Sequence
  Description of Artificial Sequence: Synthetic oligonucleotide
cccuacaccgucguucuaa

SEQ ID NO: 142799 - RNA, 19 nt, Artificial Sequence
  Description of Artificial Sequence: Synthetic oligonucleotide
gugaccccagugugaugcu

SEQ ID NO: 142800 - RNA, 19 nt, Artificial Sequence
  Description of Artificial Sequence: Synthetic oligonucleotide
cuucgucaccgacaacguu

SEQ ID NO: 142801 - RNA, 19 nt, Artificial Sequence
  Description of Artificial Sequence: Synthetic oligonucleotide
ccgacaacguugugaauau

SEQ ID NO: 142802 - RNA, 19 nt, Artificial Sequence
  Description of Artificial Sequence: Synthetic oligonucleotide
ccuaacaaagccgccuggu

SEQ ID NO: 142803 - RNA, 19 nt, Artificial Sequence
  Description of Artificial Sequence: Synthetic oligonucleotide
cguucucguacaagcaucu

SEQ ID NO: 142804 - RNA, 19 nt, Artificial Sequence
  Description of Artificial Sequence: Synthetic oligonucleotide
acccuacaccgucguucua

SEQ ID NO: 142805 - RNA, 19 nt, Artificial Sequence
  Description of Artificial Sequence: Synthetic oligonucleotide
gcguggccuuuccccagug

SEQ ID NO: 142806 - RNA, 19 nt, Artificial Sequence
  Description of Artificial Sequence: Synthetic oligonucleotide
gcuucgucaccgacaacgu

SEQ ID NO: 142807 - RNA, 19 nt, Artificial Sequence
  Description of Artificial Sequence: Synthetic oligonucleotide
gcgagccgaugugauucug

SEQ ID NO: 142808 - RNA, 19 nt, Artificial Sequence
  Description of Artificial Sequence: Synthetic oligonucleotide
cgaccuucagagccauuca

SEQ ID NO: 142809 - RNA, 19 nt, Artificial Sequence
  Description of Artificial Sequence: Synthetic oligonucleotide
ggguuuuaccggggcagua

SEQ ID NO: 142810 - RNA, 19 nt, Artificial Sequence
  Description of Artificial Sequence: Synthetic oligonucleotide
cccaauucagcgagccgau

SEQ ID NO: 142811 - RNA, 19 nt, Artificial Sequence
  Description of Artificial Sequence: Synthetic oligonucleotide
ccuacaccgucguucuaau

SEQ ID NO: 142812 - RNA, 19 nt, Artificial Sequence
  Description of Artificial Sequence: Synthetic oligonucleotide
gcguuuggacccaguacau

SEQ ID NO: 142813 - RNA, 19 nt, Artificial Sequence
  Description of Artificial Sequence: Synthetic oligonucleotide
cgacaacguugugaauauc

SEQ ID NO: 142814 - RNA, 19 nt, Artificial Sequence
  Description of Artificial Sequence: Synthetic oligonucleotide
caccgacaacguugugaau

SEQ ID NO: 142815 - RNA, 19 nt, Artificial Sequence
  Description of Artificial Sequence: Synthetic oligonucleotide
cccugauacacugccgaau

SEQ ID NO: 142816 - RNA, 19 nt, Artificial Sequence
  Description of Artificial Sequence: Synthetic oligonucleotide
ccgcucugcugaauaaauu

SEQ ID NO: 142817 - RNA, 19 nt, Artificial Sequence
  Description of Artificial Sequence: Synthetic oligonucleotide
gcuacucgguagccccaau

SEQ ID NO: 142818 - RNA, 19 nt, Artificial Sequence
  Description of Artificial Sequence: Synthetic oligonucleotide
cgucaccgacaacguugug

SEQ ID NO: 142819 - RNA, 19 nt, Artificial Sequence
  Description of Artificial Sequence: Synthetic oligonucleotide
cccagguagcguggccuuu

SEQ ID NO: 142820 - RNA, 19 nt, Artificial Sequence
  Description of Artificial Sequence: Synthetic oligonucleotide
ugaacuucuacuaaggacg

SEQ ID NO: 142821 - RNA, 19 nt, Artificial Sequence
  Description of Artificial Sequence: Synthetic oligonucleotide
acauauagaaacuugauag

SEQ ID NO: 142822 - RNA, 19 nt, Artificial Sequence
  Description of Artificial Sequence: Synthetic oligonucleotide
auuacgaucaucuucacuc

SEQ ID NO: 142823 - RNA, 19 nt, Artificial Sequence
  Description of Artificial Sequence: Synthetic oligonucleotide
aauugguaugucuagacag

SEQ ID NO: 142824 - RNA, 19 nt, Artificial Sequence
  Description of Artificial Sequence: Synthetic oligonucleotide
uuaagguaaaacuauuacg

SEQ ID NO: 142825 - RNA, 19 nt, Artificial Sequence
  Description of Artificial Sequence: Synthetic oligonucleotide
aaauuauaggacuacaaau

SEQ ID NO: 142826 - RNA, 19 nt, Artificial Sequence
  Description of Artificial Sequence: Synthetic oligonucleotide
uguacuaaguucuuuacca

SEQ ID NO: 142827 - RNA, 19 nt, Artificial Sequence
  Description of Artificial Sequence: Synthetic oligonucleotide
uuggaaucaaucaaugucc

SEQ ID NO: 142828 - RNA, 19 nt, Artificial Sequence
  Description of Artificial Sequence: Synthetic oligonucleotide
aacugaacgauucuuagga

SEQ ID NO: 142829 - RNA, 19 nt, Artificial Sequence
  Description of Artificial Sequence: Synthetic oligonucleotide
aaugccauggacauuuacc

SEQ ID NO: 142830 - RNA, 19 nt, Artificial Sequence
  Description of Artificial Sequence: Synthetic oligonucleotide
aguauagaaacaaggaacc

SEQ ID NO: 142831 - RNA, 19 nt, Artificial Sequence
  Description of Artificial Sequence: Synthetic oligonucleotide
uuagcgaucgucucgaugc

SEQ ID NO: 142832 - RNA, 19 nt, Artificial Sequence
  Description of Artificial Sequence: Synthetic oligonucleotide
auagauuccauacgcaagg

SEQ ID NO: 142833 - RNA, 19 nt, Artificial Sequence
  Description of Artificial Sequence: Synthetic oligonucleotide
aaccgaaggcaauugagac

SEQ ID NO: 142834 - RNA, 19 nt, Artificial Sequence
  Description of Artificial Sequence: Synthetic oligonucleotide
uguuuauagauuccauacg

SEQ ID NO: 142835 - RNA, 19 nt, Artificial Sequence
  Description of Artificial Sequence: Synthetic oligonucleotide
uccggauacaucaauauca

SEQ ID NO: 142836 - RNA, 19 nt, Artificial Sequence
  Description of Artificial Sequence: Synthetic oligonucleotide
ucuaccuucgucaugucag

SEQ ID NO: 142837 - RNA, 19 nt, Artificial Sequence
  Description of Artificial Sequence: Synthetic oligonucleotide
auuagaaauuaccuggcuc

SEQ ID NO: 142838 - RNA, 19 nt, Artificial Sequence
  Description of Artificial Sequence: Synthetic oligonucleotide
ucuucuaauuuuaagguaa

SEQ ID NO: 142839 - RNA, 19 nt, Artificial Sequence
  Description of Artificial Sequence: Synthetic oligonucleotide
auagaaacuugauaggcag

SEQ ID NO: 142840 - RNA, 19 nt, Artificial Sequence
  Description of Artificial Sequence: Synthetic oligonucleotide
guuuauagauuccauacgc

SEQ ID NO: 142841 - RNA, 19 nt, Artificial Sequence
  Description of Artificial Sequence: Synthetic oligonucleotide
uuagauuuuaugucuagcu

SEQ ID NO: 142842 - RNA, 19 nt, Artificial Sequence
  Description of Artificial Sequence: Synthetic oligonucleotide
agauuuuaugucuagcuug

SEQ ID NO: 142843 - RNA, 19 nt, Artificial Sequence
  Description of Artificial Sequence: Synthetic oligonucleotide
ugucuuaauaggcugaccu

SEQ ID NO: 142844 - RNA, 19 nt, Artificial Sequence
  Description of Artificial Sequence: Synthetic oligonucleotide
uuuaugucuagcuuguacu

SEQ ID NO: 142845 - RNA, 19 nt, Artificial Sequence
  Description of Artificial Sequence: Synthetic oligonucleotide
auggacauuuacccgaacc

SEQ ID NO: 142846 - RNA, 19 nt, Artificial Sequence
  Description of Artificial Sequence: Synthetic oligonucleotide
ucaaagauauuggauaugc

SEQ ID NO: 142847 - RNA, 19 nt, Artificial Sequence
  Description of Artificial Sequence: Synthetic oligonucleotide
uaacaaaccaauuuggaua

SEQ ID NO: 142848 - RNA, 19 nt, Artificial Sequence
  Description of Artificial Sequence: Synthetic oligonucleotide
ugagacagucguaauaaag

SEQ ID NO: 142849 - RNA, 19 nt, Artificial Sequence
  Description of Artificial Sequence: Synthetic oligonucleotide
ucuauaaaaggugaggacu

SEQ ID NO: 142850 - RNA, 19 nt, Artificial Sequence
  Description of Artificial Sequence: Synthetic oligonucleotide
uuaaccgaaggcaauugag

SEQ ID NO: 142851 - RNA, 19 nt, Artificial Sequence
  Description of Artificial Sequence: Synthetic oligonucleotide
uugaaauagguauuggccu

SEQ ID NO: 142852 - RNA, 19 nt, Artificial Sequence
  Description of Artificial Sequence: Synthetic oligonucleotide
ugcuaagagaucaucacac

SEQ ID NO: 142853 - RNA, 19 nt, Artificial Sequence
  Description of Artificial Sequence: Synthetic oligonucleotide
acuuggauuguuccaaaac

SEQ ID NO: 142854 - RNA, 19 nt, Artificial Sequence
  Description of Artificial Sequence: Synthetic oligonucleotide
guuggaaucaaucaauguc

SEQ ID NO: 142855 - RNA, 19 nt, Artificial Sequence
  Description of Artificial Sequence: Synthetic oligonucleotide
uuucuauaaaaggugagga

SEQ ID NO: 142856 - RNA, 19 nt, Artificial Sequence
  Description of Artificial Sequence: Synthetic oligonucleotide
uuugccucuauucauaguu

SEQ ID NO: 142857 - RNA, 19 nt, Artificial Sequence
  Description of Artificial Sequence: Synthetic oligonucleotide
auagcagucacuugcucgg

SEQ ID NO: 142858 - RNA, 19 nt, Artificial Sequence
  Description of Artificial Sequence: Synthetic oligonucleotide
ucuugcuaagagaucauca

SEQ ID NO: 142859 - RNA, 19 nt, Artificial Sequence
  Description of Artificial Sequence: Synthetic oligonucleotide
uggauaugccaccacauca

SEQ ID NO: 142860 - RNA, 19 nt, Artificial Sequence
  Description of Artificial Sequence: Synthetic oligonucleotide
gagacagucguaauaaagc

SEQ ID NO: 142861 - RNA, 19 nt, Artificial Sequence
  Description of Artificial Sequence: Synthetic oligonucleotide
acuauuacgaucaucuuca

SEQ ID NO: 142862 - RNA, 19 nt, Artificial Sequence
  Description of Artificial Sequence: Synthetic oligonucleotide
uuaagaacacuuucugcug

SEQ ID NO: 142863 - RNA, 19 nt, Artificial Sequence
  Description of Artificial Sequence: Synthetic oligonucleotide
ucuacuaaggacgcacugg

SEQ ID NO: 142864 - RNA, 19 nt, Artificial Sequence
  Description of Artificial Sequence: Synthetic oligonucleotide
uucacugcagggauucgcg

SEQ ID NO: 142865 - RNA, 19 nt, Artificial Sequence
  Description of Artificial Sequence: Synthetic oligonucleotide
uuuaugccuguuaauccag

SEQ ID NO: 142866 - RNA, 19 nt, Artificial Sequence
  Description of Artificial Sequence: Synthetic oligonucleotide
auauaaccaauuuucagua

SEQ ID NO: 142867 - RNA, 19 nt, Artificial Sequence
  Description of Artificial Sequence: Synthetic oligonucleotide
agacuugugaacuucuacu

SEQ ID NO: 142868 - RNA, 19 nt, Artificial Sequence
  Description of Artificial Sequence: Synthetic oligonucleotide
aauugagaccagcaaucug

SEQ ID NO: 142869 - RNA, 19 nt, Artificial Sequence
  Description of Artificial Sequence: Synthetic oligonucleotide
accgaaggcaauugagacc

SEQ ID NO: 142870 - RNA, 19 nt, Artificial Sequence
  Description of Artificial Sequence: Synthetic oligonucleotide
uuuacccgaaccuugacuu

SEQ ID NO: 142871 - RNA, 19 nt, Artificial Sequence
  Description of Artificial Sequence: Synthetic oligonucleotide
uaaccuuuaugccuguuaa

SEQ ID NO: 142872 - RNA, 19 nt, Artificial Sequence
  Description of Artificial Sequence: Synthetic oligonucleotide
acuaaggacgcacuggaca

SEQ ID NO: 142873 - RNA, 19 nt, Artificial Sequence
  Description of Artificial Sequence: Synthetic oligonucleotide
gucgcuauacucguuagcg

SEQ ID NO: 142874 - RNA, 19 nt, Artificial Sequence
  Description of Artificial Sequence: Synthetic oligonucleotide
uaggacuacaaauacucgu

SEQ ID NO: 142875 - RNA, 19 nt, Artificial Sequence
  Description of Artificial Sequence: Synthetic oligonucleotide
aacacccgaacccucccac

SEQ ID NO: 142876 - RNA, 19 nt, Artificial Sequence
  Description of Artificial Sequence: Synthetic oligonucleotide
uaggccucaagagugaaag

SEQ ID NO: 142877 - RNA, 19 nt, Artificial Sequence
  Description of Artificial Sequence: Synthetic oligonucleotide
uaaccgaaggcaauugaga

SEQ ID NO: 142878 - RNA, 19 nt, Artificial Sequence
  Description of Artificial Sequence: Synthetic oligonucleotide
acucucgaugggcaggucc

SEQ ID NO: 142879 - RNA, 19 nt, Artificial Sequence
  Description of Artificial Sequence: Synthetic oligonucleotide
uuugaaauuauaggacuac

SEQ ID NO: 142880 - RNA, 19 nt, Artificial Sequence
  Description of Artificial Sequence: Synthetic oligonucleotide
aacaucguaugcaagauua

SEQ ID NO: 142881 - RNA, 19 nt, Artificial Sequence
  Description of Artificial Sequence: Synthetic oligonucleotide
uucuauaaaaggugaggac

SEQ ID NO: 142882 - RNA, 19 nt, Artificial Sequence
  Description of Artificial Sequence: Synthetic oligonucleotide
aaggaaccgaaacaacaca

SEQ ID NO: 142883 - RNA, 19 nt, Artificial Sequence
  Description of Artificial Sequence: Synthetic oligonucleotide
aaugcacgcccaugaaauc

SEQ ID NO: 142884 - RNA, 19 nt, Artificial Sequence
  Description of Artificial Sequence: Synthetic oligonucleotide
uccucuauuaaaugcacau

SEQ ID NO: 142885 - RNA, 19 nt, Artificial Sequence
  Description of Artificial Sequence: Synthetic oligonucleotide
uguuuguucuguagguuca

SEQ ID NO: 142886 - RNA, 19 nt, Artificial Sequence
  Description of Artificial Sequence: Synthetic oligonucleotide
gauuccauacgcaagggca

SEQ ID NO: 142887 - RNA, 19 nt, Artificial Sequence
  Description of Artificial Sequence: Synthetic oligonucleotide
auugagaccagcaaucugu

SEQ ID NO: 142888 - RNA, 19 nt, Artificial Sequence
  Description of Artificial Sequence: Synthetic oligonucleotide
aacagucaguugcauaaga

SEQ ID NO: 142889 - RNA, 19 nt, Artificial Sequence
  Description of Artificial Sequence: Synthetic oligonucleotide
acccacacaauguuuauga

SEQ ID NO: 142890 - RNA, 19 nt, Artificial Sequence
  Description of Artificial Sequence: Synthetic oligonucleotide
ggaaccgugucuuaauagg

SEQ ID NO: 142891 - RNA, 19 nt, Artificial Sequence
  Description of Artificial Sequence: Synthetic oligonucleotide
ugaaauagguauuggccuc

SEQ ID NO: 142892 - RNA, 19 nt, Artificial Sequence
  Description of Artificial Sequence: Synthetic oligonucleotide
cuccuuucuauaaaaggug

SEQ ID NO: 142893 - RNA, 19 nt, Artificial Sequence
  Description of Artificial Sequence: Synthetic oligonucleotide
gaaccgaaacaacacaguc

SEQ ID NO: 142894 - RNA, 19 nt, Artificial Sequence
  Description of Artificial Sequence: Synthetic oligonucleotide
ucuuaauaggcugaccuaa

SEQ ID NO: 142895 - RNA, 19 nt, Artificial Sequence
  Description of Artificial Sequence: Synthetic oligonucleotide
cuauacucguuagcgaucg

SEQ ID NO: 142896 - RNA, 19 nt, Artificial Sequence
  Description of Artificial Sequence: Synthetic oligonucleotide
cucguacacauauucuucc

SEQ ID NO: 142897 - RNA, 19 nt, Artificial Sequence
  Description of Artificial Sequence: Synthetic oligonucleotide
auuaccuggcucuuagcug

SEQ ID NO: 142898 - RNA, 19 nt, Artificial Sequence
  Description of Artificial Sequence: Synthetic oligonucleotide
aacuugauaggcagaaugu

SEQ ID NO: 142899 - RNA, 19 nt, Artificial Sequence
  Description of Artificial Sequence: Synthetic oligonucleotide
cuaaggacgcacuggacac

SEQ ID NO: 142900 - RNA, 19 nt, Artificial Sequence
  Description of Artificial Sequence: Synthetic oligonucleotide
uccaucgcuucauuggugc

SEQ ID NO: 142901 - RNA, 19 nt, Artificial Sequence
  Description of Artificial Sequence: Synthetic oligonucleotide
aggagagcuauaguaggcc

SEQ ID NO: 142902 - RNA, 19 nt, Artificial Sequence
  Description of Artificial Sequence: Synthetic oligonucleotide
uggaaccgugucuuaauag

SEQ ID NO: 142903 - RNA, 19 nt, Artificial Sequence
  Description of Artificial Sequence: Synthetic oligonucleotide
uacucguuagcgaucgucu

SEQ ID NO: 142904 - RNA, 19 nt, Artificial Sequence
  Description of Artificial Sequence: Synthetic oligonucleotide
uggaucagagaaugcacgc

SEQ ID NO: 142905 - RNA, 19 nt, Artificial Sequence
  Description of Artificial Sequence: Synthetic oligonucleotide
cauucauuaaccgaaggca

SEQ ID NO: 142906 - RNA, 19 nt, Artificial Sequence
  Description of Artificial Sequence: Synthetic oligonucleotide
caacugaacgauucuuagg

SEQ ID NO: 142907 - RNA, 19 nt, Artificial Sequence
  Description of Artificial Sequence: Synthetic oligonucleotide
acugagcuauagcaggauc

SEQ ID NO: 142908 - RNA, 19 nt, Artificial Sequence
  Description of Artificial Sequence: Synthetic oligonucleotide
ugccucuauucauaguucc

SEQ ID NO: 142909 - RNA, 19 nt, Artificial Sequence
  Description of Artificial Sequence: Synthetic oligonucleotide
uauuacgaucaucuucacu

SEQ ID NO: 142910 - RNA, 19 nt, Artificial Sequence
  Description of Artificial Sequence: Synthetic oligonucleotide
uucuacuaaggacgcacug

SEQ ID NO: 142911 - RNA, 19 nt, Artificial Sequence
  Description of Artificial Sequence: Synthetic oligonucleotide
ggcagaaugucccaugucc

SEQ ID NO: 142912 - RNA, 19 nt, Artificial Sequence
  Description of Artificial Sequence: Synthetic oligonucleotide
uugaaauuauaggacuaca

SEQ ID NO: 142913 - RNA, 19 nt, Artificial Sequence
  Description of Artificial Sequence: Synthetic oligonucleotide
aguugcauaagaguuggcu

SEQ ID NO: 142914 - RNA, 19 nt, Artificial Sequence
  Description of Artificial Sequence: Synthetic oligonucleotide
aacuaucuccacugcauaa

SEQ ID NO: 142915 - RNA, 19 nt, Artificial Sequence
  Description of Artificial Sequence: Synthetic oligonucleotide
auuuacccgaaccuugacu

SEQ ID NO: 142916 - RNA, 19 nt, Artificial Sequence
  Description of Artificial Sequence: Synthetic oligonucleotide
aaggacgcacuggacacac

SEQ ID NO: 142917 - RNA, 19 nt, Artificial Sequence
  Description of Artificial Sequence: Synthetic oligonucleotide
aaggcuccuuucuauaaaa

SEQ ID NO: 142918 - RNA, 19 nt, Artificial Sequence
  Description of Artificial Sequence: Synthetic oligonucleotide
ucggugguaaaauuccgcu

SEQ ID NO: 142919 - RNA, 19 nt, Artificial Sequence
  Description of Artificial Sequence: Synthetic oligonucleotide
guuguacuaaguucuuuac

SEQ ID NO: 142920 - RNA, 19 nt, Artificial Sequence
  Description of Artificial Sequence: Synthetic oligonucleotide
auuaaccgaaggcaauuga

SEQ ID NO: 142921 - RNA, 19 nt, Artificial Sequence
  Description of Artificial Sequence: Synthetic oligonucleotide
aucagugauagaaaauucu

SEQ ID NO: 142922 - RNA, 19 nt, Artificial Sequence
  Description of Artificial Sequence: Synthetic oligonucleotide
acagccucgagugacagcu

SEQ ID NO: 142923 - RNA, 19 nt, Artificial Sequence
  Description of Artificial Sequence: Synthetic oligonucleotide
auagaaacaaggaaccgaa

SEQ ID NO: 142924 - RNA, 19 nt, Artificial Sequence
  Description of Artificial Sequence: Synthetic oligonucleotide
ucguaugcaagauuagauu

SEQ ID NO: 142925 - RNA, 19 nt, Artificial Sequence
  Description of Artificial Sequence: Synthetic oligonucleotide
cuuaguguaagaaugugau

SEQ ID NO: 142926 - RNA, 19 nt, Artificial Sequence
  Description of Artificial Sequence: Synthetic oligonucleotide
gaaccgugucuuaauaggc

SEQ ID NO: 142927 - RNA, 19 nt, Artificial Sequence
  Description of Artificial Sequence: Synthetic oligonucleotide
cccaugaaaucuuuuaaag

SEQ ID NO: 142928 - RNA, 19 nt, Artificial Sequence
  Description of Artificial Sequence: Synthetic oligonucleotide
auacucguuagcgaucguc

SEQ ID NO: 142929 - RNA, 19 nt, Artificial Sequence
  Description of Artificial Sequence: Synthetic oligonucleotide
ugagcuauagcaggaucug

SEQ ID NO: 142930 - RNA, 19 nt, Artificial Sequence
  Description of Artificial Sequence: Synthetic oligonucleotide
uuaugucuagcuuguacuu

SEQ ID NO: 142931 - RNA, 19 nt, Artificial Sequence
  Description of Artificial Sequence: Synthetic oligonucleotide
aggaaccgaaacaacacag

SEQ ID NO: 142932 - RNA, 19 nt, Artificial Sequence
  Description of Artificial Sequence: Synthetic oligonucleotide
cucggugguaaaauuccgc

SEQ ID NO: 142933 - RNA, 19 nt, Artificial Sequence
  Description of Artificial Sequence: Synthetic oligonucleotide
aggugacaagauugcacac

SEQ ID NO: 142934 - RNA, 19 nt, Artificial Sequence
  Description of Artificial Sequence: Synthetic oligonucleotide
accgugucuuaauaggcug

SEQ ID NO: 142935 - RNA, 19 nt, Artificial Sequence
  Description of Artificial Sequence: Synthetic oligonucleotide
uuccggauacaucaauauc

SEQ ID NO: 142936 - RNA, 19 nt, Artificial Sequence
  Description of Artificial Sequence: Synthetic oligonucleotide
aucuucuaauuuuaaggua

SEQ ID NO: 142937 - RNA, 19 nt, Artificial Sequence
  Description of Artificial Sequence: Synthetic oligonucleotide
gauagaaaauucucucacu

SEQ ID NO: 142938 - RNA, 19 nt, Artificial Sequence
  Description of Artificial Sequence: Synthetic oligonucleotide
uucaaauaacuuuggucuu

SEQ ID NO: 142939 - RNA, 19 nt, Artificial Sequence
  Description of Artificial Sequence: Synthetic oligonucleotide
aacuuggauuguuccaaaa

SEQ ID NO: 142940 - RNA, 19 nt, Artificial Sequence
  Description of Artificial Sequence: Synthetic oligonucleotide
aauuccgcucuucuuccau

SEQ ID NO: 142941 - RNA, 19 nt, Artificial Sequence
  Description of Artificial Sequence: Synthetic oligonucleotide
gaacuucuacuaaggacgc

SEQ ID NO: 142942 - RNA, 19 nt, Artificial Sequence
  Description of Artificial Sequence: Synthetic oligonucleotide
uuguuuuccgcuggggucu

SEQ ID NO: 142943 - RNA, 19 nt, Artificial Sequence
  Description of Artificial Sequence: Synthetic oligonucleotide
cuugagacagucguaauaa

SEQ ID NO: 142944 - RNA, 19 nt, Artificial Sequence
  Description of Artificial Sequence: Synthetic oligonucleotide
agcauucgcacucaucaau

SEQ ID NO: 142945 - RNA, 19 nt, Artificial Sequence
  Description of Artificial Sequence: Synthetic oligonucleotide
agaaugcacgcccaugaaa

SEQ ID NO: 142946 - RNA, 19 nt, Artificial Sequence
  Description of Artificial Sequence: Synthetic oligonucleotide
uuaugccuguuaauccagu

SEQ ID NO: 142947 - RNA, 19 nt, Artificial Sequence
  Description of Artificial Sequence: Synthetic oligonucleotide
uacgaucaucuucacucac

SEQ ID NO: 142948 - RNA, 19 nt, Artificial Sequence
  Description of Artificial Sequence: Synthetic oligonucleotide
aaccgugucuuaauaggcu

SEQ ID NO: 142949 - RNA, 19 nt, Artificial Sequence
  Description of Artificial Sequence: Synthetic oligonucleotide
aucguaugcaagauuagau

SEQ ID NO: 142950 - RNA, 19 nt, Artificial Sequence
  Description of Artificial Sequence: Synthetic oligonucleotide
aaauuccgcucuucuucca

SEQ ID NO: 142951 - RNA, 19 nt, Artificial Sequence
  Description of Artificial Sequence: Synthetic oligonucleotide
ucgcguggcaccaccaacu

SEQ ID NO: 142952 - RNA, 19 nt, Artificial Sequence
  Description of Artificial Sequence: Synthetic oligonucleotide
cuacuaaggacgcacugga

SEQ ID NO: 142953 - RNA, 19 nt, Artificial Sequence
  Description of Artificial Sequence: Synthetic oligonucleotide
guuagcgaucgucucgaug

SEQ ID NO: 142954 - RNA, 19 nt, Artificial Sequence
  Description of Artificial Sequence: Synthetic oligonucleotide
caguguuguaucaaaagcu

SEQ ID NO: 142955 - RNA, 19 nt, Artificial Sequence
  Description of Artificial Sequence: Synthetic oligonucleotide
agagcuauaguaggccuca

SEQ ID NO: 142956 - RNA, 19 nt, Artificial Sequence
  Description of Artificial Sequence: Synthetic oligonucleotide
uugccucuauucauaguuc

SEQ ID NO: 142957 - RNA, 19 nt, Artificial Sequence
  Description of Artificial Sequence: Synthetic oligonucleotide
ucacugaccggcguucugc

SEQ ID NO: 142958 - RNA, 19 nt, Artificial Sequence
  Description of Artificial Sequence: Synthetic oligonucleotide
gauuuuaugucuagcuugu

SEQ ID NO: 142959 - RNA, 19 nt, Artificial Sequence
  Description of Artificial Sequence: Synthetic oligonucleotide
cuaccuucgucaugucagc

SEQ ID NO: 142960 - RNA, 19 nt, Artificial Sequence
  Description of Artificial Sequence: Synthetic oligonucleotide
aguguaagaaugugaucuu

SEQ ID NO: 142961 - RNA, 19 nt, Artificial Sequence
  Description of Artificial Sequence: Synthetic oligonucleotide
uucccuaguucuucaaaua

SEQ ID NO: 142962 - RNA, 19 nt, Artificial Sequence
  Description of Artificial Sequence: Synthetic oligonucleotide
auugguaugucuagacaga

SEQ ID NO: 142963 - RNA, 19 nt, Artificial Sequence
  Description of Artificial Sequence: Synthetic oligonucleotide
guguuggaaucaaucaaug

SEQ ID NO: 142964 - RNA, 19 nt, Artificial Sequence
  Description of Artificial Sequence: Synthetic oligonucleotide
gaaauagguauuggccuca

SEQ ID NO: 142965 - RNA, 19 nt, Artificial Sequence
  Description of Artificial Sequence: Synthetic oligonucleotide
cagggauucgcguggcacc

SEQ ID NO: 142966 - RNA, 19 nt, Artificial Sequence
  Description of Artificial Sequence: Synthetic oligonucleotide
ucgcuauacucguuagcga

SEQ ID NO: 142967 - RNA, 19 nt, Artificial Sequence
  Description of Artificial Sequence: Synthetic oligonucleotide
caauugguaugucuagaca

SEQ ID NO: 142968 - RNA, 19 nt, Artificial Sequence
  Description of Artificial Sequence: Synthetic oligonucleotide
ucguuagcgaucgucucga

SEQ ID NO: 142969 - RNA, 19 nt, Artificial Sequence
  Description of Artificial Sequence: Synthetic oligonucleotide
guguaagaaugugaucuug

SEQ ID NO: 142970 - RNA, 19 nt, Artificial Sequence
  Description of Artificial Sequence: Synthetic oligonucleotide
ugaccggcguucugcauca

SEQ ID NO: 142971 - RNA, 19 nt, Artificial Sequence
  Description of Artificial Sequence: Synthetic oligonucleotide
uacuaaggacgcacuggac

SEQ ID NO: 142972 - RNA, 19 nt, Artificial Sequence
  Description of Artificial Sequence: Synthetic oligonucleotide
gaucgucucgaugccgccg

SEQ ID NO: 142973 - RNA, 19 nt, Artificial Sequence
  Description of Artificial Sequence: Synthetic oligonucleotide
caucauuccguuccuucuc

SEQ ID NO: 142974 - RNA, 19 nt, Artificial Sequence
  Description of Artificial Sequence: Synthetic oligonucleotide
ggauagggcaaauccugag

SEQ ID NO: 142975 - RNA, 19 nt, Artificial Sequence
  Description of Artificial Sequence: Synthetic oligonucleotide
ggugguaaaauuccgcucu

SEQ ID NO: 142976 - RNA, 19 nt, Artificial Sequence
  Description of Artificial Sequence: Synthetic oligonucleotide
acaacaucguaugcaagau

SEQ ID NO: 142977 - RNA, 19 nt, Artificial Sequence
  Description of Artificial Sequence: Synthetic oligonucleotide
gaaugcacgcccaugaaau

SEQ ID NO: 142978 - RNA, 19 nt, Artificial Sequence
  Description of Artificial Sequence: Synthetic oligonucleotide
ccaauugguaugucuagac

SEQ ID NO: 142979 - RNA, 19 nt, Artificial Sequence
  Description of Artificial Sequence: Synthetic oligonucleotide
uugagacagucguaauaaa

SEQ ID NO: 142980 - RNA, 19 nt, Artificial Sequence
  Description of Artificial Sequence: Synthetic oligonucleotide
auacgcaagggcaacugca

SEQ ID NO: 142981 - RNA, 19 nt, Artificial Sequence
  Description of Artificial Sequence: Synthetic oligonucleotide
uaguuccggauacaucaau

SEQ ID NO: 142982 - RNA, 19 nt, Artificial Sequence
  Description of Artificial Sequence: Synthetic oligonucleotide
ccuuucuauaaaaggugag

SEQ ID NO: 142983 - RNA, 19 nt, Artificial Sequence
  Description of Artificial Sequence: Synthetic oligonucleotide
guacuaaguucuuuaccaa

SEQ ID NO: 142984 - RNA, 19 nt, Artificial Sequence
  Description of Artificial Sequence: Synthetic oligonucleotide
ccucuauucauaguuccgg

SEQ ID NO: 142985 - RNA, 19 nt, Artificial Sequence
  Description of Artificial Sequence: Synthetic oligonucleotide
acacccgaacccucccacg

SEQ ID NO: 142986 - RNA, 19 nt, Artificial Sequence
  Description of Artificial Sequence: Synthetic oligonucleotide
ugcauaagaguuggcuuaa

SEQ ID NO: 142987 - RNA, 19 nt, Artificial Sequence
  Description of Artificial Sequence: Synthetic oligonucleotide
uacucgucaguuccuuaau

SEQ ID NO: 142988 - RNA, 19 nt, Artificial Sequence
  Description of Artificial Sequence: Synthetic oligonucleotide
uauaaaaggugaggacuuu

SEQ ID NO: 142989 - RNA, 19 nt, Artificial Sequence
  Description of Artificial Sequence: Synthetic oligonucleotide
cugagcuauagcaggaucu

SEQ ID NO: 142990 - RNA, 19 nt, Artificial Sequence
  Description of Artificial Sequence: Synthetic oligonucleotide
cugaccggcguucugcauc

SEQ ID NO: 142991 - RNA, 19 nt, Artificial Sequence
  Description of Artificial Sequence: Synthetic oligonucleotide
aucgcuucauuggugcucu

SEQ ID NO: 142992 - RNA, 19 nt, Artificial Sequence
  Description of Artificial Sequence: Synthetic oligonucleotide
acauuuacccgaaccuuga

SEQ ID NO: 142993 - RNA, 19 nt, Artificial Sequence
  Description of Artificial Sequence: Synthetic oligonucleotide
uccaucacugaccggcguu

SEQ ID NO: 142994 - RNA, 19 nt, Artificial Sequence
  Description of Artificial Sequence: Synthetic oligonucleotide
caucguaugcaagauuaga

SEQ ID NO: 142995 - RNA, 19 nt, Artificial Sequence
  Description of Artificial Sequence: Synthetic oligonucleotide
acaucguaugcaagauuag

SEQ ID NO: 142996 - RNA, 19 nt, Artificial Sequence
  Description of Artificial Sequence: Synthetic oligonucleotide
ugauccagcuugagagguc

SEQ ID NO: 142997 - RNA, 19 nt, Artificial Sequence
  Description of Artificial Sequence: Synthetic oligonucleotide
gagagcuauaguaggccuc

SEQ ID NO: 142998 - RNA, 19 nt, Artificial Sequence
  Description of Artificial Sequence: Synthetic oligonucleotide
cauuuacccgaaccuugac

SEQ ID NO: 142999 - RNA, 19 nt, Artificial Sequence
  Description of Artificial Sequence: Synthetic oligonucleotide
ucgccaaaacuuucaguuu

SEQ ID NO: 143000 - RNA, 19 nt, Artificial Sequence
  Description of Artificial Sequence: Synthetic oligonucleotide
uuaauccagugggcaacug

SEQ ID NO: 143001 - RNA, 19 nt, Artificial Sequence
  Description of Artificial Sequence: Synthetic oligonucleotide
uacccgaaccuugacuuuc

SEQ ID NO: 143002 - RNA, 19 nt, Artificial Sequence
  Description of Artificial Sequence: Synthetic oligonucleotide
aacuucuacuaaggacgca

SEQ ID NO: 143003 - RNA, 19 nt, Artificial Sequence
  Description of Artificial Sequence: Synthetic oligonucleotide
acucgucaguuccuuaauu

SEQ ID NO: 143004 - RNA, 19 nt, Artificial Sequence
  Description of Artificial Sequence: Synthetic oligonucleotide
ucuugacaacuggauccgc

SEQ ID NO: 143005 - RNA, 19 nt, Artificial Sequence
  Description of Artificial Sequence: Synthetic oligonucleotide
acuugcucggugguaaaau

SEQ ID NO: 143006 - RNA, 19 nt, Artificial Sequence
  Description of Artificial Sequence: Synthetic oligonucleotide
auuccauacgcaagggcaa

SEQ ID NO: 143007 - RNA, 19 nt, Artificial Sequence
  Description of Artificial Sequence: Synthetic oligonucleotide
ugguaaaauuccgcucuuc

SEQ ID NO: 143008 - RNA, 19 nt, Artificial Sequence
  Description of Artificial Sequence: Synthetic oligonucleotide
uuccauacgcaagggcaac

SEQ ID NO: 143009 - RNA, 19 nt, Artificial Sequence
  Description of Artificial Sequence: Synthetic oligonucleotide
gcuugaggugguugguccg

SEQ ID NO: 143010 - RNA, 19 nt, Artificial Sequence
  Description of Artificial Sequence: Synthetic oligonucleotide
guuccggauacaucaauau

SEQ ID NO: 143011 - RNA, 19 nt, Artificial Sequence
  Description of Artificial Sequence: Synthetic oligonucleotide
acacagucuaccacaggcu

SEQ ID NO: 143012 - RNA, 19 nt, Artificial Sequence
  Description of Artificial Sequence: Synthetic oligonucleotide
cucuugcuaagagaucauc

SEQ ID NO: 143013 - RNA, 19 nt, Artificial Sequence
  Description of Artificial Sequence: Synthetic oligonucleotide
caccuuguuuuccgcuggg

SEQ ID NO: 143014 - RNA, 19 nt, Artificial Sequence
  Description of Artificial Sequence: Synthetic oligonucleotide
uauacucguuagcgaucgu

SEQ ID NO: 143015 - RNA, 19 nt, Artificial Sequence
  Description of Artificial Sequence: Synthetic oligonucleotide
caccaacuaucuccacugc

SEQ ID NO: 143016 - RNA, 19 nt, Artificial Sequence
  Description of Artificial Sequence: Synthetic oligonucleotide
cccacguacccacacaaug

SEQ ID NO: 143017 - RNA, 19 nt, Artificial Sequence
  Description of Artificial Sequence: Synthetic oligonucleotide
gcuaagagaucaucacaca

SEQ ID NO: 143018 - RNA, 19 nt, Artificial Sequence
  Description of Artificial Sequence: Synthetic oligonucleotide
cuucccuaguucuucaaau

SEQ ID NO: 143019 - RNA, 19 nt, Artificial Sequence
  Description of Artificial Sequence: Synthetic oligonucleotide
cauuagaaauuaccuggcu

SEQ ID NO: 143020 - RNA, 19 nt, Artificial Sequence
  Description of Artificial Sequence: Synthetic oligonucleotide
uuacccgaaccuugacuuu

SEQ ID NO: 143021 - RNA, 19 nt, Artificial Sequence
  Description of Artificial Sequence: Synthetic oligonucleotide
ggucgcuauacucguuagc

SEQ ID NO: 143022 - RNA, 19 nt, Artificial Sequence
  Description of Artificial Sequence: Synthetic oligonucleotide
gugucuuaauaggcugacc

SEQ ID NO: 143023 - RNA, 19 nt, Artificial Sequence
  Description of Artificial Sequence: Synthetic oligonucleotide
gccucuauucauaguuccg

SEQ ID NO: 143024 - RNA, 19 nt, Artificial Sequence
  Description of Artificial Sequence: Synthetic oligonucleotide
auucgcguggcaccaccaa

SEQ ID NO: 143025 - RNA, 19 nt, Artificial Sequence
  Description of Artificial Sequence: Synthetic oligonucleotide
acgauucuuaggaccaaaa

SEQ ID NO: 143026 - RNA, 19 nt, Artificial Sequence
  Description of Artificial Sequence: Synthetic oligonucleotide
cuacaaauacucgucaguu

SEQ ID NO: 143027 - RNA, 19 nt, Artificial Sequence
  Description of Artificial Sequence: Synthetic oligonucleotide
ggauucgcguggcaccacc

SEQ ID NO: 143028 - RNA, 19 nt, Artificial Sequence
  Description of Artificial Sequence: Synthetic oligonucleotide
ucacuugcucggugguaaa

SEQ ID NO: 143029 - RNA, 19 nt, Artificial Sequence
  Description of Artificial Sequence: Synthetic oligonucleotide
cauggacauuuacccgaac

SEQ ID NO: 143030 - RNA, 19 nt, Artificial Sequence
  Description of Artificial Sequence: Synthetic oligonucleotide
caucugauuucuagcuuua

SEQ ID NO: 143031 - RNA, 19 nt, Artificial Sequence
  Description of Artificial Sequence: Synthetic oligonucleotide
ucccacguacccacacaau

SEQ ID NO: 143032 - RNA, 19 nt, Artificial Sequence
  Description of Artificial Sequence: Synthetic oligonucleotide
cucccacguacccacacaa

SEQ ID NO: 143033 - RNA, 19 nt, Artificial Sequence
  Description of Artificial Sequence: Synthetic oligonucleotide
auaguuccggauacaucaa

SEQ ID NO: 143034 - RNA, 19 nt, Artificial Sequence
  Description of Artificial Sequence: Synthetic oligonucleotide
cccaacacccgaacccucc

SEQ ID NO: 143035 - RNA, 19 nt, Artificial Sequence
  Description of Artificial Sequence: Synthetic oligonucleotide
gauucgcguggcaccacca

SEQ ID NO: 143036 - RNA, 19 nt, Artificial Sequence
  Description of Artificial Sequence: Synthetic oligonucleotide
aggugguugguccgucuuu

SEQ ID NO: 143037 - RNA, 19 nt, Artificial Sequence
  Description of Artificial Sequence: Synthetic oligonucleotide
cuucuacuaaggacgcacu

SEQ ID NO: 143038 - RNA, 19 nt, Artificial Sequence
  Description of Artificial Sequence: Synthetic oligonucleotide
gauaggcagaaugucccau

SEQ ID NO: 143039 - RNA, 19 nt, Artificial Sequence
  Description of Artificial Sequence: Synthetic oligonucleotide
cuggaaccgugucuuaaua

SEQ ID NO: 143040 - RNA, 19 nt, Artificial Sequence
  Description of Artificial Sequence: Synthetic oligonucleotide
ggagagcuauaguaggccu

SEQ ID NO: 143041 - RNA, 19 nt, Artificial Sequence
  Description of Artificial Sequence: Synthetic oligonucleotide
auuuuaugucuagcuugua

SEQ ID NO: 143042 - RNA, 19 nt, Artificial Sequence
  Description of Artificial Sequence: Synthetic oligonucleotide
cacugcgaagugguggcuc

SEQ ID NO: 143043 - RNA, 19 nt, Artificial Sequence
  Description of Artificial Sequence: Synthetic oligonucleotide
ucgucucgaugccgccggc

SEQ ID NO: 143044 - RNA, 19 nt, Artificial Sequence
  Description of Artificial Sequence: Synthetic oligonucleotide
uugaggugguugguccguc

SEQ ID NO: 143045 - RNA, 19 nt, Artificial Sequence
  Description of Artificial Sequence: Synthetic oligonucleotide
gaacgauucuuaggaccaa

SEQ ID NO: 143046 - RNA, 19 nt, Artificial Sequence
  Description of Artificial Sequence: Synthetic oligonucleotide
gcuauacucguuagcgauc

SEQ ID NO: 143047 - RNA, 19 nt, Artificial Sequence
  Description of Artificial Sequence: Synthetic oligonucleotide
ggugacaagauugcacacu

SEQ ID NO: 143048 - RNA, 19 nt, Artificial Sequence
  Description of Artificial Sequence: Synthetic oligonucleotide
acugaccggcguucugcau

SEQ ID NO: 143049 - RNA, 19 nt, Artificial Sequence
  Description of Artificial Sequence: Synthetic oligonucleotide
cacugaccggcguucugca

SEQ ID NO: 143050 - RNA, 19 nt, Artificial Sequence
  Description of Artificial Sequence: Synthetic oligonucleotide
caucugcauuuaauguugu

SEQ ID NO: 143051 - RNA, 19 nt, Artificial Sequence
  Description of Artificial Sequence: Synthetic oligonucleotide
ccaacacccgaacccuccc

SEQ ID NO: 143052 - RNA, 19 nt, Artificial Sequence
  Description of Artificial Sequence: Synthetic oligonucleotide
gcauagcagucacuugcuc

SEQ ID NO: 143053 - RNA, 19 nt, Artificial Sequence
  Description of Artificial Sequence: Synthetic oligonucleotide
caacacccgaacccuccca

SEQ ID NO: 143054 - RNA, 19 nt, Artificial Sequence
  Description of Artificial Sequence: Synthetic oligonucleotide
cccgaacccucccacguac

SEQ ID NO: 143055 - RNA, 19 nt, Artificial Sequence
  Description of Artificial Sequence: Synthetic oligonucleotide
cguacccacacaauguuua

SEQ ID NO: 143056 - RNA, 19 nt, Artificial Sequence
  Description of Artificial Sequence: Synthetic oligonucleotide
acguacccacacaauguuu

SEQ ID NO: 143057 - RNA, 19 nt, Artificial Sequence
  Description of Artificial Sequence: Synthetic oligonucleotide
cauucgcacucaucaauuu

SEQ ID NO: 143058 - RNA, 19 nt, Artificial Sequence
  Description of Artificial Sequence: Synthetic oligonucleotide
acccgaacccucccacgua

SEQ ID NO: 143059 - RNA, 19 nt, Artificial Sequence
  Description of Artificial Sequence: Synthetic oligonucleotide
cacguacccacacaauguu

SEQ ID NO: 143060 - RNA, 19 nt, Artificial Sequence
  Description of Artificial Sequence: Synthetic oligonucleotide
cgugucuuaauaggcugac

SEQ ID NO: 143061 - RNA, 19 nt, Artificial Sequence
  Description of Artificial Sequence: Synthetic oligonucleotide
cggugguaaaauuccgcuc

SEQ ID NO: 143062 - RNA, 19 nt, Artificial Sequence
  Description of Artificial Sequence: Synthetic oligonucleotide
cgugcagcggucgcuauac

SEQ ID NO: 143063 - RNA, 19 nt, Artificial Sequence
  Description of Artificial Sequence: Synthetic oligonucleotide
ccgugucuuaauaggcuga

SEQ ID NO: 143064 - RNA, 19 nt, Artificial Sequence
  Description of Artificial Sequence: Synthetic oligonucleotide
gcggucgcuauacucguua

SEQ ID NO: 143065 - RNA, 19 nt, Artificial Sequence
  Description of Artificial Sequence: Synthetic oligonucleotide
ccacguacccacacaaugu

SEQ ID NO: 143066 - RNA, 19 nt, Artificial Sequence
  Description of Artificial Sequence: Synthetic oligonucleotide
cuugaggugguugguccgu

SEQ ID NO: 143067 - RNA, 19 nt, Artificial Sequence
  Description of Artificial Sequence: Synthetic oligonucleotide
cacccgaacccucccacgu

SEQ ID NO: 143068 - RNA, 19 nt, Artificial Sequence
  Description of Artificial Sequence: Synthetic oligonucleotide
ccgaacccucccacguacc

SEQ ID NO: 143069 - RNA, 19 nt, Artificial Sequence
  Description of Artificial Sequence: Synthetic oligonucleotide
cacuugcucggugguaaaa

SEQ ID NO: 143070 - RNA, 19 nt, Artificial Sequence
  Description of Artificial Sequence: Synthetic oligonucleotide
gauccgccgucaggcucug

SEQ ID NO: 143071 - RNA, 19 nt, Artificial Sequence
  Description of Artificial Sequence: Synthetic oligonucleotide
cggucgcuauacucguuag

SEQ ID NO: 143072 - RNA, 19 nt, Artificial Sequence
  Description of Artificial Sequence: Synthetic oligonucleotide
gagcuauaguaggccucaa

SEQ ID NO: 143073 - RNA, 19 nt, Artificial Sequence
  Description of Artificial Sequence: Synthetic oligonucleotide
cagcggucgcuauacucgu

SEQ ID NO: 143074 - RNA, 19 nt, Artificial Sequence
  Description of Artificial Sequence: Synthetic oligonucleotide
ccucuauuaaaugcacaua

SEQ ID NO: 143075 - RNA, 19 nt, Artificial Sequence
  Description of Artificial Sequence: Synthetic oligonucleotide
ccggauacaucaauaucau

SEQ ID NO: 143076 - RNA, 19 nt, Artificial Sequence
  Description of Artificial Sequence: Synthetic oligonucleotide
cgcuauacucguuagcgau

SEQ ID NO: 143077 - RNA, 19 nt, Artificial Sequence
  Description of Artificial Sequence: Synthetic oligonucleotide
ggauccgccgucaggcucu

SEQ ID NO: 143078 - RNA, 19 nt, Artificial Sequence
  Description of Artificial Sequence: Synthetic oligonucleotide
gcauucgcacucaucaauu

SEQ ID NO: 143079 - RNA, 19 nt, Artificial Sequence
  Description of Artificial Sequence: Synthetic oligonucleotide
gaccggcguucugcaucag

SEQ ID NO: 143080 - RNA, 19 nt, Artificial Sequence
  Description of Artificial Sequence: Synthetic oligonucleotide
cuggauccgccgucaggcu

SEQ ID NO: 143081 - RNA, 19 nt, Artificial Sequence
  Description of Artificial Sequence: Synthetic oligonucleotide
aggacgcacuggacacacu

SEQ ID NO: 143082 - RNA, 19 nt, Artificial Sequence
  Description of Artificial Sequence: Synthetic oligonucleotide
cacgcccaugaaaucuuuu

SEQ ID NO: 143083 - RNA, 19 nt, Artificial Sequence
  Description of Artificial Sequence: Synthetic oligonucleotide
caucacugaccggcguucu

SEQ ID NO: 143084 - RNA, 19 nt, Artificial Sequence
  Description of Artificial Sequence: Synthetic oligonucleotide
agcggucgcuauacucguu

SEQ ID NO: 143085 - RNA, 19 nt, Artificial Sequence
  Description of Artificial Sequence: Synthetic oligonucleotide
gggguuccacuuuggguuu

SEQ ID NO: 143086 - RNA, 19 nt, Artificial Sequence
  Description of Artificial Sequence: Synthetic oligonucleotide
gggauucgcguggcaccac

SEQ ID NO: 143087 - RNA, 19 nt, Artificial Sequence
  Description of Artificial Sequence: Synthetic oligonucleotide
gcgugcagcggucgcuaua

SEQ ID NO: 143088 - RNA, 19 nt, Artificial Sequence
  Description of Artificial Sequence: Synthetic oligonucleotide
ccaucgcuucauuggugcu

SEQ ID NO: 143089 - RNA, 19 nt, Artificial Sequence
  Description of Artificial Sequence: Synthetic oligonucleotide
gcguggcaccaccaacuau

SEQ ID NO: 143090 - RNA, 19 nt, Artificial Sequence
  Description of Artificial Sequence: Synthetic oligonucleotide
gcgcgggccacagcgacau

SEQ ID NO: 143091 - RNA, 19 nt, Artificial Sequence
  Description of Artificial Sequence: Synthetic oligonucleotide
auccgccgucaggcucugu

SEQ ID NO: 143092 - RNA, 19 nt, Artificial Sequence
  Description of Artificial Sequence: Synthetic oligonucleotide
cgcguggcaccaccaacua

SEQ ID NO: 143093 - RNA, 19 nt, Artificial Sequence
  Description of Artificial Sequence: Synthetic oligonucleotide
ggcgugcagcggucgcuau

SEQ ID NO: 143094 - RNA, 19 nt, Artificial Sequence
  Description of Artificial Sequence: Synthetic oligonucleotide
cguuagcgaucgucucgau

SEQ ID NO: 143095 - RNA, 19 nt, Artificial Sequence
  Description of Artificial Sequence: Synthetic oligonucleotide
aacucaguagcucagacgc

SEQ ID NO: 143096 - RNA, 19 nt, Artificial Sequence
  Description of Artificial Sequence: Synthetic oligonucleotide
uguaagguaaugaauauag

SEQ ID NO: 143097 - RNA, 19 nt, Artificial Sequence
  Description of Artificial Sequence: Synthetic oligonucleotide
ugguauauaauucugugac

SEQ ID NO: 143098 - RNA, 19 nt, Artificial Sequence
  Description of Artificial Sequence: Synthetic oligonucleotide
ugaauaugaaguuugggac

SEQ ID NO: 143099 - RNA, 19 nt, Artificial Sequence
  Description of Artificial Sequence: Synthetic oligonucleotide
aaaacuagcuaaauagaac

SEQ ID NO: 143100 - RNA, 19 nt, Artificial Sequence
  Description of Artificial Sequence: Synthetic oligonucleotide
aauaugaaguuugggacac

SEQ ID NO: 143101 - RNA, 19 nt, Artificial Sequence
  Description of Artificial Sequence: Synthetic oligonucleotide
uuuuaauacuggaaggccc

SEQ ID NO: 143102 - RNA, 19 nt, Artificial Sequence
  Description of Artificial Sequence: Synthetic oligonucleotide
uauaagaggcaaaauuucc

SEQ ID NO: 143103 - RNA, 19 nt, Artificial Sequence
  Description of Artificial Sequence: Synthetic oligonucleotide
uggacauuaguucauggag

SEQ ID NO: 143104 - RNA, 19 nt, Artificial Sequence
  Description of Artificial Sequence: Synthetic oligonucleotide
uuggcaaaucuccauauag

SEQ ID NO: 143105 - RNA, 19 nt, Artificial Sequence
  Description of Artificial Sequence: Synthetic oligonucleotide
uauacgaucaaagugaaua

SEQ ID NO: 143106 - RNA, 19 nt, Artificial Sequence
  Description of Artificial Sequence: Synthetic oligonucleotide
aauaucuggaccccggugu

SEQ ID NO: 143107 - RNA, 19 nt, Artificial Sequence
  Description of Artificial Sequence: Synthetic oligonucleotide
uuuaauacuggaaggcccc

SEQ ID NO: 143108 - RNA, 19 nt, Artificial Sequence
  Description of Artificial Sequence: Synthetic oligonucleotide
gaaucauagaauucuauga

SEQ ID NO: 143109 - RNA, 19 nt, Artificial Sequence
  Description of Artificial Sequence: Synthetic oligonucleotide
aaguuugggacacuguuug

SEQ ID NO: 143110 - RNA, 19 nt, Artificial Sequence
  Description of Artificial Sequence: Synthetic oligonucleotide
aagguaaugaauauaguga

SEQ ID NO: 143111 - RNA, 19 nt, Artificial Sequence
  Description of Artificial Sequence: Synthetic oligonucleotide
uaccuuaaaggacugguag

SEQ ID NO: 143112 - RNA, 19 nt, Artificial Sequence
  Description of Artificial Sequence: Synthetic oligonucleotide
uuacacauuauucucugca

SEQ ID NO: 143113 - RNA, 19 nt, Artificial Sequence
  Description of Artificial Sequence: Synthetic oligonucleotide
auauagugaaauaugcuac

SEQ ID NO: 143114 - RNA, 19 nt, Artificial Sequence
  Description of Artificial Sequence: Synthetic oligonucleotide
aguaagagacaaaugaccg

SEQ ID NO: 143115 - RNA, 19 nt, Artificial Sequence
  Description of Artificial Sequence: Synthetic oligonucleotide
aguaaaacccauacaaugg

SEQ ID NO: 143116 - RNA, 19 nt, Artificial Sequence
  Description of Artificial Sequence: Synthetic oligonucleotide
uccgcaauaauccagucaa

SEQ ID NO: 143117 - RNA, 19 nt, Artificial Sequence
  Description of Artificial Sequence: Synthetic oligonucleotide
aacccauacaauggaagcc

SEQ ID NO: 143118 - RNA, 19 nt, Artificial Sequence
  Description of Artificial Sequence: Synthetic oligonucleotide
uauguaucaacaguguggc

SEQ ID NO: 143119 - RNA, 19 nt, Artificial Sequence
  Description of Artificial Sequence: Synthetic oligonucleotide
cuacccaagaucaacacug

SEQ ID NO: 143120 - RNA, 19 nt, Artificial Sequence
  Description of Artificial Sequence: Synthetic oligonucleotide
uucaacuccauucggacac

SEQ ID NO: 143121 - RNA, 19 nt, Artificial Sequence
  Description of Artificial Sequence: Synthetic oligonucleotide
ucguuuuacauaaauuccu

SEQ ID NO: 143122 - RNA, 19 nt, Artificial Sequence
  Description of Artificial Sequence: Synthetic oligonucleotide
uguuccugcguucacguag

SEQ ID NO: 143123 - RNA, 19 nt, Artificial Sequence
  Description of Artificial Sequence: Synthetic oligonucleotide
ucacaagauacauuggugu

SEQ ID NO: 143124 - RNA, 19 nt, Artificial Sequence
  Description of Artificial Sequence: Synthetic oligonucleotide
uuuaacccaucuuucagca

SEQ ID NO: 143125 - RNA, 19 nt, Artificial Sequence
  Description of Artificial Sequence: Synthetic oligonucleotide
agagacaaaugaccggagc

SEQ ID NO: 143126 - RNA, 19 nt, Artificial Sequence
  Description of Artificial Sequence: Synthetic oligonucleotide
ugucgugcagccaacaugu

SEQ ID NO: 143127 - RNA, 19 nt, Artificial Sequence
  Description of Artificial Sequence: Synthetic oligonucleotide
gacgcaguaaagccggucg

SEQ ID NO: 143128 - RNA, 19 nt, Artificial Sequence
  Description of Artificial Sequence: Synthetic oligonucleotide
ugcuuauguuuuaauaaca

SEQ ID NO: 143129 - RNA, 19 nt, Artificial Sequence
  Description of Artificial Sequence: Synthetic oligonucleotide
uguaucaacaguguggcuc

SEQ ID NO: 143130 - RNA, 19 nt, Artificial Sequence
  Description of Artificial Sequence: Synthetic oligonucleotide
uugauuaaugguauauaau

SEQ ID NO: 143131 - RNA, 19 nt, Artificial Sequence
  Description of Artificial Sequence: Synthetic oligonucleotide
gaugcuaggaggcacuaac

SEQ ID NO: 143132 - RNA, 19 nt, Artificial Sequence
  Description of Artificial Sequence: Synthetic oligonucleotide
guaagagacaaaugaccgg

SEQ ID NO: 143133 - RNA, 19 nt, Artificial Sequence
  Description of Artificial Sequence: Synthetic oligonucleotide
uuagugauaggaguuugag

SEQ ID NO: 143134 - RNA, 19 nt, Artificial Sequence
  Description of Artificial Sequence: Synthetic oligonucleotide
aacagcaccacuggaggac

SEQ ID NO: 143135 - RNA, 19 nt, Artificial Sequence
  Description of Artificial Sequence: Synthetic oligonucleotide
ugguagacgcaguaaagcc

SEQ ID NO: 143136 - RNA, 19 nt, Artificial Sequence
  Description of Artificial Sequence: Synthetic oligonucleotide
uuacccacaggagucaggg

SEQ ID NO: 143137 - RNA, 19 nt, Artificial Sequence
  Description of Artificial Sequence: Synthetic oligonucleotide
auaccuuagugauaggagu

SEQ ID NO: 143138 - RNA, 19 nt, Artificial Sequence
  Description of Artificial Sequence: Synthetic oligonucleotide
uguaauguguagccaucag

SEQ ID NO: 143139 - RNA, 19 nt, Artificial Sequence
  Description of Artificial Sequence: Synthetic oligonucleotide
uggcaaaucuccauauagc

SEQ ID NO: 143140 - RNA, 19 nt, Artificial Sequence
  Description of Artificial Sequence: Synthetic oligonucleotide
uagccaaggaggcuuaccc

SEQ ID NO: 143141 - RNA, 19 nt, Artificial Sequence
  Description of Artificial Sequence: Synthetic oligonucleotide
aucuccauauagcaauauc

SEQ ID NO: 143142 - RNA, 19 nt, Artificial Sequence
  Description of Artificial Sequence: Synthetic oligonucleotide
agugcacacgcuccagucc

SEQ ID NO: 143143 - RNA, 19 nt, Artificial Sequence
  Description of Artificial Sequence: Synthetic oligonucleotide
uuuauccaguguucaauca

SEQ ID NO: 143144 - RNA, 19 nt, Artificial Sequence
  Description of Artificial Sequence: Synthetic oligonucleotide
auagaguacguguggagca

SEQ ID NO: 143145 - RNA, 19 nt, Artificial Sequence
  Description of Artificial Sequence: Synthetic oligonucleotide
gagacaaaugaccggagca

SEQ ID NO: 143146 - RNA, 19 nt, Artificial Sequence
  Description of Artificial Sequence: Synthetic oligonucleotide
aguaaagccggucguccac

SEQ ID NO: 143147 - RNA, 19 nt, Artificial Sequence
  Description of Artificial Sequence: Synthetic oligonucleotide
agacaaaugaccggagcac

SEQ ID NO: 143148 - RNA, 19 nt, Artificial Sequence
  Description of Artificial Sequence: Synthetic oligonucleotide
auugcaucuaaaugacucu

SEQ ID NO: 143149 - RNA, 19 nt, Artificial Sequence
  Description of Artificial Sequence: Synthetic oligonucleotide
ucuauacgaucaaagugaa

SEQ ID NO: 143150 - RNA, 19 nt, Artificial Sequence
  Description of Artificial Sequence: Synthetic oligonucleotide
guagacgcaguaaagccgg

SEQ ID NO: 143151 - RNA, 19 nt, Artificial Sequence
  Description of Artificial Sequence: Synthetic oligonucleotide
guaucaacaguguggcucc

SEQ ID NO: 143152 - RNA, 19 nt, Artificial Sequence
  Description of Artificial Sequence: Synthetic oligonucleotide
cuuagucuggaaugaacac

SEQ ID NO: 143153 - RNA, 19 nt, Artificial Sequence
  Description of Artificial Sequence: Synthetic oligonucleotide
uagugauaggaguuugagc

SEQ ID NO: 143154 - RNA, 19 nt, Artificial Sequence
  Description of Artificial Sequence: Synthetic oligonucleotide
uuagucuggaaugaacacu

SEQ ID NO: 143155 - RNA, 19 nt, Artificial Sequence
  Description of Artificial Sequence: Synthetic oligonucleotide
aaaugaccggagcacauua

SEQ ID NO: 143156 - RNA, 19 nt, Artificial Sequence
  Description of Artificial Sequence: Synthetic oligonucleotide
aggggaaugcaaauuaauc

SEQ ID NO: 143157 - RNA, 19 nt, Artificial Sequence
  Description of Artificial Sequence: Synthetic oligonucleotide
aggugauauguaucaacag

SEQ ID NO: 143158 - RNA, 19 nt, Artificial Sequence
  Description of Artificial Sequence: Synthetic oligonucleotide
agcgcacauguccaagggc

SEQ ID NO: 143159 - RNA, 19 nt, Artificial Sequence
  Description of Artificial Sequence: Synthetic oligonucleotide
acgcuggguuauuuaaagc

SEQ ID NO: 143160 - RNA, 19 nt, Artificial Sequence
  Description of Artificial Sequence: Synthetic oligonucleotide
uagugaaauaugcuacaaa

SEQ ID NO: 143161 - RNA, 19 nt, Artificial Sequence
  Description of Artificial Sequence: Synthetic oligonucleotide
ucggacacuuuacacauua

SEQ ID NO: 143162 - RNA, 19 nt, Artificial Sequence
  Description of Artificial Sequence: Synthetic oligonucleotide
agaaaacuagcuaaauaga

SEQ ID NO: 143163 - RNA, 19 nt, Artificial Sequence
  Description of Artificial Sequence: Synthetic oligonucleotide
acgaucaaagugaauauga

SEQ ID NO: 143164 - RNA, 19 nt, Artificial Sequence
  Description of Artificial Sequence: Synthetic oligonucleotide
ggggaaugcaaauuaauca

SEQ ID NO: 143165 - RNA, 19 nt, Artificial Sequence
  Description of Artificial Sequence: Synthetic oligonucleotide
aaugaccggagcacauuac

SEQ ID NO: 143166 - RNA, 19 nt, Artificial Sequence
  Description of Artificial Sequence: Synthetic oligonucleotide
auacgaucaaagugaauau

SEQ ID NO: 143167 - RNA, 19 nt, Artificial Sequence
  Description of Artificial Sequence: Synthetic oligonucleotide
cauucggacacuuuacaca

SEQ ID NO: 143168 - RNA, 19 nt, Artificial Sequence
  Description of Artificial Sequence: Synthetic oligonucleotide
aacuuuagaaagccuccuu

SEQ ID NO: 143169 - RNA, 19 nt, Artificial Sequence
  Description of Artificial Sequence: Synthetic oligonucleotide
acuacccaagaucaacacu

SEQ ID NO: 143170 - RNA, 19 nt, Artificial Sequence
  Description of Artificial Sequence: Synthetic oligonucleotide
gcacauagcgcacaugucc

SEQ ID NO: 143171 - RNA, 19 nt, Artificial Sequence
  Description of Artificial Sequence: Synthetic oligonucleotide
cugguagacgcaguaaagc

SEQ ID NO: 143172 - RNA, 19 nt, Artificial Sequence
  Description of Artificial Sequence: Synthetic oligonucleotide
uuaccuuaaaggacuggua

SEQ ID NO: 143173 - RNA, 19 nt, Artificial Sequence
  Description of Artificial Sequence: Synthetic oligonucleotide
ggcaaaucuccauauagca

SEQ ID NO: 143174 - RNA, 19 nt, Artificial Sequence
  Description of Artificial Sequence: Synthetic oligonucleotide
uaccuuagugauaggaguu

SEQ ID NO: 143175 - RNA, 19 nt, Artificial Sequence
  Description of Artificial Sequence: Synthetic oligonucleotide
auuaaauuuggcacuucgu

SEQ ID NO: 143176 - RNA, 19 nt, Artificial Sequence
  Description of Artificial Sequence: Synthetic oligonucleotide
uuauaccuuguucccucug

SEQ ID NO: 143177 - RNA, 19 nt, Artificial Sequence
  Description of Artificial Sequence: Synthetic oligonucleotide
cugcaacccaacaaugaac

SEQ ID NO: 143178 - RNA, 19 nt, Artificial Sequence
  Description of Artificial Sequence: Synthetic oligonucleotide
gguagacgcaguaaagccg

SEQ ID NO: 143179 - RNA, 19 nt, Artificial Sequence
  Description of Artificial Sequence: Synthetic oligonucleotide
gacuacccaagaucaacac

SEQ ID NO: 143180 - RNA, 19 nt, Artificial Sequence
  Description of Artificial Sequence: Synthetic oligonucleotide
ggacagauagucaggaugc

SEQ ID NO: 143181 - RNA, 19 nt, Artificial Sequence
  Description of Artificial Sequence: Synthetic oligonucleotide
ggcacuucguuuuacauaa

SEQ ID NO: 143182 - RNA, 19 nt, Artificial Sequence
  Description of Artificial Sequence: Synthetic oligonucleotide
ggaggcacuaacucaguag

SEQ ID NO: 143183 - RNA, 19 nt, Artificial Sequence
  Description of Artificial Sequence: Synthetic oligonucleotide
uuaucucaaaacgcucaug

SEQ ID NO: 143184 - RNA, 19 nt, Artificial Sequence
  Description of Artificial Sequence: Synthetic oligonucleotide
aacuagcuaaauagaacaa

SEQ ID NO: 143185 - RNA, 19 nt, Artificial Sequence
  Description of Artificial Sequence: Synthetic oligonucleotide
aaguggacauuaguucaug

SEQ ID NO: 143186 - RNA, 19 nt, Artificial Sequence
  Description of Artificial Sequence: Synthetic oligonucleotide
ugucugccccaaaucaacu

SEQ ID NO: 143187 - RNA, 19 nt, Artificial Sequence
  Description of Artificial Sequence: Synthetic oligonucleotide
agcacguguuuuaauacug

SEQ ID NO: 143188 - RNA, 19 nt, Artificial Sequence
  Description of Artificial Sequence: Synthetic oligonucleotide
agguagcgcauagaguacg

SEQ ID NO: 143189 - RNA, 19 nt, Artificial Sequence
  Description of Artificial Sequence: Synthetic oligonucleotide
guggcuacccggcucgccg

SEQ ID NO: 143190 - RNA, 19 nt, Artificial Sequence
  Description of Artificial Sequence: Synthetic oligonucleotide
cagacuacccaagaucaac

SEQ ID NO: 143191 - RNA, 19 nt, Artificial Sequence
  Description of Artificial Sequence: Synthetic oligonucleotide
cugucgugcagccaacaug

SEQ ID NO: 143192 - RNA, 19 nt, Artificial Sequence
  Description of Artificial Sequence: Synthetic oligonucleotide
uuggcacuucguuuuacau

SEQ ID NO: 143193 - RNA, 19 nt, Artificial Sequence
  Description of Artificial Sequence: Synthetic oligonucleotide
caauaucuggaccccggug

SEQ ID NO: 143194 - RNA, 19 nt, Artificial Sequence
  Description of Artificial Sequence: Synthetic oligonucleotide
auagugaaauaugcuacaa

SEQ ID NO: 143195 - RNA, 19 nt, Artificial Sequence
  Description of Artificial Sequence: Synthetic oligonucleotide
gcaaccaugagugcacacg

SEQ ID NO: 143196 - RNA, 19 nt, Artificial Sequence
  Description of Artificial Sequence: Synthetic oligonucleotide
uuuacccaauccugaugcu

SEQ ID NO: 143197 - RNA, 19 nt, Artificial Sequence
  Description of Artificial Sequence: Synthetic oligonucleotide
gacaaaugaccggagcaca

SEQ ID NO: 143198 - RNA, 19 nt, Artificial Sequence
  Description of Artificial Sequence: Synthetic oligonucleotide
agcaccugaaaagccaugu

SEQ ID NO: 143199 - RNA, 19 nt, Artificial Sequence
  Description of Artificial Sequence: Synthetic oligonucleotide
guaaagccggucguccacg

SEQ ID NO: 143200 - RNA, 19 nt, Artificial Sequence
  Description of Artificial Sequence: Synthetic oligonucleotide
ucagucauggacggugagu

SEQ ID NO: 143201 - RNA, 19 nt, Artificial Sequence
  Description of Artificial Sequence: Synthetic oligonucleotide
agcgcauagaguacgugug

SEQ ID NO: 143202 - RNA, 19 nt, Artificial Sequence
  Description of Artificial Sequence: Synthetic oligonucleotide
agcaacgugaguugccuuu

SEQ ID NO: 143203 - RNA, 19 nt, Artificial Sequence
  Description of Artificial Sequence: Synthetic oligonucleotide
ugguaggcaaucacacuua

SEQ ID NO: 143204 - RNA, 19 nt, Artificial Sequence
  Description of Artificial Sequence: Synthetic oligonucleotide
uuaacccaucuuucagcac

SEQ ID NO: 143205 - RNA, 19 nt, Artificial Sequence
  Description of Artificial Sequence: Synthetic oligonucleotide
uccuagaagguagcucuug

SEQ ID NO: 143206 - RNA, 19 nt, Artificial Sequence
  Description of Artificial Sequence: Synthetic oligonucleotide
agucauaacagagcuucaa

SEQ ID NO: 143207 - RNA, 19 nt, Artificial Sequence
  Description of Artificial Sequence: Synthetic oligonucleotide
agacuacccaagaucaaca

SEQ ID NO: 143208 - RNA, 19 nt, Artificial Sequence
  Description of Artificial Sequence: Synthetic oligonucleotide
cacguguuuuaauacugga

SEQ ID NO: 143209 - RNA, 19 nt, Artificial Sequence
  Description of Artificial Sequence: Synthetic oligonucleotide
ucagacgcuggguuauuua

SEQ ID NO: 143210 - RNA, 19 nt, Artificial Sequence
  Description of Artificial Sequence: Synthetic oligonucleotide
agcacauuacuugcuuaug

SEQ ID NO: 143211 - RNA, 19 nt, Artificial Sequence
  Description of Artificial Sequence: Synthetic oligonucleotide
aguguucaaucaacaaggu

SEQ ID NO: 143212 - RNA, 19 nt, Artificial Sequence
  Description of Artificial Sequence: Synthetic oligonucleotide
gauuugguccuagaaggua

SEQ ID NO: 143213 - RNA, 19 nt, Artificial Sequence
  Description of Artificial Sequence: Synthetic oligonucleotide
auguccaagggcauccugu

SEQ ID NO: 143214 - RNA, 19 nt, Artificial Sequence
  Description of Artificial Sequence: Synthetic oligonucleotide
aaagucagucauggacggu

SEQ ID NO: 143215 - RNA, 19 nt, Artificial Sequence
  Description of Artificial Sequence: Synthetic oligonucleotide
cacagaugcuaggaggcac

SEQ ID NO: 143216 - RNA, 19 nt, Artificial Sequence
  Description of Artificial Sequence: Synthetic oligonucleotide
uagaguacguguggagcac

SEQ ID NO: 143217 - RNA, 19 nt, Artificial Sequence
  Description of Artificial Sequence: Synthetic oligonucleotide
cacgcgcugguagaggcgg

SEQ ID NO: 143218 - RNA, 19 nt, Artificial Sequence
  Description of Artificial Sequence: Synthetic oligonucleotide
aacgcucaugaagccauau

SEQ ID NO: 143219 - RNA, 19 nt, Artificial Sequence
  Description of Artificial Sequence: Synthetic oligonucleotide
acguguuuuaauacuggaa

SEQ ID NO: 143220 - RNA, 19 nt, Artificial Sequence
  Description of Artificial Sequence: Synthetic oligonucleotide
auguccgcaauaauccagu

SEQ ID NO: 143221 - RNA, 19 nt, Artificial Sequence
  Description of Artificial Sequence: Synthetic oligonucleotide
cacgccucggcuugcccgg

SEQ ID NO: 143222 - RNA, 19 nt, Artificial Sequence
  Description of Artificial Sequence: Synthetic oligonucleotide
aaaugccugacuggcugaa

SEQ ID NO: 143223 - RNA, 19 nt, Artificial Sequence
  Description of Artificial Sequence: Synthetic oligonucleotide
ggacauuaguucauggaga

SEQ ID NO: 143224 - RNA, 19 nt, Artificial Sequence
  Description of Artificial Sequence: Synthetic oligonucleotide
ucguccacgcgcugguaga

SEQ ID NO: 143225 - RNA, 19 nt, Artificial Sequence
  Description of Artificial Sequence: Synthetic oligonucleotide
guuccugcguucacguagc

SEQ ID NO: 143226 - RNA, 19 nt, Artificial Sequence
  Description of Artificial Sequence: Synthetic oligonucleotide
cugggaaaaucacaagaua

SEQ ID NO: 143227 - RNA, 19 nt, Artificial Sequence
  Description of Artificial Sequence: Synthetic oligonucleotide
acgcaguaaagccggucgu

SEQ ID NO: 143228 - RNA, 19 nt, Artificial Sequence
  Description of Artificial Sequence: Synthetic oligonucleotide
accgcgguaagggcacgcc

SEQ ID NO: 143229 - RNA, 19 nt, Artificial Sequence
  Description of Artificial Sequence: Synthetic oligonucleotide
gcacuaacucaguagcuca

SEQ ID NO: 143230 - RNA, 19 nt, Artificial Sequence
  Description of Artificial Sequence: Synthetic oligonucleotide
auaucuggaccccggugua

SEQ ID NO: 143231 - RNA, 19 nt, Artificial Sequence
  Description of Artificial Sequence: Synthetic oligonucleotide
aucguaaauugcaucuaaa

SEQ ID NO: 143232 - RNA, 19 nt, Artificial Sequence
  Description of Artificial Sequence: Synthetic oligonucleotide
ggguuauuuaaagcucugc

SEQ ID NO: 143233 - RNA, 19 nt, Artificial Sequence
  Description of Artificial Sequence: Synthetic oligonucleotide
gguaagggcacgccucggc

SEQ ID NO: 143234 - RNA, 19 nt, Artificial Sequence
  Description of Artificial Sequence: Synthetic oligonucleotide
gugauguaauguguagcca

SEQ ID NO: 143235 - RNA, 19 nt, Artificial Sequence
  Description of Artificial Sequence: Synthetic oligonucleotide
aaccagguacccacauaca

SEQ ID NO: 143236 - RNA, 19 nt, Artificial Sequence
  Description of Artificial Sequence: Synthetic oligonucleotide
acgcucggaagcagguagc

SEQ ID NO: 143237 - RNA, 19 nt, Artificial Sequence
  Description of Artificial Sequence: Synthetic oligonucleotide
gcaguaaagccggucgucc

SEQ ID NO: 143238 - RNA, 19 nt, Artificial Sequence
  Description of Artificial Sequence: Synthetic oligonucleotide
acguguggagcaccaggga

SEQ ID NO: 143239 - RNA, 19 nt, Artificial Sequence
  Description of Artificial Sequence: Synthetic oligonucleotide
augagugcacacgcuccag

SEQ ID NO: 143240 - RNA, 19 nt, Artificial Sequence
  Description of Artificial Sequence: Synthetic oligonucleotide
auaggaguuugagcugcca

SEQ ID NO: 143241 - RNA, 19 nt, Artificial Sequence
  Description of Artificial Sequence: Synthetic oligonucleotide
guagcgcauagaguacgug

SEQ ID NO: 143242 - RNA, 19 nt, Artificial Sequence
  Description of Artificial Sequence: Synthetic oligonucleotide
caacgugaguugccuuuac

SEQ ID NO: 143243 - RNA, 19 nt, Artificial Sequence
  Description of Artificial Sequence: Synthetic oligonucleotide
gcgguaagggcacgccucg

SEQ ID NO: 143244 - RNA, 19 nt, Artificial Sequence
  Description of Artificial Sequence: Synthetic oligonucleotide
gcacgccucggcuugcccg

SEQ ID NO: 143245 - RNA, 19 nt, Artificial Sequence
  Description of Artificial Sequence: Synthetic oligonucleotide
uagacgcaguaaagccggu

SEQ ID NO: 143246 - RNA, 19 nt, Artificial Sequence
  Description of Artificial Sequence: Synthetic oligonucleotide
acgcucaugaagccauauu

SEQ ID NO: 143247 - RNA, 19 nt, Artificial Sequence
  Description of Artificial Sequence: Synthetic oligonucleotide
uggcuacccggcucgccgc

SEQ ID NO: 143248 - RNA, 19 nt, Artificial Sequence
  Description of Artificial Sequence: Synthetic oligonucleotide
guagcucagacgcuggguu

SEQ ID NO: 143249 - RNA, 19 nt, Artificial Sequence
  Description of Artificial Sequence: Synthetic oligonucleotide
cagugugauuugguccuag

SEQ ID NO: 143250 - RNA, 19 nt, Artificial Sequence
  Description of Artificial Sequence: Synthetic oligonucleotide
cagcaccugaaaagccaug

SEQ ID NO: 143251 - RNA, 19 nt, Artificial Sequence
  Description of Artificial Sequence: Synthetic oligonucleotide
gugaguugccuuuacucuu

SEQ ID NO: 143252 - RNA, 19 nt, Artificial Sequence
  Description of Artificial Sequence: Synthetic oligonucleotide
guaagggcacgccucggcu

SEQ ID NO: 143253 - RNA, 19 nt, Artificial Sequence
  Description of Artificial Sequence: Synthetic oligonucleotide
uucggacacuuuacacauu

SEQ ID NO: 143254 - RNA, 19 nt, Artificial Sequence
  Description of Artificial Sequence: Synthetic oligonucleotide
aacuccauucggacacuuu

SEQ ID NO: 143255 - RNA, 19 nt, Artificial Sequence
  Description of Artificial Sequence: Synthetic oligonucleotide
gcagucagacuacccaaga

SEQ ID NO: 143256 - RNA, 19 nt, Artificial Sequence
  Description of Artificial Sequence: Synthetic oligonucleotide
caaucaccgcgcggggccg

SEQ ID NO: 143257 - RNA, 19 nt, Artificial Sequence
  Description of Artificial Sequence: Synthetic oligonucleotide
cagcacguguuuuaauacu

SEQ ID NO: 143258 - RNA, 19 nt, Artificial Sequence
  Description of Artificial Sequence: Synthetic oligonucleotide
uuccugcguucacguagcu

SEQ ID NO: 143259 - RNA, 19 nt, Artificial Sequence
  Description of Artificial Sequence: Synthetic oligonucleotide
agacgcuggguuauuuaaa

SEQ ID NO: 143260 - RNA, 19 nt, Artificial Sequence
  Description of Artificial Sequence: Synthetic oligonucleotide
gguuccauacaaccaggua

SEQ ID NO: 143261 - RNA, 19 nt, Artificial Sequence
  Description of Artificial Sequence: Synthetic oligonucleotide
auacaaccagguacccaca

SEQ ID NO: 143262 - RNA, 19 nt, Artificial Sequence
  Description of Artificial Sequence: Synthetic oligonucleotide
uccugcguucacguagcuc

SEQ ID NO: 143263 - RNA, 19 nt, Artificial Sequence
  Description of Artificial Sequence: Synthetic oligonucleotide
ccccaaaucaacugcaugu

SEQ ID NO: 143264 - RNA, 19 nt, Artificial Sequence
  Description of Artificial Sequence: Synthetic oligonucleotide
guguucaaucaacaagguu

SEQ ID NO: 143265 - RNA, 19 nt, Artificial Sequence
  Description of Artificial Sequence: Synthetic oligonucleotide
cugccuugcccgugccgcc

SEQ ID NO: 143266 - RNA, 19 nt, Artificial Sequence
  Description of Artificial Sequence: Synthetic oligonucleotide
aaacgcucaugaagccaua

SEQ ID NO: 143267 - RNA, 19 nt, Artificial Sequence
  Description of Artificial Sequence: Synthetic oligonucleotide
aaggccccguugagcagca

SEQ ID NO: 143268 - RNA, 19 nt, Artificial Sequence
  Description of Artificial Sequence: Synthetic oligonucleotide
ccaucaguaagagacaaau

SEQ ID NO: 143269 - RNA, 19 nt, Artificial Sequence
  Description of Artificial Sequence: Synthetic oligonucleotide
agggcacgccucggcuugc

SEQ ID NO: 143270 - RNA, 19 nt, Artificial Sequence
  Description of Artificial Sequence: Synthetic oligonucleotide
cgcuggguuauuuaaagcu

SEQ ID NO: 143271 - RNA, 19 nt, Artificial Sequence
  Description of Artificial Sequence: Synthetic oligonucleotide
cuacccggcucgccgccac

SEQ ID NO: 143272 - RNA, 19 nt, Artificial Sequence
  Description of Artificial Sequence: Synthetic oligonucleotide
cgccaaagcaaagggagac

SEQ ID NO: 143273 - RNA, 19 nt, Artificial Sequence
  Description of Artificial Sequence: Synthetic oligonucleotide
cuauacgaucaaagugaau

SEQ ID NO: 143274 - RNA, 19 nt, Artificial Sequence
  Description of Artificial Sequence: Synthetic oligonucleotide
cagucagacuacccaagau

SEQ ID NO: 143275 - RNA, 19 nt, Artificial Sequence
  Description of Artificial Sequence: Synthetic oligonucleotide
acgcuccaguccaaaugca

SEQ ID NO: 143276 - RNA, 19 nt, Artificial Sequence
  Description of Artificial Sequence: Synthetic oligonucleotide
ccgcaauaauccagucaac

SEQ ID NO: 143277 - RNA, 19 nt, Artificial Sequence
  Description of Artificial Sequence: Synthetic oligonucleotide
caccgcgguaagggcacgc

SEQ ID NO: 143278 - RNA, 19 nt, Artificial Sequence
  Description of Artificial Sequence: Synthetic oligonucleotide
acggugaguuugaguauuu

SEQ ID NO: 143279 - RNA, 19 nt, Artificial Sequence
  Description of Artificial Sequence: Synthetic oligonucleotide
agacgcucggaagcaggua

SEQ ID NO: 143280 - RNA, 19 nt, Artificial Sequence
  Description of Artificial Sequence: Synthetic oligonucleotide
caguagccaaggaggcuua

SEQ ID NO: 143281 - RNA, 19 nt, Artificial Sequence
  Description of Artificial Sequence: Synthetic oligonucleotide
acgccucggcuugcccggc

SEQ ID NO: 143282 - RNA, 19 nt, Artificial Sequence
  Description of Artificial Sequence: Synthetic oligonucleotide
gccaaucaccgcgcggggc

SEQ ID NO: 143283 - RNA, 19 nt, Artificial Sequence
  Description of Artificial Sequence: Synthetic oligonucleotide
ccacuuagcuugcaugugu

SEQ ID NO: 143284 - RNA, 19 nt, Artificial Sequence
  Description of Artificial Sequence: Synthetic oligonucleotide
guguuccugcguucacgua

SEQ ID NO: 143285 - RNA, 19 nt, Artificial Sequence
  Description of Artificial Sequence: Synthetic oligonucleotide
acgcgcugguagaggcggg

SEQ ID NO: 143286 - RNA, 19 nt, Artificial Sequence
  Description of Artificial Sequence: Synthetic oligonucleotide
cuguggcuacccggcucgc

SEQ ID NO: 143287 - RNA, 19 nt, Artificial Sequence
  Description of Artificial Sequence: Synthetic oligonucleotide
ggcacgccucggcuugccc

SEQ ID NO: 143288 - RNA, 19 nt, Artificial Sequence
  Description of Artificial Sequence: Synthetic oligonucleotide
gcgccaaagcaaagggaga

SEQ ID NO: 143289 - RNA, 19 nt, Artificial Sequence
  Description of Artificial Sequence: Synthetic oligonucleotide
gguagcgcauagaguacgu

SEQ ID NO: 143290 - RNA, 19 nt, Artificial Sequence
  Description of Artificial Sequence: Synthetic oligonucleotide
ucggcucgccaggcgcgac

SEQ ID NO: 143291 - RNA, 19 nt, Artificial Sequence
  Description of Artificial Sequence: Synthetic oligonucleotide
acgugccaggacagauagu

SEQ ID NO: 143292 - RNA, 19 nt, Artificial Sequence
  Description of Artificial Sequence: Synthetic oligonucleotide
ggguuccauacaaccaggu

SEQ ID NO: 143293 - RNA, 19 nt, Artificial Sequence
  Description of Artificial Sequence: Synthetic oligonucleotide
gcccgccucggggugcucg

SEQ ID NO: 143294 - RNA, 19 nt, Artificial Sequence
  Description of Artificial Sequence: Synthetic oligonucleotide
ggcucgccaggcgcgacuc

SEQ ID NO: 143295 - RNA, 19 nt, Artificial Sequence
  Description of Artificial Sequence: Synthetic oligonucleotide
gcucgccaggcgcgacucc

SEQ ID NO: 143296 - RNA, 19 nt, Artificial Sequence
  Description of Artificial Sequence: Synthetic oligonucleotide
cgccaaucaccgcgcgggg

SEQ ID NO: 143297 - RNA, 19 nt, Artificial Sequence
  Description of Artificial Sequence: Synthetic oligonucleotide
cucagacgcuggguuauuu

SEQ ID NO: 143298 - RNA, 19 nt, Artificial Sequence
  Description of Artificial Sequence: Synthetic oligonucleotide
gccgcccgccaaucaccgc

SEQ ID NO: 143299 - RNA, 19 nt, Artificial Sequence
  Description of Artificial Sequence: Synthetic oligonucleotide
cgguaagggcacgccucgg

SEQ ID NO: 143300 - RNA, 19 nt, Artificial Sequence
  Description of Artificial Sequence: Synthetic oligonucleotide
gccggucguccacgcgcug

SEQ ID NO: 143301 - RNA, 19 nt, Artificial Sequence
  Description of Artificial Sequence: Synthetic oligonucleotide
ccacugugacaucguaaau

SEQ ID NO: 143302 - RNA, 19 nt, Artificial Sequence
  Description of Artificial Sequence: Synthetic oligonucleotide
gcuacccggcucgccgcca

SEQ ID NO: 143303 - RNA, 19 nt, Artificial Sequence
  Description of Artificial Sequence: Synthetic oligonucleotide
cuccgccugccuugcccgu

SEQ ID NO: 143304 - RNA, 19 nt, Artificial Sequence
  Description of Artificial Sequence: Synthetic oligonucleotide
ggucguccacgcgcuggua

SEQ ID NO: 143305 - RNA, 19 nt, Artificial Sequence
  Description of Artificial Sequence: Synthetic oligonucleotide
ccgcgguaagggcacgccu

SEQ ID NO: 143306 - RNA, 19 nt, Artificial Sequence
  Description of Artificial Sequence: Synthetic oligonucleotide
ccgccucggggugcucgcc

SEQ ID NO: 143307 - RNA, 19 nt, Artificial Sequence
  Description of Artificial Sequence: Synthetic oligonucleotide
caccgccggccgcccgcca

SEQ ID NO: 143308 - RNA, 19 nt, Artificial Sequence
  Description of Artificial Sequence: Synthetic oligonucleotide
cggugaguuugaguauuuu

SEQ ID NO: 143309 - RNA, 19 nt, Artificial Sequence
  Description of Artificial Sequence: Synthetic oligonucleotide
gagauaugcagcuagaugg

SEQ ID NO: 143310 - RNA, 19 nt, Artificial Sequence
  Description of Artificial Sequence: Synthetic oligonucleotide
uauagaauaaauccguaag

SEQ ID NO: 143311 - RNA, 19 nt, Artificial Sequence
  Description of Artificial Sequence: Synthetic oligonucleotide
uucauuacgagugaaagag

SEQ ID NO: 143312 - RNA, 19 nt, Artificial Sequence
  Description of Artificial Sequence: Synthetic oligonucleotide
uuaauaaaggaaauaguaa

SEQ ID NO: 143313 - RNA, 19 nt, Artificial Sequence
  Description of Artificial Sequence: Synthetic oligonucleotide
uguauugacauugugggag

SEQ ID NO: 143314 - RNA, 19 nt, Artificial Sequence
  Description of Artificial Sequence: Synthetic oligonucleotide
uauauauuuagcagaccag

SEQ ID NO: 143315 - RNA, 19 nt, Artificial Sequence
  Description of Artificial Sequence: Synthetic oligonucleotide
aaauccguaaguuaauaaa

SEQ ID NO: 143316 - RNA, 19 nt, Artificial Sequence
  Description of Artificial Sequence: Synthetic oligonucleotide
auguuuuauucucccaucc

SEQ ID NO: 143317 - RNA, 19 nt, Artificial Sequence
  Description of Artificial Sequence: Synthetic oligonucleotide
aauccguaaguuaauaaag

SEQ ID NO: 143318 - RNA, 19 nt, Artificial Sequence
  Description of Artificial Sequence: Synthetic oligonucleotide
uggacgaugaacauguccu

SEQ ID NO: 143319 - RNA, 19 nt, Artificial Sequence
  Description of Artificial Sequence: Synthetic oligonucleotide
ugaucaauggucucuagcu

SEQ ID NO: 143320 - RNA, 19 nt, Artificial Sequence
  Description of Artificial Sequence: Synthetic oligonucleotide
cauuauguccuucucgucg

SEQ ID NO: 143321 - RNA, 19 nt, Artificial Sequence
  Description of Artificial Sequence: Synthetic oligonucleotide
uucaucucgauggagaugc

SEQ ID NO: 143322 - RNA, 19 nt, Artificial Sequence
  Description of Artificial Sequence: Synthetic oligonucleotide
cuugugaacacgccgauag

SEQ ID NO: 143323 - RNA, 19 nt, Artificial Sequence
  Description of Artificial Sequence: Synthetic oligonucleotide
auagaauaaauccguaagu

SEQ ID NO: 143324 - RNA, 19 nt, Artificial Sequence
  Description of Artificial Sequence: Synthetic oligonucleotide
ucaacuaugucuucauuac

SEQ ID NO: 143325 - RNA, 19 nt, Artificial Sequence
  Description of Artificial Sequence: Synthetic oligonucleotide
uuacgagugaaagagaggu

SEQ ID NO: 143326 - RNA, 19 nt, Artificial Sequence
  Description of Artificial Sequence: Synthetic oligonucleotide
gagcucuuugcauagauac

SEQ ID NO: 143327 - RNA, 19 nt, Artificial Sequence
  Description of Artificial Sequence: Synthetic oligonucleotide
uauucucccauccccaaag

SEQ ID NO: 143328 - RNA, 19 nt, Artificial Sequence
  Description of Artificial Sequence: Synthetic oligonucleotide
auuauguccuucucgucgg

SEQ ID NO: 143329 - RNA, 19 nt, Artificial Sequence
  Description of Artificial Sequence: Synthetic oligonucleotide
uuauagaauaaauccguaa

SEQ ID NO: 143330 - RNA, 19 nt, Artificial Sequence
  Description of Artificial Sequence: Synthetic oligonucleotide
ucgaccacacucaugauuc

SEQ ID NO: 143331 - RNA, 19 nt, Artificial Sequence
  Description of Artificial Sequence: Synthetic oligonucleotide
acgagugaaagagaggugg

SEQ ID NO: 143332 - RNA, 19 nt, Artificial Sequence
  Description of Artificial Sequence: Synthetic oligonucleotide
cacaucguagcccagacug

SEQ ID NO: 143333 - RNA, 19 nt, Artificial Sequence
  Description of Artificial Sequence: Synthetic oligonucleotide
ucggcagugaugaaguucu

SEQ ID NO: 143334 - RNA, 19 nt, Artificial Sequence
  Description of Artificial Sequence: Synthetic oligonucleotide
aacuaugucuucauuacga

SEQ ID NO: 143335 - RNA, 19 nt, Artificial Sequence
  Description of Artificial Sequence: Synthetic oligonucleotide
uccguaaguuaauaaagga

SEQ ID NO: 143336 - RNA, 19 nt, Artificial Sequence
  Description of Artificial Sequence: Synthetic oligonucleotide
uauauuuagcagaccagaa

SEQ ID NO: 143337 - RNA, 19 nt, Artificial Sequence
  Description of Artificial Sequence: Synthetic oligonucleotide
uggacaaggcacauggggc

SEQ ID NO: 143338 - RNA, 19 nt, Artificial Sequence
  Description of Artificial Sequence: Synthetic oligonucleotide
ucucuugacaugaagucaa

SEQ ID NO: 143339 - RNA, 19 nt, Artificial Sequence
  Description of Artificial Sequence: Synthetic oligonucleotide
acguucauagucuuccauc

SEQ ID NO: 143340 - RNA, 19 nt, Artificial Sequence
  Description of Artificial Sequence: Synthetic oligonucleotide
aucucuaagccucccuccc

SEQ ID NO: 143341 - RNA, 19 nt, Artificial Sequence
  Description of Artificial Sequence: Synthetic oligonucleotide
uuuagcagaccagaagugc

SEQ ID NO: 143342 - RNA, 19 nt, Artificial Sequence
  Description of Artificial Sequence: Synthetic oligonucleotide
cugcccaccgcaaacaagg

SEQ ID NO: 143343 - RNA, 19 nt, Artificial Sequence
  Description of Artificial Sequence: Synthetic oligonucleotide
auauauuuagcagaccaga

SEQ ID NO: 143344 - RNA, 19 nt, Artificial Sequence
  Description of Artificial Sequence: Synthetic oligonucleotide
uuagcagaccagaagugcu

SEQ ID NO: 143345 - RNA, 19 nt, Artificial Sequence
  Description of Artificial Sequence: Synthetic oligonucleotide
ugcaagacugagaaagaga

SEQ ID NO: 143346 - RNA, 19 nt, Artificial Sequence
  Description of Artificial Sequence: Synthetic oligonucleotide
uggucaugggcugagauca

SEQ ID NO: 143347 - RNA, 19 nt, Artificial Sequence
  Description of Artificial Sequence: Synthetic oligonucleotide
cuugaauuccucaggcccc

SEQ ID NO: 143348 - RNA, 19 nt, Artificial Sequence
  Description of Artificial Sequence: Synthetic oligonucleotide
agugaaagagagguggcgg

SEQ ID NO: 143349 - RNA, 19 nt, Artificial Sequence
  Description of Artificial Sequence: Synthetic oligonucleotide
ucguagcccagacugauga

SEQ ID NO: 143350 - RNA, 19 nt, Artificial Sequence
  Description of Artificial Sequence: Synthetic oligonucleotide
uaaauccguaaguuaauaa

SEQ ID NO: 143351 - RNA, 19 nt, Artificial Sequence
  Description of Artificial Sequence: Synthetic oligonucleotide
agaccagaagugcugaucu

SEQ ID NO: 143352 - RNA, 19 nt, Artificial Sequence
  Description of Artificial Sequence: Synthetic oligonucleotide
cauccacucacuaccaggc

SEQ ID NO: 143353 - RNA, 19 nt, Artificial Sequence
  Description of Artificial Sequence: Synthetic oligonucleotide
cagaauaaacucaaaggga

SEQ ID NO: 143354 - RNA, 19 nt, Artificial Sequence
  Description of Artificial Sequence: Synthetic oligonucleotide
cguguauugacauuguggg

SEQ ID NO: 143355 - RNA, 19 nt, Artificial Sequence
  Description of Artificial Sequence: Synthetic oligonucleotide
caaagggcgguuuauccag

SEQ ID NO: 143356 - RNA, 19 nt, Artificial Sequence
  Description of Artificial Sequence: Synthetic oligonucleotide
gaaaggugucucuaggaca

SEQ ID NO: 143357 - RNA, 19 nt, Artificial Sequence
  Description of Artificial Sequence: Synthetic oligonucleotide
gaucaauggucucuagcug

SEQ ID NO: 143358 - RNA, 19 nt, Artificial Sequence
  Description of Artificial Sequence: Synthetic oligonucleotide
auccguaaguuaauaaagg

SEQ ID NO: 143359 - RNA, 19 nt, Artificial Sequence
  Description of Artificial Sequence: Synthetic oligonucleotide
ucguucuccacaucguagc

SEQ ID NO: 143360 - RNA, 19 nt, Artificial Sequence
  Description of Artificial Sequence: Synthetic oligonucleotide
gaugugagaggcccugaag

SEQ ID NO: 143361 - RNA, 19 nt, Artificial Sequence
  Description of Artificial Sequence: Synthetic oligonucleotide
cuugucgccugccaggacc

SEQ ID NO: 143362 - RNA, 19 nt, Artificial Sequence
  Description of Artificial Sequence: Synthetic oligonucleotide
cacugaaucaacuaugucu

SEQ ID NO: 143363 - RNA, 19 nt, Artificial Sequence
  Description of Artificial Sequence: Synthetic oligonucleotide
agggguugcugccugacag

SEQ ID NO: 143364 - RNA, 19 nt, Artificial Sequence
  Description of Artificial Sequence: Synthetic oligonucleotide
ugaucucuaagccucccuc

SEQ ID NO: 143365 - RNA, 19 nt, Artificial Sequence
  Description of Artificial Sequence: Synthetic oligonucleotide
aguauggccucacgcuccc

SEQ ID NO: 143366 - RNA, 19 nt, Artificial Sequence
  Description of Artificial Sequence: Synthetic oligonucleotide
cugaucaauggucucuagc

SEQ ID NO: 143367 - RNA, 19 nt, Artificial Sequence
  Description of Artificial Sequence: Synthetic oligonucleotide
accgcaaacaaggggaggg

SEQ ID NO: 143368 - RNA, 19 nt, Artificial Sequence
  Description of Artificial Sequence: Synthetic oligonucleotide
uggaaggucacgaggccgc

SEQ ID NO: 143369 - RNA, 19 nt, Artificial Sequence
  Description of Artificial Sequence: Synthetic oligonucleotide
cacuccagaagaucacugg

SEQ ID NO: 143370 - RNA, 19 nt, Artificial Sequence
  Description of Artificial Sequence: Synthetic oligonucleotide
caacuaugucuucauuacg

SEQ ID NO: 143371 - RNA, 19 nt, Artificial Sequence
  Description of Artificial Sequence: Synthetic oligonucleotide
guuggggucgaccacacuc

SEQ ID NO: 143372 - RNA, 19 nt, Artificial Sequence
  Description of Artificial Sequence: Synthetic oligonucleotide
gguuuauccagaaaccaag

SEQ ID NO: 143373 - RNA, 19 nt, Artificial Sequence
  Description of Artificial Sequence: Synthetic oligonucleotide
ucgugcuugcggaucagag

SEQ ID NO: 143374 - RNA, 19 nt, Artificial Sequence
  Description of Artificial Sequence: Synthetic oligonucleotide
uccucggcagugaugaagu

SEQ ID NO: 143375 - RNA, 19 nt, Artificial Sequence
  Description of Artificial Sequence: Synthetic oligonucleotide
ucauuacgagugaaagaga

SEQ ID NO: 143376 - RNA, 19 nt, Artificial Sequence
  Description of Artificial Sequence: Synthetic oligonucleotide
ucucgauggagaugcgucc

SEQ ID NO: 143377 - RNA, 19 nt, Artificial Sequence
  Description of Artificial Sequence: Synthetic oligonucleotide
ugugaacacgccgauaguc

SEQ ID NO: 143378 - RNA, 19 nt, Artificial Sequence
  Description of Artificial Sequence: Synthetic oligonucleotide
uugcauagauacagaguca

SEQ ID NO: 143379 - RNA, 19 nt, Artificial Sequence
  Description of Artificial Sequence: Synthetic oligonucleotide
ugcagcuagauggauauau

SEQ ID NO: 143380 - RNA, 19 nt, Artificial Sequence
  Description of Artificial Sequence: Synthetic oligonucleotide
aacacgccgauagucucgg

SEQ ID NO: 143381 - RNA, 19 nt, Artificial Sequence
  Description of Artificial Sequence: Synthetic oligonucleotide
ccuugaauuccucaggccc

SEQ ID NO: 143382 - RNA, 19 nt, Artificial Sequence
  Description of Artificial Sequence: Synthetic oligonucleotide
auuacgagugaaagagagg

SEQ ID NO: 143383 - RNA, 19 nt, Artificial Sequence
  Description of Artificial Sequence: Synthetic oligonucleotide
guggacgaugaacaugucc

SEQ ID NO: 143384 - RNA, 19 nt, Artificial Sequence
  Description of Artificial Sequence: Synthetic oligonucleotide
ugggagucauaguagucca

SEQ ID NO: 143385 - RNA, 19 nt, Artificial Sequence
  Description of Artificial Sequence: Synthetic oligonucleotide
cucucggcgauccuuuggg

SEQ ID NO: 143386 - RNA, 19 nt, Artificial Sequence
  Description of Artificial Sequence: Synthetic oligonucleotide
gucggauccacuccagaag

SEQ ID NO: 143387 - RNA, 19 nt, Artificial Sequence
  Description of Artificial Sequence: Synthetic oligonucleotide
ggacacauaggucauuaug

SEQ ID NO: 143388 - RNA, 19 nt, Artificial Sequence
  Description of Artificial Sequence: Synthetic oligonucleotide
ugggcaauugcagcaaucu

SEQ ID NO: 143389 - RNA, 19 nt, Artificial Sequence
  Description of Artificial Sequence: Synthetic oligonucleotide
ggagauaugcagcuagaug

SEQ ID NO: 143390 - RNA, 19 nt, Artificial Sequence
  Description of Artificial Sequence: Synthetic oligonucleotide
ugcggauuucauucagcag

SEQ ID NO: 143391 - RNA, 19 nt, Artificial Sequence
  Description of Artificial Sequence: Synthetic oligonucleotide
ccguguauugacauugugg

SEQ ID NO: 143392 - RNA, 19 nt, Artificial Sequence
  Description of Artificial Sequence: Synthetic oligonucleotide
uuuauucucccauccccaa

SEQ ID NO: 143393 - RNA, 19 nt, Artificial Sequence
  Description of Artificial Sequence: Synthetic oligonucleotide
cauugugggagucauagua

SEQ ID NO: 143394 - RNA, 19 nt, Artificial Sequence
  Description of Artificial Sequence: Synthetic oligonucleotide
uacgagugaaagagaggug

SEQ ID NO: 143395 - RNA, 19 nt, Artificial Sequence
  Description of Artificial Sequence: Synthetic oligonucleotide
ugcauggucccgcuuuggc

SEQ ID NO: 143396 - RNA, 19 nt, Artificial Sequence
  Description of Artificial Sequence: Synthetic oligonucleotide
cuuaggaaaucugagaccu

SEQ ID NO: 143397 - RNA, 19 nt, Artificial Sequence
  Description of Artificial Sequence: Synthetic oligonucleotide
caugguccuugucaaagug

SEQ ID NO: 143398 - RNA, 19 nt, Artificial Sequence
  Description of Artificial Sequence: Synthetic oligonucleotide
auuuagcagaccagaagug

SEQ ID NO: 143399 - RNA, 19 nt, Artificial Sequence
  Description of Artificial Sequence: Synthetic oligonucleotide
ucucuaagccucccucccc

SEQ ID NO: 143400 - RNA, 19 nt, Artificial Sequence
  Description of Artificial Sequence: Synthetic oligonucleotide
cucggcgauccuuugggcc

SEQ ID NO: 143401 - RNA, 19 nt, Artificial Sequence
  Description of Artificial Sequence: Synthetic oligonucleotide
ugaacacgccgauagucuc

SEQ ID NO: 143402 - RNA, 19 nt, Artificial Sequence
  Description of Artificial Sequence: Synthetic oligonucleotide
gaacacgccgauagucucg

SEQ ID NO: 143403 - RNA, 19 nt, Artificial Sequence
  Description of Artificial Sequence: Synthetic oligonucleotide
cuuggaaggucacgaggcc

SEQ ID NO: 143404 - RNA, 19 nt, Artificial Sequence
  Description of Artificial Sequence: Synthetic oligonucleotide
aggcaaugaccugaucggc

SEQ ID NO: 143405 - RNA, 19 nt, Artificial Sequence
  Description of Artificial Sequence: Synthetic oligonucleotide
ggaaaggugucucuaggac

SEQ ID NO: 143406 - RNA, 19 nt, Artificial Sequence
  Description of Artificial Sequence: Synthetic oligonucleotide
uucggccugcuccaggugu

SEQ ID NO: 143407 - RNA, 19 nt, Artificial Sequence
  Description of Artificial Sequence: Synthetic oligonucleotide
gggcgguuuauccagaaac

SEQ ID NO: 143408 - RNA, 19 nt, Artificial Sequence
  Description of Artificial Sequence: Synthetic oligonucleotide
accuugcagauccgguugg

SEQ ID NO: 143409 - RNA, 19 nt, Artificial Sequence
  Description of Artificial Sequence: Synthetic oligonucleotide
gggucgaccacacucauga

SEQ ID NO: 143410 - RNA, 19 nt, Artificial Sequence
  Description of Artificial Sequence: Synthetic oligonucleotide
cguaaguuaauaaaggaaa

SEQ ID NO: 143411 - RNA, 19 nt, Artificial Sequence
  Description of Artificial Sequence: Synthetic oligonucleotide
ucggcgauccuuugggccu

SEQ ID NO: 143412 - RNA, 19 nt, Artificial Sequence
  Description of Artificial Sequence: Synthetic oligonucleotide
ucccggugcuucagcaugg

SEQ ID NO: 143413 - RNA, 19 nt, Artificial Sequence
  Description of Artificial Sequence: Synthetic oligonucleotide
agcaucgcccugccggucg

SEQ ID NO: 143414 - RNA, 19 nt, Artificial Sequence
  Description of Artificial Sequence: Synthetic oligonucleotide
aggagcggcaucagggccc

SEQ ID NO: 143415 - RNA, 19 nt, Artificial Sequence
  Description of Artificial Sequence: Synthetic oligonucleotide
agaugcguccgaucuccuc

SEQ ID NO: 143416 - RNA, 19 nt, Artificial Sequence
  Description of Artificial Sequence: Synthetic oligonucleotide
agucugaccagggugucug

SEQ ID NO: 143417 - RNA, 19 nt, Artificial Sequence
  Description of Artificial Sequence: Synthetic oligonucleotide
ggcggagauaugcagcuag

SEQ ID NO: 143418 - RNA, 19 nt, Artificial Sequence
  Description of Artificial Sequence: Synthetic oligonucleotide
gucgagucgcuccagccug

SEQ ID NO: 143419 - RNA, 19 nt, Artificial Sequence
  Description of Artificial Sequence: Synthetic oligonucleotide
auaaauccguaaguuaaua

SEQ ID NO: 143420 - RNA, 19 nt, Artificial Sequence
  Description of Artificial Sequence: Synthetic oligonucleotide
uggucgagucgcuccagcc

SEQ ID NO: 143421 - RNA, 19 nt, Artificial Sequence
  Description of Artificial Sequence: Synthetic oligonucleotide
ggggcuugugaacacgccg

SEQ ID NO: 143422 - RNA, 19 nt, Artificial Sequence
  Description of Artificial Sequence: Synthetic oligonucleotide
cuagauggauauauauuua

SEQ ID NO: 143423 - RNA, 19 nt, Artificial Sequence
  Description of Artificial Sequence: Synthetic oligonucleotide
cugguagggcgccaugcgg

SEQ ID NO: 143424 - RNA, 19 nt, Artificial Sequence
  Description of Artificial Sequence: Synthetic oligonucleotide
auaggucauuauguccuuc

SEQ ID NO: 143425 - RNA, 19 nt, Artificial Sequence
  Description of Artificial Sequence: Synthetic oligonucleotide
cugcggauuucauucagca

SEQ ID NO: 143426 - RNA, 19 nt, Artificial Sequence
  Description of Artificial Sequence: Synthetic oligonucleotide
accguguauugacauugug

SEQ ID NO: 143427 - RNA, 19 nt, Artificial Sequence
  Description of Artificial Sequence: Synthetic oligonucleotide
auggucccgcuuuggcacc

SEQ ID NO: 143428 - RNA, 19 nt, Artificial Sequence
  Description of Artificial Sequence: Synthetic oligonucleotide
agugcauggucccgcuuug

SEQ ID NO: 143429 - RNA, 19 nt, Artificial Sequence
  Description of Artificial Sequence: Synthetic oligonucleotide
cuuugggccuccuugugga

SEQ ID NO: 143430 - RNA, 19 nt, Artificial Sequence
  Description of Artificial Sequence: Synthetic oligonucleotide
ccuuaggaaaucugagacc

SEQ ID NO: 143431 - RNA, 19 nt, Artificial Sequence
  Description of Artificial Sequence: Synthetic oligonucleotide
gguugaacucagcaucgcc

SEQ ID NO: 143432 - RNA, 19 nt, Artificial Sequence
  Description of Artificial Sequence: Synthetic oligonucleotide
ucaucucgauggagaugcg

SEQ ID NO: 143433 - RNA, 19 nt, Artificial Sequence
  Description of Artificial Sequence: Synthetic oligonucleotide
gaggccgcuaugguugggg

SEQ ID NO: 143434 - RNA, 19 nt, Artificial Sequence
  Description of Artificial Sequence: Synthetic oligonucleotide
uugugaacacgccgauagu

SEQ ID NO: 143435 - RNA, 19 nt, Artificial Sequence
  Description of Artificial Sequence: Synthetic oligonucleotide
gcuuggaaggucacgaggc

SEQ ID NO: 143436 - RNA, 19 nt, Artificial Sequence
  Description of Artificial Sequence: Synthetic oligonucleotide
ggcgaugcaguacucggcc

SEQ ID NO: 143437 - RNA, 19 nt, Artificial Sequence
  Description of Artificial Sequence: Synthetic oligonucleotide
gaugcccggaauucuugca

SEQ ID NO: 143438 - RNA, 19 nt, Artificial Sequence
  Description of Artificial Sequence: Synthetic oligonucleotide
ugcggaucagagcuuugau

SEQ ID NO: 143439 - RNA, 19 nt, Artificial Sequence
  Description of Artificial Sequence: Synthetic oligonucleotide
uguguucacgaucguccuc

SEQ ID NO: 143440 - RNA, 19 nt, Artificial Sequence
  Description of Artificial Sequence: Synthetic oligonucleotide
augcgggcgaugcaguacu

SEQ ID NO: 143441 - RNA, 19 nt, Artificial Sequence
  Description of Artificial Sequence: Synthetic oligonucleotide
uugaauuccucaggcccca

SEQ ID NO: 143442 - RNA, 19 nt, Artificial Sequence
  Description of Artificial Sequence: Synthetic oligonucleotide
ugugggucagggagcccag

SEQ ID NO: 143443 - RNA, 19 nt, Artificial Sequence
  Description of Artificial Sequence: Synthetic oligonucleotide
cuaccaggcaggcaggcca

SEQ ID NO: 143444 - RNA, 19 nt, Artificial Sequence
  Description of Artificial Sequence: Synthetic oligonucleotide
uugcggaucagagcuuuga

SEQ ID NO: 143445 - RNA, 19 nt, Artificial Sequence
  Description of Artificial Sequence: Synthetic oligonucleotide
ucgauggagaugcguccga

SEQ ID NO: 143446 - RNA, 19 nt, Artificial Sequence
  Description of Artificial Sequence: Synthetic oligonucleotide
cuuggcaucucgggugagg

SEQ ID NO: 143447 - RNA, 19 nt, Artificial Sequence
  Description of Artificial Sequence: Synthetic oligonucleotide
aagggcgguuuauccagaa

SEQ ID NO: 143448 - RNA, 19 nt, Artificial Sequence
  Description of Artificial Sequence: Synthetic oligonucleotide
cuaggacacagguauauau

SEQ ID NO: 143449 - RNA, 19 nt, Artificial Sequence
  Description of Artificial Sequence: Synthetic oligonucleotide
cuucugaggcacgcggucc

SEQ ID NO: 143450 - RNA, 19 nt, Artificial Sequence
  Description of Artificial Sequence: Synthetic oligonucleotide
gaaacccauccacucacua

SEQ ID NO: 143451 - RNA, 19 nt, Artificial Sequence
  Description of Artificial Sequence: Synthetic oligonucleotide
ggacuuguagucgagggca

SEQ ID NO: 143452 - RNA, 19 nt, Artificial Sequence
  Description of Artificial Sequence: Synthetic oligonucleotide
guguauugacauuguggga

SEQ ID NO: 143453 - RNA, 19 nt, Artificial Sequence
  Description of Artificial Sequence: Synthetic oligonucleotide
uuguagucgagggcaccag

SEQ ID NO: 143454 - RNA, 19 nt, Artificial Sequence
  Description of Artificial Sequence: Synthetic oligonucleotide
ucucggcgauccuuugggc

SEQ ID NO: 143455 - RNA, 19 nt, Artificial Sequence
  Description of Artificial Sequence: Synthetic oligonucleotide
cucucuugacaugaaguca

SEQ ID NO: 143456 - RNA, 19 nt, Artificial Sequence
  Description of Artificial Sequence: Synthetic oligonucleotide
ccggucguucuccacaucg

SEQ ID NO: 143457 - RNA, 19 nt, Artificial Sequence
  Description of Artificial Sequence: Synthetic oligonucleotide
ugccuagccccuuccugcc

SEQ ID NO: 143458 - RNA, 19 nt, Artificial Sequence
  Description of Artificial Sequence: Synthetic oligonucleotide
ucgccugccaggaccuuga

SEQ ID NO: 143459 - RNA, 19 nt, Artificial Sequence
  Description of Artificial Sequence: Synthetic oligonucleotide
gcaccguguauugacauug

SEQ ID NO: 143460 - RNA, 19 nt, Artificial Sequence
  Description of Artificial Sequence: Synthetic oligonucleotide
cacucauacugcuucaggu

SEQ ID NO: 143461 - RNA, 19 nt, Artificial Sequence
  Description of Artificial Sequence: Synthetic oligonucleotide
agauccgguuggcagcagu

SEQ ID NO: 143462 - RNA, 19 nt, Artificial Sequence
  Description of Artificial Sequence: Synthetic oligonucleotide
ggucacgaggccgcuaugg

SEQ ID NO: 143463 - RNA, 19 nt, Artificial Sequence
  Description of Artificial Sequence: Synthetic oligonucleotide
cucggcagugaugaaguuc

SEQ ID NO: 143464 - RNA, 19 nt, Artificial Sequence
  Description of Artificial Sequence: Synthetic oligonucleotide
uauugacauugugggaguc

SEQ ID NO: 143465 - RNA, 19 nt, Artificial Sequence
  Description of Artificial Sequence: Synthetic oligonucleotide
ggcgguuuauccagaaacc

SEQ ID NO: 143466 - RNA, 19 nt, Artificial Sequence
  Description of Artificial Sequence: Synthetic oligonucleotide
gcggaucagagcuuugaug

SEQ ID NO: 143467 - RNA, 19 nt, Artificial Sequence
  Description of Artificial Sequence: Synthetic oligonucleotide
uggcaccguguauugacau

SEQ ID NO: 143468 - RNA, 19 nt, Artificial Sequence
  Description of Artificial Sequence: Synthetic oligonucleotide
cucgaaggccucgugcuug

SEQ ID NO: 143469 - RNA, 19 nt, Artificial Sequence
  Description of Artificial Sequence: Synthetic oligonucleotide
gguguggacgaugaacaug

SEQ ID NO: 143470 - RNA, 19 nt, Artificial Sequence
  Description of Artificial Sequence: Synthetic oligonucleotide
ccggaauucuugcaucugc

SEQ ID NO: 143471 - RNA, 19 nt, Artificial Sequence
  Description of Artificial Sequence: Synthetic oligonucleotide
ccguaaguuaauaaaggaa

SEQ ID NO: 143472 - RNA, 19 nt, Artificial Sequence
  Description of Artificial Sequence: Synthetic oligonucleotide
cagaccagaagugcugauc

SEQ ID NO: 143473 - RNA, 19 nt, Artificial Sequence
  Description of Artificial Sequence: Synthetic oligonucleotide
cucaaagggagaaacccau

SEQ ID NO: 143474 - RNA, 19 nt, Artificial Sequence
  Description of Artificial Sequence: Synthetic oligonucleotide
augauucgguugaacucag

SEQ ID NO: 143475 - RNA, 19 nt, Artificial Sequence
  Description of Artificial Sequence: Synthetic oligonucleotide
uggcaaacugccggcgcag

SEQ ID NO: 143476 - RNA, 19 nt, Artificial Sequence
  Description of Artificial Sequence: Synthetic oligonucleotide
auaugcagcuagauggaua

SEQ ID NO: 143477 - RNA, 19 nt, Artificial Sequence
  Description of Artificial Sequence: Synthetic oligonucleotide
ucgagucgcuccagccugc

SEQ ID NO: 143478 - RNA, 19 nt, Artificial Sequence
  Description of Artificial Sequence: Synthetic oligonucleotide
guagucgagggcaccagga

SEQ ID NO: 143479 - RNA, 19 nt, Artificial Sequence
  Description of Artificial Sequence: Synthetic oligonucleotide
cuuguagucgagggcacca

SEQ ID NO: 143480 - RNA, 19 nt, Artificial Sequence
  Description of Artificial Sequence: Synthetic oligonucleotide
cccaccgcaaacaagggga

SEQ ID NO: 143481 - RNA, 19 nt, Artificial Sequence
  Description of Artificial Sequence: Synthetic oligonucleotide
ggaugcccggaauucuugc

SEQ ID NO: 143482 - RNA, 19 nt, Artificial Sequence
  Description of Artificial Sequence: Synthetic oligonucleotide
gagaccccugcccaccgca

SEQ ID NO: 143483 - RNA, 19 nt, Artificial Sequence
  Description of Artificial Sequence: Synthetic oligonucleotide
aaagggcgguuuauccaga

SEQ ID NO: 143484 - RNA, 19 nt, Artificial Sequence
  Description of Artificial Sequence: Synthetic oligonucleotide
guauugacauugugggagu

SEQ ID NO: 143485 - RNA, 19 nt, Artificial Sequence
  Description of Artificial Sequence: Synthetic oligonucleotide
cauagucccggugcuucag

SEQ ID NO: 143486 - RNA, 19 nt, Artificial Sequence
  Description of Artificial Sequence: Synthetic oligonucleotide
agguggucgagucgcucca

SEQ ID NO: 143487 - RNA, 19 nt, Artificial Sequence
  Description of Artificial Sequence: Synthetic oligonucleotide
agaggggccacuggcgucu

SEQ ID NO: 143488 - RNA, 19 nt, Artificial Sequence
  Description of Artificial Sequence: Synthetic oligonucleotide
acucgguccuggugcgcgg

SEQ ID NO: 143489 - RNA, 19 nt, Artificial Sequence
  Description of Artificial Sequence: Synthetic oligonucleotide
aguacucggccuggucggg

SEQ ID NO: 143490 - RNA, 19 nt, Artificial Sequence
  Description of Artificial Sequence: Synthetic oligonucleotide
gacuuguagucgagggcac

SEQ ID NO: 143491 - RNA, 19 nt, Artificial Sequence
  Description of Artificial Sequence: Synthetic oligonucleotide
gaucaggcccucaaucucu

SEQ ID NO: 143492 - RNA, 19 nt, Artificial Sequence
  Description of Artificial Sequence: Synthetic oligonucleotide
cuugcggaucagagcuuug

SEQ ID NO: 143493 - RNA, 19 nt, Artificial Sequence
  Description of Artificial Sequence: Synthetic oligonucleotide
augcguccgaucuccucca

SEQ ID NO: 143494 - RNA, 19 nt, Artificial Sequence
  Description of Artificial Sequence: Synthetic oligonucleotide
gggcacugaaucaacuaug

SEQ ID NO: 143495 - RNA, 19 nt, Artificial Sequence
  Description of Artificial Sequence: Synthetic oligonucleotide
guggucgagucgcuccagc

SEQ ID NO: 143496 - RNA, 19 nt, Artificial Sequence
  Description of Artificial Sequence: Synthetic oligonucleotide
uguggacgaugaacauguc

SEQ ID NO: 143497 - RNA, 19 nt, Artificial Sequence
  Description of Artificial Sequence: Synthetic oligonucleotide
caugcgggcgaugcaguac

SEQ ID NO: 143498 - RNA, 19 nt, Artificial Sequence
  Description of Artificial Sequence: Synthetic oligonucleotide
ggcaaaggaggggacccgg

SEQ ID NO: 143499 - RNA, 19 nt, Artificial Sequence
  Description of Artificial Sequence: Synthetic oligonucleotide
agcaccuugcagauccggu

SEQ ID NO: 143500 - RNA, 19 nt, Artificial Sequence
  Description of Artificial Sequence: Synthetic oligonucleotide
cacucacuaccaggcaggc

SEQ ID NO: 143501 - RNA, 19 nt, Artificial Sequence
  Description of Artificial Sequence: Synthetic oligonucleotide
ugccggucguucuccacau

SEQ ID NO: 143502 - RNA, 19 nt, Artificial Sequence
  Description of Artificial Sequence: Synthetic oligonucleotide
caccgcaaacaaggggagg

SEQ ID NO: 143503 - RNA, 19 nt, Artificial Sequence
  Description of Artificial Sequence: Synthetic oligonucleotide
uggggucgaccacacucau

SEQ ID NO: 143504 - RNA, 19 nt, Artificial Sequence
  Description of Artificial Sequence: Synthetic oligonucleotide
cugugggucagggagccca

SEQ ID NO: 143505 - RNA, 19 nt, Artificial Sequence
  Description of Artificial Sequence: Synthetic oligonucleotide
gcugaucaauggucucuag

SEQ ID NO: 143506 - RNA, 19 nt, Artificial Sequence
  Description of Artificial Sequence: Synthetic oligonucleotide
gcuaugguuggggucgacc

SEQ ID NO: 143507 - RNA, 19 nt, Artificial Sequence
  Description of Artificial Sequence: Synthetic oligonucleotide
gagugcauggucccgcuuu

SEQ ID NO: 143508 - RNA, 19 nt, Artificial Sequence
  Description of Artificial Sequence: Synthetic oligonucleotide
cacgccgauagucucggaa

SEQ ID NO: 143509 - RNA, 19 nt, Artificial Sequence
  Description of Artificial Sequence: Synthetic oligonucleotide
cugaucggcugugucugug

SEQ ID NO: 143510 - RNA, 19 nt, Artificial Sequence
  Description of Artificial Sequence: Synthetic oligonucleotide
ugacggugguguagggguu

SEQ ID NO: 143511 - RNA, 19 nt, Artificial Sequence
  Description of Artificial Sequence: Synthetic oligonucleotide
agcugaucaauggucucua

SEQ ID NO: 143512 - RNA, 19 nt, Artificial Sequence
  Description of Artificial Sequence: Synthetic oligonucleotide
uucuggcaccguguauuga

SEQ ID NO: 143513 - RNA, 19 nt, Artificial Sequence
  Description of Artificial Sequence: Synthetic oligonucleotide
agaaacccauccacucacu

SEQ ID NO: 143514 - RNA, 19 nt, Artificial Sequence
  Description of Artificial Sequence: Synthetic oligonucleotide
ccuucugcgcuccugagaa

SEQ ID NO: 143515 - RNA, 19 nt, Artificial Sequence
  Description of Artificial Sequence: Synthetic oligonucleotide
cacuaccaggcaggcaggc

SEQ ID NO: 143516 - RNA, 19 nt, Artificial Sequence
  Description of Artificial Sequence: Synthetic oligonucleotide
cgagugaaagagagguggc

SEQ ID NO: 143517 - RNA, 19 nt, Artificial Sequence
  Description of Artificial Sequence: Synthetic oligonucleotide
agggcgguuuauccagaaa

SEQ ID NO: 143518 - RNA, 19 nt, Artificial Sequence
  Description of Artificial Sequence: Synthetic oligonucleotide
guacucggccuggucgggg

SEQ ID NO: 143519 - RNA, 19 nt, Artificial Sequence
  Description of Artificial Sequence: Synthetic oligonucleotide
acaucguagcccagacuga

SEQ ID NO: 143520 - RNA, 19 nt, Artificial Sequence
  Description of Artificial Sequence: Synthetic oligonucleotide
gcgguuuauccagaaacca

SEQ ID NO: 143521 - RNA, 19 nt, Artificial Sequence
  Description of Artificial Sequence: Synthetic oligonucleotide
agagcucuuugcauagaua

SEQ ID NO: 143522 - RNA, 19 nt, Artificial Sequence
  Description of Artificial Sequence: Synthetic oligonucleotide
ucgggccgggcuguguuca

SEQ ID NO: 143523 - RNA, 19 nt, Artificial Sequence
  Description of Artificial Sequence: Synthetic oligonucleotide
gcauggucccgcuuuggca

SEQ ID NO: 143524 - RNA, 19 nt, Artificial Sequence
  Description of Artificial Sequence: Synthetic oligonucleotide
gggguugcugccugacagc

SEQ ID NO: 143525 - RNA, 19 nt, Artificial Sequence
  Description of Artificial Sequence: Synthetic oligonucleotide
gucgaccacacucaugauu

SEQ ID NO: 143526 - RNA, 19 nt, Artificial Sequence
  Description of Artificial Sequence: Synthetic oligonucleotide
gaauuccucaggccccagu

SEQ ID NO: 143527 - RNA, 19 nt, Artificial Sequence
  Description of Artificial Sequence: Synthetic oligonucleotide
aucguagcccagacugaug

SEQ ID NO: 143528 - RNA, 19 nt, Artificial Sequence
  Description of Artificial Sequence: Synthetic oligonucleotide
gugcauggucccgcuuugg

SEQ ID NO: 143529 - RNA, 19 nt, Artificial Sequence
  Description of Artificial Sequence: Synthetic oligonucleotide
ccuggacaaggcacauggg

SEQ ID NO: 143530 - RNA, 19 nt, Artificial Sequence
  Description of Artificial Sequence: Synthetic oligonucleotide
aggggacccggguuuggaa

SEQ ID NO: 143531 - RNA, 19 nt, Artificial Sequence
  Description of Artificial Sequence: Synthetic oligonucleotide
gcaaaggaggggacccggg

SEQ ID NO: 143532 - RNA, 19 nt, Artificial Sequence
  Description of Artificial Sequence: Synthetic oligonucleotide
ggcgccaugcgggcgaugc

SEQ ID NO: 143533 - RNA, 19 nt, Artificial Sequence
  Description of Artificial Sequence: Synthetic oligonucleotide
cgggcgaugcaguacucgg

SEQ ID NO: 143534 - RNA, 19 nt, Artificial Sequence
  Description of Artificial Sequence: Synthetic oligonucleotide
caagguggucgagucgcuc

SEQ ID NO: 143535 - RNA, 19 nt, Artificial Sequence
  Description of Artificial Sequence: Synthetic oligonucleotide
cugccggcgcaggugcucg

SEQ ID NO: 143536 - RNA, 19 nt, Artificial Sequence
  Description of Artificial Sequence: Synthetic oligonucleotide
cagaggggccacuggcguc

SEQ ID NO: 143537 - RNA, 19 nt, Artificial Sequence
  Description of Artificial Sequence: Synthetic oligonucleotide
ccaccgcaaacaaggggag

SEQ ID NO: 143538 - RNA, 19 nt, Artificial Sequence
  Description of Artificial Sequence: Synthetic oligonucleotide
gcaggccgguugcugagcc

SEQ ID NO: 143539 - RNA, 19 nt, Artificial Sequence
  Description of Artificial Sequence: Synthetic oligonucleotide
gucgccugccaggaccuug

SEQ ID NO: 143540 - RNA, 19 nt, Artificial Sequence
  Description of Artificial Sequence: Synthetic oligonucleotide
aggugcucguuggacugcu

SEQ ID NO: 143541 - RNA, 19 nt, Artificial Sequence
  Description of Artificial Sequence: Synthetic oligonucleotide
ugcgggcgaugcaguacuc

SEQ ID NO: 143542 - RNA, 19 nt, Artificial Sequence
  Description of Artificial Sequence: Synthetic oligonucleotide
ggacccggguuuggaaagg

SEQ ID NO: 143543 - RNA, 19 nt, Artificial Sequence
  Description of Artificial Sequence: Synthetic oligonucleotide
gucacgaggccgcuauggu

SEQ ID NO: 143544 - RNA, 19 nt, Artificial Sequence
  Description of Artificial Sequence: Synthetic oligonucleotide
ugcgggcgauggugguaag

SEQ ID NO: 143545 - RNA, 19 nt, Artificial Sequence
  Description of Artificial Sequence: Synthetic oligonucleotide
gcgggcgaugcaguacucg

SEQ ID NO: 143546 - RNA, 19 nt, Artificial Sequence
  Description of Artificial Sequence: Synthetic oligonucleotide
acccggguuuggaaaggug

SEQ ID NO: 143547 - RNA, 19 nt, Artificial Sequence
  Description of Artificial Sequence: Synthetic oligonucleotide
ccgacaugguccuugucaa

SEQ ID NO: 143548 - RNA, 19 nt, Artificial Sequence
  Description of Artificial Sequence: Synthetic oligonucleotide
ggggacccggguuuggaaa

SEQ ID NO: 143549 - RNA, 19 nt, Artificial Sequence
  Description of Artificial Sequence: Synthetic oligonucleotide
ccuagccccuuccugccug

SEQ ID NO: 143550 - RNA, 19 nt, Artificial Sequence
  Description of Artificial Sequence: Synthetic oligonucleotide
ugcguccgaucuccuccau

SEQ ID NO: 143551 - RNA, 19 nt, Artificial Sequence
  Description of Artificial Sequence: Synthetic oligonucleotide
ccgagggcaugaaggcagg

SEQ ID NO: 143552 - RNA, 19 nt, Artificial Sequence
  Description of Artificial Sequence: Synthetic oligonucleotide
gggcgaugcaguacucggc

SEQ ID NO: 143553 - RNA, 19 nt, Artificial Sequence
  Description of Artificial Sequence: Synthetic oligonucleotide
cuccgagggcaugaaggca

SEQ ID NO: 143554 - RNA, 19 nt, Artificial Sequence
  Description of Artificial Sequence: Synthetic oligonucleotide
cuucucgucgggccgggcu

SEQ ID NO: 143555 - RNA, 19 nt, Artificial Sequence
  Description of Artificial Sequence: Synthetic oligonucleotide
uagcccuuuucggccugcu

SEQ ID NO: 143556 - RNA, 19 nt, Artificial Sequence
  Description of Artificial Sequence: Synthetic oligonucleotide
gucugaccagggugucuga

SEQ ID NO: 143557 - RNA, 19 nt, Artificial Sequence
  Description of Artificial Sequence: Synthetic oligonucleotide
gggagucugaccagggugu

SEQ ID NO: 143558 - RNA, 19 nt, Artificial Sequence
  Description of Artificial Sequence: Synthetic oligonucleotide
cgguuuauccagaaaccaa

SEQ ID NO: 143559 - RNA, 19 nt, Artificial Sequence
  Description of Artificial Sequence: Synthetic oligonucleotide
cugcgcuccugagaaggca

SEQ ID NO: 143560 - RNA, 19 nt, Artificial Sequence
  Description of Artificial Sequence: Synthetic oligonucleotide
gccucgugcuugcggauca

SEQ ID NO: 143561 - RNA, 19 nt, Artificial Sequence
  Description of Artificial Sequence: Synthetic oligonucleotide
cauaggucauuauguccuu

SEQ ID NO: 143562 - RNA, 19 nt, Artificial Sequence
  Description of Artificial Sequence: Synthetic oligonucleotide
aggccucgugcuugcggau

SEQ ID NO: 143563 - RNA, 19 nt, Artificial Sequence
  Description of Artificial Sequence: Synthetic oligonucleotide
cccggguuuggaaaggugu

SEQ ID NO: 143564 - RNA, 19 nt, Artificial Sequence
  Description of Artificial Sequence: Synthetic oligonucleotide
caucguagcccagacugau

SEQ ID NO: 143565 - RNA, 19 nt, Artificial Sequence
  Description of Artificial Sequence: Synthetic oligonucleotide
gucgggccgggcuguguuc

SEQ ID NO: 143566 - RNA, 19 nt, Artificial Sequence
  Description of Artificial Sequence: Synthetic oligonucleotide
caucucgauggagaugcgu

SEQ ID NO: 143567 - RNA, 19 nt, Artificial Sequence
  Description of Artificial Sequence: Synthetic oligonucleotide
gguggucgagucgcuccag

SEQ ID NO: 143568 - RNA, 19 nt, Artificial Sequence
  Description of Artificial Sequence: Synthetic oligonucleotide
cucgugcuugcggaucaga

SEQ ID NO: 143569 - RNA, 19 nt, Artificial Sequence
  Description of Artificial Sequence: Synthetic oligonucleotide
uggcggagauaugcagcua

SEQ ID NO: 143570 - RNA, 19 nt, Artificial Sequence
  Description of Artificial Sequence: Synthetic oligonucleotide
gaaggucacgaggccgcua

SEQ ID NO: 143571 - RNA, 19 nt, Artificial Sequence
  Description of Artificial Sequence: Synthetic oligonucleotide
gagucugaccagggugucu

SEQ ID NO: 143572 - RNA, 19 nt, Artificial Sequence
  Description of Artificial Sequence: Synthetic oligonucleotide
caccguguauugacauugu

SEQ ID NO: 143573 - RNA, 19 nt, Artificial Sequence
  Description of Artificial Sequence: Synthetic oligonucleotide
gacccggguuuggaaaggu

SEQ ID NO: 143574 - RNA, 19 nt, Artificial Sequence
  Description of Artificial Sequence: Synthetic oligonucleotide
caucucgggugaggaucug

SEQ ID NO: 143575 - RNA, 19 nt, Artificial Sequence
  Description of Artificial Sequence: Synthetic oligonucleotide
aggcccugaaggggccuca

SEQ ID NO: 143576 - RNA, 19 nt, Artificial Sequence
  Description of Artificial Sequence: Synthetic oligonucleotide
ggggucgaccacacucaug

SEQ ID NO: 143577 - RNA, 19 nt, Artificial Sequence
  Description of Artificial Sequence: Synthetic oligonucleotide
gcggagauaugcagcuaga

SEQ ID NO: 143578 - RNA, 19 nt, Artificial Sequence
  Description of Artificial Sequence: Synthetic oligonucleotide
cagauccgguuggcagcag

SEQ ID NO: 143579 - RNA, 19 nt, Artificial Sequence
  Description of Artificial Sequence: Synthetic oligonucleotide
ggagggcacugaaucaacu

SEQ ID NO: 143580 - RNA, 19 nt, Artificial Sequence
  Description of Artificial Sequence: Synthetic oligonucleotide
ggguugcugccugacagcu

SEQ ID NO: 143581 - RNA, 19 nt, Artificial Sequence
  Description of Artificial Sequence: Synthetic oligonucleotide
augcagcuagauggauaua

SEQ ID NO: 143582 - RNA, 19 nt, Artificial Sequence
  Description of Artificial Sequence: Synthetic oligonucleotide
cgcaaacaaggggaggguc

SEQ ID NO: 143583 - RNA, 19 nt, Artificial Sequence
  Description of Artificial Sequence: Synthetic oligonucleotide
cacuggcgucugguccagg

SEQ ID NO: 143584 - RNA, 19 nt, Artificial Sequence
  Description of Artificial Sequence: Synthetic oligonucleotide
caggaccuugaaggaggca

SEQ ID NO: 143585 - RNA, 19 nt, Artificial Sequence
  Description of Artificial Sequence: Synthetic oligonucleotide
ggcaggccgguugcugagc

SEQ ID NO: 143586 - RNA, 19 nt, Artificial Sequence
  Description of Artificial Sequence: Synthetic oligonucleotide
agaccccugcccaccgcaa

SEQ ID NO: 143587 - RNA, 19 nt, Artificial Sequence
  Description of Artificial Sequence: Synthetic oligonucleotide
gugcgcggccaggucacuc

SEQ ID NO: 143588 - RNA, 19 nt, Artificial Sequence
  Description of Artificial Sequence: Synthetic oligonucleotide
cuccuuguggauggccagu

SEQ ID NO: 143589 - RNA, 19 nt, Artificial Sequence
  Description of Artificial Sequence: Synthetic oligonucleotide
ggccucgugcuugcggauc

SEQ ID NO: 143590 - RNA, 19 nt, Artificial Sequence
  Description of Artificial Sequence: Synthetic oligonucleotide
cagcaucgcccugccgguc

SEQ ID NO: 143591 - RNA, 19 nt, Artificial Sequence
  Description of Artificial Sequence: Synthetic oligonucleotide
gcuugugaacacgccgaua

SEQ ID NO: 143592 - RNA, 19 nt, Artificial Sequence
  Description of Artificial Sequence: Synthetic oligonucleotide
ggaccuugaaggaggcaau

SEQ ID NO: 143593 - RNA, 19 nt, Artificial Sequence
  Description of Artificial Sequence: Synthetic oligonucleotide
ggcaccguguauugacauu

SEQ ID NO: 143594 - RNA, 19 nt, Artificial Sequence
  Description of Artificial Sequence: Synthetic oligonucleotide
ccggcgcaggugcucguug

SEQ ID NO: 143595 - RNA, 19 nt, Artificial Sequence
  Description of Artificial Sequence: Synthetic oligonucleotide
ugucgccugccaggaccuu

SEQ ID NO: 143596 - RNA, 19 nt, Artificial Sequence
  Description of Artificial Sequence: Synthetic oligonucleotide
gcucguuggacugcuguuu

SEQ ID NO: 143597 - RNA, 19 nt, Artificial Sequence
  Description of Artificial Sequence: Synthetic oligonucleotide
gccagacguucauagucuu

SEQ ID NO: 143598 - RNA, 19 nt, Artificial Sequence
  Description of Artificial Sequence: Synthetic oligonucleotide
ggugcgggcgaugguggua

SEQ ID NO: 143599 - RNA, 19 nt, Artificial Sequence
  Description of Artificial Sequence: Synthetic oligonucleotide
ccagccugcggauuucauu

SEQ ID NO: 143600 - RNA, 19 nt, Artificial Sequence
  Description of Artificial Sequence: Synthetic oligonucleotide
ccaugcgggcgaugcagua

SEQ ID NO: 143601 - RNA, 19 nt, Artificial Sequence
  Description of Artificial Sequence: Synthetic oligonucleotide
agggcgccaugcgggcgau

SEQ ID NO: 143602 - RNA, 19 nt, Artificial Sequence
  Description of Artificial Sequence: Synthetic oligonucleotide
gccggucguucuccacauc

SEQ ID NO: 143603 - RNA, 19 nt, Artificial Sequence
  Description of Artificial Sequence: Synthetic oligonucleotide
ggucgaccacacucaugau

SEQ ID NO: 143604 - RNA, 19 nt, Artificial Sequence
  Description of Artificial Sequence: Synthetic oligonucleotide
cuucgaugguguggacgau

SEQ ID NO: 143605 - RNA, 19 nt, Artificial Sequence
  Description of Artificial Sequence: Synthetic oligonucleotide
gcgccaugcgggcgaugca

SEQ ID NO: 143606 - RNA, 19 nt, Artificial Sequence
  Description of Artificial Sequence: Synthetic oligonucleotide
guauggccucacgcucccu

SEQ ID NO: 143607 - RNA, 19 nt, Artificial Sequence
  Description of Artificial Sequence: Synthetic oligonucleotide
cucagccuucugcgcuccu

SEQ ID NO: 143608 - RNA, 19 nt, Artificial Sequence
  Description of Artificial Sequence: Synthetic oligonucleotide
ggagugcauggucccgcuu

SEQ ID NO: 143609 - RNA, 19 nt, Artificial Sequence
  Description of Artificial Sequence: Synthetic oligonucleotide
gagcggcaucagggcccug

SEQ ID NO: 143610 - RNA, 19 nt, Artificial Sequence
  Description of Artificial Sequence: Synthetic oligonucleotide
ccaagguggucgagucgcu

SEQ ID NO: 143611 - RNA, 19 nt, Artificial Sequence
  Description of Artificial Sequence: Synthetic oligonucleotide
cccagugccccgacauggu

SEQ ID NO: 143612 - RNA, 19 nt, Artificial Sequence
  Description of Artificial Sequence: Synthetic oligonucleotide
gcaucgcccugccggucgu

SEQ ID NO: 143613 - RNA, 19 nt, Artificial Sequence
  Description of Artificial Sequence: Synthetic oligonucleotide
cggguuuggaaaggugucu

SEQ ID NO: 143614 - RNA, 19 nt, Artificial Sequence
  Description of Artificial Sequence: Synthetic oligonucleotide
cggagauaugcagcuagau

SEQ ID NO: 143615 - RNA, 19 nt, Artificial Sequence
  Description of Artificial Sequence: Synthetic oligonucleotide
ccgcaaacaaggggagggu

SEQ ID NO: 143616 - RNA, 19 nt, Artificial Sequence
  Description of Artificial Sequence: Synthetic oligonucleotide
cgcuaugguuggggucgac

SEQ ID NO: 143617 - RNA, 19 nt, Artificial Sequence
  Description of Artificial Sequence: Synthetic oligonucleotide
gggcgccaugcgggcgaug

SEQ ID NO: 143618 - RNA, 19 nt, Artificial Sequence
  Description of Artificial Sequence: Synthetic oligonucleotide
ccgcuaugguuggggucga

SEQ ID NO: 143619 - RNA, 19 nt, Artificial Sequence
  Description of Artificial Sequence: Synthetic oligonucleotide
cgauggagaugcguccgau

SEQ ID NO: 143620 - RNA, 19 nt, Artificial Sequence
  Description of Artificial Sequence: Synthetic oligonucleotide
ccucggcagugaugaaguu

SEQ ID NO: 143621 - RNA, 19 nt, Artificial Sequence
  Description of Artificial Sequence: Synthetic oligonucleotide
ggugcgcggccaggucacu

SEQ ID NO: 143622 - RNA, 19 nt, Artificial Sequence
  Description of Artificial Sequence: Synthetic oligonucleotide
cgauccuuugggccuccuu

SEQ ID NO: 143623 - RNA, 19 nt, Artificial Sequence
  Description of Artificial Sequence: Synthetic oligonucleotide
caucgcccugccggucguu

SEQ ID NO: 143624 - RNA, 19 nt, Artificial Sequence
  Description of Artificial Sequence: Synthetic oligonucleotide
aaaugaauugaacagagcc

SEQ ID NO: 143625 - RNA, 19 nt, Artificial Sequence
  Description of Artificial Sequence: Synthetic oligonucleotide
uccaaauugaauaaguggg

SEQ ID NO: 143626 - RNA, 19 nt, Artificial Sequence
  Description of Artificial Sequence: Synthetic oligonucleotide
cauaauaguauuucaaucg

SEQ ID NO: 143627 - RNA, 19 nt, Artificial Sequence
  Description of Artificial Sequence: Synthetic oligonucleotide
uuaauaacaugcaagagcu

SEQ ID NO: 143628 - RNA, 19 nt, Artificial Sequence
  Description of Artificial Sequence: Synthetic oligonucleotide
uaucuuaacaguuacuuag

SEQ ID NO: 143629 - RNA, 19 nt, Artificial Sequence
  Description of Artificial Sequence: Synthetic oligonucleotide
aguaucaucugguauaaac

SEQ ID NO: 143630 - RNA, 19 nt, Artificial Sequence
  Description of Artificial Sequence: Synthetic oligonucleotide
ucuuuuguagauuucauug

SEQ ID NO: 143631 - RNA, 19 nt, Artificial Sequence
  Description of Artificial Sequence: Synthetic oligonucleotide
uuugucuuuagaacaagcg

SEQ ID NO: 143632 - RNA, 19 nt, Artificial Sequence
  Description of Artificial Sequence: Synthetic oligonucleotide
cuaaauuagagucacacug

SEQ ID NO: 143633 - RNA, 19 nt, Artificial Sequence
  Description of Artificial Sequence: Synthetic oligonucleotide
ugguauaaaccuuagaucu

SEQ ID NO: 143634 - RNA, 19 nt, Artificial Sequence
  Description of Artificial Sequence: Synthetic oligonucleotide
ugugauucuuucaugauca

SEQ ID NO: 143635 - RNA, 19 nt, Artificial Sequence
  Description of Artificial Sequence: Synthetic oligonucleotide
uaaacuuucuguuaagugu

SEQ ID NO: 143636 - RNA, 19 nt, Artificial Sequence
  Description of Artificial Sequence: Synthetic oligonucleotide
auuaugacaaaucugugga

SEQ ID NO: 143637 - RNA, 19 nt, Artificial Sequence
  Description of Artificial Sequence: Synthetic oligonucleotide
aguuacuuagaucugccac

SEQ ID NO: 143638 - RNA, 19 nt, Artificial Sequence
  Description of Artificial Sequence: Synthetic oligonucleotide
auccaaauugaauaagugg

SEQ ID NO: 143639 - RNA, 19 nt, Artificial Sequence
  Description of Artificial Sequence: Synthetic oligonucleotide
uuauauuaugacaaaucug

SEQ ID NO: 143640 - RNA, 19 nt, Artificial Sequence
  Description of Artificial Sequence: Synthetic oligonucleotide
aaauugaauaagugggaag

SEQ ID NO: 143641 - RNA, 19 nt, Artificial Sequence
  Description of Artificial Sequence: Synthetic oligonucleotide
agauuucacaauuucagag

SEQ ID NO: 143642 - RNA, 19 nt, Artificial Sequence
  Description of Artificial Sequence: Synthetic oligonucleotide
ugaacugauagucucuuag

SEQ ID NO: 143643 - RNA, 19 nt, Artificial Sequence
  Description of Artificial Sequence: Synthetic oligonucleotide
aauugaauaagugggaagu

SEQ ID NO: 143644 - RNA, 19 nt, Artificial Sequence
  Description of Artificial Sequence: Synthetic oligonucleotide
auccauuacaagcaaggcc

SEQ ID NO: 143645 - RNA, 19 nt, Artificial Sequence
  Description of Artificial Sequence: Synthetic oligonucleotide
agaucuaugaaagaacaac

SEQ ID NO: 143646 - RNA, 19 nt, Artificial Sequence
  Description of Artificial Sequence: Synthetic oligonucleotide
uaaauuuuacacuucacau

SEQ ID NO: 143647 - RNA, 19 nt, Artificial Sequence
  Description of Artificial Sequence: Synthetic oligonucleotide
uccuauuucacuaccacug

SEQ ID NO: 143648 - RNA, 19 nt, Artificial Sequence
  Description of Artificial Sequence: Synthetic oligonucleotide
uuuaaucuaucccagucca

SEQ ID NO: 143649 - RNA, 19 nt, Artificial Sequence
  Description of Artificial Sequence: Synthetic oligonucleotide
aacaguuacuuagaucugc

SEQ ID NO: 143650 - RNA, 19 nt, Artificial Sequence
  Description of Artificial Sequence: Synthetic oligonucleotide
guagggaucauucaaauca

SEQ ID NO: 143651 - RNA, 19 nt, Artificial Sequence
  Description of Artificial Sequence: Synthetic oligonucleotide
aacagcauaacucaacuua

SEQ ID NO: 143652 - RNA, 19 nt, Artificial Sequence
  Description of Artificial Sequence: Synthetic oligonucleotide
uaucaauuuugacuuuucg

SEQ ID NO: 143653 - RNA, 19 nt, Artificial Sequence
  Description of Artificial Sequence: Synthetic oligonucleotide
uuaucuaauucucuccaag

SEQ ID NO: 143654 - RNA, 19 nt, Artificial Sequence
  Description of Artificial Sequence: Synthetic oligonucleotide
ugauaggaaaauaaguuau

SEQ ID NO: 143655 - RNA, 19 nt, Artificial Sequence
  Description of Artificial Sequence: Synthetic oligonucleotide
agcauaacucaacuuaaac

SEQ ID NO: 143656 - RNA, 19 nt, Artificial Sequence
  Description of Artificial Sequence: Synthetic oligonucleotide
aacuccgaaggauauaucu

SEQ ID NO: 143657 - RNA, 19 nt, Artificial Sequence
  Description of Artificial Sequence: Synthetic oligonucleotide
ucauaaauuaguucuacau

SEQ ID NO: 143658 - RNA, 19 nt, Artificial Sequence
  Description of Artificial Sequence: Synthetic oligonucleotide
ugggacuuauuucugaacc

SEQ ID NO: 143659 - RNA, 19 nt, Artificial Sequence
  Description of Artificial Sequence: Synthetic oligonucleotide
uacuauuuccuuuaacccc

SEQ ID NO: 143660 - RNA, 19 nt, Artificial Sequence
  Description of Artificial Sequence: Synthetic oligonucleotide
aaaauuguucccaaggggu

SEQ ID NO: 143661 - RNA, 19 nt, Artificial Sequence
  Description of Artificial Sequence: Synthetic oligonucleotide
agaaucacaauccacuacu

SEQ ID NO: 143662 - RNA, 19 nt, Artificial Sequence
  Description of Artificial Sequence: Synthetic oligonucleotide
aaaugugagucauuuacaa

SEQ ID NO: 143663 - RNA, 19 nt, Artificial Sequence
  Description of Artificial Sequence: Synthetic oligonucleotide
cuaucuaucaucuuccuca

SEQ ID NO: 143664 - RNA, 19 nt, Artificial Sequence
  Description of Artificial Sequence: Synthetic oligonucleotide
caaucguuugaacugauag

SEQ ID NO: 143665 - RNA, 19 nt, Artificial Sequence
  Description of Artificial Sequence: Synthetic oligonucleotide
uuggcuuauaugcuguuag

SEQ ID NO: 143666 - RNA, 19 nt, Artificial Sequence
  Description of Artificial Sequence: Synthetic oligonucleotide
uauuuguaggaaacgaacu

SEQ ID NO: 143667 - RNA, 19 nt, Artificial Sequence
  Description of Artificial Sequence: Synthetic oligonucleotide
aucguuugaacugauaguc

SEQ ID NO: 143668 - RNA, 19 nt, Artificial Sequence
  Description of Artificial Sequence: Synthetic oligonucleotide
auaaguagcucuucuuuuc

SEQ ID NO: 143669 - RNA, 19 nt, Artificial Sequence
  Description of Artificial Sequence: Synthetic oligonucleotide
uaaguagcucuucuuuucg

SEQ ID NO: 143670 - RNA, 19 nt, Artificial Sequence
  Description of Artificial Sequence: Synthetic oligonucleotide
ucgauguguaaucucauca

SEQ ID NO: 143671 - RNA, 19 nt, Artificial Sequence
  Description of Artificial Sequence: Synthetic oligonucleotide
ugagauuuacacaaguuuu

SEQ ID NO: 143672 - RNA, 19 nt, Artificial Sequence
  Description of Artificial Sequence: Synthetic oligonucleotide
ugagucguuaacauuuacc

SEQ ID NO: 143673 - RNA, 19 nt, Artificial Sequence
  Description of Artificial Sequence: Synthetic oligonucleotide
ucacuaucuaucaucuucc

SEQ ID NO: 143674 - RNA, 19 nt, Artificial Sequence
  Description of Artificial Sequence: Synthetic oligonucleotide
uaucguuucaagucuuccg

SEQ ID NO: 143675 - RNA, 19 nt, Artificial Sequence
  Description of Artificial Sequence: Synthetic oligonucleotide
aacuuguucuuccuucauc

SEQ ID NO: 143676 - RNA, 19 nt, Artificial Sequence
  Description of Artificial Sequence: Synthetic oligonucleotide
aucaguugaaguucuauca

SEQ ID NO: 143677 - RNA, 19 nt, Artificial Sequence
  Description of Artificial Sequence: Synthetic oligonucleotide
uauuuauaggauccuuuug

SEQ ID NO: 143678 - RNA, 19 nt, Artificial Sequence
  Description of Artificial Sequence: Synthetic oligonucleotide
uccuuuaaccccuugacaa

SEQ ID NO: 143679 - RNA, 19 nt, Artificial Sequence
  Description of Artificial Sequence: Synthetic oligonucleotide
aaucguuugaacugauagu

SEQ ID NO: 143680 - RNA, 19 nt, Artificial Sequence
  Description of Artificial Sequence: Synthetic oligonucleotide
uguguaaucucaucagccc

SEQ ID NO: 143681 - RNA, 19 nt, Artificial Sequence
  Description of Artificial Sequence: Synthetic oligonucleotide
gucguuaacauuuaccuca

SEQ ID NO: 143682 - RNA, 19 nt, Artificial Sequence
  Description of Artificial Sequence: Synthetic oligonucleotide
uaucuaauucucuccaagc

SEQ ID NO: 143683 - RNA, 19 nt, Artificial Sequence
  Description of Artificial Sequence: Synthetic oligonucleotide
aagauaagcugucuuuugu

SEQ ID NO: 143684 - RNA, 19 nt, Artificial Sequence
  Description of Artificial Sequence: Synthetic oligonucleotide
aucacaauccacuacugca

SEQ ID NO: 143685 - RNA, 19 nt, Artificial Sequence
  Description of Artificial Sequence: Synthetic oligonucleotide
auuagagucacacuguauu

SEQ ID NO: 143686 - RNA, 19 nt, Artificial Sequence
  Description of Artificial Sequence: Synthetic oligonucleotide
aaacgaacuucauacaaua

SEQ ID NO: 143687 - RNA, 19 nt, Artificial Sequence
  Description of Artificial Sequence: Synthetic oligonucleotide
uaaccccuugacaagauca

SEQ ID NO: 143688 - RNA, 19 nt, Artificial Sequence
  Description of Artificial Sequence: Synthetic oligonucleotide
augaauugaacagagccag

SEQ ID NO: 143689 - RNA, 19 nt, Artificial Sequence
  Description of Artificial Sequence: Synthetic oligonucleotide
aucugggauccuuugaaac

SEQ ID NO: 143690 - RNA, 19 nt, Artificial Sequence
  Description of Artificial Sequence: Synthetic oligonucleotide
aaaucugggauccuuugaa

SEQ ID NO: 143691 - RNA, 19 nt, Artificial Sequence
  Description of Artificial Sequence: Synthetic oligonucleotide
guuacuuagaucugccacc

SEQ ID NO: 143692 - RNA, 19 nt, Artificial Sequence
  Description of Artificial Sequence: Synthetic oligonucleotide
ucuuacuugcuguuucagg

SEQ ID NO: 143693 - RNA, 19 nt, Artificial Sequence
  Description of Artificial Sequence: Synthetic oligonucleotide
aaggcaggaucuaugggcc

SEQ ID NO: 143694 - RNA, 19 nt, Artificial Sequence
  Description of Artificial Sequence: Synthetic oligonucleotide
uguauuuguaggaaacgaa

SEQ ID NO: 143695 - RNA, 19 nt, Artificial Sequence
  Description of Artificial Sequence: Synthetic oligonucleotide
agagcugucuauauuuugc

SEQ ID NO: 143696 - RNA, 19 nt, Artificial Sequence
  Description of Artificial Sequence: Synthetic oligonucleotide
aguaguaucaucugguaua

SEQ ID NO: 143697 - RNA, 19 nt, Artificial Sequence
  Description of Artificial Sequence: Synthetic oligonucleotide
gauguguaaucucaucagc

SEQ ID NO: 143698 - RNA, 19 nt, Artificial Sequence
  Description of Artificial Sequence: Synthetic oligonucleotide
auguguaaucucaucagcc

SEQ ID NO: 143699 - RNA, 19 nt, Artificial Sequence
  Description of Artificial Sequence: Synthetic oligonucleotide
uugaauaaguagcucuucu

SEQ ID NO: 143700 - RNA, 19 nt, Artificial Sequence
  Description of Artificial Sequence: Synthetic oligonucleotide
guacuagaaucuuuggucc

SEQ ID NO: 143701 - RNA, 19 nt, Artificial Sequence
  Description of Artificial Sequence: Synthetic oligonucleotide
gcuucuauccuuaugauag

SEQ ID NO: 143702 - RNA, 19 nt, Artificial Sequence
  Description of Artificial Sequence: Synthetic oligonucleotide
ugaaccuaucuucugagau

SEQ ID NO: 143703 - RNA, 19 nt, Artificial Sequence
  Description of Artificial Sequence: Synthetic oligonucleotide
ugcauaauaguauuucaau

SEQ ID NO: 143704 - RNA, 19 nt, Artificial Sequence
  Description of Artificial Sequence: Synthetic oligonucleotide
uagucgauguguaaucuca

SEQ ID NO: 143705 - RNA, 19 nt, Artificial Sequence
  Description of Artificial Sequence: Synthetic oligonucleotide
cucacuaucuaucaucuuc

SEQ ID NO: 143706 - RNA, 19 nt, Artificial Sequence
  Description of Artificial Sequence: Synthetic oligonucleotide
cuugacaagaucaggacca

SEQ ID NO: 143707 - RNA, 19 nt, Artificial Sequence
  Description of Artificial Sequence: Synthetic oligonucleotide
ucaggaauacucaguaacu

SEQ ID NO: 143708 - RNA, 19 nt, Artificial Sequence
  Description of Artificial Sequence: Synthetic oligonucleotide
uaaaugaauugaacagagc

SEQ ID NO: 143709 - RNA, 19 nt, Artificial Sequence
  Description of Artificial Sequence: Synthetic oligonucleotide
uacaacuccuccuuugggc

SEQ ID NO: 143710 - RNA, 19 nt, Artificial Sequence
  Description of Artificial Sequence: Synthetic oligonucleotide
uuauuuauaggauccuuuu

SEQ ID NO: 143711 - RNA, 19 nt, Artificial Sequence
  Description of Artificial Sequence: Synthetic oligonucleotide
ucuuccucggaagauaagc

SEQ ID NO: 143712 - RNA, 19 nt, Artificial Sequence
  Description of Artificial Sequence: Synthetic oligonucleotide
aaaucgugagucguuaaca

SEQ ID NO: 143713 - RNA, 19 nt, Artificial Sequence
  Description of Artificial Sequence: Synthetic oligonucleotide
uguaaucucaucagcccga

SEQ ID NO: 143714 - RNA, 19 nt, Artificial Sequence
  Description of Artificial Sequence: Synthetic oligonucleotide
ugaauaagugggaagugua

SEQ ID NO: 143715 - RNA, 19 nt, Artificial Sequence
  Description of Artificial Sequence: Synthetic oligonucleotide
aaauuguucccaagggguc

SEQ ID NO: 143716 - RNA, 19 nt, Artificial Sequence
  Description of Artificial Sequence: Synthetic oligonucleotide
aaaucaacaucagaaggaa

SEQ ID NO: 143717 - RNA, 19 nt, Artificial Sequence
  Description of Artificial Sequence: Synthetic oligonucleotide
gguacuagaaucuuugguc

SEQ ID NO: 143718 - RNA, 19 nt, Artificial Sequence
  Description of Artificial Sequence: Synthetic oligonucleotide
guaucaucugguauaaacc

SEQ ID NO: 143719 - RNA, 19 nt, Artificial Sequence
  Description of Artificial Sequence: Synthetic oligonucleotide
acuuagaucugccaccugu

SEQ ID NO: 143720 - RNA, 19 nt, Artificial Sequence
  Description of Artificial Sequence: Synthetic oligonucleotide
guguaaucucaucagcccg

SEQ ID NO: 143721 - RNA, 19 nt, Artificial Sequence
  Description of Artificial Sequence: Synthetic oligonucleotide
ucgugagucguuaacauuu

SEQ ID NO: 143722 - RNA, 19 nt, Artificial Sequence
  Description of Artificial Sequence: Synthetic oligonucleotide
gagggauccaaauugaaua

SEQ ID NO: 143723 - RNA, 19 nt, Artificial Sequence
  Description of Artificial Sequence: Synthetic oligonucleotide
agucguuaacauuuaccuc

SEQ ID NO: 143724 - RNA, 19 nt, Artificial Sequence
  Description of Artificial Sequence: Synthetic oligonucleotide
aaauuagagucacacugua

SEQ ID NO: 143725 - RNA, 19 nt, Artificial Sequence
  Description of Artificial Sequence: Synthetic oligonucleotide
agaucaggaccacugucac

SEQ ID NO: 143726 - RNA, 19 nt, Artificial Sequence
  Description of Artificial Sequence: Synthetic oligonucleotide
ugugaaauacuuuggcuua

SEQ ID NO: 143727 - RNA, 19 nt, Artificial Sequence
  Description of Artificial Sequence: Synthetic oligonucleotide
aaucgugagucguuaacau

SEQ ID NO: 143728 - RNA, 19 nt, Artificial Sequence
  Description of Artificial Sequence: Synthetic oligonucleotide
uaaucuaucccaguccaug

SEQ ID NO: 143729 - RNA, 19 nt, Artificial Sequence
  Description of Artificial Sequence: Synthetic oligonucleotide
acuaucuaucaucuuccuc

SEQ ID NO: 143730 - RNA, 19 nt, Artificial Sequence
  Description of Artificial Sequence: Synthetic oligonucleotide
gauccaaauugaauaagug

SEQ ID NO: 143731 - RNA, 19 nt, Artificial Sequence
  Description of Artificial Sequence: Synthetic oligonucleotide
aaaaugugagucauuuaca

SEQ ID NO: 143732 - RNA, 19 nt, Artificial Sequence
  Description of Artificial Sequence: Synthetic oligonucleotide
uuucucuacugcuugaaua

SEQ ID NO: 143733 - RNA, 19 nt, Artificial Sequence
  Description of Artificial Sequence: Synthetic oligonucleotide
aguucuaucaucacuugug

SEQ ID NO: 143734 - RNA, 19 nt, Artificial Sequence
  Description of Artificial Sequence: Synthetic oligonucleotide
uccucacuaucuaucaucu

SEQ ID NO: 143735 - RNA, 19 nt, Artificial Sequence
  Description of Artificial Sequence: Synthetic oligonucleotide
aaguucuaucaucacuugu

SEQ ID NO: 143736 - RNA, 19 nt, Artificial Sequence
  Description of Artificial Sequence: Synthetic oligonucleotide
gagucguuaacauuuaccu

SEQ ID NO: 143737 - RNA, 19 nt, Artificial Sequence
  Description of Artificial Sequence: Synthetic oligonucleotide
uaugacaaaucuguggaaa

SEQ ID NO: 143738 - RNA, 19 nt, Artificial Sequence
  Description of Artificial Sequence: Synthetic oligonucleotide
ucacuauccuucuugggac

SEQ ID NO: 143739 - RNA, 19 nt, Artificial Sequence
  Description of Artificial Sequence: Synthetic oligonucleotide
aaaguaguaucaucuggua

SEQ ID NO: 143740 - RNA, 19 nt, Artificial Sequence
  Description of Artificial Sequence: Synthetic oligonucleotide
ugaaacccgccuaaagcgc

SEQ ID NO: 143741 - RNA, 19 nt, Artificial Sequence
  Description of Artificial Sequence: Synthetic oligonucleotide
aggaauacucaguaacucu

SEQ ID NO: 143742 - RNA, 19 nt, Artificial Sequence
  Description of Artificial Sequence: Synthetic oligonucleotide
agaucagaaucagagucgg

SEQ ID NO: 143743 - RNA, 19 nt, Artificial Sequence
  Description of Artificial Sequence: Synthetic oligonucleotide
uuuguaggaaacgaacuuc

SEQ ID NO: 143744 - RNA, 19 nt, Artificial Sequence
  Description of Artificial Sequence: Synthetic oligonucleotide
uuauaggauccuuuuguuc

SEQ ID NO: 143745 - RNA, 19 nt, Artificial Sequence
  Description of Artificial Sequence: Synthetic oligonucleotide
cacagaauaagguacuaca

SEQ ID NO: 143746 - RNA, 19 nt, Artificial Sequence
  Description of Artificial Sequence: Synthetic oligonucleotide
aaguagggaucauucaaau

SEQ ID NO: 143747 - RNA, 19 nt, Artificial Sequence
  Description of Artificial Sequence: Synthetic oligonucleotide
gaaaucgugagucguuaac

SEQ ID NO: 143748 - RNA, 19 nt, Artificial Sequence
  Description of Artificial Sequence: Synthetic oligonucleotide
agcauuucaccaucaucgg

SEQ ID NO: 143749 - RNA, 19 nt, Artificial Sequence
  Description of Artificial Sequence: Synthetic oligonucleotide
guauuuguaggaaacgaac

SEQ ID NO: 143750 - RNA, 19 nt, Artificial Sequence
  Description of Artificial Sequence: Synthetic oligonucleotide
acucuacugguccuugaac

SEQ ID NO: 143751 - RNA, 19 nt, Artificial Sequence
  Description of Artificial Sequence: Synthetic oligonucleotide
ugaccauuucuucugcacu

SEQ ID NO: 143752 - RNA, 19 nt, Artificial Sequence
  Description of Artificial Sequence: Synthetic oligonucleotide
uuguagagagucugcacug

SEQ ID NO: 143753 - RNA, 19 nt, Artificial Sequence
  Description of Artificial Sequence: Synthetic oligonucleotide
aauugaacagagccagcaa

SEQ ID NO: 143754 - RNA, 19 nt, Artificial Sequence
  Description of Artificial Sequence: Synthetic oligonucleotide
caagcaaggccauuucagc

SEQ ID NO: 143755 - RNA, 19 nt, Artificial Sequence
  Description of Artificial Sequence: Synthetic oligonucleotide
aaauuaggaucagagggau

SEQ ID NO: 143756 - RNA, 19 nt, Artificial Sequence
  Description of Artificial Sequence: Synthetic oligonucleotide
uuccuuuaaccccuugaca

SEQ ID NO: 143757 - RNA, 19 nt, Artificial Sequence
  Description of Artificial Sequence: Synthetic oligonucleotide
uugaauaagugggaagugu

SEQ ID NO: 143758 - RNA, 19 nt, Artificial Sequence
  Description of Artificial Sequence: Synthetic oligonucleotide
ugagucauuuacaauuguu

SEQ ID NO: 143759 - RNA, 19 nt, Artificial Sequence
  Description of Artificial Sequence: Synthetic oligonucleotide
ucggaaaggucauaguauc

SEQ ID NO: 143760 - RNA, 19 nt, Artificial Sequence
  Description of Artificial Sequence: Synthetic oligonucleotide
gucauaguaucguuucaag

SEQ ID NO: 143761 - RNA, 19 nt, Artificial Sequence
  Description of Artificial Sequence: Synthetic oligonucleotide
ucuauccuuaugauaggaa

SEQ ID NO: 143762 - RNA, 19 nt, Artificial Sequence
  Description of Artificial Sequence: Synthetic oligonucleotide
uuaucaauuuugacuuuuc

SEQ ID NO: 143763 - RNA, 19 nt, Artificial Sequence
  Description of Artificial Sequence: Synthetic oligonucleotide
uuucaaucguuugaacuga

SEQ ID NO: 143764 - RNA, 19 nt, Artificial Sequence
  Description of Artificial Sequence: Synthetic oligonucleotide
auacaacuccuccuuuggg

SEQ ID NO: 143765 - RNA, 19 nt, Artificial Sequence
  Description of Artificial Sequence: Synthetic oligonucleotide
ucagcuuauccuuuccuuc

SEQ ID NO: 143766 - RNA, 19 nt, Artificial Sequence
  Description of Artificial Sequence: Synthetic oligonucleotide
ucacaauccacuacugcau

SEQ ID NO: 143767 - RNA, 19 nt, Artificial Sequence
  Description of Artificial Sequence: Synthetic oligonucleotide
acgaacuucauacaauaua

SEQ ID NO: 143768 - RNA, 19 nt, Artificial Sequence
  Description of Artificial Sequence: Synthetic oligonucleotide
agguacuagaaucuuuggu

SEQ ID NO: 143769 - RNA, 19 nt, Artificial Sequence
  Description of Artificial Sequence: Synthetic oligonucleotide
ucuuagcuucucucuagag

SEQ ID NO: 143770 - RNA, 19 nt, Artificial Sequence
  Description of Artificial Sequence: Synthetic oligonucleotide
agagucacacuguauuugu

SEQ ID NO: 143771 - RNA, 19 nt, Artificial Sequence
  Description of Artificial Sequence: Synthetic oligonucleotide
ucaagucuuccguagugcu

SEQ ID NO: 143772 - RNA, 19 nt, Artificial Sequence
  Description of Artificial Sequence: Synthetic oligonucleotide
gaaguucuaucaucacuug

SEQ ID NO: 143773 - RNA, 19 nt, Artificial Sequence
  Description of Artificial Sequence: Synthetic oligonucleotide
cuaugaaagaacaacugcu

SEQ ID NO: 143774 - RNA, 19 nt, Artificial Sequence
  Description of Artificial Sequence: Synthetic oligonucleotide
auaagugggaaguguacau

SEQ ID NO: 143775 - RNA, 19 nt, Artificial Sequence
  Description of Artificial Sequence: Synthetic oligonucleotide
caagugaucuccaccguug

SEQ ID NO: 143776 - RNA, 19 nt, Artificial Sequence
  Description of Artificial Sequence: Synthetic oligonucleotide
aaaguagggaucauucaaa

SEQ ID NO: 143777 - RNA, 19 nt, Artificial Sequence
  Description of Artificial Sequence: Synthetic oligonucleotide
gagaaucacaauccacuac

SEQ ID NO: 143778 - RNA, 19 nt, Artificial Sequence
  Description of Artificial Sequence: Synthetic oligonucleotide
cuguuaaguguugugauuc

SEQ ID NO: 143779 - RNA, 19 nt, Artificial Sequence
  Description of Artificial Sequence: Synthetic oligonucleotide
ugacaaaucuguggaaaug

SEQ ID NO: 143780 - RNA, 19 nt, Artificial Sequence
  Description of Artificial Sequence: Synthetic oligonucleotide
aucuaugaaagaacaacug

SEQ ID NO: 143781 - RNA, 19 nt, Artificial Sequence
  Description of Artificial Sequence: Synthetic oligonucleotide
cuuccuauuucacuaccac

SEQ ID NO: 143782 - RNA, 19 nt, Artificial Sequence
  Description of Artificial Sequence: Synthetic oligonucleotide
caucaguugaaguucuauc

SEQ ID NO: 143783 - RNA, 19 nt, Artificial Sequence
  Description of Artificial Sequence: Synthetic oligonucleotide
ucaacaucagaaggaagcu

SEQ ID NO: 143784 - RNA, 19 nt, Artificial Sequence
  Description of Artificial Sequence: Synthetic oligonucleotide
agucggaaaggucauagua

SEQ ID NO: 143785 - RNA, 19 nt, Artificial Sequence
  Description of Artificial Sequence: Synthetic oligonucleotide
uuccuauuucacuaccacu

SEQ ID NO: 143786 - RNA, 19 nt, Artificial Sequence
  Description of Artificial Sequence: Synthetic oligonucleotide
aaccuaucuucugagauuu

SEQ ID NO: 143787 - RNA, 19 nt, Artificial Sequence
  Description of Artificial Sequence: Synthetic oligonucleotide
agagucggaaaggucauag

SEQ ID NO: 143788 - RNA, 19 nt, Artificial Sequence
  Description of Artificial Sequence: Synthetic oligonucleotide
ucuugggacuuauuucuga

SEQ ID NO: 143789 - RNA, 19 nt, Artificial Sequence
  Description of Artificial Sequence: Synthetic oligonucleotide
ucagaacuaguuucuacua

SEQ ID NO: 143790 - RNA, 19 nt, Artificial Sequence
  Description of Artificial Sequence: Synthetic oligonucleotide
aaucaacaucagaaggaag

SEQ ID NO: 143791 - RNA, 19 nt, Artificial Sequence
  Description of Artificial Sequence: Synthetic oligonucleotide
auaggauccuuuuguucag

SEQ ID NO: 143792 - RNA, 19 nt, Artificial Sequence
  Description of Artificial Sequence: Synthetic oligonucleotide
uuauaugcuguuagaucaa

SEQ ID NO: 143793 - RNA, 19 nt, Artificial Sequence
  Description of Artificial Sequence: Synthetic oligonucleotide
aguugaaguguuucuuacu

SEQ ID NO: 143794 - RNA, 19 nt, Artificial Sequence
  Description of Artificial Sequence: Synthetic oligonucleotide
uucaagucuuccguagugc

SEQ ID NO: 143795 - RNA, 19 nt, Artificial Sequence
  Description of Artificial Sequence: Synthetic oligonucleotide
cucaguaacucuacugguc

SEQ ID NO: 143796 - RNA, 19 nt, Artificial Sequence
  Description of Artificial Sequence: Synthetic oligonucleotide
cuucuauccuuaugauagg

SEQ ID NO: 143797 - RNA, 19 nt, Artificial Sequence
  Description of Artificial Sequence: Synthetic oligonucleotide
ucguuugaacugauagucu

SEQ ID NO: 143798 - RNA, 19 nt, Artificial Sequence
  Description of Artificial Sequence: Synthetic oligonucleotide
accguugauguucccauug

SEQ ID NO: 143799 - RNA, 19 nt, Artificial Sequence
  Description of Artificial Sequence: Synthetic oligonucleotide
ucucuagaggcccagucuu

SEQ ID NO: 143800 - RNA, 19 nt, Artificial Sequence
  Description of Artificial Sequence: Synthetic oligonucleotide
cuaugggccgcuucugugc

SEQ ID NO: 143801 - RNA, 19 nt, Artificial Sequence
  Description of Artificial Sequence: Synthetic oligonucleotide
agaacaagcggcuguugga

SEQ ID NO: 143802 - RNA, 19 nt, Artificial Sequence
  Description of Artificial Sequence: Synthetic oligonucleotide
gaucuaugaaagaacaacu

SEQ ID NO: 143803 - RNA, 19 nt, Artificial Sequence
  Description of Artificial Sequence: Synthetic oligonucleotide
uuacuuagaucugccaccu

SEQ ID NO: 143804 - RNA, 19 nt, Artificial Sequence
  Description of Artificial Sequence: Synthetic oligonucleotide
agugggaaguguacauugc

SEQ ID NO: 143805 - RNA, 19 nt, Artificial Sequence
  Description of Artificial Sequence: Synthetic oligonucleotide
ggcuaaguaggccuggaag

SEQ ID NO: 143806 - RNA, 19 nt, Artificial Sequence
  Description of Artificial Sequence: Synthetic oligonucleotide
uccauaucauuuucuuuuc

SEQ ID NO: 143807 - RNA, 19 nt, Artificial Sequence
  Description of Artificial Sequence: Synthetic oligonucleotide
uuaugacaaaucuguggaa

SEQ ID NO: 143808 - RNA, 19 nt, Artificial Sequence
  Description of Artificial Sequence: Synthetic oligonucleotide
augacaaaucuguggaaau

SEQ ID NO: 143809 - RNA, 19 nt, Artificial Sequence
  Description of Artificial Sequence: Synthetic oligonucleotide
aacugaacugauugcuuuu

SEQ ID NO: 143810 - RNA, 19 nt, Artificial Sequence
  Description of Artificial Sequence: Synthetic oligonucleotide
guguacauugccugaaauc

SEQ ID NO: 143811 - RNA, 19 nt, Artificial Sequence
  Description of Artificial Sequence: Synthetic oligonucleotide
acugauagucucuuagcuu

SEQ ID NO: 143812 - RNA, 19 nt, Artificial Sequence
  Description of Artificial Sequence: Synthetic oligonucleotide
ggcauuucccaaaaucugg

SEQ ID NO: 143813 - RNA, 19 nt, Artificial Sequence
  Description of Artificial Sequence: Synthetic oligonucleotide
cuuaaggccuggaacccac

SEQ ID NO: 143814 - RNA, 19 nt, Artificial Sequence
  Description of Artificial Sequence: Synthetic oligonucleotide
gugggaaguguacauugcc

SEQ ID NO: 143815 - RNA, 19 nt, Artificial Sequence
  Description of Artificial Sequence: Synthetic oligonucleotide
uccuuugaaacccgccuaa

SEQ ID NO: 143816 - RNA, 19 nt, Artificial Sequence
  Description of Artificial Sequence: Synthetic oligonucleotide
agggauccaaauugaauaa

SEQ ID NO: 143817 - RNA, 19 nt, Artificial Sequence
  Description of Artificial Sequence: Synthetic oligonucleotide
gccauuauaacugaacuga

SEQ ID NO: 143818 - RNA, 19 nt, Artificial Sequence
  Description of Artificial Sequence: Synthetic oligonucleotide
ugggauccuuugaaacccg

SEQ ID NO: 143819 - RNA, 19 nt, Artificial Sequence
  Description of Artificial Sequence: Synthetic oligonucleotide
uaacaugcaagagcugucu

SEQ ID NO: 143820 - RNA, 19 nt, Artificial Sequence
  Description of Artificial Sequence: Synthetic oligonucleotide
aguguacauugccugaaau

SEQ ID NO: 143821 - RNA, 19 nt, Artificial Sequence
  Description of Artificial Sequence: Synthetic oligonucleotide
acccacuugauuuccauuu

SEQ ID NO: 143822 - RNA, 19 nt, Artificial Sequence
  Description of Artificial Sequence: Synthetic oligonucleotide
cuuagaucugccaccuguc

SEQ ID NO: 143823 - RNA, 19 nt, Artificial Sequence
  Description of Artificial Sequence: Synthetic oligonucleotide
gaauacucaguaacucuac

SEQ ID NO: 143824 - RNA, 19 nt, Artificial Sequence
  Description of Artificial Sequence: Synthetic oligonucleotide
aucaggaccacugucacuu

SEQ ID NO: 143825 - RNA, 19 nt, Artificial Sequence
  Description of Artificial Sequence: Synthetic oligonucleotide
ugccugaaaucgugagucg

SEQ ID NO: 143826 - RNA, 19 nt, Artificial Sequence
  Description of Artificial Sequence: Synthetic oligonucleotide
ucuugaaauuaggaucaga

SEQ ID NO: 143827 - RNA, 19 nt, Artificial Sequence
  Description of Artificial Sequence: Synthetic oligonucleotide
ucucucuagaggcccaguc

SEQ ID NO: 143828 - RNA, 19 nt, Artificial Sequence
  Description of Artificial Sequence: Synthetic oligonucleotide
ugauagucucuuagcuucu

SEQ ID NO: 143829 - RNA, 19 nt, Artificial Sequence
  Description of Artificial Sequence: Synthetic oligonucleotide
uuccguagugcuguggcug

SEQ ID NO: 143830 - RNA, 19 nt, Artificial Sequence
  Description of Artificial Sequence: Synthetic oligonucleotide
ucuuuagaacaagcggcug

SEQ ID NO: 143831 - RNA, 19 nt, Artificial Sequence
  Description of Artificial Sequence: Synthetic oligonucleotide
aggaaacgaacuucauaca

SEQ ID NO: 143832 - RNA, 19 nt, Artificial Sequence
  Description of Artificial Sequence: Synthetic oligonucleotide
acaugcaagagcugucuau

SEQ ID NO: 143833 - RNA, 19 nt, Artificial Sequence
  Description of Artificial Sequence: Synthetic oligonucleotide
uguaggaaacgaacuucau

SEQ ID NO: 143834 - RNA, 19 nt, Artificial Sequence
  Description of Artificial Sequence: Synthetic oligonucleotide
aaguguacauugccugaaa

SEQ ID NO: 143835 - RNA, 19 nt, Artificial Sequence
  Description of Artificial Sequence: Synthetic oligonucleotide
ugugccgacuuuccugugu

SEQ ID NO: 143836 - RNA, 19 nt, Artificial Sequence
  Description of Artificial Sequence: Synthetic oligonucleotide
gauccuuugaaacccgccu

SEQ ID NO: 143837 - RNA, 19 nt, Artificial Sequence
  Description of Artificial Sequence: Synthetic oligonucleotide
ucggaagauaagcugucuu

SEQ ID NO: 143838 - RNA, 19 nt, Artificial Sequence
  Description of Artificial Sequence: Synthetic oligonucleotide
cuagucgauguguaaucuc

SEQ ID NO: 143839 - RNA, 19 nt, Artificial Sequence
  Description of Artificial Sequence: Synthetic oligonucleotide
caucugguauaaaccuuag

SEQ ID NO: 143840 - RNA, 19 nt, Artificial Sequence
  Description of Artificial Sequence: Synthetic oligonucleotide
ucuacugguccuugaacuu

SEQ ID NO: 143841 - RNA, 19 nt, Artificial Sequence
  Description of Artificial Sequence: Synthetic oligonucleotide
uuugaacugauagucucuu

SEQ ID NO: 143842 - RNA, 19 nt, Artificial Sequence
  Description of Artificial Sequence: Synthetic oligonucleotide
aauuagagucacacuguau

SEQ ID NO: 143843 - RNA, 19 nt, Artificial Sequence
  Description of Artificial Sequence: Synthetic oligonucleotide
cugcauaauaguauuucaa

SEQ ID NO: 143844 - RNA, 19 nt, Artificial Sequence
  Description of Artificial Sequence: Synthetic oligonucleotide
caauuucagagguacuaga

SEQ ID NO: 143845 - RNA, 19 nt, Artificial Sequence
  Description of Artificial Sequence: Synthetic oligonucleotide
uuaaucuaucccaguccau

SEQ ID NO: 143846 - RNA, 19 nt, Artificial Sequence
  Description of Artificial Sequence: Synthetic oligonucleotide
aggaucuaugggccgcuuc

SEQ ID NO: 143847 - RNA, 19 nt, Artificial Sequence
  Description of Artificial Sequence: Synthetic oligonucleotide
uggcuuauaugcuguuaga

SEQ ID NO: 143848 - RNA, 19 nt, Artificial Sequence
  Description of Artificial Sequence: Synthetic oligonucleotide
ugaaaucgugagucguuaa

SEQ ID NO: 143849 - RNA, 19 nt, Artificial Sequence
  Description of Artificial Sequence: Synthetic oligonucleotide
uccgaaggauauaucuuua

SEQ ID NO: 143850 - RNA, 19 nt, Artificial Sequence
  Description of Artificial Sequence: Synthetic oligonucleotide
aguagcucuucuuuucguu

SEQ ID NO: 143851 - RNA, 19 nt, Artificial Sequence
  Description of Artificial Sequence: Synthetic oligonucleotide
acagaauaagguacuacau

SEQ ID NO: 143852 - RNA, 19 nt, Artificial Sequence
  Description of Artificial Sequence: Synthetic oligonucleotide
guaucguuucaagucuucc

SEQ ID NO: 143853 - RNA, 19 nt, Artificial Sequence
  Description of Artificial Sequence: Synthetic oligonucleotide
ugcaagagcugucuauauu

SEQ ID NO: 143854 - RNA, 19 nt, Artificial Sequence
  Description of Artificial Sequence: Synthetic oligonucleotide
aaacuccgaaggauauauc

SEQ ID NO: 143855 - RNA, 19 nt, Artificial Sequence
  Description of Artificial Sequence: Synthetic oligonucleotide
cuaaguaggccuggaaguc

SEQ ID NO: 143856 - RNA, 19 nt, Artificial Sequence
  Description of Artificial Sequence: Synthetic oligonucleotide
guagagagucugcacugug

SEQ ID NO: 143857 - RNA, 19 nt, Artificial Sequence
  Description of Artificial Sequence: Synthetic oligonucleotide
aacaugcaagagcugucua

SEQ ID NO: 143858 - RNA, 19 nt, Artificial Sequence
  Description of Artificial Sequence: Synthetic oligonucleotide
ucaaucguuugaacugaua

SEQ ID NO: 143859 - RNA, 19 nt, Artificial Sequence
  Description of Artificial Sequence: Synthetic oligonucleotide
cuugaauaaguagcucuuc

SEQ ID NO: 143860 - RNA, 19 nt, Artificial Sequence
  Description of Artificial Sequence: Synthetic oligonucleotide
cuguauuuguaggaaacga

SEQ ID NO: 143861 - RNA, 19 nt, Artificial Sequence
  Description of Artificial Sequence: Synthetic oligonucleotide
uucuuccucggaagauaag

SEQ ID NO: 143862 - RNA, 19 nt, Artificial Sequence
  Description of Artificial Sequence: Synthetic oligonucleotide
ggcucgaaaccucuuauca

SEQ ID NO: 143863 - RNA, 19 nt, Artificial Sequence
  Description of Artificial Sequence: Synthetic oligonucleotide
caaauugaauaagugggaa

SEQ ID NO: 143864 - RNA, 19 nt, Artificial Sequence
  Description of Artificial Sequence: Synthetic oligonucleotide
ucaugaaacauggcucgaa

SEQ ID NO: 143865 - RNA, 19 nt, Artificial Sequence
  Description of Artificial Sequence: Synthetic oligonucleotide
acaagcggcuguuggagau

SEQ ID NO: 143866 - RNA, 19 nt, Artificial Sequence
  Description of Artificial Sequence: Synthetic oligonucleotide
aacgaacuucauacaauau

SEQ ID NO: 143867 - RNA, 19 nt, Artificial Sequence
  Description of Artificial Sequence: Synthetic oligonucleotide
ccuugacaagaucaggacc

SEQ ID NO: 143868 - RNA, 19 nt, Artificial Sequence
  Description of Artificial Sequence: Synthetic oligonucleotide
ugcaaacugcuagucgaug

SEQ ID NO: 143869 - RNA, 19 nt, Artificial Sequence
  Description of Artificial Sequence: Synthetic oligonucleotide
uguagagagucugcacugu

SEQ ID NO: 143870 - RNA, 19 nt, Artificial Sequence
  Description of Artificial Sequence: Synthetic oligonucleotide
acagcauaacucaacuuaa

SEQ ID NO: 143871 - RNA, 19 nt, Artificial Sequence
  Description of Artificial Sequence: Synthetic oligonucleotide
uucuugaaauuaggaucag

SEQ ID NO: 143872 - RNA, 19 nt, Artificial Sequence
  Description of Artificial Sequence: Synthetic oligonucleotide
ugucauaguugaaguguuu

SEQ ID NO: 143873 - RNA, 19 nt, Artificial Sequence
  Description of Artificial Sequence: Synthetic oligonucleotide
uucaaucguuugaacugau

SEQ ID NO: 143874 - RNA, 19 nt, Artificial Sequence
  Description of Artificial Sequence: Synthetic oligonucleotide
uggaacccacuugauuucc

SEQ ID NO: 143875 - RNA, 19 nt, Artificial Sequence
  Description of Artificial Sequence: Synthetic oligonucleotide
uccaccguugauguuccca

SEQ ID NO: 143876 - RNA, 19 nt, Artificial Sequence
  Description of Artificial Sequence: Synthetic oligonucleotide
cuggugcuccacaaucuug

SEQ ID NO: 143877 - RNA, 19 nt, Artificial Sequence
  Description of Artificial Sequence: Synthetic oligonucleotide
cuuuucguucucgcugccg

SEQ ID NO: 143878 - RNA, 19 nt, Artificial Sequence
  Description of Artificial Sequence: Synthetic oligonucleotide
uccguagugcuguggcuga

SEQ ID NO: 143879 - RNA, 19 nt, Artificial Sequence
  Description of Artificial Sequence: Synthetic oligonucleotide
cuggaacccacuugauuuc

SEQ ID NO: 143880 - RNA, 19 nt, Artificial Sequence
  Description of Artificial Sequence: Synthetic oligonucleotide
cugagauuuacacaaguuu

SEQ ID NO: 143881 - RNA, 19 nt, Artificial Sequence
  Description of Artificial Sequence: Synthetic oligonucleotide
agagggauccaaauugaau

SEQ ID NO: 143882 - RNA, 19 nt, Artificial Sequence
  Description of Artificial Sequence: Synthetic oligonucleotide
cuugggacuuauuucugaa

SEQ ID NO: 143883 - RNA, 19 nt, Artificial Sequence
  Description of Artificial Sequence: Synthetic oligonucleotide
guaaucucaucagcccgag

SEQ ID NO: 143884 - RNA, 19 nt, Artificial Sequence
  Description of Artificial Sequence: Synthetic oligonucleotide
gucgauguguaaucucauc

SEQ ID NO: 143885 - RNA, 19 nt, Artificial Sequence
  Description of Artificial Sequence: Synthetic oligonucleotide
ucguuucaagucuuccgua

SEQ ID NO: 143886 - RNA, 19 nt, Artificial Sequence
  Description of Artificial Sequence: Synthetic oligonucleotide
auccuuugaaacccgccua

SEQ ID NO: 143887 - RNA, 19 nt, Artificial Sequence
  Description of Artificial Sequence: Synthetic oligonucleotide
gaaguguacauugccugaa

SEQ ID NO: 143888 - RNA, 19 nt, Artificial Sequence
  Description of Artificial Sequence: Synthetic oligonucleotide
ucgagcauuucaccaucau

SEQ ID NO: 143889 - RNA, 19 nt, Artificial Sequence
  Description of Artificial Sequence: Synthetic oligonucleotide
guaacucuacugguccuug

SEQ ID NO: 143890 - RNA, 19 nt, Artificial Sequence
  Description of Artificial Sequence: Synthetic oligonucleotide
aacccgccuaaagcgcugg

SEQ ID NO: 143891 - RNA, 19 nt, Artificial Sequence
  Description of Artificial Sequence: Synthetic oligonucleotide
acuuccuauuucacuacca

SEQ ID NO: 143892 - RNA, 19 nt, Artificial Sequence
  Description of Artificial Sequence: Synthetic oligonucleotide
cuucuuccucggaagauaa

SEQ ID NO: 143893 - RNA, 19 nt, Artificial Sequence
  Description of Artificial Sequence: Synthetic oligonucleotide
gaaacgaacuucauacaau

SEQ ID NO: 143894 - RNA, 19 nt, Artificial Sequence
  Description of Artificial Sequence: Synthetic oligonucleotide
aucgugagucguuaacauu

SEQ ID NO: 143895 - RNA, 19 nt, Artificial Sequence
  Description of Artificial Sequence: Synthetic oligonucleotide
guaguaucaucugguauaa

SEQ ID NO: 143896 - RNA, 19 nt, Artificial Sequence
  Description of Artificial Sequence: Synthetic oligonucleotide
ggaagcuaaauuagaguca

SEQ ID NO: 143897 - RNA, 19 nt, Artificial Sequence
  Description of Artificial Sequence: Synthetic oligonucleotide
auaagguacuacauauaua

SEQ ID NO: 143898 - RNA, 19 nt, Artificial Sequence
  Description of Artificial Sequence: Synthetic oligonucleotide
augcaagagcugucuauau

SEQ ID NO: 143899 - RNA, 19 nt, Artificial Sequence
  Description of Artificial Sequence: Synthetic oligonucleotide
uacuuagaucugccaccug

SEQ ID NO: 143900 - RNA, 19 nt, Artificial Sequence
  Description of Artificial Sequence: Synthetic oligonucleotide
ucacuagaggaggcuaagu

SEQ ID NO: 143901 - RNA, 19 nt, Artificial Sequence
  Description of Artificial Sequence: Synthetic oligonucleotide
uggcucgaaaccucuuauc

SEQ ID NO: 143902 - RNA, 19 nt, Artificial Sequence
  Description of Artificial Sequence: Synthetic oligonucleotide
uuaggaucagagggaucca

SEQ ID NO: 143903 - RNA, 19 nt, Artificial Sequence
  Description of Artificial Sequence: Synthetic oligonucleotide
cuuuugccuuuaaucuauc

SEQ ID NO: 143904 - RNA, 19 nt, Artificial Sequence
  Description of Artificial Sequence: Synthetic oligonucleotide
aaagcgcuggucauucauu

SEQ ID NO: 143905 - RNA, 19 nt, Artificial Sequence
  Description of Artificial Sequence: Synthetic oligonucleotide
gcuaaguaggccuggaagu

SEQ ID NO: 143906 - RNA, 19 nt, Artificial Sequence
  Description of Artificial Sequence: Synthetic oligonucleotide
gggauccaaauugaauaag

SEQ ID NO: 143907 - RNA, 19 nt, Artificial Sequence
  Description of Artificial Sequence: Synthetic oligonucleotide
ccauaucauuuucuuuucc

SEQ ID NO: 143908 - RNA, 19 nt, Artificial Sequence
  Description of Artificial Sequence: Synthetic oligonucleotide
gaaccuaucuucugagauu

SEQ ID NO: 143909 - RNA, 19 nt, Artificial Sequence
  Description of Artificial Sequence: Synthetic oligonucleotide
aucuaucccaguccauguu

SEQ ID NO: 143910 - RNA, 19 nt, Artificial Sequence
  Description of Artificial Sequence: Synthetic oligonucleotide
auccucaccuuguggugcu

SEQ ID NO: 143911 - RNA, 19 nt, Artificial Sequence
  Description of Artificial Sequence: Synthetic oligonucleotide
cguuucaagucuuccguag

SEQ ID NO: 143912 - RNA, 19 nt, Artificial Sequence
  Description of Artificial Sequence: Synthetic oligonucleotide
ggaauacucaguaacucua

SEQ ID NO: 143913 - RNA, 19 nt, Artificial Sequence
  Description of Artificial Sequence: Synthetic oligonucleotide
caguuacuuagaucugcca

SEQ ID NO: 143914 - RNA, 19 nt, Artificial Sequence
  Description of Artificial Sequence: Synthetic oligonucleotide
cugaaccuaucuucugaga

SEQ ID NO: 143915 - RNA, 19 nt, Artificial Sequence
  Description of Artificial Sequence: Synthetic oligonucleotide
aggaccacugucacuuuca

SEQ ID NO: 143916 - RNA, 19 nt, Artificial Sequence
  Description of Artificial Sequence: Synthetic oligonucleotide
cucuuagcuucucucuaga

SEQ ID NO: 143917 - RNA, 19 nt, Artificial Sequence
  Description of Artificial Sequence: Synthetic oligonucleotide
caaacuccgaaggauauau

SEQ ID NO: 143918 - RNA, 19 nt, Artificial Sequence
  Description of Artificial Sequence: Synthetic oligonucleotide
acuccgaaggauauaucuu

SEQ ID NO: 143919 - RNA, 19 nt, Artificial Sequence
  Description of Artificial Sequence: Synthetic oligonucleotide
gucuuuagaacaagcggcu

SEQ ID NO: 143920 - RNA, 19 nt, Artificial Sequence
  Description of Artificial Sequence: Synthetic oligonucleotide
gcugucuauauuuugcaau

SEQ ID NO: 143921 - RNA, 19 nt, Artificial Sequence
  Description of Artificial Sequence: Synthetic oligonucleotide
cccuugacaagaucaggac

SEQ ID NO: 143922 - RNA, 19 nt, Artificial Sequence
  Description of Artificial Sequence: Synthetic oligonucleotide
caucaucaguugaaguucu

SEQ ID NO: 143923 - RNA, 19 nt, Artificial Sequence
  Description of Artificial Sequence: Synthetic oligonucleotide
aagcggcuguuggagauuu

SEQ ID NO: 143924 - RNA, 19 nt, Artificial Sequence
  Description of Artificial Sequence: Synthetic oligonucleotide
ccgaaggauauaucuuuac

SEQ ID NO: 143925 - RNA, 19 nt, Artificial Sequence
  Description of Artificial Sequence: Synthetic oligonucleotide
ggauccuuugaaacccgcc

SEQ ID NO: 143926 - RNA, 19 nt, Artificial Sequence
  Description of Artificial Sequence: Synthetic oligonucleotide
cagcauaacucaacuuaaa

SEQ ID NO: 143927 - RNA, 19 nt, Artificial Sequence
  Description of Artificial Sequence: Synthetic oligonucleotide
caggaccacugucacuuuc

SEQ ID NO: 143928 - RNA, 19 nt, Artificial Sequence
  Description of Artificial Sequence: Synthetic oligonucleotide
aucggcucuugccauuaua

SEQ ID NO: 143929 - RNA, 19 nt, Artificial Sequence
  Description of Artificial Sequence: Synthetic oligonucleotide
ucaucggcucuugccauua

SEQ ID NO: 143930 - RNA, 19 nt, Artificial Sequence
  Description of Artificial Sequence: Synthetic oligonucleotide
gcuguuagaucaacuucug

SEQ ID NO: 143931 - RNA, 19 nt, Artificial Sequence
  Description of Artificial Sequence: Synthetic oligonucleotide
cuccgaaggauauaucuuu

SEQ ID NO: 143932 - RNA, 19 nt, Artificial Sequence
  Description of Artificial Sequence: Synthetic oligonucleotide
gucggaaaggucauaguau

SEQ ID NO: 143933 - RNA, 19 nt, Artificial Sequence
  Description of Artificial Sequence: Synthetic oligonucleotide
gucuuccguagugcugugg

SEQ ID NO: 143934 - RNA, 19 nt, Artificial Sequence
  Description of Artificial Sequence: Synthetic oligonucleotide
aggcuaaguaggccuggaa

SEQ ID NO: 143935 - RNA, 19 nt, Artificial Sequence
  Description of Artificial Sequence: Synthetic oligonucleotide
gacuuauuucugaaccuau

SEQ ID NO: 143936 - RNA, 19 nt, Artificial Sequence
  Description of Artificial Sequence: Synthetic oligonucleotide
augaucagucucaucccaa

SEQ ID NO: 143937 - RNA, 19 nt, Artificial Sequence
  Description of Artificial Sequence: Synthetic oligonucleotide
gaaacccgccuaaagcgcu

SEQ ID NO: 143938 - RNA, 19 nt, Artificial Sequence
  Description of Artificial Sequence: Synthetic oligonucleotide
augggccgcuucugugccg

SEQ ID NO: 143939 - RNA, 19 nt, Artificial Sequence
  Description of Artificial Sequence: Synthetic oligonucleotide
ggaucuaugggccgcuucu

SEQ ID NO: 143940 - RNA, 19 nt, Artificial Sequence
  Description of Artificial Sequence: Synthetic oligonucleotide
ccuaaagcgcuggucauuc

SEQ ID NO: 143941 - RNA, 19 nt, Artificial Sequence
  Description of Artificial Sequence: Synthetic oligonucleotide
ugggccgcuucugugccga

SEQ ID NO: 143942 - RNA, 19 nt, Artificial Sequence
  Description of Artificial Sequence: Synthetic oligonucleotide
ggaggcuaaguaggccugg

SEQ ID NO: 143943 - RNA, 19 nt, Artificial Sequence
  Description of Artificial Sequence: Synthetic oligonucleotide
acuauccuucuugggacuu

SEQ ID NO: 143944 - RNA, 19 nt, Artificial Sequence
  Description of Artificial Sequence: Synthetic oligonucleotide
cugaaaucgugagucguua

SEQ ID NO: 143945 - RNA, 19 nt, Artificial Sequence
  Description of Artificial Sequence: Synthetic oligonucleotide
gcccucuuuugucaacagc

SEQ ID NO: 143946 - RNA, 19 nt, Artificial Sequence
  Description of Artificial Sequence: Synthetic oligonucleotide
cgaaggauauaucuuuaca

SEQ ID NO: 143947 - RNA, 19 nt, Artificial Sequence
  Description of Artificial Sequence: Synthetic oligonucleotide
uggcugauagggcgcccuc

SEQ ID NO: 143948 - RNA, 19 nt, Artificial Sequence
  Description of Artificial Sequence: Synthetic oligonucleotide
ggcaggaucuaugggccgc

SEQ ID NO: 143949 - RNA, 19 nt, Artificial Sequence
  Description of Artificial Sequence: Synthetic oligonucleotide
gguauaaaccuuagaucua

SEQ ID NO: 143950 - RNA, 19 nt, Artificial Sequence
  Description of Artificial Sequence: Synthetic oligonucleotide
ugccgacuuuccuguguuc

SEQ ID NO: 143951 - RNA, 19 nt, Artificial Sequence
  Description of Artificial Sequence: Synthetic oligonucleotide
agcccgaggagcaucuuua

SEQ ID NO: 143952 - RNA, 19 nt, Artificial Sequence
  Description of Artificial Sequence: Synthetic oligonucleotide
guacauugccugaaaucgu

SEQ ID NO: 143953 - RNA, 19 nt, Artificial Sequence
  Description of Artificial Sequence: Synthetic oligonucleotide
gucgagcauuucaccauca

SEQ ID NO: 143954 - RNA, 19 nt, Artificial Sequence
  Description of Artificial Sequence: Synthetic oligonucleotide
ggcuuauaugcuguuagau

SEQ ID NO: 143955 - RNA, 19 nt, Artificial Sequence
  Description of Artificial Sequence: Synthetic oligonucleotide
gggauccuuugaaacccgc

SEQ ID NO: 143956 - RNA, 19 nt, Artificial Sequence
  Description of Artificial Sequence: Synthetic oligonucleotide
cccaguccauguugcaaac

SEQ ID NO: 143957 - RNA, 19 nt, Artificial Sequence
  Description of Artificial Sequence: Synthetic oligonucleotide
gcggcuguuggagauuuca

SEQ ID NO: 143958 - RNA, 19 nt, Artificial Sequence
  Description of Artificial Sequence: Synthetic oligonucleotide
cacuauccuucuugggacu

SEQ ID NO: 143959 - RNA, 19 nt, Artificial Sequence
  Description of Artificial Sequence: Synthetic oligonucleotide
cagagguacuagaaucuuu

SEQ ID NO: 143960 - RNA, 19 nt, Artificial Sequence
  Description of Artificial Sequence: Synthetic oligonucleotide
caacagcauaacucaacuu

SEQ ID NO: 143961 - RNA, 19 nt, Artificial Sequence
  Description of Artificial Sequence: Synthetic oligonucleotide
cuuucaugaucagucucau

SEQ ID NO: 143962 - RNA, 19 nt, Artificial Sequence
  Description of Artificial Sequence: Synthetic oligonucleotide
cuguggaaaugcacaguau

SEQ ID NO: 143963 - RNA, 19 nt, Artificial Sequence
  Description of Artificial Sequence: Synthetic oligonucleotide
cuuccguagugcuguggcu

SEQ ID NO: 143964 - RNA, 19 nt, Artificial Sequence
  Description of Artificial Sequence: Synthetic oligonucleotide
gugaaauacuuuggcuuau

SEQ ID NO: 143965 - RNA, 19 nt, Artificial Sequence
  Description of Artificial Sequence: Synthetic oligonucleotide
cugcuagucgauguguaau

SEQ ID NO: 143966 - RNA, 19 nt, Artificial Sequence
  Description of Artificial Sequence: Synthetic oligonucleotide
caucaucggcucuugccau

SEQ ID NO: 143967 - RNA, 19 nt, Artificial Sequence
  Description of Artificial Sequence: Synthetic oligonucleotide
acccgccuaaagcgcuggu

SEQ ID NO: 143968 - RNA, 19 nt, Artificial Sequence
  Description of Artificial Sequence: Synthetic oligonucleotide
ggaacccacuugauuucca

SEQ ID NO: 143969 - RNA, 19 nt, Artificial Sequence
  Description of Artificial Sequence: Synthetic oligonucleotide
agcggcuguuggagauuuc

SEQ ID NO: 143970 - RNA, 19 nt, Artificial Sequence
  Description of Artificial Sequence: Synthetic oligonucleotide
ggcaucuuugucgagcauu

SEQ ID NO: 143971 - RNA, 19 nt, Artificial Sequence
  Description of Artificial Sequence: Synthetic oligonucleotide
ccucacuagaggaggcuaa

SEQ ID NO: 143972 - RNA, 19 nt, Artificial Sequence
  Description of Artificial Sequence: Synthetic oligonucleotide
ccgggcuuucuccucaaga

SEQ ID NO: 143973 - RNA, 19 nt, Artificial Sequence
  Description of Artificial Sequence: Synthetic oligonucleotide
ccagcaaaucuuuugccuu

SEQ ID NO: 143974 - RNA, 19 nt, Artificial Sequence
  Description of Artificial Sequence: Synthetic oligonucleotide
acauggcucgaaaccucuu

SEQ ID NO: 143975 - RNA, 19 nt, Artificial Sequence
  Description of Artificial Sequence: Synthetic oligonucleotide
ccauuauaacugaacugau

SEQ ID NO: 143976 - RNA, 19 nt, Artificial Sequence
  Description of Artificial Sequence: Synthetic oligonucleotide
gugccgacuuuccuguguu

SEQ ID NO: 143977 - RNA, 19 nt, Artificial Sequence
  Description of Artificial Sequence: Synthetic oligonucleotide
ggcgcccucuuuugucaac

SEQ ID NO: 143978 - RNA, 19 nt, Artificial Sequence
  Description of Artificial Sequence: Synthetic oligonucleotide
gccgacuuuccuguguucu

SEQ ID NO: 143979 - RNA, 19 nt, Artificial Sequence
  Description of Artificial Sequence: Synthetic oligonucleotide
gcgcuggucauucauuauu

SEQ ID NO: 143980 - RNA, 19 nt, Artificial Sequence
  Description of Artificial Sequence: Synthetic oligonucleotide
gccugaaaucgugagucgu

SEQ ID NO: 143981 - RNA, 19 nt, Artificial Sequence
  Description of Artificial Sequence: Synthetic oligonucleotide
guggcugauagggcgcccu

SEQ ID NO: 143982 - RNA, 19 nt, Artificial Sequence
  Description of Artificial Sequence: Synthetic oligonucleotide
cucuagaggcccagucuuu

SEQ ID NO: 143983 - RNA, 19 nt, Artificial Sequence
  Description of Artificial Sequence: Synthetic oligonucleotide
cuauuuccuuuaaccccuu

SEQ ID NO: 143984 - RNA, 19 nt, Artificial Sequence
  Description of Artificial Sequence: Synthetic oligonucleotide
cuggggcauccucaggaau

SEQ ID NO: 143985 - RNA, 19 nt, Artificial Sequence
  Description of Artificial Sequence: Synthetic oligonucleotide
ccuuaaggccuggaaccca

SEQ ID NO: 143986 - RNA, 19 nt, Artificial Sequence
  Description of Artificial Sequence: Synthetic oligonucleotide
ccucaccuuguggugcuuc

SEQ ID NO: 143987 - RNA, 19 nt, Artificial Sequence
  Description of Artificial Sequence: Synthetic oligonucleotide
cgcccucuuuugucaacag

SEQ ID NO: 143988 - RNA, 19 nt, Artificial Sequence
  Description of Artificial Sequence: Synthetic oligonucleotide
cauuacaagcaaggccauu

SEQ ID NO: 143989 - RNA, 19 nt, Artificial Sequence
  Description of Artificial Sequence: Synthetic oligonucleotide
gccuggaacccacuugauu

SEQ ID NO: 143990 - RNA, 19 nt, Artificial Sequence
  Description of Artificial Sequence: Synthetic oligonucleotide
cugauagggcgcccucuuu

SEQ ID NO: 143991 - RNA, 19 nt, Artificial Sequence
  Description of Artificial Sequence: Synthetic oligonucleotide
ccaagugaucuccaccguu

SEQ ID NO: 143992 - RNA, 19 nt, Artificial Sequence
  Description of Artificial Sequence: Synthetic oligonucleotide
ccaccugucuucacagaau

SEQ ID NO: 143993 - RNA, 19 nt, Artificial Sequence
  Description of Artificial Sequence: Synthetic oligonucleotide
caccguugauguucccauu

SEQ ID NO: 143994 - RNA, 19 nt, Artificial Sequence
  Description of Artificial Sequence: Synthetic oligonucleotide
gggcgcccucuuuugucaa

SEQ ID NO: 143995 - RNA, 19 nt, Artificial Sequence
  Description of Artificial Sequence: Synthetic oligonucleotide
gcaggaucuaugggccgcu

SEQ ID NO: 143996 - RNA, 19 nt, Artificial Sequence
  Description of Artificial Sequence: Synthetic oligonucleotide
caucggcucuugccauuau

SEQ ID NO: 143997 - RNA, 19 nt, Artificial Sequence
  Description of Artificial Sequence: Synthetic oligonucleotide
gcccgaggagcaucuuuau

SEQ ID NO: 143998 - RNA, 19 nt, Artificial Sequence
  Description of Artificial Sequence: Synthetic oligonucleotide
gccuaaagcgcuggucauu

SEQ ID NO: 143999 - RNA, 19 nt, Artificial Sequence
  Description of Artificial Sequence: Synthetic oligonucleotide
ccaguccauguugcaaacu

SEQ ID NO: 144000 - RNA, 19 nt, Artificial Sequence
  Description of Artificial Sequence: Synthetic oligonucleotide
caggaucuaugggccgcuu

SEQ ID NO: 144001 - RNA, 19 nt, Artificial Sequence
  Description of Artificial Sequence: Synthetic oligonucleotide
cgccuaaagcgcuggucau

SEQ ID NO: 144002 - RNA, 19 nt, Artificial Sequence
  Description of Artificial Sequence: Synthetic oligonucleotide
cguucucgcugccgggcuu

SEQ ID NO: 144003 - RNA, 19 nt, Artificial Sequence
  Description of Artificial Sequence: Synthetic oligonucleotide
ccguagugcuguggcugau

SEQ ID NO: 144004 - RNA, 19 nt, Artificial Sequence
  Description of Artificial Sequence: Synthetic oligonucleotide
ccgcuucugugccgacuuu

SEQ ID NO: 144005 - RNA, 19 nt, Artificial Sequence
  Description of Artificial Sequence: Synthetic oligonucleotide
uuuugauuccccaugagcg

SEQ ID NO: 144006 - RNA, 19 nt, Artificial Sequence
  Description of Artificial Sequence: Synthetic oligonucleotide
aauacgacuuaucauuugg

SEQ ID NO: 144007 - RNA, 19 nt, Artificial Sequence
  Description of Artificial Sequence: Synthetic oligonucleotide
gaugggauuaaauauuagg

SEQ ID NO: 144008 - RNA, 19 nt, Artificial Sequence
  Description of Artificial Sequence: Synthetic oligonucleotide
ugucuuaggauuaagguca

SEQ ID NO: 144009 - RNA, 19 nt, Artificial Sequence
  Description of Artificial Sequence: Synthetic oligonucleotide
acauuucagguuuagaccg

SEQ ID NO: 144010 - RNA, 19 nt, Artificial Sequence
  Description of Artificial Sequence: Synthetic oligonucleotide
ucgauaagggauaugcugg

SEQ ID NO: 144011 - RNA, 19 nt, Artificial Sequence
  Description of Artificial Sequence: Synthetic oligonucleotide
uaaagaaggagccaaguac

SEQ ID NO: 144012 - RNA, 19 nt, Artificial Sequence
  Description of Artificial Sequence: Synthetic oligonucleotide
augggauuaaauauuaggc

SEQ ID NO: 144013 - RNA, 19 nt, Artificial Sequence
  Description of Artificial Sequence: Synthetic oligonucleotide
aaauauuaggcaagaaccg

SEQ ID NO: 144014 - RNA, 19 nt, Artificial Sequence
  Description of Artificial Sequence: Synthetic oligonucleotide
aaccgucagagccacaccc

SEQ ID NO: 144015 - RNA, 19 nt, Artificial Sequence
  Description of Artificial Sequence: Synthetic oligonucleotide
agaaggauagcccuugcac

SEQ ID NO: 144016 - RNA, 19 nt, Artificial Sequence
  Description of Artificial Sequence: Synthetic oligonucleotide
aaaggaaugcuauucugug

SEQ ID NO: 144017 - RNA, 19 nt, Artificial Sequence
  Description of Artificial Sequence: Synthetic oligonucleotide
ugagccuaaaccuaaagaa

SEQ ID NO: 144018 - RNA, 19 nt, Artificial Sequence
  Description of Artificial Sequence: Synthetic oligonucleotide
ucauauccggugcacaugg

SEQ ID NO: 144019 - RNA, 19 nt, Artificial Sequence
  Description of Artificial Sequence: Synthetic oligonucleotide
agagguaucuugucggccc

SEQ ID NO: 144020 - RNA, 19 nt, Artificial Sequence
  Description of Artificial Sequence: Synthetic oligonucleotide
uucgagauuguucaaugcc

SEQ ID NO: 144021 - RNA, 19 nt, Artificial Sequence
  Description of Artificial Sequence: Synthetic oligonucleotide
uuuucaguggggaagagua

SEQ ID NO: 144022 - RNA, 19 nt, Artificial Sequence
  Description of Artificial Sequence: Synthetic oligonucleotide
uacgggagugucuuaaucg

SEQ ID NO: 144023 - RNA, 19 nt, Artificial Sequence
  Description of Artificial Sequence: Synthetic oligonucleotide
aauguccguaccgagauag

SEQ ID NO: 144024 - RNA, 19 nt, Artificial Sequence
  Description of Artificial Sequence: Synthetic oligonucleotide
ugggauuaaauauuaggca

SEQ ID NO: 144025 - RNA, 19 nt, Artificial Sequence
  Description of Artificial Sequence: Synthetic oligonucleotide
aaugcuugcagaguaacca

SEQ ID NO: 144026 - RNA, 19 nt, Artificial Sequence
  Description of Artificial Sequence: Synthetic oligonucleotide
gguuuugacacauucaagc

SEQ ID NO: 144027 - RNA, 19 nt, Artificial Sequence
  Description of Artificial Sequence: Synthetic oligonucleotide
agacuaaacuuccuugaac

SEQ ID NO: 144028 - RNA, 19 nt, Artificial Sequence
  Description of Artificial Sequence: Synthetic oligonucleotide
aauauuaggcaagaaccgu

SEQ ID NO: 144029 - RNA, 19 nt, Artificial Sequence
  Description of Artificial Sequence: Synthetic oligonucleotide
uaaggaacggcagaaauuc

SEQ ID NO: 144030 - RNA, 19 nt, Artificial Sequence
  Description of Artificial Sequence: Synthetic oligonucleotide
uccguaccgagauagaugu

SEQ ID NO: 144031 - RNA, 19 nt, Artificial Sequence
  Description of Artificial Sequence: Synthetic oligonucleotide
cucgauaagggauaugcug

SEQ ID NO: 144032 - RNA, 19 nt, Artificial Sequence
  Description of Artificial Sequence: Synthetic oligonucleotide
ucgagauuguucaaugcca

SEQ ID NO: 144033 - RNA, 19 nt, Artificial Sequence
  Description of Artificial Sequence: Synthetic oligonucleotide
uauuaggcaagaaccguca

SEQ ID NO: 144034 - RNA, 19 nt, Artificial Sequence
  Description of Artificial Sequence: Synthetic oligonucleotide
uguucgaaaggaaugcuau

SEQ ID NO: 144035 - RNA, 19 nt, Artificial Sequence
  Description of Artificial Sequence: Synthetic oligonucleotide
acgggagugucuuaaucgc

SEQ ID NO: 144036 - RNA, 19 nt, Artificial Sequence
  Description of Artificial Sequence: Synthetic oligonucleotide
cucucgauaagggauaugc

SEQ ID NO: 144037 - RNA, 19 nt, Artificial Sequence
  Description of Artificial Sequence: Synthetic oligonucleotide
ugcagcaauguccguaccg

SEQ ID NO: 144038 - RNA, 19 nt, Artificial Sequence
  Description of Artificial Sequence: Synthetic oligonucleotide
agccuaaaccuaaagaagg

SEQ ID NO: 144039 - RNA, 19 nt, Artificial Sequence
  Description of Artificial Sequence: Synthetic oligonucleotide
uaucuugucggcccgugag

SEQ ID NO: 144040 - RNA, 19 nt, Artificial Sequence
  Description of Artificial Sequence: Synthetic oligonucleotide
aagaaggagccaaguaccc

SEQ ID NO: 144041 - RNA, 19 nt, Artificial Sequence
  Description of Artificial Sequence: Synthetic oligonucleotide
acgacuuaucauuugguca

SEQ ID NO: 144042 - RNA, 19 nt, Artificial Sequence
  Description of Artificial Sequence: Synthetic oligonucleotide
aaguagaagacugguagcu

SEQ ID NO: 144043 - RNA, 19 nt, Artificial Sequence
  Description of Artificial Sequence: Synthetic oligonucleotide
acugucuuaaccaaguaga

SEQ ID NO: 144044 - RNA, 19 nt, Artificial Sequence
  Description of Artificial Sequence: Synthetic oligonucleotide
ucuuaaucgcuccucucug

SEQ ID NO: 144045 - RNA, 19 nt, Artificial Sequence
  Description of Artificial Sequence: Synthetic oligonucleotide
aucccuucgagauuguuca

SEQ ID NO: 144046 - RNA, 19 nt, Artificial Sequence
  Description of Artificial Sequence: Synthetic oligonucleotide
uugauacacacauucuaac

SEQ ID NO: 144047 - RNA, 19 nt, Artificial Sequence
  Description of Artificial Sequence: Synthetic oligonucleotide
agaaccgucagagccacac

SEQ ID NO: 144048 - RNA, 19 nt, Artificial Sequence
  Description of Artificial Sequence: Synthetic oligonucleotide
augcuauucugugaggugg

SEQ ID NO: 144049 - RNA, 19 nt, Artificial Sequence
  Description of Artificial Sequence: Synthetic oligonucleotide
ucgaaaggaaugcuauucu

SEQ ID NO: 144050 - RNA, 19 nt, Artificial Sequence
  Description of Artificial Sequence: Synthetic oligonucleotide
aacuacacuuccugcacgu

SEQ ID NO: 144051 - RNA, 19 nt, Artificial Sequence
  Description of Artificial Sequence: Synthetic oligonucleotide
aagacugguagcugcggug

SEQ ID NO: 144052 - RNA, 19 nt, Artificial Sequence
  Description of Artificial Sequence: Synthetic oligonucleotide
uucgaaugaauguacucaa

SEQ ID NO: 144053 - RNA, 19 nt, Artificial Sequence
  Description of Artificial Sequence: Synthetic oligonucleotide
guauguggcaaauucagaa

SEQ ID NO: 144054 - RNA, 19 nt, Artificial Sequence
  Description of Artificial Sequence: Synthetic oligonucleotide
ugaugggauuaaauauuag

SEQ ID NO: 144055 - RNA, 19 nt, Artificial Sequence
  Description of Artificial Sequence: Synthetic oligonucleotide
gaagaaggauaagccaugg

SEQ ID NO: 144056 - RNA, 19 nt, Artificial Sequence
  Description of Artificial Sequence: Synthetic oligonucleotide
cucagaaagaagcacccac

SEQ ID NO: 144057 - RNA, 19 nt, Artificial Sequence
  Description of Artificial Sequence: Synthetic oligonucleotide
uguagaagggaggccacgg

SEQ ID NO: 144058 - RNA, 19 nt, Artificial Sequence
  Description of Artificial Sequence: Synthetic oligonucleotide
aucggugcacgacagacug

SEQ ID NO: 144059 - RNA, 19 nt, Artificial Sequence
  Description of Artificial Sequence: Synthetic oligonucleotide
agaccaaagucaaugaugu

SEQ ID NO: 144060 - RNA, 19 nt, Artificial Sequence
  Description of Artificial Sequence: Synthetic oligonucleotide
ccaaguagaagacugguag

SEQ ID NO: 144061 - RNA, 19 nt, Artificial Sequence
  Description of Artificial Sequence: Synthetic oligonucleotide
gauguguguugauggaggc

SEQ ID NO: 144062 - RNA, 19 nt, Artificial Sequence
  Description of Artificial Sequence: Synthetic oligonucleotide
caaguagaagacugguagc

SEQ ID NO: 144063 - RNA, 19 nt, Artificial Sequence
  Description of Artificial Sequence: Synthetic oligonucleotide
ugcggugggaucgucaggg

SEQ ID NO: 144064 - RNA, 19 nt, Artificial Sequence
  Description of Artificial Sequence: Synthetic oligonucleotide
gagauagaugucuccgaag

SEQ ID NO: 144065 - RNA, 19 nt, Artificial Sequence
  Description of Artificial Sequence: Synthetic oligonucleotide
caaguacccagcauaacuc

SEQ ID NO: 144066 - RNA, 19 nt, Artificial Sequence
  Description of Artificial Sequence: Synthetic oligonucleotide
uacgacuuaucauuugguc

SEQ ID NO: 144067 - RNA, 19 nt, Artificial Sequence
  Description of Artificial Sequence: Synthetic oligonucleotide
ugggccuaaucucagcaca

SEQ ID NO: 144068 - RNA, 19 nt, Artificial Sequence
  Description of Artificial Sequence: Synthetic oligonucleotide
agauguguguugauggagg

SEQ ID NO: 144069 - RNA, 19 nt, Artificial Sequence
  Description of Artificial Sequence: Synthetic oligonucleotide
gaagcgccaagccagcaug

SEQ ID NO: 144070 - RNA, 19 nt, Artificial Sequence
  Description of Artificial Sequence: Synthetic oligonucleotide
ucaauacgacuuaucauuu

SEQ ID NO: 144071 - RNA, 19 nt, Artificial Sequence
  Description of Artificial Sequence: Synthetic oligonucleotide
caucugaugguagggaugc

SEQ ID NO: 144072 - RNA, 19 nt, Artificial Sequence
  Description of Artificial Sequence: Synthetic oligonucleotide
accgagauagaugucuccg

SEQ ID NO: 144073 - RNA, 19 nt, Artificial Sequence
  Description of Artificial Sequence: Synthetic oligonucleotide
cuucgagauuguucaaugc

SEQ ID NO: 144074 - RNA, 19 nt, Artificial Sequence
  Description of Artificial Sequence: Synthetic oligonucleotide
ugauuccccaugagcgucg

SEQ ID NO: 144075 - RNA, 19 nt, Artificial Sequence
  Description of Artificial Sequence: Synthetic oligonucleotide
uuucagguuuagaccgggg

SEQ ID NO: 144076 - RNA, 19 nt, Artificial Sequence
  Description of Artificial Sequence: Synthetic oligonucleotide
gacucagaaagaagcaccc

SEQ ID NO: 144077 - RNA, 19 nt, Artificial Sequence
  Description of Artificial Sequence: Synthetic oligonucleotide
uuguuggcauccuaaccgc

SEQ ID NO: 144078 - RNA, 19 nt, Artificial Sequence
  Description of Artificial Sequence: Synthetic oligonucleotide
ugguguucgaaaggaaugc

SEQ ID NO: 144079 - RNA, 19 nt, Artificial Sequence
  Description of Artificial Sequence: Synthetic oligonucleotide
aagcucgcggcaccacacc

SEQ ID NO: 144080 - RNA, 19 nt, Artificial Sequence
  Description of Artificial Sequence: Synthetic oligonucleotide
auucgagagguaucuuguc

SEQ ID NO: 144081 - RNA, 19 nt, Artificial Sequence
  Description of Artificial Sequence: Synthetic oligonucleotide
accccgauaccccuccagc

SEQ ID NO: 144082 - RNA, 19 nt, Artificial Sequence
  Description of Artificial Sequence: Synthetic oligonucleotide
gggauuaaauauuaggcaa

SEQ ID NO: 144083 - RNA, 19 nt, Artificial Sequence
  Description of Artificial Sequence: Synthetic oligonucleotide
uuaaucgcuccucucuguc

SEQ ID NO: 144084 - RNA, 19 nt, Artificial Sequence
  Description of Artificial Sequence: Synthetic oligonucleotide
agucaucccuucgagauug

SEQ ID NO: 144085 - RNA, 19 nt, Artificial Sequence
  Description of Artificial Sequence: Synthetic oligonucleotide
uuggcauccuaaccgccag

SEQ ID NO: 144086 - RNA, 19 nt, Artificial Sequence
  Description of Artificial Sequence: Synthetic oligonucleotide
uugcccaacccucccaacc

SEQ ID NO: 144087 - RNA, 19 nt, Artificial Sequence
  Description of Artificial Sequence: Synthetic oligonucleotide
ucucgauaagggauaugcu

SEQ ID NO: 144088 - RNA, 19 nt, Artificial Sequence
  Description of Artificial Sequence: Synthetic oligonucleotide
agccccaugauaacugagc

SEQ ID NO: 144089 - RNA, 19 nt, Artificial Sequence
  Description of Artificial Sequence: Synthetic oligonucleotide
cuucgaaugaauguacuca

SEQ ID NO: 144090 - RNA, 19 nt, Artificial Sequence
  Description of Artificial Sequence: Synthetic oligonucleotide
agaucagaugaggagacgu

SEQ ID NO: 144091 - RNA, 19 nt, Artificial Sequence
  Description of Artificial Sequence: Synthetic oligonucleotide
auaacugagcucacauggg

SEQ ID NO: 144092 - RNA, 19 nt, Artificial Sequence
  Description of Artificial Sequence: Synthetic oligonucleotide
uuccaaugggccuaaucuc

SEQ ID NO: 144093 - RNA, 19 nt, Artificial Sequence
  Description of Artificial Sequence: Synthetic oligonucleotide
uuacgggagugucuuaauc

SEQ ID NO: 144094 - RNA, 19 nt, Artificial Sequence
  Description of Artificial Sequence: Synthetic oligonucleotide
auuaggcaagaaccgucag

SEQ ID NO: 144095 - RNA, 19 nt, Artificial Sequence
  Description of Artificial Sequence: Synthetic oligonucleotide
cagcacguaccccagagac

SEQ ID NO: 144096 - RNA, 19 nt, Artificial Sequence
  Description of Artificial Sequence: Synthetic oligonucleotide
guagaucagccaugcauug

SEQ ID NO: 144097 - RNA, 19 nt, Artificial Sequence
  Description of Artificial Sequence: Synthetic oligonucleotide
caugucuuaggauuaaggu

SEQ ID NO: 144098 - RNA, 19 nt, Artificial Sequence
  Description of Artificial Sequence: Synthetic oligonucleotide
gagacguugacuggugccc

SEQ ID NO: 144099 - RNA, 19 nt, Artificial Sequence
  Description of Artificial Sequence: Synthetic oligonucleotide
aucagaugaggagacguug

SEQ ID NO: 144100 - RNA, 19 nt, Artificial Sequence
  Description of Artificial Sequence: Synthetic oligonucleotide
gagguaucuugucggcccg

SEQ ID NO: 144101 - RNA, 19 nt, Artificial Sequence
  Description of Artificial Sequence: Synthetic oligonucleotide
gugcacgacagacugaaga

SEQ ID NO: 144102 - RNA, 19 nt, Artificial Sequence
  Description of Artificial Sequence: Synthetic oligonucleotide
ugaagcucgcggcaccaca

SEQ ID NO: 144103 - RNA, 19 nt, Artificial Sequence
  Description of Artificial Sequence: Synthetic oligonucleotide
caauacgacuuaucauuug

SEQ ID NO: 144104 - RNA, 19 nt, Artificial Sequence
  Description of Artificial Sequence: Synthetic oligonucleotide
uccguucucguuccaugcc

SEQ ID NO: 144105 - RNA, 19 nt, Artificial Sequence
  Description of Artificial Sequence: Synthetic oligonucleotide
aguagaucagccaugcauu

SEQ ID NO: 144106 - RNA, 19 nt, Artificial Sequence
  Description of Artificial Sequence: Synthetic oligonucleotide
aguaaccagcucaggacuc

SEQ ID NO: 144107 - RNA, 19 nt, Artificial Sequence
  Description of Artificial Sequence: Synthetic oligonucleotide
ucgaaugaauguacucaau

SEQ ID NO: 144108 - RNA, 19 nt, Artificial Sequence
  Description of Artificial Sequence: Synthetic oligonucleotide
aagcccuggcgauggaaca

SEQ ID NO: 144109 - RNA, 19 nt, Artificial Sequence
  Description of Artificial Sequence: Synthetic oligonucleotide
agacguugacuggugcccc

SEQ ID NO: 144110 - RNA, 19 nt, Artificial Sequence
  Description of Artificial Sequence: Synthetic oligonucleotide
uggauuacgggagugucuu

SEQ ID NO: 144111 - RNA, 19 nt, Artificial Sequence
  Description of Artificial Sequence: Synthetic oligonucleotide
gguagcugcggugggaucg

SEQ ID NO: 144112 - RNA, 19 nt, Artificial Sequence
  Description of Artificial Sequence: Synthetic oligonucleotide
ccggcguuaacauuucagg

SEQ ID NO: 144113 - RNA, 19 nt, Artificial Sequence
  Description of Artificial Sequence: Synthetic oligonucleotide
ugccuuccgauggagacga

SEQ ID NO: 144114 - RNA, 19 nt, Artificial Sequence
  Description of Artificial Sequence: Synthetic oligonucleotide
cauuugagccuaaaccuaa

SEQ ID NO: 144115 - RNA, 19 nt, Artificial Sequence
  Description of Artificial Sequence: Synthetic oligonucleotide
aaccgacagccacauucug

SEQ ID NO: 144116 - RNA, 19 nt, Artificial Sequence
  Description of Artificial Sequence: Synthetic oligonucleotide
guacccagcauaacucucc

SEQ ID NO: 144117 - RNA, 19 nt, Artificial Sequence
  Description of Artificial Sequence: Synthetic oligonucleotide
ugaugggagcccacaacau

SEQ ID NO: 144118 - RNA, 19 nt, Artificial Sequence
  Description of Artificial Sequence: Synthetic oligonucleotide
gauuacgggagugucuuaa

SEQ ID NO: 144119 - RNA, 19 nt, Artificial Sequence
  Description of Artificial Sequence: Synthetic oligonucleotide
agggagucggauucucucu

SEQ ID NO: 144120 - RNA, 19 nt, Artificial Sequence
  Description of Artificial Sequence: Synthetic oligonucleotide
gaaugcuauucugugaggu

SEQ ID NO: 144121 - RNA, 19 nt, Artificial Sequence
  Description of Artificial Sequence: Synthetic oligonucleotide
gagagguaucuugucggcc

SEQ ID NO: 144122 - RNA, 19 nt, Artificial Sequence
  Description of Artificial Sequence: Synthetic oligonucleotide
uugauuccccaugagcguc

SEQ ID NO: 144123 - RNA, 19 nt, Artificial Sequence
  Description of Artificial Sequence: Synthetic oligonucleotide
ggaaugcuauucugugagg

SEQ ID NO: 144124 - RNA, 19 nt, Artificial Sequence
  Description of Artificial Sequence: Synthetic oligonucleotide
uguccguaccgagauagau

SEQ ID NO: 144125 - RNA, 19 nt, Artificial Sequence
  Description of Artificial Sequence: Synthetic oligonucleotide
ggagacguugacuggugcc

SEQ ID NO: 144126 - RNA, 19 nt, Artificial Sequence
  Description of Artificial Sequence: Synthetic oligonucleotide
caaugggccuaaucucagc

SEQ ID NO: 144127 - RNA, 19 nt, Artificial Sequence
  Description of Artificial Sequence: Synthetic oligonucleotide
cagggagucggauucucuc

SEQ ID NO: 144128 - RNA, 19 nt, Artificial Sequence
  Description of Artificial Sequence: Synthetic oligonucleotide
agagcucccggcguuaaca

SEQ ID NO: 144129 - RNA, 19 nt, Artificial Sequence
  Description of Artificial Sequence: Synthetic oligonucleotide
augaugggauuaaauauua

SEQ ID NO: 144130 - RNA, 19 nt, Artificial Sequence
  Description of Artificial Sequence: Synthetic oligonucleotide
auguacucaauacgacuua

SEQ ID NO: 144131 - RNA, 19 nt, Artificial Sequence
  Description of Artificial Sequence: Synthetic oligonucleotide
gaaccgucagagccacacc

SEQ ID NO: 144132 - RNA, 19 nt, Artificial Sequence
  Description of Artificial Sequence: Synthetic oligonucleotide
gaguaagcaagaugcccaa

SEQ ID NO: 144133 - RNA, 19 nt, Artificial Sequence
  Description of Artificial Sequence: Synthetic oligonucleotide
auuacgggagugucuuaau

SEQ ID NO: 144134 - RNA, 19 nt, Artificial Sequence
  Description of Artificial Sequence: Synthetic oligonucleotide
auacgacuuaucauuuggu

SEQ ID NO: 144135 - RNA, 19 nt, Artificial Sequence
  Description of Artificial Sequence: Synthetic oligonucleotide
augagcgucgcugggugag

SEQ ID NO: 144136 - RNA, 19 nt, Artificial Sequence
  Description of Artificial Sequence: Synthetic oligonucleotide
ggcauccuaaccgccagcg

SEQ ID NO: 144137 - RNA, 19 nt, Artificial Sequence
  Description of Artificial Sequence: Synthetic oligonucleotide
ucuugucggcccgugagau

SEQ ID NO: 144138 - RNA, 19 nt, Artificial Sequence
  Description of Artificial Sequence: Synthetic oligonucleotide
ccuucgagauuguucaaug

SEQ ID NO: 144139 - RNA, 19 nt, Artificial Sequence
  Description of Artificial Sequence: Synthetic oligonucleotide
agaagcgccaagccagcau

SEQ ID NO: 144140 - RNA, 19 nt, Artificial Sequence
  Description of Artificial Sequence: Synthetic oligonucleotide
cauucgagagguaucuugu

SEQ ID NO: 144141 - RNA, 19 nt, Artificial Sequence
  Description of Artificial Sequence: Synthetic oligonucleotide
ugaagaccacuggaagcca

SEQ ID NO: 144142 - RNA, 19 nt, Artificial Sequence
  Description of Artificial Sequence: Synthetic oligonucleotide
aucuugucggcccgugaga

SEQ ID NO: 144143 - RNA, 19 nt, Artificial Sequence
  Description of Artificial Sequence: Synthetic oligonucleotide
guccguaccgagauagaug

SEQ ID NO: 144144 - RNA, 19 nt, Artificial Sequence
  Description of Artificial Sequence: Synthetic oligonucleotide
cauucuaacuacacuuccu

SEQ ID NO: 144145 - RNA, 19 nt, Artificial Sequence
  Description of Artificial Sequence: Synthetic oligonucleotide
agcaauguccguaccgaga

SEQ ID NO: 144146 - RNA, 19 nt, Artificial Sequence
  Description of Artificial Sequence: Synthetic oligonucleotide
guccuaguagcuccaucac

SEQ ID NO: 144147 - RNA, 19 nt, Artificial Sequence
  Description of Artificial Sequence: Synthetic oligonucleotide
aaggaacggcagaaauuca

SEQ ID NO: 144148 - RNA, 19 nt, Artificial Sequence
  Description of Artificial Sequence: Synthetic oligonucleotide
acggguggcuggauuacgg

SEQ ID NO: 144149 - RNA, 19 nt, Artificial Sequence
  Description of Artificial Sequence: Synthetic oligonucleotide
gucaccccgauaccccucc

SEQ ID NO: 144150 - RNA, 19 nt, Artificial Sequence
  Description of Artificial Sequence: Synthetic oligonucleotide
gcgugucacuaguaaagcc

SEQ ID NO: 144151 - RNA, 19 nt, Artificial Sequence
  Description of Artificial Sequence: Synthetic oligonucleotide
gcugcggugggaucgucag

SEQ ID NO: 144152 - RNA, 19 nt, Artificial Sequence
  Description of Artificial Sequence: Synthetic oligonucleotide
guuccccgaagacggccgg

SEQ ID NO: 144153 - RNA, 19 nt, Artificial Sequence
  Description of Artificial Sequence: Synthetic oligonucleotide
agcucgcggcaccacaccu

SEQ ID NO: 144154 - RNA, 19 nt, Artificial Sequence
  Description of Artificial Sequence: Synthetic oligonucleotide
acgacagacugaagaccac

SEQ ID NO: 144155 - RNA, 19 nt, Artificial Sequence
  Description of Artificial Sequence: Synthetic oligonucleotide
gcacguaccccagagacuc

SEQ ID NO: 144156 - RNA, 19 nt, Artificial Sequence
  Description of Artificial Sequence: Synthetic oligonucleotide
agccacccgaccgggaauc

SEQ ID NO: 144157 - RNA, 19 nt, Artificial Sequence
  Description of Artificial Sequence: Synthetic oligonucleotide
ugcacgugaugaugggauu

SEQ ID NO: 144158 - RNA, 19 nt, Artificial Sequence
  Description of Artificial Sequence: Synthetic oligonucleotide
agauggacccacacacaug

SEQ ID NO: 144159 - RNA, 19 nt, Artificial Sequence
  Description of Artificial Sequence: Synthetic oligonucleotide
uucucucgauaagggauau

SEQ ID NO: 144160 - RNA, 19 nt, Artificial Sequence
  Description of Artificial Sequence: Synthetic oligonucleotide
acguugacuggugccccac

SEQ ID NO: 144161 - RNA, 19 nt, Artificial Sequence
  Description of Artificial Sequence: Synthetic oligonucleotide
guagggguaaggggcguug

SEQ ID NO: 144162 - RNA, 19 nt, Artificial Sequence
  Description of Artificial Sequence: Synthetic oligonucleotide
ucggugcacgacagacuga

SEQ ID NO: 144163 - RNA, 19 nt, Artificial Sequence
  Description of Artificial Sequence: Synthetic oligonucleotide
cccggcguuaacauuucag

SEQ ID NO: 144164 - RNA, 19 nt, Artificial Sequence
  Description of Artificial Sequence: Synthetic oligonucleotide
ucuuaggauuaaggucaac

SEQ ID NO: 144165 - RNA, 19 nt, Artificial Sequence
  Description of Artificial Sequence: Synthetic oligonucleotide
ucucaaggucaccccgaua

SEQ ID NO: 144166 - RNA, 19 nt, Artificial Sequence
  Description of Artificial Sequence: Synthetic oligonucleotide
ucucucgauaagggauaug

SEQ ID NO: 144167 - RNA, 19 nt, Artificial Sequence
  Description of Artificial Sequence: Synthetic oligonucleotide
gcugaugggagcccacaac

SEQ ID NO: 144168 - RNA, 19 nt, Artificial Sequence
  Description of Artificial Sequence: Synthetic oligonucleotide
ccaaugggccuaaucucag

SEQ ID NO: 144169 - RNA, 19 nt, Artificial Sequence
  Description of Artificial Sequence: Synthetic oligonucleotide
agcgccaagccagcauguc

SEQ ID NO: 144170 - RNA, 19 nt, Artificial Sequence
  Description of Artificial Sequence: Synthetic oligonucleotide
cagccgguaccuguucccg

SEQ ID NO: 144171 - RNA, 19 nt, Artificial Sequence
  Description of Artificial Sequence: Synthetic oligonucleotide
gguuccccgaagacggccg

SEQ ID NO: 144172 - RNA, 19 nt, Artificial Sequence
  Description of Artificial Sequence: Synthetic oligonucleotide
guucucucgauaagggaua

SEQ ID NO: 144173 - RNA, 19 nt, Artificial Sequence
  Description of Artificial Sequence: Synthetic oligonucleotide
guaucuugucggcccguga

SEQ ID NO: 144174 - RNA, 19 nt, Artificial Sequence
  Description of Artificial Sequence: Synthetic oligonucleotide
uggguuccccgaagacggc

SEQ ID NO: 144175 - RNA, 19 nt, Artificial Sequence
  Description of Artificial Sequence: Synthetic oligonucleotide
gauuccccaugagcgucgc

SEQ ID NO: 144176 - RNA, 19 nt, Artificial Sequence
  Description of Artificial Sequence: Synthetic oligonucleotide
gacguugacuggugcccca

SEQ ID NO: 144177 - RNA, 19 nt, Artificial Sequence
  Description of Artificial Sequence: Synthetic oligonucleotide
auuugagccuaaaccuaaa

SEQ ID NO: 144178 - RNA, 19 nt, Artificial Sequence
  Description of Artificial Sequence: Synthetic oligonucleotide
augcauugucugcccuuca

SEQ ID NO: 144179 - RNA, 19 nt, Artificial Sequence
  Description of Artificial Sequence: Synthetic oligonucleotide
caccccgauaccccuccag

SEQ ID NO: 144180 - RNA, 19 nt, Artificial Sequence
  Description of Artificial Sequence: Synthetic oligonucleotide
cuugucggcccgugagauc

SEQ ID NO: 144181 - RNA, 19 nt, Artificial Sequence
  Description of Artificial Sequence: Synthetic oligonucleotide
gggagugucuuaaucgcuc

SEQ ID NO: 144182 - RNA, 19 nt, Artificial Sequence
  Description of Artificial Sequence: Synthetic oligonucleotide
guguucgaaaggaaugcua

SEQ ID NO: 144183 - RNA, 19 nt, Artificial Sequence
  Description of Artificial Sequence: Synthetic oligonucleotide
uguucccgacccucagcuc

SEQ ID NO: 144184 - RNA, 19 nt, Artificial Sequence
  Description of Artificial Sequence: Synthetic oligonucleotide
ucccggcguuaacauuuca

SEQ ID NO: 144185 - RNA, 19 nt, Artificial Sequence
  Description of Artificial Sequence: Synthetic oligonucleotide
ggcguuaacauuucagguu

SEQ ID NO: 144186 - RNA, 19 nt, Artificial Sequence
  Description of Artificial Sequence: Synthetic oligonucleotide
acguaccccagagacucca

SEQ ID NO: 144187 - RNA, 19 nt, Artificial Sequence
  Description of Artificial Sequence: Synthetic oligonucleotide
cacggguggcuggauuacg

SEQ ID NO: 144188 - RNA, 19 nt, Artificial Sequence
  Description of Artificial Sequence: Synthetic oligonucleotide
guaaggaacggcagaaauu

SEQ ID NO: 144189 - RNA, 19 nt, Artificial Sequence
  Description of Artificial Sequence: Synthetic oligonucleotide
ggccuaggagagguguugg

SEQ ID NO: 144190 - RNA, 19 nt, Artificial Sequence
  Description of Artificial Sequence: Synthetic oligonucleotide
gugguaguacaaacacaca

SEQ ID NO: 144191 - RNA, 19 nt, Artificial Sequence
  Description of Artificial Sequence: Synthetic oligonucleotide
cugcacgugaugaugggau

SEQ ID NO: 144192 - RNA, 19 nt, Artificial Sequence
  Description of Artificial Sequence: Synthetic oligonucleotide
agcacguaccccagagacu

SEQ ID NO: 144193 - RNA, 19 nt, Artificial Sequence
  Description of Artificial Sequence: Synthetic oligonucleotide
ccgauaccccuccagcacc

SEQ ID NO: 144194 - RNA, 19 nt, Artificial Sequence
  Description of Artificial Sequence: Synthetic oligonucleotide
cugcggugggaucgucagg

SEQ ID NO: 144195 - RNA, 19 nt, Artificial Sequence
  Description of Artificial Sequence: Synthetic oligonucleotide
ggcugaaccuggaucaguc

SEQ ID NO: 144196 - RNA, 19 nt, Artificial Sequence
  Description of Artificial Sequence: Synthetic oligonucleotide
gcagcaauguccguaccga

SEQ ID NO: 144197 - RNA, 19 nt, Artificial Sequence
  Description of Artificial Sequence: Synthetic oligonucleotide
cacguaccccagagacucc

SEQ ID NO: 144198 - RNA, 19 nt, Artificial Sequence
  Description of Artificial Sequence: Synthetic oligonucleotide
gcguuaacauuucagguuu

SEQ ID NO: 144199 - RNA, 19 nt, Artificial Sequence
  Description of Artificial Sequence: Synthetic oligonucleotide
gcaauguccguaccgagau

SEQ ID NO: 144200 - RNA, 19 nt, Artificial Sequence
  Description of Artificial Sequence: Synthetic oligonucleotide
agccgguaccuguucccga

SEQ ID NO: 144201 - RNA, 19 nt, Artificial Sequence
  Description of Artificial Sequence: Synthetic oligonucleotide
cuggauuacgggagugucu

SEQ ID NO: 144202 - RNA, 19 nt, Artificial Sequence
  Description of Artificial Sequence: Synthetic oligonucleotide
ccgaccgggaauccagugc

SEQ ID NO: 144203 - RNA, 19 nt, Artificial Sequence
  Description of Artificial Sequence: Synthetic oligonucleotide
gagcgucgcugggugagug

SEQ ID NO: 144204 - RNA, 19 nt, Artificial Sequence
  Description of Artificial Sequence: Synthetic oligonucleotide
ucccuucgagauuguucaa

SEQ ID NO: 144205 - RNA, 19 nt, Artificial Sequence
  Description of Artificial Sequence: Synthetic oligonucleotide
ucacaguaccggggaacuc

SEQ ID NO: 144206 - RNA, 19 nt, Artificial Sequence
  Description of Artificial Sequence: Synthetic oligonucleotide
gcuggauuacgggaguguc

SEQ ID NO: 144207 - RNA, 19 nt, Artificial Sequence
  Description of Artificial Sequence: Synthetic oligonucleotide
gguaucuugucggcccgug

SEQ ID NO: 144208 - RNA, 19 nt, Artificial Sequence
  Description of Artificial Sequence: Synthetic oligonucleotide
cgagagguaucuugucggc

SEQ ID NO: 144209 - RNA, 19 nt, Artificial Sequence
  Description of Artificial Sequence: Synthetic oligonucleotide
aagacggccggaagcugua

SEQ ID NO: 144210 - RNA, 19 nt, Artificial Sequence
  Description of Artificial Sequence: Synthetic oligonucleotide
ucaccccgauaccccucca

SEQ ID NO: 144211 - RNA, 19 nt, Artificial Sequence
  Description of Artificial Sequence: Synthetic oligonucleotide
cccgauaccccuccagcac

SEQ ID NO: 144212 - RNA, 19 nt, Artificial Sequence
  Description of Artificial Sequence: Synthetic oligonucleotide
cacagggagucggauucuc

SEQ ID NO: 144213 - RNA, 19 nt, Artificial Sequence
  Description of Artificial Sequence: Synthetic oligonucleotide
guucgaaaggaaugcuauu

SEQ ID NO: 144214 - RNA, 19 nt, Artificial Sequence
  Description of Artificial Sequence: Synthetic oligonucleotide
gaucagaugaggagacguu

SEQ ID NO: 144215 - RNA, 19 nt, Artificial Sequence
  Description of Artificial Sequence: Synthetic oligonucleotide
gugucacuaguaaagccau

SEQ ID NO: 144216 - RNA, 19 nt, Artificial Sequence
  Description of Artificial Sequence: Synthetic oligonucleotide
ccauuugagccuaaaccua

SEQ ID NO: 144217 - RNA, 19 nt, Artificial Sequence
  Description of Artificial Sequence: Synthetic oligonucleotide
gaccgggaauccagugcug

SEQ ID NO: 144218 - RNA, 19 nt, Artificial Sequence
  Description of Artificial Sequence: Synthetic oligonucleotide
ccaaccgcccucugcacuc

SEQ ID NO: 144219 - RNA, 19 nt, Artificial Sequence
  Description of Artificial Sequence: Synthetic oligonucleotide
gccgguaccuguucccgac

SEQ ID NO: 144220 - RNA, 19 nt, Artificial Sequence
  Description of Artificial Sequence: Synthetic oligonucleotide
ugagcgucgcugggugagu

SEQ ID NO: 144221 - RNA, 19 nt, Artificial Sequence
  Description of Artificial Sequence: Synthetic oligonucleotide
cguucucguuccaugccag

SEQ ID NO: 144222 - RNA, 19 nt, Artificial Sequence
  Description of Artificial Sequence: Synthetic oligonucleotide
agcucccggcguuaacauu

SEQ ID NO: 144223 - RNA, 19 nt, Artificial Sequence
  Description of Artificial Sequence: Synthetic oligonucleotide
auuccccaugagcgucgcu

SEQ ID NO: 144224 - RNA, 19 nt, Artificial Sequence
  Description of Artificial Sequence: Synthetic oligonucleotide
aggacaguuuugagacuaa

SEQ ID NO: 144225 - RNA, 19 nt, Artificial Sequence
  Description of Artificial Sequence: Synthetic oligonucleotide
cucaucggugcacgacaga

SEQ ID NO: 144226 - RNA, 19 nt, Artificial Sequence
  Description of Artificial Sequence: Synthetic oligonucleotide
ccgugagaucagaugagga

SEQ ID NO: 144227 - RNA, 19 nt, Artificial Sequence
  Description of Artificial Sequence: Synthetic oligonucleotide
caucggugcacgacagacu

SEQ ID NO: 144228 - RNA, 19 nt, Artificial Sequence
  Description of Artificial Sequence: Synthetic oligonucleotide
ggcggcaccauuugagccu

SEQ ID NO: 144229 - RNA, 19 nt, Artificial Sequence
  Description of Artificial Sequence: Synthetic oligonucleotide
agguaucuugucggcccgu

SEQ ID NO: 144230 - RNA, 19 nt, Artificial Sequence
  Description of Artificial Sequence: Synthetic oligonucleotide
ggguuccccgaagacggcc

SEQ ID NO: 144231 - RNA, 19 nt, Artificial Sequence
  Description of Artificial Sequence: Synthetic oligonucleotide
gagcucccggcguuaacau

SEQ ID NO: 144232 - RNA, 19 nt, Artificial Sequence
  Description of Artificial Sequence: Synthetic oligonucleotide
gcccgugagaucagaugag

SEQ ID NO: 144233 - RNA, 19 nt, Artificial Sequence
  Description of Artificial Sequence: Synthetic oligonucleotide
gccgugugugagguagggg

SEQ ID NO: 144234 - RNA, 19 nt, Artificial Sequence
  Description of Artificial Sequence: Synthetic oligonucleotide
ccgagauagaugucuccga

SEQ ID NO: 144235 - RNA, 19 nt, Artificial Sequence
  Description of Artificial Sequence: Synthetic oligonucleotide
gcgauggaacagauuucug

SEQ ID NO: 144236 - RNA, 19 nt, Artificial Sequence
  Description of Artificial Sequence: Synthetic oligonucleotide
gguguucgaaaggaaugcu

SEQ ID NO: 144237 - RNA, 19 nt, Artificial Sequence
  Description of Artificial Sequence: Synthetic oligonucleotide
gcugccgaucuugcggccc

SEQ ID NO: 144238 - RNA, 19 nt, Artificial Sequence
  Description of Artificial Sequence: Synthetic oligonucleotide
ggcugaugggagcccacaa

SEQ ID NO: 144239 - RNA, 19 nt, Artificial Sequence
  Description of Artificial Sequence: Synthetic oligonucleotide
aggcucgguccuaguagcu

SEQ ID NO: 144240 - RNA, 19 nt, Artificial Sequence
  Description of Artificial Sequence: Synthetic oligonucleotide
ucgguccuaguagcuccau

SEQ ID NO: 144241 - RNA, 19 nt, Artificial Sequence
  Description of Artificial Sequence: Synthetic oligonucleotide
ccguucucguuccaugcca

SEQ ID NO: 144242 - RNA, 19 nt, Artificial Sequence
  Description of Artificial Sequence: Synthetic oligonucleotide
gccacggguggcuggauua

SEQ ID NO: 144243 - RNA, 19 nt, Artificial Sequence
  Description of Artificial Sequence: Synthetic oligonucleotide
gcacgugaugaugggauua

SEQ ID NO: 144244 - RNA, 19 nt, Artificial Sequence
  Description of Artificial Sequence: Synthetic oligonucleotide
cguaccgagauagaugucu

SEQ ID NO: 144245 - RNA, 19 nt, Artificial Sequence
  Description of Artificial Sequence: Synthetic oligonucleotide
cccgaccgggaauccagug

SEQ ID NO: 144246 - RNA, 19 nt, Artificial Sequence
  Description of Artificial Sequence: Synthetic oligonucleotide
cauauccggugcacauggu

SEQ ID NO: 144247 - RNA, 19 nt, Artificial Sequence
  Description of Artificial Sequence: Synthetic oligonucleotide
ccccgauaccccuccagca

SEQ ID NO: 144248 - RNA, 19 nt, Artificial Sequence
  Description of Artificial Sequence: Synthetic oligonucleotide
ccccaugagcgucgcuggg

SEQ ID NO: 144249 - RNA, 19 nt, Artificial Sequence
  Description of Artificial Sequence: Synthetic oligonucleotide
cucuugccugccuccauuu

SEQ ID NO: 144250 - RNA, 19 nt, Artificial Sequence
  Description of Artificial Sequence: Synthetic oligonucleotide
acccgaccgggaauccagu

SEQ ID NO: 144251 - RNA, 19 nt, Artificial Sequence
  Description of Artificial Sequence: Synthetic oligonucleotide
ggcaccauuugagccuaaa

SEQ ID NO: 144252 - RNA, 19 nt, Artificial Sequence
  Description of Artificial Sequence: Synthetic oligonucleotide
cucgcggcaccacaccuuu

SEQ ID NO: 144253 - RNA, 19 nt, Artificial Sequence
  Description of Artificial Sequence: Synthetic oligonucleotide
ggauuacgggagugucuua

SEQ ID NO: 144254 - RNA, 19 nt, Artificial Sequence
  Description of Artificial Sequence: Synthetic oligonucleotide
cggcguuaacauuucaggu

SEQ ID NO: 144255 - RNA, 19 nt, Artificial Sequence
  Description of Artificial Sequence: Synthetic oligonucleotide
auggacccacacacaugua

SEQ ID NO: 144256 - RNA, 19 nt, Artificial Sequence
  Description of Artificial Sequence: Synthetic oligonucleotide
ccacggguggcuggauuac

SEQ ID NO: 144257 - RNA, 19 nt, Artificial Sequence
  Description of Artificial Sequence: Synthetic oligonucleotide
cgaccgggaauccagugcu

SEQ ID NO: 144258 - RNA, 19 nt, Artificial Sequence
  Description of Artificial Sequence: Synthetic oligonucleotide
gcggugggaucgucaggga

SEQ ID NO: 144259 - RNA, 19 nt, Artificial Sequence
  Description of Artificial Sequence: Synthetic oligonucleotide
cggugcacgacagacugaa

SEQ ID NO: 144260 - RNA, 19 nt, Artificial Sequence
  Description of Artificial Sequence: Synthetic oligonucleotide
ggaagccacccgaccggga

SEQ ID NO: 144261 - RNA, 19 nt, Artificial Sequence
  Description of Artificial Sequence: Synthetic oligonucleotide
gcggcaccauuugagccua

SEQ ID NO: 144262 - RNA, 19 nt, Artificial Sequence
  Description of Artificial Sequence: Synthetic oligonucleotide
gucaucccuucgagauugu

SEQ ID NO: 144263 - RNA, 19 nt, Artificial Sequence
  Description of Artificial Sequence: Synthetic oligonucleotide
ccgccaccacuggugggag

SEQ ID NO: 144264 - RNA, 19 nt, Artificial Sequence
  Description of Artificial Sequence: Synthetic oligonucleotide
cccuucgagauuguucaau

SEQ ID NO: 144265 - RNA, 19 nt, Artificial Sequence
  Description of Artificial Sequence: Synthetic oligonucleotide
cgggagugucuuaaucgcu

SEQ ID NO: 144266 - RNA, 19 nt, Artificial Sequence
  Description of Artificial Sequence: Synthetic oligonucleotide
cucuucguuccagccccau

SEQ ID NO: 144267 - RNA, 19 nt, Artificial Sequence
  Description of Artificial Sequence: Synthetic oligonucleotide
gcucuucguuccagcccca

SEQ ID NO: 144268 - RNA, 19 nt, Artificial Sequence
  Description of Artificial Sequence: Synthetic oligonucleotide
gguagggguaaggggcguu

SEQ ID NO: 144269 - RNA, 19 nt, Artificial Sequence
  Description of Artificial Sequence: Synthetic oligonucleotide
gacuuccaaugggccuaau

SEQ ID NO: 144270 - RNA, 19 nt, Artificial Sequence
  Description of Artificial Sequence: Synthetic oligonucleotide
gcggugcggcucgcugcug

SEQ ID NO: 144271 - RNA, 19 nt, Artificial Sequence
  Description of Artificial Sequence: Synthetic oligonucleotide
gcucgcggcaccacaccuu

SEQ ID NO: 144272 - RNA, 19 nt, Artificial Sequence
  Description of Artificial Sequence: Synthetic oligonucleotide
cggcaccauuugagccuaa

SEQ ID NO: 144273 - RNA, 19 nt, Artificial Sequence
  Description of Artificial Sequence: Synthetic oligonucleotide
aaguuugacauauacaucc

SEQ ID NO: 144274 - RNA, 19 nt, Artificial Sequence
  Description of Artificial Sequence: Synthetic oligonucleotide
ucuaugagaacccaaaugc

SEQ ID NO: 144275 - RNA, 19 nt, Artificial Sequence
  Description of Artificial Sequence: Synthetic oligonucleotide
aauaauacccuugagaggu

SEQ ID NO: 144276 - RNA, 19 nt, Artificial Sequence
  Description of Artificial Sequence: Synthetic oligonucleotide
auaaguuugacauauacau

SEQ ID NO: 144277 - RNA, 19 nt, Artificial Sequence
  Description of Artificial Sequence: Synthetic oligonucleotide
aaaccacacacacacacac

SEQ ID NO: 144278 - RNA, 19 nt, Artificial Sequence
  Description of Artificial Sequence: Synthetic oligonucleotide
ugaagaagaacguagguca

SEQ ID NO: 144279 - RNA, 19 nt, Artificial Sequence
  Description of Artificial Sequence: Synthetic oligonucleotide
gauuuuaugauugaaccag

SEQ ID NO: 144280 - RNA, 19 nt, Artificial Sequence
  Description of Artificial Sequence: Synthetic oligonucleotide
uaucucuuuaaccauagug

SEQ ID NO: 144281 - RNA, 19 nt, Artificial Sequence
  Description of Artificial Sequence: Synthetic oligonucleotide
ucucaaaccauaaacuuug

SEQ ID NO: 144282 - RNA, 19 nt, Artificial Sequence
  Description of Artificial Sequence: Synthetic oligonucleotide
aauuacagagugaaagccc

SEQ ID NO: 144283 - RNA, 19 nt, Artificial Sequence
  Description of Artificial Sequence: Synthetic oligonucleotide
aagugcaacaacuucaaga

SEQ ID NO: 144284 - RNA, 19 nt, Artificial Sequence
  Description of Artificial Sequence: Synthetic oligonucleotide
uuuguaauaauacccuuga

SEQ ID NO: 144285 - RNA, 19 nt, Artificial Sequence
  Description of Artificial Sequence: Synthetic oligonucleotide
acaaaccacacacacacac

SEQ ID NO: 144286 - RNA, 19 nt, Artificial Sequence
  Description of Artificial Sequence: Synthetic oligonucleotide
uaauaaguuugacauauac

SEQ ID NO: 144287 - RNA, 19 nt, Artificial Sequence
  Description of Artificial Sequence: Synthetic oligonucleotide
ugaauaacccacuuguccc

SEQ ID NO: 144288 - RNA, 19 nt, Artificial Sequence
  Description of Artificial Sequence: Synthetic oligonucleotide
uuuuguaauaauacccuug

SEQ ID NO: 144289 - RNA, 19 nt, Artificial Sequence
  Description of Artificial Sequence: Synthetic oligonucleotide
aaccauaaacuuugagccc

SEQ ID NO: 144290 - RNA, 19 nt, Artificial Sequence
  Description of Artificial Sequence: Synthetic oligonucleotide
gguauuaaauuacagagug

SEQ ID NO: 144291 - RNA, 19 nt, Artificial Sequence
  Description of Artificial Sequence: Synthetic oligonucleotide
agaacccaaaugcaaauac

SEQ ID NO: 144292 - RNA, 19 nt, Artificial Sequence
  Description of Artificial Sequence: Synthetic oligonucleotide
aggguaauaaguuugacau

SEQ ID NO: 144293 - RNA, 19 nt, Artificial Sequence
  Description of Artificial Sequence: Synthetic oligonucleotide
uauagaacucuacucuagg

SEQ ID NO: 144294 - RNA, 19 nt, Artificial Sequence
  Description of Artificial Sequence: Synthetic oligonucleotide
ugcuaaauaagaauguauc

SEQ ID NO: 144295 - RNA, 19 nt, Artificial Sequence
  Description of Artificial Sequence: Synthetic oligonucleotide
ucuggcuuagcuaagauuu

SEQ ID NO: 144296 - RNA, 19 nt, Artificial Sequence
  Description of Artificial Sequence: Synthetic oligonucleotide
uuaugauugaaccaguauu

SEQ ID NO: 144297 - RNA, 19 nt, Artificial Sequence
  Description of Artificial Sequence: Synthetic oligonucleotide
agaaaauuagacaagguga

SEQ ID NO: 144298 - RNA, 19 nt, Artificial Sequence
  Description of Artificial Sequence: Synthetic oligonucleotide
uuaguucuguagaaaagcc

SEQ ID NO: 144299 - RNA, 19 nt, Artificial Sequence
  Description of Artificial Sequence: Synthetic oligonucleotide
aagaauaagcaacuggcau

SEQ ID NO: 144300 - RNA, 19 nt, Artificial Sequence
  Description of Artificial Sequence: Synthetic oligonucleotide
auuauauacuugugggaac

SEQ ID NO: 144301 - RNA, 19 nt, Artificial Sequence
  Description of Artificial Sequence: Synthetic oligonucleotide
ucacggaacgauauuacag

SEQ ID NO: 144302 - RNA, 19 nt, Artificial Sequence
  Description of Artificial Sequence: Synthetic oligonucleotide
uucuaugagaacccaaaug

SEQ ID NO: 144303 - RNA, 19 nt, Artificial Sequence
  Description of Artificial Sequence: Synthetic oligonucleotide
aaggguaauaaguuugaca

SEQ ID NO: 144304 - RNA, 19 nt, Artificial Sequence
  Description of Artificial Sequence: Synthetic oligonucleotide
ucucugcuaaauuauauac

SEQ ID NO: 144305 - RNA, 19 nt, Artificial Sequence
  Description of Artificial Sequence: Synthetic oligonucleotide
uaccaucuaaacuaaagga

SEQ ID NO: 144306 - RNA, 19 nt, Artificial Sequence
  Description of Artificial Sequence: Synthetic oligonucleotide
accacacacacacacacac

SEQ ID NO: 144307 - RNA, 19 nt, Artificial Sequence
  Description of Artificial Sequence: Synthetic oligonucleotide
cuaagccucaauuuagagg

SEQ ID NO: 144308 - RNA, 19 nt, Artificial Sequence
  Description of Artificial Sequence: Synthetic oligonucleotide
uuauagaacucuacucuag

SEQ ID NO: 144309 - RNA, 19 nt, Artificial Sequence
  Description of Artificial Sequence: Synthetic oligonucleotide
agaacaacuaacuucccca

SEQ ID NO: 144310 - RNA, 19 nt, Artificial Sequence
  Description of Artificial Sequence: Synthetic oligonucleotide
acugcaauauaaaaggguc

SEQ ID NO: 144311 - RNA, 19 nt, Artificial Sequence
  Description of Artificial Sequence: Synthetic oligonucleotide
ucaagcuucugucaaauau

SEQ ID NO: 144312 - RNA, 19 nt, Artificial Sequence
  Description of Artificial Sequence: Synthetic oligonucleotide
ucugcuaaauuauauacuu

SEQ ID NO: 144313 - RNA, 19 nt, Artificial Sequence
  Description of Artificial Sequence: Synthetic oligonucleotide
ucuaucucuuuaaccauag

SEQ ID NO: 144314 - RNA, 19 nt, Artificial Sequence
  Description of Artificial Sequence: Synthetic oligonucleotide
aagaaaacuuuuguugguc

SEQ ID NO: 144315 - RNA, 19 nt, Artificial Sequence
  Description of Artificial Sequence: Synthetic oligonucleotide
uuuauacagagacuuuugu

SEQ ID NO: 144316 - RNA, 19 nt, Artificial Sequence
  Description of Artificial Sequence: Synthetic oligonucleotide
ucuaacugcccaaugcuug

SEQ ID NO: 144317 - RNA, 19 nt, Artificial Sequence
  Description of Artificial Sequence: Synthetic oligonucleotide
uucaccgauaaaaccagag

SEQ ID NO: 144318 - RNA, 19 nt, Artificial Sequence
  Description of Artificial Sequence: Synthetic oligonucleotide
aucaaagugguuuuaaauu

SEQ ID NO: 144319 - RNA, 19 nt, Artificial Sequence
  Description of Artificial Sequence: Synthetic oligonucleotide
uuuaugauugaaccaguau

SEQ ID NO: 144320 - RNA, 19 nt, Artificial Sequence
  Description of Artificial Sequence: Synthetic oligonucleotide
uccucucaaaccauaaacu

SEQ ID NO: 144321 - RNA, 19 nt, Artificial Sequence
  Description of Artificial Sequence: Synthetic oligonucleotide
uccuaauuuucugugauga

SEQ ID NO: 144322 - RNA, 19 nt, Artificial Sequence
  Description of Artificial Sequence: Synthetic oligonucleotide
cacacacacacauacacac

SEQ ID NO: 144323 - RNA, 19 nt, Artificial Sequence
  Description of Artificial Sequence: Synthetic oligonucleotide
aguaggucgacaguugugg

SEQ ID NO: 144324 - RNA, 19 nt, Artificial Sequence
  Description of Artificial Sequence: Synthetic oligonucleotide
uuccuaagccucaauuuag

SEQ ID NO: 144325 - RNA, 19 nt, Artificial Sequence
  Description of Artificial Sequence: Synthetic oligonucleotide
aguuacagaagagacccac

SEQ ID NO: 144326 - RNA, 19 nt, Artificial Sequence
  Description of Artificial Sequence: Synthetic oligonucleotide
aguaaggguaauaaguuug

SEQ ID NO: 144327 - RNA, 19 nt, Artificial Sequence
  Description of Artificial Sequence: Synthetic oligonucleotide
caagcuacuacuugcacuc

SEQ ID NO: 144328 - RNA, 19 nt, Artificial Sequence
  Description of Artificial Sequence: Synthetic oligonucleotide
cacacacacacacacauac

SEQ ID NO: 144329 - RNA, 19 nt, Artificial Sequence
  Description of Artificial Sequence: Synthetic oligonucleotide
uuauauacuugugggaaca

SEQ ID NO: 144330 - RNA, 19 nt, Artificial Sequence
  Description of Artificial Sequence: Synthetic oligonucleotide
ucucuaacugcccaaugcu

SEQ ID NO: 144331 - RNA, 19 nt, Artificial Sequence
  Description of Artificial Sequence: Synthetic oligonucleotide
ugcaauauaaaagggucac

SEQ ID NO: 144332 - RNA, 19 nt, Artificial Sequence
  Description of Artificial Sequence: Synthetic oligonucleotide
gagaacaacuaacuucccc

SEQ ID NO: 144333 - RNA, 19 nt, Artificial Sequence
  Description of Artificial Sequence: Synthetic oligonucleotide
acuuucaccgauaaaacca

SEQ ID NO: 144334 - RNA, 19 nt, Artificial Sequence
  Description of Artificial Sequence: Synthetic oligonucleotide
auuggaacugcuaaauaag

SEQ ID NO: 144335 - RNA, 19 nt, Artificial Sequence
  Description of Artificial Sequence: Synthetic oligonucleotide
caauuaagaguguuacuac

SEQ ID NO: 144336 - RNA, 19 nt, Artificial Sequence
  Description of Artificial Sequence: Synthetic oligonucleotide
uuuaaauuugauggguggu

SEQ ID NO: 144337 - RNA, 19 nt, Artificial Sequence
  Description of Artificial Sequence: Synthetic oligonucleotide
uuauuccuaagccucaauu

SEQ ID NO: 144338 - RNA, 19 nt, Artificial Sequence
  Description of Artificial Sequence: Synthetic oligonucleotide
cagacaucggucaauuaag

SEQ ID NO: 144339 - RNA, 19 nt, Artificial Sequence
  Description of Artificial Sequence: Synthetic oligonucleotide
cacacacacacacauacac

SEQ ID NO: 144340 - RNA, 19 nt, Artificial Sequence
  Description of Artificial Sequence: Synthetic oligonucleotide
gauugaaccaguauuuuaa

SEQ ID NO: 144341 - RNA, 19 nt, Artificial Sequence
  Description of Artificial Sequence: Synthetic oligonucleotide
ccgaauaucacauuuaaca

SEQ ID NO: 144342 - RNA, 19 nt, Artificial Sequence
  Description of Artificial Sequence: Synthetic oligonucleotide
uauuccuaagccucaauuu

SEQ ID NO: 144343 - RNA, 19 nt, Artificial Sequence
  Description of Artificial Sequence: Synthetic oligonucleotide
aucuaaacuaaaggauggc

SEQ ID NO: 144344 - RNA, 19 nt, Artificial Sequence
  Description of Artificial Sequence: Synthetic oligonucleotide
uguggauuauuuccugcca

SEQ ID NO: 144345 - RNA, 19 nt, Artificial Sequence
  Description of Artificial Sequence: Synthetic oligonucleotide
cacacacacacacacacac

SEQ ID NO: 144346 - RNA, 19 nt, Artificial Sequence
  Description of Artificial Sequence: Synthetic oligonucleotide
agaaugagaacaacuaacu

SEQ ID NO: 144347 - RNA, 19 nt, Artificial Sequence
  Description of Artificial Sequence: Synthetic oligonucleotide
ucaagugcaacaacuucaa

SEQ ID NO: 144348 - RNA, 19 nt, Artificial Sequence
  Description of Artificial Sequence: Synthetic oligonucleotide
ucaccgauaaaaccagagu

SEQ ID NO: 144349 - RNA, 19 nt, Artificial Sequence
  Description of Artificial Sequence: Synthetic oligonucleotide
uggaacugcuaaauaagaa

SEQ ID NO: 144350 - RNA, 19 nt, Artificial Sequence
  Description of Artificial Sequence: Synthetic oligonucleotide
ucaguugaaacugcaauau

SEQ ID NO: 144351 - RNA, 19 nt, Artificial Sequence
  Description of Artificial Sequence: Synthetic oligonucleotide
auuauagaacucuacucua

SEQ ID NO: 144352 - RNA, 19 nt, Artificial Sequence
  Description of Artificial Sequence: Synthetic oligonucleotide
ucaaucuagcaugugcacc

SEQ ID NO: 144353 - RNA, 19 nt, Artificial Sequence
  Description of Artificial Sequence: Synthetic oligonucleotide
acaauuugugugaacugac

SEQ ID NO: 144354 - RNA, 19 nt, Artificial Sequence
  Description of Artificial Sequence: Synthetic oligonucleotide
aauacccuugagagguagc

SEQ ID NO: 144355 - RNA, 19 nt, Artificial Sequence
  Description of Artificial Sequence: Synthetic oligonucleotide
uaaacuguugucuggccau

SEQ ID NO: 144356 - RNA, 19 nt, Artificial Sequence
  Description of Artificial Sequence: Synthetic oligonucleotide
agcuaagauuuuaugauug

SEQ ID NO: 144357 - RNA, 19 nt, Artificial Sequence
  Description of Artificial Sequence: Synthetic oligonucleotide
guacacuuuacacaaugca

SEQ ID NO: 144358 - RNA, 19 nt, Artificial Sequence
  Description of Artificial Sequence: Synthetic oligonucleotide
aguuacuaauguuauuuua

SEQ ID NO: 144359 - RNA, 19 nt, Artificial Sequence
  Description of Artificial Sequence: Synthetic oligonucleotide
uguguacggagccucuuca

SEQ ID NO: 144360 - RNA, 19 nt, Artificial Sequence
  Description of Artificial Sequence: Synthetic oligonucleotide
uguaucuacaagguauuaa

SEQ ID NO: 144361 - RNA, 19 nt, Artificial Sequence
  Description of Artificial Sequence: Synthetic oligonucleotide
aagggccuaaacuguuguc

SEQ ID NO: 144362 - RNA, 19 nt, Artificial Sequence
  Description of Artificial Sequence: Synthetic oligonucleotide
uuucuaugagaacccaaau

SEQ ID NO: 144363 - RNA, 19 nt, Artificial Sequence
  Description of Artificial Sequence: Synthetic oligonucleotide
acaugagcucaaaaguuac

SEQ ID NO: 144364 - RNA, 19 nt, Artificial Sequence
  Description of Artificial Sequence: Synthetic oligonucleotide
agaugacuuguguacggag

SEQ ID NO: 144365 - RNA, 19 nt, Artificial Sequence
  Description of Artificial Sequence: Synthetic oligonucleotide
uucacggaacgauauuaca

SEQ ID NO: 144366 - RNA, 19 nt, Artificial Sequence
  Description of Artificial Sequence: Synthetic oligonucleotide
auaagcaacuggcaucccu

SEQ ID NO: 144367 - RNA, 19 nt, Artificial Sequence
  Description of Artificial Sequence: Synthetic oligonucleotide
uccuaagccucaauuuaga

SEQ ID NO: 144368 - RNA, 19 nt, Artificial Sequence
  Description of Artificial Sequence: Synthetic oligonucleotide
ggaacgauauuacagaacu

SEQ ID NO: 144369 - RNA, 19 nt, Artificial Sequence
  Description of Artificial Sequence: Synthetic oligonucleotide
aagacugcuaccagaguca

SEQ ID NO: 144370 - RNA, 19 nt, Artificial Sequence
  Description of Artificial Sequence: Synthetic oligonucleotide
uuaaauuugaugggugguu

SEQ ID NO: 144371 - RNA, 19 nt, Artificial Sequence
  Description of Artificial Sequence: Synthetic oligonucleotide
cuucacggaacgauauuac

SEQ ID NO: 144372 - RNA, 19 nt, Artificial Sequence
  Description of Artificial Sequence: Synthetic oligonucleotide
aacacuugauuugggagaa

SEQ ID NO: 144373 - RNA, 19 nt, Artificial Sequence
  Description of Artificial Sequence: Synthetic oligonucleotide
uuacucuuauuggaacugc

SEQ ID NO: 144374 - RNA, 19 nt, Artificial Sequence
  Description of Artificial Sequence: Synthetic oligonucleotide
ucuucacggaacgauauua

SEQ ID NO: 144375 - RNA, 19 nt, Artificial Sequence
  Description of Artificial Sequence: Synthetic oligonucleotide
uccccgucaauguacacaa

SEQ ID NO: 144376 - RNA, 19 nt, Artificial Sequence
  Description of Artificial Sequence: Synthetic oligonucleotide
uccccaacuaaaugaagaa

SEQ ID NO: 144377 - RNA, 19 nt, Artificial Sequence
  Description of Artificial Sequence: Synthetic oligonucleotide
uaauacccuugagagguag

SEQ ID NO: 144378 - RNA, 19 nt, Artificial Sequence
  Description of Artificial Sequence: Synthetic oligonucleotide
agaagaacguaggucaggu

SEQ ID NO: 144379 - RNA, 19 nt, Artificial Sequence
  Description of Artificial Sequence: Synthetic oligonucleotide
auaguuaccaauggccaga

SEQ ID NO: 144380 - RNA, 19 nt, Artificial Sequence
  Description of Artificial Sequence: Synthetic oligonucleotide
uuaagccuuuauacagaga

SEQ ID NO: 144381 - RNA, 19 nt, Artificial Sequence
  Description of Artificial Sequence: Synthetic oligonucleotide
ggucaauuaagaguguuac

SEQ ID NO: 144382 - RNA, 19 nt, Artificial Sequence
  Description of Artificial Sequence: Synthetic oligonucleotide
gaugggugguuaucaguug

SEQ ID NO: 144383 - RNA, 19 nt, Artificial Sequence
  Description of Artificial Sequence: Synthetic oligonucleotide
cucaaucuagcaugugcac

SEQ ID NO: 144384 - RNA, 19 nt, Artificial Sequence
  Description of Artificial Sequence: Synthetic oligonucleotide
uagcuaagauuuuaugauu

SEQ ID NO: 144385 - RNA, 19 nt, Artificial Sequence
  Description of Artificial Sequence: Synthetic oligonucleotide
cacggaacgauauuacaga

SEQ ID NO: 144386 - RNA, 19 nt, Artificial Sequence
  Description of Artificial Sequence: Synthetic oligonucleotide
agguauuaaauuacagagu

SEQ ID NO: 144387 - RNA, 19 nt, Artificial Sequence
  Description of Artificial Sequence: Synthetic oligonucleotide
uccaagugcuaugauggca

SEQ ID NO: 144388 - RNA, 19 nt, Artificial Sequence
  Description of Artificial Sequence: Synthetic oligonucleotide
uuuauuccuaagccucaau

SEQ ID NO: 144389 - RNA, 19 nt, Artificial Sequence
  Description of Artificial Sequence: Synthetic oligonucleotide
cucuacucuaggcuuuccc

SEQ ID NO: 144390 - RNA, 19 nt, Artificial Sequence
  Description of Artificial Sequence: Synthetic oligonucleotide
agcauaaacacaaguacuu

SEQ ID NO: 144391 - RNA, 19 nt, Artificial Sequence
  Description of Artificial Sequence: Synthetic oligonucleotide
aucaauaguuccauuuggu

SEQ ID NO: 144392 - RNA, 19 nt, Artificial Sequence
  Description of Artificial Sequence: Synthetic oligonucleotide
aguguuuccguuguccaga

SEQ ID NO: 144393 - RNA, 19 nt, Artificial Sequence
  Description of Artificial Sequence: Synthetic oligonucleotide
cuaaacuguugucuggcca

SEQ ID NO: 144394 - RNA, 19 nt, Artificial Sequence
  Description of Artificial Sequence: Synthetic oligonucleotide
agcaauauaagcagauuuu

SEQ ID NO: 144395 - RNA, 19 nt, Artificial Sequence
  Description of Artificial Sequence: Synthetic oligonucleotide
guuucuaugagaacccaaa

SEQ ID NO: 144396 - RNA, 19 nt, Artificial Sequence
  Description of Artificial Sequence: Synthetic oligonucleotide
ucuccucucaaaccauaaa

SEQ ID NO: 144397 - RNA, 19 nt, Artificial Sequence
  Description of Artificial Sequence: Synthetic oligonucleotide
uuguuugccaagucccaaa

SEQ ID NO: 144398 - RNA, 19 nt, Artificial Sequence
  Description of Artificial Sequence: Synthetic oligonucleotide
uguauccgggcaaccaaau

SEQ ID NO: 144399 - RNA, 19 nt, Artificial Sequence
  Description of Artificial Sequence: Synthetic oligonucleotide
augagcucaaaaguuacua

SEQ ID NO: 144400 - RNA, 19 nt, Artificial Sequence
  Description of Artificial Sequence: Synthetic oligonucleotide
uucccgaauaucacauuua

SEQ ID NO: 144401 - RNA, 19 nt, Artificial Sequence
  Description of Artificial Sequence: Synthetic oligonucleotide
acggaacgauauuacagaa

SEQ ID NO: 144402 - RNA, 19 nt, Artificial Sequence
  Description of Artificial Sequence: Synthetic oligonucleotide
uacaaaccacacacacaca

SEQ ID NO: 144403 - RNA, 19 nt, Artificial Sequence
  Description of Artificial Sequence: Synthetic oligonucleotide
caaagguggccugacaguc

SEQ ID NO: 144404 - RNA, 19 nt, Artificial Sequence
  Description of Artificial Sequence: Synthetic oligonucleotide
uuguguacggagccucuuc

SEQ ID NO: 144405 - RNA, 19 nt, Artificial Sequence
  Description of Artificial Sequence: Synthetic oligonucleotide
auacccuugagagguagca

SEQ ID NO: 144406 - RNA, 19 nt, Artificial Sequence
  Description of Artificial Sequence: Synthetic oligonucleotide
uuuguuugccaagucccaa

SEQ ID NO: 144407 - RNA, 19 nt, Artificial Sequence
  Description of Artificial Sequence: Synthetic oligonucleotide
ugcaagcuuuguuugccaa

SEQ ID NO: 144408 - RNA, 19 nt, Artificial Sequence
  Description of Artificial Sequence: Synthetic oligonucleotide
guaaggguaauaaguuuga

SEQ ID NO: 144409 - RNA, 19 nt, Artificial Sequence
  Description of Artificial Sequence: Synthetic oligonucleotide
aggucagguaauaugccug

SEQ ID NO: 144410 - RNA, 19 nt, Artificial Sequence
  Description of Artificial Sequence: Synthetic oligonucleotide
caagcuucugucaaauaua

SEQ ID NO: 144411 - RNA, 19 nt, Artificial Sequence
  Description of Artificial Sequence: Synthetic oligonucleotide
ggucagguaauaugccugc

SEQ ID NO: 144412 - RNA, 19 nt, Artificial Sequence
  Description of Artificial Sequence: Synthetic oligonucleotide
uaggucgacaguuguggau

SEQ ID NO: 144413 - RNA, 19 nt, Artificial Sequence
  Description of Artificial Sequence: Synthetic oligonucleotide
ugcuuuuccaaagccccac

SEQ ID NO: 144414 - RNA, 19 nt, Artificial Sequence
  Description of Artificial Sequence: Synthetic oligonucleotide
auagaaucacaaaguuucu

SEQ ID NO: 144415 - RNA, 19 nt, Artificial Sequence
  Description of Artificial Sequence: Synthetic oligonucleotide
ggaacugcuaaauaagaau

SEQ ID NO: 144416 - RNA, 19 nt, Artificial Sequence
  Description of Artificial Sequence: Synthetic oligonucleotide
caaaccacacacacacaca

SEQ ID NO: 144417 - RNA, 19 nt, Artificial Sequence
  Description of Artificial Sequence: Synthetic oligonucleotide
gaacugacaucauccgaaa

SEQ ID NO: 144418 - RNA, 19 nt, Artificial Sequence
  Description of Artificial Sequence: Synthetic oligonucleotide
uaccaauggccagaauucu

SEQ ID NO: 144419 - RNA, 19 nt, Artificial Sequence
  Description of Artificial Sequence: Synthetic oligonucleotide
aacguaggucagguaauau

SEQ ID NO: 144420 - RNA, 19 nt, Artificial Sequence
  Description of Artificial Sequence: Synthetic oligonucleotide
uacggagccucuucacgga

SEQ ID NO: 144421 - RNA, 19 nt, Artificial Sequence
  Description of Artificial Sequence: Synthetic oligonucleotide
uguuuccguuguccagaag

SEQ ID NO: 144422 - RNA, 19 nt, Artificial Sequence
  Description of Artificial Sequence: Synthetic oligonucleotide
gaguaggucgacaguugug

SEQ ID NO: 144423 - RNA, 19 nt, Artificial Sequence
  Description of Artificial Sequence: Synthetic oligonucleotide
cucugcuaaauuauauacu

SEQ ID NO: 144424 - RNA, 19 nt, Artificial Sequence
  Description of Artificial Sequence: Synthetic oligonucleotide
acgaaguguuuccguuguc

SEQ ID NO: 144425 - RNA, 19 nt, Artificial Sequence
  Description of Artificial Sequence: Synthetic oligonucleotide
gcaagcuuuguuugccaag

SEQ ID NO: 144426 - RNA, 19 nt, Artificial Sequence
  Description of Artificial Sequence: Synthetic oligonucleotide
cuacuacuugcacucaaaa

SEQ ID NO: 144427 - RNA, 19 nt, Artificial Sequence
  Description of Artificial Sequence: Synthetic oligonucleotide
acagcuuguuuguuccuua

SEQ ID NO: 144428 - RNA, 19 nt, Artificial Sequence
  Description of Artificial Sequence: Synthetic oligonucleotide
acucuacucuaggcuuucc

SEQ ID NO: 144429 - RNA, 19 nt, Artificial Sequence
  Description of Artificial Sequence: Synthetic oligonucleotide
acacacacacacauacaca

SEQ ID NO: 144430 - RNA, 19 nt, Artificial Sequence
  Description of Artificial Sequence: Synthetic oligonucleotide
uucaagcuucugucaaaua

SEQ ID NO: 144431 - RNA, 19 nt, Artificial Sequence
  Description of Artificial Sequence: Synthetic oligonucleotide
uuccauguauccgggcaac

SEQ ID NO: 144432 - RNA, 19 nt, Artificial Sequence
  Description of Artificial Sequence: Synthetic oligonucleotide
ccuuuguauccuaaaauaa

SEQ ID NO: 144433 - RNA, 19 nt, Artificial Sequence
  Description of Artificial Sequence: Synthetic oligonucleotide
cugauuugagaauaagcuu

SEQ ID NO: 144434 - RNA, 19 nt, Artificial Sequence
  Description of Artificial Sequence: Synthetic oligonucleotide
gguuaucaguugaaacugc

SEQ ID NO: 144435 - RNA, 19 nt, Artificial Sequence
  Description of Artificial Sequence: Synthetic oligonucleotide
aaccacacacacacacaca

SEQ ID NO: 144436 - RNA, 19 nt, Artificial Sequence
  Description of Artificial Sequence: Synthetic oligonucleotide
uccauguauccgggcaacc

SEQ ID NO: 144437 - RNA, 19 nt, Artificial Sequence
  Description of Artificial Sequence: Synthetic oligonucleotide
agaacguaggucagguaau

SEQ ID NO: 144438 - RNA, 19 nt, Artificial Sequence
  Description of Artificial Sequence: Synthetic oligonucleotide
gguaugcagagguaaggaa

SEQ ID NO: 144439 - RNA, 19 nt, Artificial Sequence
  Description of Artificial Sequence: Synthetic oligonucleotide
cacacacacacacacacau

SEQ ID NO: 144440 - RNA, 19 nt, Artificial Sequence
  Description of Artificial Sequence: Synthetic oligonucleotide
acaagggccuaaacuguug

SEQ ID NO: 144441 - RNA, 19 nt, Artificial Sequence
  Description of Artificial Sequence: Synthetic oligonucleotide
cacacacacauacacacau

SEQ ID NO: 144442 - RNA, 19 nt, Artificial Sequence
  Description of Artificial Sequence: Synthetic oligonucleotide
guauccgggcaaccaaauc

SEQ ID NO: 144443 - RNA, 19 nt, Artificial Sequence
  Description of Artificial Sequence: Synthetic oligonucleotide
cccacaaagcagcacgaag

SEQ ID NO: 144444 - RNA, 19 nt, Artificial Sequence
  Description of Artificial Sequence: Synthetic oligonucleotide
uaguuaccaauggccagaa

SEQ ID NO: 144445 - RNA, 19 nt, Artificial Sequence
  Description of Artificial Sequence: Synthetic oligonucleotide
acgauauuacagaacugua

SEQ ID NO: 144446 - RNA, 19 nt, Artificial Sequence
  Description of Artificial Sequence: Synthetic oligonucleotide
ugagcccaggucccuuuuc

SEQ ID NO: 144447 - RNA, 19 nt, Artificial Sequence
  Description of Artificial Sequence: Synthetic oligonucleotide
ucgacaguuguggauuauu

SEQ ID NO: 144448 - RNA, 19 nt, Artificial Sequence
  Description of Artificial Sequence: Synthetic oligonucleotide
gaacccuuguguugucaaa

SEQ ID NO: 144449 - RNA, 19 nt, Artificial Sequence
  Description of Artificial Sequence: Synthetic oligonucleotide
caugaacuacuugugcuaa

SEQ ID NO: 144450 - RNA, 19 nt, Artificial Sequence
  Description of Artificial Sequence: Synthetic oligonucleotide
ccuaaacuguugucuggcc

SEQ ID NO: 144451 - RNA, 19 nt, Artificial Sequence
  Description of Artificial Sequence: Synthetic oligonucleotide
guaggucgacaguugugga

SEQ ID NO: 144452 - RNA, 19 nt, Artificial Sequence
  Description of Artificial Sequence: Synthetic oligonucleotide
gcaaccaaaucuuucacuu

SEQ ID NO: 144453 - RNA, 19 nt, Artificial Sequence
  Description of Artificial Sequence: Synthetic oligonucleotide
cuggacauagugguaugca

SEQ ID NO: 144454 - RNA, 19 nt, Artificial Sequence
  Description of Artificial Sequence: Synthetic oligonucleotide
guguacggagccucuucac

SEQ ID NO: 144455 - RNA, 19 nt, Artificial Sequence
  Description of Artificial Sequence: Synthetic oligonucleotide
ccaacuaaaugaagaagaa

SEQ ID NO: 144456 - RNA, 19 nt, Artificial Sequence
  Description of Artificial Sequence: Synthetic oligonucleotide
acacacacacauacacaca

SEQ ID NO: 144457 - RNA, 19 nt, Artificial Sequence
  Description of Artificial Sequence: Synthetic oligonucleotide
guucuaaaugaaggcuguc

SEQ ID NO: 144458 - RNA, 19 nt, Artificial Sequence
  Description of Artificial Sequence: Synthetic oligonucleotide
caugugcaccucugcuaac

SEQ ID NO: 144459 - RNA, 19 nt, Artificial Sequence
  Description of Artificial Sequence: Synthetic oligonucleotide
acacacacacacacauaca

SEQ ID NO: 144460 - RNA, 19 nt, Artificial Sequence
  Description of Artificial Sequence: Synthetic oligonucleotide
agauggaccuuggccuuug

SEQ ID NO: 144461 - RNA, 19 nt, Artificial Sequence
  Description of Artificial Sequence: Synthetic oligonucleotide
gaacguaggucagguaaua

SEQ ID NO: 144462 - RNA, 19 nt, Artificial Sequence
  Description of Artificial Sequence: Synthetic oligonucleotide
acacacacacacacacaca

SEQ ID NO: 144463 - RNA, 19 nt, Artificial Sequence
  Description of Artificial Sequence: Synthetic oligonucleotide
auguaucuacaagguauua

SEQ ID NO: 144464 - RNA, 19 nt, Artificial Sequence
  Description of Artificial Sequence: Synthetic oligonucleotide
ugaaaaccagauggaccuu

SEQ ID NO: 144465 - RNA, 19 nt, Artificial Sequence
  Description of Artificial Sequence: Synthetic oligonucleotide
ccccaacuaaaugaagaag

SEQ ID NO: 144466 - RNA, 19 nt, Artificial Sequence
  Description of Artificial Sequence: Synthetic oligonucleotide
ccacuuguccccgucaaug

SEQ ID NO: 144467 - RNA, 19 nt, Artificial Sequence
  Description of Artificial Sequence: Synthetic oligonucleotide
ccccugaguaggucgacag

SEQ ID NO: 144468 - RNA, 19 nt, Artificial Sequence
  Description of Artificial Sequence: Synthetic oligonucleotide
ggcaaccaaaucuuucacu

SEQ ID NO: 144469 - RNA, 19 nt, Artificial Sequence
  Description of Artificial Sequence: Synthetic oligonucleotide
cagaugacuuguguacgga

SEQ ID NO: 144470 - RNA, 19 nt, Artificial Sequence
  Description of Artificial Sequence: Synthetic oligonucleotide
acccacaccucugauuaua

SEQ ID NO: 144471 - RNA, 19 nt, Artificial Sequence
  Description of Artificial Sequence: Synthetic oligonucleotide
caagggccuaaacuguugu

SEQ ID NO: 144472 - RNA, 19 nt, Artificial Sequence
  Description of Artificial Sequence: Synthetic oligonucleotide
cggaacgauauuacagaac

SEQ ID NO: 144473 - RNA, 19 nt, Artificial Sequence
  Description of Artificial Sequence: Synthetic oligonucleotide
guguuuccguuguccagaa

SEQ ID NO: 144474 - RNA, 19 nt, Artificial Sequence
  Description of Artificial Sequence: Synthetic oligonucleotide
cagcuuguuuguuccuuaa

SEQ ID NO: 144475 - RNA, 19 nt, Artificial Sequence
  Description of Artificial Sequence: Synthetic oligonucleotide
cagagacuuuuguaauaua

SEQ ID NO: 144476 - RNA, 19 nt, Artificial Sequence
  Description of Artificial Sequence: Synthetic oligonucleotide
cucuaacugcccaaugcuu

SEQ ID NO: 144477 - RNA, 19 nt, Artificial Sequence
  Description of Artificial Sequence: Synthetic oligonucleotide
acacacacauacacacaua

SEQ ID NO: 144478 - RNA, 19 nt, Artificial Sequence
  Description of Artificial Sequence: Synthetic oligonucleotide
cugccccugaguaggucga

SEQ ID NO: 144479 - RNA, 19 nt, Artificial Sequence
  Description of Artificial Sequence: Synthetic oligonucleotide
acacacacacacacacaua

SEQ ID NO: 144480 - RNA, 19 nt, Artificial Sequence
  Description of Artificial Sequence: Synthetic oligonucleotide
gcccaugaauguucuggca

SEQ ID NO: 144481 - RNA, 19 nt, Artificial Sequence
  Description of Artificial Sequence: Synthetic oligonucleotide
ccucaauuuagagguagaa

SEQ ID NO: 144482 - RNA, 19 nt, Artificial Sequence
  Description of Artificial Sequence: Synthetic oligonucleotide
ccauguauccgggcaacca

SEQ ID NO: 144483 - RNA, 19 nt, Artificial Sequence
  Description of Artificial Sequence: Synthetic oligonucleotide
gccucaauuuagagguaga

SEQ ID NO: 144484 - RNA, 19 nt, Artificial Sequence
  Description of Artificial Sequence: Synthetic oligonucleotide
ggucgacaguuguggauua

SEQ ID NO: 144485 - RNA, 19 nt, Artificial Sequence
  Description of Artificial Sequence: Synthetic oligonucleotide
cagcacgaaguguuuccgu

SEQ ID NO: 144486 - RNA, 19 nt, Artificial Sequence
  Description of Artificial Sequence: Synthetic oligonucleotide
ccacacacacacacacaca

SEQ ID NO: 144487 - RNA, 19 nt, Artificial Sequence
  Description of Artificial Sequence: Synthetic oligonucleotide
ccccaaccuggacccacac

SEQ ID NO: 144488 - RNA, 19 nt, Artificial Sequence
  Description of Artificial Sequence: Synthetic oligonucleotide
cuuguguacggagccucuu

SEQ ID NO: 144489 - RNA, 19 nt, Artificial Sequence
  Description of Artificial Sequence: Synthetic oligonucleotide
gucgacaguuguggauuau

SEQ ID NO: 144490 - RNA, 19 nt, Artificial Sequence
  Description of Artificial Sequence: Synthetic oligonucleotide
cccugaguaggucgacagu

SEQ ID NO: 144491 - RNA, 19 nt, Artificial Sequence
  Description of Artificial Sequence: Synthetic oligonucleotide
aauuacaugacuucgauac

SEQ ID NO: 144492 - RNA, 19 nt, Artificial Sequence
  Description of Artificial Sequence: Synthetic oligonucleotide
aaauuaagguaucagagug

SEQ ID NO: 144493 - RNA, 19 nt, Artificial Sequence
  Description of Artificial Sequence: Synthetic oligonucleotide
ugaauaucuaagcucaagg

SEQ ID NO: 144494 - RNA, 19 nt, Artificial Sequence
  Description of Artificial Sequence: Synthetic oligonucleotide
uuuuaacgcauucugaugc

SEQ ID NO: 144495 - RNA, 19 nt, Artificial Sequence
  Description of Artificial Sequence: Synthetic oligonucleotide
uguuaaagcuaaaugaagc

SEQ ID NO: 144496 - RNA, 19 nt, Artificial Sequence
  Description of Artificial Sequence: Synthetic oligonucleotide
aauuagauaguaaugaaca

SEQ ID NO: 144497 - RNA, 19 nt, Artificial Sequence
  Description of Artificial Sequence: Synthetic oligonucleotide
auauugacaucacugagac

SEQ ID NO: 144498 - RNA, 19 nt, Artificial Sequence
  Description of Artificial Sequence: Synthetic oligonucleotide
acucauuuacuuuugcugc

SEQ ID NO: 144499 - RNA, 19 nt, Artificial Sequence
  Description of Artificial Sequence: Synthetic oligonucleotide
aaucaucucauaaaguugg

SEQ ID NO: 144500 - RNA, 19 nt, Artificial Sequence
  Description of Artificial Sequence: Synthetic oligonucleotide
cauguauuaagccacacgc

SEQ ID NO: 144501 - RNA, 19 nt, Artificial Sequence
  Description of Artificial Sequence: Synthetic oligonucleotide
uuagauaguaaugaacagg

SEQ ID NO: 144502 - RNA, 19 nt, Artificial Sequence
  Description of Artificial Sequence: Synthetic oligonucleotide
auucaugugguuuacauga

SEQ ID NO: 144503 - RNA, 19 nt, Artificial Sequence
  Description of Artificial Sequence: Synthetic oligonucleotide
acugauuugcucaugacgc

SEQ ID NO: 144504 - RNA, 19 nt, Artificial Sequence
  Description of Artificial Sequence: Synthetic oligonucleotide
aauuuagcuaccccuaaug

SEQ ID NO: 144505 - RNA, 19 nt, Artificial Sequence
  Description of Artificial Sequence: Synthetic oligonucleotide
acaauaaucaggaggauac

SEQ ID NO: 144506 - RNA, 19 nt, Artificial Sequence
  Description of Artificial Sequence: Synthetic oligonucleotide
uuuaaauuuuccuugucgu

SEQ ID NO: 144507 - RNA, 19 nt, Artificial Sequence
  Description of Artificial Sequence: Synthetic oligonucleotide
auuuagcuaccccuaaugc

SEQ ID NO: 144508 - RNA, 19 nt, Artificial Sequence
  Description of Artificial Sequence: Synthetic oligonucleotide
aacuagguguuacuucucc

SEQ ID NO: 144509 - RNA, 19 nt, Artificial Sequence
  Description of Artificial Sequence: Synthetic oligonucleotide
uguauuaagccacacgcca

SEQ ID NO: 144510 - RNA, 19 nt, Artificial Sequence
  Description of Artificial Sequence: Synthetic oligonucleotide
aacaauucacaagaagugg

SEQ ID NO: 144511 - RNA, 19 nt, Artificial Sequence
  Description of Artificial Sequence: Synthetic oligonucleotide
uauaucauagccacauacc

SEQ ID NO: 144512 - RNA, 19 nt, Artificial Sequence
  Description of Artificial Sequence: Synthetic oligonucleotide
gaauguuuaacuguggcgc

SEQ ID NO: 144513 - RNA, 19 nt, Artificial Sequence
  Description of Artificial Sequence: Synthetic oligonucleotide
aaaacgauugauuccuuca

SEQ ID NO: 144514 - RNA, 19 nt, Artificial Sequence
  Description of Artificial Sequence: Synthetic oligonucleotide
aaaacaacuugucuguuau

SEQ ID NO: 144515 - RNA, 19 nt, Artificial Sequence
  Description of Artificial Sequence: Synthetic oligonucleotide
uuuaagaucucgcaaugcu

SEQ ID NO: 144516 - RNA, 19 nt, Artificial Sequence
  Description of Artificial Sequence: Synthetic oligonucleotide
aauuaagguaucagagugc

SEQ ID NO: 144517 - RNA, 19 nt, Artificial Sequence
  Description of Artificial Sequence: Synthetic oligonucleotide
uguuaugacuccuugguga

SEQ ID NO: 144518 - RNA, 19 nt, Artificial Sequence
  Description of Artificial Sequence: Synthetic oligonucleotide
augucuucgaaucugacca

SEQ ID NO: 144519 - RNA, 19 nt, Artificial Sequence
  Description of Artificial Sequence: Synthetic oligonucleotide
aaauaauccacaguuggcu

SEQ ID NO: 144520 - RNA, 19 nt, Artificial Sequence
  Description of Artificial Sequence: Synthetic oligonucleotide
aguguuuggacccagcucu

SEQ ID NO: 144521 - RNA, 19 nt, Artificial Sequence
  Description of Artificial Sequence: Synthetic oligonucleotide
aaucugaccagguuuaaaa

SEQ ID NO: 144522 - RNA, 19 nt, Artificial Sequence
  Description of Artificial Sequence: Synthetic oligonucleotide
aaacgauugauuccuucag

SEQ ID NO: 144523 - RNA, 19 nt, Artificial Sequence
  Description of Artificial Sequence: Synthetic oligonucleotide
ugguuuugcacauuuauuc

SEQ ID NO: 144524 - RNA, 19 nt, Artificial Sequence
  Description of Artificial Sequence: Synthetic oligonucleotide
auuagauaguaaugaacag

SEQ ID NO: 144525 - RNA, 19 nt, Artificial Sequence
  Description of Artificial Sequence: Synthetic oligonucleotide
acacguauauuuaugugcc

SEQ ID NO: 144526 - RNA, 19 nt, Artificial Sequence
  Description of Artificial Sequence: Synthetic oligonucleotide
cuauaucauagccacauac

SEQ ID NO: 144527 - RNA, 19 nt, Artificial Sequence
  Description of Artificial Sequence: Synthetic oligonucleotide
ugauucaugaguuccaaau

SEQ ID NO: 144528 - RNA, 19 nt, Artificial Sequence
  Description of Artificial Sequence: Synthetic oligonucleotide
ugauaugguauaaucaaua

SEQ ID NO: 144529 - RNA, 19 nt, Artificial Sequence
  Description of Artificial Sequence: Synthetic oligonucleotide
aacaggaucucggagguag

SEQ ID NO: 144530 - RNA, 19 nt, Artificial Sequence
  Description of Artificial Sequence: Synthetic oligonucleotide
uuuagcuaccccuaaugca

SEQ ID NO: 144531 - RNA, 19 nt, Artificial Sequence
  Description of Artificial Sequence: Synthetic oligonucleotide
uaugugccgacacugauuc

SEQ ID NO: 144532 - RNA, 19 nt, Artificial Sequence
  Description of Artificial Sequence: Synthetic oligonucleotide
auaccugauagauucagcu

SEQ ID NO: 144533 - RNA, 19 nt, Artificial Sequence
  Description of Artificial Sequence: Synthetic oligonucleotide
aauaccugauagauucagc

SEQ ID NO: 144534 - RNA, 19 nt, Artificial Sequence
  Description of Artificial Sequence: Synthetic oligonucleotide
acauguauuaagccacacg

SEQ ID NO: 144535 - RNA, 19 nt, Artificial Sequence
  Description of Artificial Sequence: Synthetic oligonucleotide
acuucgauacgcucucugc

SEQ ID NO: 144536 - RNA, 19 nt, Artificial Sequence
  Description of Artificial Sequence: Synthetic oligonucleotide
uguaguuucccaaaagguu

SEQ ID NO: 144537 - RNA, 19 nt, Artificial Sequence
  Description of Artificial Sequence: Synthetic oligonucleotide
aacgcauucugaugcagug

SEQ ID NO: 144538 - RNA, 19 nt, Artificial Sequence
  Description of Artificial Sequence: Synthetic oligonucleotide
gacaaugucaaggagccug

SEQ ID NO: 144539 - RNA, 19 nt, Artificial Sequence
  Description of Artificial Sequence: Synthetic oligonucleotide
agguuaugaacauacugug

SEQ ID NO: 144540 - RNA, 19 nt, Artificial Sequence
  Description of Artificial Sequence: Synthetic oligonucleotide
ugccauguguuaaugacac

SEQ ID NO: 144541 - RNA, 19 nt, Artificial Sequence
  Description of Artificial Sequence: Synthetic oligonucleotide
acuaaugcaugcuuauaug

SEQ ID NO: 144542 - RNA, 19 nt, Artificial Sequence
  Description of Artificial Sequence: Synthetic oligonucleotide
auuuuaacgcauucugaug

SEQ ID NO: 144543 - RNA, 19 nt, Artificial Sequence
  Description of Artificial Sequence: Synthetic oligonucleotide
uguuuuaacccuuuugauu

SEQ ID NO: 144544 - RNA, 19 nt, Artificial Sequence
  Description of Artificial Sequence: Synthetic oligonucleotide
aauguuuaacuguggcgca

SEQ ID NO: 144545 - RNA, 19 nt, Artificial Sequence
  Description of Artificial Sequence: Synthetic oligonucleotide
uauucaugugguuuacaug

SEQ ID NO: 144546 - RNA, 19 nt, Artificial Sequence
  Description of Artificial Sequence: Synthetic oligonucleotide
augucagaggucuagauuu

SEQ ID NO: 144547 - RNA, 19 nt, Artificial Sequence
  Description of Artificial Sequence: Synthetic oligonucleotide
ugcucaugacgccugagcc

SEQ ID NO: 144548 - RNA, 19 nt, Artificial Sequence
  Description of Artificial Sequence: Synthetic oligonucleotide
acucauauaacaauucaca

SEQ ID NO: 144549 - RNA, 19 nt, Artificial Sequence
  Description of Artificial Sequence: Synthetic oligonucleotide
auuacaugacuucgauacg

SEQ ID NO: 144550 - RNA, 19 nt, Artificial Sequence
  Description of Artificial Sequence: Synthetic oligonucleotide
aauaaucaggaggauacau

SEQ ID NO: 144551 - RNA, 19 nt, Artificial Sequence
  Description of Artificial Sequence: Synthetic oligonucleotide
ugguauaaucaauauugac

SEQ ID NO: 144552 - RNA, 19 nt, Artificial Sequence
  Description of Artificial Sequence: Synthetic oligonucleotide
aaauuuuaacgcauucuga

SEQ ID NO: 144553 - RNA, 19 nt, Artificial Sequence
  Description of Artificial Sequence: Synthetic oligonucleotide
ucgacgauuucauuaaguc

SEQ ID NO: 144554 - RNA, 19 nt, Artificial Sequence
  Description of Artificial Sequence: Synthetic oligonucleotide
ucaugaguuccaaauggcu

SEQ ID NO: 144555 - RNA, 19 nt, Artificial Sequence
  Description of Artificial Sequence: Synthetic oligonucleotide
acucaacucauaaugcugg

SEQ ID NO: 144556 - RNA, 19 nt, Artificial Sequence
  Description of Artificial Sequence: Synthetic oligonucleotide
aacgauugauuccuucaga

SEQ ID NO: 144557 - RNA, 19 nt, Artificial Sequence
  Description of Artificial Sequence: Synthetic oligonucleotide
uaauuggcaaaaguugagc

SEQ ID NO: 144558 - RNA, 19 nt, Artificial Sequence
  Description of Artificial Sequence: Synthetic oligonucleotide
auuaagguaucagagugca

SEQ ID NO: 144559 - RNA, 19 nt, Artificial Sequence
  Description of Artificial Sequence: Synthetic oligonucleotide
uacacauaguuuuaaugau

SEQ ID NO: 144560 - RNA, 19 nt, Artificial Sequence
  Description of Artificial Sequence: Synthetic oligonucleotide
uccacacguauauuuaugu

SEQ ID NO: 144561 - RNA, 19 nt, Artificial Sequence
  Description of Artificial Sequence: Synthetic oligonucleotide
agagcaguuugaucgaugu

SEQ ID NO: 144562 - RNA, 19 nt, Artificial Sequence
  Description of Artificial Sequence: Synthetic oligonucleotide
ugagacuugccccaccaac

SEQ ID NO: 144563 - RNA, 19 nt, Artificial Sequence
  Description of Artificial Sequence: Synthetic oligonucleotide
aauucacaagaaguggaca

SEQ ID NO: 144564 - RNA, 19 nt, Artificial Sequence
  Description of Artificial Sequence: Synthetic oligonucleotide
uagaucauaaugugaugac

SEQ ID NO: 144565 - RNA, 19 nt, Artificial Sequence
  Description of Artificial Sequence: Synthetic oligonucleotide
caugaauguuuaacugugg

SEQ ID NO: 144566 - RNA, 19 nt, Artificial Sequence
  Description of Artificial Sequence: Synthetic oligonucleotide
auguauuaagccacacgcc

SEQ ID NO: 144567 - RNA, 19 nt, Artificial Sequence
  Description of Artificial Sequence: Synthetic oligonucleotide
ucuaagcucaagguauuag

SEQ ID NO: 144568 - RNA, 19 nt, Artificial Sequence
  Description of Artificial Sequence: Synthetic oligonucleotide
gugauuggaacucugaaua

SEQ ID NO: 144569 - RNA, 19 nt, Artificial Sequence
  Description of Artificial Sequence: Synthetic oligonucleotide
uuucaugcaugugagcagc

SEQ ID NO: 144570 - RNA, 19 nt, Artificial Sequence
  Description of Artificial Sequence: Synthetic oligonucleotide
augugguuuacaugauuuc

SEQ ID NO: 144571 - RNA, 19 nt, Artificial Sequence
  Description of Artificial Sequence: Synthetic oligonucleotide
gucacuagaaucgagcuuc

SEQ ID NO: 144572 - RNA, 19 nt, Artificial Sequence
  Description of Artificial Sequence: Synthetic oligonucleotide
cuagguguuacuucuccac

SEQ ID NO: 144573 - RNA, 19 nt, Artificial Sequence
  Description of Artificial Sequence: Synthetic oligonucleotide
gcuauaacugcagugauug

SEQ ID NO: 144574 - RNA, 19 nt, Artificial Sequence
  Description of Artificial Sequence: Synthetic oligonucleotide
uuuugcacuuacugggcgc

SEQ ID NO: 144575 - RNA, 19 nt, Artificial Sequence
  Description of Artificial Sequence: Synthetic oligonucleotide
ucaauuguuuucccaccca

SEQ ID NO: 144576 - RNA, 19 nt, Artificial Sequence
  Description of Artificial Sequence: Synthetic oligonucleotide
gagacuugccccaccaacg

SEQ ID NO: 144577 - RNA, 19 nt, Artificial Sequence
  Description of Artificial Sequence: Synthetic oligonucleotide
ggaucucggagguagaugc

SEQ ID NO: 144578 - RNA, 19 nt, Artificial Sequence
  Description of Artificial Sequence: Synthetic oligonucleotide
uggugaagauuucuguaac

SEQ ID NO: 144579 - RNA, 19 nt, Artificial Sequence
  Description of Artificial Sequence: Synthetic oligonucleotide
aaccuuucaugcaugugag

SEQ ID NO: 144580 - RNA, 19 nt, Artificial Sequence
  Description of Artificial Sequence: Synthetic oligonucleotide
uuaaauuuuccuugucguu

SEQ ID NO: 144581 - RNA, 19 nt, Artificial Sequence
  Description of Artificial Sequence: Synthetic oligonucleotide
gaaguaacaaagaauggcu

SEQ ID NO: 144582 - RNA, 19 nt, Artificial Sequence
  Description of Artificial Sequence: Synthetic oligonucleotide
uaucccauggaaugauaug

SEQ ID NO: 144583 - RNA, 19 nt, Artificial Sequence
  Description of Artificial Sequence: Synthetic oligonucleotide
ucuuuaagacgauccaaau

SEQ ID NO: 144584 - RNA, 19 nt, Artificial Sequence
  Description of Artificial Sequence: Synthetic oligonucleotide
augucacuagaaucgagcu

SEQ ID NO: 144585 - RNA, 19 nt, Artificial Sequence
  Description of Artificial Sequence: Synthetic oligonucleotide
uaccugauagauucagcug

SEQ ID NO: 144586 - RNA, 19 nt, Artificial Sequence
  Description of Artificial Sequence: Synthetic oligonucleotide
ugcaacccuucucuuaagc

SEQ ID NO: 144587 - RNA, 19 nt, Artificial Sequence
  Description of Artificial Sequence: Synthetic oligonucleotide
uuuaugugccgacacugau

SEQ ID NO: 144588 - RNA, 19 nt, Artificial Sequence
  Description of Artificial Sequence: Synthetic oligonucleotide
uuggcgauuauuuggcaaa

SEQ ID NO: 144589 - RNA, 19 nt, Artificial Sequence
  Description of Artificial Sequence: Synthetic oligonucleotide
uacacacuaucccauggaa

SEQ ID NO: 144590 - RNA, 19 nt, Artificial Sequence
  Description of Artificial Sequence: Synthetic oligonucleotide
aacuuaaggccucucccau

SEQ ID NO: 144591 - RNA, 19 nt, Artificial Sequence
  Description of Artificial Sequence: Synthetic oligonucleotide
cacucaacucauaaugcug

SEQ ID NO: 144592 - RNA, 19 nt, Artificial Sequence
  Description of Artificial Sequence: Synthetic oligonucleotide
cucccauuaauugaguuuc

SEQ ID NO: 144593 - RNA, 19 nt, Artificial Sequence
  Description of Artificial Sequence: Synthetic oligonucleotide
gacaacuagguguuacuuc

SEQ ID NO: 144594 - RNA, 19 nt, Artificial Sequence
  Description of Artificial Sequence: Synthetic oligonucleotide
uauuggauaguggaugaaa

SEQ ID NO: 144595 - RNA, 19 nt, Artificial Sequence
  Description of Artificial Sequence: Synthetic oligonucleotide
ucuguauaaugcaacccuu

SEQ ID NO: 144596 - RNA, 19 nt, Artificial Sequence
  Description of Artificial Sequence: Synthetic oligonucleotide
uuugaucgaugugagaaau

SEQ ID NO: 144597 - RNA, 19 nt, Artificial Sequence
  Description of Artificial Sequence: Synthetic oligonucleotide
augaauaucuaagcucaag

SEQ ID NO: 144598 - RNA, 19 nt, Artificial Sequence
  Description of Artificial Sequence: Synthetic oligonucleotide
uuuuaggcugaugaaaguu

SEQ ID NO: 144599 - RNA, 19 nt, Artificial Sequence
  Description of Artificial Sequence: Synthetic oligonucleotide
cugacucauauaacaauuc

SEQ ID NO: 144600 - RNA, 19 nt, Artificial Sequence
  Description of Artificial Sequence: Synthetic oligonucleotide
ucgaaucugaccagguuua

SEQ ID NO: 144601 - RNA, 19 nt, Artificial Sequence
  Description of Artificial Sequence: Synthetic oligonucleotide
acaugacuucgauacgcuc

SEQ ID NO: 144602 - RNA, 19 nt, Artificial Sequence
  Description of Artificial Sequence: Synthetic oligonucleotide
cuucauacuuuaaggagga

SEQ ID NO: 144603 - RNA, 19 nt, Artificial Sequence
  Description of Artificial Sequence: Synthetic oligonucleotide
aucucauaaaguuggcgau

SEQ ID NO: 144604 - RNA, 19 nt, Artificial Sequence
  Description of Artificial Sequence: Synthetic oligonucleotide
uacaugacuucgauacgcu

SEQ ID NO: 144605 - RNA, 19 nt, Artificial Sequence
  Description of Artificial Sequence: Synthetic oligonucleotide
caugcuuauaugcaaaugu

SEQ ID NO: 144606 - RNA, 19 nt, Artificial Sequence
  Description of Artificial Sequence: Synthetic oligonucleotide
uaauuuagcuaccccuaau

SEQ ID NO: 144607 - RNA, 19 nt, Artificial Sequence
  Description of Artificial Sequence: Synthetic oligonucleotide
auguguuaaugacacccug

SEQ ID NO: 144608 - RNA, 19 nt, Artificial Sequence
  Description of Artificial Sequence: Synthetic oligonucleotide
uuaagccacacgccaguga

SEQ ID NO: 144609 - RNA, 19 nt, Artificial Sequence
  Description of Artificial Sequence: Synthetic oligonucleotide
ucuucgaaucugaccaggu

SEQ ID NO: 144610 - RNA, 19 nt, Artificial Sequence
  Description of Artificial Sequence: Synthetic oligonucleotide
caccugaacaggaucucgg

SEQ ID NO: 144611 - RNA, 19 nt, Artificial Sequence
  Description of Artificial Sequence: Synthetic oligonucleotide
agggaacgaaaacuuauaa

SEQ ID NO: 144612 - RNA, 19 nt, Artificial Sequence
  Description of Artificial Sequence: Synthetic oligonucleotide
agaucauaaugugaugacu

SEQ ID NO: 144613 - RNA, 19 nt, Artificial Sequence
  Description of Artificial Sequence: Synthetic oligonucleotide
caauaccugauagauucag

SEQ ID NO: 144614 - RNA, 19 nt, Artificial Sequence
  Description of Artificial Sequence: Synthetic oligonucleotide
agcgucgacgauuucauua

SEQ ID NO: 144615 - RNA, 19 nt, Artificial Sequence
  Description of Artificial Sequence: Synthetic oligonucleotide
uguaacaggcguccucccu

SEQ ID NO: 144616 - RNA, 19 nt, Artificial Sequence
  Description of Artificial Sequence: Synthetic oligonucleotide
aguuuaguugcaaacuuaa

SEQ ID NO: 144617 - RNA, 19 nt, Artificial Sequence
  Description of Artificial Sequence: Synthetic oligonucleotide
uagagcaguuugaucgaug

SEQ ID NO: 144618 - RNA, 19 nt, Artificial Sequence
  Description of Artificial Sequence: Synthetic oligonucleotide
cugauuugcucaugacgcc

SEQ ID NO: 144619 - RNA, 19 nt, Artificial Sequence
  Description of Artificial Sequence: Synthetic oligonucleotide
gcaauguaaacugcuagag

SEQ ID NO: 144620 - RNA, 19 nt, Artificial Sequence
  Description of Artificial Sequence: Synthetic oligonucleotide
cauggaaugauaugguaua

SEQ ID NO: 144621 - RNA, 19 nt, Artificial Sequence
  Description of Artificial Sequence: Synthetic oligonucleotide
uggaggaauuagauaguaa

SEQ ID NO: 144622 - RNA, 19 nt, Artificial Sequence
  Description of Artificial Sequence: Synthetic oligonucleotide
cacguauauuuaugugccg

SEQ ID NO: 144623 - RNA, 19 nt, Artificial Sequence
  Description of Artificial Sequence: Synthetic oligonucleotide
uggacaacuagguguuacu

SEQ ID NO: 144624 - RNA, 19 nt, Artificial Sequence
  Description of Artificial Sequence: Synthetic oligonucleotide
acguauauuuaugugccga

SEQ ID NO: 144625 - RNA, 19 nt, Artificial Sequence
  Description of Artificial Sequence: Synthetic oligonucleotide
guauuaagccacacgccag

SEQ ID NO: 144626 - RNA, 19 nt, Artificial Sequence
  Description of Artificial Sequence: Synthetic oligonucleotide
uggcaaaaguugagcaugu

SEQ ID NO: 144627 - RNA, 19 nt, Artificial Sequence
  Description of Artificial Sequence: Synthetic oligonucleotide
gacuucgauacgcucucug

SEQ ID NO: 144628 - RNA, 19 nt, Artificial Sequence
  Description of Artificial Sequence: Synthetic oligonucleotide
uuugcacuuacugggcgca

SEQ ID NO: 144629 - RNA, 19 nt, Artificial Sequence
  Description of Artificial Sequence: Synthetic oligonucleotide
acaggcguccucccucagc

SEQ ID NO: 144630 - RNA, 19 nt, Artificial Sequence
  Description of Artificial Sequence: Synthetic oligonucleotide
ugucuucgaaucugaccag

SEQ ID NO: 144631 - RNA, 19 nt, Artificial Sequence
  Description of Artificial Sequence: Synthetic oligonucleotide
ucaucagguaaggaaguaa

SEQ ID NO: 144632 - RNA, 19 nt, Artificial Sequence
  Description of Artificial Sequence: Synthetic oligonucleotide
gguaggauaggcccugccc

SEQ ID NO: 144633 - RNA, 19 nt, Artificial Sequence
  Description of Artificial Sequence: Synthetic oligonucleotide
ugucacuagaaucgagcuu

SEQ ID NO: 144634 - RNA, 19 nt, Artificial Sequence
  Description of Artificial Sequence: Synthetic oligonucleotide
gcaugaauguuuaacugug

SEQ ID NO: 144635 - RNA, 19 nt, Artificial Sequence
  Description of Artificial Sequence: Synthetic oligonucleotide
ugcuauaacugcagugauu

SEQ ID NO: 144636 - RNA, 19 nt, Artificial Sequence
  Description of Artificial Sequence: Synthetic oligonucleotide
gaggaagguaagcagggua

SEQ ID NO: 144637 - RNA, 19 nt, Artificial Sequence
  Description of Artificial Sequence: Synthetic oligonucleotide
uucgauacgcucucugcuu

SEQ ID NO: 144638 - RNA, 19 nt, Artificial Sequence
  Description of Artificial Sequence: Synthetic oligonucleotide
gucuucgaaucugaccagg

SEQ ID NO: 144639 - RNA, 19 nt, Artificial Sequence
  Description of Artificial Sequence: Synthetic oligonucleotide
uguuuaacuguggcgcagu

SEQ ID NO: 144640 - RNA, 19 nt, Artificial Sequence
  Description of Artificial Sequence: Synthetic oligonucleotide
agacuugccccaccaacga

SEQ ID NO: 144641 - RNA, 19 nt, Artificial Sequence
  Description of Artificial Sequence: Synthetic oligonucleotide
aaguggacaacuagguguu

SEQ ID NO: 144642 - RNA, 19 nt, Artificial Sequence
  Description of Artificial Sequence: Synthetic oligonucleotide
uggaaugauaugguauaau

SEQ ID NO: 144643 - RNA, 19 nt, Artificial Sequence
  Description of Artificial Sequence: Synthetic oligonucleotide
agccacauaccucuguaua

SEQ ID NO: 144644 - RNA, 19 nt, Artificial Sequence
  Description of Artificial Sequence: Synthetic oligonucleotide
ugucguuuugcugcagacu

SEQ ID NO: 144645 - RNA, 19 nt, Artificial Sequence
  Description of Artificial Sequence: Synthetic oligonucleotide
accaacgacggcaauacaa

SEQ ID NO: 144646 - RNA, 19 nt, Artificial Sequence
  Description of Artificial Sequence: Synthetic oligonucleotide
gccuuuauauaauuggcaa

SEQ ID NO: 144647 - RNA, 19 nt, Artificial Sequence
  Description of Artificial Sequence: Synthetic oligonucleotide
caugacuucgauacgcucu

SEQ ID NO: 144648 - RNA, 19 nt, Artificial Sequence
  Description of Artificial Sequence: Synthetic oligonucleotide
uucaugugguuuacaugau

SEQ ID NO: 144649 - RNA, 19 nt, Artificial Sequence
  Description of Artificial Sequence: Synthetic oligonucleotide
aagggaacgaaaacuuaua

SEQ ID NO: 144650 - RNA, 19 nt, Artificial Sequence
  Description of Artificial Sequence: Synthetic oligonucleotide
guuggcgauuauuuggcaa

SEQ ID NO: 144651 - RNA, 19 nt, Artificial Sequence
  Description of Artificial Sequence: Synthetic oligonucleotide
auguuuaacuguggcgcag

SEQ ID NO: 144652 - RNA, 19 nt, Artificial Sequence
  Description of Artificial Sequence: Synthetic oligonucleotide
guuugaucgaugugagaaa

SEQ ID NO: 144653 - RNA, 19 nt, Artificial Sequence
  Description of Artificial Sequence: Synthetic oligonucleotide
guacacacuaucccaugga

SEQ ID NO: 144654 - RNA, 19 nt, Artificial Sequence
  Description of Artificial Sequence: Synthetic oligonucleotide
gggugguaaugucaaacug

SEQ ID NO: 144655 - RNA, 19 nt, Artificial Sequence
  Description of Artificial Sequence: Synthetic oligonucleotide
cucggagguagaugccacg

SEQ ID NO: 144656 - RNA, 19 nt, Artificial Sequence
  Description of Artificial Sequence: Synthetic oligonucleotide
gcugcuauaacugcaguga

SEQ ID NO: 144657 - RNA, 19 nt, Artificial Sequence
  Description of Artificial Sequence: Synthetic oligonucleotide
uuaugacuccuuggugaag

SEQ ID NO: 144658 - RNA, 19 nt, Artificial Sequence
  Description of Artificial Sequence: Synthetic oligonucleotide
ugaccagguuuaaaaugua

SEQ ID NO: 144659 - RNA, 19 nt, Artificial Sequence
  Description of Artificial Sequence: Synthetic oligonucleotide
guuuggacccagcucuuca

SEQ ID NO: 144660 - RNA, 19 nt, Artificial Sequence
  Description of Artificial Sequence: Synthetic oligonucleotide
agguguuacuucuccacuu

SEQ ID NO: 144661 - RNA, 19 nt, Artificial Sequence
  Description of Artificial Sequence: Synthetic oligonucleotide
guaggauaggcccugcccu

SEQ ID NO: 144662 - RNA, 19 nt, Artificial Sequence
  Description of Artificial Sequence: Synthetic oligonucleotide
gaagggaacgaaaacuuau

SEQ ID NO: 144663 - RNA, 19 nt, Artificial Sequence
  Description of Artificial Sequence: Synthetic oligonucleotide
aguuggcgauuauuuggca

SEQ ID NO: 144664 - RNA, 19 nt, Artificial Sequence
  Description of Artificial Sequence: Synthetic oligonucleotide
cuuaagccccuggggaucc

SEQ ID NO: 144665 - RNA, 19 nt, Artificial Sequence
  Description of Artificial Sequence: Synthetic oligonucleotide
acaguaacuucagcccaag

SEQ ID NO: 144666 - RNA, 19 nt, Artificial Sequence
  Description of Artificial Sequence: Synthetic oligonucleotide
auccacacguauauuuaug

SEQ ID NO: 144667 - RNA, 19 nt, Artificial Sequence
  Description of Artificial Sequence: Synthetic oligonucleotide
gggaacgaaaacuuauaaa

SEQ ID NO: 144668 - RNA, 19 nt, Artificial Sequence
  Description of Artificial Sequence: Synthetic oligonucleotide
ggggaugcuauaucauagc

SEQ ID NO: 144669 - RNA, 19 nt, Artificial Sequence
  Description of Artificial Sequence: Synthetic oligonucleotide
cucaugacgccugagccca

SEQ ID NO: 144670 - RNA, 19 nt, Artificial Sequence
  Description of Artificial Sequence: Synthetic oligonucleotide
guggacaacuagguguuac

SEQ ID NO: 144671 - RNA, 19 nt, Artificial Sequence
  Description of Artificial Sequence: Synthetic oligonucleotide
acaaccuaugagaaacaau

SEQ ID NO: 144672 - RNA, 19 nt, Artificial Sequence
  Description of Artificial Sequence: Synthetic oligonucleotide
cugggcgcaguguuuggac

SEQ ID NO: 144673 - RNA, 19 nt, Artificial Sequence
  Description of Artificial Sequence: Synthetic oligonucleotide
aggaucucggagguagaug

SEQ ID NO: 144674 - RNA, 19 nt, Artificial Sequence
  Description of Artificial Sequence: Synthetic oligonucleotide
cacgccagugaguucucug

SEQ ID NO: 144675 - RNA, 19 nt, Artificial Sequence
  Description of Artificial Sequence: Synthetic oligonucleotide
aucucgcaaugcuucagua

SEQ ID NO: 144676 - RNA, 19 nt, Artificial Sequence
  Description of Artificial Sequence: Synthetic oligonucleotide
auggaaugauaugguauaa

SEQ ID NO: 144677 - RNA, 19 nt, Artificial Sequence
  Description of Artificial Sequence: Synthetic oligonucleotide
gcucaugacgccugagccc

SEQ ID NO: 144678 - RNA, 19 nt, Artificial Sequence
  Description of Artificial Sequence: Synthetic oligonucleotide
augcaacccuucucuuaag

SEQ ID NO: 144679 - RNA, 19 nt, Artificial Sequence
  Description of Artificial Sequence: Synthetic oligonucleotide
gcgcaguacacacuauccc

SEQ ID NO: 144680 - RNA, 19 nt, Artificial Sequence
  Description of Artificial Sequence: Synthetic oligonucleotide
cugaugcaguguacuugag

SEQ ID NO: 144681 - RNA, 19 nt, Artificial Sequence
  Description of Artificial Sequence: Synthetic oligonucleotide
agcuaccccuaaugcagcu

SEQ ID NO: 144682 - RNA, 19 nt, Artificial Sequence
  Description of Artificial Sequence: Synthetic oligonucleotide
cauguguuaaugacacccu

SEQ ID NO: 144683 - RNA, 19 nt, Artificial Sequence
  Description of Artificial Sequence: Synthetic oligonucleotide
ccugaacaggaucucggag

SEQ ID NO: 144684 - RNA, 19 nt, Artificial Sequence
  Description of Artificial Sequence: Synthetic oligonucleotide
cguauauuuaugugccgac

SEQ ID NO: 144685 - RNA, 19 nt, Artificial Sequence
  Description of Artificial Sequence: Synthetic oligonucleotide
acacacuaucccauggaau

SEQ ID NO: 144686 - RNA, 19 nt, Artificial Sequence
  Description of Artificial Sequence: Synthetic oligonucleotide
uuucuguaacaggcguccu

SEQ ID NO: 144687 - RNA, 19 nt, Artificial Sequence
  Description of Artificial Sequence: Synthetic oligonucleotide
uaggauaggcccugcccuu

SEQ ID NO: 144688 - RNA, 19 nt, Artificial Sequence
  Description of Artificial Sequence: Synthetic oligonucleotide
ccacacguauauuuaugug

SEQ ID NO: 144689 - RNA, 19 nt, Artificial Sequence
  Description of Artificial Sequence: Synthetic oligonucleotide
uucauacuuuaaggaggac

SEQ ID NO: 144690 - RNA, 19 nt, Artificial Sequence
  Description of Artificial Sequence: Synthetic oligonucleotide
gccgacacugauucaugag

SEQ ID NO: 144691 - RNA, 19 nt, Artificial Sequence
  Description of Artificial Sequence: Synthetic oligonucleotide
cuucgauacgcucucugcu

SEQ ID NO: 144692 - RNA, 19 nt, Artificial Sequence
  Description of Artificial Sequence: Synthetic oligonucleotide
gucagaggucuagauuuac

SEQ ID NO: 144693 - RNA, 19 nt, Artificial Sequence
  Description of Artificial Sequence: Synthetic oligonucleotide
uggcgauuauuuggcaaaa

SEQ ID NO: 144694 - RNA, 19 nt, Artificial Sequence
  Description of Artificial Sequence: Synthetic oligonucleotide
guucucugauaaauacaca

SEQ ID NO: 144695 - RNA, 19 nt, Artificial Sequence
  Description of Artificial Sequence: Synthetic oligonucleotide
cuuuuaggcugaugaaagu

SEQ ID NO: 144696 - RNA, 19 nt, Artificial Sequence
  Description of Artificial Sequence: Synthetic oligonucleotide
aacaaacccuuugcugaua

SEQ ID NO: 144697 - RNA, 19 nt, Artificial Sequence
  Description of Artificial Sequence: Synthetic oligonucleotide
gcaugcuuauaugcaaaug

SEQ ID NO: 144698 - RNA, 19 nt, Artificial Sequence
  Description of Artificial Sequence: Synthetic oligonucleotide
agacaaccuaugagaaaca

SEQ ID NO: 144699 - RNA, 19 nt, Artificial Sequence
  Description of Artificial Sequence: Synthetic oligonucleotide
caacgacggcaauacaaaa

SEQ ID NO: 144700 - RNA, 19 nt, Artificial Sequence
  Description of Artificial Sequence: Synthetic oligonucleotide
ggaagguaagcaggguaug

SEQ ID NO: 144701 - RNA, 19 nt, Artificial Sequence
  Description of Artificial Sequence: Synthetic oligonucleotide
guaucagagugcaaacagu

SEQ ID NO: 144702 - RNA, 19 nt, Artificial Sequence
  Description of Artificial Sequence: Synthetic oligonucleotide
gcacuuacugggcgcagug

SEQ ID NO: 144703 - RNA, 19 nt, Artificial Sequence
  Description of Artificial Sequence: Synthetic oligonucleotide
cgagcuucgucauccacug

SEQ ID NO: 144704 - RNA, 19 nt, Artificial Sequence
  Description of Artificial Sequence: Synthetic oligonucleotide
ugacaaugucaaggagccu

SEQ ID NO: 144705 - RNA, 19 nt, Artificial Sequence
  Description of Artificial Sequence: Synthetic oligonucleotide
cauaaaguuggcgauuauu

SEQ ID NO: 144706 - RNA, 19 nt, Artificial Sequence
  Description of Artificial Sequence: Synthetic oligonucleotide
ccaacgacggcaauacaaa

SEQ ID NO: 144707 - RNA, 19 nt, Artificial Sequence
  Description of Artificial Sequence: Synthetic oligonucleotide
ggcagcgucgacgauuuca

SEQ ID NO: 144708 - RNA, 19 nt, Artificial Sequence
  Description of Artificial Sequence: Synthetic oligonucleotide
acugggcgcaguguuugga

SEQ ID NO: 144709 - RNA, 19 nt, Artificial Sequence
  Description of Artificial Sequence: Synthetic oligonucleotide
gucgacgauuucauuaagu

SEQ ID NO: 144710 - RNA, 19 nt, Artificial Sequence
  Description of Artificial Sequence: Synthetic oligonucleotide
gcacucaacucauaaugcu

SEQ ID NO: 144711 - RNA, 19 nt, Artificial Sequence
  Description of Artificial Sequence: Synthetic oligonucleotide
caguuugaucgaugugaga

SEQ ID NO: 144712 - RNA, 19 nt, Artificial Sequence
  Description of Artificial Sequence: Synthetic oligonucleotide
gcgucgacgauuucauuaa

SEQ ID NO: 144713 - RNA, 19 nt, Artificial Sequence
  Description of Artificial Sequence: Synthetic oligonucleotide
guauuggauaguggaugaa

SEQ ID NO: 144714 - RNA, 19 nt, Artificial Sequence
  Description of Artificial Sequence: Synthetic oligonucleotide
ccaccugaacaggaucucg

SEQ ID NO: 144715 - RNA, 19 nt, Artificial Sequence
  Description of Artificial Sequence: Synthetic oligonucleotide
acuaucccauggaaugaua

SEQ ID NO: 144716 - RNA, 19 nt, Artificial Sequence
  Description of Artificial Sequence: Synthetic oligonucleotide
uggguccauccaaguaauu

SEQ ID NO: 144717 - RNA, 19 nt, Artificial Sequence
  Description of Artificial Sequence: Synthetic oligonucleotide
ggucuagauuuacauguau

SEQ ID NO: 144718 - RNA, 19 nt, Artificial Sequence
  Description of Artificial Sequence: Synthetic oligonucleotide
cccauuaauugaguuucuc

SEQ ID NO: 144719 - RNA, 19 nt, Artificial Sequence
  Description of Artificial Sequence: Synthetic oligonucleotide
gucaaggagccugcaaggu

SEQ ID NO: 144720 - RNA, 19 nt, Artificial Sequence
  Description of Artificial Sequence: Synthetic oligonucleotide
gcucaagguauuagacaac

SEQ ID NO: 144721 - RNA, 19 nt, Artificial Sequence
  Description of Artificial Sequence: Synthetic oligonucleotide
cugcuauaacugcagugau

SEQ ID NO: 144722 - RNA, 19 nt, Artificial Sequence
  Description of Artificial Sequence: Synthetic oligonucleotide
uuaagccccuggggaucca

SEQ ID NO: 144723 - RNA, 19 nt, Artificial Sequence
  Description of Artificial Sequence: Synthetic oligonucleotide
cacugaacccaagaugaau

SEQ ID NO: 144724 - RNA, 19 nt, Artificial Sequence
  Description of Artificial Sequence: Synthetic oligonucleotide
ggacaucaaaacgauugau

SEQ ID NO: 144725 - RNA, 19 nt, Artificial Sequence
  Description of Artificial Sequence: Synthetic oligonucleotide
aguggacaacuagguguua

SEQ ID NO: 144726 - RNA, 19 nt, Artificial Sequence
  Description of Artificial Sequence: Synthetic oligonucleotide
gguggaggaauuagauagu

SEQ ID NO: 144727 - RNA, 19 nt, Artificial Sequence
  Description of Artificial Sequence: Synthetic oligonucleotide
ccuagaagugcaaggcuau

SEQ ID NO: 144728 - RNA, 19 nt, Artificial Sequence
  Description of Artificial Sequence: Synthetic oligonucleotide
caccaacgacggcaauaca

SEQ ID NO: 144729 - RNA, 19 nt, Artificial Sequence
  Description of Artificial Sequence: Synthetic oligonucleotide
cgucgacgauuucauuaag

SEQ ID NO: 144730 - RNA, 19 nt, Artificial Sequence
  Description of Artificial Sequence: Synthetic oligonucleotide
gaacaggaucucggaggua

SEQ ID NO: 144731 - RNA, 19 nt, Artificial Sequence
  Description of Artificial Sequence: Synthetic oligonucleotide
guguacugugccugugguu

SEQ ID NO: 144732 - RNA, 19 nt, Artificial Sequence
  Description of Artificial Sequence: Synthetic oligonucleotide
ggacaacuagguguuacuu

SEQ ID NO: 144733 - RNA, 19 nt, Artificial Sequence
  Description of Artificial Sequence: Synthetic oligonucleotide
gagcuucgucauccacugu

SEQ ID NO: 144734 - RNA, 19 nt, Artificial Sequence
  Description of Artificial Sequence: Synthetic oligonucleotide
uggcagcgucgacgauuuc

SEQ ID NO: 144735 - RNA, 19 nt, Artificial Sequence
  Description of Artificial Sequence: Synthetic oligonucleotide
gcagcgucgacgauuucau

SEQ ID NO: 144736 - RNA, 19 nt, Artificial Sequence
  Description of Artificial Sequence: Synthetic oligonucleotide
caggaucucggagguagau

SEQ ID NO: 144737 - RNA, 19 nt, Artificial Sequence
  Description of Artificial Sequence: Synthetic oligonucleotide
cccauacaucuuauuuacu

SEQ ID NO: 144738 - RNA, 19 nt, Artificial Sequence
  Description of Artificial Sequence: Synthetic oligonucleotide
gucgcacccucaggaaccu

SEQ ID NO: 144739 - RNA, 19 nt, Artificial Sequence
  Description of Artificial Sequence: Synthetic oligonucleotide
ggcgauuauuuggcaaaau

SEQ ID NO: 144740 - RNA, 19 nt, Artificial Sequence
  Description of Artificial Sequence: Synthetic oligonucleotide
gcgcaguguuuggacccag

SEQ ID NO: 144741 - RNA, 19 nt, Artificial Sequence
  Description of Artificial Sequence: Synthetic oligonucleotide
cacuagaaucgagcuucgu

SEQ ID NO: 144742 - RNA, 19 nt, Artificial Sequence
  Description of Artificial Sequence: Synthetic oligonucleotide
cccaccaacgacggcaaua

SEQ ID NO: 144743 - RNA, 19 nt, Artificial Sequence
  Description of Artificial Sequence: Synthetic oligonucleotide
ggcaaaaguugagcauguu

SEQ ID NO: 144744 - RNA, 19 nt, Artificial Sequence
  Description of Artificial Sequence: Synthetic oligonucleotide
cagcgucgacgauuucauu

SEQ ID NO: 144745 - RNA, 19 nt, Artificial Sequence
  Description of Artificial Sequence: Synthetic oligonucleotide
cgaaucugaccagguuuaa

SEQ ID NO: 144746 - RNA, 19 nt, Artificial Sequence
  Description of Artificial Sequence: Synthetic oligonucleotide
aauuguuugauuuacgagg

SEQ ID NO: 144747 - RNA, 19 nt, Artificial Sequence
  Description of Artificial Sequence: Synthetic oligonucleotide
aaacuagucaucuugaagg

SEQ ID NO: 144748 - RNA, 19 nt, Artificial Sequence
  Description of Artificial Sequence: Synthetic oligonucleotide
uuuuguaugacuucaagug

SEQ ID NO: 144749 - RNA, 19 nt, Artificial Sequence
  Description of Artificial Sequence: Synthetic oligonucleotide
uguucuauaacuuucagua

SEQ ID NO: 144750 - RNA, 19 nt, Artificial Sequence
  Description of Artificial Sequence: Synthetic oligonucleotide
aauaaaggaucccaguaag

SEQ ID NO: 144751 - RNA, 19 nt, Artificial Sequence
  Description of Artificial Sequence: Synthetic oligonucleotide
uucauaaucauaugggucc

SEQ ID NO: 144752 - RNA, 19 nt, Artificial Sequence
  Description of Artificial Sequence: Synthetic oligonucleotide
agaaauggaagauaaaacu

SEQ ID NO: 144753 - RNA, 19 nt, Artificial Sequence
  Description of Artificial Sequence: Synthetic oligonucleotide
uaagacugaaucaguaucg

SEQ ID NO: 144754 - RNA, 19 nt, Artificial Sequence
  Description of Artificial Sequence: Synthetic oligonucleotide
aaauuguuugauuuacgag

SEQ ID NO: 144755 - RNA, 19 nt, Artificial Sequence
  Description of Artificial Sequence: Synthetic oligonucleotide
auuaagacaaccaagguug

SEQ ID NO: 144756 - RNA, 19 nt, Artificial Sequence
  Description of Artificial Sequence: Synthetic oligonucleotide
uuuacgaggauccaccaag

SEQ ID NO: 144757 - RNA, 19 nt, Artificial Sequence
  Description of Artificial Sequence: Synthetic oligonucleotide
uacucaauuaucaaagcug

SEQ ID NO: 144758 - RNA, 19 nt, Artificial Sequence
  Description of Artificial Sequence: Synthetic oligonucleotide
uguauuacgaagucuuccg

SEQ ID NO: 144759 - RNA, 19 nt, Artificial Sequence
  Description of Artificial Sequence: Synthetic oligonucleotide
ggaacauucaacuuguggg

SEQ ID NO: 144760 - RNA, 19 nt, Artificial Sequence
  Description of Artificial Sequence: Synthetic oligonucleotide
aacuauaaucgaucggacg

SEQ ID NO: 144761 - RNA, 19 nt, Artificial Sequence
  Description of Artificial Sequence: Synthetic oligonucleotide
acagcaaucugauaacugg

SEQ ID NO: 144762 - RNA, 19 nt, Artificial Sequence
  Description of Artificial Sequence: Synthetic oligonucleotide
uagguaaggaaucauguug

SEQ ID NO: 144763 - RNA, 19 nt, Artificial Sequence
  Description of Artificial Sequence: Synthetic oligonucleotide
ugaacuauaaucgaucgga

SEQ ID NO: 144764 - RNA, 19 nt, Artificial Sequence
  Description of Artificial Sequence: Synthetic oligonucleotide
auggauaagauguaaguug

SEQ ID NO: 144765 - RNA, 19 nt, Artificial Sequence
  Description of Artificial Sequence: Synthetic oligonucleotide
acuauaaucgaucggacga

SEQ ID NO: 144766 - RNA, 19 nt, Artificial Sequence
  Description of Artificial Sequence: Synthetic oligonucleotide
uugacuauggacaggaggu

SEQ ID NO: 144767 - RNA, 19 nt, Artificial Sequence
  Description of Artificial Sequence: Synthetic oligonucleotide
uuguauucuaagcaaagcu

SEQ ID NO: 144768 - RNA, 19 nt, Artificial Sequence
  Description of Artificial Sequence: Synthetic oligonucleotide
auuagcauuagacaagcca

SEQ ID NO: 144769 - RNA, 19 nt, Artificial Sequence
  Description of Artificial Sequence: Synthetic oligonucleotide
uggauaagauguaaguugc

SEQ ID NO: 144770 - RNA, 19 nt, Artificial Sequence
  Description of Artificial Sequence: Synthetic oligonucleotide
aacuagucaucuugaaggg

SEQ ID NO: 144771 - RNA, 19 nt, Artificial Sequence
  Description of Artificial Sequence: Synthetic oligonucleotide
uaugugaugggaauauuca

SEQ ID NO: 144772 - RNA, 19 nt, Artificial Sequence
  Description of Artificial Sequence: Synthetic oligonucleotide
cucgauaaugaaauugugg

SEQ ID NO: 144773 - RNA, 19 nt, Artificial Sequence
  Description of Artificial Sequence: Synthetic oligonucleotide
ugccaaauaauauuaggug

SEQ ID NO: 144774 - RNA, 19 nt, Artificial Sequence
  Description of Artificial Sequence: Synthetic oligonucleotide
ugaucugagcaucacauga

SEQ ID NO: 144775 - RNA, 19 nt, Artificial Sequence
  Description of Artificial Sequence: Synthetic oligonucleotide
ugauuuacgaggauccacc

SEQ ID NO: 144776 - RNA, 19 nt, Artificial Sequence
  Description of Artificial Sequence: Synthetic oligonucleotide
aauagguaccuucauuuga

SEQ ID NO: 144777 - RNA, 19 nt, Artificial Sequence
  Description of Artificial Sequence: Synthetic oligonucleotide
agccaaauagaagagacac

SEQ ID NO: 144778 - RNA, 19 nt, Artificial Sequence
  Description of Artificial Sequence: Synthetic oligonucleotide
uguauucuaagcaaagcuc

SEQ ID NO: 144779 - RNA, 19 nt, Artificial Sequence
  Description of Artificial Sequence: Synthetic oligonucleotide
uuaauaaaggaucccagua

SEQ ID NO: 144780 - RNA, 19 nt, Artificial Sequence
  Description of Artificial Sequence: Synthetic oligonucleotide
uccaaauuaauuucauuga

SEQ ID NO: 144781 - RNA, 19 nt, Artificial Sequence
  Description of Artificial Sequence: Synthetic oligonucleotide
aauggaagauaaaacuuuc

SEQ ID NO: 144782 - RNA, 19 nt, Artificial Sequence
  Description of Artificial Sequence: Synthetic oligonucleotide
ugcuucgugaauaucagga

SEQ ID NO: 144783 - RNA, 19 nt, Artificial Sequence
  Description of Artificial Sequence: Synthetic oligonucleotide
gagagauucuaucauuucc

SEQ ID NO: 144784 - RNA, 19 nt, Artificial Sequence
  Description of Artificial Sequence: Synthetic oligonucleotide
uuuggcuguagacacguag

SEQ ID NO: 144785 - RNA, 19 nt, Artificial Sequence
  Description of Artificial Sequence: Synthetic oligonucleotide
ugaauacucaauuaucaaa

SEQ ID NO: 144786 - RNA, 19 nt, Artificial Sequence
  Description of Artificial Sequence: Synthetic oligonucleotide
guugccacuccuuucaccg

SEQ ID NO: 144787 - RNA, 19 nt, Artificial Sequence
  Description of Artificial Sequence: Synthetic oligonucleotide
gaucggacgagacuguagg

SEQ ID NO: 144788 - RNA, 19 nt, Artificial Sequence
  Description of Artificial Sequence: Synthetic oligonucleotide
ucaggauaaucuuugccag

SEQ ID NO: 144789 - RNA, 19 nt, Artificial Sequence
  Description of Artificial Sequence: Synthetic oligonucleotide
aaucgaucggacgagacug

SEQ ID NO: 144790 - RNA, 19 nt, Artificial Sequence
  Description of Artificial Sequence: Synthetic oligonucleotide
aauaaauuagucgcagacu

SEQ ID NO: 144791 - RNA, 19 nt, Artificial Sequence
  Description of Artificial Sequence: Synthetic oligonucleotide
gacuguaggagauacacga

SEQ ID NO: 144792 - RNA, 19 nt, Artificial Sequence
  Description of Artificial Sequence: Synthetic oligonucleotide
aaucugauaacuggcuggg

SEQ ID NO: 144793 - RNA, 19 nt, Artificial Sequence
  Description of Artificial Sequence: Synthetic oligonucleotide
uguucaauuugugaaagcu

SEQ ID NO: 144794 - RNA, 19 nt, Artificial Sequence
  Description of Artificial Sequence: Synthetic oligonucleotide
aucaguaucgagcacaaaa

SEQ ID NO: 144795 - RNA, 19 nt, Artificial Sequence
  Description of Artificial Sequence: Synthetic oligonucleotide
uugaacuauaaucgaucgg

SEQ ID NO: 144796 - RNA, 19 nt, Artificial Sequence
  Description of Artificial Sequence: Synthetic oligonucleotide
aguacgcugauacucauca

SEQ ID NO: 144797 - RNA, 19 nt, Artificial Sequence
  Description of Artificial Sequence: Synthetic oligonucleotide
agauacacgacucuaugca

SEQ ID NO: 144798 - RNA, 19 nt, Artificial Sequence
  Description of Artificial Sequence: Synthetic oligonucleotide
gacugaaucaguaucgagc

SEQ ID NO: 144799 - RNA, 19 nt, Artificial Sequence
  Description of Artificial Sequence: Synthetic oligonucleotide
cuaugguucuuccacaagc

SEQ ID NO: 144800 - RNA, 19 nt, Artificial Sequence
  Description of Artificial Sequence: Synthetic oligonucleotide
uucgugaauaucaggauaa

SEQ ID NO: 144801 - RNA, 19 nt, Artificial Sequence
  Description of Artificial Sequence: Synthetic oligonucleotide
cuuuggugaauaauguuug

SEQ ID NO: 144802 - RNA, 19 nt, Artificial Sequence
  Description of Artificial Sequence: Synthetic oligonucleotide
ugaauggacgcuagaaaug

SEQ ID NO: 144803 - RNA, 19 nt, Artificial Sequence
  Description of Artificial Sequence: Synthetic oligonucleotide
agaguuauuacauguucca

SEQ ID NO: 144804 - RNA, 19 nt, Artificial Sequence
  Description of Artificial Sequence: Synthetic oligonucleotide
aaugaaauugugguaagua

SEQ ID NO: 144805 - RNA, 19 nt, Artificial Sequence
  Description of Artificial Sequence: Synthetic oligonucleotide
cuggguaagacugauggcg

SEQ ID NO: 144806 - RNA, 19 nt, Artificial Sequence
  Description of Artificial Sequence: Synthetic oligonucleotide
ucuagcuguacauacugcu

SEQ ID NO: 144807 - RNA, 19 nt, Artificial Sequence
  Description of Artificial Sequence: Synthetic oligonucleotide
aacugggcauucuaggaug

SEQ ID NO: 144808 - RNA, 19 nt, Artificial Sequence
  Description of Artificial Sequence: Synthetic oligonucleotide
gagauaaagcuucuucagc

SEQ ID NO: 144809 - RNA, 19 nt, Artificial Sequence
  Description of Artificial Sequence: Synthetic oligonucleotide
cagaguuauuacauguucc

SEQ ID NO: 144810 - RNA, 19 nt, Artificial Sequence
  Description of Artificial Sequence: Synthetic oligonucleotide
auaaucauauggguccagc

SEQ ID NO: 144811 - RNA, 19 nt, Artificial Sequence
  Description of Artificial Sequence: Synthetic oligonucleotide
augaauggacgcuagaaau

SEQ ID NO: 144812 - RNA, 19 nt, Artificial Sequence
  Description of Artificial Sequence: Synthetic oligonucleotide
ucugauaacuggcuggguc

SEQ ID NO: 144813 - RNA, 19 nt, Artificial Sequence
  Description of Artificial Sequence: Synthetic oligonucleotide
ugccauaaugaauggacgc

SEQ ID NO: 144814 - RNA, 19 nt, Artificial Sequence
  Description of Artificial Sequence: Synthetic oligonucleotide
uaaauuagucgcagacucc

SEQ ID NO: 144815 - RNA, 19 nt, Artificial Sequence
  Description of Artificial Sequence: Synthetic oligonucleotide
aauguuuugaauacucaau

SEQ ID NO: 144816 - RNA, 19 nt, Artificial Sequence
  Description of Artificial Sequence: Synthetic oligonucleotide
cauguacugguauucgagg

SEQ ID NO: 144817 - RNA, 19 nt, Artificial Sequence
  Description of Artificial Sequence: Synthetic oligonucleotide
agauucguggcuaugguuc

SEQ ID NO: 144818 - RNA, 19 nt, Artificial Sequence
  Description of Artificial Sequence: Synthetic oligonucleotide
gugguaaguacgcugauac

SEQ ID NO: 144819 - RNA, 19 nt, Artificial Sequence
  Description of Artificial Sequence: Synthetic oligonucleotide
gauacacgacucuaugcag

SEQ ID NO: 144820 - RNA, 19 nt, Artificial Sequence
  Description of Artificial Sequence: Synthetic oligonucleotide
guaagacugaaucaguauc

SEQ ID NO: 144821 - RNA, 19 nt, Artificial Sequence
  Description of Artificial Sequence: Synthetic oligonucleotide
aaauccauuguucguuaga

SEQ ID NO: 144822 - RNA, 19 nt, Artificial Sequence
  Description of Artificial Sequence: Synthetic oligonucleotide
gucugcaacaauuauaaaa

SEQ ID NO: 144823 - RNA, 19 nt, Artificial Sequence
  Description of Artificial Sequence: Synthetic oligonucleotide
auaugugaugggaauauuc

SEQ ID NO: 144824 - RNA, 19 nt, Artificial Sequence
  Description of Artificial Sequence: Synthetic oligonucleotide
caaacuagucaucuugaag

SEQ ID NO: 144825 - RNA, 19 nt, Artificial Sequence
  Description of Artificial Sequence: Synthetic oligonucleotide
acguagagaguaucuaggg

SEQ ID NO: 144826 - RNA, 19 nt, Artificial Sequence
  Description of Artificial Sequence: Synthetic oligonucleotide
ugucgaucaguugaaauga

SEQ ID NO: 144827 - RNA, 19 nt, Artificial Sequence
  Description of Artificial Sequence: Synthetic oligonucleotide
gagauacacgacucuaugc

SEQ ID NO: 144828 - RNA, 19 nt, Artificial Sequence
  Description of Artificial Sequence: Synthetic oligonucleotide
uacauguuccagcauguac

SEQ ID NO: 144829 - RNA, 19 nt, Artificial Sequence
  Description of Artificial Sequence: Synthetic oligonucleotide
cauagauucguggcuaugg

SEQ ID NO: 144830 - RNA, 19 nt, Artificial Sequence
  Description of Artificial Sequence: Synthetic oligonucleotide
uggacgcuagaaauggaag

SEQ ID NO: 144831 - RNA, 19 nt, Artificial Sequence
  Description of Artificial Sequence: Synthetic oligonucleotide
uucagaguggggcauuagc

SEQ ID NO: 144832 - RNA, 19 nt, Artificial Sequence
  Description of Artificial Sequence: Synthetic oligonucleotide
auggcgacgagacucucac

SEQ ID NO: 144833 - RNA, 19 nt, Artificial Sequence
  Description of Artificial Sequence: Synthetic oligonucleotide
caguaucaaauauaagaug

SEQ ID NO: 144834 - RNA, 19 nt, Artificial Sequence
  Description of Artificial Sequence: Synthetic oligonucleotide
cauaaugaauggacgcuag

SEQ ID NO: 144835 - RNA, 19 nt, Artificial Sequence
  Description of Artificial Sequence: Synthetic oligonucleotide
agagcucguguuuuguggg

SEQ ID NO: 144836 - RNA, 19 nt, Artificial Sequence
  Description of Artificial Sequence: Synthetic oligonucleotide
uuguucuauaacuuucagu

SEQ ID NO: 144837 - RNA, 19 nt, Artificial Sequence
  Description of Artificial Sequence: Synthetic oligonucleotide
ugguauucgagguccacug

SEQ ID NO: 144838 - RNA, 19 nt, Artificial Sequence
  Description of Artificial Sequence: Synthetic oligonucleotide
uuguucguuagaagcagca

SEQ ID NO: 144839 - RNA, 19 nt, Artificial Sequence
  Description of Artificial Sequence: Synthetic oligonucleotide
aaguucuuaagggacauuu

SEQ ID NO: 144840 - RNA, 19 nt, Artificial Sequence
  Description of Artificial Sequence: Synthetic oligonucleotide
ggaaaacccugcuaguugg

SEQ ID NO: 144841 - RNA, 19 nt, Artificial Sequence
  Description of Artificial Sequence: Synthetic oligonucleotide
uuagucgcagacuccaaac

SEQ ID NO: 144842 - RNA, 19 nt, Artificial Sequence
  Description of Artificial Sequence: Synthetic oligonucleotide
acuccgaucaugucaaggu

SEQ ID NO: 144843 - RNA, 19 nt, Artificial Sequence
  Description of Artificial Sequence: Synthetic oligonucleotide
auacacgacucuaugcagc

SEQ ID NO: 144844 - RNA, 19 nt, Artificial Sequence
  Description of Artificial Sequence: Synthetic oligonucleotide
uguuugauuuacgaggauc

SEQ ID NO: 144845 - RNA, 19 nt, Artificial Sequence
  Description of Artificial Sequence: Synthetic oligonucleotide
auggcgacggcccacuccg

SEQ ID NO: 144846 - RNA, 19 nt, Artificial Sequence
  Description of Artificial Sequence: Synthetic oligonucleotide
uagagaguaucuagggaga

SEQ ID NO: 144847 - RNA, 19 nt, Artificial Sequence
  Description of Artificial Sequence: Synthetic oligonucleotide
aguugccacuccuuucacc

SEQ ID NO: 144848 - RNA, 19 nt, Artificial Sequence
  Description of Artificial Sequence: Synthetic oligonucleotide
uuagaagcagcauguaaua

SEQ ID NO: 144849 - RNA, 19 nt, Artificial Sequence
  Description of Artificial Sequence: Synthetic oligonucleotide
uaaucgaucggacgagacu

SEQ ID NO: 144850 - RNA, 19 nt, Artificial Sequence
  Description of Artificial Sequence: Synthetic oligonucleotide
ggagauaaagcuucuucag

SEQ ID NO: 144851 - RNA, 19 nt, Artificial Sequence
  Description of Artificial Sequence: Synthetic oligonucleotide
agauuaagacaaccaaggu

SEQ ID NO: 144852 - RNA, 19 nt, Artificial Sequence
  Description of Artificial Sequence: Synthetic oligonucleotide
ucaauuugugaaagcugga

SEQ ID NO: 144853 - RNA, 19 nt, Artificial Sequence
  Description of Artificial Sequence: Synthetic oligonucleotide
gacucuaugcagcacuuca

SEQ ID NO: 144854 - RNA, 19 nt, Artificial Sequence
  Description of Artificial Sequence: Synthetic oligonucleotide
caaugucucaaaugaugcc

SEQ ID NO: 144855 - RNA, 19 nt, Artificial Sequence
  Description of Artificial Sequence: Synthetic oligonucleotide
uguacugguauucgagguc

SEQ ID NO: 144856 - RNA, 19 nt, Artificial Sequence
  Description of Artificial Sequence: Synthetic oligonucleotide
ucgaucaguugaaaugacu

SEQ ID NO: 144857 - RNA, 19 nt, Artificial Sequence
  Description of Artificial Sequence: Synthetic oligonucleotide
aaccugccauaaugaaugg

SEQ ID NO: 144858 - RNA, 19 nt, Artificial Sequence
  Description of Artificial Sequence: Synthetic oligonucleotide
aacauucaacuugugggcu

SEQ ID NO: 144859 - RNA, 19 nt, Artificial Sequence
  Description of Artificial Sequence: Synthetic oligonucleotide
ugggacuguugcaaaauaa

SEQ ID NO: 144860 - RNA, 19 nt, Artificial Sequence
  Description of Artificial Sequence: Synthetic oligonucleotide
uauuguugguguuuaucau

SEQ ID NO: 144861 - RNA, 19 nt, Artificial Sequence
  Description of Artificial Sequence: Synthetic oligonucleotide
uggguaagacugauggcga

SEQ ID NO: 144862 - RNA, 19 nt, Artificial Sequence
  Description of Artificial Sequence: Synthetic oligonucleotide
gccaaauaauauuagguga

SEQ ID NO: 144863 - RNA, 19 nt, Artificial Sequence
  Description of Artificial Sequence: Synthetic oligonucleotide
uuggcgacuccgaucaugu

SEQ ID NO: 144864 - RNA, 19 nt, Artificial Sequence
  Description of Artificial Sequence: Synthetic oligonucleotide
uuagguaaggaaucauguu

SEQ ID NO: 144865 - RNA, 19 nt, Artificial Sequence
  Description of Artificial Sequence: Synthetic oligonucleotide
ugucaaggucauccgaaac

SEQ ID NO: 144866 - RNA, 19 nt, Artificial Sequence
  Description of Artificial Sequence: Synthetic oligonucleotide
agacugaaucaguaucgag

SEQ ID NO: 144867 - RNA, 19 nt, Artificial Sequence
  Description of Artificial Sequence: Synthetic oligonucleotide
uugauuuacgaggauccac

SEQ ID NO: 144868 - RNA, 19 nt, Artificial Sequence
  Description of Artificial Sequence: Synthetic oligonucleotide
uguuggucugcaacaauua

SEQ ID NO: 144869 - RNA, 19 nt, Artificial Sequence
  Description of Artificial Sequence: Synthetic oligonucleotide
auuguucguuagaagcagc

SEQ ID NO: 144870 - RNA, 19 nt, Artificial Sequence
  Description of Artificial Sequence: Synthetic oligonucleotide
guauuacgaagucuuccgc

SEQ ID NO: 144871 - RNA, 19 nt, Artificial Sequence
  Description of Artificial Sequence: Synthetic oligonucleotide
cagguugucgaucaguuga

SEQ ID NO: 144872 - RNA, 19 nt, Artificial Sequence
  Description of Artificial Sequence: Synthetic oligonucleotide
auaaucgaucggacgagac

SEQ ID NO: 144873 - RNA, 19 nt, Artificial Sequence
  Description of Artificial Sequence: Synthetic oligonucleotide
auugugguaaguacgcuga

SEQ ID NO: 144874 - RNA, 19 nt, Artificial Sequence
  Description of Artificial Sequence: Synthetic oligonucleotide
ucggacgagacuguaggag

SEQ ID NO: 144875 - RNA, 19 nt, Artificial Sequence
  Description of Artificial Sequence: Synthetic oligonucleotide
ucaaacuagucaucuugaa

SEQ ID NO: 144876 - RNA, 19 nt, Artificial Sequence
  Description of Artificial Sequence: Synthetic oligonucleotide
aagacugaaucaguaucga

SEQ ID NO: 144877 - RNA, 19 nt, Artificial Sequence
  Description of Artificial Sequence: Synthetic oligonucleotide
cauuguucguuagaagcag

SEQ ID NO: 144878 - RNA, 19 nt, Artificial Sequence
  Description of Artificial Sequence: Synthetic oligonucleotide
acgacaguaucaaauauaa

SEQ ID NO: 144879 - RNA, 19 nt, Artificial Sequence
  Description of Artificial Sequence: Synthetic oligonucleotide
ggcgacgagacucucacag

SEQ ID NO: 144880 - RNA, 19 nt, Artificial Sequence
  Description of Artificial Sequence: Synthetic oligonucleotide
guacugguauucgaggucc

SEQ ID NO: 144881 - RNA, 19 nt, Artificial Sequence
  Description of Artificial Sequence: Synthetic oligonucleotide
acaagcccuuaaucauucc

SEQ ID NO: 144882 - RNA, 19 nt, Artificial Sequence
  Description of Artificial Sequence: Synthetic oligonucleotide
ucaccgaccaaaagaacuu

SEQ ID NO: 144883 - RNA, 19 nt, Artificial Sequence
  Description of Artificial Sequence: Synthetic oligonucleotide
gacuccgaucaugucaagg

SEQ ID NO: 144884 - RNA, 19 nt, Artificial Sequence
  Description of Artificial Sequence: Synthetic oligonucleotide
gguaaguacgcugauacuc

SEQ ID NO: 144885 - RNA, 19 nt, Artificial Sequence
  Description of Artificial Sequence: Synthetic oligonucleotide
uagucgcagacuccaaacu

SEQ ID NO: 144886 - RNA, 19 nt, Artificial Sequence
  Description of Artificial Sequence: Synthetic oligonucleotide
uaaugaaauugugguaagu

SEQ ID NO: 144887 - RNA, 19 nt, Artificial Sequence
  Description of Artificial Sequence: Synthetic oligonucleotide
cuauaaucgaucggacgag

SEQ ID NO: 144888 - RNA, 19 nt, Artificial Sequence
  Description of Artificial Sequence: Synthetic oligonucleotide
agguaaggaaucauguuga

SEQ ID NO: 144889 - RNA, 19 nt, Artificial Sequence
  Description of Artificial Sequence: Synthetic oligonucleotide
uuugauuuacgaggaucca

SEQ ID NO: 144890 - RNA, 19 nt, Artificial Sequence
  Description of Artificial Sequence: Synthetic oligonucleotide
auuagucgcagacuccaaa

SEQ ID NO: 144891 - RNA, 19 nt, Artificial Sequence
  Description of Artificial Sequence: Synthetic oligonucleotide
acgaggauccaccaagaaa

SEQ ID NO: 144892 - RNA, 19 nt, Artificial Sequence
  Description of Artificial Sequence: Synthetic oligonucleotide
ucauaaucauaugggucca

SEQ ID NO: 144893 - RNA, 19 nt, Artificial Sequence
  Description of Artificial Sequence: Synthetic oligonucleotide
uauaaucgaucggacgaga

SEQ ID NO: 144894 - RNA, 19 nt, Artificial Sequence
  Description of Artificial Sequence: Synthetic oligonucleotide
guuggaagcgacucuucac

SEQ ID NO: 144895 - RNA, 19 nt, Artificial Sequence
  Description of Artificial Sequence: Synthetic oligonucleotide
uggaagcgacucuucacug

SEQ ID NO: 144896 - RNA, 19 nt, Artificial Sequence
  Description of Artificial Sequence: Synthetic oligonucleotide
uuucaccgaccaaaagaac

SEQ ID NO: 144897 - RNA, 19 nt, Artificial Sequence
  Description of Artificial Sequence: Synthetic oligonucleotide
ugagcgccggaacuggaga

SEQ ID NO: 144898 - RNA, 19 nt, Artificial Sequence
  Description of Artificial Sequence: Synthetic oligonucleotide
gaacuauaaucgaucggac

SEQ ID NO: 144899 - RNA, 19 nt, Artificial Sequence
  Description of Artificial Sequence: Synthetic oligonucleotide
uggaagcucuagcuguaca

SEQ ID NO: 144900 - RNA, 19 nt, Artificial Sequence
  Description of Artificial Sequence: Synthetic oligonucleotide
gaugcaacugaaguguucu

SEQ ID NO: 144901 - RNA, 19 nt, Artificial Sequence
  Description of Artificial Sequence: Synthetic oligonucleotide
ggagauacacgacucuaug

SEQ ID NO: 144902 - RNA, 19 nt, Artificial Sequence
  Description of Artificial Sequence: Synthetic oligonucleotide
ggggagauucuuuuguaug

SEQ ID NO: 144903 - RNA, 19 nt, Artificial Sequence
  Description of Artificial Sequence: Synthetic oligonucleotide
guaaguacgcugauacuca

SEQ ID NO: 144904 - RNA, 19 nt, Artificial Sequence
  Description of Artificial Sequence: Synthetic oligonucleotide
gauggcgacggcccacucc

SEQ ID NO: 144905 - RNA, 19 nt, Artificial Sequence
  Description of Artificial Sequence: Synthetic oligonucleotide
aaguacgcugauacucauc

SEQ ID NO: 144906 - RNA, 19 nt, Artificial Sequence
  Description of Artificial Sequence: Synthetic oligonucleotide
uaucuagggagaacuucau

SEQ ID NO: 144907 - RNA, 19 nt, Artificial Sequence
  Description of Artificial Sequence: Synthetic oligonucleotide
caguagaaaugaaacuaca

SEQ ID NO: 144908 - RNA, 19 nt, Artificial Sequence
  Description of Artificial Sequence: Synthetic oligonucleotide
aagcuggagguuuguaaua

SEQ ID NO: 144909 - RNA, 19 nt, Artificial Sequence
  Description of Artificial Sequence: Synthetic oligonucleotide
cugcuucgugaauaucagg

SEQ ID NO: 144910 - RNA, 19 nt, Artificial Sequence
  Description of Artificial Sequence: Synthetic oligonucleotide
caauuaucacgggaguuuc

SEQ ID NO: 144911 - RNA, 19 nt, Artificial Sequence
  Description of Artificial Sequence: Synthetic oligonucleotide
agcauucuugaacuauaau

SEQ ID NO: 144912 - RNA, 19 nt, Artificial Sequence
  Description of Artificial Sequence: Synthetic oligonucleotide
gggaaaacccugcuaguug

SEQ ID NO: 144913 - RNA, 19 nt, Artificial Sequence
  Description of Artificial Sequence: Synthetic oligonucleotide
gauuucacaaggagcugca

SEQ ID NO: 144914 - RNA, 19 nt, Artificial Sequence
  Description of Artificial Sequence: Synthetic oligonucleotide
gggcauuagcauuagacaa

SEQ ID NO: 144915 - RNA, 19 nt, Artificial Sequence
  Description of Artificial Sequence: Synthetic oligonucleotide
uuacgaagucuuccgcuua

SEQ ID NO: 144916 - RNA, 19 nt, Artificial Sequence
  Description of Artificial Sequence: Synthetic oligonucleotide
gcagaguuauuacauguuc

SEQ ID NO: 144917 - RNA, 19 nt, Artificial Sequence
  Description of Artificial Sequence: Synthetic oligonucleotide
agaugcaacugaaguguuc

SEQ ID NO: 144918 - RNA, 19 nt, Artificial Sequence
  Description of Artificial Sequence: Synthetic oligonucleotide
uccugucaagcaauaucaa

SEQ ID NO: 144919 - RNA, 19 nt, Artificial Sequence
  Description of Artificial Sequence: Synthetic oligonucleotide
agagccugauuaauguuca

SEQ ID NO: 144920 - RNA, 19 nt, Artificial Sequence
  Description of Artificial Sequence: Synthetic oligonucleotide
ugguaaguacgcugauacu

SEQ ID NO: 144921 - RNA, 19 nt, Artificial Sequence
  Description of Artificial Sequence: Synthetic oligonucleotide
ggggcauuagcauuagaca

SEQ ID NO: 144922 - RNA, 19 nt, Artificial Sequence
  Description of Artificial Sequence: Synthetic oligonucleotide
uagguaccuucauuugaac

SEQ ID NO: 144923 - RNA, 19 nt, Artificial Sequence
  Description of Artificial Sequence: Synthetic oligonucleotide
acugguauucgagguccac

SEQ ID NO: 144924 - RNA, 19 nt, Artificial Sequence
  Description of Artificial Sequence: Synthetic oligonucleotide
uagauucguggcuaugguu

SEQ ID NO: 144925 - RNA, 19 nt, Artificial Sequence
  Description of Artificial Sequence: Synthetic oligonucleotide
uacgaggauccaccaagaa

SEQ ID NO: 144926 - RNA, 19 nt, Artificial Sequence
  Description of Artificial Sequence: Synthetic oligonucleotide
agaggcucacaaugagaug

SEQ ID NO: 144927 - RNA, 19 nt, Artificial Sequence
  Description of Artificial Sequence: Synthetic oligonucleotide
gugccaaauaauauuaggu

SEQ ID NO: 144928 - RNA, 19 nt, Artificial Sequence
  Description of Artificial Sequence: Synthetic oligonucleotide
gcauuagcauuagacaagc

SEQ ID NO: 144929 - RNA, 19 nt, Artificial Sequence
  Description of Artificial Sequence: Synthetic oligonucleotide
ccgaccaaaagaacuuucc

SEQ ID NO: 144930 - RNA, 19 nt, Artificial Sequence
  Description of Artificial Sequence: Synthetic oligonucleotide
cacuccggguugacuaugg

SEQ ID NO: 144931 - RNA, 19 nt, Artificial Sequence
  Description of Artificial Sequence: Synthetic oligonucleotide
cuucgugaauaucaggaua

SEQ ID NO: 144932 - RNA, 19 nt, Artificial Sequence
  Description of Artificial Sequence: Synthetic oligonucleotide
ccugucaagcaauaucaac

SEQ ID NO: 144933 - RNA, 19 nt, Artificial Sequence
  Description of Artificial Sequence: Synthetic oligonucleotide
ucguuggcuuguucuauaa

SEQ ID NO: 144934 - RNA, 19 nt, Artificial Sequence
  Description of Artificial Sequence: Synthetic oligonucleotide
augucaaggucauccgaaa

SEQ ID NO: 144935 - RNA, 19 nt, Artificial Sequence
  Description of Artificial Sequence: Synthetic oligonucleotide
ggacgcuagaaauggaaga

SEQ ID NO: 144936 - RNA, 19 nt, Artificial Sequence
  Description of Artificial Sequence: Synthetic oligonucleotide
cacgacaguaucaaauaua

SEQ ID NO: 144937 - RNA, 19 nt, Artificial Sequence
  Description of Artificial Sequence: Synthetic oligonucleotide
cagcauguacugguauucg

SEQ ID NO: 144938 - RNA, 19 nt, Artificial Sequence
  Description of Artificial Sequence: Synthetic oligonucleotide
aauggacgcuagaaaugga

SEQ ID NO: 144939 - RNA, 19 nt, Artificial Sequence
  Description of Artificial Sequence: Synthetic oligonucleotide
gguuagcuggcgcaugccc

SEQ ID NO: 144940 - RNA, 19 nt, Artificial Sequence
  Description of Artificial Sequence: Synthetic oligonucleotide
uuucagaguggggcauuag

SEQ ID NO: 144941 - RNA, 19 nt, Artificial Sequence
  Description of Artificial Sequence: Synthetic oligonucleotide
acauucaacuugugggcua

SEQ ID NO: 144942 - RNA, 19 nt, Artificial Sequence
  Description of Artificial Sequence: Synthetic oligonucleotide
gaaucaguaucgagcacaa

SEQ ID NO: 144943 - RNA, 19 nt, Artificial Sequence
  Description of Artificial Sequence: Synthetic oligonucleotide
ugugguaaguacgcugaua

SEQ ID NO: 144944 - RNA, 19 nt, Artificial Sequence
  Description of Artificial Sequence: Synthetic oligonucleotide
cuccgaucaugucaagguc

SEQ ID NO: 144945 - RNA, 19 nt, Artificial Sequence
  Description of Artificial Sequence: Synthetic oligonucleotide
ggcgacuccgaucauguca

SEQ ID NO: 144946 - RNA, 19 nt, Artificial Sequence
  Description of Artificial Sequence: Synthetic oligonucleotide
aggauccaccaagaaaugu

SEQ ID NO: 144947 - RNA, 19 nt, Artificial Sequence
  Description of Artificial Sequence: Synthetic oligonucleotide
agacacguagagaguaucu

SEQ ID NO: 144948 - RNA, 19 nt, Artificial Sequence
  Description of Artificial Sequence: Synthetic oligonucleotide
aguagggaaccugccauaa

SEQ ID NO: 144949 - RNA, 19 nt, Artificial Sequence
  Description of Artificial Sequence: Synthetic oligonucleotide
cugauaacuggcugggucu

SEQ ID NO: 144950 - RNA, 19 nt, Artificial Sequence
  Description of Artificial Sequence: Synthetic oligonucleotide
cuuggcgacuccgaucaug

SEQ ID NO: 144951 - RNA, 19 nt, Artificial Sequence
  Description of Artificial Sequence: Synthetic oligonucleotide
auggacgcuagaaauggaa

SEQ ID NO: 144952 - RNA, 19 nt, Artificial Sequence
  Description of Artificial Sequence: Synthetic oligonucleotide
ucguggcuaugguucuucc

SEQ ID NO: 144953 - RNA, 19 nt, Artificial Sequence
  Description of Artificial Sequence: Synthetic oligonucleotide
uggugggaaaacccugcua

SEQ ID NO: 144954 - RNA, 19 nt, Artificial Sequence
  Description of Artificial Sequence: Synthetic oligonucleotide
uugcaccuuuaacaaucuc

SEQ ID NO: 144955 - RNA, 19 nt, Artificial Sequence
  Description of Artificial Sequence: Synthetic oligonucleotide
uugugguaaguacgcugau

SEQ ID NO: 144956 - RNA, 19 nt, Artificial Sequence
  Description of Artificial Sequence: Synthetic oligonucleotide
ucauccgaaacugggcauu

SEQ ID NO: 144957 - RNA, 19 nt, Artificial Sequence
  Description of Artificial Sequence: Synthetic oligonucleotide
uuuucagaguggggcauua

SEQ ID NO: 144958 - RNA, 19 nt, Artificial Sequence
  Description of Artificial Sequence: Synthetic oligonucleotide
ugcuucggugccugagcgc

SEQ ID NO: 144959 - RNA, 19 nt, Artificial Sequence
  Description of Artificial Sequence: Synthetic oligonucleotide
ugaggggcacaaccauuuc

SEQ ID NO: 144960 - RNA, 19 nt, Artificial Sequence
  Description of Artificial Sequence: Synthetic oligonucleotide
acgggaguuucacuugcaa

SEQ ID NO: 144961 - RNA, 19 nt, Artificial Sequence
  Description of Artificial Sequence: Synthetic oligonucleotide
aauuagucgcagacuccaa

SEQ ID NO: 144962 - RNA, 19 nt, Artificial Sequence
  Description of Artificial Sequence: Synthetic oligonucleotide
agagaguaucuagggagaa

SEQ ID NO: 144963 - RNA, 19 nt, Artificial Sequence
  Description of Artificial Sequence: Synthetic oligonucleotide
ugccugagcgccggaacug

SEQ ID NO: 144964 - RNA, 19 nt, Artificial Sequence
  Description of Artificial Sequence: Synthetic oligonucleotide
gcuucggugccugagcgcc

SEQ ID NO: 144965 - RNA, 19 nt, Artificial Sequence
  Description of Artificial Sequence: Synthetic oligonucleotide
ggcauucuaggauggcgac

SEQ ID NO: 144966 - RNA, 19 nt, Artificial Sequence
  Description of Artificial Sequence: Synthetic oligonucleotide
agcucguguuuugugggca

SEQ ID NO: 144967 - RNA, 19 nt, Artificial Sequence
  Description of Artificial Sequence: Synthetic oligonucleotide
cagcauucuugaacuauaa

SEQ ID NO: 144968 - RNA, 19 nt, Artificial Sequence
  Description of Artificial Sequence: Synthetic oligonucleotide
auaugccauuucaacaauu

SEQ ID NO: 144969 - RNA, 19 nt, Artificial Sequence
  Description of Artificial Sequence: Synthetic oligonucleotide
aucagacuucuaauuuggu

SEQ ID NO: 144970 - RNA, 19 nt, Artificial Sequence
  Description of Artificial Sequence: Synthetic oligonucleotide
ucgugaauaucaggauaau

SEQ ID NO: 144971 - RNA, 19 nt, Artificial Sequence
  Description of Artificial Sequence: Synthetic oligonucleotide
gcauucuaggauggcgacg

SEQ ID NO: 144972 - RNA, 19 nt, Artificial Sequence
  Description of Artificial Sequence: Synthetic oligonucleotide
gucgaucaguugaaaugac

SEQ ID NO: 144973 - RNA, 19 nt, Artificial Sequence
  Description of Artificial Sequence: Synthetic oligonucleotide
cuagucugggcagccggug

SEQ ID NO: 144974 - RNA, 19 nt, Artificial Sequence
  Description of Artificial Sequence: Synthetic oligonucleotide
ggaagcgacucuucacuga

SEQ ID NO: 144975 - RNA, 19 nt, Artificial Sequence
  Description of Artificial Sequence: Synthetic oligonucleotide
gcuuaugcugggauguuca

SEQ ID NO: 144976 - RNA, 19 nt, Artificial Sequence
  Description of Artificial Sequence: Synthetic oligonucleotide
cauuucagauaggacuuaa

SEQ ID NO: 144977 - RNA, 19 nt, Artificial Sequence
  Description of Artificial Sequence: Synthetic oligonucleotide
cacgacucuaugcagcacu

SEQ ID NO: 144978 - RNA, 19 nt, Artificial Sequence
  Description of Artificial Sequence: Synthetic oligonucleotide
cgaggauccaccaagaaau

SEQ ID NO: 144979 - RNA, 19 nt, Artificial Sequence
  Description of Artificial Sequence: Synthetic oligonucleotide
acuccggguugacuaugga

SEQ ID NO: 144980 - RNA, 19 nt, Artificial Sequence
  Description of Artificial Sequence: Synthetic oligonucleotide
cauccgaaacugggcauuc

SEQ ID NO: 144981 - RNA, 19 nt, Artificial Sequence
  Description of Artificial Sequence: Synthetic oligonucleotide
gauguuuugcagccaucuu

SEQ ID NO: 144982 - RNA, 19 nt, Artificial Sequence
  Description of Artificial Sequence: Synthetic oligonucleotide
gacuauggacaggagguau

SEQ ID NO: 144983 - RNA, 19 nt, Artificial Sequence
  Description of Artificial Sequence: Synthetic oligonucleotide
ggaagcucuagcuguacau

SEQ ID NO: 144984 - RNA, 19 nt, Artificial Sequence
  Description of Artificial Sequence: Synthetic oligonucleotide
cugggcauucuaggauggc

SEQ ID NO: 144985 - RNA, 19 nt, Artificial Sequence
  Description of Artificial Sequence: Synthetic oligonucleotide
ggcuaugguucuuccacaa

SEQ ID NO: 144986 - RNA, 19 nt, Artificial Sequence
  Description of Artificial Sequence: Synthetic oligonucleotide
gacgagacucucacagcaa

SEQ ID NO: 144987 - RNA, 19 nt, Artificial Sequence
  Description of Artificial Sequence: Synthetic oligonucleotide
ucgaucggacgagacugua

SEQ ID NO: 144988 - RNA, 19 nt, Artificial Sequence
  Description of Artificial Sequence: Synthetic oligonucleotide
ggcucacaaugagaugugc

SEQ ID NO: 144989 - RNA, 19 nt, Artificial Sequence
  Description of Artificial Sequence: Synthetic oligonucleotide
gcgacgagacucucacagc

SEQ ID NO: 144990 - RNA, 19 nt, Artificial Sequence
  Description of Artificial Sequence: Synthetic oligonucleotide
uggcgacgagacucucaca

SEQ ID NO: 144991 - RNA, 19 nt, Artificial Sequence
  Description of Artificial Sequence: Synthetic oligonucleotide
uggcgacggcccacuccgg

SEQ ID NO: 144992 - RNA, 19 nt, Artificial Sequence
  Description of Artificial Sequence: Synthetic oligonucleotide
aucgaucggacgagacugu

SEQ ID NO: 144993 - RNA, 19 nt, Artificial Sequence
  Description of Artificial Sequence: Synthetic oligonucleotide
cgugaauaucaggauaauc

SEQ ID NO: 144994 - RNA, 19 nt, Artificial Sequence
  Description of Artificial Sequence: Synthetic oligonucleotide
ccgguggcagaguuauuac

SEQ ID NO: 144995 - RNA, 19 nt, Artificial Sequence
  Description of Artificial Sequence: Synthetic oligonucleotide
gucauccgaaacugggcau

SEQ ID NO: 144996 - RNA, 19 nt, Artificial Sequence
  Description of Artificial Sequence: Synthetic oligonucleotide
gccauaaugaauggacgcu

SEQ ID NO: 144997 - RNA, 19 nt, Artificial Sequence
  Description of Artificial Sequence: Synthetic oligonucleotide
cuaugagcacugcuucggu

SEQ ID NO: 144998 - RNA, 19 nt, Artificial Sequence
  Description of Artificial Sequence: Synthetic oligonucleotide
acgacucuaugcagcacuu

SEQ ID NO: 144999 - RNA, 19 nt, Artificial Sequence
  Description of Artificial Sequence: Synthetic oligonucleotide
cgaucggacgagacuguag

SEQ ID NO: 145000 - RNA, 19 nt, Artificial Sequence
  Description of Artificial Sequence: Synthetic oligonucleotide
cgacgagacucucacagca

SEQ ID NO: 145001 - RNA, 19 nt, Artificial Sequence
  Description of Artificial Sequence: Synthetic oligonucleotide
gcgacuccgaucaugucaa

SEQ ID NO: 145002 - RNA, 19 nt, Artificial Sequence
  Description of Artificial Sequence: Synthetic oligonucleotide
cccuuaaucauuccuuccu

SEQ ID NO: 145003 - RNA, 19 nt, Artificial Sequence
  Description of Artificial Sequence: Synthetic oligonucleotide
uggcgacuccgaucauguc

SEQ ID NO: 145004 - RNA, 19 nt, Artificial Sequence
  Description of Artificial Sequence: Synthetic oligonucleotide
gcuucgugaauaucaggau

SEQ ID NO: 145005 - RNA, 19 nt, Artificial Sequence
  Description of Artificial Sequence: Synthetic oligonucleotide
gagcgccggaacuggagau

SEQ ID NO: 145006 - RNA, 19 nt, Artificial Sequence
  Description of Artificial Sequence: Synthetic oligonucleotide
cgaucaguugaaaugacuu

SEQ ID NO: 145007 - RNA, 19 nt, Artificial Sequence
  Description of Artificial Sequence: Synthetic oligonucleotide
ccauaaugaauggacgcua

SEQ ID NO: 145008 - RNA, 19 nt, Artificial Sequence
  Description of Artificial Sequence: Synthetic oligonucleotide
guggggcauuagcauuaga

SEQ ID NO: 145009 - RNA, 19 nt, Artificial Sequence
  Description of Artificial Sequence: Synthetic oligonucleotide
caccaaucguacugccaua

SEQ ID NO: 145010 - RNA, 19 nt, Artificial Sequence
  Description of Artificial Sequence: Synthetic oligonucleotide
agcgccggaacuggagaua

SEQ ID NO: 145011 - RNA, 19 nt, Artificial Sequence
  Description of Artificial Sequence: Synthetic oligonucleotide
cggacgagacuguaggaga

SEQ ID NO: 145012 - RNA, 19 nt, Artificial Sequence
  Description of Artificial Sequence: Synthetic oligonucleotide
cguuggcuuguucuauaac

SEQ ID NO: 145013 - RNA, 19 nt, Artificial Sequence
  Description of Artificial Sequence: Synthetic oligonucleotide
ccauagauucguggcuaug

SEQ ID NO: 145014 - RNA, 19 nt, Artificial Sequence
  Description of Artificial Sequence: Synthetic oligonucleotide
ccaccaaucguacugccau

SEQ ID NO: 145015 - RNA, 19 nt, Artificial Sequence
  Description of Artificial Sequence: Synthetic oligonucleotide
cuaggauggcgacgagacu

SEQ ID NO: 145016 - RNA, 19 nt, Artificial Sequence
  Description of Artificial Sequence: Synthetic oligonucleotide
guacgcugauacucaucau

SEQ ID NO: 145017 - RNA, 19 nt, Artificial Sequence
  Description of Artificial Sequence: Synthetic oligonucleotide
ccaauuaucacgggaguuu

SEQ ID NO: 145018 - RNA, 19 nt, Artificial Sequence
  Description of Artificial Sequence: Synthetic oligonucleotide
ccaaucguacugccauaga

SEQ ID NO: 145019 - RNA, 19 nt, Artificial Sequence
  Description of Artificial Sequence: Synthetic oligonucleotide
cuaguuggccagugcucau

SEQ ID NO: 145020 - RNA, 19 nt, Artificial Sequence
  Description of Artificial Sequence: Synthetic oligonucleotide
ggguaagacugauggcgau

SEQ ID NO: 145021 - RNA, 19 nt, Artificial Sequence
  Description of Artificial Sequence: Synthetic oligonucleotide
cgaccaaaagaacuuuccu

SEQ ID NO: 145022 - RNA, 19 nt, Artificial Sequence
  Description of Artificial Sequence: Synthetic oligonucleotide
ccaauucagugauauuguu

SEQ ID NO: 145023 - RNA, 19 nt, Artificial Sequence
  Description of Artificial Sequence: Synthetic oligonucleotide
ggacgagacuguaggagau

SEQ ID NO: 145024 - RNA, 19 nt, Artificial Sequence
  Description of Artificial Sequence: Synthetic oligonucleotide
gcgccggaacuggagauaa

SEQ ID NO: 145025 - RNA, 19 nt, Artificial Sequence
  Description of Artificial Sequence: Synthetic oligonucleotide
ggauggcgacgagacucuc

SEQ ID NO: 145026 - RNA, 19 nt, Artificial Sequence
  Description of Artificial Sequence: Synthetic oligonucleotide
ccccaauuaucacgggagu

SEQ ID NO: 145027 - RNA, 19 nt, Artificial Sequence
  Description of Artificial Sequence: Synthetic oligonucleotide
ccugagcgccggaacugga

SEQ ID NO: 145028 - RNA, 19 nt, Artificial Sequence
  Description of Artificial Sequence: Synthetic oligonucleotide
cccaauuaucacgggaguu

SEQ ID NO: 145029 - RNA, 19 nt, Artificial Sequence
  Description of Artificial Sequence: Synthetic oligonucleotide
cgccggaacuggagauaaa

SEQ ID NO: 145030 - RNA, 19 nt, Artificial Sequence
  Description of Artificial Sequence: Synthetic oligonucleotide
agauuuaucauguaguugc

SEQ ID NO: 145031 - RNA, 19 nt, Artificial Sequence
  Description of Artificial Sequence: Synthetic oligonucleotide
aguaaaaugaccuagauuu

SEQ ID NO: 145032 - RNA, 19 nt, Artificial Sequence
  Description of Artificial Sequence: Synthetic oligonucleotide
acuaucaucauguuagucc

SEQ ID NO: 145033 - RNA, 19 nt, Artificial Sequence
  Description of Artificial Sequence: Synthetic oligonucleotide
aauauagacuauuggcucc

SEQ ID NO: 145034 - RNA, 19 nt, Artificial Sequence
  Description of Artificial Sequence: Synthetic oligonucleotide
auaggauuuggcuaguucc

SEQ ID NO: 145035 - RNA, 19 nt, Artificial Sequence
  Description of Artificial Sequence: Synthetic oligonucleotide
auuaugcucaccuuuagcg

SEQ ID NO: 145036 - RNA, 19 nt, Artificial Sequence
  Description of Artificial Sequence: Synthetic oligonucleotide
acuaaagaccauuugacuc

SEQ ID NO: 145037 - RNA, 19 nt, Artificial Sequence
  Description of Artificial Sequence: Synthetic oligonucleotide
cagggauucacuaagauag

SEQ ID NO: 145038 - RNA, 19 nt, Artificial Sequence
  Description of Artificial Sequence: Synthetic oligonucleotide
aauugggacguuuaccugg

SEQ ID NO: 145039 - RNA, 19 nt, Artificial Sequence
  Description of Artificial Sequence: Synthetic oligonucleotide
uguagauuaauucucagua

SEQ ID NO: 145040 - RNA, 19 nt, Artificial Sequence
  Description of Artificial Sequence: Synthetic oligonucleotide
aaaaguuacuuaauuguac

SEQ ID NO: 145041 - RNA, 19 nt, Artificial Sequence
  Description of Artificial Sequence: Synthetic oligonucleotide
acuaagauagcccagauuu

SEQ ID NO: 145042 - RNA, 19 nt, Artificial Sequence
  Description of Artificial Sequence: Synthetic oligonucleotide
aaccaaaucacuguauugg

SEQ ID NO: 145043 - RNA, 19 nt, Artificial Sequence
  Description of Artificial Sequence: Synthetic oligonucleotide
uuuagggguaguaaaauga

SEQ ID NO: 145044 - RNA, 19 nt, Artificial Sequence
  Description of Artificial Sequence: Synthetic oligonucleotide
auuacaugcacaugccacc

SEQ ID NO: 145045 - RNA, 19 nt, Artificial Sequence
  Description of Artificial Sequence: Synthetic oligonucleotide
ugucgugucacucaaaagu

SEQ ID NO: 145046 - RNA, 19 nt, Artificial Sequence
  Description of Artificial Sequence: Synthetic oligonucleotide
uucuacacaggcaagauaa

SEQ ID NO: 145047 - RNA, 19 nt, Artificial Sequence
  Description of Artificial Sequence: Synthetic oligonucleotide
aguuacugugcauacuugc

SEQ ID NO: 145048 - RNA, 19 nt, Artificial Sequence
  Description of Artificial Sequence: Synthetic oligonucleotide
uauccauuguacaaacggg

SEQ ID NO: 145049 - RNA, 19 nt, Artificial Sequence
  Description of Artificial Sequence: Synthetic oligonucleotide
uuuauaguaccguauuuca

SEQ ID NO: 145050 - RNA, 19 nt, Artificial Sequence
  Description of Artificial Sequence: Synthetic oligonucleotide
uuugaacuacccuaggcag

SEQ ID NO: 145051 - RNA, 19 nt, Artificial Sequence
  Description of Artificial Sequence: Synthetic oligonucleotide
uaacuuauacaccauuuga

SEQ ID NO: 145052 - RNA, 19 nt, Artificial Sequence
  Description of Artificial Sequence: Synthetic oligonucleotide
gauagcagaaauucaauga

SEQ ID NO: 145053 - RNA, 19 nt, Artificial Sequence
  Description of Artificial Sequence: Synthetic oligonucleotide
ugugucauuaugcucaccu

SEQ ID NO: 145054 - RNA, 19 nt, Artificial Sequence
  Description of Artificial Sequence: Synthetic oligonucleotide
aaguuacuuaauuguacuc

SEQ ID NO: 145055 - RNA, 19 nt, Artificial Sequence
  Description of Artificial Sequence: Synthetic oligonucleotide
uccucaaucaauacuauuc

SEQ ID NO: 145056 - RNA, 19 nt, Artificial Sequence
  Description of Artificial Sequence: Synthetic oligonucleotide
aaaucacuguauuggguuc

SEQ ID NO: 145057 - RNA, 19 nt, Artificial Sequence
  Description of Artificial Sequence: Synthetic oligonucleotide
uaagaguaagauuaccgug

SEQ ID NO: 145058 - RNA, 19 nt, Artificial Sequence
  Description of Artificial Sequence: Synthetic oligonucleotide
uguccuuugaggcugggcc

SEQ ID NO: 145059 - RNA, 19 nt, Artificial Sequence
  Description of Artificial Sequence: Synthetic oligonucleotide
uacaaacgggcaauggugg

SEQ ID NO: 145060 - RNA, 19 nt, Artificial Sequence
  Description of Artificial Sequence: Synthetic oligonucleotide
aaauuaauguguugaugcu

SEQ ID NO: 145061 - RNA, 19 nt, Artificial Sequence
  Description of Artificial Sequence: Synthetic oligonucleotide
ugaguauauuaaaaguuac

SEQ ID NO: 145062 - RNA, 19 nt, Artificial Sequence
  Description of Artificial Sequence: Synthetic oligonucleotide
uuuaggcuuaccuaguacu

SEQ ID NO: 145063 - RNA, 19 nt, Artificial Sequence
  Description of Artificial Sequence: Synthetic oligonucleotide
uuucacagauaacuuauac

SEQ ID NO: 145064 - RNA, 19 nt, Artificial Sequence
  Description of Artificial Sequence: Synthetic oligonucleotide
auaacuuauacaccauuug

SEQ ID NO: 145065 - RNA, 19 nt, Artificial Sequence
  Description of Artificial Sequence: Synthetic oligonucleotide
uuuagcgccauagugaaga

SEQ ID NO: 145066 - RNA, 19 nt, Artificial Sequence
  Description of Artificial Sequence: Synthetic oligonucleotide
ugaccuagauuuaucaugu

SEQ ID NO: 145067 - RNA, 19 nt, Artificial Sequence
  Description of Artificial Sequence: Synthetic oligonucleotide
acaccuauacaauuuaaca

SEQ ID NO: 145068 - RNA, 19 nt, Artificial Sequence
  Description of Artificial Sequence: Synthetic oligonucleotide
aaugaacuaucacacagua

SEQ ID NO: 145069 - RNA, 19 nt, Artificial Sequence
  Description of Artificial Sequence: Synthetic oligonucleotide
ucauuagggaguuacugug

SEQ ID NO: 145070 - RNA, 19 nt, Artificial Sequence
  Description of Artificial Sequence: Synthetic oligonucleotide
aagccugauauacagcaug

SEQ ID NO: 145071 - RNA, 19 nt, Artificial Sequence
  Description of Artificial Sequence: Synthetic oligonucleotide
uaaugguagacacauuuaa

SEQ ID NO: 145072 - RNA, 19 nt, Artificial Sequence
  Description of Artificial Sequence: Synthetic oligonucleotide
aagaugacuguucacucca

SEQ ID NO: 145073 - RNA, 19 nt, Artificial Sequence
  Description of Artificial Sequence: Synthetic oligonucleotide
aaauuaugccagcaagugu

SEQ ID NO: 145074 - RNA, 19 nt, Artificial Sequence
  Description of Artificial Sequence: Synthetic oligonucleotide
aguaagauuaccgugccug

SEQ ID NO: 145075 - RNA, 19 nt, Artificial Sequence
  Description of Artificial Sequence: Synthetic oligonucleotide
uuuucaggauuccuaaaac

SEQ ID NO: 145076 - RNA, 19 nt, Artificial Sequence
  Description of Artificial Sequence: Synthetic oligonucleotide
uauuuuaggcgaucaguag

SEQ ID NO: 145077 - RNA, 19 nt, Artificial Sequence
  Description of Artificial Sequence: Synthetic oligonucleotide
ugaguaggcaagaauagau

SEQ ID NO: 145078 - RNA, 19 nt, Artificial Sequence
  Description of Artificial Sequence: Synthetic oligonucleotide
ugcaaagacuaaauauugc

SEQ ID NO: 145079 - RNA, 19 nt, Artificial Sequence
  Description of Artificial Sequence: Synthetic oligonucleotide
aguacuagcucacauugcu

SEQ ID NO: 145080 - RNA, 19 nt, Artificial Sequence
  Description of Artificial Sequence: Synthetic oligonucleotide
uagacuauuggcucccuag

SEQ ID NO: 145081 - RNA, 19 nt, Artificial Sequence
  Description of Artificial Sequence: Synthetic oligonucleotide
auuuuaggcgaucaguaga

SEQ ID NO: 145082 - RNA, 19 nt, Artificial Sequence
  Description of Artificial Sequence: Synthetic oligonucleotide
uuaggaaauuauuugcaaa

SEQ ID NO: 145083 - RNA, 19 nt, Artificial Sequence
  Description of Artificial Sequence: Synthetic oligonucleotide
aaauuauuuuaggcgauca

SEQ ID NO: 145084 - RNA, 19 nt, Artificial Sequence
  Description of Artificial Sequence: Synthetic oligonucleotide
uacaccuauacaauuuaac

SEQ ID NO: 145085 - RNA, 19 nt, Artificial Sequence
  Description of Artificial Sequence: Synthetic oligonucleotide
uuagggguaguaaaaugac

SEQ ID NO: 145086 - RNA, 19 nt, Artificial Sequence
  Description of Artificial Sequence: Synthetic oligonucleotide
auagcagaaauucaaugaa

SEQ ID NO: 145087 - RNA, 19 nt, Artificial Sequence
  Description of Artificial Sequence: Synthetic oligonucleotide
auccauuguacaaacgggc

SEQ ID NO: 145088 - RNA, 19 nt, Artificial Sequence
  Description of Artificial Sequence: Synthetic oligonucleotide
aaccacuuauuuauuggac

SEQ ID NO: 145089 - RNA, 19 nt, Artificial Sequence
  Description of Artificial Sequence: Synthetic oligonucleotide
aagcuguccauaaugguag

SEQ ID NO: 145090 - RNA, 19 nt, Artificial Sequence
  Description of Artificial Sequence: Synthetic oligonucleotide
aggucauuuaaagagagga

SEQ ID NO: 145091 - RNA, 19 nt, Artificial Sequence
  Description of Artificial Sequence: Synthetic oligonucleotide
gggguuaggauuaagacag

SEQ ID NO: 145092 - RNA, 19 nt, Artificial Sequence
  Description of Artificial Sequence: Synthetic oligonucleotide
aggcuuaccuaguacuagc

SEQ ID NO: 145093 - RNA, 19 nt, Artificial Sequence
  Description of Artificial Sequence: Synthetic oligonucleotide
uuaugcucaccuuuagcgc

SEQ ID NO: 145094 - RNA, 19 nt, Artificial Sequence
  Description of Artificial Sequence: Synthetic oligonucleotide
guaguagucaaggagaaca

SEQ ID NO: 145095 - RNA, 19 nt, Artificial Sequence
  Description of Artificial Sequence: Synthetic oligonucleotide
uuuuaggcgaucaguagau

SEQ ID NO: 145096 - RNA, 19 nt, Artificial Sequence
  Description of Artificial Sequence: Synthetic oligonucleotide
auuaauguguugaugcuug

SEQ ID NO: 145097 - RNA, 19 nt, Artificial Sequence
  Description of Artificial Sequence: Synthetic oligonucleotide
gauuacaugcacaugccac

SEQ ID NO: 145098 - RNA, 19 nt, Artificial Sequence
  Description of Artificial Sequence: Synthetic oligonucleotide
aguuacuuaauuguacucu

SEQ ID NO: 145099 - RNA, 19 nt, Artificial Sequence
  Description of Artificial Sequence: Synthetic oligonucleotide
caaaguaauguugagcuuc

SEQ ID NO: 145100 - RNA, 19 nt, Artificial Sequence
  Description of Artificial Sequence: Synthetic oligonucleotide
cauguuaguccuuggauuc

SEQ ID NO: 145101 - RNA, 19 nt, Artificial Sequence
  Description of Artificial Sequence: Synthetic oligonucleotide
cuuaccuaguacuagcuca

SEQ ID NO: 145102 - RNA, 19 nt, Artificial Sequence
  Description of Artificial Sequence: Synthetic oligonucleotide
uacuagcucacauugcugu

SEQ ID NO: 145103 - RNA, 19 nt, Artificial Sequence
  Description of Artificial Sequence: Synthetic oligonucleotide
aaaccagguauaguggcag

SEQ ID NO: 145104 - RNA, 19 nt, Artificial Sequence
  Description of Artificial Sequence: Synthetic oligonucleotide
auaggaaaccauauuuagg

SEQ ID NO: 145105 - RNA, 19 nt, Artificial Sequence
  Description of Artificial Sequence: Synthetic oligonucleotide
ugccauuucgauuucacua

SEQ ID NO: 145106 - RNA, 19 nt, Artificial Sequence
  Description of Artificial Sequence: Synthetic oligonucleotide
uccauuguacaaacgggca

SEQ ID NO: 145107 - RNA, 19 nt, Artificial Sequence
  Description of Artificial Sequence: Synthetic oligonucleotide
uaguagucaaggagaacag

SEQ ID NO: 145108 - RNA, 19 nt, Artificial Sequence
  Description of Artificial Sequence: Synthetic oligonucleotide
aaauugggacguuuaccug

SEQ ID NO: 145109 - RNA, 19 nt, Artificial Sequence
  Description of Artificial Sequence: Synthetic oligonucleotide
uaggaguaucuguauauca

SEQ ID NO: 145110 - RNA, 19 nt, Artificial Sequence
  Description of Artificial Sequence: Synthetic oligonucleotide
aaaucugcaguuauucccu

SEQ ID NO: 145111 - RNA, 19 nt, Artificial Sequence
  Description of Artificial Sequence: Synthetic oligonucleotide
uguuacaaugcacccaaau

SEQ ID NO: 145112 - RNA, 19 nt, Artificial Sequence
  Description of Artificial Sequence: Synthetic oligonucleotide
cuuuauaguaccguauuuc

SEQ ID NO: 145113 - RNA, 19 nt, Artificial Sequence
  Description of Artificial Sequence: Synthetic oligonucleotide
uuuagcuuuauaguaccgu

SEQ ID NO: 145114 - RNA, 19 nt, Artificial Sequence
  Description of Artificial Sequence: Synthetic oligonucleotide
guaccguauuucaagauag

SEQ ID NO: 145115 - RNA, 19 nt, Artificial Sequence
  Description of Artificial Sequence: Synthetic oligonucleotide
uuagcuuuauaguaccgua

SEQ ID NO: 145116 - RNA, 19 nt, Artificial Sequence
  Description of Artificial Sequence: Synthetic oligonucleotide
uucuuuagggguaguaaaa

SEQ ID NO: 145117 - RNA, 19 nt, Artificial Sequence
  Description of Artificial Sequence: Synthetic oligonucleotide
cuuaggaagcaaucauuag

SEQ ID NO: 145118 - RNA, 19 nt, Artificial Sequence
  Description of Artificial Sequence: Synthetic oligonucleotide
auaguaccguauuucaaga

SEQ ID NO: 145119 - RNA, 19 nt, Artificial Sequence
  Description of Artificial Sequence: Synthetic oligonucleotide
uuaccuaguacuagcucac

SEQ ID NO: 145120 - RNA, 19 nt, Artificial Sequence
  Description of Artificial Sequence: Synthetic oligonucleotide
accauuugacucuugugcu

SEQ ID NO: 145121 - RNA, 19 nt, Artificial Sequence
  Description of Artificial Sequence: Synthetic oligonucleotide
ggcaaguacccauaaaagc

SEQ ID NO: 145122 - RNA, 19 nt, Artificial Sequence
  Description of Artificial Sequence: Synthetic oligonucleotide
uaguaaaaugaccuagauu

SEQ ID NO: 145123 - RNA, 19 nt, Artificial Sequence
  Description of Artificial Sequence: Synthetic oligonucleotide
gauuaagacagggauucac

SEQ ID NO: 145124 - RNA, 19 nt, Artificial Sequence
  Description of Artificial Sequence: Synthetic oligonucleotide
aucagguuaugugaaaucu

SEQ ID NO: 145125 - RNA, 19 nt, Artificial Sequence
  Description of Artificial Sequence: Synthetic oligonucleotide
agggaguuacugugcauac

SEQ ID NO: 145126 - RNA, 19 nt, Artificial Sequence
  Description of Artificial Sequence: Synthetic oligonucleotide
gagcuaugagcucauagga

SEQ ID NO: 145127 - RNA, 19 nt, Artificial Sequence
  Description of Artificial Sequence: Synthetic oligonucleotide
uauuggcucccuaggaugu

SEQ ID NO: 145128 - RNA, 19 nt, Artificial Sequence
  Description of Artificial Sequence: Synthetic oligonucleotide
agggguaguaaaaugaccu

SEQ ID NO: 145129 - RNA, 19 nt, Artificial Sequence
  Description of Artificial Sequence: Synthetic oligonucleotide
guaugagucacaucuggca

SEQ ID NO: 145130 - RNA, 19 nt, Artificial Sequence
  Description of Artificial Sequence: Synthetic oligonucleotide
uuugccccaaacuugugau

SEQ ID NO: 145131 - RNA, 19 nt, Artificial Sequence
  Description of Artificial Sequence: Synthetic oligonucleotide
cauuagggaguuacugugc

SEQ ID NO: 145132 - RNA, 19 nt, Artificial Sequence
  Description of Artificial Sequence: Synthetic oligonucleotide
caauacuauucuacacagg

SEQ ID NO: 145133 - RNA, 19 nt, Artificial Sequence
  Description of Artificial Sequence: Synthetic oligonucleotide
guaugcaugcuuaggaagc

SEQ ID NO: 145134 - RNA, 19 nt, Artificial Sequence
  Description of Artificial Sequence: Synthetic oligonucleotide
cauuaugcucaccuuuagc

SEQ ID NO: 145135 - RNA, 19 nt, Artificial Sequence
  Description of Artificial Sequence: Synthetic oligonucleotide
aacauucaaugcuguguca

SEQ ID NO: 145136 - RNA, 19 nt, Artificial Sequence
  Description of Artificial Sequence: Synthetic oligonucleotide
auggguuuauugguguuac

SEQ ID NO: 145137 - RNA, 19 nt, Artificial Sequence
  Description of Artificial Sequence: Synthetic oligonucleotide
guacaaacgggcaauggug

SEQ ID NO: 145138 - RNA, 19 nt, Artificial Sequence
  Description of Artificial Sequence: Synthetic oligonucleotide
aguaccguauuucaagaua

SEQ ID NO: 145139 - RNA, 19 nt, Artificial Sequence
  Description of Artificial Sequence: Synthetic oligonucleotide
ugggacguuuaccuggucu

SEQ ID NO: 145140 - RNA, 19 nt, Artificial Sequence
  Description of Artificial Sequence: Synthetic oligonucleotide
aauuggcaaguacccauaa

SEQ ID NO: 145141 - RNA, 19 nt, Artificial Sequence
  Description of Artificial Sequence: Synthetic oligonucleotide
gaucagguuaugugaaauc

SEQ ID NO: 145142 - RNA, 19 nt, Artificial Sequence
  Description of Artificial Sequence: Synthetic oligonucleotide
ugaggcuagaucagguuau

SEQ ID NO: 145143 - RNA, 19 nt, Artificial Sequence
  Description of Artificial Sequence: Synthetic oligonucleotide
uuaggcuuaccuaguacua

SEQ ID NO: 145144 - RNA, 19 nt, Artificial Sequence
  Description of Artificial Sequence: Synthetic oligonucleotide
caccuauacaauuuaacaa

SEQ ID NO: 145145 - RNA, 19 nt, Artificial Sequence
  Description of Artificial Sequence: Synthetic oligonucleotide
auauauguuaugauagaau

SEQ ID NO: 145146 - RNA, 19 nt, Artificial Sequence
  Description of Artificial Sequence: Synthetic oligonucleotide
uugaacuacccuaggcagu

SEQ ID NO: 145147 - RNA, 19 nt, Artificial Sequence
  Description of Artificial Sequence: Synthetic oligonucleotide
cuaagauagcccagauuug

SEQ ID NO: 145148 - RNA, 19 nt, Artificial Sequence
  Description of Artificial Sequence: Synthetic oligonucleotide
ugauagaauuucugacaca

SEQ ID NO: 145149 - RNA, 19 nt, Artificial Sequence
  Description of Artificial Sequence: Synthetic oligonucleotide
aaugcacccaaaucuuauu

SEQ ID NO: 145150 - RNA, 19 nt, Artificial Sequence
  Description of Artificial Sequence: Synthetic oligonucleotide
acguuuaccuggucugagg

SEQ ID NO: 145151 - RNA, 19 nt, Artificial Sequence
  Description of Artificial Sequence: Synthetic oligonucleotide
gcuagaucagguuauguga

SEQ ID NO: 145152 - RNA, 19 nt, Artificial Sequence
  Description of Artificial Sequence: Synthetic oligonucleotide
uagcuuuauaguaccguau

SEQ ID NO: 145153 - RNA, 19 nt, Artificial Sequence
  Description of Artificial Sequence: Synthetic oligonucleotide
guuuccuaucaaaaucugc

SEQ ID NO: 145154 - RNA, 19 nt, Artificial Sequence
  Description of Artificial Sequence: Synthetic oligonucleotide
agcuuuauaguaccguauu

SEQ ID NO: 145155 - RNA, 19 nt, Artificial Sequence
  Description of Artificial Sequence: Synthetic oligonucleotide
auuuagcuuuauaguaccg

SEQ ID NO: 145156 - RNA, 19 nt, Artificial Sequence
  Description of Artificial Sequence: Synthetic oligonucleotide
caccuuuagcgccauagug

SEQ ID NO: 145157 - RNA, 19 nt, Artificial Sequence
  Description of Artificial Sequence: Synthetic oligonucleotide
aacuugugauccugcuuca

SEQ ID NO: 145158 - RNA, 19 nt, Artificial Sequence
  Description of Artificial Sequence: Synthetic oligonucleotide
uaccguauuucaagauagc

SEQ ID NO: 145159 - RNA, 19 nt, Artificial Sequence
  Description of Artificial Sequence: Synthetic oligonucleotide
acuaaauauugcauuaauu

SEQ ID NO: 145160 - RNA, 19 nt, Artificial Sequence
  Description of Artificial Sequence: Synthetic oligonucleotide
ucagguuaugugaaaucuu

SEQ ID NO: 145161 - RNA, 19 nt, Artificial Sequence
  Description of Artificial Sequence: Synthetic oligonucleotide
cuaagaguaagauuaccgu

SEQ ID NO: 145162 - RNA, 19 nt, Artificial Sequence
  Description of Artificial Sequence: Synthetic oligonucleotide
agcuacuccaauuuuccua

SEQ ID NO: 145163 - RNA, 19 nt, Artificial Sequence
  Description of Artificial Sequence: Synthetic oligonucleotide
uuucaacuagucuuacauu

SEQ ID NO: 145164 - RNA, 19 nt, Artificial Sequence
  Description of Artificial Sequence: Synthetic oligonucleotide
acagggauucacuaagaua

SEQ ID NO: 145165 - RNA, 19 nt, Artificial Sequence
  Description of Artificial Sequence: Synthetic oligonucleotide
uuaguccuuggauucacuu

SEQ ID NO: 145166 - RNA, 19 nt, Artificial Sequence
  Description of Artificial Sequence: Synthetic oligonucleotide
aacuacccuaggcaguaau

SEQ ID NO: 145167 - RNA, 19 nt, Artificial Sequence
  Description of Artificial Sequence: Synthetic oligonucleotide
gguuaggauuaagacaggg

SEQ ID NO: 145168 - RNA, 19 nt, Artificial Sequence
  Description of Artificial Sequence: Synthetic oligonucleotide
uuacuuaauuguacucuuu

SEQ ID NO: 145169 - RNA, 19 nt, Artificial Sequence
  Description of Artificial Sequence: Synthetic oligonucleotide
accguauuucaagauagca

SEQ ID NO: 145170 - RNA, 19 nt, Artificial Sequence
  Description of Artificial Sequence: Synthetic oligonucleotide
aguaguagucaaggagaac

SEQ ID NO: 145171 - RNA, 19 nt, Artificial Sequence
  Description of Artificial Sequence: Synthetic oligonucleotide
cagguauaguggcagcacc

SEQ ID NO: 145172 - RNA, 19 nt, Artificial Sequence
  Description of Artificial Sequence: Synthetic oligonucleotide
ccguauuucaagauagcag

SEQ ID NO: 145173 - RNA, 19 nt, Artificial Sequence
  Description of Artificial Sequence: Synthetic oligonucleotide
ucaccuuuagcgccauagu

SEQ ID NO: 145174 - RNA, 19 nt, Artificial Sequence
  Description of Artificial Sequence: Synthetic oligonucleotide
augaacuaucacacaguac

SEQ ID NO: 145175 - RNA, 19 nt, Artificial Sequence
  Description of Artificial Sequence: Synthetic oligonucleotide
uuaugccagcaaguguagg

SEQ ID NO: 145176 - RNA, 19 nt, Artificial Sequence
  Description of Artificial Sequence: Synthetic oligonucleotide
aucagaggugacuacuaaa

SEQ ID NO: 145177 - RNA, 19 nt, Artificial Sequence
  Description of Artificial Sequence: Synthetic oligonucleotide
accuuuagcgccauaguga

SEQ ID NO: 145178 - RNA, 19 nt, Artificial Sequence
  Description of Artificial Sequence: Synthetic oligonucleotide
gcaaucauuagggaguuac

SEQ ID NO: 145179 - RNA, 19 nt, Artificial Sequence
  Description of Artificial Sequence: Synthetic oligonucleotide
caaagacucauuucacaga

SEQ ID NO: 145180 - RNA, 19 nt, Artificial Sequence
  Description of Artificial Sequence: Synthetic oligonucleotide
ggguaguaaaaugaccuag

SEQ ID NO: 145181 - RNA, 19 nt, Artificial Sequence
  Description of Artificial Sequence: Synthetic oligonucleotide
auaaauuauuuuaggcgau

SEQ ID NO: 145182 - RNA, 19 nt, Artificial Sequence
  Description of Artificial Sequence: Synthetic oligonucleotide
gaaguuggucuaauaagaa

SEQ ID NO: 145183 - RNA, 19 nt, Artificial Sequence
  Description of Artificial Sequence: Synthetic oligonucleotide
cauuucgauuucacuauca

SEQ ID NO: 145184 - RNA, 19 nt, Artificial Sequence
  Description of Artificial Sequence: Synthetic oligonucleotide
auauguuaugauagaauuu

SEQ ID NO: 145185 - RNA, 19 nt, Artificial Sequence
  Description of Artificial Sequence: Synthetic oligonucleotide
auuguacaaacgggcaaug

SEQ ID NO: 145186 - RNA, 19 nt, Artificial Sequence
  Description of Artificial Sequence: Synthetic oligonucleotide
augcacccaaaucuuauuu

SEQ ID NO: 145187 - RNA, 19 nt, Artificial Sequence
  Description of Artificial Sequence: Synthetic oligonucleotide
agggauucacuaagauagc

SEQ ID NO: 145188 - RNA, 19 nt, Artificial Sequence
  Description of Artificial Sequence: Synthetic oligonucleotide
augccagcaaguguaggag

SEQ ID NO: 145189 - RNA, 19 nt, Artificial Sequence
  Description of Artificial Sequence: Synthetic oligonucleotide
gcgaucaguagauuucaag

SEQ ID NO: 145190 - RNA, 19 nt, Artificial Sequence
  Description of Artificial Sequence: Synthetic oligonucleotide
guaagauuaccgugccuga

SEQ ID NO: 145191 - RNA, 19 nt, Artificial Sequence
  Description of Artificial Sequence: Synthetic oligonucleotide
uacccuaggcaguaaugaa

SEQ ID NO: 145192 - RNA, 19 nt, Artificial Sequence
  Description of Artificial Sequence: Synthetic oligonucleotide
gacguuuaccuggucugag

SEQ ID NO: 145193 - RNA, 19 nt, Artificial Sequence
  Description of Artificial Sequence: Synthetic oligonucleotide
uaguaccguauuucaagau

SEQ ID NO: 145194 - RNA, 19 nt, Artificial Sequence
  Description of Artificial Sequence: Synthetic oligonucleotide
acaaaguaauguugagcuu

SEQ ID NO: 145195 - RNA, 19 nt, Artificial Sequence
  Description of Artificial Sequence: Synthetic oligonucleotide
cugucgugucacucaaaag

SEQ ID NO: 145196 - RNA, 19 nt, Artificial Sequence
  Description of Artificial Sequence: Synthetic oligonucleotide
auuaugccagcaaguguag

SEQ ID NO: 145197 - RNA, 19 nt, Artificial Sequence
  Description of Artificial Sequence: Synthetic oligonucleotide
accuaguacuagcucacau

SEQ ID NO: 145198 - RNA, 19 nt, Artificial Sequence
  Description of Artificial Sequence: Synthetic oligonucleotide
aaauuggcaaguacccaua

SEQ ID NO: 145199 - RNA, 19 nt, Artificial Sequence
  Description of Artificial Sequence: Synthetic oligonucleotide
acaaacgggcaaugguggu

SEQ ID NO: 145200 - RNA, 19 nt, Artificial Sequence
  Description of Artificial Sequence: Synthetic oligonucleotide
gggacguuuaccuggucug

SEQ ID NO: 145201 - RNA, 19 nt, Artificial Sequence
  Description of Artificial Sequence: Synthetic oligonucleotide
cuacuuucaacuagucuua

SEQ ID NO: 145202 - RNA, 19 nt, Artificial Sequence
  Description of Artificial Sequence: Synthetic oligonucleotide
ucacuguauuggguucugg

SEQ ID NO: 145203 - RNA, 19 nt, Artificial Sequence
  Description of Artificial Sequence: Synthetic oligonucleotide
uaagauuaccgugccugaa

SEQ ID NO: 145204 - RNA, 19 nt, Artificial Sequence
  Description of Artificial Sequence: Synthetic oligonucleotide
auucacuaagauagcccag

SEQ ID NO: 145205 - RNA, 19 nt, Artificial Sequence
  Description of Artificial Sequence: Synthetic oligonucleotide
ggcucaauccccaggaccc

SEQ ID NO: 145206 - RNA, 19 nt, Artificial Sequence
  Description of Artificial Sequence: Synthetic oligonucleotide
cugagguauacaagcuguc

SEQ ID NO: 145207 - RNA, 19 nt, Artificial Sequence
  Description of Artificial Sequence: Synthetic oligonucleotide
cuacccuaggcaguaauga

SEQ ID NO: 145208 - RNA, 19 nt, Artificial Sequence
  Description of Artificial Sequence: Synthetic oligonucleotide
guuacuuaauuguacucuu

SEQ ID NO: 145209 - RNA, 19 nt, Artificial Sequence
  Description of Artificial Sequence: Synthetic oligonucleotide
acuacccuaggcaguaaug

SEQ ID NO: 145210 - RNA, 19 nt, Artificial Sequence
  Description of Artificial Sequence: Synthetic oligonucleotide
gggauucacuaagauagcc

SEQ ID NO: 145211 - RNA, 19 nt, Artificial Sequence
  Description of Artificial Sequence: Synthetic oligonucleotide
acuguucacuccacauagg

SEQ ID NO: 145212 - RNA, 19 nt, Artificial Sequence
  Description of Artificial Sequence: Synthetic oligonucleotide
cuuuagcgccauagugaag

SEQ ID NO: 145213 - RNA, 19 nt, Artificial Sequence
  Description of Artificial Sequence: Synthetic oligonucleotide
gguaugagucacaucuggc

SEQ ID NO: 145214 - RNA, 19 nt, Artificial Sequence
  Description of Artificial Sequence: Synthetic oligonucleotide
cgaucaguagauuucaaga

SEQ ID NO: 145215 - RNA, 19 nt, Artificial Sequence
  Description of Artificial Sequence: Synthetic oligonucleotide
caaacgggcaaugguggug

SEQ ID NO: 145216 - RNA, 19 nt, Artificial Sequence
  Description of Artificial Sequence: Synthetic oligonucleotide
guacuagcucacauugcug

SEQ ID NO: 145217 - RNA, 19 nt, Artificial Sequence
  Description of Artificial Sequence: Synthetic oligonucleotide
agguuaugugaaaucuugu

SEQ ID NO: 145218 - RNA, 19 nt, Artificial Sequence
  Description of Artificial Sequence: Synthetic oligonucleotide
caaguguaggaguaucugu

SEQ ID NO: 145219 - RNA, 19 nt, Artificial Sequence
  Description of Artificial Sequence: Synthetic oligonucleotide
guacgaaacuucaaagacu

SEQ ID NO: 145220 - RNA, 19 nt, Artificial Sequence
  Description of Artificial Sequence: Synthetic oligonucleotide
guuggucuaauaagaacua

SEQ ID NO: 145221 - RNA, 19 nt, Artificial Sequence
  Description of Artificial Sequence: Synthetic oligonucleotide
aggugacuacuaaagaaua

SEQ ID NO: 145222 - RNA, 19 nt, Artificial Sequence
  Description of Artificial Sequence: Synthetic oligonucleotide
gucauuaugcucaccuuua

SEQ ID NO: 145223 - RNA, 19 nt, Artificial Sequence
  Description of Artificial Sequence: Synthetic oligonucleotide
ggcaacucuacccuuuaaa

SEQ ID NO: 145224 - RNA, 19 nt, Artificial Sequence
  Description of Artificial Sequence: Synthetic oligonucleotide
gaggcuagaucagguuaug

SEQ ID NO: 145225 - RNA, 19 nt, Artificial Sequence
  Description of Artificial Sequence: Synthetic oligonucleotide
agcuaugagcucauaggau

SEQ ID NO: 145226 - RNA, 19 nt, Artificial Sequence
  Description of Artificial Sequence: Synthetic oligonucleotide
caacuagucuuacauuaua

SEQ ID NO: 145227 - RNA, 19 nt, Artificial Sequence
  Description of Artificial Sequence: Synthetic oligonucleotide
auugggacguuuaccuggu

SEQ ID NO: 145228 - RNA, 19 nt, Artificial Sequence
  Description of Artificial Sequence: Synthetic oligonucleotide
ggcugaguaggcaagaaua

SEQ ID NO: 145229 - RNA, 19 nt, Artificial Sequence
  Description of Artificial Sequence: Synthetic oligonucleotide
uauagacuauuggcucccu

SEQ ID NO: 145230 - RNA, 19 nt, Artificial Sequence
  Description of Artificial Sequence: Synthetic oligonucleotide
augccaaggggcugggaua

SEQ ID NO: 145231 - RNA, 19 nt, Artificial Sequence
  Description of Artificial Sequence: Synthetic oligonucleotide
ugcaugccauuucgauuuc

SEQ ID NO: 145232 - RNA, 19 nt, Artificial Sequence
  Description of Artificial Sequence: Synthetic oligonucleotide
cacuguuacaaugcaccca

SEQ ID NO: 145233 - RNA, 19 nt, Artificial Sequence
  Description of Artificial Sequence: Synthetic oligonucleotide
cagcaaguguaggaguauc

SEQ ID NO: 145234 - RNA, 19 nt, Artificial Sequence
  Description of Artificial Sequence: Synthetic oligonucleotide
gcuaugagcucauaggauu

SEQ ID NO: 145235 - RNA, 19 nt, Artificial Sequence
  Description of Artificial Sequence: Synthetic oligonucleotide
gcuuaccuaguacuagcuc

SEQ ID NO: 145236 - RNA, 19 nt, Artificial Sequence
  Description of Artificial Sequence: Synthetic oligonucleotide
cagcaccuauaauccuagc

SEQ ID NO: 145237 - RNA, 19 nt, Artificial Sequence
  Description of Artificial Sequence: Synthetic oligonucleotide
caaugcacccaaaucuuau

SEQ ID NO: 145238 - RNA, 19 nt, Artificial Sequence
  Description of Artificial Sequence: Synthetic oligonucleotide
ccuuuagcgccauagugaa

SEQ ID NO: 145239 - RNA, 19 nt, Artificial Sequence
  Description of Artificial Sequence: Synthetic oligonucleotide
cuaguucccugguuaugaa

SEQ ID NO: 145240 - RNA, 19 nt, Artificial Sequence
  Description of Artificial Sequence: Synthetic oligonucleotide
gcucccuaggauguaggug

SEQ ID NO: 145241 - RNA, 19 nt, Artificial Sequence
  Description of Artificial Sequence: Synthetic oligonucleotide
ucacucuuuaggggagcua

SEQ ID NO: 145242 - RNA, 19 nt, Artificial Sequence
  Description of Artificial Sequence: Synthetic oligonucleotide
ccaaggggcugggauauag

SEQ ID NO: 145243 - RNA, 19 nt, Artificial Sequence
  Description of Artificial Sequence: Synthetic oligonucleotide
ccucaaucaauacuauucu

SEQ ID NO: 145244 - RNA, 19 nt, Artificial Sequence
  Description of Artificial Sequence: Synthetic oligonucleotide
acgaaacuucaaagacuca

SEQ ID NO: 145245 - RNA, 19 nt, Artificial Sequence
  Description of Artificial Sequence: Synthetic oligonucleotide
uugggacguuuaccugguc

SEQ ID NO: 145246 - RNA, 19 nt, Artificial Sequence
  Description of Artificial Sequence: Synthetic oligonucleotide
uagcgccauagugaagaua

SEQ ID NO: 145247 - RNA, 19 nt, Artificial Sequence
  Description of Artificial Sequence: Synthetic oligonucleotide
ggguuaggauuaagacagg

SEQ ID NO: 145248 - RNA, 19 nt, Artificial Sequence
  Description of Artificial Sequence: Synthetic oligonucleotide
ccauuguacaaacgggcaa

SEQ ID NO: 145249 - RNA, 19 nt, Artificial Sequence
  Description of Artificial Sequence: Synthetic oligonucleotide
gguauaguggcagcaccua

SEQ ID NO: 145250 - RNA, 19 nt, Artificial Sequence
  Description of Artificial Sequence: Synthetic oligonucleotide
gauguaggugggacacacu

SEQ ID NO: 145251 - RNA, 19 nt, Artificial Sequence
  Description of Artificial Sequence: Synthetic oligonucleotide
uagugagguugaggcuaga

SEQ ID NO: 145252 - RNA, 19 nt, Artificial Sequence
  Description of Artificial Sequence: Synthetic oligonucleotide
ggacguuuaccuggucuga

SEQ ID NO: 145253 - RNA, 19 nt, Artificial Sequence
  Description of Artificial Sequence: Synthetic oligonucleotide
auuggcucccuaggaugua

SEQ ID NO: 145254 - RNA, 19 nt, Artificial Sequence
  Description of Artificial Sequence: Synthetic oligonucleotide
cuguuacaaugcacccaaa

SEQ ID NO: 145255 - RNA, 19 nt, Artificial Sequence
  Description of Artificial Sequence: Synthetic oligonucleotide
guuaguccuuggauucacu

SEQ ID NO: 145256 - RNA, 19 nt, Artificial Sequence
  Description of Artificial Sequence: Synthetic oligonucleotide
cucuacccuuuaaaagaau

SEQ ID NO: 145257 - RNA, 19 nt, Artificial Sequence
  Description of Artificial Sequence: Synthetic oligonucleotide
gaacuacccuaggcaguaa

SEQ ID NO: 145258 - RNA, 19 nt, Artificial Sequence
  Description of Artificial Sequence: Synthetic oligonucleotide
ccuaguacuagcucacauu

SEQ ID NO: 145259 - RNA, 19 nt, Artificial Sequence
  Description of Artificial Sequence: Synthetic oligonucleotide
ggcuuaccuaguacuagcu

SEQ ID NO: 145260 - RNA, 19 nt, Artificial Sequence
  Description of Artificial Sequence: Synthetic oligonucleotide
gguucucaagaugacuguu

SEQ ID NO: 145261 - RNA, 19 nt, Artificial Sequence
  Description of Artificial Sequence: Synthetic oligonucleotide
cguuuaccuggucugaggu

SEQ ID NO: 145262 - RNA, 19 nt, Artificial Sequence
  Description of Artificial Sequence: Synthetic oligonucleotide
cgccauagugaagauagaa

SEQ ID NO: 145263 - RNA, 19 nt, Artificial Sequence
  Description of Artificial Sequence: Synthetic oligonucleotide
gccugauauacagcaugcu

SEQ ID NO: 145264 - RNA, 19 nt, Artificial Sequence
  Description of Artificial Sequence: Synthetic oligonucleotide
cccugguuaugaagagugu

SEQ ID NO: 145265 - RNA, 19 nt, Artificial Sequence
  Description of Artificial Sequence: Synthetic oligonucleotide
gcgccauagugaagauaga

SEQ ID NO: 145266 - RNA, 19 nt, Artificial Sequence
  Description of Artificial Sequence: Synthetic oligonucleotide
gccaaggggcugggauaua

SEQ ID NO: 145267 - RNA, 19 nt, Artificial Sequence
  Description of Artificial Sequence: Synthetic oligonucleotide
aauaacuuaagguacuggc

SEQ ID NO: 145268 - RNA, 19 nt, Artificial Sequence
  Description of Artificial Sequence: Synthetic oligonucleotide
aacaaucuuaauuauacgg

SEQ ID NO: 145269 - RNA, 19 nt, Artificial Sequence
  Description of Artificial Sequence: Synthetic oligonucleotide
aaaagcaugaaaucugggc

SEQ ID NO: 145270 - RNA, 19 nt, Artificial Sequence
  Description of Artificial Sequence: Synthetic oligonucleotide
aguauauugacguaauuac

SEQ ID NO: 145271 - RNA, 19 nt, Artificial Sequence
  Description of Artificial Sequence: Synthetic oligonucleotide
auaauugaauaauugucgc

SEQ ID NO: 145272 - RNA, 19 nt, Artificial Sequence
  Description of Artificial Sequence: Synthetic oligonucleotide
uaugcuuaagagaagcugg

SEQ ID NO: 145273 - RNA, 19 nt, Artificial Sequence
  Description of Artificial Sequence: Synthetic oligonucleotide
caagauacuauacaaauag

SEQ ID NO: 145274 - RNA, 19 nt, Artificial Sequence
  Description of Artificial Sequence: Synthetic oligonucleotide
aguuccgauaaccuuaugc

SEQ ID NO: 145275 - RNA, 19 nt, Artificial Sequence
  Description of Artificial Sequence: Synthetic oligonucleotide
aaagauaucugggauacuc

SEQ ID NO: 145276 - RNA, 19 nt, Artificial Sequence
  Description of Artificial Sequence: Synthetic oligonucleotide
uauagcaaaacaaugccgu

SEQ ID NO: 145277 - RNA, 19 nt, Artificial Sequence
  Description of Artificial Sequence: Synthetic oligonucleotide
uucuggaucagccauauac

SEQ ID NO: 145278 - RNA, 19 nt, Artificial Sequence
  Description of Artificial Sequence: Synthetic oligonucleotide
agaaagaggcauuagauga

SEQ ID NO: 145279 - RNA, 19 nt, Artificial Sequence
  Description of Artificial Sequence: Synthetic oligonucleotide
uuugagugauccaauagcc

SEQ ID NO: 145280 - RNA, 19 nt, Artificial Sequence
  Description of Artificial Sequence: Synthetic oligonucleotide
uauauugacguaauuacuc

SEQ ID NO: 145281 - RNA, 19 nt, Artificial Sequence
  Description of Artificial Sequence: Synthetic oligonucleotide
aauacacugggccauagga

SEQ ID NO: 145282 - RNA, 19 nt, Artificial Sequence
  Description of Artificial Sequence: Synthetic oligonucleotide
aauugaauaauugucgcca

SEQ ID NO: 145283 - RNA, 19 nt, Artificial Sequence
  Description of Artificial Sequence: Synthetic oligonucleotide
uuaucuugagaaaagcaug

SEQ ID NO: 145284 - RNA, 19 nt, Artificial Sequence
  Description of Artificial Sequence: Synthetic oligonucleotide
acuuugaggguucaaacgg

SEQ ID NO: 145285 - RNA, 19 nt, Artificial Sequence
  Description of Artificial Sequence: Synthetic oligonucleotide
uuaauguaugacuucuccg

SEQ ID NO: 145286 - RNA, 19 nt, Artificial Sequence
  Description of Artificial Sequence: Synthetic oligonucleotide
ugaagugugaggucggugg

SEQ ID NO: 145287 - RNA, 19 nt, Artificial Sequence
  Description of Artificial Sequence: Synthetic oligonucleotide
uaauguaugacuucuccgc

SEQ ID NO: 145288 - RNA, 19 nt, Artificial Sequence
  Description of Artificial Sequence: Synthetic oligonucleotide
uguauagagaacagaagca

SEQ ID NO: 145289 - RNA, 19 nt, Artificial Sequence
  Description of Artificial Sequence: Synthetic oligonucleotide
uuuauaucaagugaguagu

SEQ ID NO: 145290 - RNA, 19 nt, Artificial Sequence
  Description of Artificial Sequence: Synthetic oligonucleotide
ucaagugaguaguagaucu

SEQ ID NO: 145291 - RNA, 19 nt, Artificial Sequence
  Description of Artificial Sequence: Synthetic oligonucleotide
ucaacaauaaggugagugc

SEQ ID NO: 145292 - RNA, 19 nt, Artificial Sequence
  Description of Artificial Sequence: Synthetic oligonucleotide
uuuaaugacaugaccacaa

SEQ ID NO: 145293 - RNA, 19 nt, Artificial Sequence
  Description of Artificial Sequence: Synthetic oligonucleotide
ucuaaaaguuccgauaacc

SEQ ID NO: 145294 - RNA, 19 nt, Artificial Sequence
  Description of Artificial Sequence: Synthetic oligonucleotide
aauuauacggguaauacuu

SEQ ID NO: 145295 - RNA, 19 nt, Artificial Sequence
  Description of Artificial Sequence: Synthetic oligonucleotide
aaucuuauauuuaaugaca

SEQ ID NO: 145296 - RNA, 19 nt, Artificial Sequence
  Description of Artificial Sequence: Synthetic oligonucleotide
caaucuuauauuuaaugac

SEQ ID NO: 145297 - RNA, 19 nt, Artificial Sequence
  Description of Artificial Sequence: Synthetic oligonucleotide
aaugccguauaacuaaccu

SEQ ID NO: 145298 - RNA, 19 nt, Artificial Sequence
  Description of Artificial Sequence: Synthetic oligonucleotide
uuacaaaugguguuggcga

SEQ ID NO: 145299 - RNA, 19 nt, Artificial Sequence
  Description of Artificial Sequence: Synthetic oligonucleotide
uuaauuauacggguaauac

SEQ ID NO: 145300 - RNA, 19 nt, Artificial Sequence
  Description of Artificial Sequence: Synthetic oligonucleotide
uaguagaucuacuuaaugu

SEQ ID NO: 145301 - RNA, 19 nt, Artificial Sequence
  Description of Artificial Sequence: Synthetic oligonucleotide
uagaugaauaugcuuaaga

SEQ ID NO: 145302 - RNA, 19 nt, Artificial Sequence
  Description of Artificial Sequence: Synthetic oligonucleotide
aacaaugccguauaacuaa

SEQ ID NO: 145303 - RNA, 19 nt, Artificial Sequence
  Description of Artificial Sequence: Synthetic oligonucleotide
uauuuaaugacaugaccac

SEQ ID NO: 145304 - RNA, 19 nt, Artificial Sequence
  Description of Artificial Sequence: Synthetic oligonucleotide
uaacuaaccugugaggugg

SEQ ID NO: 145305 - RNA, 19 nt, Artificial Sequence
  Description of Artificial Sequence: Synthetic oligonucleotide
acaaucuuaauuauacggg

SEQ ID NO: 145306 - RNA, 19 nt, Artificial Sequence
  Description of Artificial Sequence: Synthetic oligonucleotide
ugccguauaacuaaccugu

SEQ ID NO: 145307 - RNA, 19 nt, Artificial Sequence
  Description of Artificial Sequence: Synthetic oligonucleotide
aauuuaauaguggcacaac

SEQ ID NO: 145308 - RNA, 19 nt, Artificial Sequence
  Description of Artificial Sequence: Synthetic oligonucleotide
uguacuauccauaucuuuu

SEQ ID NO: 145309 - RNA, 19 nt, Artificial Sequence
  Description of Artificial Sequence: Synthetic oligonucleotide
ugaaagagcuauccgcagg

SEQ ID NO: 145310 - RNA, 19 nt, Artificial Sequence
  Description of Artificial Sequence: Synthetic oligonucleotide
auugacguaauuacucucc

SEQ ID NO: 145311 - RNA, 19 nt, Artificial Sequence
  Description of Artificial Sequence: Synthetic oligonucleotide
acucagaccaacuguauag

SEQ ID NO: 145312 - RNA, 19 nt, Artificial Sequence
  Description of Artificial Sequence: Synthetic oligonucleotide
aauugucgccaguauauug

SEQ ID NO: 145313 - RNA, 19 nt, Artificial Sequence
  Description of Artificial Sequence: Synthetic oligonucleotide
agugcuaauuagaaguacc

SEQ ID NO: 145314 - RNA, 19 nt, Artificial Sequence
  Description of Artificial Sequence: Synthetic oligonucleotide
augaauaugcuuaagagaa

SEQ ID NO: 145315 - RNA, 19 nt, Artificial Sequence
  Description of Artificial Sequence: Synthetic oligonucleotide
uaauugaauaauugucgcc

SEQ ID NO: 145316 - RNA, 19 nt, Artificial Sequence
  Description of Artificial Sequence: Synthetic oligonucleotide
uuagcaaaccugaaggcaa

SEQ ID NO: 145317 - RNA, 19 nt, Artificial Sequence
  Description of Artificial Sequence: Synthetic oligonucleotide
uuccgauaaccuuaugccg

SEQ ID NO: 145318 - RNA, 19 nt, Artificial Sequence
  Description of Artificial Sequence: Synthetic oligonucleotide
aaagcaacgcuggguagcc

SEQ ID NO: 145319 - RNA, 19 nt, Artificial Sequence
  Description of Artificial Sequence: Synthetic oligonucleotide
uacaaauagacaacaguau

SEQ ID NO: 145320 - RNA, 19 nt, Artificial Sequence
  Description of Artificial Sequence: Synthetic oligonucleotide
aauguaugacuucuccgcu

SEQ ID NO: 145321 - RNA, 19 nt, Artificial Sequence
  Description of Artificial Sequence: Synthetic oligonucleotide
acaauaaggugagugcacc

SEQ ID NO: 145322 - RNA, 19 nt, Artificial Sequence
  Description of Artificial Sequence: Synthetic oligonucleotide
uugacguaauuacucuccg

SEQ ID NO: 145323 - RNA, 19 nt, Artificial Sequence
  Description of Artificial Sequence: Synthetic oligonucleotide
uuugcagcauauacaaugu

SEQ ID NO: 145324 - RNA, 19 nt, Artificial Sequence
  Description of Artificial Sequence: Synthetic oligonucleotide
agcauuaugacaaucuucu

SEQ ID NO: 145325 - RNA, 19 nt, Artificial Sequence
  Description of Artificial Sequence: Synthetic oligonucleotide
uagaucuacuuaauguaug

SEQ ID NO: 145326 - RNA, 19 nt, Artificial Sequence
  Description of Artificial Sequence: Synthetic oligonucleotide
aguacauacuaauaucuau

SEQ ID NO: 145327 - RNA, 19 nt, Artificial Sequence
  Description of Artificial Sequence: Synthetic oligonucleotide
uaucaagugaguaguagau

SEQ ID NO: 145328 - RNA, 19 nt, Artificial Sequence
  Description of Artificial Sequence: Synthetic oligonucleotide
cauuucuaaagucaucaac

SEQ ID NO: 145329 - RNA, 19 nt, Artificial Sequence
  Description of Artificial Sequence: Synthetic oligonucleotide
ucgaugagaagauaacaga

SEQ ID NO: 145330 - RNA, 19 nt, Artificial Sequence
  Description of Artificial Sequence: Synthetic oligonucleotide
ucuuauauuuaaugacaug

SEQ ID NO: 145331 - RNA, 19 nt, Artificial Sequence
  Description of Artificial Sequence: Synthetic oligonucleotide
aaguugaccacacauuaua

SEQ ID NO: 145332 - RNA, 19 nt, Artificial Sequence
  Description of Artificial Sequence: Synthetic oligonucleotide
gacguaauuacucuccguc

SEQ ID NO: 145333 - RNA, 19 nt, Artificial Sequence
  Description of Artificial Sequence: Synthetic oligonucleotide
aagugcuaauuagaaguac

SEQ ID NO: 145334 - RNA, 19 nt, Artificial Sequence
  Description of Artificial Sequence: Synthetic oligonucleotide
uccgauaaccuuaugccgu

SEQ ID NO: 145335 - RNA, 19 nt, Artificial Sequence
  Description of Artificial Sequence: Synthetic oligonucleotide
ucuaaugguaccugaaaua

SEQ ID NO: 145336 - RNA, 19 nt, Artificial Sequence
  Description of Artificial Sequence: Synthetic oligonucleotide
uuacuuugaggguucaaac

SEQ ID NO: 145337 - RNA, 19 nt, Artificial Sequence
  Description of Artificial Sequence: Synthetic oligonucleotide
auauugacguaauuacucu

SEQ ID NO: 145338 - RNA, 19 nt, Artificial Sequence
  Description of Artificial Sequence: Synthetic oligonucleotide
ugaauaugcuuaagagaag

SEQ ID NO: 145339 - RNA, 19 nt, Artificial Sequence
  Description of Artificial Sequence: Synthetic oligonucleotide
aguaaagcaacgcugggua

SEQ ID NO: 145340 - RNA, 19 nt, Artificial Sequence
  Description of Artificial Sequence: Synthetic oligonucleotide
uuaacaguuuucccauggc

SEQ ID NO: 145341 - RNA, 19 nt, Artificial Sequence
  Description of Artificial Sequence: Synthetic oligonucleotide
uaacuaugcauuucacagc

SEQ ID NO: 145342 - RNA, 19 nt, Artificial Sequence
  Description of Artificial Sequence: Synthetic oligonucleotide
agaucuacuuaauguauga

SEQ ID NO: 145343 - RNA, 19 nt, Artificial Sequence
  Description of Artificial Sequence: Synthetic oligonucleotide
acugauuaucaugaauaac

SEQ ID NO: 145344 - RNA, 19 nt, Artificial Sequence
  Description of Artificial Sequence: Synthetic oligonucleotide
guagcaaggagacuuauaa

SEQ ID NO: 145345 - RNA, 19 nt, Artificial Sequence
  Description of Artificial Sequence: Synthetic oligonucleotide
agcaacgcuggguagccgc

SEQ ID NO: 145346 - RNA, 19 nt, Artificial Sequence
  Description of Artificial Sequence: Synthetic oligonucleotide
uaccauuuaugucagcauc

SEQ ID NO: 145347 - RNA, 19 nt, Artificial Sequence
  Description of Artificial Sequence: Synthetic oligonucleotide
uuuacuuugaggguucaaa

SEQ ID NO: 145348 - RNA, 19 nt, Artificial Sequence
  Description of Artificial Sequence: Synthetic oligonucleotide
cauaggaaccugaucauuc

SEQ ID NO: 145349 - RNA, 19 nt, Artificial Sequence
  Description of Artificial Sequence: Synthetic oligonucleotide
aucuuaauuauacggguaa

SEQ ID NO: 145350 - RNA, 19 nt, Artificial Sequence
  Description of Artificial Sequence: Synthetic oligonucleotide
guaauuacucuccgucugg

SEQ ID NO: 145351 - RNA, 19 nt, Artificial Sequence
  Description of Artificial Sequence: Synthetic oligonucleotide
ucgggugcggucaugagga

SEQ ID NO: 145352 - RNA, 19 nt, Artificial Sequence
  Description of Artificial Sequence: Synthetic oligonucleotide
uuaaucugagaaagaggca

SEQ ID NO: 145353 - RNA, 19 nt, Artificial Sequence
  Description of Artificial Sequence: Synthetic oligonucleotide
agcacgagcauccauuuga

SEQ ID NO: 145354 - RNA, 19 nt, Artificial Sequence
  Description of Artificial Sequence: Synthetic oligonucleotide
aaauaauacacugggccau

SEQ ID NO: 145355 - RNA, 19 nt, Artificial Sequence
  Description of Artificial Sequence: Synthetic oligonucleotide
auaaccuuaugccguuuuc

SEQ ID NO: 145356 - RNA, 19 nt, Artificial Sequence
  Description of Artificial Sequence: Synthetic oligonucleotide
uguugaagugugaggucgg

SEQ ID NO: 145357 - RNA, 19 nt, Artificial Sequence
  Description of Artificial Sequence: Synthetic oligonucleotide
agaucauuuagaaguaaag

SEQ ID NO: 145358 - RNA, 19 nt, Artificial Sequence
  Description of Artificial Sequence: Synthetic oligonucleotide
uugauaugugucauuacuu

SEQ ID NO: 145359 - RNA, 19 nt, Artificial Sequence
  Description of Artificial Sequence: Synthetic oligonucleotide
auaacuaaccugugaggug

SEQ ID NO: 145360 - RNA, 19 nt, Artificial Sequence
  Description of Artificial Sequence: Synthetic oligonucleotide
gacggaauaccugcuaagg

SEQ ID NO: 145361 - RNA, 19 nt, Artificial Sequence
  Description of Artificial Sequence: Synthetic oligonucleotide
uuauacggguaauacuugu

SEQ ID NO: 145362 - RNA, 19 nt, Artificial Sequence
  Description of Artificial Sequence: Synthetic oligonucleotide
auacggguaauacuugugu

SEQ ID NO: 145363 - RNA, 19 nt, Artificial Sequence
  Description of Artificial Sequence: Synthetic oligonucleotide
guaguagaucuacuuaaug

SEQ ID NO: 145364 - RNA, 19 nt, Artificial Sequence
  Description of Artificial Sequence: Synthetic oligonucleotide
auugaagaggaagagagua

SEQ ID NO: 145365 - RNA, 19 nt, Artificial Sequence
  Description of Artificial Sequence: Synthetic oligonucleotide
uacugcauugccauuuagu

SEQ ID NO: 145366 - RNA, 19 nt, Artificial Sequence
  Description of Artificial Sequence: Synthetic oligonucleotide
uuauccucauugauaugug

SEQ ID NO: 145367 - RNA, 19 nt, Artificial Sequence
  Description of Artificial Sequence: Synthetic oligonucleotide
ucgacucaauguacuaucc

SEQ ID NO: 145368 - RNA, 19 nt, Artificial Sequence
  Description of Artificial Sequence: Synthetic oligonucleotide
ucucuugggaguuuuggaa

SEQ ID NO: 145369 - RNA, 19 nt, Artificial Sequence
  Description of Artificial Sequence: Synthetic oligonucleotide
guacuauccauaucuuuug

SEQ ID NO: 145370 - RNA, 19 nt, Artificial Sequence
  Description of Artificial Sequence: Synthetic oligonucleotide
auacuuguguaucauuuaa

SEQ ID NO: 145371 - RNA, 19 nt, Artificial Sequence
  Description of Artificial Sequence: Synthetic oligonucleotide
cuaugggacgaugaaagag

SEQ ID NO: 145372 - RNA, 19 nt, Artificial Sequence
  Description of Artificial Sequence: Synthetic oligonucleotide
agcauauacaauguuuugu

SEQ ID NO: 145373 - RNA, 19 nt, Artificial Sequence
  Description of Artificial Sequence: Synthetic oligonucleotide
aaagagcuauccgcagggc

SEQ ID NO: 145374 - RNA, 19 nt, Artificial Sequence
  Description of Artificial Sequence: Synthetic oligonucleotide
aggaaguuuacuguaucag

SEQ ID NO: 145375 - RNA, 19 nt, Artificial Sequence
  Description of Artificial Sequence: Synthetic oligonucleotide
gauacucgccuagagaaac

SEQ ID NO: 145376 - RNA, 19 nt, Artificial Sequence
  Description of Artificial Sequence: Synthetic oligonucleotide
uaaugacaugaccacaaua

SEQ ID NO: 145377 - RNA, 19 nt, Artificial Sequence
  Description of Artificial Sequence: Synthetic oligonucleotide
gacuucuccgcucaaagaa

SEQ ID NO: 145378 - RNA, 19 nt, Artificial Sequence
  Description of Artificial Sequence: Synthetic oligonucleotide
gaguaaccugcucuccucg

SEQ ID NO: 145379 - RNA, 19 nt, Artificial Sequence
  Description of Artificial Sequence: Synthetic oligonucleotide
aaguuuacuguaucagguu

SEQ ID NO: 145380 - RNA, 19 nt, Artificial Sequence
  Description of Artificial Sequence: Synthetic oligonucleotide
agaauuuaaccagagguuu

SEQ ID NO: 145381 - RNA, 19 nt, Artificial Sequence
  Description of Artificial Sequence: Synthetic oligonucleotide
aagcaugaaaucugggcuu

SEQ ID NO: 145382 - RNA, 19 nt, Artificial Sequence
  Description of Artificial Sequence: Synthetic oligonucleotide
caugcaacagcaaugguua

SEQ ID NO: 145383 - RNA, 19 nt, Artificial Sequence
  Description of Artificial Sequence: Synthetic oligonucleotide
uggccggauaagaaguucc

SEQ ID NO: 145384 - RNA, 19 nt, Artificial Sequence
  Description of Artificial Sequence: Synthetic oligonucleotide
uauugacguaauuacucuc

SEQ ID NO: 145385 - RNA, 19 nt, Artificial Sequence
  Description of Artificial Sequence: Synthetic oligonucleotide
cuagaugcucgacucaaug

SEQ ID NO: 145386 - RNA, 19 nt, Artificial Sequence
  Description of Artificial Sequence: Synthetic oligonucleotide
cuguaucagguuacaaagc

SEQ ID NO: 145387 - RNA, 19 nt, Artificial Sequence
  Description of Artificial Sequence: Synthetic oligonucleotide
gaaaacuaaguagcaagga

SEQ ID NO: 145388 - RNA, 19 nt, Artificial Sequence
  Description of Artificial Sequence: Synthetic oligonucleotide
uagccccuagaauuuaacc

SEQ ID NO: 145389 - RNA, 19 nt, Artificial Sequence
  Description of Artificial Sequence: Synthetic oligonucleotide
guugaccacacauuauaac

SEQ ID NO: 145390 - RNA, 19 nt, Artificial Sequence
  Description of Artificial Sequence: Synthetic oligonucleotide
acagcagauuagcaaaccu

SEQ ID NO: 145391 - RNA, 19 nt, Artificial Sequence
  Description of Artificial Sequence: Synthetic oligonucleotide
guuggcgacaugucgacac

SEQ ID NO: 145392 - RNA, 19 nt, Artificial Sequence
  Description of Artificial Sequence: Synthetic oligonucleotide
auaggaaccugaucauucu

SEQ ID NO: 145393 - RNA, 19 nt, Artificial Sequence
  Description of Artificial Sequence: Synthetic oligonucleotide
uucuaaaaguuccgauaac

SEQ ID NO: 145394 - RNA, 19 nt, Artificial Sequence
  Description of Artificial Sequence: Synthetic oligonucleotide
augccguauaacuaaccug

SEQ ID NO: 145395 - RNA, 19 nt, Artificial Sequence
  Description of Artificial Sequence: Synthetic oligonucleotide
ugcucuagaugcucgacuc

SEQ ID NO: 145396 - RNA, 19 nt, Artificial Sequence
  Description of Artificial Sequence: Synthetic oligonucleotide
aagauacuauacaaauaga

SEQ ID NO: 145397 - RNA, 19 nt, Artificial Sequence
  Description of Artificial Sequence: Synthetic oligonucleotide
ucucgaggcagucauugaa

SEQ ID NO: 145398 - RNA, 19 nt, Artificial Sequence
  Description of Artificial Sequence: Synthetic oligonucleotide
aaccuuaugccguuuucuu

SEQ ID NO: 145399 - RNA, 19 nt, Artificial Sequence
  Description of Artificial Sequence: Synthetic oligonucleotide
agaugcucgacucaaugua

SEQ ID NO: 145400 - RNA, 19 nt, Artificial Sequence
  Description of Artificial Sequence: Synthetic oligonucleotide
aucaagugaguaguagauc

SEQ ID NO: 145401 - RNA, 19 nt, Artificial Sequence
  Description of Artificial Sequence: Synthetic oligonucleotide
cucgacucaauguacuauc

SEQ ID NO: 145402 - RNA, 19 nt, Artificial Sequence
  Description of Artificial Sequence: Synthetic oligonucleotide
aguaaccugcucuccucgg

SEQ ID NO: 145403 - RNA, 19 nt, Artificial Sequence
  Description of Artificial Sequence: Synthetic oligonucleotide
cucgaggcagucauugaag

SEQ ID NO: 145404 - RNA, 19 nt, Artificial Sequence
  Description of Artificial Sequence: Synthetic oligonucleotide
uuaucuucauauguacauc

SEQ ID NO: 145405 - RNA, 19 nt, Artificial Sequence
  Description of Artificial Sequence: Synthetic oligonucleotide
ucgaggcagucauugaaga

SEQ ID NO: 145406 - RNA, 19 nt, Artificial Sequence
  Description of Artificial Sequence: Synthetic oligonucleotide
agacggaauaccugcuaag

SEQ ID NO: 145407 - RNA, 19 nt, Artificial Sequence
  Description of Artificial Sequence: Synthetic oligonucleotide
acguaauuacucuccgucu

SEQ ID NO: 145408 - RNA, 19 nt, Artificial Sequence
  Description of Artificial Sequence: Synthetic oligonucleotide
aauaaggugagugcaccuu

SEQ ID NO: 145409 - RNA, 19 nt, Artificial Sequence
  Description of Artificial Sequence: Synthetic oligonucleotide
uaaccuuaugccguuuucu

SEQ ID NO: 145410 - RNA, 19 nt, Artificial Sequence
  Description of Artificial Sequence: Synthetic oligonucleotide
aaucuuaauuauacgggua

SEQ ID NO: 145411 - RNA, 19 nt, Artificial Sequence
  Description of Artificial Sequence: Synthetic oligonucleotide
aaggugagugcaccuuuca

SEQ ID NO: 145412 - RNA, 19 nt, Artificial Sequence
  Description of Artificial Sequence: Synthetic oligonucleotide
agagcuauccgcagggcuc

SEQ ID NO: 145413 - RNA, 19 nt, Artificial Sequence
  Description of Artificial Sequence: Synthetic oligonucleotide
uugcucuagaugcucgacu

SEQ ID NO: 145414 - RNA, 19 nt, Artificial Sequence
  Description of Artificial Sequence: Synthetic oligonucleotide
aaagaggcauuagaugaau

SEQ ID NO: 145415 - RNA, 19 nt, Artificial Sequence
  Description of Artificial Sequence: Synthetic oligonucleotide
uauugcucuagaugcucga

SEQ ID NO: 145416 - RNA, 19 nt, Artificial Sequence
  Description of Artificial Sequence: Synthetic oligonucleotide
accuuaugccguuuucuug

SEQ ID NO: 145417 - RNA, 19 nt, Artificial Sequence
  Description of Artificial Sequence: Synthetic oligonucleotide
ccggauaagaaguuccacg

SEQ ID NO: 145418 - RNA, 19 nt, Artificial Sequence
  Description of Artificial Sequence: Synthetic oligonucleotide
acggaauaccugcuaagga

SEQ ID NO: 145419 - RNA, 19 nt, Artificial Sequence
  Description of Artificial Sequence: Synthetic oligonucleotide
ccauagucaauuaaaccac

SEQ ID NO: 145420 - RNA, 19 nt, Artificial Sequence
  Description of Artificial Sequence: Synthetic oligonucleotide
caaugccguauaacuaacc

SEQ ID NO: 145421 - RNA, 19 nt, Artificial Sequence
  Description of Artificial Sequence: Synthetic oligonucleotide
gucgggugcggucaugagg

SEQ ID NO: 145422 - RNA, 19 nt, Artificial Sequence
  Description of Artificial Sequence: Synthetic oligonucleotide
aucuuauauuuaaugacau

SEQ ID NO: 145423 - RNA, 19 nt, Artificial Sequence
  Description of Artificial Sequence: Synthetic oligonucleotide
cuggaguagaacuucuaga

SEQ ID NO: 145424 - RNA, 19 nt, Artificial Sequence
  Description of Artificial Sequence: Synthetic oligonucleotide
auuauacggguaauacuug

SEQ ID NO: 145425 - RNA, 19 nt, Artificial Sequence
  Description of Artificial Sequence: Synthetic oligonucleotide
acaaugccguauaacuaac

SEQ ID NO: 145426 - RNA, 19 nt, Artificial Sequence
  Description of Artificial Sequence: Synthetic oligonucleotide
gucgccaguauauugacgu

SEQ ID NO: 145427 - RNA, 19 nt, Artificial Sequence
  Description of Artificial Sequence: Synthetic oligonucleotide
aacuaaccugugagguggc

SEQ ID NO: 145428 - RNA, 19 nt, Artificial Sequence
  Description of Artificial Sequence: Synthetic oligonucleotide
guuuacuguaucagguuac

SEQ ID NO: 145429 - RNA, 19 nt, Artificial Sequence
  Description of Artificial Sequence: Synthetic oligonucleotide
acuuaagguacuggccuuc

SEQ ID NO: 145430 - RNA, 19 nt, Artificial Sequence
  Description of Artificial Sequence: Synthetic oligonucleotide
cacacauuauaacuaugca

SEQ ID NO: 145431 - RNA, 19 nt, Artificial Sequence
  Description of Artificial Sequence: Synthetic oligonucleotide
ucuuaauuauacggguaau

SEQ ID NO: 145432 - RNA, 19 nt, Artificial Sequence
  Description of Artificial Sequence: Synthetic oligonucleotide
uagcaaaacaaugccguau

SEQ ID NO: 145433 - RNA, 19 nt, Artificial Sequence
  Description of Artificial Sequence: Synthetic oligonucleotide
caaucuuaauuauacgggu

SEQ ID NO: 145434 - RNA, 19 nt, Artificial Sequence
  Description of Artificial Sequence: Synthetic oligonucleotide
aaaguugaccacacauuau

SEQ ID NO: 145435 - RNA, 19 nt, Artificial Sequence
  Description of Artificial Sequence: Synthetic oligonucleotide
acauacuaauaucuaucuu

SEQ ID NO: 145436 - RNA, 19 nt, Artificial Sequence
  Description of Artificial Sequence: Synthetic oligonucleotide
auaaggugagugcaccuuu

SEQ ID NO: 145437 - RNA, 19 nt, Artificial Sequence
  Description of Artificial Sequence: Synthetic oligonucleotide
ugacguaauuacucuccgu

SEQ ID NO: 145438 - RNA, 19 nt, Artificial Sequence
  Description of Artificial Sequence: Synthetic oligonucleotide
caaauacguacuuccaaaa

SEQ ID NO: 145439 - RNA, 19 nt, Artificial Sequence
  Description of Artificial Sequence: Synthetic oligonucleotide
uacucgccuagagaaacug

SEQ ID NO: 145440 - RNA, 19 nt, Artificial Sequence
  Description of Artificial Sequence: Synthetic oligonucleotide
caguauauugacguaauua

SEQ ID NO: 145441 - RNA, 19 nt, Artificial Sequence
  Description of Artificial Sequence: Synthetic oligonucleotide
auguacuauccauaucuuu

SEQ ID NO: 145442 - RNA, 19 nt, Artificial Sequence
  Description of Artificial Sequence: Synthetic oligonucleotide
aauguacuauccauaucuu

SEQ ID NO: 145443 - RNA, 19 nt, Artificial Sequence
  Description of Artificial Sequence: Synthetic oligonucleotide
ggugagugcaccuuucauc

SEQ ID NO: 145444 - RNA, 19 nt, Artificial Sequence
  Description of Artificial Sequence: Synthetic oligonucleotide
ucuuauccucauugauaug

SEQ ID NO: 145445 - RNA, 19 nt, Artificial Sequence
  Description of Artificial Sequence: Synthetic oligonucleotide
cagaccaacuguauagaga

SEQ ID NO: 145446 - RNA, 19 nt, Artificial Sequence
  Description of Artificial Sequence: Synthetic oligonucleotide
gagacggaauaccugcuaa

SEQ ID NO: 145447 - RNA, 19 nt, Artificial Sequence
  Description of Artificial Sequence: Synthetic oligonucleotide
ccuagaauuuaaccagagg

SEQ ID NO: 145448 - RNA, 19 nt, Artificial Sequence
  Description of Artificial Sequence: Synthetic oligonucleotide
uaauuacucuccgucuggu

SEQ ID NO: 145449 - RNA, 19 nt, Artificial Sequence
  Description of Artificial Sequence: Synthetic oligonucleotide
aauaauacacugggccaua

SEQ ID NO: 145450 - RNA, 19 nt, Artificial Sequence
  Description of Artificial Sequence: Synthetic oligonucleotide
cuucgaugagaagauaaca

SEQ ID NO: 145451 - RNA, 19 nt, Artificial Sequence
  Description of Artificial Sequence: Synthetic oligonucleotide
caccuuucaucuccaacug

SEQ ID NO: 145452 - RNA, 19 nt, Artificial Sequence
  Description of Artificial Sequence: Synthetic oligonucleotide
caggaaguuuacuguauca

SEQ ID NO: 145453 - RNA, 19 nt, Artificial Sequence
  Description of Artificial Sequence: Synthetic oligonucleotide
ucuccucggucacagggau

SEQ ID NO: 145454 - RNA, 19 nt, Artificial Sequence
  Description of Artificial Sequence: Synthetic oligonucleotide
cuuaauuauacggguaaua

SEQ ID NO: 145455 - RNA, 19 nt, Artificial Sequence
  Description of Artificial Sequence: Synthetic oligonucleotide
uugaagugugaggucggug

SEQ ID NO: 145456 - RNA, 19 nt, Artificial Sequence
  Description of Artificial Sequence: Synthetic oligonucleotide
ucuagaugcucgacucaau

SEQ ID NO: 145457 - RNA, 19 nt, Artificial Sequence
  Description of Artificial Sequence: Synthetic oligonucleotide
agcagauuacugaaaacua

SEQ ID NO: 145458 - RNA, 19 nt, Artificial Sequence
  Description of Artificial Sequence: Synthetic oligonucleotide
aggucgguggguuguuaag

SEQ ID NO: 145459 - RNA, 19 nt, Artificial Sequence
  Description of Artificial Sequence: Synthetic oligonucleotide
uuggcgacaugucgacaca

SEQ ID NO: 145460 - RNA, 19 nt, Artificial Sequence
  Description of Artificial Sequence: Synthetic oligonucleotide
gccuagagaaacuguuucc

SEQ ID NO: 145461 - RNA, 19 nt, Artificial Sequence
  Description of Artificial Sequence: Synthetic oligonucleotide
ucuaucuuugcagcauaua

SEQ ID NO: 145462 - RNA, 19 nt, Artificial Sequence
  Description of Artificial Sequence: Synthetic oligonucleotide
cugagcuaugggacgauga

SEQ ID NO: 145463 - RNA, 19 nt, Artificial Sequence
  Description of Artificial Sequence: Synthetic oligonucleotide
ucgccuagagaaacuguuu

SEQ ID NO: 145464 - RNA, 19 nt, Artificial Sequence
  Description of Artificial Sequence: Synthetic oligonucleotide
acuaggcuucgaugagaag

SEQ ID NO: 145465 - RNA, 19 nt, Artificial Sequence
  Description of Artificial Sequence: Synthetic oligonucleotide
guauauugacguaauuacu

SEQ ID NO: 145466 - RNA, 19 nt, Artificial Sequence
  Description of Artificial Sequence: Synthetic oligonucleotide
ucugagcuaugggacgaug

SEQ ID NO: 145467 - RNA, 19 nt, Artificial Sequence
  Description of Artificial Sequence: Synthetic oligonucleotide
agugaguaguagaucuacu

SEQ ID NO: 145468 - RNA, 19 nt, Artificial Sequence
  Description of Artificial Sequence: Synthetic oligonucleotide
uggcgacaugucgacacag

SEQ ID NO: 145469 - RNA, 19 nt, Artificial Sequence
  Description of Artificial Sequence: Synthetic oligonucleotide
ugcucgacucaauguacua

SEQ ID NO: 145470 - RNA, 19 nt, Artificial Sequence
  Description of Artificial Sequence: Synthetic oligonucleotide
gcuaauuagaaguaccauu

SEQ ID NO: 145471 - RNA, 19 nt, Artificial Sequence
  Description of Artificial Sequence: Synthetic oligonucleotide
aggugagugcaccuuucau

SEQ ID NO: 145472 - RNA, 19 nt, Artificial Sequence
  Description of Artificial Sequence: Synthetic oligonucleotide
uaauugucgccaguauauu

SEQ ID NO: 145473 - RNA, 19 nt, Artificial Sequence
  Description of Artificial Sequence: Synthetic oligonucleotide
agcaaugguuaguguuacu

SEQ ID NO: 145474 - RNA, 19 nt, Artificial Sequence
  Description of Artificial Sequence: Synthetic oligonucleotide
agacggcucacaccaaguu

SEQ ID NO: 145475 - RNA, 19 nt, Artificial Sequence
  Description of Artificial Sequence: Synthetic oligonucleotide
uggccucaccagcaaggca

SEQ ID NO: 145476 - RNA, 19 nt, Artificial Sequence
  Description of Artificial Sequence: Synthetic oligonucleotide
uuaugccguuuucuugcua

SEQ ID NO: 145477 - RNA, 19 nt, Artificial Sequence
  Description of Artificial Sequence: Synthetic oligonucleotide
aagaggcauuagaugaaua

SEQ ID NO: 145478 - RNA, 19 nt, Artificial Sequence
  Description of Artificial Sequence: Synthetic oligonucleotide
aagcaacgcuggguagccg

SEQ ID NO: 145479 - RNA, 19 nt, Artificial Sequence
  Description of Artificial Sequence: Synthetic oligonucleotide
gaggucgguggguuguuaa

SEQ ID NO: 145480 - RNA, 19 nt, Artificial Sequence
  Description of Artificial Sequence: Synthetic oligonucleotide
gagcuaugggacgaugaaa

SEQ ID NO: 145481 - RNA, 19 nt, Artificial Sequence
  Description of Artificial Sequence: Synthetic oligonucleotide
acuucuccgcucaaagaaa

SEQ ID NO: 145482 - RNA, 19 nt, Artificial Sequence
  Description of Artificial Sequence: Synthetic oligonucleotide
ugagugcaccuuucaucuc

SEQ ID NO: 145483 - RNA, 19 nt, Artificial Sequence
  Description of Artificial Sequence: Synthetic oligonucleotide
agcaggaaguuuacuguau

SEQ ID NO: 145484 - RNA, 19 nt, Artificial Sequence
  Description of Artificial Sequence: Synthetic oligonucleotide
augcucgacucaauguacu

SEQ ID NO: 145485 - RNA, 19 nt, Artificial Sequence
  Description of Artificial Sequence: Synthetic oligonucleotide
ugggacgaugaaagagcua

SEQ ID NO: 145486 - RNA, 19 nt, Artificial Sequence
  Description of Artificial Sequence: Synthetic oligonucleotide
gcgacaugucgacacagca

SEQ ID NO: 145487 - RNA, 19 nt, Artificial Sequence
  Description of Artificial Sequence: Synthetic oligonucleotide
gggacgaugaaagagcuau

SEQ ID NO: 145488 - RNA, 19 nt, Artificial Sequence
  Description of Artificial Sequence: Synthetic oligonucleotide
ggugcaagaauagguccac

SEQ ID NO: 145489 - RNA, 19 nt, Artificial Sequence
  Description of Artificial Sequence: Synthetic oligonucleotide
cggauaagaaguuccacga

SEQ ID NO: 145490 - RNA, 19 nt, Artificial Sequence
  Description of Artificial Sequence: Synthetic oligonucleotide
acgaggcucugccguccac

SEQ ID NO: 145491 - RNA, 19 nt, Artificial Sequence
  Description of Artificial Sequence: Synthetic oligonucleotide
aguagcaaggagacuuaua

SEQ ID NO: 145492 - RNA, 19 nt, Artificial Sequence
  Description of Artificial Sequence: Synthetic oligonucleotide
gcuacugauuaucaugaau

SEQ ID NO: 145493 - RNA, 19 nt, Artificial Sequence
  Description of Artificial Sequence: Synthetic oligonucleotide
ggccucaccagcaaggcaa

SEQ ID NO: 145494 - RNA, 19 nt, Artificial Sequence
  Description of Artificial Sequence: Synthetic oligonucleotide
gcuaucucgaggcagucau

SEQ ID NO: 145495 - RNA, 19 nt, Artificial Sequence
  Description of Artificial Sequence: Synthetic oligonucleotide
cgccuagagaaacuguuuc

SEQ ID NO: 145496 - RNA, 19 nt, Artificial Sequence
  Description of Artificial Sequence: Synthetic oligonucleotide
cuuaugccguuuucuugcu

SEQ ID NO: 145497 - RNA, 19 nt, Artificial Sequence
  Description of Artificial Sequence: Synthetic oligonucleotide
guucaaacggaaguuccuu

SEQ ID NO: 145498 - RNA, 19 nt, Artificial Sequence
  Description of Artificial Sequence: Synthetic oligonucleotide
ccguauaacuaaccuguga

SEQ ID NO: 145499 - RNA, 19 nt, Artificial Sequence
  Description of Artificial Sequence: Synthetic oligonucleotide
ggcgacaugucgacacagc

SEQ ID NO: 145500 - RNA, 19 nt, Artificial Sequence
  Description of Artificial Sequence: Synthetic oligonucleotide
ggagacggaauaccugcua

SEQ ID NO: 145501 - RNA, 19 nt, Artificial Sequence
  Description of Artificial Sequence: Synthetic oligonucleotide
caugugcuacaucuuuuau

SEQ ID NO: 145502 - RNA, 19 nt, Artificial Sequence
  Description of Artificial Sequence: Synthetic oligonucleotide
gcucuagaugcucgacuca

SEQ ID NO: 145503 - RNA, 19 nt, Artificial Sequence
  Description of Artificial Sequence: Synthetic oligonucleotide
ugaggucgguggguuguua

SEQ ID NO: 145504 - RNA, 19 nt, Artificial Sequence
  Description of Artificial Sequence: Synthetic oligonucleotide
gccggauaagaaguuccac

SEQ ID NO: 145505 - RNA, 19 nt, Artificial Sequence
  Description of Artificial Sequence: Synthetic oligonucleotide
gagcuauccgcagggcucu

SEQ ID NO: 145506 - RNA, 19 nt, Artificial Sequence
  Description of Artificial Sequence: Synthetic oligonucleotide
gguucaaacggaaguuccu

SEQ ID NO: 145507 - RNA, 19 nt, Artificial Sequence
  Description of Artificial Sequence: Synthetic oligonucleotide
ggucgggugcggucaugag

SEQ ID NO: 145508 - RNA, 19 nt, Artificial Sequence
  Description of Artificial Sequence: Synthetic oligonucleotide
gcugacgagcgagggagac

SEQ ID NO: 145509 - RNA, 19 nt, Artificial Sequence
  Description of Artificial Sequence: Synthetic oligonucleotide
acgcuggguagccgcugca

SEQ ID NO: 145510 - RNA, 19 nt, Artificial Sequence
  Description of Artificial Sequence: Synthetic oligonucleotide
gccguauaacuaaccugug

SEQ ID NO: 145511 - RNA, 19 nt, Artificial Sequence
  Description of Artificial Sequence: Synthetic oligonucleotide
guaugacuucuccgcucaa

SEQ ID NO: 145512 - RNA, 19 nt, Artificial Sequence
  Description of Artificial Sequence: Synthetic oligonucleotide
ccgcucaaagaaagaagga

SEQ ID NO: 145513 - RNA, 19 nt, Artificial Sequence
  Description of Artificial Sequence: Synthetic oligonucleotide
agcauccauuugaaugcuu

SEQ ID NO: 145514 - RNA, 19 nt, Artificial Sequence
  Description of Artificial Sequence: Synthetic oligonucleotide
agcuauccgcagggcucuc

SEQ ID NO: 145515 - RNA, 19 nt, Artificial Sequence
  Description of Artificial Sequence: Synthetic oligonucleotide
ggacgaugaaagagcuauc

SEQ ID NO: 145516 - RNA, 19 nt, Artificial Sequence
  Description of Artificial Sequence: Synthetic oligonucleotide
ggucgguggguuguuaagu

SEQ ID NO: 145517 - RNA, 19 nt, Artificial Sequence
  Description of Artificial Sequence: Synthetic oligonucleotide
cacgaggcucugccgucca

SEQ ID NO: 145518 - RNA, 19 nt, Artificial Sequence
  Description of Artificial Sequence: Synthetic oligonucleotide
aggcuucgaugagaagaua

SEQ ID NO: 145519 - RNA, 19 nt, Artificial Sequence
  Description of Artificial Sequence: Synthetic oligonucleotide
gcuggguagccgcugcacu

SEQ ID NO: 145520 - RNA, 19 nt, Artificial Sequence
  Description of Artificial Sequence: Synthetic oligonucleotide
gagagacggcucacaccaa

SEQ ID NO: 145521 - RNA, 19 nt, Artificial Sequence
  Description of Artificial Sequence: Synthetic oligonucleotide
gcacgagcauccauuugaa

SEQ ID NO: 145522 - RNA, 19 nt, Artificial Sequence
  Description of Artificial Sequence: Synthetic oligonucleotide
cuauccgcagggcucucuu

SEQ ID NO: 145523 - RNA, 19 nt, Artificial Sequence
  Description of Artificial Sequence: Synthetic oligonucleotide
guggucgggugcggucaug

SEQ ID NO: 145524 - RNA, 19 nt, Artificial Sequence
  Description of Artificial Sequence: Synthetic oligonucleotide
gcucgacucaauguacuau

SEQ ID NO: 145525 - RNA, 19 nt, Artificial Sequence
  Description of Artificial Sequence: Synthetic oligonucleotide
cuaucucgaggcagucauu

SEQ ID NO: 145526 - RNA, 19 nt, Artificial Sequence
  Description of Artificial Sequence: Synthetic oligonucleotide
gacgagcgagggagacgga

SEQ ID NO: 145527 - RNA, 19 nt, Artificial Sequence
  Description of Artificial Sequence: Synthetic oligonucleotide
gugcggucaugaggacuuc

SEQ ID NO: 145528 - RNA, 19 nt, Artificial Sequence
  Description of Artificial Sequence: Synthetic oligonucleotide
gggagacggaauaccugcu

SEQ ID NO: 145529 - RNA, 19 nt, Artificial Sequence
  Description of Artificial Sequence: Synthetic oligonucleotide
ccucauugauaugugucau

SEQ ID NO: 145530 - RNA, 19 nt, Artificial Sequence
  Description of Artificial Sequence: Synthetic oligonucleotide
cgacaugucgacacagcau

SEQ ID NO: 145531 - RNA, 19 nt, Artificial Sequence
  Description of Artificial Sequence: Synthetic oligonucleotide
ccaguauauugacguaauu

SEQ ID NO: 145532 - RNA, 19 nt, Artificial Sequence
  Description of Artificial Sequence: Synthetic oligonucleotide
gcaacgcuggguagccgcu

SEQ ID NO: 145533 - RNA, 19 nt, Artificial Sequence
  Description of Artificial Sequence: Synthetic oligonucleotide
gcuauccgcagggcucucu

SEQ ID NO: 145534 - RNA, 19 nt, Artificial Sequence
  Description of Artificial Sequence: Synthetic oligonucleotide
aaaucuaggaaccuggcuc

SEQ ID NO: 145535 - RNA, 19 nt, Artificial Sequence
  Description of Artificial Sequence: Synthetic oligonucleotide
aaguuauacacaauuaugc

SEQ ID NO: 145536 - RNA, 19 nt, Artificial Sequence
  Description of Artificial Sequence: Synthetic oligonucleotide
uauaguaacauguuaauga

SEQ ID NO: 145537 - RNA, 19 nt, Artificial Sequence
  Description of Artificial Sequence: Synthetic oligonucleotide
aauuugaacaguuauugca

SEQ ID NO: 145538 - RNA, 19 nt, Artificial Sequence
  Description of Artificial Sequence: Synthetic oligonucleotide
aauaccuguaaagacuucc

SEQ ID NO: 145539 - RNA, 19 nt, Artificial Sequence
  Description of Artificial Sequence: Synthetic oligonucleotide
aagacuaauaguuuccucu

SEQ ID NO: 145540 - RNA, 19 nt, Artificial Sequence
  Description of Artificial Sequence: Synthetic oligonucleotide
  modified_base (2)..(2): a, c, u, g, unknown or other
gngaaugucagcuugucag

SEQ ID NO: 145541 - RNA, 19 nt, Artificial Sequence
  Description of Artificial Sequence: Synthetic oligonucleotide
uuuucgauaguauaguaac

SEQ ID NO: 145542 - RNA, 19 nt, Artificial Sequence
  Description of Artificial Sequence: Synthetic oligonucleotide
auccuuucaacagagaggc

SEQ ID NO: 145543 - RNA, 19 nt, Artificial Sequence
  Description of Artificial Sequence: Synthetic oligonucleotide
uuaauuugcacccaaguuu

SEQ ID NO: 145544 - RNA, 19 nt, Artificial Sequence
  Description of Artificial Sequence: Synthetic oligonucleotide
uucagcuugguauaugagg

SEQ ID NO: 145545 - RNA, 19 nt, Artificial Sequence
  Description of Artificial Sequence: Synthetic oligonucleotide
uccuaaaggacccucauac

SEQ ID NO: 145546 - RNA, 19 nt, Artificial Sequence
  Description of Artificial Sequence: Synthetic oligonucleotide
caauuggcaacacauaugc

SEQ ID NO: 145547 - RNA, 19 nt, Artificial Sequence
  Description of Artificial Sequence: Synthetic oligonucleotide
ugaaaauuaaguccccuac

SEQ ID NO: 145548 - RNA, 19 nt, Artificial Sequence
  Description of Artificial Sequence: Synthetic oligonucleotide
uguaugacagcccucgcag

SEQ ID NO: 145549 - RNA, 19 nt, Artificial Sequence
  Description of Artificial Sequence: Synthetic oligonucleotide
agcaaucuaauucaaaggu

SEQ ID NO: 145550 - RNA, 19 nt, Artificial Sequence
  Description of Artificial Sequence: Synthetic oligonucleotide
uuauaugcugccgugagag

SEQ ID NO: 145551 - RNA, 19 nt, Artificial Sequence
  Description of Artificial Sequence: Synthetic oligonucleotide
  modified_base (16)..(16): a, c, u, g, unknown or other
aaaagugcucuccugngaa

SEQ ID NO: 145552 - RNA, 19 nt, Artificial Sequence
  Description of Artificial Sequence: Synthetic oligonucleotide
cuuuuagagcuguacaccg

SEQ ID NO: 145553 - RNA, 19 nt, Artificial Sequence
  Description of Artificial Sequence: Synthetic oligonucleotide
aucgcugaaauacucgugg

SEQ ID NO: 145554 - RNA, 19 nt, Artificial Sequence
  Description of Artificial Sequence: Synthetic oligonucleotide
ugguauaugaggaaacaga

SEQ ID NO: 145555 - RNA, 19 nt, Artificial Sequence
  Description of Artificial Sequence: Synthetic oligonucleotide
aguugauacaaucaccaug

SEQ ID NO: 145556 - RNA, 19 nt, Artificial Sequence
  Description of Artificial Sequence: Synthetic oligonucleotide
uggguuaugccuaugacuc

SEQ ID NO: 145557 - RNA, 19 nt, Artificial Sequence
  Description of Artificial Sequence: Synthetic oligonucleotide
uuuuaagcguuaaucggcc

SEQ ID NO: 145558 - RNA, 19 nt, Artificial Sequence
  Description of Artificial Sequence: Synthetic oligonucleotide
aaacagaagacuaauaguu

SEQ ID NO: 145559 - RNA, 19 nt, Artificial Sequence
  Description of Artificial Sequence: Synthetic oligonucleotide
cuugcuaugugucauguug

SEQ ID NO: 145560 - RNA, 19 nt, Artificial Sequence
  Description of Artificial Sequence: Synthetic oligonucleotide
auucuaagcaaaucacagg

SEQ ID NO: 145561 - RNA, 19 nt, Artificial Sequence
  Description of Artificial Sequence: Synthetic oligonucleotide
acacauaugcgacacguag

SEQ ID NO: 145562 - RNA, 19 nt, Artificial Sequence
  Description of Artificial Sequence: Synthetic oligonucleotide
acugaaacccuucuaacca

SEQ ID NO: 145563 - RNA, 19 nt, Artificial Sequence
  Description of Artificial Sequence: Synthetic oligonucleotide
uuguccauaacuauuguuu

SEQ ID NO: 145564 - RNA, 19 nt, Artificial Sequence
  Description of Artificial Sequence: Synthetic oligonucleotide
aguuauacacaauuaugca

SEQ ID NO: 145565 - RNA, 19 nt, Artificial Sequence
  Description of Artificial Sequence: Synthetic oligonucleotide
ucuauuauaugcugccgug

SEQ ID NO: 145566 - RNA, 19 nt, Artificial Sequence
  Description of Artificial Sequence: Synthetic oligonucleotide
aauuacaauuggcaacaca

SEQ ID NO: 145567 - RNA, 19 nt, Artificial Sequence
  Description of Artificial Sequence: Synthetic oligonucleotide
uucggcuauacuuuauucc

SEQ ID NO: 145568 - RNA, 19 nt, Artificial Sequence
  Description of Artificial Sequence: Synthetic oligonucleotide
augacucagaggcaaugcc

SEQ ID NO: 145569 - RNA, 19 nt, Artificial Sequence
  Description of Artificial Sequence: Synthetic oligonucleotide
auuacaauuggcaacacau

SEQ ID NO: 145570 - RNA, 19 nt, Artificial Sequence
  Description of Artificial Sequence: Synthetic oligonucleotide
uagacaagggcacggaucu

SEQ ID NO: 145571 - RNA, 19 nt, Artificial Sequence
  Description of Artificial Sequence: Synthetic oligonucleotide
ugucguaugcacacagagg

SEQ ID NO: 145572 - RNA, 19 nt, Artificial Sequence
  Description of Artificial Sequence: Synthetic oligonucleotide
ugaauucucauccuugcau

SEQ ID NO: 145573 - RNA, 19 nt, Artificial Sequence
  Description of Artificial Sequence: Synthetic oligonucleotide
aaaggacccucauacucuc

SEQ ID NO: 145574 - RNA, 19 nt, Artificial Sequence
  Description of Artificial Sequence: Synthetic oligonucleotide
cauaucauguuacagaaaa

SEQ ID NO: 145575 - RNA, 19 nt, Artificial Sequence
  Description of Artificial Sequence: Synthetic oligonucleotide
ugcuuauuucauuugagau

SEQ ID NO: 145576 - RNA, 19 nt, Artificial Sequence
  Description of Artificial Sequence: Synthetic oligonucleotide
agcauauuucuauguauag

SEQ ID NO: 145577 - RNA, 19 nt, Artificial Sequence
  Description of Artificial Sequence: Synthetic oligonucleotide
uaaaggacccucauacucu

SEQ ID NO: 145578 - RNA, 19 nt, Artificial Sequence
  Description of Artificial Sequence: Synthetic oligonucleotide
aguugcguaggauccuucc

SEQ ID NO: 145579 - RNA, 19 nt, Artificial Sequence
  Description of Artificial Sequence: Synthetic oligonucleotide
ugaucagaagguucugcgg

SEQ ID NO: 145580 - RNA, 19 nt, Artificial Sequence
  Description of Artificial Sequence: Synthetic oligonucleotide
cguuaaucggccaagaugg

SEQ ID NO: 145581 - RNA, 19 nt, Artificial Sequence
  Description of Artificial Sequence: Synthetic oligonucleotide
uaugccuaugacucagagg

SEQ ID NO: 145582 - RNA, 19 nt, Artificial Sequence
  Description of Artificial Sequence: Synthetic oligonucleotide
acuaauaguuuccucugug

SEQ ID NO: 145583 - RNA, 19 nt, Artificial Sequence
  Description of Artificial Sequence: Synthetic oligonucleotide
ugcaagauugcaguuacug

SEQ ID NO: 145584 - RNA, 19 nt, Artificial Sequence
  Description of Artificial Sequence: Synthetic oligonucleotide
ugugcaaaauauaccgcug

SEQ ID NO: 145585 - RNA, 19 nt, Artificial Sequence
  Description of Artificial Sequence: Synthetic oligonucleotide
uuaugccuaugacucagag

SEQ ID NO: 145586 - RNA, 19 nt, Artificial Sequence
  Description of Artificial Sequence: Synthetic oligonucleotide
cuaaaggacccucauacuc

SEQ ID NO: 145587 - RNA, 19 nt, Artificial Sequence
  Description of Artificial Sequence: Synthetic oligonucleotide
augaauggaggauucuaag

SEQ ID NO: 145588 - RNA, 19 nt, Artificial Sequence
  Description of Artificial Sequence: Synthetic oligonucleotide
auuagcauggagcuccuga

SEQ ID NO: 145589 - RNA, 19 nt, Artificial Sequence
  Description of Artificial Sequence: Synthetic oligonucleotide
guucaugcuauucuuacca

SEQ ID NO: 145590 - RNA, 19 nt, Artificial Sequence
  Description of Artificial Sequence: Synthetic oligonucleotide
  modified_base (8)..(8): a, c, u, g, unknown or other
ucuccugngaaugucagcu

SEQ ID NO: 145591 - RNA, 19 nt, Artificial Sequence
  Description of Artificial Sequence: Synthetic oligonucleotide
uuucgauaguauaguaaca

SEQ ID NO: 145592 - RNA, 19 nt, Artificial Sequence
  Description of Artificial Sequence: Synthetic oligonucleotide
aguauaguaacauguuaau

SEQ ID NO: 145593 - RNA, 19 nt, Artificial Sequence
  Description of Artificial Sequence: Synthetic oligonucleotide
aagacauaucagucagcuc

SEQ ID NO: 145594 - RNA, 19 nt, Artificial Sequence
  Description of Artificial Sequence: Synthetic oligonucleotide
aaccauuacauccuucaua

SEQ ID NO: 145595 - RNA, 19 nt, Artificial Sequence
  Description of Artificial Sequence: Synthetic oligonucleotide
  modified_base (6)..(6): a, c, u, g, unknown or other
uccugngaaugucagcuug

SEQ ID NO: 145596 - RNA, 19 nt, Artificial Sequence
  Description of Artificial Sequence: Synthetic oligonucleotide
agacaaauuacaauuggca

SEQ ID NO: 145597 - RNA, 19 nt, Artificial Sequence
  Description of Artificial Sequence: Synthetic oligonucleotide
agacaguugcguaggaucc

SEQ ID NO: 145598 - RNA, 19 nt, Artificial Sequence
  Description of Artificial Sequence: Synthetic oligonucleotide
aggauucuaagcaaaucac

SEQ ID NO: 145599 - RNA, 19 nt, Artificial Sequence
  Description of Artificial Sequence: Synthetic oligonucleotide
uugcguaggauccuucccc

SEQ ID NO: 145600 - RNA, 19 nt, Artificial Sequence
  Description of Artificial Sequence: Synthetic oligonucleotide
ucgauaguauaguaacaug

SEQ ID NO: 145601 - RNA, 19 nt, Artificial Sequence
  Description of Artificial Sequence: Synthetic oligonucleotide
uucuagucacuugagagcu

SEQ ID NO: 145602 - RNA, 19 nt, Artificial Sequence
  Description of Artificial Sequence: Synthetic oligonucleotide
uugguauaugaggaaacag

SEQ ID NO: 145603 - RNA, 19 nt, Artificial Sequence
  Description of Artificial Sequence: Synthetic oligonucleotide
uacucguggcucaaggcag

SEQ ID NO: 145604 - RNA, 19 nt, Artificial Sequence
  Description of Artificial Sequence: Synthetic oligonucleotide
aaccuagacauccucuuau

SEQ ID NO: 145605 - RNA, 19 nt, Artificial Sequence
  Description of Artificial Sequence: Synthetic oligonucleotide
auuaugaaaggggacugag

SEQ ID NO: 145606 - RNA, 19 nt, Artificial Sequence
  Description of Artificial Sequence: Synthetic oligonucleotide
uucgauaguauaguaacau

SEQ ID NO: 145607 - RNA, 19 nt, Artificial Sequence
  Description of Artificial Sequence: Synthetic oligonucleotide
uuaaacuguuccccuuaag

SEQ ID NO: 145608 - RNA, 19 nt, Artificial Sequence
  Description of Artificial Sequence: Synthetic oligonucleotide
uuaagcguuaaucggccaa

SEQ ID NO: 145609 - RNA, 19 nt, Artificial Sequence
  Description of Artificial Sequence: Synthetic oligonucleotide
gaauuaugaaaggggacug

SEQ ID NO: 145610 - RNA, 19 nt, Artificial Sequence
  Description of Artificial Sequence: Synthetic oligonucleotide
uguaaagacuucccaugga

SEQ ID NO: 145611 - RNA, 19 nt, Artificial Sequence
  Description of Artificial Sequence: Synthetic oligonucleotide
uuaugaaaggggacugaga

SEQ ID NO: 145612 - RNA, 19 nt, Artificial Sequence
  Description of Artificial Sequence: Synthetic oligonucleotide
auauuucuauguauagggg

SEQ ID NO: 145613 - RNA, 19 nt, Artificial Sequence
  Description of Artificial Sequence: Synthetic oligonucleotide
gugucguaugcacacagag

SEQ ID NO: 145614 - RNA, 19 nt, Artificial Sequence
  Description of Artificial Sequence: Synthetic oligonucleotide
uaugcgacacguaguauuc

SEQ ID NO: 145615 - RNA, 19 nt, Artificial Sequence
  Description of Artificial Sequence: Synthetic oligonucleotide
auacucguggcucaaggca

SEQ ID NO: 145616 - RNA, 19 nt, Artificial Sequence
  Description of Artificial Sequence: Synthetic oligonucleotide
ugguauguacaaccuagac

SEQ ID NO: 145617 - RNA, 19 nt, Artificial Sequence
  Description of Artificial Sequence: Synthetic oligonucleotide
uuuagagcuguacaccgua

SEQ ID NO: 145618 - RNA, 19 nt, Artificial Sequence
  Description of Artificial Sequence: Synthetic oligonucleotide
ugacucagaggcaaugccu

SEQ ID NO: 145619 - RNA, 19 nt, Artificial Sequence
  Description of Artificial Sequence: Synthetic oligonucleotide
cuguacaccguaaagcguc

SEQ ID NO: 145620 - RNA, 19 nt, Artificial Sequence
  Description of Artificial Sequence: Synthetic oligonucleotide
  modified_base (3)..(3): a, c, u, g, unknown or other
ugngaaugucagcuuguca

SEQ ID NO: 145621 - RNA, 19 nt, Artificial Sequence
  Description of Artificial Sequence: Synthetic oligonucleotide
aaauauaccgcugguggau

SEQ ID NO: 145622 - RNA, 19 nt, Artificial Sequence
  Description of Artificial Sequence: Synthetic oligonucleotide
uggagcuccugacuuauac

SEQ ID NO: 145623 - RNA, 19 nt, Artificial Sequence
  Description of Artificial Sequence: Synthetic oligonucleotide
acauucuuacuugaaaccu

SEQ ID NO: 145624 - RNA, 19 nt, Artificial Sequence
  Description of Artificial Sequence: Synthetic oligonucleotide
agcagcacgauguuuggcu

SEQ ID NO: 145625 - RNA, 19 nt, Artificial Sequence
  Description of Artificial Sequence: Synthetic oligonucleotide
uccaagacuaacccuugac

SEQ ID NO: 145626 - RNA, 19 nt, Artificial Sequence
  Description of Artificial Sequence: Synthetic oligonucleotide
agaucgcugaaauacucgu

SEQ ID NO: 145627 - RNA, 19 nt, Artificial Sequence
  Description of Artificial Sequence: Synthetic oligonucleotide
auaugcgacacguaguauu

SEQ ID NO: 145628 - RNA, 19 nt, Artificial Sequence
  Description of Artificial Sequence: Synthetic oligonucleotide
aauuaugaaaggggacuga

SEQ ID NO: 145629 - RNA, 19 nt, Artificial Sequence
  Description of Artificial Sequence: Synthetic oligonucleotide
uugcacccaaguuuuaaga

SEQ ID NO: 145630 - RNA, 19 nt, Artificial Sequence
  Description of Artificial Sequence: Synthetic oligonucleotide
ucgccaagcauuccagugc

SEQ ID NO: 145631 - RNA, 19 nt, Artificial Sequence
  Description of Artificial Sequence: Synthetic oligonucleotide
aacggcuuggaauguuucu

SEQ ID NO: 145632 - RNA, 19 nt, Artificial Sequence
  Description of Artificial Sequence: Synthetic oligonucleotide
auaaucucgccaagcauuc

SEQ ID NO: 145633 - RNA, 19 nt, Artificial Sequence
  Description of Artificial Sequence: Synthetic oligonucleotide
agugcuugcuguuuuguau

SEQ ID NO: 145634 - RNA, 19 nt, Artificial Sequence
  Description of Artificial Sequence: Synthetic oligonucleotide
acaccguaaagcgucugcc

SEQ ID NO: 145635 - RNA, 19 nt, Artificial Sequence
  Description of Artificial Sequence: Synthetic oligonucleotide
ucccauggaaggaauuaug

SEQ ID NO: 145636 - RNA, 19 nt, Artificial Sequence
  Description of Artificial Sequence: Synthetic oligonucleotide
gguauguacaaccuagaca

SEQ ID NO: 145637 - RNA, 19 nt, Artificial Sequence
  Description of Artificial Sequence: Synthetic oligonucleotide
agugaugacuucggaacgg

SEQ ID NO: 145638 - RNA, 19 nt, Artificial Sequence
  Description of Artificial Sequence: Synthetic oligonucleotide
uuucuauguauaggggcag

SEQ ID NO: 145639 - RNA, 19 nt, Artificial Sequence
  Description of Artificial Sequence: Synthetic oligonucleotide
uuacaauuggcaacacaua

SEQ ID NO: 145640 - RNA, 19 nt, Artificial Sequence
  Description of Artificial Sequence: Synthetic oligonucleotide
acauaugcgacacguagua

SEQ ID NO: 145641 - RNA, 19 nt, Artificial Sequence
  Description of Artificial Sequence: Synthetic oligonucleotide
uaagcguuaaucggccaag

SEQ ID NO: 145642 - RNA, 19 nt, Artificial Sequence
  Description of Artificial Sequence: Synthetic oligonucleotide
ugcagcauauuucuaugua

SEQ ID NO: 145643 - RNA, 19 nt, Artificial Sequence
  Description of Artificial Sequence: Synthetic oligonucleotide
ggauguaugacagcccucg

SEQ ID NO: 145644 - RNA, 19 nt, Artificial Sequence
  Description of Artificial Sequence: Synthetic oligonucleotide
guauaugaggaaacagaag

SEQ ID NO: 145645 - RNA, 19 nt, Artificial Sequence
  Description of Artificial Sequence: Synthetic oligonucleotide
ucuauguauaggggcaggc

SEQ ID NO: 145646 - RNA, 19 nt, Artificial Sequence
  Description of Artificial Sequence: Synthetic oligonucleotide
uguccauaacuauuguuuu

SEQ ID NO: 145647 - RNA, 19 nt, Artificial Sequence
  Description of Artificial Sequence: Synthetic oligonucleotide
ucuucggcaugauuuacau

SEQ ID NO: 145648 - RNA, 19 nt, Artificial Sequence
  Description of Artificial Sequence: Synthetic oligonucleotide
uccccuacuaccuuuccaa

SEQ ID NO: 145649 - RNA, 19 nt, Artificial Sequence
  Description of Artificial Sequence: Synthetic oligonucleotide
uccaaauacuguguguagu

SEQ ID NO: 145650 - RNA, 19 nt, Artificial Sequence
  Description of Artificial Sequence: Synthetic oligonucleotide
aagacuucccauggaagga

SEQ ID NO: 145651 - RNA, 19 nt, Artificial Sequence
  Description of Artificial Sequence: Synthetic oligonucleotide
gaaaauuaaguccccuacu

SEQ ID NO: 145652 - RNA, 19 nt, Artificial Sequence
  Description of Artificial Sequence: Synthetic oligonucleotide
agagaggugugccugacuu

SEQ ID NO: 145653 - RNA, 19 nt, Artificial Sequence
  Description of Artificial Sequence: Synthetic oligonucleotide
agcgucaguguuuccuugg

SEQ ID NO: 145654 - RNA, 19 nt, Artificial Sequence
  Description of Artificial Sequence: Synthetic oligonucleotide
acguaguauuccauucucc

SEQ ID NO: 145655 - RNA, 19 nt, Artificial Sequence
  Description of Artificial Sequence: Synthetic oligonucleotide
ugcgacacguaguauucca

SEQ ID NO: 145656 - RNA, 19 nt, Artificial Sequence
  Description of Artificial Sequence: Synthetic oligonucleotide
caagauugcaguuacugcu

SEQ ID NO: 145657 - RNA, 19 nt, Artificial Sequence
  Description of Artificial Sequence: Synthetic oligonucleotide
ugacuugaggcagaccuca

SEQ ID NO: 145658 - RNA, 19 nt, Artificial Sequence
  Description of Artificial Sequence: Synthetic oligonucleotide
aaaggcguucccucuuccu

SEQ ID NO: 145659 - RNA, 19 nt, Artificial Sequence
  Description of Artificial Sequence: Synthetic oligonucleotide
aaggguaccacgagguacu

SEQ ID NO: 145660 - RNA, 19 nt, Artificial Sequence
  Description of Artificial Sequence: Synthetic oligonucleotide
uuaaucggccaagauggcu

SEQ ID NO: 145661 - RNA, 19 nt, Artificial Sequence
  Description of Artificial Sequence: Synthetic oligonucleotide
uuuaagcguuaaucggcca

SEQ ID NO: 145662 - RNA, 19 nt, Artificial Sequence
  Description of Artificial Sequence: Synthetic oligonucleotide
auguauaggggcaggcaac

SEQ ID NO: 145663 - RNA, 19 nt, Artificial Sequence
  Description of Artificial Sequence: Synthetic oligonucleotide
ucuacccugguauguacaa

SEQ ID NO: 145664 - RNA, 19 nt, Artificial Sequence
  Description of Artificial Sequence: Synthetic oligonucleotide
acuuauacuuagugaaaua

SEQ ID NO: 145665 - RNA, 19 nt, Artificial Sequence
  Description of Artificial Sequence: Synthetic oligonucleotide
gaugaauggaggauucuaa

SEQ ID NO: 145666 - RNA, 19 nt, Artificial Sequence
  Description of Artificial Sequence: Synthetic oligonucleotide
cugucaacuugcgugacac

SEQ ID NO: 145667 - RNA, 19 nt, Artificial Sequence
  Description of Artificial Sequence: Synthetic oligonucleotide
guugcguaggauccuuccc

SEQ ID NO: 145668 - RNA, 19 nt, Artificial Sequence
  Description of Artificial Sequence: Synthetic oligonucleotide
cacacuggguuugacagac

SEQ ID NO: 145669 - RNA, 19 nt, Artificial Sequence
  Description of Artificial Sequence: Synthetic oligonucleotide
ggcuuuuagagcuguacac

SEQ ID NO: 145670 - RNA, 19 nt, Artificial Sequence
  Description of Artificial Sequence: Synthetic oligonucleotide
gcguuaaucggccaagaug

SEQ ID NO: 145671 - RNA, 19 nt, Artificial Sequence
  Description of Artificial Sequence: Synthetic oligonucleotide
uguacaccguaaagcgucu

SEQ ID NO: 145672 - RNA, 19 nt, Artificial Sequence
  Description of Artificial Sequence: Synthetic oligonucleotide
ucgcugaaauacucguggc

SEQ ID NO: 145673 - RNA, 19 nt, Artificial Sequence
  Description of Artificial Sequence: Synthetic oligonucleotide
aguccccuacuaccuuucc

SEQ ID NO: 145674 - RNA, 19 nt, Artificial Sequence
  Description of Artificial Sequence: Synthetic oligonucleotide
ucacauuugggcgguaaaa

SEQ ID NO: 145675 - RNA, 19 nt, Artificial Sequence
  Description of Artificial Sequence: Synthetic oligonucleotide
ucggcaugauuuacauagc

SEQ ID NO: 145676 - RNA, 19 nt, Artificial Sequence
  Description of Artificial Sequence: Synthetic oligonucleotide
ucaacuugcgugacacuuu

SEQ ID NO: 145677 - RNA, 19 nt, Artificial Sequence
  Description of Artificial Sequence: Synthetic oligonucleotide
ugaaaggcguucccucuuc

SEQ ID NO: 145678 - RNA, 19 nt, Artificial Sequence
  Description of Artificial Sequence: Synthetic oligonucleotide
ugaugacuucggaacggcu

SEQ ID NO: 145679 - RNA, 19 nt, Artificial Sequence
  Description of Artificial Sequence: Synthetic oligonucleotide
ugauggccgugaaaggcgu

SEQ ID NO: 145680 - RNA, 19 nt, Artificial Sequence
  Description of Artificial Sequence: Synthetic oligonucleotide
gaaaggcguucccucuucc

SEQ ID NO: 145681 - RNA, 19 nt, Artificial Sequence
  Description of Artificial Sequence: Synthetic oligonucleotide
gauguaugacagcccucgc

SEQ ID NO: 145682 - RNA, 19 nt, Artificial Sequence
  Description of Artificial Sequence: Synthetic oligonucleotide
agaucuucggcaugauuua

SEQ ID NO: 145683 - RNA, 19 nt, Artificial Sequence
  Description of Artificial Sequence: Synthetic oligonucleotide
cuuccaagacuaacccuug

SEQ ID NO: 145684 - RNA, 19 nt, Artificial Sequence
  Description of Artificial Sequence: Synthetic oligonucleotide
gaaaucuaggaaccuggcu

SEQ ID NO: 145685 - RNA, 19 nt, Artificial Sequence
  Description of Artificial Sequence: Synthetic oligonucleotide
cacccagugaugacuucgg

SEQ ID NO: 145686 - RNA, 19 nt, Artificial Sequence
  Description of Artificial Sequence: Synthetic oligonucleotide
gccucuauuauaugcugcc

SEQ ID NO: 145687 - RNA, 19 nt, Artificial Sequence
  Description of Artificial Sequence: Synthetic oligonucleotide
agcugucuagacaagggca

SEQ ID NO: 145688 - RNA, 19 nt, Artificial Sequence
  Description of Artificial Sequence: Synthetic oligonucleotide
agguacuaaccccauuaaa

SEQ ID NO: 145689 - RNA, 19 nt, Artificial Sequence
  Description of Artificial Sequence: Synthetic oligonucleotide
cuugguauaugaggaaaca

SEQ ID NO: 145690 - RNA, 19 nt, Artificial Sequence
  Description of Artificial Sequence: Synthetic oligonucleotide
agaagauuacaaaccagua

SEQ ID NO: 145691 - RNA, 19 nt, Artificial Sequence
  Description of Artificial Sequence: Synthetic oligonucleotide
ugcguaggauccuuccccu

SEQ ID NO: 145692 - RNA, 19 nt, Artificial Sequence
  Description of Artificial Sequence: Synthetic oligonucleotide
gugccucuauuauaugcug

SEQ ID NO: 145693 - RNA, 19 nt, Artificial Sequence
  Description of Artificial Sequence: Synthetic oligonucleotide
aaguccccuacuaccuuuc

SEQ ID NO: 145694 - RNA, 19 nt, Artificial Sequence
  Description of Artificial Sequence: Synthetic oligonucleotide
gacuuguuggcgagcuggg

SEQ ID NO: 145695 - RNA, 19 nt, Artificial Sequence
  Description of Artificial Sequence: Synthetic oligonucleotide
uuccuaaaggacccucaua

SEQ ID NO: 145696 - RNA, 19 nt, Artificial Sequence
  Description of Artificial Sequence: Synthetic oligonucleotide
ggcagcuaacaguaaacac

SEQ ID NO: 145697 - RNA, 19 nt, Artificial Sequence
  Description of Artificial Sequence: Synthetic oligonucleotide
cagcauauuucuauguaua

SEQ ID NO: 145698 - RNA, 19 nt, Artificial Sequence
  Description of Artificial Sequence: Synthetic oligonucleotide
auauaccgcugguggaugu

SEQ ID NO: 145699 - RNA, 19 nt, Artificial Sequence
  Description of Artificial Sequence: Synthetic oligonucleotide
uacuguguguagugaggcu

SEQ ID NO: 145700 - RNA, 19 nt, Artificial Sequence
  Description of Artificial Sequence: Synthetic oligonucleotide
augcgacacguaguauucc

SEQ ID NO: 145701 - RNA, 19 nt, Artificial Sequence
  Description of Artificial Sequence: Synthetic oligonucleotide
  modified_base (9)..(9): a, c, u, g, unknown or other
cucuccugngaaugucagc

SEQ ID NO: 145702 - RNA, 19 nt, Artificial Sequence
  Description of Artificial Sequence: Synthetic oligonucleotide
uacugacauaagucagugu

SEQ ID NO: 145703 - RNA, 19 nt, Artificial Sequence
  Description of Artificial Sequence: Synthetic oligonucleotide
ucuaggaaccuggcucugc

SEQ ID NO: 145704 - RNA, 19 nt, Artificial Sequence
  Description of Artificial Sequence: Synthetic oligonucleotide
acugucaacuugcgugaca

SEQ ID NO: 145705 - RNA, 19 nt, Artificial Sequence
  Description of Artificial Sequence: Synthetic oligonucleotide
agguugcaaucucacauuu

SEQ ID NO: 145706 - RNA, 19 nt, Artificial Sequence
  Description of Artificial Sequence: Synthetic oligonucleotide
auucuuacuugaaaccuuu

SEQ ID NO: 145707 - RNA, 19 nt, Artificial Sequence
  Description of Artificial Sequence: Synthetic oligonucleotide
aggcagcuaacaguaaaca

SEQ ID NO: 145708 - RNA, 19 nt, Artificial Sequence
  Description of Artificial Sequence: Synthetic oligonucleotide
gcugaaauacucguggcuc

SEQ ID NO: 145709 - RNA, 19 nt, Artificial Sequence
  Description of Artificial Sequence: Synthetic oligonucleotide
ugacagcccucgcagcaac

SEQ ID NO: 145710 - RNA, 19 nt, Artificial Sequence
  Description of Artificial Sequence: Synthetic oligonucleotide
agcguuaaucggccaagau

SEQ ID NO: 145711 - RNA, 19 nt, Artificial Sequence
  Description of Artificial Sequence: Synthetic oligonucleotide
uggauguaugacagcccuc

SEQ ID NO: 145712 - RNA, 19 nt, Artificial Sequence
  Description of Artificial Sequence: Synthetic oligonucleotide
gaucuucggcaugauuuac

SEQ ID NO: 145713 - RNA, 19 nt, Artificial Sequence
  Description of Artificial Sequence: Synthetic oligonucleotide
aagcguuaaucggccaaga

SEQ ID NO: 145714 - RNA, 19 nt, Artificial Sequence
  Description of Artificial Sequence: Synthetic oligonucleotide
cuauuauaugcugccguga

SEQ ID NO: 145715 - RNA, 19 nt, Artificial Sequence
  Description of Artificial Sequence: Synthetic oligonucleotide
uaucaugaagcagcacgau

SEQ ID NO: 145716 - RNA, 19 nt, Artificial Sequence
  Description of Artificial Sequence: Synthetic oligonucleotide
uugcaguuacugcucccuc

SEQ ID NO: 145717 - RNA, 19 nt, Artificial Sequence
  Description of Artificial Sequence: Synthetic oligonucleotide
ugccuaugacucagaggca

SEQ ID NO: 145718 - RNA, 19 nt, Artificial Sequence
  Description of Artificial Sequence: Synthetic oligonucleotide
  modified_base (4)..(4): a, c, u, g, unknown or other
cugngaaugucagcuuguc

SEQ ID NO: 145719 - RNA, 19 nt, Artificial Sequence
  Description of Artificial Sequence: Synthetic oligonucleotide
gacuaauaguuuccucugu

SEQ ID NO: 145720 - RNA, 19 nt, Artificial Sequence
  Description of Artificial Sequence: Synthetic oligonucleotide
gguggguuaugccuaugac

SEQ ID NO: 145721 - RNA, 19 nt, Artificial Sequence
  Description of Artificial Sequence: Synthetic oligonucleotide
uaaucucgccaagcauucc

SEQ ID NO: 145722 - RNA, 19 nt, Artificial Sequence
  Description of Artificial Sequence: Synthetic oligonucleotide
gcgucugccagcuuuuaac

SEQ ID NO: 145723 - RNA, 19 nt, Artificial Sequence
  Description of Artificial Sequence: Synthetic oligonucleotide
ugucauguugaagcauaau

SEQ ID NO: 145724 - RNA, 19 nt, Artificial Sequence
  Description of Artificial Sequence: Synthetic oligonucleotide
gcagcuaacaguaaacacu

SEQ ID NO: 145725 - RNA, 19 nt, Artificial Sequence
  Description of Artificial Sequence: Synthetic oligonucleotide
ugucaacuugcgugacacu

SEQ ID NO: 145726 - RNA, 19 nt, Artificial Sequence
  Description of Artificial Sequence: Synthetic oligonucleotide
cacgagguacugguuuucc

SEQ ID NO: 145727 - RNA, 19 nt, Artificial Sequence
  Description of Artificial Sequence: Synthetic oligonucleotide
gauucggcuauacuuuauu

SEQ ID NO: 145728 - RNA, 19 nt, Artificial Sequence
  Description of Artificial Sequence: Synthetic oligonucleotide
gauuacaguggugucguau

SEQ ID NO: 145729 - RNA, 19 nt, Artificial Sequence
  Description of Artificial Sequence: Synthetic oligonucleotide
gaaaggguaccacgaggua

SEQ ID NO: 145730 - RNA, 19 nt, Artificial Sequence
  Description of Artificial Sequence: Synthetic oligonucleotide
ccguuuaccuugcuuuucc

SEQ ID NO: 145731 - RNA, 19 nt, Artificial Sequence
  Description of Artificial Sequence: Synthetic oligonucleotide
  modified_base (13)..(13): a, c, u, g, unknown or other
agugcucuccugngaaugu

SEQ ID NO: 145732 - RNA, 19 nt, Artificial Sequence
  Description of Artificial Sequence: Synthetic oligonucleotide
cuucggaacggcuuggaau

SEQ ID NO: 145733 - RNA, 19 nt, Artificial Sequence
  Description of Artificial Sequence: Synthetic oligonucleotide
ggggcaggcaacaaucuac

SEQ ID NO: 145734 - RNA, 19 nt, Artificial Sequence
  Description of Artificial Sequence: Synthetic oligonucleotide
ccaagacuaacccuugaca

SEQ ID NO: 145735 - RNA, 19 nt, Artificial Sequence
  Description of Artificial Sequence: Synthetic oligonucleotide
ucccguuuaccuugcuuuu

SEQ ID NO: 145736 - RNA, 19 nt, Artificial Sequence
  Description of Artificial Sequence: Synthetic oligonucleotide
cccauggaaggaauuauga

SEQ ID NO: 145737 - RNA, 19 nt, Artificial Sequence
  Description of Artificial Sequence: Synthetic oligonucleotide
cauaagucagugugcacau

SEQ ID NO: 145738 - RNA, 19 nt, Artificial Sequence
  Description of Artificial Sequence: Synthetic oligonucleotide
uggccgugaaaggcguucc

SEQ ID NO: 145739 - RNA, 19 nt, Artificial Sequence
  Description of Artificial Sequence: Synthetic oligonucleotide
cgauaguauaguaacaugu

SEQ ID NO: 145740 - RNA, 19 nt, Artificial Sequence
  Description of Artificial Sequence: Synthetic oligonucleotide
acggaucucugguugucuu

SEQ ID NO: 145741 - RNA, 19 nt, Artificial Sequence
  Description of Artificial Sequence: Synthetic oligonucleotide
aucuacccugguauguaca

SEQ ID NO: 145742 - RNA, 19 nt, Artificial Sequence
  Description of Artificial Sequence: Synthetic oligonucleotide
caccguaaagcgucugcca

SEQ ID NO: 145743 - RNA, 19 nt, Artificial Sequence
  Description of Artificial Sequence: Synthetic oligonucleotide
cacauaugcgacacguagu

SEQ ID NO: 145744 - RNA, 19 nt, Artificial Sequence
  Description of Artificial Sequence: Synthetic oligonucleotide
ggcugaguugauacaauca

SEQ ID NO: 145745 - RNA, 19 nt, Artificial Sequence
  Description of Artificial Sequence: Synthetic oligonucleotide
gcaacaaucuacccuggua

SEQ ID NO: 145746 - RNA, 19 nt, Artificial Sequence
  Description of Artificial Sequence: Synthetic oligonucleotide
ggaggauucuaagcaaauc

SEQ ID NO: 145747 - RNA, 19 nt, Artificial Sequence
  Description of Artificial Sequence: Synthetic oligonucleotide
cuacccugguauguacaac

SEQ ID NO: 145748 - RNA, 19 nt, Artificial Sequence
  Description of Artificial Sequence: Synthetic oligonucleotide
uccaaacuugggacuuguu

SEQ ID NO: 145749 - RNA, 19 nt, Artificial Sequence
  Description of Artificial Sequence: Synthetic oligonucleotide
caacauuagcauggagcuc

SEQ ID NO: 145750 - RNA, 19 nt, Artificial Sequence
  Description of Artificial Sequence: Synthetic oligonucleotide
cugccuuacaccucuaauu

SEQ ID NO: 145751 - RNA, 19 nt, Artificial Sequence
  Description of Artificial Sequence: Synthetic oligonucleotide
ccucuauuauaugcugccg

SEQ ID NO: 145752 - RNA, 19 nt, Artificial Sequence
  Description of Artificial Sequence: Synthetic oligonucleotide
ggcuauacuuuauuccaua

SEQ ID NO: 145753 - RNA, 19 nt, Artificial Sequence
  Description of Artificial Sequence: Synthetic oligonucleotide
cacuggguuugacagaccu

SEQ ID NO: 145754 - RNA, 19 nt, Artificial Sequence
  Description of Artificial Sequence: Synthetic oligonucleotide
gauuuacauagcugagcuu

SEQ ID NO: 145755 - RNA, 19 nt, Artificial Sequence
  Description of Artificial Sequence: Synthetic oligonucleotide
guccccuacuaccuuucca

SEQ ID NO: 145756 - RNA, 19 nt, Artificial Sequence
  Description of Artificial Sequence: Synthetic oligonucleotide
acacuggguuugacagacc

SEQ ID NO: 145757 - RNA, 19 nt, Artificial Sequence
  Description of Artificial Sequence: Synthetic oligonucleotide
uauaccgcugguggaugua

SEQ ID NO: 145758 - RNA, 19 nt, Artificial Sequence
  Description of Artificial Sequence: Synthetic oligonucleotide
auaaugagucucagaggua

SEQ ID NO: 145759 - RNA, 19 nt, Artificial Sequence
  Description of Artificial Sequence: Synthetic oligonucleotide
cucacauuugggcgguaaa

SEQ ID NO: 145760 - RNA, 19 nt, Artificial Sequence
  Description of Artificial Sequence: Synthetic oligonucleotide
gucaacuugcgugacacuu

SEQ ID NO: 145761 - RNA, 19 nt, Artificial Sequence
  Description of Artificial Sequence: Synthetic oligonucleotide
ccguaaagcgucugccagc

SEQ ID NO: 145762 - RNA, 19 nt, Artificial Sequence
  Description of Artificial Sequence: Synthetic oligonucleotide
gugucugccauggacacau

SEQ ID NO: 145763 - RNA, 19 nt, Artificial Sequence
  Description of Artificial Sequence: Synthetic oligonucleotide
gcagcauauuucuauguau

SEQ ID NO: 145764 - RNA, 19 nt, Artificial Sequence
  Description of Artificial Sequence: Synthetic oligonucleotide
gacuggagugccgccgaac

SEQ ID NO: 145765 - RNA, 19 nt, Artificial Sequence
  Description of Artificial Sequence: Synthetic oligonucleotide
acccugguauguacaaccu

SEQ ID NO: 145766 - RNA, 19 nt, Artificial Sequence
  Description of Artificial Sequence: Synthetic oligonucleotide
gguuugacagaccugccuu

SEQ ID NO: 145767 - RNA, 19 nt, Artificial Sequence
  Description of Artificial Sequence: Synthetic oligonucleotide
ccauggaaggaauuaugaa

SEQ ID NO: 145768 - RNA, 19 nt, Artificial Sequence
  Description of Artificial Sequence: Synthetic oligonucleotide
ucggaacggcuuggaaugu

SEQ ID NO: 145769 - RNA, 19 nt, Artificial Sequence
  Description of Artificial Sequence: Synthetic oligonucleotide
gaugggugucugccaugga

SEQ ID NO: 145770 - RNA, 19 nt, Artificial Sequence
  Description of Artificial Sequence: Synthetic oligonucleotide
guaggauccuuccccuagu

SEQ ID NO: 145771 - RNA, 19 nt, Artificial Sequence
  Description of Artificial Sequence: Synthetic oligonucleotide
ccggaaacugaaacccuuc

SEQ ID NO: 145772 - RNA, 19 nt, Artificial Sequence
  Description of Artificial Sequence: Synthetic oligonucleotide
ccgugaaaggcguucccuc

SEQ ID NO: 145773 - RNA, 19 nt, Artificial Sequence
  Description of Artificial Sequence: Synthetic oligonucleotide
cagugcuugcuguuuugua

SEQ ID NO: 145774 - RNA, 19 nt, Artificial Sequence
  Description of Artificial Sequence: Synthetic oligonucleotide
cauuagcauggagcuccug

SEQ ID NO: 145775 - RNA, 19 nt, Artificial Sequence
  Description of Artificial Sequence: Synthetic oligonucleotide
ggccgugaaaggcguuccc

SEQ ID NO: 145776 - RNA, 19 nt, Artificial Sequence
  Description of Artificial Sequence: Synthetic oligonucleotide
gcagauucggcuauacuuu

SEQ ID NO: 145777 - RNA, 19 nt, Artificial Sequence
  Description of Artificial Sequence: Synthetic oligonucleotide
caagcgucaguguuuccuu

SEQ ID NO: 145778 - RNA, 19 nt, Artificial Sequence
  Description of Artificial Sequence: Synthetic oligonucleotide
  modified_base (5)..(5): a, c, u, g, unknown or other
ccugngaaugucagcuugu

SEQ ID NO: 145779 - RNA, 19 nt, Artificial Sequence
  Description of Artificial Sequence: Synthetic oligonucleotide
  modified_base (7)..(7): a, c, u, g, unknown or other
cuccugngaaugucagcuu

SEQ ID NO: 145780 - RNA, 19 nt, Artificial Sequence
  Description of Artificial Sequence: Synthetic oligonucleotide
cauaugcgacacguaguau

SEQ ID NO: 145781 - RNA, 19 nt, Artificial Sequence
  Description of Artificial Sequence: Synthetic oligonucleotide
ggcacggaucucugguugu

SEQ ID NO: 145782 - RNA, 19 nt, Artificial Sequence
  Description of Artificial Sequence: Synthetic oligonucleotide
gacagcccucgcagcaacu

SEQ ID NO: 145783 - RNA, 19 nt, Artificial Sequence
  Description of Artificial Sequence: Synthetic oligonucleotide
cacggaucucugguugucu

SEQ ID NO: 145784 - RNA, 19 nt, Artificial Sequence
  Description of Artificial Sequence: Synthetic oligonucleotide
ccccgcgucacugaucaga

SEQ ID NO: 145785 - RNA, 19 nt, Artificial Sequence
  Description of Artificial Sequence: Synthetic oligonucleotide
gcgucaguguuuccuuggu

SEQ ID NO: 145786 - RNA, 19 nt, Artificial Sequence
  Description of Artificial Sequence: Synthetic oligonucleotide
ccugccuuacaccucuaau

SEQ ID NO: 145787 - RNA, 19 nt, Artificial Sequence
  Description of Artificial Sequence: Synthetic oligonucleotide
gauggccgugaaaggcguu

SEQ ID NO: 145788 - RNA, 19 nt, Artificial Sequence
  Description of Artificial Sequence: Synthetic oligonucleotide
gcguaggauccuuccccua

SEQ ID NO: 145789 - RNA, 19 nt, Artificial Sequence
  Description of Artificial Sequence: Synthetic oligonucleotide
aggcucccuuggaaacuuu

SEQ ID NO: 145790 - RNA, 19 nt, Artificial Sequence
  Description of Artificial Sequence: Synthetic oligonucleotide
gcgacacguaguauuccau

SEQ ID NO: 145791 - RNA, 19 nt, Artificial Sequence
  Description of Artificial Sequence: Synthetic oligonucleotide
cccugccuuacaccucuaa

SEQ ID NO: 145792 - RNA, 19 nt, Artificial Sequence
  Description of Artificial Sequence: Synthetic oligonucleotide
cggaacggcuuggaauguu

SEQ ID NO: 145793 - RNA, 19 nt, Artificial Sequence
  Description of Artificial Sequence: Synthetic oligonucleotide
aaaacgugaauauaaacag

SEQ ID NO: 145794 - RNA, 19 nt, Artificial Sequence
  Description of Artificial Sequence: Synthetic oligonucleotide
aaauauaucaugcuuccuc

SEQ ID NO: 145795 - RNA, 19 nt, Artificial Sequence
  Description of Artificial Sequence: Synthetic oligonucleotide
aagaguggaagguuuaugc

SEQ ID NO: 145796 - RNA, 19 nt, Artificial Sequence
  Description of Artificial Sequence: Synthetic oligonucleotide
acuauaggaucuuacagcc

SEQ ID NO: 145797 - RNA, 19 nt, Artificial Sequence
  Description of Artificial Sequence: Synthetic oligonucleotide
uuaccuauaaugaucuccg

SEQ ID NO: 145798 - RNA, 19 nt, Artificial Sequence
  Description of Artificial Sequence: Synthetic oligonucleotide
auagacaacaccuuaaagu

SEQ ID NO: 145799 - RNA, 19 nt, Artificial Sequence
  Description of Artificial Sequence: Synthetic oligonucleotide
uaaggugcaaccuacagac

SEQ ID NO: 145800 - RNA, 19 nt, Artificial Sequence
  Description of Artificial Sequence: Synthetic oligonucleotide
cauuauagcgcuuaucuag

SEQ ID NO: 145801 - RNA, 19 nt, Artificial Sequence
  Description of Artificial Sequence: Synthetic oligonucleotide
uaucuagugaugcauacug

SEQ ID NO: 145802 - RNA, 19 nt, Artificial Sequence
  Description of Artificial Sequence: Synthetic oligonucleotide
uuugaauacaccuuuccga

SEQ ID NO: 145803 - RNA, 19 nt, Artificial Sequence
  Description of Artificial Sequence: Synthetic oligonucleotide
gaugaaugcaugcugcagg

SEQ ID NO: 145804 - RNA, 19 nt, Artificial Sequence
  Description of Artificial Sequence: Synthetic oligonucleotide
cuuaguuggauuaauggug

SEQ ID NO: 145805 - RNA, 19 nt, Artificial Sequence
  Description of Artificial Sequence: Synthetic oligonucleotide
aaaauguuggucuuugaau

SEQ ID NO: 145806 - RNA, 19 nt, Artificial Sequence
  Description of Artificial Sequence: Synthetic oligonucleotide
aaaacuaugcaguuucuau

SEQ ID NO: 145807 - RNA, 19 nt, Artificial Sequence
  Description of Artificial Sequence: Synthetic oligonucleotide
uaaaagugucugaagaggc

SEQ ID NO: 145808 - RNA, 19 nt, Artificial Sequence
  Description of Artificial Sequence: Synthetic oligonucleotide
ucaaccucuauguacauga

SEQ ID NO: 145809 - RNA, 19 nt, Artificial Sequence
  Description of Artificial Sequence: Synthetic oligonucleotide
ugacuauaggaucuuacag

SEQ ID NO: 145810 - RNA, 19 nt, Artificial Sequence
  Description of Artificial Sequence: Synthetic oligonucleotide
ugcggaaauauuuauaagu

SEQ ID NO: 145811 - RNA, 19 nt, Artificial Sequence
  Description of Artificial Sequence: Synthetic oligonucleotide
uuaguuggauuaauggugc

SEQ ID NO: 145812 - RNA, 19 nt, Artificial Sequence
  Description of Artificial Sequence: Synthetic oligonucleotide
auuacucaaacccuuggag

SEQ ID NO: 145813 - RNA, 19 nt, Artificial Sequence
  Description of Artificial Sequence: Synthetic oligonucleotide
agccguacacauuauagcg

SEQ ID NO: 145814 - RNA, 19 nt, Artificial Sequence
  Description of Artificial Sequence: Synthetic oligonucleotide
uacaacauugcugaacacg

SEQ ID NO: 145815 - RNA, 19 nt, Artificial Sequence
  Description of Artificial Sequence: Synthetic oligonucleotide
acaacauugcugaacacgc

SEQ ID NO: 145816 - RNA, 19 nt, Artificial Sequence
  Description of Artificial Sequence: Synthetic oligonucleotide
guauagaguucguauaagg

SEQ ID NO: 145817 - RNA, 19 nt, Artificial Sequence
  Description of Artificial Sequence: Synthetic oligonucleotide
aaacgugaauauaaacagc

SEQ ID NO: 145818 - RNA, 19 nt, Artificial Sequence
  Description of Artificial Sequence: Synthetic oligonucleotide
aguucguuguuucugauga

SEQ ID NO: 145819 - RNA, 19 nt, Artificial Sequence
  Description of Artificial Sequence: Synthetic oligonucleotide
caacauuaggaucuggucc

SEQ ID NO: 145820 - RNA, 19 nt, Artificial Sequence
  Description of Artificial Sequence: Synthetic oligonucleotide
aacugcugacuauaggauc

SEQ ID NO: 145821 - RNA, 19 nt, Artificial Sequence
  Description of Artificial Sequence: Synthetic oligonucleotide
aaggcguuaugucauuauc

SEQ ID NO: 145822 - RNA, 19 nt, Artificial Sequence
  Description of Artificial Sequence: Synthetic oligonucleotide
uucggcaagauauuuauau

SEQ ID NO: 145823 - RNA, 19 nt, Artificial Sequence
  Description of Artificial Sequence: Synthetic oligonucleotide
ugugaaauuucuucagucu

SEQ ID NO: 145824 - RNA, 19 nt, Artificial Sequence
  Description of Artificial Sequence: Synthetic oligonucleotide
gguaaagaagcaauuaccg

SEQ ID NO: 145825 - RNA, 19 nt, Artificial Sequence
  Description of Artificial Sequence: Synthetic oligonucleotide
cauaucaggcgccaaaagc

SEQ ID NO: 145826 - RNA, 19 nt, Artificial Sequence
  Description of Artificial Sequence: Synthetic oligonucleotide
aucgauaccguagucauag

SEQ ID NO: 145827 - RNA, 19 nt, Artificial Sequence
  Description of Artificial Sequence: Synthetic oligonucleotide
uguaaacauaucaggcgcc

SEQ ID NO: 145828 - RNA, 19 nt, Artificial Sequence
  Description of Artificial Sequence: Synthetic oligonucleotide
uuagcuuaccuucagugua

SEQ ID NO: 145829 - RNA, 19 nt, Artificial Sequence
  Description of Artificial Sequence: Synthetic oligonucleotide
uugucuuuuaugugaacug

SEQ ID NO: 145830 - RNA, 19 nt, Artificial Sequence
  Description of Artificial Sequence: Synthetic oligonucleotide
guaaagaagcaauuaccgc

SEQ ID NO: 145831 - RNA, 19 nt, Artificial Sequence
  Description of Artificial Sequence: Synthetic oligonucleotide
cacuaucgaaauaagcagc

SEQ ID NO: 145832 - RNA, 19 nt, Artificial Sequence
  Description of Artificial Sequence: Synthetic oligonucleotide
agcacgguaaaaucuacug

SEQ ID NO: 145833 - RNA, 19 nt, Artificial Sequence
  Description of Artificial Sequence: Synthetic oligonucleotide
ucaaccgucauuagguuau

SEQ ID NO: 145834 - RNA, 19 nt, Artificial Sequence
  Description of Artificial Sequence: Synthetic oligonucleotide
gaaauaucacccuuggugu

SEQ ID NO: 145835 - RNA, 19 nt, Artificial Sequence
  Description of Artificial Sequence: Synthetic oligonucleotide
aaauuugcugcggaaauau

SEQ ID NO: 145836 - RNA, 19 nt, Artificial Sequence
  Description of Artificial Sequence: Synthetic oligonucleotide
uuuaugcuggccauuguau

SEQ ID NO: 145837 - RNA, 19 nt, Artificial Sequence
  Description of Artificial Sequence: Synthetic oligonucleotide
ucuuuuaugugaacugcaa

SEQ ID NO: 145838 - RNA, 19 nt, Artificial Sequence
  Description of Artificial Sequence: Synthetic oligonucleotide
ugucuuuuaugugaacugc

SEQ ID NO: 145839 - RNA, 19 nt, Artificial Sequence
  Description of Artificial Sequence: Synthetic oligonucleotide
caagguuaucaucagauga

SEQ ID NO: 145840 - RNA, 19 nt, Artificial Sequence
  Description of Artificial Sequence: Synthetic oligonucleotide
aaacauaucaggcgccaaa

SEQ ID NO: 145841 - RNA, 19 nt, Artificial Sequence
  Description of Artificial Sequence: Synthetic oligonucleotide
auaucgauaccguagucau

SEQ ID NO: 145842 - RNA, 19 nt, Artificial Sequence
  Description of Artificial Sequence: Synthetic oligonucleotide
auuauagcgcuuaucuagg

SEQ ID NO: 145843 - RNA, 19 nt, Artificial Sequence
  Description of Artificial Sequence: Synthetic oligonucleotide
ugauguugaugguuuagcu

SEQ ID NO: 145844 - RNA, 19 nt, Artificial Sequence
  Description of Artificial Sequence: Synthetic oligonucleotide
ucuucggcaagauauuuau

SEQ ID NO: 145845 - RNA, 19 nt, Artificial Sequence
  Description of Artificial Sequence: Synthetic oligonucleotide
uuauuaucuagugaugcau

SEQ ID NO: 145846 - RNA, 19 nt, Artificial Sequence
  Description of Artificial Sequence: Synthetic oligonucleotide
cucgcaaauucauacugag

SEQ ID NO: 145847 - RNA, 19 nt, Artificial Sequence
  Description of Artificial Sequence: Synthetic oligonucleotide
uauuaucuagugaugcaua

SEQ ID NO: 145848 - RNA, 19 nt, Artificial Sequence
  Description of Artificial Sequence: Synthetic oligonucleotide
uaugcuggccauuguaucu

SEQ ID NO: 145849 - RNA, 19 nt, Artificial Sequence
  Description of Artificial Sequence: Synthetic oligonucleotide
ugugaagccgauccaaaau

SEQ ID NO: 145850 - RNA, 19 nt, Artificial Sequence
  Description of Artificial Sequence: Synthetic oligonucleotide
uuuccgaaucaucuuauuu

SEQ ID NO: 145851 - RNA, 19 nt, Artificial Sequence
  Description of Artificial Sequence: Synthetic oligonucleotide
uacugacaagauaaggcgu

SEQ ID NO: 145852 - RNA, 19 nt, Artificial Sequence
  Description of Artificial Sequence: Synthetic oligonucleotide
auaaugaucuccggagcac

SEQ ID NO: 145853 - RNA, 19 nt, Artificial Sequence
  Description of Artificial Sequence: Synthetic oligonucleotide
gcaauuaccgcuuuuaaaa

SEQ ID NO: 145854 - RNA, 19 nt, Artificial Sequence
  Description of Artificial Sequence: Synthetic oligonucleotide
uagccguacacauuauagc

SEQ ID NO: 145855 - RNA, 19 nt, Artificial Sequence
  Description of Artificial Sequence: Synthetic oligonucleotide
uugaugguuuagcuuaccu

SEQ ID NO: 145856 - RNA, 19 nt, Artificial Sequence
  Description of Artificial Sequence: Synthetic oligonucleotide
uauagcgcuuaucuaggac

SEQ ID NO: 145857 - RNA, 19 nt, Artificial Sequence
  Description of Artificial Sequence: Synthetic oligonucleotide
auaucaggcgccaaaagcu

SEQ ID NO: 145858 - RNA, 19 nt, Artificial Sequence
  Description of Artificial Sequence: Synthetic oligonucleotide
aagucgcuggcacccaauc

SEQ ID NO: 145859 - RNA, 19 nt, Artificial Sequence
  Description of Artificial Sequence: Synthetic oligonucleotide
ucucgcaaauucauacuga

SEQ ID NO: 145860 - RNA, 19 nt, Artificial Sequence
  Description of Artificial Sequence: Synthetic oligonucleotide
cuguucaaccgucauuagg

SEQ ID NO: 145861 - RNA, 19 nt, Artificial Sequence
  Description of Artificial Sequence: Synthetic oligonucleotide
gcacuaucgaaauaagcag

SEQ ID NO: 145862 - RNA, 19 nt, Artificial Sequence
  Description of Artificial Sequence: Synthetic oligonucleotide
aacuaugccacagucgcaa

SEQ ID NO: 145863 - RNA, 19 nt, Artificial Sequence
  Description of Artificial Sequence: Synthetic oligonucleotide
ugcauuaucucuggcacgu

SEQ ID NO: 145864 - RNA, 19 nt, Artificial Sequence
  Description of Artificial Sequence: Synthetic oligonucleotide
cuuaucuaggacuucccca

SEQ ID NO: 145865 - RNA, 19 nt, Artificial Sequence
  Description of Artificial Sequence: Synthetic oligonucleotide
acaguaagugagugucaac

SEQ ID NO: 145866 - RNA, 19 nt, Artificial Sequence
  Description of Artificial Sequence: Synthetic oligonucleotide
aguuggauuaauggugcuc

SEQ ID NO: 145867 - RNA, 19 nt, Artificial Sequence
  Description of Artificial Sequence: Synthetic oligonucleotide
uccaucaagcgcauucgcu

SEQ ID NO: 145868 - RNA, 19 nt, Artificial Sequence
  Description of Artificial Sequence: Synthetic oligonucleotide
uuuaugcaauagacaacac

SEQ ID NO: 145869 - RNA, 19 nt, Artificial Sequence
  Description of Artificial Sequence: Synthetic oligonucleotide
auaugaggacuuucagaag

SEQ ID NO: 145870 - RNA, 19 nt, Artificial Sequence
  Description of Artificial Sequence: Synthetic oligonucleotide
aagcaauuaccgcuuuuaa

SEQ ID NO: 145871 - RNA, 19 nt, Artificial Sequence
  Description of Artificial Sequence: Synthetic oligonucleotide
uuacagccuuaauaugaag

SEQ ID NO: 145872 - RNA, 19 nt, Artificial Sequence
  Description of Artificial Sequence: Synthetic oligonucleotide
agcaauuaccgcuuuuaaa

SEQ ID NO: 145873 - RNA, 19 nt, Artificial Sequence
  Description of Artificial Sequence: Synthetic oligonucleotide
auaucgucagauucuguaa

SEQ ID NO: 145874 - RNA, 19 nt, Artificial Sequence
  Description of Artificial Sequence: Synthetic oligonucleotide
acuaucgaaauaagcagca

SEQ ID NO: 145875 - RNA, 19 nt, Artificial Sequence
  Description of Artificial Sequence: Synthetic oligonucleotide
acauaucgauaccguaguc

SEQ ID NO: 145876 - RNA, 19 nt, Artificial Sequence
  Description of Artificial Sequence: Synthetic oligonucleotide
gugaagccgauccaaaauc

SEQ ID NO: 145877 - RNA, 19 nt, Artificial Sequence
  Description of Artificial Sequence: Synthetic oligonucleotide
guacaugaaguucagauuu

SEQ ID NO: 145878 - RNA, 19 nt, Artificial Sequence
  Description of Artificial Sequence: Synthetic oligonucleotide
augaguucguuguuucuga

SEQ ID NO: 145879 - RNA, 19 nt, Artificial Sequence
  Description of Artificial Sequence: Synthetic oligonucleotide
gaacagacucccuucggca

SEQ ID NO: 145880 - RNA, 19 nt, Artificial Sequence
  Description of Artificial Sequence: Synthetic oligonucleotide
cuaugcaguuucuauguca

SEQ ID NO: 145881 - RNA, 19 nt, Artificial Sequence
  Description of Artificial Sequence: Synthetic oligonucleotide
agcgcauucgcuucaaauu

SEQ ID NO: 145882 - RNA, 19 nt, Artificial Sequence
  Description of Artificial Sequence: Synthetic oligonucleotide
ucgcaaauucauacugaga

SEQ ID NO: 145883 - RNA, 19 nt, Artificial Sequence
  Description of Artificial Sequence: Synthetic oligonucleotide
gaguucguuguuucugaug

SEQ ID NO: 145884 - RNA, 19 nt, Artificial Sequence
  Description of Artificial Sequence: Synthetic oligonucleotide
caugaguucguuguuucug

SEQ ID NO: 145885 - RNA, 19 nt, Artificial Sequence
  Description of Artificial Sequence: Synthetic oligonucleotide
cauaucgucagauucugua

SEQ ID NO: 145886 - RNA, 19 nt, Artificial Sequence
  Description of Artificial Sequence: Synthetic oligonucleotide
uucguauaaggugcaaccu

SEQ ID NO: 145887 - RNA, 19 nt, Artificial Sequence
  Description of Artificial Sequence: Synthetic oligonucleotide
uuauagcgcuuaucuagga

SEQ ID NO: 145888 - RNA, 19 nt, Artificial Sequence
  Description of Artificial Sequence: Synthetic oligonucleotide
uagcuuaccuucaguguac

SEQ ID NO: 145889 - RNA, 19 nt, Artificial Sequence
  Description of Artificial Sequence: Synthetic oligonucleotide
ggaucuuacagccuuaaua

SEQ ID NO: 145890 - RNA, 19 nt, Artificial Sequence
  Description of Artificial Sequence: Synthetic oligonucleotide
uuaucuagugaugcauacu

SEQ ID NO: 145891 - RNA, 19 nt, Artificial Sequence
  Description of Artificial Sequence: Synthetic oligonucleotide
agguuaucaucagaugaag

SEQ ID NO: 145892 - RNA, 19 nt, Artificial Sequence
  Description of Artificial Sequence: Synthetic oligonucleotide
aggaacagacucccuucgg

SEQ ID NO: 145893 - RNA, 19 nt, Artificial Sequence
  Description of Artificial Sequence: Synthetic oligonucleotide
gagacgagcacuaucgaaa

SEQ ID NO: 145894 - RNA, 19 nt, Artificial Sequence
  Description of Artificial Sequence: Synthetic oligonucleotide
guccaauuaucucugaggu

SEQ ID NO: 145895 - RNA, 19 nt, Artificial Sequence
  Description of Artificial Sequence: Synthetic oligonucleotide
ucuguucaaccgucauuag

SEQ ID NO: 145896 - RNA, 19 nt, Artificial Sequence
  Description of Artificial Sequence: Synthetic oligonucleotide
ccacauaucgauaccguag

SEQ ID NO: 145897 - RNA, 19 nt, Artificial Sequence
  Description of Artificial Sequence: Synthetic oligonucleotide
aauaucacccuugguguua

SEQ ID NO: 145898 - RNA, 19 nt, Artificial Sequence
  Description of Artificial Sequence: Synthetic oligonucleotide
ucgucagauucuguaaaca

SEQ ID NO: 145899 - RNA, 19 nt, Artificial Sequence
  Description of Artificial Sequence: Synthetic oligonucleotide
gaguggaagguuuaugccu

SEQ ID NO: 145900 - RNA, 19 nt, Artificial Sequence
  Description of Artificial Sequence: Synthetic oligonucleotide
guugaugcuaauucucuua

SEQ ID NO: 145901 - RNA, 19 nt, Artificial Sequence
  Description of Artificial Sequence: Synthetic oligonucleotide
aaggcgaacgugaucuugu

SEQ ID NO: 145902 - RNA, 19 nt, Artificial Sequence
  Description of Artificial Sequence: Synthetic oligonucleotide
aggcgcucuauccaucaag

SEQ ID NO: 145903 - RNA, 19 nt, Artificial Sequence
  Description of Artificial Sequence: Synthetic oligonucleotide
aaggugcaaccuacagacc

SEQ ID NO: 145904 - RNA, 19 nt, Artificial Sequence
  Description of Artificial Sequence: Synthetic oligonucleotide
gaagcaauuaccgcuuuua

SEQ ID NO: 145905 - RNA, 19 nt, Artificial Sequence
  Description of Artificial Sequence: Synthetic oligonucleotide
gcugcggaaauauuuauaa

SEQ ID NO: 145906 - RNA, 19 nt, Artificial Sequence
  Description of Artificial Sequence: Synthetic oligonucleotide
caacauugcugaacacgcc

SEQ ID NO: 145907 - RNA, 19 nt, Artificial Sequence
  Description of Artificial Sequence: Synthetic oligonucleotide
uggcacguacaacauugcu

SEQ ID NO: 145908 - RNA, 19 nt, Artificial Sequence
  Description of Artificial Sequence: Synthetic oligonucleotide
accuaggaaaacgugaaua

SEQ ID NO: 145909 - RNA, 19 nt, Artificial Sequence
  Description of Artificial Sequence: Synthetic oligonucleotide
cagccuuaauaugaagacc

SEQ ID NO: 145910 - RNA, 19 nt, Artificial Sequence
  Description of Artificial Sequence: Synthetic oligonucleotide
ggaacagacucccuucggc

SEQ ID NO: 145911 - RNA, 19 nt, Artificial Sequence
  Description of Artificial Sequence: Synthetic oligonucleotide
gaggcgcaagcaaugaaac

SEQ ID NO: 145912 - RNA, 19 nt, Artificial Sequence
  Description of Artificial Sequence: Synthetic oligonucleotide
auugcugucuucggcaaga

SEQ ID NO: 145913 - RNA, 19 nt, Artificial Sequence
  Description of Artificial Sequence: Synthetic oligonucleotide
aagaggcgcaagcaaugaa

SEQ ID NO: 145914 - RNA, 19 nt, Artificial Sequence
  Description of Artificial Sequence: Synthetic oligonucleotide
aggaucugguccaacaagu

SEQ ID NO: 145915 - RNA, 19 nt, Artificial Sequence
  Description of Artificial Sequence: Synthetic oligonucleotide
caucaagcgcauucgcuuc

SEQ ID NO: 145916 - RNA, 19 nt, Artificial Sequence
  Description of Artificial Sequence: Synthetic oligonucleotide
gaaggcgaacgugaucuug

SEQ ID NO: 145917 - RNA, 19 nt, Artificial Sequence
  Description of Artificial Sequence: Synthetic oligonucleotide
ucggcaagauauuuauauu

SEQ ID NO: 145918 - RNA, 19 nt, Artificial Sequence
  Description of Artificial Sequence: Synthetic oligonucleotide
uuuccaguauagaguucgu

SEQ ID NO: 145919 - RNA, 19 nt, Artificial Sequence
  Description of Artificial Sequence: Synthetic oligonucleotide
agacgagcacuaucgaaau

SEQ ID NO: 145920 - RNA, 19 nt, Artificial Sequence
  Description of Artificial Sequence: Synthetic oligonucleotide
ugcaacaugugaagccgau

SEQ ID NO: 145921 - RNA, 19 nt, Artificial Sequence
  Description of Artificial Sequence: Synthetic oligonucleotide
aggcguuaugucauuaucu

SEQ ID NO: 145922 - RNA, 19 nt, Artificial Sequence
  Description of Artificial Sequence: Synthetic oligonucleotide
auauugcugucuucggcaa

SEQ ID NO: 145923 - RNA, 19 nt, Artificial Sequence
  Description of Artificial Sequence: Synthetic oligonucleotide
caguauagaguucguauaa

SEQ ID NO: 145924 - RNA, 19 nt, Artificial Sequence
  Description of Artificial Sequence: Synthetic oligonucleotide
acugagaggcucaaauaca

SEQ ID NO: 145925 - RNA, 19 nt, Artificial Sequence
  Description of Artificial Sequence: Synthetic oligonucleotide
cuuucccgaugccagcagc

SEQ ID NO: 145926 - RNA, 19 nt, Artificial Sequence
  Description of Artificial Sequence: Synthetic oligonucleotide
auucuguucaaccgucauu

SEQ ID NO: 145927 - RNA, 19 nt, Artificial Sequence
  Description of Artificial Sequence: Synthetic oligonucleotide
augugaagccgauccaaaa

SEQ ID NO: 145928 - RNA, 19 nt, Artificial Sequence
  Description of Artificial Sequence: Synthetic oligonucleotide
ggcacguacaacauugcug

SEQ ID NO: 145929 - RNA, 19 nt, Artificial Sequence
  Description of Artificial Sequence: Synthetic oligonucleotide
uccaauuaucucugagguu

SEQ ID NO: 145930 - RNA, 19 nt, Artificial Sequence
  Description of Artificial Sequence: Synthetic oligonucleotide
gaaaacuaugcaguuucua

SEQ ID NO: 145931 - RNA, 19 nt, Artificial Sequence
  Description of Artificial Sequence: Synthetic oligonucleotide
guaaacauaucaggcgcca

SEQ ID NO: 145932 - RNA, 19 nt, Artificial Sequence
  Description of Artificial Sequence: Synthetic oligonucleotide
accacauaucgauaccgua

SEQ ID NO: 145933 - RNA, 19 nt, Artificial Sequence
  Description of Artificial Sequence: Synthetic oligonucleotide
cacccaaucaagucagcca

SEQ ID NO: 145934 - RNA, 19 nt, Artificial Sequence
  Description of Artificial Sequence: Synthetic oligonucleotide
aucaagcgcauucgcuuca

SEQ ID NO: 145935 - RNA, 19 nt, Artificial Sequence
  Description of Artificial Sequence: Synthetic oligonucleotide
gucgcuggcacccaaucaa

SEQ ID NO: 145936 - RNA, 19 nt, Artificial Sequence
  Description of Artificial Sequence: Synthetic oligonucleotide
gcucuauccaucaagcgca

SEQ ID NO: 145937 - RNA, 19 nt, Artificial Sequence
  Description of Artificial Sequence: Synthetic oligonucleotide
agaggcgcaagcaaugaaa

SEQ ID NO: 145938 - RNA, 19 nt, Artificial Sequence
  Description of Artificial Sequence: Synthetic oligonucleotide
cguauaaggugcaaccuac

SEQ ID NO: 145939 - RNA, 19 nt, Artificial Sequence
  Description of Artificial Sequence: Synthetic oligonucleotide
ugcucaugacaguaacuuu

SEQ ID NO: 145940 - RNA, 19 nt, Artificial Sequence
  Description of Artificial Sequence: Synthetic oligonucleotide
agucgcuggcacccaauca

SEQ ID NO: 145941 - RNA, 19 nt, Artificial Sequence
  Description of Artificial Sequence: Synthetic oligonucleotide
uaaacauaucaggcgccaa

SEQ ID NO: 145942 - RNA, 19 nt, Artificial Sequence
  Description of Artificial Sequence: Synthetic oligonucleotide
ggcacagauauauugcugu

SEQ ID NO: 145943 - RNA, 19 nt, Artificial Sequence
  Description of Artificial Sequence: Synthetic oligonucleotide
acgguaaaaucuacugaca

SEQ ID NO: 145944 - RNA, 19 nt, Artificial Sequence
  Description of Artificial Sequence: Synthetic oligonucleotide
uaucgauaccguagucaua

SEQ ID NO: 145945 - RNA, 19 nt, Artificial Sequence
  Description of Artificial Sequence: Synthetic oligonucleotide
cguagucauagcuuuuacc

SEQ ID NO: 145946 - RNA, 19 nt, Artificial Sequence
  Description of Artificial Sequence: Synthetic oligonucleotide
gauaccguagucauagcuu

SEQ ID NO: 145947 - RNA, 19 nt, Artificial Sequence
  Description of Artificial Sequence: Synthetic oligonucleotide
agaagcaauuaccgcuuuu

SEQ ID NO: 145948 - RNA, 19 nt, Artificial Sequence
  Description of Artificial Sequence: Synthetic oligonucleotide
cgcucuauccaucaagcgc

SEQ ID NO: 145949 - RNA, 19 nt, Artificial Sequence
  Description of Artificial Sequence: Synthetic oligonucleotide
acaaucgccugccucugua

SEQ ID NO: 145950 - RNA, 19 nt, Artificial Sequence
  Description of Artificial Sequence: Synthetic oligonucleotide
uacacugaaggcgcucuau

SEQ ID NO: 145951 - RNA, 19 nt, Artificial Sequence
  Description of Artificial Sequence: Synthetic oligonucleotide
caccucuugaucgagaccu

SEQ ID NO: 145952 - RNA, 19 nt, Artificial Sequence
  Description of Artificial Sequence: Synthetic oligonucleotide
uggcuuuuacugaggccuc

SEQ ID NO: 145953 - RNA, 19 nt, Artificial Sequence
  Description of Artificial Sequence: Synthetic oligonucleotide
ugucuucggcaagauauuu

SEQ ID NO: 145954 - RNA, 19 nt, Artificial Sequence
  Description of Artificial Sequence: Synthetic oligonucleotide
ucgauaccguagucauagc

SEQ ID NO: 145955 - RNA, 19 nt, Artificial Sequence
  Description of Artificial Sequence: Synthetic oligonucleotide
cacauaucgauaccguagu

SEQ ID NO: 145956 - RNA, 19 nt, Artificial Sequence
  Description of Artificial Sequence: Synthetic oligonucleotide
ggcgcucuauccaucaagc

SEQ ID NO: 145957 - RNA, 19 nt, Artificial Sequence
  Description of Artificial Sequence: Synthetic oligonucleotide
ccauuguaucugaagacca

SEQ ID NO: 145958 - RNA, 19 nt, Artificial Sequence
  Description of Artificial Sequence: Synthetic oligonucleotide
gcacgguaaaaucuacuga

SEQ ID NO: 145959 - RNA, 19 nt, Artificial Sequence
  Description of Artificial Sequence: Synthetic oligonucleotide
ccuuaauaugaagaccaac

SEQ ID NO: 145960 - RNA, 19 nt, Artificial Sequence
  Description of Artificial Sequence: Synthetic oligonucleotide
cucggcucagauggcacag

SEQ ID NO: 145961 - RNA, 19 nt, Artificial Sequence
  Description of Artificial Sequence: Synthetic oligonucleotide
agguugggauucucuuuga

SEQ ID NO: 145962 - RNA, 19 nt, Artificial Sequence
  Description of Artificial Sequence: Synthetic oligonucleotide
aaggcgcucuauccaucaa

SEQ ID NO: 145963 - RNA, 19 nt, Artificial Sequence
  Description of Artificial Sequence: Synthetic oligonucleotide
cacacaccuaggaaaacgu

SEQ ID NO: 145964 - RNA, 19 nt, Artificial Sequence
  Description of Artificial Sequence: Synthetic oligonucleotide
gcugacuauaggaucuuac

SEQ ID NO: 145965 - RNA, 19 nt, Artificial Sequence
  Description of Artificial Sequence: Synthetic oligonucleotide
guauaaggugcaaccuaca

SEQ ID NO: 145966 - RNA, 19 nt, Artificial Sequence
  Description of Artificial Sequence: Synthetic oligonucleotide
ggcaggcucaagaaggaac

SEQ ID NO: 145967 - RNA, 19 nt, Artificial Sequence
  Description of Artificial Sequence: Synthetic oligonucleotide
gcuggcacccaaucaaguc

SEQ ID NO: 145968 - RNA, 19 nt, Artificial Sequence
  Description of Artificial Sequence: Synthetic oligonucleotide
gcgcucuauccaucaagcg

SEQ ID NO: 145969 - RNA, 19 nt, Artificial Sequence
  Description of Artificial Sequence: Synthetic oligonucleotide
agccacucgcuccaagaua

SEQ ID NO: 145970 - RNA, 19 nt, Artificial Sequence
  Description of Artificial Sequence: Synthetic oligonucleotide
ggagacgagcacuaucgaa

SEQ ID NO: 145971 - RNA, 19 nt, Artificial Sequence
  Description of Artificial Sequence: Synthetic oligonucleotide
ccgaaucaucuuauuuggc

SEQ ID NO: 145972 - RNA, 19 nt, Artificial Sequence
  Description of Artificial Sequence: Synthetic oligonucleotide
gcaauagacaacaccuuaa

SEQ ID NO: 145973 - RNA, 19 nt, Artificial Sequence
  Description of Artificial Sequence: Synthetic oligonucleotide
cacucgcuccaagauauca

SEQ ID NO: 145974 - RNA, 19 nt, Artificial Sequence
  Description of Artificial Sequence: Synthetic oligonucleotide
acucgcuccaagauaucau

SEQ ID NO: 145975 - RNA, 19 nt, Artificial Sequence
  Description of Artificial Sequence: Synthetic oligonucleotide
cugcaacaugugaagccga

SEQ ID NO: 145976 - RNA, 19 nt, Artificial Sequence
  Description of Artificial Sequence: Synthetic oligonucleotide
caacugcugacuauaggau

SEQ ID NO: 145977 - RNA, 19 nt, Artificial Sequence
  Description of Artificial Sequence: Synthetic oligonucleotide
ucaagcgcauucgcuucaa

SEQ ID NO: 145978 - RNA, 19 nt, Artificial Sequence
  Description of Artificial Sequence: Synthetic oligonucleotide
ggcgaacgugaucuuguac

SEQ ID NO: 145979 - RNA, 19 nt, Artificial Sequence
  Description of Artificial Sequence: Synthetic oligonucleotide
agcuuaccuucaguguacu

SEQ ID NO: 145980 - RNA, 19 nt, Artificial Sequence
  Description of Artificial Sequence: Synthetic oligonucleotide
agcauuuaugcuggccauu

SEQ ID NO: 145981 - RNA, 19 nt, Artificial Sequence
  Description of Artificial Sequence: Synthetic oligonucleotide
ucuccggagcacgguaaaa

SEQ ID NO: 145982 - RNA, 19 nt, Artificial Sequence
  Description of Artificial Sequence: Synthetic oligonucleotide
gaccacauaucgauaccgu

SEQ ID NO: 145983 - RNA, 19 nt, Artificial Sequence
  Description of Artificial Sequence: Synthetic oligonucleotide
gacgagcacuaucgaaaua

SEQ ID NO: 145984 - RNA, 19 nt, Artificial Sequence
  Description of Artificial Sequence: Synthetic oligonucleotide
cuaucgaaauaagcagcaa

SEQ ID NO: 145985 - RNA, 19 nt, Artificial Sequence
  Description of Artificial Sequence: Synthetic oligonucleotide
cuauaggaucuuacagccu

SEQ ID NO: 145986 - RNA, 19 nt, Artificial Sequence
  Description of Artificial Sequence: Synthetic oligonucleotide
ugcugacuauaggaucuua

SEQ ID NO: 145987 - RNA, 19 nt, Artificial Sequence
  Description of Artificial Sequence: Synthetic oligonucleotide
gaacacgcccugcccagua

SEQ ID NO: 145988 - RNA, 19 nt, Artificial Sequence
  Description of Artificial Sequence: Synthetic oligonucleotide
ugaacacgcccugcccagu

SEQ ID NO: 145989 - RNA, 19 nt, Artificial Sequence
  Description of Artificial Sequence: Synthetic oligonucleotide
ccuaggaaaacgugaauau

SEQ ID NO: 145990 - RNA, 19 nt, Artificial Sequence
  Description of Artificial Sequence: Synthetic oligonucleotide
gucuucggcaagauauuua

SEQ ID NO: 145991 - RNA, 19 nt, Artificial Sequence
  Description of Artificial Sequence: Synthetic oligonucleotide
ggaucugguccaacaaguc

SEQ ID NO: 145992 - RNA, 19 nt, Artificial Sequence
  Description of Artificial Sequence: Synthetic oligonucleotide
caacauccuuaccauauuu

SEQ ID NO: 145993 - RNA, 19 nt, Artificial Sequence
  Description of Artificial Sequence: Synthetic oligonucleotide
aggcgaacgugaucuugua

SEQ ID NO: 145994 - RNA, 19 nt, Artificial Sequence
  Description of Artificial Sequence: Synthetic oligonucleotide
ucggcucagauggcacaga

SEQ ID NO: 145995 - RNA, 19 nt, Artificial Sequence
  Description of Artificial Sequence: Synthetic oligonucleotide
gagcacgguaaaaucuacu

SEQ ID NO: 145996 - RNA, 19 nt, Artificial Sequence
  Description of Artificial Sequence: Synthetic oligonucleotide
caaccucuauguacaugaa

SEQ ID NO: 145997 - RNA, 19 nt, Artificial Sequence
  Description of Artificial Sequence: Synthetic oligonucleotide
auggugcucaugacaguaa

SEQ ID NO: 145998 - RNA, 19 nt, Artificial Sequence
  Description of Artificial Sequence: Synthetic oligonucleotide
cgcucauuauucuuuuaca

SEQ ID NO: 145999 - RNA, 19 nt, Artificial Sequence
  Description of Artificial Sequence: Synthetic oligonucleotide
guucaaccgucauuagguu

SEQ ID NO: 146000 - RNA, 19 nt, Artificial Sequence
  Description of Artificial Sequence: Synthetic oligonucleotide
gaguucguauaaggugcaa

SEQ ID NO: 146001 - RNA, 19 nt, Artificial Sequence
  Description of Artificial Sequence: Synthetic oligonucleotide
ccguagucauagcuuuuac

SEQ ID NO: 146002 - RNA, 19 nt, Artificial Sequence
  Description of Artificial Sequence: Synthetic oligonucleotide
cacacgguaauagccuucu

SEQ ID NO: 146003 - RNA, 19 nt, Artificial Sequence
  Description of Artificial Sequence: Synthetic oligonucleotide
ccugguugaugcuaauucu

SEQ ID NO: 146004 - RNA, 19 nt, Artificial Sequence
  Description of Artificial Sequence: Synthetic oligonucleotide
ccguacacauuauagcgcu

SEQ ID NO: 146005 - RNA, 19 nt, Artificial Sequence
  Description of Artificial Sequence: Synthetic oligonucleotide
gcgcauucgcuucaaauuu

SEQ ID NO: 146006 - RNA, 19 nt, Artificial Sequence
  Description of Artificial Sequence: Synthetic oligonucleotide
cagcauuuaugcuggccau

SEQ ID NO: 146007 - RNA, 19 nt, Artificial Sequence
  Description of Artificial Sequence: Synthetic oligonucleotide
gccacucgcuccaagauau

SEQ ID NO: 146008 - RNA, 19 nt, Artificial Sequence
  Description of Artificial Sequence: Synthetic oligonucleotide
cugcuccgucuccuaugac

SEQ ID NO: 146009 - RNA, 19 nt, Artificial Sequence
  Description of Artificial Sequence: Synthetic oligonucleotide
caguauagccguacacauu

SEQ ID NO: 146010 - RNA, 19 nt, Artificial Sequence
  Description of Artificial Sequence: Synthetic oligonucleotide
cugucuucggcaagauauu

SEQ ID NO: 146011 - RNA, 19 nt, Artificial Sequence
  Description of Artificial Sequence: Synthetic oligonucleotide
ccgucauuagguuaugcuu

SEQ ID NO: 146012 - RNA, 19 nt, Artificial Sequence
  Description of Artificial Sequence: Synthetic oligonucleotide
gcaugaguucguuguuucu

SEQ ID NO: 146013 - RNA, 19 nt, Artificial Sequence
  Description of Artificial Sequence: Synthetic oligonucleotide
cggcaagauauuuauauuu

SEQ ID NO: 146014 - RNA, 19 nt, Artificial Sequence
  Description of Artificial Sequence: Synthetic oligonucleotide
agcccggagacgagcacua

SEQ ID NO: 146015 - RNA, 19 nt, Artificial Sequence
  Description of Artificial Sequence: Synthetic oligonucleotide
caagcgcauucgcuucaaa

SEQ ID NO: 146016 - RNA, 19 nt, Artificial Sequence
  Description of Artificial Sequence: Synthetic oligonucleotide
gcuacucauaacagaugcu

SEQ ID NO: 146017 - RNA, 19 nt, Artificial Sequence
  Description of Artificial Sequence: Synthetic oligonucleotide
caaucgccugccucuguau

SEQ ID NO: 146018 - RNA, 19 nt, Artificial Sequence
  Description of Artificial Sequence: Synthetic oligonucleotide
cgauaccguagucauagcu

SEQ ID NO: 146019 - RNA, 19 nt, Artificial Sequence
  Description of Artificial Sequence: Synthetic oligonucleotide
cucuauccaucaagcgcau

SEQ ID NO: 146020 - RNA, 19 nt, Artificial Sequence
  Description of Artificial Sequence: Synthetic oligonucleotide
gguccuuaguuggauuaau

SEQ ID NO: 146021 - RNA, 19 nt, Artificial Sequence
  Description of Artificial Sequence: Synthetic oligonucleotide
cggagacgagcacuaucga

SEQ ID NO: 146022 - RNA, 19 nt, Artificial Sequence
  Description of Artificial Sequence: Synthetic oligonucleotide
ccgaugccagcagcccgga

SEQ ID NO: 146023 - RNA, 19 nt, Artificial Sequence
  Description of Artificial Sequence: Synthetic oligonucleotide
gcccggagacgagcacuau

SEQ ID NO: 146024 - RNA, 19 nt, Artificial Sequence
  Description of Artificial Sequence: Synthetic oligonucleotide
aaauauuacugauggacag

SEQ ID NO: 146025 - RNA, 19 nt, Artificial Sequence
  Description of Artificial Sequence: Synthetic oligonucleotide
auuacguccgcccugaagg

SEQ ID NO: 146026 - RNA, 19 nt, Artificial Sequence
  Description of Artificial Sequence: Synthetic oligonucleotide
uuagcuaucagggagagga

SEQ ID NO: 146027 - RNA, 19 nt, Artificial Sequence
  Description of Artificial Sequence: Synthetic oligonucleotide
guuguugugacccacacug

SEQ ID NO: 146028 - RNA, 19 nt, Artificial Sequence
  Description of Artificial Sequence: Synthetic oligonucleotide
gcaacaucgaaccagaacg

SEQ ID NO: 146029 - RNA, 19 nt, Artificial Sequence
  Description of Artificial Sequence: Synthetic oligonucleotide
guagccauaaaacuggaag

SEQ ID NO: 146030 - RNA, 19 nt, Artificial Sequence
  Description of Artificial Sequence: Synthetic oligonucleotide
aaugagaccucuucuaccu

SEQ ID NO: 146031 - RNA, 19 nt, Artificial Sequence
  Description of Artificial Sequence: Synthetic oligonucleotide
aauaacggugacuggaaga

SEQ ID NO: 146032 - RNA, 19 nt, Artificial Sequence
  Description of Artificial Sequence: Synthetic oligonucleotide
acacugagcacuugaacac

SEQ ID NO: 146033 - RNA, 19 nt, Artificial Sequence
  Description of Artificial Sequence: Synthetic oligonucleotide
uguucaucggugaaaggug

SEQ ID NO: 146034 - RNA, 19 nt, Artificial Sequence
  Description of Artificial Sequence: Synthetic oligonucleotide
auacggucauuauggagcc

SEQ ID NO: 146035 - RNA, 19 nt, Artificial Sequence
  Description of Artificial Sequence: Synthetic oligonucleotide
auugcacgcugguaggugc

SEQ ID NO: 146036 - RNA, 19 nt, Artificial Sequence
  Description of Artificial Sequence: Synthetic oligonucleotide
agaacgccaagccauggac

SEQ ID NO: 146037 - RNA, 19 nt, Artificial Sequence
  Description of Artificial Sequence: Synthetic oligonucleotide
ggaaauauuacugauggac

SEQ ID NO: 146038 - RNA, 19 nt, Artificial Sequence
  Description of Artificial Sequence: Synthetic oligonucleotide
ugucucucgagacacugag

SEQ ID NO: 146039 - RNA, 19 nt, Artificial Sequence
  Description of Artificial Sequence: Synthetic oligonucleotide
gcaauaagcagacaugucc

SEQ ID NO: 146040 - RNA, 19 nt, Artificial Sequence
  Description of Artificial Sequence: Synthetic oligonucleotide
uagugcaugguguugguug

SEQ ID NO: 146041 - RNA, 19 nt, Artificial Sequence
  Description of Artificial Sequence: Synthetic oligonucleotide
aggucuacuccauggaagg

SEQ ID NO: 146042 - RNA, 19 nt, Artificial Sequence
  Description of Artificial Sequence: Synthetic oligonucleotide
aaaagggguucuucagauc

SEQ ID NO: 146043 - RNA, 19 nt, Artificial Sequence
  Description of Artificial Sequence: Synthetic oligonucleotide
uucagauccagcagguuac

SEQ ID NO: 146044 - RNA, 19 nt, Artificial Sequence
  Description of Artificial Sequence: Synthetic oligonucleotide
auaacggugacuggaagag

SEQ ID NO: 146045 - RNA, 19 nt, Artificial Sequence
  Description of Artificial Sequence: Synthetic oligonucleotide
aacgccaagccauggacca

SEQ ID NO: 146046 - RNA, 19 nt, Artificial Sequence
  Description of Artificial Sequence: Synthetic oligonucleotide
ucuacuccauggaaggaug

SEQ ID NO: 146047 - RNA, 19 nt, Artificial Sequence
  Description of Artificial Sequence: Synthetic oligonucleotide
agaacagaaaucguggggu

SEQ ID NO: 146048 - RNA, 19 nt, Artificial Sequence
  Description of Artificial Sequence: Synthetic oligonucleotide
caggauugcacgcugguag

SEQ ID NO: 146049 - RNA, 19 nt, Artificial Sequence
  Description of Artificial Sequence: Synthetic oligonucleotide
uuugucuaccccacuggcc

SEQ ID NO: 146050 - RNA, 19 nt, Artificial Sequence
  Description of Artificial Sequence: Synthetic oligonucleotide
aaguucccauagcaaagag

SEQ ID NO: 146051 - RNA, 19 nt, Artificial Sequence
  Description of Artificial Sequence: Synthetic oligonucleotide
agauuguaggugcuucccg

SEQ ID NO: 146052 - RNA, 19 nt, Artificial Sequence
  Description of Artificial Sequence: Synthetic oligonucleotide
uuucccuuacaggucaggg

SEQ ID NO: 146053 - RNA, 19 nt, Artificial Sequence
  Description of Artificial Sequence: Synthetic oligonucleotide
uauucucggagggagaugu

SEQ ID NO: 146054 - RNA, 19 nt, Artificial Sequence
  Description of Artificial Sequence: Synthetic oligonucleotide
aucguguacaaaagugucc

SEQ ID NO: 146055 - RNA, 19 nt, Artificial Sequence
  Description of Artificial Sequence: Synthetic oligonucleotide
aggcuagaggccuuuggac

SEQ ID NO: 146056 - RNA, 19 nt, Artificial Sequence
  Description of Artificial Sequence: Synthetic oligonucleotide
uagccauacggucauuaug

SEQ ID NO: 146057 - RNA, 19 nt, Artificial Sequence
  Description of Artificial Sequence: Synthetic oligonucleotide
agcuguaagaguggggugg

SEQ ID NO: 146058 - RNA, 19 nt, Artificial Sequence
  Description of Artificial Sequence: Synthetic oligonucleotide
caaugagaccucuucuacc

SEQ ID NO: 146059 - RNA, 19 nt, Artificial Sequence
  Description of Artificial Sequence: Synthetic oligonucleotide
agcgacacgcacucagggc

SEQ ID NO: 146060 - RNA, 19 nt, Artificial Sequence
  Description of Artificial Sequence: Synthetic oligonucleotide
ggcuaagggaaucagguug

SEQ ID NO: 146061 - RNA, 19 nt, Artificial Sequence
  Description of Artificial Sequence: Synthetic oligonucleotide
gauuacguccgcccugaag

SEQ ID NO: 146062 - RNA, 19 nt, Artificial Sequence
  Description of Artificial Sequence: Synthetic oligonucleotide
gugauugacaaucccugug

SEQ ID NO: 146063 - RNA, 19 nt, Artificial Sequence
  Description of Artificial Sequence: Synthetic oligonucleotide
caacaucgaaccagaacgc

SEQ ID NO: 146064 - RNA, 19 nt, Artificial Sequence
  Description of Artificial Sequence: Synthetic oligonucleotide
gaacagaaaucguggggug

SEQ ID NO: 146065 - RNA, 19 nt, Artificial Sequence
  Description of Artificial Sequence: Synthetic oligonucleotide
aggauugcacgcugguagg

SEQ ID NO: 146066 - RNA, 19 nt, Artificial Sequence
  Description of Artificial Sequence: Synthetic oligonucleotide
caugucacgcccaugguga

SEQ ID NO: 146067 - RNA, 19 nt, Artificial Sequence
  Description of Artificial Sequence: Synthetic oligonucleotide
cuaugcaaaggugauccag

SEQ ID NO: 146068 - RNA, 19 nt, Artificial Sequence
  Description of Artificial Sequence: Synthetic oligonucleotide
ugccuguccgcacauaguc

SEQ ID NO: 146069 - RNA, 19 nt, Artificial Sequence
  Description of Artificial Sequence: Synthetic oligonucleotide
gugggugugauugacaauc

SEQ ID NO: 146070 - RNA, 19 nt, Artificial Sequence
  Description of Artificial Sequence: Synthetic oligonucleotide
gaggggauuacguccgccc

SEQ ID NO: 146071 - RNA, 19 nt, Artificial Sequence
  Description of Artificial Sequence: Synthetic oligonucleotide
agccuuggcaaauaacggu

SEQ ID NO: 146072 - RNA, 19 nt, Artificial Sequence
  Description of Artificial Sequence: Synthetic oligonucleotide
uguuagcuaucagggagag

SEQ ID NO: 146073 - RNA, 19 nt, Artificial Sequence
  Description of Artificial Sequence: Synthetic oligonucleotide
ugugaccggguguucacgc

SEQ ID NO: 146074 - RNA, 19 nt, Artificial Sequence
  Description of Artificial Sequence: Synthetic oligonucleotide
uguaagagugggguggggu

SEQ ID NO: 146075 - RNA, 19 nt, Artificial Sequence
  Description of Artificial Sequence: Synthetic oligonucleotide
aacagaaaucguggggugu

SEQ ID NO: 146076 - RNA, 19 nt, Artificial Sequence
  Description of Artificial Sequence: Synthetic oligonucleotide
aaaucgugggguguggcaa

SEQ ID NO: 146077 - RNA, 19 nt, Artificial Sequence
  Description of Artificial Sequence: Synthetic oligonucleotide
cuacuccauggaaggaugg

SEQ ID NO: 146078 - RNA, 19 nt, Artificial Sequence
  Description of Artificial Sequence: Synthetic oligonucleotide
uuuagggcucaggacagga

SEQ ID NO: 146079 - RNA, 19 nt, Artificial Sequence
  Description of Artificial Sequence: Synthetic oligonucleotide
ucgagcaugcguucauuga

SEQ ID NO: 146080 - RNA, 19 nt, Artificial Sequence
  Description of Artificial Sequence: Synthetic oligonucleotide
ugggcguggacuucauuug

SEQ ID NO: 146081 - RNA, 19 nt, Artificial Sequence
  Description of Artificial Sequence: Synthetic oligonucleotide
uucaucggugaaaggugca

SEQ ID NO: 146082 - RNA, 19 nt, Artificial Sequence
  Description of Artificial Sequence: Synthetic oligonucleotide
uguuggcuaagggaaucag

SEQ ID NO: 146083 - RNA, 19 nt, Artificial Sequence
  Description of Artificial Sequence: Synthetic oligonucleotide
cuagggcaaaggagcaggg

SEQ ID NO: 146084 - RNA, 19 nt, Artificial Sequence
  Description of Artificial Sequence: Synthetic oligonucleotide
gaaccagaacgccaagcca

SEQ ID NO: 146085 - RNA, 19 nt, Artificial Sequence
  Description of Artificial Sequence: Synthetic oligonucleotide
gaaaucgugggguguggca

SEQ ID NO: 146086 - RNA, 19 nt, Artificial Sequence
  Description of Artificial Sequence: Synthetic oligonucleotide
agggaaucagguuguugug

SEQ ID NO: 146087 - RNA, 19 nt, Artificial Sequence
  Description of Artificial Sequence: Synthetic oligonucleotide
ggugauggagucgugcccg

SEQ ID NO: 146088 - RNA, 19 nt, Artificial Sequence
  Description of Artificial Sequence: Synthetic oligonucleotide
ucuaugcaaaggugaucca

SEQ ID NO: 146089 - RNA, 19 nt, Artificial Sequence
  Description of Artificial Sequence: Synthetic oligonucleotide
gaggcaccggaccugguac

SEQ ID NO: 146090 - RNA, 19 nt, Artificial Sequence
  Description of Artificial Sequence: Synthetic oligonucleotide
auaagcagacaugucccug

SEQ ID NO: 146091 - RNA, 19 nt, Artificial Sequence
  Description of Artificial Sequence: Synthetic oligonucleotide
agcaugaauguggagugca

SEQ ID NO: 146092 - RNA, 19 nt, Artificial Sequence
  Description of Artificial Sequence: Synthetic oligonucleotide
guucaucggugaaaggugc

SEQ ID NO: 146093 - RNA, 19 nt, Artificial Sequence
  Description of Artificial Sequence: Synthetic oligonucleotide
ggaaucagguuguugugac

SEQ ID NO: 146094 - RNA, 19 nt, Artificial Sequence
  Description of Artificial Sequence: Synthetic oligonucleotide
cucggagggagauguguag

SEQ ID NO: 146095 - RNA, 19 nt, Artificial Sequence
  Description of Artificial Sequence: Synthetic oligonucleotide
guucgcucacugaacacag

SEQ ID NO: 146096 - RNA, 19 nt, Artificial Sequence
  Description of Artificial Sequence: Synthetic oligonucleotide
guugugacccacacuggag

SEQ ID NO: 146097 - RNA, 19 nt, Artificial Sequence
  Description of Artificial Sequence: Synthetic oligonucleotide
gauuguaggugcuucccgu

SEQ ID NO: 146098 - RNA, 19 nt, Artificial Sequence
  Description of Artificial Sequence: Synthetic oligonucleotide
gaacgccaagccauggacc

SEQ ID NO: 146099 - RNA, 19 nt, Artificial Sequence
  Description of Artificial Sequence: Synthetic oligonucleotide
guaccuguggggcucuggc

SEQ ID NO: 146100 - RNA, 19 nt, Artificial Sequence
  Description of Artificial Sequence: Synthetic oligonucleotide
auagccauacggucauuau

SEQ ID NO: 146101 - RNA, 19 nt, Artificial Sequence
  Description of Artificial Sequence: Synthetic oligonucleotide
agaggggauuacguccgcc

SEQ ID NO: 146102 - RNA, 19 nt, Artificial Sequence
  Description of Artificial Sequence: Synthetic oligonucleotide
ggcgacaucguguacaaaa

SEQ ID NO: 146103 - RNA, 19 nt, Artificial Sequence
  Description of Artificial Sequence: Synthetic oligonucleotide
aaucgugggguguggcaaa

SEQ ID NO: 146104 - RNA, 19 nt, Artificial Sequence
  Description of Artificial Sequence: Synthetic oligonucleotide
gcaaauaacggugacugga

SEQ ID NO: 146105 - RNA, 19 nt, Artificial Sequence
  Description of Artificial Sequence: Synthetic oligonucleotide
gauugcacgcugguaggug

SEQ ID NO: 146106 - RNA, 19 nt, Artificial Sequence
  Description of Artificial Sequence: Synthetic oligonucleotide
uaccccacuggcccuaggu

SEQ ID NO: 146107 - RNA, 19 nt, Artificial Sequence
  Description of Artificial Sequence: Synthetic oligonucleotide
uuuggugagaggggauuac

SEQ ID NO: 146108 - RNA, 19 nt, Artificial Sequence
  Description of Artificial Sequence: Synthetic oligonucleotide
aggggagaaacugccuuuc

SEQ ID NO: 146109 - RNA, 19 nt, Artificial Sequence
  Description of Artificial Sequence: Synthetic oligonucleotide
acaaugcccgugcucauua

SEQ ID NO: 146110 - RNA, 19 nt, Artificial Sequence
  Description of Artificial Sequence: Synthetic oligonucleotide
gcgacacgcacucagggcc

SEQ ID NO: 146111 - RNA, 19 nt, Artificial Sequence
  Description of Artificial Sequence: Synthetic oligonucleotide
gcaaugagaccucuucuac

SEQ ID NO: 146112 - RNA, 19 nt, Artificial Sequence
  Description of Artificial Sequence: Synthetic oligonucleotide
aggccuauguuagcuauca

SEQ ID NO: 146113 - RNA, 19 nt, Artificial Sequence
  Description of Artificial Sequence: Synthetic oligonucleotide
ggagccgccagcaauaaca

SEQ ID NO: 146114 - RNA, 19 nt, Artificial Sequence
  Description of Artificial Sequence: Synthetic oligonucleotide
cgauaggucuacuccaugg

SEQ ID NO: 146115 - RNA, 19 nt, Artificial Sequence
  Description of Artificial Sequence: Synthetic oligonucleotide
cugaaagcguguccccagc

SEQ ID NO: 146116 - RNA, 19 nt, Artificial Sequence
  Description of Artificial Sequence: Synthetic oligonucleotide
uuacuggauuuggagccug

SEQ ID NO: 146117 - RNA, 19 nt, Artificial Sequence
  Description of Artificial Sequence: Synthetic oligonucleotide
gauggcagggccacccaug

SEQ ID NO: 146118 - RNA, 19 nt, Artificial Sequence
  Description of Artificial Sequence: Synthetic oligonucleotide
cagguugccggaaguacuc

SEQ ID NO: 146119 - RNA, 19 nt, Artificial Sequence
  Description of Artificial Sequence: Synthetic oligonucleotide
caccccgcugcugagauug

SEQ ID NO: 146120 - RNA, 19 nt, Artificial Sequence
  Description of Artificial Sequence: Synthetic oligonucleotide
caucggugaaaggugcaag

SEQ ID NO: 146121 - RNA, 19 nt, Artificial Sequence
  Description of Artificial Sequence: Synthetic oligonucleotide
gguuacuugagggcagcgg

SEQ ID NO: 146122 - RNA, 19 nt, Artificial Sequence
  Description of Artificial Sequence: Synthetic oligonucleotide
uggcuucuaagaaguucac

SEQ ID NO: 146123 - RNA, 19 nt, Artificial Sequence
  Description of Artificial Sequence: Synthetic oligonucleotide
auguuagcuaucagggaga

SEQ ID NO: 146124 - RNA, 19 nt, Artificial Sequence
  Description of Artificial Sequence: Synthetic oligonucleotide
caauaacacugcucagguc

SEQ ID NO: 146125 - RNA, 19 nt, Artificial Sequence
  Description of Artificial Sequence: Synthetic oligonucleotide
gauagccauacggucauua

SEQ ID NO: 146126 - RNA, 19 nt, Artificial Sequence
  Description of Artificial Sequence: Synthetic oligonucleotide
aggggauuacguccgcccu

SEQ ID NO: 146127 - RNA, 19 nt, Artificial Sequence
  Description of Artificial Sequence: Synthetic oligonucleotide
cuagcucccguagugcaug

SEQ ID NO: 146128 - RNA, 19 nt, Artificial Sequence
  Description of Artificial Sequence: Synthetic oligonucleotide
ugcaugguguugguuggga

SEQ ID NO: 146129 - RNA, 19 nt, Artificial Sequence
  Description of Artificial Sequence: Synthetic oligonucleotide
ucccugaaagcgugucccc

SEQ ID NO: 146130 - RNA, 19 nt, Artificial Sequence
  Description of Artificial Sequence: Synthetic oligonucleotide
cacagguugccggaaguac

SEQ ID NO: 146131 - RNA, 19 nt, Artificial Sequence
  Description of Artificial Sequence: Synthetic oligonucleotide
agcggcgacaucguguaca

SEQ ID NO: 146132 - RNA, 19 nt, Artificial Sequence
  Description of Artificial Sequence: Synthetic oligonucleotide
ugcccgugcucauuaugga

SEQ ID NO: 146133 - RNA, 19 nt, Artificial Sequence
  Description of Artificial Sequence: Synthetic oligonucleotide
aggugauccagagaauuua

SEQ ID NO: 146134 - RNA, 19 nt, Artificial Sequence
  Description of Artificial Sequence: Synthetic oligonucleotide
ugguaggugccuguccgca

SEQ ID NO: 146135 - RNA, 19 nt, Artificial Sequence
  Description of Artificial Sequence: Synthetic oligonucleotide
uagcucccguagugcaugg

SEQ ID NO: 146136 - RNA, 19 nt, Artificial Sequence
  Description of Artificial Sequence: Synthetic oligonucleotide
uucgcucacugaacacaga

SEQ ID NO: 146137 - RNA, 19 nt, Artificial Sequence
  Description of Artificial Sequence: Synthetic oligonucleotide
gcaugucacgcccauggug

SEQ ID NO: 146138 - RNA, 19 nt, Artificial Sequence
  Description of Artificial Sequence: Synthetic oligonucleotide
aguaccuguggggcucugg

SEQ ID NO: 146139 - RNA, 19 nt, Artificial Sequence
  Description of Artificial Sequence: Synthetic oligonucleotide
ugaccggguguucacgcuu

SEQ ID NO: 146140 - RNA, 19 nt, Artificial Sequence
  Description of Artificial Sequence: Synthetic oligonucleotide
ugcugccacccuaggugag

SEQ ID NO: 146141 - RNA, 19 nt, Artificial Sequence
  Description of Artificial Sequence: Synthetic oligonucleotide
guuagcuaucagggagagg

SEQ ID NO: 146142 - RNA, 19 nt, Artificial Sequence
  Description of Artificial Sequence: Synthetic oligonucleotide
gauggagucgugcccgugu

SEQ ID NO: 146143 - RNA, 19 nt, Artificial Sequence
  Description of Artificial Sequence: Synthetic oligonucleotide
gaaagcguguccccagccu

SEQ ID NO: 146144 - RNA, 19 nt, Artificial Sequence
  Description of Artificial Sequence: Synthetic oligonucleotide
uggagucgugcccguguac

SEQ ID NO: 146145 - RNA, 19 nt, Artificial Sequence
  Description of Artificial Sequence: Synthetic oligonucleotide
auguguagugugagccagg

SEQ ID NO: 146146 - RNA, 19 nt, Artificial Sequence
  Description of Artificial Sequence: Synthetic oligonucleotide
gggugugauugacaauccc

SEQ ID NO: 146147 - RNA, 19 nt, Artificial Sequence
  Description of Artificial Sequence: Synthetic oligonucleotide
ggagucgugcccguguacc

SEQ ID NO: 146148 - RNA, 19 nt, Artificial Sequence
  Description of Artificial Sequence: Synthetic oligonucleotide
uagcuaucagggagaggau

SEQ ID NO: 146149 - RNA, 19 nt, Artificial Sequence
  Description of Artificial Sequence: Synthetic oligonucleotide
gcgacaucguguacaaaag

SEQ ID NO: 146150 - RNA, 19 nt, Artificial Sequence
  Description of Artificial Sequence: Synthetic oligonucleotide
gggguaggugcaaggacgg

SEQ ID NO: 146151 - RNA, 19 nt, Artificial Sequence
  Description of Artificial Sequence: Synthetic oligonucleotide
gcucccguagugcauggug

SEQ ID NO: 146152 - RNA, 19 nt, Artificial Sequence
  Description of Artificial Sequence: Synthetic oligonucleotide
gagaggggauuacguccgc

SEQ ID NO: 146153 - RNA, 19 nt, Artificial Sequence
  Description of Artificial Sequence: Synthetic oligonucleotide
ucccguagugcaugguguu

SEQ ID NO: 146154 - RNA, 19 nt, Artificial Sequence
  Description of Artificial Sequence: Synthetic oligonucleotide
ccgugcucauuauggagcc

SEQ ID NO: 146155 - RNA, 19 nt, Artificial Sequence
  Description of Artificial Sequence: Synthetic oligonucleotide
agucgugcccguguaccug

SEQ ID NO: 146156 - RNA, 19 nt, Artificial Sequence
  Description of Artificial Sequence: Synthetic oligonucleotide
gcccgugcucauuauggag

SEQ ID NO: 146157 - RNA, 19 nt, Artificial Sequence
  Description of Artificial Sequence: Synthetic oligonucleotide
caggccuauguuagcuauc

SEQ ID NO: 146158 - RNA, 19 nt, Artificial Sequence
  Description of Artificial Sequence: Synthetic oligonucleotide
ggacgucaccaaugguggg

SEQ ID NO: 146159 - RNA, 19 nt, Artificial Sequence
  Description of Artificial Sequence: Synthetic oligonucleotide
uggagccgccagcaauaac

SEQ ID NO: 146160 - RNA, 19 nt, Artificial Sequence
  Description of Artificial Sequence: Synthetic oligonucleotide
cugagcacuugaacacaca

SEQ ID NO: 146161 - RNA, 19 nt, Artificial Sequence
  Description of Artificial Sequence: Synthetic oligonucleotide
ggggauuacguccgcccug

SEQ ID NO: 146162 - RNA, 19 nt, Artificial Sequence
  Description of Artificial Sequence: Synthetic oligonucleotide
gucucucgagacacugagc

SEQ ID NO: 146163 - RNA, 19 nt, Artificial Sequence
  Description of Artificial Sequence: Synthetic oligonucleotide
cugggcguggacuucauuu

SEQ ID NO: 146164 - RNA, 19 nt, Artificial Sequence
  Description of Artificial Sequence: Synthetic oligonucleotide
cagccggguuucucagagg

SEQ ID NO: 146165 - RNA, 19 nt, Artificial Sequence
  Description of Artificial Sequence: Synthetic oligonucleotide
accucggcaugcugagcca

SEQ ID NO: 146166 - RNA, 19 nt, Artificial Sequence
  Description of Artificial Sequence: Synthetic oligonucleotide
gguagcucucgagcaugcg

SEQ ID NO: 146167 - RNA, 19 nt, Artificial Sequence
  Description of Artificial Sequence: Synthetic oligonucleotide
cacugagcacuugaacaca

SEQ ID NO: 146168 - RNA, 19 nt, Artificial Sequence
  Description of Artificial Sequence: Synthetic oligonucleotide
ucgagacacugagcacuug

SEQ ID NO: 146169 - RNA, 19 nt, Artificial Sequence
  Description of Artificial Sequence: Synthetic oligonucleotide
gugcuucccguguuccaca

SEQ ID NO: 146170 - RNA, 19 nt, Artificial Sequence
  Description of Artificial Sequence: Synthetic oligonucleotide
cuguuacagcccaguguga

SEQ ID NO: 146171 - RNA, 19 nt, Artificial Sequence
  Description of Artificial Sequence: Synthetic oligonucleotide
cuuuggugagaggggauua

SEQ ID NO: 146172 - RNA, 19 nt, Artificial Sequence
  Description of Artificial Sequence: Synthetic oligonucleotide
uacggucauuauggagcca

SEQ ID NO: 146173 - RNA, 19 nt, Artificial Sequence
  Description of Artificial Sequence: Synthetic oligonucleotide
gguaggugccuguccgcac

SEQ ID NO: 146174 - RNA, 19 nt, Artificial Sequence
  Description of Artificial Sequence: Synthetic oligonucleotide
gagucgugcccguguaccu

SEQ ID NO: 146175 - RNA, 19 nt, Artificial Sequence
  Description of Artificial Sequence: Synthetic oligonucleotide
acggugacuggaagaggca

SEQ ID NO: 146176 - RNA, 19 nt, Artificial Sequence
  Description of Artificial Sequence: Synthetic oligonucleotide
gcccacgucgagaacaauc

SEQ ID NO: 146177 - RNA, 19 nt, Artificial Sequence
  Description of Artificial Sequence: Synthetic oligonucleotide
accggaccugguaccagug

SEQ ID NO: 146178 - RNA, 19 nt, Artificial Sequence
  Description of Artificial Sequence: Synthetic oligonucleotide
accggguguucacgcuucu

SEQ ID NO: 146179 - RNA, 19 nt, Artificial Sequence
  Description of Artificial Sequence: Synthetic oligonucleotide
ccgagcaggaaauauuacu

SEQ ID NO: 146180 - RNA, 19 nt, Artificial Sequence
  Description of Artificial Sequence: Synthetic oligonucleotide
gggauuacguccgcccuga

SEQ ID NO: 146181 - RNA, 19 nt, Artificial Sequence
  Description of Artificial Sequence: Synthetic oligonucleotide
cuaccccacuggcccuagg

SEQ ID NO: 146182 - RNA, 19 nt, Artificial Sequence
  Description of Artificial Sequence: Synthetic oligonucleotide
gcuaagggaaucagguugu

SEQ ID NO: 146183 - RNA, 19 nt, Artificial Sequence
  Description of Artificial Sequence: Synthetic oligonucleotide
gcauuccggccacagccac

SEQ ID NO: 146184 - RNA, 19 nt, Artificial Sequence
  Description of Artificial Sequence: Synthetic oligonucleotide
ccagaacgccaagccaugg

SEQ ID NO: 146185 - RNA, 19 nt, Artificial Sequence
  Description of Artificial Sequence: Synthetic oligonucleotide
guaggugcaaggacggguu

SEQ ID NO: 146186 - RNA, 19 nt, Artificial Sequence
  Description of Artificial Sequence: Synthetic oligonucleotide
caagguggacgucaccaau

SEQ ID NO: 146187 - RNA, 19 nt, Artificial Sequence
  Description of Artificial Sequence: Synthetic oligonucleotide
cccacgucgagaacaaucu

SEQ ID NO: 146188 - RNA, 19 nt, Artificial Sequence
  Description of Artificial Sequence: Synthetic oligonucleotide
uccgggagugggugugauu

SEQ ID NO: 146189 - RNA, 19 nt, Artificial Sequence
  Description of Artificial Sequence: Synthetic oligonucleotide
cagagggucuguggguuga

SEQ ID NO: 146190 - RNA, 19 nt, Artificial Sequence
  Description of Artificial Sequence: Synthetic oligonucleotide
cagcccacgucgagaacaa

SEQ ID NO: 146191 - RNA, 19 nt, Artificial Sequence
  Description of Artificial Sequence: Synthetic oligonucleotide
ccgauaggucuacuccaug

SEQ ID NO: 146192 - RNA, 19 nt, Artificial Sequence
  Description of Artificial Sequence: Synthetic oligonucleotide
ggugauccagagaauuuau

SEQ ID NO: 146193 - RNA, 19 nt, Artificial Sequence
  Description of Artificial Sequence: Synthetic oligonucleotide
gugaccggguguucacgcu

SEQ ID NO: 146194 - RNA, 19 nt, Artificial Sequence
  Description of Artificial Sequence: Synthetic oligonucleotide
ggagggagauguguagugu

SEQ ID NO: 146195 - RNA, 19 nt, Artificial Sequence
  Description of Artificial Sequence: Synthetic oligonucleotide
gacaaugcccgugcucauu

SEQ ID NO: 146196 - RNA, 19 nt, Artificial Sequence
  Description of Artificial Sequence: Synthetic oligonucleotide
gcggcgacaucguguacaa

SEQ ID NO: 146197 - RNA, 19 nt, Artificial Sequence
  Description of Artificial Sequence: Synthetic oligonucleotide
agcucccguagugcauggu

SEQ ID NO: 146198 - RNA, 19 nt, Artificial Sequence
  Description of Artificial Sequence: Synthetic oligonucleotide
caccggaccugguaccagu

SEQ ID NO: 146199 - RNA, 19 nt, Artificial Sequence
  Description of Artificial Sequence: Synthetic oligonucleotide
cccguguuccacauauucu

SEQ ID NO: 146200 - RNA, 19 nt, Artificial Sequence
  Description of Artificial Sequence: Synthetic oligonucleotide
cccguagugcaugguguug

SEQ ID NO: 146201 - RNA, 19 nt, Artificial Sequence
  Description of Artificial Sequence: Synthetic oligonucleotide
ggcaccggaccugguacca

SEQ ID NO: 146202 - RNA, 19 nt, Artificial Sequence
  Description of Artificial Sequence: Synthetic oligonucleotide
cucucgagcaugcguucau

SEQ ID NO: 146203 - RNA, 19 nt, Artificial Sequence
  Description of Artificial Sequence: Synthetic oligonucleotide
ggagggccgauaggucuac

SEQ ID NO: 146204 - RNA, 19 nt, Artificial Sequence
  Description of Artificial Sequence: Synthetic oligonucleotide
gguggacgucaccaauggu

SEQ ID NO: 146205 - RNA, 19 nt, Artificial Sequence
  Description of Artificial Sequence: Synthetic oligonucleotide
cagcggcgacaucguguac

SEQ ID NO: 146206 - RNA, 19 nt, Artificial Sequence
  Description of Artificial Sequence: Synthetic oligonucleotide
cuggagccgccagcaauaa

SEQ ID NO: 146207 - RNA, 19 nt, Artificial Sequence
  Description of Artificial Sequence: Synthetic oligonucleotide
gcaccggaccugguaccag

SEQ ID NO: 146208 - RNA, 19 nt, Artificial Sequence
  Description of Artificial Sequence: Synthetic oligonucleotide
ggaccucggcaugcugagc

SEQ ID NO: 146209 - RNA, 19 nt, Artificial Sequence
  Description of Artificial Sequence: Synthetic oligonucleotide
ggauugcacgcugguaggu

SEQ ID NO: 146210 - RNA, 19 nt, Artificial Sequence
  Description of Artificial Sequence: Synthetic oligonucleotide
ccuagaaccucugggccua

SEQ ID NO: 146211 - RNA, 19 nt, Artificial Sequence
  Description of Artificial Sequence: Synthetic oligonucleotide
uggcagcuacuggccuccu

SEQ ID NO: 146212 - RNA, 19 nt, Artificial Sequence
  Description of Artificial Sequence: Synthetic oligonucleotide
gucuaccccacuggcccua

SEQ ID NO: 146213 - RNA, 19 nt, Artificial Sequence
  Description of Artificial Sequence: Synthetic oligonucleotide
cgccucggagggccgauag

SEQ ID NO: 146214 - RNA, 19 nt, Artificial Sequence
  Description of Artificial Sequence: Synthetic oligonucleotide
gagcccgguuucccagccu

SEQ ID NO: 146215 - RNA, 19 nt, Artificial Sequence
  Description of Artificial Sequence: Synthetic oligonucleotide
agcgccucggagggccgau

SEQ ID NO: 146216 - RNA, 19 nt, Artificial Sequence
  Description of Artificial Sequence: Synthetic oligonucleotide
ccgcccugaaggcuugaca

SEQ ID NO: 146217 - RNA, 19 nt, Artificial Sequence
  Description of Artificial Sequence: Synthetic oligonucleotide
gccagccggguuucucaga

SEQ ID NO: 146218 - RNA, 19 nt, Artificial Sequence
  Description of Artificial Sequence: Synthetic oligonucleotide
gcccgguuucccagccugc

SEQ ID NO: 146219 - RNA, 19 nt, Artificial Sequence
  Description of Artificial Sequence: Synthetic oligonucleotide
ggauuacguccgcccugaa

SEQ ID NO: 146220 - RNA, 19 nt, Artificial Sequence
  Description of Artificial Sequence: Synthetic oligonucleotide
gagggccgauaggucuacu

SEQ ID NO: 146221 - RNA, 19 nt, Artificial Sequence
  Description of Artificial Sequence: Synthetic oligonucleotide
ccuagcucccguagugcau

SEQ ID NO: 146222 - RNA, 19 nt, Artificial Sequence
  Description of Artificial Sequence: Synthetic oligonucleotide
cguccgcccugaaggcuug

SEQ ID NO: 146223 - RNA, 19 nt, Artificial Sequence
  Description of Artificial Sequence: Synthetic oligonucleotide
ccggguguucacgcuucuc

SEQ ID NO: 146224 - RNA, 19 nt, Artificial Sequence
  Description of Artificial Sequence: Synthetic oligonucleotide
gggcagccgagcaggaaau

SEQ ID NO: 146225 - RNA, 19 nt, Artificial Sequence
  Description of Artificial Sequence: Synthetic oligonucleotide
cacugggcguggacuucau

SEQ ID NO: 146226 - RNA, 19 nt, Artificial Sequence
  Description of Artificial Sequence: Synthetic oligonucleotide
ccgguuucccagccugccu

SEQ ID NO: 146227 - RNA, 19 nt, Artificial Sequence
  Description of Artificial Sequence: Synthetic oligonucleotide
ccacgucgagaacaaucuu

SEQ ID NO: 146228 - RNA, 19 nt, Artificial Sequence
  Description of Artificial Sequence: Synthetic oligonucleotide
ccucggcaugcugagccau

SEQ ID NO: 146229 - RNA, 19 nt, Artificial Sequence
  Description of Artificial Sequence: Synthetic oligonucleotide
gcgccucggagggccgaua

SEQ ID NO: 146230 - RNA, 19 nt, Artificial Sequence
  Description of Artificial Sequence: Synthetic oligonucleotide
cggcgacaucguguacaaa

SEQ ID NO: 146231 - RNA, 19 nt, Artificial Sequence
  Description of Artificial Sequence: Synthetic oligonucleotide
cccggccagccggguuucu

SEQ ID NO: 146232 - RNA, 19 nt, Artificial Sequence
  Description of Artificial Sequence: Synthetic oligonucleotide
aaacuuacuagaucuagac

SEQ ID NO: 146233 - RNA, 19 nt, Artificial Sequence
  Description of Artificial Sequence: Synthetic oligonucleotide
aaugccuaaacacggugcc

SEQ ID NO: 146234 - RNA, 19 nt, Artificial Sequence
  Description of Artificial Sequence: Synthetic oligonucleotide
uccuaaaaccacuacauag

SEQ ID NO: 146235 - RNA, 19 nt, Artificial Sequence
  Description of Artificial Sequence: Synthetic oligonucleotide
uguuggauuguauaucugg

SEQ ID NO: 146236 - RNA, 19 nt, Artificial Sequence
  Description of Artificial Sequence: Synthetic oligonucleotide
ucugauuaagauucugugg

SEQ ID NO: 146237 - RNA, 19 nt, Artificial Sequence
  Description of Artificial Sequence: Synthetic oligonucleotide
aauguuaugguucuuugau

SEQ ID NO: 146238 - RNA, 19 nt, Artificial Sequence
  Description of Artificial Sequence: Synthetic oligonucleotide
auuaaaagguccuauccag

SEQ ID NO: 146239 - RNA, 19 nt, Artificial Sequence
  Description of Artificial Sequence: Synthetic oligonucleotide
uuaaguauccuaaaaccac

SEQ ID NO: 146240 - RNA, 19 nt, Artificial Sequence
  Description of Artificial Sequence: Synthetic oligonucleotide
ugaguugucagaacuauca

SEQ ID NO: 146241 - RNA, 19 nt, Artificial Sequence
  Description of Artificial Sequence: Synthetic oligonucleotide
aucuuuaugagagaaagag

SEQ ID NO: 146242 - RNA, 19 nt, Artificial Sequence
  Description of Artificial Sequence: Synthetic oligonucleotide
aaugggcuaacccacagcu

SEQ ID NO: 146243 - RNA, 19 nt, Artificial Sequence
  Description of Artificial Sequence: Synthetic oligonucleotide
guaguuauaucuuuaugag

SEQ ID NO: 146244 - RNA, 19 nt, Artificial Sequence
  Description of Artificial Sequence: Synthetic oligonucleotide
ugcaucucgauuuauuuag

SEQ ID NO: 146245 - RNA, 19 nt, Artificial Sequence
  Description of Artificial Sequence: Synthetic oligonucleotide
aacauaccuaaucaaauaa

SEQ ID NO: 146246 - RNA, 19 nt, Artificial Sequence
  Description of Artificial Sequence: Synthetic oligonucleotide
uauuuguuaaguauccuaa

SEQ ID NO: 146247 - RNA, 19 nt, Artificial Sequence
  Description of Artificial Sequence: Synthetic oligonucleotide
agaauugccgaauucucgg

SEQ ID NO: 146248 - RNA, 19 nt, Artificial Sequence
  Description of Artificial Sequence: Synthetic oligonucleotide
guagauguguaccacacag

SEQ ID NO: 146249 - RNA, 19 nt, Artificial Sequence
  Description of Artificial Sequence: Synthetic oligonucleotide
uguauacuugaaaggaaag

SEQ ID NO: 146250 - RNA, 19 nt, Artificial Sequence
  Description of Artificial Sequence: Synthetic oligonucleotide
uagaauaaugguaacuuuc

SEQ ID NO: 146251 - RNA, 19 nt, Artificial Sequence
  Description of Artificial Sequence: Synthetic oligonucleotide
agaucuagacacuaaagga

SEQ ID NO: 146252 - RNA, 19 nt, Artificial Sequence
  Description of Artificial Sequence: Synthetic oligonucleotide
uucgauuacuaccacauaa

SEQ ID NO: 146253 - RNA, 19 nt, Artificial Sequence
  Description of Artificial Sequence: Synthetic oligonucleotide
gagacugguauccugauac

SEQ ID NO: 146254 - RNA, 19 nt, Artificial Sequence
  Description of Artificial Sequence: Synthetic oligonucleotide
aacccgagagaauauugac

SEQ ID NO: 146255 - RNA, 19 nt, Artificial Sequence
  Description of Artificial Sequence: Synthetic oligonucleotide
gacacuaaaggauucgaug

SEQ ID NO: 146256 - RNA, 19 nt, Artificial Sequence
  Description of Artificial Sequence: Synthetic oligonucleotide
uugaucagcgaccaaaggu

SEQ ID NO: 146257 - RNA, 19 nt, Artificial Sequence
  Description of Artificial Sequence: Synthetic oligonucleotide
agcugccuaguuuugaccc

SEQ ID NO: 146258 - RNA, 19 nt, Artificial Sequence
  Description of Artificial Sequence: Synthetic oligonucleotide
uuccaaugccuaaacacgg

SEQ ID NO: 146259 - RNA, 19 nt, Artificial Sequence
  Description of Artificial Sequence: Synthetic oligonucleotide
cguaauaccacuauuaccc

SEQ ID NO: 146260 - RNA, 19 nt, Artificial Sequence
  Description of Artificial Sequence: Synthetic oligonucleotide
aaaugggcuaacccacagc

SEQ ID NO: 146261 - RNA, 19 nt, Artificial Sequence
  Description of Artificial Sequence: Synthetic oligonucleotide
uaugaugaggugcugacuc

SEQ ID NO: 146262 - RNA, 19 nt, Artificial Sequence
  Description of Artificial Sequence: Synthetic oligonucleotide
auauugacccaucuggaag

SEQ ID NO: 146263 - RNA, 19 nt, Artificial Sequence
  Description of Artificial Sequence: Synthetic oligonucleotide
uuuuacuagaagaacccgu

SEQ ID NO: 146264 - RNA, 19 nt, Artificial Sequence
  Description of Artificial Sequence: Synthetic oligonucleotide
uuaccuuacuucuugaaaa

SEQ ID NO: 146265 - RNA, 19 nt, Artificial Sequence
  Description of Artificial Sequence: Synthetic oligonucleotide
uugguugccaacuucggag

SEQ ID NO: 146266 - RNA, 19 nt, Artificial Sequence
  Description of Artificial Sequence: Synthetic oligonucleotide
ucgauuacuaccacauaag

SEQ ID NO: 146267 - RNA, 19 nt, Artificial Sequence
  Description of Artificial Sequence: Synthetic oligonucleotide
aauugccgaauucucgguc

SEQ ID NO: 146268 - RNA, 19 nt, Artificial Sequence
  Description of Artificial Sequence: Synthetic oligonucleotide
aaagguccuauccagacuu

SEQ ID NO: 146269 - RNA, 19 nt, Artificial Sequence
  Description of Artificial Sequence: Synthetic oligonucleotide
guaaagaucuagcagcaug

SEQ ID NO: 146270 - RNA, 19 nt, Artificial Sequence
  Description of Artificial Sequence: Synthetic oligonucleotide
acuucggaguauuuuacuc

SEQ ID NO: 146271 - RNA, 19 nt, Artificial Sequence
  Description of Artificial Sequence: Synthetic oligonucleotide
aaaaugggcuaacccacag

SEQ ID NO: 146272 - RNA, 19 nt, Artificial Sequence
  Description of Artificial Sequence: Synthetic oligonucleotide
agagauagacaagauguac

SEQ ID NO: 146273 - RNA, 19 nt, Artificial Sequence
  Description of Artificial Sequence: Synthetic oligonucleotide
gauggggugagcuuaugcc

SEQ ID NO: 146274 - RNA, 19 nt, Artificial Sequence
  Description of Artificial Sequence: Synthetic oligonucleotide
ucuaagguuguaacauuag

SEQ ID NO: 146275 - RNA, 19 nt, Artificial Sequence
  Description of Artificial Sequence: Synthetic oligonucleotide
uuguaagcaauucuguauc

SEQ ID NO: 146276 - RNA, 19 nt, Artificial Sequence
  Description of Artificial Sequence: Synthetic oligonucleotide
ucuaaauugaguagugcua

SEQ ID NO: 146277 - RNA, 19 nt, Artificial Sequence
  Description of Artificial Sequence: Synthetic oligonucleotide
uauuuagaguuccuuuggc

SEQ ID NO: 146278 - RNA, 19 nt, Artificial Sequence
  Description of Artificial Sequence: Synthetic oligonucleotide
aagaauugccgaauucucg

SEQ ID NO: 146279 - RNA, 19 nt, Artificial Sequence
  Description of Artificial Sequence: Synthetic oligonucleotide
aauugaguagugcuaccca

SEQ ID NO: 146280 - RNA, 19 nt, Artificial Sequence
  Description of Artificial Sequence: Synthetic oligonucleotide
aucaagaggaucugucaac

SEQ ID NO: 146281 - RNA, 19 nt, Artificial Sequence
  Description of Artificial Sequence: Synthetic oligonucleotide
aauauugacccaucuggaa

SEQ ID NO: 146282 - RNA, 19 nt, Artificial Sequence
  Description of Artificial Sequence: Synthetic oligonucleotide
uguaucaagaggaucuguc

SEQ ID NO: 146283 - RNA, 19 nt, Artificial Sequence
  Description of Artificial Sequence: Synthetic oligonucleotide
uguccucauagagagauag

SEQ ID NO: 146284 - RNA, 19 nt, Artificial Sequence
  Description of Artificial Sequence: Synthetic oligonucleotide
aggugcguaauuuucuccg

SEQ ID NO: 146285 - RNA, 19 nt, Artificial Sequence
  Description of Artificial Sequence: Synthetic oligonucleotide
gcaacaagaaaacuuauac

SEQ ID NO: 146286 - RNA, 19 nt, Artificial Sequence
  Description of Artificial Sequence: Synthetic oligonucleotide
uggauuguauaucuggguc

SEQ ID NO: 146287 - RNA, 19 nt, Artificial Sequence
  Description of Artificial Sequence: Synthetic oligonucleotide
cucauagagagauagacaa

SEQ ID NO: 146288 - RNA, 19 nt, Artificial Sequence
  Description of Artificial Sequence: Synthetic oligonucleotide
cauaaguacuccuguauac

SEQ ID NO: 146289 - RNA, 19 nt, Artificial Sequence
  Description of Artificial Sequence: Synthetic oligonucleotide
aacuuacuagaucuagaca

SEQ ID NO: 146290 - RNA, 19 nt, Artificial Sequence
  Description of Artificial Sequence: Synthetic oligonucleotide
uuuacuagaagaacccgua

SEQ ID NO: 146291 - RNA, 19 nt, Artificial Sequence
  Description of Artificial Sequence: Synthetic oligonucleotide
uucgauggaccacuaaaug

SEQ ID NO: 146292 - RNA, 19 nt, Artificial Sequence
  Description of Artificial Sequence: Synthetic oligonucleotide
ugggcuaacccacagcuga

SEQ ID NO: 146293 - RNA, 19 nt, Artificial Sequence
  Description of Artificial Sequence: Synthetic oligonucleotide
agauggggugagcuuaugc

SEQ ID NO: 146294 - RNA, 19 nt, Artificial Sequence
  Description of Artificial Sequence: Synthetic oligonucleotide
caaguucuaaauugaguag

SEQ ID NO: 146295 - RNA, 19 nt, Artificial Sequence
  Description of Artificial Sequence: Synthetic oligonucleotide
gagaauauugacccaucug

SEQ ID NO: 146296 - RNA, 19 nt, Artificial Sequence
  Description of Artificial Sequence: Synthetic oligonucleotide
ucaacccgagagaauauug

SEQ ID NO: 146297 - RNA, 19 nt, Artificial Sequence
  Description of Artificial Sequence: Synthetic oligonucleotide
uagauguguaccacacagg

SEQ ID NO: 146298 - RNA, 19 nt, Artificial Sequence
  Description of Artificial Sequence: Synthetic oligonucleotide
agauguacuacaaaauucu

SEQ ID NO: 146299 - RNA, 19 nt, Artificial Sequence
  Description of Artificial Sequence: Synthetic oligonucleotide
cuaaauugaguagugcuac

SEQ ID NO: 146300 - RNA, 19 nt, Artificial Sequence
  Description of Artificial Sequence: Synthetic oligonucleotide
ugcaaguucuaaauugagu

SEQ ID NO: 146301 - RNA, 19 nt, Artificial Sequence
  Description of Artificial Sequence: Synthetic oligonucleotide
aauucucggucaguuugcc

SEQ ID NO: 146302 - RNA, 19 nt, Artificial Sequence
  Description of Artificial Sequence: Synthetic oligonucleotide
ucgauuuauuuagaguucc

SEQ ID NO: 146303 - RNA, 19 nt, Artificial Sequence
  Description of Artificial Sequence: Synthetic oligonucleotide
aacuaucaucaugagacug

SEQ ID NO: 146304 - RNA, 19 nt, Artificial Sequence
  Description of Artificial Sequence: Synthetic oligonucleotide
cucacagauuauuuacacg

SEQ ID NO: 146305 - RNA, 19 nt, Artificial Sequence
  Description of Artificial Sequence: Synthetic oligonucleotide
aguacuccuguauaccaag

SEQ ID NO: 146306 - RNA, 19 nt, Artificial Sequence
  Description of Artificial Sequence: Synthetic oligonucleotide
ugguucuuugaucagcgac

SEQ ID NO: 146307 - RNA, 19 nt, Artificial Sequence
  Description of Artificial Sequence: Synthetic oligonucleotide
uauaucuuuaugagagaaa

SEQ ID NO: 146308 - RNA, 19 nt, Artificial Sequence
  Description of Artificial Sequence: Synthetic oligonucleotide
ugacuuuuaacugguuuag

SEQ ID NO: 146309 - RNA, 19 nt, Artificial Sequence
  Description of Artificial Sequence: Synthetic oligonucleotide
gauuguauaucugggucag

SEQ ID NO: 146310 - RNA, 19 nt, Artificial Sequence
  Description of Artificial Sequence: Synthetic oligonucleotide
guuggauuguauaucuggg

SEQ ID NO: 146311 - RNA, 19 nt, Artificial Sequence
  Description of Artificial Sequence: Synthetic oligonucleotide
acugguauccugauacagc

SEQ ID NO: 146312 - RNA, 19 nt, Artificial Sequence
  Description of Artificial Sequence: Synthetic oligonucleotide
caggauuaugaugaggugc

SEQ ID NO: 146313 - RNA, 19 nt, Artificial Sequence
  Description of Artificial Sequence: Synthetic oligonucleotide
gauucgauggaccacuaaa

SEQ ID NO: 146314 - RNA, 19 nt, Artificial Sequence
  Description of Artificial Sequence: Synthetic oligonucleotide
ucuuugaucagcgaccaaa

SEQ ID NO: 146315 - RNA, 19 nt, Artificial Sequence
  Description of Artificial Sequence: Synthetic oligonucleotide
ccuuucaauaaauuugagg

SEQ ID NO: 146316 - RNA, 19 nt, Artificial Sequence
  Description of Artificial Sequence: Synthetic oligonucleotide
uuaugccuguuucuaaggu

SEQ ID NO: 146317 - RNA, 19 nt, Artificial Sequence
  Description of Artificial Sequence: Synthetic oligonucleotide
augacuaucuaaugcugug

SEQ ID NO: 146318 - RNA, 19 nt, Artificial Sequence
  Description of Artificial Sequence: Synthetic oligonucleotide
agaucuagcagcaugacua

SEQ ID NO: 146319 - RNA, 19 nt, Artificial Sequence
  Description of Artificial Sequence: Synthetic oligonucleotide
aacuucggaguauuuuacu

SEQ ID NO: 146320 - RNA, 19 nt, Artificial Sequence
  Description of Artificial Sequence: Synthetic oligonucleotide
acuacauagaauaauggua

SEQ ID NO: 146321 - RNA, 19 nt, Artificial Sequence
  Description of Artificial Sequence: Synthetic oligonucleotide
caaugccuaaacacggugc

SEQ ID NO: 146322 - RNA, 19 nt, Artificial Sequence
  Description of Artificial Sequence: Synthetic oligonucleotide
uuuaacugguuuagugggu

SEQ ID NO: 146323 - RNA, 19 nt, Artificial Sequence
  Description of Artificial Sequence: Synthetic oligonucleotide
agauagacaagauguacua

SEQ ID NO: 146324 - RNA, 19 nt, Artificial Sequence
  Description of Artificial Sequence: Synthetic oligonucleotide
agaauaaugguaacuuuca

SEQ ID NO: 146325 - RNA, 19 nt, Artificial Sequence
  Description of Artificial Sequence: Synthetic oligonucleotide
cauagagagauagacaaga

SEQ ID NO: 146326 - RNA, 19 nt, Artificial Sequence
  Description of Artificial Sequence: Synthetic oligonucleotide
accacuacauagaauaaug

SEQ ID NO: 146327 - RNA, 19 nt, Artificial Sequence
  Description of Artificial Sequence: Synthetic oligonucleotide
agagaauauugacccaucu

SEQ ID NO: 146328 - RNA, 19 nt, Artificial Sequence
  Description of Artificial Sequence: Synthetic oligonucleotide
cagaaacacaggaacgggc

SEQ ID NO: 146329 - RNA, 19 nt, Artificial Sequence
  Description of Artificial Sequence: Synthetic oligonucleotide
ucauuguuaaaagguuugc

SEQ ID NO: 146330 - RNA, 19 nt, Artificial Sequence
  Description of Artificial Sequence: Synthetic oligonucleotide
ugugcaucucgauuuauuu

SEQ ID NO: 146331 - RNA, 19 nt, Artificial Sequence
  Description of Artificial Sequence: Synthetic oligonucleotide
uuacuagaagaacccguac

SEQ ID NO: 146332 - RNA, 19 nt, Artificial Sequence
  Description of Artificial Sequence: Synthetic oligonucleotide
guguuuaccuuacuucuug

SEQ ID NO: 146333 - RNA, 19 nt, Artificial Sequence
  Description of Artificial Sequence: Synthetic oligonucleotide
uccuguauaccaaggcaga

SEQ ID NO: 146334 - RNA, 19 nt, Artificial Sequence
  Description of Artificial Sequence: Synthetic oligonucleotide
uucggaguauuuuacucaa

SEQ ID NO: 146335 - RNA, 19 nt, Artificial Sequence
  Description of Artificial Sequence: Synthetic oligonucleotide
acauagaauaaugguaacu

SEQ ID NO: 146336 - RNA, 19 nt, Artificial Sequence
  Description of Artificial Sequence: Synthetic oligonucleotide
auugccgaauucucgguca

SEQ ID NO: 146337 - RNA, 19 nt, Artificial Sequence
  Description of Artificial Sequence: Synthetic oligonucleotide
ucaggauuaugaugaggug

SEQ ID NO: 146338 - RNA, 19 nt, Artificial Sequence
  Description of Artificial Sequence: Synthetic oligonucleotide
uacauagaauaaugguaac

SEQ ID NO: 146339 - RNA, 19 nt, Artificial Sequence
  Description of Artificial Sequence: Synthetic oligonucleotide
uggaccacuaaaugaauuu

SEQ ID NO: 146340 - RNA, 19 nt, Artificial Sequence
  Description of Artificial Sequence: Synthetic oligonucleotide
auugaguagugcuacccau

SEQ ID NO: 146341 - RNA, 19 nt, Artificial Sequence
  Description of Artificial Sequence: Synthetic oligonucleotide
guauuuguuaaguauccua

SEQ ID NO: 146342 - RNA, 19 nt, Artificial Sequence
  Description of Artificial Sequence: Synthetic oligonucleotide
cucgauuuauuuagaguuc

SEQ ID NO: 146343 - RNA, 19 nt, Artificial Sequence
  Description of Artificial Sequence: Synthetic oligonucleotide
acauaaguacuccuguaua

SEQ ID NO: 146344 - RNA, 19 nt, Artificial Sequence
  Description of Artificial Sequence: Synthetic oligonucleotide
guaucaagaggaucuguca

SEQ ID NO: 146345 - RNA, 19 nt, Artificial Sequence
  Description of Artificial Sequence: Synthetic oligonucleotide
uacccauuacacaaccguc

SEQ ID NO: 146346 - RNA, 19 nt, Artificial Sequence
  Description of Artificial Sequence: Synthetic oligonucleotide
gauuaugaugaggugcuga

SEQ ID NO: 146347 - RNA, 19 nt, Artificial Sequence
  Description of Artificial Sequence: Synthetic oligonucleotide
cuugaauccacuugagcaa

SEQ ID NO: 146348 - RNA, 19 nt, Artificial Sequence
  Description of Artificial Sequence: Synthetic oligonucleotide
gaauauugacccaucugga

SEQ ID NO: 146349 - RNA, 19 nt, Artificial Sequence
  Description of Artificial Sequence: Synthetic oligonucleotide
aggauuaugaugaggugcu

SEQ ID NO: 146350 - RNA, 19 nt, Artificial Sequence
  Description of Artificial Sequence: Synthetic oligonucleotide
cuucggaguauuuuacuca

SEQ ID NO: 146351 - RNA, 19 nt, Artificial Sequence
  Description of Artificial Sequence: Synthetic oligonucleotide
agguuguacagguucaaua

SEQ ID NO: 146352 - RNA, 19 nt, Artificial Sequence
  Description of Artificial Sequence: Synthetic oligonucleotide
ugcaaagaauugccgaauu

SEQ ID NO: 146353 - RNA, 19 nt, Artificial Sequence
  Description of Artificial Sequence: Synthetic oligonucleotide
aauccacuugagcaacaau

SEQ ID NO: 146354 - RNA, 19 nt, Artificial Sequence
  Description of Artificial Sequence: Synthetic oligonucleotide
guucuaaauugaguagugc

SEQ ID NO: 146355 - RNA, 19 nt, Artificial Sequence
  Description of Artificial Sequence: Synthetic oligonucleotide
gguuguaacauuagcaauc

SEQ ID NO: 146356 - RNA, 19 nt, Artificial Sequence
  Description of Artificial Sequence: Synthetic oligonucleotide
gaauucucggucaguuugc

SEQ ID NO: 146357 - RNA, 19 nt, Artificial Sequence
  Description of Artificial Sequence: Synthetic oligonucleotide
uugaauccacuugagcaac

SEQ ID NO: 146358 - RNA, 19 nt, Artificial Sequence
  Description of Artificial Sequence: Synthetic oligonucleotide
ucaggugcguaauuuucuc

SEQ ID NO: 146359 - RNA, 19 nt, Artificial Sequence
  Description of Artificial Sequence: Synthetic oligonucleotide
uccaaugccuaaacacggu

SEQ ID NO: 146360 - RNA, 19 nt, Artificial Sequence
  Description of Artificial Sequence: Synthetic oligonucleotide
gggauuuuagcucaucuaa

SEQ ID NO: 146361 - RNA, 19 nt, Artificial Sequence
  Description of Artificial Sequence: Synthetic oligonucleotide
uguguuuaccuuacuucuu

SEQ ID NO: 146362 - RNA, 19 nt, Artificial Sequence
  Description of Artificial Sequence: Synthetic oligonucleotide
uggaaggacucacuugaau

SEQ ID NO: 146363 - RNA, 19 nt, Artificial Sequence
  Description of Artificial Sequence: Synthetic oligonucleotide
auaugguacaucaggcaug

SEQ ID NO: 146364 - RNA, 19 nt, Artificial Sequence
  Description of Artificial Sequence: Synthetic oligonucleotide
ugauccuaguuguuuuauc

SEQ ID NO: 146365 - RNA, 19 nt, Artificial Sequence
  Description of Artificial Sequence: Synthetic oligonucleotide
gaucagcgaccaaaggugc

SEQ ID NO: 146366 - RNA, 19 nt, Artificial Sequence
  Description of Artificial Sequence: Synthetic oligonucleotide
cauguuggauuguauaucu

SEQ ID NO: 146367 - RNA, 19 nt, Artificial Sequence
  Description of Artificial Sequence: Synthetic oligonucleotide
uugccgaauucucggucag

SEQ ID NO: 146368 - RNA, 19 nt, Artificial Sequence
  Description of Artificial Sequence: Synthetic oligonucleotide
caguaaagcacgcccuuug

SEQ ID NO: 146369 - RNA, 19 nt, Artificial Sequence
  Description of Artificial Sequence: Synthetic oligonucleotide
uccgucguaauaccacuau

SEQ ID NO: 146370 - RNA, 19 nt, Artificial Sequence
  Description of Artificial Sequence: Synthetic oligonucleotide
ggauuguauaucuggguca

SEQ ID NO: 146371 - RNA, 19 nt, Artificial Sequence
  Description of Artificial Sequence: Synthetic oligonucleotide
uugaguagugcuacccauu

SEQ ID NO: 146372 - RNA, 19 nt, Artificial Sequence
  Description of Artificial Sequence: Synthetic oligonucleotide
cacuacauagaauaauggu

SEQ ID NO: 146373 - RNA, 19 nt, Artificial Sequence
  Description of Artificial Sequence: Synthetic oligonucleotide
ugguugccaacuucggagu

SEQ ID NO: 146374 - RNA, 19 nt, Artificial Sequence
  Description of Artificial Sequence: Synthetic oligonucleotide
ugggaggcuggaauaucug

SEQ ID NO: 146375 - RNA, 19 nt, Artificial Sequence
  Description of Artificial Sequence: Synthetic oligonucleotide
uuacuagaucuagacacua

SEQ ID NO: 146376 - RNA, 19 nt, Artificial Sequence
  Description of Artificial Sequence: Synthetic oligonucleotide
uuaugaugaggugcugacu

SEQ ID NO: 146377 - RNA, 19 nt, Artificial Sequence
  Description of Artificial Sequence: Synthetic oligonucleotide
acaaccgucuggucaagaa

SEQ ID NO: 146378 - RNA, 19 nt, Artificial Sequence
  Description of Artificial Sequence: Synthetic oligonucleotide
augcuguguuaucccauag

SEQ ID NO: 146379 - RNA, 19 nt, Artificial Sequence
  Description of Artificial Sequence: Synthetic oligonucleotide
ugccuaaacacggugccaa

SEQ ID NO: 146380 - RNA, 19 nt, Artificial Sequence
  Description of Artificial Sequence: Synthetic oligonucleotide
uuucgauuacuaccacaua

SEQ ID NO: 146381 - RNA, 19 nt, Artificial Sequence
  Description of Artificial Sequence: Synthetic oligonucleotide
auucgauggaccacuaaau

SEQ ID NO: 146382 - RNA, 19 nt, Artificial Sequence
  Description of Artificial Sequence: Synthetic oligonucleotide
caacccgagagaauauuga

SEQ ID NO: 146383 - RNA, 19 nt, Artificial Sequence
  Description of Artificial Sequence: Synthetic oligonucleotide
aucuagacacuaaaggauu

SEQ ID NO: 146384 - RNA, 19 nt, Artificial Sequence
  Description of Artificial Sequence: Synthetic oligonucleotide
acggugccaaaggaaaguc

SEQ ID NO: 146385 - RNA, 19 nt, Artificial Sequence
  Description of Artificial Sequence: Synthetic oligonucleotide
caggaacgggcacaggaac

SEQ ID NO: 146386 - RNA, 19 nt, Artificial Sequence
  Description of Artificial Sequence: Synthetic oligonucleotide
guuuaccuuacuucuugaa

SEQ ID NO: 146387 - RNA, 19 nt, Artificial Sequence
  Description of Artificial Sequence: Synthetic oligonucleotide
cugaguugucagaacuauc

SEQ ID NO: 146388 - RNA, 19 nt, Artificial Sequence
  Description of Artificial Sequence: Synthetic oligonucleotide
cauaugguacaucaggcau

SEQ ID NO: 146389 - RNA, 19 nt, Artificial Sequence
  Description of Artificial Sequence: Synthetic oligonucleotide
gaguagugcuacccauuac

SEQ ID NO: 146390 - RNA, 19 nt, Artificial Sequence
  Description of Artificial Sequence: Synthetic oligonucleotide
cgaauucucggucaguuug

SEQ ID NO: 146391 - RNA, 19 nt, Artificial Sequence
  Description of Artificial Sequence: Synthetic oligonucleotide
cuacccauuacacaaccgu

SEQ ID NO: 146392 - RNA, 19 nt, Artificial Sequence
  Description of Artificial Sequence: Synthetic oligonucleotide
agacugguauccugauaca

SEQ ID NO: 146393 - RNA, 19 nt, Artificial Sequence
  Description of Artificial Sequence: Synthetic oligonucleotide
gaacgcaguaaagcacgcc

SEQ ID NO: 146394 - RNA, 19 nt, Artificial Sequence
  Description of Artificial Sequence: Synthetic oligonucleotide
uccuuucgauuacuaccac

SEQ ID NO: 146395 - RNA, 19 nt, Artificial Sequence
  Description of Artificial Sequence: Synthetic oligonucleotide
uucuucaacccgagagaau

SEQ ID NO: 146396 - RNA, 19 nt, Artificial Sequence
  Description of Artificial Sequence: Synthetic oligonucleotide
caaaaugggcuaacccaca

SEQ ID NO: 146397 - RNA, 19 nt, Artificial Sequence
  Description of Artificial Sequence: Synthetic oligonucleotide
cuugguugccaacuucgga

SEQ ID NO: 146398 - RNA, 19 nt, Artificial Sequence
  Description of Artificial Sequence: Synthetic oligonucleotide
uguaaagaucuagcagcau

SEQ ID NO: 146399 - RNA, 19 nt, Artificial Sequence
  Description of Artificial Sequence: Synthetic oligonucleotide
caugacuaucuaaugcugu

SEQ ID NO: 146400 - RNA, 19 nt, Artificial Sequence
  Description of Artificial Sequence: Synthetic oligonucleotide
aagaacccguacaagcaua

SEQ ID NO: 146401 - RNA, 19 nt, Artificial Sequence
  Description of Artificial Sequence: Synthetic oligonucleotide
gaagaacccguacaagcau

SEQ ID NO: 146402 - RNA, 19 nt, Artificial Sequence
  Description of Artificial Sequence: Synthetic oligonucleotide
uuccgucguaauaccacua

SEQ ID NO: 146403 - RNA, 19 nt, Artificial Sequence
  Description of Artificial Sequence: Synthetic oligonucleotide
gaacuaucaucaugagacu

SEQ ID NO: 146404 - RNA, 19 nt, Artificial Sequence
  Description of Artificial Sequence: Synthetic oligonucleotide
gcguaauuuucuccguuug

SEQ ID NO: 146405 - RNA, 19 nt, Artificial Sequence
  Description of Artificial Sequence: Synthetic oligonucleotide
uguguaccacacagggcua

SEQ ID NO: 146406 - RNA, 19 nt, Artificial Sequence
  Description of Artificial Sequence: Synthetic oligonucleotide
gucagaguucuuugugaga

SEQ ID NO: 146407 - RNA, 19 nt, Artificial Sequence
  Description of Artificial Sequence: Synthetic oligonucleotide
uucaacccgagagaauauu

SEQ ID NO: 146408 - RNA, 19 nt, Artificial Sequence
  Description of Artificial Sequence: Synthetic oligonucleotide
agacacuaaaggauucgau

SEQ ID NO: 146409 - RNA, 19 nt, Artificial Sequence
  Description of Artificial Sequence: Synthetic oligonucleotide
ucggaguauuuuacucaau

SEQ ID NO: 146410 - RNA, 19 nt, Artificial Sequence
  Description of Artificial Sequence: Synthetic oligonucleotide
gaauugccgaauucucggu

SEQ ID NO: 146411 - RNA, 19 nt, Artificial Sequence
  Description of Artificial Sequence: Synthetic oligonucleotide
ggaccacuaaaugaauuuc

SEQ ID NO: 146412 - RNA, 19 nt, Artificial Sequence
  Description of Artificial Sequence: Synthetic oligonucleotide
cacauaaguacuccuguau

SEQ ID NO: 146413 - RNA, 19 nt, Artificial Sequence
  Description of Artificial Sequence: Synthetic oligonucleotide
aagguccuauccagacuug

SEQ ID NO: 146414 - RNA, 19 nt, Artificial Sequence
  Description of Artificial Sequence: Synthetic oligonucleotide
ccaaugccuaaacacggug

SEQ ID NO: 146415 - RNA, 19 nt, Artificial Sequence
  Description of Artificial Sequence: Synthetic oligonucleotide
gguauccugauacagcuuu

SEQ ID NO: 146416 - RNA, 19 nt, Artificial Sequence
  Description of Artificial Sequence: Synthetic oligonucleotide
guuccgucguaauaccacu

SEQ ID NO: 146417 - RNA, 19 nt, Artificial Sequence
  Description of Artificial Sequence: Synthetic oligonucleotide
cugaaacuuacuagaucua

SEQ ID NO: 146418 - RNA, 19 nt, Artificial Sequence
  Description of Artificial Sequence: Synthetic oligonucleotide
cacugcuacaaaacuuaaa

SEQ ID NO: 146419 - RNA, 19 nt, Artificial Sequence
  Description of Artificial Sequence: Synthetic oligonucleotide
acuuaguguuaaaguagaa

SEQ ID NO: 146420 - RNA, 19 nt, Artificial Sequence
  Description of Artificial Sequence: Synthetic oligonucleotide
gcauguuggauuguauauc

SEQ ID NO: 146421 - RNA, 19 nt, Artificial Sequence
  Description of Artificial Sequence: Synthetic oligonucleotide
gcuacccauuacacaaccg

SEQ ID NO: 146422 - RNA, 19 nt, Artificial Sequence
  Description of Artificial Sequence: Synthetic oligonucleotide
ggcauguuggauuguauau

SEQ ID NO: 146423 - RNA, 19 nt, Artificial Sequence
  Description of Artificial Sequence: Synthetic oligonucleotide
acgcaguaaagcacgcccu

SEQ ID NO: 146424 - RNA, 19 nt, Artificial Sequence
  Description of Artificial Sequence: Synthetic oligonucleotide
auugugcaucucgauuuau

SEQ ID NO: 146425 - RNA, 19 nt, Artificial Sequence
  Description of Artificial Sequence: Synthetic oligonucleotide
cuauccaauggagcaggca

SEQ ID NO: 146426 - RNA, 19 nt, Artificial Sequence
  Description of Artificial Sequence: Synthetic oligonucleotide
gauguacuacaaaauucuu

SEQ ID NO: 146427 - RNA, 19 nt, Artificial Sequence
  Description of Artificial Sequence: Synthetic oligonucleotide
augccuaaacacggugcca

SEQ ID NO: 146428 - RNA, 19 nt, Artificial Sequence
  Description of Artificial Sequence: Synthetic oligonucleotide
gagucugguuccgucguaa

SEQ ID NO: 146429 - RNA, 19 nt, Artificial Sequence
  Description of Artificial Sequence: Synthetic oligonucleotide
cgucggaucucauugacaa

SEQ ID NO: 146430 - RNA, 19 nt, Artificial Sequence
  Description of Artificial Sequence: Synthetic oligonucleotide
cagauugugcaucucgauu

SEQ ID NO: 146431 - RNA, 19 nt, Artificial Sequence
  Description of Artificial Sequence: Synthetic oligonucleotide
uuucuccguuugggcgucg

SEQ ID NO: 146432 - RNA, 19 nt, Artificial Sequence
  Description of Artificial Sequence: Synthetic oligonucleotide
ugccaacuucggaguauuu

SEQ ID NO: 146433 - RNA, 19 nt, Artificial Sequence
  Description of Artificial Sequence: Synthetic oligonucleotide
cgguaauacccaguguggg

SEQ ID NO: 146434 - RNA, 19 nt, Artificial Sequence
  Description of Artificial Sequence: Synthetic oligonucleotide
auaccaaggcagagguaau

SEQ ID NO: 146435 - RNA, 19 nt, Artificial Sequence
  Description of Artificial Sequence: Synthetic oligonucleotide
gucggaucucauugacaaa

SEQ ID NO: 146436 - RNA, 19 nt, Artificial Sequence
  Description of Artificial Sequence: Synthetic oligonucleotide
guccucauagagagauaga

SEQ ID NO: 146437 - RNA, 19 nt, Artificial Sequence
  Description of Artificial Sequence: Synthetic oligonucleotide
augcugucaggugcguaau

SEQ ID NO: 146438 - RNA, 19 nt, Artificial Sequence
  Description of Artificial Sequence: Synthetic oligonucleotide
auaggcacugggacauauu

SEQ ID NO: 146439 - RNA, 19 nt, Artificial Sequence
  Description of Artificial Sequence: Synthetic oligonucleotide
ggugcguaauuuucuccgu

SEQ ID NO: 146440 - RNA, 19 nt, Artificial Sequence
  Description of Artificial Sequence: Synthetic oligonucleotide
ggauucgauggaccacuaa

SEQ ID NO: 146441 - RNA, 19 nt, Artificial Sequence
  Description of Artificial Sequence: Synthetic oligonucleotide
gugauccuaguuguuuuau

SEQ ID NO: 146442 - RNA, 19 nt, Artificial Sequence
  Description of Artificial Sequence: Synthetic oligonucleotide
guaugagagaguagaucuu

SEQ ID NO: 146443 - RNA, 19 nt, Artificial Sequence
  Description of Artificial Sequence: Synthetic oligonucleotide
guugccaacuucggaguau

SEQ ID NO: 146444 - RNA, 19 nt, Artificial Sequence
  Description of Artificial Sequence: Synthetic oligonucleotide
gugcguaauuuucuccguu

SEQ ID NO: 146445 - RNA, 19 nt, Artificial Sequence
  Description of Artificial Sequence: Synthetic oligonucleotide
gguugccaacuucggagua

SEQ ID NO: 146446 - RNA, 19 nt, Artificial Sequence
  Description of Artificial Sequence: Synthetic oligonucleotide
gugguaugagagaguagau

SEQ ID NO: 146447 - RNA, 19 nt, Artificial Sequence
  Description of Artificial Sequence: Synthetic oligonucleotide
ccacauaaguacuccugua

SEQ ID NO: 146448 - RNA, 19 nt, Artificial Sequence
  Description of Artificial Sequence: Synthetic oligonucleotide
cgauuacuaccacauaagu

SEQ ID NO: 146449 - RNA, 19 nt, Artificial Sequence
  Description of Artificial Sequence: Synthetic oligonucleotide
cacaaccgucuggucaaga

SEQ ID NO: 146450 - RNA, 19 nt, Artificial Sequence
  Description of Artificial Sequence: Synthetic oligonucleotide
gaauaggcacugggacaua

SEQ ID NO: 146451 - RNA, 19 nt, Artificial Sequence
  Description of Artificial Sequence: Synthetic oligonucleotide
agcacgcccuuuggaggga

SEQ ID NO: 146452 - RNA, 19 nt, Artificial Sequence
  Description of Artificial Sequence: Synthetic oligonucleotide
guauccugauacagcuuuu

SEQ ID NO: 146453 - RNA, 19 nt, Artificial Sequence
  Description of Artificial Sequence: Synthetic oligonucleotide
guguaccacacagggcuau

SEQ ID NO: 146454 - RNA, 19 nt, Artificial Sequence
  Description of Artificial Sequence: Synthetic oligonucleotide
cggaguauuuuacucaauu

SEQ ID NO: 146455 - RNA, 19 nt, Artificial Sequence
  Description of Artificial Sequence: Synthetic oligonucleotide
gaacccguacaagcauauu

SEQ ID NO: 146456 - RNA, 19 nt, Artificial Sequence
  Description of Artificial Sequence: Synthetic oligonucleotide
ggcuaacccacagcugagu

SEQ ID NO: 146457 - RNA, 19 nt, Artificial Sequence
  Description of Artificial Sequence: Synthetic oligonucleotide
ccgucguaauaccacuauu

SEQ ID NO: 146458 - RNA, 19 nt, Artificial Sequence
  Description of Artificial Sequence: Synthetic oligonucleotide
ccgaauucucggucaguuu

SEQ ID NO: 146459 - RNA, 19 nt, Artificial Sequence
  Description of Artificial Sequence: Synthetic oligonucleotide
cggaucucauugacaaaau

SEQ ID NO: 146460 - RNA, 19 nt, Artificial Sequence
  Description of Artificial Sequence: Synthetic oligonucleotide
uauccauacagauuuagcg

SEQ ID NO: 146461 - RNA, 19 nt, Artificial Sequence
  Description of Artificial Sequence: Synthetic oligonucleotide
auuuacuguacauuagucc

SEQ ID NO: 146462 - RNA, 19 nt, Artificial Sequence
  Description of Artificial Sequence: Synthetic oligonucleotide
aaguuuacauuauccauac

SEQ ID NO: 146463 - RNA, 19 nt, Artificial Sequence
  Description of Artificial Sequence: Synthetic oligonucleotide
caaguugugacucagcugg

SEQ ID NO: 146464 - RNA, 19 nt, Artificial Sequence
  Description of Artificial Sequence: Synthetic oligonucleotide
uugacggagaccauuaagg

SEQ ID NO: 146465 - RNA, 19 nt, Artificial Sequence
  Description of Artificial Sequence: Synthetic oligonucleotide
uuuacuguacauuagucca

SEQ ID NO: 146466 - RNA, 19 nt, Artificial Sequence
  Description of Artificial Sequence: Synthetic oligonucleotide
aaggcuaggagucacucac

SEQ ID NO: 146467 - RNA, 19 nt, Artificial Sequence
  Description of Artificial Sequence: Synthetic oligonucleotide
auuaguccaaagcucaagc

SEQ ID NO: 146468 - RNA, 19 nt, Artificial Sequence
  Description of Artificial Sequence: Synthetic oligonucleotide
aauaagaugcugcaaggug

SEQ ID NO: 146469 - RNA, 19 nt, Artificial Sequence
  Description of Artificial Sequence: Synthetic oligonucleotide
uguacuuugaaaugagucc

SEQ ID NO: 146470 - RNA, 19 nt, Artificial Sequence
  Description of Artificial Sequence: Synthetic oligonucleotide
uaacuuauaaaacaucccu

SEQ ID NO: 146471 - RNA, 19 nt, Artificial Sequence
  Description of Artificial Sequence: Synthetic oligonucleotide
cuggcuaaaauucuuaagg

SEQ ID NO: 146472 - RNA, 19 nt, Artificial Sequence
  Description of Artificial Sequence: Synthetic oligonucleotide
accauuaaggucuuguagg

SEQ ID NO: 146473 - RNA, 19 nt, Artificial Sequence
  Description of Artificial Sequence: Synthetic oligonucleotide
uuuagcgugguuaaaauau

SEQ ID NO: 146474 - RNA, 19 nt, Artificial Sequence
  Description of Artificial Sequence: Synthetic oligonucleotide
aaaauguguugaaucaacc

SEQ ID NO: 146475 - RNA, 19 nt, Artificial Sequence
  Description of Artificial Sequence: Synthetic oligonucleotide
aaaugaguccaccagggug

SEQ ID NO: 146476 - RNA, 19 nt, Artificial Sequence
  Description of Artificial Sequence: Synthetic oligonucleotide
aucugaguuguacauauac

SEQ ID NO: 146477 - RNA, 19 nt, Artificial Sequence
  Description of Artificial Sequence: Synthetic oligonucleotide
uuuauuuauaacugggagu

SEQ ID NO: 146478 - RNA, 19 nt, Artificial Sequence
  Description of Artificial Sequence: Synthetic oligonucleotide
uuaacuuauaaaacauccc

SEQ ID NO: 146479 - RNA, 19 nt, Artificial Sequence
  Description of Artificial Sequence: Synthetic oligonucleotide
ugauucaccacuuaaguuc

SEQ ID NO: 146480 - RNA, 19 nt, Artificial Sequence
  Description of Artificial Sequence: Synthetic oligonucleotide
agcaauaagaugcugcaag

SEQ ID NO: 146481 - RNA, 19 nt, Artificial Sequence
  Description of Artificial Sequence: Synthetic oligonucleotide
auacauagagccuuuagca

SEQ ID NO: 146482 - RNA, 19 nt, Artificial Sequence
  Description of Artificial Sequence: Synthetic oligonucleotide
ucucccauaagucacucag

SEQ ID NO: 146483 - RNA, 19 nt, Artificial Sequence
  Description of Artificial Sequence: Synthetic oligonucleotide
uuuaaaacaugagaguucu

SEQ ID NO: 146484 - RNA, 19 nt, Artificial Sequence
  Description of Artificial Sequence: Synthetic oligonucleotide
aggacaucagaucuugagc

SEQ ID NO: 146485 - RNA, 19 nt, Artificial Sequence
  Description of Artificial Sequence: Synthetic oligonucleotide
uggcuaaaauucuuaaggg

SEQ ID NO: 146486 - RNA, 19 nt, Artificial Sequence
  Description of Artificial Sequence: Synthetic oligonucleotide
uacauuaguccaaagcuca

SEQ ID NO: 146487 - RNA, 19 nt, Artificial Sequence
  Description of Artificial Sequence: Synthetic oligonucleotide
cuuuacuaagcccugguag

SEQ ID NO: 146488 - RNA, 19 nt, Artificial Sequence
  Description of Artificial Sequence: Synthetic oligonucleotide
uauuuuggaguucugugga

SEQ ID NO: 146489 - RNA, 19 nt, Artificial Sequence
  Description of Artificial Sequence: Synthetic oligonucleotide
acaaauaguuccaaguuuc

SEQ ID NO: 146490 - RNA, 19 nt, Artificial Sequence
  Description of Artificial Sequence: Synthetic oligonucleotide
ucuaggguguguaaguccc

SEQ ID NO: 146491 - RNA, 19 nt, Artificial Sequence
  Description of Artificial Sequence: Synthetic oligonucleotide
cugacgaaugccaucaacc

SEQ ID NO: 146492 - RNA, 19 nt, Artificial Sequence
  Description of Artificial Sequence: Synthetic oligonucleotide
ggcagaauccucuaggugg

SEQ ID NO: 146493 - RNA, 19 nt, Artificial Sequence
  Description of Artificial Sequence: Synthetic oligonucleotide
uccauacagauuuagcgug

SEQ ID NO: 146494 - RNA, 19 nt, Artificial Sequence
  Description of Artificial Sequence: Synthetic oligonucleotide
aucaaaggcuuuuaauauc

SEQ ID NO: 146495 - RNA, 19 nt, Artificial Sequence
  Description of Artificial Sequence: Synthetic oligonucleotide
uuauccauacagauuuagc

SEQ ID NO: 146496 - RNA, 19 nt, Artificial Sequence
  Description of Artificial Sequence: Synthetic oligonucleotide
aaucaaccgucccuggauc

SEQ ID NO: 146497 - RNA, 19 nt, Artificial Sequence
  Description of Artificial Sequence: Synthetic oligonucleotide
uguguaagucccuugguac

SEQ ID NO: 146498 - RNA, 19 nt, Artificial Sequence
  Description of Artificial Sequence: Synthetic oligonucleotide
uauaugcacaaauaaccac

SEQ ID NO: 146499 - RNA, 19 nt, Artificial Sequence
  Description of Artificial Sequence: Synthetic oligonucleotide
ugguaucucaagcagugcc

SEQ ID NO: 146500 - RNA, 19 nt, Artificial Sequence
  Description of Artificial Sequence: Synthetic oligonucleotide
gugcauucgagguaggagg

SEQ ID NO: 146501 - RNA, 19 nt, Artificial Sequence
  Description of Artificial Sequence: Synthetic oligonucleotide
uuguuggauauauaaagaa

SEQ ID NO: 146502 - RNA, 19 nt, Artificial Sequence
  Description of Artificial Sequence: Synthetic oligonucleotide
ucccauaagucacucagug

SEQ ID NO: 146503 - RNA, 19 nt, Artificial Sequence
  Description of Artificial Sequence: Synthetic oligonucleotide
uugguacagagucacucgg

SEQ ID NO: 146504 - RNA, 19 nt, Artificial Sequence
  Description of Artificial Sequence: Synthetic oligonucleotide
aucuaggguguguaagucc

SEQ ID NO: 146505 - RNA, 19 nt, Artificial Sequence
  Description of Artificial Sequence: Synthetic oligonucleotide
ugaaucagcucccaucugu

SEQ ID NO: 146506 - RNA, 19 nt, Artificial Sequence
  Description of Artificial Sequence: Synthetic oligonucleotide
ucugaguuguacauauaca

SEQ ID NO: 146507 - RNA, 19 nt, Artificial Sequence
  Description of Artificial Sequence: Synthetic oligonucleotide
uguugaaucaaccgucccu

SEQ ID NO: 146508 - RNA, 19 nt, Artificial Sequence
  Description of Artificial Sequence: Synthetic oligonucleotide
ugcacguucccuuuuauuc

SEQ ID NO: 146509 - RNA, 19 nt, Artificial Sequence
  Description of Artificial Sequence: Synthetic oligonucleotide
gccuuuagcaauaagaugc

SEQ ID NO: 146510 - RNA, 19 nt, Artificial Sequence
  Description of Artificial Sequence: Synthetic oligonucleotide
aucgcgauacugcucuucc

SEQ ID NO: 146511 - RNA, 19 nt, Artificial Sequence
  Description of Artificial Sequence: Synthetic oligonucleotide
ugcauucgagguaggaggg

SEQ ID NO: 146512 - RNA, 19 nt, Artificial Sequence
  Description of Artificial Sequence: Synthetic oligonucleotide
aaaguuuacauuauccaua

SEQ ID NO: 146513 - RNA, 19 nt, Artificial Sequence
  Description of Artificial Sequence: Synthetic oligonucleotide
cacgucaucuccaugucgg

SEQ ID NO: 146514 - RNA, 19 nt, Artificial Sequence
  Description of Artificial Sequence: Synthetic oligonucleotide
cuuguagauacuuggccag

SEQ ID NO: 146515 - RNA, 19 nt, Artificial Sequence
  Description of Artificial Sequence: Synthetic oligonucleotide
aaugaguccaccagggugu

SEQ ID NO: 146516 - RNA, 19 nt, Artificial Sequence
  Description of Artificial Sequence: Synthetic oligonucleotide
uuucccgugaagcucuugc

SEQ ID NO: 146517 - RNA, 19 nt, Artificial Sequence
  Description of Artificial Sequence: Synthetic oligonucleotide
gacaauucuaccaucguga

SEQ ID NO: 146518 - RNA, 19 nt, Artificial Sequence
  Description of Artificial Sequence: Synthetic oligonucleotide
uacaaauaguuccaaguuu

SEQ ID NO: 146519 - RNA, 19 nt, Artificial Sequence
  Description of Artificial Sequence: Synthetic oligonucleotide
acucggcucuucuaaaugg

SEQ ID NO: 146520 - RNA, 19 nt, Artificial Sequence
  Description of Artificial Sequence: Synthetic oligonucleotide
gaauccucuaggugggagg

SEQ ID NO: 146521 - RNA, 19 nt, Artificial Sequence
  Description of Artificial Sequence: Synthetic oligonucleotide
auccauacagauuuagcgu

SEQ ID NO: 146522 - RNA, 19 nt, Artificial Sequence
  Description of Artificial Sequence: Synthetic oligonucleotide
aucccuaucaagucuggag

SEQ ID NO: 146523 - RNA, 19 nt, Artificial Sequence
  Description of Artificial Sequence: Synthetic oligonucleotide
gcuaaaauucuuaaggggc

SEQ ID NO: 146524 - RNA, 19 nt, Artificial Sequence
  Description of Artificial Sequence: Synthetic oligonucleotide
guugugacucagcuggugg

SEQ ID NO: 146525 - RNA, 19 nt, Artificial Sequence
  Description of Artificial Sequence: Synthetic oligonucleotide
ggacaucagaucuugagcc

SEQ ID NO: 146526 - RNA, 19 nt, Artificial Sequence
  Description of Artificial Sequence: Synthetic oligonucleotide
uucuccgugccccuuaaug

SEQ ID NO: 146527 - RNA, 19 nt, Artificial Sequence
  Description of Artificial Sequence: Synthetic oligonucleotide
acaugcaucgcgauacugc

SEQ ID NO: 146528 - RNA, 19 nt, Artificial Sequence
  Description of Artificial Sequence: Synthetic oligonucleotide
ugaccaaguaacugcuggg

SEQ ID NO: 146529 - RNA, 19 nt, Artificial Sequence
  Description of Artificial Sequence: Synthetic oligonucleotide
gcgugguuaaaauauaugc

SEQ ID NO: 146530 - RNA, 19 nt, Artificial Sequence
  Description of Artificial Sequence: Synthetic oligonucleotide
agcucaaccagacccaaug

SEQ ID NO: 146531 - RNA, 19 nt, Artificial Sequence
  Description of Artificial Sequence: Synthetic oligonucleotide
uauucugaguuucccguga

SEQ ID NO: 146532 - RNA, 19 nt, Artificial Sequence
  Description of Artificial Sequence: Synthetic oligonucleotide
agcaaguugugacucagcu

SEQ ID NO: 146533 - RNA, 19 nt, Artificial Sequence
  Description of Artificial Sequence: Synthetic oligonucleotide
agaauucagcugcugcacg

SEQ ID NO: 146534 - RNA, 19 nt, Artificial Sequence
  Description of Artificial Sequence: Synthetic oligonucleotide
auaugcacaaauaaccaca

SEQ ID NO: 146535 - RNA, 19 nt, Artificial Sequence
  Description of Artificial Sequence: Synthetic oligonucleotide
ucuccuaccucucccauaa

SEQ ID NO: 146536 - RNA, 19 nt, Artificial Sequence
  Description of Artificial Sequence: Synthetic oligonucleotide
aacauccauguguagagua

SEQ ID NO: 146537 - RNA, 19 nt, Artificial Sequence
  Description of Artificial Sequence: Synthetic oligonucleotide
uaucaagucuggaguuugg

SEQ ID NO: 146538 - RNA, 19 nt, Artificial Sequence
  Description of Artificial Sequence: Synthetic oligonucleotide
uugcgccugaaucagcucc

SEQ ID NO: 146539 - RNA, 19 nt, Artificial Sequence
  Description of Artificial Sequence: Synthetic oligonucleotide
agugacugucguaaguccc

SEQ ID NO: 146540 - RNA, 19 nt, Artificial Sequence
  Description of Artificial Sequence: Synthetic oligonucleotide
acggagaccauuaaggucu

SEQ ID NO: 146541 - RNA, 19 nt, Artificial Sequence
  Description of Artificial Sequence: Synthetic oligonucleotide
guggccaauaggcuguugg

SEQ ID NO: 146542 - RNA, 19 nt, Artificial Sequence
  Description of Artificial Sequence: Synthetic oligonucleotide
ugacgaaugccaucaaccu

SEQ ID NO: 146543 - RNA, 19 nt, Artificial Sequence
  Description of Artificial Sequence: Synthetic oligonucleotide
caaagcuguccagagaggg

SEQ ID NO: 146544 - RNA, 19 nt, Artificial Sequence
  Description of Artificial Sequence: Synthetic oligonucleotide
auauucucaucugcugugc

SEQ ID NO: 146545 - RNA, 19 nt, Artificial Sequence
  Description of Artificial Sequence: Synthetic oligonucleotide
uacagauuuagcgugguua

SEQ ID NO: 146546 - RNA, 19 nt, Artificial Sequence
  Description of Artificial Sequence: Synthetic oligonucleotide
acauagagccuuuagcaau

SEQ ID NO: 146547 - RNA, 19 nt, Artificial Sequence
  Description of Artificial Sequence: Synthetic oligonucleotide
gaguucuguggauucgggg

SEQ ID NO: 146548 - RNA, 19 nt, Artificial Sequence
  Description of Artificial Sequence: Synthetic oligonucleotide
guugacggagaccauuaag

SEQ ID NO: 146549 - RNA, 19 nt, Artificial Sequence
  Description of Artificial Sequence: Synthetic oligonucleotide
agugcagacugcuagccga

SEQ ID NO: 146550 - RNA, 19 nt, Artificial Sequence
  Description of Artificial Sequence: Synthetic oligonucleotide
uuguagguaucaaaggcuu

SEQ ID NO: 146551 - RNA, 19 nt, Artificial Sequence
  Description of Artificial Sequence: Synthetic oligonucleotide
auaagaugcugcaaggugu

SEQ ID NO: 146552 - RNA, 19 nt, Artificial Sequence
  Description of Artificial Sequence: Synthetic oligonucleotide
auuacguggaccuucucuu

SEQ ID NO: 146553 - RNA, 19 nt, Artificial Sequence
  Description of Artificial Sequence: Synthetic oligonucleotide
aacaucccuaucaagucug

SEQ ID NO: 146554 - RNA, 19 nt, Artificial Sequence
  Description of Artificial Sequence: Synthetic oligonucleotide
cuuaaggggcuccauugcc

SEQ ID NO: 146555 - RNA, 19 nt, Artificial Sequence
  Description of Artificial Sequence: Synthetic oligonucleotide
cuggauaucggagggaggc

SEQ ID NO: 146556 - RNA, 19 nt, Artificial Sequence
  Description of Artificial Sequence: Synthetic oligonucleotide
ucuccgugccccuuaauga

SEQ ID NO: 146557 - RNA, 19 nt, Artificial Sequence
  Description of Artificial Sequence: Synthetic oligonucleotide
ucuugcgccugaaucagcu

SEQ ID NO: 146558 - RNA, 19 nt, Artificial Sequence
  Description of Artificial Sequence: Synthetic oligonucleotide
uuaaggggcuccauugccu

SEQ ID NO: 146559 - RNA, 19 nt, Artificial Sequence
  Description of Artificial Sequence: Synthetic oligonucleotide
ucugacgaaugccaucaac

SEQ ID NO: 146560 - RNA, 19 nt, Artificial Sequence
  Description of Artificial Sequence: Synthetic oligonucleotide
acagauuuagcgugguuaa

SEQ ID NO: 146561 - RNA, 19 nt, Artificial Sequence
  Description of Artificial Sequence: Synthetic oligonucleotide
ugaaucaaccgucccugga

SEQ ID NO: 146562 - RNA, 19 nt, Artificial Sequence
  Description of Artificial Sequence: Synthetic oligonucleotide
uccuaccucucccauaagu

SEQ ID NO: 146563 - RNA, 19 nt, Artificial Sequence
  Description of Artificial Sequence: Synthetic oligonucleotide
cuaggagucacucacaggu

SEQ ID NO: 146564 - RNA, 19 nt, Artificial Sequence
  Description of Artificial Sequence: Synthetic oligonucleotide
ugacggagaccauuaaggu

SEQ ID NO: 146565 - RNA, 19 nt, Artificial Sequence
  Description of Artificial Sequence: Synthetic oligonucleotide
ugggacauccugcugucug

SEQ ID NO: 146566 - RNA, 19 nt, Artificial Sequence
  Description of Artificial Sequence: Synthetic oligonucleotide
acauauacaaauaguucca

SEQ ID NO: 146567 - RNA, 19 nt, Artificial Sequence
  Description of Artificial Sequence: Synthetic oligonucleotide
caggggacucaacagagag

SEQ ID NO: 146568 - RNA, 19 nt, Artificial Sequence
  Description of Artificial Sequence: Synthetic oligonucleotide
acugucguaagucccuucu

SEQ ID NO: 146569 - RNA, 19 nt, Artificial Sequence
  Description of Artificial Sequence: Synthetic oligonucleotide
agaguaucuucaguucugg

SEQ ID NO: 146570 - RNA, 19 nt, Artificial Sequence
  Description of Artificial Sequence: Synthetic oligonucleotide
agcucuugcgccugaauca

SEQ ID NO: 146571 - RNA, 19 nt, Artificial Sequence
  Description of Artificial Sequence: Synthetic oligonucleotide
cugcuagccgacuggaggg

SEQ ID NO: 146572 - RNA, 19 nt, Artificial Sequence
  Description of Artificial Sequence: Synthetic oligonucleotide
uuauaacugggagugcaga

SEQ ID NO: 146573 - RNA, 19 nt, Artificial Sequence
  Description of Artificial Sequence: Synthetic oligonucleotide
gauguugccgaugucagaa

SEQ ID NO: 146574 - RNA, 19 nt, Artificial Sequence
  Description of Artificial Sequence: Synthetic oligonucleotide
gaguuuggcauuuacugua

SEQ ID NO: 146575 - RNA, 19 nt, Artificial Sequence
  Description of Artificial Sequence: Synthetic oligonucleotide
agcgucuuggcugugagcu

SEQ ID NO: 146576 - RNA, 19 nt, Artificial Sequence
  Description of Artificial Sequence: Synthetic oligonucleotide
aucugucgaaggcaccugg

SEQ ID NO: 146577 - RNA, 19 nt, Artificial Sequence
  Description of Artificial Sequence: Synthetic oligonucleotide
ugagugacugucguaaguc

SEQ ID NO: 146578 - RNA, 19 nt, Artificial Sequence
  Description of Artificial Sequence: Synthetic oligonucleotide
ugcuauggaaucucggaua

SEQ ID NO: 146579 - RNA, 19 nt, Artificial Sequence
  Description of Artificial Sequence: Synthetic oligonucleotide
uuccaaguuucuuuacuaa

SEQ ID NO: 146580 - RNA, 19 nt, Artificial Sequence
  Description of Artificial Sequence: Synthetic oligonucleotide
cucggcucuucuaaauggg

SEQ ID NO: 146581 - RNA, 19 nt, Artificial Sequence
  Description of Artificial Sequence: Synthetic oligonucleotide
acgcuugcuagccacagga

SEQ ID NO: 146582 - RNA, 19 nt, Artificial Sequence
  Description of Artificial Sequence: Synthetic oligonucleotide
aaccagacccaaugugucu

SEQ ID NO: 146583 - RNA, 19 nt, Artificial Sequence
  Description of Artificial Sequence: Synthetic oligonucleotide
ucacgcaacuguuuugagu

SEQ ID NO: 146584 - RNA, 19 nt, Artificial Sequence
  Description of Artificial Sequence: Synthetic oligonucleotide
uccaugcaauaaaauuucu

SEQ ID NO: 146585 - RNA, 19 nt, Artificial Sequence
  Description of Artificial Sequence: Synthetic oligonucleotide
cagacuguugguauuaaaa

SEQ ID NO: 146586 - RNA, 19 nt, Artificial Sequence
  Description of Artificial Sequence: Synthetic oligonucleotide
gucgaaggcaccuggcugc

SEQ ID NO: 146587 - RNA, 19 nt, Artificial Sequence
  Description of Artificial Sequence: Synthetic oligonucleotide
cuggagucugcauuucagc

SEQ ID NO: 146588 - RNA, 19 nt, Artificial Sequence
  Description of Artificial Sequence: Synthetic oligonucleotide
gacggagaccauuaagguc

SEQ ID NO: 146589 - RNA, 19 nt, Artificial Sequence
  Description of Artificial Sequence: Synthetic oligonucleotide
uuagcgugguuaaaauaua

SEQ ID NO: 146590 - RNA, 19 nt, Artificial Sequence
  Description of Artificial Sequence: Synthetic oligonucleotide
gauuacguggaccuucucu

SEQ ID NO: 146591 - RNA, 19 nt, Artificial Sequence
  Description of Artificial Sequence: Synthetic oligonucleotide
ucuuuacuaagcccuggua

SEQ ID NO: 146592 - RNA, 19 nt, Artificial Sequence
  Description of Artificial Sequence: Synthetic oligonucleotide
auuuagcgugguuaaaaua

SEQ ID NO: 146593 - RNA, 19 nt, Artificial Sequence
  Description of Artificial Sequence: Synthetic oligonucleotide
agauuuagcgugguuaaaa

SEQ ID NO: 146594 - RNA, 19 nt, Artificial Sequence
  Description of Artificial Sequence: Synthetic oligonucleotide
ugguacagagucacucggc

SEQ ID NO: 146595 - RNA, 19 nt, Artificial Sequence
  Description of Artificial Sequence: Synthetic oligonucleotide
uggcagaauccucuaggug

SEQ ID NO: 146596 - RNA, 19 nt, Artificial Sequence
  Description of Artificial Sequence: Synthetic oligonucleotide
ugacaagugccuucugccu

SEQ ID NO: 146597 - RNA, 19 nt, Artificial Sequence
  Description of Artificial Sequence: Synthetic oligonucleotide
uuucaagccaagcggugau

SEQ ID NO: 146598 - RNA, 19 nt, Artificial Sequence
  Description of Artificial Sequence: Synthetic oligonucleotide
gaugcugcaagguguccac

SEQ ID NO: 146599 - RNA, 19 nt, Artificial Sequence
  Description of Artificial Sequence: Synthetic oligonucleotide
uagcgugguuaaaauauau

SEQ ID NO: 146600 - RNA, 19 nt, Artificial Sequence
  Description of Artificial Sequence: Synthetic oligonucleotide
gagugcagacugcuagccg

SEQ ID NO: 146601 - RNA, 19 nt, Artificial Sequence
  Description of Artificial Sequence: Synthetic oligonucleotide
uucuucccgauuacgugga

SEQ ID NO: 146602 - RNA, 19 nt, Artificial Sequence
  Description of Artificial Sequence: Synthetic oligonucleotide
guagucuucuccgugcccc

SEQ ID NO: 146603 - RNA, 19 nt, Artificial Sequence
  Description of Artificial Sequence: Synthetic oligonucleotide
ucgaaacacuuucaacauc

SEQ ID NO: 146604 - RNA, 19 nt, Artificial Sequence
  Description of Artificial Sequence: Synthetic oligonucleotide
cuggagggaaccaauucuc

SEQ ID NO: 146605 - RNA, 19 nt, Artificial Sequence
  Description of Artificial Sequence: Synthetic oligonucleotide
uucaaaguuuuagcaauau

SEQ ID NO: 146606 - RNA, 19 nt, Artificial Sequence
  Description of Artificial Sequence: Synthetic oligonucleotide
uuaaggucuuguagguauc

SEQ ID NO: 146607 - RNA, 19 nt, Artificial Sequence
  Description of Artificial Sequence: Synthetic oligonucleotide
cugaucuaggguguguaag

SEQ ID NO: 146608 - RNA, 19 nt, Artificial Sequence
  Description of Artificial Sequence: Synthetic oligonucleotide
agccaagcggugauguugc

SEQ ID NO: 146609 - RNA, 19 nt, Artificial Sequence
  Description of Artificial Sequence: Synthetic oligonucleotide
cugaucacccuugagagga

SEQ ID NO: 146610 - RNA, 19 nt, Artificial Sequence
  Description of Artificial Sequence: Synthetic oligonucleotide
agcgcugcccugaucaccc

SEQ ID NO: 146611 - RNA, 19 nt, Artificial Sequence
  Description of Artificial Sequence: Synthetic oligonucleotide
ucaagccaagcggugaugu

SEQ ID NO: 146612 - RNA, 19 nt, Artificial Sequence
  Description of Artificial Sequence: Synthetic oligonucleotide
ucacgucuuguuccgguga

SEQ ID NO: 146613 - RNA, 19 nt, Artificial Sequence
  Description of Artificial Sequence: Synthetic oligonucleotide
gacgaaugccaucaaccuc

SEQ ID NO: 146614 - RNA, 19 nt, Artificial Sequence
  Description of Artificial Sequence: Synthetic oligonucleotide
acaauucuaccaucgugau

SEQ ID NO: 146615 - RNA, 19 nt, Artificial Sequence
  Description of Artificial Sequence: Synthetic oligonucleotide
cagcuuguagauacuuggc

SEQ ID NO: 146616 - RNA, 19 nt, Artificial Sequence
  Description of Artificial Sequence: Synthetic oligonucleotide
uucaguugacggcugguuu

SEQ ID NO: 146617 - RNA, 19 nt, Artificial Sequence
  Description of Artificial Sequence: Synthetic oligonucleotide
gcagacaauucuaccaucg

SEQ ID NO: 146618 - RNA, 19 nt, Artificial Sequence
  Description of Artificial Sequence: Synthetic oligonucleotide
gguagcgcugcccugauca

SEQ ID NO: 146619 - RNA, 19 nt, Artificial Sequence
  Description of Artificial Sequence: Synthetic oligonucleotide
uuggcuaucuuuaguuguu

SEQ ID NO: 146620 - RNA, 19 nt, Artificial Sequence
  Description of Artificial Sequence: Synthetic oligonucleotide
cuaucaagucuggaguuug

SEQ ID NO: 146621 - RNA, 19 nt, Artificial Sequence
  Description of Artificial Sequence: Synthetic oligonucleotide
gaguaucuucaguucuggc

SEQ ID NO: 146622 - RNA, 19 nt, Artificial Sequence
  Description of Artificial Sequence: Synthetic oligonucleotide
caagcggugauguugccga

SEQ ID NO: 146623 - RNA, 19 nt, Artificial Sequence
  Description of Artificial Sequence: Synthetic oligonucleotide
uugccgaugucagaauuca

SEQ ID NO: 146624 - RNA, 19 nt, Artificial Sequence
  Description of Artificial Sequence: Synthetic oligonucleotide
uguugccgaugucagaauu

SEQ ID NO: 146625 - RNA, 19 nt, Artificial Sequence
  Description of Artificial Sequence: Synthetic oligonucleotide
gaggcgguagccccgaguc

SEQ ID NO: 146626 - RNA, 19 nt, Artificial Sequence
  Description of Artificial Sequence: Synthetic oligonucleotide
auaaaagagcugacccagg

SEQ ID NO: 146627 - RNA, 19 nt, Artificial Sequence
  Description of Artificial Sequence: Synthetic oligonucleotide
uucacucugagugcuauuu

SEQ ID NO: 146628 - RNA, 19 nt, Artificial Sequence
  Description of Artificial Sequence: Synthetic oligonucleotide
cuccgugccccuuaaugag

SEQ ID NO: 146629 - RNA, 19 nt, Artificial Sequence
  Description of Artificial Sequence: Synthetic oligonucleotide
uccaguuaguguguccagc

SEQ ID NO: 146630 - RNA, 19 nt, Artificial Sequence
  Description of Artificial Sequence: Synthetic oligonucleotide
ggcuaucuuuaguuguugg

SEQ ID NO: 146631 - RNA, 19 nt, Artificial Sequence
  Description of Artificial Sequence: Synthetic oligonucleotide
gaaucucggauauccugca

SEQ ID NO: 146632 - RNA, 19 nt, Artificial Sequence
  Description of Artificial Sequence: Synthetic oligonucleotide
uuggcauuuacuguacauu

SEQ ID NO: 146633 - RNA, 19 nt, Artificial Sequence
  Description of Artificial Sequence: Synthetic oligonucleotide
ggaaucucggauauccugc

SEQ ID NO: 146634 - RNA, 19 nt, Artificial Sequence
  Description of Artificial Sequence: Synthetic oligonucleotide
guauugcacgcugaucuag

SEQ ID NO: 146635 - RNA, 19 nt, Artificial Sequence
  Description of Artificial Sequence: Synthetic oligonucleotide
ugcgccugaaucagcuccc

SEQ ID NO: 146636 - RNA, 19 nt, Artificial Sequence
  Description of Artificial Sequence: Synthetic oligonucleotide
caugagugacugucguaag

SEQ ID NO: 146637 - RNA, 19 nt, Artificial Sequence
  Description of Artificial Sequence: Synthetic oligonucleotide
gguucgaaacacuuucaac

SEQ ID NO: 146638 - RNA, 19 nt, Artificial Sequence
  Description of Artificial Sequence: Synthetic oligonucleotide
agguucgaaacacuuucaa

SEQ ID NO: 146639 - RNA, 19 nt, Artificial Sequence
  Description of Artificial Sequence: Synthetic oligonucleotide
cagggcagacaauucuacc

SEQ ID NO: 146640 - RNA, 19 nt, Artificial Sequence
  Description of Artificial Sequence: Synthetic oligonucleotide
gauuuagcgugguuaaaau

SEQ ID NO: 146641 - RNA, 19 nt, Artificial Sequence
  Description of Artificial Sequence: Synthetic oligonucleotide
agaauccucuaggugggag

SEQ ID NO: 146642 - RNA, 19 nt, Artificial Sequence
  Description of Artificial Sequence: Synthetic oligonucleotide
cuccaggguagcuucacuc

SEQ ID NO: 146643 - RNA, 19 nt, Artificial Sequence
  Description of Artificial Sequence: Synthetic oligonucleotide
agccucacgucuuguuccg

SEQ ID NO: 146644 - RNA, 19 nt, Artificial Sequence
  Description of Artificial Sequence: Synthetic oligonucleotide
uccuguauugcacgcugau

SEQ ID NO: 146645 - RNA, 19 nt, Artificial Sequence
  Description of Artificial Sequence: Synthetic oligonucleotide
uuguuccggugauucacca

SEQ ID NO: 146646 - RNA, 19 nt, Artificial Sequence
  Description of Artificial Sequence: Synthetic oligonucleotide
agcgugguuaaaauauaug

SEQ ID NO: 146647 - RNA, 19 nt, Artificial Sequence
  Description of Artificial Sequence: Synthetic oligonucleotide
ucccuugguacagagucac

SEQ ID NO: 146648 - RNA, 19 nt, Artificial Sequence
  Description of Artificial Sequence: Synthetic oligonucleotide
uguauugcacgcugaucua

SEQ ID NO: 146649 - RNA, 19 nt, Artificial Sequence
  Description of Artificial Sequence: Synthetic oligonucleotide
gaucuaggguguguaaguc

SEQ ID NO: 146650 - RNA, 19 nt, Artificial Sequence
  Description of Artificial Sequence: Synthetic oligonucleotide
gcuugcuagccacaggagc

SEQ ID NO: 146651 - RNA, 19 nt, Artificial Sequence
  Description of Artificial Sequence: Synthetic oligonucleotide
agaccauuaaggucuugua

SEQ ID NO: 146652 - RNA, 19 nt, Artificial Sequence
  Description of Artificial Sequence: Synthetic oligonucleotide
cuaccaucgugaucuggac

SEQ ID NO: 146653 - RNA, 19 nt, Artificial Sequence
  Description of Artificial Sequence: Synthetic oligonucleotide
ugccgaugucagaauucag

SEQ ID NO: 146654 - RNA, 19 nt, Artificial Sequence
  Description of Artificial Sequence: Synthetic oligonucleotide
ucucaagcagugccucacu

SEQ ID NO: 146655 - RNA, 19 nt, Artificial Sequence
  Description of Artificial Sequence: Synthetic oligonucleotide
uccgugccccuuaaugaga

SEQ ID NO: 146656 - RNA, 19 nt, Artificial Sequence
  Description of Artificial Sequence: Synthetic oligonucleotide
guagaaggagcgcgcgaag

SEQ ID NO: 146657 - RNA, 19 nt, Artificial Sequence
  Description of Artificial Sequence: Synthetic oligonucleotide
ggcacaugcaucgcgauac

SEQ ID NO: 146658 - RNA, 19 nt, Artificial Sequence
  Description of Artificial Sequence: Synthetic oligonucleotide
ggugcauucgagguaggag

SEQ ID NO: 146659 - RNA, 19 nt, Artificial Sequence
  Description of Artificial Sequence: Synthetic oligonucleotide
cacucggcucuucuaaaug

SEQ ID NO: 146660 - RNA, 19 nt, Artificial Sequence
  Description of Artificial Sequence: Synthetic oligonucleotide
ccagguucgaaacacuuuc

SEQ ID NO: 146661 - RNA, 19 nt, Artificial Sequence
  Description of Artificial Sequence: Synthetic oligonucleotide
cugacacuccaggagggcc

SEQ ID NO: 146662 - RNA, 19 nt, Artificial Sequence
  Description of Artificial Sequence: Synthetic oligonucleotide
uguuccggugauucaccac

SEQ ID NO: 146663 - RNA, 19 nt, Artificial Sequence
  Description of Artificial Sequence: Synthetic oligonucleotide
uuacguggaccuucucuuc

SEQ ID NO: 146664 - RNA, 19 nt, Artificial Sequence
  Description of Artificial Sequence: Synthetic oligonucleotide
uguggauucggggcucuca

SEQ ID NO: 146665 - RNA, 19 nt, Artificial Sequence
  Description of Artificial Sequence: Synthetic oligonucleotide
cuucccgauuacguggacc

SEQ ID NO: 146666 - RNA, 19 nt, Artificial Sequence
  Description of Artificial Sequence: Synthetic oligonucleotide
acuaagcccugguagccaa

SEQ ID NO: 146667 - RNA, 19 nt, Artificial Sequence
  Description of Artificial Sequence: Synthetic oligonucleotide
ggugauucaccacuuaagu

SEQ ID NO: 146668 - RNA, 19 nt, Artificial Sequence
  Description of Artificial Sequence: Synthetic oligonucleotide
gaucacccuugagaggaag

SEQ ID NO: 146669 - RNA, 19 nt, Artificial Sequence
  Description of Artificial Sequence: Synthetic oligonucleotide
ucacucggcucuucuaaau

SEQ ID NO: 146670 - RNA, 19 nt, Artificial Sequence
  Description of Artificial Sequence: Synthetic oligonucleotide
gaaucaaccgucccuggau

SEQ ID NO: 146671 - RNA, 19 nt, Artificial Sequence
  Description of Artificial Sequence: Synthetic oligonucleotide
ccauacagauuuagcgugg

SEQ ID NO: 146672 - RNA, 19 nt, Artificial Sequence
  Description of Artificial Sequence: Synthetic oligonucleotide
uccacgucaucuccauguc

SEQ ID NO: 146673 - RNA, 19 nt, Artificial Sequence
  Description of Artificial Sequence: Synthetic oligonucleotide
cauucgagguaggaggguc

SEQ ID NO: 146674 - RNA, 19 nt, Artificial Sequence
  Description of Artificial Sequence: Synthetic oligonucleotide
cauccauguguagaguauc

SEQ ID NO: 146675 - RNA, 19 nt, Artificial Sequence
  Description of Artificial Sequence: Synthetic oligonucleotide
acggcugguuuucugguau

SEQ ID NO: 146676 - RNA, 19 nt, Artificial Sequence
  Description of Artificial Sequence: Synthetic oligonucleotide
gcuaucuuuaguuguugga

SEQ ID NO: 146677 - RNA, 19 nt, Artificial Sequence
  Description of Artificial Sequence: Synthetic oligonucleotide
cacgcaacuguuuugaguu

SEQ ID NO: 146678 - RNA, 19 nt, Artificial Sequence
  Description of Artificial Sequence: Synthetic oligonucleotide
aggcgguagccccgagucc

SEQ ID NO: 146679 - RNA, 19 nt, Artificial Sequence
  Description of Artificial Sequence: Synthetic oligonucleotide
uggcuaucuuuaguuguug

SEQ ID NO: 146680 - RNA, 19 nt, Artificial Sequence
  Description of Artificial Sequence: Synthetic oligonucleotide
ucgugaucuggacucccuc

SEQ ID NO: 146681 - RNA, 19 nt, Artificial Sequence
  Description of Artificial Sequence: Synthetic oligonucleotide
uuaaaacaugagaguucuu

SEQ ID NO: 146682 - RNA, 19 nt, Artificial Sequence
  Description of Artificial Sequence: Synthetic oligonucleotide
cucacgucuuguuccggug

SEQ ID NO: 146683 - RNA, 19 nt, Artificial Sequence
  Description of Artificial Sequence: Synthetic oligonucleotide
uagccgacuggagggaacc

SEQ ID NO: 146684 - RNA, 19 nt, Artificial Sequence
  Description of Artificial Sequence: Synthetic oligonucleotide
gucuggcuaaaauucuuaa

SEQ ID NO: 146685 - RNA, 19 nt, Artificial Sequence
  Description of Artificial Sequence: Synthetic oligonucleotide
gagaccauuaaggucuugu

SEQ ID NO: 146686 - RNA, 19 nt, Artificial Sequence
  Description of Artificial Sequence: Synthetic oligonucleotide
aggguguguaagucccuug

SEQ ID NO: 146687 - RNA, 19 nt, Artificial Sequence
  Description of Artificial Sequence: Synthetic oligonucleotide
uggagccuauuuuggaguu

SEQ ID NO: 146688 - RNA, 19 nt, Artificial Sequence
  Description of Artificial Sequence: Synthetic oligonucleotide
uucgagguaggagggucug

SEQ ID NO: 146689 - RNA, 19 nt, Artificial Sequence
  Description of Artificial Sequence: Synthetic oligonucleotide
guguguaagucccuuggua

SEQ ID NO: 146690 - RNA, 19 nt, Artificial Sequence
  Description of Artificial Sequence: Synthetic oligonucleotide
uuucaguugacggcugguu

SEQ ID NO: 146691 - RNA, 19 nt, Artificial Sequence
  Description of Artificial Sequence: Synthetic oligonucleotide
ugcccugaucacccuugag

SEQ ID NO: 146692 - RNA, 19 nt, Artificial Sequence
  Description of Artificial Sequence: Synthetic oligonucleotide
aaaggacaucagaucuuga

SEQ ID NO: 146693 - RNA, 19 nt, Artificial Sequence
  Description of Artificial Sequence: Synthetic oligonucleotide
uggcucacguugacggaga

SEQ ID NO: 146694 - RNA, 19 nt, Artificial Sequence
  Description of Artificial Sequence: Synthetic oligonucleotide
gguguaccgcagcaugggg

SEQ ID NO: 146695 - RNA, 19 nt, Artificial Sequence
  Description of Artificial Sequence: Synthetic oligonucleotide
aggagcaaguugugacuca

SEQ ID NO: 146696 - RNA, 19 nt, Artificial Sequence
  Description of Artificial Sequence: Synthetic oligonucleotide
guugccgaugucagaauuc

SEQ ID NO: 146697 - RNA, 19 nt, Artificial Sequence
  Description of Artificial Sequence: Synthetic oligonucleotide
guaucucaagcagugccuc

SEQ ID NO: 146698 - RNA, 19 nt, Artificial Sequence
  Description of Artificial Sequence: Synthetic oligonucleotide
uucaagccaagcggugaug

SEQ ID NO: 146699 - RNA, 19 nt, Artificial Sequence
  Description of Artificial Sequence: Synthetic oligonucleotide
uucggcucuccacgcuugc

SEQ ID NO: 146700 - RNA, 19 nt, Artificial Sequence
  Description of Artificial Sequence: Synthetic oligonucleotide
gaaggagcgucuuggcugu

SEQ ID NO: 146701 - RNA, 19 nt, Artificial Sequence
  Description of Artificial Sequence: Synthetic oligonucleotide
cuagccgacuggagggaac

SEQ ID NO: 146702 - RNA, 19 nt, Artificial Sequence
  Description of Artificial Sequence: Synthetic oligonucleotide
gcacaaauaaccacaucca

SEQ ID NO: 146703 - RNA, 19 nt, Artificial Sequence
  Description of Artificial Sequence: Synthetic oligonucleotide
ccccuuaaugagaaggcug

SEQ ID NO: 146704 - RNA, 19 nt, Artificial Sequence
  Description of Artificial Sequence: Synthetic oligonucleotide
cuuuaguuguuggauauau

SEQ ID NO: 146705 - RNA, 19 nt, Artificial Sequence
  Description of Artificial Sequence: Synthetic oligonucleotide
caugcaucgcgauacugcu

SEQ ID NO: 146706 - RNA, 19 nt, Artificial Sequence
  Description of Artificial Sequence: Synthetic oligonucleotide
cuucggcucuccacgcuug

SEQ ID NO: 146707 - RNA, 19 nt, Artificial Sequence
  Description of Artificial Sequence: Synthetic oligonucleotide
cacugcggcuggcagaauc

SEQ ID NO: 146708 - RNA, 19 nt, Artificial Sequence
  Description of Artificial Sequence: Synthetic oligonucleotide
acauccauguguagaguau

SEQ ID NO: 146709 - RNA, 19 nt, Artificial Sequence
  Description of Artificial Sequence: Synthetic oligonucleotide
auaagucacucagugccuu

SEQ ID NO: 146710 - RNA, 19 nt, Artificial Sequence
  Description of Artificial Sequence: Synthetic oligonucleotide
cccauaagucacucagugc

SEQ ID NO: 146711 - RNA, 19 nt, Artificial Sequence
  Description of Artificial Sequence: Synthetic oligonucleotide
gcaauauaaaagagcugac

SEQ ID NO: 146712 - RNA, 19 nt, Artificial Sequence
  Description of Artificial Sequence: Synthetic oligonucleotide
acaucccuaucaagucugg

SEQ ID NO: 146713 - RNA, 19 nt, Artificial Sequence
  Description of Artificial Sequence: Synthetic oligonucleotide
gcccugaucacccuugaga

SEQ ID NO: 146714 - RNA, 19 nt, Artificial Sequence
  Description of Artificial Sequence: Synthetic oligonucleotide
uggugcauucgagguagga

SEQ ID NO: 146715 - RNA, 19 nt, Artificial Sequence
  Description of Artificial Sequence: Synthetic oligonucleotide
ucgcgauacugcucuucca

SEQ ID NO: 146716 - RNA, 19 nt, Artificial Sequence
  Description of Artificial Sequence: Synthetic oligonucleotide
cacgcuugcuagccacagg

SEQ ID NO: 146717 - RNA, 19 nt, Artificial Sequence
  Description of Artificial Sequence: Synthetic oligonucleotide
gagccuauuuuggaguucu

SEQ ID NO: 146718 - RNA, 19 nt, Artificial Sequence
  Description of Artificial Sequence: Synthetic oligonucleotide
uucuccuaccucucccaua

SEQ ID NO: 146719 - RNA, 19 nt, Artificial Sequence
  Description of Artificial Sequence: Synthetic oligonucleotide
auacagauuuagcgugguu

SEQ ID NO: 146720 - RNA, 19 nt, Artificial Sequence
  Description of Artificial Sequence: Synthetic oligonucleotide
uggcacaugcaucgcgaua

SEQ ID NO: 146721 - RNA, 19 nt, Artificial Sequence
  Description of Artificial Sequence: Synthetic oligonucleotide
gagcgucuuggcugugagc

SEQ ID NO: 146722 - RNA, 19 nt, Artificial Sequence
  Description of Artificial Sequence: Synthetic oligonucleotide
cugcaggggacucaacaga

SEQ ID NO: 146723 - RNA, 19 nt, Artificial Sequence
  Description of Artificial Sequence: Synthetic oligonucleotide
uccauguguagaguaucuu

SEQ ID NO: 146724 - RNA, 19 nt, Artificial Sequence
  Description of Artificial Sequence: Synthetic oligonucleotide
cagguucgaaacacuuuca

SEQ ID NO: 146725 - RNA, 19 nt, Artificial Sequence
  Description of Artificial Sequence: Synthetic oligonucleotide
guggagccuauuuuggagu

SEQ ID NO: 146726 - RNA, 19 nt, Artificial Sequence
  Description of Artificial Sequence: Synthetic oligonucleotide
gccugaaucagcucccauc

SEQ ID NO: 146727 - RNA, 19 nt, Artificial Sequence
  Description of Artificial Sequence: Synthetic oligonucleotide
gguucugacgaaugccauc

SEQ ID NO: 146728 - RNA, 19 nt, Artificial Sequence
  Description of Artificial Sequence: Synthetic oligonucleotide
uaucggagggaggcucugc

SEQ ID NO: 146729 - RNA, 19 nt, Artificial Sequence
  Description of Artificial Sequence: Synthetic oligonucleotide
cugaaucagcucccaucug

SEQ ID NO: 146730 - RNA, 19 nt, Artificial Sequence
  Description of Artificial Sequence: Synthetic oligonucleotide
uagcgcugcccugaucacc

SEQ ID NO: 146731 - RNA, 19 nt, Artificial Sequence
  Description of Artificial Sequence: Synthetic oligonucleotide
cacaugcaucgcgauacug

SEQ ID NO: 146732 - RNA, 19 nt, Artificial Sequence
  Description of Artificial Sequence: Synthetic oligonucleotide
ccugaucacccuugagagg

SEQ ID NO: 146733 - RNA, 19 nt, Artificial Sequence
  Description of Artificial Sequence: Synthetic oligonucleotide
ucuucccgauuacguggac

SEQ ID NO: 146734 - RNA, 19 nt, Artificial Sequence
  Description of Artificial Sequence: Synthetic oligonucleotide
ugaucacccuugagaggaa

SEQ ID NO: 146735 - RNA, 19 nt, Artificial Sequence
  Description of Artificial Sequence: Synthetic oligonucleotide
auucgagguaggagggucu

SEQ ID NO: 146736 - RNA, 19 nt, Artificial Sequence
  Description of Artificial Sequence: Synthetic oligonucleotide
caucucacccuggaccgug

SEQ ID NO: 146737 - RNA, 19 nt, Artificial Sequence
  Description of Artificial Sequence: Synthetic oligonucleotide
cacaaauaaccacauccau

SEQ ID NO: 146738 - RNA, 19 nt, Artificial Sequence
  Description of Artificial Sequence: Synthetic oligonucleotide
agacugcuagccgacugga

SEQ ID NO: 146739 - RNA, 19 nt, Artificial Sequence
  Description of Artificial Sequence: Synthetic oligonucleotide
uccggugauucaccacuua

SEQ ID NO: 146740 - RNA, 19 nt, Artificial Sequence
  Description of Artificial Sequence: Synthetic oligonucleotide
gacccaaugugucucuuuu

SEQ ID NO: 146741 - RNA, 19 nt, Artificial Sequence
  Description of Artificial Sequence: Synthetic oligonucleotide
cacagggcagacaauucua

SEQ ID NO: 146742 - RNA, 19 nt, Artificial Sequence
  Description of Artificial Sequence: Synthetic oligonucleotide
cguaagucccuucuccagc

SEQ ID NO: 146743 - RNA, 19 nt, Artificial Sequence
  Description of Artificial Sequence: Synthetic oligonucleotide
uuccggugauucaccacuu

SEQ ID NO: 146744 - RNA, 19 nt, Artificial Sequence
  Description of Artificial Sequence: Synthetic oligonucleotide
aagucccuugguacagagu

SEQ ID NO: 146745 - RNA, 19 nt, Artificial Sequence
  Description of Artificial Sequence: Synthetic oligonucleotide
cuugcgccugaaucagcuc

SEQ ID NO: 146746 - RNA, 19 nt, Artificial Sequence
  Description of Artificial Sequence: Synthetic oligonucleotide
uugcuagccacaggagcaa

SEQ ID NO: 146747 - RNA, 19 nt, Artificial Sequence
  Description of Artificial Sequence: Synthetic oligonucleotide
cggugauucaccacuuaag

SEQ ID NO: 146748 - RNA, 19 nt, Artificial Sequence
  Description of Artificial Sequence: Synthetic oligonucleotide
ggagggaaccaauucucaa

SEQ ID NO: 146749 - RNA, 19 nt, Artificial Sequence
  Description of Artificial Sequence: Synthetic oligonucleotide
caauaagaugcugcaaggu

SEQ ID NO: 146750 - RNA, 19 nt, Artificial Sequence
  Description of Artificial Sequence: Synthetic oligonucleotide
auguugccgaugucagaau

SEQ ID NO: 146751 - RNA, 19 nt, Artificial Sequence
  Description of Artificial Sequence: Synthetic oligonucleotide
ucgagguaggagggucugc

SEQ ID NO: 146752 - RNA, 19 nt, Artificial Sequence
  Description of Artificial Sequence: Synthetic oligonucleotide
uggcccguugguguaccgc

SEQ ID NO: 146753 - RNA, 19 nt, Artificial Sequence
  Description of Artificial Sequence: Synthetic oligonucleotide
ugcuagccgacuggaggga

SEQ ID NO: 146754 - RNA, 19 nt, Artificial Sequence
  Description of Artificial Sequence: Synthetic oligonucleotide
caaccgucccuggaucuug

SEQ ID NO: 146755 - RNA, 19 nt, Artificial Sequence
  Description of Artificial Sequence: Synthetic oligonucleotide
gcucuugcgccugaaucag

SEQ ID NO: 146756 - RNA, 19 nt, Artificial Sequence
  Description of Artificial Sequence: Synthetic oligonucleotide
cuggugcauucgagguagg

SEQ ID NO: 146757 - RNA, 19 nt, Artificial Sequence
  Description of Artificial Sequence: Synthetic oligonucleotide
ccacgucaucuccaugucg

SEQ ID NO: 146758 - RNA, 19 nt, Artificial Sequence
  Description of Artificial Sequence: Synthetic oligonucleotide
caucgcgauacugcucuuc

SEQ ID NO: 146759 - RNA, 19 nt, Artificial Sequence
  Description of Artificial Sequence: Synthetic oligonucleotide
gucacucggcucuucuaaa

SEQ ID NO: 146760 - RNA, 19 nt, Artificial Sequence
  Description of Artificial Sequence: Synthetic oligonucleotide
guagcgcugcccugaucac

SEQ ID NO: 146761 - RNA, 19 nt, Artificial Sequence
  Description of Artificial Sequence: Synthetic oligonucleotide
gauaucggagggaggcucu

SEQ ID NO: 146762 - RNA, 19 nt, Artificial Sequence
  Description of Artificial Sequence: Synthetic oligonucleotide
ucaaccgucccuggaucuu

SEQ ID NO: 146763 - RNA, 19 nt, Artificial Sequence
  Description of Artificial Sequence: Synthetic oligonucleotide
aucgugaucuggacucccu

SEQ ID NO: 146764 - RNA, 19 nt, Artificial Sequence
  Description of Artificial Sequence: Synthetic oligonucleotide
gcuauggaaucucggauau

SEQ ID NO: 146765 - RNA, 19 nt, Artificial Sequence
  Description of Artificial Sequence: Synthetic oligonucleotide
acguugacggagaccauua

SEQ ID NO: 146766 - RNA, 19 nt, Artificial Sequence
  Description of Artificial Sequence: Synthetic oligonucleotide
ucgaaggcaccuggcugcu

SEQ ID NO: 146767 - RNA, 19 nt, Artificial Sequence
  Description of Artificial Sequence: Synthetic oligonucleotide
gacggcugguuuucuggua

SEQ ID NO: 146768 - RNA, 19 nt, Artificial Sequence
  Description of Artificial Sequence: Synthetic oligonucleotide
aaccgucccuggaucuugu

SEQ ID NO: 146769 - RNA, 19 nt, Artificial Sequence
  Description of Artificial Sequence: Synthetic oligonucleotide
ugacugucguaagucccuu

SEQ ID NO: 146770 - RNA, 19 nt, Artificial Sequence
  Description of Artificial Sequence: Synthetic oligonucleotide
ucacguugacggagaccau

SEQ ID NO: 146771 - RNA, 19 nt, Artificial Sequence
  Description of Artificial Sequence: Synthetic oligonucleotide
augucggaggagacccaag

SEQ ID NO: 146772 - RNA, 19 nt, Artificial Sequence
  Description of Artificial Sequence: Synthetic oligonucleotide
guaagucccuugguacaga

SEQ ID NO: 146773 - RNA, 19 nt, Artificial Sequence
  Description of Artificial Sequence: Synthetic oligonucleotide
acgcaacuguuuugaguuu

SEQ ID NO: 146774 - RNA, 19 nt, Artificial Sequence
  Description of Artificial Sequence: Synthetic oligonucleotide
accucucccauaagucacu

SEQ ID NO: 146775 - RNA, 19 nt, Artificial Sequence
  Description of Artificial Sequence: Synthetic oligonucleotide
guggcccguugguguaccg

SEQ ID NO: 146776 - RNA, 19 nt, Artificial Sequence
  Description of Artificial Sequence: Synthetic oligonucleotide
gguaucucaagcagugccu

SEQ ID NO: 146777 - RNA, 19 nt, Artificial Sequence
  Description of Artificial Sequence: Synthetic oligonucleotide
ccccgaguccacuucauca

SEQ ID NO: 146778 - RNA, 19 nt, Artificial Sequence
  Description of Artificial Sequence: Synthetic oligonucleotide
aguugacggcugguuuucu

SEQ ID NO: 146779 - RNA, 19 nt, Artificial Sequence
  Description of Artificial Sequence: Synthetic oligonucleotide
gugacugucguaagucccu

SEQ ID NO: 146780 - RNA, 19 nt, Artificial Sequence
  Description of Artificial Sequence: Synthetic oligonucleotide
ggcgguagccccgagucca

SEQ ID NO: 146781 - RNA, 19 nt, Artificial Sequence
  Description of Artificial Sequence: Synthetic oligonucleotide
gugcagacugcuagccgac

SEQ ID NO: 146782 - RNA, 19 nt, Artificial Sequence
  Description of Artificial Sequence: Synthetic oligonucleotide
cacgcugaucuagggugug

SEQ ID NO: 146783 - RNA, 19 nt, Artificial Sequence
  Description of Artificial Sequence: Synthetic oligonucleotide
ccauuaaggucuuguaggu

SEQ ID NO: 146784 - RNA, 19 nt, Artificial Sequence
  Description of Artificial Sequence: Synthetic oligonucleotide
caugucggaggagacccaa

SEQ ID NO: 146785 - RNA, 19 nt, Artificial Sequence
  Description of Artificial Sequence: Synthetic oligonucleotide
gcugaucuaggguguguaa

SEQ ID NO: 146786 - RNA, 19 nt, Artificial Sequence
  Description of Artificial Sequence: Synthetic oligonucleotide
caucccuaucaagucugga

SEQ ID NO: 146787 - RNA, 19 nt, Artificial Sequence
  Description of Artificial Sequence: Synthetic oligonucleotide
cccgauuacguggaccuuc

SEQ ID NO: 146788 - RNA, 19 nt, Artificial Sequence
  Description of Artificial Sequence: Synthetic oligonucleotide
gccuuuucaguugacggcu

SEQ ID NO: 146789 - RNA, 19 nt, Artificial Sequence
  Description of Artificial Sequence: Synthetic oligonucleotide
acgcugaucuagggugugu

SEQ ID NO: 146790 - RNA, 19 nt, Artificial Sequence
  Description of Artificial Sequence: Synthetic oligonucleotide
ucggggcaugaugcuucag

SEQ ID NO: 146791 - RNA, 19 nt, Artificial Sequence
  Description of Artificial Sequence: Synthetic oligonucleotide
aggcuaggagucacucaca

SEQ ID NO: 146792 - RNA, 19 nt, Artificial Sequence
  Description of Artificial Sequence: Synthetic oligonucleotide
cucggggcaugaugcuuca

SEQ ID NO: 146793 - RNA, 19 nt, Artificial Sequence
  Description of Artificial Sequence: Synthetic oligonucleotide
agccuauuuuggaguucug

SEQ ID NO: 146794 - RNA, 19 nt, Artificial Sequence
  Description of Artificial Sequence: Synthetic oligonucleotide
gcggugauguugccgaugu

SEQ ID NO: 146795 - RNA, 19 nt, Artificial Sequence
  Description of Artificial Sequence: Synthetic oligonucleotide
cccguugguguaccgcagc

SEQ ID NO: 146796 - RNA, 19 nt, Artificial Sequence
  Description of Artificial Sequence: Synthetic oligonucleotide
gugcuauuuccuggauauc

SEQ ID NO: 146797 - RNA, 19 nt, Artificial Sequence
  Description of Artificial Sequence: Synthetic oligonucleotide
cuagccacaggagcaaguu

SEQ ID NO: 146798 - RNA, 19 nt, Artificial Sequence
  Description of Artificial Sequence: Synthetic oligonucleotide
gggcucucacuuggcagag

SEQ ID NO: 146799 - RNA, 19 nt, Artificial Sequence
  Description of Artificial Sequence: Synthetic oligonucleotide
ggagccuauuuuggaguuc

SEQ ID NO: 146800 - RNA, 19 nt, Artificial Sequence
  Description of Artificial Sequence: Synthetic oligonucleotide
cuaggguguguaagucccu

SEQ ID NO: 146801 - RNA, 19 nt, Artificial Sequence
  Description of Artificial Sequence: Synthetic oligonucleotide
cgcaacuguuuugaguuuc

SEQ ID NO: 146802 - RNA, 19 nt, Artificial Sequence
  Description of Artificial Sequence: Synthetic oligonucleotide
ccggugauucaccacuuaa

SEQ ID NO: 146803 - RNA, 19 nt, Artificial Sequence
  Description of Artificial Sequence: Synthetic oligonucleotide
agucugcauuucagcacaa

SEQ ID NO: 146804 - RNA, 19 nt, Artificial Sequence
  Description of Artificial Sequence: Synthetic oligonucleotide
cugcucacgcaacuguuuu

SEQ ID NO: 146805 - RNA, 19 nt, Artificial Sequence
  Description of Artificial Sequence: Synthetic oligonucleotide
cucucacuuggcagagacu

SEQ ID NO: 146806 - RNA, 19 nt, Artificial Sequence
  Description of Artificial Sequence: Synthetic oligonucleotide
gcgucuuggcugugagcug

SEQ ID NO: 146807 - RNA, 19 nt, Artificial Sequence
  Description of Artificial Sequence: Synthetic oligonucleotide
agccgacuggagggaacca

SEQ ID NO: 146808 - RNA, 19 nt, Artificial Sequence
  Description of Artificial Sequence: Synthetic oligonucleotide
cugcccugaucacccuuga

SEQ ID NO: 146809 - RNA, 19 nt, Artificial Sequence
  Description of Artificial Sequence: Synthetic oligonucleotide
gcgcgaaguuguuggccug

SEQ ID NO: 146810 - RNA, 19 nt, Artificial Sequence
  Description of Artificial Sequence: Synthetic oligonucleotide
gcagagacucccuguggcu

SEQ ID NO: 146811 - RNA, 19 nt, Artificial Sequence
  Description of Artificial Sequence: Synthetic oligonucleotide
ucccgauuacguggaccuu

SEQ ID NO: 146812 - RNA, 19 nt, Artificial Sequence
  Description of Artificial Sequence: Synthetic oligonucleotide
cgcuugcuagccacaggag

SEQ ID NO: 146813 - RNA, 19 nt, Artificial Sequence
  Description of Artificial Sequence: Synthetic oligonucleotide
cacgucuuguuccggugau

SEQ ID NO: 146814 - RNA, 19 nt, Artificial Sequence
  Description of Artificial Sequence: Synthetic oligonucleotide
cuucuccuaccucucccau

SEQ ID NO: 146815 - RNA, 19 nt, Artificial Sequence
  Description of Artificial Sequence: Synthetic oligonucleotide
gggaaccaauucucaacau

SEQ ID NO: 146816 - RNA, 19 nt, Artificial Sequence
  Description of Artificial Sequence: Synthetic oligonucleotide
gccaagcggugauguugcc

SEQ ID NO: 146817 - RNA, 19 nt, Artificial Sequence
  Description of Artificial Sequence: Synthetic oligonucleotide
ccacagggcagacaauucu

SEQ ID NO: 146818 - RNA, 19 nt, Artificial Sequence
  Description of Artificial Sequence: Synthetic oligonucleotide
ggguagcuucacucaucuc

SEQ ID NO: 146819 - RNA, 19 nt, Artificial Sequence
  Description of Artificial Sequence: Synthetic oligonucleotide
cacguugacggagaccauu

SEQ ID NO: 146820 - RNA, 19 nt, Artificial Sequence
  Description of Artificial Sequence: Synthetic oligonucleotide
ccgugccccuuaaugagaa

SEQ ID NO: 146821 - RNA, 19 nt, Artificial Sequence
  Description of Artificial Sequence: Synthetic oligonucleotide
gcccguugguguaccgcag

SEQ ID NO: 146822 - RNA, 19 nt, Artificial Sequence
  Description of Artificial Sequence: Synthetic oligonucleotide
cgagguaggagggucugca

SEQ ID NO: 146823 - RNA, 19 nt, Artificial Sequence
  Description of Artificial Sequence: Synthetic oligonucleotide
gccccgaguccacuucauc

SEQ ID NO: 146824 - RNA, 19 nt, Artificial Sequence
  Description of Artificial Sequence: Synthetic oligonucleotide
gucugcauuucagcacaau

SEQ ID NO: 146825 - RNA, 19 nt, Artificial Sequence
  Description of Artificial Sequence: Synthetic oligonucleotide
agccccgaguccacuucau

SEQ ID NO: 146826 - RNA, 19 nt, Artificial Sequence
  Description of Artificial Sequence: Synthetic oligonucleotide
ggaggcgguagccccgagu

SEQ ID NO: 146827 - RNA, 19 nt, Artificial Sequence
  Description of Artificial Sequence: Synthetic oligonucleotide
gccgacuggagggaaccaa

SEQ ID NO: 146828 - RNA, 19 nt, Artificial Sequence
  Description of Artificial Sequence: Synthetic oligonucleotide
aguuucccgugaagcucuu

SEQ ID NO: 146829 - RNA, 19 nt, Artificial Sequence
  Description of Artificial Sequence: Synthetic oligonucleotide
ccgauuacguggaccuucu

SEQ ID NO: 146830 - RNA, 19 nt, Artificial Sequence
  Description of Artificial Sequence: Synthetic oligonucleotide
ccgaguccacuucaucaaa

SEQ ID NO: 146831 - RNA, 19 nt, Artificial Sequence
  Description of Artificial Sequence: Synthetic oligonucleotide
gcuagccacaggagcaagu

SEQ ID NO: 146832 - RNA, 19 nt, Artificial Sequence
  Description of Artificial Sequence: Synthetic oligonucleotide
cccuaucaagucuggaguu

SEQ ID NO: 146833 - RNA, 19 nt, Artificial Sequence
  Description of Artificial Sequence: Synthetic oligonucleotide
gcuagccgacuggagggaa

SEQ ID NO: 146834 - RNA, 19 nt, Artificial Sequence
  Description of Artificial Sequence: Synthetic oligonucleotide
gcugcacguucccuuuuau

SEQ ID NO: 146835 - RNA, 19 nt, Artificial Sequence
  Description of Artificial Sequence: Synthetic oligonucleotide
gcacaugcaucgcgauacu

SEQ ID NO: 146836 - RNA, 19 nt, Artificial Sequence
  Description of Artificial Sequence: Synthetic oligonucleotide
ccaugucggaggagaccca

SEQ ID NO: 146837 - RNA, 19 nt, Artificial Sequence
  Description of Artificial Sequence: Synthetic oligonucleotide
cugcggcuggcagaauccu

SEQ ID NO: 146838 - RNA, 19 nt, Artificial Sequence
  Description of Artificial Sequence: Synthetic oligonucleotide
ccgacuggagggaaccaau

SEQ ID NO: 146839 - RNA, 19 nt, Artificial Sequence
  Description of Artificial Sequence: Synthetic oligonucleotide
gcacgcugaucuagggugu

SEQ ID NO: 146840 - RNA, 19 nt, Artificial Sequence
  Description of Artificial Sequence: Synthetic oligonucleotide
gcauucgagguaggagggu

SEQ ID NO: 146841 - RNA, 19 nt, Artificial Sequence
  Description of Artificial Sequence: Synthetic oligonucleotide
ccagacccaaugugucucu

SEQ ID NO: 146842 - RNA, 19 nt, Artificial Sequence
  Description of Artificial Sequence: Synthetic oligonucleotide
ccuaucaagucuggaguuu

SEQ ID NO: 146843 - RNA, 19 nt, Artificial Sequence
  Description of Artificial Sequence: Synthetic oligonucleotide
ccucauacauagagccuuu

SEQ ID NO: 146844 - RNA, 19 nt, Artificial Sequence
  Description of Artificial Sequence: Synthetic oligonucleotide
cgauuacguggaccuucuc

SEQ ID NO: 146845 - RNA, 19 nt, Artificial Sequence
  Description of Artificial Sequence: Synthetic oligonucleotide
cguugacggagaccauuaa

SEQ ID NO: 146846 - RNA, 19 nt, Artificial Sequence
  Description of Artificial Sequence: Synthetic oligonucleotide
gcgccugaaucagcuccca

SEQ ID NO: 146847 - RNA, 19 nt, Artificial Sequence
  Description of Artificial Sequence: Synthetic oligonucleotide
ggcucccacuuggcacaug

SEQ ID NO: 146848 - RNA, 19 nt, Artificial Sequence
  Description of Artificial Sequence: Synthetic oligonucleotide
ccgcagcaugggguagaag

SEQ ID NO: 146849 - RNA, 19 nt, Artificial Sequence
  Description of Artificial Sequence: Synthetic oligonucleotide
cagacccaaugugucucuu

SEQ ID NO: 146850 - RNA, 19 nt, Artificial Sequence
  Description of Artificial Sequence: Synthetic oligonucleotide
ccuucggcucuccacgcuu

SEQ ID NO: 146851 - RNA, 19 nt, Artificial Sequence
  Description of Artificial Sequence: Synthetic oligonucleotide
gggguagcgcugcccugau

SEQ ID NO: 146852 - RNA, 19 nt, Artificial Sequence
  Description of Artificial Sequence: Synthetic oligonucleotide
gcaucgcgauacugcucuu

SEQ ID NO: 146853 - RNA, 19 nt, Artificial Sequence
  Description of Artificial Sequence: Synthetic oligonucleotide
cgccugaaucagcucccau

SEQ ID NO: 146854 - RNA, 19 nt, Artificial Sequence
  Description of Artificial Sequence: Synthetic oligonucleotide
aauuguugcgauuauugcc

SEQ ID NO: 146855 - RNA, 19 nt, Artificial Sequence
  Description of Artificial Sequence: Synthetic oligonucleotide
aauccuaagguuuacuagg

SEQ ID NO: 146856 - RNA, 19 nt, Artificial Sequence
  Description of Artificial Sequence: Synthetic oligonucleotide
auaacaagagaucaacugc

SEQ ID NO: 146857 - RNA, 19 nt, Artificial Sequence
  Description of Artificial Sequence: Synthetic oligonucleotide
uaauaagucacuacguugg

SEQ ID NO: 146858 - RNA, 19 nt, Artificial Sequence
  Description of Artificial Sequence: Synthetic oligonucleotide
uucgcaguauucuaaaugg

SEQ ID NO: 146859 - RNA, 19 nt, Artificial Sequence
  Description of Artificial Sequence: Synthetic oligonucleotide
aauagaauggaauggaauu

SEQ ID NO: 146860 - RNA, 19 nt, Artificial Sequence
  Description of Artificial Sequence: Synthetic oligonucleotide
uggaauuacauuaaauugu

SEQ ID NO: 146861 - RNA, 19 nt, Artificial Sequence
  Description of Artificial Sequence: Synthetic oligonucleotide
aauauuuauucuugaacgu

SEQ ID NO: 146862 - RNA, 19 nt, Artificial Sequence
  Description of Artificial Sequence: Synthetic oligonucleotide
aguuuuauggaggugaccg

SEQ ID NO: 146863 - RNA, 19 nt, Artificial Sequence
  Description of Artificial Sequence: Synthetic oligonucleotide
uuauuuguugggaauuggg

SEQ ID NO: 146864 - RNA, 19 nt, Artificial Sequence
  Description of Artificial Sequence: Synthetic oligonucleotide
uuuauuccguguaacauca

SEQ ID NO: 146865 - RNA, 19 nt, Artificial Sequence
  Description of Artificial Sequence: Synthetic oligonucleotide
uguauuugcucauggaugc

SEQ ID NO: 146866 - RNA, 19 nt, Artificial Sequence
  Description of Artificial Sequence: Synthetic oligonucleotide
uuagaucugagacuauucc

SEQ ID NO: 146867 - RNA, 19 nt, Artificial Sequence
  Description of Artificial Sequence: Synthetic oligonucleotide
aaucguaugucauuaaguu

SEQ ID NO: 146868 - RNA, 19 nt, Artificial Sequence
  Description of Artificial Sequence: Synthetic oligonucleotide
auuuguugggaauugggag

SEQ ID NO: 146869 - RNA, 19 nt, Artificial Sequence
  Description of Artificial Sequence: Synthetic oligonucleotide
ucagauguacaauuaaagu

SEQ ID NO: 146870 - RNA, 19 nt, Artificial Sequence
  Description of Artificial Sequence: Synthetic oligonucleotide
uuuacugaaaucucugggu

SEQ ID NO: 146871 - RNA, 19 nt, Artificial Sequence
  Description of Artificial Sequence: Synthetic oligonucleotide
ucuuaauuguauaaguaua

SEQ ID NO: 146872 - RNA, 19 nt, Artificial Sequence
  Description of Artificial Sequence: Synthetic oligonucleotide
aauagcucauccauacucg

SEQ ID NO: 146873 - RNA, 19 nt, Artificial Sequence
  Description of Artificial Sequence: Synthetic oligonucleotide
aauaagucacuacguuggg

SEQ ID NO: 146874 - RNA, 19 nt, Artificial Sequence
  Description of Artificial Sequence: Synthetic oligonucleotide
uuuucauaccaccugugca

SEQ ID NO: 146875 - RNA, 19 nt, Artificial Sequence
  Description of Artificial Sequence: Synthetic oligonucleotide
auggcaguuauuccaaaac

SEQ ID NO: 146876 - RNA, 19 nt, Artificial Sequence
  Description of Artificial Sequence: Synthetic oligonucleotide
ucuaggguuagcuaggaaa

SEQ ID NO: 146877 - RNA, 19 nt, Artificial Sequence
  Description of Artificial Sequence: Synthetic oligonucleotide
uguagugcggauuuuagau

SEQ ID NO: 146878 - RNA, 19 nt, Artificial Sequence
  Description of Artificial Sequence: Synthetic oligonucleotide
guaauaagucacuacguug

SEQ ID NO: 146879 - RNA, 19 nt, Artificial Sequence
  Description of Artificial Sequence: Synthetic oligonucleotide
aauauuaaauggccuccug

SEQ ID NO: 146880 - RNA, 19 nt, Artificial Sequence
  Description of Artificial Sequence: Synthetic oligonucleotide
uaagucacuacguuggggu

SEQ ID NO: 146881 - RNA, 19 nt, Artificial Sequence
  Description of Artificial Sequence: Synthetic oligonucleotide
gacaccuuaacaauuauga

SEQ ID NO: 146882 - RNA, 19 nt, Artificial Sequence
  Description of Artificial Sequence: Synthetic oligonucleotide
auaugaaaguuugcaaggc

SEQ ID NO: 146883 - RNA, 19 nt, Artificial Sequence
  Description of Artificial Sequence: Synthetic oligonucleotide
uguagcauuugccuguucu

SEQ ID NO: 146884 - RNA, 19 nt, Artificial Sequence
  Description of Artificial Sequence: Synthetic oligonucleotide
uauggcuacacguucuugc

SEQ ID NO: 146885 - RNA, 19 nt, Artificial Sequence
  Description of Artificial Sequence: Synthetic oligonucleotide
uucuaggacaccuuaacaa

SEQ ID NO: 146886 - RNA, 19 nt, Artificial Sequence
  Description of Artificial Sequence: Synthetic oligonucleotide
auucuaaaugguccgauga

SEQ ID NO: 146887 - RNA, 19 nt, Artificial Sequence
  Description of Artificial Sequence: Synthetic oligonucleotide
acuagaauucaaguuuggc

SEQ ID NO: 146888 - RNA, 19 nt, Artificial Sequence
  Description of Artificial Sequence: Synthetic oligonucleotide
aguacauuaaagagcugcc

SEQ ID NO: 146889 - RNA, 19 nt, Artificial Sequence
  Description of Artificial Sequence: Synthetic oligonucleotide
aagguuuagacuccaaauu

SEQ ID NO: 146890 - RNA, 19 nt, Artificial Sequence
  Description of Artificial Sequence: Synthetic oligonucleotide
gaauuguugcgauuauugc

SEQ ID NO: 146891 - RNA, 19 nt, Artificial Sequence
  Description of Artificial Sequence: Synthetic oligonucleotide
uuuuaucccacuucgucga

SEQ ID NO: 146892 - RNA, 19 nt, Artificial Sequence
  Description of Artificial Sequence: Synthetic oligonucleotide
auuccguguaacaucaccc

SEQ ID NO: 146893 - RNA, 19 nt, Artificial Sequence
  Description of Artificial Sequence: Synthetic oligonucleotide
ucuaacuuuauuccgugua

SEQ ID NO: 146894 - RNA, 19 nt, Artificial Sequence
  Description of Artificial Sequence: Synthetic oligonucleotide
agauaggaccaccugagug

SEQ ID NO: 146895 - RNA, 19 nt, Artificial Sequence
  Description of Artificial Sequence: Synthetic oligonucleotide
aaaucguaugucauuaagu

SEQ ID NO: 146896 - RNA, 19 nt, Artificial Sequence
  Description of Artificial Sequence: Synthetic oligonucleotide
uguggaucugaccauuucu

SEQ ID NO: 146897 - RNA, 19 nt, Artificial Sequence
  Description of Artificial Sequence: Synthetic oligonucleotide
aggaaguguaauaagucac

SEQ ID NO: 146898 - RNA, 19 nt, Artificial Sequence
  Description of Artificial Sequence: Synthetic oligonucleotide
uuagcuaggaaagagcaau

SEQ ID NO: 146899 - RNA, 19 nt, Artificial Sequence
  Description of Artificial Sequence: Synthetic oligonucleotide
aguuauuccaaaacuccac

SEQ ID NO: 146900 - RNA, 19 nt, Artificial Sequence
  Description of Artificial Sequence: Synthetic oligonucleotide
uuucuaacuuuauuccgug

SEQ ID NO: 146901 - RNA, 19 nt, Artificial Sequence
  Description of Artificial Sequence: Synthetic oligonucleotide
uagugcggauuuuagaucu

SEQ ID NO: 146902 - RNA, 19 nt, Artificial Sequence
  Description of Artificial Sequence: Synthetic oligonucleotide
aagguugacugcgcaaggc

SEQ ID NO: 146903 - RNA, 19 nt, Artificial Sequence
  Description of Artificial Sequence: Synthetic oligonucleotide
ucgacugcuaggaauauua

SEQ ID NO: 146904 - RNA, 19 nt, Artificial Sequence
  Description of Artificial Sequence: Synthetic oligonucleotide
ugucagauguacaauuaaa

SEQ ID NO: 146905 - RNA, 19 nt, Artificial Sequence
  Description of Artificial Sequence: Synthetic oligonucleotide
uaaaugguccgaugaagca

SEQ ID NO: 146906 - RNA, 19 nt, Artificial Sequence
  Description of Artificial Sequence: Synthetic oligonucleotide
uuccuuuuaccuuugcagu

SEQ ID NO: 146907 - RNA, 19 nt, Artificial Sequence
  Description of Artificial Sequence: Synthetic oligonucleotide
caccuuaacaauuaugaca

SEQ ID NO: 146908 - RNA, 19 nt, Artificial Sequence
  Description of Artificial Sequence: Synthetic oligonucleotide
auacaauagaaggagaaaa

SEQ ID NO: 146909 - RNA, 19 nt, Artificial Sequence
  Description of Artificial Sequence: Synthetic oligonucleotide
ugcgcuuuauggcuacacg

SEQ ID NO: 146910 - RNA, 19 nt, Artificial Sequence
  Description of Artificial Sequence: Synthetic oligonucleotide
ucugcuauuuguaccgaac

SEQ ID NO: 146911 - RNA, 19 nt, Artificial Sequence
  Description of Artificial Sequence: Synthetic oligonucleotide
cuucgcaguauucuaaaug

SEQ ID NO: 146912 - RNA, 19 nt, Artificial Sequence
  Description of Artificial Sequence: Synthetic oligonucleotide
uuagcauuggguuggcccu

SEQ ID NO: 146913 - RNA, 19 nt, Artificial Sequence
  Description of Artificial Sequence: Synthetic oligonucleotide
uuuuaaagcuuugggguca

SEQ ID NO: 146914 - RNA, 19 nt, Artificial Sequence
  Description of Artificial Sequence: Synthetic oligonucleotide
ugcgauuauugccucuucc

SEQ ID NO: 146915 - RNA, 19 nt, Artificial Sequence
  Description of Artificial Sequence: Synthetic oligonucleotide
auuguugcgauuauugccu

SEQ ID NO: 146916 - RNA, 19 nt, Artificial Sequence
  Description of Artificial Sequence: Synthetic oligonucleotide
ucgugacuucucuugagag

SEQ ID NO: 146917 - RNA, 19 nt, Artificial Sequence
  Description of Artificial Sequence: Synthetic oligonucleotide
uuugaguaauuguguaaac

SEQ ID NO: 146918 - RNA, 19 nt, Artificial Sequence
  Description of Artificial Sequence: Synthetic oligonucleotide
accuucuaaaaccuccuug

SEQ ID NO: 146919 - RNA, 19 nt, Artificial Sequence
  Description of Artificial Sequence: Synthetic oligonucleotide
guucucauacuguggauug

SEQ ID NO: 146920 - RNA, 19 nt, Artificial Sequence
  Description of Artificial Sequence: Synthetic oligonucleotide
aagugggcgggucauuuug

SEQ ID NO: 146921 - RNA, 19 nt, Artificial Sequence
  Description of Artificial Sequence: Synthetic oligonucleotide
auagucaagcagaaggcuc

SEQ ID NO: 146922 - RNA, 19 nt, Artificial Sequence
  Description of Artificial Sequence: Synthetic oligonucleotide
cauugcacgaaacccuucc

SEQ ID NO: 146923 - RNA, 19 nt, Artificial Sequence
  Description of Artificial Sequence: Synthetic oligonucleotide
cacuuaguaauuucaugac

SEQ ID NO: 146924 - RNA, 19 nt, Artificial Sequence
  Description of Artificial Sequence: Synthetic oligonucleotide
cacccagaagaauauuucc

SEQ ID NO: 146925 - RNA, 19 nt, Artificial Sequence
  Description of Artificial Sequence: Synthetic oligonucleotide
cugcuauuuguaccgaacc

SEQ ID NO: 146926 - RNA, 19 nt, Artificial Sequence
  Description of Artificial Sequence: Synthetic oligonucleotide
uucgugacuucucuugaga

SEQ ID NO: 146927 - RNA, 19 nt, Artificial Sequence
  Description of Artificial Sequence: Synthetic oligonucleotide
uuccguguaacaucacccc

SEQ ID NO: 146928 - RNA, 19 nt, Artificial Sequence
  Description of Artificial Sequence: Synthetic oligonucleotide
ucgccuuaccuucuuagcu

SEQ ID NO: 146929 - RNA, 19 nt, Artificial Sequence
  Description of Artificial Sequence: Synthetic oligonucleotide
aaugguccgaugaagcaga

SEQ ID NO: 146930 - RNA, 19 nt, Artificial Sequence
  Description of Artificial Sequence: Synthetic oligonucleotide
ugagacuauuccagaauaa

SEQ ID NO: 146931 - RNA, 19 nt, Artificial Sequence
  Description of Artificial Sequence: Synthetic oligonucleotide
acaagguugacugcgcaag

SEQ ID NO: 146932 - RNA, 19 nt, Artificial Sequence
  Description of Artificial Sequence: Synthetic oligonucleotide
uuaauagcucauccauacu

SEQ ID NO: 146933 - RNA, 19 nt, Artificial Sequence
  Description of Artificial Sequence: Synthetic oligonucleotide
uaguaauuucaugaccagc

SEQ ID NO: 146934 - RNA, 19 nt, Artificial Sequence
  Description of Artificial Sequence: Synthetic oligonucleotide
ucuucgugacuucucuuga

SEQ ID NO: 146935 - RNA, 19 nt, Artificial Sequence
  Description of Artificial Sequence: Synthetic oligonucleotide
uacucuucgugacuucucu

SEQ ID NO: 146936 - RNA, 19 nt, Artificial Sequence
  Description of Artificial Sequence: Synthetic oligonucleotide
guaaacucaaaucguaugu

SEQ ID NO: 146937 - RNA, 19 nt, Artificial Sequence
  Description of Artificial Sequence: Synthetic oligonucleotide
ucuugaacguuuacagcaa

SEQ ID NO: 146938 - RNA, 19 nt, Artificial Sequence
  Description of Artificial Sequence: Synthetic oligonucleotide
gaaucagagacagggguac

SEQ ID NO: 146939 - RNA, 19 nt, Artificial Sequence
  Description of Artificial Sequence: Synthetic oligonucleotide
uuauggaggugaccgcuug

SEQ ID NO: 146940 - RNA, 19 nt, Artificial Sequence
  Description of Artificial Sequence: Synthetic oligonucleotide
aaaucgacugcuaggaaua

SEQ ID NO: 146941 - RNA, 19 nt, Artificial Sequence
  Description of Artificial Sequence: Synthetic oligonucleotide
gagagucaugcacggagag

SEQ ID NO: 146942 - RNA, 19 nt, Artificial Sequence
  Description of Artificial Sequence: Synthetic oligonucleotide
ugcggauuuuagaucugag

SEQ ID NO: 146943 - RNA, 19 nt, Artificial Sequence
  Description of Artificial Sequence: Synthetic oligonucleotide
auaagucacuacguugggg

SEQ ID NO: 146944 - RNA, 19 nt, Artificial Sequence
  Description of Artificial Sequence: Synthetic oligonucleotide
ucauccauacucgucuggc

SEQ ID NO: 146945 - RNA, 19 nt, Artificial Sequence
  Description of Artificial Sequence: Synthetic oligonucleotide
ggagagccgaaucagagac

SEQ ID NO: 146946 - RNA, 19 nt, Artificial Sequence
  Description of Artificial Sequence: Synthetic oligonucleotide
guaucuaggguuagcuagg

SEQ ID NO: 146947 - RNA, 19 nt, Artificial Sequence
  Description of Artificial Sequence: Synthetic oligonucleotide
aacaagguugacugcgcaa

SEQ ID NO: 146948 - RNA, 19 nt, Artificial Sequence
  Description of Artificial Sequence: Synthetic oligonucleotide
uaggacaccuuaacaauua

SEQ ID NO: 146949 - RNA, 19 nt, Artificial Sequence
  Description of Artificial Sequence: Synthetic oligonucleotide
accaagagauaggaccacc

SEQ ID NO: 146950 - RNA, 19 nt, Artificial Sequence
  Description of Artificial Sequence: Synthetic oligonucleotide
uccuuuuaccuuugcaguc

SEQ ID NO: 146951 - RNA, 19 nt, Artificial Sequence
  Description of Artificial Sequence: Synthetic oligonucleotide
ggaauauuaaauggccucc

SEQ ID NO: 146952 - RNA, 19 nt, Artificial Sequence
  Description of Artificial Sequence: Synthetic oligonucleotide
ugcacgaaacccuuccuau

SEQ ID NO: 146953 - RNA, 19 nt, Artificial Sequence
  Description of Artificial Sequence: Synthetic oligonucleotide
ucuccgccccaucacagcc

SEQ ID NO: 146954 - RNA, 19 nt, Artificial Sequence
  Description of Artificial Sequence: Synthetic oligonucleotide
aaguuaaggaugucaccuu

SEQ ID NO: 146955 - RNA, 19 nt, Artificial Sequence
  Description of Artificial Sequence: Synthetic oligonucleotide
uuuauccucuacuccaguu

SEQ ID NO: 146956 - RNA, 19 nt, Artificial Sequence
  Description of Artificial Sequence: Synthetic oligonucleotide
gguugaugcgcuuuauggc

SEQ ID NO: 146957 - RNA, 19 nt, Artificial Sequence
  Description of Artificial Sequence: Synthetic oligonucleotide
ugguggguauuugugguag

SEQ ID NO: 146958 - RNA, 19 nt, Artificial Sequence
  Description of Artificial Sequence: Synthetic oligonucleotide
ucaugaccgucaaccaagc

SEQ ID NO: 146959 - RNA, 19 nt, Artificial Sequence
  Description of Artificial Sequence: Synthetic oligonucleotide
uagcuaggaaagagcaaug

SEQ ID NO: 146960 - RNA, 19 nt, Artificial Sequence
  Description of Artificial Sequence: Synthetic oligonucleotide
cggauuuuagaucugagac

SEQ ID NO: 146961 - RNA, 19 nt, Artificial Sequence
  Description of Artificial Sequence: Synthetic oligonucleotide
gcaguuauuccaaaacucc

SEQ ID NO: 146962 - RNA, 19 nt, Artificial Sequence
  Description of Artificial Sequence: Synthetic oligonucleotide
cguaucuaggguuagcuag

SEQ ID NO: 146963 - RNA, 19 nt, Artificial Sequence
  Description of Artificial Sequence: Synthetic oligonucleotide
cauacuguggauugcugga

SEQ ID NO: 146964 - RNA, 19 nt, Artificial Sequence
  Description of Artificial Sequence: Synthetic oligonucleotide
auagcucauccauacucgu

SEQ ID NO: 146965 - RNA, 19 nt, Artificial Sequence
  Description of Artificial Sequence: Synthetic oligonucleotide
auguagugcggauuuuaga

SEQ ID NO: 146966 - RNA, 19 nt, Artificial Sequence
  Description of Artificial Sequence: Synthetic oligonucleotide
cagaagccaacuuaaaugu

SEQ ID NO: 146967 - RNA, 19 nt, Artificial Sequence
  Description of Artificial Sequence: Synthetic oligonucleotide
gggcgggcaagccaaaucg

SEQ ID NO: 146968 - RNA, 19 nt, Artificial Sequence
  Description of Artificial Sequence: Synthetic oligonucleotide
ucgcaguauucuaaauggu

SEQ ID NO: 146969 - RNA, 19 nt, Artificial Sequence
  Description of Artificial Sequence: Synthetic oligonucleotide
ugacaauguauuugaugau

SEQ ID NO: 146970 - RNA, 19 nt, Artificial Sequence
  Description of Artificial Sequence: Synthetic oligonucleotide
aucccacuucgucgaagcc

SEQ ID NO: 146971 - RNA, 19 nt, Artificial Sequence
  Description of Artificial Sequence: Synthetic oligonucleotide
gacuguauuugcucaugga

SEQ ID NO: 146972 - RNA, 19 nt, Artificial Sequence
  Description of Artificial Sequence: Synthetic oligonucleotide
cucgccuuaccuucuuagc

SEQ ID NO: 146973 - RNA, 19 nt, Artificial Sequence
  Description of Artificial Sequence: Synthetic oligonucleotide
gguuuagacuccaaauuug

SEQ ID NO: 146974 - RNA, 19 nt, Artificial Sequence
  Description of Artificial Sequence: Synthetic oligonucleotide
cuucgugacuucucuugag

SEQ ID NO: 146975 - RNA, 19 nt, Artificial Sequence
  Description of Artificial Sequence: Synthetic oligonucleotide
agagucaugcacggagagg

SEQ ID NO: 146976 - RNA, 19 nt, Artificial Sequence
  Description of Artificial Sequence: Synthetic oligonucleotide
gguucuaggacaccuuaac

SEQ ID NO: 146977 - RNA, 19 nt, Artificial Sequence
  Description of Artificial Sequence: Synthetic oligonucleotide
cucaacugagcaaacccga

SEQ ID NO: 146978 - RNA, 19 nt, Artificial Sequence
  Description of Artificial Sequence: Synthetic oligonucleotide
aguauucuaaaugguccga

SEQ ID NO: 146979 - RNA, 19 nt, Artificial Sequence
  Description of Artificial Sequence: Synthetic oligonucleotide
guagugcggauuuuagauc

SEQ ID NO: 146980 - RNA, 19 nt, Artificial Sequence
  Description of Artificial Sequence: Synthetic oligonucleotide
gugacggcaagggacauac

SEQ ID NO: 146981 - RNA, 19 nt, Artificial Sequence
  Description of Artificial Sequence: Synthetic oligonucleotide
ugggcuauaucugggguuc

SEQ ID NO: 146982 - RNA, 19 nt, Artificial Sequence
  Description of Artificial Sequence: Synthetic oligonucleotide
uuacucuucgugacuucuc

SEQ ID NO: 146983 - RNA, 19 nt, Artificial Sequence
  Description of Artificial Sequence: Synthetic oligonucleotide
ucccacuucgucgaagcca

SEQ ID NO: 146984 - RNA, 19 nt, Artificial Sequence
  Description of Artificial Sequence: Synthetic oligonucleotide
auugcacgaaacccuuccu

SEQ ID NO: 146985 - RNA, 19 nt, Artificial Sequence
  Description of Artificial Sequence: Synthetic oligonucleotide
ucuaaagugggcgggucau

SEQ ID NO: 146986 - RNA, 19 nt, Artificial Sequence
  Description of Artificial Sequence: Synthetic oligonucleotide
gguuagcuaggaaagagca

SEQ ID NO: 146987 - RNA, 19 nt, Artificial Sequence
  Description of Artificial Sequence: Synthetic oligonucleotide
ggaaccuccacuuaguaau

SEQ ID NO: 146988 - RNA, 19 nt, Artificial Sequence
  Description of Artificial Sequence: Synthetic oligonucleotide
uacugaaaucucuggguuu

SEQ ID NO: 146989 - RNA, 19 nt, Artificial Sequence
  Description of Artificial Sequence: Synthetic oligonucleotide
guugggaauugggagugag

SEQ ID NO: 146990 - RNA, 19 nt, Artificial Sequence
  Description of Artificial Sequence: Synthetic oligonucleotide
uucgucgaagccagccucu

SEQ ID NO: 146991 - RNA, 19 nt, Artificial Sequence
  Description of Artificial Sequence: Synthetic oligonucleotide
uuaucccacuucgucgaag

SEQ ID NO: 146992 - RNA, 19 nt, Artificial Sequence
  Description of Artificial Sequence: Synthetic oligonucleotide
ugguucuaggacaccuuaa

SEQ ID NO: 146993 - RNA, 19 nt, Artificial Sequence
  Description of Artificial Sequence: Synthetic oligonucleotide
acggcaagggacauacauc

SEQ ID NO: 146994 - RNA, 19 nt, Artificial Sequence
  Description of Artificial Sequence: Synthetic oligonucleotide
gugcaaagcauaaauauau

SEQ ID NO: 146995 - RNA, 19 nt, Artificial Sequence
  Description of Artificial Sequence: Synthetic oligonucleotide
uccggagagccgaaucaga

SEQ ID NO: 146996 - RNA, 19 nt, Artificial Sequence
  Description of Artificial Sequence: Synthetic oligonucleotide
cuucgucgaagccagccuc

SEQ ID NO: 146997 - RNA, 19 nt, Artificial Sequence
  Description of Artificial Sequence: Synthetic oligonucleotide
augcgcuuuauggcuacac

SEQ ID NO: 146998 - RNA, 19 nt, Artificial Sequence
  Description of Artificial Sequence: Synthetic oligonucleotide
uuauggcuacacguucuug

SEQ ID NO: 146999 - RNA, 19 nt, Artificial Sequence
  Description of Artificial Sequence: Synthetic oligonucleotide
caugauagaugagggugac

SEQ ID NO: 147000 - RNA, 19 nt, Artificial Sequence
  Description of Artificial Sequence: Synthetic oligonucleotide
uucucauacuguggauugc

SEQ ID NO: 147001 - RNA, 19 nt, Artificial Sequence
  Description of Artificial Sequence: Synthetic oligonucleotide
uugggcuauaucugggguu

SEQ ID NO: 147002 - RNA, 19 nt, Artificial Sequence
  Description of Artificial Sequence: Synthetic oligonucleotide
augguucuaggacaccuua

SEQ ID NO: 147003 - RNA, 19 nt, Artificial Sequence
  Description of Artificial Sequence: Synthetic oligonucleotide
ugaugcgcuuuauggcuac

SEQ ID NO: 147004 - RNA, 19 nt, Artificial Sequence
  Description of Artificial Sequence: Synthetic oligonucleotide
gaucuccgccccaucacag

SEQ ID NO: 147005 - RNA, 19 nt, Artificial Sequence
  Description of Artificial Sequence: Synthetic oligonucleotide
gacggcaagggacauacau

SEQ ID NO: 147006 - RNA, 19 nt, Artificial Sequence
  Description of Artificial Sequence: Synthetic oligonucleotide
gguauuugugguagggcgc

SEQ ID NO: 147007 - RNA, 19 nt, Artificial Sequence
  Description of Artificial Sequence: Synthetic oligonucleotide
gaggugaccgcuugaccca

SEQ ID NO: 147008 - RNA, 19 nt, Artificial Sequence
  Description of Artificial Sequence: Synthetic oligonucleotide
aaagugggcgggucauuuu

SEQ ID NO: 147009 - RNA, 19 nt, Artificial Sequence
  Description of Artificial Sequence: Synthetic oligonucleotide
ggcaguuauuccaaaacuc

SEQ ID NO: 147010 - RNA, 19 nt, Artificial Sequence
  Description of Artificial Sequence: Synthetic oligonucleotide
ccgguggcuaauucaaugg

SEQ ID NO: 147011 - RNA, 19 nt, Artificial Sequence
  Description of Artificial Sequence: Synthetic oligonucleotide
uaaagugggcgggucauuu

SEQ ID NO: 147012 - RNA, 19 nt, Artificial Sequence
  Description of Artificial Sequence: Synthetic oligonucleotide
gaaaguuugcaaggcaccu

SEQ ID NO: 147013 - RNA, 19 nt, Artificial Sequence
  Description of Artificial Sequence: Synthetic oligonucleotide
uuucuaaagugggcggguc

SEQ ID NO: 147014 - RNA, 19 nt, Artificial Sequence
  Description of Artificial Sequence: Synthetic oligonucleotide
uuauugccucuuccagaac

SEQ ID NO: 147015 - RNA, 19 nt, Artificial Sequence
  Description of Artificial Sequence: Synthetic oligonucleotide
caaaucgacugcuaggaau

SEQ ID NO: 147016 - RNA, 19 nt, Artificial Sequence
  Description of Artificial Sequence: Synthetic oligonucleotide
ggagagggacuguauuugc

SEQ ID NO: 147017 - RNA, 19 nt, Artificial Sequence
  Description of Artificial Sequence: Synthetic oligonucleotide
uuauuccguguaacaucac

SEQ ID NO: 147018 - RNA, 19 nt, Artificial Sequence
  Description of Artificial Sequence: Synthetic oligonucleotide
aggcaauuauaaauaacuu

SEQ ID NO: 147019 - RNA, 19 nt, Artificial Sequence
  Description of Artificial Sequence: Synthetic oligonucleotide
ggauuuuagaucugagacu

SEQ ID NO: 147020 - RNA, 19 nt, Artificial Sequence
  Description of Artificial Sequence: Synthetic oligonucleotide
uccauacucgucuggcauu

SEQ ID NO: 147021 - RNA, 19 nt, Artificial Sequence
  Description of Artificial Sequence: Synthetic oligonucleotide
aagguuuacuagguucaua

SEQ ID NO: 147022 - RNA, 19 nt, Artificial Sequence
  Description of Artificial Sequence: Synthetic oligonucleotide
auccuaagguuuacuaggu

SEQ ID NO: 147023 - RNA, 19 nt, Artificial Sequence
  Description of Artificial Sequence: Synthetic oligonucleotide
agcauggaaucaaaaccgu

SEQ ID NO: 147024 - RNA, 19 nt, Artificial Sequence
  Description of Artificial Sequence: Synthetic oligonucleotide
acgaaacccuuccuauuau

SEQ ID NO: 147025 - RNA, 19 nt, Artificial Sequence
  Description of Artificial Sequence: Synthetic oligonucleotide
agacacagugaaaguaacu

SEQ ID NO: 147026 - RNA, 19 nt, Artificial Sequence
  Description of Artificial Sequence: Synthetic oligonucleotide
gcgauuauugccucuucca

SEQ ID NO: 147027 - RNA, 19 nt, Artificial Sequence
  Description of Artificial Sequence: Synthetic oligonucleotide
aucugcuauuuguaccgaa

SEQ ID NO: 147028 - RNA, 19 nt, Artificial Sequence
  Description of Artificial Sequence: Synthetic oligonucleotide
uuguugcgauuauugccuc

SEQ ID NO: 147029 - RNA, 19 nt, Artificial Sequence
  Description of Artificial Sequence: Synthetic oligonucleotide
aaucgacugcuaggaauau

SEQ ID NO: 147030 - RNA, 19 nt, Artificial Sequence
  Description of Artificial Sequence: Synthetic oligonucleotide
uaagguuuacuagguucau

SEQ ID NO: 147031 - RNA, 19 nt, Artificial Sequence
  Description of Artificial Sequence: Synthetic oligonucleotide
uugcgauuauugccucuuc

SEQ ID NO: 147032 - RNA, 19 nt, Artificial Sequence
  Description of Artificial Sequence: Synthetic oligonucleotide
gguugacugcgcaaggccc

SEQ ID NO: 147033 - RNA, 19 nt, Artificial Sequence
  Description of Artificial Sequence: Synthetic oligonucleotide
auggaaccuccacuuagua

SEQ ID NO: 147034 - RNA, 19 nt, Artificial Sequence
  Description of Artificial Sequence: Synthetic oligonucleotide
agagcuccugagacacacc

SEQ ID NO: 147035 - RNA, 19 nt, Artificial Sequence
  Description of Artificial Sequence: Synthetic oligonucleotide
gaacguuuacagcaauuuu

SEQ ID NO: 147036 - RNA, 19 nt, Artificial Sequence
  Description of Artificial Sequence: Synthetic oligonucleotide
gcggauuuuagaucugaga

SEQ ID NO: 147037 - RNA, 19 nt, Artificial Sequence
  Description of Artificial Sequence: Synthetic oligonucleotide
gucacuacguugggguggc

SEQ ID NO: 147038 - RNA, 19 nt, Artificial Sequence
  Description of Artificial Sequence: Synthetic oligonucleotide
gccaaaucgacugcuagga

SEQ ID NO: 147039 - RNA, 19 nt, Artificial Sequence
  Description of Artificial Sequence: Synthetic oligonucleotide
cgauuauugccucuuccag

SEQ ID NO: 147040 - RNA, 19 nt, Artificial Sequence
  Description of Artificial Sequence: Synthetic oligonucleotide
gaaacccuuccuauuauuu

SEQ ID NO: 147041 - RNA, 19 nt, Artificial Sequence
  Description of Artificial Sequence: Synthetic oligonucleotide
aacucgccuuaccuucuua

SEQ ID NO: 147042 - RNA, 19 nt, Artificial Sequence
  Description of Artificial Sequence: Synthetic oligonucleotide
ugguagggcgcugcuccgg

SEQ ID NO: 147043 - RNA, 19 nt, Artificial Sequence
  Description of Artificial Sequence: Synthetic oligonucleotide
uuagcucuuugggcuauau

SEQ ID NO: 147044 - RNA, 19 nt, Artificial Sequence
  Description of Artificial Sequence: Synthetic oligonucleotide
cuacacguucuugccuggg

SEQ ID NO: 147045 - RNA, 19 nt, Artificial Sequence
  Description of Artificial Sequence: Synthetic oligonucleotide
ccggagagccgaaucagag

SEQ ID NO: 147046 - RNA, 19 nt, Artificial Sequence
  Description of Artificial Sequence: Synthetic oligonucleotide
acguucuugccuggguuug

SEQ ID NO: 147047 - RNA, 19 nt, Artificial Sequence
  Description of Artificial Sequence: Synthetic oligonucleotide
ugguccgaugaagcagaag

SEQ ID NO: 147048 - RNA, 19 nt, Artificial Sequence
  Description of Artificial Sequence: Synthetic oligonucleotide
gucuaacagaacggcagca

SEQ ID NO: 147049 - RNA, 19 nt, Artificial Sequence
  Description of Artificial Sequence: Synthetic oligonucleotide
cacuacguugggguggcug

SEQ ID NO: 147050 - RNA, 19 nt, Artificial Sequence
  Description of Artificial Sequence: Synthetic oligonucleotide
uauuugugguagggcgcug

SEQ ID NO: 147051 - RNA, 19 nt, Artificial Sequence
  Description of Artificial Sequence: Synthetic oligonucleotide
ucuuagcucuuugggcuau

SEQ ID NO: 147052 - RNA, 19 nt, Artificial Sequence
  Description of Artificial Sequence: Synthetic oligonucleotide
gcuauaucugggguucuug

SEQ ID NO: 147053 - RNA, 19 nt, Artificial Sequence
  Description of Artificial Sequence: Synthetic oligonucleotide
guuagcuaggaaagagcaa

SEQ ID NO: 147054 - RNA, 19 nt, Artificial Sequence
  Description of Artificial Sequence: Synthetic oligonucleotide
ggcaagccaaaucgacugc

SEQ ID NO: 147055 - RNA, 19 nt, Artificial Sequence
  Description of Artificial Sequence: Synthetic oligonucleotide
aucuaggguuagcuaggaa

SEQ ID NO: 147056 - RNA, 19 nt, Artificial Sequence
  Description of Artificial Sequence: Synthetic oligonucleotide
gcuacacguucuugccugg

SEQ ID NO: 147057 - RNA, 19 nt, Artificial Sequence
  Description of Artificial Sequence: Synthetic oligonucleotide
gggacauacaucagcucac

SEQ ID NO: 147058 - RNA, 19 nt, Artificial Sequence
  Description of Artificial Sequence: Synthetic oligonucleotide
acucuucgugacuucucuu

SEQ ID NO: 147059 - RNA, 19 nt, Artificial Sequence
  Description of Artificial Sequence: Synthetic oligonucleotide
gaacggcagcaucuucgca

SEQ ID NO: 147060 - RNA, 19 nt, Artificial Sequence
  Description of Artificial Sequence: Synthetic oligonucleotide
accgaaccauccucaccca

SEQ ID NO: 147061 - RNA, 19 nt, Artificial Sequence
  Description of Artificial Sequence: Synthetic oligonucleotide
cuaggacaccuuaacaauu

SEQ ID NO: 147062 - RNA, 19 nt, Artificial Sequence
  Description of Artificial Sequence: Synthetic oligonucleotide
gcaugauagaugaggguga

SEQ ID NO: 147063 - RNA, 19 nt, Artificial Sequence
  Description of Artificial Sequence: Synthetic oligonucleotide
guauuugugguagggcgcu

SEQ ID NO: 147064 - RNA, 19 nt, Artificial Sequence
  Description of Artificial Sequence: Synthetic oligonucleotide
gcuaggaaagagcaauggu

SEQ ID NO: 147065 - RNA, 19 nt, Artificial Sequence
  Description of Artificial Sequence: Synthetic oligonucleotide
ggaaguguaauaagucacu

SEQ ID NO: 147066 - RNA, 19 nt, Artificial Sequence
  Description of Artificial Sequence: Synthetic oligonucleotide
gugaccgcuugacccagga

SEQ ID NO: 147067 - RNA, 19 nt, Artificial Sequence
  Description of Artificial Sequence: Synthetic oligonucleotide
caucucgucgucgcuccac

SEQ ID NO: 147068 - RNA, 19 nt, Artificial Sequence
  Description of Artificial Sequence: Synthetic oligonucleotide
gugcggauuuuagaucuga

SEQ ID NO: 147069 - RNA, 19 nt, Artificial Sequence
  Description of Artificial Sequence: Synthetic oligonucleotide
ugacggcaagggacauaca

SEQ ID NO: 147070 - RNA, 19 nt, Artificial Sequence
  Description of Artificial Sequence: Synthetic oligonucleotide
agugcggauuuuagaucug

SEQ ID NO: 147071 - RNA, 19 nt, Artificial Sequence
  Description of Artificial Sequence: Synthetic oligonucleotide
cagccacuauaacuacauc

SEQ ID NO: 147072 - RNA, 19 nt, Artificial Sequence
  Description of Artificial Sequence: Synthetic oligonucleotide
acggaggcggggcaugaua

SEQ ID NO: 147073 - RNA, 19 nt, Artificial Sequence
  Description of Artificial Sequence: Synthetic oligonucleotide
guauucuaaaugguccgau

SEQ ID NO: 147074 - RNA, 19 nt, Artificial Sequence
  Description of Artificial Sequence: Synthetic oligonucleotide
gagagccgaaucagagaca

SEQ ID NO: 147075 - RNA, 19 nt, Artificial Sequence
  Description of Artificial Sequence: Synthetic oligonucleotide
uccucacuuaggggcgggc

SEQ ID NO: 147076 - RNA, 19 nt, Artificial Sequence
  Description of Artificial Sequence: Synthetic oligonucleotide
cucgauugacaauguauuu

SEQ ID NO: 147077 - RNA, 19 nt, Artificial Sequence
  Description of Artificial Sequence: Synthetic oligonucleotide
gggaucuccgccccaucac

SEQ ID NO: 147078 - RNA, 19 nt, Artificial Sequence
  Description of Artificial Sequence: Synthetic oligonucleotide
gcuauuuguaccgaaccau

SEQ ID NO: 147079 - RNA, 19 nt, Artificial Sequence
  Description of Artificial Sequence: Synthetic oligonucleotide
gcagucuaacagaacggca

SEQ ID NO: 147080 - RNA, 19 nt, Artificial Sequence
  Description of Artificial Sequence: Synthetic oligonucleotide
gaaggcucuuggguuggaa

SEQ ID NO: 147081 - RNA, 19 nt, Artificial Sequence
  Description of Artificial Sequence: Synthetic oligonucleotide
guugacugcgcaaggcccu

SEQ ID NO: 147082 - RNA, 19 nt, Artificial Sequence
  Description of Artificial Sequence: Synthetic oligonucleotide
cuugagaauuguugcgauu

SEQ ID NO: 147083 - RNA, 19 nt, Artificial Sequence
  Description of Artificial Sequence: Synthetic oligonucleotide
aucgacugcuaggaauauu

SEQ ID NO: 147084 - RNA, 19 nt, Artificial Sequence
  Description of Artificial Sequence: Synthetic oligonucleotide
guugcgauuauugccucuu

SEQ ID NO: 147085 - RNA, 19 nt, Artificial Sequence
  Description of Artificial Sequence: Synthetic oligonucleotide
gccagaagccaacuuaaau

SEQ ID NO: 147086 - RNA, 19 nt, Artificial Sequence
  Description of Artificial Sequence: Synthetic oligonucleotide
agucaugcacggagaggga

SEQ ID NO: 147087 - RNA, 19 nt, Artificial Sequence
  Description of Artificial Sequence: Synthetic oligonucleotide
cggaggcggggcaugauag

SEQ ID NO: 147088 - RNA, 19 nt, Artificial Sequence
  Description of Artificial Sequence: Synthetic oligonucleotide
cugccguaucuaggguuag

SEQ ID NO: 147089 - RNA, 19 nt, Artificial Sequence
  Description of Artificial Sequence: Synthetic oligonucleotide
ucgucgcuccacucccaau

SEQ ID NO: 147090 - RNA, 19 nt, Artificial Sequence
  Description of Artificial Sequence: Synthetic oligonucleotide
gaacggaggcggggcauga

SEQ ID NO: 147091 - RNA, 19 nt, Artificial Sequence
  Description of Artificial Sequence: Synthetic oligonucleotide
ccucgauugacaauguauu

SEQ ID NO: 147092 - RNA, 19 nt, Artificial Sequence
  Description of Artificial Sequence: Synthetic oligonucleotide
aacggaggcggggcaugau

SEQ ID NO: 147093 - RNA, 19 nt, Artificial Sequence
  Description of Artificial Sequence: Synthetic oligonucleotide
aucggggaucuccgcccca

SEQ ID NO: 147094 - RNA, 19 nt, Artificial Sequence
  Description of Artificial Sequence: Synthetic oligonucleotide
cgucgcuccacucccaauc

SEQ ID NO: 147095 - RNA, 19 nt, Artificial Sequence
  Description of Artificial Sequence: Synthetic oligonucleotide
ggcaguauugucagaugua

SEQ ID NO: 147096 - RNA, 19 nt, Artificial Sequence
  Description of Artificial Sequence: Synthetic oligonucleotide
ccgaaucagagacaggggu

SEQ ID NO: 147097 - RNA, 19 nt, Artificial Sequence
  Description of Artificial Sequence: Synthetic oligonucleotide
gucgucgcuccacucccaa

SEQ ID NO: 147098 - RNA, 19 nt, Artificial Sequence
  Description of Artificial Sequence: Synthetic oligonucleotide
cagcauggggugccaacaa

SEQ ID NO: 147099 - RNA, 19 nt, Artificial Sequence
  Description of Artificial Sequence: Synthetic oligonucleotide
ccacccuuccggagagccg

SEQ ID NO: 147100 - RNA, 19 nt, Artificial Sequence
  Description of Artificial Sequence: Synthetic oligonucleotide
ccaagagauaggaccaccu

SEQ ID NO: 147101 - RNA, 19 nt, Artificial Sequence
  Description of Artificial Sequence: Synthetic oligonucleotide
caggaacucgccuuaccuu

SEQ ID NO: 147102 - RNA, 19 nt, Artificial Sequence
  Description of Artificial Sequence: Synthetic oligonucleotide
cuccgccccaucacagcca

SEQ ID NO: 147103 - RNA, 19 nt, Artificial Sequence
  Description of Artificial Sequence: Synthetic oligonucleotide
ccuuauguagugcggauuu

SEQ ID NO: 147104 - RNA, 19 nt, Artificial Sequence
  Description of Artificial Sequence: Synthetic oligonucleotide
gagcugccguaucuagggu

SEQ ID NO: 147105 - RNA, 19 nt, Artificial Sequence
  Description of Artificial Sequence: Synthetic oligonucleotide
ggaggcggggcaugauaga

SEQ ID NO: 147106 - RNA, 19 nt, Artificial Sequence
  Description of Artificial Sequence: Synthetic oligonucleotide
caccuccuugaagguuuag

SEQ ID NO: 147107 - RNA, 19 nt, Artificial Sequence
  Description of Artificial Sequence: Synthetic oligonucleotide
gccguaucuaggguuagcu

SEQ ID NO: 147108 - RNA, 19 nt, Artificial Sequence
  Description of Artificial Sequence: Synthetic oligonucleotide
cuccucgauugacaaugua

SEQ ID NO: 147109 - RNA, 19 nt, Artificial Sequence
  Description of Artificial Sequence: Synthetic oligonucleotide
ugacugcgcaaggcccuuc

SEQ ID NO: 147110 - RNA, 19 nt, Artificial Sequence
  Description of Artificial Sequence: Synthetic oligonucleotide
gggcaugauagaugagggu

SEQ ID NO: 147111 - RNA, 19 nt, Artificial Sequence
  Description of Artificial Sequence: Synthetic oligonucleotide
cacggagagggacuguauu

SEQ ID NO: 147112 - RNA, 19 nt, Artificial Sequence
  Description of Artificial Sequence: Synthetic oligonucleotide
gaaccuccacuuaguaauu

SEQ ID NO: 147113 - RNA, 19 nt, Artificial Sequence
  Description of Artificial Sequence: Synthetic oligonucleotide
ggugaccgcuugacccagg

SEQ ID NO: 147114 - RNA, 19 nt, Artificial Sequence
  Description of Artificial Sequence: Synthetic oligonucleotide
gaacucgccuuaccuucuu

SEQ ID NO: 147115 - RNA, 19 nt, Artificial Sequence
  Description of Artificial Sequence: Synthetic oligonucleotide
ggcgggcaagccaaaucga

SEQ ID NO: 147116 - RNA, 19 nt, Artificial Sequence
  Description of Artificial Sequence: Synthetic oligonucleotide
cuuauguagugcggauuuu

SEQ ID NO: 147117 - RNA, 19 nt, Artificial Sequence
  Description of Artificial Sequence: Synthetic oligonucleotide
ccuugagaauuguugcgau

SEQ ID NO: 147118 - RNA, 19 nt, Artificial Sequence
  Description of Artificial Sequence: Synthetic oligonucleotide
gcucuuggguuggaaauau

SEQ ID NO: 147119 - RNA, 19 nt, Artificial Sequence
  Description of Artificial Sequence: Synthetic oligonucleotide
ucacuacguugggguggcu

SEQ ID NO: 147120 - RNA, 19 nt, Artificial Sequence
  Description of Artificial Sequence: Synthetic oligonucleotide
ccguaucuaggguuagcua

SEQ ID NO: 147121 - RNA, 19 nt, Artificial Sequence
  Description of Artificial Sequence: Synthetic oligonucleotide
ccucacuuaggggcgggca

SEQ ID NO: 147122 - RNA, 19 nt, Artificial Sequence
  Description of Artificial Sequence: Synthetic oligonucleotide
cuccgguggcuaauucaau

SEQ ID NO: 147123 - RNA, 19 nt, Artificial Sequence
  Description of Artificial Sequence: Synthetic oligonucleotide
cgacugcuaggaauauuaa

SEQ ID NO: 147124 - RNA, 19 nt, Artificial Sequence
  Description of Artificial Sequence: Synthetic oligonucleotide
cuaaagugggcgggucauu

SEQ ID NO: 147125 - RNA, 19 nt, Artificial Sequence
  Description of Artificial Sequence: Synthetic oligonucleotide
ccgcuugacccaggaacuc

SEQ ID NO: 147126 - RNA, 19 nt, Artificial Sequence
  Description of Artificial Sequence: Synthetic oligonucleotide
gcggggcaugauagaugag

SEQ ID NO: 147127 - RNA, 19 nt, Artificial Sequence
  Description of Artificial Sequence: Synthetic oligonucleotide
cgaaacccuuccuauuauu

SEQ ID NO: 147128 - RNA, 19 nt, Artificial Sequence
  Description of Artificial Sequence: Synthetic oligonucleotide
cauacucgucuggcauuuu

SEQ ID NO: 147129 - RNA, 19 nt, Artificial Sequence
  Description of Artificial Sequence: Synthetic oligonucleotide
gggcuauaucugggguucu

SEQ ID NO: 147130 - RNA, 19 nt, Artificial Sequence
  Description of Artificial Sequence: Synthetic oligonucleotide
ccaucucgucgucgcucca

SEQ ID NO: 147131 - RNA, 19 nt, Artificial Sequence
  Description of Artificial Sequence: Synthetic oligonucleotide
cgucgucgcuccacuccca

SEQ ID NO: 147132 - RNA, 19 nt, Artificial Sequence
  Description of Artificial Sequence: Synthetic oligonucleotide
uaaaguauuacgauaacag

SEQ ID NO: 147133 - RNA, 19 nt, Artificial Sequence
  Description of Artificial Sequence: Synthetic oligonucleotide
uaagauaacccuuagaucu

SEQ ID NO: 147134 - RNA, 19 nt, Artificial Sequence
  Description of Artificial Sequence: Synthetic oligonucleotide
uuaaguuauagcuucaucc

SEQ ID NO: 147135 - RNA, 19 nt, Artificial Sequence
  Description of Artificial Sequence: Synthetic oligonucleotide
uaaaucgucauuuuaagcc

SEQ ID NO: 147136 - RNA, 19 nt, Artificial Sequence
  Description of Artificial Sequence: Synthetic oligonucleotide
auauuuaucucauaaaucu

SEQ ID NO: 147137 - RNA, 19 nt, Artificial Sequence
  Description of Artificial Sequence: Synthetic oligonucleotide
uuuaagaggaauuauuuug

SEQ ID NO: 147138 - RNA, 19 nt, Artificial Sequence
  Description of Artificial Sequence: Synthetic oligonucleotide
aucaucaucaucaucaucc

SEQ ID NO: 147139 - RNA, 19 nt, Artificial Sequence
  Description of Artificial Sequence: Synthetic oligonucleotide
uuaagaauauugcacacgc

SEQ ID NO: 147140 - RNA, 19 nt, Artificial Sequence
  Description of Artificial Sequence: Synthetic oligonucleotide
auuacgauaacaguuggcc

SEQ ID NO: 147141 - RNA, 19 nt, Artificial Sequence
  Description of Artificial Sequence: Synthetic oligonucleotide
uauuuaagaauauugcaca

SEQ ID NO: 147142 - RNA, 19 nt, Artificial Sequence
  Description of Artificial Sequence: Synthetic oligonucleotide
ucaacuacuaaacagcacu

SEQ ID NO: 147143 - RNA, 19 nt, Artificial Sequence
  Description of Artificial Sequence: Synthetic oligonucleotide
uuauacucaaaguacauac

SEQ ID NO: 147144 - RNA, 19 nt, Artificial Sequence
  Description of Artificial Sequence: Synthetic oligonucleotide
acaauucuaggccaaaacg

SEQ ID NO: 147145 - RNA, 19 nt, Artificial Sequence
  Description of Artificial Sequence: Synthetic oligonucleotide
uaaaaugacguucaaccug

SEQ ID NO: 147146 - RNA, 19 nt, Artificial Sequence
  Description of Artificial Sequence: Synthetic oligonucleotide
uuuaaaucgucauuuuaag

SEQ ID NO: 147147 - RNA, 19 nt, Artificial Sequence
  Description of Artificial Sequence: Synthetic oligonucleotide
ucuuugaguaaauaauuag

SEQ ID NO: 147148 - RNA, 19 nt, Artificial Sequence
  Description of Artificial Sequence: Synthetic oligonucleotide
ucuuauuaucuucugaacu

SEQ ID NO: 147149 - RNA, 19 nt, Artificial Sequence
  Description of Artificial Sequence: Synthetic oligonucleotide
gauccuaaucuuuaagagg

SEQ ID NO: 147150 - RNA, 19 nt, Artificial Sequence
  Description of Artificial Sequence: Synthetic oligonucleotide
  modified_base (7)..(7): a, c, u, g, unknown or other
auuuagnuaaggcuucguc

SEQ ID NO: 147151 - RNA, 19 nt, Artificial Sequence
  Description of Artificial Sequence: Synthetic oligonucleotide
auaaaacagggugugagcc

SEQ ID NO: 147152 - RNA, 19 nt, Artificial Sequence
  Description of Artificial Sequence: Synthetic oligonucleotide
  modified_base (6)..(6): a, c, u, g, unknown or other
uuuagnuaaggcuucgucu

SEQ ID NO: 147153 - RNA, 19 nt, Artificial Sequence
  Description of Artificial Sequence: Synthetic oligonucleotide
aaaguauuacgauaacagu

SEQ ID NO: 147154 - RNA, 19 nt, Artificial Sequence
  Description of Artificial Sequence: Synthetic oligonucleotide
uuagaucuaacuuuuaaua

SEQ ID NO: 147155 - RNA, 19 nt, Artificial Sequence
  Description of Artificial Sequence: Synthetic oligonucleotide
aauacuacagagauaauau

SEQ ID NO: 147156 - RNA, 19 nt, Artificial Sequence
  Description of Artificial Sequence: Synthetic oligonucleotide
ugaauuggauauugaaggg

SEQ ID NO: 147157 - RNA, 19 nt, Artificial Sequence
  Description of Artificial Sequence: Synthetic oligonucleotide
aagaauauugcacacgcuu

SEQ ID NO: 147158 - RNA, 19 nt, Artificial Sequence
  Description of Artificial Sequence: Synthetic oligonucleotide
aauguguucuuuauguauc

SEQ ID NO: 147159 - RNA, 19 nt, Artificial Sequence
  Description of Artificial Sequence: Synthetic oligonucleotide
uuuaagaauauugcacacg

SEQ ID NO: 147160 - RNA, 19 nt, Artificial Sequence
  Description of Artificial Sequence: Synthetic oligonucleotide
aaacgcuuuacacccaaag

SEQ ID NO: 147161 - RNA, 19 nt, Artificial Sequence
  Description of Artificial Sequence: Synthetic oligonucleotide
uaaguuauagcuucaucca

SEQ ID NO: 147162 - RNA, 19 nt, Artificial Sequence
  Description of Artificial Sequence: Synthetic oligonucleotide
uaacccacaacccugaaau

SEQ ID NO: 147163 - RNA, 19 nt, Artificial Sequence
  Description of Artificial Sequence: Synthetic oligonucleotide
acacagauaguauauuguc

SEQ ID NO: 147164 - RNA, 19 nt, Artificial Sequence
  Description of Artificial Sequence: Synthetic oligonucleotide
uacgauaacaguuggccag

SEQ ID NO: 147165 - RNA, 19 nt, Artificial Sequence
  Description of Artificial Sequence: Synthetic oligonucleotide
aguaacguuugcuugcuuc

SEQ ID NO: 147166 - RNA, 19 nt, Artificial Sequence
  Description of Artificial Sequence: Synthetic oligonucleotide
acuacagagauaauauagc

SEQ ID NO: 147167 - RNA, 19 nt, Artificial Sequence
  Description of Artificial Sequence: Synthetic oligonucleotide
aucaucaucaucaucauca

SEQ ID NO: 147168 - RNA, 19 nt, Artificial Sequence
  Description of Artificial Sequence: Synthetic oligonucleotide
uuaaaucgucauuuuaagc

SEQ ID NO: 147169 - RNA, 19 nt, Artificial Sequence
  Description of Artificial Sequence: Synthetic oligonucleotide
aaggcuguuuauacaaugc

SEQ ID NO: 147170 - RNA, 19 nt, Artificial Sequence
  Description of Artificial Sequence: Synthetic oligonucleotide
  modified_base (5)..(5): a, c, u, g, unknown or other
uuagnuaaggcuucgucuc

SEQ ID NO: 147171 - RNA, 19 nt, Artificial Sequence
  Description of Artificial Sequence: Synthetic oligonucleotide
uagaccauguugaaaauuc

SEQ ID NO: 147172 - RNA, 19 nt, Artificial Sequence
  Description of Artificial Sequence: Synthetic oligonucleotide
acauacaucauguugcuaa

SEQ ID NO: 147173 - RNA, 19 nt, Artificial Sequence
  Description of Artificial Sequence: Synthetic oligonucleotide
uuaaaguauuacgauaaca

SEQ ID NO: 147174 - RNA, 19 nt, Artificial Sequence
  Description of Artificial Sequence: Synthetic oligonucleotide
uuacuauacaacugggaca

SEQ ID NO: 147175 - RNA, 19 nt, Artificial Sequence
  Description of Artificial Sequence: Synthetic oligonucleotide
gagacaagaaacucgugug

SEQ ID NO: 147176 - RNA, 19 nt, Artificial Sequence
  Description of Artificial Sequence: Synthetic oligonucleotide
uggugauuagcauaaagaa

SEQ ID NO: 147177 - RNA, 19 nt, Artificial Sequence
  Description of Artificial Sequence: Synthetic oligonucleotide
ucauguugcuaaaauguca

SEQ ID NO: 147178 - RNA, 19 nt, Artificial Sequence
  Description of Artificial Sequence: Synthetic oligonucleotide
augacguucaaccugcugu

SEQ ID NO: 147179 - RNA, 19 nt, Artificial Sequence
  Description of Artificial Sequence: Synthetic oligonucleotide
uccgaggucuaauaaauca

SEQ ID NO: 147180 - RNA, 19 nt, Artificial Sequence
  Description of Artificial Sequence: Synthetic oligonucleotide
uguucuaggccgcuguucc

SEQ ID NO: 147181 - RNA, 19 nt, Artificial Sequence
  Description of Artificial Sequence: Synthetic oligonucleotide
acaaaauccagcgugugag

SEQ ID NO: 147182 - RNA, 19 nt, Artificial Sequence
  Description of Artificial Sequence: Synthetic oligonucleotide
gucaucaucaucaucauca

SEQ ID NO: 147183 - RNA, 19 nt, Artificial Sequence
  Description of Artificial Sequence: Synthetic oligonucleotide
aguccuuauauauauuaca

SEQ ID NO: 147184 - RNA, 19 nt, Artificial Sequence
  Description of Artificial Sequence: Synthetic oligonucleotide
uugaucaacaacucggaaa

SEQ ID NO: 147185 - RNA, 19 nt, Artificial Sequence
  Description of Artificial Sequence: Synthetic oligonucleotide
aauuccgaggucuaauaaa

SEQ ID NO: 147186 - RNA, 19 nt, Artificial Sequence
  Description of Artificial Sequence: Synthetic oligonucleotide
aguauuacgauaacaguug

SEQ ID NO: 147187 - RNA, 19 nt, Artificial Sequence
  Description of Artificial Sequence: Synthetic oligonucleotide
aagacgaagaaguaacguu

SEQ ID NO: 147188 - RNA, 19 nt, Artificial Sequence
  Description of Artificial Sequence: Synthetic oligonucleotide
cucaauacauaacugaaga

SEQ ID NO: 147189 - RNA, 19 nt, Artificial Sequence
  Description of Artificial Sequence: Synthetic oligonucleotide
uucaauacacucuaacuuu

SEQ ID NO: 147190 - RNA, 19 nt, Artificial Sequence
  Description of Artificial Sequence: Synthetic oligonucleotide
ugagccuaaucuaacuuga

SEQ ID NO: 147191 - RNA, 19 nt, Artificial Sequence
  Description of Artificial Sequence: Synthetic oligonucleotide
caccuuaggagacuuacgg

SEQ ID NO: 147192 - RNA, 19 nt, Artificial Sequence
  Description of Artificial Sequence: Synthetic oligonucleotide
ugaguuagggucaucuagu

SEQ ID NO: 147193 - RNA, 19 nt, Artificial Sequence
  Description of Artificial Sequence: Synthetic oligonucleotide
uaauacuacagagauaaua

SEQ ID NO: 147194 - RNA, 19 nt, Artificial Sequence
  Description of Artificial Sequence: Synthetic oligonucleotide
ugucuuugaguaaauaauu

SEQ ID NO: 147195 - RNA, 19 nt, Artificial Sequence
  Description of Artificial Sequence: Synthetic oligonucleotide
cucucucuaacucugaguc

SEQ ID NO: 147196 - RNA, 19 nt, Artificial Sequence
  Description of Artificial Sequence: Synthetic oligonucleotide
uacuauacaacugggacaa

SEQ ID NO: 147197 - RNA, 19 nt, Artificial Sequence
  Description of Artificial Sequence: Synthetic oligonucleotide
uacuuaagauacucaauac

SEQ ID NO: 147198 - RNA, 19 nt, Artificial Sequence
  Description of Artificial Sequence: Synthetic oligonucleotide
uauuacgauaacaguuggc

SEQ ID NO: 147199 - RNA, 19 nt, Artificial Sequence
  Description of Artificial Sequence: Synthetic oligonucleotide
uuuguuaaaaguugacguu

SEQ ID NO: 147200 - RNA, 19 nt, Artificial Sequence
  Description of Artificial Sequence: Synthetic oligonucleotide
cuuaguuugcaucccacug

SEQ ID NO: 147201 - RNA, 19 nt, Artificial Sequence
  Description of Artificial Sequence: Synthetic oligonucleotide
ugagucauaguuagaggac

SEQ ID NO: 147202 - RNA, 19 nt, Artificial Sequence
  Description of Artificial Sequence: Synthetic oligonucleotide
uauaacuccgcugauuuuc

SEQ ID NO: 147203 - RNA, 19 nt, Artificial Sequence
  Description of Artificial Sequence: Synthetic oligonucleotide
ugaaaucuuaccaguaauu

SEQ ID NO: 147204 - RNA, 19 nt, Artificial Sequence
  Description of Artificial Sequence: Synthetic oligonucleotide
guauuacgauaacaguugg

SEQ ID NO: 147205 - RNA, 19 nt, Artificial Sequence
  Description of Artificial Sequence: Synthetic oligonucleotide
aagagcauagaagccagug

SEQ ID NO: 147206 - RNA, 19 nt, Artificial Sequence
  Description of Artificial Sequence: Synthetic oligonucleotide
uuuaaggacugcuagcauu

SEQ ID NO: 147207 - RNA, 19 nt, Artificial Sequence
  Description of Artificial Sequence: Synthetic oligonucleotide
acgcuuuacacccaaagaa

SEQ ID NO: 147208 - RNA, 19 nt, Artificial Sequence
  Description of Artificial Sequence: Synthetic oligonucleotide
agagauaauauagcaggag

SEQ ID NO: 147209 - RNA, 19 nt, Artificial Sequence
  Description of Artificial Sequence: Synthetic oligonucleotide
uucuuauuaucuucugaac

SEQ ID NO: 147210 - RNA, 19 nt, Artificial Sequence
  Description of Artificial Sequence: Synthetic oligonucleotide
agucuaacagaaaccaagg

SEQ ID NO: 147211 - RNA, 19 nt, Artificial Sequence
  Description of Artificial Sequence: Synthetic oligonucleotide
uauuggaacugacagcuuu

SEQ ID NO: 147212 - RNA, 19 nt, Artificial Sequence
  Description of Artificial Sequence: Synthetic oligonucleotide
acaauuccaguccuuauau

SEQ ID NO: 147213 - RNA, 19 nt, Artificial Sequence
  Description of Artificial Sequence: Synthetic oligonucleotide
agauuuauuucaaacucug

SEQ ID NO: 147214 - RNA, 19 nt, Artificial Sequence
  Description of Artificial Sequence: Synthetic oligonucleotide
agaauauugcacacgcuuc

SEQ ID NO: 147215 - RNA, 19 nt, Artificial Sequence
  Description of Artificial Sequence: Synthetic oligonucleotide
guaacguuugcuugcuucc

SEQ ID NO: 147216 - RNA, 19 nt, Artificial Sequence
  Description of Artificial Sequence: Synthetic oligonucleotide
cuguuuauaacuccgcuga

SEQ ID NO: 147217 - RNA, 19 nt, Artificial Sequence
  Description of Artificial Sequence: Synthetic oligonucleotide
uuacgauaacaguuggcca

SEQ ID NO: 147218 - RNA, 19 nt, Artificial Sequence
  Description of Artificial Sequence: Synthetic oligonucleotide
aaugacguucaaccugcug

SEQ ID NO: 147219 - RNA, 19 nt, Artificial Sequence
  Description of Artificial Sequence: Synthetic oligonucleotide
  modified_base (9)..(9): a, c, u, g, unknown or other
ugauuuagnuaaggcuucg

SEQ ID NO: 147220 - RNA, 19 nt, Artificial Sequence
  Description of Artificial Sequence: Synthetic oligonucleotide
aauuggauauugaaggguu

SEQ ID NO: 147221 - RNA, 19 nt, Artificial Sequence
  Description of Artificial Sequence: Synthetic oligonucleotide
  modified_base (4)..(4): a, c, u, g, unknown or other
uagnuaaggcuucgucucc

SEQ ID NO: 147222 - RNA, 19 nt, Artificial Sequence
  Description of Artificial Sequence: Synthetic oligonucleotide
uuagaagguugccuaaaau

SEQ ID NO: 147223 - RNA, 19 nt, Artificial Sequence
  Description of Artificial Sequence: Synthetic oligonucleotide
cagcacuacauuaucaguc

SEQ ID NO: 147224 - RNA, 19 nt, Artificial Sequence
  Description of Artificial Sequence: Synthetic oligonucleotide
aaucuuuaagaggaauuau

SEQ ID NO: 147225 - RNA, 19 nt, Artificial Sequence
  Description of Artificial Sequence: Synthetic oligonucleotide
uuguuaaaaguugacguua

SEQ ID NO: 147226 - RNA, 19 nt, Artificial Sequence
  Description of Artificial Sequence: Synthetic oligonucleotide
cuaacuccaaggcuccucc

SEQ ID NO: 147227 - RNA, 19 nt, Artificial Sequence
  Description of Artificial Sequence: Synthetic oligonucleotide
uccaauuaguccuucuaau

SEQ ID NO: 147228 - RNA, 19 nt, Artificial Sequence
  Description of Artificial Sequence: Synthetic oligonucleotide
gugagccuaaucuaacuug

SEQ ID NO: 147229 - RNA, 19 nt, Artificial Sequence
  Description of Artificial Sequence: Synthetic oligonucleotide
uuguauucaacuguacuua

SEQ ID NO: 147230 - RNA, 19 nt, Artificial Sequence
  Description of Artificial Sequence: Synthetic oligonucleotide
ucaauacacucuaacuuuu

SEQ ID NO: 147231 - RNA, 19 nt, Artificial Sequence
  Description of Artificial Sequence: Synthetic oligonucleotide
aagaaacucgugugcagaa

SEQ ID NO: 147232 - RNA, 19 nt, Artificial Sequence
  Description of Artificial Sequence: Synthetic oligonucleotide
cacaauucuaggccaaaac

SEQ ID NO: 147233 - RNA, 19 nt, Artificial Sequence
  Description of Artificial Sequence: Synthetic oligonucleotide
ggugauuagcauaaagaag

SEQ ID NO: 147234 - RNA, 19 nt, Artificial Sequence
  Description of Artificial Sequence: Synthetic oligonucleotide
auaauuagaccauguugaa

SEQ ID NO: 147235 - RNA, 19 nt, Artificial Sequence
  Description of Artificial Sequence: Synthetic oligonucleotide
ugugagccuaaucuaacuu

SEQ ID NO: 147236 - RNA, 19 nt, Artificial Sequence
  Description of Artificial Sequence: Synthetic oligonucleotide
ucaucaucaucaucaucca

SEQ ID NO: 147237 - RNA, 19 nt, Artificial Sequence
  Description of Artificial Sequence: Synthetic oligonucleotide
auaauauagcaggagccca

SEQ ID NO: 147238 - RNA, 19 nt, Artificial Sequence
  Description of Artificial Sequence: Synthetic oligonucleotide
ugaaccuuaaugcgucguc

SEQ ID NO: 147239 - RNA, 19 nt, Artificial Sequence
  Description of Artificial Sequence: Synthetic oligonucleotide
caaaauccagcgugugagg

SEQ ID NO: 147240 - RNA, 19 nt, Artificial Sequence
  Description of Artificial Sequence: Synthetic oligonucleotide
ugauggacugaaacauuac

SEQ ID NO: 147241 - RNA, 19 nt, Artificial Sequence
  Description of Artificial Sequence: Synthetic oligonucleotide
acagauuagaagguugccu

SEQ ID NO: 147242 - RNA, 19 nt, Artificial Sequence
  Description of Artificial Sequence: Synthetic oligonucleotide
cuguuuauacaaugcuaac

SEQ ID NO: 147243 - RNA, 19 nt, Artificial Sequence
  Description of Artificial Sequence: Synthetic oligonucleotide
aggcuguuuauacaaugcu

SEQ ID NO: 147244 - RNA, 19 nt, Artificial Sequence
  Description of Artificial Sequence: Synthetic oligonucleotide
gauaacaguuggccagagc

SEQ ID NO: 147245 - RNA, 19 nt, Artificial Sequence
  Description of Artificial Sequence: Synthetic oligonucleotide
cucgcccuaaaauguaaag

SEQ ID NO: 147246 - RNA, 19 nt, Artificial Sequence
  Description of Artificial Sequence: Synthetic oligonucleotide
cuuaaugcgucgucuuuuc

SEQ ID NO: 147247 - RNA, 19 nt, Artificial Sequence
  Description of Artificial Sequence: Synthetic oligonucleotide
auugcacacgcuucugugu

SEQ ID NO: 147248 - RNA, 19 nt, Artificial Sequence
  Description of Artificial Sequence: Synthetic oligonucleotide
gacgaagaaguaacguuug

SEQ ID NO: 147249 - RNA, 19 nt, Artificial Sequence
  Description of Artificial Sequence: Synthetic oligonucleotide
uuccuaaaguaaacacaca

SEQ ID NO: 147250 - RNA, 19 nt, Artificial Sequence
  Description of Artificial Sequence: Synthetic oligonucleotide
uuaggagacuuacggugac

SEQ ID NO: 147251 - RNA, 19 nt, Artificial Sequence
  Description of Artificial Sequence: Synthetic oligonucleotide
cuugaaccuuaaugcgucg

SEQ ID NO: 147252 - RNA, 19 nt, Artificial Sequence
  Description of Artificial Sequence: Synthetic oligonucleotide
uuaaggcuguuuauacaau

SEQ ID NO: 147253 - RNA, 19 nt, Artificial Sequence
  Description of Artificial Sequence: Synthetic oligonucleotide
ccuuaggagacuuacggug

SEQ ID NO: 147254 - RNA, 19 nt, Artificial Sequence
  Description of Artificial Sequence: Synthetic oligonucleotide
  modified_base (14)..(14): a, c, u, g, unknown or other
ggcacugauuuagnuaagg

SEQ ID NO: 147255 - RNA, 19 nt, Artificial Sequence
  Description of Artificial Sequence: Synthetic oligonucleotide
ugcaaguaugguauccuuu

SEQ ID NO: 147256 - RNA, 19 nt, Artificial Sequence
  Description of Artificial Sequence: Synthetic oligonucleotide
gacaagaaacucgugugca

SEQ ID NO: 147257 - RNA, 19 nt, Artificial Sequence
  Description of Artificial Sequence: Synthetic oligonucleotide
uuggauauugaaggguuaa

SEQ ID NO: 147258 - RNA, 19 nt, Artificial Sequence
  Description of Artificial Sequence: Synthetic oligonucleotide
ggccaaaacgcuuuacacc

SEQ ID NO: 147259 - RNA, 19 nt, Artificial Sequence
  Description of Artificial Sequence: Synthetic oligonucleotide
uucagacuucggucaaaag

SEQ ID NO: 147260 - RNA, 19 nt, Artificial Sequence
  Description of Artificial Sequence: Synthetic oligonucleotide
aaccuuaaugcgucgucuu

SEQ ID NO: 147261 - RNA, 19 nt, Artificial Sequence
  Description of Artificial Sequence: Synthetic oligonucleotide
uuaaugcgucgucuuuucu

SEQ ID NO: 147262 - RNA, 19 nt, Artificial Sequence
  Description of Artificial Sequence: Synthetic oligonucleotide
auacuacagagauaauaua

SEQ ID NO: 147263 - RNA, 19 nt, Artificial Sequence
  Description of Artificial Sequence: Synthetic oligonucleotide
acguuauacucaaaguaca

SEQ ID NO: 147264 - RNA, 19 nt, Artificial Sequence
  Description of Artificial Sequence: Synthetic oligonucleotide
auuccgaggucuaauaaau

SEQ ID NO: 147265 - RNA, 19 nt, Artificial Sequence
  Description of Artificial Sequence: Synthetic oligonucleotide
uguuuauaacuccgcugau

SEQ ID NO: 147266 - RNA, 19 nt, Artificial Sequence
  Description of Artificial Sequence: Synthetic oligonucleotide
cugugacucaucuggcuug

SEQ ID NO: 147267 - RNA, 19 nt, Artificial Sequence
  Description of Artificial Sequence: Synthetic oligonucleotide
ugucaucaucaucaucauc

SEQ ID NO: 147268 - RNA, 19 nt, Artificial Sequence
  Description of Artificial Sequence: Synthetic oligonucleotide
aacucgugugcagaaaaua

SEQ ID NO: 147269 - RNA, 19 nt, Artificial Sequence
  Description of Artificial Sequence: Synthetic oligonucleotide
gacuucggucaaaagaaca

SEQ ID NO: 147270 - RNA, 19 nt, Artificial Sequence
  Description of Artificial Sequence: Synthetic oligonucleotide
ucaucaucaucaucaucau

SEQ ID NO: 147271 - RNA, 19 nt, Artificial Sequence
  Description of Artificial Sequence: Synthetic oligonucleotide
cuuagaucuaacuuuuaau

SEQ ID NO: 147272 - RNA, 19 nt, Artificial Sequence
  Description of Artificial Sequence: Synthetic oligonucleotide
guccaaaagagaaucaugu

SEQ ID NO: 147273 - RNA, 19 nt, Artificial Sequence
  Description of Artificial Sequence: Synthetic oligonucleotide
caauacacucuaacuuuuc

SEQ ID NO: 147274 - RNA, 19 nt, Artificial Sequence
  Description of Artificial Sequence: Synthetic oligonucleotide
agacgaagaaguaacguuu

SEQ ID NO: 147275 - RNA, 19 nt, Artificial Sequence
  Description of Artificial Sequence: Synthetic oligonucleotide
aauaacccacaacccugaa

SEQ ID NO: 147276 - RNA, 19 nt, Artificial Sequence
  Description of Artificial Sequence: Synthetic oligonucleotide
agguuacaaaauguggaga

SEQ ID NO: 147277 - RNA, 19 nt, Artificial Sequence
  Description of Artificial Sequence: Synthetic oligonucleotide
ugaaaauuccgaggucuaa

SEQ ID NO: 147278 - RNA, 19 nt, Artificial Sequence
  Description of Artificial Sequence: Synthetic oligonucleotide
gaauuggauauugaagggu

SEQ ID NO: 147279 - RNA, 19 nt, Artificial Sequence
  Description of Artificial Sequence: Synthetic oligonucleotide
cuggggagugcuguuaaag

SEQ ID NO: 147280 - RNA, 19 nt, Artificial Sequence
  Description of Artificial Sequence: Synthetic oligonucleotide
uuccgaggucuaauaaauc

SEQ ID NO: 147281 - RNA, 19 nt, Artificial Sequence
  Description of Artificial Sequence: Synthetic oligonucleotide
ugugacucaucuggcuugc

SEQ ID NO: 147282 - RNA, 19 nt, Artificial Sequence
  Description of Artificial Sequence: Synthetic oligonucleotide
agaccuuguucuaggccgc

SEQ ID NO: 147283 - RNA, 19 nt, Artificial Sequence
  Description of Artificial Sequence: Synthetic oligonucleotide
aaacagcacuuugaauggu

SEQ ID NO: 147284 - RNA, 19 nt, Artificial Sequence
  Description of Artificial Sequence: Synthetic oligonucleotide
ugacguucaaccugcuguu

SEQ ID NO: 147285 - RNA, 19 nt, Artificial Sequence
  Description of Artificial Sequence: Synthetic oligonucleotide
ucugaguuagggucaucua

SEQ ID NO: 147286 - RNA, 19 nt, Artificial Sequence
  Description of Artificial Sequence: Synthetic oligonucleotide
gaagacgaagaaguaacgu

SEQ ID NO: 147287 - RNA, 19 nt, Artificial Sequence
  Description of Artificial Sequence: Synthetic oligonucleotide
uccuaaucuuuaagaggaa

SEQ ID NO: 147288 - RNA, 19 nt, Artificial Sequence
  Description of Artificial Sequence: Synthetic oligonucleotide
aguuucagacuucggucaa

SEQ ID NO: 147289 - RNA, 19 nt, Artificial Sequence
  Description of Artificial Sequence: Synthetic oligonucleotide
uuauaacuccgcugauuuu

SEQ ID NO: 147290 - RNA, 19 nt, Artificial Sequence
  Description of Artificial Sequence: Synthetic oligonucleotide
ucuaggccaaaacgcuuua

SEQ ID NO: 147291 - RNA, 19 nt, Artificial Sequence
  Description of Artificial Sequence: Synthetic oligonucleotide
aagauaacccuuagaucua

SEQ ID NO: 147292 - RNA, 19 nt, Artificial Sequence
  Description of Artificial Sequence: Synthetic oligonucleotide
  modified_base (3)..(3): a, c, u, g, unknown or other
agnuaaggcuucgucuccu

SEQ ID NO: 147293 - RNA, 19 nt, Artificial Sequence
  Description of Artificial Sequence: Synthetic oligonucleotide
cucggaguaguuuuggcgu

SEQ ID NO: 147294 - RNA, 19 nt, Artificial Sequence
  Description of Artificial Sequence: Synthetic oligonucleotide
gaguaaauaauuagaccau

SEQ ID NO: 147295 - RNA, 19 nt, Artificial Sequence
  Description of Artificial Sequence: Synthetic oligonucleotide
caucaucaucaucaucauc

SEQ ID NO: 147296 - RNA, 19 nt, Artificial Sequence
  Description of Artificial Sequence: Synthetic oligonucleotide
guugaucaacaacucggaa

SEQ ID NO: 147297 - RNA, 19 nt, Artificial Sequence
  Description of Artificial Sequence: Synthetic oligonucleotide
caagaaacucgugugcaga

SEQ ID NO: 147298 - RNA, 19 nt, Artificial Sequence
  Description of Artificial Sequence: Synthetic oligonucleotide
acaccucgcccuaaaaugu

SEQ ID NO: 147299 - RNA, 19 nt, Artificial Sequence
  Description of Artificial Sequence: Synthetic oligonucleotide
cauacaucauguugcuaaa

SEQ ID NO: 147300 - RNA, 19 nt, Artificial Sequence
  Description of Artificial Sequence: Synthetic oligonucleotide
  modified_base (13)..(13): a, c, u, g, unknown or other
gcacugauuuagnuaaggc

SEQ ID NO: 147301 - RNA, 19 nt, Artificial Sequence
  Description of Artificial Sequence: Synthetic oligonucleotide
gccuaaucuaacuugauuu

SEQ ID NO: 147302 - RNA, 19 nt, Artificial Sequence
  Description of Artificial Sequence: Synthetic oligonucleotide
cugacccagaacuagaauu

SEQ ID NO: 147303 - RNA, 19 nt, Artificial Sequence
  Description of Artificial Sequence: Synthetic oligonucleotide
gaaaauuccgaggucuaau

SEQ ID NO: 147304 - RNA, 19 nt, Artificial Sequence
  Description of Artificial Sequence: Synthetic oligonucleotide
gaguuagggucaucuagua

SEQ ID NO: 147305 - RNA, 19 nt, Artificial Sequence
  Description of Artificial Sequence: Synthetic oligonucleotide
auaacuccgcugauuuucu

SEQ ID NO: 147306 - RNA, 19 nt, Artificial Sequence
  Description of Artificial Sequence: Synthetic oligonucleotide
augguauccuuuggcagca

SEQ ID NO: 147307 - RNA, 19 nt, Artificial Sequence
  Description of Artificial Sequence: Synthetic oligonucleotide
cacgcuucugugucuaaga

SEQ ID NO: 147308 - RNA, 19 nt, Artificial Sequence
  Description of Artificial Sequence: Synthetic oligonucleotide
uuguucuaggccgcuguuc

SEQ ID NO: 147309 - RNA, 19 nt, Artificial Sequence
  Description of Artificial Sequence: Synthetic oligonucleotide
cauuagugccaggagacaa

SEQ ID NO: 147310 - RNA, 19 nt, Artificial Sequence
  Description of Artificial Sequence: Synthetic oligonucleotide
accuuaaugcgucgucuuu

SEQ ID NO: 147311 - RNA, 19 nt, Artificial Sequence
  Description of Artificial Sequence: Synthetic oligonucleotide
acgauaacaguuggccaga

SEQ ID NO: 147312 - RNA, 19 nt, Artificial Sequence
  Description of Artificial Sequence: Synthetic oligonucleotide
ggucaucuaguaagucugg

SEQ ID NO: 147313 - RNA, 19 nt, Artificial Sequence
  Description of Artificial Sequence: Synthetic oligonucleotide
gaaccuuaaugcgucgucu

SEQ ID NO: 147314 - RNA, 19 nt, Artificial Sequence
  Description of Artificial Sequence: Synthetic oligonucleotide
ucggaguaguuuuggcguu

SEQ ID NO: 147315 - RNA, 19 nt, Artificial Sequence
  Description of Artificial Sequence: Synthetic oligonucleotide
aaaacgcuuuacacccaaa

SEQ ID NO: 147316 - RNA, 19 nt, Artificial Sequence
  Description of Artificial Sequence: Synthetic oligonucleotide
gacguucaaccugcuguug

SEQ ID NO: 147317 - RNA, 19 nt, Artificial Sequence
  Description of Artificial Sequence: Synthetic oligonucleotide
ucucuaacucugagucaua

SEQ ID NO: 147318 - RNA, 19 nt, Artificial Sequence
  Description of Artificial Sequence: Synthetic oligonucleotide
ucgucuccugaagauugac

SEQ ID NO: 147319 - RNA, 19 nt, Artificial Sequence
  Description of Artificial Sequence: Synthetic oligonucleotide
acccuuagaucuaacuuuu

SEQ ID NO: 147320 - RNA, 19 nt, Artificial Sequence
  Description of Artificial Sequence: Synthetic oligonucleotide
agaaacucgugugcagaaa

SEQ ID NO: 147321 - RNA, 19 nt, Artificial Sequence
  Description of Artificial Sequence: Synthetic oligonucleotide
auuggauauugaaggguua

SEQ ID NO: 147322 - RNA, 19 nt, Artificial Sequence
  Description of Artificial Sequence: Synthetic oligonucleotide
cuaggccaaaacgcuuuac

SEQ ID NO: 147323 - RNA, 19 nt, Artificial Sequence
  Description of Artificial Sequence: Synthetic oligonucleotide
  modified_base (8)..(8): a, c, u, g, unknown or other
gauuuagnuaaggcuucgu

SEQ ID NO: 147324 - RNA, 19 nt, Artificial Sequence
  Description of Artificial Sequence: Synthetic oligonucleotide
cauaacugaagagcagucu

SEQ ID NO: 147325 - RNA, 19 nt, Artificial Sequence
  Description of Artificial Sequence: Synthetic oligonucleotide
ccuuagaucuaacuuuuaa

SEQ ID NO: 147326 - RNA, 19 nt, Artificial Sequence
  Description of Artificial Sequence: Synthetic oligonucleotide
aucugacccagaacuagaa

SEQ ID NO: 147327 - RNA, 19 nt, Artificial Sequence
  Description of Artificial Sequence: Synthetic oligonucleotide
gugugagccuaaucuaacu

SEQ ID NO: 147328 - RNA, 19 nt, Artificial Sequence
  Description of Artificial Sequence: Synthetic oligonucleotide
gcaccuuaggagacuuacg

SEQ ID NO: 147329 - RNA, 19 nt, Artificial Sequence
  Description of Artificial Sequence: Synthetic oligonucleotide
acuggggagugcuguuaaa

SEQ ID NO: 147330 - RNA, 19 nt, Artificial Sequence
  Description of Artificial Sequence: Synthetic oligonucleotide
ggcuguuuauacaaugcua

SEQ ID NO: 147331 - RNA, 19 nt, Artificial Sequence
  Description of Artificial Sequence: Synthetic oligonucleotide
aggagacaagaaacucgug

SEQ ID NO: 147332 - RNA, 19 nt, Artificial Sequence
  Description of Artificial Sequence: Synthetic oligonucleotide
agucuggcucaaaaguaua

SEQ ID NO: 147333 - RNA, 19 nt, Artificial Sequence
  Description of Artificial Sequence: Synthetic oligonucleotide
augaauccucuugaaccuu

SEQ ID NO: 147334 - RNA, 19 nt, Artificial Sequence
  Description of Artificial Sequence: Synthetic oligonucleotide
uaacuccgcugauuuucuu

SEQ ID NO: 147335 - RNA, 19 nt, Artificial Sequence
  Description of Artificial Sequence: Synthetic oligonucleotide
ggcuugccucuuuaaggac

SEQ ID NO: 147336 - RNA, 19 nt, Artificial Sequence
  Description of Artificial Sequence: Synthetic oligonucleotide
agcaacgguucugccauuu

SEQ ID NO: 147337 - RNA, 19 nt, Artificial Sequence
  Description of Artificial Sequence: Synthetic oligonucleotide
accuuguucuaggccgcug

SEQ ID NO: 147338 - RNA, 19 nt, Artificial Sequence
  Description of Artificial Sequence: Synthetic oligonucleotide
caacuguacuuaaggcugu

SEQ ID NO: 147339 - RNA, 19 nt, Artificial Sequence
  Description of Artificial Sequence: Synthetic oligonucleotide
cuuuaaggacugcuagcau

SEQ ID NO: 147340 - RNA, 19 nt, Artificial Sequence
  Description of Artificial Sequence: Synthetic oligonucleotide
aguuugcaucccacugcca

SEQ ID NO: 147341 - RNA, 19 nt, Artificial Sequence
  Description of Artificial Sequence: Synthetic oligonucleotide
guuucagacuucggucaaa

SEQ ID NO: 147342 - RNA, 19 nt, Artificial Sequence
  Description of Artificial Sequence: Synthetic oligonucleotide
augcgucgucuuuucuuuu

SEQ ID NO: 147343 - RNA, 19 nt, Artificial Sequence
  Description of Artificial Sequence: Synthetic oligonucleotide
accucgcccuaaaauguaa

SEQ ID NO: 147344 - RNA, 19 nt, Artificial Sequence
  Description of Artificial Sequence: Synthetic oligonucleotide
aucgucauuuuaagccauu

SEQ ID NO: 147345 - RNA, 19 nt, Artificial Sequence
  Description of Artificial Sequence: Synthetic oligonucleotide
caccucgcccuaaaaugua

SEQ ID NO: 147346 - RNA, 19 nt, Artificial Sequence
  Description of Artificial Sequence: Synthetic oligonucleotide
acuauacaacugggacaaa

SEQ ID NO: 147347 - RNA, 19 nt, Artificial Sequence
  Description of Artificial Sequence: Synthetic oligonucleotide
cugcaaguaugguauccuu

SEQ ID NO: 147348 - RNA, 19 nt, Artificial Sequence
  Description of Artificial Sequence: Synthetic oligonucleotide
cgaggucuaauaaaucagu

SEQ ID NO: 147349 - RNA, 19 nt, Artificial Sequence
  Description of Artificial Sequence: Synthetic oligonucleotide
auccagcgugugagggcag

SEQ ID NO: 147350 - RNA, 19 nt, Artificial Sequence
  Description of Artificial Sequence: Synthetic oligonucleotide
ccucgcccuaaaauguaaa

SEQ ID NO: 147351 - RNA, 19 nt, Artificial Sequence
  Description of Artificial Sequence: Synthetic oligonucleotide
cgaagaaguaacguuugcu

SEQ ID NO: 147352 - RNA, 19 nt, Artificial Sequence
  Description of Artificial Sequence: Synthetic oligonucleotide
gaccuuguucuaggccgcu

SEQ ID NO: 147353 - RNA, 19 nt, Artificial Sequence
  Description of Artificial Sequence: Synthetic oligonucleotide
gcgugugagggcagcacua

SEQ ID NO: 147354 - RNA, 19 nt, Artificial Sequence
  Description of Artificial Sequence: Synthetic oligonucleotide
ccuuaaugcgucgucuuuu

SEQ ID NO: 147355 - RNA, 19 nt, Artificial Sequence
  Description of Artificial Sequence: Synthetic oligonucleotide
cccuuagaucuaacuuuua

SEQ ID NO: 147356 - RNA, 19 nt, Artificial Sequence
  Description of Artificial Sequence: Synthetic oligonucleotide
caggcaccuuaggagacuu

SEQ ID NO: 147357 - RNA, 19 nt, Artificial Sequence
  Description of Artificial Sequence: Synthetic oligonucleotide
ccgcugauuuucuuccaau

SEQ ID NO: 147358 - RNA, 19 nt, Artificial Sequence
  Description of Artificial Sequence: Synthetic oligonucleotide
gcaacgguucugccauuuu

SEQ ID NO: 147359 - RNA, 19 nt, Artificial Sequence
  Description of Artificial Sequence: Synthetic oligonucleotide
auuugaaugaaacugagac

SEQ ID NO: 147360 - RNA, 19 nt, Artificial Sequence
  Description of Artificial Sequence: Synthetic oligonucleotide
acugauuuugacuagaggg

SEQ ID NO: 147361 - RNA, 19 nt, Artificial Sequence
  Description of Artificial Sequence: Synthetic oligonucleotide
aauaauuccaaguccaagu

SEQ ID NO: 147362 - RNA, 19 nt, Artificial Sequence
  Description of Artificial Sequence: Synthetic oligonucleotide
uaguauaugucucuuauca

SEQ ID NO: 147363 - RNA, 19 nt, Artificial Sequence
  Description of Artificial Sequence: Synthetic oligonucleotide
ucuuaaguggacaguaucg

SEQ ID NO: 147364 - RNA, 19 nt, Artificial Sequence
  Description of Artificial Sequence: Synthetic oligonucleotide
acuguuguaucacagagag

SEQ ID NO: 147365 - RNA, 19 nt, Artificial Sequence
  Description of Artificial Sequence: Synthetic oligonucleotide
aacucuuacaugaugauag

SEQ ID NO: 147366 - RNA, 19 nt, Artificial Sequence
  Description of Artificial Sequence: Synthetic oligonucleotide
auuggaugauacuagcgcc

SEQ ID NO: 147367 - RNA, 19 nt, Artificial Sequence
  Description of Artificial Sequence: Synthetic oligonucleotide
uuaucauugaggauguggc

SEQ ID NO: 147368 - RNA, 19 nt, Artificial Sequence
  Description of Artificial Sequence: Synthetic oligonucleotide
uguuguaucacagagagau

SEQ ID NO: 147369 - RNA, 19 nt, Artificial Sequence
  Description of Artificial Sequence: Synthetic oligonucleotide
ugucaauuacccauugugg

SEQ ID NO: 147370 - RNA, 19 nt, Artificial Sequence
  Description of Artificial Sequence: Synthetic oligonucleotide
augaguuuugcacagguuc

SEQ ID NO: 147371 - RNA, 19 nt, Artificial Sequence
  Description of Artificial Sequence: Synthetic oligonucleotide
agaugcaugagguuggagg

SEQ ID NO: 147372 - RNA, 19 nt, Artificial Sequence
  Description of Artificial Sequence: Synthetic oligonucleotide
ugaaauacagacucugacc

SEQ ID NO: 147373 - RNA, 19 nt, Artificial Sequence
  Description of Artificial Sequence: Synthetic oligonucleotide
gaaagcuuaugauuguuag

SEQ ID NO: 147374 - RNA, 19 nt, Artificial Sequence
  Description of Artificial Sequence: Synthetic oligonucleotide
ucuuagaaccuucucagug

SEQ ID NO: 147375 - RNA, 19 nt, Artificial Sequence
  Description of Artificial Sequence: Synthetic oligonucleotide
uggaccacaauauaaauau

SEQ ID NO: 147376 - RNA, 19 nt, Artificial Sequence
  Description of Artificial Sequence: Synthetic oligonucleotide
aauaucacagggguguggg

SEQ ID NO: 147377 - RNA, 19 nt, Artificial Sequence
  Description of Artificial Sequence: Synthetic oligonucleotide
ucggaaauuaugaauuccc

SEQ ID NO: 147378 - RNA, 19 nt, Artificial Sequence
  Description of Artificial Sequence: Synthetic oligonucleotide
uuuuagcucauaacuauca

SEQ ID NO: 147379 - RNA, 19 nt, Artificial Sequence
  Description of Artificial Sequence: Synthetic oligonucleotide
aaggaauauuugucugucc

SEQ ID NO: 147380 - RNA, 19 nt, Artificial Sequence
  Description of Artificial Sequence: Synthetic oligonucleotide
cugauuuugacuagagggg

SEQ ID NO: 147381 - RNA, 19 nt, Artificial Sequence
  Description of Artificial Sequence: Synthetic oligonucleotide
accaauuuggaacguacac

SEQ ID NO: 147382 - RNA, 19 nt, Artificial Sequence
  Description of Artificial Sequence: Synthetic oligonucleotide
ugguaaaacccauuuagug

SEQ ID NO: 147383 - RNA, 19 nt, Artificial Sequence
  Description of Artificial Sequence: Synthetic oligonucleotide
ugucucuuaucauugagga

SEQ ID NO: 147384 - RNA, 19 nt, Artificial Sequence
  Description of Artificial Sequence: Synthetic oligonucleotide
agugaugucaauuacccau

SEQ ID NO: 147385 - RNA, 19 nt, Artificial Sequence
  Description of Artificial Sequence: Synthetic oligonucleotide
uaagccacauuguuauucg

SEQ ID NO: 147386 - RNA, 19 nt, Artificial Sequence
  Description of Artificial Sequence: Synthetic oligonucleotide
uaugcauggagccugguuc

SEQ ID NO: 147387 - RNA, 19 nt, Artificial Sequence
  Description of Artificial Sequence: Synthetic oligonucleotide
gauuguuagaaagacagga

SEQ ID NO: 147388 - RNA, 19 nt, Artificial Sequence
  Description of Artificial Sequence: Synthetic oligonucleotide
cauuggaugauacuagcgc

SEQ ID NO: 147389 - RNA, 19 nt, Artificial Sequence
  Description of Artificial Sequence: Synthetic oligonucleotide
auagguacugcaugagugg

SEQ ID NO: 147390 - RNA, 19 nt, Artificial Sequence
  Description of Artificial Sequence: Synthetic oligonucleotide
agugcuuuacuguucguag

SEQ ID NO: 147391 - RNA, 19 nt, Artificial Sequence
  Description of Artificial Sequence: Synthetic oligonucleotide
auaauuccaaguccaagug

SEQ ID NO: 147392 - RNA, 19 nt, Artificial Sequence
  Description of Artificial Sequence: Synthetic oligonucleotide
uugggucugacccaucggg

SEQ ID NO: 147393 - RNA, 19 nt, Artificial Sequence
  Description of Artificial Sequence: Synthetic oligonucleotide
uuaugauuguuagaaagac

SEQ ID NO: 147394 - RNA, 19 nt, Artificial Sequence
  Description of Artificial Sequence: Synthetic oligonucleotide
ugauuguuagaaagacagg

SEQ ID NO: 147395 - RNA, 19 nt, Artificial Sequence
  Description of Artificial Sequence: Synthetic oligonucleotide
uuuaauaaccuggucgggc

SEQ ID NO: 147396 - RNA, 19 nt, Artificial Sequence
  Description of Artificial Sequence: Synthetic oligonucleotide
uuuaacaccugggaaaugu

SEQ ID NO: 147397 - RNA, 19 nt, Artificial Sequence
  Description of Artificial Sequence: Synthetic oligonucleotide
uacugauuuugacuagagg

SEQ ID NO: 147398 - RNA, 19 nt, Artificial Sequence
  Description of Artificial Sequence: Synthetic oligonucleotide
uuauucguaucuuugguua

SEQ ID NO: 147399 - RNA, 19 nt, Artificial Sequence
  Description of Artificial Sequence: Synthetic oligonucleotide
uguuauucguaucuuuggu

SEQ ID NO: 147400 - RNA, 19 nt, Artificial Sequence
  Description of Artificial Sequence: Synthetic oligonucleotide
uguucguagguccauauuu

SEQ ID NO: 147401 - RNA, 19 nt, Artificial Sequence
  Description of Artificial Sequence: Synthetic oligonucleotide
gcuuaugauuguuagaaag

SEQ ID NO: 147402 - RNA, 19 nt, Artificial Sequence
  Description of Artificial Sequence: Synthetic oligonucleotide
aaagcuuaugauuguuaga

SEQ ID NO: 147403 - RNA, 19 nt, Artificial Sequence
  Description of Artificial Sequence: Synthetic oligonucleotide
uauacaucucugcuggcca

SEQ ID NO: 147404 - RNA, 19 nt, Artificial Sequence
  Description of Artificial Sequence: Synthetic oligonucleotide
uauuugucuguccaaucca

SEQ ID NO: 147405 - RNA, 19 nt, Artificial Sequence
  Description of Artificial Sequence: Synthetic oligonucleotide
uaucaaaccaacugacugu

SEQ ID NO: 147406 - RNA, 19 nt, Artificial Sequence
  Description of Artificial Sequence: Synthetic oligonucleotide
ucggccaguacucaaggag

SEQ ID NO: 147407 - RNA, 19 nt, Artificial Sequence
  Description of Artificial Sequence: Synthetic oligonucleotide
ucucaguggaccccgauac

SEQ ID NO: 147408 - RNA, 19 nt, Artificial Sequence
  Description of Artificial Sequence: Synthetic oligonucleotide
uuaauaaccuggucgggcu

SEQ ID NO: 147409 - RNA, 19 nt, Artificial Sequence
  Description of Artificial Sequence: Synthetic oligonucleotide
uuuacucuaauaacacaaa

SEQ ID NO: 147410 - RNA, 19 nt, Artificial Sequence
  Description of Artificial Sequence: Synthetic oligonucleotide
uucaauuuugggucugacc

SEQ ID NO: 147411 - RNA, 19 nt, Artificial Sequence
  Description of Artificial Sequence: Synthetic oligonucleotide
uuuacuguucguaggucca

SEQ ID NO: 147412 - RNA, 19 nt, Artificial Sequence
  Description of Artificial Sequence: Synthetic oligonucleotide
caauuuggaacguacacca

SEQ ID NO: 147413 - RNA, 19 nt, Artificial Sequence
  Description of Artificial Sequence: Synthetic oligonucleotide
uucguagguccauauuugg

SEQ ID NO: 147414 - RNA, 19 nt, Artificial Sequence
  Description of Artificial Sequence: Synthetic oligonucleotide
cuuguagagcccaaacgcc

SEQ ID NO: 147415 - RNA, 19 nt, Artificial Sequence
  Description of Artificial Sequence: Synthetic oligonucleotide
aaucuaugcauggagccug

SEQ ID NO: 147416 - RNA, 19 nt, Artificial Sequence
  Description of Artificial Sequence: Synthetic oligonucleotide
ucuuugguuaguauauguc

SEQ ID NO: 147417 - RNA, 19 nt, Artificial Sequence
  Description of Artificial Sequence: Synthetic oligonucleotide
ucguagguccauauuuggg

SEQ ID NO: 147418 - RNA, 19 nt, Artificial Sequence
  Description of Artificial Sequence: Synthetic oligonucleotide
aaaccaaacauggaccaca

SEQ ID NO: 147419 - RNA, 19 nt, Artificial Sequence
  Description of Artificial Sequence: Synthetic oligonucleotide
aaaaccaaacauggaccac

SEQ ID NO: 147420 - RNA, 19 nt, Artificial Sequence
  Description of Artificial Sequence: Synthetic oligonucleotide
aaaagcccacgcauaaaac

SEQ ID NO: 147421 - RNA, 19 nt, Artificial Sequence
  Description of Artificial Sequence: Synthetic oligonucleotide
uuccuaggacuacucaggg

SEQ ID NO: 147422 - RNA, 19 nt, Artificial Sequence
  Description of Artificial Sequence: Synthetic oligonucleotide
caaaccaacugacugugag

SEQ ID NO: 147423 - RNA, 19 nt, Artificial Sequence
  Description of Artificial Sequence: Synthetic oligonucleotide
uuaaguggacaguaucgug

SEQ ID NO: 147424 - RNA, 19 nt, Artificial Sequence
  Description of Artificial Sequence: Synthetic oligonucleotide
ugaucugucaagcuccauc

SEQ ID NO: 147425 - RNA, 19 nt, Artificial Sequence
  Description of Artificial Sequence: Synthetic oligonucleotide
acagugugcgaccuccagc

SEQ ID NO: 147426 - RNA, 19 nt, Artificial Sequence
  Description of Artificial Sequence: Synthetic oligonucleotide
uauucguaucuuugguuag

SEQ ID NO: 147427 - RNA, 19 nt, Artificial Sequence
  Description of Artificial Sequence: Synthetic oligonucleotide
ugugcgaccuccagcuucg

SEQ ID NO: 147428 - RNA, 19 nt, Artificial Sequence
  Description of Artificial Sequence: Synthetic oligonucleotide
acgcauaaaacuggaaaac

SEQ ID NO: 147429 - RNA, 19 nt, Artificial Sequence
  Description of Artificial Sequence: Synthetic oligonucleotide
uucaucguggacucgguac

SEQ ID NO: 147430 - RNA, 19 nt, Artificial Sequence
  Description of Artificial Sequence: Synthetic oligonucleotide
cagagggccuucaaaaggg

SEQ ID NO: 147431 - RNA, 19 nt, Artificial Sequence
  Description of Artificial Sequence: Synthetic oligonucleotide
aaaccaacugacugugaga

SEQ ID NO: 147432 - RNA, 19 nt, Artificial Sequence
  Description of Artificial Sequence: Synthetic oligonucleotide
ucugucaaaggugaagugu

SEQ ID NO: 147433 - RNA, 19 nt, Artificial Sequence
  Description of Artificial Sequence: Synthetic oligonucleotide
uuuggaacguacaccauuu

SEQ ID NO: 147434 - RNA, 19 nt, Artificial Sequence
  Description of Artificial Sequence: Synthetic oligonucleotide
aaauaucacaggggugugg

SEQ ID NO: 147435 - RNA, 19 nt, Artificial Sequence
  Description of Artificial Sequence: Synthetic oligonucleotide
aguaucgugcugcucacug

SEQ ID NO: 147436 - RNA, 19 nt, Artificial Sequence
  Description of Artificial Sequence: Synthetic oligonucleotide
guuucuuaggucugugcag

SEQ ID NO: 147437 - RNA, 19 nt, Artificial Sequence
  Description of Artificial Sequence: Synthetic oligonucleotide
aacguacaccauuuuaaau

SEQ ID NO: 147438 - RNA, 19 nt, Artificial Sequence
  Description of Artificial Sequence: Synthetic oligonucleotide
aacccauuuagugcauugg

SEQ ID NO: 147439 - RNA, 19 nt, Artificial Sequence
  Description of Artificial Sequence: Synthetic oligonucleotide
ucuuucgcagaaacccagg

SEQ ID NO: 147440 - RNA, 19 nt, Artificial Sequence
  Description of Artificial Sequence: Synthetic oligonucleotide
aaugaaacugagacuucag

SEQ ID NO: 147441 - RNA, 19 nt, Artificial Sequence
  Description of Artificial Sequence: Synthetic oligonucleotide
aacauggaccacaauauaa

SEQ ID NO: 147442 - RNA, 19 nt, Artificial Sequence
  Description of Artificial Sequence: Synthetic oligonucleotide
gaaaagcccacgcauaaaa

SEQ ID NO: 147443 - RNA, 19 nt, Artificial Sequence
  Description of Artificial Sequence: Synthetic oligonucleotide
ugauuuugacuagagggga

SEQ ID NO: 147444 - RNA, 19 nt, Artificial Sequence
  Description of Artificial Sequence: Synthetic oligonucleotide
cauuuagugcauuggcccc

SEQ ID NO: 147445 - RNA, 19 nt, Artificial Sequence
  Description of Artificial Sequence: Synthetic oligonucleotide
ccuaggacuacucagggcc

SEQ ID NO: 147446 - RNA, 19 nt, Artificial Sequence
  Description of Artificial Sequence: Synthetic oligonucleotide
uuucgcagaaacccaggca

SEQ ID NO: 147447 - RNA, 19 nt, Artificial Sequence
  Description of Artificial Sequence: Synthetic oligonucleotide
ucuuacugauuuugacuag

SEQ ID NO: 147448 - RNA, 19 nt, Artificial Sequence
  Description of Artificial Sequence: Synthetic oligonucleotide
aguguuauuugaggcaguc

SEQ ID NO: 147449 - RNA, 19 nt, Artificial Sequence
  Description of Artificial Sequence: Synthetic oligonucleotide
uuagaucuacugagaacca

SEQ ID NO: 147450 - RNA, 19 nt, Artificial Sequence
  Description of Artificial Sequence: Synthetic oligonucleotide
gucagugaaguccgcacgg

SEQ ID NO: 147451 - RNA, 19 nt, Artificial Sequence
  Description of Artificial Sequence: Synthetic oligonucleotide
gagaaguccucccaaguuc

SEQ ID NO: 147452 - RNA, 19 nt, Artificial Sequence
  Description of Artificial Sequence: Synthetic oligonucleotide
agucacguguguucucggc

SEQ ID NO: 147453 - RNA, 19 nt, Artificial Sequence
  Description of Artificial Sequence: Synthetic oligonucleotide
uauuuggguccaaaaccug

SEQ ID NO: 147454 - RNA, 19 nt, Artificial Sequence
  Description of Artificial Sequence: Synthetic oligonucleotide
uucacaucccaaaggaaua

SEQ ID NO: 147455 - RNA, 19 nt, Artificial Sequence
  Description of Artificial Sequence: Synthetic oligonucleotide
gcaucguugacuuguagag

SEQ ID NO: 147456 - RNA, 19 nt, Artificial Sequence
  Description of Artificial Sequence: Synthetic oligonucleotide
agcuucgccaaauaucaca

SEQ ID NO: 147457 - RNA, 19 nt, Artificial Sequence
  Description of Artificial Sequence: Synthetic oligonucleotide
uuaugggauuuguacaguc

SEQ ID NO: 147458 - RNA, 19 nt, Artificial Sequence
  Description of Artificial Sequence: Synthetic oligonucleotide
uuaguauaugucucuuauc

SEQ ID NO: 147459 - RNA, 19 nt, Artificial Sequence
  Description of Artificial Sequence: Synthetic oligonucleotide
ccauuuagugcauuggccc

SEQ ID NO: 147460 - RNA, 19 nt, Artificial Sequence
  Description of Artificial Sequence: Synthetic oligonucleotide
agccugaacagugugcgac

SEQ ID NO: 147461 - RNA, 19 nt, Artificial Sequence
  Description of Artificial Sequence: Synthetic oligonucleotide
uucucggccaguacucaag

SEQ ID NO: 147462 - RNA, 19 nt, Artificial Sequence
  Description of Artificial Sequence: Synthetic oligonucleotide
aaucggccgguggagcucc

SEQ ID NO: 147463 - RNA, 19 nt, Artificial Sequence
  Description of Artificial Sequence: Synthetic oligonucleotide
gaaccaauuuggaacguac

SEQ ID NO: 147464 - RNA, 19 nt, Artificial Sequence
  Description of Artificial Sequence: Synthetic oligonucleotide
ggcguuaugggauuuguac

SEQ ID NO: 147465 - RNA, 19 nt, Artificial Sequence
  Description of Artificial Sequence: Synthetic oligonucleotide
acgccaguugcucugagga

SEQ ID NO: 147466 - RNA, 19 nt, Artificial Sequence
  Description of Artificial Sequence: Synthetic oligonucleotide
ugugugccgucucuguuca

SEQ ID NO: 147467 - RNA, 19 nt, Artificial Sequence
  Description of Artificial Sequence: Synthetic oligonucleotide
cuuucgcagaaacccaggc

SEQ ID NO: 147468 - RNA, 19 nt, Artificial Sequence
  Description of Artificial Sequence: Synthetic oligonucleotide
uaaucgucagcaucccugu

SEQ ID NO: 147469 - RNA, 19 nt, Artificial Sequence
  Description of Artificial Sequence: Synthetic oligonucleotide
uuggagguagaaaggaauu

SEQ ID NO: 147470 - RNA, 19 nt, Artificial Sequence
  Description of Artificial Sequence: Synthetic oligonucleotide
uguaucacagagagauaaa

SEQ ID NO: 147471 - RNA, 19 nt, Artificial Sequence
  Description of Artificial Sequence: Synthetic oligonucleotide
aaccuggucgggcugugug

SEQ ID NO: 147472 - RNA, 19 nt, Artificial Sequence
  Description of Artificial Sequence: Synthetic oligonucleotide
acaguaucgugcugcucac

SEQ ID NO: 147473 - RNA, 19 nt, Artificial Sequence
  Description of Artificial Sequence: Synthetic oligonucleotide
cucgauuagugacuccacc

SEQ ID NO: 147474 - RNA, 19 nt, Artificial Sequence
  Description of Artificial Sequence: Synthetic oligonucleotide
aauuuugggucugacccau

SEQ ID NO: 147475 - RNA, 19 nt, Artificial Sequence
  Description of Artificial Sequence: Synthetic oligonucleotide
gugcuuuacuguucguagg

SEQ ID NO: 147476 - RNA, 19 nt, Artificial Sequence
  Description of Artificial Sequence: Synthetic oligonucleotide
uucugucaaaggugaagug

SEQ ID NO: 147477 - RNA, 19 nt, Artificial Sequence
  Description of Artificial Sequence: Synthetic oligonucleotide
uaauggagugugagguccc

SEQ ID NO: 147478 - RNA, 19 nt, Artificial Sequence
  Description of Artificial Sequence: Synthetic oligonucleotide
aucucgauuagugacucca

SEQ ID NO: 147479 - RNA, 19 nt, Artificial Sequence
  Description of Artificial Sequence: Synthetic oligonucleotide
acacucuuagaaccuucuc

SEQ ID NO: 147480 - RNA, 19 nt, Artificial Sequence
  Description of Artificial Sequence: Synthetic oligonucleotide
acuuucauccagaguaauc

SEQ ID NO: 147481 - RNA, 19 nt, Artificial Sequence
  Description of Artificial Sequence: Synthetic oligonucleotide
gaacguacaccauuuuaaa

SEQ ID NO: 147482 - RNA, 19 nt, Artificial Sequence
  Description of Artificial Sequence: Synthetic oligonucleotide
caauuacccauuguggcac

SEQ ID NO: 147483 - RNA, 19 nt, Artificial Sequence
  Description of Artificial Sequence: Synthetic oligonucleotide
acucgguacguugcuauac

SEQ ID NO: 147484 - RNA, 19 nt, Artificial Sequence
  Description of Artificial Sequence: Synthetic oligonucleotide
auuggccccuccugcaaac

SEQ ID NO: 147485 - RNA, 19 nt, Artificial Sequence
  Description of Artificial Sequence: Synthetic oligonucleotide
acaucucgauuagugacuc

SEQ ID NO: 147486 - RNA, 19 nt, Artificial Sequence
  Description of Artificial Sequence: Synthetic oligonucleotide
cacgcauaaaacuggaaaa

SEQ ID NO: 147487 - RNA, 19 nt, Artificial Sequence
  Description of Artificial Sequence: Synthetic oligonucleotide
guuaguauaugucucuuau

SEQ ID NO: 147488 - RNA, 19 nt, Artificial Sequence
  Description of Artificial Sequence: Synthetic oligonucleotide
gucuuaaguggacaguauc

SEQ ID NO: 147489 - RNA, 19 nt, Artificial Sequence
  Description of Artificial Sequence: Synthetic oligonucleotide
aaacucuuacaugaugaua

SEQ ID NO: 147490 - RNA, 19 nt, Artificial Sequence
  Description of Artificial Sequence: Synthetic oligonucleotide
agaggcucggaaauuauga

SEQ ID NO: 147491 - RNA, 19 nt, Artificial Sequence
  Description of Artificial Sequence: Synthetic oligonucleotide
uugugacaguguuauuuga

SEQ ID NO: 147492 - RNA, 19 nt, Artificial Sequence
  Description of Artificial Sequence: Synthetic oligonucleotide
gguacguugcuauacaucu

SEQ ID NO: 147493 - RNA, 19 nt, Artificial Sequence
  Description of Artificial Sequence: Synthetic oligonucleotide
ugaacugguaaaacccauu

SEQ ID NO: 147494 - RNA, 19 nt, Artificial Sequence
  Description of Artificial Sequence: Synthetic oligonucleotide
aggcgaauuguuccgucag

SEQ ID NO: 147495 - RNA, 19 nt, Artificial Sequence
  Description of Artificial Sequence: Synthetic oligonucleotide
guagacaugcuccgucacc

SEQ ID NO: 147496 - RNA, 19 nt, Artificial Sequence
  Description of Artificial Sequence: Synthetic oligonucleotide
acgcagguacaggaaaagc

SEQ ID NO: 147497 - RNA, 19 nt, Artificial Sequence
  Description of Artificial Sequence: Synthetic oligonucleotide
ucguagacaugcuccguca

SEQ ID NO: 147498 - RNA, 19 nt, Artificial Sequence
  Description of Artificial Sequence: Synthetic oligonucleotide
aauuacccauuguggcacu

SEQ ID NO: 147499 - RNA, 19 nt, Artificial Sequence
  Description of Artificial Sequence: Synthetic oligonucleotide
gucacguguguucucggcc

SEQ ID NO: 147500 - RNA, 19 nt, Artificial Sequence
  Description of Artificial Sequence: Synthetic oligonucleotide
ugacccaucgggacugcug

SEQ ID NO: 147501 - RNA, 19 nt, Artificial Sequence
  Description of Artificial Sequence: Synthetic oligonucleotide
aaccaauuuggaacguaca

SEQ ID NO: 147502 - RNA, 19 nt, Artificial Sequence
  Description of Artificial Sequence: Synthetic oligonucleotide
ugguucuauauuacaucuc

SEQ ID NO: 147503 - RNA, 19 nt, Artificial Sequence
  Description of Artificial Sequence: Synthetic oligonucleotide
guuccgucagaacucccag

SEQ ID NO: 147504 - RNA, 19 nt, Artificial Sequence
  Description of Artificial Sequence: Synthetic oligonucleotide
ugcaacccagauugcagga

SEQ ID NO: 147505 - RNA, 19 nt, Artificial Sequence
  Description of Artificial Sequence: Synthetic oligonucleotide
acaggcgaauuguuccguc

SEQ ID NO: 147506 - RNA, 19 nt, Artificial Sequence
  Description of Artificial Sequence: Synthetic oligonucleotide
aaaucggccgguggagcuc

SEQ ID NO: 147507 - RNA, 19 nt, Artificial Sequence
  Description of Artificial Sequence: Synthetic oligonucleotide
ucucgauuagugacuccac

SEQ ID NO: 147508 - RNA, 19 nt, Artificial Sequence
  Description of Artificial Sequence: Synthetic oligonucleotide
uggaugauacuagcgcccc

SEQ ID NO: 147509 - RNA, 19 nt, Artificial Sequence
  Description of Artificial Sequence: Synthetic oligonucleotide
guuaucugaaugagaagga

SEQ ID NO: 147510 - RNA, 19 nt, Artificial Sequence
  Description of Artificial Sequence: Synthetic oligonucleotide
uggucuuaaguggacagua

SEQ ID NO: 147511 - RNA, 19 nt, Artificial Sequence
  Description of Artificial Sequence: Synthetic oligonucleotide
augaauaacccaggacuug

SEQ ID NO: 147512 - RNA, 19 nt, Artificial Sequence
  Description of Artificial Sequence: Synthetic oligonucleotide
uugaaacgcggugacagau

SEQ ID NO: 147513 - RNA, 19 nt, Artificial Sequence
  Description of Artificial Sequence: Synthetic oligonucleotide
caucgccucagucucgccc

SEQ ID NO: 147514 - RNA, 19 nt, Artificial Sequence
  Description of Artificial Sequence: Synthetic oligonucleotide
uccuaggacuacucagggc

SEQ ID NO: 147515 - RNA, 19 nt, Artificial Sequence
  Description of Artificial Sequence: Synthetic oligonucleotide
guauaugucucuuaucauu

SEQ ID NO: 147516 - RNA, 19 nt, Artificial Sequence
  Description of Artificial Sequence: Synthetic oligonucleotide
ucguggacucgguacguug

SEQ ID NO: 147517 - RNA, 19 nt, Artificial Sequence
  Description of Artificial Sequence: Synthetic oligonucleotide
ugagucuaugaaagcuuau

SEQ ID NO: 147518 - RNA, 19 nt, Artificial Sequence
  Description of Artificial Sequence: Synthetic oligonucleotide
gaaacgcggugacagaugu

SEQ ID NO: 147519 - RNA, 19 nt, Artificial Sequence
  Description of Artificial Sequence: Synthetic oligonucleotide
uggaccccgauacaaugau

SEQ ID NO: 147520 - RNA, 19 nt, Artificial Sequence
  Description of Artificial Sequence: Synthetic oligonucleotide
uucucaguggaccccgaua

SEQ ID NO: 147521 - RNA, 19 nt, Artificial Sequence
  Description of Artificial Sequence: Synthetic oligonucleotide
ggcauuggaugauacuagc

SEQ ID NO: 147522 - RNA, 19 nt, Artificial Sequence
  Description of Artificial Sequence: Synthetic oligonucleotide
gacccaucgggacugcuga

SEQ ID NO: 147523 - RNA, 19 nt, Artificial Sequence
  Description of Artificial Sequence: Synthetic oligonucleotide
gccgugaacugguaaaacc

SEQ ID NO: 147524 - RNA, 19 nt, Artificial Sequence
  Description of Artificial Sequence: Synthetic oligonucleotide
cccgauacaaugauuguuc

SEQ ID NO: 147525 - RNA, 19 nt, Artificial Sequence
  Description of Artificial Sequence: Synthetic oligonucleotide
cccauuuagugcauuggcc

SEQ ID NO: 147526 - RNA, 19 nt, Artificial Sequence
  Description of Artificial Sequence: Synthetic oligonucleotide
ccaauuuggaacguacacc

SEQ ID NO: 147527 - RNA, 19 nt, Artificial Sequence
  Description of Artificial Sequence: Synthetic oligonucleotide
aagaugcaugagguuggag

SEQ ID NO: 147528 - RNA, 19 nt, Artificial Sequence
  Description of Artificial Sequence: Synthetic oligonucleotide
cuuacugauuuugacuaga

SEQ ID NO: 147529 - RNA, 19 nt, Artificial Sequence
  Description of Artificial Sequence: Synthetic oligonucleotide
aaacgccaguugcucugag

SEQ ID NO: 147530 - RNA, 19 nt, Artificial Sequence
  Description of Artificial Sequence: Synthetic oligonucleotide
uuccggaccugcagcaugu

SEQ ID NO: 147531 - RNA, 19 nt, Artificial Sequence
  Description of Artificial Sequence: Synthetic oligonucleotide
gacaugcuccgucaccuuc

SEQ ID NO: 147532 - RNA, 19 nt, Artificial Sequence
  Description of Artificial Sequence: Synthetic oligonucleotide
cucguagacaugcuccguc

SEQ ID NO: 147533 - RNA, 19 nt, Artificial Sequence
  Description of Artificial Sequence: Synthetic oligonucleotide
uagugcauuggccccuccu

SEQ ID NO: 147534 - RNA, 19 nt, Artificial Sequence
  Description of Artificial Sequence: Synthetic oligonucleotide
uaaaacccauuuagugcau

SEQ ID NO: 147535 - RNA, 19 nt, Artificial Sequence
  Description of Artificial Sequence: Synthetic oligonucleotide
uacccauuguggcacuguc

SEQ ID NO: 147536 - RNA, 19 nt, Artificial Sequence
  Description of Artificial Sequence: Synthetic oligonucleotide
acuguucguagguccauau

SEQ ID NO: 147537 - RNA, 19 nt, Artificial Sequence
  Description of Artificial Sequence: Synthetic oligonucleotide
uacaugcgugaaggcaucg

SEQ ID NO: 147538 - RNA, 19 nt, Artificial Sequence
  Description of Artificial Sequence: Synthetic oligonucleotide
accaacugacugugagauc

SEQ ID NO: 147539 - RNA, 19 nt, Artificial Sequence
  Description of Artificial Sequence: Synthetic oligonucleotide
ggagucacguguguucucg

SEQ ID NO: 147540 - RNA, 19 nt, Artificial Sequence
  Description of Artificial Sequence: Synthetic oligonucleotide
gcuucgccaaauaucacag

SEQ ID NO: 147541 - RNA, 19 nt, Artificial Sequence
  Description of Artificial Sequence: Synthetic oligonucleotide
gcauuggaugauacuagcg

SEQ ID NO: 147542 - RNA, 19 nt, Artificial Sequence
  Description of Artificial Sequence: Synthetic oligonucleotide
cuuaggucugugcaguaaa

SEQ ID NO: 147543 - RNA, 19 nt, Artificial Sequence
  Description of Artificial Sequence: Synthetic oligonucleotide
auuuagugcauuggccccu

SEQ ID NO: 147544 - RNA, 19 nt, Artificial Sequence
  Description of Artificial Sequence: Synthetic oligonucleotide
ggaacguacaccauuuuaa

SEQ ID NO: 147545 - RNA, 19 nt, Artificial Sequence
  Description of Artificial Sequence: Synthetic oligonucleotide
agcccacgcauaaaacugg

SEQ ID NO: 147546 - RNA, 19 nt, Artificial Sequence
  Description of Artificial Sequence: Synthetic oligonucleotide
accaaaucggccgguggag

SEQ ID NO: 147547 - RNA, 19 nt, Artificial Sequence
  Description of Artificial Sequence: Synthetic oligonucleotide
ucuuaggucugugcaguaa

SEQ ID NO: 147548 - RNA, 19 nt, Artificial Sequence
  Description of Artificial Sequence: Synthetic oligonucleotide
gaggcucggaaauuaugaa

SEQ ID NO: 147549 - RNA, 19 nt, Artificial Sequence
  Description of Artificial Sequence: Synthetic oligonucleotide
ggcaucguugacuuguaga

SEQ ID NO: 147550 - RNA, 19 nt, Artificial Sequence
  Description of Artificial Sequence: Synthetic oligonucleotide
auucguaucuuugguuagu

SEQ ID NO: 147551 - RNA, 19 nt, Artificial Sequence
  Description of Artificial Sequence: Synthetic oligonucleotide
auacaugcgugaaggcauc

SEQ ID NO: 147552 - RNA, 19 nt, Artificial Sequence
  Description of Artificial Sequence: Synthetic oligonucleotide
ucguaucuuugguuaguau

SEQ ID NO: 147553 - RNA, 19 nt, Artificial Sequence
  Description of Artificial Sequence: Synthetic oligonucleotide
uucguaucuuugguuagua

SEQ ID NO: 147554 - RNA, 19 nt, Artificial Sequence
  Description of Artificial Sequence: Synthetic oligonucleotide
uggggacaccuuaaucuau

SEQ ID NO: 147555 - RNA, 19 nt, Artificial Sequence
  Description of Artificial Sequence: Synthetic oligonucleotide
ucgguacguugcuauacau

SEQ ID NO: 147556 - RNA, 19 nt, Artificial Sequence
  Description of Artificial Sequence: Synthetic oligonucleotide
gcaugccuucaacacaucc

SEQ ID NO: 147557 - RNA, 19 nt, Artificial Sequence
  Description of Artificial Sequence: Synthetic oligonucleotide
gauuuugacuagaggggaa

SEQ ID NO: 147558 - RNA, 19 nt, Artificial Sequence
  Description of Artificial Sequence: Synthetic oligonucleotide
ggaucccacacucuuagaa

SEQ ID NO: 147559 - RNA, 19 nt, Artificial Sequence
  Description of Artificial Sequence: Synthetic oligonucleotide
acaucccaaaggaauauuu

SEQ ID NO: 147560 - RNA, 19 nt, Artificial Sequence
  Description of Artificial Sequence: Synthetic oligonucleotide
accuuaaucuaugcaugga

SEQ ID NO: 147561 - RNA, 19 nt, Artificial Sequence
  Description of Artificial Sequence: Synthetic oligonucleotide
guuauucguaucuuugguu

SEQ ID NO: 147562 - RNA, 19 nt, Artificial Sequence
  Description of Artificial Sequence: Synthetic oligonucleotide
auacaacuugaaauacaga

SEQ ID NO: 147563 - RNA, 19 nt, Artificial Sequence
  Description of Artificial Sequence: Synthetic oligonucleotide
aauuuggaacguacaccau

SEQ ID NO: 147564 - RNA, 19 nt, Artificial Sequence
  Description of Artificial Sequence: Synthetic oligonucleotide
cacuguuguaucacagaga

SEQ ID NO: 147565 - RNA, 19 nt, Artificial Sequence
  Description of Artificial Sequence: Synthetic oligonucleotide
uguucucggccaguacuca

SEQ ID NO: 147566 - RNA, 19 nt, Artificial Sequence
  Description of Artificial Sequence: Synthetic oligonucleotide
ggagccugguucuauauua

SEQ ID NO: 147567 - RNA, 19 nt, Artificial Sequence
  Description of Artificial Sequence: Synthetic oligonucleotide
auauuacaucucgauuagu

SEQ ID NO: 147568 - RNA, 19 nt, Artificial Sequence
  Description of Artificial Sequence: Synthetic oligonucleotide
agagggccuucaaaagggg

SEQ ID NO: 147569 - RNA, 19 nt, Artificial Sequence
  Description of Artificial Sequence: Synthetic oligonucleotide
ccgauacaaugauuguucc

SEQ ID NO: 147570 - RNA, 19 nt, Artificial Sequence
  Description of Artificial Sequence: Synthetic oligonucleotide
cuguuagaguguucacauc

SEQ ID NO: 147571 - RNA, 19 nt, Artificial Sequence
  Description of Artificial Sequence: Synthetic oligonucleotide
gugugcgaccuccagcuuc

SEQ ID NO: 147572 - RNA, 19 nt, Artificial Sequence
  Description of Artificial Sequence: Synthetic oligonucleotide
gcguuaugggauuuguaca

SEQ ID NO: 147573 - RNA, 19 nt, Artificial Sequence
  Description of Artificial Sequence: Synthetic oligonucleotide
uuacccauuguggcacugu

SEQ ID NO: 147574 - RNA, 19 nt, Artificial Sequence
  Description of Artificial Sequence: Synthetic oligonucleotide
aacagaggcgggcgcccca

SEQ ID NO: 147575 - RNA, 19 nt, Artificial Sequence
  Description of Artificial Sequence: Synthetic oligonucleotide
accccgauacaaugauugu

SEQ ID NO: 147576 - RNA, 19 nt, Artificial Sequence
  Description of Artificial Sequence: Synthetic oligonucleotide
gcuuggugggcuuccuagg

SEQ ID NO: 147577 - RNA, 19 nt, Artificial Sequence
  Description of Artificial Sequence: Synthetic oligonucleotide
auggucuuaaguggacagu

SEQ ID NO: 147578 - RNA, 19 nt, Artificial Sequence
  Description of Artificial Sequence: Synthetic oligonucleotide
uuagugcauuggccccucc

SEQ ID NO: 147579 - RNA, 19 nt, Artificial Sequence
  Description of Artificial Sequence: Synthetic oligonucleotide
cagcauggucuuaagugga

SEQ ID NO: 147580 - RNA, 19 nt, Artificial Sequence
  Description of Artificial Sequence: Synthetic oligonucleotide
cuuaaguggacaguaucgu

SEQ ID NO: 147581 - RNA, 19 nt, Artificial Sequence
  Description of Artificial Sequence: Synthetic oligonucleotide
ugguuaguauaugucucuu

SEQ ID NO: 147582 - RNA, 19 nt, Artificial Sequence
  Description of Artificial Sequence: Synthetic oligonucleotide
guccccgccgcucuuccag

SEQ ID NO: 147583 - RNA, 19 nt, Artificial Sequence
  Description of Artificial Sequence: Synthetic oligonucleotide
cucgguacguugcuauaca

SEQ ID NO: 147584 - RNA, 19 nt, Artificial Sequence
  Description of Artificial Sequence: Synthetic oligonucleotide
caccaaaucggccggugga

SEQ ID NO: 147585 - RNA, 19 nt, Artificial Sequence
  Description of Artificial Sequence: Synthetic oligonucleotide
cagugugcgaccuccagcu

SEQ ID NO: 147586 - RNA, 19 nt, Artificial Sequence
  Description of Artificial Sequence: Synthetic oligonucleotide
uggcguuaugggauuugua

SEQ ID NO: 147587 - RNA, 19 nt, Artificial Sequence
  Description of Artificial Sequence: Synthetic oligonucleotide
uuuagugcauuggccccuc

SEQ ID NO: 147588 - RNA, 19 nt, Artificial Sequence
  Description of Artificial Sequence: Synthetic oligonucleotide
aguggcguuaugggauuug

SEQ ID NO: 147589 - RNA, 19 nt, Artificial Sequence
  Description of Artificial Sequence: Synthetic oligonucleotide
auuacccauuguggcacug

SEQ ID NO: 147590 - RNA, 19 nt, Artificial Sequence
  Description of Artificial Sequence: Synthetic oligonucleotide
ccacaggcgaauuguuccg

SEQ ID NO: 147591 - RNA, 19 nt, Artificial Sequence
  Description of Artificial Sequence: Synthetic oligonucleotide
cguugcuauacaucucugc

SEQ ID NO: 147592 - RNA, 19 nt, Artificial Sequence
  Description of Artificial Sequence: Synthetic oligonucleotide
gugagucuaugaaagcuua

SEQ ID NO: 147593 - RNA, 19 nt, Artificial Sequence
  Description of Artificial Sequence: Synthetic oligonucleotide
uuacuguucguagguccau

SEQ ID NO: 147594 - RNA, 19 nt, Artificial Sequence
  Description of Artificial Sequence: Synthetic oligonucleotide
gcagaguggcguuauggga

SEQ ID NO: 147595 - RNA, 19 nt, Artificial Sequence
  Description of Artificial Sequence: Synthetic oligonucleotide
caggcgaauuguuccguca

SEQ ID NO: 147596 - RNA, 19 nt, Artificial Sequence
  Description of Artificial Sequence: Synthetic oligonucleotide
acagaggcgggcgccccac

SEQ ID NO: 147597 - RNA, 19 nt, Artificial Sequence
  Description of Artificial Sequence: Synthetic oligonucleotide
aaacgcggugacagaugug

SEQ ID NO: 147598 - RNA, 19 nt, Artificial Sequence
  Description of Artificial Sequence: Synthetic oligonucleotide
guguuauuugaggcaguca

SEQ ID NO: 147599 - RNA, 19 nt, Artificial Sequence
  Description of Artificial Sequence: Synthetic oligonucleotide
gguuaguauaugucucuua

SEQ ID NO: 147600 - RNA, 19 nt, Artificial Sequence
  Description of Artificial Sequence: Synthetic oligonucleotide
gugcuguuagaguguucac

SEQ ID NO: 147601 - RNA, 19 nt, Artificial Sequence
  Description of Artificial Sequence: Synthetic oligonucleotide
uaaucaccagaggcucgga

SEQ ID NO: 147602 - RNA, 19 nt, Artificial Sequence
  Description of Artificial Sequence: Synthetic oligonucleotide
acaugcgugaaggcaucgu

SEQ ID NO: 147603 - RNA, 19 nt, Artificial Sequence
  Description of Artificial Sequence: Synthetic oligonucleotide
gaucuacugagaaccaauu

SEQ ID NO: 147604 - RNA, 19 nt, Artificial Sequence
  Description of Artificial Sequence: Synthetic oligonucleotide
uacuguucguagguccaua

SEQ ID NO: 147605 - RNA, 19 nt, Artificial Sequence
  Description of Artificial Sequence: Synthetic oligonucleotide
gaaucccggcagagcagcc

SEQ ID NO: 147606 - RNA, 19 nt, Artificial Sequence
  Description of Artificial Sequence: Synthetic oligonucleotide
ccaacugacugugagaucu

SEQ ID NO: 147607 - RNA, 19 nt, Artificial Sequence
  Description of Artificial Sequence: Synthetic oligonucleotide
auaaccuggucgggcugug

SEQ ID NO: 147608 - RNA, 19 nt, Artificial Sequence
  Description of Artificial Sequence: Synthetic oligonucleotide
cuguuguaucacagagaga

SEQ ID NO: 147609 - RNA, 19 nt, Artificial Sequence
  Description of Artificial Sequence: Synthetic oligonucleotide
guacguugcuauacaucuc

SEQ ID NO: 147610 - RNA, 19 nt, Artificial Sequence
  Description of Artificial Sequence: Synthetic oligonucleotide
gccacauuguuauucguau

SEQ ID NO: 147611 - RNA, 19 nt, Artificial Sequence
  Description of Artificial Sequence: Synthetic oligonucleotide
ccaccaaaucggccggugg

SEQ ID NO: 147612 - RNA, 19 nt, Artificial Sequence
  Description of Artificial Sequence: Synthetic oligonucleotide
guucucggccaguacucaa

SEQ ID NO: 147613 - RNA, 19 nt, Artificial Sequence
  Description of Artificial Sequence: Synthetic oligonucleotide
cguggacucgguacguugc

SEQ ID NO: 147614 - RNA, 19 nt, Artificial Sequence
  Description of Artificial Sequence: Synthetic oligonucleotide
gacucgguacguugcuaua

SEQ ID NO: 147615 - RNA, 19 nt, Artificial Sequence
  Description of Artificial Sequence: Synthetic oligonucleotide
caaaucggccgguggagcu

SEQ ID NO: 147616 - RNA, 19 nt, Artificial Sequence
  Description of Artificial Sequence: Synthetic oligonucleotide
aaggcaucguugacuugua

SEQ ID NO: 147617 - RNA, 19 nt, Artificial Sequence
  Description of Artificial Sequence: Synthetic oligonucleotide
guucauggccaggcuauaa

SEQ ID NO: 147618 - RNA, 19 nt, Artificial Sequence
  Description of Artificial Sequence: Synthetic oligonucleotide
ggcgaauuguuccgucaga

SEQ ID NO: 147619 - RNA, 19 nt, Artificial Sequence
  Description of Artificial Sequence: Synthetic oligonucleotide
cucaguggaccccgauaca

SEQ ID NO: 147620 - RNA, 19 nt, Artificial Sequence
  Description of Artificial Sequence: Synthetic oligonucleotide
cgugaacugguaaaaccca

SEQ ID NO: 147621 - RNA, 19 nt, Artificial Sequence
  Description of Artificial Sequence: Synthetic oligonucleotide
gcgaauuguuccgucagaa

SEQ ID NO: 147622 - RNA, 19 nt, Artificial Sequence
  Description of Artificial Sequence: Synthetic oligonucleotide
guuguaucacagagagaua

SEQ ID NO: 147623 - RNA, 19 nt, Artificial Sequence
  Description of Artificial Sequence: Synthetic oligonucleotide
ccuugcuuuuagcucauaa

SEQ ID NO: 147624 - RNA, 19 nt, Artificial Sequence
  Description of Artificial Sequence: Synthetic oligonucleotide
cacaccucgaaggacugcu

SEQ ID NO: 147625 - RNA, 19 nt, Artificial Sequence
  Description of Artificial Sequence: Synthetic oligonucleotide
ccaaaucggccgguggagc

SEQ ID NO: 147626 - RNA, 19 nt, Artificial Sequence
  Description of Artificial Sequence: Synthetic oligonucleotide
caugcgugaaggcaucguu

SEQ ID NO: 147627 - RNA, 19 nt, Artificial Sequence
  Description of Artificial Sequence: Synthetic oligonucleotide
caugaguuuugcacagguu

SEQ ID NO: 147628 - RNA, 19 nt, Artificial Sequence
  Description of Artificial Sequence: Synthetic oligonucleotide
cacguuguccguguguccu

SEQ ID NO: 147629 - RNA, 19 nt, Artificial Sequence
  Description of Artificial Sequence: Synthetic oligonucleotide
acguuguccguguguccuu

SEQ ID NO: 147630 - RNA, 19 nt, Artificial Sequence
  Description of Artificial Sequence: Synthetic oligonucleotide
gguuugaaacgcggugaca

SEQ ID NO: 147631 - RNA, 19 nt, Artificial Sequence
  Description of Artificial Sequence: Synthetic oligonucleotide
cgguacguugcuauacauc

SEQ ID NO: 147632 - RNA, 19 nt, Artificial Sequence
  Description of Artificial Sequence: Synthetic oligonucleotide
guggacucgguacguugcu

SEQ ID NO: 147633 - RNA, 19 nt, Artificial Sequence
  Description of Artificial Sequence: Synthetic oligonucleotide
ggacucgguacguugcuau

SEQ ID NO: 147634 - RNA, 19 nt, Artificial Sequence
  Description of Artificial Sequence: Synthetic oligonucleotide
cuaagagacagagggccuu

SEQ ID NO: 147635 - RNA, 19 nt, Artificial Sequence
  Description of Artificial Sequence: Synthetic oligonucleotide
aucguggacucgguacguu

SEQ ID NO: 147636 - RNA, 19 nt, Artificial Sequence
  Description of Artificial Sequence: Synthetic oligonucleotide
cagccugaacagugugcga

SEQ ID NO: 147637 - RNA, 19 nt, Artificial Sequence
  Description of Artificial Sequence: Synthetic oligonucleotide
gugugccgucucuguucag

SEQ ID NO: 147638 - RNA, 19 nt, Artificial Sequence
  Description of Artificial Sequence: Synthetic oligonucleotide
caguguuauuugaggcagu

SEQ ID NO: 147639 - RNA, 19 nt, Artificial Sequence
  Description of Artificial Sequence: Synthetic oligonucleotide
cggaaauuaugaauucccu

SEQ ID NO: 147640 - RNA, 19 nt, Artificial Sequence
  Description of Artificial Sequence: Synthetic oligonucleotide
cacccgaaugucaggguuu

SEQ ID NO: 147641 - RNA, 19 nt, Artificial Sequence
  Description of Artificial Sequence: Synthetic oligonucleotide
gccaggcuauaaaauggaa

SEQ ID NO: 147642 - RNA, 19 nt, Artificial Sequence
  Description of Artificial Sequence: Synthetic oligonucleotide
gcuaagagacagagggccu

SEQ ID NO: 147643 - RNA, 19 nt, Artificial Sequence
  Description of Artificial Sequence: Synthetic oligonucleotide
cccggaaucccggcagagc

SEQ ID NO: 147644 - RNA, 19 nt, Artificial Sequence
  Description of Artificial Sequence: Synthetic oligonucleotide
gagaagccgcagaacucau

SEQ ID NO: 147645 - RNA, 19 nt, Artificial Sequence
  Description of Artificial Sequence: Synthetic oligonucleotide
cuguucguagguccauauu

SEQ ID NO: 147646 - RNA, 19 nt, Artificial Sequence
  Description of Artificial Sequence: Synthetic oligonucleotide
gcccacgcauaaaacugga

SEQ ID NO: 147647 - RNA, 19 nt, Artificial Sequence
  Description of Artificial Sequence: Synthetic oligonucleotide
acgugcacuucuggcggua

SEQ ID NO: 147648 - RNA, 19 nt, Artificial Sequence
  Description of Artificial Sequence: Synthetic oligonucleotide
ggucuuaaguggacaguau

SEQ ID NO: 147649 - RNA, 19 nt, Artificial Sequence
  Description of Artificial Sequence: Synthetic oligonucleotide
gcacccgaaugucaggguu

SEQ ID NO: 147650 - RNA, 19 nt, Artificial Sequence
  Description of Artificial Sequence: Synthetic oligonucleotide
cacaggcgaauuguuccgu

SEQ ID NO: 147651 - RNA, 19 nt, Artificial Sequence
  Description of Artificial Sequence: Synthetic oligonucleotide
gcccaaacgccuucaucgu

SEQ ID NO: 147652 - RNA, 19 nt, Artificial Sequence
  Description of Artificial Sequence: Synthetic oligonucleotide
caucguggacucgguacgu

SEQ ID NO: 147653 - RNA, 19 nt, Artificial Sequence
  Description of Artificial Sequence: Synthetic oligonucleotide
cccacgcauaaaacuggaa

SEQ ID NO: 147654 - RNA, 19 nt, Artificial Sequence
  Description of Artificial Sequence: Synthetic oligonucleotide
ccccaccccuugcuuuuag

SEQ ID NO: 147655 - RNA, 19 nt, Artificial Sequence
  Description of Artificial Sequence: Synthetic oligonucleotide
caguaucgugcugcucacu

SEQ ID NO: 147656 - RNA, 19 nt, Artificial Sequence
  Description of Artificial Sequence: Synthetic oligonucleotide
cugucccuuccuccagaau

SEQ ID NO: 147657 - RNA, 19 nt, Artificial Sequence
  Description of Artificial Sequence: Synthetic oligonucleotide
cguguguucucggccagua

SEQ ID NO: 147658 - RNA, 19 nt, Artificial Sequence
  Description of Artificial Sequence: Synthetic oligonucleotide
ccguguguccuuucagcuu

SEQ ID NO: 147659 - RNA, 19 nt, Artificial Sequence
  Description of Artificial Sequence: Synthetic oligonucleotide
aucggccgguggagcuccu

SEQ ID NO: 147660 - RNA, 19 nt, Artificial Sequence
  Description of Artificial Sequence: Synthetic oligonucleotide
ccccgcugauguucucuaa

SEQ ID NO: 147661 - RNA, 19 nt, Artificial Sequence
  Description of Artificial Sequence: Synthetic oligonucleotide
gccccaccccuugcuuuua

SEQ ID NO: 147662 - RNA, 19 nt, Artificial Sequence
  Description of Artificial Sequence: Synthetic oligonucleotide
ggcgggcgccccaccccuu

SEQ ID NO: 147663 - RNA, 19 nt, Artificial Sequence
  Description of Artificial Sequence: Synthetic oligonucleotide
auuaguuacauguaggcac

SEQ ID NO: 147664 - RNA, 19 nt, Artificial Sequence
  Description of Artificial Sequence: Synthetic oligonucleotide
aaauccauagacuccgugc

SEQ ID NO: 147665 - RNA, 19 nt, Artificial Sequence
  Description of Artificial Sequence: Synthetic oligonucleotide
ucaaucauagaccagcggg

SEQ ID NO: 147666 - RNA, 19 nt, Artificial Sequence
  Description of Artificial Sequence: Synthetic oligonucleotide
ucgaauuuugcucaaaacc

SEQ ID NO: 147667 - RNA, 19 nt, Artificial Sequence
  Description of Artificial Sequence: Synthetic oligonucleotide
ugaguaagaauauugacga

SEQ ID NO: 147668 - RNA, 19 nt, Artificial Sequence
  Description of Artificial Sequence: Synthetic oligonucleotide
aauacacguuacuucaggc

SEQ ID NO: 147669 - RNA, 19 nt, Artificial Sequence
  Description of Artificial Sequence: Synthetic oligonucleotide
aaguaaaacaaauccuagg

SEQ ID NO: 147670 - RNA, 19 nt, Artificial Sequence
  Description of Artificial Sequence: Synthetic oligonucleotide
aaucucaugagcaaggcgg

SEQ ID NO: 147671 - RNA, 19 nt, Artificial Sequence
  Description of Artificial Sequence: Synthetic oligonucleotide
aggguauucaguuucaggg

SEQ ID NO: 147672 - RNA, 19 nt, Artificial Sequence
  Description of Artificial Sequence: Synthetic oligonucleotide
aguaagucgaauuuugcuc

SEQ ID NO: 147673 - RNA, 19 nt, Artificial Sequence
  Description of Artificial Sequence: Synthetic oligonucleotide
acugguaguacacagugac

SEQ ID NO: 147674 - RNA, 19 nt, Artificial Sequence
  Description of Artificial Sequence: Synthetic oligonucleotide
aaugcaagagcccagcacu

SEQ ID NO: 147675 - RNA, 19 nt, Artificial Sequence
  Description of Artificial Sequence: Synthetic oligonucleotide
aaaggauccguuaaauggc

SEQ ID NO: 147676 - RNA, 19 nt, Artificial Sequence
  Description of Artificial Sequence: Synthetic oligonucleotide
uucaauguaaaguccgugg

SEQ ID NO: 147677 - RNA, 19 nt, Artificial Sequence
  Description of Artificial Sequence: Synthetic oligonucleotide
ggaaauauaaugaaagugg

SEQ ID NO: 147678 - RNA, 19 nt, Artificial Sequence
  Description of Artificial Sequence: Synthetic oligonucleotide
acucccaacaguuacagag

SEQ ID NO: 147679 - RNA, 19 nt, Artificial Sequence
  Description of Artificial Sequence: Synthetic oligonucleotide
aagguuaugaguaagaaua

SEQ ID NO: 147680 - RNA, 19 nt, Artificial Sequence
  Description of Artificial Sequence: Synthetic oligonucleotide
uuaugaguaagaauauuga

SEQ ID NO: 147681 - RNA, 19 nt, Artificial Sequence
  Description of Artificial Sequence: Synthetic oligonucleotide
acguauauaggcuuugggg

SEQ ID NO: 147682 - RNA, 19 nt, Artificial Sequence
  Description of Artificial Sequence: Synthetic oligonucleotide
uuugguaucugagagaaga

SEQ ID NO: 147683 - RNA, 19 nt, Artificial Sequence
  Description of Artificial Sequence: Synthetic oligonucleotide
ucuucuauacuguacugag

SEQ ID NO: 147684 - RNA, 19 nt, Artificial Sequence
  Description of Artificial Sequence: Synthetic oligonucleotide
augaguaagaauauugacg

SEQ ID NO: 147685 - RNA, 19 nt, Artificial Sequence
  Description of Artificial Sequence: Synthetic oligonucleotide
ucgaaggaaaucaaagcag

SEQ ID NO: 147686 - RNA, 19 nt, Artificial Sequence
  Description of Artificial Sequence: Synthetic oligonucleotide
aacguauauaggcuuuggg

SEQ ID NO: 147687 - RNA, 19 nt, Artificial Sequence
  Description of Artificial Sequence: Synthetic oligonucleotide
cagauggaaacguauauag

SEQ ID NO: 147688 - RNA, 19 nt, Artificial Sequence
  Description of Artificial Sequence: Synthetic oligonucleotide
aacaacuaaggucauguaa

SEQ ID NO: 147689 - RNA, 19 nt, Artificial Sequence
  Description of Artificial Sequence: Synthetic oligonucleotide
uuuacuuucagguccucug

SEQ ID NO: 147690 - RNA, 19 nt, Artificial Sequence
  Description of Artificial Sequence: Synthetic oligonucleotide
ucuuauaccauaggcaacc

SEQ ID NO: 147691 - RNA, 19 nt, Artificial Sequence
  Description of Artificial Sequence: Synthetic oligonucleotide
guagacaugguacccaagg

SEQ ID NO: 147692 - RNA, 19 nt, Artificial Sequence
  Description of Artificial Sequence: Synthetic oligonucleotide
uucacucgaauaauuaaac

SEQ ID NO: 147693 - RNA, 19 nt, Artificial Sequence
  Description of Artificial Sequence: Synthetic oligonucleotide
auaagugguggccacuugg

SEQ ID NO: 147694 - RNA, 19 nt, Artificial Sequence
  Description of Artificial Sequence: Synthetic oligonucleotide
ugacugguaguacacagug

SEQ ID NO: 147695 - RNA, 19 nt, Artificial Sequence
  Description of Artificial Sequence: Synthetic oligonucleotide
ugaacaacuaaggucaugu

SEQ ID NO: 147696 - RNA, 19 nt, Artificial Sequence
  Description of Artificial Sequence: Synthetic oligonucleotide
uugucaaucauagaccagc

SEQ ID NO: 147697 - RNA, 19 nt, Artificial Sequence
  Description of Artificial Sequence: Synthetic oligonucleotide
uggugcuauaacaaauuag

SEQ ID NO: 147698 - RNA, 19 nt, Artificial Sequence
  Description of Artificial Sequence: Synthetic oligonucleotide
ucgaauaauuaaaccaugu

SEQ ID NO: 147699 - RNA, 19 nt, Artificial Sequence
  Description of Artificial Sequence: Synthetic oligonucleotide
uccaacggaagcccuaagg

SEQ ID NO: 147700 - RNA, 19 nt, Artificial Sequence
  Description of Artificial Sequence: Synthetic oligonucleotide
aaccugucucgccauuucc

SEQ ID NO: 147701 - RNA, 19 nt, Artificial Sequence
  Description of Artificial Sequence: Synthetic oligonucleotide
ucuggcuuguauucgaaca

SEQ ID NO: 147702 - RNA, 19 nt, Artificial Sequence
  Description of Artificial Sequence: Synthetic oligonucleotide
acuugucaaucauagacca

SEQ ID NO: 147703 - RNA, 19 nt, Artificial Sequence
  Description of Artificial Sequence: Synthetic oligonucleotide
aaaauuagucuuccacagu

SEQ ID NO: 147704 - RNA, 19 nt, Artificial Sequence
  Description of Artificial Sequence: Synthetic oligonucleotide
cuuucuuauaccauaggca

SEQ ID NO: 147705 - RNA, 19 nt, Artificial Sequence
  Description of Artificial Sequence: Synthetic oligonucleotide
uauaaugaaagugguuuca

SEQ ID NO: 147706 - RNA, 19 nt, Artificial Sequence
  Description of Artificial Sequence: Synthetic oligonucleotide
aaggauccguuaaauggcc

SEQ ID NO: 147707 - RNA, 19 nt, Artificial Sequence
  Description of Artificial Sequence: Synthetic oligonucleotide
uguuugguaucugagagaa

SEQ ID NO: 147708 - RNA, 19 nt, Artificial Sequence
  Description of Artificial Sequence: Synthetic oligonucleotide
auugacgaagaugucaaag

SEQ ID NO: 147709 - RNA, 19 nt, Artificial Sequence
  Description of Artificial Sequence: Synthetic oligonucleotide
ugaacgcugagcauuuuac

SEQ ID NO: 147710 - RNA, 19 nt, Artificial Sequence
  Description of Artificial Sequence: Synthetic oligonucleotide
aaccagcuuauuaagagcu

SEQ ID NO: 147711 - RNA, 19 nt, Artificial Sequence
  Description of Artificial Sequence: Synthetic oligonucleotide
uauuuugugguaggggaag

SEQ ID NO: 147712 - RNA, 19 nt, Artificial Sequence
  Description of Artificial Sequence: Synthetic oligonucleotide
aacgcugagcauuuuacuu

SEQ ID NO: 147713 - RNA, 19 nt, Artificial Sequence
  Description of Artificial Sequence: Synthetic oligonucleotide
guaagucgaauuuugcuca

SEQ ID NO: 147714 - RNA, 19 nt, Artificial Sequence
  Description of Artificial Sequence: Synthetic oligonucleotide
uuguggaguauucacaauu

SEQ ID NO: 147715 - RNA, 19 nt, Artificial Sequence
  Description of Artificial Sequence: Synthetic oligonucleotide
aaacguauauaggcuuugg

SEQ ID NO: 147716 - RNA, 19 nt, Artificial Sequence
  Description of Artificial Sequence: Synthetic oligonucleotide
gauaucaguaauggggaug

SEQ ID NO: 147717 - RNA, 19 nt, Artificial Sequence
  Description of Artificial Sequence: Synthetic oligonucleotide
ucuauacuguacugagucc

SEQ ID NO: 147718 - RNA, 19 nt, Artificial Sequence
  Description of Artificial Sequence: Synthetic oligonucleotide
auagacuccgugcugguga

SEQ ID NO: 147719 - RNA, 19 nt, Artificial Sequence
  Description of Artificial Sequence: Synthetic oligonucleotide
aaacaagggcaguuuggug

SEQ ID NO: 147720 - RNA, 19 nt, Artificial Sequence
  Description of Artificial Sequence: Synthetic oligonucleotide
agaguaagucgaauuuugc

SEQ ID NO: 147721 - RNA, 19 nt, Artificial Sequence
  Description of Artificial Sequence: Synthetic oligonucleotide
aggucugacuuugagaaag

SEQ ID NO: 147722 - RNA, 19 nt, Artificial Sequence
  Description of Artificial Sequence: Synthetic oligonucleotide
caaaaggauccguuaaaug

SEQ ID NO: 147723 - RNA, 19 nt, Artificial Sequence
  Description of Artificial Sequence: Synthetic oligonucleotide
cagaguaagucgaauuuug

SEQ ID NO: 147724 - RNA, 19 nt, Artificial Sequence
  Description of Artificial Sequence: Synthetic oligonucleotide
uuagacuccugguaccuga

SEQ ID NO: 147725 - RNA, 19 nt, Artificial Sequence
  Description of Artificial Sequence: Synthetic oligonucleotide
uccuagguuaccaucgaaa

SEQ ID NO: 147726 - RNA, 19 nt, Artificial Sequence
  Description of Artificial Sequence: Synthetic oligonucleotide
uuucacccuguaauguugc

SEQ ID NO: 147727 - RNA, 19 nt, Artificial Sequence
  Description of Artificial Sequence: Synthetic oligonucleotide
cucgaauaauuaaaccaug

SEQ ID NO: 147728 - RNA, 19 nt, Artificial Sequence
  Description of Artificial Sequence: Synthetic oligonucleotide
ucuagcgugugugucaaug

SEQ ID NO: 147729 - RNA, 19 nt, Artificial Sequence
  Description of Artificial Sequence: Synthetic oligonucleotide
gaguauugaaugcuucuuc

SEQ ID NO: 147730 - RNA, 19 nt, Artificial Sequence
  Description of Artificial Sequence: Synthetic oligonucleotide
cuugguucgaaggaaauca

SEQ ID NO: 147731 - RNA, 19 nt, Artificial Sequence
  Description of Artificial Sequence: Synthetic oligonucleotide
cuuugcauaagugguggcc

SEQ ID NO: 147732 - RNA, 19 nt, Artificial Sequence
  Description of Artificial Sequence: Synthetic oligonucleotide
gagagaaacucuucuaucu

SEQ ID NO: 147733 - RNA, 19 nt, Artificial Sequence
  Description of Artificial Sequence: Synthetic oligonucleotide
uuucagaguuguauuuggu

SEQ ID NO: 147734 - RNA, 19 nt, Artificial Sequence
  Description of Artificial Sequence: Synthetic oligonucleotide
ucuagcgaggcuuccaaau

SEQ ID NO: 147735 - RNA, 19 nt, Artificial Sequence
  Description of Artificial Sequence: Synthetic oligonucleotide
uucuuauaccauaggcaac

SEQ ID NO: 147736 - RNA, 19 nt, Artificial Sequence
  Description of Artificial Sequence: Synthetic oligonucleotide
aauccuagguuaccaucga

SEQ ID NO: 147737 - RNA, 19 nt, Artificial Sequence
  Description of Artificial Sequence: Synthetic oligonucleotide
ucaaaaggauccguuaaau

SEQ ID NO: 147738 - RNA, 19 nt, Artificial Sequence
  Description of Artificial Sequence: Synthetic oligonucleotide
caaucucaugagcaaggcg

SEQ ID NO: 147739 - RNA, 19 nt, Artificial Sequence
  Description of Artificial Sequence: Synthetic oligonucleotide
agguguagaacugaacuca

SEQ ID NO: 147740 - RNA, 19 nt, Artificial Sequence
  Description of Artificial Sequence: Synthetic oligonucleotide
acucgaauaauuaaaccau

SEQ ID NO: 147741 - RNA, 19 nt, Artificial Sequence
  Description of Artificial Sequence: Synthetic oligonucleotide
uuugguuuagguugcccau

SEQ ID NO: 147742 - RNA, 19 nt, Artificial Sequence
  Description of Artificial Sequence: Synthetic oligonucleotide
aguuugguuuagguugccc

SEQ ID NO: 147743 - RNA, 19 nt, Artificial Sequence
  Description of Artificial Sequence: Synthetic oligonucleotide
ugcaguaacccuggguuag

SEQ ID NO: 147744 - RNA, 19 nt, Artificial Sequence
  Description of Artificial Sequence: Synthetic oligonucleotide
gugagaucagauggaaacg

SEQ ID NO: 147745 - RNA, 19 nt, Artificial Sequence
  Description of Artificial Sequence: Synthetic oligonucleotide
uccguuaaauggccaaagu

SEQ ID NO: 147746 - RNA, 19 nt, Artificial Sequence
  Description of Artificial Sequence: Synthetic oligonucleotide
gucgaauuuugcucaaaac

SEQ ID NO: 147747 - RNA, 19 nt, Artificial Sequence
  Description of Artificial Sequence: Synthetic oligonucleotide
acaggucggguagacaugg

SEQ ID NO: 147748 - RNA, 19 nt, Artificial Sequence
  Description of Artificial Sequence: Synthetic oligonucleotide
uggaaacguauauaggcuu

SEQ ID NO: 147749 - RNA, 19 nt, Artificial Sequence
  Description of Artificial Sequence: Synthetic oligonucleotide
agucgaauuuugcucaaaa

SEQ ID NO: 147750 - RNA, 19 nt, Artificial Sequence
  Description of Artificial Sequence: Synthetic oligonucleotide
gaaacguauauaggcuuug

SEQ ID NO: 147751 - RNA, 19 nt, Artificial Sequence
  Description of Artificial Sequence: Synthetic oligonucleotide
cucaguuaucauugugaag

SEQ ID NO: 147752 - RNA, 19 nt, Artificial Sequence
  Description of Artificial Sequence: Synthetic oligonucleotide
auauugacgaagaugucaa

SEQ ID NO: 147753 - RNA, 19 nt, Artificial Sequence
  Description of Artificial Sequence: Synthetic oligonucleotide
gaguaagucgaauuuugcu

SEQ ID NO: 147754 - RNA, 19 nt, Artificial Sequence
  Description of Artificial Sequence: Synthetic oligonucleotide
caaugcaagagcccagcac

SEQ ID NO: 147755 - RNA, 19 nt, Artificial Sequence
  Description of Artificial Sequence: Synthetic oligonucleotide
aagugguggccacuuggca

SEQ ID NO: 147756 - RNA, 19 nt, Artificial Sequence
  Description of Artificial Sequence: Synthetic oligonucleotide
gucggguagacaugguacc

SEQ ID NO: 147757 - RNA, 19 nt, Artificial Sequence
  Description of Artificial Sequence: Synthetic oligonucleotide
caaucauagaccagcggga

SEQ ID NO: 147758 - RNA, 19 nt, Artificial Sequence
  Description of Artificial Sequence: Synthetic oligonucleotide
cugacuuugcauaaguggu

SEQ ID NO: 147759 - RNA, 19 nt, Artificial Sequence
  Description of Artificial Sequence: Synthetic oligonucleotide
cauguaggcacacgagaac

SEQ ID NO: 147760 - RNA, 19 nt, Artificial Sequence
  Description of Artificial Sequence: Synthetic oligonucleotide
guugccugacucccaacag

SEQ ID NO: 147761 - RNA, 19 nt, Artificial Sequence
  Description of Artificial Sequence: Synthetic oligonucleotide
guccucacgaaaaggggcg

SEQ ID NO: 147762 - RNA, 19 nt, Artificial Sequence
  Description of Artificial Sequence: Synthetic oligonucleotide
ugguucaugcuugaguguc

SEQ ID NO: 147763 - RNA, 19 nt, Artificial Sequence
  Description of Artificial Sequence: Synthetic oligonucleotide
uggcucagcaagguuauga

SEQ ID NO: 147764 - RNA, 19 nt, Artificial Sequence
  Description of Artificial Sequence: Synthetic oligonucleotide
uaccugacugguaguacac

SEQ ID NO: 147765 - RNA, 19 nt, Artificial Sequence
  Description of Artificial Sequence: Synthetic oligonucleotide
guuagucuugcagaggaga

SEQ ID NO: 147766 - RNA, 19 nt, Artificial Sequence
  Description of Artificial Sequence: Synthetic oligonucleotide
ucgccauuuccaccaaaca

SEQ ID NO: 147767 - RNA, 19 nt, Artificial Sequence
  Description of Artificial Sequence: Synthetic oligonucleotide
aaagcccgguacuugucaa

SEQ ID NO: 147768 - RNA, 19 nt, Artificial Sequence
  Description of Artificial Sequence: Synthetic oligonucleotide
cuucaauguaaaguccgug

SEQ ID NO: 147769 - RNA, 19 nt, Artificial Sequence
  Description of Artificial Sequence: Synthetic oligonucleotide
ugaguauugaaugcuucuu

SEQ ID NO: 147770 - RNA, 19 nt, Artificial Sequence
  Description of Artificial Sequence: Synthetic oligonucleotide
uugguaucugagagaagau

SEQ ID NO: 147771 - RNA, 19 nt, Artificial Sequence
  Description of Artificial Sequence: Synthetic oligonucleotide
uacaggucggguagacaug

SEQ ID NO: 147772 - RNA, 19 nt, Artificial Sequence
  Description of Artificial Sequence: Synthetic oligonucleotide
guaccugacugguaguaca

SEQ ID NO: 147773 - RNA, 19 nt, Artificial Sequence
  Description of Artificial Sequence: Synthetic oligonucleotide
auccguuaaauggccaaag

SEQ ID NO: 147774 - RNA, 19 nt, Artificial Sequence
  Description of Artificial Sequence: Synthetic oligonucleotide
ugaugugaaggcccugaua

SEQ ID NO: 147775 - RNA, 19 nt, Artificial Sequence
  Description of Artificial Sequence: Synthetic oligonucleotide
agaaggucuugcaagcuga

SEQ ID NO: 147776 - RNA, 19 nt, Artificial Sequence
  Description of Artificial Sequence: Synthetic oligonucleotide
ucuccagcuaccaguuuau

SEQ ID NO: 147777 - RNA, 19 nt, Artificial Sequence
  Description of Artificial Sequence: Synthetic oligonucleotide
caguuuauacuccagcugu

SEQ ID NO: 147778 - RNA, 19 nt, Artificial Sequence
  Description of Artificial Sequence: Synthetic oligonucleotide
gcuauguacuuguuuucag

SEQ ID NO: 147779 - RNA, 19 nt, Artificial Sequence
  Description of Artificial Sequence: Synthetic oligonucleotide
aaagugguuucacccugua

SEQ ID NO: 147780 - RNA, 19 nt, Artificial Sequence
  Description of Artificial Sequence: Synthetic oligonucleotide
acaauuuuagcaggguauu

SEQ ID NO: 147781 - RNA, 19 nt, Artificial Sequence
  Description of Artificial Sequence: Synthetic oligonucleotide
uucccauauccaacaacau

SEQ ID NO: 147782 - RNA, 19 nt, Artificial Sequence
  Description of Artificial Sequence: Synthetic oligonucleotide
uugguucaugcuugagugu

SEQ ID NO: 147783 - RNA, 19 nt, Artificial Sequence
  Description of Artificial Sequence: Synthetic oligonucleotide
caguuuggugcuauaacaa

SEQ ID NO: 147784 - RNA, 19 nt, Artificial Sequence
  Description of Artificial Sequence: Synthetic oligonucleotide
uaagucgaauuuugcucaa

SEQ ID NO: 147785 - RNA, 19 nt, Artificial Sequence
  Description of Artificial Sequence: Synthetic oligonucleotide
agcgaggcuuccaaauaac

SEQ ID NO: 147786 - RNA, 19 nt, Artificial Sequence
  Description of Artificial Sequence: Synthetic oligonucleotide
ggcucagcaagguuaugag

SEQ ID NO: 147787 - RNA, 19 nt, Artificial Sequence
  Description of Artificial Sequence: Synthetic oligonucleotide
cguauauaggcuuugggga

SEQ ID NO: 147788 - RNA, 19 nt, Artificial Sequence
  Description of Artificial Sequence: Synthetic oligonucleotide
uauugacgaagaugucaaa

SEQ ID NO: 147789 - RNA, 19 nt, Artificial Sequence
  Description of Artificial Sequence: Synthetic oligonucleotide
acauucccuuguaccaggc

SEQ ID NO: 147790 - RNA, 19 nt, Artificial Sequence
  Description of Artificial Sequence: Synthetic oligonucleotide
accagcgggaauauuccag

SEQ ID NO: 147791 - RNA, 19 nt, Artificial Sequence
  Description of Artificial Sequence: Synthetic oligonucleotide
uugaugugaaggcccugau

SEQ ID NO: 147792 - RNA, 19 nt, Artificial Sequence
  Description of Artificial Sequence: Synthetic oligonucleotide
agcgggaauauuccaggau

SEQ ID NO: 147793 - RNA, 19 nt, Artificial Sequence
  Description of Artificial Sequence: Synthetic oligonucleotide
ugcccauuguuugguaucu

SEQ ID NO: 147794 - RNA, 19 nt, Artificial Sequence
  Description of Artificial Sequence: Synthetic oligonucleotide
gcagguguagaacugaacu

SEQ ID NO: 147795 - RNA, 19 nt, Artificial Sequence
  Description of Artificial Sequence: Synthetic oligonucleotide
cauucccuuguaccaggcc

SEQ ID NO: 147796 - RNA, 19 nt, Artificial Sequence
  Description of Artificial Sequence: Synthetic oligonucleotide
aggcuaaguguugauguga

SEQ ID NO: 147797 - RNA, 19 nt, Artificial Sequence
  Description of Artificial Sequence: Synthetic oligonucleotide
caauuuuagcaggguauuc

SEQ ID NO: 147798 - RNA, 19 nt, Artificial Sequence
  Description of Artificial Sequence: Synthetic oligonucleotide
aguucagcccaagaguuuu

SEQ ID NO: 147799 - RNA, 19 nt, Artificial Sequence
  Description of Artificial Sequence: Synthetic oligonucleotide
ccagcgggaauauuccagg

SEQ ID NO: 147800 - RNA, 19 nt, Artificial Sequence
  Description of Artificial Sequence: Synthetic oligonucleotide
auuugacuauuuuguggua

SEQ ID NO: 147801 - RNA, 19 nt, Artificial Sequence
  Description of Artificial Sequence: Synthetic oligonucleotide
gacaugagugucuggggcu

SEQ ID NO: 147802 - RNA, 19 nt, Artificial Sequence
  Description of Artificial Sequence: Synthetic oligonucleotide
ucuccgucacccacuuuuc

SEQ ID NO: 147803 - RNA, 19 nt, Artificial Sequence
  Description of Artificial Sequence: Synthetic oligonucleotide
cuacaggucggguagacau

SEQ ID NO: 147804 - RNA, 19 nt, Artificial Sequence
  Description of Artificial Sequence: Synthetic oligonucleotide
cugaguauugaaugcuucu

SEQ ID NO: 147805 - RNA, 19 nt, Artificial Sequence
  Description of Artificial Sequence: Synthetic oligonucleotide
ggucggguagacaugguac

SEQ ID NO: 147806 - RNA, 19 nt, Artificial Sequence
  Description of Artificial Sequence: Synthetic oligonucleotide
cugaggaaccagcuuauua

SEQ ID NO: 147807 - RNA, 19 nt, Artificial Sequence
  Description of Artificial Sequence: Synthetic oligonucleotide
gaacaacuaaggucaugua

SEQ ID NO: 147808 - RNA, 19 nt, Artificial Sequence
  Description of Artificial Sequence: Synthetic oligonucleotide
cagcaagguuaugaguaag

SEQ ID NO: 147809 - RNA, 19 nt, Artificial Sequence
  Description of Artificial Sequence: Synthetic oligonucleotide
caaagcccgguacuuguca

SEQ ID NO: 147810 - RNA, 19 nt, Artificial Sequence
  Description of Artificial Sequence: Synthetic oligonucleotide
ggcagaguaguaaugcauc

SEQ ID NO: 147811 - RNA, 19 nt, Artificial Sequence
  Description of Artificial Sequence: Synthetic oligonucleotide
gcuuguauucgaacagaag

SEQ ID NO: 147812 - RNA, 19 nt, Artificial Sequence
  Description of Artificial Sequence: Synthetic oligonucleotide
gauccguuaaauggccaaa

SEQ ID NO: 147813 - RNA, 19 nt, Artificial Sequence
  Description of Artificial Sequence: Synthetic oligonucleotide
aggucggguagacauggua

SEQ ID NO: 147814 - RNA, 19 nt, Artificial Sequence
  Description of Artificial Sequence: Synthetic oligonucleotide
ccugaguauugaaugcuuc

SEQ ID NO: 147815 - RNA, 19 nt, Artificial Sequence
  Description of Artificial Sequence: Synthetic oligonucleotide
cugaacaacuaaggucaug

SEQ ID NO: 147816 - RNA, 19 nt, Artificial Sequence
  Description of Artificial Sequence: Synthetic oligonucleotide
gucucagguuugaugagga

SEQ ID NO: 147817 - RNA, 19 nt, Artificial Sequence
  Description of Artificial Sequence: Synthetic oligonucleotide
aagucgaauuuugcucaaa

SEQ ID NO: 147818 - RNA, 19 nt, Artificial Sequence
  Description of Artificial Sequence: Synthetic oligonucleotide
uccucacgaaaaggggcgc

SEQ ID NO: 147819 - RNA, 19 nt, Artificial Sequence
  Description of Artificial Sequence: Synthetic oligonucleotide
auccuagguuaccaucgaa

SEQ ID NO: 147820 - RNA, 19 nt, Artificial Sequence
  Description of Artificial Sequence: Synthetic oligonucleotide
cacacacgucuuuaaaaua

SEQ ID NO: 147821 - RNA, 19 nt, Artificial Sequence
  Description of Artificial Sequence: Synthetic oligonucleotide
auccaacggaagcccuaag

SEQ ID NO: 147822 - RNA, 19 nt, Artificial Sequence
  Description of Artificial Sequence: Synthetic oligonucleotide
gaccugaguauugaaugcu

SEQ ID NO: 147823 - RNA, 19 nt, Artificial Sequence
  Description of Artificial Sequence: Synthetic oligonucleotide
agucuagcgugugugucaa

SEQ ID NO: 147824 - RNA, 19 nt, Artificial Sequence
  Description of Artificial Sequence: Synthetic oligonucleotide
uccuacaggucggguagac

SEQ ID NO: 147825 - RNA, 19 nt, Artificial Sequence
  Description of Artificial Sequence: Synthetic oligonucleotide
ggauccguuaaauggccaa

SEQ ID NO: 147826 - RNA, 19 nt, Artificial Sequence
  Description of Artificial Sequence: Synthetic oligonucleotide
gagaucagauggaaacgua

SEQ ID NO: 147827 - RNA, 19 nt, Artificial Sequence
  Description of Artificial Sequence: Synthetic oligonucleotide
cuagcgaggcuuccaaaua

SEQ ID NO: 147828 - RNA, 19 nt, Artificial Sequence
  Description of Artificial Sequence: Synthetic oligonucleotide
cuagaaucccagauguguu

SEQ ID NO: 147829 - RNA, 19 nt, Artificial Sequence
  Description of Artificial Sequence: Synthetic oligonucleotide
ugugccacgucagcuucau

SEQ ID NO: 147830 - RNA, 19 nt, Artificial Sequence
  Description of Artificial Sequence: Synthetic oligonucleotide
cuucuauacuguacugagu

SEQ ID NO: 147831 - RNA, 19 nt, Artificial Sequence
  Description of Artificial Sequence: Synthetic oligonucleotide
cacgaaaaggggcgccauc

SEQ ID NO: 147832 - RNA, 19 nt, Artificial Sequence
  Description of Artificial Sequence: Synthetic oligonucleotide
acaugaacgcugagcauuu

SEQ ID NO: 147833 - RNA, 19 nt, Artificial Sequence
  Description of Artificial Sequence: Synthetic oligonucleotide
ucacgaaaaggggcgccau

SEQ ID NO: 147834 - RNA, 19 nt, Artificial Sequence
  Description of Artificial Sequence: Synthetic oligonucleotide
agcugggauuuaaaauccu

SEQ ID NO: 147835 - RNA, 19 nt, Artificial Sequence
  Description of Artificial Sequence: Synthetic oligonucleotide
guuugcaucagaaggucuu

SEQ ID NO: 147836 - RNA, 19 nt, Artificial Sequence
  Description of Artificial Sequence: Synthetic oligonucleotide
gguuagucuugcagaggag

SEQ ID NO: 147837 - RNA, 19 nt, Artificial Sequence
  Description of Artificial Sequence: Synthetic oligonucleotide
gccaaaguuugguuuaggu

SEQ ID NO: 147838 - RNA, 19 nt, Artificial Sequence
  Description of Artificial Sequence: Synthetic oligonucleotide
accugacugguaguacaca

SEQ ID NO: 147839 - RNA, 19 nt, Artificial Sequence
  Description of Artificial Sequence: Synthetic oligonucleotide
cguuaaauggccaaaguuu

SEQ ID NO: 147840 - RNA, 19 nt, Artificial Sequence
  Description of Artificial Sequence: Synthetic oligonucleotide
uaucaguaauggggauggu

SEQ ID NO: 147841 - RNA, 19 nt, Artificial Sequence
  Description of Artificial Sequence: Synthetic oligonucleotide
ugcaucccuucaccagaau

SEQ ID NO: 147842 - RNA, 19 nt, Artificial Sequence
  Description of Artificial Sequence: Synthetic oligonucleotide
accugaguauugaaugcuu

SEQ ID NO: 147843 - RNA, 19 nt, Artificial Sequence
  Description of Artificial Sequence: Synthetic oligonucleotide
ugcaagagcccagcacuuu

SEQ ID NO: 147844 - RNA, 19 nt, Artificial Sequence
  Description of Artificial Sequence: Synthetic oligonucleotide
cagcgggaauauuccagga

SEQ ID NO: 147845 - RNA, 19 nt, Artificial Sequence
  Description of Artificial Sequence: Synthetic oligonucleotide
aggauccguuaaauggcca

SEQ ID NO: 147846 - RNA, 19 nt, Artificial Sequence
  Description of Artificial Sequence: Synthetic oligonucleotide
aggucuagcgaggcuucca

SEQ ID NO: 147847 - RNA, 19 nt, Artificial Sequence
  Description of Artificial Sequence: Synthetic oligonucleotide
cccauuguuugguaucuga

SEQ ID NO: 147848 - RNA, 19 nt, Artificial Sequence
  Description of Artificial Sequence: Synthetic oligonucleotide
cucacgaaaaggggcgcca

SEQ ID NO: 147849 - RNA, 19 nt, Artificial Sequence
  Description of Artificial Sequence: Synthetic oligonucleotide
cuccggugagaaaguccug

SEQ ID NO: 147850 - RNA, 19 nt, Artificial Sequence
  Description of Artificial Sequence: Synthetic oligonucleotide
ggucuagcgaggcuuccaa

SEQ ID NO: 147851 - RNA, 19 nt, Artificial Sequence
  Description of Artificial Sequence: Synthetic oligonucleotide
gucuagcgaggcuuccaaa

SEQ ID NO: 147852 - RNA, 19 nt, Artificial Sequence
  Description of Artificial Sequence: Synthetic oligonucleotide
gacuccgugcuggugacau

SEQ ID NO: 147853 - RNA, 19 nt, Artificial Sequence
  Description of Artificial Sequence: Synthetic oligonucleotide
cugcaucccuucaccagaa

SEQ ID NO: 147854 - RNA, 19 nt, Artificial Sequence
  Description of Artificial Sequence: Synthetic oligonucleotide
acguuacuucaggccaaug

SEQ ID NO: 147855 - RNA, 19 nt, Artificial Sequence
  Description of Artificial Sequence: Synthetic oligonucleotide
ccggucaauugcaucucug

SEQ ID NO: 147856 - RNA, 19 nt, Artificial Sequence
  Description of Artificial Sequence: Synthetic oligonucleotide
cucagucuagcgugugugu

SEQ ID NO: 147857 - RNA, 19 nt, Artificial Sequence
  Description of Artificial Sequence: Synthetic oligonucleotide
aaccuccggucaauugcau

SEQ ID NO: 147858 - RNA, 19 nt, Artificial Sequence
  Description of Artificial Sequence: Synthetic oligonucleotide
gcgggaauauuccaggauu

SEQ ID NO: 147859 - RNA, 19 nt, Artificial Sequence
  Description of Artificial Sequence: Synthetic oligonucleotide
accagcuuauuaagagcuu

SEQ ID NO: 147860 - RNA, 19 nt, Artificial Sequence
  Description of Artificial Sequence: Synthetic oligonucleotide
cuuauaccauaggcaaccu

SEQ ID NO: 147861 - RNA, 19 nt, Artificial Sequence
  Description of Artificial Sequence: Synthetic oligonucleotide
ccaaaguauccaggguuuc

SEQ ID NO: 147862 - RNA, 19 nt, Artificial Sequence
  Description of Artificial Sequence: Synthetic oligonucleotide
ccucacgaaaaggggcgcc

SEQ ID NO: 147863 - RNA, 19 nt, Artificial Sequence
  Description of Artificial Sequence: Synthetic oligonucleotide
caacaugaacgcugagcau

SEQ ID NO: 147864 - RNA, 19 nt, Artificial Sequence
  Description of Artificial Sequence: Synthetic oligonucleotide
gucugacuuugagaaagau

SEQ ID NO: 147865 - RNA, 19 nt, Artificial Sequence
  Description of Artificial Sequence: Synthetic oligonucleotide
ggaaacguauauaggcuuu

SEQ ID NO: 147866 - RNA, 19 nt, Artificial Sequence
  Description of Artificial Sequence: Synthetic oligonucleotide
gcaucccuucaccagaauu

SEQ ID NO: 147867 - RNA, 19 nt, Artificial Sequence
  Description of Artificial Sequence: Synthetic oligonucleotide
ccguuaaauggccaaaguu

SEQ ID NO: 147868 - RNA, 19 nt, Artificial Sequence
  Description of Artificial Sequence: Synthetic oligonucleotide
caggggcgugaaguucagc

SEQ ID NO: 147869 - RNA, 19 nt, Artificial Sequence
  Description of Artificial Sequence: Synthetic oligonucleotide
ccgucacccacuuuuccaa

SEQ ID NO: 147870 - RNA, 19 nt, Artificial Sequence
  Description of Artificial Sequence: Synthetic oligonucleotide
gggcagaguaguaaugcau

SEQ ID NO: 147871 - RNA, 19 nt, Artificial Sequence
  Description of Artificial Sequence: Synthetic oligonucleotide
cgggaauauuccaggauua

SEQ ID NO: 147872 - RNA, 19 nt, Artificial Sequence
  Description of Artificial Sequence: Synthetic oligonucleotide
ggcacacgagaacuggguu

SEQ ID NO: 147873 - RNA, 19 nt, Artificial Sequence
  Description of Artificial Sequence: Synthetic oligonucleotide
gcccauuguuugguaucug

SEQ ID NO: 147874 - RNA, 19 nt, Artificial Sequence
  Description of Artificial Sequence: Synthetic oligonucleotide
ggaaauccauagacuccgu

SEQ ID NO: 147875 - RNA, 19 nt, Artificial Sequence
  Description of Artificial Sequence: Synthetic oligonucleotide
ccuacaggucggguagaca

SEQ ID NO: 147876 - RNA, 19 nt, Artificial Sequence
  Description of Artificial Sequence: Synthetic oligonucleotide
caggucggguagacauggu

SEQ ID NO: 147877 - RNA, 19 nt, Artificial Sequence
  Description of Artificial Sequence: Synthetic oligonucleotide
cggguagacaugguaccca

SEQ ID NO: 147878 - RNA, 19 nt, Artificial Sequence
  Description of Artificial Sequence: Synthetic oligonucleotide
ggcaaccuuguggaguauu

SEQ ID NO: 147879 - RNA, 19 nt, Artificial Sequence
  Description of Artificial Sequence: Synthetic oligonucleotide
gcaguaacccuggguuagu

SEQ ID NO: 147880 - RNA, 19 nt, Artificial Sequence
  Description of Artificial Sequence: Synthetic oligonucleotide
ccacaucagauggcuugau

SEQ ID NO: 147881 - RNA, 19 nt, Artificial Sequence
  Description of Artificial Sequence: Synthetic oligonucleotide
uacuagucgaacaacaagg

SEQ ID NO: 147882 - RNA, 19 nt, Artificial Sequence
  Description of Artificial Sequence: Synthetic oligonucleotide
acuugaaucaugcagagug

SEQ ID NO: 147883 - RNA, 19 nt, Artificial Sequence
  Description of Artificial Sequence: Synthetic oligonucleotide
uacgucaugacccacacag

SEQ ID NO: 147884 - RNA, 19 nt, Artificial Sequence
  Description of Artificial Sequence: Synthetic oligonucleotide
uuuugaaucaguacaaagu

SEQ ID NO: 147885 - RNA, 19 nt, Artificial Sequence
  Description of Artificial Sequence: Synthetic oligonucleotide
aacaaggcucacuaaagcg

SEQ ID NO: 147886 - RNA, 19 nt, Artificial Sequence
  Description of Artificial Sequence: Synthetic oligonucleotide
aagacugucauaaugugac

SEQ ID NO: 147887 - RNA, 19 nt, Artificial Sequence
  Description of Artificial Sequence: Synthetic oligonucleotide
agugucguugaccaaagcc

SEQ ID NO: 147888 - RNA, 19 nt, Artificial Sequence
  Description of Artificial Sequence: Synthetic oligonucleotide
cauaaugugacuaggacug

SEQ ID NO: 147889 - RNA, 19 nt, Artificial Sequence
  Description of Artificial Sequence: Synthetic oligonucleotide
gaaggugaagcccagaggc

SEQ ID NO: 147890 - RNA, 19 nt, Artificial Sequence
  Description of Artificial Sequence: Synthetic oligonucleotide
cacgauacacacaaaaugc

SEQ ID NO: 147891 - RNA, 19 nt, Artificial Sequence
  Description of Artificial Sequence: Synthetic oligonucleotide
uuauauuccguuacugugc

SEQ ID NO: 147892 - RNA, 19 nt, Artificial Sequence
  Description of Artificial Sequence: Synthetic oligonucleotide
uaaucggucacucucaauc

SEQ ID NO: 147893 - RNA, 19 nt, Artificial Sequence
  Description of Artificial Sequence: Synthetic oligonucleotide
ugaaucaguacaaaguuua

SEQ ID NO: 147894 - RNA, 19 nt, Artificial Sequence
  Description of Artificial Sequence: Synthetic oligonucleotide
aaaccuuuguuucccggcg

SEQ ID NO: 147895 - RNA, 19 nt, Artificial Sequence
  Description of Artificial Sequence: Synthetic oligonucleotide
  modified_base (6)..(6): a, c, u, g, unknown or other
  modified_base (10)..(10): a, c, u, g, unknown or other
uggacnuucngauucuucu

SEQ ID NO: 147896 - RNA, 19 nt, Artificial Sequence
  Description of Artificial Sequence: Synthetic oligonucleotide
uuacuagucgaacaacaag

SEQ ID NO: 147897 - RNA, 19 nt, Artificial Sequence
  Description of Artificial Sequence: Synthetic oligonucleotide
ucuaucaagauggagacaa

SEQ ID NO: 147898 - RNA, 19 nt, Artificial Sequence
  Description of Artificial Sequence: Synthetic oligonucleotide
ucauaaugugacuaggacu

SEQ ID NO: 147899 - RNA, 19 nt, Artificial Sequence
  Description of Artificial Sequence: Synthetic oligonucleotide
aaacgugaaucccacaggu

SEQ ID NO: 147900 - RNA, 19 nt, Artificial Sequence
  Description of Artificial Sequence: Synthetic oligonucleotide
gaccgaaacacagucaucg

SEQ ID NO: 147901 - RNA, 19 nt, Artificial Sequence
  Description of Artificial Sequence: Synthetic oligonucleotide
uauuauauuccguuacugu

SEQ ID NO: 147902 - RNA, 19 nt, Artificial Sequence
  Description of Artificial Sequence: Synthetic oligonucleotide
uagucgaacaacaaggcuc

SEQ ID NO: 147903 - RNA, 19 nt, Artificial Sequence
  Description of Artificial Sequence: Synthetic oligonucleotide
uacaccaccaccaccacca

SEQ ID NO: 147904 - RNA, 19 nt, Artificial Sequence
  Description of Artificial Sequence: Synthetic oligonucleotide
auacugucgucacacgugc

SEQ ID NO: 147905 - RNA, 19 nt, Artificial Sequence
  Description of Artificial Sequence: Synthetic oligonucleotide
aguccaacuucacaagugg

SEQ ID NO: 147906 - RNA, 19 nt, Artificial Sequence
  Description of Artificial Sequence: Synthetic oligonucleotide
aacaugaucgaaagcuggc

SEQ ID NO: 147907 - RNA, 19 nt, Artificial Sequence
  Description of Artificial Sequence: Synthetic oligonucleotide
gaucaggccaacuucacac

SEQ ID NO: 147908 - RNA, 19 nt, Artificial Sequence
  Description of Artificial Sequence: Synthetic oligonucleotide
guuacggacgaucucaccc

SEQ ID NO: 147909 - RNA, 19 nt, Artificial Sequence
  Description of Artificial Sequence: Synthetic oligonucleotide
ugucauucacuacagcuac

SEQ ID NO: 147910 - RNA, 19 nt, Artificial Sequence
  Description of Artificial Sequence: Synthetic oligonucleotide
aaguuuacuagucgaacaa

SEQ ID NO: 147911 - RNA, 19 nt, Artificial Sequence
  Description of Artificial Sequence: Synthetic oligonucleotide
uccacggacacacaauuca

SEQ ID NO: 147912 - RNA, 19 nt, Artificial Sequence
  Description of Artificial Sequence: Synthetic oligonucleotide
uugacgguagcauuguugu

SEQ ID NO: 147913 - RNA, 19 nt, Artificial Sequence
  Description of Artificial Sequence: Synthetic oligonucleotide
uacgaugaguccaacuuca

SEQ ID NO: 147914 - RNA, 19 nt, Artificial Sequence
  Description of Artificial Sequence: Synthetic oligonucleotide
acugucauaaugugacuag

SEQ ID NO: 147915 - RNA, 19 nt, Artificial Sequence
  Description of Artificial Sequence: Synthetic oligonucleotide
ugucauaaugugacuagga

SEQ ID NO: 147916 - RNA, 19 nt, Artificial Sequence
  Description of Artificial Sequence: Synthetic oligonucleotide
uuucccggcguuuagugag

SEQ ID NO: 147917 - RNA, 19 nt, Artificial Sequence
  Description of Artificial Sequence: Synthetic oligonucleotide
cauguagcaagcauuggug

SEQ ID NO: 147918 - RNA, 19 nt, Artificial Sequence
  Description of Artificial Sequence: Synthetic oligonucleotide
uuuacuagucgaacaacaa

SEQ ID NO: 147919 - RNA, 19 nt, Artificial Sequence
  Description of Artificial Sequence: Synthetic oligonucleotide
uuuagugaguacucgucca

SEQ ID NO: 147920 - RNA, 19 nt, Artificial Sequence
  Description of Artificial Sequence: Synthetic oligonucleotide
cuuaggaggucguaucucc

SEQ ID NO: 147921 - RNA, 19 nt, Artificial Sequence
  Description of Artificial Sequence: Synthetic oligonucleotide
ucuauauuauauuccguua

SEQ ID NO: 147922 - RNA, 19 nt, Artificial Sequence
  Description of Artificial Sequence: Synthetic oligonucleotide
agugcuagaaggguggcgg

SEQ ID NO: 147923 - RNA, 19 nt, Artificial Sequence
  Description of Artificial Sequence: Synthetic oligonucleotide
uauauuccguuacugugcu

SEQ ID NO: 147924 - RNA, 19 nt, Artificial Sequence
  Description of Artificial Sequence: Synthetic oligonucleotide
ugagcgaaaggagacaaug

SEQ ID NO: 147925 - RNA, 19 nt, Artificial Sequence
  Description of Artificial Sequence: Synthetic oligonucleotide
acuuugucgaagucuguuc

SEQ ID NO: 147926 - RNA, 19 nt, Artificial Sequence
  Description of Artificial Sequence: Synthetic oligonucleotide
uaucgcauccuucaguaaa

SEQ ID NO: 147927 - RNA, 19 nt, Artificial Sequence
  Description of Artificial Sequence: Synthetic oligonucleotide
guuuagugaguacucgucc

SEQ ID NO: 147928 - RNA, 19 nt, Artificial Sequence
  Description of Artificial Sequence: Synthetic oligonucleotide
  modified_base (4)..(4): a, c, u, g, unknown or other
  modified_base (8)..(8): a, c, u, g, unknown or other
gacnuucngauucuucuca

SEQ ID NO: 147929 - RNA, 19 nt, Artificial Sequence
  Description of Artificial Sequence: Synthetic oligonucleotide
ucaaaccuuuguuucccgg

SEQ ID NO: 147930 - RNA, 19 nt, Artificial Sequence
  Description of Artificial Sequence: Synthetic oligonucleotide
gucguaucuccucugagcc

SEQ ID NO: 147931 - RNA, 19 nt, Artificial Sequence
  Description of Artificial Sequence: Synthetic oligonucleotide
acugcgguuaccaaggcag

SEQ ID NO: 147932 - RNA, 19 nt, Artificial Sequence
  Description of Artificial Sequence: Synthetic oligonucleotide
  modified_base (3)..(3): a, c, u, g, unknown or other
ucngauucuucucaugauu

SEQ ID NO: 147933 - RNA, 19 nt, Artificial Sequence
  Description of Artificial Sequence: Synthetic oligonucleotide
auauuauauuccguuacug

SEQ ID NO: 147934 - RNA, 19 nt, Artificial Sequence
  Description of Artificial Sequence: Synthetic oligonucleotide
  modified_base (2)..(2): a, c, u, g, unknown or other
cngauucuucucaugauuc

SEQ ID NO: 147935 - RNA, 19 nt, Artificial Sequence
  Description of Artificial Sequence: Synthetic oligonucleotide
agcgaaaggagacaauggu

SEQ ID NO: 147936 - RNA, 19 nt, Artificial Sequence
  Description of Artificial Sequence: Synthetic oligonucleotide
cuugacgguagcauuguug

SEQ ID NO: 147937 - RNA, 19 nt, Artificial Sequence
  Description of Artificial Sequence: Synthetic oligonucleotide
gucauaaugugacuaggac

SEQ ID NO: 147938 - RNA, 19 nt, Artificial Sequence
  Description of Artificial Sequence: Synthetic oligonucleotide
uucacaguuugaugcauga

SEQ ID NO: 147939 - RNA, 19 nt, Artificial Sequence
  Description of Artificial Sequence: Synthetic oligonucleotide
aguuuacuagucgaacaac

SEQ ID NO: 147940 - RNA, 19 nt, Artificial Sequence
  Description of Artificial Sequence: Synthetic oligonucleotide
uggucuaguccucuguucu

SEQ ID NO: 147941 - RNA, 19 nt, Artificial Sequence
  Description of Artificial Sequence: Synthetic oligonucleotide
gauacugucgucacacgug

SEQ ID NO: 147942 - RNA, 19 nt, Artificial Sequence
  Description of Artificial Sequence: Synthetic oligonucleotide
augccucggacauaggaag

SEQ ID NO: 147943 - RNA, 19 nt, Artificial Sequence
  Description of Artificial Sequence: Synthetic oligonucleotide
gaucaagauuccacaaucc

SEQ ID NO: 147944 - RNA, 19 nt, Artificial Sequence
  Description of Artificial Sequence: Synthetic oligonucleotide
acgugaaucccacagguaa

SEQ ID NO: 147945 - RNA, 19 nt, Artificial Sequence
  Description of Artificial Sequence: Synthetic oligonucleotide
ucgaucaggauguuacgga

SEQ ID NO: 147946 - RNA, 19 nt, Artificial Sequence
  Description of Artificial Sequence: Synthetic oligonucleotide
acccguugucgccaaaggc

SEQ ID NO: 147947 - RNA, 19 nt, Artificial Sequence
  Description of Artificial Sequence: Synthetic oligonucleotide
gucacguccacacucgccc

SEQ ID NO: 147948 - RNA, 19 nt, Artificial Sequence
  Description of Artificial Sequence: Synthetic oligonucleotide
caccaggucaaugugacgc

SEQ ID NO: 147949 - RNA, 19 nt, Artificial Sequence
  Description of Artificial Sequence: Synthetic oligonucleotide
ugugggugggucuuguaga

SEQ ID NO: 147950 - RNA, 19 nt, Artificial Sequence
  Description of Artificial Sequence: Synthetic oligonucleotide
uuagugaguacucguccac

SEQ ID NO: 147951 - RNA, 19 nt, Artificial Sequence
  Description of Artificial Sequence: Synthetic oligonucleotide
aguaaagugacuacgucau

SEQ ID NO: 147952 - RNA, 19 nt, Artificial Sequence
  Description of Artificial Sequence: Synthetic oligonucleotide
ggugauaauacacuucaca

SEQ ID NO: 147953 - RNA, 19 nt, Artificial Sequence
  Description of Artificial Sequence: Synthetic oligonucleotide
gaucaggauguuacggacg

SEQ ID NO: 147954 - RNA, 19 nt, Artificial Sequence
  Description of Artificial Sequence: Synthetic oligonucleotide
uguuucccggcguuuagug

SEQ ID NO: 147955 - RNA, 19 nt, Artificial Sequence
  Description of Artificial Sequence: Synthetic oligonucleotide
auagccucgucuauuuugg

SEQ ID NO: 147956 - RNA, 19 nt, Artificial Sequence
  Description of Artificial Sequence: Synthetic oligonucleotide
aggugaucaagauuccaca

SEQ ID NO: 147957 - RNA, 19 nt, Artificial Sequence
  Description of Artificial Sequence: Synthetic oligonucleotide
aacgccgggaauacugugg

SEQ ID NO: 147958 - RNA, 19 nt, Artificial Sequence
  Description of Artificial Sequence: Synthetic oligonucleotide
acgaaggcgguucaagaug

SEQ ID NO: 147959 - RNA, 19 nt, Artificial Sequence
  Description of Artificial Sequence: Synthetic oligonucleotide
ugccacuacauucacgcau

SEQ ID NO: 147960 - RNA, 19 nt, Artificial Sequence
  Description of Artificial Sequence: Synthetic oligonucleotide
  modified_base (14)..(14): a, c, u, g, unknown or other
  modified_base (18)..(18): a, c, u, g, unknown or other
acuccauguggacnuucng

SEQ ID NO: 147961 - RNA, 19 nt, Artificial Sequence
  Description of Artificial Sequence: Synthetic oligonucleotide
gagacaauggugcauacau

SEQ ID NO: 147962 - RNA, 19 nt, Artificial Sequence
  Description of Artificial Sequence: Synthetic oligonucleotide
caguaaagugacuacguca

SEQ ID NO: 147963 - RNA, 19 nt, Artificial Sequence
  Description of Artificial Sequence: Synthetic oligonucleotide
uuacggacgaucucaccca

SEQ ID NO: 147964 - RNA, 19 nt, Artificial Sequence
  Description of Artificial Sequence: Synthetic oligonucleotide
gaagaaacgugaaucccac

SEQ ID NO: 147965 - RNA, 19 nt, Artificial Sequence
  Description of Artificial Sequence: Synthetic oligonucleotide
gaaguuuguagagcguccc

SEQ ID NO: 147966 - RNA, 19 nt, Artificial Sequence
  Description of Artificial Sequence: Synthetic oligonucleotide
caaaguuuacuagucgaac

SEQ ID NO: 147967 - RNA, 19 nt, Artificial Sequence
  Description of Artificial Sequence: Synthetic oligonucleotide
uuugucgaagucuguucug

SEQ ID NO: 147968 - RNA, 19 nt, Artificial Sequence
  Description of Artificial Sequence: Synthetic oligonucleotide
caaugaucaggccaacuuc

SEQ ID NO: 147969 - RNA, 19 nt, Artificial Sequence
  Description of Artificial Sequence: Synthetic oligonucleotide
guucagauggucuaguccu

SEQ ID NO: 147970 - RNA, 19 nt, Artificial Sequence
  Description of Artificial Sequence: Synthetic oligonucleotide
auggucuaguccucuguuc

SEQ ID NO: 147971 - RNA, 19 nt, Artificial Sequence
  Description of Artificial Sequence: Synthetic oligonucleotide
gacuaggacugguuccacg

SEQ ID NO: 147972 - RNA, 19 nt, Artificial Sequence
  Description of Artificial Sequence: Synthetic oligonucleotide
cacgcaugggcaaagcaug

SEQ ID NO: 147973 - RNA, 19 nt, Artificial Sequence
  Description of Artificial Sequence: Synthetic oligonucleotide
ucgguucuagagaggagug

SEQ ID NO: 147974 - RNA, 19 nt, Artificial Sequence
  Description of Artificial Sequence: Synthetic oligonucleotide
guuuacuagucgaacaaca

SEQ ID NO: 147975 - RNA, 19 nt, Artificial Sequence
  Description of Artificial Sequence: Synthetic oligonucleotide
uugguuugucggcagggga

SEQ ID NO: 147976 - RNA, 19 nt, Artificial Sequence
  Description of Artificial Sequence: Synthetic oligonucleotide
gccaguaccaaugaucagg

SEQ ID NO: 147977 - RNA, 19 nt, Artificial Sequence
  Description of Artificial Sequence: Synthetic oligonucleotide
uacagugucguugaccaaa

SEQ ID NO: 147978 - RNA, 19 nt, Artificial Sequence
  Description of Artificial Sequence: Synthetic oligonucleotide
  modified_base (4)..(4): a, c, u, g, unknown or other
uucngauucuucucaugau

SEQ ID NO: 147979 - RNA, 19 nt, Artificial Sequence
  Description of Artificial Sequence: Synthetic oligonucleotide
gguacauccagacgggaug

SEQ ID NO: 147980 - RNA, 19 nt, Artificial Sequence
  Description of Artificial Sequence: Synthetic oligonucleotide
ugccucggacauaggaagg

SEQ ID NO: 147981 - RNA, 19 nt, Artificial Sequence
  Description of Artificial Sequence: Synthetic oligonucleotide
accgacagcacgcacucug

SEQ ID NO: 147982 - RNA, 19 nt, Artificial Sequence
  Description of Artificial Sequence: Synthetic oligonucleotide
aaacgccgggaauacugug

SEQ ID NO: 147983 - RNA, 19 nt, Artificial Sequence
  Description of Artificial Sequence: Synthetic oligonucleotide
acuagguuggcugagcgaa

SEQ ID NO: 147984 - RNA, 19 nt, Artificial Sequence
  Description of Artificial Sequence: Synthetic oligonucleotide
  modified_base (3)..(3): a, c, u, g, unknown or other
  modified_base (7)..(7): a, c, u, g, unknown or other
acnuucngauucuucucau

SEQ ID NO: 147985 - RNA, 19 nt, Artificial Sequence
  Description of Artificial Sequence: Synthetic oligonucleotide
ucguaucuccucugagccg

SEQ ID NO: 147986 - RNA, 19 nt, Artificial Sequence
  Description of Artificial Sequence: Synthetic oligonucleotide
  modified_base (2)..(2): a, c, u, g, unknown or other
  modified_base (6)..(6): a, c, u, g, unknown or other
cnuucngauucuucucaug

SEQ ID NO: 147987 - RNA, 19 nt, Artificial Sequence
  Description of Artificial Sequence: Synthetic oligonucleotide
ugucggcaggggaagaaac

SEQ ID NO: 147988 - RNA, 19 nt, Artificial Sequence
  Description of Artificial Sequence: Synthetic oligonucleotide
aggaaacgcacaucggagu

SEQ ID NO: 147989 - RNA, 19 nt, Artificial Sequence
  Description of Artificial Sequence: Synthetic oligonucleotide
acaaggcucacuaaagcga

SEQ ID NO: 147990 - RNA, 19 nt, Artificial Sequence
  Description of Artificial Sequence: Synthetic oligonucleotide
cucggacauaggaaggcag

SEQ ID NO: 147991 - RNA, 19 nt, Artificial Sequence
  Description of Artificial Sequence: Synthetic oligonucleotide
ccacgauacacacaaaaug

SEQ ID NO: 147992 - RNA, 19 nt, Artificial Sequence
  Description of Artificial Sequence: Synthetic oligonucleotide
ugaaccgcuuuguccaugu

SEQ ID NO: 147993 - RNA, 19 nt, Artificial Sequence
  Description of Artificial Sequence: Synthetic oligonucleotide
caagcauuggugccaguac

SEQ ID NO: 147994 - RNA, 19 nt, Artificial Sequence
  Description of Artificial Sequence: Synthetic oligonucleotide
ugucacguccacacucgcc

SEQ ID NO: 147995 - RNA, 19 nt, Artificial Sequence
  Description of Artificial Sequence: Synthetic oligonucleotide
cccguugucgccaaaggcg

SEQ ID NO: 147996 - RNA, 19 nt, Artificial Sequence
  Description of Artificial Sequence: Synthetic oligonucleotide
cacggaaauugguuccucc

SEQ ID NO: 147997 - RNA, 19 nt, Artificial Sequence
  Description of Artificial Sequence: Synthetic oligonucleotide
acguucagauggucuaguc

SEQ ID NO: 147998 - RNA, 19 nt, Artificial Sequence
  Description of Artificial Sequence: Synthetic oligonucleotide
aagaaacgugaaucccaca

SEQ ID NO: 147999 - RNA, 19 nt, Artificial Sequence
  Description of Artificial Sequence: Synthetic oligonucleotide
cuacgaugaguccaacuuc

SEQ ID NO: 148000 - RNA, 19 nt, Artificial Sequence
  Description of Artificial Sequence: Synthetic oligonucleotide
gugcuaaucggucacucuc

SEQ ID NO: 148001 - RNA, 19 nt, Artificial Sequence
  Description of Artificial Sequence: Synthetic oligonucleotide
agucgaacaacaaggcuca

SEQ ID NO: 148002 - RNA, 19 nt, Artificial Sequence
  Description of Artificial Sequence: Synthetic oligonucleotide
agugcuaaucggucacucu

SEQ ID NO: 148003 - RNA, 19 nt, Artificial Sequence
  Description of Artificial Sequence: Synthetic oligonucleotide
ucgucacacgugcuguuca

SEQ ID NO: 148004 - RNA, 19 nt, Artificial Sequence
  Description of Artificial Sequence: Synthetic oligonucleotide
accaccaccaccaccacca

SEQ ID NO: 148005 - RNA, 19 nt, Artificial Sequence
  Description of Artificial Sequence: Synthetic oligonucleotide
acgguagcauuguugugug

SEQ ID NO: 148006 - RNA, 19 nt, Artificial Sequence
  Description of Artificial Sequence: Synthetic oligonucleotide
uguuacggacgaucucacc

SEQ ID NO: 148007 - RNA, 19 nt, Artificial Sequence
  Description of Artificial Sequence: Synthetic oligonucleotide
ggucguaucuccucugagc

SEQ ID NO: 148008 - RNA, 19 nt, Artificial Sequence
  Description of Artificial Sequence: Synthetic oligonucleotide
auaaugugacuaggacugg

SEQ ID NO: 148009 - RNA, 19 nt, Artificial Sequence
  Description of Artificial Sequence: Synthetic oligonucleotide
agucccuacgaugagucca

SEQ ID NO: 148010 - RNA, 19 nt, Artificial Sequence
  Description of Artificial Sequence: Synthetic oligonucleotide
acgauacacacaaaaugca

SEQ ID NO: 148011 - RNA, 19 nt, Artificial Sequence
  Description of Artificial Sequence: Synthetic oligonucleotide
uucagucccuauuuccauc

SEQ ID NO: 148012 - RNA, 19 nt, Artificial Sequence
  Description of Artificial Sequence: Synthetic oligonucleotide
accaccaccaccaccacga

SEQ ID NO: 148013 - RNA, 19 nt, Artificial Sequence
  Description of Artificial Sequence: Synthetic oligonucleotide
ggaggaaacgcacaucgga

SEQ ID NO: 148014 - RNA, 19 nt, Artificial Sequence
  Description of Artificial Sequence: Synthetic oligonucleotide
acaaaguuuacuagucgaa

SEQ ID NO: 148015 - RNA, 19 nt, Artificial Sequence
  Description of Artificial Sequence: Synthetic oligonucleotide
uagugaguacucguccacc

SEQ ID NO: 148016 - RNA, 19 nt, Artificial Sequence
  Description of Artificial Sequence: Synthetic oligonucleotide
aagcgaugggagauuccgg

SEQ ID NO: 148017 - RNA, 19 nt, Artificial Sequence
  Description of Artificial Sequence: Synthetic oligonucleotide
aucgcauccuucaguaaag

SEQ ID NO: 148018 - RNA, 19 nt, Artificial Sequence
  Description of Artificial Sequence: Synthetic oligonucleotide
gaugccucggacauaggaa

SEQ ID NO: 148019 - RNA, 19 nt, Artificial Sequence
  Description of Artificial Sequence: Synthetic oligonucleotide
cuaaagcgaugggagauuc

SEQ ID NO: 148020 - RNA, 19 nt, Artificial Sequence
  Description of Artificial Sequence: Synthetic oligonucleotide
aacuugaaucaugcagagu

SEQ ID NO: 148021 - RNA, 19 nt, Artificial Sequence
  Description of Artificial Sequence: Synthetic oligonucleotide
gacgguagcauuguugugu

SEQ ID NO: 148022 - RNA, 19 nt, Artificial Sequence
  Description of Artificial Sequence: Synthetic oligonucleotide
ugccccgagucuugagugg

SEQ ID NO: 148023 - RNA, 19 nt, Artificial Sequence
  Description of Artificial Sequence: Synthetic oligonucleotide
agaggagugcuagaagggu

SEQ ID NO: 148024 - RNA, 19 nt, Artificial Sequence
  Description of Artificial Sequence: Synthetic oligonucleotide
ucgucagauggcuccacuc

SEQ ID NO: 148025 - RNA, 19 nt, Artificial Sequence
  Description of Artificial Sequence: Synthetic oligonucleotide
aggauguuacggacgaucu

SEQ ID NO: 148026 - RNA, 19 nt, Artificial Sequence
  Description of Artificial Sequence: Synthetic oligonucleotide
aucgguacauccagacggg

SEQ ID NO: 148027 - RNA, 19 nt, Artificial Sequence
  Description of Artificial Sequence: Synthetic oligonucleotide
gacgggauggcaggcugcg

SEQ ID NO: 148028 - RNA, 19 nt, Artificial Sequence
  Description of Artificial Sequence: Synthetic oligonucleotide
ggcucgucugauugcaggg

SEQ ID NO: 148029 - RNA, 19 nt, Artificial Sequence
  Description of Artificial Sequence: Synthetic oligonucleotide
uugucacgaaggcgguuca

SEQ ID NO: 148030 - RNA, 19 nt, Artificial Sequence
  Description of Artificial Sequence: Synthetic oligonucleotide
uuguugucacgaaggcggu

SEQ ID NO: 148031 - RNA, 19 nt, Artificial Sequence
  Description of Artificial Sequence: Synthetic oligonucleotide
gucggcaggggaagaaacg

SEQ ID NO: 148032 - RNA, 19 nt, Artificial Sequence
  Description of Artificial Sequence: Synthetic oligonucleotide
ggaagaaacgugaauccca

SEQ ID NO: 148033 - RNA, 19 nt, Artificial Sequence
  Description of Artificial Sequence: Synthetic oligonucleotide
cuauuuugguuugucggca

SEQ ID NO: 148034 - RNA, 19 nt, Artificial Sequence
  Description of Artificial Sequence: Synthetic oligonucleotide
guagcaagcauuggugcca

SEQ ID NO: 148035 - RNA, 19 nt, Artificial Sequence
  Description of Artificial Sequence: Synthetic oligonucleotide
cacugcggaucuuuaccag

SEQ ID NO: 148036 - RNA, 19 nt, Artificial Sequence
  Description of Artificial Sequence: Synthetic oligonucleotide
caguggcaucgguacaucc

SEQ ID NO: 148037 - RNA, 19 nt, Artificial Sequence
  Description of Artificial Sequence: Synthetic oligonucleotide
aguggcaucgguacaucca

SEQ ID NO: 148038 - RNA, 19 nt, Artificial Sequence
  Description of Artificial Sequence: Synthetic oligonucleotide
ggaaacgcacaucggaguc

SEQ ID NO: 148039 - RNA, 19 nt, Artificial Sequence
  Description of Artificial Sequence: Synthetic oligonucleotide
  modified_base (5)..(5): a, c, u, g, unknown or other
  modified_base (9)..(9): a, c, u, g, unknown or other
ggacnuucngauucuucuc

SEQ ID NO: 148040 - RNA, 19 nt, Artificial Sequence
  Description of Artificial Sequence: Synthetic oligonucleotide
cacccguugucgccaaagg

SEQ ID NO: 148041 - RNA, 19 nt, Artificial Sequence
  Description of Artificial Sequence: Synthetic oligonucleotide
cuuugucgaagucuguucu

SEQ ID NO: 148042 - RNA, 19 nt, Artificial Sequence
  Description of Artificial Sequence: Synthetic oligonucleotide
ucgucuauuuugguuuguc

SEQ ID NO: 148043 - RNA, 19 nt, Artificial Sequence
  Description of Artificial Sequence: Synthetic oligonucleotide
ggcaucgguacauccagac

SEQ ID NO: 148044 - RNA, 19 nt, Artificial Sequence
  Description of Artificial Sequence: Synthetic oligonucleotide
uuugucggcaggggaagaa

SEQ ID NO: 148045 - RNA, 19 nt, Artificial Sequence
  Description of Artificial Sequence: Synthetic oligonucleotide
gaaacgcacaucggaguca

SEQ ID NO: 148046 - RNA, 19 nt, Artificial Sequence
  Description of Artificial Sequence: Synthetic oligonucleotide
caucgguucuagagaggag

SEQ ID NO: 148047 - RNA, 19 nt, Artificial Sequence
  Description of Artificial Sequence: Synthetic oligonucleotide
gugcuagaaggguggcggg

SEQ ID NO: 148048 - RNA, 19 nt, Artificial Sequence
  Description of Artificial Sequence: Synthetic oligonucleotide
acagugucguugaccaaag

SEQ ID NO: 148049 - RNA, 19 nt, Artificial Sequence
  Description of Artificial Sequence: Synthetic oligonucleotide
gugccuacagugucguuga

SEQ ID NO: 148050 - RNA, 19 nt, Artificial Sequence
  Description of Artificial Sequence: Synthetic oligonucleotide
ggcguuuagugaguacucg

SEQ ID NO: 148051 - RNA, 19 nt, Artificial Sequence
  Description of Artificial Sequence: Synthetic oligonucleotide
gcccuuguugucacgaagg

SEQ ID NO: 148052 - RNA, 19 nt, Artificial Sequence
  Description of Artificial Sequence: Synthetic oligonucleotide
gugacuaggacugguucca

SEQ ID NO: 148053 - RNA, 19 nt, Artificial Sequence
  Description of Artificial Sequence: Synthetic oligonucleotide
uuccacugaucaucuuuuc

SEQ ID NO: 148054 - RNA, 19 nt, Artificial Sequence
  Description of Artificial Sequence: Synthetic oligonucleotide
acacccguugucgccaaag

SEQ ID NO: 148055 - RNA, 19 nt, Artificial Sequence
  Description of Artificial Sequence: Synthetic oligonucleotide
gacuacgucaugacccaca

SEQ ID NO: 148056 - RNA, 19 nt, Artificial Sequence
  Description of Artificial Sequence: Synthetic oligonucleotide
ugccagucccuacgaugag

SEQ ID NO: 148057 - RNA, 19 nt, Artificial Sequence
  Description of Artificial Sequence: Synthetic oligonucleotide
gcgaaaggagacaauggug

SEQ ID NO: 148058 - RNA, 19 nt, Artificial Sequence
  Description of Artificial Sequence: Synthetic oligonucleotide
  modified_base (7)..(7): a, c, u, g, unknown or other
  modified_base (11)..(11): a, c, u, g, unknown or other
guggacnuucngauucuuc

SEQ ID NO: 148059 - RNA, 19 nt, Artificial Sequence
  Description of Artificial Sequence: Synthetic oligonucleotide
gugucauucacuacagcua

SEQ ID NO: 148060 - RNA, 19 nt, Artificial Sequence
  Description of Artificial Sequence: Synthetic oligonucleotide
gauuccggugauggcguug

SEQ ID NO: 148061 - RNA, 19 nt, Artificial Sequence
  Description of Artificial Sequence: Synthetic oligonucleotide
cagcacgcacucugugugg

SEQ ID NO: 148062 - RNA, 19 nt, Artificial Sequence
  Description of Artificial Sequence: Synthetic oligonucleotide
ccgugcacgauguucuccg

SEQ ID NO: 148063 - RNA, 19 nt, Artificial Sequence
  Description of Artificial Sequence: Synthetic oligonucleotide
ugaucaggauagccucguc

SEQ ID NO: 148064 - RNA, 19 nt, Artificial Sequence
  Description of Artificial Sequence: Synthetic oligonucleotide
uacaccaacugugguccga

SEQ ID NO: 148065 - RNA, 19 nt, Artificial Sequence
  Description of Artificial Sequence: Synthetic oligonucleotide
  modified_base (15)..(15): a, c, u, g, unknown or other
  modified_base (19)..(19): a, c, u, g, unknown or other
gacuccauguggacnuucn

SEQ ID NO: 148066 - RNA, 19 nt, Artificial Sequence
  Description of Artificial Sequence: Synthetic oligonucleotide
cacaguuugaugcaugauu

SEQ ID NO: 148067 - RNA, 19 nt, Artificial Sequence
  Description of Artificial Sequence: Synthetic oligonucleotide
cguucagauggucuagucc

SEQ ID NO: 148068 - RNA, 19 nt, Artificial Sequence
  Description of Artificial Sequence: Synthetic oligonucleotide
guuucccggcguuuaguga

SEQ ID NO: 148069 - RNA, 19 nt, Artificial Sequence
  Description of Artificial Sequence: Synthetic oligonucleotide
gagcggcccucuuggauac

SEQ ID NO: 148070 - RNA, 19 nt, Artificial Sequence
  Description of Artificial Sequence: Synthetic oligonucleotide
cauugcugccagucccuac

SEQ ID NO: 148071 - RNA, 19 nt, Artificial Sequence
  Description of Artificial Sequence: Synthetic oligonucleotide
acaccaccaccaccaccac

SEQ ID NO: 148072 - RNA, 19 nt, Artificial Sequence
  Description of Artificial Sequence: Synthetic oligonucleotide
ccguugucgccaaaggcgc

SEQ ID NO: 148073 - RNA, 19 nt, Artificial Sequence
  Description of Artificial Sequence: Synthetic oligonucleotide
aaacacccguugucgccaa

SEQ ID NO: 148074 - RNA, 19 nt, Artificial Sequence
  Description of Artificial Sequence: Synthetic oligonucleotide
caccaccaccaccaccacg

SEQ ID NO: 148075 - RNA, 19 nt, Artificial Sequence
  Description of Artificial Sequence: Synthetic oligonucleotide
ucacaguuugaugcaugau

SEQ ID NO: 148076 - RNA, 19 nt, Artificial Sequence
  Description of Artificial Sequence: Synthetic oligonucleotide
augugacgcagcuccucca

SEQ ID NO: 148077 - RNA, 19 nt, Artificial Sequence
  Description of Artificial Sequence: Synthetic oligonucleotide
gcucuuaggaggucguauc

SEQ ID NO: 148078 - RNA, 19 nt, Artificial Sequence
  Description of Artificial Sequence: Synthetic oligonucleotide
cuagucgaacaacaaggcu

SEQ ID NO: 148079 - RNA, 19 nt, Artificial Sequence
  Description of Artificial Sequence: Synthetic oligonucleotide
ucuugacgguagcauuguu

SEQ ID NO: 148080 - RNA, 19 nt, Artificial Sequence
  Description of Artificial Sequence: Synthetic oligonucleotide
aacgugaaucccacaggua

SEQ ID NO: 148081 - RNA, 19 nt, Artificial Sequence
  Description of Artificial Sequence: Synthetic oligonucleotide
gauggucuaguccucuguu

SEQ ID NO: 148082 - RNA, 19 nt, Artificial Sequence
  Description of Artificial Sequence: Synthetic oligonucleotide
ccagucccuacgaugaguc

SEQ ID NO: 148083 - RNA, 19 nt, Artificial Sequence
  Description of Artificial Sequence: Synthetic oligonucleotide
ucgcauccuucaguaaagu

SEQ ID NO: 148084 - RNA, 19 nt, Artificial Sequence
  Description of Artificial Sequence: Synthetic oligonucleotide
uucccggcguuuagugagu

SEQ ID NO: 148085 - RNA, 19 nt, Artificial Sequence
  Description of Artificial Sequence: Synthetic oligonucleotide
  modified_base (9)..(9): a, c, u, g, unknown or other
  modified_base (13)..(13): a, c, u, g, unknown or other
auguggacnuucngauucu

SEQ ID NO: 148086 - RNA, 19 nt, Artificial Sequence
  Description of Artificial Sequence: Synthetic oligonucleotide
ugcggcgagggugcuagga

SEQ ID NO: 148087 - RNA, 19 nt, Artificial Sequence
  Description of Artificial Sequence: Synthetic oligonucleotide
cauacaugcuggaccgaaa

SEQ ID NO: 148088 - RNA, 19 nt, Artificial Sequence
  Description of Artificial Sequence: Synthetic oligonucleotide
cuggaccgaaacacaguca

SEQ ID NO: 148089 - RNA, 19 nt, Artificial Sequence
  Description of Artificial Sequence: Synthetic oligonucleotide
cguuuagugaguacucguc

SEQ ID NO: 148090 - RNA, 19 nt, Artificial Sequence
  Description of Artificial Sequence: Synthetic oligonucleotide
agacuuggugccacuacau

SEQ ID NO: 148091 - RNA, 19 nt, Artificial Sequence
  Description of Artificial Sequence: Synthetic oligonucleotide
cguaucuccucugagccgc

SEQ ID NO: 148092 - RNA, 19 nt, Artificial Sequence
  Description of Artificial Sequence: Synthetic oligonucleotide
auggugccuacagugucgu

SEQ ID NO: 148093 - RNA, 19 nt, Artificial Sequence
  Description of Artificial Sequence: Synthetic oligonucleotide
caccaccaccaccaccacc

SEQ ID NO: 148094 - RNA, 19 nt, Artificial Sequence
  Description of Artificial Sequence: Synthetic oligonucleotide
gugucacguccacacucgc

SEQ ID NO: 148095 - RNA, 19 nt, Artificial Sequence
  Description of Artificial Sequence: Synthetic oligonucleotide
  modified_base (8)..(8): a, c, u, g, unknown or other
  modified_base (12)..(12): a, c, u, g, unknown or other
uguggacnuucngauucuu

SEQ ID NO: 148096 - RNA, 19 nt, Artificial Sequence
  Description of Artificial Sequence: Synthetic oligonucleotide
cagugucguugaccaaagc

SEQ ID NO: 148097 - RNA, 19 nt, Artificial Sequence
  Description of Artificial Sequence: Synthetic oligonucleotide
cagugcuaaucggucacuc

SEQ ID NO: 148098 - RNA, 19 nt, Artificial Sequence
  Description of Artificial Sequence: Synthetic oligonucleotide
auggucccgacugugucau

SEQ ID NO: 148099 - RNA, 19 nt, Artificial Sequence
  Description of Artificial Sequence: Synthetic oligonucleotide
cacaggggcugccguagac

SEQ ID NO: 148100 - RNA, 19 nt, Artificial Sequence
  Description of Artificial Sequence: Synthetic oligonucleotide
gaaggcgguucaagauggc

SEQ ID NO: 148101 - RNA, 19 nt, Artificial Sequence
  Description of Artificial Sequence: Synthetic oligonucleotide
acauucacgcaugggcaaa

SEQ ID NO: 148102 - RNA, 19 nt, Artificial Sequence
  Description of Artificial Sequence: Synthetic oligonucleotide
cccuuguugucacgaaggc

SEQ ID NO: 148103 - RNA, 19 nt, Artificial Sequence
  Description of Artificial Sequence: Synthetic oligonucleotide
ggauacugucgucacacgu

SEQ ID NO: 148104 - RNA, 19 nt, Artificial Sequence
  Description of Artificial Sequence: Synthetic oligonucleotide
cacuagguuggcugagcga

SEQ ID NO: 148105 - RNA, 19 nt, Artificial Sequence
  Description of Artificial Sequence: Synthetic oligonucleotide
gaaacgccgggaauacugu

SEQ ID NO: 148106 - RNA, 19 nt, Artificial Sequence
  Description of Artificial Sequence: Synthetic oligonucleotide
cgaacaacaaggcucacua

SEQ ID NO: 148107 - RNA, 19 nt, Artificial Sequence
  Description of Artificial Sequence: Synthetic oligonucleotide
acgugcuguucagacccag

SEQ ID NO: 148108 - RNA, 19 nt, Artificial Sequence
  Description of Artificial Sequence: Synthetic oligonucleotide
cugccgugcacgauguucu

SEQ ID NO: 148109 - RNA, 19 nt, Artificial Sequence
  Description of Artificial Sequence: Synthetic oligonucleotide
gccuacagugucguugacc

SEQ ID NO: 148110 - RNA, 19 nt, Artificial Sequence
  Description of Artificial Sequence: Synthetic oligonucleotide
uuggcgucguaguccccuc

SEQ ID NO: 148111 - RNA, 19 nt, Artificial Sequence
  Description of Artificial Sequence: Synthetic oligonucleotide
gcgaugggagauuccggug

SEQ ID NO: 148112 - RNA, 19 nt, Artificial Sequence
  Description of Artificial Sequence: Synthetic oligonucleotide
guccccggaagaggaaccc

SEQ ID NO: 148113 - RNA, 19 nt, Artificial Sequence
  Description of Artificial Sequence: Synthetic oligonucleotide
gcgguuaccaaggcagccc

SEQ ID NO: 148114 - RNA, 19 nt, Artificial Sequence
  Description of Artificial Sequence: Synthetic oligonucleotide
aggcggguuaagauuuccu

SEQ ID NO: 148115 - RNA, 19 nt, Artificial Sequence
  Description of Artificial Sequence: Synthetic oligonucleotide
cacugcgguuaccaaggca

SEQ ID NO: 148116 - RNA, 19 nt, Artificial Sequence
  Description of Artificial Sequence: Synthetic oligonucleotide
uccccggaagaggaacccu

SEQ ID NO: 148117 - RNA, 19 nt, Artificial Sequence
  Description of Artificial Sequence: Synthetic oligonucleotide
ugucacgaaggcgguucaa

SEQ ID NO: 148118 - RNA, 19 nt, Artificial Sequence
  Description of Artificial Sequence: Synthetic oligonucleotide
cacuaaagcgaugggagau

SEQ ID NO: 148119 - RNA, 19 nt, Artificial Sequence
  Description of Artificial Sequence: Synthetic oligonucleotide
ggucccgacugugucauuc

SEQ ID NO: 148120 - RNA, 19 nt, Artificial Sequence
  Description of Artificial Sequence: Synthetic oligonucleotide
acggacgaucucacccagg

SEQ ID NO: 148121 - RNA, 19 nt, Artificial Sequence
  Description of Artificial Sequence: Synthetic oligonucleotide
gcggcgagggugcuaggag

SEQ ID NO: 148122 - RNA, 19 nt, Artificial Sequence
  Description of Artificial Sequence: Synthetic oligonucleotide
gucaccgacagcacgcacu

SEQ ID NO: 148123 - RNA, 19 nt, Artificial Sequence
  Description of Artificial Sequence: Synthetic oligonucleotide
aacacccguugucgccaaa

SEQ ID NO: 148124 - RNA, 19 nt, Artificial Sequence
  Description of Artificial Sequence: Synthetic oligonucleotide
cacgaaggcgguucaagau

SEQ ID NO: 148125 - RNA, 19 nt, Artificial Sequence
  Description of Artificial Sequence: Synthetic oligonucleotide
augggagauuccggugaug

SEQ ID NO: 148126 - RNA, 19 nt, Artificial Sequence
  Description of Artificial Sequence: Synthetic oligonucleotide
gcguuguuuuguggguugg

SEQ ID NO: 148127 - RNA, 19 nt, Artificial Sequence
  Description of Artificial Sequence: Synthetic oligonucleotide
gucauucacuacagcuaca

SEQ ID NO: 148128 - RNA, 19 nt, Artificial Sequence
  Description of Artificial Sequence: Synthetic oligonucleotide
gccucggacauaggaaggc

SEQ ID NO: 148129 - RNA, 19 nt, Artificial Sequence
  Description of Artificial Sequence: Synthetic oligonucleotide
gcugagcgaaaggagacaa

SEQ ID NO: 148130 - RNA, 19 nt, Artificial Sequence
  Description of Artificial Sequence: Synthetic oligonucleotide
ggagacaauggugcauaca

SEQ ID NO: 148131 - RNA, 19 nt, Artificial Sequence
  Description of Artificial Sequence: Synthetic oligonucleotide
cuagguuggcugagcgaaa

SEQ ID NO: 148132 - RNA, 19 nt, Artificial Sequence
  Description of Artificial Sequence: Synthetic oligonucleotide
ccccucgcuucuuaauggc

SEQ ID NO: 148133 - RNA, 19 nt, Artificial Sequence
  Description of Artificial Sequence: Synthetic oligonucleotide
ugccgugcacgauguucuc

SEQ ID NO: 148134 - RNA, 19 nt, Artificial Sequence
  Description of Artificial Sequence: Synthetic oligonucleotide
ccauguagcaagcauuggu

SEQ ID NO: 148135 - RNA, 19 nt, Artificial Sequence
  Description of Artificial Sequence: Synthetic oligonucleotide
gcuaaucggucacucucaa

SEQ ID NO: 148136 - RNA, 19 nt, Artificial Sequence
  Description of Artificial Sequence: Synthetic oligonucleotide
cgcauccuucaguaaagug

SEQ ID NO: 148137 - RNA, 19 nt, Artificial Sequence
  Description of Artificial Sequence: Synthetic oligonucleotide
cacaaguggguuccucaua

SEQ ID NO: 148138 - RNA, 19 nt, Artificial Sequence
  Description of Artificial Sequence: Synthetic oligonucleotide
caucauagccgcaggucau

SEQ ID NO: 148139 - RNA, 19 nt, Artificial Sequence
  Description of Artificial Sequence: Synthetic oligonucleotide
cuacgucaugacccacaca

SEQ ID NO: 148140 - RNA, 19 nt, Artificial Sequence
  Description of Artificial Sequence: Synthetic oligonucleotide
agauuccggugauggcguu

SEQ ID NO: 148141 - RNA, 19 nt, Artificial Sequence
  Description of Artificial Sequence: Synthetic oligonucleotide
gucccuacgaugaguccaa

SEQ ID NO: 148142 - RNA, 19 nt, Artificial Sequence
  Description of Artificial Sequence: Synthetic oligonucleotide
gcguuuagugaguacucgu

SEQ ID NO: 148143 - RNA, 19 nt, Artificial Sequence
  Description of Artificial Sequence: Synthetic oligonucleotide
gcauacaugcuggaccgaa

SEQ ID NO: 148144 - RNA, 19 nt, Artificial Sequence
  Description of Artificial Sequence: Synthetic oligonucleotide
aggcgagaggucaccgaca

SEQ ID NO: 148145 - RNA, 19 nt, Artificial Sequence
  Description of Artificial Sequence: Synthetic oligonucleotide
cuauagggauggaguagau

SEQ ID NO: 148146 - RNA, 19 nt, Artificial Sequence
  Description of Artificial Sequence: Synthetic oligonucleotide
ggcggguuaagauuuccuu

SEQ ID NO: 148147 - RNA, 19 nt, Artificial Sequence
  Description of Artificial Sequence: Synthetic oligonucleotide
uggccccgaguguggcagc

SEQ ID NO: 148148 - RNA, 19 nt, Artificial Sequence
  Description of Artificial Sequence: Synthetic oligonucleotide
ucccuacgaugaguccaac

SEQ ID NO: 148149 - RNA, 19 nt, Artificial Sequence
  Description of Artificial Sequence: Synthetic oligonucleotide
gccgcauugugggcucugg

SEQ ID NO: 148150 - RNA, 19 nt, Artificial Sequence
  Description of Artificial Sequence: Synthetic oligonucleotide
cuaaucggucacucucaau

SEQ ID NO: 148151 - RNA, 19 nt, Artificial Sequence
  Description of Artificial Sequence: Synthetic oligonucleotide
cauucacuacagcuacaau

SEQ ID NO: 148152 - RNA, 19 nt, Artificial Sequence
  Description of Artificial Sequence: Synthetic oligonucleotide
ccggaagaggaacccuuuc

SEQ ID NO: 148153 - RNA, 19 nt, Artificial Sequence
  Description of Artificial Sequence: Synthetic oligonucleotide
gcaucuugacgguagcauu

SEQ ID NO: 148154 - RNA, 19 nt, Artificial Sequence
  Description of Artificial Sequence: Synthetic oligonucleotide
gccccgagucuugaguggc

SEQ ID NO: 148155 - RNA, 19 nt, Artificial Sequence
  Description of Artificial Sequence: Synthetic oligonucleotide
ggcugagcgaaaggagaca

SEQ ID NO: 148156 - RNA, 19 nt, Artificial Sequence
  Description of Artificial Sequence: Synthetic oligonucleotide
ucccggcguuuagugagua

SEQ ID NO: 148157 - RNA, 19 nt, Artificial Sequence
  Description of Artificial Sequence: Synthetic oligonucleotide
gucgaacaacaaggcucac

SEQ ID NO: 148158 - RNA, 19 nt, Artificial Sequence
  Description of Artificial Sequence: Synthetic oligonucleotide
ggaccgaaacacagucauc

SEQ ID NO: 148159 - RNA, 19 nt, Artificial Sequence
  Description of Artificial Sequence: Synthetic oligonucleotide
cggcguuuagugaguacuc

SEQ ID NO: 148160 - RNA, 19 nt, Artificial Sequence
  Description of Artificial Sequence: Synthetic oligonucleotide
ccugccgcauugugggcuc

SEQ ID NO: 148161 - RNA, 19 nt, Artificial Sequence
  Description of Artificial Sequence: Synthetic oligonucleotide
caggggcugccguagacuu

SEQ ID NO: 148162 - RNA, 19 nt, Artificial Sequence
  Description of Artificial Sequence: Synthetic oligonucleotide
cugcggcgagggugcuagg

SEQ ID NO: 148163 - RNA, 19 nt, Artificial Sequence
  Description of Artificial Sequence: Synthetic oligonucleotide
cguugucgccaaaggcgcc

SEQ ID NO: 148164 - RNA, 19 nt, Artificial Sequence
  Description of Artificial Sequence: Synthetic oligonucleotide
uuccggugauggcguuguu

SEQ ID NO: 148165 - RNA, 19 nt, Artificial Sequence
  Description of Artificial Sequence: Synthetic oligonucleotide
gcuagaaggguggcgggcu

SEQ ID NO: 148166 - RNA, 19 nt, Artificial Sequence
  Description of Artificial Sequence: Synthetic oligonucleotide
guaucuccucugagccgca

SEQ ID NO: 148167 - RNA, 19 nt, Artificial Sequence
  Description of Artificial Sequence: Synthetic oligonucleotide
uggugccuacagugucguu

SEQ ID NO: 148168 - RNA, 19 nt, Artificial Sequence
  Description of Artificial Sequence: Synthetic oligonucleotide
ccacugcgguuaccaaggc

SEQ ID NO: 148169 - RNA, 19 nt, Artificial Sequence
  Description of Artificial Sequence: Synthetic oligonucleotide
gcgagaggucaccgacagc

SEQ ID NO: 148170 - RNA, 19 nt, Artificial Sequence
  Description of Artificial Sequence: Synthetic oligonucleotide
gguuccacggacacacaau

SEQ ID NO: 148171 - RNA, 19 nt, Artificial Sequence
  Description of Artificial Sequence: Synthetic oligonucleotide
ggcucuuaggaggucguau

SEQ ID NO: 148172 - RNA, 19 nt, Artificial Sequence
  Description of Artificial Sequence: Synthetic oligonucleotide
cccggcguuuagugaguac

SEQ ID NO: 148173 - RNA, 19 nt, Artificial Sequence
  Description of Artificial Sequence: Synthetic oligonucleotide
ccggcguuuagugaguacu

SEQ ID NO: 148174 - RNA, 19 nt, Artificial Sequence
  Description of Artificial Sequence: Synthetic oligonucleotide
cccgagucuugaguggcuc

SEQ ID NO: 148175 - RNA, 19 nt, Artificial Sequence
  Description of Artificial Sequence: Synthetic oligonucleotide
gcaggacacggaaauuggu

SEQ ID NO: 148176 - RNA, 19 nt, Artificial Sequence
  Description of Artificial Sequence: Synthetic oligonucleotide
ccucggacauaggaaggca

SEQ ID NO: 148177 - RNA, 19 nt, Artificial Sequence
  Description of Artificial Sequence: Synthetic oligonucleotide
caggucgaacuugaaucau

SEQ ID NO: 148178 - RNA, 19 nt, Artificial Sequence
  Description of Artificial Sequence: Synthetic oligonucleotide
cccaggcggguuaagauuu

SEQ ID NO: 148179 - RNA, 19 nt, Artificial Sequence
  Description of Artificial Sequence: Synthetic oligonucleotide
ccgggguuucguaggccuc

SEQ ID NO: 148180 - RNA, 19 nt, Artificial Sequence
  Description of Artificial Sequence: Synthetic oligonucleotide
cccgacugugucauucacu

SEQ ID NO: 148181 - RNA, 19 nt, Artificial Sequence
  Description of Artificial Sequence: Synthetic oligonucleotide
gccagucccuacgaugagu

SEQ ID NO: 148182 - RNA, 19 nt, Artificial Sequence
  Description of Artificial Sequence: Synthetic oligonucleotide
ccaccaccaccaccaccac

SEQ ID NO: 148183 - RNA, 19 nt, Artificial Sequence
  Description of Artificial Sequence: Synthetic oligonucleotide
ggcccgaaccuggagcagu

SEQ ID NO: 148184 - RNA, 19 nt, Artificial Sequence
  Description of Artificial Sequence: Synthetic oligonucleotide
gcacgcacucuguguggua

SEQ ID NO: 148185 - RNA, 19 nt, Artificial Sequence
  Description of Artificial Sequence: Synthetic oligonucleotide
ccgacagcacgcacucugu

SEQ ID NO: 148186 - RNA, 19 nt, Artificial Sequence
  Description of Artificial Sequence: Synthetic oligonucleotide
cgguaggccacugcgguua

SEQ ID NO: 148187 - RNA, 19 nt, Artificial Sequence
  Description of Artificial Sequence: Synthetic oligonucleotide
gcgguaggccacugcgguu

SEQ ID NO: 148188 - RNA, 19 nt, Artificial Sequence
  Description of Artificial Sequence: Synthetic oligonucleotide
caccgacagcacgcacucu

SEQ ID NO: 148189 - RNA, 19 nt, Artificial Sequence
  Description of Artificial Sequence: Synthetic oligonucleotide
ccacucccaggcggguuaa

SEQ ID NO: 148190 - RNA, 19 nt, Artificial Sequence
  Description of Artificial Sequence: Synthetic oligonucleotide
cacugccgugcacgauguu

SEQ ID NO: 148191 - RNA, 19 nt, Artificial Sequence
  Description of Artificial Sequence: Synthetic oligonucleotide
cgccgggaauacugugggu

SEQ ID NO: 148192 - RNA, 19 nt, Artificial Sequence
  Description of Artificial Sequence: Synthetic oligonucleotide
agaucuuacuguuagaagc

SEQ ID NO: 148193 - RNA, 19 nt, Artificial Sequence
  Description of Artificial Sequence: Synthetic oligonucleotide
uucaauagaccucagcucg

SEQ ID NO: 148194 - RNA, 19 nt, Artificial Sequence
  Description of Artificial Sequence: Synthetic oligonucleotide
aaguucaugugauaggagg

SEQ ID NO: 148195 - RNA, 19 nt, Artificial Sequence
  Description of Artificial Sequence: Synthetic oligonucleotide
gaaagacccauucaaaucc

SEQ ID NO: 148196 - RNA, 19 nt, Artificial Sequence
  Description of Artificial Sequence: Synthetic oligonucleotide
uuaacuuaccaucuucggg

SEQ ID NO: 148197 - RNA, 19 nt, Artificial Sequence
  Description of Artificial Sequence: Synthetic oligonucleotide
agaugugacauuuaaguag

SEQ ID NO: 148198 - RNA, 19 nt, Artificial Sequence
  Description of Artificial Sequence: Synthetic oligonucleotide
aaggguaauuuauauaaug

SEQ ID NO: 148199 - RNA, 19 nt, Artificial Sequence
  Description of Artificial Sequence: Synthetic oligonucleotide
uugugaacgacuuuaagga

SEQ ID NO: 148200 - RNA, 19 nt, Artificial Sequence
  Description of Artificial Sequence: Synthetic oligonucleotide
aaauguuuggcacaacccu

SEQ ID NO: 148201 - RNA, 19 nt, Artificial Sequence
  Description of Artificial Sequence: Synthetic oligonucleotide
aacgacuuuaaggagacuc

SEQ ID NO: 148202 - RNA, 19 nt, Artificial Sequence
  Description of Artificial Sequence: Synthetic oligonucleotide
aaugccucuacacuauaag

SEQ ID NO: 148203 - RNA, 19 nt, Artificial Sequence
  Description of Artificial Sequence: Synthetic oligonucleotide
cugaacguaguaaugaaag

SEQ ID NO: 148204 - RNA, 19 nt, Artificial Sequence
  Description of Artificial Sequence: Synthetic oligonucleotide
ucugaguuuacuaaugcaa

SEQ ID NO: 148205 - RNA, 19 nt, Artificial Sequence
  Description of Artificial Sequence: Synthetic oligonucleotide
ugcaauuauauaauacugu

SEQ ID NO: 148206 - RNA, 19 nt, Artificial Sequence
  Description of Artificial Sequence: Synthetic oligonucleotide
uaacuuaccaucuucgggu

SEQ ID NO: 148207 - RNA, 19 nt, Artificial Sequence
  Description of Artificial Sequence: Synthetic oligonucleotide
cacagguuaacucuuacag

SEQ ID NO: 148208 - RNA, 19 nt, Artificial Sequence
  Description of Artificial Sequence: Synthetic oligonucleotide
auucaauagaccucagcuc

SEQ ID NO: 148209 - RNA, 19 nt, Artificial Sequence
  Description of Artificial Sequence: Synthetic oligonucleotide
ugaaguagaucuccuguag

SEQ ID NO: 148210 - RNA, 19 nt, Artificial Sequence
  Description of Artificial Sequence: Synthetic oligonucleotide
gauaugggagaacauuucc

SEQ ID NO: 148211 - RNA, 19 nt, Artificial Sequence
  Description of Artificial Sequence: Synthetic oligonucleotide
aagauggccgaguaugcuc

SEQ ID NO: 148212 - RNA, 19 nt, Artificial Sequence
  Description of Artificial Sequence: Synthetic oligonucleotide
aggaacaaauacaagguac

SEQ ID NO: 148213 - RNA, 19 nt, Artificial Sequence
  Description of Artificial Sequence: Synthetic oligonucleotide
aguuaguaaggcuccgccc

SEQ ID NO: 148214 - RNA, 19 nt, Artificial Sequence
  Description of Artificial Sequence: Synthetic oligonucleotide
aacauguuagggauaucgc

SEQ ID NO: 148215 - RNA, 19 nt, Artificial Sequence
  Description of Artificial Sequence: Synthetic oligonucleotide
uuaaauuccagcugcuuuc

SEQ ID NO: 148216 - RNA, 19 nt, Artificial Sequence
  Description of Artificial Sequence: Synthetic oligonucleotide
auuaaccacuucuauucgg

SEQ ID NO: 148217 - RNA, 19 nt, Artificial Sequence
  Description of Artificial Sequence: Synthetic oligonucleotide
acaagaggaguccacgaac

SEQ ID NO: 148218 - RNA, 19 nt, Artificial Sequence
  Description of Artificial Sequence: Synthetic oligonucleotide
aaguaaaugguugcucaac

SEQ ID NO: 148219 - RNA, 19 nt, Artificial Sequence
  Description of Artificial Sequence: Synthetic oligonucleotide
gauaucgcugccaaaguag

SEQ ID NO: 148220 - RNA, 19 nt, Artificial Sequence
  Description of Artificial Sequence: Synthetic oligonucleotide
acgguugagaguuuucagg

SEQ ID NO: 148221 - RNA, 19 nt, Artificial Sequence
  Description of Artificial Sequence: Synthetic oligonucleotide
cuguuaaucacauggagga

SEQ ID NO: 148222 - RNA, 19 nt, Artificial Sequence
  Description of Artificial Sequence: Synthetic oligonucleotide
uuugacaccccagugcagg

SEQ ID NO: 148223 - RNA, 19 nt, Artificial Sequence
  Description of Artificial Sequence: Synthetic oligonucleotide
ugaauuagggauugcacau

SEQ ID NO: 148224 - RNA, 19 nt, Artificial Sequence
  Description of Artificial Sequence: Synthetic oligonucleotide
acuggggcuaguuaguaag

SEQ ID NO: 148225 - RNA, 19 nt, Artificial Sequence
  Description of Artificial Sequence: Synthetic oligonucleotide
ucucugaguuuacuaaugc

SEQ ID NO: 148226 - RNA, 19 nt, Artificial Sequence
  Description of Artificial Sequence: Synthetic oligonucleotide
cagguuaaacccuuguccc

SEQ ID NO: 148227 - RNA, 19 nt, Artificial Sequence
  Description of Artificial Sequence: Synthetic oligonucleotide
ugaacgacuuuaaggagac

SEQ ID NO: 148228 - RNA, 19 nt, Artificial Sequence
  Description of Artificial Sequence: Synthetic oligonucleotide
aacgguugagaguuuucag

SEQ ID NO: 148229 - RNA, 19 nt, Artificial Sequence
  Description of Artificial Sequence: Synthetic oligonucleotide
gcaauuauauaauacugug

SEQ ID NO: 148230 - RNA, 19 nt, Artificial Sequence
  Description of Artificial Sequence: Synthetic oligonucleotide
ucuccauauuacaaaugcc

SEQ ID NO: 148231 - RNA, 19 nt, Artificial Sequence
  Description of Artificial Sequence: Synthetic oligonucleotide
ugacuguaggaaaacagaa

SEQ ID NO: 148232 - RNA, 19 nt, Artificial Sequence
  Description of Artificial Sequence: Synthetic oligonucleotide
aguaaaugguugcucaacu

SEQ ID NO: 148233 - RNA, 19 nt, Artificial Sequence
  Description of Artificial Sequence: Synthetic oligonucleotide
uccacgaacauguuaggga

SEQ ID NO: 148234 - RNA, 19 nt, Artificial Sequence
  Description of Artificial Sequence: Synthetic oligonucleotide
uaguuaguaaggcuccgcc

SEQ ID NO: 148235 - RNA, 19 nt, Artificial Sequence
  Description of Artificial Sequence: Synthetic oligonucleotide
uugaagauuaaagucuugu

SEQ ID NO: 148236 - RNA, 19 nt, Artificial Sequence
  Description of Artificial Sequence: Synthetic oligonucleotide
uugauaugggagaacauuu

SEQ ID NO: 148237 - RNA, 19 nt, Artificial Sequence
  Description of Artificial Sequence: Synthetic oligonucleotide
acuucaucgguuuguagug

SEQ ID NO: 148238 - RNA, 19 nt, Artificial Sequence
  Description of Artificial Sequence: Synthetic oligonucleotide
agugaauuagggauugcac

SEQ ID NO: 148239 - RNA, 19 nt, Artificial Sequence
  Description of Artificial Sequence: Synthetic oligonucleotide
aauuugaagaguccacaua

SEQ ID NO: 148240 - RNA, 19 nt, Artificial Sequence
  Description of Artificial Sequence: Synthetic oligonucleotide
agaggugaaaguuggaaaa

SEQ ID NO: 148241 - RNA, 19 nt, Artificial Sequence
  Description of Artificial Sequence: Synthetic oligonucleotide
ugugaacgacuuuaaggag

SEQ ID NO: 148242 - RNA, 19 nt, Artificial Sequence
  Description of Artificial Sequence: Synthetic oligonucleotide
ucacacaugggcugggaag

SEQ ID NO: 148243 - RNA, 19 nt, Artificial Sequence
  Description of Artificial Sequence: Synthetic oligonucleotide
gguuuuguaacacgcacag

SEQ ID NO: 148244 - RNA, 19 nt, Artificial Sequence
  Description of Artificial Sequence: Synthetic oligonucleotide
ugcauaaggagccaacaua

SEQ ID NO: 148245 - RNA, 19 nt, Artificial Sequence
  Description of Artificial Sequence: Synthetic oligonucleotide
uucucucgggccaggaacg

SEQ ID NO: 148246 - RNA, 19 nt, Artificial Sequence
  Description of Artificial Sequence: Synthetic oligonucleotide
uuuggugcagugcagguuu

SEQ ID NO: 148247 - RNA, 19 nt, Artificial Sequence
  Description of Artificial Sequence: Synthetic oligonucleotide
gcacuuuagucacacaugg

SEQ ID NO: 148248 - RNA, 19 nt, Artificial Sequence
  Description of Artificial Sequence: Synthetic oligonucleotide
gagaguuuucaggaagugg

SEQ ID NO: 148249 - RNA, 19 nt, Artificial Sequence
  Description of Artificial Sequence: Synthetic oligonucleotide
gacccauucaaauccgggc

SEQ ID NO: 148250 - RNA, 19 nt, Artificial Sequence
  Description of Artificial Sequence: Synthetic oligonucleotide
gugaauuagggauugcaca

SEQ ID NO: 148251 - RNA, 19 nt, Artificial Sequence
  Description of Artificial Sequence: Synthetic oligonucleotide
ggagccaacauauuaacca

SEQ ID NO: 148252 - RNA, 19 nt, Artificial Sequence
  Description of Artificial Sequence: Synthetic oligonucleotide
aaagacccauucaaauccg

SEQ ID NO: 148253 - RNA, 19 nt, Artificial Sequence
  Description of Artificial Sequence: Synthetic oligonucleotide
ucugaacguaguaaugaaa

SEQ ID NO: 148254 - RNA, 19 nt, Artificial Sequence
  Description of Artificial Sequence: Synthetic oligonucleotide
acaagguacuugauaaaac

SEQ ID NO: 148255 - RNA, 19 nt, Artificial Sequence
  Description of Artificial Sequence: Synthetic oligonucleotide
agggauaucgcugccaaag

SEQ ID NO: 148256 - RNA, 19 nt, Artificial Sequence
  Description of Artificial Sequence: Synthetic oligonucleotide
uccaguccuaacaucagaa

SEQ ID NO: 148257 - RNA, 19 nt, Artificial Sequence
  Description of Artificial Sequence: Synthetic oligonucleotide
uuagggauaucgcugccaa

SEQ ID NO: 148258 - RNA, 19 nt, Artificial Sequence
  Description of Artificial Sequence: Synthetic oligonucleotide
aaaccaggacuaugacaac

SEQ ID NO: 148259 - RNA, 19 nt, Artificial Sequence
  Description of Artificial Sequence: Synthetic oligonucleotide
ugauaugggagaacauuuc

SEQ ID NO: 148260 - RNA, 19 nt, Artificial Sequence
  Description of Artificial Sequence: Synthetic oligonucleotide
guaguaaugaaaggcaaca

SEQ ID NO: 148261 - RNA, 19 nt, Artificial Sequence
  Description of Artificial Sequence: Synthetic oligonucleotide
uugugcgcagcauaguacu

SEQ ID NO: 148262 - RNA, 19 nt, Artificial Sequence
  Description of Artificial Sequence: Synthetic oligonucleotide
uuggauggggcucucucca

SEQ ID NO: 148263 - RNA, 19 nt, Artificial Sequence
  Description of Artificial Sequence: Synthetic oligonucleotide
ugaguuuacuaaugcaaua

SEQ ID NO: 148264 - RNA, 19 nt, Artificial Sequence
  Description of Artificial Sequence: Synthetic oligonucleotide
uuuuggauggggcucucuc

SEQ ID NO: 148265 - RNA, 19 nt, Artificial Sequence
  Description of Artificial Sequence: Synthetic oligonucleotide
caggcaguaucuuagcauc

SEQ ID NO: 148266 - RNA, 19 nt, Artificial Sequence
  Description of Artificial Sequence: Synthetic oligonucleotide
aguaucuuagcaucacuuu

SEQ ID NO: 148267 - RNA, 19 nt, Artificial Sequence
  Description of Artificial Sequence: Synthetic oligonucleotide
gaucuuacuguuagaagca

SEQ ID NO: 148268 - RNA, 19 nt, Artificial Sequence
  Description of Artificial Sequence: Synthetic oligonucleotide
aggacuaugacaacagagu

SEQ ID NO: 148269 - RNA, 19 nt, Artificial Sequence
  Description of Artificial Sequence: Synthetic oligonucleotide
cuuaguucacugagugggc

SEQ ID NO: 148270 - RNA, 19 nt, Artificial Sequence
  Description of Artificial Sequence: Synthetic oligonucleotide
ugaucaggaaucucugcaa

SEQ ID NO: 148271 - RNA, 19 nt, Artificial Sequence
  Description of Artificial Sequence: Synthetic oligonucleotide
ugggcaacgguugagaguu

SEQ ID NO: 148272 - RNA, 19 nt, Artificial Sequence
  Description of Artificial Sequence: Synthetic oligonucleotide
gcuaaagaacaccaaaguc

SEQ ID NO: 148273 - RNA, 19 nt, Artificial Sequence
  Description of Artificial Sequence: Synthetic oligonucleotide
aguccuaacaucagaauau

SEQ ID NO: 148274 - RNA, 19 nt, Artificial Sequence
  Description of Artificial Sequence: Synthetic oligonucleotide
cugacuguaggaaaacaga

SEQ ID NO: 148275 - RNA, 19 nt, Artificial Sequence
  Description of Artificial Sequence: Synthetic oligonucleotide
gauccuguggauggcggcg

SEQ ID NO: 148276 - RNA, 19 nt, Artificial Sequence
  Description of Artificial Sequence: Synthetic oligonucleotide
ucaucgguuuguaguguug

SEQ ID NO: 148277 - RNA, 19 nt, Artificial Sequence
  Description of Artificial Sequence: Synthetic oligonucleotide
uuccaguccuaacaucaga

SEQ ID NO: 148278 - RNA, 19 nt, Artificial Sequence
  Description of Artificial Sequence: Synthetic oligonucleotide
ugcgcagcauaguacucag

SEQ ID NO: 148279 - RNA, 19 nt, Artificial Sequence
  Description of Artificial Sequence: Synthetic oligonucleotide
ucguuauauaguguuugac

SEQ ID NO: 148280 - RNA, 19 nt, Artificial Sequence
  Description of Artificial Sequence: Synthetic oligonucleotide
uuaguucacugagugggca

SEQ ID NO: 148281 - RNA, 19 nt, Artificial Sequence
  Description of Artificial Sequence: Synthetic oligonucleotide
cauuugagugccagacagc

SEQ ID NO: 148282 - RNA, 19 nt, Artificial Sequence
  Description of Artificial Sequence: Synthetic oligonucleotide
uguuagggauaucgcugcc

SEQ ID NO: 148283 - RNA, 19 nt, Artificial Sequence
  Description of Artificial Sequence: Synthetic oligonucleotide
aucugaacguaguaaugaa

SEQ ID NO: 148284 - RNA, 19 nt, Artificial Sequence
  Description of Artificial Sequence: Synthetic oligonucleotide
uuaguaaggcuccgccccu

SEQ ID NO: 148285 - RNA, 19 nt, Artificial Sequence
  Description of Artificial Sequence: Synthetic oligonucleotide
agauuaaagucuugucaua

SEQ ID NO: 148286 - RNA, 19 nt, Artificial Sequence
  Description of Artificial Sequence: Synthetic oligonucleotide
gguacuugauaaaacugug

SEQ ID NO: 148287 - RNA, 19 nt, Artificial Sequence
  Description of Artificial Sequence: Synthetic oligonucleotide
gauaaaacugugacugcaa

SEQ ID NO: 148288 - RNA, 19 nt, Artificial Sequence
  Description of Artificial Sequence: Synthetic oligonucleotide
ggacuaugacaacagaguc

SEQ ID NO: 148289 - RNA, 19 nt, Artificial Sequence
  Description of Artificial Sequence: Synthetic oligonucleotide
agacccauucaaauccggg

SEQ ID NO: 148290 - RNA, 19 nt, Artificial Sequence
  Description of Artificial Sequence: Synthetic oligonucleotide
gugaacgacuuuaaggaga

SEQ ID NO: 148291 - RNA, 19 nt, Artificial Sequence
  Description of Artificial Sequence: Synthetic oligonucleotide
gucagguuaaacccuuguc

SEQ ID NO: 148292 - RNA, 19 nt, Artificial Sequence
  Description of Artificial Sequence: Synthetic oligonucleotide
cuaguuaguaaggcuccgc

SEQ ID NO: 148293 - RNA, 19 nt, Artificial Sequence
  Description of Artificial Sequence: Synthetic oligonucleotide
agggaaggucaccccauag

SEQ ID NO: 148294 - RNA, 19 nt, Artificial Sequence
  Description of Artificial Sequence: Synthetic oligonucleotide
gguccuacccugcagucag

SEQ ID NO: 148295 - RNA, 19 nt, Artificial Sequence
  Description of Artificial Sequence: Synthetic oligonucleotide
ggaacaucccugaaggaug

SEQ ID NO: 148296 - RNA, 19 nt, Artificial Sequence
  Description of Artificial Sequence: Synthetic oligonucleotide
acgaacauguuagggauau

SEQ ID NO: 148297 - RNA, 19 nt, Artificial Sequence
  Description of Artificial Sequence: Synthetic oligonucleotide
auaguguuugacaccccag

SEQ ID NO: 148298 - RNA, 19 nt, Artificial Sequence
  Description of Artificial Sequence: Synthetic oligonucleotide
aaaugccucuacacuauaa

SEQ ID NO: 148299 - RNA, 19 nt, Artificial Sequence
  Description of Artificial Sequence: Synthetic oligonucleotide
agauauuccggggucaauu

SEQ ID NO: 148300 - RNA, 19 nt, Artificial Sequence
  Description of Artificial Sequence: Synthetic oligonucleotide
agucaguggaauucugauu

SEQ ID NO: 148301 - RNA, 19 nt, Artificial Sequence
  Description of Artificial Sequence: Synthetic oligonucleotide
agaggcccggcuguuaauc

SEQ ID NO: 148302 - RNA, 19 nt, Artificial Sequence
  Description of Artificial Sequence: Synthetic oligonucleotide
auauaguguuugacacccc

SEQ ID NO: 148303 - RNA, 19 nt, Artificial Sequence
  Description of Artificial Sequence: Synthetic oligonucleotide
uugcuccuaugucagguua

SEQ ID NO: 148304 - RNA, 19 nt, Artificial Sequence
  Description of Artificial Sequence: Synthetic oligonucleotide
ccaauagaggaaacacagg

SEQ ID NO: 148305 - RNA, 19 nt, Artificial Sequence
  Description of Artificial Sequence: Synthetic oligonucleotide
aggcccggcuguuaaucac

SEQ ID NO: 148306 - RNA, 19 nt, Artificial Sequence
  Description of Artificial Sequence: Synthetic oligonucleotide
gucaaguaaaugguugcuc

SEQ ID NO: 148307 - RNA, 19 nt, Artificial Sequence
  Description of Artificial Sequence: Synthetic oligonucleotide
cuauaagaaguuuugucuu

SEQ ID NO: 148308 - RNA, 19 nt, Artificial Sequence
  Description of Artificial Sequence: Synthetic oligonucleotide
ucuucgggugguccuuucu

SEQ ID NO: 148309 - RNA, 19 nt, Artificial Sequence
  Description of Artificial Sequence: Synthetic oligonucleotide
cucguuauauaguguuuga

SEQ ID NO: 148310 - RNA, 19 nt, Artificial Sequence
  Description of Artificial Sequence: Synthetic oligonucleotide
guacuugauaaaacuguga

SEQ ID NO: 148311 - RNA, 19 nt, Artificial Sequence
  Description of Artificial Sequence: Synthetic oligonucleotide
uggccgaguaugcucucug

SEQ ID NO: 148312 - RNA, 19 nt, Artificial Sequence
  Description of Artificial Sequence: Synthetic oligonucleotide
uucaucgguuuguaguguu

SEQ ID NO: 148313 - RNA, 19 nt, Artificial Sequence
  Description of Artificial Sequence: Synthetic oligonucleotide
acuucccuaagggcuaaag

SEQ ID NO: 148314 - RNA, 19 nt, Artificial Sequence
  Description of Artificial Sequence: Synthetic oligonucleotide
cuucccuaagggcuaaaga

SEQ ID NO: 148315 - RNA, 19 nt, Artificial Sequence
  Description of Artificial Sequence: Synthetic oligonucleotide
auugaagauuaaagucuug

SEQ ID NO: 148316 - RNA, 19 nt, Artificial Sequence
  Description of Artificial Sequence: Synthetic oligonucleotide
caguccuaacaucagaaua

SEQ ID NO: 148317 - RNA, 19 nt, Artificial Sequence
  Description of Artificial Sequence: Synthetic oligonucleotide
cuggggcaaaugaauguuc

SEQ ID NO: 148318 - RNA, 19 nt, Artificial Sequence
  Description of Artificial Sequence: Synthetic oligonucleotide
auaucgcugccaaaguaga

SEQ ID NO: 148319 - RNA, 19 nt, Artificial Sequence
  Description of Artificial Sequence: Synthetic oligonucleotide
cuaccugugcagcguaaug

SEQ ID NO: 148320 - RNA, 19 nt, Artificial Sequence
  Description of Artificial Sequence: Synthetic oligonucleotide
ggugaaaguuggaaaagca

SEQ ID NO: 148321 - RNA, 19 nt, Artificial Sequence
  Description of Artificial Sequence: Synthetic oligonucleotide
ccacuguucccacuuagcc

SEQ ID NO: 148322 - RNA, 19 nt, Artificial Sequence
  Description of Artificial Sequence: Synthetic oligonucleotide
cguuauauaguguuugaca

SEQ ID NO: 148323 - RNA, 19 nt, Artificial Sequence
  Description of Artificial Sequence: Synthetic oligonucleotide
uuccggggucaauuugugc

SEQ ID NO: 148324 - RNA, 19 nt, Artificial Sequence
  Description of Artificial Sequence: Synthetic oligonucleotide
uauuugugcgcagcauagu

SEQ ID NO: 148325 - RNA, 19 nt, Artificial Sequence
  Description of Artificial Sequence: Synthetic oligonucleotide
gcucguuauauaguguuug

SEQ ID NO: 148326 - RNA, 19 nt, Artificial Sequence
  Description of Artificial Sequence: Synthetic oligonucleotide
cuacacuauaaggccuggg

SEQ ID NO: 148327 - RNA, 19 nt, Artificial Sequence
  Description of Artificial Sequence: Synthetic oligonucleotide
acccaauagaggaaacaca

SEQ ID NO: 148328 - RNA, 19 nt, Artificial Sequence
  Description of Artificial Sequence: Synthetic oligonucleotide
cuucgggugguccuuucuc

SEQ ID NO: 148329 - RNA, 19 nt, Artificial Sequence
  Description of Artificial Sequence: Synthetic oligonucleotide
ugugcgcagcauaguacuc

SEQ ID NO: 148330 - RNA, 19 nt, Artificial Sequence
  Description of Artificial Sequence: Synthetic oligonucleotide
auagugagaccuggggcca

SEQ ID NO: 148331 - RNA, 19 nt, Artificial Sequence
  Description of Artificial Sequence: Synthetic oligonucleotide
auugcuccuaugucagguu

SEQ ID NO: 148332 - RNA, 19 nt, Artificial Sequence
  Description of Artificial Sequence: Synthetic oligonucleotide
acguaguaaugaaaggcaa

SEQ ID NO: 148333 - RNA, 19 nt, Artificial Sequence
  Description of Artificial Sequence: Synthetic oligonucleotide
agcauaguacucagcgucu

SEQ ID NO: 148334 - RNA, 19 nt, Artificial Sequence
  Description of Artificial Sequence: Synthetic oligonucleotide
ccgucuggcuucaacacag

SEQ ID NO: 148335 - RNA, 19 nt, Artificial Sequence
  Description of Artificial Sequence: Synthetic oligonucleotide
gccccuguaguacacggcc

SEQ ID NO: 148336 - RNA, 19 nt, Artificial Sequence
  Description of Artificial Sequence: Synthetic oligonucleotide
gauauuccggggucaauuu

SEQ ID NO: 148337 - RNA, 19 nt, Artificial Sequence
  Description of Artificial Sequence: Synthetic oligonucleotide
ggcuaaagaacaccaaagu

SEQ ID NO: 148338 - RNA, 19 nt, Artificial Sequence
  Description of Artificial Sequence: Synthetic oligonucleotide
ggaugggagacuucucuuc

SEQ ID NO: 148339 - RNA, 19 nt, Artificial Sequence
  Description of Artificial Sequence: Synthetic oligonucleotide
ggcuaguuaguaaggcucc

SEQ ID NO: 148340 - RNA, 19 nt, Artificial Sequence
  Description of Artificial Sequence: Synthetic oligonucleotide
caacgguugagaguuuuca

SEQ ID NO: 148341 - RNA, 19 nt, Artificial Sequence
  Description of Artificial Sequence: Synthetic oligonucleotide
ccacuuagccccuuggguc

SEQ ID NO: 148342 - RNA, 19 nt, Artificial Sequence
  Description of Artificial Sequence: Synthetic oligonucleotide
agaccaauguaaacauuau

SEQ ID NO: 148343 - RNA, 19 nt, Artificial Sequence
  Description of Artificial Sequence: Synthetic oligonucleotide
uagucacacaugggcuggg

SEQ ID NO: 148344 - RNA, 19 nt, Artificial Sequence
  Description of Artificial Sequence: Synthetic oligonucleotide
agccaacauauuaaccacu

SEQ ID NO: 148345 - RNA, 19 nt, Artificial Sequence
  Description of Artificial Sequence: Synthetic oligonucleotide
uucccucacucaugagcgc

SEQ ID NO: 148346 - RNA, 19 nt, Artificial Sequence
  Description of Artificial Sequence: Synthetic oligonucleotide
gggcuaguuaguaaggcuc

SEQ ID NO: 148347 - RNA, 19 nt, Artificial Sequence
  Description of Artificial Sequence: Synthetic oligonucleotide
uccuacccugcagucagcu

SEQ ID NO: 148348 - RNA, 19 nt, Artificial Sequence
  Description of Artificial Sequence: Synthetic oligonucleotide
cuauucggucaauauagau

SEQ ID NO: 148349 - RNA, 19 nt, Artificial Sequence
  Description of Artificial Sequence: Synthetic oligonucleotide
uccgggcuuuccuuuccca

SEQ ID NO: 148350 - RNA, 19 nt, Artificial Sequence
  Description of Artificial Sequence: Synthetic oligonucleotide
gggaagugaugcuaacauc

SEQ ID NO: 148351 - RNA, 19 nt, Artificial Sequence
  Description of Artificial Sequence: Synthetic oligonucleotide
cccuaagggcuaaagaaca

SEQ ID NO: 148352 - RNA, 19 nt, Artificial Sequence
  Description of Artificial Sequence: Synthetic oligonucleotide
gcuaguuaguaaggcuccg

SEQ ID NO: 148353 - RNA, 19 nt, Artificial Sequence
  Description of Artificial Sequence: Synthetic oligonucleotide
agaccucagcucguuauau

SEQ ID NO: 148354 - RNA, 19 nt, Artificial Sequence
  Description of Artificial Sequence: Synthetic oligonucleotide
uucggucaauauagaucau

SEQ ID NO: 148355 - RNA, 19 nt, Artificial Sequence
  Description of Artificial Sequence: Synthetic oligonucleotide
uggcaaagugugugucccu

SEQ ID NO: 148356 - RNA, 19 nt, Artificial Sequence
  Description of Artificial Sequence: Synthetic oligonucleotide
cugguccuacccugcaguc

SEQ ID NO: 148357 - RNA, 19 nt, Artificial Sequence
  Description of Artificial Sequence: Synthetic oligonucleotide
uccgccccuguaguacacg

SEQ ID NO: 148358 - RNA, 19 nt, Artificial Sequence
  Description of Artificial Sequence: Synthetic oligonucleotide
ggguuacuugguuccacac

SEQ ID NO: 148359 - RNA, 19 nt, Artificial Sequence
  Description of Artificial Sequence: Synthetic oligonucleotide
ggcaaagugugugucccug

SEQ ID NO: 148360 - RNA, 19 nt, Artificial Sequence
  Description of Artificial Sequence: Synthetic oligonucleotide
accccauagggagcucaac

SEQ ID NO: 148361 - RNA, 19 nt, Artificial Sequence
  Description of Artificial Sequence: Synthetic oligonucleotide
uagggauaucgcugccaaa

SEQ ID NO: 148362 - RNA, 19 nt, Artificial Sequence
  Description of Artificial Sequence: Synthetic oligonucleotide
ggauaucgcugccaaagua

SEQ ID NO: 148363 - RNA, 19 nt, Artificial Sequence
  Description of Artificial Sequence: Synthetic oligonucleotide
uaguaaggcuccgccccug

SEQ ID NO: 148364 - RNA, 19 nt, Artificial Sequence
  Description of Artificial Sequence: Synthetic oligonucleotide
caaagugugugucccugua

SEQ ID NO: 148365 - RNA, 19 nt, Artificial Sequence
  Description of Artificial Sequence: Synthetic oligonucleotide
cggucaauauagaucauga

SEQ ID NO: 148366 - RNA, 19 nt, Artificial Sequence
  Description of Artificial Sequence: Synthetic oligonucleotide
gugcgcagcauaguacuca

SEQ ID NO: 148367 - RNA, 19 nt, Artificial Sequence
  Description of Artificial Sequence: Synthetic oligonucleotide
gcauaaggagccaacauau

SEQ ID NO: 148368 - RNA, 19 nt, Artificial Sequence
  Description of Artificial Sequence: Synthetic oligonucleotide
cuccucgauccuguggaug

SEQ ID NO: 148369 - RNA, 19 nt, Artificial Sequence
  Description of Artificial Sequence: Synthetic oligonucleotide
gaucaugacuccaccacuu

SEQ ID NO: 148370 - RNA, 19 nt, Artificial Sequence
  Description of Artificial Sequence: Synthetic oligonucleotide
gauggccgaguaugcucuc

SEQ ID NO: 148371 - RNA, 19 nt, Artificial Sequence
  Description of Artificial Sequence: Synthetic oligonucleotide
ggagcucaacuggaagugc

SEQ ID NO: 148372 - RNA, 19 nt, Artificial Sequence
  Description of Artificial Sequence: Synthetic oligonucleotide
gguuacuugguuccacacu

SEQ ID NO: 148373 - RNA, 19 nt, Artificial Sequence
  Description of Artificial Sequence: Synthetic oligonucleotide
ucaugagcgcuggcuuaca

SEQ ID NO: 148374 - RNA, 19 nt, Artificial Sequence
  Description of Artificial Sequence: Synthetic oligonucleotide
agucacacaugggcuggga

SEQ ID NO: 148375 - RNA, 19 nt, Artificial Sequence
  Description of Artificial Sequence: Synthetic oligonucleotide
agcucguuauauaguguuu

SEQ ID NO: 148376 - RNA, 19 nt, Artificial Sequence
  Description of Artificial Sequence: Synthetic oligonucleotide
cugcuucuauaacagcccu

SEQ ID NO: 148377 - RNA, 19 nt, Artificial Sequence
  Description of Artificial Sequence: Synthetic oligonucleotide
gaggguucaagagccuccu

SEQ ID NO: 148378 - RNA, 19 nt, Artificial Sequence
  Description of Artificial Sequence: Synthetic oligonucleotide
caugagcgcuggcuuacaa

SEQ ID NO: 148379 - RNA, 19 nt, Artificial Sequence
  Description of Artificial Sequence: Synthetic oligonucleotide
ggagaacauuuccaccucu

SEQ ID NO: 148380 - RNA, 19 nt, Artificial Sequence
  Description of Artificial Sequence: Synthetic oligonucleotide
cacgaacauguuagggaua

SEQ ID NO: 148381 - RNA, 19 nt, Artificial Sequence
  Description of Artificial Sequence: Synthetic oligonucleotide
cacuggggcuaguuaguaa

SEQ ID NO: 148382 - RNA, 19 nt, Artificial Sequence
  Description of Artificial Sequence: Synthetic oligonucleotide
ccgccccuguaguacacgg

SEQ ID NO: 148383 - RNA, 19 nt, Artificial Sequence
  Description of Artificial Sequence: Synthetic oligonucleotide
caaauccgggcuuuccuuu

SEQ ID NO: 148384 - RNA, 19 nt, Artificial Sequence
  Description of Artificial Sequence: Synthetic oligonucleotide
cuccgccccuguaguacac

SEQ ID NO: 148385 - RNA, 19 nt, Artificial Sequence
  Description of Artificial Sequence: Synthetic oligonucleotide
gcugguccuacccugcagu

SEQ ID NO: 148386 - RNA, 19 nt, Artificial Sequence
  Description of Artificial Sequence: Synthetic oligonucleotide
ccuuguuuuggauggggcu

SEQ ID NO: 148387 - RNA, 19 nt, Artificial Sequence
  Description of Artificial Sequence: Synthetic oligonucleotide
ccacgaacauguuagggau

SEQ ID NO: 148388 - RNA, 19 nt, Artificial Sequence
  Description of Artificial Sequence: Synthetic oligonucleotide
caucaaccuguguucuccu

SEQ ID NO: 148389 - RNA, 19 nt, Artificial Sequence
  Description of Artificial Sequence: Synthetic oligonucleotide
gggauaucgcugccaaagu

SEQ ID NO: 148390 - RNA, 19 nt, Artificial Sequence
  Description of Artificial Sequence: Synthetic oligonucleotide
uagugagaccuggggccau

SEQ ID NO: 148391 - RNA, 19 nt, Artificial Sequence
  Description of Artificial Sequence: Synthetic oligonucleotide
gaacccgggcuugagucau

SEQ ID NO: 148392 - RNA, 19 nt, Artificial Sequence
  Description of Artificial Sequence: Synthetic oligonucleotide
guaaggcuccgccccugua

SEQ ID NO: 148393 - RNA, 19 nt, Artificial Sequence
  Description of Artificial Sequence: Synthetic oligonucleotide
uacuucccuaagggcuaaa

SEQ ID NO: 148394 - RNA, 19 nt, Artificial Sequence
  Description of Artificial Sequence: Synthetic oligonucleotide
caccccauagggagcucaa

SEQ ID NO: 148395 - RNA, 19 nt, Artificial Sequence
  Description of Artificial Sequence: Synthetic oligonucleotide
guacuucccuaagggcuaa

SEQ ID NO: 148396 - RNA, 19 nt, Artificial Sequence
  Description of Artificial Sequence: Synthetic oligonucleotide
gcaaagugugugucccugu

SEQ ID NO: 148397 - RNA, 19 nt, Artificial Sequence
  Description of Artificial Sequence: Synthetic oligonucleotide
ggcccggcuguuaaucaca

SEQ ID NO: 148398 - RNA, 19 nt, Artificial Sequence
  Description of Artificial Sequence: Synthetic oligonucleotide
gcuggggcaaaugaauguu

SEQ ID NO: 148399 - RNA, 19 nt, Artificial Sequence
  Description of Artificial Sequence: Synthetic oligonucleotide
cgccccuguaguacacggc

SEQ ID NO: 148400 - RNA, 19 nt, Artificial Sequence
  Description of Artificial Sequence: Synthetic oligonucleotide
ggauugcacauugcuccua

SEQ ID NO: 148401 - RNA, 19 nt, Artificial Sequence
  Description of Artificial Sequence: Synthetic oligonucleotide
ggauggcggcguagaggag

SEQ ID NO: 148402 - RNA, 19 nt, Artificial Sequence
  Description of Artificial Sequence: Synthetic oligonucleotide
cccggcuguuaaucacaug

SEQ ID NO: 148403 - RNA, 19 nt, Artificial Sequence
  Description of Artificial Sequence: Synthetic oligonucleotide
ggucagagggagggcuaca

SEQ ID NO: 148404 - RNA, 19 nt, Artificial Sequence
  Description of Artificial Sequence: Synthetic oligonucleotide
ggggucaauuugugcuugu

SEQ ID NO: 148405 - RNA, 19 nt, Artificial Sequence
  Description of Artificial Sequence: Synthetic oligonucleotide
guaugcucucuggguuacu

SEQ ID NO: 148406 - RNA, 19 nt, Artificial Sequence
  Description of Artificial Sequence: Synthetic oligonucleotide
aaagugaucaccuucaggg

SEQ ID NO: 148407 - RNA, 19 nt, Artificial Sequence
  Description of Artificial Sequence: Synthetic oligonucleotide
ucgauaacaaauuugaccg

SEQ ID NO: 148408 - RNA, 19 nt, Artificial Sequence
  Description of Artificial Sequence: Synthetic oligonucleotide
aauaucucgaugaauaggg

SEQ ID NO: 148409 - RNA, 19 nt, Artificial Sequence
  Description of Artificial Sequence: Synthetic oligonucleotide
acaaauuugaccguguggc

SEQ ID NO: 148410 - RNA, 19 nt, Artificial Sequence
  Description of Artificial Sequence: Synthetic oligonucleotide
uuaaguaguuaccugaccc

SEQ ID NO: 148411 - RNA, 19 nt, Artificial Sequence
  Description of Artificial Sequence: Synthetic oligonucleotide
uuuggucaaauuaugaaug

SEQ ID NO: 148412 - RNA, 19 nt, Artificial Sequence
  Description of Artificial Sequence: Synthetic oligonucleotide
aauuugaccguguggcucc

SEQ ID NO: 148413 - RNA, 19 nt, Artificial Sequence
  Description of Artificial Sequence: Synthetic oligonucleotide
aguaccuuaggauuguuuc

SEQ ID NO: 148414 - RNA, 19 nt, Artificial Sequence
  Description of Artificial Sequence: Synthetic oligonucleotide
uguuaaauguccaggacug

SEQ ID NO: 148415 - RNA, 19 nt, Artificial Sequence
  Description of Artificial Sequence: Synthetic oligonucleotide
ugaaauaguacugugguac

SEQ ID NO: 148416 - RNA, 19 nt, Artificial Sequence
  Description of Artificial Sequence: Synthetic oligonucleotide
gaagacuacaacaucaccc

SEQ ID NO: 148417 - RNA, 19 nt, Artificial Sequence
  Description of Artificial Sequence: Synthetic oligonucleotide
uuaaguuggaaccuuccug

SEQ ID NO: 148418 - RNA, 19 nt, Artificial Sequence
  Description of Artificial Sequence: Synthetic oligonucleotide
cuuaagaaguccaagcaac

SEQ ID NO: 148419 - RNA, 19 nt, Artificial Sequence
  Description of Artificial Sequence: Synthetic oligonucleotide
aucugcauaaaauacccag

SEQ ID NO: 148420 - RNA, 19 nt, Artificial Sequence
  Description of Artificial Sequence: Synthetic oligonucleotide
cuggguuuaaguuggaacc

SEQ ID NO: 148421 - RNA, 19 nt, Artificial Sequence
  Description of Artificial Sequence: Synthetic oligonucleotide
aacgcucuuggucuguuac

SEQ ID NO: 148422 - RNA, 19 nt, Artificial Sequence
  Description of Artificial Sequence: Synthetic oligonucleotide
aaauuugaccguguggcuc

SEQ ID NO: 148423 - RNA, 19 nt, Artificial Sequence
  Description of Artificial Sequence: Synthetic oligonucleotide
agacaugaugauuccaaac

SEQ ID NO: 148424 - RNA, 19 nt, Artificial Sequence
  Description of Artificial Sequence: Synthetic oligonucleotide
caugcuucucucuuggacg

SEQ ID NO: 148425 - RNA, 19 nt, Artificial Sequence
  Description of Artificial Sequence: Synthetic oligonucleotide
ucucgguuucauccgaugg

SEQ ID NO: 148426 - RNA, 19 nt, Artificial Sequence
  Description of Artificial Sequence: Synthetic oligonucleotide
aaggcaauauucagcacac

SEQ ID NO: 148427 - RNA, 19 nt, Artificial Sequence
  Description of Artificial Sequence: Synthetic oligonucleotide
uucaugaagucgcagcggc

SEQ ID NO: 148428 - RNA, 19 nt, Artificial Sequence
  Description of Artificial Sequence: Synthetic oligonucleotide
uuccauaguaggaacugag

SEQ ID NO: 148429 - RNA, 19 nt, Artificial Sequence
  Description of Artificial Sequence: Synthetic oligonucleotide
aauaguacugugguaccag

SEQ ID NO: 148430 - RNA, 19 nt, Artificial Sequence
  Description of Artificial Sequence: Synthetic oligonucleotide
aguguguuaaauguccagg

SEQ ID NO: 148431 - RNA, 19 nt, Artificial Sequence
  Description of Artificial Sequence: Synthetic oligonucleotide
gauaaggcguaaaauagac

SEQ ID NO: 148432 - RNA, 19 nt, Artificial Sequence
  Description of Artificial Sequence: Synthetic oligonucleotide
uuuaaguuggaaccuuccu

SEQ ID NO: 148433 - RNA, 19 nt, Artificial Sequence
  Description of Artificial Sequence: Synthetic oligonucleotide
aguagcuugagagaggaug

SEQ ID NO: 148434 - RNA, 19 nt, Artificial Sequence
  Description of Artificial Sequence: Synthetic oligonucleotide
gauaacgucugccauccug

SEQ ID NO: 148435 - RNA, 19 nt, Artificial Sequence
  Description of Artificial Sequence: Synthetic oligonucleotide
aggccguucguucacauuc

SEQ ID NO: 148436 - RNA, 19 nt, Artificial Sequence
  Description of Artificial Sequence: Synthetic oligonucleotide
uaucucgaugaauagggca

SEQ ID NO: 148437 - RNA, 19 nt, Artificial Sequence
  Description of Artificial Sequence: Synthetic oligonucleotide
gauuguuucacuggugcag

SEQ ID NO: 148438 - RNA, 19 nt, Artificial Sequence
  Description of Artificial Sequence: Synthetic oligonucleotide
uaggaauaguaacuuuaag

SEQ ID NO: 148439 - RNA, 19 nt, Artificial Sequence
  Description of Artificial Sequence: Synthetic oligonucleotide
gaaauaguacugugguacc

SEQ ID NO: 148440 - RNA, 19 nt, Artificial Sequence
  Description of Artificial Sequence: Synthetic oligonucleotide
guacacaacuuccacgggg

SEQ ID NO: 148441 - RNA, 19 nt, Artificial Sequence
  Description of Artificial Sequence: Synthetic oligonucleotide
ugagcaaccugcuuaugug

SEQ ID NO: 148442 - RNA, 19 nt, Artificial Sequence
  Description of Artificial Sequence: Synthetic oligonucleotide
uguguuaaauguccaggac

SEQ ID NO: 148443 - RNA, 19 nt, Artificial Sequence
  Description of Artificial Sequence: Synthetic oligonucleotide
uaacaaauuugaccgugug

SEQ ID NO: 148444 - RNA, 19 nt, Artificial Sequence
  Description of Artificial Sequence: Synthetic oligonucleotide
uggaaucuagggauucggg

SEQ ID NO: 148445 - RNA, 19 nt, Artificial Sequence
  Description of Artificial Sequence: Synthetic oligonucleotide
aaacccgugucccucguug

SEQ ID NO: 148446 - RNA, 19 nt, Artificial Sequence
  Description of Artificial Sequence: Synthetic oligonucleotide
uucugcucggauaacgucu

SEQ ID NO: 148447 - RNA, 19 nt, Artificial Sequence
  Description of Artificial Sequence: Synthetic oligonucleotide
cauuucgucggcuacccgc

SEQ ID NO: 148448 - RNA, 19 nt, Artificial Sequence
  Description of Artificial Sequence: Synthetic oligonucleotide
aguuuguaauaucucgaug

SEQ ID NO: 148449 - RNA, 19 nt, Artificial Sequence
  Description of Artificial Sequence: Synthetic oligonucleotide
gcauaaauaguucaggaga

SEQ ID NO: 148450 - RNA, 19 nt, Artificial Sequence
  Description of Artificial Sequence: Synthetic oligonucleotide
agcucgauccgcuugauaa

SEQ ID NO: 148451 - RNA, 19 nt, Artificial Sequence
  Description of Artificial Sequence: Synthetic oligonucleotide
gaaccugagagcucuggcc

SEQ ID NO: 148452 - RNA, 19 nt, Artificial Sequence
  Description of Artificial Sequence: Synthetic oligonucleotide
agcauuaaguaguuaccug

SEQ ID NO: 148453 - RNA, 19 nt, Artificial Sequence
  Description of Artificial Sequence: Synthetic oligonucleotide
aacaggauuggacaucauu

SEQ ID NO: 148454 - RNA, 19 nt, Artificial Sequence
  Description of Artificial Sequence: Synthetic oligonucleotide
uccaaacucggagagauuc

SEQ ID NO: 148455 - RNA, 19 nt, Artificial Sequence
  Description of Artificial Sequence: Synthetic oligonucleotide
auagggaagcucgauccgc

SEQ ID NO: 148456 - RNA, 19 nt, Artificial Sequence
  Description of Artificial Sequence: Synthetic oligonucleotide
auagcuacccagaacagga

SEQ ID NO: 148457 - RNA, 19 nt, Artificial Sequence
  Description of Artificial Sequence: Synthetic oligonucleotide
uuaugaaugauugguuaaa

SEQ ID NO: 148458 - RNA, 19 nt, Artificial Sequence
  Description of Artificial Sequence: Synthetic oligonucleotide
caaauuaugaaugauuggu

SEQ ID NO: 148459 - RNA, 19 nt, Artificial Sequence
  Description of Artificial Sequence: Synthetic oligonucleotide
uucuaagaguucugcucgg

SEQ ID NO: 148460 - RNA, 19 nt, Artificial Sequence
  Description of Artificial Sequence: Synthetic oligonucleotide
ggcacguuuccauaguagg

SEQ ID NO: 148461 - RNA, 19 nt, Artificial Sequence
  Description of Artificial Sequence: Synthetic oligonucleotide
uuaaauguccaggacuguc

SEQ ID NO: 148462 - RNA, 19 nt, Artificial Sequence
  Description of Artificial Sequence: Synthetic oligonucleotide
ugaggaaccugagagcucu

SEQ ID NO: 148463 - RNA, 19 nt, Artificial Sequence
  Description of Artificial Sequence: Synthetic oligonucleotide
gauggaguagcuugagaga

SEQ ID NO: 148464 - RNA, 19 nt, Artificial Sequence
  Description of Artificial Sequence: Synthetic oligonucleotide
uugcuaguaacacauccuu

SEQ ID NO: 148465 - RNA, 19 nt, Artificial Sequence
  Description of Artificial Sequence: Synthetic oligonucleotide
ucggcugacgcucgcgugg

SEQ ID NO: 148466 - RNA, 19 nt, Artificial Sequence
  Description of Artificial Sequence: Synthetic oligonucleotide
uuaugagcuucaguucggg

SEQ ID NO: 148467 - RNA, 19 nt, Artificial Sequence
  Description of Artificial Sequence: Synthetic oligonucleotide
ugcuggcucacuucaacgc

SEQ ID NO: 148468 - RNA, 19 nt, Artificial Sequence
  Description of Artificial Sequence: Synthetic oligonucleotide
gaguucugcucggauaacg

SEQ ID NO: 148469 - RNA, 19 nt, Artificial Sequence
  Description of Artificial Sequence: Synthetic oligonucleotide
ucagggugcaagaauguuu

SEQ ID NO: 148470 - RNA, 19 nt, Artificial Sequence
  Description of Artificial Sequence: Synthetic oligonucleotide
uaugaaugauugguuaaaa

SEQ ID NO: 148471 - RNA, 19 nt, Artificial Sequence
  Description of Artificial Sequence: Synthetic oligonucleotide
guagcuugagagaggaugc

SEQ ID NO: 148472 - RNA, 19 nt, Artificial Sequence
  Description of Artificial Sequence: Synthetic oligonucleotide
uaagaguucugcucggaua

SEQ ID NO: 148473 - RNA, 19 nt, Artificial Sequence
  Description of Artificial Sequence: Synthetic oligonucleotide
cauagcuacccagaacagg

SEQ ID NO: 148474 - RNA, 19 nt, Artificial Sequence
  Description of Artificial Sequence: Synthetic oligonucleotide
cucgguuucauccgauggc

SEQ ID NO: 148475 - RNA, 19 nt, Artificial Sequence
  Description of Artificial Sequence: Synthetic oligonucleotide
auaucucgaugaauagggc

SEQ ID NO: 148476 - RNA, 19 nt, Artificial Sequence
  Description of Artificial Sequence: Synthetic oligonucleotide
guauacuuggcaucucuuc

SEQ ID NO: 148477 - RNA, 19 nt, Artificial Sequence
  Description of Artificial Sequence: Synthetic oligonucleotide
ucgguuucauccgauggcc

SEQ ID NO: 148478 - RNA, 19 nt, Artificial Sequence
  Description of Artificial Sequence: Synthetic oligonucleotide
accaacgucgauaacaaau

SEQ ID NO: 148479 - RNA, 19 nt, Artificial Sequence
  Description of Artificial Sequence: Synthetic oligonucleotide
guggaagaggacccauucg

SEQ ID NO: 148480 - RNA, 19 nt, Artificial Sequence
  Description of Artificial Sequence: Synthetic oligonucleotide
agaacaggauuggacauca

SEQ ID NO: 148481 - RNA, 19 nt, Artificial Sequence
  Description of Artificial Sequence: Synthetic oligonucleotide
uaccuuaggauuguuucac

SEQ ID NO: 148482 - RNA, 19 nt, Artificial Sequence
  Description of Artificial Sequence: Synthetic oligonucleotide
gcauuaaguaguuaccuga

SEQ ID NO: 148483 - RNA, 19 nt, Artificial Sequence
  Description of Artificial Sequence: Synthetic oligonucleotide
cacuucaacgcucuugguc

SEQ ID NO: 148484 - RNA, 19 nt, Artificial Sequence
  Description of Artificial Sequence: Synthetic oligonucleotide
acaggauuggacaucauuu

SEQ ID NO: 148485 - RNA, 19 nt, Artificial Sequence
  Description of Artificial Sequence: Synthetic oligonucleotide
gcguaaaauagacucgaag

SEQ ID NO: 148486 - RNA, 19 nt, Artificial Sequence
  Description of Artificial Sequence: Synthetic oligonucleotide
agcucgggauuucagcaag

SEQ ID NO: 148487 - RNA, 19 nt, Artificial Sequence
  Description of Artificial Sequence: Synthetic oligonucleotide
acgucguccaagaugauga

SEQ ID NO: 148488 - RNA, 19 nt, Artificial Sequence
  Description of Artificial Sequence: Synthetic oligonucleotide
ucggagaggucacuggauc

SEQ ID NO: 148489 - RNA, 19 nt, Artificial Sequence
  Description of Artificial Sequence: Synthetic oligonucleotide
guacaguaccuuaggauug

SEQ ID NO: 148490 - RNA, 19 nt, Artificial Sequence
  Description of Artificial Sequence: Synthetic oligonucleotide
auuucaaagauaaggcgua

SEQ ID NO: 148491 - RNA, 19 nt, Artificial Sequence
  Description of Artificial Sequence: Synthetic oligonucleotide
acagguugcauuucucuuu

SEQ ID NO: 148492 - RNA, 19 nt, Artificial Sequence
  Description of Artificial Sequence: Synthetic oligonucleotide
uucgucggcuacccgcagg

SEQ ID NO: 148493 - RNA, 19 nt, Artificial Sequence
  Description of Artificial Sequence: Synthetic oligonucleotide
agauaaggcguaaaauaga

SEQ ID NO: 148494 - RNA, 19 nt, Artificial Sequence
  Description of Artificial Sequence: Synthetic oligonucleotide
agaacaguugaggaaguaa

SEQ ID NO: 148495 - RNA, 19 nt, Artificial Sequence
  Description of Artificial Sequence: Synthetic oligonucleotide
agcaauucucaaaaggaau

SEQ ID NO: 148496 - RNA, 19 nt, Artificial Sequence
  Description of Artificial Sequence: Synthetic oligonucleotide
agcgagcucaggccguucg

SEQ ID NO: 148497 - RNA, 19 nt, Artificial Sequence
  Description of Artificial Sequence: Synthetic oligonucleotide
ugcuaguaacacauccuua

SEQ ID NO: 148498 - RNA, 19 nt, Artificial Sequence
  Description of Artificial Sequence: Synthetic oligonucleotide
ucggauaacgucugccauc

SEQ ID NO: 148499 - RNA, 19 nt, Artificial Sequence
  Description of Artificial Sequence: Synthetic oligonucleotide
ucucgaugaauagggcaag

SEQ ID NO: 148500 - RNA, 19 nt, Artificial Sequence
  Description of Artificial Sequence: Synthetic oligonucleotide
uggguuuaaguuggaaccu

SEQ ID NO: 148501 - RNA, 19 nt, Artificial Sequence
  Description of Artificial Sequence: Synthetic oligonucleotide
ucaugacaccacuucucca

SEQ ID NO: 148502 - RNA, 19 nt, Artificial Sequence
  Description of Artificial Sequence: Synthetic oligonucleotide
guucaugaagucgcagcgg

SEQ ID NO: 148503 - RNA, 19 nt, Artificial Sequence
  Description of Artificial Sequence: Synthetic oligonucleotide
gcuaguaacacauccuuaa

SEQ ID NO: 148504 - RNA, 19 nt, Artificial Sequence
  Description of Artificial Sequence: Synthetic oligonucleotide
gguuacugaaauaguacug

SEQ ID NO: 148505 - RNA, 19 nt, Artificial Sequence
  Description of Artificial Sequence: Synthetic oligonucleotide
guaccuuaggauuguuuca

SEQ ID NO: 148506 - RNA, 19 nt, Artificial Sequence
  Description of Artificial Sequence: Synthetic oligonucleotide
cucaaacccgugucccucg

SEQ ID NO: 148507 - RNA, 19 nt, Artificial Sequence
  Description of Artificial Sequence: Synthetic oligonucleotide
aacgucugccauccugaga

SEQ ID NO: 148508 - RNA, 19 nt, Artificial Sequence
  Description of Artificial Sequence: Synthetic oligonucleotide
cuuuccaaaccaacgucga

SEQ ID NO: 148509 - RNA, 19 nt, Artificial Sequence
  Description of Artificial Sequence: Synthetic oligonucleotide
ucacuucuaugagaggcac

SEQ ID NO: 148510 - RNA, 19 nt, Artificial Sequence
  Description of Artificial Sequence: Synthetic oligonucleotide
acuuggcaucucuucucgg

SEQ ID NO: 148511 - RNA, 19 nt, Artificial Sequence
  Description of Artificial Sequence: Synthetic oligonucleotide
cacuucuaugagaggcacg

SEQ ID NO: 148512 - RNA, 19 nt, Artificial Sequence
  Description of Artificial Sequence: Synthetic oligonucleotide
aggcguaaaauagacucga

SEQ ID NO: 148513 - RNA, 19 nt, Artificial Sequence
  Description of Artificial Sequence: Synthetic oligonucleotide
uugaccguguggcuccaga

SEQ ID NO: 148514 - RNA, 19 nt, Artificial Sequence
  Description of Artificial Sequence: Synthetic oligonucleotide
guuccgacagaagcugacg

SEQ ID NO: 148515 - RNA, 19 nt, Artificial Sequence
  Description of Artificial Sequence: Synthetic oligonucleotide
ugcucggauaacgucugcc

SEQ ID NO: 148516 - RNA, 19 nt, Artificial Sequence
  Description of Artificial Sequence: Synthetic oligonucleotide
aggaguuuggaugcuccag

SEQ ID NO: 148517 - RNA, 19 nt, Artificial Sequence
  Description of Artificial Sequence: Synthetic oligonucleotide
uauugcacucugucucgga

SEQ ID NO: 148518 - RNA, 19 nt, Artificial Sequence
  Description of Artificial Sequence: Synthetic oligonucleotide
agcgaugguuagcauuuca

SEQ ID NO: 148519 - RNA, 19 nt, Artificial Sequence
  Description of Artificial Sequence: Synthetic oligonucleotide
uggucaaauuaugaaugau

SEQ ID NO: 148520 - RNA, 19 nt, Artificial Sequence
  Description of Artificial Sequence: Synthetic oligonucleotide
agcuugagagaggaugcag

SEQ ID NO: 148521 - RNA, 19 nt, Artificial Sequence
  Description of Artificial Sequence: Synthetic oligonucleotide
aggugagcaguuaauuaug

SEQ ID NO: 148522 - RNA, 19 nt, Artificial Sequence
  Description of Artificial Sequence: Synthetic oligonucleotide
uacaguaccuuaggauugu

SEQ ID NO: 148523 - RNA, 19 nt, Artificial Sequence
  Description of Artificial Sequence: Synthetic oligonucleotide
uuggaccgccgucugcuug

SEQ ID NO: 148524 - RNA, 19 nt, Artificial Sequence
  Description of Artificial Sequence: Synthetic oligonucleotide
gcugaugggcugaaggacg

SEQ ID NO: 148525 - RNA, 19 nt, Artificial Sequence
  Description of Artificial Sequence: Synthetic oligonucleotide
uuucaaagauaaggcguaa

SEQ ID NO: 148526 - RNA, 19 nt, Artificial Sequence
  Description of Artificial Sequence: Synthetic oligonucleotide
cauccauuucgucggcuac

SEQ ID NO: 148527 - RNA, 19 nt, Artificial Sequence
  Description of Artificial Sequence: Synthetic oligonucleotide
uggcucacuucaacgcucu

SEQ ID NO: 148528 - RNA, 19 nt, Artificial Sequence
  Description of Artificial Sequence: Synthetic oligonucleotide
auaaggcguaaaauagacu

SEQ ID NO: 148529 - RNA, 19 nt, Artificial Sequence
  Description of Artificial Sequence: Synthetic oligonucleotide
agaggcacguuuccauagu

SEQ ID NO: 148530 - RNA, 19 nt, Artificial Sequence
  Description of Artificial Sequence: Synthetic oligonucleotide
cugacgcucgcgugguucc

SEQ ID NO: 148531 - RNA, 19 nt, Artificial Sequence
  Description of Artificial Sequence: Synthetic oligonucleotide
agcaacacgucagucgcca

SEQ ID NO: 148532 - RNA, 19 nt, Artificial Sequence
  Description of Artificial Sequence: Synthetic oligonucleotide
acauccauuucgucggcua

SEQ ID NO: 148533 - RNA, 19 nt, Artificial Sequence
  Description of Artificial Sequence: Synthetic oligonucleotide
caacacgucagucgccaug

SEQ ID NO: 148534 - RNA, 19 nt, Artificial Sequence
  Description of Artificial Sequence: Synthetic oligonucleotide
gcaguuaauuaugagcuuc

SEQ ID NO: 148535 - RNA, 19 nt, Artificial Sequence
  Description of Artificial Sequence: Synthetic oligonucleotide
cuugcuaguaacacauccu

SEQ ID NO: 148536 - RNA, 19 nt, Artificial Sequence
  Description of Artificial Sequence: Synthetic oligonucleotide
cuagaucuggguuuaaguu

SEQ ID NO: 148537 - RNA, 19 nt, Artificial Sequence
  Description of Artificial Sequence: Synthetic oligonucleotide
ucgggccuugcuaguaaca

SEQ ID NO: 148538 - RNA, 19 nt, Artificial Sequence
  Description of Artificial Sequence: Synthetic oligonucleotide
guucugcucggauaacguc

SEQ ID NO: 148539 - RNA, 19 nt, Artificial Sequence
  Description of Artificial Sequence: Synthetic oligonucleotide
cauaguaggaacugaguuu

SEQ ID NO: 148540 - RNA, 19 nt, Artificial Sequence
  Description of Artificial Sequence: Synthetic oligonucleotide
agcaaccugcuuaugugug

SEQ ID NO: 148541 - RNA, 19 nt, Artificial Sequence
  Description of Artificial Sequence: Synthetic oligonucleotide
agcaguuaauuaugagcuu

SEQ ID NO: 148542 - RNA, 19 nt, Artificial Sequence
  Description of Artificial Sequence: Synthetic oligonucleotide
agggugcaagaauguuuuc

SEQ ID NO: 148543 - RNA, 19 nt, Artificial Sequence
  Description of Artificial Sequence: Synthetic oligonucleotide
guagacguugaugagugua

SEQ ID NO: 148544 - RNA, 19 nt, Artificial Sequence
  Description of Artificial Sequence: Synthetic oligonucleotide
gaggaguuuggaugcucca

SEQ ID NO: 148545 - RNA, 19 nt, Artificial Sequence
  Description of Artificial Sequence: Synthetic oligonucleotide
ugucccucguugcuggguu

SEQ ID NO: 148546 - RNA, 19 nt, Artificial Sequence
  Description of Artificial Sequence: Synthetic oligonucleotide
uucgggccuugcuaguaac

SEQ ID NO: 148547 - RNA, 19 nt, Artificial Sequence
  Description of Artificial Sequence: Synthetic oligonucleotide
uguagacguugaugagugu

SEQ ID NO: 148548 - RNA, 19 nt, Artificial Sequence
  Description of Artificial Sequence: Synthetic oligonucleotide
cucgaugaauagggcaagc

SEQ ID NO: 148549 - RNA, 19 nt, Artificial Sequence
  Description of Artificial Sequence: Synthetic oligonucleotide
uggaccgccgucugcuugu

SEQ ID NO: 148550 - RNA, 19 nt, Artificial Sequence
  Description of Artificial Sequence: Synthetic oligonucleotide
aguaaucaugacaccacuu

SEQ ID NO: 148551 - RNA, 19 nt, Artificial Sequence
  Description of Artificial Sequence: Synthetic oligonucleotide
uuucgucggcuacccgcag

SEQ ID NO: 148552 - RNA, 19 nt, Artificial Sequence
  Description of Artificial Sequence: Synthetic oligonucleotide
aggcacguuuccauaguag

SEQ ID NO: 148553 - RNA, 19 nt, Artificial Sequence
  Description of Artificial Sequence: Synthetic oligonucleotide
auuucgucggcuacccgca

SEQ ID NO: 148554 - RNA, 19 nt, Artificial Sequence
  Description of Artificial Sequence: Synthetic oligonucleotide
guugcuggguuacccucug

SEQ ID NO: 148555 - RNA, 19 nt, Artificial Sequence
  Description of Artificial Sequence: Synthetic oligonucleotide
gcucgcgugguuccgacag

SEQ ID NO: 148556 - RNA, 19 nt, Artificial Sequence
  Description of Artificial Sequence: Synthetic oligonucleotide
auagggcaagccaucaaaa

SEQ ID NO: 148557 - RNA, 19 nt, Artificial Sequence
  Description of Artificial Sequence: Synthetic oligonucleotide
ugaccguguggcuccagau

SEQ ID NO: 148558 - RNA, 19 nt, Artificial Sequence
  Description of Artificial Sequence: Synthetic oligonucleotide
ucgauccgcuugauaauuu

SEQ ID NO: 148559 - RNA, 19 nt, Artificial Sequence
  Description of Artificial Sequence: Synthetic oligonucleotide
ucaaacccgugucccucgu

SEQ ID NO: 148560 - RNA, 19 nt, Artificial Sequence
  Description of Artificial Sequence: Synthetic oligonucleotide
cugaaauaguacuguggua

SEQ ID NO: 148561 - RNA, 19 nt, Artificial Sequence
  Description of Artificial Sequence: Synthetic oligonucleotide
ccgacagaagcugacgccg

SEQ ID NO: 148562 - RNA, 19 nt, Artificial Sequence
  Description of Artificial Sequence: Synthetic oligonucleotide
guuucauccgauggccuga

SEQ ID NO: 148563 - RNA, 19 nt, Artificial Sequence
  Description of Artificial Sequence: Synthetic oligonucleotide
caggaugcuaagauagacu

SEQ ID NO: 148564 - RNA, 19 nt, Artificial Sequence
  Description of Artificial Sequence: Synthetic oligonucleotide
ggauuguuucacuggugca

SEQ ID NO: 148565 - RNA, 19 nt, Artificial Sequence
  Description of Artificial Sequence: Synthetic oligonucleotide
acgcucgcgugguuccgac

SEQ ID NO: 148566 - RNA, 19 nt, Artificial Sequence
  Description of Artificial Sequence: Synthetic oligonucleotide
ggaagcucgauccgcuuga

SEQ ID NO: 148567 - RNA, 19 nt, Artificial Sequence
  Description of Artificial Sequence: Synthetic oligonucleotide
ggcuuaaggggccucaugu

SEQ ID NO: 148568 - RNA, 19 nt, Artificial Sequence
  Description of Artificial Sequence: Synthetic oligonucleotide
gaggcacguuuccauagua

SEQ ID NO: 148569 - RNA, 19 nt, Artificial Sequence
  Description of Artificial Sequence: Synthetic oligonucleotide
gguuguauaccugucuucu

SEQ ID NO: 148570 - RNA, 19 nt, Artificial Sequence
  Description of Artificial Sequence: Synthetic oligonucleotide
uucccgagcucggcugacg

SEQ ID NO: 148571 - RNA, 19 nt, Artificial Sequence
  Description of Artificial Sequence: Synthetic oligonucleotide
gguuuaaguuggaaccuuc

SEQ ID NO: 148572 - RNA, 19 nt, Artificial Sequence
  Description of Artificial Sequence: Synthetic oligonucleotide
ugugagcauuaaguaguua

SEQ ID NO: 148573 - RNA, 19 nt, Artificial Sequence
  Description of Artificial Sequence: Synthetic oligonucleotide
aagcucgauccgcuugaua

SEQ ID NO: 148574 - RNA, 19 nt, Artificial Sequence
  Description of Artificial Sequence: Synthetic oligonucleotide
agacguugaugaguguaaa

SEQ ID NO: 148575 - RNA, 19 nt, Artificial Sequence
  Description of Artificial Sequence: Synthetic oligonucleotide
ucaggccguucguucacau

SEQ ID NO: 148576 - RNA, 19 nt, Artificial Sequence
  Description of Artificial Sequence: Synthetic oligonucleotide
gacacgaccacaaccugau

SEQ ID NO: 148577 - RNA, 19 nt, Artificial Sequence
  Description of Artificial Sequence: Synthetic oligonucleotide
uucaacgcucuuggucugu

SEQ ID NO: 148578 - RNA, 19 nt, Artificial Sequence
  Description of Artificial Sequence: Synthetic oligonucleotide
auucgggaaaauagcguuu

SEQ ID NO: 148579 - RNA, 19 nt, Artificial Sequence
  Description of Artificial Sequence: Synthetic oligonucleotide
ggguuguauaccugucuuc

SEQ ID NO: 148580 - RNA, 19 nt, Artificial Sequence
  Description of Artificial Sequence: Synthetic oligonucleotide
agcucgccuagaucugggu

SEQ ID NO: 148581 - RNA, 19 nt, Artificial Sequence
  Description of Artificial Sequence: Synthetic oligonucleotide
ugacgcucgcgugguuccg

SEQ ID NO: 148582 - RNA, 19 nt, Artificial Sequence
  Description of Artificial Sequence: Synthetic oligonucleotide
cagggugcaagaauguuuu

SEQ ID NO: 148583 - RNA, 19 nt, Artificial Sequence
  Description of Artificial Sequence: Synthetic oligonucleotide
cucggcugacgcucgcgug

SEQ ID NO: 148584 - RNA, 19 nt, Artificial Sequence
  Description of Artificial Sequence: Synthetic oligonucleotide
cggauaacgucugccaucc

SEQ ID NO: 148585 - RNA, 19 nt, Artificial Sequence
  Description of Artificial Sequence: Synthetic oligonucleotide
ggaccugugugcauaucac

SEQ ID NO: 148586 - RNA, 19 nt, Artificial Sequence
  Description of Artificial Sequence: Synthetic oligonucleotide
uuugaccguguggcuccag

SEQ ID NO: 148587 - RNA, 19 nt, Artificial Sequence
  Description of Artificial Sequence: Synthetic oligonucleotide
ucgccuagaucuggguuua

SEQ ID NO: 148588 - RNA, 19 nt, Artificial Sequence
  Description of Artificial Sequence: Synthetic oligonucleotide
gacgagggaguuggcucug

SEQ ID NO: 148589 - RNA, 19 nt, Artificial Sequence
  Description of Artificial Sequence: Synthetic oligonucleotide
augcuaagauagacuuuga

SEQ ID NO: 148590 - RNA, 19 nt, Artificial Sequence
  Description of Artificial Sequence: Synthetic oligonucleotide
gccuagaucuggguuuaag

SEQ ID NO: 148591 - RNA, 19 nt, Artificial Sequence
  Description of Artificial Sequence: Synthetic oligonucleotide
cuucccgagcucggggcgc

SEQ ID NO: 148592 - RNA, 19 nt, Artificial Sequence
  Description of Artificial Sequence: Synthetic oligonucleotide
guucgggccuugcuaguaa

SEQ ID NO: 148593 - RNA, 19 nt, Artificial Sequence
  Description of Artificial Sequence: Synthetic oligonucleotide
ggcuuucaauaaacugugc

SEQ ID NO: 148594 - RNA, 19 nt, Artificial Sequence
  Description of Artificial Sequence: Synthetic oligonucleotide
aguucgggccuugcuagua

SEQ ID NO: 148595 - RNA, 19 nt, Artificial Sequence
  Description of Artificial Sequence: Synthetic oligonucleotide
ggauucgggaaaauagcgu

SEQ ID NO: 148596 - RNA, 19 nt, Artificial Sequence
  Description of Artificial Sequence: Synthetic oligonucleotide
uggccugaacagguugcau

SEQ ID NO: 148597 - RNA, 19 nt, Artificial Sequence
  Description of Artificial Sequence: Synthetic oligonucleotide
cucguugcuggguuacccu

SEQ ID NO: 148598 - RNA, 19 nt, Artificial Sequence
  Description of Artificial Sequence: Synthetic oligonucleotide
ccucguugcuggguuaccc

SEQ ID NO: 148599 - RNA, 19 nt, Artificial Sequence
  Description of Artificial Sequence: Synthetic oligonucleotide
cucggauaacgucugccau

SEQ ID NO: 148600 - RNA, 19 nt, Artificial Sequence
  Description of Artificial Sequence: Synthetic oligonucleotide
gaucuggguuuaaguugga

SEQ ID NO: 148601 - RNA, 19 nt, Artificial Sequence
  Description of Artificial Sequence: Synthetic oligonucleotide
ccguucguucacauuccac

SEQ ID NO: 148602 - RNA, 19 nt, Artificial Sequence
  Description of Artificial Sequence: Synthetic oligonucleotide
gaggaaccugagagcucug

SEQ ID NO: 148603 - RNA, 19 nt, Artificial Sequence
  Description of Artificial Sequence: Synthetic oligonucleotide
cugcuuaugugugagcauu

SEQ ID NO: 148604 - RNA, 19 nt, Artificial Sequence
  Description of Artificial Sequence: Synthetic oligonucleotide
caacgucgauaacaaauuu

SEQ ID NO: 148605 - RNA, 19 nt, Artificial Sequence
  Description of Artificial Sequence: Synthetic oligonucleotide
cuuucacuaggaggcaggu

SEQ ID NO: 148606 - RNA, 19 nt, Artificial Sequence
  Description of Artificial Sequence: Synthetic oligonucleotide
ggccguucguucacauucc

SEQ ID NO: 148607 - RNA, 19 nt, Artificial Sequence
  Description of Artificial Sequence: Synthetic oligonucleotide
ggccgaacggagcccgggc

SEQ ID NO: 148608 - RNA, 19 nt, Artificial Sequence
  Description of Artificial Sequence: Synthetic oligonucleotide
gcuuaugugugagcauuaa

SEQ ID NO: 148609 - RNA, 19 nt, Artificial Sequence
  Description of Artificial Sequence: Synthetic oligonucleotide
gcugacgcucgcgugguuc

SEQ ID NO: 148610 - RNA, 19 nt, Artificial Sequence
  Description of Artificial Sequence: Synthetic oligonucleotide
ggccaccgaggccgaacgg

SEQ ID NO: 148611 - RNA, 19 nt, Artificial Sequence
  Description of Artificial Sequence: Synthetic oligonucleotide
ccgagcaaucugcauaaaa

SEQ ID NO: 148612 - RNA, 19 nt, Artificial Sequence
  Description of Artificial Sequence: Synthetic oligonucleotide
gacgcucgcgugguuccga

SEQ ID NO: 148613 - RNA, 19 nt, Artificial Sequence
  Description of Artificial Sequence: Synthetic oligonucleotide
acacgaccacaaccugauu

SEQ ID NO: 148614 - RNA, 19 nt, Artificial Sequence
  Description of Artificial Sequence: Synthetic oligonucleotide
cuguuacauggcuuucaau

SEQ ID NO: 148615 - RNA, 19 nt, Artificial Sequence
  Description of Artificial Sequence: Synthetic oligonucleotide
ccucaaacccgugucccuc

SEQ ID NO: 148616 - RNA, 19 nt, Artificial Sequence
  Description of Artificial Sequence: Synthetic oligonucleotide
cucgauccgcuugauaauu

SEQ ID NO: 148617 - RNA, 19 nt, Artificial Sequence
  Description of Artificial Sequence: Synthetic oligonucleotide
acgagggaguuggcucuga

SEQ ID NO: 148618 - RNA, 19 nt, Artificial Sequence
  Description of Artificial Sequence: Synthetic oligonucleotide
ggccaguuggaccgccguc

SEQ ID NO: 148619 - RNA, 19 nt, Artificial Sequence
  Description of Artificial Sequence: Synthetic oligonucleotide
cagcgaugguuagcauuuc

SEQ ID NO: 148620 - RNA, 19 nt, Artificial Sequence
  Description of Artificial Sequence: Synthetic oligonucleotide
cgggcgguagcuucccgag

SEQ ID NO: 148621 - RNA, 19 nt, Artificial Sequence
  Description of Artificial Sequence: Synthetic oligonucleotide
cucgcgugguuccgacaga

SEQ ID NO: 148622 - RNA, 19 nt, Artificial Sequence
  Description of Artificial Sequence: Synthetic oligonucleotide
ggcguaaaauagacucgaa

SEQ ID NO: 148623 - RNA, 19 nt, Artificial Sequence
  Description of Artificial Sequence: Synthetic oligonucleotide
ccugaacagguugcauuuc

SEQ ID NO: 148624 - RNA, 19 nt, Artificial Sequence
  Description of Artificial Sequence: Synthetic oligonucleotide
cucaggccguucguucaca

SEQ ID NO: 148625 - RNA, 19 nt, Artificial Sequence
  Description of Artificial Sequence: Synthetic oligonucleotide
caacgcucuuggucuguua

SEQ ID NO: 148626 - RNA, 19 nt, Artificial Sequence
  Description of Artificial Sequence: Synthetic oligonucleotide
cgaggccgaacggagcccg

SEQ ID NO: 148627 - RNA, 19 nt, Artificial Sequence
  Description of Artificial Sequence: Synthetic oligonucleotide
gccaguuggaccgccgucu

SEQ ID NO: 148628 - RNA, 19 nt, Artificial Sequence
  Description of Artificial Sequence: Synthetic oligonucleotide
ccgccgucugcuuguggac

SEQ ID NO: 148629 - RNA, 19 nt, Artificial Sequence
  Description of Artificial Sequence: Synthetic oligonucleotide
cuuggacgucguccaagau

SEQ ID NO: 148630 - RNA, 19 nt, Artificial Sequence
  Description of Artificial Sequence: Synthetic oligonucleotide
gaagcucgauccgcuugau

SEQ ID NO: 148631 - RNA, 19 nt, Artificial Sequence
  Description of Artificial Sequence: Synthetic oligonucleotide
gucccucguugcuggguua

SEQ ID NO: 148632 - RNA, 19 nt, Artificial Sequence
  Description of Artificial Sequence: Synthetic oligonucleotide
gcucgauccgcuugauaau

SEQ ID NO: 148633 - RNA, 19 nt, Artificial Sequence
  Description of Artificial Sequence: Synthetic oligonucleotide
cccgugucccucguugcug

SEQ ID NO: 148634 - RNA, 19 nt, Artificial Sequence
  Description of Artificial Sequence: Synthetic oligonucleotide
ggaugcuaagauagacuuu

SEQ ID NO: 148635 - RNA, 19 nt, Artificial Sequence
  Description of Artificial Sequence: Synthetic oligonucleotide
ggguuuaaguuggaaccuu

SEQ ID NO: 148636 - RNA, 19 nt, Artificial Sequence
  Description of Artificial Sequence: Synthetic oligonucleotide
caguucgggccuugcuagu

SEQ ID NO: 148637 - RNA, 19 nt, Artificial Sequence
  Description of Artificial Sequence: Synthetic oligonucleotide
ccauuucuugccgcagcga

SEQ ID NO: 148638 - RNA, 19 nt, Artificial Sequence
  Description of Artificial Sequence: Synthetic oligonucleotide
gugucccucguugcugggu

SEQ ID NO: 148639 - RNA, 19 nt, Artificial Sequence
  Description of Artificial Sequence: Synthetic oligonucleotide
ccgggcgguagcuucccga

SEQ ID NO: 148640 - RNA, 19 nt, Artificial Sequence
  Description of Artificial Sequence: Synthetic oligonucleotide
guuggaccgccgucugcuu

SEQ ID NO: 148641 - RNA, 19 nt, Artificial Sequence
  Description of Artificial Sequence: Synthetic oligonucleotide
cagcgagcucaggccguuc

SEQ ID NO: 148642 - RNA, 19 nt, Artificial Sequence
  Description of Artificial Sequence: Synthetic oligonucleotide
cagcaccaugaggcacgug

SEQ ID NO: 148643 - RNA, 19 nt, Artificial Sequence
  Description of Artificial Sequence: Synthetic oligonucleotide
ggaccgccgucugcuugug

SEQ ID NO: 148644 - RNA, 19 nt, Artificial Sequence
  Description of Artificial Sequence: Synthetic oligonucleotide
caaacccgugucccucguu

SEQ ID NO: 148645 - RNA, 19 nt, Artificial Sequence
  Description of Artificial Sequence: Synthetic oligonucleotide
ggauaacgucugccauccu

SEQ ID NO: 148646 - RNA, 19 nt, Artificial Sequence
  Description of Artificial Sequence: Synthetic oligonucleotide
gcaacacgucagucgccau

SEQ ID NO: 148647 - RNA, 19 nt, Artificial Sequence
  Description of Artificial Sequence: Synthetic oligonucleotide
gcccgggcgguagcuuccc

SEQ ID NO: 148648 - RNA, 19 nt, Artificial Sequence
  Description of Artificial Sequence: Synthetic oligonucleotide
cgucagucgccaugcuucu

SEQ ID NO: 148649 - RNA, 19 nt, Artificial Sequence
  Description of Artificial Sequence: Synthetic oligonucleotide
cgguuucauccgauggccu

SEQ ID NO: 148650 - RNA, 19 nt, Artificial Sequence
  Description of Artificial Sequence: Synthetic oligonucleotide
ggcucacuucaacgcucuu

SEQ ID NO: 148651 - RNA, 19 nt, Artificial Sequence
  Description of Artificial Sequence: Synthetic oligonucleotide
cgcucgcgugguuccgaca

SEQ ID NO: 148652 - RNA, 19 nt, Artificial Sequence
  Description of Artificial Sequence: Synthetic oligonucleotide
ggacgucguccaagaugau

SEQ ID NO: 148653 - RNA, 19 nt, Artificial Sequence
  Description of Artificial Sequence: Synthetic oligonucleotide
cgccuagaucuggguuuaa

SEQ ID NO: 148654 - RNA, 19 nt, Artificial Sequence
  Description of Artificial Sequence: Synthetic oligonucleotide
aacacuaucugcuacaacc

SEQ ID NO: 148655 - RNA, 19 nt, Artificial Sequence
  Description of Artificial Sequence: Synthetic oligonucleotide
auuacuugcaaauuugugc

SEQ ID NO: 148656 - RNA, 19 nt, Artificial Sequence
  Description of Artificial Sequence: Synthetic oligonucleotide
aaaauuccauuauaugccc

SEQ ID NO: 148657 - RNA, 19 nt, Artificial Sequence
  Description of Artificial Sequence: Synthetic oligonucleotide
auaaaagguggauauacac

SEQ ID NO: 148658 - RNA, 19 nt, Artificial Sequence
  Description of Artificial Sequence: Synthetic oligonucleotide
auauauauauauuuuauaa

SEQ ID NO: 148659 - RNA, 19 nt, Artificial Sequence
  Description of Artificial Sequence: Synthetic oligonucleotide
ugcaaaacuugccacaagg

SEQ ID NO: 148660 - RNA, 19 nt, Artificial Sequence
  Description of Artificial Sequence: Synthetic oligonucleotide
acuagugugaacugacucc

SEQ ID NO: 148661 - RNA, 19 nt, Artificial Sequence
  Description of Artificial Sequence: Synthetic oligonucleotide
ucuaguuucagcugaauga

SEQ ID NO: 148662 - RNA, 19 nt, Artificial Sequence
  Description of Artificial Sequence: Synthetic oligonucleotide
ugaaucuagacccaugcug

SEQ ID NO: 148663 - RNA, 19 nt, Artificial Sequence
  Description of Artificial Sequence: Synthetic oligonucleotide
auuaguacauguuaugugu

SEQ ID NO: 148664 - RNA, 19 nt, Artificial Sequence
  Description of Artificial Sequence: Synthetic oligonucleotide
uauguguauauauauauau

SEQ ID NO: 148665 - RNA, 19 nt, Artificial Sequence
  Description of Artificial Sequence: Synthetic oligonucleotide
uaggguaccgguuauuucg

SEQ ID NO: 148666 - RNA, 19 nt, Artificial Sequence
  Description of Artificial Sequence: Synthetic oligonucleotide
uguguauauauauauauuu

SEQ ID NO: 148667 - RNA, 19 nt, Artificial Sequence
  Description of Artificial Sequence: Synthetic oligonucleotide
auauacaccaagugcacgg

SEQ ID NO: 148668 - RNA, 19 nt, Artificial Sequence
  Description of Artificial Sequence: Synthetic oligonucleotide
uccaccauaaguugguacg

SEQ ID NO: 148669 - RNA, 19 nt, Artificial Sequence
  Description of Artificial Sequence: Synthetic oligonucleotide
uauaugcccaacaaucucc

SEQ ID NO: 148670 - RNA, 19 nt, Artificial Sequence
  Description of Artificial Sequence: Synthetic oligonucleotide
uguauauauauauauuuua

SEQ ID NO: 148671 - RNA, 19 nt, Artificial Sequence
  Description of Artificial Sequence: Synthetic oligonucleotide
auuugugcugacucaauac

SEQ ID NO: 148672 - RNA, 19 nt, Artificial Sequence
  Description of Artificial Sequence: Synthetic oligonucleotide
uuguacaaaacggagggcg

SEQ ID NO: 148673 - RNA, 19 nt, Artificial Sequence
  Description of Artificial Sequence: Synthetic oligonucleotide
uguacuuucgcagagucgc

SEQ ID NO: 148674 - RNA, 19 nt, Artificial Sequence
  Description of Artificial Sequence: Synthetic oligonucleotide
uuacuugcaaauuugugcu

SEQ ID NO: 148675 - RNA, 19 nt, Artificial Sequence
  Description of Artificial Sequence: Synthetic oligonucleotide
aguuuagggacauuuaacu

SEQ ID NO: 148676 - RNA, 19 nt, Artificial Sequence
  Description of Artificial Sequence: Synthetic oligonucleotide
aaagcuuucuggauaacuc

SEQ ID NO: 148677 - RNA, 19 nt, Artificial Sequence
  Description of Artificial Sequence: Synthetic oligonucleotide
aauauagauacagauuaga

SEQ ID NO: 148678 - RNA, 19 nt, Artificial Sequence
  Description of Artificial Sequence: Synthetic oligonucleotide
aaauacuacaaauccguau

SEQ ID NO: 148679 - RNA, 19 nt, Artificial Sequence
  Description of Artificial Sequence: Synthetic oligonucleotide
uguaaauuaggguaccggu

SEQ ID NO: 148680 - RNA, 19 nt, Artificial Sequence
  Description of Artificial Sequence: Synthetic oligonucleotide
aaauguacaccguguagug

SEQ ID NO: 148681 - RNA, 19 nt, Artificial Sequence
  Description of Artificial Sequence: Synthetic oligonucleotide
uugacuagcugacaaauaa

SEQ ID NO: 148682 - RNA, 19 nt, Artificial Sequence
  Description of Artificial Sequence: Synthetic oligonucleotide
uauauauauauauuuuaua

SEQ ID NO: 148683 - RNA, 19 nt, Artificial Sequence
  Description of Artificial Sequence: Synthetic oligonucleotide
uguguaauaaaaugaaauu

SEQ ID NO: 148684 - RNA, 19 nt, Artificial Sequence
  Description of Artificial Sequence: Synthetic oligonucleotide
uuguuuagagacaaucuac

SEQ ID NO: 148685 - RNA, 19 nt, Artificial Sequence
  Description of Artificial Sequence: Synthetic oligonucleotide
aguacauugccucggaucu

SEQ ID NO: 148686 - RNA, 19 nt, Artificial Sequence
  Description of Artificial Sequence: Synthetic oligonucleotide
ugcuacaaccauaaaaggu

SEQ ID NO: 148687 - RNA, 19 nt, Artificial Sequence
  Description of Artificial Sequence: Synthetic oligonucleotide
aggauugacaguauguuac

SEQ ID NO: 148688 - RNA, 19 nt, Artificial Sequence
  Description of Artificial Sequence: Synthetic oligonucleotide
ucucaugcuagauaaucag

SEQ ID NO: 148689 - RNA, 19 nt, Artificial Sequence
  Description of Artificial Sequence: Synthetic oligonucleotide
agggcauaacaucagacag

SEQ ID NO: 148690 - RNA, 19 nt, Artificial Sequence
  Description of Artificial Sequence: Synthetic oligonucleotide
acuacaaauccguauauau

SEQ ID NO: 148691 - RNA, 19 nt, Artificial Sequence
  Description of Artificial Sequence: Synthetic oligonucleotide
aacaaaacauguggccucc

SEQ ID NO: 148692 - RNA, 19 nt, Artificial Sequence
  Description of Artificial Sequence: Synthetic oligonucleotide
uuagacaucagaacaggaa

SEQ ID NO: 148693 - RNA, 19 nt, Artificial Sequence
  Description of Artificial Sequence: Synthetic oligonucleotide
uuugacugucacaaaauaa

SEQ ID NO: 148694 - RNA, 19 nt, Artificial Sequence
  Description of Artificial Sequence: Synthetic oligonucleotide
cagaugauaccauuagggg

SEQ ID NO: 148695 - RNA, 19 nt, Artificial Sequence
  Description of Artificial Sequence: Synthetic oligonucleotide
aacacuagugugaacugac

SEQ ID NO: 148696 - RNA, 19 nt, Artificial Sequence
  Description of Artificial Sequence: Synthetic oligonucleotide
ucaugcuagauaaucagau

SEQ ID NO: 148697 - RNA, 19 nt, Artificial Sequence
  Description of Artificial Sequence: Synthetic oligonucleotide
aagguggauauacaccaag

SEQ ID NO: 148698 - RNA, 19 nt, Artificial Sequence
  Description of Artificial Sequence: Synthetic oligonucleotide
ugacugucacaaaauaagc

SEQ ID NO: 148699 - RNA, 19 nt, Artificial Sequence
  Description of Artificial Sequence: Synthetic oligonucleotide
ugacguaauuuccaaacac

SEQ ID NO: 148700 - RNA, 19 nt, Artificial Sequence
  Description of Artificial Sequence: Synthetic oligonucleotide
uccauaucucaaacgagag

SEQ ID NO: 148701 - RNA, 19 nt, Artificial Sequence
  Description of Artificial Sequence: Synthetic oligonucleotide
agcuauuugcaaaacuugc

SEQ ID NO: 148702 - RNA, 19 nt, Artificial Sequence
  Description of Artificial Sequence: Synthetic oligonucleotide
cauaaguugguacgcagcc

SEQ ID NO: 148703 - RNA, 19 nt, Artificial Sequence
  Description of Artificial Sequence: Synthetic oligonucleotide
uauuucgaaaaucuuccaa

SEQ ID NO: 148704 - RNA, 19 nt, Artificial Sequence
  Description of Artificial Sequence: Synthetic oligonucleotide
cuacuaggguacaauauag

SEQ ID NO: 148705 - RNA, 19 nt, Artificial Sequence
  Description of Artificial Sequence: Synthetic oligonucleotide
uuguaaauuaggguaccgg

SEQ ID NO: 148706 - RNA, 19 nt, Artificial Sequence
  Description of Artificial Sequence: Synthetic oligonucleotide
auacaacacuaucugcuac

SEQ ID NO: 148707 - RNA, 19 nt, Artificial Sequence
  Description of Artificial Sequence: Synthetic oligonucleotide
uugguacgcagccuggagg

SEQ ID NO: 148708 - RNA, 19 nt, Artificial Sequence
  Description of Artificial Sequence: Synthetic oligonucleotide
agacaaucuacacaagagu

SEQ ID NO: 148709 - RNA, 19 nt, Artificial Sequence
  Description of Artificial Sequence: Synthetic oligonucleotide
auuguuuagagacaaucua

SEQ ID NO: 148710 - RNA, 19 nt, Artificial Sequence
  Description of Artificial Sequence: Synthetic oligonucleotide
cuaggcuguauaaagaaca

SEQ ID NO: 148711 - RNA, 19 nt, Artificial Sequence
  Description of Artificial Sequence: Synthetic oligonucleotide
cauaccucaucaaugagca

SEQ ID NO: 148712 - RNA, 19 nt, Artificial Sequence
  Description of Artificial Sequence: Synthetic oligonucleotide
gaaaauacuacaaauccgu

SEQ ID NO: 148713 - RNA, 19 nt, Artificial Sequence
  Description of Artificial Sequence: Synthetic oligonucleotide
uuauaugcccaacaaucuc

SEQ ID NO: 148714 - RNA, 19 nt, Artificial Sequence
  Description of Artificial Sequence: Synthetic oligonucleotide
aguuguaaauuaggguacc

SEQ ID NO: 148715 - RNA, 19 nt, Artificial Sequence
  Description of Artificial Sequence: Synthetic oligonucleotide
uacaaagaccuuuccacga

SEQ ID NO: 148716 - RNA, 19 nt, Artificial Sequence
  Description of Artificial Sequence: Synthetic oligonucleotide
cagguuuaagcuugaagag

SEQ ID NO: 148717 - RNA, 19 nt, Artificial Sequence
  Description of Artificial Sequence: Synthetic oligonucleotide
agggcaauuagucaauuaa

SEQ ID NO: 148718 - RNA, 19 nt, Artificial Sequence
  Description of Artificial Sequence: Synthetic oligonucleotide
ggaaaauacuacaaauccg

SEQ ID NO: 148719 - RNA, 19 nt, Artificial Sequence
  Description of Artificial Sequence: Synthetic oligonucleotide
aauuugugcugacucaaua

SEQ ID NO: 148720 - RNA, 19 nt, Artificial Sequence
  Description of Artificial Sequence: Synthetic oligonucleotide
ucaaacaaggauugacagu

SEQ ID NO: 148721 - RNA, 19 nt, Artificial Sequence
  Description of Artificial Sequence: Synthetic oligonucleotide
uguggcacgcucuaguuuc

SEQ ID NO: 148722 - RNA, 19 nt, Artificial Sequence
  Description of Artificial Sequence: Synthetic oligonucleotide
uacagucuauauucaaaca

SEQ ID NO: 148723 - RNA, 19 nt, Artificial Sequence
  Description of Artificial Sequence: Synthetic oligonucleotide
ugaaugacguaauuuccaa

SEQ ID NO: 148724 - RNA, 19 nt, Artificial Sequence
  Description of Artificial Sequence: Synthetic oligonucleotide
auuuaaaaugaggugggga

SEQ ID NO: 148725 - RNA, 19 nt, Artificial Sequence
  Description of Artificial Sequence: Synthetic oligonucleotide
gcuacaaccauaaaaggug

SEQ ID NO: 148726 - RNA, 19 nt, Artificial Sequence
  Description of Artificial Sequence: Synthetic oligonucleotide
acuacuaggguacaauaua

SEQ ID NO: 148727 - RNA, 19 nt, Artificial Sequence
  Description of Artificial Sequence: Synthetic oligonucleotide
gaacaaaacauguggccuc

SEQ ID NO: 148728 - RNA, 19 nt, Artificial Sequence
  Description of Artificial Sequence: Synthetic oligonucleotide
ugacucaauacaaguacau

SEQ ID NO: 148729 - RNA, 19 nt, Artificial Sequence
  Description of Artificial Sequence: Synthetic oligonucleotide
uauacaacacuaucugcua

SEQ ID NO: 148730 - RNA, 19 nt, Artificial Sequence
  Description of Artificial Sequence: Synthetic oligonucleotide
aauccgggaacaaccauug

SEQ ID NO: 148731 - RNA, 19 nt, Artificial Sequence
  Description of Artificial Sequence: Synthetic oligonucleotide
ggcgagucacuuuacaagg

SEQ ID NO: 148732 - RNA, 19 nt, Artificial Sequence
  Description of Artificial Sequence: Synthetic oligonucleotide
acuuuacaaggggaggggc

SEQ ID NO: 148733 - RNA, 19 nt, Artificial Sequence
  Description of Artificial Sequence: Synthetic oligonucleotide
uauacaccaagugcacggg

SEQ ID NO: 148734 - RNA, 19 nt, Artificial Sequence
  Description of Artificial Sequence: Synthetic oligonucleotide
accauaaguugguacgcag

SEQ ID NO: 148735 - RNA, 19 nt, Artificial Sequence
  Description of Artificial Sequence: Synthetic oligonucleotide
caguuuagggacauuuaac

SEQ ID NO: 148736 - RNA, 19 nt, Artificial Sequence
  Description of Artificial Sequence: Synthetic oligonucleotide
gagggcauaacaucagaca

SEQ ID NO: 148737 - RNA, 19 nt, Artificial Sequence
  Description of Artificial Sequence: Synthetic oligonucleotide
auuauaugcccaacaaucu

SEQ ID NO: 148738 - RNA, 19 nt, Artificial Sequence
  Description of Artificial Sequence: Synthetic oligonucleotide
agaacacuagugugaacug

SEQ ID NO: 148739 - RNA, 19 nt, Artificial Sequence
  Description of Artificial Sequence: Synthetic oligonucleotide
aagggugcguagacaaggc

SEQ ID NO: 148740 - RNA, 19 nt, Artificial Sequence
  Description of Artificial Sequence: Synthetic oligonucleotide
ccagguuuaagcuugaaga

SEQ ID NO: 148741 - RNA, 19 nt, Artificial Sequence
  Description of Artificial Sequence: Synthetic oligonucleotide
ugccaaugacaggacaugg

SEQ ID NO: 148742 - RNA, 19 nt, Artificial Sequence
  Description of Artificial Sequence: Synthetic oligonucleotide
ugacaguauguuacauuca

SEQ ID NO: 148743 - RNA, 19 nt, Artificial Sequence
  Description of Artificial Sequence: Synthetic oligonucleotide
ugacuagcugacaaauaaa

SEQ ID NO: 148744 - RNA, 19 nt, Artificial Sequence
  Description of Artificial Sequence: Synthetic oligonucleotide
gcugacucaauacaaguac

SEQ ID NO: 148745 - RNA, 19 nt, Artificial Sequence
  Description of Artificial Sequence: Synthetic oligonucleotide
gacugucacaaaauaagca

SEQ ID NO: 148746 - RNA, 19 nt, Artificial Sequence
  Description of Artificial Sequence: Synthetic oligonucleotide
accgguuauuucgaaaauc

SEQ ID NO: 148747 - RNA, 19 nt, Artificial Sequence
  Description of Artificial Sequence: Synthetic oligonucleotide
guuguaaauuaggguaccg

SEQ ID NO: 148748 - RNA, 19 nt, Artificial Sequence
  Description of Artificial Sequence: Synthetic oligonucleotide
auacaccaagugcacgggg

SEQ ID NO: 148749 - RNA, 19 nt, Artificial Sequence
  Description of Artificial Sequence: Synthetic oligonucleotide
gguggauauacaccaagug

SEQ ID NO: 148750 - RNA, 19 nt, Artificial Sequence
  Description of Artificial Sequence: Synthetic oligonucleotide
ucucaaacgagaggaagaa

SEQ ID NO: 148751 - RNA, 19 nt, Artificial Sequence
  Description of Artificial Sequence: Synthetic oligonucleotide
auguacaccguguaguguu

SEQ ID NO: 148752 - RNA, 19 nt, Artificial Sequence
  Description of Artificial Sequence: Synthetic oligonucleotide
uggugcauaccucaucaau

SEQ ID NO: 148753 - RNA, 19 nt, Artificial Sequence
  Description of Artificial Sequence: Synthetic oligonucleotide
aguuccuauacaccaguaa

SEQ ID NO: 148754 - RNA, 19 nt, Artificial Sequence
  Description of Artificial Sequence: Synthetic oligonucleotide
uacgugaagcaugagugac

SEQ ID NO: 148755 - RNA, 19 nt, Artificial Sequence
  Description of Artificial Sequence: Synthetic oligonucleotide
auuccauuauaugcccaac

SEQ ID NO: 148756 - RNA, 19 nt, Artificial Sequence
  Description of Artificial Sequence: Synthetic oligonucleotide
uaggcuguauaaagaacau

SEQ ID NO: 148757 - RNA, 19 nt, Artificial Sequence
  Description of Artificial Sequence: Synthetic oligonucleotide
uuucgcagagucgcgaugu

SEQ ID NO: 148758 - RNA, 19 nt, Artificial Sequence
  Description of Artificial Sequence: Synthetic oligonucleotide
cacugauuaccuauguaca

SEQ ID NO: 148759 - RNA, 19 nt, Artificial Sequence
  Description of Artificial Sequence: Synthetic oligonucleotide
cacuagugugaacugacuc

SEQ ID NO: 148760 - RNA, 19 nt, Artificial Sequence
  Description of Artificial Sequence: Synthetic oligonucleotide
gucgacgccauucuucaug

SEQ ID NO: 148761 - RNA, 19 nt, Artificial Sequence
  Description of Artificial Sequence: Synthetic oligonucleotide
uggccaucuagcuucccgc

SEQ ID NO: 148762 - RNA, 19 nt, Artificial Sequence
  Description of Artificial Sequence: Synthetic oligonucleotide
acaaaacggagggcgaguc

SEQ ID NO: 148763 - RNA, 19 nt, Artificial Sequence
  Description of Artificial Sequence: Synthetic oligonucleotide
acugacuccugugaaauaa

SEQ ID NO: 148764 - RNA, 19 nt, Artificial Sequence
  Description of Artificial Sequence: Synthetic oligonucleotide
uccacgagcggauaugauu

SEQ ID NO: 148765 - RNA, 19 nt, Artificial Sequence
  Description of Artificial Sequence: Synthetic oligonucleotide
ucggaucucugcuacaauu

SEQ ID NO: 148766 - RNA, 19 nt, Artificial Sequence
  Description of Artificial Sequence: Synthetic oligonucleotide
ucgaggauagggagagucu

SEQ ID NO: 148767 - RNA, 19 nt, Artificial Sequence
  Description of Artificial Sequence: Synthetic oligonucleotide
ucgacgccauucuucaugu

SEQ ID NO: 148768 - RNA, 19 nt, Artificial Sequence
  Description of Artificial Sequence: Synthetic oligonucleotide
aaauuccauuauaugccca

SEQ ID NO: 148769 - RNA, 19 nt, Artificial Sequence
  Description of Artificial Sequence: Synthetic oligonucleotide
caauuaaaaguauguccga

SEQ ID NO: 148770 - RNA, 19 nt, Artificial Sequence
  Description of Artificial Sequence: Synthetic oligonucleotide
guauauauauauauuuuau

SEQ ID NO: 148771 - RNA, 19 nt, Artificial Sequence
  Description of Artificial Sequence: Synthetic oligonucleotide
aaaauacuacaaauccgua

SEQ ID NO: 148772 - RNA, 19 nt, Artificial Sequence
  Description of Artificial Sequence: Synthetic oligonucleotide
gcucagaugauaccauuag

SEQ ID NO: 148773 - RNA, 19 nt, Artificial Sequence
  Description of Artificial Sequence: Synthetic oligonucleotide
guccauaucucaaacgaga

SEQ ID NO: 148774 - RNA, 19 nt, Artificial Sequence
  Description of Artificial Sequence: Synthetic oligonucleotide
uuuccacgagcggauauga

SEQ ID NO: 148775 - RNA, 19 nt, Artificial Sequence
  Description of Artificial Sequence: Synthetic oligonucleotide
uuaggguaccgguuauuuc

SEQ ID NO: 148776 - RNA, 19 nt, Artificial Sequence
  Description of Artificial Sequence: Synthetic oligonucleotide
cugacucaauacaaguaca

SEQ ID NO: 148777 - RNA, 19 nt, Artificial Sequence
  Description of Artificial Sequence: Synthetic oligonucleotide
agaccuuuccacgagcgga

SEQ ID NO: 148778 - RNA, 19 nt, Artificial Sequence
  Description of Artificial Sequence: Synthetic oligonucleotide
ugcgguacuuggcuucggc

SEQ ID NO: 148779 - RNA, 19 nt, Artificial Sequence
  Description of Artificial Sequence: Synthetic oligonucleotide
gaaugacguaauuuccaaa

SEQ ID NO: 148780 - RNA, 19 nt, Artificial Sequence
  Description of Artificial Sequence: Synthetic oligonucleotide
acguaauuuccaaacacau

SEQ ID NO: 148781 - RNA, 19 nt, Artificial Sequence
  Description of Artificial Sequence: Synthetic oligonucleotide
aguccauaucucaaacgag

SEQ ID NO: 148782 - RNA, 19 nt, Artificial Sequence
  Description of Artificial Sequence: Synthetic oligonucleotide
auguccgacuacuagggua

SEQ ID NO: 148783 - RNA, 19 nt, Artificial Sequence
  Description of Artificial Sequence: Synthetic oligonucleotide
gggcgagucacuuuacaag

SEQ ID NO: 148784 - RNA, 19 nt, Artificial Sequence
  Description of Artificial Sequence: Synthetic oligonucleotide
ccgggaacaaccauugccc

SEQ ID NO: 148785 - RNA, 19 nt, Artificial Sequence
  Description of Artificial Sequence: Synthetic oligonucleotide
cucaugcuagauaaucaga

SEQ ID NO: 148786 - RNA, 19 nt, Artificial Sequence
  Description of Artificial Sequence: Synthetic oligonucleotide
aaguugguacgcagccugg

SEQ ID NO: 148787 - RNA, 19 nt, Artificial Sequence
  Description of Artificial Sequence: Synthetic oligonucleotide
aguacauguuauguguaau

SEQ ID NO: 148788 - RNA, 19 nt, Artificial Sequence
  Description of Artificial Sequence: Synthetic oligonucleotide
aaucucccguaguuguaaa

SEQ ID NO: 148789 - RNA, 19 nt, Artificial Sequence
  Description of Artificial Sequence: Synthetic oligonucleotide
guacaaaacggagggcgag

SEQ ID NO: 148790 - RNA, 19 nt, Artificial Sequence
  Description of Artificial Sequence: Synthetic oligonucleotide
uauguccgacuacuagggu

SEQ ID NO: 148791 - RNA, 19 nt, Artificial Sequence
  Description of Artificial Sequence: Synthetic oligonucleotide
ucucccguaguuguaaauu

SEQ ID NO: 148792 - RNA, 19 nt, Artificial Sequence
  Description of Artificial Sequence: Synthetic oligonucleotide
auuaggguaccgguuauuu

SEQ ID NO: 148793 - RNA, 19 nt, Artificial Sequence
  Description of Artificial Sequence: Synthetic oligonucleotide
uuaaaccaaccacccugaa

SEQ ID NO: 148794 - RNA, 19 nt, Artificial Sequence
  Description of Artificial Sequence: Synthetic oligonucleotide
gauguaucuuccacugcca

SEQ ID NO: 148795 - RNA, 19 nt, Artificial Sequence
  Description of Artificial Sequence: Synthetic oligonucleotide
agggcgagucacuuuacaa

SEQ ID NO: 148796 - RNA, 19 nt, Artificial Sequence
  Description of Artificial Sequence: Synthetic oligonucleotide
caaauccguauauaugcaa

SEQ ID NO: 148797 - RNA, 19 nt, Artificial Sequence
  Description of Artificial Sequence: Synthetic oligonucleotide
cauguuguauuacauaauu

SEQ ID NO: 148798 - RNA, 19 nt, Artificial Sequence
  Description of Artificial Sequence: Synthetic oligonucleotide
ugccaguuuagggacauuu

SEQ ID NO: 148799 - RNA, 19 nt, Artificial Sequence
  Description of Artificial Sequence: Synthetic oligonucleotide
auguguauauauauauauu

SEQ ID NO: 148800 - RNA, 19 nt, Artificial Sequence
  Description of Artificial Sequence: Synthetic oligonucleotide
ugcccaacaaucucccgua

SEQ ID NO: 148801 - RNA, 19 nt, Artificial Sequence
  Description of Artificial Sequence: Synthetic oligonucleotide
gguguacuuucgcagaguc

SEQ ID NO: 148802 - RNA, 19 nt, Artificial Sequence
  Description of Artificial Sequence: Synthetic oligonucleotide
gagucacuuuacaagggga

SEQ ID NO: 148803 - RNA, 19 nt, Artificial Sequence
  Description of Artificial Sequence: Synthetic oligonucleotide
uaccgguuauuucgaaaau

SEQ ID NO: 148804 - RNA, 19 nt, Artificial Sequence
  Description of Artificial Sequence: Synthetic oligonucleotide
ccauaaguugguacgcagc

SEQ ID NO: 148805 - RNA, 19 nt, Artificial Sequence
  Description of Artificial Sequence: Synthetic oligonucleotide
uacaaaacggagggcgagu

SEQ ID NO: 148806 - RNA, 19 nt, Artificial Sequence
  Description of Artificial Sequence: Synthetic oligonucleotide
uacaccguguaguguuaca

SEQ ID NO: 148807 - RNA, 19 nt, Artificial Sequence
  Description of Artificial Sequence: Synthetic oligonucleotide
ugacaaucuuccgcugacc

SEQ ID NO: 148808 - RNA, 19 nt, Artificial Sequence
  Description of Artificial Sequence: Synthetic oligonucleotide
cacgcucuaguuucagcug

SEQ ID NO: 148809 - RNA, 19 nt, Artificial Sequence
  Description of Artificial Sequence: Synthetic oligonucleotide
ccacgagcggauaugauuc

SEQ ID NO: 148810 - RNA, 19 nt, Artificial Sequence
  Description of Artificial Sequence: Synthetic oligonucleotide
cuuuccacgagcggauaug

SEQ ID NO: 148811 - RNA, 19 nt, Artificial Sequence
  Description of Artificial Sequence: Synthetic oligonucleotide
ggcaauuagucaauuaaaa

SEQ ID NO: 148812 - RNA, 19 nt, Artificial Sequence
  Description of Artificial Sequence: Synthetic oligonucleotide
uacuuucgcagagucgcga

SEQ ID NO: 148813 - RNA, 19 nt, Artificial Sequence
  Description of Artificial Sequence: Synthetic oligonucleotide
uguacaccguguaguguua

SEQ ID NO: 148814 - RNA, 19 nt, Artificial Sequence
  Description of Artificial Sequence: Synthetic oligonucleotide
auaaguugguacgcagccu

SEQ ID NO: 148815 - RNA, 19 nt, Artificial Sequence
  Description of Artificial Sequence: Synthetic oligonucleotide
guauguguauauauauaua

SEQ ID NO: 148816 - RNA, 19 nt, Artificial Sequence
  Description of Artificial Sequence: Synthetic oligonucleotide
agucgcgauguguggccgg

SEQ ID NO: 148817 - RNA, 19 nt, Artificial Sequence
  Description of Artificial Sequence: Synthetic oligonucleotide
acuuucgcagagucgcgau

SEQ ID NO: 148818 - RNA, 19 nt, Artificial Sequence
  Description of Artificial Sequence: Synthetic oligonucleotide
agguggauauacaccaagu

SEQ ID NO: 148819 - RNA, 19 nt, Artificial Sequence
  Description of Artificial Sequence: Synthetic oligonucleotide
cagacaguccauaucucaa

SEQ ID NO: 148820 - RNA, 19 nt, Artificial Sequence
  Description of Artificial Sequence: Synthetic oligonucleotide
acaaauaaaccaagcuauu

SEQ ID NO: 148821 - RNA, 19 nt, Artificial Sequence
  Description of Artificial Sequence: Synthetic oligonucleotide
cacgagcggauaugauucc

SEQ ID NO: 148822 - RNA, 19 nt, Artificial Sequence
  Description of Artificial Sequence: Synthetic oligonucleotide
gaagacaagcuggcgcuca

SEQ ID NO: 148823 - RNA, 19 nt, Artificial Sequence
  Description of Artificial Sequence: Synthetic oligonucleotide
cuuucgcagagucgcgaug

SEQ ID NO: 148824 - RNA, 19 nt, Artificial Sequence
  Description of Artificial Sequence: Synthetic oligonucleotide
uucgcagagucgcgaugug

SEQ ID NO: 148825 - RNA, 19 nt, Artificial Sequence
  Description of Artificial Sequence: Synthetic oligonucleotide
cacccauaagggugcguag

SEQ ID NO: 148826 - RNA, 19 nt, Artificial Sequence
  Description of Artificial Sequence: Synthetic oligonucleotide
ccucccagguuuaagcuug

SEQ ID NO: 148827 - RNA, 19 nt, Artificial Sequence
  Description of Artificial Sequence: Synthetic oligonucleotide
guguggccggaucuugugc

SEQ ID NO: 148828 - RNA, 19 nt, Artificial Sequence
  Description of Artificial Sequence: Synthetic oligonucleotide
agggugcguagacaaggca

SEQ ID NO: 148829 - RNA, 19 nt, Artificial Sequence
  Description of Artificial Sequence: Synthetic oligonucleotide
ugcuccguaugcuggugaa

SEQ ID NO: 148830 - RNA, 19 nt, Artificial Sequence
  Description of Artificial Sequence: Synthetic oligonucleotide
acauguuguauuacauaau

SEQ ID NO: 148831 - RNA, 19 nt, Artificial Sequence
  Description of Artificial Sequence: Synthetic oligonucleotide
guacuuucgcagagucgcg

SEQ ID NO: 148832 - RNA, 19 nt, Artificial Sequence
  Description of Artificial Sequence: Synthetic oligonucleotide
ggauugacaguauguuaca

SEQ ID NO: 148833 - RNA, 19 nt, Artificial Sequence
  Description of Artificial Sequence: Synthetic oligonucleotide
gagucgcgauguguggccg

SEQ ID NO: 148834 - RNA, 19 nt, Artificial Sequence
  Description of Artificial Sequence: Synthetic oligonucleotide
guguauauauauauauuuu

SEQ ID NO: 148835 - RNA, 19 nt, Artificial Sequence
  Description of Artificial Sequence: Synthetic oligonucleotide
aguguccacaugugggaua

SEQ ID NO: 148836 - RNA, 19 nt, Artificial Sequence
  Description of Artificial Sequence: Synthetic oligonucleotide
gagggcgagucacuuuaca

SEQ ID NO: 148837 - RNA, 19 nt, Artificial Sequence
  Description of Artificial Sequence: Synthetic oligonucleotide
cgagucacuuuacaagggg

SEQ ID NO: 148838 - RNA, 19 nt, Artificial Sequence
  Description of Artificial Sequence: Synthetic oligonucleotide
cuugacuagcugacaaaua

SEQ ID NO: 148839 - RNA, 19 nt, Artificial Sequence
  Description of Artificial Sequence: Synthetic oligonucleotide
acccauaagggugcguaga

SEQ ID NO: 148840 - RNA, 19 nt, Artificial Sequence
  Description of Artificial Sequence: Synthetic oligonucleotide
gaacaaccauugcccacuc

SEQ ID NO: 148841 - RNA, 19 nt, Artificial Sequence
  Description of Artificial Sequence: Synthetic oligonucleotide
ccaucuagcuucccgcacc

SEQ ID NO: 148842 - RNA, 19 nt, Artificial Sequence
  Description of Artificial Sequence: Synthetic oligonucleotide
ucuguacgugaagcaugag

SEQ ID NO: 148843 - RNA, 19 nt, Artificial Sequence
  Description of Artificial Sequence: Synthetic oligonucleotide
acaggacauggccucgaau

SEQ ID NO: 148844 - RNA, 19 nt, Artificial Sequence
  Description of Artificial Sequence: Synthetic oligonucleotide
gacuacuaggguacaauau

SEQ ID NO: 148845 - RNA, 19 nt, Artificial Sequence
  Description of Artificial Sequence: Synthetic oligonucleotide
cucccguaguuguaaauua

SEQ ID NO: 148846 - RNA, 19 nt, Artificial Sequence
  Description of Artificial Sequence: Synthetic oligonucleotide
uucaggacauggccaucua

SEQ ID NO: 148847 - RNA, 19 nt, Artificial Sequence
  Description of Artificial Sequence: Synthetic oligonucleotide
aaguuccuauacaccagua

SEQ ID NO: 148848 - RNA, 19 nt, Artificial Sequence
  Description of Artificial Sequence: Synthetic oligonucleotide
aggagggagcaauccggga

SEQ ID NO: 148849 - RNA, 19 nt, Artificial Sequence
  Description of Artificial Sequence: Synthetic oligonucleotide
uuccacgagcggauaugau

SEQ ID NO: 148850 - RNA, 19 nt, Artificial Sequence
  Description of Artificial Sequence: Synthetic oligonucleotide
aguugguacgcagccugga

SEQ ID NO: 148851 - RNA, 19 nt, Artificial Sequence
  Description of Artificial Sequence: Synthetic oligonucleotide
cucugcuacaauuuugcuu

SEQ ID NO: 148852 - RNA, 19 nt, Artificial Sequence
  Description of Artificial Sequence: Synthetic oligonucleotide
aaacggagggcgagucacu

SEQ ID NO: 148853 - RNA, 19 nt, Artificial Sequence
  Description of Artificial Sequence: Synthetic oligonucleotide
ucgcagagucgcgaugugu

SEQ ID NO: 148854 - RNA, 19 nt, Artificial Sequence
  Description of Artificial Sequence: Synthetic oligonucleotide
agcacguucuguacgugaa

SEQ ID NO: 148855 - RNA, 19 nt, Artificial Sequence
  Description of Artificial Sequence: Synthetic oligonucleotide
cugagggaauaaauuccaa

SEQ ID NO: 148856 - RNA, 19 nt, Artificial Sequence
  Description of Artificial Sequence: Synthetic oligonucleotide
cagagggcauaacaucaga

SEQ ID NO: 148857 - RNA, 19 nt, Artificial Sequence
  Description of Artificial Sequence: Synthetic oligonucleotide
ccagagggcauaacaucag

SEQ ID NO: 148858 - RNA, 19 nt, Artificial Sequence
  Description of Artificial Sequence: Synthetic oligonucleotide
ccaguuuagggacauuuaa

SEQ ID NO: 148859 - RNA, 19 nt, Artificial Sequence
  Description of Artificial Sequence: Synthetic oligonucleotide
ccgguuauuucgaaaaucu

SEQ ID NO: 148860 - RNA, 19 nt, Artificial Sequence
  Description of Artificial Sequence: Synthetic oligonucleotide
acgagcggauaugauuccu

SEQ ID NO: 148861 - RNA, 19 nt, Artificial Sequence
  Description of Artificial Sequence: Synthetic oligonucleotide
gcccacucugacucuacgc

SEQ ID NO: 148862 - RNA, 19 nt, Artificial Sequence
  Description of Artificial Sequence: Synthetic oligonucleotide
cacggcccugcccacuggc

SEQ ID NO: 148863 - RNA, 19 nt, Artificial Sequence
  Description of Artificial Sequence: Synthetic oligonucleotide
ugacucuacgcugggcauu

SEQ ID NO: 148864 - RNA, 19 nt, Artificial Sequence
  Description of Artificial Sequence: Synthetic oligonucleotide
uccgacuacuaggguacaa

SEQ ID NO: 148865 - RNA, 19 nt, Artificial Sequence
  Description of Artificial Sequence: Synthetic oligonucleotide
ugguuggaucugccagggu

SEQ ID NO: 148866 - RNA, 19 nt, Artificial Sequence
  Description of Artificial Sequence: Synthetic oligonucleotide
aggcuguauaaagaacauu

SEQ ID NO: 148867 - RNA, 19 nt, Artificial Sequence
  Description of Artificial Sequence: Synthetic oligonucleotide
caauccgggaacaaccauu

SEQ ID NO: 148868 - RNA, 19 nt, Artificial Sequence
  Description of Artificial Sequence: Synthetic oligonucleotide
guacaccguguaguguuac

SEQ ID NO: 148869 - RNA, 19 nt, Artificial Sequence
  Description of Artificial Sequence: Synthetic oligonucleotide
gauuaccuauguacaaguu

SEQ ID NO: 148870 - RNA, 19 nt, Artificial Sequence
  Description of Artificial Sequence: Synthetic oligonucleotide
ccacaugugggauauagau

SEQ ID NO: 148871 - RNA, 19 nt, Artificial Sequence
  Description of Artificial Sequence: Synthetic oligonucleotide
gagcggauaugauuccuuu

SEQ ID NO: 148872 - RNA, 19 nt, Artificial Sequence
  Description of Artificial Sequence: Synthetic oligonucleotide
ggcaggcgaaacuucugca

SEQ ID NO: 148873 - RNA, 19 nt, Artificial Sequence
  Description of Artificial Sequence: Synthetic oligonucleotide
guccucccagguuuaagcu

SEQ ID NO: 148874 - RNA, 19 nt, Artificial Sequence
  Description of Artificial Sequence: Synthetic oligonucleotide
agggagcaauccgggaaca

SEQ ID NO: 148875 - RNA, 19 nt, Artificial Sequence
  Description of Artificial Sequence: Synthetic oligonucleotide
ggugcguagacaaggcaaa

SEQ ID NO: 148876 - RNA, 19 nt, Artificial Sequence
  Description of Artificial Sequence: Synthetic oligonucleotide
gggugcguagacaaggcaa

SEQ ID NO: 148877 - RNA, 19 nt, Artificial Sequence
  Description of Artificial Sequence: Synthetic oligonucleotide
cugccccuugaaugcauca

SEQ ID NO: 148878 - RNA, 19 nt, Artificial Sequence
  Description of Artificial Sequence: Synthetic oligonucleotide
caccaagugcacggggcug

SEQ ID NO: 148879 - RNA, 19 nt, Artificial Sequence
  Description of Artificial Sequence: Synthetic oligonucleotide
guacauugccucggaucuc

SEQ ID NO: 148880 - RNA, 19 nt, Artificial Sequence
  Description of Artificial Sequence: Synthetic oligonucleotide
gcgguacuuggcuucggca

SEQ ID NO: 148881 - RNA, 19 nt, Artificial Sequence
  Description of Artificial Sequence: Synthetic oligonucleotide
auguggccucccauguaca

SEQ ID NO: 148882 - RNA, 19 nt, Artificial Sequence
  Description of Artificial Sequence: Synthetic oligonucleotide
guguccacaugugggauau

SEQ ID NO: 148883 - RNA, 19 nt, Artificial Sequence
  Description of Artificial Sequence: Synthetic oligonucleotide
cugcacccauaagggugcg

SEQ ID NO: 148884 - RNA, 19 nt, Artificial Sequence
  Description of Artificial Sequence: Synthetic oligonucleotide
cauggccaucuagcuuccc

SEQ ID NO: 148885 - RNA, 19 nt, Artificial Sequence
  Description of Artificial Sequence: Synthetic oligonucleotide
gacucuacgcugggcauuu

SEQ ID NO: 148886 - RNA, 19 nt, Artificial Sequence
  Description of Artificial Sequence: Synthetic oligonucleotide
gcacccauaagggugcgua

SEQ ID NO: 148887 - RNA, 19 nt, Artificial Sequence
  Description of Artificial Sequence: Synthetic oligonucleotide
gucgcgauguguggccgga

SEQ ID NO: 148888 - RNA, 19 nt, Artificial Sequence
  Description of Artificial Sequence: Synthetic oligonucleotide
cugacucuacgcugggcau

SEQ ID NO: 148889 - RNA, 19 nt, Artificial Sequence
  Description of Artificial Sequence: Synthetic oligonucleotide
ggauuucguugaagacaag

SEQ ID NO: 148890 - RNA, 19 nt, Artificial Sequence
  Description of Artificial Sequence: Synthetic oligonucleotide
gggcauaacaucagacagu

SEQ ID NO: 148891 - RNA, 19 nt, Artificial Sequence
  Description of Artificial Sequence: Synthetic oligonucleotide
guggcacgcucuaguuuca

SEQ ID NO: 148892 - RNA, 19 nt, Artificial Sequence
  Description of Artificial Sequence: Synthetic oligonucleotide
cgacuacuaggguacaaua

SEQ ID NO: 148893 - RNA, 19 nt, Artificial Sequence
  Description of Artificial Sequence: Synthetic oligonucleotide
aucuagcuucccgcaccau

SEQ ID NO: 148894 - RNA, 19 nt, Artificial Sequence
  Description of Artificial Sequence: Synthetic oligonucleotide
ggagggcgagucacuuuac

SEQ ID NO: 148895 - RNA, 19 nt, Artificial Sequence
  Description of Artificial Sequence: Synthetic oligonucleotide
ggguaccgguuauuucgaa

SEQ ID NO: 148896 - RNA, 19 nt, Artificial Sequence
  Description of Artificial Sequence: Synthetic oligonucleotide
cuguggcacgcucuaguuu

SEQ ID NO: 148897 - RNA, 19 nt, Artificial Sequence
  Description of Artificial Sequence: Synthetic oligonucleotide
ccguguaguguuacagucu

SEQ ID NO: 148898 - RNA, 19 nt, Artificial Sequence
  Description of Artificial Sequence: Synthetic oligonucleotide
ucgcgauguguggccggau

SEQ ID NO: 148899 - RNA, 19 nt, Artificial Sequence
  Description of Artificial Sequence: Synthetic oligonucleotide
cucggaucucugcuacaau

SEQ ID NO: 148900 - RNA, 19 nt, Artificial Sequence
  Description of Artificial Sequence: Synthetic oligonucleotide
gcuguggcacgcucuaguu

SEQ ID NO: 148901 - RNA, 19 nt, Artificial Sequence
  Description of Artificial Sequence: Synthetic oligonucleotide
cgcgauguguggccggauc

SEQ ID NO: 148902 - RNA, 19 nt, Artificial Sequence
  Description of Artificial Sequence: Synthetic oligonucleotide
cccaagucgacgccauucu

SEQ ID NO: 148903 - RNA, 19 nt, Artificial Sequence
  Description of Artificial Sequence: Synthetic oligonucleotide
gggagcaauccgggaacaa

SEQ ID NO: 148904 - RNA, 19 nt, Artificial Sequence
  Description of Artificial Sequence: Synthetic oligonucleotide
cggagggcgagucacuuua

SEQ ID NO: 148905 - RNA, 19 nt, Artificial Sequence
  Description of Artificial Sequence: Synthetic oligonucleotide
ccgacuacuaggguacaau

SEQ ID NO: 148906 - RNA, 19 nt, Artificial Sequence
  Description of Artificial Sequence: Synthetic oligonucleotide
gcccaggcauaagcauaca

SEQ ID NO: 148907 - RNA, 19 nt, Artificial Sequence
  Description of Artificial Sequence: Synthetic oligonucleotide
cgagcggauaugauuccuu

SEQ ID NO: 148908 - RNA, 19 nt, Artificial Sequence
  Description of Artificial Sequence: Synthetic oligonucleotide
aaugucacguaccuggacc

SEQ ID NO: 148909 - RNA, 19 nt, Artificial Sequence
  Description of Artificial Sequence: Synthetic oligonucleotide
aauucgguuaaaccgcugc

SEQ ID NO: 148910 - RNA, 19 nt, Artificial Sequence
  Description of Artificial Sequence: Synthetic oligonucleotide
auaggauucacuuguagac

SEQ ID NO: 148911 - RNA, 19 nt, Artificial Sequence
  Description of Artificial Sequence: Synthetic oligonucleotide
uucaugaacugacugaccc

SEQ ID NO: 148912 - RNA, 19 nt, Artificial Sequence
  Description of Artificial Sequence: Synthetic oligonucleotide
caaauuuaggaucuggccc

SEQ ID NO: 148913 - RNA, 19 nt, Artificial Sequence
  Description of Artificial Sequence: Synthetic oligonucleotide
acccaauucgguuaaaccg

SEQ ID NO: 148914 - RNA, 19 nt, Artificial Sequence
  Description of Artificial Sequence: Synthetic oligonucleotide
agaauuauccauugggcag

SEQ ID NO: 148915 - RNA, 19 nt, Artificial Sequence
  Description of Artificial Sequence: Synthetic oligonucleotide
ucaaauuuaggaucuggcc

SEQ ID NO: 148916 - RNA, 19 nt, Artificial Sequence
  Description of Artificial Sequence: Synthetic oligonucleotide
auguugacuaaguggaagc

SEQ ID NO: 148917 - RNA, 19 nt, Artificial Sequence
  Description of Artificial Sequence: Synthetic oligonucleotide
uauacuaccuuuguacggg

SEQ ID NO: 148918 - RNA, 19 nt, Artificial Sequence
  Description of Artificial Sequence: Synthetic oligonucleotide
cuagaauuauccauugggc

SEQ ID NO: 148919 - RNA, 19 nt, Artificial Sequence
  Description of Artificial Sequence: Synthetic oligonucleotide
uguaacagggaacugggga

SEQ ID NO: 148920 - RNA, 19 nt, Artificial Sequence
  Description of Artificial Sequence: Synthetic oligonucleotide
aaugacccaaccuuuggug

SEQ ID NO: 148921 - RNA, 19 nt, Artificial Sequence
  Description of Artificial Sequence: Synthetic oligonucleotide
uucauauagguccucuucc

SEQ ID NO: 148922 - RNA, 19 nt, Artificial Sequence
  Description of Artificial Sequence: Synthetic oligonucleotide
aguagcuaccgcuggagcc

SEQ ID NO: 148923 - RNA, 19 nt, Artificial Sequence
  Description of Artificial Sequence: Synthetic oligonucleotide
ugcauuagaagaacggggc

SEQ ID NO: 148924 - RNA, 19 nt, Artificial Sequence
  Description of Artificial Sequence: Synthetic oligonucleotide
agaaacggaguagaaaagc

SEQ ID NO: 148925 - RNA, 19 nt, Artificial Sequence
  Description of Artificial Sequence: Synthetic oligonucleotide
gcuagaauuauccauuggg

SEQ ID NO: 148926 - RNA, 19 nt, Artificial Sequence
  Description of Artificial Sequence: Synthetic oligonucleotide
gaaaagaagggcuuccgac

SEQ ID NO: 148927 - RNA, 19 nt, Artificial Sequence
  Description of Artificial Sequence: Synthetic oligonucleotide
gguuaagcugcccauaugg

SEQ ID NO: 148928 - RNA, 19 nt, Artificial Sequence
  Description of Artificial Sequence: Synthetic oligonucleotide
aaguagcuaccgcuggagc

SEQ ID NO: 148929 - RNA, 19 nt, Artificial Sequence
  Description of Artificial Sequence: Synthetic oligonucleotide
aauuucuacagugcauuag

SEQ ID NO: 148930 - RNA, 19 nt, Artificial Sequence
  Description of Artificial Sequence: Synthetic oligonucleotide
auucgguuaaaccgcugcc

SEQ ID NO: 148931 - RNA, 19 nt, Artificial Sequence
  Description of Artificial Sequence: Synthetic oligonucleotide
aaggguucaaacaccuggc

SEQ ID NO: 148932 - RNA, 19 nt, Artificial Sequence
  Description of Artificial Sequence: Synthetic oligonucleotide
caaccaaccgcucaaacug

SEQ ID NO: 148933 - RNA, 19 nt, Artificial Sequence
  Description of Artificial Sequence: Synthetic oligonucleotide
ugagaucuugggaagaauc

SEQ ID NO: 148934 - RNA, 19 nt, Artificial Sequence
  Description of Artificial Sequence: Synthetic oligonucleotide
guauacuaccuuuguacgg

SEQ ID NO: 148935 - RNA, 19 nt, Artificial Sequence
  Description of Artificial Sequence: Synthetic oligonucleotide
aacgccgcagccaauaguc

SEQ ID NO: 148936 - RNA, 19 nt, Artificial Sequence
  Description of Artificial Sequence: Synthetic oligonucleotide
augucacguaccuggaccc

SEQ ID NO: 148937 - RNA, 19 nt, Artificial Sequence
  Description of Artificial Sequence: Synthetic oligonucleotide
ggugccuucguccacaggg

SEQ ID NO: 148938 - RNA, 19 nt, Artificial Sequence
  Description of Artificial Sequence: Synthetic oligonucleotide
uuuggugguaacccaauuc

SEQ ID NO: 148939 - RNA, 19 nt, Artificial Sequence
  Description of Artificial Sequence: Synthetic oligonucleotide
gaaugugagagcccucggg

SEQ ID NO: 148940 - RNA, 19 nt, Artificial Sequence
  Description of Artificial Sequence: Synthetic oligonucleotide
uuuacucggucaauggcac

SEQ ID NO: 148941 - RNA, 19 nt, Artificial Sequence
  Description of Artificial Sequence: Synthetic oligonucleotide
cuuucucuagugcaagccg

SEQ ID NO: 148942 - RNA, 19 nt, Artificial Sequence
  Description of Artificial Sequence: Synthetic oligonucleotide
uucacuuguagaccgcuga

SEQ ID NO: 148943 - RNA, 19 nt, Artificial Sequence
  Description of Artificial Sequence: Synthetic oligonucleotide
uucaaaacgccgcagccaa

SEQ ID NO: 148944 - RNA, 19 nt, Artificial Sequence
  Description of Artificial Sequence: Synthetic oligonucleotide
augacccaaccuuuggugg

SEQ ID NO: 148945 - RNA, 19 nt, Artificial Sequence
  Description of Artificial Sequence: Synthetic oligonucleotide
caccguauggcucuggacc

SEQ ID NO: 148946 - RNA, 19 nt, Artificial Sequence
  Description of Artificial Sequence: Synthetic oligonucleotide
ugacugaccaauuguagaa

SEQ ID NO: 148947 - RNA, 19 nt, Artificial Sequence
  Description of Artificial Sequence: Synthetic oligonucleotide
aagaugcacguugagcggg

SEQ ID NO: 148948 - RNA, 19 nt, Artificial Sequence
  Description of Artificial Sequence: Synthetic oligonucleotide
acuggccagguauacuacc

SEQ ID NO: 148949 - RNA, 19 nt, Artificial Sequence
  Description of Artificial Sequence: Synthetic oligonucleotide
uggugguaacccaauucgg

SEQ ID NO: 148950 - RNA, 19 nt, Artificial Sequence
  Description of Artificial Sequence: Synthetic oligonucleotide
uuggacuggacggagagca

SEQ ID NO: 148951 - RNA, 19 nt, Artificial Sequence
  Description of Artificial Sequence: Synthetic oligonucleotide
augcacuuaggcuauguca

SEQ ID NO: 148952 - RNA, 19 nt, Artificial Sequence
  Description of Artificial Sequence: Synthetic oligonucleotide
cucccucuuacauuggacc

SEQ ID NO: 148953 - RNA, 19 nt, Artificial Sequence
  Description of Artificial Sequence: Synthetic oligonucleotide
ugcuucaaaacgccgcagc

SEQ ID NO: 148954 - RNA, 19 nt, Artificial Sequence
  Description of Artificial Sequence: Synthetic oligonucleotide
agagaugggacuuucccaa

SEQ ID NO: 148955 - RNA, 19 nt, Artificial Sequence
  Description of Artificial Sequence: Synthetic oligonucleotide
agucauauuuaaucagcca

SEQ ID NO: 148956 - RNA, 19 nt, Artificial Sequence
  Description of Artificial Sequence: Synthetic oligonucleotide
uuaaucagccaguugucau

SEQ ID NO: 148957 - RNA, 19 nt, Artificial Sequence
  Description of Artificial Sequence: Synthetic oligonucleotide
aaaacgccgcagccaauag

SEQ ID NO: 148958 - RNA, 19 nt, Artificial Sequence
  Description of Artificial Sequence: Synthetic oligonucleotide
cuucaagcgagagaggcag

SEQ ID NO: 148959 - RNA, 19 nt, Artificial Sequence
  Description of Artificial Sequence: Synthetic oligonucleotide
ugcuuauggaacuggcccc

SEQ ID NO: 148960 - RNA, 19 nt, Artificial Sequence
  Description of Artificial Sequence: Synthetic oligonucleotide
uccuugacgaaguuagggu

SEQ ID NO: 148961 - RNA, 19 nt, Artificial Sequence
  Description of Artificial Sequence: Synthetic oligonucleotide
cugacugacccacagcccc

SEQ ID NO: 148962 - RNA, 19 nt, Artificial Sequence
  Description of Artificial Sequence: Synthetic oligonucleotide
ugucccggcagcuagaauu

SEQ ID NO: 148963 - RNA, 19 nt, Artificial Sequence
  Description of Artificial Sequence: Synthetic oligonucleotide
uuuguacgggguacaaugu

SEQ ID NO: 148964 - RNA, 19 nt, Artificial Sequence
  Description of Artificial Sequence: Synthetic oligonucleotide
auccuugacgaaguuaggg

SEQ ID NO: 148965 - RNA, 19 nt, Artificial Sequence
  Description of Artificial Sequence: Synthetic oligonucleotide
uuguagaccgcugauggga

SEQ ID NO: 148966 - RNA, 19 nt, Artificial Sequence
  Description of Artificial Sequence: Synthetic oligonucleotide
gaaguuagggucugagauc

SEQ ID NO: 148967 - RNA, 19 nt, Artificial Sequence
  Description of Artificial Sequence: Synthetic oligonucleotide
agcuagaauuauccauugg

SEQ ID NO: 148968 - RNA, 19 nt, Artificial Sequence
  Description of Artificial Sequence: Synthetic oligonucleotide
acuaaggaaggacccagga

SEQ ID NO: 148969 - RNA, 19 nt, Artificial Sequence
  Description of Artificial Sequence: Synthetic oligonucleotide
ucccucuuacauuggaccc

SEQ ID NO: 148970 - RNA, 19 nt, Artificial Sequence
  Description of Artificial Sequence: Synthetic oligonucleotide
uggaaugacccaaccuuug

SEQ ID NO: 148971 - RNA, 19 nt, Artificial Sequence
  Description of Artificial Sequence: Synthetic oligonucleotide
ugggagacugucugaaggc

SEQ ID NO: 148972 - RNA, 19 nt, Artificial Sequence
  Description of Artificial Sequence: Synthetic oligonucleotide
acuuaggcuaugucaacca

SEQ ID NO: 148973 - RNA, 19 nt, Artificial Sequence
  Description of Artificial Sequence: Synthetic oligonucleotide
caaccuuuggugguaaccc

SEQ ID NO: 148974 - RNA, 19 nt, Artificial Sequence
  Description of Artificial Sequence: Synthetic oligonucleotide
ugagagaaugggacuuuug

SEQ ID NO: 148975 - RNA, 19 nt, Artificial Sequence
  Description of Artificial Sequence: Synthetic oligonucleotide
ucggguccauagcacaggg

SEQ ID NO: 148976 - RNA, 19 nt, Artificial Sequence
  Description of Artificial Sequence: Synthetic oligonucleotide
uagaccgcugaugggaacg

SEQ ID NO: 148977 - RNA, 19 nt, Artificial Sequence
  Description of Artificial Sequence: Synthetic oligonucleotide
acgaaguagcuaccgcugg

SEQ ID NO: 148978 - RNA, 19 nt, Artificial Sequence
  Description of Artificial Sequence: Synthetic oligonucleotide
aguaguugucgguuagugu

SEQ ID NO: 148979 - RNA, 19 nt, Artificial Sequence
  Description of Artificial Sequence: Synthetic oligonucleotide
uucgguuaaaccgcugccc

SEQ ID NO: 148980 - RNA, 19 nt, Artificial Sequence
  Description of Artificial Sequence: Synthetic oligonucleotide
cagaaacggaguagaaaag

SEQ ID NO: 148981 - RNA, 19 nt, Artificial Sequence
  Description of Artificial Sequence: Synthetic oligonucleotide
aguucucccaaacaugguu

SEQ ID NO: 148982 - RNA, 19 nt, Artificial Sequence
  Description of Artificial Sequence: Synthetic oligonucleotide
accgcugcccaacuuuugg

SEQ ID NO: 148983 - RNA, 19 nt, Artificial Sequence
  Description of Artificial Sequence: Synthetic oligonucleotide
agucuaagugggcuggcug

SEQ ID NO: 148984 - RNA, 19 nt, Artificial Sequence
  Description of Artificial Sequence: Synthetic oligonucleotide
uuguagaaugugagagccc

SEQ ID NO: 148985 - RNA, 19 nt, Artificial Sequence
  Description of Artificial Sequence: Synthetic oligonucleotide
ggguccauagcacagggug

SEQ ID NO: 148986 - RNA, 19 nt, Artificial Sequence
  Description of Artificial Sequence: Synthetic oligonucleotide
guagaugcgcucgggauag

SEQ ID NO: 148987 - RNA, 19 nt, Artificial Sequence
  Description of Artificial Sequence: Synthetic oligonucleotide
ugcaacaguaguugucggu

SEQ ID NO: 148988 - RNA, 19 nt, Artificial Sequence
  Description of Artificial Sequence: Synthetic oligonucleotide
uguugacuaaguggaagcu

SEQ ID NO: 148989 - RNA, 19 nt, Artificial Sequence
  Description of Artificial Sequence: Synthetic oligonucleotide
aacagcgugcgccgccgcg

SEQ ID NO: 148990 - RNA, 19 nt, Artificial Sequence
  Description of Artificial Sequence: Synthetic oligonucleotide
ucauacuauuugcauugau

SEQ ID NO: 148991 - RNA, 19 nt, Artificial Sequence
  Description of Artificial Sequence: Synthetic oligonucleotide
uugucgguuaguguucuca

SEQ ID NO: 148992 - RNA, 19 nt, Artificial Sequence
  Description of Artificial Sequence: Synthetic oligonucleotide
aaacgccgcagccaauagu

SEQ ID NO: 148993 - RNA, 19 nt, Artificial Sequence
  Description of Artificial Sequence: Synthetic oligonucleotide
ugggucugaacagcgugcg

SEQ ID NO: 148994 - RNA, 19 nt, Artificial Sequence
  Description of Artificial Sequence: Synthetic oligonucleotide
cccaauucgguuaaaccgc

SEQ ID NO: 148995 - RNA, 19 nt, Artificial Sequence
  Description of Artificial Sequence: Synthetic oligonucleotide
uucucuagugcaagccgcu

SEQ ID NO: 148996 - RNA, 19 nt, Artificial Sequence
  Description of Artificial Sequence: Synthetic oligonucleotide
ugguaacccaauucgguua

SEQ ID NO: 148997 - RNA, 19 nt, Artificial Sequence
  Description of Artificial Sequence: Synthetic oligonucleotide
cugagaguccuugacgaag

SEQ ID NO: 148998 - RNA, 19 nt, Artificial Sequence
  Description of Artificial Sequence: Synthetic oligonucleotide
uguagaccgcugaugggaa

SEQ ID NO: 148999 - RNA, 19 nt, Artificial Sequence
  Description of Artificial Sequence: Synthetic oligonucleotide
gauaagaaggcaggaagcu

SEQ ID NO: 149000 - RNA, 19 nt, Artificial Sequence
  Description of Artificial Sequence: Synthetic oligonucleotide
auuggacuggacggagagc

SEQ ID NO: 149001 - RNA, 19 nt, Artificial Sequence
  Description of Artificial Sequence: Synthetic oligonucleotide
gacuaaggaaggacccagg

SEQ ID NO: 149002 - RNA, 19 nt, Artificial Sequence
  Description of Artificial Sequence: Synthetic oligonucleotide
ugaacagcgugcgccgccg

SEQ ID NO: 149003 - RNA, 19 nt, Artificial Sequence
  Description of Artificial Sequence: Synthetic oligonucleotide
ugacccaaccuuugguggu

SEQ ID NO: 149004 - RNA, 19 nt, Artificial Sequence
  Description of Artificial Sequence: Synthetic oligonucleotide
guagcuaccgcuggagccc

SEQ ID NO: 149005 - RNA, 19 nt, Artificial Sequence
  Description of Artificial Sequence: Synthetic oligonucleotide
acauucaaggcaaccugag

SEQ ID NO: 149006 - RNA, 19 nt, Artificial Sequence
  Description of Artificial Sequence: Synthetic oligonucleotide
cagagucuaagugggcugg

SEQ ID NO: 149007 - RNA, 19 nt, Artificial Sequence
  Description of Artificial Sequence: Synthetic oligonucleotide
accguauggcucuggaccu

SEQ ID NO: 149008 - RNA, 19 nt, Artificial Sequence
  Description of Artificial Sequence: Synthetic oligonucleotide
ccggcagcuagaauuaucc

SEQ ID NO: 149009 - RNA, 19 nt, Artificial Sequence
  Description of Artificial Sequence: Synthetic oligonucleotide
ucgccaacaggcuggugug

SEQ ID NO: 149010 - RNA, 19 nt, Artificial Sequence
  Description of Artificial Sequence: Synthetic oligonucleotide
accgcugaugggaacgcgc

SEQ ID NO: 149011 - RNA, 19 nt, Artificial Sequence
  Description of Artificial Sequence: Synthetic oligonucleotide
agucguuccgcucgcggug

SEQ ID NO: 149012 - RNA, 19 nt, Artificial Sequence
  Description of Artificial Sequence: Synthetic oligonucleotide
gaugggaacgcgccgucuc

SEQ ID NO: 149013 - RNA, 19 nt, Artificial Sequence
  Description of Artificial Sequence: Synthetic oligonucleotide
agaacggggcagcagcgcu

SEQ ID NO: 149014 - RNA, 19 nt, Artificial Sequence
  Description of Artificial Sequence: Synthetic oligonucleotide
ucacuuguagaccgcugau

SEQ ID NO: 149015 - RNA, 19 nt, Artificial Sequence
  Description of Artificial Sequence: Synthetic oligonucleotide
aauuuaggaucuggccccu

SEQ ID NO: 149016 - RNA, 19 nt, Artificial Sequence
  Description of Artificial Sequence: Synthetic oligonucleotide
ggagacuaaggaaggaccc

SEQ ID NO: 149017 - RNA, 19 nt, Artificial Sequence
  Description of Artificial Sequence: Synthetic oligonucleotide
uacgggguacaauguugag

SEQ ID NO: 149018 - RNA, 19 nt, Artificial Sequence
  Description of Artificial Sequence: Synthetic oligonucleotide
ggauagauggagcacucga

SEQ ID NO: 149019 - RNA, 19 nt, Artificial Sequence
  Description of Artificial Sequence: Synthetic oligonucleotide
aggguucaaacaccuggca

SEQ ID NO: 149020 - RNA, 19 nt, Artificial Sequence
  Description of Artificial Sequence: Synthetic oligonucleotide
gcuucaaaacgccgcagcc

SEQ ID NO: 149021 - RNA, 19 nt, Artificial Sequence
  Description of Artificial Sequence: Synthetic oligonucleotide
uugacgaaguuagggucug

SEQ ID NO: 149022 - RNA, 19 nt, Artificial Sequence
  Description of Artificial Sequence: Synthetic oligonucleotide
cuuccgacucugaaagcuc

SEQ ID NO: 149023 - RNA, 19 nt, Artificial Sequence
  Description of Artificial Sequence: Synthetic oligonucleotide
ggcuucaagcgagagaggc

SEQ ID NO: 149024 - RNA, 19 nt, Artificial Sequence
  Description of Artificial Sequence: Synthetic oligonucleotide
aggaguucucccaaacaug

SEQ ID NO: 149025 - RNA, 19 nt, Artificial Sequence
  Description of Artificial Sequence: Synthetic oligonucleotide
gaauuauccauugggcagu

SEQ ID NO: 149026 - RNA, 19 nt, Artificial Sequence
  Description of Artificial Sequence: Synthetic oligonucleotide
gaaugacccaaccuuuggu

SEQ ID NO: 149027 - RNA, 19 nt, Artificial Sequence
  Description of Artificial Sequence: Synthetic oligonucleotide
aggacgccugcacccuugc

SEQ ID NO: 149028 - RNA, 19 nt, Artificial Sequence
  Description of Artificial Sequence: Synthetic oligonucleotide
uccgacucugaaagcucug

SEQ ID NO: 149029 - RNA, 19 nt, Artificial Sequence
  Description of Artificial Sequence: Synthetic oligonucleotide
ugcuuccgagagauagccc

SEQ ID NO: 149030 - RNA, 19 nt, Artificial Sequence
  Description of Artificial Sequence: Synthetic oligonucleotide
ucacguaccuggaccccug

SEQ ID NO: 149031 - RNA, 19 nt, Artificial Sequence
  Description of Artificial Sequence: Synthetic oligonucleotide
agaccgcugaugggaacgc

SEQ ID NO: 149032 - RNA, 19 nt, Artificial Sequence
  Description of Artificial Sequence: Synthetic oligonucleotide
uuaaaccgcugcccaacuu

SEQ ID NO: 149033 - RNA, 19 nt, Artificial Sequence
  Description of Artificial Sequence: Synthetic oligonucleotide
cagcccgggauaagaaggc

SEQ ID NO: 149034 - RNA, 19 nt, Artificial Sequence
  Description of Artificial Sequence: Synthetic oligonucleotide
aacgcgccgucucaacaau

SEQ ID NO: 149035 - RNA, 19 nt, Artificial Sequence
  Description of Artificial Sequence: Synthetic oligonucleotide
ucgcggugggucugaacag

SEQ ID NO: 149036 - RNA, 19 nt, Artificial Sequence
  Description of Artificial Sequence: Synthetic oligonucleotide
gagacuaaggaaggaccca

SEQ ID NO: 149037 - RNA, 19 nt, Artificial Sequence
  Description of Artificial Sequence: Synthetic oligonucleotide
cuugacgaaguuagggucu

SEQ ID NO: 149038 - RNA, 19 nt, Artificial Sequence
  Description of Artificial Sequence: Synthetic oligonucleotide
gaugggacuuucccaaccu

SEQ ID NO: 149039 - RNA, 19 nt, Artificial Sequence
  Description of Artificial Sequence: Synthetic oligonucleotide
acgggguacaauguugagu

SEQ ID NO: 149040 - RNA, 19 nt, Artificial Sequence
  Description of Artificial Sequence: Synthetic oligonucleotide
augguucugaggccagagu

SEQ ID NO: 149041 - RNA, 19 nt, Artificial Sequence
  Description of Artificial Sequence: Synthetic oligonucleotide
uccagugcucagagauuca

SEQ ID NO: 149042 - RNA, 19 nt, Artificial Sequence
  Description of Artificial Sequence: Synthetic oligonucleotide
ugacugucgccuucucccu

SEQ ID NO: 149043 - RNA, 19 nt, Artificial Sequence
  Description of Artificial Sequence: Synthetic oligonucleotide
gaacgcgccgucucaacaa

SEQ ID NO: 149044 - RNA, 19 nt, Artificial Sequence
  Description of Artificial Sequence: Synthetic oligonucleotide
cugaacagcgugcgccgcc

SEQ ID NO: 149045 - RNA, 19 nt, Artificial Sequence
  Description of Artificial Sequence: Synthetic oligonucleotide
cacuuguagaccgcugaug

SEQ ID NO: 149046 - RNA, 19 nt, Artificial Sequence
  Description of Artificial Sequence: Synthetic oligonucleotide
cuucaaaacgccgcagcca

SEQ ID NO: 149047 - RNA, 19 nt, Artificial Sequence
  Description of Artificial Sequence: Synthetic oligonucleotide
accaugaaaagaagggcuu

SEQ ID NO: 149048 - RNA, 19 nt, Artificial Sequence
  Description of Artificial Sequence: Synthetic oligonucleotide
ggacuuuacucggucaaug

SEQ ID NO: 149049 - RNA, 19 nt, Artificial Sequence
  Description of Artificial Sequence: Synthetic oligonucleotide
guacgggguacaauguuga

SEQ ID NO: 149050 - RNA, 19 nt, Artificial Sequence
  Description of Artificial Sequence: Synthetic oligonucleotide
guguaacagggaacugggg

SEQ ID NO: 149051 - RNA, 19 nt, Artificial Sequence
  Description of Artificial Sequence: Synthetic oligonucleotide
caauucgguuaaaccgcug

SEQ ID NO: 149052 - RNA, 19 nt, Artificial Sequence
  Description of Artificial Sequence: Synthetic oligonucleotide
gggauugucgggguggggc

SEQ ID NO: 149053 - RNA, 19 nt, Artificial Sequence
  Description of Artificial Sequence: Synthetic oligonucleotide
gugggucugaacagcgugc

SEQ ID NO: 149054 - RNA, 19 nt, Artificial Sequence
  Description of Artificial Sequence: Synthetic oligonucleotide
agaugcacguugagcgggg

SEQ ID NO: 149055 - RNA, 19 nt, Artificial Sequence
  Description of Artificial Sequence: Synthetic oligonucleotide
agcuagcccauugucuaug

SEQ ID NO: 149056 - RNA, 19 nt, Artificial Sequence
  Description of Artificial Sequence: Synthetic oligonucleotide
ugucacguaccuggacccc

SEQ ID NO: 149057 - RNA, 19 nt, Artificial Sequence
  Description of Artificial Sequence: Synthetic oligonucleotide
uggacccaauuuccuccug

SEQ ID NO: 149058 - RNA, 19 nt, Artificial Sequence
  Description of Artificial Sequence: Synthetic oligonucleotide
augggaacgcgccgucuca

SEQ ID NO: 149059 - RNA, 19 nt, Artificial Sequence
  Description of Artificial Sequence: Synthetic oligonucleotide
gguuaaaccgcugcccaac

SEQ ID NO: 149060 - RNA, 19 nt, Artificial Sequence
  Description of Artificial Sequence: Synthetic oligonucleotide
aggggacucuuauugucuu

SEQ ID NO: 149061 - RNA, 19 nt, Artificial Sequence
  Description of Artificial Sequence: Synthetic oligonucleotide
gagcccucggguccauagc

SEQ ID NO: 149062 - RNA, 19 nt, Artificial Sequence
  Description of Artificial Sequence: Synthetic oligonucleotide
cugggauugucgggguggg

SEQ ID NO: 149063 - RNA, 19 nt, Artificial Sequence
  Description of Artificial Sequence: Synthetic oligonucleotide
ucaaaacgccgcagccaau

SEQ ID NO: 149064 - RNA, 19 nt, Artificial Sequence
  Description of Artificial Sequence: Synthetic oligonucleotide
agacaggaguucucccaaa

SEQ ID NO: 149065 - RNA, 19 nt, Artificial Sequence
  Description of Artificial Sequence: Synthetic oligonucleotide
guagaccgcugaugggaac

SEQ ID NO: 149066 - RNA, 19 nt, Artificial Sequence
  Description of Artificial Sequence: Synthetic oligonucleotide
cuggcuccuagauuggacu

SEQ ID NO: 149067 - RNA, 19 nt, Artificial Sequence
  Description of Artificial Sequence: Synthetic oligonucleotide
gaccgcugaugggaacgcg

SEQ ID NO: 149068 - RNA, 19 nt, Artificial Sequence
  Description of Artificial Sequence: Synthetic oligonucleotide
ccaagcuagccccugcuuc

SEQ ID NO: 149069 - RNA, 19 nt, Artificial Sequence
  Description of Artificial Sequence: Synthetic oligonucleotide
ccaaucugugucccggcag

SEQ ID NO: 149070 - RNA, 19 nt, Artificial Sequence
  Description of Artificial Sequence: Synthetic oligonucleotide
gaugcacguugagcggggc

SEQ ID NO: 149071 - RNA, 19 nt, Artificial Sequence
  Description of Artificial Sequence: Synthetic oligonucleotide
cgggaagucguuccgcucg

SEQ ID NO: 149072 - RNA, 19 nt, Artificial Sequence
  Description of Artificial Sequence: Synthetic oligonucleotide
cagugguaacaggaagaac

SEQ ID NO: 149073 - RNA, 19 nt, Artificial Sequence
  Description of Artificial Sequence: Synthetic oligonucleotide
gguagaugcgcucgggaua

SEQ ID NO: 149074 - RNA, 19 nt, Artificial Sequence
  Description of Artificial Sequence: Synthetic oligonucleotide
ucguuccgcucgcgguggg

SEQ ID NO: 149075 - RNA, 19 nt, Artificial Sequence
  Description of Artificial Sequence: Synthetic oligonucleotide
cagguauacuaccuuugua

SEQ ID NO: 149076 - RNA, 19 nt, Artificial Sequence
  Description of Artificial Sequence: Synthetic oligonucleotide
gugguaacccaauucgguu

SEQ ID NO: 149077 - RNA, 19 nt, Artificial Sequence
  Description of Artificial Sequence: Synthetic oligonucleotide
gugccuucguccacagggc

SEQ ID NO: 149078 - RNA, 19 nt, Artificial Sequence
  Description of Artificial Sequence: Synthetic oligonucleotide
agauuggacuggacggaga

SEQ ID NO: 149079 - RNA, 19 nt, Artificial Sequence
  Description of Artificial Sequence: Synthetic oligonucleotide
acguaccuggaccccugca

SEQ ID NO: 149080 - RNA, 19 nt, Artificial Sequence
  Description of Artificial Sequence: Synthetic oligonucleotide
ggacccaauuuccuccuga

SEQ ID NO: 149081 - RNA, 19 nt, Artificial Sequence
  Description of Artificial Sequence: Synthetic oligonucleotide
caaaacgccgcagccaaua

SEQ ID NO: 149082 - RNA, 19 nt, Artificial Sequence
  Description of Artificial Sequence: Synthetic oligonucleotide
gacuuuugccuggggcaac

SEQ ID NO: 149083 - RNA, 19 nt, Artificial Sequence
  Description of Artificial Sequence: Synthetic oligonucleotide
acggccaaagcagcagggu

SEQ ID NO: 149084 - RNA, 19 nt, Artificial Sequence
  Description of Artificial Sequence: Synthetic oligonucleotide
gggucucgccaacaggcug

SEQ ID NO: 149085 - RNA, 19 nt, Artificial Sequence
  Description of Artificial Sequence: Synthetic oligonucleotide
cuccuagauuggacuggac

SEQ ID NO: 149086 - RNA, 19 nt, Artificial Sequence
  Description of Artificial Sequence: Synthetic oligonucleotide
ggaacgcgccgucucaaca

SEQ ID NO: 149087 - RNA, 19 nt, Artificial Sequence
  Description of Artificial Sequence: Synthetic oligonucleotide
ggauugucgggguggggca

SEQ ID NO: 149088 - RNA, 19 nt, Artificial Sequence
  Description of Artificial Sequence: Synthetic oligonucleotide
cccugucgaaaccaggauc

SEQ ID NO: 149089 - RNA, 19 nt, Artificial Sequence
  Description of Artificial Sequence: Synthetic oligonucleotide
cacguaccuggaccccugc

SEQ ID NO: 149090 - RNA, 19 nt, Artificial Sequence
  Description of Artificial Sequence: Synthetic oligonucleotide
gaacagcgugcgccgccgc

SEQ ID NO: 149091 - RNA, 19 nt, Artificial Sequence
  Description of Artificial Sequence: Synthetic oligonucleotide
cacguugagcggggcaggc

SEQ ID NO: 149092 - RNA, 19 nt, Artificial Sequence
  Description of Artificial Sequence: Synthetic oligonucleotide
ggauucacuuguagaccgc

SEQ ID NO: 149093 - RNA, 19 nt, Artificial Sequence
  Description of Artificial Sequence: Synthetic oligonucleotide
ugacgaaguuagggucuga

SEQ ID NO: 149094 - RNA, 19 nt, Artificial Sequence
  Description of Artificial Sequence: Synthetic oligonucleotide
guagaaugugagagcccuc

SEQ ID NO: 149095 - RNA, 19 nt, Artificial Sequence
  Description of Artificial Sequence: Synthetic oligonucleotide
ggugguaacccaauucggu

SEQ ID NO: 149096 - RNA, 19 nt, Artificial Sequence
  Description of Artificial Sequence: Synthetic oligonucleotide
ugcccaacuuuuggcacuu

SEQ ID NO: 149097 - RNA, 19 nt, Artificial Sequence
  Description of Artificial Sequence: Synthetic oligonucleotide
cccucauaacagcaaucug

SEQ ID NO: 149098 - RNA, 19 nt, Artificial Sequence
  Description of Artificial Sequence: Synthetic oligonucleotide
guugucgguuaguguucuc

SEQ ID NO: 149099 - RNA, 19 nt, Artificial Sequence
  Description of Artificial Sequence: Synthetic oligonucleotide
agcccgggauaagaaggca

SEQ ID NO: 149100 - RNA, 19 nt, Artificial Sequence
  Description of Artificial Sequence: Synthetic oligonucleotide
gauugucgggguggggcaa

SEQ ID NO: 149101 - RNA, 19 nt, Artificial Sequence
  Description of Artificial Sequence: Synthetic oligonucleotide
uagcuaccgcuggagcccu

SEQ ID NO: 149102 - RNA, 19 nt, Artificial Sequence
  Description of Artificial Sequence: Synthetic oligonucleotide
cuaagccuucaagacaaau

SEQ ID NO: 149103 - RNA, 19 nt, Artificial Sequence
  Description of Artificial Sequence: Synthetic oligonucleotide
gagucuaagugggcuggcu

SEQ ID NO: 149104 - RNA, 19 nt, Artificial Sequence
  Description of Artificial Sequence: Synthetic oligonucleotide
gcucccucuuacauuggac

SEQ ID NO: 149105 - RNA, 19 nt, Artificial Sequence
  Description of Artificial Sequence: Synthetic oligonucleotide
gcuucaagcgagagaggca

SEQ ID NO: 149106 - RNA, 19 nt, Artificial Sequence
  Description of Artificial Sequence: Synthetic oligonucleotide
gggucugaacagcgugcgc

SEQ ID NO: 149107 - RNA, 19 nt, Artificial Sequence
  Description of Artificial Sequence: Synthetic oligonucleotide
cugcccaacuuuuggcacu

SEQ ID NO: 149108 - RNA, 19 nt, Artificial Sequence
  Description of Artificial Sequence: Synthetic oligonucleotide
acguugagcggggcaggca

SEQ ID NO: 149109 - RNA, 19 nt, Artificial Sequence
  Description of Artificial Sequence: Synthetic oligonucleotide
ccaccguauggcucuggac

SEQ ID NO: 149110 - RNA, 19 nt, Artificial Sequence
  Description of Artificial Sequence: Synthetic oligonucleotide
gaguucucccaaacauggu

SEQ ID NO: 149111 - RNA, 19 nt, Artificial Sequence
  Description of Artificial Sequence: Synthetic oligonucleotide
ccacccaaucugugucccg

SEQ ID NO: 149112 - RNA, 19 nt, Artificial Sequence
  Description of Artificial Sequence: Synthetic oligonucleotide
auaugcccuccaggaguca

SEQ ID NO: 149113 - RNA, 19 nt, Artificial Sequence
  Description of Artificial Sequence: Synthetic oligonucleotide
gggucaaauuuaggaucug

SEQ ID NO: 149114 - RNA, 19 nt, Artificial Sequence
  Description of Artificial Sequence: Synthetic oligonucleotide
agccaauagucugcaucuu

SEQ ID NO: 149115 - RNA, 19 nt, Artificial Sequence
  Description of Artificial Sequence: Synthetic oligonucleotide
gcaacaguaguugucgguu

SEQ ID NO: 149116 - RNA, 19 nt, Artificial Sequence
  Description of Artificial Sequence: Synthetic oligonucleotide
gugcaagccgcuugccccu

SEQ ID NO: 149117 - RNA, 19 nt, Artificial Sequence
  Description of Artificial Sequence: Synthetic oligonucleotide
cccggcagcuagaauuauc

SEQ ID NO: 149118 - RNA, 19 nt, Artificial Sequence
  Description of Artificial Sequence: Synthetic oligonucleotide
gggaacgcgccgucucaac

SEQ ID NO: 149119 - RNA, 19 nt, Artificial Sequence
  Description of Artificial Sequence: Synthetic oligonucleotide
gccagagucuaagugggcu

SEQ ID NO: 149120 - RNA, 19 nt, Artificial Sequence
  Description of Artificial Sequence: Synthetic oligonucleotide
acgccgcagccaauagucu

SEQ ID NO: 149121 - RNA, 19 nt, Artificial Sequence
  Description of Artificial Sequence: Synthetic oligonucleotide
cagcaugcacuuaggcuau

SEQ ID NO: 149122 - RNA, 19 nt, Artificial Sequence
  Description of Artificial Sequence: Synthetic oligonucleotide
gcgccgucucaacaaucac

SEQ ID NO: 149123 - RNA, 19 nt, Artificial Sequence
  Description of Artificial Sequence: Synthetic oligonucleotide
ggcaaccugaguacaggcu

SEQ ID NO: 149124 - RNA, 19 nt, Artificial Sequence
  Description of Artificial Sequence: Synthetic oligonucleotide
gaaggacgccugcacccuu

SEQ ID NO: 149125 - RNA, 19 nt, Artificial Sequence
  Description of Artificial Sequence: Synthetic oligonucleotide
ccccucauaacagcaaucu

SEQ ID NO: 149126 - RNA, 19 nt, Artificial Sequence
  Description of Artificial Sequence: Synthetic oligonucleotide
gccccucauaacagcaauc

SEQ ID NO: 149127 - RNA, 19 nt, Artificial Sequence
  Description of Artificial Sequence: Synthetic oligonucleotide
ccgggaagucguuccgcuc

SEQ ID NO: 149128 - RNA, 19 nt, Artificial Sequence
  Description of Artificial Sequence: Synthetic oligonucleotide
gggcaaacaauggugccuu

SEQ ID NO: 149129 - RNA, 19 nt, Artificial Sequence
  Description of Artificial Sequence: Synthetic oligonucleotide
cugagagaaugggacuuuu

SEQ ID NO: 149130 - RNA, 19 nt, Artificial Sequence
  Description of Artificial Sequence: Synthetic oligonucleotide
ccaguggggucucgccaac

SEQ ID NO: 149131 - RNA, 19 nt, Artificial Sequence
  Description of Artificial Sequence: Synthetic oligonucleotide
caguggggucucgccaaca

SEQ ID NO: 149132 - RNA, 19 nt, Artificial Sequence
  Description of Artificial Sequence: Synthetic oligonucleotide
ggaaggacgccugcacccu

SEQ ID NO: 149133 - RNA, 19 nt, Artificial Sequence
  Description of Artificial Sequence: Synthetic oligonucleotide
ccaaccgcucaaacugcaa

SEQ ID NO: 149134 - RNA, 19 nt, Artificial Sequence
  Description of Artificial Sequence: Synthetic oligonucleotide
ccgggauaagaaggcagga

SEQ ID NO: 149135 - RNA, 19 nt, Artificial Sequence
  Description of Artificial Sequence: Synthetic oligonucleotide
ccugcgccgccaccguaug

SEQ ID NO: 149136 - RNA, 19 nt, Artificial Sequence
  Description of Artificial Sequence: Synthetic oligonucleotide
ccccaguggggucucgcca

SEQ ID NO: 149137 - RNA, 19 nt, Artificial Sequence
  Description of Artificial Sequence: Synthetic oligonucleotide
ccuuuggugguaacccaau

SEQ ID NO: 149138 - RNA, 19 nt, Artificial Sequence
  Description of Artificial Sequence: Synthetic oligonucleotide
ccguauggcucuggaccug

SEQ ID NO: 149139 - RNA, 19 nt, Artificial Sequence
  Description of Artificial Sequence: Synthetic oligonucleotide
cguccacagggcaugcaua

SEQ ID NO: 149140 - RNA, 19 nt, Artificial Sequence
  Description of Artificial Sequence: Synthetic oligonucleotide
ggggucucgccaacaggcu

SEQ ID NO: 149141 - RNA, 19 nt, Artificial Sequence
  Description of Artificial Sequence: Synthetic oligonucleotide
cgguuaaaccgcugcccaa

SEQ ID NO: 149142 - RNA, 19 nt, Artificial Sequence
  Description of Artificial Sequence: Synthetic oligonucleotide
ccgacucugaaagcucugu

SEQ ID NO: 149143 - RNA, 19 nt, Artificial Sequence
  Description of Artificial Sequence: Synthetic oligonucleotide
cugucgaaaccaggaucuu

SEQ ID NO: 149144 - RNA, 19 nt, Artificial Sequence
  Description of Artificial Sequence: Synthetic oligonucleotide
ccgcagccaauagucugca

SEQ ID NO: 149145 - RNA, 19 nt, Artificial Sequence
  Description of Artificial Sequence: Synthetic oligonucleotide
ccuuuguacgggguacaau

SEQ ID NO: 149146 - RNA, 19 nt, Artificial Sequence
  Description of Artificial Sequence: Synthetic oligonucleotide
ccugccggugggagccaga

SEQ ID NO: 149147 - RNA, 19 nt, Artificial Sequence
  Description of Artificial Sequence: Synthetic oligonucleotide
ccccugucgaaaccaggau

SEQ ID NO: 149148 - RNA, 19 nt, Artificial Sequence
  Description of Artificial Sequence: Synthetic oligonucleotide
ccgcgaccgccugggcagc

SEQ ID NO: 149149 - RNA, 19 nt, Artificial Sequence
  Description of Artificial Sequence: Synthetic oligonucleotide
cgcgaccgccugggcagcc

SEQ ID NO: 149150 - RNA, 19 nt, Artificial Sequence
  Description of Artificial Sequence: Synthetic oligonucleotide
ccccuagggcuaccaccau

SEQ ID NO: 149151 - RNA, 19 nt, Artificial Sequence
  Description of Artificial Sequence: Synthetic oligonucleotide
aauaacaaaucugauagag

SEQ ID NO: 149152 - RNA, 19 nt, Artificial Sequence
  Description of Artificial Sequence: Synthetic oligonucleotide
gaaucagacagauagcugg

SEQ ID NO: 149153 - RNA, 19 nt, Artificial Sequence
  Description of Artificial Sequence: Synthetic oligonucleotide
acuccuaacauauuugacc

SEQ ID NO: 149154 - RNA, 19 nt, Artificial Sequence
  Description of Artificial Sequence: Synthetic oligonucleotide
aacucugaaacccuuacag

SEQ ID NO: 149155 - RNA, 19 nt, Artificial Sequence
  Description of Artificial Sequence: Synthetic oligonucleotide
aaaacuuuaccgugacucc

SEQ ID NO: 149156 - RNA, 19 nt, Artificial Sequence
  Description of Artificial Sequence: Synthetic oligonucleotide
aacauuaguggaucuagac

SEQ ID NO: 149157 - RNA, 19 nt, Artificial Sequence
  Description of Artificial Sequence: Synthetic oligonucleotide
agauaagugaaucaaacca

SEQ ID NO: 149158 - RNA, 19 nt, Artificial Sequence
  Description of Artificial Sequence: Synthetic oligonucleotide
uucaacuccacuuauacac

SEQ ID NO: 149159 - RNA, 19 nt, Artificial Sequence
  Description of Artificial Sequence: Synthetic oligonucleotide
uuuacguaaugccugaagc

SEQ ID NO: 149160 - RNA, 19 nt, Artificial Sequence
  Description of Artificial Sequence: Synthetic oligonucleotide
uuuuguuagaagauaggcc

SEQ ID NO: 149161 - RNA, 19 nt, Artificial Sequence
  Description of Artificial Sequence: Synthetic oligonucleotide
ggaauugaggaauauaugg

SEQ ID NO: 149162 - RNA, 19 nt, Artificial Sequence
  Description of Artificial Sequence: Synthetic oligonucleotide
uacaguuuuauaaagcagu

SEQ ID NO: 149163 - RNA, 19 nt, Artificial Sequence
  Description of Artificial Sequence: Synthetic oligonucleotide
aggauaaguaaacauuuac

SEQ ID NO: 149164 - RNA, 19 nt, Artificial Sequence
  Description of Artificial Sequence: Synthetic oligonucleotide
agaaguacaaugugugggc

SEQ ID NO: 149165 - RNA, 19 nt, Artificial Sequence
  Description of Artificial Sequence: Synthetic oligonucleotide
uuuaccgugacuccuaaca

SEQ ID NO: 149166 - RNA, 19 nt, Artificial Sequence
  Description of Artificial Sequence: Synthetic oligonucleotide
uuuagguaagugcugagca

SEQ ID NO: 149167 - RNA, 19 nt, Artificial Sequence
  Description of Artificial Sequence: Synthetic oligonucleotide
ucagauaagugaaucaaac

SEQ ID NO: 149168 - RNA, 19 nt, Artificial Sequence
  Description of Artificial Sequence: Synthetic oligonucleotide
uggaagcuaacucagauaa

SEQ ID NO: 149169 - RNA, 19 nt, Artificial Sequence
  Description of Artificial Sequence: Synthetic oligonucleotide
uuauugcugagacaaaugu

SEQ ID NO: 149170 - RNA, 19 nt, Artificial Sequence
  Description of Artificial Sequence: Synthetic oligonucleotide
ucguauaccucuaugugag

SEQ ID NO: 149171 - RNA, 19 nt, Artificial Sequence
  Description of Artificial Sequence: Synthetic oligonucleotide
aaaagcaauuagcugggug

SEQ ID NO: 149172 - RNA, 19 nt, Artificial Sequence
  Description of Artificial Sequence: Synthetic oligonucleotide
auuuguuaagagcuugagg

SEQ ID NO: 149173 - RNA, 19 nt, Artificial Sequence
  Description of Artificial Sequence: Synthetic oligonucleotide
aacccauuaaacuuuguau

SEQ ID NO: 149174 - RNA, 19 nt, Artificial Sequence
  Description of Artificial Sequence: Synthetic oligonucleotide
aauauacauaguucaagaa

SEQ ID NO: 149175 - RNA, 19 nt, Artificial Sequence
  Description of Artificial Sequence: Synthetic oligonucleotide
cuuaaagcggaauugagga

SEQ ID NO: 149176 - RNA, 19 nt, Artificial Sequence
  Description of Artificial Sequence: Synthetic oligonucleotide
uggcauauaccccacaugu

SEQ ID NO: 149177 - RNA, 19 nt, Artificial Sequence
  Description of Artificial Sequence: Synthetic oligonucleotide
aggacaaccacauugguaa

SEQ ID NO: 149178 - RNA, 19 nt, Artificial Sequence
  Description of Artificial Sequence: Synthetic oligonucleotide
aaccgaggaaacuuuguag

SEQ ID NO: 149179 - RNA, 19 nt, Artificial Sequence
  Description of Artificial Sequence: Synthetic oligonucleotide
agagcuugaggucaaauga

SEQ ID NO: 149180 - RNA, 19 nt, Artificial Sequence
  Description of Artificial Sequence: Synthetic oligonucleotide
uauacgcacauguuuacug

SEQ ID NO: 149181 - RNA, 19 nt, Artificial Sequence
  Description of Artificial Sequence: Synthetic oligonucleotide
ugucuagaaacuuuuggcu

SEQ ID NO: 149182 - RNA, 19 nt, Artificial Sequence
  Description of Artificial Sequence: Synthetic oligonucleotide
uuccgggucaccauaauug

SEQ ID NO: 149183 - RNA, 19 nt, Artificial Sequence
  Description of Artificial Sequence: Synthetic oligonucleotide
auacgcacauguuuacugc

SEQ ID NO: 149184 - RNA, 19 nt, Artificial Sequence
  Description of Artificial Sequence: Synthetic oligonucleotide
uccacuuauacacuugacu

SEQ ID NO: 149185 - RNA, 19 nt, Artificial Sequence
  Description of Artificial Sequence: Synthetic oligonucleotide
ucugcugucucguauaccu

SEQ ID NO: 149186 - RNA, 19 nt, Artificial Sequence
  Description of Artificial Sequence: Synthetic oligonucleotide
ucggacuucgacauuguag

SEQ ID NO: 149187 - RNA, 19 nt, Artificial Sequence
  Description of Artificial Sequence: Synthetic oligonucleotide
uuacguaaugccugaagcc

SEQ ID NO: 149188 - RNA, 19 nt, Artificial Sequence
  Description of Artificial Sequence: Synthetic oligonucleotide
uuagauucuuacuguaaug

SEQ ID NO: 149189 - RNA, 19 nt, Artificial Sequence
  Description of Artificial Sequence: Synthetic oligonucleotide
uaggcccugacuaauguag

SEQ ID NO: 149190 - RNA, 19 nt, Artificial Sequence
  Description of Artificial Sequence: Synthetic oligonucleotide
uguuaccuaacuaucucca

SEQ ID NO: 149191 - RNA, 19 nt, Artificial Sequence
  Description of Artificial Sequence: Synthetic oligonucleotide
uauaccucuaugugagggg

SEQ ID NO: 149192 - RNA, 19 nt, Artificial Sequence
  Description of Artificial Sequence: Synthetic oligonucleotide
aacaaugcucccauguggg

SEQ ID NO: 149193 - RNA, 19 nt, Artificial Sequence
  Description of Artificial Sequence: Synthetic oligonucleotide
cuucccguaguauaugucc

SEQ ID NO: 149194 - RNA, 19 nt, Artificial Sequence
  Description of Artificial Sequence: Synthetic oligonucleotide
acuacuaaaauggcaacag

SEQ ID NO: 149195 - RNA, 19 nt, Artificial Sequence
  Description of Artificial Sequence: Synthetic oligonucleotide
ucucguauaccucuaugug

SEQ ID NO: 149196 - RNA, 19 nt, Artificial Sequence
  Description of Artificial Sequence: Synthetic oligonucleotide
uagauucuuacuguaauga

SEQ ID NO: 149197 - RNA, 19 nt, Artificial Sequence
  Description of Artificial Sequence: Synthetic oligonucleotide
ucuuacuguaaugacuuag

SEQ ID NO: 149198 - RNA, 19 nt, Artificial Sequence
  Description of Artificial Sequence: Synthetic oligonucleotide
acucauguuaccuaacuau

SEQ ID NO: 149199 - RNA, 19 nt, Artificial Sequence
  Description of Artificial Sequence: Synthetic oligonucleotide
ucauguuaccuaacuaucu

SEQ ID NO: 149200 - RNA, 19 nt, Artificial Sequence
  Description of Artificial Sequence: Synthetic oligonucleotide
ucuuagggaauucugggau

SEQ ID NO: 149201 - RNA, 19 nt, Artificial Sequence
  Description of Artificial Sequence: Synthetic oligonucleotide
cagauaagugaaucaaacc

SEQ ID NO: 149202 - RNA, 19 nt, Artificial Sequence
  Description of Artificial Sequence: Synthetic oligonucleotide
acucuaauaacaaaucuga

SEQ ID NO: 149203 - RNA, 19 nt, Artificial Sequence
  Description of Artificial Sequence: Synthetic oligonucleotide
agcccuauaacagacacug

SEQ ID NO: 149204 - RNA, 19 nt, Artificial Sequence
  Description of Artificial Sequence: Synthetic oligonucleotide
acacuugccaugaagcagc

SEQ ID NO: 149205 - RNA, 19 nt, Artificial Sequence
  Description of Artificial Sequence: Synthetic oligonucleotide
ggguguuugaaacauaaug

SEQ ID NO: 149206 - RNA, 19 nt, Artificial Sequence
  Description of Artificial Sequence: Synthetic oligonucleotide
ugcauauuugacacauggc

SEQ ID NO: 149207 - RNA, 19 nt, Artificial Sequence
  Description of Artificial Sequence: Synthetic oligonucleotide
uuagguaagugcugagcag

SEQ ID NO: 149208 - RNA, 19 nt, Artificial Sequence
  Description of Artificial Sequence: Synthetic oligonucleotide
ugaaucagacagauagcug

SEQ ID NO: 149209 - RNA, 19 nt, Artificial Sequence
  Description of Artificial Sequence: Synthetic oligonucleotide
uacguaaugccugaagccc

SEQ ID NO: 149210 - RNA, 19 nt, Artificial Sequence
  Description of Artificial Sequence: Synthetic oligonucleotide
auuggguagaaauagccuu

SEQ ID NO: 149211 - RNA, 19 nt, Artificial Sequence
  Description of Artificial Sequence: Synthetic oligonucleotide
ugacuccuaacauauuuga

SEQ ID NO: 149212 - RNA, 19 nt, Artificial Sequence
  Description of Artificial Sequence: Synthetic oligonucleotide
uuuuagguaagugcugagc

SEQ ID NO: 149213 - RNA, 19 nt, Artificial Sequence
  Description of Artificial Sequence: Synthetic oligonucleotide
aacauaaagcaaagucggg

SEQ ID NO: 149214 - RNA, 19 nt, Artificial Sequence
  Description of Artificial Sequence: Synthetic oligonucleotide
ucucgcuauacucaggaua

SEQ ID NO: 149215 - RNA, 19 nt, Artificial Sequence
  Description of Artificial Sequence: Synthetic oligonucleotide
accgaggaaacuuuguaga

SEQ ID NO: 149216 - RNA, 19 nt, Artificial Sequence
  Description of Artificial Sequence: Synthetic oligonucleotide
uccgggucaccauaauugg

SEQ ID NO: 149217 - RNA, 19 nt, Artificial Sequence
  Description of Artificial Sequence: Synthetic oligonucleotide
uaccuaacuaucuccauau

SEQ ID NO: 149218 - RNA, 19 nt, Artificial Sequence
  Description of Artificial Sequence: Synthetic oligonucleotide
gcauauuugacacauggca

SEQ ID NO: 149219 - RNA, 19 nt, Artificial Sequence
  Description of Artificial Sequence: Synthetic oligonucleotide
uucucgguuagauucuuac

SEQ ID NO: 149220 - RNA, 19 nt, Artificial Sequence
  Description of Artificial Sequence: Synthetic oligonucleotide
uccgguaaacacguuauug

SEQ ID NO: 149221 - RNA, 19 nt, Artificial Sequence
  Description of Artificial Sequence: Synthetic oligonucleotide
uguuuaacauuaguggauc

SEQ ID NO: 149222 - RNA, 19 nt, Artificial Sequence
  Description of Artificial Sequence: Synthetic oligonucleotide
aaagccugcuuucagcaua

SEQ ID NO: 149223 - RNA, 19 nt, Artificial Sequence
  Description of Artificial Sequence: Synthetic oligonucleotide
uaaagcggaauugaggaau

SEQ ID NO: 149224 - RNA, 19 nt, Artificial Sequence
  Description of Artificial Sequence: Synthetic oligonucleotide
agacuuaaacccuuccccu

SEQ ID NO: 149225 - RNA, 19 nt, Artificial Sequence
  Description of Artificial Sequence: Synthetic oligonucleotide
cuccacacuaaguuuuagg

SEQ ID NO: 149226 - RNA, 19 nt, Artificial Sequence
  Description of Artificial Sequence: Synthetic oligonucleotide
cucauguuaccuaacuauc

SEQ ID NO: 149227 - RNA, 19 nt, Artificial Sequence
  Description of Artificial Sequence: Synthetic oligonucleotide
acauaaagcaaagucggga

SEQ ID NO: 149228 - RNA, 19 nt, Artificial Sequence
  Description of Artificial Sequence: Synthetic oligonucleotide
uuaccuaacuaucuccaua

SEQ ID NO: 149229 - RNA, 19 nt, Artificial Sequence
  Description of Artificial Sequence: Synthetic oligonucleotide
uucccguaguauauguccc

SEQ ID NO: 149230 - RNA, 19 nt, Artificial Sequence
  Description of Artificial Sequence: Synthetic oligonucleotide
guaaugacuuaguccauac

SEQ ID NO: 149231 - RNA, 19 nt, Artificial Sequence
  Description of Artificial Sequence: Synthetic oligonucleotide
ucgguuagauucuuacugu

SEQ ID NO: 149232 - RNA, 19 nt, Artificial Sequence
  Description of Artificial Sequence: Synthetic oligonucleotide
aaacuuuaccgugacuccu

SEQ ID NO: 149233 - RNA, 19 nt, Artificial Sequence
  Description of Artificial Sequence: Synthetic oligonucleotide
ucaacuccacuuauacacu

SEQ ID NO: 149234 - RNA, 19 nt, Artificial Sequence
  Description of Artificial Sequence: Synthetic oligonucleotide
gacaaccacauugguaagg

SEQ ID NO: 149235 - RNA, 19 nt, Artificial Sequence
  Description of Artificial Sequence: Synthetic oligonucleotide
cauguuaccuaacuaucuc

SEQ ID NO: 149236 - RNA, 19 nt, Artificial Sequence
  Description of Artificial Sequence: Synthetic oligonucleotide
cugaagaccaguaugcaaa

SEQ ID NO: 149237 - RNA, 19 nt, Artificial Sequence
  Description of Artificial Sequence: Synthetic oligonucleotide
ugugugggcaaaccauuca

SEQ ID NO: 149238 - RNA, 19 nt, Artificial Sequence
  Description of Artificial Sequence: Synthetic oligonucleotide
gaagcuaacucagauaagu

SEQ ID NO: 149239 - RNA, 19 nt, Artificial Sequence
  Description of Artificial Sequence: Synthetic oligonucleotide
gucgggaccacucuaauaa

SEQ ID NO: 149240 - RNA, 19 nt, Artificial Sequence
  Description of Artificial Sequence: Synthetic oligonucleotide
ugagaccugaacacaggcu

SEQ ID NO: 149241 - RNA, 19 nt, Artificial Sequence
  Description of Artificial Sequence: Synthetic oligonucleotide
ccuuaaagcggaauugagg

SEQ ID NO: 149242 - RNA, 19 nt, Artificial Sequence
  Description of Artificial Sequence: Synthetic oligonucleotide
acguuauugcauauuugac

SEQ ID NO: 149243 - RNA, 19 nt, Artificial Sequence
  Description of Artificial Sequence: Synthetic oligonucleotide
cuagcagcagccacuuacc

SEQ ID NO: 149244 - RNA, 19 nt, Artificial Sequence
  Description of Artificial Sequence: Synthetic oligonucleotide
ugcugucucguauaccucu

SEQ ID NO: 149245 - RNA, 19 nt, Artificial Sequence
  Description of Artificial Sequence: Synthetic oligonucleotide
guaaacacguuauugcaua

SEQ ID NO: 149246 - RNA, 19 nt, Artificial Sequence
  Description of Artificial Sequence: Synthetic oligonucleotide
ccacuuauacacuugacuc

SEQ ID NO: 149247 - RNA, 19 nt, Artificial Sequence
  Description of Artificial Sequence: Synthetic oligonucleotide
gagcaauaaacuguuuaac

SEQ ID NO: 149248 - RNA, 19 nt, Artificial Sequence
  Description of Artificial Sequence: Synthetic oligonucleotide
uuguuaagagcuugagguc

SEQ ID NO: 149249 - RNA, 19 nt, Artificial Sequence
  Description of Artificial Sequence: Synthetic oligonucleotide
gcauauaccccacauguac

SEQ ID NO: 149250 - RNA, 19 nt, Artificial Sequence
  Description of Artificial Sequence: Synthetic oligonucleotide
ggguuucucgguuagauuc

SEQ ID NO: 149251 - RNA, 19 nt, Artificial Sequence
  Description of Artificial Sequence: Synthetic oligonucleotide
aaguagcuguugcaaugug

SEQ ID NO: 149252 - RNA, 19 nt, Artificial Sequence
  Description of Artificial Sequence: Synthetic oligonucleotide
aucacaagacaagucaagu

SEQ ID NO: 149253 - RNA, 19 nt, Artificial Sequence
  Description of Artificial Sequence: Synthetic oligonucleotide
uuaaagcggaauugaggaa

SEQ ID NO: 149254 - RNA, 19 nt, Artificial Sequence
  Description of Artificial Sequence: Synthetic oligonucleotide
cucguauaccucuauguga

SEQ ID NO: 149255 - RNA, 19 nt, Artificial Sequence
  Description of Artificial Sequence: Synthetic oligonucleotide
acucagauaagugaaucaa

SEQ ID NO: 149256 - RNA, 19 nt, Artificial Sequence
  Description of Artificial Sequence: Synthetic oligonucleotide
cucgcuauacucaggauaa

SEQ ID NO: 149257 - RNA, 19 nt, Artificial Sequence
  Description of Artificial Sequence: Synthetic oligonucleotide
auauaccccacauguacaa

SEQ ID NO: 149258 - RNA, 19 nt, Artificial Sequence
  Description of Artificial Sequence: Synthetic oligonucleotide
ggcucuuaaacaugaauca

SEQ ID NO: 149259 - RNA, 19 nt, Artificial Sequence
  Description of Artificial Sequence: Synthetic oligonucleotide
ugaaacccuuacagauccg

SEQ ID NO: 149260 - RNA, 19 nt, Artificial Sequence
  Description of Artificial Sequence: Synthetic oligonucleotide
auaacaaaucugauagagu

SEQ ID NO: 149261 - RNA, 19 nt, Artificial Sequence
  Description of Artificial Sequence: Synthetic oligonucleotide
auggcauauaccccacaug

SEQ ID NO: 149262 - RNA, 19 nt, Artificial Sequence
  Description of Artificial Sequence: Synthetic oligonucleotide
acggacaguagacacagua

SEQ ID NO: 149263 - RNA, 19 nt, Artificial Sequence
  Description of Artificial Sequence: Synthetic oligonucleotide
guuuuagguaagugcugag

SEQ ID NO: 149264 - RNA, 19 nt, Artificial Sequence
  Description of Artificial Sequence: Synthetic oligonucleotide
ggauuggguagaaauagcc

SEQ ID NO: 149265 - RNA, 19 nt, Artificial Sequence
  Description of Artificial Sequence: Synthetic oligonucleotide
ugcccuuaaagcggaauug

SEQ ID NO: 149266 - RNA, 19 nt, Artificial Sequence
  Description of Artificial Sequence: Synthetic oligonucleotide
ggggcuguugcccuuaaag

SEQ ID NO: 149267 - RNA, 19 nt, Artificial Sequence
  Description of Artificial Sequence: Synthetic oligonucleotide
guagcuguugcaaugugga

SEQ ID NO: 149268 - RNA, 19 nt, Artificial Sequence
  Description of Artificial Sequence: Synthetic oligonucleotide
cauggcaugagaacucuga

SEQ ID NO: 149269 - RNA, 19 nt, Artificial Sequence
  Description of Artificial Sequence: Synthetic oligonucleotide
uagagugaacaaugcuccc

SEQ ID NO: 149270 - RNA, 19 nt, Artificial Sequence
  Description of Artificial Sequence: Synthetic oligonucleotide
uauaugucccugucuuuaa

SEQ ID NO: 149271 - RNA, 19 nt, Artificial Sequence
  Description of Artificial Sequence: Synthetic oligonucleotide
gaauugaggaauauauggu

SEQ ID NO: 149272 - RNA, 19 nt, Artificial Sequence
  Description of Artificial Sequence: Synthetic oligonucleotide
uggcacacggacaguagac

SEQ ID NO: 149273 - RNA, 19 nt, Artificial Sequence
  Description of Artificial Sequence: Synthetic oligonucleotide
uguaaugacuuaguccaua

SEQ ID NO: 149274 - RNA, 19 nt, Artificial Sequence
  Description of Artificial Sequence: Synthetic oligonucleotide
gcuagcagcagccacuuac

SEQ ID NO: 149275 - RNA, 19 nt, Artificial Sequence
  Description of Artificial Sequence: Synthetic oligonucleotide
ccgguaaacacguuauugc

SEQ ID NO: 149276 - RNA, 19 nt, Artificial Sequence
  Description of Artificial Sequence: Synthetic oligonucleotide
agaagggcauccgguaaac

SEQ ID NO: 149277 - RNA, 19 nt, Artificial Sequence
  Description of Artificial Sequence: Synthetic oligonucleotide
uugcccuuaaagcggaauu

SEQ ID NO: 149278 - RNA, 19 nt, Artificial Sequence
  Description of Artificial Sequence: Synthetic oligonucleotide
ccucuuagggaauucuggg

SEQ ID NO: 149279 - RNA, 19 nt, Artificial Sequence
  Description of Artificial Sequence: Synthetic oligonucleotide
ugagaacucugaaacccuu

SEQ ID NO: 149280 - RNA, 19 nt, Artificial Sequence
  Description of Artificial Sequence: Synthetic oligonucleotide
aggcuauacgcacauguuu

SEQ ID NO: 149281 - RNA, 19 nt, Artificial Sequence
  Description of Artificial Sequence: Synthetic oligonucleotide
caccuagagucucauuuug

SEQ ID NO: 149282 - RNA, 19 nt, Artificial Sequence
  Description of Artificial Sequence: Synthetic oligonucleotide
gcugcguggcucuugaaug

SEQ ID NO: 149283 - RNA, 19 nt, Artificial Sequence
  Description of Artificial Sequence: Synthetic oligonucleotide
cauauuugacacauggcau

SEQ ID NO: 149284 - RNA, 19 nt, Artificial Sequence
  Description of Artificial Sequence: Synthetic oligonucleotide
ugguaaaaucuagggauua

SEQ ID NO: 149285 - RNA, 19 nt, Artificial Sequence
  Description of Artificial Sequence: Synthetic oligonucleotide
ccugcuuucagcauaaaua

SEQ ID NO: 149286 - RNA, 19 nt, Artificial Sequence
  Description of Artificial Sequence: Synthetic oligonucleotide
gaaguacaaugugugggca

SEQ ID NO: 149287 - RNA, 19 nt, Artificial Sequence
  Description of Artificial Sequence: Synthetic oligonucleotide
agucccgcggcaucuggag

SEQ ID NO: 149288 - RNA, 19 nt, Artificial Sequence
  Description of Artificial Sequence: Synthetic oligonucleotide
uggguagaaauagccuuga

SEQ ID NO: 149289 - RNA, 19 nt, Artificial Sequence
  Description of Artificial Sequence: Synthetic oligonucleotide
acccuucagaagggcaucc

SEQ ID NO: 149290 - RNA, 19 nt, Artificial Sequence
  Description of Artificial Sequence: Synthetic oligonucleotide
aguauaugucccugucuuu

SEQ ID NO: 149291 - RNA, 19 nt, Artificial Sequence
  Description of Artificial Sequence: Synthetic oligonucleotide
gauuggguagaaauagccu

SEQ ID NO: 149292 - RNA, 19 nt, Artificial Sequence
  Description of Artificial Sequence: Synthetic oligonucleotide
ugugucguuucugcacuug

SEQ ID NO: 149293 - RNA, 19 nt, Artificial Sequence
  Description of Artificial Sequence: Synthetic oligonucleotide
cagauccgauggcacacgg

SEQ ID NO: 149294 - RNA, 19 nt, Artificial Sequence
  Description of Artificial Sequence: Synthetic oligonucleotide
aagucgggaccacucuaau

SEQ ID NO: 149295 - RNA, 19 nt, Artificial Sequence
  Description of Artificial Sequence: Synthetic oligonucleotide
gauaggcccugacuaaugu

SEQ ID NO: 149296 - RNA, 19 nt, Artificial Sequence
  Description of Artificial Sequence: Synthetic oligonucleotide
uagcuggguguuugaaaca

SEQ ID NO: 149297 - RNA, 19 nt, Artificial Sequence
  Description of Artificial Sequence: Synthetic oligonucleotide
cuccacuuauacacuugac

SEQ ID NO: 149298 - RNA, 19 nt, Artificial Sequence
  Description of Artificial Sequence: Synthetic oligonucleotide
ccacaauccaggcuauacg

SEQ ID NO: 149299 - RNA, 19 nt, Artificial Sequence
  Description of Artificial Sequence: Synthetic oligonucleotide
gcgaggaaacaauuacaag

SEQ ID NO: 149300 - RNA, 19 nt, Artificial Sequence
  Description of Artificial Sequence: Synthetic oligonucleotide
aaagcggaauugaggaaua

SEQ ID NO: 149301 - RNA, 19 nt, Artificial Sequence
  Description of Artificial Sequence: Synthetic oligonucleotide
uuccccuaacuuccggguc

SEQ ID NO: 149302 - RNA, 19 nt, Artificial Sequence
  Description of Artificial Sequence: Synthetic oligonucleotide
acacguuauugcauauuug

SEQ ID NO: 149303 - RNA, 19 nt, Artificial Sequence
  Description of Artificial Sequence: Synthetic oligonucleotide
cacuuauacacuugacucu

SEQ ID NO: 149304 - RNA, 19 nt, Artificial Sequence
  Description of Artificial Sequence: Synthetic oligonucleotide
ucgggaccacucuaauaac

SEQ ID NO: 149305 - RNA, 19 nt, Artificial Sequence
  Description of Artificial Sequence: Synthetic oligonucleotide
aggaaucccuucccguagu

SEQ ID NO: 149306 - RNA, 19 nt, Artificial Sequence
  Description of Artificial Sequence: Synthetic oligonucleotide
ucauggacgcugcguggcu

SEQ ID NO: 149307 - RNA, 19 nt, Artificial Sequence
  Description of Artificial Sequence: Synthetic oligonucleotide
agaagcgaggaaacaauua

SEQ ID NO: 149308 - RNA, 19 nt, Artificial Sequence
  Description of Artificial Sequence: Synthetic oligonucleotide
aacuuuaccgugacuccua

SEQ ID NO: 149309 - RNA, 19 nt, Artificial Sequence
  Description of Artificial Sequence: Synthetic oligonucleotide
acuuuaccgugacuccuaa

SEQ ID NO: 149310 - RNA, 19 nt, Artificial Sequence
  Description of Artificial Sequence: Synthetic oligonucleotide
agcuggguguuugaaacau

SEQ ID NO: 149311 - RNA, 19 nt, Artificial Sequence
  Description of Artificial Sequence: Synthetic oligonucleotide
cuacacaagcccagcucuc

SEQ ID NO: 149312 - RNA, 19 nt, Artificial Sequence
  Description of Artificial Sequence: Synthetic oligonucleotide
cuuuaccgugacuccuaac

SEQ ID NO: 149313 - RNA, 19 nt, Artificial Sequence
  Description of Artificial Sequence: Synthetic oligonucleotide
aagcccuauaacagacacu

SEQ ID NO: 149314 - RNA, 19 nt, Artificial Sequence
  Description of Artificial Sequence: Synthetic oligonucleotide
gcuauacgcacauguuuac

SEQ ID NO: 149315 - RNA, 19 nt, Artificial Sequence
  Description of Artificial Sequence: Synthetic oligonucleotide
uucuuacuguaaugacuua

SEQ ID NO: 149316 - RNA, 19 nt, Artificial Sequence
  Description of Artificial Sequence: Synthetic oligonucleotide
cuugugucguuucugcacu

SEQ ID NO: 149317 - RNA, 19 nt, Artificial Sequence
  Description of Artificial Sequence: Synthetic oligonucleotide
gacgcugcguggcucuuga

SEQ ID NO: 149318 - RNA, 19 nt, Artificial Sequence
  Description of Artificial Sequence: Synthetic oligonucleotide
cccuuaaagcggaauugag

SEQ ID NO: 149319 - RNA, 19 nt, Artificial Sequence
  Description of Artificial Sequence: Synthetic oligonucleotide
caccuggcucuuaaacaug

SEQ ID NO: 149320 - RNA, 19 nt, Artificial Sequence
  Description of Artificial Sequence: Synthetic oligonucleotide
cuucagaagggcauccggu

SEQ ID NO: 149321 - RNA, 19 nt, Artificial Sequence
  Description of Artificial Sequence: Synthetic oligonucleotide
gugagacucauguuaccua

SEQ ID NO: 149322 - RNA, 19 nt, Artificial Sequence
  Description of Artificial Sequence: Synthetic oligonucleotide
uucucgcuauacucaggau

SEQ ID NO: 149323 - RNA, 19 nt, Artificial Sequence
  Description of Artificial Sequence: Synthetic oligonucleotide
agucgggaccacucuaaua

SEQ ID NO: 149324 - RNA, 19 nt, Artificial Sequence
  Description of Artificial Sequence: Synthetic oligonucleotide
ugugaccucuuagggaauu

SEQ ID NO: 149325 - RNA, 19 nt, Artificial Sequence
  Description of Artificial Sequence: Synthetic oligonucleotide
aaucuggauuggguagaaa

SEQ ID NO: 149326 - RNA, 19 nt, Artificial Sequence
  Description of Artificial Sequence: Synthetic oligonucleotide
aacuuccgggucaccauaa

SEQ ID NO: 149327 - RNA, 19 nt, Artificial Sequence
  Description of Artificial Sequence: Synthetic oligonucleotide
ucgcuauacucaggauaag

SEQ ID NO: 149328 - RNA, 19 nt, Artificial Sequence
  Description of Artificial Sequence: Synthetic oligonucleotide
agcggaauugaggaauaua

SEQ ID NO: 149329 - RNA, 19 nt, Artificial Sequence
  Description of Artificial Sequence: Synthetic oligonucleotide
aagcggaauugaggaauau

SEQ ID NO: 149330 - RNA, 19 nt, Artificial Sequence
  Description of Artificial Sequence: Synthetic oligonucleotide
agaccaguaugcaaacaua

SEQ ID NO: 149331 - RNA, 19 nt, Artificial Sequence
  Description of Artificial Sequence: Synthetic oligonucleotide
ccuuguugcuuuuacguaa

SEQ ID NO: 149332 - RNA, 19 nt, Artificial Sequence
  Description of Artificial Sequence: Synthetic oligonucleotide
cauccgguaaacacguuau

SEQ ID NO: 149333 - RNA, 19 nt, Artificial Sequence
  Description of Artificial Sequence: Synthetic oligonucleotide
cagcaaacugccauuucua

SEQ ID NO: 149334 - RNA, 19 nt, Artificial Sequence
  Description of Artificial Sequence: Synthetic oligonucleotide
cugcguggcucuugaauga

SEQ ID NO: 149335 - RNA, 19 nt, Artificial Sequence
  Description of Artificial Sequence: Synthetic oligonucleotide
ccauauuaucacaccauaa

SEQ ID NO: 149336 - RNA, 19 nt, Artificial Sequence
  Description of Artificial Sequence: Synthetic oligonucleotide
gguuagauucuuacuguaa

SEQ ID NO: 149337 - RNA, 19 nt, Artificial Sequence
  Description of Artificial Sequence: Synthetic oligonucleotide
ggaagcuaacucagauaag

SEQ ID NO: 149338 - RNA, 19 nt, Artificial Sequence
  Description of Artificial Sequence: Synthetic oligonucleotide
ggcuauacgcacauguuua

SEQ ID NO: 149339 - RNA, 19 nt, Artificial Sequence
  Description of Artificial Sequence: Synthetic oligonucleotide
auccgguaaacacguuauu

SEQ ID NO: 149340 - RNA, 19 nt, Artificial Sequence
  Description of Artificial Sequence: Synthetic oligonucleotide
uacccuccccuucucgcua

SEQ ID NO: 149341 - RNA, 19 nt, Artificial Sequence
  Description of Artificial Sequence: Synthetic oligonucleotide
gucacaaaagcaguaccau

SEQ ID NO: 149342 - RNA, 19 nt, Artificial Sequence
  Description of Artificial Sequence: Synthetic oligonucleotide
guuaccuaacuaucuccau

SEQ ID NO: 149343 - RNA, 19 nt, Artificial Sequence
  Description of Artificial Sequence: Synthetic oligonucleotide
gaagugugagacucauguu

SEQ ID NO: 149344 - RNA, 19 nt, Artificial Sequence
  Description of Artificial Sequence: Synthetic oligonucleotide
ggcccugacuaauguagac

SEQ ID NO: 149345 - RNA, 19 nt, Artificial Sequence
  Description of Artificial Sequence: Synthetic oligonucleotide
cuuguugcuuuuacguaau

SEQ ID NO: 149346 - RNA, 19 nt, Artificial Sequence
  Description of Artificial Sequence: Synthetic oligonucleotide
caaagucgggaccacucua

SEQ ID NO: 149347 - RNA, 19 nt, Artificial Sequence
  Description of Artificial Sequence: Synthetic oligonucleotide
cagaagggcauccgguaaa

SEQ ID NO: 149348 - RNA, 19 nt, Artificial Sequence
  Description of Artificial Sequence: Synthetic oligonucleotide
uguugcccuuaaagcggaa

SEQ ID NO: 149349 - RNA, 19 nt, Artificial Sequence
  Description of Artificial Sequence: Synthetic oligonucleotide
gcauccgguaaacacguua

SEQ ID NO: 149350 - RNA, 19 nt, Artificial Sequence
  Description of Artificial Sequence: Synthetic oligonucleotide
uugugucguuucugcacuu

SEQ ID NO: 149351 - RNA, 19 nt, Artificial Sequence
  Description of Artificial Sequence: Synthetic oligonucleotide
ccuagagucucauuuugua

SEQ ID NO: 149352 - RNA, 19 nt, Artificial Sequence
  Description of Artificial Sequence: Synthetic oligonucleotide
caaguagcuguugcaaugu

SEQ ID NO: 149353 - RNA, 19 nt, Artificial Sequence
  Description of Artificial Sequence: Synthetic oligonucleotide
cuuccccuaacuuccgggu

SEQ ID NO: 149354 - RNA, 19 nt, Artificial Sequence
  Description of Artificial Sequence: Synthetic oligonucleotide
ccugacuaauguagacaug

SEQ ID NO: 149355 - RNA, 19 nt, Artificial Sequence
  Description of Artificial Sequence: Synthetic oligonucleotide
ccuacaggaaagaaacacu

SEQ ID NO: 149356 - RNA, 19 nt, Artificial Sequence
  Description of Artificial Sequence: Synthetic oligonucleotide
ccauuaaacuuuguauaga

SEQ ID NO: 149357 - RNA, 19 nt, Artificial Sequence
  Description of Artificial Sequence: Synthetic oligonucleotide
gagaagcgaggaaacaauu

SEQ ID NO: 149358 - RNA, 19 nt, Artificial Sequence
  Description of Artificial Sequence: Synthetic oligonucleotide
cugggaucacaagacaagu

SEQ ID NO: 149359 - RNA, 19 nt, Artificial Sequence
  Description of Artificial Sequence: Synthetic oligonucleotide
cgguaaacacguuauugca

SEQ ID NO: 149360 - RNA, 19 nt, Artificial Sequence
  Description of Artificial Sequence: Synthetic oligonucleotide
gccacuuaccauuaucuuu

SEQ ID NO: 149361 - RNA, 19 nt, Artificial Sequence
  Description of Artificial Sequence: Synthetic oligonucleotide
acaacccauuaaacuuugu

SEQ ID NO: 149362 - RNA, 19 nt, Artificial Sequence
  Description of Artificial Sequence: Synthetic oligonucleotide
auccgauggcacacggaca

SEQ ID NO: 149363 - RNA, 19 nt, Artificial Sequence
  Description of Artificial Sequence: Synthetic oligonucleotide
aggcccugacuaauguaga

SEQ ID NO: 149364 - RNA, 19 nt, Artificial Sequence
  Description of Artificial Sequence: Synthetic oligonucleotide
gguaaacacguuauugcau

SEQ ID NO: 149365 - RNA, 19 nt, Artificial Sequence
  Description of Artificial Sequence: Synthetic oligonucleotide
caccauaauuggccagcca

SEQ ID NO: 149366 - RNA, 19 nt, Artificial Sequence
  Description of Artificial Sequence: Synthetic oligonucleotide
gugaccucuuagggaauuc

SEQ ID NO: 149367 - RNA, 19 nt, Artificial Sequence
  Description of Artificial Sequence: Synthetic oligonucleotide
gcccuuaaagcggaauuga

SEQ ID NO: 149368 - RNA, 19 nt, Artificial Sequence
  Description of Artificial Sequence: Synthetic oligonucleotide
cugcacaccuagagucuca

SEQ ID NO: 149369 - RNA, 19 nt, Artificial Sequence
  Description of Artificial Sequence: Synthetic oligonucleotide
ccuaacuuccgggucacca

SEQ ID NO: 149370 - RNA, 19 nt, Artificial Sequence
  Description of Artificial Sequence: Synthetic oligonucleotide
cuauacgcacauguuuacu

SEQ ID NO: 149371 - RNA, 19 nt, Artificial Sequence
  Description of Artificial Sequence: Synthetic oligonucleotide
ccacucuaauaacaaaucu

SEQ ID NO: 149372 - RNA, 19 nt, Artificial Sequence
  Description of Artificial Sequence: Synthetic oligonucleotide
cguauaccucuaugugagg

SEQ ID NO: 149373 - RNA, 19 nt, Artificial Sequence
  Description of Artificial Sequence: Synthetic oligonucleotide
ggcacacggacaguagaca

SEQ ID NO: 149374 - RNA, 19 nt, Artificial Sequence
  Description of Artificial Sequence: Synthetic oligonucleotide
uagaaacuuuuggcugguu

SEQ ID NO: 149375 - RNA, 19 nt, Artificial Sequence
  Description of Artificial Sequence: Synthetic oligonucleotide
gcccugacuaauguagaca

SEQ ID NO: 149376 - RNA, 19 nt, Artificial Sequence
  Description of Artificial Sequence: Synthetic oligonucleotide
ggagaagcgaggaaacaau

SEQ ID NO: 149377 - RNA, 19 nt, Artificial Sequence
  Description of Artificial Sequence: Synthetic oligonucleotide
cccugacuaauguagacau

SEQ ID NO: 149378 - RNA, 19 nt, Artificial Sequence
  Description of Artificial Sequence: Synthetic oligonucleotide
gguaaaaucuagggauuau

SEQ ID NO: 149379 - RNA, 19 nt, Artificial Sequence
  Description of Artificial Sequence: Synthetic oligonucleotide
accugcccuuugucuagaa

SEQ ID NO: 149380 - RNA, 19 nt, Artificial Sequence
  Description of Artificial Sequence: Synthetic oligonucleotide
guugcccuuaaagcggaau

SEQ ID NO: 149381 - RNA, 19 nt, Artificial Sequence
  Description of Artificial Sequence: Synthetic oligonucleotide
cucggacuucgacauugua

SEQ ID NO: 149382 - RNA, 19 nt, Artificial Sequence
  Description of Artificial Sequence: Synthetic oligonucleotide
cuguaaugacuuaguccau

SEQ ID NO: 149383 - RNA, 19 nt, Artificial Sequence
  Description of Artificial Sequence: Synthetic oligonucleotide
ggcauauaccccacaugua

SEQ ID NO: 149384 - RNA, 19 nt, Artificial Sequence
  Description of Artificial Sequence: Synthetic oligonucleotide
gccugcuuucagcauaaau

SEQ ID NO: 149385 - RNA, 19 nt, Artificial Sequence
  Description of Artificial Sequence: Synthetic oligonucleotide
cgugacuccuaacauauuu

SEQ ID NO: 149386 - RNA, 19 nt, Artificial Sequence
  Description of Artificial Sequence: Synthetic oligonucleotide
gcucugacagaaacuugua

SEQ ID NO: 149387 - RNA, 19 nt, Artificial Sequence
  Description of Artificial Sequence: Synthetic oligonucleotide
ccgaggaaacuuuguagau

SEQ ID NO: 149388 - RNA, 19 nt, Artificial Sequence
  Description of Artificial Sequence: Synthetic oligonucleotide
acgcugcguggcucuugaa

SEQ ID NO: 149389 - RNA, 19 nt, Artificial Sequence
  Description of Artificial Sequence: Synthetic oligonucleotide
ggacgcugcguggcucuug

SEQ ID NO: 149390 - RNA, 19 nt, Artificial Sequence
  Description of Artificial Sequence: Synthetic oligonucleotide
gggguuucucgguuagauu

SEQ ID NO: 149391 - RNA, 19 nt, Artificial Sequence
  Description of Artificial Sequence: Synthetic oligonucleotide
uggacgcugcguggcucuu

SEQ ID NO: 149392 - RNA, 19 nt, Artificial Sequence
  Description of Artificial Sequence: Synthetic oligonucleotide
ccguaguauaugucccugu

SEQ ID NO: 149393 - RNA, 19 nt, Artificial Sequence
  Description of Artificial Sequence: Synthetic oligonucleotide
cccauguggggaagcuugu

SEQ ID NO: 149394 - RNA, 19 nt, Artificial Sequence
  Description of Artificial Sequence: Synthetic oligonucleotide
ccgcggcaucuggagagug

SEQ ID NO: 149395 - RNA, 19 nt, Artificial Sequence
  Description of Artificial Sequence: Synthetic oligonucleotide
gcccuauaacagacacugu

SEQ ID NO: 149396 - RNA, 19 nt, Artificial Sequence
  Description of Artificial Sequence: Synthetic oligonucleotide
cgcugcguggcucuugaau

SEQ ID NO: 149397 - RNA, 19 nt, Artificial Sequence
  Description of Artificial Sequence: Synthetic oligonucleotide
gcacuugcucauggacgcu

SEQ ID NO: 149398 - RNA, 19 nt, Artificial Sequence
  Description of Artificial Sequence: Synthetic oligonucleotide
ggcauccgguaaacacguu

SEQ ID NO: 149399 - RNA, 19 nt, Artificial Sequence
  Description of Artificial Sequence: Synthetic oligonucleotide
ccgugacuccuaacauauu

SEQ ID NO: 149400 - RNA, 19 nt, Artificial Sequence
  Description of Artificial Sequence: Synthetic oligonucleotide
uuauauuugacacuugacc

SEQ ID NO: 149401 - RNA, 19 nt, Artificial Sequence
  Description of Artificial Sequence: Synthetic oligonucleotide
aaaacgcaaagacagacga

SEQ ID NO: 149402 - RNA, 19 nt, Artificial Sequence
  Description of Artificial Sequence: Synthetic oligonucleotide
uguuuaacgacgucggccg

SEQ ID NO: 149403 - RNA, 19 nt, Artificial Sequence
  Description of Artificial Sequence: Synthetic oligonucleotide
uccauguguacaaugagcc

SEQ ID NO: 149404 - RNA, 19 nt, Artificial Sequence
  Description of Artificial Sequence: Synthetic oligonucleotide
uugguaagcaaauucuccg

SEQ ID NO: 149405 - RNA, 19 nt, Artificial Sequence
  Description of Artificial Sequence: Synthetic oligonucleotide
ucauccgacacuaugucag

SEQ ID NO: 149406 - RNA, 19 nt, Artificial Sequence
  Description of Artificial Sequence: Synthetic oligonucleotide
ugugcugauuucuauaaca

SEQ ID NO: 149407 - RNA, 19 nt, Artificial Sequence
  Description of Artificial Sequence: Synthetic oligonucleotide
uaucucggcgaucucagcg

SEQ ID NO: 149408 - RNA, 19 nt, Artificial Sequence
  Description of Artificial Sequence: Synthetic oligonucleotide
aacgccaucguacaucaug

SEQ ID NO: 149409 - RNA, 19 nt, Artificial Sequence
  Description of Artificial Sequence: Synthetic oligonucleotide
uuuagauaaguccuuuauc

SEQ ID NO: 149410 - RNA, 19 nt, Artificial Sequence
  Description of Artificial Sequence: Synthetic oligonucleotide
ugaacaaucugcaccaaaa

SEQ ID NO: 149411 - RNA, 19 nt, Artificial Sequence
  Description of Artificial Sequence: Synthetic oligonucleotide
uucgaaacgcggcauaagc

SEQ ID NO: 149412 - RNA, 19 nt, Artificial Sequence
  Description of Artificial Sequence: Synthetic oligonucleotide
accacgaguguccacaagg

SEQ ID NO: 149413 - RNA, 19 nt, Artificial Sequence
  Description of Artificial Sequence: Synthetic oligonucleotide
uuugauaccuugauagaaa

SEQ ID NO: 149414 - RNA, 19 nt, Artificial Sequence
  Description of Artificial Sequence: Synthetic oligonucleotide
aacggaaugcaguaugccu

SEQ ID NO: 149415 - RNA, 19 nt, Artificial Sequence
  Description of Artificial Sequence: Synthetic oligonucleotide
ugcugaaauaaauacuaac

SEQ ID NO: 149416 - RNA, 19 nt, Artificial Sequence
  Description of Artificial Sequence: Synthetic oligonucleotide
ugggcuaagcacuauggag

SEQ ID NO: 149417 - RNA, 19 nt, Artificial Sequence
  Description of Artificial Sequence: Synthetic oligonucleotide
aguuagaauccuuuguacu

SEQ ID NO: 149418 - RNA, 19 nt, Artificial Sequence
  Description of Artificial Sequence: Synthetic oligonucleotide
uguacgcuuauauuugaca

SEQ ID NO: 149419 - RNA, 19 nt, Artificial Sequence
  Description of Artificial Sequence: Synthetic oligonucleotide
ucucgauguaaacaauuca

SEQ ID NO: 149420 - RNA, 19 nt, Artificial Sequence
  Description of Artificial Sequence: Synthetic oligonucleotide
ugguaagcaaauucuccgg

SEQ ID NO: 149421 - RNA, 19 nt, Artificial Sequence
  Description of Artificial Sequence: Synthetic oligonucleotide
gaaaucagaaggugguuac

SEQ ID NO: 149422 - RNA, 19 nt, Artificial Sequence
  Description of Artificial Sequence: Synthetic oligonucleotide
ugagcaagcgcugaaauuc

SEQ ID NO: 149423 - RNA, 19 nt, Artificial Sequence
  Description of Artificial Sequence: Synthetic oligonucleotide
agucuauacacucacggaa

SEQ ID NO: 149424 - RNA, 19 nt, Artificial Sequence
  Description of Artificial Sequence: Synthetic oligonucleotide
aacguccucuuuugaaagg

SEQ ID NO: 149425 - RNA, 19 nt, Artificial Sequence
  Description of Artificial Sequence: Synthetic oligonucleotide
aagucuauacacucacgga

SEQ ID NO: 149426 - RNA, 19 nt, Artificial Sequence
  Description of Artificial Sequence: Synthetic oligonucleotide
gaaggucucgcaaauacug

SEQ ID NO: 149427 - RNA, 19 nt, Artificial Sequence
  Description of Artificial Sequence: Synthetic oligonucleotide
guacgcuuauauuugacac

SEQ ID NO: 149428 - RNA, 19 nt, Artificial Sequence
  Description of Artificial Sequence: Synthetic oligonucleotide
ucaaugauggccucacgcu

SEQ ID NO: 149429 - RNA, 19 nt, Artificial Sequence
  Description of Artificial Sequence: Synthetic oligonucleotide
cauguguacaaugagccag

SEQ ID NO: 149430 - RNA, 19 nt, Artificial Sequence
  Description of Artificial Sequence: Synthetic oligonucleotide
ucuuggacggacuuucggc

SEQ ID NO: 149431 - RNA, 19 nt, Artificial Sequence
  Description of Artificial Sequence: Synthetic oligonucleotide
ucagaaggugguuacacuc

SEQ ID NO: 149432 - RNA, 19 nt, Artificial Sequence
  Description of Artificial Sequence: Synthetic oligonucleotide
accauacuaucuucucucc

SEQ ID NO: 149433 - RNA, 19 nt, Artificial Sequence
  Description of Artificial Sequence: Synthetic oligonucleotide
cacuguuuaacgacgucgg

SEQ ID NO: 149434 - RNA, 19 nt, Artificial Sequence
  Description of Artificial Sequence: Synthetic oligonucleotide
gaucugacgccgcagaaac

SEQ ID NO: 149435 - RNA, 19 nt, Artificial Sequence
  Description of Artificial Sequence: Synthetic oligonucleotide
aguuuggagacuccucccg

SEQ ID NO: 149436 - RNA, 19 nt, Artificial Sequence
  Description of Artificial Sequence: Synthetic oligonucleotide
aaauagugugcugauuucu

SEQ ID NO: 149437 - RNA, 19 nt, Artificial Sequence
  Description of Artificial Sequence: Synthetic oligonucleotide
ucaucuaccuuugauuuga

SEQ ID NO: 149438 - RNA, 19 nt, Artificial Sequence
  Description of Artificial Sequence: Synthetic oligonucleotide
aauaggugcugaaauaaau

SEQ ID NO: 149439 - RNA, 19 nt, Artificial Sequence
  Description of Artificial Sequence: Synthetic oligonucleotide
acuguuuaacgacgucggc

SEQ ID NO: 149440 - RNA, 19 nt, Artificial Sequence
  Description of Artificial Sequence: Synthetic oligonucleotide
caaugagccaggaaaucag

SEQ ID NO: 149441 - RNA, 19 nt, Artificial Sequence
  Description of Artificial Sequence: Synthetic oligonucleotide
acuauggagauguucugga

SEQ ID NO: 149442 - RNA, 19 nt, Artificial Sequence
  Description of Artificial Sequence: Synthetic oligonucleotide
aacgcaaagacagacgauu

SEQ ID NO: 149443 - RNA, 19 nt, Artificial Sequence
  Description of Artificial Sequence: Synthetic oligonucleotide
auaaguccuuuaucccacc

SEQ ID NO: 149444 - RNA, 19 nt, Artificial Sequence
  Description of Artificial Sequence: Synthetic oligonucleotide
ucuugcacgugugugaaga

SEQ ID NO: 149445 - RNA, 19 nt, Artificial Sequence
  Description of Artificial Sequence: Synthetic oligonucleotide
ucaccuauugccagcaaau

SEQ ID NO: 149446 - RNA, 19 nt, Artificial Sequence
  Description of Artificial Sequence: Synthetic oligonucleotide
uguguguccccucguaagc

SEQ ID NO: 149447 - RNA, 19 nt, Artificial Sequence
  Description of Artificial Sequence: Synthetic oligonucleotide
ccaucguacaucauggucc

SEQ ID NO: 149448 - RNA, 19 nt, Artificial Sequence
  Description of Artificial Sequence: Synthetic oligonucleotide
auacuaucuucucuccaag

SEQ ID NO: 149449 - RNA, 19 nt, Artificial Sequence
  Description of Artificial Sequence: Synthetic oligonucleotide
uugauaccuugauagaaau

SEQ ID NO: 149450 - RNA, 19 nt, Artificial Sequence
  Description of Artificial Sequence: Synthetic oligonucleotide
ugcgguguucacuagggcu

SEQ ID NO: 149451 - RNA, 19 nt, Artificial Sequence
  Description of Artificial Sequence: Synthetic oligonucleotide
ucuguuaccuacccaucac

SEQ ID NO: 149452 - RNA, 19 nt, Artificial Sequence
  Description of Artificial Sequence: Synthetic oligonucleotide
aaacccuguagacgccuuc

SEQ ID NO: 149453 - RNA, 19 nt, Artificial Sequence
  Description of Artificial Sequence: Synthetic oligonucleotide
accuauugccagcaaaugu

SEQ ID NO: 149454 - RNA, 19 nt, Artificial Sequence
  Description of Artificial Sequence: Synthetic oligonucleotide
agacucggaacaucgaccu

SEQ ID NO: 149455 - RNA, 19 nt, Artificial Sequence
  Description of Artificial Sequence: Synthetic oligonucleotide
cuguuuaacgacgucggcc

SEQ ID NO: 149456 - RNA, 19 nt, Artificial Sequence
  Description of Artificial Sequence: Synthetic oligonucleotide
ucgaaacgcggcauaagcu

SEQ ID NO: 149457 - RNA, 19 nt, Artificial Sequence
  Description of Artificial Sequence: Synthetic oligonucleotide
acguccucuuuugaaaggc

SEQ ID NO: 149458 - RNA, 19 nt, Artificial Sequence
  Description of Artificial Sequence: Synthetic oligonucleotide
accucgaggacaccgucac

SEQ ID NO: 149459 - RNA, 19 nt, Artificial Sequence
  Description of Artificial Sequence: Synthetic oligonucleotide
cucguaagccccuuguaug

SEQ ID NO: 149460 - RNA, 19 nt, Artificial Sequence
  Description of Artificial Sequence: Synthetic oligonucleotide
agucagcucacucgcuuac

SEQ ID NO: 149461 - RNA, 19 nt, Artificial Sequence
  Description of Artificial Sequence: Synthetic oligonucleotide
caccauacuaucuucucuc

SEQ ID NO: 149462 - RNA, 19 nt, Artificial Sequence
  Description of Artificial Sequence: Synthetic oligonucleotide
caagccucuucgaaacgcg

SEQ ID NO: 149463 - RNA, 19 nt, Artificial Sequence
  Description of Artificial Sequence: Synthetic oligonucleotide
uguccucuguuaccuaccc

SEQ ID NO: 149464 - RNA, 19 nt, Artificial Sequence
  Description of Artificial Sequence: Synthetic oligonucleotide
acuuguacgcuuauauuug

SEQ ID NO: 149465 - RNA, 19 nt, Artificial Sequence
  Description of Artificial Sequence: Synthetic oligonucleotide
guuuggagacuccucccgg

SEQ ID NO: 149466 - RNA, 19 nt, Artificial Sequence
  Description of Artificial Sequence: Synthetic oligonucleotide
aacgacgucggccgccguc

SEQ ID NO: 149467 - RNA, 19 nt, Artificial Sequence
  Description of Artificial Sequence: Synthetic oligonucleotide
aacaucgaccugaggcacc

SEQ ID NO: 149468 - RNA, 19 nt, Artificial Sequence
  Description of Artificial Sequence: Synthetic oligonucleotide
cagaucucgauguaaacaa

SEQ ID NO: 149469 - RNA, 19 nt, Artificial Sequence
  Description of Artificial Sequence: Synthetic oligonucleotide
agcucacucgcuuacagua

SEQ ID NO: 149470 - RNA, 19 nt, Artificial Sequence
  Description of Artificial Sequence: Synthetic oligonucleotide
gucuauacacucacggaag

SEQ ID NO: 149471 - RNA, 19 nt, Artificial Sequence
  Description of Artificial Sequence: Synthetic oligonucleotide
gagacucggaacaucgacc

SEQ ID NO: 149472 - RNA, 19 nt, Artificial Sequence
  Description of Artificial Sequence: Synthetic oligonucleotide
ucguacaucaugguccucu

SEQ ID NO: 149473 - RNA, 19 nt, Artificial Sequence
  Description of Artificial Sequence: Synthetic oligonucleotide
cuggcgacucuguaucucg

SEQ ID NO: 149474 - RNA, 19 nt, Artificial Sequence
  Description of Artificial Sequence: Synthetic oligonucleotide
acucgcuuacaguaagaug

SEQ ID NO: 149475 - RNA, 19 nt, Artificial Sequence
  Description of Artificial Sequence: Synthetic oligonucleotide
cuccgaggcgaucugacgc

SEQ ID NO: 149476 - RNA, 19 nt, Artificial Sequence
  Description of Artificial Sequence: Synthetic oligonucleotide
uuguacgcuuauauuugac

SEQ ID NO: 149477 - RNA, 19 nt, Artificial Sequence
  Description of Artificial Sequence: Synthetic oligonucleotide
uuaacgacgucggccgccg

SEQ ID NO: 149478 - RNA, 19 nt, Artificial Sequence
  Description of Artificial Sequence: Synthetic oligonucleotide
ucucgaccgcaucagccag

SEQ ID NO: 149479 - RNA, 19 nt, Artificial Sequence
  Description of Artificial Sequence: Synthetic oligonucleotide
cauacuaucuucucuccaa

SEQ ID NO: 149480 - RNA, 19 nt, Artificial Sequence
  Description of Artificial Sequence: Synthetic oligonucleotide
ccauguuggaccaacgcag

SEQ ID NO: 149481 - RNA, 19 nt, Artificial Sequence
  Description of Artificial Sequence: Synthetic oligonucleotide
ucuuuagauaaguccuuua

SEQ ID NO: 149482 - RNA, 19 nt, Artificial Sequence
  Description of Artificial Sequence: Synthetic oligonucleotide
guaagccccuuguaugucc

SEQ ID NO: 149483 - RNA, 19 nt, Artificial Sequence
  Description of Artificial Sequence: Synthetic oligonucleotide
ucuccgaggcgaucugacg

SEQ ID NO: 149484 - RNA, 19 nt, Artificial Sequence
  Description of Artificial Sequence: Synthetic oligonucleotide
cggaacaucgaccugaggc

SEQ ID NO: 149485 - RNA, 19 nt, Artificial Sequence
  Description of Artificial Sequence: Synthetic oligonucleotide
ucgaccugaggcaccucgg

SEQ ID NO: 149486 - RNA, 19 nt, Artificial Sequence
  Description of Artificial Sequence: Synthetic oligonucleotide
auaccuugauagaaauuag

SEQ ID NO: 149487 - RNA, 19 nt, Artificial Sequence
  Description of Artificial Sequence: Synthetic oligonucleotide
agugcaauagguagaggcu

SEQ ID NO: 149488 - RNA, 19 nt, Artificial Sequence
  Description of Artificial Sequence: Synthetic oligonucleotide
aaugagccaggaaaucaga

SEQ ID NO: 149489 - RNA, 19 nt, Artificial Sequence
  Description of Artificial Sequence: Synthetic oligonucleotide
uuuaacgacgucggccgcc

SEQ ID NO: 149490 - RNA, 19 nt, Artificial Sequence
  Description of Artificial Sequence: Synthetic oligonucleotide
cuaagcacuauggagaugu

SEQ ID NO: 149491 - RNA, 19 nt, Artificial Sequence
  Description of Artificial Sequence: Synthetic oligonucleotide
acgccaucguacaucaugg

SEQ ID NO: 149492 - RNA, 19 nt, Artificial Sequence
  Description of Artificial Sequence: Synthetic oligonucleotide
aauagugugcugauuucua

SEQ ID NO: 149493 - RNA, 19 nt, Artificial Sequence
  Description of Artificial Sequence: Synthetic oligonucleotide
uggaaggcggcauagccuu

SEQ ID NO: 149494 - RNA, 19 nt, Artificial Sequence
  Description of Artificial Sequence: Synthetic oligonucleotide
aucauccgacacuauguca

SEQ ID NO: 149495 - RNA, 19 nt, Artificial Sequence
  Description of Artificial Sequence: Synthetic oligonucleotide
acgcgcagcucaaugaugg

SEQ ID NO: 149496 - RNA, 19 nt, Artificial Sequence
  Description of Artificial Sequence: Synthetic oligonucleotide
ggcauaagcucuuugguaa

SEQ ID NO: 149497 - RNA, 19 nt, Artificial Sequence
  Description of Artificial Sequence: Synthetic oligonucleotide
ucucgcaaauacugcuuca

SEQ ID NO: 149498 - RNA, 19 nt, Artificial Sequence
  Description of Artificial Sequence: Synthetic oligonucleotide
cacccguccgguacaaucc

SEQ ID NO: 149499 - RNA, 19 nt, Artificial Sequence
  Description of Artificial Sequence: Synthetic oligonucleotide
ucacccguccgguacaauc

SEQ ID NO: 149500 - RNA, 19 nt, Artificial Sequence
  Description of Artificial Sequence: Synthetic oligonucleotide
acgaguguccacaaggcca

SEQ ID NO: 149501 - RNA, 19 nt, Artificial Sequence
  Description of Artificial Sequence: Synthetic oligonucleotide
ucgaggacaccgucacagg

SEQ ID NO: 149502 - RNA, 19 nt, Artificial Sequence
  Description of Artificial Sequence: Synthetic oligonucleotide
gacacuugaccuauuucca

SEQ ID NO: 149503 - RNA, 19 nt, Artificial Sequence
  Description of Artificial Sequence: Synthetic oligonucleotide
guacaucaugguccucucg

SEQ ID NO: 149504 - RNA, 19 nt, Artificial Sequence
  Description of Artificial Sequence: Synthetic oligonucleotide
ggaacaucgaccugaggca

SEQ ID NO: 149505 - RNA, 19 nt, Artificial Sequence
  Description of Artificial Sequence: Synthetic oligonucleotide
guuggaccaacgcagaggu

SEQ ID NO: 149506 - RNA, 19 nt, Artificial Sequence
  Description of Artificial Sequence: Synthetic oligonucleotide
auguuggaccaacgcagag

SEQ ID NO: 149507 - RNA, 19 nt, Artificial Sequence
  Description of Artificial Sequence: Synthetic oligonucleotide
caucauccgacacuauguc

SEQ ID NO: 149508 - RNA, 19 nt, Artificial Sequence
  Description of Artificial Sequence: Synthetic oligonucleotide
cucgcaaauacugcuucag

SEQ ID NO: 149509 - RNA, 19 nt, Artificial Sequence
  Description of Artificial Sequence: Synthetic oligonucleotide
agcgcggaggcguucgauc

SEQ ID NO: 149510 - RNA, 19 nt, Artificial Sequence
  Description of Artificial Sequence: Synthetic oligonucleotide
cauccgacacuaugucagg

SEQ ID NO: 149511 - RNA, 19 nt, Artificial Sequence
  Description of Artificial Sequence: Synthetic oligonucleotide
aagccucuucgaaacgcgg

SEQ ID NO: 149512 - RNA, 19 nt, Artificial Sequence
  Description of Artificial Sequence: Synthetic oligonucleotide
gcuuuaggaccacagugcc

SEQ ID NO: 149513 - RNA, 19 nt, Artificial Sequence
  Description of Artificial Sequence: Synthetic oligonucleotide
cugaucuggacgguugggc

SEQ ID NO: 149514 - RNA, 19 nt, Artificial Sequence
  Description of Artificial Sequence: Synthetic oligonucleotide
ucacucgcuuacaguaaga

SEQ ID NO: 149515 - RNA, 19 nt, Artificial Sequence
  Description of Artificial Sequence: Synthetic oligonucleotide
ucacgcuccucguggacug

SEQ ID NO: 149516 - RNA, 19 nt, Artificial Sequence
  Description of Artificial Sequence: Synthetic oligonucleotide
gaggcuagagcccucgugu

SEQ ID NO: 149517 - RNA, 19 nt, Artificial Sequence
  Description of Artificial Sequence: Synthetic oligonucleotide
cuuguacgcuuauauuuga

SEQ ID NO: 149518 - RNA, 19 nt, Artificial Sequence
  Description of Artificial Sequence: Synthetic oligonucleotide
cuuuagauaaguccuuuau

SEQ ID NO: 149519 - RNA, 19 nt, Artificial Sequence
  Description of Artificial Sequence: Synthetic oligonucleotide
agugugggcaucguugcca

SEQ ID NO: 149520 - RNA, 19 nt, Artificial Sequence
  Description of Artificial Sequence: Synthetic oligonucleotide
ccuuccacuguuuaacgac

SEQ ID NO: 149521 - RNA, 19 nt, Artificial Sequence
  Description of Artificial Sequence: Synthetic oligonucleotide
gaacaucgaccugaggcac

SEQ ID NO: 149522 - RNA, 19 nt, Artificial Sequence
  Description of Artificial Sequence: Synthetic oligonucleotide
ugcuucacccucccaggac

SEQ ID NO: 149523 - RNA, 19 nt, Artificial Sequence
  Description of Artificial Sequence: Synthetic oligonucleotide
cugacguggagccagacgu

SEQ ID NO: 149524 - RNA, 19 nt, Artificial Sequence
  Description of Artificial Sequence: Synthetic oligonucleotide
ugacguggagccagacgug

SEQ ID NO: 149525 - RNA, 19 nt, Artificial Sequence
  Description of Artificial Sequence: Synthetic oligonucleotide
ugacgccgcagaaacugcu

SEQ ID NO: 149526 - RNA, 19 nt, Artificial Sequence
  Description of Artificial Sequence: Synthetic oligonucleotide
cuuuccggucuuugcuggg

SEQ ID NO: 149527 - RNA, 19 nt, Artificial Sequence
  Description of Artificial Sequence: Synthetic oligonucleotide
caacagugcaauagguaga

SEQ ID NO: 149528 - RNA, 19 nt, Artificial Sequence
  Description of Artificial Sequence: Synthetic oligonucleotide
gguaagcaaauucuccgga

SEQ ID NO: 149529 - RNA, 19 nt, Artificial Sequence
  Description of Artificial Sequence: Synthetic oligonucleotide
ugaacacauggauucccuu

SEQ ID NO: 149530 - RNA, 19 nt, Artificial Sequence
  Description of Artificial Sequence: Synthetic oligonucleotide
auccgacacuaugucaggg

SEQ ID NO: 149531 - RNA, 19 nt, Artificial Sequence
  Description of Artificial Sequence: Synthetic oligonucleotide
cucggaacaucgaccugag

SEQ ID NO: 149532 - RNA, 19 nt, Artificial Sequence
  Description of Artificial Sequence: Synthetic oligonucleotide
auucuccggaaggucucgc

SEQ ID NO: 149533 - RNA, 19 nt, Artificial Sequence
  Description of Artificial Sequence: Synthetic oligonucleotide
uccggucuuugcuggggag

SEQ ID NO: 149534 - RNA, 19 nt, Artificial Sequence
  Description of Artificial Sequence: Synthetic oligonucleotide
uucuccggaaggucucgca

SEQ ID NO: 149535 - RNA, 19 nt, Artificial Sequence
  Description of Artificial Sequence: Synthetic oligonucleotide
uguguacaaugagccagga

SEQ ID NO: 149536 - RNA, 19 nt, Artificial Sequence
  Description of Artificial Sequence: Synthetic oligonucleotide
ggacgguugggcuaagcac

SEQ ID NO: 149537 - RNA, 19 nt, Artificial Sequence
  Description of Artificial Sequence: Synthetic oligonucleotide
ccugcgguguucacuaggg

SEQ ID NO: 149538 - RNA, 19 nt, Artificial Sequence
  Description of Artificial Sequence: Synthetic oligonucleotide
ggcagugugggcaucguug

SEQ ID NO: 149539 - RNA, 19 nt, Artificial Sequence
  Description of Artificial Sequence: Synthetic oligonucleotide
ggaaacguccucuuuugaa

SEQ ID NO: 149540 - RNA, 19 nt, Artificial Sequence
  Description of Artificial Sequence: Synthetic oligonucleotide
aaacgcaaagacagacgau

SEQ ID NO: 149541 - RNA, 19 nt, Artificial Sequence
  Description of Artificial Sequence: Synthetic oligonucleotide
cauguuggaccaacgcaga

SEQ ID NO: 149542 - RNA, 19 nt, Artificial Sequence
  Description of Artificial Sequence: Synthetic oligonucleotide
cuguuaccuacccaucaca

SEQ ID NO: 149543 - RNA, 19 nt, Artificial Sequence
  Description of Artificial Sequence: Synthetic oligonucleotide
aggcgaacgccaucguaca

SEQ ID NO: 149544 - RNA, 19 nt, Artificial Sequence
  Description of Artificial Sequence: Synthetic oligonucleotide
caucguugccauguuggac

SEQ ID NO: 149545 - RNA, 19 nt, Artificial Sequence
  Description of Artificial Sequence: Synthetic oligonucleotide
ccaauaagcugacacuauc

SEQ ID NO: 149546 - RNA, 19 nt, Artificial Sequence
  Description of Artificial Sequence: Synthetic oligonucleotide
cuucgaaacgcggcauaag

SEQ ID NO: 149547 - RNA, 19 nt, Artificial Sequence
  Description of Artificial Sequence: Synthetic oligonucleotide
auggauucccuuggaccuc

SEQ ID NO: 149548 - RNA, 19 nt, Artificial Sequence
  Description of Artificial Sequence: Synthetic oligonucleotide
cucucgaccgcaucagcca

SEQ ID NO: 149549 - RNA, 19 nt, Artificial Sequence
  Description of Artificial Sequence: Synthetic oligonucleotide
cucguggaggaugucauga

SEQ ID NO: 149550 - RNA, 19 nt, Artificial Sequence
  Description of Artificial Sequence: Synthetic oligonucleotide
acgugugcaagaggagauc

SEQ ID NO: 149551 - RNA, 19 nt, Artificial Sequence
  Description of Artificial Sequence: Synthetic oligonucleotide
cuggcuaucuccugugcaa

SEQ ID NO: 149552 - RNA, 19 nt, Artificial Sequence
  Description of Artificial Sequence: Synthetic oligonucleotide
guuuaacgacgucggccgc

SEQ ID NO: 149553 - RNA, 19 nt, Artificial Sequence
  Description of Artificial Sequence: Synthetic oligonucleotide
ccuauugccagcaaaugua

SEQ ID NO: 149554 - RNA, 19 nt, Artificial Sequence
  Description of Artificial Sequence: Synthetic oligonucleotide
ucguguggguuugucccag

SEQ ID NO: 149555 - RNA, 19 nt, Artificial Sequence
  Description of Artificial Sequence: Synthetic oligonucleotide
gcagaucucgauguaaaca

SEQ ID NO: 149556 - RNA, 19 nt, Artificial Sequence
  Description of Artificial Sequence: Synthetic oligonucleotide
caaacaaggaguggccaga

SEQ ID NO: 149557 - RNA, 19 nt, Artificial Sequence
  Description of Artificial Sequence: Synthetic oligonucleotide
gaccacgaguguccacaag

SEQ ID NO: 149558 - RNA, 19 nt, Artificial Sequence
  Description of Artificial Sequence: Synthetic oligonucleotide
caccuauugccagcaaaug

SEQ ID NO: 149559 - RNA, 19 nt, Artificial Sequence
  Description of Artificial Sequence: Synthetic oligonucleotide
cuuggacggacuuucggcu

SEQ ID NO: 149560 - RNA, 19 nt, Artificial Sequence
  Description of Artificial Sequence: Synthetic oligonucleotide
ccucucgaccgcaucagcc

SEQ ID NO: 149561 - RNA, 19 nt, Artificial Sequence
  Description of Artificial Sequence: Synthetic oligonucleotide
gacucggaacaucgaccug

SEQ ID NO: 149562 - RNA, 19 nt, Artificial Sequence
  Description of Artificial Sequence: Synthetic oligonucleotide
cacgcgcagcucaaugaug

SEQ ID NO: 149563 - RNA, 19 nt, Artificial Sequence
  Description of Artificial Sequence: Synthetic oligonucleotide
gccaucguacaucaugguc

SEQ ID NO: 149564 - RNA, 19 nt, Artificial Sequence
  Description of Artificial Sequence: Synthetic oligonucleotide
cgcggcauaagcucuuugg

SEQ ID NO: 149565 - RNA, 19 nt, Artificial Sequence
  Description of Artificial Sequence: Synthetic oligonucleotide
gaucucgauguaaacaauu

SEQ ID NO: 149566 - RNA, 19 nt, Artificial Sequence
  Description of Artificial Sequence: Synthetic oligonucleotide
guaucucggcgaucucagc

SEQ ID NO: 149567 - RNA, 19 nt, Artificial Sequence
  Description of Artificial Sequence: Synthetic oligonucleotide
gaaggcggcauagccuuca

SEQ ID NO: 149568 - RNA, 19 nt, Artificial Sequence
  Description of Artificial Sequence: Synthetic oligonucleotide
cgaaacgcggcauaagcuc

SEQ ID NO: 149569 - RNA, 19 nt, Artificial Sequence
  Description of Artificial Sequence: Synthetic oligonucleotide
caugcuccgcccugcggug

SEQ ID NO: 149570 - RNA, 19 nt, Artificial Sequence
  Description of Artificial Sequence: Synthetic oligonucleotide
accaacgcagaggucuugu

SEQ ID NO: 149571 - RNA, 19 nt, Artificial Sequence
  Description of Artificial Sequence: Synthetic oligonucleotide
gaucucagcgcggaggcgu

SEQ ID NO: 149572 - RNA, 19 nt, Artificial Sequence
  Description of Artificial Sequence: Synthetic oligonucleotide
gccgccgucaagucuuuag

SEQ ID NO: 149573 - RNA, 19 nt, Artificial Sequence
  Description of Artificial Sequence: Synthetic oligonucleotide
cugugggccggcgagacca

SEQ ID NO: 149574 - RNA, 19 nt, Artificial Sequence
  Description of Artificial Sequence: Synthetic oligonucleotide
ggcgagaccacgagugucc

SEQ ID NO: 149575 - RNA, 19 nt, Artificial Sequence
  Description of Artificial Sequence: Synthetic oligonucleotide
cugcgguguucacuagggc

SEQ ID NO: 149576 - RNA, 19 nt, Artificial Sequence
  Description of Artificial Sequence: Synthetic oligonucleotide
cggaaggucucgcaaauac

SEQ ID NO: 149577 - RNA, 19 nt, Artificial Sequence
  Description of Artificial Sequence: Synthetic oligonucleotide
acccguccgguacaaucca

SEQ ID NO: 149578 - RNA, 19 nt, Artificial Sequence
  Description of Artificial Sequence: Synthetic oligonucleotide
gacucuguaucucggcgau

SEQ ID NO: 149579 - RNA, 19 nt, Artificial Sequence
  Description of Artificial Sequence: Synthetic oligonucleotide
agagcccucguguggguuu

SEQ ID NO: 149580 - RNA, 19 nt, Artificial Sequence
  Description of Artificial Sequence: Synthetic oligonucleotide
acacuaucuggaacuuugu

SEQ ID NO: 149581 - RNA, 19 nt, Artificial Sequence
  Description of Artificial Sequence: Synthetic oligonucleotide
agaucucgauguaaacaau

SEQ ID NO: 149582 - RNA, 19 nt, Artificial Sequence
  Description of Artificial Sequence: Synthetic oligonucleotide
guacaaugagccaggaaau

SEQ ID NO: 149583 - RNA, 19 nt, Artificial Sequence
  Description of Artificial Sequence: Synthetic oligonucleotide
ccugacguggagccagacg

SEQ ID NO: 149584 - RNA, 19 nt, Artificial Sequence
  Description of Artificial Sequence: Synthetic oligonucleotide
gguccucucgaccgcauca

SEQ ID NO: 149585 - RNA, 19 nt, Artificial Sequence
  Description of Artificial Sequence: Synthetic oligonucleotide
guccucucgaccgcaucag

SEQ ID NO: 149586 - RNA, 19 nt, Artificial Sequence
  Description of Artificial Sequence: Synthetic oligonucleotide
ugguccucucgaccgcauc

SEQ ID NO: 149587 - RNA, 19 nt, Artificial Sequence
  Description of Artificial Sequence: Synthetic oligonucleotide
ggcgacucuguaucucggc

SEQ ID NO: 149588 - RNA, 19 nt, Artificial Sequence
  Description of Artificial Sequence: Synthetic oligonucleotide
ugacacuaucuggaacuuu

SEQ ID NO: 149589 - RNA, 19 nt, Artificial Sequence
  Description of Artificial Sequence: Synthetic oligonucleotide
acucuguaucucggcgauc

SEQ ID NO: 149590 - RNA, 19 nt, Artificial Sequence
  Description of Artificial Sequence: Synthetic oligonucleotide
cagcaaauguaaacggaau

SEQ ID NO: 149591 - RNA, 19 nt, Artificial Sequence
  Description of Artificial Sequence: Synthetic oligonucleotide
gacgugugcaagaggagau

SEQ ID NO: 149592 - RNA, 19 nt, Artificial Sequence
  Description of Artificial Sequence: Synthetic oligonucleotide
uuaucccacccugcagauc

SEQ ID NO: 149593 - RNA, 19 nt, Artificial Sequence
  Description of Artificial Sequence: Synthetic oligonucleotide
acgcggcauaagcucuuug

SEQ ID NO: 149594 - RNA, 19 nt, Artificial Sequence
  Description of Artificial Sequence: Synthetic oligonucleotide
ucagcgcggaggcguucga

SEQ ID NO: 149595 - RNA, 19 nt, Artificial Sequence
  Description of Artificial Sequence: Synthetic oligonucleotide
acgcaaagacagacgauuu

SEQ ID NO: 149596 - RNA, 19 nt, Artificial Sequence
  Description of Artificial Sequence: Synthetic oligonucleotide
ggguuugucccagucagaa

SEQ ID NO: 149597 - RNA, 19 nt, Artificial Sequence
  Description of Artificial Sequence: Synthetic oligonucleotide
agcaagcgcugaaauuccu

SEQ ID NO: 149598 - RNA, 19 nt, Artificial Sequence
  Description of Artificial Sequence: Synthetic oligonucleotide
aggcggcauagccuucagu

SEQ ID NO: 149599 - RNA, 19 nt, Artificial Sequence
  Description of Artificial Sequence: Synthetic oligonucleotide
agcacucggucaugcugau

SEQ ID NO: 149600 - RNA, 19 nt, Artificial Sequence
  Description of Artificial Sequence: Synthetic oligonucleotide
cgcaucagccagcggaacg

SEQ ID NO: 149601 - RNA, 19 nt, Artificial Sequence
  Description of Artificial Sequence: Synthetic oligonucleotide
ggcgaucugacgccgcaga

SEQ ID NO: 149602 - RNA, 19 nt, Artificial Sequence
  Description of Artificial Sequence: Synthetic oligonucleotide
cccacccuuucccaagaag

SEQ ID NO: 149603 - RNA, 19 nt, Artificial Sequence
  Description of Artificial Sequence: Synthetic oligonucleotide
cucuucgaaacgcggcaua

SEQ ID NO: 149604 - RNA, 19 nt, Artificial Sequence
  Description of Artificial Sequence: Synthetic oligonucleotide
cuggacgguugggcuaagc

SEQ ID NO: 149605 - RNA, 19 nt, Artificial Sequence
  Description of Artificial Sequence: Synthetic oligonucleotide
gcgaacgccaucguacauc

SEQ ID NO: 149606 - RNA, 19 nt, Artificial Sequence
  Description of Artificial Sequence: Synthetic oligonucleotide
ccauguguacaaugagcca

SEQ ID NO: 149607 - RNA, 19 nt, Artificial Sequence
  Description of Artificial Sequence: Synthetic oligonucleotide
ggcuaagcacuauggagau

SEQ ID NO: 149608 - RNA, 19 nt, Artificial Sequence
  Description of Artificial Sequence: Synthetic oligonucleotide
cgaacgccaucguacauca

SEQ ID NO: 149609 - RNA, 19 nt, Artificial Sequence
  Description of Artificial Sequence: Synthetic oligonucleotide
gcgagggcucacccguccg

SEQ ID NO: 149610 - RNA, 19 nt, Artificial Sequence
  Description of Artificial Sequence: Synthetic oligonucleotide
gcggcauaagcucuuuggu

SEQ ID NO: 149611 - RNA, 19 nt, Artificial Sequence
  Description of Artificial Sequence: Synthetic oligonucleotide
cugucuccguggcccuccc

SEQ ID NO: 149612 - RNA, 19 nt, Artificial Sequence
  Description of Artificial Sequence: Synthetic oligonucleotide
caugguccucucgaccgca

SEQ ID NO: 149613 - RNA, 19 nt, Artificial Sequence
  Description of Artificial Sequence: Synthetic oligonucleotide
gucagcucacucgcuuaca

SEQ ID NO: 149614 - RNA, 19 nt, Artificial Sequence
  Description of Artificial Sequence: Synthetic oligonucleotide
ucuggacgguugggcuaag

SEQ ID NO: 149615 - RNA, 19 nt, Artificial Sequence
  Description of Artificial Sequence: Synthetic oligonucleotide
aucugacgccgcagaaacu

SEQ ID NO: 149616 - RNA, 19 nt, Artificial Sequence
  Description of Artificial Sequence: Synthetic oligonucleotide
uaacgacgucggccgccgu

SEQ ID NO: 149617 - RNA, 19 nt, Artificial Sequence
  Description of Artificial Sequence: Synthetic oligonucleotide
gggcaagcaggauauuuau

SEQ ID NO: 149618 - RNA, 19 nt, Artificial Sequence
  Description of Artificial Sequence: Synthetic oligonucleotide
ggaaggucucgcaaauacu

SEQ ID NO: 149619 - RNA, 19 nt, Artificial Sequence
  Description of Artificial Sequence: Synthetic oligonucleotide
gcuaagcacuauggagaug

SEQ ID NO: 149620 - RNA, 19 nt, Artificial Sequence
  Description of Artificial Sequence: Synthetic oligonucleotide
cacucgcuuacaguaagau

SEQ ID NO: 149621 - RNA, 19 nt, Artificial Sequence
  Description of Artificial Sequence: Synthetic oligonucleotide
cuccguggcccucccacaa

SEQ ID NO: 149622 - RNA, 19 nt, Artificial Sequence
  Description of Artificial Sequence: Synthetic oligonucleotide
ggaggcguucgaucuccuc

SEQ ID NO: 149623 - RNA, 19 nt, Artificial Sequence
  Description of Artificial Sequence: Synthetic oligonucleotide
gggccggcgagaccacgag

SEQ ID NO: 149624 - RNA, 19 nt, Artificial Sequence
  Description of Artificial Sequence: Synthetic oligonucleotide
agccagcggaacgccaaaa

SEQ ID NO: 149625 - RNA, 19 nt, Artificial Sequence
  Description of Artificial Sequence: Synthetic oligonucleotide
agggcucacccguccggua

SEQ ID NO: 149626 - RNA, 19 nt, Artificial Sequence
  Description of Artificial Sequence: Synthetic oligonucleotide
cagcucacucgcuuacagu

SEQ ID NO: 149627 - RNA, 19 nt, Artificial Sequence
  Description of Artificial Sequence: Synthetic oligonucleotide
gcucuugcacgugugugaa

SEQ ID NO: 149628 - RNA, 19 nt, Artificial Sequence
  Description of Artificial Sequence: Synthetic oligonucleotide
gguuacacucaggcagcuc

SEQ ID NO: 149629 - RNA, 19 nt, Artificial Sequence
  Description of Artificial Sequence: Synthetic oligonucleotide
cccguccgguacaauccag

SEQ ID NO: 149630 - RNA, 19 nt, Artificial Sequence
  Description of Artificial Sequence: Synthetic oligonucleotide
ggcucacccguccgguaca

SEQ ID NO: 149631 - RNA, 19 nt, Artificial Sequence
  Description of Artificial Sequence: Synthetic oligonucleotide
gagggcucacccguccggu

SEQ ID NO: 149632 - RNA, 19 nt, Artificial Sequence
  Description of Artificial Sequence: Synthetic oligonucleotide
ccgccgucaagucuuuaga

SEQ ID NO: 149633 - RNA, 19 nt, Artificial Sequence
  Description of Artificial Sequence: Synthetic oligonucleotide
gcaggcgaacgccaucgua

SEQ ID NO: 149634 - RNA, 19 nt, Artificial Sequence
  Description of Artificial Sequence: Synthetic oligonucleotide
gcgaucugacgccgcagaa

SEQ ID NO: 149635 - RNA, 19 nt, Artificial Sequence
  Description of Artificial Sequence: Synthetic oligonucleotide
ccucguaagccccuuguau

SEQ ID NO: 149636 - RNA, 19 nt, Artificial Sequence
  Description of Artificial Sequence: Synthetic oligonucleotide
cggcauaagcucuuuggua

SEQ ID NO: 149637 - RNA, 19 nt, Artificial Sequence
  Description of Artificial Sequence: Synthetic oligonucleotide
agccugacguggagccaga

SEQ ID NO: 149638 - RNA, 19 nt, Artificial Sequence
  Description of Artificial Sequence: Synthetic oligonucleotide
cagccagcggaacgccaaa

SEQ ID NO: 149639 - RNA, 19 nt, Artificial Sequence
  Description of Artificial Sequence: Synthetic oligonucleotide
ggcucguggaggaugucau

SEQ ID NO: 149640 - RNA, 19 nt, Artificial Sequence
  Description of Artificial Sequence: Synthetic oligonucleotide
gcgagaccacgagugucca

SEQ ID NO: 149641 - RNA, 19 nt, Artificial Sequence
  Description of Artificial Sequence: Synthetic oligonucleotide
cucccggucauaggcugcu

SEQ ID NO: 149642 - RNA, 19 nt, Artificial Sequence
  Description of Artificial Sequence: Synthetic oligonucleotide
cccugugggccggcgagac

SEQ ID NO: 149643 - RNA, 19 nt, Artificial Sequence
  Description of Artificial Sequence: Synthetic oligonucleotide
acagggcggugggccuaug

SEQ ID NO: 149644 - RNA, 19 nt, Artificial Sequence
  Description of Artificial Sequence: Synthetic oligonucleotide
gcggccugguuugguuccc

SEQ ID NO: 149645 - RNA, 19 nt, Artificial Sequence
  Description of Artificial Sequence: Synthetic oligonucleotide
ggcgaacgccaucguacau

SEQ ID NO: 149646 - RNA, 19 nt, Artificial Sequence
  Description of Artificial Sequence: Synthetic oligonucleotide
ccgguacaauccaggaaau

SEQ ID NO: 149647 - RNA, 19 nt, Artificial Sequence
  Description of Artificial Sequence: Synthetic oligonucleotide
ccgcaucagccagcggaac

SEQ ID NO: 149648 - RNA, 19 nt, Artificial Sequence
  Description of Artificial Sequence: Synthetic oligonucleotide
gaacgccaucguacaucau

SEQ ID NO: 149649 - RNA, 19 nt, Artificial Sequence
  Description of Artificial Sequence: Synthetic oligonucleotide
cgccgucaagucuuuagau

SEQ ID NO: 149650 - RNA, 19 nt, Artificial Sequence
  Description of Artificial Sequence: Synthetic oligonucleotide
ggaccaacgcagaggucuu

SEQ ID NO: 149651 - RNA, 19 nt, Artificial Sequence
  Description of Artificial Sequence: Synthetic oligonucleotide
gcucacccguccgguacaa

SEQ ID NO: 149652 - RNA, 19 nt, Artificial Sequence
  Description of Artificial Sequence: Synthetic oligonucleotide
cggcgaucucagcgcggag

SEQ ID NO: 149653 - RNA, 19 nt, Artificial Sequence
  Description of Artificial Sequence: Synthetic oligonucleotide
cccggucauaggcugcuuu

SEQ ID NO: 149654 - RNA, 19 nt, Artificial Sequence
  Description of Artificial Sequence: Synthetic oligonucleotide
ccggaaggucucgcaaaua

SEQ ID NO: 149655 - RNA, 19 nt, Artificial Sequence
  Description of Artificial Sequence: Synthetic oligonucleotide
ccggcgagaccacgagugu

SEQ ID NO: 149656 - RNA, 19 nt, Artificial Sequence
  Description of Artificial Sequence: Synthetic oligonucleotide
gcuccgcccugcgguguuc

SEQ ID NO: 149657 - RNA, 19 nt, Artificial Sequence
  Description of Artificial Sequence: Synthetic oligonucleotide
cucacccguccgguacaau

SEQ ID NO: 149658 - RNA, 19 nt, Artificial Sequence
  Description of Artificial Sequence: Synthetic oligonucleotide
guccccucguaagccccuu

SEQ ID NO: 149659 - RNA, 19 nt, Artificial Sequence
  Description of Artificial Sequence: Synthetic oligonucleotide
cgcagaggucuugucacuu

SEQ ID NO: 149660 - RNA, 19 nt, Artificial Sequence
  Description of Artificial Sequence: Synthetic oligonucleotide
ggccgccgucaagucuuua

SEQ ID NO: 149661 - RNA, 19 nt, Artificial Sequence
  Description of Artificial Sequence: Synthetic oligonucleotide
cgguugggcuaagcacuau

SEQ ID NO: 149662 - RNA, 19 nt, Artificial Sequence
  Description of Artificial Sequence: Synthetic oligonucleotide
cggccgccgucaagucuuu

SEQ ID NO: 149663 - RNA, 19 nt, Artificial Sequence
  Description of Artificial Sequence: Synthetic oligonucleotide
auuacuuggacccucaucc

SEQ ID NO: 149664 - RNA, 19 nt, Artificial Sequence
  Description of Artificial Sequence: Synthetic oligonucleotide
aacccaaacacacacacac

SEQ ID NO: 149665 - RNA, 19 nt, Artificial Sequence
  Description of Artificial Sequence: Synthetic oligonucleotide
aacacacacacacacacac

SEQ ID NO: 149666 - RNA, 19 nt, Artificial Sequence
  Description of Artificial Sequence: Synthetic oligonucleotide
  modified_base (12)..(12): a, c, u, g, unknown or other
ugaagaaucacnguaaaag

SEQ ID NO: 149667 - RNA, 19 nt, Artificial Sequence
  Description of Artificial Sequence: Synthetic oligonucleotide
  modified_base (19)..(19): a, c, u, g, unknown or other
uuuacauugaagaaucacn

SEQ ID NO: 149668 - RNA, 19 nt, Artificial Sequence
  Description of Artificial Sequence: Synthetic oligonucleotide
aaacgaaugucgucgaugg

SEQ ID NO: 149669 - RNA, 19 nt, Artificial Sequence
  Description of Artificial Sequence: Synthetic oligonucleotide
aacagacuagccuccagcc

SEQ ID NO: 149670 - RNA, 19 nt, Artificial Sequence
  Description of Artificial Sequence: Synthetic oligonucleotide
gaugcuauccccuccacgg

SEQ ID NO: 149671 - RNA, 19 nt, Artificial Sequence
  Description of Artificial Sequence: Synthetic oligonucleotide
gauaaagauaaccagugca

SEQ ID NO: 149672 - RNA, 19 nt, Artificial Sequence
  Description of Artificial Sequence: Synthetic oligonucleotide
agagaacccaaacacacac

SEQ ID NO: 149673 - RNA, 19 nt, Artificial Sequence
  Description of Artificial Sequence: Synthetic oligonucleotide
cacacaaacacacacacac

SEQ ID NO: 149674 - RNA, 19 nt, Artificial Sequence
  Description of Artificial Sequence: Synthetic oligonucleotide
uguagucucaagaaguucu

SEQ ID NO: 149675 - RNA, 19 nt, Artificial Sequence
  Description of Artificial Sequence: Synthetic oligonucleotide
uuaacuuuucaccucuacc

SEQ ID NO: 149676 - RNA, 19 nt, Artificial Sequence
  Description of Artificial Sequence: Synthetic oligonucleotide
auuucuagggcacagacaa

SEQ ID NO: 149677 - RNA, 19 nt, Artificial Sequence
  Description of Artificial Sequence: Synthetic oligonucleotide
auaauuaugucuuuguguu

SEQ ID NO: 149678 - RNA, 19 nt, Artificial Sequence
  Description of Artificial Sequence: Synthetic oligonucleotide
ugaccacucacauacacag

SEQ ID NO: 149679 - RNA, 19 nt, Artificial Sequence
  Description of Artificial Sequence: Synthetic oligonucleotide
auagcagagaugcuauccc

SEQ ID NO: 149680 - RNA, 19 nt, Artificial Sequence
  Description of Artificial Sequence: Synthetic oligonucleotide
agugcuuaaacgaaugucg

SEQ ID NO: 149681 - RNA, 19 nt, Artificial Sequence
  Description of Artificial Sequence: Synthetic oligonucleotide
aaucucguauaauuauguc

SEQ ID NO: 149682 - RNA, 19 nt, Artificial Sequence
  Description of Artificial Sequence: Synthetic oligonucleotide
aaauguucggucauugggg

SEQ ID NO: 149683 - RNA, 19 nt, Artificial Sequence
  Description of Artificial Sequence: Synthetic oligonucleotide
agauaaagauaaccagugc

SEQ ID NO: 149684 - RNA, 19 nt, Artificial Sequence
  Description of Artificial Sequence: Synthetic oligonucleotide
cuuauaugcaacagucugg

SEQ ID NO: 149685 - RNA, 19 nt, Artificial Sequence
  Description of Artificial Sequence: Synthetic oligonucleotide
uguagagggaagaugcaag

SEQ ID NO: 149686 - RNA, 19 nt, Artificial Sequence
  Description of Artificial Sequence: Synthetic oligonucleotide
  modified_base (2)..(2): a, c, u, g, unknown or other
anaggugagaccacuuuac

SEQ ID NO: 149687 - RNA, 19 nt, Artificial Sequence
  Description of Artificial Sequence: Synthetic oligonucleotide
aaggucucuaaugaucagc

SEQ ID NO: 149688 - RNA, 19 nt, Artificial Sequence
  Description of Artificial Sequence: Synthetic oligonucleotide
aaugcguguauguucucuc

SEQ ID NO: 149689 - RNA, 19 nt, Artificial Sequence
  Description of Artificial Sequence: Synthetic oligonucleotide
ucugcaaaggucucuaaug

SEQ ID NO: 149690 - RNA, 19 nt, Artificial Sequence
  Description of Artificial Sequence: Synthetic oligonucleotide
ucucguauaauuaugucuu

SEQ ID NO: 149691 - RNA, 19 nt, Artificial Sequence
  Description of Artificial Sequence: Synthetic oligonucleotide
  modified_base (8)..(8): a, c, u, g, unknown or other
agcaaaanaggugagacca

SEQ ID NO: 149692 - RNA, 19 nt, Artificial Sequence
  Description of Artificial Sequence: Synthetic oligonucleotide
agacuuugaacuugcguac

SEQ ID NO: 149693 - RNA, 19 nt, Artificial Sequence
  Description of Artificial Sequence: Synthetic oligonucleotide
cagauaaagauaaccagug

SEQ ID NO: 149694 - RNA, 19 nt, Artificial Sequence
  Description of Artificial Sequence: Synthetic oligonucleotide
ugugauuccuacccagagg

SEQ ID NO: 149695 - RNA, 19 nt, Artificial Sequence
  Description of Artificial Sequence: Synthetic oligonucleotide
gagguaucuacuuguagcc

SEQ ID NO: 149696 - RNA, 19 nt, Artificial Sequence
  Description of Artificial Sequence: Synthetic oligonucleotide
cuagguuuguggaaucucg

SEQ ID NO: 149697 - RNA, 19 nt, Artificial Sequence
  Description of Artificial Sequence: Synthetic oligonucleotide
aucucguauaauuaugucu

SEQ ID NO: 149698 - RNA, 19 nt, Artificial Sequence
  Description of Artificial Sequence: Synthetic oligonucleotide
caaacacacacacacacac

SEQ ID NO: 149699 - RNA, 19 nt, Artificial Sequence
  Description of Artificial Sequence: Synthetic oligonucleotide
gagguaaugugucauucag

SEQ ID NO: 149700 - RNA, 19 nt, Artificial Sequence
  Description of Artificial Sequence: Synthetic oligonucleotide
  modified_base (3)..(3): a, c, u, g, unknown or other
acnguaaaagcucucgagu

SEQ ID NO: 149701 - RNA, 19 nt, Artificial Sequence
  Description of Artificial Sequence: Synthetic oligonucleotide
uuaacagcuuaacuuuuca

SEQ ID NO: 149702 - RNA, 19 nt, Artificial Sequence
  Description of Artificial Sequence: Synthetic oligonucleotide
uguggaaucucguauaauu

SEQ ID NO: 149703 - RNA, 19 nt, Artificial Sequence
  Description of Artificial Sequence: Synthetic oligonucleotide
auaccuuuaacagcacacc

SEQ ID NO: 149704 - RNA, 19 nt, Artificial Sequence
  Description of Artificial Sequence: Synthetic oligonucleotide
gagacuuugaacuugcgua

SEQ ID NO: 149705 - RNA, 19 nt, Artificial Sequence
  Description of Artificial Sequence: Synthetic oligonucleotide
aaugucgucgauggcaauc

SEQ ID NO: 149706 - RNA, 19 nt, Artificial Sequence
  Description of Artificial Sequence: Synthetic oligonucleotide
aauccuagcugcaugggag

SEQ ID NO: 149707 - RNA, 19 nt, Artificial Sequence
  Description of Artificial Sequence: Synthetic oligonucleotide
gaucaauacugugaguuag

SEQ ID NO: 149708 - RNA, 19 nt, Artificial Sequence
  Description of Artificial Sequence: Synthetic oligonucleotide
  modified_base (4)..(4): a, c, u, g, unknown or other
aaanaggugagaccacuuu

SEQ ID NO: 149709 - RNA, 19 nt, Artificial Sequence
  Description of Artificial Sequence: Synthetic oligonucleotide
cacacacacacaaacacac

SEQ ID NO: 149710 - RNA, 19 nt, Artificial Sequence
  Description of Artificial Sequence: Synthetic oligonucleotide
  modified_base (3)..(3): a, c, u, g, unknown or other
aanaggugagaccacuuua

SEQ ID NO: 149711 - RNA, 19 nt, Artificial Sequence
  Description of Artificial Sequence: Synthetic oligonucleotide
gaugucgggagugucauag

SEQ ID NO: 149712 - RNA, 19 nt, Artificial Sequence
  Description of Artificial Sequence: Synthetic oligonucleotide
uaccuuuaacagcacaccc

SEQ ID NO: 149713 - RNA, 19 nt, Artificial Sequence
  Description of Artificial Sequence: Synthetic oligonucleotide
  modified_base (4)..(4): a, c, u, g, unknown or other
cacnguaaaagcucucgag

SEQ ID NO: 149714 - RNA, 19 nt, Artificial Sequence
  Description of Artificial Sequence: Synthetic oligonucleotide
cacaaacacacacacacac

SEQ ID NO: 149715 - RNA, 19 nt, Artificial Sequence
  Description of Artificial Sequence: Synthetic oligonucleotide
cacacacacacacacacgc

SEQ ID NO: 149716 - RNA, 19 nt, Artificial Sequence
  Description of Artificial Sequence: Synthetic oligonucleotide
guauguucucuccaguucc

SEQ ID NO: 149717 - RNA, 19 nt, Artificial Sequence
  Description of Artificial Sequence: Synthetic oligonucleotide
guccuugccauuuaggcug

SEQ ID NO: 149718 - RNA, 19 nt, Artificial Sequence
  Description of Artificial Sequence: Synthetic oligonucleotide
auggucaaauaccuuuaac

SEQ ID NO: 149719 - RNA, 19 nt, Artificial Sequence
  Description of Artificial Sequence: Synthetic oligonucleotide
gauaaugcguccaugcuuc

SEQ ID NO: 149720 - RNA, 19 nt, Artificial Sequence
  Description of Artificial Sequence: Synthetic oligonucleotide
gcuuaaacgaaugucgucg

SEQ ID NO: 149721 - RNA, 19 nt, Artificial Sequence
  Description of Artificial Sequence: Synthetic oligonucleotide
uuuccggagucaucuaggg

SEQ ID NO: 149722 - RNA, 19 nt, Artificial Sequence
  Description of Artificial Sequence: Synthetic oligonucleotide
cacacacacacacaaacac

SEQ ID NO: 149723 - RNA, 19 nt, Artificial Sequence
  Description of Artificial Sequence: Synthetic oligonucleotide
cacacacacacacacaaac

SEQ ID NO: 149724 - RNA, 19 nt, Artificial Sequence
  Description of Artificial Sequence: Synthetic oligonucleotide
cacacacaaacacacacac

SEQ ID NO: 149725 - RNA, 19 nt, Artificial Sequence
  Description of Artificial Sequence: Synthetic oligonucleotide
aacgaaugucgucgauggc

SEQ ID NO: 149726 - RNA, 19 nt, Artificial Sequence
  Description of Artificial Sequence: Synthetic oligonucleotide
agagcuaagaaaacccagg

SEQ ID NO: 149727 - RNA, 19 nt, Artificial Sequence
  Description of Artificial Sequence: Synthetic oligonucleotide
ugugaguuagguuucccaa

SEQ ID NO: 149728 - RNA, 19 nt, Artificial Sequence
  Description of Artificial Sequence: Synthetic oligonucleotide
uaaacgaaugucgucgaug

SEQ ID NO: 149729 - RNA, 19 nt, Artificial Sequence
  Description of Artificial Sequence: Synthetic oligonucleotide
aacgagugccaagaucagc

SEQ ID NO: 149730 - RNA, 19 nt, Artificial Sequence
  Description of Artificial Sequence: Synthetic oligonucleotide
cguacauccaaccacaggg

SEQ ID NO: 149731 - RNA, 19 nt, Artificial Sequence
  Description of Artificial Sequence: Synthetic oligonucleotide
ucccaaagggaacaauuca

SEQ ID NO: 149732 - RNA, 19 nt, Artificial Sequence
  Description of Artificial Sequence: Synthetic oligonucleotide
cacacacacaaacacacac

SEQ ID NO: 149733 - RNA, 19 nt, Artificial Sequence
  Description of Artificial Sequence: Synthetic oligonucleotide
cucgaacacgaucugauac

SEQ ID NO: 149734 - RNA, 19 nt, Artificial Sequence
  Description of Artificial Sequence: Synthetic oligonucleotide
cacacacacacacacacac

SEQ ID NO: 149735 - RNA, 19 nt, Artificial Sequence
  Description of Artificial Sequence: Synthetic oligonucleotide
ucaaaccuucggaugucgg

SEQ ID NO: 149736 - RNA, 19 nt, Artificial Sequence
  Description of Artificial Sequence: Synthetic oligonucleotide
cacacacacacacacgcgg

SEQ ID NO: 149737 - RNA, 19 nt, Artificial Sequence
  Description of Artificial Sequence: Synthetic oligonucleotide
uguuuagcccucagggacc

SEQ ID NO: 149738 - RNA, 19 nt, Artificial Sequence
  Description of Artificial Sequence: Synthetic oligonucleotide
cauagcagagaugcuaucc

SEQ ID NO: 149739 - RNA, 19 nt, Artificial Sequence
  Description of Artificial Sequence: Synthetic oligonucleotide
uggaaucucguauaauuau

SEQ ID NO: 149740 - RNA, 19 nt, Artificial Sequence
  Description of Artificial Sequence: Synthetic oligonucleotide
ugucgggagugucauagug

SEQ ID NO: 149741 - RNA, 19 nt, Artificial Sequence
  Description of Artificial Sequence: Synthetic oligonucleotide
agagccucgaaucagccaa

SEQ ID NO: 149742 - RNA, 19 nt, Artificial Sequence
  Description of Artificial Sequence: Synthetic oligonucleotide
uuuaggcauuaacacaaaa

SEQ ID NO: 149743 - RNA, 19 nt, Artificial Sequence
  Description of Artificial Sequence: Synthetic oligonucleotide
aaagcaacccuguggcccu

SEQ ID NO: 149744 - RNA, 19 nt, Artificial Sequence
  Description of Artificial Sequence: Synthetic oligonucleotide
cuuuccggagucaucuagg

SEQ ID NO: 149745 - RNA, 19 nt, Artificial Sequence
  Description of Artificial Sequence: Synthetic oligonucleotide
aauggucaaauaccuuuaa

SEQ ID NO: 149746 - RNA, 19 nt, Artificial Sequence
  Description of Artificial Sequence: Synthetic oligonucleotide
ucguacauccaaccacagg

SEQ ID NO: 149747 - RNA, 19 nt, Artificial Sequence
  Description of Artificial Sequence: Synthetic oligonucleotide
aguugcaaaucuugucauc

SEQ ID NO: 149748 - RNA, 19 nt, Artificial Sequence
  Description of Artificial Sequence: Synthetic oligonucleotide
aggcauuaacacaaaaguc

SEQ ID NO: 149749 - RNA, 19 nt, Artificial Sequence
  Description of Artificial Sequence: Synthetic oligonucleotide
uuguuacggucguacaucc

SEQ ID NO: 149750 - RNA, 19 nt, Artificial Sequence
  Description of Artificial Sequence: Synthetic oligonucleotide
uugcguacaaaugcucugg

SEQ ID NO: 149751 - RNA, 19 nt, Artificial Sequence
  Description of Artificial Sequence: Synthetic oligonucleotide
aggucucuaaugaucagcg

SEQ ID NO: 149752 - RNA, 19 nt, Artificial Sequence
  Description of Artificial Sequence: Synthetic oligonucleotide
agugugcugaauccuagcu

SEQ ID NO: 149753 - RNA, 19 nt, Artificial Sequence
  Description of Artificial Sequence: Synthetic oligonucleotide
caucucucuggguacacgc

SEQ ID NO: 149754 - RNA, 19 nt, Artificial Sequence
  Description of Artificial Sequence: Synthetic oligonucleotide
ucgaacacgaucugauacu

SEQ ID NO: 149755 - RNA, 19 nt, Artificial Sequence
  Description of Artificial Sequence: Synthetic oligonucleotide
aaaccuucggaugucggga

SEQ ID NO: 149756 - RNA, 19 nt, Artificial Sequence
  Description of Artificial Sequence: Synthetic oligonucleotide
cauuuaggcuguaggagac

SEQ ID NO: 149757 - RNA, 19 nt, Artificial Sequence
  Description of Artificial Sequence: Synthetic oligonucleotide
cucgaaucagccaaaguga

SEQ ID NO: 149758 - RNA, 19 nt, Artificial Sequence
  Description of Artificial Sequence: Synthetic oligonucleotide
gaauccccaccucacuagg

SEQ ID NO: 149759 - RNA, 19 nt, Artificial Sequence
  Description of Artificial Sequence: Synthetic oligonucleotide
gauaaccagugcaccaagg

SEQ ID NO: 149760 - RNA, 19 nt, Artificial Sequence
  Description of Artificial Sequence: Synthetic oligonucleotide
aggagauagcuccugacau

SEQ ID NO: 149761 - RNA, 19 nt, Artificial Sequence
  Description of Artificial Sequence: Synthetic oligonucleotide
ucagagggcgccuaacacu

SEQ ID NO: 149762 - RNA, 19 nt, Artificial Sequence
  Description of Artificial Sequence: Synthetic oligonucleotide
ucguauaauuaugucuuug

SEQ ID NO: 149763 - RNA, 19 nt, Artificial Sequence
  Description of Artificial Sequence: Synthetic oligonucleotide
aaaugcguguauguucucu

SEQ ID NO: 149764 - RNA, 19 nt, Artificial Sequence
  Description of Artificial Sequence: Synthetic oligonucleotide
uacacgcgcacauacugug

SEQ ID NO: 149765 - RNA, 19 nt, Artificial Sequence
  Description of Artificial Sequence: Synthetic oligonucleotide
caacagacuagccuccagc

SEQ ID NO: 149766 - RNA, 19 nt, Artificial Sequence
  Description of Artificial Sequence: Synthetic oligonucleotide
ccucgaaucagccaaagug

SEQ ID NO: 149767 - RNA, 19 nt, Artificial Sequence
  Description of Artificial Sequence: Synthetic oligonucleotide
ggaguugcaaaucuuguca

SEQ ID NO: 149768 - RNA, 19 nt, Artificial Sequence
  Description of Artificial Sequence: Synthetic oligonucleotide
aaccuucggaugucgggag

SEQ ID NO: 149769 - RNA, 19 nt, Artificial Sequence
  Description of Artificial Sequence: Synthetic oligonucleotide
  modified_base (9)..(9): a, c, u, g, unknown or other
cagcaaaanaggugagacc

SEQ ID NO: 149770 - RNA, 19 nt, Artificial Sequence
  Description of Artificial Sequence: Synthetic oligonucleotide
ucaauacugugaguuaggu

SEQ ID NO: 149771 - RNA, 19 nt, Artificial Sequence
  Description of Artificial Sequence: Synthetic oligonucleotide
agguaucuacuuguagccc

SEQ ID NO: 149772 - RNA, 19 nt, Artificial Sequence
  Description of Artificial Sequence: Synthetic oligonucleotide
gguagcuugguacuggaac

SEQ ID NO: 149773 - RNA, 19 nt, Artificial Sequence
  Description of Artificial Sequence: Synthetic oligonucleotide
cuugcguacaaaugcucug

SEQ ID NO: 149774 - RNA, 19 nt, Artificial Sequence
  Description of Artificial Sequence: Synthetic oligonucleotide
uacggucguacauccaacc

SEQ ID NO: 149775 - RNA, 19 nt, Artificial Sequence
  Description of Artificial Sequence: Synthetic oligonucleotide
agggcuuaacagcuuaacu

SEQ ID NO: 149776 - RNA, 19 nt, Artificial Sequence
  Description of Artificial Sequence: Synthetic oligonucleotide
cuacccagagggaaaguac

SEQ ID NO: 149777 - RNA, 19 nt, Artificial Sequence
  Description of Artificial Sequence: Synthetic oligonucleotide
cuuuaacagcacacccugg

SEQ ID NO: 149778 - RNA, 19 nt, Artificial Sequence
  Description of Artificial Sequence: Synthetic oligonucleotide
acuuguuacggucguacau

SEQ ID NO: 149779 - RNA, 19 nt, Artificial Sequence
  Description of Artificial Sequence: Synthetic oligonucleotide
gacaccucccuuuccggag

SEQ ID NO: 149780 - RNA, 19 nt, Artificial Sequence
  Description of Artificial Sequence: Synthetic oligonucleotide
augagccgcccauacuggc

SEQ ID NO: 149781 - RNA, 19 nt, Artificial Sequence
  Description of Artificial Sequence: Synthetic oligonucleotide
ugaauccuagcugcauggg

SEQ ID NO: 149782 - RNA, 19 nt, Artificial Sequence
  Description of Artificial Sequence: Synthetic oligonucleotide
ugcguguauguucucucca

SEQ ID NO: 149783 - RNA, 19 nt, Artificial Sequence
  Description of Artificial Sequence: Synthetic oligonucleotide
gaaggagaaaugccuuaac

SEQ ID NO: 149784 - RNA, 19 nt, Artificial Sequence
  Description of Artificial Sequence: Synthetic oligonucleotide
ugcguacaaaugcucuggc

SEQ ID NO: 149785 - RNA, 19 nt, Artificial Sequence
  Description of Artificial Sequence: Synthetic oligonucleotide
cuaucugcagauaaagaua

SEQ ID NO: 149786 - RNA, 19 nt, Artificial Sequence
  Description of Artificial Sequence: Synthetic oligonucleotide
cuuguuacggucguacauc

SEQ ID NO: 149787 - RNA, 19 nt, Artificial Sequence
  Description of Artificial Sequence: Synthetic oligonucleotide
aguugcacaugacuuuaga

SEQ ID NO: 149788 - RNA, 19 nt, Artificial Sequence
  Description of Artificial Sequence: Synthetic oligonucleotide
agcaggacucauuccacug

SEQ ID NO: 149789 - RNA, 19 nt, Artificial Sequence
  Description of Artificial Sequence: Synthetic oligonucleotide
gaauggagucacuagggua

SEQ ID NO: 149790 - RNA, 19 nt, Artificial Sequence
  Description of Artificial Sequence: Synthetic oligonucleotide
aucaauacugugaguuagg

SEQ ID NO: 149791 - RNA, 19 nt, Artificial Sequence
  Description of Artificial Sequence: Synthetic oligonucleotide
ggaaauguucggucauugg

SEQ ID NO: 149792 - RNA, 19 nt, Artificial Sequence
  Description of Artificial Sequence: Synthetic oligonucleotide
guuacggucguacauccaa

SEQ ID NO: 149793 - RNA, 19 nt, Artificial Sequence
  Description of Artificial Sequence: Synthetic oligonucleotide
cucccgaucguccuuuccc

SEQ ID NO: 149794 - RNA, 19 nt, Artificial Sequence
  Description of Artificial Sequence: Synthetic oligonucleotide
ugcuuaaacgaaugucguc

SEQ ID NO: 149795 - RNA, 19 nt, Artificial Sequence
  Description of Artificial Sequence: Synthetic oligonucleotide
gaauccuagcugcauggga

SEQ ID NO: 149796 - RNA, 19 nt, Artificial Sequence
  Description of Artificial Sequence: Synthetic oligonucleotide
uuacggucguacauccaac

SEQ ID NO: 149797 - RNA, 19 nt, Artificial Sequence
  Description of Artificial Sequence: Synthetic oligonucleotide
acgagugccaagaucagca

SEQ ID NO: 149798 - RNA, 19 nt, Artificial Sequence
  Description of Artificial Sequence: Synthetic oligonucleotide
ucggaugucgggaguguca

SEQ ID NO: 149799 - RNA, 19 nt, Artificial Sequence
  Description of Artificial Sequence: Synthetic oligonucleotide
acugugaguuagguuuccc

SEQ ID NO: 149800 - RNA, 19 nt, Artificial Sequence
  Description of Artificial Sequence: Synthetic oligonucleotide
gacugugugugugugugug

SEQ ID NO: 149801 - RNA, 19 nt, Artificial Sequence
  Description of Artificial Sequence: Synthetic oligonucleotide
uuaaacgaaugucgucgau

SEQ ID NO: 149802 - RNA, 19 nt, Artificial Sequence
  Description of Artificial Sequence: Synthetic oligonucleotide
  modified_base (5)..(5): a, c, u, g, unknown or other
aaaanaggugagaccacuu

SEQ ID NO: 149803 - RNA, 19 nt, Artificial Sequence
  Description of Artificial Sequence: Synthetic oligonucleotide
aucaaaccuucggaugucg

SEQ ID NO: 149804 - RNA, 19 nt, Artificial Sequence
  Description of Artificial Sequence: Synthetic oligonucleotide
ugugugugugugugugugc

SEQ ID NO: 149805 - RNA, 19 nt, Artificial Sequence
  Description of Artificial Sequence: Synthetic oligonucleotide
aaguugaguugcacaugac

SEQ ID NO: 149806 - RNA, 19 nt, Artificial Sequence
  Description of Artificial Sequence: Synthetic oligonucleotide
agaucaauacugugaguua

SEQ ID NO: 149807 - RNA, 19 nt, Artificial Sequence
  Description of Artificial Sequence: Synthetic oligonucleotide
gaaucucguauaauuaugu

SEQ ID NO: 149808 - RNA, 19 nt, Artificial Sequence
  Description of Artificial Sequence: Synthetic oligonucleotide
aacugacugugugugugug

SEQ ID NO: 149809 - RNA, 19 nt, Artificial Sequence
  Description of Artificial Sequence: Synthetic oligonucleotide
ucuacugcgugcccagcuc

SEQ ID NO: 149810 - RNA, 19 nt, Artificial Sequence
  Description of Artificial Sequence: Synthetic oligonucleotide
cugacugugugugugugug

SEQ ID NO: 149811 - RNA, 19 nt, Artificial Sequence
  Description of Artificial Sequence: Synthetic oligonucleotide
cacacacacacacacacaa

SEQ ID NO: 149812 - RNA, 19 nt, Artificial Sequence
  Description of Artificial Sequence: Synthetic oligonucleotide
uggagguaaugugucauuc

SEQ ID NO: 149813 - RNA, 19 nt, Artificial Sequence
  Description of Artificial Sequence: Synthetic oligonucleotide
cuuaaacgaaugucgucga

SEQ ID NO: 149814 - RNA, 19 nt, Artificial Sequence
  Description of Artificial Sequence: Synthetic oligonucleotide
gagggcgccuaacacuaag

SEQ ID NO: 149815 - RNA, 19 nt, Artificial Sequence
  Description of Artificial Sequence: Synthetic oligonucleotide
gcgccuaacacuaagcccc

SEQ ID NO: 149816 - RNA, 19 nt, Artificial Sequence
  Description of Artificial Sequence: Synthetic oligonucleotide
aaacacacacacacacaca

SEQ ID NO: 149817 - RNA, 19 nt, Artificial Sequence
  Description of Artificial Sequence: Synthetic oligonucleotide
ggaaucucguauaauuaug

SEQ ID NO: 149818 - RNA, 19 nt, Artificial Sequence
  Description of Artificial Sequence: Synthetic oligonucleotide
cucagagggcgccuaacac

SEQ ID NO: 149819 - RNA, 19 nt, Artificial Sequence
  Description of Artificial Sequence: Synthetic oligonucleotide
acuugcguacaaaugcucu

SEQ ID NO: 149820 - RNA, 19 nt, Artificial Sequence
  Description of Artificial Sequence: Synthetic oligonucleotide
ccuuuaacagcacacccug

SEQ ID NO: 149821 - RNA, 19 nt, Artificial Sequence
  Description of Artificial Sequence: Synthetic oligonucleotide
cccaaacacacacacacac

SEQ ID NO: 149822 - RNA, 19 nt, Artificial Sequence
  Description of Artificial Sequence: Synthetic oligonucleotide
gggagugucauagugcaug

SEQ ID NO: 149823 - RNA, 19 nt, Artificial Sequence
  Description of Artificial Sequence: Synthetic oligonucleotide
uguggaccgccuaguccgg

SEQ ID NO: 149824 - RNA, 19 nt, Artificial Sequence
  Description of Artificial Sequence: Synthetic oligonucleotide
gaaagcggggaccgguuuc

SEQ ID NO: 149825 - RNA, 19 nt, Artificial Sequence
  Description of Artificial Sequence: Synthetic oligonucleotide
ugauuccuacccagaggga

SEQ ID NO: 149826 - RNA, 19 nt, Artificial Sequence
  Description of Artificial Sequence: Synthetic oligonucleotide
ucacuaggagauagcuccu

SEQ ID NO: 149827 - RNA, 19 nt, Artificial Sequence
  Description of Artificial Sequence: Synthetic oligonucleotide
gugugugugugugugugcc

SEQ ID NO: 149828 - RNA, 19 nt, Artificial Sequence
  Description of Artificial Sequence: Synthetic oligonucleotide
ugugugugugugugccugc

SEQ ID NO: 149829 - RNA, 19 nt, Artificial Sequence
  Description of Artificial Sequence: Synthetic oligonucleotide
uauugucuugggcgucccc

SEQ ID NO: 149830 - RNA, 19 nt, Artificial Sequence
  Description of Artificial Sequence: Synthetic oligonucleotide
acacacacacacacgcggg

SEQ ID NO: 149831 - RNA, 19 nt, Artificial Sequence
  Description of Artificial Sequence: Synthetic oligonucleotide
uguuacggucguacaucca

SEQ ID NO: 149832 - RNA, 19 nt, Artificial Sequence
  Description of Artificial Sequence: Synthetic oligonucleotide
guacauccaaccacagggc

SEQ ID NO: 149833 - RNA, 19 nt, Artificial Sequence
  Description of Artificial Sequence: Synthetic oligonucleotide
acggucguacauccaacca

SEQ ID NO: 149834 - RNA, 19 nt, Artificial Sequence
  Description of Artificial Sequence: Synthetic oligonucleotide
cucaucccugugaacuccc

SEQ ID NO: 149835 - RNA, 19 nt, Artificial Sequence
  Description of Artificial Sequence: Synthetic oligonucleotide
ugugugugugugugugugu

SEQ ID NO: 149836 - RNA, 19 nt, Artificial Sequence
  Description of Artificial Sequence: Synthetic oligonucleotide
uuagcccucagggaccacu

SEQ ID NO: 149837 - RNA, 19 nt, Artificial Sequence
  Description of Artificial Sequence: Synthetic oligonucleotide
aguaacacucaggcucuag

SEQ ID NO: 149838 - RNA, 19 nt, Artificial Sequence
  Description of Artificial Sequence: Synthetic oligonucleotide
gccauuuaggcuguaggag

SEQ ID NO: 149839 - RNA, 19 nt, Artificial Sequence
  Description of Artificial Sequence: Synthetic oligonucleotide
acggaugacccagaggagu

SEQ ID NO: 149840 - RNA, 19 nt, Artificial Sequence
  Description of Artificial Sequence: Synthetic oligonucleotide
acacacacacacaaacaca

SEQ ID NO: 149841 - RNA, 19 nt, Artificial Sequence
  Description of Artificial Sequence: Synthetic oligonucleotide
ucccgaagggaguugcaaa

SEQ ID NO: 149842 - RNA, 19 nt, Artificial Sequence
  Description of Artificial Sequence: Synthetic oligonucleotide
agggcgccuaacacuaagc

SEQ ID NO: 149843 - RNA, 19 nt, Artificial Sequence
  Description of Artificial Sequence: Synthetic oligonucleotide
acacacacaaacacacaca

SEQ ID NO: 149844 - RNA, 19 nt, Artificial Sequence
  Description of Artificial Sequence: Synthetic oligonucleotide
acaaacacacacacacaca

SEQ ID NO: 149845 - RNA, 19 nt, Artificial Sequence
  Description of Artificial Sequence: Synthetic oligonucleotide
ggcgccuaacacuaagccc

SEQ ID NO: 149846 - RNA, 19 nt, Artificial Sequence
  Description of Artificial Sequence: Synthetic oligonucleotide
ugcuaaccuggcuucucac

SEQ ID NO: 149847 - RNA, 19 nt, Artificial Sequence
  Description of Artificial Sequence: Synthetic oligonucleotide
acacacacacacacacacg

SEQ ID NO: 149848 - RNA, 19 nt, Artificial Sequence
  Description of Artificial Sequence: Synthetic oligonucleotide
cugugugugugugugugug

SEQ ID NO: 149849 - RNA, 19 nt, Artificial Sequence
  Description of Artificial Sequence: Synthetic oligonucleotide
cuuuaccacuuauaugcaa

SEQ ID NO: 149850 - RNA, 19 nt, Artificial Sequence
  Description of Artificial Sequence: Synthetic oligonucleotide
cugugaguuagguuuccca

SEQ ID NO: 149851 - RNA, 19 nt, Artificial Sequence
  Description of Artificial Sequence: Synthetic oligonucleotide
acugacugugugugugugu

SEQ ID NO: 149852 - RNA, 19 nt, Artificial Sequence
  Description of Artificial Sequence: Synthetic oligonucleotide
gugugugugugugugugug

SEQ ID NO: 149853 - RNA, 19 nt, Artificial Sequence
  Description of Artificial Sequence: Synthetic oligonucleotide
ugagaccacuuuaccacuu

SEQ ID NO: 149854 - RNA, 19 nt, Artificial Sequence
  Description of Artificial Sequence: Synthetic oligonucleotide
ggccaaguuagaaucagac

SEQ ID NO: 149855 - RNA, 19 nt, Artificial Sequence
  Description of Artificial Sequence: Synthetic oligonucleotide
ucccgaucguccuuucccu

SEQ ID NO: 149856 - RNA, 19 nt, Artificial Sequence
  Description of Artificial Sequence: Synthetic oligonucleotide
acacacacacacacacgcg

SEQ ID NO: 149857 - RNA, 19 nt, Artificial Sequence
  Description of Artificial Sequence: Synthetic oligonucleotide
cagagugggccuuugagcu

SEQ ID NO: 149858 - RNA, 19 nt, Artificial Sequence
  Description of Artificial Sequence: Synthetic oligonucleotide
accgguagcuugguacugg

SEQ ID NO: 149859 - RNA, 19 nt, Artificial Sequence
  Description of Artificial Sequence: Synthetic oligonucleotide
acacacacacacacaaaca

SEQ ID NO: 149860 - RNA, 19 nt, Artificial Sequence
  Description of Artificial Sequence: Synthetic oligonucleotide
augucgucgauggcaaucu

SEQ ID NO: 149861 - RNA, 19 nt, Artificial Sequence
  Description of Artificial Sequence: Synthetic oligonucleotide
ugugugugugugugugccu

SEQ ID NO: 149862 - RNA, 19 nt, Artificial Sequence
  Description of Artificial Sequence: Synthetic oligonucleotide
ggccuaucugcagauaaag

SEQ ID NO: 149863 - RNA, 19 nt, Artificial Sequence
  Description of Artificial Sequence: Synthetic oligonucleotide
caacgagugccaagaucag

SEQ ID NO: 149864 - RNA, 19 nt, Artificial Sequence
  Description of Artificial Sequence: Synthetic oligonucleotide
agcggggaccgguuucuuc

SEQ ID NO: 149865 - RNA, 19 nt, Artificial Sequence
  Description of Artificial Sequence: Synthetic oligonucleotide
acucacauacacaguagau

SEQ ID NO: 149866 - RNA, 19 nt, Artificial Sequence
  Description of Artificial Sequence: Synthetic oligonucleotide
uuauugucuugggcguccc

SEQ ID NO: 149867 - RNA, 19 nt, Artificial Sequence
  Description of Artificial Sequence: Synthetic oligonucleotide
acugugugugugugugugu

SEQ ID NO: 149868 - RNA, 19 nt, Artificial Sequence
  Description of Artificial Sequence: Synthetic oligonucleotide
cgggaaccgagccagaacg

SEQ ID NO: 149869 - RNA, 19 nt, Artificial Sequence
  Description of Artificial Sequence: Synthetic oligonucleotide
uaaugcguccaugcuucca

SEQ ID NO: 149870 - RNA, 19 nt, Artificial Sequence
  Description of Artificial Sequence: Synthetic oligonucleotide
agucaucuagggcucugau

SEQ ID NO: 149871 - RNA, 19 nt, Artificial Sequence
  Description of Artificial Sequence: Synthetic oligonucleotide
uacugugaguuagguuucc

SEQ ID NO: 149872 - RNA, 19 nt, Artificial Sequence
  Description of Artificial Sequence: Synthetic oligonucleotide
gugugugugugugugccug

SEQ ID NO: 149873 - RNA, 19 nt, Artificial Sequence
  Description of Artificial Sequence: Synthetic oligonucleotide
agggcuagguuuguggaau

SEQ ID NO: 149874 - RNA, 19 nt, Artificial Sequence
  Description of Artificial Sequence: Synthetic oligonucleotide
ugugugugugugccugcaa

SEQ ID NO: 149875 - RNA, 19 nt, Artificial Sequence
  Description of Artificial Sequence: Synthetic oligonucleotide
gggcgccuaacacuaagcc

SEQ ID NO: 149876 - RNA, 19 nt, Artificial Sequence
  Description of Artificial Sequence: Synthetic oligonucleotide
ggagguaaugugucauuca

SEQ ID NO: 149877 - RNA, 19 nt, Artificial Sequence
  Description of Artificial Sequence: Synthetic oligonucleotide
cacucccucgaacacgauc

SEQ ID NO: 149878 - RNA, 19 nt, Artificial Sequence
  Description of Artificial Sequence: Synthetic oligonucleotide
gggaguugcaaaucuuguc

SEQ ID NO: 149879 - RNA, 19 nt, Artificial Sequence
  Description of Artificial Sequence: Synthetic oligonucleotide
guggaaucucguauaauua

SEQ ID NO: 149880 - RNA, 19 nt, Artificial Sequence
  Description of Artificial Sequence: Synthetic oligonucleotide
gcguguauguucucuccag

SEQ ID NO: 149881 - RNA, 19 nt, Artificial Sequence
  Description of Artificial Sequence: Synthetic oligonucleotide
gacucauuccacugugggu

SEQ ID NO: 149882 - RNA, 19 nt, Artificial Sequence
  Description of Artificial Sequence: Synthetic oligonucleotide
ugcaaacgcugagaugggu

SEQ ID NO: 149883 - RNA, 19 nt, Artificial Sequence
  Description of Artificial Sequence: Synthetic oligonucleotide
cuaguccgggagagcgugg

SEQ ID NO: 149884 - RNA, 19 nt, Artificial Sequence
  Description of Artificial Sequence: Synthetic oligonucleotide
ucaucccugugaacucccu

SEQ ID NO: 149885 - RNA, 19 nt, Artificial Sequence
  Description of Artificial Sequence: Synthetic oligonucleotide
acacacacacacgcgggug

SEQ ID NO: 149886 - RNA, 19 nt, Artificial Sequence
  Description of Artificial Sequence: Synthetic oligonucleotide
accgccuaguccgggagag

SEQ ID NO: 149887 - RNA, 19 nt, Artificial Sequence
  Description of Artificial Sequence: Synthetic oligonucleotide
ugacugugugugugugugu

SEQ ID NO: 149888 - RNA, 19 nt, Artificial Sequence
  Description of Artificial Sequence: Synthetic oligonucleotide
acacaaacacacacacaca

SEQ ID NO: 149889 - RNA, 19 nt, Artificial Sequence
  Description of Artificial Sequence: Synthetic oligonucleotide
  modified_base (2)..(2): a, c, u, g, unknown or other
cnguaaaagcucucgaguu

SEQ ID NO: 149890 - RNA, 19 nt, Artificial Sequence
  Description of Artificial Sequence: Synthetic oligonucleotide
auuuaggcuguaggagacu

SEQ ID NO: 149891 - RNA, 19 nt, Artificial Sequence
  Description of Artificial Sequence: Synthetic oligonucleotide
  modified_base (6)..(6): a, c, u, g, unknown or other
caaaanaggugagaccacu

SEQ ID NO: 149892 - RNA, 19 nt, Artificial Sequence
  Description of Artificial Sequence: Synthetic oligonucleotide
agccacuuguuacggucgu

SEQ ID NO: 149893 - RNA, 19 nt, Artificial Sequence
  Description of Artificial Sequence: Synthetic oligonucleotide
ccuaucugcagauaaagau

SEQ ID NO: 149894 - RNA, 19 nt, Artificial Sequence
  Description of Artificial Sequence: Synthetic oligonucleotide
ggucguacauccaaccaca

SEQ ID NO: 149895 - RNA, 19 nt, Artificial Sequence
  Description of Artificial Sequence: Synthetic oligonucleotide
cagagggcgccuaacacua

SEQ ID NO: 149896 - RNA, 19 nt, Artificial Sequence
  Description of Artificial Sequence: Synthetic oligonucleotide
ccuuuccggagucaucuag

SEQ ID NO: 149897 - RNA, 19 nt, Artificial Sequence
  Description of Artificial Sequence: Synthetic oligonucleotide
uggaccgccuaguccggga

SEQ ID NO: 149898 - RNA, 19 nt, Artificial Sequence
  Description of Artificial Sequence: Synthetic oligonucleotide
ucccucgaacacgaucuga

SEQ ID NO: 149899 - RNA, 19 nt, Artificial Sequence
  Description of Artificial Sequence: Synthetic oligonucleotide
uuguggaaucucguauaau

SEQ ID NO: 149900 - RNA, 19 nt, Artificial Sequence
  Description of Artificial Sequence: Synthetic oligonucleotide
uuucuacugcgugcccagc

SEQ ID NO: 149901 - RNA, 19 nt, Artificial Sequence
  Description of Artificial Sequence: Synthetic oligonucleotide
uaguccgggagagcgugga

SEQ ID NO: 149902 - RNA, 19 nt, Artificial Sequence
  Description of Artificial Sequence: Synthetic oligonucleotide
accccguggccaccgguag

SEQ ID NO: 149903 - RNA, 19 nt, Artificial Sequence
  Description of Artificial Sequence: Synthetic oligonucleotide
acacacaaacacacacaca

SEQ ID NO: 149904 - RNA, 19 nt, Artificial Sequence
  Description of Artificial Sequence: Synthetic oligonucleotide
  modified_base (7)..(7): a, c, u, g, unknown or other
gcaaaanaggugagaccac

SEQ ID NO: 149905 - RNA, 19 nt, Artificial Sequence
  Description of Artificial Sequence: Synthetic oligonucleotide
gagaccacuuuaccacuua

SEQ ID NO: 149906 - RNA, 19 nt, Artificial Sequence
  Description of Artificial Sequence: Synthetic oligonucleotide
gucguacauccaaccacag

SEQ ID NO: 149907 - RNA, 19 nt, Artificial Sequence
  Description of Artificial Sequence: Synthetic oligonucleotide
caucaaaccuucggauguc

SEQ ID NO: 149908 - RNA, 19 nt, Artificial Sequence
  Description of Artificial Sequence: Synthetic oligonucleotide
cacuuguuacggucguaca

SEQ ID NO: 149909 - RNA, 19 nt, Artificial Sequence
  Description of Artificial Sequence: Synthetic oligonucleotide
ugucgucgauggcaaucuc

SEQ ID NO: 149910 - RNA, 19 nt, Artificial Sequence
  Description of Artificial Sequence: Synthetic oligonucleotide
ggagacuuugaacuugcgu

SEQ ID NO: 149911 - RNA, 19 nt, Artificial Sequence
  Description of Artificial Sequence: Synthetic oligonucleotide
cccagagugggccuuugag

SEQ ID NO: 149912 - RNA, 19 nt, Artificial Sequence
  Description of Artificial Sequence: Synthetic oligonucleotide
acgcgcacauacugugcug

SEQ ID NO: 149913 - RNA, 19 nt, Artificial Sequence
  Description of Artificial Sequence: Synthetic oligonucleotide
cacuaggagauagcuccug

SEQ ID NO: 149914 - RNA, 19 nt, Artificial Sequence
  Description of Artificial Sequence: Synthetic oligonucleotide
uuggacccucaucccugug

SEQ ID NO: 149915 - RNA, 19 nt, Artificial Sequence
  Description of Artificial Sequence: Synthetic oligonucleotide
agccucgaaucagccaaag

SEQ ID NO: 149916 - RNA, 19 nt, Artificial Sequence
  Description of Artificial Sequence: Synthetic oligonucleotide
cuuugaacuugcguacaaa

SEQ ID NO: 149917 - RNA, 19 nt, Artificial Sequence
  Description of Artificial Sequence: Synthetic oligonucleotide
augucgggagugucauagu

SEQ ID NO: 149918 - RNA, 19 nt, Artificial Sequence
  Description of Artificial Sequence: Synthetic oligonucleotide
uucggaugucgggaguguc

SEQ ID NO: 149919 - RNA, 19 nt, Artificial Sequence
  Description of Artificial Sequence: Synthetic oligonucleotide
acacacacacaaacacaca

SEQ ID NO: 149920 - RNA, 19 nt, Artificial Sequence
  Description of Artificial Sequence: Synthetic oligonucleotide
acacgcgggugagugacca

SEQ ID NO: 149921 - RNA, 19 nt, Artificial Sequence
  Description of Artificial Sequence: Synthetic oligonucleotide
acacacacacacacacaca

SEQ ID NO: 149922 - RNA, 19 nt, Artificial Sequence
  Description of Artificial Sequence: Synthetic oligonucleotide
ucgccggccgucacucugu

SEQ ID NO: 149923 - RNA, 19 nt, Artificial Sequence
  Description of Artificial Sequence: Synthetic oligonucleotide
guuuagcccucagggacca

SEQ ID NO: 149924 - RNA, 19 nt, Artificial Sequence
  Description of Artificial Sequence: Synthetic oligonucleotide
ccacuuguuacggucguac

SEQ ID NO: 149925 - RNA, 19 nt, Artificial Sequence
  Description of Artificial Sequence: Synthetic oligonucleotide
uccgggaaccgagccagaa

SEQ ID NO: 149926 - RNA, 19 nt, Artificial Sequence
  Description of Artificial Sequence: Synthetic oligonucleotide
gugaacccuggccaaguua

SEQ ID NO: 149927 - RNA, 19 nt, Artificial Sequence
  Description of Artificial Sequence: Synthetic oligonucleotide
gcaaguugaguugcacaug

SEQ ID NO: 149928 - RNA, 19 nt, Artificial Sequence
  Description of Artificial Sequence: Synthetic oligonucleotide
ggauaaugcguccaugcuu

SEQ ID NO: 149929 - RNA, 19 nt, Artificial Sequence
  Description of Artificial Sequence: Synthetic oligonucleotide
acccaaacacacacacaca

SEQ ID NO: 149930 - RNA, 19 nt, Artificial Sequence
  Description of Artificial Sequence: Synthetic oligonucleotide
ccaaacacacacacacaca

SEQ ID NO: 149931 - RNA, 19 nt, Artificial Sequence
  Description of Artificial Sequence: Synthetic oligonucleotide
cacacgcgggugagugacc

SEQ ID NO: 149932 - RNA, 19 nt, Artificial Sequence
  Description of Artificial Sequence: Synthetic oligonucleotide
caggcucuaggucaaaguu

SEQ ID NO: 149933 - RNA, 19 nt, Artificial Sequence
  Description of Artificial Sequence: Synthetic oligonucleotide
ggaccgccuaguccgggag

SEQ ID NO: 149934 - RNA, 19 nt, Artificial Sequence
  Description of Artificial Sequence: Synthetic oligonucleotide
cguauaauuaugucuuugu

SEQ ID NO: 149935 - RNA, 19 nt, Artificial Sequence
  Description of Artificial Sequence: Synthetic oligonucleotide
cggucguacauccaaccac

SEQ ID NO: 149936 - RNA, 19 nt, Artificial Sequence
  Description of Artificial Sequence: Synthetic oligonucleotide
acacacacacacacacaaa

SEQ ID NO: 149937 - RNA, 19 nt, Artificial Sequence
  Description of Artificial Sequence: Synthetic oligonucleotide
gaccgccuaguccgggaga

SEQ ID NO: 149938 - RNA, 19 nt, Artificial Sequence
  Description of Artificial Sequence: Synthetic oligonucleotide
cagggcuagguuuguggaa

SEQ ID NO: 149939 - RNA, 19 nt, Artificial Sequence
  Description of Artificial Sequence: Synthetic oligonucleotide
uccuacccagagggaaagu

SEQ ID NO: 149940 - RNA, 19 nt, Artificial Sequence
  Description of Artificial Sequence: Synthetic oligonucleotide
uuccgggaaccgagccaga

SEQ ID NO: 149941 - RNA, 19 nt, Artificial Sequence
  Description of Artificial Sequence: Synthetic oligonucleotide
ccuaguccgggagagcgug

SEQ ID NO: 149942 - RNA, 19 nt, Artificial Sequence
  Description of Artificial Sequence: Synthetic oligonucleotide
cccgucuucaccuuuaauu

SEQ ID NO: 149943 - RNA, 19 nt, Artificial Sequence
  Description of Artificial Sequence: Synthetic oligonucleotide
cuauccccuccacgggcuc

SEQ ID NO: 149944 - RNA, 19 nt, Artificial Sequence
  Description of Artificial Sequence: Synthetic oligonucleotide
gcguccaugcuuccauuca

SEQ ID NO: 149945 - RNA, 19 nt, Artificial Sequence
  Description of Artificial Sequence: Synthetic oligonucleotide
gggaccacucagagccucg

SEQ ID NO: 149946 - RNA, 19 nt, Artificial Sequence
  Description of Artificial Sequence: Synthetic oligonucleotide
gugugugugugugccugca

SEQ ID NO: 149947 - RNA, 19 nt, Artificial Sequence
  Description of Artificial Sequence: Synthetic oligonucleotide
cgccuaguccgggagagcg

SEQ ID NO: 149948 - RNA, 19 nt, Artificial Sequence
  Description of Artificial Sequence: Synthetic oligonucleotide
ccuucggaugucgggagug

SEQ ID NO: 149949 - RNA, 19 nt, Artificial Sequence
  Description of Artificial Sequence: Synthetic oligonucleotide
caccgguagcuugguacug

SEQ ID NO: 149950 - RNA, 19 nt, Artificial Sequence
  Description of Artificial Sequence: Synthetic oligonucleotide
gcuaaccuggcuucucacu

SEQ ID NO: 149951 - RNA, 19 nt, Artificial Sequence
  Description of Artificial Sequence: Synthetic oligonucleotide
cgaacacgaucugauacuc

SEQ ID NO: 149952 - RNA, 19 nt, Artificial Sequence
  Description of Artificial Sequence: Synthetic oligonucleotide
cucguauaauuaugucuuu

SEQ ID NO: 149953 - RNA, 19 nt, Artificial Sequence
  Description of Artificial Sequence: Synthetic oligonucleotide
cacacacacacacgcgggu

SEQ ID NO: 149954 - RNA, 19 nt, Artificial Sequence
  Description of Artificial Sequence: Synthetic oligonucleotide
cuuccauagcagagaugcu

SEQ ID NO: 149955 - RNA, 19 nt, Artificial Sequence
  Description of Artificial Sequence: Synthetic oligonucleotide
caccucccuuuccggaguc

SEQ ID NO: 149956 - RNA, 19 nt, Artificial Sequence
  Description of Artificial Sequence: Synthetic oligonucleotide
guggagguaaugugucauu

SEQ ID NO: 149957 - RNA, 19 nt, Artificial Sequence
  Description of Artificial Sequence: Synthetic oligonucleotide
cuuggacccucaucccugu

SEQ ID NO: 149958 - RNA, 19 nt, Artificial Sequence
  Description of Artificial Sequence: Synthetic oligonucleotide
guagucucaagaaguucuu

SEQ ID NO: 149959 - RNA, 19 nt, Artificial Sequence
  Description of Artificial Sequence: Synthetic oligonucleotide
gcggggaccgguuucuucu

SEQ ID NO: 149960 - RNA, 19 nt, Artificial Sequence
  Description of Artificial Sequence: Synthetic oligonucleotide
uuuagcccucagggaccac

SEQ ID NO: 149961 - RNA, 19 nt, Artificial Sequence
  Description of Artificial Sequence: Synthetic oligonucleotide
cagcaguaacacucaggcu

SEQ ID NO: 149962 - RNA, 19 nt, Artificial Sequence
  Description of Artificial Sequence: Synthetic oligonucleotide
gaaugucgucgauggcaau

SEQ ID NO: 149963 - RNA, 19 nt, Artificial Sequence
  Description of Artificial Sequence: Synthetic oligonucleotide
gacuuuagacagggcuagu

SEQ ID NO: 149964 - RNA, 19 nt, Artificial Sequence
  Description of Artificial Sequence: Synthetic oligonucleotide
gcguacaaaugcucuggcu

SEQ ID NO: 149965 - RNA, 19 nt, Artificial Sequence
  Description of Artificial Sequence: Synthetic oligonucleotide
gagccucgaaucagccaaa

SEQ ID NO: 149966 - RNA, 19 nt, Artificial Sequence
  Description of Artificial Sequence: Synthetic oligonucleotide
ccgggaaccgagccagaac

SEQ ID NO: 149967 - RNA, 19 nt, Artificial Sequence
  Description of Artificial Sequence: Synthetic oligonucleotide
caccccguggccaccggua

SEQ ID NO: 149968 - RNA, 19 nt, Artificial Sequence
  Description of Artificial Sequence: Synthetic oligonucleotide
aagcggggaccgguuucuu

SEQ ID NO: 149969 - RNA, 19 nt, Artificial Sequence
  Description of Artificial Sequence: Synthetic oligonucleotide
cuucggaugucgggagugu

SEQ ID NO: 149970 - RNA, 19 nt, Artificial Sequence
  Description of Artificial Sequence: Synthetic oligonucleotide
ccgguagcuugguacugga

SEQ ID NO: 149971 - RNA, 19 nt, Artificial Sequence
  Description of Artificial Sequence: Synthetic oligonucleotide
cccuagaagcucucagugu

SEQ ID NO: 149972 - RNA, 19 nt, Artificial Sequence
  Description of Artificial Sequence: Synthetic oligonucleotide
agagggcgccuaacacuaa

SEQ ID NO: 149973 - RNA, 19 nt, Artificial Sequence
  Description of Artificial Sequence: Synthetic oligonucleotide
gccucgaaucagccaaagu

SEQ ID NO: 149974 - RNA, 19 nt, Artificial Sequence
  Description of Artificial Sequence: Synthetic oligonucleotide
ccgucacucuguagucuca

SEQ ID NO: 149975 - RNA, 19 nt, Artificial Sequence
  Description of Artificial Sequence: Synthetic oligonucleotide
ggcccgucuucaccuuuaa

SEQ ID NO: 149976 - RNA, 19 nt, Artificial Sequence
  Description of Artificial Sequence: Synthetic oligonucleotide
cguguauguucucuccagu

SEQ ID NO: 149977 - RNA, 19 nt, Artificial Sequence
  Description of Artificial Sequence: Synthetic oligonucleotide
gccacuuguuacggucgua

SEQ ID NO: 149978 - RNA, 19 nt, Artificial Sequence
  Description of Artificial Sequence: Synthetic oligonucleotide
ccgccuaguccgggagagc

SEQ ID NO: 149979 - RNA, 19 nt, Artificial Sequence
  Description of Artificial Sequence: Synthetic oligonucleotide
cgucacucuguagucucaa

SEQ ID NO: 149980 - RNA, 19 nt, Artificial Sequence
  Description of Artificial Sequence: Synthetic oligonucleotide
cuccagccuuggugaggua

SEQ ID NO: 149981 - RNA, 19 nt, Artificial Sequence
  Description of Artificial Sequence: Synthetic oligonucleotide
cccucucgccggccgucac

SEQ ID NO: 149982 - RNA, 19 nt, Artificial Sequence
  Description of Artificial Sequence: Synthetic oligonucleotide
gccgcccauacuggcccuc

SEQ ID NO: 149983 - RNA, 19 nt, Artificial Sequence
  Description of Artificial Sequence: Synthetic oligonucleotide
cggaugucgggagugucau

SEQ ID NO: 149984 - RNA, 19 nt, Artificial Sequence
  Description of Artificial Sequence: Synthetic oligonucleotide
cgggagugucauagugcau

SEQ ID NO: 149985 - RNA, 19 nt, Artificial Sequence
  Description of Artificial Sequence: Synthetic oligonucleotide
cggagucaucuagggcucu

SEQ ID NO: 149986 - RNA, 19 nt, Artificial Sequence
  Description of Artificial Sequence: Synthetic oligonucleotide
cggggaccgguuucuucuu

SEQ ID NO: 149987 - RNA, 19 nt, Artificial Sequence
  Description of Artificial Sequence: Synthetic oligonucleotide
cgccggccgucacucugua

SEQ ID NO: 149988 - RNA, 19 nt, Artificial Sequence
  Description of Artificial Sequence: Synthetic oligonucleotide
aaaacuauaucucuugcau

SEQ ID NO: 149989 - RNA, 19 nt, Artificial Sequence
  Description of Artificial Sequence: Synthetic oligonucleotide
aguuacuuaaaacuauauc

SEQ ID NO: 149990 - RNA, 19 nt, Artificial Sequence
  Description of Artificial Sequence: Synthetic oligonucleotide
aagucaaugcgcaacgugc

SEQ ID NO: 149991 - RNA, 19 nt, Artificial Sequence
  Description of Artificial Sequence: Synthetic oligonucleotide
uaucucuugcauauaaaug

SEQ ID NO: 149992 - RNA, 19 nt, Artificial Sequence
  Description of Artificial Sequence: Synthetic oligonucleotide
uggucaaguggaaauauug

SEQ ID NO: 149993 - RNA, 19 nt, Artificial Sequence
  Description of Artificial Sequence: Synthetic oligonucleotide
aagacuagugagcuuggag

SEQ ID NO: 149994 - RNA, 19 nt, Artificial Sequence
  Description of Artificial Sequence: Synthetic oligonucleotide
uccaaaauuugaagguagg

SEQ ID NO: 149995 - RNA, 19 nt, Artificial Sequence
  Description of Artificial Sequence: Synthetic oligonucleotide
gauaaccucgcccucagug

SEQ ID NO: 149996 - RNA, 19 nt, Artificial Sequence
  Description of Artificial Sequence: Synthetic oligonucleotide
agagagauaaccucgcccu

SEQ ID NO: 149997 - RNA, 19 nt, Artificial Sequence
  Description of Artificial Sequence: Synthetic oligonucleotide
cacucugaugcuuugacag

SEQ ID NO: 149998 - RNA, 19 nt, Artificial Sequence
  Description of Artificial Sequence: Synthetic oligonucleotide
ucacuugauuauaagggug

SEQ ID NO: 149999 - RNA, 19 nt, Artificial Sequence
  Description of Artificial Sequence: Synthetic oligonucleotide
gugcaguucaauuagcgcc

SEQ ID NO: 150000 - RNA, 19 nt, Artificial Sequence
  Description of Artificial Sequence: Synthetic oligonucleotide
gagaagucaaugcgcaacg

SEQ ID NO: 150001 - RNA, 19 nt, Artificial Sequence
  Description of Artificial Sequence: Synthetic oligonucleotide
gaggcugacauuaugccgg

SEQ ID NO: 150002 - RNA, 19 nt, Artificial Sequence
  Description of Artificial Sequence: Synthetic oligonucleotide
uuuauugaguccaggccca

SEQ ID NO: 150003 - RNA, 19 nt, Artificial Sequence
  Description of Artificial Sequence: Synthetic oligonucleotide
ugagcuaccauaguccuug

SEQ ID NO: 150004 - RNA, 19 nt, Artificial Sequence
  Description of Artificial Sequence: Synthetic oligonucleotide
uuugacagugugaugcgca

SEQ ID NO: 150005 - RNA, 19 nt, Artificial Sequence
  Description of Artificial Sequence: Synthetic oligonucleotide
ccgaagagaauaaagaggc

SEQ ID NO: 150006 - RNA, 19 nt, Artificial Sequence
  Description of Artificial Sequence: Synthetic oligonucleotide
uggugagcuaccauagucc

SEQ ID NO: 150007 - RNA, 19 nt, Artificial Sequence
  Description of Artificial Sequence: Synthetic oligonucleotide
acaugggagaaucauguca

SEQ ID NO: 150008 - RNA, 19 nt, Artificial Sequence
  Description of Artificial Sequence: Synthetic oligonucleotide
uguagaugggcuguccacg

SEQ ID NO: 150009 - RNA, 19 nt, Artificial Sequence
  Description of Artificial Sequence: Synthetic oligonucleotide
uuaagacuagugagcuugg

SEQ ID NO: 150010 - RNA, 19 nt, Artificial Sequence
  Description of Artificial Sequence: Synthetic oligonucleotide
agggucggcauacugcagc

SEQ ID NO: 150011 - RNA, 19 nt, Artificial Sequence
  Description of Artificial Sequence: Synthetic oligonucleotide
ugacguauaguaguugacc

SEQ ID NO: 150012 - RNA, 19 nt, Artificial Sequence
  Description of Artificial Sequence: Synthetic oligonucleotide
gacguauaguaguugacca

SEQ ID NO: 150013 - RNA, 19 nt, Artificial Sequence
  Description of Artificial Sequence: Synthetic oligonucleotide
auaccauuguaucauugcu

SEQ ID NO: 150014 - RNA, 19 nt, Artificial Sequence
  Description of Artificial Sequence: Synthetic oligonucleotide
aaacgugaugaucuucaga

SEQ ID NO: 150015 - RNA, 19 nt, Artificial Sequence
  Description of Artificial Sequence: Synthetic oligonucleotide
gaagucaaugcgcaacgug

SEQ ID NO: 150016 - RNA, 19 nt, Artificial Sequence
  Description of Artificial Sequence: Synthetic oligonucleotide
accauuguaucauugcuau

SEQ ID NO: 150017 - RNA, 19 nt, Artificial Sequence
  Description of Artificial Sequence: Synthetic oligonucleotide
caggcuaggcaugauaugg

SEQ ID NO: 150018 - RNA, 19 nt, Artificial Sequence
  Description of Artificial Sequence: Synthetic oligonucleotide
aggcguuuguuuuauugag

SEQ ID NO: 150019 - RNA, 19 nt, Artificial Sequence
  Description of Artificial Sequence: Synthetic oligonucleotide
aauuuccggcaccugccag

SEQ ID NO: 150020 - RNA, 19 nt, Artificial Sequence
  Description of Artificial Sequence: Synthetic oligonucleotide
guacuugacauuaagacua

SEQ ID NO: 150021 - RNA, 19 nt, Artificial Sequence
  Description of Artificial Sequence: Synthetic oligonucleotide
gacuccgaagagaauaaag

SEQ ID NO: 150022 - RNA, 19 nt, Artificial Sequence
  Description of Artificial Sequence: Synthetic oligonucleotide
cauaguguuggcagccucc

SEQ ID NO: 150023 - RNA, 19 nt, Artificial Sequence
  Description of Artificial Sequence: Synthetic oligonucleotide
gaaaagaucuggugcagaa

SEQ ID NO: 150024 - RNA, 19 nt, Artificial Sequence
  Description of Artificial Sequence: Synthetic oligonucleotide
ggcauuaaggccuagaggu

SEQ ID NO: 150025 - RNA, 19 nt, Artificial Sequence
  Description of Artificial Sequence: Synthetic oligonucleotide
uacuugacauuaagacuag

SEQ ID NO: 150026 - RNA, 19 nt, Artificial Sequence
  Description of Artificial Sequence: Synthetic oligonucleotide
gacgaugccguccauggca

SEQ ID NO: 150027 - RNA, 19 nt, Artificial Sequence
  Description of Artificial Sequence: Synthetic oligonucleotide
gcugacauuaugccgggcg

SEQ ID NO: 150028 - RNA, 19 nt, Artificial Sequence
  Description of Artificial Sequence: Synthetic oligonucleotide
ggugucugcgaccacacag

SEQ ID NO: 150029 - RNA, 19 nt, Artificial Sequence
  Description of Artificial Sequence: Synthetic oligonucleotide
guaaacgugaugaucuuca

SEQ ID NO: 150030 - RNA, 19 nt, Artificial Sequence
  Description of Artificial Sequence: Synthetic oligonucleotide
auaaccucgcccucaguga

SEQ ID NO: 150031 - RNA, 19 nt, Artificial Sequence
  Description of Artificial Sequence: Synthetic oligonucleotide
ugcgcaacgugcagcaggc

SEQ ID NO: 150032 - RNA, 19 nt, Artificial Sequence
  Description of Artificial Sequence: Synthetic oligonucleotide
ugccacugacguauaguag

SEQ ID NO: 150033 - RNA, 19 nt, Artificial Sequence
  Description of Artificial Sequence: Synthetic oligonucleotide
ugguugugcaguucaauua

SEQ ID NO: 150034 - RNA, 19 nt, Artificial Sequence
  Description of Artificial Sequence: Synthetic oligonucleotide
cugacauuaugccgggcgc

SEQ ID NO: 150035 - RNA, 19 nt, Artificial Sequence
  Description of Artificial Sequence: Synthetic oligonucleotide
ucaaugcgcaacgugcagc

SEQ ID NO: 150036 - RNA, 19 nt, Artificial Sequence
  Description of Artificial Sequence: Synthetic oligonucleotide
auaugggcauuugggaggg

SEQ ID NO: 150037 - RNA, 19 nt, Artificial Sequence
  Description of Artificial Sequence: Synthetic oligonucleotide
acacacguggagaagagcu

SEQ ID NO: 150038 - RNA, 19 nt, Artificial Sequence
  Description of Artificial Sequence: Synthetic oligonucleotide
ugaccauaguguuggcagc

SEQ ID NO: 150039 - RNA, 19 nt, Artificial Sequence
  Description of Artificial Sequence: Synthetic oligonucleotide
ucggcauacugcagcagug

SEQ ID NO: 150040 - RNA, 19 nt, Artificial Sequence
  Description of Artificial Sequence: Synthetic oligonucleotide
uagaggucagccccucacc

SEQ ID NO: 150041 - RNA, 19 nt, Artificial Sequence
  Description of Artificial Sequence: Synthetic oligonucleotide
aguucaauuagcgccugca

SEQ ID NO: 150042 - RNA, 19 nt, Artificial Sequence
  Description of Artificial Sequence: Synthetic oligonucleotide
ugugacucucucaggguuc

SEQ ID NO: 150043 - RNA, 19 nt, Artificial Sequence
  Description of Artificial Sequence: Synthetic oligonucleotide
guggugagcuaccauaguc

SEQ ID NO: 150044 - RNA, 19 nt, Artificial Sequence
  Description of Artificial Sequence: Synthetic oligonucleotide
cagcuugcggacauggaug

SEQ ID NO: 150045 - RNA, 19 nt, Artificial Sequence
  Description of Artificial Sequence: Synthetic oligonucleotide
gggacgaugccguccaugg

SEQ ID NO: 150046 - RNA, 19 nt, Artificial Sequence
  Description of Artificial Sequence: Synthetic oligonucleotide
ugaagcggugcagugguga

SEQ ID NO: 150047 - RNA, 19 nt, Artificial Sequence
  Description of Artificial Sequence: Synthetic oligonucleotide
cuagaggucagccccucac

SEQ ID NO: 150048 - RNA, 19 nt, Artificial Sequence
  Description of Artificial Sequence: Synthetic oligonucleotide
ugauaccucuacagcucag

SEQ ID NO: 150049 - RNA, 19 nt, Artificial Sequence
  Description of Artificial Sequence: Synthetic oligonucleotide
cugacguauaguaguugac

SEQ ID NO: 150050 - RNA, 19 nt, Artificial Sequence
  Description of Artificial Sequence: Synthetic oligonucleotide
guaaggcacgagaaagcgg

SEQ ID NO: 150051 - RNA, 19 nt, Artificial Sequence
  Description of Artificial Sequence: Synthetic oligonucleotide
guaccgacugcuaugucug

SEQ ID NO: 150052 - RNA, 19 nt, Artificial Sequence
  Description of Artificial Sequence: Synthetic oligonucleotide
ugcuaugucugggacgaug

SEQ ID NO: 150053 - RNA, 19 nt, Artificial Sequence
  Description of Artificial Sequence: Synthetic oligonucleotide
gaccauaguguuggcagcc

SEQ ID NO: 150054 - RNA, 19 nt, Artificial Sequence
  Description of Artificial Sequence: Synthetic oligonucleotide
agcuugcggacauggauga

SEQ ID NO: 150055 - RNA, 19 nt, Artificial Sequence
  Description of Artificial Sequence: Synthetic oligonucleotide
ggggcauuaaggccuagag

SEQ ID NO: 150056 - RNA, 19 nt, Artificial Sequence
  Description of Artificial Sequence: Synthetic oligonucleotide
ggagaggcugacauuaugc

SEQ ID NO: 150057 - RNA, 19 nt, Artificial Sequence
  Description of Artificial Sequence: Synthetic oligonucleotide
ugccgggcgcaccaaaggc

SEQ ID NO: 150058 - RNA, 19 nt, Artificial Sequence
  Description of Artificial Sequence: Synthetic oligonucleotide
ugguugggugagcugucag

SEQ ID NO: 150059 - RNA, 19 nt, Artificial Sequence
  Description of Artificial Sequence: Synthetic oligonucleotide
uguggccuuaugccugagc

SEQ ID NO: 150060 - RNA, 19 nt, Artificial Sequence
  Description of Artificial Sequence: Synthetic oligonucleotide
cauuaaggccuagagguca

SEQ ID NO: 150061 - RNA, 19 nt, Artificial Sequence
  Description of Artificial Sequence: Synthetic oligonucleotide
acguauaguaguugaccau

SEQ ID NO: 150062 - RNA, 19 nt, Artificial Sequence
  Description of Artificial Sequence: Synthetic oligonucleotide
gucaaugcgcaacgugcag

SEQ ID NO: 150063 - RNA, 19 nt, Artificial Sequence
  Description of Artificial Sequence: Synthetic oligonucleotide
agagauaaccucgcccuca

SEQ ID NO: 150064 - RNA, 19 nt, Artificial Sequence
  Description of Artificial Sequence: Synthetic oligonucleotide
gauaccucuacagcucaga

SEQ ID NO: 150065 - RNA, 19 nt, Artificial Sequence
  Description of Artificial Sequence: Synthetic oligonucleotide
ugacauuaugccgggcgca

SEQ ID NO: 150066 - RNA, 19 nt, Artificial Sequence
  Description of Artificial Sequence: Synthetic oligonucleotide
gaacccggcuccugcauac

SEQ ID NO: 150067 - RNA, 19 nt, Artificial Sequence
  Description of Artificial Sequence: Synthetic oligonucleotide
augccgggcgcaccaaagg

SEQ ID NO: 150068 - RNA, 19 nt, Artificial Sequence
  Description of Artificial Sequence: Synthetic oligonucleotide
uguguucggggcaccgcug

SEQ ID NO: 150069 - RNA, 19 nt, Artificial Sequence
  Description of Artificial Sequence: Synthetic oligonucleotide
ucggauccccgcuuuguac

SEQ ID NO: 150070 - RNA, 19 nt, Artificial Sequence
  Description of Artificial Sequence: Synthetic oligonucleotide
agugugaugcgcacggacu

SEQ ID NO: 150071 - RNA, 19 nt, Artificial Sequence
  Description of Artificial Sequence: Synthetic oligonucleotide
aggcacgggugucugcgac

SEQ ID NO: 150072 - RNA, 19 nt, Artificial Sequence
  Description of Artificial Sequence: Synthetic oligonucleotide
agucggggcgaguguaguc

SEQ ID NO: 150073 - RNA, 19 nt, Artificial Sequence
  Description of Artificial Sequence: Synthetic oligonucleotide
auccccgcuuuguaccgac

SEQ ID NO: 150074 - RNA, 19 nt, Artificial Sequence
  Description of Artificial Sequence: Synthetic oligonucleotide
uccagcgaaggcuggcugu

SEQ ID NO: 150075 - RNA, 19 nt, Artificial Sequence
  Description of Artificial Sequence: Synthetic oligonucleotide
auuaaggccuagaggucag

SEQ ID NO: 150076 - RNA, 19 nt, Artificial Sequence
  Description of Artificial Sequence: Synthetic oligonucleotide
ggagaagucaaugcgcaac

SEQ ID NO: 150077 - RNA, 19 nt, Artificial Sequence
  Description of Artificial Sequence: Synthetic oligonucleotide
caccgcuguggccuuaugc

SEQ ID NO: 150078 - RNA, 19 nt, Artificial Sequence
  Description of Artificial Sequence: Synthetic oligonucleotide
caaugcgcaacgugcagca

SEQ ID NO: 150079 - RNA, 19 nt, Artificial Sequence
  Description of Artificial Sequence: Synthetic oligonucleotide
guggacuagauuuaauuuu

SEQ ID NO: 150080 - RNA, 19 nt, Artificial Sequence
  Description of Artificial Sequence: Synthetic oligonucleotide
uucuugcuaucauuuccau

SEQ ID NO: 150081 - RNA, 19 nt, Artificial Sequence
  Description of Artificial Sequence: Synthetic oligonucleotide
gaggcuaggugcgcagccg

SEQ ID NO: 150082 - RNA, 19 nt, Artificial Sequence
  Description of Artificial Sequence: Synthetic oligonucleotide
aguggugagcuaccauagu

SEQ ID NO: 150083 - RNA, 19 nt, Artificial Sequence
  Description of Artificial Sequence: Synthetic oligonucleotide
ggaauggcaaugcggccag

SEQ ID NO: 150084 - RNA, 19 nt, Artificial Sequence
  Description of Artificial Sequence: Synthetic oligonucleotide
acgggugccacugacguau

SEQ ID NO: 150085 - RNA, 19 nt, Artificial Sequence
  Description of Artificial Sequence: Synthetic oligonucleotide
augcgcacggacuucccgu

SEQ ID NO: 150086 - RNA, 19 nt, Artificial Sequence
  Description of Artificial Sequence: Synthetic oligonucleotide
uaccgacugcuaugucugg

SEQ ID NO: 150087 - RNA, 19 nt, Artificial Sequence
  Description of Artificial Sequence: Synthetic oligonucleotide
ggcuaggcaugauaugggc

SEQ ID NO: 150088 - RNA, 19 nt, Artificial Sequence
  Description of Artificial Sequence: Synthetic oligonucleotide
agucaaugcgcaacgugca

SEQ ID NO: 150089 - RNA, 19 nt, Artificial Sequence
  Description of Artificial Sequence: Synthetic oligonucleotide
uaagacuagugagcuugga

SEQ ID NO: 150090 - RNA, 19 nt, Artificial Sequence
  Description of Artificial Sequence: Synthetic oligonucleotide
augucugggacgaugccgu

SEQ ID NO: 150091 - RNA, 19 nt, Artificial Sequence
  Description of Artificial Sequence: Synthetic oligonucleotide
guagucccugcucuuguca

SEQ ID NO: 150092 - RNA, 19 nt, Artificial Sequence
  Description of Artificial Sequence: Synthetic oligonucleotide
gugagcugucaguuuugag

SEQ ID NO: 150093 - RNA, 19 nt, Artificial Sequence
  Description of Artificial Sequence: Synthetic oligonucleotide
accgacugcuaugucuggg

SEQ ID NO: 150094 - RNA, 19 nt, Artificial Sequence
  Description of Artificial Sequence: Synthetic oligonucleotide
auaguguuggcagccuccu

SEQ ID NO: 150095 - RNA, 19 nt, Artificial Sequence
  Description of Artificial Sequence: Synthetic oligonucleotide
cuaggcaugauaugggcau

SEQ ID NO: 150096 - RNA, 19 nt, Artificial Sequence
  Description of Artificial Sequence: Synthetic oligonucleotide
gucggggcgaguguagucc

SEQ ID NO: 150097 - RNA, 19 nt, Artificial Sequence
  Description of Artificial Sequence: Synthetic oligonucleotide
aaugcgcaacgugcagcag

SEQ ID NO: 150098 - RNA, 19 nt, Artificial Sequence
  Description of Artificial Sequence: Synthetic oligonucleotide
acccggcuccugcauacgg

SEQ ID NO: 150099 - RNA, 19 nt, Artificial Sequence
  Description of Artificial Sequence: Synthetic oligonucleotide
gagagauaaccucgcccuc

SEQ ID NO: 150100 - RNA, 19 nt, Artificial Sequence
  Description of Artificial Sequence: Synthetic oligonucleotide
ugcgcacggacuucccgug

SEQ ID NO: 150101 - RNA, 19 nt, Artificial Sequence
  Description of Artificial Sequence: Synthetic oligonucleotide
ccggcugauaccucuacag

SEQ ID NO: 150102 - RNA, 19 nt, Artificial Sequence
  Description of Artificial Sequence: Synthetic oligonucleotide
acgagaaagcggcuguguu

SEQ ID NO: 150103 - RNA, 19 nt, Artificial Sequence
  Description of Artificial Sequence: Synthetic oligonucleotide
uggagaagucaaugcgcaa

SEQ ID NO: 150104 - RNA, 19 nt, Artificial Sequence
  Description of Artificial Sequence: Synthetic oligonucleotide
cuaggugcgcagccgcaag

SEQ ID NO: 150105 - RNA, 19 nt, Artificial Sequence
  Description of Artificial Sequence: Synthetic oligonucleotide
ggacacacgcagguggugg

SEQ ID NO: 150106 - RNA, 19 nt, Artificial Sequence
  Description of Artificial Sequence: Synthetic oligonucleotide
cugggccuagucagaggcg

SEQ ID NO: 150107 - RNA, 19 nt, Artificial Sequence
  Description of Artificial Sequence: Synthetic oligonucleotide
cuugaagcggugcaguggu

SEQ ID NO: 150108 - RNA, 19 nt, Artificial Sequence
  Description of Artificial Sequence: Synthetic oligonucleotide
ucggggcgaguguaguccc

SEQ ID NO: 150109 - RNA, 19 nt, Artificial Sequence
  Description of Artificial Sequence: Synthetic oligonucleotide
guccacgcagcacgggugc

SEQ ID NO: 150110 - RNA, 19 nt, Artificial Sequence
  Description of Artificial Sequence: Synthetic oligonucleotide
auuagcgccugcacggccu

SEQ ID NO: 150111 - RNA, 19 nt, Artificial Sequence
  Description of Artificial Sequence: Synthetic oligonucleotide
aucaugucacuugauuaua

SEQ ID NO: 150112 - RNA, 19 nt, Artificial Sequence
  Description of Artificial Sequence: Synthetic oligonucleotide
gccuggaauggcaaugcgg

SEQ ID NO: 150113 - RNA, 19 nt, Artificial Sequence
  Description of Artificial Sequence: Synthetic oligonucleotide
agcacgggugccacugacg

SEQ ID NO: 150114 - RNA, 19 nt, Artificial Sequence
  Description of Artificial Sequence: Synthetic oligonucleotide
uggaaugguggaagcuguu

SEQ ID NO: 150115 - RNA, 19 nt, Artificial Sequence
  Description of Artificial Sequence: Synthetic oligonucleotide
caccguugcuggagaagag

SEQ ID NO: 150116 - RNA, 19 nt, Artificial Sequence
  Description of Artificial Sequence: Synthetic oligonucleotide
caguucaauuagcgccugc

SEQ ID NO: 150117 - RNA, 19 nt, Artificial Sequence
  Description of Artificial Sequence: Synthetic oligonucleotide
aacgcuccauggacauuag

SEQ ID NO: 150118 - RNA, 19 nt, Artificial Sequence
  Description of Artificial Sequence: Synthetic oligonucleotide
gccacugacguauaguagu

SEQ ID NO: 150119 - RNA, 19 nt, Artificial Sequence
  Description of Artificial Sequence: Synthetic oligonucleotide
aacccggcuccugcauacg

SEQ ID NO: 150120 - RNA, 19 nt, Artificial Sequence
  Description of Artificial Sequence: Synthetic oligonucleotide
cauggcaagguggacuaga

SEQ ID NO: 150121 - RNA, 19 nt, Artificial Sequence
  Description of Artificial Sequence: Synthetic oligonucleotide
ucgucggauccccgcuuug

SEQ ID NO: 150122 - RNA, 19 nt, Artificial Sequence
  Description of Artificial Sequence: Synthetic oligonucleotide
acaagacugguggccuaag

SEQ ID NO: 150123 - RNA, 19 nt, Artificial Sequence
  Description of Artificial Sequence: Synthetic oligonucleotide
uucuggccauccagcgaca

SEQ ID NO: 150124 - RNA, 19 nt, Artificial Sequence
  Description of Artificial Sequence: Synthetic oligonucleotide
cuaagaggcuaggugcgca

SEQ ID NO: 150125 - RNA, 19 nt, Artificial Sequence
  Description of Artificial Sequence: Synthetic oligonucleotide
gucggcauacugcagcagu

SEQ ID NO: 150126 - RNA, 19 nt, Artificial Sequence
  Description of Artificial Sequence: Synthetic oligonucleotide
gggccaacgcuccauggac

SEQ ID NO: 150127 - RNA, 19 nt, Artificial Sequence
  Description of Artificial Sequence: Synthetic oligonucleotide
cacggacuucccguguagc

SEQ ID NO: 150128 - RNA, 19 nt, Artificial Sequence
  Description of Artificial Sequence: Synthetic oligonucleotide
caagacugguggccuaaga

SEQ ID NO: 150129 - RNA, 19 nt, Artificial Sequence
  Description of Artificial Sequence: Synthetic oligonucleotide
uuguaccgacugcuauguc

SEQ ID NO: 150130 - RNA, 19 nt, Artificial Sequence
  Description of Artificial Sequence: Synthetic oligonucleotide
ggggccguugcugacacac

SEQ ID NO: 150131 - RNA, 19 nt, Artificial Sequence
  Description of Artificial Sequence: Synthetic oligonucleotide
ccaaaauuugaagguagga

SEQ ID NO: 150132 - RNA, 19 nt, Artificial Sequence
  Description of Artificial Sequence: Synthetic oligonucleotide
caacgugcagcaggcguug

SEQ ID NO: 150133 - RNA, 19 nt, Artificial Sequence
  Description of Artificial Sequence: Synthetic oligonucleotide
cuugcggacauggaugacu

SEQ ID NO: 150134 - RNA, 19 nt, Artificial Sequence
  Description of Artificial Sequence: Synthetic oligonucleotide
cggacauggaugacucugg

SEQ ID NO: 150135 - RNA, 19 nt, Artificial Sequence
  Description of Artificial Sequence: Synthetic oligonucleotide
aggggcauuaaggccuaga

SEQ ID NO: 150136 - RNA, 19 nt, Artificial Sequence
  Description of Artificial Sequence: Synthetic oligonucleotide
ugcauacggagaggcugac

SEQ ID NO: 150137 - RNA, 19 nt, Artificial Sequence
  Description of Artificial Sequence: Synthetic oligonucleotide
cagggucggcauacugcag

SEQ ID NO: 150138 - RNA, 19 nt, Artificial Sequence
  Description of Artificial Sequence: Synthetic oligonucleotide
cuuggcauguugggcgcuc

SEQ ID NO: 150139 - RNA, 19 nt, Artificial Sequence
  Description of Artificial Sequence: Synthetic oligonucleotide
cuagucagaggcgggcaga

SEQ ID NO: 150140 - RNA, 19 nt, Artificial Sequence
  Description of Artificial Sequence: Synthetic oligonucleotide
cggauccccgcuuuguacc

SEQ ID NO: 150141 - RNA, 19 nt, Artificial Sequence
  Description of Artificial Sequence: Synthetic oligonucleotide
gacacacgcaggugguggu

SEQ ID NO: 150142 - RNA, 19 nt, Artificial Sequence
  Description of Artificial Sequence: Synthetic oligonucleotide
gcgaguguagucccugcuc

SEQ ID NO: 150143 - RNA, 19 nt, Artificial Sequence
  Description of Artificial Sequence: Synthetic oligonucleotide
ggcacgggugucugcgacc

SEQ ID NO: 150144 - RNA, 19 nt, Artificial Sequence
  Description of Artificial Sequence: Synthetic oligonucleotide
uccccgcuuuguaccgacu

SEQ ID NO: 150145 - RNA, 19 nt, Artificial Sequence
  Description of Artificial Sequence: Synthetic oligonucleotide
uccacgcagcacgggugcc

SEQ ID NO: 150146 - RNA, 19 nt, Artificial Sequence
  Description of Artificial Sequence: Synthetic oligonucleotide
gcucacagggucggcauac

SEQ ID NO: 150147 - RNA, 19 nt, Artificial Sequence
  Description of Artificial Sequence: Synthetic oligonucleotide
ggggccaacgcuccaugga

SEQ ID NO: 150148 - RNA, 19 nt, Artificial Sequence
  Description of Artificial Sequence: Synthetic oligonucleotide
gggcaagucggggcgagug

SEQ ID NO: 150149 - RNA, 19 nt, Artificial Sequence
  Description of Artificial Sequence: Synthetic oligonucleotide
gucggauccccgcuuugua

SEQ ID NO: 150150 - RNA, 19 nt, Artificial Sequence
  Description of Artificial Sequence: Synthetic oligonucleotide
ccgggcgcaccaaaggcug

SEQ ID NO: 150151 - RNA, 19 nt, Artificial Sequence
  Description of Artificial Sequence: Synthetic oligonucleotide
ggcaccuagaugguggacu

SEQ ID NO: 150152 - RNA, 19 nt, Artificial Sequence
  Description of Artificial Sequence: Synthetic oligonucleotide
cuguguucggggcaccgcu

SEQ ID NO: 150153 - RNA, 19 nt, Artificial Sequence
  Description of Artificial Sequence: Synthetic oligonucleotide
ggccuagucagaggcgggc

SEQ ID NO: 150154 - RNA, 19 nt, Artificial Sequence
  Description of Artificial Sequence: Synthetic oligonucleotide
gggucccaccugcaaguug

SEQ ID NO: 150155 - RNA, 19 nt, Artificial Sequence
  Description of Artificial Sequence: Synthetic oligonucleotide
gagaaucaugucacuugau

SEQ ID NO: 150156 - RNA, 19 nt, Artificial Sequence
  Description of Artificial Sequence: Synthetic oligonucleotide
cuguccacgcagcacgggu

SEQ ID NO: 150157 - RNA, 19 nt, Artificial Sequence
  Description of Artificial Sequence: Synthetic oligonucleotide
gauccccgcuuuguaccga

SEQ ID NO: 150158 - RNA, 19 nt, Artificial Sequence
  Description of Artificial Sequence: Synthetic oligonucleotide
cauuaagacuagugagcuu

SEQ ID NO: 150159 - RNA, 19 nt, Artificial Sequence
  Description of Artificial Sequence: Synthetic oligonucleotide
gcuaggcacgggugucugc

SEQ ID NO: 150160 - RNA, 19 nt, Artificial Sequence
  Description of Artificial Sequence: Synthetic oligonucleotide
gggcgaguguagucccugc

SEQ ID NO: 150161 - RNA, 19 nt, Artificial Sequence
  Description of Artificial Sequence: Synthetic oligonucleotide
gcacgggugccacugacgu

SEQ ID NO: 150162 - RNA, 19 nt, Artificial Sequence
  Description of Artificial Sequence: Synthetic oligonucleotide
guguucggggcaccgcugu

SEQ ID NO: 150163 - RNA, 19 nt, Artificial Sequence
  Description of Artificial Sequence: Synthetic oligonucleotide
ccgacugcuaugucuggga

SEQ ID NO: 150164 - RNA, 19 nt, Artificial Sequence
  Description of Artificial Sequence: Synthetic oligonucleotide
ggccguugcugacacacgu

SEQ ID NO: 150165 - RNA, 19 nt, Artificial Sequence
  Description of Artificial Sequence: Synthetic oligonucleotide
gaggggcauuaaggccuag

SEQ ID NO: 150166 - RNA, 19 nt, Artificial Sequence
  Description of Artificial Sequence: Synthetic oligonucleotide
cuuuggggugugacucucu

SEQ ID NO: 150167 - RNA, 19 nt, Artificial Sequence
  Description of Artificial Sequence: Synthetic oligonucleotide
gggccuagucagaggcggg

SEQ ID NO: 150168 - RNA, 19 nt, Artificial Sequence
  Description of Artificial Sequence: Synthetic oligonucleotide
ccucaccugggccuaguca

SEQ ID NO: 150169 - RNA, 19 nt, Artificial Sequence
  Description of Artificial Sequence: Synthetic oligonucleotide
acggagaggcugacauuau

SEQ ID NO: 150170 - RNA, 19 nt, Artificial Sequence
  Description of Artificial Sequence: Synthetic oligonucleotide
cacgagaaagcggcugugu

SEQ ID NO: 150171 - RNA, 19 nt, Artificial Sequence
  Description of Artificial Sequence: Synthetic oligonucleotide
ggaacccggcuccugcaua

SEQ ID NO: 150172 - RNA, 19 nt, Artificial Sequence
  Description of Artificial Sequence: Synthetic oligonucleotide
ccuagaugguggacuugga

SEQ ID NO: 150173 - RNA, 19 nt, Artificial Sequence
  Description of Artificial Sequence: Synthetic oligonucleotide
gguuuccggacugcacaga

SEQ ID NO: 150174 - RNA, 19 nt, Artificial Sequence
  Description of Artificial Sequence: Synthetic oligonucleotide
cggcauacugcagcagugc

SEQ ID NO: 150175 - RNA, 19 nt, Artificial Sequence
  Description of Artificial Sequence: Synthetic oligonucleotide
cagcccggcugauaccucu

SEQ ID NO: 150176 - RNA, 19 nt, Artificial Sequence
  Description of Artificial Sequence: Synthetic oligonucleotide
gcaagucggggcgagugua

SEQ ID NO: 150177 - RNA, 19 nt, Artificial Sequence
  Description of Artificial Sequence: Synthetic oligonucleotide
caccaccguugcuggagaa

SEQ ID NO: 150178 - RNA, 19 nt, Artificial Sequence
  Description of Artificial Sequence: Synthetic oligonucleotide
ggcgaguguagucccugcu

SEQ ID NO: 150179 - RNA, 19 nt, Artificial Sequence
  Description of Artificial Sequence: Synthetic oligonucleotide
cacgggugucugcgaccac

SEQ ID NO: 150180 - RNA, 19 nt, Artificial Sequence
  Description of Artificial Sequence: Synthetic oligonucleotide
ggcaagucggggcgagugu

SEQ ID NO: 150181 - RNA, 19 nt, Artificial Sequence
  Description of Artificial Sequence: Synthetic oligonucleotide
gcuaggugcgcagccgcaa

SEQ ID NO: 150182 - RNA, 19 nt, Artificial Sequence
  Description of Artificial Sequence: Synthetic oligonucleotide
ccauuguaucauugcuaua

SEQ ID NO: 150183 - RNA, 19 nt, Artificial Sequence
  Description of Artificial Sequence: Synthetic oligonucleotide
caccgggaagaggggacaa

SEQ ID NO: 150184 - RNA, 19 nt, Artificial Sequence
  Description of Artificial Sequence: Synthetic oligonucleotide
gcccagcccggcugauacc

SEQ ID NO: 150185 - RNA, 19 nt, Artificial Sequence
  Description of Artificial Sequence: Synthetic oligonucleotide
gcgggauauuggagaggug

SEQ ID NO: 150186 - RNA, 19 nt, Artificial Sequence
  Description of Artificial Sequence: Synthetic oligonucleotide
gcgcaacgugcagcaggcg

SEQ ID NO: 150187 - RNA, 19 nt, Artificial Sequence
  Description of Artificial Sequence: Synthetic oligonucleotide
gcuugcggacauggaugac

SEQ ID NO: 150188 - RNA, 19 nt, Artificial Sequence
  Description of Artificial Sequence: Synthetic oligonucleotide
gcaacgugcagcaggcguu

SEQ ID NO: 150189 - RNA, 19 nt, Artificial Sequence
  Description of Artificial Sequence: Synthetic oligonucleotide
ggccugacuggaccucugu

SEQ ID NO: 150190 - RNA, 19 nt, Artificial Sequence
  Description of Artificial Sequence: Synthetic oligonucleotide
gagccccucaaggcauggu

SEQ ID NO: 150191 - RNA, 19 nt, Artificial Sequence
  Description of Artificial Sequence: Synthetic oligonucleotide
cccucaccugggccuaguc

SEQ ID NO: 150192 - RNA, 19 nt, Artificial Sequence
  Description of Artificial Sequence: Synthetic oligonucleotide
ccgcuuuguaccgacugcu

SEQ ID NO: 150193 - RNA, 19 nt, Artificial Sequence
  Description of Artificial Sequence: Synthetic oligonucleotide
gccgggcgcaccaaaggcu

SEQ ID NO: 150194 - RNA, 19 nt, Artificial Sequence
  Description of Artificial Sequence: Synthetic oligonucleotide
gggaacccggcuccugcau

SEQ ID NO: 150195 - RNA, 19 nt, Artificial Sequence
  Description of Artificial Sequence: Synthetic oligonucleotide
ggcacgugccugguugggu

SEQ ID NO: 150196 - RNA, 19 nt, Artificial Sequence
  Description of Artificial Sequence: Synthetic oligonucleotide
gccuuaugccugagccccu

SEQ ID NO: 150197 - RNA, 19 nt, Artificial Sequence
  Description of Artificial Sequence: Synthetic oligonucleotide
ccguguagcuuguguccau

SEQ ID NO: 150198 - RNA, 19 nt, Artificial Sequence
  Description of Artificial Sequence: Synthetic oligonucleotide
gcgcagccgcaaggugggc

SEQ ID NO: 150199 - RNA, 19 nt, Artificial Sequence
  Description of Artificial Sequence: Synthetic oligonucleotide
cccucaaggcauggugccu

SEQ ID NO: 150200 - RNA, 19 nt, Artificial Sequence
  Description of Artificial Sequence: Synthetic oligonucleotide
cgucggauccccgcuuugu

SEQ ID NO: 150201 - RNA, 19 nt, Artificial Sequence
  Description of Artificial Sequence: Synthetic oligonucleotide
ccaacgcuccauggacauu

SEQ ID NO: 150202 - RNA, 19 nt, Artificial Sequence
  Description of Artificial Sequence: Synthetic oligonucleotide
uauaguaacucucagaggu

SEQ ID NO: 150203 - RNA, 19 nt, Artificial Sequence
  Description of Artificial Sequence: Synthetic oligonucleotide
aauuacuugaccucugguc

SEQ ID NO: 150204 - RNA, 19 nt, Artificial Sequence
  Description of Artificial Sequence: Synthetic oligonucleotide
uauaaaucaagacaaggca

SEQ ID NO: 150205 - RNA, 19 nt, Artificial Sequence
  Description of Artificial Sequence: Synthetic oligonucleotide
aagcaugagaguucaaacg

SEQ ID NO: 150206 - RNA, 19 nt, Artificial Sequence
  Description of Artificial Sequence: Synthetic oligonucleotide
aauacguggauaccaacag

SEQ ID NO: 150207 - RNA, 19 nt, Artificial Sequence
  Description of Artificial Sequence: Synthetic oligonucleotide
uauuuaguugaucaggugu

SEQ ID NO: 150208 - RNA, 19 nt, Artificial Sequence
  Description of Artificial Sequence: Synthetic oligonucleotide
acuaaaacaauucuagagu

SEQ ID NO: 150209 - RNA, 19 nt, Artificial Sequence
  Description of Artificial Sequence: Synthetic oligonucleotide
auaacaguaauauuuucug

SEQ ID NO: 150210 - RNA, 19 nt, Artificial Sequence
  Description of Artificial Sequence: Synthetic oligonucleotide
uucgauaaggacuaguucu

SEQ ID NO: 150211 - RNA, 19 nt, Artificial Sequence
  Description of Artificial Sequence: Synthetic oligonucleotide
acaauuuucaacccacuuc

SEQ ID NO: 150212 - RNA, 19 nt, Artificial Sequence
  Description of Artificial Sequence: Synthetic oligonucleotide
agagauaggcauuucagag

SEQ ID NO: 150213 - RNA, 19 nt, Artificial Sequence
  Description of Artificial Sequence: Synthetic oligonucleotide
aagucaguugccuguaugg

SEQ ID NO: 150214 - RNA, 19 nt, Artificial Sequence
  Description of Artificial Sequence: Synthetic oligonucleotide
agcaugagaguucaaacgg

SEQ ID NO: 150215 - RNA, 19 nt, Artificial Sequence
  Description of Artificial Sequence: Synthetic oligonucleotide
ugauguguugaauuuaagc

SEQ ID NO: 150216 - RNA, 19 nt, Artificial Sequence
  Description of Artificial Sequence: Synthetic oligonucleotide
ugugucgcuauuuauacca

SEQ ID NO: 150217 - RNA, 19 nt, Artificial Sequence
  Description of Artificial Sequence: Synthetic oligonucleotide
uggauuguucaaaugacug

SEQ ID NO: 150218 - RNA, 19 nt, Artificial Sequence
  Description of Artificial Sequence: Synthetic oligonucleotide
ugagcuuuagagcagaaua

SEQ ID NO: 150219 - RNA, 19 nt, Artificial Sequence
  Description of Artificial Sequence: Synthetic oligonucleotide
aauuuaagcugccccauca

SEQ ID NO: 150220 - RNA, 19 nt, Artificial Sequence
  Description of Artificial Sequence: Synthetic oligonucleotide
uaaaucaagacaaggcagu

SEQ ID NO: 150221 - RNA, 19 nt, Artificial Sequence
  Description of Artificial Sequence: Synthetic oligonucleotide
ugcucguccagcuauacag

SEQ ID NO: 150222 - RNA, 19 nt, Artificial Sequence
  Description of Artificial Sequence: Synthetic oligonucleotide
agguaacacauucccaucc

SEQ ID NO: 150223 - RNA, 19 nt, Artificial Sequence
  Description of Artificial Sequence: Synthetic oligonucleotide
caucacuucguuaagugag

SEQ ID NO: 150224 - RNA, 19 nt, Artificial Sequence
  Description of Artificial Sequence: Synthetic oligonucleotide
auuuuggcacucccaaugc

SEQ ID NO: 150225 - RNA, 19 nt, Artificial Sequence
  Description of Artificial Sequence: Synthetic oligonucleotide
uuugugucgcuauuuauac

SEQ ID NO: 150226 - RNA, 19 nt, Artificial Sequence
  Description of Artificial Sequence: Synthetic oligonucleotide
aguuauuccaccuaauauu

SEQ ID NO: 150227 - RNA, 19 nt, Artificial Sequence
  Description of Artificial Sequence: Synthetic oligonucleotide
agcaaagaggccuucgggg

SEQ ID NO: 150228 - RNA, 19 nt, Artificial Sequence
  Description of Artificial Sequence: Synthetic oligonucleotide
cugaccacgacaauacucc

SEQ ID NO: 150229 - RNA, 19 nt, Artificial Sequence
  Description of Artificial Sequence: Synthetic oligonucleotide
acugagggcgucuuuauag

SEQ ID NO: 150230 - RNA, 19 nt, Artificial Sequence
  Description of Artificial Sequence: Synthetic oligonucleotide
ugauucgacacuccaguag

SEQ ID NO: 150231 - RNA, 19 nt, Artificial Sequence
  Description of Artificial Sequence: Synthetic oligonucleotide
uacuccauauucaaucccc

SEQ ID NO: 150232 - RNA, 19 nt, Artificial Sequence
  Description of Artificial Sequence: Synthetic oligonucleotide
uuaagcugccccaucacug

SEQ ID NO: 150233 - RNA, 19 nt, Artificial Sequence
  Description of Artificial Sequence: Synthetic oligonucleotide
uaccaucuaaacauaacac

SEQ ID NO: 150234 - RNA, 19 nt, Artificial Sequence
  Description of Artificial Sequence: Synthetic oligonucleotide
aaggacuaguucuacagau

SEQ ID NO: 150235 - RNA, 19 nt, Artificial Sequence
  Description of Artificial Sequence: Synthetic oligonucleotide
agcucaauaucuuucccuc

SEQ ID NO: 150236 - RNA, 19 nt, Artificial Sequence
  Description of Artificial Sequence: Synthetic oligonucleotide
gaccugauaacccaacagc

SEQ ID NO: 150237 - RNA, 19 nt, Artificial Sequence
  Description of Artificial Sequence: Synthetic oligonucleotide
uuaaauacguggauaccaa

SEQ ID NO: 150238 - RNA, 19 nt, Artificial Sequence
  Description of Artificial Sequence: Synthetic oligonucleotide
aaaguuauccggagcaaag

SEQ ID NO: 150239 - RNA, 19 nt, Artificial Sequence
  Description of Artificial Sequence: Synthetic oligonucleotide
acaccuauaacuccuacaa

SEQ ID NO: 150240 - RNA, 19 nt, Artificial Sequence
  Description of Artificial Sequence: Synthetic oligonucleotide
uguuccuaaagccacggau

SEQ ID NO: 150241 - RNA, 19 nt, Artificial Sequence
  Description of Artificial Sequence: Synthetic oligonucleotide
ucucaguuauuguagugug

SEQ ID NO: 150242 - RNA, 19 nt, Artificial Sequence
  Description of Artificial Sequence: Synthetic oligonucleotide
aaauacguggauaccaaca

SEQ ID NO: 150243 - RNA, 19 nt, Artificial Sequence
  Description of Artificial Sequence: Synthetic oligonucleotide
ugguugcuaaauuuguggc

SEQ ID NO: 150244 - RNA, 19 nt, Artificial Sequence
  Description of Artificial Sequence: Synthetic oligonucleotide
gauuaacuggccuaccaca

SEQ ID NO: 150245 - RNA, 19 nt, Artificial Sequence
  Description of Artificial Sequence: Synthetic oligonucleotide
acgcauuuaaggcacagga

SEQ ID NO: 150246 - RNA, 19 nt, Artificial Sequence
  Description of Artificial Sequence: Synthetic oligonucleotide
cauuuuggcacucccaaug

SEQ ID NO: 150247 - RNA, 19 nt, Artificial Sequence
  Description of Artificial Sequence: Synthetic oligonucleotide
gcaaauaugccuugagacg

SEQ ID NO: 150248 - RNA, 19 nt, Artificial Sequence
  Description of Artificial Sequence: Synthetic oligonucleotide
uccaucacuucguuaagug

SEQ ID NO: 150249 - RNA, 19 nt, Artificial Sequence
  Description of Artificial Sequence: Synthetic oligonucleotide
aaagaagugcgagucucuc

SEQ ID NO: 150250 - RNA, 19 nt, Artificial Sequence
  Description of Artificial Sequence: Synthetic oligonucleotide
ugauuaacuggccuaccac

SEQ ID NO: 150251 - RNA, 19 nt, Artificial Sequence
  Description of Artificial Sequence: Synthetic oligonucleotide
agcuucauauggcaggaag

SEQ ID NO: 150252 - RNA, 19 nt, Artificial Sequence
  Description of Artificial Sequence: Synthetic oligonucleotide
ugaauggccuaaaaccugu

SEQ ID NO: 150253 - RNA, 19 nt, Artificial Sequence
  Description of Artificial Sequence: Synthetic oligonucleotide
uuauuuaguugaucaggug

SEQ ID NO: 150254 - RNA, 19 nt, Artificial Sequence
  Description of Artificial Sequence: Synthetic oligonucleotide
cuucauauggcaggaagcc

SEQ ID NO: 150255 - RNA, 19 nt, Artificial Sequence
  Description of Artificial Sequence: Synthetic oligonucleotide
agaccugauaacccaacag

SEQ ID NO: 150256 - RNA, 19 nt, Artificial Sequence
  Description of Artificial Sequence: Synthetic oligonucleotide
aaccacgcauuuaaggcac

SEQ ID NO: 150257 - RNA, 19 nt, Artificial Sequence
  Description of Artificial Sequence: Synthetic oligonucleotide
aauggccuaaaaccuguga

SEQ ID NO: 150258 - RNA, 19 nt, Artificial Sequence
  Description of Artificial Sequence: Synthetic oligonucleotide
ucaguuauuguagugugaa

SEQ ID NO: 150259 - RNA, 19 nt, Artificial Sequence
  Description of Artificial Sequence: Synthetic oligonucleotide
uaaagcaugagaguucaaa

SEQ ID NO: 150260 - RNA, 19 nt, Artificial Sequence
  Description of Artificial Sequence: Synthetic oligonucleotide
uguaucgucuaugugugca

SEQ ID NO: 150261 - RNA, 19 nt, Artificial Sequence
  Description of Artificial Sequence: Synthetic oligonucleotide
uguuccgcaaauaugccuu

SEQ ID NO: 150262 - RNA, 19 nt, Artificial Sequence
  Description of Artificial Sequence: Synthetic oligonucleotide
ggauuguucaaaugacugg

SEQ ID NO: 150263 - RNA, 19 nt, Artificial Sequence
  Description of Artificial Sequence: Synthetic oligonucleotide
ucguccauuuucauagcgc

SEQ ID NO: 150264 - RNA, 19 nt, Artificial Sequence
  Description of Artificial Sequence: Synthetic oligonucleotide
uguaagccugaccacgaca

SEQ ID NO: 150265 - RNA, 19 nt, Artificial Sequence
  Description of Artificial Sequence: Synthetic oligonucleotide
agaucaaauauuguuguau

SEQ ID NO: 150266 - RNA, 19 nt, Artificial Sequence
  Description of Artificial Sequence: Synthetic oligonucleotide
guuauccggagcaaagagg

SEQ ID NO: 150267 - RNA, 19 nt, Artificial Sequence
  Description of Artificial Sequence: Synthetic oligonucleotide
uucauaaaugguggauggg

SEQ ID NO: 150268 - RNA, 19 nt, Artificial Sequence
  Description of Artificial Sequence: Synthetic oligonucleotide
gaauugauucgacacucca

SEQ ID NO: 150269 - RNA, 19 nt, Artificial Sequence
  Description of Artificial Sequence: Synthetic oligonucleotide
cugaaaguuauccggagca

SEQ ID NO: 150270 - RNA, 19 nt, Artificial Sequence
  Description of Artificial Sequence: Synthetic oligonucleotide
ugugugcaagugauuaacu

SEQ ID NO: 150271 - RNA, 19 nt, Artificial Sequence
  Description of Artificial Sequence: Synthetic oligonucleotide
auguuauauccuaaaauga

SEQ ID NO: 150272 - RNA, 19 nt, Artificial Sequence
  Description of Artificial Sequence: Synthetic oligonucleotide
uggacacaauguaagccug

SEQ ID NO: 150273 - RNA, 19 nt, Artificial Sequence
  Description of Artificial Sequence: Synthetic oligonucleotide
acggauaccccuaucacag

SEQ ID NO: 150274 - RNA, 19 nt, Artificial Sequence
  Description of Artificial Sequence: Synthetic oligonucleotide
uccgcaaauaugccuugag

SEQ ID NO: 150275 - RNA, 19 nt, Artificial Sequence
  Description of Artificial Sequence: Synthetic oligonucleotide
uuauuguagugugaaauuu

SEQ ID NO: 150276 - RNA, 19 nt, Artificial Sequence
  Description of Artificial Sequence: Synthetic oligonucleotide
aaugcucguccagcuauac

SEQ ID NO: 150277 - RNA, 19 nt, Artificial Sequence
  Description of Artificial Sequence: Synthetic oligonucleotide
uaaauacguggauaccaac

SEQ ID NO: 150278 - RNA, 19 nt, Artificial Sequence
  Description of Artificial Sequence: Synthetic oligonucleotide
uccagcuauacaguuauuc

SEQ ID NO: 150279 - RNA, 19 nt, Artificial Sequence
  Description of Artificial Sequence: Synthetic oligonucleotide
aagaagugcgagucucuca

SEQ ID NO: 150280 - RNA, 19 nt, Artificial Sequence
  Description of Artificial Sequence: Synthetic oligonucleotide
auaauaugcuccacuguag

SEQ ID NO: 150281 - RNA, 19 nt, Artificial Sequence
  Description of Artificial Sequence: Synthetic oligonucleotide
agaauugauucgacacucc

SEQ ID NO: 150282 - RNA, 19 nt, Artificial Sequence
  Description of Artificial Sequence: Synthetic oligonucleotide
auggaaaagaagugcgagu

SEQ ID NO: 150283 - RNA, 19 nt, Artificial Sequence
  Description of Artificial Sequence: Synthetic oligonucleotide
ucgccaaccacgcauuuaa

SEQ ID NO: 150284 - RNA, 19 nt, Artificial Sequence
  Description of Artificial Sequence: Synthetic oligonucleotide
cagacuucgccaaccacgc

SEQ ID NO: 150285 - RNA, 19 nt, Artificial Sequence
  Description of Artificial Sequence: Synthetic oligonucleotide
gcauuucagagcuuugagg

SEQ ID NO: 150286 - RNA, 19 nt, Artificial Sequence
  Description of Artificial Sequence: Synthetic oligonucleotide
uuaucucgaagaacuguuc

SEQ ID NO: 150287 - RNA, 19 nt, Artificial Sequence
  Description of Artificial Sequence: Synthetic oligonucleotide
uguuuggcacauaaucgau

SEQ ID NO: 150288 - RNA, 19 nt, Artificial Sequence
  Description of Artificial Sequence: Synthetic oligonucleotide
uguauugcauuaucucgaa

SEQ ID NO: 150289 - RNA, 19 nt, Artificial Sequence
  Description of Artificial Sequence: Synthetic oligonucleotide
acauaaucgauaaugcuua

SEQ ID NO: 150290 - RNA, 19 nt, Artificial Sequence
  Description of Artificial Sequence: Synthetic oligonucleotide
aagauucgccuugaggugu

SEQ ID NO: 150291 - RNA, 19 nt, Artificial Sequence
  Description of Artificial Sequence: Synthetic oligonucleotide
aacuguucgauaaggacua

SEQ ID NO: 150292 - RNA, 19 nt, Artificial Sequence
  Description of Artificial Sequence: Synthetic oligonucleotide
uuacuugaccucuggucug

SEQ ID NO: 150293 - RNA, 19 nt, Artificial Sequence
  Description of Artificial Sequence: Synthetic oligonucleotide
uuguagugugaaauuucac

SEQ ID NO: 150294 - RNA, 19 nt, Artificial Sequence
  Description of Artificial Sequence: Synthetic oligonucleotide
ucgauaaggacuaguucua

SEQ ID NO: 150295 - RNA, 19 nt, Artificial Sequence
  Description of Artificial Sequence: Synthetic oligonucleotide
agugauuaacuggccuacc

SEQ ID NO: 150296 - RNA, 19 nt, Artificial Sequence
  Description of Artificial Sequence: Synthetic oligonucleotide
aaguuauccggagcaaaga

SEQ ID NO: 150297 - RNA, 19 nt, Artificial Sequence
  Description of Artificial Sequence: Synthetic oligonucleotide
cuuaccccgcucuucacug

SEQ ID NO: 150298 - RNA, 19 nt, Artificial Sequence
  Description of Artificial Sequence: Synthetic oligonucleotide
ccaccuaauauuugugucg

SEQ ID NO: 150299 - RNA, 19 nt, Artificial Sequence
  Description of Artificial Sequence: Synthetic oligonucleotide
caccuaauauuugugucgc

SEQ ID NO: 150300 - RNA, 19 nt, Artificial Sequence
  Description of Artificial Sequence: Synthetic oligonucleotide
uggccuaaaaccugugauc

SEQ ID NO: 150301 - RNA, 19 nt, Artificial Sequence
  Description of Artificial Sequence: Synthetic oligonucleotide
gaacuguucgauaaggacu

SEQ ID NO: 150302 - RNA, 19 nt, Artificial Sequence
  Description of Artificial Sequence: Synthetic oligonucleotide
ggacuaguucuacagauca

SEQ ID NO: 150303 - RNA, 19 nt, Artificial Sequence
  Description of Artificial Sequence: Synthetic oligonucleotide
cagcuauacaguuauucca

SEQ ID NO: 150304 - RNA, 19 nt, Artificial Sequence
  Description of Artificial Sequence: Synthetic oligonucleotide
cuauaacuccuacaaguca

SEQ ID NO: 150305 - RNA, 19 nt, Artificial Sequence
  Description of Artificial Sequence: Synthetic oligonucleotide
ugcuuguaagagauccacu

SEQ ID NO: 150306 - RNA, 19 nt, Artificial Sequence
  Description of Artificial Sequence: Synthetic oligonucleotide
guucgauaaggacuaguuc

SEQ ID NO: 150307 - RNA, 19 nt, Artificial Sequence
  Description of Artificial Sequence: Synthetic oligonucleotide
aucucgucggccucauguc

SEQ ID NO: 150308 - RNA, 19 nt, Artificial Sequence
  Description of Artificial Sequence: Synthetic oligonucleotide
aguuccugaauaauaugcu

SEQ ID NO: 150309 - RNA, 19 nt, Artificial Sequence
  Description of Artificial Sequence: Synthetic oligonucleotide
uucaguuccuuaccccgcu

SEQ ID NO: 150310 - RNA, 19 nt, Artificial Sequence
  Description of Artificial Sequence: Synthetic oligonucleotide
gccaaccacgcauuuaagg

SEQ ID NO: 150311 - RNA, 19 nt, Artificial Sequence
  Description of Artificial Sequence: Synthetic oligonucleotide
uugugucgcuauuuauacc

SEQ ID NO: 150312 - RNA, 19 nt, Artificial Sequence
  Description of Artificial Sequence: Synthetic oligonucleotide
auguaagccugaccacgac

SEQ ID NO: 150313 - RNA, 19 nt, Artificial Sequence
  Description of Artificial Sequence: Synthetic oligonucleotide
guacaaaugcucguccagc

SEQ ID NO: 150314 - RNA, 19 nt, Artificial Sequence
  Description of Artificial Sequence: Synthetic oligonucleotide
gaucucgucggccucaugu

SEQ ID NO: 150315 - RNA, 19 nt, Artificial Sequence
  Description of Artificial Sequence: Synthetic oligonucleotide
ggccuaaaaccugugaucc

SEQ ID NO: 150316 - RNA, 19 nt, Artificial Sequence
  Description of Artificial Sequence: Synthetic oligonucleotide
caagucaguugccuguaug

SEQ ID NO: 150317 - RNA, 19 nt, Artificial Sequence
  Description of Artificial Sequence: Synthetic oligonucleotide
agaucauagaggucucaaa

SEQ ID NO: 150318 - RNA, 19 nt, Artificial Sequence
  Description of Artificial Sequence: Synthetic oligonucleotide
uguccauccaaggguaugu

SEQ ID NO: 150319 - RNA, 19 nt, Artificial Sequence
  Description of Artificial Sequence: Synthetic oligonucleotide
cugauguguugaauuuaag

SEQ ID NO: 150320 - RNA, 19 nt, Artificial Sequence
  Description of Artificial Sequence: Synthetic oligonucleotide
gaauaagguguucaccgcu

SEQ ID NO: 150321 - RNA, 19 nt, Artificial Sequence
  Description of Artificial Sequence: Synthetic oligonucleotide
ugcuaaauuuguggcuucc

SEQ ID NO: 150322 - RNA, 19 nt, Artificial Sequence
  Description of Artificial Sequence: Synthetic oligonucleotide
auaagguguucaccgcugu

SEQ ID NO: 150323 - RNA, 19 nt, Artificial Sequence
  Description of Artificial Sequence: Synthetic oligonucleotide
guauugcauuaucucgaag

SEQ ID NO: 150324 - RNA, 19 nt, Artificial Sequence
  Description of Artificial Sequence: Synthetic oligonucleotide
cuccuacaauuuucaaccc

SEQ ID NO: 150325 - RNA, 19 nt, Artificial Sequence
  Description of Artificial Sequence: Synthetic oligonucleotide
gguguaucgucuaugugug

SEQ ID NO: 150326 - RNA, 19 nt, Artificial Sequence
  Description of Artificial Sequence: Synthetic oligonucleotide
gcaaggcauauacauuggg

SEQ ID NO: 150327 - RNA, 19 nt, Artificial Sequence
  Description of Artificial Sequence: Synthetic oligonucleotide
uugcauuaucucgaagaac

SEQ ID NO: 150328 - RNA, 19 nt, Artificial Sequence
  Description of Artificial Sequence: Synthetic oligonucleotide
uaguaacucucagagguua

SEQ ID NO: 150329 - RNA, 19 nt, Artificial Sequence
  Description of Artificial Sequence: Synthetic oligonucleotide
acaagugaauggccuaaaa

SEQ ID NO: 150330 - RNA, 19 nt, Artificial Sequence
  Description of Artificial Sequence: Synthetic oligonucleotide
aggacuaguucuacagauc

SEQ ID NO: 150331 - RNA, 19 nt, Artificial Sequence
  Description of Artificial Sequence: Synthetic oligonucleotide
gaaaguuauccggagcaaa

SEQ ID NO: 150332 - RNA, 19 nt, Artificial Sequence
  Description of Artificial Sequence: Synthetic oligonucleotide
ugucgcuauuuauaccauc

SEQ ID NO: 150333 - RNA, 19 nt, Artificial Sequence
  Description of Artificial Sequence: Synthetic oligonucleotide
ucacuucguuaagugagug

SEQ ID NO: 150334 - RNA, 19 nt, Artificial Sequence
  Description of Artificial Sequence: Synthetic oligonucleotide
cuaaagccacggauacccc

SEQ ID NO: 150335 - RNA, 19 nt, Artificial Sequence
  Description of Artificial Sequence: Synthetic oligonucleotide
gagcagaauaagguguuca

SEQ ID NO: 150336 - RNA, 19 nt, Artificial Sequence
  Description of Artificial Sequence: Synthetic oligonucleotide
ugaaaguuauccggagcaa

SEQ ID NO: 150337 - RNA, 19 nt, Artificial Sequence
  Description of Artificial Sequence: Synthetic oligonucleotide
ggugagaucaaauauuguu

SEQ ID NO: 150338 - RNA, 19 nt, Artificial Sequence
  Description of Artificial Sequence: Synthetic oligonucleotide
agcaaggcauauacauugg

SEQ ID NO: 150339 - RNA, 19 nt, Artificial Sequence
  Description of Artificial Sequence: Synthetic oligonucleotide
guaacucucagagguuagc

SEQ ID NO: 150340 - RNA, 19 nt, Artificial Sequence
  Description of Artificial Sequence: Synthetic oligonucleotide
ggucucaaaaguguuuggc

SEQ ID NO: 150341 - RNA, 19 nt, Artificial Sequence
  Description of Artificial Sequence: Synthetic oligonucleotide
agcuacuggcugcaaagaa

SEQ ID NO: 150342 - RNA, 19 nt, Artificial Sequence
  Description of Artificial Sequence: Synthetic oligonucleotide
guaagccugaccacgacaa

SEQ ID NO: 150343 - RNA, 19 nt, Artificial Sequence
  Description of Artificial Sequence: Synthetic oligonucleotide
aguaacucucagagguuag

SEQ ID NO: 150344 - RNA, 19 nt, Artificial Sequence
  Description of Artificial Sequence: Synthetic oligonucleotide
ucgcuauuuauaccaucua

SEQ ID NO: 150345 - RNA, 19 nt, Artificial Sequence
  Description of Artificial Sequence: Synthetic oligonucleotide
aagcuacuggcugcaaaga

SEQ ID NO: 150346 - RNA, 19 nt, Artificial Sequence
  Description of Artificial Sequence: Synthetic oligonucleotide
cacggauaccccuaucaca

SEQ ID NO: 150347 - RNA, 19 nt, Artificial Sequence
  Description of Artificial Sequence: Synthetic oligonucleotide
ucguuaagugagugcagua

SEQ ID NO: 150348 - RNA, 19 nt, Artificial Sequence
  Description of Artificial Sequence: Synthetic oligonucleotide
cacgcauuuaaggcacagg

SEQ ID NO: 150349 - RNA, 19 nt, Artificial Sequence
  Description of Artificial Sequence: Synthetic oligonucleotide
agucaguugccuguaugga

SEQ ID NO: 150350 - RNA, 19 nt, Artificial Sequence
  Description of Artificial Sequence: Synthetic oligonucleotide
aaagccacggauaccccua

SEQ ID NO: 150351 - RNA, 19 nt, Artificial Sequence
  Description of Artificial Sequence: Synthetic oligonucleotide
uaccccuaucacagggaca

SEQ ID NO: 150352 - RNA, 19 nt, Artificial Sequence
  Description of Artificial Sequence: Synthetic oligonucleotide
ucguccagcuauacaguua

SEQ ID NO: 150353 - RNA, 19 nt, Artificial Sequence
  Description of Artificial Sequence: Synthetic oligonucleotide
caccgcuguggucucaaag

SEQ ID NO: 150354 - RNA, 19 nt, Artificial Sequence
  Description of Artificial Sequence: Synthetic oligonucleotide
ccugaaaguuauccggagc

SEQ ID NO: 150355 - RNA, 19 nt, Artificial Sequence
  Description of Artificial Sequence: Synthetic oligonucleotide
guuccgcaaauaugccuug

SEQ ID NO: 150356 - RNA, 19 nt, Artificial Sequence
  Description of Artificial Sequence: Synthetic oligonucleotide
gcagaguguguagacagcc

SEQ ID NO: 150357 - RNA, 19 nt, Artificial Sequence
  Description of Artificial Sequence: Synthetic oligonucleotide
gucgcuauuuauaccaucu

SEQ ID NO: 150358 - RNA, 19 nt, Artificial Sequence
  Description of Artificial Sequence: Synthetic oligonucleotide
auaaucgauaaugcuuauu

SEQ ID NO: 150359 - RNA, 19 nt, Artificial Sequence
  Description of Artificial Sequence: Synthetic oligonucleotide
caguuauuccaccuaauau

SEQ ID NO: 150360 - RNA, 19 nt, Artificial Sequence
  Description of Artificial Sequence: Synthetic oligonucleotide
ccugaccacgacaauacuc

SEQ ID NO: 150361 - RNA, 19 nt, Artificial Sequence
  Description of Artificial Sequence: Synthetic oligonucleotide
cacgucgucugugaugaug

SEQ ID NO: 150362 - RNA, 19 nt, Artificial Sequence
  Description of Artificial Sequence: Synthetic oligonucleotide
aucacuucguuaagugagu

SEQ ID NO: 150363 - RNA, 19 nt, Artificial Sequence
  Description of Artificial Sequence: Synthetic oligonucleotide
cuggccuaccacaccuuac

SEQ ID NO: 150364 - RNA, 19 nt, Artificial Sequence
  Description of Artificial Sequence: Synthetic oligonucleotide
uccccgcuucuguacuggg

SEQ ID NO: 150365 - RNA, 19 nt, Artificial Sequence
  Description of Artificial Sequence: Synthetic oligonucleotide
ugaccucuggucugucaaa

SEQ ID NO: 150366 - RNA, 19 nt, Artificial Sequence
  Description of Artificial Sequence: Synthetic oligonucleotide
agagauccacuaagacuuc

SEQ ID NO: 150367 - RNA, 19 nt, Artificial Sequence
  Description of Artificial Sequence: Synthetic oligonucleotide
uaagccugaccacgacaau

SEQ ID NO: 150368 - RNA, 19 nt, Artificial Sequence
  Description of Artificial Sequence: Synthetic oligonucleotide
acgggcaggugcucuucuc

SEQ ID NO: 150369 - RNA, 19 nt, Artificial Sequence
  Description of Artificial Sequence: Synthetic oligonucleotide
gccuaccacaccuuacagc

SEQ ID NO: 150370 - RNA, 19 nt, Artificial Sequence
  Description of Artificial Sequence: Synthetic oligonucleotide
auaacuccuacaagucaaa

SEQ ID NO: 150371 - RNA, 19 nt, Artificial Sequence
  Description of Artificial Sequence: Synthetic oligonucleotide
uucggggaucucgucggcc

SEQ ID NO: 150372 - RNA, 19 nt, Artificial Sequence
  Description of Artificial Sequence: Synthetic oligonucleotide
acuggccuaccacaccuua

SEQ ID NO: 150373 - RNA, 19 nt, Artificial Sequence
  Description of Artificial Sequence: Synthetic oligonucleotide
guguaucgucuaugugugc

SEQ ID NO: 150374 - RNA, 19 nt, Artificial Sequence
  Description of Artificial Sequence: Synthetic oligonucleotide
ugagacguuuucguccauu

SEQ ID NO: 150375 - RNA, 19 nt, Artificial Sequence
  Description of Artificial Sequence: Synthetic oligonucleotide
ccgcuguggucucaaagcg

SEQ ID NO: 150376 - RNA, 19 nt, Artificial Sequence
  Description of Artificial Sequence: Synthetic oligonucleotide
ucgccuugagguguaucgu

SEQ ID NO: 150377 - RNA, 19 nt, Artificial Sequence
  Description of Artificial Sequence: Synthetic oligonucleotide
agauccacuaagacuucaa

SEQ ID NO: 150378 - RNA, 19 nt, Artificial Sequence
  Description of Artificial Sequence: Synthetic oligonucleotide
uuaccccgcucuucacugu

SEQ ID NO: 150379 - RNA, 19 nt, Artificial Sequence
  Description of Artificial Sequence: Synthetic oligonucleotide
auaguaacucucagagguu

SEQ ID NO: 150380 - RNA, 19 nt, Artificial Sequence
  Description of Artificial Sequence: Synthetic oligonucleotide
aaaugcucguccagcuaua

SEQ ID NO: 150381 - RNA, 19 nt, Artificial Sequence
  Description of Artificial Sequence: Synthetic oligonucleotide
agccacggauaccccuauc

SEQ ID NO: 150382 - RNA, 19 nt, Artificial Sequence
  Description of Artificial Sequence: Synthetic oligonucleotide
caucuggccgggucccgag

SEQ ID NO: 150383 - RNA, 19 nt, Artificial Sequence
  Description of Artificial Sequence: Synthetic oligonucleotide
ggccuaccacaccuuacag

SEQ ID NO: 150384 - RNA, 19 nt, Artificial Sequence
  Description of Artificial Sequence: Synthetic oligonucleotide
gugugaaauuucacagcca

SEQ ID NO: 150385 - RNA, 19 nt, Artificial Sequence
  Description of Artificial Sequence: Synthetic oligonucleotide
ucuagcagggaggcauuuu

SEQ ID NO: 150386 - RNA, 19 nt, Artificial Sequence
  Description of Artificial Sequence: Synthetic oligonucleotide
cccuccggaauuucccugg

SEQ ID NO: 150387 - RNA, 19 nt, Artificial Sequence
  Description of Artificial Sequence: Synthetic oligonucleotide
cugagagugugucaggauu

SEQ ID NO: 150388 - RNA, 19 nt, Artificial Sequence
  Description of Artificial Sequence: Synthetic oligonucleotide
cuggucugucaaaguguuc

SEQ ID NO: 150389 - RNA, 19 nt, Artificial Sequence
  Description of Artificial Sequence: Synthetic oligonucleotide
uaccccgcucuucacuguu

SEQ ID NO: 150390 - RNA, 19 nt, Artificial Sequence
  Description of Artificial Sequence: Synthetic oligonucleotide
uucgccaaccacgcauuua

SEQ ID NO: 150391 - RNA, 19 nt, Artificial Sequence
  Description of Artificial Sequence: Synthetic oligonucleotide
uucaccgcuguggucucaa

SEQ ID NO: 150392 - RNA, 19 nt, Artificial Sequence
  Description of Artificial Sequence: Synthetic oligonucleotide
gcgucuuuauaguaacucu

SEQ ID NO: 150393 - RNA, 19 nt, Artificial Sequence
  Description of Artificial Sequence: Synthetic oligonucleotide
ggaaaagaagugcgagucu

SEQ ID NO: 150394 - RNA, 19 nt, Artificial Sequence
  Description of Artificial Sequence: Synthetic oligonucleotide
aggauugggcaggucacuu

SEQ ID NO: 150395 - RNA, 19 nt, Artificial Sequence
  Description of Artificial Sequence: Synthetic oligonucleotide
ccaacagggcaagauucgc

SEQ ID NO: 150396 - RNA, 19 nt, Artificial Sequence
  Description of Artificial Sequence: Synthetic oligonucleotide
ccaucacuucguuaaguga

SEQ ID NO: 150397 - RNA, 19 nt, Artificial Sequence
  Description of Artificial Sequence: Synthetic oligonucleotide
agacuucgccaaccacgca

SEQ ID NO: 150398 - RNA, 19 nt, Artificial Sequence
  Description of Artificial Sequence: Synthetic oligonucleotide
ccacggauaccccuaucac

SEQ ID NO: 150399 - RNA, 19 nt, Artificial Sequence
  Description of Artificial Sequence: Synthetic oligonucleotide
uugagacguuuucguccau

SEQ ID NO: 150400 - RNA, 19 nt, Artificial Sequence
  Description of Artificial Sequence: Synthetic oligonucleotide
ccauuuaaauacguggaua

SEQ ID NO: 150401 - RNA, 19 nt, Artificial Sequence
  Description of Artificial Sequence: Synthetic oligonucleotide
uaggaagcucugguuuauu

SEQ ID NO: 150402 - RNA, 19 nt, Artificial Sequence
  Description of Artificial Sequence: Synthetic oligonucleotide
cauaaucgauaaugcuuau

SEQ ID NO: 150403 - RNA, 19 nt, Artificial Sequence
  Description of Artificial Sequence: Synthetic oligonucleotide
ccgcaaauaugccuugaga

SEQ ID NO: 150404 - RNA, 19 nt, Artificial Sequence
  Description of Artificial Sequence: Synthetic oligonucleotide
gguguucaccgcugugguc

SEQ ID NO: 150405 - RNA, 19 nt, Artificial Sequence
  Description of Artificial Sequence: Synthetic oligonucleotide
guaccagagauaggcauuu

SEQ ID NO: 150406 - RNA, 19 nt, Artificial Sequence
  Description of Artificial Sequence: Synthetic oligonucleotide
cacgacaauacuccauauu

SEQ ID NO: 150407 - RNA, 19 nt, Artificial Sequence
  Description of Artificial Sequence: Synthetic oligonucleotide
auaugccuugagacguuuu

SEQ ID NO: 150408 - RNA, 19 nt, Artificial Sequence
  Description of Artificial Sequence: Synthetic oligonucleotide
gacuaguucuacagaucau

SEQ ID NO: 150409 - RNA, 19 nt, Artificial Sequence
  Description of Artificial Sequence: Synthetic oligonucleotide
cgcuguggucucaaagcgc

SEQ ID NO: 150410 - RNA, 19 nt, Artificial Sequence
  Description of Artificial Sequence: Synthetic oligonucleotide
ucaccgcuguggucucaaa

SEQ ID NO: 150411 - RNA, 19 nt, Artificial Sequence
  Description of Artificial Sequence: Synthetic oligonucleotide
cuccggaauuucccuggga

SEQ ID NO: 150412 - RNA, 19 nt, Artificial Sequence
  Description of Artificial Sequence: Synthetic oligonucleotide
gaccacgacaauacuccau

SEQ ID NO: 150413 - RNA, 19 nt, Artificial Sequence
  Description of Artificial Sequence: Synthetic oligonucleotide
cucguccagcuauacaguu

SEQ ID NO: 150414 - RNA, 19 nt, Artificial Sequence
  Description of Artificial Sequence: Synthetic oligonucleotide
gcucaauaucuuucccucu

SEQ ID NO: 150415 - RNA, 19 nt, Artificial Sequence
  Description of Artificial Sequence: Synthetic oligonucleotide
gcacaagugaauggccuaa

SEQ ID NO: 150416 - RNA, 19 nt, Artificial Sequence
  Description of Artificial Sequence: Synthetic oligonucleotide
ccacgcauuuaaggcacag

SEQ ID NO: 150417 - RNA, 19 nt, Artificial Sequence
  Description of Artificial Sequence: Synthetic oligonucleotide
agauucgccuugaggugua

SEQ ID NO: 150418 - RNA, 19 nt, Artificial Sequence
  Description of Artificial Sequence: Synthetic oligonucleotide
caguagcgccugaaaguua

SEQ ID NO: 150419 - RNA, 19 nt, Artificial Sequence
  Description of Artificial Sequence: Synthetic oligonucleotide
ggcuucauaaaugguggau

SEQ ID NO: 150420 - RNA, 19 nt, Artificial Sequence
  Description of Artificial Sequence: Synthetic oligonucleotide
guagcgccugaaaguuauc

SEQ ID NO: 150421 - RNA, 19 nt, Artificial Sequence
  Description of Artificial Sequence: Synthetic oligonucleotide
gcuaaauuuguggcuuccu

SEQ ID NO: 150422 - RNA, 19 nt, Artificial Sequence
  Description of Artificial Sequence: Synthetic oligonucleotide
cgauaaugcuuauuuaguu

SEQ ID NO: 150423 - RNA, 19 nt, Artificial Sequence
  Description of Artificial Sequence: Synthetic oligonucleotide
cggauaccccuaucacagg

SEQ ID NO: 150424 - RNA, 19 nt, Artificial Sequence
  Description of Artificial Sequence: Synthetic oligonucleotide
cgccugaaaguuauccgga

SEQ ID NO: 150425 - RNA, 19 nt, Artificial Sequence
  Description of Artificial Sequence: Synthetic oligonucleotide
gccuaaaaccugugauccu

SEQ ID NO: 150426 - RNA, 19 nt, Artificial Sequence
  Description of Artificial Sequence: Synthetic oligonucleotide
gugucgcuauuuauaccau

SEQ ID NO: 150427 - RNA, 19 nt, Artificial Sequence
  Description of Artificial Sequence: Synthetic oligonucleotide
guucaccgcuguggucuca

SEQ ID NO: 150428 - RNA, 19 nt, Artificial Sequence
  Description of Artificial Sequence: Synthetic oligonucleotide
ccggaauuucccugggagu

SEQ ID NO: 150429 - RNA, 19 nt, Artificial Sequence
  Description of Artificial Sequence: Synthetic oligonucleotide
cuaccacaccuuacagcuu

SEQ ID NO: 150430 - RNA, 19 nt, Artificial Sequence
  Description of Artificial Sequence: Synthetic oligonucleotide
ccuuaccccgcucuucacu

SEQ ID NO: 150431 - RNA, 19 nt, Artificial Sequence
  Description of Artificial Sequence: Synthetic oligonucleotide
cagcuucauauggcaggaa

SEQ ID NO: 150432 - RNA, 19 nt, Artificial Sequence
  Description of Artificial Sequence: Synthetic oligonucleotide
gauucgccuugagguguau

SEQ ID NO: 150433 - RNA, 19 nt, Artificial Sequence
  Description of Artificial Sequence: Synthetic oligonucleotide
cgaaugcagcucucacaga

SEQ ID NO: 150434 - RNA, 19 nt, Artificial Sequence
  Description of Artificial Sequence: Synthetic oligonucleotide
gggcgucuuuauaguaacu

SEQ ID NO: 150435 - RNA, 19 nt, Artificial Sequence
  Description of Artificial Sequence: Synthetic oligonucleotide
ccacgacaauacuccauau

SEQ ID NO: 150436 - RNA, 19 nt, Artificial Sequence
  Description of Artificial Sequence: Synthetic oligonucleotide
guccagcuauacaguuauu

SEQ ID NO: 150437 - RNA, 19 nt, Artificial Sequence
  Description of Artificial Sequence: Synthetic oligonucleotide
ccgggucccgagggaaccu

SEQ ID NO: 150438 - RNA, 19 nt, Artificial Sequence
  Description of Artificial Sequence: Synthetic oligonucleotide
ucaugaaucgauaagagug

SEQ ID NO: 150439 - RNA, 19 nt, Artificial Sequence
  Description of Artificial Sequence: Synthetic oligonucleotide
uuaacaauuguauacaucu

SEQ ID NO: 150440 - RNA, 19 nt, Artificial Sequence
  Description of Artificial Sequence: Synthetic oligonucleotide
aauagaacacaccuguauc

SEQ ID NO: 150441 - RNA, 19 nt, Artificial Sequence
  Description of Artificial Sequence: Synthetic oligonucleotide
aaugucuuuucccuagacc

SEQ ID NO: 150442 - RNA, 19 nt, Artificial Sequence
  Description of Artificial Sequence: Synthetic oligonucleotide
uacaauaacauuccuacug

SEQ ID NO: 150443 - RNA, 19 nt, Artificial Sequence
  Description of Artificial Sequence: Synthetic oligonucleotide
aaaucuaucauaaugcugu

SEQ ID NO: 150444 - RNA, 19 nt, Artificial Sequence
  Description of Artificial Sequence: Synthetic oligonucleotide
aacucuuuacuguagacug

SEQ ID NO: 150445 - RNA, 19 nt, Artificial Sequence
  Description of Artificial Sequence: Synthetic oligonucleotide
uguaaaucagcuaccagag

SEQ ID NO: 150446 - RNA, 19 nt, Artificial Sequence
  Description of Artificial Sequence: Synthetic oligonucleotide
ucucaagaaaaucaaaugu

SEQ ID NO: 150447 - RNA, 19 nt, Artificial Sequence
  Description of Artificial Sequence: Synthetic oligonucleotide
aguaacuucucauauucac

SEQ ID NO: 150448 - RNA, 19 nt, Artificial Sequence
  Description of Artificial Sequence: Synthetic oligonucleotide
auaauuugcagcauuaagg

SEQ ID NO: 150449 - RNA, 19 nt, Artificial Sequence
  Description of Artificial Sequence: Synthetic oligonucleotide
auaaucgugaaguuguguc

SEQ ID NO: 150450 - RNA, 19 nt, Artificial Sequence
  Description of Artificial Sequence: Synthetic oligonucleotide
aaaccuuaaagccugcuca

SEQ ID NO: 150451 - RNA, 19 nt, Artificial Sequence
  Description of Artificial Sequence: Synthetic oligonucleotide
uuaaaccuuuauaacauca

SEQ ID NO: 150452 - RNA, 19 nt, Artificial Sequence
  Description of Artificial Sequence: Synthetic oligonucleotide
ugacauuucaacauaucug

SEQ ID NO: 150453 - RNA, 19 nt, Artificial Sequence
  Description of Artificial Sequence: Synthetic oligonucleotide
uuacauacuacuacaauaa

SEQ ID NO: 150454 - RNA, 19 nt, Artificial Sequence
  Description of Artificial Sequence: Synthetic oligonucleotide
auaucauaggcguuuauug

SEQ ID NO: 150455 - RNA, 19 nt, Artificial Sequence
  Description of Artificial Sequence: Synthetic oligonucleotide
ugcuaguacaaauuaaaca

SEQ ID NO: 150456 - RNA, 19 nt, Artificial Sequence
  Description of Artificial Sequence: Synthetic oligonucleotide
aguugugucuaucuaacag

SEQ ID NO: 150457 - RNA, 19 nt, Artificial Sequence
  Description of Artificial Sequence: Synthetic oligonucleotide
aguagcuaacagcaagugc

SEQ ID NO: 150458 - RNA, 19 nt, Artificial Sequence
  Description of Artificial Sequence: Synthetic oligonucleotide
uggaaauuaggcuucuugc

SEQ ID NO: 150459 - RNA, 19 nt, Artificial Sequence
  Description of Artificial Sequence: Synthetic oligonucleotide
uacucuaagaaagaaaggu

SEQ ID NO: 150460 - RNA, 19 nt, Artificial Sequence
  Description of Artificial Sequence: Synthetic oligonucleotide
uuuccuuaugaccuuacga

SEQ ID NO: 150461 - RNA, 19 nt, Artificial Sequence
  Description of Artificial Sequence: Synthetic oligonucleotide
cagauuagcaguaauguuc

SEQ ID NO: 150462 - RNA, 19 nt, Artificial Sequence
  Description of Artificial Sequence: Synthetic oligonucleotide
agauuagcaguaauguucc

SEQ ID NO: 150463 - RNA, 19 nt, Artificial Sequence
  Description of Artificial Sequence: Synthetic oligonucleotide
aaucguuuugguaauagga

SEQ ID NO: 150464 - RNA, 19 nt, Artificial Sequence
  Description of Artificial Sequence: Synthetic oligonucleotide
uugcacgccaacuuuaucc

SEQ ID NO: 150465 - RNA, 19 nt, Artificial Sequence
  Description of Artificial Sequence: Synthetic oligonucleotide
uaugaccuuacgaagcgcc

SEQ ID NO: 150466 - RNA, 19 nt, Artificial Sequence
  Description of Artificial Sequence: Synthetic oligonucleotide
uugaacacgugaaaggccu

SEQ ID NO: 150467 - RNA, 19 nt, Artificial Sequence
  Description of Artificial Sequence: Synthetic oligonucleotide
cuaaugugcaagcagcagc

SEQ ID NO: 150468 - RNA, 19 nt, Artificial Sequence
  Description of Artificial Sequence: Synthetic oligonucleotide
agauuugugagacuugcca

SEQ ID NO: 150469 - RNA, 19 nt, Artificial Sequence
  Description of Artificial Sequence: Synthetic oligonucleotide
caugaaucgauaagagugc

SEQ ID NO: 150470 - RNA, 19 nt, Artificial Sequence
  Description of Artificial Sequence: Synthetic oligonucleotide
guugcuauguuucaguauc

SEQ ID NO: 150471 - RNA, 19 nt, Artificial Sequence
  Description of Artificial Sequence: Synthetic oligonucleotide
uuccuuaugaccuuacgaa

SEQ ID NO: 150472 - RNA, 19 nt, Artificial Sequence
  Description of Artificial Sequence: Synthetic oligonucleotide
cuuaugaccuuacgaagcg

SEQ ID NO: 150473 - RNA, 19 nt, Artificial Sequence
  Description of Artificial Sequence: Synthetic oligonucleotide
ugaucacacaucaaaugca

SEQ ID NO: 150474 - RNA, 19 nt, Artificial Sequence
  Description of Artificial Sequence: Synthetic oligonucleotide
aaaccuuuauaacaucaaa

SEQ ID NO: 150475 - RNA, 19 nt, Artificial Sequence
  Description of Artificial Sequence: Synthetic oligonucleotide
gaaucgauaagagugccug

SEQ ID NO: 150476 - RNA, 19 nt, Artificial Sequence
  Description of Artificial Sequence: Synthetic oligonucleotide
aauaccuuaccaaaguaaa

SEQ ID NO: 150477 - RNA, 19 nt, Artificial Sequence
  Description of Artificial Sequence: Synthetic oligonucleotide
ugagacuugccaaacggga

SEQ ID NO: 150478 - RNA, 19 nt, Artificial Sequence
  Description of Artificial Sequence: Synthetic oligonucleotide
auauuguugaaaauuugag

SEQ ID NO: 150479 - RNA, 19 nt, Artificial Sequence
  Description of Artificial Sequence: Synthetic oligonucleotide
uuuuagucagcuacagcca

SEQ ID NO: 150480 - RNA, 19 nt, Artificial Sequence
  Description of Artificial Sequence: Synthetic oligonucleotide
aaaauaccuuaccaaagua

SEQ ID NO: 150481 - RNA, 19 nt, Artificial Sequence
  Description of Artificial Sequence: Synthetic oligonucleotide
ugagcuaccgcuucugucu

SEQ ID NO: 150482 - RNA, 19 nt, Artificial Sequence
  Description of Artificial Sequence: Synthetic oligonucleotide
ugugucacugagacgaaca

SEQ ID NO: 150483 - RNA, 19 nt, Artificial Sequence
  Description of Artificial Sequence: Synthetic oligonucleotide
ugaaguugugucuaucuaa

SEQ ID NO: 150484 - RNA, 19 nt, Artificial Sequence
  Description of Artificial Sequence: Synthetic oligonucleotide
aaacucuuuacuguagacu

SEQ ID NO: 150485 - RNA, 19 nt, Artificial Sequence
  Description of Artificial Sequence: Synthetic oligonucleotide
uccuuaugaccuuacgaag

SEQ ID NO: 150486 - RNA, 19 nt, Artificial Sequence
  Description of Artificial Sequence: Synthetic oligonucleotide
ugaaacguaagguguuugc

SEQ ID NO: 150487 - RNA, 19 nt, Artificial Sequence
  Description of Artificial Sequence: Synthetic oligonucleotide
aaguaacugccuuaaguaa

SEQ ID NO: 150488 - RNA, 19 nt, Artificial Sequence
  Description of Artificial Sequence: Synthetic oligonucleotide
uucccaacuacuguacugg

SEQ ID NO: 150489 - RNA, 19 nt, Artificial Sequence
  Description of Artificial Sequence: Synthetic oligonucleotide
acuaaauaggucuucucau

SEQ ID NO: 150490 - RNA, 19 nt, Artificial Sequence
  Description of Artificial Sequence: Synthetic oligonucleotide
auguauucaacaguaggag

SEQ ID NO: 150491 - RNA, 19 nt, Artificial Sequence
  Description of Artificial Sequence: Synthetic oligonucleotide
uuuuacuggccaauggauc

SEQ ID NO: 150492 - RNA, 19 nt, Artificial Sequence
  Description of Artificial Sequence: Synthetic oligonucleotide
agcauauauacacuuuccu

SEQ ID NO: 150493 - RNA, 19 nt, Artificial Sequence
  Description of Artificial Sequence: Synthetic oligonucleotide
cuaucuaacagcaguucac

SEQ ID NO: 150494 - RNA, 19 nt, Artificial Sequence
  Description of Artificial Sequence: Synthetic oligonucleotide
auguucagaacuccuguag

SEQ ID NO: 150495 - RNA, 19 nt, Artificial Sequence
  Description of Artificial Sequence: Synthetic oligonucleotide
auuagcaguaauguuccuc

SEQ ID NO: 150496 - RNA, 19 nt, Artificial Sequence
  Description of Artificial Sequence: Synthetic oligonucleotide
uaauuacucaguuucccaa

SEQ ID NO: 150497 - RNA, 19 nt, Artificial Sequence
  Description of Artificial Sequence: Synthetic oligonucleotide
uuccucaugaaucgauaag

SEQ ID NO: 150498 - RNA, 19 nt, Artificial Sequence
  Description of Artificial Sequence: Synthetic oligonucleotide
uccucaugaaucgauaaga

SEQ ID NO: 150499 - RNA, 19 nt, Artificial Sequence
  Description of Artificial Sequence: Synthetic oligonucleotide
uucucagguuuacugaugu

SEQ ID NO: 150500 - RNA, 19 nt, Artificial Sequence
  Description of Artificial Sequence: Synthetic oligonucleotide
aauuaggcuucuugcugag

SEQ ID NO: 150501 - RNA, 19 nt, Artificial Sequence
  Description of Artificial Sequence: Synthetic oligonucleotide
ugaguaaauccuugaacgu

SEQ ID NO: 150502 - RNA, 19 nt, Artificial Sequence
  Description of Artificial Sequence: Synthetic oligonucleotide
ucguuuugguaauaggaac

SEQ ID NO: 150503 - RNA, 19 nt, Artificial Sequence
  Description of Artificial Sequence: Synthetic oligonucleotide
uaaguuguuaguugugauc

SEQ ID NO: 150504 - RNA, 19 nt, Artificial Sequence
  Description of Artificial Sequence: Synthetic oligonucleotide
cugaguagcuaacagcaag

SEQ ID NO: 150505 - RNA, 19 nt, Artificial Sequence
  Description of Artificial Sequence: Synthetic oligonucleotide
gaauauuguugaaaauuug

SEQ ID NO: 150506 - RNA, 19 nt, Artificial Sequence
  Description of Artificial Sequence: Synthetic oligonucleotide
aaacguaagguguuugcua

SEQ ID NO: 150507 - RNA, 19 nt, Artificial Sequence
  Description of Artificial Sequence: Synthetic oligonucleotide
ucauacccuuucaauaaca

SEQ ID NO: 150508 - RNA, 19 nt, Artificial Sequence
  Description of Artificial Sequence: Synthetic oligonucleotide
accaugugcgcucuaaugu

SEQ ID NO: 150509 - RNA, 19 nt, Artificial Sequence
  Description of Artificial Sequence: Synthetic oligonucleotide
auaaucguuuugguaauag

SEQ ID NO: 150510 - RNA, 19 nt, Artificial Sequence
  Description of Artificial Sequence: Synthetic oligonucleotide
uaaucgugaaguugugucu

SEQ ID NO: 150511 - RNA, 19 nt, Artificial Sequence
  Description of Artificial Sequence: Synthetic oligonucleotide
augaaucgauaagagugcc

SEQ ID NO: 150512 - RNA, 19 nt, Artificial Sequence
  Description of Artificial Sequence: Synthetic oligonucleotide
cuaaauaggucuucucauc

SEQ ID NO: 150513 - RNA, 19 nt, Artificial Sequence
  Description of Artificial Sequence: Synthetic oligonucleotide
gucacugagacgaacagac

SEQ ID NO: 150514 - RNA, 19 nt, Artificial Sequence
  Description of Artificial Sequence: Synthetic oligonucleotide
gguaauaggaaccuaguaa

SEQ ID NO: 150515 - RNA, 19 nt, Artificial Sequence
  Description of Artificial Sequence: Synthetic oligonucleotide
gaagggauaucauaggcgu

SEQ ID NO: 150516 - RNA, 19 nt, Artificial Sequence
  Description of Artificial Sequence: Synthetic oligonucleotide
ucacauuaaguaacugccu

SEQ ID NO: 150517 - RNA, 19 nt, Artificial Sequence
  Description of Artificial Sequence: Synthetic oligonucleotide
agggaaagaccaugugcgc

SEQ ID NO: 150518 - RNA, 19 nt, Artificial Sequence
  Description of Artificial Sequence: Synthetic oligonucleotide
uuguuaguugugaucugug

SEQ ID NO: 150519 - RNA, 19 nt, Artificial Sequence
  Description of Artificial Sequence: Synthetic oligonucleotide
uguuugcuagcucuacugu

SEQ ID NO: 150520 - RNA, 19 nt, Artificial Sequence
  Description of Artificial Sequence: Synthetic oligonucleotide
uuaaguuguuaguugugau

SEQ ID NO: 150521 - RNA, 19 nt, Artificial Sequence
  Description of Artificial Sequence: Synthetic oligonucleotide
gaucacuuacucuaagaaa

SEQ ID NO: 150522 - RNA, 19 nt, Artificial Sequence
  Description of Artificial Sequence: Synthetic oligonucleotide
uuauuugcacgccaacuuu

SEQ ID NO: 150523 - RNA, 19 nt, Artificial Sequence
  Description of Artificial Sequence: Synthetic oligonucleotide
uuaguaagagaggcuagca

SEQ ID NO: 150524 - RNA, 19 nt, Artificial Sequence
  Description of Artificial Sequence: Synthetic oligonucleotide
acgugaaaggccucaaacu

SEQ ID NO: 150525 - RNA, 19 nt, Artificial Sequence
  Description of Artificial Sequence: Synthetic oligonucleotide
cugcuaguacaaauuaaac

SEQ ID NO: 150526 - RNA, 19 nt, Artificial Sequence
  Description of Artificial Sequence: Synthetic oligonucleotide
cacgccaacuuuauccucc

SEQ ID NO: 150527 - RNA, 19 nt, Artificial Sequence
  Description of Artificial Sequence: Synthetic oligonucleotide
caucauuaacuugagguuc

SEQ ID NO: 150528 - RNA, 19 nt, Artificial Sequence
  Description of Artificial Sequence: Synthetic oligonucleotide
aaucgauaagagugccuga

SEQ ID NO: 150529 - RNA, 19 nt, Artificial Sequence
  Description of Artificial Sequence: Synthetic oligonucleotide
uaacaauuguauacaucuc

SEQ ID NO: 150530 - RNA, 19 nt, Artificial Sequence
  Description of Artificial Sequence: Synthetic oligonucleotide
cacaauuaagagcuauuuc

SEQ ID NO: 150531 - RNA, 19 nt, Artificial Sequence
  Description of Artificial Sequence: Synthetic oligonucleotide
cccuagaccacucucaucc

SEQ ID NO: 150532 - RNA, 19 nt, Artificial Sequence
  Description of Artificial Sequence: Synthetic oligonucleotide
ucauaggcguuuauuggaa

SEQ ID NO: 150533 - RNA, 19 nt, Artificial Sequence
  Description of Artificial Sequence: Synthetic oligonucleotide
cacuuaacagcagauuagc

SEQ ID NO: 150534 - RNA, 19 nt, Artificial Sequence
  Description of Artificial Sequence: Synthetic oligonucleotide
cuuuccuuaugaccuuacg

SEQ ID NO: 150535 - RNA, 19 nt, Artificial Sequence
  Description of Artificial Sequence: Synthetic oligonucleotide
ucauaaucgugaaguugug

SEQ ID NO: 150536 - RNA, 19 nt, Artificial Sequence
  Description of Artificial Sequence: Synthetic oligonucleotide
agcauucuaagaauuauau

SEQ ID NO: 150537 - RNA, 19 nt, Artificial Sequence
  Description of Artificial Sequence: Synthetic oligonucleotide
uggaucauucaguuaguaa

SEQ ID NO: 150538 - RNA, 19 nt, Artificial Sequence
  Description of Artificial Sequence: Synthetic oligonucleotide
aaguugcuauguuucagua

SEQ ID NO: 150539 - RNA, 19 nt, Artificial Sequence
  Description of Artificial Sequence: Synthetic oligonucleotide
guuaguaagagaggcuagc

SEQ ID NO: 150540 - RNA, 19 nt, Artificial Sequence
  Description of Artificial Sequence: Synthetic oligonucleotide
acgggaacggcaugacggc

SEQ ID NO: 150541 - RNA, 19 nt, Artificial Sequence
  Description of Artificial Sequence: Synthetic oligonucleotide
ugguaauaggaaccuagua

SEQ ID NO: 150542 - RNA, 19 nt, Artificial Sequence
  Description of Artificial Sequence: Synthetic oligonucleotide
ucgauaagagugccugaug

SEQ ID NO: 150543 - RNA, 19 nt, Artificial Sequence
  Description of Artificial Sequence: Synthetic oligonucleotide
ugcgcucuaaugugcaagc

SEQ ID NO: 150544 - RNA, 19 nt, Artificial Sequence
  Description of Artificial Sequence: Synthetic oligonucleotide
ugggaggcuccuuuuacug

SEQ ID NO: 150545 - RNA, 19 nt, Artificial Sequence
  Description of Artificial Sequence: Synthetic oligonucleotide
caugugcgcucuaaugugc

SEQ ID NO: 150546 - RNA, 19 nt, Artificial Sequence
  Description of Artificial Sequence: Synthetic oligonucleotide
ugagcauucuaagaauuau

SEQ ID NO: 150547 - RNA, 19 nt, Artificial Sequence
  Description of Artificial Sequence: Synthetic oligonucleotide
ugucuuuucccuagaccac

SEQ ID NO: 150548 - RNA, 19 nt, Artificial Sequence
  Description of Artificial Sequence: Synthetic oligonucleotide
gauguacagguaucagcug

SEQ ID NO: 150549 - RNA, 19 nt, Artificial Sequence
  Description of Artificial Sequence: Synthetic oligonucleotide
ggaagggauaucauaggcg

SEQ ID NO: 150550 - RNA, 19 nt, Artificial Sequence
  Description of Artificial Sequence: Synthetic oligonucleotide
uuccuaagagaagccaaag

SEQ ID NO: 150551 - RNA, 19 nt, Artificial Sequence
  Description of Artificial Sequence: Synthetic oligonucleotide
ccuuaugaccuuacgaagc

SEQ ID NO: 150552 - RNA, 19 nt, Artificial Sequence
  Description of Artificial Sequence: Synthetic oligonucleotide
agugacugucgcuuuguca

SEQ ID NO: 150553 - RNA, 19 nt, Artificial Sequence
  Description of Artificial Sequence: Synthetic oligonucleotide
gacuugccaaacgggaacg

SEQ ID NO: 150554 - RNA, 19 nt, Artificial Sequence
  Description of Artificial Sequence: Synthetic oligonucleotide
ucuagcgcuacuucauguc

SEQ ID NO: 150555 - RNA, 19 nt, Artificial Sequence
  Description of Artificial Sequence: Synthetic oligonucleotide
agccagauaucugauaaga

SEQ ID NO: 150556 - RNA, 19 nt, Artificial Sequence
  Description of Artificial Sequence: Synthetic oligonucleotide
ugcacgccaacuuuauccu

SEQ ID NO: 150557 - RNA, 19 nt, Artificial Sequence
  Description of Artificial Sequence: Synthetic oligonucleotide
cuguuugacuaaauagguc

SEQ ID NO: 150558 - RNA, 19 nt, Artificial Sequence
  Description of Artificial Sequence: Synthetic oligonucleotide
uucggcucuugucucggag

SEQ ID NO: 150559 - RNA, 19 nt, Artificial Sequence
  Description of Artificial Sequence: Synthetic oligonucleotide
agacucuagcgcuacuuca

SEQ ID NO: 150560 - RNA, 19 nt, Artificial Sequence
  Description of Artificial Sequence: Synthetic oligonucleotide
aaucgugaaguugugucua

SEQ ID NO: 150561 - RNA, 19 nt, Artificial Sequence
  Description of Artificial Sequence: Synthetic oligonucleotide
uaacauuccuacugcuagu

SEQ ID NO: 150562 - RNA, 19 nt, Artificial Sequence
  Description of Artificial Sequence: Synthetic oligonucleotide
uagcgcuacuucaugucug

SEQ ID NO: 150563 - RNA, 19 nt, Artificial Sequence
  Description of Artificial Sequence: Synthetic oligonucleotide
gucauaaucgugaaguugu

SEQ ID NO: 150564 - RNA, 19 nt, Artificial Sequence
  Description of Artificial Sequence: Synthetic oligonucleotide
uccacaauuaagagcuauu

SEQ ID NO: 150565 - RNA, 19 nt, Artificial Sequence
  Description of Artificial Sequence: Synthetic oligonucleotide
agcgccacacuugagaagu

SEQ ID NO: 150566 - RNA, 19 nt, Artificial Sequence
  Description of Artificial Sequence: Synthetic oligonucleotide
auuggauggggcaaacucu

SEQ ID NO: 150567 - RNA, 19 nt, Artificial Sequence
  Description of Artificial Sequence: Synthetic oligonucleotide
acuguuccgaccauaaaau

SEQ ID NO: 150568 - RNA, 19 nt, Artificial Sequence
  Description of Artificial Sequence: Synthetic oligonucleotide
ugacuaaauaggucuucuc

SEQ ID NO: 150569 - RNA, 19 nt, Artificial Sequence
  Description of Artificial Sequence: Synthetic oligonucleotide
gcagcuacguucuccaacc

SEQ ID NO: 150570 - RNA, 19 nt, Artificial Sequence
  Description of Artificial Sequence: Synthetic oligonucleotide
cuugaacguagcaaaugca

SEQ ID NO: 150571 - RNA, 19 nt, Artificial Sequence
  Description of Artificial Sequence: Synthetic oligonucleotide
caccuugaacacgugaaag

SEQ ID NO: 150572 - RNA, 19 nt, Artificial Sequence
  Description of Artificial Sequence: Synthetic oligonucleotide
ggagauuugugagacuugc

SEQ ID NO: 150573 - RNA, 19 nt, Artificial Sequence
  Description of Artificial Sequence: Synthetic oligonucleotide
cuggggaucacuuacucua

SEQ ID NO: 150574 - RNA, 19 nt, Artificial Sequence
  Description of Artificial Sequence: Synthetic oligonucleotide
gaugcacuggugacacacg

SEQ ID NO: 150575 - RNA, 19 nt, Artificial Sequence
  Description of Artificial Sequence: Synthetic oligonucleotide
caauuuauuugcacgccaa

SEQ ID NO: 150576 - RNA, 19 nt, Artificial Sequence
  Description of Artificial Sequence: Synthetic oligonucleotide
cacaauaucugcuggagau

SEQ ID NO: 150577 - RNA, 19 nt, Artificial Sequence
  Description of Artificial Sequence: Synthetic oligonucleotide
acucuagcgcuacuucaug

SEQ ID NO: 150578 - RNA, 19 nt, Artificial Sequence
  Description of Artificial Sequence: Synthetic oligonucleotide
ccucaugaaucgauaagag

SEQ ID NO: 150579 - RNA, 19 nt, Artificial Sequence
  Description of Artificial Sequence: Synthetic oligonucleotide
augaaacguaagguguuug

SEQ ID NO: 150580 - RNA, 19 nt, Artificial Sequence
  Description of Artificial Sequence: Synthetic oligonucleotide
cuaugucaaauguugacau

SEQ ID NO: 150581 - RNA, 19 nt, Artificial Sequence
  Description of Artificial Sequence: Synthetic oligonucleotide
uuugcacgccaacuuuauc

SEQ ID NO: 150582 - RNA, 19 nt, Artificial Sequence
  Description of Artificial Sequence: Synthetic oligonucleotide
guuccucaugaaucgauaa

SEQ ID NO: 150583 - RNA, 19 nt, Artificial Sequence
  Description of Artificial Sequence: Synthetic oligonucleotide
aucgauaagagugccugau

SEQ ID NO: 150584 - RNA, 19 nt, Artificial Sequence
  Description of Artificial Sequence: Synthetic oligonucleotide
agguguuugcuagcucuac

SEQ ID NO: 150585 - RNA, 19 nt, Artificial Sequence
  Description of Artificial Sequence: Synthetic oligonucleotide
agcgcuacuucaugucuga

SEQ ID NO: 150586 - RNA, 19 nt, Artificial Sequence
  Description of Artificial Sequence: Synthetic oligonucleotide
ccuuucacgccuuggaaac

SEQ ID NO: 150587 - RNA, 19 nt, Artificial Sequence
  Description of Artificial Sequence: Synthetic oligonucleotide
acuuaacagcagauuagca

SEQ ID NO: 150588 - RNA, 19 nt, Artificial Sequence
  Description of Artificial Sequence: Synthetic oligonucleotide
acgaacagacaccauucua

SEQ ID NO: 150589 - RNA, 19 nt, Artificial Sequence
  Description of Artificial Sequence: Synthetic oligonucleotide
ccgauguacagguaucagc

SEQ ID NO: 150590 - RNA, 19 nt, Artificial Sequence
  Description of Artificial Sequence: Synthetic oligonucleotide
ggaaacucuuuacuguaga

SEQ ID NO: 150591 - RNA, 19 nt, Artificial Sequence
  Description of Artificial Sequence: Synthetic oligonucleotide
cagguaucagcugauguca

SEQ ID NO: 150592 - RNA, 19 nt, Artificial Sequence
  Description of Artificial Sequence: Synthetic oligonucleotide
ugaccuuacgaagcgccac

SEQ ID NO: 150593 - RNA, 19 nt, Artificial Sequence
  Description of Artificial Sequence: Synthetic oligonucleotide
gaaacguaagguguuugcu

SEQ ID NO: 150594 - RNA, 19 nt, Artificial Sequence
  Description of Artificial Sequence: Synthetic oligonucleotide
ugcuauguuucaguaucaa

SEQ ID NO: 150595 - RNA, 19 nt, Artificial Sequence
  Description of Artificial Sequence: Synthetic oligonucleotide
accuuacgaagcgccacac

SEQ ID NO: 150596 - RNA, 19 nt, Artificial Sequence
  Description of Artificial Sequence: Synthetic oligonucleotide
ggaaauuaggcuucuugcu

SEQ ID NO: 150597 - RNA, 19 nt, Artificial Sequence
  Description of Artificial Sequence: Synthetic oligonucleotide
uggggaucacuuacucuaa

SEQ ID NO: 150598 - RNA, 19 nt, Artificial Sequence
  Description of Artificial Sequence: Synthetic oligonucleotide
cagacucuagcgcuacuuc

SEQ ID NO: 150599 - RNA, 19 nt, Artificial Sequence
  Description of Artificial Sequence: Synthetic oligonucleotide
acagucuaggagauauugu

SEQ ID NO: 150600 - RNA, 19 nt, Artificial Sequence
  Description of Artificial Sequence: Synthetic oligonucleotide
auucaacaguaggaguucu

SEQ ID NO: 150601 - RNA, 19 nt, Artificial Sequence
  Description of Artificial Sequence: Synthetic oligonucleotide
uaguugugaucuguguguc

SEQ ID NO: 150602 - RNA, 19 nt, Artificial Sequence
  Description of Artificial Sequence: Synthetic oligonucleotide
gaccuuacgaagcgccaca

SEQ ID NO: 150603 - RNA, 19 nt, Artificial Sequence
  Description of Artificial Sequence: Synthetic oligonucleotide
ugacugucgcuuugucaca

SEQ ID NO: 150604 - RNA, 19 nt, Artificial Sequence
  Description of Artificial Sequence: Synthetic oligonucleotide
cuuuuacuggccaauggau

SEQ ID NO: 150605 - RNA, 19 nt, Artificial Sequence
  Description of Artificial Sequence: Synthetic oligonucleotide
cuuuauccuccccaaagcu

SEQ ID NO: 150606 - RNA, 19 nt, Artificial Sequence
  Description of Artificial Sequence: Synthetic oligonucleotide
cugagacgaacagacacca

SEQ ID NO: 150607 - RNA, 19 nt, Artificial Sequence
  Description of Artificial Sequence: Synthetic oligonucleotide
cucccgaugcacuggugac

SEQ ID NO: 150608 - RNA, 19 nt, Artificial Sequence
  Description of Artificial Sequence: Synthetic oligonucleotide
gugcgcucuaaugugcaag

SEQ ID NO: 150609 - RNA, 19 nt, Artificial Sequence
  Description of Artificial Sequence: Synthetic oligonucleotide
gucuaucuaacagcaguuc

SEQ ID NO: 150610 - RNA, 19 nt, Artificial Sequence
  Description of Artificial Sequence: Synthetic oligonucleotide
cucaugaaucgauaagagu

SEQ ID NO: 150611 - RNA, 19 nt, Artificial Sequence
  Description of Artificial Sequence: Synthetic oligonucleotide
gagcuaccgcuucugucug

SEQ ID NO: 150612 - RNA, 19 nt, Artificial Sequence
  Description of Artificial Sequence: Synthetic oligonucleotide
gccaacuuuauccucccca

SEQ ID NO: 150613 - RNA, 19 nt, Artificial Sequence
  Description of Artificial Sequence: Synthetic oligonucleotide
ucaucccgcauuugccuuc

SEQ ID NO: 150614 - RNA, 19 nt, Artificial Sequence
  Description of Artificial Sequence: Synthetic oligonucleotide
cuuacgaagcgccacacuu

SEQ ID NO: 150615 - RNA, 19 nt, Artificial Sequence
  Description of Artificial Sequence: Synthetic oligonucleotide
auaccuuaccaaaguaaaa

SEQ ID NO: 150616 - RNA, 19 nt, Artificial Sequence
  Description of Artificial Sequence: Synthetic oligonucleotide
aggaaaccuuaaagccugc

SEQ ID NO: 150617 - RNA, 19 nt, Artificial Sequence
  Description of Artificial Sequence: Synthetic oligonucleotide
guuguuaguugugaucugu

SEQ ID NO: 150618 - RNA, 19 nt, Artificial Sequence
  Description of Artificial Sequence: Synthetic oligonucleotide
ggcguuuauuggaaauuag

SEQ ID NO: 150619 - RNA, 19 nt, Artificial Sequence
  Description of Artificial Sequence: Synthetic oligonucleotide
aggcguuuauuggaaauua

SEQ ID NO: 150620 - RNA, 19 nt, Artificial Sequence
  Description of Artificial Sequence: Synthetic oligonucleotide
ugugcgcucuaaugugcaa

SEQ ID NO: 150621 - RNA, 19 nt, Artificial Sequence
  Description of Artificial Sequence: Synthetic oligonucleotide
aucgugaaguugugucuau

SEQ ID NO: 150622 - RNA, 19 nt, Artificial Sequence
  Description of Artificial Sequence: Synthetic oligonucleotide
augagcauucuaagaauua

SEQ ID NO: 150623 - RNA, 19 nt, Artificial Sequence
  Description of Artificial Sequence: Synthetic oligonucleotide
ggcucuaagagcuggcuua

SEQ ID NO: 150624 - RNA, 19 nt, Artificial Sequence
  Description of Artificial Sequence: Synthetic oligonucleotide
gacgaacagacaccauucu

SEQ ID NO: 150625 - RNA, 19 nt, Artificial Sequence
  Description of Artificial Sequence: Synthetic oligonucleotide
ccuuuuacuggccaaugga

SEQ ID NO: 150626 - RNA, 19 nt, Artificial Sequence
  Description of Artificial Sequence: Synthetic oligonucleotide
ucucagguuuacugaugua

SEQ ID NO: 150627 - RNA, 19 nt, Artificial Sequence
  Description of Artificial Sequence: Synthetic oligonucleotide
acaauaucugcuggagauu

SEQ ID NO: 150628 - RNA, 19 nt, Artificial Sequence
  Description of Artificial Sequence: Synthetic oligonucleotide
auuugcacgccaacuuuau

SEQ ID NO: 150629 - RNA, 19 nt, Artificial Sequence
  Description of Artificial Sequence: Synthetic oligonucleotide
ugcaaagagcagugccgau

SEQ ID NO: 150630 - RNA, 19 nt, Artificial Sequence
  Description of Artificial Sequence: Synthetic oligonucleotide
cacauuaaguaacugccuu

SEQ ID NO: 150631 - RNA, 19 nt, Artificial Sequence
  Description of Artificial Sequence: Synthetic oligonucleotide
gauaaucguuuugguaaua

SEQ ID NO: 150632 - RNA, 19 nt, Artificial Sequence
  Description of Artificial Sequence: Synthetic oligonucleotide
cccguuacauacuacuaca

SEQ ID NO: 150633 - RNA, 19 nt, Artificial Sequence
  Description of Artificial Sequence: Synthetic oligonucleotide
auguuccucaugaaucgau

SEQ ID NO: 150634 - RNA, 19 nt, Artificial Sequence
  Description of Artificial Sequence: Synthetic oligonucleotide
accuguaagcaguguugaa

SEQ ID NO: 150635 - RNA, 19 nt, Artificial Sequence
  Description of Artificial Sequence: Synthetic oligonucleotide
cauaggcguuuauuggaaa

SEQ ID NO: 150636 - RNA, 19 nt, Artificial Sequence
  Description of Artificial Sequence: Synthetic oligonucleotide
ccuaguaaaugaucacaca

SEQ ID NO: 150637 - RNA, 19 nt, Artificial Sequence
  Description of Artificial Sequence: Synthetic oligonucleotide
ccauucuaguaacuuuaug

SEQ ID NO: 150638 - RNA, 19 nt, Artificial Sequence
  Description of Artificial Sequence: Synthetic oligonucleotide
ccuaagagaagccaaaguu

SEQ ID NO: 150639 - RNA, 19 nt, Artificial Sequence
  Description of Artificial Sequence: Synthetic oligonucleotide
ucccuagaccacucucauc

SEQ ID NO: 150640 - RNA, 19 nt, Artificial Sequence
  Description of Artificial Sequence: Synthetic oligonucleotide
cuagcgcuacuucaugucu

SEQ ID NO: 150641 - RNA, 19 nt, Artificial Sequence
  Description of Artificial Sequence: Synthetic oligonucleotide
uccguccugucguucugaa

SEQ ID NO: 150642 - RNA, 19 nt, Artificial Sequence
  Description of Artificial Sequence: Synthetic oligonucleotide
augaccuuacgaagcgcca

SEQ ID NO: 150643 - RNA, 19 nt, Artificial Sequence
  Description of Artificial Sequence: Synthetic oligonucleotide
gaggccccguuacauacua

SEQ ID NO: 150644 - RNA, 19 nt, Artificial Sequence
  Description of Artificial Sequence: Synthetic oligonucleotide
caaauggagucugugaguu

SEQ ID NO: 150645 - RNA, 19 nt, Artificial Sequence
  Description of Artificial Sequence: Synthetic oligonucleotide
cgcucuaaugugcaagcag

SEQ ID NO: 150646 - RNA, 19 nt, Artificial Sequence
  Description of Artificial Sequence: Synthetic oligonucleotide
cugaaguuggaagggauau

SEQ ID NO: 150647 - RNA, 19 nt, Artificial Sequence
  Description of Artificial Sequence: Synthetic oligonucleotide
gcuaccgcuucugucugag

SEQ ID NO: 150648 - RNA, 19 nt, Artificial Sequence
  Description of Artificial Sequence: Synthetic oligonucleotide
cucuagcgcuacuucaugu

SEQ ID NO: 150649 - RNA, 19 nt, Artificial Sequence
  Description of Artificial Sequence: Synthetic oligonucleotide
cgucauaaucgugaaguug

SEQ ID NO: 150650 - RNA, 19 nt, Artificial Sequence
  Description of Artificial Sequence: Synthetic oligonucleotide
gacucuagcgcuacuucau

SEQ ID NO: 150651 - RNA, 19 nt, Artificial Sequence
  Description of Artificial Sequence: Synthetic oligonucleotide
cauaaucgugaaguugugu

SEQ ID NO: 150652 - RNA, 19 nt, Artificial Sequence
  Description of Artificial Sequence: Synthetic oligonucleotide
ggcaugacggcagcaccag

SEQ ID NO: 150653 - RNA, 19 nt, Artificial Sequence
  Description of Artificial Sequence: Synthetic oligonucleotide
gcugaauuggauggggcaa

SEQ ID NO: 150654 - RNA, 19 nt, Artificial Sequence
  Description of Artificial Sequence: Synthetic oligonucleotide
ggauaaucguuuugguaau

SEQ ID NO: 150655 - RNA, 19 nt, Artificial Sequence
  Description of Artificial Sequence: Synthetic oligonucleotide
agcuaccgcuucugucuga

SEQ ID NO: 150656 - RNA, 19 nt, Artificial Sequence
  Description of Artificial Sequence: Synthetic oligonucleotide
gccgauguacagguaucag

SEQ ID NO: 150657 - RNA, 19 nt, Artificial Sequence
  Description of Artificial Sequence: Synthetic oligonucleotide
gccaauggaucauucaguu

SEQ ID NO: 150658 - RNA, 19 nt, Artificial Sequence
  Description of Artificial Sequence: Synthetic oligonucleotide
gcuauguuucaguaucaau

SEQ ID NO: 150659 - RNA, 19 nt, Artificial Sequence
  Description of Artificial Sequence: Synthetic oligonucleotide
guccugucguucugaaacu

SEQ ID NO: 150660 - RNA, 19 nt, Artificial Sequence
  Description of Artificial Sequence: Synthetic oligonucleotide
cuggcuuaacaaggagaca

SEQ ID NO: 150661 - RNA, 19 nt, Artificial Sequence
  Description of Artificial Sequence: Synthetic oligonucleotide
cgaagcgccacacuugaga

SEQ ID NO: 150662 - RNA, 19 nt, Artificial Sequence
  Description of Artificial Sequence: Synthetic oligonucleotide
auacagucuaggagauauu

SEQ ID NO: 150663 - RNA, 19 nt, Artificial Sequence
  Description of Artificial Sequence: Synthetic oligonucleotide
ccaaacgggaacggcauga

SEQ ID NO: 150664 - RNA, 19 nt, Artificial Sequence
  Description of Artificial Sequence: Synthetic oligonucleotide
gccaaacgggaacggcaug

SEQ ID NO: 150665 - RNA, 19 nt, Artificial Sequence
  Description of Artificial Sequence: Synthetic oligonucleotide
guccacuauuguacagcuc

SEQ ID NO: 150666 - RNA, 19 nt, Artificial Sequence
  Description of Artificial Sequence: Synthetic oligonucleotide
acgaagcgccacacuugag

SEQ ID NO: 150667 - RNA, 19 nt, Artificial Sequence
  Description of Artificial Sequence: Synthetic oligonucleotide
cuacuguacuggggaucac

SEQ ID NO: 150668 - RNA, 19 nt, Artificial Sequence
  Description of Artificial Sequence: Synthetic oligonucleotide
gacugucgcuuugucacau

SEQ ID NO: 150669 - RNA, 19 nt, Artificial Sequence
  Description of Artificial Sequence: Synthetic oligonucleotide
ggauggggcaaacucugau

SEQ ID NO: 150670 - RNA, 19 nt, Artificial Sequence
  Description of Artificial Sequence: Synthetic oligonucleotide
cacacccaggauaaucguu

SEQ ID NO: 150671 - RNA, 19 nt, Artificial Sequence
  Description of Artificial Sequence: Synthetic oligonucleotide
gcacgccaacuuuauccuc

SEQ ID NO: 150672 - RNA, 19 nt, Artificial Sequence
  Description of Artificial Sequence: Synthetic oligonucleotide
ggaaaccuuaaagccugcu

SEQ ID NO: 150673 - RNA, 19 nt, Artificial Sequence
  Description of Artificial Sequence: Synthetic oligonucleotide
gcugaguagcuaacagcaa

SEQ ID NO: 150674 - RNA, 19 nt, Artificial Sequence
  Description of Artificial Sequence: Synthetic oligonucleotide
gccagccagauaucugaua

SEQ ID NO: 150675 - RNA, 19 nt, Artificial Sequence
  Description of Artificial Sequence: Synthetic oligonucleotide
gcaugacggcagcaccaga

SEQ ID NO: 150676 - RNA, 19 nt, Artificial Sequence
  Description of Artificial Sequence: Synthetic oligonucleotide
aucuaggacuagggcucuu

SEQ ID NO: 150677 - RNA, 19 nt, Artificial Sequence
  Description of Artificial Sequence: Synthetic oligonucleotide
caucuaggacuagggcucu

SEQ ID NO: 150678 - RNA, 19 nt, Artificial Sequence
  Description of Artificial Sequence: Synthetic oligonucleotide
accccagacucuagcgcua

SEQ ID NO: 150679 - RNA, 19 nt, Artificial Sequence
  Description of Artificial Sequence: Synthetic oligonucleotide
gcgcucuaaugugcaagca

SEQ ID NO: 150680 - RNA, 19 nt, Artificial Sequence
  Description of Artificial Sequence: Synthetic oligonucleotide
cacccaggauaaucguuuu

SEQ ID NO: 150681 - RNA, 19 nt, Artificial Sequence
  Description of Artificial Sequence: Synthetic oligonucleotide
cggcaugacggcagcacca

SEQ ID NO: 150682 - RNA, 19 nt, Artificial Sequence
  Description of Artificial Sequence: Synthetic oligonucleotide
ccuuacgaagcgccacacu

SEQ ID NO: 150683 - RNA, 19 nt, Artificial Sequence
  Description of Artificial Sequence: Synthetic oligonucleotide
ccagacucuagcgcuacuu

SEQ ID NO: 150684 - RNA, 19 nt, Artificial Sequence
  Description of Artificial Sequence: Synthetic oligonucleotide
ccguccugucguucugaaa

SEQ ID NO: 150685 - RNA, 19 nt, Artificial Sequence
  Description of Artificial Sequence: Synthetic oligonucleotide
cgggaacggcaugacggca

SEQ ID NO: 150686 - RNA, 19 nt, Artificial Sequence
  Description of Artificial Sequence: Synthetic oligonucleotide
cccagacucuagcgcuacu

SEQ ID NO: 150687 - RNA, 19 nt, Artificial Sequence
  Description of Artificial Sequence: Synthetic oligonucleotide
aguuccaauaauuugugcc

SEQ ID NO: 150688 - RNA, 19 nt, Artificial Sequence
  Description of Artificial Sequence: Synthetic oligonucleotide
aaguuuaugaacuauuacu

SEQ ID NO: 150689 - RNA, 19 nt, Artificial Sequence
  Description of Artificial Sequence: Synthetic oligonucleotide
aauauugcuaucuuuguga

SEQ ID NO: 150690 - RNA, 19 nt, Artificial Sequence
  Description of Artificial Sequence: Synthetic oligonucleotide
uuagcuuaagaucuuauug

SEQ ID NO: 150691 - RNA, 19 nt, Artificial Sequence
  Description of Artificial Sequence: Synthetic oligonucleotide
uuuaggaagcgauacaggg

SEQ ID NO: 150692 - RNA, 19 nt, Artificial Sequence
  Description of Artificial Sequence: Synthetic oligonucleotide
cucaauaccaucuuuuggg

SEQ ID NO: 150693 - RNA, 19 nt, Artificial Sequence
  Description of Artificial Sequence: Synthetic oligonucleotide
uucccucucacucagauag

SEQ ID NO: 150694 - RNA, 19 nt, Artificial Sequence
  Description of Artificial Sequence: Synthetic oligonucleotide
acuauuacuacaaagaacu

SEQ ID NO: 150695 - RNA, 19 nt, Artificial Sequence
  Description of Artificial Sequence: Synthetic oligonucleotide
auagaucagaucuuguacg

SEQ ID NO: 150696 - RNA, 19 nt, Artificial Sequence
  Description of Artificial Sequence: Synthetic oligonucleotide
acuuuuagguuuugaagcc

SEQ ID NO: 150697 - RNA, 19 nt, Artificial Sequence
  Description of Artificial Sequence: Synthetic oligonucleotide
aacccggaggucuaaaugg

SEQ ID NO: 150698 - RNA, 19 nt, Artificial Sequence
  Description of Artificial Sequence: Synthetic oligonucleotide
aaacaaacgcuguauaaga

SEQ ID NO: 150699 - RNA, 19 nt, Artificial Sequence
  Description of Artificial Sequence: Synthetic oligonucleotide
aacuauuacuacaaagaac

SEQ ID NO: 150700 - RNA, 19 nt, Artificial Sequence
  Description of Artificial Sequence: Synthetic oligonucleotide
uuagucaaagcauuaauau

SEQ ID NO: 150701 - RNA, 19 nt, Artificial Sequence
  Description of Artificial Sequence: Synthetic oligonucleotide
aagccgaacacuaagaucu

SEQ ID NO: 150702 - RNA, 19 nt, Artificial Sequence
  Description of Artificial Sequence: Synthetic oligonucleotide
uuuuccuacauuguaaggc

SEQ ID NO: 150703 - RNA, 19 nt, Artificial Sequence
  Description of Artificial Sequence: Synthetic oligonucleotide
uaaaugaucguucuguuuu

SEQ ID NO: 150704 - RNA, 19 nt, Artificial Sequence
  Description of Artificial Sequence: Synthetic oligonucleotide
aaaucauugagcaauuaca

SEQ ID NO: 150705 - RNA, 19 nt, Artificial Sequence
  Description of Artificial Sequence: Synthetic oligonucleotide
agucaaagcauuaauauug

SEQ ID NO: 150706 - RNA, 19 nt, Artificial Sequence
  Description of Artificial Sequence: Synthetic oligonucleotide
uguuuugccgcucauacuc

SEQ ID NO: 150707 - RNA, 19 nt, Artificial Sequence
  Description of Artificial Sequence: Synthetic oligonucleotide
acaucaacuagacacaggu

SEQ ID NO: 150708 - RNA, 19 nt, Artificial Sequence
  Description of Artificial Sequence: Synthetic oligonucleotide
ggucaaacaaaguuaaggg

SEQ ID NO: 150709 - RNA, 19 nt, Artificial Sequence
  Description of Artificial Sequence: Synthetic oligonucleotide
aaucucaagucccaaggug

SEQ ID NO: 150710 - RNA, 19 nt, Artificial Sequence
  Description of Artificial Sequence: Synthetic oligonucleotide
gaggauuuuguguauucgg

SEQ ID NO: 150711 - RNA, 19 nt, Artificial Sequence
  Description of Artificial Sequence: Synthetic oligonucleotide
ucaacuggcacacacuaga

SEQ ID NO: 150712 - RNA, 19 nt, Artificial Sequence
  Description of Artificial Sequence: Synthetic oligonucleotide
ugaucguucuguuuuaugu

SEQ ID NO: 150713 - RNA, 19 nt, Artificial Sequence
  Description of Artificial Sequence: Synthetic oligonucleotide
uccagguuacaucuagugg

SEQ ID NO: 150714 - RNA, 19 nt, Artificial Sequence
  Description of Artificial Sequence: Synthetic oligonucleotide
aaauagaucagaucuugua

SEQ ID NO: 150715 - RNA, 19 nt, Artificial Sequence
  Description of Artificial Sequence: Synthetic oligonucleotide
uuuagcaacaaagacgagu

SEQ ID NO: 150716 - RNA, 19 nt, Artificial Sequence
  Description of Artificial Sequence: Synthetic oligonucleotide
uguguauucggucuuccug

SEQ ID NO: 150717 - RNA, 19 nt, Artificial Sequence
  Description of Artificial Sequence: Synthetic oligonucleotide
acuuuagcaacaaagacga

SEQ ID NO: 150718 - RNA, 19 nt, Artificial Sequence
  Description of Artificial Sequence: Synthetic oligonucleotide
auacagggacuucuggucc

SEQ ID NO: 150719 - RNA, 19 nt, Artificial Sequence
  Description of Artificial Sequence: Synthetic oligonucleotide
uuucaaaguuugaaggaca

SEQ ID NO: 150720 - RNA, 19 nt, Artificial Sequence
  Description of Artificial Sequence: Synthetic oligonucleotide
ucaauucuccgcuuguaag

SEQ ID NO: 150721 - RNA, 19 nt, Artificial Sequence
  Description of Artificial Sequence: Synthetic oligonucleotide
acuggcacacacuagacca

SEQ ID NO: 150722 - RNA, 19 nt, Artificial Sequence
  Description of Artificial Sequence: Synthetic oligonucleotide
caucuaguggacauugacg

SEQ ID NO: 150723 - RNA, 19 nt, Artificial Sequence
  Description of Artificial Sequence: Synthetic oligonucleotide
ucuaaauggugcauguccu

SEQ ID NO: 150724 - RNA, 19 nt, Artificial Sequence
  Description of Artificial Sequence: Synthetic oligonucleotide
caaacgcuguauaagaaac

SEQ ID NO: 150725 - RNA, 19 nt, Artificial Sequence
  Description of Artificial Sequence: Synthetic oligonucleotide
uuuagcguaacagucuuug

SEQ ID NO: 150726 - RNA, 19 nt, Artificial Sequence
  Description of Artificial Sequence: Synthetic oligonucleotide
aguuggaggugguaaacgg

SEQ ID NO: 150727 - RNA, 19 nt, Artificial Sequence
  Description of Artificial Sequence: Synthetic oligonucleotide
uuguacgucauccaacacu

SEQ ID NO: 150728 - RNA, 19 nt, Artificial Sequence
  Description of Artificial Sequence: Synthetic oligonucleotide
aggcauguuaaccuuguuc

SEQ ID NO: 150729 - RNA, 19 nt, Artificial Sequence
  Description of Artificial Sequence: Synthetic oligonucleotide
gaggcaguaagucucuugc

SEQ ID NO: 150730 - RNA, 19 nt, Artificial Sequence
  Description of Artificial Sequence: Synthetic oligonucleotide
acaucgaaguacuuuagga

SEQ ID NO: 150731 - RNA, 19 nt, Artificial Sequence
  Description of Artificial Sequence: Synthetic oligonucleotide
uccuacauuguaaggcagg

SEQ ID NO: 150732 - RNA, 19 nt, Artificial Sequence
  Description of Artificial Sequence: Synthetic oligonucleotide
gacaucgaaguacuuuagg

SEQ ID NO: 150733 - RNA, 19 nt, Artificial Sequence
  Description of Artificial Sequence: Synthetic oligonucleotide
uuuuaugaucacagguuca

SEQ ID NO: 150734 - RNA, 19 nt, Artificial Sequence
  Description of Artificial Sequence: Synthetic oligonucleotide
ugcagguugauccaaggaa

SEQ ID NO: 150735 - RNA, 19 nt, Artificial Sequence
  Description of Artificial Sequence: Synthetic oligonucleotide
auugcuaucuuugugagua

SEQ ID NO: 150736 - RNA, 19 nt, Artificial Sequence
  Description of Artificial Sequence: Synthetic oligonucleotide
acucucuuaugccuagugg

SEQ ID NO: 150737 - RNA, 19 nt, Artificial Sequence
  Description of Artificial Sequence: Synthetic oligonucleotide
guuuuaugaucacagguuc

SEQ ID NO: 150738 - RNA, 19 nt, Artificial Sequence
  Description of Artificial Sequence: Synthetic oligonucleotide
gacauuuagcuuaagaucu

SEQ ID NO: 150739 - RNA, 19 nt, Artificial Sequence
  Description of Artificial Sequence: Synthetic oligonucleotide
ucuguaaguugcacccugg

SEQ ID NO: 150740 - RNA, 19 nt, Artificial Sequence
  Description of Artificial Sequence: Synthetic oligonucleotide
acaaauagaucagaucuug

SEQ ID NO: 150741 - RNA, 19 nt, Artificial Sequence
  Description of Artificial Sequence: Synthetic oligonucleotide
aacaccucgcucuguauca

SEQ ID NO: 150742 - RNA, 19 nt, Artificial Sequence
  Description of Artificial Sequence: Synthetic oligonucleotide
uaaacgggcaccaggaaua

SEQ ID NO: 150743 - RNA, 19 nt, Artificial Sequence
  Description of Artificial Sequence: Synthetic oligonucleotide
ucucuuaugccuaguggug

SEQ ID NO: 150744 - RNA, 19 nt, Artificial Sequence
  Description of Artificial Sequence: Synthetic oligonucleotide
acgagguaaaugccugucc

SEQ ID NO: 150745 - RNA, 19 nt, Artificial Sequence
  Description of Artificial Sequence: Synthetic oligonucleotide
uuguguccgagacacgucc

SEQ ID NO: 150746 - RNA, 19 nt, Artificial Sequence
  Description of Artificial Sequence: Synthetic oligonucleotide
guuuugggcgaucaggccc

SEQ ID NO: 150747 - RNA, 19 nt, Artificial Sequence
  Description of Artificial Sequence: Synthetic oligonucleotide
uugauuuggucuuccaggu

SEQ ID NO: 150748 - RNA, 19 nt, Artificial Sequence
  Description of Artificial Sequence: Synthetic oligonucleotide
aauacucucuuggaccaag

SEQ ID NO: 150749 - RNA, 19 nt, Artificial Sequence
  Description of Artificial Sequence: Synthetic oligonucleotide
uaucaacuggcacacacua

SEQ ID NO: 150750 - RNA, 19 nt, Artificial Sequence
  Description of Artificial Sequence: Synthetic oligonucleotide
gaucccguuucccaggcag

SEQ ID NO: 150751 - RNA, 19 nt, Artificial Sequence
  Description of Artificial Sequence: Synthetic oligonucleotide
ucuaguggacauugacgcg

SEQ ID NO: 150752 - RNA, 19 nt, Artificial Sequence
  Description of Artificial Sequence: Synthetic oligonucleotide
ugccuggaacaaauggugg

SEQ ID NO: 150753 - RNA, 19 nt, Artificial Sequence
  Description of Artificial Sequence: Synthetic oligonucleotide
uguaaggcaggcugucccg

SEQ ID NO: 150754 - RNA, 19 nt, Artificial Sequence
  Description of Artificial Sequence: Synthetic oligonucleotide
uuuugggcgaucaggcccc

SEQ ID NO: 150755 - RNA, 19 nt, Artificial Sequence
  Description of Artificial Sequence: Synthetic oligonucleotide
acuagacacagguauuucu

SEQ ID NO: 150756 - RNA, 19 nt, Artificial Sequence
  Description of Artificial Sequence: Synthetic oligonucleotide
auaucgagugggugguggc

SEQ ID NO: 150757 - RNA, 19 nt, Artificial Sequence
  Description of Artificial Sequence: Synthetic oligonucleotide
ugcauacucucuuaugccu

SEQ ID NO: 150758 - RNA, 19 nt, Artificial Sequence
  Description of Artificial Sequence: Synthetic oligonucleotide
ucuuggacacugcuuggag

SEQ ID NO: 150759 - RNA, 19 nt, Artificial Sequence
  Description of Artificial Sequence: Synthetic oligonucleotide
ugcacuuagucaaagcauu

SEQ ID NO: 150760 - RNA, 19 nt, Artificial Sequence
  Description of Artificial Sequence: Synthetic oligonucleotide
ugucgggaaucucaggugu

SEQ ID NO: 150761 - RNA, 19 nt, Artificial Sequence
  Description of Artificial Sequence: Synthetic oligonucleotide
uaugccuagugguggaccc

SEQ ID NO: 150762 - RNA, 19 nt, Artificial Sequence
  Description of Artificial Sequence: Synthetic oligonucleotide
cuggccgaggcccaaaagg

SEQ ID NO: 150763 - RNA, 19 nt, Artificial Sequence
  Description of Artificial Sequence: Synthetic oligonucleotide
cacggaagacuuuaucuag

SEQ ID NO: 150764 - RNA, 19 nt, Artificial Sequence
  Description of Artificial Sequence: Synthetic oligonucleotide
aggcaugucucuucgacug

SEQ ID NO: 150765 - RNA, 19 nt, Artificial Sequence
  Description of Artificial Sequence: Synthetic oligonucleotide
cuaguggacauugacgcgc

SEQ ID NO: 150766 - RNA, 19 nt, Artificial Sequence
  Description of Artificial Sequence: Synthetic oligonucleotide
aacuagacacagguauuuc

SEQ ID NO: 150767 - RNA, 19 nt, Artificial Sequence
  Description of Artificial Sequence: Synthetic oligonucleotide
agaguauugguaccugaca

SEQ ID NO: 150768 - RNA, 19 nt, Artificial Sequence
  Description of Artificial Sequence: Synthetic oligonucleotide
ugugaguaagagcuacuuc

SEQ ID NO: 150769 - RNA, 19 nt, Artificial Sequence
  Description of Artificial Sequence: Synthetic oligonucleotide
aaauggugcauguccuagu

SEQ ID NO: 150770 - RNA, 19 nt, Artificial Sequence
  Description of Artificial Sequence: Synthetic oligonucleotide
uuuaugaucacagguucau

SEQ ID NO: 150771 - RNA, 19 nt, Artificial Sequence
  Description of Artificial Sequence: Synthetic oligonucleotide
gugguaaacgggcaccagg

SEQ ID NO: 150772 - RNA, 19 nt, Artificial Sequence
  Description of Artificial Sequence: Synthetic oligonucleotide
gaguauugguaccugacaa

SEQ ID NO: 150773 - RNA, 19 nt, Artificial Sequence
  Description of Artificial Sequence: Synthetic oligonucleotide
acaaacgcuguauaagaaa

SEQ ID NO: 150774 - RNA, 19 nt, Artificial Sequence
  Description of Artificial Sequence: Synthetic oligonucleotide
aaguacuuuaggaagcgau

SEQ ID NO: 150775 - RNA, 19 nt, Artificial Sequence
  Description of Artificial Sequence: Synthetic oligonucleotide
aacgcuguauaagaaacuu

SEQ ID NO: 150776 - RNA, 19 nt, Artificial Sequence
  Description of Artificial Sequence: Synthetic oligonucleotide
gagcaauuacauaugcuac

SEQ ID NO: 150777 - RNA, 19 nt, Artificial Sequence
  Description of Artificial Sequence: Synthetic oligonucleotide
uguggcagcggguaguccu

SEQ ID NO: 150778 - RNA, 19 nt, Artificial Sequence
  Description of Artificial Sequence: Synthetic oligonucleotide
cuaggcaugucucuucgac

SEQ ID NO: 150779 - RNA, 19 nt, Artificial Sequence
  Description of Artificial Sequence: Synthetic oligonucleotide
gacauugacgcgcuuaucu

SEQ ID NO: 150780 - RNA, 19 nt, Artificial Sequence
  Description of Artificial Sequence: Synthetic oligonucleotide
acucuaaccgauucaccug

SEQ ID NO: 150781 - RNA, 19 nt, Artificial Sequence
  Description of Artificial Sequence: Synthetic oligonucleotide
gugagcucgucacagguug

SEQ ID NO: 150782 - RNA, 19 nt, Artificial Sequence
  Description of Artificial Sequence: Synthetic oligonucleotide
cucgcucuguaucaacugg

SEQ ID NO: 150783 - RNA, 19 nt, Artificial Sequence
  Description of Artificial Sequence: Synthetic oligonucleotide
cuucuacugguccagacca

SEQ ID NO: 150784 - RNA, 19 nt, Artificial Sequence
  Description of Artificial Sequence: Synthetic oligonucleotide
ugugguaagcuguccuuca

SEQ ID NO: 150785 - RNA, 19 nt, Artificial Sequence
  Description of Artificial Sequence: Synthetic oligonucleotide
ucgcucuguaucaacuggc

SEQ ID NO: 150786 - RNA, 19 nt, Artificial Sequence
  Description of Artificial Sequence: Synthetic oligonucleotide
ugaguaagagcuacuucua

SEQ ID NO: 150787 - RNA, 19 nt, Artificial Sequence
  Description of Artificial Sequence: Synthetic oligonucleotide
cagguugauccaaggaacc

SEQ ID NO: 150788 - RNA, 19 nt, Artificial Sequence
  Description of Artificial Sequence: Synthetic oligonucleotide
acgcgcuuaucuuaaguug

SEQ ID NO: 150789 - RNA, 19 nt, Artificial Sequence
  Description of Artificial Sequence: Synthetic oligonucleotide
aaaugaucguucuguuuua

SEQ ID NO: 150790 - RNA, 19 nt, Artificial Sequence
  Description of Artificial Sequence: Synthetic oligonucleotide
cauacucucuuaugccuag

SEQ ID NO: 150791 - RNA, 19 nt, Artificial Sequence
  Description of Artificial Sequence: Synthetic oligonucleotide
uccgcuuguaaguuuugac

SEQ ID NO: 150792 - RNA, 19 nt, Artificial Sequence
  Description of Artificial Sequence: Synthetic oligonucleotide
caagucuucccucacgcuc

SEQ ID NO: 150793 - RNA, 19 nt, Artificial Sequence
  Description of Artificial Sequence: Synthetic oligonucleotide
aagguguugacuagugccu

SEQ ID NO: 150794 - RNA, 19 nt, Artificial Sequence
  Description of Artificial Sequence: Synthetic oligonucleotide
ucuuaugccuaguggugga

SEQ ID NO: 150795 - RNA, 19 nt, Artificial Sequence
  Description of Artificial Sequence: Synthetic oligonucleotide
cucuuaugccuaguggugg

SEQ ID NO: 150796 - RNA, 19 nt, Artificial Sequence
  Description of Artificial Sequence: Synthetic oligonucleotide
cauaucgaguggguggugg

SEQ ID NO: 150797 - RNA, 19 nt, Artificial Sequence
  Description of Artificial Sequence: Synthetic oligonucleotide
agguugauccaagaaacca

SEQ ID NO: 150798 - RNA, 19 nt, Artificial Sequence
  Description of Artificial Sequence: Synthetic oligonucleotide
guaagagcuacuucuaagu

SEQ ID NO: 150799 - RNA, 19 nt, Artificial Sequence
  Description of Artificial Sequence: Synthetic oligonucleotide
ccgaggacgagguaaaugc

SEQ ID NO: 150800 - RNA, 19 nt, Artificial Sequence
  Description of Artificial Sequence: Synthetic oligonucleotide
uauugagacugcaguuugu

SEQ ID NO: 150801 - RNA, 19 nt, Artificial Sequence
  Description of Artificial Sequence: Synthetic oligonucleotide
acuaugucgggaaucucag

SEQ ID NO: 150802 - RNA, 19 nt, Artificial Sequence
  Description of Artificial Sequence: Synthetic oligonucleotide
caucgaaguacuuuaggaa

SEQ ID NO: 150803 - RNA, 19 nt, Artificial Sequence
  Description of Artificial Sequence: Synthetic oligonucleotide
ugacgcgcuuaucuuaagu

SEQ ID NO: 150804 - RNA, 19 nt, Artificial Sequence
  Description of Artificial Sequence: Synthetic oligonucleotide
aacaaacgcuguauaagaa

SEQ ID NO: 150805 - RNA, 19 nt, Artificial Sequence
  Description of Artificial Sequence: Synthetic oligonucleotide
augaucguucuguuuuaug

SEQ ID NO: 150806 - RNA, 19 nt, Artificial Sequence
  Description of Artificial Sequence: Synthetic oligonucleotide
cagguuacaucuaguggac

SEQ ID NO: 150807 - RNA, 19 nt, Artificial Sequence
  Description of Artificial Sequence: Synthetic oligonucleotide
uuaugccuagugguggacc

SEQ ID NO: 150808 - RNA, 19 nt, Artificial Sequence
  Description of Artificial Sequence: Synthetic oligonucleotide
aauucuccgcuuguaaguu

SEQ ID NO: 150809 - RNA, 19 nt, Artificial Sequence
  Description of Artificial Sequence: Synthetic oligonucleotide
ucuucgacugaguguggca

SEQ ID NO: 150810 - RNA, 19 nt, Artificial Sequence
  Description of Artificial Sequence: Synthetic oligonucleotide
cuucgacugaguguggcag

SEQ ID NO: 150811 - RNA, 19 nt, Artificial Sequence
  Description of Artificial Sequence: Synthetic oligonucleotide
aaguuguacacuggucaca

SEQ ID NO: 150812 - RNA, 19 nt, Artificial Sequence
  Description of Artificial Sequence: Synthetic oligonucleotide
acuauugagacugcaguuu

SEQ ID NO: 150813 - RNA, 19 nt, Artificial Sequence
  Description of Artificial Sequence: Synthetic oligonucleotide
gguaaaugccuguccaaug

SEQ ID NO: 150814 - RNA, 19 nt, Artificial Sequence
  Description of Artificial Sequence: Synthetic oligonucleotide
gaucguucuguuuuaugua

SEQ ID NO: 150815 - RNA, 19 nt, Artificial Sequence
  Description of Artificial Sequence: Synthetic oligonucleotide
uguugauccuugaguuaca

SEQ ID NO: 150816 - RNA, 19 nt, Artificial Sequence
  Description of Artificial Sequence: Synthetic oligonucleotide
augucgggaaucucaggug

SEQ ID NO: 150817 - RNA, 19 nt, Artificial Sequence
  Description of Artificial Sequence: Synthetic oligonucleotide
uccauaucgaguggguggu

SEQ ID NO: 150818 - RNA, 19 nt, Artificial Sequence
  Description of Artificial Sequence: Synthetic oligonucleotide
acggaagacuuuaucuagg

SEQ ID NO: 150819 - RNA, 19 nt, Artificial Sequence
  Description of Artificial Sequence: Synthetic oligonucleotide
uucuccgcuuguaaguuuu

SEQ ID NO: 150820 - RNA, 19 nt, Artificial Sequence
  Description of Artificial Sequence: Synthetic oligonucleotide
auguuaaccuuguucucau

SEQ ID NO: 150821 - RNA, 19 nt, Artificial Sequence
  Description of Artificial Sequence: Synthetic oligonucleotide
ccagguuacaucuagugga

SEQ ID NO: 150822 - RNA, 19 nt, Artificial Sequence
  Description of Artificial Sequence: Synthetic oligonucleotide
uuuguguccgagacacguc

SEQ ID NO: 150823 - RNA, 19 nt, Artificial Sequence
  Description of Artificial Sequence: Synthetic oligonucleotide
gaaagaggucucccaggug

SEQ ID NO: 150824 - RNA, 19 nt, Artificial Sequence
  Description of Artificial Sequence: Synthetic oligonucleotide
cuaugucgggaaucucagg

SEQ ID NO: 150825 - RNA, 19 nt, Artificial Sequence
  Description of Artificial Sequence: Synthetic oligonucleotide
acacucuaaccgauucacc

SEQ ID NO: 150826 - RNA, 19 nt, Artificial Sequence
  Description of Artificial Sequence: Synthetic oligonucleotide
aaccuuguucucauccgug

SEQ ID NO: 150827 - RNA, 19 nt, Artificial Sequence
  Description of Artificial Sequence: Synthetic oligonucleotide
cgaugugccgauuucagcc

SEQ ID NO: 150828 - RNA, 19 nt, Artificial Sequence
  Description of Artificial Sequence: Synthetic oligonucleotide
aucgagugggugguggcac

SEQ ID NO: 150829 - RNA, 19 nt, Artificial Sequence
  Description of Artificial Sequence: Synthetic oligonucleotide
ucgggaaucucagguguag

SEQ ID NO: 150830 - RNA, 19 nt, Artificial Sequence
  Description of Artificial Sequence: Synthetic oligonucleotide
aaacucccgagggucaaca

SEQ ID NO: 150831 - RNA, 19 nt, Artificial Sequence
  Description of Artificial Sequence: Synthetic oligonucleotide
ucuaaccgauucaccugug

SEQ ID NO: 150832 - RNA, 19 nt, Artificial Sequence
  Description of Artificial Sequence: Synthetic oligonucleotide
ggauuuuguguauucgguc

SEQ ID NO: 150833 - RNA, 19 nt, Artificial Sequence
  Description of Artificial Sequence: Synthetic oligonucleotide
agcggguaguccugaggac

SEQ ID NO: 150834 - RNA, 19 nt, Artificial Sequence
  Description of Artificial Sequence: Synthetic oligonucleotide
cucucuuaugccuaguggu

SEQ ID NO: 150835 - RNA, 19 nt, Artificial Sequence
  Description of Artificial Sequence: Synthetic oligonucleotide
agagaggcgccccugggaa

SEQ ID NO: 150836 - RNA, 19 nt, Artificial Sequence
  Description of Artificial Sequence: Synthetic oligonucleotide
ucucuucgacugagugugg

SEQ ID NO: 150837 - RNA, 19 nt, Artificial Sequence
  Description of Artificial Sequence: Synthetic oligonucleotide
caacuggcacacacuagac

SEQ ID NO: 150838 - RNA, 19 nt, Artificial Sequence
  Description of Artificial Sequence: Synthetic oligonucleotide
uaguggacauugacgcgcu

SEQ ID NO: 150839 - RNA, 19 nt, Artificial Sequence
  Description of Artificial Sequence: Synthetic oligonucleotide
uucgacugaguguggcaga

SEQ ID NO: 150840 - RNA, 19 nt, Artificial Sequence
  Description of Artificial Sequence: Synthetic oligonucleotide
cacucuaaccgauucaccu

SEQ ID NO: 150841 - RNA, 19 nt, Artificial Sequence
  Description of Artificial Sequence: Synthetic oligonucleotide
aggcccaaaaggcccgauc

SEQ ID NO: 150842 - RNA, 19 nt, Artificial Sequence
  Description of Artificial Sequence: Synthetic oligonucleotide
gggaugggccaaaagaacc

SEQ ID NO: 150843 - RNA, 19 nt, Artificial Sequence
  Description of Artificial Sequence: Synthetic oligonucleotide
acgaguuuguugauccuug

SEQ ID NO: 150844 - RNA, 19 nt, Artificial Sequence
  Description of Artificial Sequence: Synthetic oligonucleotide
  modified_base (4)..(4): a, c, u, g, unknown or other
cccnggaaucucaaguccc

SEQ ID NO: 150845 - RNA, 19 nt, Artificial Sequence
  Description of Artificial Sequence: Synthetic oligonucleotide
uugugguaagcuguccuuc

SEQ ID NO: 150846 - RNA, 19 nt, Artificial Sequence
  Description of Artificial Sequence: Synthetic oligonucleotide
aggcagaucccguuuccca

SEQ ID NO: 150847 - RNA, 19 nt, Artificial Sequence
  Description of Artificial Sequence: Synthetic oligonucleotide
agguguugacuagugccuc

SEQ ID NO: 150848 - RNA, 19 nt, Artificial Sequence
  Description of Artificial Sequence: Synthetic oligonucleotide
gcguaacagucuuugagac

SEQ ID NO: 150849 - RNA, 19 nt, Artificial Sequence
  Description of Artificial Sequence: Synthetic oligonucleotide
uccagaguauugguaccug

SEQ ID NO: 150850 - RNA, 19 nt, Artificial Sequence
  Description of Artificial Sequence: Synthetic oligonucleotide
uuuuagcguaacagucuuu

SEQ ID NO: 150851 - RNA, 19 nt, Artificial Sequence
  Description of Artificial Sequence: Synthetic oligonucleotide
uuaugaucacagguucauc

SEQ ID NO: 150852 - RNA, 19 nt, Artificial Sequence
  Description of Artificial Sequence: Synthetic oligonucleotide
gagguaaaugccuguccaa

SEQ ID NO: 150853 - RNA, 19 nt, Artificial Sequence
  Description of Artificial Sequence: Synthetic oligonucleotide
agguaaaugccuguccaau

SEQ ID NO: 150854 - RNA, 19 nt, Artificial Sequence
  Description of Artificial Sequence: Synthetic oligonucleotide
auggacaucgaaguacuuu

SEQ ID NO: 150855 - RNA, 19 nt, Artificial Sequence
  Description of Artificial Sequence: Synthetic oligonucleotide
ugucccgaugugccgauuu

SEQ ID NO: 150856 - RNA, 19 nt, Artificial Sequence
  Description of Artificial Sequence: Synthetic oligonucleotide
ggcagaucccguuucccag

SEQ ID NO: 150857 - RNA, 19 nt, Artificial Sequence
  Description of Artificial Sequence: Synthetic oligonucleotide
gcgaguuucggucaccuuc

SEQ ID NO: 150858 - RNA, 19 nt, Artificial Sequence
  Description of Artificial Sequence: Synthetic oligonucleotide
cuuguacgucauccaacac

SEQ ID NO: 150859 - RNA, 19 nt, Artificial Sequence
  Description of Artificial Sequence: Synthetic oligonucleotide
ugcagcgaguuucggucac

SEQ ID NO: 150860 - RNA, 19 nt, Artificial Sequence
  Description of Artificial Sequence: Synthetic oligonucleotide
gacgagguaaaugccuguc

SEQ ID NO: 150861 - RNA, 19 nt, Artificial Sequence
  Description of Artificial Sequence: Synthetic oligonucleotide
ucuccgcuuguaaguuuug

SEQ ID NO: 150862 - RNA, 19 nt, Artificial Sequence
  Description of Artificial Sequence: Synthetic oligonucleotide
accgaggacgagguaaaug

SEQ ID NO: 150863 - RNA, 19 nt, Artificial Sequence
  Description of Artificial Sequence: Synthetic oligonucleotide
uccuugaguuacacguuuu

SEQ ID NO: 150864 - RNA, 19 nt, Artificial Sequence
  Description of Artificial Sequence: Synthetic oligonucleotide
caauucuccgcuuguaagu

SEQ ID NO: 150865 - RNA, 19 nt, Artificial Sequence
  Description of Artificial Sequence: Synthetic oligonucleotide
cucuucgacugaguguggc

SEQ ID NO: 150866 - RNA, 19 nt, Artificial Sequence
  Description of Artificial Sequence: Synthetic oligonucleotide
uugacgcgcuuaucuuaag

SEQ ID NO: 150867 - RNA, 19 nt, Artificial Sequence
  Description of Artificial Sequence: Synthetic oligonucleotide
auugacgcgcuuaucuuaa

SEQ ID NO: 150868 - RNA, 19 nt, Artificial Sequence
  Description of Artificial Sequence: Synthetic oligonucleotide
accgauucaccugugugau

SEQ ID NO: 150869 - RNA, 19 nt, Artificial Sequence
  Description of Artificial Sequence: Synthetic oligonucleotide
cgauucaccugugugaugc

SEQ ID NO: 150870 - RNA, 19 nt, Artificial Sequence
  Description of Artificial Sequence: Synthetic oligonucleotide
guuuguguccgagacacgu

SEQ ID NO: 150871 - RNA, 19 nt, Artificial Sequence
  Description of Artificial Sequence: Synthetic oligonucleotide
cagcggguaguccugagga

SEQ ID NO: 150872 - RNA, 19 nt, Artificial Sequence
  Description of Artificial Sequence: Synthetic oligonucleotide
aacuggccgaggcccaaaa

SEQ ID NO: 150873 - RNA, 19 nt, Artificial Sequence
  Description of Artificial Sequence: Synthetic oligonucleotide
ucccgaugugccgauuuca

SEQ ID NO: 150874 - RNA, 19 nt, Artificial Sequence
  Description of Artificial Sequence: Synthetic oligonucleotide
ugggcaagucuucccucac

SEQ ID NO: 150875 - RNA, 19 nt, Artificial Sequence
  Description of Artificial Sequence: Synthetic oligonucleotide
gguuuugggcgaucaggcc

SEQ ID NO: 150876 - RNA, 19 nt, Artificial Sequence
  Description of Artificial Sequence: Synthetic oligonucleotide
uccggaagccgaacacuaa

SEQ ID NO: 150877 - RNA, 19 nt, Artificial Sequence
  Description of Artificial Sequence: Synthetic oligonucleotide
gacgcgcuuaucuuaaguu

SEQ ID NO: 150878 - RNA, 19 nt, Artificial Sequence
  Description of Artificial Sequence: Synthetic oligonucleotide
cauugacgcgcuuaucuua

SEQ ID NO: 150879 - RNA, 19 nt, Artificial Sequence
  Description of Artificial Sequence: Synthetic oligonucleotide
aaacgggcaccaggaauaa

SEQ ID NO: 150880 - RNA, 19 nt, Artificial Sequence
  Description of Artificial Sequence: Synthetic oligonucleotide
gauagaggucaaacaaagu

SEQ ID NO: 150881 - RNA, 19 nt, Artificial Sequence
  Description of Artificial Sequence: Synthetic oligonucleotide
cuuaugccuagugguggac

SEQ ID NO: 150882 - RNA, 19 nt, Artificial Sequence
  Description of Artificial Sequence: Synthetic oligonucleotide
gagcacuaugucgggaauc

SEQ ID NO: 150883 - RNA, 19 nt, Artificial Sequence
  Description of Artificial Sequence: Synthetic oligonucleotide
caagucccaagguguugac

SEQ ID NO: 150884 - RNA, 19 nt, Artificial Sequence
  Description of Artificial Sequence: Synthetic oligonucleotide
cucuaaccgauucaccugu

SEQ ID NO: 150885 - RNA, 19 nt, Artificial Sequence
  Description of Artificial Sequence: Synthetic oligonucleotide
cgaguuucggucaccuucc

SEQ ID NO: 150886 - RNA, 19 nt, Artificial Sequence
  Description of Artificial Sequence: Synthetic oligonucleotide
gguuacaucuaguggacau

SEQ ID NO: 150887 - RNA, 19 nt, Artificial Sequence
  Description of Artificial Sequence: Synthetic oligonucleotide
cacauucacuucuaggcau

SEQ ID NO: 150888 - RNA, 19 nt, Artificial Sequence
  Description of Artificial Sequence: Synthetic oligonucleotide
cugguugcagguugaucca

SEQ ID NO: 150889 - RNA, 19 nt, Artificial Sequence
  Description of Artificial Sequence: Synthetic oligonucleotide
auucuccgcuuguaaguuu

SEQ ID NO: 150890 - RNA, 19 nt, Artificial Sequence
  Description of Artificial Sequence: Synthetic oligonucleotide
  modified_base (5)..(5): a, c, u, g, unknown or other
ccccnggaaucucaagucc

SEQ ID NO: 150891 - RNA, 19 nt, Artificial Sequence
  Description of Artificial Sequence: Synthetic oligonucleotide
ucgucacagguugauccaa

SEQ ID NO: 150892 - RNA, 19 nt, Artificial Sequence
  Description of Artificial Sequence: Synthetic oligonucleotide
uguccgagacacguccauc

SEQ ID NO: 150893 - RNA, 19 nt, Artificial Sequence
  Description of Artificial Sequence: Synthetic oligonucleotide
gguuuuaugaucacagguu

SEQ ID NO: 150894 - RNA, 19 nt, Artificial Sequence
  Description of Artificial Sequence: Synthetic oligonucleotide
ccggaagccgaacacuaag

SEQ ID NO: 150895 - RNA, 19 nt, Artificial Sequence
  Description of Artificial Sequence: Synthetic oligonucleotide
gcucuguaucaacuggcac

SEQ ID NO: 150896 - RNA, 19 nt, Artificial Sequence
  Description of Artificial Sequence: Synthetic oligonucleotide
ucccguuucccaggcagaa

SEQ ID NO: 150897 - RNA, 19 nt, Artificial Sequence
  Description of Artificial Sequence: Synthetic oligonucleotide
agguuacaucuaguggaca

SEQ ID NO: 150898 - RNA, 19 nt, Artificial Sequence
  Description of Artificial Sequence: Synthetic oligonucleotide
ugccuuaaguuggcagccu

SEQ ID NO: 150899 - RNA, 19 nt, Artificial Sequence
  Description of Artificial Sequence: Synthetic oligonucleotide
caucaacuagacacaggua

SEQ ID NO: 150900 - RNA, 19 nt, Artificial Sequence
  Description of Artificial Sequence: Synthetic oligonucleotide
gcggguaguccugaggacc

SEQ ID NO: 150901 - RNA, 19 nt, Artificial Sequence
  Description of Artificial Sequence: Synthetic oligonucleotide
cgaacacuaagaucuucug

SEQ ID NO: 150902 - RNA, 19 nt, Artificial Sequence
  Description of Artificial Sequence: Synthetic oligonucleotide
ugguugcagguugauccaa

SEQ ID NO: 150903 - RNA, 19 nt, Artificial Sequence
  Description of Artificial Sequence: Synthetic oligonucleotide
ggcacacacuagaccaagg

SEQ ID NO: 150904 - RNA, 19 nt, Artificial Sequence
  Description of Artificial Sequence: Synthetic oligonucleotide
acauuuagcuuaagaucuu

SEQ ID NO: 150905 - RNA, 19 nt, Artificial Sequence
  Description of Artificial Sequence: Synthetic oligonucleotide
cuccggaagccgaacacua

SEQ ID NO: 150906 - RNA, 19 nt, Artificial Sequence
  Description of Artificial Sequence: Synthetic oligonucleotide
ggggaugggccaaaagaac

SEQ ID NO: 150907 - RNA, 19 nt, Artificial Sequence
  Description of Artificial Sequence: Synthetic oligonucleotide
aggcccgaucaguggagga

SEQ ID NO: 150908 - RNA, 19 nt, Artificial Sequence
  Description of Artificial Sequence: Synthetic oligonucleotide
ccgaugugccgauuucagc

SEQ ID NO: 150909 - RNA, 19 nt, Artificial Sequence
  Description of Artificial Sequence: Synthetic oligonucleotide
acccggaggucuaaauggu

SEQ ID NO: 150910 - RNA, 19 nt, Artificial Sequence
  Description of Artificial Sequence: Synthetic oligonucleotide
guugcuccggaagccgaac

SEQ ID NO: 150911 - RNA, 19 nt, Artificial Sequence
  Description of Artificial Sequence: Synthetic oligonucleotide
gucccgaugugccgauuuc

SEQ ID NO: 150912 - RNA, 19 nt, Artificial Sequence
  Description of Artificial Sequence: Synthetic oligonucleotide
ggcccgaucaguggaggag

SEQ ID NO: 150913 - RNA, 19 nt, Artificial Sequence
  Description of Artificial Sequence: Synthetic oligonucleotide
agaucccguuucccaggca

SEQ ID NO: 150914 - RNA, 19 nt, Artificial Sequence
  Description of Artificial Sequence: Synthetic oligonucleotide
uuguggcagcggguagucc

SEQ ID NO: 150915 - RNA, 19 nt, Artificial Sequence
  Description of Artificial Sequence: Synthetic oligonucleotide
cuggcacacacuagaccaa

SEQ ID NO: 150916 - RNA, 19 nt, Artificial Sequence
  Description of Artificial Sequence: Synthetic oligonucleotide
gaugggccaaaagaaccau

SEQ ID NO: 150917 - RNA, 19 nt, Artificial Sequence
  Description of Artificial Sequence: Synthetic oligonucleotide
gccuuaaguuggcagccuc

SEQ ID NO: 150918 - RNA, 19 nt, Artificial Sequence
  Description of Artificial Sequence: Synthetic oligonucleotide
cgagguaaaugccugucca

SEQ ID NO: 150919 - RNA, 19 nt, Artificial Sequence
  Description of Artificial Sequence: Synthetic oligonucleotide
cgagacacguccaucaucu

SEQ ID NO: 150920 - RNA, 19 nt, Artificial Sequence
  Description of Artificial Sequence: Synthetic oligonucleotide
ggucuaaauggugcauguc

SEQ ID NO: 150921 - RNA, 19 nt, Artificial Sequence
  Description of Artificial Sequence: Synthetic oligonucleotide
ugccgauuucagccuuauu

SEQ ID NO: 150922 - RNA, 19 nt, Artificial Sequence
  Description of Artificial Sequence: Synthetic oligonucleotide
ccgaggcccaaaaggcccg

SEQ ID NO: 150923 - RNA, 19 nt, Artificial Sequence
  Description of Artificial Sequence: Synthetic oligonucleotide
ccugacaaauagaucagau

SEQ ID NO: 150924 - RNA, 19 nt, Artificial Sequence
  Description of Artificial Sequence: Synthetic oligonucleotide
augccuagugguggaccca

SEQ ID NO: 150925 - RNA, 19 nt, Artificial Sequence
  Description of Artificial Sequence: Synthetic oligonucleotide
gauggccaccgaggacgag

SEQ ID NO: 150926 - RNA, 19 nt, Artificial Sequence
  Description of Artificial Sequence: Synthetic oligonucleotide
ccgcuuguaaguuuugacu

SEQ ID NO: 150927 - RNA, 19 nt, Artificial Sequence
  Description of Artificial Sequence: Synthetic oligonucleotide
caacuagacacagguauuu

SEQ ID NO: 150928 - RNA, 19 nt, Artificial Sequence
  Description of Artificial Sequence: Synthetic oligonucleotide
aucccguuucccaggcaga

SEQ ID NO: 150929 - RNA, 19 nt, Artificial Sequence
  Description of Artificial Sequence: Synthetic oligonucleotide
cccggaggucuaaauggug

SEQ ID NO: 150930 - RNA, 19 nt, Artificial Sequence
  Description of Artificial Sequence: Synthetic oligonucleotide
augggccaaaagaaccauu

SEQ ID NO: 150931 - RNA, 19 nt, Artificial Sequence
  Description of Artificial Sequence: Synthetic oligonucleotide
guuuugccgcucauacucu

SEQ ID NO: 150932 - RNA, 19 nt, Artificial Sequence
  Description of Artificial Sequence: Synthetic oligonucleotide
gaccucuucggggaggauu

SEQ ID NO: 150933 - RNA, 19 nt, Artificial Sequence
  Description of Artificial Sequence: Synthetic oligonucleotide
ccgagacacguccaucauc

SEQ ID NO: 150934 - RNA, 19 nt, Artificial Sequence
  Description of Artificial Sequence: Synthetic oligonucleotide
gcgccccugggaauggagg

SEQ ID NO: 150935 - RNA, 19 nt, Artificial Sequence
  Description of Artificial Sequence: Synthetic oligonucleotide
ggacccaugccuggaacaa

SEQ ID NO: 150936 - RNA, 19 nt, Artificial Sequence
  Description of Artificial Sequence: Synthetic oligonucleotide
gccgaacacuaagaucuuc

SEQ ID NO: 150937 - RNA, 19 nt, Artificial Sequence
  Description of Artificial Sequence: Synthetic oligonucleotide
cugggcccucuugauuguc

SEQ ID NO: 150938 - RNA, 19 nt, Artificial Sequence
  Description of Artificial Sequence: Synthetic oligonucleotide
gucgggaaucucaggugua

SEQ ID NO: 150939 - RNA, 19 nt, Artificial Sequence
  Description of Artificial Sequence: Synthetic oligonucleotide
cgcgcuuaucuuaaguugu

SEQ ID NO: 150940 - RNA, 19 nt, Artificial Sequence
  Description of Artificial Sequence: Synthetic oligonucleotide
ggacauugacgcgcuuauc

SEQ ID NO: 150941 - RNA, 19 nt, Artificial Sequence
  Description of Artificial Sequence: Synthetic oligonucleotide
caacaggcagaucccguuu

SEQ ID NO: 150942 - RNA, 19 nt, Artificial Sequence
  Description of Artificial Sequence: Synthetic oligonucleotide
ccgauucaccugugugaug

SEQ ID NO: 150943 - RNA, 19 nt, Artificial Sequence
  Description of Artificial Sequence: Synthetic oligonucleotide
gguuguggcagcggguagu

SEQ ID NO: 150944 - RNA, 19 nt, Artificial Sequence
  Description of Artificial Sequence: Synthetic oligonucleotide
ccgggaguugcuguucauc

SEQ ID NO: 150945 - RNA, 19 nt, Artificial Sequence
  Description of Artificial Sequence: Synthetic oligonucleotide
gagaggcgccccugggaau

SEQ ID NO: 150946 - RNA, 19 nt, Artificial Sequence
  Description of Artificial Sequence: Synthetic oligonucleotide
ccgaucaguggaggaggug

SEQ ID NO: 150947 - RNA, 19 nt, Artificial Sequence
  Description of Artificial Sequence: Synthetic oligonucleotide
gcgcuuaucuuaaguugua

SEQ ID NO: 150948 - RNA, 19 nt, Artificial Sequence
  Description of Artificial Sequence: Synthetic oligonucleotide
ccauaucgaguggguggug

SEQ ID NO: 150949 - RNA, 19 nt, Artificial Sequence
  Description of Artificial Sequence: Synthetic oligonucleotide
cgcuuaucuuaaguuguaa

SEQ ID NO: 150950 - RNA, 19 nt, Artificial Sequence
  Description of Artificial Sequence: Synthetic oligonucleotide
cacgagcuuugagccaguu

SEQ ID NO: 150951 - RNA, 19 nt, Artificial Sequence
  Description of Artificial Sequence: Synthetic oligonucleotide
caccgaggacgagguaaau

SEQ ID NO: 150952 - RNA, 19 nt, Artificial Sequence
  Description of Artificial Sequence: Synthetic oligonucleotide
cggggaggauuuuguguau

SEQ ID NO: 150953 - RNA, 19 nt, Artificial Sequence
  Description of Artificial Sequence: Synthetic oligonucleotide
cugucccgaugugccgauu

SEQ ID NO: 150954 - RNA, 19 nt, Artificial Sequence
  Description of Artificial Sequence: Synthetic oligonucleotide
aaauuuucguuccagaucc

SEQ ID NO: 150955 - RNA, 19 nt, Artificial Sequence
  Description of Artificial Sequence: Synthetic oligonucleotide
uguaguuuggucaugagag

SEQ ID NO: 150956 - RNA, 19 nt, Artificial Sequence
  Description of Artificial Sequence: Synthetic oligonucleotide
ucuacgacaaaauugacca

SEQ ID NO: 150957 - RNA, 19 nt, Artificial Sequence
  Description of Artificial Sequence: Synthetic oligonucleotide
cacauugucacccagaggg

SEQ ID NO: 150958 - RNA, 19 nt, Artificial Sequence
  Description of Artificial Sequence: Synthetic oligonucleotide
uguuuuauacauuaaaguc

SEQ ID NO: 150959 - RNA, 19 nt, Artificial Sequence
  Description of Artificial Sequence: Synthetic oligonucleotide
uguuguuucauuaggaaca

SEQ ID NO: 150960 - RNA, 19 nt, Artificial Sequence
  Description of Artificial Sequence: Synthetic oligonucleotide
gacacuucgcuuaagaucg

SEQ ID NO: 150961 - RNA, 19 nt, Artificial Sequence
  Description of Artificial Sequence: Synthetic oligonucleotide
uuaagaucgaagaccauag

SEQ ID NO: 150962 - RNA, 19 nt, Artificial Sequence
  Description of Artificial Sequence: Synthetic oligonucleotide
uuuaaagguaggaucaggc

SEQ ID NO: 150963 - RNA, 19 nt, Artificial Sequence
  Description of Artificial Sequence: Synthetic oligonucleotide
uuaguuugaacaacaaaug

SEQ ID NO: 150964 - RNA, 19 nt, Artificial Sequence
  Description of Artificial Sequence: Synthetic oligonucleotide
uguaaaguaaugacauuag

SEQ ID NO: 150965 - RNA, 19 nt, Artificial Sequence
  Description of Artificial Sequence: Synthetic oligonucleotide
ugugacaugaugaugugca

SEQ ID NO: 150966 - RNA, 19 nt, Artificial Sequence
  Description of Artificial Sequence: Synthetic oligonucleotide
ugcuaugucauguagaaaa

SEQ ID NO: 150967 - RNA, 19 nt, Artificial Sequence
  Description of Artificial Sequence: Synthetic oligonucleotide
agguuauauaugcauagac

SEQ ID NO: 150968 - RNA, 19 nt, Artificial Sequence
  Description of Artificial Sequence: Synthetic oligonucleotide
ucuaaaauccacacauugc

SEQ ID NO: 150969 - RNA, 19 nt, Artificial Sequence
  Description of Artificial Sequence: Synthetic oligonucleotide
uccagcacuacauuagugg

SEQ ID NO: 150970 - RNA, 19 nt, Artificial Sequence
  Description of Artificial Sequence: Synthetic oligonucleotide
uaauuaaccagaaugcaau

SEQ ID NO: 150971 - RNA, 19 nt, Artificial Sequence
  Description of Artificial Sequence: Synthetic oligonucleotide
cuugucauaaacuagaugu

SEQ ID NO: 150972 - RNA, 19 nt, Artificial Sequence
  Description of Artificial Sequence: Synthetic oligonucleotide
agcuaauuaaccagaaugc

SEQ ID NO: 150973 - RNA, 19 nt, Artificial Sequence
  Description of Artificial Sequence: Synthetic oligonucleotide
accuuaucuccucaaaccc

SEQ ID NO: 150974 - RNA, 19 nt, Artificial Sequence
  Description of Artificial Sequence: Synthetic oligonucleotide
ugcauguaaaguaaugaca

SEQ ID NO: 150975 - RNA, 19 nt, Artificial Sequence
  Description of Artificial Sequence: Synthetic oligonucleotide
augcauguaaaguaaugac

SEQ ID NO: 150976 - RNA, 19 nt, Artificial Sequence
  Description of Artificial Sequence: Synthetic oligonucleotide
uuauauagcacguugccau

SEQ ID NO: 150977 - RNA, 19 nt, Artificial Sequence
  Description of Artificial Sequence: Synthetic oligonucleotide
uuaaccagaaugcaaugac

SEQ ID NO: 150978 - RNA, 19 nt, Artificial Sequence
  Description of Artificial Sequence: Synthetic oligonucleotide
uaugucauguagaaaacuc

SEQ ID NO: 150979 - RNA, 19 nt, Artificial Sequence
  Description of Artificial Sequence: Synthetic oligonucleotide
ucuauuugacauaugcacu

SEQ ID NO: 150980 - RNA, 19 nt, Artificial Sequence
  Description of Artificial Sequence: Synthetic oligonucleotide
ugagagaucaaucacccau

SEQ ID NO: 150981 - RNA, 19 nt, Artificial Sequence
  Description of Artificial Sequence: Synthetic oligonucleotide
augugcaugaauaugcccc

SEQ ID NO: 150982 - RNA, 19 nt, Artificial Sequence
  Description of Artificial Sequence: Synthetic oligonucleotide
uaaauuuucguuccagauc

SEQ ID NO: 150983 - RNA, 19 nt, Artificial Sequence
  Description of Artificial Sequence: Synthetic oligonucleotide
uaaagcgcucacuuguugg

SEQ ID NO: 150984 - RNA, 19 nt, Artificial Sequence
  Description of Artificial Sequence: Synthetic oligonucleotide
uuucgagucauucuaucca

SEQ ID NO: 150985 - RNA, 19 nt, Artificial Sequence
  Description of Artificial Sequence: Synthetic oligonucleotide
auagacccagcauuucucc

SEQ ID NO: 150986 - RNA, 19 nt, Artificial Sequence
  Description of Artificial Sequence: Synthetic oligonucleotide
cucacguaaaacacuagcc

SEQ ID NO: 150987 - RNA, 19 nt, Artificial Sequence
  Description of Artificial Sequence: Synthetic oligonucleotide
acuaggagcauccaagugu

SEQ ID NO: 150988 - RNA, 19 nt, Artificial Sequence
  Description of Artificial Sequence: Synthetic oligonucleotide
guuuuauacauuaaaguca

SEQ ID NO: 150989 - RNA, 19 nt, Artificial Sequence
  Description of Artificial Sequence: Synthetic oligonucleotide
uaaacuagauguuaacuua

SEQ ID NO: 150990 - RNA, 19 nt, Artificial Sequence
  Description of Artificial Sequence: Synthetic oligonucleotide
acaacuaaggcagguaugg

SEQ ID NO: 150991 - RNA, 19 nt, Artificial Sequence
  Description of Artificial Sequence: Synthetic oligonucleotide
uaccuuaucuccucaaacc

SEQ ID NO: 150992 - RNA, 19 nt, Artificial Sequence
  Description of Artificial Sequence: Synthetic oligonucleotide
uacauuagugguuagucaa

SEQ ID NO: 150993 - RNA, 19 nt, Artificial Sequence
  Description of Artificial Sequence: Synthetic oligonucleotide
uucuccgaacaccagaaug

SEQ ID NO: 150994 - RNA, 19 nt, Artificial Sequence
  Description of Artificial Sequence: Synthetic oligonucleotide
guacaagcuaauuaaccag

SEQ ID NO: 150995 - RNA, 19 nt, Artificial Sequence
  Description of Artificial Sequence: Synthetic oligonucleotide
uuaugagucagcacauugu

SEQ ID NO: 150996 - RNA, 19 nt, Artificial Sequence
  Description of Artificial Sequence: Synthetic oligonucleotide
gacccuuacaaaaugacac

SEQ ID NO: 150997 - RNA, 19 nt, Artificial Sequence
  Description of Artificial Sequence: Synthetic oligonucleotide
uuguaguuuggucaugaga

SEQ ID NO: 150998 - RNA, 19 nt, Artificial Sequence
  Description of Artificial Sequence: Synthetic oligonucleotide
cucuucgcugguuaggucg

SEQ ID NO: 150999 - RNA, 19 nt, Artificial Sequence
  Description of Artificial Sequence: Synthetic oligonucleotide
uuagacccuuacaaaauga

SEQ ID NO: 151000 - RNA, 19 nt, Artificial Sequence
  Description of Artificial Sequence: Synthetic oligonucleotide
uuaccuuaucuccucaaac

SEQ ID NO: 151001 - RNA, 19 nt, Artificial Sequence
  Description of Artificial Sequence: Synthetic oligonucleotide
uacgacaaaauugaccagc

SEQ ID NO: 151002 - RNA, 19 nt, Artificial Sequence
  Description of Artificial Sequence: Synthetic oligonucleotide
uaagucuuaaaauccuggu

SEQ ID NO: 151003 - RNA, 19 nt, Artificial Sequence
  Description of Artificial Sequence: Synthetic oligonucleotide
aagccuguaaucauguucu

SEQ ID NO: 151004 - RNA, 19 nt, Artificial Sequence
  Description of Artificial Sequence: Synthetic oligonucleotide
cuuucgagucauucuaucc

SEQ ID NO: 151005 - RNA, 19 nt, Artificial Sequence
  Description of Artificial Sequence: Synthetic oligonucleotide
aaggacaaaaggacauggc

SEQ ID NO: 151006 - RNA, 19 nt, Artificial Sequence
  Description of Artificial Sequence: Synthetic oligonucleotide
auguaaagcgcucacuugu

SEQ ID NO: 151007 - RNA, 19 nt, Artificial Sequence
  Description of Artificial Sequence: Synthetic oligonucleotide
uuaaagguaggaucaggcu

SEQ ID NO: 151008 - RNA, 19 nt, Artificial Sequence
  Description of Artificial Sequence: Synthetic oligonucleotide
uguuaacuuauguccagca

SEQ ID NO: 151009 - RNA, 19 nt, Artificial Sequence
  Description of Artificial Sequence: Synthetic oligonucleotide
ucuccaucuaaaauccaca

SEQ ID NO: 151010 - RNA, 19 nt, Artificial Sequence
  Description of Artificial Sequence: Synthetic oligonucleotide
uaugguaaaaugagagauc

SEQ ID NO: 151011 - RNA, 19 nt, Artificial Sequence
  Description of Artificial Sequence: Synthetic oligonucleotide
gacacgacaguugaggagc

SEQ ID NO: 151012 - RNA, 19 nt, Artificial Sequence
  Description of Artificial Sequence: Synthetic oligonucleotide
uuuauauagcacguugcca

SEQ ID NO: 151013 - RNA, 19 nt, Artificial Sequence
  Description of Artificial Sequence: Synthetic oligonucleotide
uucgcuuaagaucgaagac

SEQ ID NO: 151014 - RNA, 19 nt, Artificial Sequence
  Description of Artificial Sequence: Synthetic oligonucleotide
aacuccacugacgugaacu

SEQ ID NO: 151015 - RNA, 19 nt, Artificial Sequence
  Description of Artificial Sequence: Synthetic oligonucleotide
auuagugguuagucaaguc

SEQ ID NO: 151016 - RNA, 19 nt, Artificial Sequence
  Description of Artificial Sequence: Synthetic oligonucleotide
uauaugcauagacccagca

SEQ ID NO: 151017 - RNA, 19 nt, Artificial Sequence
  Description of Artificial Sequence: Synthetic oligonucleotide
uucgagucauucuauccag

SEQ ID NO: 151018 - RNA, 19 nt, Artificial Sequence
  Description of Artificial Sequence: Synthetic oligonucleotide
aucgugugugaucaucucg

SEQ ID NO: 151019 - RNA, 19 nt, Artificial Sequence
  Description of Artificial Sequence: Synthetic oligonucleotide
uaugguaaaguggaagcca

SEQ ID NO: 151020 - RNA, 19 nt, Artificial Sequence
  Description of Artificial Sequence: Synthetic oligonucleotide
cucauuuugcccuggcugc

SEQ ID NO: 151021 - RNA, 19 nt, Artificial Sequence
  Description of Artificial Sequence: Synthetic oligonucleotide
gaugaugugcaugaauaug

SEQ ID NO: 151022 - RNA, 19 nt, Artificial Sequence
  Description of Artificial Sequence: Synthetic oligonucleotide
ucgcuuaagaucgaagacc

SEQ ID NO: 151023 - RNA, 19 nt, Artificial Sequence
  Description of Artificial Sequence: Synthetic oligonucleotide
cuauuaguuggccagccug

SEQ ID NO: 151024 - RNA, 19 nt, Artificial Sequence
  Description of Artificial Sequence: Synthetic oligonucleotide
acccuuacaaaaugacacg

SEQ ID NO: 151025 - RNA, 19 nt, Artificial Sequence
  Description of Artificial Sequence: Synthetic oligonucleotide
uauuaguuggccagccugu

SEQ ID NO: 151026 - RNA, 19 nt, Artificial Sequence
  Description of Artificial Sequence: Synthetic oligonucleotide
aaaaccggcacaagaaaca

SEQ ID NO: 151027 - RNA, 19 nt, Artificial Sequence
  Description of Artificial Sequence: Synthetic oligonucleotide
uccacugacgugaacugug

SEQ ID NO: 151028 - RNA, 19 nt, Artificial Sequence
  Description of Artificial Sequence: Synthetic oligonucleotide
uaacuuauguccagcacua

SEQ ID NO: 151029 - RNA, 19 nt, Artificial Sequence
  Description of Artificial Sequence: Synthetic oligonucleotide
aaaccauucucagaaugcu

SEQ ID NO: 151030 - RNA, 19 nt, Artificial Sequence
  Description of Artificial Sequence: Synthetic oligonucleotide
ucgaagaccauagacucug

SEQ ID NO: 151031 - RNA, 19 nt, Artificial Sequence
  Description of Artificial Sequence: Synthetic oligonucleotide
ugguaugcauguaaaguaa

SEQ ID NO: 151032 - RNA, 19 nt, Artificial Sequence
  Description of Artificial Sequence: Synthetic oligonucleotide
ugugcucacguaaaacacu

SEQ ID NO: 151033 - RNA, 19 nt, Artificial Sequence
  Description of Artificial Sequence: Synthetic oligonucleotide
ucuuucguuaucccagccu

SEQ ID NO: 151034 - RNA, 19 nt, Artificial Sequence
  Description of Artificial Sequence: Synthetic oligonucleotide
aauaccccuucacuugcug

SEQ ID NO: 151035 - RNA, 19 nt, Artificial Sequence
  Description of Artificial Sequence: Synthetic oligonucleotide
auguuaacuuauguccagc

SEQ ID NO: 151036 - RNA, 19 nt, Artificial Sequence
  Description of Artificial Sequence: Synthetic oligonucleotide
auuagggacauuaugccga

SEQ ID NO: 151037 - RNA, 19 nt, Artificial Sequence
  Description of Artificial Sequence: Synthetic oligonucleotide
aauuaccuuaucuccucaa

SEQ ID NO: 151038 - RNA, 19 nt, Artificial Sequence
  Description of Artificial Sequence: Synthetic oligonucleotide
agaucgaagaccauagacu

SEQ ID NO: 151039 - RNA, 19 nt, Artificial Sequence
  Description of Artificial Sequence: Synthetic oligonucleotide
guaaaaugagagaucaauc

SEQ ID NO: 151040 - RNA, 19 nt, Artificial Sequence
  Description of Artificial Sequence: Synthetic oligonucleotide
acgguuguaaaauuuucau

SEQ ID NO: 151041 - RNA, 19 nt, Artificial Sequence
  Description of Artificial Sequence: Synthetic oligonucleotide
cuucgcuuaagaucgaaga

SEQ ID NO: 151042 - RNA, 19 nt, Artificial Sequence
  Description of Artificial Sequence: Synthetic oligonucleotide
ucgauauaaucuugaaaau

SEQ ID NO: 151043 - RNA, 19 nt, Artificial Sequence
  Description of Artificial Sequence: Synthetic oligonucleotide
cugacacccuucuucaggc

SEQ ID NO: 151044 - RNA, 19 nt, Artificial Sequence
  Description of Artificial Sequence: Synthetic oligonucleotide
guaaagauacuccaagccu

SEQ ID NO: 151045 - RNA, 19 nt, Artificial Sequence
  Description of Artificial Sequence: Synthetic oligonucleotide
guuaacuuauguccagcac

SEQ ID NO: 151046 - RNA, 19 nt, Artificial Sequence
  Description of Artificial Sequence: Synthetic oligonucleotide
ugugcaugaauaugccccu

SEQ ID NO: 151047 - RNA, 19 nt, Artificial Sequence
  Description of Artificial Sequence: Synthetic oligonucleotide
agagaggcaaguaagcgcu

SEQ ID NO: 151048 - RNA, 19 nt, Artificial Sequence
  Description of Artificial Sequence: Synthetic oligonucleotide
uuagggacauuaugccgag

SEQ ID NO: 151049 - RNA, 19 nt, Artificial Sequence
  Description of Artificial Sequence: Synthetic oligonucleotide
caccagaauguucuugccg

SEQ ID NO: 151050 - RNA, 19 nt, Artificial Sequence
  Description of Artificial Sequence: Synthetic oligonucleotide
gucuacgacaaaauugacc

SEQ ID NO: 151051 - RNA, 19 nt, Artificial Sequence
  Description of Artificial Sequence: Synthetic oligonucleotide
cacguaaaacacuagccca

SEQ ID NO: 151052 - RNA, 19 nt, Artificial Sequence
  Description of Artificial Sequence: Synthetic oligonucleotide
aauuuucguuccagauccc

SEQ ID NO: 151053 - RNA, 19 nt, Artificial Sequence
  Description of Artificial Sequence: Synthetic oligonucleotide
gcaaagauucagcugaaac

SEQ ID NO: 151054 - RNA, 19 nt, Artificial Sequence
  Description of Artificial Sequence: Synthetic oligonucleotide
uaagaucgaagaccauaga

SEQ ID NO: 151055 - RNA, 19 nt, Artificial Sequence
  Description of Artificial Sequence: Synthetic oligonucleotide
caaagauucagcugaaacu

SEQ ID NO: 151056 - RNA, 19 nt, Artificial Sequence
  Description of Artificial Sequence: Synthetic oligonucleotide
gcaaccacugagcaugugg

SEQ ID NO: 151057 - RNA, 19 nt, Artificial Sequence
  Description of Artificial Sequence: Synthetic oligonucleotide
aguugaggagccuugucau

SEQ ID NO: 151058 - RNA, 19 nt, Artificial Sequence
  Description of Artificial Sequence: Synthetic oligonucleotide
uuuauacauuaaagucaug

SEQ ID NO: 151059 - RNA, 19 nt, Artificial Sequence
  Description of Artificial Sequence: Synthetic oligonucleotide
acgacaaaauugaccagcg

SEQ ID NO: 151060 - RNA, 19 nt, Artificial Sequence
  Description of Artificial Sequence: Synthetic oligonucleotide
ucuauuaguuggccagccu

SEQ ID NO: 151061 - RNA, 19 nt, Artificial Sequence
  Description of Artificial Sequence: Synthetic oligonucleotide
auacauaguuuauuugguu

SEQ ID NO: 151062 - RNA, 19 nt, Artificial Sequence
  Description of Artificial Sequence: Synthetic oligonucleotide
guuaggucgcuggaggccg

SEQ ID NO: 151063 - RNA, 19 nt, Artificial Sequence
  Description of Artificial Sequence: Synthetic oligonucleotide
cauuaugccgagaacacua

SEQ ID NO: 151064 - RNA, 19 nt, Artificial Sequence
  Description of Artificial Sequence: Synthetic oligonucleotide
uguaagaguuuguuaccau

SEQ ID NO: 151065 - RNA, 19 nt, Artificial Sequence
  Description of Artificial Sequence: Synthetic oligonucleotide
uccggcaaagauucagcug

SEQ ID NO: 151066 - RNA, 19 nt, Artificial Sequence
  Description of Artificial Sequence: Synthetic oligonucleotide
caaauuuuauauagcacgu

SEQ ID NO: 151067 - RNA, 19 nt, Artificial Sequence
  Description of Artificial Sequence: Synthetic oligonucleotide
augacacgacaguugagga

SEQ ID NO: 151068 - RNA, 19 nt, Artificial Sequence
  Description of Artificial Sequence: Synthetic oligonucleotide
cuuuuaaagguaggaucag

SEQ ID NO: 151069 - RNA, 19 nt, Artificial Sequence
  Description of Artificial Sequence: Synthetic oligonucleotide
aaacuccacugacgugaac

SEQ ID NO: 151070 - RNA, 19 nt, Artificial Sequence
  Description of Artificial Sequence: Synthetic oligonucleotide
ucgcugguuaggucgcugg

SEQ ID NO: 151071 - RNA, 19 nt, Artificial Sequence
  Description of Artificial Sequence: Synthetic oligonucleotide
ggacacuucgcuuaagauc

SEQ ID NO: 151072 - RNA, 19 nt, Artificial Sequence
  Description of Artificial Sequence: Synthetic oligonucleotide
cuacauuagugguuaguca

SEQ ID NO: 151073 - RNA, 19 nt, Artificial Sequence
  Description of Artificial Sequence: Synthetic oligonucleotide
gcucacguaaaacacuagc

SEQ ID NO: 151074 - RNA, 19 nt, Artificial Sequence
  Description of Artificial Sequence: Synthetic oligonucleotide
aaccauucucagaaugcug

SEQ ID NO: 151075 - RNA, 19 nt, Artificial Sequence
  Description of Artificial Sequence: Synthetic oligonucleotide
auguccagcacuacauuag

SEQ ID NO: 151076 - RNA, 19 nt, Artificial Sequence
  Description of Artificial Sequence: Synthetic oligonucleotide
agugguuagucaagucugg

SEQ ID NO: 151077 - RNA, 19 nt, Artificial Sequence
  Description of Artificial Sequence: Synthetic oligonucleotide
cacgguuguaaaauuuuca

SEQ ID NO: 151078 - RNA, 19 nt, Artificial Sequence
  Description of Artificial Sequence: Synthetic oligonucleotide
ugcucacguaaaacacuag

SEQ ID NO: 151079 - RNA, 19 nt, Artificial Sequence
  Description of Artificial Sequence: Synthetic oligonucleotide
aggaauugguacaagcuaa

SEQ ID NO: 151080 - RNA, 19 nt, Artificial Sequence
  Description of Artificial Sequence: Synthetic oligonucleotide
ggacauuaugccgagaaca

SEQ ID NO: 151081 - RNA, 19 nt, Artificial Sequence
  Description of Artificial Sequence: Synthetic oligonucleotide
aaaccggcacaagaaacau

SEQ ID NO: 151082 - RNA, 19 nt, Artificial Sequence
  Description of Artificial Sequence: Synthetic oligonucleotide
agccuugucauaaacuaga

SEQ ID NO: 151083 - RNA, 19 nt, Artificial Sequence
  Description of Artificial Sequence: Synthetic oligonucleotide
caaaaggacauggccuggg

SEQ ID NO: 151084 - RNA, 19 nt, Artificial Sequence
  Description of Artificial Sequence: Synthetic oligonucleotide
gagccuugucauaaacuag

SEQ ID NO: 151085 - RNA, 19 nt, Artificial Sequence
  Description of Artificial Sequence: Synthetic oligonucleotide
caguaaaaccggcacaaga

SEQ ID NO: 151086 - RNA, 19 nt, Artificial Sequence
  Description of Artificial Sequence: Synthetic oligonucleotide
uguaaagcgcucacuuguu

SEQ ID NO: 151087 - RNA, 19 nt, Artificial Sequence
  Description of Artificial Sequence: Synthetic oligonucleotide
ugucuacgacaaaauugac

SEQ ID NO: 151088 - RNA, 19 nt, Artificial Sequence
  Description of Artificial Sequence: Synthetic oligonucleotide
cauugcaucgugugugauc

SEQ ID NO: 151089 - RNA, 19 nt, Artificial Sequence
  Description of Artificial Sequence: Synthetic oligonucleotide
cuuaagaucgaagaccaua

SEQ ID NO: 151090 - RNA, 19 nt, Artificial Sequence
  Description of Artificial Sequence: Synthetic oligonucleotide
ugguuagucaagucuggua

SEQ ID NO: 151091 - RNA, 19 nt, Artificial Sequence
  Description of Artificial Sequence: Synthetic oligonucleotide
agcacuacauuagugguua

SEQ ID NO: 151092 - RNA, 19 nt, Artificial Sequence
  Description of Artificial Sequence: Synthetic oligonucleotide
guggggaacccugacaccc

SEQ ID NO: 151093 - RNA, 19 nt, Artificial Sequence
  Description of Artificial Sequence: Synthetic oligonucleotide
gucaugagaguuguuuuac

SEQ ID NO: 151094 - RNA, 19 nt, Artificial Sequence
  Description of Artificial Sequence: Synthetic oligonucleotide
ucaugaacgcugagguaaa

SEQ ID NO: 151095 - RNA, 19 nt, Artificial Sequence
  Description of Artificial Sequence: Synthetic oligonucleotide
gaggagccuugucauaaac

SEQ ID NO: 151096 - RNA, 19 nt, Artificial Sequence
  Description of Artificial Sequence: Synthetic oligonucleotide
uaaacuccacugacgugaa

SEQ ID NO: 151097 - RNA, 19 nt, Artificial Sequence
  Description of Artificial Sequence: Synthetic oligonucleotide
cuagcccacuucuguagag

SEQ ID NO: 151098 - RNA, 19 nt, Artificial Sequence
  Description of Artificial Sequence: Synthetic oligonucleotide
ugguaguguuugcauuaca

SEQ ID NO: 151099 - RNA, 19 nt, Artificial Sequence
  Description of Artificial Sequence: Synthetic oligonucleotide
gcauccaagugucaaagga

SEQ ID NO: 151100 - RNA, 19 nt, Artificial Sequence
  Description of Artificial Sequence: Synthetic oligonucleotide
acuaccccugugucaguuc

SEQ ID NO: 151101 - RNA, 19 nt, Artificial Sequence
  Description of Artificial Sequence: Synthetic oligonucleotide
aaucacccuauuaggcaug

SEQ ID NO: 151102 - RNA, 19 nt, Artificial Sequence
  Description of Artificial Sequence: Synthetic oligonucleotide
ggaauaacaguggucuccc

SEQ ID NO: 151103 - RNA, 19 nt, Artificial Sequence
  Description of Artificial Sequence: Synthetic oligonucleotide
uauauagcacguugccauu

SEQ ID NO: 151104 - RNA, 19 nt, Artificial Sequence
  Description of Artificial Sequence: Synthetic oligonucleotide
auuuucguuccagaucccu

SEQ ID NO: 151105 - RNA, 19 nt, Artificial Sequence
  Description of Artificial Sequence: Synthetic oligonucleotide
agucaugguaguguuugca

SEQ ID NO: 151106 - RNA, 19 nt, Artificial Sequence
  Description of Artificial Sequence: Synthetic oligonucleotide
guaggaucaggcuucauuu

SEQ ID NO: 151107 - RNA, 19 nt, Artificial Sequence
  Description of Artificial Sequence: Synthetic oligonucleotide
ugccccuaaaaggaagaca

SEQ ID NO: 151108 - RNA, 19 nt, Artificial Sequence
  Description of Artificial Sequence: Synthetic oligonucleotide
guuaccauggagucuggcu

SEQ ID NO: 151109 - RNA, 19 nt, Artificial Sequence
  Description of Artificial Sequence: Synthetic oligonucleotide
aaccggcacaagaaacauc

SEQ ID NO: 151110 - RNA, 19 nt, Artificial Sequence
  Description of Artificial Sequence: Synthetic oligonucleotide
acuucgcuuaagaucgaag

SEQ ID NO: 151111 - RNA, 19 nt, Artificial Sequence
  Description of Artificial Sequence: Synthetic oligonucleotide
gccaauaccccuucacuug

SEQ ID NO: 151112 - RNA, 19 nt, Artificial Sequence
  Description of Artificial Sequence: Synthetic oligonucleotide
caggcucgauauaaucuug

SEQ ID NO: 151113 - RNA, 19 nt, Artificial Sequence
  Description of Artificial Sequence: Synthetic oligonucleotide
uuaugccgagaacacuaua

SEQ ID NO: 151114 - RNA, 19 nt, Artificial Sequence
  Description of Artificial Sequence: Synthetic oligonucleotide
gguaaaaugagagaucaau

SEQ ID NO: 151115 - RNA, 19 nt, Artificial Sequence
  Description of Artificial Sequence: Synthetic oligonucleotide
ccugacacccuucuucagg

SEQ ID NO: 151116 - RNA, 19 nt, Artificial Sequence
  Description of Artificial Sequence: Synthetic oligonucleotide
caggaauugguacaagcua

SEQ ID NO: 151117 - RNA, 19 nt, Artificial Sequence
  Description of Artificial Sequence: Synthetic oligonucleotide
cuugccggacggcagcuug

SEQ ID NO: 151118 - RNA, 19 nt, Artificial Sequence
  Description of Artificial Sequence: Synthetic oligonucleotide
gcuaauuaaccagaaugca

SEQ ID NO: 151119 - RNA, 19 nt, Artificial Sequence
  Description of Artificial Sequence: Synthetic oligonucleotide
caaguaagcgcucagcuuu

SEQ ID NO: 151120 - RNA, 19 nt, Artificial Sequence
  Description of Artificial Sequence: Synthetic oligonucleotide
uccaaggucuagacauguc

SEQ ID NO: 151121 - RNA, 19 nt, Artificial Sequence
  Description of Artificial Sequence: Synthetic oligonucleotide
ugcaucgugugugaucauc

SEQ ID NO: 151122 - RNA, 19 nt, Artificial Sequence
  Description of Artificial Sequence: Synthetic oligonucleotide
auuaguuggccagccugug

SEQ ID NO: 151123 - RNA, 19 nt, Artificial Sequence
  Description of Artificial Sequence: Synthetic oligonucleotide
augagagaucaaucaccca

SEQ ID NO: 151124 - RNA, 19 nt, Artificial Sequence
  Description of Artificial Sequence: Synthetic oligonucleotide
uguuaccauggagucuggc

SEQ ID NO: 151125 - RNA, 19 nt, Artificial Sequence
  Description of Artificial Sequence: Synthetic oligonucleotide
agcccacuucuguagagau

SEQ ID NO: 151126 - RNA, 19 nt, Artificial Sequence
  Description of Artificial Sequence: Synthetic oligonucleotide
ugguucuauuugacauaug

SEQ ID NO: 151127 - RNA, 19 nt, Artificial Sequence
  Description of Artificial Sequence: Synthetic oligonucleotide
agacucggagguucuugug

SEQ ID NO: 151128 - RNA, 19 nt, Artificial Sequence
  Description of Artificial Sequence: Synthetic oligonucleotide
caguaaucaagaccacaga

SEQ ID NO: 151129 - RNA, 19 nt, Artificial Sequence
  Description of Artificial Sequence: Synthetic oligonucleotide
cuuguuggucugguagcag

SEQ ID NO: 151130 - RNA, 19 nt, Artificial Sequence
  Description of Artificial Sequence: Synthetic oligonucleotide
caucgugugugaucaucuc

SEQ ID NO: 151131 - RNA, 19 nt, Artificial Sequence
  Description of Artificial Sequence: Synthetic oligonucleotide
ugguaaaguggaagccaua

SEQ ID NO: 151132 - RNA, 19 nt, Artificial Sequence
  Description of Artificial Sequence: Synthetic oligonucleotide
acuagcuguuccacuccgg

SEQ ID NO: 151133 - RNA, 19 nt, Artificial Sequence
  Description of Artificial Sequence: Synthetic oligonucleotide
cuccaguaugcucacugca

SEQ ID NO: 151134 - RNA, 19 nt, Artificial Sequence
  Description of Artificial Sequence: Synthetic oligonucleotide
acacuagcccacuucugua

SEQ ID NO: 151135 - RNA, 19 nt, Artificial Sequence
  Description of Artificial Sequence: Synthetic oligonucleotide
cagaauguucuugccggac

SEQ ID NO: 151136 - RNA, 19 nt, Artificial Sequence
  Description of Artificial Sequence: Synthetic oligonucleotide
guagacuuuggcaaccacu

SEQ ID NO: 151137 - RNA, 19 nt, Artificial Sequence
  Description of Artificial Sequence: Synthetic oligonucleotide
uagcccacuucuguagaga

SEQ ID NO: 151138 - RNA, 19 nt, Artificial Sequence
  Description of Artificial Sequence: Synthetic oligonucleotide
cccagaaaccuucacaaga

SEQ ID NO: 151139 - RNA, 19 nt, Artificial Sequence
  Description of Artificial Sequence: Synthetic oligonucleotide
ccggacggcagcuuggacc

SEQ ID NO: 151140 - RNA, 19 nt, Artificial Sequence
  Description of Artificial Sequence: Synthetic oligonucleotide
gcauguaaaguaaugacau

SEQ ID NO: 151141 - RNA, 19 nt, Artificial Sequence
  Description of Artificial Sequence: Synthetic oligonucleotide
cugguuucacgguuguaaa

SEQ ID NO: 151142 - RNA, 19 nt, Artificial Sequence
  Description of Artificial Sequence: Synthetic oligonucleotide
uggggaacccugacacccu

SEQ ID NO: 151143 - RNA, 19 nt, Artificial Sequence
  Description of Artificial Sequence: Synthetic oligonucleotide
cacauugcaucguguguga

SEQ ID NO: 151144 - RNA, 19 nt, Artificial Sequence
  Description of Artificial Sequence: Synthetic oligonucleotide
gagacucggagguucuugu

SEQ ID NO: 151145 - RNA, 19 nt, Artificial Sequence
  Description of Artificial Sequence: Synthetic oligonucleotide
ugguaacaugcaucaguuu

SEQ ID NO: 151146 - RNA, 19 nt, Artificial Sequence
  Description of Artificial Sequence: Synthetic oligonucleotide
auauagcacguugccauua

SEQ ID NO: 151147 - RNA, 19 nt, Artificial Sequence
  Description of Artificial Sequence: Synthetic oligonucleotide
ugcauagacccagcauuuc

SEQ ID NO: 151148 - RNA, 19 nt, Artificial Sequence
  Description of Artificial Sequence: Synthetic oligonucleotide
auuaugccgagaacacuau

SEQ ID NO: 151149 - RNA, 19 nt, Artificial Sequence
  Description of Artificial Sequence: Synthetic oligonucleotide
caugaacgcugagguaaag

SEQ ID NO: 151150 - RNA, 19 nt, Artificial Sequence
  Description of Artificial Sequence: Synthetic oligonucleotide
uucgcugguuaggucgcug

SEQ ID NO: 151151 - RNA, 19 nt, Artificial Sequence
  Description of Artificial Sequence: Synthetic oligonucleotide
aggcucgauauaaucuuga

SEQ ID NO: 151152 - RNA, 19 nt, Artificial Sequence
  Description of Artificial Sequence: Synthetic oligonucleotide
gcaugugguaacaugcauc

SEQ ID NO: 151153 - RNA, 19 nt, Artificial Sequence
  Description of Artificial Sequence: Synthetic oligonucleotide
gggacauuaugccgagaac

SEQ ID NO: 151154 - RNA, 19 nt, Artificial Sequence
  Description of Artificial Sequence: Synthetic oligonucleotide
gcuuucgagucauucuauc

SEQ ID NO: 151155 - RNA, 19 nt, Artificial Sequence
  Description of Artificial Sequence: Synthetic oligonucleotide
ccacugacgugaacugugg

SEQ ID NO: 151156 - RNA, 19 nt, Artificial Sequence
  Description of Artificial Sequence: Synthetic oligonucleotide
acgacaguugaggagccuu

SEQ ID NO: 151157 - RNA, 19 nt, Artificial Sequence
  Description of Artificial Sequence: Synthetic oligonucleotide
cuaugucauguagaaaacu

SEQ ID NO: 151158 - RNA, 19 nt, Artificial Sequence
  Description of Artificial Sequence: Synthetic oligonucleotide
acuugguacacuagcuguu

SEQ ID NO: 151159 - RNA, 19 nt, Artificial Sequence
  Description of Artificial Sequence: Synthetic oligonucleotide
ucacugcaucacacuuugu

SEQ ID NO: 151160 - RNA, 19 nt, Artificial Sequence
  Description of Artificial Sequence: Synthetic oligonucleotide
gcgucuccggcaaagauuc

SEQ ID NO: 151161 - RNA, 19 nt, Artificial Sequence
  Description of Artificial Sequence: Synthetic oligonucleotide
gguaaaguggaagccauau

SEQ ID NO: 151162 - RNA, 19 nt, Artificial Sequence
  Description of Artificial Sequence: Synthetic oligonucleotide
cauuagugguuagucaagu

SEQ ID NO: 151163 - RNA, 19 nt, Artificial Sequence
  Description of Artificial Sequence: Synthetic oligonucleotide
ccuuaguuugaacaacaaa

SEQ ID NO: 151164 - RNA, 19 nt, Artificial Sequence
  Description of Artificial Sequence: Synthetic oligonucleotide
cugacgugaacugugguuu

SEQ ID NO: 151165 - RNA, 19 nt, Artificial Sequence
  Description of Artificial Sequence: Synthetic oligonucleotide
ggcucgauauaaucuugaa

SEQ ID NO: 151166 - RNA, 19 nt, Artificial Sequence
  Description of Artificial Sequence: Synthetic oligonucleotide
ucacccuauuaggcaugug

SEQ ID NO: 151167 - RNA, 19 nt, Artificial Sequence
  Description of Artificial Sequence: Synthetic oligonucleotide
ccccuuaguuugaacaaca

SEQ ID NO: 151168 - RNA, 19 nt, Artificial Sequence
  Description of Artificial Sequence: Synthetic oligonucleotide
ugccggacggcagcuugga

SEQ ID NO: 151169 - RNA, 19 nt, Artificial Sequence
  Description of Artificial Sequence: Synthetic oligonucleotide
caccaacacugggaucccc

SEQ ID NO: 151170 - RNA, 19 nt, Artificial Sequence
  Description of Artificial Sequence: Synthetic oligonucleotide
ggccaauaccccuucacuu

SEQ ID NO: 151171 - RNA, 19 nt, Artificial Sequence
  Description of Artificial Sequence: Synthetic oligonucleotide
cuggucuuaucagaugaau

SEQ ID NO: 151172 - RNA, 19 nt, Artificial Sequence
  Description of Artificial Sequence: Synthetic oligonucleotide
gguaugcauguaaaguaau

SEQ ID NO: 151173 - RNA, 19 nt, Artificial Sequence
  Description of Artificial Sequence: Synthetic oligonucleotide
gugguuagucaagucuggu

SEQ ID NO: 151174 - RNA, 19 nt, Artificial Sequence
  Description of Artificial Sequence: Synthetic oligonucleotide
ccacucauuuugcccuggc

SEQ ID NO: 151175 - RNA, 19 nt, Artificial Sequence
  Description of Artificial Sequence: Synthetic oligonucleotide
gugcuaugucauguagaaa

SEQ ID NO: 151176 - RNA, 19 nt, Artificial Sequence
  Description of Artificial Sequence: Synthetic oligonucleotide
uggcacggguggacacuuc

SEQ ID NO: 151177 - RNA, 19 nt, Artificial Sequence
  Description of Artificial Sequence: Synthetic oligonucleotide
cacuuccauuuucaaugua

SEQ ID NO: 151178 - RNA, 19 nt, Artificial Sequence
  Description of Artificial Sequence: Synthetic oligonucleotide
cagcacuacauuagugguu

SEQ ID NO: 151179 - RNA, 19 nt, Artificial Sequence
  Description of Artificial Sequence: Synthetic oligonucleotide
caauaccccuucacuugcu

SEQ ID NO: 151180 - RNA, 19 nt, Artificial Sequence
  Description of Artificial Sequence: Synthetic oligonucleotide
gcaaguaagcgcucagcuu

SEQ ID NO: 151181 - RNA, 19 nt, Artificial Sequence
  Description of Artificial Sequence: Synthetic oligonucleotide
cacuucgcuuaagaucgaa

SEQ ID NO: 151182 - RNA, 19 nt, Artificial Sequence
  Description of Artificial Sequence: Synthetic oligonucleotide
cccuuaguuugaacaacaa

SEQ ID NO: 151183 - RNA, 19 nt, Artificial Sequence
  Description of Artificial Sequence: Synthetic oligonucleotide
gcacggguggacacuucgc

SEQ ID NO: 151184 - RNA, 19 nt, Artificial Sequence
  Description of Artificial Sequence: Synthetic oligonucleotide
caacuaaggcagguauggu

SEQ ID NO: 151185 - RNA, 19 nt, Artificial Sequence
  Description of Artificial Sequence: Synthetic oligonucleotide
ggguggacacuucgcuuaa

SEQ ID NO: 151186 - RNA, 19 nt, Artificial Sequence
  Description of Artificial Sequence: Synthetic oligonucleotide
cuucuccgaacaccagaau

SEQ ID NO: 151187 - RNA, 19 nt, Artificial Sequence
  Description of Artificial Sequence: Synthetic oligonucleotide
ggcuuucgagucauucuau

SEQ ID NO: 151188 - RNA, 19 nt, Artificial Sequence
  Description of Artificial Sequence: Synthetic oligonucleotide
gccuugucauaaacuagau

SEQ ID NO: 151189 - RNA, 19 nt, Artificial Sequence
  Description of Artificial Sequence: Synthetic oligonucleotide
cacuaccccugugucaguu

SEQ ID NO: 151190 - RNA, 19 nt, Artificial Sequence
  Description of Artificial Sequence: Synthetic oligonucleotide
cuucgcugguuaggucgcu

SEQ ID NO: 151191 - RNA, 19 nt, Artificial Sequence
  Description of Artificial Sequence: Synthetic oligonucleotide
ccggcccuggguccuugga

SEQ ID NO: 151192 - RNA, 19 nt, Artificial Sequence
  Description of Artificial Sequence: Synthetic oligonucleotide
cgucuccggcaaagauuca

SEQ ID NO: 151193 - RNA, 19 nt, Artificial Sequence
  Description of Artificial Sequence: Synthetic oligonucleotide
ccggcacaagaaacaucuu

SEQ ID NO: 151194 - RNA, 19 nt, Artificial Sequence
  Description of Artificial Sequence: Synthetic oligonucleotide
ccgccaccgcuggcccauu

SEQ ID NO: 151195 - RNA, 19 nt, Artificial Sequence
  Description of Artificial Sequence: Synthetic oligonucleotide
acaugauucauauauuucc

SEQ ID NO: 151196 - RNA, 19 nt, Artificial Sequence
  Description of Artificial Sequence: Synthetic oligonucleotide
aaaugacacaaucuguuac

SEQ ID NO: 151197 - RNA, 19 nt, Artificial Sequence
  Description of Artificial Sequence: Synthetic oligonucleotide
uugauuuacaacugguucg

SEQ ID NO: 151198 - RNA, 19 nt, Artificial Sequence
  Description of Artificial Sequence: Synthetic oligonucleotide
cuaagaagggaucaaaugc

SEQ ID NO: 151199 - RNA, 19 nt, Artificial Sequence
  Description of Artificial Sequence: Synthetic oligonucleotide
aagcauucgauguugagug

SEQ ID NO: 151200 - RNA, 19 nt, Artificial Sequence
  Description of Artificial Sequence: Synthetic oligonucleotide
aaaucuacgggacagacuu

SEQ ID NO: 151201 - RNA, 19 nt, Artificial Sequence
  Description of Artificial Sequence: Synthetic oligonucleotide
acuuagucucauuauaaac

SEQ ID NO: 151202 - RNA, 19 nt, Artificial Sequence
  Description of Artificial Sequence: Synthetic oligonucleotide
aacgcuuccagcucaaaag

SEQ ID NO: 151203 - RNA, 19 nt, Artificial Sequence
  Description of Artificial Sequence: Synthetic oligonucleotide
uguaagaagccucaggaac

SEQ ID NO: 151204 - RNA, 19 nt, Artificial Sequence
  Description of Artificial Sequence: Synthetic oligonucleotide
ucgaacuuuaacaggauug

SEQ ID NO: 151205 - RNA, 19 nt, Artificial Sequence
  Description of Artificial Sequence: Synthetic oligonucleotide
aauagaacgcuuccagcuc

SEQ ID NO: 151206 - RNA, 19 nt, Artificial Sequence
  Description of Artificial Sequence: Synthetic oligonucleotide
uucugaacgacaaaacggc

SEQ ID NO: 151207 - RNA, 19 nt, Artificial Sequence
  Description of Artificial Sequence: Synthetic oligonucleotide
gaaaugacaccacagggug

SEQ ID NO: 151208 - RNA, 19 nt, Artificial Sequence
  Description of Artificial Sequence: Synthetic oligonucleotide
aaauugggaaaggaacugc

SEQ ID NO: 151209 - RNA, 19 nt, Artificial Sequence
  Description of Artificial Sequence: Synthetic oligonucleotide
aucgguuuguaccuggggc

SEQ ID NO: 151210 - RNA, 19 nt, Artificial Sequence
  Description of Artificial Sequence: Synthetic oligonucleotide
gauauaugcuugcuuagcc

SEQ ID NO: 151211 - RNA, 19 nt, Artificial Sequence
  Description of Artificial Sequence: Synthetic oligonucleotide
auaugguccacacagcuug

SEQ ID NO: 151212 - RNA, 19 nt, Artificial Sequence
  Description of Artificial Sequence: Synthetic oligonucleotide
aagcaaguagaguugucuc

SEQ ID NO: 151213 - RNA, 19 nt, Artificial Sequence
  Description of Artificial Sequence: Synthetic oligonucleotide
aacugcaucggugacagag

SEQ ID NO: 151214 - RNA, 19 nt, Artificial Sequence
  Description of Artificial Sequence: Synthetic oligonucleotide
agcaaguagaguugucucc

SEQ ID NO: 151215 - RNA, 19 nt, Artificial Sequence
  Description of Artificial Sequence: Synthetic oligonucleotide
auucugaacgacaaaacgg

SEQ ID NO: 151216 - RNA, 19 nt, Artificial Sequence
  Description of Artificial Sequence: Synthetic oligonucleotide
acguuuaccacuuuuauuu

SEQ ID NO: 151217 - RNA, 19 nt, Artificial Sequence
  Description of Artificial Sequence: Synthetic oligonucleotide
ucauucaugagccgcaaac

SEQ ID NO: 151218 - RNA, 19 nt, Artificial Sequence
  Description of Artificial Sequence: Synthetic oligonucleotide
uacuauggcaaacacauuu

SEQ ID NO: 151219 - RNA, 19 nt, Artificial Sequence
  Description of Artificial Sequence: Synthetic oligonucleotide
uguacagaaucacauacua

SEQ ID NO: 151220 - RNA, 19 nt, Artificial Sequence
  Description of Artificial Sequence: Synthetic oligonucleotide
uccuccaauacuuucggcc

SEQ ID NO: 151221 - RNA, 19 nt, Artificial Sequence
  Description of Artificial Sequence: Synthetic oligonucleotide
aagaaggucucucccuaac

SEQ ID NO: 151222 - RNA, 19 nt, Artificial Sequence
  Description of Artificial Sequence: Synthetic oligonucleotide
uucaugagugcgcacaaca

SEQ ID NO: 151223 - RNA, 19 nt, Artificial Sequence
  Description of Artificial Sequence: Synthetic oligonucleotide
uuuagcgucguuucucucc

SEQ ID NO: 151224 - RNA, 19 nt, Artificial Sequence
  Description of Artificial Sequence: Synthetic oligonucleotide
agccacacgacucugucac

SEQ ID NO: 151225 - RNA, 19 nt, Artificial Sequence
  Description of Artificial Sequence: Synthetic oligonucleotide
cuaacuuuaaaugccggag

SEQ ID NO: 151226 - RNA, 19 nt, Artificial Sequence
  Description of Artificial Sequence: Synthetic oligonucleotide
ugauucauauauuucccgu

SEQ ID NO: 151227 - RNA, 19 nt, Artificial Sequence
  Description of Artificial Sequence: Synthetic oligonucleotide
aacuugucgauauaugcuu

SEQ ID NO: 151228 - RNA, 19 nt, Artificial Sequence
  Description of Artificial Sequence: Synthetic oligonucleotide
uauauuucccgugucacac

SEQ ID NO: 151229 - RNA, 19 nt, Artificial Sequence
  Description of Artificial Sequence: Synthetic oligonucleotide
ucuaacuuuaaaugccgga

SEQ ID NO: 151230 - RNA, 19 nt, Artificial Sequence
  Description of Artificial Sequence: Synthetic oligonucleotide
uuuacaacugguucgcaaa

SEQ ID NO: 151231 - RNA, 19 nt, Artificial Sequence
  Description of Artificial Sequence: Synthetic oligonucleotide
uggguugauuuacaacugg

SEQ ID NO: 151232 - RNA, 19 nt, Artificial Sequence
  Description of Artificial Sequence: Synthetic oligonucleotide
uccgcauugaguguggugc

SEQ ID NO: 151233 - RNA, 19 nt, Artificial Sequence
  Description of Artificial Sequence: Synthetic oligonucleotide
uauuucaugagugcgcaca

SEQ ID NO: 151234 - RNA, 19 nt, Artificial Sequence
  Description of Artificial Sequence: Synthetic oligonucleotide
agaauugcacacugcaaug

SEQ ID NO: 151235 - RNA, 19 nt, Artificial Sequence
  Description of Artificial Sequence: Synthetic oligonucleotide
aacaccacuacccgaggcu

SEQ ID NO: 151236 - RNA, 19 nt, Artificial Sequence
  Description of Artificial Sequence: Synthetic oligonucleotide
aaaugccggagacagaauu

SEQ ID NO: 151237 - RNA, 19 nt, Artificial Sequence
  Description of Artificial Sequence: Synthetic oligonucleotide
gagacagaauugcacacug

SEQ ID NO: 151238 - RNA, 19 nt, Artificial Sequence
  Description of Artificial Sequence: Synthetic oligonucleotide
aggauugcccauuuucauc

SEQ ID NO: 151239 - RNA, 19 nt, Artificial Sequence
  Description of Artificial Sequence: Synthetic oligonucleotide
ugcuccacgcuaaagagau

SEQ ID NO: 151240 - RNA, 19 nt, Artificial Sequence
  Description of Artificial Sequence: Synthetic oligonucleotide
gaaauugggaaaggaacug

SEQ ID NO: 151241 - RNA, 19 nt, Artificial Sequence
  Description of Artificial Sequence: Synthetic oligonucleotide
uugaaagcccuuaugcaaa

SEQ ID NO: 151242 - RNA, 19 nt, Artificial Sequence
  Description of Artificial Sequence: Synthetic oligonucleotide
ucgauauaugcuugcuuag

SEQ ID NO: 151243 - RNA, 19 nt, Artificial Sequence
  Description of Artificial Sequence: Synthetic oligonucleotide
cacacaugcggaaauggag

SEQ ID NO: 151244 - RNA, 19 nt, Artificial Sequence
  Description of Artificial Sequence: Synthetic oligonucleotide
auauaugcuugcuuagccu

SEQ ID NO: 151245 - RNA, 19 nt, Artificial Sequence
  Description of Artificial Sequence: Synthetic oligonucleotide
auauuucccgugucacacc

SEQ ID NO: 151246 - RNA, 19 nt, Artificial Sequence
  Description of Artificial Sequence: Synthetic oligonucleotide
augagugcgcacaacaggg

SEQ ID NO: 151247 - RNA, 19 nt, Artificial Sequence
  Description of Artificial Sequence: Synthetic oligonucleotide
ucugaacgacaaaacggcc

SEQ ID NO: 151248 - RNA, 19 nt, Artificial Sequence
  Description of Artificial Sequence: Synthetic oligonucleotide
ugcuuauaaauuccguaau

SEQ ID NO: 151249 - RNA, 19 nt, Artificial Sequence
  Description of Artificial Sequence: Synthetic oligonucleotide
uuucccgugucacaccuca

SEQ ID NO: 151250 - RNA, 19 nt, Artificial Sequence
  Description of Artificial Sequence: Synthetic oligonucleotide
aacaguucaagcccacgau

SEQ ID NO: 151251 - RNA, 19 nt, Artificial Sequence
  Description of Artificial Sequence: Synthetic oligonucleotide
acgcuuccagcucaaaagg

SEQ ID NO: 151252 - RNA, 19 nt, Artificial Sequence
  Description of Artificial Sequence: Synthetic oligonucleotide
ggugaacuuuauuuuaaag

SEQ ID NO: 151253 - RNA, 19 nt, Artificial Sequence
  Description of Artificial Sequence: Synthetic oligonucleotide
acugccagaccaaauuggc

SEQ ID NO: 151254 - RNA, 19 nt, Artificial Sequence
  Description of Artificial Sequence: Synthetic oligonucleotide
cucccuuagggucaaagac

SEQ ID NO: 151255 - RNA, 19 nt, Artificial Sequence
  Description of Artificial Sequence: Synthetic oligonucleotide
agcccuuuucguuagggug

SEQ ID NO: 151256 - RNA, 19 nt, Artificial Sequence
  Description of Artificial Sequence: Synthetic oligonucleotide
ucccgugucacaccucacg

SEQ ID NO: 151257 - RNA, 19 nt, Artificial Sequence
  Description of Artificial Sequence: Synthetic oligonucleotide
cuugucgauauaugcuugc

SEQ ID NO: 151258 - RNA, 19 nt, Artificial Sequence
  Description of Artificial Sequence: Synthetic oligonucleotide
cuccacgcuaaagagaugc

SEQ ID NO: 151259 - RNA, 19 nt, Artificial Sequence
  Description of Artificial Sequence: Synthetic oligonucleotide
cucuaacuuuaaaugccgg

SEQ ID NO: 151260 - RNA, 19 nt, Artificial Sequence
  Description of Artificial Sequence: Synthetic oligonucleotide
acauucugaacgacaaaac

SEQ ID NO: 151261 - RNA, 19 nt, Artificial Sequence
  Description of Artificial Sequence: Synthetic oligonucleotide
gaaggaggggacugaaaug

SEQ ID NO: 151262 - RNA, 19 nt, Artificial Sequence
  Description of Artificial Sequence: Synthetic oligonucleotide
uugaccuucgcucguauuu

SEQ ID NO: 151263 - RNA, 19 nt, Artificial Sequence
  Description of Artificial Sequence: Synthetic oligonucleotide
ccugaacucauauacacac

SEQ ID NO: 151264 - RNA, 19 nt, Artificial Sequence
  Description of Artificial Sequence: Synthetic oligonucleotide
uuacaacugguucgcaaac

SEQ ID NO: 151265 - RNA, 19 nt, Artificial Sequence
  Description of Artificial Sequence: Synthetic oligonucleotide
uuaacuuagucagcaacau

SEQ ID NO: 151266 - RNA, 19 nt, Artificial Sequence
  Description of Artificial Sequence: Synthetic oligonucleotide
uucgcaaacauuguucaau

SEQ ID NO: 151267 - RNA, 19 nt, Artificial Sequence
  Description of Artificial Sequence: Synthetic oligonucleotide
gucgauauaugcuugcuua

SEQ ID NO: 151268 - RNA, 19 nt, Artificial Sequence
  Description of Artificial Sequence: Synthetic oligonucleotide
ugugguuguauuucucauc

SEQ ID NO: 151269 - RNA, 19 nt, Artificial Sequence
  Description of Artificial Sequence: Synthetic oligonucleotide
uucaccguucugaugugga

SEQ ID NO: 151270 - RNA, 19 nt, Artificial Sequence
  Description of Artificial Sequence: Synthetic oligonucleotide
aguccaaguggcaauacug

SEQ ID NO: 151271 - RNA, 19 nt, Artificial Sequence
  Description of Artificial Sequence: Synthetic oligonucleotide
uguuguacucguugaauuu

SEQ ID NO: 151272 - RNA, 19 nt, Artificial Sequence
  Description of Artificial Sequence: Synthetic oligonucleotide
ugagcguucaugacauuau

SEQ ID NO: 151273 - RNA, 19 nt, Artificial Sequence
  Description of Artificial Sequence: Synthetic oligonucleotide
ggcaguucaacguuuacca

SEQ ID NO: 151274 - RNA, 19 nt, Artificial Sequence
  Description of Artificial Sequence: Synthetic oligonucleotide
uuuaaaugccggagacaga

SEQ ID NO: 151275 - RNA, 19 nt, Artificial Sequence
  Description of Artificial Sequence: Synthetic oligonucleotide
agacgacaaagucuguugu

SEQ ID NO: 151276 - RNA, 19 nt, Artificial Sequence
  Description of Artificial Sequence: Synthetic oligonucleotide
ucauccgcauugagugugg

SEQ ID NO: 151277 - RNA, 19 nt, Artificial Sequence
  Description of Artificial Sequence: Synthetic oligonucleotide
gaccucgauuuucugcagg

SEQ ID NO: 151278 - RNA, 19 nt, Artificial Sequence
  Description of Artificial Sequence: Synthetic oligonucleotide
cucccuaacugccagacca

SEQ ID NO: 151279 - RNA, 19 nt, Artificial Sequence
  Description of Artificial Sequence: Synthetic oligonucleotide
ucuugaaaucgaacuuuaa

SEQ ID NO: 151280 - RNA, 19 nt, Artificial Sequence
  Description of Artificial Sequence: Synthetic oligonucleotide
gacuuagucucauuauaaa

SEQ ID NO: 151281 - RNA, 19 nt, Artificial Sequence
  Description of Artificial Sequence: Synthetic oligonucleotide
uuggcgagaacaacugcuc

SEQ ID NO: 151282 - RNA, 19 nt, Artificial Sequence
  Description of Artificial Sequence: Synthetic oligonucleotide
uggcgagaacaacugcucc

SEQ ID NO: 151283 - RNA, 19 nt, Artificial Sequence
  Description of Artificial Sequence: Synthetic oligonucleotide
cacauacuauggcaaacac

SEQ ID NO: 151284 - RNA, 19 nt, Artificial Sequence
  Description of Artificial Sequence: Synthetic oligonucleotide
agacccgucgucuuccucu

SEQ ID NO: 151285 - RNA, 19 nt, Artificial Sequence
  Description of Artificial Sequence: Synthetic oligonucleotide
uacuuucggccguuccucg

SEQ ID NO: 151286 - RNA, 19 nt, Artificial Sequence
  Description of Artificial Sequence: Synthetic oligonucleotide
uucgcucguauuucaugag

SEQ ID NO: 151287 - RNA, 19 nt, Artificial Sequence
  Description of Artificial Sequence: Synthetic oligonucleotide
cuucgcucguauuucauga

SEQ ID NO: 151288 - RNA, 19 nt, Artificial Sequence
  Description of Artificial Sequence: Synthetic oligonucleotide
ugucugccucgacagaaga

SEQ ID NO: 151289 - RNA, 19 nt, Artificial Sequence
  Description of Artificial Sequence: Synthetic oligonucleotide
ugauaguuacagccuugcu

SEQ ID NO: 151290 - RNA, 19 nt, Artificial Sequence
  Description of Artificial Sequence: Synthetic oligonucleotide
cucauaugguccacacagc

SEQ ID NO: 151291 - RNA, 19 nt, Artificial Sequence
  Description of Artificial Sequence: Synthetic oligonucleotide
uccguaauucaaagccaca

SEQ ID NO: 151292 - RNA, 19 nt, Artificial Sequence
  Description of Artificial Sequence: Synthetic oligonucleotide
auguguguucacacgcacc

SEQ ID NO: 151293 - RNA, 19 nt, Artificial Sequence
  Description of Artificial Sequence: Synthetic oligonucleotide
ucgcucguauuucaugagu

SEQ ID NO: 151294 - RNA, 19 nt, Artificial Sequence
  Description of Artificial Sequence: Synthetic oligonucleotide
ugucgauauaugcuugcuu

SEQ ID NO: 151295 - RNA, 19 nt, Artificial Sequence
  Description of Artificial Sequence: Synthetic oligonucleotide
acaugcggaaauggagagc

SEQ ID NO: 151296 - RNA, 19 nt, Artificial Sequence
  Description of Artificial Sequence: Synthetic oligonucleotide
ucaccguucugauguggag

SEQ ID NO: 151297 - RNA, 19 nt, Artificial Sequence
  Description of Artificial Sequence: Synthetic oligonucleotide
ugccucgacagaagacccg

SEQ ID NO: 151298 - RNA, 19 nt, Artificial Sequence
  Description of Artificial Sequence: Synthetic oligonucleotide
ucgcaaacauuguucaauu

SEQ ID NO: 151299 - RNA, 19 nt, Artificial Sequence
  Description of Artificial Sequence: Synthetic oligonucleotide
gugauaguuacagccuugc

SEQ ID NO: 151300 - RNA, 19 nt, Artificial Sequence
  Description of Artificial Sequence: Synthetic oligonucleotide
agacagaauugcacacugc

SEQ ID NO: 151301 - RNA, 19 nt, Artificial Sequence
  Description of Artificial Sequence: Synthetic oligonucleotide
agagcccuuuucguuaggg

SEQ ID NO: 151302 - RNA, 19 nt, Artificial Sequence
  Description of Artificial Sequence: Synthetic oligonucleotide
cuucucaagaaggugagaa

SEQ ID NO: 151303 - RNA, 19 nt, Artificial Sequence
  Description of Artificial Sequence: Synthetic oligonucleotide
uuucguuaggguggcauuc

SEQ ID NO: 151304 - RNA, 19 nt, Artificial Sequence
  Description of Artificial Sequence: Synthetic oligonucleotide
cauccuugcuucugaaguc

SEQ ID NO: 151305 - RNA, 19 nt, Artificial Sequence
  Description of Artificial Sequence: Synthetic oligonucleotide
gguucgcaaacauuguuca

SEQ ID NO: 151306 - RNA, 19 nt, Artificial Sequence
  Description of Artificial Sequence: Synthetic oligonucleotide
agacuuagucucauuauaa

SEQ ID NO: 151307 - RNA, 19 nt, Artificial Sequence
  Description of Artificial Sequence: Synthetic oligonucleotide
cauuuggaguucucuccag

SEQ ID NO: 151308 - RNA, 19 nt, Artificial Sequence
  Description of Artificial Sequence: Synthetic oligonucleotide
caucgguuuguaccugggg

SEQ ID NO: 151309 - RNA, 19 nt, Artificial Sequence
  Description of Artificial Sequence: Synthetic oligonucleotide
acacaugcggaaauggaga

SEQ ID NO: 151310 - RNA, 19 nt, Artificial Sequence
  Description of Artificial Sequence: Synthetic oligonucleotide
uuuucguuaggguggcauu

SEQ ID NO: 151311 - RNA, 19 nt, Artificial Sequence
  Description of Artificial Sequence: Synthetic oligonucleotide
uccaaguggcaauacugua

SEQ ID NO: 151312 - RNA, 19 nt, Artificial Sequence
  Description of Artificial Sequence: Synthetic oligonucleotide
cugccucgacagaagaccc

SEQ ID NO: 151313 - RNA, 19 nt, Artificial Sequence
  Description of Artificial Sequence: Synthetic oligonucleotide
uggcaauacuguagaguac

SEQ ID NO: 151314 - RNA, 19 nt, Artificial Sequence
  Description of Artificial Sequence: Synthetic oligonucleotide
guuaagaaggucucucccu

SEQ ID NO: 151315 - RNA, 19 nt, Artificial Sequence
  Description of Artificial Sequence: Synthetic oligonucleotide
acuuucggccguuccucgg

SEQ ID NO: 151316 - RNA, 19 nt, Artificial Sequence
  Description of Artificial Sequence: Synthetic oligonucleotide
ugcggaaauggagagcaaa

SEQ ID NO: 151317 - RNA, 19 nt, Artificial Sequence
  Description of Artificial Sequence: Synthetic oligonucleotide
uuaaagcucauggggcagu

SEQ ID NO: 151318 - RNA, 19 nt, Artificial Sequence
  Description of Artificial Sequence: Synthetic oligonucleotide
ugagugcgcacaacagggu

SEQ ID NO: 151319 - RNA, 19 nt, Artificial Sequence
  Description of Artificial Sequence: Synthetic oligonucleotide
cuuucggccguuccucggc

SEQ ID NO: 151320 - RNA, 19 nt, Artificial Sequence
  Description of Artificial Sequence: Synthetic oligonucleotide
caccucauuaacagacuuc

SEQ ID NO: 151321 - RNA, 19 nt, Artificial Sequence
  Description of Artificial Sequence: Synthetic oligonucleotide
aaaugacaccacaggguga

SEQ ID NO: 151322 - RNA, 19 nt, Artificial Sequence
  Description of Artificial Sequence: Synthetic oligonucleotide
acgggacagacuuaauuuu

SEQ ID NO: 151323 - RNA, 19 nt, Artificial Sequence
  Description of Artificial Sequence: Synthetic oligonucleotide
gagugcgcacaacaggguc

SEQ ID NO: 151324 - RNA, 19 nt, Artificial Sequence
  Description of Artificial Sequence: Synthetic oligonucleotide
cacuguauggugauaguua

SEQ ID NO: 151325 - RNA, 19 nt, Artificial Sequence
  Description of Artificial Sequence: Synthetic oligonucleotide
uccuuuuagccugagcguu

SEQ ID NO: 151326 - RNA, 19 nt, Artificial Sequence
  Description of Artificial Sequence: Synthetic oligonucleotide
uguuagagcucaugagcuu

SEQ ID NO: 151327 - RNA, 19 nt, Artificial Sequence
  Description of Artificial Sequence: Synthetic oligonucleotide
ucucccuaacugccagacc

SEQ ID NO: 151328 - RNA, 19 nt, Artificial Sequence
  Description of Artificial Sequence: Synthetic oligonucleotide
cuguuagagcucaugagcu

SEQ ID NO: 151329 - RNA, 19 nt, Artificial Sequence
  Description of Artificial Sequence: Synthetic oligonucleotide
uugucgauauaugcuugcu

SEQ ID NO: 151330 - RNA, 19 nt, Artificial Sequence
  Description of Artificial Sequence: Synthetic oligonucleotide
acuugucgauauaugcuug

SEQ ID NO: 151331 - RNA, 19 nt, Artificial Sequence
  Description of Artificial Sequence: Synthetic oligonucleotide
auagacgacaaagucuguu

SEQ ID NO: 151332 - RNA, 19 nt, Artificial Sequence
  Description of Artificial Sequence: Synthetic oligonucleotide
caaggcuauucucccuuag

SEQ ID NO: 151333 - RNA, 19 nt, Artificial Sequence
  Description of Artificial Sequence: Synthetic oligonucleotide
cuuggcgagaacaacugcu

SEQ ID NO: 151334 - RNA, 19 nt, Artificial Sequence
  Description of Artificial Sequence: Synthetic oligonucleotide
acgacaaaacggccuauuu

SEQ ID NO: 151335 - RNA, 19 nt, Artificial Sequence
  Description of Artificial Sequence: Synthetic oligonucleotide
aaucgaacuuuaacaggau

SEQ ID NO: 151336 - RNA, 19 nt, Artificial Sequence
  Description of Artificial Sequence: Synthetic oligonucleotide
aguucaacguuuaccacuu

SEQ ID NO: 151337 - RNA, 19 nt, Artificial Sequence
  Description of Artificial Sequence: Synthetic oligonucleotide
cacgcuaaagagaugcucu

SEQ ID NO: 151338 - RNA, 19 nt, Artificial Sequence
  Description of Artificial Sequence: Synthetic oligonucleotide
accaaggcuauucucccuu

SEQ ID NO: 151339 - RNA, 19 nt, Artificial Sequence
  Description of Artificial Sequence: Synthetic oligonucleotide
uucguuaggguggcauuca

SEQ ID NO: 151340 - RNA, 19 nt, Artificial Sequence
  Description of Artificial Sequence: Synthetic oligonucleotide
uccacgcuaaagagaugcu

SEQ ID NO: 151341 - RNA, 19 nt, Artificial Sequence
  Description of Artificial Sequence: Synthetic oligonucleotide
ccgcaaacaguucaagccc

SEQ ID NO: 151342 - RNA, 19 nt, Artificial Sequence
  Description of Artificial Sequence: Synthetic oligonucleotide
ucguuaggguggcauucac

SEQ ID NO: 151343 - RNA, 19 nt, Artificial Sequence
  Description of Artificial Sequence: Synthetic oligonucleotide
caguucaacguuuaccacu

SEQ ID NO: 151344 - RNA, 19 nt, Artificial Sequence
  Description of Artificial Sequence: Synthetic oligonucleotide
uuuuagcgucguuucucuc

SEQ ID NO: 151345 - RNA, 19 nt, Artificial Sequence
  Description of Artificial Sequence: Synthetic oligonucleotide
cagacuuagucucauuaua

SEQ ID NO: 151346 - RNA, 19 nt, Artificial Sequence
  Description of Artificial Sequence: Synthetic oligonucleotide
gcuuccagcucaaaaggcc

SEQ ID NO: 151347 - RNA, 19 nt, Artificial Sequence
  Description of Artificial Sequence: Synthetic oligonucleotide
ugaccuucgcucguauuuc

SEQ ID NO: 151348 - RNA, 19 nt, Artificial Sequence
  Description of Artificial Sequence: Synthetic oligonucleotide
cucucccuaacugccagac

SEQ ID NO: 151349 - RNA, 19 nt, Artificial Sequence
  Description of Artificial Sequence: Synthetic oligonucleotide
ucggucuugaggugaguuu

SEQ ID NO: 151350 - RNA, 19 nt, Artificial Sequence
  Description of Artificial Sequence: Synthetic oligonucleotide
ccguaauucaaagccacag

SEQ ID NO: 151351 - RNA, 19 nt, Artificial Sequence
  Description of Artificial Sequence: Synthetic oligonucleotide
uuucggccguuccucggcu

SEQ ID NO: 151352 - RNA, 19 nt, Artificial Sequence
  Description of Artificial Sequence: Synthetic oligonucleotide
cacaccucacgggacagug

SEQ ID NO: 151353 - RNA, 19 nt, Artificial Sequence
  Description of Artificial Sequence: Synthetic oligonucleotide
cuguaagaagccucaggaa

SEQ ID NO: 151354 - RNA, 19 nt, Artificial Sequence
  Description of Artificial Sequence: Synthetic oligonucleotide
ucccuaacugccagaccaa

SEQ ID NO: 151355 - RNA, 19 nt, Artificial Sequence
  Description of Artificial Sequence: Synthetic oligonucleotide
cuccuccaauacuuucggc

SEQ ID NO: 151356 - RNA, 19 nt, Artificial Sequence
  Description of Artificial Sequence: Synthetic oligonucleotide
caccucacgggacagugca

SEQ ID NO: 151357 - RNA, 19 nt, Artificial Sequence
  Description of Artificial Sequence: Synthetic oligonucleotide
ggcacucacauccucgguc

SEQ ID NO: 151358 - RNA, 19 nt, Artificial Sequence
  Description of Artificial Sequence: Synthetic oligonucleotide
gaccuucgcucguauuuca

SEQ ID NO: 151359 - RNA, 19 nt, Artificial Sequence
  Description of Artificial Sequence: Synthetic oligonucleotide
uagccugagcguucaugac

SEQ ID NO: 151360 - RNA, 19 nt, Artificial Sequence
  Description of Artificial Sequence: Synthetic oligonucleotide
cauucaccguucugaugug

SEQ ID NO: 151361 - RNA, 19 nt, Artificial Sequence
  Description of Artificial Sequence: Synthetic oligonucleotide
acaccucacgggacagugc

SEQ ID NO: 151362 - RNA, 19 nt, Artificial Sequence
  Description of Artificial Sequence: Synthetic oligonucleotide
cucggcuucuugaaaucga

SEQ ID NO: 151363 - RNA, 19 nt, Artificial Sequence
  Description of Artificial Sequence: Synthetic oligonucleotide
gagugcucggauuuuggau

SEQ ID NO: 151364 - RNA, 19 nt, Artificial Sequence
  Description of Artificial Sequence: Synthetic oligonucleotide
acgcuaaagagaugcucuu

SEQ ID NO: 151365 - RNA, 19 nt, Artificial Sequence
  Description of Artificial Sequence: Synthetic oligonucleotide
ggugauaguuacagccuug

SEQ ID NO: 151366 - RNA, 19 nt, Artificial Sequence
  Description of Artificial Sequence: Synthetic oligonucleotide
cuuuuagccugagcguuca

SEQ ID NO: 151367 - RNA, 19 nt, Artificial Sequence
  Description of Artificial Sequence: Synthetic oligonucleotide
cccgugucacaccucacgg

SEQ ID NO: 151368 - RNA, 19 nt, Artificial Sequence
  Description of Artificial Sequence: Synthetic oligonucleotide
uaacaggauugcccauuuu

SEQ ID NO: 151369 - RNA, 19 nt, Artificial Sequence
  Description of Artificial Sequence: Synthetic oligonucleotide
ucacgggacagugcacugu

SEQ ID NO: 151370 - RNA, 19 nt, Artificial Sequence
  Description of Artificial Sequence: Synthetic oligonucleotide
ucggccguuccucggcuuc

SEQ ID NO: 151371 - RNA, 19 nt, Artificial Sequence
  Description of Artificial Sequence: Synthetic oligonucleotide
cugagcguucaugacauua

SEQ ID NO: 151372 - RNA, 19 nt, Artificial Sequence
  Description of Artificial Sequence: Synthetic oligonucleotide
auguugaguggcaggucug

SEQ ID NO: 151373 - RNA, 19 nt, Artificial Sequence
  Description of Artificial Sequence: Synthetic oligonucleotide
accacuacccgaggcuucu

SEQ ID NO: 151374 - RNA, 19 nt, Artificial Sequence
  Description of Artificial Sequence: Synthetic oligonucleotide
cgcucguauuucaugagug

SEQ ID NO: 151375 - RNA, 19 nt, Artificial Sequence
  Description of Artificial Sequence: Synthetic oligonucleotide
uccaauacuuucggccguu

SEQ ID NO: 151376 - RNA, 19 nt, Artificial Sequence
  Description of Artificial Sequence: Synthetic oligonucleotide
ccggagacagaauugcaca

SEQ ID NO: 151377 - RNA, 19 nt, Artificial Sequence
  Description of Artificial Sequence: Synthetic oligonucleotide
ccgacugaacaccucauga

SEQ ID NO: 151378 - RNA, 19 nt, Artificial Sequence
  Description of Artificial Sequence: Synthetic oligonucleotide
ggugaguuuguuccaucaa

SEQ ID NO: 151379 - RNA, 19 nt, Artificial Sequence
  Description of Artificial Sequence: Synthetic oligonucleotide
caaucuguuacuggcuucu

SEQ ID NO: 151380 - RNA, 19 nt, Artificial Sequence
  Description of Artificial Sequence: Synthetic oligonucleotide
aggguccgaauagaacgcu

SEQ ID NO: 151381 - RNA, 19 nt, Artificial Sequence
  Description of Artificial Sequence: Synthetic oligonucleotide
ccaucgguuuguaccuggg

SEQ ID NO: 151382 - RNA, 19 nt, Artificial Sequence
  Description of Artificial Sequence: Synthetic oligonucleotide
auuucccgugucacaccuc

SEQ ID NO: 151383 - RNA, 19 nt, Artificial Sequence
  Description of Artificial Sequence: Synthetic oligonucleotide
uucccgugucacaccucac

SEQ ID NO: 151384 - RNA, 19 nt, Artificial Sequence
  Description of Artificial Sequence: Synthetic oligonucleotide
gaccaucgguuuguaccug

SEQ ID NO: 151385 - RNA, 19 nt, Artificial Sequence
  Description of Artificial Sequence: Synthetic oligonucleotide
gagcccuuuucguuagggu

SEQ ID NO: 151386 - RNA, 19 nt, Artificial Sequence
  Description of Artificial Sequence: Synthetic oligonucleotide
ccgugucacaccucacggg

SEQ ID NO: 151387 - RNA, 19 nt, Artificial Sequence
  Description of Artificial Sequence: Synthetic oligonucleotide
uggcuguuaucugcuccac

SEQ ID NO: 151388 - RNA, 19 nt, Artificial Sequence
  Description of Artificial Sequence: Synthetic oligonucleotide
cuuagccugguccucuccu

SEQ ID NO: 151389 - RNA, 19 nt, Artificial Sequence
  Description of Artificial Sequence: Synthetic oligonucleotide
caccacuacccgaggcuuc

SEQ ID NO: 151390 - RNA, 19 nt, Artificial Sequence
  Description of Artificial Sequence: Synthetic oligonucleotide
cacacgcaccuugacuuuc

SEQ ID NO: 151391 - RNA, 19 nt, Artificial Sequence
  Description of Artificial Sequence: Synthetic oligonucleotide
aaucuacgggacagacuua

SEQ ID NO: 151392 - RNA, 19 nt, Artificial Sequence
  Description of Artificial Sequence: Synthetic oligonucleotide
ccuuggcgagaacaacugc

SEQ ID NO: 151393 - RNA, 19 nt, Artificial Sequence
  Description of Artificial Sequence: Synthetic oligonucleotide
cuuuucguuaggguggcau

SEQ ID NO: 151394 - RNA, 19 nt, Artificial Sequence
  Description of Artificial Sequence: Synthetic oligonucleotide
cacgcaccuugacuuucac

SEQ ID NO: 151395 - RNA, 19 nt, Artificial Sequence
  Description of Artificial Sequence: Synthetic oligonucleotide
cagagcccuuuucguuagg

SEQ ID NO: 151396 - RNA, 19 nt, Artificial Sequence
  Description of Artificial Sequence: Synthetic oligonucleotide
gccuuggcgagaacaacug

SEQ ID NO: 151397 - RNA, 19 nt, Artificial Sequence
  Description of Artificial Sequence: Synthetic oligonucleotide
uccuugaccuucgcucgua

SEQ ID NO: 151398 - RNA, 19 nt, Artificial Sequence
  Description of Artificial Sequence: Synthetic oligonucleotide
cauaugguccacacagcuu

SEQ ID NO: 151399 - RNA, 19 nt, Artificial Sequence
  Description of Artificial Sequence: Synthetic oligonucleotide
cagccacacgacucuguca

SEQ ID NO: 151400 - RNA, 19 nt, Artificial Sequence
  Description of Artificial Sequence: Synthetic oligonucleotide
acacgcaccuugacuuuca

SEQ ID NO: 151401 - RNA, 19 nt, Artificial Sequence
  Description of Artificial Sequence: Synthetic oligonucleotide
ggguugauuuacaacuggu

SEQ ID NO: 151402 - RNA, 19 nt, Artificial Sequence
  Description of Artificial Sequence: Synthetic oligonucleotide
cgcaaacauuguucaauuc

SEQ ID NO: 151403 - RNA, 19 nt, Artificial Sequence
  Description of Artificial Sequence: Synthetic oligonucleotide
cugguucgcaaacauuguu

SEQ ID NO: 151404 - RNA, 19 nt, Artificial Sequence
  Description of Artificial Sequence: Synthetic oligonucleotide
cuccaauacuuucggccgu

SEQ ID NO: 151405 - RNA, 19 nt, Artificial Sequence
  Description of Artificial Sequence: Synthetic oligonucleotide
uucggccguuccucggcuu

SEQ ID NO: 151406 - RNA, 19 nt, Artificial Sequence
  Description of Artificial Sequence: Synthetic oligonucleotide
gcaguccaaguggcaauac

SEQ ID NO: 151407 - RNA, 19 nt, Artificial Sequence
  Description of Artificial Sequence: Synthetic oligonucleotide
gguuccgacugaacaccuc

SEQ ID NO: 151408 - RNA, 19 nt, Artificial Sequence
  Description of Artificial Sequence: Synthetic oligonucleotide
caccaaggcuauucucccu

SEQ ID NO: 151409 - RNA, 19 nt, Artificial Sequence
  Description of Artificial Sequence: Synthetic oligonucleotide
ugcgcacaacaggguccug

SEQ ID NO: 151410 - RNA, 19 nt, Artificial Sequence
  Description of Artificial Sequence: Synthetic oligonucleotide
augcggaaauggagagcaa

SEQ ID NO: 151411 - RNA, 19 nt, Artificial Sequence
  Description of Artificial Sequence: Synthetic oligonucleotide
ccucgacagaagacccguc

SEQ ID NO: 151412 - RNA, 19 nt, Artificial Sequence
  Description of Artificial Sequence: Synthetic oligonucleotide
cguuccucggcuucuugaa

SEQ ID NO: 151413 - RNA, 19 nt, Artificial Sequence
  Description of Artificial Sequence: Synthetic oligonucleotide
gccucgacagaagacccgu

SEQ ID NO: 151414 - RNA, 19 nt, Artificial Sequence
  Description of Artificial Sequence: Synthetic oligonucleotide
ccaaggcuauucucccuua

SEQ ID NO: 151415 - RNA, 19 nt, Artificial Sequence
  Description of Artificial Sequence: Synthetic oligonucleotide
ccuucucaagaaggugaga

SEQ ID NO: 151416 - RNA, 19 nt, Artificial Sequence
  Description of Artificial Sequence: Synthetic oligonucleotide
gcucggauuuuggauucau

SEQ ID NO: 151417 - RNA, 19 nt, Artificial Sequence
  Description of Artificial Sequence: Synthetic oligonucleotide
cccuaacugccagaccaaa

SEQ ID NO: 151418 - RNA, 19 nt, Artificial Sequence
  Description of Artificial Sequence: Synthetic oligonucleotide
ggguccgaauagaacgcuu

SEQ ID NO: 151419 - RNA, 19 nt, Artificial Sequence
  Description of Artificial Sequence: Synthetic oligonucleotide
ccuugaccuucgcucguau

SEQ ID NO: 151420 - RNA, 19 nt, Artificial Sequence
  Description of Artificial Sequence: Synthetic oligonucleotide
ccuuuucguuaggguggca

SEQ ID NO: 151421 - RNA, 19 nt, Artificial Sequence
  Description of Artificial Sequence: Synthetic oligonucleotide
accauaaucacacauuaac

SEQ ID NO: 151422 - RNA, 19 nt, Artificial Sequence
  Description of Artificial Sequence: Synthetic oligonucleotide
acauaaaggcaauaaaugg

SEQ ID NO: 151423 - RNA, 19 nt, Artificial Sequence
  Description of Artificial Sequence: Synthetic oligonucleotide
aauaugacugacuuggggu

SEQ ID NO: 151424 - RNA, 19 nt, Artificial Sequence
  Description of Artificial Sequence: Synthetic oligonucleotide
uauaccuggauucauagcu

SEQ ID NO: 151425 - RNA, 19 nt, Artificial Sequence
  Description of Artificial Sequence: Synthetic oligonucleotide
aaugcaugcagaucugaac

SEQ ID NO: 151426 - RNA, 19 nt, Artificial Sequence
  Description of Artificial Sequence: Synthetic oligonucleotide
agaauuaacagaguuguac

SEQ ID NO: 151427 - RNA, 19 nt, Artificial Sequence
  Description of Artificial Sequence: Synthetic oligonucleotide
uggguauccaguaacaugc

SEQ ID NO: 151428 - RNA, 19 nt, Artificial Sequence
  Description of Artificial Sequence: Synthetic oligonucleotide
aacgcugcgugacauauac

SEQ ID NO: 151429 - RNA, 19 nt, Artificial Sequence
  Description of Artificial Sequence: Synthetic oligonucleotide
uauacauaggcacacagau

SEQ ID NO: 151430 - RNA, 19 nt, Artificial Sequence
  Description of Artificial Sequence: Synthetic oligonucleotide
uaaacuaggccaaagcucu

SEQ ID NO: 151431 - RNA, 19 nt, Artificial Sequence
  Description of Artificial Sequence: Synthetic oligonucleotide
uuuauaccuggauucauag

SEQ ID NO: 151432 - RNA, 19 nt, Artificial Sequence
  Description of Artificial Sequence: Synthetic oligonucleotide
aauaaaccggcaugaacag

SEQ ID NO: 151433 - RNA, 19 nt, Artificial Sequence
  Description of Artificial Sequence: Synthetic oligonucleotide
auagauacauaaucuuuac

SEQ ID NO: 151434 - RNA, 19 nt, Artificial Sequence
  Description of Artificial Sequence: Synthetic oligonucleotide
gauuauggcuaauuuauac

SEQ ID NO: 151435 - RNA, 19 nt, Artificial Sequence
  Description of Artificial Sequence: Synthetic oligonucleotide
gauacgauacuagagcagg

SEQ ID NO: 151436 - RNA, 19 nt, Artificial Sequence
  Description of Artificial Sequence: Synthetic oligonucleotide
uccaaucucuacaagagac

SEQ ID NO: 151437 - RNA, 19 nt, Artificial Sequence
  Description of Artificial Sequence: Synthetic oligonucleotide
ucugucggcgcuaagacug

SEQ ID NO: 151438 - RNA, 19 nt, Artificial Sequence
  Description of Artificial Sequence: Synthetic oligonucleotide
caaggcaucagauaauggc

SEQ ID NO: 151439 - RNA, 19 nt, Artificial Sequence
  Description of Artificial Sequence: Synthetic oligonucleotide
aauuacuuacagaauuaac

SEQ ID NO: 151440 - RNA, 19 nt, Artificial Sequence
  Description of Artificial Sequence: Synthetic oligonucleotide
uaagcagaccuaaacuagg

SEQ ID NO: 151441 - RNA, 19 nt, Artificial Sequence
  Description of Artificial Sequence: Synthetic oligonucleotide
uauacacagauucacgccu

SEQ ID NO: 151442 - RNA, 19 nt, Artificial Sequence
  Description of Artificial Sequence: Synthetic oligonucleotide
caauuagccauauuugccc

SEQ ID NO: 151443 - RNA, 19 nt, Artificial Sequence
  Description of Artificial Sequence: Synthetic oligonucleotide
uuagaagagagcaugcaaa

SEQ ID NO: 151444 - RNA, 19 nt, Artificial Sequence
  Description of Artificial Sequence: Synthetic oligonucleotide
uuuacuuaguuacauugaa

SEQ ID NO: 151445 - RNA, 19 nt, Artificial Sequence
  Description of Artificial Sequence: Synthetic oligonucleotide
uaaauggguauccaguaac

SEQ ID NO: 151446 - RNA, 19 nt, Artificial Sequence
  Description of Artificial Sequence: Synthetic oligonucleotide
gaauuuaccacauccacaa

SEQ ID NO: 151447 - RNA, 19 nt, Artificial Sequence
  Description of Artificial Sequence: Synthetic oligonucleotide
auggcuaauuuauaccugg

SEQ ID NO: 151448 - RNA, 19 nt, Artificial Sequence
  Description of Artificial Sequence: Synthetic oligonucleotide
uccuaaaugaggaaucaac

SEQ ID NO: 151449 - RNA, 19 nt, Artificial Sequence
  Description of Artificial Sequence: Synthetic oligonucleotide
aagacuaggguguaucaca

SEQ ID NO: 151450 - RNA, 19 nt, Artificial Sequence
  Description of Artificial Sequence: Synthetic oligonucleotide
ucgaacugcaccaaugaug

SEQ ID NO: 151451 - RNA, 19 nt, Artificial Sequence
  Description of Artificial Sequence: Synthetic oligonucleotide
accuaaacuaggccaaagc

SEQ ID NO: 151452 - RNA, 19 nt, Artificial Sequence
  Description of Artificial Sequence: Synthetic oligonucleotide
uuagaagcaacugugauuu

SEQ ID NO: 151453 - RNA, 19 nt, Artificial Sequence
  Description of Artificial Sequence: Synthetic oligonucleotide
uagcuauagauacauaauc

SEQ ID NO: 151454 - RNA, 19 nt, Artificial Sequence
  Description of Artificial Sequence: Synthetic oligonucleotide
ugccauauuuuaaaguuac

SEQ ID NO: 151455 - RNA, 19 nt, Artificial Sequence
  Description of Artificial Sequence: Synthetic oligonucleotide
aguaagcaaauguacagga

SEQ ID NO: 151456 - RNA, 19 nt, Artificial Sequence
  Description of Artificial Sequence: Synthetic oligonucleotide
uuauacacagauucacgcc

SEQ ID NO: 151457 - RNA, 19 nt, Artificial Sequence
  Description of Artificial Sequence: Synthetic oligonucleotide
uuacguggcagccugacgu

SEQ ID NO: 151458 - RNA, 19 nt, Artificial Sequence
  Description of Artificial Sequence: Synthetic oligonucleotide
cacgauacgauacuagagc

SEQ ID NO: 151459 - RNA, 19 nt, Artificial Sequence
  Description of Artificial Sequence: Synthetic oligonucleotide
aaguuuacguggcagccug

SEQ ID NO: 151460 - RNA, 19 nt, Artificial Sequence
  Description of Artificial Sequence: Synthetic oligonucleotide
ucuaauaccaaugcacugu

SEQ ID NO: 151461 - RNA, 19 nt, Artificial Sequence
  Description of Artificial Sequence: Synthetic oligonucleotide
aggcacuacaaucugugac

SEQ ID NO: 151462 - RNA, 19 nt, Artificial Sequence
  Description of Artificial Sequence: Synthetic oligonucleotide
ucugaaacgaagugagagc

SEQ ID NO: 151463 - RNA, 19 nt, Artificial Sequence
  Description of Artificial Sequence: Synthetic oligonucleotide
aggacaguaaaccaaaaua

SEQ ID NO: 151464 - RNA, 19 nt, Artificial Sequence
  Description of Artificial Sequence: Synthetic oligonucleotide
aaccuaagucucuuuaaca

SEQ ID NO: 151465 - RNA, 19 nt, Artificial Sequence
  Description of Artificial Sequence: Synthetic oligonucleotide
gacaugucuuaacagauca

SEQ ID NO: 151466 - RNA, 19 nt, Artificial Sequence
  Description of Artificial Sequence: Synthetic oligonucleotide
gagaauacggagaacgcag

SEQ ID NO: 151467 - RNA, 19 nt, Artificial Sequence
  Description of Artificial Sequence: Synthetic oligonucleotide
uuacccagauuucucaaca

SEQ ID NO: 151468 - RNA, 19 nt, Artificial Sequence
  Description of Artificial Sequence: Synthetic oligonucleotide
cauaagaguuuucaggcac

SEQ ID NO: 151469 - RNA, 19 nt, Artificial Sequence
  Description of Artificial Sequence: Synthetic oligonucleotide
auacggagaacgcagcauc

SEQ ID NO: 151470 - RNA, 19 nt, Artificial Sequence
  Description of Artificial Sequence: Synthetic oligonucleotide
acggucaaggcaauuagcc

SEQ ID NO: 151471 - RNA, 19 nt, Artificial Sequence
  Description of Artificial Sequence: Synthetic oligonucleotide
aacuccuaaaugaggaauc

SEQ ID NO: 151472 - RNA, 19 nt, Artificial Sequence
  Description of Artificial Sequence: Synthetic oligonucleotide
agcagaccuaaacuaggcc

SEQ ID NO: 151473 - RNA, 19 nt, Artificial Sequence
  Description of Artificial Sequence: Synthetic oligonucleotide
gaaacgaagugagagcaag

SEQ ID NO: 151474 - RNA, 19 nt, Artificial Sequence
  Description of Artificial Sequence: Synthetic oligonucleotide
aguuuacuaaagucuacug

SEQ ID NO: 151475 - RNA, 19 nt, Artificial Sequence
  Description of Artificial Sequence: Synthetic oligonucleotide
acucauucauucgaacugc

SEQ ID NO: 151476 - RNA, 19 nt, Artificial Sequence
  Description of Artificial Sequence: Synthetic oligonucleotide
uuacuuaguuacauugaac

SEQ ID NO: 151477 - RNA, 19 nt, Artificial Sequence
  Description of Artificial Sequence: Synthetic oligonucleotide
ugaccauaaucacacauua

SEQ ID NO: 151478 - RNA, 19 nt, Artificial Sequence
  Description of Artificial Sequence: Synthetic oligonucleotide
uuagcuagucaaccaacca

SEQ ID NO: 151479 - RNA, 19 nt, Artificial Sequence
  Description of Artificial Sequence: Synthetic oligonucleotide
uuuagagcgugcacagucc

SEQ ID NO: 151480 - RNA, 19 nt, Artificial Sequence
  Description of Artificial Sequence: Synthetic oligonucleotide
agaaaugaaaucuggcuua

SEQ ID NO: 151481 - RNA, 19 nt, Artificial Sequence
  Description of Artificial Sequence: Synthetic oligonucleotide
acuagcacgacagccuucc

SEQ ID NO: 151482 - RNA, 19 nt, Artificial Sequence
  Description of Artificial Sequence: Synthetic oligonucleotide
agcaccgaagacuagggug

SEQ ID NO: 151483 - RNA, 19 nt, Artificial Sequence
  Description of Artificial Sequence: Synthetic oligonucleotide
aagcagaccuaaacuaggc

SEQ ID NO: 151484 - RNA, 19 nt, Artificial Sequence
  Description of Artificial Sequence: Synthetic oligonucleotide
cucugaaacgaagugagag

SEQ ID NO: 151485 - RNA, 19 nt, Artificial Sequence
  Description of Artificial Sequence: Synthetic oligonucleotide
guaaccaaaguaacguggg

SEQ ID NO: 151486 - RNA, 19 nt, Artificial Sequence
  Description of Artificial Sequence: Synthetic oligonucleotide
gaaaugguacucugaauuc

SEQ ID NO: 151487 - RNA, 19 nt, Artificial Sequence
  Description of Artificial Sequence: Synthetic oligonucleotide
ugugaagacuaaaugggua

SEQ ID NO: 151488 - RNA, 19 nt, Artificial Sequence
  Description of Artificial Sequence: Synthetic oligonucleotide
uggaaugauucuugcauca

SEQ ID NO: 151489 - RNA, 19 nt, Artificial Sequence
  Description of Artificial Sequence: Synthetic oligonucleotide
gaaccuaagucucuuuaac

SEQ ID NO: 151490 - RNA, 19 nt, Artificial Sequence
  Description of Artificial Sequence: Synthetic oligonucleotide
gaagacuaaauggguaucc

SEQ ID NO: 151491 - RNA, 19 nt, Artificial Sequence
  Description of Artificial Sequence: Synthetic oligonucleotide
agacuaaauggguauccag

SEQ ID NO: 151492 - RNA, 19 nt, Artificial Sequence
  Description of Artificial Sequence: Synthetic oligonucleotide
gcaggaauuuaccacaucc

SEQ ID NO: 151493 - RNA, 19 nt, Artificial Sequence
  Description of Artificial Sequence: Synthetic oligonucleotide
aacuauggaaugauucuug

SEQ ID NO: 151494 - RNA, 19 nt, Artificial Sequence
  Description of Artificial Sequence: Synthetic oligonucleotide
ucguugacugauuauggcu

SEQ ID NO: 151495 - RNA, 19 nt, Artificial Sequence
  Description of Artificial Sequence: Synthetic oligonucleotide
agguaagcagaccuaaacu

SEQ ID NO: 151496 - RNA, 19 nt, Artificial Sequence
  Description of Artificial Sequence: Synthetic oligonucleotide
uuaaggaaggauagaguua

SEQ ID NO: 151497 - RNA, 19 nt, Artificial Sequence
  Description of Artificial Sequence: Synthetic oligonucleotide
ugcuauucacccacaagcu

SEQ ID NO: 151498 - RNA, 19 nt, Artificial Sequence
  Description of Artificial Sequence: Synthetic oligonucleotide
acgacaccuggucacacac

SEQ ID NO: 151499 - RNA, 19 nt, Artificial Sequence
  Description of Artificial Sequence: Synthetic oligonucleotide
uacaaccacuagaacagca

SEQ ID NO: 151500 - RNA, 19 nt, Artificial Sequence
  Description of Artificial Sequence: Synthetic oligonucleotide
aaucucuacaagagacugg

SEQ ID NO: 151501 - RNA, 19 nt, Artificial Sequence
  Description of Artificial Sequence: Synthetic oligonucleotide
guaagcagaccuaaacuag

SEQ ID NO: 151502 - RNA, 19 nt, Artificial Sequence
  Description of Artificial Sequence: Synthetic oligonucleotide
ugcgugacauauacaacug

SEQ ID NO: 151503 - RNA, 19 nt, Artificial Sequence
  Description of Artificial Sequence: Synthetic oligonucleotide
acgauacgauacuagagca

SEQ ID NO: 151504 - RNA, 19 nt, Artificial Sequence
  Description of Artificial Sequence: Synthetic oligonucleotide
uuuacguggcagccugacg

SEQ ID NO: 151505 - RNA, 19 nt, Artificial Sequence
  Description of Artificial Sequence: Synthetic oligonucleotide
gguaaccaaaguaacgugg

SEQ ID NO: 151506 - RNA, 19 nt, Artificial Sequence
  Description of Artificial Sequence: Synthetic oligonucleotide
aaugguacucugaauucug

SEQ ID NO: 151507 - RNA, 19 nt, Artificial Sequence
  Description of Artificial Sequence: Synthetic oligonucleotide
ucuacaagagacugguuuu

SEQ ID NO: 151508 - RNA, 19 nt, Artificial Sequence
  Description of Artificial Sequence: Synthetic oligonucleotide
uuagagcgugcacaguccc

SEQ ID NO: 151509 - RNA, 19 nt, Artificial Sequence
  Description of Artificial Sequence: Synthetic oligonucleotide
aggucguuuaucuaguuuu

SEQ ID NO: 151510 - RNA, 19 nt, Artificial Sequence
  Description of Artificial Sequence: Synthetic oligonucleotide
agcuauagauacauaaucu

SEQ ID NO: 151511 - RNA, 19 nt, Artificial Sequence
  Description of Artificial Sequence: Synthetic oligonucleotide
gaggaaucaacauucagau

SEQ ID NO: 151512 - RNA, 19 nt, Artificial Sequence
  Description of Artificial Sequence: Synthetic oligonucleotide
acagguaaccaaaguaacg

SEQ ID NO: 151513 - RNA, 19 nt, Artificial Sequence
  Description of Artificial Sequence: Synthetic oligonucleotide
acuaaauggguauccagua

SEQ ID NO: 151514 - RNA, 19 nt, Artificial Sequence
  Description of Artificial Sequence: Synthetic oligonucleotide
uuauaccuggauucauagc

SEQ ID NO: 151515 - RNA, 19 nt, Artificial Sequence
  Description of Artificial Sequence: Synthetic oligonucleotide
agcaguugugaccauccag

SEQ ID NO: 151516 - RNA, 19 nt, Artificial Sequence
  Description of Artificial Sequence: Synthetic oligonucleotide
agccccaugauaauuuugg

SEQ ID NO: 151517 - RNA, 19 nt, Artificial Sequence
  Description of Artificial Sequence: Synthetic oligonucleotide
ucguuuaucuaguuuuaaa

SEQ ID NO: 151518 - RNA, 19 nt, Artificial Sequence
  Description of Artificial Sequence: Synthetic oligonucleotide
acaaccacuagaacagcac

SEQ ID NO: 151519 - RNA, 19 nt, Artificial Sequence
  Description of Artificial Sequence: Synthetic oligonucleotide
gcgucuuuacccuacaacc

SEQ ID NO: 151520 - RNA, 19 nt, Artificial Sequence
  Description of Artificial Sequence: Synthetic oligonucleotide
acugucuacacguuguaua

SEQ ID NO: 151521 - RNA, 19 nt, Artificial Sequence
  Description of Artificial Sequence: Synthetic oligonucleotide
uuccaaucucuacaagaga

SEQ ID NO: 151522 - RNA, 19 nt, Artificial Sequence
  Description of Artificial Sequence: Synthetic oligonucleotide
ugauuauuuugugaguaau

SEQ ID NO: 151523 - RNA, 19 nt, Artificial Sequence
  Description of Artificial Sequence: Synthetic oligonucleotide
aucucuacaagagacuggu

SEQ ID NO: 151524 - RNA, 19 nt, Artificial Sequence
  Description of Artificial Sequence: Synthetic oligonucleotide
agaauacggagaacgcagc

SEQ ID NO: 151525 - RNA, 19 nt, Artificial Sequence
  Description of Artificial Sequence: Synthetic oligonucleotide
acgaagugagagcaagcag

SEQ ID NO: 151526 - RNA, 19 nt, Artificial Sequence
  Description of Artificial Sequence: Synthetic oligonucleotide
ggguuuggcacauaaaaca

SEQ ID NO: 151527 - RNA, 19 nt, Artificial Sequence
  Description of Artificial Sequence: Synthetic oligonucleotide
aagacuaaauggguaucca

SEQ ID NO: 151528 - RNA, 19 nt, Artificial Sequence
  Description of Artificial Sequence: Synthetic oligonucleotide
cagauguuuagcuagucaa

SEQ ID NO: 151529 - RNA, 19 nt, Artificial Sequence
  Description of Artificial Sequence: Synthetic oligonucleotide
caugcuccuugaacuaugg

SEQ ID NO: 151530 - RNA, 19 nt, Artificial Sequence
  Description of Artificial Sequence: Synthetic oligonucleotide
agguaaccaaaguaacgug

SEQ ID NO: 151531 - RNA, 19 nt, Artificial Sequence
  Description of Artificial Sequence: Synthetic oligonucleotide
ggcaauaaauggaacagug

SEQ ID NO: 151532 - RNA, 19 nt, Artificial Sequence
  Description of Artificial Sequence: Synthetic oligonucleotide
agaaccuaagucucuuuaa

SEQ ID NO: 151533 - RNA, 19 nt, Artificial Sequence
  Description of Artificial Sequence: Synthetic oligonucleotide
cuaggguguaucacacugc

SEQ ID NO: 151534 - RNA, 19 nt, Artificial Sequence
  Description of Artificial Sequence: Synthetic oligonucleotide
aauacggagaacgcagcau

SEQ ID NO: 151535 - RNA, 19 nt, Artificial Sequence
  Description of Artificial Sequence: Synthetic oligonucleotide
aaaucuggcuuagaagcaa

SEQ ID NO: 151536 - RNA, 19 nt, Artificial Sequence
  Description of Artificial Sequence: Synthetic oligonucleotide
ugauuauggcuaauuuaua

SEQ ID NO: 151537 - RNA, 19 nt, Artificial Sequence
  Description of Artificial Sequence: Synthetic oligonucleotide
agacuaggguguaucacac

SEQ ID NO: 151538 - RNA, 19 nt, Artificial Sequence
  Description of Artificial Sequence: Synthetic oligonucleotide
gagauucaggcccaaugca

SEQ ID NO: 151539 - RNA, 19 nt, Artificial Sequence
  Description of Artificial Sequence: Synthetic oligonucleotide
augauuauuuugugaguaa

SEQ ID NO: 151540 - RNA, 19 nt, Artificial Sequence
  Description of Artificial Sequence: Synthetic oligonucleotide
auucacgccuuguguugcc

SEQ ID NO: 151541 - RNA, 19 nt, Artificial Sequence
  Description of Artificial Sequence: Synthetic oligonucleotide
agucccuucgaacgcugcg

SEQ ID NO: 151542 - RNA, 19 nt, Artificial Sequence
  Description of Artificial Sequence: Synthetic oligonucleotide
uacccagauuucucaacag

SEQ ID NO: 151543 - RNA, 19 nt, Artificial Sequence
  Description of Artificial Sequence: Synthetic oligonucleotide
agagggaauaaaccggcau

SEQ ID NO: 151544 - RNA, 19 nt, Artificial Sequence
  Description of Artificial Sequence: Synthetic oligonucleotide
gucguugacugauuauggc

SEQ ID NO: 151545 - RNA, 19 nt, Artificial Sequence
  Description of Artificial Sequence: Synthetic oligonucleotide
acgauacuagagcagguaa

SEQ ID NO: 151546 - RNA, 19 nt, Artificial Sequence
  Description of Artificial Sequence: Synthetic oligonucleotide
guauacuucuaaaugcaga

SEQ ID NO: 151547 - RNA, 19 nt, Artificial Sequence
  Description of Artificial Sequence: Synthetic oligonucleotide
gaauacggagaacgcagca

SEQ ID NO: 151548 - RNA, 19 nt, Artificial Sequence
  Description of Artificial Sequence: Synthetic oligonucleotide
aacacggucaaggcaauua

SEQ ID NO: 151549 - RNA, 19 nt, Artificial Sequence
  Description of Artificial Sequence: Synthetic oligonucleotide
agggaauaaaccggcauga

SEQ ID NO: 151550 - RNA, 19 nt, Artificial Sequence
  Description of Artificial Sequence: Synthetic oligonucleotide
cuuagaagagagcaugcaa

SEQ ID NO: 151551 - RNA, 19 nt, Artificial Sequence
  Description of Artificial Sequence: Synthetic oligonucleotide
gauugaaaugguacucuga

SEQ ID NO: 151552 - RNA, 19 nt, Artificial Sequence
  Description of Artificial Sequence: Synthetic oligonucleotide
ucaagcacuccuguugaac

SEQ ID NO: 151553 - RNA, 19 nt, Artificial Sequence
  Description of Artificial Sequence: Synthetic oligonucleotide
uggcuaauuuauaccugga

SEQ ID NO: 151554 - RNA, 19 nt, Artificial Sequence
  Description of Artificial Sequence: Synthetic oligonucleotide
agcuagucaaccaaccaca

SEQ ID NO: 151555 - RNA, 19 nt, Artificial Sequence
  Description of Artificial Sequence: Synthetic oligonucleotide
accaggaguucacagguaa

SEQ ID NO: 151556 - RNA, 19 nt, Artificial Sequence
  Description of Artificial Sequence: Synthetic oligonucleotide
cacacgauacgauacuaga

SEQ ID NO: 151557 - RNA, 19 nt, Artificial Sequence
  Description of Artificial Sequence: Synthetic oligonucleotide
aggcaauuagccauauuug

SEQ ID NO: 151558 - RNA, 19 nt, Artificial Sequence
  Description of Artificial Sequence: Synthetic oligonucleotide
uaacgugggcugcuugcag

SEQ ID NO: 151559 - RNA, 19 nt, Artificial Sequence
  Description of Artificial Sequence: Synthetic oligonucleotide
ggcccaaugcacuucgggg

SEQ ID NO: 151560 - RNA, 19 nt, Artificial Sequence
  Description of Artificial Sequence: Synthetic oligonucleotide
acgagucaagacucagcuc

SEQ ID NO: 151561 - RNA, 19 nt, Artificial Sequence
  Description of Artificial Sequence: Synthetic oligonucleotide
gcaauuagccauauuugcc

SEQ ID NO: 151562 - RNA, 19 nt, Artificial Sequence
  Description of Artificial Sequence: Synthetic oligonucleotide
ugaagacuaaauggguauc

SEQ ID NO: 151563 - RNA, 19 nt, Artificial Sequence
  Description of Artificial Sequence: Synthetic oligonucleotide
uaccuggauucauagcuaa

SEQ ID NO: 151564 - RNA, 19 nt, Artificial Sequence
  Description of Artificial Sequence: Synthetic oligonucleotide
aguuuucaggcacuacaau

SEQ ID NO: 151565 - RNA, 19 nt, Artificial Sequence
  Description of Artificial Sequence: Synthetic oligonucleotide
uaacaugcuccuugaacua

SEQ ID NO: 151566 - RNA, 19 nt, Artificial Sequence
  Description of Artificial Sequence: Synthetic oligonucleotide
acuuagaagagagcaugca

SEQ ID NO: 151567 - RNA, 19 nt, Artificial Sequence
  Description of Artificial Sequence: Synthetic oligonucleotide
aaaaugaauucaagcucaa

SEQ ID NO: 151568 - RNA, 19 nt, Artificial Sequence
  Description of Artificial Sequence: Synthetic oligonucleotide
ggcacuacaaucugugaca

SEQ ID NO: 151569 - RNA, 19 nt, Artificial Sequence
  Description of Artificial Sequence: Synthetic oligonucleotide
aagcaccgaagacuagggu

SEQ ID NO: 151570 - RNA, 19 nt, Artificial Sequence
  Description of Artificial Sequence: Synthetic oligonucleotide
aagggagcgccagugguga

SEQ ID NO: 151571 - RNA, 19 nt, Artificial Sequence
  Description of Artificial Sequence: Synthetic oligonucleotide
gacuaaauggguauccagu

SEQ ID NO: 151572 - RNA, 19 nt, Artificial Sequence
  Description of Artificial Sequence: Synthetic oligonucleotide
cugcgugacauauacaacu

SEQ ID NO: 151573 - RNA, 19 nt, Artificial Sequence
  Description of Artificial Sequence: Synthetic oligonucleotide
ucccuucgaacgcugcgug

SEQ ID NO: 151574 - RNA, 19 nt, Artificial Sequence
  Description of Artificial Sequence: Synthetic oligonucleotide
cauuaucacccuccacccc

SEQ ID NO: 151575 - RNA, 19 nt, Artificial Sequence
  Description of Artificial Sequence: Synthetic oligonucleotide
ggucguugacugauuaugg

SEQ ID NO: 151576 - RNA, 19 nt, Artificial Sequence
  Description of Artificial Sequence: Synthetic oligonucleotide
gaccuaaacuaggccaaag

SEQ ID NO: 151577 - RNA, 19 nt, Artificial Sequence
  Description of Artificial Sequence: Synthetic oligonucleotide
guacuguguucacacggug

SEQ ID NO: 151578 - RNA, 19 nt, Artificial Sequence
  Description of Artificial Sequence: Synthetic oligonucleotide
ugacuagcacgacagccuu

SEQ ID NO: 151579 - RNA, 19 nt, Artificial Sequence
  Description of Artificial Sequence: Synthetic oligonucleotide
acacacgauacgauacuag

SEQ ID NO: 151580 - RNA, 19 nt, Artificial Sequence
  Description of Artificial Sequence: Synthetic oligonucleotide
uucccgugcccaaauuuaa

SEQ ID NO: 151581 - RNA, 19 nt, Artificial Sequence
  Description of Artificial Sequence: Synthetic oligonucleotide
uacgauacuagagcaggua

SEQ ID NO: 151582 - RNA, 19 nt, Artificial Sequence
  Description of Artificial Sequence: Synthetic oligonucleotide
agauaccagaacaaugcaa

SEQ ID NO: 151583 - RNA, 19 nt, Artificial Sequence
  Description of Artificial Sequence: Synthetic oligonucleotide
ucuuucuaaugggucuaca

SEQ ID NO: 151584 - RNA, 19 nt, Artificial Sequence
  Description of Artificial Sequence: Synthetic oligonucleotide
gaguuuucaggcacuacaa

SEQ ID NO: 151585 - RNA, 19 nt, Artificial Sequence
  Description of Artificial Sequence: Synthetic oligonucleotide
aacugucuacacguuguau

SEQ ID NO: 151586 - RNA, 19 nt, Artificial Sequence
  Description of Artificial Sequence: Synthetic oligonucleotide
ggcuuuacgagucaagacu

SEQ ID NO: 151587 - RNA, 19 nt, Artificial Sequence
  Description of Artificial Sequence: Synthetic oligonucleotide
guucuacacugucagucca

SEQ ID NO: 151588 - RNA, 19 nt, Artificial Sequence
  Description of Artificial Sequence: Synthetic oligonucleotide
caaccacuagaacagcaca

SEQ ID NO: 151589 - RNA, 19 nt, Artificial Sequence
  Description of Artificial Sequence: Synthetic oligonucleotide
ugacugauuauggcuaauu

SEQ ID NO: 151590 - RNA, 19 nt, Artificial Sequence
  Description of Artificial Sequence: Synthetic oligonucleotide
agcuaaaagccuccagauu

SEQ ID NO: 151591 - RNA, 19 nt, Artificial Sequence
  Description of Artificial Sequence: Synthetic oligonucleotide
gcugacuagcacgacagcc

SEQ ID NO: 151592 - RNA, 19 nt, Artificial Sequence
  Description of Artificial Sequence: Synthetic oligonucleotide
aucuaguuuuaaaugugaa

SEQ ID NO: 151593 - RNA, 19 nt, Artificial Sequence
  Description of Artificial Sequence: Synthetic oligonucleotide
gggucguugacugauuaug

SEQ ID NO: 151594 - RNA, 19 nt, Artificial Sequence
  Description of Artificial Sequence: Synthetic oligonucleotide
cagaccuaaacuaggccaa

SEQ ID NO: 151595 - RNA, 19 nt, Artificial Sequence
  Description of Artificial Sequence: Synthetic oligonucleotide
acaugucuuaacagaucag

SEQ ID NO: 151596 - RNA, 19 nt, Artificial Sequence
  Description of Artificial Sequence: Synthetic oligonucleotide
cuuuacgagucaagacuca

SEQ ID NO: 151597 - RNA, 19 nt, Artificial Sequence
  Description of Artificial Sequence: Synthetic oligonucleotide
aagugagagcaagcagaug

SEQ ID NO: 151598 - RNA, 19 nt, Artificial Sequence
  Description of Artificial Sequence: Synthetic oligonucleotide
gcuaauuuauaccuggauu

SEQ ID NO: 151599 - RNA, 19 nt, Artificial Sequence
  Description of Artificial Sequence: Synthetic oligonucleotide
agucaccgucugucggcgc

SEQ ID NO: 151600 - RNA, 19 nt, Artificial Sequence
  Description of Artificial Sequence: Synthetic oligonucleotide
ggccuucugaccauaauca

SEQ ID NO: 151601 - RNA, 19 nt, Artificial Sequence
  Description of Artificial Sequence: Synthetic oligonucleotide
gcuuuacgagucaagacuc

SEQ ID NO: 151602 - RNA, 19 nt, Artificial Sequence
  Description of Artificial Sequence: Synthetic oligonucleotide
cgaagugagagcaagcaga

SEQ ID NO: 151603 - RNA, 19 nt, Artificial Sequence
  Description of Artificial Sequence: Synthetic oligonucleotide
ggagaauacggagaacgca

SEQ ID NO: 151604 - RNA, 19 nt, Artificial Sequence
  Description of Artificial Sequence: Synthetic oligonucleotide
gacgacaccuggucacaca

SEQ ID NO: 151605 - RNA, 19 nt, Artificial Sequence
  Description of Artificial Sequence: Synthetic oligonucleotide
ucgggguuuggcacauaaa

SEQ ID NO: 151606 - RNA, 19 nt, Artificial Sequence
  Description of Artificial Sequence: Synthetic oligonucleotide
cacuccaccaaggaaggga

SEQ ID NO: 151607 - RNA, 19 nt, Artificial Sequence
  Description of Artificial Sequence: Synthetic oligonucleotide
cgauacuagagcagguaag

SEQ ID NO: 151608 - RNA, 19 nt, Artificial Sequence
  Description of Artificial Sequence: Synthetic oligonucleotide
uacguggcagccugacguc

SEQ ID NO: 151609 - RNA, 19 nt, Artificial Sequence
  Description of Artificial Sequence: Synthetic oligonucleotide
auacgauacuagagcaggu

SEQ ID NO: 151610 - RNA, 19 nt, Artificial Sequence
  Description of Artificial Sequence: Synthetic oligonucleotide
agagcccuggcaagguaag

SEQ ID NO: 151611 - RNA, 19 nt, Artificial Sequence
  Description of Artificial Sequence: Synthetic oligonucleotide
ggaguucacagguaaccaa

SEQ ID NO: 151612 - RNA, 19 nt, Artificial Sequence
  Description of Artificial Sequence: Synthetic oligonucleotide
agcaaugcaugcagaucug

SEQ ID NO: 151613 - RNA, 19 nt, Artificial Sequence
  Description of Artificial Sequence: Synthetic oligonucleotide
guguaucacacugcauuga

SEQ ID NO: 151614 - RNA, 19 nt, Artificial Sequence
  Description of Artificial Sequence: Synthetic oligonucleotide
cacccacaagcugacuagc

SEQ ID NO: 151615 - RNA, 19 nt, Artificial Sequence
  Description of Artificial Sequence: Synthetic oligonucleotide
ucucuacaagagacugguu

SEQ ID NO: 151616 - RNA, 19 nt, Artificial Sequence
  Description of Artificial Sequence: Synthetic oligonucleotide
ggcgcuaagacugcuucac

SEQ ID NO: 151617 - RNA, 19 nt, Artificial Sequence
  Description of Artificial Sequence: Synthetic oligonucleotide
caguuuacuaaagucuacu

SEQ ID NO: 151618 - RNA, 19 nt, Artificial Sequence
  Description of Artificial Sequence: Synthetic oligonucleotide
uucacgccuuguguugcca

SEQ ID NO: 151619 - RNA, 19 nt, Artificial Sequence
  Description of Artificial Sequence: Synthetic oligonucleotide
acacagauucacgccuugu

SEQ ID NO: 151620 - RNA, 19 nt, Artificial Sequence
  Description of Artificial Sequence: Synthetic oligonucleotide
augucaggaugggcuuuac

SEQ ID NO: 151621 - RNA, 19 nt, Artificial Sequence
  Description of Artificial Sequence: Synthetic oligonucleotide
cgauacgauacuagagcag

SEQ ID NO: 151622 - RNA, 19 nt, Artificial Sequence
  Description of Artificial Sequence: Synthetic oligonucleotide
uugacugauuauggcuaau

SEQ ID NO: 151623 - RNA, 19 nt, Artificial Sequence
  Description of Artificial Sequence: Synthetic oligonucleotide
gagagucagucaccauuaa

SEQ ID NO: 151624 - RNA, 19 nt, Artificial Sequence
  Description of Artificial Sequence: Synthetic oligonucleotide
uucacacggugagcaguug

SEQ ID NO: 151625 - RNA, 19 nt, Artificial Sequence
  Description of Artificial Sequence: Synthetic oligonucleotide
gucguuuaucuaguuuuaa

SEQ ID NO: 151626 - RNA, 19 nt, Artificial Sequence
  Description of Artificial Sequence: Synthetic oligonucleotide
cuaauaccaaugcacuguu

SEQ ID NO: 151627 - RNA, 19 nt, Artificial Sequence
  Description of Artificial Sequence: Synthetic oligonucleotide
agcgcgucuuuacccuaca

SEQ ID NO: 151628 - RNA, 19 nt, Artificial Sequence
  Description of Artificial Sequence: Synthetic oligonucleotide
caggcacuacaaucuguga

SEQ ID NO: 151629 - RNA, 19 nt, Artificial Sequence
  Description of Artificial Sequence: Synthetic oligonucleotide
caggcccaaugcacuucgg

SEQ ID NO: 151630 - RNA, 19 nt, Artificial Sequence
  Description of Artificial Sequence: Synthetic oligonucleotide
agccuuacauaaaggcaau

SEQ ID NO: 151631 - RNA, 19 nt, Artificial Sequence
  Description of Artificial Sequence: Synthetic oligonucleotide
cagguagcuauagauacau

SEQ ID NO: 151632 - RNA, 19 nt, Artificial Sequence
  Description of Artificial Sequence: Synthetic oligonucleotide
gacgucacacacgcacgca

SEQ ID NO: 151633 - RNA, 19 nt, Artificial Sequence
  Description of Artificial Sequence: Synthetic oligonucleotide
ggguuccucugaaacgaag

SEQ ID NO: 151634 - RNA, 19 nt, Artificial Sequence
  Description of Artificial Sequence: Synthetic oligonucleotide
agaccuaaacuaggccaaa

SEQ ID NO: 151635 - RNA, 19 nt, Artificial Sequence
  Description of Artificial Sequence: Synthetic oligonucleotide
cgcugcgugacauauacaa

SEQ ID NO: 151636 - RNA, 19 nt, Artificial Sequence
  Description of Artificial Sequence: Synthetic oligonucleotide
cuucgaacgcugcgugaca

SEQ ID NO: 151637 - RNA, 19 nt, Artificial Sequence
  Description of Artificial Sequence: Synthetic oligonucleotide
ugcuucccgugcccaaauu

SEQ ID NO: 151638 - RNA, 19 nt, Artificial Sequence
  Description of Artificial Sequence: Synthetic oligonucleotide
cgcgucuuuacccuacaac

SEQ ID NO: 151639 - RNA, 19 nt, Artificial Sequence
  Description of Artificial Sequence: Synthetic oligonucleotide
cuaaugggucuacaguguu

SEQ ID NO: 151640 - RNA, 19 nt, Artificial Sequence
  Description of Artificial Sequence: Synthetic oligonucleotide
gcgcuaagacugcuucacc

SEQ ID NO: 151641 - RNA, 19 nt, Artificial Sequence
  Description of Artificial Sequence: Synthetic oligonucleotide
cgucugucggcgcuaagac

SEQ ID NO: 151642 - RNA, 19 nt, Artificial Sequence
  Description of Artificial Sequence: Synthetic oligonucleotide
cguugacugauuauggcua

SEQ ID NO: 151643 - RNA, 19 nt, Artificial Sequence
  Description of Artificial Sequence: Synthetic oligonucleotide
gucaagcacuccuguugaa

SEQ ID NO: 151644 - RNA, 19 nt, Artificial Sequence
  Description of Artificial Sequence: Synthetic oligonucleotide
cacacacgauacgauacua

SEQ ID NO: 151645 - RNA, 19 nt, Artificial Sequence
  Description of Artificial Sequence: Synthetic oligonucleotide
agcccuugggacauucguu

SEQ ID NO: 151646 - RNA, 19 nt, Artificial Sequence
  Description of Artificial Sequence: Synthetic oligonucleotide
augcaggacgacaccuggu

SEQ ID NO: 151647 - RNA, 19 nt, Artificial Sequence
  Description of Artificial Sequence: Synthetic oligonucleotide
gucugucggcgcuaagacu

SEQ ID NO: 151648 - RNA, 19 nt, Artificial Sequence
  Description of Artificial Sequence: Synthetic oligonucleotide
gccccaugauaauuuugga

SEQ ID NO: 151649 - RNA, 19 nt, Artificial Sequence
  Description of Artificial Sequence: Synthetic oligonucleotide
accgucugucggcgcuaag

SEQ ID NO: 151650 - RNA, 19 nt, Artificial Sequence
  Description of Artificial Sequence: Synthetic oligonucleotide
ggcagccugacgucacaca

SEQ ID NO: 151651 - RNA, 19 nt, Artificial Sequence
  Description of Artificial Sequence: Synthetic oligonucleotide
ggucguuuaucuaguuuua

SEQ ID NO: 151652 - RNA, 19 nt, Artificial Sequence
  Description of Artificial Sequence: Synthetic oligonucleotide
cagcccuugggacauucgu

SEQ ID NO: 151653 - RNA, 19 nt, Artificial Sequence
  Description of Artificial Sequence: Synthetic oligonucleotide
ccggcaugaacagcacacc

SEQ ID NO: 151654 - RNA, 19 nt, Artificial Sequence
  Description of Artificial Sequence: Synthetic oligonucleotide
cacgcacacacgauacgau

SEQ ID NO: 151655 - RNA, 19 nt, Artificial Sequence
  Description of Artificial Sequence: Synthetic oligonucleotide
aggguguaucacacugcau

SEQ ID NO: 151656 - RNA, 19 nt, Artificial Sequence
  Description of Artificial Sequence: Synthetic oligonucleotide
agucaccauuaaggguggu

SEQ ID NO: 151657 - RNA, 19 nt, Artificial Sequence
  Description of Artificial Sequence: Synthetic oligonucleotide
gggaauaaaccggcaugaa

SEQ ID NO: 151658 - RNA, 19 nt, Artificial Sequence
  Description of Artificial Sequence: Synthetic oligonucleotide
gucccuucgaacgcugcgu

SEQ ID NO: 151659 - RNA, 19 nt, Artificial Sequence
  Description of Artificial Sequence: Synthetic oligonucleotide
gugugcuucccgugcccaa

SEQ ID NO: 151660 - RNA, 19 nt, Artificial Sequence
  Description of Artificial Sequence: Synthetic oligonucleotide
ggcaagguaagcagaccua

SEQ ID NO: 151661 - RNA, 19 nt, Artificial Sequence
  Description of Artificial Sequence: Synthetic oligonucleotide
cugaccggccaccaggguu

SEQ ID NO: 151662 - RNA, 19 nt, Artificial Sequence
  Description of Artificial Sequence: Synthetic oligonucleotide
agguagcuauagauacaua

SEQ ID NO: 151663 - RNA, 19 nt, Artificial Sequence
  Description of Artificial Sequence: Synthetic oligonucleotide
aggguuccucugaaacgaa

SEQ ID NO: 151664 - RNA, 19 nt, Artificial Sequence
  Description of Artificial Sequence: Synthetic oligonucleotide
cggucaaggcaauuagcca

SEQ ID NO: 151665 - RNA, 19 nt, Artificial Sequence
  Description of Artificial Sequence: Synthetic oligonucleotide
ggacgacaccuggucacac

SEQ ID NO: 151666 - RNA, 19 nt, Artificial Sequence
  Description of Artificial Sequence: Synthetic oligonucleotide
cacaagccccaugauaauu

SEQ ID NO: 151667 - RNA, 19 nt, Artificial Sequence
  Description of Artificial Sequence: Synthetic oligonucleotide
acgcugcgugacauauaca

SEQ ID NO: 151668 - RNA, 19 nt, Artificial Sequence
  Description of Artificial Sequence: Synthetic oligonucleotide
ccgucugucggcgcuaaga

SEQ ID NO: 151669 - RNA, 19 nt, Artificial Sequence
  Description of Artificial Sequence: Synthetic oligonucleotide
ccuugaacuauggaaugau

SEQ ID NO: 151670 - RNA, 19 nt, Artificial Sequence
  Description of Artificial Sequence: Synthetic oligonucleotide
gccuuacauaaaggcaaua

SEQ ID NO: 151671 - RNA, 19 nt, Artificial Sequence
  Description of Artificial Sequence: Synthetic oligonucleotide
cccuucgaacgcugcguga

SEQ ID NO: 151672 - RNA, 19 nt, Artificial Sequence
  Description of Artificial Sequence: Synthetic oligonucleotide
gcgcgucuuuacccuacaa

SEQ ID NO: 151673 - RNA, 19 nt, Artificial Sequence
  Description of Artificial Sequence: Synthetic oligonucleotide
gccuguguguguguauaau

SEQ ID NO: 151674 - RNA, 19 nt, Artificial Sequence
  Description of Artificial Sequence: Synthetic oligonucleotide
gucggcgcuaagacugcuu

SEQ ID NO: 151675 - RNA, 19 nt, Artificial Sequence
  Description of Artificial Sequence: Synthetic oligonucleotide
cggcgcuaagacugcuuca

SEQ ID NO: 151676 - RNA, 19 nt, Artificial Sequence
  Description of Artificial Sequence: Synthetic oligonucleotide
cuucgggguuuggcacaua

SEQ ID NO: 151677 - RNA, 19 nt, Artificial Sequence
  Description of Artificial Sequence: Synthetic oligonucleotide
gaucagcccuugggacauu

SEQ ID NO: 151678 - RNA, 19 nt, Artificial Sequence
  Description of Artificial Sequence: Synthetic oligonucleotide
aacaauucgaucucucugc

SEQ ID NO: 151679 - RNA, 19 nt, Artificial Sequence
  Description of Artificial Sequence: Synthetic oligonucleotide
agaaugauguuuuaggugg

SEQ ID NO: 151680 - RNA, 19 nt, Artificial Sequence
  Description of Artificial Sequence: Synthetic oligonucleotide
cauacaacagaucauaugg

SEQ ID NO: 151681 - RNA, 19 nt, Artificial Sequence
  Description of Artificial Sequence: Synthetic oligonucleotide
uguucuauuauacaaacgu

SEQ ID NO: 151682 - RNA, 19 nt, Artificial Sequence
  Description of Artificial Sequence: Synthetic oligonucleotide
aaaacgaaucaccuucucc

SEQ ID NO: 151683 - RNA, 19 nt, Artificial Sequence
  Description of Artificial Sequence: Synthetic oligonucleotide
cauacauauauauauauac

SEQ ID NO: 151684 - RNA, 19 nt, Artificial Sequence
  Description of Artificial Sequence: Synthetic oligonucleotide
uauguauaauuacauaucc

SEQ ID NO: 151685 - RNA, 19 nt, Artificial Sequence
  Description of Artificial Sequence: Synthetic oligonucleotide
uauuauacaaacguaacag

SEQ ID NO: 151686 - RNA, 19 nt, Artificial Sequence
  Description of Artificial Sequence: Synthetic oligonucleotide
aaacaguauucccacacgc

SEQ ID NO: 151687 - RNA, 19 nt, Artificial Sequence
  Description of Artificial Sequence: Synthetic oligonucleotide
uuuugcaauguuaacaccc

SEQ ID NO: 151688 - RNA, 19 nt, Artificial Sequence
  Description of Artificial Sequence: Synthetic oligonucleotide
gauaaaacgaaucaccuuc

SEQ ID NO: 151689 - RNA, 19 nt, Artificial Sequence
  Description of Artificial Sequence: Synthetic oligonucleotide
aauuagcaggccuuugcgc

SEQ ID NO: 151690 - RNA, 19 nt, Artificial Sequence
  Description of Artificial Sequence: Synthetic oligonucleotide
agcauuguagaauccaagc

SEQ ID NO: 151691 - RNA, 19 nt, Artificial Sequence
  Description of Artificial Sequence: Synthetic oligonucleotide
ucaaguucgaagcaggaug

SEQ ID NO: 151692 - RNA, 19 nt, Artificial Sequence
  Description of Artificial Sequence: Synthetic oligonucleotide
ugaguuauaauaaaugauu

SEQ ID NO: 151693 - RNA, 19 nt, Artificial Sequence
  Description of Artificial Sequence: Synthetic oligonucleotide
ugucccgcaagacugaugg

SEQ ID NO: 151694 - RNA, 19 nt, Artificial Sequence
  Description of Artificial Sequence: Synthetic oligonucleotide
aauucgaucucucugcaga

SEQ ID NO: 151695 - RNA, 19 nt, Artificial Sequence
  Description of Artificial Sequence: Synthetic oligonucleotide
aaaagagagcccauuaagg

SEQ ID NO: 151696 - RNA, 19 nt, Artificial Sequence
  Description of Artificial Sequence: Synthetic oligonucleotide
aaaucgcucauccccaagg

SEQ ID NO: 151697 - RNA, 19 nt, Artificial Sequence
  Description of Artificial Sequence: Synthetic oligonucleotide
ucuauuauacaaacguaac

SEQ ID NO: 151698 - RNA, 19 nt, Artificial Sequence
  Description of Artificial Sequence: Synthetic oligonucleotide
auagcuucgucacagaaca

SEQ ID NO: 151699 - RNA, 19 nt, Artificial Sequence
  Description of Artificial Sequence: Synthetic oligonucleotide
auaauaauguuggauauug

SEQ ID NO: 151700 - RNA, 19 nt, Artificial Sequence
  Description of Artificial Sequence: Synthetic oligonucleotide
uacauauauauauauacuu

SEQ ID NO: 151701 - RNA, 19 nt, Artificial Sequence
  Description of Artificial Sequence: Synthetic oligonucleotide
augacugagacagaaggcc

SEQ ID NO: 151702 - RNA, 19 nt, Artificial Sequence
  Description of Artificial Sequence: Synthetic oligonucleotide
ucggaaaucgcucaucccc

SEQ ID NO: 151703 - RNA, 19 nt, Artificial Sequence
  Description of Artificial Sequence: Synthetic oligonucleotide
uguacagauacccucugug

SEQ ID NO: 151704 - RNA, 19 nt, Artificial Sequence
  Description of Artificial Sequence: Synthetic oligonucleotide
uauauauauauacuuuaua

SEQ ID NO: 151705 - RNA, 19 nt, Artificial Sequence
  Description of Artificial Sequence: Synthetic oligonucleotide
uguagacccauccacugag

SEQ ID NO: 151706 - RNA, 19 nt, Artificial Sequence
  Description of Artificial Sequence: Synthetic oligonucleotide
ugcuuuaagcauaugagua

SEQ ID NO: 151707 - RNA, 19 nt, Artificial Sequence
  Description of Artificial Sequence: Synthetic oligonucleotide
ugaagguucagcgaccccg

SEQ ID NO: 151708 - RNA, 19 nt, Artificial Sequence
  Description of Artificial Sequence: Synthetic oligonucleotide
ugcguauauaucauuugcc

SEQ ID NO: 151709 - RNA, 19 nt, Artificial Sequence
  Description of Artificial Sequence: Synthetic oligonucleotide
uugcgugugguauagcccg

SEQ ID NO: 151710 - RNA, 19 nt, Artificial Sequence
  Description of Artificial Sequence: Synthetic oligonucleotide
ugguugugaagguucagcg

SEQ ID NO: 151711 - RNA, 19 nt, Artificial Sequence
  Description of Artificial Sequence: Synthetic oligonucleotide
uuugccgucaguuucguaa

SEQ ID NO: 151712 - RNA, 19 nt, Artificial Sequence
  Description of Artificial Sequence: Synthetic oligonucleotide
acggcgaacaucuugaagu

SEQ ID NO: 151713 - RNA, 19 nt, Artificial Sequence
  Description of Artificial Sequence: Synthetic oligonucleotide
aacaguauucccacacgcc

SEQ ID NO: 151714 - RNA, 19 nt, Artificial Sequence
  Description of Artificial Sequence: Synthetic oligonucleotide
gaaacaguauucccacacg

SEQ ID NO: 151715 - RNA, 19 nt, Artificial Sequence
  Description of Artificial Sequence: Synthetic oligonucleotide
augggaaugggcuguauuc

SEQ ID NO: 151716 - RNA, 19 nt, Artificial Sequence
  Description of Artificial Sequence: Synthetic oligonucleotide
ucaguuucguaacuggcca

SEQ ID NO: 151717 - RNA, 19 nt, Artificial Sequence
  Description of Artificial Sequence: Synthetic oligonucleotide
uaaaacgugggucagcgua

SEQ ID NO: 151718 - RNA, 19 nt, Artificial Sequence
  Description of Artificial Sequence: Synthetic oligonucleotide
aucauacauauauauauau

SEQ ID NO: 151719 - RNA, 19 nt, Artificial Sequence
  Description of Artificial Sequence: Synthetic oligonucleotide
guauauaucauuugccguc

SEQ ID NO: 151720 - RNA, 19 nt, Artificial Sequence
  Description of Artificial Sequence: Synthetic oligonucleotide
agauuuugcaauguuaaca

SEQ ID NO: 151721 - RNA, 19 nt, Artificial Sequence
  Description of Artificial Sequence: Synthetic oligonucleotide
auagcccguguacaggucc

SEQ ID NO: 151722 - RNA, 19 nt, Artificial Sequence
  Description of Artificial Sequence: Synthetic oligonucleotide
gaacucugcguauauauca

SEQ ID NO: 151723 - RNA, 19 nt, Artificial Sequence
  Description of Artificial Sequence: Synthetic oligonucleotide
guugugaagguucagcgac

SEQ ID NO: 151724 - RNA, 19 nt, Artificial Sequence
  Description of Artificial Sequence: Synthetic oligonucleotide
cacuauucuagauacagca

SEQ ID NO: 151725 - RNA, 19 nt, Artificial Sequence
  Description of Artificial Sequence: Synthetic oligonucleotide
agcccauuaaggcuuuggc

SEQ ID NO: 151726 - RNA, 19 nt, Artificial Sequence
  Description of Artificial Sequence: Synthetic oligonucleotide
ucucggaaaucgcucaucc

SEQ ID NO: 151727 - RNA, 19 nt, Artificial Sequence
  Description of Artificial Sequence: Synthetic oligonucleotide
ucauacauauauauauaua

SEQ ID NO: 151728 - RNA, 19 nt, Artificial Sequence
  Description of Artificial Sequence: Synthetic oligonucleotide
auuagcaggccuuugcgcu

SEQ ID NO: 151729 - RNA, 19 nt, Artificial Sequence
  Description of Artificial Sequence: Synthetic oligonucleotide
agugaugcugcgcaauuag

SEQ ID NO: 151730 - RNA, 19 nt, Artificial Sequence
  Description of Artificial Sequence: Synthetic oligonucleotide
aauguugcgugugguauag

SEQ ID NO: 151731 - RNA, 19 nt, Artificial Sequence
  Description of Artificial Sequence: Synthetic oligonucleotide
aguucgaagcaggaugucc

SEQ ID NO: 151732 - RNA, 19 nt, Artificial Sequence
  Description of Artificial Sequence: Synthetic oligonucleotide
acuauguuaucaaaguaug

SEQ ID NO: 151733 - RNA, 19 nt, Artificial Sequence
  Description of Artificial Sequence: Synthetic oligonucleotide
uuaacacccauauuugcau

SEQ ID NO: 151734 - RNA, 19 nt, Artificial Sequence
  Description of Artificial Sequence: Synthetic oligonucleotide
cauauauauauauacuuua

SEQ ID NO: 151735 - RNA, 19 nt, Artificial Sequence
  Description of Artificial Sequence: Synthetic oligonucleotide
cuuccuuuaucccgggugg

SEQ ID NO: 151736 - RNA, 19 nt, Artificial Sequence
  Description of Artificial Sequence: Synthetic oligonucleotide
cugcguauauaucauuugc

SEQ ID NO: 151737 - RNA, 19 nt, Artificial Sequence
  Description of Artificial Sequence: Synthetic oligonucleotide
acaguauucccacacgcca

SEQ ID NO: 151738 - RNA, 19 nt, Artificial Sequence
  Description of Artificial Sequence: Synthetic oligonucleotide
acuaugggcaugcauagaa

SEQ ID NO: 151739 - RNA, 19 nt, Artificial Sequence
  Description of Artificial Sequence: Synthetic oligonucleotide
gcguauauaucauuugccg

SEQ ID NO: 151740 - RNA, 19 nt, Artificial Sequence
  Description of Artificial Sequence: Synthetic oligonucleotide
caauuagcaggccuuugcg

SEQ ID NO: 151741 - RNA, 19 nt, Artificial Sequence
  Description of Artificial Sequence: Synthetic oligonucleotide
ucugcguauauaucauuug

SEQ ID NO: 151742 - RNA, 19 nt, Artificial Sequence
  Description of Artificial Sequence: Synthetic oligonucleotide
auauauacuggcugauuga

SEQ ID NO: 151743 - RNA, 19 nt, Artificial Sequence
  Description of Artificial Sequence: Synthetic oligonucleotide
cuauucuagauacagcaca

SEQ ID NO: 151744 - RNA, 19 nt, Artificial Sequence
  Description of Artificial Sequence: Synthetic oligonucleotide
ggggauuuaauuuacauua

SEQ ID NO: 151745 - RNA, 19 nt, Artificial Sequence
  Description of Artificial Sequence: Synthetic oligonucleotide
uucucguccgucuuggaga

SEQ ID NO: 151746 - RNA, 19 nt, Artificial Sequence
  Description of Artificial Sequence: Synthetic oligonucleotide
gaagacggcgaacaucuug

SEQ ID NO: 151747 - RNA, 19 nt, Artificial Sequence
  Description of Artificial Sequence: Synthetic oligonucleotide
uguaguuugguaaguguuu

SEQ ID NO: 151748 - RNA, 19 nt, Artificial Sequence
  Description of Artificial Sequence: Synthetic oligonucleotide
aacguaacaguaaaggcuu

SEQ ID NO: 151749 - RNA, 19 nt, Artificial Sequence
  Description of Artificial Sequence: Synthetic oligonucleotide
uuuacaccuugucugaguu

SEQ ID NO: 151750 - RNA, 19 nt, Artificial Sequence
  Description of Artificial Sequence: Synthetic oligonucleotide
auacauauauauauauacu

SEQ ID NO: 151751 - RNA, 19 nt, Artificial Sequence
  Description of Artificial Sequence: Synthetic oligonucleotide
auggcguacaugcagugug

SEQ ID NO: 151752 - RNA, 19 nt, Artificial Sequence
  Description of Artificial Sequence: Synthetic oligonucleotide
acugccgcugaucuuguuc

SEQ ID NO: 151753 - RNA, 19 nt, Artificial Sequence
  Description of Artificial Sequence: Synthetic oligonucleotide
aacacccauauuugcauau

SEQ ID NO: 151754 - RNA, 19 nt, Artificial Sequence
  Description of Artificial Sequence: Synthetic oligonucleotide
cucccuguuaaaacguggg

SEQ ID NO: 151755 - RNA, 19 nt, Artificial Sequence
  Description of Artificial Sequence: Synthetic oligonucleotide
aacgaaucaccuucuccca

SEQ ID NO: 151756 - RNA, 19 nt, Artificial Sequence
  Description of Artificial Sequence: Synthetic oligonucleotide
ggagaaucucuuuuguucc

SEQ ID NO: 151757 - RNA, 19 nt, Artificial Sequence
  Description of Artificial Sequence: Synthetic oligonucleotide
uguuuggcgagaccucugc

SEQ ID NO: 151758 - RNA, 19 nt, Artificial Sequence
  Description of Artificial Sequence: Synthetic oligonucleotide
ucguccgucuuggagaagg

SEQ ID NO: 151759 - RNA, 19 nt, Artificial Sequence
  Description of Artificial Sequence: Synthetic oligonucleotide
augcugcgcaauuagcagg

SEQ ID NO: 151760 - RNA, 19 nt, Artificial Sequence
  Description of Artificial Sequence: Synthetic oligonucleotide
ugcugcgcaauuagcaggc

SEQ ID NO: 151761 - RNA, 19 nt, Artificial Sequence
  Description of Artificial Sequence: Synthetic oligonucleotide
aaaacgugggucagcguag

SEQ ID NO: 151762 - RNA, 19 nt, Artificial Sequence
  Description of Artificial Sequence: Synthetic oligonucleotide
ugguauagcccguguacag

SEQ ID NO: 151763 - RNA, 19 nt, Artificial Sequence
  Description of Artificial Sequence: Synthetic oligonucleotide
guagaacaaagauagagau

SEQ ID NO: 151764 - RNA, 19 nt, Artificial Sequence
  Description of Artificial Sequence: Synthetic oligonucleotide
gcuuuaagcauaugaguag

SEQ ID NO: 151765 - RNA, 19 nt, Artificial Sequence
  Description of Artificial Sequence: Synthetic oligonucleotide
gauguuuaggacuuccccu

SEQ ID NO: 151766 - RNA, 19 nt, Artificial Sequence
  Description of Artificial Sequence: Synthetic oligonucleotide
aagacggcgaacaucuuga

SEQ ID NO: 151767 - RNA, 19 nt, Artificial Sequence
  Description of Artificial Sequence: Synthetic oligonucleotide
aaggcgaggaugcccauaa

SEQ ID NO: 151768 - RNA, 19 nt, Artificial Sequence
  Description of Artificial Sequence: Synthetic oligonucleotide
uuggcgagaccucugcaca

SEQ ID NO: 151769 - RNA, 19 nt, Artificial Sequence
  Description of Artificial Sequence: Synthetic oligonucleotide
uggaauuuacuaacucauc

SEQ ID NO: 151770 - RNA, 19 nt, Artificial Sequence
  Description of Artificial Sequence: Synthetic oligonucleotide
auauauauauauacuuuau

SEQ ID NO: 151771 - RNA, 19 nt, Artificial Sequence
  Description of Artificial Sequence: Synthetic oligonucleotide
acauauauauauauacuuu

SEQ ID NO: 151772 - RNA, 19 nt, Artificial Sequence
  Description of Artificial Sequence: Synthetic oligonucleotide
uuggcuguagacccaucca

SEQ ID NO: 151773 - RNA, 19 nt, Artificial Sequence
  Description of Artificial Sequence: Synthetic oligonucleotide
uuucguaacuggccauagc

SEQ ID NO: 151774 - RNA, 19 nt, Artificial Sequence
  Description of Artificial Sequence: Synthetic oligonucleotide
guucgaagcaggauguccc

SEQ ID NO: 151775 - RNA, 19 nt, Artificial Sequence
  Description of Artificial Sequence: Synthetic oligonucleotide
acgaugggcaagcaaagaa

SEQ ID NO: 151776 - RNA, 19 nt, Artificial Sequence
  Description of Artificial Sequence: Synthetic oligonucleotide
ugugucagcgugguguagc

SEQ ID NO: 151777 - RNA, 19 nt, Artificial Sequence
  Description of Artificial Sequence: Synthetic oligonucleotide
gucaguuucguaacuggcc

SEQ ID NO: 151778 - RNA, 19 nt, Artificial Sequence
  Description of Artificial Sequence: Synthetic oligonucleotide
uugugaagguucagcgacc

SEQ ID NO: 151779 - RNA, 19 nt, Artificial Sequence
  Description of Artificial Sequence: Synthetic oligonucleotide
uguucugaaguauggcgua

SEQ ID NO: 151780 - RNA, 19 nt, Artificial Sequence
  Description of Artificial Sequence: Synthetic oligonucleotide
cacgaucucgaugugacug

SEQ ID NO: 151781 - RNA, 19 nt, Artificial Sequence
  Description of Artificial Sequence: Synthetic oligonucleotide
uauaauaauguuggauauu

SEQ ID NO: 151782 - RNA, 19 nt, Artificial Sequence
  Description of Artificial Sequence: Synthetic oligonucleotide
uaaggaacccgccgguagu

SEQ ID NO: 151783 - RNA, 19 nt, Artificial Sequence
  Description of Artificial Sequence: Synthetic oligonucleotide
accgugacugcgugcuucc

SEQ ID NO: 151784 - RNA, 19 nt, Artificial Sequence
  Description of Artificial Sequence: Synthetic oligonucleotide
uccauacaacagaucauau

SEQ ID NO: 151785 - RNA, 19 nt, Artificial Sequence
  Description of Artificial Sequence: Synthetic oligonucleotide
cuucgucacagaacauagg

SEQ ID NO: 151786 - RNA, 19 nt, Artificial Sequence
  Description of Artificial Sequence: Synthetic oligonucleotide
ugaguagaacaaagauaga

SEQ ID NO: 151787 - RNA, 19 nt, Artificial Sequence
  Description of Artificial Sequence: Synthetic oligonucleotide
agaacucugcguauauauc

SEQ ID NO: 151788 - RNA, 19 nt, Artificial Sequence
  Description of Artificial Sequence: Synthetic oligonucleotide
agaauguugcgugugguau

SEQ ID NO: 151789 - RNA, 19 nt, Artificial Sequence
  Description of Artificial Sequence: Synthetic oligonucleotide
uguuaaaacgugggucagc

SEQ ID NO: 151790 - RNA, 19 nt, Artificial Sequence
  Description of Artificial Sequence: Synthetic oligonucleotide
uuaggugggcuagacaaaa

SEQ ID NO: 151791 - RNA, 19 nt, Artificial Sequence
  Description of Artificial Sequence: Synthetic oligonucleotide
gacggcgaacaucuugaag

SEQ ID NO: 151792 - RNA, 19 nt, Artificial Sequence
  Description of Artificial Sequence: Synthetic oligonucleotide
gaaaucgcucauccccaag

SEQ ID NO: 151793 - RNA, 19 nt, Artificial Sequence
  Description of Artificial Sequence: Synthetic oligonucleotide
auccgggauguuuaggacu

SEQ ID NO: 151794 - RNA, 19 nt, Artificial Sequence
  Description of Artificial Sequence: Synthetic oligonucleotide
acaauucgaucucucugca

SEQ ID NO: 151795 - RNA, 19 nt, Artificial Sequence
  Description of Artificial Sequence: Synthetic oligonucleotide
guagagagcgaggucagug

SEQ ID NO: 151796 - RNA, 19 nt, Artificial Sequence
  Description of Artificial Sequence: Synthetic oligonucleotide
ugauugaauuaugaauuua

SEQ ID NO: 151797 - RNA, 19 nt, Artificial Sequence
  Description of Artificial Sequence: Synthetic oligonucleotide
agaucauauggaaacagua

SEQ ID NO: 151798 - RNA, 19 nt, Artificial Sequence
  Description of Artificial Sequence: Synthetic oligonucleotide
guugcaaccuccugaugac

SEQ ID NO: 151799 - RNA, 19 nt, Artificial Sequence
  Description of Artificial Sequence: Synthetic oligonucleotide
aaacgugggucagcguagg

SEQ ID NO: 151800 - RNA, 19 nt, Artificial Sequence
  Description of Artificial Sequence: Synthetic oligonucleotide
ugcgcaauuagcaggccuu

SEQ ID NO: 151801 - RNA, 19 nt, Artificial Sequence
  Description of Artificial Sequence: Synthetic oligonucleotide
uaucauuugccgucaguuu

SEQ ID NO: 151802 - RNA, 19 nt, Artificial Sequence
  Description of Artificial Sequence: Synthetic oligonucleotide
auguucaugaagagaaagu

SEQ ID NO: 151803 - RNA, 19 nt, Artificial Sequence
  Description of Artificial Sequence: Synthetic oligonucleotide
uugugguaaggaacccgcc

SEQ ID NO: 151804 - RNA, 19 nt, Artificial Sequence
  Description of Artificial Sequence: Synthetic oligonucleotide
agaacauaggucacaggca

SEQ ID NO: 151805 - RNA, 19 nt, Artificial Sequence
  Description of Artificial Sequence: Synthetic oligonucleotide
ucccuguuaaaacgugggu

SEQ ID NO: 151806 - RNA, 19 nt, Artificial Sequence
  Description of Artificial Sequence: Synthetic oligonucleotide
auauaucauuugccgucag

SEQ ID NO: 151807 - RNA, 19 nt, Artificial Sequence
  Description of Artificial Sequence: Synthetic oligonucleotide
ggaugcccauaauagaaug

SEQ ID NO: 151808 - RNA, 19 nt, Artificial Sequence
  Description of Artificial Sequence: Synthetic oligonucleotide
ucguuaaauuauugcacuu

SEQ ID NO: 151809 - RNA, 19 nt, Artificial Sequence
  Description of Artificial Sequence: Synthetic oligonucleotide
auaaaacgaaucaccuucu

SEQ ID NO: 151810 - RNA, 19 nt, Artificial Sequence
  Description of Artificial Sequence: Synthetic oligonucleotide
uagaauguugcguguggua

SEQ ID NO: 151811 - RNA, 19 nt, Artificial Sequence
  Description of Artificial Sequence: Synthetic oligonucleotide
agagucuauggcaacuaug

SEQ ID NO: 151812 - RNA, 19 nt, Artificial Sequence
  Description of Artificial Sequence: Synthetic oligonucleotide
cacuccgagugucggaucc

SEQ ID NO: 151813 - RNA, 19 nt, Artificial Sequence
  Description of Artificial Sequence: Synthetic oligonucleotide
uggcguacaugcagugugc

SEQ ID NO: 151814 - RNA, 19 nt, Artificial Sequence
  Description of Artificial Sequence: Synthetic oligonucleotide
ucucgaugugacugguugu

SEQ ID NO: 151815 - RNA, 19 nt, Artificial Sequence
  Description of Artificial Sequence: Synthetic oligonucleotide
uucaugaggccuugccacu

SEQ ID NO: 151816 - RNA, 19 nt, Artificial Sequence
  Description of Artificial Sequence: Synthetic oligonucleotide
gaugcgcgauggcagguug

SEQ ID NO: 151817 - RNA, 19 nt, Artificial Sequence
  Description of Artificial Sequence: Synthetic oligonucleotide
cucaaggaugccgaucaag

SEQ ID NO: 151818 - RNA, 19 nt, Artificial Sequence
  Description of Artificial Sequence: Synthetic oligonucleotide
gaugcccauaauagaauga

SEQ ID NO: 151819 - RNA, 19 nt, Artificial Sequence
  Description of Artificial Sequence: Synthetic oligonucleotide
auaagcagagaugguggug

SEQ ID NO: 151820 - RNA, 19 nt, Artificial Sequence
  Description of Artificial Sequence: Synthetic oligonucleotide
caaggaugccgaucaaguc

SEQ ID NO: 151821 - RNA, 19 nt, Artificial Sequence
  Description of Artificial Sequence: Synthetic oligonucleotide
acacgccauuuauauucac

SEQ ID NO: 151822 - RNA, 19 nt, Artificial Sequence
  Description of Artificial Sequence: Synthetic oligonucleotide
gcgaggaugcccauaauag

SEQ ID NO: 151823 - RNA, 19 nt, Artificial Sequence
  Description of Artificial Sequence: Synthetic oligonucleotide
auagaauguugcguguggu

SEQ ID NO: 151824 - RNA, 19 nt, Artificial Sequence
  Description of Artificial Sequence: Synthetic oligonucleotide
aguauggcguacaugcagu

SEQ ID NO: 151825 - RNA, 19 nt, Artificial Sequence
  Description of Artificial Sequence: Synthetic oligonucleotide
caauucgaucucucugcag

SEQ ID NO: 151826 - RNA, 19 nt, Artificial Sequence
  Description of Artificial Sequence: Synthetic oligonucleotide
uugccgucaguuucguaac

SEQ ID NO: 151827 - RNA, 19 nt, Artificial Sequence
  Description of Artificial Sequence: Synthetic oligonucleotide
aacucugcguauauaucau

SEQ ID NO: 151828 - RNA, 19 nt, Artificial Sequence
  Description of Artificial Sequence: Synthetic oligonucleotide
auacaacagaucauaugga

SEQ ID NO: 151829 - RNA, 19 nt, Artificial Sequence
  Description of Artificial Sequence: Synthetic oligonucleotide
uucaaguucgaagcaggau

SEQ ID NO: 151830 - RNA, 19 nt, Artificial Sequence
  Description of Artificial Sequence: Synthetic oligonucleotide
uacaugcagugugccaccg

SEQ ID NO: 151831 - RNA, 19 nt, Artificial Sequence
  Description of Artificial Sequence: Synthetic oligonucleotide
guuucguaacuggccauag

SEQ ID NO: 151832 - RNA, 19 nt, Artificial Sequence
  Description of Artificial Sequence: Synthetic oligonucleotide
ccgaucaagucuccaaugg

SEQ ID NO: 151833 - RNA, 19 nt, Artificial Sequence
  Description of Artificial Sequence: Synthetic oligonucleotide
uggaaacaguauucccaca

SEQ ID NO: 151834 - RNA, 19 nt, Artificial Sequence
  Description of Artificial Sequence: Synthetic oligonucleotide
uuaaaacgugggucagcgu

SEQ ID NO: 151835 - RNA, 19 nt, Artificial Sequence
  Description of Artificial Sequence: Synthetic oligonucleotide
agacgcugcauuuguaguu

SEQ ID NO: 151836 - RNA, 19 nt, Artificial Sequence
  Description of Artificial Sequence: Synthetic oligonucleotide
gaagguucagcgaccccgc

SEQ ID NO: 151837 - RNA, 19 nt, Artificial Sequence
  Description of Artificial Sequence: Synthetic oligonucleotide
cuuuaucccggguggugug

SEQ ID NO: 151838 - RNA, 19 nt, Artificial Sequence
  Description of Artificial Sequence: Synthetic oligonucleotide
auacuggcugauugaauua

SEQ ID NO: 151839 - RNA, 19 nt, Artificial Sequence
  Description of Artificial Sequence: Synthetic oligonucleotide
guauggcguacaugcagug

SEQ ID NO: 151840 - RNA, 19 nt, Artificial Sequence
  Description of Artificial Sequence: Synthetic oligonucleotide
ucccgcaagacugauggau

SEQ ID NO: 151841 - RNA, 19 nt, Artificial Sequence
  Description of Artificial Sequence: Synthetic oligonucleotide
auucgaucucucugcagau

SEQ ID NO: 151842 - RNA, 19 nt, Artificial Sequence
  Description of Artificial Sequence: Synthetic oligonucleotide
gguauagcccguguacagg

SEQ ID NO: 151843 - RNA, 19 nt, Artificial Sequence
  Description of Artificial Sequence: Synthetic oligonucleotide
gacccuguagaugcacucc

SEQ ID NO: 151844 - RNA, 19 nt, Artificial Sequence
  Description of Artificial Sequence: Synthetic oligonucleotide
guacaugcagugugccacc

SEQ ID NO: 151845 - RNA, 19 nt, Artificial Sequence
  Description of Artificial Sequence: Synthetic oligonucleotide
cauccgggauguuuaggac

SEQ ID NO: 151846 - RNA, 19 nt, Artificial Sequence
  Description of Artificial Sequence: Synthetic oligonucleotide
accugcaccugguguauug

SEQ ID NO: 151847 - RNA, 19 nt, Artificial Sequence
  Description of Artificial Sequence: Synthetic oligonucleotide
guagcuuggggauuuaauu

SEQ ID NO: 151848 - RNA, 19 nt, Artificial Sequence
  Description of Artificial Sequence: Synthetic oligonucleotide
uauggcguacaugcagugu

SEQ ID NO: 151849 - RNA, 19 nt, Artificial Sequence
  Description of Artificial Sequence: Synthetic oligonucleotide
gggauuuaauuuacauuag

SEQ ID NO: 151850 - RNA, 19 nt, Artificial Sequence
  Description of Artificial Sequence: Synthetic oligonucleotide
ucugugucagcguggugua

SEQ ID NO: 151851 - RNA, 19 nt, Artificial Sequence
  Description of Artificial Sequence: Synthetic oligonucleotide
agagagcccauuaaggcuu

SEQ ID NO: 151852 - RNA, 19 nt, Artificial Sequence
  Description of Artificial Sequence: Synthetic oligonucleotide
agcgugguguagcagggaa

SEQ ID NO: 151853 - RNA, 19 nt, Artificial Sequence
  Description of Artificial Sequence: Synthetic oligonucleotide
aguauucccacacgccauu

SEQ ID NO: 151854 - RNA, 19 nt, Artificial Sequence
  Description of Artificial Sequence: Synthetic oligonucleotide
ugccgcggcucacuauggg

SEQ ID NO: 151855 - RNA, 19 nt, Artificial Sequence
  Description of Artificial Sequence: Synthetic oligonucleotide
augggcaugcauagaaugu

SEQ ID NO: 151856 - RNA, 19 nt, Artificial Sequence
  Description of Artificial Sequence: Synthetic oligonucleotide
gaauguugcgugugguaua

SEQ ID NO: 151857 - RNA, 19 nt, Artificial Sequence
  Description of Artificial Sequence: Synthetic oligonucleotide
ugggcaugcauagaauguu

SEQ ID NO: 151858 - RNA, 19 nt, Artificial Sequence
  Description of Artificial Sequence: Synthetic oligonucleotide
cuauguuaucaaaguaugu

SEQ ID NO: 151859 - RNA, 19 nt, Artificial Sequence
  Description of Artificial Sequence: Synthetic oligonucleotide
caaguucgaagcaggaugu

SEQ ID NO: 151860 - RNA, 19 nt, Artificial Sequence
  Description of Artificial Sequence: Synthetic oligonucleotide
aagaauccagacgcugcau

SEQ ID NO: 151861 - RNA, 19 nt, Artificial Sequence
  Description of Artificial Sequence: Synthetic oligonucleotide
agaagugaugcugcgcaau

SEQ ID NO: 151862 - RNA, 19 nt, Artificial Sequence
  Description of Artificial Sequence: Synthetic oligonucleotide
ugcacuccgagugucggau

SEQ ID NO: 151863 - RNA, 19 nt, Artificial Sequence
  Description of Artificial Sequence: Synthetic oligonucleotide
acgacacaauuuucaaguu

SEQ ID NO: 151864 - RNA, 19 nt, Artificial Sequence
  Description of Artificial Sequence: Synthetic oligonucleotide
ugagccgggguugaccuuc

SEQ ID NO: 151865 - RNA, 19 nt, Artificial Sequence
  Description of Artificial Sequence: Synthetic oligonucleotide
gaaguauggcguacaugca

SEQ ID NO: 151866 - RNA, 19 nt, Artificial Sequence
  Description of Artificial Sequence: Synthetic oligonucleotide
agguucagcgaccccgccu

SEQ ID NO: 151867 - RNA, 19 nt, Artificial Sequence
  Description of Artificial Sequence: Synthetic oligonucleotide
gcagaugcgcgauggcagg

SEQ ID NO: 151868 - RNA, 19 nt, Artificial Sequence
  Description of Artificial Sequence: Synthetic oligonucleotide
guagacccauccacugagg

SEQ ID NO: 151869 - RNA, 19 nt, Artificial Sequence
  Description of Artificial Sequence: Synthetic oligonucleotide
ucccggguggugugaauac

SEQ ID NO: 151870 - RNA, 19 nt, Artificial Sequence
  Description of Artificial Sequence: Synthetic oligonucleotide
ucgaugugacugguuguga

SEQ ID NO: 151871 - RNA, 19 nt, Artificial Sequence
  Description of Artificial Sequence: Synthetic oligonucleotide
gcacuugugcacuuuacaa

SEQ ID NO: 151872 - RNA, 19 nt, Artificial Sequence
  Description of Artificial Sequence: Synthetic oligonucleotide
aucgcucauccccaaggau

SEQ ID NO: 151873 - RNA, 19 nt, Artificial Sequence
  Description of Artificial Sequence: Synthetic oligonucleotide
agauacccucugugcauca

SEQ ID NO: 151874 - RNA, 19 nt, Artificial Sequence
  Description of Artificial Sequence: Synthetic oligonucleotide
gacuucgucucgcuugucu

SEQ ID NO: 151875 - RNA, 19 nt, Artificial Sequence
  Description of Artificial Sequence: Synthetic oligonucleotide
gugguauagcccguguaca

SEQ ID NO: 151876 - RNA, 19 nt, Artificial Sequence
  Description of Artificial Sequence: Synthetic oligonucleotide
ugccgucaguuucguaacu

SEQ ID NO: 151877 - RNA, 19 nt, Artificial Sequence
  Description of Artificial Sequence: Synthetic oligonucleotide
acucugcguauauaucauu

SEQ ID NO: 151878 - RNA, 19 nt, Artificial Sequence
  Description of Artificial Sequence: Synthetic oligonucleotide
aguuucguaacuggccaua

SEQ ID NO: 151879 - RNA, 19 nt, Artificial Sequence
  Description of Artificial Sequence: Synthetic oligonucleotide
gcugccgcggcucacuaug

SEQ ID NO: 151880 - RNA, 19 nt, Artificial Sequence
  Description of Artificial Sequence: Synthetic oligonucleotide
ggauucggguucccgauuc

SEQ ID NO: 151881 - RNA, 19 nt, Artificial Sequence
  Description of Artificial Sequence: Synthetic oligonucleotide
guucugaaguauggcguac

SEQ ID NO: 151882 - RNA, 19 nt, Artificial Sequence
  Description of Artificial Sequence: Synthetic oligonucleotide
auucggguucccgauucca

SEQ ID NO: 151883 - RNA, 19 nt, Artificial Sequence
  Description of Artificial Sequence: Synthetic oligonucleotide
auauacuggcugauugaau

SEQ ID NO: 151884 - RNA, 19 nt, Artificial Sequence
  Description of Artificial Sequence: Synthetic oligonucleotide
acacgaucucgaugugacu

SEQ ID NO: 151885 - RNA, 19 nt, Artificial Sequence
  Description of Artificial Sequence: Synthetic oligonucleotide
aggaugcccauaauagaau

SEQ ID NO: 151886 - RNA, 19 nt, Artificial Sequence
  Description of Artificial Sequence: Synthetic oligonucleotide
auguugcgugugguauagc

SEQ ID NO: 151887 - RNA, 19 nt, Artificial Sequence
  Description of Artificial Sequence: Synthetic oligonucleotide
cuguagacccauccacuga

SEQ ID NO: 151888 - RNA, 19 nt, Artificial Sequence
  Description of Artificial Sequence: Synthetic oligonucleotide
cacgccauuuauauucacu

SEQ ID NO: 151889 - RNA, 19 nt, Artificial Sequence
  Description of Artificial Sequence: Synthetic oligonucleotide
cugauugaauuaugaauuu

SEQ ID NO: 151890 - RNA, 19 nt, Artificial Sequence
  Description of Artificial Sequence: Synthetic oligonucleotide
acaugcagugugccaccgu

SEQ ID NO: 151891 - RNA, 19 nt, Artificial Sequence
  Description of Artificial Sequence: Synthetic oligonucleotide
guagaugcacuccgagugu

SEQ ID NO: 151892 - RNA, 19 nt, Artificial Sequence
  Description of Artificial Sequence: Synthetic oligonucleotide
agcgaccccgccugguaca

SEQ ID NO: 151893 - RNA, 19 nt, Artificial Sequence
  Description of Artificial Sequence: Synthetic oligonucleotide
cugccgcggcucacuaugg

SEQ ID NO: 151894 - RNA, 19 nt, Artificial Sequence
  Description of Artificial Sequence: Synthetic oligonucleotide
acccauauuugcauauaua

SEQ ID NO: 151895 - RNA, 19 nt, Artificial Sequence
  Description of Artificial Sequence: Synthetic oligonucleotide
cauaguuguucugaaguau

SEQ ID NO: 151896 - RNA, 19 nt, Artificial Sequence
  Description of Artificial Sequence: Synthetic oligonucleotide
ugcgcgauggcagguugaa

SEQ ID NO: 151897 - RNA, 19 nt, Artificial Sequence
  Description of Artificial Sequence: Synthetic oligonucleotide
agcggucggcguucacuag

SEQ ID NO: 151898 - RNA, 19 nt, Artificial Sequence
  Description of Artificial Sequence: Synthetic oligonucleotide
uuaucccggguggugugaa

SEQ ID NO: 151899 - RNA, 19 nt, Artificial Sequence
  Description of Artificial Sequence: Synthetic oligonucleotide
ggcgaggaugcccauaaua

SEQ ID NO: 151900 - RNA, 19 nt, Artificial Sequence
  Description of Artificial Sequence: Synthetic oligonucleotide
ggguugaccuuccuuuauc

SEQ ID NO: 151901 - RNA, 19 nt, Artificial Sequence
  Description of Artificial Sequence: Synthetic oligonucleotide
guucccgauuccaggccag

SEQ ID NO: 151902 - RNA, 19 nt, Artificial Sequence
  Description of Artificial Sequence: Synthetic oligonucleotide
gagagucuauggcaacuau

SEQ ID NO: 151903 - RNA, 19 nt, Artificial Sequence
  Description of Artificial Sequence: Synthetic oligonucleotide
guucagcgaccccgccugg

SEQ ID NO: 151904 - RNA, 19 nt, Artificial Sequence
  Description of Artificial Sequence: Synthetic oligonucleotide
cgagugucggauccugugg

SEQ ID NO: 151905 - RNA, 19 nt, Artificial Sequence
  Description of Artificial Sequence: Synthetic oligonucleotide
ccggguggugugaauacac

SEQ ID NO: 151906 - RNA, 19 nt, Artificial Sequence
  Description of Artificial Sequence: Synthetic oligonucleotide
agacggcgaacaucuugaa

SEQ ID NO: 151907 - RNA, 19 nt, Artificial Sequence
  Description of Artificial Sequence: Synthetic oligonucleotide
gggccgaugucaaagugga

SEQ ID NO: 151908 - RNA, 19 nt, Artificial Sequence
  Description of Artificial Sequence: Synthetic oligonucleotide
ugccaccgugacugcgugc

SEQ ID NO: 151909 - RNA, 19 nt, Artificial Sequence
  Description of Artificial Sequence: Synthetic oligonucleotide
caccgugacugcgugcuuc

SEQ ID NO: 151910 - RNA, 19 nt, Artificial Sequence
  Description of Artificial Sequence: Synthetic oligonucleotide
ccuuacugcuuuaagcaua

SEQ ID NO: 151911 - RNA, 19 nt, Artificial Sequence
  Description of Artificial Sequence: Synthetic oligonucleotide
ucgucucgcuugucucugu

SEQ ID NO: 151912 - RNA, 19 nt, Artificial Sequence
  Description of Artificial Sequence: Synthetic oligonucleotide
cccgcaagacugauggauc

SEQ ID NO: 151913 - RNA, 19 nt, Artificial Sequence
  Description of Artificial Sequence: Synthetic oligonucleotide
ccgagugucggauccugug

SEQ ID NO: 151914 - RNA, 19 nt, Artificial Sequence
  Description of Artificial Sequence: Synthetic oligonucleotide
cagacgcugcauuuguagu

SEQ ID NO: 151915 - RNA, 19 nt, Artificial Sequence
  Description of Artificial Sequence: Synthetic oligonucleotide
gccgcggcucacuaugggc

SEQ ID NO: 151916 - RNA, 19 nt, Artificial Sequence
  Description of Artificial Sequence: Synthetic oligonucleotide
caaaagggccgaugucaaa

SEQ ID NO: 151917 - RNA, 19 nt, Artificial Sequence
  Description of Artificial Sequence: Synthetic oligonucleotide
cccgaugacacgaucucga

SEQ ID NO: 151918 - RNA, 19 nt, Artificial Sequence
  Description of Artificial Sequence: Synthetic oligonucleotide
ggcguacaugcagugugcc

SEQ ID NO: 151919 - RNA, 19 nt, Artificial Sequence
  Description of Artificial Sequence: Synthetic oligonucleotide
cuucgucucgcuugucucu

SEQ ID NO: 151920 - RNA, 19 nt, Artificial Sequence
  Description of Artificial Sequence: Synthetic oligonucleotide
aucccggguggugugaaua

SEQ ID NO: 151921 - RNA, 19 nt, Artificial Sequence
  Description of Artificial Sequence: Synthetic oligonucleotide
gcccauuaaggcuuuggcu

SEQ ID NO: 151922 - RNA, 19 nt, Artificial Sequence
  Description of Artificial Sequence: Synthetic oligonucleotide
cuaugggcaugcauagaau

SEQ ID NO: 151923 - RNA, 19 nt, Artificial Sequence
  Description of Artificial Sequence: Synthetic oligonucleotide
gacgcugcauuuguaguuu

SEQ ID NO: 151924 - RNA, 19 nt, Artificial Sequence
  Description of Artificial Sequence: Synthetic oligonucleotide
cucguacucgcuggagcuc

SEQ ID NO: 151925 - RNA, 19 nt, Artificial Sequence
  Description of Artificial Sequence: Synthetic oligonucleotide
auuugccgucaguuucgua

SEQ ID NO: 151926 - RNA, 19 nt, Artificial Sequence
  Description of Artificial Sequence: Synthetic oligonucleotide
uaucccggguggugugaau

SEQ ID NO: 151927 - RNA, 19 nt, Artificial Sequence
  Description of Artificial Sequence: Synthetic oligonucleotide
gccgguaguucuucuucac

SEQ ID NO: 151928 - RNA, 19 nt, Artificial Sequence
  Description of Artificial Sequence: Synthetic oligonucleotide
cguauauaucauuugccgu

SEQ ID NO: 151929 - RNA, 19 nt, Artificial Sequence
  Description of Artificial Sequence: Synthetic oligonucleotide
caccucccuguuaaaacgu

SEQ ID NO: 151930 - RNA, 19 nt, Artificial Sequence
  Description of Artificial Sequence: Synthetic oligonucleotide
cugugucagcgugguguag

SEQ ID NO: 151931 - RNA, 19 nt, Artificial Sequence
  Description of Artificial Sequence: Synthetic oligonucleotide
cagcggucggcguucacua

SEQ ID NO: 151932 - RNA, 19 nt, Artificial Sequence
  Description of Artificial Sequence: Synthetic oligonucleotide
ggcgagaccucugcacacc

SEQ ID NO: 151933 - RNA, 19 nt, Artificial Sequence
  Description of Artificial Sequence: Synthetic oligonucleotide
guaggcauccgggauguuu

SEQ ID NO: 151934 - RNA, 19 nt, Artificial Sequence
  Description of Artificial Sequence: Synthetic oligonucleotide
ccgcaagacugauggauca

SEQ ID NO: 151935 - RNA, 19 nt, Artificial Sequence
  Description of Artificial Sequence: Synthetic oligonucleotide
cugcgcaauuagcaggccu

SEQ ID NO: 151936 - RNA, 19 nt, Artificial Sequence
  Description of Artificial Sequence: Synthetic oligonucleotide
gcguacaugcagugugcca

SEQ ID NO: 151937 - RNA, 19 nt, Artificial Sequence
  Description of Artificial Sequence: Synthetic oligonucleotide
gcgcucgaggucugugaag

SEQ ID NO: 151938 - RNA, 19 nt, Artificial Sequence
  Description of Artificial Sequence: Synthetic oligonucleotide
cgaggaugcccauaauaga

SEQ ID NO: 151939 - RNA, 19 nt, Artificial Sequence
  Description of Artificial Sequence: Synthetic oligonucleotide
gcggucggcguucacuaga

SEQ ID NO: 151940 - RNA, 19 nt, Artificial Sequence
  Description of Artificial Sequence: Synthetic oligonucleotide
caucaauccacagcacuuu

SEQ ID NO: 151941 - RNA, 19 nt, Artificial Sequence
  Description of Artificial Sequence: Synthetic oligonucleotide
gagccgggguugaccuucc

SEQ ID NO: 151942 - RNA, 19 nt, Artificial Sequence
  Description of Artificial Sequence: Synthetic oligonucleotide
gugccucucggaaaucgcu

SEQ ID NO: 151943 - RNA, 19 nt, Artificial Sequence
  Description of Artificial Sequence: Synthetic oligonucleotide
cagggugaccaagccaaaa

SEQ ID NO: 151944 - RNA, 19 nt, Artificial Sequence
  Description of Artificial Sequence: Synthetic oligonucleotide
ccgccgguaguucuucuuc

SEQ ID NO: 151945 - RNA, 19 nt, Artificial Sequence
  Description of Artificial Sequence: Synthetic oligonucleotide
ccauuaaggcuuuggcugu

SEQ ID NO: 151946 - RNA, 19 nt, Artificial Sequence
  Description of Artificial Sequence: Synthetic oligonucleotide
ccgcggcucacuaugggca

SEQ ID NO: 151947 - RNA, 19 nt, Artificial Sequence
  Description of Artificial Sequence: Synthetic oligonucleotide
gaugucccgcaagacugau

SEQ ID NO: 151948 - RNA, 19 nt, Artificial Sequence
  Description of Artificial Sequence: Synthetic oligonucleotide
aggcgaggaugcccauaau

SEQ ID NO: 151949 - RNA, 19 nt, Artificial Sequence
  Description of Artificial Sequence: Synthetic oligonucleotide
acguaacaguaaaggcuuu

SEQ ID NO: 151950 - RNA, 19 nt, Artificial Sequence
  Description of Artificial Sequence: Synthetic oligonucleotide
augagccgggguugaccuu

SEQ ID NO: 151951 - RNA, 19 nt, Artificial Sequence
  Description of Artificial Sequence: Synthetic oligonucleotide
gucccgcaagacugaugga

SEQ ID NO: 151952 - RNA, 19 nt, Artificial Sequence
  Description of Artificial Sequence: Synthetic oligonucleotide
caguuucguaacuggccau

SEQ ID NO: 151953 - RNA, 19 nt, Artificial Sequence
  Description of Artificial Sequence: Synthetic oligonucleotide
ggaugccgaucaagucucc

SEQ ID NO: 151954 - RNA, 19 nt, Artificial Sequence
  Description of Artificial Sequence: Synthetic oligonucleotide
cgccaaucacgcugccgcg

SEQ ID NO: 151955 - RNA, 19 nt, Artificial Sequence
  Description of Artificial Sequence: Synthetic oligonucleotide
agccgggguugaccuuccu

SEQ ID NO: 151956 - RNA, 19 nt, Artificial Sequence
  Description of Artificial Sequence: Synthetic oligonucleotide
agaagacggcgaacaucuu

SEQ ID NO: 151957 - RNA, 19 nt, Artificial Sequence
  Description of Artificial Sequence: Synthetic oligonucleotide
gcugcgcaauuagcaggcc

SEQ ID NO: 151958 - RNA, 19 nt, Artificial Sequence
  Description of Artificial Sequence: Synthetic oligonucleotide
cccuguagaugcacuccga

SEQ ID NO: 151959 - RNA, 19 nt, Artificial Sequence
  Description of Artificial Sequence: Synthetic oligonucleotide
cuccaaaagagagcccauu

SEQ ID NO: 151960 - RNA, 19 nt, Artificial Sequence
  Description of Artificial Sequence: Synthetic oligonucleotide
cauuugccgucaguuucgu

SEQ ID NO: 151961 - RNA, 19 nt, Artificial Sequence
  Description of Artificial Sequence: Synthetic oligonucleotide
gcacuccgagugucggauc

SEQ ID NO: 151962 - RNA, 19 nt, Artificial Sequence
  Description of Artificial Sequence: Synthetic oligonucleotide
acaccuugucugaguuaua

SEQ ID NO: 151963 - RNA, 19 nt, Artificial Sequence
  Description of Artificial Sequence: Synthetic oligonucleotide
ccuuugcgcucgaggucug

SEQ ID NO: 151964 - RNA, 19 nt, Artificial Sequence
  Description of Artificial Sequence: Synthetic oligonucleotide
gcgcgauggcagguugaag

SEQ ID NO: 151965 - RNA, 19 nt, Artificial Sequence
  Description of Artificial Sequence: Synthetic oligonucleotide
ccuuuaucccggguggugu

SEQ ID NO: 151966 - RNA, 19 nt, Artificial Sequence
  Description of Artificial Sequence: Synthetic oligonucleotide
gcgagaccucugcacaccu

SEQ ID NO: 151967 - RNA, 19 nt, Artificial Sequence
  Description of Artificial Sequence: Synthetic oligonucleotide
cguacucgcuggagcucag

SEQ ID NO: 151968 - RNA, 19 nt, Artificial Sequence
  Description of Artificial Sequence: Synthetic oligonucleotide
gaacccgccgguaguucuu

SEQ ID NO: 151969 - RNA, 19 nt, Artificial Sequence
  Description of Artificial Sequence: Synthetic oligonucleotide
cugagacagaaggccuccu

SEQ ID NO: 151970 - RNA, 19 nt, Artificial Sequence
  Description of Artificial Sequence: Synthetic oligonucleotide
gcccagaacucugcguaua

SEQ ID NO: 151971 - RNA, 19 nt, Artificial Sequence
  Description of Artificial Sequence: Synthetic oligonucleotide
gcgugguguagcagggaau

SEQ ID NO: 151972 - RNA, 19 nt, Artificial Sequence
  Description of Artificial Sequence: Synthetic oligonucleotide
ccgugacugcgugcuucca

SEQ ID NO: 151973 - RNA, 19 nt, Artificial Sequence
  Description of Artificial Sequence: Synthetic oligonucleotide
cgcagcggucggcguucac

SEQ ID NO: 151974 - RNA, 19 nt, Artificial Sequence
  Description of Artificial Sequence: Synthetic oligonucleotide
gcgaccccgccugguacau

SEQ ID NO: 151975 - RNA, 19 nt, Artificial Sequence
  Description of Artificial Sequence: Synthetic oligonucleotide
gcgcagcggucggcguuca

SEQ ID NO: 151976 - RNA, 19 nt, Artificial Sequence
  Description of Artificial Sequence: Synthetic oligonucleotide
aaccccaugauacagaagc

SEQ ID NO: 151977 - RNA, 19 nt, Artificial Sequence
  Description of Artificial Sequence: Synthetic oligonucleotide
auucaauugacuuaauggc

SEQ ID NO: 151978 - RNA, 19 nt, Artificial Sequence
  Description of Artificial Sequence: Synthetic oligonucleotide
ugauuauucaaacagaccu

SEQ ID NO: 151979 - RNA, 19 nt, Artificial Sequence
  Description of Artificial Sequence: Synthetic oligonucleotide
agaguuucgguuuaaaugg

SEQ ID NO: 151980 - RNA, 19 nt, Artificial Sequence
  Description of Artificial Sequence: Synthetic oligonucleotide
ugauuuugggcccaaaugg

SEQ ID NO: 151981 - RNA, 19 nt, Artificial Sequence
  Description of Artificial Sequence: Synthetic oligonucleotide
gauggaagguuuuagaagc

SEQ ID NO: 151982 - RNA, 19 nt, Artificial Sequence
  Description of Artificial Sequence: Synthetic oligonucleotide
uccuguauaaauauauucc

SEQ ID NO: 151983 - RNA, 19 nt, Artificial Sequence
  Description of Artificial Sequence: Synthetic oligonucleotide
ucugaaagggucaacauga

SEQ ID NO: 151984 - RNA, 19 nt, Artificial Sequence
  Description of Artificial Sequence: Synthetic oligonucleotide
gaaaguaugaccccggggc

SEQ ID NO: 151985 - RNA, 19 nt, Artificial Sequence
  Description of Artificial Sequence: Synthetic oligonucleotide
acaauauagaaacacagga

SEQ ID NO: 151986 - RNA, 19 nt, Artificial Sequence
  Description of Artificial Sequence: Synthetic oligonucleotide
ugguaagacagaaugacag

SEQ ID NO: 151987 - RNA, 19 nt, Artificial Sequence
  Description of Artificial Sequence: Synthetic oligonucleotide
auuacuaacuaacucuuuc

SEQ ID NO: 151988 - RNA, 19 nt, Artificial Sequence
  Description of Artificial Sequence: Synthetic oligonucleotide
agaacgaaguguuucaccg

SEQ ID NO: 151989 - RNA, 19 nt, Artificial Sequence
  Description of Artificial Sequence: Synthetic oligonucleotide
aaauauauuccccucgccu

SEQ ID NO: 151990 - RNA, 19 nt, Artificial Sequence
  Description of Artificial Sequence: Synthetic oligonucleotide
aagaacgaaguguuucacc

SEQ ID NO: 151991 - RNA, 19 nt, Artificial Sequence
  Description of Artificial Sequence: Synthetic oligonucleotide
uagaguuucgguuuaaaug

SEQ ID NO: 151992 - RNA, 19 nt, Artificial Sequence
  Description of Artificial Sequence: Synthetic oligonucleotide
uguauaaauauauuccccu

SEQ ID NO: 151993 - RNA, 19 nt, Artificial Sequence
  Description of Artificial Sequence: Synthetic oligonucleotide
aaauucaauugacuuaaug

SEQ ID NO: 151994 - RNA, 19 nt, Artificial Sequence
  Description of Artificial Sequence: Synthetic oligonucleotide
uguacagagagauaugaca

SEQ ID NO: 151995 - RNA, 19 nt, Artificial Sequence
  Description of Artificial Sequence: Synthetic oligonucleotide
aaaguaaucaauggguuug

SEQ ID NO: 151996 - RNA, 19 nt, Artificial Sequence
  Description of Artificial Sequence: Synthetic oligonucleotide
aguuaugaaugaaagaaac

SEQ ID NO: 151997 - RNA, 19 nt, Artificial Sequence
  Description of Artificial Sequence: Synthetic oligonucleotide
uaauuauuaggaacuacug

SEQ ID NO: 151998 - RNA, 19 nt, Artificial Sequence
  Description of Artificial Sequence: Synthetic oligonucleotide
uuaggugaacaaaaccugg

SEQ ID NO: 151999 - RNA, 19 nt, Artificial Sequence
  Description of Artificial Sequence: Synthetic oligonucleotide
uuggacuuaugcuugaaag

SEQ ID NO: 152000 - RNA, 19 nt, Artificial Sequence
  Description of Artificial Sequence: Synthetic oligonucleotide
acuaacuaacucuuucuac

SEQ ID NO: 152001 - RNA, 19 nt, Artificial Sequence
  Description of Artificial Sequence: Synthetic oligonucleotide
agagacauuacuaacuaac

SEQ ID NO: 152002 - RNA, 19 nt, Artificial Sequence
  Description of Artificial Sequence: Synthetic oligonucleotide
uguguuaauuagaaagcag

SEQ ID NO: 152003 - RNA, 19 nt, Artificial Sequence
  Description of Artificial Sequence: Synthetic oligonucleotide
aacgaaguguuucaccguc

SEQ ID NO: 152004 - RNA, 19 nt, Artificial Sequence
  Description of Artificial Sequence: Synthetic oligonucleotide
uuaauggaaauggacacag

SEQ ID NO: 152005 - RNA, 19 nt, Artificial Sequence
  Description of Artificial Sequence: Synthetic oligonucleotide
agccuauuuggacuuaugc

SEQ ID NO: 152006 - RNA, 19 nt, Artificial Sequence
  Description of Artificial Sequence: Synthetic oligonucleotide
uuagcauccagauggagga

SEQ ID NO: 152007 - RNA, 19 nt, Artificial Sequence
  Description of Artificial Sequence: Synthetic oligonucleotide
ugauacagaagcuugugga

SEQ ID NO: 152008 - RNA, 19 nt, Artificial Sequence
  Description of Artificial Sequence: Synthetic oligonucleotide
uaccugacgacaaagugag

SEQ ID NO: 152009 - RNA, 19 nt, Artificial Sequence
  Description of Artificial Sequence: Synthetic oligonucleotide
gaugggucgaacuggaugc

SEQ ID NO: 152010 - RNA, 19 nt, Artificial Sequence
  Description of Artificial Sequence: Synthetic oligonucleotide
uuaccuuuugcuccuuucg

SEQ ID NO: 152011 - RNA, 19 nt, Artificial Sequence
  Description of Artificial Sequence: Synthetic oligonucleotide
uaaucaauggguuuggcua

SEQ ID NO: 152012 - RNA, 19 nt, Artificial Sequence
  Description of Artificial Sequence: Synthetic oligonucleotide
agacauuacuaacuaacuc

SEQ ID NO: 152013 - RNA, 19 nt, Artificial Sequence
  Description of Artificial Sequence: Synthetic oligonucleotide
acguuaaaaucucucugcc

SEQ ID NO: 152014 - RNA, 19 nt, Artificial Sequence
  Description of Artificial Sequence: Synthetic oligonucleotide
uguaguauugcuuguuccc

SEQ ID NO: 152015 - RNA, 19 nt, Artificial Sequence
  Description of Artificial Sequence: Synthetic oligonucleotide
uucaauugacuuaauggcu

SEQ ID NO: 152016 - RNA, 19 nt, Artificial Sequence
  Description of Artificial Sequence: Synthetic oligonucleotide
uugauuuaaagcgagcuac

SEQ ID NO: 152017 - RNA, 19 nt, Artificial Sequence
  Description of Artificial Sequence: Synthetic oligonucleotide
ugaaguugaagcgagucag

SEQ ID NO: 152018 - RNA, 19 nt, Artificial Sequence
  Description of Artificial Sequence: Synthetic oligonucleotide
aacugauagagauuucaca

SEQ ID NO: 152019 - RNA, 19 nt, Artificial Sequence
  Description of Artificial Sequence: Synthetic oligonucleotide
uagcauaguauuuaacccc

SEQ ID NO: 152020 - RNA, 19 nt, Artificial Sequence
  Description of Artificial Sequence: Synthetic oligonucleotide
cucaguagccaguuaaugg

SEQ ID NO: 152021 - RNA, 19 nt, Artificial Sequence
  Description of Artificial Sequence: Synthetic oligonucleotide
ucgccuaucaaaagaagcc

SEQ ID NO: 152022 - RNA, 19 nt, Artificial Sequence
  Description of Artificial Sequence: Synthetic oligonucleotide
acagcaaaugcagagaaag

SEQ ID NO: 152023 - RNA, 19 nt, Artificial Sequence
  Description of Artificial Sequence: Synthetic oligonucleotide
cauaaacucugauuauucg

SEQ ID NO: 152024 - RNA, 19 nt, Artificial Sequence
  Description of Artificial Sequence: Synthetic oligonucleotide
agauauacagugcaugcug

SEQ ID NO: 152025 - RNA, 19 nt, Artificial Sequence
  Description of Artificial Sequence: Synthetic oligonucleotide
aagacauuaaaagcuuuag

SEQ ID NO: 152026 - RNA, 19 nt, Artificial Sequence
  Description of Artificial Sequence: Synthetic oligonucleotide
gauuauucgaucugcugug

SEQ ID NO: 152027 - RNA, 19 nt, Artificial Sequence
  Description of Artificial Sequence: Synthetic oligonucleotide
aaacucugauuauucgauc

SEQ ID NO: 152028 - RNA, 19 nt, Artificial Sequence
  Description of Artificial Sequence: Synthetic oligonucleotide
aauauauuccccucgccua

SEQ ID NO: 152029 - RNA, 19 nt, Artificial Sequence
  Description of Artificial Sequence: Synthetic oligonucleotide
uaggugaacaaaaccuggg

SEQ ID NO: 152030 - RNA, 19 nt, Artificial Sequence
  Description of Artificial Sequence: Synthetic oligonucleotide
aaagugagaagaacgaagu

SEQ ID NO: 152031 - RNA, 19 nt, Artificial Sequence
  Description of Artificial Sequence: Synthetic oligonucleotide
ucuccugacgucuucacgc

SEQ ID NO: 152032 - RNA, 19 nt, Artificial Sequence
  Description of Artificial Sequence: Synthetic oligonucleotide
auauacagugcaugcugcc

SEQ ID NO: 152033 - RNA, 19 nt, Artificial Sequence
  Description of Artificial Sequence: Synthetic oligonucleotide
agaacaacauguuuggaau

SEQ ID NO: 152034 - RNA, 19 nt, Artificial Sequence
  Description of Artificial Sequence: Synthetic oligonucleotide
uuccuguauaaauauauuc

SEQ ID NO: 152035 - RNA, 19 nt, Artificial Sequence
  Description of Artificial Sequence: Synthetic oligonucleotide
aguuaggugaacaaaaccu

SEQ ID NO: 152036 - RNA, 19 nt, Artificial Sequence
  Description of Artificial Sequence: Synthetic oligonucleotide
uggacuuuggauuuucaga

SEQ ID NO: 152037 - RNA, 19 nt, Artificial Sequence
  Description of Artificial Sequence: Synthetic oligonucleotide
gacauuacuaacuaacucu

SEQ ID NO: 152038 - RNA, 19 nt, Artificial Sequence
  Description of Artificial Sequence: Synthetic oligonucleotide
cacguuaaaaucucucugc

SEQ ID NO: 152039 - RNA, 19 nt, Artificial Sequence
  Description of Artificial Sequence: Synthetic oligonucleotide
ucuacuugauuuugggccc

SEQ ID NO: 152040 - RNA, 19 nt, Artificial Sequence
  Description of Artificial Sequence: Synthetic oligonucleotide
ugaaccugaucuuugauuu

SEQ ID NO: 152041 - RNA, 19 nt, Artificial Sequence
  Description of Artificial Sequence: Synthetic oligonucleotide
guguuaauuagaaagcagc

SEQ ID NO: 152042 - RNA, 19 nt, Artificial Sequence
  Description of Artificial Sequence: Synthetic oligonucleotide
uccaaaggcuaccugacga

SEQ ID NO: 152043 - RNA, 19 nt, Artificial Sequence
  Description of Artificial Sequence: Synthetic oligonucleotide
uuacuaacuaacucuuucu

SEQ ID NO: 152044 - RNA, 19 nt, Artificial Sequence
  Description of Artificial Sequence: Synthetic oligonucleotide
uucucccagauauacagug

SEQ ID NO: 152045 - RNA, 19 nt, Artificial Sequence
  Description of Artificial Sequence: Synthetic oligonucleotide
aagcuuuagcaagaaguac

SEQ ID NO: 152046 - RNA, 19 nt, Artificial Sequence
  Description of Artificial Sequence: Synthetic oligonucleotide
uaaauauauuccccucgcc

SEQ ID NO: 152047 - RNA, 19 nt, Artificial Sequence
  Description of Artificial Sequence: Synthetic oligonucleotide
uaaagcgagcuacugcugc

SEQ ID NO: 152048 - RNA, 19 nt, Artificial Sequence
  Description of Artificial Sequence: Synthetic oligonucleotide
ugcacacuacugcaggacg

SEQ ID NO: 152049 - RNA, 19 nt, Artificial Sequence
  Description of Artificial Sequence: Synthetic oligonucleotide
augauuauucaaacagacc

SEQ ID NO: 152050 - RNA, 19 nt, Artificial Sequence
  Description of Artificial Sequence: Synthetic oligonucleotide
agcaaccuuucacagaaag

SEQ ID NO: 152051 - RNA, 19 nt, Artificial Sequence
  Description of Artificial Sequence: Synthetic oligonucleotide
ugcaagaucuucaccaggu

SEQ ID NO: 152052 - RNA, 19 nt, Artificial Sequence
  Description of Artificial Sequence: Synthetic oligonucleotide
uaucaguuugcacacuacu

SEQ ID NO: 152053 - RNA, 19 nt, Artificial Sequence
  Description of Artificial Sequence: Synthetic oligonucleotide
aucucaaaugacuggccac

SEQ ID NO: 152054 - RNA, 19 nt, Artificial Sequence
  Description of Artificial Sequence: Synthetic oligonucleotide
cuuguaucaguuugcacac

SEQ ID NO: 152055 - RNA, 19 nt, Artificial Sequence
  Description of Artificial Sequence: Synthetic oligonucleotide
agccaguuaauggaaaugg

SEQ ID NO: 152056 - RNA, 19 nt, Artificial Sequence
  Description of Artificial Sequence: Synthetic oligonucleotide
agguuuuagaagcuuacga

SEQ ID NO: 152057 - RNA, 19 nt, Artificial Sequence
  Description of Artificial Sequence: Synthetic oligonucleotide
auuccugagagccuauuug

SEQ ID NO: 152058 - RNA, 19 nt, Artificial Sequence
  Description of Artificial Sequence: Synthetic oligonucleotide
agugagaagaacgaagugu

SEQ ID NO: 152059 - RNA, 19 nt, Artificial Sequence
  Description of Artificial Sequence: Synthetic oligonucleotide
cucgccuaucaaaagaagc

SEQ ID NO: 152060 - RNA, 19 nt, Artificial Sequence
  Description of Artificial Sequence: Synthetic oligonucleotide
aaauggacaccacuccacu

SEQ ID NO: 152061 - RNA, 19 nt, Artificial Sequence
  Description of Artificial Sequence: Synthetic oligonucleotide
auuggucucacacacacuu

SEQ ID NO: 152062 - RNA, 19 nt, Artificial Sequence
  Description of Artificial Sequence: Synthetic oligonucleotide
uaugcuugaaaggaaggca

SEQ ID NO: 152063 - RNA, 19 nt, Artificial Sequence
  Description of Artificial Sequence: Synthetic oligonucleotide
ucuucacgcauccucauuc

SEQ ID NO: 152064 - RNA, 19 nt, Artificial Sequence
  Description of Artificial Sequence: Synthetic oligonucleotide
ccacuuaccaaucacaacc

SEQ ID NO: 152065 - RNA, 19 nt, Artificial Sequence
  Description of Artificial Sequence: Synthetic oligonucleotide
agaaaguaugaccccgggg

SEQ ID NO: 152066 - RNA, 19 nt, Artificial Sequence
  Description of Artificial Sequence: Synthetic oligonucleotide
gacaggagcagauuucaug

SEQ ID NO: 152067 - RNA, 19 nt, Artificial Sequence
  Description of Artificial Sequence: Synthetic oligonucleotide
aagugagaagaacgaagug

SEQ ID NO: 152068 - RNA, 19 nt, Artificial Sequence
  Description of Artificial Sequence: Synthetic oligonucleotide
gauuauucaaacagaccug

SEQ ID NO: 152069 - RNA, 19 nt, Artificial Sequence
  Description of Artificial Sequence: Synthetic oligonucleotide
ucaaaucggagucaucguc

SEQ ID NO: 152070 - RNA, 19 nt, Artificial Sequence
  Description of Artificial Sequence: Synthetic oligonucleotide
acacguuaaaaucucucug

SEQ ID NO: 152071 - RNA, 19 nt, Artificial Sequence
  Description of Artificial Sequence: Synthetic oligonucleotide
ugccccaaccccaugauac

SEQ ID NO: 152072 - RNA, 19 nt, Artificial Sequence
  Description of Artificial Sequence: Synthetic oligonucleotide
gaucucgaggaugauauug

SEQ ID NO: 152073 - RNA, 19 nt, Artificial Sequence
  Description of Artificial Sequence: Synthetic oligonucleotide
uaauuagaaagcagcuccu

SEQ ID NO: 152074 - RNA, 19 nt, Artificial Sequence
  Description of Artificial Sequence: Synthetic oligonucleotide
aaaguaugaccccggggca

SEQ ID NO: 152075 - RNA, 19 nt, Artificial Sequence
  Description of Artificial Sequence: Synthetic oligonucleotide
aauagagagucagggaaga

SEQ ID NO: 152076 - RNA, 19 nt, Artificial Sequence
  Description of Artificial Sequence: Synthetic oligonucleotide
aaguaaucaauggguuugg

SEQ ID NO: 152077 - RNA, 19 nt, Artificial Sequence
  Description of Artificial Sequence: Synthetic oligonucleotide
caguuaauggaaauggaca

SEQ ID NO: 152078 - RNA, 19 nt, Artificial Sequence
  Description of Artificial Sequence: Synthetic oligonucleotide
uaugaugggucgaacugga

SEQ ID NO: 152079 - RNA, 19 nt, Artificial Sequence
  Description of Artificial Sequence: Synthetic oligonucleotide
ucugauuauucgaucugcu

SEQ ID NO: 152080 - RNA, 19 nt, Artificial Sequence
  Description of Artificial Sequence: Synthetic oligonucleotide
acaggcaaugauuuaacaa

SEQ ID NO: 152081 - RNA, 19 nt, Artificial Sequence
  Description of Artificial Sequence: Synthetic oligonucleotide
acaaauagagagucaggga

SEQ ID NO: 152082 - RNA, 19 nt, Artificial Sequence
  Description of Artificial Sequence: Synthetic oligonucleotide
guuuuagaagcuuacgaaa

SEQ ID NO: 152083 - RNA, 19 nt, Artificial Sequence
  Description of Artificial Sequence: Synthetic oligonucleotide
accacguucaaaucggagu

SEQ ID NO: 152084 - RNA, 19 nt, Artificial Sequence
  Description of Artificial Sequence: Synthetic oligonucleotide
cuguaguauugcuuguucc

SEQ ID NO: 152085 - RNA, 19 nt, Artificial Sequence
  Description of Artificial Sequence: Synthetic oligonucleotide
cccguuguuacucugaagg

SEQ ID NO: 152086 - RNA, 19 nt, Artificial Sequence
  Description of Artificial Sequence: Synthetic oligonucleotide
uaaaguaaucaauggguuu

SEQ ID NO: 152087 - RNA, 19 nt, Artificial Sequence
  Description of Artificial Sequence: Synthetic oligonucleotide
caguuaggugaacaaaacc

SEQ ID NO: 152088 - RNA, 19 nt, Artificial Sequence
  Description of Artificial Sequence: Synthetic oligonucleotide
ugcauugguuuuccgagga

SEQ ID NO: 152089 - RNA, 19 nt, Artificial Sequence
  Description of Artificial Sequence: Synthetic oligonucleotide
uauugcuuguucccguugu

SEQ ID NO: 152090 - RNA, 19 nt, Artificial Sequence
  Description of Artificial Sequence: Synthetic oligonucleotide
guuaggugaacaaaaccug

SEQ ID NO: 152091 - RNA, 19 nt, Artificial Sequence
  Description of Artificial Sequence: Synthetic oligonucleotide
gagaaaguaugaccccggg

SEQ ID NO: 152092 - RNA, 19 nt, Artificial Sequence
  Description of Artificial Sequence: Synthetic oligonucleotide
guaguauugcuuguucccg

SEQ ID NO: 152093 - RNA, 19 nt, Artificial Sequence
  Description of Artificial Sequence: Synthetic oligonucleotide
acgacaaagugagaagaac

SEQ ID NO: 152094 - RNA, 19 nt, Artificial Sequence
  Description of Artificial Sequence: Synthetic oligonucleotide
aagcuauugccagagacau

SEQ ID NO: 152095 - RNA, 19 nt, Artificial Sequence
  Description of Artificial Sequence: Synthetic oligonucleotide
uucacgucaguccucgcac

SEQ ID NO: 152096 - RNA, 19 nt, Artificial Sequence
  Description of Artificial Sequence: Synthetic oligonucleotide
auaucaacuucuugauucu

SEQ ID NO: 152097 - RNA, 19 nt, Artificial Sequence
  Description of Artificial Sequence: Synthetic oligonucleotide
uacuaacuaacucuuucua

SEQ ID NO: 152098 - RNA, 19 nt, Artificial Sequence
  Description of Artificial Sequence: Synthetic oligonucleotide
acaguuaggugaacaaaac

SEQ ID NO: 152099 - RNA, 19 nt, Artificial Sequence
  Description of Artificial Sequence: Synthetic oligonucleotide
cacucaaggacaugcacug

SEQ ID NO: 152100 - RNA, 19 nt, Artificial Sequence
  Description of Artificial Sequence: Synthetic oligonucleotide
uacagagagauaugacaug

SEQ ID NO: 152101 - RNA, 19 nt, Artificial Sequence
  Description of Artificial Sequence: Synthetic oligonucleotide
uuuccaugggguccuauuc

SEQ ID NO: 152102 - RNA, 19 nt, Artificial Sequence
  Description of Artificial Sequence: Synthetic oligonucleotide
ucuaccggcagaacaacau

SEQ ID NO: 152103 - RNA, 19 nt, Artificial Sequence
  Description of Artificial Sequence: Synthetic oligonucleotide
uggauauaguaucuacaaa

SEQ ID NO: 152104 - RNA, 19 nt, Artificial Sequence
  Description of Artificial Sequence: Synthetic oligonucleotide
cuaugaugggucgaacugg

SEQ ID NO: 152105 - RNA, 19 nt, Artificial Sequence
  Description of Artificial Sequence: Synthetic oligonucleotide
agaccugauacuggaaaac

SEQ ID NO: 152106 - RNA, 19 nt, Artificial Sequence
  Description of Artificial Sequence: Synthetic oligonucleotide
uguccaaaggcuaccugac

SEQ ID NO: 152107 - RNA, 19 nt, Artificial Sequence
  Description of Artificial Sequence: Synthetic oligonucleotide
acaaccaagugugaaguug

SEQ ID NO: 152108 - RNA, 19 nt, Artificial Sequence
  Description of Artificial Sequence: Synthetic oligonucleotide
agguagaacccuuguauca

SEQ ID NO: 152109 - RNA, 19 nt, Artificial Sequence
  Description of Artificial Sequence: Synthetic oligonucleotide
uuuucgccaauuugaaauc

SEQ ID NO: 152110 - RNA, 19 nt, Artificial Sequence
  Description of Artificial Sequence: Synthetic oligonucleotide
gguccuauucaccaagucc

SEQ ID NO: 152111 - RNA, 19 nt, Artificial Sequence
  Description of Artificial Sequence: Synthetic oligonucleotide
aaguuaugaaugaaagaaa

SEQ ID NO: 152112 - RNA, 19 nt, Artificial Sequence
  Description of Artificial Sequence: Synthetic oligonucleotide
aagcgagucagaucuccug

SEQ ID NO: 152113 - RNA, 19 nt, Artificial Sequence
  Description of Artificial Sequence: Synthetic oligonucleotide
gcaaaaggugguaagacag

SEQ ID NO: 152114 - RNA, 19 nt, Artificial Sequence
  Description of Artificial Sequence: Synthetic oligonucleotide
uuaaagcgagcuacugcug

SEQ ID NO: 152115 - RNA, 19 nt, Artificial Sequence
  Description of Artificial Sequence: Synthetic oligonucleotide
ugugaaguugaagcgaguc

SEQ ID NO: 152116 - RNA, 19 nt, Artificial Sequence
  Description of Artificial Sequence: Synthetic oligonucleotide
agcagauuucaugggacac

SEQ ID NO: 152117 - RNA, 19 nt, Artificial Sequence
  Description of Artificial Sequence: Synthetic oligonucleotide
aucgucuaccggcagaaca

SEQ ID NO: 152118 - RNA, 19 nt, Artificial Sequence
  Description of Artificial Sequence: Synthetic oligonucleotide
cauggauauaguaucuaca

SEQ ID NO: 152119 - RNA, 19 nt, Artificial Sequence
  Description of Artificial Sequence: Synthetic oligonucleotide
caugcaagaucuucaccag

SEQ ID NO: 152120 - RNA, 19 nt, Artificial Sequence
  Description of Artificial Sequence: Synthetic oligonucleotide
aaagcgagcuacugcugcu

SEQ ID NO: 152121 - RNA, 19 nt, Artificial Sequence
  Description of Artificial Sequence: Synthetic oligonucleotide
agcacucgcuucucugucc

SEQ ID NO: 152122 - RNA, 19 nt, Artificial Sequence
  Description of Artificial Sequence: Synthetic oligonucleotide
aguaaucaauggguuuggc

SEQ ID NO: 152123 - RNA, 19 nt, Artificial Sequence
  Description of Artificial Sequence: Synthetic oligonucleotide
cugauuauucgaucugcug

SEQ ID NO: 152124 - RNA, 19 nt, Artificial Sequence
  Description of Artificial Sequence: Synthetic oligonucleotide
caacugauagagauuucac

SEQ ID NO: 152125 - RNA, 19 nt, Artificial Sequence
  Description of Artificial Sequence: Synthetic oligonucleotide
uuucaccgucuucauagca

SEQ ID NO: 152126 - RNA, 19 nt, Artificial Sequence
  Description of Artificial Sequence: Synthetic oligonucleotide
uuccaugggguccuauuca

SEQ ID NO: 152127 - RNA, 19 nt, Artificial Sequence
  Description of Artificial Sequence: Synthetic oligonucleotide
agugugaaguugaagcgag

SEQ ID NO: 152128 - RNA, 19 nt, Artificial Sequence
  Description of Artificial Sequence: Synthetic oligonucleotide
cuggaaaacaugcaaugca

SEQ ID NO: 152129 - RNA, 19 nt, Artificial Sequence
  Description of Artificial Sequence: Synthetic oligonucleotide
cuaccugacgacaaaguga

SEQ ID NO: 152130 - RNA, 19 nt, Artificial Sequence
  Description of Artificial Sequence: Synthetic oligonucleotide
aaccccagauucucuggag

SEQ ID NO: 152131 - RNA, 19 nt, Artificial Sequence
  Description of Artificial Sequence: Synthetic oligonucleotide
aucuuugauuuaaagcgag

SEQ ID NO: 152132 - RNA, 19 nt, Artificial Sequence
  Description of Artificial Sequence: Synthetic oligonucleotide
ccuuguaucaguuugcaca

SEQ ID NO: 152133 - RNA, 19 nt, Artificial Sequence
  Description of Artificial Sequence: Synthetic oligonucleotide
uucaugggacacacgagaa

SEQ ID NO: 152134 - RNA, 19 nt, Artificial Sequence
  Description of Artificial Sequence: Synthetic oligonucleotide
ugcaagggaaaccccagau

SEQ ID NO: 152135 - RNA, 19 nt, Artificial Sequence
  Description of Artificial Sequence: Synthetic oligonucleotide
auaugacauggauauagua

SEQ ID NO: 152136 - RNA, 19 nt, Artificial Sequence
  Description of Artificial Sequence: Synthetic oligonucleotide
ucucaguagccaguuaaug

SEQ ID NO: 152137 - RNA, 19 nt, Artificial Sequence
  Description of Artificial Sequence: Synthetic oligonucleotide
agcuaugaugggucgaacu

SEQ ID NO: 152138 - RNA, 19 nt, Artificial Sequence
  Description of Artificial Sequence: Synthetic oligonucleotide
ucgucuaccggcagaacaa

SEQ ID NO: 152139 - RNA, 19 nt, Artificial Sequence
  Description of Artificial Sequence: Synthetic oligonucleotide
cucugauuauucgaucugc

SEQ ID NO: 152140 - RNA, 19 nt, Artificial Sequence
  Description of Artificial Sequence: Synthetic oligonucleotide
gagaaccuuguucugaucu

SEQ ID NO: 152141 - RNA, 19 nt, Artificial Sequence
  Description of Artificial Sequence: Synthetic oligonucleotide
uaauggaaauggacacagc

SEQ ID NO: 152142 - RNA, 19 nt, Artificial Sequence
  Description of Artificial Sequence: Synthetic oligonucleotide
uucaaaucggagucaucgu

SEQ ID NO: 152143 - RNA, 19 nt, Artificial Sequence
  Description of Artificial Sequence: Synthetic oligonucleotide
auaaaguaaucaauggguu

SEQ ID NO: 152144 - RNA, 19 nt, Artificial Sequence
  Description of Artificial Sequence: Synthetic oligonucleotide
augaaccugaucuuugauu

SEQ ID NO: 152145 - RNA, 19 nt, Artificial Sequence
  Description of Artificial Sequence: Synthetic oligonucleotide
caagaaguacccaaggcua

SEQ ID NO: 152146 - RNA, 19 nt, Artificial Sequence
  Description of Artificial Sequence: Synthetic oligonucleotide
cagaacaacauguuuggaa

SEQ ID NO: 152147 - RNA, 19 nt, Artificial Sequence
  Description of Artificial Sequence: Synthetic oligonucleotide
gguuuuagaagcuuacgaa

SEQ ID NO: 152148 - RNA, 19 nt, Artificial Sequence
  Description of Artificial Sequence: Synthetic oligonucleotide
augacuggccacacugucc

SEQ ID NO: 152149 - RNA, 19 nt, Artificial Sequence
  Description of Artificial Sequence: Synthetic oligonucleotide
aaaucggagucaucgucua

SEQ ID NO: 152150 - RNA, 19 nt, Artificial Sequence
  Description of Artificial Sequence: Synthetic oligonucleotide
cuuucggccggccugcuug

SEQ ID NO: 152151 - RNA, 19 nt, Artificial Sequence
  Description of Artificial Sequence: Synthetic oligonucleotide
caugcugccgggcggagcc

SEQ ID NO: 152152 - RNA, 19 nt, Artificial Sequence
  Description of Artificial Sequence: Synthetic oligonucleotide
acaugacaggagcagauuu

SEQ ID NO: 152153 - RNA, 19 nt, Artificial Sequence
  Description of Artificial Sequence: Synthetic oligonucleotide
acacaaccaagugugaagu

SEQ ID NO: 152154 - RNA, 19 nt, Artificial Sequence
  Description of Artificial Sequence: Synthetic oligonucleotide
aagcuuguggagaaauaca

SEQ ID NO: 152155 - RNA, 19 nt, Artificial Sequence
  Description of Artificial Sequence: Synthetic oligonucleotide
gcuaugaugggucgaacug

SEQ ID NO: 152156 - RNA, 19 nt, Artificial Sequence
  Description of Artificial Sequence: Synthetic oligonucleotide
uguuacucugaaggaagca

SEQ ID NO: 152157 - RNA, 19 nt, Artificial Sequence
  Description of Artificial Sequence: Synthetic oligonucleotide
uuccccucgccuaucaaaa

SEQ ID NO: 152158 - RNA, 19 nt, Artificial Sequence
  Description of Artificial Sequence: Synthetic oligonucleotide
gauuuugggcccaaaugga

SEQ ID NO: 152159 - RNA, 19 nt, Artificial Sequence
  Description of Artificial Sequence: Synthetic oligonucleotide
cuguacagagagauaugac

SEQ ID NO: 152160 - RNA, 19 nt, Artificial Sequence
  Description of Artificial Sequence: Synthetic oligonucleotide
agcgagucagaucuccuga

SEQ ID NO: 152161 - RNA, 19 nt, Artificial Sequence
  Description of Artificial Sequence: Synthetic oligonucleotide
gcuguguuaauuagaaagc

SEQ ID NO: 152162 - RNA, 19 nt, Artificial Sequence
  Description of Artificial Sequence: Synthetic oligonucleotide
cuucacgcauccucauucc

SEQ ID NO: 152163 - RNA, 19 nt, Artificial Sequence
  Description of Artificial Sequence: Synthetic oligonucleotide
uuucgccaauuugaaaucu

SEQ ID NO: 152164 - RNA, 19 nt, Artificial Sequence
  Description of Artificial Sequence: Synthetic oligonucleotide
aucauaaacucugauuauu

SEQ ID NO: 152165 - RNA, 19 nt, Artificial Sequence
  Description of Artificial Sequence: Synthetic oligonucleotide
uccaugggguccuauucac

SEQ ID NO: 152166 - RNA, 19 nt, Artificial Sequence
  Description of Artificial Sequence: Synthetic oligonucleotide
uucucaguagccaguuaau

SEQ ID NO: 152167 - RNA, 19 nt, Artificial Sequence
  Description of Artificial Sequence: Synthetic oligonucleotide
cucgcuucucuguccaacc

SEQ ID NO: 152168 - RNA, 19 nt, Artificial Sequence
  Description of Artificial Sequence: Synthetic oligonucleotide
cugacgucuucacgcaucc

SEQ ID NO: 152169 - RNA, 19 nt, Artificial Sequence
  Description of Artificial Sequence: Synthetic oligonucleotide
aagcuaugaugggucgaac

SEQ ID NO: 152170 - RNA, 19 nt, Artificial Sequence
  Description of Artificial Sequence: Synthetic oligonucleotide
cuuguucccguuguuacuc

SEQ ID NO: 152171 - RNA, 19 nt, Artificial Sequence
  Description of Artificial Sequence: Synthetic oligonucleotide
uuccgccugcacuuuaccc

SEQ ID NO: 152172 - RNA, 19 nt, Artificial Sequence
  Description of Artificial Sequence: Synthetic oligonucleotide
uucgguuuaaauggagaau

SEQ ID NO: 152173 - RNA, 19 nt, Artificial Sequence
  Description of Artificial Sequence: Synthetic oligonucleotide
gagauugcuccuccugcug

SEQ ID NO: 152174 - RNA, 19 nt, Artificial Sequence
  Description of Artificial Sequence: Synthetic oligonucleotide
uccacacguuaaaaucucu

SEQ ID NO: 152175 - RNA, 19 nt, Artificial Sequence
  Description of Artificial Sequence: Synthetic oligonucleotide
acgcuguacagagagauau

SEQ ID NO: 152176 - RNA, 19 nt, Artificial Sequence
  Description of Artificial Sequence: Synthetic oligonucleotide
gugaaguugaagcgaguca

SEQ ID NO: 152177 - RNA, 19 nt, Artificial Sequence
  Description of Artificial Sequence: Synthetic oligonucleotide
ucgccaauuugaaaucuuu

SEQ ID NO: 152178 - RNA, 19 nt, Artificial Sequence
  Description of Artificial Sequence: Synthetic oligonucleotide
gcuaccugacgacaaagug

SEQ ID NO: 152179 - RNA, 19 nt, Artificial Sequence
  Description of Artificial Sequence: Synthetic oligonucleotide
aaaugacuggccacacugu

SEQ ID NO: 152180 - RNA, 19 nt, Artificial Sequence
  Description of Artificial Sequence: Synthetic oligonucleotide
aguuucgguuuaaauggag

SEQ ID NO: 152181 - RNA, 19 nt, Artificial Sequence
  Description of Artificial Sequence: Synthetic oligonucleotide
guuaauggaaauggacaca

SEQ ID NO: 152182 - RNA, 19 nt, Artificial Sequence
  Description of Artificial Sequence: Synthetic oligonucleotide
ucccaugcaagaucuucac

SEQ ID NO: 152183 - RNA, 19 nt, Artificial Sequence
  Description of Artificial Sequence: Synthetic oligonucleotide
uucaagcacucgcuucucu

SEQ ID NO: 152184 - RNA, 19 nt, Artificial Sequence
  Description of Artificial Sequence: Synthetic oligonucleotide
uggacaccacuccacuaga

SEQ ID NO: 152185 - RNA, 19 nt, Artificial Sequence
  Description of Artificial Sequence: Synthetic oligonucleotide
uccccagagaaacaacauu

SEQ ID NO: 152186 - RNA, 19 nt, Artificial Sequence
  Description of Artificial Sequence: Synthetic oligonucleotide
cauccauccaauuugcuau

SEQ ID NO: 152187 - RNA, 19 nt, Artificial Sequence
  Description of Artificial Sequence: Synthetic oligonucleotide
cuguguuaauuagaaagca

SEQ ID NO: 152188 - RNA, 19 nt, Artificial Sequence
  Description of Artificial Sequence: Synthetic oligonucleotide
gguagaacccuuguaucag

SEQ ID NO: 152189 - RNA, 19 nt, Artificial Sequence
  Description of Artificial Sequence: Synthetic oligonucleotide
aaggcuaccugacgacaaa

SEQ ID NO: 152190 - RNA, 19 nt, Artificial Sequence
  Description of Artificial Sequence: Synthetic oligonucleotide
uccgaggauacugguagca

SEQ ID NO: 152191 - RNA, 19 nt, Artificial Sequence
  Description of Artificial Sequence: Synthetic oligonucleotide
uuguggagaaauacaccuu

SEQ ID NO: 152192 - RNA, 19 nt, Artificial Sequence
  Description of Artificial Sequence: Synthetic oligonucleotide
uucuuggauuuaccauccc

SEQ ID NO: 152193 - RNA, 19 nt, Artificial Sequence
  Description of Artificial Sequence: Synthetic oligonucleotide
cugaucucgaggaugauau

SEQ ID NO: 152194 - RNA, 19 nt, Artificial Sequence
  Description of Artificial Sequence: Synthetic oligonucleotide
guuucgguuuaaauggaga

SEQ ID NO: 152195 - RNA, 19 nt, Artificial Sequence
  Description of Artificial Sequence: Synthetic oligonucleotide
acuccacuagaaauagaag

SEQ ID NO: 152196 - RNA, 19 nt, Artificial Sequence
  Description of Artificial Sequence: Synthetic oligonucleotide
aaaggcuaccugacgacaa

SEQ ID NO: 152197 - RNA, 19 nt, Artificial Sequence
  Description of Artificial Sequence: Synthetic oligonucleotide
ggaaaccccagauucucug

SEQ ID NO: 152198 - RNA, 19 nt, Artificial Sequence
  Description of Artificial Sequence: Synthetic oligonucleotide
ccuucguugauccuuccag

SEQ ID NO: 152199 - RNA, 19 nt, Artificial Sequence
  Description of Artificial Sequence: Synthetic oligonucleotide
gacuuaauggcuguaguau

SEQ ID NO: 152200 - RNA, 19 nt, Artificial Sequence
  Description of Artificial Sequence: Synthetic oligonucleotide
guuacucugaaggaagcaa

SEQ ID NO: 152201 - RNA, 19 nt, Artificial Sequence
  Description of Artificial Sequence: Synthetic oligonucleotide
ucgcacaggugccccaacc

SEQ ID NO: 152202 - RNA, 19 nt, Artificial Sequence
  Description of Artificial Sequence: Synthetic oligonucleotide
guucugaucucgaggauga

SEQ ID NO: 152203 - RNA, 19 nt, Artificial Sequence
  Description of Artificial Sequence: Synthetic oligonucleotide
guccuauucaccaaguccu

SEQ ID NO: 152204 - RNA, 19 nt, Artificial Sequence
  Description of Artificial Sequence: Synthetic oligonucleotide
acuguccaaaggcuaccug

SEQ ID NO: 152205 - RNA, 19 nt, Artificial Sequence
  Description of Artificial Sequence: Synthetic oligonucleotide
guuucaccgucuucauagc

SEQ ID NO: 152206 - RNA, 19 nt, Artificial Sequence
  Description of Artificial Sequence: Synthetic oligonucleotide
ucugaucucgaggaugaua

SEQ ID NO: 152207 - RNA, 19 nt, Artificial Sequence
  Description of Artificial Sequence: Synthetic oligonucleotide
guauugcuuguucccguug

SEQ ID NO: 152208 - RNA, 19 nt, Artificial Sequence
  Description of Artificial Sequence: Synthetic oligonucleotide
uguagaguuucgguuuaaa

SEQ ID NO: 152209 - RNA, 19 nt, Artificial Sequence
  Description of Artificial Sequence: Synthetic oligonucleotide
uucgccaauuugaaaucuu

SEQ ID NO: 152210 - RNA, 19 nt, Artificial Sequence
  Description of Artificial Sequence: Synthetic oligonucleotide
cacuuaccaaucacaacca

SEQ ID NO: 152211 - RNA, 19 nt, Artificial Sequence
  Description of Artificial Sequence: Synthetic oligonucleotide
ucgggucccaugcaagauc

SEQ ID NO: 152212 - RNA, 19 nt, Artificial Sequence
  Description of Artificial Sequence: Synthetic oligonucleotide
gaagcuaugaugggucgaa

SEQ ID NO: 152213 - RNA, 19 nt, Artificial Sequence
  Description of Artificial Sequence: Synthetic oligonucleotide
caccacguucaaaucggag

SEQ ID NO: 152214 - RNA, 19 nt, Artificial Sequence
  Description of Artificial Sequence: Synthetic oligonucleotide
uacccuucguugauccuuc

SEQ ID NO: 152215 - RNA, 19 nt, Artificial Sequence
  Description of Artificial Sequence: Synthetic oligonucleotide
gaucuccugacgucuucac

SEQ ID NO: 152216 - RNA, 19 nt, Artificial Sequence
  Description of Artificial Sequence: Synthetic oligonucleotide
cagaaugacaggccccuuc

SEQ ID NO: 152217 - RNA, 19 nt, Artificial Sequence
  Description of Artificial Sequence: Synthetic oligonucleotide
auauuccccucgccuauca

SEQ ID NO: 152218 - RNA, 19 nt, Artificial Sequence
  Description of Artificial Sequence: Synthetic oligonucleotide
ugggaucuacacuggugac

SEQ ID NO: 152219 - RNA, 19 nt, Artificial Sequence
  Description of Artificial Sequence: Synthetic oligonucleotide
uggaaucugaaagggucaa

SEQ ID NO: 152220 - RNA, 19 nt, Artificial Sequence
  Description of Artificial Sequence: Synthetic oligonucleotide
ccaaaagcuauugccagag

SEQ ID NO: 152221 - RNA, 19 nt, Artificial Sequence
  Description of Artificial Sequence: Synthetic oligonucleotide
cuucguugauccuuccaga

SEQ ID NO: 152222 - RNA, 19 nt, Artificial Sequence
  Description of Artificial Sequence: Synthetic oligonucleotide
caaccauuggucucacaca

SEQ ID NO: 152223 - RNA, 19 nt, Artificial Sequence
  Description of Artificial Sequence: Synthetic oligonucleotide
aguccucgcacaggugccc

SEQ ID NO: 152224 - RNA, 19 nt, Artificial Sequence
  Description of Artificial Sequence: Synthetic oligonucleotide
augggucgaacuggaugcc

SEQ ID NO: 152225 - RNA, 19 nt, Artificial Sequence
  Description of Artificial Sequence: Synthetic oligonucleotide
ucccguuguuacucugaag

SEQ ID NO: 152226 - RNA, 19 nt, Artificial Sequence
  Description of Artificial Sequence: Synthetic oligonucleotide
aguaugaccccggggcaag

SEQ ID NO: 152227 - RNA, 19 nt, Artificial Sequence
  Description of Artificial Sequence: Synthetic oligonucleotide
cuuuguagaguuucgguuu

SEQ ID NO: 152228 - RNA, 19 nt, Artificial Sequence
  Description of Artificial Sequence: Synthetic oligonucleotide
ucgcuucucuguccaaccu

SEQ ID NO: 152229 - RNA, 19 nt, Artificial Sequence
  Description of Artificial Sequence: Synthetic oligonucleotide
cccacaauauaaaguaauc

SEQ ID NO: 152230 - RNA, 19 nt, Artificial Sequence
  Description of Artificial Sequence: Synthetic oligonucleotide
caaaucggagucaucgucu

SEQ ID NO: 152231 - RNA, 19 nt, Artificial Sequence
  Description of Artificial Sequence: Synthetic oligonucleotide
ggaccugcgcucuucuucc

SEQ ID NO: 152232 - RNA, 19 nt, Artificial Sequence
  Description of Artificial Sequence: Synthetic oligonucleotide
cacuuauuguacacaucca

SEQ ID NO: 152233 - RNA, 19 nt, Artificial Sequence
  Description of Artificial Sequence: Synthetic oligonucleotide
aggagccuccaccaacuga

SEQ ID NO: 152234 - RNA, 19 nt, Artificial Sequence
  Description of Artificial Sequence: Synthetic oligonucleotide
agcaccagccacgauucug

SEQ ID NO: 152235 - RNA, 19 nt, Artificial Sequence
  Description of Artificial Sequence: Synthetic oligonucleotide
ucaauggguuuggcuaucu

SEQ ID NO: 152236 - RNA, 19 nt, Artificial Sequence
  Description of Artificial Sequence: Synthetic oligonucleotide
gacgacaaagugagaagaa

SEQ ID NO: 152237 - RNA, 19 nt, Artificial Sequence
  Description of Artificial Sequence: Synthetic oligonucleotide
ggcaaugauuuaacaaaug

SEQ ID NO: 152238 - RNA, 19 nt, Artificial Sequence
  Description of Artificial Sequence: Synthetic oligonucleotide
cacgucaguccucgcacag

SEQ ID NO: 152239 - RNA, 19 nt, Artificial Sequence
  Description of Artificial Sequence: Synthetic oligonucleotide
guagaguuucgguuuaaau

SEQ ID NO: 152240 - RNA, 19 nt, Artificial Sequence
  Description of Artificial Sequence: Synthetic oligonucleotide
cacaggcaaugauuuaaca

SEQ ID NO: 152241 - RNA, 19 nt, Artificial Sequence
  Description of Artificial Sequence: Synthetic oligonucleotide
cacacacuugaggaagcag

SEQ ID NO: 152242 - RNA, 19 nt, Artificial Sequence
  Description of Artificial Sequence: Synthetic oligonucleotide
guaucaguuugcacacuac

SEQ ID NO: 152243 - RNA, 19 nt, Artificial Sequence
  Description of Artificial Sequence: Synthetic oligonucleotide
augcaagggaaaccccaga

SEQ ID NO: 152244 - RNA, 19 nt, Artificial Sequence
  Description of Artificial Sequence: Synthetic oligonucleotide
ggaacuacugccacagaca

SEQ ID NO: 152245 - RNA, 19 nt, Artificial Sequence
  Description of Artificial Sequence: Synthetic oligonucleotide
gugguaagacagaaugaca

SEQ ID NO: 152246 - RNA, 19 nt, Artificial Sequence
  Description of Artificial Sequence: Synthetic oligonucleotide
acuacugcaggacgcugua

SEQ ID NO: 152247 - RNA, 19 nt, Artificial Sequence
  Description of Artificial Sequence: Synthetic oligonucleotide
acccuucguugauccuucc

SEQ ID NO: 152248 - RNA, 19 nt, Artificial Sequence
  Description of Artificial Sequence: Synthetic oligonucleotide
cccgccacuauguauuccc

SEQ ID NO: 152249 - RNA, 19 nt, Artificial Sequence
  Description of Artificial Sequence: Synthetic oligonucleotide
aggcuaccugacgacaaag

SEQ ID NO: 152250 - RNA, 19 nt, Artificial Sequence
  Description of Artificial Sequence: Synthetic oligonucleotide
ccgagcaaauucaauugac

SEQ ID NO: 152251 - RNA, 19 nt, Artificial Sequence
  Description of Artificial Sequence: Synthetic oligonucleotide
gcuguaguauugcuuguuc

SEQ ID NO: 152252 - RNA, 19 nt, Artificial Sequence
  Description of Artificial Sequence: Synthetic oligonucleotide
gcucuaggaagagacacac

SEQ ID NO: 152253 - RNA, 19 nt, Artificial Sequence
  Description of Artificial Sequence: Synthetic oligonucleotide
gacagaaugacaggccccu

SEQ ID NO: 152254 - RNA, 19 nt, Artificial Sequence
  Description of Artificial Sequence: Synthetic oligonucleotide
uauuccccucgccuaucaa

SEQ ID NO: 152255 - RNA, 19 nt, Artificial Sequence
  Description of Artificial Sequence: Synthetic oligonucleotide
ccaugauuauucaaacaga

SEQ ID NO: 152256 - RNA, 19 nt, Artificial Sequence
  Description of Artificial Sequence: Synthetic oligonucleotide
uuucggccggccugcuugc

SEQ ID NO: 152257 - RNA, 19 nt, Artificial Sequence
  Description of Artificial Sequence: Synthetic oligonucleotide
ggaagugagugaaaacaca

SEQ ID NO: 152258 - RNA, 19 nt, Artificial Sequence
  Description of Artificial Sequence: Synthetic oligonucleotide
gaguuucgguuuaaaugga

SEQ ID NO: 152259 - RNA, 19 nt, Artificial Sequence
  Description of Artificial Sequence: Synthetic oligonucleotide
agcauccagauggaggaaa

SEQ ID NO: 152260 - RNA, 19 nt, Artificial Sequence
  Description of Artificial Sequence: Synthetic oligonucleotide
caaccccaugauacagaag

SEQ ID NO: 152261 - RNA, 19 nt, Artificial Sequence
  Description of Artificial Sequence: Synthetic oligonucleotide
cuuaccaaucacaaccauu

SEQ ID NO: 152262 - RNA, 19 nt, Artificial Sequence
  Description of Artificial Sequence: Synthetic oligonucleotide
uggcuguaguauugcuugu

SEQ ID NO: 152263 - RNA, 19 nt, Artificial Sequence
  Description of Artificial Sequence: Synthetic oligonucleotide
cauaauucacuucuuccuu

SEQ ID NO: 152264 - RNA, 19 nt, Artificial Sequence
  Description of Artificial Sequence: Synthetic oligonucleotide
agcccgccacuauguauuc

SEQ ID NO: 152265 - RNA, 19 nt, Artificial Sequence
  Description of Artificial Sequence: Synthetic oligonucleotide
cuaggaagagacacacugu

SEQ ID NO: 152266 - RNA, 19 nt, Artificial Sequence
  Description of Artificial Sequence: Synthetic oligonucleotide
acgucuucacgcauccuca

SEQ ID NO: 152267 - RNA, 19 nt, Artificial Sequence
  Description of Artificial Sequence: Synthetic oligonucleotide
gagccuauuuggacuuaug

SEQ ID NO: 152268 - RNA, 19 nt, Artificial Sequence
  Description of Artificial Sequence: Synthetic oligonucleotide
gaacgaaguguuucaccgu

SEQ ID NO: 152269 - RNA, 19 nt, Artificial Sequence
  Description of Artificial Sequence: Synthetic oligonucleotide
cuugauuuugggcccaaau

SEQ ID NO: 152270 - RNA, 19 nt, Artificial Sequence
  Description of Artificial Sequence: Synthetic oligonucleotide
gccuauuuggacuuaugcu

SEQ ID NO: 152271 - RNA, 19 nt, Artificial Sequence
  Description of Artificial Sequence: Synthetic oligonucleotide
gaaggagccuccaccaacu

SEQ ID NO: 152272 - RNA, 19 nt, Artificial Sequence
  Description of Artificial Sequence: Synthetic oligonucleotide
acgucaguccucgcacagg

SEQ ID NO: 152273 - RNA, 19 nt, Artificial Sequence
  Description of Artificial Sequence: Synthetic oligonucleotide
cugauagagauuucacaau

SEQ ID NO: 152274 - RNA, 19 nt, Artificial Sequence
  Description of Artificial Sequence: Synthetic oligonucleotide
ccacacguuaaaaucucuc

SEQ ID NO: 152275 - RNA, 19 nt, Artificial Sequence
  Description of Artificial Sequence: Synthetic oligonucleotide
accaacugauagagauuuc

SEQ ID NO: 152276 - RNA, 19 nt, Artificial Sequence
  Description of Artificial Sequence: Synthetic oligonucleotide
ugggucgaacuggaugcca

SEQ ID NO: 152277 - RNA, 19 nt, Artificial Sequence
  Description of Artificial Sequence: Synthetic oligonucleotide
ccaacugauagagauuuca

SEQ ID NO: 152278 - RNA, 19 nt, Artificial Sequence
  Description of Artificial Sequence: Synthetic oligonucleotide
caauugacuuaauggcugu

SEQ ID NO: 152279 - RNA, 19 nt, Artificial Sequence
  Description of Artificial Sequence: Synthetic oligonucleotide
cacgagaaccuuguucuga

SEQ ID NO: 152280 - RNA, 19 nt, Artificial Sequence
  Description of Artificial Sequence: Synthetic oligonucleotide
gggaccugcgcucuucuuc

SEQ ID NO: 152281 - RNA, 19 nt, Artificial Sequence
  Description of Artificial Sequence: Synthetic oligonucleotide
agagccuauuuggacuuau

SEQ ID NO: 152282 - RNA, 19 nt, Artificial Sequence
  Description of Artificial Sequence: Synthetic oligonucleotide
gccacuuaccaaucacaac

SEQ ID NO: 152283 - RNA, 19 nt, Artificial Sequence
  Description of Artificial Sequence: Synthetic oligonucleotide
ccugacgacaaagugagaa

SEQ ID NO: 152284 - RNA, 19 nt, Artificial Sequence
  Description of Artificial Sequence: Synthetic oligonucleotide
ugaucucgaggaugauauu

SEQ ID NO: 152285 - RNA, 19 nt, Artificial Sequence
  Description of Artificial Sequence: Synthetic oligonucleotide
gaaguacccaaggcuaagu

SEQ ID NO: 152286 - RNA, 19 nt, Artificial Sequence
  Description of Artificial Sequence: Synthetic oligonucleotide
aggcuaagucucaucuugu

SEQ ID NO: 152287 - RNA, 19 nt, Artificial Sequence
  Description of Artificial Sequence: Synthetic oligonucleotide
agaagcuuguggagaaaua

SEQ ID NO: 152288 - RNA, 19 nt, Artificial Sequence
  Description of Artificial Sequence: Synthetic oligonucleotide
gcuaucugaaggagccucc

SEQ ID NO: 152289 - RNA, 19 nt, Artificial Sequence
  Description of Artificial Sequence: Synthetic oligonucleotide
cuccuuucggccggccugc

SEQ ID NO: 152290 - RNA, 19 nt, Artificial Sequence
  Description of Artificial Sequence: Synthetic oligonucleotide
gucagaucuccugacgucu

SEQ ID NO: 152291 - RNA, 19 nt, Artificial Sequence
  Description of Artificial Sequence: Synthetic oligonucleotide
acacuacugcaggacgcug

SEQ ID NO: 152292 - RNA, 19 nt, Artificial Sequence
  Description of Artificial Sequence: Synthetic oligonucleotide
aagcgagcuacugcugcuu

SEQ ID NO: 152293 - RNA, 19 nt, Artificial Sequence
  Description of Artificial Sequence: Synthetic oligonucleotide
cuccugacgucuucacgca

SEQ ID NO: 152294 - RNA, 19 nt, Artificial Sequence
  Description of Artificial Sequence: Synthetic oligonucleotide
cuggcucuaggaagagaca

SEQ ID NO: 152295 - RNA, 19 nt, Artificial Sequence
  Description of Artificial Sequence: Synthetic oligonucleotide
ccucgccuaucaaaagaag

SEQ ID NO: 152296 - RNA, 19 nt, Artificial Sequence
  Description of Artificial Sequence: Synthetic oligonucleotide
agacagucuggcagggccu

SEQ ID NO: 152297 - RNA, 19 nt, Artificial Sequence
  Description of Artificial Sequence: Synthetic oligonucleotide
gcacacuacugcaggacgc

SEQ ID NO: 152298 - RNA, 19 nt, Artificial Sequence
  Description of Artificial Sequence: Synthetic oligonucleotide
acgaaguguuucaccgucu

SEQ ID NO: 152299 - RNA, 19 nt, Artificial Sequence
  Description of Artificial Sequence: Synthetic oligonucleotide
guuucacgucaguccucgc

SEQ ID NO: 152300 - RNA, 19 nt, Artificial Sequence
  Description of Artificial Sequence: Synthetic oligonucleotide
caccaacugauagagauuu

SEQ ID NO: 152301 - RNA, 19 nt, Artificial Sequence
  Description of Artificial Sequence: Synthetic oligonucleotide
acucaaggacaugcacuga

SEQ ID NO: 152302 - RNA, 19 nt, Artificial Sequence
  Description of Artificial Sequence: Synthetic oligonucleotide
uccucgcacaggugcccca

SEQ ID NO: 152303 - RNA, 19 nt, Artificial Sequence
  Description of Artificial Sequence: Synthetic oligonucleotide
gcaaugcaagggaaacccc

SEQ ID NO: 152304 - RNA, 19 nt, Artificial Sequence
  Description of Artificial Sequence: Synthetic oligonucleotide
cucuuucuacacuuggcuu

SEQ ID NO: 152305 - RNA, 19 nt, Artificial Sequence
  Description of Artificial Sequence: Synthetic oligonucleotide
uggcuaucugaaggagccu

SEQ ID NO: 152306 - RNA, 19 nt, Artificial Sequence
  Description of Artificial Sequence: Synthetic oligonucleotide
acgauucuggagacuuccu

SEQ ID NO: 152307 - RNA, 19 nt, Artificial Sequence
  Description of Artificial Sequence: Synthetic oligonucleotide
guuccccucgggucccaug

SEQ ID NO: 152308 - RNA, 19 nt, Artificial Sequence
  Description of Artificial Sequence: Synthetic oligonucleotide
gucuaccggcagaacaaca

SEQ ID NO: 152309 - RNA, 19 nt, Artificial Sequence
  Description of Artificial Sequence: Synthetic oligonucleotide
ggcggagcccgccacuaug

SEQ ID NO: 152310 - RNA, 19 nt, Artificial Sequence
  Description of Artificial Sequence: Synthetic oligonucleotide
ggguccuauucaccaaguc

SEQ ID NO: 152311 - RNA, 19 nt, Artificial Sequence
  Description of Artificial Sequence: Synthetic oligonucleotide
cacuacugcaggacgcugu

SEQ ID NO: 152312 - RNA, 19 nt, Artificial Sequence
  Description of Artificial Sequence: Synthetic oligonucleotide
gagauaugacauggauaua

SEQ ID NO: 152313 - RNA, 19 nt, Artificial Sequence
  Description of Artificial Sequence: Synthetic oligonucleotide
uagcauccagauggaggaa

SEQ ID NO: 152314 - RNA, 19 nt, Artificial Sequence
  Description of Artificial Sequence: Synthetic oligonucleotide
ccaaccccaugauacagaa

SEQ ID NO: 152315 - RNA, 19 nt, Artificial Sequence
  Description of Artificial Sequence: Synthetic oligonucleotide
gagcccgccacuauguauu

SEQ ID NO: 152316 - RNA, 19 nt, Artificial Sequence
  Description of Artificial Sequence: Synthetic oligonucleotide
ugaguuccgccugcacuuu

SEQ ID NO: 152317 - RNA, 19 nt, Artificial Sequence
  Description of Artificial Sequence: Synthetic oligonucleotide
gcgagcuacugcugcuuug

SEQ ID NO: 152318 - RNA, 19 nt, Artificial Sequence
  Description of Artificial Sequence: Synthetic oligonucleotide
cccuuguaucaguuugcac

SEQ ID NO: 152319 - RNA, 19 nt, Artificial Sequence
  Description of Artificial Sequence: Synthetic oligonucleotide
cccagauucucuggagccc

SEQ ID NO: 152320 - RNA, 19 nt, Artificial Sequence
  Description of Artificial Sequence: Synthetic oligonucleotide
gcacucgcuucucugucca

SEQ ID NO: 152321 - RNA, 19 nt, Artificial Sequence
  Description of Artificial Sequence: Synthetic oligonucleotide
gacgcuguacagagagaua

SEQ ID NO: 152322 - RNA, 19 nt, Artificial Sequence
  Description of Artificial Sequence: Synthetic oligonucleotide
ggacgcuguacagagagau

SEQ ID NO: 152323 - RNA, 19 nt, Artificial Sequence
  Description of Artificial Sequence: Synthetic oligonucleotide
guaugaccccggggcaagc

SEQ ID NO: 152324 - RNA, 19 nt, Artificial Sequence
  Description of Artificial Sequence: Synthetic oligonucleotide
uucugaucucgaggaugau

SEQ ID NO: 152325 - RNA, 19 nt, Artificial Sequence
  Description of Artificial Sequence: Synthetic oligonucleotide
guccucgcacaggugcccc

SEQ ID NO: 152326 - RNA, 19 nt, Artificial Sequence
  Description of Artificial Sequence: Synthetic oligonucleotide
cucgcacaggugccccaac

SEQ ID NO: 152327 - RNA, 19 nt, Artificial Sequence
  Description of Artificial Sequence: Synthetic oligonucleotide
ccccagagaaacaacauuu

SEQ ID NO: 152328 - RNA, 19 nt, Artificial Sequence
  Description of Artificial Sequence: Synthetic oligonucleotide
ucggccggccugcuugcuu

SEQ ID NO: 152329 - RNA, 19 nt, Artificial Sequence
  Description of Artificial Sequence: Synthetic oligonucleotide
cgaucugcuguguuaauua

SEQ ID NO: 152330 - RNA, 19 nt, Artificial Sequence
  Description of Artificial Sequence: Synthetic oligonucleotide
cauuggucucacacacacu

SEQ ID NO: 152331 - RNA, 19 nt, Artificial Sequence
  Description of Artificial Sequence: Synthetic oligonucleotide
ccgccacuauguauucccc

SEQ ID NO: 152332 - RNA, 19 nt, Artificial Sequence
  Description of Artificial Sequence: Synthetic oligonucleotide
cccucgccuaucaaaagaa

SEQ ID NO: 152333 - RNA, 19 nt, Artificial Sequence
  Description of Artificial Sequence: Synthetic oligonucleotide
gaguuccgccugcacuuua

SEQ ID NO: 152334 - RNA, 19 nt, Artificial Sequence
  Description of Artificial Sequence: Synthetic oligonucleotide
caaggcuaagucucaucuu

SEQ ID NO: 152335 - RNA, 19 nt, Artificial Sequence
  Description of Artificial Sequence: Synthetic oligonucleotide
guugauccuuccagaggua

SEQ ID NO: 152336 - RNA, 19 nt, Artificial Sequence
  Description of Artificial Sequence: Synthetic oligonucleotide
cacuuuacccuucguugau

SEQ ID NO: 152337 - RNA, 19 nt, Artificial Sequence
  Description of Artificial Sequence: Synthetic oligonucleotide
cgagcaaauucaauugacu

SEQ ID NO: 152338 - RNA, 19 nt, Artificial Sequence
  Description of Artificial Sequence: Synthetic oligonucleotide
ccccucgccuaucaaaaga

SEQ ID NO: 152339 - RNA, 19 nt, Artificial Sequence
  Description of Artificial Sequence: Synthetic oligonucleotide
cacacuacugcaggacgcu

SEQ ID NO: 152340 - RNA, 19 nt, Artificial Sequence
  Description of Artificial Sequence: Synthetic oligonucleotide
augaugggucgaacuggau

SEQ ID NO: 152341 - RNA, 19 nt, Artificial Sequence
  Description of Artificial Sequence: Synthetic oligonucleotide
acagaaugacaggccccuu

SEQ ID NO: 152342 - RNA, 19 nt, Artificial Sequence
  Description of Artificial Sequence: Synthetic oligonucleotide
cccuuuguagaguuucggu

SEQ ID NO: 152343 - RNA, 19 nt, Artificial Sequence
  Description of Artificial Sequence: Synthetic oligonucleotide
cacaaccaagugugaaguu

SEQ ID NO: 152344 - RNA, 19 nt, Artificial Sequence
  Description of Artificial Sequence: Synthetic oligonucleotide
gggagguagaggccuuugu

SEQ ID NO: 152345 - RNA, 19 nt, Artificial Sequence
  Description of Artificial Sequence: Synthetic oligonucleotide
ccucgggucccaugcaaga

SEQ ID NO: 152346 - RNA, 19 nt, Artificial Sequence
  Description of Artificial Sequence: Synthetic oligonucleotide
ccccggggcaagccaaaag

SEQ ID NO: 152347 - RNA, 19 nt, Artificial Sequence
  Description of Artificial Sequence: Synthetic oligonucleotide
ggcuaccugacgacaaagu

SEQ ID NO: 152348 - RNA, 19 nt, Artificial Sequence
  Description of Artificial Sequence: Synthetic oligonucleotide
uucggccggccugcuugcu

SEQ ID NO: 152349 - RNA, 19 nt, Artificial Sequence
  Description of Artificial Sequence: Synthetic oligonucleotide
cuccugggugggagguaga

SEQ ID NO: 152350 - RNA, 19 nt, Artificial Sequence
  Description of Artificial Sequence: Synthetic oligonucleotide
accugacgacaaagugaga

SEQ ID NO: 152351 - RNA, 19 nt, Artificial Sequence
  Description of Artificial Sequence: Synthetic oligonucleotide
cgagaaccuuguucugauc

SEQ ID NO: 152352 - RNA, 19 nt, Artificial Sequence
  Description of Artificial Sequence: Synthetic oligonucleotide
cgagcuacugcugcuuuga

SEQ ID NO: 152353 - RNA, 19 nt, Artificial Sequence
  Description of Artificial Sequence: Synthetic oligonucleotide
cacucgcuucucuguccaa

SEQ ID NO: 152354 - RNA, 19 nt, Artificial Sequence
  Description of Artificial Sequence: Synthetic oligonucleotide
ccggggcaagccaaaagcu

SEQ ID NO: 152355 - RNA, 19 nt, Artificial Sequence
  Description of Artificial Sequence: Synthetic oligonucleotide
ccacuccacuagaaauaga

SEQ ID NO: 152356 - RNA, 19 nt, Artificial Sequence
  Description of Artificial Sequence: Synthetic oligonucleotide
cgucuaccggcagaacaac

SEQ ID NO: 152357 - RNA, 19 nt, Artificial Sequence
  Description of Artificial Sequence: Synthetic oligonucleotide
gaccccggggcaagccaaa

SEQ ID NO: 152358 - RNA, 19 nt, Artificial Sequence
  Description of Artificial Sequence: Synthetic oligonucleotide
ccaucccuuccacacguua

SEQ ID NO: 152359 - RNA, 19 nt, Artificial Sequence
  Description of Artificial Sequence: Synthetic oligonucleotide
cgccacuauguauucccca

SEQ ID NO: 152360 - RNA, 19 nt, Artificial Sequence
  Description of Artificial Sequence: Synthetic oligonucleotide
cucgggucccaugcaagau

SEQ ID NO: 152361 - RNA, 19 nt, Artificial Sequence
  Description of Artificial Sequence: Synthetic oligonucleotide
gcccgccacuauguauucc

SEQ ID NO: 152362 - RNA, 19 nt, Artificial Sequence
  Description of Artificial Sequence: Synthetic oligonucleotide
gcauugguuuuccgaggau

SEQ ID NO: 152363 - RNA, 19 nt, Artificial Sequence
  Description of Artificial Sequence: Synthetic oligonucleotide
caccgucuucauagcaguu

SEQ ID NO: 152364 - RNA, 19 nt, Artificial Sequence
  Description of Artificial Sequence: Synthetic oligonucleotide
cggccggccugcuugcuuc

SEQ ID NO: 152365 - RNA, 19 nt, Artificial Sequence
  Description of Artificial Sequence: Synthetic oligonucleotide
gggguccuauucaccaagu

SEQ ID NO: 152366 - RNA, 19 nt, Artificial Sequence
  Description of Artificial Sequence: Synthetic oligonucleotide
ccccucgggucccaugcaa

SEQ ID NO: 152367 - RNA, 19 nt, Artificial Sequence
  Description of Artificial Sequence: Synthetic oligonucleotide
cagcaccagccacgauucu

SEQ ID NO: 152368 - RNA, 19 nt, Artificial Sequence
  Description of Artificial Sequence: Synthetic oligonucleotide
cgcuucucuguccaaccuu

SEQ ID NO: 152369 - RNA, 19 nt, Artificial Sequence
  Description of Artificial Sequence: Synthetic oligonucleotide
gggcggagcccgccacuau

SEQ ID NO: 152370 - RNA, 19 nt, Artificial Sequence
  Description of Artificial Sequence: Synthetic oligonucleotide
ccuuucggccggccugcuu

SEQ ID NO: 152371 - RNA, 19 nt, Artificial Sequence
  Description of Artificial Sequence: Synthetic oligonucleotide
cgggcggagcccgccacua

SEQ ID NO: 152372 - RNA, 19 nt, Artificial Sequence
  Description of Artificial Sequence: Synthetic oligonucleotide
aauacaguuaauaaguccc

SEQ ID NO: 152373 - RNA, 19 nt, Artificial Sequence
  Description of Artificial Sequence: Synthetic oligonucleotide
ucuacugugaguauacugg

SEQ ID NO: 152374 - RNA, 19 nt, Artificial Sequence
  Description of Artificial Sequence: Synthetic oligonucleotide
aguaguauggaccagagcu

SEQ ID NO: 152375 - RNA, 19 nt, Artificial Sequence
  Description of Artificial Sequence: Synthetic oligonucleotide
aaguauugaaauuggaaag

SEQ ID NO: 152376 - RNA, 19 nt, Artificial Sequence
  Description of Artificial Sequence: Synthetic oligonucleotide
aauguuaccaguuguagca

SEQ ID NO: 152377 - RNA, 19 nt, Artificial Sequence
  Description of Artificial Sequence: Synthetic oligonucleotide
uuauagguaaauuuucagg

SEQ ID NO: 152378 - RNA, 19 nt, Artificial Sequence
  Description of Artificial Sequence: Synthetic oligonucleotide
aucguaacuauacagaguc

SEQ ID NO: 152379 - RNA, 19 nt, Artificial Sequence
  Description of Artificial Sequence: Synthetic oligonucleotide
aauuacugcgcuuauaggu

SEQ ID NO: 152380 - RNA, 19 nt, Artificial Sequence
  Description of Artificial Sequence: Synthetic oligonucleotide
gaaauuacugcgcuuauag

SEQ ID NO: 152381 - RNA, 19 nt, Artificial Sequence
  Description of Artificial Sequence: Synthetic oligonucleotide
uauagguaaauuuucaggu

SEQ ID NO: 152382 - RNA, 19 nt, Artificial Sequence
  Description of Artificial Sequence: Synthetic oligonucleotide
aaaacgauugauucucuag

SEQ ID NO: 152383 - RNA, 19 nt, Artificial Sequence
  Description of Artificial Sequence: Synthetic oligonucleotide
uguacuacuacccucguga

SEQ ID NO: 152384 - RNA, 19 nt, Artificial Sequence
  Description of Artificial Sequence: Synthetic oligonucleotide
agacacguuuacuagaggc

SEQ ID NO: 152385 - RNA, 19 nt, Artificial Sequence
  Description of Artificial Sequence: Synthetic oligonucleotide
aaguuuaauacaaagcaag

SEQ ID NO: 152386 - RNA, 19 nt, Artificial Sequence
  Description of Artificial Sequence: Synthetic oligonucleotide
ucuucggccaagcaaaacg

SEQ ID NO: 152387 - RNA, 19 nt, Artificial Sequence
  Description of Artificial Sequence: Synthetic oligonucleotide
uuuagaagugguuauaaaa

SEQ ID NO: 152388 - RNA, 19 nt, Artificial Sequence
  Description of Artificial Sequence: Synthetic oligonucleotide
uaauaagucccuaucaggu

SEQ ID NO: 152389 - RNA, 19 nt, Artificial Sequence
  Description of Artificial Sequence: Synthetic oligonucleotide
aaugcaugggaguaguaug

SEQ ID NO: 152390 - RNA, 19 nt, Artificial Sequence
  Description of Artificial Sequence: Synthetic oligonucleotide
agcacuaaggcuuuaagcu

SEQ ID NO: 152391 - RNA, 19 nt, Artificial Sequence
  Description of Artificial Sequence: Synthetic oligonucleotide
aauaagucccuaucagguc

SEQ ID NO: 152392 - RNA, 19 nt, Artificial Sequence
  Description of Artificial Sequence: Synthetic oligonucleotide
gaaguauugaaauuggaaa

SEQ ID NO: 152393 - RNA, 19 nt, Artificial Sequence
  Description of Artificial Sequence: Synthetic oligonucleotide
ugacauaaauauuaucccc

SEQ ID NO: 152394 - RNA, 19 nt, Artificial Sequence
  Description of Artificial Sequence: Synthetic oligonucleotide
cuaaaguacaaagacacag

SEQ ID NO: 152395 - RNA, 19 nt, Artificial Sequence
  Description of Artificial Sequence: Synthetic oligonucleotide
gauauuccacccuuuacag

SEQ ID NO: 152396 - RNA, 19 nt, Artificial Sequence
  Description of Artificial Sequence: Synthetic oligonucleotide
acuacuacccucgugaccg

SEQ ID NO: 152397 - RNA, 19 nt, Artificial Sequence
  Description of Artificial Sequence: Synthetic oligonucleotide
uuguguacuacuacccucg

SEQ ID NO: 152398 - RNA, 19 nt, Artificial Sequence
  Description of Artificial Sequence: Synthetic oligonucleotide
guuaauaagucccuaucag

SEQ ID NO: 152399 - RNA, 19 nt, Artificial Sequence
  Description of Artificial Sequence: Synthetic oligonucleotide
aaacgauugauucucuagu

SEQ ID NO: 152400 - RNA, 19 nt, Artificial Sequence
  Description of Artificial Sequence: Synthetic oligonucleotide
uugacacggacucagaugu

SEQ ID NO: 152401 - RNA, 19 nt, Artificial Sequence
  Description of Artificial Sequence: Synthetic oligonucleotide
aaauuacugcgcuuauagg

SEQ ID NO: 152402 - RNA, 19 nt, Artificial Sequence
  Description of Artificial Sequence: Synthetic oligonucleotide
uguauggcaguauagcuga

SEQ ID NO: 152403 - RNA, 19 nt, Artificial Sequence
  Description of Artificial Sequence: Synthetic oligonucleotide
auauuauccccuucuacuc

SEQ ID NO: 152404 - RNA, 19 nt, Artificial Sequence
  Description of Artificial Sequence: Synthetic oligonucleotide
ucugugauuauucuuucgu

SEQ ID NO: 152405 - RNA, 19 nt, Artificial Sequence
  Description of Artificial Sequence: Synthetic oligonucleotide
uguagcggaauuuggaccc

SEQ ID NO: 152406 - RNA, 19 nt, Artificial Sequence
  Description of Artificial Sequence: Synthetic oligonucleotide
cuuauagguaaauuuucag

SEQ ID NO: 152407 - RNA, 19 nt, Artificial Sequence
  Description of Artificial Sequence: Synthetic oligonucleotide
uucccuaauugccugagcc

SEQ ID NO: 152408 - RNA, 19 nt, Artificial Sequence
  Description of Artificial Sequence: Synthetic oligonucleotide
aguuaauaagucccuauca

SEQ ID NO: 152409 - RNA, 19 nt, Artificial Sequence
  Description of Artificial Sequence: Synthetic oligonucleotide
acuagaggcacgcucaaag

SEQ ID NO: 152410 - RNA, 19 nt, Artificial Sequence
  Description of Artificial Sequence: Synthetic oligonucleotide
ucauaauucuccagucuag

SEQ ID NO: 152411 - RNA, 19 nt, Artificial Sequence
  Description of Artificial Sequence: Synthetic oligonucleotide
auugcuaugucugacauaa

SEQ ID NO: 152412 - RNA, 19 nt, Artificial Sequence
  Description of Artificial Sequence: Synthetic oligonucleotide
uuucccauucauuggggcg

SEQ ID NO: 152413 - RNA, 19 nt, Artificial Sequence
  Description of Artificial Sequence: Synthetic oligonucleotide
ugucaugucuugcuuaaca

SEQ ID NO: 152414 - RNA, 19 nt, Artificial Sequence
  Description of Artificial Sequence: Synthetic oligonucleotide
aaauuguuaccaucucugu

SEQ ID NO: 152415 - RNA, 19 nt, Artificial Sequence
  Description of Artificial Sequence: Synthetic oligonucleotide
aggcaucagaaauuguuac

SEQ ID NO: 152416 - RNA, 19 nt, Artificial Sequence
  Description of Artificial Sequence: Synthetic oligonucleotide
aggggugccaauuugguug

SEQ ID NO: 152417 - RNA, 19 nt, Artificial Sequence
  Description of Artificial Sequence: Synthetic oligonucleotide
ucuuucgucuuucccaacc

SEQ ID NO: 152418 - RNA, 19 nt, Artificial Sequence
  Description of Artificial Sequence: Synthetic oligonucleotide
ucaauguuaccaguuguag

SEQ ID NO: 152419 - RNA, 19 nt, Artificial Sequence
  Description of Artificial Sequence: Synthetic oligonucleotide
auuaaauugcuaugucuga

SEQ ID NO: 152420 - RNA, 19 nt, Artificial Sequence
  Description of Artificial Sequence: Synthetic oligonucleotide
agauauaccugcucaauaa

SEQ ID NO: 152421 - RNA, 19 nt, Artificial Sequence
  Description of Artificial Sequence: Synthetic oligonucleotide
ucuaaucuggcaucguaac

SEQ ID NO: 152422 - RNA, 19 nt, Artificial Sequence
  Description of Artificial Sequence: Synthetic oligonucleotide
ucaguaacgugcccgaauc

SEQ ID NO: 152423 - RNA, 19 nt, Artificial Sequence
  Description of Artificial Sequence: Synthetic oligonucleotide
ugcgcuuauagguaaauuu

SEQ ID NO: 152424 - RNA, 19 nt, Artificial Sequence
  Description of Artificial Sequence: Synthetic oligonucleotide
aauuugguugggcuccuga

SEQ ID NO: 152425 - RNA, 19 nt, Artificial Sequence
  Description of Artificial Sequence: Synthetic oligonucleotide
uuaaauugcuaugucugac

SEQ ID NO: 152426 - RNA, 19 nt, Artificial Sequence
  Description of Artificial Sequence: Synthetic oligonucleotide
ugaacagcaccguaccagc

SEQ ID NO: 152427 - RNA, 19 nt, Artificial Sequence
  Description of Artificial Sequence: Synthetic oligonucleotide
uuugguugggcuccugaca

SEQ ID NO: 152428 - RNA, 19 nt, Artificial Sequence
  Description of Artificial Sequence: Synthetic oligonucleotide
aacgauugauucucuaguu

SEQ ID NO: 152429 - RNA, 19 nt, Artificial Sequence
  Description of Artificial Sequence: Synthetic oligonucleotide
acguuuacuagaggcacgc

SEQ ID NO: 152430 - RNA, 19 nt, Artificial Sequence
  Description of Artificial Sequence: Synthetic oligonucleotide
uccugugaucacaauacgu

SEQ ID NO: 152431 - RNA, 19 nt, Artificial Sequence
  Description of Artificial Sequence: Synthetic oligonucleotide
uaacgugcccgaaucacca

SEQ ID NO: 152432 - RNA, 19 nt, Artificial Sequence
  Description of Artificial Sequence: Synthetic oligonucleotide
ggagacucauaugugaugg

SEQ ID NO: 152433 - RNA, 19 nt, Artificial Sequence
  Description of Artificial Sequence: Synthetic oligonucleotide
aagagauauaccugcucaa

SEQ ID NO: 152434 - RNA, 19 nt, Artificial Sequence
  Description of Artificial Sequence: Synthetic oligonucleotide
uggaccagagcuguuaaug

SEQ ID NO: 152435 - RNA, 19 nt, Artificial Sequence
  Description of Artificial Sequence: Synthetic oligonucleotide
cuuacgagucuccccaggg

SEQ ID NO: 152436 - RNA, 19 nt, Artificial Sequence
  Description of Artificial Sequence: Synthetic oligonucleotide
ugguguggcguuaagacuu

SEQ ID NO: 152437 - RNA, 19 nt, Artificial Sequence
  Description of Artificial Sequence: Synthetic oligonucleotide
cuacugugaguauacuggc

SEQ ID NO: 152438 - RNA, 19 nt, Artificial Sequence
  Description of Artificial Sequence: Synthetic oligonucleotide
uaauugguaguaauauguu

SEQ ID NO: 152439 - RNA, 19 nt, Artificial Sequence
  Description of Artificial Sequence: Synthetic oligonucleotide
cuguagcggaauuuggacc

SEQ ID NO: 152440 - RNA, 19 nt, Artificial Sequence
  Description of Artificial Sequence: Synthetic oligonucleotide
uauuuacuguaagaaagaa

SEQ ID NO: 152441 - RNA, 19 nt, Artificial Sequence
  Description of Artificial Sequence: Synthetic oligonucleotide
ugcuggccuaucuaugagg

SEQ ID NO: 152442 - RNA, 19 nt, Artificial Sequence
  Description of Artificial Sequence: Synthetic oligonucleotide
guuugugcggucaguaacg

SEQ ID NO: 152443 - RNA, 19 nt, Artificial Sequence
  Description of Artificial Sequence: Synthetic oligonucleotide
uccgugugcacucuucucu

SEQ ID NO: 152444 - RNA, 19 nt, Artificial Sequence
  Description of Artificial Sequence: Synthetic oligonucleotide
augggaguaguauggacca

SEQ ID NO: 152445 - RNA, 19 nt, Artificial Sequence
  Description of Artificial Sequence: Synthetic oligonucleotide
guugacacggacucagaug

SEQ ID NO: 152446 - RNA, 19 nt, Artificial Sequence
  Description of Artificial Sequence: Synthetic oligonucleotide
guuuacuagaggcacgcuc

SEQ ID NO: 152447 - RNA, 19 nt, Artificial Sequence
  Description of Artificial Sequence: Synthetic oligonucleotide
acaguuaauaagucccuau

SEQ ID NO: 152448 - RNA, 19 nt, Artificial Sequence
  Description of Artificial Sequence: Synthetic oligonucleotide
agugcuuggucagugagcu

SEQ ID NO: 152449 - RNA, 19 nt, Artificial Sequence
  Description of Artificial Sequence: Synthetic oligonucleotide
uaaaugguauagcuuucau

SEQ ID NO: 152450 - RNA, 19 nt, Artificial Sequence
  Description of Artificial Sequence: Synthetic oligonucleotide
aguuuaauacaaagcaagu

SEQ ID NO: 152451 - RNA, 19 nt, Artificial Sequence
  Description of Artificial Sequence: Synthetic oligonucleotide
uugguugggcuccugacau

SEQ ID NO: 152452 - RNA, 19 nt, Artificial Sequence
  Description of Artificial Sequence: Synthetic oligonucleotide
acgugcccgaaucaccacc

SEQ ID NO: 152453 - RNA, 19 nt, Artificial Sequence
  Description of Artificial Sequence: Synthetic oligonucleotide
cagcugauagcucuuuacc

SEQ ID NO: 152454 - RNA, 19 nt, Artificial Sequence
  Description of Artificial Sequence: Synthetic oligonucleotide
acucagaugugaugguuug

SEQ ID NO: 152455 - RNA, 19 nt, Artificial Sequence
  Description of Artificial Sequence: Synthetic oligonucleotide
ucccuuauggugcccucgg

SEQ ID NO: 152456 - RNA, 19 nt, Artificial Sequence
  Description of Artificial Sequence: Synthetic oligonucleotide
cugcucaauaacaaauguc

SEQ ID NO: 152457 - RNA, 19 nt, Artificial Sequence
  Description of Artificial Sequence: Synthetic oligonucleotide
auuuagaagugguuauaaa

SEQ ID NO: 152458 - RNA, 19 nt, Artificial Sequence
  Description of Artificial Sequence: Synthetic oligonucleotide
guguucaaauaaugggaag

SEQ ID NO: 152459 - RNA, 19 nt, Artificial Sequence
  Description of Artificial Sequence: Synthetic oligonucleotide
cuaugagggugcuugcuug

SEQ ID NO: 152460 - RNA, 19 nt, Artificial Sequence
  Description of Artificial Sequence: Synthetic oligonucleotide
cugguaaaacaucaauguc

SEQ ID NO: 152461 - RNA, 19 nt, Artificial Sequence
  Description of Artificial Sequence: Synthetic oligonucleotide
ucuaggcuccuagagacac

SEQ ID NO: 152462 - RNA, 19 nt, Artificial Sequence
  Description of Artificial Sequence: Synthetic oligonucleotide
caauuggagcuccaucuag

SEQ ID NO: 152463 - RNA, 19 nt, Artificial Sequence
  Description of Artificial Sequence: Synthetic oligonucleotide
uuacgagucuccccagggc

SEQ ID NO: 152464 - RNA, 19 nt, Artificial Sequence
  Description of Artificial Sequence: Synthetic oligonucleotide
caguuaauaagucccuauc

SEQ ID NO: 152465 - RNA, 19 nt, Artificial Sequence
  Description of Artificial Sequence: Synthetic oligonucleotide
uguuaauguaagguuuggu

SEQ ID NO: 152466 - RNA, 19 nt, Artificial Sequence
  Description of Artificial Sequence: Synthetic oligonucleotide
uaccaguuguagcacaaau

SEQ ID NO: 152467 - RNA, 19 nt, Artificial Sequence
  Description of Artificial Sequence: Synthetic oligonucleotide
uacuacuacccucgugacc

SEQ ID NO: 152468 - RNA, 19 nt, Artificial Sequence
  Description of Artificial Sequence: Synthetic oligonucleotide
gugaacagcaccguaccag

SEQ ID NO: 152469 - RNA, 19 nt, Artificial Sequence
  Description of Artificial Sequence: Synthetic oligonucleotide
uggcguuaagacuuggaau

SEQ ID NO: 152470 - RNA, 19 nt, Artificial Sequence
  Description of Artificial Sequence: Synthetic oligonucleotide
aacgugcccgaaucaccac

SEQ ID NO: 152471 - RNA, 19 nt, Artificial Sequence
  Description of Artificial Sequence: Synthetic oligonucleotide
auauaccugcucaauaaca

SEQ ID NO: 152472 - RNA, 19 nt, Artificial Sequence
  Description of Artificial Sequence: Synthetic oligonucleotide
gcuuuaagcugccugauuc

SEQ ID NO: 152473 - RNA, 19 nt, Artificial Sequence
  Description of Artificial Sequence: Synthetic oligonucleotide
agcaaguguucaaauaaug

SEQ ID NO: 152474 - RNA, 19 nt, Artificial Sequence
  Description of Artificial Sequence: Synthetic oligonucleotide
uggggcgcggcucaggugu

SEQ ID NO: 152475 - RNA, 19 nt, Artificial Sequence
  Description of Artificial Sequence: Synthetic oligonucleotide
uucauuggggcgcggcuca

SEQ ID NO: 152476 - RNA, 19 nt, Artificial Sequence
  Description of Artificial Sequence: Synthetic oligonucleotide
ugucguuguugacacggac

SEQ ID NO: 152477 - RNA, 19 nt, Artificial Sequence
  Description of Artificial Sequence: Synthetic oligonucleotide
uguggcguuaagacuugga

SEQ ID NO: 152478 - RNA, 19 nt, Artificial Sequence
  Description of Artificial Sequence: Synthetic oligonucleotide
cacguuuacuagaggcacg

SEQ ID NO: 152479 - RNA, 19 nt, Artificial Sequence
  Description of Artificial Sequence: Synthetic oligonucleotide
guaucuucggccaagcaaa

SEQ ID NO: 152480 - RNA, 19 nt, Artificial Sequence
  Description of Artificial Sequence: Synthetic oligonucleotide
aucuugagucaucaaacua

SEQ ID NO: 152481 - RNA, 19 nt, Artificial Sequence
  Description of Artificial Sequence: Synthetic oligonucleotide
uguaagguuugguguuggc

SEQ ID NO: 152482 - RNA, 19 nt, Artificial Sequence
  Description of Artificial Sequence: Synthetic oligonucleotide
aauugcuaugucugacaua

SEQ ID NO: 152483 - RNA, 19 nt, Artificial Sequence
  Description of Artificial Sequence: Synthetic oligonucleotide
uuacugcgcuuauagguaa

SEQ ID NO: 152484 - RNA, 19 nt, Artificial Sequence
  Description of Artificial Sequence: Synthetic oligonucleotide
cuguuaauguaagguuugg

SEQ ID NO: 152485 - RNA, 19 nt, Artificial Sequence
  Description of Artificial Sequence: Synthetic oligonucleotide
auauuccacccuuuacagu

SEQ ID NO: 152486 - RNA, 19 nt, Artificial Sequence
  Description of Artificial Sequence: Synthetic oligonucleotide
ucguaacuauacagaguca

SEQ ID NO: 152487 - RNA, 19 nt, Artificial Sequence
  Description of Artificial Sequence: Synthetic oligonucleotide
ggugcguccacuguagcgg

SEQ ID NO: 152488 - RNA, 19 nt, Artificial Sequence
  Description of Artificial Sequence: Synthetic oligonucleotide
auucauuggggcgcggcuc

SEQ ID NO: 152489 - RNA, 19 nt, Artificial Sequence
  Description of Artificial Sequence: Synthetic oligonucleotide
guuaagacuuggaaugguc

SEQ ID NO: 152490 - RNA, 19 nt, Artificial Sequence
  Description of Artificial Sequence: Synthetic oligonucleotide
uagaaauuacugcgcuuau

SEQ ID NO: 152491 - RNA, 19 nt, Artificial Sequence
  Description of Artificial Sequence: Synthetic oligonucleotide
guaguauggaccagagcug

SEQ ID NO: 152492 - RNA, 19 nt, Artificial Sequence
  Description of Artificial Sequence: Synthetic oligonucleotide
uaacagugccuccgugugc

SEQ ID NO: 152493 - RNA, 19 nt, Artificial Sequence
  Description of Artificial Sequence: Synthetic oligonucleotide
gguuugugcggucaguaac

SEQ ID NO: 152494 - RNA, 19 nt, Artificial Sequence
  Description of Artificial Sequence: Synthetic oligonucleotide
acgauugauucucuaguuu

SEQ ID NO: 152495 - RNA, 19 nt, Artificial Sequence
  Description of Artificial Sequence: Synthetic oligonucleotide
uuguuaccaucucuguuuu

SEQ ID NO: 152496 - RNA, 19 nt, Artificial Sequence
  Description of Artificial Sequence: Synthetic oligonucleotide
aagcaaguguucaaauaau

SEQ ID NO: 152497 - RNA, 19 nt, Artificial Sequence
  Description of Artificial Sequence: Synthetic oligonucleotide
cuuguauggcaguauagcu

SEQ ID NO: 152498 - RNA, 19 nt, Artificial Sequence
  Description of Artificial Sequence: Synthetic oligonucleotide
uaggcuccuagagacacgu

SEQ ID NO: 152499 - RNA, 19 nt, Artificial Sequence
  Description of Artificial Sequence: Synthetic oligonucleotide
uucccuuauggugcccucg

SEQ ID NO: 152500 - RNA, 19 nt, Artificial Sequence
  Description of Artificial Sequence: Synthetic oligonucleotide
ugcuuaacagugccuccgu

SEQ ID NO: 152501 - RNA, 19 nt, Artificial Sequence
  Description of Artificial Sequence: Synthetic oligonucleotide
cuucggccaagcaaaacga

SEQ ID NO: 152502 - RNA, 19 nt, Artificial Sequence
  Description of Artificial Sequence: Synthetic oligonucleotide
gcuggucuaacuuuaaugu

SEQ ID NO: 152503 - RNA, 19 nt, Artificial Sequence
  Description of Artificial Sequence: Synthetic oligonucleotide
ggaaguauugaaauuggaa

SEQ ID NO: 152504 - RNA, 19 nt, Artificial Sequence
  Description of Artificial Sequence: Synthetic oligonucleotide
ucggccaagcaaaacgauu

SEQ ID NO: 152505 - RNA, 19 nt, Artificial Sequence
  Description of Artificial Sequence: Synthetic oligonucleotide
guaacgugcccgaaucacc

SEQ ID NO: 152506 - RNA, 19 nt, Artificial Sequence
  Description of Artificial Sequence: Synthetic oligonucleotide
agaggcacgcucaaagugu

SEQ ID NO: 152507 - RNA, 19 nt, Artificial Sequence
  Description of Artificial Sequence: Synthetic oligonucleotide
guaagguuugguguuggca

SEQ ID NO: 152508 - RNA, 19 nt, Artificial Sequence
  Description of Artificial Sequence: Synthetic oligonucleotide
auuacugcgcuuauaggua

SEQ ID NO: 152509 - RNA, 19 nt, Artificial Sequence
  Description of Artificial Sequence: Synthetic oligonucleotide
guggcguuaagacuuggaa

SEQ ID NO: 152510 - RNA, 19 nt, Artificial Sequence
  Description of Artificial Sequence: Synthetic oligonucleotide
gcacuaaggcuuuaagcug

SEQ ID NO: 152511 - RNA, 19 nt, Artificial Sequence
  Description of Artificial Sequence: Synthetic oligonucleotide
uugcgcuugagcucacuaa

SEQ ID NO: 152512 - RNA, 19 nt, Artificial Sequence
  Description of Artificial Sequence: Synthetic oligonucleotide
uguguacuacuacccucgu

SEQ ID NO: 152513 - RNA, 19 nt, Artificial Sequence
  Description of Artificial Sequence: Synthetic oligonucleotide
gaauuuagaagugguuaua

SEQ ID NO: 152514 - RNA, 19 nt, Artificial Sequence
  Description of Artificial Sequence: Synthetic oligonucleotide
agggcacguuuugugauuc

SEQ ID NO: 152515 - RNA, 19 nt, Artificial Sequence
  Description of Artificial Sequence: Synthetic oligonucleotide
cacuguagcggaauuugga

SEQ ID NO: 152516 - RNA, 19 nt, Artificial Sequence
  Description of Artificial Sequence: Synthetic oligonucleotide
agggugcuugcuuggcggg

SEQ ID NO: 152517 - RNA, 19 nt, Artificial Sequence
  Description of Artificial Sequence: Synthetic oligonucleotide
auuggggcgcggcucaggu

SEQ ID NO: 152518 - RNA, 19 nt, Artificial Sequence
  Description of Artificial Sequence: Synthetic oligonucleotide
cuaggcuccuagagacacg

SEQ ID NO: 152519 - RNA, 19 nt, Artificial Sequence
  Description of Artificial Sequence: Synthetic oligonucleotide
uccagucuagagagucucu

SEQ ID NO: 152520 - RNA, 19 nt, Artificial Sequence
  Description of Artificial Sequence: Synthetic oligonucleotide
aucuaaucuggcaucguaa

SEQ ID NO: 152521 - RNA, 19 nt, Artificial Sequence
  Description of Artificial Sequence: Synthetic oligonucleotide
uacaguuaauaagucccua

SEQ ID NO: 152522 - RNA, 19 nt, Artificial Sequence
  Description of Artificial Sequence: Synthetic oligonucleotide
ucggucacucggugguggg

SEQ ID NO: 152523 - RNA, 19 nt, Artificial Sequence
  Description of Artificial Sequence: Synthetic oligonucleotide
uuaacucuguguugcucuu

SEQ ID NO: 152524 - RNA, 19 nt, Artificial Sequence
  Description of Artificial Sequence: Synthetic oligonucleotide
ggugcccucggucacucgg

SEQ ID NO: 152525 - RNA, 19 nt, Artificial Sequence
  Description of Artificial Sequence: Synthetic oligonucleotide
uuugugcggucaguaacgu

SEQ ID NO: 152526 - RNA, 19 nt, Artificial Sequence
  Description of Artificial Sequence: Synthetic oligonucleotide
uucggccaagcaaaacgau

SEQ ID NO: 152527 - RNA, 19 nt, Artificial Sequence
  Description of Artificial Sequence: Synthetic oligonucleotide
gcuguuaauguaagguuug

SEQ ID NO: 152528 - RNA, 19 nt, Artificial Sequence
  Description of Artificial Sequence: Synthetic oligonucleotide
uucagguaucuucggccaa

SEQ ID NO: 152529 - RNA, 19 nt, Artificial Sequence
  Description of Artificial Sequence: Synthetic oligonucleotide
cuuaacagugccuccgugu

SEQ ID NO: 152530 - RNA, 19 nt, Artificial Sequence
  Description of Artificial Sequence: Synthetic oligonucleotide
ugcccgaugguuuggcaau

SEQ ID NO: 152531 - RNA, 19 nt, Artificial Sequence
  Description of Artificial Sequence: Synthetic oligonucleotide
guacuacuacccucgugac

SEQ ID NO: 152532 - RNA, 19 nt, Artificial Sequence
  Description of Artificial Sequence: Synthetic oligonucleotide
agacucauaugugaugguu

SEQ ID NO: 152533 - RNA, 19 nt, Artificial Sequence
  Description of Artificial Sequence: Synthetic oligonucleotide
uaauugccugagccagcgc

SEQ ID NO: 152534 - RNA, 19 nt, Artificial Sequence
  Description of Artificial Sequence: Synthetic oligonucleotide
cugugaguauacuggccuc

SEQ ID NO: 152535 - RNA, 19 nt, Artificial Sequence
  Description of Artificial Sequence: Synthetic oligonucleotide
ugaacucccuugugucugu

SEQ ID NO: 152536 - RNA, 19 nt, Artificial Sequence
  Description of Artificial Sequence: Synthetic oligonucleotide
cgaaucaccaccagccccg

SEQ ID NO: 152537 - RNA, 19 nt, Artificial Sequence
  Description of Artificial Sequence: Synthetic oligonucleotide
gggccaaacccucuccagg

SEQ ID NO: 152538 - RNA, 19 nt, Artificial Sequence
  Description of Artificial Sequence: Synthetic oligonucleotide
gcuuauagguaaauuuuca

SEQ ID NO: 152539 - RNA, 19 nt, Artificial Sequence
  Description of Artificial Sequence: Synthetic oligonucleotide
ggcaucguaacuauacaga

SEQ ID NO: 152540 - RNA, 19 nt, Artificial Sequence
  Description of Artificial Sequence: Synthetic oligonucleotide
aguauagcugaaagcugca

SEQ ID NO: 152541 - RNA, 19 nt, Artificial Sequence
  Description of Artificial Sequence: Synthetic oligonucleotide
caccaauuggagcuccauc

SEQ ID NO: 152542 - RNA, 19 nt, Artificial Sequence
  Description of Artificial Sequence: Synthetic oligonucleotide
ugcuguggcaaagcauaug

SEQ ID NO: 152543 - RNA, 19 nt, Artificial Sequence
  Description of Artificial Sequence: Synthetic oligonucleotide
gugaucacaauacguuucu

SEQ ID NO: 152544 - RNA, 19 nt, Artificial Sequence
  Description of Artificial Sequence: Synthetic oligonucleotide
gcccgaaucaccaccagcc

SEQ ID NO: 152545 - RNA, 19 nt, Artificial Sequence
  Description of Artificial Sequence: Synthetic oligonucleotide
ggggugccaauuugguugg

SEQ ID NO: 152546 - RNA, 19 nt, Artificial Sequence
  Description of Artificial Sequence: Synthetic oligonucleotide
gggugcguccacuguagcg

SEQ ID NO: 152547 - RNA, 19 nt, Artificial Sequence
  Description of Artificial Sequence: Synthetic oligonucleotide
gaacagcaccguaccagcc

SEQ ID NO: 152548 - RNA, 19 nt, Artificial Sequence
  Description of Artificial Sequence: Synthetic oligonucleotide
ggaguaguauggaccagag

SEQ ID NO: 152549 - RNA, 19 nt, Artificial Sequence
  Description of Artificial Sequence: Synthetic oligonucleotide
guguacuacuacccucgug

SEQ ID NO: 152550 - RNA, 19 nt, Artificial Sequence
  Description of Artificial Sequence: Synthetic oligonucleotide
ggaaugcuguggcaaagca

SEQ ID NO: 152551 - RNA, 19 nt, Artificial Sequence
  Description of Artificial Sequence: Synthetic oligonucleotide
gaccgacauaucagggugc

SEQ ID NO: 152552 - RNA, 19 nt, Artificial Sequence
  Description of Artificial Sequence: Synthetic oligonucleotide
ggacuaccauaaaauugcg

SEQ ID NO: 152553 - RNA, 19 nt, Artificial Sequence
  Description of Artificial Sequence: Synthetic oligonucleotide
cucggucacucgguggugg

SEQ ID NO: 152554 - RNA, 19 nt, Artificial Sequence
  Description of Artificial Sequence: Synthetic oligonucleotide
ccuagagacacguuuacua

SEQ ID NO: 152555 - RNA, 19 nt, Artificial Sequence
  Description of Artificial Sequence: Synthetic oligonucleotide
aucuaugagggugcuugcu

SEQ ID NO: 152556 - RNA, 19 nt, Artificial Sequence
  Description of Artificial Sequence: Synthetic oligonucleotide
agaaauuacugcgcuuaua

SEQ ID NO: 152557 - RNA, 19 nt, Artificial Sequence
  Description of Artificial Sequence: Synthetic oligonucleotide
ucucuccggguaucuuuug

SEQ ID NO: 152558 - RNA, 19 nt, Artificial Sequence
  Description of Artificial Sequence: Synthetic oligonucleotide
guagugguguggcguuaag

SEQ ID NO: 152559 - RNA, 19 nt, Artificial Sequence
  Description of Artificial Sequence: Synthetic oligonucleotide
uacugcgcuuauagguaaa

SEQ ID NO: 152560 - RNA, 19 nt, Artificial Sequence
  Description of Artificial Sequence: Synthetic oligonucleotide
aaauugcgcuugagcucac

SEQ ID NO: 152561 - RNA, 19 nt, Artificial Sequence
  Description of Artificial Sequence: Synthetic oligonucleotide
accuuacgagucuccccag

SEQ ID NO: 152562 - RNA, 19 nt, Artificial Sequence
  Description of Artificial Sequence: Synthetic oligonucleotide
gccugaucgugaucaagag

SEQ ID NO: 152563 - RNA, 19 nt, Artificial Sequence
  Description of Artificial Sequence: Synthetic oligonucleotide
accgacauaucagggugcu

SEQ ID NO: 152564 - RNA, 19 nt, Artificial Sequence
  Description of Artificial Sequence: Synthetic oligonucleotide
gcggucaguaacgugcccg

SEQ ID NO: 152565 - RNA, 19 nt, Artificial Sequence
  Description of Artificial Sequence: Synthetic oligonucleotide
ugcggucaguaacgugccc

SEQ ID NO: 152566 - RNA, 19 nt, Artificial Sequence
  Description of Artificial Sequence: Synthetic oligonucleotide
ccacccuuuacagucuugg

SEQ ID NO: 152567 - RNA, 19 nt, Artificial Sequence
  Description of Artificial Sequence: Synthetic oligonucleotide
guuaccaguuguagcacaa

SEQ ID NO: 152568 - RNA, 19 nt, Artificial Sequence
  Description of Artificial Sequence: Synthetic oligonucleotide
cugcaauuugaacacugua

SEQ ID NO: 152569 - RNA, 19 nt, Artificial Sequence
  Description of Artificial Sequence: Synthetic oligonucleotide
cccuaauugccugagccag

SEQ ID NO: 152570 - RNA, 19 nt, Artificial Sequence
  Description of Artificial Sequence: Synthetic oligonucleotide
ugggaguaguauggaccag

SEQ ID NO: 152571 - RNA, 19 nt, Artificial Sequence
  Description of Artificial Sequence: Synthetic oligonucleotide
caucguaacuauacagagu

SEQ ID NO: 152572 - RNA, 19 nt, Artificial Sequence
  Description of Artificial Sequence: Synthetic oligonucleotide
gcaccguaccagccgaggg

SEQ ID NO: 152573 - RNA, 19 nt, Artificial Sequence
  Description of Artificial Sequence: Synthetic oligonucleotide
cgcuuauagguaaauuuuc

SEQ ID NO: 152574 - RNA, 19 nt, Artificial Sequence
  Description of Artificial Sequence: Synthetic oligonucleotide
cuugcuuggcgggucugug

SEQ ID NO: 152575 - RNA, 19 nt, Artificial Sequence
  Description of Artificial Sequence: Synthetic oligonucleotide
gcgauggucucucaacaca

SEQ ID NO: 152576 - RNA, 19 nt, Artificial Sequence
  Description of Artificial Sequence: Synthetic oligonucleotide
cagcgccugaucgugauca

SEQ ID NO: 152577 - RNA, 19 nt, Artificial Sequence
  Description of Artificial Sequence: Synthetic oligonucleotide
ggucaauguuaccaguugu

SEQ ID NO: 152578 - RNA, 19 nt, Artificial Sequence
  Description of Artificial Sequence: Synthetic oligonucleotide
acugcgcuuauagguaaau

SEQ ID NO: 152579 - RNA, 19 nt, Artificial Sequence
  Description of Artificial Sequence: Synthetic oligonucleotide
uaacucuguguugcucuuc

SEQ ID NO: 152580 - RNA, 19 nt, Artificial Sequence
  Description of Artificial Sequence: Synthetic oligonucleotide
ccuaauugccugagccagc

SEQ ID NO: 152581 - RNA, 19 nt, Artificial Sequence
  Description of Artificial Sequence: Synthetic oligonucleotide
gugaugguuugugcgguca

SEQ ID NO: 152582 - RNA, 19 nt, Artificial Sequence
  Description of Artificial Sequence: Synthetic oligonucleotide
cuagaggcacgcucaaagu

SEQ ID NO: 152583 - RNA, 19 nt, Artificial Sequence
  Description of Artificial Sequence: Synthetic oligonucleotide
ggucacucggugguggggc

SEQ ID NO: 152584 - RNA, 19 nt, Artificial Sequence
  Description of Artificial Sequence: Synthetic oligonucleotide
gcuuaacagugccuccgug

SEQ ID NO: 152585 - RNA, 19 nt, Artificial Sequence
  Description of Artificial Sequence: Synthetic oligonucleotide
uagcggaauuuggacccca

SEQ ID NO: 152586 - RNA, 19 nt, Artificial Sequence
  Description of Artificial Sequence: Synthetic oligonucleotide
guagcggaauuuggacccc

SEQ ID NO: 152587 - RNA, 19 nt, Artificial Sequence
  Description of Artificial Sequence: Synthetic oligonucleotide
aagcugccugauucucuuu

SEQ ID NO: 152588 - RNA, 19 nt, Artificial Sequence
  Description of Artificial Sequence: Synthetic oligonucleotide
uugcuaugucugacauaaa

SEQ ID NO: 152589 - RNA, 19 nt, Artificial Sequence
  Description of Artificial Sequence: Synthetic oligonucleotide
gugcggucaguaacgugcc

SEQ ID NO: 152590 - RNA, 19 nt, Artificial Sequence
  Description of Artificial Sequence: Synthetic oligonucleotide
gagacucauaugugauggu

SEQ ID NO: 152591 - RNA, 19 nt, Artificial Sequence
  Description of Artificial Sequence: Synthetic oligonucleotide
ccuuacgagucuccccagg

SEQ ID NO: 152592 - RNA, 19 nt, Artificial Sequence
  Description of Artificial Sequence: Synthetic oligonucleotide
gggaguaguauggaccaga

SEQ ID NO: 152593 - RNA, 19 nt, Artificial Sequence
  Description of Artificial Sequence: Synthetic oligonucleotide
ccaccuuacgagucucccc

SEQ ID NO: 152594 - RNA, 19 nt, Artificial Sequence
  Description of Artificial Sequence: Synthetic oligonucleotide
acuacccucgugaccgaca

SEQ ID NO: 152595 - RNA, 19 nt, Artificial Sequence
  Description of Artificial Sequence: Synthetic oligonucleotide
acaccaauuggagcuccau

SEQ ID NO: 152596 - RNA, 19 nt, Artificial Sequence
  Description of Artificial Sequence: Synthetic oligonucleotide
gggaaguauugaaauugga

SEQ ID NO: 152597 - RNA, 19 nt, Artificial Sequence
  Description of Artificial Sequence: Synthetic oligonucleotide
uuugaacaauggggacuuc

SEQ ID NO: 152598 - RNA, 19 nt, Artificial Sequence
  Description of Artificial Sequence: Synthetic oligonucleotide
gucaguaacgugcccgaau

SEQ ID NO: 152599 - RNA, 19 nt, Artificial Sequence
  Description of Artificial Sequence: Synthetic oligonucleotide
ugugggcgauggucucuca

SEQ ID NO: 152600 - RNA, 19 nt, Artificial Sequence
  Description of Artificial Sequence: Synthetic oligonucleotide
uacuacccucgugaccgac

SEQ ID NO: 152601 - RNA, 19 nt, Artificial Sequence
  Description of Artificial Sequence: Synthetic oligonucleotide
ugcguccacuguagcggaa

SEQ ID NO: 152602 - RNA, 19 nt, Artificial Sequence
  Description of Artificial Sequence: Synthetic oligonucleotide
cacguuuugugauucucuu

SEQ ID NO: 152603 - RNA, 19 nt, Artificial Sequence
  Description of Artificial Sequence: Synthetic oligonucleotide
cguaacuauacagagucaa

SEQ ID NO: 152604 - RNA, 19 nt, Artificial Sequence
  Description of Artificial Sequence: Synthetic oligonucleotide
uggccgggcucuuccucca

SEQ ID NO: 152605 - RNA, 19 nt, Artificial Sequence
  Description of Artificial Sequence: Synthetic oligonucleotide
cugucaugucuugcuuaac

SEQ ID NO: 152606 - RNA, 19 nt, Artificial Sequence
  Description of Artificial Sequence: Synthetic oligonucleotide
ggcacguuuugugauucuc

SEQ ID NO: 152607 - RNA, 19 nt, Artificial Sequence
  Description of Artificial Sequence: Synthetic oligonucleotide
gugcguccacuguagcgga

SEQ ID NO: 152608 - RNA, 19 nt, Artificial Sequence
  Description of Artificial Sequence: Synthetic oligonucleotide
ggcuccuagagacacguuu

SEQ ID NO: 152609 - RNA, 19 nt, Artificial Sequence
  Description of Artificial Sequence: Synthetic oligonucleotide
caauuugguugggcuccug

SEQ ID NO: 152610 - RNA, 19 nt, Artificial Sequence
  Description of Artificial Sequence: Synthetic oligonucleotide
cuaaugcuagccugauguu

SEQ ID NO: 152611 - RNA, 19 nt, Artificial Sequence
  Description of Artificial Sequence: Synthetic oligonucleotide
cagaggugugauacgucgu

SEQ ID NO: 152612 - RNA, 19 nt, Artificial Sequence
  Description of Artificial Sequence: Synthetic oligonucleotide
agcgccugaucgugaucaa

SEQ ID NO: 152613 - RNA, 19 nt, Artificial Sequence
  Description of Artificial Sequence: Synthetic oligonucleotide
gcuccuagagacacguuua

SEQ ID NO: 152614 - RNA, 19 nt, Artificial Sequence
  Description of Artificial Sequence: Synthetic oligonucleotide
ccgugugcacucuucucuc

SEQ ID NO: 152615 - RNA, 19 nt, Artificial Sequence
  Description of Artificial Sequence: Synthetic oligonucleotide
gcgcuuauagguaaauuuu

SEQ ID NO: 152616 - RNA, 19 nt, Artificial Sequence
  Description of Artificial Sequence: Synthetic oligonucleotide
agcggaauuuggaccccaa

SEQ ID NO: 152617 - RNA, 19 nt, Artificial Sequence
  Description of Artificial Sequence: Synthetic oligonucleotide
cuacuacccucgugaccga

SEQ ID NO: 152618 - RNA, 19 nt, Artificial Sequence
  Description of Artificial Sequence: Synthetic oligonucleotide
gcgccugaucgugaucaag

SEQ ID NO: 152619 - RNA, 19 nt, Artificial Sequence
  Description of Artificial Sequence: Synthetic oligonucleotide
gcggaauuuggaccccaaa

SEQ ID NO: 152620 - RNA, 19 nt, Artificial Sequence
  Description of Artificial Sequence: Synthetic oligonucleotide
gcacguuuugugauucucu

SEQ ID NO: 152621 - RNA, 19 nt, Artificial Sequence
  Description of Artificial Sequence: Synthetic oligonucleotide
ccaauuggagcuccaucua

SEQ ID NO: 152622 - RNA, 19 nt, Artificial Sequence
  Description of Artificial Sequence: Synthetic oligonucleotide
agcgagcaggggugccaau

SEQ ID NO: 152623 - RNA, 19 nt, Artificial Sequence
  Description of Artificial Sequence: Synthetic oligonucleotide
cguuaacucuguguugcuc

SEQ ID NO: 152624 - RNA, 19 nt, Artificial Sequence
  Description of Artificial Sequence: Synthetic oligonucleotide
aucuggcaucguaacuaua

SEQ ID NO: 152625 - RNA, 19 nt, Artificial Sequence
  Description of Artificial Sequence: Synthetic oligonucleotide
gucacucggugguggggcu

SEQ ID NO: 152626 - RNA, 19 nt, Artificial Sequence
  Description of Artificial Sequence: Synthetic oligonucleotide
gugcuugcuuggcgggucu

SEQ ID NO: 152627 - RNA, 19 nt, Artificial Sequence
  Description of Artificial Sequence: Synthetic oligonucleotide
cacugucaugugagcaaau

SEQ ID NO: 152628 - RNA, 19 nt, Artificial Sequence
  Description of Artificial Sequence: Synthetic oligonucleotide
cucuacuaccuuggcugcu

SEQ ID NO: 152629 - RNA, 19 nt, Artificial Sequence
  Description of Artificial Sequence: Synthetic oligonucleotide
ggcuuuaagcugccugauu

SEQ ID NO: 152630 - RNA, 19 nt, Artificial Sequence
  Description of Artificial Sequence: Synthetic oligonucleotide
cugcgcuuauagguaaauu

SEQ ID NO: 152631 - RNA, 19 nt, Artificial Sequence
  Description of Artificial Sequence: Synthetic oligonucleotide
ccucuccguuaacucugug

SEQ ID NO: 152632 - RNA, 19 nt, Artificial Sequence
  Description of Artificial Sequence: Synthetic oligonucleotide
ggucaguaacgugcccgaa

SEQ ID NO: 152633 - RNA, 19 nt, Artificial Sequence
  Description of Artificial Sequence: Synthetic oligonucleotide
ccgacauaucagggugcug

SEQ ID NO: 152634 - RNA, 19 nt, Artificial Sequence
  Description of Artificial Sequence: Synthetic oligonucleotide
cggucacucgguggugggg

SEQ ID NO: 152635 - RNA, 19 nt, Artificial Sequence
  Description of Artificial Sequence: Synthetic oligonucleotide
ggcgcggcucaggugugga

SEQ ID NO: 152636 - RNA, 19 nt, Artificial Sequence
  Description of Artificial Sequence: Synthetic oligonucleotide
ccucggucacucgguggug

SEQ ID NO: 152637 - RNA, 19 nt, Artificial Sequence
  Description of Artificial Sequence: Synthetic oligonucleotide
ggguaucuuuugggcaacu

SEQ ID NO: 152638 - RNA, 19 nt, Artificial Sequence
  Description of Artificial Sequence: Synthetic oligonucleotide
cguuaagacuuggaauggu

SEQ ID NO: 152639 - RNA, 19 nt, Artificial Sequence
  Description of Artificial Sequence: Synthetic oligonucleotide
gccuaucuaugagggugcu

SEQ ID NO: 152640 - RNA, 19 nt, Artificial Sequence
  Description of Artificial Sequence: Synthetic oligonucleotide
gggugcuugcuuggcgggu

SEQ ID NO: 152641 - RNA, 19 nt, Artificial Sequence
  Description of Artificial Sequence: Synthetic oligonucleotide
ccaauuugguugggcuccu

SEQ ID NO: 152642 - RNA, 19 nt, Artificial Sequence
  Description of Artificial Sequence: Synthetic oligonucleotide
cggacucagaugugauggu

SEQ ID NO: 152643 - RNA, 19 nt, Artificial Sequence
  Description of Artificial Sequence: Synthetic oligonucleotide
cccuuauggugcccucggu

SEQ ID NO: 152644 - RNA, 19 nt, Artificial Sequence
  Description of Artificial Sequence: Synthetic oligonucleotide
ccuaucuaugagggugcuu

SEQ ID NO: 152645 - RNA, 19 nt, Artificial Sequence
  Description of Artificial Sequence: Synthetic oligonucleotide
gcccgaugguuuggcaauu

SEQ ID NO: 152646 - RNA, 19 nt, Artificial Sequence
  Description of Artificial Sequence: Synthetic oligonucleotide
uguaagaacacucugaggg

SEQ ID NO: 152647 - RNA, 19 nt, Artificial Sequence
  Description of Artificial Sequence: Synthetic oligonucleotide
uuuauuaggauauuuaugc

SEQ ID NO: 152648 - RNA, 19 nt, Artificial Sequence
  Description of Artificial Sequence: Synthetic oligonucleotide
aauuuaccauuuuauaucc

SEQ ID NO: 152649 - RNA, 19 nt, Artificial Sequence
  Description of Artificial Sequence: Synthetic oligonucleotide
aaaacuacauuuuauaaga

SEQ ID NO: 152650 - RNA, 19 nt, Artificial Sequence
  Description of Artificial Sequence: Synthetic oligonucleotide
ugauggaucaaacucaugg

SEQ ID NO: 152651 - RNA, 19 nt, Artificial Sequence
  Description of Artificial Sequence: Synthetic oligonucleotide
aaaguuagaacucaauuca

SEQ ID NO: 152652 - RNA, 19 nt, Artificial Sequence
  Description of Artificial Sequence: Synthetic oligonucleotide
ugauaaagagcuaggaugg

SEQ ID NO: 152653 - RNA, 19 nt, Artificial Sequence
  Description of Artificial Sequence: Synthetic oligonucleotide
aaauuauuuguccauaagu

SEQ ID NO: 152654 - RNA, 19 nt, Artificial Sequence
  Description of Artificial Sequence: Synthetic oligonucleotide
aauguaagaacacucugag

SEQ ID NO: 152655 - RNA, 19 nt, Artificial Sequence
  Description of Artificial Sequence: Synthetic oligonucleotide
uccaauacugcaaagacug

SEQ ID NO: 152656 - RNA, 19 nt, Artificial Sequence
  Description of Artificial Sequence: Synthetic oligonucleotide
uuuauauccuuaaagaguc

SEQ ID NO: 152657 - RNA, 19 nt, Artificial Sequence
  Description of Artificial Sequence: Synthetic oligonucleotide
uuuuauauccuuaaagagu

SEQ ID NO: 152658 - RNA, 19 nt, Artificial Sequence
  Description of Artificial Sequence: Synthetic oligonucleotide
agauuuaaccaacugcugc

SEQ ID NO: 152659 - RNA, 19 nt, Artificial Sequence
  Description of Artificial Sequence: Synthetic oligonucleotide
aaagguggaauuaugaauc

SEQ ID NO: 152660 - RNA, 19 nt, Artificial Sequence
  Description of Artificial Sequence: Synthetic oligonucleotide
auuacaagugcacaccacc

SEQ ID NO: 152661 - RNA, 19 nt, Artificial Sequence
  Description of Artificial Sequence: Synthetic oligonucleotide
aaggagcuauacuauaccc

SEQ ID NO: 152662 - RNA, 19 nt, Artificial Sequence
  Description of Artificial Sequence: Synthetic oligonucleotide
ucucaucucaaccuaagcg

SEQ ID NO: 152663 - RNA, 19 nt, Artificial Sequence
  Description of Artificial Sequence: Synthetic oligonucleotide
aauaucaacaucaccuggc

SEQ ID NO: 152664 - RNA, 19 nt, Artificial Sequence
  Description of Artificial Sequence: Synthetic oligonucleotide
aauuagauucaugauauug

SEQ ID NO: 152665 - RNA, 19 nt, Artificial Sequence
  Description of Artificial Sequence: Synthetic oligonucleotide
aaugucaagauuuaaccaa

SEQ ID NO: 152666 - RNA, 19 nt, Artificial Sequence
  Description of Artificial Sequence: Synthetic oligonucleotide
gauagauuggucuaucagc

SEQ ID NO: 152667 - RNA, 19 nt, Artificial Sequence
  Description of Artificial Sequence: Synthetic oligonucleotide
aaaggaagcaaucuagaca

SEQ ID NO: 152668 - RNA, 19 nt, Artificial Sequence
  Description of Artificial Sequence: Synthetic oligonucleotide
aagacugagaagcacaaca

SEQ ID NO: 152669 - RNA, 19 nt, Artificial Sequence
  Description of Artificial Sequence: Synthetic oligonucleotide
ucaugaaccagcaugucag

SEQ ID NO: 152670 - RNA, 19 nt, Artificial Sequence
  Description of Artificial Sequence: Synthetic oligonucleotide
uggauuauaacuggaaagg

SEQ ID NO: 152671 - RNA, 19 nt, Artificial Sequence
  Description of Artificial Sequence: Synthetic oligonucleotide
auaaguagaagcuuaaaau

SEQ ID NO: 152672 - RNA, 19 nt, Artificial Sequence
  Description of Artificial Sequence: Synthetic oligonucleotide
uucuuuguaucuacaaacg

SEQ ID NO: 152673 - RNA, 19 nt, Artificial Sequence
  Description of Artificial Sequence: Synthetic oligonucleotide
ucuacaaacgccaacugga

SEQ ID NO: 152674 - RNA, 19 nt, Artificial Sequence
  Description of Artificial Sequence: Synthetic oligonucleotide
acaaugggaaaucuuauag

SEQ ID NO: 152675 - RNA, 19 nt, Artificial Sequence
  Description of Artificial Sequence: Synthetic oligonucleotide
aaaugucaagauuuaacca

SEQ ID NO: 152676 - RNA, 19 nt, Artificial Sequence
  Description of Artificial Sequence: Synthetic oligonucleotide
auaagaagaauuuuacacu

SEQ ID NO: 152677 - RNA, 19 nt, Artificial Sequence
  Description of Artificial Sequence: Synthetic oligonucleotide
gacuucucaaguuacagug

SEQ ID NO: 152678 - RNA, 19 nt, Artificial Sequence
  Description of Artificial Sequence: Synthetic oligonucleotide
acaaacgccaacuggaauc

SEQ ID NO: 152679 - RNA, 19 nt, Artificial Sequence
  Description of Artificial Sequence: Synthetic oligonucleotide
aagguggaauuaugaaucc

SEQ ID NO: 152680 - RNA, 19 nt, Artificial Sequence
  Description of Artificial Sequence: Synthetic oligonucleotide
agucccaaauuauuugucc

SEQ ID NO: 152681 - RNA, 19 nt, Artificial Sequence
  Description of Artificial Sequence: Synthetic oligonucleotide
aaauguuccuguuacgggu

SEQ ID NO: 152682 - RNA, 19 nt, Artificial Sequence
  Description of Artificial Sequence: Synthetic oligonucleotide
uuaaaguuagaacucaauu

SEQ ID NO: 152683 - RNA, 19 nt, Artificial Sequence
  Description of Artificial Sequence: Synthetic oligonucleotide
auacaucuggcacauuugc

SEQ ID NO: 152684 - RNA, 19 nt, Artificial Sequence
  Description of Artificial Sequence: Synthetic oligonucleotide
cugaaacugauuuauuagg

SEQ ID NO: 152685 - RNA, 19 nt, Artificial Sequence
  Description of Artificial Sequence: Synthetic oligonucleotide
ugaaacugauuuauuagga

SEQ ID NO: 152686 - RNA, 19 nt, Artificial Sequence
  Description of Artificial Sequence: Synthetic oligonucleotide
aaaucaauauugcuaccug

SEQ ID NO: 152687 - RNA, 19 nt, Artificial Sequence
  Description of Artificial Sequence: Synthetic oligonucleotide
aaucugacaaacuggauua

SEQ ID NO: 152688 - RNA, 19 nt, Artificial Sequence
  Description of Artificial Sequence: Synthetic oligonucleotide
aaaacaagcuugcaaucug

SEQ ID NO: 152689 - RNA, 19 nt, Artificial Sequence
  Description of Artificial Sequence: Synthetic oligonucleotide
ugaaguaaaagaacuugca

SEQ ID NO: 152690 - RNA, 19 nt, Artificial Sequence
  Description of Artificial Sequence: Synthetic oligonucleotide
aaccucacuacauagcuga

SEQ ID NO: 152691 - RNA, 19 nt, Artificial Sequence
  Description of Artificial Sequence: Synthetic oligonucleotide
aaaaucaauauugcuaccu

SEQ ID NO: 152692 - RNA, 19 nt, Artificial Sequence
  Description of Artificial Sequence: Synthetic oligonucleotide
acaguaucaaaucugacaa

SEQ ID NO: 152693 - RNA, 19 nt, Artificial Sequence
  Description of Artificial Sequence: Synthetic oligonucleotide
uuuuguugaacugaguuac

SEQ ID NO: 152694 - RNA, 19 nt, Artificial Sequence
  Description of Artificial Sequence: Synthetic oligonucleotide
uaaguagaagcuuaaaaua

SEQ ID NO: 152695 - RNA, 19 nt, Artificial Sequence
  Description of Artificial Sequence: Synthetic oligonucleotide
uacaagaguaauugaacag

SEQ ID NO: 152696 - RNA, 19 nt, Artificial Sequence
  Description of Artificial Sequence: Synthetic oligonucleotide
ugucuuuaaaagcauuggc

SEQ ID NO: 152697 - RNA, 19 nt, Artificial Sequence
  Description of Artificial Sequence: Synthetic oligonucleotide
uuauagugcauacaagagu

SEQ ID NO: 152698 - RNA, 19 nt, Artificial Sequence
  Description of Artificial Sequence: Synthetic oligonucleotide
guaaaugaauguuauacga

SEQ ID NO: 152699 - RNA, 19 nt, Artificial Sequence
  Description of Artificial Sequence: Synthetic oligonucleotide
cucaucucaaccuaagcgc

SEQ ID NO: 152700 - RNA, 19 nt, Artificial Sequence
  Description of Artificial Sequence: Synthetic oligonucleotide
caggauucuauucagcacg

SEQ ID NO: 152701 - RNA, 19 nt, Artificial Sequence
  Description of Artificial Sequence: Synthetic oligonucleotide
uucagcacgauacauuuac

SEQ ID NO: 152702 - RNA, 19 nt, Artificial Sequence
  Description of Artificial Sequence: Synthetic oligonucleotide
aacgacagugcuaacuacc

SEQ ID NO: 152703 - RNA, 19 nt, Artificial Sequence
  Description of Artificial Sequence: Synthetic oligonucleotide
uuaaccaacugcugcaaag

SEQ ID NO: 152704 - RNA, 19 nt, Artificial Sequence
  Description of Artificial Sequence: Synthetic oligonucleotide
aaucaauauugcuaccugu

SEQ ID NO: 152705 - RNA, 19 nt, Artificial Sequence
  Description of Artificial Sequence: Synthetic oligonucleotide
uggaaugucuuuuauuaug

SEQ ID NO: 152706 - RNA, 19 nt, Artificial Sequence
  Description of Artificial Sequence: Synthetic oligonucleotide
ugcaagauccucuauuuca

SEQ ID NO: 152707 - RNA, 19 nt, Artificial Sequence
  Description of Artificial Sequence: Synthetic oligonucleotide
ucucaaguaucccaggcug

SEQ ID NO: 152708 - RNA, 19 nt, Artificial Sequence
  Description of Artificial Sequence: Synthetic oligonucleotide
ugcuaaagcuacuugaccu

SEQ ID NO: 152709 - RNA, 19 nt, Artificial Sequence
  Description of Artificial Sequence: Synthetic oligonucleotide
aaauagugcaaugacuucu

SEQ ID NO: 152710 - RNA, 19 nt, Artificial Sequence
  Description of Artificial Sequence: Synthetic oligonucleotide
uuugaaugccuacauaaau

SEQ ID NO: 152711 - RNA, 19 nt, Artificial Sequence
  Description of Artificial Sequence: Synthetic oligonucleotide
aacagauuuuguugaacug

SEQ ID NO: 152712 - RNA, 19 nt, Artificial Sequence
  Description of Artificial Sequence: Synthetic oligonucleotide
aaaacgacagugcuaacua

SEQ ID NO: 152713 - RNA, 19 nt, Artificial Sequence
  Description of Artificial Sequence: Synthetic oligonucleotide
aaaucuuaagcaaauuaga

SEQ ID NO: 152714 - RNA, 19 nt, Artificial Sequence
  Description of Artificial Sequence: Synthetic oligonucleotide
ugugugagaaaagauagcu

SEQ ID NO: 152715 - RNA, 19 nt, Artificial Sequence
  Description of Artificial Sequence: Synthetic oligonucleotide
uuauacaucuggcacauuu

SEQ ID NO: 152716 - RNA, 19 nt, Artificial Sequence
  Description of Artificial Sequence: Synthetic oligonucleotide
uguuuaaauagugcaauga

SEQ ID NO: 152717 - RNA, 19 nt, Artificial Sequence
  Description of Artificial Sequence: Synthetic oligonucleotide
uagcuaauaauccuuuacu

SEQ ID NO: 152718 - RNA, 19 nt, Artificial Sequence
  Description of Artificial Sequence: Synthetic oligonucleotide
agaagagacauauuuuaca

SEQ ID NO: 152719 - RNA, 19 nt, Artificial Sequence
  Description of Artificial Sequence: Synthetic oligonucleotide
uuuugaguauuauagcaaa

SEQ ID NO: 152720 - RNA, 19 nt, Artificial Sequence
  Description of Artificial Sequence: Synthetic oligonucleotide
aaugggagaagagacauau

SEQ ID NO: 152721 - RNA, 19 nt, Artificial Sequence
  Description of Artificial Sequence: Synthetic oligonucleotide
uaagcgcucaguuauaaaa

SEQ ID NO: 152722 - RNA, 19 nt, Artificial Sequence
  Description of Artificial Sequence: Synthetic oligonucleotide
auaaagagcuaggauggcc

SEQ ID NO: 152723 - RNA, 19 nt, Artificial Sequence
  Description of Artificial Sequence: Synthetic oligonucleotide
agacauauuuuacagugca

SEQ ID NO: 152724 - RNA, 19 nt, Artificial Sequence
  Description of Artificial Sequence: Synthetic oligonucleotide
uggucuaucagcuguauaa

SEQ ID NO: 152725 - RNA, 19 nt, Artificial Sequence
  Description of Artificial Sequence: Synthetic oligonucleotide
agauagauuggucuaucag

SEQ ID NO: 152726 - RNA, 19 nt, Artificial Sequence
  Description of Artificial Sequence: Synthetic oligonucleotide
agcucaacagauuuuguug

SEQ ID NO: 152727 - RNA, 19 nt, Artificial Sequence
  Description of Artificial Sequence: Synthetic oligonucleotide
uaaaugaauguuauacgau

SEQ ID NO: 152728 - RNA, 19 nt, Artificial Sequence
  Description of Artificial Sequence: Synthetic oligonucleotide
ucaacagauauucuuggau

SEQ ID NO: 152729 - RNA, 19 nt, Artificial Sequence
  Description of Artificial Sequence: Synthetic oligonucleotide
uccuuaaagagucuucaac

SEQ ID NO: 152730 - RNA, 19 nt, Artificial Sequence
  Description of Artificial Sequence: Synthetic oligonucleotide
agauccucuauuucagaac

SEQ ID NO: 152731 - RNA, 19 nt, Artificial Sequence
  Description of Artificial Sequence: Synthetic oligonucleotide
aaccuaagcgcucaguuau

SEQ ID NO: 152732 - RNA, 19 nt, Artificial Sequence
  Description of Artificial Sequence: Synthetic oligonucleotide
ugaaugccuacauaaauau

SEQ ID NO: 152733 - RNA, 19 nt, Artificial Sequence
  Description of Artificial Sequence: Synthetic oligonucleotide
augauuauuuuguaucugu

SEQ ID NO: 152734 - RNA, 19 nt, Artificial Sequence
  Description of Artificial Sequence: Synthetic oligonucleotide
aaugagcauaucagaaugg

SEQ ID NO: 152735 - RNA, 19 nt, Artificial Sequence
  Description of Artificial Sequence: Synthetic oligonucleotide
uuagauucaugauauuguc

SEQ ID NO: 152736 - RNA, 19 nt, Artificial Sequence
  Description of Artificial Sequence: Synthetic oligonucleotide
aaccauuauuuucucauaa

SEQ ID NO: 152737 - RNA, 19 nt, Artificial Sequence
  Description of Artificial Sequence: Synthetic oligonucleotide
agaguaauugaacaggauu

SEQ ID NO: 152738 - RNA, 19 nt, Artificial Sequence
  Description of Artificial Sequence: Synthetic oligonucleotide
ugaguuacagcuucugaac

SEQ ID NO: 152739 - RNA, 19 nt, Artificial Sequence
  Description of Artificial Sequence: Synthetic oligonucleotide
gaaaucuuauagugcauac

SEQ ID NO: 152740 - RNA, 19 nt, Artificial Sequence
  Description of Artificial Sequence: Synthetic oligonucleotide
cauaauuuugaaugccuac

SEQ ID NO: 152741 - RNA, 19 nt, Artificial Sequence
  Description of Artificial Sequence: Synthetic oligonucleotide
uguucgcucaucaucaaaa

SEQ ID NO: 152742 - RNA, 19 nt, Artificial Sequence
  Description of Artificial Sequence: Synthetic oligonucleotide
aaugauuauuuuguaucug

SEQ ID NO: 152743 - RNA, 19 nt, Artificial Sequence
  Description of Artificial Sequence: Synthetic oligonucleotide
aucacgaaggcuucuuuuc

SEQ ID NO: 152744 - RNA, 19 nt, Artificial Sequence
  Description of Artificial Sequence: Synthetic oligonucleotide
augagcauaucagaauggc

SEQ ID NO: 152745 - RNA, 19 nt, Artificial Sequence
  Description of Artificial Sequence: Synthetic oligonucleotide
ugucuuuuauuaugcauac

SEQ ID NO: 152746 - RNA, 19 nt, Artificial Sequence
  Description of Artificial Sequence: Synthetic oligonucleotide
aauagugcaaugacuucuc

SEQ ID NO: 152747 - RNA, 19 nt, Artificial Sequence
  Description of Artificial Sequence: Synthetic oligonucleotide
uuauuaggauauuuaugca

SEQ ID NO: 152748 - RNA, 19 nt, Artificial Sequence
  Description of Artificial Sequence: Synthetic oligonucleotide
aauccauauacaaggcuag

SEQ ID NO: 152749 - RNA, 19 nt, Artificial Sequence
  Description of Artificial Sequence: Synthetic oligonucleotide
cuaauguucgcucaucauc

SEQ ID NO: 152750 - RNA, 19 nt, Artificial Sequence
  Description of Artificial Sequence: Synthetic oligonucleotide
auugcuaccugucaacaga

SEQ ID NO: 152751 - RNA, 19 nt, Artificial Sequence
  Description of Artificial Sequence: Synthetic oligonucleotide
cuaauaauccuuuacuaaa

SEQ ID NO: 152752 - RNA, 19 nt, Artificial Sequence
  Description of Artificial Sequence: Synthetic oligonucleotide
gauauugucaagauguuua

SEQ ID NO: 152753 - RNA, 19 nt, Artificial Sequence
  Description of Artificial Sequence: Synthetic oligonucleotide
uaauuuugaaugccuacau

SEQ ID NO: 152754 - RNA, 19 nt, Artificial Sequence
  Description of Artificial Sequence: Synthetic oligonucleotide
caugcuucuuaucacuucc

SEQ ID NO: 152755 - RNA, 19 nt, Artificial Sequence
  Description of Artificial Sequence: Synthetic oligonucleotide
auuagauucaugauauugu

SEQ ID NO: 152756 - RNA, 19 nt, Artificial Sequence
  Description of Artificial Sequence: Synthetic oligonucleotide
ggagcauucaaccaaagga

SEQ ID NO: 152757 - RNA, 19 nt, Artificial Sequence
  Description of Artificial Sequence: Synthetic oligonucleotide
aaccuuauugagaauauau

SEQ ID NO: 152758 - RNA, 19 nt, Artificial Sequence
  Description of Artificial Sequence: Synthetic oligonucleotide
aaccauagaggcugagaag

SEQ ID NO: 152759 - RNA, 19 nt, Artificial Sequence
  Description of Artificial Sequence: Synthetic oligonucleotide
uuuuacccaagcugcauca

SEQ ID NO: 152760 - RNA, 19 nt, Artificial Sequence
  Description of Artificial Sequence: Synthetic oligonucleotide
uucuaauguucgcucauca

SEQ ID NO: 152761 - RNA, 19 nt, Artificial Sequence
  Description of Artificial Sequence: Synthetic oligonucleotide
ugaauguuauacgaugugu

SEQ ID NO: 152762 - RNA, 19 nt, Artificial Sequence
  Description of Artificial Sequence: Synthetic oligonucleotide
uuuauguucucuucuuuau

SEQ ID NO: 152763 - RNA, 19 nt, Artificial Sequence
  Description of Artificial Sequence: Synthetic oligonucleotide
aauacugauuggggaaagg

SEQ ID NO: 152764 - RNA, 19 nt, Artificial Sequence
  Description of Artificial Sequence: Synthetic oligonucleotide
auggccugcacucacuuag

SEQ ID NO: 152765 - RNA, 19 nt, Artificial Sequence
  Description of Artificial Sequence: Synthetic oligonucleotide
uuuugaaugccuacauaaa

SEQ ID NO: 152766 - RNA, 19 nt, Artificial Sequence
  Description of Artificial Sequence: Synthetic oligonucleotide
agcaucacuuauuagugga

SEQ ID NO: 152767 - RNA, 19 nt, Artificial Sequence
  Description of Artificial Sequence: Synthetic oligonucleotide
uauccuuaaagagucuuca

SEQ ID NO: 152768 - RNA, 19 nt, Artificial Sequence
  Description of Artificial Sequence: Synthetic oligonucleotide
caaaggagcuauacuauac

SEQ ID NO: 152769 - RNA, 19 nt, Artificial Sequence
  Description of Artificial Sequence: Synthetic oligonucleotide
ucacuuauuaguggaaugu

SEQ ID NO: 152770 - RNA, 19 nt, Artificial Sequence
  Description of Artificial Sequence: Synthetic oligonucleotide
auuggcaugucgccuuccc

SEQ ID NO: 152771 - RNA, 19 nt, Artificial Sequence
  Description of Artificial Sequence: Synthetic oligonucleotide
auacauuuuaaagcucaac

SEQ ID NO: 152772 - RNA, 19 nt, Artificial Sequence
  Description of Artificial Sequence: Synthetic oligonucleotide
agcauucaaccaaaggagc

SEQ ID NO: 152773 - RNA, 19 nt, Artificial Sequence
  Description of Artificial Sequence: Synthetic oligonucleotide
uuccuguugacauaaugaa

SEQ ID NO: 152774 - RNA, 19 nt, Artificial Sequence
  Description of Artificial Sequence: Synthetic oligonucleotide
uccaauacugauuggggaa

SEQ ID NO: 152775 - RNA, 19 nt, Artificial Sequence
  Description of Artificial Sequence: Synthetic oligonucleotide
ugagcauaucagaauggca

SEQ ID NO: 152776 - RNA, 19 nt, Artificial Sequence
  Description of Artificial Sequence: Synthetic oligonucleotide
aggagcuauacuauacccc

SEQ ID NO: 152777 - RNA, 19 nt, Artificial Sequence
  Description of Artificial Sequence: Synthetic oligonucleotide
aucacuuauuaguggaaug

SEQ ID NO: 152778 - RNA, 19 nt, Artificial Sequence
  Description of Artificial Sequence: Synthetic oligonucleotide
uuacuucaaauacauuuua

SEQ ID NO: 152779 - RNA, 19 nt, Artificial Sequence
  Description of Artificial Sequence: Synthetic oligonucleotide
augaaaacgacagugcuaa

SEQ ID NO: 152780 - RNA, 19 nt, Artificial Sequence
  Description of Artificial Sequence: Synthetic oligonucleotide
cuguucuuuaaaacauucc

SEQ ID NO: 152781 - RNA, 19 nt, Artificial Sequence
  Description of Artificial Sequence: Synthetic oligonucleotide
gugcauacaagaguaauug

SEQ ID NO: 152782 - RNA, 19 nt, Artificial Sequence
  Description of Artificial Sequence: Synthetic oligonucleotide
aacaaugggaaaucuuaua

SEQ ID NO: 152783 - RNA, 19 nt, Artificial Sequence
  Description of Artificial Sequence: Synthetic oligonucleotide
ugacaaacuggauuauaac

SEQ ID NO: 152784 - RNA, 19 nt, Artificial Sequence
  Description of Artificial Sequence: Synthetic oligonucleotide
gauucaugauauugucaag

SEQ ID NO: 152785 - RNA, 19 nt, Artificial Sequence
  Description of Artificial Sequence: Synthetic oligonucleotide
ucguggauuggcaugucgc

SEQ ID NO: 152786 - RNA, 19 nt, Artificial Sequence
  Description of Artificial Sequence: Synthetic oligonucleotide
cacuacauagcugaggaug

SEQ ID NO: 152787 - RNA, 19 nt, Artificial Sequence
  Description of Artificial Sequence: Synthetic oligonucleotide
ucuuggaugugacaauauc

SEQ ID NO: 152788 - RNA, 19 nt, Artificial Sequence
  Description of Artificial Sequence: Synthetic oligonucleotide
uucuuaaaguuagaacuca

SEQ ID NO: 152789 - RNA, 19 nt, Artificial Sequence
  Description of Artificial Sequence: Synthetic oligonucleotide
uguuacgggucucaagaac

SEQ ID NO: 152790 - RNA, 19 nt, Artificial Sequence
  Description of Artificial Sequence: Synthetic oligonucleotide
aucaugaaccagcauguca

SEQ ID NO: 152791 - RNA, 19 nt, Artificial Sequence
  Description of Artificial Sequence: Synthetic oligonucleotide
cauaaguagaagcuuaaaa

SEQ ID NO: 152792 - RNA, 19 nt, Artificial Sequence
  Description of Artificial Sequence: Synthetic oligonucleotide
uaucuacaaacgccaacug

SEQ ID NO: 152793 - RNA, 19 nt, Artificial Sequence
  Description of Artificial Sequence: Synthetic oligonucleotide
ucaaccaaaggagcuauac

SEQ ID NO: 152794 - RNA, 19 nt, Artificial Sequence
  Description of Artificial Sequence: Synthetic oligonucleotide
uguagacagcgucucaagu

SEQ ID NO: 152795 - RNA, 19 nt, Artificial Sequence
  Description of Artificial Sequence: Synthetic oligonucleotide
aagcucaacagauuuuguu

SEQ ID NO: 152796 - RNA, 19 nt, Artificial Sequence
  Description of Artificial Sequence: Synthetic oligonucleotide
uagacagcgucucaaguau

SEQ ID NO: 152797 - RNA, 19 nt, Artificial Sequence
  Description of Artificial Sequence: Synthetic oligonucleotide
cauuuauacaucuggcaca

SEQ ID NO: 152798 - RNA, 19 nt, Artificial Sequence
  Description of Artificial Sequence: Synthetic oligonucleotide
agcuguauaaaacuacauu

SEQ ID NO: 152799 - RNA, 19 nt, Artificial Sequence
  Description of Artificial Sequence: Synthetic oligonucleotide
uucucaucucaaccuaagc

SEQ ID NO: 152800 - RNA, 19 nt, Artificial Sequence
  Description of Artificial Sequence: Synthetic oligonucleotide
ugaaccuuauugagaauau

SEQ ID NO: 152801 - RNA, 19 nt, Artificial Sequence
  Description of Artificial Sequence: Synthetic oligonucleotide
uuugggucauucaaauuua

SEQ ID NO: 152802 - RNA, 19 nt, Artificial Sequence
  Description of Artificial Sequence: Synthetic oligonucleotide
agcuaauaauccuuuacua

SEQ ID NO: 152803 - RNA, 19 nt, Artificial Sequence
  Description of Artificial Sequence: Synthetic oligonucleotide
uacugauuggggaaaggaa

SEQ ID NO: 152804 - RNA, 19 nt, Artificial Sequence
  Description of Artificial Sequence: Synthetic oligonucleotide
augucaagauuuaaccaac

SEQ ID NO: 152805 - RNA, 19 nt, Artificial Sequence
  Description of Artificial Sequence: Synthetic oligonucleotide
acuaccaacagacuuucuu

SEQ ID NO: 152806 - RNA, 19 nt, Artificial Sequence
  Description of Artificial Sequence: Synthetic oligonucleotide
aaacauuccuacagaccac

SEQ ID NO: 152807 - RNA, 19 nt, Artificial Sequence
  Description of Artificial Sequence: Synthetic oligonucleotide
agauauucuuggaugugac

SEQ ID NO: 152808 - RNA, 19 nt, Artificial Sequence
  Description of Artificial Sequence: Synthetic oligonucleotide
auuaggauauuuaugcaaa

SEQ ID NO: 152809 - RNA, 19 nt, Artificial Sequence
  Description of Artificial Sequence: Synthetic oligonucleotide
uauacgauguguugucaaa

SEQ ID NO: 152810 - RNA, 19 nt, Artificial Sequence
  Description of Artificial Sequence: Synthetic oligonucleotide
gugggaaacaccuccaauc

SEQ ID NO: 152811 - RNA, 19 nt, Artificial Sequence
  Description of Artificial Sequence: Synthetic oligonucleotide
uuauacgauguguugucaa

SEQ ID NO: 152812 - RNA, 19 nt, Artificial Sequence
  Description of Artificial Sequence: Synthetic oligonucleotide
ugcauacaagaguaauuga

SEQ ID NO: 152813 - RNA, 19 nt, Artificial Sequence
  Description of Artificial Sequence: Synthetic oligonucleotide
agcgcucaguuauaaaaug

SEQ ID NO: 152814 - RNA, 19 nt, Artificial Sequence
  Description of Artificial Sequence: Synthetic oligonucleotide
ugucaagauuuaaccaacu

SEQ ID NO: 152815 - RNA, 19 nt, Artificial Sequence
  Description of Artificial Sequence: Synthetic oligonucleotide
acgauguguugucaaagug

SEQ ID NO: 152816 - RNA, 19 nt, Artificial Sequence
  Description of Artificial Sequence: Synthetic oligonucleotide
gauccucuauuucagaacu

SEQ ID NO: 152817 - RNA, 19 nt, Artificial Sequence
  Description of Artificial Sequence: Synthetic oligonucleotide
uccucuauuucagaacuga

SEQ ID NO: 152818 - RNA, 19 nt, Artificial Sequence
  Description of Artificial Sequence: Synthetic oligonucleotide
cagcugauggaucaaacuc

SEQ ID NO: 152819 - RNA, 19 nt, Artificial Sequence
  Description of Artificial Sequence: Synthetic oligonucleotide
uacgauguguugucaaagu

SEQ ID NO: 152820 - RNA, 19 nt, Artificial Sequence
  Description of Artificial Sequence: Synthetic oligonucleotide
uuaaagcucaacagauuuu

SEQ ID NO: 152821 - RNA, 19 nt, Artificial Sequence
  Description of Artificial Sequence: Synthetic oligonucleotide
gauucuauucagcacgaua

SEQ ID NO: 152822 - RNA, 19 nt, Artificial Sequence
  Description of Artificial Sequence: Synthetic oligonucleotide
uuaguggaaugucuuuuau

SEQ ID NO: 152823 - RNA, 19 nt, Artificial Sequence
  Description of Artificial Sequence: Synthetic oligonucleotide
uccuguugacauaaugaaa

SEQ ID NO: 152824 - RNA, 19 nt, Artificial Sequence
  Description of Artificial Sequence: Synthetic oligonucleotide
uacaaacuugccaccagau

SEQ ID NO: 152825 - RNA, 19 nt, Artificial Sequence
  Description of Artificial Sequence: Synthetic oligonucleotide
cucaaguaucccaggcugg

SEQ ID NO: 152826 - RNA, 19 nt, Artificial Sequence
  Description of Artificial Sequence: Synthetic oligonucleotide
agaacucaauucaaauguc

SEQ ID NO: 152827 - RNA, 19 nt, Artificial Sequence
  Description of Artificial Sequence: Synthetic oligonucleotide
uccauaaguagaagcuuaa

SEQ ID NO: 152828 - RNA, 19 nt, Artificial Sequence
  Description of Artificial Sequence: Synthetic oligonucleotide
agcacgauacauuuacaaa

SEQ ID NO: 152829 - RNA, 19 nt, Artificial Sequence
  Description of Artificial Sequence: Synthetic oligonucleotide
ucccugagcaucugggaag

SEQ ID NO: 152830 - RNA, 19 nt, Artificial Sequence
  Description of Artificial Sequence: Synthetic oligonucleotide
auuauauauuccaaaugaa

SEQ ID NO: 152831 - RNA, 19 nt, Artificial Sequence
  Description of Artificial Sequence: Synthetic oligonucleotide
ucacgaaggcuucuuuucu

SEQ ID NO: 152832 - RNA, 19 nt, Artificial Sequence
  Description of Artificial Sequence: Synthetic oligonucleotide
acuaccagccacuguuguc

SEQ ID NO: 152833 - RNA, 19 nt, Artificial Sequence
  Description of Artificial Sequence: Synthetic oligonucleotide
auuacuucaaauacauuuu

SEQ ID NO: 152834 - RNA, 19 nt, Artificial Sequence
  Description of Artificial Sequence: Synthetic oligonucleotide
ugacaguaagucuuuguuu

SEQ ID NO: 152835 - RNA, 19 nt, Artificial Sequence
  Description of Artificial Sequence: Synthetic oligonucleotide
uuuaugugguacuggggau

SEQ ID NO: 152836 - RNA, 19 nt, Artificial Sequence
  Description of Artificial Sequence: Synthetic oligonucleotide
uuggagauagauuggucua

SEQ ID NO: 152837 - RNA, 19 nt, Artificial Sequence
  Description of Artificial Sequence: Synthetic oligonucleotide
agcauaucagaauggcaga

SEQ ID NO: 152838 - RNA, 19 nt, Artificial Sequence
  Description of Artificial Sequence: Synthetic oligonucleotide
agguggaauuaugaauccc

SEQ ID NO: 152839 - RNA, 19 nt, Artificial Sequence
  Description of Artificial Sequence: Synthetic oligonucleotide
uuacccaagcugcaucaga

SEQ ID NO: 152840 - RNA, 19 nt, Artificial Sequence
  Description of Artificial Sequence: Synthetic oligonucleotide
acuuauuaguggaaugucu

SEQ ID NO: 152841 - RNA, 19 nt, Artificial Sequence
  Description of Artificial Sequence: Synthetic oligonucleotide
cugagcaucacuuauuagu

SEQ ID NO: 152842 - RNA, 19 nt, Artificial Sequence
  Description of Artificial Sequence: Synthetic oligonucleotide
aaccgagugcugucauaac

SEQ ID NO: 152843 - RNA, 19 nt, Artificial Sequence
  Description of Artificial Sequence: Synthetic oligonucleotide
ugcaaugacuucucaaguu

SEQ ID NO: 152844 - RNA, 19 nt, Artificial Sequence
  Description of Artificial Sequence: Synthetic oligonucleotide
uauauccuuaaagagucuu

SEQ ID NO: 152845 - RNA, 19 nt, Artificial Sequence
  Description of Artificial Sequence: Synthetic oligonucleotide
uugaagaacaaagggugaa

SEQ ID NO: 152846 - RNA, 19 nt, Artificial Sequence
  Description of Artificial Sequence: Synthetic oligonucleotide
aagcuugcaaucugagcau

SEQ ID NO: 152847 - RNA, 19 nt, Artificial Sequence
  Description of Artificial Sequence: Synthetic oligonucleotide
ucuauucagcacgauacau

SEQ ID NO: 152848 - RNA, 19 nt, Artificial Sequence
  Description of Artificial Sequence: Synthetic oligonucleotide
aaacaagcuugcaaucuga

SEQ ID NO: 152849 - RNA, 19 nt, Artificial Sequence
  Description of Artificial Sequence: Synthetic oligonucleotide
aaagggugaaaucccugua

SEQ ID NO: 152850 - RNA, 19 nt, Artificial Sequence
  Description of Artificial Sequence: Synthetic oligonucleotide
ucaacagauuuuguugaac

SEQ ID NO: 152851 - RNA, 19 nt, Artificial Sequence
  Description of Artificial Sequence: Synthetic oligonucleotide
gacagcgucucaaguaucc

SEQ ID NO: 152852 - RNA, 19 nt, Artificial Sequence
  Description of Artificial Sequence: Synthetic oligonucleotide
cugacaaacuggauuauaa

SEQ ID NO: 152853 - RNA, 19 nt, Artificial Sequence
  Description of Artificial Sequence: Synthetic oligonucleotide
uuauauccuuaaagagucu

SEQ ID NO: 152854 - RNA, 19 nt, Artificial Sequence
  Description of Artificial Sequence: Synthetic oligonucleotide
ucuaauguucgcucaucau

SEQ ID NO: 152855 - RNA, 19 nt, Artificial Sequence
  Description of Artificial Sequence: Synthetic oligonucleotide
auacugauuggggaaagga

SEQ ID NO: 152856 - RNA, 19 nt, Artificial Sequence
  Description of Artificial Sequence: Synthetic oligonucleotide
cuuuuacccaagcugcauc

SEQ ID NO: 152857 - RNA, 19 nt, Artificial Sequence
  Description of Artificial Sequence: Synthetic oligonucleotide
uaaccgagugcugucauaa

SEQ ID NO: 152858 - RNA, 19 nt, Artificial Sequence
  Description of Artificial Sequence: Synthetic oligonucleotide
augucuuuuauuaugcaua

SEQ ID NO: 152859 - RNA, 19 nt, Artificial Sequence
  Description of Artificial Sequence: Synthetic oligonucleotide
acuucucaaguuacagugg

SEQ ID NO: 152860 - RNA, 19 nt, Artificial Sequence
  Description of Artificial Sequence: Synthetic oligonucleotide
uaaagcuacuugaccuacu

SEQ ID NO: 152861 - RNA, 19 nt, Artificial Sequence
  Description of Artificial Sequence: Synthetic oligonucleotide
ccuuaaagagucuucaaca

SEQ ID NO: 152862 - RNA, 19 nt, Artificial Sequence
  Description of Artificial Sequence: Synthetic oligonucleotide
gcuaauaauccuuuacuaa

SEQ ID NO: 152863 - RNA, 19 nt, Artificial Sequence
  Description of Artificial Sequence: Synthetic oligonucleotide
ccuguugacauaaugaaaa

SEQ ID NO: 152864 - RNA, 19 nt, Artificial Sequence
  Description of Artificial Sequence: Synthetic oligonucleotide
ucagcacgauacauuuaca

SEQ ID NO: 152865 - RNA, 19 nt, Artificial Sequence
  Description of Artificial Sequence: Synthetic oligonucleotide
uuggagcauucaaccaaag

SEQ ID NO: 152866 - RNA, 19 nt, Artificial Sequence
  Description of Artificial Sequence: Synthetic oligonucleotide
ugauuggggaaaggaagca

SEQ ID NO: 152867 - RNA, 19 nt, Artificial Sequence
  Description of Artificial Sequence: Synthetic oligonucleotide
gauaaagagcuaggauggc

SEQ ID NO: 152868 - RNA, 19 nt, Artificial Sequence
  Description of Artificial Sequence: Synthetic oligonucleotide
aacgccaacuggaaucuca

SEQ ID NO: 152869 - RNA, 19 nt, Artificial Sequence
  Description of Artificial Sequence: Synthetic oligonucleotide
uacaaacgccaacuggaau

SEQ ID NO: 152870 - RNA, 19 nt, Artificial Sequence
  Description of Artificial Sequence: Synthetic oligonucleotide
aaacuacauuuuauaagaa

SEQ ID NO: 152871 - RNA, 19 nt, Artificial Sequence
  Description of Artificial Sequence: Synthetic oligonucleotide
aguaacagacugugaggga

SEQ ID NO: 152872 - RNA, 19 nt, Artificial Sequence
  Description of Artificial Sequence: Synthetic oligonucleotide
gaaaacgacagugcuaacu

SEQ ID NO: 152873 - RNA, 19 nt, Artificial Sequence
  Description of Artificial Sequence: Synthetic oligonucleotide
caugcugaacuccagaagu

SEQ ID NO: 152874 - RNA, 19 nt, Artificial Sequence
  Description of Artificial Sequence: Synthetic oligonucleotide
agcugauggaucaaacuca

SEQ ID NO: 152875 - RNA, 19 nt, Artificial Sequence
  Description of Artificial Sequence: Synthetic oligonucleotide
cuaaagcuacuugaccuac

SEQ ID NO: 152876 - RNA, 19 nt, Artificial Sequence
  Description of Artificial Sequence: Synthetic oligonucleotide
uugcuaccugucaacagau

SEQ ID NO: 152877 - RNA, 19 nt, Artificial Sequence
  Description of Artificial Sequence: Synthetic oligonucleotide
aaguuagaacucaauucaa

SEQ ID NO: 152878 - RNA, 19 nt, Artificial Sequence
  Description of Artificial Sequence: Synthetic oligonucleotide
uaacuaccaacagacuuuc

SEQ ID NO: 152879 - RNA, 19 nt, Artificial Sequence
  Description of Artificial Sequence: Synthetic oligonucleotide
aauguucgcucaucaucaa

SEQ ID NO: 152880 - RNA, 19 nt, Artificial Sequence
  Description of Artificial Sequence: Synthetic oligonucleotide
auaaccauagaggcugaga

SEQ ID NO: 152881 - RNA, 19 nt, Artificial Sequence
  Description of Artificial Sequence: Synthetic oligonucleotide
uuacgggucucaagaacuc

SEQ ID NO: 152882 - RNA, 19 nt, Artificial Sequence
  Description of Artificial Sequence: Synthetic oligonucleotide
cuuuaaaagcauuggcucu

SEQ ID NO: 152883 - RNA, 19 nt, Artificial Sequence
  Description of Artificial Sequence: Synthetic oligonucleotide
aaauuacagcugggugugg

SEQ ID NO: 152884 - RNA, 19 nt, Artificial Sequence
  Description of Artificial Sequence: Synthetic oligonucleotide
uagugcauacaagaguaau

SEQ ID NO: 152885 - RNA, 19 nt, Artificial Sequence
  Description of Artificial Sequence: Synthetic oligonucleotide
uucuuggaugugacaauau

SEQ ID NO: 152886 - RNA, 19 nt, Artificial Sequence
  Description of Artificial Sequence: Synthetic oligonucleotide
gauuacaagugcacaccac

SEQ ID NO: 152887 - RNA, 19 nt, Artificial Sequence
  Description of Artificial Sequence: Synthetic oligonucleotide
aagcgcucaguuauaaaau

SEQ ID NO: 152888 - RNA, 19 nt, Artificial Sequence
  Description of Artificial Sequence: Synthetic oligonucleotide
ugucgccuucccuugcaag

SEQ ID NO: 152889 - RNA, 19 nt, Artificial Sequence
  Description of Artificial Sequence: Synthetic oligonucleotide
cagcauuuggggacguggc

SEQ ID NO: 152890 - RNA, 19 nt, Artificial Sequence
  Description of Artificial Sequence: Synthetic oligonucleotide
guagacagcgucucaagua

SEQ ID NO: 152891 - RNA, 19 nt, Artificial Sequence
  Description of Artificial Sequence: Synthetic oligonucleotide
uuuacccaagcugcaucag

SEQ ID NO: 152892 - RNA, 19 nt, Artificial Sequence
  Description of Artificial Sequence: Synthetic oligonucleotide
cucguggauuggcaugucg

SEQ ID NO: 152893 - RNA, 19 nt, Artificial Sequence
  Description of Artificial Sequence: Synthetic oligonucleotide
gauagcuaauaauccuuua

SEQ ID NO: 152894 - RNA, 19 nt, Artificial Sequence
  Description of Artificial Sequence: Synthetic oligonucleotide
uggccaucugcuaaagcua

SEQ ID NO: 152895 - RNA, 19 nt, Artificial Sequence
  Description of Artificial Sequence: Synthetic oligonucleotide
agcgucucaaguaucccag

SEQ ID NO: 152896 - RNA, 19 nt, Artificial Sequence
  Description of Artificial Sequence: Synthetic oligonucleotide
uauugucaagauguuuaaa

SEQ ID NO: 152897 - RNA, 19 nt, Artificial Sequence
  Description of Artificial Sequence: Synthetic oligonucleotide
caaggcuagugcacacagg

SEQ ID NO: 152898 - RNA, 19 nt, Artificial Sequence
  Description of Artificial Sequence: Synthetic oligonucleotide
aguuagaacucaauucaaa

SEQ ID NO: 152899 - RNA, 19 nt, Artificial Sequence
  Description of Artificial Sequence: Synthetic oligonucleotide
ccugugauaaagagcuagg

SEQ ID NO: 152900 - RNA, 19 nt, Artificial Sequence
  Description of Artificial Sequence: Synthetic oligonucleotide
ugcuaacuaccaacagacu

SEQ ID NO: 152901 - RNA, 19 nt, Artificial Sequence
  Description of Artificial Sequence: Synthetic oligonucleotide
aacuuuuacccaagcugca

SEQ ID NO: 152902 - RNA, 19 nt, Artificial Sequence
  Description of Artificial Sequence: Synthetic oligonucleotide
uggacaugacaccuccaau

SEQ ID NO: 152903 - RNA, 19 nt, Artificial Sequence
  Description of Artificial Sequence: Synthetic oligonucleotide
aagaguaauugaacaggau

SEQ ID NO: 152904 - RNA, 19 nt, Artificial Sequence
  Description of Artificial Sequence: Synthetic oligonucleotide
gguggaauuaugaauccca

SEQ ID NO: 152905 - RNA, 19 nt, Artificial Sequence
  Description of Artificial Sequence: Synthetic oligonucleotide
auagugcaaugacuucuca

SEQ ID NO: 152906 - RNA, 19 nt, Artificial Sequence
  Description of Artificial Sequence: Synthetic oligonucleotide
uucagguaaccgagugcug

SEQ ID NO: 152907 - RNA, 19 nt, Artificial Sequence
  Description of Artificial Sequence: Synthetic oligonucleotide
gaagguacagguaagucuu

SEQ ID NO: 152908 - RNA, 19 nt, Artificial Sequence
  Description of Artificial Sequence: Synthetic oligonucleotide
gcaaucuagacaaauguaa

SEQ ID NO: 152909 - RNA, 19 nt, Artificial Sequence
  Description of Artificial Sequence: Synthetic oligonucleotide
agcauuuggggacguggcu

SEQ ID NO: 152910 - RNA, 19 nt, Artificial Sequence
  Description of Artificial Sequence: Synthetic oligonucleotide
caaccucacuacauagcug

SEQ ID NO: 152911 - RNA, 19 nt, Artificial Sequence
  Description of Artificial Sequence: Synthetic oligonucleotide
cuuauuaguggaaugucuu

SEQ ID NO: 152912 - RNA, 19 nt, Artificial Sequence
  Description of Artificial Sequence: Synthetic oligonucleotide
cacuuauuaguggaauguc

SEQ ID NO: 152913 - RNA, 19 nt, Artificial Sequence
  Description of Artificial Sequence: Synthetic oligonucleotide
agcaugucagcugauggau

SEQ ID NO: 152914 - RNA, 19 nt, Artificial Sequence
  Description of Artificial Sequence: Synthetic oligonucleotide
guaggaggauugcaaguuc

SEQ ID NO: 152915 - RNA, 19 nt, Artificial Sequence
  Description of Artificial Sequence: Synthetic oligonucleotide
ucugacaaacuggauuaua

SEQ ID NO: 152916 - RNA, 19 nt, Artificial Sequence
  Description of Artificial Sequence: Synthetic oligonucleotide
acauauguucauaauucuu

SEQ ID NO: 152917 - RNA, 19 nt, Artificial Sequence
  Description of Artificial Sequence: Synthetic oligonucleotide
cuaacuaccaacagacuuu

SEQ ID NO: 152918 - RNA, 19 nt, Artificial Sequence
  Description of Artificial Sequence: Synthetic oligonucleotide
agugcauacaagaguaauu

SEQ ID NO: 152919 - RNA, 19 nt, Artificial Sequence
  Description of Artificial Sequence: Synthetic oligonucleotide
acccaguuuaugugguacu

SEQ ID NO: 152920 - RNA, 19 nt, Artificial Sequence
  Description of Artificial Sequence: Synthetic oligonucleotide
cagcacgauacauuuacaa

SEQ ID NO: 152921 - RNA, 19 nt, Artificial Sequence
  Description of Artificial Sequence: Synthetic oligonucleotide
acuaaaucuuaagcaaauu

SEQ ID NO: 152922 - RNA, 19 nt, Artificial Sequence
  Description of Artificial Sequence: Synthetic oligonucleotide
cacgaaggcuucuuuucuc

SEQ ID NO: 152923 - RNA, 19 nt, Artificial Sequence
  Description of Artificial Sequence: Synthetic oligonucleotide
ugcacucacuuaguaaaau

SEQ ID NO: 152924 - RNA, 19 nt, Artificial Sequence
  Description of Artificial Sequence: Synthetic oligonucleotide
aucucaaccuaagcgcuca

SEQ ID NO: 152925 - RNA, 19 nt, Artificial Sequence
  Description of Artificial Sequence: Synthetic oligonucleotide
gaauguuauacgauguguu

SEQ ID NO: 152926 - RNA, 19 nt, Artificial Sequence
  Description of Artificial Sequence: Synthetic oligonucleotide
ccuguuacgggucucaaga

SEQ ID NO: 152927 - RNA, 19 nt, Artificial Sequence
  Description of Artificial Sequence: Synthetic oligonucleotide
ggauuacaagugcacacca

SEQ ID NO: 152928 - RNA, 19 nt, Artificial Sequence
  Description of Artificial Sequence: Synthetic oligonucleotide
guuacgggucucaagaacu

SEQ ID NO: 152929 - RNA, 19 nt, Artificial Sequence
  Description of Artificial Sequence: Synthetic oligonucleotide
accaaaggagcuauacuau

SEQ ID NO: 152930 - RNA, 19 nt, Artificial Sequence
  Description of Artificial Sequence: Synthetic oligonucleotide
agcaaucuagacaaaugua

SEQ ID NO: 152931 - RNA, 19 nt, Artificial Sequence
  Description of Artificial Sequence: Synthetic oligonucleotide
uccucugauguugcugagc

SEQ ID NO: 152932 - RNA, 19 nt, Artificial Sequence
  Description of Artificial Sequence: Synthetic oligonucleotide
gucgccuucccuugcaaga

SEQ ID NO: 152933 - RNA, 19 nt, Artificial Sequence
  Description of Artificial Sequence: Synthetic oligonucleotide
agauagcuaauaauccuuu

SEQ ID NO: 152934 - RNA, 19 nt, Artificial Sequence
  Description of Artificial Sequence: Synthetic oligonucleotide
gcauacaagaguaauugaa

SEQ ID NO: 152935 - RNA, 19 nt, Artificial Sequence
  Description of Artificial Sequence: Synthetic oligonucleotide
cauggccaucugcuaaagc

SEQ ID NO: 152936 - RNA, 19 nt, Artificial Sequence
  Description of Artificial Sequence: Synthetic oligonucleotide
gcucaguuauaaaauguac

SEQ ID NO: 152937 - RNA, 19 nt, Artificial Sequence
  Description of Artificial Sequence: Synthetic oligonucleotide
cuucagguaaccgagugcu

SEQ ID NO: 152938 - RNA, 19 nt, Artificial Sequence
  Description of Artificial Sequence: Synthetic oligonucleotide
ccucaaccucacuacauag

SEQ ID NO: 152939 - RNA, 19 nt, Artificial Sequence
  Description of Artificial Sequence: Synthetic oligonucleotide
gauuggggaaaggaagcaa

SEQ ID NO: 152940 - RNA, 19 nt, Artificial Sequence
  Description of Artificial Sequence: Synthetic oligonucleotide
acgacagugcuaacuacca

SEQ ID NO: 152941 - RNA, 19 nt, Artificial Sequence
  Description of Artificial Sequence: Synthetic oligonucleotide
aaacgccaacuggaaucuc

SEQ ID NO: 152942 - RNA, 19 nt, Artificial Sequence
  Description of Artificial Sequence: Synthetic oligonucleotide
cugugauaaagagcuagga

SEQ ID NO: 152943 - RNA, 19 nt, Artificial Sequence
  Description of Artificial Sequence: Synthetic oligonucleotide
cuucucaaguuacaguggu

SEQ ID NO: 152944 - RNA, 19 nt, Artificial Sequence
  Description of Artificial Sequence: Synthetic oligonucleotide
caaagggugaaaucccugu

SEQ ID NO: 152945 - RNA, 19 nt, Artificial Sequence
  Description of Artificial Sequence: Synthetic oligonucleotide
caucucaaccuaagcgcuc

SEQ ID NO: 152946 - RNA, 19 nt, Artificial Sequence
  Description of Artificial Sequence: Synthetic oligonucleotide
auguucgcucaucaucaaa

SEQ ID NO: 152947 - RNA, 19 nt, Artificial Sequence
  Description of Artificial Sequence: Synthetic oligonucleotide
agcucguggauuggcaugu

SEQ ID NO: 152948 - RNA, 19 nt, Artificial Sequence
  Description of Artificial Sequence: Synthetic oligonucleotide
cuacaaacgccaacuggaa

SEQ ID NO: 152949 - RNA, 19 nt, Artificial Sequence
  Description of Artificial Sequence: Synthetic oligonucleotide
ugaaaacgacagugcuaac

SEQ ID NO: 152950 - RNA, 19 nt, Artificial Sequence
  Description of Artificial Sequence: Synthetic oligonucleotide
agucuuugggucauucaaa

SEQ ID NO: 152951 - RNA, 19 nt, Artificial Sequence
  Description of Artificial Sequence: Synthetic oligonucleotide
cugauggaucaaacucaug

SEQ ID NO: 152952 - RNA, 19 nt, Artificial Sequence
  Description of Artificial Sequence: Synthetic oligonucleotide
cagguaaccgagugcuguc

SEQ ID NO: 152953 - RNA, 19 nt, Artificial Sequence
  Description of Artificial Sequence: Synthetic oligonucleotide
uucaaccaaaggagcuaua

SEQ ID NO: 152954 - RNA, 19 nt, Artificial Sequence
  Description of Artificial Sequence: Synthetic oligonucleotide
cauaaccauagaggcugag

SEQ ID NO: 152955 - RNA, 19 nt, Artificial Sequence
  Description of Artificial Sequence: Synthetic oligonucleotide
gcuaacuaccaacagacuu

SEQ ID NO: 152956 - RNA, 19 nt, Artificial Sequence
  Description of Artificial Sequence: Synthetic oligonucleotide
aggauucuauucagcacga

SEQ ID NO: 152957 - RNA, 19 nt, Artificial Sequence
  Description of Artificial Sequence: Synthetic oligonucleotide
cuaccaacagacuuucuuu

SEQ ID NO: 152958 - RNA, 19 nt, Artificial Sequence
  Description of Artificial Sequence: Synthetic oligonucleotide
gaaucucagcuugaaacau

SEQ ID NO: 152959 - RNA, 19 nt, Artificial Sequence
  Description of Artificial Sequence: Synthetic oligonucleotide
cucaacagauuuuguugaa

SEQ ID NO: 152960 - RNA, 19 nt, Artificial Sequence
  Description of Artificial Sequence: Synthetic oligonucleotide
ugcccaucacgaaggcuuc

SEQ ID NO: 152961 - RNA, 19 nt, Artificial Sequence
  Description of Artificial Sequence: Synthetic oligonucleotide
acgccaacuggaaucucag

SEQ ID NO: 152962 - RNA, 19 nt, Artificial Sequence
  Description of Artificial Sequence: Synthetic oligonucleotide
auccauauacaaggcuagu

SEQ ID NO: 152963 - RNA, 19 nt, Artificial Sequence
  Description of Artificial Sequence: Synthetic oligonucleotide
cuauuucagaacugaaguu

SEQ ID NO: 152964 - RNA, 19 nt, Artificial Sequence
  Description of Artificial Sequence: Synthetic oligonucleotide
cagcgucucaaguauccca

SEQ ID NO: 152965 - RNA, 19 nt, Artificial Sequence
  Description of Artificial Sequence: Synthetic oligonucleotide
agacagcgucucaaguauc

SEQ ID NO: 152966 - RNA, 19 nt, Artificial Sequence
  Description of Artificial Sequence: Synthetic oligonucleotide
cugacaguaagucuuuguu

SEQ ID NO: 152967 - RNA, 19 nt, Artificial Sequence
  Description of Artificial Sequence: Synthetic oligonucleotide
gugcaaugacuucucaagu

SEQ ID NO: 152968 - RNA, 19 nt, Artificial Sequence
  Description of Artificial Sequence: Synthetic oligonucleotide
uggccugcacucacuuagu

SEQ ID NO: 152969 - RNA, 19 nt, Artificial Sequence
  Description of Artificial Sequence: Synthetic oligonucleotide
caaccuaagcgcucaguua

SEQ ID NO: 152970 - RNA, 19 nt, Artificial Sequence
  Description of Artificial Sequence: Synthetic oligonucleotide
ugcuaccugucaacagaua

SEQ ID NO: 152971 - RNA, 19 nt, Artificial Sequence
  Description of Artificial Sequence: Synthetic oligonucleotide
ggcaugucgccuucccuug

SEQ ID NO: 152972 - RNA, 19 nt, Artificial Sequence
  Description of Artificial Sequence: Synthetic oligonucleotide
agguaaccgagugcuguca

SEQ ID NO: 152973 - RNA, 19 nt, Artificial Sequence
  Description of Artificial Sequence: Synthetic oligonucleotide
gcuaccugucaacagauau

SEQ ID NO: 152974 - RNA, 19 nt, Artificial Sequence
  Description of Artificial Sequence: Synthetic oligonucleotide
gccuacauaaauauuacuu

SEQ ID NO: 152975 - RNA, 19 nt, Artificial Sequence
  Description of Artificial Sequence: Synthetic oligonucleotide
gcuaaagcuacuugaccua

SEQ ID NO: 152976 - RNA, 19 nt, Artificial Sequence
  Description of Artificial Sequence: Synthetic oligonucleotide
auccucuauuucagaacug

SEQ ID NO: 152977 - RNA, 19 nt, Artificial Sequence
  Description of Artificial Sequence: Synthetic oligonucleotide
cuaagcgcucaguuauaaa

SEQ ID NO: 152978 - RNA, 19 nt, Artificial Sequence
  Description of Artificial Sequence: Synthetic oligonucleotide
auagugcauacaagaguaa

SEQ ID NO: 152979 - RNA, 19 nt, Artificial Sequence
  Description of Artificial Sequence: Synthetic oligonucleotide
guaagucuuuguuuugcuu

SEQ ID NO: 152980 - RNA, 19 nt, Artificial Sequence
  Description of Artificial Sequence: Synthetic oligonucleotide
cguggauuggcaugucgcc

SEQ ID NO: 152981 - RNA, 19 nt, Artificial Sequence
  Description of Artificial Sequence: Synthetic oligonucleotide
ugguugcauugaagaacaa

SEQ ID NO: 152982 - RNA, 19 nt, Artificial Sequence
  Description of Artificial Sequence: Synthetic oligonucleotide
ccgagugcugucauaacca

SEQ ID NO: 152983 - RNA, 19 nt, Artificial Sequence
  Description of Artificial Sequence: Synthetic oligonucleotide
aacuaccaacagacuuucu

SEQ ID NO: 152984 - RNA, 19 nt, Artificial Sequence
  Description of Artificial Sequence: Synthetic oligonucleotide
agguaagucuuugggucau

SEQ ID NO: 152985 - RNA, 19 nt, Artificial Sequence
  Description of Artificial Sequence: Synthetic oligonucleotide
ccuagacggucauucucag

SEQ ID NO: 152986 - RNA, 19 nt, Artificial Sequence
  Description of Artificial Sequence: Synthetic oligonucleotide
ccccugcccaucacgaagg

SEQ ID NO: 152987 - RNA, 19 nt, Artificial Sequence
  Description of Artificial Sequence: Synthetic oligonucleotide
cuguuacgggucucaagaa

SEQ ID NO: 152988 - RNA, 19 nt, Artificial Sequence
  Description of Artificial Sequence: Synthetic oligonucleotide
cugcacucacuuaguaaaa

SEQ ID NO: 152989 - RNA, 19 nt, Artificial Sequence
  Description of Artificial Sequence: Synthetic oligonucleotide
cauuuggggacguggcugu

SEQ ID NO: 152990 - RNA, 19 nt, Artificial Sequence
  Description of Artificial Sequence: Synthetic oligonucleotide
aucugacaaacuggauuau

SEQ ID NO: 152991 - RNA, 19 nt, Artificial Sequence
  Description of Artificial Sequence: Synthetic oligonucleotide
guucgcucaucaucaaaau

SEQ ID NO: 152992 - RNA, 19 nt, Artificial Sequence
  Description of Artificial Sequence: Synthetic oligonucleotide
caugucgccuucccuugca

SEQ ID NO: 152993 - RNA, 19 nt, Artificial Sequence
  Description of Artificial Sequence: Synthetic oligonucleotide
gccuagacggucauucuca

SEQ ID NO: 152994 - RNA, 19 nt, Artificial Sequence
  Description of Artificial Sequence: Synthetic oligonucleotide
ggagcccaccaugauuucc

SEQ ID NO: 152995 - RNA, 19 nt, Artificial Sequence
  Description of Artificial Sequence: Synthetic oligonucleotide
guaaccgagugcugucaua

SEQ ID NO: 152996 - RNA, 19 nt, Artificial Sequence
  Description of Artificial Sequence: Synthetic oligonucleotide
caaacgccaacuggaaucu

SEQ ID NO: 152997 - RNA, 19 nt, Artificial Sequence
  Description of Artificial Sequence: Synthetic oligonucleotide
accucacuacauagcugag

SEQ ID NO: 152998 - RNA, 19 nt, Artificial Sequence
  Description of Artificial Sequence: Synthetic oligonucleotide
gacugugagggaucaucau

SEQ ID NO: 152999 - RNA, 19 nt, Artificial Sequence
  Description of Artificial Sequence: Synthetic oligonucleotide
cuacuugaccuacugccau

SEQ ID NO: 153000 - RNA, 19 nt, Artificial Sequence
  Description of Artificial Sequence: Synthetic oligonucleotide
caucacgaaggcuucuuuu

SEQ ID NO: 153001 - RNA, 19 nt, Artificial Sequence
  Description of Artificial Sequence: Synthetic oligonucleotide
gcauaucagaauggcagaa

SEQ ID NO: 153002 - RNA, 19 nt, Artificial Sequence
  Description of Artificial Sequence: Synthetic oligonucleotide
guuacagcuucugaaccuu

SEQ ID NO: 153003 - RNA, 19 nt, Artificial Sequence
  Description of Artificial Sequence: Synthetic oligonucleotide
gcugacaguaagucuuugu

SEQ ID NO: 153004 - RNA, 19 nt, Artificial Sequence
  Description of Artificial Sequence: Synthetic oligonucleotide
gccugcacucacuuaguaa

SEQ ID NO: 153005 - RNA, 19 nt, Artificial Sequence
  Description of Artificial Sequence: Synthetic oligonucleotide
guggauuggcaugucgccu

SEQ ID NO: 153006 - RNA, 19 nt, Artificial Sequence
  Description of Artificial Sequence: Synthetic oligonucleotide
ccacuaccagccacuguug

SEQ ID NO: 153007 - RNA, 19 nt, Artificial Sequence
  Description of Artificial Sequence: Synthetic oligonucleotide
ggaucaucauuggaagacu

SEQ ID NO: 153008 - RNA, 19 nt, Artificial Sequence
  Description of Artificial Sequence: Synthetic oligonucleotide
ggauuggcaugucgccuuc

SEQ ID NO: 153009 - RNA, 19 nt, Artificial Sequence
  Description of Artificial Sequence: Synthetic oligonucleotide
gcaugucgccuucccuugc

SEQ ID NO: 153010 - RNA, 19 nt, Artificial Sequence
  Description of Artificial Sequence: Synthetic oligonucleotide
cgggucucaagaacucuac

SEQ ID NO: 153011 - RNA, 19 nt, Artificial Sequence
  Description of Artificial Sequence: Synthetic oligonucleotide
cacuaccagccacuguugu

SEQ ID NO: 153012 - RNA, 19 nt, Artificial Sequence
  Description of Artificial Sequence: Synthetic oligonucleotide
gcaucacuuauuaguggaa

SEQ ID NO: 153013 - RNA, 19 nt, Artificial Sequence
  Description of Artificial Sequence: Synthetic oligonucleotide
ccagaagucccaaauuauu

SEQ ID NO: 153014 - RNA, 19 nt, Artificial Sequence
  Description of Artificial Sequence: Synthetic oligonucleotide
gccgagguaggaggauugc

SEQ ID NO: 153015 - RNA, 19 nt, Artificial Sequence
  Description of Artificial Sequence: Synthetic oligonucleotide
accuaagcgcucaguuaua

SEQ ID NO: 153016 - RNA, 19 nt, Artificial Sequence
  Description of Artificial Sequence: Synthetic oligonucleotide
ccuaagcgcucaguuauaa

SEQ ID NO: 153017 - RNA, 19 nt, Artificial Sequence
  Description of Artificial Sequence: Synthetic oligonucleotide
ccauaaguagaagcuuaaa

SEQ ID NO: 153018 - RNA, 19 nt, Artificial Sequence
  Description of Artificial Sequence: Synthetic oligonucleotide
gguggacaugacaccucca

SEQ ID NO: 153019 - RNA, 19 nt, Artificial Sequence
  Description of Artificial Sequence: Synthetic oligonucleotide
gccugagaauuuccuuaaa

SEQ ID NO: 153020 - RNA, 19 nt, Artificial Sequence
  Description of Artificial Sequence: Synthetic oligonucleotide
cugagggaugaggccuaga

SEQ ID NO: 153021 - RNA, 19 nt, Artificial Sequence
  Description of Artificial Sequence: Synthetic oligonucleotide
ccgagguaggaggauugca

SEQ ID NO: 153022 - RNA, 19 nt, Artificial Sequence
  Description of Artificial Sequence: Synthetic oligonucleotide
ccaucaugccugagaauuu

SEQ ID NO: 153023 - RNA, 19 nt, Artificial Sequence
  Description of Artificial Sequence: Synthetic oligonucleotide
ggauucuauucagcacgau

SEQ ID NO: 153024 - RNA, 19 nt, Artificial Sequence
  Description of Artificial Sequence: Synthetic oligonucleotide
gcucguggauuggcauguc

SEQ ID NO: 153025 - RNA, 19 nt, Artificial Sequence
  Description of Artificial Sequence: Synthetic oligonucleotide
ccaucacgaaggcuucuuu

SEQ ID NO: 153026 - RNA, 19 nt, Artificial Sequence
  Description of Artificial Sequence: Synthetic oligonucleotide
aauuauuagaauuaugccc

SEQ ID NO: 153027 - RNA, 19 nt, Artificial Sequence
  Description of Artificial Sequence: Synthetic oligonucleotide
uuaauuauuagaauuaugc

SEQ ID NO: 153028 - RNA, 19 nt, Artificial Sequence
  Description of Artificial Sequence: Synthetic oligonucleotide
ucuuagauaggacacaugg

SEQ ID NO: 153029 - RNA, 19 nt, Artificial Sequence
  Description of Artificial Sequence: Synthetic oligonucleotide
aucaguuagaagcagagcc

SEQ ID NO: 153030 - RNA, 19 nt, Artificial Sequence
  Description of Artificial Sequence: Synthetic oligonucleotide
uguucuaaaagcaagugcc

SEQ ID NO: 153031 - RNA, 19 nt, Artificial Sequence
  Description of Artificial Sequence: Synthetic oligonucleotide
uguaaaaccagcuugugga

SEQ ID NO: 153032 - RNA, 19 nt, Artificial Sequence
  Description of Artificial Sequence: Synthetic oligonucleotide
uuagauaggacacaugggu

SEQ ID NO: 153033 - RNA, 19 nt, Artificial Sequence
  Description of Artificial Sequence: Synthetic oligonucleotide
ucagagaccgccaaguccg

SEQ ID NO: 153034 - RNA, 19 nt, Artificial Sequence
  Description of Artificial Sequence: Synthetic oligonucleotide
aacuucucuagcaauaagc

SEQ ID NO: 153035 - RNA, 19 nt, Artificial Sequence
  Description of Artificial Sequence: Synthetic oligonucleotide
ugacuagugaagcaguugg

SEQ ID NO: 153036 - RNA, 19 nt, Artificial Sequence
  Description of Artificial Sequence: Synthetic oligonucleotide
uaauuauuagaauuaugcc

SEQ ID NO: 153037 - RNA, 19 nt, Artificial Sequence
  Description of Artificial Sequence: Synthetic oligonucleotide
uauauucccaagaacaaga

SEQ ID NO: 153038 - RNA, 19 nt, Artificial Sequence
  Description of Artificial Sequence: Synthetic oligonucleotide
agaacuagccauucugucc

SEQ ID NO: 153039 - RNA, 19 nt, Artificial Sequence
  Description of Artificial Sequence: Synthetic oligonucleotide
agcaauuuugggcacaaac

SEQ ID NO: 153040 - RNA, 19 nt, Artificial Sequence
  Description of Artificial Sequence: Synthetic oligonucleotide
uguacuaaagcuucguuga

SEQ ID NO: 153041 - RNA, 19 nt, Artificial Sequence
  Description of Artificial Sequence: Synthetic oligonucleotide
agcacauauacucagaggu

SEQ ID NO: 153042 - RNA, 19 nt, Artificial Sequence
  Description of Artificial Sequence: Synthetic oligonucleotide
agugaguaucucuugacac

SEQ ID NO: 153043 - RNA, 19 nt, Artificial Sequence
  Description of Artificial Sequence: Synthetic oligonucleotide
aaugagcacauauacucag

SEQ ID NO: 153044 - RNA, 19 nt, Artificial Sequence
  Description of Artificial Sequence: Synthetic oligonucleotide
uccauuaccuccuugcucc

SEQ ID NO: 153045 - RNA, 19 nt, Artificial Sequence
  Description of Artificial Sequence: Synthetic oligonucleotide
aacaauguuuucuucggcu

SEQ ID NO: 153046 - RNA, 19 nt, Artificial Sequence
  Description of Artificial Sequence: Synthetic oligonucleotide
auuauuagaauuaugccca

SEQ ID NO: 153047 - RNA, 19 nt, Artificial Sequence
  Description of Artificial Sequence: Synthetic oligonucleotide
ggaagugagccauagagcg

SEQ ID NO: 153048 - RNA, 19 nt, Artificial Sequence
  Description of Artificial Sequence: Synthetic oligonucleotide
aagaacuagccauucuguc

SEQ ID NO: 153049 - RNA, 19 nt, Artificial Sequence
  Description of Artificial Sequence: Synthetic oligonucleotide
uggauuuuggccacucugg

SEQ ID NO: 153050 - RNA, 19 nt, Artificial Sequence
  Description of Artificial Sequence: Synthetic oligonucleotide
ugcaaagauguauuucugg

SEQ ID NO: 153051 - RNA, 19 nt, Artificial Sequence
  Description of Artificial Sequence: Synthetic oligonucleotide
uguuaagugacaucuguac

SEQ ID NO: 153052 - RNA, 19 nt, Artificial Sequence
  Description of Artificial Sequence: Synthetic oligonucleotide
aacucaucuaagcagggga

SEQ ID NO: 153053 - RNA, 19 nt, Artificial Sequence
  Description of Artificial Sequence: Synthetic oligonucleotide
caggauacuagcaggaucc

SEQ ID NO: 153054 - RNA, 19 nt, Artificial Sequence
  Description of Artificial Sequence: Synthetic oligonucleotide
aaagugacuugugggaggc

SEQ ID NO: 153055 - RNA, 19 nt, Artificial Sequence
  Description of Artificial Sequence: Synthetic oligonucleotide
auugccacuaguccuuacc

SEQ ID NO: 153056 - RNA, 19 nt, Artificial Sequence
  Description of Artificial Sequence: Synthetic oligonucleotide
cucgaagccacucaguucc

SEQ ID NO: 153057 - RNA, 19 nt, Artificial Sequence
  Description of Artificial Sequence: Synthetic oligonucleotide
ugagcacauauacucagag

SEQ ID NO: 153058 - RNA, 19 nt, Artificial Sequence
  Description of Artificial Sequence: Synthetic oligonucleotide
uuauuggaaguguuaagug

SEQ ID NO: 153059 - RNA, 19 nt, Artificial Sequence
  Description of Artificial Sequence: Synthetic oligonucleotide
agagcggauaacucgggcc

SEQ ID NO: 153060 - RNA, 19 nt, Artificial Sequence
  Description of Artificial Sequence: Synthetic oligonucleotide
cauagagcggauaacucgg

SEQ ID NO: 153061 - RNA, 19 nt, Artificial Sequence
  Description of Artificial Sequence: Synthetic oligonucleotide
ucuaagcaggggaagaucu

SEQ ID NO: 153062 - RNA, 19 nt, Artificial Sequence
  Description of Artificial Sequence: Synthetic oligonucleotide
agaaaugccuaugaguuuc

SEQ ID NO: 153063 - RNA, 19 nt, Artificial Sequence
  Description of Artificial Sequence: Synthetic oligonucleotide
acuacgguggcgcaucagc

SEQ ID NO: 153064 - RNA, 19 nt, Artificial Sequence
  Description of Artificial Sequence: Synthetic oligonucleotide
aauguggugcaccuccguc

SEQ ID NO: 153065 - RNA, 19 nt, Artificial Sequence
  Description of Artificial Sequence: Synthetic oligonucleotide
aacaagaagagaacauuuc

SEQ ID NO: 153066 - RNA, 19 nt, Artificial Sequence
  Description of Artificial Sequence: Synthetic oligonucleotide
ucuagcaauaagcuucuga

SEQ ID NO: 153067 - RNA, 19 nt, Artificial Sequence
  Description of Artificial Sequence: Synthetic oligonucleotide
aaugccuaugaguuuccag

SEQ ID NO: 153068 - RNA, 19 nt, Artificial Sequence
  Description of Artificial Sequence: Synthetic oligonucleotide
agaauuaugcccaaaagaa

SEQ ID NO: 153069 - RNA, 19 nt, Artificial Sequence
  Description of Artificial Sequence: Synthetic oligonucleotide
aaugacuccguggagggag

SEQ ID NO: 153070 - RNA, 19 nt, Artificial Sequence
  Description of Artificial Sequence: Synthetic oligonucleotide
acuugcaugaaauauuaaa

SEQ ID NO: 153071 - RNA, 19 nt, Artificial Sequence
  Description of Artificial Sequence: Synthetic oligonucleotide
uugggcacaaacaaucaca

SEQ ID NO: 153072 - RNA, 19 nt, Artificial Sequence
  Description of Artificial Sequence: Synthetic oligonucleotide
aucaugaaugacuccgugg

SEQ ID NO: 153073 - RNA, 19 nt, Artificial Sequence
  Description of Artificial Sequence: Synthetic oligonucleotide
ugugcaaauuuguuggucu

SEQ ID NO: 153074 - RNA, 19 nt, Artificial Sequence
  Description of Artificial Sequence: Synthetic oligonucleotide
uguuugauugccacuaguc

SEQ ID NO: 153075 - RNA, 19 nt, Artificial Sequence
  Description of Artificial Sequence: Synthetic oligonucleotide
guuaccacacccuggagcc

SEQ ID NO: 153076 - RNA, 19 nt, Artificial Sequence
  Description of Artificial Sequence: Synthetic oligonucleotide
cuuagauaggacacauggg

SEQ ID NO: 153077 - RNA, 19 nt, Artificial Sequence
  Description of Artificial Sequence: Synthetic oligonucleotide
cauccaguuauuucguucc

SEQ ID NO: 153078 - RNA, 19 nt, Artificial Sequence
  Description of Artificial Sequence: Synthetic oligonucleotide
aacgucuaucuucaguucu

SEQ ID NO: 153079 - RNA, 19 nt, Artificial Sequence
  Description of Artificial Sequence: Synthetic oligonucleotide
aaacgucuaucuucaguuc

SEQ ID NO: 153080 - RNA, 19 nt, Artificial Sequence
  Description of Artificial Sequence: Synthetic oligonucleotide
uuuauuuguuugcuuggga

SEQ ID NO: 153081 - RNA, 19 nt, Artificial Sequence
  Description of Artificial Sequence: Synthetic oligonucleotide
auaacugaaggcuucuggu

SEQ ID NO: 153082 - RNA, 19 nt, Artificial Sequence
  Description of Artificial Sequence: Synthetic oligonucleotide
ugacaucuguacuaaagcu

SEQ ID NO: 153083 - RNA, 19 nt, Artificial Sequence
  Description of Artificial Sequence: Synthetic oligonucleotide
uggauguuagccaacuccu

SEQ ID NO: 153084 - RNA, 19 nt, Artificial Sequence
  Description of Artificial Sequence: Synthetic oligonucleotide
agaaacaugccucucuccu

SEQ ID NO: 153085 - RNA, 19 nt, Artificial Sequence
  Description of Artificial Sequence: Synthetic oligonucleotide
guuauuucguuccuccuug

SEQ ID NO: 153086 - RNA, 19 nt, Artificial Sequence
  Description of Artificial Sequence: Synthetic oligonucleotide
aacccaacaucaucaaaca

SEQ ID NO: 153087 - RNA, 19 nt, Artificial Sequence
  Description of Artificial Sequence: Synthetic oligonucleotide
gauacagcucaucggaaug

SEQ ID NO: 153088 - RNA, 19 nt, Artificial Sequence
  Description of Artificial Sequence: Synthetic oligonucleotide
cuugggaaacaauaaauga

SEQ ID NO: 153089 - RNA, 19 nt, Artificial Sequence
  Description of Artificial Sequence: Synthetic oligonucleotide
cuguacuaaagcuucguug

SEQ ID NO: 153090 - RNA, 19 nt, Artificial Sequence
  Description of Artificial Sequence: Synthetic oligonucleotide
ugagccauagagcggauaa

SEQ ID NO: 153091 - RNA, 19 nt, Artificial Sequence
  Description of Artificial Sequence: Synthetic oligonucleotide
guagggaugaguucucugc

SEQ ID NO: 153092 - RNA, 19 nt, Artificial Sequence
  Description of Artificial Sequence: Synthetic oligonucleotide
cuguaaaaccagcuugugg

SEQ ID NO: 153093 - RNA, 19 nt, Artificial Sequence
  Description of Artificial Sequence: Synthetic oligonucleotide
gcuucguugauguaaaaug

SEQ ID NO: 153094 - RNA, 19 nt, Artificial Sequence
  Description of Artificial Sequence: Synthetic oligonucleotide
ucuugguuagugaguaucu

SEQ ID NO: 153095 - RNA, 19 nt, Artificial Sequence
  Description of Artificial Sequence: Synthetic oligonucleotide
acuaguccuuaccaaauca

SEQ ID NO: 153096 - RNA, 19 nt, Artificial Sequence
  Description of Artificial Sequence: Synthetic oligonucleotide
uagugaguaucucuugaca

SEQ ID NO: 153097 - RNA, 19 nt, Artificial Sequence
  Description of Artificial Sequence: Synthetic oligonucleotide
uugguuagugaguaucucu

SEQ ID NO: 153098 - RNA, 19 nt, Artificial Sequence
  Description of Artificial Sequence: Synthetic oligonucleotide
ugaguaucucuugacacug

SEQ ID NO: 153099 - RNA, 19 nt, Artificial Sequence
  Description of Artificial Sequence: Synthetic oligonucleotide
gccucauccaguuauuucg

SEQ ID NO: 153100 - RNA, 19 nt, Artificial Sequence
  Description of Artificial Sequence: Synthetic oligonucleotide
gauguuagccaacuccuca

SEQ ID NO: 153101 - RNA, 19 nt, Artificial Sequence
  Description of Artificial Sequence: Synthetic oligonucleotide
uuagugaguaucucuugac

SEQ ID NO: 153102 - RNA, 19 nt, Artificial Sequence
  Description of Artificial Sequence: Synthetic oligonucleotide
agaaacgucuaucuucagu

SEQ ID NO: 153103 - RNA, 19 nt, Artificial Sequence
  Description of Artificial Sequence: Synthetic oligonucleotide
gaaggguccaccacgagac

SEQ ID NO: 153104 - RNA, 19 nt, Artificial Sequence
  Description of Artificial Sequence: Synthetic oligonucleotide
uuugggcacaaacaaucac

SEQ ID NO: 153105 - RNA, 19 nt, Artificial Sequence
  Description of Artificial Sequence: Synthetic oligonucleotide
gauuuaguuccauuaccuc

SEQ ID NO: 153106 - RNA, 19 nt, Artificial Sequence
  Description of Artificial Sequence: Synthetic oligonucleotide
uucguugauguaaaaugaa

SEQ ID NO: 153107 - RNA, 19 nt, Artificial Sequence
  Description of Artificial Sequence: Synthetic oligonucleotide
aggcuugaugagcaggugg

SEQ ID NO: 153108 - RNA, 19 nt, Artificial Sequence
  Description of Artificial Sequence: Synthetic oligonucleotide
uccguuaccacacccugga

SEQ ID NO: 153109 - RNA, 19 nt, Artificial Sequence
  Description of Artificial Sequence: Synthetic oligonucleotide
aagugagccauagagcgga

SEQ ID NO: 153110 - RNA, 19 nt, Artificial Sequence
  Description of Artificial Sequence: Synthetic oligonucleotide
ucguugauguaaaaugaau

SEQ ID NO: 153111 - RNA, 19 nt, Artificial Sequence
  Description of Artificial Sequence: Synthetic oligonucleotide
caaagugacuugugggagg

SEQ ID NO: 153112 - RNA, 19 nt, Artificial Sequence
  Description of Artificial Sequence: Synthetic oligonucleotide
ugaauguggugcaccuccg

SEQ ID NO: 153113 - RNA, 19 nt, Artificial Sequence
  Description of Artificial Sequence: Synthetic oligonucleotide
cuucguugauguaaaauga

SEQ ID NO: 153114 - RNA, 19 nt, Artificial Sequence
  Description of Artificial Sequence: Synthetic oligonucleotide
uggcuaugggccaagcucu

SEQ ID NO: 153115 - RNA, 19 nt, Artificial Sequence
  Description of Artificial Sequence: Synthetic oligonucleotide
gagcggauaacucgggccc

SEQ ID NO: 153116 - RNA, 19 nt, Artificial Sequence
  Description of Artificial Sequence: Synthetic oligonucleotide
uuauuucguuccuccuugg

SEQ ID NO: 153117 - RNA, 19 nt, Artificial Sequence
  Description of Artificial Sequence: Synthetic oligonucleotide
cucgauuuaguuccauuac

SEQ ID NO: 153118 - RNA, 19 nt, Artificial Sequence
  Description of Artificial Sequence: Synthetic oligonucleotide
uugccacuaguccuuacca

SEQ ID NO: 153119 - RNA, 19 nt, Artificial Sequence
  Description of Artificial Sequence: Synthetic oligonucleotide
gcaucuugugaacugagcc

SEQ ID NO: 153120 - RNA, 19 nt, Artificial Sequence
  Description of Artificial Sequence: Synthetic oligonucleotide
gaaacgucuaucuucaguu

SEQ ID NO: 153121 - RNA, 19 nt, Artificial Sequence
  Description of Artificial Sequence: Synthetic oligonucleotide
uggcuuacaucacccaucu

SEQ ID NO: 153122 - RNA, 19 nt, Artificial Sequence
  Description of Artificial Sequence: Synthetic oligonucleotide
cucgauguggcuguccugg

SEQ ID NO: 153123 - RNA, 19 nt, Artificial Sequence
  Description of Artificial Sequence: Synthetic oligonucleotide
ugcaucuugugaacugagc

SEQ ID NO: 153124 - RNA, 19 nt, Artificial Sequence
  Description of Artificial Sequence: Synthetic oligonucleotide
uuaaagcaauuuugggcac

SEQ ID NO: 153125 - RNA, 19 nt, Artificial Sequence
  Description of Artificial Sequence: Synthetic oligonucleotide
agaucuuguccacugugcu

SEQ ID NO: 153126 - RNA, 19 nt, Artificial Sequence
  Description of Artificial Sequence: Synthetic oligonucleotide
gaguucucugcagugagug

SEQ ID NO: 153127 - RNA, 19 nt, Artificial Sequence
  Description of Artificial Sequence: Synthetic oligonucleotide
uucuauauuccaccuucuc

SEQ ID NO: 153128 - RNA, 19 nt, Artificial Sequence
  Description of Artificial Sequence: Synthetic oligonucleotide
guaucgggauuucuccugg

SEQ ID NO: 153129 - RNA, 19 nt, Artificial Sequence
  Description of Artificial Sequence: Synthetic oligonucleotide
uacuaaagcuucguugaug

SEQ ID NO: 153130 - RNA, 19 nt, Artificial Sequence
  Description of Artificial Sequence: Synthetic oligonucleotide
ugcugcugaauagagacuc

SEQ ID NO: 153131 - RNA, 19 nt, Artificial Sequence
  Description of Artificial Sequence: Synthetic oligonucleotide
ugguguggauuucauacau

SEQ ID NO: 153132 - RNA, 19 nt, Artificial Sequence
  Description of Artificial Sequence: Synthetic oligonucleotide
uguagggaugaguucucug

SEQ ID NO: 153133 - RNA, 19 nt, Artificial Sequence
  Description of Artificial Sequence: Synthetic oligonucleotide
ucauacaucuccgggccag

SEQ ID NO: 153134 - RNA, 19 nt, Artificial Sequence
  Description of Artificial Sequence: Synthetic oligonucleotide
ugccuaugaguuuccagca

SEQ ID NO: 153135 - RNA, 19 nt, Artificial Sequence
  Description of Artificial Sequence: Synthetic oligonucleotide
acggguuaaauucuguauu

SEQ ID NO: 153136 - RNA, 19 nt, Artificial Sequence
  Description of Artificial Sequence: Synthetic oligonucleotide
ugauacagcucaucggaau

SEQ ID NO: 153137 - RNA, 19 nt, Artificial Sequence
  Description of Artificial Sequence: Synthetic oligonucleotide
aguuauuucguuccuccuu

SEQ ID NO: 153138 - RNA, 19 nt, Artificial Sequence
  Description of Artificial Sequence: Synthetic oligonucleotide
cuagugaagcaguugguga

SEQ ID NO: 153139 - RNA, 19 nt, Artificial Sequence
  Description of Artificial Sequence: Synthetic oligonucleotide
ucuuccaaauaugugcaaa

SEQ ID NO: 153140 - RNA, 19 nt, Artificial Sequence
  Description of Artificial Sequence: Synthetic oligonucleotide
ggaaacaauaaaugagcac

SEQ ID NO: 153141 - RNA, 19 nt, Artificial Sequence
  Description of Artificial Sequence: Synthetic oligonucleotide
ucacuacugaggucgcucc

SEQ ID NO: 153142 - RNA, 19 nt, Artificial Sequence
  Description of Artificial Sequence: Synthetic oligonucleotide
guggcuaugggccaagcuc

SEQ ID NO: 153143 - RNA, 19 nt, Artificial Sequence
  Description of Artificial Sequence: Synthetic oligonucleotide
agcucaucggaaugagauc

SEQ ID NO: 153144 - RNA, 19 nt, Artificial Sequence
  Description of Artificial Sequence: Synthetic oligonucleotide
aucacuacugaggucgcuc

SEQ ID NO: 153145 - RNA, 19 nt, Artificial Sequence
  Description of Artificial Sequence: Synthetic oligonucleotide
ucucagcucgauuuaguuc

SEQ ID NO: 153146 - RNA, 19 nt, Artificial Sequence
  Description of Artificial Sequence: Synthetic oligonucleotide
cauauacucagagguaaac

SEQ ID NO: 153147 - RNA, 19 nt, Artificial Sequence
  Description of Artificial Sequence: Synthetic oligonucleotide
uccaguucacuacgguggc

SEQ ID NO: 153148 - RNA, 19 nt, Artificial Sequence
  Description of Artificial Sequence: Synthetic oligonucleotide
guuagccaacuccucacgc

SEQ ID NO: 153149 - RNA, 19 nt, Artificial Sequence
  Description of Artificial Sequence: Synthetic oligonucleotide
accugggaaacuucuauau

SEQ ID NO: 153150 - RNA, 19 nt, Artificial Sequence
  Description of Artificial Sequence: Synthetic oligonucleotide
ucucagagauccacagugu

SEQ ID NO: 153151 - RNA, 19 nt, Artificial Sequence
  Description of Artificial Sequence: Synthetic oligonucleotide
gaagugagccauagagcgg

SEQ ID NO: 153152 - RNA, 19 nt, Artificial Sequence
  Description of Artificial Sequence: Synthetic oligonucleotide
uggaccuggggauucacuc

SEQ ID NO: 153153 - RNA, 19 nt, Artificial Sequence
  Description of Artificial Sequence: Synthetic oligonucleotide
uaugugcaaauuuguuggu

SEQ ID NO: 153154 - RNA, 19 nt, Artificial Sequence
  Description of Artificial Sequence: Synthetic oligonucleotide
aguccguuaccacacccug

SEQ ID NO: 153155 - RNA, 19 nt, Artificial Sequence
  Description of Artificial Sequence: Synthetic oligonucleotide
ucuguacuaaagcuucguu

SEQ ID NO: 153156 - RNA, 19 nt, Artificial Sequence
  Description of Artificial Sequence: Synthetic oligonucleotide
ugcaaauuuguuggucuug

SEQ ID NO: 153157 - RNA, 19 nt, Artificial Sequence
  Description of Artificial Sequence: Synthetic oligonucleotide
acuacugaggucgcuccac

SEQ ID NO: 153158 - RNA, 19 nt, Artificial Sequence
  Description of Artificial Sequence: Synthetic oligonucleotide
uagagcggauaacucgggc

SEQ ID NO: 153159 - RNA, 19 nt, Artificial Sequence
  Description of Artificial Sequence: Synthetic oligonucleotide
accacgagacuccaagacu

SEQ ID NO: 153160 - RNA, 19 nt, Artificial Sequence
  Description of Artificial Sequence: Synthetic oligonucleotide
agaccgccaaguccguuac

SEQ ID NO: 153161 - RNA, 19 nt, Artificial Sequence
  Description of Artificial Sequence: Synthetic oligonucleotide
uugguuuauuggaaguguu

SEQ ID NO: 153162 - RNA, 19 nt, Artificial Sequence
  Description of Artificial Sequence: Synthetic oligonucleotide
augugcaaauuuguugguc

SEQ ID NO: 153163 - RNA, 19 nt, Artificial Sequence
  Description of Artificial Sequence: Synthetic oligonucleotide
agcuuguggauguuagcca

SEQ ID NO: 153164 - RNA, 19 nt, Artificial Sequence
  Description of Artificial Sequence: Synthetic oligonucleotide
aaagcaauuuugggcacaa

SEQ ID NO: 153165 - RNA, 19 nt, Artificial Sequence
  Description of Artificial Sequence: Synthetic oligonucleotide
uggugcaucuugugaacug

SEQ ID NO: 153166 - RNA, 19 nt, Artificial Sequence
  Description of Artificial Sequence: Synthetic oligonucleotide
gcaaauuuguuggucuugg

SEQ ID NO: 153167 - RNA, 19 nt, Artificial Sequence
  Description of Artificial Sequence: Synthetic oligonucleotide
ucaucggaaugagaucugc

SEQ ID NO: 153168 - RNA, 19 nt, Artificial Sequence
  Description of Artificial Sequence: Synthetic oligonucleotide
uaaagcaauuuugggcaca

SEQ ID NO: 153169 - RNA, 19 nt, Artificial Sequence
  Description of Artificial Sequence: Synthetic oligonucleotide
ugaguaucuguggcugagg

SEQ ID NO: 153170 - RNA, 19 nt, Artificial Sequence
  Description of Artificial Sequence: Synthetic oligonucleotide
ggugguccaguucacuacg

SEQ ID NO: 153171 - RNA, 19 nt, Artificial Sequence
  Description of Artificial Sequence: Synthetic oligonucleotide
guagauaugcagcuuuucu

SEQ ID NO: 153172 - RNA, 19 nt, Artificial Sequence
  Description of Artificial Sequence: Synthetic oligonucleotide
cugcaaagauguauuucug

SEQ ID NO: 153173 - RNA, 19 nt, Artificial Sequence
  Description of Artificial Sequence: Synthetic oligonucleotide
cuggcuuacaucacccauc

SEQ ID NO: 153174 - RNA, 19 nt, Artificial Sequence
  Description of Artificial Sequence: Synthetic oligonucleotide
ugugacuagugaagcaguu

SEQ ID NO: 153175 - RNA, 19 nt, Artificial Sequence
  Description of Artificial Sequence: Synthetic oligonucleotide
uaugaguuuccagcaacuc

SEQ ID NO: 153176 - RNA, 19 nt, Artificial Sequence
  Description of Artificial Sequence: Synthetic oligonucleotide
uauacaggagacggguuaa

SEQ ID NO: 153177 - RNA, 19 nt, Artificial Sequence
  Description of Artificial Sequence: Synthetic oligonucleotide
caguucacuacgguggcgc

SEQ ID NO: 153178 - RNA, 19 nt, Artificial Sequence
  Description of Artificial Sequence: Synthetic oligonucleotide
caaguccguuaccacaccc

SEQ ID NO: 153179 - RNA, 19 nt, Artificial Sequence
  Description of Artificial Sequence: Synthetic oligonucleotide
caugaaugacuccguggag

SEQ ID NO: 153180 - RNA, 19 nt, Artificial Sequence
  Description of Artificial Sequence: Synthetic oligonucleotide
gaugaguucucugcaguga

SEQ ID NO: 153181 - RNA, 19 nt, Artificial Sequence
  Description of Artificial Sequence: Synthetic oligonucleotide
cagacgaugcacugaucag

SEQ ID NO: 153182 - RNA, 19 nt, Artificial Sequence
  Description of Artificial Sequence: Synthetic oligonucleotide
uaaaaccagcuuguggauc

SEQ ID NO: 153183 - RNA, 19 nt, Artificial Sequence
  Description of Artificial Sequence: Synthetic oligonucleotide
uacugaggucgcuccacag

SEQ ID NO: 153184 - RNA, 19 nt, Artificial Sequence
  Description of Artificial Sequence: Synthetic oligonucleotide
augccucucuccucguuag

SEQ ID NO: 153185 - RNA, 19 nt, Artificial Sequence
  Description of Artificial Sequence: Synthetic oligonucleotide
uccccaaagugccaguguu

SEQ ID NO: 153186 - RNA, 19 nt, Artificial Sequence
  Description of Artificial Sequence: Synthetic oligonucleotide
uuguggauguuagccaacu

SEQ ID NO: 153187 - RNA, 19 nt, Artificial Sequence
  Description of Artificial Sequence: Synthetic oligonucleotide
gccacuugcagacuuucag

SEQ ID NO: 153188 - RNA, 19 nt, Artificial Sequence
  Description of Artificial Sequence: Synthetic oligonucleotide
caaacucucagcucgauuu

SEQ ID NO: 153189 - RNA, 19 nt, Artificial Sequence
  Description of Artificial Sequence: Synthetic oligonucleotide
uuaugcccaaaagaaugaa

SEQ ID NO: 153190 - RNA, 19 nt, Artificial Sequence
  Description of Artificial Sequence: Synthetic oligonucleotide
caucaguuagaagcagagc

SEQ ID NO: 153191 - RNA, 19 nt, Artificial Sequence
  Description of Artificial Sequence: Synthetic oligonucleotide
cuaguccuuaccaaaucaa

SEQ ID NO: 153192 - RNA, 19 nt, Artificial Sequence
  Description of Artificial Sequence: Synthetic oligonucleotide
ugagggcucucuuguggag

SEQ ID NO: 153193 - RNA, 19 nt, Artificial Sequence
  Description of Artificial Sequence: Synthetic oligonucleotide
uguggauguuagccaacuc

SEQ ID NO: 153194 - RNA, 19 nt, Artificial Sequence
  Description of Artificial Sequence: Synthetic oligonucleotide
gguaucgggauuucuccug

SEQ ID NO: 153195 - RNA, 19 nt, Artificial Sequence
  Description of Artificial Sequence: Synthetic oligonucleotide
aaguccguuaccacacccu

SEQ ID NO: 153196 - RNA, 19 nt, Artificial Sequence
  Description of Artificial Sequence: Synthetic oligonucleotide
gauacuagcaggauccuuu

SEQ ID NO: 153197 - RNA, 19 nt, Artificial Sequence
  Description of Artificial Sequence: Synthetic oligonucleotide
agacggguuaaauucugua

SEQ ID NO: 153198 - RNA, 19 nt, Artificial Sequence
  Description of Artificial Sequence: Synthetic oligonucleotide
agguaucgggauuucuccu

SEQ ID NO: 153199 - RNA, 19 nt, Artificial Sequence
  Description of Artificial Sequence: Synthetic oligonucleotide
gaaaugccuaugaguuucc

SEQ ID NO: 153200 - RNA, 19 nt, Artificial Sequence
  Description of Artificial Sequence: Synthetic oligonucleotide
uauuagaauuaugcccaaa

SEQ ID NO: 153201 - RNA, 19 nt, Artificial Sequence
  Description of Artificial Sequence: Synthetic oligonucleotide
accugauggauuugguuua

SEQ ID NO: 153202 - RNA, 19 nt, Artificial Sequence
  Description of Artificial Sequence: Synthetic oligonucleotide
gcuuguauaaucucugacu

SEQ ID NO: 153203 - RNA, 19 nt, Artificial Sequence
  Description of Artificial Sequence: Synthetic oligonucleotide
caauaagcuucugaaguga

SEQ ID NO: 153204 - RNA, 19 nt, Artificial Sequence
  Description of Artificial Sequence: Synthetic oligonucleotide
gacggguuaaauucuguau

SEQ ID NO: 153205 - RNA, 19 nt, Artificial Sequence
  Description of Artificial Sequence: Synthetic oligonucleotide
aaaugccuaugaguuucca

SEQ ID NO: 153206 - RNA, 19 nt, Artificial Sequence
  Description of Artificial Sequence: Synthetic oligonucleotide
auacagcucaucggaauga

SEQ ID NO: 153207 - RNA, 19 nt, Artificial Sequence
  Description of Artificial Sequence: Synthetic oligonucleotide
uucacuacgguggcgcauc

SEQ ID NO: 153208 - RNA, 19 nt, Artificial Sequence
  Description of Artificial Sequence: Synthetic oligonucleotide
uccguggagggagaagagc

SEQ ID NO: 153209 - RNA, 19 nt, Artificial Sequence
  Description of Artificial Sequence: Synthetic oligonucleotide
gguuuauuggaaguguuaa

SEQ ID NO: 153210 - RNA, 19 nt, Artificial Sequence
  Description of Artificial Sequence: Synthetic oligonucleotide
cugccuacugcaaaaggaa

SEQ ID NO: 153211 - RNA, 19 nt, Artificial Sequence
  Description of Artificial Sequence: Synthetic oligonucleotide
gugaguaucuguggcugag

SEQ ID NO: 153212 - RNA, 19 nt, Artificial Sequence
  Description of Artificial Sequence: Synthetic oligonucleotide
agucgcucgaggcucugcu

SEQ ID NO: 153213 - RNA, 19 nt, Artificial Sequence
  Description of Artificial Sequence: Synthetic oligonucleotide
gugacuagugaagcaguug

SEQ ID NO: 153214 - RNA, 19 nt, Artificial Sequence
  Description of Artificial Sequence: Synthetic oligonucleotide
acaccugauggauuugguu

SEQ ID NO: 153215 - RNA, 19 nt, Artificial Sequence
  Description of Artificial Sequence: Synthetic oligonucleotide
gagaaacgucuaucuucag

SEQ ID NO: 153216 - RNA, 19 nt, Artificial Sequence
  Description of Artificial Sequence: Synthetic oligonucleotide
agcuucguugauguaaaau

SEQ ID NO: 153217 - RNA, 19 nt, Artificial Sequence
  Description of Artificial Sequence: Synthetic oligonucleotide
auagagcggauaacucggg

SEQ ID NO: 153218 - RNA, 19 nt, Artificial Sequence
  Description of Artificial Sequence: Synthetic oligonucleotide
accgccaaguccguuacca

SEQ ID NO: 153219 - RNA, 19 nt, Artificial Sequence
  Description of Artificial Sequence: Synthetic oligonucleotide
auacucagagguaaacaau

SEQ ID NO: 153220 - RNA, 19 nt, Artificial Sequence
  Description of Artificial Sequence: Synthetic oligonucleotide
agcggauaacucgggcccc

SEQ ID NO: 153221 - RNA, 19 nt, Artificial Sequence
  Description of Artificial Sequence: Synthetic oligonucleotide
cacuaguccuuaccaaauc

SEQ ID NO: 153222 - RNA, 19 nt, Artificial Sequence
  Description of Artificial Sequence: Synthetic oligonucleotide
ccuaugaguuuccagcaac

SEQ ID NO: 153223 - RNA, 19 nt, Artificial Sequence
  Description of Artificial Sequence: Synthetic oligonucleotide
ccugugauuggcacucacg

SEQ ID NO: 153224 - RNA, 19 nt, Artificial Sequence
  Description of Artificial Sequence: Synthetic oligonucleotide
uccgucugcaucaguucaa

SEQ ID NO: 153225 - RNA, 19 nt, Artificial Sequence
  Description of Artificial Sequence: Synthetic oligonucleotide
cuugguuagugaguaucuc

SEQ ID NO: 153226 - RNA, 19 nt, Artificial Sequence
  Description of Artificial Sequence: Synthetic oligonucleotide
gaaccugggaaacuucuau

SEQ ID NO: 153227 - RNA, 19 nt, Artificial Sequence
  Description of Artificial Sequence: Synthetic oligonucleotide
ucgggagaguuaguuuugc

SEQ ID NO: 153228 - RNA, 19 nt, Artificial Sequence
  Description of Artificial Sequence: Synthetic oligonucleotide
gaacugagccugucaguca

SEQ ID NO: 153229 - RNA, 19 nt, Artificial Sequence
  Description of Artificial Sequence: Synthetic oligonucleotide
gagaguuaguuuugcuucu

SEQ ID NO: 153230 - RNA, 19 nt, Artificial Sequence
  Description of Artificial Sequence: Synthetic oligonucleotide
cucaucggaaugagaucug

SEQ ID NO: 153231 - RNA, 19 nt, Artificial Sequence
  Description of Artificial Sequence: Synthetic oligonucleotide
ccacgagacuccaagacuc

SEQ ID NO: 153232 - RNA, 19 nt, Artificial Sequence
  Description of Artificial Sequence: Synthetic oligonucleotide
gugaguaucucuugacacu

SEQ ID NO: 153233 - RNA, 19 nt, Artificial Sequence
  Description of Artificial Sequence: Synthetic oligonucleotide
cugugauuggcacucacgu

SEQ ID NO: 153234 - RNA, 19 nt, Artificial Sequence
  Description of Artificial Sequence: Synthetic oligonucleotide
uggauggucaaggcagccu

SEQ ID NO: 153235 - RNA, 19 nt, Artificial Sequence
  Description of Artificial Sequence: Synthetic oligonucleotide
auccaguuauuucguuccu

SEQ ID NO: 153236 - RNA, 19 nt, Artificial Sequence
  Description of Artificial Sequence: Synthetic oligonucleotide
ggguucuagguggacaucc

SEQ ID NO: 153237 - RNA, 19 nt, Artificial Sequence
  Description of Artificial Sequence: Synthetic oligonucleotide
uggacugauacagcucauc

SEQ ID NO: 153238 - RNA, 19 nt, Artificial Sequence
  Description of Artificial Sequence: Synthetic oligonucleotide
auauucccaagaacaagaa

SEQ ID NO: 153239 - RNA, 19 nt, Artificial Sequence
  Description of Artificial Sequence: Synthetic oligonucleotide
caucuugugaacugagccu

SEQ ID NO: 153240 - RNA, 19 nt, Artificial Sequence
  Description of Artificial Sequence: Synthetic oligonucleotide
aguucagcguagauaugca

SEQ ID NO: 153241 - RNA, 19 nt, Artificial Sequence
  Description of Artificial Sequence: Synthetic oligonucleotide
ggacaccugauggauuugg

SEQ ID NO: 153242 - RNA, 19 nt, Artificial Sequence
  Description of Artificial Sequence: Synthetic oligonucleotide
gaggucgcuccacagggaa

SEQ ID NO: 153243 - RNA, 19 nt, Artificial Sequence
  Description of Artificial Sequence: Synthetic oligonucleotide
aguucacuacgguggcgca

SEQ ID NO: 153244 - RNA, 19 nt, Artificial Sequence
  Description of Artificial Sequence: Synthetic oligonucleotide
cagcucaucggaaugagau

SEQ ID NO: 153245 - RNA, 19 nt, Artificial Sequence
  Description of Artificial Sequence: Synthetic oligonucleotide
gauuggcacucacguuccc

SEQ ID NO: 153246 - RNA, 19 nt, Artificial Sequence
  Description of Artificial Sequence: Synthetic oligonucleotide
acgucuaucuucaguucug

SEQ ID NO: 153247 - RNA, 19 nt, Artificial Sequence
  Description of Artificial Sequence: Synthetic oligonucleotide
gacaucuguacuaaagcuu

SEQ ID NO: 153248 - RNA, 19 nt, Artificial Sequence
  Description of Artificial Sequence: Synthetic oligonucleotide
agacucacuuguccuuccu

SEQ ID NO: 153249 - RNA, 19 nt, Artificial Sequence
  Description of Artificial Sequence: Synthetic oligonucleotide
cuacgguggcgcaucagca

SEQ ID NO: 153250 - RNA, 19 nt, Artificial Sequence
  Description of Artificial Sequence: Synthetic oligonucleotide
uggugcaccuccgucugca

SEQ ID NO: 153251 - RNA, 19 nt, Artificial Sequence
  Description of Artificial Sequence: Synthetic oligonucleotide
caaguucagcguagauaug

SEQ ID NO: 153252 - RNA, 19 nt, Artificial Sequence
  Description of Artificial Sequence: Synthetic oligonucleotide
gcucgauuuaguuccauua

SEQ ID NO: 153253 - RNA, 19 nt, Artificial Sequence
  Description of Artificial Sequence: Synthetic oligonucleotide
ucgaagccacucaguuccc

SEQ ID NO: 153254 - RNA, 19 nt, Artificial Sequence
  Description of Artificial Sequence: Synthetic oligonucleotide
acucaucuaagcaggggaa

SEQ ID NO: 153255 - RNA, 19 nt, Artificial Sequence
  Description of Artificial Sequence: Synthetic oligonucleotide
cuaugaguuuccagcaacu

SEQ ID NO: 153256 - RNA, 19 nt, Artificial Sequence
  Description of Artificial Sequence: Synthetic oligonucleotide
cugcuggucgcacgugcgg

SEQ ID NO: 153257 - RNA, 19 nt, Artificial Sequence
  Description of Artificial Sequence: Synthetic oligonucleotide
aagcuucguugauguaaaa

SEQ ID NO: 153258 - RNA, 19 nt, Artificial Sequence
  Description of Artificial Sequence: Synthetic oligonucleotide
aggagacggguuaaauucu

SEQ ID NO: 153259 - RNA, 19 nt, Artificial Sequence
  Description of Artificial Sequence: Synthetic oligonucleotide
guccguuaccacacccugg

SEQ ID NO: 153260 - RNA, 19 nt, Artificial Sequence
  Description of Artificial Sequence: Synthetic oligonucleotide
gugcaucuugugaacugag

SEQ ID NO: 153261 - RNA, 19 nt, Artificial Sequence
  Description of Artificial Sequence: Synthetic oligonucleotide
gaguuaguuuugcuucugu

SEQ ID NO: 153262 - RNA, 19 nt, Artificial Sequence
  Description of Artificial Sequence: Synthetic oligonucleotide
uggaauugguguggauuuc

SEQ ID NO: 153263 - RNA, 19 nt, Artificial Sequence
  Description of Artificial Sequence: Synthetic oligonucleotide
caucgggagaguuaguuuu

SEQ ID NO: 153264 - RNA, 19 nt, Artificial Sequence
  Description of Artificial Sequence: Synthetic oligonucleotide
aucgggagaguuaguuuug

SEQ ID NO: 153265 - RNA, 19 nt, Artificial Sequence
  Description of Artificial Sequence: Synthetic oligonucleotide
ucacuacgguggcgcauca

SEQ ID NO: 153266 - RNA, 19 nt, Artificial Sequence
  Description of Artificial Sequence: Synthetic oligonucleotide
gucccuucugugacuagug

SEQ ID NO: 153267 - RNA, 19 nt, Artificial Sequence
  Description of Artificial Sequence: Synthetic oligonucleotide
agccaggauacuagcagga

SEQ ID NO: 153268 - RNA, 19 nt, Artificial Sequence
  Description of Artificial Sequence: Synthetic oligonucleotide
acauauacucagagguaaa

SEQ ID NO: 153269 - RNA, 19 nt, Artificial Sequence
  Description of Artificial Sequence: Synthetic oligonucleotide
gcgacugugucugcagugg

SEQ ID NO: 153270 - RNA, 19 nt, Artificial Sequence
  Description of Artificial Sequence: Synthetic oligonucleotide
ucgaggcucugcugguacu

SEQ ID NO: 153271 - RNA, 19 nt, Artificial Sequence
  Description of Artificial Sequence: Synthetic oligonucleotide
ccaggauacuagcaggauc

SEQ ID NO: 153272 - RNA, 19 nt, Artificial Sequence
  Description of Artificial Sequence: Synthetic oligonucleotide
gcccagucagaacagguuc

SEQ ID NO: 153273 - RNA, 19 nt, Artificial Sequence
  Description of Artificial Sequence: Synthetic oligonucleotide
cucggaaggaguggcuaug

SEQ ID NO: 153274 - RNA, 19 nt, Artificial Sequence
  Description of Artificial Sequence: Synthetic oligonucleotide
agacccaugugagggcucu

SEQ ID NO: 153275 - RNA, 19 nt, Artificial Sequence
  Description of Artificial Sequence: Synthetic oligonucleotide
gagccauagagcggauaac

SEQ ID NO: 153276 - RNA, 19 nt, Artificial Sequence
  Description of Artificial Sequence: Synthetic oligonucleotide
gguucuuagauaggacaca

SEQ ID NO: 153277 - RNA, 19 nt, Artificial Sequence
  Description of Artificial Sequence: Synthetic oligonucleotide
ggcgacugugucugcagug

SEQ ID NO: 153278 - RNA, 19 nt, Artificial Sequence
  Description of Artificial Sequence: Synthetic oligonucleotide
caagcucucccucugcugu

SEQ ID NO: 153279 - RNA, 19 nt, Artificial Sequence
  Description of Artificial Sequence: Synthetic oligonucleotide
cuaaaagcaagugccacuu

SEQ ID NO: 153280 - RNA, 19 nt, Artificial Sequence
  Description of Artificial Sequence: Synthetic oligonucleotide
ugcuggucgcacgugcggu

SEQ ID NO: 153281 - RNA, 19 nt, Artificial Sequence
  Description of Artificial Sequence: Synthetic oligonucleotide
ggccgcaagccucaccaag

SEQ ID NO: 153282 - RNA, 19 nt, Artificial Sequence
  Description of Artificial Sequence: Synthetic oligonucleotide
acucacguucccgcgcuug

SEQ ID NO: 153283 - RNA, 19 nt, Artificial Sequence
  Description of Artificial Sequence: Synthetic oligonucleotide
gauggucaaggcagccuga

SEQ ID NO: 153284 - RNA, 19 nt, Artificial Sequence
  Description of Artificial Sequence: Synthetic oligonucleotide
ggagacggguuaaauucug

SEQ ID NO: 153285 - RNA, 19 nt, Artificial Sequence
  Description of Artificial Sequence: Synthetic oligonucleotide
guguuaagugacaucugua

SEQ ID NO: 153286 - RNA, 19 nt, Artificial Sequence
  Description of Artificial Sequence: Synthetic oligonucleotide
caagccucaccaagaacua

SEQ ID NO: 153287 - RNA, 19 nt, Artificial Sequence
  Description of Artificial Sequence: Synthetic oligonucleotide
uggucgcacgugcggugcc

SEQ ID NO: 153288 - RNA, 19 nt, Artificial Sequence
  Description of Artificial Sequence: Synthetic oligonucleotide
ugaagaccucagacaugau

SEQ ID NO: 153289 - RNA, 19 nt, Artificial Sequence
  Description of Artificial Sequence: Synthetic oligonucleotide
uguggaccuggggauucac

SEQ ID NO: 153290 - RNA, 19 nt, Artificial Sequence
  Description of Artificial Sequence: Synthetic oligonucleotide
ucacguucccgcgcuugca

SEQ ID NO: 153291 - RNA, 19 nt, Artificial Sequence
  Description of Artificial Sequence: Synthetic oligonucleotide
uggcuucagcuuuccgccu

SEQ ID NO: 153292 - RNA, 19 nt, Artificial Sequence
  Description of Artificial Sequence: Synthetic oligonucleotide
cuggucgcacgugcggugc

SEQ ID NO: 153293 - RNA, 19 nt, Artificial Sequence
  Description of Artificial Sequence: Synthetic oligonucleotide
cuacugaggucgcuccaca

SEQ ID NO: 153294 - RNA, 19 nt, Artificial Sequence
  Description of Artificial Sequence: Synthetic oligonucleotide
gaauguggugcaccuccgu

SEQ ID NO: 153295 - RNA, 19 nt, Artificial Sequence
  Description of Artificial Sequence: Synthetic oligonucleotide
aggauacuagcaggauccu

SEQ ID NO: 153296 - RNA, 19 nt, Artificial Sequence
  Description of Artificial Sequence: Synthetic oligonucleotide
uccgccucauccaguuauu

SEQ ID NO: 153297 - RNA, 19 nt, Artificial Sequence
  Description of Artificial Sequence: Synthetic oligonucleotide
aagcaauuuugggcacaaa

SEQ ID NO: 153298 - RNA, 19 nt, Artificial Sequence
  Description of Artificial Sequence: Synthetic oligonucleotide
auggucaaggcagccugaa

SEQ ID NO: 153299 - RNA, 19 nt, Artificial Sequence
  Description of Artificial Sequence: Synthetic oligonucleotide
cugcaaaaggaagggucca

SEQ ID NO: 153300 - RNA, 19 nt, Artificial Sequence
  Description of Artificial Sequence: Synthetic oligonucleotide
gggagaguuaguuuugcuu

SEQ ID NO: 153301 - RNA, 19 nt, Artificial Sequence
  Description of Artificial Sequence: Synthetic oligonucleotide
ccaaaagaaugaacuugca

SEQ ID NO: 153302 - RNA, 19 nt, Artificial Sequence
  Description of Artificial Sequence: Synthetic oligonucleotide
ugauugccacuaguccuua

SEQ ID NO: 153303 - RNA, 19 nt, Artificial Sequence
  Description of Artificial Sequence: Synthetic oligonucleotide
caucggaaugagaucugcu

SEQ ID NO: 153304 - RNA, 19 nt, Artificial Sequence
  Description of Artificial Sequence: Synthetic oligonucleotide
cccagggaaguuucucccc

SEQ ID NO: 153305 - RNA, 19 nt, Artificial Sequence
  Description of Artificial Sequence: Synthetic oligonucleotide
agcagacgaugcacugauc

SEQ ID NO: 153306 - RNA, 19 nt, Artificial Sequence
  Description of Artificial Sequence: Synthetic oligonucleotide
gaccgccaaguccguuacc

SEQ ID NO: 153307 - RNA, 19 nt, Artificial Sequence
  Description of Artificial Sequence: Synthetic oligonucleotide
ggcuauacaggagacgggu

SEQ ID NO: 153308 - RNA, 19 nt, Artificial Sequence
  Description of Artificial Sequence: Synthetic oligonucleotide
auacaggagacggguuaaa

SEQ ID NO: 153309 - RNA, 19 nt, Artificial Sequence
  Description of Artificial Sequence: Synthetic oligonucleotide
accucggaaggaguggcua

SEQ ID NO: 153310 - RNA, 19 nt, Artificial Sequence
  Description of Artificial Sequence: Synthetic oligonucleotide
guacuaaagcuucguugau

SEQ ID NO: 153311 - RNA, 19 nt, Artificial Sequence
  Description of Artificial Sequence: Synthetic oligonucleotide
gguguggauuucauacauc

SEQ ID NO: 153312 - RNA, 19 nt, Artificial Sequence
  Description of Artificial Sequence: Synthetic oligonucleotide
aggucgcuccacagggaag

SEQ ID NO: 153313 - RNA, 19 nt, Artificial Sequence
  Description of Artificial Sequence: Synthetic oligonucleotide
gggaugaguucucugcagu

SEQ ID NO: 153314 - RNA, 19 nt, Artificial Sequence
  Description of Artificial Sequence: Synthetic oligonucleotide
gagacggguuaaauucugu

SEQ ID NO: 153315 - RNA, 19 nt, Artificial Sequence
  Description of Artificial Sequence: Synthetic oligonucleotide
cucucagcucgauuuaguu

SEQ ID NO: 153316 - RNA, 19 nt, Artificial Sequence
  Description of Artificial Sequence: Synthetic oligonucleotide
cagacccaugugagggcuc

SEQ ID NO: 153317 - RNA, 19 nt, Artificial Sequence
  Description of Artificial Sequence: Synthetic oligonucleotide
cacuacugaggucgcucca

SEQ ID NO: 153318 - RNA, 19 nt, Artificial Sequence
  Description of Artificial Sequence: Synthetic oligonucleotide
auacaggacugggccccag

SEQ ID NO: 153319 - RNA, 19 nt, Artificial Sequence
  Description of Artificial Sequence: Synthetic oligonucleotide
ggauguuagccaacuccuc

SEQ ID NO: 153320 - RNA, 19 nt, Artificial Sequence
  Description of Artificial Sequence: Synthetic oligonucleotide
gacaccugauggauuuggu

SEQ ID NO: 153321 - RNA, 19 nt, Artificial Sequence
  Description of Artificial Sequence: Synthetic oligonucleotide
gcuggucgcacgugcggug

SEQ ID NO: 153322 - RNA, 19 nt, Artificial Sequence
  Description of Artificial Sequence: Synthetic oligonucleotide
ugacuccguggagggagaa

SEQ ID NO: 153323 - RNA, 19 nt, Artificial Sequence
  Description of Artificial Sequence: Synthetic oligonucleotide
cagcagacgaugcacugau

SEQ ID NO: 153324 - RNA, 19 nt, Artificial Sequence
  Description of Artificial Sequence: Synthetic oligonucleotide
uccuguggaccuggggauu

SEQ ID NO: 153325 - RNA, 19 nt, Artificial Sequence
  Description of Artificial Sequence: Synthetic oligonucleotide
acgugcggugccagcgccg

SEQ ID NO: 153326 - RNA, 19 nt, Artificial Sequence
  Description of Artificial Sequence: Synthetic oligonucleotide
augacuccguggagggaga

SEQ ID NO: 153327 - RNA, 19 nt, Artificial Sequence
  Description of Artificial Sequence: Synthetic oligonucleotide
cacuacgguggcgcaucag

SEQ ID NO: 153328 - RNA, 19 nt, Artificial Sequence
  Description of Artificial Sequence: Synthetic oligonucleotide
ccauuaccuccuugcuccc

SEQ ID NO: 153329 - RNA, 19 nt, Artificial Sequence
  Description of Artificial Sequence: Synthetic oligonucleotide
gcuaugggccaagcucucc

SEQ ID NO: 153330 - RNA, 19 nt, Artificial Sequence
  Description of Artificial Sequence: Synthetic oligonucleotide
cucuggcgacugugucugc

SEQ ID NO: 153331 - RNA, 19 nt, Artificial Sequence
  Description of Artificial Sequence: Synthetic oligonucleotide
cucuagcaauaagcuucug

SEQ ID NO: 153332 - RNA, 19 nt, Artificial Sequence
  Description of Artificial Sequence: Synthetic oligonucleotide
ccaugggacaccugaugga

SEQ ID NO: 153333 - RNA, 19 nt, Artificial Sequence
  Description of Artificial Sequence: Synthetic oligonucleotide
gcacauauacucagaggua

SEQ ID NO: 153334 - RNA, 19 nt, Artificial Sequence
  Description of Artificial Sequence: Synthetic oligonucleotide
cacgagacuccaagacucu

SEQ ID NO: 153335 - RNA, 19 nt, Artificial Sequence
  Description of Artificial Sequence: Synthetic oligonucleotide
cuaagcaggggaagaucuu

SEQ ID NO: 153336 - RNA, 19 nt, Artificial Sequence
  Description of Artificial Sequence: Synthetic oligonucleotide
gauccgccucauccaguua

SEQ ID NO: 153337 - RNA, 19 nt, Artificial Sequence
  Description of Artificial Sequence: Synthetic oligonucleotide
gccuaugaguuuccagcaa

SEQ ID NO: 153338 - RNA, 19 nt, Artificial Sequence
  Description of Artificial Sequence: Synthetic oligonucleotide
ggaccuggggauucacucu

SEQ ID NO: 153339 - RNA, 19 nt, Artificial Sequence
  Description of Artificial Sequence: Synthetic oligonucleotide
ccaguucacuacgguggcg

SEQ ID NO: 153340 - RNA, 19 nt, Artificial Sequence
  Description of Artificial Sequence: Synthetic oligonucleotide
gcacgugcggugccagcgc

SEQ ID NO: 153341 - RNA, 19 nt, Artificial Sequence
  Description of Artificial Sequence: Synthetic oligonucleotide
gccgcaagccucaccaaga

SEQ ID NO: 153342 - RNA, 19 nt, Artificial Sequence
  Description of Artificial Sequence: Synthetic oligonucleotide
ggacacgcauccucugucu

SEQ ID NO: 153343 - RNA, 19 nt, Artificial Sequence
  Description of Artificial Sequence: Synthetic oligonucleotide
gcaaggggccaccucggaa

SEQ ID NO: 153344 - RNA, 19 nt, Artificial Sequence
  Description of Artificial Sequence: Synthetic oligonucleotide
cguagauaugcagcuuuuc

SEQ ID NO: 153345 - RNA, 19 nt, Artificial Sequence
  Description of Artificial Sequence: Synthetic oligonucleotide
cgccucauccaguuauuuc

SEQ ID NO: 153346 - RNA, 19 nt, Artificial Sequence
  Description of Artificial Sequence: Synthetic oligonucleotide
cgacugugucugcaguggc

SEQ ID NO: 153347 - RNA, 19 nt, Artificial Sequence
  Description of Artificial Sequence: Synthetic oligonucleotide
cgcacgugcggugccagcg

SEQ ID NO: 153348 - RNA, 19 nt, Artificial Sequence
  Description of Artificial Sequence: Synthetic oligonucleotide
cacucacgccuuggccagc

SEQ ID NO: 153349 - RNA, 19 nt, Artificial Sequence
  Description of Artificial Sequence: Synthetic oligonucleotide
agugagccauagagcggau

SEQ ID NO: 153350 - RNA, 19 nt, Artificial Sequence
  Description of Artificial Sequence: Synthetic oligonucleotide
gugagccauagagcggaua

SEQ ID NO: 153351 - RNA, 19 nt, Artificial Sequence
  Description of Artificial Sequence: Synthetic oligonucleotide
cccgggauccacaucccaa

SEQ ID NO: 153352 - RNA, 19 nt, Artificial Sequence
  Description of Artificial Sequence: Synthetic oligonucleotide
gacccaugugagggcucuc

SEQ ID NO: 153353 - RNA, 19 nt, Artificial Sequence
  Description of Artificial Sequence: Synthetic oligonucleotide
ccaucaugaaugacuccgu

SEQ ID NO: 153354 - RNA, 19 nt, Artificial Sequence
  Description of Artificial Sequence: Synthetic oligonucleotide
guucacuacgguggcgcau

SEQ ID NO: 153355 - RNA, 19 nt, Artificial Sequence
  Description of Artificial Sequence: Synthetic oligonucleotide
ccguuaccacacccuggag

SEQ ID NO: 153356 - RNA, 19 nt, Artificial Sequence
  Description of Artificial Sequence: Synthetic oligonucleotide
ccucguuagcaacuucucu

SEQ ID NO: 153357 - RNA, 19 nt, Artificial Sequence
  Description of Artificial Sequence: Synthetic oligonucleotide
ggcuaugggccaagcucuc

SEQ ID NO: 153358 - RNA, 19 nt, Artificial Sequence
  Description of Artificial Sequence: Synthetic oligonucleotide
gcggugccagcgccgcugc

SEQ ID NO: 153359 - RNA, 19 nt, Artificial Sequence
  Description of Artificial Sequence: Synthetic oligonucleotide
gggguucuagguggacauc

SEQ ID NO: 153360 - RNA, 19 nt, Artificial Sequence
  Description of Artificial Sequence: Synthetic oligonucleotide
gggccccguagcuguccag

SEQ ID NO: 153361 - RNA, 19 nt, Artificial Sequence
  Description of Artificial Sequence: Synthetic oligonucleotide
gcccgggauccacauccca

SEQ ID NO: 153362 - RNA, 19 nt, Artificial Sequence
  Description of Artificial Sequence: Synthetic oligonucleotide
ggucuugguuagugaguau

SEQ ID NO: 153363 - RNA, 19 nt, Artificial Sequence
  Description of Artificial Sequence: Synthetic oligonucleotide
cgugcggugccagcgccgc

SEQ ID NO: 153364 - RNA, 19 nt, Artificial Sequence
  Description of Artificial Sequence: Synthetic oligonucleotide
cacaaacucucagcucgau

SEQ ID NO: 153365 - RNA, 19 nt, Artificial Sequence
  Description of Artificial Sequence: Synthetic oligonucleotide
ggauacuagcaggauccuu

SEQ ID NO: 153366 - RNA, 19 nt, Artificial Sequence
  Description of Artificial Sequence: Synthetic oligonucleotide
ggucgcacgugcggugcca

SEQ ID NO: 153367 - RNA, 19 nt, Artificial Sequence
  Description of Artificial Sequence: Synthetic oligonucleotide
ccgcaagccucaccaagaa

SEQ ID NO: 153368 - RNA, 19 nt, Artificial Sequence
  Description of Artificial Sequence: Synthetic oligonucleotide
cuccgggccagcagacgau

SEQ ID NO: 153369 - RNA, 19 nt, Artificial Sequence
  Description of Artificial Sequence: Synthetic oligonucleotide
gcuauacaggagacggguu

SEQ ID NO: 153370 - RNA, 19 nt, Artificial Sequence
  Description of Artificial Sequence: Synthetic oligonucleotide
ccaucgggagaguuaguuu

SEQ ID NO: 153371 - RNA, 19 nt, Artificial Sequence
  Description of Artificial Sequence: Synthetic oligonucleotide
ccgucugcaucaguucaaa

SEQ ID NO: 153372 - RNA, 19 nt, Artificial Sequence
  Description of Artificial Sequence: Synthetic oligonucleotide
cccgcagucgcucgaggcu

SEQ ID NO: 153373 - RNA, 19 nt, Artificial Sequence
  Description of Artificial Sequence: Synthetic oligonucleotide
ccucggaaggaguggcuau

SEQ ID NO: 153374 - RNA, 19 nt, Artificial Sequence
  Description of Artificial Sequence: Synthetic oligonucleotide
gcguagauaugcagcuuuu

SEQ ID NO: 153375 - RNA, 19 nt, Artificial Sequence
  Description of Artificial Sequence: Synthetic oligonucleotide
cacaucccaacagccucuu

SEQ ID NO: 153376 - RNA, 19 nt, Artificial Sequence
  Description of Artificial Sequence: Synthetic oligonucleotide
cagcguagauaugcagcuu

SEQ ID NO: 153377 - RNA, 19 nt, Artificial Sequence
  Description of Artificial Sequence: Synthetic oligonucleotide
ggugcaccuccgucugcau

SEQ ID NO: 153378 - RNA, 19 nt, Artificial Sequence
  Description of Artificial Sequence: Synthetic oligonucleotide
cgucuaucuucaguucugu

SEQ ID NO: 153379 - RNA, 19 nt, Artificial Sequence
  Description of Artificial Sequence: Synthetic oligonucleotide
cacucacguucccgcgcuu

SEQ ID NO: 153380 - RNA, 19 nt, Artificial Sequence
  Description of Artificial Sequence: Synthetic oligonucleotide
cgcagucgcucgaggcucu

SEQ ID NO: 153381 - RNA, 19 nt, Artificial Sequence
  Description of Artificial Sequence: Synthetic oligonucleotide
ccgccucauccaguuauuu

SEQ ID NO: 153382 - RNA, 19 nt, Artificial Sequence
  Description of Artificial Sequence: Synthetic oligonucleotide
cucccgggucaggcuugau

SEQ ID NO: 153383 - RNA, 19 nt, Artificial Sequence
  Description of Artificial Sequence: Synthetic oligonucleotide
uuaaaaucgaugaugaguu

SEQ ID NO: 153384 - RNA, 19 nt, Artificial Sequence
  Description of Artificial Sequence: Synthetic oligonucleotide
aaaaucgaugaugaguucg

SEQ ID NO: 153385 - RNA, 19 nt, Artificial Sequence
  Description of Artificial Sequence: Synthetic oligonucleotide
auucaucuaucucagacgg

SEQ ID NO: 153386 - RNA, 19 nt, Artificial Sequence
  Description of Artificial Sequence: Synthetic oligonucleotide
aauaugcuugcaauguugc

SEQ ID NO: 153387 - RNA, 19 nt, Artificial Sequence
  Description of Artificial Sequence: Synthetic oligonucleotide
aagaagaccaucugagcuc

SEQ ID NO: 153388 - RNA, 19 nt, Artificial Sequence
  Description of Artificial Sequence: Synthetic oligonucleotide
ucaaccguguuccagcugg

SEQ ID NO: 153389 - RNA, 19 nt, Artificial Sequence
  Description of Artificial Sequence: Synthetic oligonucleotide
gaaguuuaggcauuggcug

SEQ ID NO: 153390 - RNA, 19 nt, Artificial Sequence
  Description of Artificial Sequence: Synthetic oligonucleotide
aguucgucaucugaaaacc

SEQ ID NO: 153391 - RNA, 19 nt, Artificial Sequence
  Description of Artificial Sequence: Synthetic oligonucleotide
guuguuaaaaucgaugaug

SEQ ID NO: 153392 - RNA, 19 nt, Artificial Sequence
  Description of Artificial Sequence: Synthetic oligonucleotide
gacgguuauauucuucagg

SEQ ID NO: 153393 - RNA, 19 nt, Artificial Sequence
  Description of Artificial Sequence: Synthetic oligonucleotide
aggagguaaggcaauaugc

SEQ ID NO: 153394 - RNA, 19 nt, Artificial Sequence
  Description of Artificial Sequence: Synthetic oligonucleotide
ucccguaaguucaaggucc

SEQ ID NO: 153395 - RNA, 19 nt, Artificial Sequence
  Description of Artificial Sequence: Synthetic oligonucleotide
uccacaacuugguagucgg

SEQ ID NO: 153396 - RNA, 19 nt, Artificial Sequence
  Description of Artificial Sequence: Synthetic oligonucleotide
gaagguaucugaccgcucc

SEQ ID NO: 153397 - RNA, 19 nt, Artificial Sequence
  Description of Artificial Sequence: Synthetic oligonucleotide
ucgucaucugaaaaccggg

SEQ ID NO: 153398 - RNA, 19 nt, Artificial Sequence
  Description of Artificial Sequence: Synthetic oligonucleotide
acccauucgccauauugcc

SEQ ID NO: 153399 - RNA, 19 nt, Artificial Sequence
  Description of Artificial Sequence: Synthetic oligonucleotide
agcuugauuagguacugag

SEQ ID NO: 153400 - RNA, 19 nt, Artificial Sequence
  Description of Artificial Sequence: Synthetic oligonucleotide
ugaaaaccgggcaacgaug

SEQ ID NO: 153401 - RNA, 19 nt, Artificial Sequence
  Description of Artificial Sequence: Synthetic oligonucleotide
agauugacuuccuguuugc

SEQ ID NO: 153402 - RNA, 19 nt, Artificial Sequence
  Description of Artificial Sequence: Synthetic oligonucleotide
aguggauauucgucugucc

SEQ ID NO: 153403 - RNA, 19 nt, Artificial Sequence
  Description of Artificial Sequence: Synthetic oligonucleotide
ucaacaucgauuucccggu

SEQ ID NO: 153404 - RNA, 19 nt, Artificial Sequence
  Description of Artificial Sequence: Synthetic oligonucleotide
gaucuaggggcacaacccg

SEQ ID NO: 153405 - RNA, 19 nt, Artificial Sequence
  Description of Artificial Sequence: Synthetic oligonucleotide
gaagguacagccccucucc

SEQ ID NO: 153406 - RNA, 19 nt, Artificial Sequence
  Description of Artificial Sequence: Synthetic oligonucleotide
ucauccauuuaaguaaaug

SEQ ID NO: 153407 - RNA, 19 nt, Artificial Sequence
  Description of Artificial Sequence: Synthetic oligonucleotide
cuugaagcgguugaguacc

SEQ ID NO: 153408 - RNA, 19 nt, Artificial Sequence
  Description of Artificial Sequence: Synthetic oligonucleotide
ugacggaguacgcaugucc

SEQ ID NO: 153409 - RNA, 19 nt, Artificial Sequence
  Description of Artificial Sequence: Synthetic oligonucleotide
gacuugauaucuuggcgcc

SEQ ID NO: 153410 - RNA, 19 nt, Artificial Sequence
  Description of Artificial Sequence: Synthetic oligonucleotide
uucaagcuuaucaaggguu

SEQ ID NO: 153411 - RNA, 19 nt, Artificial Sequence
  Description of Artificial Sequence: Synthetic oligonucleotide
agaacucgcucccuucagc

SEQ ID NO: 153412 - RNA, 19 nt, Artificial Sequence
  Description of Artificial Sequence: Synthetic oligonucleotide
gaguucgucaucugaaaac

SEQ ID NO: 153413 - RNA, 19 nt, Artificial Sequence
  Description of Artificial Sequence: Synthetic oligonucleotide
aguuguuuaaugccucucu

SEQ ID NO: 153414 - RNA, 19 nt, Artificial Sequence
  Description of Artificial Sequence: Synthetic oligonucleotide
cugaucuaggggcacaacc

SEQ ID NO: 153415 - RNA, 19 nt, Artificial Sequence
  Description of Artificial Sequence: Synthetic oligonucleotide
auggugugcauauccucgc

SEQ ID NO: 153416 - RNA, 19 nt, Artificial Sequence
  Description of Artificial Sequence: Synthetic oligonucleotide
auugcgaugcccgccaugg

SEQ ID NO: 153417 - RNA, 19 nt, Artificial Sequence
  Description of Artificial Sequence: Synthetic oligonucleotide
uguuagcuccucuggaacc

SEQ ID NO: 153418 - RNA, 19 nt, Artificial Sequence
  Description of Artificial Sequence: Synthetic oligonucleotide
auauugccagaacuggaag

SEQ ID NO: 153419 - RNA, 19 nt, Artificial Sequence
  Description of Artificial Sequence: Synthetic oligonucleotide
gaugaagguaucugaccgc

SEQ ID NO: 153420 - RNA, 19 nt, Artificial Sequence
  Description of Artificial Sequence: Synthetic oligonucleotide
uacgcauguccuuucacca

SEQ ID NO: 153421 - RNA, 19 nt, Artificial Sequence
  Description of Artificial Sequence: Synthetic oligonucleotide
cugguugagguacuugacg

SEQ ID NO: 153422 - RNA, 19 nt, Artificial Sequence
  Description of Artificial Sequence: Synthetic oligonucleotide
aaucgggcuggcucacggc

SEQ ID NO: 153423 - RNA, 19 nt, Artificial Sequence
  Description of Artificial Sequence: Synthetic oligonucleotide
ggcaacgaugacuuggugg

SEQ ID NO: 153424 - RNA, 19 nt, Artificial Sequence
  Description of Artificial Sequence: Synthetic oligonucleotide
cacccauucgccauauugc

SEQ ID NO: 153425 - RNA, 19 nt, Artificial Sequence
  Description of Artificial Sequence: Synthetic oligonucleotide
gaacucgcucccuucagcc

SEQ ID NO: 153426 - RNA, 19 nt, Artificial Sequence
  Description of Artificial Sequence: Synthetic oligonucleotide
gaauccgcagcacugguga

SEQ ID NO: 153427 - RNA, 19 nt, Artificial Sequence
  Description of Artificial Sequence: Synthetic oligonucleotide
aguaaauguucccguaagu

SEQ ID NO: 153428 - RNA, 19 nt, Artificial Sequence
  Description of Artificial Sequence: Synthetic oligonucleotide
cuugaauaucuugaauagc

SEQ ID NO: 153429 - RNA, 19 nt, Artificial Sequence
  Description of Artificial Sequence: Synthetic oligonucleotide
ucgauuucccgguaaauuu

SEQ ID NO: 153430 - RNA, 19 nt, Artificial Sequence
  Description of Artificial Sequence: Synthetic oligonucleotide
uucagccgaguguacaaag

SEQ ID NO: 153431 - RNA, 19 nt, Artificial Sequence
  Description of Artificial Sequence: Synthetic oligonucleotide
aacucgcucccuucagccg

SEQ ID NO: 153432 - RNA, 19 nt, Artificial Sequence
  Description of Artificial Sequence: Synthetic oligonucleotide
agcagccgagaagagagcc

SEQ ID NO: 153433 - RNA, 19 nt, Artificial Sequence
  Description of Artificial Sequence: Synthetic oligonucleotide
guacgcauguccuuucacc

SEQ ID NO: 153434 - RNA, 19 nt, Artificial Sequence
  Description of Artificial Sequence: Synthetic oligonucleotide
cucaacucauaccacucag

SEQ ID NO: 153435 - RNA, 19 nt, Artificial Sequence
  Description of Artificial Sequence: Synthetic oligonucleotide
ucaucuaucucagacgguu

SEQ ID NO: 153436 - RNA, 19 nt, Artificial Sequence
  Description of Artificial Sequence: Synthetic oligonucleotide
aaaucgaugaugaguucgu

SEQ ID NO: 153437 - RNA, 19 nt, Artificial Sequence
  Description of Artificial Sequence: Synthetic oligonucleotide
uuccucaacucauaccacu

SEQ ID NO: 153438 - RNA, 19 nt, Artificial Sequence
  Description of Artificial Sequence: Synthetic oligonucleotide
uuuccguuagacgucuuca

SEQ ID NO: 153439 - RNA, 19 nt, Artificial Sequence
  Description of Artificial Sequence: Synthetic oligonucleotide
agguaaggcaauaugcuug

SEQ ID NO: 153440 - RNA, 19 nt, Artificial Sequence
  Description of Artificial Sequence: Synthetic oligonucleotide
guaucugaccgcucccugg

SEQ ID NO: 153441 - RNA, 19 nt, Artificial Sequence
  Description of Artificial Sequence: Synthetic oligonucleotide
uagcaguuccagccgaacc

SEQ ID NO: 153442 - RNA, 19 nt, Artificial Sequence
  Description of Artificial Sequence: Synthetic oligonucleotide
agcuuaucaaggguuaaug

SEQ ID NO: 153443 - RNA, 19 nt, Artificial Sequence
  Description of Artificial Sequence: Synthetic oligonucleotide
uuuuccguuagacgucuuc

SEQ ID NO: 153444 - RNA, 19 nt, Artificial Sequence
  Description of Artificial Sequence: Synthetic oligonucleotide
guauuuggguaguuccugc

SEQ ID NO: 153445 - RNA, 19 nt, Artificial Sequence
  Description of Artificial Sequence: Synthetic oligonucleotide
uuccguuagacgucuucag

SEQ ID NO: 153446 - RNA, 19 nt, Artificial Sequence
  Description of Artificial Sequence: Synthetic oligonucleotide
aaccucguagaugccaaag

SEQ ID NO: 153447 - RNA, 19 nt, Artificial Sequence
  Description of Artificial Sequence: Synthetic oligonucleotide
uugacggcucucucgugcg

SEQ ID NO: 153448 - RNA, 19 nt, Artificial Sequence
  Description of Artificial Sequence: Synthetic oligonucleotide
ucagccgaguguacaaaga

SEQ ID NO: 153449 - RNA, 19 nt, Artificial Sequence
  Description of Artificial Sequence: Synthetic oligonucleotide
uuccggauucugaucaacu

SEQ ID NO: 153450 - RNA, 19 nt, Artificial Sequence
  Description of Artificial Sequence: Synthetic oligonucleotide
gaacaaguugggaggaggc

SEQ ID NO: 153451 - RNA, 19 nt, Artificial Sequence
  Description of Artificial Sequence: Synthetic oligonucleotide
aggcaauaugcuugcaaug

SEQ ID NO: 153452 - RNA, 19 nt, Artificial Sequence
  Description of Artificial Sequence: Synthetic oligonucleotide
uggauugcgaugcccgcca

SEQ ID NO: 153453 - RNA, 19 nt, Artificial Sequence
  Description of Artificial Sequence: Synthetic oligonucleotide
agccgaguguacaaagagc

SEQ ID NO: 153454 - RNA, 19 nt, Artificial Sequence
  Description of Artificial Sequence: Synthetic oligonucleotide
guaccaaucgggcuggcuc

SEQ ID NO: 153455 - RNA, 19 nt, Artificial Sequence
  Description of Artificial Sequence: Synthetic oligonucleotide
caagaaagaagguugaguu

SEQ ID NO: 153456 - RNA, 19 nt, Artificial Sequence
  Description of Artificial Sequence: Synthetic oligonucleotide
caggcauguaacgucagag

SEQ ID NO: 153457 - RNA, 19 nt, Artificial Sequence
  Description of Artificial Sequence: Synthetic oligonucleotide
uucaacguuggccucgauu

SEQ ID NO: 153458 - RNA, 19 nt, Artificial Sequence
  Description of Artificial Sequence: Synthetic oligonucleotide
cauauugccagaacuggaa

SEQ ID NO: 153459 - RNA, 19 nt, Artificial Sequence
  Description of Artificial Sequence: Synthetic oligonucleotide
aaucuucguccagaggaug

SEQ ID NO: 153460 - RNA, 19 nt, Artificial Sequence
  Description of Artificial Sequence: Synthetic oligonucleotide
uaacgucagaguacuguaa

SEQ ID NO: 153461 - RNA, 19 nt, Artificial Sequence
  Description of Artificial Sequence: Synthetic oligonucleotide
cagccgaguguacaaagag

SEQ ID NO: 153462 - RNA, 19 nt, Artificial Sequence
  Description of Artificial Sequence: Synthetic oligonucleotide
gguuauauucuucagguau

SEQ ID NO: 153463 - RNA, 19 nt, Artificial Sequence
  Description of Artificial Sequence: Synthetic oligonucleotide
uaccaaucgggcuggcuca

SEQ ID NO: 153464 - RNA, 19 nt, Artificial Sequence
  Description of Artificial Sequence: Synthetic oligonucleotide
gcaacgaugacuuggugga

SEQ ID NO: 153465 - RNA, 19 nt, Artificial Sequence
  Description of Artificial Sequence: Synthetic oligonucleotide
acgugacugccuccgaauc

SEQ ID NO: 153466 - RNA, 19 nt, Artificial Sequence
  Description of Artificial Sequence: Synthetic oligonucleotide
aaggcuuuccgcaucucgu

SEQ ID NO: 153467 - RNA, 19 nt, Artificial Sequence
  Description of Artificial Sequence: Synthetic oligonucleotide
agcagaucuccgugggccg

SEQ ID NO: 153468 - RNA, 19 nt, Artificial Sequence
  Description of Artificial Sequence: Synthetic oligonucleotide
gccaauggugugcauaucc

SEQ ID NO: 153469 - RNA, 19 nt, Artificial Sequence
  Description of Artificial Sequence: Synthetic oligonucleotide
gaaaaccgggcaacgauga

SEQ ID NO: 153470 - RNA, 19 nt, Artificial Sequence
  Description of Artificial Sequence: Synthetic oligonucleotide
ggccccaacuccuugaagc

SEQ ID NO: 153471 - RNA, 19 nt, Artificial Sequence
  Description of Artificial Sequence: Synthetic oligonucleotide
uaaaaucgaugaugaguuc

SEQ ID NO: 153472 - RNA, 19 nt, Artificial Sequence
  Description of Artificial Sequence: Synthetic oligonucleotide
aucuaucucagacgguuau

SEQ ID NO: 153473 - RNA, 19 nt, Artificial Sequence
  Description of Artificial Sequence: Synthetic oligonucleotide
auuccggauucugaucaac

SEQ ID NO: 153474 - RNA, 19 nt, Artificial Sequence
  Description of Artificial Sequence: Synthetic oligonucleotide
ggauuccggauucugauca

SEQ ID NO: 153475 - RNA, 19 nt, Artificial Sequence
  Description of Artificial Sequence: Synthetic oligonucleotide
auaccacucagcaaugccu

SEQ ID NO: 153476 - RNA, 19 nt, Artificial Sequence
  Description of Artificial Sequence: Synthetic oligonucleotide
uucaggcauguaacgucag

SEQ ID NO: 153477 - RNA, 19 nt, Artificial Sequence
  Description of Artificial Sequence: Synthetic oligonucleotide
uaugaaguguuuggaaguu

SEQ ID NO: 153478 - RNA, 19 nt, Artificial Sequence
  Description of Artificial Sequence: Synthetic oligonucleotide
auagcaguuccagccgaac

SEQ ID NO: 153479 - RNA, 19 nt, Artificial Sequence
  Description of Artificial Sequence: Synthetic oligonucleotide
ucgggauccagcugcuuga

SEQ ID NO: 153480 - RNA, 19 nt, Artificial Sequence
  Description of Artificial Sequence: Synthetic oligonucleotide
caaucgggcuggcucacgg

SEQ ID NO: 153481 - RNA, 19 nt, Artificial Sequence
  Description of Artificial Sequence: Synthetic oligonucleotide
ccauucgccauauugccag

SEQ ID NO: 153482 - RNA, 19 nt, Artificial Sequence
  Description of Artificial Sequence: Synthetic oligonucleotide
auagcacccguugaucuug

SEQ ID NO: 153483 - RNA, 19 nt, Artificial Sequence
  Description of Artificial Sequence: Synthetic oligonucleotide
ucucucgugcgaccccagg

SEQ ID NO: 153484 - RNA, 19 nt, Artificial Sequence
  Description of Artificial Sequence: Synthetic oligonucleotide
cagcucuaggcacaauccc

SEQ ID NO: 153485 - RNA, 19 nt, Artificial Sequence
  Description of Artificial Sequence: Synthetic oligonucleotide
uggugugcauauccucgcc

SEQ ID NO: 153486 - RNA, 19 nt, Artificial Sequence
  Description of Artificial Sequence: Synthetic oligonucleotide
ugcgaugcccgccauggua

SEQ ID NO: 153487 - RNA, 19 nt, Artificial Sequence
  Description of Artificial Sequence: Synthetic oligonucleotide
guaacgucagaguacugua

SEQ ID NO: 153488 - RNA, 19 nt, Artificial Sequence
  Description of Artificial Sequence: Synthetic oligonucleotide
guuggauugcgaugcccgc

SEQ ID NO: 153489 - RNA, 19 nt, Artificial Sequence
  Description of Artificial Sequence: Synthetic oligonucleotide
uucaucuaucucagacggu

SEQ ID NO: 153490 - RNA, 19 nt, Artificial Sequence
  Description of Artificial Sequence: Synthetic oligonucleotide
gcuugauuagguacugagg

SEQ ID NO: 153491 - RNA, 19 nt, Artificial Sequence
  Description of Artificial Sequence: Synthetic oligonucleotide
aggcacucguuccgcagcg

SEQ ID NO: 153492 - RNA, 19 nt, Artificial Sequence
  Description of Artificial Sequence: Synthetic oligonucleotide
aagcuuaucaaggguuaau

SEQ ID NO: 153493 - RNA, 19 nt, Artificial Sequence
  Description of Artificial Sequence: Synthetic oligonucleotide
agaccugucaacaucgauu

SEQ ID NO: 153494 - RNA, 19 nt, Artificial Sequence
  Description of Artificial Sequence: Synthetic oligonucleotide
auauucgucuguccuguua

SEQ ID NO: 153495 - RNA, 19 nt, Artificial Sequence
  Description of Artificial Sequence: Synthetic oligonucleotide
cuccgaauccgcagcacug

SEQ ID NO: 153496 - RNA, 19 nt, Artificial Sequence
  Description of Artificial Sequence: Synthetic oligonucleotide
ucgauggagcagccgagaa

SEQ ID NO: 153497 - RNA, 19 nt, Artificial Sequence
  Description of Artificial Sequence: Synthetic oligonucleotide
uccggauucugaucaacuu

SEQ ID NO: 153498 - RNA, 19 nt, Artificial Sequence
  Description of Artificial Sequence: Synthetic oligonucleotide
acggcucucucgugcgacc

SEQ ID NO: 153499 - RNA, 19 nt, Artificial Sequence
  Description of Artificial Sequence: Synthetic oligonucleotide
ugggucaaccguguuccag

SEQ ID NO: 153500 - RNA, 19 nt, Artificial Sequence
  Description of Artificial Sequence: Synthetic oligonucleotide
guggauauucgucuguccu

SEQ ID NO: 153501 - RNA, 19 nt, Artificial Sequence
  Description of Artificial Sequence: Synthetic oligonucleotide
uagcacccguugaucuugg

SEQ ID NO: 153502 - RNA, 19 nt, Artificial Sequence
  Description of Artificial Sequence: Synthetic oligonucleotide
cguucagucagccuugccc

SEQ ID NO: 153503 - RNA, 19 nt, Artificial Sequence
  Description of Artificial Sequence: Synthetic oligonucleotide
agguauaaucauccauuua

SEQ ID NO: 153504 - RNA, 19 nt, Artificial Sequence
  Description of Artificial Sequence: Synthetic oligonucleotide
guggaguugacagggcagc

SEQ ID NO: 153505 - RNA, 19 nt, Artificial Sequence
  Description of Artificial Sequence: Synthetic oligonucleotide
gauugcgaugcccgccaug

SEQ ID NO: 153506 - RNA, 19 nt, Artificial Sequence
  Description of Artificial Sequence: Synthetic oligonucleotide
ucaaccuccucggcuccgg

SEQ ID NO: 153507 - RNA, 19 nt, Artificial Sequence
  Description of Artificial Sequence: Synthetic oligonucleotide
acgcggaugcagaaaucgc

SEQ ID NO: 153508 - RNA, 19 nt, Artificial Sequence
  Description of Artificial Sequence: Synthetic oligonucleotide
gggucaaccguguuccagc

SEQ ID NO: 153509 - RNA, 19 nt, Artificial Sequence
  Description of Artificial Sequence: Synthetic oligonucleotide
agaagacgcggaugcagaa

SEQ ID NO: 153510 - RNA, 19 nt, Artificial Sequence
  Description of Artificial Sequence: Synthetic oligonucleotide
acgucagaguacuguaaaa

SEQ ID NO: 153511 - RNA, 19 nt, Artificial Sequence
  Description of Artificial Sequence: Synthetic oligonucleotide
ugaagguaucugaccgcuc

SEQ ID NO: 153512 - RNA, 19 nt, Artificial Sequence
  Description of Artificial Sequence: Synthetic oligonucleotide
aauagcaguuccagccgaa

SEQ ID NO: 153513 - RNA, 19 nt, Artificial Sequence
  Description of Artificial Sequence: Synthetic oligonucleotide
gcuccggugacggaguacg

SEQ ID NO: 153514 - RNA, 19 nt, Artificial Sequence
  Description of Artificial Sequence: Synthetic oligonucleotide
uggcuagaacucuucucaa

SEQ ID NO: 153515 - RNA, 19 nt, Artificial Sequence
  Description of Artificial Sequence: Synthetic oligonucleotide
cuuuccgcaucucguagga

SEQ ID NO: 153516 - RNA, 19 nt, Artificial Sequence
  Description of Artificial Sequence: Synthetic oligonucleotide
cauguaacgucagaguacu

SEQ ID NO: 153517 - RNA, 19 nt, Artificial Sequence
  Description of Artificial Sequence: Synthetic oligonucleotide
agcacccguugaucuuggc

SEQ ID NO: 153518 - RNA, 19 nt, Artificial Sequence
  Description of Artificial Sequence: Synthetic oligonucleotide
cucgugcgaccccaggccc

SEQ ID NO: 153519 - RNA, 19 nt, Artificial Sequence
  Description of Artificial Sequence: Synthetic oligonucleotide
cugauaagugaaaauucau

SEQ ID NO: 153520 - RNA, 19 nt, Artificial Sequence
  Description of Artificial Sequence: Synthetic oligonucleotide
aauguucccguaaguucaa

SEQ ID NO: 153521 - RNA, 19 nt, Artificial Sequence
  Description of Artificial Sequence: Synthetic oligonucleotide
ucuucaacguuggccucga

SEQ ID NO: 153522 - RNA, 19 nt, Artificial Sequence
  Description of Artificial Sequence: Synthetic oligonucleotide
cagccgaaccaaacaccgg

SEQ ID NO: 153523 - RNA, 19 nt, Artificial Sequence
  Description of Artificial Sequence: Synthetic oligonucleotide
gagguaaggcaauaugcuu

SEQ ID NO: 153524 - RNA, 19 nt, Artificial Sequence
  Description of Artificial Sequence: Synthetic oligonucleotide
gguacagccccucucccca

SEQ ID NO: 153525 - RNA, 19 nt, Artificial Sequence
  Description of Artificial Sequence: Synthetic oligonucleotide
caaccguguuccagcuggg

SEQ ID NO: 153526 - RNA, 19 nt, Artificial Sequence
  Description of Artificial Sequence: Synthetic oligonucleotide
uccauucgaugccccgagu

SEQ ID NO: 153527 - RNA, 19 nt, Artificial Sequence
  Description of Artificial Sequence: Synthetic oligonucleotide
gcaagcggcaguccccagg

SEQ ID NO: 153528 - RNA, 19 nt, Artificial Sequence
  Description of Artificial Sequence: Synthetic oligonucleotide
augccagcguaguucuccu

SEQ ID NO: 153529 - RNA, 19 nt, Artificial Sequence
  Description of Artificial Sequence: Synthetic oligonucleotide
auuucccgguccacucuac

SEQ ID NO: 153530 - RNA, 19 nt, Artificial Sequence
  Description of Artificial Sequence: Synthetic oligonucleotide
aggggacgacgauguacuc

SEQ ID NO: 153531 - RNA, 19 nt, Artificial Sequence
  Description of Artificial Sequence: Synthetic oligonucleotide
ucugaucuaggggcacaac

SEQ ID NO: 153532 - RNA, 19 nt, Artificial Sequence
  Description of Artificial Sequence: Synthetic oligonucleotide
ucgccauccuuguggggcu

SEQ ID NO: 153533 - RNA, 19 nt, Artificial Sequence
  Description of Artificial Sequence: Synthetic oligonucleotide
ucuucguccagaggaugua

SEQ ID NO: 153534 - RNA, 19 nt, Artificial Sequence
  Description of Artificial Sequence: Synthetic oligonucleotide
gauuccggauucugaucaa

SEQ ID NO: 153535 - RNA, 19 nt, Artificial Sequence
  Description of Artificial Sequence: Synthetic oligonucleotide
ugggccgcuuccauucgau

SEQ ID NO: 153536 - RNA, 19 nt, Artificial Sequence
  Description of Artificial Sequence: Synthetic oligonucleotide
ggcaauaugcuugcaaugu

SEQ ID NO: 153537 - RNA, 19 nt, Artificial Sequence
  Description of Artificial Sequence: Synthetic oligonucleotide
accaaucgggcuggcucac

SEQ ID NO: 153538 - RNA, 19 nt, Artificial Sequence
  Description of Artificial Sequence: Synthetic oligonucleotide
cacaacccgagccaggacu

SEQ ID NO: 153539 - RNA, 19 nt, Artificial Sequence
  Description of Artificial Sequence: Synthetic oligonucleotide
cagggcgcuccagaacucg

SEQ ID NO: 153540 - RNA, 19 nt, Artificial Sequence
  Description of Artificial Sequence: Synthetic oligonucleotide
ugacggcucucucgugcga

SEQ ID NO: 153541 - RNA, 19 nt, Artificial Sequence
  Description of Artificial Sequence: Synthetic oligonucleotide
cugaaaaccgggcaacgau

SEQ ID NO: 153542 - RNA, 19 nt, Artificial Sequence
  Description of Artificial Sequence: Synthetic oligonucleotide
caggcgagaguagugccuc

SEQ ID NO: 153543 - RNA, 19 nt, Artificial Sequence
  Description of Artificial Sequence: Synthetic oligonucleotide
accggacaaaguuguuaaa

SEQ ID NO: 153544 - RNA, 19 nt, Artificial Sequence
  Description of Artificial Sequence: Synthetic oligonucleotide
gacggaguacgcauguccu

SEQ ID NO: 153545 - RNA, 19 nt, Artificial Sequence
  Description of Artificial Sequence: Synthetic oligonucleotide
aguaccucccggagguuga

SEQ ID NO: 153546 - RNA, 19 nt, Artificial Sequence
  Description of Artificial Sequence: Synthetic oligonucleotide
ggagguaaggcaauaugcu

SEQ ID NO: 153547 - RNA, 19 nt, Artificial Sequence
  Description of Artificial Sequence: Synthetic oligonucleotide
gucaaccguguuccagcug

SEQ ID NO: 153548 - RNA, 19 nt, Artificial Sequence
  Description of Artificial Sequence: Synthetic oligonucleotide
guacgugacugccuccgaa

SEQ ID NO: 153549 - RNA, 19 nt, Artificial Sequence
  Description of Artificial Sequence: Synthetic oligonucleotide
ccgggcaacgaugacuugg

SEQ ID NO: 153550 - RNA, 19 nt, Artificial Sequence
  Description of Artificial Sequence: Synthetic oligonucleotide
uggcgccuggcuagaacuc

SEQ ID NO: 153551 - RNA, 19 nt, Artificial Sequence
  Description of Artificial Sequence: Synthetic oligonucleotide
agacgcggaugcagaaauc

SEQ ID NO: 153552 - RNA, 19 nt, Artificial Sequence
  Description of Artificial Sequence: Synthetic oligonucleotide
cuuccauucgaugccccga

SEQ ID NO: 153553 - RNA, 19 nt, Artificial Sequence
  Description of Artificial Sequence: Synthetic oligonucleotide
acggaguacgcauguccuu

SEQ ID NO: 153554 - RNA, 19 nt, Artificial Sequence
  Description of Artificial Sequence: Synthetic oligonucleotide
auucgccauauugccagaa

SEQ ID NO: 153555 - RNA, 19 nt, Artificial Sequence
  Description of Artificial Sequence: Synthetic oligonucleotide
gccaagaaagaagguugag

SEQ ID NO: 153556 - RNA, 19 nt, Artificial Sequence
  Description of Artificial Sequence: Synthetic oligonucleotide
caucuaucucagacgguua

SEQ ID NO: 153557 - RNA, 19 nt, Artificial Sequence
  Description of Artificial Sequence: Synthetic oligonucleotide
ucuccgugggccgcuucca

SEQ ID NO: 153558 - RNA, 19 nt, Artificial Sequence
  Description of Artificial Sequence: Synthetic oligonucleotide
ccauauugccagaacugga

SEQ ID NO: 153559 - RNA, 19 nt, Artificial Sequence
  Description of Artificial Sequence: Synthetic oligonucleotide
gcacccguugaucuuggca

SEQ ID NO: 153560 - RNA, 19 nt, Artificial Sequence
  Description of Artificial Sequence: Synthetic oligonucleotide
cuccggugacggaguacgc

SEQ ID NO: 153561 - RNA, 19 nt, Artificial Sequence
  Description of Artificial Sequence: Synthetic oligonucleotide
gcuuucaaccuccucggcu

SEQ ID NO: 153562 - RNA, 19 nt, Artificial Sequence
  Description of Artificial Sequence: Synthetic oligonucleotide
gugcauauccucgcccauc

SEQ ID NO: 153563 - RNA, 19 nt, Artificial Sequence
  Description of Artificial Sequence: Synthetic oligonucleotide
ccgaguuuugcuggaguag

SEQ ID NO: 153564 - RNA, 19 nt, Artificial Sequence
  Description of Artificial Sequence: Synthetic oligonucleotide
caagcuuaucaaggguuaa

SEQ ID NO: 153565 - RNA, 19 nt, Artificial Sequence
  Description of Artificial Sequence: Synthetic oligonucleotide
cucucucgugcgaccccag

SEQ ID NO: 153566 - RNA, 19 nt, Artificial Sequence
  Description of Artificial Sequence: Synthetic oligonucleotide
gaacucuucucaagauggu

SEQ ID NO: 153567 - RNA, 19 nt, Artificial Sequence
  Description of Artificial Sequence: Synthetic oligonucleotide
ucguuccgcagcgucucgu

SEQ ID NO: 153568 - RNA, 19 nt, Artificial Sequence
  Description of Artificial Sequence: Synthetic oligonucleotide
cauuucccgguccacucua

SEQ ID NO: 153569 - RNA, 19 nt, Artificial Sequence
  Description of Artificial Sequence: Synthetic oligonucleotide
uccgugggccgcuuccauu

SEQ ID NO: 153570 - RNA, 19 nt, Artificial Sequence
  Description of Artificial Sequence: Synthetic oligonucleotide
aacaccggacaaaguuguu

SEQ ID NO: 153571 - RNA, 19 nt, Artificial Sequence
  Description of Artificial Sequence: Synthetic oligonucleotide
gagggcucgcggagacgcg

SEQ ID NO: 153572 - RNA, 19 nt, Artificial Sequence
  Description of Artificial Sequence: Synthetic oligonucleotide
cauucgccauauugccaga

SEQ ID NO: 153573 - RNA, 19 nt, Artificial Sequence
  Description of Artificial Sequence: Synthetic oligonucleotide
gcgaugcccgccaugguac

SEQ ID NO: 153574 - RNA, 19 nt, Artificial Sequence
  Description of Artificial Sequence: Synthetic oligonucleotide
gcccaaguggauauucguc

SEQ ID NO: 153575 - RNA, 19 nt, Artificial Sequence
  Description of Artificial Sequence: Synthetic oligonucleotide
caccaccgcaacuuaauuu

SEQ ID NO: 153576 - RNA, 19 nt, Artificial Sequence
  Description of Artificial Sequence: Synthetic oligonucleotide
cgagaguagugccucagga

SEQ ID NO: 153577 - RNA, 19 nt, Artificial Sequence
  Description of Artificial Sequence: Synthetic oligonucleotide
aggguucauccagaaggua

SEQ ID NO: 153578 - RNA, 19 nt, Artificial Sequence
  Description of Artificial Sequence: Synthetic oligonucleotide
uggaggggacgacgaugua

SEQ ID NO: 153579 - RNA, 19 nt, Artificial Sequence
  Description of Artificial Sequence: Synthetic oligonucleotide
ccucaacucauaccacuca

SEQ ID NO: 153580 - RNA, 19 nt, Artificial Sequence
  Description of Artificial Sequence: Synthetic oligonucleotide
acgcggggcgcugcacucg

SEQ ID NO: 153581 - RNA, 19 nt, Artificial Sequence
  Description of Artificial Sequence: Synthetic oligonucleotide
gugacggaguacgcauguc

SEQ ID NO: 153582 - RNA, 19 nt, Artificial Sequence
  Description of Artificial Sequence: Synthetic oligonucleotide
ccuucagccgaguguacaa

SEQ ID NO: 153583 - RNA, 19 nt, Artificial Sequence
  Description of Artificial Sequence: Synthetic oligonucleotide
ggcucucucgugcgacccc

SEQ ID NO: 153584 - RNA, 19 nt, Artificial Sequence
  Description of Artificial Sequence: Synthetic oligonucleotide
gugggccgcuuccauucga

SEQ ID NO: 153585 - RNA, 19 nt, Artificial Sequence
  Description of Artificial Sequence: Synthetic oligonucleotide
ggcucgcggagacgcgggg

SEQ ID NO: 153586 - RNA, 19 nt, Artificial Sequence
  Description of Artificial Sequence: Synthetic oligonucleotide
gguacgugacugccuccga

SEQ ID NO: 153587 - RNA, 19 nt, Artificial Sequence
  Description of Artificial Sequence: Synthetic oligonucleotide
cagcggacugcgggagccg

SEQ ID NO: 153588 - RNA, 19 nt, Artificial Sequence
  Description of Artificial Sequence: Synthetic oligonucleotide
gcucccuucagccgagugu

SEQ ID NO: 153589 - RNA, 19 nt, Artificial Sequence
  Description of Artificial Sequence: Synthetic oligonucleotide
cccauucgccauauugcca

SEQ ID NO: 153590 - RNA, 19 nt, Artificial Sequence
  Description of Artificial Sequence: Synthetic oligonucleotide
gcagaucuccgugggccgc

SEQ ID NO: 153591 - RNA, 19 nt, Artificial Sequence
  Description of Artificial Sequence: Synthetic oligonucleotide
ggcagcuugaaaccugcuu

SEQ ID NO: 153592 - RNA, 19 nt, Artificial Sequence
  Description of Artificial Sequence: Synthetic oligonucleotide
caacaucgauuucccggua

SEQ ID NO: 153593 - RNA, 19 nt, Artificial Sequence
  Description of Artificial Sequence: Synthetic oligonucleotide
cagaccugucaacaucgau

SEQ ID NO: 153594 - RNA, 19 nt, Artificial Sequence
  Description of Artificial Sequence: Synthetic oligonucleotide
caacccgagccaggacuuc

SEQ ID NO: 153595 - RNA, 19 nt, Artificial Sequence
  Description of Artificial Sequence: Synthetic oligonucleotide
cccguaaguucaaggucca

SEQ ID NO: 153596 - RNA, 19 nt, Artificial Sequence
  Description of Artificial Sequence: Synthetic oligonucleotide
cccgaguuuugcuggagua

SEQ ID NO: 153597 - RNA, 19 nt, Artificial Sequence
  Description of Artificial Sequence: Synthetic oligonucleotide
guuugcccaguuguuuaau

SEQ ID NO: 153598 - RNA, 19 nt, Artificial Sequence
  Description of Artificial Sequence: Synthetic oligonucleotide
gcucugaucuaggggcaca

SEQ ID NO: 153599 - RNA, 19 nt, Artificial Sequence
  Description of Artificial Sequence: Synthetic oligonucleotide
gcucucucgugcgacccca

SEQ ID NO: 153600 - RNA, 19 nt, Artificial Sequence
  Description of Artificial Sequence: Synthetic oligonucleotide
cagggcggggaaggaagga

SEQ ID NO: 153601 - RNA, 19 nt, Artificial Sequence
  Description of Artificial Sequence: Synthetic oligonucleotide
ccaaucgggcuggcucacg

SEQ ID NO: 153602 - RNA, 19 nt, Artificial Sequence
  Description of Artificial Sequence: Synthetic oligonucleotide
cccuucagccgaguguaca

SEQ ID NO: 153603 - RNA, 19 nt, Artificial Sequence
  Description of Artificial Sequence: Synthetic oligonucleotide
gguaccaaucgggcuggcu

SEQ ID NO: 153604 - RNA, 19 nt, Artificial Sequence
  Description of Artificial Sequence: Synthetic oligonucleotide
cuugguagucggccuucuu

SEQ ID NO: 153605 - RNA, 19 nt, Artificial Sequence
  Description of Artificial Sequence: Synthetic oligonucleotide
ccaggcgagaguagugccu

SEQ ID NO: 153606 - RNA, 19 nt, Artificial Sequence
  Description of Artificial Sequence: Synthetic oligonucleotide
ggcuccggugacggaguac

SEQ ID NO: 153607 - RNA, 19 nt, Artificial Sequence
  Description of Artificial Sequence: Synthetic oligonucleotide
ccauucgaugccccgaguu

SEQ ID NO: 153608 - RNA, 19 nt, Artificial Sequence
  Description of Artificial Sequence: Synthetic oligonucleotide
cgguuauauucuucaggua

SEQ ID NO: 153609 - RNA, 19 nt, Artificial Sequence
  Description of Artificial Sequence: Synthetic oligonucleotide
gccaccaccgcaacuuaau

SEQ ID NO: 153610 - RNA, 19 nt, Artificial Sequence
  Description of Artificial Sequence: Synthetic oligonucleotide
ccgagaagagagccuuucu

SEQ ID NO: 153611 - RNA, 19 nt, Artificial Sequence
  Description of Artificial Sequence: Synthetic oligonucleotide
cggcucucucgugcgaccc

SEQ ID NO: 153612 - RNA, 19 nt, Artificial Sequence
  Description of Artificial Sequence: Synthetic oligonucleotide
cagaucuccgugggccgcu

SEQ ID NO: 153613 - RNA, 19 nt, Artificial Sequence
  Description of Artificial Sequence: Synthetic oligonucleotide
gccgccgaugcuucuggau

SEQ ID NO: 153614 - RNA, 19 nt, Artificial Sequence
  Description of Artificial Sequence: Synthetic oligonucleotide
guaccucccggagguugau

SEQ ID NO: 153615 - RNA, 19 nt, Artificial Sequence
  Description of Artificial Sequence: Synthetic oligonucleotide
ccgaauccgcagcacuggu

SEQ ID NO: 153616 - RNA, 19 nt, Artificial Sequence
  Description of Artificial Sequence: Synthetic oligonucleotide
cuucaacguuggccucgau

SEQ ID NO: 153617 - RNA, 19 nt, Artificial Sequence
  Description of Artificial Sequence: Synthetic oligonucleotide
ccaccaccgcaacuuaauu

SEQ ID NO: 153618 - RNA, 19 nt, Artificial Sequence
  Description of Artificial Sequence: Synthetic oligonucleotide
auauauauaauauauauau

SEQ ID NO: 153619 - RNA, 19 nt, Artificial Sequence
  Description of Artificial Sequence: Synthetic oligonucleotide
acauacacgguauagaacc

SEQ ID NO: 153620 - RNA, 19 nt, Artificial Sequence
  Description of Artificial Sequence: Synthetic oligonucleotide
agaauucuaacccugaaac

SEQ ID NO: 153621 - RNA, 19 nt, Artificial Sequence
  Description of Artificial Sequence: Synthetic oligonucleotide
  modified_base (4)..(4): a, c, u, g, unknown or other
uuancuuugaguaacuucu

SEQ ID NO: 153622 - RNA, 19 nt, Artificial Sequence
  Description of Artificial Sequence: Synthetic oligonucleotide
acauaugauacauacacgg

SEQ ID NO: 153623 - RNA, 19 nt, Artificial Sequence
  Description of Artificial Sequence: Synthetic oligonucleotide
auauauauauaauauauau

SEQ ID NO: 153624 - RNA, 19 nt, Artificial Sequence
  Description of Artificial Sequence: Synthetic oligonucleotide
auauauaauauauauauuu

SEQ ID NO: 153625 - RNA, 19 nt, Artificial Sequence
  Description of Artificial Sequence: Synthetic oligonucleotide
aauagaauaaaccacucuu

SEQ ID NO: 153626 - RNA, 19 nt, Artificial Sequence
  Description of Artificial Sequence: Synthetic oligonucleotide
ugcuuaauaaaccaccucc

SEQ ID NO: 153627 - RNA, 19 nt, Artificial Sequence
  Description of Artificial Sequence: Synthetic oligonucleotide
uguauauaaccaauuauga

SEQ ID NO: 153628 - RNA, 19 nt, Artificial Sequence
  Description of Artificial Sequence: Synthetic oligonucleotide
ugauuuauuaagcauggca

SEQ ID NO: 153629 - RNA, 19 nt, Artificial Sequence
  Description of Artificial Sequence: Synthetic oligonucleotide
uguguauauauauauauaa

SEQ ID NO: 153630 - RNA, 19 nt, Artificial Sequence
  Description of Artificial Sequence: Synthetic oligonucleotide
  modified_base (2)..(2): a, c, u, g, unknown or other
ancuuugaguaacuucucc

SEQ ID NO: 153631 - RNA, 19 nt, Artificial Sequence
  Description of Artificial Sequence: Synthetic oligonucleotide
uguauauauauauauaaua

SEQ ID NO: 153632 - RNA, 19 nt, Artificial Sequence
  Description of Artificial Sequence: Synthetic oligonucleotide
uauagaaccaguuaccacu

SEQ ID NO: 153633 - RNA, 19 nt, Artificial Sequence
  Description of Artificial Sequence: Synthetic oligonucleotide
uuugguguaauucaagggu

SEQ ID NO: 153634 - RNA, 19 nt, Artificial Sequence
  Description of Artificial Sequence: Synthetic oligonucleotide
uuuagugacacccugugcu

SEQ ID NO: 153635 - RNA, 19 nt, Artificial Sequence
  Description of Artificial Sequence: Synthetic oligonucleotide
uguagauuaaagacucugg

SEQ ID NO: 153636 - RNA, 19 nt, Artificial Sequence
  Description of Artificial Sequence: Synthetic oligonucleotide
uauauaauauauauauuua

SEQ ID NO: 153637 - RNA, 19 nt, Artificial Sequence
  Description of Artificial Sequence: Synthetic oligonucleotide
acgguauagaaccaguuac

SEQ ID NO: 153638 - RNA, 19 nt, Artificial Sequence
  Description of Artificial Sequence: Synthetic oligonucleotide
auauaaccaauuaugaaac

SEQ ID NO: 153639 - RNA, 19 nt, Artificial Sequence
  Description of Artificial Sequence: Synthetic oligonucleotide
uauuugauagucaacuuaa

SEQ ID NO: 153640 - RNA, 19 nt, Artificial Sequence
  Description of Artificial Sequence: Synthetic oligonucleotide
auagcaccgccuuuaaucc

SEQ ID NO: 153641 - RNA, 19 nt, Artificial Sequence
  Description of Artificial Sequence: Synthetic oligonucleotide
uguguguauauauauauau

SEQ ID NO: 153642 - RNA, 19 nt, Artificial Sequence
  Description of Artificial Sequence: Synthetic oligonucleotide
uaaugguucagauaguagu

SEQ ID NO: 153643 - RNA, 19 nt, Artificial Sequence
  Description of Artificial Sequence: Synthetic oligonucleotide
uauauauauauauaauaua

SEQ ID NO: 153644 - RNA, 19 nt, Artificial Sequence
  Description of Artificial Sequence: Synthetic oligonucleotide
ugguugagaauucuaaccc

SEQ ID NO: 153645 - RNA, 19 nt, Artificial Sequence
  Description of Artificial Sequence: Synthetic oligonucleotide
uauauauauaauauauaua

SEQ ID NO: 153646 - RNA, 19 nt, Artificial Sequence
  Description of Artificial Sequence: Synthetic oligonucleotide
auauauauauauaauauau

SEQ ID NO: 153647 - RNA, 19 nt, Artificial Sequence
  Description of Artificial Sequence: Synthetic oligonucleotide
uauagcaccgccuuuaauc

SEQ ID NO: 153648 - RNA, 19 nt, Artificial Sequence
  Description of Artificial Sequence: Synthetic oligonucleotide
uauagcggcucucacaaag

SEQ ID NO: 153649 - RNA, 19 nt, Artificial Sequence
  Description of Artificial Sequence: Synthetic oligonucleotide
auauaauauauauauuuau

SEQ ID NO: 153650 - RNA, 19 nt, Artificial Sequence
  Description of Artificial Sequence: Synthetic oligonucleotide
aucauuguauaccugggag

SEQ ID NO: 153651 - RNA, 19 nt, Artificial Sequence
  Description of Artificial Sequence: Synthetic oligonucleotide
aggcagauuuaguaaaacc

SEQ ID NO: 153652 - RNA, 19 nt, Artificial Sequence
  Description of Artificial Sequence: Synthetic oligonucleotide
uauucuagggcuguguuag

SEQ ID NO: 153653 - RNA, 19 nt, Artificial Sequence
  Description of Artificial Sequence: Synthetic oligonucleotide
uauauauauauaauauaua

SEQ ID NO: 153654 - RNA, 19 nt, Artificial Sequence
  Description of Artificial Sequence: Synthetic oligonucleotide
  modified_base (5)..(5): a, c, u, g, unknown or other
uuuancuuugaguaacuuc

SEQ ID NO: 153655 - RNA, 19 nt, Artificial Sequence
  Description of Artificial Sequence: Synthetic oligonucleotide
ucuaccauagaaucuauau

SEQ ID NO: 153656 - RNA, 19 nt, Artificial Sequence
  Description of Artificial Sequence: Synthetic oligonucleotide
acugauaacagagaaauaa

SEQ ID NO: 153657 - RNA, 19 nt, Artificial Sequence
  Description of Artificial Sequence: Synthetic oligonucleotide
uaagucacgagaaagugua

SEQ ID NO: 153658 - RNA, 19 nt, Artificial Sequence
  Description of Artificial Sequence: Synthetic oligonucleotide
ucuuaagucacgagaaagu

SEQ ID NO: 153659 - RNA, 19 nt, Artificial Sequence
  Description of Artificial Sequence: Synthetic oligonucleotide
cauaaagauuguaaacuag

SEQ ID NO: 153660 - RNA, 19 nt, Artificial Sequence
  Description of Artificial Sequence: Synthetic oligonucleotide
uucagauaaugauagagua

SEQ ID NO: 153661 - RNA, 19 nt, Artificial Sequence
  Description of Artificial Sequence: Synthetic oligonucleotide
uaaacacgaguacugauuc

SEQ ID NO: 153662 - RNA, 19 nt, Artificial Sequence
  Description of Artificial Sequence: Synthetic oligonucleotide
agauuuaguaaaaccaagg

SEQ ID NO: 153663 - RNA, 19 nt, Artificial Sequence
  Description of Artificial Sequence: Synthetic oligonucleotide
aaacaauuaggucauuaua

SEQ ID NO: 153664 - RNA, 19 nt, Artificial Sequence
  Description of Artificial Sequence: Synthetic oligonucleotide
uauaagggaaccugggcug

SEQ ID NO: 153665 - RNA, 19 nt, Artificial Sequence
  Description of Artificial Sequence: Synthetic oligonucleotide
caauuaaacacgaguacug

SEQ ID NO: 153666 - RNA, 19 nt, Artificial Sequence
  Description of Artificial Sequence: Synthetic oligonucleotide
gaugacucaugacugacac

SEQ ID NO: 153667 - RNA, 19 nt, Artificial Sequence
  Description of Artificial Sequence: Synthetic oligonucleotide
ucagauaaugauagaguac

SEQ ID NO: 153668 - RNA, 19 nt, Artificial Sequence
  Description of Artificial Sequence: Synthetic oligonucleotide
ugauagucaacuuaauaua

SEQ ID NO: 153669 - RNA, 19 nt, Artificial Sequence
  Description of Artificial Sequence: Synthetic oligonucleotide
ucugguucauuguagguac

SEQ ID NO: 153670 - RNA, 19 nt, Artificial Sequence
  Description of Artificial Sequence: Synthetic oligonucleotide
uauauauaauauauauauu

SEQ ID NO: 153671 - RNA, 19 nt, Artificial Sequence
  Description of Artificial Sequence: Synthetic oligonucleotide
ugagucaaggguccaaaug

SEQ ID NO: 153672 - RNA, 19 nt, Artificial Sequence
  Description of Artificial Sequence: Synthetic oligonucleotide
ugagcauuauagcaccgcc

SEQ ID NO: 153673 - RNA, 19 nt, Artificial Sequence
  Description of Artificial Sequence: Synthetic oligonucleotide
gaauguuuauucuagggcu

SEQ ID NO: 153674 - RNA, 19 nt, Artificial Sequence
  Description of Artificial Sequence: Synthetic oligonucleotide
uuaaacacgaguacugauu

SEQ ID NO: 153675 - RNA, 19 nt, Artificial Sequence
  Description of Artificial Sequence: Synthetic oligonucleotide
uauggauaaguucuugaau

SEQ ID NO: 153676 - RNA, 19 nt, Artificial Sequence
  Description of Artificial Sequence: Synthetic oligonucleotide
cuacuauaagggaaccugg

SEQ ID NO: 153677 - RNA, 19 nt, Artificial Sequence
  Description of Artificial Sequence: Synthetic oligonucleotide
uggcaauuaaacacgagua

SEQ ID NO: 153678 - RNA, 19 nt, Artificial Sequence
  Description of Artificial Sequence: Synthetic oligonucleotide
uagaauaaaccacucuuua

SEQ ID NO: 153679 - RNA, 19 nt, Artificial Sequence
  Description of Artificial Sequence: Synthetic oligonucleotide
accaguuaccacuuaaacu

SEQ ID NO: 153680 - RNA, 19 nt, Artificial Sequence
  Description of Artificial Sequence: Synthetic oligonucleotide
uuguagauuaaagacucug

SEQ ID NO: 153681 - RNA, 19 nt, Artificial Sequence
  Description of Artificial Sequence: Synthetic oligonucleotide
uuucaguuggccugcagga

SEQ ID NO: 153682 - RNA, 19 nt, Artificial Sequence
  Description of Artificial Sequence: Synthetic oligonucleotide
gauaccggggacuucuuug

SEQ ID NO: 153683 - RNA, 19 nt, Artificial Sequence
  Description of Artificial Sequence: Synthetic oligonucleotide
uggauaaguucuugaauca

SEQ ID NO: 153684 - RNA, 19 nt, Artificial Sequence
  Description of Artificial Sequence: Synthetic oligonucleotide
gaaauaccauaacugauaa

SEQ ID NO: 153685 - RNA, 19 nt, Artificial Sequence
  Description of Artificial Sequence: Synthetic oligonucleotide
uaccauaacugauaacaga

SEQ ID NO: 153686 - RNA, 19 nt, Artificial Sequence
  Description of Artificial Sequence: Synthetic oligonucleotide
ucacucucauuauagcggc

SEQ ID NO: 153687 - RNA, 19 nt, Artificial Sequence
  Description of Artificial Sequence: Synthetic oligonucleotide
uucuuaagccacauuacua

SEQ ID NO: 153688 - RNA, 19 nt, Artificial Sequence
  Description of Artificial Sequence: Synthetic oligonucleotide
agcauggcaauuaaacacg

SEQ ID NO: 153689 - RNA, 19 nt, Artificial Sequence
  Description of Artificial Sequence: Synthetic oligonucleotide
uuaagcuugggagaagcca

SEQ ID NO: 153690 - RNA, 19 nt, Artificial Sequence
  Description of Artificial Sequence: Synthetic oligonucleotide
auagcacugagacggcgac

SEQ ID NO: 153691 - RNA, 19 nt, Artificial Sequence
  Description of Artificial Sequence: Synthetic oligonucleotide
uauagcacugagacggcga

SEQ ID NO: 153692 - RNA, 19 nt, Artificial Sequence
  Description of Artificial Sequence: Synthetic oligonucleotide
uaagcuugggagaagccau

SEQ ID NO: 153693 - RNA, 19 nt, Artificial Sequence
  Description of Artificial Sequence: Synthetic oligonucleotide
ucagcauaacacaaccauc

SEQ ID NO: 153694 - RNA, 19 nt, Artificial Sequence
  Description of Artificial Sequence: Synthetic oligonucleotide
ugguucagauaguagucag

SEQ ID NO: 153695 - RNA, 19 nt, Artificial Sequence
  Description of Artificial Sequence: Synthetic oligonucleotide
gauaaugauagaguacaga

SEQ ID NO: 153696 - RNA, 19 nt, Artificial Sequence
  Description of Artificial Sequence: Synthetic oligonucleotide
ugucauuucggauguuaug

SEQ ID NO: 153697 - RNA, 19 nt, Artificial Sequence
  Description of Artificial Sequence: Synthetic oligonucleotide
ugacuauguauauaaccaa

SEQ ID NO: 153698 - RNA, 19 nt, Artificial Sequence
  Description of Artificial Sequence: Synthetic oligonucleotide
uuagauguagugguugacu

SEQ ID NO: 153699 - RNA, 19 nt, Artificial Sequence
  Description of Artificial Sequence: Synthetic oligonucleotide
agaaccugauuacauuuca

SEQ ID NO: 153700 - RNA, 19 nt, Artificial Sequence
  Description of Artificial Sequence: Synthetic oligonucleotide
uuuauucuagggcuguguu

SEQ ID NO: 153701 - RNA, 19 nt, Artificial Sequence
  Description of Artificial Sequence: Synthetic oligonucleotide
uucaaaucauaaagauugu

SEQ ID NO: 153702 - RNA, 19 nt, Artificial Sequence
  Description of Artificial Sequence: Synthetic oligonucleotide
cugcauuggagucauguac

SEQ ID NO: 153703 - RNA, 19 nt, Artificial Sequence
  Description of Artificial Sequence: Synthetic oligonucleotide
guauauauauauauaauau

SEQ ID NO: 153704 - RNA, 19 nt, Artificial Sequence
  Description of Artificial Sequence: Synthetic oligonucleotide
gaauucuaacccugaaaca

SEQ ID NO: 153705 - RNA, 19 nt, Artificial Sequence
  Description of Artificial Sequence: Synthetic oligonucleotide
cuaccauagaaucuauauc

SEQ ID NO: 153706 - RNA, 19 nt, Artificial Sequence
  Description of Artificial Sequence: Synthetic oligonucleotide
auuaaacacgaguacugau

SEQ ID NO: 153707 - RNA, 19 nt, Artificial Sequence
  Description of Artificial Sequence: Synthetic oligonucleotide
caguggcugagcauuauag

SEQ ID NO: 153708 - RNA, 19 nt, Artificial Sequence
  Description of Artificial Sequence: Synthetic oligonucleotide
aacaucguacacugccuca

SEQ ID NO: 153709 - RNA, 19 nt, Artificial Sequence
  Description of Artificial Sequence: Synthetic oligonucleotide
aacacgaguacugauucau

SEQ ID NO: 153710 - RNA, 19 nt, Artificial Sequence
  Description of Artificial Sequence: Synthetic oligonucleotide
cuuaaacuucagauaauga

SEQ ID NO: 153711 - RNA, 19 nt, Artificial Sequence
  Description of Artificial Sequence: Synthetic oligonucleotide
ccucuuaucaguauaguuc

SEQ ID NO: 153712 - RNA, 19 nt, Artificial Sequence
  Description of Artificial Sequence: Synthetic oligonucleotide
uuaguaaaaccaaggucuu

SEQ ID NO: 153713 - RNA, 19 nt, Artificial Sequence
  Description of Artificial Sequence: Synthetic oligonucleotide
ugcauauguaggcagucua

SEQ ID NO: 153714 - RNA, 19 nt, Artificial Sequence
  Description of Artificial Sequence: Synthetic oligonucleotide
agugguugacuauuggcau

SEQ ID NO: 153715 - RNA, 19 nt, Artificial Sequence
  Description of Artificial Sequence: Synthetic oligonucleotide
ugaugacucaugacugaca

SEQ ID NO: 153716 - RNA, 19 nt, Artificial Sequence
  Description of Artificial Sequence: Synthetic oligonucleotide
aaacacgaguacugauuca

SEQ ID NO: 153717 - RNA, 19 nt, Artificial Sequence
  Description of Artificial Sequence: Synthetic oligonucleotide
uguaauucaaggguaccua

SEQ ID NO: 153718 - RNA, 19 nt, Artificial Sequence
  Description of Artificial Sequence: Synthetic oligonucleotide
uacacgguauagaaccagu

SEQ ID NO: 153719 - RNA, 19 nt, Artificial Sequence
  Description of Artificial Sequence: Synthetic oligonucleotide
agcauuauagcaccgccuu

SEQ ID NO: 153720 - RNA, 19 nt, Artificial Sequence
  Description of Artificial Sequence: Synthetic oligonucleotide
cacaguuacaugcaagaca

SEQ ID NO: 153721 - RNA, 19 nt, Artificial Sequence
  Description of Artificial Sequence: Synthetic oligonucleotide
guauagaaccaguuaccac

SEQ ID NO: 153722 - RNA, 19 nt, Artificial Sequence
  Description of Artificial Sequence: Synthetic oligonucleotide
guugacuauuggcauuaag

SEQ ID NO: 153723 - RNA, 19 nt, Artificial Sequence
  Description of Artificial Sequence: Synthetic oligonucleotide
ggcagauuuaguaaaacca

SEQ ID NO: 153724 - RNA, 19 nt, Artificial Sequence
  Description of Artificial Sequence: Synthetic oligonucleotide
aguauuacuucugguugag

SEQ ID NO: 153725 - RNA, 19 nt, Artificial Sequence
  Description of Artificial Sequence: Synthetic oligonucleotide
agccacauuacuacaguuc

SEQ ID NO: 153726 - RNA, 19 nt, Artificial Sequence
  Description of Artificial Sequence: Synthetic oligonucleotide
cacuaaugcacuggggagg

SEQ ID NO: 153727 - RNA, 19 nt, Artificial Sequence
  Description of Artificial Sequence: Synthetic oligonucleotide
uugcuuaauaaaccaccuc

SEQ ID NO: 153728 - RNA, 19 nt, Artificial Sequence
  Description of Artificial Sequence: Synthetic oligonucleotide
cuaugacuauguauauaac

SEQ ID NO: 153729 - RNA, 19 nt, Artificial Sequence
  Description of Artificial Sequence: Synthetic oligonucleotide
ucauuauagcggcucucac

SEQ ID NO: 153730 - RNA, 19 nt, Artificial Sequence
  Description of Artificial Sequence: Synthetic oligonucleotide
agucaaggguccaaaugac

SEQ ID NO: 153731 - RNA, 19 nt, Artificial Sequence
  Description of Artificial Sequence: Synthetic oligonucleotide
  modified_base (3)..(3): a, c, u, g, unknown or other
uancuuugaguaacuucuc

SEQ ID NO: 153732 - RNA, 19 nt, Artificial Sequence
  Description of Artificial Sequence: Synthetic oligonucleotide
aacuuagcuucuaagcaau

SEQ ID NO: 153733 - RNA, 19 nt, Artificial Sequence
  Description of Artificial Sequence: Synthetic oligonucleotide
ugguucauuguagguacag

SEQ ID NO: 153734 - RNA, 19 nt, Artificial Sequence
  Description of Artificial Sequence: Synthetic oligonucleotide
ggcaauuaaacacgaguac

SEQ ID NO: 153735 - RNA, 19 nt, Artificial Sequence
  Description of Artificial Sequence: Synthetic oligonucleotide
  modified_base (9)..(9): a, c, u, g, unknown or other
uccuuuuancuuugaguaa

SEQ ID NO: 153736 - RNA, 19 nt, Artificial Sequence
  Description of Artificial Sequence: Synthetic oligonucleotide
uuauucuagggcuguguua

SEQ ID NO: 153737 - RNA, 19 nt, Artificial Sequence
  Description of Artificial Sequence: Synthetic oligonucleotide
auagcggcucucacaaagc

SEQ ID NO: 153738 - RNA, 19 nt, Artificial Sequence
  Description of Artificial Sequence: Synthetic oligonucleotide
uuugggacaugagaauccu

SEQ ID NO: 153739 - RNA, 19 nt, Artificial Sequence
  Description of Artificial Sequence: Synthetic oligonucleotide
agucaacuuaauauaacaa

SEQ ID NO: 153740 - RNA, 19 nt, Artificial Sequence
  Description of Artificial Sequence: Synthetic oligonucleotide
gaacaucguacacugccuc

SEQ ID NO: 153741 - RNA, 19 nt, Artificial Sequence
  Description of Artificial Sequence: Synthetic oligonucleotide
acucuucauaggaacuuac

SEQ ID NO: 153742 - RNA, 19 nt, Artificial Sequence
  Description of Artificial Sequence: Synthetic oligonucleotide
guguauuguuuacuuguac

SEQ ID NO: 153743 - RNA, 19 nt, Artificial Sequence
  Description of Artificial Sequence: Synthetic oligonucleotide
auagaauaaaccacucuuu

SEQ ID NO: 153744 - RNA, 19 nt, Artificial Sequence
  Description of Artificial Sequence: Synthetic oligonucleotide
acgaguacugauucauuau

SEQ ID NO: 153745 - RNA, 19 nt, Artificial Sequence
  Description of Artificial Sequence: Synthetic oligonucleotide
auacacgguauagaaccag

SEQ ID NO: 153746 - RNA, 19 nt, Artificial Sequence
  Description of Artificial Sequence: Synthetic oligonucleotide
agauaaugauagaguacag

SEQ ID NO: 153747 - RNA, 19 nt, Artificial Sequence
  Description of Artificial Sequence: Synthetic oligonucleotide
  modified_base (6)..(6): a, c, u, g, unknown or other
uuuuancuuugaguaacuu

SEQ ID NO: 153748 - RNA, 19 nt, Artificial Sequence
  Description of Artificial Sequence: Synthetic oligonucleotide
  modified_base (8)..(8): a, c, u, g, unknown or other
ccuuuuancuuugaguaac

SEQ ID NO: 153749 - RNA, 19 nt, Artificial Sequence
  Description of Artificial Sequence: Synthetic oligonucleotide
auuauagcaccgccuuuaa

SEQ ID NO: 153750 - RNA, 19 nt, Artificial Sequence
  Description of Artificial Sequence: Synthetic oligonucleotide
uucaguuggccugcaggag

SEQ ID NO: 153751 - RNA, 19 nt, Artificial Sequence
  Description of Artificial Sequence: Synthetic oligonucleotide
cugagcauuauagcaccgc

SEQ ID NO: 153752 - RNA, 19 nt, Artificial Sequence
  Description of Artificial Sequence: Synthetic oligonucleotide
acuaaugcacuggggagga

SEQ ID NO: 153753 - RNA, 19 nt, Artificial Sequence
  Description of Artificial Sequence: Synthetic oligonucleotide
auacaacucauggggcagg

SEQ ID NO: 153754 - RNA, 19 nt, Artificial Sequence
  Description of Artificial Sequence: Synthetic oligonucleotide
uucugguauuucaguuggc

SEQ ID NO: 153755 - RNA, 19 nt, Artificial Sequence
  Description of Artificial Sequence: Synthetic oligonucleotide
acauuacuacaguucuuaa

SEQ ID NO: 153756 - RNA, 19 nt, Artificial Sequence
  Description of Artificial Sequence: Synthetic oligonucleotide
ggauuucuacuauaaggga

SEQ ID NO: 153757 - RNA, 19 nt, Artificial Sequence
  Description of Artificial Sequence: Synthetic oligonucleotide
uuauagcaccgccuuuaau

SEQ ID NO: 153758 - RNA, 19 nt, Artificial Sequence
  Description of Artificial Sequence: Synthetic oligonucleotide
acgaaauaccauaacugau

SEQ ID NO: 153759 - RNA, 19 nt, Artificial Sequence
  Description of Artificial Sequence: Synthetic oligonucleotide
gguauagaaccaguuacca

SEQ ID NO: 153760 - RNA, 19 nt, Artificial Sequence
  Description of Artificial Sequence: Synthetic oligonucleotide
ucguacacugccucagaau

SEQ ID NO: 153761 - RNA, 19 nt, Artificial Sequence
  Description of Artificial Sequence: Synthetic oligonucleotide
gguucauuguagguacagg

SEQ ID NO: 153762 - RNA, 19 nt, Artificial Sequence
  Description of Artificial Sequence: Synthetic oligonucleotide
gcaagacaaagcuuguguc

SEQ ID NO: 153763 - RNA, 19 nt, Artificial Sequence
  Description of Artificial Sequence: Synthetic oligonucleotide
agacucugguucauuguag

SEQ ID NO: 153764 - RNA, 19 nt, Artificial Sequence
  Description of Artificial Sequence: Synthetic oligonucleotide
gguucagauaguagucagg

SEQ ID NO: 153765 - RNA, 19 nt, Artificial Sequence
  Description of Artificial Sequence: Synthetic oligonucleotide
caguuaccacuuaaacuuc

SEQ ID NO: 153766 - RNA, 19 nt, Artificial Sequence
  Description of Artificial Sequence: Synthetic oligonucleotide
auauguacuucaguacuuu

SEQ ID NO: 153767 - RNA, 19 nt, Artificial Sequence
  Description of Artificial Sequence: Synthetic oligonucleotide
auaccugggagccccuccu

SEQ ID NO: 153768 - RNA, 19 nt, Artificial Sequence
  Description of Artificial Sequence: Synthetic oligonucleotide
cguacacugccucagaaug

SEQ ID NO: 153769 - RNA, 19 nt, Artificial Sequence
  Description of Artificial Sequence: Synthetic oligonucleotide
accuuuaacaagagaaaua

SEQ ID NO: 153770 - RNA, 19 nt, Artificial Sequence
  Description of Artificial Sequence: Synthetic oligonucleotide
aguuaccacuuaaacuuca

SEQ ID NO: 153771 - RNA, 19 nt, Artificial Sequence
  Description of Artificial Sequence: Synthetic oligonucleotide
cauaugauacauacacggu

SEQ ID NO: 153772 - RNA, 19 nt, Artificial Sequence
  Description of Artificial Sequence: Synthetic oligonucleotide
cacgaguacugauucauua

SEQ ID NO: 153773 - RNA, 19 nt, Artificial Sequence
  Description of Artificial Sequence: Synthetic oligonucleotide
aaacuuagauguagugguu

SEQ ID NO: 153774 - RNA, 19 nt, Artificial Sequence
  Description of Artificial Sequence: Synthetic oligonucleotide
gaugagucaaggguccaaa

SEQ ID NO: 153775 - RNA, 19 nt, Artificial Sequence
  Description of Artificial Sequence: Synthetic oligonucleotide
cucauuauagcggcucuca

SEQ ID NO: 153776 - RNA, 19 nt, Artificial Sequence
  Description of Artificial Sequence: Synthetic oligonucleotide
  modified_base (7)..(7): a, c, u, g, unknown or other
cuuuuancuuugaguaacu

SEQ ID NO: 153777 - RNA, 19 nt, Artificial Sequence
  Description of Artificial Sequence: Synthetic oligonucleotide
agucacgagaaaguguauu

SEQ ID NO: 153778 - RNA, 19 nt, Artificial Sequence
  Description of Artificial Sequence: Synthetic oligonucleotide
augauacauacacgguaua

SEQ ID NO: 153779 - RNA, 19 nt, Artificial Sequence
  Description of Artificial Sequence: Synthetic oligonucleotide
guguguauauauauauaua

SEQ ID NO: 153780 - RNA, 19 nt, Artificial Sequence
  Description of Artificial Sequence: Synthetic oligonucleotide
caauaagguacuggcauaa

SEQ ID NO: 153781 - RNA, 19 nt, Artificial Sequence
  Description of Artificial Sequence: Synthetic oligonucleotide
guaggcagucuacccuugc

SEQ ID NO: 153782 - RNA, 19 nt, Artificial Sequence
  Description of Artificial Sequence: Synthetic oligonucleotide
aagcacaagcugaauucaa

SEQ ID NO: 153783 - RNA, 19 nt, Artificial Sequence
  Description of Artificial Sequence: Synthetic oligonucleotide
guguauauauauauauaau

SEQ ID NO: 153784 - RNA, 19 nt, Artificial Sequence
  Description of Artificial Sequence: Synthetic oligonucleotide
aacugauaacagagaaaua

SEQ ID NO: 153785 - RNA, 19 nt, Artificial Sequence
  Description of Artificial Sequence: Synthetic oligonucleotide
aguguauuguuuacuugua

SEQ ID NO: 153786 - RNA, 19 nt, Artificial Sequence
  Description of Artificial Sequence: Synthetic oligonucleotide
gcaauuaaacacgaguacu

SEQ ID NO: 153787 - RNA, 19 nt, Artificial Sequence
  Description of Artificial Sequence: Synthetic oligonucleotide
cacgguauagaaccaguua

SEQ ID NO: 153788 - RNA, 19 nt, Artificial Sequence
  Description of Artificial Sequence: Synthetic oligonucleotide
cuuuagucagagagugaaa

SEQ ID NO: 153789 - RNA, 19 nt, Artificial Sequence
  Description of Artificial Sequence: Synthetic oligonucleotide
agcaccgccuuuaauccca

SEQ ID NO: 153790 - RNA, 19 nt, Artificial Sequence
  Description of Artificial Sequence: Synthetic oligonucleotide
gauuguaaacuaggaccaa

SEQ ID NO: 153791 - RNA, 19 nt, Artificial Sequence
  Description of Artificial Sequence: Synthetic oligonucleotide
gccacauuacuacaguucu

SEQ ID NO: 153792 - RNA, 19 nt, Artificial Sequence
  Description of Artificial Sequence: Synthetic oligonucleotide
auagaaccaguuaccacuu

SEQ ID NO: 153793 - RNA, 19 nt, Artificial Sequence
  Description of Artificial Sequence: Synthetic oligonucleotide
cagcaucagcauaacacaa

SEQ ID NO: 153794 - RNA, 19 nt, Artificial Sequence
  Description of Artificial Sequence: Synthetic oligonucleotide
cuagggagcugcaucuaaa

SEQ ID NO: 153795 - RNA, 19 nt, Artificial Sequence
  Description of Artificial Sequence: Synthetic oligonucleotide
gaccccucuuaucaguaua

SEQ ID NO: 153796 - RNA, 19 nt, Artificial Sequence
  Description of Artificial Sequence: Synthetic oligonucleotide
uuauagcggcucucacaaa

SEQ ID NO: 153797 - RNA, 19 nt, Artificial Sequence
  Description of Artificial Sequence: Synthetic oligonucleotide
auucuagggcuguguuaga

SEQ ID NO: 153798 - RNA, 19 nt, Artificial Sequence
  Description of Artificial Sequence: Synthetic oligonucleotide
agauaccggggacuucuuu

SEQ ID NO: 153799 - RNA, 19 nt, Artificial Sequence
  Description of Artificial Sequence: Synthetic oligonucleotide
gcauauguaggcagucuac

SEQ ID NO: 153800 - RNA, 19 nt, Artificial Sequence
  Description of Artificial Sequence: Synthetic oligonucleotide
guguguguauauauauaua

SEQ ID NO: 153801 - RNA, 19 nt, Artificial Sequence
  Description of Artificial Sequence: Synthetic oligonucleotide
cuauaucuugguauuuguu

SEQ ID NO: 153802 - RNA, 19 nt, Artificial Sequence
  Description of Artificial Sequence: Synthetic oligonucleotide
gacggcgaccccucuuauc

SEQ ID NO: 153803 - RNA, 19 nt, Artificial Sequence
  Description of Artificial Sequence: Synthetic oligonucleotide
ugccaucaugugacuucga

SEQ ID NO: 153804 - RNA, 19 nt, Artificial Sequence
  Description of Artificial Sequence: Synthetic oligonucleotide
aagucacgagaaaguguau

SEQ ID NO: 153805 - RNA, 19 nt, Artificial Sequence
  Description of Artificial Sequence: Synthetic oligonucleotide
gagcauuauagcaccgccu

SEQ ID NO: 153806 - RNA, 19 nt, Artificial Sequence
  Description of Artificial Sequence: Synthetic oligonucleotide
ggagucauguacuuugauu

SEQ ID NO: 153807 - RNA, 19 nt, Artificial Sequence
  Description of Artificial Sequence: Synthetic oligonucleotide
gcaauaagguacuggcaua

SEQ ID NO: 153808 - RNA, 19 nt, Artificial Sequence
  Description of Artificial Sequence: Synthetic oligonucleotide
acacgguauagaaccaguu

SEQ ID NO: 153809 - RNA, 19 nt, Artificial Sequence
  Description of Artificial Sequence: Synthetic oligonucleotide
guauuacuucugguugaga

SEQ ID NO: 153810 - RNA, 19 nt, Artificial Sequence
  Description of Artificial Sequence: Synthetic oligonucleotide
gccaucaugugacuucgaa

SEQ ID NO: 153811 - RNA, 19 nt, Artificial Sequence
  Description of Artificial Sequence: Synthetic oligonucleotide
caucguacacugccucaga

SEQ ID NO: 153812 - RNA, 19 nt, Artificial Sequence
  Description of Artificial Sequence: Synthetic oligonucleotide
caucaucuacaacuuuagu

SEQ ID NO: 153813 - RNA, 19 nt, Artificial Sequence
  Description of Artificial Sequence: Synthetic oligonucleotide
cugguucauuguagguaca

SEQ ID NO: 153814 - RNA, 19 nt, Artificial Sequence
  Description of Artificial Sequence: Synthetic oligonucleotide
uccggguuucaaggaggac

SEQ ID NO: 153815 - RNA, 19 nt, Artificial Sequence
  Description of Artificial Sequence: Synthetic oligonucleotide
gcauggcaauuaaacacga

SEQ ID NO: 153816 - RNA, 19 nt, Artificial Sequence
  Description of Artificial Sequence: Synthetic oligonucleotide
gaggggagucuuagaaaua

SEQ ID NO: 153817 - RNA, 19 nt, Artificial Sequence
  Description of Artificial Sequence: Synthetic oligonucleotide
guaggacaagagcaucuuu

SEQ ID NO: 153818 - RNA, 19 nt, Artificial Sequence
  Description of Artificial Sequence: Synthetic oligonucleotide
acaaggguuccuggauuua

SEQ ID NO: 153819 - RNA, 19 nt, Artificial Sequence
  Description of Artificial Sequence: Synthetic oligonucleotide
acacgaguacugauucauu

SEQ ID NO: 153820 - RNA, 19 nt, Artificial Sequence
  Description of Artificial Sequence: Synthetic oligonucleotide
cgaguacugauucauuaua

SEQ ID NO: 153821 - RNA, 19 nt, Artificial Sequence
  Description of Artificial Sequence: Synthetic oligonucleotide
cugcauauguaggcagucu

SEQ ID NO: 153822 - RNA, 19 nt, Artificial Sequence
  Description of Artificial Sequence: Synthetic oligonucleotide
cugaucuagaggggagucu

SEQ ID NO: 153823 - RNA, 19 nt, Artificial Sequence
  Description of Artificial Sequence: Synthetic oligonucleotide
ccggguuucaaggaggacu

SEQ ID NO: 153824 - RNA, 19 nt, Artificial Sequence
  Description of Artificial Sequence: Synthetic oligonucleotide
ccaucaugugacuucgaau

SEQ ID NO: 153825 - RNA, 19 nt, Artificial Sequence
  Description of Artificial Sequence: Synthetic oligonucleotide
ccuagggagcugcaucuaa

SEQ ID NO: 153826 - RNA, 19 nt, Artificial Sequence
  Description of Artificial Sequence: Synthetic oligonucleotide
cacucucauuauagcggcu

SEQ ID NO: 153827 - RNA, 19 nt, Artificial Sequence
  Description of Artificial Sequence: Synthetic oligonucleotide
ggcgaccccucuuaucagu

SEQ ID NO: 153828 - RNA, 19 nt, Artificial Sequence
  Description of Artificial Sequence: Synthetic oligonucleotide
cccucuuaucaguauaguu

SEQ ID NO: 153829 - RNA, 19 nt, Artificial Sequence
  Description of Artificial Sequence: Synthetic oligonucleotide
gguugacuauuggcauuaa

SEQ ID NO: 153830 - RNA, 19 nt, Artificial Sequence
  Description of Artificial Sequence: Synthetic oligonucleotide
cgaccccucuuaucaguau

SEQ ID NO: 153831 - RNA, 19 nt, Artificial Sequence
  Description of Artificial Sequence: Synthetic oligonucleotide
uuuacuguguauaauaugg

SEQ ID NO: 153832 - RNA, 19 nt, Artificial Sequence
  Description of Artificial Sequence: Synthetic oligonucleotide
aauccuuacacccagugcc

SEQ ID NO: 153833 - RNA, 19 nt, Artificial Sequence
  Description of Artificial Sequence: Synthetic oligonucleotide
aaaccuaacuaguucaagc

SEQ ID NO: 153834 - RNA, 19 nt, Artificial Sequence
  Description of Artificial Sequence: Synthetic oligonucleotide
aaauuagggaccuugcggg

SEQ ID NO: 153835 - RNA, 19 nt, Artificial Sequence
  Description of Artificial Sequence: Synthetic oligonucleotide
uaaauuagggaccuugcgg

SEQ ID NO: 153836 - RNA, 19 nt, Artificial Sequence
  Description of Artificial Sequence: Synthetic oligonucleotide
uaaguuuacuuguauacgg

SEQ ID NO: 153837 - RNA, 19 nt, Artificial Sequence
  Description of Artificial Sequence: Synthetic oligonucleotide
uguaccuuaaaauaagaga

SEQ ID NO: 153838 - RNA, 19 nt, Artificial Sequence
  Description of Artificial Sequence: Synthetic oligonucleotide
uaaagaauccucuuuagcu

SEQ ID NO: 153839 - RNA, 19 nt, Artificial Sequence
  Description of Artificial Sequence: Synthetic oligonucleotide
uucagcuuaaaucaacuag

SEQ ID NO: 153840 - RNA, 19 nt, Artificial Sequence
  Description of Artificial Sequence: Synthetic oligonucleotide
aaguguaggacuugucugc

SEQ ID NO: 153841 - RNA, 19 nt, Artificial Sequence
  Description of Artificial Sequence: Synthetic oligonucleotide
gauuuuaugaagugcagug

SEQ ID NO: 153842 - RNA, 19 nt, Artificial Sequence
  Description of Artificial Sequence: Synthetic oligonucleotide
ucagcuuaaaucaacuagc

SEQ ID NO: 153843 - RNA, 19 nt, Artificial Sequence
  Description of Artificial Sequence: Synthetic oligonucleotide
aaucagauaauggauaugu

SEQ ID NO: 153844 - RNA, 19 nt, Artificial Sequence
  Description of Artificial Sequence: Synthetic oligonucleotide
acucauccauuauugaucc

SEQ ID NO: 153845 - RNA, 19 nt, Artificial Sequence
  Description of Artificial Sequence: Synthetic oligonucleotide
aacaguuaaaacccagcuc

SEQ ID NO: 153846 - RNA, 19 nt, Artificial Sequence
  Description of Artificial Sequence: Synthetic oligonucleotide
aauuaaacugacugugaug

SEQ ID NO: 153847 - RNA, 19 nt, Artificial Sequence
  Description of Artificial Sequence: Synthetic oligonucleotide
uuaaguuuacuuguauacg

SEQ ID NO: 153848 - RNA, 19 nt, Artificial Sequence
  Description of Artificial Sequence: Synthetic oligonucleotide
uacaacguaauuuaaacuu

SEQ ID NO: 153849 - RNA, 19 nt, Artificial Sequence
  Description of Artificial Sequence: Synthetic oligonucleotide
ugcauuggcgacauaaaag

SEQ ID NO: 153850 - RNA, 19 nt, Artificial Sequence
  Description of Artificial Sequence: Synthetic oligonucleotide
uguacuuaauuaaacugac

SEQ ID NO: 153851 - RNA, 19 nt, Artificial Sequence
  Description of Artificial Sequence: Synthetic oligonucleotide
aaguagaccuuuuauuucu

SEQ ID NO: 153852 - RNA, 19 nt, Artificial Sequence
  Description of Artificial Sequence: Synthetic oligonucleotide
gcaagauagauuuauaggc

SEQ ID NO: 153853 - RNA, 19 nt, Artificial Sequence
  Description of Artificial Sequence: Synthetic oligonucleotide
uuuagauacccuguguagg

SEQ ID NO: 153854 - RNA, 19 nt, Artificial Sequence
  Description of Artificial Sequence: Synthetic oligonucleotide
auaaauuagggaccuugcg

SEQ ID NO: 153855 - RNA, 19 nt, Artificial Sequence
  Description of Artificial Sequence: Synthetic oligonucleotide
uuguaccuuaaaauaagag

SEQ ID NO: 153856 - RNA, 19 nt, Artificial Sequence
  Description of Artificial Sequence: Synthetic oligonucleotide
uuuacucacguucaccuca

SEQ ID NO: 153857 - RNA, 19 nt, Artificial Sequence
  Description of Artificial Sequence: Synthetic oligonucleotide
aaccuaacuaguucaagca

SEQ ID NO: 153858 - RNA, 19 nt, Artificial Sequence
  Description of Artificial Sequence: Synthetic oligonucleotide
aaagaauaguguacaugcc

SEQ ID NO: 153859 - RNA, 19 nt, Artificial Sequence
  Description of Artificial Sequence: Synthetic oligonucleotide
auacggaacaaccacaaga

SEQ ID NO: 153860 - RNA, 19 nt, Artificial Sequence
  Description of Artificial Sequence: Synthetic oligonucleotide
ucuacugucgugucaaaca

SEQ ID NO: 153861 - RNA, 19 nt, Artificial Sequence
  Description of Artificial Sequence: Synthetic oligonucleotide
gaagacgggucacauaucc

SEQ ID NO: 153862 - RNA, 19 nt, Artificial Sequence
  Description of Artificial Sequence: Synthetic oligonucleotide
aaauuaaguuuacuuguau

SEQ ID NO: 153863 - RNA, 19 nt, Artificial Sequence
  Description of Artificial Sequence: Synthetic oligonucleotide
uucuaaagggcaaucagau

SEQ ID NO: 153864 - RNA, 19 nt, Artificial Sequence
  Description of Artificial Sequence: Synthetic oligonucleotide
aaugaaguagcguguugug

SEQ ID NO: 153865 - RNA, 19 nt, Artificial Sequence
  Description of Artificial Sequence: Synthetic oligonucleotide
uguauacggaacaaccaca

SEQ ID NO: 153866 - RNA, 19 nt, Artificial Sequence
  Description of Artificial Sequence: Synthetic oligonucleotide
uucguuaacaguuccacau

SEQ ID NO: 153867 - RNA, 19 nt, Artificial Sequence
  Description of Artificial Sequence: Synthetic oligonucleotide
uuuguaccuuaaaauaaga

SEQ ID NO: 153868 - RNA, 19 nt, Artificial Sequence
  Description of Artificial Sequence: Synthetic oligonucleotide
uucacuguuccaaggauac

SEQ ID NO: 153869 - RNA, 19 nt, Artificial Sequence
  Description of Artificial Sequence: Synthetic oligonucleotide
agauacccuguguaggacc

SEQ ID NO: 153870 - RNA, 19 nt, Artificial Sequence
  Description of Artificial Sequence: Synthetic oligonucleotide
uacuguguauaauauggug

SEQ ID NO: 153871 - RNA, 19 nt, Artificial Sequence
  Description of Artificial Sequence: Synthetic oligonucleotide
ugucuagaaugcuucaagc

SEQ ID NO: 153872 - RNA, 19 nt, Artificial Sequence
  Description of Artificial Sequence: Synthetic oligonucleotide
uccauuauugauccaggga

SEQ ID NO: 153873 - RNA, 19 nt, Artificial Sequence
  Description of Artificial Sequence: Synthetic oligonucleotide
ucuuccuauucguuaacag

SEQ ID NO: 153874 - RNA, 19 nt, Artificial Sequence
  Description of Artificial Sequence: Synthetic oligonucleotide
cuuucuaaagggcaaucag

SEQ ID NO: 153875 - RNA, 19 nt, Artificial Sequence
  Description of Artificial Sequence: Synthetic oligonucleotide
augacuuucccuuguuacg

SEQ ID NO: 153876 - RNA, 19 nt, Artificial Sequence
  Description of Artificial Sequence: Synthetic oligonucleotide
uguaauuccguuugcccug

SEQ ID NO: 153877 - RNA, 19 nt, Artificial Sequence
  Description of Artificial Sequence: Synthetic oligonucleotide
accauugaaucaacaaucc

SEQ ID NO: 153878 - RNA, 19 nt, Artificial Sequence
  Description of Artificial Sequence: Synthetic oligonucleotide
uguugcauaguguucuucu

SEQ ID NO: 153879 - RNA, 19 nt, Artificial Sequence
  Description of Artificial Sequence: Synthetic oligonucleotide
ugacggucaagcuuugucc

SEQ ID NO: 153880 - RNA, 19 nt, Artificial Sequence
  Description of Artificial Sequence: Synthetic oligonucleotide
aaauuccgucuuaagugcc

SEQ ID NO: 153881 - RNA, 19 nt, Artificial Sequence
  Description of Artificial Sequence: Synthetic oligonucleotide
uuaucacucaguuguggcc

SEQ ID NO: 153882 - RNA, 19 nt, Artificial Sequence
  Description of Artificial Sequence: Synthetic oligonucleotide
ucuacuuucaagugccccu

SEQ ID NO: 153883 - RNA, 19 nt, Artificial Sequence
  Description of Artificial Sequence: Synthetic oligonucleotide
guaaagaauccucuuuagc

SEQ ID NO: 153884 - RNA, 19 nt, Artificial Sequence
  Description of Artificial Sequence: Synthetic oligonucleotide
uauucguuaacaguuccac

SEQ ID NO: 153885 - RNA, 19 nt, Artificial Sequence
  Description of Artificial Sequence: Synthetic oligonucleotide
gaccauugaaucaacaauc

SEQ ID NO: 153886 - RNA, 19 nt, Artificial Sequence
  Description of Artificial Sequence: Synthetic oligonucleotide
guuacguuaaguuguuuca

SEQ ID NO: 153887 - RNA, 19 nt, Artificial Sequence
  Description of Artificial Sequence: Synthetic oligonucleotide
auccauuauugauccaggg

SEQ ID NO: 153888 - RNA, 19 nt, Artificial Sequence
  Description of Artificial Sequence: Synthetic oligonucleotide
ugacauuagauguggcaug

SEQ ID NO: 153889 - RNA, 19 nt, Artificial Sequence
  Description of Artificial Sequence: Synthetic oligonucleotide
acuuacuuuccagagagga

SEQ ID NO: 153890 - RNA, 19 nt, Artificial Sequence
  Description of Artificial Sequence: Synthetic oligonucleotide
aguaucggauggaaggccc

SEQ ID NO: 153891 - RNA, 19 nt, Artificial Sequence
  Description of Artificial Sequence: Synthetic oligonucleotide
uuacuguguauaauauggu

SEQ ID NO: 153892 - RNA, 19 nt, Artificial Sequence
  Description of Artificial Sequence: Synthetic oligonucleotide
uuacguuaaguuguuucag

SEQ ID NO: 153893 - RNA, 19 nt, Artificial Sequence
  Description of Artificial Sequence: Synthetic oligonucleotide
aaagaguaucggauggaag

SEQ ID NO: 153894 - RNA, 19 nt, Artificial Sequence
  Description of Artificial Sequence: Synthetic oligonucleotide
uuaaaacccagcucugauc

SEQ ID NO: 153895 - RNA, 19 nt, Artificial Sequence
  Description of Artificial Sequence: Synthetic oligonucleotide
agagacucauccauuauug

SEQ ID NO: 153896 - RNA, 19 nt, Artificial Sequence
  Description of Artificial Sequence: Synthetic oligonucleotide
gugucuagaaugcuucaag

SEQ ID NO: 153897 - RNA, 19 nt, Artificial Sequence
  Description of Artificial Sequence: Synthetic oligonucleotide
cuacugucgugucaaacag

SEQ ID NO: 153898 - RNA, 19 nt, Artificial Sequence
  Description of Artificial Sequence: Synthetic oligonucleotide
acgaauccgaauucccuuc

SEQ ID NO: 153899 - RNA, 19 nt, Artificial Sequence
  Description of Artificial Sequence: Synthetic oligonucleotide
uuacaguccaauuguaauu

SEQ ID NO: 153900 - RNA, 19 nt, Artificial Sequence
  Description of Artificial Sequence: Synthetic oligonucleotide
gaagacgaauccgaauucc

SEQ ID NO: 153901 - RNA, 19 nt, Artificial Sequence
  Description of Artificial Sequence: Synthetic oligonucleotide
uacaguccaauuguaauuc

SEQ ID NO: 153902 - RNA, 19 nt, Artificial Sequence
  Description of Artificial Sequence: Synthetic oligonucleotide
cuuauaaaaccuaacuagu

SEQ ID NO: 153903 - RNA, 19 nt, Artificial Sequence
  Description of Artificial Sequence: Synthetic oligonucleotide
uacguuaaguuguuucagu

SEQ ID NO: 153904 - RNA, 19 nt, Artificial Sequence
  Description of Artificial Sequence: Synthetic oligonucleotide
aguuuacuuguauacggaa

SEQ ID NO: 153905 - RNA, 19 nt, Artificial Sequence
  Description of Artificial Sequence: Synthetic oligonucleotide
uccaauuguaauuccguuu

SEQ ID NO: 153906 - RNA, 19 nt, Artificial Sequence
  Description of Artificial Sequence: Synthetic oligonucleotide
agcuccgucaagugcaaag

SEQ ID NO: 153907 - RNA, 19 nt, Artificial Sequence
  Description of Artificial Sequence: Synthetic oligonucleotide
uguauaauaugguguccuc

SEQ ID NO: 153908 - RNA, 19 nt, Artificial Sequence
  Description of Artificial Sequence: Synthetic oligonucleotide
gaaguagcguguugugacc

SEQ ID NO: 153909 - RNA, 19 nt, Artificial Sequence
  Description of Artificial Sequence: Synthetic oligonucleotide
uuacucacguucaccucag

SEQ ID NO: 153910 - RNA, 19 nt, Artificial Sequence
  Description of Artificial Sequence: Synthetic oligonucleotide
auaccagggaaguccugac

SEQ ID NO: 153911 - RNA, 19 nt, Artificial Sequence
  Description of Artificial Sequence: Synthetic oligonucleotide
acucacguucaccucagug

SEQ ID NO: 153912 - RNA, 19 nt, Artificial Sequence
  Description of Artificial Sequence: Synthetic oligonucleotide
aaguuuacuuguauacgga

SEQ ID NO: 153913 - RNA, 19 nt, Artificial Sequence
  Description of Artificial Sequence: Synthetic oligonucleotide
ucccuuguuacguuaaguu

SEQ ID NO: 153914 - RNA, 19 nt, Artificial Sequence
  Description of Artificial Sequence: Synthetic oligonucleotide
cauugaaucaacaauccau

SEQ ID NO: 153915 - RNA, 19 nt, Artificial Sequence
  Description of Artificial Sequence: Synthetic oligonucleotide
auaauaugguguccucugu

SEQ ID NO: 153916 - RNA, 19 nt, Artificial Sequence
  Description of Artificial Sequence: Synthetic oligonucleotide
ugcaacuguugcauagugu

SEQ ID NO: 153917 - RNA, 19 nt, Artificial Sequence
  Description of Artificial Sequence: Synthetic oligonucleotide
ggagcagucuaccaguggc

SEQ ID NO: 153918 - RNA, 19 nt, Artificial Sequence
  Description of Artificial Sequence: Synthetic oligonucleotide
aaacugacugugaugacuu

SEQ ID NO: 153919 - RNA, 19 nt, Artificial Sequence
  Description of Artificial Sequence: Synthetic oligonucleotide
uccuguuguaaauuccguc

SEQ ID NO: 153920 - RNA, 19 nt, Artificial Sequence
  Description of Artificial Sequence: Synthetic oligonucleotide
aaggcgagugagcagugau

SEQ ID NO: 153921 - RNA, 19 nt, Artificial Sequence
  Description of Artificial Sequence: Synthetic oligonucleotide
uccuauucguuaacaguuc

SEQ ID NO: 153922 - RNA, 19 nt, Artificial Sequence
  Description of Artificial Sequence: Synthetic oligonucleotide
aacuccuuuacaguccaau

SEQ ID NO: 153923 - RNA, 19 nt, Artificial Sequence
  Description of Artificial Sequence: Synthetic oligonucleotide
uagcguguugugaccagcc

SEQ ID NO: 153924 - RNA, 19 nt, Artificial Sequence
  Description of Artificial Sequence: Synthetic oligonucleotide
ucccuuguguuuugcacca

SEQ ID NO: 153925 - RNA, 19 nt, Artificial Sequence
  Description of Artificial Sequence: Synthetic oligonucleotide
uacugucgugucaaacagc

SEQ ID NO: 153926 - RNA, 19 nt, Artificial Sequence
  Description of Artificial Sequence: Synthetic oligonucleotide
aaacgguggcaucccgcuc

SEQ ID NO: 153927 - RNA, 19 nt, Artificial Sequence
  Description of Artificial Sequence: Synthetic oligonucleotide
agaauaguguacaugccau

SEQ ID NO: 153928 - RNA, 19 nt, Artificial Sequence
  Description of Artificial Sequence: Synthetic oligonucleotide
ucaaagaguaucggaugga

SEQ ID NO: 153929 - RNA, 19 nt, Artificial Sequence
  Description of Artificial Sequence: Synthetic oligonucleotide
aagacgggucacauauccg

SEQ ID NO: 153930 - RNA, 19 nt, Artificial Sequence
  Description of Artificial Sequence: Synthetic oligonucleotide
auauccggucacagcaugc

SEQ ID NO: 153931 - RNA, 19 nt, Artificial Sequence
  Description of Artificial Sequence: Synthetic oligonucleotide
accuaacuaguucaagcau

SEQ ID NO: 153932 - RNA, 19 nt, Artificial Sequence
  Description of Artificial Sequence: Synthetic oligonucleotide
agcuuuuaagcaaguguag

SEQ ID NO: 153933 - RNA, 19 nt, Artificial Sequence
  Description of Artificial Sequence: Synthetic oligonucleotide
aaguagcguguugugacca

SEQ ID NO: 153934 - RNA, 19 nt, Artificial Sequence
  Description of Artificial Sequence: Synthetic oligonucleotide
aaguccugacgcccacuag

SEQ ID NO: 153935 - RNA, 19 nt, Artificial Sequence
  Description of Artificial Sequence: Synthetic oligonucleotide
uacuuguauacggaacaac

SEQ ID NO: 153936 - RNA, 19 nt, Artificial Sequence
  Description of Artificial Sequence: Synthetic oligonucleotide
cugaaggucugcgagcuac

SEQ ID NO: 153937 - RNA, 19 nt, Artificial Sequence
  Description of Artificial Sequence: Synthetic oligonucleotide
ucuaaagggcaaucagaua

SEQ ID NO: 153938 - RNA, 19 nt, Artificial Sequence
  Description of Artificial Sequence: Synthetic oligonucleotide
cuuugcggcugcuacaaga

SEQ ID NO: 153939 - RNA, 19 nt, Artificial Sequence
  Description of Artificial Sequence: Synthetic oligonucleotide
aguccaauuguaauuccgu

SEQ ID NO: 153940 - RNA, 19 nt, Artificial Sequence
  Description of Artificial Sequence: Synthetic oligonucleotide
caagaaauuugauucugua

SEQ ID NO: 153941 - RNA, 19 nt, Artificial Sequence
  Description of Artificial Sequence: Synthetic oligonucleotide
gaguaucggauggaaggcc

SEQ ID NO: 153942 - RNA, 19 nt, Artificial Sequence
  Description of Artificial Sequence: Synthetic oligonucleotide
uccgucuuaagugccuuca

SEQ ID NO: 153943 - RNA, 19 nt, Artificial Sequence
  Description of Artificial Sequence: Synthetic oligonucleotide
cagcuuaaaucaacuagca

SEQ ID NO: 153944 - RNA, 19 nt, Artificial Sequence
  Description of Artificial Sequence: Synthetic oligonucleotide
gagacucauccauuauuga

SEQ ID NO: 153945 - RNA, 19 nt, Artificial Sequence
  Description of Artificial Sequence: Synthetic oligonucleotide
uacuuucaagugccccucc

SEQ ID NO: 153946 - RNA, 19 nt, Artificial Sequence
  Description of Artificial Sequence: Synthetic oligonucleotide
aguagcguguugugaccag

SEQ ID NO: 153947 - RNA, 19 nt, Artificial Sequence
  Description of Artificial Sequence: Synthetic oligonucleotide
ugucuacuuucaagugccc

SEQ ID NO: 153948 - RNA, 19 nt, Artificial Sequence
  Description of Artificial Sequence: Synthetic oligonucleotide
cagcaacacgacauuuuag

SEQ ID NO: 153949 - RNA, 19 nt, Artificial Sequence
  Description of Artificial Sequence: Synthetic oligonucleotide
cuauucguuaacaguucca

SEQ ID NO: 153950 - RNA, 19 nt, Artificial Sequence
  Description of Artificial Sequence: Synthetic oligonucleotide
guacaacguaauuuaaacu

SEQ ID NO: 153951 - RNA, 19 nt, Artificial Sequence
  Description of Artificial Sequence: Synthetic oligonucleotide
cauggaaggugagauaaca

SEQ ID NO: 153952 - RNA, 19 nt, Artificial Sequence
  Description of Artificial Sequence: Synthetic oligonucleotide
ugacccuguacaacguaau

SEQ ID NO: 153953 - RNA, 19 nt, Artificial Sequence
  Description of Artificial Sequence: Synthetic oligonucleotide
ugaaggucugcgagcuaca

SEQ ID NO: 153954 - RNA, 19 nt, Artificial Sequence
  Description of Artificial Sequence: Synthetic oligonucleotide
gaucuuccuauucguuaac

SEQ ID NO: 153955 - RNA, 19 nt, Artificial Sequence
  Description of Artificial Sequence: Synthetic oligonucleotide
caacacgacauuuuagaua

SEQ ID NO: 153956 - RNA, 19 nt, Artificial Sequence
  Description of Artificial Sequence: Synthetic oligonucleotide
aguggcagguuugaugacu

SEQ ID NO: 153957 - RNA, 19 nt, Artificial Sequence
  Description of Artificial Sequence: Synthetic oligonucleotide
aauaccuguggaggaaaua

SEQ ID NO: 153958 - RNA, 19 nt, Artificial Sequence
  Description of Artificial Sequence: Synthetic oligonucleotide
uugugaccagccuuagcuc

SEQ ID NO: 153959 - RNA, 19 nt, Artificial Sequence
  Description of Artificial Sequence: Synthetic oligonucleotide
cuuccuauucguuaacagu

SEQ ID NO: 153960 - RNA, 19 nt, Artificial Sequence
  Description of Artificial Sequence: Synthetic oligonucleotide
guaauuccguuugcccugg

SEQ ID NO: 153961 - RNA, 19 nt, Artificial Sequence
  Description of Artificial Sequence: Synthetic oligonucleotide
gucuacuuucaagugcccc

SEQ ID NO: 153962 - RNA, 19 nt, Artificial Sequence
  Description of Artificial Sequence: Synthetic oligonucleotide
uuuccggccugaaggucug

SEQ ID NO: 153963 - RNA, 19 nt, Artificial Sequence
  Description of Artificial Sequence: Synthetic oligonucleotide
cacuuacuuuccagagagg

SEQ ID NO: 153964 - RNA, 19 nt, Artificial Sequence
  Description of Artificial Sequence: Synthetic oligonucleotide
uucagaagacgggucacau

SEQ ID NO: 153965 - RNA, 19 nt, Artificial Sequence
  Description of Artificial Sequence: Synthetic oligonucleotide
aaggggcaacuccuguuaa

SEQ ID NO: 153966 - RNA, 19 nt, Artificial Sequence
  Description of Artificial Sequence: Synthetic oligonucleotide
cagaagacgggucacauau

SEQ ID NO: 153967 - RNA, 19 nt, Artificial Sequence
  Description of Artificial Sequence: Synthetic oligonucleotide
ccuauucguuaacaguucc

SEQ ID NO: 153968 - RNA, 19 nt, Artificial Sequence
  Description of Artificial Sequence: Synthetic oligonucleotide
caaugagacaagagacuca

SEQ ID NO: 153969 - RNA, 19 nt, Artificial Sequence
  Description of Artificial Sequence: Synthetic oligonucleotide
ucugacccuguacaacgua

SEQ ID NO: 153970 - RNA, 19 nt, Artificial Sequence
  Description of Artificial Sequence: Synthetic oligonucleotide
uacuuucuaaagggcaauc

SEQ ID NO: 153971 - RNA, 19 nt, Artificial Sequence
  Description of Artificial Sequence: Synthetic oligonucleotide
gagcaagaccuuccuuccc

SEQ ID NO: 153972 - RNA, 19 nt, Artificial Sequence
  Description of Artificial Sequence: Synthetic oligonucleotide
guauacggaacaaccacaa

SEQ ID NO: 153973 - RNA, 19 nt, Artificial Sequence
  Description of Artificial Sequence: Synthetic oligonucleotide
cuagaaugcuucaagcaau

SEQ ID NO: 153974 - RNA, 19 nt, Artificial Sequence
  Description of Artificial Sequence: Synthetic oligonucleotide
agacgaauccgaauucccu

SEQ ID NO: 153975 - RNA, 19 nt, Artificial Sequence
  Description of Artificial Sequence: Synthetic oligonucleotide
cucacaucggccagucuca

SEQ ID NO: 153976 - RNA, 19 nt, Artificial Sequence
  Description of Artificial Sequence: Synthetic oligonucleotide
guacgcgcggguuuccggc

SEQ ID NO: 153977 - RNA, 19 nt, Artificial Sequence
  Description of Artificial Sequence: Synthetic oligonucleotide
uuauugauccagggaccga

SEQ ID NO: 153978 - RNA, 19 nt, Artificial Sequence
  Description of Artificial Sequence: Synthetic oligonucleotide
uagauguggcaugucuacu

SEQ ID NO: 153979 - RNA, 19 nt, Artificial Sequence
  Description of Artificial Sequence: Synthetic oligonucleotide
agcggcgcagacgacgagg

SEQ ID NO: 153980 - RNA, 19 nt, Artificial Sequence
  Description of Artificial Sequence: Synthetic oligonucleotide
gagcucucggagcuucccc

SEQ ID NO: 153981 - RNA, 19 nt, Artificial Sequence
  Description of Artificial Sequence: Synthetic oligonucleotide
acccuguacaacguaauuu

SEQ ID NO: 153982 - RNA, 19 nt, Artificial Sequence
  Description of Artificial Sequence: Synthetic oligonucleotide
agugucuagaaugcuucaa

SEQ ID NO: 153983 - RNA, 19 nt, Artificial Sequence
  Description of Artificial Sequence: Synthetic oligonucleotide
cagggaaguccugacgccc

SEQ ID NO: 153984 - RNA, 19 nt, Artificial Sequence
  Description of Artificial Sequence: Synthetic oligonucleotide
gcuuucauuuaauauggcu

SEQ ID NO: 153985 - RNA, 19 nt, Artificial Sequence
  Description of Artificial Sequence: Synthetic oligonucleotide
acuuucccuuguuacguua

SEQ ID NO: 153986 - RNA, 19 nt, Artificial Sequence
  Description of Artificial Sequence: Synthetic oligonucleotide
ggaccaaacgguggcaucc

SEQ ID NO: 153987 - RNA, 19 nt, Artificial Sequence
  Description of Artificial Sequence: Synthetic oligonucleotide
gacauuagauguggcaugu

SEQ ID NO: 153988 - RNA, 19 nt, Artificial Sequence
  Description of Artificial Sequence: Synthetic oligonucleotide
acauuagauguggcauguc

SEQ ID NO: 153989 - RNA, 19 nt, Artificial Sequence
  Description of Artificial Sequence: Synthetic oligonucleotide
acgacgagggccgggguag

SEQ ID NO: 153990 - RNA, 19 nt, Artificial Sequence
  Description of Artificial Sequence: Synthetic oligonucleotide
cagccuuagcucagggaac

SEQ ID NO: 153991 - RNA, 19 nt, Artificial Sequence
  Description of Artificial Sequence: Synthetic oligonucleotide
acggaacaaccacaagaaa

SEQ ID NO: 153992 - RNA, 19 nt, Artificial Sequence
  Description of Artificial Sequence: Synthetic oligonucleotide
agccuuagcucagggaacu

SEQ ID NO: 153993 - RNA, 19 nt, Artificial Sequence
  Description of Artificial Sequence: Synthetic oligonucleotide
aggcuggguauuucaauua

SEQ ID NO: 153994 - RNA, 19 nt, Artificial Sequence
  Description of Artificial Sequence: Synthetic oligonucleotide
ugaucgcugugguucuuau

SEQ ID NO: 153995 - RNA, 19 nt, Artificial Sequence
  Description of Artificial Sequence: Synthetic oligonucleotide
gcgagcuacacgcucgcag

SEQ ID NO: 153996 - RNA, 19 nt, Artificial Sequence
  Description of Artificial Sequence: Synthetic oligonucleotide
accuuggcggugccuguag

SEQ ID NO: 153997 - RNA, 19 nt, Artificial Sequence
  Description of Artificial Sequence: Synthetic oligonucleotide
agcguguugugaccagccu

SEQ ID NO: 153998 - RNA, 19 nt, Artificial Sequence
  Description of Artificial Sequence: Synthetic oligonucleotide
gaucucacaucggccaguc

SEQ ID NO: 153999 - RNA, 19 nt, Artificial Sequence
  Description of Artificial Sequence: Synthetic oligonucleotide
acgacauuuuagauacccu

SEQ ID NO: 154000 - RNA, 19 nt, Artificial Sequence
  Description of Artificial Sequence: Synthetic oligonucleotide
uccgcaguucugucugacu

SEQ ID NO: 154001 - RNA, 19 nt, Artificial Sequence
  Description of Artificial Sequence: Synthetic oligonucleotide
ccuuguuacguuaaguugu

SEQ ID NO: 154002 - RNA, 19 nt, Artificial Sequence
  Description of Artificial Sequence: Synthetic oligonucleotide
gacgaauccgaauucccuu

SEQ ID NO: 154003 - RNA, 19 nt, Artificial Sequence
  Description of Artificial Sequence: Synthetic oligonucleotide
guagcguguugugaccagc

SEQ ID NO: 154004 - RNA, 19 nt, Artificial Sequence
  Description of Artificial Sequence: Synthetic oligonucleotide
cugacccuguacaacguaa

SEQ ID NO: 154005 - RNA, 19 nt, Artificial Sequence
  Description of Artificial Sequence: Synthetic oligonucleotide
agaagacgggucacauauc

SEQ ID NO: 154006 - RNA, 19 nt, Artificial Sequence
  Description of Artificial Sequence: Synthetic oligonucleotide
gcauaguguucuucuggcc

SEQ ID NO: 154007 - RNA, 19 nt, Artificial Sequence
  Description of Artificial Sequence: Synthetic oligonucleotide
gaccaaacgguggcauccc

SEQ ID NO: 154008 - RNA, 19 nt, Artificial Sequence
  Description of Artificial Sequence: Synthetic oligonucleotide
agcaaugaaguagcguguu

SEQ ID NO: 154009 - RNA, 19 nt, Artificial Sequence
  Description of Artificial Sequence: Synthetic oligonucleotide
ggcgagugagcagugauga

SEQ ID NO: 154010 - RNA, 19 nt, Artificial Sequence
  Description of Artificial Sequence: Synthetic oligonucleotide
uacgcgcggguuuccggcc

SEQ ID NO: 154011 - RNA, 19 nt, Artificial Sequence
  Description of Artificial Sequence: Synthetic oligonucleotide
cgagcuacacgcucgcagg

SEQ ID NO: 154012 - RNA, 19 nt, Artificial Sequence
  Description of Artificial Sequence: Synthetic oligonucleotide
gguacgcgcggguuuccgg

SEQ ID NO: 154013 - RNA, 19 nt, Artificial Sequence
  Description of Artificial Sequence: Synthetic oligonucleotide
uccuuacacccagugccac

SEQ ID NO: 154014 - RNA, 19 nt, Artificial Sequence
  Description of Artificial Sequence: Synthetic oligonucleotide
gcagauugccucugaucgc

SEQ ID NO: 154015 - RNA, 19 nt, Artificial Sequence
  Description of Artificial Sequence: Synthetic oligonucleotide
uuccgucuuaagugccuuc

SEQ ID NO: 154016 - RNA, 19 nt, Artificial Sequence
  Description of Artificial Sequence: Synthetic oligonucleotide
gaauaguguacaugccauu

SEQ ID NO: 154017 - RNA, 19 nt, Artificial Sequence
  Description of Artificial Sequence: Synthetic oligonucleotide
cacucaguuguggccauuc

SEQ ID NO: 154018 - RNA, 19 nt, Artificial Sequence
  Description of Artificial Sequence: Synthetic oligonucleotide
gagcagucuaccaguggca

SEQ ID NO: 154019 - RNA, 19 nt, Artificial Sequence
  Description of Artificial Sequence: Synthetic oligonucleotide
gcaguauauaaauggugcu

SEQ ID NO: 154020 - RNA, 19 nt, Artificial Sequence
  Description of Artificial Sequence: Synthetic oligonucleotide
guaggaccauugaaucaac

SEQ ID NO: 154021 - RNA, 19 nt, Artificial Sequence
  Description of Artificial Sequence: Synthetic oligonucleotide
auauggcuuucugggagaa

SEQ ID NO: 154022 - RNA, 19 nt, Artificial Sequence
  Description of Artificial Sequence: Synthetic oligonucleotide
aggaccccgaggcugcuuu

SEQ ID NO: 154023 - RNA, 19 nt, Artificial Sequence
  Description of Artificial Sequence: Synthetic oligonucleotide
gcagcaacacgacauuuua

SEQ ID NO: 154024 - RNA, 19 nt, Artificial Sequence
  Description of Artificial Sequence: Synthetic oligonucleotide
uggcagguuugaugacugu

SEQ ID NO: 154025 - RNA, 19 nt, Artificial Sequence
  Description of Artificial Sequence: Synthetic oligonucleotide
cuguucuacugucguguca

SEQ ID NO: 154026 - RNA, 19 nt, Artificial Sequence
  Description of Artificial Sequence: Synthetic oligonucleotide
cuguugcauaguguucuuc

SEQ ID NO: 154027 - RNA, 19 nt, Artificial Sequence
  Description of Artificial Sequence: Synthetic oligonucleotide
aagcuacagugggaauccu

SEQ ID NO: 154028 - RNA, 19 nt, Artificial Sequence
  Description of Artificial Sequence: Synthetic oligonucleotide
uggcggugccuguaguuuu

SEQ ID NO: 154029 - RNA, 19 nt, Artificial Sequence
  Description of Artificial Sequence: Synthetic oligonucleotide
uacucacguucaccucagu

SEQ ID NO: 154030 - RNA, 19 nt, Artificial Sequence
  Description of Artificial Sequence: Synthetic oligonucleotide
ggcuggguauuucaauuaa

SEQ ID NO: 154031 - RNA, 19 nt, Artificial Sequence
  Description of Artificial Sequence: Synthetic oligonucleotide
uacacgcucgcagguccca

SEQ ID NO: 154032 - RNA, 19 nt, Artificial Sequence
  Description of Artificial Sequence: Synthetic oligonucleotide
cugucgugucaaacagcuc

SEQ ID NO: 154033 - RNA, 19 nt, Artificial Sequence
  Description of Artificial Sequence: Synthetic oligonucleotide
agaggcaauaggacagguu

SEQ ID NO: 154034 - RNA, 19 nt, Artificial Sequence
  Description of Artificial Sequence: Synthetic oligonucleotide
cuuguuacguuaaguuguu

SEQ ID NO: 154035 - RNA, 19 nt, Artificial Sequence
  Description of Artificial Sequence: Synthetic oligonucleotide
auuccgucuuaagugccuu

SEQ ID NO: 154036 - RNA, 19 nt, Artificial Sequence
  Description of Artificial Sequence: Synthetic oligonucleotide
ccauugaaucaacaaucca

SEQ ID NO: 154037 - RNA, 19 nt, Artificial Sequence
  Description of Artificial Sequence: Synthetic oligonucleotide
caugccguuugucuaaauu

SEQ ID NO: 154038 - RNA, 19 nt, Artificial Sequence
  Description of Artificial Sequence: Synthetic oligonucleotide
guaucggauggaaggccca

SEQ ID NO: 154039 - RNA, 19 nt, Artificial Sequence
  Description of Artificial Sequence: Synthetic oligonucleotide
cugacgcccacuagcaccu

SEQ ID NO: 154040 - RNA, 19 nt, Artificial Sequence
  Description of Artificial Sequence: Synthetic oligonucleotide
caguauauaaauggugcuu

SEQ ID NO: 154041 - RNA, 19 nt, Artificial Sequence
  Description of Artificial Sequence: Synthetic oligonucleotide
ccaaccaggagcucucgga

SEQ ID NO: 154042 - RNA, 19 nt, Artificial Sequence
  Description of Artificial Sequence: Synthetic oligonucleotide
agcggguacgcgcggguuu

SEQ ID NO: 154043 - RNA, 19 nt, Artificial Sequence
  Description of Artificial Sequence: Synthetic oligonucleotide
aucucacaucggccagucu

SEQ ID NO: 154044 - RNA, 19 nt, Artificial Sequence
  Description of Artificial Sequence: Synthetic oligonucleotide
gcgagcggcgcagacgacg

SEQ ID NO: 154045 - RNA, 19 nt, Artificial Sequence
  Description of Artificial Sequence: Synthetic oligonucleotide
cagauugccucugaucgcu

SEQ ID NO: 154046 - RNA, 19 nt, Artificial Sequence
  Description of Artificial Sequence: Synthetic oligonucleotide
ggggcaacuccuguuaaaa

SEQ ID NO: 154047 - RNA, 19 nt, Artificial Sequence
  Description of Artificial Sequence: Synthetic oligonucleotide
gaccgagcaagaccuuccu

SEQ ID NO: 154048 - RNA, 19 nt, Artificial Sequence
  Description of Artificial Sequence: Synthetic oligonucleotide
gacccuguacaacguaauu

SEQ ID NO: 154049 - RNA, 19 nt, Artificial Sequence
  Description of Artificial Sequence: Synthetic oligonucleotide
gagcuacacgcucgcaggu

SEQ ID NO: 154050 - RNA, 19 nt, Artificial Sequence
  Description of Artificial Sequence: Synthetic oligonucleotide
gcaacacgacauuuuagau

SEQ ID NO: 154051 - RNA, 19 nt, Artificial Sequence
  Description of Artificial Sequence: Synthetic oligonucleotide
gcggcgcagacgacgaggg

SEQ ID NO: 154052 - RNA, 19 nt, Artificial Sequence
  Description of Artificial Sequence: Synthetic oligonucleotide
cgggguagcggguacgcgc

SEQ ID NO: 154053 - RNA, 19 nt, Artificial Sequence
  Description of Artificial Sequence: Synthetic oligonucleotide
cuccgucaagugcaaagcu

SEQ ID NO: 154054 - RNA, 19 nt, Artificial Sequence
  Description of Artificial Sequence: Synthetic oligonucleotide
ugcgagcuacacgcucgca

SEQ ID NO: 154055 - RNA, 19 nt, Artificial Sequence
  Description of Artificial Sequence: Synthetic oligonucleotide
ccuaacuaguucaagcauu

SEQ ID NO: 154056 - RNA, 19 nt, Artificial Sequence
  Description of Artificial Sequence: Synthetic oligonucleotide
ccgucuuaagugccuucag

SEQ ID NO: 154057 - RNA, 19 nt, Artificial Sequence
  Description of Artificial Sequence: Synthetic oligonucleotide
gccuggcaguauauaaaug

SEQ ID NO: 154058 - RNA, 19 nt, Artificial Sequence
  Description of Artificial Sequence: Synthetic oligonucleotide
gcggguuuccggccugaag

SEQ ID NO: 154059 - RNA, 19 nt, Artificial Sequence
  Description of Artificial Sequence: Synthetic oligonucleotide
acgcgcggguuuccggccu

SEQ ID NO: 154060 - RNA, 19 nt, Artificial Sequence
  Description of Artificial Sequence: Synthetic oligonucleotide
aggcagaacuccagaugaa

SEQ ID NO: 154061 - RNA, 19 nt, Artificial Sequence
  Description of Artificial Sequence: Synthetic oligonucleotide
gggaccgagcaagaccuuc

SEQ ID NO: 154062 - RNA, 19 nt, Artificial Sequence
  Description of Artificial Sequence: Synthetic oligonucleotide
cguguugugaccagccuua

SEQ ID NO: 154063 - RNA, 19 nt, Artificial Sequence
  Description of Artificial Sequence: Synthetic oligonucleotide
cuuggcggugccuguaguu

SEQ ID NO: 154064 - RNA, 19 nt, Artificial Sequence
  Description of Artificial Sequence: Synthetic oligonucleotide
ggguacgcgcggguuuccg

SEQ ID NO: 154065 - RNA, 19 nt, Artificial Sequence
  Description of Artificial Sequence: Synthetic oligonucleotide
guagcggguacgcgcgggu

SEQ ID NO: 154066 - RNA, 19 nt, Artificial Sequence
  Description of Artificial Sequence: Synthetic oligonucleotide
cugaucgcugugguucuua

SEQ ID NO: 154067 - RNA, 19 nt, Artificial Sequence
  Description of Artificial Sequence: Synthetic oligonucleotide
uagcggguacgcgcggguu

SEQ ID NO: 154068 - RNA, 19 nt, Artificial Sequence
  Description of Artificial Sequence: Synthetic oligonucleotide
ggccgggguagcggguacg

SEQ ID NO: 154069 - RNA, 19 nt, Artificial Sequence
  Description of Artificial Sequence: Synthetic oligonucleotide
gcguguugugaccagccuu

SEQ ID NO: 154070 - RNA, 19 nt, Artificial Sequence
  Description of Artificial Sequence: Synthetic oligonucleotide
gaccccgaggcugcuuuau

SEQ ID NO: 154071 - RNA, 19 nt, Artificial Sequence
  Description of Artificial Sequence: Synthetic oligonucleotide
ugacgcccacuagcaccuc

SEQ ID NO: 154072 - RNA, 19 nt, Artificial Sequence
  Description of Artificial Sequence: Synthetic oligonucleotide
ccgggguagcggguacgcg

SEQ ID NO: 154073 - RNA, 19 nt, Artificial Sequence
  Description of Artificial Sequence: Synthetic oligonucleotide
ccuuacacccagugccacu

SEQ ID NO: 154074 - RNA, 19 nt, Artificial Sequence
  Description of Artificial Sequence: Synthetic oligonucleotide
ccgcucuguccagugccag

SEQ ID NO: 154075 - RNA, 19 nt, Artificial Sequence
  Description of Artificial Sequence: Synthetic oligonucleotide
cugucugacuuagcugauu

SEQ ID NO: 154076 - RNA, 19 nt, Artificial Sequence
  Description of Artificial Sequence: Synthetic oligonucleotide
agggaccgagcaagaccuu

SEQ ID NO: 154077 - RNA, 19 nt, Artificial Sequence
  Description of Artificial Sequence: Synthetic oligonucleotide
gggaauccuuacacccagu

SEQ ID NO: 154078 - RNA, 19 nt, Artificial Sequence
  Description of Artificial Sequence: Synthetic oligonucleotide
cuugcggggaggggacuuu

SEQ ID NO: 154079 - RNA, 19 nt, Artificial Sequence
  Description of Artificial Sequence: Synthetic oligonucleotide
gccucugaucgcugugguu

SEQ ID NO: 154080 - RNA, 19 nt, Artificial Sequence
  Description of Artificial Sequence: Synthetic oligonucleotide
cggcgcagacgacgagggc

SEQ ID NO: 154081 - RNA, 19 nt, Artificial Sequence
  Description of Artificial Sequence: Synthetic oligonucleotide
ccugaaggucugcgagcua

SEQ ID NO: 154082 - RNA, 19 nt, Artificial Sequence
  Description of Artificial Sequence: Synthetic oligonucleotide
cgcgcggguuuccggccug

SEQ ID NO: 154083 - RNA, 19 nt, Artificial Sequence
  Description of Artificial Sequence: Synthetic oligonucleotide
ccaugccguuugucuaaau

SEQ ID NO: 154084 - RNA, 19 nt, Artificial Sequence
  Description of Artificial Sequence: Synthetic oligonucleotide
cgcggguuuccggccugaa

SEQ ID NO: 154085 - RNA, 19 nt, Artificial Sequence
  Description of Artificial Sequence: Synthetic oligonucleotide
ucuaauaccagcauggugu

SEQ ID NO: 154086 - RNA, 19 nt, Artificial Sequence
  Description of Artificial Sequence: Synthetic oligonucleotide
guaaguaacuucuauaagg

SEQ ID NO: 154087 - RNA, 19 nt, Artificial Sequence
  Description of Artificial Sequence: Synthetic oligonucleotide
aagaauggauuucaagugc

SEQ ID NO: 154088 - RNA, 19 nt, Artificial Sequence
  Description of Artificial Sequence: Synthetic oligonucleotide
uuagcuaaaggacaaaagc

SEQ ID NO: 154089 - RNA, 19 nt, Artificial Sequence
  Description of Artificial Sequence: Synthetic oligonucleotide
aguauuaccuaaaagaaac

SEQ ID NO: 154090 - RNA, 19 nt, Artificial Sequence
  Description of Artificial Sequence: Synthetic oligonucleotide
auagaugcuucuuugagac

SEQ ID NO: 154091 - RNA, 19 nt, Artificial Sequence
  Description of Artificial Sequence: Synthetic oligonucleotide
ugagggauaugacagaggg

SEQ ID NO: 154092 - RNA, 19 nt, Artificial Sequence
  Description of Artificial Sequence: Synthetic oligonucleotide
ucugccaaagaucagaugu

SEQ ID NO: 154093 - RNA, 19 nt, Artificial Sequence
  Description of Artificial Sequence: Synthetic oligonucleotide
aucuuucgcaaauuuaugc

SEQ ID NO: 154094 - RNA, 19 nt, Artificial Sequence
  Description of Artificial Sequence: Synthetic oligonucleotide
ucuauaagggcauagcaug

SEQ ID NO: 154095 - RNA, 19 nt, Artificial Sequence
  Description of Artificial Sequence: Synthetic oligonucleotide
uauugaagaaaagaggucc

SEQ ID NO: 154096 - RNA, 19 nt, Artificial Sequence
  Description of Artificial Sequence: Synthetic oligonucleotide
gauagacuaaguuaaugag

SEQ ID NO: 154097 - RNA, 19 nt, Artificial Sequence
  Description of Artificial Sequence: Synthetic oligonucleotide
aucaauagugcacuucacc

SEQ ID NO: 154098 - RNA, 19 nt, Artificial Sequence
  Description of Artificial Sequence: Synthetic oligonucleotide
aaguaacuucuauaagggc

SEQ ID NO: 154099 - RNA, 19 nt, Artificial Sequence
  Description of Artificial Sequence: Synthetic oligonucleotide
aaugaguacaacucaagaa

SEQ ID NO: 154100 - RNA, 19 nt, Artificial Sequence
  Description of Artificial Sequence: Synthetic oligonucleotide
aauaggaccaccaaugcug

SEQ ID NO: 154101 - RNA, 19 nt, Artificial Sequence
  Description of Artificial Sequence: Synthetic oligonucleotide
gaucauaccacugagugcc

SEQ ID NO: 154102 - RNA, 19 nt, Artificial Sequence
  Description of Artificial Sequence: Synthetic oligonucleotide
uuuagcuaaaggacaaaag

SEQ ID NO: 154103 - RNA, 19 nt, Artificial Sequence
  Description of Artificial Sequence: Synthetic oligonucleotide
uucaacaugcucauaagcu

SEQ ID NO: 154104 - RNA, 19 nt, Artificial Sequence
  Description of Artificial Sequence: Synthetic oligonucleotide
uuuccguucacauugagua

SEQ ID NO: 154105 - RNA, 19 nt, Artificial Sequence
  Description of Artificial Sequence: Synthetic oligonucleotide
acucauagaguauugaaga

SEQ ID NO: 154106 - RNA, 19 nt, Artificial Sequence
  Description of Artificial Sequence: Synthetic oligonucleotide
agacaagagaaccaccucg

SEQ ID NO: 154107 - RNA, 19 nt, Artificial Sequence
  Description of Artificial Sequence: Synthetic oligonucleotide
ucaauagugauagacuaag

SEQ ID NO: 154108 - RNA, 19 nt, Artificial Sequence
  Description of Artificial Sequence: Synthetic oligonucleotide
uuguaaguaacuucuauaa

SEQ ID NO: 154109 - RNA, 19 nt, Artificial Sequence
  Description of Artificial Sequence: Synthetic oligonucleotide
uagacuaaguuaaugagua

SEQ ID NO: 154110 - RNA, 19 nt, Artificial Sequence
  Description of Artificial Sequence: Synthetic oligonucleotide
aauagugcacuucaccaca

SEQ ID NO: 154111 - RNA, 19 nt, Artificial Sequence
  Description of Artificial Sequence: Synthetic oligonucleotide
uuuauuaccagaugugguc

SEQ ID NO: 154112 - RNA, 19 nt, Artificial Sequence
  Description of Artificial Sequence: Synthetic oligonucleotide
agcaaaucgaaacuagaag

SEQ ID NO: 154113 - RNA, 19 nt, Artificial Sequence
  Description of Artificial Sequence: Synthetic oligonucleotide
agacuagacacuucacugc

SEQ ID NO: 154114 - RNA, 19 nt, Artificial Sequence
  Description of Artificial Sequence: Synthetic oligonucleotide
uuucaacaugcucauaagc

SEQ ID NO: 154115 - RNA, 19 nt, Artificial Sequence
  Description of Artificial Sequence: Synthetic oligonucleotide
guaguaacaccaucaaggg

SEQ ID NO: 154116 - RNA, 19 nt, Artificial Sequence
  Description of Artificial Sequence: Synthetic oligonucleotide
gagacuagacacuucacug

SEQ ID NO: 154117 - RNA, 19 nt, Artificial Sequence
  Description of Artificial Sequence: Synthetic oligonucleotide
augaguacaacucaagaaa

SEQ ID NO: 154118 - RNA, 19 nt, Artificial Sequence
  Description of Artificial Sequence: Synthetic oligonucleotide
uaugcagguaucgacagag

SEQ ID NO: 154119 - RNA, 19 nt, Artificial Sequence
  Description of Artificial Sequence: Synthetic oligonucleotide
ucgaguagguuuauuacca

SEQ ID NO: 154120 - RNA, 19 nt, Artificial Sequence
  Description of Artificial Sequence: Synthetic oligonucleotide
uguguauagcaccagguuc

SEQ ID NO: 154121 - RNA, 19 nt, Artificial Sequence
  Description of Artificial Sequence: Synthetic oligonucleotide
ucauaugcagguaucgaca

SEQ ID NO: 154122 - RNA, 19 nt, Artificial Sequence
  Description of Artificial Sequence: Synthetic oligonucleotide
auuggcuaaugacacgugg

SEQ ID NO: 154123 - RNA, 19 nt, Artificial Sequence
  Description of Artificial Sequence: Synthetic oligonucleotide
uucgaguagguuuauuacc

SEQ ID NO: 154124 - RNA, 19 nt, Artificial Sequence
  Description of Artificial Sequence: Synthetic oligonucleotide
uguaauuccaaagauguuu

SEQ ID NO: 154125 - RNA, 19 nt, Artificial Sequence
  Description of Artificial Sequence: Synthetic oligonucleotide
uucauaaagagcccuugcu

SEQ ID NO: 154126 - RNA, 19 nt, Artificial Sequence
  Description of Artificial Sequence: Synthetic oligonucleotide
uuuucaacaugcucauaag

SEQ ID NO: 154127 - RNA, 19 nt, Artificial Sequence
  Description of Artificial Sequence: Synthetic oligonucleotide
aguaacuucuauaagggca

SEQ ID NO: 154128 - RNA, 19 nt, Artificial Sequence
  Description of Artificial Sequence: Synthetic oligonucleotide
ucuucauaugcagguaucg

SEQ ID NO: 154129 - RNA, 19 nt, Artificial Sequence
  Description of Artificial Sequence: Synthetic oligonucleotide
cacucauagaguauugaag

SEQ ID NO: 154130 - RNA, 19 nt, Artificial Sequence
  Description of Artificial Sequence: Synthetic oligonucleotide
uucauaugcagguaucgac

SEQ ID NO: 154131 - RNA, 19 nt, Artificial Sequence
  Description of Artificial Sequence: Synthetic oligonucleotide
uucuauaagggcauagcau

SEQ ID NO: 154132 - RNA, 19 nt, Artificial Sequence
  Description of Artificial Sequence: Synthetic oligonucleotide
agugucguggugcuggcac

SEQ ID NO: 154133 - RNA, 19 nt, Artificial Sequence
  Description of Artificial Sequence: Synthetic oligonucleotide
ucuagagacuaguaaagau

SEQ ID NO: 154134 - RNA, 19 nt, Artificial Sequence
  Description of Artificial Sequence: Synthetic oligonucleotide
uuucgaguagguuuauuac

SEQ ID NO: 154135 - RNA, 19 nt, Artificial Sequence
  Description of Artificial Sequence: Synthetic oligonucleotide
uuuugacccauguucacac

SEQ ID NO: 154136 - RNA, 19 nt, Artificial Sequence
  Description of Artificial Sequence: Synthetic oligonucleotide
cuauaagggcauagcaugg

SEQ ID NO: 154137 - RNA, 19 nt, Artificial Sequence
  Description of Artificial Sequence: Synthetic oligonucleotide
agagaauuuuaacugacuu

SEQ ID NO: 154138 - RNA, 19 nt, Artificial Sequence
  Description of Artificial Sequence: Synthetic oligonucleotide
uucuaauaccagcauggug

SEQ ID NO: 154139 - RNA, 19 nt, Artificial Sequence
  Description of Artificial Sequence: Synthetic oligonucleotide
aaagaccugacauccgagu

SEQ ID NO: 154140 - RNA, 19 nt, Artificial Sequence
  Description of Artificial Sequence: Synthetic oligonucleotide
auaaagagcccuugcuuag

SEQ ID NO: 154141 - RNA, 19 nt, Artificial Sequence
  Description of Artificial Sequence: Synthetic oligonucleotide
gaugugcucaaagaguacc

SEQ ID NO: 154142 - RNA, 19 nt, Artificial Sequence
  Description of Artificial Sequence: Synthetic oligonucleotide
agaaucauuaaguuuugua

SEQ ID NO: 154143 - RNA, 19 nt, Artificial Sequence
  Description of Artificial Sequence: Synthetic oligonucleotide
caaguggaaaccauaguuc

SEQ ID NO: 154144 - RNA, 19 nt, Artificial Sequence
  Description of Artificial Sequence: Synthetic oligonucleotide
guugccuucuaauaccagc

SEQ ID NO: 154145 - RNA, 19 nt, Artificial Sequence
  Description of Artificial Sequence: Synthetic oligonucleotide
gacuaaguuaaugaguaca

SEQ ID NO: 154146 - RNA, 19 nt, Artificial Sequence
  Description of Artificial Sequence: Synthetic oligonucleotide
aagaaucccucaauucugg

SEQ ID NO: 154147 - RNA, 19 nt, Artificial Sequence
  Description of Artificial Sequence: Synthetic oligonucleotide
agacuaguaaagauaaucu

SEQ ID NO: 154148 - RNA, 19 nt, Artificial Sequence
  Description of Artificial Sequence: Synthetic oligonucleotide
uuauuaccagaugugguca

SEQ ID NO: 154149 - RNA, 19 nt, Artificial Sequence
  Description of Artificial Sequence: Synthetic oligonucleotide
ugaucauaccacugagugc

SEQ ID NO: 154150 - RNA, 19 nt, Artificial Sequence
  Description of Artificial Sequence: Synthetic oligonucleotide
gguuuauuaccagaugugg

SEQ ID NO: 154151 - RNA, 19 nt, Artificial Sequence
  Description of Artificial Sequence: Synthetic oligonucleotide
ucggacuggaaucuucagc

SEQ ID NO: 154152 - RNA, 19 nt, Artificial Sequence
  Description of Artificial Sequence: Synthetic oligonucleotide
agacuaaguuaaugaguac

SEQ ID NO: 154153 - RNA, 19 nt, Artificial Sequence
  Description of Artificial Sequence: Synthetic oligonucleotide
ucugcgccaacaaacucug

SEQ ID NO: 154154 - RNA, 19 nt, Artificial Sequence
  Description of Artificial Sequence: Synthetic oligonucleotide
acgcugauaaguuuucuga

SEQ ID NO: 154155 - RNA, 19 nt, Artificial Sequence
  Description of Artificial Sequence: Synthetic oligonucleotide
uacauuggcuaaugacacg

SEQ ID NO: 154156 - RNA, 19 nt, Artificial Sequence
  Description of Artificial Sequence: Synthetic oligonucleotide
guaagaaucccucaauucu

SEQ ID NO: 154157 - RNA, 19 nt, Artificial Sequence
  Description of Artificial Sequence: Synthetic oligonucleotide
auagacuaaguuaaugagu

SEQ ID NO: 154158 - RNA, 19 nt, Artificial Sequence
  Description of Artificial Sequence: Synthetic oligonucleotide
uaugaacagggucucgcac

SEQ ID NO: 154159 - RNA, 19 nt, Artificial Sequence
  Description of Artificial Sequence: Synthetic oligonucleotide
acuaguaaagauaaucuuu

SEQ ID NO: 154160 - RNA, 19 nt, Artificial Sequence
  Description of Artificial Sequence: Synthetic oligonucleotide
uguuagaaacagucugcgc

SEQ ID NO: 154161 - RNA, 19 nt, Artificial Sequence
  Description of Artificial Sequence: Synthetic oligonucleotide
ugucuucauaugcagguau

SEQ ID NO: 154162 - RNA, 19 nt, Artificial Sequence
  Description of Artificial Sequence: Synthetic oligonucleotide
guguauagcaccagguucc

SEQ ID NO: 154163 - RNA, 19 nt, Artificial Sequence
  Description of Artificial Sequence: Synthetic oligonucleotide
agcccauguaauuccaaag

SEQ ID NO: 154164 - RNA, 19 nt, Artificial Sequence
  Description of Artificial Sequence: Synthetic oligonucleotide
uucgcaaauuuaugcaaac

SEQ ID NO: 154165 - RNA, 19 nt, Artificial Sequence
  Description of Artificial Sequence: Synthetic oligonucleotide
cucaauucuggaacuggag

SEQ ID NO: 154166 - RNA, 19 nt, Artificial Sequence
  Description of Artificial Sequence: Synthetic oligonucleotide
ugauaaguuuucugagcca

SEQ ID NO: 154167 - RNA, 19 nt, Artificial Sequence
  Description of Artificial Sequence: Synthetic oligonucleotide
aaucagccuucacuugaag

SEQ ID NO: 154168 - RNA, 19 nt, Artificial Sequence
  Description of Artificial Sequence: Synthetic oligonucleotide
uaauuccaaagauguuugc

SEQ ID NO: 154169 - RNA, 19 nt, Artificial Sequence
  Description of Artificial Sequence: Synthetic oligonucleotide
cuuuggucugaucauacca

SEQ ID NO: 154170 - RNA, 19 nt, Artificial Sequence
  Description of Artificial Sequence: Synthetic oligonucleotide
acagguuucgagguuguag

SEQ ID NO: 154171 - RNA, 19 nt, Artificial Sequence
  Description of Artificial Sequence: Synthetic oligonucleotide
gcagcuagcacauagaggu

SEQ ID NO: 154172 - RNA, 19 nt, Artificial Sequence
  Description of Artificial Sequence: Synthetic oligonucleotide
acauuggcuaaugacacgu

SEQ ID NO: 154173 - RNA, 19 nt, Artificial Sequence
  Description of Artificial Sequence: Synthetic oligonucleotide
ucgaaacuagaagugacuc

SEQ ID NO: 154174 - RNA, 19 nt, Artificial Sequence
  Description of Artificial Sequence: Synthetic oligonucleotide
accucaauuugccauugcu

SEQ ID NO: 154175 - RNA, 19 nt, Artificial Sequence
  Description of Artificial Sequence: Synthetic oligonucleotide
caauggaugaguuggaugu

SEQ ID NO: 154176 - RNA, 19 nt, Artificial Sequence
  Description of Artificial Sequence: Synthetic oligonucleotide
ugacccauguucacacuug

SEQ ID NO: 154177 - RNA, 19 nt, Artificial Sequence
  Description of Artificial Sequence: Synthetic oligonucleotide
ucccguugccuucuaauac

SEQ ID NO: 154178 - RNA, 19 nt, Artificial Sequence
  Description of Artificial Sequence: Synthetic oligonucleotide
uauugaguccucucuuuaa

SEQ ID NO: 154179 - RNA, 19 nt, Artificial Sequence
  Description of Artificial Sequence: Synthetic oligonucleotide
guaucgacagagcugcaac

SEQ ID NO: 154180 - RNA, 19 nt, Artificial Sequence
  Description of Artificial Sequence: Synthetic oligonucleotide
gacacguggauagcaacag

SEQ ID NO: 154181 - RNA, 19 nt, Artificial Sequence
  Description of Artificial Sequence: Synthetic oligonucleotide
gucugaucauaccacugag

SEQ ID NO: 154182 - RNA, 19 nt, Artificial Sequence
  Description of Artificial Sequence: Synthetic oligonucleotide
uggucugaucauaccacug

SEQ ID NO: 154183 - RNA, 19 nt, Artificial Sequence
  Description of Artificial Sequence: Synthetic oligonucleotide
cuaaucagccuucacuuga

SEQ ID NO: 154184 - RNA, 19 nt, Artificial Sequence
  Description of Artificial Sequence: Synthetic oligonucleotide
gcuucgaugccucauauga

SEQ ID NO: 154185 - RNA, 19 nt, Artificial Sequence
  Description of Artificial Sequence: Synthetic oligonucleotide
gucacaagaccaucggcug

SEQ ID NO: 154186 - RNA, 19 nt, Artificial Sequence
  Description of Artificial Sequence: Synthetic oligonucleotide
cuuguaaguaacuucuaua

SEQ ID NO: 154187 - RNA, 19 nt, Artificial Sequence
  Description of Artificial Sequence: Synthetic oligonucleotide
auaaugugaucaauaguga

SEQ ID NO: 154188 - RNA, 19 nt, Artificial Sequence
  Description of Artificial Sequence: Synthetic oligonucleotide
cauagaugcuucuuugaga

SEQ ID NO: 154189 - RNA, 19 nt, Artificial Sequence
  Description of Artificial Sequence: Synthetic oligonucleotide
acuuagauacagugaggca

SEQ ID NO: 154190 - RNA, 19 nt, Artificial Sequence
  Description of Artificial Sequence: Synthetic oligonucleotide
uguauugaguccucucuuu

SEQ ID NO: 154191 - RNA, 19 nt, Artificial Sequence
  Description of Artificial Sequence: Synthetic oligonucleotide
cuucuuauagccugaucca

SEQ ID NO: 154192 - RNA, 19 nt, Artificial Sequence
  Description of Artificial Sequence: Synthetic oligonucleotide
ucuuauagccugauccauu

SEQ ID NO: 154193 - RNA, 19 nt, Artificial Sequence
  Description of Artificial Sequence: Synthetic oligonucleotide
uuccguucacauugaguag

SEQ ID NO: 154194 - RNA, 19 nt, Artificial Sequence
  Description of Artificial Sequence: Synthetic oligonucleotide
gaccugacauccgaguucc

SEQ ID NO: 154195 - RNA, 19 nt, Artificial Sequence
  Description of Artificial Sequence: Synthetic oligonucleotide
uaaguuccaagcugcugga

SEQ ID NO: 154196 - RNA, 19 nt, Artificial Sequence
  Description of Artificial Sequence: Synthetic oligonucleotide
ucguccauugauccaagua

SEQ ID NO: 154197 - RNA, 19 nt, Artificial Sequence
  Description of Artificial Sequence: Synthetic oligonucleotide
uuagcuucgaugccucaua

SEQ ID NO: 154198 - RNA, 19 nt, Artificial Sequence
  Description of Artificial Sequence: Synthetic oligonucleotide
acuaaguuaaugaguacaa

SEQ ID NO: 154199 - RNA, 19 nt, Artificial Sequence
  Description of Artificial Sequence: Synthetic oligonucleotide
ugaguagcuguuuccgagu

SEQ ID NO: 154200 - RNA, 19 nt, Artificial Sequence
  Description of Artificial Sequence: Synthetic oligonucleotide
gugacucuguuaugaacag

SEQ ID NO: 154201 - RNA, 19 nt, Artificial Sequence
  Description of Artificial Sequence: Synthetic oligonucleotide
gcggcaauggaugaguugg

SEQ ID NO: 154202 - RNA, 19 nt, Artificial Sequence
  Description of Artificial Sequence: Synthetic oligonucleotide
acuagaagugacucuguua

SEQ ID NO: 154203 - RNA, 19 nt, Artificial Sequence
  Description of Artificial Sequence: Synthetic oligonucleotide
cuaaguuaaugaguacaac

SEQ ID NO: 154204 - RNA, 19 nt, Artificial Sequence
  Description of Artificial Sequence: Synthetic oligonucleotide
ucguggugcuggcacagag

SEQ ID NO: 154205 - RNA, 19 nt, Artificial Sequence
  Description of Artificial Sequence: Synthetic oligonucleotide
uggaucagaagugaaugau

SEQ ID NO: 154206 - RNA, 19 nt, Artificial Sequence
  Description of Artificial Sequence: Synthetic oligonucleotide
ccgaguuccuguuagaaac

SEQ ID NO: 154207 - RNA, 19 nt, Artificial Sequence
  Description of Artificial Sequence: Synthetic oligonucleotide
gcaaaucgaaacuagaagu

SEQ ID NO: 154208 - RNA, 19 nt, Artificial Sequence
  Description of Artificial Sequence: Synthetic oligonucleotide
gaaagaccugacauccgag

SEQ ID NO: 154209 - RNA, 19 nt, Artificial Sequence
  Description of Artificial Sequence: Synthetic oligonucleotide
agaauggauuucaagugcu

SEQ ID NO: 154210 - RNA, 19 nt, Artificial Sequence
  Description of Artificial Sequence: Synthetic oligonucleotide
agguuuauuaccagaugug

SEQ ID NO: 154211 - RNA, 19 nt, Artificial Sequence
  Description of Artificial Sequence: Synthetic oligonucleotide
agucugcgccaacaaacuc

SEQ ID NO: 154212 - RNA, 19 nt, Artificial Sequence
  Description of Artificial Sequence: Synthetic oligonucleotide
cugauccauugcuauguag

SEQ ID NO: 154213 - RNA, 19 nt, Artificial Sequence
  Description of Artificial Sequence: Synthetic oligonucleotide
cuuucgcaaauuuaugcaa

SEQ ID NO: 154214 - RNA, 19 nt, Artificial Sequence
  Description of Artificial Sequence: Synthetic oligonucleotide
ucuuagcaaggcucggacu

SEQ ID NO: 154215 - RNA, 19 nt, Artificial Sequence
  Description of Artificial Sequence: Synthetic oligonucleotide
cuuuaccaaaguauuaccu

SEQ ID NO: 154216 - RNA, 19 nt, Artificial Sequence
  Description of Artificial Sequence: Synthetic oligonucleotide
ugacucuguuaugaacagg

SEQ ID NO: 154217 - RNA, 19 nt, Artificial Sequence
  Description of Artificial Sequence: Synthetic oligonucleotide
ucgcaaauuuaugcaaaca

SEQ ID NO: 154218 - RNA, 19 nt, Artificial Sequence
  Description of Artificial Sequence: Synthetic oligonucleotide
gucucgcacagaaugaaug

SEQ ID NO: 154219 - RNA, 19 nt, Artificial Sequence
  Description of Artificial Sequence: Synthetic oligonucleotide
gagcacuagaauuucuucu

SEQ ID NO: 154220 - RNA, 19 nt, Artificial Sequence
  Description of Artificial Sequence: Synthetic oligonucleotide
uuucgagguuguagggccc

SEQ ID NO: 154221 - RNA, 19 nt, Artificial Sequence
  Description of Artificial Sequence: Synthetic oligonucleotide
uaacugacuuuuauacauu

SEQ ID NO: 154222 - RNA, 19 nt, Artificial Sequence
  Description of Artificial Sequence: Synthetic oligonucleotide
uguagggcccuguuacaga

SEQ ID NO: 154223 - RNA, 19 nt, Artificial Sequence
  Description of Artificial Sequence: Synthetic oligonucleotide
uuuccgcuguauugagucc

SEQ ID NO: 154224 - RNA, 19 nt, Artificial Sequence
  Description of Artificial Sequence: Synthetic oligonucleotide
cagcugaccaauaggacca

SEQ ID NO: 154225 - RNA, 19 nt, Artificial Sequence
  Description of Artificial Sequence: Synthetic oligonucleotide
accguccuggcuaaucagc

SEQ ID NO: 154226 - RNA, 19 nt, Artificial Sequence
  Description of Artificial Sequence: Synthetic oligonucleotide
agaccguccuggcuaauca

SEQ ID NO: 154227 - RNA, 19 nt, Artificial Sequence
  Description of Artificial Sequence: Synthetic oligonucleotide
uccauugauccaaguaauu

SEQ ID NO: 154228 - RNA, 19 nt, Artificial Sequence
  Description of Artificial Sequence: Synthetic oligonucleotide
ccagucuuagcaaggcucg

SEQ ID NO: 154229 - RNA, 19 nt, Artificial Sequence
  Description of Artificial Sequence: Synthetic oligonucleotide
caaaggagccagucuuagc

SEQ ID NO: 154230 - RNA, 19 nt, Artificial Sequence
  Description of Artificial Sequence: Synthetic oligonucleotide
ucccacgagauguucuaga

SEQ ID NO: 154231 - RNA, 19 nt, Artificial Sequence
  Description of Artificial Sequence: Synthetic oligonucleotide
gcuggaucagaagugaaug

SEQ ID NO: 154232 - RNA, 19 nt, Artificial Sequence
  Description of Artificial Sequence: Synthetic oligonucleotide
cacugguuaccaaacagaa

SEQ ID NO: 154233 - RNA, 19 nt, Artificial Sequence
  Description of Artificial Sequence: Synthetic oligonucleotide
caucaauagugcacuucac

SEQ ID NO: 154234 - RNA, 19 nt, Artificial Sequence
  Description of Artificial Sequence: Synthetic oligonucleotide
uucuuauagccugauccau

SEQ ID NO: 154235 - RNA, 19 nt, Artificial Sequence
  Description of Artificial Sequence: Synthetic oligonucleotide
gacuaguaaagauaaucuu

SEQ ID NO: 154236 - RNA, 19 nt, Artificial Sequence
  Description of Artificial Sequence: Synthetic oligonucleotide
gaguagcuguuuccgaguc

SEQ ID NO: 154237 - RNA, 19 nt, Artificial Sequence
  Description of Artificial Sequence: Synthetic oligonucleotide
aaggguguacuaggccggg

SEQ ID NO: 154238 - RNA, 19 nt, Artificial Sequence
  Description of Artificial Sequence: Synthetic oligonucleotide
gaagagcggcaauggauga

SEQ ID NO: 154239 - RNA, 19 nt, Artificial Sequence
  Description of Artificial Sequence: Synthetic oligonucleotide
aaacuagaagugacucugu

SEQ ID NO: 154240 - RNA, 19 nt, Artificial Sequence
  Description of Artificial Sequence: Synthetic oligonucleotide
gacuaggauccgugcaggc

SEQ ID NO: 154241 - RNA, 19 nt, Artificial Sequence
  Description of Artificial Sequence: Synthetic oligonucleotide
uuccgcuguauugaguccu

SEQ ID NO: 154242 - RNA, 19 nt, Artificial Sequence
  Description of Artificial Sequence: Synthetic oligonucleotide
cuaaugacacguggauagc

SEQ ID NO: 154243 - RNA, 19 nt, Artificial Sequence
  Description of Artificial Sequence: Synthetic oligonucleotide
gaccguccuggcuaaucag

SEQ ID NO: 154244 - RNA, 19 nt, Artificial Sequence
  Description of Artificial Sequence: Synthetic oligonucleotide
ggcuugcagaaauauucag

SEQ ID NO: 154245 - RNA, 19 nt, Artificial Sequence
  Description of Artificial Sequence: Synthetic oligonucleotide
ccaaugcaaagucuuuucc

SEQ ID NO: 154246 - RNA, 19 nt, Artificial Sequence
  Description of Artificial Sequence: Synthetic oligonucleotide
aggacaacacucagacagg

SEQ ID NO: 154247 - RNA, 19 nt, Artificial Sequence
  Description of Artificial Sequence: Synthetic oligonucleotide
agcggcaauggaugaguug

SEQ ID NO: 154248 - RNA, 19 nt, Artificial Sequence
  Description of Artificial Sequence: Synthetic oligonucleotide
agaaucccucaauucugga

SEQ ID NO: 154249 - RNA, 19 nt, Artificial Sequence
  Description of Artificial Sequence: Synthetic oligonucleotide
agagcggcaauggaugagu

SEQ ID NO: 154250 - RNA, 19 nt, Artificial Sequence
  Description of Artificial Sequence: Synthetic oligonucleotide
ggaucagaagugaaugaug

SEQ ID NO: 154251 - RNA, 19 nt, Artificial Sequence
  Description of Artificial Sequence: Synthetic oligonucleotide
auaugcagguaucgacaga

SEQ ID NO: 154252 - RNA, 19 nt, Artificial Sequence
  Description of Artificial Sequence: Synthetic oligonucleotide
cuagcaugcuggcucaaga

SEQ ID NO: 154253 - RNA, 19 nt, Artificial Sequence
  Description of Artificial Sequence: Synthetic oligonucleotide
cauuggcuaaugacacgug

SEQ ID NO: 154254 - RNA, 19 nt, Artificial Sequence
  Description of Artificial Sequence: Synthetic oligonucleotide
acuaggauccgugcaggca

SEQ ID NO: 154255 - RNA, 19 nt, Artificial Sequence
  Description of Artificial Sequence: Synthetic oligonucleotide
ggucugaucauaccacuga

SEQ ID NO: 154256 - RNA, 19 nt, Artificial Sequence
  Description of Artificial Sequence: Synthetic oligonucleotide
cacaagaccaucggcugug

SEQ ID NO: 154257 - RNA, 19 nt, Artificial Sequence
  Description of Artificial Sequence: Synthetic oligonucleotide
agccuggagaugauagcgg

SEQ ID NO: 154258 - RNA, 19 nt, Artificial Sequence
  Description of Artificial Sequence: Synthetic oligonucleotide
acuaggccggggcaucaug

SEQ ID NO: 154259 - RNA, 19 nt, Artificial Sequence
  Description of Artificial Sequence: Synthetic oligonucleotide
gcccauguaauuccaaaga

SEQ ID NO: 154260 - RNA, 19 nt, Artificial Sequence
  Description of Artificial Sequence: Synthetic oligonucleotide
guauugaguccucucuuua

SEQ ID NO: 154261 - RNA, 19 nt, Artificial Sequence
  Description of Artificial Sequence: Synthetic oligonucleotide
auaggaccaccaaugcugu

SEQ ID NO: 154262 - RNA, 19 nt, Artificial Sequence
  Description of Artificial Sequence: Synthetic oligonucleotide
gcuaaucagccuucacuug

SEQ ID NO: 154263 - RNA, 19 nt, Artificial Sequence
  Description of Artificial Sequence: Synthetic oligonucleotide
cuucauaugcagguaucga

SEQ ID NO: 154264 - RNA, 19 nt, Artificial Sequence
  Description of Artificial Sequence: Synthetic oligonucleotide
agucuuagcaaggcucgga

SEQ ID NO: 154265 - RNA, 19 nt, Artificial Sequence
  Description of Artificial Sequence: Synthetic oligonucleotide
cucaacaggcugcccacuc

SEQ ID NO: 154266 - RNA, 19 nt, Artificial Sequence
  Description of Artificial Sequence: Synthetic oligonucleotide
guaacuucuauaagggcau

SEQ ID NO: 154267 - RNA, 19 nt, Artificial Sequence
  Description of Artificial Sequence: Synthetic oligonucleotide
aggaccaccaaugcuguuu

SEQ ID NO: 154268 - RNA, 19 nt, Artificial Sequence
  Description of Artificial Sequence: Synthetic oligonucleotide
gagaagagcggcaauggau

SEQ ID NO: 154269 - RNA, 19 nt, Artificial Sequence
  Description of Artificial Sequence: Synthetic oligonucleotide
ggaguaguaacaccaucaa

SEQ ID NO: 154270 - RNA, 19 nt, Artificial Sequence
  Description of Artificial Sequence: Synthetic oligonucleotide
ccaccucguccauugaucc

SEQ ID NO: 154271 - RNA, 19 nt, Artificial Sequence
  Description of Artificial Sequence: Synthetic oligonucleotide
ggaauucagaguucauaaa

SEQ ID NO: 154272 - RNA, 19 nt, Artificial Sequence
  Description of Artificial Sequence: Synthetic oligonucleotide
agugauagacuaaguuaau

SEQ ID NO: 154273 - RNA, 19 nt, Artificial Sequence
  Description of Artificial Sequence: Synthetic oligonucleotide
uggcacagagugguagaca

SEQ ID NO: 154274 - RNA, 19 nt, Artificial Sequence
  Description of Artificial Sequence: Synthetic oligonucleotide
ggacuaggauccgugcagg

SEQ ID NO: 154275 - RNA, 19 nt, Artificial Sequence
  Description of Artificial Sequence: Synthetic oligonucleotide
uucgagguuguagggcccu

SEQ ID NO: 154276 - RNA, 19 nt, Artificial Sequence
  Description of Artificial Sequence: Synthetic oligonucleotide
aucagaccguccuggcuaa

SEQ ID NO: 154277 - RNA, 19 nt, Artificial Sequence
  Description of Artificial Sequence: Synthetic oligonucleotide
cgcugauaaguuuucugag

SEQ ID NO: 154278 - RNA, 19 nt, Artificial Sequence
  Description of Artificial Sequence: Synthetic oligonucleotide
ggccaacaugcuuagcuga

SEQ ID NO: 154279 - RNA, 19 nt, Artificial Sequence
  Description of Artificial Sequence: Synthetic oligonucleotide
caauaggaccaccaaugcu

SEQ ID NO: 154280 - RNA, 19 nt, Artificial Sequence
  Description of Artificial Sequence: Synthetic oligonucleotide
aagaaggguuggagccauc

SEQ ID NO: 154281 - RNA, 19 nt, Artificial Sequence
  Description of Artificial Sequence: Synthetic oligonucleotide
cagucuuagcaaggcucgg

SEQ ID NO: 154282 - RNA, 19 nt, Artificial Sequence
  Description of Artificial Sequence: Synthetic oligonucleotide
ccguccuggcuaaucagcc

SEQ ID NO: 154283 - RNA, 19 nt, Artificial Sequence
  Description of Artificial Sequence: Synthetic oligonucleotide
ggcuaaucagccuucacuu

SEQ ID NO: 154284 - RNA, 19 nt, Artificial Sequence
  Description of Artificial Sequence: Synthetic oligonucleotide
auguaaguuccaagcugcu

SEQ ID NO: 154285 - RNA, 19 nt, Artificial Sequence
  Description of Artificial Sequence: Synthetic oligonucleotide
gcucaagagcacuagaauu

SEQ ID NO: 154286 - RNA, 19 nt, Artificial Sequence
  Description of Artificial Sequence: Synthetic oligonucleotide
auggugagacugccuccca

SEQ ID NO: 154287 - RNA, 19 nt, Artificial Sequence
  Description of Artificial Sequence: Synthetic oligonucleotide
gguguacuaggccggggca

SEQ ID NO: 154288 - RNA, 19 nt, Artificial Sequence
  Description of Artificial Sequence: Synthetic oligonucleotide
gguaccaggagccuugguu

SEQ ID NO: 154289 - RNA, 19 nt, Artificial Sequence
  Description of Artificial Sequence: Synthetic oligonucleotide
aggguguacuaggccgggg

SEQ ID NO: 154290 - RNA, 19 nt, Artificial Sequence
  Description of Artificial Sequence: Synthetic oligonucleotide
cuggcucaagagcacuaga

SEQ ID NO: 154291 - RNA, 19 nt, Artificial Sequence
  Description of Artificial Sequence: Synthetic oligonucleotide
ccucaauucuggaacugga

SEQ ID NO: 154292 - RNA, 19 nt, Artificial Sequence
  Description of Artificial Sequence: Synthetic oligonucleotide
gaagaaggguuggagccau

SEQ ID NO: 154293 - RNA, 19 nt, Artificial Sequence
  Description of Artificial Sequence: Synthetic oligonucleotide
ccuuagaaagaauggauuu

SEQ ID NO: 154294 - RNA, 19 nt, Artificial Sequence
  Description of Artificial Sequence: Synthetic oligonucleotide
cagucugcgccaacaaacu

SEQ ID NO: 154295 - RNA, 19 nt, Artificial Sequence
  Description of Artificial Sequence: Synthetic oligonucleotide
cagaccguccuggcuaauc

SEQ ID NO: 154296 - RNA, 19 nt, Artificial Sequence
  Description of Artificial Sequence: Synthetic oligonucleotide
cuaggccggggcaucaugu

SEQ ID NO: 154297 - RNA, 19 nt, Artificial Sequence
  Description of Artificial Sequence: Synthetic oligonucleotide
guaacaccaucaagggugu

SEQ ID NO: 154298 - RNA, 19 nt, Artificial Sequence
  Description of Artificial Sequence: Synthetic oligonucleotide
cgaguagguuuauuaccag

SEQ ID NO: 154299 - RNA, 19 nt, Artificial Sequence
  Description of Artificial Sequence: Synthetic oligonucleotide
gugucguggugcuggcaca

SEQ ID NO: 154300 - RNA, 19 nt, Artificial Sequence
  Description of Artificial Sequence: Synthetic oligonucleotide
gguaucgacagagcugcaa

SEQ ID NO: 154301 - RNA, 19 nt, Artificial Sequence
  Description of Artificial Sequence: Synthetic oligonucleotide
cugcgccaacaaacucugc

SEQ ID NO: 154302 - RNA, 19 nt, Artificial Sequence
  Description of Artificial Sequence: Synthetic oligonucleotide
uggugcccauacagcugac

SEQ ID NO: 154303 - RNA, 19 nt, Artificial Sequence
  Description of Artificial Sequence: Synthetic oligonucleotide
ggcucaagagcacuagaau

SEQ ID NO: 154304 - RNA, 19 nt, Artificial Sequence
  Description of Artificial Sequence: Synthetic oligonucleotide
cuucgaugccucauaugau

SEQ ID NO: 154305 - RNA, 19 nt, Artificial Sequence
  Description of Artificial Sequence: Synthetic oligonucleotide
caccucguccauugaucca

SEQ ID NO: 154306 - RNA, 19 nt, Artificial Sequence
  Description of Artificial Sequence: Synthetic oligonucleotide
cuuagcuucgaugccucau

SEQ ID NO: 154307 - RNA, 19 nt, Artificial Sequence
  Description of Artificial Sequence: Synthetic oligonucleotide
cacuuggcuugcagaaaua

SEQ ID NO: 154308 - RNA, 19 nt, Artificial Sequence
  Description of Artificial Sequence: Synthetic oligonucleotide
guacuaggccggggcauca

SEQ ID NO: 154309 - RNA, 19 nt, Artificial Sequence
  Description of Artificial Sequence: Synthetic oligonucleotide
agacugccucccacgagau

SEQ ID NO: 154310 - RNA, 19 nt, Artificial Sequence
  Description of Artificial Sequence: Synthetic oligonucleotide
ccuagcaugcuggcucaag

SEQ ID NO: 154311 - RNA, 19 nt, Artificial Sequence
  Description of Artificial Sequence: Synthetic oligonucleotide
uacuaggccggggcaucau

SEQ ID NO: 154312 - RNA, 19 nt, Artificial Sequence
  Description of Artificial Sequence: Synthetic oligonucleotide
gcuuagugggauggguaga

SEQ ID NO: 154313 - RNA, 19 nt, Artificial Sequence
  Description of Artificial Sequence: Synthetic oligonucleotide
ccguugccuucuaauacca

SEQ ID NO: 154314 - RNA, 19 nt, Artificial Sequence
  Description of Artificial Sequence: Synthetic oligonucleotide
guguuccacugguuaccaa

SEQ ID NO: 154315 - RNA, 19 nt, Artificial Sequence
  Description of Artificial Sequence: Synthetic oligonucleotide
cguugccuucuaauaccag

SEQ ID NO: 154316 - RNA, 19 nt, Artificial Sequence
  Description of Artificial Sequence: Synthetic oligonucleotide
cgcuguauugaguccucuc

SEQ ID NO: 154317 - RNA, 19 nt, Artificial Sequence
  Description of Artificial Sequence: Synthetic oligonucleotide
cgaaacuagaagugacucu

SEQ ID NO: 154318 - RNA, 19 nt, Artificial Sequence
  Description of Artificial Sequence: Synthetic oligonucleotide
cucguccauugauccaagu

SEQ ID NO: 154319 - RNA, 19 nt, Artificial Sequence
  Description of Artificial Sequence: Synthetic oligonucleotide
guguacuaggccggggcau

SEQ ID NO: 154320 - RNA, 19 nt, Artificial Sequence
  Description of Artificial Sequence: Synthetic oligonucleotide
ugccaccccauuggaucuu

SEQ ID NO: 154321 - RNA, 19 nt, Artificial Sequence
  Description of Artificial Sequence: Synthetic oligonucleotide
agguaucgacagagcugca

SEQ ID NO: 154322 - RNA, 19 nt, Artificial Sequence
  Description of Artificial Sequence: Synthetic oligonucleotide
gagcggcaauggaugaguu

SEQ ID NO: 154323 - RNA, 19 nt, Artificial Sequence
  Description of Artificial Sequence: Synthetic oligonucleotide
cgaaccacuccuguguaua

SEQ ID NO: 154324 - RNA, 19 nt, Artificial Sequence
  Description of Artificial Sequence: Synthetic oligonucleotide
aggcucggacuggaaucuu

SEQ ID NO: 154325 - RNA, 19 nt, Artificial Sequence
  Description of Artificial Sequence: Synthetic oligonucleotide
ggucucgcacagaaugaau

SEQ ID NO: 154326 - RNA, 19 nt, Artificial Sequence
  Description of Artificial Sequence: Synthetic oligonucleotide
cagaggcggcaagugucgu

SEQ ID NO: 154327 - RNA, 19 nt, Artificial Sequence
  Description of Artificial Sequence: Synthetic oligonucleotide
ccggggcaucauguuggac

SEQ ID NO: 154328 - RNA, 19 nt, Artificial Sequence
  Description of Artificial Sequence: Synthetic oligonucleotide
ccgcuguauugaguccucu

SEQ ID NO: 154329 - RNA, 19 nt, Artificial Sequence
  Description of Artificial Sequence: Synthetic oligonucleotide
auuauuuuacaacagcggg

SEQ ID NO: 154330 - RNA, 19 nt, Artificial Sequence
  Description of Artificial Sequence: Synthetic oligonucleotide
aagaggguacgguuaaagc

SEQ ID NO: 154331 - RNA, 19 nt, Artificial Sequence
  Description of Artificial Sequence: Synthetic oligonucleotide
aaacaaugauauuguauag

SEQ ID NO: 154332 - RNA, 19 nt, Artificial Sequence
  Description of Artificial Sequence: Synthetic oligonucleotide
acugagauuuuauagcauc

SEQ ID NO: 154333 - RNA, 19 nt, Artificial Sequence
  Description of Artificial Sequence: Synthetic oligonucleotide
uacaacagcgggcaggugg

SEQ ID NO: 154334 - RNA, 19 nt, Artificial Sequence
  Description of Artificial Sequence: Synthetic oligonucleotide
uguccauauacacaguagc

SEQ ID NO: 154335 - RNA, 19 nt, Artificial Sequence
  Description of Artificial Sequence: Synthetic oligonucleotide
  modified_base (18)..(18): a, c, u, g, unknown or other
caagcuucuucuuugacng

SEQ ID NO: 154336 - RNA, 19 nt, Artificial Sequence
  Description of Artificial Sequence: Synthetic oligonucleotide
  modified_base (2)..(2): a, c, u, g, unknown or other
unaggaauccacuuugaca

SEQ ID NO: 154337 - RNA, 19 nt, Artificial Sequence
  Description of Artificial Sequence: Synthetic oligonucleotide
  modified_base (14)..(14): a, c, u, g, unknown or other
uauggauucgguunaggaa

SEQ ID NO: 154338 - RNA, 19 nt, Artificial Sequence
  Description of Artificial Sequence: Synthetic oligonucleotide
uucucaucguagaauaugc

SEQ ID NO: 154339 - RNA, 19 nt, Artificial Sequence
  Description of Artificial Sequence: Synthetic oligonucleotide
  modified_base (9)..(9): a, c, u, g, unknown or other
ucuuugacngacuggagca

SEQ ID NO: 154340 - RNA, 19 nt, Artificial Sequence
  Description of Artificial Sequence: Synthetic oligonucleotide
aaugcucgaagugaauugg

SEQ ID NO: 154341 - RNA, 19 nt, Artificial Sequence
  Description of Artificial Sequence: Synthetic oligonucleotide
guuaaagcgcuuccuaugg

SEQ ID NO: 154342 - RNA, 19 nt, Artificial Sequence
  Description of Artificial Sequence: Synthetic oligonucleotide
gugaccauaguuuguaagg

SEQ ID NO: 154343 - RNA, 19 nt, Artificial Sequence
  Description of Artificial Sequence: Synthetic oligonucleotide
uucaauaugcugcacugga

SEQ ID NO: 154344 - RNA, 19 nt, Artificial Sequence
  Description of Artificial Sequence: Synthetic oligonucleotide
uuuggucgcaaacucagug

SEQ ID NO: 154345 - RNA, 19 nt, Artificial Sequence
  Description of Artificial Sequence: Synthetic oligonucleotide
uuacuauguacaucgguac

SEQ ID NO: 154346 - RNA, 19 nt, Artificial Sequence
  Description of Artificial Sequence: Synthetic oligonucleotide
agucaaaaccccauccugc

SEQ ID NO: 154347 - RNA, 19 nt, Artificial Sequence
  Description of Artificial Sequence: Synthetic oligonucleotide
  modified_base (3)..(3): a, c, u, g, unknown or other
uunaggaauccacuuugac

SEQ ID NO: 154348 - RNA, 19 nt, Artificial Sequence
  Description of Artificial Sequence: Synthetic oligonucleotide
agugaccauaguuuguaag

SEQ ID NO: 154349 - RNA, 19 nt, Artificial Sequence
  Description of Artificial Sequence: Synthetic oligonucleotide
gauguauucucugcaaggc

SEQ ID NO: 154350 - RNA, 19 nt, Artificial Sequence
  Description of Artificial Sequence: Synthetic oligonucleotide
uggguagcgaucuuuauau

SEQ ID NO: 154351 - RNA, 19 nt, Artificial Sequence
  Description of Artificial Sequence: Synthetic oligonucleotide
cucgaagugaauuggugag

SEQ ID NO: 154352 - RNA, 19 nt, Artificial Sequence
  Description of Artificial Sequence: Synthetic oligonucleotide
cuuagcagauaaauguuuc

SEQ ID NO: 154353 - RNA, 19 nt, Artificial Sequence
  Description of Artificial Sequence: Synthetic oligonucleotide
aacggaguuagagcgcagc

SEQ ID NO: 154354 - RNA, 19 nt, Artificial Sequence
  Description of Artificial Sequence: Synthetic oligonucleotide
caucacuagauguauuuac

SEQ ID NO: 154355 - RNA, 19 nt, Artificial Sequence
  Description of Artificial Sequence: Synthetic oligonucleotide
ucaauaugcugcacuggag

SEQ ID NO: 154356 - RNA, 19 nt, Artificial Sequence
  Description of Artificial Sequence: Synthetic oligonucleotide
caugccguuccucagcucg

SEQ ID NO: 154357 - RNA, 19 nt, Artificial Sequence
  Description of Artificial Sequence: Synthetic oligonucleotide
ucacuagauguauuuacac

SEQ ID NO: 154358 - RNA, 19 nt, Artificial Sequence
  Description of Artificial Sequence: Synthetic oligonucleotide
  modified_base (16)..(16): a, c, u, g, unknown or other
ucuauggauucgguunagg

SEQ ID NO: 154359 - RNA, 19 nt, Artificial Sequence
  Description of Artificial Sequence: Synthetic oligonucleotide
aacgccuuugcuacaauag

SEQ ID NO: 154360 - RNA, 19 nt, Artificial Sequence
  Description of Artificial Sequence: Synthetic oligonucleotide
cuauggauaacgugccggg

SEQ ID NO: 154361 - RNA, 19 nt, Artificial Sequence
  Description of Artificial Sequence: Synthetic oligonucleotide
gaagacgaacugcaggcag

SEQ ID NO: 154362 - RNA, 19 nt, Artificial Sequence
  Description of Artificial Sequence: Synthetic oligonucleotide
uuuaucucgauuucuccau

SEQ ID NO: 154363 - RNA, 19 nt, Artificial Sequence
  Description of Artificial Sequence: Synthetic oligonucleotide
uaggagggugcuucuaugg

SEQ ID NO: 154364 - RNA, 19 nt, Artificial Sequence
  Description of Artificial Sequence: Synthetic oligonucleotide
uuccuauggauaacgugcc

SEQ ID NO: 154365 - RNA, 19 nt, Artificial Sequence
  Description of Artificial Sequence: Synthetic oligonucleotide
uucgauagcacauguucac

SEQ ID NO: 154366 - RNA, 19 nt, Artificial Sequence
  Description of Artificial Sequence: Synthetic oligonucleotide
gaggguacgguuaaagcgc

SEQ ID NO: 154367 - RNA, 19 nt, Artificial Sequence
  Description of Artificial Sequence: Synthetic oligonucleotide
  modified_base (5)..(5): a, c, u, g, unknown or other
gguunaggaauccacuuug

SEQ ID NO: 154368 - RNA, 19 nt, Artificial Sequence
  Description of Artificial Sequence: Synthetic oligonucleotide
  modified_base (8)..(8): a, c, u, g, unknown or other
uucgguunaggaauccacu

SEQ ID NO: 154369 - RNA, 19 nt, Artificial Sequence
  Description of Artificial Sequence: Synthetic oligonucleotide
guaccaaacuccucugggg

SEQ ID NO: 154370 - RNA, 19 nt, Artificial Sequence
  Description of Artificial Sequence: Synthetic oligonucleotide
aagguccuaucugugauug

SEQ ID NO: 154371 - RNA, 19 nt, Artificial Sequence
  Description of Artificial Sequence: Synthetic oligonucleotide
gacacguaguuacagugac

SEQ ID NO: 154372 - RNA, 19 nt, Artificial Sequence
  Description of Artificial Sequence: Synthetic oligonucleotide
  modified_base (9)..(9): a, c, u, g, unknown or other
auucgguunaggaauccac

SEQ ID NO: 154373 - RNA, 19 nt, Artificial Sequence
  Description of Artificial Sequence: Synthetic oligonucleotide
aauagccgcaggugcaaug

SEQ ID NO: 154374 - RNA, 19 nt, Artificial Sequence
  Description of Artificial Sequence: Synthetic oligonucleotide
uuguaaggcacacauccau

SEQ ID NO: 154375 - RNA, 19 nt, Artificial Sequence
  Description of Artificial Sequence: Synthetic oligonucleotide
acacggaacagguuuacga

SEQ ID NO: 154376 - RNA, 19 nt, Artificial Sequence
  Description of Artificial Sequence: Synthetic oligonucleotide
aaugcgaaggcaucugcuu

SEQ ID NO: 154377 - RNA, 19 nt, Artificial Sequence
  Description of Artificial Sequence: Synthetic oligonucleotide
ugaccauaguuuguaaggc

SEQ ID NO: 154378 - RNA, 19 nt, Artificial Sequence
  Description of Artificial Sequence: Synthetic oligonucleotide
guagaguuggcugggaaag

SEQ ID NO: 154379 - RNA, 19 nt, Artificial Sequence
  Description of Artificial Sequence: Synthetic oligonucleotide
  modified_base (6)..(6): a, c, u, g, unknown or other
uggagngcagcccagcgaa

SEQ ID NO: 154380 - RNA, 19 nt, Artificial Sequence
  Description of Artificial Sequence: Synthetic oligonucleotide
uucccggacacguaguuac

SEQ ID NO: 154381 - RNA, 19 nt, Artificial Sequence
  Description of Artificial Sequence: Synthetic oligonucleotide
auuacuauguacaucggua

SEQ ID NO: 154382 - RNA, 19 nt, Artificial Sequence
  Description of Artificial Sequence: Synthetic oligonucleotide
aggcauguuucccggacac

SEQ ID NO: 154383 - RNA, 19 nt, Artificial Sequence
  Description of Artificial Sequence: Synthetic oligonucleotide
uccuaucugugauuggaca

SEQ ID NO: 154384 - RNA, 19 nt, Artificial Sequence
  Description of Artificial Sequence: Synthetic oligonucleotide
cuagggaacggaguuagag

SEQ ID NO: 154385 - RNA, 19 nt, Artificial Sequence
  Description of Artificial Sequence: Synthetic oligonucleotide
ugggacagguaccaaacuc

SEQ ID NO: 154386 - RNA, 19 nt, Artificial Sequence
  Description of Artificial Sequence: Synthetic oligonucleotide
  modified_base (7)..(7): a, c, u, g, unknown or other
uuugacngacuggagcaca

SEQ ID NO: 154387 - RNA, 19 nt, Artificial Sequence
  Description of Artificial Sequence: Synthetic oligonucleotide
auacagcacauuguccacc

SEQ ID NO: 154388 - RNA, 19 nt, Artificial Sequence
  Description of Artificial Sequence: Synthetic oligonucleotide
uuuauagcaucaggaaccu

SEQ ID NO: 154389 - RNA, 19 nt, Artificial Sequence
  Description of Artificial Sequence: Synthetic oligonucleotide
gguucgauagcacauguuc

SEQ ID NO: 154390 - RNA, 19 nt, Artificial Sequence
  Description of Artificial Sequence: Synthetic oligonucleotide
ucuaggccaaugaccuagg

SEQ ID NO: 154391 - RNA, 19 nt, Artificial Sequence
  Description of Artificial Sequence: Synthetic oligonucleotide
cuaccuguagugcaaccgc

SEQ ID NO: 154392 - RNA, 19 nt, Artificial Sequence
  Description of Artificial Sequence: Synthetic oligonucleotide
ucgaagugaauuggugagg

SEQ ID NO: 154393 - RNA, 19 nt, Artificial Sequence
  Description of Artificial Sequence: Synthetic oligonucleotide
  modified_base (7)..(7): a, c, u, g, unknown or other
ucgguunaggaauccacuu

SEQ ID NO: 154394 - RNA, 19 nt, Artificial Sequence
  Description of Artificial Sequence: Synthetic oligonucleotide
agaguaacuugaagggugg

SEQ ID NO: 154395 - RNA, 19 nt, Artificial Sequence
  Description of Artificial Sequence: Synthetic oligonucleotide
gagcgcaacaacacuacag

SEQ ID NO: 154396 - RNA, 19 nt, Artificial Sequence
  Description of Artificial Sequence: Synthetic oligonucleotide
gguauagaaaacacccggg

SEQ ID NO: 154397 - RNA, 19 nt, Artificial Sequence
  Description of Artificial Sequence: Synthetic oligonucleotide
  modified_base (13)..(13): a, c, u, g, unknown or other
auggauucgguunaggaau

SEQ ID NO: 154398 - RNA, 19 nt, Artificial Sequence
  Description of Artificial Sequence: Synthetic oligonucleotide
cacggaacagguuuacgac

SEQ ID NO: 154399 - RNA, 19 nt, Artificial Sequence
  Description of Artificial Sequence: Synthetic oligonucleotide
cauaaaugcucgaagugaa

SEQ ID NO: 154400 - RNA, 19 nt, Artificial Sequence
  Description of Artificial Sequence: Synthetic oligonucleotide
cucauaauguuugguauuc

SEQ ID NO: 154401 - RNA, 19 nt, Artificial Sequence
  Description of Artificial Sequence: Synthetic oligonucleotide
  modified_base (3)..(3): a, c, u, g, unknown or other
agngcagcccagcgaauuc

SEQ ID NO: 154402 - RNA, 19 nt, Artificial Sequence
  Description of Artificial Sequence: Synthetic oligonucleotide
uauggauaacgugccgggg

SEQ ID NO: 154403 - RNA, 19 nt, Artificial Sequence
  Description of Artificial Sequence: Synthetic oligonucleotide
uuagagcgcagcacagggc

SEQ ID NO: 154404 - RNA, 19 nt, Artificial Sequence
  Description of Artificial Sequence: Synthetic oligonucleotide
ugaccuagggaacggaguu

SEQ ID NO: 154405 - RNA, 19 nt, Artificial Sequence
  Description of Artificial Sequence: Synthetic oligonucleotide
agcuaccuguagugcaacc

SEQ ID NO: 154406 - RNA, 19 nt, Artificial Sequence
  Description of Artificial Sequence: Synthetic oligonucleotide
gucuaggccaaugaccuag

SEQ ID NO: 154407 - RNA, 19 nt, Artificial Sequence
  Description of Artificial Sequence: Synthetic oligonucleotide
cauuggcagucccacaaag

SEQ ID NO: 154408 - RNA, 19 nt, Artificial Sequence
  Description of Artificial Sequence: Synthetic oligonucleotide
cugagauuuuauagcauca

SEQ ID NO: 154409 - RNA, 19 nt, Artificial Sequence
  Description of Artificial Sequence: Synthetic oligonucleotide
gguuaaagcgcuuccuaug

SEQ ID NO: 154410 - RNA, 19 nt, Artificial Sequence
  Description of Artificial Sequence: Synthetic oligonucleotide
  modified_base (10)..(10): a, c, u, g, unknown or other
gauucgguunaggaaucca

SEQ ID NO: 154411 - RNA, 19 nt, Artificial Sequence
  Description of Artificial Sequence: Synthetic oligonucleotide
uggagcgcaacaacacuac

SEQ ID NO: 154412 - RNA, 19 nt, Artificial Sequence
  Description of Artificial Sequence: Synthetic oligonucleotide
auuggcagucccacaaagg

SEQ ID NO: 154413 - RNA, 19 nt, Artificial Sequence
  Description of Artificial Sequence: Synthetic oligonucleotide
  modified_base (6)..(6): a, c, u, g, unknown or other
uugacngacuggagcacac

SEQ ID NO: 154414 - RNA, 19 nt, Artificial Sequence
  Description of Artificial Sequence: Synthetic oligonucleotide
acggaacagguuuacgaca

SEQ ID NO: 154415 - RNA, 19 nt, Artificial Sequence
  Description of Artificial Sequence: Synthetic oligonucleotide
aguuagagcgcagcacagg

SEQ ID NO: 154416 - RNA, 19 nt, Artificial Sequence
  Description of Artificial Sequence: Synthetic oligonucleotide
agaacaaguuucugauuau

SEQ ID NO: 154417 - RNA, 19 nt, Artificial Sequence
  Description of Artificial Sequence: Synthetic oligonucleotide
gcaaagauuguaguugaag

SEQ ID NO: 154418 - RNA, 19 nt, Artificial Sequence
  Description of Artificial Sequence: Synthetic oligonucleotide
gaugccgacggugugguuc

SEQ ID NO: 154419 - RNA, 19 nt, Artificial Sequence
  Description of Artificial Sequence: Synthetic oligonucleotide
acuaguuguggagaagaga

SEQ ID NO: 154420 - RNA, 19 nt, Artificial Sequence
  Description of Artificial Sequence: Synthetic oligonucleotide
guacuaguuguggagaaga

SEQ ID NO: 154421 - RNA, 19 nt, Artificial Sequence
  Description of Artificial Sequence: Synthetic oligonucleotide
  modified_base (11)..(11): a, c, u, g, unknown or other
cuucuuugacngacuggag

SEQ ID NO: 154422 - RNA, 19 nt, Artificial Sequence
  Description of Artificial Sequence: Synthetic oligonucleotide
  modified_base (19)..(19): a, c, u, g, unknown or other
gcuucuauggauucgguun

SEQ ID NO: 154423 - RNA, 19 nt, Artificial Sequence
  Description of Artificial Sequence: Synthetic oligonucleotide
acacaguagcuaccuguag

SEQ ID NO: 154424 - RNA, 19 nt, Artificial Sequence
  Description of Artificial Sequence: Synthetic oligonucleotide
gagagagcuucucagucaa

SEQ ID NO: 154425 - RNA, 19 nt, Artificial Sequence
  Description of Artificial Sequence: Synthetic oligonucleotide
  modified_base (12)..(12): a, c, u, g, unknown or other
uggauucgguunaggaauc

SEQ ID NO: 154426 - RNA, 19 nt, Artificial Sequence
  Description of Artificial Sequence: Synthetic oligonucleotide
guuacagugaccauaguuu

SEQ ID NO: 154427 - RNA, 19 nt, Artificial Sequence
  Description of Artificial Sequence: Synthetic oligonucleotide
aguuuguaaggcacacauc

SEQ ID NO: 154428 - RNA, 19 nt, Artificial Sequence
  Description of Artificial Sequence: Synthetic oligonucleotide
ucgguacuaguuguggaga

SEQ ID NO: 154429 - RNA, 19 nt, Artificial Sequence
  Description of Artificial Sequence: Synthetic oligonucleotide
  modified_base (5)..(5): a, c, u, g, unknown or other
ugacngacuggagcacacg

SEQ ID NO: 154430 - RNA, 19 nt, Artificial Sequence
  Description of Artificial Sequence: Synthetic oligonucleotide
guacgguuaaagcgcuucc

SEQ ID NO: 154431 - RNA, 19 nt, Artificial Sequence
  Description of Artificial Sequence: Synthetic oligonucleotide
guagcgaucuuuauauuaa

SEQ ID NO: 154432 - RNA, 19 nt, Artificial Sequence
  Description of Artificial Sequence: Synthetic oligonucleotide
aucccgaauagccgcaggu

SEQ ID NO: 154433 - RNA, 19 nt, Artificial Sequence
  Description of Artificial Sequence: Synthetic oligonucleotide
aggcuuaauaucagccuuc

SEQ ID NO: 154434 - RNA, 19 nt, Artificial Sequence
  Description of Artificial Sequence: Synthetic oligonucleotide
acgccuuugcuacaauaga

SEQ ID NO: 154435 - RNA, 19 nt, Artificial Sequence
  Description of Artificial Sequence: Synthetic oligonucleotide
gacacggaacagguuuacg

SEQ ID NO: 154436 - RNA, 19 nt, Artificial Sequence
  Description of Artificial Sequence: Synthetic oligonucleotide
acacguaguuacagugacc

SEQ ID NO: 154437 - RNA, 19 nt, Artificial Sequence
  Description of Artificial Sequence: Synthetic oligonucleotide
ucauaauguuugguauucu

SEQ ID NO: 154438 - RNA, 19 nt, Artificial Sequence
  Description of Artificial Sequence: Synthetic oligonucleotide
gugcaaccgcugcagaaag

SEQ ID NO: 154439 - RNA, 19 nt, Artificial Sequence
  Description of Artificial Sequence: Synthetic oligonucleotide
gaacagguuuacgacaaaa

SEQ ID NO: 154440 - RNA, 19 nt, Artificial Sequence
  Description of Artificial Sequence: Synthetic oligonucleotide
guucgauagcacauguuca

SEQ ID NO: 154441 - RNA, 19 nt, Artificial Sequence
  Description of Artificial Sequence: Synthetic oligonucleotide
uagcgaucuuuauauuaaa

SEQ ID NO: 154442 - RNA, 19 nt, Artificial Sequence
  Description of Artificial Sequence: Synthetic oligonucleotide
gaguaacuugaaggguggg

SEQ ID NO: 154443 - RNA, 19 nt, Artificial Sequence
  Description of Artificial Sequence: Synthetic oligonucleotide
uuaucucgauuucuccauu

SEQ ID NO: 154444 - RNA, 19 nt, Artificial Sequence
  Description of Artificial Sequence: Synthetic oligonucleotide
uacgguuaaagcgcuuccu

SEQ ID NO: 154445 - RNA, 19 nt, Artificial Sequence
  Description of Artificial Sequence: Synthetic oligonucleotide
gguagcgaucuuuauauua

SEQ ID NO: 154446 - RNA, 19 nt, Artificial Sequence
  Description of Artificial Sequence: Synthetic oligonucleotide
gcuaccuguagugcaaccg

SEQ ID NO: 154447 - RNA, 19 nt, Artificial Sequence
  Description of Artificial Sequence: Synthetic oligonucleotide
cuaggccaaugaccuaggg

SEQ ID NO: 154448 - RNA, 19 nt, Artificial Sequence
  Description of Artificial Sequence: Synthetic oligonucleotide
gggccauuggucuuuuacc

SEQ ID NO: 154449 - RNA, 19 nt, Artificial Sequence
  Description of Artificial Sequence: Synthetic oligonucleotide
ugucggcggcgccugauga

SEQ ID NO: 154450 - RNA, 19 nt, Artificial Sequence
  Description of Artificial Sequence: Synthetic oligonucleotide
  modified_base (18)..(18): a, c, u, g, unknown or other
cuucuauggauucgguuna

SEQ ID NO: 154451 - RNA, 19 nt, Artificial Sequence
  Description of Artificial Sequence: Synthetic oligonucleotide
aaaacgccuuugcuacaau

SEQ ID NO: 154452 - RNA, 19 nt, Artificial Sequence
  Description of Artificial Sequence: Synthetic oligonucleotide
ccaagauacugucuccugc

SEQ ID NO: 154453 - RNA, 19 nt, Artificial Sequence
  Description of Artificial Sequence: Synthetic oligonucleotide
  modified_base (4)..(4): a, c, u, g, unknown or other
guunaggaauccacuuuga

SEQ ID NO: 154454 - RNA, 19 nt, Artificial Sequence
  Description of Artificial Sequence: Synthetic oligonucleotide
ccuauggauaacgugccgg

SEQ ID NO: 154455 - RNA, 19 nt, Artificial Sequence
  Description of Artificial Sequence: Synthetic oligonucleotide
  modified_base (17)..(17): a, c, u, g, unknown or other
uucuauggauucgguunag

SEQ ID NO: 154456 - RNA, 19 nt, Artificial Sequence
  Description of Artificial Sequence: Synthetic oligonucleotide
auagccgcaggugcaauga

SEQ ID NO: 154457 - RNA, 19 nt, Artificial Sequence
  Description of Artificial Sequence: Synthetic oligonucleotide
  modified_base (8)..(8): a, c, u, g, unknown or other
gguggagngcagcccagcg

SEQ ID NO: 154458 - RNA, 19 nt, Artificial Sequence
  Description of Artificial Sequence: Synthetic oligonucleotide
caacacuacagagccacuc

SEQ ID NO: 154459 - RNA, 19 nt, Artificial Sequence
  Description of Artificial Sequence: Synthetic oligonucleotide
uguuggcgccaggaagucg

SEQ ID NO: 154460 - RNA, 19 nt, Artificial Sequence
  Description of Artificial Sequence: Synthetic oligonucleotide
ucccgaauagccgcaggug

SEQ ID NO: 154461 - RNA, 19 nt, Artificial Sequence
  Description of Artificial Sequence: Synthetic oligonucleotide
guuucuggugucggcggcg

SEQ ID NO: 154462 - RNA, 19 nt, Artificial Sequence
  Description of Artificial Sequence: Synthetic oligonucleotide
gcucgaagugaauugguga

SEQ ID NO: 154463 - RNA, 19 nt, Artificial Sequence
  Description of Artificial Sequence: Synthetic oligonucleotide
agguccuaucugugauugg

SEQ ID NO: 154464 - RNA, 19 nt, Artificial Sequence
  Description of Artificial Sequence: Synthetic oligonucleotide
aaaggguagugggaaggua

SEQ ID NO: 154465 - RNA, 19 nt, Artificial Sequence
  Description of Artificial Sequence: Synthetic oligonucleotide
agucccaaugcgaaggcau

SEQ ID NO: 154466 - RNA, 19 nt, Artificial Sequence
  Description of Artificial Sequence: Synthetic oligonucleotide
  modified_base (8)..(8): a, c, u, g, unknown or other
cuuugacngacuggagcac

SEQ ID NO: 154467 - RNA, 19 nt, Artificial Sequence
  Description of Artificial Sequence: Synthetic oligonucleotide
augcgaaggcaucugcuua

SEQ ID NO: 154468 - RNA, 19 nt, Artificial Sequence
  Description of Artificial Sequence: Synthetic oligonucleotide
uagccgcaggugcaaugag

SEQ ID NO: 154469 - RNA, 19 nt, Artificial Sequence
  Description of Artificial Sequence: Synthetic oligonucleotide
caguagcuaccuguagugc

SEQ ID NO: 154470 - RNA, 19 nt, Artificial Sequence
  Description of Artificial Sequence: Synthetic oligonucleotide
  modified_base (7)..(7): a, c, u, g, unknown or other
guggagngcagcccagcga

SEQ ID NO: 154471 - RNA, 19 nt, Artificial Sequence
  Description of Artificial Sequence: Synthetic oligonucleotide
gauaacgugccggggcuga

SEQ ID NO: 154472 - RNA, 19 nt, Artificial Sequence
  Description of Artificial Sequence: Synthetic oligonucleotide
augccgacggugugguucu

SEQ ID NO: 154473 - RNA, 19 nt, Artificial Sequence
  Description of Artificial Sequence: Synthetic oligonucleotide
cccgaauagccgcaggugc

SEQ ID NO: 154474 - RNA, 19 nt, Artificial Sequence
  Description of Artificial Sequence: Synthetic oligonucleotide
gcgcaacaacacuacagag

SEQ ID NO: 154475 - RNA, 19 nt, Artificial Sequence
  Description of Artificial Sequence: Synthetic oligonucleotide
guggguagcgaucuuuaua

SEQ ID NO: 154476 - RNA, 19 nt, Artificial Sequence
  Description of Artificial Sequence: Synthetic oligonucleotide
ugucccgauguagaggguu

SEQ ID NO: 154477 - RNA, 19 nt, Artificial Sequence
  Description of Artificial Sequence: Synthetic oligonucleotide
caaaaggugcaucugugau

SEQ ID NO: 154478 - RNA, 19 nt, Artificial Sequence
  Description of Artificial Sequence: Synthetic oligonucleotide
gguccuaucugugauugga

SEQ ID NO: 154479 - RNA, 19 nt, Artificial Sequence
  Description of Artificial Sequence: Synthetic oligonucleotide
acaacagcgggcagguggu

SEQ ID NO: 154480 - RNA, 19 nt, Artificial Sequence
  Description of Artificial Sequence: Synthetic oligonucleotide
gguacuaguuguggagaag

SEQ ID NO: 154481 - RNA, 19 nt, Artificial Sequence
  Description of Artificial Sequence: Synthetic oligonucleotide
gguacgguuaaagcgcuuc

SEQ ID NO: 154482 - RNA, 19 nt, Artificial Sequence
  Description of Artificial Sequence: Synthetic oligonucleotide
uaguuacagugaccauagu

SEQ ID NO: 154483 - RNA, 19 nt, Artificial Sequence
  Description of Artificial Sequence: Synthetic oligonucleotide
agucgccggggauccgugg

SEQ ID NO: 154484 - RNA, 19 nt, Artificial Sequence
  Description of Artificial Sequence: Synthetic oligonucleotide
gaaucguugguuggggccu

SEQ ID NO: 154485 - RNA, 19 nt, Artificial Sequence
  Description of Artificial Sequence: Synthetic oligonucleotide
ccauaaaugcucgaaguga

SEQ ID NO: 154486 - RNA, 19 nt, Artificial Sequence
  Description of Artificial Sequence: Synthetic oligonucleotide
gaggggugaaacugguacu

SEQ ID NO: 154487 - RNA, 19 nt, Artificial Sequence
  Description of Artificial Sequence: Synthetic oligonucleotide
auaacgugccggggcugac

SEQ ID NO: 154488 - RNA, 19 nt, Artificial Sequence
  Description of Artificial Sequence: Synthetic oligonucleotide
guagcuaccuguagugcaa

SEQ ID NO: 154489 - RNA, 19 nt, Artificial Sequence
  Description of Artificial Sequence: Synthetic oligonucleotide
cucuguguucacuggccca

SEQ ID NO: 154490 - RNA, 19 nt, Artificial Sequence
  Description of Artificial Sequence: Synthetic oligonucleotide
uuggcgccaggaagucgcc

SEQ ID NO: 154491 - RNA, 19 nt, Artificial Sequence
  Description of Artificial Sequence: Synthetic oligonucleotide
ccaaugcgaaggcaucugc

SEQ ID NO: 154492 - RNA, 19 nt, Artificial Sequence
  Description of Artificial Sequence: Synthetic oligonucleotide
cggacacguaguuacagug

SEQ ID NO: 154493 - RNA, 19 nt, Artificial Sequence
  Description of Artificial Sequence: Synthetic oligonucleotide
ggaacggaguuagagcgca

SEQ ID NO: 154494 - RNA, 19 nt, Artificial Sequence
  Description of Artificial Sequence: Synthetic oligonucleotide
gaucagcuccccaucccga

SEQ ID NO: 154495 - RNA, 19 nt, Artificial Sequence
  Description of Artificial Sequence: Synthetic oligonucleotide
gacagguaccaaacuccuc

SEQ ID NO: 154496 - RNA, 19 nt, Artificial Sequence
  Description of Artificial Sequence: Synthetic oligonucleotide
gcaguggcaagagacaaaa

SEQ ID NO: 154497 - RNA, 19 nt, Artificial Sequence
  Description of Artificial Sequence: Synthetic oligonucleotide
uagcuaccuguagugcaac

SEQ ID NO: 154498 - RNA, 19 nt, Artificial Sequence
  Description of Artificial Sequence: Synthetic oligonucleotide
caaugcgaaggcaucugcu

SEQ ID NO: 154499 - RNA, 19 nt, Artificial Sequence
  Description of Artificial Sequence: Synthetic oligonucleotide
ccaaugaccuagggaacgg

SEQ ID NO: 154500 - RNA, 19 nt, Artificial Sequence
  Description of Artificial Sequence: Synthetic oligonucleotide
ccccaucccgaauagccgc

SEQ ID NO: 154501 - RNA, 19 nt, Artificial Sequence
  Description of Artificial Sequence: Synthetic oligonucleotide
augcucgaagugaauuggu

SEQ ID NO: 154502 - RNA, 19 nt, Artificial Sequence
  Description of Artificial Sequence: Synthetic oligonucleotide
gaacggaguuagagcgcag

SEQ ID NO: 154503 - RNA, 19 nt, Artificial Sequence
  Description of Artificial Sequence: Synthetic oligonucleotide
aggugcaaugagaggggug

SEQ ID NO: 154504 - RNA, 19 nt, Artificial Sequence
  Description of Artificial Sequence: Synthetic oligonucleotide
aggguacgguuaaagcgcu

SEQ ID NO: 154505 - RNA, 19 nt, Artificial Sequence
  Description of Artificial Sequence: Synthetic oligonucleotide
ccaugucagcuccuguccc

SEQ ID NO: 154506 - RNA, 19 nt, Artificial Sequence
  Description of Artificial Sequence: Synthetic oligonucleotide
  modified_base (11)..(11): a, c, u, g, unknown or other
ggauucgguunaggaaucc

SEQ ID NO: 154507 - RNA, 19 nt, Artificial Sequence
  Description of Artificial Sequence: Synthetic oligonucleotide
gguauucucaucguagaau

SEQ ID NO: 154508 - RNA, 19 nt, Artificial Sequence
  Description of Artificial Sequence: Synthetic oligonucleotide
cccagcgaauucugggugc

SEQ ID NO: 154509 - RNA, 19 nt, Artificial Sequence
  Description of Artificial Sequence: Synthetic oligonucleotide
ggacacguaguuacaguga

SEQ ID NO: 154510 - RNA, 19 nt, Artificial Sequence
  Description of Artificial Sequence: Synthetic oligonucleotide
cagccgaugguggcgugag

SEQ ID NO: 154511 - RNA, 19 nt, Artificial Sequence
  Description of Artificial Sequence: Synthetic oligonucleotide
ggugcccuccggaagucag

SEQ ID NO: 154512 - RNA, 19 nt, Artificial Sequence
  Description of Artificial Sequence: Synthetic oligonucleotide
ccgaugguggcgugagggg

SEQ ID NO: 154513 - RNA, 19 nt, Artificial Sequence
  Description of Artificial Sequence: Synthetic oligonucleotide
gucccaaugcgaaggcauc

SEQ ID NO: 154514 - RNA, 19 nt, Artificial Sequence
  Description of Artificial Sequence: Synthetic oligonucleotide
gugucggcggcgccugaug

SEQ ID NO: 154515 - RNA, 19 nt, Artificial Sequence
  Description of Artificial Sequence: Synthetic oligonucleotide
cuguaguuuaacagcucau

SEQ ID NO: 154516 - RNA, 19 nt, Artificial Sequence
  Description of Artificial Sequence: Synthetic oligonucleotide
gucgccggggauccgugga

SEQ ID NO: 154517 - RNA, 19 nt, Artificial Sequence
  Description of Artificial Sequence: Synthetic oligonucleotide
gaaaacacccgggcuuggu

SEQ ID NO: 154518 - RNA, 19 nt, Artificial Sequence
  Description of Artificial Sequence: Synthetic oligonucleotide
auuccucggggaucccauu

SEQ ID NO: 154519 - RNA, 19 nt, Artificial Sequence
  Description of Artificial Sequence: Synthetic oligonucleotide
ggagcgcaacaacacuaca

SEQ ID NO: 154520 - RNA, 19 nt, Artificial Sequence
  Description of Artificial Sequence: Synthetic oligonucleotide
agcaguggcaagagacaaa

SEQ ID NO: 154521 - RNA, 19 nt, Artificial Sequence
  Description of Artificial Sequence: Synthetic oligonucleotide
gugagcagaaucguugguu

SEQ ID NO: 154522 - RNA, 19 nt, Artificial Sequence
  Description of Artificial Sequence: Synthetic oligonucleotide
gaggugccuugucagcagu

SEQ ID NO: 154523 - RNA, 19 nt, Artificial Sequence
  Description of Artificial Sequence: Synthetic oligonucleotide
gcauguuucccggacacgu

SEQ ID NO: 154524 - RNA, 19 nt, Artificial Sequence
  Description of Artificial Sequence: Synthetic oligonucleotide
  modified_base (2)..(2): a, c, u, g, unknown or other
gngcagcccagcgaauucu

SEQ ID NO: 154525 - RNA, 19 nt, Artificial Sequence
  Description of Artificial Sequence: Synthetic oligonucleotide
  modified_base (4)..(4): a, c, u, g, unknown or other
gagngcagcccagcgaauu

SEQ ID NO: 154526 - RNA, 19 nt, Artificial Sequence
  Description of Artificial Sequence: Synthetic oligonucleotide
gcggaugugucccaacacu

SEQ ID NO: 154527 - RNA, 19 nt, Artificial Sequence
  Description of Artificial Sequence: Synthetic oligonucleotide
ccuuugcuacaauagacau

SEQ ID NO: 154528 - RNA, 19 nt, Artificial Sequence
  Description of Artificial Sequence: Synthetic oligonucleotide
cuuggacccgggagggaaa

SEQ ID NO: 154529 - RNA, 19 nt, Artificial Sequence
  Description of Artificial Sequence: Synthetic oligonucleotide
gaccuagggaacggaguua

SEQ ID NO: 154530 - RNA, 19 nt, Artificial Sequence
  Description of Artificial Sequence: Synthetic oligonucleotide
ggagggugcuucuauggau

SEQ ID NO: 154531 - RNA, 19 nt, Artificial Sequence
  Description of Artificial Sequence: Synthetic oligonucleotide
caauugcagggucuccgcu

SEQ ID NO: 154532 - RNA, 19 nt, Artificial Sequence
  Description of Artificial Sequence: Synthetic oligonucleotide
guuucccggacacguaguu

SEQ ID NO: 154533 - RNA, 19 nt, Artificial Sequence
  Description of Artificial Sequence: Synthetic oligonucleotide
ggccaaugaccuagggaac

SEQ ID NO: 154534 - RNA, 19 nt, Artificial Sequence
  Description of Artificial Sequence: Synthetic oligonucleotide
guguuggcgccaggaaguc

SEQ ID NO: 154535 - RNA, 19 nt, Artificial Sequence
  Description of Artificial Sequence: Synthetic oligonucleotide
cccggacacguaguuacag

SEQ ID NO: 154536 - RNA, 19 nt, Artificial Sequence
  Description of Artificial Sequence: Synthetic oligonucleotide
ggauaacgugccggggcug

SEQ ID NO: 154537 - RNA, 19 nt, Artificial Sequence
  Description of Artificial Sequence: Synthetic oligonucleotide
ccgggcuugguucguguac

SEQ ID NO: 154538 - RNA, 19 nt, Artificial Sequence
  Description of Artificial Sequence: Synthetic oligonucleotide
ggacagguaccaaacuccu

SEQ ID NO: 154539 - RNA, 19 nt, Artificial Sequence
  Description of Artificial Sequence: Synthetic oligonucleotide
gcgccugaugacacucugc

SEQ ID NO: 154540 - RNA, 19 nt, Artificial Sequence
  Description of Artificial Sequence: Synthetic oligonucleotide
cgauguagaggguucgaua

SEQ ID NO: 154541 - RNA, 19 nt, Artificial Sequence
  Description of Artificial Sequence: Synthetic oligonucleotide
ugaugccgacggugugguu

SEQ ID NO: 154542 - RNA, 19 nt, Artificial Sequence
  Description of Artificial Sequence: Synthetic oligonucleotide
ccggugaagcuuggacccg

SEQ ID NO: 154543 - RNA, 19 nt, Artificial Sequence
  Description of Artificial Sequence: Synthetic oligonucleotide
gguggguagcgaucuuuau

SEQ ID NO: 154544 - RNA, 19 nt, Artificial Sequence
  Description of Artificial Sequence: Synthetic oligonucleotide
ccaucacuagauguauuua

SEQ ID NO: 154545 - RNA, 19 nt, Artificial Sequence
  Description of Artificial Sequence: Synthetic oligonucleotide
ggguggguagcgaucuuua

SEQ ID NO: 154546 - RNA, 19 nt, Artificial Sequence
  Description of Artificial Sequence: Synthetic oligonucleotide
caacagcgggcaggugguc

SEQ ID NO: 154547 - RNA, 19 nt, Artificial Sequence
  Description of Artificial Sequence: Synthetic oligonucleotide
cgaagugaauuggugaggu

SEQ ID NO: 154548 - RNA, 19 nt, Artificial Sequence
  Description of Artificial Sequence: Synthetic oligonucleotide
gcaguagaguuggcuggga

SEQ ID NO: 154549 - RNA, 19 nt, Artificial Sequence
  Description of Artificial Sequence: Synthetic oligonucleotide
cgguacuaguuguggagaa

SEQ ID NO: 154550 - RNA, 19 nt, Artificial Sequence
  Description of Artificial Sequence: Synthetic oligonucleotide
ugccgacggugugguucug

SEQ ID NO: 154551 - RNA, 19 nt, Artificial Sequence
  Description of Artificial Sequence: Synthetic oligonucleotide
ccgacggugugguucugaa

SEQ ID NO: 154552 - RNA, 19 nt, Artificial Sequence
  Description of Artificial Sequence: Synthetic oligonucleotide
ccuagggaacggaguuaga

SEQ ID NO: 154553 - RNA, 19 nt, Artificial Sequence
  Description of Artificial Sequence: Synthetic oligonucleotide
ccggacacguaguuacagu

SEQ ID NO: 154554 - RNA, 19 nt, Artificial Sequence
  Description of Artificial Sequence: Synthetic oligonucleotide
ccaugccguuccucagcuc

SEQ ID NO: 154555 - RNA, 19 nt, Artificial Sequence
  Description of Artificial Sequence: Synthetic oligonucleotide
cgguuaaagcgcuuccuau

SEQ ID NO: 154556 - RNA, 19 nt, Artificial Sequence
  Description of Artificial Sequence: Synthetic oligonucleotide
ggcaucgccuuugggcugu

SEQ ID NO: 154557 - RNA, 19 nt, Artificial Sequence
  Description of Artificial Sequence: Synthetic oligonucleotide
ggguagcgaucuuuauauu

SEQ ID NO: 154558 - RNA, 19 nt, Artificial Sequence
  Description of Artificial Sequence: Synthetic oligonucleotide
cugucccgauguagagggu

SEQ ID NO: 154559 - RNA, 19 nt, Artificial Sequence
  Description of Artificial Sequence: Synthetic oligonucleotide
cccgauguagaggguucga

SEQ ID NO: 154560 - RNA, 19 nt, Artificial Sequence
  Description of Artificial Sequence: Synthetic oligonucleotide
  modified_base (6)..(6): a, c, u, g, unknown or other
cgguunaggaauccacuuu

SEQ ID NO: 154561 - RNA, 19 nt, Artificial Sequence
  Description of Artificial Sequence: Synthetic oligonucleotide
ccagccgaugguggcguga

SEQ ID NO: 154562 - RNA, 19 nt, Artificial Sequence
  Description of Artificial Sequence: Synthetic oligonucleotide
ccagcgaauucugggugcu

SEQ ID NO: 154563 - RNA, 19 nt, Artificial Sequence
  Description of Artificial Sequence: Synthetic oligonucleotide
ccgauguagaggguucgau

SEQ ID NO: 154564 - RNA, 19 nt, Artificial Sequence
  Description of Artificial Sequence: Synthetic oligonucleotide
ggcuugguucguguacauu

SEQ ID NO: 154565 - RNA, 19 nt, Artificial Sequence
  Description of Artificial Sequence: Synthetic oligonucleotide
  modified_base (5)..(5): a, c, u, g, unknown or other
ggagngcagcccagcgaau

SEQ ID NO: 154566 - RNA, 19 nt, Artificial Sequence
  Description of Artificial Sequence: Synthetic oligonucleotide
ggugucggcggcgccugau

SEQ ID NO: 154567 - RNA, 19 nt, Artificial Sequence
  Description of Artificial Sequence: Synthetic oligonucleotide
caucgccuuugggcuguuu

SEQ ID NO: 154568 - RNA, 19 nt, Artificial Sequence
  Description of Artificial Sequence: Synthetic oligonucleotide
gcaucgccuuugggcuguu

SEQ ID NO: 154569 - RNA, 19 nt, Artificial Sequence
  Description of Artificial Sequence: Synthetic oligonucleotide
aaagcauuaacuuaguacu

SEQ ID NO: 154570 - RNA, 19 nt, Artificial Sequence
  Description of Artificial Sequence: Synthetic oligonucleotide
acuuuaguaacucugggcc

SEQ ID NO: 154571 - RNA, 19 nt, Artificial Sequence
  Description of Artificial Sequence: Synthetic oligonucleotide
uuaacuaagaacuagcaga

SEQ ID NO: 154572 - RNA, 19 nt, Artificial Sequence
  Description of Artificial Sequence: Synthetic oligonucleotide
uuuuauauucacuugacca

SEQ ID NO: 154573 - RNA, 19 nt, Artificial Sequence
  Description of Artificial Sequence: Synthetic oligonucleotide
auucaagacaucuaacccc

SEQ ID NO: 154574 - RNA, 19 nt, Artificial Sequence
  Description of Artificial Sequence: Synthetic oligonucleotide
ugaauugauaauaaaacaa

SEQ ID NO: 154575 - RNA, 19 nt, Artificial Sequence
  Description of Artificial Sequence: Synthetic oligonucleotide
acuaaaucaaucuagcacu

SEQ ID NO: 154576 - RNA, 19 nt, Artificial Sequence
  Description of Artificial Sequence: Synthetic oligonucleotide
uauaccagccuuaagaacu

SEQ ID NO: 154577 - RNA, 19 nt, Artificial Sequence
  Description of Artificial Sequence: Synthetic oligonucleotide
uagguuguaacuaauguca

SEQ ID NO: 154578 - RNA, 19 nt, Artificial Sequence
  Description of Artificial Sequence: Synthetic oligonucleotide
auaaauuucaauguuaggu

SEQ ID NO: 154579 - RNA, 19 nt, Artificial Sequence
  Description of Artificial Sequence: Synthetic oligonucleotide
uuagaacuagacuaaauca

SEQ ID NO: 154580 - RNA, 19 nt, Artificial Sequence
  Description of Artificial Sequence: Synthetic oligonucleotide
auguaaauagucuaaaaga

SEQ ID NO: 154581 - RNA, 19 nt, Artificial Sequence
  Description of Artificial Sequence: Synthetic oligonucleotide
uauauuauguccuuguaaa

SEQ ID NO: 154582 - RNA, 19 nt, Artificial Sequence
  Description of Artificial Sequence: Synthetic oligonucleotide
uguaaaacgcagcaaaaug

SEQ ID NO: 154583 - RNA, 19 nt, Artificial Sequence
  Description of Artificial Sequence: Synthetic oligonucleotide
ucucagagagaacugaggg

SEQ ID NO: 154584 - RNA, 19 nt, Artificial Sequence
  Description of Artificial Sequence: Synthetic oligonucleotide
acaauuacaauaaugucac

SEQ ID NO: 154585 - RNA, 19 nt, Artificial Sequence
  Description of Artificial Sequence: Synthetic oligonucleotide
uggagcaccauaaugaggc

SEQ ID NO: 154586 - RNA, 19 nt, Artificial Sequence
  Description of Artificial Sequence: Synthetic oligonucleotide
caaaucauaguugugaugc

SEQ ID NO: 154587 - RNA, 19 nt, Artificial Sequence
  Description of Artificial Sequence: Synthetic oligonucleotide
uauucaagacaucuaaccc

SEQ ID NO: 154588 - RNA, 19 nt, Artificial Sequence
  Description of Artificial Sequence: Synthetic oligonucleotide
augcuaauaaaacaaauca

SEQ ID NO: 154589 - RNA, 19 nt, Artificial Sequence
  Description of Artificial Sequence: Synthetic oligonucleotide
acuauguaagaguaggagg

SEQ ID NO: 154590 - RNA, 19 nt, Artificial Sequence
  Description of Artificial Sequence: Synthetic oligonucleotide
aaugucaguacauaacagu

SEQ ID NO: 154591 - RNA, 19 nt, Artificial Sequence
  Description of Artificial Sequence: Synthetic oligonucleotide
uauaucauguaauccaagc

SEQ ID NO: 154592 - RNA, 19 nt, Artificial Sequence
  Description of Artificial Sequence: Synthetic oligonucleotide
aaaucaaucuagcacuuca

SEQ ID NO: 154593 - RNA, 19 nt, Artificial Sequence
  Description of Artificial Sequence: Synthetic oligonucleotide
ugcauaaaaggaauuaaga

SEQ ID NO: 154594 - RNA, 19 nt, Artificial Sequence
  Description of Artificial Sequence: Synthetic oligonucleotide
uucguuaacaggaaaauau

SEQ ID NO: 154595 - RNA, 19 nt, Artificial Sequence
  Description of Artificial Sequence: Synthetic oligonucleotide
uagugaaagaacuugguga

SEQ ID NO: 154596 - RNA, 19 nt, Artificial Sequence
  Description of Artificial Sequence: Synthetic oligonucleotide
gacuaaaucaaucuagcac

SEQ ID NO: 154597 - RNA, 19 nt, Artificial Sequence
  Description of Artificial Sequence: Synthetic oligonucleotide
cuagacuaaaucaaucuag

SEQ ID NO: 154598 - RNA, 19 nt, Artificial Sequence
  Description of Artificial Sequence: Synthetic oligonucleotide
accaaguaaucuuagguuc

SEQ ID NO: 154599 - RNA, 19 nt, Artificial Sequence
  Description of Artificial Sequence: Synthetic oligonucleotide
ucaaucuagcacuucagag

SEQ ID NO: 154600 - RNA, 19 nt, Artificial Sequence
  Description of Artificial Sequence: Synthetic oligonucleotide
guuuauaccagccuuaaga

SEQ ID NO: 154601 - RNA, 19 nt, Artificial Sequence
  Description of Artificial Sequence: Synthetic oligonucleotide
uguaacuaaugucaguaca

SEQ ID NO: 154602 - RNA, 19 nt, Artificial Sequence
  Description of Artificial Sequence: Synthetic oligonucleotide
accauaaugaggcagcaag

SEQ ID NO: 154603 - RNA, 19 nt, Artificial Sequence
  Description of Artificial Sequence: Synthetic oligonucleotide
agugaaagaacuuggugag

SEQ ID NO: 154604 - RNA, 19 nt, Artificial Sequence
  Description of Artificial Sequence: Synthetic oligonucleotide
uguaauguuacuugcaaau

SEQ ID NO: 154605 - RNA, 19 nt, Artificial Sequence
  Description of Artificial Sequence: Synthetic oligonucleotide
cucaaaaccaaaacuagug

SEQ ID NO: 154606 - RNA, 19 nt, Artificial Sequence
  Description of Artificial Sequence: Synthetic oligonucleotide
guaucaaauagacugaaca

SEQ ID NO: 154607 - RNA, 19 nt, Artificial Sequence
  Description of Artificial Sequence: Synthetic oligonucleotide
caaucuagcacuucagagg

SEQ ID NO: 154608 - RNA, 19 nt, Artificial Sequence
  Description of Artificial Sequence: Synthetic oligonucleotide
aaauuucuaagucucccca

SEQ ID NO: 154609 - RNA, 19 nt, Artificial Sequence
  Description of Artificial Sequence: Synthetic oligonucleotide
aauuuuaagugcuuucaaa

SEQ ID NO: 154610 - RNA, 19 nt, Artificial Sequence
  Description of Artificial Sequence: Synthetic oligonucleotide
caaggaacaauauauaaca

SEQ ID NO: 154611 - RNA, 19 nt, Artificial Sequence
  Description of Artificial Sequence: Synthetic oligonucleotide
cuuauuagcacccauucuc

SEQ ID NO: 154612 - RNA, 19 nt, Artificial Sequence
  Description of Artificial Sequence: Synthetic oligonucleotide
ucaggguacauuuacauau

SEQ ID NO: 154613 - RNA, 19 nt, Artificial Sequence
  Description of Artificial Sequence: Synthetic oligonucleotide
agucuaaguccuuauuagc

SEQ ID NO: 154614 - RNA, 19 nt, Artificial Sequence
  Description of Artificial Sequence: Synthetic oligonucleotide
aaaacuagguuguaacuaa

SEQ ID NO: 154615 - RNA, 19 nt, Artificial Sequence
  Description of Artificial Sequence: Synthetic oligonucleotide
uuuugacuggcacugagga

SEQ ID NO: 154616 - RNA, 19 nt, Artificial Sequence
  Description of Artificial Sequence: Synthetic oligonucleotide
uuagcuuugcuaaucaaaa

SEQ ID NO: 154617 - RNA, 19 nt, Artificial Sequence
  Description of Artificial Sequence: Synthetic oligonucleotide
uuugauguuuauuagguuu

SEQ ID NO: 154618 - RNA, 19 nt, Artificial Sequence
  Description of Artificial Sequence: Synthetic oligonucleotide
aauauauuuuguucaacua

SEQ ID NO: 154619 - RNA, 19 nt, Artificial Sequence
  Description of Artificial Sequence: Synthetic oligonucleotide
cacaauuacaauaauguca

SEQ ID NO: 154620 - RNA, 19 nt, Artificial Sequence
  Description of Artificial Sequence: Synthetic oligonucleotide
ugucauacggucuacaaau

SEQ ID NO: 154621 - RNA, 19 nt, Artificial Sequence
  Description of Artificial Sequence: Synthetic oligonucleotide
uuugacuacacugacaaaa

SEQ ID NO: 154622 - RNA, 19 nt, Artificial Sequence
  Description of Artificial Sequence: Synthetic oligonucleotide
caauuaaacacacacacga

SEQ ID NO: 154623 - RNA, 19 nt, Artificial Sequence
  Description of Artificial Sequence: Synthetic oligonucleotide
aaauccauagggcaaacuu

SEQ ID NO: 154624 - RNA, 19 nt, Artificial Sequence
  Description of Artificial Sequence: Synthetic oligonucleotide
uuacuugcaaauucacagg

SEQ ID NO: 154625 - RNA, 19 nt, Artificial Sequence
  Description of Artificial Sequence: Synthetic oligonucleotide
agaaauauaaaguguguaa

SEQ ID NO: 154626 - RNA, 19 nt, Artificial Sequence
  Description of Artificial Sequence: Synthetic oligonucleotide
aagaauucccuaucggaug

SEQ ID NO: 154627 - RNA, 19 nt, Artificial Sequence
  Description of Artificial Sequence: Synthetic oligonucleotide
acaaaagauguaaauaguc

SEQ ID NO: 154628 - RNA, 19 nt, Artificial Sequence
  Description of Artificial Sequence: Synthetic oligonucleotide
aaucagaccugcauguuac

SEQ ID NO: 154629 - RNA, 19 nt, Artificial Sequence
  Description of Artificial Sequence: Synthetic oligonucleotide
aaacuagugaaagaacuug

SEQ ID NO: 154630 - RNA, 19 nt, Artificial Sequence
  Description of Artificial Sequence: Synthetic oligonucleotide
uucacuacuacagugacaa

SEQ ID NO: 154631 - RNA, 19 nt, Artificial Sequence
  Description of Artificial Sequence: Synthetic oligonucleotide
aguguuguguuccuuaucu

SEQ ID NO: 154632 - RNA, 19 nt, Artificial Sequence
  Description of Artificial Sequence: Synthetic oligonucleotide
acaaguuaccccuaggaga

SEQ ID NO: 154633 - RNA, 19 nt, Artificial Sequence
  Description of Artificial Sequence: Synthetic oligonucleotide
guuaacuaagaacuagcag

SEQ ID NO: 154634 - RNA, 19 nt, Artificial Sequence
  Description of Artificial Sequence: Synthetic oligonucleotide
aauccaagccaaccgagug

SEQ ID NO: 154635 - RNA, 19 nt, Artificial Sequence
  Description of Artificial Sequence: Synthetic oligonucleotide
uucaagacaucuaacccca

SEQ ID NO: 154636 - RNA, 19 nt, Artificial Sequence
  Description of Artificial Sequence: Synthetic oligonucleotide
uaaugucaguacauaacag

SEQ ID NO: 154637 - RNA, 19 nt, Artificial Sequence
  Description of Artificial Sequence: Synthetic oligonucleotide
uuuaacugaaacauccuuu

SEQ ID NO: 154638 - RNA, 19 nt, Artificial Sequence
  Description of Artificial Sequence: Synthetic oligonucleotide
acucuagaaacuguuuucc

SEQ ID NO: 154639 - RNA, 19 nt, Artificial Sequence
  Description of Artificial Sequence: Synthetic oligonucleotide
aacggcacgaaagggaugg

SEQ ID NO: 154640 - RNA, 19 nt, Artificial Sequence
  Description of Artificial Sequence: Synthetic oligonucleotide
uaauucaggguacauuuac

SEQ ID NO: 154641 - RNA, 19 nt, Artificial Sequence
  Description of Artificial Sequence: Synthetic oligonucleotide
agaauucccuaucggaugg

SEQ ID NO: 154642 - RNA, 19 nt, Artificial Sequence
  Description of Artificial Sequence: Synthetic oligonucleotide
acaccuauaucauguaauc

SEQ ID NO: 154643 - RNA, 19 nt, Artificial Sequence
  Description of Artificial Sequence: Synthetic oligonucleotide
auaacuuauauuauguccu

SEQ ID NO: 154644 - RNA, 19 nt, Artificial Sequence
  Description of Artificial Sequence: Synthetic oligonucleotide
auacccauuagcuuuucag

SEQ ID NO: 154645 - RNA, 19 nt, Artificial Sequence
  Description of Artificial Sequence: Synthetic oligonucleotide
aacuagugaaagaacuugg

SEQ ID NO: 154646 - RNA, 19 nt, Artificial Sequence
  Description of Artificial Sequence: Synthetic oligonucleotide
uuaaaacuagguuguaacu

SEQ ID NO: 154647 - RNA, 19 nt, Artificial Sequence
  Description of Artificial Sequence: Synthetic oligonucleotide
aaagcauuguaucuauaaa

SEQ ID NO: 154648 - RNA, 19 nt, Artificial Sequence
  Description of Artificial Sequence: Synthetic oligonucleotide
uaacuaagaacuagcagaa

SEQ ID NO: 154649 - RNA, 19 nt, Artificial Sequence
  Description of Artificial Sequence: Synthetic oligonucleotide
uucuacagaacaauaacuu

SEQ ID NO: 154650 - RNA, 19 nt, Artificial Sequence
  Description of Artificial Sequence: Synthetic oligonucleotide
uguugaaugguccaaucau

SEQ ID NO: 154651 - RNA, 19 nt, Artificial Sequence
  Description of Artificial Sequence: Synthetic oligonucleotide
acuagguuguaacuaaugu

SEQ ID NO: 154652 - RNA, 19 nt, Artificial Sequence
  Description of Artificial Sequence: Synthetic oligonucleotide
uaaaacgcagcaaaauguc

SEQ ID NO: 154653 - RNA, 19 nt, Artificial Sequence
  Description of Artificial Sequence: Synthetic oligonucleotide
uaucaaauagacugaacau

SEQ ID NO: 154654 - RNA, 19 nt, Artificial Sequence
  Description of Artificial Sequence: Synthetic oligonucleotide
ucuaagucuccccaugaug

SEQ ID NO: 154655 - RNA, 19 nt, Artificial Sequence
  Description of Artificial Sequence: Synthetic oligonucleotide
uacuugcaaauucacagga

SEQ ID NO: 154656 - RNA, 19 nt, Artificial Sequence
  Description of Artificial Sequence: Synthetic oligonucleotide
gaggaaugcaacauugggg

SEQ ID NO: 154657 - RNA, 19 nt, Artificial Sequence
  Description of Artificial Sequence: Synthetic oligonucleotide
cuauguaagaguaggagga

SEQ ID NO: 154658 - RNA, 19 nt, Artificial Sequence
  Description of Artificial Sequence: Synthetic oligonucleotide
ccuuaaauaccuuuuaaag

SEQ ID NO: 154659 - RNA, 19 nt, Artificial Sequence
  Description of Artificial Sequence: Synthetic oligonucleotide
uugcuaaucaaaauuguuu

SEQ ID NO: 154660 - RNA, 19 nt, Artificial Sequence
  Description of Artificial Sequence: Synthetic oligonucleotide
uggaguugaaacuguauga

SEQ ID NO: 154661 - RNA, 19 nt, Artificial Sequence
  Description of Artificial Sequence: Synthetic oligonucleotide
aaaguuaacagggcaauaa

SEQ ID NO: 154662 - RNA, 19 nt, Artificial Sequence
  Description of Artificial Sequence: Synthetic oligonucleotide
acuaaacuugagcauuuuc

SEQ ID NO: 154663 - RNA, 19 nt, Artificial Sequence
  Description of Artificial Sequence: Synthetic oligonucleotide
ugaagccucagacuguuca

SEQ ID NO: 154664 - RNA, 19 nt, Artificial Sequence
  Description of Artificial Sequence: Synthetic oligonucleotide
uugaggaaugcaacauugg

SEQ ID NO: 154665 - RNA, 19 nt, Artificial Sequence
  Description of Artificial Sequence: Synthetic oligonucleotide
gaggauggaguuuauacca

SEQ ID NO: 154666 - RNA, 19 nt, Artificial Sequence
  Description of Artificial Sequence: Synthetic oligonucleotide
uucacauggaaacuuucac

SEQ ID NO: 154667 - RNA, 19 nt, Artificial Sequence
  Description of Artificial Sequence: Synthetic oligonucleotide
ucaguauuugcauccaagu

SEQ ID NO: 154668 - RNA, 19 nt, Artificial Sequence
  Description of Artificial Sequence: Synthetic oligonucleotide
guuuugacuacacugacaa

SEQ ID NO: 154669 - RNA, 19 nt, Artificial Sequence
  Description of Artificial Sequence: Synthetic oligonucleotide
ucucaaguacacaauuaca

SEQ ID NO: 154670 - RNA, 19 nt, Artificial Sequence
  Description of Artificial Sequence: Synthetic oligonucleotide
aacucugggccaauuaaac

SEQ ID NO: 154671 - RNA, 19 nt, Artificial Sequence
  Description of Artificial Sequence: Synthetic oligonucleotide
ucucaaaaccaaaacuagu

SEQ ID NO: 154672 - RNA, 19 nt, Artificial Sequence
  Description of Artificial Sequence: Synthetic oligonucleotide
gacuauguaagaguaggag

SEQ ID NO: 154673 - RNA, 19 nt, Artificial Sequence
  Description of Artificial Sequence: Synthetic oligonucleotide
aggaauuaagaaauagggg

SEQ ID NO: 154674 - RNA, 19 nt, Artificial Sequence
  Description of Artificial Sequence: Synthetic oligonucleotide
uaucggauggaaaggcuag

SEQ ID NO: 154675 - RNA, 19 nt, Artificial Sequence
  Description of Artificial Sequence: Synthetic oligonucleotide
ucuaaguccuuauuagcac

SEQ ID NO: 154676 - RNA, 19 nt, Artificial Sequence
  Description of Artificial Sequence: Synthetic oligonucleotide
uacaccaaauauucaagac

SEQ ID NO: 154677 - RNA, 19 nt, Artificial Sequence
  Description of Artificial Sequence: Synthetic oligonucleotide
acaauaacuuauauuaugu

SEQ ID NO: 154678 - RNA, 19 nt, Artificial Sequence
  Description of Artificial Sequence: Synthetic oligonucleotide
uugcacguuauucucaagu

SEQ ID NO: 154679 - RNA, 19 nt, Artificial Sequence
  Description of Artificial Sequence: Synthetic oligonucleotide
aguaaucuuagguuccuca

SEQ ID NO: 154680 - RNA, 19 nt, Artificial Sequence
  Description of Artificial Sequence: Synthetic oligonucleotide
uugcaaauucacaggacug

SEQ ID NO: 154681 - RNA, 19 nt, Artificial Sequence
  Description of Artificial Sequence: Synthetic oligonucleotide
acggucuacaaauacuaag

SEQ ID NO: 154682 - RNA, 19 nt, Artificial Sequence
  Description of Artificial Sequence: Synthetic oligonucleotide
gcuuucaaaguuaacaggg

SEQ ID NO: 154683 - RNA, 19 nt, Artificial Sequence
  Description of Artificial Sequence: Synthetic oligonucleotide
uuaacugaaacauccuuuu

SEQ ID NO: 154684 - RNA, 19 nt, Artificial Sequence
  Description of Artificial Sequence: Synthetic oligonucleotide
aaaguguguaaaguguugu

SEQ ID NO: 154685 - RNA, 19 nt, Artificial Sequence
  Description of Artificial Sequence: Synthetic oligonucleotide
cuagguuguaacuaauguc

SEQ ID NO: 154686 - RNA, 19 nt, Artificial Sequence
  Description of Artificial Sequence: Synthetic oligonucleotide
aaagauguaaauagucuaa

SEQ ID NO: 154687 - RNA, 19 nt, Artificial Sequence
  Description of Artificial Sequence: Synthetic oligonucleotide
gccaauuaaacacacacac

SEQ ID NO: 154688 - RNA, 19 nt, Artificial Sequence
  Description of Artificial Sequence: Synthetic oligonucleotide
uaauuuugaccuccuaaaa

SEQ ID NO: 154689 - RNA, 19 nt, Artificial Sequence
  Description of Artificial Sequence: Synthetic oligonucleotide
gaaacuuucacuugucaua

SEQ ID NO: 154690 - RNA, 19 nt, Artificial Sequence
  Description of Artificial Sequence: Synthetic oligonucleotide
ucauacggucuacaaauac

SEQ ID NO: 154691 - RNA, 19 nt, Artificial Sequence
  Description of Artificial Sequence: Synthetic oligonucleotide
uaacuuaguacugguauca

SEQ ID NO: 154692 - RNA, 19 nt, Artificial Sequence
  Description of Artificial Sequence: Synthetic oligonucleotide
ucacauggaaacuuucacu

SEQ ID NO: 154693 - RNA, 19 nt, Artificial Sequence
  Description of Artificial Sequence: Synthetic oligonucleotide
cuagaggccuccaaccugg

SEQ ID NO: 154694 - RNA, 19 nt, Artificial Sequence
  Description of Artificial Sequence: Synthetic oligonucleotide
uuaacuuaguacugguauc

SEQ ID NO: 154695 - RNA, 19 nt, Artificial Sequence
  Description of Artificial Sequence: Synthetic oligonucleotide
acgaaagggauggagcacc

SEQ ID NO: 154696 - RNA, 19 nt, Artificial Sequence
  Description of Artificial Sequence: Synthetic oligonucleotide
auagacugaacauucguua

SEQ ID NO: 154697 - RNA, 19 nt, Artificial Sequence
  Description of Artificial Sequence: Synthetic oligonucleotide
uguaagaguaggaggacua

SEQ ID NO: 154698 - RNA, 19 nt, Artificial Sequence
  Description of Artificial Sequence: Synthetic oligonucleotide
uaaaacuagguuguaacua

SEQ ID NO: 154699 - RNA, 19 nt, Artificial Sequence
  Description of Artificial Sequence: Synthetic oligonucleotide
cuagugaaagaacuuggug

SEQ ID NO: 154700 - RNA, 19 nt, Artificial Sequence
  Description of Artificial Sequence: Synthetic oligonucleotide
ucuacagaacaauaacuua

SEQ ID NO: 154701 - RNA, 19 nt, Artificial Sequence
  Description of Artificial Sequence: Synthetic oligonucleotide
agagaugcuaauaaaacaa

SEQ ID NO: 154702 - RNA, 19 nt, Artificial Sequence
  Description of Artificial Sequence: Synthetic oligonucleotide
cauaaugaggcagcaaggc

SEQ ID NO: 154703 - RNA, 19 nt, Artificial Sequence
  Description of Artificial Sequence: Synthetic oligonucleotide
uuucuaagucuccccauga

SEQ ID NO: 154704 - RNA, 19 nt, Artificial Sequence
  Description of Artificial Sequence: Synthetic oligonucleotide
auuucuaagucuccccaug

SEQ ID NO: 154705 - RNA, 19 nt, Artificial Sequence
  Description of Artificial Sequence: Synthetic oligonucleotide
cuacuagaggccuccaacc

SEQ ID NO: 154706 - RNA, 19 nt, Artificial Sequence
  Description of Artificial Sequence: Synthetic oligonucleotide
cagaacaggcucaauuugc

SEQ ID NO: 154707 - RNA, 19 nt, Artificial Sequence
  Description of Artificial Sequence: Synthetic oligonucleotide
uaacagggcaauaaaucaa

SEQ ID NO: 154708 - RNA, 19 nt, Artificial Sequence
  Description of Artificial Sequence: Synthetic oligonucleotide
uacccauuagcuuuucaga

SEQ ID NO: 154709 - RNA, 19 nt, Artificial Sequence
  Description of Artificial Sequence: Synthetic oligonucleotide
aagguagggccucagacua

SEQ ID NO: 154710 - RNA, 19 nt, Artificial Sequence
  Description of Artificial Sequence: Synthetic oligonucleotide
agacaagaguucucucgcc

SEQ ID NO: 154711 - RNA, 19 nt, Artificial Sequence
  Description of Artificial Sequence: Synthetic oligonucleotide
acgaacacacaauuuucag

SEQ ID NO: 154712 - RNA, 19 nt, Artificial Sequence
  Description of Artificial Sequence: Synthetic oligonucleotide
agcaccauaaugaggcagc

SEQ ID NO: 154713 - RNA, 19 nt, Artificial Sequence
  Description of Artificial Sequence: Synthetic oligonucleotide
cauguaauccaagccaacc

SEQ ID NO: 154714 - RNA, 19 nt, Artificial Sequence
  Description of Artificial Sequence: Synthetic oligonucleotide
aggacaaacaauauauaca

SEQ ID NO: 154715 - RNA, 19 nt, Artificial Sequence
  Description of Artificial Sequence: Synthetic oligonucleotide
aaagggauggagcaccaua

SEQ ID NO: 154716 - RNA, 19 nt, Artificial Sequence
  Description of Artificial Sequence: Synthetic oligonucleotide
auugauaauaaaacaaauu

SEQ ID NO: 154717 - RNA, 19 nt, Artificial Sequence
  Description of Artificial Sequence: Synthetic oligonucleotide
uuaugcgcagguaauuuau

SEQ ID NO: 154718 - RNA, 19 nt, Artificial Sequence
  Description of Artificial Sequence: Synthetic oligonucleotide
uugaaugguccaaucauuu

SEQ ID NO: 154719 - RNA, 19 nt, Artificial Sequence
  Description of Artificial Sequence: Synthetic oligonucleotide
uacuuaucaagucuuccua

SEQ ID NO: 154720 - RNA, 19 nt, Artificial Sequence
  Description of Artificial Sequence: Synthetic oligonucleotide
uggaguuuauaccagccuu

SEQ ID NO: 154721 - RNA, 19 nt, Artificial Sequence
  Description of Artificial Sequence: Synthetic oligonucleotide
cuaugagccacaaguuacc

SEQ ID NO: 154722 - RNA, 19 nt, Artificial Sequence
  Description of Artificial Sequence: Synthetic oligonucleotide
gacucuagaaacuguuuuc

SEQ ID NO: 154723 - RNA, 19 nt, Artificial Sequence
  Description of Artificial Sequence: Synthetic oligonucleotide
uuauucucaaguacacaau

SEQ ID NO: 154724 - RNA, 19 nt, Artificial Sequence
  Description of Artificial Sequence: Synthetic oligonucleotide
agacccgugugccaacagc

SEQ ID NO: 154725 - RNA, 19 nt, Artificial Sequence
  Description of Artificial Sequence: Synthetic oligonucleotide
aacaaauuuuaagugcuuu

SEQ ID NO: 154726 - RNA, 19 nt, Artificial Sequence
  Description of Artificial Sequence: Synthetic oligonucleotide
auucacuugaccaaacccu

SEQ ID NO: 154727 - RNA, 19 nt, Artificial Sequence
  Description of Artificial Sequence: Synthetic oligonucleotide
ucucgcuugaucagacaag

SEQ ID NO: 154728 - RNA, 19 nt, Artificial Sequence
  Description of Artificial Sequence: Synthetic oligonucleotide
aaugucacacauccccuau

SEQ ID NO: 154729 - RNA, 19 nt, Artificial Sequence
  Description of Artificial Sequence: Synthetic oligonucleotide
acuagacuaaaucaaucua

SEQ ID NO: 154730 - RNA, 19 nt, Artificial Sequence
  Description of Artificial Sequence: Synthetic oligonucleotide
cacaaguuaccccuaggag

SEQ ID NO: 154731 - RNA, 19 nt, Artificial Sequence
  Description of Artificial Sequence: Synthetic oligonucleotide
aacuuucacuugucauacg

SEQ ID NO: 154732 - RNA, 19 nt, Artificial Sequence
  Description of Artificial Sequence: Synthetic oligonucleotide
uuucacuaaacuugagcau

SEQ ID NO: 154733 - RNA, 19 nt, Artificial Sequence
  Description of Artificial Sequence: Synthetic oligonucleotide
ucagacuaaauguguugug

SEQ ID NO: 154734 - RNA, 19 nt, Artificial Sequence
  Description of Artificial Sequence: Synthetic oligonucleotide
uuacauuacuucuggggaa

SEQ ID NO: 154735 - RNA, 19 nt, Artificial Sequence
  Description of Artificial Sequence: Synthetic oligonucleotide
aucaaaucauaguugugau

SEQ ID NO: 154736 - RNA, 19 nt, Artificial Sequence
  Description of Artificial Sequence: Synthetic oligonucleotide
ugacuacacugacaaaaga

SEQ ID NO: 154737 - RNA, 19 nt, Artificial Sequence
  Description of Artificial Sequence: Synthetic oligonucleotide
aaacccacuuuaugcgcag

SEQ ID NO: 154738 - RNA, 19 nt, Artificial Sequence
  Description of Artificial Sequence: Synthetic oligonucleotide
aacuaagaacuagcagaac

SEQ ID NO: 154739 - RNA, 19 nt, Artificial Sequence
  Description of Artificial Sequence: Synthetic oligonucleotide
cacguuauucucaaguaca

SEQ ID NO: 154740 - RNA, 19 nt, Artificial Sequence
  Description of Artificial Sequence: Synthetic oligonucleotide
uuuugcacguuauucucaa

SEQ ID NO: 154741 - RNA, 19 nt, Artificial Sequence
  Description of Artificial Sequence: Synthetic oligonucleotide
aagauguaaauagucuaaa

SEQ ID NO: 154742 - RNA, 19 nt, Artificial Sequence
  Description of Artificial Sequence: Synthetic oligonucleotide
agggacauacaauauuuaa

SEQ ID NO: 154743 - RNA, 19 nt, Artificial Sequence
  Description of Artificial Sequence: Synthetic oligonucleotide
gggacuauguaagaguagg

SEQ ID NO: 154744 - RNA, 19 nt, Artificial Sequence
  Description of Artificial Sequence: Synthetic oligonucleotide
acuaaauguguugugaauu

SEQ ID NO: 154745 - RNA, 19 nt, Artificial Sequence
  Description of Artificial Sequence: Synthetic oligonucleotide
uugcggaggcuacaaaggc

SEQ ID NO: 154746 - RNA, 19 nt, Artificial Sequence
  Description of Artificial Sequence: Synthetic oligonucleotide
aguguguaaaguguugugu

SEQ ID NO: 154747 - RNA, 19 nt, Artificial Sequence
  Description of Artificial Sequence: Synthetic oligonucleotide
aacuagguuguaacuaaug

SEQ ID NO: 154748 - RNA, 19 nt, Artificial Sequence
  Description of Artificial Sequence: Synthetic oligonucleotide
uuaacuucucuguaauguu

SEQ ID NO: 154749 - RNA, 19 nt, Artificial Sequence
  Description of Artificial Sequence: Synthetic oligonucleotide
uuuguagcacacaaccauu

SEQ ID NO: 154750 - RNA, 19 nt, Artificial Sequence
  Description of Artificial Sequence: Synthetic oligonucleotide
uucacuaaacuugagcauu

SEQ ID NO: 154751 - RNA, 19 nt, Artificial Sequence
  Description of Artificial Sequence: Synthetic oligonucleotide
ucguuaacaggaaaauauu

SEQ ID NO: 154752 - RNA, 19 nt, Artificial Sequence
  Description of Artificial Sequence: Synthetic oligonucleotide
guugcggaggcuacaaagg

SEQ ID NO: 154753 - RNA, 19 nt, Artificial Sequence
  Description of Artificial Sequence: Synthetic oligonucleotide
acauaacagugacuacuuc

SEQ ID NO: 154754 - RNA, 19 nt, Artificial Sequence
  Description of Artificial Sequence: Synthetic oligonucleotide
auaaaguugaaaagauccu

SEQ ID NO: 154755 - RNA, 19 nt, Artificial Sequence
  Description of Artificial Sequence: Synthetic oligonucleotide
uguaugguuccagauuaug

SEQ ID NO: 154756 - RNA, 19 nt, Artificial Sequence
  Description of Artificial Sequence: Synthetic oligonucleotide
gguaaacucaaagguaggg

SEQ ID NO: 154757 - RNA, 19 nt, Artificial Sequence
  Description of Artificial Sequence: Synthetic oligonucleotide
aagccaaccgaguguuaag

SEQ ID NO: 154758 - RNA, 19 nt, Artificial Sequence
  Description of Artificial Sequence: Synthetic oligonucleotide
aucaaauagacugaacauu

SEQ ID NO: 154759 - RNA, 19 nt, Artificial Sequence
  Description of Artificial Sequence: Synthetic oligonucleotide
aucaguauuugcauccaag

SEQ ID NO: 154760 - RNA, 19 nt, Artificial Sequence
  Description of Artificial Sequence: Synthetic oligonucleotide
agacuaaauguguugugaa

SEQ ID NO: 154761 - RNA, 19 nt, Artificial Sequence
  Description of Artificial Sequence: Synthetic oligonucleotide
uccuaugagccacaaguua

SEQ ID NO: 154762 - RNA, 19 nt, Artificial Sequence
  Description of Artificial Sequence: Synthetic oligonucleotide
uuuaugcgcagguaauuua

SEQ ID NO: 154763 - RNA, 19 nt, Artificial Sequence
  Description of Artificial Sequence: Synthetic oligonucleotide
uccaaccugggcacaaaug

SEQ ID NO: 154764 - RNA, 19 nt, Artificial Sequence
  Description of Artificial Sequence: Synthetic oligonucleotide
acacgaacacacaauuuuc

SEQ ID NO: 154765 - RNA, 19 nt, Artificial Sequence
  Description of Artificial Sequence: Synthetic oligonucleotide
cagguuaacuaagaacuag

SEQ ID NO: 154766 - RNA, 19 nt, Artificial Sequence
  Description of Artificial Sequence: Synthetic oligonucleotide
aacagggcaauaaaucaaa

SEQ ID NO: 154767 - RNA, 19 nt, Artificial Sequence
  Description of Artificial Sequence: Synthetic oligonucleotide
acguuauucucaaguacac

SEQ ID NO: 154768 - RNA, 19 nt, Artificial Sequence
  Description of Artificial Sequence: Synthetic oligonucleotide
ucauaguugugaugcauuu

SEQ ID NO: 154769 - RNA, 19 nt, Artificial Sequence
  Description of Artificial Sequence: Synthetic oligonucleotide
agguuugccauacaccaaa

SEQ ID NO: 154770 - RNA, 19 nt, Artificial Sequence
  Description of Artificial Sequence: Synthetic oligonucleotide
acuagaggccuccaaccug

SEQ ID NO: 154771 - RNA, 19 nt, Artificial Sequence
  Description of Artificial Sequence: Synthetic oligonucleotide
aucagagaugcuaauaaaa

SEQ ID NO: 154772 - RNA, 19 nt, Artificial Sequence
  Description of Artificial Sequence: Synthetic oligonucleotide
aauccauagggcaaacuua

SEQ ID NO: 154773 - RNA, 19 nt, Artificial Sequence
  Description of Artificial Sequence: Synthetic oligonucleotide
caguauuugcauccaaguc

SEQ ID NO: 154774 - RNA, 19 nt, Artificial Sequence
  Description of Artificial Sequence: Synthetic oligonucleotide
uauauaauucaggguacau

SEQ ID NO: 154775 - RNA, 19 nt, Artificial Sequence
  Description of Artificial Sequence: Synthetic oligonucleotide
ugcacguuauucucaagua

SEQ ID NO: 154776 - RNA, 19 nt, Artificial Sequence
  Description of Artificial Sequence: Synthetic oligonucleotide
gucuaaguccuuauuagca

SEQ ID NO: 154777 - RNA, 19 nt, Artificial Sequence
  Description of Artificial Sequence: Synthetic oligonucleotide
gacaagaguucucucgcca

SEQ ID NO: 154778 - RNA, 19 nt, Artificial Sequence
  Description of Artificial Sequence: Synthetic oligonucleotide
cuaucgagugggaagaaaa

SEQ ID NO: 154779 - RNA, 19 nt, Artificial Sequence
  Description of Artificial Sequence: Synthetic oligonucleotide
uaucaagucuuccuaccuu

SEQ ID NO: 154780 - RNA, 19 nt, Artificial Sequence
  Description of Artificial Sequence: Synthetic oligonucleotide
agagaaauauaaagugugu

SEQ ID NO: 154781 - RNA, 19 nt, Artificial Sequence
  Description of Artificial Sequence: Synthetic oligonucleotide
gcauguuacaaauuagcca

SEQ ID NO: 154782 - RNA, 19 nt, Artificial Sequence
  Description of Artificial Sequence: Synthetic oligonucleotide
uggaccacaccuauaucau

SEQ ID NO: 154783 - RNA, 19 nt, Artificial Sequence
  Description of Artificial Sequence: Synthetic oligonucleotide
ugcggaggcuacaaaggca

SEQ ID NO: 154784 - RNA, 19 nt, Artificial Sequence
  Description of Artificial Sequence: Synthetic oligonucleotide
uuagguuccucaagugcuc

SEQ ID NO: 154785 - RNA, 19 nt, Artificial Sequence
  Description of Artificial Sequence: Synthetic oligonucleotide
guaauccaagccaaccgag

SEQ ID NO: 154786 - RNA, 19 nt, Artificial Sequence
  Description of Artificial Sequence: Synthetic oligonucleotide
ucuggauacccauuagcuu

SEQ ID NO: 154787 - RNA, 19 nt, Artificial Sequence
  Description of Artificial Sequence: Synthetic oligonucleotide
auauauaauucaggguaca

SEQ ID NO: 154788 - RNA, 19 nt, Artificial Sequence
  Description of Artificial Sequence: Synthetic oligonucleotide
guaaaacgcagcaaaaugu

SEQ ID NO: 154789 - RNA, 19 nt, Artificial Sequence
  Description of Artificial Sequence: Synthetic oligonucleotide
aguacacaauuacaauaau

SEQ ID NO: 154790 - RNA, 19 nt, Artificial Sequence
  Description of Artificial Sequence: Synthetic oligonucleotide
ccuaugagccacaaguuac

SEQ ID NO: 154791 - RNA, 19 nt, Artificial Sequence
  Description of Artificial Sequence: Synthetic oligonucleotide
aaauuuccaacaagguuuu

SEQ ID NO: 154792 - RNA, 19 nt, Artificial Sequence
  Description of Artificial Sequence: Synthetic oligonucleotide
caguacauaacagugacua

SEQ ID NO: 154793 - RNA, 19 nt, Artificial Sequence
  Description of Artificial Sequence: Synthetic oligonucleotide
uauguaagaguaggaggac

SEQ ID NO: 154794 - RNA, 19 nt, Artificial Sequence
  Description of Artificial Sequence: Synthetic oligonucleotide
uacugauuguagacaauuu

SEQ ID NO: 154795 - RNA, 19 nt, Artificial Sequence
  Description of Artificial Sequence: Synthetic oligonucleotide
gcagcuaucgagugggaag

SEQ ID NO: 154796 - RNA, 19 nt, Artificial Sequence
  Description of Artificial Sequence: Synthetic oligonucleotide
ucccuaucggauggaaagg

SEQ ID NO: 154797 - RNA, 19 nt, Artificial Sequence
  Description of Artificial Sequence: Synthetic oligonucleotide
acuuaguacugguaucaaa

SEQ ID NO: 154798 - RNA, 19 nt, Artificial Sequence
  Description of Artificial Sequence: Synthetic oligonucleotide
aacgcagcaaaauguccuu

SEQ ID NO: 154799 - RNA, 19 nt, Artificial Sequence
  Description of Artificial Sequence: Synthetic oligonucleotide
aaauaccuuuuaaaggcuu

SEQ ID NO: 154800 - RNA, 19 nt, Artificial Sequence
  Description of Artificial Sequence: Synthetic oligonucleotide
aguuaacagggcaauaaau

SEQ ID NO: 154801 - RNA, 19 nt, Artificial Sequence
  Description of Artificial Sequence: Synthetic oligonucleotide
gacccgugugccaacagcc

SEQ ID NO: 154802 - RNA, 19 nt, Artificial Sequence
  Description of Artificial Sequence: Synthetic oligonucleotide
uucuaagucuccccaugau

SEQ ID NO: 154803 - RNA, 19 nt, Artificial Sequence
  Description of Artificial Sequence: Synthetic oligonucleotide
guaaucuuagguuccucaa

SEQ ID NO: 154804 - RNA, 19 nt, Artificial Sequence
  Description of Artificial Sequence: Synthetic oligonucleotide
acauucguuaacaggaaaa

SEQ ID NO: 154805 - RNA, 19 nt, Artificial Sequence
  Description of Artificial Sequence: Synthetic oligonucleotide
uaacuaaugucaguacaua

SEQ ID NO: 154806 - RNA, 19 nt, Artificial Sequence
  Description of Artificial Sequence: Synthetic oligonucleotide
cauagggcaaacuuaauuu

SEQ ID NO: 154807 - RNA, 19 nt, Artificial Sequence
  Description of Artificial Sequence: Synthetic oligonucleotide
gcgcagguaauuuauaaca

SEQ ID NO: 154808 - RNA, 19 nt, Artificial Sequence
  Description of Artificial Sequence: Synthetic oligonucleotide
uuugcacguuauucucaag

SEQ ID NO: 154809 - RNA, 19 nt, Artificial Sequence
  Description of Artificial Sequence: Synthetic oligonucleotide
uacggucuacaaauacuaa

SEQ ID NO: 154810 - RNA, 19 nt, Artificial Sequence
  Description of Artificial Sequence: Synthetic oligonucleotide
acuagugaaagaacuuggu

SEQ ID NO: 154811 - RNA, 19 nt, Artificial Sequence
  Description of Artificial Sequence: Synthetic oligonucleotide
cacgaacacacaauuuuca

SEQ ID NO: 154812 - RNA, 19 nt, Artificial Sequence
  Description of Artificial Sequence: Synthetic oligonucleotide
gaaaggcuagggaaucuac

SEQ ID NO: 154813 - RNA, 19 nt, Artificial Sequence
  Description of Artificial Sequence: Synthetic oligonucleotide
auaaugucacacauccccu

SEQ ID NO: 154814 - RNA, 19 nt, Artificial Sequence
  Description of Artificial Sequence: Synthetic oligonucleotide
agggauuccugucuggaua

SEQ ID NO: 154815 - RNA, 19 nt, Artificial Sequence
  Description of Artificial Sequence: Synthetic oligonucleotide
ucgcuugaucagacaagag

SEQ ID NO: 154816 - RNA, 19 nt, Artificial Sequence
  Description of Artificial Sequence: Synthetic oligonucleotide
ugcuggggucuacuagagg

SEQ ID NO: 154817 - RNA, 19 nt, Artificial Sequence
  Description of Artificial Sequence: Synthetic oligonucleotide
ccauaaugaggcagcaagg

SEQ ID NO: 154818 - RNA, 19 nt, Artificial Sequence
  Description of Artificial Sequence: Synthetic oligonucleotide
acaaauuagccagcucuca

SEQ ID NO: 154819 - RNA, 19 nt, Artificial Sequence
  Description of Artificial Sequence: Synthetic oligonucleotide
ugguccaaucauuuguauu

SEQ ID NO: 154820 - RNA, 19 nt, Artificial Sequence
  Description of Artificial Sequence: Synthetic oligonucleotide
auacggucuacaaauacua

SEQ ID NO: 154821 - RNA, 19 nt, Artificial Sequence
  Description of Artificial Sequence: Synthetic oligonucleotide
uagcuuugcuaaucaaaau

SEQ ID NO: 154822 - RNA, 19 nt, Artificial Sequence
  Description of Artificial Sequence: Synthetic oligonucleotide
aggguacauuuacauauau

SEQ ID NO: 154823 - RNA, 19 nt, Artificial Sequence
  Description of Artificial Sequence: Synthetic oligonucleotide
accccuaggagauuccaaa

SEQ ID NO: 154824 - RNA, 19 nt, Artificial Sequence
  Description of Artificial Sequence: Synthetic oligonucleotide
ccaaaacuagugaaagaac

SEQ ID NO: 154825 - RNA, 19 nt, Artificial Sequence
  Description of Artificial Sequence: Synthetic oligonucleotide
agguuguaacuaaugucag

SEQ ID NO: 154826 - RNA, 19 nt, Artificial Sequence
  Description of Artificial Sequence: Synthetic oligonucleotide
ugaaagcauuguaucuaua

SEQ ID NO: 154827 - RNA, 19 nt, Artificial Sequence
  Description of Artificial Sequence: Synthetic oligonucleotide
cuugucauacggucuacaa

SEQ ID NO: 154828 - RNA, 19 nt, Artificial Sequence
  Description of Artificial Sequence: Synthetic oligonucleotide
cucuguaauguuacuugca

SEQ ID NO: 154829 - RNA, 19 nt, Artificial Sequence
  Description of Artificial Sequence: Synthetic oligonucleotide
cagacuaaauguguuguga

SEQ ID NO: 154830 - RNA, 19 nt, Artificial Sequence
  Description of Artificial Sequence: Synthetic oligonucleotide
cauacggucuacaaauacu

SEQ ID NO: 154831 - RNA, 19 nt, Artificial Sequence
  Description of Artificial Sequence: Synthetic oligonucleotide
guucacauggaaacuuuca

SEQ ID NO: 154832 - RNA, 19 nt, Artificial Sequence
  Description of Artificial Sequence: Synthetic oligonucleotide
aauucccuaucggauggaa

SEQ ID NO: 154833 - RNA, 19 nt, Artificial Sequence
  Description of Artificial Sequence: Synthetic oligonucleotide
auggagcaccauaaugagg

SEQ ID NO: 154834 - RNA, 19 nt, Artificial Sequence
  Description of Artificial Sequence: Synthetic oligonucleotide
cuguaugaaagcauuguau

SEQ ID NO: 154835 - RNA, 19 nt, Artificial Sequence
  Description of Artificial Sequence: Synthetic oligonucleotide
uuuugacuacacugacaaa

SEQ ID NO: 154836 - RNA, 19 nt, Artificial Sequence
  Description of Artificial Sequence: Synthetic oligonucleotide
gaaucuacgccuugguuuu

SEQ ID NO: 154837 - RNA, 19 nt, Artificial Sequence
  Description of Artificial Sequence: Synthetic oligonucleotide
aaacuagguuguaacuaau

SEQ ID NO: 154838 - RNA, 19 nt, Artificial Sequence
  Description of Artificial Sequence: Synthetic oligonucleotide
uaacggcacgaaagggaug

SEQ ID NO: 154839 - RNA, 19 nt, Artificial Sequence
  Description of Artificial Sequence: Synthetic oligonucleotide
caggaaucagagaugcuaa

SEQ ID NO: 154840 - RNA, 19 nt, Artificial Sequence
  Description of Artificial Sequence: Synthetic oligonucleotide
gguuaacuaagaacuagca

SEQ ID NO: 154841 - RNA, 19 nt, Artificial Sequence
  Description of Artificial Sequence: Synthetic oligonucleotide
acgaaaguucacauggaaa

SEQ ID NO: 154842 - RNA, 19 nt, Artificial Sequence
  Description of Artificial Sequence: Synthetic oligonucleotide
auucguuaacaggaaaaua

SEQ ID NO: 154843 - RNA, 19 nt, Artificial Sequence
  Description of Artificial Sequence: Synthetic oligonucleotide
aacuuaguacugguaucaa

SEQ ID NO: 154844 - RNA, 19 nt, Artificial Sequence
  Description of Artificial Sequence: Synthetic oligonucleotide
aucggauggaaaggcuagg

SEQ ID NO: 154845 - RNA, 19 nt, Artificial Sequence
  Description of Artificial Sequence: Synthetic oligonucleotide
aggauggaguuuauaccag

SEQ ID NO: 154846 - RNA, 19 nt, Artificial Sequence
  Description of Artificial Sequence: Synthetic oligonucleotide
gacuaaauguguugugaau

SEQ ID NO: 154847 - RNA, 19 nt, Artificial Sequence
  Description of Artificial Sequence: Synthetic oligonucleotide
auggguaaacucaaaggua

SEQ ID NO: 154848 - RNA, 19 nt, Artificial Sequence
  Description of Artificial Sequence: Synthetic oligonucleotide
cuguaauguuacuugcaaa

SEQ ID NO: 154849 - RNA, 19 nt, Artificial Sequence
  Description of Artificial Sequence: Synthetic oligonucleotide
caaauuagccagcucucaa

SEQ ID NO: 154850 - RNA, 19 nt, Artificial Sequence
  Description of Artificial Sequence: Synthetic oligonucleotide
uauuugcauccaagucaca

SEQ ID NO: 154851 - RNA, 19 nt, Artificial Sequence
  Description of Artificial Sequence: Synthetic oligonucleotide
gguccaaucauuuguauuu

SEQ ID NO: 154852 - RNA, 19 nt, Artificial Sequence
  Description of Artificial Sequence: Synthetic oligonucleotide
guaagaguaggaggacuac

SEQ ID NO: 154853 - RNA, 19 nt, Artificial Sequence
  Description of Artificial Sequence: Synthetic oligonucleotide
uuaccccuaggagauucca

SEQ ID NO: 154854 - RNA, 19 nt, Artificial Sequence
  Description of Artificial Sequence: Synthetic oligonucleotide
gcacguuauucucaaguac

SEQ ID NO: 154855 - RNA, 19 nt, Artificial Sequence
  Description of Artificial Sequence: Synthetic oligonucleotide
guaacuaaugucaguacau

SEQ ID NO: 154856 - RNA, 19 nt, Artificial Sequence
  Description of Artificial Sequence: Synthetic oligonucleotide
cucucgcuugaucagacaa

SEQ ID NO: 154857 - RNA, 19 nt, Artificial Sequence
  Description of Artificial Sequence: Synthetic oligonucleotide
cucgcuugaucagacaaga

SEQ ID NO: 154858 - RNA, 19 nt, Artificial Sequence
  Description of Artificial Sequence: Synthetic oligonucleotide
uaccccuaggagauuccaa

SEQ ID NO: 154859 - RNA, 19 nt, Artificial Sequence
  Description of Artificial Sequence: Synthetic oligonucleotide
ggaaucuacgccuugguuu

SEQ ID NO: 154860 - RNA, 19 nt, Artificial Sequence
  Description of Artificial Sequence: Synthetic oligonucleotide
agccaaccgaguguuaagu

SEQ ID NO: 154861 - RNA, 19 nt, Artificial Sequence
  Description of Artificial Sequence: Synthetic oligonucleotide
cuagcacuucagagguuug

SEQ ID NO: 154862 - RNA, 19 nt, Artificial Sequence
  Description of Artificial Sequence: Synthetic oligonucleotide
gucuggauacccauuagcu

SEQ ID NO: 154863 - RNA, 19 nt, Artificial Sequence
  Description of Artificial Sequence: Synthetic oligonucleotide
cacaccuauaucauguaau

SEQ ID NO: 154864 - RNA, 19 nt, Artificial Sequence
  Description of Artificial Sequence: Synthetic oligonucleotide
aguccucaguuaaauuuca

SEQ ID NO: 154865 - RNA, 19 nt, Artificial Sequence
  Description of Artificial Sequence: Synthetic oligonucleotide
ccaacuguucuuuuacuca

SEQ ID NO: 154866 - RNA, 19 nt, Artificial Sequence
  Description of Artificial Sequence: Synthetic oligonucleotide
gcacgaaagggauggagca

SEQ ID NO: 154867 - RNA, 19 nt, Artificial Sequence
  Description of Artificial Sequence: Synthetic oligonucleotide
guuagguguuuuacauuac

SEQ ID NO: 154868 - RNA, 19 nt, Artificial Sequence
  Description of Artificial Sequence: Synthetic oligonucleotide
cuagggaaucuacgccuug

SEQ ID NO: 154869 - RNA, 19 nt, Artificial Sequence
  Description of Artificial Sequence: Synthetic oligonucleotide
cucaccaaucaccuuuuaa

SEQ ID NO: 154870 - RNA, 19 nt, Artificial Sequence
  Description of Artificial Sequence: Synthetic oligonucleotide
ggaguugaaacuguaugaa

SEQ ID NO: 154871 - RNA, 19 nt, Artificial Sequence
  Description of Artificial Sequence: Synthetic oligonucleotide
acuuuaugcgcagguaauu

SEQ ID NO: 154872 - RNA, 19 nt, Artificial Sequence
  Description of Artificial Sequence: Synthetic oligonucleotide
uccccuuucugucccucuc

SEQ ID NO: 154873 - RNA, 19 nt, Artificial Sequence
  Description of Artificial Sequence: Synthetic oligonucleotide
aagauccuaugagccacaa

SEQ ID NO: 154874 - RNA, 19 nt, Artificial Sequence
  Description of Artificial Sequence: Synthetic oligonucleotide
auccccuauaugauuuucu

SEQ ID NO: 154875 - RNA, 19 nt, Artificial Sequence
  Description of Artificial Sequence: Synthetic oligonucleotide
acuugucauacggucuaca

SEQ ID NO: 154876 - RNA, 19 nt, Artificial Sequence
  Description of Artificial Sequence: Synthetic oligonucleotide
cguugcggaggcuacaaag

SEQ ID NO: 154877 - RNA, 19 nt, Artificial Sequence
  Description of Artificial Sequence: Synthetic oligonucleotide
cuaacggcacgaaagggau

SEQ ID NO: 154878 - RNA, 19 nt, Artificial Sequence
  Description of Artificial Sequence: Synthetic oligonucleotide
aagugcucuaagaucucuu

SEQ ID NO: 154879 - RNA, 19 nt, Artificial Sequence
  Description of Artificial Sequence: Synthetic oligonucleotide
ccuaacggcacgaaaggga

SEQ ID NO: 154880 - RNA, 19 nt, Artificial Sequence
  Description of Artificial Sequence: Synthetic oligonucleotide
caagacaucuaaccccaaa

SEQ ID NO: 154881 - RNA, 19 nt, Artificial Sequence
  Description of Artificial Sequence: Synthetic oligonucleotide
gcuaaucaaaauuguuuua

SEQ ID NO: 154882 - RNA, 19 nt, Artificial Sequence
  Description of Artificial Sequence: Synthetic oligonucleotide
cucagacuaaauguguugu

SEQ ID NO: 154883 - RNA, 19 nt, Artificial Sequence
  Description of Artificial Sequence: Synthetic oligonucleotide
cacgaaagggauggagcac

SEQ ID NO: 154884 - RNA, 19 nt, Artificial Sequence
  Description of Artificial Sequence: Synthetic oligonucleotide
guccaaucauuuguauuuc

SEQ ID NO: 154885 - RNA, 19 nt, Artificial Sequence
  Description of Artificial Sequence: Synthetic oligonucleotide
guuugccauacaccaaaua

SEQ ID NO: 154886 - RNA, 19 nt, Artificial Sequence
  Description of Artificial Sequence: Synthetic oligonucleotide
cccuuaaauaccuuuuaaa

SEQ ID NO: 154887 - RNA, 19 nt, Artificial Sequence
  Description of Artificial Sequence: Synthetic oligonucleotide
caccaaguaaucuuagguu

SEQ ID NO: 154888 - RNA, 19 nt, Artificial Sequence
  Description of Artificial Sequence: Synthetic oligonucleotide
guuaccccuaggagauucc

SEQ ID NO: 154889 - RNA, 19 nt, Artificial Sequence
  Description of Artificial Sequence: Synthetic oligonucleotide
caauuacaauaaugucaca

SEQ ID NO: 154890 - RNA, 19 nt, Artificial Sequence
  Description of Artificial Sequence: Synthetic oligonucleotide
guacugauuguagacaauu

SEQ ID NO: 154891 - RNA, 19 nt, Artificial Sequence
  Description of Artificial Sequence: Synthetic oligonucleotide
ggaccacaccuauaucaug

SEQ ID NO: 154892 - RNA, 19 nt, Artificial Sequence
  Description of Artificial Sequence: Synthetic oligonucleotide
cagcuaucgagugggaaga

SEQ ID NO: 154893 - RNA, 19 nt, Artificial Sequence
  Description of Artificial Sequence: Synthetic oligonucleotide
ucccucucgcuugaucaga

SEQ ID NO: 154894 - RNA, 19 nt, Artificial Sequence
  Description of Artificial Sequence: Synthetic oligonucleotide
agggacucuagaaacuguu

SEQ ID NO: 154895 - RNA, 19 nt, Artificial Sequence
  Description of Artificial Sequence: Synthetic oligonucleotide
augucacacauccccuaua

SEQ ID NO: 154896 - RNA, 19 nt, Artificial Sequence
  Description of Artificial Sequence: Synthetic oligonucleotide
augcuggggucuacuagag

SEQ ID NO: 154897 - RNA, 19 nt, Artificial Sequence
  Description of Artificial Sequence: Synthetic oligonucleotide
uccaguaugcuggggucua

SEQ ID NO: 154898 - RNA, 19 nt, Artificial Sequence
  Description of Artificial Sequence: Synthetic oligonucleotide
caaccgaguguuaaguuuu

SEQ ID NO: 154899 - RNA, 19 nt, Artificial Sequence
  Description of Artificial Sequence: Synthetic oligonucleotide
gcucaauuugccaagucua

SEQ ID NO: 154900 - RNA, 19 nt, Artificial Sequence
  Description of Artificial Sequence: Synthetic oligonucleotide
ccacaaguuaccccuagga

SEQ ID NO: 154901 - RNA, 19 nt, Artificial Sequence
  Description of Artificial Sequence: Synthetic oligonucleotide
ggcuagggaaucuacgccu

SEQ ID NO: 154902 - RNA, 19 nt, Artificial Sequence
  Description of Artificial Sequence: Synthetic oligonucleotide
auucccuaucggauggaaa

SEQ ID NO: 154903 - RNA, 19 nt, Artificial Sequence
  Description of Artificial Sequence: Synthetic oligonucleotide
cccuaucggauggaaaggc

SEQ ID NO: 154904 - RNA, 19 nt, Artificial Sequence
  Description of Artificial Sequence: Synthetic oligonucleotide
guugaaugguccaaucauu

SEQ ID NO: 154905 - RNA, 19 nt, Artificial Sequence
  Description of Artificial Sequence: Synthetic oligonucleotide
gcauuaacuuaguacuggu

SEQ ID NO: 154906 - RNA, 19 nt, Artificial Sequence
  Description of Artificial Sequence: Synthetic oligonucleotide
caugaugugccagacccgu

SEQ ID NO: 154907 - RNA, 19 nt, Artificial Sequence
  Description of Artificial Sequence: Synthetic oligonucleotide
gggacauacaauauuuaau

SEQ ID NO: 154908 - RNA, 19 nt, Artificial Sequence
  Description of Artificial Sequence: Synthetic oligonucleotide
gucuacuagaggccuccaa

SEQ ID NO: 154909 - RNA, 19 nt, Artificial Sequence
  Description of Artificial Sequence: Synthetic oligonucleotide
gguuguaacuaaugucagu

SEQ ID NO: 154910 - RNA, 19 nt, Artificial Sequence
  Description of Artificial Sequence: Synthetic oligonucleotide
acacacacacgaacacaca

SEQ ID NO: 154911 - RNA, 19 nt, Artificial Sequence
  Description of Artificial Sequence: Synthetic oligonucleotide
gaauucccuaucggaugga

SEQ ID NO: 154912 - RNA, 19 nt, Artificial Sequence
  Description of Artificial Sequence: Synthetic oligonucleotide
ggaguuuauaccagccuua

SEQ ID NO: 154913 - RNA, 19 nt, Artificial Sequence
  Description of Artificial Sequence: Synthetic oligonucleotide
ggacuauguaagaguagga

SEQ ID NO: 154914 - RNA, 19 nt, Artificial Sequence
  Description of Artificial Sequence: Synthetic oligonucleotide
caaaguuaacagggcaaua

SEQ ID NO: 154915 - RNA, 19 nt, Artificial Sequence
  Description of Artificial Sequence: Synthetic oligonucleotide
cuuuaugcgcagguaauuu

SEQ ID NO: 154916 - RNA, 19 nt, Artificial Sequence
  Description of Artificial Sequence: Synthetic oligonucleotide
aggacucaccaaucaccuu

SEQ ID NO: 154917 - RNA, 19 nt, Artificial Sequence
  Description of Artificial Sequence: Synthetic oligonucleotide
cacuugucauacggucuac

SEQ ID NO: 154918 - RNA, 19 nt, Artificial Sequence
  Description of Artificial Sequence: Synthetic oligonucleotide
guuccuuaucucucaguuu

SEQ ID NO: 154919 - RNA, 19 nt, Artificial Sequence
  Description of Artificial Sequence: Synthetic oligonucleotide
caaguaaucuuagguuccu

SEQ ID NO: 154920 - RNA, 19 nt, Artificial Sequence
  Description of Artificial Sequence: Synthetic oligonucleotide
acucaccaaucaccuuuua

SEQ ID NO: 154921 - RNA, 19 nt, Artificial Sequence
  Description of Artificial Sequence: Synthetic oligonucleotide
augaugugccagacccgug

SEQ ID NO: 154922 - RNA, 19 nt, Artificial Sequence
  Description of Artificial Sequence: Synthetic oligonucleotide
cuacgccuugguuuugacu

SEQ ID NO: 154923 - RNA, 19 nt, Artificial Sequence
  Description of Artificial Sequence: Synthetic oligonucleotide
gcggaggcuacaaaggcaa

SEQ ID NO: 154924 - RNA, 19 nt, Artificial Sequence
  Description of Artificial Sequence: Synthetic oligonucleotide
gucauacggucuacaaaua

SEQ ID NO: 154925 - RNA, 19 nt, Artificial Sequence
  Description of Artificial Sequence: Synthetic oligonucleotide
ggguacauuuacauauaua

SEQ ID NO: 154926 - RNA, 19 nt, Artificial Sequence
  Description of Artificial Sequence: Synthetic oligonucleotide
cuacuacagugacaauccu

SEQ ID NO: 154927 - RNA, 19 nt, Artificial Sequence
  Description of Artificial Sequence: Synthetic oligonucleotide
acccgugugccaacagcca

SEQ ID NO: 154928 - RNA, 19 nt, Artificial Sequence
  Description of Artificial Sequence: Synthetic oligonucleotide
gguagggccucagacuaaa

SEQ ID NO: 154929 - RNA, 19 nt, Artificial Sequence
  Description of Artificial Sequence: Synthetic oligonucleotide
agcuaucgagugggaagaa

SEQ ID NO: 154930 - RNA, 19 nt, Artificial Sequence
  Description of Artificial Sequence: Synthetic oligonucleotide
gggagggacauacaauauu

SEQ ID NO: 154931 - RNA, 19 nt, Artificial Sequence
  Description of Artificial Sequence: Synthetic oligonucleotide
cacguugcggaggcuacaa

SEQ ID NO: 154932 - RNA, 19 nt, Artificial Sequence
  Description of Artificial Sequence: Synthetic oligonucleotide
cauaguugugaugcauuuu

SEQ ID NO: 154933 - RNA, 19 nt, Artificial Sequence
  Description of Artificial Sequence: Synthetic oligonucleotide
gcuaucgagugggaagaaa

SEQ ID NO: 154934 - RNA, 19 nt, Artificial Sequence
  Description of Artificial Sequence: Synthetic oligonucleotide
ccaaccgaguguuaaguuu

SEQ ID NO: 154935 - RNA, 19 nt, Artificial Sequence
  Description of Artificial Sequence: Synthetic oligonucleotide
ggcagcuaucgagugggaa

SEQ ID NO: 154936 - RNA, 19 nt, Artificial Sequence
  Description of Artificial Sequence: Synthetic oligonucleotide
gccaagucuaaguccuuau

SEQ ID NO: 154937 - RNA, 19 nt, Artificial Sequence
  Description of Artificial Sequence: Synthetic oligonucleotide
ccuaucggauggaaaggcu

SEQ ID NO: 154938 - RNA, 19 nt, Artificial Sequence
  Description of Artificial Sequence: Synthetic oligonucleotide
cuccaguaugcuggggucu

SEQ ID NO: 154939 - RNA, 19 nt, Artificial Sequence
  Description of Artificial Sequence: Synthetic oligonucleotide
gggaaucuacgccuugguu

SEQ ID NO: 154940 - RNA, 19 nt, Artificial Sequence
  Description of Artificial Sequence: Synthetic oligonucleotide
ccccuaggagauuccaaaa

SEQ ID NO: 154941 - RNA, 19 nt, Artificial Sequence
  Description of Artificial Sequence: Synthetic oligonucleotide
acggcacgaaagggaugga

SEQ ID NO: 154942 - RNA, 19 nt, Artificial Sequence
  Description of Artificial Sequence: Synthetic oligonucleotide
cagagagaacugagggauu

SEQ ID NO: 154943 - RNA, 19 nt, Artificial Sequence
  Description of Artificial Sequence: Synthetic oligonucleotide
guguaugguuccagauuau

SEQ ID NO: 154944 - RNA, 19 nt, Artificial Sequence
  Description of Artificial Sequence: Synthetic oligonucleotide
aggcagcuaucgaguggga

SEQ ID NO: 154945 - RNA, 19 nt, Artificial Sequence
  Description of Artificial Sequence: Synthetic oligonucleotide
ggucuacuagaggccucca

SEQ ID NO: 154946 - RNA, 19 nt, Artificial Sequence
  Description of Artificial Sequence: Synthetic oligonucleotide
cccgugugccaacagccaa

SEQ ID NO: 154947 - RNA, 19 nt, Artificial Sequence
  Description of Artificial Sequence: Synthetic oligonucleotide
ccaguaugcuggggucuac

SEQ ID NO: 154948 - RNA, 19 nt, Artificial Sequence
  Description of Artificial Sequence: Synthetic oligonucleotide
gguuugccauacaccaaau

SEQ ID NO: 154949 - RNA, 19 nt, Artificial Sequence
  Description of Artificial Sequence: Synthetic oligonucleotide
ccccuauaugauuuucuuu

SEQ ID NO: 154950 - RNA, 19 nt, Artificial Sequence
  Description of Artificial Sequence: Synthetic oligonucleotide
gcacguugcggaggcuaca

SEQ ID NO: 154951 - RNA, 19 nt, Artificial Sequence
  Description of Artificial Sequence: Synthetic oligonucleotide
guagggccucagacuaaau

SEQ ID NO: 154952 - RNA, 19 nt, Artificial Sequence
  Description of Artificial Sequence: Synthetic oligonucleotide
gcaaucagaccugcauguu

SEQ ID NO: 154953 - RNA, 19 nt, Artificial Sequence
  Description of Artificial Sequence: Synthetic oligonucleotide
ccuuaucucucaguuuauu

SEQ ID NO: 154954 - RNA, 19 nt, Artificial Sequence
  Description of Artificial Sequence: Synthetic oligonucleotide
ccgugugccaacagccaau

SEQ ID NO: 154955 - RNA, 19 nt, Artificial Sequence
  Description of Artificial Sequence: Synthetic oligonucleotide
ccaaacccuuaaauaccuu

SEQ ID NO: 154956 - RNA, 19 nt, Artificial Sequence
  Description of Artificial Sequence: Synthetic oligonucleotide
aacaacuugguugugaacc

SEQ ID NO: 154957 - RNA, 19 nt, Artificial Sequence
  Description of Artificial Sequence: Synthetic oligonucleotide
auuacgaacauuugaauac

SEQ ID NO: 154958 - RNA, 19 nt, Artificial Sequence
  Description of Artificial Sequence: Synthetic oligonucleotide
uaagaguugggcaaaaggg

SEQ ID NO: 154959 - RNA, 19 nt, Artificial Sequence
  Description of Artificial Sequence: Synthetic oligonucleotide
caauguauaaauaaugagc

SEQ ID NO: 154960 - RNA, 19 nt, Artificial Sequence
  Description of Artificial Sequence: Synthetic oligonucleotide
gauugaaaaggacucaagg

SEQ ID NO: 154961 - RNA, 19 nt, Artificial Sequence
  Description of Artificial Sequence: Synthetic oligonucleotide
agggaagguaauuaaagcc

SEQ ID NO: 154962 - RNA, 19 nt, Artificial Sequence
  Description of Artificial Sequence: Synthetic oligonucleotide
ucaagauuggaaaagacaa

SEQ ID NO: 154963 - RNA, 19 nt, Artificial Sequence
  Description of Artificial Sequence: Synthetic oligonucleotide
aauaaugagcauuaacaca

SEQ ID NO: 154964 - RNA, 19 nt, Artificial Sequence
  Description of Artificial Sequence: Synthetic oligonucleotide
uuagacaacaguccuaugc

SEQ ID NO: 154965 - RNA, 19 nt, Artificial Sequence
  Description of Artificial Sequence: Synthetic oligonucleotide
uuugauacacuccuugugc

SEQ ID NO: 154966 - RNA, 19 nt, Artificial Sequence
  Description of Artificial Sequence: Synthetic oligonucleotide
auaaugagcauuaacacag

SEQ ID NO: 154967 - RNA, 19 nt, Artificial Sequence
  Description of Artificial Sequence: Synthetic oligonucleotide
acugccuuaaccuuugggg

SEQ ID NO: 154968 - RNA, 19 nt, Artificial Sequence
  Description of Artificial Sequence: Synthetic oligonucleotide
ugagcauuaacacaguaaa

SEQ ID NO: 154969 - RNA, 19 nt, Artificial Sequence
  Description of Artificial Sequence: Synthetic oligonucleotide
uuaucauuggaauggagug

SEQ ID NO: 154970 - RNA, 19 nt, Artificial Sequence
  Description of Artificial Sequence: Synthetic oligonucleotide
ugaaccaacugccuuaacc

SEQ ID NO: 154971 - RNA, 19 nt, Artificial Sequence
  Description of Artificial Sequence: Synthetic oligonucleotide
aaggucaccaaacaacuug

SEQ ID NO: 154972 - RNA, 19 nt, Artificial Sequence
  Description of Artificial Sequence: Synthetic oligonucleotide
auaauauuccgauugauuu

SEQ ID NO: 154973 - RNA, 19 nt, Artificial Sequence
  Description of Artificial Sequence: Synthetic oligonucleotide
ucugcaaauaauuuugcac

SEQ ID NO: 154974 - RNA, 19 nt, Artificial Sequence
  Description of Artificial Sequence: Synthetic oligonucleotide
uucauuacgaacauuugaa

SEQ ID NO: 154975 - RNA, 19 nt, Artificial Sequence
  Description of Artificial Sequence: Synthetic oligonucleotide
ggaguaaagacaaagauug

SEQ ID NO: 154976 - RNA, 19 nt, Artificial Sequence
  Description of Artificial Sequence: Synthetic oligonucleotide
aaagggaagguaauuaaag

SEQ ID NO: 154977 - RNA, 19 nt, Artificial Sequence
  Description of Artificial Sequence: Synthetic oligonucleotide
uccuagauggguuagacaa

SEQ ID NO: 154978 - RNA, 19 nt, Artificial Sequence
  Description of Artificial Sequence: Synthetic oligonucleotide
aguagaagccuuaauaccg

SEQ ID NO: 154979 - RNA, 19 nt, Artificial Sequence
  Description of Artificial Sequence: Synthetic oligonucleotide
aauagcuauuuuaggagac

SEQ ID NO: 154980 - RNA, 19 nt, Artificial Sequence
  Description of Artificial Sequence: Synthetic oligonucleotide
uaugcagggaucaugauuu

SEQ ID NO: 154981 - RNA, 19 nt, Artificial Sequence
  Description of Artificial Sequence: Synthetic oligonucleotide
uucuauccaggaaauagag

SEQ ID NO: 154982 - RNA, 19 nt, Artificial Sequence
  Description of Artificial Sequence: Synthetic oligonucleotide
uaacgcuccuucaacaggg

SEQ ID NO: 154983 - RNA, 19 nt, Artificial Sequence
  Description of Artificial Sequence: Synthetic oligonucleotide
gagagaauagcuauuuuag

SEQ ID NO: 154984 - RNA, 19 nt, Artificial Sequence
  Description of Artificial Sequence: Synthetic oligonucleotide
aauauuccgauugauuuca

SEQ ID NO: 154985 - RNA, 19 nt, Artificial Sequence
  Description of Artificial Sequence: Synthetic oligonucleotide
caucccaugauuauucugc

SEQ ID NO: 154986 - RNA, 19 nt, Artificial Sequence
  Description of Artificial Sequence: Synthetic oligonucleotide
uuuggaacgaacugucucc

SEQ ID NO: 154987 - RNA, 19 nt, Artificial Sequence
  Description of Artificial Sequence: Synthetic oligonucleotide
gaguuaaacaucauauucc

SEQ ID NO: 154988 - RNA, 19 nt, Artificial Sequence
  Description of Artificial Sequence: Synthetic oligonucleotide
uuaacacaguaaaauauuc

SEQ ID NO: 154989 - RNA, 19 nt, Artificial Sequence
  Description of Artificial Sequence: Synthetic oligonucleotide
agagaauagcuauuuuagg

SEQ ID NO: 154990 - RNA, 19 nt, Artificial Sequence
  Description of Artificial Sequence: Synthetic oligonucleotide
aaagcuucggggaagagcu

SEQ ID NO: 154991 - RNA, 19 nt, Artificial Sequence
  Description of Artificial Sequence: Synthetic oligonucleotide
uccugauccacucugacuc

SEQ ID NO: 154992 - RNA, 19 nt, Artificial Sequence
  Description of Artificial Sequence: Synthetic oligonucleotide
uuuuauccuagacagggaa

SEQ ID NO: 154993 - RNA, 19 nt, Artificial Sequence
  Description of Artificial Sequence: Synthetic oligonucleotide
aucauuuaagaguugggca

SEQ ID NO: 154994 - RNA, 19 nt, Artificial Sequence
  Description of Artificial Sequence: Synthetic oligonucleotide
ucacaaacgaaaauccaac

SEQ ID NO: 154995 - RNA, 19 nt, Artificial Sequence
  Description of Artificial Sequence: Synthetic oligonucleotide
aucauuggaauggaguggc

SEQ ID NO: 154996 - RNA, 19 nt, Artificial Sequence
  Description of Artificial Sequence: Synthetic oligonucleotide
gguaauuaaagccauuuac

SEQ ID NO: 154997 - RNA, 19 nt, Artificial Sequence
  Description of Artificial Sequence: Synthetic oligonucleotide
ugcaaauaauuuugcacag

SEQ ID NO: 154998 - RNA, 19 nt, Artificial Sequence
  Description of Artificial Sequence: Synthetic oligonucleotide
aaauguacacggcaugagu

SEQ ID NO: 154999 - RNA, 19 nt, Artificial Sequence
  Description of Artificial Sequence: Synthetic oligonucleotide
acagcuuacaggugggugg

SEQ ID NO: 155000 - RNA, 19 nt, Artificial Sequence
  Description of Artificial Sequence: Synthetic oligonucleotide
uguauaaauaaugagcauu

SEQ ID NO: 155001 - RNA, 19 nt, Artificial Sequence
  Description of Artificial Sequence: Synthetic oligonucleotide
uuucuauccaggaaauaga

SEQ ID NO: 155002 - RNA, 19 nt, Artificial Sequence
  Description of Artificial Sequence: Synthetic oligonucleotide
aagaacgaggaucugcacu

SEQ ID NO: 155003 - RNA, 19 nt, Artificial Sequence
  Description of Artificial Sequence: Synthetic oligonucleotide
aauagagaagggcauccga

SEQ ID NO: 155004 - RNA, 19 nt, Artificial Sequence
  Description of Artificial Sequence: Synthetic oligonucleotide
gaggcaaguuguuugagug

SEQ ID NO: 155005 - RNA, 19 nt, Artificial Sequence
  Description of Artificial Sequence: Synthetic oligonucleotide
uauaugucacuguauaaau

SEQ ID NO: 155006 - RNA, 19 nt, Artificial Sequence
  Description of Artificial Sequence: Synthetic oligonucleotide
cuugaagcaugaaaucugc

SEQ ID NO: 155007 - RNA, 19 nt, Artificial Sequence
  Description of Artificial Sequence: Synthetic oligonucleotide
acaaagauugaaaaggacu

SEQ ID NO: 155008 - RNA, 19 nt, Artificial Sequence
  Description of Artificial Sequence: Synthetic oligonucleotide
uuaauaccgcccaagccug

SEQ ID NO: 155009 - RNA, 19 nt, Artificial Sequence
  Description of Artificial Sequence: Synthetic oligonucleotide
agaacgaggaucugcacug

SEQ ID NO: 155010 - RNA, 19 nt, Artificial Sequence
  Description of Artificial Sequence: Synthetic oligonucleotide
aaacaacuugguugugaac

SEQ ID NO: 155011 - RNA, 19 nt, Artificial Sequence
  Description of Artificial Sequence: Synthetic oligonucleotide
aaagaacgaggaucugcac

SEQ ID NO: 155012 - RNA, 19 nt, Artificial Sequence
  Description of Artificial Sequence: Synthetic oligonucleotide
auuugauacacuccuugug

SEQ ID NO: 155013 - RNA, 19 nt, Artificial Sequence
  Description of Artificial Sequence: Synthetic oligonucleotide
uguguuuaccucugaaucu

SEQ ID NO: 155014 - RNA, 19 nt, Artificial Sequence
  Description of Artificial Sequence: Synthetic oligonucleotide
auugugaccugcccaauag

SEQ ID NO: 155015 - RNA, 19 nt, Artificial Sequence
  Description of Artificial Sequence: Synthetic oligonucleotide
aaauccaagccugcauccc

SEQ ID NO: 155016 - RNA, 19 nt, Artificial Sequence
  Description of Artificial Sequence: Synthetic oligonucleotide
uuuauggucacauccugaa

SEQ ID NO: 155017 - RNA, 19 nt, Artificial Sequence
  Description of Artificial Sequence: Synthetic oligonucleotide
uucaaggccgaguuaaaca

SEQ ID NO: 155018 - RNA, 19 nt, Artificial Sequence
  Description of Artificial Sequence: Synthetic oligonucleotide
cugcaaauaauuuugcaca

SEQ ID NO: 155019 - RNA, 19 nt, Artificial Sequence
  Description of Artificial Sequence: Synthetic oligonucleotide
uggaguggcuaaaacaaca

SEQ ID NO: 155020 - RNA, 19 nt, Artificial Sequence
  Description of Artificial Sequence: Synthetic oligonucleotide
uuauccgaacuccauucag

SEQ ID NO: 155021 - RNA, 19 nt, Artificial Sequence
  Description of Artificial Sequence: Synthetic oligonucleotide
uccauuccucacuagcugg

SEQ ID NO: 155022 - RNA, 19 nt, Artificial Sequence
  Description of Artificial Sequence: Synthetic oligonucleotide
uaucauuggaauggagugg

SEQ ID NO: 155023 - RNA, 19 nt, Artificial Sequence
  Description of Artificial Sequence: Synthetic oligonucleotide
gaaauccaagccugcaucc

SEQ ID NO: 155024 - RNA, 19 nt, Artificial Sequence
  Description of Artificial Sequence: Synthetic oligonucleotide
caucauuuaagaguugggc

SEQ ID NO: 155025 - RNA, 19 nt, Artificial Sequence
  Description of Artificial Sequence: Synthetic oligonucleotide
uuauccuagacagggaaug

SEQ ID NO: 155026 - RNA, 19 nt, Artificial Sequence
  Description of Artificial Sequence: Synthetic oligonucleotide
gauggguuagacaacaguc

SEQ ID NO: 155027 - RNA, 19 nt, Artificial Sequence
  Description of Artificial Sequence: Synthetic oligonucleotide
aacgaaaauccaacauccc

SEQ ID NO: 155028 - RNA, 19 nt, Artificial Sequence
  Description of Artificial Sequence: Synthetic oligonucleotide
ucuugaucuguguuuaccu

SEQ ID NO: 155029 - RNA, 19 nt, Artificial Sequence
  Description of Artificial Sequence: Synthetic oligonucleotide
aaaauguacacggcaugag

SEQ ID NO: 155030 - RNA, 19 nt, Artificial Sequence
  Description of Artificial Sequence: Synthetic oligonucleotide
gaauagcuauuuuaggaga

SEQ ID NO: 155031 - RNA, 19 nt, Artificial Sequence
  Description of Artificial Sequence: Synthetic oligonucleotide
ugcacuauauacauacuuu

SEQ ID NO: 155032 - RNA, 19 nt, Artificial Sequence
  Description of Artificial Sequence: Synthetic oligonucleotide
aaaucuugaacccgcguuu

SEQ ID NO: 155033 - RNA, 19 nt, Artificial Sequence
  Description of Artificial Sequence: Synthetic oligonucleotide
auggguuagacaacagucc

SEQ ID NO: 155034 - RNA, 19 nt, Artificial Sequence
  Description of Artificial Sequence: Synthetic oligonucleotide
acgaaaauccaacauccca

SEQ ID NO: 155035 - RNA, 19 nt, Artificial Sequence
  Description of Artificial Sequence: Synthetic oligonucleotide
aguagacagaagauggugg

SEQ ID NO: 155036 - RNA, 19 nt, Artificial Sequence
  Description of Artificial Sequence: Synthetic oligonucleotide
ucgggugcagcucacuggg

SEQ ID NO: 155037 - RNA, 19 nt, Artificial Sequence
  Description of Artificial Sequence: Synthetic oligonucleotide
acaaacgaaaauccaacau

SEQ ID NO: 155038 - RNA, 19 nt, Artificial Sequence
  Description of Artificial Sequence: Synthetic oligonucleotide
aaugaacuagaggccgagc

SEQ ID NO: 155039 - RNA, 19 nt, Artificial Sequence
  Description of Artificial Sequence: Synthetic oligonucleotide
cuggacaaguuucugacac

SEQ ID NO: 155040 - RNA, 19 nt, Artificial Sequence
  Description of Artificial Sequence: Synthetic oligonucleotide
gacuauuaaacuggucccg

SEQ ID NO: 155041 - RNA, 19 nt, Artificial Sequence
  Description of Artificial Sequence: Synthetic oligonucleotide
uugucuacugguuggggcc

SEQ ID NO: 155042 - RNA, 19 nt, Artificial Sequence
  Description of Artificial Sequence: Synthetic oligonucleotide
cauuauccgaacuccauuc

SEQ ID NO: 155043 - RNA, 19 nt, Artificial Sequence
  Description of Artificial Sequence: Synthetic oligonucleotide
acagaaguacucaguaagc

SEQ ID NO: 155044 - RNA, 19 nt, Artificial Sequence
  Description of Artificial Sequence: Synthetic oligonucleotide
aaagauugaaaaggacuca

SEQ ID NO: 155045 - RNA, 19 nt, Artificial Sequence
  Description of Artificial Sequence: Synthetic oligonucleotide
gaaaccaucucacuccaga

SEQ ID NO: 155046 - RNA, 19 nt, Artificial Sequence
  Description of Artificial Sequence: Synthetic oligonucleotide
uagaaaucuugaacccgcg

SEQ ID NO: 155047 - RNA, 19 nt, Artificial Sequence
  Description of Artificial Sequence: Synthetic oligonucleotide
uccauaauauuccgauuga

SEQ ID NO: 155048 - RNA, 19 nt, Artificial Sequence
  Description of Artificial Sequence: Synthetic oligonucleotide
ugggaaccgagucaguagc

SEQ ID NO: 155049 - RNA, 19 nt, Artificial Sequence
  Description of Artificial Sequence: Synthetic oligonucleotide
uacucaguaagcagaggug

SEQ ID NO: 155050 - RNA, 19 nt, Artificial Sequence
  Description of Artificial Sequence: Synthetic oligonucleotide
aaaccaagcaggauggccu

SEQ ID NO: 155051 - RNA, 19 nt, Artificial Sequence
  Description of Artificial Sequence: Synthetic oligonucleotide
uuugcgggaggcacuacag

SEQ ID NO: 155052 - RNA, 19 nt, Artificial Sequence
  Description of Artificial Sequence: Synthetic oligonucleotide
uacgaacauuugaauacag

SEQ ID NO: 155053 - RNA, 19 nt, Artificial Sequence
  Description of Artificial Sequence: Synthetic oligonucleotide
uggguuagacaacaguccu

SEQ ID NO: 155054 - RNA, 19 nt, Artificial Sequence
  Description of Artificial Sequence: Synthetic oligonucleotide
gaaaugggacuugauuacg

SEQ ID NO: 155055 - RNA, 19 nt, Artificial Sequence
  Description of Artificial Sequence: Synthetic oligonucleotide
aagagguggggaugauugg

SEQ ID NO: 155056 - RNA, 19 nt, Artificial Sequence
  Description of Artificial Sequence: Synthetic oligonucleotide
aguuccauuucccacacuu

SEQ ID NO: 155057 - RNA, 19 nt, Artificial Sequence
  Description of Artificial Sequence: Synthetic oligonucleotide
aguaaagacaaagauugaa

SEQ ID NO: 155058 - RNA, 19 nt, Artificial Sequence
  Description of Artificial Sequence: Synthetic oligonucleotide
aaucuugaacccgcguuuc

SEQ ID NO: 155059 - RNA, 19 nt, Artificial Sequence
  Description of Artificial Sequence: Synthetic oligonucleotide
uugauacacuccuugugca

SEQ ID NO: 155060 - RNA, 19 nt, Artificial Sequence
  Description of Artificial Sequence: Synthetic oligonucleotide
agccauuuacuacaggagu

SEQ ID NO: 155061 - RNA, 19 nt, Artificial Sequence
  Description of Artificial Sequence: Synthetic oligonucleotide
aacgaggaucugcacuggg

SEQ ID NO: 155062 - RNA, 19 nt, Artificial Sequence
  Description of Artificial Sequence: Synthetic oligonucleotide
aguacuucuugguaacgcu

SEQ ID NO: 155063 - RNA, 19 nt, Artificial Sequence
  Description of Artificial Sequence: Synthetic oligonucleotide
agccuuuaguaucuccugg

SEQ ID NO: 155064 - RNA, 19 nt, Artificial Sequence
  Description of Artificial Sequence: Synthetic oligonucleotide
gaagccuuaauaccgccca

SEQ ID NO: 155065 - RNA, 19 nt, Artificial Sequence
  Description of Artificial Sequence: Synthetic oligonucleotide
auaaaacagaauauccugu

SEQ ID NO: 155066 - RNA, 19 nt, Artificial Sequence
  Description of Artificial Sequence: Synthetic oligonucleotide
aucgaacuaucagaguuac

SEQ ID NO: 155067 - RNA, 19 nt, Artificial Sequence
  Description of Artificial Sequence: Synthetic oligonucleotide
auuuacuacaggaguaaag

SEQ ID NO: 155068 - RNA, 19 nt, Artificial Sequence
  Description of Artificial Sequence: Synthetic oligonucleotide
agucuauccaguuccauuu

SEQ ID NO: 155069 - RNA, 19 nt, Artificial Sequence
  Description of Artificial Sequence: Synthetic oligonucleotide
guaacgcuccuucaacagg

SEQ ID NO: 155070 - RNA, 19 nt, Artificial Sequence
  Description of Artificial Sequence: Synthetic oligonucleotide
ucuauccaggaaauagagu

SEQ ID NO: 155071 - RNA, 19 nt, Artificial Sequence
  Description of Artificial Sequence: Synthetic oligonucleotide
cuuaauaccgcccaagccu

SEQ ID NO: 155072 - RNA, 19 nt, Artificial Sequence
  Description of Artificial Sequence: Synthetic oligonucleotide
uauuccgauugauuucacc

SEQ ID NO: 155073 - RNA, 19 nt, Artificial Sequence
  Description of Artificial Sequence: Synthetic oligonucleotide
aagauugaaaaggacucaa

SEQ ID NO: 155074 - RNA, 19 nt, Artificial Sequence
  Description of Artificial Sequence: Synthetic oligonucleotide
uggaggaguugacuugagg

SEQ ID NO: 155075 - RNA, 19 nt, Artificial Sequence
  Description of Artificial Sequence: Synthetic oligonucleotide
augauuucaaggccgaguu

SEQ ID NO: 155076 - RNA, 19 nt, Artificial Sequence
  Description of Artificial Sequence: Synthetic oligonucleotide
cagagcaauuccuggaggc

SEQ ID NO: 155077 - RNA, 19 nt, Artificial Sequence
  Description of Artificial Sequence: Synthetic oligonucleotide
gaaagcuucggggaagagc

SEQ ID NO: 155078 - RNA, 19 nt, Artificial Sequence
  Description of Artificial Sequence: Synthetic oligonucleotide
gaugauuggcuggacuggg

SEQ ID NO: 155079 - RNA, 19 nt, Artificial Sequence
  Description of Artificial Sequence: Synthetic oligonucleotide
gaaagcgcaggguucaaga

SEQ ID NO: 155080 - RNA, 19 nt, Artificial Sequence
  Description of Artificial Sequence: Synthetic oligonucleotide
acggcaugaguauauguca

SEQ ID NO: 155081 - RNA, 19 nt, Artificial Sequence
  Description of Artificial Sequence: Synthetic oligonucleotide
gggaaucuacaaaacaugg

SEQ ID NO: 155082 - RNA, 19 nt, Artificial Sequence
  Description of Artificial Sequence: Synthetic oligonucleotide
gauacacuccuugugcagc

SEQ ID NO: 155083 - RNA, 19 nt, Artificial Sequence
  Description of Artificial Sequence: Synthetic oligonucleotide
caaagaacgaggaucugca

SEQ ID NO: 155084 - RNA, 19 nt, Artificial Sequence
  Description of Artificial Sequence: Synthetic oligonucleotide
agauggguuagacaacagu

SEQ ID NO: 155085 - RNA, 19 nt, Artificial Sequence
  Description of Artificial Sequence: Synthetic oligonucleotide
uuuauccuagacagggaau

SEQ ID NO: 155086 - RNA, 19 nt, Artificial Sequence
  Description of Artificial Sequence: Synthetic oligonucleotide
uuacgaacauuugaauaca

SEQ ID NO: 155087 - RNA, 19 nt, Artificial Sequence
  Description of Artificial Sequence: Synthetic oligonucleotide
uugguaacgcuccuucaac

SEQ ID NO: 155088 - RNA, 19 nt, Artificial Sequence
  Description of Artificial Sequence: Synthetic oligonucleotide
ucauuacgaacauuugaau

SEQ ID NO: 155089 - RNA, 19 nt, Artificial Sequence
  Description of Artificial Sequence: Synthetic oligonucleotide
uuaaacuggucccgaacau

SEQ ID NO: 155090 - RNA, 19 nt, Artificial Sequence
  Description of Artificial Sequence: Synthetic oligonucleotide
agggacaaguaucauuugu

SEQ ID NO: 155091 - RNA, 19 nt, Artificial Sequence
  Description of Artificial Sequence: Synthetic oligonucleotide
aaggccgaguuaaacauca

SEQ ID NO: 155092 - RNA, 19 nt, Artificial Sequence
  Description of Artificial Sequence: Synthetic oligonucleotide
uucaucucacuuugucucc

SEQ ID NO: 155093 - RNA, 19 nt, Artificial Sequence
  Description of Artificial Sequence: Synthetic oligonucleotide
guuuggaacgaacugucuc

SEQ ID NO: 155094 - RNA, 19 nt, Artificial Sequence
  Description of Artificial Sequence: Synthetic oligonucleotide
uguuugaguggcacccugc

SEQ ID NO: 155095 - RNA, 19 nt, Artificial Sequence
  Description of Artificial Sequence: Synthetic oligonucleotide
ggccuuauugcacuguggg

SEQ ID NO: 155096 - RNA, 19 nt, Artificial Sequence
  Description of Artificial Sequence: Synthetic oligonucleotide
ugggcauaaccauaggcau

SEQ ID NO: 155097 - RNA, 19 nt, Artificial Sequence
  Description of Artificial Sequence: Synthetic oligonucleotide
gugacugucaagucccacc

SEQ ID NO: 155098 - RNA, 19 nt, Artificial Sequence
  Description of Artificial Sequence: Synthetic oligonucleotide
gauggugggagaaauggga

SEQ ID NO: 155099 - RNA, 19 nt, Artificial Sequence
  Description of Artificial Sequence: Synthetic oligonucleotide
aaugggacuugauuacguu

SEQ ID NO: 155100 - RNA, 19 nt, Artificial Sequence
  Description of Artificial Sequence: Synthetic oligonucleotide
ucauuauccgaacuccauu

SEQ ID NO: 155101 - RNA, 19 nt, Artificial Sequence
  Description of Artificial Sequence: Synthetic oligonucleotide
agaagccuuaauaccgccc

SEQ ID NO: 155102 - RNA, 19 nt, Artificial Sequence
  Description of Artificial Sequence: Synthetic oligonucleotide
uaccugauaucaauguaua

SEQ ID NO: 155103 - RNA, 19 nt, Artificial Sequence
  Description of Artificial Sequence: Synthetic oligonucleotide
aggucggaaauccaagccu

SEQ ID NO: 155104 - RNA, 19 nt, Artificial Sequence
  Description of Artificial Sequence: Synthetic oligonucleotide
uccaguacuucuugguaac

SEQ ID NO: 155105 - RNA, 19 nt, Artificial Sequence
  Description of Artificial Sequence: Synthetic oligonucleotide
auuauccgaacuccauuca

SEQ ID NO: 155106 - RNA, 19 nt, Artificial Sequence
  Description of Artificial Sequence: Synthetic oligonucleotide
cauuacgaacauuugaaua

SEQ ID NO: 155107 - RNA, 19 nt, Artificial Sequence
  Description of Artificial Sequence: Synthetic oligonucleotide
accugcccaauagagaagg

SEQ ID NO: 155108 - RNA, 19 nt, Artificial Sequence
  Description of Artificial Sequence: Synthetic oligonucleotide
agagaccccaagccagggc

SEQ ID NO: 155109 - RNA, 19 nt, Artificial Sequence
  Description of Artificial Sequence: Synthetic oligonucleotide
aucgggugcagcucacugg

SEQ ID NO: 155110 - RNA, 19 nt, Artificial Sequence
  Description of Artificial Sequence: Synthetic oligonucleotide
caaaccaagcaggauggcc

SEQ ID NO: 155111 - RNA, 19 nt, Artificial Sequence
  Description of Artificial Sequence: Synthetic oligonucleotide
aauaccgcccaagccuggg

SEQ ID NO: 155112 - RNA, 19 nt, Artificial Sequence
  Description of Artificial Sequence: Synthetic oligonucleotide
cuugguugugaaccaacug

SEQ ID NO: 155113 - RNA, 19 nt, Artificial Sequence
  Description of Artificial Sequence: Synthetic oligonucleotide
uuguuugaguggcacccug

SEQ ID NO: 155114 - RNA, 19 nt, Artificial Sequence
  Description of Artificial Sequence: Synthetic oligonucleotide
aggggaucguggcuaggcc

SEQ ID NO: 155115 - RNA, 19 nt, Artificial Sequence
  Description of Artificial Sequence: Synthetic oligonucleotide
auaccugauaucaauguau

SEQ ID NO: 155116 - RNA, 19 nt, Artificial Sequence
  Description of Artificial Sequence: Synthetic oligonucleotide
uccaggaaauagaguagac

SEQ ID NO: 155117 - RNA, 19 nt, Artificial Sequence
  Description of Artificial Sequence: Synthetic oligonucleotide
cuuuaguaucuccugguga

SEQ ID NO: 155118 - RNA, 19 nt, Artificial Sequence
  Description of Artificial Sequence: Synthetic oligonucleotide
gcauacaugagccuuacaa

SEQ ID NO: 155119 - RNA, 19 nt, Artificial Sequence
  Description of Artificial Sequence: Synthetic oligonucleotide
uguccaguacuucuuggua

SEQ ID NO: 155120 - RNA, 19 nt, Artificial Sequence
  Description of Artificial Sequence: Synthetic oligonucleotide
uuuccuguucacaucgguu

SEQ ID NO: 155121 - RNA, 19 nt, Artificial Sequence
  Description of Artificial Sequence: Synthetic oligonucleotide
auccuguauaccugauauc

SEQ ID NO: 155122 - RNA, 19 nt, Artificial Sequence
  Description of Artificial Sequence: Synthetic oligonucleotide
cagcgcauggguacaagcc

SEQ ID NO: 155123 - RNA, 19 nt, Artificial Sequence
  Description of Artificial Sequence: Synthetic oligonucleotide
accccuucaucucacuuug

SEQ ID NO: 155124 - RNA, 19 nt, Artificial Sequence
  Description of Artificial Sequence: Synthetic oligonucleotide
ucugcauacaugagccuua

SEQ ID NO: 155125 - RNA, 19 nt, Artificial Sequence
  Description of Artificial Sequence: Synthetic oligonucleotide
uugugcagcgcauggguac

SEQ ID NO: 155126 - RNA, 19 nt, Artificial Sequence
  Description of Artificial Sequence: Synthetic oligonucleotide
uugcgggaggcacuacagg

SEQ ID NO: 155127 - RNA, 19 nt, Artificial Sequence
  Description of Artificial Sequence: Synthetic oligonucleotide
acaucccaugauuauucug

SEQ ID NO: 155128 - RNA, 19 nt, Artificial Sequence
  Description of Artificial Sequence: Synthetic oligonucleotide
uaaugagcauuaacacagu

SEQ ID NO: 155129 - RNA, 19 nt, Artificial Sequence
  Description of Artificial Sequence: Synthetic oligonucleotide
ugugacuauuaaacugguc

SEQ ID NO: 155130 - RNA, 19 nt, Artificial Sequence
  Description of Artificial Sequence: Synthetic oligonucleotide
auuugcgggaggcacuaca

SEQ ID NO: 155131 - RNA, 19 nt, Artificial Sequence
  Description of Artificial Sequence: Synthetic oligonucleotide
ucggguccaucauuuaaga

SEQ ID NO: 155132 - RNA, 19 nt, Artificial Sequence
  Description of Artificial Sequence: Synthetic oligonucleotide
gguaacgcuccuucaacag

SEQ ID NO: 155133 - RNA, 19 nt, Artificial Sequence
  Description of Artificial Sequence: Synthetic oligonucleotide
ggucaucugggccuuauug

SEQ ID NO: 155134 - RNA, 19 nt, Artificial Sequence
  Description of Artificial Sequence: Synthetic oligonucleotide
agcgcauggguacaagcca

SEQ ID NO: 155135 - RNA, 19 nt, Artificial Sequence
  Description of Artificial Sequence: Synthetic oligonucleotide
caccaagccuucuggaggc

SEQ ID NO: 155136 - RNA, 19 nt, Artificial Sequence
  Description of Artificial Sequence: Synthetic oligonucleotide
guacucaguaagcagaggu

SEQ ID NO: 155137 - RNA, 19 nt, Artificial Sequence
  Description of Artificial Sequence: Synthetic oligonucleotide
uuugaguggcacccugccu

SEQ ID NO: 155138 - RNA, 19 nt, Artificial Sequence
  Description of Artificial Sequence: Synthetic oligonucleotide
uuccgauugauuucaccau

SEQ ID NO: 155139 - RNA, 19 nt, Artificial Sequence
  Description of Artificial Sequence: Synthetic oligonucleotide
acacuuguguaauucuaaa

SEQ ID NO: 155140 - RNA, 19 nt, Artificial Sequence
  Description of Artificial Sequence: Synthetic oligonucleotide
gcguuuccuguucacaucg

SEQ ID NO: 155141 - RNA, 19 nt, Artificial Sequence
  Description of Artificial Sequence: Synthetic oligonucleotide
agauugaaaaggacucaag

SEQ ID NO: 155142 - RNA, 19 nt, Artificial Sequence
  Description of Artificial Sequence: Synthetic oligonucleotide
ucuugguaacgcuccuuca

SEQ ID NO: 155143 - RNA, 19 nt, Artificial Sequence
  Description of Artificial Sequence: Synthetic oligonucleotide
aaucgaacuaucagaguua

SEQ ID NO: 155144 - RNA, 19 nt, Artificial Sequence
  Description of Artificial Sequence: Synthetic oligonucleotide
acuauuaaacuggucccga

SEQ ID NO: 155145 - RNA, 19 nt, Artificial Sequence
  Description of Artificial Sequence: Synthetic oligonucleotide
uaauaccgcccaagccugg

SEQ ID NO: 155146 - RNA, 19 nt, Artificial Sequence
  Description of Artificial Sequence: Synthetic oligonucleotide
ugucuacugguuggggccg

SEQ ID NO: 155147 - RNA, 19 nt, Artificial Sequence
  Description of Artificial Sequence: Synthetic oligonucleotide
aaccaacugccuuaaccuu

SEQ ID NO: 155148 - RNA, 19 nt, Artificial Sequence
  Description of Artificial Sequence: Synthetic oligonucleotide
acgaggaucugcacugggc

SEQ ID NO: 155149 - RNA, 19 nt, Artificial Sequence
  Description of Artificial Sequence: Synthetic oligonucleotide
uuccuagauggguuagaca

SEQ ID NO: 155150 - RNA, 19 nt, Artificial Sequence
  Description of Artificial Sequence: Synthetic oligonucleotide
uaguaucuccuggugauuc

SEQ ID NO: 155151 - RNA, 19 nt, Artificial Sequence
  Description of Artificial Sequence: Synthetic oligonucleotide
gaaaucuugaacccgcguu

SEQ ID NO: 155152 - RNA, 19 nt, Artificial Sequence
  Description of Artificial Sequence: Synthetic oligonucleotide
cacaaacgaaaauccaaca

SEQ ID NO: 155153 - RNA, 19 nt, Artificial Sequence
  Description of Artificial Sequence: Synthetic oligonucleotide
ggagagaauagcuauuuua

SEQ ID NO: 155154 - RNA, 19 nt, Artificial Sequence
  Description of Artificial Sequence: Synthetic oligonucleotide
uggguacaagccaucgggu

SEQ ID NO: 155155 - RNA, 19 nt, Artificial Sequence
  Description of Artificial Sequence: Synthetic oligonucleotide
uggaccaugagggcugacc

SEQ ID NO: 155156 - RNA, 19 nt, Artificial Sequence
  Description of Artificial Sequence: Synthetic oligonucleotide
uccuucaacaggguucucu

SEQ ID NO: 155157 - RNA, 19 nt, Artificial Sequence
  Description of Artificial Sequence: Synthetic oligonucleotide
guucaagauuggaaaagac

SEQ ID NO: 155158 - RNA, 19 nt, Artificial Sequence
  Description of Artificial Sequence: Synthetic oligonucleotide
guaucugcacuauauacau

SEQ ID NO: 155159 - RNA, 19 nt, Artificial Sequence
  Description of Artificial Sequence: Synthetic oligonucleotide
caguacuucuugguaacgc

SEQ ID NO: 155160 - RNA, 19 nt, Artificial Sequence
  Description of Artificial Sequence: Synthetic oligonucleotide
cuugaacccgcguuuccug

SEQ ID NO: 155161 - RNA, 19 nt, Artificial Sequence
  Description of Artificial Sequence: Synthetic oligonucleotide
gucggguccaucauuuaag

SEQ ID NO: 155162 - RNA, 19 nt, Artificial Sequence
  Description of Artificial Sequence: Synthetic oligonucleotide
gaagaauguuggucaucug

SEQ ID NO: 155163 - RNA, 19 nt, Artificial Sequence
  Description of Artificial Sequence: Synthetic oligonucleotide
acuagaggccgagccaaac

SEQ ID NO: 155164 - RNA, 19 nt, Artificial Sequence
  Description of Artificial Sequence: Synthetic oligonucleotide
aggguucaagauuggaaaa

SEQ ID NO: 155165 - RNA, 19 nt, Artificial Sequence
  Description of Artificial Sequence: Synthetic oligonucleotide
ggaaucuacaaaacauggc

SEQ ID NO: 155166 - RNA, 19 nt, Artificial Sequence
  Description of Artificial Sequence: Synthetic oligonucleotide
gggaagguaauuaaagcca

SEQ ID NO: 155167 - RNA, 19 nt, Artificial Sequence
  Description of Artificial Sequence: Synthetic oligonucleotide
ugcuuaguggaggccaagc

SEQ ID NO: 155168 - RNA, 19 nt, Artificial Sequence
  Description of Artificial Sequence: Synthetic oligonucleotide
augagcauuaacacaguaa

SEQ ID NO: 155169 - RNA, 19 nt, Artificial Sequence
  Description of Artificial Sequence: Synthetic oligonucleotide
ucaguaagcagagguggaa

SEQ ID NO: 155170 - RNA, 19 nt, Artificial Sequence
  Description of Artificial Sequence: Synthetic oligonucleotide
gcagcuaccagcuggauua

SEQ ID NO: 155171 - RNA, 19 nt, Artificial Sequence
  Description of Artificial Sequence: Synthetic oligonucleotide
uccgaacuccauucagucu

SEQ ID NO: 155172 - RNA, 19 nt, Artificial Sequence
  Description of Artificial Sequence: Synthetic oligonucleotide
aaccgagucaguagcuucu

SEQ ID NO: 155173 - RNA, 19 nt, Artificial Sequence
  Description of Artificial Sequence: Synthetic oligonucleotide
uacugguuggggccgggga

SEQ ID NO: 155174 - RNA, 19 nt, Artificial Sequence
  Description of Artificial Sequence: Synthetic oligonucleotide
uuggaacgaacugucucca

SEQ ID NO: 155175 - RNA, 19 nt, Artificial Sequence
  Description of Artificial Sequence: Synthetic oligonucleotide
ugcucgaugccacccguuc

SEQ ID NO: 155176 - RNA, 19 nt, Artificial Sequence
  Description of Artificial Sequence: Synthetic oligonucleotide
agcuggaugugacuauuaa

SEQ ID NO: 155177 - RNA, 19 nt, Artificial Sequence
  Description of Artificial Sequence: Synthetic oligonucleotide
gggacaaguaucauuugug

SEQ ID NO: 155178 - RNA, 19 nt, Artificial Sequence
  Description of Artificial Sequence: Synthetic oligonucleotide
uauccuagacagggaaugu

SEQ ID NO: 155179 - RNA, 19 nt, Artificial Sequence
  Description of Artificial Sequence: Synthetic oligonucleotide
acgugcugucuugauuugc

SEQ ID NO: 155180 - RNA, 19 nt, Artificial Sequence
  Description of Artificial Sequence: Synthetic oligonucleotide
ggaggaguugacuugaggu

SEQ ID NO: 155181 - RNA, 19 nt, Artificial Sequence
  Description of Artificial Sequence: Synthetic oligonucleotide
uugaacccgcguuuccugu

SEQ ID NO: 155182 - RNA, 19 nt, Artificial Sequence
  Description of Artificial Sequence: Synthetic oligonucleotide
aagccaucgggugcagcuc

SEQ ID NO: 155183 - RNA, 19 nt, Artificial Sequence
  Description of Artificial Sequence: Synthetic oligonucleotide
caagauuggaaaagacaaa

SEQ ID NO: 155184 - RNA, 19 nt, Artificial Sequence
  Description of Artificial Sequence: Synthetic oligonucleotide
uggaacgaacugucuccag

SEQ ID NO: 155185 - RNA, 19 nt, Artificial Sequence
  Description of Artificial Sequence: Synthetic oligonucleotide
ugauuucaaggccgaguua

SEQ ID NO: 155186 - RNA, 19 nt, Artificial Sequence
  Description of Artificial Sequence: Synthetic oligonucleotide
accugauaucaauguauaa

SEQ ID NO: 155187 - RNA, 19 nt, Artificial Sequence
  Description of Artificial Sequence: Synthetic oligonucleotide
ccuuaauaccgcccaagcc

SEQ ID NO: 155188 - RNA, 19 nt, Artificial Sequence
  Description of Artificial Sequence: Synthetic oligonucleotide
agguguaucugcacuauau

SEQ ID NO: 155189 - RNA, 19 nt, Artificial Sequence
  Description of Artificial Sequence: Synthetic oligonucleotide
guccaguacuucuugguaa

SEQ ID NO: 155190 - RNA, 19 nt, Artificial Sequence
  Description of Artificial Sequence: Synthetic oligonucleotide
agccuuaauaccgcccaag

SEQ ID NO: 155191 - RNA, 19 nt, Artificial Sequence
  Description of Artificial Sequence: Synthetic oligonucleotide
ucaucucacuuugucucca

SEQ ID NO: 155192 - RNA, 19 nt, Artificial Sequence
  Description of Artificial Sequence: Synthetic oligonucleotide
cuugguaacgcuccuucaa

SEQ ID NO: 155193 - RNA, 19 nt, Artificial Sequence
  Description of Artificial Sequence: Synthetic oligonucleotide
ggcuccauuccucacuagc

SEQ ID NO: 155194 - RNA, 19 nt, Artificial Sequence
  Description of Artificial Sequence: Synthetic oligonucleotide
ggaauggaguggcuaaaac

SEQ ID NO: 155195 - RNA, 19 nt, Artificial Sequence
  Description of Artificial Sequence: Synthetic oligonucleotide
aagguguaucugcacuaua

SEQ ID NO: 155196 - RNA, 19 nt, Artificial Sequence
  Description of Artificial Sequence: Synthetic oligonucleotide
ucggaaauccaagccugca

SEQ ID NO: 155197 - RNA, 19 nt, Artificial Sequence
  Description of Artificial Sequence: Synthetic oligonucleotide
aggcccgccauggugguac

SEQ ID NO: 155198 - RNA, 19 nt, Artificial Sequence
  Description of Artificial Sequence: Synthetic oligonucleotide
aguggcacccugccuuaag

SEQ ID NO: 155199 - RNA, 19 nt, Artificial Sequence
  Description of Artificial Sequence: Synthetic oligonucleotide
auaccgcccaagccugggg

SEQ ID NO: 155200 - RNA, 19 nt, Artificial Sequence
  Description of Artificial Sequence: Synthetic oligonucleotide
cuuccggcucuccagugac

SEQ ID NO: 155201 - RNA, 19 nt, Artificial Sequence
  Description of Artificial Sequence: Synthetic oligonucleotide
ggaugauuggcuggacugg

SEQ ID NO: 155202 - RNA, 19 nt, Artificial Sequence
  Description of Artificial Sequence: Synthetic oligonucleotide
acgaacauuugaauacaga

SEQ ID NO: 155203 - RNA, 19 nt, Artificial Sequence
  Description of Artificial Sequence: Synthetic oligonucleotide
ucauuggaauggaguggcu

SEQ ID NO: 155204 - RNA, 19 nt, Artificial Sequence
  Description of Artificial Sequence: Synthetic oligonucleotide
ccgagccaaaccaagcagg

SEQ ID NO: 155205 - RNA, 19 nt, Artificial Sequence
  Description of Artificial Sequence: Synthetic oligonucleotide
gcuuaguggaggccaagcc

SEQ ID NO: 155206 - RNA, 19 nt, Artificial Sequence
  Description of Artificial Sequence: Synthetic oligonucleotide
uacgugcugucuugauuug

SEQ ID NO: 155207 - RNA, 19 nt, Artificial Sequence
  Description of Artificial Sequence: Synthetic oligonucleotide
gacugggcugaaauacuug

SEQ ID NO: 155208 - RNA, 19 nt, Artificial Sequence
  Description of Artificial Sequence: Synthetic oligonucleotide
acuugguugugaaccaacu

SEQ ID NO: 155209 - RNA, 19 nt, Artificial Sequence
  Description of Artificial Sequence: Synthetic oligonucleotide
ucgaacuaucagaguuaca

SEQ ID NO: 155210 - RNA, 19 nt, Artificial Sequence
  Description of Artificial Sequence: Synthetic oligonucleotide
uaucugcacuauauacaua

SEQ ID NO: 155211 - RNA, 19 nt, Artificial Sequence
  Description of Artificial Sequence: Synthetic oligonucleotide
guacgugcugucuugauuu

SEQ ID NO: 155212 - RNA, 19 nt, Artificial Sequence
  Description of Artificial Sequence: Synthetic oligonucleotide
caccaaacaacuugguugu

SEQ ID NO: 155213 - RNA, 19 nt, Artificial Sequence
  Description of Artificial Sequence: Synthetic oligonucleotide
caggaguaaagacaaagau

SEQ ID NO: 155214 - RNA, 19 nt, Artificial Sequence
  Description of Artificial Sequence: Synthetic oligonucleotide
uccccggucggguccauca

SEQ ID NO: 155215 - RNA, 19 nt, Artificial Sequence
  Description of Artificial Sequence: Synthetic oligonucleotide
caucgggugcagcucacug

SEQ ID NO: 155216 - RNA, 19 nt, Artificial Sequence
  Description of Artificial Sequence: Synthetic oligonucleotide
uggaauggaguggcuaaaa

SEQ ID NO: 155217 - RNA, 19 nt, Artificial Sequence
  Description of Artificial Sequence: Synthetic oligonucleotide
aagccuuaauaccgcccaa

SEQ ID NO: 155218 - RNA, 19 nt, Artificial Sequence
  Description of Artificial Sequence: Synthetic oligonucleotide
gaggccccugcaaagcaag

SEQ ID NO: 155219 - RNA, 19 nt, Artificial Sequence
  Description of Artificial Sequence: Synthetic oligonucleotide
uuccuuuaggauggaggcu

SEQ ID NO: 155220 - RNA, 19 nt, Artificial Sequence
  Description of Artificial Sequence: Synthetic oligonucleotide
auaugucacuguauaaaua

SEQ ID NO: 155221 - RNA, 19 nt, Artificial Sequence
  Description of Artificial Sequence: Synthetic oligonucleotide
aggccgagccaaaccaagc

SEQ ID NO: 155222 - RNA, 19 nt, Artificial Sequence
  Description of Artificial Sequence: Synthetic oligonucleotide
agugcucgaugccacccgu

SEQ ID NO: 155223 - RNA, 19 nt, Artificial Sequence
  Description of Artificial Sequence: Synthetic oligonucleotide
gccuuaauaccgcccaagc

SEQ ID NO: 155224 - RNA, 19 nt, Artificial Sequence
  Description of Artificial Sequence: Synthetic oligonucleotide
acccaaggucaccaaacaa

SEQ ID NO: 155225 - RNA, 19 nt, Artificial Sequence
  Description of Artificial Sequence: Synthetic oligonucleotide
ggugguacgugcugucuug

SEQ ID NO: 155226 - RNA, 19 nt, Artificial Sequence
  Description of Artificial Sequence: Synthetic oligonucleotide
acuaucagaguuacauuuu

SEQ ID NO: 155227 - RNA, 19 nt, Artificial Sequence
  Description of Artificial Sequence: Synthetic oligonucleotide
aacccgcguuuccuguuca

SEQ ID NO: 155228 - RNA, 19 nt, Artificial Sequence
  Description of Artificial Sequence: Synthetic oligonucleotide
ugauuacguuguucuugga

SEQ ID NO: 155229 - RNA, 19 nt, Artificial Sequence
  Description of Artificial Sequence: Synthetic oligonucleotide
ggucggaaauccaagccug

SEQ ID NO: 155230 - RNA, 19 nt, Artificial Sequence
  Description of Artificial Sequence: Synthetic oligonucleotide
ugugcagcgcauggguaca

SEQ ID NO: 155231 - RNA, 19 nt, Artificial Sequence
  Description of Artificial Sequence: Synthetic oligonucleotide
cucaguaagcagaggugga

SEQ ID NO: 155232 - RNA, 19 nt, Artificial Sequence
  Description of Artificial Sequence: Synthetic oligonucleotide
agcaugaaaucugccucug

SEQ ID NO: 155233 - RNA, 19 nt, Artificial Sequence
  Description of Artificial Sequence: Synthetic oligonucleotide
auauuccgauugauuucac

SEQ ID NO: 155234 - RNA, 19 nt, Artificial Sequence
  Description of Artificial Sequence: Synthetic oligonucleotide
cugguuggacagcagguga

SEQ ID NO: 155235 - RNA, 19 nt, Artificial Sequence
  Description of Artificial Sequence: Synthetic oligonucleotide
gaguugggcaaaagggaca

SEQ ID NO: 155236 - RNA, 19 nt, Artificial Sequence
  Description of Artificial Sequence: Synthetic oligonucleotide
aaacaacaccaagccuucu

SEQ ID NO: 155237 - RNA, 19 nt, Artificial Sequence
  Description of Artificial Sequence: Synthetic oligonucleotide
auuuaagaguugggcaaaa

SEQ ID NO: 155238 - RNA, 19 nt, Artificial Sequence
  Description of Artificial Sequence: Synthetic oligonucleotide
agccaucgggugcagcuca

SEQ ID NO: 155239 - RNA, 19 nt, Artificial Sequence
  Description of Artificial Sequence: Synthetic oligonucleotide
uuggaauggaguggcuaaa

SEQ ID NO: 155240 - RNA, 19 nt, Artificial Sequence
  Description of Artificial Sequence: Synthetic oligonucleotide
ggggaucguggcuaggccc

SEQ ID NO: 155241 - RNA, 19 nt, Artificial Sequence
  Description of Artificial Sequence: Synthetic oligonucleotide
gagcauuaacacaguaaaa

SEQ ID NO: 155242 - RNA, 19 nt, Artificial Sequence
  Description of Artificial Sequence: Synthetic oligonucleotide
gagaaagcuucggggaaga

SEQ ID NO: 155243 - RNA, 19 nt, Artificial Sequence
  Description of Artificial Sequence: Synthetic oligonucleotide
uagcuggaugugacuauua

SEQ ID NO: 155244 - RNA, 19 nt, Artificial Sequence
  Description of Artificial Sequence: Synthetic oligonucleotide
ucccgcuuuauggucacau

SEQ ID NO: 155245 - RNA, 19 nt, Artificial Sequence
  Description of Artificial Sequence: Synthetic oligonucleotide
ggaguggcuaaaacaacac

SEQ ID NO: 155246 - RNA, 19 nt, Artificial Sequence
  Description of Artificial Sequence: Synthetic oligonucleotide
gucuauccaguuccauuuc

SEQ ID NO: 155247 - RNA, 19 nt, Artificial Sequence
  Description of Artificial Sequence: Synthetic oligonucleotide
guacaagccaucgggugca

SEQ ID NO: 155248 - RNA, 19 nt, Artificial Sequence
  Description of Artificial Sequence: Synthetic oligonucleotide
gagucuauccaguuccauu

SEQ ID NO: 155249 - RNA, 19 nt, Artificial Sequence
  Description of Artificial Sequence: Synthetic oligonucleotide
cugagaaagcuucggggaa

SEQ ID NO: 155250 - RNA, 19 nt, Artificial Sequence
  Description of Artificial Sequence: Synthetic oligonucleotide
ugagucuauccaguuccau

SEQ ID NO: 155251 - RNA, 19 nt, Artificial Sequence
  Description of Artificial Sequence: Synthetic oligonucleotide
agcuuccuagauggguuag

SEQ ID NO: 155252 - RNA, 19 nt, Artificial Sequence
  Description of Artificial Sequence: Synthetic oligonucleotide
cuucccgcuuuauggucac

SEQ ID NO: 155253 - RNA, 19 nt, Artificial Sequence
  Description of Artificial Sequence: Synthetic oligonucleotide
acaguccuaugcagggauc

SEQ ID NO: 155254 - RNA, 19 nt, Artificial Sequence
  Description of Artificial Sequence: Synthetic oligonucleotide
cauuuaagaguugggcaaa

SEQ ID NO: 155255 - RNA, 19 nt, Artificial Sequence
  Description of Artificial Sequence: Synthetic oligonucleotide
ggcauugugaccugcccaa

SEQ ID NO: 155256 - RNA, 19 nt, Artificial Sequence
  Description of Artificial Sequence: Synthetic oligonucleotide
acccgcguuuccuguucac

SEQ ID NO: 155257 - RNA, 19 nt, Artificial Sequence
  Description of Artificial Sequence: Synthetic oligonucleotide
gucggaaauccaagccugc

SEQ ID NO: 155258 - RNA, 19 nt, Artificial Sequence
  Description of Artificial Sequence: Synthetic oligonucleotide
gcagcgcauggguacaagc

SEQ ID NO: 155259 - RNA, 19 nt, Artificial Sequence
  Description of Artificial Sequence: Synthetic oligonucleotide
ugcagcgcauggguacaag

SEQ ID NO: 155260 - RNA, 19 nt, Artificial Sequence
  Description of Artificial Sequence: Synthetic oligonucleotide
ccuagacagggaauguguc

SEQ ID NO: 155261 - RNA, 19 nt, Artificial Sequence
  Description of Artificial Sequence: Synthetic oligonucleotide
caacaggguucucucuguc

SEQ ID NO: 155262 - RNA, 19 nt, Artificial Sequence
  Description of Artificial Sequence: Synthetic oligonucleotide
caugauuucaaggccgagu

SEQ ID NO: 155263 - RNA, 19 nt, Artificial Sequence
  Description of Artificial Sequence: Synthetic oligonucleotide
ccuagauggguuagacaac

SEQ ID NO: 155264 - RNA, 19 nt, Artificial Sequence
  Description of Artificial Sequence: Synthetic oligonucleotide
gccugucuggagcucaccc

SEQ ID NO: 155265 - RNA, 19 nt, Artificial Sequence
  Description of Artificial Sequence: Synthetic oligonucleotide
cagacaccucaccccagug

SEQ ID NO: 155266 - RNA, 19 nt, Artificial Sequence
  Description of Artificial Sequence: Synthetic oligonucleotide
ggcacuacaggucggaaau

SEQ ID NO: 155267 - RNA, 19 nt, Artificial Sequence
  Description of Artificial Sequence: Synthetic oligonucleotide
ugaacccgcguuuccuguu

SEQ ID NO: 155268 - RNA, 19 nt, Artificial Sequence
  Description of Artificial Sequence: Synthetic oligonucleotide
gugaccugcccaauagaga

SEQ ID NO: 155269 - RNA, 19 nt, Artificial Sequence
  Description of Artificial Sequence: Synthetic oligonucleotide
cagagaccccaagccaggg

SEQ ID NO: 155270 - RNA, 19 nt, Artificial Sequence
  Description of Artificial Sequence: Synthetic oligonucleotide
cuaggcccaggggaaaauc

SEQ ID NO: 155271 - RNA, 19 nt, Artificial Sequence
  Description of Artificial Sequence: Synthetic oligonucleotide
cauuggaauggaguggcua

SEQ ID NO: 155272 - RNA, 19 nt, Artificial Sequence
  Description of Artificial Sequence: Synthetic oligonucleotide
ugguacgugcugucuugau

SEQ ID NO: 155273 - RNA, 19 nt, Artificial Sequence
  Description of Artificial Sequence: Synthetic oligonucleotide
ggaguuucaguagaagccu

SEQ ID NO: 155274 - RNA, 19 nt, Artificial Sequence
  Description of Artificial Sequence: Synthetic oligonucleotide
ggaacgaacugucuccagu

SEQ ID NO: 155275 - RNA, 19 nt, Artificial Sequence
  Description of Artificial Sequence: Synthetic oligonucleotide
ucgaugccacccguucaug

SEQ ID NO: 155276 - RNA, 19 nt, Artificial Sequence
  Description of Artificial Sequence: Synthetic oligonucleotide
aggaucugcacugggcaua

SEQ ID NO: 155277 - RNA, 19 nt, Artificial Sequence
  Description of Artificial Sequence: Synthetic oligonucleotide
cuacugguuggggccgggg

SEQ ID NO: 155278 - RNA, 19 nt, Artificial Sequence
  Description of Artificial Sequence: Synthetic oligonucleotide
uguguuggucugggcccag

SEQ ID NO: 155279 - RNA, 19 nt, Artificial Sequence
  Description of Artificial Sequence: Synthetic oligonucleotide
uggucaucugggccuuauu

SEQ ID NO: 155280 - RNA, 19 nt, Artificial Sequence
  Description of Artificial Sequence: Synthetic oligonucleotide
uacaagccaucgggugcag

SEQ ID NO: 155281 - RNA, 19 nt, Artificial Sequence
  Description of Artificial Sequence: Synthetic oligonucleotide
accaaacaacuugguugug

SEQ ID NO: 155282 - RNA, 19 nt, Artificial Sequence
  Description of Artificial Sequence: Synthetic oligonucleotide
gggccuuauugcacugugg

SEQ ID NO: 155283 - RNA, 19 nt, Artificial Sequence
  Description of Artificial Sequence: Synthetic oligonucleotide
ggcuggacugggaaagcgc

SEQ ID NO: 155284 - RNA, 19 nt, Artificial Sequence
  Description of Artificial Sequence: Synthetic oligonucleotide
cgaacuaucagaguuacau

SEQ ID NO: 155285 - RNA, 19 nt, Artificial Sequence
  Description of Artificial Sequence: Synthetic oligonucleotide
caacaggggaucguggcua

SEQ ID NO: 155286 - RNA, 19 nt, Artificial Sequence
  Description of Artificial Sequence: Synthetic oligonucleotide
gaagagcuauccugaucau

SEQ ID NO: 155287 - RNA, 19 nt, Artificial Sequence
  Description of Artificial Sequence: Synthetic oligonucleotide
ggaggcaaguuguuugagu

SEQ ID NO: 155288 - RNA, 19 nt, Artificial Sequence
  Description of Artificial Sequence: Synthetic oligonucleotide
gugcuuaguggaggccaag

SEQ ID NO: 155289 - RNA, 19 nt, Artificial Sequence
  Description of Artificial Sequence: Synthetic oligonucleotide
ggaagguaauuaaagccau

SEQ ID NO: 155290 - RNA, 19 nt, Artificial Sequence
  Description of Artificial Sequence: Synthetic oligonucleotide
ccugaauagccuuuaguau

SEQ ID NO: 155291 - RNA, 19 nt, Artificial Sequence
  Description of Artificial Sequence: Synthetic oligonucleotide
ccaaacaacuugguuguga

SEQ ID NO: 155292 - RNA, 19 nt, Artificial Sequence
  Description of Artificial Sequence: Synthetic oligonucleotide
cggcaugaguauaugucac

SEQ ID NO: 155293 - RNA, 19 nt, Artificial Sequence
  Description of Artificial Sequence: Synthetic oligonucleotide
cgagucaguagcuucucca

SEQ ID NO: 155294 - RNA, 19 nt, Artificial Sequence
  Description of Artificial Sequence: Synthetic oligonucleotide
gugaaccaacugccuuaac

SEQ ID NO: 155295 - RNA, 19 nt, Artificial Sequence
  Description of Artificial Sequence: Synthetic oligonucleotide
ugccagccgugcagcuacc

SEQ ID NO: 155296 - RNA, 19 nt, Artificial Sequence
  Description of Artificial Sequence: Synthetic oligonucleotide
cccaauagagaagggcauc

SEQ ID NO: 155297 - RNA, 19 nt, Artificial Sequence
  Description of Artificial Sequence: Synthetic oligonucleotide
gcaugaaaucugccucuga

SEQ ID NO: 155298 - RNA, 19 nt, Artificial Sequence
  Description of Artificial Sequence: Synthetic oligonucleotide
cagcuuccuagauggguua

SEQ ID NO: 155299 - RNA, 19 nt, Artificial Sequence
  Description of Artificial Sequence: Synthetic oligonucleotide
ccuguauaccugauaucaa

SEQ ID NO: 155300 - RNA, 19 nt, Artificial Sequence
  Description of Artificial Sequence: Synthetic oligonucleotide
caagcaggauggccuuaga

SEQ ID NO: 155301 - RNA, 19 nt, Artificial Sequence
  Description of Artificial Sequence: Synthetic oligonucleotide
ggccaagccaguggcaaca

SEQ ID NO: 155302 - RNA, 19 nt, Artificial Sequence
  Description of Artificial Sequence: Synthetic oligonucleotide
ccagccgugcagcuaccag

SEQ ID NO: 155303 - RNA, 19 nt, Artificial Sequence
  Description of Artificial Sequence: Synthetic oligonucleotide
gcucgaugccacccguuca

SEQ ID NO: 155304 - RNA, 19 nt, Artificial Sequence
  Description of Artificial Sequence: Synthetic oligonucleotide
guuguuugaguggcacccu

SEQ ID NO: 155305 - RNA, 19 nt, Artificial Sequence
  Description of Artificial Sequence: Synthetic oligonucleotide
gaggcacuacaggucggaa

SEQ ID NO: 155306 - RNA, 19 nt, Artificial Sequence
  Description of Artificial Sequence: Synthetic oligonucleotide
cauuugcgggaggcacuac

SEQ ID NO: 155307 - RNA, 19 nt, Artificial Sequence
  Description of Artificial Sequence: Synthetic oligonucleotide
gaguuucaguagaagccuu

SEQ ID NO: 155308 - RNA, 19 nt, Artificial Sequence
  Description of Artificial Sequence: Synthetic oligonucleotide
ccccauuugcgggaggcac

SEQ ID NO: 155309 - RNA, 19 nt, Artificial Sequence
  Description of Artificial Sequence: Synthetic oligonucleotide
ggggaugauuggcuggacu

SEQ ID NO: 155310 - RNA, 19 nt, Artificial Sequence
  Description of Artificial Sequence: Synthetic oligonucleotide
cgaacuccauucagucuug

SEQ ID NO: 155311 - RNA, 19 nt, Artificial Sequence
  Description of Artificial Sequence: Synthetic oligonucleotide
ccgaacuccauucagucuu

SEQ ID NO: 155312 - RNA, 19 nt, Artificial Sequence
  Description of Artificial Sequence: Synthetic oligonucleotide
cuggucccgaacauucuuu

SEQ ID NO: 155313 - RNA, 19 nt, Artificial Sequence
  Description of Artificial Sequence: Synthetic oligonucleotide
uucccgcuuuauggucaca

SEQ ID NO: 155314 - RNA, 19 nt, Artificial Sequence
  Description of Artificial Sequence: Synthetic oligonucleotide
caagguguaucugcacuau

SEQ ID NO: 155315 - RNA, 19 nt, Artificial Sequence
  Description of Artificial Sequence: Synthetic oligonucleotide
gaacuccauucagucuugu

SEQ ID NO: 155316 - RNA, 19 nt, Artificial Sequence
  Description of Artificial Sequence: Synthetic oligonucleotide
ggaucugcacugggcauaa

SEQ ID NO: 155317 - RNA, 19 nt, Artificial Sequence
  Description of Artificial Sequence: Synthetic oligonucleotide
gguugugaaccaacugccu

SEQ ID NO: 155318 - RNA, 19 nt, Artificial Sequence
  Description of Artificial Sequence: Synthetic oligonucleotide
cuagcuggaugugacuauu

SEQ ID NO: 155319 - RNA, 19 nt, Artificial Sequence
  Description of Artificial Sequence: Synthetic oligonucleotide
aagcuucggggaagagcua

SEQ ID NO: 155320 - RNA, 19 nt, Artificial Sequence
  Description of Artificial Sequence: Synthetic oligonucleotide
gcaaguuguuugaguggca

SEQ ID NO: 155321 - RNA, 19 nt, Artificial Sequence
  Description of Artificial Sequence: Synthetic oligonucleotide
gcugcuuagcuuggcucca

SEQ ID NO: 155322 - RNA, 19 nt, Artificial Sequence
  Description of Artificial Sequence: Synthetic oligonucleotide
ggguuagacaacaguccua

SEQ ID NO: 155323 - RNA, 19 nt, Artificial Sequence
  Description of Artificial Sequence: Synthetic oligonucleotide
ccggcucuccagugacagg

SEQ ID NO: 155324 - RNA, 19 nt, Artificial Sequence
  Description of Artificial Sequence: Synthetic oligonucleotide
caucucacuuugucuccau

SEQ ID NO: 155325 - RNA, 19 nt, Artificial Sequence
  Description of Artificial Sequence: Synthetic oligonucleotide
ccucacuagcuggauguga

SEQ ID NO: 155326 - RNA, 19 nt, Artificial Sequence
  Description of Artificial Sequence: Synthetic oligonucleotide
gcacuacaggucggaaauc

SEQ ID NO: 155327 - RNA, 19 nt, Artificial Sequence
  Description of Artificial Sequence: Synthetic oligonucleotide
aggccgaguuaaacaucau

SEQ ID NO: 155328 - RNA, 19 nt, Artificial Sequence
  Description of Artificial Sequence: Synthetic oligonucleotide
ggcccaggggaaaaucugu

SEQ ID NO: 155329 - RNA, 19 nt, Artificial Sequence
  Description of Artificial Sequence: Synthetic oligonucleotide
ggucaccaaacaacuuggu

SEQ ID NO: 155330 - RNA, 19 nt, Artificial Sequence
  Description of Artificial Sequence: Synthetic oligonucleotide
ccauaauauuccgauugau

SEQ ID NO: 155331 - RNA, 19 nt, Artificial Sequence
  Description of Artificial Sequence: Synthetic oligonucleotide
guggaccaugagggcugac

SEQ ID NO: 155332 - RNA, 19 nt, Artificial Sequence
  Description of Artificial Sequence: Synthetic oligonucleotide
gugcagcgcauggguacaa

SEQ ID NO: 155333 - RNA, 19 nt, Artificial Sequence
  Description of Artificial Sequence: Synthetic oligonucleotide
ggaagagguggggaugauu

SEQ ID NO: 155334 - RNA, 19 nt, Artificial Sequence
  Description of Artificial Sequence: Synthetic oligonucleotide
ccgcguuuccuguucacau

SEQ ID NO: 155335 - RNA, 19 nt, Artificial Sequence
  Description of Artificial Sequence: Synthetic oligonucleotide
ccggggaguuucaguagaa

SEQ ID NO: 155336 - RNA, 19 nt, Artificial Sequence
  Description of Artificial Sequence: Synthetic oligonucleotide
ccauuugcgggaggcacua

SEQ ID NO: 155337 - RNA, 19 nt, Artificial Sequence
  Description of Artificial Sequence: Synthetic oligonucleotide
cccgcguuuccuguucaca

SEQ ID NO: 155338 - RNA, 19 nt, Artificial Sequence
  Description of Artificial Sequence: Synthetic oligonucleotide
gggcauaaccauaggcauu

SEQ ID NO: 155339 - RNA, 19 nt, Artificial Sequence
  Description of Artificial Sequence: Synthetic oligonucleotide
gccaucgggugcagcucac

SEQ ID NO: 155340 - RNA, 19 nt, Artificial Sequence
  Description of Artificial Sequence: Synthetic oligonucleotide
gcgcauggguacaagccau

SEQ ID NO: 155341 - RNA, 19 nt, Artificial Sequence
  Description of Artificial Sequence: Synthetic oligonucleotide
ggaggcauguguggaccau

SEQ ID NO: 155342 - RNA, 19 nt, Artificial Sequence
  Description of Artificial Sequence: Synthetic oligonucleotide
gggaaagcgcaggguucaa

SEQ ID NO: 155343 - RNA, 19 nt, Artificial Sequence
  Description of Artificial Sequence: Synthetic oligonucleotide
ccggucggguccaucauuu

SEQ ID NO: 155344 - RNA, 19 nt, Artificial Sequence
  Description of Artificial Sequence: Synthetic oligonucleotide
gccagccgugcagcuacca

SEQ ID NO: 155345 - RNA, 19 nt, Artificial Sequence
  Description of Artificial Sequence: Synthetic oligonucleotide
ggguucucucugucaucau

SEQ ID NO: 155346 - RNA, 19 nt, Artificial Sequence
  Description of Artificial Sequence: Synthetic oligonucleotide
cugcuuagcuuggcuccau

SEQ ID NO: 155347 - RNA, 19 nt, Artificial Sequence
  Description of Artificial Sequence: Synthetic oligonucleotide
gugcucgaugccacccguu

SEQ ID NO: 155348 - RNA, 19 nt, Artificial Sequence
  Description of Artificial Sequence: Synthetic oligonucleotide
gcauugugaccugcccaau

SEQ ID NO: 155349 - RNA, 19 nt, Artificial Sequence
  Description of Artificial Sequence: Synthetic oligonucleotide
gugcagcuaccagcuggau

SEQ ID NO: 155350 - RNA, 19 nt, Artificial Sequence
  Description of Artificial Sequence: Synthetic oligonucleotide
cccggucggguccaucauu

SEQ ID NO: 155351 - RNA, 19 nt, Artificial Sequence
  Description of Artificial Sequence: Synthetic oligonucleotide
ccaucgggugcagcucacu

SEQ ID NO: 155352 - RNA, 19 nt, Artificial Sequence
  Description of Artificial Sequence: Synthetic oligonucleotide
cggucggguccaucauuua

SEQ ID NO: 155353 - RNA, 19 nt, Artificial Sequence
  Description of Artificial Sequence: Synthetic oligonucleotide
ccccggucggguccaucau

SEQ ID NO: 155354 - RNA, 19 nt, Artificial Sequence
  Description of Artificial Sequence: Synthetic oligonucleotide
aacaccagugcuuagaugc

SEQ ID NO: 155355 - RNA, 19 nt, Artificial Sequence
  Description of Artificial Sequence: Synthetic oligonucleotide
uuugacauaacaucgauac

SEQ ID NO: 155356 - RNA, 19 nt, Artificial Sequence
  Description of Artificial Sequence: Synthetic oligonucleotide
auauagaggacauauuuac

SEQ ID NO: 155357 - RNA, 19 nt, Artificial Sequence
  Description of Artificial Sequence: Synthetic oligonucleotide
gauagagucaacuggagcc

SEQ ID NO: 155358 - RNA, 19 nt, Artificial Sequence
  Description of Artificial Sequence: Synthetic oligonucleotide
aauugcucggaauguaacc

SEQ ID NO: 155359 - RNA, 19 nt, Artificial Sequence
  Description of Artificial Sequence: Synthetic oligonucleotide
aaugcgugaacucagcuca

SEQ ID NO: 155360 - RNA, 19 nt, Artificial Sequence
  Description of Artificial Sequence: Synthetic oligonucleotide
uuugcgaauuuuauaaugc

SEQ ID NO: 155361 - RNA, 19 nt, Artificial Sequence
  Description of Artificial Sequence: Synthetic oligonucleotide
aaacgcaacccucuugugc

SEQ ID NO: 155362 - RNA, 19 nt, Artificial Sequence
  Description of Artificial Sequence: Synthetic oligonucleotide
uccgugacgauguauaugg

SEQ ID NO: 155363 - RNA, 19 nt, Artificial Sequence
  Description of Artificial Sequence: Synthetic oligonucleotide
aaguuugcgaauuuuauaa

SEQ ID NO: 155364 - RNA, 19 nt, Artificial Sequence
  Description of Artificial Sequence: Synthetic oligonucleotide
aauaggaauugauuuguug

SEQ ID NO: 155365 - RNA, 19 nt, Artificial Sequence
  Description of Artificial Sequence: Synthetic oligonucleotide
ugcuauauggguuuuagac

SEQ ID NO: 155366 - RNA, 19 nt, Artificial Sequence
  Description of Artificial Sequence: Synthetic oligonucleotide
gaaacgggcacuaaaaugc

SEQ ID NO: 155367 - RNA, 19 nt, Artificial Sequence
  Description of Artificial Sequence: Synthetic oligonucleotide
aaaugcgugaacucagcuc

SEQ ID NO: 155368 - RNA, 19 nt, Artificial Sequence
  Description of Artificial Sequence: Synthetic oligonucleotide
aguuaaaacacaaaccauc

SEQ ID NO: 155369 - RNA, 19 nt, Artificial Sequence
  Description of Artificial Sequence: Synthetic oligonucleotide
auaggaauugauuuguugu

SEQ ID NO: 155370 - RNA, 19 nt, Artificial Sequence
  Description of Artificial Sequence: Synthetic oligonucleotide
auaacaucgauacaaugca

SEQ ID NO: 155371 - RNA, 19 nt, Artificial Sequence
  Description of Artificial Sequence: Synthetic oligonucleotide
gauauaauucaugcgcucg

SEQ ID NO: 155372 - RNA, 19 nt, Artificial Sequence
  Description of Artificial Sequence: Synthetic oligonucleotide
auaucuauacagcaagucu

SEQ ID NO: 155373 - RNA, 19 nt, Artificial Sequence
  Description of Artificial Sequence: Synthetic oligonucleotide
ugacauaacaucgauacaa

SEQ ID NO: 155374 - RNA, 19 nt, Artificial Sequence
  Description of Artificial Sequence: Synthetic oligonucleotide
aaguucgccggcuucagag

SEQ ID NO: 155375 - RNA, 19 nt, Artificial Sequence
  Description of Artificial Sequence: Synthetic oligonucleotide
aauuaguccauuccccacu

SEQ ID NO: 155376 - RNA, 19 nt, Artificial Sequence
  Description of Artificial Sequence: Synthetic oligonucleotide
uggaguacgcucgacaugg

SEQ ID NO: 155377 - RNA, 19 nt, Artificial Sequence
  Description of Artificial Sequence: Synthetic oligonucleotide
acauauguaauucaagguu

SEQ ID NO: 155378 - RNA, 19 nt, Artificial Sequence
  Description of Artificial Sequence: Synthetic oligonucleotide
uuaagagucuuuauggcua

SEQ ID NO: 155379 - RNA, 19 nt, Artificial Sequence
  Description of Artificial Sequence: Synthetic oligonucleotide
ucauaucaucccaaucacg

SEQ ID NO: 155380 - RNA, 19 nt, Artificial Sequence
  Description of Artificial Sequence: Synthetic oligonucleotide
uauauagaggacauauuua

SEQ ID NO: 155381 - RNA, 19 nt, Artificial Sequence
  Description of Artificial Sequence: Synthetic oligonucleotide
aaucacauaggauuugcuu

SEQ ID NO: 155382 - RNA, 19 nt, Artificial Sequence
  Description of Artificial Sequence: Synthetic oligonucleotide
ucgcggauaagaaagguac

SEQ ID NO: 155383 - RNA, 19 nt, Artificial Sequence
  Description of Artificial Sequence: Synthetic oligonucleotide
cuauauggguuuuagacca

SEQ ID NO: 155384 - RNA, 19 nt, Artificial Sequence
  Description of Artificial Sequence: Synthetic oligonucleotide
cuaaaaugcgugaacucag

SEQ ID NO: 155385 - RNA, 19 nt, Artificial Sequence
  Description of Artificial Sequence: Synthetic oligonucleotide
uaauucaugcgcucgauau

SEQ ID NO: 155386 - RNA, 19 nt, Artificial Sequence
  Description of Artificial Sequence: Synthetic oligonucleotide
guuugcgaauuuuauaaug

SEQ ID NO: 155387 - RNA, 19 nt, Artificial Sequence
  Description of Artificial Sequence: Synthetic oligonucleotide
uuaguuugaaucaggugaa

SEQ ID NO: 155388 - RNA, 19 nt, Artificial Sequence
  Description of Artificial Sequence: Synthetic oligonucleotide
uggauauaauucaugcgcu

SEQ ID NO: 155389 - RNA, 19 nt, Artificial Sequence
  Description of Artificial Sequence: Synthetic oligonucleotide
auaagaaagguaccucuug

SEQ ID NO: 155390 - RNA, 19 nt, Artificial Sequence
  Description of Artificial Sequence: Synthetic oligonucleotide
ugugccuggcuuaagaguc

SEQ ID NO: 155391 - RNA, 19 nt, Artificial Sequence
  Description of Artificial Sequence: Synthetic oligonucleotide
caugcgcucgauauaagcc

SEQ ID NO: 155392 - RNA, 19 nt, Artificial Sequence
  Description of Artificial Sequence: Synthetic oligonucleotide
aaucaaccgagccaaucca

SEQ ID NO: 155393 - RNA, 19 nt, Artificial Sequence
  Description of Artificial Sequence: Synthetic oligonucleotide
ucggaauguaaccaguuuc

SEQ ID NO: 155394 - RNA, 19 nt, Artificial Sequence
  Description of Artificial Sequence: Synthetic oligonucleotide
uuaagugugcucacucuca

SEQ ID NO: 155395 - RNA, 19 nt, Artificial Sequence
  Description of Artificial Sequence: Synthetic oligonucleotide
caaucaaccgagccaaucc

SEQ ID NO: 155396 - RNA, 19 nt, Artificial Sequence
  Description of Artificial Sequence: Synthetic oligonucleotide
ugugaguaagauuccaaaa

SEQ ID NO: 155397 - RNA, 19 nt, Artificial Sequence
  Description of Artificial Sequence: Synthetic oligonucleotide
ucaagucgcaagaacagau

SEQ ID NO: 155398 - RNA, 19 nt, Artificial Sequence
  Description of Artificial Sequence: Synthetic oligonucleotide
ugcauaguuauugacugga

SEQ ID NO: 155399 - RNA, 19 nt, Artificial Sequence
  Description of Artificial Sequence: Synthetic oligonucleotide
aaaguuuaguaggcugccg

SEQ ID NO: 155400 - RNA, 19 nt, Artificial Sequence
  Description of Artificial Sequence: Synthetic oligonucleotide
aaagugaguaggcaccuuu

SEQ ID NO: 155401 - RNA, 19 nt, Artificial Sequence
  Description of Artificial Sequence: Synthetic oligonucleotide
guaauguugcacgagcugc

SEQ ID NO: 155402 - RNA, 19 nt, Artificial Sequence
  Description of Artificial Sequence: Synthetic oligonucleotide
aaccgagccaauccaaagu

SEQ ID NO: 155403 - RNA, 19 nt, Artificial Sequence
  Description of Artificial Sequence: Synthetic oligonucleotide
auugugccuggcuuaagag

SEQ ID NO: 155404 - RNA, 19 nt, Artificial Sequence
  Description of Artificial Sequence: Synthetic oligonucleotide
guacgcucgacauggagag

SEQ ID NO: 155405 - RNA, 19 nt, Artificial Sequence
  Description of Artificial Sequence: Synthetic oligonucleotide
ugaaaacgcaacccucuug

SEQ ID NO: 155406 - RNA, 19 nt, Artificial Sequence
  Description of Artificial Sequence: Synthetic oligonucleotide
acauaacaucgauacaaug

SEQ ID NO: 155407 - RNA, 19 nt, Artificial Sequence
  Description of Artificial Sequence: Synthetic oligonucleotide
aagguuuggcaauuucaga

SEQ ID NO: 155408 - RNA, 19 nt, Artificial Sequence
  Description of Artificial Sequence: Synthetic oligonucleotide
uuguguauauagaggacau

SEQ ID NO: 155409 - RNA, 19 nt, Artificial Sequence
  Description of Artificial Sequence: Synthetic oligonucleotide
agcucgugcagggagaugg

SEQ ID NO: 155410 - RNA, 19 nt, Artificial Sequence
  Description of Artificial Sequence: Synthetic oligonucleotide
ucauaucuauacagcaagu

SEQ ID NO: 155411 - RNA, 19 nt, Artificial Sequence
  Description of Artificial Sequence: Synthetic oligonucleotide
agaaacaacgagucacgug

SEQ ID NO: 155412 - RNA, 19 nt, Artificial Sequence
  Description of Artificial Sequence: Synthetic oligonucleotide
cacgguucugucuggaugc

SEQ ID NO: 155413 - RNA, 19 nt, Artificial Sequence
  Description of Artificial Sequence: Synthetic oligonucleotide
guaacuauguggccuuugc

SEQ ID NO: 155414 - RNA, 19 nt, Artificial Sequence
  Description of Artificial Sequence: Synthetic oligonucleotide
acucucgcggauaagaaag

SEQ ID NO: 155415 - RNA, 19 nt, Artificial Sequence
  Description of Artificial Sequence: Synthetic oligonucleotide
ucacgugcaacuucccaag

SEQ ID NO: 155416 - RNA, 19 nt, Artificial Sequence
  Description of Artificial Sequence: Synthetic oligonucleotide
agaacagaucacaguacgc

SEQ ID NO: 155417 - RNA, 19 nt, Artificial Sequence
  Description of Artificial Sequence: Synthetic oligonucleotide
ucggccaaguuuuccaaag

SEQ ID NO: 155418 - RNA, 19 nt, Artificial Sequence
  Description of Artificial Sequence: Synthetic oligonucleotide
gcuauauggguuuuagacc

SEQ ID NO: 155419 - RNA, 19 nt, Artificial Sequence
  Description of Artificial Sequence: Synthetic oligonucleotide
uauuuacguauauauucau

SEQ ID NO: 155420 - RNA, 19 nt, Artificial Sequence
  Description of Artificial Sequence: Synthetic oligonucleotide
gaaaacgcaacccucuugu

SEQ ID NO: 155421 - RNA, 19 nt, Artificial Sequence
  Description of Artificial Sequence: Synthetic oligonucleotide
cacgggagcagauauuuac

SEQ ID NO: 155422 - RNA, 19 nt, Artificial Sequence
  Description of Artificial Sequence: Synthetic oligonucleotide
ucgcaagaacagaucacag

SEQ ID NO: 155423 - RNA, 19 nt, Artificial Sequence
  Description of Artificial Sequence: Synthetic oligonucleotide
uguauauagaggacauauu

SEQ ID NO: 155424 - RNA, 19 nt, Artificial Sequence
  Description of Artificial Sequence: Synthetic oligonucleotide
aguacgcuggagcgaaacg

SEQ ID NO: 155425 - RNA, 19 nt, Artificial Sequence
  Description of Artificial Sequence: Synthetic oligonucleotide
uaauguugcacgagcugcu

SEQ ID NO: 155426 - RNA, 19 nt, Artificial Sequence
  Description of Artificial Sequence: Synthetic oligonucleotide
aaacgggcacuaaaaugcg

SEQ ID NO: 155427 - RNA, 19 nt, Artificial Sequence
  Description of Artificial Sequence: Synthetic oligonucleotide
aaaacgcaacccucuugug

SEQ ID NO: 155428 - RNA, 19 nt, Artificial Sequence
  Description of Artificial Sequence: Synthetic oligonucleotide
uccgaacuguucaaaauuu

SEQ ID NO: 155429 - RNA, 19 nt, Artificial Sequence
  Description of Artificial Sequence: Synthetic oligonucleotide
aguuuaguaggcugccgug

SEQ ID NO: 155430 - RNA, 19 nt, Artificial Sequence
  Description of Artificial Sequence: Synthetic oligonucleotide
gcgaauuuuauaaugcuug

SEQ ID NO: 155431 - RNA, 19 nt, Artificial Sequence
  Description of Artificial Sequence: Synthetic oligonucleotide
gguugguacaaacagcaac

SEQ ID NO: 155432 - RNA, 19 nt, Artificial Sequence
  Description of Artificial Sequence: Synthetic oligonucleotide
uacuccgugacgauguaua

SEQ ID NO: 155433 - RNA, 19 nt, Artificial Sequence
  Description of Artificial Sequence: Synthetic oligonucleotide
cauaucuauacagcaaguc

SEQ ID NO: 155434 - RNA, 19 nt, Artificial Sequence
  Description of Artificial Sequence: Synthetic oligonucleotide
auugcucggaauguaacca

SEQ ID NO: 155435 - RNA, 19 nt, Artificial Sequence
  Description of Artificial Sequence: Synthetic oligonucleotide
uguugcacgagcugcugga

SEQ ID NO: 155436 - RNA, 19 nt, Artificial Sequence
  Description of Artificial Sequence: Synthetic oligonucleotide
aagucuaugcggucuccgu

SEQ ID NO: 155437 - RNA, 19 nt, Artificial Sequence
  Description of Artificial Sequence: Synthetic oligonucleotide
ccggcuuucaaaauaacac

SEQ ID NO: 155438 - RNA, 19 nt, Artificial Sequence
  Description of Artificial Sequence: Synthetic oligonucleotide
acaacgagucacgugcaac

SEQ ID NO: 155439 - RNA, 19 nt, Artificial Sequence
  Description of Artificial Sequence: Synthetic oligonucleotide
caaauuaguccauucccca

SEQ ID NO: 155440 - RNA, 19 nt, Artificial Sequence
  Description of Artificial Sequence: Synthetic oligonucleotide
aacaucgauacaaugcauu

SEQ ID NO: 155441 - RNA, 19 nt, Artificial Sequence
  Description of Artificial Sequence: Synthetic oligonucleotide
ucagcgaaacaccccugcc

SEQ ID NO: 155442 - RNA, 19 nt, Artificial Sequence
  Description of Artificial Sequence: Synthetic oligonucleotide
uugcucggaauguaaccag

SEQ ID NO: 155443 - RNA, 19 nt, Artificial Sequence
  Description of Artificial Sequence: Synthetic oligonucleotide
augcgcucgauauaagcca

SEQ ID NO: 155444 - RNA, 19 nt, Artificial Sequence
  Description of Artificial Sequence: Synthetic oligonucleotide
acaucgauacaaugcauuu

SEQ ID NO: 155445 - RNA, 19 nt, Artificial Sequence
  Description of Artificial Sequence: Synthetic oligonucleotide
acuggaguacgcucgacau

SEQ ID NO: 155446 - RNA, 19 nt, Artificial Sequence
  Description of Artificial Sequence: Synthetic oligonucleotide
acggauggaaagugaguag

SEQ ID NO: 155447 - RNA, 19 nt, Artificial Sequence
  Description of Artificial Sequence: Synthetic oligonucleotide
uagaggacauauuuacgua

SEQ ID NO: 155448 - RNA, 19 nt, Artificial Sequence
  Description of Artificial Sequence: Synthetic oligonucleotide
gaguuucaaacugggcccg

SEQ ID NO: 155449 - RNA, 19 nt, Artificial Sequence
  Description of Artificial Sequence: Synthetic oligonucleotide
ucaaccgagccaauccaaa

SEQ ID NO: 155450 - RNA, 19 nt, Artificial Sequence
  Description of Artificial Sequence: Synthetic oligonucleotide
uuauugacuggaguacgcu

SEQ ID NO: 155451 - RNA, 19 nt, Artificial Sequence
  Description of Artificial Sequence: Synthetic oligonucleotide
uaggauuguuggcacggga

SEQ ID NO: 155452 - RNA, 19 nt, Artificial Sequence
  Description of Artificial Sequence: Synthetic oligonucleotide
acgagucacgugcaacuuc

SEQ ID NO: 155453 - RNA, 19 nt, Artificial Sequence
  Description of Artificial Sequence: Synthetic oligonucleotide
acgcucgacauggagaguc

SEQ ID NO: 155454 - RNA, 19 nt, Artificial Sequence
  Description of Artificial Sequence: Synthetic oligonucleotide
guuauugacuggaguacgc

SEQ ID NO: 155455 - RNA, 19 nt, Artificial Sequence
  Description of Artificial Sequence: Synthetic oligonucleotide
gaguacgcucgacauggag

SEQ ID NO: 155456 - RNA, 19 nt, Artificial Sequence
  Description of Artificial Sequence: Synthetic oligonucleotide
ucgauacaaugcauuucca

SEQ ID NO: 155457 - RNA, 19 nt, Artificial Sequence
  Description of Artificial Sequence: Synthetic oligonucleotide
uaacaucgauacaaugcau

SEQ ID NO: 155458 - RNA, 19 nt, Artificial Sequence
  Description of Artificial Sequence: Synthetic oligonucleotide
gugcauaguuauugacugg

SEQ ID NO: 155459 - RNA, 19 nt, Artificial Sequence
  Description of Artificial Sequence: Synthetic oligonucleotide
aguuugcgaauuuuauaau

SEQ ID NO: 155460 - RNA, 19 nt, Artificial Sequence
  Description of Artificial Sequence: Synthetic oligonucleotide
aauguugcacgagcugcug

SEQ ID NO: 155461 - RNA, 19 nt, Artificial Sequence
  Description of Artificial Sequence: Synthetic oligonucleotide
uggcuacggaacuggaagc

SEQ ID NO: 155462 - RNA, 19 nt, Artificial Sequence
  Description of Artificial Sequence: Synthetic oligonucleotide
ugucuucaaucaaccgagc

SEQ ID NO: 155463 - RNA, 19 nt, Artificial Sequence
  Description of Artificial Sequence: Synthetic oligonucleotide
ugcggucuccgucuugcag

SEQ ID NO: 155464 - RNA, 19 nt, Artificial Sequence
  Description of Artificial Sequence: Synthetic oligonucleotide
agucgcaagaacagaucac

SEQ ID NO: 155465 - RNA, 19 nt, Artificial Sequence
  Description of Artificial Sequence: Synthetic oligonucleotide
aaugugguuacaagauuua

SEQ ID NO: 155466 - RNA, 19 nt, Artificial Sequence
  Description of Artificial Sequence: Synthetic oligonucleotide
ggauagagucaacuggagc

SEQ ID NO: 155467 - RNA, 19 nt, Artificial Sequence
  Description of Artificial Sequence: Synthetic oligonucleotide
cagcgaaacaccccugccc

SEQ ID NO: 155468 - RNA, 19 nt, Artificial Sequence
  Description of Artificial Sequence: Synthetic oligonucleotide
ugcucggaauguaaccagu

SEQ ID NO: 155469 - RNA, 19 nt, Artificial Sequence
  Description of Artificial Sequence: Synthetic oligonucleotide
uauguaauucaagguuggu

SEQ ID NO: 155470 - RNA, 19 nt, Artificial Sequence
  Description of Artificial Sequence: Synthetic oligonucleotide
aguacgcucgacauggaga

SEQ ID NO: 155471 - RNA, 19 nt, Artificial Sequence
  Description of Artificial Sequence: Synthetic oligonucleotide
guaaacucacaaauaaaua

SEQ ID NO: 155472 - RNA, 19 nt, Artificial Sequence
  Description of Artificial Sequence: Synthetic oligonucleotide
uuaguccauuccccacuag

SEQ ID NO: 155473 - RNA, 19 nt, Artificial Sequence
  Description of Artificial Sequence: Synthetic oligonucleotide
auagagucaacuggagcca

SEQ ID NO: 155474 - RNA, 19 nt, Artificial Sequence
  Description of Artificial Sequence: Synthetic oligonucleotide
cucucgcggauaagaaagg

SEQ ID NO: 155475 - RNA, 19 nt, Artificial Sequence
  Description of Artificial Sequence: Synthetic oligonucleotide
aacaacgagucacgugcaa

SEQ ID NO: 155476 - RNA, 19 nt, Artificial Sequence
  Description of Artificial Sequence: Synthetic oligonucleotide
caaucacggauggaaagug

SEQ ID NO: 155477 - RNA, 19 nt, Artificial Sequence
  Description of Artificial Sequence: Synthetic oligonucleotide
uucaugcgcucgauauaag

SEQ ID NO: 155478 - RNA, 19 nt, Artificial Sequence
  Description of Artificial Sequence: Synthetic oligonucleotide
agggccguggaaguucgcc

SEQ ID NO: 155479 - RNA, 19 nt, Artificial Sequence
  Description of Artificial Sequence: Synthetic oligonucleotide
ggcccuguaacuauguggc

SEQ ID NO: 155480 - RNA, 19 nt, Artificial Sequence
  Description of Artificial Sequence: Synthetic oligonucleotide
gacuggaguacgcucgaca

SEQ ID NO: 155481 - RNA, 19 nt, Artificial Sequence
  Description of Artificial Sequence: Synthetic oligonucleotide
acauuggaacacuuauuuu

SEQ ID NO: 155482 - RNA, 19 nt, Artificial Sequence
  Description of Artificial Sequence: Synthetic oligonucleotide
acaugcaaucugauccugg

SEQ ID NO: 155483 - RNA, 19 nt, Artificial Sequence
  Description of Artificial Sequence: Synthetic oligonucleotide
gcauucauaucuauacagc

SEQ ID NO: 155484 - RNA, 19 nt, Artificial Sequence
  Description of Artificial Sequence: Synthetic oligonucleotide
guguauauagaggacauau

SEQ ID NO: 155485 - RNA, 19 nt, Artificial Sequence
  Description of Artificial Sequence: Synthetic oligonucleotide
acgugcaacuucccaagca

SEQ ID NO: 155486 - RNA, 19 nt, Artificial Sequence
  Description of Artificial Sequence: Synthetic oligonucleotide
uuaagacuuuagaguugcu

SEQ ID NO: 155487 - RNA, 19 nt, Artificial Sequence
  Description of Artificial Sequence: Synthetic oligonucleotide
acauauuuacguauauauu

SEQ ID NO: 155488 - RNA, 19 nt, Artificial Sequence
  Description of Artificial Sequence: Synthetic oligonucleotide
augagggccguggaaguuc

SEQ ID NO: 155489 - RNA, 19 nt, Artificial Sequence
  Description of Artificial Sequence: Synthetic oligonucleotide
cugaguaauguugcacgag

SEQ ID NO: 155490 - RNA, 19 nt, Artificial Sequence
  Description of Artificial Sequence: Synthetic oligonucleotide
cuuuucggccaaguuuucc

SEQ ID NO: 155491 - RNA, 19 nt, Artificial Sequence
  Description of Artificial Sequence: Synthetic oligonucleotide
cugugaguaagauuccaaa

SEQ ID NO: 155492 - RNA, 19 nt, Artificial Sequence
  Description of Artificial Sequence: Synthetic oligonucleotide
guuguuaaacauauguaau

SEQ ID NO: 155493 - RNA, 19 nt, Artificial Sequence
  Description of Artificial Sequence: Synthetic oligonucleotide
caagucuaugcggucuccg

SEQ ID NO: 155494 - RNA, 19 nt, Artificial Sequence
  Description of Artificial Sequence: Synthetic oligonucleotide
cacggcguagagcugcacc

SEQ ID NO: 155495 - RNA, 19 nt, Artificial Sequence
  Description of Artificial Sequence: Synthetic oligonucleotide
gucacgugcaacuucccaa

SEQ ID NO: 155496 - RNA, 19 nt, Artificial Sequence
  Description of Artificial Sequence: Synthetic oligonucleotide
auuaguccauuccccacua

SEQ ID NO: 155497 - RNA, 19 nt, Artificial Sequence
  Description of Artificial Sequence: Synthetic oligonucleotide
ugcgugaacucagcucagg

SEQ ID NO: 155498 - RNA, 19 nt, Artificial Sequence
  Description of Artificial Sequence: Synthetic oligonucleotide
caaacaccuguccugaucu

SEQ ID NO: 155499 - RNA, 19 nt, Artificial Sequence
  Description of Artificial Sequence: Synthetic oligonucleotide
ugcgcucgauauaagccau

SEQ ID NO: 155500 - RNA, 19 nt, Artificial Sequence
  Description of Artificial Sequence: Synthetic oligonucleotide
gggaaaaucaugcuuugua

SEQ ID NO: 155501 - RNA, 19 nt, Artificial Sequence
  Description of Artificial Sequence: Synthetic oligonucleotide
ggcacuaaaaugcgugaac

SEQ ID NO: 155502 - RNA, 19 nt, Artificial Sequence
  Description of Artificial Sequence: Synthetic oligonucleotide
ugccgugacuacaaugcua

SEQ ID NO: 155503 - RNA, 19 nt, Artificial Sequence
  Description of Artificial Sequence: Synthetic oligonucleotide
accggcuuucaaaauaaca

SEQ ID NO: 155504 - RNA, 19 nt, Artificial Sequence
  Description of Artificial Sequence: Synthetic oligonucleotide
gcaaucuugcaaauuaguc

SEQ ID NO: 155505 - RNA, 19 nt, Artificial Sequence
  Description of Artificial Sequence: Synthetic oligonucleotide
cggaauguaaccaguuucc

SEQ ID NO: 155506 - RNA, 19 nt, Artificial Sequence
  Description of Artificial Sequence: Synthetic oligonucleotide
gaggccaccggcuuucaaa

SEQ ID NO: 155507 - RNA, 19 nt, Artificial Sequence
  Description of Artificial Sequence: Synthetic oligonucleotide
ucucgcggauaagaaaggu

SEQ ID NO: 155508 - RNA, 19 nt, Artificial Sequence
  Description of Artificial Sequence: Synthetic oligonucleotide
ggauauaauucaugcgcuc

SEQ ID NO: 155509 - RNA, 19 nt, Artificial Sequence
  Description of Artificial Sequence: Synthetic oligonucleotide
ucucggcaucuuuucggcc

SEQ ID NO: 155510 - RNA, 19 nt, Artificial Sequence
  Description of Artificial Sequence: Synthetic oligonucleotide
gaccgcagaucucugugga

SEQ ID NO: 155511 - RNA, 19 nt, Artificial Sequence
  Description of Artificial Sequence: Synthetic oligonucleotide
cuuugacauaacaucgaua

SEQ ID NO: 155512 - RNA, 19 nt, Artificial Sequence
  Description of Artificial Sequence: Synthetic oligonucleotide
cuguucgugcucacucccc

SEQ ID NO: 155513 - RNA, 19 nt, Artificial Sequence
  Description of Artificial Sequence: Synthetic oligonucleotide
cuaggauuguuggcacggg

SEQ ID NO: 155514 - RNA, 19 nt, Artificial Sequence
  Description of Artificial Sequence: Synthetic oligonucleotide
guuuaguaggcugccguga

SEQ ID NO: 155515 - RNA, 19 nt, Artificial Sequence
  Description of Artificial Sequence: Synthetic oligonucleotide
agcgaaacgggcacuaaaa

SEQ ID NO: 155516 - RNA, 19 nt, Artificial Sequence
  Description of Artificial Sequence: Synthetic oligonucleotide
ugucauuaaugagggccgu

SEQ ID NO: 155517 - RNA, 19 nt, Artificial Sequence
  Description of Artificial Sequence: Synthetic oligonucleotide
gcgugaacucagcucaggg

SEQ ID NO: 155518 - RNA, 19 nt, Artificial Sequence
  Description of Artificial Sequence: Synthetic oligonucleotide
aagguaccucuuggguuuc

SEQ ID NO: 155519 - RNA, 19 nt, Artificial Sequence
  Description of Artificial Sequence: Synthetic oligonucleotide
agacagaguuaaaaucaca

SEQ ID NO: 155520 - RNA, 19 nt, Artificial Sequence
  Description of Artificial Sequence: Synthetic oligonucleotide
uacggaacuggaagcuaau

SEQ ID NO: 155521 - RNA, 19 nt, Artificial Sequence
  Description of Artificial Sequence: Synthetic oligonucleotide
gugguuucacucucgcgga

SEQ ID NO: 155522 - RNA, 19 nt, Artificial Sequence
  Description of Artificial Sequence: Synthetic oligonucleotide
cuacggaacuggaagcuaa

SEQ ID NO: 155523 - RNA, 19 nt, Artificial Sequence
  Description of Artificial Sequence: Synthetic oligonucleotide
aguucgccggcuucagagu

SEQ ID NO: 155524 - RNA, 19 nt, Artificial Sequence
  Description of Artificial Sequence: Synthetic oligonucleotide
cgaaacgggcacuaaaaug

SEQ ID NO: 155525 - RNA, 19 nt, Artificial Sequence
  Description of Artificial Sequence: Synthetic oligonucleotide
aggccaccggcuuucaaaa

SEQ ID NO: 155526 - RNA, 19 nt, Artificial Sequence
  Description of Artificial Sequence: Synthetic oligonucleotide
ggcgguaaaguaguccucc

SEQ ID NO: 155527 - RNA, 19 nt, Artificial Sequence
  Description of Artificial Sequence: Synthetic oligonucleotide
aguuucaaacugggcccgg

SEQ ID NO: 155528 - RNA, 19 nt, Artificial Sequence
  Description of Artificial Sequence: Synthetic oligonucleotide
cuggaguacgcucgacaug

SEQ ID NO: 155529 - RNA, 19 nt, Artificial Sequence
  Description of Artificial Sequence: Synthetic oligonucleotide
gagcgaaacgggcacuaaa

SEQ ID NO: 155530 - RNA, 19 nt, Artificial Sequence
  Description of Artificial Sequence: Synthetic oligonucleotide
ucacaguacgcuggagcga

SEQ ID NO: 155531 - RNA, 19 nt, Artificial Sequence
  Description of Artificial Sequence: Synthetic oligonucleotide
augugguuacaagauuuau

SEQ ID NO: 155532 - RNA, 19 nt, Artificial Sequence
  Description of Artificial Sequence: Synthetic oligonucleotide
aaacgggaggccaccggcu

SEQ ID NO: 155533 - RNA, 19 nt, Artificial Sequence
  Description of Artificial Sequence: Synthetic oligonucleotide
ggccguggaaguucgccgg

SEQ ID NO: 155534 - RNA, 19 nt, Artificial Sequence
  Description of Artificial Sequence: Synthetic oligonucleotide
aacgagucacgugcaacuu

SEQ ID NO: 155535 - RNA, 19 nt, Artificial Sequence
  Description of Artificial Sequence: Synthetic oligonucleotide
ucggcaucuuuucggccaa

SEQ ID NO: 155536 - RNA, 19 nt, Artificial Sequence
  Description of Artificial Sequence: Synthetic oligonucleotide
gggccguggaaguucgccg

SEQ ID NO: 155537 - RNA, 19 nt, Artificial Sequence
  Description of Artificial Sequence: Synthetic oligonucleotide
gguuguucaugccugggua

SEQ ID NO: 155538 - RNA, 19 nt, Artificial Sequence
  Description of Artificial Sequence: Synthetic oligonucleotide
ucgacaagguuuggcaauu

SEQ ID NO: 155539 - RNA, 19 nt, Artificial Sequence
  Description of Artificial Sequence: Synthetic oligonucleotide
cuccgugacgauguauaug

SEQ ID NO: 155540 - RNA, 19 nt, Artificial Sequence
  Description of Artificial Sequence: Synthetic oligonucleotide
ucuaugcggucuccgucuu

SEQ ID NO: 155541 - RNA, 19 nt, Artificial Sequence
  Description of Artificial Sequence: Synthetic oligonucleotide
aguuugugggguacaacuu

SEQ ID NO: 155542 - RNA, 19 nt, Artificial Sequence
  Description of Artificial Sequence: Synthetic oligonucleotide
aguggaucaugagcucgug

SEQ ID NO: 155543 - RNA, 19 nt, Artificial Sequence
  Description of Artificial Sequence: Synthetic oligonucleotide
caguacgcuggagcgaaac

SEQ ID NO: 155544 - RNA, 19 nt, Artificial Sequence
  Description of Artificial Sequence: Synthetic oligonucleotide
gugaguaggcaccuuuggu

SEQ ID NO: 155545 - RNA, 19 nt, Artificial Sequence
  Description of Artificial Sequence: Synthetic oligonucleotide
ucgaaaguggggcgcucuu

SEQ ID NO: 155546 - RNA, 19 nt, Artificial Sequence
  Description of Artificial Sequence: Synthetic oligonucleotide
ugguuucacucucgcggau

SEQ ID NO: 155547 - RNA, 19 nt, Artificial Sequence
  Description of Artificial Sequence: Synthetic oligonucleotide
cagaucacaguacgcugga

SEQ ID NO: 155548 - RNA, 19 nt, Artificial Sequence
  Description of Artificial Sequence: Synthetic oligonucleotide
uccuuccgaacuguucaaa

SEQ ID NO: 155549 - RNA, 19 nt, Artificial Sequence
  Description of Artificial Sequence: Synthetic oligonucleotide
agguaccucuuggguuucc

SEQ ID NO: 155550 - RNA, 19 nt, Artificial Sequence
  Description of Artificial Sequence: Synthetic oligonucleotide
cacucucgcggauaagaaa

SEQ ID NO: 155551 - RNA, 19 nt, Artificial Sequence
  Description of Artificial Sequence: Synthetic oligonucleotide
agguaugacuggaacugaa

SEQ ID NO: 155552 - RNA, 19 nt, Artificial Sequence
  Description of Artificial Sequence: Synthetic oligonucleotide
uggagcgaaacgggcacua

SEQ ID NO: 155553 - RNA, 19 nt, Artificial Sequence
  Description of Artificial Sequence: Synthetic oligonucleotide
gucgacaagguuuggcaau

SEQ ID NO: 155554 - RNA, 19 nt, Artificial Sequence
  Description of Artificial Sequence: Synthetic oligonucleotide
ggaugcuuucacagaggag

SEQ ID NO: 155555 - RNA, 19 nt, Artificial Sequence
  Description of Artificial Sequence: Synthetic oligonucleotide
gcacuaaaaugcgugaacu

SEQ ID NO: 155556 - RNA, 19 nt, Artificial Sequence
  Description of Artificial Sequence: Synthetic oligonucleotide
ccgucuugcagcccucagg

SEQ ID NO: 155557 - RNA, 19 nt, Artificial Sequence
  Description of Artificial Sequence: Synthetic oligonucleotide
gugguagcacccauguugu

SEQ ID NO: 155558 - RNA, 19 nt, Artificial Sequence
  Description of Artificial Sequence: Synthetic oligonucleotide
cuaugcggucuccgucuug

SEQ ID NO: 155559 - RNA, 19 nt, Artificial Sequence
  Description of Artificial Sequence: Synthetic oligonucleotide
ggucacgccgaagcugggg

SEQ ID NO: 155560 - RNA, 19 nt, Artificial Sequence
  Description of Artificial Sequence: Synthetic oligonucleotide
agggaccugaaaagucaca

SEQ ID NO: 155561 - RNA, 19 nt, Artificial Sequence
  Description of Artificial Sequence: Synthetic oligonucleotide
cgcggauaagaaagguacc

SEQ ID NO: 155562 - RNA, 19 nt, Artificial Sequence
  Description of Artificial Sequence: Synthetic oligonucleotide
gcuuaagugugcucacucu

SEQ ID NO: 155563 - RNA, 19 nt, Artificial Sequence
  Description of Artificial Sequence: Synthetic oligonucleotide
gccaccggcuuucaaaaua

SEQ ID NO: 155564 - RNA, 19 nt, Artificial Sequence
  Description of Artificial Sequence: Synthetic oligonucleotide
augcgugaacucagcucag

SEQ ID NO: 155565 - RNA, 19 nt, Artificial Sequence
  Description of Artificial Sequence: Synthetic oligonucleotide
cagguaugacuggaacuga

SEQ ID NO: 155566 - RNA, 19 nt, Artificial Sequence
  Description of Artificial Sequence: Synthetic oligonucleotide
ccagaaguuugugggguac

SEQ ID NO: 155567 - RNA, 19 nt, Artificial Sequence
  Description of Artificial Sequence: Synthetic oligonucleotide
gcggauaagaaagguaccu

SEQ ID NO: 155568 - RNA, 19 nt, Artificial Sequence
  Description of Artificial Sequence: Synthetic oligonucleotide
aucaugcuuuguagaagua

SEQ ID NO: 155569 - RNA, 19 nt, Artificial Sequence
  Description of Artificial Sequence: Synthetic oligonucleotide
cuccuuccgaacuguucaa

SEQ ID NO: 155570 - RNA, 19 nt, Artificial Sequence
  Description of Artificial Sequence: Synthetic oligonucleotide
ccgugacgauguauauggg

SEQ ID NO: 155571 - RNA, 19 nt, Artificial Sequence
  Description of Artificial Sequence: Synthetic oligonucleotide
uacgcucgacauggagagu

SEQ ID NO: 155572 - RNA, 19 nt, Artificial Sequence
  Description of Artificial Sequence: Synthetic oligonucleotide
gcccuguaacuauguggcc

SEQ ID NO: 155573 - RNA, 19 nt, Artificial Sequence
  Description of Artificial Sequence: Synthetic oligonucleotide
gguaaaguacuaggauugu

SEQ ID NO: 155574 - RNA, 19 nt, Artificial Sequence
  Description of Artificial Sequence: Synthetic oligonucleotide
guuggcacgggagcagaua

SEQ ID NO: 155575 - RNA, 19 nt, Artificial Sequence
  Description of Artificial Sequence: Synthetic oligonucleotide
agguuuucaccgggcuggu

SEQ ID NO: 155576 - RNA, 19 nt, Artificial Sequence
  Description of Artificial Sequence: Synthetic oligonucleotide
gcaagucuaugcggucucc

SEQ ID NO: 155577 - RNA, 19 nt, Artificial Sequence
  Description of Artificial Sequence: Synthetic oligonucleotide
gcucuguggcgguaaagua

SEQ ID NO: 155578 - RNA, 19 nt, Artificial Sequence
  Description of Artificial Sequence: Synthetic oligonucleotide
ggcucuguggcgguaaagu

SEQ ID NO: 155579 - RNA, 19 nt, Artificial Sequence
  Description of Artificial Sequence: Synthetic oligonucleotide
cagaaacaacgagucacgu

SEQ ID NO: 155580 - RNA, 19 nt, Artificial Sequence
  Description of Artificial Sequence: Synthetic oligonucleotide
gccgugacuacaaugcuau

SEQ ID NO: 155581 - RNA, 19 nt, Artificial Sequence
  Description of Artificial Sequence: Synthetic oligonucleotide
cggauaagaaagguaccuc

SEQ ID NO: 155582 - RNA, 19 nt, Artificial Sequence
  Description of Artificial Sequence: Synthetic oligonucleotide
gguagggcacucuuccuuu

SEQ ID NO: 155583 - RNA, 19 nt, Artificial Sequence
  Description of Artificial Sequence: Synthetic oligonucleotide
gagcgggcuucccaccagu

SEQ ID NO: 155584 - RNA, 19 nt, Artificial Sequence
  Description of Artificial Sequence: Synthetic oligonucleotide
aggucacgccgaagcuggg

SEQ ID NO: 155585 - RNA, 19 nt, Artificial Sequence
  Description of Artificial Sequence: Synthetic oligonucleotide
gcgaaacgggcacuaaaau

SEQ ID NO: 155586 - RNA, 19 nt, Artificial Sequence
  Description of Artificial Sequence: Synthetic oligonucleotide
gguuucacucucgcggaua

SEQ ID NO: 155587 - RNA, 19 nt, Artificial Sequence
  Description of Artificial Sequence: Synthetic oligonucleotide
ccgguuguucaugccuggg

SEQ ID NO: 155588 - RNA, 19 nt, Artificial Sequence
  Description of Artificial Sequence: Synthetic oligonucleotide
ccuuugacauaacaucgau

SEQ ID NO: 155589 - RNA, 19 nt, Artificial Sequence
  Description of Artificial Sequence: Synthetic oligonucleotide
cucugggcccuguaacuau

SEQ ID NO: 155590 - RNA, 19 nt, Artificial Sequence
  Description of Artificial Sequence: Synthetic oligonucleotide
ggcuacggaacuggaagcu

SEQ ID NO: 155591 - RNA, 19 nt, Artificial Sequence
  Description of Artificial Sequence: Synthetic oligonucleotide
cugccgugacuacaaugcu

SEQ ID NO: 155592 - RNA, 19 nt, Artificial Sequence
  Description of Artificial Sequence: Synthetic oligonucleotide
ggcacgggagcagauauuu

SEQ ID NO: 155593 - RNA, 19 nt, Artificial Sequence
  Description of Artificial Sequence: Synthetic oligonucleotide
cucgaaaguggggcgcucu

SEQ ID NO: 155594 - RNA, 19 nt, Artificial Sequence
  Description of Artificial Sequence: Synthetic oligonucleotide
gagggccguggaaguucgc

SEQ ID NO: 155595 - RNA, 19 nt, Artificial Sequence
  Description of Artificial Sequence: Synthetic oligonucleotide
gcuacggaacuggaagcua

SEQ ID NO: 155596 - RNA, 19 nt, Artificial Sequence
  Description of Artificial Sequence: Synthetic oligonucleotide
cgcuggagcgaaacgggca

SEQ ID NO: 155597 - RNA, 19 nt, Artificial Sequence
  Description of Artificial Sequence: Synthetic oligonucleotide
ggagcgaaacgggcacuaa

SEQ ID NO: 155598 - RNA, 19 nt, Artificial Sequence
  Description of Artificial Sequence: Synthetic oligonucleotide
cccggguugugauguagua

SEQ ID NO: 155599 - RNA, 19 nt, Artificial Sequence
  Description of Artificial Sequence: Synthetic oligonucleotide
ggaguacgcucgacaugga

SEQ ID NO: 155600 - RNA, 19 nt, Artificial Sequence
  Description of Artificial Sequence: Synthetic oligonucleotide
cuggagcgaaacgggcacu

SEQ ID NO: 155601 - RNA, 19 nt, Artificial Sequence
  Description of Artificial Sequence: Synthetic oligonucleotide
gguuggccuuugacauaac

SEQ ID NO: 155602 - RNA, 19 nt, Artificial Sequence
  Description of Artificial Sequence: Synthetic oligonucleotide
ccccguugucaaggagcgg

SEQ ID NO: 155603 - RNA, 19 nt, Artificial Sequence
  Description of Artificial Sequence: Synthetic oligonucleotide
gcacgggagcagauauuua

SEQ ID NO: 155604 - RNA, 19 nt, Artificial Sequence
  Description of Artificial Sequence: Synthetic oligonucleotide
ggccaccggcuuucaaaau

SEQ ID NO: 155605 - RNA, 19 nt, Artificial Sequence
  Description of Artificial Sequence: Synthetic oligonucleotide
gcccggguugugauguagu

SEQ ID NO: 155606 - RNA, 19 nt, Artificial Sequence
  Description of Artificial Sequence: Synthetic oligonucleotide
ccggguugugauguaguau

SEQ ID NO: 155607 - RNA, 19 nt, Artificial Sequence
  Description of Artificial Sequence: Synthetic oligonucleotide
ccgugacuacaaugcuaua

SEQ ID NO: 155608 - RNA, 19 nt, Artificial Sequence
  Description of Artificial Sequence: Synthetic oligonucleotide
ccacggcguagagcugcac

SEQ ID NO: 155609 - RNA, 19 nt, Artificial Sequence
  Description of Artificial Sequence: Synthetic oligonucleotide
ccguggaaguucgccggcu

SEQ ID NO: 155610 - RNA, 19 nt, Artificial Sequence
  Description of Artificial Sequence: Synthetic oligonucleotide
cguggaaguucgccggcuu

SEQ ID NO: 155611 - RNA, 19 nt, Artificial Sequence
  Description of Artificial Sequence: Synthetic oligonucleotide
gcgcucgauauaagccauu

SEQ ID NO: 155612 - RNA, 19 nt, Artificial Sequence
  Description of Artificial Sequence: Synthetic oligonucleotide
uccgaaauaaauagaaucg

SEQ ID NO: 155613 - RNA, 19 nt, Artificial Sequence
  Description of Artificial Sequence: Synthetic oligonucleotide
aguguuagugcucaauggc

SEQ ID NO: 155614 - RNA, 19 nt, Artificial Sequence
  Description of Artificial Sequence: Synthetic oligonucleotide
aaucgguugugcuuguugg

SEQ ID NO: 155615 - RNA, 19 nt, Artificial Sequence
  Description of Artificial Sequence: Synthetic oligonucleotide
ugugaagcgugucucaccg

SEQ ID NO: 155616 - RNA, 19 nt, Artificial Sequence
  Description of Artificial Sequence: Synthetic oligonucleotide
agcaacaucccauucguac

SEQ ID NO: 155617 - RNA, 19 nt, Artificial Sequence
  Description of Artificial Sequence: Synthetic oligonucleotide
ugugcguguucaaaggugg

SEQ ID NO: 155618 - RNA, 19 nt, Artificial Sequence
  Description of Artificial Sequence: Synthetic oligonucleotide
uagauaggcuccaugaggc

SEQ ID NO: 155619 - RNA, 19 nt, Artificial Sequence
  Description of Artificial Sequence: Synthetic oligonucleotide
gucuacaccaaccagcccg

SEQ ID NO: 155620 - RNA, 19 nt, Artificial Sequence
  Description of Artificial Sequence: Synthetic oligonucleotide
aaaaugauaagagcugugu

SEQ ID NO: 155621 - RNA, 19 nt, Artificial Sequence
  Description of Artificial Sequence: Synthetic oligonucleotide
guagauaggcuccaugagg

SEQ ID NO: 155622 - RNA, 19 nt, Artificial Sequence
  Description of Artificial Sequence: Synthetic oligonucleotide
auuggcgggaucaaaauac

SEQ ID NO: 155623 - RNA, 19 nt, Artificial Sequence
  Description of Artificial Sequence: Synthetic oligonucleotide
uguuagugcucaauggcag

SEQ ID NO: 155624 - RNA, 19 nt, Artificial Sequence
  Description of Artificial Sequence: Synthetic oligonucleotide
auaucgguaagaauguugg

SEQ ID NO: 155625 - RNA, 19 nt, Artificial Sequence
  Description of Artificial Sequence: Synthetic oligonucleotide
augaugcggaccuugaguc

SEQ ID NO: 155626 - RNA, 19 nt, Artificial Sequence
  Description of Artificial Sequence: Synthetic oligonucleotide
auaaauagaaucggcauca

SEQ ID NO: 155627 - RNA, 19 nt, Artificial Sequence
  Description of Artificial Sequence: Synthetic oligonucleotide
uguugggcgacuuggacag

SEQ ID NO: 155628 - RNA, 19 nt, Artificial Sequence
  Description of Artificial Sequence: Synthetic oligonucleotide
ucgguaagaauguuggggc

SEQ ID NO: 155629 - RNA, 19 nt, Artificial Sequence
  Description of Artificial Sequence: Synthetic oligonucleotide
guuaugugcguguucaaag

SEQ ID NO: 155630 - RNA, 19 nt, Artificial Sequence
  Description of Artificial Sequence: Synthetic oligonucleotide
uuagauguuugaauaucug

SEQ ID NO: 155631 - RNA, 19 nt, Artificial Sequence
  Description of Artificial Sequence: Synthetic oligonucleotide
agaccuuugcgcuugcggg

SEQ ID NO: 155632 - RNA, 19 nt, Artificial Sequence
  Description of Artificial Sequence: Synthetic oligonucleotide
cucaauuggcuccacauac

SEQ ID NO: 155633 - RNA, 19 nt, Artificial Sequence
  Description of Artificial Sequence: Synthetic oligonucleotide
ugaagcgugucucaccggc

SEQ ID NO: 155634 - RNA, 19 nt, Artificial Sequence
  Description of Artificial Sequence: Synthetic oligonucleotide
gacaacgacgagcuguggg

SEQ ID NO: 155635 - RNA, 19 nt, Artificial Sequence
  Description of Artificial Sequence: Synthetic oligonucleotide
uccacgugagcgaugacug

SEQ ID NO: 155636 - RNA, 19 nt, Artificial Sequence
  Description of Artificial Sequence: Synthetic oligonucleotide
gauaucgguaagaauguug

SEQ ID NO: 155637 - RNA, 19 nt, Artificial Sequence
  Description of Artificial Sequence: Synthetic oligonucleotide
uggucuacaccaaccagcc

SEQ ID NO: 155638 - RNA, 19 nt, Artificial Sequence
  Description of Artificial Sequence: Synthetic oligonucleotide
aaccccauaaaccucugaa

SEQ ID NO: 155639 - RNA, 19 nt, Artificial Sequence
  Description of Artificial Sequence: Synthetic oligonucleotide
uauacaaucgguugugcuu

SEQ ID NO: 155640 - RNA, 19 nt, Artificial Sequence
  Description of Artificial Sequence: Synthetic oligonucleotide
uccuuuagaccuuugcgcu

SEQ ID NO: 155641 - RNA, 19 nt, Artificial Sequence
  Description of Artificial Sequence: Synthetic oligonucleotide
caauuggcuccacauaccg

SEQ ID NO: 155642 - RNA, 19 nt, Artificial Sequence
  Description of Artificial Sequence: Synthetic oligonucleotide
ucacacgcauguuaugugc

SEQ ID NO: 155643 - RNA, 19 nt, Artificial Sequence
  Description of Artificial Sequence: Synthetic oligonucleotide
ucggcaucaaguguuagug

SEQ ID NO: 155644 - RNA, 19 nt, Artificial Sequence
  Description of Artificial Sequence: Synthetic oligonucleotide
caaguguuagugcucaaug

SEQ ID NO: 155645 - RNA, 19 nt, Artificial Sequence
  Description of Artificial Sequence: Synthetic oligonucleotide
cugacgacagggcugacgc

SEQ ID NO: 155646 - RNA, 19 nt, Artificial Sequence
  Description of Artificial Sequence: Synthetic oligonucleotide
aagcgugucucaccggcuc

SEQ ID NO: 155647 - RNA, 19 nt, Artificial Sequence
  Description of Artificial Sequence: Synthetic oligonucleotide
guaguuggggcccaugaug

SEQ ID NO: 155648 - RNA, 19 nt, Artificial Sequence
  Description of Artificial Sequence: Synthetic oligonucleotide
cucgcagcgguauuucugg

SEQ ID NO: 155649 - RNA, 19 nt, Artificial Sequence
  Description of Artificial Sequence: Synthetic oligonucleotide
uaucgguaagaauguuggg

SEQ ID NO: 155650 - RNA, 19 nt, Artificial Sequence
  Description of Artificial Sequence: Synthetic oligonucleotide
gcgucaaacaccuugaaga

SEQ ID NO: 155651 - RNA, 19 nt, Artificial Sequence
  Description of Artificial Sequence: Synthetic oligonucleotide
auaccgaucuccccacaac

SEQ ID NO: 155652 - RNA, 19 nt, Artificial Sequence
  Description of Artificial Sequence: Synthetic oligonucleotide
guuagugcucaauggcagg

SEQ ID NO: 155653 - RNA, 19 nt, Artificial Sequence
  Description of Artificial Sequence: Synthetic oligonucleotide
acauuugacuccucgcuca

SEQ ID NO: 155654 - RNA, 19 nt, Artificial Sequence
  Description of Artificial Sequence: Synthetic oligonucleotide
gacaucgaagcgcacacca

SEQ ID NO: 155655 - RNA, 19 nt, Artificial Sequence
  Description of Artificial Sequence: Synthetic oligonucleotide
aauaccgaucuccccacaa

SEQ ID NO: 155656 - RNA, 19 nt, Artificial Sequence
  Description of Artificial Sequence: Synthetic oligonucleotide
auacaaucgguugugcuug

SEQ ID NO: 155657 - RNA, 19 nt, Artificial Sequence
  Description of Artificial Sequence: Synthetic oligonucleotide
uagaaucggcaucaagugu

SEQ ID NO: 155658 - RNA, 19 nt, Artificial Sequence
  Description of Artificial Sequence: Synthetic oligonucleotide
ugucgaacggguccccggg

SEQ ID NO: 155659 - RNA, 19 nt, Artificial Sequence
  Description of Artificial Sequence: Synthetic oligonucleotide
acaacgacgagcuguggga

SEQ ID NO: 155660 - RNA, 19 nt, Artificial Sequence
  Description of Artificial Sequence: Synthetic oligonucleotide
uguacaucauaaggggacc

SEQ ID NO: 155661 - RNA, 19 nt, Artificial Sequence
  Description of Artificial Sequence: Synthetic oligonucleotide
cugucucccgguaugagac

SEQ ID NO: 155662 - RNA, 19 nt, Artificial Sequence
  Description of Artificial Sequence: Synthetic oligonucleotide
agcccgacaauguucccac

SEQ ID NO: 155663 - RNA, 19 nt, Artificial Sequence
  Description of Artificial Sequence: Synthetic oligonucleotide
ucggaaauuccgaaauaaa

SEQ ID NO: 155664 - RNA, 19 nt, Artificial Sequence
  Description of Artificial Sequence: Synthetic oligonucleotide
uuucagcuagauagcgugc

SEQ ID NO: 155665 - RNA, 19 nt, Artificial Sequence
  Description of Artificial Sequence: Synthetic oligonucleotide
uuugucggagguuggcacc

SEQ ID NO: 155666 - RNA, 19 nt, Artificial Sequence
  Description of Artificial Sequence: Synthetic oligonucleotide
acagucucaaggugucuuc

SEQ ID NO: 155667 - RNA, 19 nt, Artificial Sequence
  Description of Artificial Sequence: Synthetic oligonucleotide
uuagcggacuugcugaauu

SEQ ID NO: 155668 - RNA, 19 nt, Artificial Sequence
  Description of Artificial Sequence: Synthetic oligonucleotide
aauuggcuccacauaccgg

SEQ ID NO: 155669 - RNA, 19 nt, Artificial Sequence
  Description of Artificial Sequence: Synthetic oligonucleotide
cacacgcauguuaugugcg

SEQ ID NO: 155670 - RNA, 19 nt, Artificial Sequence
  Description of Artificial Sequence: Synthetic oligonucleotide
cuagauagcgugcgcgugc

SEQ ID NO: 155671 - RNA, 19 nt, Artificial Sequence
  Description of Artificial Sequence: Synthetic oligonucleotide
ucuacaccaaccagcccga

SEQ ID NO: 155672 - RNA, 19 nt, Artificial Sequence
  Description of Artificial Sequence: Synthetic oligonucleotide
cuuugucggagguuggcac

SEQ ID NO: 155673 - RNA, 19 nt, Artificial Sequence
  Description of Artificial Sequence: Synthetic oligonucleotide
uccaucggugacacgaagu

SEQ ID NO: 155674 - RNA, 19 nt, Artificial Sequence
  Description of Artificial Sequence: Synthetic oligonucleotide
gagagcgcccuccuuagug

SEQ ID NO: 155675 - RNA, 19 nt, Artificial Sequence
  Description of Artificial Sequence: Synthetic oligonucleotide
uuucugggcggugacgggg

SEQ ID NO: 155676 - RNA, 19 nt, Artificial Sequence
  Description of Artificial Sequence: Synthetic oligonucleotide
cuugauagugaugcagcgc

SEQ ID NO: 155677 - RNA, 19 nt, Artificial Sequence
  Description of Artificial Sequence: Synthetic oligonucleotide
agcuccaucggugacacga

SEQ ID NO: 155678 - RNA, 19 nt, Artificial Sequence
  Description of Artificial Sequence: Synthetic oligonucleotide
ucugacgacagggcugacg

SEQ ID NO: 155679 - RNA, 19 nt, Artificial Sequence
  Description of Artificial Sequence: Synthetic oligonucleotide
cacguccucaauuggcucc

SEQ ID NO: 155680 - RNA, 19 nt, Artificial Sequence
  Description of Artificial Sequence: Synthetic oligonucleotide
gcagcgguauuucugggcg

SEQ ID NO: 155681 - RNA, 19 nt, Artificial Sequence
  Description of Artificial Sequence: Synthetic oligonucleotide
ccgguaugagacaacaggg

SEQ ID NO: 155682 - RNA, 19 nt, Artificial Sequence
  Description of Artificial Sequence: Synthetic oligonucleotide
uugucgaacggguccccgg

SEQ ID NO: 155683 - RNA, 19 nt, Artificial Sequence
  Description of Artificial Sequence: Synthetic oligonucleotide
aucggugacacgaagugca

SEQ ID NO: 155684 - RNA, 19 nt, Artificial Sequence
  Description of Artificial Sequence: Synthetic oligonucleotide
cauguagggucacaucaug

SEQ ID NO: 155685 - RNA, 19 nt, Artificial Sequence
  Description of Artificial Sequence: Synthetic oligonucleotide
auguagggucacaucaugg

SEQ ID NO: 155686 - RNA, 19 nt, Artificial Sequence
  Description of Artificial Sequence: Synthetic oligonucleotide
uguuaugugcguguucaaa

SEQ ID NO: 155687 - RNA, 19 nt, Artificial Sequence
  Description of Artificial Sequence: Synthetic oligonucleotide
cccgguaugagacaacagg

SEQ ID NO: 155688 - RNA, 19 nt, Artificial Sequence
  Description of Artificial Sequence: Synthetic oligonucleotide
ugucucaccggcucuugca

SEQ ID NO: 155689 - RNA, 19 nt, Artificial Sequence
  Description of Artificial Sequence: Synthetic oligonucleotide
gacgacagggcugacgcug

SEQ ID NO: 155690 - RNA, 19 nt, Artificial Sequence
  Description of Artificial Sequence: Synthetic oligonucleotide
cagacaacgacgagcugug

SEQ ID NO: 155691 - RNA, 19 nt, Artificial Sequence
  Description of Artificial Sequence: Synthetic oligonucleotide
cacucuaccaaaggcguag

SEQ ID NO: 155692 - RNA, 19 nt, Artificial Sequence
  Description of Artificial Sequence: Synthetic oligonucleotide
aagcgcacaccacgcaugu

SEQ ID NO: 155693 - RNA, 19 nt, Artificial Sequence
  Description of Artificial Sequence: Synthetic oligonucleotide
agaaucggcaucaaguguu

SEQ ID NO: 155694 - RNA, 19 nt, Artificial Sequence
  Description of Artificial Sequence: Synthetic oligonucleotide
cuguuagcggacuugcuga

SEQ ID NO: 155695 - RNA, 19 nt, Artificial Sequence
  Description of Artificial Sequence: Synthetic oligonucleotide
aucggcaucaaguguuagu

SEQ ID NO: 155696 - RNA, 19 nt, Artificial Sequence
  Description of Artificial Sequence: Synthetic oligonucleotide
acuaccccggagaacacuc

SEQ ID NO: 155697 - RNA, 19 nt, Artificial Sequence
  Description of Artificial Sequence: Synthetic oligonucleotide
cacugccucggaaauuccg

SEQ ID NO: 155698 - RNA, 19 nt, Artificial Sequence
  Description of Artificial Sequence: Synthetic oligonucleotide
uccuguucaggacaccgua

SEQ ID NO: 155699 - RNA, 19 nt, Artificial Sequence
  Description of Artificial Sequence: Synthetic oligonucleotide
cccauaaaccucugaaugc

SEQ ID NO: 155700 - RNA, 19 nt, Artificial Sequence
  Description of Artificial Sequence: Synthetic oligonucleotide
ccuccuuuagaccuuugcg

SEQ ID NO: 155701 - RNA, 19 nt, Artificial Sequence
  Description of Artificial Sequence: Synthetic oligonucleotide
uguucaggacaccguagau

SEQ ID NO: 155702 - RNA, 19 nt, Artificial Sequence
  Description of Artificial Sequence: Synthetic oligonucleotide
ucgacacuaccccggagaa

SEQ ID NO: 155703 - RNA, 19 nt, Artificial Sequence
  Description of Artificial Sequence: Synthetic oligonucleotide
guaagaauguuggggccag

SEQ ID NO: 155704 - RNA, 19 nt, Artificial Sequence
  Description of Artificial Sequence: Synthetic oligonucleotide
uauaguuccucaggcucca

SEQ ID NO: 155705 - RNA, 19 nt, Artificial Sequence
  Description of Artificial Sequence: Synthetic oligonucleotide
uguucguccuugcgggugu

SEQ ID NO: 155706 - RNA, 19 nt, Artificial Sequence
  Description of Artificial Sequence: Synthetic oligonucleotide
ucaaguguuagugcucaau

SEQ ID NO: 155707 - RNA, 19 nt, Artificial Sequence
  Description of Artificial Sequence: Synthetic oligonucleotide
aaauaccgaucuccccaca

SEQ ID NO: 155708 - RNA, 19 nt, Artificial Sequence
  Description of Artificial Sequence: Synthetic oligonucleotide
ucagcauguagggucacau

SEQ ID NO: 155709 - RNA, 19 nt, Artificial Sequence
  Description of Artificial Sequence: Synthetic oligonucleotide
cacauuugacuccucgcuc

SEQ ID NO: 155710 - RNA, 19 nt, Artificial Sequence
  Description of Artificial Sequence: Synthetic oligonucleotide
cacaccacgcauguucucc

SEQ ID NO: 155711 - RNA, 19 nt, Artificial Sequence
  Description of Artificial Sequence: Synthetic oligonucleotide
gucgacacuaccccggaga

SEQ ID NO: 155712 - RNA, 19 nt, Artificial Sequence
  Description of Artificial Sequence: Synthetic oligonucleotide
aggacucguugacuggaag

SEQ ID NO: 155713 - RNA, 19 nt, Artificial Sequence
  Description of Artificial Sequence: Synthetic oligonucleotide
ugcguguucaaagguggug

SEQ ID NO: 155714 - RNA, 19 nt, Artificial Sequence
  Description of Artificial Sequence: Synthetic oligonucleotide
uggugauagucccugucuu

SEQ ID NO: 155715 - RNA, 19 nt, Artificial Sequence
  Description of Artificial Sequence: Synthetic oligonucleotide
aggcguguaguuggggccc

SEQ ID NO: 155716 - RNA, 19 nt, Artificial Sequence
  Description of Artificial Sequence: Synthetic oligonucleotide
guucaggacacugaaucuc

SEQ ID NO: 155717 - RNA, 19 nt, Artificial Sequence
  Description of Artificial Sequence: Synthetic oligonucleotide
agggcacguccucaauugg

SEQ ID NO: 155718 - RNA, 19 nt, Artificial Sequence
  Description of Artificial Sequence: Synthetic oligonucleotide
accccauaaaccucugaau

SEQ ID NO: 155719 - RNA, 19 nt, Artificial Sequence
  Description of Artificial Sequence: Synthetic oligonucleotide
ucccgguaugagacaacag

SEQ ID NO: 155720 - RNA, 19 nt, Artificial Sequence
  Description of Artificial Sequence: Synthetic oligonucleotide
uuuagaccuuugcgcuugc

SEQ ID NO: 155721 - RNA, 19 nt, Artificial Sequence
  Description of Artificial Sequence: Synthetic oligonucleotide
agaggcgaugauacccgcc

SEQ ID NO: 155722 - RNA, 19 nt, Artificial Sequence
  Description of Artificial Sequence: Synthetic oligonucleotide
cacgcuuccuguucaggac

SEQ ID NO: 155723 - RNA, 19 nt, Artificial Sequence
  Description of Artificial Sequence: Synthetic oligonucleotide
ugauagucccugucuucac

SEQ ID NO: 155724 - RNA, 19 nt, Artificial Sequence
  Description of Artificial Sequence: Synthetic oligonucleotide
uagauagcgugcgcgugcc

SEQ ID NO: 155725 - RNA, 19 nt, Artificial Sequence
  Description of Artificial Sequence: Synthetic oligonucleotide
guacaucauaaggggaccc

SEQ ID NO: 155726 - RNA, 19 nt, Artificial Sequence
  Description of Artificial Sequence: Synthetic oligonucleotide
ugcgggugucugugaagcg

SEQ ID NO: 155727 - RNA, 19 nt, Artificial Sequence
  Description of Artificial Sequence: Synthetic oligonucleotide
uguuagcggacuugcugaa

SEQ ID NO: 155728 - RNA, 19 nt, Artificial Sequence
  Description of Artificial Sequence: Synthetic oligonucleotide
aacgacgagcugugggaau

SEQ ID NO: 155729 - RNA, 19 nt, Artificial Sequence
  Description of Artificial Sequence: Synthetic oligonucleotide
auagcgugcgcgugccuug

SEQ ID NO: 155730 - RNA, 19 nt, Artificial Sequence
  Description of Artificial Sequence: Synthetic oligonucleotide
augugcguguucaaaggug

SEQ ID NO: 155731 - RNA, 19 nt, Artificial Sequence
  Description of Artificial Sequence: Synthetic oligonucleotide
ugucgacacuaccccggag

SEQ ID NO: 155732 - RNA, 19 nt, Artificial Sequence
  Description of Artificial Sequence: Synthetic oligonucleotide
acacgcauguuaugugcgu

SEQ ID NO: 155733 - RNA, 19 nt, Artificial Sequence
  Description of Artificial Sequence: Synthetic oligonucleotide
cacauaccggcccaucauc

SEQ ID NO: 155734 - RNA, 19 nt, Artificial Sequence
  Description of Artificial Sequence: Synthetic oligonucleotide
acaucgaagcgcacaccac

SEQ ID NO: 155735 - RNA, 19 nt, Artificial Sequence
  Description of Artificial Sequence: Synthetic oligonucleotide
caaaggcguagaagcggcc

SEQ ID NO: 155736 - RNA, 19 nt, Artificial Sequence
  Description of Artificial Sequence: Synthetic oligonucleotide
caucggugacacgaagugc

SEQ ID NO: 155737 - RNA, 19 nt, Artificial Sequence
  Description of Artificial Sequence: Synthetic oligonucleotide
cacgugagcgaugacugac

SEQ ID NO: 155738 - RNA, 19 nt, Artificial Sequence
  Description of Artificial Sequence: Synthetic oligonucleotide
acuggcauacagacaacga

SEQ ID NO: 155739 - RNA, 19 nt, Artificial Sequence
  Description of Artificial Sequence: Synthetic oligonucleotide
gcauuauggggacagucuc

SEQ ID NO: 155740 - RNA, 19 nt, Artificial Sequence
  Description of Artificial Sequence: Synthetic oligonucleotide
ucgcagcgguauuucuggg

SEQ ID NO: 155741 - RNA, 19 nt, Artificial Sequence
  Description of Artificial Sequence: Synthetic oligonucleotide
gaggcgaugauacccgccu

SEQ ID NO: 155742 - RNA, 19 nt, Artificial Sequence
  Description of Artificial Sequence: Synthetic oligonucleotide
ucucgcccucgccauaggu

SEQ ID NO: 155743 - RNA, 19 nt, Artificial Sequence
  Description of Artificial Sequence: Synthetic oligonucleotide
aguccgucaguguggacuu

SEQ ID NO: 155744 - RNA, 19 nt, Artificial Sequence
  Description of Artificial Sequence: Synthetic oligonucleotide
uugucggagguuggcacca

SEQ ID NO: 155745 - RNA, 19 nt, Artificial Sequence
  Description of Artificial Sequence: Synthetic oligonucleotide
accuuugcgcuugcggguc

SEQ ID NO: 155746 - RNA, 19 nt, Artificial Sequence
  Description of Artificial Sequence: Synthetic oligonucleotide
cucgguggauggcaucagc

SEQ ID NO: 155747 - RNA, 19 nt, Artificial Sequence
  Description of Artificial Sequence: Synthetic oligonucleotide
acgacgagcugugggaaug

SEQ ID NO: 155748 - RNA, 19 nt, Artificial Sequence
  Description of Artificial Sequence: Synthetic oligonucleotide
acugccucggaaauuccga

SEQ ID NO: 155749 - RNA, 19 nt, Artificial Sequence
  Description of Artificial Sequence: Synthetic oligonucleotide
cagcauuauggggacaguc

SEQ ID NO: 155750 - RNA, 19 nt, Artificial Sequence
  Description of Artificial Sequence: Synthetic oligonucleotide
gccgugguccacgugagcg

SEQ ID NO: 155751 - RNA, 19 nt, Artificial Sequence
  Description of Artificial Sequence: Synthetic oligonucleotide
ucguacuuuucagcuagau

SEQ ID NO: 155752 - RNA, 19 nt, Artificial Sequence
  Description of Artificial Sequence: Synthetic oligonucleotide
guugucgaacggguccccg

SEQ ID NO: 155753 - RNA, 19 nt, Artificial Sequence
  Description of Artificial Sequence: Synthetic oligonucleotide
ccaucggugacacgaagug

SEQ ID NO: 155754 - RNA, 19 nt, Artificial Sequence
  Description of Artificial Sequence: Synthetic oligonucleotide
ggacucguugacuggaaga

SEQ ID NO: 155755 - RNA, 19 nt, Artificial Sequence
  Description of Artificial Sequence: Synthetic oligonucleotide
uggccguggacuugauagu

SEQ ID NO: 155756 - RNA, 19 nt, Artificial Sequence
  Description of Artificial Sequence: Synthetic oligonucleotide
uacaaucgguugugcuugu

SEQ ID NO: 155757 - RNA, 19 nt, Artificial Sequence
  Description of Artificial Sequence: Synthetic oligonucleotide
auguuccggauguuggcuu

SEQ ID NO: 155758 - RNA, 19 nt, Artificial Sequence
  Description of Artificial Sequence: Synthetic oligonucleotide
cuccaucggugacacgaag

SEQ ID NO: 155759 - RNA, 19 nt, Artificial Sequence
  Description of Artificial Sequence: Synthetic oligonucleotide
acucucgcccucgccauag

SEQ ID NO: 155760 - RNA, 19 nt, Artificial Sequence
  Description of Artificial Sequence: Synthetic oligonucleotide
cagaggcgaugauacccgc

SEQ ID NO: 155761 - RNA, 19 nt, Artificial Sequence
  Description of Artificial Sequence: Synthetic oligonucleotide
cacgcauguuaugugcgug

SEQ ID NO: 155762 - RNA, 19 nt, Artificial Sequence
  Description of Artificial Sequence: Synthetic oligonucleotide
ggcauacagacaacgacga

SEQ ID NO: 155763 - RNA, 19 nt, Artificial Sequence
  Description of Artificial Sequence: Synthetic oligonucleotide
uaccccggagaacacucua

SEQ ID NO: 155764 - RNA, 19 nt, Artificial Sequence
  Description of Artificial Sequence: Synthetic oligonucleotide
aggacggggucaaucauaa

SEQ ID NO: 155765 - RNA, 19 nt, Artificial Sequence
  Description of Artificial Sequence: Synthetic oligonucleotide
ugauaucgguaagaauguu

SEQ ID NO: 155766 - RNA, 19 nt, Artificial Sequence
  Description of Artificial Sequence: Synthetic oligonucleotide
gguggccccucguagagca

SEQ ID NO: 155767 - RNA, 19 nt, Artificial Sequence
  Description of Artificial Sequence: Synthetic oligonucleotide
gacucguugacuggaagau

SEQ ID NO: 155768 - RNA, 19 nt, Artificial Sequence
  Description of Artificial Sequence: Synthetic oligonucleotide
uguugucgaacgggucccc

SEQ ID NO: 155769 - RNA, 19 nt, Artificial Sequence
  Description of Artificial Sequence: Synthetic oligonucleotide
cagcauguagggucacauc

SEQ ID NO: 155770 - RNA, 19 nt, Artificial Sequence
  Description of Artificial Sequence: Synthetic oligonucleotide
agcgugucucaccggcucu

SEQ ID NO: 155771 - RNA, 19 nt, Artificial Sequence
  Description of Artificial Sequence: Synthetic oligonucleotide
cccgacaauguucccacag

SEQ ID NO: 155772 - RNA, 19 nt, Artificial Sequence
  Description of Artificial Sequence: Synthetic oligonucleotide
uagcggacuugcugaauuu

SEQ ID NO: 155773 - RNA, 19 nt, Artificial Sequence
  Description of Artificial Sequence: Synthetic oligonucleotide
ccuguucaggacaccguag

SEQ ID NO: 155774 - RNA, 19 nt, Artificial Sequence
  Description of Artificial Sequence: Synthetic oligonucleotide
gugucucaccggcucuugc

SEQ ID NO: 155775 - RNA, 19 nt, Artificial Sequence
  Description of Artificial Sequence: Synthetic oligonucleotide
agcucgcagcgguauuucu

SEQ ID NO: 155776 - RNA, 19 nt, Artificial Sequence
  Description of Artificial Sequence: Synthetic oligonucleotide
cuguucguccuugcgggug

SEQ ID NO: 155777 - RNA, 19 nt, Artificial Sequence
  Description of Artificial Sequence: Synthetic oligonucleotide
gcgcacaccacgcauguuc

SEQ ID NO: 155778 - RNA, 19 nt, Artificial Sequence
  Description of Artificial Sequence: Synthetic oligonucleotide
cagagugaaggcccagcca

SEQ ID NO: 155779 - RNA, 19 nt, Artificial Sequence
  Description of Artificial Sequence: Synthetic oligonucleotide
ccaccggcgcaucacagcc

SEQ ID NO: 155780 - RNA, 19 nt, Artificial Sequence
  Description of Artificial Sequence: Synthetic oligonucleotide
ccauaaaccucugaaugca

SEQ ID NO: 155781 - RNA, 19 nt, Artificial Sequence
  Description of Artificial Sequence: Synthetic oligonucleotide
ccacccacgaccuguucag

SEQ ID NO: 155782 - RNA, 19 nt, Artificial Sequence
  Description of Artificial Sequence: Synthetic oligonucleotide
gaccuuugcgcuugcgggu

SEQ ID NO: 155783 - RNA, 19 nt, Artificial Sequence
  Description of Artificial Sequence: Synthetic oligonucleotide
aaggacucguugacuggaa

SEQ ID NO: 155784 - RNA, 19 nt, Artificial Sequence
  Description of Artificial Sequence: Synthetic oligonucleotide
agacaacgacgagcugugg

SEQ ID NO: 155785 - RNA, 19 nt, Artificial Sequence
  Description of Artificial Sequence: Synthetic oligonucleotide
gcacauuugacuccucgcu

SEQ ID NO: 155786 - RNA, 19 nt, Artificial Sequence
  Description of Artificial Sequence: Synthetic oligonucleotide
gugacacgaagugcagcug

SEQ ID NO: 155787 - RNA, 19 nt, Artificial Sequence
  Description of Artificial Sequence: Synthetic oligonucleotide
gucgaacggguccccgggc

SEQ ID NO: 155788 - RNA, 19 nt, Artificial Sequence
  Description of Artificial Sequence: Synthetic oligonucleotide
gcaacaucccauucguacu

SEQ ID NO: 155789 - RNA, 19 nt, Artificial Sequence
  Description of Artificial Sequence: Synthetic oligonucleotide
cauggacaucgaagcgcac

SEQ ID NO: 155790 - RNA, 19 nt, Artificial Sequence
  Description of Artificial Sequence: Synthetic oligonucleotide
gaaucggcaucaaguguua

SEQ ID NO: 155791 - RNA, 19 nt, Artificial Sequence
  Description of Artificial Sequence: Synthetic oligonucleotide
ccauucguacuuuucagcu

SEQ ID NO: 155792 - RNA, 19 nt, Artificial Sequence
  Description of Artificial Sequence: Synthetic oligonucleotide
ccauggguccacucucgcc

SEQ ID NO: 155793 - RNA, 19 nt, Artificial Sequence
  Description of Artificial Sequence: Synthetic oligonucleotide
gggcuguuagcggacuugc

SEQ ID NO: 155794 - RNA, 19 nt, Artificial Sequence
  Description of Artificial Sequence: Synthetic oligonucleotide
acgguccaucuuauucauc

SEQ ID NO: 155795 - RNA, 19 nt, Artificial Sequence
  Description of Artificial Sequence: Synthetic oligonucleotide
ugccauuggcgggaucaaa

SEQ ID NO: 155796 - RNA, 19 nt, Artificial Sequence
  Description of Artificial Sequence: Synthetic oligonucleotide
cccacgaccuguucaggac

SEQ ID NO: 155797 - RNA, 19 nt, Artificial Sequence
  Description of Artificial Sequence: Synthetic oligonucleotide
agauagcgugcgcgugccu

SEQ ID NO: 155798 - RNA, 19 nt, Artificial Sequence
  Description of Artificial Sequence: Synthetic oligonucleotide
gccacccacgaccuguuca

SEQ ID NO: 155799 - RNA, 19 nt, Artificial Sequence
  Description of Artificial Sequence: Synthetic oligonucleotide
ggucuacaccaaccagccc

SEQ ID NO: 155800 - RNA, 19 nt, Artificial Sequence
  Description of Artificial Sequence: Synthetic oligonucleotide
gucucccgguaugagacaa

SEQ ID NO: 155801 - RNA, 19 nt, Artificial Sequence
  Description of Artificial Sequence: Synthetic oligonucleotide
gcucgcagcgguauuucug

SEQ ID NO: 155802 - RNA, 19 nt, Artificial Sequence
  Description of Artificial Sequence: Synthetic oligonucleotide
gauagcgugcgcgugccuu

SEQ ID NO: 155803 - RNA, 19 nt, Artificial Sequence
  Description of Artificial Sequence: Synthetic oligonucleotide
cacgcauguucuccucaca

SEQ ID NO: 155804 - RNA, 19 nt, Artificial Sequence
  Description of Artificial Sequence: Synthetic oligonucleotide
cugucgacacuaccccgga

SEQ ID NO: 155805 - RNA, 19 nt, Artificial Sequence
  Description of Artificial Sequence: Synthetic oligonucleotide
cacccacgaccuguucagg

SEQ ID NO: 155806 - RNA, 19 nt, Artificial Sequence
  Description of Artificial Sequence: Synthetic oligonucleotide
caguggucgaacacacacu

SEQ ID NO: 155807 - RNA, 19 nt, Artificial Sequence
  Description of Artificial Sequence: Synthetic oligonucleotide
gcgcaggucagcuguaaaa

SEQ ID NO: 155808 - RNA, 19 nt, Artificial Sequence
  Description of Artificial Sequence: Synthetic oligonucleotide
agccaccggcgcaucacag

SEQ ID NO: 155809 - RNA, 19 nt, Artificial Sequence
  Description of Artificial Sequence: Synthetic oligonucleotide
agcgugcgcgugccuugag

SEQ ID NO: 155810 - RNA, 19 nt, Artificial Sequence
  Description of Artificial Sequence: Synthetic oligonucleotide
aggugcguggcaguuucuu

SEQ ID NO: 155811 - RNA, 19 nt, Artificial Sequence
  Description of Artificial Sequence: Synthetic oligonucleotide
uagcgugcgcgugccuuga

SEQ ID NO: 155812 - RNA, 19 nt, Artificial Sequence
  Description of Artificial Sequence: Synthetic oligonucleotide
gccaccggcgcaucacagc

SEQ ID NO: 155813 - RNA, 19 nt, Artificial Sequence
  Description of Artificial Sequence: Synthetic oligonucleotide
acccuuggugauaucggua

SEQ ID NO: 155814 - RNA, 19 nt, Artificial Sequence
  Description of Artificial Sequence: Synthetic oligonucleotide
cggcaucaaguguuagugc

SEQ ID NO: 155815 - RNA, 19 nt, Artificial Sequence
  Description of Artificial Sequence: Synthetic oligonucleotide
gcagcagggcguccccugc

SEQ ID NO: 155816 - RNA, 19 nt, Artificial Sequence
  Description of Artificial Sequence: Synthetic oligonucleotide
caacgacgagcugugggaa

SEQ ID NO: 155817 - RNA, 19 nt, Artificial Sequence
  Description of Artificial Sequence: Synthetic oligonucleotide
caggcgugguccuccucca

SEQ ID NO: 155818 - RNA, 19 nt, Artificial Sequence
  Description of Artificial Sequence: Synthetic oligonucleotide
acacucuaccaaaggcgua

SEQ ID NO: 155819 - RNA, 19 nt, Artificial Sequence
  Description of Artificial Sequence: Synthetic oligonucleotide
gcgugcgcgugccuugagc

SEQ ID NO: 155820 - RNA, 19 nt, Artificial Sequence
  Description of Artificial Sequence: Synthetic oligonucleotide
cauggcccgccagccaguc

SEQ ID NO: 155821 - RNA, 19 nt, Artificial Sequence
  Description of Artificial Sequence: Synthetic oligonucleotide
acaaucgguugugcuuguu

SEQ ID NO: 155822 - RNA, 19 nt, Artificial Sequence
  Description of Artificial Sequence: Synthetic oligonucleotide
cuacaccaaccagcccgac

SEQ ID NO: 155823 - RNA, 19 nt, Artificial Sequence
  Description of Artificial Sequence: Synthetic oligonucleotide
acgaccuguucaggacacu

SEQ ID NO: 155824 - RNA, 19 nt, Artificial Sequence
  Description of Artificial Sequence: Synthetic oligonucleotide
ggcacguccucaauuggcu

SEQ ID NO: 155825 - RNA, 19 nt, Artificial Sequence
  Description of Artificial Sequence: Synthetic oligonucleotide
cagccaccggcgcaucaca

SEQ ID NO: 155826 - RNA, 19 nt, Artificial Sequence
  Description of Artificial Sequence: Synthetic oligonucleotide
ccacugccucggaaauucc

SEQ ID NO: 155827 - RNA, 19 nt, Artificial Sequence
  Description of Artificial Sequence: Synthetic oligonucleotide
cguacuuuucagcuagaua

SEQ ID NO: 155828 - RNA, 19 nt, Artificial Sequence
  Description of Artificial Sequence: Synthetic oligonucleotide
caaaaggugcguggcaguu

SEQ ID NO: 155829 - RNA, 19 nt, Artificial Sequence
  Description of Artificial Sequence: Synthetic oligonucleotide
ugucggagguuggcaccau

SEQ ID NO: 155830 - RNA, 19 nt, Artificial Sequence
  Description of Artificial Sequence: Synthetic oligonucleotide
aggggacccuugggaucac

SEQ ID NO: 155831 - RNA, 19 nt, Artificial Sequence
  Description of Artificial Sequence: Synthetic oligonucleotide
gagcuggcaaaaggugcgu

SEQ ID NO: 155832 - RNA, 19 nt, Artificial Sequence
  Description of Artificial Sequence: Synthetic oligonucleotide
ccuuugucggagguuggca

SEQ ID NO: 155833 - RNA, 19 nt, Artificial Sequence
  Description of Artificial Sequence: Synthetic oligonucleotide
guuagcggacuugcugaau

SEQ ID NO: 155834 - RNA, 19 nt, Artificial Sequence
  Description of Artificial Sequence: Synthetic oligonucleotide
guccgucaguguggacuug

SEQ ID NO: 155835 - RNA, 19 nt, Artificial Sequence
  Description of Artificial Sequence: Synthetic oligonucleotide
cagauuuugccagccgcuu

SEQ ID NO: 155836 - RNA, 19 nt, Artificial Sequence
  Description of Artificial Sequence: Synthetic oligonucleotide
ccagcccgacaauguuccc

SEQ ID NO: 155837 - RNA, 19 nt, Artificial Sequence
  Description of Artificial Sequence: Synthetic oligonucleotide
gugcguguucaaagguggu

SEQ ID NO: 155838 - RNA, 19 nt, Artificial Sequence
  Description of Artificial Sequence: Synthetic oligonucleotide
ccauuggcgggaucaaaau

SEQ ID NO: 155839 - RNA, 19 nt, Artificial Sequence
  Description of Artificial Sequence: Synthetic oligonucleotide
cacuaccccggagaacacu

SEQ ID NO: 155840 - RNA, 19 nt, Artificial Sequence
  Description of Artificial Sequence: Synthetic oligonucleotide
ccgugguccacgugagcga

SEQ ID NO: 155841 - RNA, 19 nt, Artificial Sequence
  Description of Artificial Sequence: Synthetic oligonucleotide
gcguggcaguuucuuccca

SEQ ID NO: 155842 - RNA, 19 nt, Artificial Sequence
  Description of Artificial Sequence: Synthetic oligonucleotide
ccgcaaacugcuucagagu

SEQ ID NO: 155843 - RNA, 19 nt, Artificial Sequence
  Description of Artificial Sequence: Synthetic oligonucleotide
cugcacacccuuggugaua

SEQ ID NO: 155844 - RNA, 19 nt, Artificial Sequence
  Description of Artificial Sequence: Synthetic oligonucleotide
ccacgugagcgaugacuga

SEQ ID NO: 155845 - RNA, 19 nt, Artificial Sequence
  Description of Artificial Sequence: Synthetic oligonucleotide
cucugacgacagggcugac

SEQ ID NO: 155846 - RNA, 19 nt, Artificial Sequence
  Description of Artificial Sequence: Synthetic oligonucleotide
caccggcgcaucacagccu

SEQ ID NO: 155847 - RNA, 19 nt, Artificial Sequence
  Description of Artificial Sequence: Synthetic oligonucleotide
cacucucgcccucgccaua

SEQ ID NO: 155848 - RNA, 19 nt, Artificial Sequence
  Description of Artificial Sequence: Synthetic oligonucleotide
gcccgacaauguucccaca

SEQ ID NO: 155849 - RNA, 19 nt, Artificial Sequence
  Description of Artificial Sequence: Synthetic oligonucleotide
cugacauguuccggauguu

SEQ ID NO: 155850 - RNA, 19 nt, Artificial Sequence
  Description of Artificial Sequence: Synthetic oligonucleotide
cgaagcgcacaccacgcau

SEQ ID NO: 155851 - RNA, 19 nt, Artificial Sequence
  Description of Artificial Sequence: Synthetic oligonucleotide
ccuguucguccuugcgggu

SEQ ID NO: 155852 - RNA, 19 nt, Artificial Sequence
  Description of Artificial Sequence: Synthetic oligonucleotide
ggacggggucaaucauaau

SEQ ID NO: 155853 - RNA, 19 nt, Artificial Sequence
  Description of Artificial Sequence: Synthetic oligonucleotide
ccucgccauagguggaaau

SEQ ID NO: 155854 - RNA, 19 nt, Artificial Sequence
  Description of Artificial Sequence: Synthetic oligonucleotide
ccggcgcaucacagccuuc

SEQ ID NO: 155855 - RNA, 19 nt, Artificial Sequence
  Description of Artificial Sequence: Synthetic oligonucleotide
ccgggccuucauauacaau

SEQ ID NO: 155856 - RNA, 19 nt, Artificial Sequence
  Description of Artificial Sequence: Synthetic oligonucleotide
aaaguuaucugucaguagg

SEQ ID NO: 155857 - RNA, 19 nt, Artificial Sequence
  Description of Artificial Sequence: Synthetic oligonucleotide
cucauaaugagaaaagucg

SEQ ID NO: 155858 - RNA, 19 nt, Artificial Sequence
  Description of Artificial Sequence: Synthetic oligonucleotide
agagcaaguaaacaggccc

SEQ ID NO: 155859 - RNA, 19 nt, Artificial Sequence
  Description of Artificial Sequence: Synthetic oligonucleotide
aacuaagaaugucacaacg

SEQ ID NO: 155860 - RNA, 19 nt, Artificial Sequence
  Description of Artificial Sequence: Synthetic oligonucleotide
acuaaaaugaucugcgaac

SEQ ID NO: 155861 - RNA, 19 nt, Artificial Sequence
  Description of Artificial Sequence: Synthetic oligonucleotide
auaaggaucacucaucgag

SEQ ID NO: 155862 - RNA, 19 nt, Artificial Sequence
  Description of Artificial Sequence: Synthetic oligonucleotide
acuguaaagcaguagaggg

SEQ ID NO: 155863 - RNA, 19 nt, Artificial Sequence
  Description of Artificial Sequence: Synthetic oligonucleotide
agaugcaacaaucaacccc

SEQ ID NO: 155864 - RNA, 19 nt, Artificial Sequence
  Description of Artificial Sequence: Synthetic oligonucleotide
ucuaagacaguaaggaucc

SEQ ID NO: 155865 - RNA, 19 nt, Artificial Sequence
  Description of Artificial Sequence: Synthetic oligonucleotide
aggccuuugaaacagggcc

SEQ ID NO: 155866 - RNA, 19 nt, Artificial Sequence
  Description of Artificial Sequence: Synthetic oligonucleotide
ugcagauucaguaugcgag

SEQ ID NO: 155867 - RNA, 19 nt, Artificial Sequence
  Description of Artificial Sequence: Synthetic oligonucleotide
gaugcaacaaucaaccccg

SEQ ID NO: 155868 - RNA, 19 nt, Artificial Sequence
  Description of Artificial Sequence: Synthetic oligonucleotide
agauccuacauuuaaagcu

SEQ ID NO: 155869 - RNA, 19 nt, Artificial Sequence
  Description of Artificial Sequence: Synthetic oligonucleotide
uugguuauugggcacaucc

SEQ ID NO: 155870 - RNA, 19 nt, Artificial Sequence
  Description of Artificial Sequence: Synthetic oligonucleotide
uuuuguauuaggucaaucu

SEQ ID NO: 155871 - RNA, 19 nt, Artificial Sequence
  Description of Artificial Sequence: Synthetic oligonucleotide
agugacgcguucuaaauac

SEQ ID NO: 155872 - RNA, 19 nt, Artificial Sequence
  Description of Artificial Sequence: Synthetic oligonucleotide
uaaagcuuagcguuacugg

SEQ ID NO: 155873 - RNA, 19 nt, Artificial Sequence
  Description of Artificial Sequence: Synthetic oligonucleotide
aaagucgucaaagauggag

SEQ ID NO: 155874 - RNA, 19 nt, Artificial Sequence
  Description of Artificial Sequence: Synthetic oligonucleotide
cuuguauucuccuagagga

SEQ ID NO: 155875 - RNA, 19 nt, Artificial Sequence
  Description of Artificial Sequence: Synthetic oligonucleotide
aguacugugagaugucaac

SEQ ID NO: 155876 - RNA, 19 nt, Artificial Sequence
  Description of Artificial Sequence: Synthetic oligonucleotide
uuugugacagguuuguugu

SEQ ID NO: 155877 - RNA, 19 nt, Artificial Sequence
  Description of Artificial Sequence: Synthetic oligonucleotide
aaagcuuagcguuacuggu

SEQ ID NO: 155878 - RNA, 19 nt, Artificial Sequence
  Description of Artificial Sequence: Synthetic oligonucleotide
ucauaaugagaaaagucgu

SEQ ID NO: 155879 - RNA, 19 nt, Artificial Sequence
  Description of Artificial Sequence: Synthetic oligonucleotide
aacugagagggucuuuugg

SEQ ID NO: 155880 - RNA, 19 nt, Artificial Sequence
  Description of Artificial Sequence: Synthetic oligonucleotide
uaaggaucacucaucgagg

SEQ ID NO: 155881 - RNA, 19 nt, Artificial Sequence
  Description of Artificial Sequence: Synthetic oligonucleotide
cuuguuaccauguucggug

SEQ ID NO: 155882 - RNA, 19 nt, Artificial Sequence
  Description of Artificial Sequence: Synthetic oligonucleotide
aguguaacugcucccauag

SEQ ID NO: 155883 - RNA, 19 nt, Artificial Sequence
  Description of Artificial Sequence: Synthetic oligonucleotide
gauucaguaugcgagggcg

SEQ ID NO: 155884 - RNA, 19 nt, Artificial Sequence
  Description of Artificial Sequence: Synthetic oligonucleotide
uuaucugucaguaggcaac

SEQ ID NO: 155885 - RNA, 19 nt, Artificial Sequence
  Description of Artificial Sequence: Synthetic oligonucleotide
ugccuguacuaucagaucc

SEQ ID NO: 155886 - RNA, 19 nt, Artificial Sequence
  Description of Artificial Sequence: Synthetic oligonucleotide
aacuaaaaguuaucuguca

SEQ ID NO: 155887 - RNA, 19 nt, Artificial Sequence
  Description of Artificial Sequence: Synthetic oligonucleotide
uguuacucggauuggacug

SEQ ID NO: 155888 - RNA, 19 nt, Artificial Sequence
  Description of Artificial Sequence: Synthetic oligonucleotide
agggauauuaaaugaccgg

SEQ ID NO: 155889 - RNA, 19 nt, Artificial Sequence
  Description of Artificial Sequence: Synthetic oligonucleotide
ucggugcuacaccagaugg

SEQ ID NO: 155890 - RNA, 19 nt, Artificial Sequence
  Description of Artificial Sequence: Synthetic oligonucleotide
ugugagaugucaacaacac

SEQ ID NO: 155891 - RNA, 19 nt, Artificial Sequence
  Description of Artificial Sequence: Synthetic oligonucleotide
aaguuaucugucaguaggc

SEQ ID NO: 155892 - RNA, 19 nt, Artificial Sequence
  Description of Artificial Sequence: Synthetic oligonucleotide
aaugagaaaagucgucaaa

SEQ ID NO: 155893 - RNA, 19 nt, Artificial Sequence
  Description of Artificial Sequence: Synthetic oligonucleotide
gaaggcgccauccaggcgc

SEQ ID NO: 155894 - RNA, 19 nt, Artificial Sequence
  Description of Artificial Sequence: Synthetic oligonucleotide
agaaaagucgucaaagaug

SEQ ID NO: 155895 - RNA, 19 nt, Artificial Sequence
  Description of Artificial Sequence: Synthetic oligonucleotide
aaaugaucugcgaacaacu

SEQ ID NO: 155896 - RNA, 19 nt, Artificial Sequence
  Description of Artificial Sequence: Synthetic oligonucleotide
uauccuauagggauauuaa

SEQ ID NO: 155897 - RNA, 19 nt, Artificial Sequence
  Description of Artificial Sequence: Synthetic oligonucleotide
guuugugacagguuuguug

SEQ ID NO: 155898 - RNA, 19 nt, Artificial Sequence
  Description of Artificial Sequence: Synthetic oligonucleotide
uuaaagcuuagcguuacug

SEQ ID NO: 155899 - RNA, 19 nt, Artificial Sequence
  Description of Artificial Sequence: Synthetic oligonucleotide
gacuguucaucccaggggc

SEQ ID NO: 155900 - RNA, 19 nt, Artificial Sequence
  Description of Artificial Sequence: Synthetic oligonucleotide
agggguaacuguuacucgg

SEQ ID NO: 155901 - RNA, 19 nt, Artificial Sequence
  Description of Artificial Sequence: Synthetic oligonucleotide
auaaugagaaaagucguca

SEQ ID NO: 155902 - RNA, 19 nt, Artificial Sequence
  Description of Artificial Sequence: Synthetic oligonucleotide
aggucaaucugacugauaa

SEQ ID NO: 155903 - RNA, 19 nt, Artificial Sequence
  Description of Artificial Sequence: Synthetic oligonucleotide
aaauccaauggauggugga

SEQ ID NO: 155904 - RNA, 19 nt, Artificial Sequence
  Description of Artificial Sequence: Synthetic oligonucleotide
acagauaaggaucacucau

SEQ ID NO: 155905 - RNA, 19 nt, Artificial Sequence
  Description of Artificial Sequence: Synthetic oligonucleotide
cauagccccaaccucaugc

SEQ ID NO: 155906 - RNA, 19 nt, Artificial Sequence
  Description of Artificial Sequence: Synthetic oligonucleotide
caacaaucaaccccgcacg

SEQ ID NO: 155907 - RNA, 19 nt, Artificial Sequence
  Description of Artificial Sequence: Synthetic oligonucleotide
aacaacuaagaaugucaca

SEQ ID NO: 155908 - RNA, 19 nt, Artificial Sequence
  Description of Artificial Sequence: Synthetic oligonucleotide
aaugaccggguauaagagu

SEQ ID NO: 155909 - RNA, 19 nt, Artificial Sequence
  Description of Artificial Sequence: Synthetic oligonucleotide
agauucaguaugcgagggc

SEQ ID NO: 155910 - RNA, 19 nt, Artificial Sequence
  Description of Artificial Sequence: Synthetic oligonucleotide
agguaguaaaauggcaagc

SEQ ID NO: 155911 - RNA, 19 nt, Artificial Sequence
  Description of Artificial Sequence: Synthetic oligonucleotide
ggcauguuuacauuugucc

SEQ ID NO: 155912 - RNA, 19 nt, Artificial Sequence
  Description of Artificial Sequence: Synthetic oligonucleotide
ugauaagcugacaaacaaa

SEQ ID NO: 155913 - RNA, 19 nt, Artificial Sequence
  Description of Artificial Sequence: Synthetic oligonucleotide
auaauuuucagcacuugcu

SEQ ID NO: 155914 - RNA, 19 nt, Artificial Sequence
  Description of Artificial Sequence: Synthetic oligonucleotide
uauuaaaugaccggguaua

SEQ ID NO: 155915 - RNA, 19 nt, Artificial Sequence
  Description of Artificial Sequence: Synthetic oligonucleotide
agaacauaauuucugccaa

SEQ ID NO: 155916 - RNA, 19 nt, Artificial Sequence
  Description of Artificial Sequence: Synthetic oligonucleotide
acagcuuaaaugguaacug

SEQ ID NO: 155917 - RNA, 19 nt, Artificial Sequence
  Description of Artificial Sequence: Synthetic oligonucleotide
aagguuaucugcucucuaa

SEQ ID NO: 155918 - RNA, 19 nt, Artificial Sequence
  Description of Artificial Sequence: Synthetic oligonucleotide
auuaggucaaucugacuga

SEQ ID NO: 155919 - RNA, 19 nt, Artificial Sequence
  Description of Artificial Sequence: Synthetic oligonucleotide
auauuaaaugaccggguau

SEQ ID NO: 155920 - RNA, 19 nt, Artificial Sequence
  Description of Artificial Sequence: Synthetic oligonucleotide
uuacuaaguuguccauagg

SEQ ID NO: 155921 - RNA, 19 nt, Artificial Sequence
  Description of Artificial Sequence: Synthetic oligonucleotide
acgcguucuaaauacaagu

SEQ ID NO: 155922 - RNA, 19 nt, Artificial Sequence
  Description of Artificial Sequence: Synthetic oligonucleotide
gggauauuaaaugaccggg

SEQ ID NO: 155923 - RNA, 19 nt, Artificial Sequence
  Description of Artificial Sequence: Synthetic oligonucleotide
acgacacuggagcugacuc

SEQ ID NO: 155924 - RNA, 19 nt, Artificial Sequence
  Description of Artificial Sequence: Synthetic oligonucleotide
auacagcuuaaaugguaac

SEQ ID NO: 155925 - RNA, 19 nt, Artificial Sequence
  Description of Artificial Sequence: Synthetic oligonucleotide
uuacauuugucccaccauu

SEQ ID NO: 155926 - RNA, 19 nt, Artificial Sequence
  Description of Artificial Sequence: Synthetic oligonucleotide
gacaacugaacccaccguc

SEQ ID NO: 155927 - RNA, 19 nt, Artificial Sequence
  Description of Artificial Sequence: Synthetic oligonucleotide
uauuagugaguucuacaau

SEQ ID NO: 155928 - RNA, 19 nt, Artificial Sequence
  Description of Artificial Sequence: Synthetic oligonucleotide
gauauuaaaugaccgggua

SEQ ID NO: 155929 - RNA, 19 nt, Artificial Sequence
  Description of Artificial Sequence: Synthetic oligonucleotide
uuauugggcacauccuuga

SEQ ID NO: 155930 - RNA, 19 nt, Artificial Sequence
  Description of Artificial Sequence: Synthetic oligonucleotide
gaaauccaauggauggugg

SEQ ID NO: 155931 - RNA, 19 nt, Artificial Sequence
  Description of Artificial Sequence: Synthetic oligonucleotide
ugcuacaccagauggagua

SEQ ID NO: 155932 - RNA, 19 nt, Artificial Sequence
  Description of Artificial Sequence: Synthetic oligonucleotide
ucuaaggguaccuccugug

SEQ ID NO: 155933 - RNA, 19 nt, Artificial Sequence
  Description of Artificial Sequence: Synthetic oligonucleotide
uguaucacgggaguuugug

SEQ ID NO: 155934 - RNA, 19 nt, Artificial Sequence
  Description of Artificial Sequence: Synthetic oligonucleotide
guaaacaggccccuugcug

SEQ ID NO: 155935 - RNA, 19 nt, Artificial Sequence
  Description of Artificial Sequence: Synthetic oligonucleotide
agugggcgcgugcagauuc

SEQ ID NO: 155936 - RNA, 19 nt, Artificial Sequence
  Description of Artificial Sequence: Synthetic oligonucleotide
aguaggcaacucaaaaggg

SEQ ID NO: 155937 - RNA, 19 nt, Artificial Sequence
  Description of Artificial Sequence: Synthetic oligonucleotide
aacaaucaaccccgcacga

SEQ ID NO: 155938 - RNA, 19 nt, Artificial Sequence
  Description of Artificial Sequence: Synthetic oligonucleotide
uuucuaaggguaccuccug

SEQ ID NO: 155939 - RNA, 19 nt, Artificial Sequence
  Description of Artificial Sequence: Synthetic oligonucleotide
ugaacccaccgucuuaacu

SEQ ID NO: 155940 - RNA, 19 nt, Artificial Sequence
  Description of Artificial Sequence: Synthetic oligonucleotide
caagugaagaaagaggaca

SEQ ID NO: 155941 - RNA, 19 nt, Artificial Sequence
  Description of Artificial Sequence: Synthetic oligonucleotide
uccuagaggacagguaucc

SEQ ID NO: 155942 - RNA, 19 nt, Artificial Sequence
  Description of Artificial Sequence: Synthetic oligonucleotide
ugguggguaaguguaacug

SEQ ID NO: 155943 - RNA, 19 nt, Artificial Sequence
  Description of Artificial Sequence: Synthetic oligonucleotide
uauccgauguuguccacga

SEQ ID NO: 155944 - RNA, 19 nt, Artificial Sequence
  Description of Artificial Sequence: Synthetic oligonucleotide
cacgacuccguacaggcag

SEQ ID NO: 155945 - RNA, 19 nt, Artificial Sequence
  Description of Artificial Sequence: Synthetic oligonucleotide
ugcuuuauagguggaggag

SEQ ID NO: 155946 - RNA, 19 nt, Artificial Sequence
  Description of Artificial Sequence: Synthetic oligonucleotide
gagggguaacuguuacucg

SEQ ID NO: 155947 - RNA, 19 nt, Artificial Sequence
  Description of Artificial Sequence: Synthetic oligonucleotide
uguguaucacgggaguuug

SEQ ID NO: 155948 - RNA, 19 nt, Artificial Sequence
  Description of Artificial Sequence: Synthetic oligonucleotide
aggguaucacugugaaaac

SEQ ID NO: 155949 - RNA, 19 nt, Artificial Sequence
  Description of Artificial Sequence: Synthetic oligonucleotide
gugaaauuuacaguuggca

SEQ ID NO: 155950 - RNA, 19 nt, Artificial Sequence
  Description of Artificial Sequence: Synthetic oligonucleotide
accauguucggugcuacac

SEQ ID NO: 155951 - RNA, 19 nt, Artificial Sequence
  Description of Artificial Sequence: Synthetic oligonucleotide
guaggcaacucaaaagggc

SEQ ID NO: 155952 - RNA, 19 nt, Artificial Sequence
  Description of Artificial Sequence: Synthetic oligonucleotide
aguaaaauggcaagccacu

SEQ ID NO: 155953 - RNA, 19 nt, Artificial Sequence
  Description of Artificial Sequence: Synthetic oligonucleotide
guagugagauaugggauag

SEQ ID NO: 155954 - RNA, 19 nt, Artificial Sequence
  Description of Artificial Sequence: Synthetic oligonucleotide
guaguaaaauggcaagcca

SEQ ID NO: 155955 - RNA, 19 nt, Artificial Sequence
  Description of Artificial Sequence: Synthetic oligonucleotide
uaugcgagggcgucgggca

SEQ ID NO: 155956 - RNA, 19 nt, Artificial Sequence
  Description of Artificial Sequence: Synthetic oligonucleotide
ugacgcguucuaaauacaa

SEQ ID NO: 155957 - RNA, 19 nt, Artificial Sequence
  Description of Artificial Sequence: Synthetic oligonucleotide
uucuguuucgaggagccac

SEQ ID NO: 155958 - RNA, 19 nt, Artificial Sequence
  Description of Artificial Sequence: Synthetic oligonucleotide
uagaggacagguauccgau

SEQ ID NO: 155959 - RNA, 19 nt, Artificial Sequence
  Description of Artificial Sequence: Synthetic oligonucleotide
ucaaccccgcacgaggacg

SEQ ID NO: 155960 - RNA, 19 nt, Artificial Sequence
  Description of Artificial Sequence: Synthetic oligonucleotide
uugaaacuggcauguuuac

SEQ ID NO: 155961 - RNA, 19 nt, Artificial Sequence
  Description of Artificial Sequence: Synthetic oligonucleotide
uucuaaggguaccuccugu

SEQ ID NO: 155962 - RNA, 19 nt, Artificial Sequence
  Description of Artificial Sequence: Synthetic oligonucleotide
gauagggaggguccccugc

SEQ ID NO: 155963 - RNA, 19 nt, Artificial Sequence
  Description of Artificial Sequence: Synthetic oligonucleotide
ucaucgagggguaacuguu

SEQ ID NO: 155964 - RNA, 19 nt, Artificial Sequence
  Description of Artificial Sequence: Synthetic oligonucleotide
ugcuaccccacagaaaugu

SEQ ID NO: 155965 - RNA, 19 nt, Artificial Sequence
  Description of Artificial Sequence: Synthetic oligonucleotide
cuuucaugcuaacuccaac

SEQ ID NO: 155966 - RNA, 19 nt, Artificial Sequence
  Description of Artificial Sequence: Synthetic oligonucleotide
aauccaauggaugguggau

SEQ ID NO: 155967 - RNA, 19 nt, Artificial Sequence
  Description of Artificial Sequence: Synthetic oligonucleotide
acuaucggcccacucuuug

SEQ ID NO: 155968 - RNA, 19 nt, Artificial Sequence
  Description of Artificial Sequence: Synthetic oligonucleotide
accgucuuaacugcagagg

SEQ ID NO: 155969 - RNA, 19 nt, Artificial Sequence
  Description of Artificial Sequence: Synthetic oligonucleotide
cugacugauaagcugacaa

SEQ ID NO: 155970 - RNA, 19 nt, Artificial Sequence
  Description of Artificial Sequence: Synthetic oligonucleotide
ucugauauuguggcuggac

SEQ ID NO: 155971 - RNA, 19 nt, Artificial Sequence
  Description of Artificial Sequence: Synthetic oligonucleotide
ugguuauugggcacauccu

SEQ ID NO: 155972 - RNA, 19 nt, Artificial Sequence
  Description of Artificial Sequence: Synthetic oligonucleotide
agguauccgauguugucca

SEQ ID NO: 155973 - RNA, 19 nt, Artificial Sequence
  Description of Artificial Sequence: Synthetic oligonucleotide
gacgcguucuaaauacaag

SEQ ID NO: 155974 - RNA, 19 nt, Artificial Sequence
  Description of Artificial Sequence: Synthetic oligonucleotide
acucaaaagggcagguuag

SEQ ID NO: 155975 - RNA, 19 nt, Artificial Sequence
  Description of Artificial Sequence: Synthetic oligonucleotide
aaauaucuuugggauguau

SEQ ID NO: 155976 - RNA, 19 nt, Artificial Sequence
  Description of Artificial Sequence: Synthetic oligonucleotide
gguaacauccccaaucuuc

SEQ ID NO: 155977 - RNA, 19 nt, Artificial Sequence
  Description of Artificial Sequence: Synthetic oligonucleotide
aacuguuacucggauugga

SEQ ID NO: 155978 - RNA, 19 nt, Artificial Sequence
  Description of Artificial Sequence: Synthetic oligonucleotide
aagugacgcguucuaaaua

SEQ ID NO: 155979 - RNA, 19 nt, Artificial Sequence
  Description of Artificial Sequence: Synthetic oligonucleotide
auccuauagggauauuaaa

SEQ ID NO: 155980 - RNA, 19 nt, Artificial Sequence
  Description of Artificial Sequence: Synthetic oligonucleotide
agcucgaggaagugacgcg

SEQ ID NO: 155981 - RNA, 19 nt, Artificial Sequence
  Description of Artificial Sequence: Synthetic oligonucleotide
cucaagucugaugugccgc

SEQ ID NO: 155982 - RNA, 19 nt, Artificial Sequence
  Description of Artificial Sequence: Synthetic oligonucleotide
cugauaagcugacaaacaa

SEQ ID NO: 155983 - RNA, 19 nt, Artificial Sequence
  Description of Artificial Sequence: Synthetic oligonucleotide
auuugucccaccauugcca

SEQ ID NO: 155984 - RNA, 19 nt, Artificial Sequence
  Description of Artificial Sequence: Synthetic oligonucleotide
gcagauucaguaugcgagg

SEQ ID NO: 155985 - RNA, 19 nt, Artificial Sequence
  Description of Artificial Sequence: Synthetic oligonucleotide
aguagagggcaagaaauau

SEQ ID NO: 155986 - RNA, 19 nt, Artificial Sequence
  Description of Artificial Sequence: Synthetic oligonucleotide
ucgggcaugagcaccacuu

SEQ ID NO: 155987 - RNA, 19 nt, Artificial Sequence
  Description of Artificial Sequence: Synthetic oligonucleotide
acugauaagcugacaaaca

SEQ ID NO: 155988 - RNA, 19 nt, Artificial Sequence
  Description of Artificial Sequence: Synthetic oligonucleotide
uaacugagagggucuuuug

SEQ ID NO: 155989 - RNA, 19 nt, Artificial Sequence
  Description of Artificial Sequence: Synthetic oligonucleotide
cacugagggaauaaggaaa

SEQ ID NO: 155990 - RNA, 19 nt, Artificial Sequence
  Description of Artificial Sequence: Synthetic oligonucleotide
uccuguguaucacgggagu

SEQ ID NO: 155991 - RNA, 19 nt, Artificial Sequence
  Description of Artificial Sequence: Synthetic oligonucleotide
guaaguguaacugcuccca

SEQ ID NO: 155992 - RNA, 19 nt, Artificial Sequence
  Description of Artificial Sequence: Synthetic oligonucleotide
cagauucaguaugcgaggg

SEQ ID NO: 155993 - RNA, 19 nt, Artificial Sequence
  Description of Artificial Sequence: Synthetic oligonucleotide
gguggguaaguguaacugc

SEQ ID NO: 155994 - RNA, 19 nt, Artificial Sequence
  Description of Artificial Sequence: Synthetic oligonucleotide
gauaaggaucacucaucga

SEQ ID NO: 155995 - RNA, 19 nt, Artificial Sequence
  Description of Artificial Sequence: Synthetic oligonucleotide
agcuuagcguuacugguau

SEQ ID NO: 155996 - RNA, 19 nt, Artificial Sequence
  Description of Artificial Sequence: Synthetic oligonucleotide
guauccgauguuguccacg

SEQ ID NO: 155997 - RNA, 19 nt, Artificial Sequence
  Description of Artificial Sequence: Synthetic oligonucleotide
acuucaguacugugagaug

SEQ ID NO: 155998 - RNA, 19 nt, Artificial Sequence
  Description of Artificial Sequence: Synthetic oligonucleotide
ggugcuacaccagauggag

SEQ ID NO: 155999 - RNA, 19 nt, Artificial Sequence
  Description of Artificial Sequence: Synthetic oligonucleotide
aguaacagcucgaggaagu

SEQ ID NO: 156000 - RNA, 19 nt, Artificial Sequence
  Description of Artificial Sequence: Synthetic oligonucleotide
auaagaguaagaacauaau

SEQ ID NO: 156001 - RNA, 19 nt, Artificial Sequence
  Description of Artificial Sequence: Synthetic oligonucleotide
ugaacacccgcccacucuu

SEQ ID NO: 156002 - RNA, 19 nt, Artificial Sequence
  Description of Artificial Sequence: Synthetic oligonucleotide
gcgcuuguuaccauguucg

SEQ ID NO: 156003 - RNA, 19 nt, Artificial Sequence
  Description of Artificial Sequence: Synthetic oligonucleotide
cuaucggcccacucuuugc

SEQ ID NO: 156004 - RNA, 19 nt, Artificial Sequence
  Description of Artificial Sequence: Synthetic oligonucleotide
guacuugauggagcggugg

SEQ ID NO: 156005 - RNA, 19 nt, Artificial Sequence
  Description of Artificial Sequence: Synthetic oligonucleotide
aucaaccccgcacgaggac

SEQ ID NO: 156006 - RNA, 19 nt, Artificial Sequence
  Description of Artificial Sequence: Synthetic oligonucleotide
ugcgaacaacuaagaaugu

SEQ ID NO: 156007 - RNA, 19 nt, Artificial Sequence
  Description of Artificial Sequence: Synthetic oligonucleotide
cauguucggugcuacacca

SEQ ID NO: 156008 - RNA, 19 nt, Artificial Sequence
  Description of Artificial Sequence: Synthetic oligonucleotide
ucuccauuacuaaguuguc

SEQ ID NO: 156009 - RNA, 19 nt, Artificial Sequence
  Description of Artificial Sequence: Synthetic oligonucleotide
aguuaucugucaguaggca

SEQ ID NO: 156010 - RNA, 19 nt, Artificial Sequence
  Description of Artificial Sequence: Synthetic oligonucleotide
uaaguguaacugcucccau

SEQ ID NO: 156011 - RNA, 19 nt, Artificial Sequence
  Description of Artificial Sequence: Synthetic oligonucleotide
aucugcgaacaacuaagaa

SEQ ID NO: 156012 - RNA, 19 nt, Artificial Sequence
  Description of Artificial Sequence: Synthetic oligonucleotide
aaucaaccccgcacgagga

SEQ ID NO: 156013 - RNA, 19 nt, Artificial Sequence
  Description of Artificial Sequence: Synthetic oligonucleotide
augaacacccgcccacucu

SEQ ID NO: 156014 - RNA, 19 nt, Artificial Sequence
  Description of Artificial Sequence: Synthetic oligonucleotide
aaugaucugcgaacaacua

SEQ ID NO: 156015 - RNA, 19 nt, Artificial Sequence
  Description of Artificial Sequence: Synthetic oligonucleotide
uggguaaguguaacugcuc

SEQ ID NO: 156016 - RNA, 19 nt, Artificial Sequence
  Description of Artificial Sequence: Synthetic oligonucleotide
uaucugucaguaggcaacu

SEQ ID NO: 156017 - RNA, 19 nt, Artificial Sequence
  Description of Artificial Sequence: Synthetic oligonucleotide
gaccggguauaagaguaag

SEQ ID NO: 156018 - RNA, 19 nt, Artificial Sequence
  Description of Artificial Sequence: Synthetic oligonucleotide
cucaacagguguuuauuaa

SEQ ID NO: 156019 - RNA, 19 nt, Artificial Sequence
  Description of Artificial Sequence: Synthetic oligonucleotide
ggaaauccaauggauggug

SEQ ID NO: 156020 - RNA, 19 nt, Artificial Sequence
  Description of Artificial Sequence: Synthetic oligonucleotide
cuuagcguuacugguauaa

SEQ ID NO: 156021 - RNA, 19 nt, Artificial Sequence
  Description of Artificial Sequence: Synthetic oligonucleotide
cuguacuaucagauccuac

SEQ ID NO: 156022 - RNA, 19 nt, Artificial Sequence
  Description of Artificial Sequence: Synthetic oligonucleotide
gugggauucuacacuuggg

SEQ ID NO: 156023 - RNA, 19 nt, Artificial Sequence
  Description of Artificial Sequence: Synthetic oligonucleotide
uggauaguagcuggacaga

SEQ ID NO: 156024 - RNA, 19 nt, Artificial Sequence
  Description of Artificial Sequence: Synthetic oligonucleotide
uguuuacauuugucccacc

SEQ ID NO: 156025 - RNA, 19 nt, Artificial Sequence
  Description of Artificial Sequence: Synthetic oligonucleotide
gaagugacgcguucuaaau

SEQ ID NO: 156026 - RNA, 19 nt, Artificial Sequence
  Description of Artificial Sequence: Synthetic oligonucleotide
augaccggguauaagagua

SEQ ID NO: 156027 - RNA, 19 nt, Artificial Sequence
  Description of Artificial Sequence: Synthetic oligonucleotide
caacuaaaaugaucugcga

SEQ ID NO: 156028 - RNA, 19 nt, Artificial Sequence
  Description of Artificial Sequence: Synthetic oligonucleotide
uuagcguuacugguauaaa

SEQ ID NO: 156029 - RNA, 19 nt, Artificial Sequence
  Description of Artificial Sequence: Synthetic oligonucleotide
uuaggucaaucugacugau

SEQ ID NO: 156030 - RNA, 19 nt, Artificial Sequence
  Description of Artificial Sequence: Synthetic oligonucleotide
agggcgucgggcaugagca

SEQ ID NO: 156031 - RNA, 19 nt, Artificial Sequence
  Description of Artificial Sequence: Synthetic oligonucleotide
ugaccggguauaagaguaa

SEQ ID NO: 156032 - RNA, 19 nt, Artificial Sequence
  Description of Artificial Sequence: Synthetic oligonucleotide
cuucaguacugugagaugu

SEQ ID NO: 156033 - RNA, 19 nt, Artificial Sequence
  Description of Artificial Sequence: Synthetic oligonucleotide
uacaccagauggaguacuu

SEQ ID NO: 156034 - RNA, 19 nt, Artificial Sequence
  Description of Artificial Sequence: Synthetic oligonucleotide
caguaugcgagggcgucgg

SEQ ID NO: 156035 - RNA, 19 nt, Artificial Sequence
  Description of Artificial Sequence: Synthetic oligonucleotide
ugcucaacagguguuuauu

SEQ ID NO: 156036 - RNA, 19 nt, Artificial Sequence
  Description of Artificial Sequence: Synthetic oligonucleotide
aggacgacacuggagcuga

SEQ ID NO: 156037 - RNA, 19 nt, Artificial Sequence
  Description of Artificial Sequence: Synthetic oligonucleotide
ucgaggaagugacgcguuc

SEQ ID NO: 156038 - RNA, 19 nt, Artificial Sequence
  Description of Artificial Sequence: Synthetic oligonucleotide
acgggaguuugugacaggu

SEQ ID NO: 156039 - RNA, 19 nt, Artificial Sequence
  Description of Artificial Sequence: Synthetic oligonucleotide
ucgagggguaacuguuacu

SEQ ID NO: 156040 - RNA, 19 nt, Artificial Sequence
  Description of Artificial Sequence: Synthetic oligonucleotide
ugguggauaguagcuggac

SEQ ID NO: 156041 - RNA, 19 nt, Artificial Sequence
  Description of Artificial Sequence: Synthetic oligonucleotide
gaucugcgaacaacuaaga

SEQ ID NO: 156042 - RNA, 19 nt, Artificial Sequence
  Description of Artificial Sequence: Synthetic oligonucleotide
agaaugucacaacgcugaa

SEQ ID NO: 156043 - RNA, 19 nt, Artificial Sequence
  Description of Artificial Sequence: Synthetic oligonucleotide
cagguguuuauuaaggcuu

SEQ ID NO: 156044 - RNA, 19 nt, Artificial Sequence
  Description of Artificial Sequence: Synthetic oligonucleotide
gguggauaguagcuggaca

SEQ ID NO: 156045 - RNA, 19 nt, Artificial Sequence
  Description of Artificial Sequence: Synthetic oligonucleotide
aagcuuagcguuacuggua

SEQ ID NO: 156046 - RNA, 19 nt, Artificial Sequence
  Description of Artificial Sequence: Synthetic oligonucleotide
ucacucaucgagggguaac

SEQ ID NO: 156047 - RNA, 19 nt, Artificial Sequence
  Description of Artificial Sequence: Synthetic oligonucleotide
guugaggguaucacuguga

SEQ ID NO: 156048 - RNA, 19 nt, Artificial Sequence
  Description of Artificial Sequence: Synthetic oligonucleotide
ggguaucacugugaaaacc

SEQ ID NO: 156049 - RNA, 19 nt, Artificial Sequence
  Description of Artificial Sequence: Synthetic oligonucleotide
aaaauaucuuugggaugua

SEQ ID NO: 156050 - RNA, 19 nt, Artificial Sequence
  Description of Artificial Sequence: Synthetic oligonucleotide
auaccacagguaguaaaau

SEQ ID NO: 156051 - RNA, 19 nt, Artificial Sequence
  Description of Artificial Sequence: Synthetic oligonucleotide
cuccuagaggacagguauc

SEQ ID NO: 156052 - RNA, 19 nt, Artificial Sequence
  Description of Artificial Sequence: Synthetic oligonucleotide
aguaugcgagggcgucggg

SEQ ID NO: 156053 - RNA, 19 nt, Artificial Sequence
  Description of Artificial Sequence: Synthetic oligonucleotide
cugccuguacuaucagauc

SEQ ID NO: 156054 - RNA, 19 nt, Artificial Sequence
  Description of Artificial Sequence: Synthetic oligonucleotide
ggaagugacgcguucuaaa

SEQ ID NO: 156055 - RNA, 19 nt, Artificial Sequence
  Description of Artificial Sequence: Synthetic oligonucleotide
gaagguuaucugcucucua

SEQ ID NO: 156056 - RNA, 19 nt, Artificial Sequence
  Description of Artificial Sequence: Synthetic oligonucleotide
ggauucucaagugaagaaa

SEQ ID NO: 156057 - RNA, 19 nt, Artificial Sequence
  Description of Artificial Sequence: Synthetic oligonucleotide
guauaagaguaagaacaua

SEQ ID NO: 156058 - RNA, 19 nt, Artificial Sequence
  Description of Artificial Sequence: Synthetic oligonucleotide
gauaguagcuggacagaua

SEQ ID NO: 156059 - RNA, 19 nt, Artificial Sequence
  Description of Artificial Sequence: Synthetic oligonucleotide
cuguuacucggauuggacu

SEQ ID NO: 156060 - RNA, 19 nt, Artificial Sequence
  Description of Artificial Sequence: Synthetic oligonucleotide
cuuuccuugcgcaccaccu

SEQ ID NO: 156061 - RNA, 19 nt, Artificial Sequence
  Description of Artificial Sequence: Synthetic oligonucleotide
uaccauguucggugcuaca

SEQ ID NO: 156062 - RNA, 19 nt, Artificial Sequence
  Description of Artificial Sequence: Synthetic oligonucleotide
uaggucaaucugacugaua

SEQ ID NO: 156063 - RNA, 19 nt, Artificial Sequence
  Description of Artificial Sequence: Synthetic oligonucleotide
aaaagucgucaaagaugga

SEQ ID NO: 156064 - RNA, 19 nt, Artificial Sequence
  Description of Artificial Sequence: Synthetic oligonucleotide
ccauguucggugcuacacc

SEQ ID NO: 156065 - RNA, 19 nt, Artificial Sequence
  Description of Artificial Sequence: Synthetic oligonucleotide
gaggaagugacgcguucua

SEQ ID NO: 156066 - RNA, 19 nt, Artificial Sequence
  Description of Artificial Sequence: Synthetic oligonucleotide
cccacucuuaagauuccag

SEQ ID NO: 156067 - RNA, 19 nt, Artificial Sequence
  Description of Artificial Sequence: Synthetic oligonucleotide
ccgcccacucuuaagauuc

SEQ ID NO: 156068 - RNA, 19 nt, Artificial Sequence
  Description of Artificial Sequence: Synthetic oligonucleotide
accaaacugguuuguccuu

SEQ ID NO: 156069 - RNA, 19 nt, Artificial Sequence
  Description of Artificial Sequence: Synthetic oligonucleotide
acuuucaugcuaacuccaa

SEQ ID NO: 156070 - RNA, 19 nt, Artificial Sequence
  Description of Artificial Sequence: Synthetic oligonucleotide
ggguuauagcugugggcag

SEQ ID NO: 156071 - RNA, 19 nt, Artificial Sequence
  Description of Artificial Sequence: Synthetic oligonucleotide
cauuacuaaguuguccaua

SEQ ID NO: 156072 - RNA, 19 nt, Artificial Sequence
  Description of Artificial Sequence: Synthetic oligonucleotide
cuaucagauccuacauuua

SEQ ID NO: 156073 - RNA, 19 nt, Artificial Sequence
  Description of Artificial Sequence: Synthetic oligonucleotide
ggcaugagcaccacuuuca

SEQ ID NO: 156074 - RNA, 19 nt, Artificial Sequence
  Description of Artificial Sequence: Synthetic oligonucleotide
acauagccccaaccucaug

SEQ ID NO: 156075 - RNA, 19 nt, Artificial Sequence
  Description of Artificial Sequence: Synthetic oligonucleotide
guggguaaguguaacugcu

SEQ ID NO: 156076 - RNA, 19 nt, Artificial Sequence
  Description of Artificial Sequence: Synthetic oligonucleotide
ugggauguauuagguguuu

SEQ ID NO: 156077 - RNA, 19 nt, Artificial Sequence
  Description of Artificial Sequence: Synthetic oligonucleotide
ggcgcgugcagauucagua

SEQ ID NO: 156078 - RNA, 19 nt, Artificial Sequence
  Description of Artificial Sequence: Synthetic oligonucleotide
cacgggaguuugugacagg

SEQ ID NO: 156079 - RNA, 19 nt, Artificial Sequence
  Description of Artificial Sequence: Synthetic oligonucleotide
cggguauaagaguaagaac

SEQ ID NO: 156080 - RNA, 19 nt, Artificial Sequence
  Description of Artificial Sequence: Synthetic oligonucleotide
ggaucacucaucgaggggu

SEQ ID NO: 156081 - RNA, 19 nt, Artificial Sequence
  Description of Artificial Sequence: Synthetic oligonucleotide
accggguauaagaguaaga

SEQ ID NO: 156082 - RNA, 19 nt, Artificial Sequence
  Description of Artificial Sequence: Synthetic oligonucleotide
cgcguucuaaauacaaguc

SEQ ID NO: 156083 - RNA, 19 nt, Artificial Sequence
  Description of Artificial Sequence: Synthetic oligonucleotide
aaccccgcacgaggacgac

SEQ ID NO: 156084 - RNA, 19 nt, Artificial Sequence
  Description of Artificial Sequence: Synthetic oligonucleotide
ggauauuaaaugaccgggu

SEQ ID NO: 156085 - RNA, 19 nt, Artificial Sequence
  Description of Artificial Sequence: Synthetic oligonucleotide
aggaagugacgcguucuaa

SEQ ID NO: 156086 - RNA, 19 nt, Artificial Sequence
  Description of Artificial Sequence: Synthetic oligonucleotide
gggcaugagcaccacuuuc

SEQ ID NO: 156087 - RNA, 19 nt, Artificial Sequence
  Description of Artificial Sequence: Synthetic oligonucleotide
ccagcgggguugaaguggc

SEQ ID NO: 156088 - RNA, 19 nt, Artificial Sequence
  Description of Artificial Sequence: Synthetic oligonucleotide
cgagggguaacuguuacuc

SEQ ID NO: 156089 - RNA, 19 nt, Artificial Sequence
  Description of Artificial Sequence: Synthetic oligonucleotide
uggagcggaaggcgccauc

SEQ ID NO: 156090 - RNA, 19 nt, Artificial Sequence
  Description of Artificial Sequence: Synthetic oligonucleotide
cgcacgaggacgacacugg

SEQ ID NO: 156091 - RNA, 19 nt, Artificial Sequence
  Description of Artificial Sequence: Synthetic oligonucleotide
acugaacuauggauagcuu

SEQ ID NO: 156092 - RNA, 19 nt, Artificial Sequence
  Description of Artificial Sequence: Synthetic oligonucleotide
ugcgagggcgucgggcaug

SEQ ID NO: 156093 - RNA, 19 nt, Artificial Sequence
  Description of Artificial Sequence: Synthetic oligonucleotide
acccgcccacucuuaagau

SEQ ID NO: 156094 - RNA, 19 nt, Artificial Sequence
  Description of Artificial Sequence: Synthetic oligonucleotide
gcaugaagugauggucucc

SEQ ID NO: 156095 - RNA, 19 nt, Artificial Sequence
  Description of Artificial Sequence: Synthetic oligonucleotide
caaccccgcacgaggacga

SEQ ID NO: 156096 - RNA, 19 nt, Artificial Sequence
  Description of Artificial Sequence: Synthetic oligonucleotide
gaucacucaucgaggggua

SEQ ID NO: 156097 - RNA, 19 nt, Artificial Sequence
  Description of Artificial Sequence: Synthetic oligonucleotide
ccaccaagggagcuuggug

SEQ ID NO: 156098 - RNA, 19 nt, Artificial Sequence
  Description of Artificial Sequence: Synthetic oligonucleotide
cagaccucccggcugccca

SEQ ID NO: 156099 - RNA, 19 nt, Artificial Sequence
  Description of Artificial Sequence: Synthetic oligonucleotide
agggagcuugguggguaag

SEQ ID NO: 156100 - RNA, 19 nt, Artificial Sequence
  Description of Artificial Sequence: Synthetic oligonucleotide
caucgagggguaacuguua

SEQ ID NO: 156101 - RNA, 19 nt, Artificial Sequence
  Description of Artificial Sequence: Synthetic oligonucleotide
guaaaauggcaagccacuu

SEQ ID NO: 156102 - RNA, 19 nt, Artificial Sequence
  Description of Artificial Sequence: Synthetic oligonucleotide
gugacgcguucuaaauaca

SEQ ID NO: 156103 - RNA, 19 nt, Artificial Sequence
  Description of Artificial Sequence: Synthetic oligonucleotide
aucacucaucgagggguaa

SEQ ID NO: 156104 - RNA, 19 nt, Artificial Sequence
  Description of Artificial Sequence: Synthetic oligonucleotide
agaccucccggcugcccaa

SEQ ID NO: 156105 - RNA, 19 nt, Artificial Sequence
  Description of Artificial Sequence: Synthetic oligonucleotide
cgcgugcagauucaguaug

SEQ ID NO: 156106 - RNA, 19 nt, Artificial Sequence
  Description of Artificial Sequence: Synthetic oligonucleotide
cauaggcggagcucugagu

SEQ ID NO: 156107 - RNA, 19 nt, Artificial Sequence
  Description of Artificial Sequence: Synthetic oligonucleotide
gacgacacuggagcugacu

SEQ ID NO: 156108 - RNA, 19 nt, Artificial Sequence
  Description of Artificial Sequence: Synthetic oligonucleotide
ccacucuuaagauuccagu

SEQ ID NO: 156109 - RNA, 19 nt, Artificial Sequence
  Description of Artificial Sequence: Synthetic oligonucleotide
acgacuccguacaggcagu

SEQ ID NO: 156110 - RNA, 19 nt, Artificial Sequence
  Description of Artificial Sequence: Synthetic oligonucleotide
ccgucuuaacugcagaggu

SEQ ID NO: 156111 - RNA, 19 nt, Artificial Sequence
  Description of Artificial Sequence: Synthetic oligonucleotide
augcgagggcgucgggcau

SEQ ID NO: 156112 - RNA, 19 nt, Artificial Sequence
  Description of Artificial Sequence: Synthetic oligonucleotide
ggauaguagcuggacagau

SEQ ID NO: 156113 - RNA, 19 nt, Artificial Sequence
  Description of Artificial Sequence: Synthetic oligonucleotide
caccaagcauacagcuuua

SEQ ID NO: 156114 - RNA, 19 nt, Artificial Sequence
  Description of Artificial Sequence: Synthetic oligonucleotide
cacaacgcugaaccauacu

SEQ ID NO: 156115 - RNA, 19 nt, Artificial Sequence
  Description of Artificial Sequence: Synthetic oligonucleotide
ccgcacgaggacgacacug

SEQ ID NO: 156116 - RNA, 19 nt, Artificial Sequence
  Description of Artificial Sequence: Synthetic oligonucleotide
gcuuguuaccauguucggu

SEQ ID NO: 156117 - RNA, 19 nt, Artificial Sequence
  Description of Artificial Sequence: Synthetic oligonucleotide
gcacgaggacgacacugga

SEQ ID NO: 156118 - RNA, 19 nt, Artificial Sequence
  Description of Artificial Sequence: Synthetic oligonucleotide
acccaccgucuuaacugca

SEQ ID NO: 156119 - RNA, 19 nt, Artificial Sequence
  Description of Artificial Sequence: Synthetic oligonucleotide
gaacacccgcccacucuua

SEQ ID NO: 156120 - RNA, 19 nt, Artificial Sequence
  Description of Artificial Sequence: Synthetic oligonucleotide
gcucccauaggcggagcuc

SEQ ID NO: 156121 - RNA, 19 nt, Artificial Sequence
  Description of Artificial Sequence: Synthetic oligonucleotide
ggguaacuguuacucggau

SEQ ID NO: 156122 - RNA, 19 nt, Artificial Sequence
  Description of Artificial Sequence: Synthetic oligonucleotide
cugcucccauaggcggagc

SEQ ID NO: 156123 - RNA, 19 nt, Artificial Sequence
  Description of Artificial Sequence: Synthetic oligonucleotide
gcaugagcaccacuuucau

SEQ ID NO: 156124 - RNA, 19 nt, Artificial Sequence
  Description of Artificial Sequence: Synthetic oligonucleotide
cucgaggaagugacgcguu

SEQ ID NO: 156125 - RNA, 19 nt, Artificial Sequence
  Description of Artificial Sequence: Synthetic oligonucleotide
gucgggcaugagcaccacu

SEQ ID NO: 156126 - RNA, 19 nt, Artificial Sequence
  Description of Artificial Sequence: Synthetic oligonucleotide
gcccacucuuaagauucca

SEQ ID NO: 156127 - RNA, 19 nt, Artificial Sequence
  Description of Artificial Sequence: Synthetic oligonucleotide
guguaucacgggaguuugu

SEQ ID NO: 156128 - RNA, 19 nt, Artificial Sequence
  Description of Artificial Sequence: Synthetic oligonucleotide
ccauuacuaaguuguccau

SEQ ID NO: 156129 - RNA, 19 nt, Artificial Sequence
  Description of Artificial Sequence: Synthetic oligonucleotide
gcuuagcguuacugguaua

SEQ ID NO: 156130 - RNA, 19 nt, Artificial Sequence
  Description of Artificial Sequence: Synthetic oligonucleotide
gcgcgugcagauucaguau

SEQ ID NO: 156131 - RNA, 19 nt, Artificial Sequence
  Description of Artificial Sequence: Synthetic oligonucleotide
gggauguauuagguguuuu

SEQ ID NO: 156132 - RNA, 19 nt, Artificial Sequence
  Description of Artificial Sequence: Synthetic oligonucleotide
ccguaguccacaggggacu

SEQ ID NO: 156133 - RNA, 19 nt, Artificial Sequence
  Description of Artificial Sequence: Synthetic oligonucleotide
gcgagggcgucgggcauga

SEQ ID NO: 156134 - RNA, 19 nt, Artificial Sequence
  Description of Artificial Sequence: Synthetic oligonucleotide
cgaggacgacacuggagcu

SEQ ID NO: 156135 - RNA, 19 nt, Artificial Sequence
  Description of Artificial Sequence: Synthetic oligonucleotide
ccucuacagugggcgcgug

SEQ ID NO: 156136 - RNA, 19 nt, Artificial Sequence
  Description of Artificial Sequence: Synthetic oligonucleotide
cgaggaagugacgcguucu

SEQ ID NO: 156137 - RNA, 19 nt, Artificial Sequence
  Description of Artificial Sequence: Synthetic oligonucleotide
ccuguguaucacgggaguu

SEQ ID NO: 156138 - RNA, 19 nt, Artificial Sequence
  Description of Artificial Sequence: Synthetic oligonucleotide
cccgcccacucuuaagauu

SEQ ID NO: 156139 - RNA, 19 nt, Artificial Sequence
  Description of Artificial Sequence: Synthetic oligonucleotide
gggcgcgugcagauucagu

SEQ ID NO: 156140 - RNA, 19 nt, Artificial Sequence
  Description of Artificial Sequence: Synthetic oligonucleotide
cgucgggcaugagcaccac

SEQ ID NO: 156141 - RNA, 19 nt, Artificial Sequence
  Description of Artificial Sequence: Synthetic oligonucleotide
cgggaguuugugacagguu

SEQ ID NO: 156142 - RNA, 19 nt, Artificial Sequence
  Description of Artificial Sequence: Synthetic oligonucleotide
cgggcaugagcaccacuuu

SEQ ID NO: 156143 - RNA, 19 nt, Artificial Sequence
  Description of Artificial Sequence: Synthetic oligonucleotide
cgacuccguacaggcagua

SEQ ID NO: 156144 - RNA, 19 nt, Artificial Sequence
  Description of Artificial Sequence: Synthetic oligonucleotide
uaaaucucuaaacaaaacg

SEQ ID NO: 156145 - RNA, 19 nt, Artificial Sequence
  Description of Artificial Sequence: Synthetic oligonucleotide
aacuuaauuugucugacac

SEQ ID NO: 156146 - RNA, 19 nt, Artificial Sequence
  Description of Artificial Sequence: Synthetic oligonucleotide
auugcauaaagucaguaac

SEQ ID NO: 156147 - RNA, 19 nt, Artificial Sequence
  Description of Artificial Sequence: Synthetic oligonucleotide
uuggguauuaucuauacag

SEQ ID NO: 156148 - RNA, 19 nt, Artificial Sequence
  Description of Artificial Sequence: Synthetic oligonucleotide
uuuguugucacauaacacc

SEQ ID NO: 156149 - RNA, 19 nt, Artificial Sequence
  Description of Artificial Sequence: Synthetic oligonucleotide
aaugaaguuuccuccaagg

SEQ ID NO: 156150 - RNA, 19 nt, Artificial Sequence
  Description of Artificial Sequence: Synthetic oligonucleotide
uaaucuacuaauauauucu

SEQ ID NO: 156151 - RNA, 19 nt, Artificial Sequence
  Description of Artificial Sequence: Synthetic oligonucleotide
cuugcuaggauuaaggcac

SEQ ID NO: 156152 - RNA, 19 nt, Artificial Sequence
  Description of Artificial Sequence: Synthetic oligonucleotide
agcuagauugcauaaaguc

SEQ ID NO: 156153 - RNA, 19 nt, Artificial Sequence
  Description of Artificial Sequence: Synthetic oligonucleotide
cuagauugcauaaagucag

SEQ ID NO: 156154 - RNA, 19 nt, Artificial Sequence
  Description of Artificial Sequence: Synthetic oligonucleotide
aaaacggacaaccaaugga

SEQ ID NO: 156155 - RNA, 19 nt, Artificial Sequence
  Description of Artificial Sequence: Synthetic oligonucleotide
ucacauaacaccaaguaau

SEQ ID NO: 156156 - RNA, 19 nt, Artificial Sequence
  Description of Artificial Sequence: Synthetic oligonucleotide
cuuaauuugucugacacag

SEQ ID NO: 156157 - RNA, 19 nt, Artificial Sequence
  Description of Artificial Sequence: Synthetic oligonucleotide
uucuauuuauggcauagug

SEQ ID NO: 156158 - RNA, 19 nt, Artificial Sequence
  Description of Artificial Sequence: Synthetic oligonucleotide
acauaaagaguuccaggcc

SEQ ID NO: 156159 - RNA, 19 nt, Artificial Sequence
  Description of Artificial Sequence: Synthetic oligonucleotide
aaaauagacuccaccacac

SEQ ID NO: 156160 - RNA, 19 nt, Artificial Sequence
  Description of Artificial Sequence: Synthetic oligonucleotide
ucuauuuauggcauagugu

SEQ ID NO: 156161 - RNA, 19 nt, Artificial Sequence
  Description of Artificial Sequence: Synthetic oligonucleotide
aacccaaguaucuuaggag

SEQ ID NO: 156162 - RNA, 19 nt, Artificial Sequence
  Description of Artificial Sequence: Synthetic oligonucleotide
ucucuaaacaaaacggaca

SEQ ID NO: 156163 - RNA, 19 nt, Artificial Sequence
  Description of Artificial Sequence: Synthetic oligonucleotide
aaaugauaguccuuacugu

SEQ ID NO: 156164 - RNA, 19 nt, Artificial Sequence
  Description of Artificial Sequence: Synthetic oligonucleotide
acaaauagugcaucagggg

SEQ ID NO: 156165 - RNA, 19 nt, Artificial Sequence
  Description of Artificial Sequence: Synthetic oligonucleotide
cuagaauaagcuuccauac

SEQ ID NO: 156166 - RNA, 19 nt, Artificial Sequence
  Description of Artificial Sequence: Synthetic oligonucleotide
uuaucuauacaguuguuuc

SEQ ID NO: 156167 - RNA, 19 nt, Artificial Sequence
  Description of Artificial Sequence: Synthetic oligonucleotide
aguaucuuaggagauuccc

SEQ ID NO: 156168 - RNA, 19 nt, Artificial Sequence
  Description of Artificial Sequence: Synthetic oligonucleotide
uaguguucagcacaaacca

SEQ ID NO: 156169 - RNA, 19 nt, Artificial Sequence
  Description of Artificial Sequence: Synthetic oligonucleotide
agguauaagcacucuaaac

SEQ ID NO: 156170 - RNA, 19 nt, Artificial Sequence
  Description of Artificial Sequence: Synthetic oligonucleotide
acuaccuuuagcauuuacc

SEQ ID NO: 156171 - RNA, 19 nt, Artificial Sequence
  Description of Artificial Sequence: Synthetic oligonucleotide
uucagagaagguuagauuu

SEQ ID NO: 156172 - RNA, 19 nt, Artificial Sequence
  Description of Artificial Sequence: Synthetic oligonucleotide
aauaccuucggacucuuaa

SEQ ID NO: 156173 - RNA, 19 nt, Artificial Sequence
  Description of Artificial Sequence: Synthetic oligonucleotide
aaacucucguguuucauga

SEQ ID NO: 156174 - RNA, 19 nt, Artificial Sequence
  Description of Artificial Sequence: Synthetic oligonucleotide
gagagaacgaagugaaugc

SEQ ID NO: 156175 - RNA, 19 nt, Artificial Sequence
  Description of Artificial Sequence: Synthetic oligonucleotide
agcaaauuauugugaagac

SEQ ID NO: 156176 - RNA, 19 nt, Artificial Sequence
  Description of Artificial Sequence: Synthetic oligonucleotide
accaauggaauuuccucgc

SEQ ID NO: 156177 - RNA, 19 nt, Artificial Sequence
  Description of Artificial Sequence: Synthetic oligonucleotide
aaugauaguccuuacugua

SEQ ID NO: 156178 - RNA, 19 nt, Artificial Sequence
  Description of Artificial Sequence: Synthetic oligonucleotide
ugcagcuaauuccagaaga

SEQ ID NO: 156179 - RNA, 19 nt, Artificial Sequence
  Description of Artificial Sequence: Synthetic oligonucleotide
ucuuaaugguccuugcagc

SEQ ID NO: 156180 - RNA, 19 nt, Artificial Sequence
  Description of Artificial Sequence: Synthetic oligonucleotide
agugucaaguuguagguug

SEQ ID NO: 156181 - RNA, 19 nt, Artificial Sequence
  Description of Artificial Sequence: Synthetic oligonucleotide
uaucccauaaucuacuaau

SEQ ID NO: 156182 - RNA, 19 nt, Artificial Sequence
  Description of Artificial Sequence: Synthetic oligonucleotide
ucuuaggagauucccagga

SEQ ID NO: 156183 - RNA, 19 nt, Artificial Sequence
  Description of Artificial Sequence: Synthetic oligonucleotide
agcguuucacaacugcagc

SEQ ID NO: 156184 - RNA, 19 nt, Artificial Sequence
  Description of Artificial Sequence: Synthetic oligonucleotide
agaagguuagauuugcuaa

SEQ ID NO: 156185 - RNA, 19 nt, Artificial Sequence
  Description of Artificial Sequence: Synthetic oligonucleotide
aacgaagugaaugcaacug

SEQ ID NO: 156186 - RNA, 19 nt, Artificial Sequence
  Description of Artificial Sequence: Synthetic oligonucleotide
uugcauagugucaaguugu

SEQ ID NO: 156187 - RNA, 19 nt, Artificial Sequence
  Description of Artificial Sequence: Synthetic oligonucleotide
aaggcacuguaauacacca

SEQ ID NO: 156188 - RNA, 19 nt, Artificial Sequence
  Description of Artificial Sequence: Synthetic oligonucleotide
aaucuacuaauauauucua

SEQ ID NO: 156189 - RNA, 19 nt, Artificial Sequence
  Description of Artificial Sequence: Synthetic oligonucleotide
ugaaguuuccuccaaggua

SEQ ID NO: 156190 - RNA, 19 nt, Artificial Sequence
  Description of Artificial Sequence: Synthetic oligonucleotide
aagacugagagaacgaagu

SEQ ID NO: 156191 - RNA, 19 nt, Artificial Sequence
  Description of Artificial Sequence: Synthetic oligonucleotide
uuguagguugcucugaaau

SEQ ID NO: 156192 - RNA, 19 nt, Artificial Sequence
  Description of Artificial Sequence: Synthetic oligonucleotide
caugcaaauagucucagca

SEQ ID NO: 156193 - RNA, 19 nt, Artificial Sequence
  Description of Artificial Sequence: Synthetic oligonucleotide
aaugcaacugugaaagcug

SEQ ID NO: 156194 - RNA, 19 nt, Artificial Sequence
  Description of Artificial Sequence: Synthetic oligonucleotide
cuaccuuuagcauuuacca

SEQ ID NO: 156195 - RNA, 19 nt, Artificial Sequence
  Description of Artificial Sequence: Synthetic oligonucleotide
aagugaaugcaacugugaa

SEQ ID NO: 156196 - RNA, 19 nt, Artificial Sequence
  Description of Artificial Sequence: Synthetic oligonucleotide
auuuauggcauaguguuca

SEQ ID NO: 156197 - RNA, 19 nt, Artificial Sequence
  Description of Artificial Sequence: Synthetic oligonucleotide
aacuaccuuuagcauuuac

SEQ ID NO: 156198 - RNA, 19 nt, Artificial Sequence
  Description of Artificial Sequence: Synthetic oligonucleotide
uggguuuugggcaauugcu

SEQ ID NO: 156199 - RNA, 19 nt, Artificial Sequence
  Description of Artificial Sequence: Synthetic oligonucleotide
uauaagcacucuaaacgcu

SEQ ID NO: 156200 - RNA, 19 nt, Artificial Sequence
  Description of Artificial Sequence: Synthetic oligonucleotide
ugcaaauagucucagcaua

SEQ ID NO: 156201 - RNA, 19 nt, Artificial Sequence
  Description of Artificial Sequence: Synthetic oligonucleotide
ugaaacuaccuuuagcauu

SEQ ID NO: 156202 - RNA, 19 nt, Artificial Sequence
  Description of Artificial Sequence: Synthetic oligonucleotide
uugaccucuaacaaagcau

SEQ ID NO: 156203 - RNA, 19 nt, Artificial Sequence
  Description of Artificial Sequence: Synthetic oligonucleotide
aacaaaacggacaaccaau

SEQ ID NO: 156204 - RNA, 19 nt, Artificial Sequence
  Description of Artificial Sequence: Synthetic oligonucleotide
cacaaagguucuaaccugg

SEQ ID NO: 156205 - RNA, 19 nt, Artificial Sequence
  Description of Artificial Sequence: Synthetic oligonucleotide
gaaacucucguguuucaug

SEQ ID NO: 156206 - RNA, 19 nt, Artificial Sequence
  Description of Artificial Sequence: Synthetic oligonucleotide
agggucguauguuaaaucu

SEQ ID NO: 156207 - RNA, 19 nt, Artificial Sequence
  Description of Artificial Sequence: Synthetic oligonucleotide
ugauaguccuuacuguacu

SEQ ID NO: 156208 - RNA, 19 nt, Artificial Sequence
  Description of Artificial Sequence: Synthetic oligonucleotide
aaguaauucagagaagguu

SEQ ID NO: 156209 - RNA, 19 nt, Artificial Sequence
  Description of Artificial Sequence: Synthetic oligonucleotide
agaacgaagugaaugcaac

SEQ ID NO: 156210 - RNA, 19 nt, Artificial Sequence
  Description of Artificial Sequence: Synthetic oligonucleotide
uucggacucuuaauggucc

SEQ ID NO: 156211 - RNA, 19 nt, Artificial Sequence
  Description of Artificial Sequence: Synthetic oligonucleotide
uggcauaguguucagcaca

SEQ ID NO: 156212 - RNA, 19 nt, Artificial Sequence
  Description of Artificial Sequence: Synthetic oligonucleotide
aaaaucacuauagcagcgu

SEQ ID NO: 156213 - RNA, 19 nt, Artificial Sequence
  Description of Artificial Sequence: Synthetic oligonucleotide
aggaagaucauagggagug

SEQ ID NO: 156214 - RNA, 19 nt, Artificial Sequence
  Description of Artificial Sequence: Synthetic oligonucleotide
gcugauguaguuucguugg

SEQ ID NO: 156215 - RNA, 19 nt, Artificial Sequence
  Description of Artificial Sequence: Synthetic oligonucleotide
ucccuagucugcuaaagca

SEQ ID NO: 156216 - RNA, 19 nt, Artificial Sequence
  Description of Artificial Sequence: Synthetic oligonucleotide
uaccuucggacucuuaaug

SEQ ID NO: 156217 - RNA, 19 nt, Artificial Sequence
  Description of Artificial Sequence: Synthetic oligonucleotide
aagguauaagcacucuaaa

SEQ ID NO: 156218 - RNA, 19 nt, Artificial Sequence
  Description of Artificial Sequence: Synthetic oligonucleotide
agcgucagcaguucggguc

SEQ ID NO: 156219 - RNA, 19 nt, Artificial Sequence
  Description of Artificial Sequence: Synthetic oligonucleotide
uccacaaacuuaauuuguc

SEQ ID NO: 156220 - RNA, 19 nt, Artificial Sequence
  Description of Artificial Sequence: Synthetic oligonucleotide
guuccauacccacggaagg

SEQ ID NO: 156221 - RNA, 19 nt, Artificial Sequence
  Description of Artificial Sequence: Synthetic oligonucleotide
gauugcauaaagucaguaa

SEQ ID NO: 156222 - RNA, 19 nt, Artificial Sequence
  Description of Artificial Sequence: Synthetic oligonucleotide
aaacggacaaccaauggaa

SEQ ID NO: 156223 - RNA, 19 nt, Artificial Sequence
  Description of Artificial Sequence: Synthetic oligonucleotide
uggguauuaucuauacagu

SEQ ID NO: 156224 - RNA, 19 nt, Artificial Sequence
  Description of Artificial Sequence: Synthetic oligonucleotide
caaaacggacaaccaaugg

SEQ ID NO: 156225 - RNA, 19 nt, Artificial Sequence
  Description of Artificial Sequence: Synthetic oligonucleotide
uauugugaagacugagaga

SEQ ID NO: 156226 - RNA, 19 nt, Artificial Sequence
  Description of Artificial Sequence: Synthetic oligonucleotide
acccaaguaucuuaggaga

SEQ ID NO: 156227 - RNA, 19 nt, Artificial Sequence
  Description of Artificial Sequence: Synthetic oligonucleotide
aguaauucagagaagguua

SEQ ID NO: 156228 - RNA, 19 nt, Artificial Sequence
  Description of Artificial Sequence: Synthetic oligonucleotide
ucccauaaucuacuaauau

SEQ ID NO: 156229 - RNA, 19 nt, Artificial Sequence
  Description of Artificial Sequence: Synthetic oligonucleotide
uauagcagcguuucacaac

SEQ ID NO: 156230 - RNA, 19 nt, Artificial Sequence
  Description of Artificial Sequence: Synthetic oligonucleotide
uaagcacucuaaacgcugc

SEQ ID NO: 156231 - RNA, 19 nt, Artificial Sequence
  Description of Artificial Sequence: Synthetic oligonucleotide
aauaagcuuccauacccuu

SEQ ID NO: 156232 - RNA, 19 nt, Artificial Sequence
  Description of Artificial Sequence: Synthetic oligonucleotide
aacucucguguuucaugac

SEQ ID NO: 156233 - RNA, 19 nt, Artificial Sequence
  Description of Artificial Sequence: Synthetic oligonucleotide
gguuuugggcaauugcugg

SEQ ID NO: 156234 - RNA, 19 nt, Artificial Sequence
  Description of Artificial Sequence: Synthetic oligonucleotide
ugcauaaagucaguaacaa

SEQ ID NO: 156235 - RNA, 19 nt, Artificial Sequence
  Description of Artificial Sequence: Synthetic oligonucleotide
aaacgcugcaaguucucga

SEQ ID NO: 156236 - RNA, 19 nt, Artificial Sequence
  Description of Artificial Sequence: Synthetic oligonucleotide
ucaaccaagaaggaccuuc

SEQ ID NO: 156237 - RNA, 19 nt, Artificial Sequence
  Description of Artificial Sequence: Synthetic oligonucleotide
uuaauuugucugacacagc

SEQ ID NO: 156238 - RNA, 19 nt, Artificial Sequence
  Description of Artificial Sequence: Synthetic oligonucleotide
uuuuguaaggugugcacuu

SEQ ID NO: 156239 - RNA, 19 nt, Artificial Sequence
  Description of Artificial Sequence: Synthetic oligonucleotide
cugaacccaaguaucuuag

SEQ ID NO: 156240 - RNA, 19 nt, Artificial Sequence
  Description of Artificial Sequence: Synthetic oligonucleotide
uuaucccauaaucuacuaa

SEQ ID NO: 156241 - RNA, 19 nt, Artificial Sequence
  Description of Artificial Sequence: Synthetic oligonucleotide
aaaucacuauagcagcguu

SEQ ID NO: 156242 - RNA, 19 nt, Artificial Sequence
  Description of Artificial Sequence: Synthetic oligonucleotide
cuuaaugaaguuuccucca

SEQ ID NO: 156243 - RNA, 19 nt, Artificial Sequence
  Description of Artificial Sequence: Synthetic oligonucleotide
gaucauagggaguguaaga

SEQ ID NO: 156244 - RNA, 19 nt, Artificial Sequence
  Description of Artificial Sequence: Synthetic oligonucleotide
agaucauagggaguguaag

SEQ ID NO: 156245 - RNA, 19 nt, Artificial Sequence
  Description of Artificial Sequence: Synthetic oligonucleotide
aacgcugcaaguucucgau

SEQ ID NO: 156246 - RNA, 19 nt, Artificial Sequence
  Description of Artificial Sequence: Synthetic oligonucleotide
uagggaguguaagaaauac

SEQ ID NO: 156247 - RNA, 19 nt, Artificial Sequence
  Description of Artificial Sequence: Synthetic oligonucleotide
cauacaaaacaagagcuga

SEQ ID NO: 156248 - RNA, 19 nt, Artificial Sequence
  Description of Artificial Sequence: Synthetic oligonucleotide
agugaaugcaacugugaaa

SEQ ID NO: 156249 - RNA, 19 nt, Artificial Sequence
  Description of Artificial Sequence: Synthetic oligonucleotide
uaaacgcugcaaguucucg

SEQ ID NO: 156250 - RNA, 19 nt, Artificial Sequence
  Description of Artificial Sequence: Synthetic oligonucleotide
guaauucagagaagguuag

SEQ ID NO: 156251 - RNA, 19 nt, Artificial Sequence
  Description of Artificial Sequence: Synthetic oligonucleotide
cagcucauucuacauaaag

SEQ ID NO: 156252 - RNA, 19 nt, Artificial Sequence
  Description of Artificial Sequence: Synthetic oligonucleotide
uguuucccuagucugcuaa

SEQ ID NO: 156253 - RNA, 19 nt, Artificial Sequence
  Description of Artificial Sequence: Synthetic oligonucleotide
aagaaggaccuucugcauu

SEQ ID NO: 156254 - RNA, 19 nt, Artificial Sequence
  Description of Artificial Sequence: Synthetic oligonucleotide
uugccgcccaggcugaggg

SEQ ID NO: 156255 - RNA, 19 nt, Artificial Sequence
  Description of Artificial Sequence: Synthetic oligonucleotide
gaggcugcgacagagcggc

SEQ ID NO: 156256 - RNA, 19 nt, Artificial Sequence
  Description of Artificial Sequence: Synthetic oligonucleotide
ucgcaaacucaacucuucc

SEQ ID NO: 156257 - RNA, 19 nt, Artificial Sequence
  Description of Artificial Sequence: Synthetic oligonucleotide
acgaagugaaugcaacugu

SEQ ID NO: 156258 - RNA, 19 nt, Artificial Sequence
  Description of Artificial Sequence: Synthetic oligonucleotide
uugucacauaacaccaagu

SEQ ID NO: 156259 - RNA, 19 nt, Artificial Sequence
  Description of Artificial Sequence: Synthetic oligonucleotide
uggaauuuccucgcaaacu

SEQ ID NO: 156260 - RNA, 19 nt, Artificial Sequence
  Description of Artificial Sequence: Synthetic oligonucleotide
guugaccucuaacaaagca

SEQ ID NO: 156261 - RNA, 19 nt, Artificial Sequence
  Description of Artificial Sequence: Synthetic oligonucleotide
agggaguguaagaaauacc

SEQ ID NO: 156262 - RNA, 19 nt, Artificial Sequence
  Description of Artificial Sequence: Synthetic oligonucleotide
caaguaucuuaggagauuc

SEQ ID NO: 156263 - RNA, 19 nt, Artificial Sequence
  Description of Artificial Sequence: Synthetic oligonucleotide
aguuccauacccacggaag

SEQ ID NO: 156264 - RNA, 19 nt, Artificial Sequence
  Description of Artificial Sequence: Synthetic oligonucleotide
guuucguuggaugccacag

SEQ ID NO: 156265 - RNA, 19 nt, Artificial Sequence
  Description of Artificial Sequence: Synthetic oligonucleotide
cuacuaauauauucuauua

SEQ ID NO: 156266 - RNA, 19 nt, Artificial Sequence
  Description of Artificial Sequence: Synthetic oligonucleotide
auagccgugcucgaugggg

SEQ ID NO: 156267 - RNA, 19 nt, Artificial Sequence
  Description of Artificial Sequence: Synthetic oligonucleotide
caagguauaagcacucuaa

SEQ ID NO: 156268 - RNA, 19 nt, Artificial Sequence
  Description of Artificial Sequence: Synthetic oligonucleotide
agguugaggaucucucgag

SEQ ID NO: 156269 - RNA, 19 nt, Artificial Sequence
  Description of Artificial Sequence: Synthetic oligonucleotide
uugcagcuaauuccagaag

SEQ ID NO: 156270 - RNA, 19 nt, Artificial Sequence
  Description of Artificial Sequence: Synthetic oligonucleotide
gagaagguuagauuugcua

SEQ ID NO: 156271 - RNA, 19 nt, Artificial Sequence
  Description of Artificial Sequence: Synthetic oligonucleotide
aaacaccugacauccuaau

SEQ ID NO: 156272 - RNA, 19 nt, Artificial Sequence
  Description of Artificial Sequence: Synthetic oligonucleotide
uuucccuagucugcuaaag

SEQ ID NO: 156273 - RNA, 19 nt, Artificial Sequence
  Description of Artificial Sequence: Synthetic oligonucleotide
cauaggguugaccucuaac

SEQ ID NO: 156274 - RNA, 19 nt, Artificial Sequence
  Description of Artificial Sequence: Synthetic oligonucleotide
guuuugggcaauugcuggc

SEQ ID NO: 156275 - RNA, 19 nt, Artificial Sequence
  Description of Artificial Sequence: Synthetic oligonucleotide
agguaugucagcaaauuau

SEQ ID NO: 156276 - RNA, 19 nt, Artificial Sequence
  Description of Artificial Sequence: Synthetic oligonucleotide
uggugggauuuccuuaaug

SEQ ID NO: 156277 - RNA, 19 nt, Artificial Sequence
  Description of Artificial Sequence: Synthetic oligonucleotide
agccacgaaacucucgugu

SEQ ID NO: 156278 - RNA, 19 nt, Artificial Sequence
  Description of Artificial Sequence: Synthetic oligonucleotide
cucuuuugaugucacgcac

SEQ ID NO: 156279 - RNA, 19 nt, Artificial Sequence
  Description of Artificial Sequence: Synthetic oligonucleotide
auaagcacucuaaacgcug

SEQ ID NO: 156280 - RNA, 19 nt, Artificial Sequence
  Description of Artificial Sequence: Synthetic oligonucleotide
acagagcggcgacugggcc

SEQ ID NO: 156281 - RNA, 19 nt, Artificial Sequence
  Description of Artificial Sequence: Synthetic oligonucleotide
cuggcugaacccaaguauc

SEQ ID NO: 156282 - RNA, 19 nt, Artificial Sequence
  Description of Artificial Sequence: Synthetic oligonucleotide
acugagagaacgaagugaa

SEQ ID NO: 156283 - RNA, 19 nt, Artificial Sequence
  Description of Artificial Sequence: Synthetic oligonucleotide
cucuaaacgcugcaaguuc

SEQ ID NO: 156284 - RNA, 19 nt, Artificial Sequence
  Description of Artificial Sequence: Synthetic oligonucleotide
aaccaagaaggaccuucug

SEQ ID NO: 156285 - RNA, 19 nt, Artificial Sequence
  Description of Artificial Sequence: Synthetic oligonucleotide
augcaaauagucucagcau

SEQ ID NO: 156286 - RNA, 19 nt, Artificial Sequence
  Description of Artificial Sequence: Synthetic oligonucleotide
gacucuuaaugguccuugc

SEQ ID NO: 156287 - RNA, 19 nt, Artificial Sequence
  Description of Artificial Sequence: Synthetic oligonucleotide
aagaguuggagggucguau

SEQ ID NO: 156288 - RNA, 19 nt, Artificial Sequence
  Description of Artificial Sequence: Synthetic oligonucleotide
uacuucccacaaaagucca

SEQ ID NO: 156289 - RNA, 19 nt, Artificial Sequence
  Description of Artificial Sequence: Synthetic oligonucleotide
gaaguuuccuccaagguau

SEQ ID NO: 156290 - RNA, 19 nt, Artificial Sequence
  Description of Artificial Sequence: Synthetic oligonucleotide
cauucgguguugcagcaac

SEQ ID NO: 156291 - RNA, 19 nt, Artificial Sequence
  Description of Artificial Sequence: Synthetic oligonucleotide
cacuauagcagcguuucac

SEQ ID NO: 156292 - RNA, 19 nt, Artificial Sequence
  Description of Artificial Sequence: Synthetic oligonucleotide
acaaaacggacaaccaaug

SEQ ID NO: 156293 - RNA, 19 nt, Artificial Sequence
  Description of Artificial Sequence: Synthetic oligonucleotide
uuccucgcaaacucaacuc

SEQ ID NO: 156294 - RNA, 19 nt, Artificial Sequence
  Description of Artificial Sequence: Synthetic oligonucleotide
agcgccgugagcgcguucc

SEQ ID NO: 156295 - RNA, 19 nt, Artificial Sequence
  Description of Artificial Sequence: Synthetic oligonucleotide
uacccacggaaggaaaggg

SEQ ID NO: 156296 - RNA, 19 nt, Artificial Sequence
  Description of Artificial Sequence: Synthetic oligonucleotide
cuucggacucuuaaugguc

SEQ ID NO: 156297 - RNA, 19 nt, Artificial Sequence
  Description of Artificial Sequence: Synthetic oligonucleotide
cacuuuuggauuuuguugu

SEQ ID NO: 156298 - RNA, 19 nt, Artificial Sequence
  Description of Artificial Sequence: Synthetic oligonucleotide
uagauugcauaaagucagu

SEQ ID NO: 156299 - RNA, 19 nt, Artificial Sequence
  Description of Artificial Sequence: Synthetic oligonucleotide
augacauaacacaaacaca

SEQ ID NO: 156300 - RNA, 19 nt, Artificial Sequence
  Description of Artificial Sequence: Synthetic oligonucleotide
agaaauaccuucggacucu

SEQ ID NO: 156301 - RNA, 19 nt, Artificial Sequence
  Description of Artificial Sequence: Synthetic oligonucleotide
uagucucagcauaggguug

SEQ ID NO: 156302 - RNA, 19 nt, Artificial Sequence
  Description of Artificial Sequence: Synthetic oligonucleotide
aaaacaccugacauccuaa

SEQ ID NO: 156303 - RNA, 19 nt, Artificial Sequence
  Description of Artificial Sequence: Synthetic oligonucleotide
agcuaauuccagaagaguu

SEQ ID NO: 156304 - RNA, 19 nt, Artificial Sequence
  Description of Artificial Sequence: Synthetic oligonucleotide
ggguugaccucuaacaaag

SEQ ID NO: 156305 - RNA, 19 nt, Artificial Sequence
  Description of Artificial Sequence: Synthetic oligonucleotide
gaagugaaugcaacuguga

SEQ ID NO: 156306 - RNA, 19 nt, Artificial Sequence
  Description of Artificial Sequence: Synthetic oligonucleotide
gaaugcaacugugaaagcu

SEQ ID NO: 156307 - RNA, 19 nt, Artificial Sequence
  Description of Artificial Sequence: Synthetic oligonucleotide
acaaccaauggaauuuccu

SEQ ID NO: 156308 - RNA, 19 nt, Artificial Sequence
  Description of Artificial Sequence: Synthetic oligonucleotide
gagggucguauguuaaauc

SEQ ID NO: 156309 - RNA, 19 nt, Artificial Sequence
  Description of Artificial Sequence: Synthetic oligonucleotide
aagaucauagggaguguaa

SEQ ID NO: 156310 - RNA, 19 nt, Artificial Sequence
  Description of Artificial Sequence: Synthetic oligonucleotide
aagcacauucccaaguguu

SEQ ID NO: 156311 - RNA, 19 nt, Artificial Sequence
  Description of Artificial Sequence: Synthetic oligonucleotide
gacucacucugggaugugg

SEQ ID NO: 156312 - RNA, 19 nt, Artificial Sequence
  Description of Artificial Sequence: Synthetic oligonucleotide
uuauggcauaguguucagc

SEQ ID NO: 156313 - RNA, 19 nt, Artificial Sequence
  Description of Artificial Sequence: Synthetic oligonucleotide
ucgguguugcagcaacacu

SEQ ID NO: 156314 - RNA, 19 nt, Artificial Sequence
  Description of Artificial Sequence: Synthetic oligonucleotide
gcaaauagucucagcauag

SEQ ID NO: 156315 - RNA, 19 nt, Artificial Sequence
  Description of Artificial Sequence: Synthetic oligonucleotide
cucgcaaacucaacucuuc

SEQ ID NO: 156316 - RNA, 19 nt, Artificial Sequence
  Description of Artificial Sequence: Synthetic oligonucleotide
uuggagggucguauguuaa

SEQ ID NO: 156317 - RNA, 19 nt, Artificial Sequence
  Description of Artificial Sequence: Synthetic oligonucleotide
agagaacgaagugaaugca

SEQ ID NO: 156318 - RNA, 19 nt, Artificial Sequence
  Description of Artificial Sequence: Synthetic oligonucleotide
auaccuucggacucuuaau

SEQ ID NO: 156319 - RNA, 19 nt, Artificial Sequence
  Description of Artificial Sequence: Synthetic oligonucleotide
gaugaauaagguugaggau

SEQ ID NO: 156320 - RNA, 19 nt, Artificial Sequence
  Description of Artificial Sequence: Synthetic oligonucleotide
uuccauacccacggaagga

SEQ ID NO: 156321 - RNA, 19 nt, Artificial Sequence
  Description of Artificial Sequence: Synthetic oligonucleotide
cuaggauuaaggcacugua

SEQ ID NO: 156322 - RNA, 19 nt, Artificial Sequence
  Description of Artificial Sequence: Synthetic oligonucleotide
gguaacacaagaaggcuca

SEQ ID NO: 156323 - RNA, 19 nt, Artificial Sequence
  Description of Artificial Sequence: Synthetic oligonucleotide
auuaucccauaaucuacua

SEQ ID NO: 156324 - RNA, 19 nt, Artificial Sequence
  Description of Artificial Sequence: Synthetic oligonucleotide
gaucucucgaggcagguau

SEQ ID NO: 156325 - RNA, 19 nt, Artificial Sequence
  Description of Artificial Sequence: Synthetic oligonucleotide
gaagguuagauuugcuaau

SEQ ID NO: 156326 - RNA, 19 nt, Artificial Sequence
  Description of Artificial Sequence: Synthetic oligonucleotide
aaguuguagguugcucuga

SEQ ID NO: 156327 - RNA, 19 nt, Artificial Sequence
  Description of Artificial Sequence: Synthetic oligonucleotide
gaaacuaccuuuagcauuu

SEQ ID NO: 156328 - RNA, 19 nt, Artificial Sequence
  Description of Artificial Sequence: Synthetic oligonucleotide
guaucuuaggagauuccca

SEQ ID NO: 156329 - RNA, 19 nt, Artificial Sequence
  Description of Artificial Sequence: Synthetic oligonucleotide
aguuucguuggaugccaca

SEQ ID NO: 156330 - RNA, 19 nt, Artificial Sequence
  Description of Artificial Sequence: Synthetic oligonucleotide
acauccuaaugaaaucuga

SEQ ID NO: 156331 - RNA, 19 nt, Artificial Sequence
  Description of Artificial Sequence: Synthetic oligonucleotide
gcacucuaaacgcugcaag

SEQ ID NO: 156332 - RNA, 19 nt, Artificial Sequence
  Description of Artificial Sequence: Synthetic oligonucleotide
ugcauagugucaaguugua

SEQ ID NO: 156333 - RNA, 19 nt, Artificial Sequence
  Description of Artificial Sequence: Synthetic oligonucleotide
ggcacaaagguucuaaccu

SEQ ID NO: 156334 - RNA, 19 nt, Artificial Sequence
  Description of Artificial Sequence: Synthetic oligonucleotide
ucacuauagcagcguuuca

SEQ ID NO: 156335 - RNA, 19 nt, Artificial Sequence
  Description of Artificial Sequence: Synthetic oligonucleotide
aaggcucauucuauuuaug

SEQ ID NO: 156336 - RNA, 19 nt, Artificial Sequence
  Description of Artificial Sequence: Synthetic oligonucleotide
aaucacuauagcagcguuu

SEQ ID NO: 156337 - RNA, 19 nt, Artificial Sequence
  Description of Artificial Sequence: Synthetic oligonucleotide
uggauuuuguugucacaua

SEQ ID NO: 156338 - RNA, 19 nt, Artificial Sequence
  Description of Artificial Sequence: Synthetic oligonucleotide
caguucgggucccagcgcc

SEQ ID NO: 156339 - RNA, 19 nt, Artificial Sequence
  Description of Artificial Sequence: Synthetic oligonucleotide
ugcgacagagcggcgacug

SEQ ID NO: 156340 - RNA, 19 nt, Artificial Sequence
  Description of Artificial Sequence: Synthetic oligonucleotide
gaaggcucauucuauuuau

SEQ ID NO: 156341 - RNA, 19 nt, Artificial Sequence
  Description of Artificial Sequence: Synthetic oligonucleotide
gcacaaagguucuaaccug

SEQ ID NO: 156342 - RNA, 19 nt, Artificial Sequence
  Description of Artificial Sequence: Synthetic oligonucleotide
ucauucuauuuauggcaua

SEQ ID NO: 156343 - RNA, 19 nt, Artificial Sequence
  Description of Artificial Sequence: Synthetic oligonucleotide
acucuaaacgcugcaaguu

SEQ ID NO: 156344 - RNA, 19 nt, Artificial Sequence
  Description of Artificial Sequence: Synthetic oligonucleotide
cuguaauacaccacagcua

SEQ ID NO: 156345 - RNA, 19 nt, Artificial Sequence
  Description of Artificial Sequence: Synthetic oligonucleotide
cacgaaacucucguguuuc

SEQ ID NO: 156346 - RNA, 19 nt, Artificial Sequence
  Description of Artificial Sequence: Synthetic oligonucleotide
gagaacgaagugaaugcaa

SEQ ID NO: 156347 - RNA, 19 nt, Artificial Sequence
  Description of Artificial Sequence: Synthetic oligonucleotide
uacccuugcuaggauuaag

SEQ ID NO: 156348 - RNA, 19 nt, Artificial Sequence
  Description of Artificial Sequence: Synthetic oligonucleotide
ugcuaauucuggugggauu

SEQ ID NO: 156349 - RNA, 19 nt, Artificial Sequence
  Description of Artificial Sequence: Synthetic oligonucleotide
gaguuccauacccacggaa

SEQ ID NO: 156350 - RNA, 19 nt, Artificial Sequence
  Description of Artificial Sequence: Synthetic oligonucleotide
aucuacuaauauauucuau

SEQ ID NO: 156351 - RNA, 19 nt, Artificial Sequence
  Description of Artificial Sequence: Synthetic oligonucleotide
cuuggguauuaucuauaca

SEQ ID NO: 156352 - RNA, 19 nt, Artificial Sequence
  Description of Artificial Sequence: Synthetic oligonucleotide
guaguuucguuggaugcca

SEQ ID NO: 156353 - RNA, 19 nt, Artificial Sequence
  Description of Artificial Sequence: Synthetic oligonucleotide
ugacaauagccgugcucga

SEQ ID NO: 156354 - RNA, 19 nt, Artificial Sequence
  Description of Artificial Sequence: Synthetic oligonucleotide
ucggcggggaugcucugca

SEQ ID NO: 156355 - RNA, 19 nt, Artificial Sequence
  Description of Artificial Sequence: Synthetic oligonucleotide
ucucucgaggcagguaugu

SEQ ID NO: 156356 - RNA, 19 nt, Artificial Sequence
  Description of Artificial Sequence: Synthetic oligonucleotide
cuauagcagcguuucacaa

SEQ ID NO: 156357 - RNA, 19 nt, Artificial Sequence
  Description of Artificial Sequence: Synthetic oligonucleotide
uugcuaauucuggugggau

SEQ ID NO: 156358 - RNA, 19 nt, Artificial Sequence
  Description of Artificial Sequence: Synthetic oligonucleotide
aacccugaauuaucccaua

SEQ ID NO: 156359 - RNA, 19 nt, Artificial Sequence
  Description of Artificial Sequence: Synthetic oligonucleotide
cugcuaaagcacauuccca

SEQ ID NO: 156360 - RNA, 19 nt, Artificial Sequence
  Description of Artificial Sequence: Synthetic oligonucleotide
aacggacaaccaauggaau

SEQ ID NO: 156361 - RNA, 19 nt, Artificial Sequence
  Description of Artificial Sequence: Synthetic oligonucleotide
agagcggcgacugggccag

SEQ ID NO: 156362 - RNA, 19 nt, Artificial Sequence
  Description of Artificial Sequence: Synthetic oligonucleotide
ucggacucuuaaugguccu

SEQ ID NO: 156363 - RNA, 19 nt, Artificial Sequence
  Description of Artificial Sequence: Synthetic oligonucleotide
uuuguaaggugugcacuuu

SEQ ID NO: 156364 - RNA, 19 nt, Artificial Sequence
  Description of Artificial Sequence: Synthetic oligonucleotide
aauugcuggcugaacccaa

SEQ ID NO: 156365 - RNA, 19 nt, Artificial Sequence
  Description of Artificial Sequence: Synthetic oligonucleotide
agauugcauaaagucagua

SEQ ID NO: 156366 - RNA, 19 nt, Artificial Sequence
  Description of Artificial Sequence: Synthetic oligonucleotide
uaguuucguuggaugccac

SEQ ID NO: 156367 - RNA, 19 nt, Artificial Sequence
  Description of Artificial Sequence: Synthetic oligonucleotide
gugucaaguuguagguugc

SEQ ID NO: 156368 - RNA, 19 nt, Artificial Sequence
  Description of Artificial Sequence: Synthetic oligonucleotide
guuggagggucguauguua

SEQ ID NO: 156369 - RNA, 19 nt, Artificial Sequence
  Description of Artificial Sequence: Synthetic oligonucleotide
acgaaacucucguguuuca

SEQ ID NO: 156370 - RNA, 19 nt, Artificial Sequence
  Description of Artificial Sequence: Synthetic oligonucleotide
cucguguuucaugacauaa

SEQ ID NO: 156371 - RNA, 19 nt, Artificial Sequence
  Description of Artificial Sequence: Synthetic oligonucleotide
gaauaagcuuccauacccu

SEQ ID NO: 156372 - RNA, 19 nt, Artificial Sequence
  Description of Artificial Sequence: Synthetic oligonucleotide
caaguaauucagagaaggu

SEQ ID NO: 156373 - RNA, 19 nt, Artificial Sequence
  Description of Artificial Sequence: Synthetic oligonucleotide
gccagcucauucuacauaa

SEQ ID NO: 156374 - RNA, 19 nt, Artificial Sequence
  Description of Artificial Sequence: Synthetic oligonucleotide
ggugacaauagccgugcuc

SEQ ID NO: 156375 - RNA, 19 nt, Artificial Sequence
  Description of Artificial Sequence: Synthetic oligonucleotide
cccuugcuaggauuaaggc

SEQ ID NO: 156376 - RNA, 19 nt, Artificial Sequence
  Description of Artificial Sequence: Synthetic oligonucleotide
ccuugcuaggauuaaggca

SEQ ID NO: 156377 - RNA, 19 nt, Artificial Sequence
  Description of Artificial Sequence: Synthetic oligonucleotide
ggacucuuaaugguccuug

SEQ ID NO: 156378 - RNA, 19 nt, Artificial Sequence
  Description of Artificial Sequence: Synthetic oligonucleotide
cacaggaguuccauaccca

SEQ ID NO: 156379 - RNA, 19 nt, Artificial Sequence
  Description of Artificial Sequence: Synthetic oligonucleotide
cccuagucugcuaaagcac

SEQ ID NO: 156380 - RNA, 19 nt, Artificial Sequence
  Description of Artificial Sequence: Synthetic oligonucleotide
ucucguguuucaugacaua

SEQ ID NO: 156381 - RNA, 19 nt, Artificial Sequence
  Description of Artificial Sequence: Synthetic oligonucleotide
ugggcaauugcuggcugaa

SEQ ID NO: 156382 - RNA, 19 nt, Artificial Sequence
  Description of Artificial Sequence: Synthetic oligonucleotide
ucccgcucacguccaggag

SEQ ID NO: 156383 - RNA, 19 nt, Artificial Sequence
  Description of Artificial Sequence: Synthetic oligonucleotide
agcgcgcgcagcuccagca

SEQ ID NO: 156384 - RNA, 19 nt, Artificial Sequence
  Description of Artificial Sequence: Synthetic oligonucleotide
agagaagguuagauuugcu

SEQ ID NO: 156385 - RNA, 19 nt, Artificial Sequence
  Description of Artificial Sequence: Synthetic oligonucleotide
cgaagugaaugcaacugug

SEQ ID NO: 156386 - RNA, 19 nt, Artificial Sequence
  Description of Artificial Sequence: Synthetic oligonucleotide
ggaggcuacacuuuuggau

SEQ ID NO: 156387 - RNA, 19 nt, Artificial Sequence
  Description of Artificial Sequence: Synthetic oligonucleotide
agcacucuaaacgcugcaa

SEQ ID NO: 156388 - RNA, 19 nt, Artificial Sequence
  Description of Artificial Sequence: Synthetic oligonucleotide
aggcuacacuuuuggauuu

SEQ ID NO: 156389 - RNA, 19 nt, Artificial Sequence
  Description of Artificial Sequence: Synthetic oligonucleotide
cccauaaucuacuaauaua

SEQ ID NO: 156390 - RNA, 19 nt, Artificial Sequence
  Description of Artificial Sequence: Synthetic oligonucleotide
ccuagucugcuaaagcaca

SEQ ID NO: 156391 - RNA, 19 nt, Artificial Sequence
  Description of Artificial Sequence: Synthetic oligonucleotide
ccugacauccuaaugaaau

SEQ ID NO: 156392 - RNA, 19 nt, Artificial Sequence
  Description of Artificial Sequence: Synthetic oligonucleotide
caauugcuggcugaaccca

SEQ ID NO: 156393 - RNA, 19 nt, Artificial Sequence
  Description of Artificial Sequence: Synthetic oligonucleotide
ggguaacacaagaaggcuc

SEQ ID NO: 156394 - RNA, 19 nt, Artificial Sequence
  Description of Artificial Sequence: Synthetic oligonucleotide
aucccauaaucuacuaaua

SEQ ID NO: 156395 - RNA, 19 nt, Artificial Sequence
  Description of Artificial Sequence: Synthetic oligonucleotide
uggugacaauagccgugcu

SEQ ID NO: 156396 - RNA, 19 nt, Artificial Sequence
  Description of Artificial Sequence: Synthetic oligonucleotide
aucucggcggggaugcucu

SEQ ID NO: 156397 - RNA, 19 nt, Artificial Sequence
  Description of Artificial Sequence: Synthetic oligonucleotide
guuguuucccuagucugcu

SEQ ID NO: 156398 - RNA, 19 nt, Artificial Sequence
  Description of Artificial Sequence: Synthetic oligonucleotide
gcauagugucaaguuguag

SEQ ID NO: 156399 - RNA, 19 nt, Artificial Sequence
  Description of Artificial Sequence: Synthetic oligonucleotide
cacauaacaccaaguaauu

SEQ ID NO: 156400 - RNA, 19 nt, Artificial Sequence
  Description of Artificial Sequence: Synthetic oligonucleotide
ggguauuaucuauacaguu

SEQ ID NO: 156401 - RNA, 19 nt, Artificial Sequence
  Description of Artificial Sequence: Synthetic oligonucleotide
ggaggcgauacuucccaca

SEQ ID NO: 156402 - RNA, 19 nt, Artificial Sequence
  Description of Artificial Sequence: Synthetic oligonucleotide
agccgguuguuccgggcca

SEQ ID NO: 156403 - RNA, 19 nt, Artificial Sequence
  Description of Artificial Sequence: Synthetic oligonucleotide
cccgcucacguccaggagc

SEQ ID NO: 156404 - RNA, 19 nt, Artificial Sequence
  Description of Artificial Sequence: Synthetic oligonucleotide
ugguugccgcccaggcuga

SEQ ID NO: 156405 - RNA, 19 nt, Artificial Sequence
  Description of Artificial Sequence: Synthetic oligonucleotide
agagcccgggccgccgagc

SEQ ID NO: 156406 - RNA, 19 nt, Artificial Sequence
  Description of Artificial Sequence: Synthetic oligonucleotide
cagccacgaaacucucgug

SEQ ID NO: 156407 - RNA, 19 nt, Artificial Sequence
  Description of Artificial Sequence: Synthetic oligonucleotide
ugccgcugagguugagcac

SEQ ID NO: 156408 - RNA, 19 nt, Artificial Sequence
  Description of Artificial Sequence: Synthetic oligonucleotide
gugagcgcguucccgcuca

SEQ ID NO: 156409 - RNA, 19 nt, Artificial Sequence
  Description of Artificial Sequence: Synthetic oligonucleotide
acccacggaaggaaaggga

SEQ ID NO: 156410 - RNA, 19 nt, Artificial Sequence
  Description of Artificial Sequence: Synthetic oligonucleotide
gcuacacuuuuggauuuug

SEQ ID NO: 156411 - RNA, 19 nt, Artificial Sequence
  Description of Artificial Sequence: Synthetic oligonucleotide
guaauacaccacagcuaga

SEQ ID NO: 156412 - RNA, 19 nt, Artificial Sequence
  Description of Artificial Sequence: Synthetic oligonucleotide
gcucagcgucagcaguucg

SEQ ID NO: 156413 - RNA, 19 nt, Artificial Sequence
  Description of Artificial Sequence: Synthetic oligonucleotide
auucgguguugcagcaaca

SEQ ID NO: 156414 - RNA, 19 nt, Artificial Sequence
  Description of Artificial Sequence: Synthetic oligonucleotide
gggucguauguuaaaucuc

SEQ ID NO: 156415 - RNA, 19 nt, Artificial Sequence
  Description of Artificial Sequence: Synthetic oligonucleotide
gguugaccucuaacaaagc

SEQ ID NO: 156416 - RNA, 19 nt, Artificial Sequence
  Description of Artificial Sequence: Synthetic oligonucleotide
gccgugagcgcguucccgc

SEQ ID NO: 156417 - RNA, 19 nt, Artificial Sequence
  Description of Artificial Sequence: Synthetic oligonucleotide
agcgugcgcaggccgcuca

SEQ ID NO: 156418 - RNA, 19 nt, Artificial Sequence
  Description of Artificial Sequence: Synthetic oligonucleotide
uguuccgggccagcagcgu

SEQ ID NO: 156419 - RNA, 19 nt, Artificial Sequence
  Description of Artificial Sequence: Synthetic oligonucleotide
aaauaccuucggacucuua

SEQ ID NO: 156420 - RNA, 19 nt, Artificial Sequence
  Description of Artificial Sequence: Synthetic oligonucleotide
cacagcuagauugcauaaa

SEQ ID NO: 156421 - RNA, 19 nt, Artificial Sequence
  Description of Artificial Sequence: Synthetic oligonucleotide
cagcauaggguugaccucu

SEQ ID NO: 156422 - RNA, 19 nt, Artificial Sequence
  Description of Artificial Sequence: Synthetic oligonucleotide
cuagucugcuaaagcacau

SEQ ID NO: 156423 - RNA, 19 nt, Artificial Sequence
  Description of Artificial Sequence: Synthetic oligonucleotide
agcagcgaggcgggcaccu

SEQ ID NO: 156424 - RNA, 19 nt, Artificial Sequence
  Description of Artificial Sequence: Synthetic oligonucleotide
gacaauagccgugcucgau

SEQ ID NO: 156425 - RNA, 19 nt, Artificial Sequence
  Description of Artificial Sequence: Synthetic oligonucleotide
cucucgaggcagguauguc

SEQ ID NO: 156426 - RNA, 19 nt, Artificial Sequence
  Description of Artificial Sequence: Synthetic oligonucleotide
cucggcggggaugcucugc

SEQ ID NO: 156427 - RNA, 19 nt, Artificial Sequence
  Description of Artificial Sequence: Synthetic oligonucleotide
ccuccaagguauaagcacu

SEQ ID NO: 156428 - RNA, 19 nt, Artificial Sequence
  Description of Artificial Sequence: Synthetic oligonucleotide
gcuaauucuggugggauuu

SEQ ID NO: 156429 - RNA, 19 nt, Artificial Sequence
  Description of Artificial Sequence: Synthetic oligonucleotide
gucguauguuaaaucucua

SEQ ID NO: 156430 - RNA, 19 nt, Artificial Sequence
  Description of Artificial Sequence: Synthetic oligonucleotide
ugagcgcguucccgcucac

SEQ ID NO: 156431 - RNA, 19 nt, Artificial Sequence
  Description of Artificial Sequence: Synthetic oligonucleotide
gcauaaagucaguaacaau

SEQ ID NO: 156432 - RNA, 19 nt, Artificial Sequence
  Description of Artificial Sequence: Synthetic oligonucleotide
ucucggcggggaugcucug

SEQ ID NO: 156433 - RNA, 19 nt, Artificial Sequence
  Description of Artificial Sequence: Synthetic oligonucleotide
gcgacagagcggcgacugg

SEQ ID NO: 156434 - RNA, 19 nt, Artificial Sequence
  Description of Artificial Sequence: Synthetic oligonucleotide
agacucacucugggaugug

SEQ ID NO: 156435 - RNA, 19 nt, Artificial Sequence
  Description of Artificial Sequence: Synthetic oligonucleotide
gggguaacacaagaaggcu

SEQ ID NO: 156436 - RNA, 19 nt, Artificial Sequence
  Description of Artificial Sequence: Synthetic oligonucleotide
ccgccgagccgguuguucc

SEQ ID NO: 156437 - RNA, 19 nt, Artificial Sequence
  Description of Artificial Sequence: Synthetic oligonucleotide
ccaagguauaagcacucua

SEQ ID NO: 156438 - RNA, 19 nt, Artificial Sequence
  Description of Artificial Sequence: Synthetic oligonucleotide
cgacagagcggcgacuggg

SEQ ID NO: 156439 - RNA, 19 nt, Artificial Sequence
  Description of Artificial Sequence: Synthetic oligonucleotide
cagacucacucugggaugu

SEQ ID NO: 156440 - RNA, 19 nt, Artificial Sequence
  Description of Artificial Sequence: Synthetic oligonucleotide
agguugcucugaaaucauu

SEQ ID NO: 156441 - RNA, 19 nt, Artificial Sequence
  Description of Artificial Sequence: Synthetic oligonucleotide
gcaggccuuggguauuauc

SEQ ID NO: 156442 - RNA, 19 nt, Artificial Sequence
  Description of Artificial Sequence: Synthetic oligonucleotide
cgcaaacucaacucuucca

SEQ ID NO: 156443 - RNA, 19 nt, Artificial Sequence
  Description of Artificial Sequence: Synthetic oligonucleotide
ccuucggacucuuaauggu

SEQ ID NO: 156444 - RNA, 19 nt, Artificial Sequence
  Description of Artificial Sequence: Synthetic oligonucleotide
ccaauggaauuuccucgca

SEQ ID NO: 156445 - RNA, 19 nt, Artificial Sequence
  Description of Artificial Sequence: Synthetic oligonucleotide
gcugcucaaccaagaagga

SEQ ID NO: 156446 - RNA, 19 nt, Artificial Sequence
  Description of Artificial Sequence: Synthetic oligonucleotide
gugcgggaagccgcugccc

SEQ ID NO: 156447 - RNA, 19 nt, Artificial Sequence
  Description of Artificial Sequence: Synthetic oligonucleotide
gcgcgcagcuccagcagcg

SEQ ID NO: 156448 - RNA, 19 nt, Artificial Sequence
  Description of Artificial Sequence: Synthetic oligonucleotide
gaaauaccuucggacucuu

SEQ ID NO: 156449 - RNA, 19 nt, Artificial Sequence
  Description of Artificial Sequence: Synthetic oligonucleotide
ugccgcccaggcugagggu

SEQ ID NO: 156450 - RNA, 19 nt, Artificial Sequence
  Description of Artificial Sequence: Synthetic oligonucleotide
gaggugcgggaagccgcug

SEQ ID NO: 156451 - RNA, 19 nt, Artificial Sequence
  Description of Artificial Sequence: Synthetic oligonucleotide
ggagggucguauguuaaau

SEQ ID NO: 156452 - RNA, 19 nt, Artificial Sequence
  Description of Artificial Sequence: Synthetic oligonucleotide
gccgagccgguuguuccgg

SEQ ID NO: 156453 - RNA, 19 nt, Artificial Sequence
  Description of Artificial Sequence: Synthetic oligonucleotide
ggaguguaagaaauaccuu

SEQ ID NO: 156454 - RNA, 19 nt, Artificial Sequence
  Description of Artificial Sequence: Synthetic oligonucleotide
cucugggauguggagcugu

SEQ ID NO: 156455 - RNA, 19 nt, Artificial Sequence
  Description of Artificial Sequence: Synthetic oligonucleotide
cccgcggcagcgacgucag

SEQ ID NO: 156456 - RNA, 19 nt, Artificial Sequence
  Description of Artificial Sequence: Synthetic oligonucleotide
gccacgaaacucucguguu

SEQ ID NO: 156457 - RNA, 19 nt, Artificial Sequence
  Description of Artificial Sequence: Synthetic oligonucleotide
cgccgagccgguuguuccg

SEQ ID NO: 156458 - RNA, 19 nt, Artificial Sequence
  Description of Artificial Sequence: Synthetic oligonucleotide
cccugaauuaucccauaau

SEQ ID NO: 156459 - RNA, 19 nt, Artificial Sequence
  Description of Artificial Sequence: Synthetic oligonucleotide
gcccgcggcagcgacguca

SEQ ID NO: 156460 - RNA, 19 nt, Artificial Sequence
  Description of Artificial Sequence: Synthetic oligonucleotide
ggaucucucgaggcaggua

SEQ ID NO: 156461 - RNA, 19 nt, Artificial Sequence
  Description of Artificial Sequence: Synthetic oligonucleotide
aggcugcgacagagcggcg

SEQ ID NO: 156462 - RNA, 19 nt, Artificial Sequence
  Description of Artificial Sequence: Synthetic oligonucleotide
gggucccagcgccgugagc

SEQ ID NO: 156463 - RNA, 19 nt, Artificial Sequence
  Description of Artificial Sequence: Synthetic oligonucleotide
gcauucgguguugcagcaa

SEQ ID NO: 156464 - RNA, 19 nt, Artificial Sequence
  Description of Artificial Sequence: Synthetic oligonucleotide
ggcagcgacgucaggcggu

SEQ ID NO: 156465 - RNA, 19 nt, Artificial Sequence
  Description of Artificial Sequence: Synthetic oligonucleotide
gcgccgugagcgcguuccc

SEQ ID NO: 156466 - RNA, 19 nt, Artificial Sequence
  Description of Artificial Sequence: Synthetic oligonucleotide
ggcugaacccaaguaucuu

SEQ ID NO: 156467 - RNA, 19 nt, Artificial Sequence
  Description of Artificial Sequence: Synthetic oligonucleotide
ccauacccuugcuaggauu

SEQ ID NO: 156468 - RNA, 19 nt, Artificial Sequence
  Description of Artificial Sequence: Synthetic oligonucleotide
gccgccgagccgguuguuc

SEQ ID NO: 156469 - RNA, 19 nt, Artificial Sequence
  Description of Artificial Sequence: Synthetic oligonucleotide
ccaaguaucuuaggagauu

SEQ ID NO: 156470 - RNA, 19 nt, Artificial Sequence
  Description of Artificial Sequence: Synthetic oligonucleotide
cgggccgccgagccgguug

SEQ ID NO: 156471 - RNA, 19 nt, Artificial Sequence
  Description of Artificial Sequence: Synthetic oligonucleotide
cgccgugagcgcguucccg

SEQ ID NO: 156472 - RNA, 19 nt, Artificial Sequence
  Description of Artificial Sequence: Synthetic oligonucleotide
cgugagcgcguucccgcuc

SEQ ID NO: 156473 - RNA, 19 nt, Artificial Sequence
  Description of Artificial Sequence: Synthetic oligonucleotide
ccacgaaacucucguguuu

SEQ ID NO: 156474 - RNA, 19 nt, Artificial Sequence
  Description of Artificial Sequence: Synthetic oligonucleotide
cgucagcaguucggguccc

SEQ ID NO: 156475 - RNA, 19 nt, Artificial Sequence
  Description of Artificial Sequence: Synthetic oligonucleotide
ggcuacacuuuuggauuuu

SEQ ID NO: 156476 - RNA, 19 nt, Artificial Sequence
  Description of Artificial Sequence: Synthetic oligonucleotide
cgggucccagcgccgugag

SEQ ID NO: 156477 - RNA, 19 nt, Artificial Sequence
  Description of Artificial Sequence: Synthetic oligonucleotide
gggccgccgagccgguugu

SEQ ID NO: 156478 - RNA, 19 nt, Artificial Sequence
  Description of Artificial Sequence: Synthetic oligonucleotide
gcagcgugcgcaggccgcu

SEQ ID NO: 156479 - RNA, 19 nt, Artificial Sequence
  Description of Artificial Sequence: Synthetic oligonucleotide
cgaaacucucguguuucau

SEQ ID NO: 156480 - RNA, 19 nt, Artificial Sequence
  Description of Artificial Sequence: Synthetic oligonucleotide
gcagcgacgucaggcgguu

SEQ ID NO: 156481 - RNA, 19 nt, Artificial Sequence
  Description of Artificial Sequence: Synthetic oligonucleotide
ccgugagcgcguucccgcu

SEQ ID NO: 156482 - RNA, 19 nt, Artificial Sequence
  Description of Artificial Sequence: Synthetic oligonucleotide
ccgggccagcagcgugcgc

SEQ ID NO: 156483 - RNA, 19 nt, Artificial Sequence
  Description of Artificial Sequence: Synthetic oligonucleotide
cgcucacguccaggagcug

SEQ ID NO: 156484 - RNA, 19 nt, Artificial Sequence
  Description of Artificial Sequence: Synthetic oligonucleotide
cggacucuuaaugguccuu

SEQ ID NO: 156485 - RNA, 19 nt, Artificial Sequence
  Description of Artificial Sequence: Synthetic oligonucleotide
cgcccgcggcagcgacguc

SEQ ID NO: 156486 - RNA, 19 nt, Artificial Sequence
  Description of Artificial Sequence: Synthetic oligonucleotide
ugaaagucgacauagacag

SEQ ID NO: 156487 - RNA, 19 nt, Artificial Sequence
  Description of Artificial Sequence: Synthetic oligonucleotide
uucaauauaauacagugga

SEQ ID NO: 156488 - RNA, 19 nt, Artificial Sequence
  Description of Artificial Sequence: Synthetic oligonucleotide
aacuguaauaaaucggccc

SEQ ID NO: 156489 - RNA, 19 nt, Artificial Sequence
  Description of Artificial Sequence: Synthetic oligonucleotide
auaacuguaauaaaucggc

SEQ ID NO: 156490 - RNA, 19 nt, Artificial Sequence
  Description of Artificial Sequence: Synthetic oligonucleotide
ucauaacuguaauaaaucg

SEQ ID NO: 156491 - RNA, 19 nt, Artificial Sequence
  Description of Artificial Sequence: Synthetic oligonucleotide
aaagcaaucucugauacug

SEQ ID NO: 156492 - RNA, 19 nt, Artificial Sequence
  Description of Artificial Sequence: Synthetic oligonucleotide
uuauaucacaaaauaaacu

SEQ ID NO: 156493 - RNA, 19 nt, Artificial Sequence
  Description of Artificial Sequence: Synthetic oligonucleotide
aauaaaucggcccaaguua

SEQ ID NO: 156494 - RNA, 19 nt, Artificial Sequence
  Description of Artificial Sequence: Synthetic oligonucleotide
aaaacccucauacucaacu

SEQ ID NO: 156495 - RNA, 19 nt, Artificial Sequence
  Description of Artificial Sequence: Synthetic oligonucleotide
cucguaaauaaccauauag

SEQ ID NO: 156496 - RNA, 19 nt, Artificial Sequence
  Description of Artificial Sequence: Synthetic oligonucleotide
gaaucuaugcuuuaaccgc

SEQ ID NO: 156497 - RNA, 19 nt, Artificial Sequence
  Description of Artificial Sequence: Synthetic oligonucleotide
aaaauaauugggucucgag

SEQ ID NO: 156498 - RNA, 19 nt, Artificial Sequence
  Description of Artificial Sequence: Synthetic oligonucleotide
agaauaauuggguagugug

SEQ ID NO: 156499 - RNA, 19 nt, Artificial Sequence
  Description of Artificial Sequence: Synthetic oligonucleotide
ucuuucggcauccacagcc

SEQ ID NO: 156500 - RNA, 19 nt, Artificial Sequence
  Description of Artificial Sequence: Synthetic oligonucleotide
  modified_base (14)..(14): a, c, u, g, unknown or other
uugucauacagcanacccc

SEQ ID NO: 156501 - RNA, 19 nt, Artificial Sequence
  Description of Artificial Sequence: Synthetic oligonucleotide
uucauaacuguaauaaauc

SEQ ID NO: 156502 - RNA, 19 nt, Artificial Sequence
  Description of Artificial Sequence: Synthetic oligonucleotide
ucagaaacgccucugcugc

SEQ ID NO: 156503 - RNA, 19 nt, Artificial Sequence
  Description of Artificial Sequence: Synthetic oligonucleotide
uccacugacaguucgaaug

SEQ ID NO: 156504 - RNA, 19 nt, Artificial Sequence
  Description of Artificial Sequence: Synthetic oligonucleotide
uauagagacaccuuucggu

SEQ ID NO: 156505 - RNA, 19 nt, Artificial Sequence
  Description of Artificial Sequence: Synthetic oligonucleotide
ugggguguacuuuagaagc

SEQ ID NO: 156506 - RNA, 19 nt, Artificial Sequence
  Description of Artificial Sequence: Synthetic oligonucleotide
cauuccgucaccuucagac

SEQ ID NO: 156507 - RNA, 19 nt, Artificial Sequence
  Description of Artificial Sequence: Synthetic oligonucleotide
uguaaggaugagaaguuug

SEQ ID NO: 156508 - RNA, 19 nt, Artificial Sequence
  Description of Artificial Sequence: Synthetic oligonucleotide
uuuaugacuguguauugug

SEQ ID NO: 156509 - RNA, 19 nt, Artificial Sequence
  Description of Artificial Sequence: Synthetic oligonucleotide
uucuucuucuucuucuucg

SEQ ID NO: 156510 - RNA, 19 nt, Artificial Sequence
  Description of Artificial Sequence: Synthetic oligonucleotide
guucuuaaauggcagagcc

SEQ ID NO: 156511 - RNA, 19 nt, Artificial Sequence
  Description of Artificial Sequence: Synthetic oligonucleotide
aguguucacguccacuugc

SEQ ID NO: 156512 - RNA, 19 nt, Artificial Sequence
  Description of Artificial Sequence: Synthetic oligonucleotide
  modified_base (5)..(5): a, c, u, g, unknown or other
agcancuugucauacagca

SEQ ID NO: 156513 - RNA, 19 nt, Artificial Sequence
  Description of Artificial Sequence: Synthetic oligonucleotide
ucaguugauguguuguccg

SEQ ID NO: 156514 - RNA, 19 nt, Artificial Sequence
  Description of Artificial Sequence: Synthetic oligonucleotide
ucuccuuagacccucucag

SEQ ID NO: 156515 - RNA, 19 nt, Artificial Sequence
  Description of Artificial Sequence: Synthetic oligonucleotide
cauuucacccuuaagauca

SEQ ID NO: 156516 - RNA, 19 nt, Artificial Sequence
  Description of Artificial Sequence: Synthetic oligonucleotide
gaauaauuggguagugugg

SEQ ID NO: 156517 - RNA, 19 nt, Artificial Sequence
  Description of Artificial Sequence: Synthetic oligonucleotide
aaacccucauacucaacuc

SEQ ID NO: 156518 - RNA, 19 nt, Artificial Sequence
  Description of Artificial Sequence: Synthetic oligonucleotide
  modified_base (11)..(11): a, c, u, g, unknown or other
auagacagcancuugucau

SEQ ID NO: 156519 - RNA, 19 nt, Artificial Sequence
  Description of Artificial Sequence: Synthetic oligonucleotide
ggacauacauuccaggucg

SEQ ID NO: 156520 - RNA, 19 nt, Artificial Sequence
  Description of Artificial Sequence: Synthetic oligonucleotide
ucaaucucgauucggacau

SEQ ID NO: 156521 - RNA, 19 nt, Artificial Sequence
  Description of Artificial Sequence: Synthetic oligonucleotide
auaccaacgauguuucuug

SEQ ID NO: 156522 - RNA, 19 nt, Artificial Sequence
  Description of Artificial Sequence: Synthetic oligonucleotide
uuuauagauuuauccaggu

SEQ ID NO: 156523 - RNA, 19 nt, Artificial Sequence
  Description of Artificial Sequence: Synthetic oligonucleotide
ucgaaaacccucauacuca

SEQ ID NO: 156524 - RNA, 19 nt, Artificial Sequence
  Description of Artificial Sequence: Synthetic oligonucleotide
uuggcuuauacaaggaguc

SEQ ID NO: 156525 - RNA, 19 nt, Artificial Sequence
  Description of Artificial Sequence: Synthetic oligonucleotide
aaucucgauucggacauac

SEQ ID NO: 156526 - RNA, 19 nt, Artificial Sequence
  Description of Artificial Sequence: Synthetic oligonucleotide
uuaugacuguguauugugc

SEQ ID NO: 156527 - RNA, 19 nt, Artificial Sequence
  Description of Artificial Sequence: Synthetic oligonucleotide
ucgauucggacauacauuc

SEQ ID NO: 156528 - RNA, 19 nt, Artificial Sequence
  Description of Artificial Sequence: Synthetic oligonucleotide
uucaaucucgauucggaca

SEQ ID NO: 156529 - RNA, 19 nt, Artificial Sequence
  Description of Artificial Sequence: Synthetic oligonucleotide
aaaaucuccuacgccuggc

SEQ ID NO: 156530 - RNA, 19 nt, Artificial Sequence
  Description of Artificial Sequence: Synthetic oligonucleotide
ugggucucgagacuugagg

SEQ ID NO: 156531 - RNA, 19 nt, Artificial Sequence
  Description of Artificial Sequence: Synthetic oligonucleotide
ucgaccaguguucacgucc

SEQ ID NO: 156532 - RNA, 19 nt, Artificial Sequence
  Description of Artificial Sequence: Synthetic oligonucleotide
aaguuaugaaucucuuggu

SEQ ID NO: 156533 - RNA, 19 nt, Artificial Sequence
  Description of Artificial Sequence: Synthetic oligonucleotide
ugcauuucacccuuaagau

SEQ ID NO: 156534 - RNA, 19 nt, Artificial Sequence
  Description of Artificial Sequence: Synthetic oligonucleotide
ucucgauucggacauacau

SEQ ID NO: 156535 - RNA, 19 nt, Artificial Sequence
  Description of Artificial Sequence: Synthetic oligonucleotide
ucuucuucuucuucuucgg

SEQ ID NO: 156536 - RNA, 19 nt, Artificial Sequence
  Description of Artificial Sequence: Synthetic oligonucleotide
uaacuguaauaaaucggcc

SEQ ID NO: 156537 - RNA, 19 nt, Artificial Sequence
  Description of Artificial Sequence: Synthetic oligonucleotide
ugauuaucuauaucuucug

SEQ ID NO: 156538 - RNA, 19 nt, Artificial Sequence
  Description of Artificial Sequence: Synthetic oligonucleotide
uaugacuguguauugugcu

SEQ ID NO: 156539 - RNA, 19 nt, Artificial Sequence
  Description of Artificial Sequence: Synthetic oligonucleotide
ucucaugagguucacguau

SEQ ID NO: 156540 - RNA, 19 nt, Artificial Sequence
  Description of Artificial Sequence: Synthetic oligonucleotide
  modified_base (18)..(18): a, c, u, g, unknown or other
agucgacauagacagcanc

SEQ ID NO: 156541 - RNA, 19 nt, Artificial Sequence
  Description of Artificial Sequence: Synthetic oligonucleotide
cuuacacucucuauccggc

SEQ ID NO: 156542 - RNA, 19 nt, Artificial Sequence
  Description of Artificial Sequence: Synthetic oligonucleotide
uacucgaccaguguucacg

SEQ ID NO: 156543 - RNA, 19 nt, Artificial Sequence
  Description of Artificial Sequence: Synthetic oligonucleotide
ugugagaggccuaaacuuc

SEQ ID NO: 156544 - RNA, 19 nt, Artificial Sequence
  Description of Artificial Sequence: Synthetic oligonucleotide
uuggcaucgauacuggcau

SEQ ID NO: 156545 - RNA, 19 nt, Artificial Sequence
  Description of Artificial Sequence: Synthetic oligonucleotide
ucuuaaauggcagagccuu

SEQ ID NO: 156546 - RNA, 19 nt, Artificial Sequence
  Description of Artificial Sequence: Synthetic oligonucleotide
aggccuaaacuucauaacu

SEQ ID NO: 156547 - RNA, 19 nt, Artificial Sequence
  Description of Artificial Sequence: Synthetic oligonucleotide
uccagagagaggugcauag

SEQ ID NO: 156548 - RNA, 19 nt, Artificial Sequence
  Description of Artificial Sequence: Synthetic oligonucleotide
aacccucauacucaacucu

SEQ ID NO: 156549 - RNA, 19 nt, Artificial Sequence
  Description of Artificial Sequence: Synthetic oligonucleotide
  modified_base (2)..(2): a, c, u, g, unknown or other
  modified_base (17)..(17): a, c, u, g, unknown or other
ancuugucauacagcanac

SEQ ID NO: 156550 - RNA, 19 nt, Artificial Sequence
  Description of Artificial Sequence: Synthetic oligonucleotide
gauguuacgggguuauaga

SEQ ID NO: 156551 - RNA, 19 nt, Artificial Sequence
  Description of Artificial Sequence: Synthetic oligonucleotide
uuauagauuuauccagguc

SEQ ID NO: 156552 - RNA, 19 nt, Artificial Sequence
  Description of Artificial Sequence: Synthetic oligonucleotide
gagaaaacugacaucgcug

SEQ ID NO: 156553 - RNA, 19 nt, Artificial Sequence
  Description of Artificial Sequence: Synthetic oligonucleotide
gauuuguccccuuauucca

SEQ ID NO: 156554 - RNA, 19 nt, Artificial Sequence
  Description of Artificial Sequence: Synthetic oligonucleotide
uucggacauacauuccagg

SEQ ID NO: 156555 - RNA, 19 nt, Artificial Sequence
  Description of Artificial Sequence: Synthetic oligonucleotide
auuugugcggauguccucg

SEQ ID NO: 156556 - RNA, 19 nt, Artificial Sequence
  Description of Artificial Sequence: Synthetic oligonucleotide
uuguccgcauuccugacca

SEQ ID NO: 156557 - RNA, 19 nt, Artificial Sequence
  Description of Artificial Sequence: Synthetic oligonucleotide
cugauacucuccauguacc

SEQ ID NO: 156558 - RNA, 19 nt, Artificial Sequence
  Description of Artificial Sequence: Synthetic oligonucleotide
aacagcgcucuuuugcugu

SEQ ID NO: 156559 - RNA, 19 nt, Artificial Sequence
  Description of Artificial Sequence: Synthetic oligonucleotide
aguggcagcaauccgaaau

SEQ ID NO: 156560 - RNA, 19 nt, Artificial Sequence
  Description of Artificial Sequence: Synthetic oligonucleotide
cugcauuucacccuuaaga

SEQ ID NO: 156561 - RNA, 19 nt, Artificial Sequence
  Description of Artificial Sequence: Synthetic oligonucleotide
agauguuacgggguuauag

SEQ ID NO: 156562 - RNA, 19 nt, Artificial Sequence
  Description of Artificial Sequence: Synthetic oligonucleotide
cuagagucauuuuccauuc

SEQ ID NO: 156563 - RNA, 19 nt, Artificial Sequence
  Description of Artificial Sequence: Synthetic oligonucleotide
uccggaagagcacaggguc

SEQ ID NO: 156564 - RNA, 19 nt, Artificial Sequence
  Description of Artificial Sequence: Synthetic oligonucleotide
uccucguaaauaaccauau

SEQ ID NO: 156565 - RNA, 19 nt, Artificial Sequence
  Description of Artificial Sequence: Synthetic oligonucleotide
gaaaccuagaacaguccag

SEQ ID NO: 156566 - RNA, 19 nt, Artificial Sequence
  Description of Artificial Sequence: Synthetic oligonucleotide
uuucggucacacuugacau

SEQ ID NO: 156567 - RNA, 19 nt, Artificial Sequence
  Description of Artificial Sequence: Synthetic oligonucleotide
agauuuauccaggucaaga

SEQ ID NO: 156568 - RNA, 19 nt, Artificial Sequence
  Description of Artificial Sequence: Synthetic oligonucleotide
uuccccgucacaaagcaau

SEQ ID NO: 156569 - RNA, 19 nt, Artificial Sequence
  Description of Artificial Sequence: Synthetic oligonucleotide
uguaauaaaucggcccaag

SEQ ID NO: 156570 - RNA, 19 nt, Artificial Sequence
  Description of Artificial Sequence: Synthetic oligonucleotide
aaaucggcccaaguuauga

SEQ ID NO: 156571 - RNA, 19 nt, Artificial Sequence
  Description of Artificial Sequence: Synthetic oligonucleotide
cacuauugcccaaaccacc

SEQ ID NO: 156572 - RNA, 19 nt, Artificial Sequence
  Description of Artificial Sequence: Synthetic oligonucleotide
ucggacauacauuccaggu

SEQ ID NO: 156573 - RNA, 19 nt, Artificial Sequence
  Description of Artificial Sequence: Synthetic oligonucleotide
agcuuucgaagauuuggag

SEQ ID NO: 156574 - RNA, 19 nt, Artificial Sequence
  Description of Artificial Sequence: Synthetic oligonucleotide
augugaaucugacuguuau

SEQ ID NO: 156575 - RNA, 19 nt, Artificial Sequence
  Description of Artificial Sequence: Synthetic oligonucleotide
aguuaugaaucucuugguu

SEQ ID NO: 156576 - RNA, 19 nt, Artificial Sequence
  Description of Artificial Sequence: Synthetic oligonucleotide
  modified_base (3)..(3): a, c, u, g, unknown or other
  modified_base (18)..(18): a, c, u, g, unknown or other
cancuugucauacagcana

SEQ ID NO: 156577 - RNA, 19 nt, Artificial Sequence
  Description of Artificial Sequence: Synthetic oligonucleotide
cucagaaacgccucugcug

SEQ ID NO: 156578 - RNA, 19 nt, Artificial Sequence
  Description of Artificial Sequence: Synthetic oligonucleotide
acguaugacagccggucuc

SEQ ID NO: 156579 - RNA, 19 nt, Artificial Sequence
  Description of Artificial Sequence: Synthetic oligonucleotide
acacucucuauccggcugg

SEQ ID NO: 156580 - RNA, 19 nt, Artificial Sequence
  Description of Artificial Sequence: Synthetic oligonucleotide
uccauaaaucagcuuucga

SEQ ID NO: 156581 - RNA, 19 nt, Artificial Sequence
  Description of Artificial Sequence: Synthetic oligonucleotide
augugagaggccuaaacuu

SEQ ID NO: 156582 - RNA, 19 nt, Artificial Sequence
  Description of Artificial Sequence: Synthetic oligonucleotide
uuucaaguaggcuccucgu

SEQ ID NO: 156583 - RNA, 19 nt, Artificial Sequence
  Description of Artificial Sequence: Synthetic oligonucleotide
uccaggucgaaaacccuca

SEQ ID NO: 156584 - RNA, 19 nt, Artificial Sequence
  Description of Artificial Sequence: Synthetic oligonucleotide
acccggguauacuucaguc

SEQ ID NO: 156585 - RNA, 19 nt, Artificial Sequence
  Description of Artificial Sequence: Synthetic oligonucleotide
ggcgcaucugcacauaucc

SEQ ID NO: 156586 - RNA, 19 nt, Artificial Sequence
  Description of Artificial Sequence: Synthetic oligonucleotide
gcuuucgaagauuuggagc

SEQ ID NO: 156587 - RNA, 19 nt, Artificial Sequence
  Description of Artificial Sequence: Synthetic oligonucleotide
accuucuucuucuucuucu

SEQ ID NO: 156588 - RNA, 19 nt, Artificial Sequence
  Description of Artificial Sequence: Synthetic oligonucleotide
aggcuccucguaaauaacc

SEQ ID NO: 156589 - RNA, 19 nt, Artificial Sequence
  Description of Artificial Sequence: Synthetic oligonucleotide
gguucugauacucuccaug

SEQ ID NO: 156590 - RNA, 19 nt, Artificial Sequence
  Description of Artificial Sequence: Synthetic oligonucleotide
auaauugggucucgagacu

SEQ ID NO: 156591 - RNA, 19 nt, Artificial Sequence
  Description of Artificial Sequence: Synthetic oligonucleotide
ugacuguguauugugcuca

SEQ ID NO: 156592 - RNA, 19 nt, Artificial Sequence
  Description of Artificial Sequence: Synthetic oligonucleotide
ucaugagguucacguauga

SEQ ID NO: 156593 - RNA, 19 nt, Artificial Sequence
  Description of Artificial Sequence: Synthetic oligonucleotide
ucggcccaaguuaugaauc

SEQ ID NO: 156594 - RNA, 19 nt, Artificial Sequence
  Description of Artificial Sequence: Synthetic oligonucleotide
cagccuugugcuuacacuc

SEQ ID NO: 156595 - RNA, 19 nt, Artificial Sequence
  Description of Artificial Sequence: Synthetic oligonucleotide
auguuacgggguuauagaa

SEQ ID NO: 156596 - RNA, 19 nt, Artificial Sequence
  Description of Artificial Sequence: Synthetic oligonucleotide
uaauuggguaguguggguc

SEQ ID NO: 156597 - RNA, 19 nt, Artificial Sequence
  Description of Artificial Sequence: Synthetic oligonucleotide
ugccuuccgggaaaggucu

SEQ ID NO: 156598 - RNA, 19 nt, Artificial Sequence
  Description of Artificial Sequence: Synthetic oligonucleotide
cucaguugauguguugucc

SEQ ID NO: 156599 - RNA, 19 nt, Artificial Sequence
  Description of Artificial Sequence: Synthetic oligonucleotide
  modified_base (9)..(9): a, c, u, g, unknown or other
agacagcancuugucauac

SEQ ID NO: 156600 - RNA, 19 nt, Artificial Sequence
  Description of Artificial Sequence: Synthetic oligonucleotide
accaacgauguuucuugag

SEQ ID NO: 156601 - RNA, 19 nt, Artificial Sequence
  Description of Artificial Sequence: Synthetic oligonucleotide
uucgaaugacagcaccuuc

SEQ ID NO: 156602 - RNA, 19 nt, Artificial Sequence
  Description of Artificial Sequence: Synthetic oligonucleotide
uaaaucggcccaaguuaug

SEQ ID NO: 156603 - RNA, 19 nt, Artificial Sequence
  Description of Artificial Sequence: Synthetic oligonucleotide
cacggaacaguccuccaag

SEQ ID NO: 156604 - RNA, 19 nt, Artificial Sequence
  Description of Artificial Sequence: Synthetic oligonucleotide
guaggcuccucguaaauaa

SEQ ID NO: 156605 - RNA, 19 nt, Artificial Sequence
  Description of Artificial Sequence: Synthetic oligonucleotide
auacucuccauguaccauu

SEQ ID NO: 156606 - RNA, 19 nt, Artificial Sequence
  Description of Artificial Sequence: Synthetic oligonucleotide
uucaaguaggcuccucgua

SEQ ID NO: 156607 - RNA, 19 nt, Artificial Sequence
  Description of Artificial Sequence: Synthetic oligonucleotide
auaauuggguagugugggu

SEQ ID NO: 156608 - RNA, 19 nt, Artificial Sequence
  Description of Artificial Sequence: Synthetic oligonucleotide
cucaugagguucacguaug

SEQ ID NO: 156609 - RNA, 19 nt, Artificial Sequence
  Description of Artificial Sequence: Synthetic oligonucleotide
cugcuaagaccuuggcugc

SEQ ID NO: 156610 - RNA, 19 nt, Artificial Sequence
  Description of Artificial Sequence: Synthetic oligonucleotide
ggggauguuuucaaucucg

SEQ ID NO: 156611 - RNA, 19 nt, Artificial Sequence
  Description of Artificial Sequence: Synthetic oligonucleotide
aaucggcccaaguuaugaa

SEQ ID NO: 156612 - RNA, 19 nt, Artificial Sequence
  Description of Artificial Sequence: Synthetic oligonucleotide
  modified_base (16)..(16): a, c, u, g, unknown or other
ucgacauagacagcancuu

SEQ ID NO: 156613 - RNA, 19 nt, Artificial Sequence
  Description of Artificial Sequence: Synthetic oligonucleotide
agcuuuccgacguacucga

SEQ ID NO: 156614 - RNA, 19 nt, Artificial Sequence
  Description of Artificial Sequence: Synthetic oligonucleotide
ggaauggucugaaaucucc

SEQ ID NO: 156615 - RNA, 19 nt, Artificial Sequence
  Description of Artificial Sequence: Synthetic oligonucleotide
auaaaucggcccaaguuau

SEQ ID NO: 156616 - RNA, 19 nt, Artificial Sequence
  Description of Artificial Sequence: Synthetic oligonucleotide
cuauccggcuggcugacac

SEQ ID NO: 156617 - RNA, 19 nt, Artificial Sequence
  Description of Artificial Sequence: Synthetic oligonucleotide
ucuccuacgccuggcaugu

SEQ ID NO: 156618 - RNA, 19 nt, Artificial Sequence
  Description of Artificial Sequence: Synthetic oligonucleotide
caguugauguguuguccgc

SEQ ID NO: 156619 - RNA, 19 nt, Artificial Sequence
  Description of Artificial Sequence: Synthetic oligonucleotide
ggaacaguccuccaagcuc

SEQ ID NO: 156620 - RNA, 19 nt, Artificial Sequence
  Description of Artificial Sequence: Synthetic oligonucleotide
guacucugcgucaaauagc

SEQ ID NO: 156621 - RNA, 19 nt, Artificial Sequence
  Description of Artificial Sequence: Synthetic oligonucleotide
auuccgucaccuucagaca

SEQ ID NO: 156622 - RNA, 19 nt, Artificial Sequence
  Description of Artificial Sequence: Synthetic oligonucleotide
cacguguuccuuguugugc

SEQ ID NO: 156623 - RNA, 19 nt, Artificial Sequence
  Description of Artificial Sequence: Synthetic oligonucleotide
aguucgaaugacagcaccu

SEQ ID NO: 156624 - RNA, 19 nt, Artificial Sequence
  Description of Artificial Sequence: Synthetic oligonucleotide
  modified_base (6)..(6): a, c, u, g, unknown or other
cagcancuugucauacagc

SEQ ID NO: 156625 - RNA, 19 nt, Artificial Sequence
  Description of Artificial Sequence: Synthetic oligonucleotide
uagauuuauccaggucaag

SEQ ID NO: 156626 - RNA, 19 nt, Artificial Sequence
  Description of Artificial Sequence: Synthetic oligonucleotide
uuacacucucuauccggcu

SEQ ID NO: 156627 - RNA, 19 nt, Artificial Sequence
  Description of Artificial Sequence: Synthetic oligonucleotide
uccauuccgucaccuucag

SEQ ID NO: 156628 - RNA, 19 nt, Artificial Sequence
  Description of Artificial Sequence: Synthetic oligonucleotide
acguacucgaccaguguuc

SEQ ID NO: 156629 - RNA, 19 nt, Artificial Sequence
  Description of Artificial Sequence: Synthetic oligonucleotide
uaauugggucucgagacuu

SEQ ID NO: 156630 - RNA, 19 nt, Artificial Sequence
  Description of Artificial Sequence: Synthetic oligonucleotide
aucugaguauccggguccg

SEQ ID NO: 156631 - RNA, 19 nt, Artificial Sequence
  Description of Artificial Sequence: Synthetic oligonucleotide
  modified_base (8)..(8): a, c, u, g, unknown or other
gacagcancuugucauaca

SEQ ID NO: 156632 - RNA, 19 nt, Artificial Sequence
  Description of Artificial Sequence: Synthetic oligonucleotide
ggcaucgauacuggcaugg

SEQ ID NO: 156633 - RNA, 19 nt, Artificial Sequence
  Description of Artificial Sequence: Synthetic oligonucleotide
acucgaccaguguucacgu

SEQ ID NO: 156634 - RNA, 19 nt, Artificial Sequence
  Description of Artificial Sequence: Synthetic oligonucleotide
gagguucacguaugacagc

SEQ ID NO: 156635 - RNA, 19 nt, Artificial Sequence
  Description of Artificial Sequence: Synthetic oligonucleotide
uuucggcauccacagcccu

SEQ ID NO: 156636 - RNA, 19 nt, Artificial Sequence
  Description of Artificial Sequence: Synthetic oligonucleotide
cuucuucuucuucuucuuc

SEQ ID NO: 156637 - RNA, 19 nt, Artificial Sequence
  Description of Artificial Sequence: Synthetic oligonucleotide
caugugagaggccuaaacu

SEQ ID NO: 156638 - RNA, 19 nt, Artificial Sequence
  Description of Artificial Sequence: Synthetic oligonucleotide
uuugucggccauugugguc

SEQ ID NO: 156639 - RNA, 19 nt, Artificial Sequence
  Description of Artificial Sequence: Synthetic oligonucleotide
uugugcuuacacucucuau

SEQ ID NO: 156640 - RNA, 19 nt, Artificial Sequence
  Description of Artificial Sequence: Synthetic oligonucleotide
uaccaacgauguuucuuga

SEQ ID NO: 156641 - RNA, 19 nt, Artificial Sequence
  Description of Artificial Sequence: Synthetic oligonucleotide
caccuuucggucacacuug

SEQ ID NO: 156642 - RNA, 19 nt, Artificial Sequence
  Description of Artificial Sequence: Synthetic oligonucleotide
ugacaucgcugacaacaaa

SEQ ID NO: 156643 - RNA, 19 nt, Artificial Sequence
  Description of Artificial Sequence: Synthetic oligonucleotide
ccucuuucggcauccacag

SEQ ID NO: 156644 - RNA, 19 nt, Artificial Sequence
  Description of Artificial Sequence: Synthetic oligonucleotide
gguagugugggucaaaguu

SEQ ID NO: 156645 - RNA, 19 nt, Artificial Sequence
  Description of Artificial Sequence: Synthetic oligonucleotide
uuggcacccggguauacuu

SEQ ID NO: 156646 - RNA, 19 nt, Artificial Sequence
  Description of Artificial Sequence: Synthetic oligonucleotide
ugagaggccuaaacuucau

SEQ ID NO: 156647 - RNA, 19 nt, Artificial Sequence
  Description of Artificial Sequence: Synthetic oligonucleotide
cuccucguaaauaaccaua

SEQ ID NO: 156648 - RNA, 19 nt, Artificial Sequence
  Description of Artificial Sequence: Synthetic oligonucleotide
guaauaaaucggcccaagu

SEQ ID NO: 156649 - RNA, 19 nt, Artificial Sequence
  Description of Artificial Sequence: Synthetic oligonucleotide
caggauaccaaguucuuau

SEQ ID NO: 156650 - RNA, 19 nt, Artificial Sequence
  Description of Artificial Sequence: Synthetic oligonucleotide
cauccacagcccuugauua

SEQ ID NO: 156651 - RNA, 19 nt, Artificial Sequence
  Description of Artificial Sequence: Synthetic oligonucleotide
acacggaacaguccuccaa

SEQ ID NO: 156652 - RNA, 19 nt, Artificial Sequence
  Description of Artificial Sequence: Synthetic oligonucleotide
uccuuguggggugaucgga

SEQ ID NO: 156653 - RNA, 19 nt, Artificial Sequence
  Description of Artificial Sequence: Synthetic oligonucleotide
ccucuaaaucccaaucgug

SEQ ID NO: 156654 - RNA, 19 nt, Artificial Sequence
  Description of Artificial Sequence: Synthetic oligonucleotide
gaaagucgacauagacagc

SEQ ID NO: 156655 - RNA, 19 nt, Artificial Sequence
  Description of Artificial Sequence: Synthetic oligonucleotide
accugacguuuccauggag

SEQ ID NO: 156656 - RNA, 19 nt, Artificial Sequence
  Description of Artificial Sequence: Synthetic oligonucleotide
ggaccaguucauguguggg

SEQ ID NO: 156657 - RNA, 19 nt, Artificial Sequence
  Description of Artificial Sequence: Synthetic oligonucleotide
gcauuucacccuuaagauc

SEQ ID NO: 156658 - RNA, 19 nt, Artificial Sequence
  Description of Artificial Sequence: Synthetic oligonucleotide
auacuucaguccagaaucu

SEQ ID NO: 156659 - RNA, 19 nt, Artificial Sequence
  Description of Artificial Sequence: Synthetic oligonucleotide
uccgaaauucaggcauuac

SEQ ID NO: 156660 - RNA, 19 nt, Artificial Sequence
  Description of Artificial Sequence: Synthetic oligonucleotide
ggguuugucagaucuucca

SEQ ID NO: 156661 - RNA, 19 nt, Artificial Sequence
  Description of Artificial Sequence: Synthetic oligonucleotide
gggucucgagacuugagga

SEQ ID NO: 156662 - RNA, 19 nt, Artificial Sequence
  Description of Artificial Sequence: Synthetic oligonucleotide
uucggucacacuugacauu

SEQ ID NO: 156663 - RNA, 19 nt, Artificial Sequence
  Description of Artificial Sequence: Synthetic oligonucleotide
ucugaguauccggguccgg

SEQ ID NO: 156664 - RNA, 19 nt, Artificial Sequence
  Description of Artificial Sequence: Synthetic oligonucleotide
uugauguguuguccgcauu

SEQ ID NO: 156665 - RNA, 19 nt, Artificial Sequence
  Description of Artificial Sequence: Synthetic oligonucleotide
  modified_base (17)..(17): a, c, u, g, unknown or other
gucgacauagacagcancu

SEQ ID NO: 156666 - RNA, 19 nt, Artificial Sequence
  Description of Artificial Sequence: Synthetic oligonucleotide
ccgaaauucaggcauuaca

SEQ ID NO: 156667 - RNA, 19 nt, Artificial Sequence
  Description of Artificial Sequence: Synthetic oligonucleotide
uucugacccuggauccgga

SEQ ID NO: 156668 - RNA, 19 nt, Artificial Sequence
  Description of Artificial Sequence: Synthetic oligonucleotide
cccggguauacuucagucc

SEQ ID NO: 156669 - RNA, 19 nt, Artificial Sequence
  Description of Artificial Sequence: Synthetic oligonucleotide
aguaggcuccucguaaaua

SEQ ID NO: 156670 - RNA, 19 nt, Artificial Sequence
  Description of Artificial Sequence: Synthetic oligonucleotide
uccccgucacaaagcaauc

SEQ ID NO: 156671 - RNA, 19 nt, Artificial Sequence
  Description of Artificial Sequence: Synthetic oligonucleotide
gaaaacccucauacucaac

SEQ ID NO: 156672 - RNA, 19 nt, Artificial Sequence
  Description of Artificial Sequence: Synthetic oligonucleotide
aucguacucugcgucaaau

SEQ ID NO: 156673 - RNA, 19 nt, Artificial Sequence
  Description of Artificial Sequence: Synthetic oligonucleotide
gacguacucgaccaguguu

SEQ ID NO: 156674 - RNA, 19 nt, Artificial Sequence
  Description of Artificial Sequence: Synthetic oligonucleotide
  modified_base (19)..(19): a, c, u, g, unknown or other
aagucgacauagacagcan

SEQ ID NO: 156675 - RNA, 19 nt, Artificial Sequence
  Description of Artificial Sequence: Synthetic oligonucleotide
gcgucaaauagcuccuuca

SEQ ID NO: 156676 - RNA, 19 nt, Artificial Sequence
  Description of Artificial Sequence: Synthetic oligonucleotide
guaccauuccagaaaggua

SEQ ID NO: 156677 - RNA, 19 nt, Artificial Sequence
  Description of Artificial Sequence: Synthetic oligonucleotide
gacacggaacaguccucca

SEQ ID NO: 156678 - RNA, 19 nt, Artificial Sequence
  Description of Artificial Sequence: Synthetic oligonucleotide
acaccacugacagacugua

SEQ ID NO: 156679 - RNA, 19 nt, Artificial Sequence
  Description of Artificial Sequence: Synthetic oligonucleotide
gguuauagaaggccgggau

SEQ ID NO: 156680 - RNA, 19 nt, Artificial Sequence
  Description of Artificial Sequence: Synthetic oligonucleotide
cuauugcccaaaccaccca

SEQ ID NO: 156681 - RNA, 19 nt, Artificial Sequence
  Description of Artificial Sequence: Synthetic oligonucleotide
cucuuucggcauccacagc

SEQ ID NO: 156682 - RNA, 19 nt, Artificial Sequence
  Description of Artificial Sequence: Synthetic oligonucleotide
ucgggguuugucagaucuu

SEQ ID NO: 156683 - RNA, 19 nt, Artificial Sequence
  Description of Artificial Sequence: Synthetic oligonucleotide
cucgauucggacauacauu

SEQ ID NO: 156684 - RNA, 19 nt, Artificial Sequence
  Description of Artificial Sequence: Synthetic oligonucleotide
gucggggagaaaacugaca

SEQ ID NO: 156685 - RNA, 19 nt, Artificial Sequence
  Description of Artificial Sequence: Synthetic oligonucleotide
cuuugucggccauuguggu

SEQ ID NO: 156686 - RNA, 19 nt, Artificial Sequence
  Description of Artificial Sequence: Synthetic oligonucleotide
cucucaugagguucacgua

SEQ ID NO: 156687 - RNA, 19 nt, Artificial Sequence
  Description of Artificial Sequence: Synthetic oligonucleotide
ccucaguugauguguuguc

SEQ ID NO: 156688 - RNA, 19 nt, Artificial Sequence
  Description of Artificial Sequence: Synthetic oligonucleotide
guacucgaccaguguucac

SEQ ID NO: 156689 - RNA, 19 nt, Artificial Sequence
  Description of Artificial Sequence: Synthetic oligonucleotide
ggcacccggguauacuuca

SEQ ID NO: 156690 - RNA, 19 nt, Artificial Sequence
  Description of Artificial Sequence: Synthetic oligonucleotide
aucucgauucggacauaca

SEQ ID NO: 156691 - RNA, 19 nt, Artificial Sequence
  Description of Artificial Sequence: Synthetic oligonucleotide
cggacauacauuccagguc

SEQ ID NO: 156692 - RNA, 19 nt, Artificial Sequence
  Description of Artificial Sequence: Synthetic oligonucleotide
acagcgcucuuuugcuguu

SEQ ID NO: 156693 - RNA, 19 nt, Artificial Sequence
  Description of Artificial Sequence: Synthetic oligonucleotide
cucgaccaguguucacguc

SEQ ID NO: 156694 - RNA, 19 nt, Artificial Sequence
  Description of Artificial Sequence: Synthetic oligonucleotide
gggugaucggaccccaaaa

SEQ ID NO: 156695 - RNA, 19 nt, Artificial Sequence
  Description of Artificial Sequence: Synthetic oligonucleotide
ggcaugugaaucugacugu

SEQ ID NO: 156696 - RNA, 19 nt, Artificial Sequence
  Description of Artificial Sequence: Synthetic oligonucleotide
ucuauccggcuggcugaca

SEQ ID NO: 156697 - RNA, 19 nt, Artificial Sequence
  Description of Artificial Sequence: Synthetic oligonucleotide
gguccgguuuucccuugug

SEQ ID NO: 156698 - RNA, 19 nt, Artificial Sequence
  Description of Artificial Sequence: Synthetic oligonucleotide
gacagcuuuccgacguacu

SEQ ID NO: 156699 - RNA, 19 nt, Artificial Sequence
  Description of Artificial Sequence: Synthetic oligonucleotide
guucgaaugacagcaccuu

SEQ ID NO: 156700 - RNA, 19 nt, Artificial Sequence
  Description of Artificial Sequence: Synthetic oligonucleotide
cuuccccgucacaaagcaa

SEQ ID NO: 156701 - RNA, 19 nt, Artificial Sequence
  Description of Artificial Sequence: Synthetic oligonucleotide
  modified_base (4)..(4): a, c, u, g, unknown or other
  modified_base (19)..(19): a, c, u, g, unknown or other
gcancuugucauacagcan

SEQ ID NO: 156702 - RNA, 19 nt, Artificial Sequence
  Description of Artificial Sequence: Synthetic oligonucleotide
gucucgagacuugaggauu

SEQ ID NO: 156703 - RNA, 19 nt, Artificial Sequence
  Description of Artificial Sequence: Synthetic oligonucleotide
cacguaugacagccggucu

SEQ ID NO: 156704 - RNA, 19 nt, Artificial Sequence
  Description of Artificial Sequence: Synthetic oligonucleotide
gcgcaucugcacauauccc

SEQ ID NO: 156705 - RNA, 19 nt, Artificial Sequence
  Description of Artificial Sequence: Synthetic oligonucleotide
caucguacucugcgucaaa

SEQ ID NO: 156706 - RNA, 19 nt, Artificial Sequence
  Description of Artificial Sequence: Synthetic oligonucleotide
ggguguacuuuagaagccu

SEQ ID NO: 156707 - RNA, 19 nt, Artificial Sequence
  Description of Artificial Sequence: Synthetic oligonucleotide
agccuccacaagaaaccua

SEQ ID NO: 156708 - RNA, 19 nt, Artificial Sequence
  Description of Artificial Sequence: Synthetic oligonucleotide
cgauguuucuugaggcgca

SEQ ID NO: 156709 - RNA, 19 nt, Artificial Sequence
  Description of Artificial Sequence: Synthetic oligonucleotide
gcagugaauugaaauguuu

SEQ ID NO: 156710 - RNA, 19 nt, Artificial Sequence
  Description of Artificial Sequence: Synthetic oligonucleotide
cguguuccuuguugugcag

SEQ ID NO: 156711 - RNA, 19 nt, Artificial Sequence
  Description of Artificial Sequence: Synthetic oligonucleotide
uccugucugccaggaugua

SEQ ID NO: 156712 - RNA, 19 nt, Artificial Sequence
  Description of Artificial Sequence: Synthetic oligonucleotide
gcuccucguaaauaaccau

SEQ ID NO: 156713 - RNA, 19 nt, Artificial Sequence
  Description of Artificial Sequence: Synthetic oligonucleotide
cacccggguauacuucagu

SEQ ID NO: 156714 - RNA, 19 nt, Artificial Sequence
  Description of Artificial Sequence: Synthetic oligonucleotide
gaggugcauagaccagcuu

SEQ ID NO: 156715 - RNA, 19 nt, Artificial Sequence
  Description of Artificial Sequence: Synthetic oligonucleotide
ggcuuuaguuugaugccau

SEQ ID NO: 156716 - RNA, 19 nt, Artificial Sequence
  Description of Artificial Sequence: Synthetic oligonucleotide
gcaugugaaucugacuguu

SEQ ID NO: 156717 - RNA, 19 nt, Artificial Sequence
  Description of Artificial Sequence: Synthetic oligonucleotide
cuacgccuggcaugugaau

SEQ ID NO: 156718 - RNA, 19 nt, Artificial Sequence
  Description of Artificial Sequence: Synthetic oligonucleotide
gguguacuuuagaagccuu

SEQ ID NO: 156719 - RNA, 19 nt, Artificial Sequence
  Description of Artificial Sequence: Synthetic oligonucleotide
gcuuggcacccggguauac

SEQ ID NO: 156720 - RNA, 19 nt, Artificial Sequence
  Description of Artificial Sequence: Synthetic oligonucleotide
gcuuuccgacguacucgac

SEQ ID NO: 156721 - RNA, 19 nt, Artificial Sequence
  Description of Artificial Sequence: Synthetic oligonucleotide
caaucucgauucggacaua

SEQ ID NO: 156722 - RNA, 19 nt, Artificial Sequence
  Description of Artificial Sequence: Synthetic oligonucleotide
ccuucuucuucuucuucuu

SEQ ID NO: 156723 - RNA, 19 nt, Artificial Sequence
  Description of Artificial Sequence: Synthetic oligonucleotide
gcccucacuauugcccaaa

SEQ ID NO: 156724 - RNA, 19 nt, Artificial Sequence
  Description of Artificial Sequence: Synthetic oligonucleotide
cggaacaguccuccaagcu

SEQ ID NO: 156725 - RNA, 19 nt, Artificial Sequence
  Description of Artificial Sequence: Synthetic oligonucleotide
cugcgccugucucugcauu

SEQ ID NO: 156726 - RNA, 19 nt, Artificial Sequence
  Description of Artificial Sequence: Synthetic oligonucleotide
ggguccgguuuucccuugu

SEQ ID NO: 156727 - RNA, 19 nt, Artificial Sequence
  Description of Artificial Sequence: Synthetic oligonucleotide
cggcccaaguuaugaaucu

SEQ ID NO: 156728 - RNA, 19 nt, Artificial Sequence
  Description of Artificial Sequence: Synthetic oligonucleotide
cggguccgguuuucccuug

SEQ ID NO: 156729 - RNA, 19 nt, Artificial Sequence
  Description of Artificial Sequence: Synthetic oligonucleotide
ccccgucacaaagcaaucu

SEQ ID NO: 156730 - RNA, 19 nt, Artificial Sequence
  Description of Artificial Sequence: Synthetic oligonucleotide
ccaggucgaaaacccucau

SEQ ID NO: 156731 - RNA, 19 nt, Artificial Sequence
  Description of Artificial Sequence: Synthetic oligonucleotide
agaacguucagauagaagg

SEQ ID NO: 156732 - RNA, 19 nt, Artificial Sequence
  Description of Artificial Sequence: Synthetic oligonucleotide
auagagauaagacaguuuc

SEQ ID NO: 156733 - RNA, 19 nt, Artificial Sequence
  Description of Artificial Sequence: Synthetic oligonucleotide
uuaacggugaacuucauca

SEQ ID NO: 156734 - RNA, 19 nt, Artificial Sequence
  Description of Artificial Sequence: Synthetic oligonucleotide
uauauaaccugcauugagg

SEQ ID NO: 156735 - RNA, 19 nt, Artificial Sequence
  Description of Artificial Sequence: Synthetic oligonucleotide
auaaccugcauugagggcc

SEQ ID NO: 156736 - RNA, 19 nt, Artificial Sequence
  Description of Artificial Sequence: Synthetic oligonucleotide
aagcgaauguacuuggagg

SEQ ID NO: 156737 - RNA, 19 nt, Artificial Sequence
  Description of Artificial Sequence: Synthetic oligonucleotide
uguuugugcagucaaacug

SEQ ID NO: 156738 - RNA, 19 nt, Artificial Sequence
  Description of Artificial Sequence: Synthetic oligonucleotide
auauaaccugcauugaggg

SEQ ID NO: 156739 - RNA, 19 nt, Artificial Sequence
  Description of Artificial Sequence: Synthetic oligonucleotide
auugauucgugauuguuuc

SEQ ID NO: 156740 - RNA, 19 nt, Artificial Sequence
  Description of Artificial Sequence: Synthetic oligonucleotide
accaacguguaacaggucc

SEQ ID NO: 156741 - RNA, 19 nt, Artificial Sequence
  Description of Artificial Sequence: Synthetic oligonucleotide
aggagagcacuucauaugc

SEQ ID NO: 156742 - RNA, 19 nt, Artificial Sequence
  Description of Artificial Sequence: Synthetic oligonucleotide
aaucgcuuguuucauguag

SEQ ID NO: 156743 - RNA, 19 nt, Artificial Sequence
  Description of Artificial Sequence: Synthetic oligonucleotide
uuuccgaggauauuucugg

SEQ ID NO: 156744 - RNA, 19 nt, Artificial Sequence
  Description of Artificial Sequence: Synthetic oligonucleotide
agauaagacaguuucuuug

SEQ ID NO: 156745 - RNA, 19 nt, Artificial Sequence
  Description of Artificial Sequence: Synthetic oligonucleotide
cauuuaguauauaaccugc

SEQ ID NO: 156746 - RNA, 19 nt, Artificial Sequence
  Description of Artificial Sequence: Synthetic oligonucleotide
uuuauccccauccuaagcu

SEQ ID NO: 156747 - RNA, 19 nt, Artificial Sequence
  Description of Artificial Sequence: Synthetic oligonucleotide
aaaucuacccuagcauucc

SEQ ID NO: 156748 - RNA, 19 nt, Artificial Sequence
  Description of Artificial Sequence: Synthetic oligonucleotide
agcgaauguacuuggaggg

SEQ ID NO: 156749 - RNA, 19 nt, Artificial Sequence
  Description of Artificial Sequence: Synthetic oligonucleotide
ucuaucucucacuucauug

SEQ ID NO: 156750 - RNA, 19 nt, Artificial Sequence
  Description of Artificial Sequence: Synthetic oligonucleotide
caugaaggaagaaaucugc

SEQ ID NO: 156751 - RNA, 19 nt, Artificial Sequence
  Description of Artificial Sequence: Synthetic oligonucleotide
gauacgagggcagagcugg

SEQ ID NO: 156752 - RNA, 19 nt, Artificial Sequence
  Description of Artificial Sequence: Synthetic oligonucleotide
aauaccaagaugcuaggua

SEQ ID NO: 156753 - RNA, 19 nt, Artificial Sequence
  Description of Artificial Sequence: Synthetic oligonucleotide
ugguacuguaccaugaugu

SEQ ID NO: 156754 - RNA, 19 nt, Artificial Sequence
  Description of Artificial Sequence: Synthetic oligonucleotide
gacccauccaucuauaaac

SEQ ID NO: 156755 - RNA, 19 nt, Artificial Sequence
  Description of Artificial Sequence: Synthetic oligonucleotide
uucaacguaguguugaaaa

SEQ ID NO: 156756 - RNA, 19 nt, Artificial Sequence
  Description of Artificial Sequence: Synthetic oligonucleotide
ucuacccuagcauuccugg

SEQ ID NO: 156757 - RNA, 19 nt, Artificial Sequence
  Description of Artificial Sequence: Synthetic oligonucleotide
aaaguucacuuucaugacu

SEQ ID NO: 156758 - RNA, 19 nt, Artificial Sequence
  Description of Artificial Sequence: Synthetic oligonucleotide
ucgaugaagucgaacagug

SEQ ID NO: 156759 - RNA, 19 nt, Artificial Sequence
  Description of Artificial Sequence: Synthetic oligonucleotide
caucggaugacauacucag

SEQ ID NO: 156760 - RNA, 19 nt, Artificial Sequence
  Description of Artificial Sequence: Synthetic oligonucleotide
gauguuaucacuggacgcc

SEQ ID NO: 156761 - RNA, 19 nt, Artificial Sequence
  Description of Artificial Sequence: Synthetic oligonucleotide
aacaaaugcaggauccggg

SEQ ID NO: 156762 - RNA, 19 nt, Artificial Sequence
  Description of Artificial Sequence: Synthetic oligonucleotide
ggauauuucuggcacaggg

SEQ ID NO: 156763 - RNA, 19 nt, Artificial Sequence
  Description of Artificial Sequence: Synthetic oligonucleotide
auucauuugugauggcuuc

SEQ ID NO: 156764 - RNA, 19 nt, Artificial Sequence
  Description of Artificial Sequence: Synthetic oligonucleotide
uuuaguauauaaccugcau

SEQ ID NO: 156765 - RNA, 19 nt, Artificial Sequence
  Description of Artificial Sequence: Synthetic oligonucleotide
gaagcgaauguacuuggag

SEQ ID NO: 156766 - RNA, 19 nt, Artificial Sequence
  Description of Artificial Sequence: Synthetic oligonucleotide
agagccaccaacguguaac

SEQ ID NO: 156767 - RNA, 19 nt, Artificial Sequence
  Description of Artificial Sequence: Synthetic oligonucleotide
ucugaauacagaggugugg

SEQ ID NO: 156768 - RNA, 19 nt, Artificial Sequence
  Description of Artificial Sequence: Synthetic oligonucleotide
aagauacgagggcagagcu

SEQ ID NO: 156769 - RNA, 19 nt, Artificial Sequence
  Description of Artificial Sequence: Synthetic oligonucleotide
agcucuaucucucacuuca

SEQ ID NO: 156770 - RNA, 19 nt, Artificial Sequence
  Description of Artificial Sequence: Synthetic oligonucleotide
augcugacuuauuauagag

SEQ ID NO: 156771 - RNA, 19 nt, Artificial Sequence
  Description of Artificial Sequence: Synthetic oligonucleotide
acaccuuuucagcaauacc

SEQ ID NO: 156772 - RNA, 19 nt, Artificial Sequence
  Description of Artificial Sequence: Synthetic oligonucleotide
gaugucuacuggcaguucc

SEQ ID NO: 156773 - RNA, 19 nt, Artificial Sequence
  Description of Artificial Sequence: Synthetic oligonucleotide
uacgguucgagucugugac

SEQ ID NO: 156774 - RNA, 19 nt, Artificial Sequence
  Description of Artificial Sequence: Synthetic oligonucleotide
acaaaaucuacccuagcau

SEQ ID NO: 156775 - RNA, 19 nt, Artificial Sequence
  Description of Artificial Sequence: Synthetic oligonucleotide
ugauguuaucacuggacgc

SEQ ID NO: 156776 - RNA, 19 nt, Artificial Sequence
  Description of Artificial Sequence: Synthetic oligonucleotide
uugcuugcuagccacucgg

SEQ ID NO: 156777 - RNA, 19 nt, Artificial Sequence
  Description of Artificial Sequence: Synthetic oligonucleotide
uccuuaacggugaacuuca

SEQ ID NO: 156778 - RNA, 19 nt, Artificial Sequence
  Description of Artificial Sequence: Synthetic oligonucleotide
gucaaacugaaacaccaag

SEQ ID NO: 156779 - RNA, 19 nt, Artificial Sequence
  Description of Artificial Sequence: Synthetic oligonucleotide
aaucuguauugauucguga

SEQ ID NO: 156780 - RNA, 19 nt, Artificial Sequence
  Description of Artificial Sequence: Synthetic oligonucleotide
aagaugcuagguaacaucu

SEQ ID NO: 156781 - RNA, 19 nt, Artificial Sequence
  Description of Artificial Sequence: Synthetic oligonucleotide
uguuugacuguugcggugg

SEQ ID NO: 156782 - RNA, 19 nt, Artificial Sequence
  Description of Artificial Sequence: Synthetic oligonucleotide
auagccuucuucaucaauc

SEQ ID NO: 156783 - RNA, 19 nt, Artificial Sequence
  Description of Artificial Sequence: Synthetic oligonucleotide
cauaaggcggucaaugcug

SEQ ID NO: 156784 - RNA, 19 nt, Artificial Sequence
  Description of Artificial Sequence: Synthetic oligonucleotide
uauugauucgugauuguuu

SEQ ID NO: 156785 - RNA, 19 nt, Artificial Sequence
  Description of Artificial Sequence: Synthetic oligonucleotide
ugauaggauggaauuaaaa

SEQ ID NO: 156786 - RNA, 19 nt, Artificial Sequence
  Description of Artificial Sequence: Synthetic oligonucleotide
ucauaaggcggucaaugcu

SEQ ID NO: 156787 - RNA, 19 nt, Artificial Sequence
  Description of Artificial Sequence: Synthetic oligonucleotide
augaagcgaauguacuugg

SEQ ID NO: 156788 - RNA, 19 nt, Artificial Sequence
  Description of Artificial Sequence: Synthetic oligonucleotide
uucauaaggcggucaaugc

SEQ ID NO: 156789 - RNA, 19 nt, Artificial Sequence
  Description of Artificial Sequence: Synthetic oligonucleotide
aauguggcgaugcuacggu

SEQ ID NO: 156790 - RNA, 19 nt, Artificial Sequence
  Description of Artificial Sequence: Synthetic oligonucleotide
uguacucaaagccacccuc

SEQ ID NO: 156791 - RNA, 19 nt, Artificial Sequence
  Description of Artificial Sequence: Synthetic oligonucleotide
uacggcauguuuccgagga

SEQ ID NO: 156792 - RNA, 19 nt, Artificial Sequence
  Description of Artificial Sequence: Synthetic oligonucleotide
cugaauacagagguguggg

SEQ ID NO: 156793 - RNA, 19 nt, Artificial Sequence
  Description of Artificial Sequence: Synthetic oligonucleotide
auaccaagaugcuagguaa

SEQ ID NO: 156794 - RNA, 19 nt, Artificial Sequence
  Description of Artificial Sequence: Synthetic oligonucleotide
uugacuguugcgguggcgg

SEQ ID NO: 156795 - RNA, 19 nt, Artificial Sequence
  Description of Artificial Sequence: Synthetic oligonucleotide
acaaucgcuuguuucaugu

SEQ ID NO: 156796 - RNA, 19 nt, Artificial Sequence
  Description of Artificial Sequence: Synthetic oligonucleotide
gaagaucuccugucgagug

SEQ ID NO: 156797 - RNA, 19 nt, Artificial Sequence
  Description of Artificial Sequence: Synthetic oligonucleotide
ucgcuugaccacaucaaag

SEQ ID NO: 156798 - RNA, 19 nt, Artificial Sequence
  Description of Artificial Sequence: Synthetic oligonucleotide
aaagcagaagucgggcgcg

SEQ ID NO: 156799 - RNA, 19 nt, Artificial Sequence
  Description of Artificial Sequence: Synthetic oligonucleotide
agaagguagcucuaucucu

SEQ ID NO: 156800 - RNA, 19 nt, Artificial Sequence
  Description of Artificial Sequence: Synthetic oligonucleotide
aaaucuguauugauucgug

SEQ ID NO: 156801 - RNA, 19 nt, Artificial Sequence
  Description of Artificial Sequence: Synthetic oligonucleotide
agcagcauagcgaagagca

SEQ ID NO: 156802 - RNA, 19 nt, Artificial Sequence
  Description of Artificial Sequence: Synthetic oligonucleotide
agaccagggauagacacgg

SEQ ID NO: 156803 - RNA, 19 nt, Artificial Sequence
  Description of Artificial Sequence: Synthetic oligonucleotide
gauauuucuggcacagggc

SEQ ID NO: 156804 - RNA, 19 nt, Artificial Sequence
  Description of Artificial Sequence: Synthetic oligonucleotide
ucuguauugauucgugauu

SEQ ID NO: 156805 - RNA, 19 nt, Artificial Sequence
  Description of Artificial Sequence: Synthetic oligonucleotide
uagaagguagcucuaucuc

SEQ ID NO: 156806 - RNA, 19 nt, Artificial Sequence
  Description of Artificial Sequence: Synthetic oligonucleotide
ugauucgugauuguuucug

SEQ ID NO: 156807 - RNA, 19 nt, Artificial Sequence
  Description of Artificial Sequence: Synthetic oligonucleotide
ugcccgaaccucuucaugc

SEQ ID NO: 156808 - RNA, 19 nt, Artificial Sequence
  Description of Artificial Sequence: Synthetic oligonucleotide
aguacggcauguuuccgag

SEQ ID NO: 156809 - RNA, 19 nt, Artificial Sequence
  Description of Artificial Sequence: Synthetic oligonucleotide
uacugaucaucuuacucac

SEQ ID NO: 156810 - RNA, 19 nt, Artificial Sequence
  Description of Artificial Sequence: Synthetic oligonucleotide
cacgguuguagaugaagcg

SEQ ID NO: 156811 - RNA, 19 nt, Artificial Sequence
  Description of Artificial Sequence: Synthetic oligonucleotide
cuuauugaggguucggaca

SEQ ID NO: 156812 - RNA, 19 nt, Artificial Sequence
  Description of Artificial Sequence: Synthetic oligonucleotide
ucgcuuguuucauguagcg

SEQ ID NO: 156813 - RNA, 19 nt, Artificial Sequence
  Description of Artificial Sequence: Synthetic oligonucleotide
ucccuuagcauggugaaca

SEQ ID NO: 156814 - RNA, 19 nt, Artificial Sequence
  Description of Artificial Sequence: Synthetic oligonucleotide
ucgucauccaucacacacc

SEQ ID NO: 156815 - RNA, 19 nt, Artificial Sequence
  Description of Artificial Sequence: Synthetic oligonucleotide
acgguaauuaucuucuuuu

SEQ ID NO: 156816 - RNA, 19 nt, Artificial Sequence
  Description of Artificial Sequence: Synthetic oligonucleotide
uacaugcugacuuauuaua

SEQ ID NO: 156817 - RNA, 19 nt, Artificial Sequence
  Description of Artificial Sequence: Synthetic oligonucleotide
accagggauagacacgguc

SEQ ID NO: 156818 - RNA, 19 nt, Artificial Sequence
  Description of Artificial Sequence: Synthetic oligonucleotide
aggaaguucaugaguacgg

SEQ ID NO: 156819 - RNA, 19 nt, Artificial Sequence
  Description of Artificial Sequence: Synthetic oligonucleotide
cuucauaaggcggucaaug

SEQ ID NO: 156820 - RNA, 19 nt, Artificial Sequence
  Description of Artificial Sequence: Synthetic oligonucleotide
ucuuacucacggccagugg

SEQ ID NO: 156821 - RNA, 19 nt, Artificial Sequence
  Description of Artificial Sequence: Synthetic oligonucleotide
cuguauugauucgugauug

SEQ ID NO: 156822 - RNA, 19 nt, Artificial Sequence
  Description of Artificial Sequence: Synthetic oligonucleotide
uacuucaacguaguguuga

SEQ ID NO: 156823 - RNA, 19 nt, Artificial Sequence
  Description of Artificial Sequence: Synthetic oligonucleotide
aucuguauugauucgugau

SEQ ID NO: 156824 - RNA, 19 nt, Artificial Sequence
  Description of Artificial Sequence: Synthetic oligonucleotide
caucucaugcuuguuacgc

SEQ ID NO: 156825 - RNA, 19 nt, Artificial Sequence
  Description of Artificial Sequence: Synthetic oligonucleotide
uauagagauaagacaguuu

SEQ ID NO: 156826 - RNA, 19 nt, Artificial Sequence
  Description of Artificial Sequence: Synthetic oligonucleotide
gaagauacgagggcagagc

SEQ ID NO: 156827 - RNA, 19 nt, Artificial Sequence
  Description of Artificial Sequence: Synthetic oligonucleotide
acguguaacaggucccagg

SEQ ID NO: 156828 - RNA, 19 nt, Artificial Sequence
  Description of Artificial Sequence: Synthetic oligonucleotide
uagcauuccugggugauag

SEQ ID NO: 156829 - RNA, 19 nt, Artificial Sequence
  Description of Artificial Sequence: Synthetic oligonucleotide
uauaaccugcauugagggc

SEQ ID NO: 156830 - RNA, 19 nt, Artificial Sequence
  Description of Artificial Sequence: Synthetic oligonucleotide
aucgcuuguuucauguagc

SEQ ID NO: 156831 - RNA, 19 nt, Artificial Sequence
  Description of Artificial Sequence: Synthetic oligonucleotide
acacggucagaccauuuag

SEQ ID NO: 156832 - RNA, 19 nt, Artificial Sequence
  Description of Artificial Sequence: Synthetic oligonucleotide
cuuuauccccauccuaagc

SEQ ID NO: 156833 - RNA, 19 nt, Artificial Sequence
  Description of Artificial Sequence: Synthetic oligonucleotide
uucauaugccucagugggc

SEQ ID NO: 156834 - RNA, 19 nt, Artificial Sequence
  Description of Artificial Sequence: Synthetic oligonucleotide
ucaucagaccugcuaggug

SEQ ID NO: 156835 - RNA, 19 nt, Artificial Sequence
  Description of Artificial Sequence: Synthetic oligonucleotide
uguguuuggugcaucggau

SEQ ID NO: 156836 - RNA, 19 nt, Artificial Sequence
  Description of Artificial Sequence: Synthetic oligonucleotide
aagacaucuccuugauggu

SEQ ID NO: 156837 - RNA, 19 nt, Artificial Sequence
  Description of Artificial Sequence: Synthetic oligonucleotide
cuugcuagccacucggauc

SEQ ID NO: 156838 - RNA, 19 nt, Artificial Sequence
  Description of Artificial Sequence: Synthetic oligonucleotide
gauagaagguagcucuauc

SEQ ID NO: 156839 - RNA, 19 nt, Artificial Sequence
  Description of Artificial Sequence: Synthetic oligonucleotide
uuguuacgcaggcagcucu

SEQ ID NO: 156840 - RNA, 19 nt, Artificial Sequence
  Description of Artificial Sequence: Synthetic oligonucleotide
acuauggcgcgcuuguacu

SEQ ID NO: 156841 - RNA, 19 nt, Artificial Sequence
  Description of Artificial Sequence: Synthetic oligonucleotide
gcuaucagugaucuggcag

SEQ ID NO: 156842 - RNA, 19 nt, Artificial Sequence
  Description of Artificial Sequence: Synthetic oligonucleotide
aggaccacgguaauuaucu

SEQ ID NO: 156843 - RNA, 19 nt, Artificial Sequence
  Description of Artificial Sequence: Synthetic oligonucleotide
ggugaggacuugaagaggg

SEQ ID NO: 156844 - RNA, 19 nt, Artificial Sequence
  Description of Artificial Sequence: Synthetic oligonucleotide
acaugcugacuuauuauag

SEQ ID NO: 156845 - RNA, 19 nt, Artificial Sequence
  Description of Artificial Sequence: Synthetic oligonucleotide
ucacaguccuuaacgguga

SEQ ID NO: 156846 - RNA, 19 nt, Artificial Sequence
  Description of Artificial Sequence: Synthetic oligonucleotide
agcuacuucaacguagugu

SEQ ID NO: 156847 - RNA, 19 nt, Artificial Sequence
  Description of Artificial Sequence: Synthetic oligonucleotide
uccacuauggcgcgcuugu

SEQ ID NO: 156848 - RNA, 19 nt, Artificial Sequence
  Description of Artificial Sequence: Synthetic oligonucleotide
cucugacucagugagggcc

SEQ ID NO: 156849 - RNA, 19 nt, Artificial Sequence
  Description of Artificial Sequence: Synthetic oligonucleotide
acuguugcgguggcggugc

SEQ ID NO: 156850 - RNA, 19 nt, Artificial Sequence
  Description of Artificial Sequence: Synthetic oligonucleotide
gaaguucaugaguacggca

SEQ ID NO: 156851 - RNA, 19 nt, Artificial Sequence
  Description of Artificial Sequence: Synthetic oligonucleotide
cagcgugugaguauucuug

SEQ ID NO: 156852 - RNA, 19 nt, Artificial Sequence
  Description of Artificial Sequence: Synthetic oligonucleotide
ucuuuggcgcugcagccug

SEQ ID NO: 156853 - RNA, 19 nt, Artificial Sequence
  Description of Artificial Sequence: Synthetic oligonucleotide
ccauuuaguauauaaccug

SEQ ID NO: 156854 - RNA, 19 nt, Artificial Sequence
  Description of Artificial Sequence: Synthetic oligonucleotide
aaguucacuuucaugacuu

SEQ ID NO: 156855 - RNA, 19 nt, Artificial Sequence
  Description of Artificial Sequence: Synthetic oligonucleotide
auaaggcggucaaugcugc

SEQ ID NO: 156856 - RNA, 19 nt, Artificial Sequence
  Description of Artificial Sequence: Synthetic oligonucleotide
ugaaugugcaugccacagu

SEQ ID NO: 156857 - RNA, 19 nt, Artificial Sequence
  Description of Artificial Sequence: Synthetic oligonucleotide
gucacaguccuuaacggug

SEQ ID NO: 156858 - RNA, 19 nt, Artificial Sequence
  Description of Artificial Sequence: Synthetic oligonucleotide
uguauugauucgugauugu

SEQ ID NO: 156859 - RNA, 19 nt, Artificial Sequence
  Description of Artificial Sequence: Synthetic oligonucleotide
uccgaggauauuucuggca

SEQ ID NO: 156860 - RNA, 19 nt, Artificial Sequence
  Description of Artificial Sequence: Synthetic oligonucleotide
agauugcaggcagucaccg

SEQ ID NO: 156861 - RNA, 19 nt, Artificial Sequence
  Description of Artificial Sequence: Synthetic oligonucleotide
uuguaggaucuuccuuggg

SEQ ID NO: 156862 - RNA, 19 nt, Artificial Sequence
  Description of Artificial Sequence: Synthetic oligonucleotide
aacucgcaguccucaauga

SEQ ID NO: 156863 - RNA, 19 nt, Artificial Sequence
  Description of Artificial Sequence: Synthetic oligonucleotide
aaucuacccuagcauuccu

SEQ ID NO: 156864 - RNA, 19 nt, Artificial Sequence
  Description of Artificial Sequence: Synthetic oligonucleotide
agguacauaggagagcacu

SEQ ID NO: 156865 - RNA, 19 nt, Artificial Sequence
  Description of Artificial Sequence: Synthetic oligonucleotide
uucugaugguuccagugua

SEQ ID NO: 156866 - RNA, 19 nt, Artificial Sequence
  Description of Artificial Sequence: Synthetic oligonucleotide
uggagacccauccaucuau

SEQ ID NO: 156867 - RNA, 19 nt, Artificial Sequence
  Description of Artificial Sequence: Synthetic oligonucleotide
uuuauucauuugugauggc

SEQ ID NO: 156868 - RNA, 19 nt, Artificial Sequence
  Description of Artificial Sequence: Synthetic oligonucleotide
gaagguagcucuaucucuc

SEQ ID NO: 156869 - RNA, 19 nt, Artificial Sequence
  Description of Artificial Sequence: Synthetic oligonucleotide
ucgaacagugggcugucac

SEQ ID NO: 156870 - RNA, 19 nt, Artificial Sequence
  Description of Artificial Sequence: Synthetic oligonucleotide
uaacggugaacuucaucac

SEQ ID NO: 156871 - RNA, 19 nt, Artificial Sequence
  Description of Artificial Sequence: Synthetic oligonucleotide
caauguggcgaugcuacgg

SEQ ID NO: 156872 - RNA, 19 nt, Artificial Sequence
  Description of Artificial Sequence: Synthetic oligonucleotide
ucaugaguacggcauguuu

SEQ ID NO: 156873 - RNA, 19 nt, Artificial Sequence
  Description of Artificial Sequence: Synthetic oligonucleotide
agguagcucuaucucucac

SEQ ID NO: 156874 - RNA, 19 nt, Artificial Sequence
  Description of Artificial Sequence: Synthetic oligonucleotide
gauucgugauuguuucuga

SEQ ID NO: 156875 - RNA, 19 nt, Artificial Sequence
  Description of Artificial Sequence: Synthetic oligonucleotide
uccagaacguucagauaga

SEQ ID NO: 156876 - RNA, 19 nt, Artificial Sequence
  Description of Artificial Sequence: Synthetic oligonucleotide
cagaacguucagauagaag

SEQ ID NO: 156877 - RNA, 19 nt, Artificial Sequence
  Description of Artificial Sequence: Synthetic oligonucleotide
agacaucuccuugaugguc

SEQ ID NO: 156878 - RNA, 19 nt, Artificial Sequence
  Description of Artificial Sequence: Synthetic oligonucleotide
auguuaucacuggacgccg

SEQ ID NO: 156879 - RNA, 19 nt, Artificial Sequence
  Description of Artificial Sequence: Synthetic oligonucleotide
aacucacacaggugugaca

SEQ ID NO: 156880 - RNA, 19 nt, Artificial Sequence
  Description of Artificial Sequence: Synthetic oligonucleotide
guuaucacuggacgccgcc

SEQ ID NO: 156881 - RNA, 19 nt, Artificial Sequence
  Description of Artificial Sequence: Synthetic oligonucleotide
gaugcuacgguucgagucu

SEQ ID NO: 156882 - RNA, 19 nt, Artificial Sequence
  Description of Artificial Sequence: Synthetic oligonucleotide
uguuaucacuggacgccgc

SEQ ID NO: 156883 - RNA, 19 nt, Artificial Sequence
  Description of Artificial Sequence: Synthetic oligonucleotide
ucacccaucgcuugaccac

SEQ ID NO: 156884 - RNA, 19 nt, Artificial Sequence
  Description of Artificial Sequence: Synthetic oligonucleotide
auuuaguauauaaccugca

SEQ ID NO: 156885 - RNA, 19 nt, Artificial Sequence
  Description of Artificial Sequence: Synthetic oligonucleotide
uucgagucugugaccaggu

SEQ ID NO: 156886 - RNA, 19 nt, Artificial Sequence
  Description of Artificial Sequence: Synthetic oligonucleotide
cuuaacggugaacuucauc

SEQ ID NO: 156887 - RNA, 19 nt, Artificial Sequence
  Description of Artificial Sequence: Synthetic oligonucleotide
gccaccaacguguaacagg

SEQ ID NO: 156888 - RNA, 19 nt, Artificial Sequence
  Description of Artificial Sequence: Synthetic oligonucleotide
caugcugacuuauuauaga

SEQ ID NO: 156889 - RNA, 19 nt, Artificial Sequence
  Description of Artificial Sequence: Synthetic oligonucleotide
uaccaagaugcuagguaac

SEQ ID NO: 156890 - RNA, 19 nt, Artificial Sequence
  Description of Artificial Sequence: Synthetic oligonucleotide
cucaggugaggacuugaag

SEQ ID NO: 156891 - RNA, 19 nt, Artificial Sequence
  Description of Artificial Sequence: Synthetic oligonucleotide
acgguucgagucugugacc

SEQ ID NO: 156892 - RNA, 19 nt, Artificial Sequence
  Description of Artificial Sequence: Synthetic oligonucleotide
guucgagucugugaccagg

SEQ ID NO: 156893 - RNA, 19 nt, Artificial Sequence
  Description of Artificial Sequence: Synthetic oligonucleotide
cauggugcuaucagugauc

SEQ ID NO: 156894 - RNA, 19 nt, Artificial Sequence
  Description of Artificial Sequence: Synthetic oligonucleotide
agcgugugaguauucuugu

SEQ ID NO: 156895 - RNA, 19 nt, Artificial Sequence
  Description of Artificial Sequence: Synthetic oligonucleotide
uuccgaggauauuucuggc

SEQ ID NO: 156896 - RNA, 19 nt, Artificial Sequence
  Description of Artificial Sequence: Synthetic oligonucleotide
acguucagauagaagguag

SEQ ID NO: 156897 - RNA, 19 nt, Artificial Sequence
  Description of Artificial Sequence: Synthetic oligonucleotide
guuuccgaggauauuucug

SEQ ID NO: 156898 - RNA, 19 nt, Artificial Sequence
  Description of Artificial Sequence: Synthetic oligonucleotide
agacccauccaucuauaaa

SEQ ID NO: 156899 - RNA, 19 nt, Artificial Sequence
  Description of Artificial Sequence: Synthetic oligonucleotide
gaagucgaacagugggcug

SEQ ID NO: 156900 - RNA, 19 nt, Artificial Sequence
  Description of Artificial Sequence: Synthetic oligonucleotide
cagggauagacacggucag

SEQ ID NO: 156901 - RNA, 19 nt, Artificial Sequence
  Description of Artificial Sequence: Synthetic oligonucleotide
ggucuggucauugagggug

SEQ ID NO: 156902 - RNA, 19 nt, Artificial Sequence
  Description of Artificial Sequence: Synthetic oligonucleotide
cuacccuagcauuccuggg

SEQ ID NO: 156903 - RNA, 19 nt, Artificial Sequence
  Description of Artificial Sequence: Synthetic oligonucleotide
cuagccacucggaucauca

SEQ ID NO: 156904 - RNA, 19 nt, Artificial Sequence
  Description of Artificial Sequence: Synthetic oligonucleotide
auagcgaagagcagccuug

SEQ ID NO: 156905 - RNA, 19 nt, Artificial Sequence
  Description of Artificial Sequence: Synthetic oligonucleotide
agaccugcuagguguuguc

SEQ ID NO: 156906 - RNA, 19 nt, Artificial Sequence
  Description of Artificial Sequence: Synthetic oligonucleotide
aagagcagccuugggugag

SEQ ID NO: 156907 - RNA, 19 nt, Artificial Sequence
  Description of Artificial Sequence: Synthetic oligonucleotide
cacacgguuguagaugaag

SEQ ID NO: 156908 - RNA, 19 nt, Artificial Sequence
  Description of Artificial Sequence: Synthetic oligonucleotide
gacuuauuauagagauaag

SEQ ID NO: 156909 - RNA, 19 nt, Artificial Sequence
  Description of Artificial Sequence: Synthetic oligonucleotide
gucauugaggguguuugug

SEQ ID NO: 156910 - RNA, 19 nt, Artificial Sequence
  Description of Artificial Sequence: Synthetic oligonucleotide
cacuauggcgcgcuuguac

SEQ ID NO: 156911 - RNA, 19 nt, Artificial Sequence
  Description of Artificial Sequence: Synthetic oligonucleotide
uuacucacggccaguggua

SEQ ID NO: 156912 - RNA, 19 nt, Artificial Sequence
  Description of Artificial Sequence: Synthetic oligonucleotide
accagcuagcagcagcgug

SEQ ID NO: 156913 - RNA, 19 nt, Artificial Sequence
  Description of Artificial Sequence: Synthetic oligonucleotide
agucaccgcggacgggugc

SEQ ID NO: 156914 - RNA, 19 nt, Artificial Sequence
  Description of Artificial Sequence: Synthetic oligonucleotide
acccuagcauuccugggug

SEQ ID NO: 156915 - RNA, 19 nt, Artificial Sequence
  Description of Artificial Sequence: Synthetic oligonucleotide
accaccccggaacacacca

SEQ ID NO: 156916 - RNA, 19 nt, Artificial Sequence
  Description of Artificial Sequence: Synthetic oligonucleotide
gggucacaguccuuaacgg

SEQ ID NO: 156917 - RNA, 19 nt, Artificial Sequence
  Description of Artificial Sequence: Synthetic oligonucleotide
ugaguacggcauguuuccg

SEQ ID NO: 156918 - RNA, 19 nt, Artificial Sequence
  Description of Artificial Sequence: Synthetic oligonucleotide
aucgcuugaccacaucaaa

SEQ ID NO: 156919 - RNA, 19 nt, Artificial Sequence
  Description of Artificial Sequence: Synthetic oligonucleotide
acggucagaccauuuagua

SEQ ID NO: 156920 - RNA, 19 nt, Artificial Sequence
  Description of Artificial Sequence: Synthetic oligonucleotide
uugauucgugauuguuucu

SEQ ID NO: 156921 - RNA, 19 nt, Artificial Sequence
  Description of Artificial Sequence: Synthetic oligonucleotide
cuugaagaggggcccuagc

SEQ ID NO: 156922 - RNA, 19 nt, Artificial Sequence
  Description of Artificial Sequence: Synthetic oligonucleotide
gaguacggcauguuuccga

SEQ ID NO: 156923 - RNA, 19 nt, Artificial Sequence
  Description of Artificial Sequence: Synthetic oligonucleotide
aggcaccgcugcuaacugc

SEQ ID NO: 156924 - RNA, 19 nt, Artificial Sequence
  Description of Artificial Sequence: Synthetic oligonucleotide
auggugcuaucagugaucu

SEQ ID NO: 156925 - RNA, 19 nt, Artificial Sequence
  Description of Artificial Sequence: Synthetic oligonucleotide
aacguguaacaggucccag

SEQ ID NO: 156926 - RNA, 19 nt, Artificial Sequence
  Description of Artificial Sequence: Synthetic oligonucleotide
guguguuuggugcaucgga

SEQ ID NO: 156927 - RNA, 19 nt, Artificial Sequence
  Description of Artificial Sequence: Synthetic oligonucleotide
cucaugcuccacuugguga

SEQ ID NO: 156928 - RNA, 19 nt, Artificial Sequence
  Description of Artificial Sequence: Synthetic oligonucleotide
gugauuguuucugaauaca

SEQ ID NO: 156929 - RNA, 19 nt, Artificial Sequence
  Description of Artificial Sequence: Synthetic oligonucleotide
uggcggugcuuucuggucu

SEQ ID NO: 156930 - RNA, 19 nt, Artificial Sequence
  Description of Artificial Sequence: Synthetic oligonucleotide
gguucggacagcagcauag

SEQ ID NO: 156931 - RNA, 19 nt, Artificial Sequence
  Description of Artificial Sequence: Synthetic oligonucleotide
caucagaccugcuaggugu

SEQ ID NO: 156932 - RNA, 19 nt, Artificial Sequence
  Description of Artificial Sequence: Synthetic oligonucleotide
gcugacuuauuauagagau

SEQ ID NO: 156933 - RNA, 19 nt, Artificial Sequence
  Description of Artificial Sequence: Synthetic oligonucleotide
ggagcacugacacggcggg

SEQ ID NO: 156934 - RNA, 19 nt, Artificial Sequence
  Description of Artificial Sequence: Synthetic oligonucleotide
gagcacucacugcaccugc

SEQ ID NO: 156935 - RNA, 19 nt, Artificial Sequence
  Description of Artificial Sequence: Synthetic oligonucleotide
cauccuaagcuuggaacug

SEQ ID NO: 156936 - RNA, 19 nt, Artificial Sequence
  Description of Artificial Sequence: Synthetic oligonucleotide
ugcuagguguugucauuca

SEQ ID NO: 156937 - RNA, 19 nt, Artificial Sequence
  Description of Artificial Sequence: Synthetic oligonucleotide
cuguuugacuguugcggug

SEQ ID NO: 156938 - RNA, 19 nt, Artificial Sequence
  Description of Artificial Sequence: Synthetic oligonucleotide
aucuuacucacggccagug

SEQ ID NO: 156939 - RNA, 19 nt, Artificial Sequence
  Description of Artificial Sequence: Synthetic oligonucleotide
uguuacgcaggcagcucuc

SEQ ID NO: 156940 - RNA, 19 nt, Artificial Sequence
  Description of Artificial Sequence: Synthetic oligonucleotide
auaccucaugcuccacuug

SEQ ID NO: 156941 - RNA, 19 nt, Artificial Sequence
  Description of Artificial Sequence: Synthetic oligonucleotide
uuacgcaggcagcucucga

SEQ ID NO: 156942 - RNA, 19 nt, Artificial Sequence
  Description of Artificial Sequence: Synthetic oligonucleotide
agaugcuagguaacaucuc

SEQ ID NO: 156943 - RNA, 19 nt, Artificial Sequence
  Description of Artificial Sequence: Synthetic oligonucleotide
gaagcaguuguaagaaaua

SEQ ID NO: 156944 - RNA, 19 nt, Artificial Sequence
  Description of Artificial Sequence: Synthetic oligonucleotide
uggaacugacagccccaag

SEQ ID NO: 156945 - RNA, 19 nt, Artificial Sequence
  Description of Artificial Sequence: Synthetic oligonucleotide
cucucacaaggaugcauuc

SEQ ID NO: 156946 - RNA, 19 nt, Artificial Sequence
  Description of Artificial Sequence: Synthetic oligonucleotide
caccccggaacacaccagc

SEQ ID NO: 156947 - RNA, 19 nt, Artificial Sequence
  Description of Artificial Sequence: Synthetic oligonucleotide
acuucaacguaguguugaa

SEQ ID NO: 156948 - RNA, 19 nt, Artificial Sequence
  Description of Artificial Sequence: Synthetic oligonucleotide
gacgggugaacuuacugau

SEQ ID NO: 156949 - RNA, 19 nt, Artificial Sequence
  Description of Artificial Sequence: Synthetic oligonucleotide
guuacgcaggcagcucucg

SEQ ID NO: 156950 - RNA, 19 nt, Artificial Sequence
  Description of Artificial Sequence: Synthetic oligonucleotide
gaggguucggacagcagca

SEQ ID NO: 156951 - RNA, 19 nt, Artificial Sequence
  Description of Artificial Sequence: Synthetic oligonucleotide
cucguucacccaucgcuug

SEQ ID NO: 156952 - RNA, 19 nt, Artificial Sequence
  Description of Artificial Sequence: Synthetic oligonucleotide
cacaaucgcuuguuucaug

SEQ ID NO: 156953 - RNA, 19 nt, Artificial Sequence
  Description of Artificial Sequence: Synthetic oligonucleotide
uuaucacuggacgccgccu

SEQ ID NO: 156954 - RNA, 19 nt, Artificial Sequence
  Description of Artificial Sequence: Synthetic oligonucleotide
guacauaggagagcacuuc

SEQ ID NO: 156955 - RNA, 19 nt, Artificial Sequence
  Description of Artificial Sequence: Synthetic oligonucleotide
cuuacucacggccaguggu

SEQ ID NO: 156956 - RNA, 19 nt, Artificial Sequence
  Description of Artificial Sequence: Synthetic oligonucleotide
ccaacguguaacagguccc

SEQ ID NO: 156957 - RNA, 19 nt, Artificial Sequence
  Description of Artificial Sequence: Synthetic oligonucleotide
gcggacgggugcuucaugg

SEQ ID NO: 156958 - RNA, 19 nt, Artificial Sequence
  Description of Artificial Sequence: Synthetic oligonucleotide
ccagauccagauugcaggc

SEQ ID NO: 156959 - RNA, 19 nt, Artificial Sequence
  Description of Artificial Sequence: Synthetic oligonucleotide
agcacucacugcaccugcc

SEQ ID NO: 156960 - RNA, 19 nt, Artificial Sequence
  Description of Artificial Sequence: Synthetic oligonucleotide
ggaaguucaugaguacggc

SEQ ID NO: 156961 - RNA, 19 nt, Artificial Sequence
  Description of Artificial Sequence: Synthetic oligonucleotide
caggaccacgguaauuauc

SEQ ID NO: 156962 - RNA, 19 nt, Artificial Sequence
  Description of Artificial Sequence: Synthetic oligonucleotide
gaacguucagauagaaggu

SEQ ID NO: 156963 - RNA, 19 nt, Artificial Sequence
  Description of Artificial Sequence: Synthetic oligonucleotide
ccgaggauauuucuggcac

SEQ ID NO: 156964 - RNA, 19 nt, Artificial Sequence
  Description of Artificial Sequence: Synthetic oligonucleotide
acucgcaguccucaaugaa

SEQ ID NO: 156965 - RNA, 19 nt, Artificial Sequence
  Description of Artificial Sequence: Synthetic oligonucleotide
uuggugcaucggaugacau

SEQ ID NO: 156966 - RNA, 19 nt, Artificial Sequence
  Description of Artificial Sequence: Synthetic oligonucleotide
guacggcauguuuccgagg

SEQ ID NO: 156967 - RNA, 19 nt, Artificial Sequence
  Description of Artificial Sequence: Synthetic oligonucleotide
gcuagguaacaucucuuca

SEQ ID NO: 156968 - RNA, 19 nt, Artificial Sequence
  Description of Artificial Sequence: Synthetic oligonucleotide
cuggcaguuccucugagcu

SEQ ID NO: 156969 - RNA, 19 nt, Artificial Sequence
  Description of Artificial Sequence: Synthetic oligonucleotide
gagccaccaacguguaaca

SEQ ID NO: 156970 - RNA, 19 nt, Artificial Sequence
  Description of Artificial Sequence: Synthetic oligonucleotide
cuauggcgcgcuuguacuc

SEQ ID NO: 156971 - RNA, 19 nt, Artificial Sequence
  Description of Artificial Sequence: Synthetic oligonucleotide
acggccagugguacuguac

SEQ ID NO: 156972 - RNA, 19 nt, Artificial Sequence
  Description of Artificial Sequence: Synthetic oligonucleotide
gagauaagacaguuucuuu

SEQ ID NO: 156973 - RNA, 19 nt, Artificial Sequence
  Description of Artificial Sequence: Synthetic oligonucleotide
ugcuuaggccagcccucag

SEQ ID NO: 156974 - RNA, 19 nt, Artificial Sequence
  Description of Artificial Sequence: Synthetic oligonucleotide
uggugcaucggaugacaua

SEQ ID NO: 156975 - RNA, 19 nt, Artificial Sequence
  Description of Artificial Sequence: Synthetic oligonucleotide
ccgaaccucuucaugcucc

SEQ ID NO: 156976 - RNA, 19 nt, Artificial Sequence
  Description of Artificial Sequence: Synthetic oligonucleotide
caucgcuugaccacaucaa

SEQ ID NO: 156977 - RNA, 19 nt, Artificial Sequence
  Description of Artificial Sequence: Synthetic oligonucleotide
cugcuagguguugucauuc

SEQ ID NO: 156978 - RNA, 19 nt, Artificial Sequence
  Description of Artificial Sequence: Synthetic oligonucleotide
agcuuggaacugacagccc

SEQ ID NO: 156979 - RNA, 19 nt, Artificial Sequence
  Description of Artificial Sequence: Synthetic oligonucleotide
gagacccauccaucuauaa

SEQ ID NO: 156980 - RNA, 19 nt, Artificial Sequence
  Description of Artificial Sequence: Synthetic oligonucleotide
agccuuuauccccauccua

SEQ ID NO: 156981 - RNA, 19 nt, Artificial Sequence
  Description of Artificial Sequence: Synthetic oligonucleotide
uacucacggccagugguac

SEQ ID NO: 156982 - RNA, 19 nt, Artificial Sequence
  Description of Artificial Sequence: Synthetic oligonucleotide
auccuaagcuuggaacuga

SEQ ID NO: 156983 - RNA, 19 nt, Artificial Sequence
  Description of Artificial Sequence: Synthetic oligonucleotide
ggcgcgcuuguacucaaag

SEQ ID NO: 156984 - RNA, 19 nt, Artificial Sequence
  Description of Artificial Sequence: Synthetic oligonucleotide
agucgaacagugggcuguc

SEQ ID NO: 156985 - RNA, 19 nt, Artificial Sequence
  Description of Artificial Sequence: Synthetic oligonucleotide
caccuuauugaggguucgg

SEQ ID NO: 156986 - RNA, 19 nt, Artificial Sequence
  Description of Artificial Sequence: Synthetic oligonucleotide
cuuguuacgcaggcagcuc

SEQ ID NO: 156987 - RNA, 19 nt, Artificial Sequence
  Description of Artificial Sequence: Synthetic oligonucleotide
gguguguuuggugcaucgg

SEQ ID NO: 156988 - RNA, 19 nt, Artificial Sequence
  Description of Artificial Sequence: Synthetic oligonucleotide
acgggugaacuuacugauc

SEQ ID NO: 156989 - RNA, 19 nt, Artificial Sequence
  Description of Artificial Sequence: Synthetic oligonucleotide
agcagcgugugaguauucu

SEQ ID NO: 156990 - RNA, 19 nt, Artificial Sequence
  Description of Artificial Sequence: Synthetic oligonucleotide
agauacgagggcagagcug

SEQ ID NO: 156991 - RNA, 19 nt, Artificial Sequence
  Description of Artificial Sequence: Synthetic oligonucleotide
auccggguagccagcacag

SEQ ID NO: 156992 - RNA, 19 nt, Artificial Sequence
  Description of Artificial Sequence: Synthetic oligonucleotide
guguuugugcagucaaacu

SEQ ID NO: 156993 - RNA, 19 nt, Artificial Sequence
  Description of Artificial Sequence: Synthetic oligonucleotide
uuggaacugacagccccaa

SEQ ID NO: 156994 - RNA, 19 nt, Artificial Sequence
  Description of Artificial Sequence: Synthetic oligonucleotide
auagacacggucagaccau

SEQ ID NO: 156995 - RNA, 19 nt, Artificial Sequence
  Description of Artificial Sequence: Synthetic oligonucleotide
guucggacagcagcauagc

SEQ ID NO: 156996 - RNA, 19 nt, Artificial Sequence
  Description of Artificial Sequence: Synthetic oligonucleotide
aucuacccuagcauuccug

SEQ ID NO: 156997 - RNA, 19 nt, Artificial Sequence
  Description of Artificial Sequence: Synthetic oligonucleotide
guagggcaagcuccgggca

SEQ ID NO: 156998 - RNA, 19 nt, Artificial Sequence
  Description of Artificial Sequence: Synthetic oligonucleotide
cugacuuauuauagagaua

SEQ ID NO: 156999 - RNA, 19 nt, Artificial Sequence
  Description of Artificial Sequence: Synthetic oligonucleotide
uggacgccgccuccugggc

SEQ ID NO: 157000 - RNA, 19 nt, Artificial Sequence
  Description of Artificial Sequence: Synthetic oligonucleotide
uucaugaguacggcauguu

SEQ ID NO: 157001 - RNA, 19 nt, Artificial Sequence
  Description of Artificial Sequence: Synthetic oligonucleotide
gcgaauguacuuggagggg

SEQ ID NO: 157002 - RNA, 19 nt, Artificial Sequence
  Description of Artificial Sequence: Synthetic oligonucleotide
guacuguaccaugauguua

SEQ ID NO: 157003 - RNA, 19 nt, Artificial Sequence
  Description of Artificial Sequence: Synthetic oligonucleotide
cugcccgaaccucuucaug

SEQ ID NO: 157004 - RNA, 19 nt, Artificial Sequence
  Description of Artificial Sequence: Synthetic oligonucleotide
ggcgaugcuacgguucgag

SEQ ID NO: 157005 - RNA, 19 nt, Artificial Sequence
  Description of Artificial Sequence: Synthetic oligonucleotide
agccaccaacguguaacag

SEQ ID NO: 157006 - RNA, 19 nt, Artificial Sequence
  Description of Artificial Sequence: Synthetic oligonucleotide
aggccaugacgggugaacu

SEQ ID NO: 157007 - RNA, 19 nt, Artificial Sequence
  Description of Artificial Sequence: Synthetic oligonucleotide
cgaugcuacgguucgaguc

SEQ ID NO: 157008 - RNA, 19 nt, Artificial Sequence
  Description of Artificial Sequence: Synthetic oligonucleotide
guggcggugcuuucugguc

SEQ ID NO: 157009 - RNA, 19 nt, Artificial Sequence
  Description of Artificial Sequence: Synthetic oligonucleotide
ucgagucugugaccagguu

SEQ ID NO: 157010 - RNA, 19 nt, Artificial Sequence
  Description of Artificial Sequence: Synthetic oligonucleotide
cagguacauaggagagcac

SEQ ID NO: 157011 - RNA, 19 nt, Artificial Sequence
  Description of Artificial Sequence: Synthetic oligonucleotide
uggugcuaucagugaucug

SEQ ID NO: 157012 - RNA, 19 nt, Artificial Sequence
  Description of Artificial Sequence: Synthetic oligonucleotide
aggcagcucucgaugaagu

SEQ ID NO: 157013 - RNA, 19 nt, Artificial Sequence
  Description of Artificial Sequence: Synthetic oligonucleotide
gaagucgggcgcgcacaag

SEQ ID NO: 157014 - RNA, 19 nt, Artificial Sequence
  Description of Artificial Sequence: Synthetic oligonucleotide
ugucgaguggcggccacuu

SEQ ID NO: 157015 - RNA, 19 nt, Artificial Sequence
  Description of Artificial Sequence: Synthetic oligonucleotide
ggggauaccucaugcucca

SEQ ID NO: 157016 - RNA, 19 nt, Artificial Sequence
  Description of Artificial Sequence: Synthetic oligonucleotide
cugggugauaggauggaau

SEQ ID NO: 157017 - RNA, 19 nt, Artificial Sequence
  Description of Artificial Sequence: Synthetic oligonucleotide
ggggacuucaggccaugac

SEQ ID NO: 157018 - RNA, 19 nt, Artificial Sequence
  Description of Artificial Sequence: Synthetic oligonucleotide
cgcuuguacucaaagccac

SEQ ID NO: 157019 - RNA, 19 nt, Artificial Sequence
  Description of Artificial Sequence: Synthetic oligonucleotide
gcgcgcuuguacucaaagc

SEQ ID NO: 157020 - RNA, 19 nt, Artificial Sequence
  Description of Artificial Sequence: Synthetic oligonucleotide
gugugacagucccgucucc

SEQ ID NO: 157021 - RNA, 19 nt, Artificial Sequence
  Description of Artificial Sequence: Synthetic oligonucleotide
cacggucagaccauuuagu

SEQ ID NO: 157022 - RNA, 19 nt, Artificial Sequence
  Description of Artificial Sequence: Synthetic oligonucleotide
gccucguucacccaucgcu

SEQ ID NO: 157023 - RNA, 19 nt, Artificial Sequence
  Description of Artificial Sequence: Synthetic oligonucleotide
auccaucuauaaacaccug

SEQ ID NO: 157024 - RNA, 19 nt, Artificial Sequence
  Description of Artificial Sequence: Synthetic oligonucleotide
gcgcacaaggaugucauga

SEQ ID NO: 157025 - RNA, 19 nt, Artificial Sequence
  Description of Artificial Sequence: Synthetic oligonucleotide
augcuacgguucgagucug

SEQ ID NO: 157026 - RNA, 19 nt, Artificial Sequence
  Description of Artificial Sequence: Synthetic oligonucleotide
guacucaaagccacccucu

SEQ ID NO: 157027 - RNA, 19 nt, Artificial Sequence
  Description of Artificial Sequence: Synthetic oligonucleotide
cucgaugaagucgaacagu

SEQ ID NO: 157028 - RNA, 19 nt, Artificial Sequence
  Description of Artificial Sequence: Synthetic oligonucleotide
gguucgagucugugaccag

SEQ ID NO: 157029 - RNA, 19 nt, Artificial Sequence
  Description of Artificial Sequence: Synthetic oligonucleotide
gagggcucgcacagcagga

SEQ ID NO: 157030 - RNA, 19 nt, Artificial Sequence
  Description of Artificial Sequence: Synthetic oligonucleotide
guauugauucgugauuguu

SEQ ID NO: 157031 - RNA, 19 nt, Artificial Sequence
  Description of Artificial Sequence: Synthetic oligonucleotide
ggucacaguccuuaacggu

SEQ ID NO: 157032 - RNA, 19 nt, Artificial Sequence
  Description of Artificial Sequence: Synthetic oligonucleotide
cuucaacguaguguugaaa

SEQ ID NO: 157033 - RNA, 19 nt, Artificial Sequence
  Description of Artificial Sequence: Synthetic oligonucleotide
auguggcgaugcuacgguu

SEQ ID NO: 157034 - RNA, 19 nt, Artificial Sequence
  Description of Artificial Sequence: Synthetic oligonucleotide
accgcggacgggugcuuca

SEQ ID NO: 157035 - RNA, 19 nt, Artificial Sequence
  Description of Artificial Sequence: Synthetic oligonucleotide
ccgggcagguacauaggag

SEQ ID NO: 157036 - RNA, 19 nt, Artificial Sequence
  Description of Artificial Sequence: Synthetic oligonucleotide
uagacacggucagaccauu

SEQ ID NO: 157037 - RNA, 19 nt, Artificial Sequence
  Description of Artificial Sequence: Synthetic oligonucleotide
accucaugcuccacuuggu

SEQ ID NO: 157038 - RNA, 19 nt, Artificial Sequence
  Description of Artificial Sequence: Synthetic oligonucleotide
gggccucguucacccaucg

SEQ ID NO: 157039 - RNA, 19 nt, Artificial Sequence
  Description of Artificial Sequence: Synthetic oligonucleotide
acggcauguuuccgaggau

SEQ ID NO: 157040 - RNA, 19 nt, Artificial Sequence
  Description of Artificial Sequence: Synthetic oligonucleotide
ggugcuuucuggucucugu

SEQ ID NO: 157041 - RNA, 19 nt, Artificial Sequence
  Description of Artificial Sequence: Synthetic oligonucleotide
gcuacgguucgagucugug

SEQ ID NO: 157042 - RNA, 19 nt, Artificial Sequence
  Description of Artificial Sequence: Synthetic oligonucleotide
caaucgcuuguuucaugua

SEQ ID NO: 157043 - RNA, 19 nt, Artificial Sequence
  Description of Artificial Sequence: Synthetic oligonucleotide
cagaagucgggcgcgcaca

SEQ ID NO: 157044 - RNA, 19 nt, Artificial Sequence
  Description of Artificial Sequence: Synthetic oligonucleotide
cacgguaauuaucuucuuu

SEQ ID NO: 157045 - RNA, 19 nt, Artificial Sequence
  Description of Artificial Sequence: Synthetic oligonucleotide
uggguaccuuguccacaau

SEQ ID NO: 157046 - RNA, 19 nt, Artificial Sequence
  Description of Artificial Sequence: Synthetic oligonucleotide
agucgggcgcgcacaagga

SEQ ID NO: 157047 - RNA, 19 nt, Artificial Sequence
  Description of Artificial Sequence: Synthetic oligonucleotide
uccugucgaguggcggcca

SEQ ID NO: 157048 - RNA, 19 nt, Artificial Sequence
  Description of Artificial Sequence: Synthetic oligonucleotide
gcgcuuguacucaaagcca

SEQ ID NO: 157049 - RNA, 19 nt, Artificial Sequence
  Description of Artificial Sequence: Synthetic oligonucleotide
gaauguacuuggagggguu

SEQ ID NO: 157050 - RNA, 19 nt, Artificial Sequence
  Description of Artificial Sequence: Synthetic oligonucleotide
cacccaucgcuugaccaca

SEQ ID NO: 157051 - RNA, 19 nt, Artificial Sequence
  Description of Artificial Sequence: Synthetic oligonucleotide
gaguggcggccacuuucuc

SEQ ID NO: 157052 - RNA, 19 nt, Artificial Sequence
  Description of Artificial Sequence: Synthetic oligonucleotide
caggugugacagucccguc

SEQ ID NO: 157053 - RNA, 19 nt, Artificial Sequence
  Description of Artificial Sequence: Synthetic oligonucleotide
ucacggccagugguacugu

SEQ ID NO: 157054 - RNA, 19 nt, Artificial Sequence
  Description of Artificial Sequence: Synthetic oligonucleotide
caauaccaagaugcuaggu

SEQ ID NO: 157055 - RNA, 19 nt, Artificial Sequence
  Description of Artificial Sequence: Synthetic oligonucleotide
ggaagaucuccugucgagu

SEQ ID NO: 157056 - RNA, 19 nt, Artificial Sequence
  Description of Artificial Sequence: Synthetic oligonucleotide
uggcgcgcuuguacucaaa

SEQ ID NO: 157057 - RNA, 19 nt, Artificial Sequence
  Description of Artificial Sequence: Synthetic oligonucleotide
aggguucggacagcagcau

SEQ ID NO: 157058 - RNA, 19 nt, Artificial Sequence
  Description of Artificial Sequence: Synthetic oligonucleotide
gcucucgaugaagucgaac

SEQ ID NO: 157059 - RNA, 19 nt, Artificial Sequence
  Description of Artificial Sequence: Synthetic oligonucleotide
guugcgguggcggugcuuu

SEQ ID NO: 157060 - RNA, 19 nt, Artificial Sequence
  Description of Artificial Sequence: Synthetic oligonucleotide
ggcggugcuuucuggucuc

SEQ ID NO: 157061 - RNA, 19 nt, Artificial Sequence
  Description of Artificial Sequence: Synthetic oligonucleotide
cuagcauuccugggugaua

SEQ ID NO: 157062 - RNA, 19 nt, Artificial Sequence
  Description of Artificial Sequence: Synthetic oligonucleotide
gucccgucuccuugcucuc

SEQ ID NO: 157063 - RNA, 19 nt, Artificial Sequence
  Description of Artificial Sequence: Synthetic oligonucleotide
cagccuuuauccccauccu

SEQ ID NO: 157064 - RNA, 19 nt, Artificial Sequence
  Description of Artificial Sequence: Synthetic oligonucleotide
gguacauaggagagcacuu

SEQ ID NO: 157065 - RNA, 19 nt, Artificial Sequence
  Description of Artificial Sequence: Synthetic oligonucleotide
ggcgcgcacaaggauguca

SEQ ID NO: 157066 - RNA, 19 nt, Artificial Sequence
  Description of Artificial Sequence: Synthetic oligonucleotide
aguccacuauggcgcgcuu

SEQ ID NO: 157067 - RNA, 19 nt, Artificial Sequence
  Description of Artificial Sequence: Synthetic oligonucleotide
gcgguggcggugcuuucug

SEQ ID NO: 157068 - RNA, 19 nt, Artificial Sequence
  Description of Artificial Sequence: Synthetic oligonucleotide
uugcgguggcggugcuuuc

SEQ ID NO: 157069 - RNA, 19 nt, Artificial Sequence
  Description of Artificial Sequence: Synthetic oligonucleotide
ggcaccgcugcuaacugcu

SEQ ID NO: 157070 - RNA, 19 nt, Artificial Sequence
  Description of Artificial Sequence: Synthetic oligonucleotide
ggccucguucacccaucgc

SEQ ID NO: 157071 - RNA, 19 nt, Artificial Sequence
  Description of Artificial Sequence: Synthetic oligonucleotide
ugacagccccaaggggaua

SEQ ID NO: 157072 - RNA, 19 nt, Artificial Sequence
  Description of Artificial Sequence: Synthetic oligonucleotide
gguagccagcacagugaac

SEQ ID NO: 157073 - RNA, 19 nt, Artificial Sequence
  Description of Artificial Sequence: Synthetic oligonucleotide
aucuggcagagggcucgca

SEQ ID NO: 157074 - RNA, 19 nt, Artificial Sequence
  Description of Artificial Sequence: Synthetic oligonucleotide
gugacagucccgucuccuu

SEQ ID NO: 157075 - RNA, 19 nt, Artificial Sequence
  Description of Artificial Sequence: Synthetic oligonucleotide
cccgaaccucuucaugcuc

SEQ ID NO: 157076 - RNA, 19 nt, Artificial Sequence
  Description of Artificial Sequence: Synthetic oligonucleotide
auacgagggcagagcugga

SEQ ID NO: 157077 - RNA, 19 nt, Artificial Sequence
  Description of Artificial Sequence: Synthetic oligonucleotide
cggacgggugcuucauggc

SEQ ID NO: 157078 - RNA, 19 nt, Artificial Sequence
  Description of Artificial Sequence: Synthetic oligonucleotide
gcggucaaugcugcucuca

SEQ ID NO: 157079 - RNA, 19 nt, Artificial Sequence
  Description of Artificial Sequence: Synthetic oligonucleotide
gucgaacagugggcuguca

SEQ ID NO: 157080 - RNA, 19 nt, Artificial Sequence
  Description of Artificial Sequence: Synthetic oligonucleotide
ccaccccggaacacaccag

SEQ ID NO: 157081 - RNA, 19 nt, Artificial Sequence
  Description of Artificial Sequence: Synthetic oligonucleotide
ggaccacacgguuguagau

SEQ ID NO: 157082 - RNA, 19 nt, Artificial Sequence
  Description of Artificial Sequence: Synthetic oligonucleotide
ggguucggacagcagcaua

SEQ ID NO: 157083 - RNA, 19 nt, Artificial Sequence
  Description of Artificial Sequence: Synthetic oligonucleotide
gucaccgcggacgggugcu

SEQ ID NO: 157084 - RNA, 19 nt, Artificial Sequence
  Description of Artificial Sequence: Synthetic oligonucleotide
augggucaucagaccugcu

SEQ ID NO: 157085 - RNA, 19 nt, Artificial Sequence
  Description of Artificial Sequence: Synthetic oligonucleotide
cagagccaccaacguguaa

SEQ ID NO: 157086 - RNA, 19 nt, Artificial Sequence
  Description of Artificial Sequence: Synthetic oligonucleotide
ccagaacguucagauagaa

SEQ ID NO: 157087 - RNA, 19 nt, Artificial Sequence
  Description of Artificial Sequence: Synthetic oligonucleotide
gucgggcgcgcacaaggau

SEQ ID NO: 157088 - RNA, 19 nt, Artificial Sequence
  Description of Artificial Sequence: Synthetic oligonucleotide
caguugcuugcuagccacu

SEQ ID NO: 157089 - RNA, 19 nt, Artificial Sequence
  Description of Artificial Sequence: Synthetic oligonucleotide
gguuguagaugaagcgaau

SEQ ID NO: 157090 - RNA, 19 nt, Artificial Sequence
  Description of Artificial Sequence: Synthetic oligonucleotide
caucuuacucacggccagu

SEQ ID NO: 157091 - RNA, 19 nt, Artificial Sequence
  Description of Artificial Sequence: Synthetic oligonucleotide
cgguucgagucugugacca

SEQ ID NO: 157092 - RNA, 19 nt, Artificial Sequence
  Description of Artificial Sequence: Synthetic oligonucleotide
ccugucgaguggcggccac

SEQ ID NO: 157093 - RNA, 19 nt, Artificial Sequence
  Description of Artificial Sequence: Synthetic oligonucleotide
gcccgaaccucuucaugcu

SEQ ID NO: 157094 - RNA, 19 nt, Artificial Sequence
  Description of Artificial Sequence: Synthetic oligonucleotide
cacggccagugguacugua

SEQ ID NO: 157095 - RNA, 19 nt, Artificial Sequence
  Description of Artificial Sequence: Synthetic oligonucleotide
aaccugcauugagggccuu

SEQ ID NO: 157096 - RNA, 19 nt, Artificial Sequence
  Description of Artificial Sequence: Synthetic oligonucleotide
gcagcgugugaguauucuu

SEQ ID NO: 157097 - RNA, 19 nt, Artificial Sequence
  Description of Artificial Sequence: Synthetic oligonucleotide
ggggcccuagccccuggaa

SEQ ID NO: 157098 - RNA, 19 nt, Artificial Sequence
  Description of Artificial Sequence: Synthetic oligonucleotide
gugcaucggaugacauacu

SEQ ID NO: 157099 - RNA, 19 nt, Artificial Sequence
  Description of Artificial Sequence: Synthetic oligonucleotide
ggccaugacgggugaacuu

SEQ ID NO: 157100 - RNA, 19 nt, Artificial Sequence
  Description of Artificial Sequence: Synthetic oligonucleotide
cgaauguacuuggaggggu

SEQ ID NO: 157101 - RNA, 19 nt, Artificial Sequence
  Description of Artificial Sequence: Synthetic oligonucleotide
gcgaugcuacgguucgagu

SEQ ID NO: 157102 - RNA, 19 nt, Artificial Sequence
  Description of Artificial Sequence: Synthetic oligonucleotide
cgagucugugaccagguuu

SEQ ID NO: 157103 - RNA, 19 nt, Artificial Sequence
  Description of Artificial Sequence: Synthetic oligonucleotide
ccucguucacccaucgcuu

SEQ ID NO: 157104 - RNA, 19 nt, Artificial Sequence
  Description of Artificial Sequence: Synthetic oligonucleotide
cgcgcacaaggaugucaug

SEQ ID NO: 157105 - RNA, 19 nt, Artificial Sequence
  Description of Artificial Sequence: Synthetic oligonucleotide
cggucagaccauuuaguau

SEQ ID NO: 157106 - RNA, 19 nt, Artificial Sequence
  Description of Artificial Sequence: Synthetic oligonucleotide
gcgugugaguauucuuguu

SEQ ID NO: 157107 - RNA, 19 nt, Artificial Sequence
  Description of Artificial Sequence: Synthetic oligonucleotide
ggaccacgguaauuaucuu

SEQ ID NO: 157108 - RNA, 19 nt, Artificial Sequence
  Description of Artificial Sequence: Synthetic oligonucleotide
gcgcgcacaaggaugucau

SEQ ID NO: 157109 - RNA, 19 nt, Artificial Sequence
  Description of Artificial Sequence: Synthetic oligonucleotide
gucgaguggcggccacuuu

SEQ ID NO: 157110 - RNA, 19 nt, Artificial Sequence
  Description of Artificial Sequence: Synthetic oligonucleotide
cgaguggcggccacuuucu

SEQ ID NO: 157111 - RNA, 19 nt, Artificial Sequence
  Description of Artificial Sequence: Synthetic oligonucleotide
cugucgaguggcggccacu

SEQ ID NO: 157112 - RNA, 19 nt, Artificial Sequence
  Description of Artificial Sequence: Synthetic oligonucleotide
gcauguuuccgaggauauu

SEQ ID NO: 157113 - RNA, 19 nt, Artificial Sequence
  Description of Artificial Sequence: Synthetic oligonucleotide
ccacaaucgcuuguuucau

SEQ ID NO: 157114 - RNA, 19 nt, Artificial Sequence
  Description of Artificial Sequence: Synthetic oligonucleotide
cgcggacgggugcuucaug

SEQ ID NO: 157115 - RNA, 19 nt, Artificial Sequence
  Description of Artificial Sequence: Synthetic oligonucleotide
cuguugcgguggcggugcu

SEQ ID NO: 157116 - RNA, 19 nt, Artificial Sequence
  Description of Artificial Sequence: Synthetic oligonucleotide
ccuuaacggugaacuucau

SEQ ID NO: 157117 - RNA, 19 nt, Artificial Sequence
  Description of Artificial Sequence: Synthetic oligonucleotide
ccacgguaauuaucuucuu

SEQ ID NO: 157118 - RNA, 19 nt, Artificial Sequence
  Description of Artificial Sequence: Synthetic oligonucleotide
gggcgcgcacaaggauguc

SEQ ID NO: 157119 - RNA, 19 nt, Artificial Sequence
  Description of Artificial Sequence: Synthetic oligonucleotide
ccacuauggcgcgcuugua

SEQ ID NO: 157120 - RNA, 19 nt, Artificial Sequence
  Description of Artificial Sequence: Synthetic oligonucleotide
ccgcggacgggugcuucau

SEQ ID NO: 157121 - RNA, 19 nt, Artificial Sequence
  Description of Artificial Sequence: Synthetic oligonucleotide
aaucuaugaaacuagacgc

SEQ ID NO: 157122 - RNA, 19 nt, Artificial Sequence
  Description of Artificial Sequence: Synthetic oligonucleotide
ugaauaaucagaauuggag

SEQ ID NO: 157123 - RNA, 19 nt, Artificial Sequence
  Description of Artificial Sequence: Synthetic oligonucleotide
gaaucuaugaaacuagacg

SEQ ID NO: 157124 - RNA, 19 nt, Artificial Sequence
  Description of Artificial Sequence: Synthetic oligonucleotide
uuuacuaugaguaucuucu

SEQ ID NO: 157125 - RNA, 19 nt, Artificial Sequence
  Description of Artificial Sequence: Synthetic oligonucleotide
aauugaaaggaucgaaucg

SEQ ID NO: 157126 - RNA, 19 nt, Artificial Sequence
  Description of Artificial Sequence: Synthetic oligonucleotide
aaauugaaaggaucgaauc

SEQ ID NO: 157127 - RNA, 19 nt, Artificial Sequence
  Description of Artificial Sequence: Synthetic oligonucleotide
aaaggaucgaaucggacac

SEQ ID NO: 157128 - RNA, 19 nt, Artificial Sequence
  Description of Artificial Sequence: Synthetic oligonucleotide
auuuacagcccguagagcc

SEQ ID NO: 157129 - RNA, 19 nt, Artificial Sequence
  Description of Artificial Sequence: Synthetic oligonucleotide
gaucaaacaacauuaguag

SEQ ID NO: 157130 - RNA, 19 nt, Artificial Sequence
  Description of Artificial Sequence: Synthetic oligonucleotide
aauaaucagaauuggagga

SEQ ID NO: 157131 - RNA, 19 nt, Artificial Sequence
  Description of Artificial Sequence: Synthetic oligonucleotide
uuacauacuaucaauguug

SEQ ID NO: 157132 - RNA, 19 nt, Artificial Sequence
  Description of Artificial Sequence: Synthetic oligonucleotide
aauacaggcauuuccaaug

SEQ ID NO: 157133 - RNA, 19 nt, Artificial Sequence
  Description of Artificial Sequence: Synthetic oligonucleotide
aaaucuauaccacgggcac

SEQ ID NO: 157134 - RNA, 19 nt, Artificial Sequence
  Description of Artificial Sequence: Synthetic oligonucleotide
aguagauugugcuaccugc

SEQ ID NO: 157135 - RNA, 19 nt, Artificial Sequence
  Description of Artificial Sequence: Synthetic oligonucleotide
aaauuuacaaggugaauga

SEQ ID NO: 157136 - RNA, 19 nt, Artificial Sequence
  Description of Artificial Sequence: Synthetic oligonucleotide
ugaaacuagacgcugacug

SEQ ID NO: 157137 - RNA, 19 nt, Artificial Sequence
  Description of Artificial Sequence: Synthetic oligonucleotide
auaagugacauaauggccc

SEQ ID NO: 157138 - RNA, 19 nt, Artificial Sequence
  Description of Artificial Sequence: Synthetic oligonucleotide
acugaaaucguuuaaggug

SEQ ID NO: 157139 - RNA, 19 nt, Artificial Sequence
  Description of Artificial Sequence: Synthetic oligonucleotide
uauaacuauccauugguag

SEQ ID NO: 157140 - RNA, 19 nt, Artificial Sequence
  Description of Artificial Sequence: Synthetic oligonucleotide
cuuauagucagauucgaag

SEQ ID NO: 157141 - RNA, 19 nt, Artificial Sequence
  Description of Artificial Sequence: Synthetic oligonucleotide
uaauuuacagcccguagag

SEQ ID NO: 157142 - RNA, 19 nt, Artificial Sequence
  Description of Artificial Sequence: Synthetic oligonucleotide
aaggugaauaaucagaauu

SEQ ID NO: 157143 - RNA, 19 nt, Artificial Sequence
  Description of Artificial Sequence: Synthetic oligonucleotide
uuaauuuacagcccguaga

SEQ ID NO: 157144 - RNA, 19 nt, Artificial Sequence
  Description of Artificial Sequence: Synthetic oligonucleotide
uaauccauaucguauuggg

SEQ ID NO: 157145 - RNA, 19 nt, Artificial Sequence
  Description of Artificial Sequence: Synthetic oligonucleotide
ucuaaauucuccuuacuac

SEQ ID NO: 157146 - RNA, 19 nt, Artificial Sequence
  Description of Artificial Sequence: Synthetic oligonucleotide
gucggugucaauuucaucc

SEQ ID NO: 157147 - RNA, 19 nt, Artificial Sequence
  Description of Artificial Sequence: Synthetic oligonucleotide
aauggauacugauagccca

SEQ ID NO: 157148 - RNA, 19 nt, Artificial Sequence
  Description of Artificial Sequence: Synthetic oligonucleotide
uuaaggugaauaaucagaa

SEQ ID NO: 157149 - RNA, 19 nt, Artificial Sequence
  Description of Artificial Sequence: Synthetic oligonucleotide
caaagugcucucaugaucc

SEQ ID NO: 157150 - RNA, 19 nt, Artificial Sequence
  Description of Artificial Sequence: Synthetic oligonucleotide
ucuuauuuacacucuaugu

SEQ ID NO: 157151 - RNA, 19 nt, Artificial Sequence
  Description of Artificial Sequence: Synthetic oligonucleotide
aaaacuuucacgaggaaau

SEQ ID NO: 157152 - RNA, 19 nt, Artificial Sequence
  Description of Artificial Sequence: Synthetic oligonucleotide
uuauagucagauucgaagu

SEQ ID NO: 157153 - RNA, 19 nt, Artificial Sequence
  Description of Artificial Sequence: Synthetic oligonucleotide
augguuacuagcuucgguc

SEQ ID NO: 157154 - RNA, 19 nt, Artificial Sequence
  Description of Artificial Sequence: Synthetic oligonucleotide
uugauuuuauccaccgucc

SEQ ID NO: 157155 - RNA, 19 nt, Artificial Sequence
  Description of Artificial Sequence: Synthetic oligonucleotide
uuacaguucauauucagua

SEQ ID NO: 157156 - RNA, 19 nt, Artificial Sequence
  Description of Artificial Sequence: Synthetic oligonucleotide
aauacugcauuuagccugc

SEQ ID NO: 157157 - RNA, 19 nt, Artificial Sequence
  Description of Artificial Sequence: Synthetic oligonucleotide
gacuaucuuauuuacacuc

SEQ ID NO: 157158 - RNA, 19 nt, Artificial Sequence
  Description of Artificial Sequence: Synthetic oligonucleotide
uuauccaccguccauuuac

SEQ ID NO: 157159 - RNA, 19 nt, Artificial Sequence
  Description of Artificial Sequence: Synthetic oligonucleotide
ugauguuugauagcggagg

SEQ ID NO: 157160 - RNA, 19 nt, Artificial Sequence
  Description of Artificial Sequence: Synthetic oligonucleotide
auacuaucaauguuggaug

SEQ ID NO: 157161 - RNA, 19 nt, Artificial Sequence
  Description of Artificial Sequence: Synthetic oligonucleotide
auaacuauccauugguagu

SEQ ID NO: 157162 - RNA, 19 nt, Artificial Sequence
  Description of Artificial Sequence: Synthetic oligonucleotide
auuaguagauugugcuacc

SEQ ID NO: 157163 - RNA, 19 nt, Artificial Sequence
  Description of Artificial Sequence: Synthetic oligonucleotide
auccauaucguauuggggu

SEQ ID NO: 157164 - RNA, 19 nt, Artificial Sequence
  Description of Artificial Sequence: Synthetic oligonucleotide
cauuacuauagccauugcc

SEQ ID NO: 157165 - RNA, 19 nt, Artificial Sequence
  Description of Artificial Sequence: Synthetic oligonucleotide
uaguuacagauaaacaggu

SEQ ID NO: 157166 - RNA, 19 nt, Artificial Sequence
  Description of Artificial Sequence: Synthetic oligonucleotide
aaccuguguacuuuucauc

SEQ ID NO: 157167 - RNA, 19 nt, Artificial Sequence
  Description of Artificial Sequence: Synthetic oligonucleotide
aaucggacacuuauaugcc

SEQ ID NO: 157168 - RNA, 19 nt, Artificial Sequence
  Description of Artificial Sequence: Synthetic oligonucleotide
guacacgccauauacaaug

SEQ ID NO: 157169 - RNA, 19 nt, Artificial Sequence
  Description of Artificial Sequence: Synthetic oligonucleotide
aaaaucuauaccacgggca

SEQ ID NO: 157170 - RNA, 19 nt, Artificial Sequence
  Description of Artificial Sequence: Synthetic oligonucleotide
uguguccuaaaccuagcag

SEQ ID NO: 157171 - RNA, 19 nt, Artificial Sequence
  Description of Artificial Sequence: Synthetic oligonucleotide
ugauggaguuaauuuacag

SEQ ID NO: 157172 - RNA, 19 nt, Artificial Sequence
  Description of Artificial Sequence: Synthetic oligonucleotide
aggugugagugguuuaugc

SEQ ID NO: 157173 - RNA, 19 nt, Artificial Sequence
  Description of Artificial Sequence: Synthetic oligonucleotide
uguuugauagcggagguga

SEQ ID NO: 157174 - RNA, 19 nt, Artificial Sequence
  Description of Artificial Sequence: Synthetic oligonucleotide
gaaaggaucgaaucggaca

SEQ ID NO: 157175 - RNA, 19 nt, Artificial Sequence
  Description of Artificial Sequence: Synthetic oligonucleotide
aauuuacagcccguagagc

SEQ ID NO: 157176 - RNA, 19 nt, Artificial Sequence
  Description of Artificial Sequence: Synthetic oligonucleotide
ugaaucuaugaaacuagac

SEQ ID NO: 157177 - RNA, 19 nt, Artificial Sequence
  Description of Artificial Sequence: Synthetic oligonucleotide
uuagcaauacuuacauacu

SEQ ID NO: 157178 - RNA, 19 nt, Artificial Sequence
  Description of Artificial Sequence: Synthetic oligonucleotide
uuuguuuggguaauaguua

SEQ ID NO: 157179 - RNA, 19 nt, Artificial Sequence
  Description of Artificial Sequence: Synthetic oligonucleotide
ucaagacuaucuuauuuac

SEQ ID NO: 157180 - RNA, 19 nt, Artificial Sequence
  Description of Artificial Sequence: Synthetic oligonucleotide
guuaauuuacagcccguag

SEQ ID NO: 157181 - RNA, 19 nt, Artificial Sequence
  Description of Artificial Sequence: Synthetic oligonucleotide
uucuuaguugccaaacagu

SEQ ID NO: 157182 - RNA, 19 nt, Artificial Sequence
  Description of Artificial Sequence: Synthetic oligonucleotide
cacgccauauacaaugacc

SEQ ID NO: 157183 - RNA, 19 nt, Artificial Sequence
  Description of Artificial Sequence: Synthetic oligonucleotide
cauuaguagauugugcuac

SEQ ID NO: 157184 - RNA, 19 nt, Artificial Sequence
  Description of Artificial Sequence: Synthetic oligonucleotide
aggaucugacaauaaauga

SEQ ID NO: 157185 - RNA, 19 nt, Artificial Sequence
  Description of Artificial Sequence: Synthetic oligonucleotide
cugaaaucguuuaagguga

SEQ ID NO: 157186 - RNA, 19 nt, Artificial Sequence
  Description of Artificial Sequence: Synthetic oligonucleotide
ucgaaucggacacuuauau

SEQ ID NO: 157187 - RNA, 19 nt, Artificial Sequence
  Description of Artificial Sequence: Synthetic oligonucleotide
agaucaaacaacauuagua

SEQ ID NO: 157188 - RNA, 19 nt, Artificial Sequence
  Description of Artificial Sequence: Synthetic oligonucleotide
agugcuauuuuaauuagga

SEQ ID NO: 157189 - RNA, 19 nt, Artificial Sequence
  Description of Artificial Sequence: Synthetic oligonucleotide
uacuaugaguaucuucucu

SEQ ID NO: 157190 - RNA, 19 nt, Artificial Sequence
  Description of Artificial Sequence: Synthetic oligonucleotide
uuacuauagccauugccac

SEQ ID NO: 157191 - RNA, 19 nt, Artificial Sequence
  Description of Artificial Sequence: Synthetic oligonucleotide
caacauuaguagauugugc

SEQ ID NO: 157192 - RNA, 19 nt, Artificial Sequence
  Description of Artificial Sequence: Synthetic oligonucleotide
ucggugucaauuucauccg

SEQ ID NO: 157193 - RNA, 19 nt, Artificial Sequence
  Description of Artificial Sequence: Synthetic oligonucleotide
agucaccucgaguaccacc

SEQ ID NO: 157194 - RNA, 19 nt, Artificial Sequence
  Description of Artificial Sequence: Synthetic oligonucleotide
cugaccauuacuauagcca

SEQ ID NO: 157195 - RNA, 19 nt, Artificial Sequence
  Description of Artificial Sequence: Synthetic oligonucleotide
ggcauaagugacauaaugg

SEQ ID NO: 157196 - RNA, 19 nt, Artificial Sequence
  Description of Artificial Sequence: Synthetic oligonucleotide
aacacuaacugcacuguug

SEQ ID NO: 157197 - RNA, 19 nt, Artificial Sequence
  Description of Artificial Sequence: Synthetic oligonucleotide
cuagcuucggucaucagga

SEQ ID NO: 157198 - RNA, 19 nt, Artificial Sequence
  Description of Artificial Sequence: Synthetic oligonucleotide
uguagggucccaauccaca

SEQ ID NO: 157199 - RNA, 19 nt, Artificial Sequence
  Description of Artificial Sequence: Synthetic oligonucleotide
ugaaccuuuuggacuacug

SEQ ID NO: 157200 - RNA, 19 nt, Artificial Sequence
  Description of Artificial Sequence: Synthetic oligonucleotide
uuucacgaggaaauuuaac

SEQ ID NO: 157201 - RNA, 19 nt, Artificial Sequence
  Description of Artificial Sequence: Synthetic oligonucleotide
accauuacuauagccauug

SEQ ID NO: 157202 - RNA, 19 nt, Artificial Sequence
  Description of Artificial Sequence: Synthetic oligonucleotide
aucuaaauucuccuuacua

SEQ ID NO: 157203 - RNA, 19 nt, Artificial Sequence
  Description of Artificial Sequence: Synthetic oligonucleotide
ugauuuuauccaccgucca

SEQ ID NO: 157204 - RNA, 19 nt, Artificial Sequence
  Description of Artificial Sequence: Synthetic oligonucleotide
gacuacuggugauauuugc

SEQ ID NO: 157205 - RNA, 19 nt, Artificial Sequence
  Description of Artificial Sequence: Synthetic oligonucleotide
ugaccauuacuauagccau

SEQ ID NO: 157206 - RNA, 19 nt, Artificial Sequence
  Description of Artificial Sequence: Synthetic oligonucleotide
uacaaugaccaauacuuuu

SEQ ID NO: 157207 - RNA, 19 nt, Artificial Sequence
  Description of Artificial Sequence: Synthetic oligonucleotide
uaguagauugugcuaccug

SEQ ID NO: 157208 - RNA, 19 nt, Artificial Sequence
  Description of Artificial Sequence: Synthetic oligonucleotide
agccaaagugcucucauga

SEQ ID NO: 157209 - RNA, 19 nt, Artificial Sequence
  Description of Artificial Sequence: Synthetic oligonucleotide
caacauauguccucggcuc

SEQ ID NO: 157210 - RNA, 19 nt, Artificial Sequence
  Description of Artificial Sequence: Synthetic oligonucleotide
uagcaauacuuacauacua

SEQ ID NO: 157211 - RNA, 19 nt, Artificial Sequence
  Description of Artificial Sequence: Synthetic oligonucleotide
ucuucggcagaaacugugc

SEQ ID NO: 157212 - RNA, 19 nt, Artificial Sequence
  Description of Artificial Sequence: Synthetic oligonucleotide
uguagcuacagggagucac

SEQ ID NO: 157213 - RNA, 19 nt, Artificial Sequence
  Description of Artificial Sequence: Synthetic oligonucleotide
uuuguguccuaaaccuagc

SEQ ID NO: 157214 - RNA, 19 nt, Artificial Sequence
  Description of Artificial Sequence: Synthetic oligonucleotide
ucggacacuuauaugccca

SEQ ID NO: 157215 - RNA, 19 nt, Artificial Sequence
  Description of Artificial Sequence: Synthetic oligonucleotide
ugaaaggaucgaaucggac

SEQ ID NO: 157216 - RNA, 19 nt, Artificial Sequence
  Description of Artificial Sequence: Synthetic oligonucleotide
ucuccuuacuacuggacaa

SEQ ID NO: 157217 - RNA, 19 nt, Artificial Sequence
  Description of Artificial Sequence: Synthetic oligonucleotide
uacuaucaauguuggaugu

SEQ ID NO: 157218 - RNA, 19 nt, Artificial Sequence
  Description of Artificial Sequence: Synthetic oligonucleotide
uggacuacuggugauauuu

SEQ ID NO: 157219 - RNA, 19 nt, Artificial Sequence
  Description of Artificial Sequence: Synthetic oligonucleotide
ggcacgaaauugcauauag

SEQ ID NO: 157220 - RNA, 19 nt, Artificial Sequence
  Description of Artificial Sequence: Synthetic oligonucleotide
ugugcuaccugcucaacua

SEQ ID NO: 157221 - RNA, 19 nt, Artificial Sequence
  Description of Artificial Sequence: Synthetic oligonucleotide
gagaugucauccccugagg

SEQ ID NO: 157222 - RNA, 19 nt, Artificial Sequence
  Description of Artificial Sequence: Synthetic oligonucleotide
guuuacuaugaguaucuuc

SEQ ID NO: 157223 - RNA, 19 nt, Artificial Sequence
  Description of Artificial Sequence: Synthetic oligonucleotide
auugguagugguaaagaca

SEQ ID NO: 157224 - RNA, 19 nt, Artificial Sequence
  Description of Artificial Sequence: Synthetic oligonucleotide
agauugugcuaccugcuca

SEQ ID NO: 157225 - RNA, 19 nt, Artificial Sequence
  Description of Artificial Sequence: Synthetic oligonucleotide
cauauaacuauccauuggu

SEQ ID NO: 157226 - RNA, 19 nt, Artificial Sequence
  Description of Artificial Sequence: Synthetic oligonucleotide
gacuacauauuaaaacaca

SEQ ID NO: 157227 - RNA, 19 nt, Artificial Sequence
  Description of Artificial Sequence: Synthetic oligonucleotide
aacuauccauugguagugg

SEQ ID NO: 157228 - RNA, 19 nt, Artificial Sequence
  Description of Artificial Sequence: Synthetic oligonucleotide
ugggguaguaccaucuaau

SEQ ID NO: 157229 - RNA, 19 nt, Artificial Sequence
  Description of Artificial Sequence: Synthetic oligonucleotide
uacaacucuuuccugugau

SEQ ID NO: 157230 - RNA, 19 nt, Artificial Sequence
  Description of Artificial Sequence: Synthetic oligonucleotide
uaugguuuccaagcugacc

SEQ ID NO: 157231 - RNA, 19 nt, Artificial Sequence
  Description of Artificial Sequence: Synthetic oligonucleotide
gcaaaaucuauaccacggg

SEQ ID NO: 157232 - RNA, 19 nt, Artificial Sequence
  Description of Artificial Sequence: Synthetic oligonucleotide
agaugucauccccugaggu

SEQ ID NO: 157233 - RNA, 19 nt, Artificial Sequence
  Description of Artificial Sequence: Synthetic oligonucleotide
uauguccucggcucaaggu

SEQ ID NO: 157234 - RNA, 19 nt, Artificial Sequence
  Description of Artificial Sequence: Synthetic oligonucleotide
uuagccugcuuuucaguga

SEQ ID NO: 157235 - RNA, 19 nt, Artificial Sequence
  Description of Artificial Sequence: Synthetic oligonucleotide
cagaguuuguguccuaaac

SEQ ID NO: 157236 - RNA, 19 nt, Artificial Sequence
  Description of Artificial Sequence: Synthetic oligonucleotide
auagguuuacuaugaguau

SEQ ID NO: 157237 - RNA, 19 nt, Artificial Sequence
  Description of Artificial Sequence: Synthetic oligonucleotide
uagguuuacuaugaguauc

SEQ ID NO: 157238 - RNA, 19 nt, Artificial Sequence
  Description of Artificial Sequence: Synthetic oligonucleotide
agacuaucuuauuuacacu

SEQ ID NO: 157239 - RNA, 19 nt, Artificial Sequence
  Description of Artificial Sequence: Synthetic oligonucleotide
acacgccauauacaaugac

SEQ ID NO: 157240 - RNA, 19 nt, Artificial Sequence
  Description of Artificial Sequence: Synthetic oligonucleotide
ugcaaacaaccagaguuug

SEQ ID NO: 157241 - RNA, 19 nt, Artificial Sequence
  Description of Artificial Sequence: Synthetic oligonucleotide
uacacgccauauacaauga

SEQ ID NO: 157242 - RNA, 19 nt, Artificial Sequence
  Description of Artificial Sequence: Synthetic oligonucleotide
cuaaauucuccuuacuacu

SEQ ID NO: 157243 - RNA, 19 nt, Artificial Sequence
  Description of Artificial Sequence: Synthetic oligonucleotide
ucgaguaccaccagcccau

SEQ ID NO: 157244 - RNA, 19 nt, Artificial Sequence
  Description of Artificial Sequence: Synthetic oligonucleotide
cuaccugcucaacuaaaac

SEQ ID NO: 157245 - RNA, 19 nt, Artificial Sequence
  Description of Artificial Sequence: Synthetic oligonucleotide
uguccucggcucaaggugu

SEQ ID NO: 157246 - RNA, 19 nt, Artificial Sequence
  Description of Artificial Sequence: Synthetic oligonucleotide
acgccauauacaaugacca

SEQ ID NO: 157247 - RNA, 19 nt, Artificial Sequence
  Description of Artificial Sequence: Synthetic oligonucleotide
agcugaccauuacuauagc

SEQ ID NO: 157248 - RNA, 19 nt, Artificial Sequence
  Description of Artificial Sequence: Synthetic oligonucleotide
cguagagccauuaaaguac

SEQ ID NO: 157249 - RNA, 19 nt, Artificial Sequence
  Description of Artificial Sequence: Synthetic oligonucleotide
uuuuacacuuggagcagua

SEQ ID NO: 157250 - RNA, 19 nt, Artificial Sequence
  Description of Artificial Sequence: Synthetic oligonucleotide
cauacuaucaauguuggau

SEQ ID NO: 157251 - RNA, 19 nt, Artificial Sequence
  Description of Artificial Sequence: Synthetic oligonucleotide
uuacuagcuucggucauca

SEQ ID NO: 157252 - RNA, 19 nt, Artificial Sequence
  Description of Artificial Sequence: Synthetic oligonucleotide
agggagucaccucgaguac

SEQ ID NO: 157253 - RNA, 19 nt, Artificial Sequence
  Description of Artificial Sequence: Synthetic oligonucleotide
uuuggacuacuggugauau

SEQ ID NO: 157254 - RNA, 19 nt, Artificial Sequence
  Description of Artificial Sequence: Synthetic oligonucleotide
uuaguagauugugcuaccu

SEQ ID NO: 157255 - RNA, 19 nt, Artificial Sequence
  Description of Artificial Sequence: Synthetic oligonucleotide
uccauaucguauuggggua

SEQ ID NO: 157256 - RNA, 19 nt, Artificial Sequence
  Description of Artificial Sequence: Synthetic oligonucleotide
acauuaguagauugugcua

SEQ ID NO: 157257 - RNA, 19 nt, Artificial Sequence
  Description of Artificial Sequence: Synthetic oligonucleotide
uuacuaugaguaucuucuc

SEQ ID NO: 157258 - RNA, 19 nt, Artificial Sequence
  Description of Artificial Sequence: Synthetic oligonucleotide
ucccuugacuacauauuaa

SEQ ID NO: 157259 - RNA, 19 nt, Artificial Sequence
  Description of Artificial Sequence: Synthetic oligonucleotide
aacagguacacgccauaua

SEQ ID NO: 157260 - RNA, 19 nt, Artificial Sequence
  Description of Artificial Sequence: Synthetic oligonucleotide
gcaauacuuacauacuauc

SEQ ID NO: 157261 - RNA, 19 nt, Artificial Sequence
  Description of Artificial Sequence: Synthetic oligonucleotide
acuaucuuauuuacacucu

SEQ ID NO: 157262 - RNA, 19 nt, Artificial Sequence
  Description of Artificial Sequence: Synthetic oligonucleotide
aagugcucucaugauccag

SEQ ID NO: 157263 - RNA, 19 nt, Artificial Sequence
  Description of Artificial Sequence: Synthetic oligonucleotide
ucggagggugaauggauac

SEQ ID NO: 157264 - RNA, 19 nt, Artificial Sequence
  Description of Artificial Sequence: Synthetic oligonucleotide
ucaaaacuuucacgaggaa

SEQ ID NO: 157265 - RNA, 19 nt, Artificial Sequence
  Description of Artificial Sequence: Synthetic oligonucleotide
gauugugcuaccugcucaa

SEQ ID NO: 157266 - RNA, 19 nt, Artificial Sequence
  Description of Artificial Sequence: Synthetic oligonucleotide
uuucaaaccuguguacuuu

SEQ ID NO: 157267 - RNA, 19 nt, Artificial Sequence
  Description of Artificial Sequence: Synthetic oligonucleotide
gaaauugaaaggaucgaau

SEQ ID NO: 157268 - RNA, 19 nt, Artificial Sequence
  Description of Artificial Sequence: Synthetic oligonucleotide
acuauccauugguaguggu

SEQ ID NO: 157269 - RNA, 19 nt, Artificial Sequence
  Description of Artificial Sequence: Synthetic oligonucleotide
agucggugucaauuucauc

SEQ ID NO: 157270 - RNA, 19 nt, Artificial Sequence
  Description of Artificial Sequence: Synthetic oligonucleotide
aucuaugaaacuagacgcu

SEQ ID NO: 157271 - RNA, 19 nt, Artificial Sequence
  Description of Artificial Sequence: Synthetic oligonucleotide
caacucggagggugaaugg

SEQ ID NO: 157272 - RNA, 19 nt, Artificial Sequence
  Description of Artificial Sequence: Synthetic oligonucleotide
agcaauacuuacauacuau

SEQ ID NO: 157273 - RNA, 19 nt, Artificial Sequence
  Description of Artificial Sequence: Synthetic oligonucleotide
aucguuuaaggugaauaau

SEQ ID NO: 157274 - RNA, 19 nt, Artificial Sequence
  Description of Artificial Sequence: Synthetic oligonucleotide
auggcacgaaauugcauau

SEQ ID NO: 157275 - RNA, 19 nt, Artificial Sequence
  Description of Artificial Sequence: Synthetic oligonucleotide
ugauggguucagccugugc

SEQ ID NO: 157276 - RNA, 19 nt, Artificial Sequence
  Description of Artificial Sequence: Synthetic oligonucleotide
gauguuugauagcggaggu

SEQ ID NO: 157277 - RNA, 19 nt, Artificial Sequence
  Description of Artificial Sequence: Synthetic oligonucleotide
ucaugggacuuguccaggu

SEQ ID NO: 157278 - RNA, 19 nt, Artificial Sequence
  Description of Artificial Sequence: Synthetic oligonucleotide
guaacaggaucugacaaua

SEQ ID NO: 157279 - RNA, 19 nt, Artificial Sequence
  Description of Artificial Sequence: Synthetic oligonucleotide
ugguagugguaaagacaag

SEQ ID NO: 157280 - RNA, 19 nt, Artificial Sequence
  Description of Artificial Sequence: Synthetic oligonucleotide
aucuucggcagaaacugug

SEQ ID NO: 157281 - RNA, 19 nt, Artificial Sequence
  Description of Artificial Sequence: Synthetic oligonucleotide
accguccauuuacaaacug

SEQ ID NO: 157282 - RNA, 19 nt, Artificial Sequence
  Description of Artificial Sequence: Synthetic oligonucleotide
acauacuaucaauguugga

SEQ ID NO: 157283 - RNA, 19 nt, Artificial Sequence
  Description of Artificial Sequence: Synthetic oligonucleotide
ugcuaccugcucaacuaaa

SEQ ID NO: 157284 - RNA, 19 nt, Artificial Sequence
  Description of Artificial Sequence: Synthetic oligonucleotide
cuagacgcugacuggucuc

SEQ ID NO: 157285 - RNA, 19 nt, Artificial Sequence
  Description of Artificial Sequence: Synthetic oligonucleotide
agcccguagagccauuaaa

SEQ ID NO: 157286 - RNA, 19 nt, Artificial Sequence
  Description of Artificial Sequence: Synthetic oligonucleotide
aaacuuucacgaggaaauu

SEQ ID NO: 157287 - RNA, 19 nt, Artificial Sequence
  Description of Artificial Sequence: Synthetic oligonucleotide
guagcuacagggagucacc

SEQ ID NO: 157288 - RNA, 19 nt, Artificial Sequence
  Description of Artificial Sequence: Synthetic oligonucleotide
acgaaauugcauauagauu

SEQ ID NO: 157289 - RNA, 19 nt, Artificial Sequence
  Description of Artificial Sequence: Synthetic oligonucleotide
auauaacuauccauuggua

SEQ ID NO: 157290 - RNA, 19 nt, Artificial Sequence
  Description of Artificial Sequence: Synthetic oligonucleotide
auugugcuaccugcucaac

SEQ ID NO: 157291 - RNA, 19 nt, Artificial Sequence
  Description of Artificial Sequence: Synthetic oligonucleotide
auuagccaaagugcucuca

SEQ ID NO: 157292 - RNA, 19 nt, Artificial Sequence
  Description of Artificial Sequence: Synthetic oligonucleotide
cuguagggucccaauccac

SEQ ID NO: 157293 - RNA, 19 nt, Artificial Sequence
  Description of Artificial Sequence: Synthetic oligonucleotide
cacuagggucaaaacuuuc

SEQ ID NO: 157294 - RNA, 19 nt, Artificial Sequence
  Description of Artificial Sequence: Synthetic oligonucleotide
auguuugauagcggaggug

SEQ ID NO: 157295 - RNA, 19 nt, Artificial Sequence
  Description of Artificial Sequence: Synthetic oligonucleotide
gagugguagcuuuacugua

SEQ ID NO: 157296 - RNA, 19 nt, Artificial Sequence
  Description of Artificial Sequence: Synthetic oligonucleotide
ugccaaacagugaguuuua

SEQ ID NO: 157297 - RNA, 19 nt, Artificial Sequence
  Description of Artificial Sequence: Synthetic oligonucleotide
ucuagcagccagaguggua

SEQ ID NO: 157298 - RNA, 19 nt, Artificial Sequence
  Description of Artificial Sequence: Synthetic oligonucleotide
gcccguagagccauuaaag

SEQ ID NO: 157299 - RNA, 19 nt, Artificial Sequence
  Description of Artificial Sequence: Synthetic oligonucleotide
cugcacaacucggagggug

SEQ ID NO: 157300 - RNA, 19 nt, Artificial Sequence
  Description of Artificial Sequence: Synthetic oligonucleotide
aaggaucgaaucggacacu

SEQ ID NO: 157301 - RNA, 19 nt, Artificial Sequence
  Description of Artificial Sequence: Synthetic oligonucleotide
auugggguaguaccaucua

SEQ ID NO: 157302 - RNA, 19 nt, Artificial Sequence
  Description of Artificial Sequence: Synthetic oligonucleotide
gucuuaauccauaucguau

SEQ ID NO: 157303 - RNA, 19 nt, Artificial Sequence
  Description of Artificial Sequence: Synthetic oligonucleotide
cuucggcagaaacugugca

SEQ ID NO: 157304 - RNA, 19 nt, Artificial Sequence
  Description of Artificial Sequence: Synthetic oligonucleotide
cacgaggaaauuuaacaau

SEQ ID NO: 157305 - RNA, 19 nt, Artificial Sequence
  Description of Artificial Sequence: Synthetic oligonucleotide
cauuagccaaagugcucuc

SEQ ID NO: 157306 - RNA, 19 nt, Artificial Sequence
  Description of Artificial Sequence: Synthetic oligonucleotide
gugagugguuuaugcuggc

SEQ ID NO: 157307 - RNA, 19 nt, Artificial Sequence
  Description of Artificial Sequence: Synthetic oligonucleotide
ggguaacaggaucugacaa

SEQ ID NO: 157308 - RNA, 19 nt, Artificial Sequence
  Description of Artificial Sequence: Synthetic oligonucleotide
gaggagugaccagcucagg

SEQ ID NO: 157309 - RNA, 19 nt, Artificial Sequence
  Description of Artificial Sequence: Synthetic oligonucleotide
cagccgaagccuuccuuug

SEQ ID NO: 157310 - RNA, 19 nt, Artificial Sequence
  Description of Artificial Sequence: Synthetic oligonucleotide
cagaucaaacaacauuagu

SEQ ID NO: 157311 - RNA, 19 nt, Artificial Sequence
  Description of Artificial Sequence: Synthetic oligonucleotide
uacuagcuucggucaucag

SEQ ID NO: 157312 - RNA, 19 nt, Artificial Sequence
  Description of Artificial Sequence: Synthetic oligonucleotide
uugaggcagccgaagccuu

SEQ ID NO: 157313 - RNA, 19 nt, Artificial Sequence
  Description of Artificial Sequence: Synthetic oligonucleotide
ucuauaccacgggcaccag

SEQ ID NO: 157314 - RNA, 19 nt, Artificial Sequence
  Description of Artificial Sequence: Synthetic oligonucleotide
caauacaggcauuuccaau

SEQ ID NO: 157315 - RNA, 19 nt, Artificial Sequence
  Description of Artificial Sequence: Synthetic oligonucleotide
accagaguuuguguccuaa

SEQ ID NO: 157316 - RNA, 19 nt, Artificial Sequence
  Description of Artificial Sequence: Synthetic oligonucleotide
auccugugcaugguuacua

SEQ ID NO: 157317 - RNA, 19 nt, Artificial Sequence
  Description of Artificial Sequence: Synthetic oligonucleotide
gugcuauuuuaauuaggau

SEQ ID NO: 157318 - RNA, 19 nt, Artificial Sequence
  Description of Artificial Sequence: Synthetic oligonucleotide
gguaacaggaucugacaau

SEQ ID NO: 157319 - RNA, 19 nt, Artificial Sequence
  Description of Artificial Sequence: Synthetic oligonucleotide
ggaguggacauuucauaua

SEQ ID NO: 157320 - RNA, 19 nt, Artificial Sequence
  Description of Artificial Sequence: Synthetic oligonucleotide
aaccagaguuuguguccua

SEQ ID NO: 157321 - RNA, 19 nt, Artificial Sequence
  Description of Artificial Sequence: Synthetic oligonucleotide
caugguuacuagcuucggu

SEQ ID NO: 157322 - RNA, 19 nt, Artificial Sequence
  Description of Artificial Sequence: Synthetic oligonucleotide
gcuggcauaugaccauuca

SEQ ID NO: 157323 - RNA, 19 nt, Artificial Sequence
  Description of Artificial Sequence: Synthetic oligonucleotide
uuggacuacuggugauauu

SEQ ID NO: 157324 - RNA, 19 nt, Artificial Sequence
  Description of Artificial Sequence: Synthetic oligonucleotide
cuuugcuccugcccaaagu

SEQ ID NO: 157325 - RNA, 19 nt, Artificial Sequence
  Description of Artificial Sequence: Synthetic oligonucleotide
ccauaucguauugggguag

SEQ ID NO: 157326 - RNA, 19 nt, Artificial Sequence
  Description of Artificial Sequence: Synthetic oligonucleotide
ccguagagccauuaaagua

SEQ ID NO: 157327 - RNA, 19 nt, Artificial Sequence
  Description of Artificial Sequence: Synthetic oligonucleotide
ccauuacuauagccauugc

SEQ ID NO: 157328 - RNA, 19 nt, Artificial Sequence
  Description of Artificial Sequence: Synthetic oligonucleotide
auaucguauugggguagua

SEQ ID NO: 157329 - RNA, 19 nt, Artificial Sequence
  Description of Artificial Sequence: Synthetic oligonucleotide
gcuaccugcucaacuaaaa

SEQ ID NO: 157330 - RNA, 19 nt, Artificial Sequence
  Description of Artificial Sequence: Synthetic oligonucleotide
gggugaauggauacugaua

SEQ ID NO: 157331 - RNA, 19 nt, Artificial Sequence
  Description of Artificial Sequence: Synthetic oligonucleotide
aguccgugggcugcuguua

SEQ ID NO: 157332 - RNA, 19 nt, Artificial Sequence
  Description of Artificial Sequence: Synthetic oligonucleotide
gcacgaaauugcauauaga

SEQ ID NO: 157333 - RNA, 19 nt, Artificial Sequence
  Description of Artificial Sequence: Synthetic oligonucleotide
cugcuaguucuugaauuua

SEQ ID NO: 157334 - RNA, 19 nt, Artificial Sequence
  Description of Artificial Sequence: Synthetic oligonucleotide
acagcccguagagccauua

SEQ ID NO: 157335 - RNA, 19 nt, Artificial Sequence
  Description of Artificial Sequence: Synthetic oligonucleotide
ggacacuuauaugcccaca

SEQ ID NO: 157336 - RNA, 19 nt, Artificial Sequence
  Description of Artificial Sequence: Synthetic oligonucleotide
caaggugaaugaaguuaau

SEQ ID NO: 157337 - RNA, 19 nt, Artificial Sequence
  Description of Artificial Sequence: Synthetic oligonucleotide
cauaucguauugggguagu

SEQ ID NO: 157338 - RNA, 19 nt, Artificial Sequence
  Description of Artificial Sequence: Synthetic oligonucleotide
cccguagagccauuaaagu

SEQ ID NO: 157339 - RNA, 19 nt, Artificial Sequence
  Description of Artificial Sequence: Synthetic oligonucleotide
gcauaugaccauucaccau

SEQ ID NO: 157340 - RNA, 19 nt, Artificial Sequence
  Description of Artificial Sequence: Synthetic oligonucleotide
cggacacuuauaugcccac

SEQ ID NO: 157341 - RNA, 19 nt, Artificial Sequence
  Description of Artificial Sequence: Synthetic oligonucleotide
ccagaguuuguguccuaaa

SEQ ID NO: 157342 - RNA, 19 nt, Artificial Sequence
  Description of Artificial Sequence: Synthetic oligonucleotide
cuccuuacuacuggacaau

SEQ ID NO: 157343 - RNA, 19 nt, Artificial Sequence
  Description of Artificial Sequence: Synthetic oligonucleotide
gguacacgccauauacaau

SEQ ID NO: 157344 - RNA, 19 nt, Artificial Sequence
  Description of Artificial Sequence: Synthetic oligonucleotide
ccuuacuacuggacaauuu

SEQ ID NO: 157345 - RNA, 19 nt, Artificial Sequence
  Description of Artificial Sequence: Synthetic oligonucleotide
ggcugccucccaacauaug

SEQ ID NO: 157346 - RNA, 19 nt, Artificial Sequence
  Description of Artificial Sequence: Synthetic oligonucleotide
cuauccccugcugcucaua

SEQ ID NO: 157347 - RNA, 19 nt, Artificial Sequence
  Description of Artificial Sequence: Synthetic oligonucleotide
cacaacucggagggugaau

SEQ ID NO: 157348 - RNA, 19 nt, Artificial Sequence
  Description of Artificial Sequence: Synthetic oligonucleotide
gcacaacucggagggugaa

SEQ ID NO: 157349 - RNA, 19 nt, Artificial Sequence
  Description of Artificial Sequence: Synthetic oligonucleotide
ccagagugguagcuuuacu

SEQ ID NO: 157350 - RNA, 19 nt, Artificial Sequence
  Description of Artificial Sequence: Synthetic oligonucleotide
cagccugugcucgccgacu

SEQ ID NO: 157351 - RNA, 19 nt, Artificial Sequence
  Description of Artificial Sequence: Synthetic oligonucleotide
uguuauacaccuuacagcc

SEQ ID NO: 157352 - RNA, 19 nt, Artificial Sequence
  Description of Artificial Sequence: Synthetic oligonucleotide
auuagaguacugcuuaugc

SEQ ID NO: 157353 - RNA, 19 nt, Artificial Sequence
  Description of Artificial Sequence: Synthetic oligonucleotide
uaguugauugcaaaugucg

SEQ ID NO: 157354 - RNA, 19 nt, Artificial Sequence
  Description of Artificial Sequence: Synthetic oligonucleotide
gaacaaaggagauuguggg

SEQ ID NO: 157355 - RNA, 19 nt, Artificial Sequence
  Description of Artificial Sequence: Synthetic oligonucleotide
ucuauuaucucuauucgac

SEQ ID NO: 157356 - RNA, 19 nt, Artificial Sequence
  Description of Artificial Sequence: Synthetic oligonucleotide
aaugcuuuguucuuagaca

SEQ ID NO: 157357 - RNA, 19 nt, Artificial Sequence
  Description of Artificial Sequence: Synthetic oligonucleotide
acuagugaguuacaauucc

SEQ ID NO: 157358 - RNA, 19 nt, Artificial Sequence
  Description of Artificial Sequence: Synthetic oligonucleotide
ucuauuaggacuucaaauc

SEQ ID NO: 157359 - RNA, 19 nt, Artificial Sequence
  Description of Artificial Sequence: Synthetic oligonucleotide
aaaugaaagguuaauuauc

SEQ ID NO: 157360 - RNA, 19 nt, Artificial Sequence
  Description of Artificial Sequence: Synthetic oligonucleotide
uuauguauguuuuaccucu

SEQ ID NO: 157361 - RNA, 19 nt, Artificial Sequence
  Description of Artificial Sequence: Synthetic oligonucleotide
aagaccuacucauucacag

SEQ ID NO: 157362 - RNA, 19 nt, Artificial Sequence
  Description of Artificial Sequence: Synthetic oligonucleotide
ucaaauauuuaaguugagg

SEQ ID NO: 157363 - RNA, 19 nt, Artificial Sequence
  Description of Artificial Sequence: Synthetic oligonucleotide
ucuaaaagacccuaguccu

SEQ ID NO: 157364 - RNA, 19 nt, Artificial Sequence
  Description of Artificial Sequence: Synthetic oligonucleotide
aaauauuuaaguugagguu

SEQ ID NO: 157365 - RNA, 19 nt, Artificial Sequence
  Description of Artificial Sequence: Synthetic oligonucleotide
agaauguccacacuaagca

SEQ ID NO: 157366 - RNA, 19 nt, Artificial Sequence
  Description of Artificial Sequence: Synthetic oligonucleotide
caucgaagaaaucaugugg

SEQ ID NO: 157367 - RNA, 19 nt, Artificial Sequence
  Description of Artificial Sequence: Synthetic oligonucleotide
aaugucguucacuguuugc

SEQ ID NO: 157368 - RNA, 19 nt, Artificial Sequence
  Description of Artificial Sequence: Synthetic oligonucleotide
aaagauucgguuugaagau

SEQ ID NO: 157369 - RNA, 19 nt, Artificial Sequence
  Description of Artificial Sequence: Synthetic oligonucleotide
uagugaguuacaauucccg

SEQ ID NO: 157370 - RNA, 19 nt, Artificial Sequence
  Description of Artificial Sequence: Synthetic oligonucleotide
uuuguuagcaaucccucug

SEQ ID NO: 157371 - RNA, 19 nt, Artificial Sequence
  Description of Artificial Sequence: Synthetic oligonucleotide
uuacucuaaauacuggacu

SEQ ID NO: 157372 - RNA, 19 nt, Artificial Sequence
  Description of Artificial Sequence: Synthetic oligonucleotide
aaacgaacaccccuccgcg

SEQ ID NO: 157373 - RNA, 19 nt, Artificial Sequence
  Description of Artificial Sequence: Synthetic oligonucleotide
agaugaguaucucacagug

SEQ ID NO: 157374 - RNA, 19 nt, Artificial Sequence
  Description of Artificial Sequence: Synthetic oligonucleotide
aguaagaacacacugcuuu

SEQ ID NO: 157375 - RNA, 19 nt, Artificial Sequence
  Description of Artificial Sequence: Synthetic oligonucleotide
uggcuagaaacuuuugagg

SEQ ID NO: 157376 - RNA, 19 nt, Artificial Sequence
  Description of Artificial Sequence: Synthetic oligonucleotide
uauuaauauauuccacaga

SEQ ID NO: 157377 - RNA, 19 nt, Artificial Sequence
  Description of Artificial Sequence: Synthetic oligonucleotide
aaucacaucuauuuaucau

SEQ ID NO: 157378 - RNA, 19 nt, Artificial Sequence
  Description of Artificial Sequence: Synthetic oligonucleotide
ucaauauuaguucuaccau

SEQ ID NO: 157379 - RNA, 19 nt, Artificial Sequence
  Description of Artificial Sequence: Synthetic oligonucleotide
gaccuaauucgauagauga

SEQ ID NO: 157380 - RNA, 19 nt, Artificial Sequence
  Description of Artificial Sequence: Synthetic oligonucleotide
uugaauuguuacaauuuga

SEQ ID NO: 157381 - RNA, 19 nt, Artificial Sequence
  Description of Artificial Sequence: Synthetic oligonucleotide
uuuguuugauacaguacug

SEQ ID NO: 157382 - RNA, 19 nt, Artificial Sequence
  Description of Artificial Sequence: Synthetic oligonucleotide
gguuaaagcauauggcucg

SEQ ID NO: 157383 - RNA, 19 nt, Artificial Sequence
  Description of Artificial Sequence: Synthetic oligonucleotide
ugaccaucuacguguaugg

SEQ ID NO: 157384 - RNA, 19 nt, Artificial Sequence
  Description of Artificial Sequence: Synthetic oligonucleotide
cugucuacguccauuagag

SEQ ID NO: 157385 - RNA, 19 nt, Artificial Sequence
  Description of Artificial Sequence: Synthetic oligonucleotide
uacggcaacacucuguaac

SEQ ID NO: 157386 - RNA, 19 nt, Artificial Sequence
  Description of Artificial Sequence: Synthetic oligonucleotide
uuaauuaucucuugauaau

SEQ ID NO: 157387 - RNA, 19 nt, Artificial Sequence
  Description of Artificial Sequence: Synthetic oligonucleotide
augacuuacaagaacauga

SEQ ID NO: 157388 - RNA, 19 nt, Artificial Sequence
  Description of Artificial Sequence: Synthetic oligonucleotide
uaaagcauauggcucgaug

SEQ ID NO: 157389 - RNA, 19 nt, Artificial Sequence
  Description of Artificial Sequence: Synthetic oligonucleotide
ucuacguccauuagaguac

SEQ ID NO: 157390 - RNA, 19 nt, Artificial Sequence
  Description of Artificial Sequence: Synthetic oligonucleotide
ugagccgagagguuaaagc

SEQ ID NO: 157391 - RNA, 19 nt, Artificial Sequence
  Description of Artificial Sequence: Synthetic oligonucleotide
uggugcauaaaagauucgg

SEQ ID NO: 157392 - RNA, 19 nt, Artificial Sequence
  Description of Artificial Sequence: Synthetic oligonucleotide
ucucuuagcuauuacagua

SEQ ID NO: 157393 - RNA, 19 nt, Artificial Sequence
  Description of Artificial Sequence: Synthetic oligonucleotide
ucuauucgacauuuguuug

SEQ ID NO: 157394 - RNA, 19 nt, Artificial Sequence
  Description of Artificial Sequence: Synthetic oligonucleotide
aaaugaguaaugaucuaug

SEQ ID NO: 157395 - RNA, 19 nt, Artificial Sequence
  Description of Artificial Sequence: Synthetic oligonucleotide
guguuauacaccuuacagc

SEQ ID NO: 157396 - RNA, 19 nt, Artificial Sequence
  Description of Artificial Sequence: Synthetic oligonucleotide
aauucgauagaugaauuuu

SEQ ID NO: 157397 - RNA, 19 nt, Artificial Sequence
  Description of Artificial Sequence: Synthetic oligonucleotide
ugcgugccaagcaagaaug

SEQ ID NO: 157398 - RNA, 19 nt, Artificial Sequence
  Description of Artificial Sequence: Synthetic oligonucleotide
aauugaauuguuacaauuu

SEQ ID NO: 157399 - RNA, 19 nt, Artificial Sequence
  Description of Artificial Sequence: Synthetic oligonucleotide
uauuaucucuauucgacau

SEQ ID NO: 157400 - RNA, 19 nt, Artificial Sequence
  Description of Artificial Sequence: Synthetic oligonucleotide
aauguuggcuguguauuuc

SEQ ID NO: 157401 - RNA, 19 nt, Artificial Sequence
  Description of Artificial Sequence: Synthetic oligonucleotide
aguaaugaucuaugcauca

SEQ ID NO: 157402 - RNA, 19 nt, Artificial Sequence
  Description of Artificial Sequence: Synthetic oligonucleotide
cucagaccuaauucgauag

SEQ ID NO: 157403 - RNA, 19 nt, Artificial Sequence
  Description of Artificial Sequence: Synthetic oligonucleotide
uugacggaguguuauacac

SEQ ID NO: 157404 - RNA, 19 nt, Artificial Sequence
  Description of Artificial Sequence: Synthetic oligonucleotide
uagaguugaagcacgccug

SEQ ID NO: 157405 - RNA, 19 nt, Artificial Sequence
  Description of Artificial Sequence: Synthetic oligonucleotide
guggucgugguaaugagcg

SEQ ID NO: 157406 - RNA, 19 nt, Artificial Sequence
  Description of Artificial Sequence: Synthetic oligonucleotide
uaagcaaaugaguaaugau

SEQ ID NO: 157407 - RNA, 19 nt, Artificial Sequence
  Description of Artificial Sequence: Synthetic oligonucleotide
uucguucacccacacaucu

SEQ ID NO: 157408 - RNA, 19 nt, Artificial Sequence
  Description of Artificial Sequence: Synthetic oligonucleotide
aacgaacaccccuccgcgc

SEQ ID NO: 157409 - RNA, 19 nt, Artificial Sequence
  Description of Artificial Sequence: Synthetic oligonucleotide
ugucccuucccuaaacucu

SEQ ID NO: 157410 - RNA, 19 nt, Artificial Sequence
  Description of Artificial Sequence: Synthetic oligonucleotide
uauuaggacuucaaaucaa

SEQ ID NO: 157411 - RNA, 19 nt, Artificial Sequence
  Description of Artificial Sequence: Synthetic oligonucleotide
gacaccacgcuacugcugc

SEQ ID NO: 157412 - RNA, 19 nt, Artificial Sequence
  Description of Artificial Sequence: Synthetic oligonucleotide
caaacgaacaccccuccgc

SEQ ID NO: 157413 - RNA, 19 nt, Artificial Sequence
  Description of Artificial Sequence: Synthetic oligonucleotide
ucucuaugugagccgagag

SEQ ID NO: 157414 - RNA, 19 nt, Artificial Sequence
  Description of Artificial Sequence: Synthetic oligonucleotide
acguccauuagaguacugc

SEQ ID NO: 157415 - RNA, 19 nt, Artificial Sequence
  Description of Artificial Sequence: Synthetic oligonucleotide
uugaagcuaaaugugauuu

SEQ ID NO: 157416 - RNA, 19 nt, Artificial Sequence
  Description of Artificial Sequence: Synthetic oligonucleotide
acucuaaugugcaacuuuc

SEQ ID NO: 157417 - RNA, 19 nt, Artificial Sequence
  Description of Artificial Sequence: Synthetic oligonucleotide
agugacuaagacugcagga

SEQ ID NO: 157418 - RNA, 19 nt, Artificial Sequence
  Description of Artificial Sequence: Synthetic oligonucleotide
ggaacaaaggagauugugg

SEQ ID NO: 157419 - RNA, 19 nt, Artificial Sequence
  Description of Artificial Sequence: Synthetic oligonucleotide
agauucgguuugaagauac

SEQ ID NO: 157420 - RNA, 19 nt, Artificial Sequence
  Description of Artificial Sequence: Synthetic oligonucleotide
acaagcaacgcucuauuau

SEQ ID NO: 157421 - RNA, 19 nt, Artificial Sequence
  Description of Artificial Sequence: Synthetic oligonucleotide
gacccuaguccugaaaagg

SEQ ID NO: 157422 - RNA, 19 nt, Artificial Sequence
  Description of Artificial Sequence: Synthetic oligonucleotide
aauacucaagcaaagucua

SEQ ID NO: 157423 - RNA, 19 nt, Artificial Sequence
  Description of Artificial Sequence: Synthetic oligonucleotide
uucgguuugaagauacuuu

SEQ ID NO: 157424 - RNA, 19 nt, Artificial Sequence
  Description of Artificial Sequence: Synthetic oligonucleotide
cuauuaggacuucaaauca

SEQ ID NO: 157425 - RNA, 19 nt, Artificial Sequence
  Description of Artificial Sequence: Synthetic oligonucleotide
aagauguagugcucccuug

SEQ ID NO: 157426 - RNA, 19 nt, Artificial Sequence
  Description of Artificial Sequence: Synthetic oligonucleotide
auggcucgaugucuuaugg

SEQ ID NO: 157427 - RNA, 19 nt, Artificial Sequence
  Description of Artificial Sequence: Synthetic oligonucleotide
cacacugucaagaugagua

SEQ ID NO: 157428 - RNA, 19 nt, Artificial Sequence
  Description of Artificial Sequence: Synthetic oligonucleotide
aguuauguaaguaaauaua

SEQ ID NO: 157429 - RNA, 19 nt, Artificial Sequence
  Description of Artificial Sequence: Synthetic oligonucleotide
caagcaacgcucuauuauc

SEQ ID NO: 157430 - RNA, 19 nt, Artificial Sequence
  Description of Artificial Sequence: Synthetic oligonucleotide
uaaaagacccuaguccuga

SEQ ID NO: 157431 - RNA, 19 nt, Artificial Sequence
  Description of Artificial Sequence: Synthetic oligonucleotide
agcuauuacaguacuauga

SEQ ID NO: 157432 - RNA, 19 nt, Artificial Sequence
  Description of Artificial Sequence: Synthetic oligonucleotide
agugaguuacaauucccgu

SEQ ID NO: 157433 - RNA, 19 nt, Artificial Sequence
  Description of Artificial Sequence: Synthetic oligonucleotide
ucaagaugaguaucucaca

SEQ ID NO: 157434 - RNA, 19 nt, Artificial Sequence
  Description of Artificial Sequence: Synthetic oligonucleotide
auugcagccaccaacuaca

SEQ ID NO: 157435 - RNA, 19 nt, Artificial Sequence
  Description of Artificial Sequence: Synthetic oligonucleotide
uguauggaacggauguggu

SEQ ID NO: 157436 - RNA, 19 nt, Artificial Sequence
  Description of Artificial Sequence: Synthetic oligonucleotide
uguggucgugguaaugagc

SEQ ID NO: 157437 - RNA, 19 nt, Artificial Sequence
  Description of Artificial Sequence: Synthetic oligonucleotide
gcucuauuaucucuauucg

SEQ ID NO: 157438 - RNA, 19 nt, Artificial Sequence
  Description of Artificial Sequence: Synthetic oligonucleotide
uucccgucaauauuaguuc

SEQ ID NO: 157439 - RNA, 19 nt, Artificial Sequence
  Description of Artificial Sequence: Synthetic oligonucleotide
uaauucgauagaugaauuu

SEQ ID NO: 157440 - RNA, 19 nt, Artificial Sequence
  Description of Artificial Sequence: Synthetic oligonucleotide
ugacggaguguuauacacc

SEQ ID NO: 157441 - RNA, 19 nt, Artificial Sequence
  Description of Artificial Sequence: Synthetic oligonucleotide
agcuuaagcagcgagcaug

SEQ ID NO: 157442 - RNA, 19 nt, Artificial Sequence
  Description of Artificial Sequence: Synthetic oligonucleotide
uacaaaucugcugaauuau

SEQ ID NO: 157443 - RNA, 19 nt, Artificial Sequence
  Description of Artificial Sequence: Synthetic oligonucleotide
aucgaagaaaucauguggu

SEQ ID NO: 157444 - RNA, 19 nt, Artificial Sequence
  Description of Artificial Sequence: Synthetic oligonucleotide
uuguucgucuuuccaauaa

SEQ ID NO: 157445 - RNA, 19 nt, Artificial Sequence
  Description of Artificial Sequence: Synthetic oligonucleotide
cagugacuaagacugcagg

SEQ ID NO: 157446 - RNA, 19 nt, Artificial Sequence
  Description of Artificial Sequence: Synthetic oligonucleotide
aaacgaugaagugcuuaag

SEQ ID NO: 157447 - RNA, 19 nt, Artificial Sequence
  Description of Artificial Sequence: Synthetic oligonucleotide
cuaaacucucuaugugagc

SEQ ID NO: 157448 - RNA, 19 nt, Artificial Sequence
  Description of Artificial Sequence: Synthetic oligonucleotide
uuggugcauaaaagauucg

SEQ ID NO: 157449 - RNA, 19 nt, Artificial Sequence
  Description of Artificial Sequence: Synthetic oligonucleotide
uauggcucgaugucuuaug

SEQ ID NO: 157450 - RNA, 19 nt, Artificial Sequence
  Description of Artificial Sequence: Synthetic oligonucleotide
acagacauacggcaacacu

SEQ ID NO: 157451 - RNA, 19 nt, Artificial Sequence
  Description of Artificial Sequence: Synthetic oligonucleotide
ggugccguagcccucgucg

SEQ ID NO: 157452 - RNA, 19 nt, Artificial Sequence
  Description of Artificial Sequence: Synthetic oligonucleotide
gaguugaacgcccacugga

SEQ ID NO: 157453 - RNA, 19 nt, Artificial Sequence
  Description of Artificial Sequence: Synthetic oligonucleotide
ugauugcaaaugucguuca

SEQ ID NO: 157454 - RNA, 19 nt, Artificial Sequence
  Description of Artificial Sequence: Synthetic oligonucleotide
gucuacguccauuagagua

SEQ ID NO: 157455 - RNA, 19 nt, Artificial Sequence
  Description of Artificial Sequence: Synthetic oligonucleotide
ugcuuaagcaaaagauaaa

SEQ ID NO: 157456 - RNA, 19 nt, Artificial Sequence
  Description of Artificial Sequence: Synthetic oligonucleotide
cuagcccucccugagaagc

SEQ ID NO: 157457 - RNA, 19 nt, Artificial Sequence
  Description of Artificial Sequence: Synthetic oligonucleotide
aguucuaccauaauauaua

SEQ ID NO: 157458 - RNA, 19 nt, Artificial Sequence
  Description of Artificial Sequence: Synthetic oligonucleotide
aauucccgucaauauuagu

SEQ ID NO: 157459 - RNA, 19 nt, Artificial Sequence
  Description of Artificial Sequence: Synthetic oligonucleotide
ucagaccuaauucgauaga

SEQ ID NO: 157460 - RNA, 19 nt, Artificial Sequence
  Description of Artificial Sequence: Synthetic oligonucleotide
caucuacguguauggaacg

SEQ ID NO: 157461 - RNA, 19 nt, Artificial Sequence
  Description of Artificial Sequence: Synthetic oligonucleotide
agacccuaguccugaaaag

SEQ ID NO: 157462 - RNA, 19 nt, Artificial Sequence
  Description of Artificial Sequence: Synthetic oligonucleotide
agcaacgcucuauuaucuc

SEQ ID NO: 157463 - RNA, 19 nt, Artificial Sequence
  Description of Artificial Sequence: Synthetic oligonucleotide
ggcuagaaacuuuugagga

SEQ ID NO: 157464 - RNA, 19 nt, Artificial Sequence
  Description of Artificial Sequence: Synthetic oligonucleotide
uguaaucacuaaggggaag

SEQ ID NO: 157465 - RNA, 19 nt, Artificial Sequence
  Description of Artificial Sequence: Synthetic oligonucleotide
cauugcagccaccaacuac

SEQ ID NO: 157466 - RNA, 19 nt, Artificial Sequence
  Description of Artificial Sequence: Synthetic oligonucleotide
cacuagugaguuacaauuc

SEQ ID NO: 157467 - RNA, 19 nt, Artificial Sequence
  Description of Artificial Sequence: Synthetic oligonucleotide
agauguagugcucccuugu

SEQ ID NO: 157468 - RNA, 19 nt, Artificial Sequence
  Description of Artificial Sequence: Synthetic oligonucleotide
auucccgucaauauuaguu

SEQ ID NO: 157469 - RNA, 19 nt, Artificial Sequence
  Description of Artificial Sequence: Synthetic oligonucleotide
cuguaccccaucuaaaaga

SEQ ID NO: 157470 - RNA, 19 nt, Artificial Sequence
  Description of Artificial Sequence: Synthetic oligonucleotide
agaauggaacaaacgauga

SEQ ID NO: 157471 - RNA, 19 nt, Artificial Sequence
  Description of Artificial Sequence: Synthetic oligonucleotide
cuauuaucucuauucgaca

SEQ ID NO: 157472 - RNA, 19 nt, Artificial Sequence
  Description of Artificial Sequence: Synthetic oligonucleotide
ucuacguguauggaacgga

SEQ ID NO: 157473 - RNA, 19 nt, Artificial Sequence
  Description of Artificial Sequence: Synthetic oligonucleotide
aaggugcuuuguuagcaau

SEQ ID NO: 157474 - RNA, 19 nt, Artificial Sequence
  Description of Artificial Sequence: Synthetic oligonucleotide
ucucagaccuaauucgaua

SEQ ID NO: 157475 - RNA, 19 nt, Artificial Sequence
  Description of Artificial Sequence: Synthetic oligonucleotide
gugcuuaagcaaaagauaa

SEQ ID NO: 157476 - RNA, 19 nt, Artificial Sequence
  Description of Artificial Sequence: Synthetic oligonucleotide
ugggcuagaguugaagcac

SEQ ID NO: 157477 - RNA, 19 nt, Artificial Sequence
  Description of Artificial Sequence: Synthetic oligonucleotide
ucccaacaacaauuauagg

SEQ ID NO: 157478 - RNA, 19 nt, Artificial Sequence
  Description of Artificial Sequence: Synthetic oligonucleotide
aguugauugcaaaugucgu

SEQ ID NO: 157479 - RNA, 19 nt, Artificial Sequence
  Description of Artificial Sequence: Synthetic oligonucleotide
accaucuacguguauggaa

SEQ ID NO: 157480 - RNA, 19 nt, Artificial Sequence
  Description of Artificial Sequence: Synthetic oligonucleotide
guuacaauucccgucaaua

SEQ ID NO: 157481 - RNA, 19 nt, Artificial Sequence
  Description of Artificial Sequence: Synthetic oligonucleotide
aguacacaaucccuucagu

SEQ ID NO: 157482 - RNA, 19 nt, Artificial Sequence
  Description of Artificial Sequence: Synthetic oligonucleotide
aacucucuaugugagccga

SEQ ID NO: 157483 - RNA, 19 nt, Artificial Sequence
  Description of Artificial Sequence: Synthetic oligonucleotide
uugaacgcccacuggaaau

SEQ ID NO: 157484 - RNA, 19 nt, Artificial Sequence
  Description of Artificial Sequence: Synthetic oligonucleotide
gacggaguguuauacaccu

SEQ ID NO: 157485 - RNA, 19 nt, Artificial Sequence
  Description of Artificial Sequence: Synthetic oligonucleotide
acagaauggaacaaacgau

SEQ ID NO: 157486 - RNA, 19 nt, Artificial Sequence
  Description of Artificial Sequence: Synthetic oligonucleotide
caauuaagaaugacuuaca

SEQ ID NO: 157487 - RNA, 19 nt, Artificial Sequence
  Description of Artificial Sequence: Synthetic oligonucleotide
uggcagauacagaauggaa

SEQ ID NO: 157488 - RNA, 19 nt, Artificial Sequence
  Description of Artificial Sequence: Synthetic oligonucleotide
cugaccaucuacguguaug

SEQ ID NO: 157489 - RNA, 19 nt, Artificial Sequence
  Description of Artificial Sequence: Synthetic oligonucleotide
guaaucacuaaggggaaga

SEQ ID NO: 157490 - RNA, 19 nt, Artificial Sequence
  Description of Artificial Sequence: Synthetic oligonucleotide
ucccgucaauauuaguucu

SEQ ID NO: 157491 - RNA, 19 nt, Artificial Sequence
  Description of Artificial Sequence: Synthetic oligonucleotide
cuauucgacauuuguuuga

SEQ ID NO: 157492 - RNA, 19 nt, Artificial Sequence
  Description of Artificial Sequence: Synthetic oligonucleotide
accacgcuacugcugcuac

SEQ ID NO: 157493 - RNA, 19 nt, Artificial Sequence
  Description of Artificial Sequence: Synthetic oligonucleotide
acccuaguccugaaaaggg

SEQ ID NO: 157494 - RNA, 19 nt, Artificial Sequence
  Description of Artificial Sequence: Synthetic oligonucleotide
aucuacguguauggaacgg

SEQ ID NO: 157495 - RNA, 19 nt, Artificial Sequence
  Description of Artificial Sequence: Synthetic oligonucleotide
agauugugggguacuuggc

SEQ ID NO: 157496 - RNA, 19 nt, Artificial Sequence
  Description of Artificial Sequence: Synthetic oligonucleotide
uucucagaccuaauucgau

SEQ ID NO: 157497 - RNA, 19 nt, Artificial Sequence
  Description of Artificial Sequence: Synthetic oligonucleotide
ccaucuacguguauggaac

SEQ ID NO: 157498 - RNA, 19 nt, Artificial Sequence
  Description of Artificial Sequence: Synthetic oligonucleotide
agcacuagugaguuacaau

SEQ ID NO: 157499 - RNA, 19 nt, Artificial Sequence
  Description of Artificial Sequence: Synthetic oligonucleotide
uaucucuauucgacauuug

SEQ ID NO: 157500 - RNA, 19 nt, Artificial Sequence
  Description of Artificial Sequence: Synthetic oligonucleotide
aagcaacgcucuauuaucu

SEQ ID NO: 157501 - RNA, 19 nt, Artificial Sequence
  Description of Artificial Sequence: Synthetic oligonucleotide
ugaagcacgccuggcacug

SEQ ID NO: 157502 - RNA, 19 nt, Artificial Sequence
  Description of Artificial Sequence: Synthetic oligonucleotide
acaguaguacacaaucccu

SEQ ID NO: 157503 - RNA, 19 nt, Artificial Sequence
  Description of Artificial Sequence: Synthetic oligonucleotide
agucuacaaucaucgguca

SEQ ID NO: 157504 - RNA, 19 nt, Artificial Sequence
  Description of Artificial Sequence: Synthetic oligonucleotide
gaaaucauguggucguggu

SEQ ID NO: 157505 - RNA, 19 nt, Artificial Sequence
  Description of Artificial Sequence: Synthetic oligonucleotide
cauuagaguacugcuuaug

SEQ ID NO: 157506 - RNA, 19 nt, Artificial Sequence
  Description of Artificial Sequence: Synthetic oligonucleotide
auuaggacuucaaaucaau

SEQ ID NO: 157507 - RNA, 19 nt, Artificial Sequence
  Description of Artificial Sequence: Synthetic oligonucleotide
auacucaagcaaagucuac

SEQ ID NO: 157508 - RNA, 19 nt, Artificial Sequence
  Description of Artificial Sequence: Synthetic oligonucleotide
gacauacggcaacacucug

SEQ ID NO: 157509 - RNA, 19 nt, Artificial Sequence
  Description of Artificial Sequence: Synthetic oligonucleotide
ugcugucuacguccauuag

SEQ ID NO: 157510 - RNA, 19 nt, Artificial Sequence
  Description of Artificial Sequence: Synthetic oligonucleotide
agaccuacucauucacaga

SEQ ID NO: 157511 - RNA, 19 nt, Artificial Sequence
  Description of Artificial Sequence: Synthetic oligonucleotide
guaggagugguccucccuc

SEQ ID NO: 157512 - RNA, 19 nt, Artificial Sequence
  Description of Artificial Sequence: Synthetic oligonucleotide
acgaacaccccuccgcgcu

SEQ ID NO: 157513 - RNA, 19 nt, Artificial Sequence
  Description of Artificial Sequence: Synthetic oligonucleotide
cuagaguugaagcacgccu

SEQ ID NO: 157514 - RNA, 19 nt, Artificial Sequence
  Description of Artificial Sequence: Synthetic oligonucleotide
uuuggguagcuuugauaaa

SEQ ID NO: 157515 - RNA, 19 nt, Artificial Sequence
  Description of Artificial Sequence: Synthetic oligonucleotide
agacauacggcaacacucu

SEQ ID NO: 157516 - RNA, 19 nt, Artificial Sequence
  Description of Artificial Sequence: Synthetic oligonucleotide
uauguauguuuuaccucuu

SEQ ID NO: 157517 - RNA, 19 nt, Artificial Sequence
  Description of Artificial Sequence: Synthetic oligonucleotide
guugacggaguguuauaca

SEQ ID NO: 157518 - RNA, 19 nt, Artificial Sequence
  Description of Artificial Sequence: Synthetic oligonucleotide
agaccuaauucgauagaug

SEQ ID NO: 157519 - RNA, 19 nt, Artificial Sequence
  Description of Artificial Sequence: Synthetic oligonucleotide
cucuauucgacauuuguuu

SEQ ID NO: 157520 - RNA, 19 nt, Artificial Sequence
  Description of Artificial Sequence: Synthetic oligonucleotide
guauggaacggaugugguc

SEQ ID NO: 157521 - RNA, 19 nt, Artificial Sequence
  Description of Artificial Sequence: Synthetic oligonucleotide
uccccgucggacgacaucu

SEQ ID NO: 157522 - RNA, 19 nt, Artificial Sequence
  Description of Artificial Sequence: Synthetic oligonucleotide
auucgguuugaagauacuu

SEQ ID NO: 157523 - RNA, 19 nt, Artificial Sequence
  Description of Artificial Sequence: Synthetic oligonucleotide
cugggcuagaguugaagca

SEQ ID NO: 157524 - RNA, 19 nt, Artificial Sequence
  Description of Artificial Sequence: Synthetic oligonucleotide
uucugcggcauuguucugu

SEQ ID NO: 157525 - RNA, 19 nt, Artificial Sequence
  Description of Artificial Sequence: Synthetic oligonucleotide
uguccaaugcuuuguucuu

SEQ ID NO: 157526 - RNA, 19 nt, Artificial Sequence
  Description of Artificial Sequence: Synthetic oligonucleotide
ucgacaccacgcuacugcu

SEQ ID NO: 157527 - RNA, 19 nt, Artificial Sequence
  Description of Artificial Sequence: Synthetic oligonucleotide
cagaagaccuacucauuca

SEQ ID NO: 157528 - RNA, 19 nt, Artificial Sequence
  Description of Artificial Sequence: Synthetic oligonucleotide
ucguucacuuucguucacc

SEQ ID NO: 157529 - RNA, 19 nt, Artificial Sequence
  Description of Artificial Sequence: Synthetic oligonucleotide
aguuacaauucccgucaau

SEQ ID NO: 157530 - RNA, 19 nt, Artificial Sequence
  Description of Artificial Sequence: Synthetic oligonucleotide
guacguggcgagcuagccc

SEQ ID NO: 157531 - RNA, 19 nt, Artificial Sequence
  Description of Artificial Sequence: Synthetic oligonucleotide
gcaauauguuugcuugaag

SEQ ID NO: 157532 - RNA, 19 nt, Artificial Sequence
  Description of Artificial Sequence: Synthetic oligonucleotide
aagcaagaaugugauuuua

SEQ ID NO: 157533 - RNA, 19 nt, Artificial Sequence
  Description of Artificial Sequence: Synthetic oligonucleotide
aggcaauauguuugcuuga

SEQ ID NO: 157534 - RNA, 19 nt, Artificial Sequence
  Description of Artificial Sequence: Synthetic oligonucleotide
gucgugguaaugagcgccg

SEQ ID NO: 157535 - RNA, 19 nt, Artificial Sequence
  Description of Artificial Sequence: Synthetic oligonucleotide
ugcuuaugcuguccuccga

SEQ ID NO: 157536 - RNA, 19 nt, Artificial Sequence
  Description of Artificial Sequence: Synthetic oligonucleotide
uacaaucaucggucaauua

SEQ ID NO: 157537 - RNA, 19 nt, Artificial Sequence
  Description of Artificial Sequence: Synthetic oligonucleotide
acaaacgaugaagugcuua

SEQ ID NO: 157538 - RNA, 19 nt, Artificial Sequence
  Description of Artificial Sequence: Synthetic oligonucleotide
cauacggcaacacucugua

SEQ ID NO: 157539 - RNA, 19 nt, Artificial Sequence
  Description of Artificial Sequence: Synthetic oligonucleotide
auaaaagauucgguuugaa

SEQ ID NO: 157540 - RNA, 19 nt, Artificial Sequence
  Description of Artificial Sequence: Synthetic oligonucleotide
acagcgccauuccaugaca

SEQ ID NO: 157541 - RNA, 19 nt, Artificial Sequence
  Description of Artificial Sequence: Synthetic oligonucleotide
cacagcgccauuccaugac

SEQ ID NO: 157542 - RNA, 19 nt, Artificial Sequence
  Description of Artificial Sequence: Synthetic oligonucleotide
aagauucgguuugaagaua

SEQ ID NO: 157543 - RNA, 19 nt, Artificial Sequence
  Description of Artificial Sequence: Synthetic oligonucleotide
ugugcugucuacguccauu

SEQ ID NO: 157544 - RNA, 19 nt, Artificial Sequence
  Description of Artificial Sequence: Synthetic oligonucleotide
ggucgugguaaugagcgcc

SEQ ID NO: 157545 - RNA, 19 nt, Artificial Sequence
  Description of Artificial Sequence: Synthetic oligonucleotide
gaagaccuacucauucaca

SEQ ID NO: 157546 - RNA, 19 nt, Artificial Sequence
  Description of Artificial Sequence: Synthetic oligonucleotide
acuuucguucacccacaca

SEQ ID NO: 157547 - RNA, 19 nt, Artificial Sequence
  Description of Artificial Sequence: Synthetic oligonucleotide
guucaacugaguugccaga

SEQ ID NO: 157548 - RNA, 19 nt, Artificial Sequence
  Description of Artificial Sequence: Synthetic oligonucleotide
ugucuacguccauuagagu

SEQ ID NO: 157549 - RNA, 19 nt, Artificial Sequence
  Description of Artificial Sequence: Synthetic oligonucleotide
gugcauaaaagauucgguu

SEQ ID NO: 157550 - RNA, 19 nt, Artificial Sequence
  Description of Artificial Sequence: Synthetic oligonucleotide
auuguucgucuuuccaaua

SEQ ID NO: 157551 - RNA, 19 nt, Artificial Sequence
  Description of Artificial Sequence: Synthetic oligonucleotide
agcgccauuccaugacaug

SEQ ID NO: 157552 - RNA, 19 nt, Artificial Sequence
  Description of Artificial Sequence: Synthetic oligonucleotide
uggguacguggcgagcuag

SEQ ID NO: 157553 - RNA, 19 nt, Artificial Sequence
  Description of Artificial Sequence: Synthetic oligonucleotide
acauacggcaacacucugu

SEQ ID NO: 157554 - RNA, 19 nt, Artificial Sequence
  Description of Artificial Sequence: Synthetic oligonucleotide
cuuagcuauuacaguacua

SEQ ID NO: 157555 - RNA, 19 nt, Artificial Sequence
  Description of Artificial Sequence: Synthetic oligonucleotide
gcaauuguucgucuuucca

SEQ ID NO: 157556 - RNA, 19 nt, Artificial Sequence
  Description of Artificial Sequence: Synthetic oligonucleotide
gguugacggaguguuauac

SEQ ID NO: 157557 - RNA, 19 nt, Artificial Sequence
  Description of Artificial Sequence: Synthetic oligonucleotide
aacaccccuccgcgcugac

SEQ ID NO: 157558 - RNA, 19 nt, Artificial Sequence
  Description of Artificial Sequence: Synthetic oligonucleotide
gcaaacgaacaccccuccg

SEQ ID NO: 157559 - RNA, 19 nt, Artificial Sequence
  Description of Artificial Sequence: Synthetic oligonucleotide
gcugucuacguccauuaga

SEQ ID NO: 157560 - RNA, 19 nt, Artificial Sequence
  Description of Artificial Sequence: Synthetic oligonucleotide
guugaacgcccacuggaaa

SEQ ID NO: 157561 - RNA, 19 nt, Artificial Sequence
  Description of Artificial Sequence: Synthetic oligonucleotide
gucagugacuaagacugca

SEQ ID NO: 157562 - RNA, 19 nt, Artificial Sequence
  Description of Artificial Sequence: Synthetic oligonucleotide
cucuaaauacuggacuuaa

SEQ ID NO: 157563 - RNA, 19 nt, Artificial Sequence
  Description of Artificial Sequence: Synthetic oligonucleotide
uggucgugguaaugagcgc

SEQ ID NO: 157564 - RNA, 19 nt, Artificial Sequence
  Description of Artificial Sequence: Synthetic oligonucleotide
caaaugaguaaugaucuau

SEQ ID NO: 157565 - RNA, 19 nt, Artificial Sequence
  Description of Artificial Sequence: Synthetic oligonucleotide
uggucccaacaacaauuau

SEQ ID NO: 157566 - RNA, 19 nt, Artificial Sequence
  Description of Artificial Sequence: Synthetic oligonucleotide
cucagcggcuccccgucgg

SEQ ID NO: 157567 - RNA, 19 nt, Artificial Sequence
  Description of Artificial Sequence: Synthetic oligonucleotide
gucggacgacaucuccagg

SEQ ID NO: 157568 - RNA, 19 nt, Artificial Sequence
  Description of Artificial Sequence: Synthetic oligonucleotide
gcacuagugaguuacaauu

SEQ ID NO: 157569 - RNA, 19 nt, Artificial Sequence
  Description of Artificial Sequence: Synthetic oligonucleotide
auauggcucgaugucuuau

SEQ ID NO: 157570 - RNA, 19 nt, Artificial Sequence
  Description of Artificial Sequence: Synthetic oligonucleotide
gaguacugcuuaugcuguc

SEQ ID NO: 157571 - RNA, 19 nt, Artificial Sequence
  Description of Artificial Sequence: Synthetic oligonucleotide
cccaucuaaaagacccuag

SEQ ID NO: 157572 - RNA, 19 nt, Artificial Sequence
  Description of Artificial Sequence: Synthetic oligonucleotide
cuaauucgauagaugaauu

SEQ ID NO: 157573 - RNA, 19 nt, Artificial Sequence
  Description of Artificial Sequence: Synthetic oligonucleotide
ggacuacaguaauauauua

SEQ ID NO: 157574 - RNA, 19 nt, Artificial Sequence
  Description of Artificial Sequence: Synthetic oligonucleotide
cauguggacuacaguaaua

SEQ ID NO: 157575 - RNA, 19 nt, Artificial Sequence
  Description of Artificial Sequence: Synthetic oligonucleotide
uucaguccgcaaagacauc

SEQ ID NO: 157576 - RNA, 19 nt, Artificial Sequence
  Description of Artificial Sequence: Synthetic oligonucleotide
gggcuagaguugaagcacg

SEQ ID NO: 157577 - RNA, 19 nt, Artificial Sequence
  Description of Artificial Sequence: Synthetic oligonucleotide
uggugucguucacuuucgu

SEQ ID NO: 157578 - RNA, 19 nt, Artificial Sequence
  Description of Artificial Sequence: Synthetic oligonucleotide
caggcaaacgaacaccccu

SEQ ID NO: 157579 - RNA, 19 nt, Artificial Sequence
  Description of Artificial Sequence: Synthetic oligonucleotide
aacgcccacuggaaauugu

SEQ ID NO: 157580 - RNA, 19 nt, Artificial Sequence
  Description of Artificial Sequence: Synthetic oligonucleotide
ccguuugcuacagagcuug

SEQ ID NO: 157581 - RNA, 19 nt, Artificial Sequence
  Description of Artificial Sequence: Synthetic oligonucleotide
ugguugacggaguguuaua

SEQ ID NO: 157582 - RNA, 19 nt, Artificial Sequence
  Description of Artificial Sequence: Synthetic oligonucleotide
uggcgagcuagcccucccu

SEQ ID NO: 157583 - RNA, 19 nt, Artificial Sequence
  Description of Artificial Sequence: Synthetic oligonucleotide
cacuuucguucacccacac

SEQ ID NO: 157584 - RNA, 19 nt, Artificial Sequence
  Description of Artificial Sequence: Synthetic oligonucleotide
ggagauugugggguacuug

SEQ ID NO: 157585 - RNA, 19 nt, Artificial Sequence
  Description of Artificial Sequence: Synthetic oligonucleotide
gguacguggcgagcuagcc

SEQ ID NO: 157586 - RNA, 19 nt, Artificial Sequence
  Description of Artificial Sequence: Synthetic oligonucleotide
gcuaaaugugauuuugcuu

SEQ ID NO: 157587 - RNA, 19 nt, Artificial Sequence
  Description of Artificial Sequence: Synthetic oligonucleotide
ucucugguuaaaggugcuu

SEQ ID NO: 157588 - RNA, 19 nt, Artificial Sequence
  Description of Artificial Sequence: Synthetic oligonucleotide
ggugcauaaaagauucggu

SEQ ID NO: 157589 - RNA, 19 nt, Artificial Sequence
  Description of Artificial Sequence: Synthetic oligonucleotide
gcuagaguugaagcacgcc

SEQ ID NO: 157590 - RNA, 19 nt, Artificial Sequence
  Description of Artificial Sequence: Synthetic oligonucleotide
gaccaucuacguguaugga

SEQ ID NO: 157591 - RNA, 19 nt, Artificial Sequence
  Description of Artificial Sequence: Synthetic oligonucleotide
auacggcaacacucuguaa

SEQ ID NO: 157592 - RNA, 19 nt, Artificial Sequence
  Description of Artificial Sequence: Synthetic oligonucleotide
ccgucaauauuaguucuac

SEQ ID NO: 157593 - RNA, 19 nt, Artificial Sequence
  Description of Artificial Sequence: Synthetic oligonucleotide
guacugcuuaugcuguccu

SEQ ID NO: 157594 - RNA, 19 nt, Artificial Sequence
  Description of Artificial Sequence: Synthetic oligonucleotide
ggcaauauguuugcuugaa

SEQ ID NO: 157595 - RNA, 19 nt, Artificial Sequence
  Description of Artificial Sequence: Synthetic oligonucleotide
gcgcugaccaucuacgugu

SEQ ID NO: 157596 - RNA, 19 nt, Artificial Sequence
  Description of Artificial Sequence: Synthetic oligonucleotide
cuuaugcuguccuccgagu

SEQ ID NO: 157597 - RNA, 19 nt, Artificial Sequence
  Description of Artificial Sequence: Synthetic oligonucleotide
ugugagccgagagguuaaa

SEQ ID NO: 157598 - RNA, 19 nt, Artificial Sequence
  Description of Artificial Sequence: Synthetic oligonucleotide
gucugcgcagucucccaca

SEQ ID NO: 157599 - RNA, 19 nt, Artificial Sequence
  Description of Artificial Sequence: Synthetic oligonucleotide
cagaccuaauucgauagau

SEQ ID NO: 157600 - RNA, 19 nt, Artificial Sequence
  Description of Artificial Sequence: Synthetic oligonucleotide
ccuaauucgauagaugaau

SEQ ID NO: 157601 - RNA, 19 nt, Artificial Sequence
  Description of Artificial Sequence: Synthetic oligonucleotide
guggcgagcuagcccuccc

SEQ ID NO: 157602 - RNA, 19 nt, Artificial Sequence
  Description of Artificial Sequence: Synthetic oligonucleotide
aacaaacgaugaagugcuu

SEQ ID NO: 157603 - RNA, 19 nt, Artificial Sequence
  Description of Artificial Sequence: Synthetic oligonucleotide
ggcgagcuagcccucccug

SEQ ID NO: 157604 - RNA, 19 nt, Artificial Sequence
  Description of Artificial Sequence: Synthetic oligonucleotide
ucgugguaaugagcgccgu

SEQ ID NO: 157605 - RNA, 19 nt, Artificial Sequence
  Description of Artificial Sequence: Synthetic oligonucleotide
ggcuagaguugaagcacgc

SEQ ID NO: 157606 - RNA, 19 nt, Artificial Sequence
  Description of Artificial Sequence: Synthetic oligonucleotide
cgucggacgacaucuccag

SEQ ID NO: 157607 - RNA, 19 nt, Artificial Sequence
  Description of Artificial Sequence: Synthetic oligonucleotide
acaccacgcuacugcugcu

SEQ ID NO: 157608 - RNA, 19 nt, Artificial Sequence
  Description of Artificial Sequence: Synthetic oligonucleotide
cauauggcucgaugucuua

SEQ ID NO: 157609 - RNA, 19 nt, Artificial Sequence
  Description of Artificial Sequence: Synthetic oligonucleotide
gauucgguuugaagauacu

SEQ ID NO: 157610 - RNA, 19 nt, Artificial Sequence
  Description of Artificial Sequence: Synthetic oligonucleotide
augugagccgagagguuaa

SEQ ID NO: 157611 - RNA, 19 nt, Artificial Sequence
  Description of Artificial Sequence: Synthetic oligonucleotide
ccgcucgacaccacgcuac

SEQ ID NO: 157612 - RNA, 19 nt, Artificial Sequence
  Description of Artificial Sequence: Synthetic oligonucleotide
cugguugacggaguguuau

SEQ ID NO: 157613 - RNA, 19 nt, Artificial Sequence
  Description of Artificial Sequence: Synthetic oligonucleotide
cgagcuagcccucccugag

SEQ ID NO: 157614 - RNA, 19 nt, Artificial Sequence
  Description of Artificial Sequence: Synthetic oligonucleotide
cuccccgucggacgacauc

SEQ ID NO: 157615 - RNA, 19 nt, Artificial Sequence
  Description of Artificial Sequence: Synthetic oligonucleotide
gcgccauuccaugacaugu

SEQ ID NO: 157616 - RNA, 19 nt, Artificial Sequence
  Description of Artificial Sequence: Synthetic oligonucleotide
cuacguccauuagaguacu

SEQ ID NO: 157617 - RNA, 19 nt, Artificial Sequence
  Description of Artificial Sequence: Synthetic oligonucleotide
ggguacguggcgagcuagc

SEQ ID NO: 157618 - RNA, 19 nt, Artificial Sequence
  Description of Artificial Sequence: Synthetic oligonucleotide
cgcgcugaccaucuacgug

SEQ ID NO: 157619 - RNA, 19 nt, Artificial Sequence
  Description of Artificial Sequence: Synthetic oligonucleotide
gguaaugagcgccgucuuu

SEQ ID NO: 157620 - RNA, 19 nt, Artificial Sequence
  Description of Artificial Sequence: Synthetic oligonucleotide
cacuggucccaacaacaau

SEQ ID NO: 157621 - RNA, 19 nt, Artificial Sequence
  Description of Artificial Sequence: Synthetic oligonucleotide
ccgucggacgacaucucca

SEQ ID NO: 157622 - RNA, 19 nt, Artificial Sequence
  Description of Artificial Sequence: Synthetic oligonucleotide
gggagccaacagacauacg

SEQ ID NO: 157623 - RNA, 19 nt, Artificial Sequence
  Description of Artificial Sequence: Synthetic oligonucleotide
acguggcgagcuagcccuc

SEQ ID NO: 157624 - RNA, 19 nt, Artificial Sequence
  Description of Artificial Sequence: Synthetic oligonucleotide
cccggugccguagcccucg

SEQ ID NO: 157625 - RNA, 19 nt, Artificial Sequence
  Description of Artificial Sequence: Synthetic oligonucleotide
cacuucuauuuggcaaugu

SEQ ID NO: 157626 - RNA, 19 nt, Artificial Sequence
  Description of Artificial Sequence: Synthetic oligonucleotide
cccgucaauauuaguucua

SEQ ID NO: 157627 - RNA, 19 nt, Artificial Sequence
  Description of Artificial Sequence: Synthetic oligonucleotide
cgugguaaugagcgccguc

SEQ ID NO: 157628 - RNA, 19 nt, Artificial Sequence
  Description of Artificial Sequence: Synthetic oligonucleotide
cagcgccauuccaugacau

SEQ ID NO: 157629 - RNA, 19 nt, Artificial Sequence
  Description of Artificial Sequence: Synthetic oligonucleotide
cgacaccacgcuacugcug

SEQ ID NO: 157630 - RNA, 19 nt, Artificial Sequence
  Description of Artificial Sequence: Synthetic oligonucleotide
ccuucccuaaacucucuau

SEQ ID NO: 157631 - RNA, 19 nt, Artificial Sequence
  Description of Artificial Sequence: Synthetic oligonucleotide
cccuuguccauucaucauu

SEQ ID NO: 157632 - RNA, 19 nt, Artificial Sequence
  Description of Artificial Sequence: Synthetic oligonucleotide
ggaagggguugacucuaau

SEQ ID NO: 157633 - RNA, 19 nt, Artificial Sequence
  Description of Artificial Sequence: Synthetic oligonucleotide
ucccgccgccgccgccgcc

SEQ ID NO: 157634 - RNA, 19 nt, Artificial Sequence
  Description of Artificial Sequence: Synthetic oligonucleotide
ccauuagaguacugcuuau

SEQ ID NO: 157635 - RNA, 19 nt, Artificial Sequence
  Description of Artificial Sequence: Synthetic oligonucleotide
gccgcucgacaccacgcua

SEQ ID NO: 157636 - RNA, 19 nt, Artificial Sequence
  Description of Artificial Sequence: Synthetic oligonucleotide
ccccaucuaaaagacccua

SEQ ID NO: 157637 - RNA, 19 nt, Artificial Sequence
  Description of Artificial Sequence: Synthetic oligonucleotide
ccgcaaagacaucucuggu

SEQ ID NO: 157638 - RNA, 19 nt, Artificial Sequence
  Description of Artificial Sequence: Synthetic oligonucleotide
cguggcgagcuagcccucc

SEQ ID NO: 157639 - RNA, 19 nt, Artificial Sequence
  Description of Artificial Sequence: Synthetic oligonucleotide
ggcuccccgucggacgaca

SEQ ID NO: 157640 - RNA, 19 nt, Artificial Sequence
  Description of Artificial Sequence: Synthetic oligonucleotide
ccccgucggacgacaucuc

SEQ ID NO: 157641 - RNA, 19 nt, Artificial Sequence
  Description of Artificial Sequence: Synthetic oligonucleotide
gcgugccaagcaagaaugu

SEQ ID NO: 157642 - RNA, 19 nt, Artificial Sequence
  Description of Artificial Sequence: Synthetic oligonucleotide
cggacgacaucuccaggcu

SEQ ID NO: 157643 - RNA, 19 nt, Artificial Sequence
  Description of Artificial Sequence: Synthetic oligonucleotide
ccacgcuacugcugcuacu

SEQ ID NO: 157644 - RNA, 19 nt, Artificial Sequence
  Description of Artificial Sequence: Synthetic oligonucleotide
ccgcgcugaccaucuacgu

SEQ ID NO: 157645 - RNA, 19 nt, Artificial Sequence
  Description of Artificial Sequence: Synthetic oligonucleotide
cggugccguagcccucguc

SEQ ID NO: 157646 - RNA, 19 nt, Artificial Sequence
  Description of Artificial Sequence: Synthetic oligonucleotide
cgccgcucgacaccacgcu

SEQ ID NO: 157647 - RNA, 19 nt, Artificial Sequence
  Description of Artificial Sequence: Synthetic oligonucleotide
ccggugccguagcccucgu

SEQ ID NO: 157648 - RNA, 19 nt, Artificial Sequence
  Description of Artificial Sequence: Synthetic oligonucleotide
aaagcuuacaucuggauuc

SEQ ID NO: 157649 - RNA, 19 nt, Artificial Sequence
  Description of Artificial Sequence: Synthetic oligonucleotide
agaagugccauuaagaccc

SEQ ID NO: 157650 - RNA, 19 nt, Artificial Sequence
  Description of Artificial Sequence: Synthetic oligonucleotide
uuauacuugagugugaggg

SEQ ID NO: 157651 - RNA, 19 nt, Artificial Sequence
  Description of Artificial Sequence: Synthetic oligonucleotide
uuaaggaccaccaucacug

SEQ ID NO: 157652 - RNA, 19 nt, Artificial Sequence
  Description of Artificial Sequence: Synthetic oligonucleotide
aauaccaucaauaagccga

SEQ ID NO: 157653 - RNA, 19 nt, Artificial Sequence
  Description of Artificial Sequence: Synthetic oligonucleotide
auuguaacaugauuaggcc

SEQ ID NO: 157654 - RNA, 19 nt, Artificial Sequence
  Description of Artificial Sequence: Synthetic oligonucleotide
uauauuuagagagaagugc

SEQ ID NO: 157655 - RNA, 19 nt, Artificial Sequence
  Description of Artificial Sequence: Synthetic oligonucleotide
uacggaacgaaucaacgcg

SEQ ID NO: 157656 - RNA, 19 nt, Artificial Sequence
  Description of Artificial Sequence: Synthetic oligonucleotide
acucauuuguaacaaggcc

SEQ ID NO: 157657 - RNA, 19 nt, Artificial Sequence
  Description of Artificial Sequence: Synthetic oligonucleotide
aagaaaucgagcauggcgg

SEQ ID NO: 157658 - RNA, 19 nt, Artificial Sequence
  Description of Artificial Sequence: Synthetic oligonucleotide
aacccaauagagcugggac

SEQ ID NO: 157659 - RNA, 19 nt, Artificial Sequence
  Description of Artificial Sequence: Synthetic oligonucleotide
uguaacaaggccuaacuga

SEQ ID NO: 157660 - RNA, 19 nt, Artificial Sequence
  Description of Artificial Sequence: Synthetic oligonucleotide
uuagcaauacuccagguau

SEQ ID NO: 157661 - RNA, 19 nt, Artificial Sequence
  Description of Artificial Sequence: Synthetic oligonucleotide
aaucaacgcguucacgggc

SEQ ID NO: 157662 - RNA, 19 nt, Artificial Sequence
  Description of Artificial Sequence: Synthetic oligonucleotide
aauaccgaacuacaggaca

SEQ ID NO: 157663 - RNA, 19 nt, Artificial Sequence
  Description of Artificial Sequence: Synthetic oligonucleotide
acagccuuagcguuuagac

SEQ ID NO: 157664 - RNA, 19 nt, Artificial Sequence
  Description of Artificial Sequence: Synthetic oligonucleotide
uugguuacgugcaaaagca

SEQ ID NO: 157665 - RNA, 19 nt, Artificial Sequence
  Description of Artificial Sequence: Synthetic oligonucleotide
auuauguauuucucugggc

SEQ ID NO: 157666 - RNA, 19 nt, Artificial Sequence
  Description of Artificial Sequence: Synthetic oligonucleotide
auucaugguaccucuacgg

SEQ ID NO: 157667 - RNA, 19 nt, Artificial Sequence
  Description of Artificial Sequence: Synthetic oligonucleotide
agcaaugagaugaucacgc

SEQ ID NO: 157668 - RNA, 19 nt, Artificial Sequence
  Description of Artificial Sequence: Synthetic oligonucleotide
uuuagaauuagcagcaauu

SEQ ID NO: 157669 - RNA, 19 nt, Artificial Sequence
  Description of Artificial Sequence: Synthetic oligonucleotide
aaagcuaggacccgcucag

SEQ ID NO: 157670 - RNA, 19 nt, Artificial Sequence
  Description of Artificial Sequence: Synthetic oligonucleotide
agccuuagcguuuagacug

SEQ ID NO: 157671 - RNA, 19 nt, Artificial Sequence
  Description of Artificial Sequence: Synthetic oligonucleotide
  modified_base (15)..(15): a, c, u, g, unknown or other
guauuauccgaacanccgg

SEQ ID NO: 157672 - RNA, 19 nt, Artificial Sequence
  Description of Artificial Sequence: Synthetic oligonucleotide
cuugguuacgugcaaaagc

SEQ ID NO: 157673 - RNA, 19 nt, Artificial Sequence
  Description of Artificial Sequence: Synthetic oligonucleotide
caucguacgaccaccaugc

SEQ ID NO: 157674 - RNA, 19 nt, Artificial Sequence
  Description of Artificial Sequence: Synthetic oligonucleotide
  modified_base (14)..(14): a, c, u, g, unknown or other
uauuauccgaacanccggu

SEQ ID NO: 157675 - RNA, 19 nt, Artificial Sequence
  Description of Artificial Sequence: Synthetic oligonucleotide
gaaguaacccaauagagcu

SEQ ID NO: 157676 - RNA, 19 nt, Artificial Sequence
  Description of Artificial Sequence: Synthetic oligonucleotide
ugaaugaguuguuaccucc

SEQ ID NO: 157677 - RNA, 19 nt, Artificial Sequence
  Description of Artificial Sequence: Synthetic oligonucleotide
uccaugauaucucggagca

SEQ ID NO: 157678 - RNA, 19 nt, Artificial Sequence
  Description of Artificial Sequence: Synthetic oligonucleotide
aauuaaggaccaccaucac

SEQ ID NO: 157679 - RNA, 19 nt, Artificial Sequence
  Description of Artificial Sequence: Synthetic oligonucleotide
gacuuaagcucuuggaacc

SEQ ID NO: 157680 - RNA, 19 nt, Artificial Sequence
  Description of Artificial Sequence: Synthetic oligonucleotide
uucaugguaccucuacggg

SEQ ID NO: 157681 - RNA, 19 nt, Artificial Sequence
  Description of Artificial Sequence: Synthetic oligonucleotide
augauuaggcccuccuugc

SEQ ID NO: 157682 - RNA, 19 nt, Artificial Sequence
  Description of Artificial Sequence: Synthetic oligonucleotide
aacgaaucaacgcguucac

SEQ ID NO: 157683 - RNA, 19 nt, Artificial Sequence
  Description of Artificial Sequence: Synthetic oligonucleotide
uucaacguagcacuugucu

SEQ ID NO: 157684 - RNA, 19 nt, Artificial Sequence
  Description of Artificial Sequence: Synthetic oligonucleotide
aacuuuaacccuucugacu

SEQ ID NO: 157685 - RNA, 19 nt, Artificial Sequence
  Description of Artificial Sequence: Synthetic oligonucleotide
aaucgagcauggcggaagc

SEQ ID NO: 157686 - RNA, 19 nt, Artificial Sequence
  Description of Artificial Sequence: Synthetic oligonucleotide
gacaagucuuaacaagagg

SEQ ID NO: 157687 - RNA, 19 nt, Artificial Sequence
  Description of Artificial Sequence: Synthetic oligonucleotide
uuacgugcaaaagcaaugg

SEQ ID NO: 157688 - RNA, 19 nt, Artificial Sequence
  Description of Artificial Sequence: Synthetic oligonucleotide
gugauuguaacaugauuag

SEQ ID NO: 157689 - RNA, 19 nt, Artificial Sequence
  Description of Artificial Sequence: Synthetic oligonucleotide
aacugcaccaucguacgac

SEQ ID NO: 157690 - RNA, 19 nt, Artificial Sequence
  Description of Artificial Sequence: Synthetic oligonucleotide
aguaaugaguuuugccagg

SEQ ID NO: 157691 - RNA, 19 nt, Artificial Sequence
  Description of Artificial Sequence: Synthetic oligonucleotide
uggggcaacaaucagguau

SEQ ID NO: 157692 - RNA, 19 nt, Artificial Sequence
  Description of Artificial Sequence: Synthetic oligonucleotide
agccauagaauggucagcc

SEQ ID NO: 157693 - RNA, 19 nt, Artificial Sequence
  Description of Artificial Sequence: Synthetic oligonucleotide
aguaacccaauagagcugg

SEQ ID NO: 157694 - RNA, 19 nt, Artificial Sequence
  Description of Artificial Sequence: Synthetic oligonucleotide
aguuccucggaucaaguug

SEQ ID NO: 157695 - RNA, 19 nt, Artificial Sequence
  Description of Artificial Sequence: Synthetic oligonucleotide
gaaucaacgcguucacggg

SEQ ID NO: 157696 - RNA, 19 nt, Artificial Sequence
  Description of Artificial Sequence: Synthetic oligonucleotide
ugaacaugaaguaggguua

SEQ ID NO: 157697 - RNA, 19 nt, Artificial Sequence
  Description of Artificial Sequence: Synthetic oligonucleotide
caauuaaggaccaccauca

SEQ ID NO: 157698 - RNA, 19 nt, Artificial Sequence
  Description of Artificial Sequence: Synthetic oligonucleotide
gauuaguagacuuccccac

SEQ ID NO: 157699 - RNA, 19 nt, Artificial Sequence
  Description of Artificial Sequence: Synthetic oligonucleotide
acuuuaacccuucugacua

SEQ ID NO: 157700 - RNA, 19 nt, Artificial Sequence
  Description of Artificial Sequence: Synthetic oligonucleotide
  modified_base (16)..(16): a, c, u, g, unknown or other
gguauuauccgaacanccg

SEQ ID NO: 157701 - RNA, 19 nt, Artificial Sequence
  Description of Artificial Sequence: Synthetic oligonucleotide
uuuauacuugagugugagg

SEQ ID NO: 157702 - RNA, 19 nt, Artificial Sequence
  Description of Artificial Sequence: Synthetic oligonucleotide
cuagguuugguguuuugag

SEQ ID NO: 157703 - RNA, 19 nt, Artificial Sequence
  Description of Artificial Sequence: Synthetic oligonucleotide
aucagauuuagaauuagca

SEQ ID NO: 157704 - RNA, 19 nt, Artificial Sequence
  Description of Artificial Sequence: Synthetic oligonucleotide
cauagaauggucagccaag

SEQ ID NO: 157705 - RNA, 19 nt, Artificial Sequence
  Description of Artificial Sequence: Synthetic oligonucleotide
caacaaucagguauagaag

SEQ ID NO: 157706 - RNA, 19 nt, Artificial Sequence
  Description of Artificial Sequence: Synthetic oligonucleotide
uuagcguuuagacugcgua

SEQ ID NO: 157707 - RNA, 19 nt, Artificial Sequence
  Description of Artificial Sequence: Synthetic oligonucleotide
ucuucaacguagcacuugu

SEQ ID NO: 157708 - RNA, 19 nt, Artificial Sequence
  Description of Artificial Sequence: Synthetic oligonucleotide
  modified_base (19)..(19): a, c, u, g, unknown or other
ugcgguauuauccgaacan

SEQ ID NO: 157709 - RNA, 19 nt, Artificial Sequence
  Description of Artificial Sequence: Synthetic oligonucleotide
aagcuuacaucuggauucc

SEQ ID NO: 157710 - RNA, 19 nt, Artificial Sequence
  Description of Artificial Sequence: Synthetic oligonucleotide
cuuccugcguaucagcucc

SEQ ID NO: 157711 - RNA, 19 nt, Artificial Sequence
  Description of Artificial Sequence: Synthetic oligonucleotide
aaaucgagcauggcggaag

SEQ ID NO: 157712 - RNA, 19 nt, Artificial Sequence
  Description of Artificial Sequence: Synthetic oligonucleotide
agauuuagaauuagcagca

SEQ ID NO: 157713 - RNA, 19 nt, Artificial Sequence
  Description of Artificial Sequence: Synthetic oligonucleotide
uauugcacuaguagcacau

SEQ ID NO: 157714 - RNA, 19 nt, Artificial Sequence
  Description of Artificial Sequence: Synthetic oligonucleotide
aguacggaacgaaucaacg

SEQ ID NO: 157715 - RNA, 19 nt, Artificial Sequence
  Description of Artificial Sequence: Synthetic oligonucleotide
uuaagccuucaugagagca

SEQ ID NO: 157716 - RNA, 19 nt, Artificial Sequence
  Description of Artificial Sequence: Synthetic oligonucleotide
ugcacuaguagcacaucug

SEQ ID NO: 157717 - RNA, 19 nt, Artificial Sequence
  Description of Artificial Sequence: Synthetic oligonucleotide
aaucagguauagaaguuca

SEQ ID NO: 157718 - RNA, 19 nt, Artificial Sequence
  Description of Artificial Sequence: Synthetic oligonucleotide
cuaggacccgcucaggagg

SEQ ID NO: 157719 - RNA, 19 nt, Artificial Sequence
  Description of Artificial Sequence: Synthetic oligonucleotide
agcaguacggaacgaauca

SEQ ID NO: 157720 - RNA, 19 nt, Artificial Sequence
  Description of Artificial Sequence: Synthetic oligonucleotide
ucacgacuuaagcucuugg

SEQ ID NO: 157721 - RNA, 19 nt, Artificial Sequence
  Description of Artificial Sequence: Synthetic oligonucleotide
aguuguuaccuccccguuc

SEQ ID NO: 157722 - RNA, 19 nt, Artificial Sequence
  Description of Artificial Sequence: Synthetic oligonucleotide
ugaguuguuaccuccccgu

SEQ ID NO: 157723 - RNA, 19 nt, Artificial Sequence
  Description of Artificial Sequence: Synthetic oligonucleotide
uaacugaugcuuuggggca

SEQ ID NO: 157724 - RNA, 19 nt, Artificial Sequence
  Description of Artificial Sequence: Synthetic oligonucleotide
augaucacgcaucuugucu

SEQ ID NO: 157725 - RNA, 19 nt, Artificial Sequence
  Description of Artificial Sequence: Synthetic oligonucleotide
ucuucacgacuuaagcucu

SEQ ID NO: 157726 - RNA, 19 nt, Artificial Sequence
  Description of Artificial Sequence: Synthetic oligonucleotide
guguguacgaaguugcuca

SEQ ID NO: 157727 - RNA, 19 nt, Artificial Sequence
  Description of Artificial Sequence: Synthetic oligonucleotide
  modified_base (4)..(4): a, c, u, g, unknown or other
acanccgguguacaucauc

SEQ ID NO: 157728 - RNA, 19 nt, Artificial Sequence
  Description of Artificial Sequence: Synthetic oligonucleotide
  modified_base (6)..(6): a, c, u, g, unknown or other
gaacanccgguguacauca

SEQ ID NO: 157729 - RNA, 19 nt, Artificial Sequence
  Description of Artificial Sequence: Synthetic oligonucleotide
auuuagaauuagcagcaau

SEQ ID NO: 157730 - RNA, 19 nt, Artificial Sequence
  Description of Artificial Sequence: Synthetic oligonucleotide
ggaguaucugacuuuguag

SEQ ID NO: 157731 - RNA, 19 nt, Artificial Sequence
  Description of Artificial Sequence: Synthetic oligonucleotide
aaaucuuggcaagauuagu

SEQ ID NO: 157732 - RNA, 19 nt, Artificial Sequence
  Description of Artificial Sequence: Synthetic oligonucleotide
aauaagccgagguguuuga

SEQ ID NO: 157733 - RNA, 19 nt, Artificial Sequence
  Description of Artificial Sequence: Synthetic oligonucleotide
agcguuuagacugcguagg

SEQ ID NO: 157734 - RNA, 19 nt, Artificial Sequence
  Description of Artificial Sequence: Synthetic oligonucleotide
cucccuuuguuucuaagug

SEQ ID NO: 157735 - RNA, 19 nt, Artificial Sequence
  Description of Artificial Sequence: Synthetic oligonucleotide
uagcguuuagacugcguag

SEQ ID NO: 157736 - RNA, 19 nt, Artificial Sequence
  Description of Artificial Sequence: Synthetic oligonucleotide
caauaccaucaauaagccg

SEQ ID NO: 157737 - RNA, 19 nt, Artificial Sequence
  Description of Artificial Sequence: Synthetic oligonucleotide
  modified_base (12)..(12): a, c, u, g, unknown or other
uuauccgaacanccggugu

SEQ ID NO: 157738 - RNA, 19 nt, Artificial Sequence
  Description of Artificial Sequence: Synthetic oligonucleotide
guacggaacgaaucaacgc

SEQ ID NO: 157739 - RNA, 19 nt, Artificial Sequence
  Description of Artificial Sequence: Synthetic oligonucleotide
acuuaagcucuuggaaccc

SEQ ID NO: 157740 - RNA, 19 nt, Artificial Sequence
  Description of Artificial Sequence: Synthetic oligonucleotide
gagagaagugccauuaaga

SEQ ID NO: 157741 - RNA, 19 nt, Artificial Sequence
  Description of Artificial Sequence: Synthetic oligonucleotide
ucagguauagaaguucauc

SEQ ID NO: 157742 - RNA, 19 nt, Artificial Sequence
  Description of Artificial Sequence: Synthetic oligonucleotide
ugguauuaggcaagagcca

SEQ ID NO: 157743 - RNA, 19 nt, Artificial Sequence
  Description of Artificial Sequence: Synthetic oligonucleotide
gaacgaaucaacgcguuca

SEQ ID NO: 157744 - RNA, 19 nt, Artificial Sequence
  Description of Artificial Sequence: Synthetic oligonucleotide
caacguagcacuugucuac

SEQ ID NO: 157745 - RNA, 19 nt, Artificial Sequence
  Description of Artificial Sequence: Synthetic oligonucleotide
uaauaccgaacuacaggac

SEQ ID NO: 157746 - RNA, 19 nt, Artificial Sequence
  Description of Artificial Sequence: Synthetic oligonucleotide
ucggaucaaguugauaucu

SEQ ID NO: 157747 - RNA, 19 nt, Artificial Sequence
  Description of Artificial Sequence: Synthetic oligonucleotide
  modified_base (11)..(11): a, c, u, g, unknown or other
uauccgaacanccggugua

SEQ ID NO: 157748 - RNA, 19 nt, Artificial Sequence
  Description of Artificial Sequence: Synthetic oligonucleotide
gaucacacuaguuagcaau

SEQ ID NO: 157749 - RNA, 19 nt, Artificial Sequence
  Description of Artificial Sequence: Synthetic oligonucleotide
agcccgaaaaguaucacag

SEQ ID NO: 157750 - RNA, 19 nt, Artificial Sequence
  Description of Artificial Sequence: Synthetic oligonucleotide
ucaacguagcacuugucua

SEQ ID NO: 157751 - RNA, 19 nt, Artificial Sequence
  Description of Artificial Sequence: Synthetic oligonucleotide
caauucaugguaccucuac

SEQ ID NO: 157752 - RNA, 19 nt, Artificial Sequence
  Description of Artificial Sequence: Synthetic oligonucleotide
caagauuaguagacuuccc

SEQ ID NO: 157753 - RNA, 19 nt, Artificial Sequence
  Description of Artificial Sequence: Synthetic oligonucleotide
uacgugcaaaagcaauggc

SEQ ID NO: 157754 - RNA, 19 nt, Artificial Sequence
  Description of Artificial Sequence: Synthetic oligonucleotide
uguuuugcuaguagccaaa

SEQ ID NO: 157755 - RNA, 19 nt, Artificial Sequence
  Description of Artificial Sequence: Synthetic oligonucleotide
agacuuaaagcacuuuguu

SEQ ID NO: 157756 - RNA, 19 nt, Artificial Sequence
  Description of Artificial Sequence: Synthetic oligonucleotide
cucuguugaacuugaccag

SEQ ID NO: 157757 - RNA, 19 nt, Artificial Sequence
  Description of Artificial Sequence: Synthetic oligonucleotide
gaaaaguaucacaggcagc

SEQ ID NO: 157758 - RNA, 19 nt, Artificial Sequence
  Description of Artificial Sequence: Synthetic oligonucleotide
  modified_base (10)..(10): a, c, u, g, unknown or other
auccgaacanccgguguac

SEQ ID NO: 157759 - RNA, 19 nt, Artificial Sequence
  Description of Artificial Sequence: Synthetic oligonucleotide
ugaucacgcaucuugucua

SEQ ID NO: 157760 - RNA, 19 nt, Artificial Sequence
  Description of Artificial Sequence: Synthetic oligonucleotide
ugcucgauuuguccagacc

SEQ ID NO: 157761 - RNA, 19 nt, Artificial Sequence
  Description of Artificial Sequence: Synthetic oligonucleotide
cgaaucaacgcguucacgg

SEQ ID NO: 157762 - RNA, 19 nt, Artificial Sequence
  Description of Artificial Sequence: Synthetic oligonucleotide
aggacaagucuuaacaaga

SEQ ID NO: 157763 - RNA, 19 nt, Artificial Sequence
  Description of Artificial Sequence: Synthetic oligonucleotide
cccgaaaaguaucacaggc

SEQ ID NO: 157764 - RNA, 19 nt, Artificial Sequence
  Description of Artificial Sequence: Synthetic oligonucleotide
auugccuacuaaggccucc

SEQ ID NO: 157765 - RNA, 19 nt, Artificial Sequence
  Description of Artificial Sequence: Synthetic oligonucleotide
gaugaucacgcaucuuguc

SEQ ID NO: 157766 - RNA, 19 nt, Artificial Sequence
  Description of Artificial Sequence: Synthetic oligonucleotide
gucuacgcgacgcuguggc

SEQ ID NO: 157767 - RNA, 19 nt, Artificial Sequence
  Description of Artificial Sequence: Synthetic oligonucleotide
ugcaccaucguacgaccac

SEQ ID NO: 157768 - RNA, 19 nt, Artificial Sequence
  Description of Artificial Sequence: Synthetic oligonucleotide
ugguguuuugaguggcccc

SEQ ID NO: 157769 - RNA, 19 nt, Artificial Sequence
  Description of Artificial Sequence: Synthetic oligonucleotide
ugugcgguauuauccgaac

SEQ ID NO: 157770 - RNA, 19 nt, Artificial Sequence
  Description of Artificial Sequence: Synthetic oligonucleotide
cauugucuugcaugcggcc

SEQ ID NO: 157771 - RNA, 19 nt, Artificial Sequence
  Description of Artificial Sequence: Synthetic oligonucleotide
caguacggaacgaaucaac

SEQ ID NO: 157772 - RNA, 19 nt, Artificial Sequence
  Description of Artificial Sequence: Synthetic oligonucleotide
gagcaugucuacgcgacgc

SEQ ID NO: 157773 - RNA, 19 nt, Artificial Sequence
  Description of Artificial Sequence: Synthetic oligonucleotide
gacugcguaggucacagua

SEQ ID NO: 157774 - RNA, 19 nt, Artificial Sequence
  Description of Artificial Sequence: Synthetic oligonucleotide
ggcgauuugguauuaggca

SEQ ID NO: 157775 - RNA, 19 nt, Artificial Sequence
  Description of Artificial Sequence: Synthetic oligonucleotide
guuagcaauacuccaggua

SEQ ID NO: 157776 - RNA, 19 nt, Artificial Sequence
  Description of Artificial Sequence: Synthetic oligonucleotide
cuuuaacccuucugacuag

SEQ ID NO: 157777 - RNA, 19 nt, Artificial Sequence
  Description of Artificial Sequence: Synthetic oligonucleotide
uguguguacgaaguugcuc

SEQ ID NO: 157778 - RNA, 19 nt, Artificial Sequence
  Description of Artificial Sequence: Synthetic oligonucleotide
auaccaucaauaagccgag

SEQ ID NO: 157779 - RNA, 19 nt, Artificial Sequence
  Description of Artificial Sequence: Synthetic oligonucleotide
uguauuucucugggcagac

SEQ ID NO: 157780 - RNA, 19 nt, Artificial Sequence
  Description of Artificial Sequence: Synthetic oligonucleotide
ucuuaacaagagguuugug

SEQ ID NO: 157781 - RNA, 19 nt, Artificial Sequence
  Description of Artificial Sequence: Synthetic oligonucleotide
acccgaaagcuguauauuu

SEQ ID NO: 157782 - RNA, 19 nt, Artificial Sequence
  Description of Artificial Sequence: Synthetic oligonucleotide
ucugugcgguauuauccga

SEQ ID NO: 157783 - RNA, 19 nt, Artificial Sequence
  Description of Artificial Sequence: Synthetic oligonucleotide
ccacauuaagccuucauga

SEQ ID NO: 157784 - RNA, 19 nt, Artificial Sequence
  Description of Artificial Sequence: Synthetic oligonucleotide
uaaggaccaccaucacugc

SEQ ID NO: 157785 - RNA, 19 nt, Artificial Sequence
  Description of Artificial Sequence: Synthetic oligonucleotide
guagcacaucuguaauacc

SEQ ID NO: 157786 - RNA, 19 nt, Artificial Sequence
  Description of Artificial Sequence: Synthetic oligonucleotide
caaccauuggucaaagcua

SEQ ID NO: 157787 - RNA, 19 nt, Artificial Sequence
  Description of Artificial Sequence: Synthetic oligonucleotide
gugaaugaguuguuaccuc

SEQ ID NO: 157788 - RNA, 19 nt, Artificial Sequence
  Description of Artificial Sequence: Synthetic oligonucleotide
ccgaaagcuguauauuuag

SEQ ID NO: 157789 - RNA, 19 nt, Artificial Sequence
  Description of Artificial Sequence: Synthetic oligonucleotide
ucgcucacgcccuggaaac

SEQ ID NO: 157790 - RNA, 19 nt, Artificial Sequence
  Description of Artificial Sequence: Synthetic oligonucleotide
gagccgaaggaagucauuc

SEQ ID NO: 157791 - RNA, 19 nt, Artificial Sequence
  Description of Artificial Sequence: Synthetic oligonucleotide
cagcaguacggaacgaauc

SEQ ID NO: 157792 - RNA, 19 nt, Artificial Sequence
  Description of Artificial Sequence: Synthetic oligonucleotide
  modified_base (13)..(13): a, c, u, g, unknown or other
auuauccgaacanccggug

SEQ ID NO: 157793 - RNA, 19 nt, Artificial Sequence
  Description of Artificial Sequence: Synthetic oligonucleotide
accuuucacucauuuguaa

SEQ ID NO: 157794 - RNA, 19 nt, Artificial Sequence
  Description of Artificial Sequence: Synthetic oligonucleotide
guuuguguucuucaacgua

SEQ ID NO: 157795 - RNA, 19 nt, Artificial Sequence
  Description of Artificial Sequence: Synthetic oligonucleotide
ggucaucaggcagugauug

SEQ ID NO: 157796 - RNA, 19 nt, Artificial Sequence
  Description of Artificial Sequence: Synthetic oligonucleotide
cacgacuuaagcucuugga

SEQ ID NO: 157797 - RNA, 19 nt, Artificial Sequence
  Description of Artificial Sequence: Synthetic oligonucleotide
auguauuucucugggcaga

SEQ ID NO: 157798 - RNA, 19 nt, Artificial Sequence
  Description of Artificial Sequence: Synthetic oligonucleotide
aggacaacuuuaacccuuc

SEQ ID NO: 157799 - RNA, 19 nt, Artificial Sequence
  Description of Artificial Sequence: Synthetic oligonucleotide
ccuuucacucauuuguaac

SEQ ID NO: 157800 - RNA, 19 nt, Artificial Sequence
  Description of Artificial Sequence: Synthetic oligonucleotide
gaagagggugggucaucag

SEQ ID NO: 157801 - RNA, 19 nt, Artificial Sequence
  Description of Artificial Sequence: Synthetic oligonucleotide
ucggagcaugucuacgcga

SEQ ID NO: 157802 - RNA, 19 nt, Artificial Sequence
  Description of Artificial Sequence: Synthetic oligonucleotide
uacgcgacgcuguggcugc

SEQ ID NO: 157803 - RNA, 19 nt, Artificial Sequence
  Description of Artificial Sequence: Synthetic oligonucleotide
ggacaagucuuaacaagag

SEQ ID NO: 157804 - RNA, 19 nt, Artificial Sequence
  Description of Artificial Sequence: Synthetic oligonucleotide
uguguacgaaguugcucaa

SEQ ID NO: 157805 - RNA, 19 nt, Artificial Sequence
  Description of Artificial Sequence: Synthetic oligonucleotide
gcuuacaucuggauuccgg

SEQ ID NO: 157806 - RNA, 19 nt, Artificial Sequence
  Description of Artificial Sequence: Synthetic oligonucleotide
aggccuaacugaugcuuug

SEQ ID NO: 157807 - RNA, 19 nt, Artificial Sequence
  Description of Artificial Sequence: Synthetic oligonucleotide
uaccgaacuacaggacaag

SEQ ID NO: 157808 - RNA, 19 nt, Artificial Sequence
  Description of Artificial Sequence: Synthetic oligonucleotide
agaugaucacgcaucuugu

SEQ ID NO: 157809 - RNA, 19 nt, Artificial Sequence
  Description of Artificial Sequence: Synthetic oligonucleotide
acgaaucaacgcguucacg

SEQ ID NO: 157810 - RNA, 19 nt, Artificial Sequence
  Description of Artificial Sequence: Synthetic oligonucleotide
ggcuguuuugcuaguagcc

SEQ ID NO: 157811 - RNA, 19 nt, Artificial Sequence
  Description of Artificial Sequence: Synthetic oligonucleotide
gacgccggguguguguacg

SEQ ID NO: 157812 - RNA, 19 nt, Artificial Sequence
  Description of Artificial Sequence: Synthetic oligonucleotide
cacgcaucuugucuagcac

SEQ ID NO: 157813 - RNA, 19 nt, Artificial Sequence
  Description of Artificial Sequence: Synthetic oligonucleotide
gccuaacugaugcuuuggg

SEQ ID NO: 157814 - RNA, 19 nt, Artificial Sequence
  Description of Artificial Sequence: Synthetic oligonucleotide
uuaucucagauggcucugu

SEQ ID NO: 157815 - RNA, 19 nt, Artificial Sequence
  Description of Artificial Sequence: Synthetic oligonucleotide
ucguacgaccaccaugcuu

SEQ ID NO: 157816 - RNA, 19 nt, Artificial Sequence
  Description of Artificial Sequence: Synthetic oligonucleotide
aacccgaaagcuguauauu

SEQ ID NO: 157817 - RNA, 19 nt, Artificial Sequence
  Description of Artificial Sequence: Synthetic oligonucleotide
caucaauaagccgaggugu

SEQ ID NO: 157818 - RNA, 19 nt, Artificial Sequence
  Description of Artificial Sequence: Synthetic oligonucleotide
gaacccgaaagcuguauau

SEQ ID NO: 157819 - RNA, 19 nt, Artificial Sequence
  Description of Artificial Sequence: Synthetic oligonucleotide
aaaguaucacaggcagcaa

SEQ ID NO: 157820 - RNA, 19 nt, Artificial Sequence
  Description of Artificial Sequence: Synthetic oligonucleotide
uuagacugcguaggucaca

SEQ ID NO: 157821 - RNA, 19 nt, Artificial Sequence
  Description of Artificial Sequence: Synthetic oligonucleotide
  modified_base (17)..(17): a, c, u, g, unknown or other
cgguauuauccgaacancc

SEQ ID NO: 157822 - RNA, 19 nt, Artificial Sequence
  Description of Artificial Sequence: Synthetic oligonucleotide
acuacacugaagacaaguu

SEQ ID NO: 157823 - RNA, 19 nt, Artificial Sequence
  Description of Artificial Sequence: Synthetic oligonucleotide
aagugggcacucaccuuuc

SEQ ID NO: 157824 - RNA, 19 nt, Artificial Sequence
  Description of Artificial Sequence: Synthetic oligonucleotide
uugccuacuaaggccuccc

SEQ ID NO: 157825 - RNA, 19 nt, Artificial Sequence
  Description of Artificial Sequence: Synthetic oligonucleotide
auaccgaacuacaggacaa

SEQ ID NO: 157826 - RNA, 19 nt, Artificial Sequence
  Description of Artificial Sequence: Synthetic oligonucleotide
guauuggguuuuccaacca

SEQ ID NO: 157827 - RNA, 19 nt, Artificial Sequence
  Description of Artificial Sequence: Synthetic oligonucleotide
gcgauuugguauuaggcaa

SEQ ID NO: 157828 - RNA, 19 nt, Artificial Sequence
  Description of Artificial Sequence: Synthetic oligonucleotide
ucgcuuccugcguaucagc

SEQ ID NO: 157829 - RNA, 19 nt, Artificial Sequence
  Description of Artificial Sequence: Synthetic oligonucleotide
agcaugucuacgcgacgcu

SEQ ID NO: 157830 - RNA, 19 nt, Artificial Sequence
  Description of Artificial Sequence: Synthetic oligonucleotide
ugccuacuaaggccucccc

SEQ ID NO: 157831 - RNA, 19 nt, Artificial Sequence
  Description of Artificial Sequence: Synthetic oligonucleotide
cuacgcgacgcuguggcug

SEQ ID NO: 157832 - RNA, 19 nt, Artificial Sequence
  Description of Artificial Sequence: Synthetic oligonucleotide
guuugagccauagaauggu

SEQ ID NO: 157833 - RNA, 19 nt, Artificial Sequence
  Description of Artificial Sequence: Synthetic oligonucleotide
cucgcuuccugcguaucag

SEQ ID NO: 157834 - RNA, 19 nt, Artificial Sequence
  Description of Artificial Sequence: Synthetic oligonucleotide
uuccaacuuguuggcaaca

SEQ ID NO: 157835 - RNA, 19 nt, Artificial Sequence
  Description of Artificial Sequence: Synthetic oligonucleotide
auaucucggagcaugucua

SEQ ID NO: 157836 - RNA, 19 nt, Artificial Sequence
  Description of Artificial Sequence: Synthetic oligonucleotide
gcuaggacccgcucaggag

SEQ ID NO: 157837 - RNA, 19 nt, Artificial Sequence
  Description of Artificial Sequence: Synthetic oligonucleotide
ucaauaagccgagguguuu

SEQ ID NO: 157838 - RNA, 19 nt, Artificial Sequence
  Description of Artificial Sequence: Synthetic oligonucleotide
aaggccuaacugaugcuuu

SEQ ID NO: 157839 - RNA, 19 nt, Artificial Sequence
  Description of Artificial Sequence: Synthetic oligonucleotide
cuucaacguagcacuuguc

SEQ ID NO: 157840 - RNA, 19 nt, Artificial Sequence
  Description of Artificial Sequence: Synthetic oligonucleotide
uugcucgauuuguccagac

SEQ ID NO: 157841 - RNA, 19 nt, Artificial Sequence
  Description of Artificial Sequence: Synthetic oligonucleotide
acggaacgaaucaacgcgu

SEQ ID NO: 157842 - RNA, 19 nt, Artificial Sequence
  Description of Artificial Sequence: Synthetic oligonucleotide
accgaacuacaggacaagu

SEQ ID NO: 157843 - RNA, 19 nt, Artificial Sequence
  Description of Artificial Sequence: Synthetic oligonucleotide
gcccgaaaaguaucacagg

SEQ ID NO: 157844 - RNA, 19 nt, Artificial Sequence
  Description of Artificial Sequence: Synthetic oligonucleotide
cagcccgaaaaguaucaca

SEQ ID NO: 157845 - RNA, 19 nt, Artificial Sequence
  Description of Artificial Sequence: Synthetic oligonucleotide
ggcaagauuaguagacuuc

SEQ ID NO: 157846 - RNA, 19 nt, Artificial Sequence
  Description of Artificial Sequence: Synthetic oligonucleotide
gaguuccauuggugguggg

SEQ ID NO: 157847 - RNA, 19 nt, Artificial Sequence
  Description of Artificial Sequence: Synthetic oligonucleotide
guagacuugcucgauuugu

SEQ ID NO: 157848 - RNA, 19 nt, Artificial Sequence
  Description of Artificial Sequence: Synthetic oligonucleotide
  modified_base (9)..(9): a, c, u, g, unknown or other
uccgaacanccgguguaca

SEQ ID NO: 157849 - RNA, 19 nt, Artificial Sequence
  Description of Artificial Sequence: Synthetic oligonucleotide
ggagcaugucuacgcgacg

SEQ ID NO: 157850 - RNA, 19 nt, Artificial Sequence
  Description of Artificial Sequence: Synthetic oligonucleotide
aucaauaagccgagguguu

SEQ ID NO: 157851 - RNA, 19 nt, Artificial Sequence
  Description of Artificial Sequence: Synthetic oligonucleotide
aucgagcauggcggaagcg

SEQ ID NO: 157852 - RNA, 19 nt, Artificial Sequence
  Description of Artificial Sequence: Synthetic oligonucleotide
guaucugacuuuguagacu

SEQ ID NO: 157853 - RNA, 19 nt, Artificial Sequence
  Description of Artificial Sequence: Synthetic oligonucleotide
ccaucguacgaccaccaug

SEQ ID NO: 157854 - RNA, 19 nt, Artificial Sequence
  Description of Artificial Sequence: Synthetic oligonucleotide
gugcgguauuauccgaaca

SEQ ID NO: 157855 - RNA, 19 nt, Artificial Sequence
  Description of Artificial Sequence: Synthetic oligonucleotide
caauagagcugggacuuca

SEQ ID NO: 157856 - RNA, 19 nt, Artificial Sequence
  Description of Artificial Sequence: Synthetic oligonucleotide
ucuacgcgacgcuguggcu

SEQ ID NO: 157857 - RNA, 19 nt, Artificial Sequence
  Description of Artificial Sequence: Synthetic oligonucleotide
acguagcacuugucuacca

SEQ ID NO: 157858 - RNA, 19 nt, Artificial Sequence
  Description of Artificial Sequence: Synthetic oligonucleotide
cauugccuacuaaggccuc

SEQ ID NO: 157859 - RNA, 19 nt, Artificial Sequence
  Description of Artificial Sequence: Synthetic oligonucleotide
ggugucaaauuugguaaga

SEQ ID NO: 157860 - RNA, 19 nt, Artificial Sequence
  Description of Artificial Sequence: Synthetic oligonucleotide
guaacccaauagagcuggg

SEQ ID NO: 157861 - RNA, 19 nt, Artificial Sequence
  Description of Artificial Sequence: Synthetic oligonucleotide
acggcuucauugccuacua

SEQ ID NO: 157862 - RNA, 19 nt, Artificial Sequence
  Description of Artificial Sequence: Synthetic oligonucleotide
ggcauccaugauaucucgg

SEQ ID NO: 157863 - RNA, 19 nt, Artificial Sequence
  Description of Artificial Sequence: Synthetic oligonucleotide
acgcccuggaaacaccaua

SEQ ID NO: 157864 - RNA, 19 nt, Artificial Sequence
  Description of Artificial Sequence: Synthetic oligonucleotide
ccucggaucaaguugauau

SEQ ID NO: 157865 - RNA, 19 nt, Artificial Sequence
  Description of Artificial Sequence: Synthetic oligonucleotide
ugggagcacggaucuuacu

SEQ ID NO: 157866 - RNA, 19 nt, Artificial Sequence
  Description of Artificial Sequence: Synthetic oligonucleotide
ggccuaacugaugcuuugg

SEQ ID NO: 157867 - RNA, 19 nt, Artificial Sequence
  Description of Artificial Sequence: Synthetic oligonucleotide
cugugcgguauuauccgaa

SEQ ID NO: 157868 - RNA, 19 nt, Artificial Sequence
  Description of Artificial Sequence: Synthetic oligonucleotide
uuguuaccuccccguuccu

SEQ ID NO: 157869 - RNA, 19 nt, Artificial Sequence
  Description of Artificial Sequence: Synthetic oligonucleotide
cacuaguagcacaucugua

SEQ ID NO: 157870 - RNA, 19 nt, Artificial Sequence
  Description of Artificial Sequence: Synthetic oligonucleotide
  modified_base (18)..(18): a, c, u, g, unknown or other
gcgguauuauccgaacanc

SEQ ID NO: 157871 - RNA, 19 nt, Artificial Sequence
  Description of Artificial Sequence: Synthetic oligonucleotide
gcaaugagaugaucacgca

SEQ ID NO: 157872 - RNA, 19 nt, Artificial Sequence
  Description of Artificial Sequence: Synthetic oligonucleotide
accaucguacgaccaccau

SEQ ID NO: 157873 - RNA, 19 nt, Artificial Sequence
  Description of Artificial Sequence: Synthetic oligonucleotide
auuccgggagcagggacaa

SEQ ID NO: 157874 - RNA, 19 nt, Artificial Sequence
  Description of Artificial Sequence: Synthetic oligonucleotide
agcaccaagucagguguau

SEQ ID NO: 157875 - RNA, 19 nt, Artificial Sequence
  Description of Artificial Sequence: Synthetic oligonucleotide
guaacaugauuaggcccuc

SEQ ID NO: 157876 - RNA, 19 nt, Artificial Sequence
  Description of Artificial Sequence: Synthetic oligonucleotide
aucagguauagaaguucau

SEQ ID NO: 157877 - RNA, 19 nt, Artificial Sequence
  Description of Artificial Sequence: Synthetic oligonucleotide
cacggaucuuacugcucuc

SEQ ID NO: 157878 - RNA, 19 nt, Artificial Sequence
  Description of Artificial Sequence: Synthetic oligonucleotide
uuccugcguaucagcuccu

SEQ ID NO: 157879 - RNA, 19 nt, Artificial Sequence
  Description of Artificial Sequence: Synthetic oligonucleotide
aucguacgaccaccaugcu

SEQ ID NO: 157880 - RNA, 19 nt, Artificial Sequence
  Description of Artificial Sequence: Synthetic oligonucleotide
uucuccccguuguuucaau

SEQ ID NO: 157881 - RNA, 19 nt, Artificial Sequence
  Description of Artificial Sequence: Synthetic oligonucleotide
guguacgaaguugcucaac

SEQ ID NO: 157882 - RNA, 19 nt, Artificial Sequence
  Description of Artificial Sequence: Synthetic oligonucleotide
ggacccgcucaggaggugg

SEQ ID NO: 157883 - RNA, 19 nt, Artificial Sequence
  Description of Artificial Sequence: Synthetic oligonucleotide
cguagcacuugucuaccag

SEQ ID NO: 157884 - RNA, 19 nt, Artificial Sequence
  Description of Artificial Sequence: Synthetic oligonucleotide
caccaucguacgaccacca

SEQ ID NO: 157885 - RNA, 19 nt, Artificial Sequence
  Description of Artificial Sequence: Synthetic oligonucleotide
ccaguuuauacuugagugu

SEQ ID NO: 157886 - RNA, 19 nt, Artificial Sequence
  Description of Artificial Sequence: Synthetic oligonucleotide
gcaagcggcgauuugguau

SEQ ID NO: 157887 - RNA, 19 nt, Artificial Sequence
  Description of Artificial Sequence: Synthetic oligonucleotide
cagccuuagcguuuagacu

SEQ ID NO: 157888 - RNA, 19 nt, Artificial Sequence
  Description of Artificial Sequence: Synthetic oligonucleotide
gcaccaucguacgaccacc

SEQ ID NO: 157889 - RNA, 19 nt, Artificial Sequence
  Description of Artificial Sequence: Synthetic oligonucleotide
  modified_base (7)..(7): a, c, u, g, unknown or other
cgaacanccgguguacauc

SEQ ID NO: 157890 - RNA, 19 nt, Artificial Sequence
  Description of Artificial Sequence: Synthetic oligonucleotide
  modified_base (5)..(5): a, c, u, g, unknown or other
aacanccgguguacaucau

SEQ ID NO: 157891 - RNA, 19 nt, Artificial Sequence
  Description of Artificial Sequence: Synthetic oligonucleotide
uccucggaucaaguugaua

SEQ ID NO: 157892 - RNA, 19 nt, Artificial Sequence
  Description of Artificial Sequence: Synthetic oligonucleotide
cuuagcguuuagacugcgu

SEQ ID NO: 157893 - RNA, 19 nt, Artificial Sequence
  Description of Artificial Sequence: Synthetic oligonucleotide
aucugacuuuguagacuug

SEQ ID NO: 157894 - RNA, 19 nt, Artificial Sequence
  Description of Artificial Sequence: Synthetic oligonucleotide
ggaacccgaaagcuguaua

SEQ ID NO: 157895 - RNA, 19 nt, Artificial Sequence
  Description of Artificial Sequence: Synthetic oligonucleotide
cggagcaugucuacgcgac

SEQ ID NO: 157896 - RNA, 19 nt, Artificial Sequence
  Description of Artificial Sequence: Synthetic oligonucleotide
augguaccucuacggguuu

SEQ ID NO: 157897 - RNA, 19 nt, Artificial Sequence
  Description of Artificial Sequence: Synthetic oligonucleotide
cacagccuuagcguuuaga

SEQ ID NO: 157898 - RNA, 19 nt, Artificial Sequence
  Description of Artificial Sequence: Synthetic oligonucleotide
gccuugguuacgugcaaaa

SEQ ID NO: 157899 - RNA, 19 nt, Artificial Sequence
  Description of Artificial Sequence: Synthetic oligonucleotide
gguguacaucaucuaucaa

SEQ ID NO: 157900 - RNA, 19 nt, Artificial Sequence
  Description of Artificial Sequence: Synthetic oligonucleotide
gacgcuguggcugcagaau

SEQ ID NO: 157901 - RNA, 19 nt, Artificial Sequence
  Description of Artificial Sequence: Synthetic oligonucleotide
gucaucaggcagugauugu

SEQ ID NO: 157902 - RNA, 19 nt, Artificial Sequence
  Description of Artificial Sequence: Synthetic oligonucleotide
acccgcucaggaggugggg

SEQ ID NO: 157903 - RNA, 19 nt, Artificial Sequence
  Description of Artificial Sequence: Synthetic oligonucleotide
cucuacggguuucuuaguu

SEQ ID NO: 157904 - RNA, 19 nt, Artificial Sequence
  Description of Artificial Sequence: Synthetic oligonucleotide
acgccggguguguguacga

SEQ ID NO: 157905 - RNA, 19 nt, Artificial Sequence
  Description of Artificial Sequence: Synthetic oligonucleotide
gccauagaauggucagcca

SEQ ID NO: 157906 - RNA, 19 nt, Artificial Sequence
  Description of Artificial Sequence: Synthetic oligonucleotide
gcucacgcccuggaaacac

SEQ ID NO: 157907 - RNA, 19 nt, Artificial Sequence
  Description of Artificial Sequence: Synthetic oligonucleotide
ccuuagcguuuagacugcg

SEQ ID NO: 157908 - RNA, 19 nt, Artificial Sequence
  Description of Artificial Sequence: Synthetic oligonucleotide
ggcccggugcacgagucgc

SEQ ID NO: 157909 - RNA, 19 nt, Artificial Sequence
  Description of Artificial Sequence: Synthetic oligonucleotide
cccgaaagcuguauauuua

SEQ ID NO: 157910 - RNA, 19 nt, Artificial Sequence
  Description of Artificial Sequence: Synthetic oligonucleotide
caaggccuaacugaugcuu

SEQ ID NO: 157911 - RNA, 19 nt, Artificial Sequence
  Description of Artificial Sequence: Synthetic oligonucleotide
gggcccggugcacgagucg

SEQ ID NO: 157912 - RNA, 19 nt, Artificial Sequence
  Description of Artificial Sequence: Synthetic oligonucleotide
cuaagugggcacucaccuu

SEQ ID NO: 157913 - RNA, 19 nt, Artificial Sequence
  Description of Artificial Sequence: Synthetic oligonucleotide
gcaguacggaacgaaucaa

SEQ ID NO: 157914 - RNA, 19 nt, Artificial Sequence
  Description of Artificial Sequence: Synthetic oligonucleotide
cacugggagaccugacuuu

SEQ ID NO: 157915 - RNA, 19 nt, Artificial Sequence
  Description of Artificial Sequence: Synthetic oligonucleotide
gcguccuugccauagccuu

SEQ ID NO: 157916 - RNA, 19 nt, Artificial Sequence
  Description of Artificial Sequence: Synthetic oligonucleotide
aggacccgcucaggaggug

SEQ ID NO: 157917 - RNA, 19 nt, Artificial Sequence
  Description of Artificial Sequence: Synthetic oligonucleotide
cagacgccgggugugugua

SEQ ID NO: 157918 - RNA, 19 nt, Artificial Sequence
  Description of Artificial Sequence: Synthetic oligonucleotide
ccaauagagcugggacuuc

SEQ ID NO: 157919 - RNA, 19 nt, Artificial Sequence
  Description of Artificial Sequence: Synthetic oligonucleotide
  modified_base (8)..(8): a, c, u, g, unknown or other
ccgaacanccgguguacau

SEQ ID NO: 157920 - RNA, 19 nt, Artificial Sequence
  Description of Artificial Sequence: Synthetic oligonucleotide
cacgcccuggaaacaccau

SEQ ID NO: 157921 - RNA, 19 nt, Artificial Sequence
  Description of Artificial Sequence: Synthetic oligonucleotide
ccggugcacgagucgcuca

SEQ ID NO: 157922 - RNA, 19 nt, Artificial Sequence
  Description of Artificial Sequence: Synthetic oligonucleotide
ccacagccuuagcguuuag

SEQ ID NO: 157923 - RNA, 19 nt, Artificial Sequence
  Description of Artificial Sequence: Synthetic oligonucleotide
guaccucuacggguuucuu

SEQ ID NO: 157924 - RNA, 19 nt, Artificial Sequence
  Description of Artificial Sequence: Synthetic oligonucleotide
cacucaccuuucacucauu

SEQ ID NO: 157925 - RNA, 19 nt, Artificial Sequence
  Description of Artificial Sequence: Synthetic oligonucleotide
ccucuacggguuucuuagu

SEQ ID NO: 157926 - RNA, 19 nt, Artificial Sequence
  Description of Artificial Sequence: Synthetic oligonucleotide
gcucuggaaguaacccaau

SEQ ID NO: 157927 - RNA, 19 nt, Artificial Sequence
  Description of Artificial Sequence: Synthetic oligonucleotide
cgcguucacgggcccggug

SEQ ID NO: 157928 - RNA, 19 nt, Artificial Sequence
  Description of Artificial Sequence: Synthetic oligonucleotide
caaacccggggugccuuuu

SEQ ID NO: 157929 - RNA, 19 nt, Artificial Sequence
  Description of Artificial Sequence: Synthetic oligonucleotide
gccucacgaaggagccgaa

SEQ ID NO: 157930 - RNA, 19 nt, Artificial Sequence
  Description of Artificial Sequence: Synthetic oligonucleotide
ccaugauaucucggagcau

SEQ ID NO: 157931 - RNA, 19 nt, Artificial Sequence
  Description of Artificial Sequence: Synthetic oligonucleotide
cgcucacgcccuggaaaca

SEQ ID NO: 157932 - RNA, 19 nt, Artificial Sequence
  Description of Artificial Sequence: Synthetic oligonucleotide
ccgagguguuugagccaua

SEQ ID NO: 157933 - RNA, 19 nt, Artificial Sequence
  Description of Artificial Sequence: Synthetic oligonucleotide
aaucaaacuauccacuggc

SEQ ID NO: 157934 - RNA, 19 nt, Artificial Sequence
  Description of Artificial Sequence: Synthetic oligonucleotide
uuuaauugaaguaggaagu

SEQ ID NO: 157935 - RNA, 19 nt, Artificial Sequence
  Description of Artificial Sequence: Synthetic oligonucleotide
aauaagcgaacacauauca

SEQ ID NO: 157936 - RNA, 19 nt, Artificial Sequence
  Description of Artificial Sequence: Synthetic oligonucleotide
uuauacaauaucacugcgg

SEQ ID NO: 157937 - RNA, 19 nt, Artificial Sequence
  Description of Artificial Sequence: Synthetic oligonucleotide
auaaacuacaaguacauaa

SEQ ID NO: 157938 - RNA, 19 nt, Artificial Sequence
  Description of Artificial Sequence: Synthetic oligonucleotide
ucaaaaucgauagaaaaga

SEQ ID NO: 157939 - RNA, 19 nt, Artificial Sequence
  Description of Artificial Sequence: Synthetic oligonucleotide
ucaauguuagugcuaaccc

SEQ ID NO: 157940 - RNA, 19 nt, Artificial Sequence
  Description of Artificial Sequence: Synthetic oligonucleotide
ugaucuauaacaucguagu

SEQ ID NO: 157941 - RNA, 19 nt, Artificial Sequence
  Description of Artificial Sequence: Synthetic oligonucleotide
uuccuuuaaauaaggagag

SEQ ID NO: 157942 - RNA, 19 nt, Artificial Sequence
  Description of Artificial Sequence: Synthetic oligonucleotide
uuuuguuagcuucacguca

SEQ ID NO: 157943 - RNA, 19 nt, Artificial Sequence
  Description of Artificial Sequence: Synthetic oligonucleotide
ucuauaacaucguaguagu

SEQ ID NO: 157944 - RNA, 19 nt, Artificial Sequence
  Description of Artificial Sequence: Synthetic oligonucleotide
uuaaauaaggagagcugag

SEQ ID NO: 157945 - RNA, 19 nt, Artificial Sequence
  Description of Artificial Sequence: Synthetic oligonucleotide
aaacuuugcaucuagcauu

SEQ ID NO: 157946 - RNA, 19 nt, Artificial Sequence
  Description of Artificial Sequence: Synthetic oligonucleotide
aguggggugaucuauaaca

SEQ ID NO: 157947 - RNA, 19 nt, Artificial Sequence
  Description of Artificial Sequence: Synthetic oligonucleotide
ucauaaaaggggaagcaga

SEQ ID NO: 157948 - RNA, 19 nt, Artificial Sequence
  Description of Artificial Sequence: Synthetic oligonucleotide
ucuuuauaaacuacaagua

SEQ ID NO: 157949 - RNA, 19 nt, Artificial Sequence
  Description of Artificial Sequence: Synthetic oligonucleotide
uucgaaucaaacuauccac

SEQ ID NO: 157950 - RNA, 19 nt, Artificial Sequence
  Description of Artificial Sequence: Synthetic oligonucleotide
gaaucaaacuauccacugg

SEQ ID NO: 157951 - RNA, 19 nt, Artificial Sequence
  Description of Artificial Sequence: Synthetic oligonucleotide
aucuauaacaucguaguag

SEQ ID NO: 157952 - RNA, 19 nt, Artificial Sequence
  Description of Artificial Sequence: Synthetic oligonucleotide
aauaucccucuacucugcc

SEQ ID NO: 157953 - RNA, 19 nt, Artificial Sequence
  Description of Artificial Sequence: Synthetic oligonucleotide
acaacacgaggcuagacag

SEQ ID NO: 157954 - RNA, 19 nt, Artificial Sequence
  Description of Artificial Sequence: Synthetic oligonucleotide
aaauacaacacgaggcuag

SEQ ID NO: 157955 - RNA, 19 nt, Artificial Sequence
  Description of Artificial Sequence: Synthetic oligonucleotide
auuuuguuagcuucacguc

SEQ ID NO: 157956 - RNA, 19 nt, Artificial Sequence
  Description of Artificial Sequence: Synthetic oligonucleotide
guuuccugcggacauaggg

SEQ ID NO: 157957 - RNA, 19 nt, Artificial Sequence
  Description of Artificial Sequence: Synthetic oligonucleotide
gaaguaggaaguuuucgug

SEQ ID NO: 157958 - RNA, 19 nt, Artificial Sequence
  Description of Artificial Sequence: Synthetic oligonucleotide
aagucuacccuuaaccgcg

SEQ ID NO: 157959 - RNA, 19 nt, Artificial Sequence
  Description of Artificial Sequence: Synthetic oligonucleotide
uguucgaaucaaacuaucc

SEQ ID NO: 157960 - RNA, 19 nt, Artificial Sequence
  Description of Artificial Sequence: Synthetic oligonucleotide
ugaaguaggaaguuuucgu

SEQ ID NO: 157961 - RNA, 19 nt, Artificial Sequence
  Description of Artificial Sequence: Synthetic oligonucleotide
uaaaacacguuagaagcag

SEQ ID NO: 157962 - RNA, 19 nt, Artificial Sequence
  Description of Artificial Sequence: Synthetic oligonucleotide
ucugcuaaaacacguuaga

SEQ ID NO: 157963 - RNA, 19 nt, Artificial Sequence
  Description of Artificial Sequence: Synthetic oligonucleotide
aauguuagugcuaacccca

SEQ ID NO: 157964 - RNA, 19 nt, Artificial Sequence
  Description of Artificial Sequence: Synthetic oligonucleotide
uuacacucgucacacagga

SEQ ID NO: 157965 - RNA, 19 nt, Artificial Sequence
  Description of Artificial Sequence: Synthetic oligonucleotide
guuagugcuaaccccaacc

SEQ ID NO: 157966 - RNA, 19 nt, Artificial Sequence
  Description of Artificial Sequence: Synthetic oligonucleotide
aauaucacugcggaaacaa

SEQ ID NO: 157967 - RNA, 19 nt, Artificial Sequence
  Description of Artificial Sequence: Synthetic oligonucleotide
uuaugaggcggugagcugg

SEQ ID NO: 157968 - RNA, 19 nt, Artificial Sequence
  Description of Artificial Sequence: Synthetic oligonucleotide
uugaaguaggaaguuuucg

SEQ ID NO: 157969 - RNA, 19 nt, Artificial Sequence
  Description of Artificial Sequence: Synthetic oligonucleotide
aaacacguuagaagcaggg

SEQ ID NO: 157970 - RNA, 19 nt, Artificial Sequence
  Description of Artificial Sequence: Synthetic oligonucleotide
uuagugcuaaccccaacca

SEQ ID NO: 157971 - RNA, 19 nt, Artificial Sequence
  Description of Artificial Sequence: Synthetic oligonucleotide
aguaucauacuccccaaga

SEQ ID NO: 157972 - RNA, 19 nt, Artificial Sequence
  Description of Artificial Sequence: Synthetic oligonucleotide
caauguuagugcuaacccc

SEQ ID NO: 157973 - RNA, 19 nt, Artificial Sequence
  Description of Artificial Sequence: Synthetic oligonucleotide
ucgaaucaaacuauccacu

SEQ ID NO: 157974 - RNA, 19 nt, Artificial Sequence
  Description of Artificial Sequence: Synthetic oligonucleotide
agauagugcggacauaaga

SEQ ID NO: 157975 - RNA, 19 nt, Artificial Sequence
  Description of Artificial Sequence: Synthetic oligonucleotide
uuuucguggagaccuacgu

SEQ ID NO: 157976 - RNA, 19 nt, Artificial Sequence
  Description of Artificial Sequence: Synthetic oligonucleotide
caagucuacccuuaaccgc

SEQ ID NO: 157977 - RNA, 19 nt, Artificial Sequence
  Description of Artificial Sequence: Synthetic oligonucleotide
ugccuaaauacaacacgag

SEQ ID NO: 157978 - RNA, 19 nt, Artificial Sequence
  Description of Artificial Sequence: Synthetic oligonucleotide
accagcuuucugcuaaaac

SEQ ID NO: 157979 - RNA, 19 nt, Artificial Sequence
  Description of Artificial Sequence: Synthetic oligonucleotide
aggaucacggcaucaaugu

SEQ ID NO: 157980 - RNA, 19 nt, Artificial Sequence
  Description of Artificial Sequence: Synthetic oligonucleotide
gugaucuauaacaucguag

SEQ ID NO: 157981 - RNA, 19 nt, Artificial Sequence
  Description of Artificial Sequence: Synthetic oligonucleotide
aucgauagaaaagaaaguu

SEQ ID NO: 157982 - RNA, 19 nt, Artificial Sequence
  Description of Artificial Sequence: Synthetic oligonucleotide
aaaacacguuagaagcagg

SEQ ID NO: 157983 - RNA, 19 nt, Artificial Sequence
  Description of Artificial Sequence: Synthetic oligonucleotide
uuucugcuaaaacacguua

SEQ ID NO: 157984 - RNA, 19 nt, Artificial Sequence
  Description of Artificial Sequence: Synthetic oligonucleotide
uggugaacacacaacucug

SEQ ID NO: 157985 - RNA, 19 nt, Artificial Sequence
  Description of Artificial Sequence: Synthetic oligonucleotide
gauagugcggacauaagaa

SEQ ID NO: 157986 - RNA, 19 nt, Artificial Sequence
  Description of Artificial Sequence: Synthetic oligonucleotide
ugcacagaucgguaguucc

SEQ ID NO: 157987 - RNA, 19 nt, Artificial Sequence
  Description of Artificial Sequence: Synthetic oligonucleotide
aaguagagugccaucagga

SEQ ID NO: 157988 - RNA, 19 nt, Artificial Sequence
  Description of Artificial Sequence: Synthetic oligonucleotide
aguuucgccuggcaguagg

SEQ ID NO: 157989 - RNA, 19 nt, Artificial Sequence
  Description of Artificial Sequence: Synthetic oligonucleotide
agugcuaaccccaaccaag

SEQ ID NO: 157990 - RNA, 19 nt, Artificial Sequence
  Description of Artificial Sequence: Synthetic oligonucleotide
ugucauaaaaggggaagca

SEQ ID NO: 157991 - RNA, 19 nt, Artificial Sequence
  Description of Artificial Sequence: Synthetic oligonucleotide
ucgucagcgagccuaucag

SEQ ID NO: 157992 - RNA, 19 nt, Artificial Sequence
  Description of Artificial Sequence: Synthetic oligonucleotide
aacuuuugccuaaauacaa

SEQ ID NO: 157993 - RNA, 19 nt, Artificial Sequence
  Description of Artificial Sequence: Synthetic oligonucleotide
aggacuccagucucuacgg

SEQ ID NO: 157994 - RNA, 19 nt, Artificial Sequence
  Description of Artificial Sequence: Synthetic oligonucleotide
acacacaacucuguauggc

SEQ ID NO: 157995 - RNA, 19 nt, Artificial Sequence
  Description of Artificial Sequence: Synthetic oligonucleotide
ugagccuccugauacggug

SEQ ID NO: 157996 - RNA, 19 nt, Artificial Sequence
  Description of Artificial Sequence: Synthetic oligonucleotide
aucgguaguucccacacga

SEQ ID NO: 157997 - RNA, 19 nt, Artificial Sequence
  Description of Artificial Sequence: Synthetic oligonucleotide
uccgacaaacuuugcaucu

SEQ ID NO: 157998 - RNA, 19 nt, Artificial Sequence
  Description of Artificial Sequence: Synthetic oligonucleotide
agccuaucaggaaacuucc

SEQ ID NO: 157999 - RNA, 19 nt, Artificial Sequence
  Description of Artificial Sequence: Synthetic oligonucleotide
ucuacgggaagugccuucg

SEQ ID NO: 158000 - RNA, 19 nt, Artificial Sequence
  Description of Artificial Sequence: Synthetic oligonucleotide
aguggaaauaccagcuuuc

SEQ ID NO: 158001 - RNA, 19 nt, Artificial Sequence
  Description of Artificial Sequence: Synthetic oligonucleotide
ucuugcacagaucgguagu

SEQ ID NO: 158002 - RNA, 19 nt, Artificial Sequence
  Description of Artificial Sequence: Synthetic oligonucleotide
ucuacccuuaaccgcggcc

SEQ ID NO: 158003 - RNA, 19 nt, Artificial Sequence
  Description of Artificial Sequence: Synthetic oligonucleotide
ugugagccuccugauacgg

SEQ ID NO: 158004 - RNA, 19 nt, Artificial Sequence
  Description of Artificial Sequence: Synthetic oligonucleotide
uuaaccgcggcccuuccuc

SEQ ID NO: 158005 - RNA, 19 nt, Artificial Sequence
  Description of Artificial Sequence: Synthetic oligonucleotide
agagauagugcggacauaa

SEQ ID NO: 158006 - RNA, 19 nt, Artificial Sequence
  Description of Artificial Sequence: Synthetic oligonucleotide
aaaggggaagcagacuaca

SEQ ID NO: 158007 - RNA, 19 nt, Artificial Sequence
  Description of Artificial Sequence: Synthetic oligonucleotide
uaugaggcggugagcuggg

SEQ ID NO: 158008 - RNA, 19 nt, Artificial Sequence
  Description of Artificial Sequence: Synthetic oligonucleotide
aaagaaaguuaaacccugu

SEQ ID NO: 158009 - RNA, 19 nt, Artificial Sequence
  Description of Artificial Sequence: Synthetic oligonucleotide
auagugcggacauaagaaa

SEQ ID NO: 158010 - RNA, 19 nt, Artificial Sequence
  Description of Artificial Sequence: Synthetic oligonucleotide
gaauaagcgaacacauauc

SEQ ID NO: 158011 - RNA, 19 nt, Artificial Sequence
  Description of Artificial Sequence: Synthetic oligonucleotide
gucuuucgaggucucaacc

SEQ ID NO: 158012 - RNA, 19 nt, Artificial Sequence
  Description of Artificial Sequence: Synthetic oligonucleotide
ugccacggcaguuguagag

SEQ ID NO: 158013 - RNA, 19 nt, Artificial Sequence
  Description of Artificial Sequence: Synthetic oligonucleotide
agcaagaugacaaguauuu

SEQ ID NO: 158014 - RNA, 19 nt, Artificial Sequence
  Description of Artificial Sequence: Synthetic oligonucleotide
aggaagagauagugcggac

SEQ ID NO: 158015 - RNA, 19 nt, Artificial Sequence
  Description of Artificial Sequence: Synthetic oligonucleotide
gacuacaaacuuuugccua

SEQ ID NO: 158016 - RNA, 19 nt, Artificial Sequence
  Description of Artificial Sequence: Synthetic oligonucleotide
aaccugucauaaaagggga

SEQ ID NO: 158017 - RNA, 19 nt, Artificial Sequence
  Description of Artificial Sequence: Synthetic oligonucleotide
uuuaugaggcggugagcug

SEQ ID NO: 158018 - RNA, 19 nt, Artificial Sequence
  Description of Artificial Sequence: Synthetic oligonucleotide
aacacguuagaagcaggga

SEQ ID NO: 158019 - RNA, 19 nt, Artificial Sequence
  Description of Artificial Sequence: Synthetic oligonucleotide
uuccgacaaacuuugcauc

SEQ ID NO: 158020 - RNA, 19 nt, Artificial Sequence
  Description of Artificial Sequence: Synthetic oligonucleotide
ucgagcuacgcuuggucug

SEQ ID NO: 158021 - RNA, 19 nt, Artificial Sequence
  Description of Artificial Sequence: Synthetic oligonucleotide
cuacccuuaaccgcggccc

SEQ ID NO: 158022 - RNA, 19 nt, Artificial Sequence
  Description of Artificial Sequence: Synthetic oligonucleotide
ggagcaagcgcccacagga

SEQ ID NO: 158023 - RNA, 19 nt, Artificial Sequence
  Description of Artificial Sequence: Synthetic oligonucleotide
acccgucaaagccaagguc

SEQ ID NO: 158024 - RNA, 19 nt, Artificial Sequence
  Description of Artificial Sequence: Synthetic oligonucleotide
auacggugggcuuccuuuc

SEQ ID NO: 158025 - RNA, 19 nt, Artificial Sequence
  Description of Artificial Sequence: Synthetic oligonucleotide
agaccuacgugcucuguca

SEQ ID NO: 158026 - RNA, 19 nt, Artificial Sequence
  Description of Artificial Sequence: Synthetic oligonucleotide
aucacggcaucaauguuag

SEQ ID NO: 158027 - RNA, 19 nt, Artificial Sequence
  Description of Artificial Sequence: Synthetic oligonucleotide
gacaccaacuaccguccag

SEQ ID NO: 158028 - RNA, 19 nt, Artificial Sequence
  Description of Artificial Sequence: Synthetic oligonucleotide
gaucgguaguucccacacg

SEQ ID NO: 158029 - RNA, 19 nt, Artificial Sequence
  Description of Artificial Sequence: Synthetic oligonucleotide
cacuagcugauacugucac

SEQ ID NO: 158030 - RNA, 19 nt, Artificial Sequence
  Description of Artificial Sequence: Synthetic oligonucleotide
ggaauaagcgaacacauau

SEQ ID NO: 158031 - RNA, 19 nt, Artificial Sequence
  Description of Artificial Sequence: Synthetic oligonucleotide
aucgucagcgagccuauca

SEQ ID NO: 158032 - RNA, 19 nt, Artificial Sequence
  Description of Artificial Sequence: Synthetic oligonucleotide
uccccauacagcucagaac

SEQ ID NO: 158033 - RNA, 19 nt, Artificial Sequence
  Description of Artificial Sequence: Synthetic oligonucleotide
ucugaaguaccaguucauc

SEQ ID NO: 158034 - RNA, 19 nt, Artificial Sequence
  Description of Artificial Sequence: Synthetic oligonucleotide
uucgaggucucaaccguaa

SEQ ID NO: 158035 - RNA, 19 nt, Artificial Sequence
  Description of Artificial Sequence: Synthetic oligonucleotide
gaggggaauaagcgaacac

SEQ ID NO: 158036 - RNA, 19 nt, Artificial Sequence
  Description of Artificial Sequence: Synthetic oligonucleotide
acuaccguccaggagauuu

SEQ ID NO: 158037 - RNA, 19 nt, Artificial Sequence
  Description of Artificial Sequence: Synthetic oligonucleotide
cacuugauggagaaucaca

SEQ ID NO: 158038 - RNA, 19 nt, Artificial Sequence
  Description of Artificial Sequence: Synthetic oligonucleotide
ugcuaaccccaaccaaggc

SEQ ID NO: 158039 - RNA, 19 nt, Artificial Sequence
  Description of Artificial Sequence: Synthetic oligonucleotide
uccuuuaaauaaggagagc

SEQ ID NO: 158040 - RNA, 19 nt, Artificial Sequence
  Description of Artificial Sequence: Synthetic oligonucleotide
accaacuaccguccaggag

SEQ ID NO: 158041 - RNA, 19 nt, Artificial Sequence
  Description of Artificial Sequence: Synthetic oligonucleotide
ucgguaguucccacacgag

SEQ ID NO: 158042 - RNA, 19 nt, Artificial Sequence
  Description of Artificial Sequence: Synthetic oligonucleotide
caacacgaggcuagacagg

SEQ ID NO: 158043 - RNA, 19 nt, Artificial Sequence
  Description of Artificial Sequence: Synthetic oligonucleotide
aucacugcggaaacaagca

SEQ ID NO: 158044 - RNA, 19 nt, Artificial Sequence
  Description of Artificial Sequence: Synthetic oligonucleotide
uagugcuaaccccaaccaa

SEQ ID NO: 158045 - RNA, 19 nt, Artificial Sequence
  Description of Artificial Sequence: Synthetic oligonucleotide
cacacaacucuguauggca

SEQ ID NO: 158046 - RNA, 19 nt, Artificial Sequence
  Description of Artificial Sequence: Synthetic oligonucleotide
ucccacacgagcauuuguu

SEQ ID NO: 158047 - RNA, 19 nt, Artificial Sequence
  Description of Artificial Sequence: Synthetic oligonucleotide
guuuucguggagaccuacg

SEQ ID NO: 158048 - RNA, 19 nt, Artificial Sequence
  Description of Artificial Sequence: Synthetic oligonucleotide
ucccuaggggcuugucugg

SEQ ID NO: 158049 - RNA, 19 nt, Artificial Sequence
  Description of Artificial Sequence: Synthetic oligonucleotide
aacuuugcaucuagcauuu

SEQ ID NO: 158050 - RNA, 19 nt, Artificial Sequence
  Description of Artificial Sequence: Synthetic oligonucleotide
ucgaggucucaaccguaag

SEQ ID NO: 158051 - RNA, 19 nt, Artificial Sequence
  Description of Artificial Sequence: Synthetic oligonucleotide
gaucuauaacaucguagua

SEQ ID NO: 158052 - RNA, 19 nt, Artificial Sequence
  Description of Artificial Sequence: Synthetic oligonucleotide
cuguucgaaucaaacuauc

SEQ ID NO: 158053 - RNA, 19 nt, Artificial Sequence
  Description of Artificial Sequence: Synthetic oligonucleotide
ccaacuaccguccaggaga

SEQ ID NO: 158054 - RNA, 19 nt, Artificial Sequence
  Description of Artificial Sequence: Synthetic oligonucleotide
gcggacauaagaaacagga

SEQ ID NO: 158055 - RNA, 19 nt, Artificial Sequence
  Description of Artificial Sequence: Synthetic oligonucleotide
acugcggaaacaagcaacu

SEQ ID NO: 158056 - RNA, 19 nt, Artificial Sequence
  Description of Artificial Sequence: Synthetic oligonucleotide
uuccccgucugguacuuca

SEQ ID NO: 158057 - RNA, 19 nt, Artificial Sequence
  Description of Artificial Sequence: Synthetic oligonucleotide
agguagacucuucagugua

SEQ ID NO: 158058 - RNA, 19 nt, Artificial Sequence
  Description of Artificial Sequence: Synthetic oligonucleotide
ucacugcggaaacaagcaa

SEQ ID NO: 158059 - RNA, 19 nt, Artificial Sequence
  Description of Artificial Sequence: Synthetic oligonucleotide
ggaaaguagagugccauca

SEQ ID NO: 158060 - RNA, 19 nt, Artificial Sequence
  Description of Artificial Sequence: Synthetic oligonucleotide
aaccccaaccaaggcuuac

SEQ ID NO: 158061 - RNA, 19 nt, Artificial Sequence
  Description of Artificial Sequence: Synthetic oligonucleotide
cuauaacaucguaguaguc

SEQ ID NO: 158062 - RNA, 19 nt, Artificial Sequence
  Description of Artificial Sequence: Synthetic oligonucleotide
caaauucaaaaucgauaga

SEQ ID NO: 158063 - RNA, 19 nt, Artificial Sequence
  Description of Artificial Sequence: Synthetic oligonucleotide
agcgagccuaucaggaaac

SEQ ID NO: 158064 - RNA, 19 nt, Artificial Sequence
  Description of Artificial Sequence: Synthetic oligonucleotide
uguuagcuucacgucauau

SEQ ID NO: 158065 - RNA, 19 nt, Artificial Sequence
  Description of Artificial Sequence: Synthetic oligonucleotide
uggggugaucuauaacauc

SEQ ID NO: 158066 - RNA, 19 nt, Artificial Sequence
  Description of Artificial Sequence: Synthetic oligonucleotide
ucguggagaccuacgugcu

SEQ ID NO: 158067 - RNA, 19 nt, Artificial Sequence
  Description of Artificial Sequence: Synthetic oligonucleotide
uugguuuuaugaggcggug

SEQ ID NO: 158068 - RNA, 19 nt, Artificial Sequence
  Description of Artificial Sequence: Synthetic oligonucleotide
acggcaguuguagagcuca

SEQ ID NO: 158069 - RNA, 19 nt, Artificial Sequence
  Description of Artificial Sequence: Synthetic oligonucleotide
ugcuagcuuuucugggcag

SEQ ID NO: 158070 - RNA, 19 nt, Artificial Sequence
  Description of Artificial Sequence: Synthetic oligonucleotide
cuggugaacacacaacucu

SEQ ID NO: 158071 - RNA, 19 nt, Artificial Sequence
  Description of Artificial Sequence: Synthetic oligonucleotide
gauacggugggcuuccuuu

SEQ ID NO: 158072 - RNA, 19 nt, Artificial Sequence
  Description of Artificial Sequence: Synthetic oligonucleotide
ugguuuuaugaggcgguga

SEQ ID NO: 158073 - RNA, 19 nt, Artificial Sequence
  Description of Artificial Sequence: Synthetic oligonucleotide
ccccauacagcucagaaca

SEQ ID NO: 158074 - RNA, 19 nt, Artificial Sequence
  Description of Artificial Sequence: Synthetic oligonucleotide
gcgaacacauaucauagaa

SEQ ID NO: 158075 - RNA, 19 nt, Artificial Sequence
  Description of Artificial Sequence: Synthetic oligonucleotide
uuucgaggucucaaccgua

SEQ ID NO: 158076 - RNA, 19 nt, Artificial Sequence
  Description of Artificial Sequence: Synthetic oligonucleotide
auaucacugcggaaacaag

SEQ ID NO: 158077 - RNA, 19 nt, Artificial Sequence
  Description of Artificial Sequence: Synthetic oligonucleotide
acgggaagugccuucguuu

SEQ ID NO: 158078 - RNA, 19 nt, Artificial Sequence
  Description of Artificial Sequence: Synthetic oligonucleotide
gagauagugcggacauaag

SEQ ID NO: 158079 - RNA, 19 nt, Artificial Sequence
  Description of Artificial Sequence: Synthetic oligonucleotide
uacgugcucugucauuaau

SEQ ID NO: 158080 - RNA, 19 nt, Artificial Sequence
  Description of Artificial Sequence: Synthetic oligonucleotide
aaaagccccauggggaguu

SEQ ID NO: 158081 - RNA, 19 nt, Artificial Sequence
  Description of Artificial Sequence: Synthetic oligonucleotide
acgcuuggucugaaguacc

SEQ ID NO: 158082 - RNA, 19 nt, Artificial Sequence
  Description of Artificial Sequence: Synthetic oligonucleotide
cuaccguccaggagauuug

SEQ ID NO: 158083 - RNA, 19 nt, Artificial Sequence
  Description of Artificial Sequence: Synthetic oligonucleotide
gccuguucgaaucaaacua

SEQ ID NO: 158084 - RNA, 19 nt, Artificial Sequence
  Description of Artificial Sequence: Synthetic oligonucleotide
ucaucgucagcgagccuau

SEQ ID NO: 158085 - RNA, 19 nt, Artificial Sequence
  Description of Artificial Sequence: Synthetic oligonucleotide
uaaccgcggcccuuccucc

SEQ ID NO: 158086 - RNA, 19 nt, Artificial Sequence
  Description of Artificial Sequence: Synthetic oligonucleotide
ccucggauggucuuucgag

SEQ ID NO: 158087 - RNA, 19 nt, Artificial Sequence
  Description of Artificial Sequence: Synthetic oligonucleotide
cccgucaaagccaagguca

SEQ ID NO: 158088 - RNA, 19 nt, Artificial Sequence
  Description of Artificial Sequence: Synthetic oligonucleotide
ggaagcuuuucuccccgcc

SEQ ID NO: 158089 - RNA, 19 nt, Artificial Sequence
  Description of Artificial Sequence: Synthetic oligonucleotide
cagacauaucccagccuuc

SEQ ID NO: 158090 - RNA, 19 nt, Artificial Sequence
  Description of Artificial Sequence: Synthetic oligonucleotide
cuaaccccaaccaaggcuu

SEQ ID NO: 158091 - RNA, 19 nt, Artificial Sequence
  Description of Artificial Sequence: Synthetic oligonucleotide
auacucucucuccugccuu

SEQ ID NO: 158092 - RNA, 19 nt, Artificial Sequence
  Description of Artificial Sequence: Synthetic oligonucleotide
gugaacacacaacucugua

SEQ ID NO: 158093 - RNA, 19 nt, Artificial Sequence
  Description of Artificial Sequence: Synthetic oligonucleotide
uacccuuaaccgcggcccu

SEQ ID NO: 158094 - RNA, 19 nt, Artificial Sequence
  Description of Artificial Sequence: Synthetic oligonucleotide
aaccguaagccagccacuu

SEQ ID NO: 158095 - RNA, 19 nt, Artificial Sequence
  Description of Artificial Sequence: Synthetic oligonucleotide
acgaggcuagacaggcuac

SEQ ID NO: 158096 - RNA, 19 nt, Artificial Sequence
  Description of Artificial Sequence: Synthetic oligonucleotide
uggagaccuacgugcucug

SEQ ID NO: 158097 - RNA, 19 nt, Artificial Sequence
  Description of Artificial Sequence: Synthetic oligonucleotide
cuacgcuuggucugaagua

SEQ ID NO: 158098 - RNA, 19 nt, Artificial Sequence
  Description of Artificial Sequence: Synthetic oligonucleotide
cagucucuacgggaagugc

SEQ ID NO: 158099 - RNA, 19 nt, Artificial Sequence
  Description of Artificial Sequence: Synthetic oligonucleotide
uucguccccuggacugucc

SEQ ID NO: 158100 - RNA, 19 nt, Artificial Sequence
  Description of Artificial Sequence: Synthetic oligonucleotide
cucuacgggaagugccuuc

SEQ ID NO: 158101 - RNA, 19 nt, Artificial Sequence
  Description of Artificial Sequence: Synthetic oligonucleotide
ggaagagauagugcggaca

SEQ ID NO: 158102 - RNA, 19 nt, Artificial Sequence
  Description of Artificial Sequence: Synthetic oligonucleotide
cuuucgaggucucaaccgu

SEQ ID NO: 158103 - RNA, 19 nt, Artificial Sequence
  Description of Artificial Sequence: Synthetic oligonucleotide
ugauacggugggcuuccuu

SEQ ID NO: 158104 - RNA, 19 nt, Artificial Sequence
  Description of Artificial Sequence: Synthetic oligonucleotide
cacgaggcuagacaggcua

SEQ ID NO: 158105 - RNA, 19 nt, Artificial Sequence
  Description of Artificial Sequence: Synthetic oligonucleotide
caguggggugaucuauaac

SEQ ID NO: 158106 - RNA, 19 nt, Artificial Sequence
  Description of Artificial Sequence: Synthetic oligonucleotide
auacuccccaagagcuugg

SEQ ID NO: 158107 - RNA, 19 nt, Artificial Sequence
  Description of Artificial Sequence: Synthetic oligonucleotide
uuguuagcuucacgucaua

SEQ ID NO: 158108 - RNA, 19 nt, Artificial Sequence
  Description of Artificial Sequence: Synthetic oligonucleotide
cccuucaucgucagcgagc

SEQ ID NO: 158109 - RNA, 19 nt, Artificial Sequence
  Description of Artificial Sequence: Synthetic oligonucleotide
aggcuuuauuacacucguc

SEQ ID NO: 158110 - RNA, 19 nt, Artificial Sequence
  Description of Artificial Sequence: Synthetic oligonucleotide
agagggccggccucagaca

SEQ ID NO: 158111 - RNA, 19 nt, Artificial Sequence
  Description of Artificial Sequence: Synthetic oligonucleotide
auuagccccaagaguugug

SEQ ID NO: 158112 - RNA, 19 nt, Artificial Sequence
  Description of Artificial Sequence: Synthetic oligonucleotide
ggugaucuauaacaucgua

SEQ ID NO: 158113 - RNA, 19 nt, Artificial Sequence
  Description of Artificial Sequence: Synthetic oligonucleotide
agucuacccuuaaccgcgg

SEQ ID NO: 158114 - RNA, 19 nt, Artificial Sequence
  Description of Artificial Sequence: Synthetic oligonucleotide
acaacucuguauggcacua

SEQ ID NO: 158115 - RNA, 19 nt, Artificial Sequence
  Description of Artificial Sequence: Synthetic oligonucleotide
gcuaaccccaaccaaggcu

SEQ ID NO: 158116 - RNA, 19 nt, Artificial Sequence
  Description of Artificial Sequence: Synthetic oligonucleotide
ugccauuccccgucuggua

SEQ ID NO: 158117 - RNA, 19 nt, Artificial Sequence
  Description of Artificial Sequence: Synthetic oligonucleotide
cugccacgggaguuucgcc

SEQ ID NO: 158118 - RNA, 19 nt, Artificial Sequence
  Description of Artificial Sequence: Synthetic oligonucleotide
uaaccccaaccaaggcuua

SEQ ID NO: 158119 - RNA, 19 nt, Artificial Sequence
  Description of Artificial Sequence: Synthetic oligonucleotide
gcuacgcuuggucugaagu

SEQ ID NO: 158120 - RNA, 19 nt, Artificial Sequence
  Description of Artificial Sequence: Synthetic oligonucleotide
caguggugccaggaucacg

SEQ ID NO: 158121 - RNA, 19 nt, Artificial Sequence
  Description of Artificial Sequence: Synthetic oligonucleotide
acgugcucugucauuaaua

SEQ ID NO: 158122 - RNA, 19 nt, Artificial Sequence
  Description of Artificial Sequence: Synthetic oligonucleotide
aagcgguacuucaccaguu

SEQ ID NO: 158123 - RNA, 19 nt, Artificial Sequence
  Description of Artificial Sequence: Synthetic oligonucleotide
guccccuggacuguccaac

SEQ ID NO: 158124 - RNA, 19 nt, Artificial Sequence
  Description of Artificial Sequence: Synthetic oligonucleotide
cucgagcuacgcuuggucu

SEQ ID NO: 158125 - RNA, 19 nt, Artificial Sequence
  Description of Artificial Sequence: Synthetic oligonucleotide
acgggaguuucgccuggca

SEQ ID NO: 158126 - RNA, 19 nt, Artificial Sequence
  Description of Artificial Sequence: Synthetic oligonucleotide
gucuacccuuaaccgcggc

SEQ ID NO: 158127 - RNA, 19 nt, Artificial Sequence
  Description of Artificial Sequence: Synthetic oligonucleotide
cggacauaagaaacaggac

SEQ ID NO: 158128 - RNA, 19 nt, Artificial Sequence
  Description of Artificial Sequence: Synthetic oligonucleotide
cuuccuacugugggguaca

SEQ ID NO: 158129 - RNA, 19 nt, Artificial Sequence
  Description of Artificial Sequence: Synthetic oligonucleotide
uccccgucugguacuucau

SEQ ID NO: 158130 - RNA, 19 nt, Artificial Sequence
  Description of Artificial Sequence: Synthetic oligonucleotide
cccacacgagcauuuguuc

SEQ ID NO: 158131 - RNA, 19 nt, Artificial Sequence
  Description of Artificial Sequence: Synthetic oligonucleotide
ucucuacgggaagugccuu

SEQ ID NO: 158132 - RNA, 19 nt, Artificial Sequence
  Description of Artificial Sequence: Synthetic oligonucleotide
caguggaaauaccagcuuu

SEQ ID NO: 158133 - RNA, 19 nt, Artificial Sequence
  Description of Artificial Sequence: Synthetic oligonucleotide
auguuagugcuaaccccaa

SEQ ID NO: 158134 - RNA, 19 nt, Artificial Sequence
  Description of Artificial Sequence: Synthetic oligonucleotide
ggggaauaagcgaacacau

SEQ ID NO: 158135 - RNA, 19 nt, Artificial Sequence
  Description of Artificial Sequence: Synthetic oligonucleotide
cgucagcgagccuaucagg

SEQ ID NO: 158136 - RNA, 19 nt, Artificial Sequence
  Description of Artificial Sequence: Synthetic oligonucleotide
gucucuacgggaagugccu

SEQ ID NO: 158137 - RNA, 19 nt, Artificial Sequence
  Description of Artificial Sequence: Synthetic oligonucleotide
gcggaggggaauaagcgaa

SEQ ID NO: 158138 - RNA, 19 nt, Artificial Sequence
  Description of Artificial Sequence: Synthetic oligonucleotide
ccucgagcuacgcuugguc

SEQ ID NO: 158139 - RNA, 19 nt, Artificial Sequence
  Description of Artificial Sequence: Synthetic oligonucleotide
ucacggcaucaauguuagu

SEQ ID NO: 158140 - RNA, 19 nt, Artificial Sequence
  Description of Artificial Sequence: Synthetic oligonucleotide
cacgagcauuuguucugca

SEQ ID NO: 158141 - RNA, 19 nt, Artificial Sequence
  Description of Artificial Sequence: Synthetic oligonucleotide
cuacgugcucugucauuaa

SEQ ID NO: 158142 - RNA, 19 nt, Artificial Sequence
  Description of Artificial Sequence: Synthetic oligonucleotide
guggggugaucuauaacau

SEQ ID NO: 158143 - RNA, 19 nt, Artificial Sequence
  Description of Artificial Sequence: Synthetic oligonucleotide
uggccggggagguguuuau

SEQ ID NO: 158144 - RNA, 19 nt, Artificial Sequence
  Description of Artificial Sequence: Synthetic oligonucleotide
cgggaguuucgccuggcag

SEQ ID NO: 158145 - RNA, 19 nt, Artificial Sequence
  Description of Artificial Sequence: Synthetic oligonucleotide
cagacccgucaaagccaag

SEQ ID NO: 158146 - RNA, 19 nt, Artificial Sequence
  Description of Artificial Sequence: Synthetic oligonucleotide
gaccuacgugcucugucau

SEQ ID NO: 158147 - RNA, 19 nt, Artificial Sequence
  Description of Artificial Sequence: Synthetic oligonucleotide
ggaguuucgccuggcagua

SEQ ID NO: 158148 - RNA, 19 nt, Artificial Sequence
  Description of Artificial Sequence: Synthetic oligonucleotide
ccuguucgaaucaaacuau

SEQ ID NO: 158149 - RNA, 19 nt, Artificial Sequence
  Description of Artificial Sequence: Synthetic oligonucleotide
caacuaccguccaggagau

SEQ ID NO: 158150 - RNA, 19 nt, Artificial Sequence
  Description of Artificial Sequence: Synthetic oligonucleotide
gggaauaagcgaacacaua

SEQ ID NO: 158151 - RNA, 19 nt, Artificial Sequence
  Description of Artificial Sequence: Synthetic oligonucleotide
ccuacgugcucugucauua

SEQ ID NO: 158152 - RNA, 19 nt, Artificial Sequence
  Description of Artificial Sequence: Synthetic oligonucleotide
ccccuucaucgucagcgag

SEQ ID NO: 158153 - RNA, 19 nt, Artificial Sequence
  Description of Artificial Sequence: Synthetic oligonucleotide
cgaggcuagacaggcuacg

SEQ ID NO: 158154 - RNA, 19 nt, Artificial Sequence
  Description of Artificial Sequence: Synthetic oligonucleotide
gccucggauggucuuucga

SEQ ID NO: 158155 - RNA, 19 nt, Artificial Sequence
  Description of Artificial Sequence: Synthetic oligonucleotide
cuuaaccgcggcccuuccu

SEQ ID NO: 158156 - RNA, 19 nt, Artificial Sequence
  Description of Artificial Sequence: Synthetic oligonucleotide
cccaaccaaggcuuacaga

SEQ ID NO: 158157 - RNA, 19 nt, Artificial Sequence
  Description of Artificial Sequence: Synthetic oligonucleotide
cagaucccgcugcccgcug

SEQ ID NO: 158158 - RNA, 19 nt, Artificial Sequence
  Description of Artificial Sequence: Synthetic oligonucleotide
ccuuaaccgcggcccuucc

SEQ ID NO: 158159 - RNA, 19 nt, Artificial Sequence
  Description of Artificial Sequence: Synthetic oligonucleotide
cggaggggaauaagcgaac

SEQ ID NO: 158160 - RNA, 19 nt, Artificial Sequence
  Description of Artificial Sequence: Synthetic oligonucleotide
ggcggugagcugggugagg

SEQ ID NO: 158161 - RNA, 19 nt, Artificial Sequence
  Description of Artificial Sequence: Synthetic oligonucleotide
gcaguggaaauaccagcuu

SEQ ID NO: 158162 - RNA, 19 nt, Artificial Sequence
  Description of Artificial Sequence: Synthetic oligonucleotide
cugugggguacaguacccu

SEQ ID NO: 158163 - RNA, 19 nt, Artificial Sequence
  Description of Artificial Sequence: Synthetic oligonucleotide
acccuuaaccgcggcccuu

SEQ ID NO: 158164 - RNA, 19 nt, Artificial Sequence
  Description of Artificial Sequence: Synthetic oligonucleotide
cccuuaaccgcggcccuuc

SEQ ID NO: 158165 - RNA, 19 nt, Artificial Sequence
  Description of Artificial Sequence: Synthetic oligonucleotide
ggaucacggcaucaauguu

SEQ ID NO: 158166 - RNA, 19 nt, Artificial Sequence
  Description of Artificial Sequence: Synthetic oligonucleotide
cguggagaccuacgugcuc

SEQ ID NO: 158167 - RNA, 19 nt, Artificial Sequence
  Description of Artificial Sequence: Synthetic oligonucleotide
ccacggcaguuguagagcu

SEQ ID NO: 158168 - RNA, 19 nt, Artificial Sequence
  Description of Artificial Sequence: Synthetic oligonucleotide
cgagcuacgcuuggucuga

SEQ ID NO: 158169 - RNA, 19 nt, Artificial Sequence
  Description of Artificial Sequence: Synthetic oligonucleotide
ccgacaaacuuugcaucua

SEQ ID NO: 158170 - RNA, 19 nt, Artificial Sequence
  Description of Artificial Sequence: Synthetic oligonucleotide
cauuccccgucugguacuu

SEQ ID NO: 158171 - RNA, 19 nt, Artificial Sequence
  Description of Artificial Sequence: Synthetic oligonucleotide
gcggcccuuccuccuuuaa

SEQ ID NO: 158172 - RNA, 19 nt, Artificial Sequence
  Description of Artificial Sequence: Synthetic oligonucleotide
cugauacggugggcuuccu

SEQ ID NO: 158173 - RNA, 19 nt, Artificial Sequence
  Description of Artificial Sequence: Synthetic oligonucleotide
cgagccuaucaggaaacuu

SEQ ID NO: 158174 - RNA, 19 nt, Artificial Sequence
  Description of Artificial Sequence: Synthetic oligonucleotide
ccgcaauggggagggugcu

SEQ ID NO: 158175 - RNA, 19 nt, Artificial Sequence
  Description of Artificial Sequence: Synthetic oligonucleotide
cgcggcccuuccuccuuua

SEQ ID NO: 158176 - RNA, 19 nt, Artificial Sequence
  Description of Artificial Sequence: Synthetic oligonucleotide
aauaauuacaggcaccgug

SEQ ID NO: 158177 - RNA, 19 nt, Artificial Sequence
  Description of Artificial Sequence: Synthetic oligonucleotide
uuaauaauuacaggcaccg

SEQ ID NO: 158178 - RNA, 19 nt, Artificial Sequence
  Description of Artificial Sequence: Synthetic oligonucleotide
ucuggcacgaucaagucgg

SEQ ID NO: 158179 - RNA, 19 nt, Artificial Sequence
  Description of Artificial Sequence: Synthetic oligonucleotide
uucguaauuucccugaaga

SEQ ID NO: 158180 - RNA, 19 nt, Artificial Sequence
  Description of Artificial Sequence: Synthetic oligonucleotide
ugcaacauaaaacggauuc

SEQ ID NO: 158181 - RNA, 19 nt, Artificial Sequence
  Description of Artificial Sequence: Synthetic oligonucleotide
ucuauccagucaaacaccg

SEQ ID NO: 158182 - RNA, 19 nt, Artificial Sequence
  Description of Artificial Sequence: Synthetic oligonucleotide
aaugugcuaacgucuuggc

SEQ ID NO: 158183 - RNA, 19 nt, Artificial Sequence
  Description of Artificial Sequence: Synthetic oligonucleotide
ugugcuaacgucuuggccu

SEQ ID NO: 158184 - RNA, 19 nt, Artificial Sequence
  Description of Artificial Sequence: Synthetic oligonucleotide
aguuuucgaaaauucacag

SEQ ID NO: 158185 - RNA, 19 nt, Artificial Sequence
  Description of Artificial Sequence: Synthetic oligonucleotide
aaaugugcuaacgucuugg

SEQ ID NO: 158186 - RNA, 19 nt, Artificial Sequence
  Description of Artificial Sequence: Synthetic oligonucleotide
auaauuacaggcaccgugc

SEQ ID NO: 158187 - RNA, 19 nt, Artificial Sequence
  Description of Artificial Sequence: Synthetic oligonucleotide
ugagguaucaauggggcgg

SEQ ID NO: 158188 - RNA, 19 nt, Artificial Sequence
  Description of Artificial Sequence: Synthetic oligonucleotide
aagacuuuauauauaucuc

SEQ ID NO: 158189 - RNA, 19 nt, Artificial Sequence
  Description of Artificial Sequence: Synthetic oligonucleotide
uguucuggcacgaucaagu

SEQ ID NO: 158190 - RNA, 19 nt, Artificial Sequence
  Description of Artificial Sequence: Synthetic oligonucleotide
uaaaacggauucgagauga

SEQ ID NO: 158191 - RNA, 19 nt, Artificial Sequence
  Description of Artificial Sequence: Synthetic oligonucleotide
uaaggucacuacaagggcc

SEQ ID NO: 158192 - RNA, 19 nt, Artificial Sequence
  Description of Artificial Sequence: Synthetic oligonucleotide
acauaaaacggauucgaga

SEQ ID NO: 158193 - RNA, 19 nt, Artificial Sequence
  Description of Artificial Sequence: Synthetic oligonucleotide
uguuggaaucaauggaucc

SEQ ID NO: 158194 - RNA, 19 nt, Artificial Sequence
  Description of Artificial Sequence: Synthetic oligonucleotide
agugcuacguuccagcgug

SEQ ID NO: 158195 - RNA, 19 nt, Artificial Sequence
  Description of Artificial Sequence: Synthetic oligonucleotide
uggcauaagccacagagaa

SEQ ID NO: 158196 - RNA, 19 nt, Artificial Sequence
  Description of Artificial Sequence: Synthetic oligonucleotide
aacggauucgagaugaggu

SEQ ID NO: 158197 - RNA, 19 nt, Artificial Sequence
  Description of Artificial Sequence: Synthetic oligonucleotide
uucuggcacgaucaagucg

SEQ ID NO: 158198 - RNA, 19 nt, Artificial Sequence
  Description of Artificial Sequence: Synthetic oligonucleotide
aucaagucgguccccacgg

SEQ ID NO: 158199 - RNA, 19 nt, Artificial Sequence
  Description of Artificial Sequence: Synthetic oligonucleotide
auauucccuaaagagcgcc

SEQ ID NO: 158200 - RNA, 19 nt, Artificial Sequence
  Description of Artificial Sequence: Synthetic oligonucleotide
ugucaugagggcucgaacu

SEQ ID NO: 158201 - RNA, 19 nt, Artificial Sequence
  Description of Artificial Sequence: Synthetic oligonucleotide
aauuacugauccauucgag

SEQ ID NO: 158202 - RNA, 19 nt, Artificial Sequence
  Description of Artificial Sequence: Synthetic oligonucleotide
agcgucuuccuucacgacg

SEQ ID NO: 158203 - RNA, 19 nt, Artificial Sequence
  Description of Artificial Sequence: Synthetic oligonucleotide
cauucgagggaauuaacuc

SEQ ID NO: 158204 - RNA, 19 nt, Artificial Sequence
  Description of Artificial Sequence: Synthetic oligonucleotide
auuaacucuccaaugaacu

SEQ ID NO: 158205 - RNA, 19 nt, Artificial Sequence
  Description of Artificial Sequence: Synthetic oligonucleotide
ucguaauuucccugaagag

SEQ ID NO: 158206 - RNA, 19 nt, Artificial Sequence
  Description of Artificial Sequence: Synthetic oligonucleotide
aaacggauucgagaugagg

SEQ ID NO: 158207 - RNA, 19 nt, Artificial Sequence
  Description of Artificial Sequence: Synthetic oligonucleotide
augugcuaacgucuuggcc

SEQ ID NO: 158208 - RNA, 19 nt, Artificial Sequence
  Description of Artificial Sequence: Synthetic oligonucleotide
cacugcaacauccacucgg

SEQ ID NO: 158209 - RNA, 19 nt, Artificial Sequence
  Description of Artificial Sequence: Synthetic oligonucleotide
uguucacgagcaauagugc

SEQ ID NO: 158210 - RNA, 19 nt, Artificial Sequence
  Description of Artificial Sequence: Synthetic oligonucleotide
caagguauauuccaccuuc

SEQ ID NO: 158211 - RNA, 19 nt, Artificial Sequence
  Description of Artificial Sequence: Synthetic oligonucleotide
ugcaacauccacucggaga

SEQ ID NO: 158212 - RNA, 19 nt, Artificial Sequence
  Description of Artificial Sequence: Synthetic oligonucleotide
aacauaaaacggauucgag

SEQ ID NO: 158213 - RNA, 19 nt, Artificial Sequence
  Description of Artificial Sequence: Synthetic oligonucleotide
uauucccuaaagagcgccg

SEQ ID NO: 158214 - RNA, 19 nt, Artificial Sequence
  Description of Artificial Sequence: Synthetic oligonucleotide
uccagcguggacucaaugc

SEQ ID NO: 158215 - RNA, 19 nt, Artificial Sequence
  Description of Artificial Sequence: Synthetic oligonucleotide
uauauaucucugugccccg

SEQ ID NO: 158216 - RNA, 19 nt, Artificial Sequence
  Description of Artificial Sequence: Synthetic oligonucleotide
uauaucucugugccccggg

SEQ ID NO: 158217 - RNA, 19 nt, Artificial Sequence
  Description of Artificial Sequence: Synthetic oligonucleotide
aaggccgcucucuacuccg

SEQ ID NO: 158218 - RNA, 19 nt, Artificial Sequence
  Description of Artificial Sequence: Synthetic oligonucleotide
cuaaggucacuacaagggc

SEQ ID NO: 158219 - RNA, 19 nt, Artificial Sequence
  Description of Artificial Sequence: Synthetic oligonucleotide
uauuggaugcuaucugcug

SEQ ID NO: 158220 - RNA, 19 nt, Artificial Sequence
  Description of Artificial Sequence: Synthetic oligonucleotide
agggaauuaacucuccaau

SEQ ID NO: 158221 - RNA, 19 nt, Artificial Sequence
  Description of Artificial Sequence: Synthetic oligonucleotide
agcgauucaagguacuagu

SEQ ID NO: 158222 - RNA, 19 nt, Artificial Sequence
  Description of Artificial Sequence: Synthetic oligonucleotide
uaaagagcgccgucgagcu

SEQ ID NO: 158223 - RNA, 19 nt, Artificial Sequence
  Description of Artificial Sequence: Synthetic oligonucleotide
uaauuacaggcaccgugcc

SEQ ID NO: 158224 - RNA, 19 nt, Artificial Sequence
  Description of Artificial Sequence: Synthetic oligonucleotide
ugagggcucgaacuaaugu

SEQ ID NO: 158225 - RNA, 19 nt, Artificial Sequence
  Description of Artificial Sequence: Synthetic oligonucleotide
agguacuaguagcuggacg

SEQ ID NO: 158226 - RNA, 19 nt, Artificial Sequence
  Description of Artificial Sequence: Synthetic oligonucleotide
aagcgauucaagguacuag

SEQ ID NO: 158227 - RNA, 19 nt, Artificial Sequence
  Description of Artificial Sequence: Synthetic oligonucleotide
uccucuguacaacacgccu

SEQ ID NO: 158228 - RNA, 19 nt, Artificial Sequence
  Description of Artificial Sequence: Synthetic oligonucleotide
uauguucacgagcaauagu

SEQ ID NO: 158229 - RNA, 19 nt, Artificial Sequence
  Description of Artificial Sequence: Synthetic oligonucleotide
cucuauccagucaaacacc

SEQ ID NO: 158230 - RNA, 19 nt, Artificial Sequence
  Description of Artificial Sequence: Synthetic oligonucleotide
uagcagucgccccauaugu

SEQ ID NO: 158231 - RNA, 19 nt, Artificial Sequence
  Description of Artificial Sequence: Synthetic oligonucleotide
auaaaacggauucgagaug

SEQ ID NO: 158232 - RNA, 19 nt, Artificial Sequence
  Description of Artificial Sequence: Synthetic oligonucleotide
cucacuccgcucuagucgg

SEQ ID NO: 158233 - RNA, 19 nt, Artificial Sequence
  Description of Artificial Sequence: Synthetic oligonucleotide
gaaaagcgauucaagguac

SEQ ID NO: 158234 - RNA, 19 nt, Artificial Sequence
  Description of Artificial Sequence: Synthetic oligonucleotide
cacccaauugcucugccgc

SEQ ID NO: 158235 - RNA, 19 nt, Artificial Sequence
  Description of Artificial Sequence: Synthetic oligonucleotide
agccaauugaagaaggcug

SEQ ID NO: 158236 - RNA, 19 nt, Artificial Sequence
  Description of Artificial Sequence: Synthetic oligonucleotide
ucgaagccaauugaagaag

SEQ ID NO: 158237 - RNA, 19 nt, Artificial Sequence
  Description of Artificial Sequence: Synthetic oligonucleotide
ucgaacuaauguauuggau

SEQ ID NO: 158238 - RNA, 19 nt, Artificial Sequence
  Description of Artificial Sequence: Synthetic oligonucleotide
ucccuaaagagcgccgucg

SEQ ID NO: 158239 - RNA, 19 nt, Artificial Sequence
  Description of Artificial Sequence: Synthetic oligonucleotide
caugcucuugcauaggaga

SEQ ID NO: 158240 - RNA, 19 nt, Artificial Sequence
  Description of Artificial Sequence: Synthetic oligonucleotide
uggcaucgauuuaacaaca

SEQ ID NO: 158241 - RNA, 19 nt, Artificial Sequence
  Description of Artificial Sequence: Synthetic oligonucleotide
auauguucacgagcaauag

SEQ ID NO: 158242 - RNA, 19 nt, Artificial Sequence
  Description of Artificial Sequence: Synthetic oligonucleotide
gacccugauccccucgucg

SEQ ID NO: 158243 - RNA, 19 nt, Artificial Sequence
  Description of Artificial Sequence: Synthetic oligonucleotide
ugcuagaaauucccuccag

SEQ ID NO: 158244 - RNA, 19 nt, Artificial Sequence
  Description of Artificial Sequence: Synthetic oligonucleotide
gaaucaauggauccaggcu

SEQ ID NO: 158245 - RNA, 19 nt, Artificial Sequence
  Description of Artificial Sequence: Synthetic oligonucleotide
ugagccgugagguaucaau

SEQ ID NO: 158246 - RNA, 19 nt, Artificial Sequence
  Description of Artificial Sequence: Synthetic oligonucleotide
ugcuaaaacuucucuuggu

SEQ ID NO: 158247 - RNA, 19 nt, Artificial Sequence
  Description of Artificial Sequence: Synthetic oligonucleotide
ucugacgcugugucugagg

SEQ ID NO: 158248 - RNA, 19 nt, Artificial Sequence
  Description of Artificial Sequence: Synthetic oligonucleotide
caguuuucgaaaauucaca

SEQ ID NO: 158249 - RNA, 19 nt, Artificial Sequence
  Description of Artificial Sequence: Synthetic oligonucleotide
guaauuucccugaagagcu

SEQ ID NO: 158250 - RNA, 19 nt, Artificial Sequence
  Description of Artificial Sequence: Synthetic oligonucleotide
uagaaauuacugauccauu

SEQ ID NO: 158251 - RNA, 19 nt, Artificial Sequence
  Description of Artificial Sequence: Synthetic oligonucleotide
cauugagauggagauauuc

SEQ ID NO: 158252 - RNA, 19 nt, Artificial Sequence
  Description of Artificial Sequence: Synthetic oligonucleotide
uauguccggccucuucuag

SEQ ID NO: 158253 - RNA, 19 nt, Artificial Sequence
  Description of Artificial Sequence: Synthetic oligonucleotide
aagguacuaguagcuggac

SEQ ID NO: 158254 - RNA, 19 nt, Artificial Sequence
  Description of Artificial Sequence: Synthetic oligonucleotide
cuucacgacguccucauca

SEQ ID NO: 158255 - RNA, 19 nt, Artificial Sequence
  Description of Artificial Sequence: Synthetic oligonucleotide
ccucuauccagucaaacac

SEQ ID NO: 158256 - RNA, 19 nt, Artificial Sequence
  Description of Artificial Sequence: Synthetic oligonucleotide
agcgccgucgagcuuaugu

SEQ ID NO: 158257 - RNA, 19 nt, Artificial Sequence
  Description of Artificial Sequence: Synthetic oligonucleotide
gugagguaucaauggggcg

SEQ ID NO: 158258 - RNA, 19 nt, Artificial Sequence
  Description of Artificial Sequence: Synthetic oligonucleotide
gcucacuccgcucuagucg

SEQ ID NO: 158259 - RNA, 19 nt, Artificial Sequence
  Description of Artificial Sequence: Synthetic oligonucleotide
gagggaauuaacucuccaa

SEQ ID NO: 158260 - RNA, 19 nt, Artificial Sequence
  Description of Artificial Sequence: Synthetic oligonucleotide
cuucguaauuucccugaag

SEQ ID NO: 158261 - RNA, 19 nt, Artificial Sequence
  Description of Artificial Sequence: Synthetic oligonucleotide
ugccgcagauccaauacau

SEQ ID NO: 158262 - RNA, 19 nt, Artificial Sequence
  Description of Artificial Sequence: Synthetic oligonucleotide
aucgauuuaacaacaguuu

SEQ ID NO: 158263 - RNA, 19 nt, Artificial Sequence
  Description of Artificial Sequence: Synthetic oligonucleotide
ugcuaauggggacuguauu

SEQ ID NO: 158264 - RNA, 19 nt, Artificial Sequence
  Description of Artificial Sequence: Synthetic oligonucleotide
caacauaaaacggauucga

SEQ ID NO: 158265 - RNA, 19 nt, Artificial Sequence
  Description of Artificial Sequence: Synthetic oligonucleotide
ucgcacuuucaacacugca

SEQ ID NO: 158266 - RNA, 19 nt, Artificial Sequence
  Description of Artificial Sequence: Synthetic oligonucleotide
cucgaacuaauguauugga

SEQ ID NO: 158267 - RNA, 19 nt, Artificial Sequence
  Description of Artificial Sequence: Synthetic oligonucleotide
uccauucgagggaauuaac

SEQ ID NO: 158268 - RNA, 19 nt, Artificial Sequence
  Description of Artificial Sequence: Synthetic oligonucleotide
cucaccggagguagagugg

SEQ ID NO: 158269 - RNA, 19 nt, Artificial Sequence
  Description of Artificial Sequence: Synthetic oligonucleotide
ucgagggaauuaacucucc

SEQ ID NO: 158270 - RNA, 19 nt, Artificial Sequence
  Description of Artificial Sequence: Synthetic oligonucleotide
cucuagucggucuccccgg

SEQ ID NO: 158271 - RNA, 19 nt, Artificial Sequence
  Description of Artificial Sequence: Synthetic oligonucleotide
agcuacuccucuguacaac

SEQ ID NO: 158272 - RNA, 19 nt, Artificial Sequence
  Description of Artificial Sequence: Synthetic oligonucleotide
gauauucccuaaagagcgc

SEQ ID NO: 158273 - RNA, 19 nt, Artificial Sequence
  Description of Artificial Sequence: Synthetic oligonucleotide
aguagcuucugacgcugug

SEQ ID NO: 158274 - RNA, 19 nt, Artificial Sequence
  Description of Artificial Sequence: Synthetic oligonucleotide
gcuagaaauucccuccagc

SEQ ID NO: 158275 - RNA, 19 nt, Artificial Sequence
  Description of Artificial Sequence: Synthetic oligonucleotide
ugcgcagucccucgggcug

SEQ ID NO: 158276 - RNA, 19 nt, Artificial Sequence
  Description of Artificial Sequence: Synthetic oligonucleotide
caucgauuuaacaacaguu

SEQ ID NO: 158277 - RNA, 19 nt, Artificial Sequence
  Description of Artificial Sequence: Synthetic oligonucleotide
guagcagucucgcucgcac

SEQ ID NO: 158278 - RNA, 19 nt, Artificial Sequence
  Description of Artificial Sequence: Synthetic oligonucleotide
gagggcucgaacuaaugua

SEQ ID NO: 158279 - RNA, 19 nt, Artificial Sequence
  Description of Artificial Sequence: Synthetic oligonucleotide
ucgcacuacaggcacccac

SEQ ID NO: 158280 - RNA, 19 nt, Artificial Sequence
  Description of Artificial Sequence: Synthetic oligonucleotide
aaauucccuccagcucagc

SEQ ID NO: 158281 - RNA, 19 nt, Artificial Sequence
  Description of Artificial Sequence: Synthetic oligonucleotide
auacagcccuugguaauac

SEQ ID NO: 158282 - RNA, 19 nt, Artificial Sequence
  Description of Artificial Sequence: Synthetic oligonucleotide
cuuuggagggcucaccgga

SEQ ID NO: 158283 - RNA, 19 nt, Artificial Sequence
  Description of Artificial Sequence: Synthetic oligonucleotide
gcacauguuggcauaagcc

SEQ ID NO: 158284 - RNA, 19 nt, Artificial Sequence
  Description of Artificial Sequence: Synthetic oligonucleotide
auauaucucugugccccgg

SEQ ID NO: 158285 - RNA, 19 nt, Artificial Sequence
  Description of Artificial Sequence: Synthetic oligonucleotide
aaaacggauucgagaugag

SEQ ID NO: 158286 - RNA, 19 nt, Artificial Sequence
  Description of Artificial Sequence: Synthetic oligonucleotide
cguaauuucccugaagagc

SEQ ID NO: 158287 - RNA, 19 nt, Artificial Sequence
  Description of Artificial Sequence: Synthetic oligonucleotide
gcucuagucggucuccccg

SEQ ID NO: 158288 - RNA, 19 nt, Artificial Sequence
  Description of Artificial Sequence: Synthetic oligonucleotide
ugccagguaaagccauaca

SEQ ID NO: 158289 - RNA, 19 nt, Artificial Sequence
  Description of Artificial Sequence: Synthetic oligonucleotide
caucgcacuacaggcaccc

SEQ ID NO: 158290 - RNA, 19 nt, Artificial Sequence
  Description of Artificial Sequence: Synthetic oligonucleotide
uaauaauuacaggcaccgu

SEQ ID NO: 158291 - RNA, 19 nt, Artificial Sequence
  Description of Artificial Sequence: Synthetic oligonucleotide
uucacgacguccucaucau

SEQ ID NO: 158292 - RNA, 19 nt, Artificial Sequence
  Description of Artificial Sequence: Synthetic oligonucleotide
ucucgcucgcacuuucaac

SEQ ID NO: 158293 - RNA, 19 nt, Artificial Sequence
  Description of Artificial Sequence: Synthetic oligonucleotide
cacaaguauuucuguagca

SEQ ID NO: 158294 - RNA, 19 nt, Artificial Sequence
  Description of Artificial Sequence: Synthetic oligonucleotide
cugauccccucgucgaggc

SEQ ID NO: 158295 - RNA, 19 nt, Artificial Sequence
  Description of Artificial Sequence: Synthetic oligonucleotide
ggcacauguuggcauaagc

SEQ ID NO: 158296 - RNA, 19 nt, Artificial Sequence
  Description of Artificial Sequence: Synthetic oligonucleotide
acaccggcugguuacugcu

SEQ ID NO: 158297 - RNA, 19 nt, Artificial Sequence
  Description of Artificial Sequence: Synthetic oligonucleotide
ggcaucaaagaacauccga

SEQ ID NO: 158298 - RNA, 19 nt, Artificial Sequence
  Description of Artificial Sequence: Synthetic oligonucleotide
uuccagcguggacucaaug

SEQ ID NO: 158299 - RNA, 19 nt, Artificial Sequence
  Description of Artificial Sequence: Synthetic oligonucleotide
aacacgccuguuaucugug

SEQ ID NO: 158300 - RNA, 19 nt, Artificial Sequence
  Description of Artificial Sequence: Synthetic oligonucleotide
gcuguagaaagcgucuucc

SEQ ID NO: 158301 - RNA, 19 nt, Artificial Sequence
  Description of Artificial Sequence: Synthetic oligonucleotide
uuauuagcucagacacauc

SEQ ID NO: 158302 - RNA, 19 nt, Artificial Sequence
  Description of Artificial Sequence: Synthetic oligonucleotide
aggaucccgaccacgaucu

SEQ ID NO: 158303 - RNA, 19 nt, Artificial Sequence
  Description of Artificial Sequence: Synthetic oligonucleotide
auacaugagggaugucaau

SEQ ID NO: 158304 - RNA, 19 nt, Artificial Sequence
  Description of Artificial Sequence: Synthetic oligonucleotide
agccauacaugagggaugu

SEQ ID NO: 158305 - RNA, 19 nt, Artificial Sequence
  Description of Artificial Sequence: Synthetic oligonucleotide
cgugagguaucaauggggc

SEQ ID NO: 158306 - RNA, 19 nt, Artificial Sequence
  Description of Artificial Sequence: Synthetic oligonucleotide
ggcguagagugcuuguagc

SEQ ID NO: 158307 - RNA, 19 nt, Artificial Sequence
  Description of Artificial Sequence: Synthetic oligonucleotide
ccacaaaugugcuaacguc

SEQ ID NO: 158308 - RNA, 19 nt, Artificial Sequence
  Description of Artificial Sequence: Synthetic oligonucleotide
agguaaagccauacaugag

SEQ ID NO: 158309 - RNA, 19 nt, Artificial Sequence
  Description of Artificial Sequence: Synthetic oligonucleotide
uuucuaggucgucccguuc

SEQ ID NO: 158310 - RNA, 19 nt, Artificial Sequence
  Description of Artificial Sequence: Synthetic oligonucleotide
ucccggcuuaagcuacucc

SEQ ID NO: 158311 - RNA, 19 nt, Artificial Sequence
  Description of Artificial Sequence: Synthetic oligonucleotide
cgauucaagguacuaguag

SEQ ID NO: 158312 - RNA, 19 nt, Artificial Sequence
  Description of Artificial Sequence: Synthetic oligonucleotide
acccugauccccucgucga

SEQ ID NO: 158313 - RNA, 19 nt, Artificial Sequence
  Description of Artificial Sequence: Synthetic oligonucleotide
ucuagucggucuccccggu

SEQ ID NO: 158314 - RNA, 19 nt, Artificial Sequence
  Description of Artificial Sequence: Synthetic oligonucleotide
gcucaccggagguagagug

SEQ ID NO: 158315 - RNA, 19 nt, Artificial Sequence
  Description of Artificial Sequence: Synthetic oligonucleotide
auucccuaaagagcgccgu

SEQ ID NO: 158316 - RNA, 19 nt, Artificial Sequence
  Description of Artificial Sequence: Synthetic oligonucleotide
uuauguccggccucuucua

SEQ ID NO: 158317 - RNA, 19 nt, Artificial Sequence
  Description of Artificial Sequence: Synthetic oligonucleotide
ucaugagggcucgaacuaa

SEQ ID NO: 158318 - RNA, 19 nt, Artificial Sequence
  Description of Artificial Sequence: Synthetic oligonucleotide
gucgagcuuauguccggcc

SEQ ID NO: 158319 - RNA, 19 nt, Artificial Sequence
  Description of Artificial Sequence: Synthetic oligonucleotide
cauccacaaguggaaggcc

SEQ ID NO: 158320 - RNA, 19 nt, Artificial Sequence
  Description of Artificial Sequence: Synthetic oligonucleotide
agggcucgaacuaauguau

SEQ ID NO: 158321 - RNA, 19 nt, Artificial Sequence
  Description of Artificial Sequence: Synthetic oligonucleotide
acucagucguccuccuggu

SEQ ID NO: 158322 - RNA, 19 nt, Artificial Sequence
  Description of Artificial Sequence: Synthetic oligonucleotide
agccacuuuauuagcucag

SEQ ID NO: 158323 - RNA, 19 nt, Artificial Sequence
  Description of Artificial Sequence: Synthetic oligonucleotide
ucaagucgguccccacggu

SEQ ID NO: 158324 - RNA, 19 nt, Artificial Sequence
  Description of Artificial Sequence: Synthetic oligonucleotide
gucaugagggcucgaacua

SEQ ID NO: 158325 - RNA, 19 nt, Artificial Sequence
  Description of Artificial Sequence: Synthetic oligonucleotide
ggcuucguaauuucccuga

SEQ ID NO: 158326 - RNA, 19 nt, Artificial Sequence
  Description of Artificial Sequence: Synthetic oligonucleotide
ccaugccgcacaaagauga

SEQ ID NO: 158327 - RNA, 19 nt, Artificial Sequence
  Description of Artificial Sequence: Synthetic oligonucleotide
caagucgguccccacgguc

SEQ ID NO: 158328 - RNA, 19 nt, Artificial Sequence
  Description of Artificial Sequence: Synthetic oligonucleotide
gaucccgaccacgaucuuc

SEQ ID NO: 158329 - RNA, 19 nt, Artificial Sequence
  Description of Artificial Sequence: Synthetic oligonucleotide
uguagcagucucgcucgca

SEQ ID NO: 158330 - RNA, 19 nt, Artificial Sequence
  Description of Artificial Sequence: Synthetic oligonucleotide
caaggagggugaagccagc

SEQ ID NO: 158331 - RNA, 19 nt, Artificial Sequence
  Description of Artificial Sequence: Synthetic oligonucleotide
gccccauauguucacgagc

SEQ ID NO: 158332 - RNA, 19 nt, Artificial Sequence
  Description of Artificial Sequence: Synthetic oligonucleotide
gcuguucuaaggucacuac

SEQ ID NO: 158333 - RNA, 19 nt, Artificial Sequence
  Description of Artificial Sequence: Synthetic oligonucleotide
gucacuacaagggccugga

SEQ ID NO: 158334 - RNA, 19 nt, Artificial Sequence
  Description of Artificial Sequence: Synthetic oligonucleotide
ggucucagaggcuucguaa

SEQ ID NO: 158335 - RNA, 19 nt, Artificial Sequence
  Description of Artificial Sequence: Synthetic oligonucleotide
aguugugaucagacuccuc

SEQ ID NO: 158336 - RNA, 19 nt, Artificial Sequence
  Description of Artificial Sequence: Synthetic oligonucleotide
ggcuuaagcuacuccucug

SEQ ID NO: 158337 - RNA, 19 nt, Artificial Sequence
  Description of Artificial Sequence: Synthetic oligonucleotide
gcacccaauugcucugccg

SEQ ID NO: 158338 - RNA, 19 nt, Artificial Sequence
  Description of Artificial Sequence: Synthetic oligonucleotide
cucguucccggcuuaagcu

SEQ ID NO: 158339 - RNA, 19 nt, Artificial Sequence
  Description of Artificial Sequence: Synthetic oligonucleotide
guacaacacgccuguuauc

SEQ ID NO: 158340 - RNA, 19 nt, Artificial Sequence
  Description of Artificial Sequence: Synthetic oligonucleotide
gauucgagaugaggucuuc

SEQ ID NO: 158341 - RNA, 19 nt, Artificial Sequence
  Description of Artificial Sequence: Synthetic oligonucleotide
cuuaagcuacuccucugua

SEQ ID NO: 158342 - RNA, 19 nt, Artificial Sequence
  Description of Artificial Sequence: Synthetic oligonucleotide
cuacguuccagcguggacu

SEQ ID NO: 158343 - RNA, 19 nt, Artificial Sequence
  Description of Artificial Sequence: Synthetic oligonucleotide
ugcuacguuccagcgugga

SEQ ID NO: 158344 - RNA, 19 nt, Artificial Sequence
  Description of Artificial Sequence: Synthetic oligonucleotide
ggcaucgauuuaacaacag

SEQ ID NO: 158345 - RNA, 19 nt, Artificial Sequence
  Description of Artificial Sequence: Synthetic oligonucleotide
caugggucucagaggcuuc

SEQ ID NO: 158346 - RNA, 19 nt, Artificial Sequence
  Description of Artificial Sequence: Synthetic oligonucleotide
ccaugcucuugcauaggag

SEQ ID NO: 158347 - RNA, 19 nt, Artificial Sequence
  Description of Artificial Sequence: Synthetic oligonucleotide
acacgccuguuaucugugu

SEQ ID NO: 158348 - RNA, 19 nt, Artificial Sequence
  Description of Artificial Sequence: Synthetic oligonucleotide
cacgagcaauagugcuacg

SEQ ID NO: 158349 - RNA, 19 nt, Artificial Sequence
  Description of Artificial Sequence: Synthetic oligonucleotide
ggacccaugcucuugcaua

SEQ ID NO: 158350 - RNA, 19 nt, Artificial Sequence
  Description of Artificial Sequence: Synthetic oligonucleotide
gccgucgagcuuauguccg

SEQ ID NO: 158351 - RNA, 19 nt, Artificial Sequence
  Description of Artificial Sequence: Synthetic oligonucleotide
gccagguaaagccauacau

SEQ ID NO: 158352 - RNA, 19 nt, Artificial Sequence
  Description of Artificial Sequence: Synthetic oligonucleotide
caacacgccuguuaucugu

SEQ ID NO: 158353 - RNA, 19 nt, Artificial Sequence
  Description of Artificial Sequence: Synthetic oligonucleotide
aaagagcgccgucgagcuu

SEQ ID NO: 158354 - RNA, 19 nt, Artificial Sequence
  Description of Artificial Sequence: Synthetic oligonucleotide
gucucagaggcuucguaau

SEQ ID NO: 158355 - RNA, 19 nt, Artificial Sequence
  Description of Artificial Sequence: Synthetic oligonucleotide
acggcugaugggcgggccu

SEQ ID NO: 158356 - RNA, 19 nt, Artificial Sequence
  Description of Artificial Sequence: Synthetic oligonucleotide
cugccgcagauccaauaca

SEQ ID NO: 158357 - RNA, 19 nt, Artificial Sequence
  Description of Artificial Sequence: Synthetic oligonucleotide
gcaucgauuuaacaacagu

SEQ ID NO: 158358 - RNA, 19 nt, Artificial Sequence
  Description of Artificial Sequence: Synthetic oligonucleotide
cugcuuucgcagcuccuca

SEQ ID NO: 158359 - RNA, 19 nt, Artificial Sequence
  Description of Artificial Sequence: Synthetic oligonucleotide
cccgcaaagacacaccaaa

SEQ ID NO: 158360 - RNA, 19 nt, Artificial Sequence
  Description of Artificial Sequence: Synthetic oligonucleotide
ccuaaagagcgccgucgag

SEQ ID NO: 158361 - RNA, 19 nt, Artificial Sequence
  Description of Artificial Sequence: Synthetic oligonucleotide
ggaucugaucaauagucuu

SEQ ID NO: 158362 - RNA, 19 nt, Artificial Sequence
  Description of Artificial Sequence: Synthetic oligonucleotide
cuagucggucuccccgguc

SEQ ID NO: 158363 - RNA, 19 nt, Artificial Sequence
  Description of Artificial Sequence: Synthetic oligonucleotide
gcuacguuccagcguggac

SEQ ID NO: 158364 - RNA, 19 nt, Artificial Sequence
  Description of Artificial Sequence: Synthetic oligonucleotide
guagcuucugacgcugugu

SEQ ID NO: 158365 - RNA, 19 nt, Artificial Sequence
  Description of Artificial Sequence: Synthetic oligonucleotide
accccgacgcuugucgcug

SEQ ID NO: 158366 - RNA, 19 nt, Artificial Sequence
  Description of Artificial Sequence: Synthetic oligonucleotide
gcacuacaggcacccacug

SEQ ID NO: 158367 - RNA, 19 nt, Artificial Sequence
  Description of Artificial Sequence: Synthetic oligonucleotide
ucacuccgcucuagucggu

SEQ ID NO: 158368 - RNA, 19 nt, Artificial Sequence
  Description of Artificial Sequence: Synthetic oligonucleotide
gcuuauguccggccucuuc

SEQ ID NO: 158369 - RNA, 19 nt, Artificial Sequence
  Description of Artificial Sequence: Synthetic oligonucleotide
accucguucccggcuuaag

SEQ ID NO: 158370 - RNA, 19 nt, Artificial Sequence
  Description of Artificial Sequence: Synthetic oligonucleotide
caccggcugguuacugcug

SEQ ID NO: 158371 - RNA, 19 nt, Artificial Sequence
  Description of Artificial Sequence: Synthetic oligonucleotide
aggccgcucucuacuccgc

SEQ ID NO: 158372 - RNA, 19 nt, Artificial Sequence
  Description of Artificial Sequence: Synthetic oligonucleotide
cgcacuuucaacacugcaa

SEQ ID NO: 158373 - RNA, 19 nt, Artificial Sequence
  Description of Artificial Sequence: Synthetic oligonucleotide
ccauucgagggaauuaacu

SEQ ID NO: 158374 - RNA, 19 nt, Artificial Sequence
  Description of Artificial Sequence: Synthetic oligonucleotide
ccugauccccucgucgagg

SEQ ID NO: 158375 - RNA, 19 nt, Artificial Sequence
  Description of Artificial Sequence: Synthetic oligonucleotide
gagcuuauguccggccucu

SEQ ID NO: 158376 - RNA, 19 nt, Artificial Sequence
  Description of Artificial Sequence: Synthetic oligonucleotide
uggcacgaucaagucgguc

SEQ ID NO: 158377 - RNA, 19 nt, Artificial Sequence
  Description of Artificial Sequence: Synthetic oligonucleotide
cauccacucggagaggagu

SEQ ID NO: 158378 - RNA, 19 nt, Artificial Sequence
  Description of Artificial Sequence: Synthetic oligonucleotide
gcgccgucgagcuuauguc

SEQ ID NO: 158379 - RNA, 19 nt, Artificial Sequence
  Description of Artificial Sequence: Synthetic oligonucleotide
gggcucaccggagguagag

SEQ ID NO: 158380 - RNA, 19 nt, Artificial Sequence
  Description of Artificial Sequence: Synthetic oligonucleotide
gccaauugaagaaggcugu

SEQ ID NO: 158381 - RNA, 19 nt, Artificial Sequence
  Description of Artificial Sequence: Synthetic oligonucleotide
cccgcuucacaggaucccg

SEQ ID NO: 158382 - RNA, 19 nt, Artificial Sequence
  Description of Artificial Sequence: Synthetic oligonucleotide
gugcuacguuccagcgugg

SEQ ID NO: 158383 - RNA, 19 nt, Artificial Sequence
  Description of Artificial Sequence: Synthetic oligonucleotide
cuuucuaggucgucccguu

SEQ ID NO: 158384 - RNA, 19 nt, Artificial Sequence
  Description of Artificial Sequence: Synthetic oligonucleotide
ccgucgagcuuauguccgg

SEQ ID NO: 158385 - RNA, 19 nt, Artificial Sequence
  Description of Artificial Sequence: Synthetic oligonucleotide
gcuucguaauuucccugaa

SEQ ID NO: 158386 - RNA, 19 nt, Artificial Sequence
  Description of Artificial Sequence: Synthetic oligonucleotide
ccacccgccaucaguugug

SEQ ID NO: 158387 - RNA, 19 nt, Artificial Sequence
  Description of Artificial Sequence: Synthetic oligonucleotide
gccaugccgcacaaagaug

SEQ ID NO: 158388 - RNA, 19 nt, Artificial Sequence
  Description of Artificial Sequence: Synthetic oligonucleotide
ccggagguagaguggcuuc

SEQ ID NO: 158389 - RNA, 19 nt, Artificial Sequence
  Description of Artificial Sequence: Synthetic oligonucleotide
gugcuaacgucuuggccuu

SEQ ID NO: 158390 - RNA, 19 nt, Artificial Sequence
  Description of Artificial Sequence: Synthetic oligonucleotide
ccuugcuaaaacuucucuu

SEQ ID NO: 158391 - RNA, 19 nt, Artificial Sequence
  Description of Artificial Sequence: Synthetic oligonucleotide
cugcaacauaaaacggauu

SEQ ID NO: 158392 - RNA, 19 nt, Artificial Sequence
  Description of Artificial Sequence: Synthetic oligonucleotide
acccgccaucaguugugau

SEQ ID NO: 158393 - RNA, 19 nt, Artificial Sequence
  Description of Artificial Sequence: Synthetic oligonucleotide
aucgcacuacaggcaccca

SEQ ID NO: 158394 - RNA, 19 nt, Artificial Sequence
  Description of Artificial Sequence: Synthetic oligonucleotide
gcguggacucaaugccaug

SEQ ID NO: 158395 - RNA, 19 nt, Artificial Sequence
  Description of Artificial Sequence: Synthetic oligonucleotide
guagaguggcuucccgcuu

SEQ ID NO: 158396 - RNA, 19 nt, Artificial Sequence
  Description of Artificial Sequence: Synthetic oligonucleotide
gcgauucaagguacuagua

SEQ ID NO: 158397 - RNA, 19 nt, Artificial Sequence
  Description of Artificial Sequence: Synthetic oligonucleotide
cccugauccccucgucgag

SEQ ID NO: 158398 - RNA, 19 nt, Artificial Sequence
  Description of Artificial Sequence: Synthetic oligonucleotide
cccuaaagagcgccgucga

SEQ ID NO: 158399 - RNA, 19 nt, Artificial Sequence
  Description of Artificial Sequence: Synthetic oligonucleotide
ggacccugauccccucguc

SEQ ID NO: 158400 - RNA, 19 nt, Artificial Sequence
  Description of Artificial Sequence: Synthetic oligonucleotide
ggugagccgugagguauca

SEQ ID NO: 158401 - RNA, 19 nt, Artificial Sequence
  Description of Artificial Sequence: Synthetic oligonucleotide
cucaccucguucccggcuu

SEQ ID NO: 158402 - RNA, 19 nt, Artificial Sequence
  Description of Artificial Sequence: Synthetic oligonucleotide
cgcucuagucggucucccc

SEQ ID NO: 158403 - RNA, 19 nt, Artificial Sequence
  Description of Artificial Sequence: Synthetic oligonucleotide
ccacucggagaggagucuc

SEQ ID NO: 158404 - RNA, 19 nt, Artificial Sequence
  Description of Artificial Sequence: Synthetic oligonucleotide
caccccgacgcuugucgcu

SEQ ID NO: 158405 - RNA, 19 nt, Artificial Sequence
  Description of Artificial Sequence: Synthetic oligonucleotide
cacccgccaucaguuguga

SEQ ID NO: 158406 - RNA, 19 nt, Artificial Sequence
  Description of Artificial Sequence: Synthetic oligonucleotide
ccccaacucagucguccuc

SEQ ID NO: 158407 - RNA, 19 nt, Artificial Sequence
  Description of Artificial Sequence: Synthetic oligonucleotide
cgucgagcuuauguccggc

SEQ ID NO: 158408 - RNA, 19 nt, Artificial Sequence
  Description of Artificial Sequence: Synthetic oligonucleotide
agcuuauguccggccucuu

SEQ ID NO: 158409 - RNA, 19 nt, Artificial Sequence
  Description of Artificial Sequence: Synthetic oligonucleotide
gggacccaugcucuugcau

SEQ ID NO: 158410 - RNA, 19 nt, Artificial Sequence
  Description of Artificial Sequence: Synthetic oligonucleotide
ggauucgagaugaggucuu

SEQ ID NO: 158411 - RNA, 19 nt, Artificial Sequence
  Description of Artificial Sequence: Synthetic oligonucleotide
ccgacgcuugucgcugccc

SEQ ID NO: 158412 - RNA, 19 nt, Artificial Sequence
  Description of Artificial Sequence: Synthetic oligonucleotide
cgcacuacaggcacccacu

SEQ ID NO: 158413 - RNA, 19 nt, Artificial Sequence
  Description of Artificial Sequence: Synthetic oligonucleotide
cuggcacgaucaagucggu

SEQ ID NO: 158414 - RNA, 19 nt, Artificial Sequence
  Description of Artificial Sequence: Synthetic oligonucleotide
ccaagguauauuccaccuu

SEQ ID NO: 158415 - RNA, 19 nt, Artificial Sequence
  Description of Artificial Sequence: Synthetic oligonucleotide
gugagccgugagguaucaa

SEQ ID NO: 158416 - RNA, 19 nt, Artificial Sequence
  Description of Artificial Sequence: Synthetic oligonucleotide
caccggagguagaguggcu

SEQ ID NO: 158417 - RNA, 19 nt, Artificial Sequence
  Description of Artificial Sequence: Synthetic oligonucleotide
cggauucgagaugaggucu

SEQ ID NO: 158418 - RNA, 19 nt, Artificial Sequence
  Description of Artificial Sequence: Synthetic oligonucleotide
gccccaagccauccugccu

SEQ ID NO: 158419 - RNA, 19 nt, Artificial Sequence
  Description of Artificial Sequence: Synthetic oligonucleotide
caccucguucccggcuuaa

SEQ ID NO: 158420 - RNA, 19 nt, Artificial Sequence
  Description of Artificial Sequence: Synthetic oligonucleotide
gagcgccgucgagcuuaug

SEQ ID NO: 158421 - RNA, 19 nt, Artificial Sequence
  Description of Artificial Sequence: Synthetic oligonucleotide
cccacccgccaucaguugu

SEQ ID NO: 158422 - RNA, 19 nt, Artificial Sequence
  Description of Artificial Sequence: Synthetic oligonucleotide
cccgaccacgaucuucugu

SEQ ID NO: 158423 - RNA, 19 nt, Artificial Sequence
  Description of Artificial Sequence: Synthetic oligonucleotide
gggcucgaacuaauguauu

SEQ ID NO: 158424 - RNA, 19 nt, Artificial Sequence
  Description of Artificial Sequence: Synthetic oligonucleotide
ggcagucccaagagugauu

SEQ ID NO: 158425 - RNA, 19 nt, Artificial Sequence
  Description of Artificial Sequence: Synthetic oligonucleotide
gcagucucgcucgcacuuu

SEQ ID NO: 158426 - RNA, 19 nt, Artificial Sequence
  Description of Artificial Sequence: Synthetic oligonucleotide
ccucgucgaggcacccaau

SEQ ID NO: 158427 - RNA, 19 nt, Artificial Sequence
  Description of Artificial Sequence: Synthetic oligonucleotide
cgcucucuacuccgcuccu

SEQ ID NO: 158428 - RNA, 19 nt, Artificial Sequence
  Description of Artificial Sequence: Synthetic oligonucleotide
aauuguaugagcuugguug

SEQ ID NO: 158429 - RNA, 19 nt, Artificial Sequence
  Description of Artificial Sequence: Synthetic oligonucleotide
aauccaaccaauauuagcc

SEQ ID NO: 158430 - RNA, 19 nt, Artificial Sequence
  Description of Artificial Sequence: Synthetic oligonucleotide
aaauucaugaauccaaauc

SEQ ID NO: 158431 - RNA, 19 nt, Artificial Sequence
  Description of Artificial Sequence: Synthetic oligonucleotide
uuaacuauaaacaaucacu

SEQ ID NO: 158432 - RNA, 19 nt, Artificial Sequence
  Description of Artificial Sequence: Synthetic oligonucleotide
acacguauaaucuaggcuc

SEQ ID NO: 158433 - RNA, 19 nt, Artificial Sequence
  Description of Artificial Sequence: Synthetic oligonucleotide
auuaacuauaaacaaucac

SEQ ID NO: 158434 - RNA, 19 nt, Artificial Sequence
  Description of Artificial Sequence: Synthetic oligonucleotide
aaaucuuaacacuuuaaga

SEQ ID NO: 158435 - RNA, 19 nt, Artificial Sequence
  Description of Artificial Sequence: Synthetic oligonucleotide
aguccuaugaacuguaaac

SEQ ID NO: 158436 - RNA, 19 nt, Artificial Sequence
  Description of Artificial Sequence: Synthetic oligonucleotide
uaaugaaucauuccuaaac

SEQ ID NO: 158437 - RNA, 19 nt, Artificial Sequence
  Description of Artificial Sequence: Synthetic oligonucleotide
aaugaaucauuccuaaacu

SEQ ID NO: 158438 - RNA, 19 nt, Artificial Sequence
  Description of Artificial Sequence: Synthetic oligonucleotide
caugcuaccaaauauguac

SEQ ID NO: 158439 - RNA, 19 nt, Artificial Sequence
  Description of Artificial Sequence: Synthetic oligonucleotide
uucgguaaaauauggaaag

SEQ ID NO: 158440 - RNA, 19 nt, Artificial Sequence
  Description of Artificial Sequence: Synthetic oligonucleotide
acuagaacaacaugcuacc

SEQ ID NO: 158441 - RNA, 19 nt, Artificial Sequence
  Description of Artificial Sequence: Synthetic oligonucleotide
agguguaccguucacauac

SEQ ID NO: 158442 - RNA, 19 nt, Artificial Sequence
  Description of Artificial Sequence: Synthetic oligonucleotide
gaaauuaacagcccaauga

SEQ ID NO: 158443 - RNA, 19 nt, Artificial Sequence
  Description of Artificial Sequence: Synthetic oligonucleotide
auuguaugagcuugguugc

SEQ ID NO: 158444 - RNA, 19 nt, Artificial Sequence
  Description of Artificial Sequence: Synthetic oligonucleotide
auuagucauuccuaugacc

SEQ ID NO: 158445 - RNA, 19 nt, Artificial Sequence
  Description of Artificial Sequence: Synthetic oligonucleotide
aaggccgccauauucaguc

SEQ ID NO: 158446 - RNA, 19 nt, Artificial Sequence
  Description of Artificial Sequence: Synthetic oligonucleotide
aacgacgacaaacucauca

SEQ ID NO: 158447 - RNA, 19 nt, Artificial Sequence
  Description of Artificial Sequence: Synthetic oligonucleotide
uguagcuaauaucuggucc

SEQ ID NO: 158448 - RNA, 19 nt, Artificial Sequence
  Description of Artificial Sequence: Synthetic oligonucleotide
aaugacugaggcuccuacc

SEQ ID NO: 158449 - RNA, 19 nt, Artificial Sequence
  Description of Artificial Sequence: Synthetic oligonucleotide
aaguaaggccgccauauuc

SEQ ID NO: 158450 - RNA, 19 nt, Artificial Sequence
  Description of Artificial Sequence: Synthetic oligonucleotide
auaaacaaucacuagggca

SEQ ID NO: 158451 - RNA, 19 nt, Artificial Sequence
  Description of Artificial Sequence: Synthetic oligonucleotide
uugagaauuuuaaugaauc

SEQ ID NO: 158452 - RNA, 19 nt, Artificial Sequence
  Description of Artificial Sequence: Synthetic oligonucleotide
aaucuaggcucacagaacu

SEQ ID NO: 158453 - RNA, 19 nt, Artificial Sequence
  Description of Artificial Sequence: Synthetic oligonucleotide
aagucaagcgguaaacugc

SEQ ID NO: 158454 - RNA, 19 nt, Artificial Sequence
  Description of Artificial Sequence: Synthetic oligonucleotide
uuuguaaaccucaaaugcu

SEQ ID NO: 158455 - RNA, 19 nt, Artificial Sequence
  Description of Artificial Sequence: Synthetic oligonucleotide
augaacugaagucaagcgg

SEQ ID NO: 158456 - RNA, 19 nt, Artificial Sequence
  Description of Artificial Sequence: Synthetic oligonucleotide
ugaaucauuccuaaacugu

SEQ ID NO: 158457 - RNA, 19 nt, Artificial Sequence
  Description of Artificial Sequence: Synthetic oligonucleotide
uguaagagguauucgaaca

SEQ ID NO: 158458 - RNA, 19 nt, Artificial Sequence
  Description of Artificial Sequence: Synthetic oligonucleotide
uuauguaaguguagcaacc

SEQ ID NO: 158459 - RNA, 19 nt, Artificial Sequence
  Description of Artificial Sequence: Synthetic oligonucleotide
uuguaaaccucaaaugcug

SEQ ID NO: 158460 - RNA, 19 nt, Artificial Sequence
  Description of Artificial Sequence: Synthetic oligonucleotide
aauccuauguuuguuuuag

SEQ ID NO: 158461 - RNA, 19 nt, Artificial Sequence
  Description of Artificial Sequence: Synthetic oligonucleotide
aaacaugauugcuuucuag

SEQ ID NO: 158462 - RNA, 19 nt, Artificial Sequence
  Description of Artificial Sequence: Synthetic oligonucleotide
auaaucuaggcucacagaa

SEQ ID NO: 158463 - RNA, 19 nt, Artificial Sequence
  Description of Artificial Sequence: Synthetic oligonucleotide
auuccuaugaccucucuug

SEQ ID NO: 158464 - RNA, 19 nt, Artificial Sequence
  Description of Artificial Sequence: Synthetic oligonucleotide
uuaaggguaaguuuucagu

SEQ ID NO: 158465 - RNA, 19 nt, Artificial Sequence
  Description of Artificial Sequence: Synthetic oligonucleotide
uuucgguaaaauauggaaa

SEQ ID NO: 158466 - RNA, 19 nt, Artificial Sequence
  Description of Artificial Sequence: Synthetic oligonucleotide
uauucauaugagaaucuga

SEQ ID NO: 158467 - RNA, 19 nt, Artificial Sequence
  Description of Artificial Sequence: Synthetic oligonucleotide
aaaacaucgagggaccuug

SEQ ID NO: 158468 - RNA, 19 nt, Artificial Sequence
  Description of Artificial Sequence: Synthetic oligonucleotide
acgcaaaagugacaggagc

SEQ ID NO: 158469 - RNA, 19 nt, Artificial Sequence
  Description of Artificial Sequence: Synthetic oligonucleotide
ucaacgacgacaaacucau

SEQ ID NO: 158470 - RNA, 19 nt, Artificial Sequence
  Description of Artificial Sequence: Synthetic oligonucleotide
cauacuauaaagaaaucaa

SEQ ID NO: 158471 - RNA, 19 nt, Artificial Sequence
  Description of Artificial Sequence: Synthetic oligonucleotide
aaauccacgacaggaggac

SEQ ID NO: 158472 - RNA, 19 nt, Artificial Sequence
  Description of Artificial Sequence: Synthetic oligonucleotide
aauuggucuuaccagacuu

SEQ ID NO: 158473 - RNA, 19 nt, Artificial Sequence
  Description of Artificial Sequence: Synthetic oligonucleotide
uacacguauaaucuaggcu

SEQ ID NO: 158474 - RNA, 19 nt, Artificial Sequence
  Description of Artificial Sequence: Synthetic oligonucleotide
aaaucaggcgacuguaagu

SEQ ID NO: 158475 - RNA, 19 nt, Artificial Sequence
  Description of Artificial Sequence: Synthetic oligonucleotide
aaggauugggacucucuag

SEQ ID NO: 158476 - RNA, 19 nt, Artificial Sequence
  Description of Artificial Sequence: Synthetic oligonucleotide
gacuagaacaacaugcuac

SEQ ID NO: 158477 - RNA, 19 nt, Artificial Sequence
  Description of Artificial Sequence: Synthetic oligonucleotide
auacgguuuggcuuucccc

SEQ ID NO: 158478 - RNA, 19 nt, Artificial Sequence
  Description of Artificial Sequence: Synthetic oligonucleotide
cuaccaaauauguacgaac

SEQ ID NO: 158479 - RNA, 19 nt, Artificial Sequence
  Description of Artificial Sequence: Synthetic oligonucleotide
augaaucauuccuaaacug

SEQ ID NO: 158480 - RNA, 19 nt, Artificial Sequence
  Description of Artificial Sequence: Synthetic oligonucleotide
caauccaaccaauauuagc

SEQ ID NO: 158481 - RNA, 19 nt, Artificial Sequence
  Description of Artificial Sequence: Synthetic oligonucleotide
acuucgaaggagcuguuag

SEQ ID NO: 158482 - RNA, 19 nt, Artificial Sequence
  Description of Artificial Sequence: Synthetic oligonucleotide
agcccuuacagucuucugg

SEQ ID NO: 158483 - RNA, 19 nt, Artificial Sequence
  Description of Artificial Sequence: Synthetic oligonucleotide
gacacaucgucacauaaca

SEQ ID NO: 158484 - RNA, 19 nt, Artificial Sequence
  Description of Artificial Sequence: Synthetic oligonucleotide
caauagacgcaaaagugac

SEQ ID NO: 158485 - RNA, 19 nt, Artificial Sequence
  Description of Artificial Sequence: Synthetic oligonucleotide
uauguacgaacgcuugugc

SEQ ID NO: 158486 - RNA, 19 nt, Artificial Sequence
  Description of Artificial Sequence: Synthetic oligonucleotide
aaaucccggaaugacuugg

SEQ ID NO: 158487 - RNA, 19 nt, Artificial Sequence
  Description of Artificial Sequence: Synthetic oligonucleotide
aaagugacaggagcgacug

SEQ ID NO: 158488 - RNA, 19 nt, Artificial Sequence
  Description of Artificial Sequence: Synthetic oligonucleotide
agguauucgaacaagucag

SEQ ID NO: 158489 - RNA, 19 nt, Artificial Sequence
  Description of Artificial Sequence: Synthetic oligonucleotide
gauugggacucucuaguag

SEQ ID NO: 158490 - RNA, 19 nt, Artificial Sequence
  Description of Artificial Sequence: Synthetic oligonucleotide
ucugggacuacccacuccu

SEQ ID NO: 158491 - RNA, 19 nt, Artificial Sequence
  Description of Artificial Sequence: Synthetic oligonucleotide
ugguuugaagccaugaguu

SEQ ID NO: 158492 - RNA, 19 nt, Artificial Sequence
  Description of Artificial Sequence: Synthetic oligonucleotide
uuccgaguaauuugguucc

SEQ ID NO: 158493 - RNA, 19 nt, Artificial Sequence
  Description of Artificial Sequence: Synthetic oligonucleotide
uugaacaugguuuccgagu

SEQ ID NO: 158494 - RNA, 19 nt, Artificial Sequence
  Description of Artificial Sequence: Synthetic oligonucleotide
aaauauguacgaacgcuug

SEQ ID NO: 158495 - RNA, 19 nt, Artificial Sequence
  Description of Artificial Sequence: Synthetic oligonucleotide
gucacaaguaucuguauac

SEQ ID NO: 158496 - RNA, 19 nt, Artificial Sequence
  Description of Artificial Sequence: Synthetic oligonucleotide
ugcuguaaaaucaggcgac

SEQ ID NO: 158497 - RNA, 19 nt, Artificial Sequence
  Description of Artificial Sequence: Synthetic oligonucleotide
caacaugcuaccaaauaug

SEQ ID NO: 158498 - RNA, 19 nt, Artificial Sequence
  Description of Artificial Sequence: Synthetic oligonucleotide
ucuugauaugguguaauga

SEQ ID NO: 158499 - RNA, 19 nt, Artificial Sequence
  Description of Artificial Sequence: Synthetic oligonucleotide
ucuacugaaccauggccag

SEQ ID NO: 158500 - RNA, 19 nt, Artificial Sequence
  Description of Artificial Sequence: Synthetic oligonucleotide
acugaguuagcuucaguca

SEQ ID NO: 158501 - RNA, 19 nt, Artificial Sequence
  Description of Artificial Sequence: Synthetic oligonucleotide
agucuuguaucgcaugcuc

SEQ ID NO: 158502 - RNA, 19 nt, Artificial Sequence
  Description of Artificial Sequence: Synthetic oligonucleotide
cuuaaggguaaguuuucag

SEQ ID NO: 158503 - RNA, 19 nt, Artificial Sequence
  Description of Artificial Sequence: Synthetic oligonucleotide
ugaacuguaagagguauuc

SEQ ID NO: 158504 - RNA, 19 nt, Artificial Sequence
  Description of Artificial Sequence: Synthetic oligonucleotide
cuugcauguagcuaauauc

SEQ ID NO: 158505 - RNA, 19 nt, Artificial Sequence
  Description of Artificial Sequence: Synthetic oligonucleotide
uucuaaaauccacgacagg

SEQ ID NO: 158506 - RNA, 19 nt, Artificial Sequence
  Description of Artificial Sequence: Synthetic oligonucleotide
uauaaucuaggcucacaga

SEQ ID NO: 158507 - RNA, 19 nt, Artificial Sequence
  Description of Artificial Sequence: Synthetic oligonucleotide
guucuaaaauccacgacag

SEQ ID NO: 158508 - RNA, 19 nt, Artificial Sequence
  Description of Artificial Sequence: Synthetic oligonucleotide
agucaagcgguaaacugcc

SEQ ID NO: 158509 - RNA, 19 nt, Artificial Sequence
  Description of Artificial Sequence: Synthetic oligonucleotide
auugggacucucuaguagu

SEQ ID NO: 158510 - RNA, 19 nt, Artificial Sequence
  Description of Artificial Sequence: Synthetic oligonucleotide
cacugaguuagcuucaguc

SEQ ID NO: 158511 - RNA, 19 nt, Artificial Sequence
  Description of Artificial Sequence: Synthetic oligonucleotide
uuguacauugcugcgaacu

SEQ ID NO: 158512 - RNA, 19 nt, Artificial Sequence
  Description of Artificial Sequence: Synthetic oligonucleotide
acaauagacgcaaaaguga

SEQ ID NO: 158513 - RNA, 19 nt, Artificial Sequence
  Description of Artificial Sequence: Synthetic oligonucleotide
uaguaagaaaucccggaau

SEQ ID NO: 158514 - RNA, 19 nt, Artificial Sequence
  Description of Artificial Sequence: Synthetic oligonucleotide
caagucuuguaucgcaugc

SEQ ID NO: 158515 - RNA, 19 nt, Artificial Sequence
  Description of Artificial Sequence: Synthetic oligonucleotide
ucgguaaaauauggaaagg

SEQ ID NO: 158516 - RNA, 19 nt, Artificial Sequence
  Description of Artificial Sequence: Synthetic oligonucleotide
acaaguaucuguauacaug

SEQ ID NO: 158517 - RNA, 19 nt, Artificial Sequence
  Description of Artificial Sequence: Synthetic oligonucleotide
uccuaugaacuguaaacaa

SEQ ID NO: 158518 - RNA, 19 nt, Artificial Sequence
  Description of Artificial Sequence: Synthetic oligonucleotide
cuaagaaauuaacagccca

SEQ ID NO: 158519 - RNA, 19 nt, Artificial Sequence
  Description of Artificial Sequence: Synthetic oligonucleotide
acgacgacaaacucaucag

SEQ ID NO: 158520 - RNA, 19 nt, Artificial Sequence
  Description of Artificial Sequence: Synthetic oligonucleotide
uguacgaacgcuugugcaa

SEQ ID NO: 158521 - RNA, 19 nt, Artificial Sequence
  Description of Artificial Sequence: Synthetic oligonucleotide
ucucccauagaagcuaugc

SEQ ID NO: 158522 - RNA, 19 nt, Artificial Sequence
  Description of Artificial Sequence: Synthetic oligonucleotide
ugucggagcgcuuccgugg

SEQ ID NO: 158523 - RNA, 19 nt, Artificial Sequence
  Description of Artificial Sequence: Synthetic oligonucleotide
uucugacuagaacaacaug

SEQ ID NO: 158524 - RNA, 19 nt, Artificial Sequence
  Description of Artificial Sequence: Synthetic oligonucleotide
acaauuagucauuccuaug

SEQ ID NO: 158525 - RNA, 19 nt, Artificial Sequence
  Description of Artificial Sequence: Synthetic oligonucleotide
auguagcuaauaucugguc

SEQ ID NO: 158526 - RNA, 19 nt, Artificial Sequence
  Description of Artificial Sequence: Synthetic oligonucleotide
uguaccguucacauacggu

SEQ ID NO: 158527 - RNA, 19 nt, Artificial Sequence
  Description of Artificial Sequence: Synthetic oligonucleotide
ugacacaucgucacauaac

SEQ ID NO: 158528 - RNA, 19 nt, Artificial Sequence
  Description of Artificial Sequence: Synthetic oligonucleotide
cuaguaguggaaaaucaga

SEQ ID NO: 158529 - RNA, 19 nt, Artificial Sequence
  Description of Artificial Sequence: Synthetic oligonucleotide
cagucaauuucccaugaac

SEQ ID NO: 158530 - RNA, 19 nt, Artificial Sequence
  Description of Artificial Sequence: Synthetic oligonucleotide
ugcauguagcuaauaucug

SEQ ID NO: 158531 - RNA, 19 nt, Artificial Sequence
  Description of Artificial Sequence: Synthetic oligonucleotide
auucaguaauccuauguuu

SEQ ID NO: 158532 - RNA, 19 nt, Artificial Sequence
  Description of Artificial Sequence: Synthetic oligonucleotide
uacucaaauuacugaggcc

SEQ ID NO: 158533 - RNA, 19 nt, Artificial Sequence
  Description of Artificial Sequence: Synthetic oligonucleotide
agaauuggucuuaccagac

SEQ ID NO: 158534 - RNA, 19 nt, Artificial Sequence
  Description of Artificial Sequence: Synthetic oligonucleotide
aaaauccacgacaggagga

SEQ ID NO: 158535 - RNA, 19 nt, Artificial Sequence
  Description of Artificial Sequence: Synthetic oligonucleotide
agagguauucgaacaaguc

SEQ ID NO: 158536 - RNA, 19 nt, Artificial Sequence
  Description of Artificial Sequence: Synthetic oligonucleotide
aguaauccuauguuuguuu

SEQ ID NO: 158537 - RNA, 19 nt, Artificial Sequence
  Description of Artificial Sequence: Synthetic oligonucleotide
uuccuaugaccucucuugc

SEQ ID NO: 158538 - RNA, 19 nt, Artificial Sequence
  Description of Artificial Sequence: Synthetic oligonucleotide
cuugaacaugguuuccgag

SEQ ID NO: 158539 - RNA, 19 nt, Artificial Sequence
  Description of Artificial Sequence: Synthetic oligonucleotide
uaaaaucaggcgacuguaa

SEQ ID NO: 158540 - RNA, 19 nt, Artificial Sequence
  Description of Artificial Sequence: Synthetic oligonucleotide
auguacacguauaaucuag

SEQ ID NO: 158541 - RNA, 19 nt, Artificial Sequence
  Description of Artificial Sequence: Synthetic oligonucleotide
aucuugauaugguguaaug

SEQ ID NO: 158542 - RNA, 19 nt, Artificial Sequence
  Description of Artificial Sequence: Synthetic oligonucleotide
gcgacuguaagucucuggg

SEQ ID NO: 158543 - RNA, 19 nt, Artificial Sequence
  Description of Artificial Sequence: Synthetic oligonucleotide
acgacaggaggacuuguag

SEQ ID NO: 158544 - RNA, 19 nt, Artificial Sequence
  Description of Artificial Sequence: Synthetic oligonucleotide
auauguacgaacgcuugug

SEQ ID NO: 158545 - RNA, 19 nt, Artificial Sequence
  Description of Artificial Sequence: Synthetic oligonucleotide
aucuguauacaugaacugu

SEQ ID NO: 158546 - RNA, 19 nt, Artificial Sequence
  Description of Artificial Sequence: Synthetic oligonucleotide
aaucacuagggcaaacuau

SEQ ID NO: 158547 - RNA, 19 nt, Artificial Sequence
  Description of Artificial Sequence: Synthetic oligonucleotide
ucucuaguaguggaaaauc

SEQ ID NO: 158548 - RNA, 19 nt, Artificial Sequence
  Description of Artificial Sequence: Synthetic oligonucleotide
ucccggaaugacuuggaug

SEQ ID NO: 158549 - RNA, 19 nt, Artificial Sequence
  Description of Artificial Sequence: Synthetic oligonucleotide
gcuaugcaacuuuaaagag

SEQ ID NO: 158550 - RNA, 19 nt, Artificial Sequence
  Description of Artificial Sequence: Synthetic oligonucleotide
ugguucuaaaauccacgac

SEQ ID NO: 158551 - RNA, 19 nt, Artificial Sequence
  Description of Artificial Sequence: Synthetic oligonucleotide
uuguaucgcaugcuccuca

SEQ ID NO: 158552 - RNA, 19 nt, Artificial Sequence
  Description of Artificial Sequence: Synthetic oligonucleotide
ccuugcuucaaguaaggcc

SEQ ID NO: 158553 - RNA, 19 nt, Artificial Sequence
  Description of Artificial Sequence: Synthetic oligonucleotide
aaaucucccauagaagcua

SEQ ID NO: 158554 - RNA, 19 nt, Artificial Sequence
  Description of Artificial Sequence: Synthetic oligonucleotide
caagcgguaaacugccuac

SEQ ID NO: 158555 - RNA, 19 nt, Artificial Sequence
  Description of Artificial Sequence: Synthetic oligonucleotide
uggaaagguccuucaaaac

SEQ ID NO: 158556 - RNA, 19 nt, Artificial Sequence
  Description of Artificial Sequence: Synthetic oligonucleotide
aacaugguuuccgaguaau

SEQ ID NO: 158557 - RNA, 19 nt, Artificial Sequence
  Description of Artificial Sequence: Synthetic oligonucleotide
ugggacuacccacuccugc

SEQ ID NO: 158558 - RNA, 19 nt, Artificial Sequence
  Description of Artificial Sequence: Synthetic oligonucleotide
augcuaccaaauauguacg

SEQ ID NO: 158559 - RNA, 19 nt, Artificial Sequence
  Description of Artificial Sequence: Synthetic oligonucleotide
agcccaugcauucgcuggc

SEQ ID NO: 158560 - RNA, 19 nt, Artificial Sequence
  Description of Artificial Sequence: Synthetic oligonucleotide
cucauuagucauacaaaca

SEQ ID NO: 158561 - RNA, 19 nt, Artificial Sequence
  Description of Artificial Sequence: Synthetic oligonucleotide
aaccugcuacucaaauuac

SEQ ID NO: 158562 - RNA, 19 nt, Artificial Sequence
  Description of Artificial Sequence: Synthetic oligonucleotide
aacaucgagggaccuugcu

SEQ ID NO: 158563 - RNA, 19 nt, Artificial Sequence
  Description of Artificial Sequence: Synthetic oligonucleotide
ggucaaugcaaucauuuuc

SEQ ID NO: 158564 - RNA, 19 nt, Artificial Sequence
  Description of Artificial Sequence: Synthetic oligonucleotide
ccuaugaacuguaaacaag

SEQ ID NO: 158565 - RNA, 19 nt, Artificial Sequence
  Description of Artificial Sequence: Synthetic oligonucleotide
gacuuguaggacugaaaga

SEQ ID NO: 158566 - RNA, 19 nt, Artificial Sequence
  Description of Artificial Sequence: Synthetic oligonucleotide
auccaaccaauauuagccu

SEQ ID NO: 158567 - RNA, 19 nt, Artificial Sequence
  Description of Artificial Sequence: Synthetic oligonucleotide
aguaaggccgccauauuca

SEQ ID NO: 158568 - RNA, 19 nt, Artificial Sequence
  Description of Artificial Sequence: Synthetic oligonucleotide
auguacgaacgcuugugca

SEQ ID NO: 158569 - RNA, 19 nt, Artificial Sequence
  Description of Artificial Sequence: Synthetic oligonucleotide
ucaucaggguugccaaaug

SEQ ID NO: 158570 - RNA, 19 nt, Artificial Sequence
  Description of Artificial Sequence: Synthetic oligonucleotide
aauagacgcaaaagugaca

SEQ ID NO: 158571 - RNA, 19 nt, Artificial Sequence
  Description of Artificial Sequence: Synthetic oligonucleotide
ugguccaucuugauauggu

SEQ ID NO: 158572 - RNA, 19 nt, Artificial Sequence
  Description of Artificial Sequence: Synthetic oligonucleotide
agucacaaguaucuguaua

SEQ ID NO: 158573 - RNA, 19 nt, Artificial Sequence
  Description of Artificial Sequence: Synthetic oligonucleotide
aacacugaguuagcuucag

SEQ ID NO: 158574 - RNA, 19 nt, Artificial Sequence
  Description of Artificial Sequence: Synthetic oligonucleotide
aaagagccaguaacccaac

SEQ ID NO: 158575 - RNA, 19 nt, Artificial Sequence
  Description of Artificial Sequence: Synthetic oligonucleotide
ugccuuucacuaauuguau

SEQ ID NO: 158576 - RNA, 19 nt, Artificial Sequence
  Description of Artificial Sequence: Synthetic oligonucleotide
gacgcaaaagugacaggag

SEQ ID NO: 158577 - RNA, 19 nt, Artificial Sequence
  Description of Artificial Sequence: Synthetic oligonucleotide
aggguaaguuuucagucaa

SEQ ID NO: 158578 - RNA, 19 nt, Artificial Sequence
  Description of Artificial Sequence: Synthetic oligonucleotide
gaaaucccggaaugacuug

SEQ ID NO: 158579 - RNA, 19 nt, Artificial Sequence
  Description of Artificial Sequence: Synthetic oligonucleotide
uugccaaaugccucauaga

SEQ ID NO: 158580 - RNA, 19 nt, Artificial Sequence
  Description of Artificial Sequence: Synthetic oligonucleotide
cauacgguuuggcuuuccc

SEQ ID NO: 158581 - RNA, 19 nt, Artificial Sequence
  Description of Artificial Sequence: Synthetic oligonucleotide
ugaguuagcuucagucaau

SEQ ID NO: 158582 - RNA, 19 nt, Artificial Sequence
  Description of Artificial Sequence: Synthetic oligonucleotide
ucucaacgacgacaaacuc

SEQ ID NO: 158583 - RNA, 19 nt, Artificial Sequence
  Description of Artificial Sequence: Synthetic oligonucleotide
ccucacuuaaaacaucgag

SEQ ID NO: 158584 - RNA, 19 nt, Artificial Sequence
  Description of Artificial Sequence: Synthetic oligonucleotide
gcauacuauaaagaaauca

SEQ ID NO: 158585 - RNA, 19 nt, Artificial Sequence
  Description of Artificial Sequence: Synthetic oligonucleotide
guguaccguucacauacgg

SEQ ID NO: 158586 - RNA, 19 nt, Artificial Sequence
  Description of Artificial Sequence: Synthetic oligonucleotide
guaaguguagcaaccacaa

SEQ ID NO: 158587 - RNA, 19 nt, Artificial Sequence
  Description of Artificial Sequence: Synthetic oligonucleotide
cuaguaagaaaucccggaa

SEQ ID NO: 158588 - RNA, 19 nt, Artificial Sequence
  Description of Artificial Sequence: Synthetic oligonucleotide
aggguugccaaaugccuca

SEQ ID NO: 158589 - RNA, 19 nt, Artificial Sequence
  Description of Artificial Sequence: Synthetic oligonucleotide
ugggacucucuaguagugg

SEQ ID NO: 158590 - RNA, 19 nt, Artificial Sequence
  Description of Artificial Sequence: Synthetic oligonucleotide
uccaaccaauauuagccua

SEQ ID NO: 158591 - RNA, 19 nt, Artificial Sequence
  Description of Artificial Sequence: Synthetic oligonucleotide
guccuaugaacuguaaaca

SEQ ID NO: 158592 - RNA, 19 nt, Artificial Sequence
  Description of Artificial Sequence: Synthetic oligonucleotide
guacauugcugcgaacucc

SEQ ID NO: 158593 - RNA, 19 nt, Artificial Sequence
  Description of Artificial Sequence: Synthetic oligonucleotide
uacgaacgcuugugcaagg

SEQ ID NO: 158594 - RNA, 19 nt, Artificial Sequence
  Description of Artificial Sequence: Synthetic oligonucleotide
guacgaacgcuugugcaag

SEQ ID NO: 158595 - RNA, 19 nt, Artificial Sequence
  Description of Artificial Sequence: Synthetic oligonucleotide
caaggaaucuuucccagaa

SEQ ID NO: 158596 - RNA, 19 nt, Artificial Sequence
  Description of Artificial Sequence: Synthetic oligonucleotide
gcuacucaaauuacugagg

SEQ ID NO: 158597 - RNA, 19 nt, Artificial Sequence
  Description of Artificial Sequence: Synthetic oligonucleotide
acauccucacuuaaaacau

SEQ ID NO: 158598 - RNA, 19 nt, Artificial Sequence
  Description of Artificial Sequence: Synthetic oligonucleotide
auauggaaagguccuucaa

SEQ ID NO: 158599 - RNA, 19 nt, Artificial Sequence
  Description of Artificial Sequence: Synthetic oligonucleotide
cuagcacccaugcuuguuc

SEQ ID NO: 158600 - RNA, 19 nt, Artificial Sequence
  Description of Artificial Sequence: Synthetic oligonucleotide
guuugaagccaugaguuaa

SEQ ID NO: 158601 - RNA, 19 nt, Artificial Sequence
  Description of Artificial Sequence: Synthetic oligonucleotide
agcauacuauaaagaaauc

SEQ ID NO: 158602 - RNA, 19 nt, Artificial Sequence
  Description of Artificial Sequence: Synthetic oligonucleotide
uugguaagauuuguguuuu

SEQ ID NO: 158603 - RNA, 19 nt, Artificial Sequence
  Description of Artificial Sequence: Synthetic oligonucleotide
aaacacugaguuagcuuca

SEQ ID NO: 158604 - RNA, 19 nt, Artificial Sequence
  Description of Artificial Sequence: Synthetic oligonucleotide
gagagccaaggguuucucc

SEQ ID NO: 158605 - RNA, 19 nt, Artificial Sequence
  Description of Artificial Sequence: Synthetic oligonucleotide
caguaacccaacuggaaga

SEQ ID NO: 158606 - RNA, 19 nt, Artificial Sequence
  Description of Artificial Sequence: Synthetic oligonucleotide
aacuuugguacugcgccau

SEQ ID NO: 158607 - RNA, 19 nt, Artificial Sequence
  Description of Artificial Sequence: Synthetic oligonucleotide
cgcaaaagugacaggagcg

SEQ ID NO: 158608 - RNA, 19 nt, Artificial Sequence
  Description of Artificial Sequence: Synthetic oligonucleotide
aucacuagggcaaacuauu

SEQ ID NO: 158609 - RNA, 19 nt, Artificial Sequence
  Description of Artificial Sequence: Synthetic oligonucleotide
cugaaccauggccaguaac

SEQ ID NO: 158610 - RNA, 19 nt, Artificial Sequence
  Description of Artificial Sequence: Synthetic oligonucleotide
gauaugguguaaugacucu

SEQ ID NO: 158611 - RNA, 19 nt, Artificial Sequence
  Description of Artificial Sequence: Synthetic oligonucleotide
ucuaguccuggacuuccau

SEQ ID NO: 158612 - RNA, 19 nt, Artificial Sequence
  Description of Artificial Sequence: Synthetic oligonucleotide
cccauagaagcuaugcaac

SEQ ID NO: 158613 - RNA, 19 nt, Artificial Sequence
  Description of Artificial Sequence: Synthetic oligonucleotide
cccggaaugacuuggauga

SEQ ID NO: 158614 - RNA, 19 nt, Artificial Sequence
  Description of Artificial Sequence: Synthetic oligonucleotide
uguaucgcaugcuccucaa

SEQ ID NO: 158615 - RNA, 19 nt, Artificial Sequence
  Description of Artificial Sequence: Synthetic oligonucleotide
gucuuguaucgcaugcucc

SEQ ID NO: 158616 - RNA, 19 nt, Artificial Sequence
  Description of Artificial Sequence: Synthetic oligonucleotide
cugcuacucaaauuacuga

SEQ ID NO: 158617 - RNA, 19 nt, Artificial Sequence
  Description of Artificial Sequence: Synthetic oligonucleotide
cacguauaaucuaggcuca

SEQ ID NO: 158618 - RNA, 19 nt, Artificial Sequence
  Description of Artificial Sequence: Synthetic oligonucleotide
ucauuccuaugaccucucu

SEQ ID NO: 158619 - RNA, 19 nt, Artificial Sequence
  Description of Artificial Sequence: Synthetic oligonucleotide
accccuauuuuccauugua

SEQ ID NO: 158620 - RNA, 19 nt, Artificial Sequence
  Description of Artificial Sequence: Synthetic oligonucleotide
ucaaauuacugaggccaaa

SEQ ID NO: 158621 - RNA, 19 nt, Artificial Sequence
  Description of Artificial Sequence: Synthetic oligonucleotide
guauucgaacaagucagga

SEQ ID NO: 158622 - RNA, 19 nt, Artificial Sequence
  Description of Artificial Sequence: Synthetic oligonucleotide
gguauucgaacaagucagg

SEQ ID NO: 158623 - RNA, 19 nt, Artificial Sequence
  Description of Artificial Sequence: Synthetic oligonucleotide
ucaguccuaugaacuguaa

SEQ ID NO: 158624 - RNA, 19 nt, Artificial Sequence
  Description of Artificial Sequence: Synthetic oligonucleotide
guaccguucacauacgguu

SEQ ID NO: 158625 - RNA, 19 nt, Artificial Sequence
  Description of Artificial Sequence: Synthetic oligonucleotide
cucucaacgacgacaaacu

SEQ ID NO: 158626 - RNA, 19 nt, Artificial Sequence
  Description of Artificial Sequence: Synthetic oligonucleotide
aauccacgacaggaggacu

SEQ ID NO: 158627 - RNA, 19 nt, Artificial Sequence
  Description of Artificial Sequence: Synthetic oligonucleotide
uggucuuaccagacuuuaa

SEQ ID NO: 158628 - RNA, 19 nt, Artificial Sequence
  Description of Artificial Sequence: Synthetic oligonucleotide
cacuagggcaaacuauuca

SEQ ID NO: 158629 - RNA, 19 nt, Artificial Sequence
  Description of Artificial Sequence: Synthetic oligonucleotide
caggguugccaaaugccuc

SEQ ID NO: 158630 - RNA, 19 nt, Artificial Sequence
  Description of Artificial Sequence: Synthetic oligonucleotide
aagcgguaaacugccuaca

SEQ ID NO: 158631 - RNA, 19 nt, Artificial Sequence
  Description of Artificial Sequence: Synthetic oligonucleotide
acguauaaucuaggcucac

SEQ ID NO: 158632 - RNA, 19 nt, Artificial Sequence
  Description of Artificial Sequence: Synthetic oligonucleotide
cuuaggcauuaacauucuc

SEQ ID NO: 158633 - RNA, 19 nt, Artificial Sequence
  Description of Artificial Sequence: Synthetic oligonucleotide
acgaacgcuugugcaaggg

SEQ ID NO: 158634 - RNA, 19 nt, Artificial Sequence
  Description of Artificial Sequence: Synthetic oligonucleotide
ccuaguaagaaaucccgga

SEQ ID NO: 158635 - RNA, 19 nt, Artificial Sequence
  Description of Artificial Sequence: Synthetic oligonucleotide
uguauacuucaccccuauu

SEQ ID NO: 158636 - RNA, 19 nt, Artificial Sequence
  Description of Artificial Sequence: Synthetic oligonucleotide
agcuaauaucugguccauc

SEQ ID NO: 158637 - RNA, 19 nt, Artificial Sequence
  Description of Artificial Sequence: Synthetic oligonucleotide
aaucucccauagaagcuau

SEQ ID NO: 158638 - RNA, 19 nt, Artificial Sequence
  Description of Artificial Sequence: Synthetic oligonucleotide
cauguacacguauaaucua

SEQ ID NO: 158639 - RNA, 19 nt, Artificial Sequence
  Description of Artificial Sequence: Synthetic oligonucleotide
uguaugagcuugguugcuu

SEQ ID NO: 158640 - RNA, 19 nt, Artificial Sequence
  Description of Artificial Sequence: Synthetic oligonucleotide
cucuugcuaccuucccacc

SEQ ID NO: 158641 - RNA, 19 nt, Artificial Sequence
  Description of Artificial Sequence: Synthetic oligonucleotide
uugcuaccuucccacccca

SEQ ID NO: 158642 - RNA, 19 nt, Artificial Sequence
  Description of Artificial Sequence: Synthetic oligonucleotide
acauacgguuuggcuuucc

SEQ ID NO: 158643 - RNA, 19 nt, Artificial Sequence
  Description of Artificial Sequence: Synthetic oligonucleotide
gaauuggucuuaccagacu

SEQ ID NO: 158644 - RNA, 19 nt, Artificial Sequence
  Description of Artificial Sequence: Synthetic oligonucleotide
aaucccggaaugacuugga

SEQ ID NO: 158645 - RNA, 19 nt, Artificial Sequence
  Description of Artificial Sequence: Synthetic oligonucleotide
ucgaacaagucaggaugga

SEQ ID NO: 158646 - RNA, 19 nt, Artificial Sequence
  Description of Artificial Sequence: Synthetic oligonucleotide
ggaagagccugcagugucg

SEQ ID NO: 158647 - RNA, 19 nt, Artificial Sequence
  Description of Artificial Sequence: Synthetic oligonucleotide
cauuagugaucagaaguaa

SEQ ID NO: 158648 - RNA, 19 nt, Artificial Sequence
  Description of Artificial Sequence: Synthetic oligonucleotide
cucaaauuacugaggccaa

SEQ ID NO: 158649 - RNA, 19 nt, Artificial Sequence
  Description of Artificial Sequence: Synthetic oligonucleotide
gcaagucuuguaucgcaug

SEQ ID NO: 158650 - RNA, 19 nt, Artificial Sequence
  Description of Artificial Sequence: Synthetic oligonucleotide
cugacacaucgucacauaa

SEQ ID NO: 158651 - RNA, 19 nt, Artificial Sequence
  Description of Artificial Sequence: Synthetic oligonucleotide
cagcaagucuuguaucgca

SEQ ID NO: 158652 - RNA, 19 nt, Artificial Sequence
  Description of Artificial Sequence: Synthetic oligonucleotide
ccacuuuuauucugacuag

SEQ ID NO: 158653 - RNA, 19 nt, Artificial Sequence
  Description of Artificial Sequence: Synthetic oligonucleotide
aucgagggaccuugcuuca

SEQ ID NO: 158654 - RNA, 19 nt, Artificial Sequence
  Description of Artificial Sequence: Synthetic oligonucleotide
guaacccaacuggaagagc

SEQ ID NO: 158655 - RNA, 19 nt, Artificial Sequence
  Description of Artificial Sequence: Synthetic oligonucleotide
gacuccaucuaaccugcua

SEQ ID NO: 158656 - RNA, 19 nt, Artificial Sequence
  Description of Artificial Sequence: Synthetic oligonucleotide
accugcuacucaaauuacu

SEQ ID NO: 158657 - RNA, 19 nt, Artificial Sequence
  Description of Artificial Sequence: Synthetic oligonucleotide
caaggauugggacucucua

SEQ ID NO: 158658 - RNA, 19 nt, Artificial Sequence
  Description of Artificial Sequence: Synthetic oligonucleotide
acccaacuggaagagccug

SEQ ID NO: 158659 - RNA, 19 nt, Artificial Sequence
  Description of Artificial Sequence: Synthetic oligonucleotide
cugucggagcgcuuccgug

SEQ ID NO: 158660 - RNA, 19 nt, Artificial Sequence
  Description of Artificial Sequence: Synthetic oligonucleotide
gggacucucuaguagugga

SEQ ID NO: 158661 - RNA, 19 nt, Artificial Sequence
  Description of Artificial Sequence: Synthetic oligonucleotide
gccuccagaacugucggag

SEQ ID NO: 158662 - RNA, 19 nt, Artificial Sequence
  Description of Artificial Sequence: Synthetic oligonucleotide
agccaaggguuucucccga

SEQ ID NO: 158663 - RNA, 19 nt, Artificial Sequence
  Description of Artificial Sequence: Synthetic oligonucleotide
gaagagccugcagugucga

SEQ ID NO: 158664 - RNA, 19 nt, Artificial Sequence
  Description of Artificial Sequence: Synthetic oligonucleotide
auauucccaaggaaucuuu

SEQ ID NO: 158665 - RNA, 19 nt, Artificial Sequence
  Description of Artificial Sequence: Synthetic oligonucleotide
uuccguugccucugagaaa

SEQ ID NO: 158666 - RNA, 19 nt, Artificial Sequence
  Description of Artificial Sequence: Synthetic oligonucleotide
cuaccuuaaucucaucaau

SEQ ID NO: 158667 - RNA, 19 nt, Artificial Sequence
  Description of Artificial Sequence: Synthetic oligonucleotide
gcgacugcgguagaagcag

SEQ ID NO: 158668 - RNA, 19 nt, Artificial Sequence
  Description of Artificial Sequence: Synthetic oligonucleotide
caguccuaugaacuguaaa

SEQ ID NO: 158669 - RNA, 19 nt, Artificial Sequence
  Description of Artificial Sequence: Synthetic oligonucleotide
agcaagucuuguaucgcau

SEQ ID NO: 158670 - RNA, 19 nt, Artificial Sequence
  Description of Artificial Sequence: Synthetic oligonucleotide
ccuaccuuaaucucaucaa

SEQ ID NO: 158671 - RNA, 19 nt, Artificial Sequence
  Description of Artificial Sequence: Synthetic oligonucleotide
ggagcgacugcgguagaag

SEQ ID NO: 158672 - RNA, 19 nt, Artificial Sequence
  Description of Artificial Sequence: Synthetic oligonucleotide
cuaggcucacagaacuucu

SEQ ID NO: 158673 - RNA, 19 nt, Artificial Sequence
  Description of Artificial Sequence: Synthetic oligonucleotide
guccucucaacgacgacaa

SEQ ID NO: 158674 - RNA, 19 nt, Artificial Sequence
  Description of Artificial Sequence: Synthetic oligonucleotide
guuuccgaguaauuugguu

SEQ ID NO: 158675 - RNA, 19 nt, Artificial Sequence
  Description of Artificial Sequence: Synthetic oligonucleotide
cauuuagggccugagaguu

SEQ ID NO: 158676 - RNA, 19 nt, Artificial Sequence
  Description of Artificial Sequence: Synthetic oligonucleotide
ccaauauuagccuaacauu

SEQ ID NO: 158677 - RNA, 19 nt, Artificial Sequence
  Description of Artificial Sequence: Synthetic oligonucleotide
gguguaccguucacauacg

SEQ ID NO: 158678 - RNA, 19 nt, Artificial Sequence
  Description of Artificial Sequence: Synthetic oligonucleotide
cuuugguggucaaugcaau

SEQ ID NO: 158679 - RNA, 19 nt, Artificial Sequence
  Description of Artificial Sequence: Synthetic oligonucleotide
aggacuuguaggacugaaa

SEQ ID NO: 158680 - RNA, 19 nt, Artificial Sequence
  Description of Artificial Sequence: Synthetic oligonucleotide
cugggacuacccacuccug

SEQ ID NO: 158681 - RNA, 19 nt, Artificial Sequence
  Description of Artificial Sequence: Synthetic oligonucleotide
caaauuacugaggccaaau

SEQ ID NO: 158682 - RNA, 19 nt, Artificial Sequence
  Description of Artificial Sequence: Synthetic oligonucleotide
agcuagcacccaugcuugu

SEQ ID NO: 158683 - RNA, 19 nt, Artificial Sequence
  Description of Artificial Sequence: Synthetic oligonucleotide
gaacugaagucaagcggua

SEQ ID NO: 158684 - RNA, 19 nt, Artificial Sequence
  Description of Artificial Sequence: Synthetic oligonucleotide
augaacuguaagagguauu

SEQ ID NO: 158685 - RNA, 19 nt, Artificial Sequence
  Description of Artificial Sequence: Synthetic oligonucleotide
ccaaauauguacgaacgcu

SEQ ID NO: 158686 - RNA, 19 nt, Artificial Sequence
  Description of Artificial Sequence: Synthetic oligonucleotide
ugcuaccuucccaccccaa

SEQ ID NO: 158687 - RNA, 19 nt, Artificial Sequence
  Description of Artificial Sequence: Synthetic oligonucleotide
uccucucaacgacgacaaa

SEQ ID NO: 158688 - RNA, 19 nt, Artificial Sequence
  Description of Artificial Sequence: Synthetic oligonucleotide
auccacgacaggaggacuu

SEQ ID NO: 158689 - RNA, 19 nt, Artificial Sequence
  Description of Artificial Sequence: Synthetic oligonucleotide
acuuugguacugcgccaua

SEQ ID NO: 158690 - RNA, 19 nt, Artificial Sequence
  Description of Artificial Sequence: Synthetic oligonucleotide
guaugagcuugguugcuuu

SEQ ID NO: 158691 - RNA, 19 nt, Artificial Sequence
  Description of Artificial Sequence: Synthetic oligonucleotide
cuccaucuaaccugcuacu

SEQ ID NO: 158692 - RNA, 19 nt, Artificial Sequence
  Description of Artificial Sequence: Synthetic oligonucleotide
gucauuccuaugaccucuc

SEQ ID NO: 158693 - RNA, 19 nt, Artificial Sequence
  Description of Artificial Sequence: Synthetic oligonucleotide
gggaaugaacuggggagca

SEQ ID NO: 158694 - RNA, 19 nt, Artificial Sequence
  Description of Artificial Sequence: Synthetic oligonucleotide
ggacugaaagagccaguaa

SEQ ID NO: 158695 - RNA, 19 nt, Artificial Sequence
  Description of Artificial Sequence: Synthetic oligonucleotide
gaguuagcuucagucaauu

SEQ ID NO: 158696 - RNA, 19 nt, Artificial Sequence
  Description of Artificial Sequence: Synthetic oligonucleotide
ggauugggacucucuagua

SEQ ID NO: 158697 - RNA, 19 nt, Artificial Sequence
  Description of Artificial Sequence: Synthetic oligonucleotide
gauuuagauguuggugauu

SEQ ID NO: 158698 - RNA, 19 nt, Artificial Sequence
  Description of Artificial Sequence: Synthetic oligonucleotide
ucggagcgcuuccguggcu

SEQ ID NO: 158699 - RNA, 19 nt, Artificial Sequence
  Description of Artificial Sequence: Synthetic oligonucleotide
cgguaaacugccuacauau

SEQ ID NO: 158700 - RNA, 19 nt, Artificial Sequence
  Description of Artificial Sequence: Synthetic oligonucleotide
guaaugacugaggcuccua

SEQ ID NO: 158701 - RNA, 19 nt, Artificial Sequence
  Description of Artificial Sequence: Synthetic oligonucleotide
caacgacgacaaacucauc

SEQ ID NO: 158702 - RNA, 19 nt, Artificial Sequence
  Description of Artificial Sequence: Synthetic oligonucleotide
cuguauacuucaccccuau

SEQ ID NO: 158703 - RNA, 19 nt, Artificial Sequence
  Description of Artificial Sequence: Synthetic oligonucleotide
aucuaggcucacagaacuu

SEQ ID NO: 158704 - RNA, 19 nt, Artificial Sequence
  Description of Artificial Sequence: Synthetic oligonucleotide
ccauagaagcuaugcaacu

SEQ ID NO: 158705 - RNA, 19 nt, Artificial Sequence
  Description of Artificial Sequence: Synthetic oligonucleotide
gguggacucugaauaauau

SEQ ID NO: 158706 - RNA, 19 nt, Artificial Sequence
  Description of Artificial Sequence: Synthetic oligonucleotide
cuuugguacugcgccauau

SEQ ID NO: 158707 - RNA, 19 nt, Artificial Sequence
  Description of Artificial Sequence: Synthetic oligonucleotide
gguuuggcuuuccccucga

SEQ ID NO: 158708 - RNA, 19 nt, Artificial Sequence
  Description of Artificial Sequence: Synthetic oligonucleotide
cacauacgguuuggcuuuc

SEQ ID NO: 158709 - RNA, 19 nt, Artificial Sequence
  Description of Artificial Sequence: Synthetic oligonucleotide
cguucacauacgguuuggc

SEQ ID NO: 158710 - RNA, 19 nt, Artificial Sequence
  Description of Artificial Sequence: Synthetic oligonucleotide
ggacucucuaguaguggaa

SEQ ID NO: 158711 - RNA, 19 nt, Artificial Sequence
  Description of Artificial Sequence: Synthetic oligonucleotide
cgguaaaauauggaaaggu

SEQ ID NO: 158712 - RNA, 19 nt, Artificial Sequence
  Description of Artificial Sequence: Synthetic oligonucleotide
gguuuccgaguaauuuggu

SEQ ID NO: 158713 - RNA, 19 nt, Artificial Sequence
  Description of Artificial Sequence: Synthetic oligonucleotide
cuguuagaauugguuccau

SEQ ID NO: 158714 - RNA, 19 nt, Artificial Sequence
  Description of Artificial Sequence: Synthetic oligonucleotide
gucaagcgguaaacugccu

SEQ ID NO: 158715 - RNA, 19 nt, Artificial Sequence
  Description of Artificial Sequence: Synthetic oligonucleotide
gccgccauauucaguccua

SEQ ID NO: 158716 - RNA, 19 nt, Artificial Sequence
  Description of Artificial Sequence: Synthetic oligonucleotide
cccucgaccuuguccaaau

SEQ ID NO: 158717 - RNA, 19 nt, Artificial Sequence
  Description of Artificial Sequence: Synthetic oligonucleotide
gcuagcacccaugcuuguu

SEQ ID NO: 158718 - RNA, 19 nt, Artificial Sequence
  Description of Artificial Sequence: Synthetic oligonucleotide
cgaacgcuugugcaagggu

SEQ ID NO: 158719 - RNA, 19 nt, Artificial Sequence
  Description of Artificial Sequence: Synthetic oligonucleotide
cccagaacuuaggcauuaa

SEQ ID NO: 158720 - RNA, 19 nt, Artificial Sequence
  Description of Artificial Sequence: Synthetic oligonucleotide
cggagcgcuuccguggcuu

SEQ ID NO: 158721 - RNA, 19 nt, Artificial Sequence
  Description of Artificial Sequence: Synthetic oligonucleotide
uacuauuuagucuaaaaga

SEQ ID NO: 158722 - RNA, 19 nt, Artificial Sequence
  Description of Artificial Sequence: Synthetic oligonucleotide
aaauuauauuuguuugggg

SEQ ID NO: 158723 - RNA, 19 nt, Artificial Sequence
  Description of Artificial Sequence: Synthetic oligonucleotide
ugaguuucuaauaucgugc

SEQ ID NO: 158724 - RNA, 19 nt, Artificial Sequence
  Description of Artificial Sequence: Synthetic oligonucleotide
ucuaauuuccccaacaaua

SEQ ID NO: 158725 - RNA, 19 nt, Artificial Sequence
  Description of Artificial Sequence: Synthetic oligonucleotide
ucuaauaucgugcaacacu

SEQ ID NO: 158726 - RNA, 19 nt, Artificial Sequence
  Description of Artificial Sequence: Synthetic oligonucleotide
uuaagcuacgcccuacucg

SEQ ID NO: 158727 - RNA, 19 nt, Artificial Sequence
  Description of Artificial Sequence: Synthetic oligonucleotide
gauaguuuagaaaugaguc

SEQ ID NO: 158728 - RNA, 19 nt, Artificial Sequence
  Description of Artificial Sequence: Synthetic oligonucleotide
auacuagacuuucaaaugg

SEQ ID NO: 158729 - RNA, 19 nt, Artificial Sequence
  Description of Artificial Sequence: Synthetic oligonucleotide
uguacaguaggccagcuca

SEQ ID NO: 158730 - RNA, 19 nt, Artificial Sequence
  Description of Artificial Sequence: Synthetic oligonucleotide
  modified_base (4)..(4): a, c, u, g, unknown or other
uucncauguguucacacag

SEQ ID NO: 158731 - RNA, 19 nt, Artificial Sequence
  Description of Artificial Sequence: Synthetic oligonucleotide
agaugguagauuuaaccac

SEQ ID NO: 158732 - RNA, 19 nt, Artificial Sequence
  Description of Artificial Sequence: Synthetic oligonucleotide
ugaugugugguauacuggg

SEQ ID NO: 158733 - RNA, 19 nt, Artificial Sequence
  Description of Artificial Sequence: Synthetic oligonucleotide
cauuucaauaagcugaggc

SEQ ID NO: 158734 - RNA, 19 nt, Artificial Sequence
  Description of Artificial Sequence: Synthetic oligonucleotide
aauacuauuuagucuaaaa

SEQ ID NO: 158735 - RNA, 19 nt, Artificial Sequence
  Description of Artificial Sequence: Synthetic oligonucleotide
uaugaugugugguauacug

SEQ ID NO: 158736 - RNA, 19 nt, Artificial Sequence
  Description of Artificial Sequence: Synthetic oligonucleotide
ucuacauugacagaagaca

SEQ ID NO: 158737 - RNA, 19 nt, Artificial Sequence
  Description of Artificial Sequence: Synthetic oligonucleotide
uuuuauuaagcuacgcccu

SEQ ID NO: 158738 - RNA, 19 nt, Artificial Sequence
  Description of Artificial Sequence: Synthetic oligonucleotide
guuaucagcacuucuacug

SEQ ID NO: 158739 - RNA, 19 nt, Artificial Sequence
  Description of Artificial Sequence: Synthetic oligonucleotide
uugacaauacuauuuaguc

SEQ ID NO: 158740 - RNA, 19 nt, Artificial Sequence
  Description of Artificial Sequence: Synthetic oligonucleotide
ucagauaugacugcucccg

SEQ ID NO: 158741 - RNA, 19 nt, Artificial Sequence
  Description of Artificial Sequence: Synthetic oligonucleotide
uuuacaacaggaccauuug

SEQ ID NO: 158742 - RNA, 19 nt, Artificial Sequence
  Description of Artificial Sequence: Synthetic oligonucleotide
augggauccaucccaaccc

SEQ ID NO: 158743 - RNA, 19 nt, Artificial Sequence
  Description of Artificial Sequence: Synthetic oligonucleotide
uguagccugagagaaaacg

SEQ ID NO: 158744 - RNA, 19 nt, Artificial Sequence
  Description of Artificial Sequence: Synthetic oligonucleotide
aguguuuaccauaaggcac

SEQ ID NO: 158745 - RNA, 19 nt, Artificial Sequence
  Description of Artificial Sequence: Synthetic oligonucleotide
augaauuuguuauugcaca

SEQ ID NO: 158746 - RNA, 19 nt, Artificial Sequence
  Description of Artificial Sequence: Synthetic oligonucleotide
uguagugaguuucuaauau

SEQ ID NO: 158747 - RNA, 19 nt, Artificial Sequence
  Description of Artificial Sequence: Synthetic oligonucleotide
aacucucgagaucuggagg

SEQ ID NO: 158748 - RNA, 19 nt, Artificial Sequence
  Description of Artificial Sequence: Synthetic oligonucleotide
ucggcaaagacugagaccu

SEQ ID NO: 158749 - RNA, 19 nt, Artificial Sequence
  Description of Artificial Sequence: Synthetic oligonucleotide
uuuaaucucucguaugacu

SEQ ID NO: 158750 - RNA, 19 nt, Artificial Sequence
  Description of Artificial Sequence: Synthetic oligonucleotide
aauuucgaaccccaucucu

SEQ ID NO: 158751 - RNA, 19 nt, Artificial Sequence
  Description of Artificial Sequence: Synthetic oligonucleotide
cuaauaucgugcaacacuc

SEQ ID NO: 158752 - RNA, 19 nt, Artificial Sequence
  Description of Artificial Sequence: Synthetic oligonucleotide
auaguuuagaaaugaguca

SEQ ID NO: 158753 - RNA, 19 nt, Artificial Sequence
  Description of Artificial Sequence: Synthetic oligonucleotide
aguuaaugggauccauccc

SEQ ID NO: 158754 - RNA, 19 nt, Artificial Sequence
  Description of Artificial Sequence: Synthetic oligonucleotide
uguuauugcacagugaaua

SEQ ID NO: 158755 - RNA, 19 nt, Artificial Sequence
  Description of Artificial Sequence: Synthetic oligonucleotide
caguuaaugggauccaucc

SEQ ID NO: 158756 - RNA, 19 nt, Artificial Sequence
  Description of Artificial Sequence: Synthetic oligonucleotide
aaccccaucucuccaaguc

SEQ ID NO: 158757 - RNA, 19 nt, Artificial Sequence
  Description of Artificial Sequence: Synthetic oligonucleotide
gaauucgaugcuuuaguug

SEQ ID NO: 158758 - RNA, 19 nt, Artificial Sequence
  Description of Artificial Sequence: Synthetic oligonucleotide
guauaguguacacucauac

SEQ ID NO: 158759 - RNA, 19 nt, Artificial Sequence
  Description of Artificial Sequence: Synthetic oligonucleotide
uuagauagucuuugaagga

SEQ ID NO: 158760 - RNA, 19 nt, Artificial Sequence
  Description of Artificial Sequence: Synthetic oligonucleotide
uguaagucccacaaccugu

SEQ ID NO: 158761 - RNA, 19 nt, Artificial Sequence
  Description of Artificial Sequence: Synthetic oligonucleotide
cuucuacuggaacacaucc

SEQ ID NO: 158762 - RNA, 19 nt, Artificial Sequence
  Description of Artificial Sequence: Synthetic oligonucleotide
uuuggggcaaagcaacaag

SEQ ID NO: 158763 - RNA, 19 nt, Artificial Sequence
  Description of Artificial Sequence: Synthetic oligonucleotide
uacaacaggaccauuuguc

SEQ ID NO: 158764 - RNA, 19 nt, Artificial Sequence
  Description of Artificial Sequence: Synthetic oligonucleotide
uauccuauccauucaaguc

SEQ ID NO: 158765 - RNA, 19 nt, Artificial Sequence
  Description of Artificial Sequence: Synthetic oligonucleotide
ucggacuucagauaugacu

SEQ ID NO: 158766 - RNA, 19 nt, Artificial Sequence
  Description of Artificial Sequence: Synthetic oligonucleotide
augucuaugugaauagggc

SEQ ID NO: 158767 - RNA, 19 nt, Artificial Sequence
  Description of Artificial Sequence: Synthetic oligonucleotide
uuaaucucucguaugacuu

SEQ ID NO: 158768 - RNA, 19 nt, Artificial Sequence
  Description of Artificial Sequence: Synthetic oligonucleotide
cuacucguugaccagacag

SEQ ID NO: 158769 - RNA, 19 nt, Artificial Sequence
  Description of Artificial Sequence: Synthetic oligonucleotide
ggcaugauaaguuaucagc

SEQ ID NO: 158770 - RNA, 19 nt, Artificial Sequence
  Description of Artificial Sequence: Synthetic oligonucleotide
uaagcuacgcccuacucgu

SEQ ID NO: 158771 - RNA, 19 nt, Artificial Sequence
  Description of Artificial Sequence: Synthetic oligonucleotide
ucuuagaagugacccaaug

SEQ ID NO: 158772 - RNA, 19 nt, Artificial Sequence
  Description of Artificial Sequence: Synthetic oligonucleotide
ucucguaugacuugcugca

SEQ ID NO: 158773 - RNA, 19 nt, Artificial Sequence
  Description of Artificial Sequence: Synthetic oligonucleotide
uacuagacuuucaaauggc

SEQ ID NO: 158774 - RNA, 19 nt, Artificial Sequence
  Description of Artificial Sequence: Synthetic oligonucleotide
cauaggaacaucaacugga

SEQ ID NO: 158775 - RNA, 19 nt, Artificial Sequence
  Description of Artificial Sequence: Synthetic oligonucleotide
auaaguugguuaugucugg

SEQ ID NO: 158776 - RNA, 19 nt, Artificial Sequence
  Description of Artificial Sequence: Synthetic oligonucleotide
ucuauccuauccauucaag

SEQ ID NO: 158777 - RNA, 19 nt, Artificial Sequence
  Description of Artificial Sequence: Synthetic oligonucleotide
guuaaugggauccauccca

SEQ ID NO: 158778 - RNA, 19 nt, Artificial Sequence
  Description of Artificial Sequence: Synthetic oligonucleotide
augauaaguuaucagcacu

SEQ ID NO: 158779 - RNA, 19 nt, Artificial Sequence
  Description of Artificial Sequence: Synthetic oligonucleotide
uauaguguacacucauaca

SEQ ID NO: 158780 - RNA, 19 nt, Artificial Sequence
  Description of Artificial Sequence: Synthetic oligonucleotide
ucuauuguuguggagggcu

SEQ ID NO: 158781 - RNA, 19 nt, Artificial Sequence
  Description of Artificial Sequence: Synthetic oligonucleotide
  modified_base (3)..(3): a, c, u, g, unknown or other
ucncauguguucacacagg

SEQ ID NO: 158782 - RNA, 19 nt, Artificial Sequence
  Description of Artificial Sequence: Synthetic oligonucleotide
cuuacugggcucaguaagg

SEQ ID NO: 158783 - RNA, 19 nt, Artificial Sequence
  Description of Artificial Sequence: Synthetic oligonucleotide
gugaguuucuaauaucgug

SEQ ID NO: 158784 - RNA, 19 nt, Artificial Sequence
  Description of Artificial Sequence: Synthetic oligonucleotide
accuucuuaggggauagcc

SEQ ID NO: 158785 - RNA, 19 nt, Artificial Sequence
  Description of Artificial Sequence: Synthetic oligonucleotide
ucauuggauacugugaaaa

SEQ ID NO: 158786 - RNA, 19 nt, Artificial Sequence
  Description of Artificial Sequence: Synthetic oligonucleotide
auagguauuuucauaaaga

SEQ ID NO: 158787 - RNA, 19 nt, Artificial Sequence
  Description of Artificial Sequence: Synthetic oligonucleotide
ucgugcaacacucuucgca

SEQ ID NO: 158788 - RNA, 19 nt, Artificial Sequence
  Description of Artificial Sequence: Synthetic oligonucleotide
auuaucuugacaauacuau

SEQ ID NO: 158789 - RNA, 19 nt, Artificial Sequence
  Description of Artificial Sequence: Synthetic oligonucleotide
  modified_base (2)..(2): a, c, u, g, unknown or other
cncauguguucacacaggg

SEQ ID NO: 158790 - RNA, 19 nt, Artificial Sequence
  Description of Artificial Sequence: Synthetic oligonucleotide
aaggauuugagaauaugau

SEQ ID NO: 158791 - RNA, 19 nt, Artificial Sequence
  Description of Artificial Sequence: Synthetic oligonucleotide
cacucuauccacagaagag

SEQ ID NO: 158792 - RNA, 19 nt, Artificial Sequence
  Description of Artificial Sequence: Synthetic oligonucleotide
auaaguuaucagcacuucu

SEQ ID NO: 158793 - RNA, 19 nt, Artificial Sequence
  Description of Artificial Sequence: Synthetic oligonucleotide
uuaugucugggacucuuca

SEQ ID NO: 158794 - RNA, 19 nt, Artificial Sequence
  Description of Artificial Sequence: Synthetic oligonucleotide
uguagaagcuagucugaag

SEQ ID NO: 158795 - RNA, 19 nt, Artificial Sequence
  Description of Artificial Sequence: Synthetic oligonucleotide
cagaggaucgaaaagguga

SEQ ID NO: 158796 - RNA, 19 nt, Artificial Sequence
  Description of Artificial Sequence: Synthetic oligonucleotide
auuaagcuacgcccuacuc

SEQ ID NO: 158797 - RNA, 19 nt, Artificial Sequence
  Description of Artificial Sequence: Synthetic oligonucleotide
acuuauaaguugguuaugu

SEQ ID NO: 158798 - RNA, 19 nt, Artificial Sequence
  Description of Artificial Sequence: Synthetic oligonucleotide
ugagaucuacccuacugcu

SEQ ID NO: 158799 - RNA, 19 nt, Artificial Sequence
  Description of Artificial Sequence: Synthetic oligonucleotide
caugagaucuacccuacug

SEQ ID NO: 158800 - RNA, 19 nt, Artificial Sequence
  Description of Artificial Sequence: Synthetic oligonucleotide
uaguguacacucauacaga

SEQ ID NO: 158801 - RNA, 19 nt, Artificial Sequence
  Description of Artificial Sequence: Synthetic oligonucleotide
caugacauucaguggagac

SEQ ID NO: 158802 - RNA, 19 nt, Artificial Sequence
  Description of Artificial Sequence: Synthetic oligonucleotide
uucuacuggaacacauccc

SEQ ID NO: 158803 - RNA, 19 nt, Artificial Sequence
  Description of Artificial Sequence: Synthetic oligonucleotide
accugauauguuuggggac

SEQ ID NO: 158804 - RNA, 19 nt, Artificial Sequence
  Description of Artificial Sequence: Synthetic oligonucleotide
cucuacauugacagaagac

SEQ ID NO: 158805 - RNA, 19 nt, Artificial Sequence
  Description of Artificial Sequence: Synthetic oligonucleotide
ccaguauuacaguuaaugg

SEQ ID NO: 158806 - RNA, 19 nt, Artificial Sequence
  Description of Artificial Sequence: Synthetic oligonucleotide
uuacaacaggaccauuugu

SEQ ID NO: 158807 - RNA, 19 nt, Artificial Sequence
  Description of Artificial Sequence: Synthetic oligonucleotide
aucucuauggcggaaggag

SEQ ID NO: 158808 - RNA, 19 nt, Artificial Sequence
  Description of Artificial Sequence: Synthetic oligonucleotide
acauucaguggagacgggc

SEQ ID NO: 158809 - RNA, 19 nt, Artificial Sequence
  Description of Artificial Sequence: Synthetic oligonucleotide
ucauggauaacgccaguau

SEQ ID NO: 158810 - RNA, 19 nt, Artificial Sequence
  Description of Artificial Sequence: Synthetic oligonucleotide
acugugaaaagauucugua

SEQ ID NO: 158811 - RNA, 19 nt, Artificial Sequence
  Description of Artificial Sequence: Synthetic oligonucleotide
auguaagucccacaaccug

SEQ ID NO: 158812 - RNA, 19 nt, Artificial Sequence
  Description of Artificial Sequence: Synthetic oligonucleotide
uguggacugggauauugca

SEQ ID NO: 158813 - RNA, 19 nt, Artificial Sequence
  Description of Artificial Sequence: Synthetic oligonucleotide
uauuaagcuacgcccuacu

SEQ ID NO: 158814 - RNA, 19 nt, Artificial Sequence
  Description of Artificial Sequence: Synthetic oligonucleotide
augugaauagggcaccuga

SEQ ID NO: 158815 - RNA, 19 nt, Artificial Sequence
  Description of Artificial Sequence: Synthetic oligonucleotide
aacagacgauuucugagua

SEQ ID NO: 158816 - RNA, 19 nt, Artificial Sequence
  Description of Artificial Sequence: Synthetic oligonucleotide
ucgaaaaggugaaggcacc

SEQ ID NO: 158817 - RNA, 19 nt, Artificial Sequence
  Description of Artificial Sequence: Synthetic oligonucleotide
uaaguugguuaugucuggg

SEQ ID NO: 158818 - RNA, 19 nt, Artificial Sequence
  Description of Artificial Sequence: Synthetic oligonucleotide
uuaucuugacaauacuauu

SEQ ID NO: 158819 - RNA, 19 nt, Artificial Sequence
  Description of Artificial Sequence: Synthetic oligonucleotide
acucucgagaucuggaggu

SEQ ID NO: 158820 - RNA, 19 nt, Artificial Sequence
  Description of Artificial Sequence: Synthetic oligonucleotide
cucauggacucuuuguuuc

SEQ ID NO: 158821 - RNA, 19 nt, Artificial Sequence
  Description of Artificial Sequence: Synthetic oligonucleotide
uuuauuaagcuacgcccua

SEQ ID NO: 158822 - RNA, 19 nt, Artificial Sequence
  Description of Artificial Sequence: Synthetic oligonucleotide
gauauguuuggggacgcug

SEQ ID NO: 158823 - RNA, 19 nt, Artificial Sequence
  Description of Artificial Sequence: Synthetic oligonucleotide
cagaguuccgcaaacccug

SEQ ID NO: 158824 - RNA, 19 nt, Artificial Sequence
  Description of Artificial Sequence: Synthetic oligonucleotide
cuuauaaguugguuauguc

SEQ ID NO: 158825 - RNA, 19 nt, Artificial Sequence
  Description of Artificial Sequence: Synthetic oligonucleotide
gaguuucuaauaucgugca

SEQ ID NO: 158826 - RNA, 19 nt, Artificial Sequence
  Description of Artificial Sequence: Synthetic oligonucleotide
uacucguugaccagacaga

SEQ ID NO: 158827 - RNA, 19 nt, Artificial Sequence
  Description of Artificial Sequence: Synthetic oligonucleotide
uuauauuuguuuggggcaa

SEQ ID NO: 158828 - RNA, 19 nt, Artificial Sequence
  Description of Artificial Sequence: Synthetic oligonucleotide
uucagauaugacugcuccc

SEQ ID NO: 158829 - RNA, 19 nt, Artificial Sequence
  Description of Artificial Sequence: Synthetic oligonucleotide
acagacgauuucugaguac

SEQ ID NO: 158830 - RNA, 19 nt, Artificial Sequence
  Description of Artificial Sequence: Synthetic oligonucleotide
uuaaugggauccaucccaa

SEQ ID NO: 158831 - RNA, 19 nt, Artificial Sequence
  Description of Artificial Sequence: Synthetic oligonucleotide
cuagacuuucaaauggcca

SEQ ID NO: 158832 - RNA, 19 nt, Artificial Sequence
  Description of Artificial Sequence: Synthetic oligonucleotide
ugcaaaccuucauuugagc

SEQ ID NO: 158833 - RNA, 19 nt, Artificial Sequence
  Description of Artificial Sequence: Synthetic oligonucleotide
cauuaucuugacaauacua

SEQ ID NO: 158834 - RNA, 19 nt, Artificial Sequence
  Description of Artificial Sequence: Synthetic oligonucleotide
uauuuguuuggggcaaagc

SEQ ID NO: 158835 - RNA, 19 nt, Artificial Sequence
  Description of Artificial Sequence: Synthetic oligonucleotide
ucgaugcuuuaguugaaga

SEQ ID NO: 158836 - RNA, 19 nt, Artificial Sequence
  Description of Artificial Sequence: Synthetic oligonucleotide
aguuaucagcacuucuacu

SEQ ID NO: 158837 - RNA, 19 nt, Artificial Sequence
  Description of Artificial Sequence: Synthetic oligonucleotide
ugugaauagggcaccugau

SEQ ID NO: 158838 - RNA, 19 nt, Artificial Sequence
  Description of Artificial Sequence: Synthetic oligonucleotide
uccgccucacaacuugaag

SEQ ID NO: 158839 - RNA, 19 nt, Artificial Sequence
  Description of Artificial Sequence: Synthetic oligonucleotide
gucuaugugaauagggcac

SEQ ID NO: 158840 - RNA, 19 nt, Artificial Sequence
  Description of Artificial Sequence: Synthetic oligonucleotide
ucguaugacuugcugcaac

SEQ ID NO: 158841 - RNA, 19 nt, Artificial Sequence
  Description of Artificial Sequence: Synthetic oligonucleotide
ugagcucauaccacugcac

SEQ ID NO: 158842 - RNA, 19 nt, Artificial Sequence
  Description of Artificial Sequence: Synthetic oligonucleotide
agacugcaaaccuucauuu

SEQ ID NO: 158843 - RNA, 19 nt, Artificial Sequence
  Description of Artificial Sequence: Synthetic oligonucleotide
cauaccacugcacugagcu

SEQ ID NO: 158844 - RNA, 19 nt, Artificial Sequence
  Description of Artificial Sequence: Synthetic oligonucleotide
agaauucgaugcuuuaguu

SEQ ID NO: 158845 - RNA, 19 nt, Artificial Sequence
  Description of Artificial Sequence: Synthetic oligonucleotide
auaugacugcucccguauc

SEQ ID NO: 158846 - RNA, 19 nt, Artificial Sequence
  Description of Artificial Sequence: Synthetic oligonucleotide
aguccuaggcccaacucgg

SEQ ID NO: 158847 - RNA, 19 nt, Artificial Sequence
  Description of Artificial Sequence: Synthetic oligonucleotide
ugauagguauuuucauaaa

SEQ ID NO: 158848 - RNA, 19 nt, Artificial Sequence
  Description of Artificial Sequence: Synthetic oligonucleotide
ucuacccuacugcuucuca

SEQ ID NO: 158849 - RNA, 19 nt, Artificial Sequence
  Description of Artificial Sequence: Synthetic oligonucleotide
uaauaucgugcaacacucu

SEQ ID NO: 158850 - RNA, 19 nt, Artificial Sequence
  Description of Artificial Sequence: Synthetic oligonucleotide
aacagacggaggaggacuc

SEQ ID NO: 158851 - RNA, 19 nt, Artificial Sequence
  Description of Artificial Sequence: Synthetic oligonucleotide
uggauaacgccaguauuac

SEQ ID NO: 158852 - RNA, 19 nt, Artificial Sequence
  Description of Artificial Sequence: Synthetic oligonucleotide
ggcgguauucacucuaucc

SEQ ID NO: 158853 - RNA, 19 nt, Artificial Sequence
  Description of Artificial Sequence: Synthetic oligonucleotide
uagaagcuagucugaagaa

SEQ ID NO: 158854 - RNA, 19 nt, Artificial Sequence
  Description of Artificial Sequence: Synthetic oligonucleotide
aggcacauagcuauaauaa

SEQ ID NO: 158855 - RNA, 19 nt, Artificial Sequence
  Description of Artificial Sequence: Synthetic oligonucleotide
guagugaguuucuaauauc

SEQ ID NO: 158856 - RNA, 19 nt, Artificial Sequence
  Description of Artificial Sequence: Synthetic oligonucleotide
cacguuccgaugcauuucc

SEQ ID NO: 158857 - RNA, 19 nt, Artificial Sequence
  Description of Artificial Sequence: Synthetic oligonucleotide
uguugagcacucaggguuc

SEQ ID NO: 158858 - RNA, 19 nt, Artificial Sequence
  Description of Artificial Sequence: Synthetic oligonucleotide
aaucauggauaacgccagu

SEQ ID NO: 158859 - RNA, 19 nt, Artificial Sequence
  Description of Artificial Sequence: Synthetic oligonucleotide
uucuuaggggauagccagc

SEQ ID NO: 158860 - RNA, 19 nt, Artificial Sequence
  Description of Artificial Sequence: Synthetic oligonucleotide
gaacagacgauuucugagu

SEQ ID NO: 158861 - RNA, 19 nt, Artificial Sequence
  Description of Artificial Sequence: Synthetic oligonucleotide
uuauuaagcuacgcccuac

SEQ ID NO: 158862 - RNA, 19 nt, Artificial Sequence
  Description of Artificial Sequence: Synthetic oligonucleotide
ggaauuucgaaccccaucu

SEQ ID NO: 158863 - RNA, 19 nt, Artificial Sequence
  Description of Artificial Sequence: Synthetic oligonucleotide
cuacccuacugcuucucag

SEQ ID NO: 158864 - RNA, 19 nt, Artificial Sequence
  Description of Artificial Sequence: Synthetic oligonucleotide
uucgcaacugcaucucuau

SEQ ID NO: 158865 - RNA, 19 nt, Artificial Sequence
  Description of Artificial Sequence: Synthetic oligonucleotide
caugagauguaagucccac

SEQ ID NO: 158866 - RNA, 19 nt, Artificial Sequence
  Description of Artificial Sequence: Synthetic oligonucleotide
agcauaaaucauggauaac

SEQ ID NO: 158867 - RNA, 19 nt, Artificial Sequence
  Description of Artificial Sequence: Synthetic oligonucleotide
gucuccacuaccuucccuc

SEQ ID NO: 158868 - RNA, 19 nt, Artificial Sequence
  Description of Artificial Sequence: Synthetic oligonucleotide
uguuacuuauaaguugguu

SEQ ID NO: 158869 - RNA, 19 nt, Artificial Sequence
  Description of Artificial Sequence: Synthetic oligonucleotide
accucaugagaucuacccu

SEQ ID NO: 158870 - RNA, 19 nt, Artificial Sequence
  Description of Artificial Sequence: Synthetic oligonucleotide
gaauuucgaaccccaucuc

SEQ ID NO: 158871 - RNA, 19 nt, Artificial Sequence
  Description of Artificial Sequence: Synthetic oligonucleotide
auauuuguuuggggcaaag

SEQ ID NO: 158872 - RNA, 19 nt, Artificial Sequence
  Description of Artificial Sequence: Synthetic oligonucleotide
guggagacgggcaugauaa

SEQ ID NO: 158873 - RNA, 19 nt, Artificial Sequence
  Description of Artificial Sequence: Synthetic oligonucleotide
uucuaauaucgugcaacac

SEQ ID NO: 158874 - RNA, 19 nt, Artificial Sequence
  Description of Artificial Sequence: Synthetic oligonucleotide
caccugauauguuugggga

SEQ ID NO: 158875 - RNA, 19 nt, Artificial Sequence
  Description of Artificial Sequence: Synthetic oligonucleotide
agucgugucuccucacugu

SEQ ID NO: 158876 - RNA, 19 nt, Artificial Sequence
  Description of Artificial Sequence: Synthetic oligonucleotide
cuuugugugauauuucaau

SEQ ID NO: 158877 - RNA, 19 nt, Artificial Sequence
  Description of Artificial Sequence: Synthetic oligonucleotide
guagaacagacgauuucug

SEQ ID NO: 158878 - RNA, 19 nt, Artificial Sequence
  Description of Artificial Sequence: Synthetic oligonucleotide
  modified_base (5)..(5): a, c, u, g, unknown or other
guucncauguguucacaca

SEQ ID NO: 158879 - RNA, 19 nt, Artificial Sequence
  Description of Artificial Sequence: Synthetic oligonucleotide
acgauuucugaguacugua

SEQ ID NO: 158880 - RNA, 19 nt, Artificial Sequence
  Description of Artificial Sequence: Synthetic oligonucleotide
guguuuaccauaaggcaca

SEQ ID NO: 158881 - RNA, 19 nt, Artificial Sequence
  Description of Artificial Sequence: Synthetic oligonucleotide
guaaccucaugagaucuac

SEQ ID NO: 158882 - RNA, 19 nt, Artificial Sequence
  Description of Artificial Sequence: Synthetic oligonucleotide
auggauaacgccaguauua

SEQ ID NO: 158883 - RNA, 19 nt, Artificial Sequence
  Description of Artificial Sequence: Synthetic oligonucleotide
ggccccauuaucuugacaa

SEQ ID NO: 158884 - RNA, 19 nt, Artificial Sequence
  Description of Artificial Sequence: Synthetic oligonucleotide
auauguuuggggacgcugu

SEQ ID NO: 158885 - RNA, 19 nt, Artificial Sequence
  Description of Artificial Sequence: Synthetic oligonucleotide
aucgugcaacacucuucgc

SEQ ID NO: 158886 - RNA, 19 nt, Artificial Sequence
  Description of Artificial Sequence: Synthetic oligonucleotide
agcucaguagaaaguaucu

SEQ ID NO: 158887 - RNA, 19 nt, Artificial Sequence
  Description of Artificial Sequence: Synthetic oligonucleotide
agcuacgcccuacucguug

SEQ ID NO: 158888 - RNA, 19 nt, Artificial Sequence
  Description of Artificial Sequence: Synthetic oligonucleotide
acgccaguauuacaguuaa

SEQ ID NO: 158889 - RNA, 19 nt, Artificial Sequence
  Description of Artificial Sequence: Synthetic oligonucleotide
agguaaccucaugagaucu

SEQ ID NO: 158890 - RNA, 19 nt, Artificial Sequence
  Description of Artificial Sequence: Synthetic oligonucleotide
ucuucgcaacugcaucucu

SEQ ID NO: 158891 - RNA, 19 nt, Artificial Sequence
  Description of Artificial Sequence: Synthetic oligonucleotide
cagucugauaguuuagaaa

SEQ ID NO: 158892 - RNA, 19 nt, Artificial Sequence
  Description of Artificial Sequence: Synthetic oligonucleotide
agaagcuagucugaagaaa

SEQ ID NO: 158893 - RNA, 19 nt, Artificial Sequence
  Description of Artificial Sequence: Synthetic oligonucleotide
gauaugacugcucccguau

SEQ ID NO: 158894 - RNA, 19 nt, Artificial Sequence
  Description of Artificial Sequence: Synthetic oligonucleotide
uaacgccaguauuacaguu

SEQ ID NO: 158895 - RNA, 19 nt, Artificial Sequence
  Description of Artificial Sequence: Synthetic oligonucleotide
ugccguaacauggccaacu

SEQ ID NO: 158896 - RNA, 19 nt, Artificial Sequence
  Description of Artificial Sequence: Synthetic oligonucleotide
ccugauauguuuggggacg

SEQ ID NO: 158897 - RNA, 19 nt, Artificial Sequence
  Description of Artificial Sequence: Synthetic oligonucleotide
uuacugggcucaguaaggu

SEQ ID NO: 158898 - RNA, 19 nt, Artificial Sequence
  Description of Artificial Sequence: Synthetic oligonucleotide
ucgcaacugcaucucuaug

SEQ ID NO: 158899 - RNA, 19 nt, Artificial Sequence
  Description of Artificial Sequence: Synthetic oligonucleotide
ucaugagaucuacccuacu

SEQ ID NO: 158900 - RNA, 19 nt, Artificial Sequence
  Description of Artificial Sequence: Synthetic oligonucleotide
aguggagacgggcaugaua

SEQ ID NO: 158901 - RNA, 19 nt, Artificial Sequence
  Description of Artificial Sequence: Synthetic oligonucleotide
ugcaagcaaguaccuuugu

SEQ ID NO: 158902 - RNA, 19 nt, Artificial Sequence
  Description of Artificial Sequence: Synthetic oligonucleotide
cccaacccuaauaauuucc

SEQ ID NO: 158903 - RNA, 19 nt, Artificial Sequence
  Description of Artificial Sequence: Synthetic oligonucleotide
acgggcaugauaaguuauc

SEQ ID NO: 158904 - RNA, 19 nt, Artificial Sequence
  Description of Artificial Sequence: Synthetic oligonucleotide
gucgugucuccucacugug

SEQ ID NO: 158905 - RNA, 19 nt, Artificial Sequence
  Description of Artificial Sequence: Synthetic oligonucleotide
gcgguauucacucuaucca

SEQ ID NO: 158906 - RNA, 19 nt, Artificial Sequence
  Description of Artificial Sequence: Synthetic oligonucleotide
  modified_base (6)..(6): a, c, u, g, unknown or other
gguucncauguguucacac

SEQ ID NO: 158907 - RNA, 19 nt, Artificial Sequence
  Description of Artificial Sequence: Synthetic oligonucleotide
acacucauacagaaaugca

SEQ ID NO: 158908 - RNA, 19 nt, Artificial Sequence
  Description of Artificial Sequence: Synthetic oligonucleotide
cagcacuucuacuggaaca

SEQ ID NO: 158909 - RNA, 19 nt, Artificial Sequence
  Description of Artificial Sequence: Synthetic oligonucleotide
gauguaagucccacaaccu

SEQ ID NO: 158910 - RNA, 19 nt, Artificial Sequence
  Description of Artificial Sequence: Synthetic oligonucleotide
auaggccccauuaucuuga

SEQ ID NO: 158911 - RNA, 19 nt, Artificial Sequence
  Description of Artificial Sequence: Synthetic oligonucleotide
uaaugggauccaucccaac

SEQ ID NO: 158912 - RNA, 19 nt, Artificial Sequence
  Description of Artificial Sequence: Synthetic oligonucleotide
ucucgagaucuggaggugu

SEQ ID NO: 158913 - RNA, 19 nt, Artificial Sequence
  Description of Artificial Sequence: Synthetic oligonucleotide
agaggaucgaaaaggugaa

SEQ ID NO: 158914 - RNA, 19 nt, Artificial Sequence
  Description of Artificial Sequence: Synthetic oligonucleotide
cugauauguuuggggacgc

SEQ ID NO: 158915 - RNA, 19 nt, Artificial Sequence
  Description of Artificial Sequence: Synthetic oligonucleotide
ggcaucgguugcuucaagc

SEQ ID NO: 158916 - RNA, 19 nt, Artificial Sequence
  Description of Artificial Sequence: Synthetic oligonucleotide
gaggaucgaaaaggugaag

SEQ ID NO: 158917 - RNA, 19 nt, Artificial Sequence
  Description of Artificial Sequence: Synthetic oligonucleotide
ccacuuacaauuucucguc

SEQ ID NO: 158918 - RNA, 19 nt, Artificial Sequence
  Description of Artificial Sequence: Synthetic oligonucleotide
aggcgguauucacucuauc

SEQ ID NO: 158919 - RNA, 19 nt, Artificial Sequence
  Description of Artificial Sequence: Synthetic oligonucleotide
cucgagaucuggagguguc

SEQ ID NO: 158920 - RNA, 19 nt, Artificial Sequence
  Description of Artificial Sequence: Synthetic oligonucleotide
auaugaugugugguauacu

SEQ ID NO: 158921 - RNA, 19 nt, Artificial Sequence
  Description of Artificial Sequence: Synthetic oligonucleotide
uggagacgggcaugauaag

SEQ ID NO: 158922 - RNA, 19 nt, Artificial Sequence
  Description of Artificial Sequence: Synthetic oligonucleotide
ggauauugcagcaaacugu

SEQ ID NO: 158923 - RNA, 19 nt, Artificial Sequence
  Description of Artificial Sequence: Synthetic oligonucleotide
agacgggcaugauaaguua

SEQ ID NO: 158924 - RNA, 19 nt, Artificial Sequence
  Description of Artificial Sequence: Synthetic oligonucleotide
aucagccuuugugugauau

SEQ ID NO: 158925 - RNA, 19 nt, Artificial Sequence
  Description of Artificial Sequence: Synthetic oligonucleotide
ucgaaccccaucucuccaa

SEQ ID NO: 158926 - RNA, 19 nt, Artificial Sequence
  Description of Artificial Sequence: Synthetic oligonucleotide
gacugaccauccuguucag

SEQ ID NO: 158927 - RNA, 19 nt, Artificial Sequence
  Description of Artificial Sequence: Synthetic oligonucleotide
gguagaacagacgauuucu

SEQ ID NO: 158928 - RNA, 19 nt, Artificial Sequence
  Description of Artificial Sequence: Synthetic oligonucleotide
cuguagugaguuucuaaua

SEQ ID NO: 158929 - RNA, 19 nt, Artificial Sequence
  Description of Artificial Sequence: Synthetic oligonucleotide
aaggcaucgguugcuucaa

SEQ ID NO: 158930 - RNA, 19 nt, Artificial Sequence
  Description of Artificial Sequence: Synthetic oligonucleotide
ggaugaagaugguagauuu

SEQ ID NO: 158931 - RNA, 19 nt, Artificial Sequence
  Description of Artificial Sequence: Synthetic oligonucleotide
uacgcccuacucguugacc

SEQ ID NO: 158932 - RNA, 19 nt, Artificial Sequence
  Description of Artificial Sequence: Synthetic oligonucleotide
cgaugcuuuaguugaagac

SEQ ID NO: 158933 - RNA, 19 nt, Artificial Sequence
  Description of Artificial Sequence: Synthetic oligonucleotide
gaugaagaugguagauuua

SEQ ID NO: 158934 - RNA, 19 nt, Artificial Sequence
  Description of Artificial Sequence: Synthetic oligonucleotide
aguagccgccucaagaauu

SEQ ID NO: 158935 - RNA, 19 nt, Artificial Sequence
  Description of Artificial Sequence: Synthetic oligonucleotide
gacauucaguggagacggg

SEQ ID NO: 158936 - RNA, 19 nt, Artificial Sequence
  Description of Artificial Sequence: Synthetic oligonucleotide
gucuaauuuccccaacaau

SEQ ID NO: 158937 - RNA, 19 nt, Artificial Sequence
  Description of Artificial Sequence: Synthetic oligonucleotide
ggcuuacaguguaagaaca

SEQ ID NO: 158938 - RNA, 19 nt, Artificial Sequence
  Description of Artificial Sequence: Synthetic oligonucleotide
aucuacccuacugcuucuc

SEQ ID NO: 158939 - RNA, 19 nt, Artificial Sequence
  Description of Artificial Sequence: Synthetic oligonucleotide
uggcagucguccagucgug

SEQ ID NO: 158940 - RNA, 19 nt, Artificial Sequence
  Description of Artificial Sequence: Synthetic oligonucleotide
aaggcgguauucacucuau

SEQ ID NO: 158941 - RNA, 19 nt, Artificial Sequence
  Description of Artificial Sequence: Synthetic oligonucleotide
agacgauuucugaguacug

SEQ ID NO: 158942 - RNA, 19 nt, Artificial Sequence
  Description of Artificial Sequence: Synthetic oligonucleotide
ggaggaauuucgaacccca

SEQ ID NO: 158943 - RNA, 19 nt, Artificial Sequence
  Description of Artificial Sequence: Synthetic oligonucleotide
ccaacccuaauaauuucca

SEQ ID NO: 158944 - RNA, 19 nt, Artificial Sequence
  Description of Artificial Sequence: Synthetic oligonucleotide
ucgguugcuucaagcucuc

SEQ ID NO: 158945 - RNA, 19 nt, Artificial Sequence
  Description of Artificial Sequence: Synthetic oligonucleotide
auguuacuuauaaguuggu

SEQ ID NO: 158946 - RNA, 19 nt, Artificial Sequence
  Description of Artificial Sequence: Synthetic oligonucleotide
agccgccucaagaauuaag

SEQ ID NO: 158947 - RNA, 19 nt, Artificial Sequence
  Description of Artificial Sequence: Synthetic oligonucleotide
cuggaucuucuauuguugu

SEQ ID NO: 158948 - RNA, 19 nt, Artificial Sequence
  Description of Artificial Sequence: Synthetic oligonucleotide
gccgccucaagaauuaaga

SEQ ID NO: 158949 - RNA, 19 nt, Artificial Sequence
  Description of Artificial Sequence: Synthetic oligonucleotide
cucuucgcaacugcaucuc

SEQ ID NO: 158950 - RNA, 19 nt, Artificial Sequence
  Description of Artificial Sequence: Synthetic oligonucleotide
ggauagccagcuuuugcaa

SEQ ID NO: 158951 - RNA, 19 nt, Artificial Sequence
  Description of Artificial Sequence: Synthetic oligonucleotide
cuucgcaacugcaucucua

SEQ ID NO: 158952 - RNA, 19 nt, Artificial Sequence
  Description of Artificial Sequence: Synthetic oligonucleotide
caaggcgguauucacucua

SEQ ID NO: 158953 - RNA, 19 nt, Artificial Sequence
  Description of Artificial Sequence: Synthetic oligonucleotide
ccacuaagcgggcucuggg

SEQ ID NO: 158954 - RNA, 19 nt, Artificial Sequence
  Description of Artificial Sequence: Synthetic oligonucleotide
gagacgggcaugauaaguu

SEQ ID NO: 158955 - RNA, 19 nt, Artificial Sequence
  Description of Artificial Sequence: Synthetic oligonucleotide
ggauaacgccaguauuaca

SEQ ID NO: 158956 - RNA, 19 nt, Artificial Sequence
  Description of Artificial Sequence: Synthetic oligonucleotide
acaugagauguaaguccca

SEQ ID NO: 158957 - RNA, 19 nt, Artificial Sequence
  Description of Artificial Sequence: Synthetic oligonucleotide
cauggauaacgccaguauu

SEQ ID NO: 158958 - RNA, 19 nt, Artificial Sequence
  Description of Artificial Sequence: Synthetic oligonucleotide
guaagguggucggcaaaga

SEQ ID NO: 158959 - RNA, 19 nt, Artificial Sequence
  Description of Artificial Sequence: Synthetic oligonucleotide
gagaccuucuuaggggaua

SEQ ID NO: 158960 - RNA, 19 nt, Artificial Sequence
  Description of Artificial Sequence: Synthetic oligonucleotide
gaggacucugauguagccu

SEQ ID NO: 158961 - RNA, 19 nt, Artificial Sequence
  Description of Artificial Sequence: Synthetic oligonucleotide
cucucgagaucuggaggug

SEQ ID NO: 158962 - RNA, 19 nt, Artificial Sequence
  Description of Artificial Sequence: Synthetic oligonucleotide
ccguaacauggccaacucc

SEQ ID NO: 158963 - RNA, 19 nt, Artificial Sequence
  Description of Artificial Sequence: Synthetic oligonucleotide
cuacgcccuacucguugac

SEQ ID NO: 158964 - RNA, 19 nt, Artificial Sequence
  Description of Artificial Sequence: Synthetic oligonucleotide
gaucuacccuacugcuucu

SEQ ID NO: 158965 - RNA, 19 nt, Artificial Sequence
  Description of Artificial Sequence: Synthetic oligonucleotide
guagccgccucaagaauua

SEQ ID NO: 158966 - RNA, 19 nt, Artificial Sequence
  Description of Artificial Sequence: Synthetic oligonucleotide
acagacggaggaggacucu

SEQ ID NO: 158967 - RNA, 19 nt, Artificial Sequence
  Description of Artificial Sequence: Synthetic oligonucleotide
gccacuaagcgggcucugg

SEQ ID NO: 158968 - RNA, 19 nt, Artificial Sequence
  Description of Artificial Sequence: Synthetic oligonucleotide
gugacccaaugaagagcag

SEQ ID NO: 158969 - RNA, 19 nt, Artificial Sequence
  Description of Artificial Sequence: Synthetic oligonucleotide
gccguaacauggccaacuc

SEQ ID NO: 158970 - RNA, 19 nt, Artificial Sequence
  Description of Artificial Sequence: Synthetic oligonucleotide
caagaucagguccucucau

SEQ ID NO: 158971 - RNA, 19 nt, Artificial Sequence
  Description of Artificial Sequence: Synthetic oligonucleotide
gcuacgcccuacucguuga

SEQ ID NO: 158972 - RNA, 19 nt, Artificial Sequence
  Description of Artificial Sequence: Synthetic oligonucleotide
gacgggcaugauaaguuau

SEQ ID NO: 158973 - RNA, 19 nt, Artificial Sequence
  Description of Artificial Sequence: Synthetic oligonucleotide
cacuaagcgggcucugggu

SEQ ID NO: 158974 - RNA, 19 nt, Artificial Sequence
  Description of Artificial Sequence: Synthetic oligonucleotide
cagucguccagucgugucu

SEQ ID NO: 158975 - RNA, 19 nt, Artificial Sequence
  Description of Artificial Sequence: Synthetic oligonucleotide
  modified_base (7)..(7): a, c, u, g, unknown or other
ggguucncauguguucaca

SEQ ID NO: 158976 - RNA, 19 nt, Artificial Sequence
  Description of Artificial Sequence: Synthetic oligonucleotide
gcagucguccagucguguc

SEQ ID NO: 158977 - RNA, 19 nt, Artificial Sequence
  Description of Artificial Sequence: Synthetic oligonucleotide
ugguuaugucugggacucu

SEQ ID NO: 158978 - RNA, 19 nt, Artificial Sequence
  Description of Artificial Sequence: Synthetic oligonucleotide
cguuccgaugcauuuccuc

SEQ ID NO: 158979 - RNA, 19 nt, Artificial Sequence
  Description of Artificial Sequence: Synthetic oligonucleotide
ggagacgggcaugauaagu

SEQ ID NO: 158980 - RNA, 19 nt, Artificial Sequence
  Description of Artificial Sequence: Synthetic oligonucleotide
caguaagguggucggcaaa

SEQ ID NO: 158981 - RNA, 19 nt, Artificial Sequence
  Description of Artificial Sequence: Synthetic oligonucleotide
cuaggcccaacucggacuu

SEQ ID NO: 158982 - RNA, 19 nt, Artificial Sequence
  Description of Artificial Sequence: Synthetic oligonucleotide
caguguuguagaagcuagu

SEQ ID NO: 158983 - RNA, 19 nt, Artificial Sequence
  Description of Artificial Sequence: Synthetic oligonucleotide
ccucaagaauuaagaacaa

SEQ ID NO: 158984 - RNA, 19 nt, Artificial Sequence
  Description of Artificial Sequence: Synthetic oligonucleotide
gcaguuggugucagggcca

SEQ ID NO: 158985 - RNA, 19 nt, Artificial Sequence
  Description of Artificial Sequence: Synthetic oligonucleotide
cuaugugaauagggcaccu

SEQ ID NO: 158986 - RNA, 19 nt, Artificial Sequence
  Description of Artificial Sequence: Synthetic oligonucleotide
caccuggaccccucaugga

SEQ ID NO: 158987 - RNA, 19 nt, Artificial Sequence
  Description of Artificial Sequence: Synthetic oligonucleotide
gaagcuccugauagguauu

SEQ ID NO: 158988 - RNA, 19 nt, Artificial Sequence
  Description of Artificial Sequence: Synthetic oligonucleotide
cucguaugacuugcugcaa

SEQ ID NO: 158989 - RNA, 19 nt, Artificial Sequence
  Description of Artificial Sequence: Synthetic oligonucleotide
acguuccgaugcauuuccu

SEQ ID NO: 158990 - RNA, 19 nt, Artificial Sequence
  Description of Artificial Sequence: Synthetic oligonucleotide
ccgccucaagaauuaagaa

SEQ ID NO: 158991 - RNA, 19 nt, Artificial Sequence
  Description of Artificial Sequence: Synthetic oligonucleotide
cugccguaacauggccaac

SEQ ID NO: 158992 - RNA, 19 nt, Artificial Sequence
  Description of Artificial Sequence: Synthetic oligonucleotide
auagggcaccugauauguu

SEQ ID NO: 158993 - RNA, 19 nt, Artificial Sequence
  Description of Artificial Sequence: Synthetic oligonucleotide
caucugcguucugaacaga

SEQ ID NO: 158994 - RNA, 19 nt, Artificial Sequence
  Description of Artificial Sequence: Synthetic oligonucleotide
aagcuacgcccuacucguu

SEQ ID NO: 158995 - RNA, 19 nt, Artificial Sequence
  Description of Artificial Sequence: Synthetic oligonucleotide
ccuaggcccaacucggacu

SEQ ID NO: 158996 - RNA, 19 nt, Artificial Sequence
  Description of Artificial Sequence: Synthetic oligonucleotide
guccuaggcccaacucgga

SEQ ID NO: 158997 - RNA, 19 nt, Artificial Sequence
  Description of Artificial Sequence: Synthetic oligonucleotide
ggggaugaagaugguagau

SEQ ID NO: 158998 - RNA, 19 nt, Artificial Sequence
  Description of Artificial Sequence: Synthetic oligonucleotide
cuccacguuccgaugcauu

SEQ ID NO: 158999 - RNA, 19 nt, Artificial Sequence
  Description of Artificial Sequence: Synthetic oligonucleotide
gcccuacucguugaccaga

SEQ ID NO: 159000 - RNA, 19 nt, Artificial Sequence
  Description of Artificial Sequence: Synthetic oligonucleotide
ccguaucaguucugugaca

SEQ ID NO: 159001 - RNA, 19 nt, Artificial Sequence
  Description of Artificial Sequence: Synthetic oligonucleotide
cuuaggggauagccagcuu

SEQ ID NO: 159002 - RNA, 19 nt, Artificial Sequence
  Description of Artificial Sequence: Synthetic oligonucleotide
gcaaggcgguauucacucu

SEQ ID NO: 159003 - RNA, 19 nt, Artificial Sequence
  Description of Artificial Sequence: Synthetic oligonucleotide
aggcuccgccucacaacuu

SEQ ID NO: 159004 - RNA, 19 nt, Artificial Sequence
  Description of Artificial Sequence: Synthetic oligonucleotide
ggacgcuguugagcacuca

SEQ ID NO: 159005 - RNA, 19 nt, Artificial Sequence
  Description of Artificial Sequence: Synthetic oligonucleotide
ggcagucguccagucgugu

SEQ ID NO: 159006 - RNA, 19 nt, Artificial Sequence
  Description of Artificial Sequence: Synthetic oligonucleotide
ggaccccucauggacucuu

SEQ ID NO: 159007 - RNA, 19 nt, Artificial Sequence
  Description of Artificial Sequence: Synthetic oligonucleotide
uuuagaaauauauauauau

SEQ ID NO: 159008 - RNA, 19 nt, Artificial Sequence
  Description of Artificial Sequence: Synthetic oligonucleotide
aauauauauauauuucuga

SEQ ID NO: 159009 - RNA, 19 nt, Artificial Sequence
  Description of Artificial Sequence: Synthetic oligonucleotide
uauauauauguauauauga

SEQ ID NO: 159010 - RNA, 19 nt, Artificial Sequence
  Description of Artificial Sequence: Synthetic oligonucleotide
ugucugauggcucauagcg

SEQ ID NO: 159011 - RNA, 19 nt, Artificial Sequence
  Description of Artificial Sequence: Synthetic oligonucleotide
uaucauagucauaauaagg

SEQ ID NO: 159012 - RNA, 19 nt, Artificial Sequence
  Description of Artificial Sequence: Synthetic oligonucleotide
uauauauauauguauauau

SEQ ID NO: 159013 - RNA, 19 nt, Artificial Sequence
  Description of Artificial Sequence: Synthetic oligonucleotide
aacgcucuauaucauaguc

SEQ ID NO: 159014 - RNA, 19 nt, Artificial Sequence
  Description of Artificial Sequence: Synthetic oligonucleotide
ugacuuuagaaauauauau

SEQ ID NO: 159015 - RNA, 19 nt, Artificial Sequence
  Description of Artificial Sequence: Synthetic oligonucleotide
uagucauauauauauaugu

SEQ ID NO: 159016 - RNA, 19 nt, Artificial Sequence
  Description of Artificial Sequence: Synthetic oligonucleotide
aaauauauauauauuucug

SEQ ID NO: 159017 - RNA, 19 nt, Artificial Sequence
  Description of Artificial Sequence: Synthetic oligonucleotide
ugaagaaucggcagguggg

SEQ ID NO: 159018 - RNA, 19 nt, Artificial Sequence
  Description of Artificial Sequence: Synthetic oligonucleotide
uaugauacggcucugcuuc

SEQ ID NO: 159019 - RNA, 19 nt, Artificial Sequence
  Description of Artificial Sequence: Synthetic oligonucleotide
uagaaauauauauauauuu

SEQ ID NO: 159020 - RNA, 19 nt, Artificial Sequence
  Description of Artificial Sequence: Synthetic oligonucleotide
agaaauauauauauauuuc

SEQ ID NO: 159021 - RNA, 19 nt, Artificial Sequence
  Description of Artificial Sequence: Synthetic oligonucleotide
uuuagucauauauauauau

SEQ ID NO: 159022 - RNA, 19 nt, Artificial Sequence
  Description of Artificial Sequence: Synthetic oligonucleotide
uuugucaaacucccggucg

SEQ ID NO: 159023 - RNA, 19 nt, Artificial Sequence
  Description of Artificial Sequence: Synthetic oligonucleotide
aguauagugucucugacgu

SEQ ID NO: 159024 - RNA, 19 nt, Artificial Sequence
  Description of Artificial Sequence: Synthetic oligonucleotide
accgagaugagccggagcc

SEQ ID NO: 159025 - RNA, 19 nt, Artificial Sequence
  Description of Artificial Sequence: Synthetic oligonucleotide
uauuuuaggagaucgcuca

SEQ ID NO: 159026 - RNA, 19 nt, Artificial Sequence
  Description of Artificial Sequence: Synthetic oligonucleotide
uuagucauauauauauaug

SEQ ID NO: 159027 - RNA, 19 nt, Artificial Sequence
  Description of Artificial Sequence: Synthetic oligonucleotide
ucauauauauauauguaua

SEQ ID NO: 159028 - RNA, 19 nt, Artificial Sequence
  Description of Artificial Sequence: Synthetic oligonucleotide
auaguuaugauacggcucu

SEQ ID NO: 159029 - RNA, 19 nt, Artificial Sequence
  Description of Artificial Sequence: Synthetic oligonucleotide
auaauaaggaucugcauaa

SEQ ID NO: 159030 - RNA, 19 nt, Artificial Sequence
  Description of Artificial Sequence: Synthetic oligonucleotide
auaaggcucaaguauagug

SEQ ID NO: 159031 - RNA, 19 nt, Artificial Sequence
  Description of Artificial Sequence: Synthetic oligonucleotide
auauauauauauuucugau

SEQ ID NO: 159032 - RNA, 19 nt, Artificial Sequence
  Description of Artificial Sequence: Synthetic oligonucleotide
uguaggaugaggaucggga

SEQ ID NO: 159033 - RNA, 19 nt, Artificial Sequence
  Description of Artificial Sequence: Synthetic oligonucleotide
auuuugaccucucugccuc

SEQ ID NO: 159034 - RNA, 19 nt, Artificial Sequence
  Description of Artificial Sequence: Synthetic oligonucleotide
gaaauauauauauauuucu

SEQ ID NO: 159035 - RNA, 19 nt, Artificial Sequence
  Description of Artificial Sequence: Synthetic oligonucleotide
ucucguacuguccaccacg

SEQ ID NO: 159036 - RNA, 19 nt, Artificial Sequence
  Description of Artificial Sequence: Synthetic oligonucleotide
uuagaaauauauauauauu

SEQ ID NO: 159037 - RNA, 19 nt, Artificial Sequence
  Description of Artificial Sequence: Synthetic oligonucleotide
uaaggcucaaguauagugu

SEQ ID NO: 159038 - RNA, 19 nt, Artificial Sequence
  Description of Artificial Sequence: Synthetic oligonucleotide
uuaucagccgccuuauuca

SEQ ID NO: 159039 - RNA, 19 nt, Artificial Sequence
  Description of Artificial Sequence: Synthetic oligonucleotide
uuugucugauggcucauag

SEQ ID NO: 159040 - RNA, 19 nt, Artificial Sequence
  Description of Artificial Sequence: Synthetic oligonucleotide
auuggaggggaguaguuuc

SEQ ID NO: 159041 - RNA, 19 nt, Artificial Sequence
  Description of Artificial Sequence: Synthetic oligonucleotide
aaauucucguacuguccac

SEQ ID NO: 159042 - RNA, 19 nt, Artificial Sequence
  Description of Artificial Sequence: Synthetic oligonucleotide
aagaccgugaagaugaccu

SEQ ID NO: 159043 - RNA, 19 nt, Artificial Sequence
  Description of Artificial Sequence: Synthetic oligonucleotide
uauagugucucugacgucu

SEQ ID NO: 159044 - RNA, 19 nt, Artificial Sequence
  Description of Artificial Sequence: Synthetic oligonucleotide
uuuugcgacgccuucgugc

SEQ ID NO: 159045 - RNA, 19 nt, Artificial Sequence
  Description of Artificial Sequence: Synthetic oligonucleotide
agacuuuagucauauauau

SEQ ID NO: 159046 - RNA, 19 nt, Artificial Sequence
  Description of Artificial Sequence: Synthetic oligonucleotide
ucaaguauagugucucuga

SEQ ID NO: 159047 - RNA, 19 nt, Artificial Sequence
  Description of Artificial Sequence: Synthetic oligonucleotide
uguuuaaggagcuccuccc

SEQ ID NO: 159048 - RNA, 19 nt, Artificial Sequence
  Description of Artificial Sequence: Synthetic oligonucleotide
aauucaacuaaaacaauuu

SEQ ID NO: 159049 - RNA, 19 nt, Artificial Sequence
  Description of Artificial Sequence: Synthetic oligonucleotide
ucgauaguuaugauacggc

SEQ ID NO: 159050 - RNA, 19 nt, Artificial Sequence
  Description of Artificial Sequence: Synthetic oligonucleotide
auauauauauguauauaug

SEQ ID NO: 159051 - RNA, 19 nt, Artificial Sequence
  Description of Artificial Sequence: Synthetic oligonucleotide
auuuccggucccgagaacc

SEQ ID NO: 159052 - RNA, 19 nt, Artificial Sequence
  Description of Artificial Sequence: Synthetic oligonucleotide
uuauuuuaggagaucgcuc

SEQ ID NO: 159053 - RNA, 19 nt, Artificial Sequence
  Description of Artificial Sequence: Synthetic oligonucleotide
aauacccuuggccuuauuu

SEQ ID NO: 159054 - RNA, 19 nt, Artificial Sequence
  Description of Artificial Sequence: Synthetic oligonucleotide
cuuagauuucccucucucc

SEQ ID NO: 159055 - RNA, 19 nt, Artificial Sequence
  Description of Artificial Sequence: Synthetic oligonucleotide
ucuuagacuggggugacag

SEQ ID NO: 159056 - RNA, 19 nt, Artificial Sequence
  Description of Artificial Sequence: Synthetic oligonucleotide
cucgauaguuaugauacgg

SEQ ID NO: 159057 - RNA, 19 nt, Artificial Sequence
  Description of Artificial Sequence: Synthetic oligonucleotide
aauaggagcuguaggauga

SEQ ID NO: 159058 - RNA, 19 nt, Artificial Sequence
  Description of Artificial Sequence: Synthetic oligonucleotide
uuugcgacgccuucgugcc

SEQ ID NO: 159059 - RNA, 19 nt, Artificial Sequence
  Description of Artificial Sequence: Synthetic oligonucleotide
aaaaccuccuuugcguguc

SEQ ID NO: 159060 - RNA, 19 nt, Artificial Sequence
  Description of Artificial Sequence: Synthetic oligonucleotide
agaucucccgguuuggcag

SEQ ID NO: 159061 - RNA, 19 nt, Artificial Sequence
  Description of Artificial Sequence: Synthetic oligonucleotide
uuuacugacuucuccccug

SEQ ID NO: 159062 - RNA, 19 nt, Artificial Sequence
  Description of Artificial Sequence: Synthetic oligonucleotide
ucugggguuaaguuggccu

SEQ ID NO: 159063 - RNA, 19 nt, Artificial Sequence
  Description of Artificial Sequence: Synthetic oligonucleotide
aguuaugauacggcucugc

SEQ ID NO: 159064 - RNA, 19 nt, Artificial Sequence
  Description of Artificial Sequence: Synthetic oligonucleotide
ucuuagauuucccucucuc

SEQ ID NO: 159065 - RNA, 19 nt, Artificial Sequence
  Description of Artificial Sequence: Synthetic oligonucleotide
agaaucggcagguggggcg

SEQ ID NO: 159066 - RNA, 19 nt, Artificial Sequence
  Description of Artificial Sequence: Synthetic oligonucleotide
uuuugggugauuggagggg

SEQ ID NO: 159067 - RNA, 19 nt, Artificial Sequence
  Description of Artificial Sequence: Synthetic oligonucleotide
cauaauaaggaucugcaua

SEQ ID NO: 159068 - RNA, 19 nt, Artificial Sequence
  Description of Artificial Sequence: Synthetic oligonucleotide
ucauagucauaauaaggau

SEQ ID NO: 159069 - RNA, 19 nt, Artificial Sequence
  Description of Artificial Sequence: Synthetic oligonucleotide
uaaggagcuccucccgucg

SEQ ID NO: 159070 - RNA, 19 nt, Artificial Sequence
  Description of Artificial Sequence: Synthetic oligonucleotide
agcugugucuggaagagcg

SEQ ID NO: 159071 - RNA, 19 nt, Artificial Sequence
  Description of Artificial Sequence: Synthetic oligonucleotide
augaagcagagguuuugcg

SEQ ID NO: 159072 - RNA, 19 nt, Artificial Sequence
  Description of Artificial Sequence: Synthetic oligonucleotide
cuuucaugaagaaucggca

SEQ ID NO: 159073 - RNA, 19 nt, Artificial Sequence
  Description of Artificial Sequence: Synthetic oligonucleotide
uguggcccuacagaggugg

SEQ ID NO: 159074 - RNA, 19 nt, Artificial Sequence
  Description of Artificial Sequence: Synthetic oligonucleotide
uggggagacggacacacca

SEQ ID NO: 159075 - RNA, 19 nt, Artificial Sequence
  Description of Artificial Sequence: Synthetic oligonucleotide
acuuggaucgccgccaagg

SEQ ID NO: 159076 - RNA, 19 nt, Artificial Sequence
  Description of Artificial Sequence: Synthetic oligonucleotide
guuuaaggagcuccucccg

SEQ ID NO: 159077 - RNA, 19 nt, Artificial Sequence
  Description of Artificial Sequence: Synthetic oligonucleotide
aagaaucggcagguggggc

SEQ ID NO: 159078 - RNA, 19 nt, Artificial Sequence
  Description of Artificial Sequence: Synthetic oligonucleotide
ucucugacgucucuuggga

SEQ ID NO: 159079 - RNA, 19 nt, Artificial Sequence
  Description of Artificial Sequence: Synthetic oligonucleotide
uggaucgccgccaaggauc

SEQ ID NO: 159080 - RNA, 19 nt, Artificial Sequence
  Description of Artificial Sequence: Synthetic oligonucleotide
acaacgugcuggcuuuccc

SEQ ID NO: 159081 - RNA, 19 nt, Artificial Sequence
  Description of Artificial Sequence: Synthetic oligonucleotide
ucugcauaaggcucaagua

SEQ ID NO: 159082 - RNA, 19 nt, Artificial Sequence
  Description of Artificial Sequence: Synthetic oligonucleotide
aaucagacuuuagucauau

SEQ ID NO: 159083 - RNA, 19 nt, Artificial Sequence
  Description of Artificial Sequence: Synthetic oligonucleotide
uggcucauagcgcuuccgg

SEQ ID NO: 159084 - RNA, 19 nt, Artificial Sequence
  Description of Artificial Sequence: Synthetic oligonucleotide
auuggacagacaccccaac

SEQ ID NO: 159085 - RNA, 19 nt, Artificial Sequence
  Description of Artificial Sequence: Synthetic oligonucleotide
aaacgcucuauaucauagu

SEQ ID NO: 159086 - RNA, 19 nt, Artificial Sequence
  Description of Artificial Sequence: Synthetic oligonucleotide
ccuuucaugaagaaucggc

SEQ ID NO: 159087 - RNA, 19 nt, Artificial Sequence
  Description of Artificial Sequence: Synthetic oligonucleotide
uauacugcacccugaaauu

SEQ ID NO: 159088 - RNA, 19 nt, Artificial Sequence
  Description of Artificial Sequence: Synthetic oligonucleotide
gaauuggaagcagaagcug

SEQ ID NO: 159089 - RNA, 19 nt, Artificial Sequence
  Description of Artificial Sequence: Synthetic oligonucleotide
ucgucuucaccaaugguua

SEQ ID NO: 159090 - RNA, 19 nt, Artificial Sequence
  Description of Artificial Sequence: Synthetic oligonucleotide
ucauaauaaggaucugcau

SEQ ID NO: 159091 - RNA, 19 nt, Artificial Sequence
  Description of Artificial Sequence: Synthetic oligonucleotide
gaagaaucggcaggugggg

SEQ ID NO: 159092 - RNA, 19 nt, Artificial Sequence
  Description of Artificial Sequence: Synthetic oligonucleotide
auauauauauauguauaua

SEQ ID NO: 159093 - RNA, 19 nt, Artificial Sequence
  Description of Artificial Sequence: Synthetic oligonucleotide
uaguuuugguggucugugg

SEQ ID NO: 159094 - RNA, 19 nt, Artificial Sequence
  Description of Artificial Sequence: Synthetic oligonucleotide
ucggagaucucccgguuug

SEQ ID NO: 159095 - RNA, 19 nt, Artificial Sequence
  Description of Artificial Sequence: Synthetic oligonucleotide
cuccaggguguauaaaccc

SEQ ID NO: 159096 - RNA, 19 nt, Artificial Sequence
  Description of Artificial Sequence: Synthetic oligonucleotide
uugcccggcacacugguga

SEQ ID NO: 159097 - RNA, 19 nt, Artificial Sequence
  Description of Artificial Sequence: Synthetic oligonucleotide
gucauauauauauauguau

SEQ ID NO: 159098 - RNA, 19 nt, Artificial Sequence
  Description of Artificial Sequence: Synthetic oligonucleotide
uuggcucucucucucuccc

SEQ ID NO: 159099 - RNA, 19 nt, Artificial Sequence
  Description of Artificial Sequence: Synthetic oligonucleotide
ugggagacggggaugggga

SEQ ID NO: 159100 - RNA, 19 nt, Artificial Sequence
  Description of Artificial Sequence: Synthetic oligonucleotide
caaguauagugucucugac

SEQ ID NO: 159101 - RNA, 19 nt, Artificial Sequence
  Description of Artificial Sequence: Synthetic oligonucleotide
ucucguucucgauaguuau

SEQ ID NO: 159102 - RNA, 19 nt, Artificial Sequence
  Description of Artificial Sequence: Synthetic oligonucleotide
ugggcaacaaaggagcccu

SEQ ID NO: 159103 - RNA, 19 nt, Artificial Sequence
  Description of Artificial Sequence: Synthetic oligonucleotide
aggguguauaaacccuuuc

SEQ ID NO: 159104 - RNA, 19 nt, Artificial Sequence
  Description of Artificial Sequence: Synthetic oligonucleotide
acuacuggcgcaccccaag

SEQ ID NO: 159105 - RNA, 19 nt, Artificial Sequence
  Description of Artificial Sequence: Synthetic oligonucleotide
uggccuuauuuuauuauuu

SEQ ID NO: 159106 - RNA, 19 nt, Artificial Sequence
  Description of Artificial Sequence: Synthetic oligonucleotide
auaaaagacaggaaauguu

SEQ ID NO: 159107 - RNA, 19 nt, Artificial Sequence
  Description of Artificial Sequence: Synthetic oligonucleotide
ucugauccgagggagggga

SEQ ID NO: 159108 - RNA, 19 nt, Artificial Sequence
  Description of Artificial Sequence: Synthetic oligonucleotide
uaaaaccuccuuugcgugu

SEQ ID NO: 159109 - RNA, 19 nt, Artificial Sequence
  Description of Artificial Sequence: Synthetic oligonucleotide
cuugggacccuagaauucc

SEQ ID NO: 159110 - RNA, 19 nt, Artificial Sequence
  Description of Artificial Sequence: Synthetic oligonucleotide
ugugggcaacaaaggagcc

SEQ ID NO: 159111 - RNA, 19 nt, Artificial Sequence
  Description of Artificial Sequence: Synthetic oligonucleotide
cauauauauauauguauau

SEQ ID NO: 159112 - RNA, 19 nt, Artificial Sequence
  Description of Artificial Sequence: Synthetic oligonucleotide
ucuugggacccuagaauuc

SEQ ID NO: 159113 - RNA, 19 nt, Artificial Sequence
  Description of Artificial Sequence: Synthetic oligonucleotide
aguaggaugaagaccguga

SEQ ID NO: 159114 - RNA, 19 nt, Artificial Sequence
  Description of Artificial Sequence: Synthetic oligonucleotide
uuuggcucucucucucucc

SEQ ID NO: 159115 - RNA, 19 nt, Artificial Sequence
  Description of Artificial Sequence: Synthetic oligonucleotide
auacccuuggccuuauuuu

SEQ ID NO: 159116 - RNA, 19 nt, Artificial Sequence
  Description of Artificial Sequence: Synthetic oligonucleotide
gagcucuuagacuggggug

SEQ ID NO: 159117 - RNA, 19 nt, Artificial Sequence
  Description of Artificial Sequence: Synthetic oligonucleotide
uuggccuuauuuuauuauu

SEQ ID NO: 159118 - RNA, 19 nt, Artificial Sequence
  Description of Artificial Sequence: Synthetic oligonucleotide
ugcuacuugagguggcgcu

SEQ ID NO: 159119 - RNA, 19 nt, Artificial Sequence
  Description of Artificial Sequence: Synthetic oligonucleotide
uugucugauggcucauagc

SEQ ID NO: 159120 - RNA, 19 nt, Artificial Sequence
  Description of Artificial Sequence: Synthetic oligonucleotide
accgguuggguggaaaagg

SEQ ID NO: 159121 - RNA, 19 nt, Artificial Sequence
  Description of Artificial Sequence: Synthetic oligonucleotide
gacggacacaccaaguuuc

SEQ ID NO: 159122 - RNA, 19 nt, Artificial Sequence
  Description of Artificial Sequence: Synthetic oligonucleotide
uccggcucccuuuaucagc

SEQ ID NO: 159123 - RNA, 19 nt, Artificial Sequence
  Description of Artificial Sequence: Synthetic oligonucleotide
guaggaugaggaucgggac

SEQ ID NO: 159124 - RNA, 19 nt, Artificial Sequence
  Description of Artificial Sequence: Synthetic oligonucleotide
gucuacuccagggagugag

SEQ ID NO: 159125 - RNA, 19 nt, Artificial Sequence
  Description of Artificial Sequence: Synthetic oligonucleotide
cuucucggagaucucccgg

SEQ ID NO: 159126 - RNA, 19 nt, Artificial Sequence
  Description of Artificial Sequence: Synthetic oligonucleotide
cucgcuucaccuguggccc

SEQ ID NO: 159127 - RNA, 19 nt, Artificial Sequence
  Description of Artificial Sequence: Synthetic oligonucleotide
ucuacuccagggagugagc

SEQ ID NO: 159128 - RNA, 19 nt, Artificial Sequence
  Description of Artificial Sequence: Synthetic oligonucleotide
agucauauauauauaugua

SEQ ID NO: 159129 - RNA, 19 nt, Artificial Sequence
  Description of Artificial Sequence: Synthetic oligonucleotide
gauccgagggaggggaggg

SEQ ID NO: 159130 - RNA, 19 nt, Artificial Sequence
  Description of Artificial Sequence: Synthetic oligonucleotide
cucaaguauagugucucug

SEQ ID NO: 159131 - RNA, 19 nt, Artificial Sequence
  Description of Artificial Sequence: Synthetic oligonucleotide
ugaguccgcguucccaggc

SEQ ID NO: 159132 - RNA, 19 nt, Artificial Sequence
  Description of Artificial Sequence: Synthetic oligonucleotide
gagucuacuccagggagug

SEQ ID NO: 159133 - RNA, 19 nt, Artificial Sequence
  Description of Artificial Sequence: Synthetic oligonucleotide
uuugggugauuggagggga

SEQ ID NO: 159134 - RNA, 19 nt, Artificial Sequence
  Description of Artificial Sequence: Synthetic oligonucleotide
agcucuuagacugggguga

SEQ ID NO: 159135 - RNA, 19 nt, Artificial Sequence
  Description of Artificial Sequence: Synthetic oligonucleotide
auucucguacuguccacca

SEQ ID NO: 159136 - RNA, 19 nt, Artificial Sequence
  Description of Artificial Sequence: Synthetic oligonucleotide
cucguacuguccaccacgc

SEQ ID NO: 159137 - RNA, 19 nt, Artificial Sequence
  Description of Artificial Sequence: Synthetic oligonucleotide
ugccccgacuuucucagcu

SEQ ID NO: 159138 - RNA, 19 nt, Artificial Sequence
  Description of Artificial Sequence: Synthetic oligonucleotide
uggagcucuuagacugggg

SEQ ID NO: 159139 - RNA, 19 nt, Artificial Sequence
  Description of Artificial Sequence: Synthetic oligonucleotide
cagacuuuagucauauaua

SEQ ID NO: 159140 - RNA, 19 nt, Artificial Sequence
  Description of Artificial Sequence: Synthetic oligonucleotide
ccuuucucguucucgauag

SEQ ID NO: 159141 - RNA, 19 nt, Artificial Sequence
  Description of Artificial Sequence: Synthetic oligonucleotide
uucucggagaucucccggu

SEQ ID NO: 159142 - RNA, 19 nt, Artificial Sequence
  Description of Artificial Sequence: Synthetic oligonucleotide
ccacauuggacagacaccc

SEQ ID NO: 159143 - RNA, 19 nt, Artificial Sequence
  Description of Artificial Sequence: Synthetic oligonucleotide
uucgugcccggcuugggga

SEQ ID NO: 159144 - RNA, 19 nt, Artificial Sequence
  Description of Artificial Sequence: Synthetic oligonucleotide
uuugccgcuccuuccuucu

SEQ ID NO: 159145 - RNA, 19 nt, Artificial Sequence
  Description of Artificial Sequence: Synthetic oligonucleotide
aguccgcguucccaggcac

SEQ ID NO: 159146 - RNA, 19 nt, Artificial Sequence
  Description of Artificial Sequence: Synthetic oligonucleotide
agaaccucggucugggguu

SEQ ID NO: 159147 - RNA, 19 nt, Artificial Sequence
  Description of Artificial Sequence: Synthetic oligonucleotide
gucgugacaacgugcuggc

SEQ ID NO: 159148 - RNA, 19 nt, Artificial Sequence
  Description of Artificial Sequence: Synthetic oligonucleotide
aacaauacccuuggccuua

SEQ ID NO: 159149 - RNA, 19 nt, Artificial Sequence
  Description of Artificial Sequence: Synthetic oligonucleotide
uccgcugucgcuccuuguc

SEQ ID NO: 159150 - RNA, 19 nt, Artificial Sequence
  Description of Artificial Sequence: Synthetic oligonucleotide
uugcgugucugaguccgcg

SEQ ID NO: 159151 - RNA, 19 nt, Artificial Sequence
  Description of Artificial Sequence: Synthetic oligonucleotide
gaugaggaucgggaccggg

SEQ ID NO: 159152 - RNA, 19 nt, Artificial Sequence
  Description of Artificial Sequence: Synthetic oligonucleotide
gagaucucccgguuuggca

SEQ ID NO: 159153 - RNA, 19 nt, Artificial Sequence
  Description of Artificial Sequence: Synthetic oligonucleotide
cuuccggcucccuuuauca

SEQ ID NO: 159154 - RNA, 19 nt, Artificial Sequence
  Description of Artificial Sequence: Synthetic oligonucleotide
uccaggaaauacucggcuu

SEQ ID NO: 159155 - RNA, 19 nt, Artificial Sequence
  Description of Artificial Sequence: Synthetic oligonucleotide
caucuaucuccccaucauc

SEQ ID NO: 159156 - RNA, 19 nt, Artificial Sequence
  Description of Artificial Sequence: Synthetic oligonucleotide
gccggucuuugucugaugg

SEQ ID NO: 159157 - RNA, 19 nt, Artificial Sequence
  Description of Artificial Sequence: Synthetic oligonucleotide
gaagaccgugaagaugacc

SEQ ID NO: 159158 - RNA, 19 nt, Artificial Sequence
  Description of Artificial Sequence: Synthetic oligonucleotide
cuacuggcgcaccccaagg

SEQ ID NO: 159159 - RNA, 19 nt, Artificial Sequence
  Description of Artificial Sequence: Synthetic oligonucleotide
ucccgucgugacaacgugc

SEQ ID NO: 159160 - RNA, 19 nt, Artificial Sequence
  Description of Artificial Sequence: Synthetic oligonucleotide
agacggacacaccaaguuu

SEQ ID NO: 159161 - RNA, 19 nt, Artificial Sequence
  Description of Artificial Sequence: Synthetic oligonucleotide
gggcuuuagcauuuugacc

SEQ ID NO: 159162 - RNA, 19 nt, Artificial Sequence
  Description of Artificial Sequence: Synthetic oligonucleotide
gaguaggaugaagaccgug

SEQ ID NO: 159163 - RNA, 19 nt, Artificial Sequence
  Description of Artificial Sequence: Synthetic oligonucleotide
gcucuuuccgaaugguugc

SEQ ID NO: 159164 - RNA, 19 nt, Artificial Sequence
  Description of Artificial Sequence: Synthetic oligonucleotide
guaggaugaagaccgugaa

SEQ ID NO: 159165 - RNA, 19 nt, Artificial Sequence
  Description of Artificial Sequence: Synthetic oligonucleotide
aagaugaccuggaggaauu

SEQ ID NO: 159166 - RNA, 19 nt, Artificial Sequence
  Description of Artificial Sequence: Synthetic oligonucleotide
acccugaaauucucguacu

SEQ ID NO: 159167 - RNA, 19 nt, Artificial Sequence
  Description of Artificial Sequence: Synthetic oligonucleotide
uuccggcucccuuuaucag

SEQ ID NO: 159168 - RNA, 19 nt, Artificial Sequence
  Description of Artificial Sequence: Synthetic oligonucleotide
guuaugauacggcucugcu

SEQ ID NO: 159169 - RNA, 19 nt, Artificial Sequence
  Description of Artificial Sequence: Synthetic oligonucleotide
acucaaagaccuggaucgg

SEQ ID NO: 159170 - RNA, 19 nt, Artificial Sequence
  Description of Artificial Sequence: Synthetic oligonucleotide
agaccgugaagaugaccug

SEQ ID NO: 159171 - RNA, 19 nt, Artificial Sequence
  Description of Artificial Sequence: Synthetic oligonucleotide
uugggacccuagaauucca

SEQ ID NO: 159172 - RNA, 19 nt, Artificial Sequence
  Description of Artificial Sequence: Synthetic oligonucleotide
uucucguacuguccaccac

SEQ ID NO: 159173 - RNA, 19 nt, Artificial Sequence
  Description of Artificial Sequence: Synthetic oligonucleotide
gacggcuugguggcugugg

SEQ ID NO: 159174 - RNA, 19 nt, Artificial Sequence
  Description of Artificial Sequence: Synthetic oligonucleotide
uggcgcaccccaaggguug

SEQ ID NO: 159175 - RNA, 19 nt, Artificial Sequence
  Description of Artificial Sequence: Synthetic oligonucleotide
cugacgucucuugggaccc

SEQ ID NO: 159176 - RNA, 19 nt, Artificial Sequence
  Description of Artificial Sequence: Synthetic oligonucleotide
uuggaucgccgccaaggau

SEQ ID NO: 159177 - RNA, 19 nt, Artificial Sequence
  Description of Artificial Sequence: Synthetic oligonucleotide
cucaucggcucgcuucacc

SEQ ID NO: 159178 - RNA, 19 nt, Artificial Sequence
  Description of Artificial Sequence: Synthetic oligonucleotide
cuguaggaugaggaucggg

SEQ ID NO: 159179 - RNA, 19 nt, Artificial Sequence
  Description of Artificial Sequence: Synthetic oligonucleotide
ucucucucucucccacucu

SEQ ID NO: 159180 - RNA, 19 nt, Artificial Sequence
  Description of Artificial Sequence: Synthetic oligonucleotide
gagguuuugcgacgccuuc

SEQ ID NO: 159181 - RNA, 19 nt, Artificial Sequence
  Description of Artificial Sequence: Synthetic oligonucleotide
ucccgguuuggcaggcuca

SEQ ID NO: 159182 - RNA, 19 nt, Artificial Sequence
  Description of Artificial Sequence: Synthetic oligonucleotide
cugagaacgagcugugucu

SEQ ID NO: 159183 - RNA, 19 nt, Artificial Sequence
  Description of Artificial Sequence: Synthetic oligonucleotide
uuugcgugucugaguccgc

SEQ ID NO: 159184 - RNA, 19 nt, Artificial Sequence
  Description of Artificial Sequence: Synthetic oligonucleotide
cucucucucucucccacuc

SEQ ID NO: 159185 - RNA, 19 nt, Artificial Sequence
  Description of Artificial Sequence: Synthetic oligonucleotide
uguggacgggucccguuuc

SEQ ID NO: 159186 - RNA, 19 nt, Artificial Sequence
  Description of Artificial Sequence: Synthetic oligonucleotide
uccucccgucgugacaacg

SEQ ID NO: 159187 - RNA, 19 nt, Artificial Sequence
  Description of Artificial Sequence: Synthetic oligonucleotide
uuugcccggcacacuggug

SEQ ID NO: 159188 - RNA, 19 nt, Artificial Sequence
  Description of Artificial Sequence: Synthetic oligonucleotide
aucagccgccuuauucagc

SEQ ID NO: 159189 - RNA, 19 nt, Artificial Sequence
  Description of Artificial Sequence: Synthetic oligonucleotide
cccacuacacuuucccagg

SEQ ID NO: 159190 - RNA, 19 nt, Artificial Sequence
  Description of Artificial Sequence: Synthetic oligonucleotide
gcuggaauaggagcuguag

SEQ ID NO: 159191 - RNA, 19 nt, Artificial Sequence
  Description of Artificial Sequence: Synthetic oligonucleotide
ucguacuguccaccacgcc

SEQ ID NO: 159192 - RNA, 19 nt, Artificial Sequence
  Description of Artificial Sequence: Synthetic oligonucleotide
gagcgauggcaucuucaac

SEQ ID NO: 159193 - RNA, 19 nt, Artificial Sequence
  Description of Artificial Sequence: Synthetic oligonucleotide
gacagacaccccaacaaua

SEQ ID NO: 159194 - RNA, 19 nt, Artificial Sequence
  Description of Artificial Sequence: Synthetic oligonucleotide
cucugacgucucuugggac

SEQ ID NO: 159195 - RNA, 19 nt, Artificial Sequence
  Description of Artificial Sequence: Synthetic oligonucleotide
aguuucccuuggucauuuc

SEQ ID NO: 159196 - RNA, 19 nt, Artificial Sequence
  Description of Artificial Sequence: Synthetic oligonucleotide
gguguauaaacccuuucau

SEQ ID NO: 159197 - RNA, 19 nt, Artificial Sequence
  Description of Artificial Sequence: Synthetic oligonucleotide
ucccgagaaccucggucug

SEQ ID NO: 159198 - RNA, 19 nt, Artificial Sequence
  Description of Artificial Sequence: Synthetic oligonucleotide
guuuggcucucucucucuc

SEQ ID NO: 159199 - RNA, 19 nt, Artificial Sequence
  Description of Artificial Sequence: Synthetic oligonucleotide
cacaggacuggccaggucu

SEQ ID NO: 159200 - RNA, 19 nt, Artificial Sequence
  Description of Artificial Sequence: Synthetic oligonucleotide
gagacggacacaccaaguu

SEQ ID NO: 159201 - RNA, 19 nt, Artificial Sequence
  Description of Artificial Sequence: Synthetic oligonucleotide
ugggugauuggaggggagu

SEQ ID NO: 159202 - RNA, 19 nt, Artificial Sequence
  Description of Artificial Sequence: Synthetic oligonucleotide
cugucggagcuuuggagga

SEQ ID NO: 159203 - RNA, 19 nt, Artificial Sequence
  Description of Artificial Sequence: Synthetic oligonucleotide
gaucgagagcuggcugagg

SEQ ID NO: 159204 - RNA, 19 nt, Artificial Sequence
  Description of Artificial Sequence: Synthetic oligonucleotide
cuugacggcuugguggcug

SEQ ID NO: 159205 - RNA, 19 nt, Artificial Sequence
  Description of Artificial Sequence: Synthetic oligonucleotide
gggcccacuacacuuuccc

SEQ ID NO: 159206 - RNA, 19 nt, Artificial Sequence
  Description of Artificial Sequence: Synthetic oligonucleotide
cuuggaucgccgccaagga

SEQ ID NO: 159207 - RNA, 19 nt, Artificial Sequence
  Description of Artificial Sequence: Synthetic oligonucleotide
ucucgcucacgcucccucu

SEQ ID NO: 159208 - RNA, 19 nt, Artificial Sequence
  Description of Artificial Sequence: Synthetic oligonucleotide
aguagcagugucgguggcu

SEQ ID NO: 159209 - RNA, 19 nt, Artificial Sequence
  Description of Artificial Sequence: Synthetic oligonucleotide
ggugacaguggacgcuucc

SEQ ID NO: 159210 - RNA, 19 nt, Artificial Sequence
  Description of Artificial Sequence: Synthetic oligonucleotide
agacgcugcucacacucaa

SEQ ID NO: 159211 - RNA, 19 nt, Artificial Sequence
  Description of Artificial Sequence: Synthetic oligonucleotide
cucugccggucuuugucug

SEQ ID NO: 159212 - RNA, 19 nt, Artificial Sequence
  Description of Artificial Sequence: Synthetic oligonucleotide
guuuugcgacgccuucgug

SEQ ID NO: 159213 - RNA, 19 nt, Artificial Sequence
  Description of Artificial Sequence: Synthetic oligonucleotide
uugacggcuugguggcugu

SEQ ID NO: 159214 - RNA, 19 nt, Artificial Sequence
  Description of Artificial Sequence: Synthetic oligonucleotide
uaguuaugauacggcucug

SEQ ID NO: 159215 - RNA, 19 nt, Artificial Sequence
  Description of Artificial Sequence: Synthetic oligonucleotide
augauacggcucugcuucu

SEQ ID NO: 159216 - RNA, 19 nt, Artificial Sequence
  Description of Artificial Sequence: Synthetic oligonucleotide
cuuggccuuauuuuauuau

SEQ ID NO: 159217 - RNA, 19 nt, Artificial Sequence
  Description of Artificial Sequence: Synthetic oligonucleotide
cuguauacugcacccugaa

SEQ ID NO: 159218 - RNA, 19 nt, Artificial Sequence
  Description of Artificial Sequence: Synthetic oligonucleotide
guauagugucucugacguc

SEQ ID NO: 159219 - RNA, 19 nt, Artificial Sequence
  Description of Artificial Sequence: Synthetic oligonucleotide
gauuuccggucccgagaac

SEQ ID NO: 159220 - RNA, 19 nt, Artificial Sequence
  Description of Artificial Sequence: Synthetic oligonucleotide
cacgcucccucugucugcg

SEQ ID NO: 159221 - RNA, 19 nt, Artificial Sequence
  Description of Artificial Sequence: Synthetic oligonucleotide
ugcgugucugaguccgcgu

SEQ ID NO: 159222 - RNA, 19 nt, Artificial Sequence
  Description of Artificial Sequence: Synthetic oligonucleotide
uggggugacaguggacgcu

SEQ ID NO: 159223 - RNA, 19 nt, Artificial Sequence
  Description of Artificial Sequence: Synthetic oligonucleotide
augaggaucgggaccggga

SEQ ID NO: 159224 - RNA, 19 nt, Artificial Sequence
  Description of Artificial Sequence: Synthetic oligonucleotide
gggaucgagagcuggcuga

SEQ ID NO: 159225 - RNA, 19 nt, Artificial Sequence
  Description of Artificial Sequence: Synthetic oligonucleotide
caucggcucgcuucaccug

SEQ ID NO: 159226 - RNA, 19 nt, Artificial Sequence
  Description of Artificial Sequence: Synthetic oligonucleotide
cucccgucgugacaacgug

SEQ ID NO: 159227 - RNA, 19 nt, Artificial Sequence
  Description of Artificial Sequence: Synthetic oligonucleotide
gaaucggcagguggggcga

SEQ ID NO: 159228 - RNA, 19 nt, Artificial Sequence
  Description of Artificial Sequence: Synthetic oligonucleotide
uguuugccgcuccuuccuu

SEQ ID NO: 159229 - RNA, 19 nt, Artificial Sequence
  Description of Artificial Sequence: Synthetic oligonucleotide
ccggcucccuuuaucagcc

SEQ ID NO: 159230 - RNA, 19 nt, Artificial Sequence
  Description of Artificial Sequence: Synthetic oligonucleotide
ggagcucuuagacuggggu

SEQ ID NO: 159231 - RNA, 19 nt, Artificial Sequence
  Description of Artificial Sequence: Synthetic oligonucleotide
cacucaucggcucgcuuca

SEQ ID NO: 159232 - RNA, 19 nt, Artificial Sequence
  Description of Artificial Sequence: Synthetic oligonucleotide
caaagaccuggaucgggaa

SEQ ID NO: 159233 - RNA, 19 nt, Artificial Sequence
  Description of Artificial Sequence: Synthetic oligonucleotide
caccgguuggguggaaaag

SEQ ID NO: 159234 - RNA, 19 nt, Artificial Sequence
  Description of Artificial Sequence: Synthetic oligonucleotide
gaacgagcugugucuggaa

SEQ ID NO: 159235 - RNA, 19 nt, Artificial Sequence
  Description of Artificial Sequence: Synthetic oligonucleotide
cugauccgagggaggggag

SEQ ID NO: 159236 - RNA, 19 nt, Artificial Sequence
  Description of Artificial Sequence: Synthetic oligonucleotide
ggcaacaaaggagcccugc

SEQ ID NO: 159237 - RNA, 19 nt, Artificial Sequence
  Description of Artificial Sequence: Synthetic oligonucleotide
cucuugggacccuagaauu

SEQ ID NO: 159238 - RNA, 19 nt, Artificial Sequence
  Description of Artificial Sequence: Synthetic oligonucleotide
cugcuacuugagguggcgc

SEQ ID NO: 159239 - RNA, 19 nt, Artificial Sequence
  Description of Artificial Sequence: Synthetic oligonucleotide
caacuacuggcgcacccca

SEQ ID NO: 159240 - RNA, 19 nt, Artificial Sequence
  Description of Artificial Sequence: Synthetic oligonucleotide
caucaacuacuggcgcacc

SEQ ID NO: 159241 - RNA, 19 nt, Artificial Sequence
  Description of Artificial Sequence: Synthetic oligonucleotide
uguguggacgggucccguu

SEQ ID NO: 159242 - RNA, 19 nt, Artificial Sequence
  Description of Artificial Sequence: Synthetic oligonucleotide
agagguuuugcgacgccuu

SEQ ID NO: 159243 - RNA, 19 nt, Artificial Sequence
  Description of Artificial Sequence: Synthetic oligonucleotide
caaugguuacugugaaccu

SEQ ID NO: 159244 - RNA, 19 nt, Artificial Sequence
  Description of Artificial Sequence: Synthetic oligonucleotide
gguguugccgguccuucuc

SEQ ID NO: 159245 - RNA, 19 nt, Artificial Sequence
  Description of Artificial Sequence: Synthetic oligonucleotide
guggacgggucccguuucc

SEQ ID NO: 159246 - RNA, 19 nt, Artificial Sequence
  Description of Artificial Sequence: Synthetic oligonucleotide
cuucccaccugucggagcu

SEQ ID NO: 159247 - RNA, 19 nt, Artificial Sequence
  Description of Artificial Sequence: Synthetic oligonucleotide
aaucggcagguggggcgag

SEQ ID NO: 159248 - RNA, 19 nt, Artificial Sequence
  Description of Artificial Sequence: Synthetic oligonucleotide
gaguccgcguucccaggca

SEQ ID NO: 159249 - RNA, 19 nt, Artificial Sequence
  Description of Artificial Sequence: Synthetic oligonucleotide
cacuacacuuucccaggga

SEQ ID NO: 159250 - RNA, 19 nt, Artificial Sequence
  Description of Artificial Sequence: Synthetic oligonucleotide
ugcgagcgauggcaucuuc

SEQ ID NO: 159251 - RNA, 19 nt, Artificial Sequence
  Description of Artificial Sequence: Synthetic oligonucleotide
uggcucucucucucuccca

SEQ ID NO: 159252 - RNA, 19 nt, Artificial Sequence
  Description of Artificial Sequence: Synthetic oligonucleotide
uccgcguucccaggcacuc

SEQ ID NO: 159253 - RNA, 19 nt, Artificial Sequence
  Description of Artificial Sequence: Synthetic oligonucleotide
cugccgcugaguguccgcc

SEQ ID NO: 159254 - RNA, 19 nt, Artificial Sequence
  Description of Artificial Sequence: Synthetic oligonucleotide
caguagcagugucgguggc

SEQ ID NO: 159255 - RNA, 19 nt, Artificial Sequence
  Description of Artificial Sequence: Synthetic oligonucleotide
ucgguguugccgguccuuc

SEQ ID NO: 159256 - RNA, 19 nt, Artificial Sequence
  Description of Artificial Sequence: Synthetic oligonucleotide
cauagcgcuuccggcuccc

SEQ ID NO: 159257 - RNA, 19 nt, Artificial Sequence
  Description of Artificial Sequence: Synthetic oligonucleotide
acggacacaccaaguuucu

SEQ ID NO: 159258 - RNA, 19 nt, Artificial Sequence
  Description of Artificial Sequence: Synthetic oligonucleotide
ggcuuucccugacuuggug

SEQ ID NO: 159259 - RNA, 19 nt, Artificial Sequence
  Description of Artificial Sequence: Synthetic oligonucleotide
ccacuacacuuucccaggg

SEQ ID NO: 159260 - RNA, 19 nt, Artificial Sequence
  Description of Artificial Sequence: Synthetic oligonucleotide
ucgccgccaaggauccuuc

SEQ ID NO: 159261 - RNA, 19 nt, Artificial Sequence
  Description of Artificial Sequence: Synthetic oligonucleotide
ggggaucgagagcuggcug

SEQ ID NO: 159262 - RNA, 19 nt, Artificial Sequence
  Description of Artificial Sequence: Synthetic oligonucleotide
ggaucgagagcuggcugag

SEQ ID NO: 159263 - RNA, 19 nt, Artificial Sequence
  Description of Artificial Sequence: Synthetic oligonucleotide
cguacuguccaccacgcca

SEQ ID NO: 159264 - RNA, 19 nt, Artificial Sequence
  Description of Artificial Sequence: Synthetic oligonucleotide
ggcucucucucucucccac

SEQ ID NO: 159265 - RNA, 19 nt, Artificial Sequence
  Description of Artificial Sequence: Synthetic oligonucleotide
cuugcgagcgauggcaucu

SEQ ID NO: 159266 - RNA, 19 nt, Artificial Sequence
  Description of Artificial Sequence: Synthetic oligonucleotide
ugccggucuuugucugaug

SEQ ID NO: 159267 - RNA, 19 nt, Artificial Sequence
  Description of Artificial Sequence: Synthetic oligonucleotide
gcuuuagcauuuugaccuc

SEQ ID NO: 159268 - RNA, 19 nt, Artificial Sequence
  Description of Artificial Sequence: Synthetic oligonucleotide
ggaucgccgccaaggaucc

SEQ ID NO: 159269 - RNA, 19 nt, Artificial Sequence
  Description of Artificial Sequence: Synthetic oligonucleotide
gugaccuugcuggagcucu

SEQ ID NO: 159270 - RNA, 19 nt, Artificial Sequence
  Description of Artificial Sequence: Synthetic oligonucleotide
ggagaucucccgguuuggc

SEQ ID NO: 159271 - RNA, 19 nt, Artificial Sequence
  Description of Artificial Sequence: Synthetic oligonucleotide
gucugggguuaaguuggcc

SEQ ID NO: 159272 - RNA, 19 nt, Artificial Sequence
  Description of Artificial Sequence: Synthetic oligonucleotide
gcuacuugagguggcgcug

SEQ ID NO: 159273 - RNA, 19 nt, Artificial Sequence
  Description of Artificial Sequence: Synthetic oligonucleotide
ucccuuuaucagccgccuu

SEQ ID NO: 159274 - RNA, 19 nt, Artificial Sequence
  Description of Artificial Sequence: Synthetic oligonucleotide
uugcgacgccuucgugccc

SEQ ID NO: 159275 - RNA, 19 nt, Artificial Sequence
  Description of Artificial Sequence: Synthetic oligonucleotide
cagugucgguggcuuugcc

SEQ ID NO: 159276 - RNA, 19 nt, Artificial Sequence
  Description of Artificial Sequence: Synthetic oligonucleotide
gugacaacgugcuggcuuu

SEQ ID NO: 159277 - RNA, 19 nt, Artificial Sequence
  Description of Artificial Sequence: Synthetic oligonucleotide
gugauuggaggggaguagu

SEQ ID NO: 159278 - RNA, 19 nt, Artificial Sequence
  Description of Artificial Sequence: Synthetic oligonucleotide
aacuacuggcgcaccccaa

SEQ ID NO: 159279 - RNA, 19 nt, Artificial Sequence
  Description of Artificial Sequence: Synthetic oligonucleotide
ggcaucaaugggugagguc

SEQ ID NO: 159280 - RNA, 19 nt, Artificial Sequence
  Description of Artificial Sequence: Synthetic oligonucleotide
cugggcccacuacacuuuc

SEQ ID NO: 159281 - RNA, 19 nt, Artificial Sequence
  Description of Artificial Sequence: Synthetic oligonucleotide
aucgccgccaaggauccuu

SEQ ID NO: 159282 - RNA, 19 nt, Artificial Sequence
  Description of Artificial Sequence: Synthetic oligonucleotide
ucccggucgucuucaccaa

SEQ ID NO: 159283 - RNA, 19 nt, Artificial Sequence
  Description of Artificial Sequence: Synthetic oligonucleotide
ggcucgcuucaccuguggc

SEQ ID NO: 159284 - RNA, 19 nt, Artificial Sequence
  Description of Artificial Sequence: Synthetic oligonucleotide
ugccgcugaguguccgccu

SEQ ID NO: 159285 - RNA, 19 nt, Artificial Sequence
  Description of Artificial Sequence: Synthetic oligonucleotide
ccgccaaggauccuuccac

SEQ ID NO: 159286 - RNA, 19 nt, Artificial Sequence
  Description of Artificial Sequence: Synthetic oligonucleotide
gacgccuucgugcccggcu

SEQ ID NO: 159287 - RNA, 19 nt, Artificial Sequence
  Description of Artificial Sequence: Synthetic oligonucleotide
ugaccuugcuggagcucuu

SEQ ID NO: 159288 - RNA, 19 nt, Artificial Sequence
  Description of Artificial Sequence: Synthetic oligonucleotide
caacgugcuggcuuucccu

SEQ ID NO: 159289 - RNA, 19 nt, Artificial Sequence
  Description of Artificial Sequence: Synthetic oligonucleotide
ccggucuuugucugauggc

SEQ ID NO: 159290 - RNA, 19 nt, Artificial Sequence
  Description of Artificial Sequence: Synthetic oligonucleotide
cccgacuuucucagcuucc

SEQ ID NO: 159291 - RNA, 19 nt, Artificial Sequence
  Description of Artificial Sequence: Synthetic oligonucleotide
ggacuucccaccugucgga

SEQ ID NO: 159292 - RNA, 19 nt, Artificial Sequence
  Description of Artificial Sequence: Synthetic oligonucleotide
ucucggucacgcucccguu

SEQ ID NO: 159293 - RNA, 19 nt, Artificial Sequence
  Description of Artificial Sequence: Synthetic oligonucleotide
gccgccuuauucagcagug

SEQ ID NO: 159294 - RNA, 19 nt, Artificial Sequence
  Description of Artificial Sequence: Synthetic oligonucleotide
ccaccugucggagcuuugg

SEQ ID NO: 159295 - RNA, 19 nt, Artificial Sequence
  Description of Artificial Sequence: Synthetic oligonucleotide
ucgcuucaccuguggcccu

SEQ ID NO: 159296 - RNA, 19 nt, Artificial Sequence
  Description of Artificial Sequence: Synthetic oligonucleotide
cuugcucuuuccgaauggu

SEQ ID NO: 159297 - RNA, 19 nt, Artificial Sequence
  Description of Artificial Sequence: Synthetic oligonucleotide
ccggagccagaguaggaug

SEQ ID NO: 159298 - RNA, 19 nt, Artificial Sequence
  Description of Artificial Sequence: Synthetic oligonucleotide
acuguccaccacgccaaaa

SEQ ID NO: 159299 - RNA, 19 nt, Artificial Sequence
  Description of Artificial Sequence: Synthetic oligonucleotide
caccugucggagcuuugga

SEQ ID NO: 159300 - RNA, 19 nt, Artificial Sequence
  Description of Artificial Sequence: Synthetic oligonucleotide
ggcucagcuugacggcuug

SEQ ID NO: 159301 - RNA, 19 nt, Artificial Sequence
  Description of Artificial Sequence: Synthetic oligonucleotide
acgucucuugggacccuag

SEQ ID NO: 159302 - RNA, 19 nt, Artificial Sequence
  Description of Artificial Sequence: Synthetic oligonucleotide
ccuuugcgugucugagucc

SEQ ID NO: 159303 - RNA, 19 nt, Artificial Sequence
  Description of Artificial Sequence: Synthetic oligonucleotide
ccuggaccggcuuccugag

SEQ ID NO: 159304 - RNA, 19 nt, Artificial Sequence
  Description of Artificial Sequence: Synthetic oligonucleotide
caacaauacccuuggccuu

SEQ ID NO: 159305 - RNA, 19 nt, Artificial Sequence
  Description of Artificial Sequence: Synthetic oligonucleotide
cugggguuaaguuggccuu

SEQ ID NO: 159306 - RNA, 19 nt, Artificial Sequence
  Description of Artificial Sequence: Synthetic oligonucleotide
agucuacuccagggaguga

SEQ ID NO: 159307 - RNA, 19 nt, Artificial Sequence
  Description of Artificial Sequence: Synthetic oligonucleotide
cucggucugggguuaaguu

SEQ ID NO: 159308 - RNA, 19 nt, Artificial Sequence
  Description of Artificial Sequence: Synthetic oligonucleotide
acaauacccuuggccuuau

SEQ ID NO: 159309 - RNA, 19 nt, Artificial Sequence
  Description of Artificial Sequence: Synthetic oligonucleotide
gcuguaggaugaggaucgg

SEQ ID NO: 159310 - RNA, 19 nt, Artificial Sequence
  Description of Artificial Sequence: Synthetic oligonucleotide
cgccuuauucagcaguguc

SEQ ID NO: 159311 - RNA, 19 nt, Artificial Sequence
  Description of Artificial Sequence: Synthetic oligonucleotide
cuucuguauacugcacccu

SEQ ID NO: 159312 - RNA, 19 nt, Artificial Sequence
  Description of Artificial Sequence: Synthetic oligonucleotide
ucccaccugucggagcuuu

SEQ ID NO: 159313 - RNA, 19 nt, Artificial Sequence
  Description of Artificial Sequence: Synthetic oligonucleotide
gccgccaaggauccuucca

SEQ ID NO: 159314 - RNA, 19 nt, Artificial Sequence
  Description of Artificial Sequence: Synthetic oligonucleotide
ggaucgggaacuggagcca

SEQ ID NO: 159315 - RNA, 19 nt, Artificial Sequence
  Description of Artificial Sequence: Synthetic oligonucleotide
cgcucuauaucauagucau

SEQ ID NO: 159316 - RNA, 19 nt, Artificial Sequence
  Description of Artificial Sequence: Synthetic oligonucleotide
gacacaggacuggccaggu

SEQ ID NO: 159317 - RNA, 19 nt, Artificial Sequence
  Description of Artificial Sequence: Synthetic oligonucleotide
ggcccacuacacuuuccca

SEQ ID NO: 159318 - RNA, 19 nt, Artificial Sequence
  Description of Artificial Sequence: Synthetic oligonucleotide
ugacggcuugguggcugug

SEQ ID NO: 159319 - RNA, 19 nt, Artificial Sequence
  Description of Artificial Sequence: Synthetic oligonucleotide
uggcccgcuugcgagcgau

SEQ ID NO: 159320 - RNA, 19 nt, Artificial Sequence
  Description of Artificial Sequence: Synthetic oligonucleotide
gcaguaguuuugguggucu

SEQ ID NO: 159321 - RNA, 19 nt, Artificial Sequence
  Description of Artificial Sequence: Synthetic oligonucleotide
ugacgucucuugggacccu

SEQ ID NO: 159322 - RNA, 19 nt, Artificial Sequence
  Description of Artificial Sequence: Synthetic oligonucleotide
ggaccgagaugagccggag

SEQ ID NO: 159323 - RNA, 19 nt, Artificial Sequence
  Description of Artificial Sequence: Synthetic oligonucleotide
gcaccgguuggguggaaaa

SEQ ID NO: 159324 - RNA, 19 nt, Artificial Sequence
  Description of Artificial Sequence: Synthetic oligonucleotide
gaaccucggucugggguua

SEQ ID NO: 159325 - RNA, 19 nt, Artificial Sequence
  Description of Artificial Sequence: Synthetic oligonucleotide
uugcgagcgauggcaucuu

SEQ ID NO: 159326 - RNA, 19 nt, Artificial Sequence
  Description of Artificial Sequence: Synthetic oligonucleotide
cuuccucccaagucaucau

SEQ ID NO: 159327 - RNA, 19 nt, Artificial Sequence
  Description of Artificial Sequence: Synthetic oligonucleotide
ucucccgguuuggcaggcu

SEQ ID NO: 159328 - RNA, 19 nt, Artificial Sequence
  Description of Artificial Sequence: Synthetic oligonucleotide
cccgagaaccucggucugg

SEQ ID NO: 159329 - RNA, 19 nt, Artificial Sequence
  Description of Artificial Sequence: Synthetic oligonucleotide
ccccgacuuucucagcuuc

SEQ ID NO: 159330 - RNA, 19 nt, Artificial Sequence
  Description of Artificial Sequence: Synthetic oligonucleotide
gacgucucuugggacccua

SEQ ID NO: 159331 - RNA, 19 nt, Artificial Sequence
  Description of Artificial Sequence: Synthetic oligonucleotide
gggaccgggguuuuggcuu

SEQ ID NO: 159332 - RNA, 19 nt, Artificial Sequence
  Description of Artificial Sequence: Synthetic oligonucleotide
gcgagcgauggcaucuuca

SEQ ID NO: 159333 - RNA, 19 nt, Artificial Sequence
  Description of Artificial Sequence: Synthetic oligonucleotide
gggugauuggaggggagua

SEQ ID NO: 159334 - RNA, 19 nt, Artificial Sequence
  Description of Artificial Sequence: Synthetic oligonucleotide
aaccucggucugggguuaa

SEQ ID NO: 159335 - RNA, 19 nt, Artificial Sequence
  Description of Artificial Sequence: Synthetic oligonucleotide
ggcgcaccccaaggguugg

SEQ ID NO: 159336 - RNA, 19 nt, Artificial Sequence
  Description of Artificial Sequence: Synthetic oligonucleotide
gccgcugaguguccgccuc

SEQ ID NO: 159337 - RNA, 19 nt, Artificial Sequence
  Description of Artificial Sequence: Synthetic oligonucleotide
gcucuuagacuggggugac

SEQ ID NO: 159338 - RNA, 19 nt, Artificial Sequence
  Description of Artificial Sequence: Synthetic oligonucleotide
auagcgcuuccggcucccu

SEQ ID NO: 159339 - RNA, 19 nt, Artificial Sequence
  Description of Artificial Sequence: Synthetic oligonucleotide
gcucugccggucuuugucu

SEQ ID NO: 159340 - RNA, 19 nt, Artificial Sequence
  Description of Artificial Sequence: Synthetic oligonucleotide
cuuucucguucucgauagu

SEQ ID NO: 159341 - RNA, 19 nt, Artificial Sequence
  Description of Artificial Sequence: Synthetic oligonucleotide
cuccucccgucgugacaac

SEQ ID NO: 159342 - RNA, 19 nt, Artificial Sequence
  Description of Artificial Sequence: Synthetic oligonucleotide
guaguuucccuuggucauu

SEQ ID NO: 159343 - RNA, 19 nt, Artificial Sequence
  Description of Artificial Sequence: Synthetic oligonucleotide
cuggcgcaccccaaggguu

SEQ ID NO: 159344 - RNA, 19 nt, Artificial Sequence
  Description of Artificial Sequence: Synthetic oligonucleotide
cucccuuuaucagccgccu

SEQ ID NO: 159345 - RNA, 19 nt, Artificial Sequence
  Description of Artificial Sequence: Synthetic oligonucleotide
cccgucgugacaacgugcu

SEQ ID NO: 159346 - RNA, 19 nt, Artificial Sequence
  Description of Artificial Sequence: Synthetic oligonucleotide
ggggagacggacacaccaa

SEQ ID NO: 159347 - RNA, 19 nt, Artificial Sequence
  Description of Artificial Sequence: Synthetic oligonucleotide
cuggaccggcuuccugaga

SEQ ID NO: 159348 - RNA, 19 nt, Artificial Sequence
  Description of Artificial Sequence: Synthetic oligonucleotide
gggaccgagaugagccgga

SEQ ID NO: 159349 - RNA, 19 nt, Artificial Sequence
  Description of Artificial Sequence: Synthetic oligonucleotide
ggucccguuuccgcuuuuc

SEQ ID NO: 159350 - RNA, 19 nt, Artificial Sequence
  Description of Artificial Sequence: Synthetic oligonucleotide
ccgcugaguguccgccucc

SEQ ID NO: 159351 - RNA, 19 nt, Artificial Sequence
  Description of Artificial Sequence: Synthetic oligonucleotide
cucggagaucucccgguuu

SEQ ID NO: 159352 - RNA, 19 nt, Artificial Sequence
  Description of Artificial Sequence: Synthetic oligonucleotide
ccgguuggguggaaaaggu

SEQ ID NO: 159353 - RNA, 19 nt, Artificial Sequence
  Description of Artificial Sequence: Synthetic oligonucleotide
ggggaccgggguuuuggcu

SEQ ID NO: 159354 - RNA, 19 nt, Artificial Sequence
  Description of Artificial Sequence: Synthetic oligonucleotide
gcccuacagagguggucuc

SEQ ID NO: 159355 - RNA, 19 nt, Artificial Sequence
  Description of Artificial Sequence: Synthetic oligonucleotide
uucccaccugucggagcuu

SEQ ID NO: 159356 - RNA, 19 nt, Artificial Sequence
  Description of Artificial Sequence: Synthetic oligonucleotide
ccccugcuuucccgggagg

SEQ ID NO: 159357 - RNA, 19 nt, Artificial Sequence
  Description of Artificial Sequence: Synthetic oligonucleotide
gggcaacaaaggagcccug

SEQ ID NO: 159358 - RNA, 19 nt, Artificial Sequence
  Description of Artificial Sequence: Synthetic oligonucleotide
ccgucgugacaacgugcug

SEQ ID NO: 159359 - RNA, 19 nt, Artificial Sequence
  Description of Artificial Sequence: Synthetic oligonucleotide
ccucccgucgugacaacgu

SEQ ID NO: 159360 - RNA, 19 nt, Artificial Sequence
  Description of Artificial Sequence: Synthetic oligonucleotide
cccaccugucggagcuuug

SEQ ID NO: 159361 - RNA, 19 nt, Artificial Sequence
  Description of Artificial Sequence: Synthetic oligonucleotide
cgugacaacgugcuggcuu

SEQ ID NO: 159362 - RNA, 19 nt, Artificial Sequence
  Description of Artificial Sequence: Synthetic oligonucleotide
cggucuuugucugauggcu

SEQ ID NO: 159363 - RNA, 19 nt, Artificial Sequence
  Description of Artificial Sequence: Synthetic oligonucleotide
gcucucucucucucccacu

SEQ ID NO: 159364 - RNA, 19 nt, Artificial Sequence
  Description of Artificial Sequence: Synthetic oligonucleotide
cggcucgcuucaccugugg

SEQ ID NO: 159365 - RNA, 19 nt, Artificial Sequence
  Description of Artificial Sequence: Synthetic oligonucleotide
ggcaccgguuggguggaaa

SEQ ID NO: 159366 - RNA, 19 nt, Artificial Sequence
  Description of Artificial Sequence: Synthetic oligonucleotide
gcccggcacacuggugacc

SEQ ID NO: 159367 - RNA, 19 nt, Artificial Sequence
  Description of Artificial Sequence: Synthetic oligonucleotide
guccgcguucccaggcacu

SEQ ID NO: 159368 - RNA, 19 nt, Artificial Sequence
  Description of Artificial Sequence: Synthetic oligonucleotide
gagggcucugccggucuuu

SEQ ID NO: 159369 - RNA, 19 nt, Artificial Sequence
  Description of Artificial Sequence: Synthetic oligonucleotide
ccgagaugagccggagcca

SEQ ID NO: 159370 - RNA, 19 nt, Artificial Sequence
  Description of Artificial Sequence: Synthetic oligonucleotide
ggaccgggguuuuggcuuu

SEQ ID NO: 159371 - RNA, 19 nt, Artificial Sequence
  Description of Artificial Sequence: Synthetic oligonucleotide
cgccgccaaggauccuucc

SEQ ID NO: 159372 - RNA, 19 nt, Artificial Sequence
  Description of Artificial Sequence: Synthetic oligonucleotide
ccgacuuucucagcuuccu

SEQ ID NO: 159373 - RNA, 19 nt, Artificial Sequence
  Description of Artificial Sequence: Synthetic oligonucleotide
gcgcuuccggcucccuuua

SEQ ID NO: 159374 - RNA, 19 nt, Artificial Sequence
  Description of Artificial Sequence: Synthetic oligonucleotide
cucgguguugccgguccuu

SEQ ID NO: 159375 - RNA, 19 nt, Artificial Sequence
  Description of Artificial Sequence: Synthetic oligonucleotide
cguuuggcucucucucucu

SEQ ID NO: 159376 - RNA, 19 nt, Artificial Sequence
  Description of Artificial Sequence: Synthetic oligonucleotide
gaucgccgccaaggauccu

SEQ ID NO: 159377 - RNA, 19 nt, Artificial Sequence
  Description of Artificial Sequence: Synthetic oligonucleotide
ccucggucugggguuaagu

SEQ ID NO: 159378 - RNA, 19 nt, Artificial Sequence
  Description of Artificial Sequence: Synthetic oligonucleotide
caauacccuuggccuuauu

SEQ ID NO: 159379 - RNA, 19 nt, Artificial Sequence
  Description of Artificial Sequence: Synthetic oligonucleotide
gccccgacuuucucagcuu

SEQ ID NO: 159380 - RNA, 19 nt, Artificial Sequence
  Description of Artificial Sequence: Synthetic oligonucleotide
ccgccuuauucagcagugu

SEQ ID NO: 159381 - RNA, 19 nt, Artificial Sequence
  Description of Artificial Sequence: Synthetic oligonucleotide
cgacgccuucgugcccggc

SEQ ID NO: 159382 - RNA, 19 nt, Artificial Sequence
  Description of Artificial Sequence: Synthetic oligonucleotide
cggucucgguguugccggu

SEQ ID NO: 159383 - RNA, 19 nt, Artificial Sequence
  Description of Artificial Sequence: Synthetic oligonucleotide
cggucccgagaaccucggu

SEQ ID NO: 159384 - RNA, 19 nt, Artificial Sequence
  Description of Artificial Sequence: Synthetic oligonucleotide
uuaaauaaggguuauuggg

SEQ ID NO: 159385 - RNA, 19 nt, Artificial Sequence
  Description of Artificial Sequence: Synthetic oligonucleotide
aguaguaacagacaaacag

SEQ ID NO: 159386 - RNA, 19 nt, Artificial Sequence
  Description of Artificial Sequence: Synthetic oligonucleotide
cauuuaagacuaaagauag

SEQ ID NO: 159387 - RNA, 19 nt, Artificial Sequence
  Description of Artificial Sequence: Synthetic oligonucleotide
agaaaucucgaagauaucc

SEQ ID NO: 159388 - RNA, 19 nt, Artificial Sequence
  Description of Artificial Sequence: Synthetic oligonucleotide
aaacuugggacacaucuuc

SEQ ID NO: 159389 - RNA, 19 nt, Artificial Sequence
  Description of Artificial Sequence: Synthetic oligonucleotide
ugguugauuaacuugacug

SEQ ID NO: 159390 - RNA, 19 nt, Artificial Sequence
  Description of Artificial Sequence: Synthetic oligonucleotide
cacauaauaaaccuccugg

SEQ ID NO: 159391 - RNA, 19 nt, Artificial Sequence
  Description of Artificial Sequence: Synthetic oligonucleotide
ucgauuuaagcuuugguca

SEQ ID NO: 159392 - RNA, 19 nt, Artificial Sequence
  Description of Artificial Sequence: Synthetic oligonucleotide
aaauccaagauaguuguag

SEQ ID NO: 159393 - RNA, 19 nt, Artificial Sequence
  Description of Artificial Sequence: Synthetic oligonucleotide
acuuauaacacuaauggug

SEQ ID NO: 159394 - RNA, 19 nt, Artificial Sequence
  Description of Artificial Sequence: Synthetic oligonucleotide
uggacaagaaguuagcaga

SEQ ID NO: 159395 - RNA, 19 nt, Artificial Sequence
  Description of Artificial Sequence: Synthetic oligonucleotide
auauuguuaugcuugaaga

SEQ ID NO: 159396 - RNA, 19 nt, Artificial Sequence
  Description of Artificial Sequence: Synthetic oligonucleotide
auuaagagaagucuaggga

SEQ ID NO: 159397 - RNA, 19 nt, Artificial Sequence
  Description of Artificial Sequence: Synthetic oligonucleotide
aacaucuacauccucggga

SEQ ID NO: 159398 - RNA, 19 nt, Artificial Sequence
  Description of Artificial Sequence: Synthetic oligonucleotide
ucaucuuaggacauuucag

SEQ ID NO: 159399 - RNA, 19 nt, Artificial Sequence
  Description of Artificial Sequence: Synthetic oligonucleotide
gaaggcgaacaauagaccc

SEQ ID NO: 159400 - RNA, 19 nt, Artificial Sequence
  Description of Artificial Sequence: Synthetic oligonucleotide
ugaagauuaagagaagucu

SEQ ID NO: 159401 - RNA, 19 nt, Artificial Sequence
  Description of Artificial Sequence: Synthetic oligonucleotide
uucgauuuaagcuuugguc

SEQ ID NO: 159402 - RNA, 19 nt, Artificial Sequence
  Description of Artificial Sequence: Synthetic oligonucleotide
agugugauuucacaaguag

SEQ ID NO: 159403 - RNA, 19 nt, Artificial Sequence
  Description of Artificial Sequence: Synthetic oligonucleotide
aauaaacuauuuggugacc

SEQ ID NO: 159404 - RNA, 19 nt, Artificial Sequence
  Description of Artificial Sequence: Synthetic oligonucleotide
ucucuuauccucauguaga

SEQ ID NO: 159405 - RNA, 19 nt, Artificial Sequence
  Description of Artificial Sequence: Synthetic oligonucleotide
aacuuauaacacuaauggu

SEQ ID NO: 159406 - RNA, 19 nt, Artificial Sequence
  Description of Artificial Sequence: Synthetic oligonucleotide
uuccaguuuaggaaagagg

SEQ ID NO: 159407 - RNA, 19 nt, Artificial Sequence
  Description of Artificial Sequence: Synthetic oligonucleotide
aaugccugugugguaagcc

SEQ ID NO: 159408 - RNA, 19 nt, Artificial Sequence
  Description of Artificial Sequence: Synthetic oligonucleotide
agauucgaaugguugcucc

SEQ ID NO: 159409 - RNA, 19 nt, Artificial Sequence
  Description of Artificial Sequence: Synthetic oligonucleotide
aagauuaagagaagucuag

SEQ ID NO: 159410 - RNA, 19 nt, Artificial Sequence
  Description of Artificial Sequence: Synthetic oligonucleotide
aggaaggcgaacaauagac

SEQ ID NO: 159411 - RNA, 19 nt, Artificial Sequence
  Description of Artificial Sequence: Synthetic oligonucleotide
auacccuacauaugugagc

SEQ ID NO: 159412 - RNA, 19 nt, Artificial Sequence
  Description of Artificial Sequence: Synthetic oligonucleotide
uuugguaugagcugcugac

SEQ ID NO: 159413 - RNA, 19 nt, Artificial Sequence
  Description of Artificial Sequence: Synthetic oligonucleotide
agagguuucguguauagaa

SEQ ID NO: 159414 - RNA, 19 nt, Artificial Sequence
  Description of Artificial Sequence: Synthetic oligonucleotide
aaucacuucaggaaggcga

SEQ ID NO: 159415 - RNA, 19 nt, Artificial Sequence
  Description of Artificial Sequence: Synthetic oligonucleotide
uuuccaaucuccuggcgag

SEQ ID NO: 159416 - RNA, 19 nt, Artificial Sequence
  Description of Artificial Sequence: Synthetic oligonucleotide
uacgccauacccuacauau

SEQ ID NO: 159417 - RNA, 19 nt, Artificial Sequence
  Description of Artificial Sequence: Synthetic oligonucleotide
agagcaaucacuucaggaa

SEQ ID NO: 159418 - RNA, 19 nt, Artificial Sequence
  Description of Artificial Sequence: Synthetic oligonucleotide
ucggaaaugucuuucacau

SEQ ID NO: 159419 - RNA, 19 nt, Artificial Sequence
  Description of Artificial Sequence: Synthetic oligonucleotide
uaugcuugaagauucgaau

SEQ ID NO: 159420 - RNA, 19 nt, Artificial Sequence
  Description of Artificial Sequence: Synthetic oligonucleotide
agacuuagcaaacaaugga

SEQ ID NO: 159421 - RNA, 19 nt, Artificial Sequence
  Description of Artificial Sequence: Synthetic oligonucleotide
gagacuuagcaaacaaugg

SEQ ID NO: 159422 - RNA, 19 nt, Artificial Sequence
  Description of Artificial Sequence: Synthetic oligonucleotide
ugguaugagcugcugacag

SEQ ID NO: 159423 - RNA, 19 nt, Artificial Sequence
  Description of Artificial Sequence: Synthetic oligonucleotide
ugggguaagaacccaaacu

SEQ ID NO: 159424 - RNA, 19 nt, Artificial Sequence
  Description of Artificial Sequence: Synthetic oligonucleotide
aucuuaggacauuucagag

SEQ ID NO: 159425 - RNA, 19 nt, Artificial Sequence
  Description of Artificial Sequence: Synthetic oligonucleotide
acuaauggugaaguggaac

SEQ ID NO: 159426 - RNA, 19 nt, Artificial Sequence
  Description of Artificial Sequence: Synthetic oligonucleotide
ucuuguccgagguugacca

SEQ ID NO: 159427 - RNA, 19 nt, Artificial Sequence
  Description of Artificial Sequence: Synthetic oligonucleotide
uagucuaccacaccucgcc

SEQ ID NO: 159428 - RNA, 19 nt, Artificial Sequence
  Description of Artificial Sequence: Synthetic oligonucleotide
gguugauuaacuugacugg

SEQ ID NO: 159429 - RNA, 19 nt, Artificial Sequence
  Description of Artificial Sequence: Synthetic oligonucleotide
aaaucucgaagauauccaa

SEQ ID NO: 159430 - RNA, 19 nt, Artificial Sequence
  Description of Artificial Sequence: Synthetic oligonucleotide
auuaaacggucuuuuauaa

SEQ ID NO: 159431 - RNA, 19 nt, Artificial Sequence
  Description of Artificial Sequence: Synthetic oligonucleotide
guuagcagaaggcacuugc

SEQ ID NO: 159432 - RNA, 19 nt, Artificial Sequence
  Description of Artificial Sequence: Synthetic oligonucleotide
aaggcgccaauuuuggcug

SEQ ID NO: 159433 - RNA, 19 nt, Artificial Sequence
  Description of Artificial Sequence: Synthetic oligonucleotide
uguuaugcuugaagauucg

SEQ ID NO: 159434 - RNA, 19 nt, Artificial Sequence
  Description of Artificial Sequence: Synthetic oligonucleotide
uuaugcuugaagauucgaa

SEQ ID NO: 159435 - RNA, 19 nt, Artificial Sequence
  Description of Artificial Sequence: Synthetic oligonucleotide
aauguucccaucauaacau

SEQ ID NO: 159436 - RNA, 19 nt, Artificial Sequence
  Description of Artificial Sequence: Synthetic oligonucleotide
aggucggaagcauuagggc

SEQ ID NO: 159437 - RNA, 19 nt, Artificial Sequence
  Description of Artificial Sequence: Synthetic oligonucleotide
agaugaugaaucccauuuc

SEQ ID NO: 159438 - RNA, 19 nt, Artificial Sequence
  Description of Artificial Sequence: Synthetic oligonucleotide
uauuguuaugcuugaagau

SEQ ID NO: 159439 - RNA, 19 nt, Artificial Sequence
  Description of Artificial Sequence: Synthetic oligonucleotide
cacauccuaaucuggaccc

SEQ ID NO: 159440 - RNA, 19 nt, Artificial Sequence
  Description of Artificial Sequence: Synthetic oligonucleotide
auguucuuuggucaagcag

SEQ ID NO: 159441 - RNA, 19 nt, Artificial Sequence
  Description of Artificial Sequence: Synthetic oligonucleotide
ucccucuaacacuugauca

SEQ ID NO: 159442 - RNA, 19 nt, Artificial Sequence
  Description of Artificial Sequence: Synthetic oligonucleotide
guaaucaugugagacuuag

SEQ ID NO: 159443 - RNA, 19 nt, Artificial Sequence
  Description of Artificial Sequence: Synthetic oligonucleotide
gaggucggaagcauuaggg

SEQ ID NO: 159444 - RNA, 19 nt, Artificial Sequence
  Description of Artificial Sequence: Synthetic oligonucleotide
uccaauguauccuccagaa

SEQ ID NO: 159445 - RNA, 19 nt, Artificial Sequence
  Description of Artificial Sequence: Synthetic oligonucleotide
uacccuacauaugugagca

SEQ ID NO: 159446 - RNA, 19 nt, Artificial Sequence
  Description of Artificial Sequence: Synthetic oligonucleotide
agaaauuccucaaaggaaa

SEQ ID NO: 159447 - RNA, 19 nt, Artificial Sequence
  Description of Artificial Sequence: Synthetic oligonucleotide
gacaaacagaggcuauucc

SEQ ID NO: 159448 - RNA, 19 nt, Artificial Sequence
  Description of Artificial Sequence: Synthetic oligonucleotide
gcauuguuaacauuuaaga

SEQ ID NO: 159449 - RNA, 19 nt, Artificial Sequence
  Description of Artificial Sequence: Synthetic oligonucleotide
auagguagucucaucaaag

SEQ ID NO: 159450 - RNA, 19 nt, Artificial Sequence
  Description of Artificial Sequence: Synthetic oligonucleotide
caccuuuaauuauauuccc

SEQ ID NO: 159451 - RNA, 19 nt, Artificial Sequence
  Description of Artificial Sequence: Synthetic oligonucleotide
uuuaggaaagagguaucug

SEQ ID NO: 159452 - RNA, 19 nt, Artificial Sequence
  Description of Artificial Sequence: Synthetic oligonucleotide
ugaucagaaauuccucaaa

SEQ ID NO: 159453 - RNA, 19 nt, Artificial Sequence
  Description of Artificial Sequence: Synthetic oligonucleotide
gauucgaaugguugcuccc

SEQ ID NO: 159454 - RNA, 19 nt, Artificial Sequence
  Description of Artificial Sequence: Synthetic oligonucleotide
ucaccucccguucuucacg

SEQ ID NO: 159455 - RNA, 19 nt, Artificial Sequence
  Description of Artificial Sequence: Synthetic oligonucleotide
aagauucgaaugguugcuc

SEQ ID NO: 159456 - RNA, 19 nt, Artificial Sequence
  Description of Artificial Sequence: Synthetic oligonucleotide
acuuagcaaacaauggaag

SEQ ID NO: 159457 - RNA, 19 nt, Artificial Sequence
  Description of Artificial Sequence: Synthetic oligonucleotide
cucuuauccucauguagag

SEQ ID NO: 159458 - RNA, 19 nt, Artificial Sequence
  Description of Artificial Sequence: Synthetic oligonucleotide
caucuuaggacauuucaga

SEQ ID NO: 159459 - RNA, 19 nt, Artificial Sequence
  Description of Artificial Sequence: Synthetic oligonucleotide
caugcuauauaugccuucc

SEQ ID NO: 159460 - RNA, 19 nt, Artificial Sequence
  Description of Artificial Sequence: Synthetic oligonucleotide
gaugaaucuggccggcagc

SEQ ID NO: 159461 - RNA, 19 nt, Artificial Sequence
  Description of Artificial Sequence: Synthetic oligonucleotide
acaucuacauccucgggau

SEQ ID NO: 159462 - RNA, 19 nt, Artificial Sequence
  Description of Artificial Sequence: Synthetic oligonucleotide
uucccaucauaacaucuac

SEQ ID NO: 159463 - RNA, 19 nt, Artificial Sequence
  Description of Artificial Sequence: Synthetic oligonucleotide
uugguugauuaacuugacu

SEQ ID NO: 159464 - RNA, 19 nt, Artificial Sequence
  Description of Artificial Sequence: Synthetic oligonucleotide
ugugagaaugugugcgcag

SEQ ID NO: 159465 - RNA, 19 nt, Artificial Sequence
  Description of Artificial Sequence: Synthetic oligonucleotide
auuguuaugcuugaagauu

SEQ ID NO: 159466 - RNA, 19 nt, Artificial Sequence
  Description of Artificial Sequence: Synthetic oligonucleotide
accaacguuccgcuucagc

SEQ ID NO: 159467 - RNA, 19 nt, Artificial Sequence
  Description of Artificial Sequence: Synthetic oligonucleotide
uaauaaaccuccuggcauu

SEQ ID NO: 159468 - RNA, 19 nt, Artificial Sequence
  Description of Artificial Sequence: Synthetic oligonucleotide
aaguagucuaccacaccuc

SEQ ID NO: 159469 - RNA, 19 nt, Artificial Sequence
  Description of Artificial Sequence: Synthetic oligonucleotide
ucuuauccucauguagagg

SEQ ID NO: 159470 - RNA, 19 nt, Artificial Sequence
  Description of Artificial Sequence: Synthetic oligonucleotide
gaagauuaagagaagucua

SEQ ID NO: 159471 - RNA, 19 nt, Artificial Sequence
  Description of Artificial Sequence: Synthetic oligonucleotide
auucgaaugguugcucccg

SEQ ID NO: 159472 - RNA, 19 nt, Artificial Sequence
  Description of Artificial Sequence: Synthetic oligonucleotide
uucccucuaacacuugauc

SEQ ID NO: 159473 - RNA, 19 nt, Artificial Sequence
  Description of Artificial Sequence: Synthetic oligonucleotide
acuaaagauagaaugcuuu

SEQ ID NO: 159474 - RNA, 19 nt, Artificial Sequence
  Description of Artificial Sequence: Synthetic oligonucleotide
agugaugcaugguucaguu

SEQ ID NO: 159475 - RNA, 19 nt, Artificial Sequence
  Description of Artificial Sequence: Synthetic oligonucleotide
aaggauugacucacacuuc

SEQ ID NO: 159476 - RNA, 19 nt, Artificial Sequence
  Description of Artificial Sequence: Synthetic oligonucleotide
acacuaauggugaagugga

SEQ ID NO: 159477 - RNA, 19 nt, Artificial Sequence
  Description of Artificial Sequence: Synthetic oligonucleotide
cuccuagaaccagugaugc

SEQ ID NO: 159478 - RNA, 19 nt, Artificial Sequence
  Description of Artificial Sequence: Synthetic oligonucleotide
guuuccaaucuccuggcga

SEQ ID NO: 159479 - RNA, 19 nt, Artificial Sequence
  Description of Artificial Sequence: Synthetic oligonucleotide
ugaccagaacaacaaugaa

SEQ ID NO: 159480 - RNA, 19 nt, Artificial Sequence
  Description of Artificial Sequence: Synthetic oligonucleotide
cagaguacaagaacuggca

SEQ ID NO: 159481 - RNA, 19 nt, Artificial Sequence
  Description of Artificial Sequence: Synthetic oligonucleotide
agaaugcuuugguugauua

SEQ ID NO: 159482 - RNA, 19 nt, Artificial Sequence
  Description of Artificial Sequence: Synthetic oligonucleotide
gccucaagaaaucucgaag

SEQ ID NO: 159483 - RNA, 19 nt, Artificial Sequence
  Description of Artificial Sequence: Synthetic oligonucleotide
uguaggaacccauguuuau

SEQ ID NO: 159484 - RNA, 19 nt, Artificial Sequence
  Description of Artificial Sequence: Synthetic oligonucleotide
agaguacaagaacuggcau

SEQ ID NO: 159485 - RNA, 19 nt, Artificial Sequence
  Description of Artificial Sequence: Synthetic oligonucleotide
aaguucucgaaguccugau

SEQ ID NO: 159486 - RNA, 19 nt, Artificial Sequence
  Description of Artificial Sequence: Synthetic oligonucleotide
uccucuagggagcaccaaa

SEQ ID NO: 159487 - RNA, 19 nt, Artificial Sequence
  Description of Artificial Sequence: Synthetic oligonucleotide
uuguugcaaaucccaugcc

SEQ ID NO: 159488 - RNA, 19 nt, Artificial Sequence
  Description of Artificial Sequence: Synthetic oligonucleotide
aguuguaggaacccauguu

SEQ ID NO: 159489 - RNA, 19 nt, Artificial Sequence
  Description of Artificial Sequence: Synthetic oligonucleotide
agacugucauaacugugga

SEQ ID NO: 159490 - RNA, 19 nt, Artificial Sequence
  Description of Artificial Sequence: Synthetic oligonucleotide
aaggcgaacaauagacccu

SEQ ID NO: 159491 - RNA, 19 nt, Artificial Sequence
  Description of Artificial Sequence: Synthetic oligonucleotide
uggaguagggaaugccugu

SEQ ID NO: 159492 - RNA, 19 nt, Artificial Sequence
  Description of Artificial Sequence: Synthetic oligonucleotide
aguuguagucaugggacug

SEQ ID NO: 159493 - RNA, 19 nt, Artificial Sequence
  Description of Artificial Sequence: Synthetic oligonucleotide
cacaccaacguuccgcuuc

SEQ ID NO: 159494 - RNA, 19 nt, Artificial Sequence
  Description of Artificial Sequence: Synthetic oligonucleotide
gaacaauagacccuuccau

SEQ ID NO: 159495 - RNA, 19 nt, Artificial Sequence
  Description of Artificial Sequence: Synthetic oligonucleotide
uucgaaugguugcucccga

SEQ ID NO: 159496 - RNA, 19 nt, Artificial Sequence
  Description of Artificial Sequence: Synthetic oligonucleotide
augguucaguucaucacuc

SEQ ID NO: 159497 - RNA, 19 nt, Artificial Sequence
  Description of Artificial Sequence: Synthetic oligonucleotide
caucucccgcccaaaggcg

SEQ ID NO: 159498 - RNA, 19 nt, Artificial Sequence
  Description of Artificial Sequence: Synthetic oligonucleotide
gcuauauaugccuuccaca

SEQ ID NO: 159499 - RNA, 19 nt, Artificial Sequence
  Description of Artificial Sequence: Synthetic oligonucleotide
gggucaaaaucaucuuagg

SEQ ID NO: 159500 - RNA, 19 nt, Artificial Sequence
  Description of Artificial Sequence: Synthetic oligonucleotide
uucuuguccgagguugacc

SEQ ID NO: 159501 - RNA, 19 nt, Artificial Sequence
  Description of Artificial Sequence: Synthetic oligonucleotide
auaguuguaggaacccaug

SEQ ID NO: 159502 - RNA, 19 nt, Artificial Sequence
  Description of Artificial Sequence: Synthetic oligonucleotide
gggugaguacgccauaccc

SEQ ID NO: 159503 - RNA, 19 nt, Artificial Sequence
  Description of Artificial Sequence: Synthetic oligonucleotide
aaagccgugucaaguauuu

SEQ ID NO: 159504 - RNA, 19 nt, Artificial Sequence
  Description of Artificial Sequence: Synthetic oligonucleotide
gagagggccagugagucuc

SEQ ID NO: 159505 - RNA, 19 nt, Artificial Sequence
  Description of Artificial Sequence: Synthetic oligonucleotide
uccaugcuauauaugccuu

SEQ ID NO: 159506 - RNA, 19 nt, Artificial Sequence
  Description of Artificial Sequence: Synthetic oligonucleotide
ucaggcaaccuuugccaac

SEQ ID NO: 159507 - RNA, 19 nt, Artificial Sequence
  Description of Artificial Sequence: Synthetic oligonucleotide
ugacauugacguggcauac

SEQ ID NO: 159508 - RNA, 19 nt, Artificial Sequence
  Description of Artificial Sequence: Synthetic oligonucleotide
aggugacuggaguagggaa

SEQ ID NO: 159509 - RNA, 19 nt, Artificial Sequence
  Description of Artificial Sequence: Synthetic oligonucleotide
cuggcuccuagaaccagug

SEQ ID NO: 159510 - RNA, 19 nt, Artificial Sequence
  Description of Artificial Sequence: Synthetic oligonucleotide
acaccucgcccugaagggc

SEQ ID NO: 159511 - RNA, 19 nt, Artificial Sequence
  Description of Artificial Sequence: Synthetic oligonucleotide
aucucccgcccaaaggcgc

SEQ ID NO: 159512 - RNA, 19 nt, Artificial Sequence
  Description of Artificial Sequence: Synthetic oligonucleotide
uucacgcagccguucgccc

SEQ ID NO: 159513 - RNA, 19 nt, Artificial Sequence
  Description of Artificial Sequence: Synthetic oligonucleotide
acguggcauacacagcacu

SEQ ID NO: 159514 - RNA, 19 nt, Artificial Sequence
  Description of Artificial Sequence: Synthetic oligonucleotide
acacuugaucaccacuaaa

SEQ ID NO: 159515 - RNA, 19 nt, Artificial Sequence
  Description of Artificial Sequence: Synthetic oligonucleotide
uggcgagugcugcacacuc

SEQ ID NO: 159516 - RNA, 19 nt, Artificial Sequence
  Description of Artificial Sequence: Synthetic oligonucleotide
gaguacgccauacccuaca

SEQ ID NO: 159517 - RNA, 19 nt, Artificial Sequence
  Description of Artificial Sequence: Synthetic oligonucleotide
ccgagguugaccauaaaca

SEQ ID NO: 159518 - RNA, 19 nt, Artificial Sequence
  Description of Artificial Sequence: Synthetic oligonucleotide
cuucacgcagccguucgcc

SEQ ID NO: 159519 - RNA, 19 nt, Artificial Sequence
  Description of Artificial Sequence: Synthetic oligonucleotide
gugacauugacguggcaua

SEQ ID NO: 159520 - RNA, 19 nt, Artificial Sequence
  Description of Artificial Sequence: Synthetic oligonucleotide
gugaguacgccauacccua

SEQ ID NO: 159521 - RNA, 19 nt, Artificial Sequence
  Description of Artificial Sequence: Synthetic oligonucleotide
uccuagaaccagugaugca

SEQ ID NO: 159522 - RNA, 19 nt, Artificial Sequence
  Description of Artificial Sequence: Synthetic oligonucleotide
uagagguuucguguauaga

SEQ ID NO: 159523 - RNA, 19 nt, Artificial Sequence
  Description of Artificial Sequence: Synthetic oligonucleotide
gaagauucgaaugguugcu

SEQ ID NO: 159524 - RNA, 19 nt, Artificial Sequence
  Description of Artificial Sequence: Synthetic oligonucleotide
ccuacauaugugagcacag

SEQ ID NO: 159525 - RNA, 19 nt, Artificial Sequence
  Description of Artificial Sequence: Synthetic oligonucleotide
aagccgugucaaguauuuc

SEQ ID NO: 159526 - RNA, 19 nt, Artificial Sequence
  Description of Artificial Sequence: Synthetic oligonucleotide
auuuaagacuaaagauaga

SEQ ID NO: 159527 - RNA, 19 nt, Artificial Sequence
  Description of Artificial Sequence: Synthetic oligonucleotide
cauccuaaucuggacccag

SEQ ID NO: 159528 - RNA, 19 nt, Artificial Sequence
  Description of Artificial Sequence: Synthetic oligonucleotide
caucacucagaaucaggca

SEQ ID NO: 159529 - RNA, 19 nt, Artificial Sequence
  Description of Artificial Sequence: Synthetic oligonucleotide
cauguagagguuucgugua

SEQ ID NO: 159530 - RNA, 19 nt, Artificial Sequence
  Description of Artificial Sequence: Synthetic oligonucleotide
ugaguacgccauacccuac

SEQ ID NO: 159531 - RNA, 19 nt, Artificial Sequence
  Description of Artificial Sequence: Synthetic oligonucleotide
ucucccgcccaaaggcgcc

SEQ ID NO: 159532 - RNA, 19 nt, Artificial Sequence
  Description of Artificial Sequence: Synthetic oligonucleotide
cugaccuaguaguaacaga

SEQ ID NO: 159533 - RNA, 19 nt, Artificial Sequence
  Description of Artificial Sequence: Synthetic oligonucleotide
gauaguuguaggaacccau

SEQ ID NO: 159534 - RNA, 19 nt, Artificial Sequence
  Description of Artificial Sequence: Synthetic oligonucleotide
aguacgccauacccuacau

SEQ ID NO: 159535 - RNA, 19 nt, Artificial Sequence
  Description of Artificial Sequence: Synthetic oligonucleotide
acccuacauaugugagcac

SEQ ID NO: 159536 - RNA, 19 nt, Artificial Sequence
  Description of Artificial Sequence: Synthetic oligonucleotide
ucgaaugguugcucccgac

SEQ ID NO: 159537 - RNA, 19 nt, Artificial Sequence
  Description of Artificial Sequence: Synthetic oligonucleotide
gaguacaagaacuggcauu

SEQ ID NO: 159538 - RNA, 19 nt, Artificial Sequence
  Description of Artificial Sequence: Synthetic oligonucleotide
gacccuuccaugcuauaua

SEQ ID NO: 159539 - RNA, 19 nt, Artificial Sequence
  Description of Artificial Sequence: Synthetic oligonucleotide
guuaugcuugaagauucga

SEQ ID NO: 159540 - RNA, 19 nt, Artificial Sequence
  Description of Artificial Sequence: Synthetic oligonucleotide
ccaacguuccgcuucagca

SEQ ID NO: 159541 - RNA, 19 nt, Artificial Sequence
  Description of Artificial Sequence: Synthetic oligonucleotide
caccucccguucuucacgc

SEQ ID NO: 159542 - RNA, 19 nt, Artificial Sequence
  Description of Artificial Sequence: Synthetic oligonucleotide
ggaaggcgaacaauagacc

SEQ ID NO: 159543 - RNA, 19 nt, Artificial Sequence
  Description of Artificial Sequence: Synthetic oligonucleotide
ccuaaucuggacccagaag

SEQ ID NO: 159544 - RNA, 19 nt, Artificial Sequence
  Description of Artificial Sequence: Synthetic oligonucleotide
agggccagugagucucaag

SEQ ID NO: 159545 - RNA, 19 nt, Artificial Sequence
  Description of Artificial Sequence: Synthetic oligonucleotide
agacccuuccaugcuauau

SEQ ID NO: 159546 - RNA, 19 nt, Artificial Sequence
  Description of Artificial Sequence: Synthetic oligonucleotide
ucucaaggcuggagcgcca

SEQ ID NO: 159547 - RNA, 19 nt, Artificial Sequence
  Description of Artificial Sequence: Synthetic oligonucleotide
uuguccgagguugaccaua

SEQ ID NO: 159548 - RNA, 19 nt, Artificial Sequence
  Description of Artificial Sequence: Synthetic oligonucleotide
ggccagugagucucaaggc

SEQ ID NO: 159549 - RNA, 19 nt, Artificial Sequence
  Description of Artificial Sequence: Synthetic oligonucleotide
uagaaugcuuugguugauu

SEQ ID NO: 159550 - RNA, 19 nt, Artificial Sequence
  Description of Artificial Sequence: Synthetic oligonucleotide
gucgguuccaguugucucu

SEQ ID NO: 159551 - RNA, 19 nt, Artificial Sequence
  Description of Artificial Sequence: Synthetic oligonucleotide
aggcgccaauuuuggcugg

SEQ ID NO: 159552 - RNA, 19 nt, Artificial Sequence
  Description of Artificial Sequence: Synthetic oligonucleotide
cacguacccguuccucacc

SEQ ID NO: 159553 - RNA, 19 nt, Artificial Sequence
  Description of Artificial Sequence: Synthetic oligonucleotide
caaggauuaggauuuucuu

SEQ ID NO: 159554 - RNA, 19 nt, Artificial Sequence
  Description of Artificial Sequence: Synthetic oligonucleotide
aggcgaacaauagacccuu

SEQ ID NO: 159555 - RNA, 19 nt, Artificial Sequence
  Description of Artificial Sequence: Synthetic oligonucleotide
ugguugcucccgacagucu

SEQ ID NO: 159556 - RNA, 19 nt, Artificial Sequence
  Description of Artificial Sequence: Synthetic oligonucleotide
acucagaaucaggcaaccu

SEQ ID NO: 159557 - RNA, 19 nt, Artificial Sequence
  Description of Artificial Sequence: Synthetic oligonucleotide
guaggaacccauguuuaua

SEQ ID NO: 159558 - RNA, 19 nt, Artificial Sequence
  Description of Artificial Sequence: Synthetic oligonucleotide
ccauacccuacauauguga

SEQ ID NO: 159559 - RNA, 19 nt, Artificial Sequence
  Description of Artificial Sequence: Synthetic oligonucleotide
cauugacguggcauacaca

SEQ ID NO: 159560 - RNA, 19 nt, Artificial Sequence
  Description of Artificial Sequence: Synthetic oligonucleotide
ggauuaggauuuucuucca

SEQ ID NO: 159561 - RNA, 19 nt, Artificial Sequence
  Description of Artificial Sequence: Synthetic oligonucleotide
ccaauguauccuccagaag

SEQ ID NO: 159562 - RNA, 19 nt, Artificial Sequence
  Description of Artificial Sequence: Synthetic oligonucleotide
caggcaaccuuugccaaca

SEQ ID NO: 159563 - RNA, 19 nt, Artificial Sequence
  Description of Artificial Sequence: Synthetic oligonucleotide
ugguuaaauaaggguuauu

SEQ ID NO: 159564 - RNA, 19 nt, Artificial Sequence
  Description of Artificial Sequence: Synthetic oligonucleotide
cuugggacacaucuucagu

SEQ ID NO: 159565 - RNA, 19 nt, Artificial Sequence
  Description of Artificial Sequence: Synthetic oligonucleotide
gcucccuagggagagggcc

SEQ ID NO: 159566 - RNA, 19 nt, Artificial Sequence
  Description of Artificial Sequence: Synthetic oligonucleotide
cagccgacggcgugaguac

SEQ ID NO: 159567 - RNA, 19 nt, Artificial Sequence
  Description of Artificial Sequence: Synthetic oligonucleotide
ugugcgcagguagucuauc

SEQ ID NO: 159568 - RNA, 19 nt, Artificial Sequence
  Description of Artificial Sequence: Synthetic oligonucleotide
caggcaaaaucuggcucug

SEQ ID NO: 159569 - RNA, 19 nt, Artificial Sequence
  Description of Artificial Sequence: Synthetic oligonucleotide
acauccuaaucuggaccca

SEQ ID NO: 159570 - RNA, 19 nt, Artificial Sequence
  Description of Artificial Sequence: Synthetic oligonucleotide
accaccggggaaucuucau

SEQ ID NO: 159571 - RNA, 19 nt, Artificial Sequence
  Description of Artificial Sequence: Synthetic oligonucleotide
cugugagaaugugugcgca

SEQ ID NO: 159572 - RNA, 19 nt, Artificial Sequence
  Description of Artificial Sequence: Synthetic oligonucleotide
guagagcaucaaaggcacc

SEQ ID NO: 159573 - RNA, 19 nt, Artificial Sequence
  Description of Artificial Sequence: Synthetic oligonucleotide
augaugaaucuggccggca

SEQ ID NO: 159574 - RNA, 19 nt, Artificial Sequence
  Description of Artificial Sequence: Synthetic oligonucleotide
ccuggcauuguuaacauuu

SEQ ID NO: 159575 - RNA, 19 nt, Artificial Sequence
  Description of Artificial Sequence: Synthetic oligonucleotide
ccaugcuauauaugccuuc

SEQ ID NO: 159576 - RNA, 19 nt, Artificial Sequence
  Description of Artificial Sequence: Synthetic oligonucleotide
guuguagucaugggacugu

SEQ ID NO: 159577 - RNA, 19 nt, Artificial Sequence
  Description of Artificial Sequence: Synthetic oligonucleotide
ccggggaaucuucauugcc

SEQ ID NO: 159578 - RNA, 19 nt, Artificial Sequence
  Description of Artificial Sequence: Synthetic oligonucleotide
ggacucaaugauuggggua

SEQ ID NO: 159579 - RNA, 19 nt, Artificial Sequence
  Description of Artificial Sequence: Synthetic oligonucleotide
auccuaaucuggacccaga

SEQ ID NO: 159580 - RNA, 19 nt, Artificial Sequence
  Description of Artificial Sequence: Synthetic oligonucleotide
agccguucgcccgcagcgg

SEQ ID NO: 159581 - RNA, 19 nt, Artificial Sequence
  Description of Artificial Sequence: Synthetic oligonucleotide
agagggugaguacgccaua

SEQ ID NO: 159582 - RNA, 19 nt, Artificial Sequence
  Description of Artificial Sequence: Synthetic oligonucleotide
uagacccuuccaugcuaua

SEQ ID NO: 159583 - RNA, 19 nt, Artificial Sequence
  Description of Artificial Sequence: Synthetic oligonucleotide
acgccauacccuacauaug

SEQ ID NO: 159584 - RNA, 19 nt, Artificial Sequence
  Description of Artificial Sequence: Synthetic oligonucleotide
aguaaucaugugagacuua

SEQ ID NO: 159585 - RNA, 19 nt, Artificial Sequence
  Description of Artificial Sequence: Synthetic oligonucleotide
ucgguuccaguugucucuu

SEQ ID NO: 159586 - RNA, 19 nt, Artificial Sequence
  Description of Artificial Sequence: Synthetic oligonucleotide
ggugaguacgccauacccu

SEQ ID NO: 159587 - RNA, 19 nt, Artificial Sequence
  Description of Artificial Sequence: Synthetic oligonucleotide
caacguuccgcuucagcau

SEQ ID NO: 159588 - RNA, 19 nt, Artificial Sequence
  Description of Artificial Sequence: Synthetic oligonucleotide
guacgccauacccuacaua

SEQ ID NO: 159589 - RNA, 19 nt, Artificial Sequence
  Description of Artificial Sequence: Synthetic oligonucleotide
gccguucgcccgcagcggg

SEQ ID NO: 159590 - RNA, 19 nt, Artificial Sequence
  Description of Artificial Sequence: Synthetic oligonucleotide
cauaacuguggaggucgga

SEQ ID NO: 159591 - RNA, 19 nt, Artificial Sequence
  Description of Artificial Sequence: Synthetic oligonucleotide
gcagcuagagacugucaua

SEQ ID NO: 159592 - RNA, 19 nt, Artificial Sequence
  Description of Artificial Sequence: Synthetic oligonucleotide
gccauacccuacauaugug

SEQ ID NO: 159593 - RNA, 19 nt, Artificial Sequence
  Description of Artificial Sequence: Synthetic oligonucleotide
caccacuaaaacacagauu

SEQ ID NO: 159594 - RNA, 19 nt, Artificial Sequence
  Description of Artificial Sequence: Synthetic oligonucleotide
cugguuaaauaaggguuau

SEQ ID NO: 159595 - RNA, 19 nt, Artificial Sequence
  Description of Artificial Sequence: Synthetic oligonucleotide
gcgucuccugaaauacuug

SEQ ID NO: 159596 - RNA, 19 nt, Artificial Sequence
  Description of Artificial Sequence: Synthetic oligonucleotide
ggagggaguuuccuccucu

SEQ ID NO: 159597 - RNA, 19 nt, Artificial Sequence
  Description of Artificial Sequence: Synthetic oligonucleotide
ggcgagugcugcacacucc

SEQ ID NO: 159598 - RNA, 19 nt, Artificial Sequence
  Description of Artificial Sequence: Synthetic oligonucleotide
agccgacggcgugaguacu

SEQ ID NO: 159599 - RNA, 19 nt, Artificial Sequence
  Description of Artificial Sequence: Synthetic oligonucleotide
agcaaccaacauggguguu

SEQ ID NO: 159600 - RNA, 19 nt, Artificial Sequence
  Description of Artificial Sequence: Synthetic oligonucleotide
gccauaagucauagcagcu

SEQ ID NO: 159601 - RNA, 19 nt, Artificial Sequence
  Description of Artificial Sequence: Synthetic oligonucleotide
ggcgccaauuuuggcuggc

SEQ ID NO: 159602 - RNA, 19 nt, Artificial Sequence
  Description of Artificial Sequence: Synthetic oligonucleotide
cagacaaacagaggcuauu

SEQ ID NO: 159603 - RNA, 19 nt, Artificial Sequence
  Description of Artificial Sequence: Synthetic oligonucleotide
ccagccgacggcgugagua

SEQ ID NO: 159604 - RNA, 19 nt, Artificial Sequence
  Description of Artificial Sequence: Synthetic oligonucleotide
caccaacguuccgcuucag

SEQ ID NO: 159605 - RNA, 19 nt, Artificial Sequence
  Description of Artificial Sequence: Synthetic oligonucleotide
gggcuagaugggguaagaa

SEQ ID NO: 159606 - RNA, 19 nt, Artificial Sequence
  Description of Artificial Sequence: Synthetic oligonucleotide
gggccccaaugcugugugc

SEQ ID NO: 159607 - RNA, 19 nt, Artificial Sequence
  Description of Artificial Sequence: Synthetic oligonucleotide
ucccgacagucuggcuccu

SEQ ID NO: 159608 - RNA, 19 nt, Artificial Sequence
  Description of Artificial Sequence: Synthetic oligonucleotide
accagccgacggcgugagu

SEQ ID NO: 159609 - RNA, 19 nt, Artificial Sequence
  Description of Artificial Sequence: Synthetic oligonucleotide
ucccgcccaaaggcgccaa

SEQ ID NO: 159610 - RNA, 19 nt, Artificial Sequence
  Description of Artificial Sequence: Synthetic oligonucleotide
ggagagggccagugagucu

SEQ ID NO: 159611 - RNA, 19 nt, Artificial Sequence
  Description of Artificial Sequence: Synthetic oligonucleotide
ccguucgcccgcagcgggc

SEQ ID NO: 159612 - RNA, 19 nt, Artificial Sequence
  Description of Artificial Sequence: Synthetic oligonucleotide
cuuguccgagguugaccau

SEQ ID NO: 159613 - RNA, 19 nt, Artificial Sequence
  Description of Artificial Sequence: Synthetic oligonucleotide
guccgagguugaccauaaa

SEQ ID NO: 159614 - RNA, 19 nt, Artificial Sequence
  Description of Artificial Sequence: Synthetic oligonucleotide
gggucgguuccaguugucu

SEQ ID NO: 159615 - RNA, 19 nt, Artificial Sequence
  Description of Artificial Sequence: Synthetic oligonucleotide
gcccaaaggcgccaauuuu

SEQ ID NO: 159616 - RNA, 19 nt, Artificial Sequence
  Description of Artificial Sequence: Synthetic oligonucleotide
ggcgaacaauagacccuuc

SEQ ID NO: 159617 - RNA, 19 nt, Artificial Sequence
  Description of Artificial Sequence: Synthetic oligonucleotide
cuccucuagggagcaccaa

SEQ ID NO: 159618 - RNA, 19 nt, Artificial Sequence
  Description of Artificial Sequence: Synthetic oligonucleotide
ccgacggcgugaguacuuc

SEQ ID NO: 159619 - RNA, 19 nt, Artificial Sequence
  Description of Artificial Sequence: Synthetic oligonucleotide
aggcaccagccgacggcgu

SEQ ID NO: 159620 - RNA, 19 nt, Artificial Sequence
  Description of Artificial Sequence: Synthetic oligonucleotide
gccgcggcuguggcggugc

SEQ ID NO: 159621 - RNA, 19 nt, Artificial Sequence
  Description of Artificial Sequence: Synthetic oligonucleotide
ccucauguagagguuucgu

SEQ ID NO: 159622 - RNA, 19 nt, Artificial Sequence
  Description of Artificial Sequence: Synthetic oligonucleotide
gcgccaauuuuggcuggca

SEQ ID NO: 159623 - RNA, 19 nt, Artificial Sequence
  Description of Artificial Sequence: Synthetic oligonucleotide
cgacggcgugaguacuuca

SEQ ID NO: 159624 - RNA, 19 nt, Artificial Sequence
  Description of Artificial Sequence: Synthetic oligonucleotide
gccgacggcgugaguacuu

SEQ ID NO: 159625 - RNA, 19 nt, Artificial Sequence
  Description of Artificial Sequence: Synthetic oligonucleotide
cgcagccguucgcccgcag

SEQ ID NO: 159626 - RNA, 19 nt, Artificial Sequence
  Description of Artificial Sequence: Synthetic oligonucleotide
ccgcccaaaggcgccaauu

SEQ ID NO: 159627 - RNA, 19 nt, Artificial Sequence
  Description of Artificial Sequence: Synthetic oligonucleotide
aaccauuaaauauauuugg

SEQ ID NO: 159628 - RNA, 19 nt, Artificial Sequence
  Description of Artificial Sequence: Synthetic oligonucleotide
gaagcuauagcauuggcgg

SEQ ID NO: 159629 - RNA, 19 nt, Artificial Sequence
  Description of Artificial Sequence: Synthetic oligonucleotide
ucauagaaaacucuugugc

SEQ ID NO: 159630 - RNA, 19 nt, Artificial Sequence
  Description of Artificial Sequence: Synthetic oligonucleotide
uauuugguccccuagagug

SEQ ID NO: 159631 - RNA, 19 nt, Artificial Sequence
  Description of Artificial Sequence: Synthetic oligonucleotide
ugaagcuauagcauuggcg

SEQ ID NO: 159632 - RNA, 19 nt, Artificial Sequence
  Description of Artificial Sequence: Synthetic oligonucleotide
aacucuugugcccacuccc

SEQ ID NO: 159633 - RNA, 19 nt, Artificial Sequence
  Description of Artificial Sequence: Synthetic oligonucleotide
cauagaaaacucuugugcc

SEQ ID NO: 159634 - RNA, 19 nt, Artificial Sequence
  Description of Artificial Sequence: Synthetic oligonucleotide
agcuauuaaaaccuuuauc

SEQ ID NO: 159635 - RNA, 19 nt, Artificial Sequence
  Description of Artificial Sequence: Synthetic oligonucleotide
uuuuacaaucggaaggggc

SEQ ID NO: 159636 - RNA, 19 nt, Artificial Sequence
  Description of Artificial Sequence: Synthetic oligonucleotide
ugucagacugauuaaggag

SEQ ID NO: 159637 - RNA, 19 nt, Artificial Sequence
  Description of Artificial Sequence: Synthetic oligonucleotide
ugucuguugucucaggcag

SEQ ID NO: 159638 - RNA, 19 nt, Artificial Sequence
  Description of Artificial Sequence: Synthetic oligonucleotide
agcucauggacacucuugc

SEQ ID NO: 159639 - RNA, 19 nt, Artificial Sequence
  Description of Artificial Sequence: Synthetic oligonucleotide
cauuuuacaaucggaaggg

SEQ ID NO: 159640 - RNA, 19 nt, Artificial Sequence
  Description of Artificial Sequence: Synthetic oligonucleotide
aagguauggaggacuaugc

SEQ ID NO: 159641 - RNA, 19 nt, Artificial Sequence
  Description of Artificial Sequence: Synthetic oligonucleotide
ugccuuuccggacaagucg

SEQ ID NO: 159642 - RNA, 19 nt, Artificial Sequence
  Description of Artificial Sequence: Synthetic oligonucleotide
uuaaauauauuuggucccc

SEQ ID NO: 159643 - RNA, 19 nt, Artificial Sequence
  Description of Artificial Sequence: Synthetic oligonucleotide
cucaagaguagcuuuuacc

SEQ ID NO: 159644 - RNA, 19 nt, Artificial Sequence
  Description of Artificial Sequence: Synthetic oligonucleotide
aaacggcaagucuccacgc

SEQ ID NO: 159645 - RNA, 19 nt, Artificial Sequence
  Description of Artificial Sequence: Synthetic oligonucleotide
uauuuggcagagauggucu

SEQ ID NO: 159646 - RNA, 19 nt, Artificial Sequence
  Description of Artificial Sequence: Synthetic oligonucleotide
aacggcaagucuccacgcc

SEQ ID NO: 159647 - RNA, 19 nt, Artificial Sequence
  Description of Artificial Sequence: Synthetic oligonucleotide
cugacuucccgguucaugg

SEQ ID NO: 159648 - RNA, 19 nt, Artificial Sequence
  Description of Artificial Sequence: Synthetic oligonucleotide
ucccuuaaccauuaaauau

SEQ ID NO: 159649 - RNA, 19 nt, Artificial Sequence
  Description of Artificial Sequence: Synthetic oligonucleotide
gugacaacacuucuagagg

SEQ ID NO: 159650 - RNA, 19 nt, Artificial Sequence
  Description of Artificial Sequence: Synthetic oligonucleotide
uguguuacccugcuccucc

SEQ ID NO: 159651 - RNA, 19 nt, Artificial Sequence
  Description of Artificial Sequence: Synthetic oligonucleotide
auauuuggcagagaugguc

SEQ ID NO: 159652 - RNA, 19 nt, Artificial Sequence
  Description of Artificial Sequence: Synthetic oligonucleotide
aacgcgagugccccuuugc

SEQ ID NO: 159653 - RNA, 19 nt, Artificial Sequence
  Description of Artificial Sequence: Synthetic oligonucleotide
ugagcuauuaaaaccuuua

SEQ ID NO: 159654 - RNA, 19 nt, Artificial Sequence
  Description of Artificial Sequence: Synthetic oligonucleotide
aaaaccuugcuggucacug

SEQ ID NO: 159655 - RNA, 19 nt, Artificial Sequence
  Description of Artificial Sequence: Synthetic oligonucleotide
agcuuuuacccgcuuaguc

SEQ ID NO: 159656 - RNA, 19 nt, Artificial Sequence
  Description of Artificial Sequence: Synthetic oligonucleotide
caaacggcaagucuccacg

SEQ ID NO: 159657 - RNA, 19 nt, Artificial Sequence
  Description of Artificial Sequence: Synthetic oligonucleotide
uauucagcuggcuuggccu

SEQ ID NO: 159658 - RNA, 19 nt, Artificial Sequence
  Description of Artificial Sequence: Synthetic oligonucleotide
cuugcugucagacugauua

SEQ ID NO: 159659 - RNA, 19 nt, Artificial Sequence
  Description of Artificial Sequence: Synthetic oligonucleotide
gacuaugcagcagaggaag

SEQ ID NO: 159660 - RNA, 19 nt, Artificial Sequence
  Description of Artificial Sequence: Synthetic oligonucleotide
caagaguagcuuuuacccg

SEQ ID NO: 159661 - RNA, 19 nt, Artificial Sequence
  Description of Artificial Sequence: Synthetic oligonucleotide
cuuuuacccgcuuagucug

SEQ ID NO: 159662 - RNA, 19 nt, Artificial Sequence
  Description of Artificial Sequence: Synthetic oligonucleotide
uuuccggacaagucggcgg

SEQ ID NO: 159663 - RNA, 19 nt, Artificial Sequence
  Description of Artificial Sequence: Synthetic oligonucleotide
gguaucggauucuugaaag

SEQ ID NO: 159664 - RNA, 19 nt, Artificial Sequence
  Description of Artificial Sequence: Synthetic oligonucleotide
cuucucacgggccucagcc

SEQ ID NO: 159665 - RNA, 19 nt, Artificial Sequence
  Description of Artificial Sequence: Synthetic oligonucleotide
ucugaagcuauagcauugg

SEQ ID NO: 159666 - RNA, 19 nt, Artificial Sequence
  Description of Artificial Sequence: Synthetic oligonucleotide
guuuaucuggucaaucugc

SEQ ID NO: 159667 - RNA, 19 nt, Artificial Sequence
  Description of Artificial Sequence: Synthetic oligonucleotide
ucguugaucagcucugugu

SEQ ID NO: 159668 - RNA, 19 nt, Artificial Sequence
  Description of Artificial Sequence: Synthetic oligonucleotide
aacgacagugccuuuguuu

SEQ ID NO: 159669 - RNA, 19 nt, Artificial Sequence
  Description of Artificial Sequence: Synthetic oligonucleotide
ugauugcaacagcagagga

SEQ ID NO: 159670 - RNA, 19 nt, Artificial Sequence
  Description of Artificial Sequence: Synthetic oligonucleotide
agugccccuguucugcacc

SEQ ID NO: 159671 - RNA, 19 nt, Artificial Sequence
  Description of Artificial Sequence: Synthetic oligonucleotide
gauuggagacgcucugccg

SEQ ID NO: 159672 - RNA, 19 nt, Artificial Sequence
  Description of Artificial Sequence: Synthetic oligonucleotide
ucggauucuugaaagguau

SEQ ID NO: 159673 - RNA, 19 nt, Artificial Sequence
  Description of Artificial Sequence: Synthetic oligonucleotide
uuaaggagaccagucacac

SEQ ID NO: 159674 - RNA, 19 nt, Artificial Sequence
  Description of Artificial Sequence: Synthetic oligonucleotide
uuccggacaagucggcggg

SEQ ID NO: 159675 - RNA, 19 nt, Artificial Sequence
  Description of Artificial Sequence: Synthetic oligonucleotide
uaucggauucuugaaaggu

SEQ ID NO: 159676 - RNA, 19 nt, Artificial Sequence
  Description of Artificial Sequence: Synthetic oligonucleotide
ucaaugugagccuccagau

SEQ ID NO: 159677 - RNA, 19 nt, Artificial Sequence
  Description of Artificial Sequence: Synthetic oligonucleotide
uguagccgagucuuggucu

SEQ ID NO: 159678 - RNA, 19 nt, Artificial Sequence
  Description of Artificial Sequence: Synthetic oligonucleotide
aacuggggcaaaaccuugc

SEQ ID NO: 159679 - RNA, 19 nt, Artificial Sequence
  Description of Artificial Sequence: Synthetic oligonucleotide
uccagauuggagacgcucu

SEQ ID NO: 159680 - RNA, 19 nt, Artificial Sequence
  Description of Artificial Sequence: Synthetic oligonucleotide
agcgcagagaaguccuucg

SEQ ID NO: 159681 - RNA, 19 nt, Artificial Sequence
  Description of Artificial Sequence: Synthetic oligonucleotide
uuauuggcugugucaaugu

SEQ ID NO: 159682 - RNA, 19 nt, Artificial Sequence
  Description of Artificial Sequence: Synthetic oligonucleotide
agcaugacugcgcuccagg

SEQ ID NO: 159683 - RNA, 19 nt, Artificial Sequence
  Description of Artificial Sequence: Synthetic oligonucleotide
cuguuugccuucucaagag

SEQ ID NO: 159684 - RNA, 19 nt, Artificial Sequence
  Description of Artificial Sequence: Synthetic oligonucleotide
uuguuuccuucucacgggc

SEQ ID NO: 159685 - RNA, 19 nt, Artificial Sequence
  Description of Artificial Sequence: Synthetic oligonucleotide
uugaucagcucuguguuac

SEQ ID NO: 159686 - RNA, 19 nt, Artificial Sequence
  Description of Artificial Sequence: Synthetic oligonucleotide
aagccaaugcccucaguaa

SEQ ID NO: 159687 - RNA, 19 nt, Artificial Sequence
  Description of Artificial Sequence: Synthetic oligonucleotide
aagucccuuaaccauuaaa

SEQ ID NO: 159688 - RNA, 19 nt, Artificial Sequence
  Description of Artificial Sequence: Synthetic oligonucleotide
cugcgugaggcauuggccc

SEQ ID NO: 159689 - RNA, 19 nt, Artificial Sequence
  Description of Artificial Sequence: Synthetic oligonucleotide
cuagagugcugggagaagc

SEQ ID NO: 159690 - RNA, 19 nt, Artificial Sequence
  Description of Artificial Sequence: Synthetic oligonucleotide
ucgucagccagcucguccc

SEQ ID NO: 159691 - RNA, 19 nt, Artificial Sequence
  Description of Artificial Sequence: Synthetic oligonucleotide
uucgugagcuugcuggacu

SEQ ID NO: 159692 - RNA, 19 nt, Artificial Sequence
  Description of Artificial Sequence: Synthetic oligonucleotide
gacacauuuuacaaucgga

SEQ ID NO: 159693 - RNA, 19 nt, Artificial Sequence
  Description of Artificial Sequence: Synthetic oligonucleotide
auuugguccccuagagugc

SEQ ID NO: 159694 - RNA, 19 nt, Artificial Sequence
  Description of Artificial Sequence: Synthetic oligonucleotide
uuacaaucggaaggggcag

SEQ ID NO: 159695 - RNA, 19 nt, Artificial Sequence
  Description of Artificial Sequence: Synthetic oligonucleotide
accauuaaauauauuuggu

SEQ ID NO: 159696 - RNA, 19 nt, Artificial Sequence
  Description of Artificial Sequence: Synthetic oligonucleotide
ugagcgcuguuuccucucg

SEQ ID NO: 159697 - RNA, 19 nt, Artificial Sequence
  Description of Artificial Sequence: Synthetic oligonucleotide
uguuuccuucucacgggcc

SEQ ID NO: 159698 - RNA, 19 nt, Artificial Sequence
  Description of Artificial Sequence: Synthetic oligonucleotide
gucgccagugccuuuccgg

SEQ ID NO: 159699 - RNA, 19 nt, Artificial Sequence
  Description of Artificial Sequence: Synthetic oligonucleotide
acgcgagugccccuuugcc

SEQ ID NO: 159700 - RNA, 19 nt, Artificial Sequence
  Description of Artificial Sequence: Synthetic oligonucleotide
ucgcucauucuccaggguc

SEQ ID NO: 159701 - RNA, 19 nt, Artificial Sequence
  Description of Artificial Sequence: Synthetic oligonucleotide
aagauccuauucagcuggc

SEQ ID NO: 159702 - RNA, 19 nt, Artificial Sequence
  Description of Artificial Sequence: Synthetic oligonucleotide
cuggcguucgagcugcugc

SEQ ID NO: 159703 - RNA, 19 nt, Artificial Sequence
  Description of Artificial Sequence: Synthetic oligonucleotide
uguuggccuuuccagugug

SEQ ID NO: 159704 - RNA, 19 nt, Artificial Sequence
  Description of Artificial Sequence: Synthetic oligonucleotide
ggccugagcuauuaaaacc

SEQ ID NO: 159705 - RNA, 19 nt, Artificial Sequence
  Description of Artificial Sequence: Synthetic oligonucleotide
auagucugcccucggcaag

SEQ ID NO: 159706 - RNA, 19 nt, Artificial Sequence
  Description of Artificial Sequence: Synthetic oligonucleotide
uugguaucggauucuugaa

SEQ ID NO: 159707 - RNA, 19 nt, Artificial Sequence
  Description of Artificial Sequence: Synthetic oligonucleotide
uuuuacccgcuuagucugc

SEQ ID NO: 159708 - RNA, 19 nt, Artificial Sequence
  Description of Artificial Sequence: Synthetic oligonucleotide
ucuguguuacccugcuccu

SEQ ID NO: 159709 - RNA, 19 nt, Artificial Sequence
  Description of Artificial Sequence: Synthetic oligonucleotide
gacaacacuucuagagggc

SEQ ID NO: 159710 - RNA, 19 nt, Artificial Sequence
  Description of Artificial Sequence: Synthetic oligonucleotide
ucgguguuuaucuggucaa

SEQ ID NO: 159711 - RNA, 19 nt, Artificial Sequence
  Description of Artificial Sequence: Synthetic oligonucleotide
ucucccucgcugaacuuga

SEQ ID NO: 159712 - RNA, 19 nt, Artificial Sequence
  Description of Artificial Sequence: Synthetic oligonucleotide
agcgcuguuuccucucguc

SEQ ID NO: 159713 - RNA, 19 nt, Artificial Sequence
  Description of Artificial Sequence: Synthetic oligonucleotide
cuguucugcacccagcaca

SEQ ID NO: 159714 - RNA, 19 nt, Artificial Sequence
  Description of Artificial Sequence: Synthetic oligonucleotide
cacuugacacauuuuacaa

SEQ ID NO: 159715 - RNA, 19 nt, Artificial Sequence
  Description of Artificial Sequence: Synthetic oligonucleotide
agguauggaggacuaugca

SEQ ID NO: 159716 - RNA, 19 nt, Artificial Sequence
  Description of Artificial Sequence: Synthetic oligonucleotide
ugcccugucugguugcccc

SEQ ID NO: 159717 - RNA, 19 nt, Artificial Sequence
  Description of Artificial Sequence: Synthetic oligonucleotide
uagucugcccucggcaagg

SEQ ID NO: 159718 - RNA, 19 nt, Artificial Sequence
  Description of Artificial Sequence: Synthetic oligonucleotide
cugaagcuauagcauuggc

SEQ ID NO: 159719 - RNA, 19 nt, Artificial Sequence
  Description of Artificial Sequence: Synthetic oligonucleotide
aucugaagcuauagcauug

SEQ ID NO: 159720 - RNA, 19 nt, Artificial Sequence
  Description of Artificial Sequence: Synthetic oligonucleotide
uuugguccccuagagugcu

SEQ ID NO: 159721 - RNA, 19 nt, Artificial Sequence
  Description of Artificial Sequence: Synthetic oligonucleotide
auugagcgcuguuuccucu

SEQ ID NO: 159722 - RNA, 19 nt, Artificial Sequence
  Description of Artificial Sequence: Synthetic oligonucleotide
cuuugguaucggauucuug

SEQ ID NO: 159723 - RNA, 19 nt, Artificial Sequence
  Description of Artificial Sequence: Synthetic oligonucleotide
aguagcuuuuacccgcuua

SEQ ID NO: 159724 - RNA, 19 nt, Artificial Sequence
  Description of Artificial Sequence: Synthetic oligonucleotide
ggcgggucaccacaaacgg

SEQ ID NO: 159725 - RNA, 19 nt, Artificial Sequence
  Description of Artificial Sequence: Synthetic oligonucleotide
ucccucgcugaacuugacc

SEQ ID NO: 159726 - RNA, 19 nt, Artificial Sequence
  Description of Artificial Sequence: Synthetic oligonucleotide
uggacucuuugguaucgga

SEQ ID NO: 159727 - RNA, 19 nt, Artificial Sequence
  Description of Artificial Sequence: Synthetic oligonucleotide
ugcggaacugcuuguugac

SEQ ID NO: 159728 - RNA, 19 nt, Artificial Sequence
  Description of Artificial Sequence: Synthetic oligonucleotide
agcuaggagcuggucaaac

SEQ ID NO: 159729 - RNA, 19 nt, Artificial Sequence
  Description of Artificial Sequence: Synthetic oligonucleotide
cauucucguucuucugagc

SEQ ID NO: 159730 - RNA, 19 nt, Artificial Sequence
  Description of Artificial Sequence: Synthetic oligonucleotide
ucuccacgccucaauuugu

SEQ ID NO: 159731 - RNA, 19 nt, Artificial Sequence
  Description of Artificial Sequence: Synthetic oligonucleotide
acuggggcaaaaccuugcu

SEQ ID NO: 159732 - RNA, 19 nt, Artificial Sequence
  Description of Artificial Sequence: Synthetic oligonucleotide
ugccgggauagucugcccu

SEQ ID NO: 159733 - RNA, 19 nt, Artificial Sequence
  Description of Artificial Sequence: Synthetic oligonucleotide
ggagaguuccccgagugcc

SEQ ID NO: 159734 - RNA, 19 nt, Artificial Sequence
  Description of Artificial Sequence: Synthetic oligonucleotide
ucggcgggucaccacaaac

SEQ ID NO: 159735 - RNA, 19 nt, Artificial Sequence
  Description of Artificial Sequence: Synthetic oligonucleotide
cuuuccggacaagucggcg

SEQ ID NO: 159736 - RNA, 19 nt, Artificial Sequence
  Description of Artificial Sequence: Synthetic oligonucleotide
gcuucaagcggguggacgc

SEQ ID NO: 159737 - RNA, 19 nt, Artificial Sequence
  Description of Artificial Sequence: Synthetic oligonucleotide
ugacuucccgguucauggc

SEQ ID NO: 159738 - RNA, 19 nt, Artificial Sequence
  Description of Artificial Sequence: Synthetic oligonucleotide
uggcguucgagcugcugcc

SEQ ID NO: 159739 - RNA, 19 nt, Artificial Sequence
  Description of Artificial Sequence: Synthetic oligonucleotide
gacuccagcgcagagaagu

SEQ ID NO: 159740 - RNA, 19 nt, Artificial Sequence
  Description of Artificial Sequence: Synthetic oligonucleotide
acaaucggaaggggcagag

SEQ ID NO: 159741 - RNA, 19 nt, Artificial Sequence
  Description of Artificial Sequence: Synthetic oligonucleotide
uccucgagggcccgggcca

SEQ ID NO: 159742 - RNA, 19 nt, Artificial Sequence
  Description of Artificial Sequence: Synthetic oligonucleotide
acggcaagucuccacgccu

SEQ ID NO: 159743 - RNA, 19 nt, Artificial Sequence
  Description of Artificial Sequence: Synthetic oligonucleotide
gcauucucguucuucugag

SEQ ID NO: 159744 - RNA, 19 nt, Artificial Sequence
  Description of Artificial Sequence: Synthetic oligonucleotide
uggccugcaagucccuuaa

SEQ ID NO: 159745 - RNA, 19 nt, Artificial Sequence
  Description of Artificial Sequence: Synthetic oligonucleotide
cugcccucggcaagggagg

SEQ ID NO: 159746 - RNA, 19 nt, Artificial Sequence
  Description of Artificial Sequence: Synthetic oligonucleotide
caaugcccucaguaaggcc

SEQ ID NO: 159747 - RNA, 19 nt, Artificial Sequence
  Description of Artificial Sequence: Synthetic oligonucleotide
cuacccggaagggaauggg

SEQ ID NO: 159748 - RNA, 19 nt, Artificial Sequence
  Description of Artificial Sequence: Synthetic oligonucleotide
uucuuccgugccgccaugg

SEQ ID NO: 159749 - RNA, 19 nt, Artificial Sequence
  Description of Artificial Sequence: Synthetic oligonucleotide
cauuccuccgcucgucuuc

SEQ ID NO: 159750 - RNA, 19 nt, Artificial Sequence
  Description of Artificial Sequence: Synthetic oligonucleotide
cauugagcgcuguuuccuc

SEQ ID NO: 159751 - RNA, 19 nt, Artificial Sequence
  Description of Artificial Sequence: Synthetic oligonucleotide
gccaccggaaggcuguugg

SEQ ID NO: 159752 - RNA, 19 nt, Artificial Sequence
  Description of Artificial Sequence: Synthetic oligonucleotide
augugacaacacuucuaga

SEQ ID NO: 159753 - RNA, 19 nt, Artificial Sequence
  Description of Artificial Sequence: Synthetic oligonucleotide
uggcgcuuagcacgcucag

SEQ ID NO: 159754 - RNA, 19 nt, Artificial Sequence
  Description of Artificial Sequence: Synthetic oligonucleotide
agucgccagugccuuuccg

SEQ ID NO: 159755 - RNA, 19 nt, Artificial Sequence
  Description of Artificial Sequence: Synthetic oligonucleotide
cagauuggagacgcucugc

SEQ ID NO: 159756 - RNA, 19 nt, Artificial Sequence
  Description of Artificial Sequence: Synthetic oligonucleotide
cuguagccgagucuugguc

SEQ ID NO: 159757 - RNA, 19 nt, Artificial Sequence
  Description of Artificial Sequence: Synthetic oligonucleotide
uugcugucagacugauuaa

SEQ ID NO: 159758 - RNA, 19 nt, Artificial Sequence
  Description of Artificial Sequence: Synthetic oligonucleotide
ggcagaucugaagcuauag

SEQ ID NO: 159759 - RNA, 19 nt, Artificial Sequence
  Description of Artificial Sequence: Synthetic oligonucleotide
uucucgguccggcgcaccu

SEQ ID NO: 159760 - RNA, 19 nt, Artificial Sequence
  Description of Artificial Sequence: Synthetic oligonucleotide
agucuccacgccucaauuu

SEQ ID NO: 159761 - RNA, 19 nt, Artificial Sequence
  Description of Artificial Sequence: Synthetic oligonucleotide
ggauagucugcccucggca

SEQ ID NO: 159762 - RNA, 19 nt, Artificial Sequence
  Description of Artificial Sequence: Synthetic oligonucleotide
auggacacucuugcccacg

SEQ ID NO: 159763 - RNA, 19 nt, Artificial Sequence
  Description of Artificial Sequence: Synthetic oligonucleotide
ccacaaacggcaagucucc

SEQ ID NO: 159764 - RNA, 19 nt, Artificial Sequence
  Description of Artificial Sequence: Synthetic oligonucleotide
uuuacccgcuuagucugcu

SEQ ID NO: 159765 - RNA, 19 nt, Artificial Sequence
  Description of Artificial Sequence: Synthetic oligonucleotide
cuuagcacgcucagcagcu

SEQ ID NO: 159766 - RNA, 19 nt, Artificial Sequence
  Description of Artificial Sequence: Synthetic oligonucleotide
uuucuuccgugccgccaug

SEQ ID NO: 159767 - RNA, 19 nt, Artificial Sequence
  Description of Artificial Sequence: Synthetic oligonucleotide
ucugcauauuuggcagaga

SEQ ID NO: 159768 - RNA, 19 nt, Artificial Sequence
  Description of Artificial Sequence: Synthetic oligonucleotide
uccacgccucaauuuguuc

SEQ ID NO: 159769 - RNA, 19 nt, Artificial Sequence
  Description of Artificial Sequence: Synthetic oligonucleotide
uacaaucggaaggggcaga

SEQ ID NO: 159770 - RNA, 19 nt, Artificial Sequence
  Description of Artificial Sequence: Synthetic oligonucleotide
ucagccggucguugaucag

SEQ ID NO: 159771 - RNA, 19 nt, Artificial Sequence
  Description of Artificial Sequence: Synthetic oligonucleotide
ugcuacccggaagggaaug

SEQ ID NO: 159772 - RNA, 19 nt, Artificial Sequence
  Description of Artificial Sequence: Synthetic oligonucleotide
aggcggagccgucugucug

SEQ ID NO: 159773 - RNA, 19 nt, Artificial Sequence
  Description of Artificial Sequence: Synthetic oligonucleotide
gccuuuccggacaagucgg

SEQ ID NO: 159774 - RNA, 19 nt, Artificial Sequence
  Description of Artificial Sequence: Synthetic oligonucleotide
acaauccauguggaaggca

SEQ ID NO: 159775 - RNA, 19 nt, Artificial Sequence
  Description of Artificial Sequence: Synthetic oligonucleotide
cagcaagaccuucaccuca

SEQ ID NO: 159776 - RNA, 19 nt, Artificial Sequence
  Description of Artificial Sequence: Synthetic oligonucleotide
cagacugauuaaggagacc

SEQ ID NO: 159777 - RNA, 19 nt, Artificial Sequence
  Description of Artificial Sequence: Synthetic oligonucleotide
ggggagaguuccccgagug

SEQ ID NO: 159778 - RNA, 19 nt, Artificial Sequence
  Description of Artificial Sequence: Synthetic oligonucleotide
ucaccacaaacggcaaguc

SEQ ID NO: 159779 - RNA, 19 nt, Artificial Sequence
  Description of Artificial Sequence: Synthetic oligonucleotide
aucggauucuugaaaggua

SEQ ID NO: 159780 - RNA, 19 nt, Artificial Sequence
  Description of Artificial Sequence: Synthetic oligonucleotide
gacaagucggcgggucacc

SEQ ID NO: 159781 - RNA, 19 nt, Artificial Sequence
  Description of Artificial Sequence: Synthetic oligonucleotide
cuucaagcggguggacgcc

SEQ ID NO: 159782 - RNA, 19 nt, Artificial Sequence
  Description of Artificial Sequence: Synthetic oligonucleotide
cccuuaaccauuaaauaua

SEQ ID NO: 159783 - RNA, 19 nt, Artificial Sequence
  Description of Artificial Sequence: Synthetic oligonucleotide
caaucggaaggggcagagg

SEQ ID NO: 159784 - RNA, 19 nt, Artificial Sequence
  Description of Artificial Sequence: Synthetic oligonucleotide
ucgugagcuugcuggacuu

SEQ ID NO: 159785 - RNA, 19 nt, Artificial Sequence
  Description of Artificial Sequence: Synthetic oligonucleotide
gggacuccagcgcagagaa

SEQ ID NO: 159786 - RNA, 19 nt, Artificial Sequence
  Description of Artificial Sequence: Synthetic oligonucleotide
agcuuucugcgugaggcau

SEQ ID NO: 159787 - RNA, 19 nt, Artificial Sequence
  Description of Artificial Sequence: Synthetic oligonucleotide
gcgagugccccuuugccac

SEQ ID NO: 159788 - RNA, 19 nt, Artificial Sequence
  Description of Artificial Sequence: Synthetic oligonucleotide
ugccgcgcauucucguucu

SEQ ID NO: 159789 - RNA, 19 nt, Artificial Sequence
  Description of Artificial Sequence: Synthetic oligonucleotide
cugcucggcauuccuccgc

SEQ ID NO: 159790 - RNA, 19 nt, Artificial Sequence
  Description of Artificial Sequence: Synthetic oligonucleotide
uucaagcggguggacgccu

SEQ ID NO: 159791 - RNA, 19 nt, Artificial Sequence
  Description of Artificial Sequence: Synthetic oligonucleotide
ucgggaggcgcgcguguca

SEQ ID NO: 159792 - RNA, 19 nt, Artificial Sequence
  Description of Artificial Sequence: Synthetic oligonucleotide
ucuccagauuggagacgcu

SEQ ID NO: 159793 - RNA, 19 nt, Artificial Sequence
  Description of Artificial Sequence: Synthetic oligonucleotide
gcucccgcaugccaagucc

SEQ ID NO: 159794 - RNA, 19 nt, Artificial Sequence
  Description of Artificial Sequence: Synthetic oligonucleotide
gggauagucugcccucggc

SEQ ID NO: 159795 - RNA, 19 nt, Artificial Sequence
  Description of Artificial Sequence: Synthetic oligonucleotide
uuagcacgcucagcagcug

SEQ ID NO: 159796 - RNA, 19 nt, Artificial Sequence
  Description of Artificial Sequence: Synthetic oligonucleotide
gcauuggcggugcagcuca

SEQ ID NO: 159797 - RNA, 19 nt, Artificial Sequence
  Description of Artificial Sequence: Synthetic oligonucleotide
gguccggcgcaccuguuug

SEQ ID NO: 159798 - RNA, 19 nt, Artificial Sequence
  Description of Artificial Sequence: Synthetic oligonucleotide
acccgcuuagucugcucca

SEQ ID NO: 159799 - RNA, 19 nt, Artificial Sequence
  Description of Artificial Sequence: Synthetic oligonucleotide
guugaucagcucuguguua

SEQ ID NO: 159800 - RNA, 19 nt, Artificial Sequence
  Description of Artificial Sequence: Synthetic oligonucleotide
ucucgggaggcgcgcgugu

SEQ ID NO: 159801 - RNA, 19 nt, Artificial Sequence
  Description of Artificial Sequence: Synthetic oligonucleotide
guccggcgcaccuguuugg

SEQ ID NO: 159802 - RNA, 19 nt, Artificial Sequence
  Description of Artificial Sequence: Synthetic oligonucleotide
gcuauagcauuggcggugc

SEQ ID NO: 159803 - RNA, 19 nt, Artificial Sequence
  Description of Artificial Sequence: Synthetic oligonucleotide
gcggguggacgccuugucg

SEQ ID NO: 159804 - RNA, 19 nt, Artificial Sequence
  Description of Artificial Sequence: Synthetic oligonucleotide
ucguucuucugagcaugac

SEQ ID NO: 159805 - RNA, 19 nt, Artificial Sequence
  Description of Artificial Sequence: Synthetic oligonucleotide
ccuuguauuuggacuugac

SEQ ID NO: 159806 - RNA, 19 nt, Artificial Sequence
  Description of Artificial Sequence: Synthetic oligonucleotide
ggaggcgcgcgugucaucc

SEQ ID NO: 159807 - RNA, 19 nt, Artificial Sequence
  Description of Artificial Sequence: Synthetic oligonucleotide
gcucauggacacucuugcc

SEQ ID NO: 159808 - RNA, 19 nt, Artificial Sequence
  Description of Artificial Sequence: Synthetic oligonucleotide
cucacgcugcagcuuucug

SEQ ID NO: 159809 - RNA, 19 nt, Artificial Sequence
  Description of Artificial Sequence: Synthetic oligonucleotide
guguccugaagcugggacu

SEQ ID NO: 159810 - RNA, 19 nt, Artificial Sequence
  Description of Artificial Sequence: Synthetic oligonucleotide
cuuugcccugcagcaagac

SEQ ID NO: 159811 - RNA, 19 nt, Artificial Sequence
  Description of Artificial Sequence: Synthetic oligonucleotide
uagagggccugagcuauua

SEQ ID NO: 159812 - RNA, 19 nt, Artificial Sequence
  Description of Artificial Sequence: Synthetic oligonucleotide
uuucugcgugaggcauugg

SEQ ID NO: 159813 - RNA, 19 nt, Artificial Sequence
  Description of Artificial Sequence: Synthetic oligonucleotide
aagcggguggacgccuugu

SEQ ID NO: 159814 - RNA, 19 nt, Artificial Sequence
  Description of Artificial Sequence: Synthetic oligonucleotide
gggagaguuccccgagugc

SEQ ID NO: 159815 - RNA, 19 nt, Artificial Sequence
  Description of Artificial Sequence: Synthetic oligonucleotide
uuacccgcuuagucugcuc

SEQ ID NO: 159816 - RNA, 19 nt, Artificial Sequence
  Description of Artificial Sequence: Synthetic oligonucleotide
cugccgcgcauucucguuc

SEQ ID NO: 159817 - RNA, 19 nt, Artificial Sequence
  Description of Artificial Sequence: Synthetic oligonucleotide
uugacccguuccagcucug

SEQ ID NO: 159818 - RNA, 19 nt, Artificial Sequence
  Description of Artificial Sequence: Synthetic oligonucleotide
ugguagguccccagcucuu

SEQ ID NO: 159819 - RNA, 19 nt, Artificial Sequence
  Description of Artificial Sequence: Synthetic oligonucleotide
acaagucggcgggucacca

SEQ ID NO: 159820 - RNA, 19 nt, Artificial Sequence
  Description of Artificial Sequence: Synthetic oligonucleotide
cccggaagggaauggggag

SEQ ID NO: 159821 - RNA, 19 nt, Artificial Sequence
  Description of Artificial Sequence: Synthetic oligonucleotide
uccggcgcaccuguuugga

SEQ ID NO: 159822 - RNA, 19 nt, Artificial Sequence
  Description of Artificial Sequence: Synthetic oligonucleotide
agcaagaccuucaccucau

SEQ ID NO: 159823 - RNA, 19 nt, Artificial Sequence
  Description of Artificial Sequence: Synthetic oligonucleotide
agccgucugucuguugucu

SEQ ID NO: 159824 - RNA, 19 nt, Artificial Sequence
  Description of Artificial Sequence: Synthetic oligonucleotide
gcuacccggaagggaaugg

SEQ ID NO: 159825 - RNA, 19 nt, Artificial Sequence
  Description of Artificial Sequence: Synthetic oligonucleotide
ggcaucggcugucucugug

SEQ ID NO: 159826 - RNA, 19 nt, Artificial Sequence
  Description of Artificial Sequence: Synthetic oligonucleotide
uggacgccuugucggccug

SEQ ID NO: 159827 - RNA, 19 nt, Artificial Sequence
  Description of Artificial Sequence: Synthetic oligonucleotide
guucgagcugcugccgcgc

SEQ ID NO: 159828 - RNA, 19 nt, Artificial Sequence
  Description of Artificial Sequence: Synthetic oligonucleotide
gagccgucugucuguuguc

SEQ ID NO: 159829 - RNA, 19 nt, Artificial Sequence
  Description of Artificial Sequence: Synthetic oligonucleotide
cgcgugucaucccagcucc

SEQ ID NO: 159830 - RNA, 19 nt, Artificial Sequence
  Description of Artificial Sequence: Synthetic oligonucleotide
cggcgggucaccacaaacg

SEQ ID NO: 159831 - RNA, 19 nt, Artificial Sequence
  Description of Artificial Sequence: Synthetic oligonucleotide
ucaagcggguggacgccuu

SEQ ID NO: 159832 - RNA, 19 nt, Artificial Sequence
  Description of Artificial Sequence: Synthetic oligonucleotide
ggagccgucugucuguugu

SEQ ID NO: 159833 - RNA, 19 nt, Artificial Sequence
  Description of Artificial Sequence: Synthetic oligonucleotide
aggcgcgcgugucauccca

SEQ ID NO: 159834 - RNA, 19 nt, Artificial Sequence
  Description of Artificial Sequence: Synthetic oligonucleotide
gccugagcuauuaaaaccu

SEQ ID NO: 159835 - RNA, 19 nt, Artificial Sequence
  Description of Artificial Sequence: Synthetic oligonucleotide
uccaacgcgagugccccuu

SEQ ID NO: 159836 - RNA, 19 nt, Artificial Sequence
  Description of Artificial Sequence: Synthetic oligonucleotide
ccuccgcucgucuuccacc

SEQ ID NO: 159837 - RNA, 19 nt, Artificial Sequence
  Description of Artificial Sequence: Synthetic oligonucleotide
acgcucucccucgcugaac

SEQ ID NO: 159838 - RNA, 19 nt, Artificial Sequence
  Description of Artificial Sequence: Synthetic oligonucleotide
cuguguuacccugcuccuc

SEQ ID NO: 159839 - RNA, 19 nt, Artificial Sequence
  Description of Artificial Sequence: Synthetic oligonucleotide
caagcggguggacgccuug

SEQ ID NO: 159840 - RNA, 19 nt, Artificial Sequence
  Description of Artificial Sequence: Synthetic oligonucleotide
caacgcgagugccccuuug

SEQ ID NO: 159841 - RNA, 19 nt, Artificial Sequence
  Description of Artificial Sequence: Synthetic oligonucleotide
gccaacgacagugccuuug

SEQ ID NO: 159842 - RNA, 19 nt, Artificial Sequence
  Description of Artificial Sequence: Synthetic oligonucleotide
gaggcgcgcgugucauccc

SEQ ID NO: 159843 - RNA, 19 nt, Artificial Sequence
  Description of Artificial Sequence: Synthetic oligonucleotide
ucccgcaugccaaguccuu

SEQ ID NO: 159844 - RNA, 19 nt, Artificial Sequence
  Description of Artificial Sequence: Synthetic oligonucleotide
cggcgcaccuguuuggagg

SEQ ID NO: 159845 - RNA, 19 nt, Artificial Sequence
  Description of Artificial Sequence: Synthetic oligonucleotide
cugagcuauuaaaaccuuu

SEQ ID NO: 159846 - RNA, 19 nt, Artificial Sequence
  Description of Artificial Sequence: Synthetic oligonucleotide
ggguggacgccuugucggc

SEQ ID NO: 159847 - RNA, 19 nt, Artificial Sequence
  Description of Artificial Sequence: Synthetic oligonucleotide
cauuggcggugcagcucag

SEQ ID NO: 159848 - RNA, 19 nt, Artificial Sequence
  Description of Artificial Sequence: Synthetic oligonucleotide
gcccgggccaacgacagug

SEQ ID NO: 159849 - RNA, 19 nt, Artificial Sequence
  Description of Artificial Sequence: Synthetic oligonucleotide
ccuuuccggacaagucggc

SEQ ID NO: 159850 - RNA, 19 nt, Artificial Sequence
  Description of Artificial Sequence: Synthetic oligonucleotide
ggacaagucggcgggucac

SEQ ID NO: 159851 - RNA, 19 nt, Artificial Sequence
  Description of Artificial Sequence: Synthetic oligonucleotide
gugccgggauagucugccc

SEQ ID NO: 159852 - RNA, 19 nt, Artificial Sequence
  Description of Artificial Sequence: Synthetic oligonucleotide
cccucgcugaacuugaccu

SEQ ID NO: 159853 - RNA, 19 nt, Artificial Sequence
  Description of Artificial Sequence: Synthetic oligonucleotide
cucccgguucuuauuggcu

SEQ ID NO: 159854 - RNA, 19 nt, Artificial Sequence
  Description of Artificial Sequence: Synthetic oligonucleotide
cucccucgcugaacuugac

SEQ ID NO: 159855 - RNA, 19 nt, Artificial Sequence
  Description of Artificial Sequence: Synthetic oligonucleotide
cguucgagcugcugccgcg

SEQ ID NO: 159856 - RNA, 19 nt, Artificial Sequence
  Description of Artificial Sequence: Synthetic oligonucleotide
ggcguucgagcugcugccg

SEQ ID NO: 159857 - RNA, 19 nt, Artificial Sequence
  Description of Artificial Sequence: Synthetic oligonucleotide
gcaugguagguccccagcu

SEQ ID NO: 159858 - RNA, 19 nt, Artificial Sequence
  Description of Artificial Sequence: Synthetic oligonucleotide
gcguucgagcugcugccgc

SEQ ID NO: 159859 - RNA, 19 nt, Artificial Sequence
  Description of Artificial Sequence: Synthetic oligonucleotide
gaggcggagccgucugucu

SEQ ID NO: 159860 - RNA, 19 nt, Artificial Sequence
  Description of Artificial Sequence: Synthetic oligonucleotide
cuucucgguccggcgcacc

SEQ ID NO: 159861 - RNA, 19 nt, Artificial Sequence
  Description of Artificial Sequence: Synthetic oligonucleotide
gcgcgugucaucccagcuc

SEQ ID NO: 159862 - RNA, 19 nt, Artificial Sequence
  Description of Artificial Sequence: Synthetic oligonucleotide
cucucgggaggcgcgcgug

SEQ ID NO: 159863 - RNA, 19 nt, Artificial Sequence
  Description of Artificial Sequence: Synthetic oligonucleotide
guagccgagucuuggucuu

SEQ ID NO: 159864 - RNA, 19 nt, Artificial Sequence
  Description of Artificial Sequence: Synthetic oligonucleotide
ugggcaaugcgggccucua

SEQ ID NO: 159865 - RNA, 19 nt, Artificial Sequence
  Description of Artificial Sequence: Synthetic oligonucleotide
uccggacaagucggcgggu

SEQ ID NO: 159866 - RNA, 19 nt, Artificial Sequence
  Description of Artificial Sequence: Synthetic oligonucleotide
caagucuccacgccucaau

SEQ ID NO: 159867 - RNA, 19 nt, Artificial Sequence
  Description of Artificial Sequence: Synthetic oligonucleotide
cuccgcucgucuuccaccu

SEQ ID NO: 159868 - RNA, 19 nt, Artificial Sequence
  Description of Artificial Sequence: Synthetic oligonucleotide
ccaccggaaggcuguuggc

SEQ ID NO: 159869 - RNA, 19 nt, Artificial Sequence
  Description of Artificial Sequence: Synthetic oligonucleotide
caugacugcgcuccagguu

SEQ ID NO: 159870 - RNA, 19 nt, Artificial Sequence
  Description of Artificial Sequence: Synthetic oligonucleotide
ggcgcuuagcacgcucagc

SEQ ID NO: 159871 - RNA, 19 nt, Artificial Sequence
  Description of Artificial Sequence: Synthetic oligonucleotide
ccggugccgggauagucug

SEQ ID NO: 159872 - RNA, 19 nt, Artificial Sequence
  Description of Artificial Sequence: Synthetic oligonucleotide
ggacuugcugucagacuga

SEQ ID NO: 159873 - RNA, 19 nt, Artificial Sequence
  Description of Artificial Sequence: Synthetic oligonucleotide
cucccgcaugccaaguccu

SEQ ID NO: 159874 - RNA, 19 nt, Artificial Sequence
  Description of Artificial Sequence: Synthetic oligonucleotide
ugccccuguucugcaccca

SEQ ID NO: 159875 - RNA, 19 nt, Artificial Sequence
  Description of Artificial Sequence: Synthetic oligonucleotide
cuguuggccuuuccagugu

SEQ ID NO: 159876 - RNA, 19 nt, Artificial Sequence
  Description of Artificial Sequence: Synthetic oligonucleotide
ccgggauagucugcccucg

SEQ ID NO: 159877 - RNA, 19 nt, Artificial Sequence
  Description of Artificial Sequence: Synthetic oligonucleotide
agccaccggaaggcuguug

SEQ ID NO: 159878 - RNA, 19 nt, Artificial Sequence
  Description of Artificial Sequence: Synthetic oligonucleotide
ccgcuuagucugcuccagc

SEQ ID NO: 159879 - RNA, 19 nt, Artificial Sequence
  Description of Artificial Sequence: Synthetic oligonucleotide
cucgggaggcgcgcguguc

SEQ ID NO: 159880 - RNA, 19 nt, Artificial Sequence
  Description of Artificial Sequence: Synthetic oligonucleotide
aggcagaucugaagcuaua

SEQ ID NO: 159881 - RNA, 19 nt, Artificial Sequence
  Description of Artificial Sequence: Synthetic oligonucleotide
agcagucgccagugccuuu

SEQ ID NO: 159882 - RNA, 19 nt, Artificial Sequence
  Description of Artificial Sequence: Synthetic oligonucleotide
cccgggccaacgacagugc

SEQ ID NO: 159883 - RNA, 19 nt, Artificial Sequence
  Description of Artificial Sequence: Synthetic oligonucleotide
agucggcgggucaccacaa

SEQ ID NO: 159884 - RNA, 19 nt, Artificial Sequence
  Description of Artificial Sequence: Synthetic oligonucleotide
gcccucaguaaggccuggg

SEQ ID NO: 159885 - RNA, 19 nt, Artificial Sequence
  Description of Artificial Sequence: Synthetic oligonucleotide
cacgcucucccucgcugaa

SEQ ID NO: 159886 - RNA, 19 nt, Artificial Sequence
  Description of Artificial Sequence: Synthetic oligonucleotide
ccuggcgcuuagcacgcuc

SEQ ID NO: 159887 - RNA, 19 nt, Artificial Sequence
  Description of Artificial Sequence: Synthetic oligonucleotide
cucgguccggcgcaccugu

SEQ ID NO: 159888 - RNA, 19 nt, Artificial Sequence
  Description of Artificial Sequence: Synthetic oligonucleotide
uggcgcuccuuggucucau

SEQ ID NO: 159889 - RNA, 19 nt, Artificial Sequence
  Description of Artificial Sequence: Synthetic oligonucleotide
gucaucccagcucccgcau

SEQ ID NO: 159890 - RNA, 19 nt, Artificial Sequence
  Description of Artificial Sequence: Synthetic oligonucleotide
cagccccgucugcuuugcc

SEQ ID NO: 159891 - RNA, 19 nt, Artificial Sequence
  Description of Artificial Sequence: Synthetic oligonucleotide
aagccaccggaaggcuguu

SEQ ID NO: 159892 - RNA, 19 nt, Artificial Sequence
  Description of Artificial Sequence: Synthetic oligonucleotide
cuccacgccucaauuuguu

SEQ ID NO: 159893 - RNA, 19 nt, Artificial Sequence
  Description of Artificial Sequence: Synthetic oligonucleotide
ggcauuccuccgcucgucu

SEQ ID NO: 159894 - RNA, 19 nt, Artificial Sequence
  Description of Artificial Sequence: Synthetic oligonucleotide
gcgcgcgugucaucccagc

SEQ ID NO: 159895 - RNA, 19 nt, Artificial Sequence
  Description of Artificial Sequence: Synthetic oligonucleotide
gcucugccgcugguggucc

SEQ ID NO: 159896 - RNA, 19 nt, Artificial Sequence
  Description of Artificial Sequence: Synthetic oligonucleotide
ggacgccuugucggccugg

SEQ ID NO: 159897 - RNA, 19 nt, Artificial Sequence
  Description of Artificial Sequence: Synthetic oligonucleotide
gccgcuggugguccagguc

SEQ ID NO: 159898 - RNA, 19 nt, Artificial Sequence
  Description of Artificial Sequence: Synthetic oligonucleotide
gucggcgggucaccacaaa

SEQ ID NO: 159899 - RNA, 19 nt, Artificial Sequence
  Description of Artificial Sequence: Synthetic oligonucleotide
cccgagugccccuguucug

SEQ ID NO: 159900 - RNA, 19 nt, Artificial Sequence
  Description of Artificial Sequence: Synthetic oligonucleotide
ccggcgcaccuguuuggag

SEQ ID NO: 159901 - RNA, 19 nt, Artificial Sequence
  Description of Artificial Sequence: Synthetic oligonucleotide
cgggauagucugcccucgg

SEQ ID NO: 159902 - RNA, 19 nt, Artificial Sequence
  Description of Artificial Sequence: Synthetic oligonucleotide
gacgccuugucggccuggu

SEQ ID NO: 159903 - RNA, 19 nt, Artificial Sequence
  Description of Artificial Sequence: Synthetic oligonucleotide
ccgguucuuauuggcugug

SEQ ID NO: 159904 - RNA, 19 nt, Artificial Sequence
  Description of Artificial Sequence: Synthetic oligonucleotide
ggccugcaagucccuuaac

SEQ ID NO: 159905 - RNA, 19 nt, Artificial Sequence
  Description of Artificial Sequence: Synthetic oligonucleotide
ggcgcgcgugucaucccag

SEQ ID NO: 159906 - RNA, 19 nt, Artificial Sequence
  Description of Artificial Sequence: Synthetic oligonucleotide
gugccccuuugccacugcu

SEQ ID NO: 159907 - RNA, 19 nt, Artificial Sequence
  Description of Artificial Sequence: Synthetic oligonucleotide
ccaacgacagugccuuugu

SEQ ID NO: 159908 - RNA, 19 nt, Artificial Sequence
  Description of Artificial Sequence: Synthetic oligonucleotide
cccuagagugcugggagaa

SEQ ID NO: 159909 - RNA, 19 nt, Artificial Sequence
  Description of Artificial Sequence: Synthetic oligonucleotide
cgcgagugccccuuugcca

SEQ ID NO: 159910 - RNA, 19 nt, Artificial Sequence
  Description of Artificial Sequence: Synthetic oligonucleotide
cauccucuaccugcucgcu

SEQ ID NO: 159911 - RNA, 19 nt, Artificial Sequence
  Description of Artificial Sequence: Synthetic oligonucleotide
gccgagucuuggucuucuc

SEQ ID NO: 159912 - RNA, 19 nt, Artificial Sequence
  Description of Artificial Sequence: Synthetic oligonucleotide
ccccuagagugcugggaga

SEQ ID NO: 159913 - RNA, 19 nt, Artificial Sequence
  Description of Artificial Sequence: Synthetic oligonucleotide
cuggcgcuccuuggucuca

SEQ ID NO: 159914 - RNA, 19 nt, Artificial Sequence
  Description of Artificial Sequence: Synthetic oligonucleotide
cccucggcaagggagggaa

SEQ ID NO: 159915 - RNA, 19 nt, Artificial Sequence
  Description of Artificial Sequence: Synthetic oligonucleotide
ccgcgcauucucguucuuc

SEQ ID NO: 159916 - RNA, 19 nt, Artificial Sequence
  Description of Artificial Sequence: Synthetic oligonucleotide
ggucguugaucagcucugu

SEQ ID NO: 159917 - RNA, 19 nt, Artificial Sequence
  Description of Artificial Sequence: Synthetic oligonucleotide
cccgguucuuauuggcugu

SEQ ID NO: 159918 - RNA, 19 nt, Artificial Sequence
  Description of Artificial Sequence: Synthetic oligonucleotide
cucuaccugcucgcuccaa

SEQ ID NO: 159919 - RNA, 19 nt, Artificial Sequence
  Description of Artificial Sequence: Synthetic oligonucleotide
ccccgagugccccuguucu

SEQ ID NO: 159920 - RNA, 19 nt, Artificial Sequence
  Description of Artificial Sequence: Synthetic oligonucleotide
gcgugucaucccagcuccc

SEQ ID NO: 159921 - RNA, 19 nt, Artificial Sequence
  Description of Artificial Sequence: Synthetic oligonucleotide
gccggucguugaucagcuc

SEQ ID NO: 159922 - RNA, 19 nt, Artificial Sequence
  Description of Artificial Sequence: Synthetic oligonucleotide
gggaggcgcgcgugucauc

SEQ ID NO: 159923 - RNA, 19 nt, Artificial Sequence
  Description of Artificial Sequence: Synthetic oligonucleotide
gugcuacccggaagggaau

SEQ ID NO: 159924 - RNA, 19 nt, Artificial Sequence
  Description of Artificial Sequence: Synthetic oligonucleotide
gcauuccuccgcucgucuu

SEQ ID NO: 159925 - RNA, 19 nt, Artificial Sequence
  Description of Artificial Sequence: Synthetic oligonucleotide
cauggccauugagcgcugu

SEQ ID NO: 159926 - RNA, 19 nt, Artificial Sequence
  Description of Artificial Sequence: Synthetic oligonucleotide
cggugccgggauagucugc

SEQ ID NO: 159927 - RNA, 19 nt, Artificial Sequence
  Description of Artificial Sequence: Synthetic oligonucleotide
cuccaacgcgagugccccu

SEQ ID NO: 159928 - RNA, 19 nt, Artificial Sequence
  Description of Artificial Sequence: Synthetic oligonucleotide
ccucuaccugcucgcucca

SEQ ID NO: 159929 - RNA, 19 nt, Artificial Sequence
  Description of Artificial Sequence: Synthetic oligonucleotide
gcugccgcgcauucucguu

SEQ ID NO: 159930 - RNA, 19 nt, Artificial Sequence
  Description of Artificial Sequence: Synthetic oligonucleotide
cgagugccccuguucugca

SEQ ID NO: 159931 - RNA, 19 nt, Artificial Sequence
  Description of Artificial Sequence: Synthetic oligonucleotide
gcucacgcugcagcuuucu

SEQ ID NO: 159932 - RNA, 19 nt, Artificial Sequence
  Description of Artificial Sequence: Synthetic oligonucleotide
cggcauuccuccgcucguc

SEQ ID NO: 159933 - RNA, 19 nt, Artificial Sequence
  Description of Artificial Sequence: Synthetic oligonucleotide
cggagccgucugucuguug

SEQ ID NO: 159934 - RNA, 19 nt, Artificial Sequence
  Description of Artificial Sequence: Synthetic oligonucleotide
cgcgcgugucaucccagcu

SEQ ID NO: 159935 - RNA, 19 nt, Artificial Sequence
  Description of Artificial Sequence: Synthetic oligonucleotide
cgguucuuauuggcugugu

SEQ ID NO: 159936 - RNA, 19 nt, Artificial Sequence
  Description of Artificial Sequence: Synthetic oligonucleotide
cgagugccccuuugccacu

SEQ ID NO: 159937 - RNA, 19 nt, Artificial Sequence
  Description of Artificial Sequence: Synthetic oligonucleotide
ccaacgcgagugccccuuu

SEQ ID NO: 159938 - RNA, 19 nt, Artificial Sequence
  Description of Artificial Sequence: Synthetic oligonucleotide
cgggaggcgcgcgugucau

SEQ ID NO: 159939 - RNA, 19 nt, Artificial Sequence
  Description of Artificial Sequence: Synthetic oligonucleotide
uugguuaugacagagaggc

SEQ ID NO: 159940 - RNA, 19 nt, Artificial Sequence
  Description of Artificial Sequence: Synthetic oligonucleotide
uugaauuaggaguaggcgg

SEQ ID NO: 159941 - RNA, 19 nt, Artificial Sequence
  Description of Artificial Sequence: Synthetic oligonucleotide
ugaagauaaggucugcccg

SEQ ID NO: 159942 - RNA, 19 nt, Artificial Sequence
  Description of Artificial Sequence: Synthetic oligonucleotide
uguguuagcggaaggaccg

SEQ ID NO: 159943 - RNA, 19 nt, Artificial Sequence
  Description of Artificial Sequence: Synthetic oligonucleotide
uucacuaucgaaacuucgg

SEQ ID NO: 159944 - RNA, 19 nt, Artificial Sequence
  Description of Artificial Sequence: Synthetic oligonucleotide
uguagcaauuucaaagucc

SEQ ID NO: 159945 - RNA, 19 nt, Artificial Sequence
  Description of Artificial Sequence: Synthetic oligonucleotide
aaacagacgcuccaggaag

SEQ ID NO: 159946 - RNA, 19 nt, Artificial Sequence
  Description of Artificial Sequence: Synthetic oligonucleotide
ucaaacacgaagauucggc

SEQ ID NO: 159947 - RNA, 19 nt, Artificial Sequence
  Description of Artificial Sequence: Synthetic oligonucleotide
uguaaugggaccagcuccg

SEQ ID NO: 159948 - RNA, 19 nt, Artificial Sequence
  Description of Artificial Sequence: Synthetic oligonucleotide
ucacuaucgaaacuucggg

SEQ ID NO: 159949 - RNA, 19 nt, Artificial Sequence
  Description of Artificial Sequence: Synthetic oligonucleotide
ugaauuaggaguaggcggu

SEQ ID NO: 159950 - RNA, 19 nt, Artificial Sequence
  Description of Artificial Sequence: Synthetic oligonucleotide
agaaccgaaacaaaggauc

SEQ ID NO: 159951 - RNA, 19 nt, Artificial Sequence
  Description of Artificial Sequence: Synthetic oligonucleotide
aaaagucggaagcaggcgu

SEQ ID NO: 159952 - RNA, 19 nt, Artificial Sequence
  Description of Artificial Sequence: Synthetic oligonucleotide
aaaaguccaucuuuacuca

SEQ ID NO: 159953 - RNA, 19 nt, Artificial Sequence
  Description of Artificial Sequence: Synthetic oligonucleotide
gaaacuucggguuguaaac

SEQ ID NO: 159954 - RNA, 19 nt, Artificial Sequence
  Description of Artificial Sequence: Synthetic oligonucleotide
agagguacgguacagucug

SEQ ID NO: 159955 - RNA, 19 nt, Artificial Sequence
  Description of Artificial Sequence: Synthetic oligonucleotide
ugugagaugcucuggagcu

SEQ ID NO: 159956 - RNA, 19 nt, Artificial Sequence
  Description of Artificial Sequence: Synthetic oligonucleotide
cuugaauuaggaguaggcg

SEQ ID NO: 159957 - RNA, 19 nt, Artificial Sequence
  Description of Artificial Sequence: Synthetic oligonucleotide
gaucuuaucaggugagaug

SEQ ID NO: 159958 - RNA, 19 nt, Artificial Sequence
  Description of Artificial Sequence: Synthetic oligonucleotide
aacuucggguuguaaacag

SEQ ID NO: 159959 - RNA, 19 nt, Artificial Sequence
  Description of Artificial Sequence: Synthetic oligonucleotide
agcgacaacuuguuguugg

SEQ ID NO: 159960 - RNA, 19 nt, Artificial Sequence
  Description of Artificial Sequence: Synthetic oligonucleotide
ucgaggaagaacugcagug

SEQ ID NO: 159961 - RNA, 19 nt, Artificial Sequence
  Description of Artificial Sequence: Synthetic oligonucleotide
uggauuuuacuauuccaga

SEQ ID NO: 159962 - RNA, 19 nt, Artificial Sequence
  Description of Artificial Sequence: Synthetic oligonucleotide
aauucacuaucgaaacuuc

SEQ ID NO: 159963 - RNA, 19 nt, Artificial Sequence
  Description of Artificial Sequence: Synthetic oligonucleotide
aaguccgacacccacugga

SEQ ID NO: 159964 - RNA, 19 nt, Artificial Sequence
  Description of Artificial Sequence: Synthetic oligonucleotide
caaauagccaaacugcuca

SEQ ID NO: 159965 - RNA, 19 nt, Artificial Sequence
  Description of Artificial Sequence: Synthetic oligonucleotide
ucaacaugcccacuggcgu

SEQ ID NO: 159966 - RNA, 19 nt, Artificial Sequence
  Description of Artificial Sequence: Synthetic oligonucleotide
caaacacgaagauucggcc

SEQ ID NO: 159967 - RNA, 19 nt, Artificial Sequence
  Description of Artificial Sequence: Synthetic oligonucleotide
aauggcaauagaagugauc

SEQ ID NO: 159968 - RNA, 19 nt, Artificial Sequence
  Description of Artificial Sequence: Synthetic oligonucleotide
cuggauuugggguggagcc

SEQ ID NO: 159969 - RNA, 19 nt, Artificial Sequence
  Description of Artificial Sequence: Synthetic oligonucleotide
caagcuugaauucacuauc

SEQ ID NO: 159970 - RNA, 19 nt, Artificial Sequence
  Description of Artificial Sequence: Synthetic oligonucleotide
gaaagcgacaacuuguugu

SEQ ID NO: 159971 - RNA, 19 nt, Artificial Sequence
  Description of Artificial Sequence: Synthetic oligonucleotide
uugacccucucacugaagu

SEQ ID NO: 159972 - RNA, 19 nt, Artificial Sequence
  Description of Artificial Sequence: Synthetic oligonucleotide
acuggauaaccgucaugcc

SEQ ID NO: 159973 - RNA, 19 nt, Artificial Sequence
  Description of Artificial Sequence: Synthetic oligonucleotide
ggaaggaccguggagaugg

SEQ ID NO: 159974 - RNA, 19 nt, Artificial Sequence
  Description of Artificial Sequence: Synthetic oligonucleotide
cagccaaauagccaaacug

SEQ ID NO: 159975 - RNA, 19 nt, Artificial Sequence
  Description of Artificial Sequence: Synthetic oligonucleotide
gaaaagucggaagcaggcg

SEQ ID NO: 159976 - RNA, 19 nt, Artificial Sequence
  Description of Artificial Sequence: Synthetic oligonucleotide
caucugaauguccuugugc

SEQ ID NO: 159977 - RNA, 19 nt, Artificial Sequence
  Description of Artificial Sequence: Synthetic oligonucleotide
acaaguccaucaaacuugc

SEQ ID NO: 159978 - RNA, 19 nt, Artificial Sequence
  Description of Artificial Sequence: Synthetic oligonucleotide
acuaucgaaacuucggguu

SEQ ID NO: 159979 - RNA, 19 nt, Artificial Sequence
  Description of Artificial Sequence: Synthetic oligonucleotide
acacggccgccauagaugg

SEQ ID NO: 159980 - RNA, 19 nt, Artificial Sequence
  Description of Artificial Sequence: Synthetic oligonucleotide
gaagauaaggucugcccga

SEQ ID NO: 159981 - RNA, 19 nt, Artificial Sequence
  Description of Artificial Sequence: Synthetic oligonucleotide
ggcaguaacauugacuucc

SEQ ID NO: 159982 - RNA, 19 nt, Artificial Sequence
  Description of Artificial Sequence: Synthetic oligonucleotide
guagacgcugaucaaacuc

SEQ ID NO: 159983 - RNA, 19 nt, Artificial Sequence
  Description of Artificial Sequence: Synthetic oligonucleotide
ccgaguaaaguucagguag

SEQ ID NO: 159984 - RNA, 19 nt, Artificial Sequence
  Description of Artificial Sequence: Synthetic oligonucleotide
uccgaauucguauuucuuu

SEQ ID NO: 159985 - RNA, 19 nt, Artificial Sequence
  Description of Artificial Sequence: Synthetic oligonucleotide
aagguauuaaguagacgcu

SEQ ID NO: 159986 - RNA, 19 nt, Artificial Sequence
  Description of Artificial Sequence: Synthetic oligonucleotide
acggccaucggauguagag

SEQ ID NO: 159987 - RNA, 19 nt, Artificial Sequence
  Description of Artificial Sequence: Synthetic oligonucleotide
ggcaauagaagugaucugc

SEQ ID NO: 159988 - RNA, 19 nt, Artificial Sequence
  Description of Artificial Sequence: Synthetic oligonucleotide
ugcaacaugccucgagcca

SEQ ID NO: 159989 - RNA, 19 nt, Artificial Sequence
  Description of Artificial Sequence: Synthetic oligonucleotide
ugcacgaacucuucucgcc

SEQ ID NO: 159990 - RNA, 19 nt, Artificial Sequence
  Description of Artificial Sequence: Synthetic oligonucleotide
gauaaggucugcccgagua

SEQ ID NO: 159991 - RNA, 19 nt, Artificial Sequence
  Description of Artificial Sequence: Synthetic oligonucleotide
aaacuucggguuguaaaca

SEQ ID NO: 159992 - RNA, 19 nt, Artificial Sequence
  Description of Artificial Sequence: Synthetic oligonucleotide
auucacuaucgaaacuucg

SEQ ID NO: 159993 - RNA, 19 nt, Artificial Sequence
  Description of Artificial Sequence: Synthetic oligonucleotide
gacuccccgagguuugugg

SEQ ID NO: 159994 - RNA, 19 nt, Artificial Sequence
  Description of Artificial Sequence: Synthetic oligonucleotide
augaaggacuccccgaggu

SEQ ID NO: 159995 - RNA, 19 nt, Artificial Sequence
  Description of Artificial Sequence: Synthetic oligonucleotide
cuaucgaaacuucggguug

SEQ ID NO: 159996 - RNA, 19 nt, Artificial Sequence
  Description of Artificial Sequence: Synthetic oligonucleotide
aagauaaggucugcccgag

SEQ ID NO: 159997 - RNA, 19 nt, Artificial Sequence
  Description of Artificial Sequence: Synthetic oligonucleotide
guaaacagacgcuccagga

SEQ ID NO: 159998 - RNA, 19 nt, Artificial Sequence
  Description of Artificial Sequence: Synthetic oligonucleotide
uccgcauugguuugcuuca

SEQ ID NO: 159999 - RNA, 19 nt, Artificial Sequence
  Description of Artificial Sequence: Synthetic oligonucleotide
agguauuaaguagacgcug

SEQ ID NO: 160000 - RNA, 19 nt, Artificial Sequence
  Description of Artificial Sequence: Synthetic oligonucleotide
gauggcguuggaaagcgac

SEQ ID NO: 160001 - RNA, 19 nt, Artificial Sequence
  Description of Artificial Sequence: Synthetic oligonucleotide
aggaagguauuaaguagac

SEQ ID NO: 160002 - RNA, 19 nt, Artificial Sequence
  Description of Artificial Sequence: Synthetic oligonucleotide
uacgguacagucugcucug

SEQ ID NO: 160003 - RNA, 19 nt, Artificial Sequence
  Description of Artificial Sequence: Synthetic oligonucleotide
gagccacgcgguuaaaggc

SEQ ID NO: 160004 - RNA, 19 nt, Artificial Sequence
  Description of Artificial Sequence: Synthetic oligonucleotide
caggaagguauuaaguaga

SEQ ID NO: 160005 - RNA, 19 nt, Artificial Sequence
  Description of Artificial Sequence: Synthetic oligonucleotide
aacuccucgcucauagaag

SEQ ID NO: 160006 - RNA, 19 nt, Artificial Sequence
  Description of Artificial Sequence: Synthetic oligonucleotide
gaacucggcaucauaggug

SEQ ID NO: 160007 - RNA, 19 nt, Artificial Sequence
  Description of Artificial Sequence: Synthetic oligonucleotide
gucauacccaggcacggag

SEQ ID NO: 160008 - RNA, 19 nt, Artificial Sequence
  Description of Artificial Sequence: Synthetic oligonucleotide
gcagugaguacugauacag

SEQ ID NO: 160009 - RNA, 19 nt, Artificial Sequence
  Description of Artificial Sequence: Synthetic oligonucleotide
uaaugggaccagcuccgag

SEQ ID NO: 160010 - RNA, 19 nt, Artificial Sequence
  Description of Artificial Sequence: Synthetic oligonucleotide
agcgcagcuguguuagcgg

SEQ ID NO: 160011 - RNA, 19 nt, Artificial Sequence
  Description of Artificial Sequence: Synthetic oligonucleotide
agccgaucgaaggucagac

SEQ ID NO: 160012 - RNA, 19 nt, Artificial Sequence
  Description of Artificial Sequence: Synthetic oligonucleotide
cucaaacacgaagauucgg

SEQ ID NO: 160013 - RNA, 19 nt, Artificial Sequence
  Description of Artificial Sequence: Synthetic oligonucleotide
aaagucggaagcaggcgug

SEQ ID NO: 160014 - RNA, 19 nt, Artificial Sequence
  Description of Artificial Sequence: Synthetic oligonucleotide
aaugugggugaggucaagu

SEQ ID NO: 160015 - RNA, 19 nt, Artificial Sequence
  Description of Artificial Sequence: Synthetic oligonucleotide
agccacgcgguuaaaggcc

SEQ ID NO: 160016 - RNA, 19 nt, Artificial Sequence
  Description of Artificial Sequence: Synthetic oligonucleotide
aagaaccgaaacaaaggau

SEQ ID NO: 160017 - RNA, 19 nt, Artificial Sequence
  Description of Artificial Sequence: Synthetic oligonucleotide
agugcgcuuaagugggcuc

SEQ ID NO: 160018 - RNA, 19 nt, Artificial Sequence
  Description of Artificial Sequence: Synthetic oligonucleotide
cagcuccgaggcaagaucc

SEQ ID NO: 160019 - RNA, 19 nt, Artificial Sequence
  Description of Artificial Sequence: Synthetic oligonucleotide
acagucagacccuggauuu

SEQ ID NO: 160020 - RNA, 19 nt, Artificial Sequence
  Description of Artificial Sequence: Synthetic oligonucleotide
uggcgucauacccaggcac

SEQ ID NO: 160021 - RNA, 19 nt, Artificial Sequence
  Description of Artificial Sequence: Synthetic oligonucleotide
cagugaguacugauacagg

SEQ ID NO: 160022 - RNA, 19 nt, Artificial Sequence
  Description of Artificial Sequence: Synthetic oligonucleotide
agcgggcacgcucauuugg

SEQ ID NO: 160023 - RNA, 19 nt, Artificial Sequence
  Description of Artificial Sequence: Synthetic oligonucleotide
cucggagcagguucacugg

SEQ ID NO: 160024 - RNA, 19 nt, Artificial Sequence
  Description of Artificial Sequence: Synthetic oligonucleotide
uucucgccugauaccauca

SEQ ID NO: 160025 - RNA, 19 nt, Artificial Sequence
  Description of Artificial Sequence: Synthetic oligonucleotide
acggccgccauagauggac

SEQ ID NO: 160026 - RNA, 19 nt, Artificial Sequence
  Description of Artificial Sequence: Synthetic oligonucleotide
caggugagauguucuggcg

SEQ ID NO: 160027 - RNA, 19 nt, Artificial Sequence
  Description of Artificial Sequence: Synthetic oligonucleotide
cucgccugauaccaucagg

SEQ ID NO: 160028 - RNA, 19 nt, Artificial Sequence
  Description of Artificial Sequence: Synthetic oligonucleotide
guuagcggaaggaccgugg

SEQ ID NO: 160029 - RNA, 19 nt, Artificial Sequence
  Description of Artificial Sequence: Synthetic oligonucleotide
cucggucucugcauaggcc

SEQ ID NO: 160030 - RNA, 19 nt, Artificial Sequence
  Description of Artificial Sequence: Synthetic oligonucleotide
aacuugccaaagguuuaag

SEQ ID NO: 160031 - RNA, 19 nt, Artificial Sequence
  Description of Artificial Sequence: Synthetic oligonucleotide
ugcccgaguaaaguucagg

SEQ ID NO: 160032 - RNA, 19 nt, Artificial Sequence
  Description of Artificial Sequence: Synthetic oligonucleotide
aacaugccucgagccacgc

SEQ ID NO: 160033 - RNA, 19 nt, Artificial Sequence
  Description of Artificial Sequence: Synthetic oligonucleotide
uggcaauagaagugaucug

SEQ ID NO: 160034 - RNA, 19 nt, Artificial Sequence
  Description of Artificial Sequence: Synthetic oligonucleotide
uuccucacuccagagguac

SEQ ID NO: 160035 - RNA, 19 nt, Artificial Sequence
  Description of Artificial Sequence: Synthetic oligonucleotide
aaccgaaacaaaggauccu

SEQ ID NO: 160036 - RNA, 19 nt, Artificial Sequence
  Description of Artificial Sequence: Synthetic oligonucleotide
ucucgccugauaccaucag

SEQ ID NO: 160037 - RNA, 19 nt, Artificial Sequence
  Description of Artificial Sequence: Synthetic oligonucleotide
uccucacuccagagguacg

SEQ ID NO: 160038 - RNA, 19 nt, Artificial Sequence
  Description of Artificial Sequence: Synthetic oligonucleotide
gugcaacaugccucgagcc

SEQ ID NO: 160039 - RNA, 19 nt, Artificial Sequence
  Description of Artificial Sequence: Synthetic oligonucleotide
cagcucuacccacugcacg

SEQ ID NO: 160040 - RNA, 19 nt, Artificial Sequence
  Description of Artificial Sequence: Synthetic oligonucleotide
agccaguuagaugcugugg

SEQ ID NO: 160041 - RNA, 19 nt, Artificial Sequence
  Description of Artificial Sequence: Synthetic oligonucleotide
uaucgaaacuucggguugu

SEQ ID NO: 160042 - RNA, 19 nt, Artificial Sequence
  Description of Artificial Sequence: Synthetic oligonucleotide
agauucggccugcucggag

SEQ ID NO: 160043 - RNA, 19 nt, Artificial Sequence
  Description of Artificial Sequence: Synthetic oligonucleotide
gaguaaaguucagguagac

SEQ ID NO: 160044 - RNA, 19 nt, Artificial Sequence
  Description of Artificial Sequence: Synthetic oligonucleotide
ggaagguauuaaguagacg

SEQ ID NO: 160045 - RNA, 19 nt, Artificial Sequence
  Description of Artificial Sequence: Synthetic oligonucleotide
aaauacaagcgggcacgcu

SEQ ID NO: 160046 - RNA, 19 nt, Artificial Sequence
  Description of Artificial Sequence: Synthetic oligonucleotide
ccgaauucguauuucuuug

SEQ ID NO: 160047 - RNA, 19 nt, Artificial Sequence
  Description of Artificial Sequence: Synthetic oligonucleotide
gguaagcaggacccucucg

SEQ ID NO: 160048 - RNA, 19 nt, Artificial Sequence
  Description of Artificial Sequence: Synthetic oligonucleotide
guacgguacagucugcucu

SEQ ID NO: 160049 - RNA, 19 nt, Artificial Sequence
  Description of Artificial Sequence: Synthetic oligonucleotide
gaauuaggaguaggcggug

SEQ ID NO: 160050 - RNA, 19 nt, Artificial Sequence
  Description of Artificial Sequence: Synthetic oligonucleotide
accguguaaugggaccagc

SEQ ID NO: 160051 - RNA, 19 nt, Artificial Sequence
  Description of Artificial Sequence: Synthetic oligonucleotide
cugcacgaacucuucucgc

SEQ ID NO: 160052 - RNA, 19 nt, Artificial Sequence
  Description of Artificial Sequence: Synthetic oligonucleotide
uguuagcggaaggaccgug

SEQ ID NO: 160053 - RNA, 19 nt, Artificial Sequence
  Description of Artificial Sequence: Synthetic oligonucleotide
acuccagagguacgguaca

SEQ ID NO: 160054 - RNA, 19 nt, Artificial Sequence
  Description of Artificial Sequence: Synthetic oligonucleotide
aggcggucgggucggaaag

SEQ ID NO: 160055 - RNA, 19 nt, Artificial Sequence
  Description of Artificial Sequence: Synthetic oligonucleotide
ggaagaacugcagugagua

SEQ ID NO: 160056 - RNA, 19 nt, Artificial Sequence
  Description of Artificial Sequence: Synthetic oligonucleotide
gccaauggcaauagaagug

SEQ ID NO: 160057 - RNA, 19 nt, Artificial Sequence
  Description of Artificial Sequence: Synthetic oligonucleotide
auagaagcugcgagggucu

SEQ ID NO: 160058 - RNA, 19 nt, Artificial Sequence
  Description of Artificial Sequence: Synthetic oligonucleotide
gaucugcguguucugcuca

SEQ ID NO: 160059 - RNA, 19 nt, Artificial Sequence
  Description of Artificial Sequence: Synthetic oligonucleotide
guacugauacaggaaguga

SEQ ID NO: 160060 - RNA, 19 nt, Artificial Sequence
  Description of Artificial Sequence: Synthetic oligonucleotide
ugcguguggucaguggcgc

SEQ ID NO: 160061 - RNA, 19 nt, Artificial Sequence
  Description of Artificial Sequence: Synthetic oligonucleotide
caucuuuacucagugcaca

SEQ ID NO: 160062 - RNA, 19 nt, Artificial Sequence
  Description of Artificial Sequence: Synthetic oligonucleotide
uuaugacagagaggcgcug

SEQ ID NO: 160063 - RNA, 19 nt, Artificial Sequence
  Description of Artificial Sequence: Synthetic oligonucleotide
uggcguguuuggcuucacc

SEQ ID NO: 160064 - RNA, 19 nt, Artificial Sequence
  Description of Artificial Sequence: Synthetic oligonucleotide
agcgcaggcgcucuuggau

SEQ ID NO: 160065 - RNA, 19 nt, Artificial Sequence
  Description of Artificial Sequence: Synthetic oligonucleotide
cagcgcagcuguguuagcg

SEQ ID NO: 160066 - RNA, 19 nt, Artificial Sequence
  Description of Artificial Sequence: Synthetic oligonucleotide
acaugccucgagccacgcg

SEQ ID NO: 160067 - RNA, 19 nt, Artificial Sequence
  Description of Artificial Sequence: Synthetic oligonucleotide
ccacauacugucugguggc

SEQ ID NO: 160068 - RNA, 19 nt, Artificial Sequence
  Description of Artificial Sequence: Synthetic oligonucleotide
ggccaucggauguagaguc

SEQ ID NO: 160069 - RNA, 19 nt, Artificial Sequence
  Description of Artificial Sequence: Synthetic oligonucleotide
ucucguugccucugaggaa

SEQ ID NO: 160070 - RNA, 19 nt, Artificial Sequence
  Description of Artificial Sequence: Synthetic oligonucleotide
gcgguuaaaggccaccuga

SEQ ID NO: 160071 - RNA, 19 nt, Artificial Sequence
  Description of Artificial Sequence: Synthetic oligonucleotide
caccaccggacgcagcugc

SEQ ID NO: 160072 - RNA, 19 nt, Artificial Sequence
  Description of Artificial Sequence: Synthetic oligonucleotide
caagccgaucgaaggucag

SEQ ID NO: 160073 - RNA, 19 nt, Artificial Sequence
  Description of Artificial Sequence: Synthetic oligonucleotide
aagucggaagcaggcgugu

SEQ ID NO: 160074 - RNA, 19 nt, Artificial Sequence
  Description of Artificial Sequence: Synthetic oligonucleotide
ggaaagcgacaacuuguug

SEQ ID NO: 160075 - RNA, 19 nt, Artificial Sequence
  Description of Artificial Sequence: Synthetic oligonucleotide
uccagagguacgguacagu

SEQ ID NO: 160076 - RNA, 19 nt, Artificial Sequence
  Description of Artificial Sequence: Synthetic oligonucleotide
aagccgaucgaaggucaga

SEQ ID NO: 160077 - RNA, 19 nt, Artificial Sequence
  Description of Artificial Sequence: Synthetic oligonucleotide
acgacaucagcaagguccu

SEQ ID NO: 160078 - RNA, 19 nt, Artificial Sequence
  Description of Artificial Sequence: Synthetic oligonucleotide
ccagagguacgguacaguc

SEQ ID NO: 160079 - RNA, 19 nt, Artificial Sequence
  Description of Artificial Sequence: Synthetic oligonucleotide
cucucggcauuguugggca

SEQ ID NO: 160080 - RNA, 19 nt, Artificial Sequence
  Description of Artificial Sequence: Synthetic oligonucleotide
ggcgucauacccaggcacg

SEQ ID NO: 160081 - RNA, 19 nt, Artificial Sequence
  Description of Artificial Sequence: Synthetic oligonucleotide
acaagccgaucgaagguca

SEQ ID NO: 160082 - RNA, 19 nt, Artificial Sequence
  Description of Artificial Sequence: Synthetic oligonucleotide
agauaaggucugcccgagu

SEQ ID NO: 160083 - RNA, 19 nt, Artificial Sequence
  Description of Artificial Sequence: Synthetic oligonucleotide
gaacugcaacuccucgcuc

SEQ ID NO: 160084 - RNA, 19 nt, Artificial Sequence
  Description of Artificial Sequence: Synthetic oligonucleotide
gcgcgaaccaaccacuuuc

SEQ ID NO: 160085 - RNA, 19 nt, Artificial Sequence
  Description of Artificial Sequence: Synthetic oligonucleotide
cacaaucucguugccucug

SEQ ID NO: 160086 - RNA, 19 nt, Artificial Sequence
  Description of Artificial Sequence: Synthetic oligonucleotide
agguacgguacagucugcu

SEQ ID NO: 160087 - RNA, 19 nt, Artificial Sequence
  Description of Artificial Sequence: Synthetic oligonucleotide
cacuaucgaaacuucgggu

SEQ ID NO: 160088 - RNA, 19 nt, Artificial Sequence
  Description of Artificial Sequence: Synthetic oligonucleotide
ugcgcgaaccaaccacuuu

SEQ ID NO: 160089 - RNA, 19 nt, Artificial Sequence
  Description of Artificial Sequence: Synthetic oligonucleotide
cagcggagcauagcgcagg

SEQ ID NO: 160090 - RNA, 19 nt, Artificial Sequence
  Description of Artificial Sequence: Synthetic oligonucleotide
augggaguugaaguuguuu

SEQ ID NO: 160091 - RNA, 19 nt, Artificial Sequence
  Description of Artificial Sequence: Synthetic oligonucleotide
ccaucggauguagaguccg

SEQ ID NO: 160092 - RNA, 19 nt, Artificial Sequence
  Description of Artificial Sequence: Synthetic oligonucleotide
ugcgagggucuuccuuugu

SEQ ID NO: 160093 - RNA, 19 nt, Artificial Sequence
  Description of Artificial Sequence: Synthetic oligonucleotide
auuugggguggagccagca

SEQ ID NO: 160094 - RNA, 19 nt, Artificial Sequence
  Description of Artificial Sequence: Synthetic oligonucleotide
uagaagugaucugcguguu

SEQ ID NO: 160095 - RNA, 19 nt, Artificial Sequence
  Description of Artificial Sequence: Synthetic oligonucleotide
cauagcgcaggcgcucuug

SEQ ID NO: 160096 - RNA, 19 nt, Artificial Sequence
  Description of Artificial Sequence: Synthetic oligonucleotide
uccccgagguuuguggaaa

SEQ ID NO: 160097 - RNA, 19 nt, Artificial Sequence
  Description of Artificial Sequence: Synthetic oligonucleotide
ucagcccucuaaacacaua

SEQ ID NO: 160098 - RNA, 19 nt, Artificial Sequence
  Description of Artificial Sequence: Synthetic oligonucleotide
guaggcgguggauggccug

SEQ ID NO: 160099 - RNA, 19 nt, Artificial Sequence
  Description of Artificial Sequence: Synthetic oligonucleotide
caacaggcggucgggucgg

SEQ ID NO: 160100 - RNA, 19 nt, Artificial Sequence
  Description of Artificial Sequence: Synthetic oligonucleotide
ccaguuagaugcuguggug

SEQ ID NO: 160101 - RNA, 19 nt, Artificial Sequence
  Description of Artificial Sequence: Synthetic oligonucleotide
aggcaccguguaaugggac

SEQ ID NO: 160102 - RNA, 19 nt, Artificial Sequence
  Description of Artificial Sequence: Synthetic oligonucleotide
ccaauggcaauagaaguga

SEQ ID NO: 160103 - RNA, 19 nt, Artificial Sequence
  Description of Artificial Sequence: Synthetic oligonucleotide
acagugcgcuuaagugggc

SEQ ID NO: 160104 - RNA, 19 nt, Artificial Sequence
  Description of Artificial Sequence: Synthetic oligonucleotide
uucuccgcauugguuugcu

SEQ ID NO: 160105 - RNA, 19 nt, Artificial Sequence
  Description of Artificial Sequence: Synthetic oligonucleotide
cuccagagguacgguacag

SEQ ID NO: 160106 - RNA, 19 nt, Artificial Sequence
  Description of Artificial Sequence: Synthetic oligonucleotide
ucgaaacuucggguuguaa

SEQ ID NO: 160107 - RNA, 19 nt, Artificial Sequence
  Description of Artificial Sequence: Synthetic oligonucleotide
ccccuugaaguuucagacc

SEQ ID NO: 160108 - RNA, 19 nt, Artificial Sequence
  Description of Artificial Sequence: Synthetic oligonucleotide
cacgcgguuaaaggccacc

SEQ ID NO: 160109 - RNA, 19 nt, Artificial Sequence
  Description of Artificial Sequence: Synthetic oligonucleotide
gcgguggauggccugcccg

SEQ ID NO: 160110 - RNA, 19 nt, Artificial Sequence
  Description of Artificial Sequence: Synthetic oligonucleotide
gguacgguacagucugcuc

SEQ ID NO: 160111 - RNA, 19 nt, Artificial Sequence
  Description of Artificial Sequence: Synthetic oligonucleotide
caggcaccguguaauggga

SEQ ID NO: 160112 - RNA, 19 nt, Artificial Sequence
  Description of Artificial Sequence: Synthetic oligonucleotide
acccacuggauaaccguca

SEQ ID NO: 160113 - RNA, 19 nt, Artificial Sequence
  Description of Artificial Sequence: Synthetic oligonucleotide
cauggccaacaggcggucg

SEQ ID NO: 160114 - RNA, 19 nt, Artificial Sequence
  Description of Artificial Sequence: Synthetic oligonucleotide
gccagcacucagcacaauc

SEQ ID NO: 160115 - RNA, 19 nt, Artificial Sequence
  Description of Artificial Sequence: Synthetic oligonucleotide
accaccggacgcagcugcc

SEQ ID NO: 160116 - RNA, 19 nt, Artificial Sequence
  Description of Artificial Sequence: Synthetic oligonucleotide
gcguguuuggcuucaccuc

SEQ ID NO: 160117 - RNA, 19 nt, Artificial Sequence
  Description of Artificial Sequence: Synthetic oligonucleotide
uggccccuugaaguuucag

SEQ ID NO: 160118 - RNA, 19 nt, Artificial Sequence
  Description of Artificial Sequence: Synthetic oligonucleotide
gacuggcguguuuggcuuc

SEQ ID NO: 160119 - RNA, 19 nt, Artificial Sequence
  Description of Artificial Sequence: Synthetic oligonucleotide
caccggacgcagcugccug

SEQ ID NO: 160120 - RNA, 19 nt, Artificial Sequence
  Description of Artificial Sequence: Synthetic oligonucleotide
caccguguaaugggaccag

SEQ ID NO: 160121 - RNA, 19 nt, Artificial Sequence
  Description of Artificial Sequence: Synthetic oligonucleotide
agucggaagcaggcgugug

SEQ ID NO: 160122 - RNA, 19 nt, Artificial Sequence
  Description of Artificial Sequence: Synthetic oligonucleotide
gagguacgguacagucugc

SEQ ID NO: 160123 - RNA, 19 nt, Artificial Sequence
  Description of Artificial Sequence: Synthetic oligonucleotide
aagcugcgagggucuuccu

SEQ ID NO: 160124 - RNA, 19 nt, Artificial Sequence
  Description of Artificial Sequence: Synthetic oligonucleotide
cguguaaugggaccagcuc

SEQ ID NO: 160125 - RNA, 19 nt, Artificial Sequence
  Description of Artificial Sequence: Synthetic oligonucleotide
cacauccgggacacgggga

SEQ ID NO: 160126 - RNA, 19 nt, Artificial Sequence
  Description of Artificial Sequence: Synthetic oligonucleotide
aguaggcgguggauggccu

SEQ ID NO: 160127 - RNA, 19 nt, Artificial Sequence
  Description of Artificial Sequence: Synthetic oligonucleotide
gauaaccgucaugccugca

SEQ ID NO: 160128 - RNA, 19 nt, Artificial Sequence
  Description of Artificial Sequence: Synthetic oligonucleotide
cuggcgucauacccaggca

SEQ ID NO: 160129 - RNA, 19 nt, Artificial Sequence
  Description of Artificial Sequence: Synthetic oligonucleotide
guaaugggaccagcuccga

SEQ ID NO: 160130 - RNA, 19 nt, Artificial Sequence
  Description of Artificial Sequence: Synthetic oligonucleotide
ucuccgcauugguuugcuu

SEQ ID NO: 160131 - RNA, 19 nt, Artificial Sequence
  Description of Artificial Sequence: Synthetic oligonucleotide
cgaguaaaguucagguaga

SEQ ID NO: 160132 - RNA, 19 nt, Artificial Sequence
  Description of Artificial Sequence: Synthetic oligonucleotide
ggaguaggcgguggauggc

SEQ ID NO: 160133 - RNA, 19 nt, Artificial Sequence
  Description of Artificial Sequence: Synthetic oligonucleotide
ucgggucggaaagcuugaa

SEQ ID NO: 160134 - RNA, 19 nt, Artificial Sequence
  Description of Artificial Sequence: Synthetic oligonucleotide
cgaauucguauuucuuuga

SEQ ID NO: 160135 - RNA, 19 nt, Artificial Sequence
  Description of Artificial Sequence: Synthetic oligonucleotide
ggacacggggauacugcug

SEQ ID NO: 160136 - RNA, 19 nt, Artificial Sequence
  Description of Artificial Sequence: Synthetic oligonucleotide
cacgagggcgucugggugu

SEQ ID NO: 160137 - RNA, 19 nt, Artificial Sequence
  Description of Artificial Sequence: Synthetic oligonucleotide
ccagcggagcauagcgcag

SEQ ID NO: 160138 - RNA, 19 nt, Artificial Sequence
  Description of Artificial Sequence: Synthetic oligonucleotide
cuccccgagguuuguggaa

SEQ ID NO: 160139 - RNA, 19 nt, Artificial Sequence
  Description of Artificial Sequence: Synthetic oligonucleotide
gccaacaggcggucggguc

SEQ ID NO: 160140 - RNA, 19 nt, Artificial Sequence
  Description of Artificial Sequence: Synthetic oligonucleotide
aucgaaacuucggguugua

SEQ ID NO: 160141 - RNA, 19 nt, Artificial Sequence
  Description of Artificial Sequence: Synthetic oligonucleotide
gccaucggauguagagucc

SEQ ID NO: 160142 - RNA, 19 nt, Artificial Sequence
  Description of Artificial Sequence: Synthetic oligonucleotide
gcgcccuucagguuggggu

SEQ ID NO: 160143 - RNA, 19 nt, Artificial Sequence
  Description of Artificial Sequence: Synthetic oligonucleotide
cgcauugguuugcuucacc

SEQ ID NO: 160144 - RNA, 19 nt, Artificial Sequence
  Description of Artificial Sequence: Synthetic oligonucleotide
gguguccacugugucacaa

SEQ ID NO: 160145 - RNA, 19 nt, Artificial Sequence
  Description of Artificial Sequence: Synthetic oligonucleotide
cccgaguaaaguucaggua

SEQ ID NO: 160146 - RNA, 19 nt, Artificial Sequence
  Description of Artificial Sequence: Synthetic oligonucleotide
gacggccaucggauguaga

SEQ ID NO: 160147 - RNA, 19 nt, Artificial Sequence
  Description of Artificial Sequence: Synthetic oligonucleotide
aggacuccccgagguuugu

SEQ ID NO: 160148 - RNA, 19 nt, Artificial Sequence
  Description of Artificial Sequence: Synthetic oligonucleotide
cugcugcaagcaguagaca

SEQ ID NO: 160149 - RNA, 19 nt, Artificial Sequence
  Description of Artificial Sequence: Synthetic oligonucleotide
gggacacggggauacugcu

SEQ ID NO: 160150 - RNA, 19 nt, Artificial Sequence
  Description of Artificial Sequence: Synthetic oligonucleotide
ccaugggaucuuaucaggu

SEQ ID NO: 160151 - RNA, 19 nt, Artificial Sequence
  Description of Artificial Sequence: Synthetic oligonucleotide
cccucucggcauuguuggg

SEQ ID NO: 160152 - RNA, 19 nt, Artificial Sequence
  Description of Artificial Sequence: Synthetic oligonucleotide
gcggagcauagcgcaggcg

SEQ ID NO: 160153 - RNA, 19 nt, Artificial Sequence
  Description of Artificial Sequence: Synthetic oligonucleotide
cguuagccuucuucuccgc

SEQ ID NO: 160154 - RNA, 19 nt, Artificial Sequence
  Description of Artificial Sequence: Synthetic oligonucleotide
gcguguggucaguggcgcc

SEQ ID NO: 160155 - RNA, 19 nt, Artificial Sequence
  Description of Artificial Sequence: Synthetic oligonucleotide
ccgagguuuguggaaacaa

SEQ ID NO: 160156 - RNA, 19 nt, Artificial Sequence
  Description of Artificial Sequence: Synthetic oligonucleotide
ggcgcccuucagguugggg

SEQ ID NO: 160157 - RNA, 19 nt, Artificial Sequence
  Description of Artificial Sequence: Synthetic oligonucleotide
ggacuggcguguuuggcuu

SEQ ID NO: 160158 - RNA, 19 nt, Artificial Sequence
  Description of Artificial Sequence: Synthetic oligonucleotide
gccacgcgguuaaaggcca

SEQ ID NO: 160159 - RNA, 19 nt, Artificial Sequence
  Description of Artificial Sequence: Synthetic oligonucleotide
ggcggucgggucggaaagc

SEQ ID NO: 160160 - RNA, 19 nt, Artificial Sequence
  Description of Artificial Sequence: Synthetic oligonucleotide
cgcgguuaaaggccaccug

SEQ ID NO: 160161 - RNA, 19 nt, Artificial Sequence
  Description of Artificial Sequence: Synthetic oligonucleotide
gaugggaguugaaguuguu

SEQ ID NO: 160162 - RNA, 19 nt, Artificial Sequence
  Description of Artificial Sequence: Synthetic oligonucleotide
gcgggcacgcucauuugga

SEQ ID NO: 160163 - RNA, 19 nt, Artificial Sequence
  Description of Artificial Sequence: Synthetic oligonucleotide
gcacaaucucguugccucu

SEQ ID NO: 160164 - RNA, 19 nt, Artificial Sequence
  Description of Artificial Sequence: Synthetic oligonucleotide
ccugcgcgaaccaaccacu

SEQ ID NO: 160165 - RNA, 19 nt, Artificial Sequence
  Description of Artificial Sequence: Synthetic oligonucleotide
ccguguaaugggaccagcu

SEQ ID NO: 160166 - RNA, 19 nt, Artificial Sequence
  Description of Artificial Sequence: Synthetic oligonucleotide
cagugcgcuuaagugggcu

SEQ ID NO: 160167 - RNA, 19 nt, Artificial Sequence
  Description of Artificial Sequence: Synthetic oligonucleotide
ccgggacacggggauacug

SEQ ID NO: 160168 - RNA, 19 nt, Artificial Sequence
  Description of Artificial Sequence: Synthetic oligonucleotide
guguuagcggaaggaccgu

SEQ ID NO: 160169 - RNA, 19 nt, Artificial Sequence
  Description of Artificial Sequence: Synthetic oligonucleotide
cacgcucauuuggagacuu

SEQ ID NO: 160170 - RNA, 19 nt, Artificial Sequence
  Description of Artificial Sequence: Synthetic oligonucleotide
ccgaggcaagaucccuuuc

SEQ ID NO: 160171 - RNA, 19 nt, Artificial Sequence
  Description of Artificial Sequence: Synthetic oligonucleotide
gccgaucgaaggucagacu

SEQ ID NO: 160172 - RNA, 19 nt, Artificial Sequence
  Description of Artificial Sequence: Synthetic oligonucleotide
cacggccgccauagaugga

SEQ ID NO: 160173 - RNA, 19 nt, Artificial Sequence
  Description of Artificial Sequence: Synthetic oligonucleotide
cgaucgaaggucagacucu

SEQ ID NO: 160174 - RNA, 19 nt, Artificial Sequence
  Description of Artificial Sequence: Synthetic oligonucleotide
caggcaaggucaccacguu

SEQ ID NO: 160175 - RNA, 19 nt, Artificial Sequence
  Description of Artificial Sequence: Synthetic oligonucleotide
cugcccgaugggaguugaa

SEQ ID NO: 160176 - RNA, 19 nt, Artificial Sequence
  Description of Artificial Sequence: Synthetic oligonucleotide
cugcgcgaaccaaccacuu

SEQ ID NO: 160177 - RNA, 19 nt, Artificial Sequence
  Description of Artificial Sequence: Synthetic oligonucleotide
cggauguagaguccguccu

SEQ ID NO: 160178 - RNA, 19 nt, Artificial Sequence
  Description of Artificial Sequence: Synthetic oligonucleotide
ccgcauugguuugcuucac

SEQ ID NO: 160179 - RNA, 19 nt, Artificial Sequence
  Description of Artificial Sequence: Synthetic oligonucleotide
cccgagguuuguggaaaca

SEQ ID NO: 160180 - RNA, 19 nt, Artificial Sequence
  Description of Artificial Sequence: Synthetic oligonucleotide
cacgaagauucggccugcu

SEQ ID NO: 160181 - RNA, 19 nt, Artificial Sequence
  Description of Artificial Sequence: Synthetic oligonucleotide
cggggauacugcugaaugu

SEQ ID NO: 160182 - RNA, 19 nt, Artificial Sequence
  Description of Artificial Sequence: Synthetic oligonucleotide
gccucgagccacgcgguua

SEQ ID NO: 160183 - RNA, 19 nt, Artificial Sequence
  Description of Artificial Sequence: Synthetic oligonucleotide
gcggucgggucggaaagcu

SEQ ID NO: 160184 - RNA, 19 nt, Artificial Sequence
  Description of Artificial Sequence: Synthetic oligonucleotide
gccugcccgaugggaguug

SEQ ID NO: 160185 - RNA, 19 nt, Artificial Sequence
  Description of Artificial Sequence: Synthetic oligonucleotide
gaccaccccagcggagcau

SEQ ID NO: 160186 - RNA, 19 nt, Artificial Sequence
  Description of Artificial Sequence: Synthetic oligonucleotide
ccacugcacgaacucuucu

SEQ ID NO: 160187 - RNA, 19 nt, Artificial Sequence
  Description of Artificial Sequence: Synthetic oligonucleotide
gcgcugcguguggucagug

SEQ ID NO: 160188 - RNA, 19 nt, Artificial Sequence
  Description of Artificial Sequence: Synthetic oligonucleotide
ccugcccgaugggaguuga

SEQ ID NO: 160189 - RNA, 19 nt, Artificial Sequence
  Description of Artificial Sequence: Synthetic oligonucleotide
ggcgcacaucuuggaguaa

SEQ ID NO: 160190 - RNA, 19 nt, Artificial Sequence
  Description of Artificial Sequence: Synthetic oligonucleotide
cucgagccacgcgguuaaa

SEQ ID NO: 160191 - RNA, 19 nt, Artificial Sequence
  Description of Artificial Sequence: Synthetic oligonucleotide
ggccaacaggcggucgggu

SEQ ID NO: 160192 - RNA, 19 nt, Artificial Sequence
  Description of Artificial Sequence: Synthetic oligonucleotide
caguggcgcccuucagguu

SEQ ID NO: 160193 - RNA, 19 nt, Artificial Sequence
  Description of Artificial Sequence: Synthetic oligonucleotide
ggcgcugcguguggucagu

SEQ ID NO: 160194 - RNA, 19 nt, Artificial Sequence
  Description of Artificial Sequence: Synthetic oligonucleotide
cggccaucggauguagagu

SEQ ID NO: 160195 - RNA, 19 nt, Artificial Sequence
  Description of Artificial Sequence: Synthetic oligonucleotide
cggccgccauagauggacu

SEQ ID NO: 160196 - RNA, 19 nt, Artificial Sequence
  Description of Artificial Sequence: Synthetic oligonucleotide
cgagggcgucuggguguca

SEQ ID NO: 160197 - RNA, 19 nt, Artificial Sequence
  Description of Artificial Sequence: Synthetic oligonucleotide
aguauucucagauaggacc

SEQ ID NO: 160198 - RNA, 19 nt, Artificial Sequence
  Description of Artificial Sequence: Synthetic oligonucleotide
aauauauucuaguuguagg

SEQ ID NO: 160199 - RNA, 19 nt, Artificial Sequence
  Description of Artificial Sequence: Synthetic oligonucleotide
ugaguuaagguccugaagg

SEQ ID NO: 160200 - RNA, 19 nt, Artificial Sequence
  Description of Artificial Sequence: Synthetic oligonucleotide
uuaaaguauucucagauag

SEQ ID NO: 160201 - RNA, 19 nt, Artificial Sequence
  Description of Artificial Sequence: Synthetic oligonucleotide
aagaagauaauuucggaga

SEQ ID NO: 160202 - RNA, 19 nt, Artificial Sequence
  Description of Artificial Sequence: Synthetic oligonucleotide
ucaaaaguaccaauaauca

SEQ ID NO: 160203 - RNA, 19 nt, Artificial Sequence
  Description of Artificial Sequence: Synthetic oligonucleotide
uuaguuuuaagacuguuaa

SEQ ID NO: 160204 - RNA, 19 nt, Artificial Sequence
  Description of Artificial Sequence: Synthetic oligonucleotide
aaacaaucuguuuguaacg

SEQ ID NO: 160205 - RNA, 19 nt, Artificial Sequence
  Description of Artificial Sequence: Synthetic oligonucleotide
uguuguaaguaucaacagg

SEQ ID NO: 160206 - RNA, 19 nt, Artificial Sequence
  Description of Artificial Sequence: Synthetic oligonucleotide
aauaauguuuccagcauac

SEQ ID NO: 160207 - RNA, 19 nt, Artificial Sequence
  Description of Artificial Sequence: Synthetic oligonucleotide
aauaguggagguuauacau

SEQ ID NO: 160208 - RNA, 19 nt, Artificial Sequence
  Description of Artificial Sequence: Synthetic oligonucleotide
gaagaagauaauuucggag

SEQ ID NO: 160209 - RNA, 19 nt, Artificial Sequence
  Description of Artificial Sequence: Synthetic oligonucleotide
uuucggagaaaccaaaccc

SEQ ID NO: 160210 - RNA, 19 nt, Artificial Sequence
  Description of Artificial Sequence: Synthetic oligonucleotide
aaugaaucggccaacgagg

SEQ ID NO: 160211 - RNA, 19 nt, Artificial Sequence
  Description of Artificial Sequence: Synthetic oligonucleotide
auuucggagaaaccaaacc

SEQ ID NO: 160212 - RNA, 19 nt, Artificial Sequence
  Description of Artificial Sequence: Synthetic oligonucleotide
aaaguaccaauaaucaagg

SEQ ID NO: 160213 - RNA, 19 nt, Artificial Sequence
  Description of Artificial Sequence: Synthetic oligonucleotide
agaguuugaucucagcugg

SEQ ID NO: 160214 - RNA, 19 nt, Artificial Sequence
  Description of Artificial Sequence: Synthetic oligonucleotide
uuaguagcaagguuaaaug

SEQ ID NO: 160215 - RNA, 19 nt, Artificial Sequence
  Description of Artificial Sequence: Synthetic oligonucleotide
aauccguugauuuccacca

SEQ ID NO: 160216 - RNA, 19 nt, Artificial Sequence
  Description of Artificial Sequence: Synthetic oligonucleotide
aauaaucaaggugauagca

SEQ ID NO: 160217 - RNA, 19 nt, Artificial Sequence
  Description of Artificial Sequence: Synthetic oligonucleotide
gauaauuucggagaaacca

SEQ ID NO: 160218 - RNA, 19 nt, Artificial Sequence
  Description of Artificial Sequence: Synthetic oligonucleotide
agcacauaacagcucaugc

SEQ ID NO: 160219 - RNA, 19 nt, Artificial Sequence
  Description of Artificial Sequence: Synthetic oligonucleotide
uaaggaaugggaaaccuac

SEQ ID NO: 160220 - RNA, 19 nt, Artificial Sequence
  Description of Artificial Sequence: Synthetic oligonucleotide
aguuuuaagacuguuaaga

SEQ ID NO: 160221 - RNA, 19 nt, Artificial Sequence
  Description of Artificial Sequence: Synthetic oligonucleotide
ugugaugcauuucacauaa

SEQ ID NO: 160222 - RNA, 19 nt, Artificial Sequence
  Description of Artificial Sequence: Synthetic oligonucleotide
uccauuaguagcaagguua

SEQ ID NO: 160223 - RNA, 19 nt, Artificial Sequence
  Description of Artificial Sequence: Synthetic oligonucleotide
uucacgaugagcaaauaaa

SEQ ID NO: 160224 - RNA, 19 nt, Artificial Sequence
  Description of Artificial Sequence: Synthetic oligonucleotide
uguaacucagcacaggcuc

SEQ ID NO: 160225 - RNA, 19 nt, Artificial Sequence
  Description of Artificial Sequence: Synthetic oligonucleotide
aauacacuccaugagauau

SEQ ID NO: 160226 - RNA, 19 nt, Artificial Sequence
  Description of Artificial Sequence: Synthetic oligonucleotide
gugauucccgccuugagcg

SEQ ID NO: 160227 - RNA, 19 nt, Artificial Sequence
  Description of Artificial Sequence: Synthetic oligonucleotide
ugaggaaaugacuugacau

SEQ ID NO: 160228 - RNA, 19 nt, Artificial Sequence
  Description of Artificial Sequence: Synthetic oligonucleotide
cucuuuguaucgaaaagcc

SEQ ID NO: 160229 - RNA, 19 nt, Artificial Sequence
  Description of Artificial Sequence: Synthetic oligonucleotide
agauuggccccucagacuc

SEQ ID NO: 160230 - RNA, 19 nt, Artificial Sequence
  Description of Artificial Sequence: Synthetic oligonucleotide
acauaaauuuacaauagug

SEQ ID NO: 160231 - RNA, 19 nt, Artificial Sequence
  Description of Artificial Sequence: Synthetic oligonucleotide
ugaauaagcugguucaaga

SEQ ID NO: 160232 - RNA, 19 nt, Artificial Sequence
  Description of Artificial Sequence: Synthetic oligonucleotide
uucggagaaaccaaacccc

SEQ ID NO: 160233 - RNA, 19 nt, Artificial Sequence
  Description of Artificial Sequence: Synthetic oligonucleotide
uacuaagcacauaacagcu

SEQ ID NO: 160234 - RNA, 19 nt, Artificial Sequence
  Description of Artificial Sequence: Synthetic oligonucleotide
aguuguagggaauauauua

SEQ ID NO: 160235 - RNA, 19 nt, Artificial Sequence
  Description of Artificial Sequence: Synthetic oligonucleotide
gauuugggagaucuucucg

SEQ ID NO: 160236 - RNA, 19 nt, Artificial Sequence
  Description of Artificial Sequence: Synthetic oligonucleotide
ugugaagcgaauccguuga

SEQ ID NO: 160237 - RNA, 19 nt, Artificial Sequence
  Description of Artificial Sequence: Synthetic oligonucleotide
uguaaguaucaacagguau

SEQ ID NO: 160238 - RNA, 19 nt, Artificial Sequence
  Description of Artificial Sequence: Synthetic oligonucleotide
uuaugaagugaguuaaggu

SEQ ID NO: 160239 - RNA, 19 nt, Artificial Sequence
  Description of Artificial Sequence: Synthetic oligonucleotide
uuuguaucgaaaagccagc

SEQ ID NO: 160240 - RNA, 19 nt, Artificial Sequence
  Description of Artificial Sequence: Synthetic oligonucleotide
guugaguaguacaaaaucc

SEQ ID NO: 160241 - RNA, 19 nt, Artificial Sequence
  Description of Artificial Sequence: Synthetic oligonucleotide
uuaauggauagcugagucc

SEQ ID NO: 160242 - RNA, 19 nt, Artificial Sequence
  Description of Artificial Sequence: Synthetic oligonucleotide
uucggccagaccaaaagag

SEQ ID NO: 160243 - RNA, 19 nt, Artificial Sequence
  Description of Artificial Sequence: Synthetic oligonucleotide
uggacuguauuacuguagc

SEQ ID NO: 160244 - RNA, 19 nt, Artificial Sequence
  Description of Artificial Sequence: Synthetic oligonucleotide
uguaacguuccacauuuac

SEQ ID NO: 160245 - RNA, 19 nt, Artificial Sequence
  Description of Artificial Sequence: Synthetic oligonucleotide
auuaaugagagagacuugu

SEQ ID NO: 160246 - RNA, 19 nt, Artificial Sequence
  Description of Artificial Sequence: Synthetic oligonucleotide
cagacguuaaacaauuaug

SEQ ID NO: 160247 - RNA, 19 nt, Artificial Sequence
  Description of Artificial Sequence: Synthetic oligonucleotide
uauugaauaucuccacugu

SEQ ID NO: 160248 - RNA, 19 nt, Artificial Sequence
  Description of Artificial Sequence: Synthetic oligonucleotide
aauuucggagaaaccaaac

SEQ ID NO: 160249 - RNA, 19 nt, Artificial Sequence
  Description of Artificial Sequence: Synthetic oligonucleotide
auaugcuacuguuucauga

SEQ ID NO: 160250 - RNA, 19 nt, Artificial Sequence
  Description of Artificial Sequence: Synthetic oligonucleotide
guaucgaaaagccagcuga

SEQ ID NO: 160251 - RNA, 19 nt, Artificial Sequence
  Description of Artificial Sequence: Synthetic oligonucleotide
agcgaauccguugauuucc

SEQ ID NO: 160252 - RNA, 19 nt, Artificial Sequence
  Description of Artificial Sequence: Synthetic oligonucleotide
ucagacagacguuaaacaa

SEQ ID NO: 160253 - RNA, 19 nt, Artificial Sequence
  Description of Artificial Sequence: Synthetic oligonucleotide
uuguuguaaguaucaacag

SEQ ID NO: 160254 - RNA, 19 nt, Artificial Sequence
  Description of Artificial Sequence: Synthetic oligonucleotide
ccaauaaucaaggugauag

SEQ ID NO: 160255 - RNA, 19 nt, Artificial Sequence
  Description of Artificial Sequence: Synthetic oligonucleotide
cuuaauggauagcugaguc

SEQ ID NO: 160256 - RNA, 19 nt, Artificial Sequence
  Description of Artificial Sequence: Synthetic oligonucleotide
aaaagagaugugcgcaugu

SEQ ID NO: 160257 - RNA, 19 nt, Artificial Sequence
  Description of Artificial Sequence: Synthetic oligonucleotide
gaauaagcugguucaagac

SEQ ID NO: 160258 - RNA, 19 nt, Artificial Sequence
  Description of Artificial Sequence: Synthetic oligonucleotide
uuaagauauuguuguaagu

SEQ ID NO: 160259 - RNA, 19 nt, Artificial Sequence
  Description of Artificial Sequence: Synthetic oligonucleotide
augagaccuucauagauug

SEQ ID NO: 160260 - RNA, 19 nt, Artificial Sequence
  Description of Artificial Sequence: Synthetic oligonucleotide
uauauucuaguuguaggga

SEQ ID NO: 160261 - RNA, 19 nt, Artificial Sequence
  Description of Artificial Sequence: Synthetic oligonucleotide
agacguuaaacaauuauga

SEQ ID NO: 160262 - RNA, 19 nt, Artificial Sequence
  Description of Artificial Sequence: Synthetic oligonucleotide
auuacacauaggcuuuauc

SEQ ID NO: 160263 - RNA, 19 nt, Artificial Sequence
  Description of Artificial Sequence: Synthetic oligonucleotide
aaaaucaaguacugcugau

SEQ ID NO: 160264 - RNA, 19 nt, Artificial Sequence
  Description of Artificial Sequence: Synthetic oligonucleotide
aagcgaauccguugauuuc

SEQ ID NO: 160265 - RNA, 19 nt, Artificial Sequence
  Description of Artificial Sequence: Synthetic oligonucleotide
gacuguuaagauauuguug

SEQ ID NO: 160266 - RNA, 19 nt, Artificial Sequence
  Description of Artificial Sequence: Synthetic oligonucleotide
uaagacuguuaagauauug

SEQ ID NO: 160267 - RNA, 19 nt, Artificial Sequence
  Description of Artificial Sequence: Synthetic oligonucleotide
uguuaagauauuguuguaa

SEQ ID NO: 160268 - RNA, 19 nt, Artificial Sequence
  Description of Artificial Sequence: Synthetic oligonucleotide
ugcgcaugugcucacagcu

SEQ ID NO: 160269 - RNA, 19 nt, Artificial Sequence
  Description of Artificial Sequence: Synthetic oligonucleotide
uguauuacuguagccaccu

SEQ ID NO: 160270 - RNA, 19 nt, Artificial Sequence
  Description of Artificial Sequence: Synthetic oligonucleotide
acuaaggcgcaccagauuu

SEQ ID NO: 160271 - RNA, 19 nt, Artificial Sequence
  Description of Artificial Sequence: Synthetic oligonucleotide
uguaucgaaaagccagcug

SEQ ID NO: 160272 - RNA, 19 nt, Artificial Sequence
  Description of Artificial Sequence: Synthetic oligonucleotide
agcagaucagucaugcuac

SEQ ID NO: 160273 - RNA, 19 nt, Artificial Sequence
  Description of Artificial Sequence: Synthetic oligonucleotide
guaaguaucaacagguauc

SEQ ID NO: 160274 - RNA, 19 nt, Artificial Sequence
  Description of Artificial Sequence: Synthetic oligonucleotide
agaccugaauuguuaccgc

SEQ ID NO: 160275 - RNA, 19 nt, Artificial Sequence
  Description of Artificial Sequence: Synthetic oligonucleotide
agucaugcuacuuggggug

SEQ ID NO: 160276 - RNA, 19 nt, Artificial Sequence
  Description of Artificial Sequence: Synthetic oligonucleotide
aaguauucucagauaggac

SEQ ID NO: 160277 - RNA, 19 nt, Artificial Sequence
  Description of Artificial Sequence: Synthetic oligonucleotide
aauuguuaccgcaucauuu

SEQ ID NO: 160278 - RNA, 19 nt, Artificial Sequence
  Description of Artificial Sequence: Synthetic oligonucleotide
caaucuauggaagggagac

SEQ ID NO: 160279 - RNA, 19 nt, Artificial Sequence
  Description of Artificial Sequence: Synthetic oligonucleotide
acagacguuaaacaauuau

SEQ ID NO: 160280 - RNA, 19 nt, Artificial Sequence
  Description of Artificial Sequence: Synthetic oligonucleotide
agaugaaugaaucggccaa

SEQ ID NO: 160281 - RNA, 19 nt, Artificial Sequence
  Description of Artificial Sequence: Synthetic oligonucleotide
agaagauaauuucggagaa

SEQ ID NO: 160282 - RNA, 19 nt, Artificial Sequence
  Description of Artificial Sequence: Synthetic oligonucleotide
uaggcuuuaucuugcauuc

SEQ ID NO: 160283 - RNA, 19 nt, Artificial Sequence
  Description of Artificial Sequence: Synthetic oligonucleotide
uuuacaccuuccaacugac

SEQ ID NO: 160284 - RNA, 19 nt, Artificial Sequence
  Description of Artificial Sequence: Synthetic oligonucleotide
uguuaccgcaucauuuucu

SEQ ID NO: 160285 - RNA, 19 nt, Artificial Sequence
  Description of Artificial Sequence: Synthetic oligonucleotide
gaccaaaagagaugugcgc

SEQ ID NO: 160286 - RNA, 19 nt, Artificial Sequence
  Description of Artificial Sequence: Synthetic oligonucleotide
ugaguaguacaaaauccau

SEQ ID NO: 160287 - RNA, 19 nt, Artificial Sequence
  Description of Artificial Sequence: Synthetic oligonucleotide
caauaaucaaggugauagc

SEQ ID NO: 160288 - RNA, 19 nt, Artificial Sequence
  Description of Artificial Sequence: Synthetic oligonucleotide
agauaauuucggagaaacc

SEQ ID NO: 160289 - RNA, 19 nt, Artificial Sequence
  Description of Artificial Sequence: Synthetic oligonucleotide
acuaauagucuggugagca

SEQ ID NO: 160290 - RNA, 19 nt, Artificial Sequence
  Description of Artificial Sequence: Synthetic oligonucleotide
aggaaugggaaaccuaccu

SEQ ID NO: 160291 - RNA, 19 nt, Artificial Sequence
  Description of Artificial Sequence: Synthetic oligonucleotide
auauucuaguuguagggaa

SEQ ID NO: 160292 - RNA, 19 nt, Artificial Sequence
  Description of Artificial Sequence: Synthetic oligonucleotide
ucaagaccugaauuguuac

SEQ ID NO: 160293 - RNA, 19 nt, Artificial Sequence
  Description of Artificial Sequence: Synthetic oligonucleotide
aaaccuaccucagcauuuc

SEQ ID NO: 160294 - RNA, 19 nt, Artificial Sequence
  Description of Artificial Sequence: Synthetic oligonucleotide
guuucggccagaccaaaag

SEQ ID NO: 160295 - RNA, 19 nt, Artificial Sequence
  Description of Artificial Sequence: Synthetic oligonucleotide
gacauaaauucauaugcua

SEQ ID NO: 160296 - RNA, 19 nt, Artificial Sequence
  Description of Artificial Sequence: Synthetic oligonucleotide
ugagcaaauaaagcuaauc

SEQ ID NO: 160297 - RNA, 19 nt, Artificial Sequence
  Description of Artificial Sequence: Synthetic oligonucleotide
acguuccacauuuacaccu

SEQ ID NO: 160298 - RNA, 19 nt, Artificial Sequence
  Description of Artificial Sequence: Synthetic oligonucleotide
cuaagcacauaacagcuca

SEQ ID NO: 160299 - RNA, 19 nt, Artificial Sequence
  Description of Artificial Sequence: Synthetic oligonucleotide
auuguuaccgcaucauuuu

SEQ ID NO: 160300 - RNA, 19 nt, Artificial Sequence
  Description of Artificial Sequence: Synthetic oligonucleotide
auaguccacacgaucaggg

SEQ ID NO: 160301 - RNA, 19 nt, Artificial Sequence
  Description of Artificial Sequence: Synthetic oligonucleotide
gaaauagauguaccuguuc

SEQ ID NO: 160302 - RNA, 19 nt, Artificial Sequence
  Description of Artificial Sequence: Synthetic oligonucleotide
ucaacguggacaccaaauu

SEQ ID NO: 160303 - RNA, 19 nt, Artificial Sequence
  Description of Artificial Sequence: Synthetic oligonucleotide
uuucggccagaccaaaaga

SEQ ID NO: 160304 - RNA, 19 nt, Artificial Sequence
  Description of Artificial Sequence: Synthetic oligonucleotide
guuguagggaauauauuac

SEQ ID NO: 160305 - RNA, 19 nt, Artificial Sequence
  Description of Artificial Sequence: Synthetic oligonucleotide
aggaaagagagcuccauua

SEQ ID NO: 160306 - RNA, 19 nt, Artificial Sequence
  Description of Artificial Sequence: Synthetic oligonucleotide
uauucuaguuguagggaau

SEQ ID NO: 160307 - RNA, 19 nt, Artificial Sequence
  Description of Artificial Sequence: Synthetic oligonucleotide
ugaaugaaucggccaacga

SEQ ID NO: 160308 - RNA, 19 nt, Artificial Sequence
  Description of Artificial Sequence: Synthetic oligonucleotide
gagcgcaaaugcuccaacg

SEQ ID NO: 160309 - RNA, 19 nt, Artificial Sequence
  Description of Artificial Sequence: Synthetic oligonucleotide
gauaggaccacagaacaaa

SEQ ID NO: 160310 - RNA, 19 nt, Artificial Sequence
  Description of Artificial Sequence: Synthetic oligonucleotide
ugcauccgcacccagaguu

SEQ ID NO: 160311 - RNA, 19 nt, Artificial Sequence
  Description of Artificial Sequence: Synthetic oligonucleotide
agaccuucauagauuggcc

SEQ ID NO: 160312 - RNA, 19 nt, Artificial Sequence
  Description of Artificial Sequence: Synthetic oligonucleotide
aacugcacuacugguagca

SEQ ID NO: 160313 - RNA, 19 nt, Artificial Sequence
  Description of Artificial Sequence: Synthetic oligonucleotide
agucugguaagcuccuuug

SEQ ID NO: 160314 - RNA, 19 nt, Artificial Sequence
  Description of Artificial Sequence: Synthetic oligonucleotide
uccuggauugaggaaauga

SEQ ID NO: 160315 - RNA, 19 nt, Artificial Sequence
  Description of Artificial Sequence: Synthetic oligonucleotide
gacccuuuugccuccauga

SEQ ID NO: 160316 - RNA, 19 nt, Artificial Sequence
  Description of Artificial Sequence: Synthetic oligonucleotide
aacguguuaugaaaaugcu

SEQ ID NO: 160317 - RNA, 19 nt, Artificial Sequence
  Description of Artificial Sequence: Synthetic oligonucleotide
aagcacauaacagcucaug

SEQ ID NO: 160318 - RNA, 19 nt, Artificial Sequence
  Description of Artificial Sequence: Synthetic oligonucleotide
gaugagcaaauaaagcuaa

SEQ ID NO: 160319 - RNA, 19 nt, Artificial Sequence
  Description of Artificial Sequence: Synthetic oligonucleotide
gaaucggccaacgaggcuc

SEQ ID NO: 160320 - RNA, 19 nt, Artificial Sequence
  Description of Artificial Sequence: Synthetic oligonucleotide
guaucaacagguaucuuca

SEQ ID NO: 160321 - RNA, 19 nt, Artificial Sequence
  Description of Artificial Sequence: Synthetic oligonucleotide
gguguaacucagcacaggc

SEQ ID NO: 160322 - RNA, 19 nt, Artificial Sequence
  Description of Artificial Sequence: Synthetic oligonucleotide
augaaucggccaacgaggc

SEQ ID NO: 160323 - RNA, 19 nt, Artificial Sequence
  Description of Artificial Sequence: Synthetic oligonucleotide
aacugacuaaggcgcacca

SEQ ID NO: 160324 - RNA, 19 nt, Artificial Sequence
  Description of Artificial Sequence: Synthetic oligonucleotide
gaauaauguuuccagcaua

SEQ ID NO: 160325 - RNA, 19 nt, Artificial Sequence
  Description of Artificial Sequence: Synthetic oligonucleotide
ucggccagaccaaaagaga

SEQ ID NO: 160326 - RNA, 19 nt, Artificial Sequence
  Description of Artificial Sequence: Synthetic oligonucleotide
cuauggaagggagaccuag

SEQ ID NO: 160327 - RNA, 19 nt, Artificial Sequence
  Description of Artificial Sequence: Synthetic oligonucleotide
aacauccucugauggcaug

SEQ ID NO: 160328 - RNA, 19 nt, Artificial Sequence
  Description of Artificial Sequence: Synthetic oligonucleotide
gcaaugauuauguucuuca

SEQ ID NO: 160329 - RNA, 19 nt, Artificial Sequence
  Description of Artificial Sequence: Synthetic oligonucleotide
uguguuucggccagaccaa

SEQ ID NO: 160330 - RNA, 19 nt, Artificial Sequence
  Description of Artificial Sequence: Synthetic oligonucleotide
uauggaagggagaccuagu

SEQ ID NO: 160331 - RNA, 19 nt, Artificial Sequence
  Description of Artificial Sequence: Synthetic oligonucleotide
cuguauuacuguagccacc

SEQ ID NO: 160332 - RNA, 19 nt, Artificial Sequence
  Description of Artificial Sequence: Synthetic oligonucleotide
uguaauugugaugcauuuc

SEQ ID NO: 160333 - RNA, 19 nt, Artificial Sequence
  Description of Artificial Sequence: Synthetic oligonucleotide
uuguaaguaucaacaggua

SEQ ID NO: 160334 - RNA, 19 nt, Artificial Sequence
  Description of Artificial Sequence: Synthetic oligonucleotide
accuguugugaaaauaugu

SEQ ID NO: 160335 - RNA, 19 nt, Artificial Sequence
  Description of Artificial Sequence: Synthetic oligonucleotide
ccugaaucaacguggacac

SEQ ID NO: 160336 - RNA, 19 nt, Artificial Sequence
  Description of Artificial Sequence: Synthetic oligonucleotide
accuaguaaagcccuuucu

SEQ ID NO: 160337 - RNA, 19 nt, Artificial Sequence
  Description of Artificial Sequence: Synthetic oligonucleotide
acuaagcacauaacagcuc

SEQ ID NO: 160338 - RNA, 19 nt, Artificial Sequence
  Description of Artificial Sequence: Synthetic oligonucleotide
ggcucuaagaaaaggauuc

SEQ ID NO: 160339 - RNA, 19 nt, Artificial Sequence
  Description of Artificial Sequence: Synthetic oligonucleotide
uuguuaccgcaucauuuuc

SEQ ID NO: 160340 - RNA, 19 nt, Artificial Sequence
  Description of Artificial Sequence: Synthetic oligonucleotide
cauaguccacacgaucagg

SEQ ID NO: 160341 - RNA, 19 nt, Artificial Sequence
  Description of Artificial Sequence: Synthetic oligonucleotide
caauaguggagguuauaca

SEQ ID NO: 160342 - RNA, 19 nt, Artificial Sequence
  Description of Artificial Sequence: Synthetic oligonucleotide
guaacguuccacauuuaca

SEQ ID NO: 160343 - RNA, 19 nt, Artificial Sequence
  Description of Artificial Sequence: Synthetic oligonucleotide
uuacaauaguggagguuau

SEQ ID NO: 160344 - RNA, 19 nt, Artificial Sequence
  Description of Artificial Sequence: Synthetic oligonucleotide
cagauaaagccuuggaaua

SEQ ID NO: 160345 - RNA, 19 nt, Artificial Sequence
  Description of Artificial Sequence: Synthetic oligonucleotide
gaagcgaauccguugauuu

SEQ ID NO: 160346 - RNA, 19 nt, Artificial Sequence
  Description of Artificial Sequence: Synthetic oligonucleotide
uccucucaaaaguaccaau

SEQ ID NO: 160347 - RNA, 19 nt, Artificial Sequence
  Description of Artificial Sequence: Synthetic oligonucleotide
caccacggcacauuucuac

SEQ ID NO: 160348 - RNA, 19 nt, Artificial Sequence
  Description of Artificial Sequence: Synthetic oligonucleotide
uggguuagcacuccccauu

SEQ ID NO: 160349 - RNA, 19 nt, Artificial Sequence
  Description of Artificial Sequence: Synthetic oligonucleotide
gaccugaauuguuaccgca

SEQ ID NO: 160350 - RNA, 19 nt, Artificial Sequence
  Description of Artificial Sequence: Synthetic oligonucleotide
uaagcugguucaagaccug

SEQ ID NO: 160351 - RNA, 19 nt, Artificial Sequence
  Description of Artificial Sequence: Synthetic oligonucleotide
uagaaaggaguugcucagc

SEQ ID NO: 160352 - RNA, 19 nt, Artificial Sequence
  Description of Artificial Sequence: Synthetic oligonucleotide
aggaugagaccuucauaga

SEQ ID NO: 160353 - RNA, 19 nt, Artificial Sequence
  Description of Artificial Sequence: Synthetic oligonucleotide
auggaagggagaccuagua

SEQ ID NO: 160354 - RNA, 19 nt, Artificial Sequence
  Description of Artificial Sequence: Synthetic oligonucleotide
gucucagagguaauucagc

SEQ ID NO: 160355 - RNA, 19 nt, Artificial Sequence
  Description of Artificial Sequence: Synthetic oligonucleotide
gaccuaguaaagcccuuuc

SEQ ID NO: 160356 - RNA, 19 nt, Artificial Sequence
  Description of Artificial Sequence: Synthetic oligonucleotide
acguuuacauuuuggugua

SEQ ID NO: 160357 - RNA, 19 nt, Artificial Sequence
  Description of Artificial Sequence: Synthetic oligonucleotide
ugaaucggccaacgaggcu

SEQ ID NO: 160358 - RNA, 19 nt, Artificial Sequence
  Description of Artificial Sequence: Synthetic oligonucleotide
cuaaggcgcaccagauuug

SEQ ID NO: 160359 - RNA, 19 nt, Artificial Sequence
  Description of Artificial Sequence: Synthetic oligonucleotide
uaaggcgcaccagauuugu

SEQ ID NO: 160360 - RNA, 19 nt, Artificial Sequence
  Description of Artificial Sequence: Synthetic oligonucleotide
cuucacgaugagcaaauaa

SEQ ID NO: 160361 - RNA, 19 nt, Artificial Sequence
  Description of Artificial Sequence: Synthetic oligonucleotide
uguuucggccagaccaaaa

SEQ ID NO: 160362 - RNA, 19 nt, Artificial Sequence
  Description of Artificial Sequence: Synthetic oligonucleotide
agacagacguuaaacaauu

SEQ ID NO: 160363 - RNA, 19 nt, Artificial Sequence
  Description of Artificial Sequence: Synthetic oligonucleotide
guuuucgugcuguauucaa

SEQ ID NO: 160364 - RNA, 19 nt, Artificial Sequence
  Description of Artificial Sequence: Synthetic oligonucleotide
acgaucaggguaacauuuc

SEQ ID NO: 160365 - RNA, 19 nt, Artificial Sequence
  Description of Artificial Sequence: Synthetic oligonucleotide
ccuugagcgcaaaugcucc

SEQ ID NO: 160366 - RNA, 19 nt, Artificial Sequence
  Description of Artificial Sequence: Synthetic oligonucleotide
uauucucagauaggaccac

SEQ ID NO: 160367 - RNA, 19 nt, Artificial Sequence
  Description of Artificial Sequence: Synthetic oligonucleotide
gcuggguaaacacaccaca

SEQ ID NO: 160368 - RNA, 19 nt, Artificial Sequence
  Description of Artificial Sequence: Synthetic oligonucleotide
uagcaagauuaaugagaga

SEQ ID NO: 160369 - RNA, 19 nt, Artificial Sequence
  Description of Artificial Sequence: Synthetic oligonucleotide
acaaucuauggaagggaga

SEQ ID NO: 160370 - RNA, 19 nt, Artificial Sequence
  Description of Artificial Sequence: Synthetic oligonucleotide
cuggauugaggaaaugacu

SEQ ID NO: 160371 - RNA, 19 nt, Artificial Sequence
  Description of Artificial Sequence: Synthetic oligonucleotide
cacuaauagucuggugagc

SEQ ID NO: 160372 - RNA, 19 nt, Artificial Sequence
  Description of Artificial Sequence: Synthetic oligonucleotide
ggacuguauuacuguagcc

SEQ ID NO: 160373 - RNA, 19 nt, Artificial Sequence
  Description of Artificial Sequence: Synthetic oligonucleotide
acacgaucaggguaacauu

SEQ ID NO: 160374 - RNA, 19 nt, Artificial Sequence
  Description of Artificial Sequence: Synthetic oligonucleotide
ugauucccgccuugagcgc

SEQ ID NO: 160375 - RNA, 19 nt, Artificial Sequence
  Description of Artificial Sequence: Synthetic oligonucleotide
ucuauggaagggagaccua

SEQ ID NO: 160376 - RNA, 19 nt, Artificial Sequence
  Description of Artificial Sequence: Synthetic oligonucleotide
ggaucaucagaucguagaa

SEQ ID NO: 160377 - RNA, 19 nt, Artificial Sequence
  Description of Artificial Sequence: Synthetic oligonucleotide
aaaccccucaguggaugcu

SEQ ID NO: 160378 - RNA, 19 nt, Artificial Sequence
  Description of Artificial Sequence: Synthetic oligonucleotide
gccaacgaggcucuguuca

SEQ ID NO: 160379 - RNA, 19 nt, Artificial Sequence
  Description of Artificial Sequence: Synthetic oligonucleotide
gcgcaaaugcuccaacgug

SEQ ID NO: 160380 - RNA, 19 nt, Artificial Sequence
  Description of Artificial Sequence: Synthetic oligonucleotide
auaguggagguuauacaua

SEQ ID NO: 160381 - RNA, 19 nt, Artificial Sequence
  Description of Artificial Sequence: Synthetic oligonucleotide
guagcgagggguccaugca

SEQ ID NO: 160382 - RNA, 19 nt, Artificial Sequence
  Description of Artificial Sequence: Synthetic oligonucleotide
guauuacuguagccaccug

SEQ ID NO: 160383 - RNA, 19 nt, Artificial Sequence
  Description of Artificial Sequence: Synthetic oligonucleotide
aaucggccaacgaggcucu

SEQ ID NO: 160384 - RNA, 19 nt, Artificial Sequence
  Description of Artificial Sequence: Synthetic oligonucleotide
gggagaccuaguaaagccc

SEQ ID NO: 160385 - RNA, 19 nt, Artificial Sequence
  Description of Artificial Sequence: Synthetic oligonucleotide
agcugauaagcugcaaaua

SEQ ID NO: 160386 - RNA, 19 nt, Artificial Sequence
  Description of Artificial Sequence: Synthetic oligonucleotide
ccacggugcuuuaaaauuc

SEQ ID NO: 160387 - RNA, 19 nt, Artificial Sequence
  Description of Artificial Sequence: Synthetic oligonucleotide
ccgccuugagcgcaaaugc

SEQ ID NO: 160388 - RNA, 19 nt, Artificial Sequence
  Description of Artificial Sequence: Synthetic oligonucleotide
guuuguaacguuccacauu

SEQ ID NO: 160389 - RNA, 19 nt, Artificial Sequence
  Description of Artificial Sequence: Synthetic oligonucleotide
ggaugagaccuucauagau

SEQ ID NO: 160390 - RNA, 19 nt, Artificial Sequence
  Description of Artificial Sequence: Synthetic oligonucleotide
ccugaauuguuaccgcauc

SEQ ID NO: 160391 - RNA, 19 nt, Artificial Sequence
  Description of Artificial Sequence: Synthetic oligonucleotide
cacgaucaggguaacauuu

SEQ ID NO: 160392 - RNA, 19 nt, Artificial Sequence
  Description of Artificial Sequence: Synthetic oligonucleotide
uuguaacguuccacauuua

SEQ ID NO: 160393 - RNA, 19 nt, Artificial Sequence
  Description of Artificial Sequence: Synthetic oligonucleotide
gcacauaacagcucaugcu

SEQ ID NO: 160394 - RNA, 19 nt, Artificial Sequence
  Description of Artificial Sequence: Synthetic oligonucleotide
gaaucaacguggacaccaa

SEQ ID NO: 160395 - RNA, 19 nt, Artificial Sequence
  Description of Artificial Sequence: Synthetic oligonucleotide
cauccgcacccagaguuug

SEQ ID NO: 160396 - RNA, 19 nt, Artificial Sequence
  Description of Artificial Sequence: Synthetic oligonucleotide
acggcacauuucuaccaaa

SEQ ID NO: 160397 - RNA, 19 nt, Artificial Sequence
  Description of Artificial Sequence: Synthetic oligonucleotide
guuaccgcaucauuuucuu

SEQ ID NO: 160398 - RNA, 19 nt, Artificial Sequence
  Description of Artificial Sequence: Synthetic oligonucleotide
gacucaagauuugggagau

SEQ ID NO: 160399 - RNA, 19 nt, Artificial Sequence
  Description of Artificial Sequence: Synthetic oligonucleotide
acucaagauuugggagauc

SEQ ID NO: 160400 - RNA, 19 nt, Artificial Sequence
  Description of Artificial Sequence: Synthetic oligonucleotide
cugaaucaacguggacacc

SEQ ID NO: 160401 - RNA, 19 nt, Artificial Sequence
  Description of Artificial Sequence: Synthetic oligonucleotide
cagcugauaagcugcaaau

SEQ ID NO: 160402 - RNA, 19 nt, Artificial Sequence
  Description of Artificial Sequence: Synthetic oligonucleotide
cuguuaagauauuguugua

SEQ ID NO: 160403 - RNA, 19 nt, Artificial Sequence
  Description of Artificial Sequence: Synthetic oligonucleotide
ggacauaaauucauaugcu

SEQ ID NO: 160404 - RNA, 19 nt, Artificial Sequence
  Description of Artificial Sequence: Synthetic oligonucleotide
agcgagggguccaugcacu

SEQ ID NO: 160405 - RNA, 19 nt, Artificial Sequence
  Description of Artificial Sequence: Synthetic oligonucleotide
cacggugcuuuaaaauucu

SEQ ID NO: 160406 - RNA, 19 nt, Artificial Sequence
  Description of Artificial Sequence: Synthetic oligonucleotide
augagcaaauaaagcuaau

SEQ ID NO: 160407 - RNA, 19 nt, Artificial Sequence
  Description of Artificial Sequence: Synthetic oligonucleotide
ucggccaacgaggcucugu

SEQ ID NO: 160408 - RNA, 19 nt, Artificial Sequence
  Description of Artificial Sequence: Synthetic oligonucleotide
caugcuacuuggggugauc

SEQ ID NO: 160409 - RNA, 19 nt, Artificial Sequence
  Description of Artificial Sequence: Synthetic oligonucleotide
aggcuuuaucuugcauuca

SEQ ID NO: 160410 - RNA, 19 nt, Artificial Sequence
  Description of Artificial Sequence: Synthetic oligonucleotide
ucaugcuacuuggggugau

SEQ ID NO: 160411 - RNA, 19 nt, Artificial Sequence
  Description of Artificial Sequence: Synthetic oligonucleotide
gugaucagacagacguuaa

SEQ ID NO: 160412 - RNA, 19 nt, Artificial Sequence
  Description of Artificial Sequence: Synthetic oligonucleotide
acugcacuacugguagcaa

SEQ ID NO: 160413 - RNA, 19 nt, Artificial Sequence
  Description of Artificial Sequence: Synthetic oligonucleotide
gacagacguuaaacaauua

SEQ ID NO: 160414 - RNA, 19 nt, Artificial Sequence
  Description of Artificial Sequence: Synthetic oligonucleotide
gucaugcuacuugggguga

SEQ ID NO: 160415 - RNA, 19 nt, Artificial Sequence
  Description of Artificial Sequence: Synthetic oligonucleotide
ggaaaccuaccucagcauu

SEQ ID NO: 160416 - RNA, 19 nt, Artificial Sequence
  Description of Artificial Sequence: Synthetic oligonucleotide
gacuaaggcgcaccagauu

SEQ ID NO: 160417 - RNA, 19 nt, Artificial Sequence
  Description of Artificial Sequence: Synthetic oligonucleotide
aguggagguuauacauaaa

SEQ ID NO: 160418 - RNA, 19 nt, Artificial Sequence
  Description of Artificial Sequence: Synthetic oligonucleotide
cccgccuugagcgcaaaug

SEQ ID NO: 160419 - RNA, 19 nt, Artificial Sequence
  Description of Artificial Sequence: Synthetic oligonucleotide
cauuaguagcaagguuaaa

SEQ ID NO: 160420 - RNA, 19 nt, Artificial Sequence
  Description of Artificial Sequence: Synthetic oligonucleotide
acggugcuuuaaaauucuu

SEQ ID NO: 160421 - RNA, 19 nt, Artificial Sequence
  Description of Artificial Sequence: Synthetic oligonucleotide
gugaagcgaauccguugau

SEQ ID NO: 160422 - RNA, 19 nt, Artificial Sequence
  Description of Artificial Sequence: Synthetic oligonucleotide
ccguugauuuccaccagcu

SEQ ID NO: 160423 - RNA, 19 nt, Artificial Sequence
  Description of Artificial Sequence: Synthetic oligonucleotide
ggccaacgaggcucuguuc

SEQ ID NO: 160424 - RNA, 19 nt, Artificial Sequence
  Description of Artificial Sequence: Synthetic oligonucleotide
cuggguuagcacuccccau

SEQ ID NO: 160425 - RNA, 19 nt, Artificial Sequence
  Description of Artificial Sequence: Synthetic oligonucleotide
auucccgccuugagcgcaa

SEQ ID NO: 160426 - RNA, 19 nt, Artificial Sequence
  Description of Artificial Sequence: Synthetic oligonucleotide
gcgaauccguugauuucca

SEQ ID NO: 160427 - RNA, 19 nt, Artificial Sequence
  Description of Artificial Sequence: Synthetic oligonucleotide
gagaccuaguaaagcccuu

SEQ ID NO: 160428 - RNA, 19 nt, Artificial Sequence
  Description of Artificial Sequence: Synthetic oligonucleotide
cuuguagcgagggguccau

SEQ ID NO: 160429 - RNA, 19 nt, Artificial Sequence
  Description of Artificial Sequence: Synthetic oligonucleotide
aucggccaacgaggcucug

SEQ ID NO: 160430 - RNA, 19 nt, Artificial Sequence
  Description of Artificial Sequence: Synthetic oligonucleotide
uucccgccuugagcgcaaa

SEQ ID NO: 160431 - RNA, 19 nt, Artificial Sequence
  Description of Artificial Sequence: Synthetic oligonucleotide
ccuucauagauuggccccu

SEQ ID NO: 160432 - RNA, 19 nt, Artificial Sequence
  Description of Artificial Sequence: Synthetic oligonucleotide
gcccuuucugguggguaga

SEQ ID NO: 160433 - RNA, 19 nt, Artificial Sequence
  Description of Artificial Sequence: Synthetic oligonucleotide
ccaacgaggcucuguucau

SEQ ID NO: 160434 - RNA, 19 nt, Artificial Sequence
  Description of Artificial Sequence: Synthetic oligonucleotide
ccacacgaucaggguaaca

SEQ ID NO: 160435 - RNA, 19 nt, Artificial Sequence
  Description of Artificial Sequence: Synthetic oligonucleotide
cguuccacauuuacaccuu

SEQ ID NO: 160436 - RNA, 19 nt, Artificial Sequence
  Description of Artificial Sequence: Synthetic oligonucleotide
cggccaacgaggcucuguu

SEQ ID NO: 160437 - RNA, 19 nt, Artificial Sequence
  Description of Artificial Sequence: Synthetic oligonucleotide
cuuaacaucaaucaaguag

SEQ ID NO: 160438 - RNA, 19 nt, Artificial Sequence
  Description of Artificial Sequence: Synthetic oligonucleotide
uuaacaucaaucaaguaga

SEQ ID NO: 160439 - RNA, 19 nt, Artificial Sequence
  Description of Artificial Sequence: Synthetic oligonucleotide
ugugcauauugucauagcg

SEQ ID NO: 160440 - RNA, 19 nt, Artificial Sequence
  Description of Artificial Sequence: Synthetic oligonucleotide
uaugauguaguuuccaggc

SEQ ID NO: 160441 - RNA, 19 nt, Artificial Sequence
  Description of Artificial Sequence: Synthetic oligonucleotide
uuaauguuuaugauguagu

SEQ ID NO: 160442 - RNA, 19 nt, Artificial Sequence
  Description of Artificial Sequence: Synthetic oligonucleotide
ugggauaugcucaucaccc

SEQ ID NO: 160443 - RNA, 19 nt, Artificial Sequence
  Description of Artificial Sequence: Synthetic oligonucleotide
uucacgaagaccuugucca

SEQ ID NO: 160444 - RNA, 19 nt, Artificial Sequence
  Description of Artificial Sequence: Synthetic oligonucleotide
uguguugacgauaaacuca

SEQ ID NO: 160445 - RNA, 19 nt, Artificial Sequence
  Description of Artificial Sequence: Synthetic oligonucleotide
aguaaguaugguucucucc

SEQ ID NO: 160446 - RNA, 19 nt, Artificial Sequence
  Description of Artificial Sequence: Synthetic oligonucleotide
acaaaucggauacaguaag

SEQ ID NO: 160447 - RNA, 19 nt, Artificial Sequence
  Description of Artificial Sequence: Synthetic oligonucleotide
ugugauacuuucuuucacc

SEQ ID NO: 160448 - RNA, 19 nt, Artificial Sequence
  Description of Artificial Sequence: Synthetic oligonucleotide
cuuuaggugggacauacgc

SEQ ID NO: 160449 - RNA, 19 nt, Artificial Sequence
  Description of Artificial Sequence: Synthetic oligonucleotide
gaaacaguaaggcggcggg

SEQ ID NO: 160450 - RNA, 19 nt, Artificial Sequence
  Description of Artificial Sequence: Synthetic oligonucleotide
ucuuggauacuaauuucag

SEQ ID NO: 160451 - RNA, 19 nt, Artificial Sequence
  Description of Artificial Sequence: Synthetic oligonucleotide
cuuggauacuaauuucagg

SEQ ID NO: 160452 - RNA, 19 nt, Artificial Sequence
  Description of Artificial Sequence: Synthetic oligonucleotide
agcauacuuaucuugguca

SEQ ID NO: 160453 - RNA, 19 nt, Artificial Sequence
  Description of Artificial Sequence: Synthetic oligonucleotide
acuaaggucuguuucugag

SEQ ID NO: 160454 - RNA, 19 nt, Artificial Sequence
  Description of Artificial Sequence: Synthetic oligonucleotide
uuacuaacaagacggggac

SEQ ID NO: 160455 - RNA, 19 nt, Artificial Sequence
  Description of Artificial Sequence: Synthetic oligonucleotide
aaacgcacagcauacuuau

SEQ ID NO: 160456 - RNA, 19 nt, Artificial Sequence
  Description of Artificial Sequence: Synthetic oligonucleotide
ucagcaggcacaaaucgga

SEQ ID NO: 160457 - RNA, 19 nt, Artificial Sequence
  Description of Artificial Sequence: Synthetic oligonucleotide
aaucggauacaguaaguau

SEQ ID NO: 160458 - RNA, 19 nt, Artificial Sequence
  Description of Artificial Sequence: Synthetic oligonucleotide
auacgcauggaaucgucac

SEQ ID NO: 160459 - RNA, 19 nt, Artificial Sequence
  Description of Artificial Sequence: Synthetic oligonucleotide
uuuaggugggacauacgca

SEQ ID NO: 160460 - RNA, 19 nt, Artificial Sequence
  Description of Artificial Sequence: Synthetic oligonucleotide
guuguuaccugcuuugcug

SEQ ID NO: 160461 - RNA, 19 nt, Artificial Sequence
  Description of Artificial Sequence: Synthetic oligonucleotide
gauacuaauuucaggaauc

SEQ ID NO: 160462 - RNA, 19 nt, Artificial Sequence
  Description of Artificial Sequence: Synthetic oligonucleotide
gaaccaaaggagucaggcg

SEQ ID NO: 160463 - RNA, 19 nt, Artificial Sequence
  Description of Artificial Sequence: Synthetic oligonucleotide
aagacugugguuacuaaca

SEQ ID NO: 160464 - RNA, 19 nt, Artificial Sequence
  Description of Artificial Sequence: Synthetic oligonucleotide
uugggcacgaaggaaaucc

SEQ ID NO: 160465 - RNA, 19 nt, Artificial Sequence
  Description of Artificial Sequence: Synthetic oligonucleotide
uuaggugggacauacgcau

SEQ ID NO: 160466 - RNA, 19 nt, Artificial Sequence
  Description of Artificial Sequence: Synthetic oligonucleotide
ucagggaguccacaaauac

SEQ ID NO: 160467 - RNA, 19 nt, Artificial Sequence
  Description of Artificial Sequence: Synthetic oligonucleotide
ugugauagggcccaccaua

SEQ ID NO: 160468 - RNA, 19 nt, Artificial Sequence
  Description of Artificial Sequence: Synthetic oligonucleotide
ucaaguagaugccauucuc

SEQ ID NO: 160469 - RNA, 19 nt, Artificial Sequence
  Description of Artificial Sequence: Synthetic oligonucleotide
agagugaucuaagggaggg

SEQ ID NO: 160470 - RNA, 19 nt, Artificial Sequence
  Description of Artificial Sequence: Synthetic oligonucleotide
cauaaugcgguaugggcug

SEQ ID NO: 160471 - RNA, 19 nt, Artificial Sequence
  Description of Artificial Sequence: Synthetic oligonucleotide
uguuuaugauguaguuucc

SEQ ID NO: 160472 - RNA, 19 nt, Artificial Sequence
  Description of Artificial Sequence: Synthetic oligonucleotide
cagauguugucucaugaag

SEQ ID NO: 160473 - RNA, 19 nt, Artificial Sequence
  Description of Artificial Sequence: Synthetic oligonucleotide
cuugacgcugacuguaugc

SEQ ID NO: 160474 - RNA, 19 nt, Artificial Sequence
  Description of Artificial Sequence: Synthetic oligonucleotide
ugagguagcuuccgggugc

SEQ ID NO: 160475 - RNA, 19 nt, Artificial Sequence
  Description of Artificial Sequence: Synthetic oligonucleotide
gugaguagcgcacaguaac

SEQ ID NO: 160476 - RNA, 19 nt, Artificial Sequence
  Description of Artificial Sequence: Synthetic oligonucleotide
gaugaaacgcacagcauac

SEQ ID NO: 160477 - RNA, 19 nt, Artificial Sequence
  Description of Artificial Sequence: Synthetic oligonucleotide
ugcgguaugggcugccugg

SEQ ID NO: 160478 - RNA, 19 nt, Artificial Sequence
  Description of Artificial Sequence: Synthetic oligonucleotide
uuguuaccugcuuugcugc

SEQ ID NO: 160479 - RNA, 19 nt, Artificial Sequence
  Description of Artificial Sequence: Synthetic oligonucleotide
guuacuaacaagacgggga

SEQ ID NO: 160480 - RNA, 19 nt, Artificial Sequence
  Description of Artificial Sequence: Synthetic oligonucleotide
gugcauauugucauagcgg

SEQ ID NO: 160481 - RNA, 19 nt, Artificial Sequence
  Description of Artificial Sequence: Synthetic oligonucleotide
aaaucggauacaguaagua

SEQ ID NO: 160482 - RNA, 19 nt, Artificial Sequence
  Description of Artificial Sequence: Synthetic oligonucleotide
uuguguugacgauaaacuc

SEQ ID NO: 160483 - RNA, 19 nt, Artificial Sequence
  Description of Artificial Sequence: Synthetic oligonucleotide
gcauguaccauccuccagg

SEQ ID NO: 160484 - RNA, 19 nt, Artificial Sequence
  Description of Artificial Sequence: Synthetic oligonucleotide
guagacuaaggucuguuuc

SEQ ID NO: 160485 - RNA, 19 nt, Artificial Sequence
  Description of Artificial Sequence: Synthetic oligonucleotide
acuaacaagacggggaccu

SEQ ID NO: 160486 - RNA, 19 nt, Artificial Sequence
  Description of Artificial Sequence: Synthetic oligonucleotide
cacauguuggcccuuguac

SEQ ID NO: 160487 - RNA, 19 nt, Artificial Sequence
  Description of Artificial Sequence: Synthetic oligonucleotide
ugacucuugcagugaaggg

SEQ ID NO: 160488 - RNA, 19 nt, Artificial Sequence
  Description of Artificial Sequence: Synthetic oligonucleotide
cauggaaucgucaccugug

SEQ ID NO: 160489 - RNA, 19 nt, Artificial Sequence
  Description of Artificial Sequence: Synthetic oligonucleotide
cucagcaggcacaaaucgg

SEQ ID NO: 160490 - RNA, 19 nt, Artificial Sequence
  Description of Artificial Sequence: Synthetic oligonucleotide
guagcgcacaguaacacag

SEQ ID NO: 160491 - RNA, 19 nt, Artificial Sequence
  Description of Artificial Sequence: Synthetic oligonucleotide
agaaacaguaaggcggcgg

SEQ ID NO: 160492 - RNA, 19 nt, Artificial Sequence
  Description of Artificial Sequence: Synthetic oligonucleotide
cugaagacuagaaacagua

SEQ ID NO: 160493 - RNA, 19 nt, Artificial Sequence
  Description of Artificial Sequence: Synthetic oligonucleotide
auccuuacgguccucaaaa

SEQ ID NO: 160494 - RNA, 19 nt, Artificial Sequence
  Description of Artificial Sequence: Synthetic oligonucleotide
ugggacauacgcauggaau

SEQ ID NO: 160495 - RNA, 19 nt, Artificial Sequence
  Description of Artificial Sequence: Synthetic oligonucleotide
uguuguuaccugcuuugcu

SEQ ID NO: 160496 - RNA, 19 nt, Artificial Sequence
  Description of Artificial Sequence: Synthetic oligonucleotide
agguaugugcuccucguug

SEQ ID NO: 160497 - RNA, 19 nt, Artificial Sequence
  Description of Artificial Sequence: Synthetic oligonucleotide
ugaaacgcacagcauacuu

SEQ ID NO: 160498 - RNA, 19 nt, Artificial Sequence
  Description of Artificial Sequence: Synthetic oligonucleotide
uacgcauggaaucgucacc

SEQ ID NO: 160499 - RNA, 19 nt, Artificial Sequence
  Description of Artificial Sequence: Synthetic oligonucleotide
ggaugcuauagucaccagg

SEQ ID NO: 160500 - RNA, 19 nt, Artificial Sequence
  Description of Artificial Sequence: Synthetic oligonucleotide
cuuguguugacgauaaacu

SEQ ID NO: 160501 - RNA, 19 nt, Artificial Sequence
  Description of Artificial Sequence: Synthetic oligonucleotide
cugggauaugcucaucacc

SEQ ID NO: 160502 - RNA, 19 nt, Artificial Sequence
  Description of Artificial Sequence: Synthetic oligonucleotide
gcugucauaucuuggauac

SEQ ID NO: 160503 - RNA, 19 nt, Artificial Sequence
  Description of Artificial Sequence: Synthetic oligonucleotide
ugaugucuaccuugcuagg

SEQ ID NO: 160504 - RNA, 19 nt, Artificial Sequence
  Description of Artificial Sequence: Synthetic oligonucleotide
uggauacuaauuucaggaa

SEQ ID NO: 160505 - RNA, 19 nt, Artificial Sequence
  Description of Artificial Sequence: Synthetic oligonucleotide
guaccauugaacuuaacau

SEQ ID NO: 160506 - RNA, 19 nt, Artificial Sequence
  Description of Artificial Sequence: Synthetic oligonucleotide
gaaucgucaccugugacuc

SEQ ID NO: 160507 - RNA, 19 nt, Artificial Sequence
  Description of Artificial Sequence: Synthetic oligonucleotide
acgaaggaaauccccacgu

SEQ ID NO: 160508 - RNA, 19 nt, Artificial Sequence
  Description of Artificial Sequence: Synthetic oligonucleotide
aacuagcaagugguuguac

SEQ ID NO: 160509 - RNA, 19 nt, Artificial Sequence
  Description of Artificial Sequence: Synthetic oligonucleotide
aucaaguagaugccauucu

SEQ ID NO: 160510 - RNA, 19 nt, Artificial Sequence
  Description of Artificial Sequence: Synthetic oligonucleotide
gagacccucacacgacugg

SEQ ID NO: 160511 - RNA, 19 nt, Artificial Sequence
  Description of Artificial Sequence: Synthetic oligonucleotide
caggccuuuggcuacuacc

SEQ ID NO: 160512 - RNA, 19 nt, Artificial Sequence
  Description of Artificial Sequence: Synthetic oligonucleotide
ugugacucuugcagugaag

SEQ ID NO: 160513 - RNA, 19 nt, Artificial Sequence
  Description of Artificial Sequence: Synthetic oligonucleotide
augguaacggaaagggcac

SEQ ID NO: 160514 - RNA, 19 nt, Artificial Sequence
  Description of Artificial Sequence: Synthetic oligonucleotide
accacgaaagggcuaucag

SEQ ID NO: 160515 - RNA, 19 nt, Artificial Sequence
  Description of Artificial Sequence: Synthetic oligonucleotide
agauauugaugggaauauc

SEQ ID NO: 160516 - RNA, 19 nt, Artificial Sequence
  Description of Artificial Sequence: Synthetic oligonucleotide
ugaacuacguaggccacac

SEQ ID NO: 160517 - RNA, 19 nt, Artificial Sequence
  Description of Artificial Sequence: Synthetic oligonucleotide
uugcuaguugucaggcuca

SEQ ID NO: 160518 - RNA, 19 nt, Artificial Sequence
  Description of Artificial Sequence: Synthetic oligonucleotide
uucuacgaucucugccucg

SEQ ID NO: 160519 - RNA, 19 nt, Artificial Sequence
  Description of Artificial Sequence: Synthetic oligonucleotide
gaacccaccuuuagguggg

SEQ ID NO: 160520 - RNA, 19 nt, Artificial Sequence
  Description of Artificial Sequence: Synthetic oligonucleotide
gaaagggcuaucagguaug

SEQ ID NO: 160521 - RNA, 19 nt, Artificial Sequence
  Description of Artificial Sequence: Synthetic oligonucleotide
uccaaaugcugaacuccgc

SEQ ID NO: 160522 - RNA, 19 nt, Artificial Sequence
  Description of Artificial Sequence: Synthetic oligonucleotide
uauaggugacacgguagcc

SEQ ID NO: 160523 - RNA, 19 nt, Artificial Sequence
  Description of Artificial Sequence: Synthetic oligonucleotide
cucucgugggaugaaacgc

SEQ ID NO: 160524 - RNA, 19 nt, Artificial Sequence
  Description of Artificial Sequence: Synthetic oligonucleotide
aguagcgcacaguaacaca

SEQ ID NO: 160525 - RNA, 19 nt, Artificial Sequence
  Description of Artificial Sequence: Synthetic oligonucleotide
ugaucuaagggagggccca

SEQ ID NO: 160526 - RNA, 19 nt, Artificial Sequence
  Description of Artificial Sequence: Synthetic oligonucleotide
caagugguuguacauagaa

SEQ ID NO: 160527 - RNA, 19 nt, Artificial Sequence
  Description of Artificial Sequence: Synthetic oligonucleotide
caagacggggaccugugac

SEQ ID NO: 160528 - RNA, 19 nt, Artificial Sequence
  Description of Artificial Sequence: Synthetic oligonucleotide
augagguagcuuccgggug

SEQ ID NO: 160529 - RNA, 19 nt, Artificial Sequence
  Description of Artificial Sequence: Synthetic oligonucleotide
ggacauacgcauggaaucg

SEQ ID NO: 160530 - RNA, 19 nt, Artificial Sequence
  Description of Artificial Sequence: Synthetic oligonucleotide
ugaagacugugguuacuaa

SEQ ID NO: 160531 - RNA, 19 nt, Artificial Sequence
  Description of Artificial Sequence: Synthetic oligonucleotide
auaaugcgguaugggcugc

SEQ ID NO: 160532 - RNA, 19 nt, Artificial Sequence
  Description of Artificial Sequence: Synthetic oligonucleotide
ugaacuggaaugggcuccc

SEQ ID NO: 160533 - RNA, 19 nt, Artificial Sequence
  Description of Artificial Sequence: Synthetic oligonucleotide
aacaagacggggaccugug

SEQ ID NO: 160534 - RNA, 19 nt, Artificial Sequence
  Description of Artificial Sequence: Synthetic oligonucleotide
gugugauacuuucuuucac

SEQ ID NO: 160535 - RNA, 19 nt, Artificial Sequence
  Description of Artificial Sequence: Synthetic oligonucleotide
uaacaagacggggaccugu

SEQ ID NO: 160536 - RNA, 19 nt, Artificial Sequence
  Description of Artificial Sequence: Synthetic oligonucleotide
cacaaaucggauacaguaa

SEQ ID NO: 160537 - RNA, 19 nt, Artificial Sequence
  Description of Artificial Sequence: Synthetic oligonucleotide
gguauaggugacacgguag

SEQ ID NO: 160538 - RNA, 19 nt, Artificial Sequence
  Description of Artificial Sequence: Synthetic oligonucleotide
uagcgcacaguaacacagc

SEQ ID NO: 160539 - RNA, 19 nt, Artificial Sequence
  Description of Artificial Sequence: Synthetic oligonucleotide
caccauaaugcgguauggg

SEQ ID NO: 160540 - RNA, 19 nt, Artificial Sequence
  Description of Artificial Sequence: Synthetic oligonucleotide
cacgguagcccucagggca

SEQ ID NO: 160541 - RNA, 19 nt, Artificial Sequence
  Description of Artificial Sequence: Synthetic oligonucleotide
acaguaagugacccugcau

SEQ ID NO: 160542 - RNA, 19 nt, Artificial Sequence
  Description of Artificial Sequence: Synthetic oligonucleotide
uguagagacggcugcccau

SEQ ID NO: 160543 - RNA, 19 nt, Artificial Sequence
  Description of Artificial Sequence: Synthetic oligonucleotide
gguaugaccuucacgaaga

SEQ ID NO: 160544 - RNA, 19 nt, Artificial Sequence
  Description of Artificial Sequence: Synthetic oligonucleotide
gcuaucagguaugugcucc

SEQ ID NO: 160545 - RNA, 19 nt, Artificial Sequence
  Description of Artificial Sequence: Synthetic oligonucleotide
cagaacccaccuuuaggug

SEQ ID NO: 160546 - RNA, 19 nt, Artificial Sequence
  Description of Artificial Sequence: Synthetic oligonucleotide
uacuaacaagacggggacc

SEQ ID NO: 160547 - RNA, 19 nt, Artificial Sequence
  Description of Artificial Sequence: Synthetic oligonucleotide
acauacgcauggaaucguc

SEQ ID NO: 160548 - RNA, 19 nt, Artificial Sequence
  Description of Artificial Sequence: Synthetic oligonucleotide
caggaugcuauagucacca

SEQ ID NO: 160549 - RNA, 19 nt, Artificial Sequence
  Description of Artificial Sequence: Synthetic oligonucleotide
agacacuguagagacggcu

SEQ ID NO: 160550 - RNA, 19 nt, Artificial Sequence
  Description of Artificial Sequence: Synthetic oligonucleotide
ggaacaguggcaacuuuug

SEQ ID NO: 160551 - RNA, 19 nt, Artificial Sequence
  Description of Artificial Sequence: Synthetic oligonucleotide
gauagggcccaccauacuu

SEQ ID NO: 160552 - RNA, 19 nt, Artificial Sequence
  Description of Artificial Sequence: Synthetic oligonucleotide
gacuaaggucuguuucuga

SEQ ID NO: 160553 - RNA, 19 nt, Artificial Sequence
  Description of Artificial Sequence: Synthetic oligonucleotide
ucgugggaugaaacgcaca

SEQ ID NO: 160554 - RNA, 19 nt, Artificial Sequence
  Description of Artificial Sequence: Synthetic oligonucleotide
cucgugggaugaaacgcac

SEQ ID NO: 160555 - RNA, 19 nt, Artificial Sequence
  Description of Artificial Sequence: Synthetic oligonucleotide
cccuuuacccaagugaaag

SEQ ID NO: 160556 - RNA, 19 nt, Artificial Sequence
  Description of Artificial Sequence: Synthetic oligonucleotide
caaccgcuucagcaaacag

SEQ ID NO: 160557 - RNA, 19 nt, Artificial Sequence
  Description of Artificial Sequence: Synthetic oligonucleotide
aacgcacagcauacuuauc

SEQ ID NO: 160558 - RNA, 19 nt, Artificial Sequence
  Description of Artificial Sequence: Synthetic oligonucleotide
gagauauugaugggaauau

SEQ ID NO: 160559 - RNA, 19 nt, Artificial Sequence
  Description of Artificial Sequence: Synthetic oligonucleotide
cuacguaggccacaccaca

SEQ ID NO: 160560 - RNA, 19 nt, Artificial Sequence
  Description of Artificial Sequence: Synthetic oligonucleotide
cuuucacccggcccucacc

SEQ ID NO: 160561 - RNA, 19 nt, Artificial Sequence
  Description of Artificial Sequence: Synthetic oligonucleotide
ugcgugugauacuuucuuu

SEQ ID NO: 160562 - RNA, 19 nt, Artificial Sequence
  Description of Artificial Sequence: Synthetic oligonucleotide
guagagacggcugcccaug

SEQ ID NO: 160563 - RNA, 19 nt, Artificial Sequence
  Description of Artificial Sequence: Synthetic oligonucleotide
aauccccacguggccauug

SEQ ID NO: 160564 - RNA, 19 nt, Artificial Sequence
  Description of Artificial Sequence: Synthetic oligonucleotide
cauugcgcaaccgcuucag

SEQ ID NO: 160565 - RNA, 19 nt, Artificial Sequence
  Description of Artificial Sequence: Synthetic oligonucleotide
gcgugugauacuuucuuuc

SEQ ID NO: 160566 - RNA, 19 nt, Artificial Sequence
  Description of Artificial Sequence: Synthetic oligonucleotide
gaucacuacugggauggga

SEQ ID NO: 160567 - RNA, 19 nt, Artificial Sequence
  Description of Artificial Sequence: Synthetic oligonucleotide
cugagguugcaagcugggg

SEQ ID NO: 160568 - RNA, 19 nt, Artificial Sequence
  Description of Artificial Sequence: Synthetic oligonucleotide
cuucuacgaucucugccuc

SEQ ID NO: 160569 - RNA, 19 nt, Artificial Sequence
  Description of Artificial Sequence: Synthetic oligonucleotide
acuuaauguuuaugaugua

SEQ ID NO: 160570 - RNA, 19 nt, Artificial Sequence
  Description of Artificial Sequence: Synthetic oligonucleotide
ugaguagacuaaggucugu

SEQ ID NO: 160571 - RNA, 19 nt, Artificial Sequence
  Description of Artificial Sequence: Synthetic oligonucleotide
gagugaucuaagggagggc

SEQ ID NO: 160572 - RNA, 19 nt, Artificial Sequence
  Description of Artificial Sequence: Synthetic oligonucleotide
agcaggcacaaaucggaua

SEQ ID NO: 160573 - RNA, 19 nt, Artificial Sequence
  Description of Artificial Sequence: Synthetic oligonucleotide
acaagacggggaccuguga

SEQ ID NO: 160574 - RNA, 19 nt, Artificial Sequence
  Description of Artificial Sequence: Synthetic oligonucleotide
aggaugcuauagucaccag

SEQ ID NO: 160575 - RNA, 19 nt, Artificial Sequence
  Description of Artificial Sequence: Synthetic oligonucleotide
ggauacuaauuucaggaau

SEQ ID NO: 160576 - RNA, 19 nt, Artificial Sequence
  Description of Artificial Sequence: Synthetic oligonucleotide
ggaaucgucaccugugacu

SEQ ID NO: 160577 - RNA, 19 nt, Artificial Sequence
  Description of Artificial Sequence: Synthetic oligonucleotide
gaacuacguaggccacacc

SEQ ID NO: 160578 - RNA, 19 nt, Artificial Sequence
  Description of Artificial Sequence: Synthetic oligonucleotide
gggauaugcucaucacccc

SEQ ID NO: 160579 - RNA, 19 nt, Artificial Sequence
  Description of Artificial Sequence: Synthetic oligonucleotide
uagagacggcugcccaugu

SEQ ID NO: 160580 - RNA, 19 nt, Artificial Sequence
  Description of Artificial Sequence: Synthetic oligonucleotide
acguggccauugcgcaacc

SEQ ID NO: 160581 - RNA, 19 nt, Artificial Sequence
  Description of Artificial Sequence: Synthetic oligonucleotide
augcgguaugggcugccug

SEQ ID NO: 160582 - RNA, 19 nt, Artificial Sequence
  Description of Artificial Sequence: Synthetic oligonucleotide
ggcgucaccagacggagaa

SEQ ID NO: 160583 - RNA, 19 nt, Artificial Sequence
  Description of Artificial Sequence: Synthetic oligonucleotide
aaggggcacgucgccugcg

SEQ ID NO: 160584 - RNA, 19 nt, Artificial Sequence
  Description of Artificial Sequence: Synthetic oligonucleotide
uaaugcgguaugggcugcc

SEQ ID NO: 160585 - RNA, 19 nt, Artificial Sequence
  Description of Artificial Sequence: Synthetic oligonucleotide
gcaccauaaugcgguaugg

SEQ ID NO: 160586 - RNA, 19 nt, Artificial Sequence
  Description of Artificial Sequence: Synthetic oligonucleotide
aacuugacugagaccucau

SEQ ID NO: 160587 - RNA, 19 nt, Artificial Sequence
  Description of Artificial Sequence: Synthetic oligonucleotide
aguaaggcggcgggcguca

SEQ ID NO: 160588 - RNA, 19 nt, Artificial Sequence
  Description of Artificial Sequence: Synthetic oligonucleotide
acgaaagggcuaucaggua

SEQ ID NO: 160589 - RNA, 19 nt, Artificial Sequence
  Description of Artificial Sequence: Synthetic oligonucleotide
uggccuacauaggccuugc

SEQ ID NO: 160590 - RNA, 19 nt, Artificial Sequence
  Description of Artificial Sequence: Synthetic oligonucleotide
ucgccugcgugugauacuu

SEQ ID NO: 160591 - RNA, 19 nt, Artificial Sequence
  Description of Artificial Sequence: Synthetic oligonucleotide
ucggaucuugaagggacuu

SEQ ID NO: 160592 - RNA, 19 nt, Artificial Sequence
  Description of Artificial Sequence: Synthetic oligonucleotide
cuugcuacaugcuggccau

SEQ ID NO: 160593 - RNA, 19 nt, Artificial Sequence
  Description of Artificial Sequence: Synthetic oligonucleotide
cuaacaagacggggaccug

SEQ ID NO: 160594 - RNA, 19 nt, Artificial Sequence
  Description of Artificial Sequence: Synthetic oligonucleotide
gagacacuguagagacggc

SEQ ID NO: 160595 - RNA, 19 nt, Artificial Sequence
  Description of Artificial Sequence: Synthetic oligonucleotide
gugggacauacgcauggaa

SEQ ID NO: 160596 - RNA, 19 nt, Artificial Sequence
  Description of Artificial Sequence: Synthetic oligonucleotide
ggcacgaaggaaaucccca

SEQ ID NO: 160597 - RNA, 19 nt, Artificial Sequence
  Description of Artificial Sequence: Synthetic oligonucleotide
acccaccuuuaggugggac

SEQ ID NO: 160598 - RNA, 19 nt, Artificial Sequence
  Description of Artificial Sequence: Synthetic oligonucleotide
ggguauaggugacacggua

SEQ ID NO: 160599 - RNA, 19 nt, Artificial Sequence
  Description of Artificial Sequence: Synthetic oligonucleotide
gaacuagcaagugguugua

SEQ ID NO: 160600 - RNA, 19 nt, Artificial Sequence
  Description of Artificial Sequence: Synthetic oligonucleotide
ccauaaugcgguaugggcu

SEQ ID NO: 160601 - RNA, 19 nt, Artificial Sequence
  Description of Artificial Sequence: Synthetic oligonucleotide
gguaacggaaagggcacca

SEQ ID NO: 160602 - RNA, 19 nt, Artificial Sequence
  Description of Artificial Sequence: Synthetic oligonucleotide
ccuucuacgaucucugccu

SEQ ID NO: 160603 - RNA, 19 nt, Artificial Sequence
  Description of Artificial Sequence: Synthetic oligonucleotide
ggaccauaggcagugacgu

SEQ ID NO: 160604 - RNA, 19 nt, Artificial Sequence
  Description of Artificial Sequence: Synthetic oligonucleotide
ccuuuaacccugacuccug

SEQ ID NO: 160605 - RNA, 19 nt, Artificial Sequence
  Description of Artificial Sequence: Synthetic oligonucleotide
cuugggcacgaaggaaauc

SEQ ID NO: 160606 - RNA, 19 nt, Artificial Sequence
  Description of Artificial Sequence: Synthetic oligonucleotide
gacauacgcauggaaucgu

SEQ ID NO: 160607 - RNA, 19 nt, Artificial Sequence
  Description of Artificial Sequence: Synthetic oligonucleotide
cuaccuugcugacaucagu

SEQ ID NO: 160608 - RNA, 19 nt, Artificial Sequence
  Description of Artificial Sequence: Synthetic oligonucleotide
guagcuuccgggugccaua

SEQ ID NO: 160609 - RNA, 19 nt, Artificial Sequence
  Description of Artificial Sequence: Synthetic oligonucleotide
cuacgaucucugccucgug

SEQ ID NO: 160610 - RNA, 19 nt, Artificial Sequence
  Description of Artificial Sequence: Synthetic oligonucleotide
ccccaaugugauagggccc

SEQ ID NO: 160611 - RNA, 19 nt, Artificial Sequence
  Description of Artificial Sequence: Synthetic oligonucleotide
caccacgaaagggcuauca

SEQ ID NO: 160612 - RNA, 19 nt, Artificial Sequence
  Description of Artificial Sequence: Synthetic oligonucleotide
cugaacuacguaggccaca

SEQ ID NO: 160613 - RNA, 19 nt, Artificial Sequence
  Description of Artificial Sequence: Synthetic oligonucleotide
cuaucagguaugugcuccu

SEQ ID NO: 160614 - RNA, 19 nt, Artificial Sequence
  Description of Artificial Sequence: Synthetic oligonucleotide
gccauugcgcaaccgcuuc

SEQ ID NO: 160615 - RNA, 19 nt, Artificial Sequence
  Description of Artificial Sequence: Synthetic oligonucleotide
guacuugaccaggaugcua

SEQ ID NO: 160616 - RNA, 19 nt, Artificial Sequence
  Description of Artificial Sequence: Synthetic oligonucleotide
gaguagacuaaggucuguu

SEQ ID NO: 160617 - RNA, 19 nt, Artificial Sequence
  Description of Artificial Sequence: Synthetic oligonucleotide
uggcggguuuguugaccac

SEQ ID NO: 160618 - RNA, 19 nt, Artificial Sequence
  Description of Artificial Sequence: Synthetic oligonucleotide
ggcuaucagguaugugcuc

SEQ ID NO: 160619 - RNA, 19 nt, Artificial Sequence
  Description of Artificial Sequence: Synthetic oligonucleotide
gcuaguugucaggcucagg

SEQ ID NO: 160620 - RNA, 19 nt, Artificial Sequence
  Description of Artificial Sequence: Synthetic oligonucleotide
gguucaaagguaugaccuu

SEQ ID NO: 160621 - RNA, 19 nt, Artificial Sequence
  Description of Artificial Sequence: Synthetic oligonucleotide
cugcgugugauacuuucuu

SEQ ID NO: 160622 - RNA, 19 nt, Artificial Sequence
  Description of Artificial Sequence: Synthetic oligonucleotide
caguaaggcggcgggcguc

SEQ ID NO: 160623 - RNA, 19 nt, Artificial Sequence
  Description of Artificial Sequence: Synthetic oligonucleotide
gcgguaugggcugccuggg

SEQ ID NO: 160624 - RNA, 19 nt, Artificial Sequence
  Description of Artificial Sequence: Synthetic oligonucleotide
cucggaucuugaagggacu

SEQ ID NO: 160625 - RNA, 19 nt, Artificial Sequence
  Description of Artificial Sequence: Synthetic oligonucleotide
ggugaguagcgcacaguaa

SEQ ID NO: 160626 - RNA, 19 nt, Artificial Sequence
  Description of Artificial Sequence: Synthetic oligonucleotide
ccaaaugcugaacuccgcu

SEQ ID NO: 160627 - RNA, 19 nt, Artificial Sequence
  Description of Artificial Sequence: Synthetic oligonucleotide
ggcacgucgccugcgugug

SEQ ID NO: 160628 - RNA, 19 nt, Artificial Sequence
  Description of Artificial Sequence: Synthetic oligonucleotide
cagggauaugaguaccauu

SEQ ID NO: 160629 - RNA, 19 nt, Artificial Sequence
  Description of Artificial Sequence: Synthetic oligonucleotide
gucaggcgcugccaccaaa

SEQ ID NO: 160630 - RNA, 19 nt, Artificial Sequence
  Description of Artificial Sequence: Synthetic oligonucleotide
ggugggacauacgcaugga

SEQ ID NO: 160631 - RNA, 19 nt, Artificial Sequence
  Description of Artificial Sequence: Synthetic oligonucleotide
gcggguuuguugaccacuc

SEQ ID NO: 160632 - RNA, 19 nt, Artificial Sequence
  Description of Artificial Sequence: Synthetic oligonucleotide
cacgacuggcaucaccaau

SEQ ID NO: 160633 - RNA, 19 nt, Artificial Sequence
  Description of Artificial Sequence: Synthetic oligonucleotide
gauguuccccugucuccuu

SEQ ID NO: 160634 - RNA, 19 nt, Artificial Sequence
  Description of Artificial Sequence: Synthetic oligonucleotide
gucgccugcgugugauacu

SEQ ID NO: 160635 - RNA, 19 nt, Artificial Sequence
  Description of Artificial Sequence: Synthetic oligonucleotide
ggcaccacgaaagggcuau

SEQ ID NO: 160636 - RNA, 19 nt, Artificial Sequence
  Description of Artificial Sequence: Synthetic oligonucleotide
cgauaaacucagcugggcu

SEQ ID NO: 160637 - RNA, 19 nt, Artificial Sequence
  Description of Artificial Sequence: Synthetic oligonucleotide
cgaaagggcuaucagguau

SEQ ID NO: 160638 - RNA, 19 nt, Artificial Sequence
  Description of Artificial Sequence: Synthetic oligonucleotide
ggcggguuuguugaccacu

SEQ ID NO: 160639 - RNA, 19 nt, Artificial Sequence
  Description of Artificial Sequence: Synthetic oligonucleotide
cgucgccugcgugugauac

SEQ ID NO: 160640 - RNA, 19 nt, Artificial Sequence
  Description of Artificial Sequence: Synthetic oligonucleotide
gggcacgucgccugcgugu

SEQ ID NO: 160641 - RNA, 19 nt, Artificial Sequence
  Description of Artificial Sequence: Synthetic oligonucleotide
gguagcuuccgggugccau

SEQ ID NO: 160642 - RNA, 19 nt, Artificial Sequence
  Description of Artificial Sequence: Synthetic oligonucleotide
acgucgccugcgugugaua

SEQ ID NO: 160643 - RNA, 19 nt, Artificial Sequence
  Description of Artificial Sequence: Synthetic oligonucleotide
ccauugcgcaaccgcuuca

SEQ ID NO: 160644 - RNA, 19 nt, Artificial Sequence
  Description of Artificial Sequence: Synthetic oligonucleotide
gcgggcgucaccagacgga

SEQ ID NO: 160645 - RNA, 19 nt, Artificial Sequence
  Description of Artificial Sequence: Synthetic oligonucleotide
cagguaugugcuccucguu

SEQ ID NO: 160646 - RNA, 19 nt, Artificial Sequence
  Description of Artificial Sequence: Synthetic oligonucleotide
aggcaccacgaaagggcua

SEQ ID NO: 160647 - RNA, 19 nt, Artificial Sequence
  Description of Artificial Sequence: Synthetic oligonucleotide
ggcacauguuggcccuugu

SEQ ID NO: 160648 - RNA, 19 nt, Artificial Sequence
  Description of Artificial Sequence: Synthetic oligonucleotide
cacgucgccugcgugugau

SEQ ID NO: 160649 - RNA, 19 nt, Artificial Sequence
  Description of Artificial Sequence: Synthetic oligonucleotide
gggguauaggugacacggu

SEQ ID NO: 160650 - RNA, 19 nt, Artificial Sequence
  Description of Artificial Sequence: Synthetic oligonucleotide
gacggggaccugugaccuu

SEQ ID NO: 160651 - RNA, 19 nt, Artificial Sequence
  Description of Artificial Sequence: Synthetic oligonucleotide
gcacgucgccugcguguga

SEQ ID NO: 160652 - RNA, 19 nt, Artificial Sequence
  Description of Artificial Sequence: Synthetic oligonucleotide
gggcgucaccagacggaga

SEQ ID NO: 160653 - RNA, 19 nt, Artificial Sequence
  Description of Artificial Sequence: Synthetic oligonucleotide
ccgggugccauagggguau

SEQ ID NO: 160654 - RNA, 19 nt, Artificial Sequence
  Description of Artificial Sequence: Synthetic oligonucleotide
cgccugcgugugauacuuu

SEQ ID NO: 160655 - RNA, 19 nt, Artificial Sequence
  Description of Artificial Sequence: Synthetic oligonucleotide
aguguuguaaaucagagcc

SEQ ID NO: 160656 - RNA, 19 nt, Artificial Sequence
  Description of Artificial Sequence: Synthetic oligonucleotide
uccaguaaggguuagaugg

SEQ ID NO: 160657 - RNA, 19 nt, Artificial Sequence
  Description of Artificial Sequence: Synthetic oligonucleotide
aacuuuaugaaaugccugc

SEQ ID NO: 160658 - RNA, 19 nt, Artificial Sequence
  Description of Artificial Sequence: Synthetic oligonucleotide
agaaauuuguccuccaagc

SEQ ID NO: 160659 - RNA, 19 nt, Artificial Sequence
  Description of Artificial Sequence: Synthetic oligonucleotide
acaauugcaagacacuucc

SEQ ID NO: 160660 - RNA, 19 nt, Artificial Sequence
  Description of Artificial Sequence: Synthetic oligonucleotide
cuugaagaaagcaagggcc

SEQ ID NO: 160661 - RNA, 19 nt, Artificial Sequence
  Description of Artificial Sequence: Synthetic oligonucleotide
acuagaaguagccuguggc

SEQ ID NO: 160662 - RNA, 19 nt, Artificial Sequence
  Description of Artificial Sequence: Synthetic oligonucleotide
uuagcgaugguuuuccggg

SEQ ID NO: 160663 - RNA, 19 nt, Artificial Sequence
  Description of Artificial Sequence: Synthetic oligonucleotide
  modified_base (6)..(6): a, c, u, g, unknown or other
aguggnacccagcaggugc

SEQ ID NO: 160664 - RNA, 19 nt, Artificial Sequence
  Description of Artificial Sequence: Synthetic oligonucleotide
aaagcucaguugcugaguc

SEQ ID NO: 160665 - RNA, 19 nt, Artificial Sequence
  Description of Artificial Sequence: Synthetic oligonucleotide
gguaaauacauccacauca

SEQ ID NO: 160666 - RNA, 19 nt, Artificial Sequence
  Description of Artificial Sequence: Synthetic oligonucleotide
aaaaucagauaccacuggu

SEQ ID NO: 160667 - RNA, 19 nt, Artificial Sequence
  Description of Artificial Sequence: Synthetic oligonucleotide
gacacgucaaguaaaacag

SEQ ID NO: 160668 - RNA, 19 nt, Artificial Sequence
  Description of Artificial Sequence: Synthetic oligonucleotide
uguguuuuacuccggaucu

SEQ ID NO: 160669 - RNA, 19 nt, Artificial Sequence
  Description of Artificial Sequence: Synthetic oligonucleotide
aaucuagacacacuuucca

SEQ ID NO: 160670 - RNA, 19 nt, Artificial Sequence
  Description of Artificial Sequence: Synthetic oligonucleotide
uuucaguauacucuggggu

SEQ ID NO: 160671 - RNA, 19 nt, Artificial Sequence
  Description of Artificial Sequence: Synthetic oligonucleotide
ugagacucagcauucagug

SEQ ID NO: 160672 - RNA, 19 nt, Artificial Sequence
  Description of Artificial Sequence: Synthetic oligonucleotide
gaaaaucagauaccacugg

SEQ ID NO: 160673 - RNA, 19 nt, Artificial Sequence
  Description of Artificial Sequence: Synthetic oligonucleotide
agugaacuuuaugaaaugc

SEQ ID NO: 160674 - RNA, 19 nt, Artificial Sequence
  Description of Artificial Sequence: Synthetic oligonucleotide
ucuucugugcaaauaauaa

SEQ ID NO: 160675 - RNA, 19 nt, Artificial Sequence
  Description of Artificial Sequence: Synthetic oligonucleotide
acccaguugagccacgucc

SEQ ID NO: 160676 - RNA, 19 nt, Artificial Sequence
  Description of Artificial Sequence: Synthetic oligonucleotide
aacuuagcgaugguuuucc

SEQ ID NO: 160677 - RNA, 19 nt, Artificial Sequence
  Description of Artificial Sequence: Synthetic oligonucleotide
uaacauuaacaucuguuac

SEQ ID NO: 160678 - RNA, 19 nt, Artificial Sequence
  Description of Artificial Sequence: Synthetic oligonucleotide
ucuagacacacuuuccaag

SEQ ID NO: 160679 - RNA, 19 nt, Artificial Sequence
  Description of Artificial Sequence: Synthetic oligonucleotide
uguccgugaacaauuaaca

SEQ ID NO: 160680 - RNA, 19 nt, Artificial Sequence
  Description of Artificial Sequence: Synthetic oligonucleotide
acuucuagacaauugcaag

SEQ ID NO: 160681 - RNA, 19 nt, Artificial Sequence
  Description of Artificial Sequence: Synthetic oligonucleotide
augaccacugaaucggccc

SEQ ID NO: 160682 - RNA, 19 nt, Artificial Sequence
  Description of Artificial Sequence: Synthetic oligonucleotide
ucucuuaauggcauauuug

SEQ ID NO: 160683 - RNA, 19 nt, Artificial Sequence
  Description of Artificial Sequence: Synthetic oligonucleotide
ggagcauggaauuuguugg

SEQ ID NO: 160684 - RNA, 19 nt, Artificial Sequence
  Description of Artificial Sequence: Synthetic oligonucleotide
agacacgucaaguaaaaca

SEQ ID NO: 160685 - RNA, 19 nt, Artificial Sequence
  Description of Artificial Sequence: Synthetic oligonucleotide
gguuucaauacccaggugc

SEQ ID NO: 160686 - RNA, 19 nt, Artificial Sequence
  Description of Artificial Sequence: Synthetic oligonucleotide
aaauuuguccuccaagcuu

SEQ ID NO: 160687 - RNA, 19 nt, Artificial Sequence
  Description of Artificial Sequence: Synthetic oligonucleotide
uguaaacuacuucuagaca

SEQ ID NO: 160688 - RNA, 19 nt, Artificial Sequence
  Description of Artificial Sequence: Synthetic oligonucleotide
ucaaaaggucccauggucu

SEQ ID NO: 160689 - RNA, 19 nt, Artificial Sequence
  Description of Artificial Sequence: Synthetic oligonucleotide
uuauccagcaccccaguca

SEQ ID NO: 160690 - RNA, 19 nt, Artificial Sequence
  Description of Artificial Sequence: Synthetic oligonucleotide
caauacacaggguacguag

SEQ ID NO: 160691 - RNA, 19 nt, Artificial Sequence
  Description of Artificial Sequence: Synthetic oligonucleotide
uccgugaacaauuaacagu

SEQ ID NO: 160692 - RNA, 19 nt, Artificial Sequence
  Description of Artificial Sequence: Synthetic oligonucleotide
aaagauauguguucuuauu

SEQ ID NO: 160693 - RNA, 19 nt, Artificial Sequence
  Description of Artificial Sequence: Synthetic oligonucleotide
aaaucagauaccacugguc

SEQ ID NO: 160694 - RNA, 19 nt, Artificial Sequence
  Description of Artificial Sequence: Synthetic oligonucleotide
uaacuggcgucccagcugg

SEQ ID NO: 160695 - RNA, 19 nt, Artificial Sequence
  Description of Artificial Sequence: Synthetic oligonucleotide
cuuggcacugcaaagucgc

SEQ ID NO: 160696 - RNA, 19 nt, Artificial Sequence
  Description of Artificial Sequence: Synthetic oligonucleotide
uggggcuagagucugagga

SEQ ID NO: 160697 - RNA, 19 nt, Artificial Sequence
  Description of Artificial Sequence: Synthetic oligonucleotide
aguugagugagccaaugcu

SEQ ID NO: 160698 - RNA, 19 nt, Artificial Sequence
  Description of Artificial Sequence: Synthetic oligonucleotide
  modified_base (17)..(17): a, c, u, g, unknown or other
ucuucuaucccaguggnac

SEQ ID NO: 160699 - RNA, 19 nt, Artificial Sequence
  Description of Artificial Sequence: Synthetic oligonucleotide
aaucauggcagaugcagaa

SEQ ID NO: 160700 - RNA, 19 nt, Artificial Sequence
  Description of Artificial Sequence: Synthetic oligonucleotide
cacgucaaguaaaacagag

SEQ ID NO: 160701 - RNA, 19 nt, Artificial Sequence
  Description of Artificial Sequence: Synthetic oligonucleotide
aagacggucuucuauccca

SEQ ID NO: 160702 - RNA, 19 nt, Artificial Sequence
  Description of Artificial Sequence: Synthetic oligonucleotide
auugcaagacacuucccag

SEQ ID NO: 160703 - RNA, 19 nt, Artificial Sequence
  Description of Artificial Sequence: Synthetic oligonucleotide
uguugcuaacauuggaagc

SEQ ID NO: 160704 - RNA, 19 nt, Artificial Sequence
  Description of Artificial Sequence: Synthetic oligonucleotide
caggcuacccaguugagcc

SEQ ID NO: 160705 - RNA, 19 nt, Artificial Sequence
  Description of Artificial Sequence: Synthetic oligonucleotide
auggcagaugcagaaaagc

SEQ ID NO: 160706 - RNA, 19 nt, Artificial Sequence
  Description of Artificial Sequence: Synthetic oligonucleotide
gaggauagcauguugcaca

SEQ ID NO: 160707 - RNA, 19 nt, Artificial Sequence
  Description of Artificial Sequence: Synthetic oligonucleotide
cacaucagagucauaguag

SEQ ID NO: 160708 - RNA, 19 nt, Artificial Sequence
  Description of Artificial Sequence: Synthetic oligonucleotide
gaagggacucaaaaggucc

SEQ ID NO: 160709 - RNA, 19 nt, Artificial Sequence
  Description of Artificial Sequence: Synthetic oligonucleotide
ugagacccaaauuugcaga

SEQ ID NO: 160710 - RNA, 19 nt, Artificial Sequence
  Description of Artificial Sequence: Synthetic oligonucleotide
uguuguaaaucagagccac

SEQ ID NO: 160711 - RNA, 19 nt, Artificial Sequence
  Description of Artificial Sequence: Synthetic oligonucleotide
uccuauauuugucuuggaa

SEQ ID NO: 160712 - RNA, 19 nt, Artificial Sequence
  Description of Artificial Sequence: Synthetic oligonucleotide
cuuagcgaugguuuuccgg

SEQ ID NO: 160713 - RNA, 19 nt, Artificial Sequence
  Description of Artificial Sequence: Synthetic oligonucleotide
ugccuuaacuuagcgaugg

SEQ ID NO: 160714 - RNA, 19 nt, Artificial Sequence
  Description of Artificial Sequence: Synthetic oligonucleotide
aguaaaacagagggucacc

SEQ ID NO: 160715 - RNA, 19 nt, Artificial Sequence
  Description of Artificial Sequence: Synthetic oligonucleotide
cacggcuuuccacagaugc

SEQ ID NO: 160716 - RNA, 19 nt, Artificial Sequence
  Description of Artificial Sequence: Synthetic oligonucleotide
augaagugaacuuuaugaa

SEQ ID NO: 160717 - RNA, 19 nt, Artificial Sequence
  Description of Artificial Sequence: Synthetic oligonucleotide
gacauuggagcugucauac

SEQ ID NO: 160718 - RNA, 19 nt, Artificial Sequence
  Description of Artificial Sequence: Synthetic oligonucleotide
aagggcguaggccagacuu

SEQ ID NO: 160719 - RNA, 19 nt, Artificial Sequence
  Description of Artificial Sequence: Synthetic oligonucleotide
agcugucauaccuaugaag

SEQ ID NO: 160720 - RNA, 19 nt, Artificial Sequence
  Description of Artificial Sequence: Synthetic oligonucleotide
uguuaauggcuguuucuug

SEQ ID NO: 160721 - RNA, 19 nt, Artificial Sequence
  Description of Artificial Sequence: Synthetic oligonucleotide
ucugcaaccaacaggcaua

SEQ ID NO: 160722 - RNA, 19 nt, Artificial Sequence
  Description of Artificial Sequence: Synthetic oligonucleotide
uguaaaucagagccacgga

SEQ ID NO: 160723 - RNA, 19 nt, Artificial Sequence
  Description of Artificial Sequence: Synthetic oligonucleotide
uuugggagcauggaauuug

SEQ ID NO: 160724 - RNA, 19 nt, Artificial Sequence
  Description of Artificial Sequence: Synthetic oligonucleotide
gaacuuuaugaaaugccug

SEQ ID NO: 160725 - RNA, 19 nt, Artificial Sequence
  Description of Artificial Sequence: Synthetic oligonucleotide
gacaucguuggccccaucc

SEQ ID NO: 160726 - RNA, 19 nt, Artificial Sequence
  Description of Artificial Sequence: Synthetic oligonucleotide
gguuguuuauugcuugugg

SEQ ID NO: 160727 - RNA, 19 nt, Artificial Sequence
  Description of Artificial Sequence: Synthetic oligonucleotide
ugaagacggucuucuaucc

SEQ ID NO: 160728 - RNA, 19 nt, Artificial Sequence
  Description of Artificial Sequence: Synthetic oligonucleotide
auaccuaugaagugaacuu

SEQ ID NO: 160729 - RNA, 19 nt, Artificial Sequence
  Description of Artificial Sequence: Synthetic oligonucleotide
ucgaucggcagcaaaggac

SEQ ID NO: 160730 - RNA, 19 nt, Artificial Sequence
  Description of Artificial Sequence: Synthetic oligonucleotide
agauaaagauauguguucu

SEQ ID NO: 160731 - RNA, 19 nt, Artificial Sequence
  Description of Artificial Sequence: Synthetic oligonucleotide
gucgcuugccaucacagcc

SEQ ID NO: 160732 - RNA, 19 nt, Artificial Sequence
  Description of Artificial Sequence: Synthetic oligonucleotide
ucaguauacucuacuuaga

SEQ ID NO: 160733 - RNA, 19 nt, Artificial Sequence
  Description of Artificial Sequence: Synthetic oligonucleotide
caacaugucugcuggaaug

SEQ ID NO: 160734 - RNA, 19 nt, Artificial Sequence
  Description of Artificial Sequence: Synthetic oligonucleotide
uaaugaggaaucugccuca

SEQ ID NO: 160735 - RNA, 19 nt, Artificial Sequence
  Description of Artificial Sequence: Synthetic oligonucleotide
ugggauaaaggagaacccc

SEQ ID NO: 160736 - RNA, 19 nt, Artificial Sequence
  Description of Artificial Sequence: Synthetic oligonucleotide
uucaguauacucuggggua

SEQ ID NO: 160737 - RNA, 19 nt, Artificial Sequence
  Description of Artificial Sequence: Synthetic oligonucleotide
ugcacaagaaguguuguaa

SEQ ID NO: 160738 - RNA, 19 nt, Artificial Sequence
  Description of Artificial Sequence: Synthetic oligonucleotide
cucaaaaggucccaugguc

SEQ ID NO: 160739 - RNA, 19 nt, Artificial Sequence
  Description of Artificial Sequence: Synthetic oligonucleotide
gcugggauaaaggagaacc

SEQ ID NO: 160740 - RNA, 19 nt, Artificial Sequence
  Description of Artificial Sequence: Synthetic oligonucleotide
gguaucggaaucuuggcac

SEQ ID NO: 160741 - RNA, 19 nt, Artificial Sequence
  Description of Artificial Sequence: Synthetic oligonucleotide
cucugggguacuuugggag

SEQ ID NO: 160742 - RNA, 19 nt, Artificial Sequence
  Description of Artificial Sequence: Synthetic oligonucleotide
uuguauccacugcacuggg

SEQ ID NO: 160743 - RNA, 19 nt, Artificial Sequence
  Description of Artificial Sequence: Synthetic oligonucleotide
cucccaucaaucacaagac

SEQ ID NO: 160744 - RNA, 19 nt, Artificial Sequence
  Description of Artificial Sequence: Synthetic oligonucleotide
uuucucaagggcguaggcc

SEQ ID NO: 160745 - RNA, 19 nt, Artificial Sequence
  Description of Artificial Sequence: Synthetic oligonucleotide
gugagacccaaauuugcag

SEQ ID NO: 160746 - RNA, 19 nt, Artificial Sequence
  Description of Artificial Sequence: Synthetic oligonucleotide
auaugcaauguuaauggcu

SEQ ID NO: 160747 - RNA, 19 nt, Artificial Sequence
  Description of Artificial Sequence: Synthetic oligonucleotide
cugggaagggacucaaaag

SEQ ID NO: 160748 - RNA, 19 nt, Artificial Sequence
  Description of Artificial Sequence: Synthetic oligonucleotide
aaucccugggaagggacuc

SEQ ID NO: 160749 - RNA, 19 nt, Artificial Sequence
  Description of Artificial Sequence: Synthetic oligonucleotide
cugggauaaaggagaaccc

SEQ ID NO: 160750 - RNA, 19 nt, Artificial Sequence
  Description of Artificial Sequence: Synthetic oligonucleotide
agggcuuugaaaacaaucu

SEQ ID NO: 160751 - RNA, 19 nt, Artificial Sequence
  Description of Artificial Sequence: Synthetic oligonucleotide
ccagguaucggaaucuugg

SEQ ID NO: 160752 - RNA, 19 nt, Artificial Sequence
  Description of Artificial Sequence: Synthetic oligonucleotide
cauaguaggccagguaagg

SEQ ID NO: 160753 - RNA, 19 nt, Artificial Sequence
  Description of Artificial Sequence: Synthetic oligonucleotide
aaagcauaccaggcucugg

SEQ ID NO: 160754 - RNA, 19 nt, Artificial Sequence
  Description of Artificial Sequence: Synthetic oligonucleotide
agucgcuugccaucacagc

SEQ ID NO: 160755 - RNA, 19 nt, Artificial Sequence
  Description of Artificial Sequence: Synthetic oligonucleotide
cuguguuuuacuccggauc

SEQ ID NO: 160756 - RNA, 19 nt, Artificial Sequence
  Description of Artificial Sequence: Synthetic oligonucleotide
guccgugaacaauuaacag

SEQ ID NO: 160757 - RNA, 19 nt, Artificial Sequence
  Description of Artificial Sequence: Synthetic oligonucleotide
aaccccacgcucacguugc

SEQ ID NO: 160758 - RNA, 19 nt, Artificial Sequence
  Description of Artificial Sequence: Synthetic oligonucleotide
uggauugcacguaguggag

SEQ ID NO: 160759 - RNA, 19 nt, Artificial Sequence
  Description of Artificial Sequence: Synthetic oligonucleotide
uacucuacuuagaacuuua

SEQ ID NO: 160760 - RNA, 19 nt, Artificial Sequence
  Description of Artificial Sequence: Synthetic oligonucleotide
agaugaaagagugaugaua

SEQ ID NO: 160761 - RNA, 19 nt, Artificial Sequence
  Description of Artificial Sequence: Synthetic oligonucleotide
uaguaggccagguaaggaa

SEQ ID NO: 160762 - RNA, 19 nt, Artificial Sequence
  Description of Artificial Sequence: Synthetic oligonucleotide
agucacauguuuaugccug

SEQ ID NO: 160763 - RNA, 19 nt, Artificial Sequence
  Description of Artificial Sequence: Synthetic oligonucleotide
aagucgcuugccaucacag

SEQ ID NO: 160764 - RNA, 19 nt, Artificial Sequence
  Description of Artificial Sequence: Synthetic oligonucleotide
agaccuuccagcaauuugu

SEQ ID NO: 160765 - RNA, 19 nt, Artificial Sequence
  Description of Artificial Sequence: Synthetic oligonucleotide
cuuggcaauacacagggua

SEQ ID NO: 160766 - RNA, 19 nt, Artificial Sequence
  Description of Artificial Sequence: Synthetic oligonucleotide
uagucacauguuuaugccu

SEQ ID NO: 160767 - RNA, 19 nt, Artificial Sequence
  Description of Artificial Sequence: Synthetic oligonucleotide
cagugcagcaacaggcgcg

SEQ ID NO: 160768 - RNA, 19 nt, Artificial Sequence
  Description of Artificial Sequence: Synthetic oligonucleotide
ugcaugguccaguaagggu

SEQ ID NO: 160769 - RNA, 19 nt, Artificial Sequence
  Description of Artificial Sequence: Synthetic oligonucleotide
gacccuuuggaggugagac

SEQ ID NO: 160770 - RNA, 19 nt, Artificial Sequence
  Description of Artificial Sequence: Synthetic oligonucleotide
ccgugaacaauuaacaguc

SEQ ID NO: 160771 - RNA, 19 nt, Artificial Sequence
  Description of Artificial Sequence: Synthetic oligonucleotide
gcaaccaacaggcauacuc

SEQ ID NO: 160772 - RNA, 19 nt, Artificial Sequence
  Description of Artificial Sequence: Synthetic oligonucleotide
ggagcugucauaccuauga

SEQ ID NO: 160773 - RNA, 19 nt, Artificial Sequence
  Description of Artificial Sequence: Synthetic oligonucleotide
agacuucucccaucaauca

SEQ ID NO: 160774 - RNA, 19 nt, Artificial Sequence
  Description of Artificial Sequence: Synthetic oligonucleotide
caauguuaauggcuguuuc

SEQ ID NO: 160775 - RNA, 19 nt, Artificial Sequence
  Description of Artificial Sequence: Synthetic oligonucleotide
gacacuucccagcccacug

SEQ ID NO: 160776 - RNA, 19 nt, Artificial Sequence
  Description of Artificial Sequence: Synthetic oligonucleotide
gaagacggucuucuauccc

SEQ ID NO: 160777 - RNA, 19 nt, Artificial Sequence
  Description of Artificial Sequence: Synthetic oligonucleotide
gacuucucccaucaaucac

SEQ ID NO: 160778 - RNA, 19 nt, Artificial Sequence
  Description of Artificial Sequence: Synthetic oligonucleotide
gaaccccacgcucacguug

SEQ ID NO: 160779 - RNA, 19 nt, Artificial Sequence
  Description of Artificial Sequence: Synthetic oligonucleotide
acagaacugaguauuggca

SEQ ID NO: 160780 - RNA, 19 nt, Artificial Sequence
  Description of Artificial Sequence: Synthetic oligonucleotide
cuuuucucaagggcguagg

SEQ ID NO: 160781 - RNA, 19 nt, Artificial Sequence
  Description of Artificial Sequence: Synthetic oligonucleotide
ucaguauacucugggguac

SEQ ID NO: 160782 - RNA, 19 nt, Artificial Sequence
  Description of Artificial Sequence: Synthetic oligonucleotide
cugucauaccuaugaagug

SEQ ID NO: 160783 - RNA, 19 nt, Artificial Sequence
  Description of Artificial Sequence: Synthetic oligonucleotide
gaggcccacaaacauugug

SEQ ID NO: 160784 - RNA, 19 nt, Artificial Sequence
  Description of Artificial Sequence: Synthetic oligonucleotide
ugcagcaacaggcgcgaug

SEQ ID NO: 160785 - RNA, 19 nt, Artificial Sequence
  Description of Artificial Sequence: Synthetic oligonucleotide
uccgcuucuauguggcucu

SEQ ID NO: 160786 - RNA, 19 nt, Artificial Sequence
  Description of Artificial Sequence: Synthetic oligonucleotide
acggucuucuaucccagug

SEQ ID NO: 160787 - RNA, 19 nt, Artificial Sequence
  Description of Artificial Sequence: Synthetic oligonucleotide
acugaaucggccccuuggu

SEQ ID NO: 160788 - RNA, 19 nt, Artificial Sequence
  Description of Artificial Sequence: Synthetic oligonucleotide
caugaccacugaaucggcc

SEQ ID NO: 160789 - RNA, 19 nt, Artificial Sequence
  Description of Artificial Sequence: Synthetic oligonucleotide
aggagaaccccacgcucac

SEQ ID NO: 160790 - RNA, 19 nt, Artificial Sequence
  Description of Artificial Sequence: Synthetic oligonucleotide
aucuagacacacuuuccaa

SEQ ID NO: 160791 - RNA, 19 nt, Artificial Sequence
  Description of Artificial Sequence: Synthetic oligonucleotide
aucggaaucuuggcacugc

SEQ ID NO: 160792 - RNA, 19 nt, Artificial Sequence
  Description of Artificial Sequence: Synthetic oligonucleotide
aaggagaaccccacgcuca

SEQ ID NO: 160793 - RNA, 19 nt, Artificial Sequence
  Description of Artificial Sequence: Synthetic oligonucleotide
acgucaaguaaaacagagg

SEQ ID NO: 160794 - RNA, 19 nt, Artificial Sequence
  Description of Artificial Sequence: Synthetic oligonucleotide
aggaggcccacaaacauug

SEQ ID NO: 160795 - RNA, 19 nt, Artificial Sequence
  Description of Artificial Sequence: Synthetic oligonucleotide
gacaauugcaagacacuuc

SEQ ID NO: 160796 - RNA, 19 nt, Artificial Sequence
  Description of Artificial Sequence: Synthetic oligonucleotide
uggagguuguuuauugcuu

SEQ ID NO: 160797 - RNA, 19 nt, Artificial Sequence
  Description of Artificial Sequence: Synthetic oligonucleotide
  modified_base (9)..(9): a, c, u, g, unknown or other
cccaguggnacccagcagg

SEQ ID NO: 160798 - RNA, 19 nt, Artificial Sequence
  Description of Artificial Sequence: Synthetic oligonucleotide
uugccuuaacuuagcgaug

SEQ ID NO: 160799 - RNA, 19 nt, Artificial Sequence
  Description of Artificial Sequence: Synthetic oligonucleotide
auguuuaaccagaaugccu

SEQ ID NO: 160800 - RNA, 19 nt, Artificial Sequence
  Description of Artificial Sequence: Synthetic oligonucleotide
cagguaucggaaucuuggc

SEQ ID NO: 160801 - RNA, 19 nt, Artificial Sequence
  Description of Artificial Sequence: Synthetic oligonucleotide
uugggagcauggaauuugu

SEQ ID NO: 160802 - RNA, 19 nt, Artificial Sequence
  Description of Artificial Sequence: Synthetic oligonucleotide
cuuaacuuagcgaugguuu

SEQ ID NO: 160803 - RNA, 19 nt, Artificial Sequence
  Description of Artificial Sequence: Synthetic oligonucleotide
uuucaauacccaggugcag

SEQ ID NO: 160804 - RNA, 19 nt, Artificial Sequence
  Description of Artificial Sequence: Synthetic oligonucleotide
gccuacaucugccaccugg

SEQ ID NO: 160805 - RNA, 19 nt, Artificial Sequence
  Description of Artificial Sequence: Synthetic oligonucleotide
gguuagauggaggauagca

SEQ ID NO: 160806 - RNA, 19 nt, Artificial Sequence
  Description of Artificial Sequence: Synthetic oligonucleotide
cuaacuggcgucccagcug

SEQ ID NO: 160807 - RNA, 19 nt, Artificial Sequence
  Description of Artificial Sequence: Synthetic oligonucleotide
acuucucccaucaaucaca

SEQ ID NO: 160808 - RNA, 19 nt, Artificial Sequence
  Description of Artificial Sequence: Synthetic oligonucleotide
caugcuuccugagacucag

SEQ ID NO: 160809 - RNA, 19 nt, Artificial Sequence
  Description of Artificial Sequence: Synthetic oligonucleotide
ggugagacuagaaguagcc

SEQ ID NO: 160810 - RNA, 19 nt, Artificial Sequence
  Description of Artificial Sequence: Synthetic oligonucleotide
ucccaucaaucacaagacu

SEQ ID NO: 160811 - RNA, 19 nt, Artificial Sequence
  Description of Artificial Sequence: Synthetic oligonucleotide
aacagagggucacccagua

SEQ ID NO: 160812 - RNA, 19 nt, Artificial Sequence
  Description of Artificial Sequence: Synthetic oligonucleotide
uggcuugucccuguaagcu

SEQ ID NO: 160813 - RNA, 19 nt, Artificial Sequence
  Description of Artificial Sequence: Synthetic oligonucleotide
gacacucuacugaaacagc

SEQ ID NO: 160814 - RNA, 19 nt, Artificial Sequence
  Description of Artificial Sequence: Synthetic oligonucleotide
uagcgaugguuuuccgggg

SEQ ID NO: 160815 - RNA, 19 nt, Artificial Sequence
  Description of Artificial Sequence: Synthetic oligonucleotide
aaccaacaggcauacucuu

SEQ ID NO: 160816 - RNA, 19 nt, Artificial Sequence
  Description of Artificial Sequence: Synthetic oligonucleotide
ucggaaucuuggcacugca

SEQ ID NO: 160817 - RNA, 19 nt, Artificial Sequence
  Description of Artificial Sequence: Synthetic oligonucleotide
agauccaugaccacugaau

SEQ ID NO: 160818 - RNA, 19 nt, Artificial Sequence
  Description of Artificial Sequence: Synthetic oligonucleotide
uuuuccggggaacucccau

SEQ ID NO: 160819 - RNA, 19 nt, Artificial Sequence
  Description of Artificial Sequence: Synthetic oligonucleotide
cacguugcuuucaguauac

SEQ ID NO: 160820 - RNA, 19 nt, Artificial Sequence
  Description of Artificial Sequence: Synthetic oligonucleotide
acuuagcgaugguuuuccg

SEQ ID NO: 160821 - RNA, 19 nt, Artificial Sequence
  Description of Artificial Sequence: Synthetic oligonucleotide
aagcuuuucucaagggcgu

SEQ ID NO: 160822 - RNA, 19 nt, Artificial Sequence
  Description of Artificial Sequence: Synthetic oligonucleotide
ugccuccgcuucuaugugg

SEQ ID NO: 160823 - RNA, 19 nt, Artificial Sequence
  Description of Artificial Sequence: Synthetic oligonucleotide
guugagguaauucuguguu

SEQ ID NO: 160824 - RNA, 19 nt, Artificial Sequence
  Description of Artificial Sequence: Synthetic oligonucleotide
cuuccuagaacucuucugu

SEQ ID NO: 160825 - RNA, 19 nt, Artificial Sequence
  Description of Artificial Sequence: Synthetic oligonucleotide
uggccacucuuguaaagcu

SEQ ID NO: 160826 - RNA, 19 nt, Artificial Sequence
  Description of Artificial Sequence: Synthetic oligonucleotide
ucuuggcuaacuggcgucc

SEQ ID NO: 160827 - RNA, 19 nt, Artificial Sequence
  Description of Artificial Sequence: Synthetic oligonucleotide
agacaauugcaagacacuu

SEQ ID NO: 160828 - RNA, 19 nt, Artificial Sequence
  Description of Artificial Sequence: Synthetic oligonucleotide
uacguaggccuuccacugc

SEQ ID NO: 160829 - RNA, 19 nt, Artificial Sequence
  Description of Artificial Sequence: Synthetic oligonucleotide
caguugagugagccaaugc

SEQ ID NO: 160830 - RNA, 19 nt, Artificial Sequence
  Description of Artificial Sequence: Synthetic oligonucleotide
caguauacucuacuuagaa

SEQ ID NO: 160831 - RNA, 19 nt, Artificial Sequence
  Description of Artificial Sequence: Synthetic oligonucleotide
ggcgcgaugagacacguca

SEQ ID NO: 160832 - RNA, 19 nt, Artificial Sequence
  Description of Artificial Sequence: Synthetic oligonucleotide
gccccauccaccuauggcc

SEQ ID NO: 160833 - RNA, 19 nt, Artificial Sequence
  Description of Artificial Sequence: Synthetic oligonucleotide
caauugcaagacacuuccc

SEQ ID NO: 160834 - RNA, 19 nt, Artificial Sequence
  Description of Artificial Sequence: Synthetic oligonucleotide
uguuuuacuccggaucuuu

SEQ ID NO: 160835 - RNA, 19 nt, Artificial Sequence
  Description of Artificial Sequence: Synthetic oligonucleotide
auccaguugagugagccaa

SEQ ID NO: 160836 - RNA, 19 nt, Artificial Sequence
  Description of Artificial Sequence: Synthetic oligonucleotide
aucagauaccacuggucaa

SEQ ID NO: 160837 - RNA, 19 nt, Artificial Sequence
  Description of Artificial Sequence: Synthetic oligonucleotide
ugcuaacauuggaagcuaa

SEQ ID NO: 160838 - RNA, 19 nt, Artificial Sequence
  Description of Artificial Sequence: Synthetic oligonucleotide
acguaguggaggcauuggu

SEQ ID NO: 160839 - RNA, 19 nt, Artificial Sequence
  Description of Artificial Sequence: Synthetic oligonucleotide
ucuccaggcgaaccgcgga

SEQ ID NO: 160840 - RNA, 19 nt, Artificial Sequence
  Description of Artificial Sequence: Synthetic oligonucleotide
agauaccacuggucaauca

SEQ ID NO: 160841 - RNA, 19 nt, Artificial Sequence
  Description of Artificial Sequence: Synthetic oligonucleotide
cgucaucugaggaacacgg

SEQ ID NO: 160842 - RNA, 19 nt, Artificial Sequence
  Description of Artificial Sequence: Synthetic oligonucleotide
ucauaccuaugaagugaac

SEQ ID NO: 160843 - RNA, 19 nt, Artificial Sequence
  Description of Artificial Sequence: Synthetic oligonucleotide
guccaguaaggguuagaug

SEQ ID NO: 160844 - RNA, 19 nt, Artificial Sequence
  Description of Artificial Sequence: Synthetic oligonucleotide
gaacugaguauuggcagga

SEQ ID NO: 160845 - RNA, 19 nt, Artificial Sequence
  Description of Artificial Sequence: Synthetic oligonucleotide
uaacuuagcgaugguuuuc

SEQ ID NO: 160846 - RNA, 19 nt, Artificial Sequence
  Description of Artificial Sequence: Synthetic oligonucleotide
auaguaggccagguaagga

SEQ ID NO: 160847 - RNA, 19 nt, Artificial Sequence
  Description of Artificial Sequence: Synthetic oligonucleotide
uaccuaugaagugaacuuu

SEQ ID NO: 160848 - RNA, 19 nt, Artificial Sequence
  Description of Artificial Sequence: Synthetic oligonucleotide
ccuauggccagggucaugg

SEQ ID NO: 160849 - RNA, 19 nt, Artificial Sequence
  Description of Artificial Sequence: Synthetic oligonucleotide
uuggcuaacuggcguccca

SEQ ID NO: 160850 - RNA, 19 nt, Artificial Sequence
  Description of Artificial Sequence: Synthetic oligonucleotide
uccucacggcuuuccacag

SEQ ID NO: 160851 - RNA, 19 nt, Artificial Sequence
  Description of Artificial Sequence: Synthetic oligonucleotide
cauaccuaugaagugaacu

SEQ ID NO: 160852 - RNA, 19 nt, Artificial Sequence
  Description of Artificial Sequence: Synthetic oligonucleotide
cugcaugguccaguaaggg

SEQ ID NO: 160853 - RNA, 19 nt, Artificial Sequence
  Description of Artificial Sequence: Synthetic oligonucleotide
caguuugcaggcauaugca

SEQ ID NO: 160854 - RNA, 19 nt, Artificial Sequence
  Description of Artificial Sequence: Synthetic oligonucleotide
uaucggaaucuuggcacug

SEQ ID NO: 160855 - RNA, 19 nt, Artificial Sequence
  Description of Artificial Sequence: Synthetic oligonucleotide
cuagacacacuuuccaagu

SEQ ID NO: 160856 - RNA, 19 nt, Artificial Sequence
  Description of Artificial Sequence: Synthetic oligonucleotide
gauccaguugagugagcca

SEQ ID NO: 160857 - RNA, 19 nt, Artificial Sequence
  Description of Artificial Sequence: Synthetic oligonucleotide
cacaugcuuccugagacuc

SEQ ID NO: 160858 - RNA, 19 nt, Artificial Sequence
  Description of Artificial Sequence: Synthetic oligonucleotide
auaaaucuagacacacuuu

SEQ ID NO: 160859 - RNA, 19 nt, Artificial Sequence
  Description of Artificial Sequence: Synthetic oligonucleotide
gaacucccauccugaagac

SEQ ID NO: 160860 - RNA, 19 nt, Artificial Sequence
  Description of Artificial Sequence: Synthetic oligonucleotide
agguuguuuauugcuugug

SEQ ID NO: 160861 - RNA, 19 nt, Artificial Sequence
  Description of Artificial Sequence: Synthetic oligonucleotide
uuaugccugcuugaagaaa

SEQ ID NO: 160862 - RNA, 19 nt, Artificial Sequence
  Description of Artificial Sequence: Synthetic oligonucleotide
uugcacaagaaguguugua

SEQ ID NO: 160863 - RNA, 19 nt, Artificial Sequence
  Description of Artificial Sequence: Synthetic oligonucleotide
uaaggguuagauggaggau

SEQ ID NO: 160864 - RNA, 19 nt, Artificial Sequence
  Description of Artificial Sequence: Synthetic oligonucleotide
cuggguucccagaccuucc

SEQ ID NO: 160865 - RNA, 19 nt, Artificial Sequence
  Description of Artificial Sequence: Synthetic oligonucleotide
acagagcgacacugcuugg

SEQ ID NO: 160866 - RNA, 19 nt, Artificial Sequence
  Description of Artificial Sequence: Synthetic oligonucleotide
acaugucugcuggaauguc

SEQ ID NO: 160867 - RNA, 19 nt, Artificial Sequence
  Description of Artificial Sequence: Synthetic oligonucleotide
cugaaucggccccuuggug

SEQ ID NO: 160868 - RNA, 19 nt, Artificial Sequence
  Description of Artificial Sequence: Synthetic oligonucleotide
aguaggccagguaaggaau

SEQ ID NO: 160869 - RNA, 19 nt, Artificial Sequence
  Description of Artificial Sequence: Synthetic oligonucleotide
aguuugucuccaggcgaac

SEQ ID NO: 160870 - RNA, 19 nt, Artificial Sequence
  Description of Artificial Sequence: Synthetic oligonucleotide
cuccucacggcuuuccaca

SEQ ID NO: 160871 - RNA, 19 nt, Artificial Sequence
  Description of Artificial Sequence: Synthetic oligonucleotide
uuccuauauuugucuugga

SEQ ID NO: 160872 - RNA, 19 nt, Artificial Sequence
  Description of Artificial Sequence: Synthetic oligonucleotide
uggagcugucauaccuaug

SEQ ID NO: 160873 - RNA, 19 nt, Artificial Sequence
  Description of Artificial Sequence: Synthetic oligonucleotide
agcaacaggcgcgaugaga

SEQ ID NO: 160874 - RNA, 19 nt, Artificial Sequence
  Description of Artificial Sequence: Synthetic oligonucleotide
  modified_base (2)..(2): a, c, u, g, unknown or other
gnacccagcaggugcaagu

SEQ ID NO: 160875 - RNA, 19 nt, Artificial Sequence
  Description of Artificial Sequence: Synthetic oligonucleotide
caaccaacaggcauacucu

SEQ ID NO: 160876 - RNA, 19 nt, Artificial Sequence
  Description of Artificial Sequence: Synthetic oligonucleotide
ucacauguuuaugccugcu

SEQ ID NO: 160877 - RNA, 19 nt, Artificial Sequence
  Description of Artificial Sequence: Synthetic oligonucleotide
augagacacgucaaguaaa

SEQ ID NO: 160878 - RNA, 19 nt, Artificial Sequence
  Description of Artificial Sequence: Synthetic oligonucleotide
gcugucauaccuaugaagu

SEQ ID NO: 160879 - RNA, 19 nt, Artificial Sequence
  Description of Artificial Sequence: Synthetic oligonucleotide
uugcacguaguggaggcau

SEQ ID NO: 160880 - RNA, 19 nt, Artificial Sequence
  Description of Artificial Sequence: Synthetic oligonucleotide
aaccgcggacuggaagagg

SEQ ID NO: 160881 - RNA, 19 nt, Artificial Sequence
  Description of Artificial Sequence: Synthetic oligonucleotide
gaaccgcggacuggaagag

SEQ ID NO: 160882 - RNA, 19 nt, Artificial Sequence
  Description of Artificial Sequence: Synthetic oligonucleotide
ggucgaucggcagcaaagg

SEQ ID NO: 160883 - RNA, 19 nt, Artificial Sequence
  Description of Artificial Sequence: Synthetic oligonucleotide
cagagcgacacugcuuggc

SEQ ID NO: 160884 - RNA, 19 nt, Artificial Sequence
  Description of Artificial Sequence: Synthetic oligonucleotide
ugugugagcugggaaguuu

SEQ ID NO: 160885 - RNA, 19 nt, Artificial Sequence
  Description of Artificial Sequence: Synthetic oligonucleotide
cacguaguggaggcauugg

SEQ ID NO: 160886 - RNA, 19 nt, Artificial Sequence
  Description of Artificial Sequence: Synthetic oligonucleotide
gaucggcagcaaaggacag

SEQ ID NO: 160887 - RNA, 19 nt, Artificial Sequence
  Description of Artificial Sequence: Synthetic oligonucleotide
ucacgagcuggggaaguga

SEQ ID NO: 160888 - RNA, 19 nt, Artificial Sequence
  Description of Artificial Sequence: Synthetic oligonucleotide
caccacaauuggcugugac

SEQ ID NO: 160889 - RNA, 19 nt, Artificial Sequence
  Description of Artificial Sequence: Synthetic oligonucleotide
acccuuuggaggugagacu

SEQ ID NO: 160890 - RNA, 19 nt, Artificial Sequence
  Description of Artificial Sequence: Synthetic oligonucleotide
ucacaagacucgggcuggg

SEQ ID NO: 160891 - RNA, 19 nt, Artificial Sequence
  Description of Artificial Sequence: Synthetic oligonucleotide
gcguaggccagacuucucc

SEQ ID NO: 160892 - RNA, 19 nt, Artificial Sequence
  Description of Artificial Sequence: Synthetic oligonucleotide
gucauaccuaugaagugaa

SEQ ID NO: 160893 - RNA, 19 nt, Artificial Sequence
  Description of Artificial Sequence: Synthetic oligonucleotide
acaggguacguaggccuuc

SEQ ID NO: 160894 - RNA, 19 nt, Artificial Sequence
  Description of Artificial Sequence: Synthetic oligonucleotide
cugagauccccacgccuac

SEQ ID NO: 160895 - RNA, 19 nt, Artificial Sequence
  Description of Artificial Sequence: Synthetic oligonucleotide
guguuguaaaucagagcca

SEQ ID NO: 160896 - RNA, 19 nt, Artificial Sequence
  Description of Artificial Sequence: Synthetic oligonucleotide
agcauaccaggcucuggaa

SEQ ID NO: 160897 - RNA, 19 nt, Artificial Sequence
  Description of Artificial Sequence: Synthetic oligonucleotide
auacucuacuuagaacuuu

SEQ ID NO: 160898 - RNA, 19 nt, Artificial Sequence
  Description of Artificial Sequence: Synthetic oligonucleotide
accuaugaagugaacuuua

SEQ ID NO: 160899 - RNA, 19 nt, Artificial Sequence
  Description of Artificial Sequence: Synthetic oligonucleotide
gggaacucccauccugaag

SEQ ID NO: 160900 - RNA, 19 nt, Artificial Sequence
  Description of Artificial Sequence: Synthetic oligonucleotide
gggauaaaggagaacccca

SEQ ID NO: 160901 - RNA, 19 nt, Artificial Sequence
  Description of Artificial Sequence: Synthetic oligonucleotide
gucgaucggcagcaaagga

SEQ ID NO: 160902 - RNA, 19 nt, Artificial Sequence
  Description of Artificial Sequence: Synthetic oligonucleotide
cagagggucacccaguaau

SEQ ID NO: 160903 - RNA, 19 nt, Artificial Sequence
  Description of Artificial Sequence: Synthetic oligonucleotide
ucacggcuuuccacagaug

SEQ ID NO: 160904 - RNA, 19 nt, Artificial Sequence
  Description of Artificial Sequence: Synthetic oligonucleotide
gagguuguuuauugcuugu

SEQ ID NO: 160905 - RNA, 19 nt, Artificial Sequence
  Description of Artificial Sequence: Synthetic oligonucleotide
agccacguccagguuuugg

SEQ ID NO: 160906 - RNA, 19 nt, Artificial Sequence
  Description of Artificial Sequence: Synthetic oligonucleotide
gguacguaggccuuccacu

SEQ ID NO: 160907 - RNA, 19 nt, Artificial Sequence
  Description of Artificial Sequence: Synthetic oligonucleotide
gaaucggccccuuggugua

SEQ ID NO: 160908 - RNA, 19 nt, Artificial Sequence
  Description of Artificial Sequence: Synthetic oligonucleotide
accgcggacuggaagagga

SEQ ID NO: 160909 - RNA, 19 nt, Artificial Sequence
  Description of Artificial Sequence: Synthetic oligonucleotide
acaggcgcgaugagacacg

SEQ ID NO: 160910 - RNA, 19 nt, Artificial Sequence
  Description of Artificial Sequence: Synthetic oligonucleotide
ggcuugucccuguaagcug

SEQ ID NO: 160911 - RNA, 19 nt, Artificial Sequence
  Description of Artificial Sequence: Synthetic oligonucleotide
acgccuacaucugccaccu

SEQ ID NO: 160912 - RNA, 19 nt, Artificial Sequence
  Description of Artificial Sequence: Synthetic oligonucleotide
gcucacguugcuuucagua

SEQ ID NO: 160913 - RNA, 19 nt, Artificial Sequence
  Description of Artificial Sequence: Synthetic oligonucleotide
cuucucccaucaaucacaa

SEQ ID NO: 160914 - RNA, 19 nt, Artificial Sequence
  Description of Artificial Sequence: Synthetic oligonucleotide
caggucuugaucuggcugu

SEQ ID NO: 160915 - RNA, 19 nt, Artificial Sequence
  Description of Artificial Sequence: Synthetic oligonucleotide
augaggaaucugccucaga

SEQ ID NO: 160916 - RNA, 19 nt, Artificial Sequence
  Description of Artificial Sequence: Synthetic oligonucleotide
aggugcaaguuugucucca

SEQ ID NO: 160917 - RNA, 19 nt, Artificial Sequence
  Description of Artificial Sequence: Synthetic oligonucleotide
gagcugucauaccuaugaa

SEQ ID NO: 160918 - RNA, 19 nt, Artificial Sequence
  Description of Artificial Sequence: Synthetic oligonucleotide
auuggagcugucauaccua

SEQ ID NO: 160919 - RNA, 19 nt, Artificial Sequence
  Description of Artificial Sequence: Synthetic oligonucleotide
cuauggccagggucauggc

SEQ ID NO: 160920 - RNA, 19 nt, Artificial Sequence
  Description of Artificial Sequence: Synthetic oligonucleotide
acuggcgucccagcuggag

SEQ ID NO: 160921 - RNA, 19 nt, Artificial Sequence
  Description of Artificial Sequence: Synthetic oligonucleotide
gcuguugcuaacauuggaa

SEQ ID NO: 160922 - RNA, 19 nt, Artificial Sequence
  Description of Artificial Sequence: Synthetic oligonucleotide
aggcuacccaguugagcca

SEQ ID NO: 160923 - RNA, 19 nt, Artificial Sequence
  Description of Artificial Sequence: Synthetic oligonucleotide
cacaagaaguguuguaaau

SEQ ID NO: 160924 - RNA, 19 nt, Artificial Sequence
  Description of Artificial Sequence: Synthetic oligonucleotide
aaucggccccuugguguag

SEQ ID NO: 160925 - RNA, 19 nt, Artificial Sequence
  Description of Artificial Sequence: Synthetic oligonucleotide
gccauuucaaggauuuguc

SEQ ID NO: 160926 - RNA, 19 nt, Artificial Sequence
  Description of Artificial Sequence: Synthetic oligonucleotide
cacggcagcaaaagaucca

SEQ ID NO: 160927 - RNA, 19 nt, Artificial Sequence
  Description of Artificial Sequence: Synthetic oligonucleotide
agggcguaggccagacuuc

SEQ ID NO: 160928 - RNA, 19 nt, Artificial Sequence
  Description of Artificial Sequence: Synthetic oligonucleotide
aagggcccugugugcugag

SEQ ID NO: 160929 - RNA, 19 nt, Artificial Sequence
  Description of Artificial Sequence: Synthetic oligonucleotide
ggccccauccaccuauggc

SEQ ID NO: 160930 - RNA, 19 nt, Artificial Sequence
  Description of Artificial Sequence: Synthetic oligonucleotide
cagaggggucgaucggcag

SEQ ID NO: 160931 - RNA, 19 nt, Artificial Sequence
  Description of Artificial Sequence: Synthetic oligonucleotide
uggcgucaucugaggaaca

SEQ ID NO: 160932 - RNA, 19 nt, Artificial Sequence
  Description of Artificial Sequence: Synthetic oligonucleotide
ugacccuuuggaggugaga

SEQ ID NO: 160933 - RNA, 19 nt, Artificial Sequence
  Description of Artificial Sequence: Synthetic oligonucleotide
guaucggaaucuuggcacu

SEQ ID NO: 160934 - RNA, 19 nt, Artificial Sequence
  Description of Artificial Sequence: Synthetic oligonucleotide
uacccaguugagccacguc

SEQ ID NO: 160935 - RNA, 19 nt, Artificial Sequence
  Description of Artificial Sequence: Synthetic oligonucleotide
guaguacugguggguuucc

SEQ ID NO: 160936 - RNA, 19 nt, Artificial Sequence
  Description of Artificial Sequence: Synthetic oligonucleotide
ggguacguaggccuuccac

SEQ ID NO: 160937 - RNA, 19 nt, Artificial Sequence
  Description of Artificial Sequence: Synthetic oligonucleotide
cuccaggcgaaccgcggac

SEQ ID NO: 160938 - RNA, 19 nt, Artificial Sequence
  Description of Artificial Sequence: Synthetic oligonucleotide
uguggccgguauuccucca

SEQ ID NO: 160939 - RNA, 19 nt, Artificial Sequence
  Description of Artificial Sequence: Synthetic oligonucleotide
gucuccaggcgaaccgcgg

SEQ ID NO: 160940 - RNA, 19 nt, Artificial Sequence
  Description of Artificial Sequence: Synthetic oligonucleotide
auguugcacaagaaguguu

SEQ ID NO: 160941 - RNA, 19 nt, Artificial Sequence
  Description of Artificial Sequence: Synthetic oligonucleotide
gguuuuccggggaacuccc

SEQ ID NO: 160942 - RNA, 19 nt, Artificial Sequence
  Description of Artificial Sequence: Synthetic oligonucleotide
cuacugaaacagccuccuc

SEQ ID NO: 160943 - RNA, 19 nt, Artificial Sequence
  Description of Artificial Sequence: Synthetic oligonucleotide
gcacaagaaguguuguaaa

SEQ ID NO: 160944 - RNA, 19 nt, Artificial Sequence
  Description of Artificial Sequence: Synthetic oligonucleotide
auugcacguaguggaggca

SEQ ID NO: 160945 - RNA, 19 nt, Artificial Sequence
  Description of Artificial Sequence: Synthetic oligonucleotide
caaauuugcagaccagcuu

SEQ ID NO: 160946 - RNA, 19 nt, Artificial Sequence
  Description of Artificial Sequence: Synthetic oligonucleotide
caauacccaggugcagcag

SEQ ID NO: 160947 - RNA, 19 nt, Artificial Sequence
  Description of Artificial Sequence: Synthetic oligonucleotide
caggguacguaggccuucc

SEQ ID NO: 160948 - RNA, 19 nt, Artificial Sequence
  Description of Artificial Sequence: Synthetic oligonucleotide
ugcacguaguggaggcauu

SEQ ID NO: 160949 - RNA, 19 nt, Artificial Sequence
  Description of Artificial Sequence: Synthetic oligonucleotide
ugggagcauggaauuuguu

SEQ ID NO: 160950 - RNA, 19 nt, Artificial Sequence
  Description of Artificial Sequence: Synthetic oligonucleotide
cagauaccacuggucaauc

SEQ ID NO: 160951 - RNA, 19 nt, Artificial Sequence
  Description of Artificial Sequence: Synthetic oligonucleotide
aagacucgggcuggggcua

SEQ ID NO: 160952 - RNA, 19 nt, Artificial Sequence
  Description of Artificial Sequence: Synthetic oligonucleotide
aggagggcuuugaaaacaa

SEQ ID NO: 160953 - RNA, 19 nt, Artificial Sequence
  Description of Artificial Sequence: Synthetic oligonucleotide
ugguccaguaaggguuaga

SEQ ID NO: 160954 - RNA, 19 nt, Artificial Sequence
  Description of Artificial Sequence: Synthetic oligonucleotide
agacacuucccagcccacu

SEQ ID NO: 160955 - RNA, 19 nt, Artificial Sequence
  Description of Artificial Sequence: Synthetic oligonucleotide
acucuacuuagaacuuuaa

SEQ ID NO: 160956 - RNA, 19 nt, Artificial Sequence
  Description of Artificial Sequence: Synthetic oligonucleotide
gcgucaucugaggaacacg

SEQ ID NO: 160957 - RNA, 19 nt, Artificial Sequence
  Description of Artificial Sequence: Synthetic oligonucleotide
aggcgaaccgcggacugga

SEQ ID NO: 160958 - RNA, 19 nt, Artificial Sequence
  Description of Artificial Sequence: Synthetic oligonucleotide
gucacgagcuggggaagug

SEQ ID NO: 160959 - RNA, 19 nt, Artificial Sequence
  Description of Artificial Sequence: Synthetic oligonucleotide
agucacgagcuggggaagu

SEQ ID NO: 160960 - RNA, 19 nt, Artificial Sequence
  Description of Artificial Sequence: Synthetic oligonucleotide
gcgaaccgcggacuggaag

SEQ ID NO: 160961 - RNA, 19 nt, Artificial Sequence
  Description of Artificial Sequence: Synthetic oligonucleotide
gguuuccuccuggaguccc

SEQ ID NO: 160962 - RNA, 19 nt, Artificial Sequence
  Description of Artificial Sequence: Synthetic oligonucleotide
  modified_base (5)..(5): a, c, u, g, unknown or other
guggnacccagcaggugca

SEQ ID NO: 160963 - RNA, 19 nt, Artificial Sequence
  Description of Artificial Sequence: Synthetic oligonucleotide
guaccucugguuuccuaua

SEQ ID NO: 160964 - RNA, 19 nt, Artificial Sequence
  Description of Artificial Sequence: Synthetic oligonucleotide
ugguaccucugguuuccua

SEQ ID NO: 160965 - RNA, 19 nt, Artificial Sequence
  Description of Artificial Sequence: Synthetic oligonucleotide
cucacguugcuuucaguau

SEQ ID NO: 160966 - RNA, 19 nt, Artificial Sequence
  Description of Artificial Sequence: Synthetic oligonucleotide
ugccuguggccgguauucc

SEQ ID NO: 160967 - RNA, 19 nt, Artificial Sequence
  Description of Artificial Sequence: Synthetic oligonucleotide
  modified_base (7)..(7): a, c, u, g, unknown or other
caguggnacccagcaggug

SEQ ID NO: 160968 - RNA, 19 nt, Artificial Sequence
  Description of Artificial Sequence: Synthetic oligonucleotide
aguauacucugggguacuu

SEQ ID NO: 160969 - RNA, 19 nt, Artificial Sequence
  Description of Artificial Sequence: Synthetic oligonucleotide
cgaucggcagcaaaggaca

SEQ ID NO: 160970 - RNA, 19 nt, Artificial Sequence
  Description of Artificial Sequence: Synthetic oligonucleotide
ccugggaagggacucaaaa

SEQ ID NO: 160971 - RNA, 19 nt, Artificial Sequence
  Description of Artificial Sequence: Synthetic oligonucleotide
gcucaggacccucuuggca

SEQ ID NO: 160972 - RNA, 19 nt, Artificial Sequence
  Description of Artificial Sequence: Synthetic oligonucleotide
ggucuugaucuggcugugg

SEQ ID NO: 160973 - RNA, 19 nt, Artificial Sequence
  Description of Artificial Sequence: Synthetic oligonucleotide
cagucacgagcuggggaag

SEQ ID NO: 160974 - RNA, 19 nt, Artificial Sequence
  Description of Artificial Sequence: Synthetic oligonucleotide
caaaaggucccauggucuu

SEQ ID NO: 160975 - RNA, 19 nt, Artificial Sequence
  Description of Artificial Sequence: Synthetic oligonucleotide
ccagucacgagcuggggaa

SEQ ID NO: 160976 - RNA, 19 nt, Artificial Sequence
  Description of Artificial Sequence: Synthetic oligonucleotide
ggccccuugguguagacau

SEQ ID NO: 160977 - RNA, 19 nt, Artificial Sequence
  Description of Artificial Sequence: Synthetic oligonucleotide
  modified_base (3)..(3): a, c, u, g, unknown or other
ggnacccagcaggugcaag

SEQ ID NO: 160978 - RNA, 19 nt, Artificial Sequence
  Description of Artificial Sequence: Synthetic oligonucleotide
ccaguaaggguuagaugga

SEQ ID NO: 160979 - RNA, 19 nt, Artificial Sequence
  Description of Artificial Sequence: Synthetic oligonucleotide
caccccaggguucaaugua

SEQ ID NO: 160980 - RNA, 19 nt, Artificial Sequence
  Description of Artificial Sequence: Synthetic oligonucleotide
caacaggcgcgaugagaca

SEQ ID NO: 160981 - RNA, 19 nt, Artificial Sequence
  Description of Artificial Sequence: Synthetic oligonucleotide
aggguacguaggccuucca

SEQ ID NO: 160982 - RNA, 19 nt, Artificial Sequence
  Description of Artificial Sequence: Synthetic oligonucleotide
  modified_base (4)..(4): a, c, u, g, unknown or other
uggnacccagcaggugcaa

SEQ ID NO: 160983 - RNA, 19 nt, Artificial Sequence
  Description of Artificial Sequence: Synthetic oligonucleotide
gcacguaguggaggcauug

SEQ ID NO: 160984 - RNA, 19 nt, Artificial Sequence
  Description of Artificial Sequence: Synthetic oligonucleotide
cugcacagaacugaguauu

SEQ ID NO: 160985 - RNA, 19 nt, Artificial Sequence
  Description of Artificial Sequence: Synthetic oligonucleotide
acguugcuuucaguauacu

SEQ ID NO: 160986 - RNA, 19 nt, Artificial Sequence
  Description of Artificial Sequence: Synthetic oligonucleotide
caaaggacagagcgacacu

SEQ ID NO: 160987 - RNA, 19 nt, Artificial Sequence
  Description of Artificial Sequence: Synthetic oligonucleotide
cgaaccgcggacuggaaga

SEQ ID NO: 160988 - RNA, 19 nt, Artificial Sequence
  Description of Artificial Sequence: Synthetic oligonucleotide
caaucccugggaagggacu

SEQ ID NO: 160989 - RNA, 19 nt, Artificial Sequence
  Description of Artificial Sequence: Synthetic oligonucleotide
gguuuccuauauuugucuu

SEQ ID NO: 160990 - RNA, 19 nt, Artificial Sequence
  Description of Artificial Sequence: Synthetic oligonucleotide
ggcuacccaguugagccac

SEQ ID NO: 160991 - RNA, 19 nt, Artificial Sequence
  Description of Artificial Sequence: Synthetic oligonucleotide
cccaguugagccacgucca

SEQ ID NO: 160992 - RNA, 19 nt, Artificial Sequence
  Description of Artificial Sequence: Synthetic oligonucleotide
ccggggaacucccauccug

SEQ ID NO: 160993 - RNA, 19 nt, Artificial Sequence
  Description of Artificial Sequence: Synthetic oligonucleotide
cgcgaugagacacgucaag

SEQ ID NO: 160994 - RNA, 19 nt, Artificial Sequence
  Description of Artificial Sequence: Synthetic oligonucleotide
gggcccugugugcugagga

SEQ ID NO: 160995 - RNA, 19 nt, Artificial Sequence
  Description of Artificial Sequence: Synthetic oligonucleotide
gugacccuuuggaggugag

SEQ ID NO: 160996 - RNA, 19 nt, Artificial Sequence
  Description of Artificial Sequence: Synthetic oligonucleotide
caguguccgugaacaauua

SEQ ID NO: 160997 - RNA, 19 nt, Artificial Sequence
  Description of Artificial Sequence: Synthetic oligonucleotide
ucggccccuugguguagac

SEQ ID NO: 160998 - RNA, 19 nt, Artificial Sequence
  Description of Artificial Sequence: Synthetic oligonucleotide
ugcaaccaacaggcauacu

SEQ ID NO: 160999 - RNA, 19 nt, Artificial Sequence
  Description of Artificial Sequence: Synthetic oligonucleotide
ugacaucguuggccccauc

SEQ ID NO: 161000 - RNA, 19 nt, Artificial Sequence
  Description of Artificial Sequence: Synthetic oligonucleotide
gacggucuucuaucccagu

SEQ ID NO: 161001 - RNA, 19 nt, Artificial Sequence
  Description of Artificial Sequence: Synthetic oligonucleotide
ggaagcuaaugaggaaucu

SEQ ID NO: 161002 - RNA, 19 nt, Artificial Sequence
  Description of Artificial Sequence: Synthetic oligonucleotide
cacauguuuaugccugcuu

SEQ ID NO: 161003 - RNA, 19 nt, Artificial Sequence
  Description of Artificial Sequence: Synthetic oligonucleotide
cccgcuggccucuggggag

SEQ ID NO: 161004 - RNA, 19 nt, Artificial Sequence
  Description of Artificial Sequence: Synthetic oligonucleotide
guuuuccggggaacuccca

SEQ ID NO: 161005 - RNA, 19 nt, Artificial Sequence
  Description of Artificial Sequence: Synthetic oligonucleotide
cuggguaguacuggugggu

SEQ ID NO: 161006 - RNA, 19 nt, Artificial Sequence
  Description of Artificial Sequence: Synthetic oligonucleotide
cccuuuggaggugagacua

SEQ ID NO: 161007 - RNA, 19 nt, Artificial Sequence
  Description of Artificial Sequence: Synthetic oligonucleotide
aucggccccuugguguaga

SEQ ID NO: 161008 - RNA, 19 nt, Artificial Sequence
  Description of Artificial Sequence: Synthetic oligonucleotide
ggcaauacacaggguacgu

SEQ ID NO: 161009 - RNA, 19 nt, Artificial Sequence
  Description of Artificial Sequence: Synthetic oligonucleotide
ggguuagauggaggauagc

SEQ ID NO: 161010 - RNA, 19 nt, Artificial Sequence
  Description of Artificial Sequence: Synthetic oligonucleotide
cgcggacuggaagaggagc

SEQ ID NO: 161011 - RNA, 19 nt, Artificial Sequence
  Description of Artificial Sequence: Synthetic oligonucleotide
guauacucugggguacuuu

SEQ ID NO: 161012 - RNA, 19 nt, Artificial Sequence
  Description of Artificial Sequence: Synthetic oligonucleotide
gcuacccaguugagccacg

SEQ ID NO: 161013 - RNA, 19 nt, Artificial Sequence
  Description of Artificial Sequence: Synthetic oligonucleotide
gcgaugagacacgucaagu

SEQ ID NO: 161014 - RNA, 19 nt, Artificial Sequence
  Description of Artificial Sequence: Synthetic oligonucleotide
aggcgcgaugagacacguc

SEQ ID NO: 161015 - RNA, 19 nt, Artificial Sequence
  Description of Artificial Sequence: Synthetic oligonucleotide
gaccacugaaucggccccu

SEQ ID NO: 161016 - RNA, 19 nt, Artificial Sequence
  Description of Artificial Sequence: Synthetic oligonucleotide
accacugaaucggccccuu

SEQ ID NO: 161017 - RNA, 19 nt, Artificial Sequence
  Description of Artificial Sequence: Synthetic oligonucleotide
gcaauacacaggguacgua

SEQ ID NO: 161018 - RNA, 19 nt, Artificial Sequence
  Description of Artificial Sequence: Synthetic oligonucleotide
accccacgcucacguugcu

SEQ ID NO: 161019 - RNA, 19 nt, Artificial Sequence
  Description of Artificial Sequence: Synthetic oligonucleotide
cccagucacgagcugggga

SEQ ID NO: 161020 - RNA, 19 nt, Artificial Sequence
  Description of Artificial Sequence: Synthetic oligonucleotide
aacuggcgucccagcugga

SEQ ID NO: 161021 - RNA, 19 nt, Artificial Sequence
  Description of Artificial Sequence: Synthetic oligonucleotide
gcagaggggucgaucggca

SEQ ID NO: 161022 - RNA, 19 nt, Artificial Sequence
  Description of Artificial Sequence: Synthetic oligonucleotide
ggggucgaucggcagcaaa

SEQ ID NO: 161023 - RNA, 19 nt, Artificial Sequence
  Description of Artificial Sequence: Synthetic oligonucleotide
ggccgguauuccuccaugu

SEQ ID NO: 161024 - RNA, 19 nt, Artificial Sequence
  Description of Artificial Sequence: Synthetic oligonucleotide
ccagcuuuaccaccaugcu

SEQ ID NO: 161025 - RNA, 19 nt, Artificial Sequence
  Description of Artificial Sequence: Synthetic oligonucleotide
caguauacucugggguacu

SEQ ID NO: 161026 - RNA, 19 nt, Artificial Sequence
  Description of Artificial Sequence: Synthetic oligonucleotide
gcggacuggaagaggagcu

SEQ ID NO: 161027 - RNA, 19 nt, Artificial Sequence
  Description of Artificial Sequence: Synthetic oligonucleotide
ccgcggacuggaagaggag

SEQ ID NO: 161028 - RNA, 19 nt, Artificial Sequence
  Description of Artificial Sequence: Synthetic oligonucleotide
cuucuuugcucaggacccu

SEQ ID NO: 161029 - RNA, 19 nt, Artificial Sequence
  Description of Artificial Sequence: Synthetic oligonucleotide
guggccgguauuccuccau

SEQ ID NO: 161030 - RNA, 19 nt, Artificial Sequence
  Description of Artificial Sequence: Synthetic oligonucleotide
cuggucaaucauggcagau

SEQ ID NO: 161031 - RNA, 19 nt, Artificial Sequence
  Description of Artificial Sequence: Synthetic oligonucleotide
cucccauccugaagacggu

SEQ ID NO: 161032 - RNA, 19 nt, Artificial Sequence
  Description of Artificial Sequence: Synthetic oligonucleotide
cuacccaguugagccacgu

SEQ ID NO: 161033 - RNA, 19 nt, Artificial Sequence
  Description of Artificial Sequence: Synthetic oligonucleotide
  modified_base (8)..(8): a, c, u, g, unknown or other
ccaguggnacccagcaggu

SEQ ID NO: 161034 - RNA, 19 nt, Artificial Sequence
  Description of Artificial Sequence: Synthetic oligonucleotide
ccacugaaucggccccuug

SEQ ID NO: 161035 - RNA, 19 nt, Artificial Sequence
  Description of Artificial Sequence: Synthetic oligonucleotide
gggcguaggccagacuucu

SEQ ID NO: 161036 - RNA, 19 nt, Artificial Sequence
  Description of Artificial Sequence: Synthetic oligonucleotide
ccuuaacuuagcgaugguu

SEQ ID NO: 161037 - RNA, 19 nt, Artificial Sequence
  Description of Artificial Sequence: Synthetic oligonucleotide
cccacgcucacguugcuuu

SEQ ID NO: 161038 - RNA, 19 nt, Artificial Sequence
  Description of Artificial Sequence: Synthetic oligonucleotide
gccuuaacuuagcgauggu

SEQ ID NO: 161039 - RNA, 19 nt, Artificial Sequence
  Description of Artificial Sequence: Synthetic oligonucleotide
caggcgcgaugagacacgu

SEQ ID NO: 161040 - RNA, 19 nt, Artificial Sequence
  Description of Artificial Sequence: Synthetic oligonucleotide
ggcguaggccagacuucuc

SEQ ID NO: 161041 - RNA, 19 nt, Artificial Sequence
  Description of Artificial Sequence: Synthetic oligonucleotide
gcgcgaugagacacgucaa

SEQ ID NO: 161042 - RNA, 19 nt, Artificial Sequence
  Description of Artificial Sequence: Synthetic oligonucleotide
aggggucgaucggcagcaa

SEQ ID NO: 161043 - RNA, 19 nt, Artificial Sequence
  Description of Artificial Sequence: Synthetic oligonucleotide
ccgcuucuauguggcucug

SEQ ID NO: 161044 - RNA, 19 nt, Artificial Sequence
  Description of Artificial Sequence: Synthetic oligonucleotide
ggcgaaccgcggacuggaa

SEQ ID NO: 161045 - RNA, 19 nt, Artificial Sequence
  Description of Artificial Sequence: Synthetic oligonucleotide
cgcucacguugcuuucagu

SEQ ID NO: 161046 - RNA, 19 nt, Artificial Sequence
  Description of Artificial Sequence: Synthetic oligonucleotide
cggccccuugguguagaca

SEQ ID NO: 161047 - RNA, 19 nt, Artificial Sequence
  Description of Artificial Sequence: Synthetic oligonucleotide
ccccacgcucacguugcuu

SEQ ID NO: 161048 - RNA, 19 nt, Artificial Sequence
  Description of Artificial Sequence: Synthetic oligonucleotide
  modified_base (3)..(3): a, c, u, g, unknown or other
uunuuaaauaucuucaagg

SEQ ID NO: 161049 - RNA, 19 nt, Artificial Sequence
  Description of Artificial Sequence: Synthetic oligonucleotide
aacuuauggaaauccaucc

SEQ ID NO: 161050 - RNA, 19 nt, Artificial Sequence
  Description of Artificial Sequence: Synthetic oligonucleotide
aauuagucuauuaauaguc

SEQ ID NO: 161051 - RNA, 19 nt, Artificial Sequence
  Description of Artificial Sequence: Synthetic oligonucleotide
aaacgaacaggacugccgc

SEQ ID NO: 161052 - RNA, 19 nt, Artificial Sequence
  Description of Artificial Sequence: Synthetic oligonucleotide
aagucuauacuuuucaggu

SEQ ID NO: 161053 - RNA, 19 nt, Artificial Sequence
  Description of Artificial Sequence: Synthetic oligonucleotide
ugcauagaaaucaccaccg

SEQ ID NO: 161054 - RNA, 19 nt, Artificial Sequence
  Description of Artificial Sequence: Synthetic oligonucleotide
aaauuagucuauuaauagu

SEQ ID NO: 161055 - RNA, 19 nt, Artificial Sequence
  Description of Artificial Sequence: Synthetic oligonucleotide
auauagcuugugcugaucc

SEQ ID NO: 161056 - RNA, 19 nt, Artificial Sequence
  Description of Artificial Sequence: Synthetic oligonucleotide
uguucaauaggcuuuuggc

SEQ ID NO: 161057 - RNA, 19 nt, Artificial Sequence
  Description of Artificial Sequence: Synthetic oligonucleotide
ucaaaguaaaacuuaugga

SEQ ID NO: 161058 - RNA, 19 nt, Artificial Sequence
  Description of Artificial Sequence: Synthetic oligonucleotide
aguaagaacgcuaagaagu

SEQ ID NO: 161059 - RNA, 19 nt, Artificial Sequence
  Description of Artificial Sequence: Synthetic oligonucleotide
uggacauugagccaccugc

SEQ ID NO: 161060 - RNA, 19 nt, Artificial Sequence
  Description of Artificial Sequence: Synthetic oligonucleotide
uacaggaugaccccgcagg

SEQ ID NO: 161061 - RNA, 19 nt, Artificial Sequence
  Description of Artificial Sequence: Synthetic oligonucleotide
acuuauggaaauccauccc

SEQ ID NO: 161062 - RNA, 19 nt, Artificial Sequence
  Description of Artificial Sequence: Synthetic oligonucleotide
cuuauggaaauccaucccc

SEQ ID NO: 161063 - RNA, 19 nt, Artificial Sequence
  Description of Artificial Sequence: Synthetic oligonucleotide
uuuaauuguuuuaaaccuc

SEQ ID NO: 161064 - RNA, 19 nt, Artificial Sequence
  Description of Artificial Sequence: Synthetic oligonucleotide
aagaacgcuaagaaguggg

SEQ ID NO: 161065 - RNA, 19 nt, Artificial Sequence
  Description of Artificial Sequence: Synthetic oligonucleotide
uuguguuaucugcuuaggg

SEQ ID NO: 161066 - RNA, 19 nt, Artificial Sequence
  Description of Artificial Sequence: Synthetic oligonucleotide
guaaaacuuauggaaaucc

SEQ ID NO: 161067 - RNA, 19 nt, Artificial Sequence
  Description of Artificial Sequence: Synthetic oligonucleotide
aaucagcuagcuugaccgc

SEQ ID NO: 161068 - RNA, 19 nt, Artificial Sequence
  Description of Artificial Sequence: Synthetic oligonucleotide
ugugauacgcuuugcuggg

SEQ ID NO: 161069 - RNA, 19 nt, Artificial Sequence
  Description of Artificial Sequence: Synthetic oligonucleotide
aaucacguggacgugcggg

SEQ ID NO: 161070 - RNA, 19 nt, Artificial Sequence
  Description of Artificial Sequence: Synthetic oligonucleotide
ugugguucccuuacgagac

SEQ ID NO: 161071 - RNA, 19 nt, Artificial Sequence
  Description of Artificial Sequence: Synthetic oligonucleotide
  modified_base (10)..(10): a, c, u, g, unknown or other
agguuauuunuuaaauauc

SEQ ID NO: 161072 - RNA, 19 nt, Artificial Sequence
  Description of Artificial Sequence: Synthetic oligonucleotide
caaacgaacaggacugccg

SEQ ID NO: 161073 - RNA, 19 nt, Artificial Sequence
  Description of Artificial Sequence: Synthetic oligonucleotide
gaguaagaacgcuaagaag

SEQ ID NO: 161074 - RNA, 19 nt, Artificial Sequence
  Description of Artificial Sequence: Synthetic oligonucleotide
ucuaagaccauuuguuguc

SEQ ID NO: 161075 - RNA, 19 nt, Artificial Sequence
  Description of Artificial Sequence: Synthetic oligonucleotide
uuaauagucuauagaugcu

SEQ ID NO: 161076 - RNA, 19 nt, Artificial Sequence
  Description of Artificial Sequence: Synthetic oligonucleotide
accucaaacgaacaggacu

SEQ ID NO: 161077 - RNA, 19 nt, Artificial Sequence
  Description of Artificial Sequence: Synthetic oligonucleotide
uccguaucauucuaggugu

SEQ ID NO: 161078 - RNA, 19 nt, Artificial Sequence
  Description of Artificial Sequence: Synthetic oligonucleotide
uccuuacuaaguuaggaaa

SEQ ID NO: 161079 - RNA, 19 nt, Artificial Sequence
  Description of Artificial Sequence: Synthetic oligonucleotide
agucuauagaugcugacau

SEQ ID NO: 161080 - RNA, 19 nt, Artificial Sequence
  Description of Artificial Sequence: Synthetic oligonucleotide
cauccuaaagagauggaug

SEQ ID NO: 161081 - RNA, 19 nt, Artificial Sequence
  Description of Artificial Sequence: Synthetic oligonucleotide
auagucuauagaugcugac

SEQ ID NO: 161082 - RNA, 19 nt, Artificial Sequence
  Description of Artificial Sequence: Synthetic oligonucleotide
ucuauagaugcugacauua

SEQ ID NO: 161083 - RNA, 19 nt, Artificial Sequence
  Description of Artificial Sequence: Synthetic oligonucleotide
cuauuaauagucuauagau

SEQ ID NO: 161084 - RNA, 19 nt, Artificial Sequence
  Description of Artificial Sequence: Synthetic oligonucleotide
ugaauuugcgcaagcacuc

SEQ ID NO: 161085 - RNA, 19 nt, Artificial Sequence
  Description of Artificial Sequence: Synthetic oligonucleotide
uucuaggugucaaugcaug

SEQ ID NO: 161086 - RNA, 19 nt, Artificial Sequence
  Description of Artificial Sequence: Synthetic oligonucleotide
auauaggcgaugcaagcug

SEQ ID NO: 161087 - RNA, 19 nt, Artificial Sequence
  Description of Artificial Sequence: Synthetic oligonucleotide
uuauggaaauccauccccu

SEQ ID NO: 161088 - RNA, 19 nt, Artificial Sequence
  Description of Artificial Sequence: Synthetic oligonucleotide
cuguuuucgcacuuugagg

SEQ ID NO: 161089 - RNA, 19 nt, Artificial Sequence
  Description of Artificial Sequence: Synthetic oligonucleotide
aagaccaagccaauugcuc

SEQ ID NO: 161090 - RNA, 19 nt, Artificial Sequence
  Description of Artificial Sequence: Synthetic oligonucleotide
gaugggaaaucguaggcuc

SEQ ID NO: 161091 - RNA, 19 nt, Artificial Sequence
  Description of Artificial Sequence: Synthetic oligonucleotide
aaucguaggcuccagcuuu

SEQ ID NO: 161092 - RNA, 19 nt, Artificial Sequence
  Description of Artificial Sequence: Synthetic oligonucleotide
cuaggaagggacuaccaac

SEQ ID NO: 161093 - RNA, 19 nt, Artificial Sequence
  Description of Artificial Sequence: Synthetic oligonucleotide
acaaauaaccuggggugcc

SEQ ID NO: 161094 - RNA, 19 nt, Artificial Sequence
  Description of Artificial Sequence: Synthetic oligonucleotide
ucguguaggccucaaaguc

SEQ ID NO: 161095 - RNA, 19 nt, Artificial Sequence
  Description of Artificial Sequence: Synthetic oligonucleotide
ggacaaauaaccuggggug

SEQ ID NO: 161096 - RNA, 19 nt, Artificial Sequence
  Description of Artificial Sequence: Synthetic oligonucleotide
uuacuaaguuaggaaagcc

SEQ ID NO: 161097 - RNA, 19 nt, Artificial Sequence
  Description of Artificial Sequence: Synthetic oligonucleotide
guucaauaggcuuuuggca

SEQ ID NO: 161098 - RNA, 19 nt, Artificial Sequence
  Description of Artificial Sequence: Synthetic oligonucleotide
agaccugggguaaucaggc

SEQ ID NO: 161099 - RNA, 19 nt, Artificial Sequence
  Description of Artificial Sequence: Synthetic oligonucleotide
uugugguucccuuacgaga

SEQ ID NO: 161100 - RNA, 19 nt, Artificial Sequence
  Description of Artificial Sequence: Synthetic oligonucleotide
guagcauuguguaccacgg

SEQ ID NO: 161101 - RNA, 19 nt, Artificial Sequence
  Description of Artificial Sequence: Synthetic oligonucleotide
ggugaugggaaaucguagg

SEQ ID NO: 161102 - RNA, 19 nt, Artificial Sequence
  Description of Artificial Sequence: Synthetic oligonucleotide
uuagucuauuaauagucua

SEQ ID NO: 161103 - RNA, 19 nt, Artificial Sequence
  Description of Artificial Sequence: Synthetic oligonucleotide
uaagaacgcuaagaagugg

SEQ ID NO: 161104 - RNA, 19 nt, Artificial Sequence
  Description of Artificial Sequence: Synthetic oligonucleotide
ugcacuucgauggcgaggc

SEQ ID NO: 161105 - RNA, 19 nt, Artificial Sequence
  Description of Artificial Sequence: Synthetic oligonucleotide
uaaagagauggaugaguga

SEQ ID NO: 161106 - RNA, 19 nt, Artificial Sequence
  Description of Artificial Sequence: Synthetic oligonucleotide
cuagcuugaccgcagcacc

SEQ ID NO: 161107 - RNA, 19 nt, Artificial Sequence
  Description of Artificial Sequence: Synthetic oligonucleotide
gagauggacgugcaguaug

SEQ ID NO: 161108 - RNA, 19 nt, Artificial Sequence
  Description of Artificial Sequence: Synthetic oligonucleotide
ucuccuuacuaaguuagga

SEQ ID NO: 161109 - RNA, 19 nt, Artificial Sequence
  Description of Artificial Sequence: Synthetic oligonucleotide
auauacaggaugaccccgc

SEQ ID NO: 161110 - RNA, 19 nt, Artificial Sequence
  Description of Artificial Sequence: Synthetic oligonucleotide
aagagauggacgugcagua

SEQ ID NO: 161111 - RNA, 19 nt, Artificial Sequence
  Description of Artificial Sequence: Synthetic oligonucleotide
uuaccaagggcuucuggcu

SEQ ID NO: 161112 - RNA, 19 nt, Artificial Sequence
  Description of Artificial Sequence: Synthetic oligonucleotide
uucguguaggccucaaagu

SEQ ID NO: 161113 - RNA, 19 nt, Artificial Sequence
  Description of Artificial Sequence: Synthetic oligonucleotide
gacaaauaaccuggggugc

SEQ ID NO: 161114 - RNA, 19 nt, Artificial Sequence
  Description of Artificial Sequence: Synthetic oligonucleotide
uagucuauagaugcugaca

SEQ ID NO: 161115 - RNA, 19 nt, Artificial Sequence
  Description of Artificial Sequence: Synthetic oligonucleotide
acuaaguuaggaaagccaa

SEQ ID NO: 161116 - RNA, 19 nt, Artificial Sequence
  Description of Artificial Sequence: Synthetic oligonucleotide
gagugagugcaugucaugc

SEQ ID NO: 161117 - RNA, 19 nt, Artificial Sequence
  Description of Artificial Sequence: Synthetic oligonucleotide
auacuaugcaguuguuuga

SEQ ID NO: 161118 - RNA, 19 nt, Artificial Sequence
  Description of Artificial Sequence: Synthetic oligonucleotide
caugucaugcucagacuag

SEQ ID NO: 161119 - RNA, 19 nt, Artificial Sequence
  Description of Artificial Sequence: Synthetic oligonucleotide
ugcguccuccccaaucacg

SEQ ID NO: 161120 - RNA, 19 nt, Artificial Sequence
  Description of Artificial Sequence: Synthetic oligonucleotide
gugaugggaaaucguaggc

SEQ ID NO: 161121 - RNA, 19 nt, Artificial Sequence
  Description of Artificial Sequence: Synthetic oligonucleotide
aaaucguaggcuccagcuu

SEQ ID NO: 161122 - RNA, 19 nt, Artificial Sequence
  Description of Artificial Sequence: Synthetic oligonucleotide
cucagacuagguuucucag

SEQ ID NO: 161123 - RNA, 19 nt, Artificial Sequence
  Description of Artificial Sequence: Synthetic oligonucleotide
auaggcuuuuggcagcuga

SEQ ID NO: 161124 - RNA, 19 nt, Artificial Sequence
  Description of Artificial Sequence: Synthetic oligonucleotide
uggacgugcggguuuagga

SEQ ID NO: 161125 - RNA, 19 nt, Artificial Sequence
  Description of Artificial Sequence: Synthetic oligonucleotide
uuauggucaacaucugguu

SEQ ID NO: 161126 - RNA, 19 nt, Artificial Sequence
  Description of Artificial Sequence: Synthetic oligonucleotide
guaggucugauagccacgg

SEQ ID NO: 161127 - RNA, 19 nt, Artificial Sequence
  Description of Artificial Sequence: Synthetic oligonucleotide
guuuaggauggugguaugg

SEQ ID NO: 161128 - RNA, 19 nt, Artificial Sequence
  Description of Artificial Sequence: Synthetic oligonucleotide
uauagcuugugcugauccu

SEQ ID NO: 161129 - RNA, 19 nt, Artificial Sequence
  Description of Artificial Sequence: Synthetic oligonucleotide
cauuaacuggaacagcaca

SEQ ID NO: 161130 - RNA, 19 nt, Artificial Sequence
  Description of Artificial Sequence: Synthetic oligonucleotide
  modified_base (9)..(9): a, c, u, g, unknown or other
gguuauuunuuaaauaucu

SEQ ID NO: 161131 - RNA, 19 nt, Artificial Sequence
  Description of Artificial Sequence: Synthetic oligonucleotide
caugcucagacuagguuuc

SEQ ID NO: 161132 - RNA, 19 nt, Artificial Sequence
  Description of Artificial Sequence: Synthetic oligonucleotide
uguggaucguugacagacc

SEQ ID NO: 161133 - RNA, 19 nt, Artificial Sequence
  Description of Artificial Sequence: Synthetic oligonucleotide
cuccacgagguuaccaagg

SEQ ID NO: 161134 - RNA, 19 nt, Artificial Sequence
  Description of Artificial Sequence: Synthetic oligonucleotide
gaacgcuaagaaguggggc

SEQ ID NO: 161135 - RNA, 19 nt, Artificial Sequence
  Description of Artificial Sequence: Synthetic oligonucleotide
caaaucuucguguaggccu

SEQ ID NO: 161136 - RNA, 19 nt, Artificial Sequence
  Description of Artificial Sequence: Synthetic oligonucleotide
uauacaggaugaccccgca

SEQ ID NO: 161137 - RNA, 19 nt, Artificial Sequence
  Description of Artificial Sequence: Synthetic oligonucleotide
gacgugcggguuuaggaug

SEQ ID NO: 161138 - RNA, 19 nt, Artificial Sequence
  Description of Artificial Sequence: Synthetic oligonucleotide
uucaagccagcaaaaccaa

SEQ ID NO: 161139 - RNA, 19 nt, Artificial Sequence
  Description of Artificial Sequence: Synthetic oligonucleotide
ucugaggcaugcagaaggu

SEQ ID NO: 161140 - RNA, 19 nt, Artificial Sequence
  Description of Artificial Sequence: Synthetic oligonucleotide
cauucuaggugucaaugca

SEQ ID NO: 161141 - RNA, 19 nt, Artificial Sequence
  Description of Artificial Sequence: Synthetic oligonucleotide
ucaaacgaacaggacugcc

SEQ ID NO: 161142 - RNA, 19 nt, Artificial Sequence
  Description of Artificial Sequence: Synthetic oligonucleotide
ugcaucaaaugccuuccau

SEQ ID NO: 161143 - RNA, 19 nt, Artificial Sequence
  Description of Artificial Sequence: Synthetic oligonucleotide
uuuagggaggacacuccuc

SEQ ID NO: 161144 - RNA, 19 nt, Artificial Sequence
  Description of Artificial Sequence: Synthetic oligonucleotide
aaucuccuaaugccccugu

SEQ ID NO: 161145 - RNA, 19 nt, Artificial Sequence
  Description of Artificial Sequence: Synthetic oligonucleotide
uuugcgcaagcacuccacu

SEQ ID NO: 161146 - RNA, 19 nt, Artificial Sequence
  Description of Artificial Sequence: Synthetic oligonucleotide
ggaguaagaacgcuaagaa

SEQ ID NO: 161147 - RNA, 19 nt, Artificial Sequence
  Description of Artificial Sequence: Synthetic oligonucleotide
agugagugcaugucaugcu

SEQ ID NO: 161148 - RNA, 19 nt, Artificial Sequence
  Description of Artificial Sequence: Synthetic oligonucleotide
ccauaugaagcuauggguc

SEQ ID NO: 161149 - RNA, 19 nt, Artificial Sequence
  Description of Artificial Sequence: Synthetic oligonucleotide
guauggaugggcuugcugu

SEQ ID NO: 161150 - RNA, 19 nt, Artificial Sequence
  Description of Artificial Sequence: Synthetic oligonucleotide
aggcgaugcaagcugcguc

SEQ ID NO: 161151 - RNA, 19 nt, Artificial Sequence
  Description of Artificial Sequence: Synthetic oligonucleotide
ggauauaggcgaugcaagc

SEQ ID NO: 161152 - RNA, 19 nt, Artificial Sequence
  Description of Artificial Sequence: Synthetic oligonucleotide
aaccucaaacgaacaggac

SEQ ID NO: 161153 - RNA, 19 nt, Artificial Sequence
  Description of Artificial Sequence: Synthetic oligonucleotide
auaugaagcuaugggucuc

SEQ ID NO: 161154 - RNA, 19 nt, Artificial Sequence
  Description of Artificial Sequence: Synthetic oligonucleotide
gaggagccuggcuaaauuc

SEQ ID NO: 161155 - RNA, 19 nt, Artificial Sequence
  Description of Artificial Sequence: Synthetic oligonucleotide
aagguucaacauccagcug

SEQ ID NO: 161156 - RNA, 19 nt, Artificial Sequence
  Description of Artificial Sequence: Synthetic oligonucleotide
guuugugguucccuuacga

SEQ ID NO: 161157 - RNA, 19 nt, Artificial Sequence
  Description of Artificial Sequence: Synthetic oligonucleotide
ccuguuuucgcacuuugag

SEQ ID NO: 161158 - RNA, 19 nt, Artificial Sequence
  Description of Artificial Sequence: Synthetic oligonucleotide
auggacgugcaguauggga

SEQ ID NO: 161159 - RNA, 19 nt, Artificial Sequence
  Description of Artificial Sequence: Synthetic oligonucleotide
ggcgaugcaucauggaugc

SEQ ID NO: 161160 - RNA, 19 nt, Artificial Sequence
  Description of Artificial Sequence: Synthetic oligonucleotide
cucuccuuacuaaguuagg

SEQ ID NO: 161161 - RNA, 19 nt, Artificial Sequence
  Description of Artificial Sequence: Synthetic oligonucleotide
agaacgcuaagaagugggg

SEQ ID NO: 161162 - RNA, 19 nt, Artificial Sequence
  Description of Artificial Sequence: Synthetic oligonucleotide
gagauggaugagugagugc

SEQ ID NO: 161163 - RNA, 19 nt, Artificial Sequence
  Description of Artificial Sequence: Synthetic oligonucleotide
guagcaaccccuucccuuc

SEQ ID NO: 161164 - RNA, 19 nt, Artificial Sequence
  Description of Artificial Sequence: Synthetic oligonucleotide
ugaggcccgggucacaaau

SEQ ID NO: 161165 - RNA, 19 nt, Artificial Sequence
  Description of Artificial Sequence: Synthetic oligonucleotide
uaugaagcuaugggucuca

SEQ ID NO: 161166 - RNA, 19 nt, Artificial Sequence
  Description of Artificial Sequence: Synthetic oligonucleotide
agcucuaagaccauuuguu

SEQ ID NO: 161167 - RNA, 19 nt, Artificial Sequence
  Description of Artificial Sequence: Synthetic oligonucleotide
ucauuggcggacacacuuc

SEQ ID NO: 161168 - RNA, 19 nt, Artificial Sequence
  Description of Artificial Sequence: Synthetic oligonucleotide
uggaucguugacagaccca

SEQ ID NO: 161169 - RNA, 19 nt, Artificial Sequence
  Description of Artificial Sequence: Synthetic oligonucleotide
ugauauagcuugugcugau

SEQ ID NO: 161170 - RNA, 19 nt, Artificial Sequence
  Description of Artificial Sequence: Synthetic oligonucleotide
aguaggucugauagccacg

SEQ ID NO: 161171 - RNA, 19 nt, Artificial Sequence
  Description of Artificial Sequence: Synthetic oligonucleotide
ccuggcuaaauucaagcac

SEQ ID NO: 161172 - RNA, 19 nt, Artificial Sequence
  Description of Artificial Sequence: Synthetic oligonucleotide
gacauugagccaccugcca

SEQ ID NO: 161173 - RNA, 19 nt, Artificial Sequence
  Description of Artificial Sequence: Synthetic oligonucleotide
agcaaucaggccucaguau

SEQ ID NO: 161174 - RNA, 19 nt, Artificial Sequence
  Description of Artificial Sequence: Synthetic oligonucleotide
gauggacgugcaguauggg

SEQ ID NO: 161175 - RNA, 19 nt, Artificial Sequence
  Description of Artificial Sequence: Synthetic oligonucleotide
cuccuuacuaaguuaggaa

SEQ ID NO: 161176 - RNA, 19 nt, Artificial Sequence
  Description of Artificial Sequence: Synthetic oligonucleotide
gauauaggcgaugcaagcu

SEQ ID NO: 161177 - RNA, 19 nt, Artificial Sequence
  Description of Artificial Sequence: Synthetic oligonucleotide
ugauacgcuuugcuggguu

SEQ ID NO: 161178 - RNA, 19 nt, Artificial Sequence
  Description of Artificial Sequence: Synthetic oligonucleotide
gcauagaaaucaccaccgg

SEQ ID NO: 161179 - RNA, 19 nt, Artificial Sequence
  Description of Artificial Sequence: Synthetic oligonucleotide
ugcgaggccgacccugccc

SEQ ID NO: 161180 - RNA, 19 nt, Artificial Sequence
  Description of Artificial Sequence: Synthetic oligonucleotide
gcugugaagguucaacauc

SEQ ID NO: 161181 - RNA, 19 nt, Artificial Sequence
  Description of Artificial Sequence: Synthetic oligonucleotide
aaguggaguaagaacgcua

SEQ ID NO: 161182 - RNA, 19 nt, Artificial Sequence
  Description of Artificial Sequence: Synthetic oligonucleotide
ugagcucacugcagcggug

SEQ ID NO: 161183 - RNA, 19 nt, Artificial Sequence
  Description of Artificial Sequence: Synthetic oligonucleotide
guggaguaagaacgcuaag

SEQ ID NO: 161184 - RNA, 19 nt, Artificial Sequence
  Description of Artificial Sequence: Synthetic oligonucleotide
ugguucccuuacgagacug

SEQ ID NO: 161185 - RNA, 19 nt, Artificial Sequence
  Description of Artificial Sequence: Synthetic oligonucleotide
cuugaccgcagcacccuug

SEQ ID NO: 161186 - RNA, 19 nt, Artificial Sequence
  Description of Artificial Sequence: Synthetic oligonucleotide
ggggacaaauaaccugggg

SEQ ID NO: 161187 - RNA, 19 nt, Artificial Sequence
  Description of Artificial Sequence: Synthetic oligonucleotide
agacgagcauggucgugag

SEQ ID NO: 161188 - RNA, 19 nt, Artificial Sequence
  Description of Artificial Sequence: Synthetic oligonucleotide
gcuggugcgaggccgaccc

SEQ ID NO: 161189 - RNA, 19 nt, Artificial Sequence
  Description of Artificial Sequence: Synthetic oligonucleotide
caucgauguacugggugag

SEQ ID NO: 161190 - RNA, 19 nt, Artificial Sequence
  Description of Artificial Sequence: Synthetic oligonucleotide
ggacuaccaacauucagaa

SEQ ID NO: 161191 - RNA, 19 nt, Artificial Sequence
  Description of Artificial Sequence: Synthetic oligonucleotide
ggugagccggauauaggcg

SEQ ID NO: 161192 - RNA, 19 nt, Artificial Sequence
  Description of Artificial Sequence: Synthetic oligonucleotide
gacuaccaacauucagaac

SEQ ID NO: 161193 - RNA, 19 nt, Artificial Sequence
  Description of Artificial Sequence: Synthetic oligonucleotide
ggacgugcaguaugggaag

SEQ ID NO: 161194 - RNA, 19 nt, Artificial Sequence
  Description of Artificial Sequence: Synthetic oligonucleotide
acccuugcauuuacucgcc

SEQ ID NO: 161195 - RNA, 19 nt, Artificial Sequence
  Description of Artificial Sequence: Synthetic oligonucleotide
guuuucgcacuuugagguc

SEQ ID NO: 161196 - RNA, 19 nt, Artificial Sequence
  Description of Artificial Sequence: Synthetic oligonucleotide
cucaaacgaacaggacugc

SEQ ID NO: 161197 - RNA, 19 nt, Artificial Sequence
  Description of Artificial Sequence: Synthetic oligonucleotide
agguuuggaucucuccuua

SEQ ID NO: 161198 - RNA, 19 nt, Artificial Sequence
  Description of Artificial Sequence: Synthetic oligonucleotide
auucuaggugucaaugcau

SEQ ID NO: 161199 - RNA, 19 nt, Artificial Sequence
  Description of Artificial Sequence: Synthetic oligonucleotide
auaggcgaugcaagcugcg

SEQ ID NO: 161200 - RNA, 19 nt, Artificial Sequence
  Description of Artificial Sequence: Synthetic oligonucleotide
guaucauucuaggugucaa

SEQ ID NO: 161201 - RNA, 19 nt, Artificial Sequence
  Description of Artificial Sequence: Synthetic oligonucleotide
aggagccuggcuaaauuca

SEQ ID NO: 161202 - RNA, 19 nt, Artificial Sequence
  Description of Artificial Sequence: Synthetic oligonucleotide
ccaaucacguggacgugcg

SEQ ID NO: 161203 - RNA, 19 nt, Artificial Sequence
  Description of Artificial Sequence: Synthetic oligonucleotide
acgcuaagaaguggggcug

SEQ ID NO: 161204 - RNA, 19 nt, Artificial Sequence
  Description of Artificial Sequence: Synthetic oligonucleotide
cauuagccccagaagugga

SEQ ID NO: 161205 - RNA, 19 nt, Artificial Sequence
  Description of Artificial Sequence: Synthetic oligonucleotide
uggagacgagcauggucgu

SEQ ID NO: 161206 - RNA, 19 nt, Artificial Sequence
  Description of Artificial Sequence: Synthetic oligonucleotide
gaugcccaugcagauuguc

SEQ ID NO: 161207 - RNA, 19 nt, Artificial Sequence
  Description of Artificial Sequence: Synthetic oligonucleotide
ggccccugagcagugauag

SEQ ID NO: 161208 - RNA, 19 nt, Artificial Sequence
  Description of Artificial Sequence: Synthetic oligonucleotide
cggauauaggcgaugcaag

SEQ ID NO: 161209 - RNA, 19 nt, Artificial Sequence
  Description of Artificial Sequence: Synthetic oligonucleotide
uggugcgaggccgacccug

SEQ ID NO: 161210 - RNA, 19 nt, Artificial Sequence
  Description of Artificial Sequence: Synthetic oligonucleotide
  modified_base (8)..(8): a, c, u, g, unknown or other
guuauuunuuaaauaucuu

SEQ ID NO: 161211 - RNA, 19 nt, Artificial Sequence
  Description of Artificial Sequence: Synthetic oligonucleotide
uaggcgaugcaagcugcgu

SEQ ID NO: 161212 - RNA, 19 nt, Artificial Sequence
  Description of Artificial Sequence: Synthetic oligonucleotide
ccaucuguagcauugugua

SEQ ID NO: 161213 - RNA, 19 nt, Artificial Sequence
  Description of Artificial Sequence: Synthetic oligonucleotide
gcuaugggucucaaugagc

SEQ ID NO: 161214 - RNA, 19 nt, Artificial Sequence
  Description of Artificial Sequence: Synthetic oligonucleotide
ccauuguaacaaagcuagg

SEQ ID NO: 161215 - RNA, 19 nt, Artificial Sequence
  Description of Artificial Sequence: Synthetic oligonucleotide
cuccacugucucuuggcga

SEQ ID NO: 161216 - RNA, 19 nt, Artificial Sequence
  Description of Artificial Sequence: Synthetic oligonucleotide
cucaagaccucaggggaca

SEQ ID NO: 161217 - RNA, 19 nt, Artificial Sequence
  Description of Artificial Sequence: Synthetic oligonucleotide
agcagccauaugaagcuau

SEQ ID NO: 161218 - RNA, 19 nt, Artificial Sequence
  Description of Artificial Sequence: Synthetic oligonucleotide
uagccacggcauuuucuuc

SEQ ID NO: 161219 - RNA, 19 nt, Artificial Sequence
  Description of Artificial Sequence: Synthetic oligonucleotide
gaugcuacuguggaucguu

SEQ ID NO: 161220 - RNA, 19 nt, Artificial Sequence
  Description of Artificial Sequence: Synthetic oligonucleotide
cccgggucacaaaucuucg

SEQ ID NO: 161221 - RNA, 19 nt, Artificial Sequence
  Description of Artificial Sequence: Synthetic oligonucleotide
auucaagcaccagcaccca

SEQ ID NO: 161222 - RNA, 19 nt, Artificial Sequence
  Description of Artificial Sequence: Synthetic oligonucleotide
gaccgcagcacccuugcau

SEQ ID NO: 161223 - RNA, 19 nt, Artificial Sequence
  Description of Artificial Sequence: Synthetic oligonucleotide
auggcuucgaucaguuguu

SEQ ID NO: 161224 - RNA, 19 nt, Artificial Sequence
  Description of Artificial Sequence: Synthetic oligonucleotide
caguaucagggcccacgug

SEQ ID NO: 161225 - RNA, 19 nt, Artificial Sequence
  Description of Artificial Sequence: Synthetic oligonucleotide
cacuucgauggcgaggcca

SEQ ID NO: 161226 - RNA, 19 nt, Artificial Sequence
  Description of Artificial Sequence: Synthetic oligonucleotide
cagagggacaaugaaugua

SEQ ID NO: 161227 - RNA, 19 nt, Artificial Sequence
  Description of Artificial Sequence: Synthetic oligonucleotide
cauagggaucuuuccucaa

SEQ ID NO: 161228 - RNA, 19 nt, Artificial Sequence
  Description of Artificial Sequence: Synthetic oligonucleotide
cgcuuuguaauuuaauugu

SEQ ID NO: 161229 - RNA, 19 nt, Artificial Sequence
  Description of Artificial Sequence: Synthetic oligonucleotide
gacgugcaguaugggaaga

SEQ ID NO: 161230 - RNA, 19 nt, Artificial Sequence
  Description of Artificial Sequence: Synthetic oligonucleotide
auuggcggacacacuucug

SEQ ID NO: 161231 - RNA, 19 nt, Artificial Sequence
  Description of Artificial Sequence: Synthetic oligonucleotide
gccaccugccaucccggcg

SEQ ID NO: 161232 - RNA, 19 nt, Artificial Sequence
  Description of Artificial Sequence: Synthetic oligonucleotide
augcuacuguggaucguug

SEQ ID NO: 161233 - RNA, 19 nt, Artificial Sequence
  Description of Artificial Sequence: Synthetic oligonucleotide
ccucaagaccucaggggac

SEQ ID NO: 161234 - RNA, 19 nt, Artificial Sequence
  Description of Artificial Sequence: Synthetic oligonucleotide
aguggacauugagccaccu

SEQ ID NO: 161235 - RNA, 19 nt, Artificial Sequence
  Description of Artificial Sequence: Synthetic oligonucleotide
uucucccaaguaggucuga

SEQ ID NO: 161236 - RNA, 19 nt, Artificial Sequence
  Description of Artificial Sequence: Synthetic oligonucleotide
agcagaguagcaaccccuu

SEQ ID NO: 161237 - RNA, 19 nt, Artificial Sequence
  Description of Artificial Sequence: Synthetic oligonucleotide
gcgugcauuggcugcugcc

SEQ ID NO: 161238 - RNA, 19 nt, Artificial Sequence
  Description of Artificial Sequence: Synthetic oligonucleotide
cccacgugcauugugcauc

SEQ ID NO: 161239 - RNA, 19 nt, Artificial Sequence
  Description of Artificial Sequence: Synthetic oligonucleotide
acgugcaguaugggaagaa

SEQ ID NO: 161240 - RNA, 19 nt, Artificial Sequence
  Description of Artificial Sequence: Synthetic oligonucleotide
ggucugaggcaugcagaag

SEQ ID NO: 161241 - RNA, 19 nt, Artificial Sequence
  Description of Artificial Sequence: Synthetic oligonucleotide
gaggcccgggucacaaauc

SEQ ID NO: 161242 - RNA, 19 nt, Artificial Sequence
  Description of Artificial Sequence: Synthetic oligonucleotide
ggcugugaagguucaacau

SEQ ID NO: 161243 - RNA, 19 nt, Artificial Sequence
  Description of Artificial Sequence: Synthetic oligonucleotide
gauggaugagugagugcau

SEQ ID NO: 161244 - RNA, 19 nt, Artificial Sequence
  Description of Artificial Sequence: Synthetic oligonucleotide
caccaccggcucucauccc

SEQ ID NO: 161245 - RNA, 19 nt, Artificial Sequence
  Description of Artificial Sequence: Synthetic oligonucleotide
ggugcgaggccgacccugc

SEQ ID NO: 161246 - RNA, 19 nt, Artificial Sequence
  Description of Artificial Sequence: Synthetic oligonucleotide
gcgcaagcacuccacuguc

SEQ ID NO: 161247 - RNA, 19 nt, Artificial Sequence
  Description of Artificial Sequence: Synthetic oligonucleotide
gaggccgacccugcccauc

SEQ ID NO: 161248 - RNA, 19 nt, Artificial Sequence
  Description of Artificial Sequence: Synthetic oligonucleotide
ccguaucauucuagguguc

SEQ ID NO: 161249 - RNA, 19 nt, Artificial Sequence
  Description of Artificial Sequence: Synthetic oligonucleotide
uccccuccacgagguuacc

SEQ ID NO: 161250 - RNA, 19 nt, Artificial Sequence
  Description of Artificial Sequence: Synthetic oligonucleotide
acguggacgugcggguuua

SEQ ID NO: 161251 - RNA, 19 nt, Artificial Sequence
  Description of Artificial Sequence: Synthetic oligonucleotide
cugcagcggugcggcaggg

SEQ ID NO: 161252 - RNA, 19 nt, Artificial Sequence
  Description of Artificial Sequence: Synthetic oligonucleotide
gugguucccuuacgagacu

SEQ ID NO: 161253 - RNA, 19 nt, Artificial Sequence
  Description of Artificial Sequence: Synthetic oligonucleotide
ggucaguaaagaggccucu

SEQ ID NO: 161254 - RNA, 19 nt, Artificial Sequence
  Description of Artificial Sequence: Synthetic oligonucleotide
gugaggcccgggucacaaa

SEQ ID NO: 161255 - RNA, 19 nt, Artificial Sequence
  Description of Artificial Sequence: Synthetic oligonucleotide
gcucucgguacagcagaga

SEQ ID NO: 161256 - RNA, 19 nt, Artificial Sequence
  Description of Artificial Sequence: Synthetic oligonucleotide
ggcuggugcgaggccgacc

SEQ ID NO: 161257 - RNA, 19 nt, Artificial Sequence
  Description of Artificial Sequence: Synthetic oligonucleotide
gugauacgcuuugcugggu

SEQ ID NO: 161258 - RNA, 19 nt, Artificial Sequence
  Description of Artificial Sequence: Synthetic oligonucleotide
gguucccuuacgagacugu

SEQ ID NO: 161259 - RNA, 19 nt, Artificial Sequence
  Description of Artificial Sequence: Synthetic oligonucleotide
cccuugcauuuacucgcca

SEQ ID NO: 161260 - RNA, 19 nt, Artificial Sequence
  Description of Artificial Sequence: Synthetic oligonucleotide
ggaugcuacuguggaucgu

SEQ ID NO: 161261 - RNA, 19 nt, Artificial Sequence
  Description of Artificial Sequence: Synthetic oligonucleotide
cugcugccgcuuuguaauu

SEQ ID NO: 161262 - RNA, 19 nt, Artificial Sequence
  Description of Artificial Sequence: Synthetic oligonucleotide
ccgggucacaaaucuucgu

SEQ ID NO: 161263 - RNA, 19 nt, Artificial Sequence
  Description of Artificial Sequence: Synthetic oligonucleotide
gcgaugcaagcugcguccu

SEQ ID NO: 161264 - RNA, 19 nt, Artificial Sequence
  Description of Artificial Sequence: Synthetic oligonucleotide
cuggugcgaggccgacccu

SEQ ID NO: 161265 - RNA, 19 nt, Artificial Sequence
  Description of Artificial Sequence: Synthetic oligonucleotide
cguggacgugcggguuuag

SEQ ID NO: 161266 - RNA, 19 nt, Artificial Sequence
  Description of Artificial Sequence: Synthetic oligonucleotide
gcgaugcaucauggaugcu

SEQ ID NO: 161267 - RNA, 19 nt, Artificial Sequence
  Description of Artificial Sequence: Synthetic oligonucleotide
cgaggccgacccugcccau

SEQ ID NO: 161268 - RNA, 19 nt, Artificial Sequence
  Description of Artificial Sequence: Synthetic oligonucleotide
aauguagaaacguacaaug

SEQ ID NO: 161269 - RNA, 19 nt, Artificial Sequence
  Description of Artificial Sequence: Synthetic oligonucleotide
cauuauaagaucaacagug

SEQ ID NO: 161270 - RNA, 19 nt, Artificial Sequence
  Description of Artificial Sequence: Synthetic oligonucleotide
auaaaugccacauaccuuc

SEQ ID NO: 161271 - RNA, 19 nt, Artificial Sequence
  Description of Artificial Sequence: Synthetic oligonucleotide
uuuacuaugacaacucuac

SEQ ID NO: 161272 - RNA, 19 nt, Artificial Sequence
  Description of Artificial Sequence: Synthetic oligonucleotide
auuacaucauuauauagug

SEQ ID NO: 161273 - RNA, 19 nt, Artificial Sequence
  Description of Artificial Sequence: Synthetic oligonucleotide
uucacaacuacauagggga

SEQ ID NO: 161274 - RNA, 19 nt, Artificial Sequence
  Description of Artificial Sequence: Synthetic oligonucleotide
ugguaauccacucucaucc

SEQ ID NO: 161275 - RNA, 19 nt, Artificial Sequence
  Description of Artificial Sequence: Synthetic oligonucleotide
uacaucauuauauagugga

SEQ ID NO: 161276 - RNA, 19 nt, Artificial Sequence
  Description of Artificial Sequence: Synthetic oligonucleotide
aaaauuuucaacugccuau

SEQ ID NO: 161277 - RNA, 19 nt, Artificial Sequence
  Description of Artificial Sequence: Synthetic oligonucleotide
ugagauuaugaaaagcuca

SEQ ID NO: 161278 - RNA, 19 nt, Artificial Sequence
  Description of Artificial Sequence: Synthetic oligonucleotide
ucuacaugcuaaaucagag

SEQ ID NO: 161279 - RNA, 19 nt, Artificial Sequence
  Description of Artificial Sequence: Synthetic oligonucleotide
ucuauauuguccuucguca

SEQ ID NO: 161280 - RNA, 19 nt, Artificial Sequence
  Description of Artificial Sequence: Synthetic oligonucleotide
uuucacaacuacauagggg

SEQ ID NO: 161281 - RNA, 19 nt, Artificial Sequence
  Description of Artificial Sequence: Synthetic oligonucleotide
aaagggagccaucauguuc

SEQ ID NO: 161282 - RNA, 19 nt, Artificial Sequence
  Description of Artificial Sequence: Synthetic oligonucleotide
ucuauaucauguaaauggc

SEQ ID NO: 161283 - RNA, 19 nt, Artificial Sequence
  Description of Artificial Sequence: Synthetic oligonucleotide
aauuauugugauuugucau

SEQ ID NO: 161284 - RNA, 19 nt, Artificial Sequence
  Description of Artificial Sequence: Synthetic oligonucleotide
aauaauucaauaagggaca

SEQ ID NO: 161285 - RNA, 19 nt, Artificial Sequence
  Description of Artificial Sequence: Synthetic oligonucleotide
gaaaagcucaguuaacuug

SEQ ID NO: 161286 - RNA, 19 nt, Artificial Sequence
  Description of Artificial Sequence: Synthetic oligonucleotide
acaaauuaauauacuaggc

SEQ ID NO: 161287 - RNA, 19 nt, Artificial Sequence
  Description of Artificial Sequence: Synthetic oligonucleotide
agcuuucacaacuacauag

SEQ ID NO: 161288 - RNA, 19 nt, Artificial Sequence
  Description of Artificial Sequence: Synthetic oligonucleotide
uuucaacugccuaugauca

SEQ ID NO: 161289 - RNA, 19 nt, Artificial Sequence
  Description of Artificial Sequence: Synthetic oligonucleotide
uuuacuaacaauccaugau

SEQ ID NO: 161290 - RNA, 19 nt, Artificial Sequence
  Description of Artificial Sequence: Synthetic oligonucleotide
uuaaacauaaaagcugacc

SEQ ID NO: 161291 - RNA, 19 nt, Artificial Sequence
  Description of Artificial Sequence: Synthetic oligonucleotide
aguugugcaguguuguagc

SEQ ID NO: 161292 - RNA, 19 nt, Artificial Sequence
  Description of Artificial Sequence: Synthetic oligonucleotide
aauauauugugcaacugug

SEQ ID NO: 161293 - RNA, 19 nt, Artificial Sequence
  Description of Artificial Sequence: Synthetic oligonucleotide
ugauguaacaaaacaguac

SEQ ID NO: 161294 - RNA, 19 nt, Artificial Sequence
  Description of Artificial Sequence: Synthetic oligonucleotide
auggugaaaauacugagga

SEQ ID NO: 161295 - RNA, 19 nt, Artificial Sequence
  Description of Artificial Sequence: Synthetic oligonucleotide
ucuucuauauuguccuucg

SEQ ID NO: 161296 - RNA, 19 nt, Artificial Sequence
  Description of Artificial Sequence: Synthetic oligonucleotide
uuuucgaccaguuccaacu

SEQ ID NO: 161297 - RNA, 19 nt, Artificial Sequence
  Description of Artificial Sequence: Synthetic oligonucleotide
uuugggaauacauuauaca

SEQ ID NO: 161298 - RNA, 19 nt, Artificial Sequence
  Description of Artificial Sequence: Synthetic oligonucleotide
cauccaucgggauauaggg

SEQ ID NO: 161299 - RNA, 19 nt, Artificial Sequence
  Description of Artificial Sequence: Synthetic oligonucleotide
caacuggaaaucaucaucc

SEQ ID NO: 161300 - RNA, 19 nt, Artificial Sequence
  Description of Artificial Sequence: Synthetic oligonucleotide
ucauccaucgggauauagg

SEQ ID NO: 161301 - RNA, 19 nt, Artificial Sequence
  Description of Artificial Sequence: Synthetic oligonucleotide
caaaucuaagucaguaucc

SEQ ID NO: 161302 - RNA, 19 nt, Artificial Sequence
  Description of Artificial Sequence: Synthetic oligonucleotide
cauaaaagcugacccaugg

SEQ ID NO: 161303 - RNA, 19 nt, Artificial Sequence
  Description of Artificial Sequence: Synthetic oligonucleotide
uaagucaguauccugaguu

SEQ ID NO: 161304 - RNA, 19 nt, Artificial Sequence
  Description of Artificial Sequence: Synthetic oligonucleotide
guaacggagacauugccag

SEQ ID NO: 161305 - RNA, 19 nt, Artificial Sequence
  Description of Artificial Sequence: Synthetic oligonucleotide
aucauuauauaguggaaca

SEQ ID NO: 161306 - RNA, 19 nt, Artificial Sequence
  Description of Artificial Sequence: Synthetic oligonucleotide
uuuaaugcaacuucuugau

SEQ ID NO: 161307 - RNA, 19 nt, Artificial Sequence
  Description of Artificial Sequence: Synthetic oligonucleotide
uuaguguuagacccaacca

SEQ ID NO: 161308 - RNA, 19 nt, Artificial Sequence
  Description of Artificial Sequence: Synthetic oligonucleotide
guuaguguuagacccaacc

SEQ ID NO: 161309 - RNA, 19 nt, Artificial Sequence
  Description of Artificial Sequence: Synthetic oligonucleotide
uuacuaacaauccaugauu

SEQ ID NO: 161310 - RNA, 19 nt, Artificial Sequence
  Description of Artificial Sequence: Synthetic oligonucleotide
uugggaauacauuauacau

SEQ ID NO: 161311 - RNA, 19 nt, Artificial Sequence
  Description of Artificial Sequence: Synthetic oligonucleotide
uuuuacuaacaauccauga

SEQ ID NO: 161312 - RNA, 19 nt, Artificial Sequence
  Description of Artificial Sequence: Synthetic oligonucleotide
uucgaaguggcuuuggagu

SEQ ID NO: 161313 - RNA, 19 nt, Artificial Sequence
  Description of Artificial Sequence: Synthetic oligonucleotide
uguagaaacguacaaugua

SEQ ID NO: 161314 - RNA, 19 nt, Artificial Sequence
  Description of Artificial Sequence: Synthetic oligonucleotide
ugcaguagguuucugcugc

SEQ ID NO: 161315 - RNA, 19 nt, Artificial Sequence
  Description of Artificial Sequence: Synthetic oligonucleotide
uucuuugacucaaagugac

SEQ ID NO: 161316 - RNA, 19 nt, Artificial Sequence
  Description of Artificial Sequence: Synthetic oligonucleotide
aauuauauuggcauuucau

SEQ ID NO: 161317 - RNA, 19 nt, Artificial Sequence
  Description of Artificial Sequence: Synthetic oligonucleotide
aguuuaagaaucauuauaa

SEQ ID NO: 161318 - RNA, 19 nt, Artificial Sequence
  Description of Artificial Sequence: Synthetic oligonucleotide
agcauuaacuucacaaucg

SEQ ID NO: 161319 - RNA, 19 nt, Artificial Sequence
  Description of Artificial Sequence: Synthetic oligonucleotide
uaguguuagacccaaccac

SEQ ID NO: 161320 - RNA, 19 nt, Artificial Sequence
  Description of Artificial Sequence: Synthetic oligonucleotide
ucacaaucguaacugguca

SEQ ID NO: 161321 - RNA, 19 nt, Artificial Sequence
  Description of Artificial Sequence: Synthetic oligonucleotide
aauccacucucauccauug

SEQ ID NO: 161322 - RNA, 19 nt, Artificial Sequence
  Description of Artificial Sequence: Synthetic oligonucleotide
ucuagugcuuccaucagaa

SEQ ID NO: 161323 - RNA, 19 nt, Artificial Sequence
  Description of Artificial Sequence: Synthetic oligonucleotide
cuuugacucaaagugacag

SEQ ID NO: 161324 - RNA, 19 nt, Artificial Sequence
  Description of Artificial Sequence: Synthetic oligonucleotide
uauaguggaacaucuucga

SEQ ID NO: 161325 - RNA, 19 nt, Artificial Sequence
  Description of Artificial Sequence: Synthetic oligonucleotide
gauaugauuguguccccag

SEQ ID NO: 161326 - RNA, 19 nt, Artificial Sequence
  Description of Artificial Sequence: Synthetic oligonucleotide
uuuuaugaccuggaaaugu

SEQ ID NO: 161327 - RNA, 19 nt, Artificial Sequence
  Description of Artificial Sequence: Synthetic oligonucleotide
ucuaauggugacaacugau

SEQ ID NO: 161328 - RNA, 19 nt, Artificial Sequence
  Description of Artificial Sequence: Synthetic oligonucleotide
uaaaucagagggaauuaaa

SEQ ID NO: 161329 - RNA, 19 nt, Artificial Sequence
  Description of Artificial Sequence: Synthetic oligonucleotide
uuucauuagaugaggggaa

SEQ ID NO: 161330 - RNA, 19 nt, Artificial Sequence
  Description of Artificial Sequence: Synthetic oligonucleotide
ugacguaguaggagcacgg

SEQ ID NO: 161331 - RNA, 19 nt, Artificial Sequence
  Description of Artificial Sequence: Synthetic oligonucleotide
agguaacggagacauugcc

SEQ ID NO: 161332 - RNA, 19 nt, Artificial Sequence
  Description of Artificial Sequence: Synthetic oligonucleotide
uaccggagcauuaacuuca

SEQ ID NO: 161333 - RNA, 19 nt, Artificial Sequence
  Description of Artificial Sequence: Synthetic oligonucleotide
acuaugacaacucuacauu

SEQ ID NO: 161334 - RNA, 19 nt, Artificial Sequence
  Description of Artificial Sequence: Synthetic oligonucleotide
uguuguuuacaguaugcuc

SEQ ID NO: 161335 - RNA, 19 nt, Artificial Sequence
  Description of Artificial Sequence: Synthetic oligonucleotide
acaaucguaacuggucagc

SEQ ID NO: 161336 - RNA, 19 nt, Artificial Sequence
  Description of Artificial Sequence: Synthetic oligonucleotide
uagaaacguacaauguaac

SEQ ID NO: 161337 - RNA, 19 nt, Artificial Sequence
  Description of Artificial Sequence: Synthetic oligonucleotide
agagacagcuuguaucguc

SEQ ID NO: 161338 - RNA, 19 nt, Artificial Sequence
  Description of Artificial Sequence: Synthetic oligonucleotide
aaagcauuauuuucaugua

SEQ ID NO: 161339 - RNA, 19 nt, Artificial Sequence
  Description of Artificial Sequence: Synthetic oligonucleotide
cagucuacaugcuaaauca

SEQ ID NO: 161340 - RNA, 19 nt, Artificial Sequence
  Description of Artificial Sequence: Synthetic oligonucleotide
uacuaggcaauuuuacuaa

SEQ ID NO: 161341 - RNA, 19 nt, Artificial Sequence
  Description of Artificial Sequence: Synthetic oligonucleotide
uuuucgcuuucucugggca

SEQ ID NO: 161342 - RNA, 19 nt, Artificial Sequence
  Description of Artificial Sequence: Synthetic oligonucleotide
auacauugaccauaucgcu

SEQ ID NO: 161343 - RNA, 19 nt, Artificial Sequence
  Description of Artificial Sequence: Synthetic oligonucleotide
aauggcaauaaugaaugua

SEQ ID NO: 161344 - RNA, 19 nt, Artificial Sequence
  Description of Artificial Sequence: Synthetic oligonucleotide
agcauuaauggaaauuaag

SEQ ID NO: 161345 - RNA, 19 nt, Artificial Sequence
  Description of Artificial Sequence: Synthetic oligonucleotide
aaaggagcgcaacuggaaa

SEQ ID NO: 161346 - RNA, 19 nt, Artificial Sequence
  Description of Artificial Sequence: Synthetic oligonucleotide
auauacugcuggcaaagca

SEQ ID NO: 161347 - RNA, 19 nt, Artificial Sequence
  Description of Artificial Sequence: Synthetic oligonucleotide
auagcgacaaagugcauaa

SEQ ID NO: 161348 - RNA, 19 nt, Artificial Sequence
  Description of Artificial Sequence: Synthetic oligonucleotide
uccgcauauaugcaucucu

SEQ ID NO: 161349 - RNA, 19 nt, Artificial Sequence
  Description of Artificial Sequence: Synthetic oligonucleotide
agagcauuaauggaaauua

SEQ ID NO: 161350 - RNA, 19 nt, Artificial Sequence
  Description of Artificial Sequence: Synthetic oligonucleotide
aauauacuaggcaauuuua

SEQ ID NO: 161351 - RNA, 19 nt, Artificial Sequence
  Description of Artificial Sequence: Synthetic oligonucleotide
aguggaacaucuucgaguu

SEQ ID NO: 161352 - RNA, 19 nt, Artificial Sequence
  Description of Artificial Sequence: Synthetic oligonucleotide
uuuaugaccuggaaauguu

SEQ ID NO: 161353 - RNA, 19 nt, Artificial Sequence
  Description of Artificial Sequence: Synthetic oligonucleotide
aauagcgacaaagugcaua

SEQ ID NO: 161354 - RNA, 19 nt, Artificial Sequence
  Description of Artificial Sequence: Synthetic oligonucleotide
ugagucuauuucauaucug

SEQ ID NO: 161355 - RNA, 19 nt, Artificial Sequence
  Description of Artificial Sequence: Synthetic oligonucleotide
cauuauauaguggaacauc

SEQ ID NO: 161356 - RNA, 19 nt, Artificial Sequence
  Description of Artificial Sequence: Synthetic oligonucleotide
ucugaguugugcaguguug

SEQ ID NO: 161357 - RNA, 19 nt, Artificial Sequence
  Description of Artificial Sequence: Synthetic oligonucleotide
gacaacucuacauuccuaa

SEQ ID NO: 161358 - RNA, 19 nt, Artificial Sequence
  Description of Artificial Sequence: Synthetic oligonucleotide
ccuaugaucaugaugaaga

SEQ ID NO: 161359 - RNA, 19 nt, Artificial Sequence
  Description of Artificial Sequence: Synthetic oligonucleotide
auaguggaacaucuucgag

SEQ ID NO: 161360 - RNA, 19 nt, Artificial Sequence
  Description of Artificial Sequence: Synthetic oligonucleotide
uuugacucaaagugacaga

SEQ ID NO: 161361 - RNA, 19 nt, Artificial Sequence
  Description of Artificial Sequence: Synthetic oligonucleotide
uguaccggagcauuaacuu

SEQ ID NO: 161362 - RNA, 19 nt, Artificial Sequence
  Description of Artificial Sequence: Synthetic oligonucleotide
uaggagcacggucaccugg

SEQ ID NO: 161363 - RNA, 19 nt, Artificial Sequence
  Description of Artificial Sequence: Synthetic oligonucleotide
uuacuaugacaacucuaca

SEQ ID NO: 161364 - RNA, 19 nt, Artificial Sequence
  Description of Artificial Sequence: Synthetic oligonucleotide
cuucgaaguggcuuuggag

SEQ ID NO: 161365 - RNA, 19 nt, Artificial Sequence
  Description of Artificial Sequence: Synthetic oligonucleotide
guuuugaucugguaaagua

SEQ ID NO: 161366 - RNA, 19 nt, Artificial Sequence
  Description of Artificial Sequence: Synthetic oligonucleotide
ucgaccaguuccaacuuga

SEQ ID NO: 161367 - RNA, 19 nt, Artificial Sequence
  Description of Artificial Sequence: Synthetic oligonucleotide
uggcaauaaugaauguaga

SEQ ID NO: 161368 - RNA, 19 nt, Artificial Sequence
  Description of Artificial Sequence: Synthetic oligonucleotide
acuaacaauccaugauucu

SEQ ID NO: 161369 - RNA, 19 nt, Artificial Sequence
  Description of Artificial Sequence: Synthetic oligonucleotide
uggcauuaaaaggacauau

SEQ ID NO: 161370 - RNA, 19 nt, Artificial Sequence
  Description of Artificial Sequence: Synthetic oligonucleotide
agaaaggggauuaaaacua

SEQ ID NO: 161371 - RNA, 19 nt, Artificial Sequence
  Description of Artificial Sequence: Synthetic oligonucleotide
caggaucagcacuacuucg

SEQ ID NO: 161372 - RNA, 19 nt, Artificial Sequence
  Description of Artificial Sequence: Synthetic oligonucleotide
gaguugugcaguguuguag

SEQ ID NO: 161373 - RNA, 19 nt, Artificial Sequence
  Description of Artificial Sequence: Synthetic oligonucleotide
auugauugccccagcaguc

SEQ ID NO: 161374 - RNA, 19 nt, Artificial Sequence
  Description of Artificial Sequence: Synthetic oligonucleotide
acuguuaggcucucaggug

SEQ ID NO: 161375 - RNA, 19 nt, Artificial Sequence
  Description of Artificial Sequence: Synthetic oligonucleotide
uccauugauugccccagca

SEQ ID NO: 161376 - RNA, 19 nt, Artificial Sequence
  Description of Artificial Sequence: Synthetic oligonucleotide
acuacuucgaaguggcuuu

SEQ ID NO: 161377 - RNA, 19 nt, Artificial Sequence
  Description of Artificial Sequence: Synthetic oligonucleotide
acaguuuaagaaucauuau

SEQ ID NO: 161378 - RNA, 19 nt, Artificial Sequence
  Description of Artificial Sequence: Synthetic oligonucleotide
auuauaagaucaacagugu

SEQ ID NO: 161379 - RNA, 19 nt, Artificial Sequence
  Description of Artificial Sequence: Synthetic oligonucleotide
uuugucuagugcuuccauc

SEQ ID NO: 161380 - RNA, 19 nt, Artificial Sequence
  Description of Artificial Sequence: Synthetic oligonucleotide
ugccaaaauccagagauau

SEQ ID NO: 161381 - RNA, 19 nt, Artificial Sequence
  Description of Artificial Sequence: Synthetic oligonucleotide
guagaaacguacaauguaa

SEQ ID NO: 161382 - RNA, 19 nt, Artificial Sequence
  Description of Artificial Sequence: Synthetic oligonucleotide
caacuucuugauucagugc

SEQ ID NO: 161383 - RNA, 19 nt, Artificial Sequence
  Description of Artificial Sequence: Synthetic oligonucleotide
aucgcuauccacaucaaaa

SEQ ID NO: 161384 - RNA, 19 nt, Artificial Sequence
  Description of Artificial Sequence: Synthetic oligonucleotide
gacuguuaggcucucaggu

SEQ ID NO: 161385 - RNA, 19 nt, Artificial Sequence
  Description of Artificial Sequence: Synthetic oligonucleotide
ucauuauauaguggaacau

SEQ ID NO: 161386 - RNA, 19 nt, Artificial Sequence
  Description of Artificial Sequence: Synthetic oligonucleotide
augaauguagaaacguaca

SEQ ID NO: 161387 - RNA, 19 nt, Artificial Sequence
  Description of Artificial Sequence: Synthetic oligonucleotide
augugaaugugaucuggca

SEQ ID NO: 161388 - RNA, 19 nt, Artificial Sequence
  Description of Artificial Sequence: Synthetic oligonucleotide
caguuuaagaaucauuaua

SEQ ID NO: 161389 - RNA, 19 nt, Artificial Sequence
  Description of Artificial Sequence: Synthetic oligonucleotide
ugaccauaucgcuauccac

SEQ ID NO: 161390 - RNA, 19 nt, Artificial Sequence
  Description of Artificial Sequence: Synthetic oligonucleotide
agcuuaucaaagagacagc

SEQ ID NO: 161391 - RNA, 19 nt, Artificial Sequence
  Description of Artificial Sequence: Synthetic oligonucleotide
ucuugauucagugcaggau

SEQ ID NO: 161392 - RNA, 19 nt, Artificial Sequence
  Description of Artificial Sequence: Synthetic oligonucleotide
uucgaccaguuccaacuug

SEQ ID NO: 161393 - RNA, 19 nt, Artificial Sequence
  Description of Artificial Sequence: Synthetic oligonucleotide
uugccagauuuauauuugu

SEQ ID NO: 161394 - RNA, 19 nt, Artificial Sequence
  Description of Artificial Sequence: Synthetic oligonucleotide
uauugugauuugucauuac

SEQ ID NO: 161395 - RNA, 19 nt, Artificial Sequence
  Description of Artificial Sequence: Synthetic oligonucleotide
cuuuuacacguuuccaaga

SEQ ID NO: 161396 - RNA, 19 nt, Artificial Sequence
  Description of Artificial Sequence: Synthetic oligonucleotide
cacaaucguaacuggucag

SEQ ID NO: 161397 - RNA, 19 nt, Artificial Sequence
  Description of Artificial Sequence: Synthetic oligonucleotide
agcgcaacuggaaaucauc

SEQ ID NO: 161398 - RNA, 19 nt, Artificial Sequence
  Description of Artificial Sequence: Synthetic oligonucleotide
gacaaagugcauaaaccaa

SEQ ID NO: 161399 - RNA, 19 nt, Artificial Sequence
  Description of Artificial Sequence: Synthetic oligonucleotide
agugacguaguaggagcac

SEQ ID NO: 161400 - RNA, 19 nt, Artificial Sequence
  Description of Artificial Sequence: Synthetic oligonucleotide
uaauggcaauaaugaaugu

SEQ ID NO: 161401 - RNA, 19 nt, Artificial Sequence
  Description of Artificial Sequence: Synthetic oligonucleotide
gcaacuggaaaucaucauc

SEQ ID NO: 161402 - RNA, 19 nt, Artificial Sequence
  Description of Artificial Sequence: Synthetic oligonucleotide
uuaggcucucaggugaacu

SEQ ID NO: 161403 - RNA, 19 nt, Artificial Sequence
  Description of Artificial Sequence: Synthetic oligonucleotide
cuuuucgaccaguuccaac

SEQ ID NO: 161404 - RNA, 19 nt, Artificial Sequence
  Description of Artificial Sequence: Synthetic oligonucleotide
acuuacaaucccugcugcu

SEQ ID NO: 161405 - RNA, 19 nt, Artificial Sequence
  Description of Artificial Sequence: Synthetic oligonucleotide
aggagcgcaacuggaaauc

SEQ ID NO: 161406 - RNA, 19 nt, Artificial Sequence
  Description of Artificial Sequence: Synthetic oligonucleotide
gugacguaguaggagcacg

SEQ ID NO: 161407 - RNA, 19 nt, Artificial Sequence
  Description of Artificial Sequence: Synthetic oligonucleotide
acccauauaaagaaaccau

SEQ ID NO: 161408 - RNA, 19 nt, Artificial Sequence
  Description of Artificial Sequence: Synthetic oligonucleotide
agaugcaaucaguauuuua

SEQ ID NO: 161409 - RNA, 19 nt, Artificial Sequence
  Description of Artificial Sequence: Synthetic oligonucleotide
aguaugcucaaaaugucuu

SEQ ID NO: 161410 - RNA, 19 nt, Artificial Sequence
  Description of Artificial Sequence: Synthetic oligonucleotide
cuguccgacugugaggagg

SEQ ID NO: 161411 - RNA, 19 nt, Artificial Sequence
  Description of Artificial Sequence: Synthetic oligonucleotide
gcgacaaagugcauaaacc

SEQ ID NO: 161412 - RNA, 19 nt, Artificial Sequence
  Description of Artificial Sequence: Synthetic oligonucleotide
cuuguaccggagcauuaac

SEQ ID NO: 161413 - RNA, 19 nt, Artificial Sequence
  Description of Artificial Sequence: Synthetic oligonucleotide
aggagcacggucaccuggc

SEQ ID NO: 161414 - RNA, 19 nt, Artificial Sequence
  Description of Artificial Sequence: Synthetic oligonucleotide
aagugacguaguaggagca

SEQ ID NO: 161415 - RNA, 19 nt, Artificial Sequence
  Description of Artificial Sequence: Synthetic oligonucleotide
gcagucuacaugcuaaauc

SEQ ID NO: 161416 - RNA, 19 nt, Artificial Sequence
  Description of Artificial Sequence: Synthetic oligonucleotide
cuguuuugaucugguaaag

SEQ ID NO: 161417 - RNA, 19 nt, Artificial Sequence
  Description of Artificial Sequence: Synthetic oligonucleotide
cagcugucguuucuugagg

SEQ ID NO: 161418 - RNA, 19 nt, Artificial Sequence
  Description of Artificial Sequence: Synthetic oligonucleotide
acaacucuacauuccuaaa

SEQ ID NO: 161419 - RNA, 19 nt, Artificial Sequence
  Description of Artificial Sequence: Synthetic oligonucleotide
gucuacaugcuaaaucaga

SEQ ID NO: 161420 - RNA, 19 nt, Artificial Sequence
  Description of Artificial Sequence: Synthetic oligonucleotide
cauauacugcuggcaaagc

SEQ ID NO: 161421 - RNA, 19 nt, Artificial Sequence
  Description of Artificial Sequence: Synthetic oligonucleotide
guaccggagcauuaacuuc

SEQ ID NO: 161422 - RNA, 19 nt, Artificial Sequence
  Description of Artificial Sequence: Synthetic oligonucleotide
accauauacugcuggcaaa

SEQ ID NO: 161423 - RNA, 19 nt, Artificial Sequence
  Description of Artificial Sequence: Synthetic oligonucleotide
uuccgugucaucgcugcca

SEQ ID NO: 161424 - RNA, 19 nt, Artificial Sequence
  Description of Artificial Sequence: Synthetic oligonucleotide
cuauaucauguaaauggcu

SEQ ID NO: 161425 - RNA, 19 nt, Artificial Sequence
  Description of Artificial Sequence: Synthetic oligonucleotide
uuucgcuuucucugggcau

SEQ ID NO: 161426 - RNA, 19 nt, Artificial Sequence
  Description of Artificial Sequence: Synthetic oligonucleotide
gcauuaauggaaauuaagu

SEQ ID NO: 161427 - RNA, 19 nt, Artificial Sequence
  Description of Artificial Sequence: Synthetic oligonucleotide
aucauccaucgggauauag

SEQ ID NO: 161428 - RNA, 19 nt, Artificial Sequence
  Description of Artificial Sequence: Synthetic oligonucleotide
ggguuagagcaucagguuc

SEQ ID NO: 161429 - RNA, 19 nt, Artificial Sequence
  Description of Artificial Sequence: Synthetic oligonucleotide
cuaaaucagagggaauuaa

SEQ ID NO: 161430 - RNA, 19 nt, Artificial Sequence
  Description of Artificial Sequence: Synthetic oligonucleotide
acaugcuaaaucagaggga

SEQ ID NO: 161431 - RNA, 19 nt, Artificial Sequence
  Description of Artificial Sequence: Synthetic oligonucleotide
guuuacuaugacaacucua

SEQ ID NO: 161432 - RNA, 19 nt, Artificial Sequence
  Description of Artificial Sequence: Synthetic oligonucleotide
gaggaaaugugaaugugau

SEQ ID NO: 161433 - RNA, 19 nt, Artificial Sequence
  Description of Artificial Sequence: Synthetic oligonucleotide
caacugccuaugaucauga

SEQ ID NO: 161434 - RNA, 19 nt, Artificial Sequence
  Description of Artificial Sequence: Synthetic oligonucleotide
auuagaugaggggaacauu

SEQ ID NO: 161435 - RNA, 19 nt, Artificial Sequence
  Description of Artificial Sequence: Synthetic oligonucleotide
gaugaagauuuacugccuu

SEQ ID NO: 161436 - RNA, 19 nt, Artificial Sequence
  Description of Artificial Sequence: Synthetic oligonucleotide
gagcacggucaccuggcug

SEQ ID NO: 161437 - RNA, 19 nt, Artificial Sequence
  Description of Artificial Sequence: Synthetic oligonucleotide
gagcauuaauggaaauuaa

SEQ ID NO: 161438 - RNA, 19 nt, Artificial Sequence
  Description of Artificial Sequence: Synthetic oligonucleotide
cuggacuuggcucuaauuu

SEQ ID NO: 161439 - RNA, 19 nt, Artificial Sequence
  Description of Artificial Sequence: Synthetic oligonucleotide
gguaacggagacauugcca

SEQ ID NO: 161440 - RNA, 19 nt, Artificial Sequence
  Description of Artificial Sequence: Synthetic oligonucleotide
acuacauaggggacuguuu

SEQ ID NO: 161441 - RNA, 19 nt, Artificial Sequence
  Description of Artificial Sequence: Synthetic oligonucleotide
uaauagcgacaaagugcau

SEQ ID NO: 161442 - RNA, 19 nt, Artificial Sequence
  Description of Artificial Sequence: Synthetic oligonucleotide
caggcuuaacaauuucaua

SEQ ID NO: 161443 - RNA, 19 nt, Artificial Sequence
  Description of Artificial Sequence: Synthetic oligonucleotide
guaggagcacggucaccug

SEQ ID NO: 161444 - RNA, 19 nt, Artificial Sequence
  Description of Artificial Sequence: Synthetic oligonucleotide
ccuuccgcauauaugcauc

SEQ ID NO: 161445 - RNA, 19 nt, Artificial Sequence
  Description of Artificial Sequence: Synthetic oligonucleotide
gcuuaucaaagagacagcu

SEQ ID NO: 161446 - RNA, 19 nt, Artificial Sequence
  Description of Artificial Sequence: Synthetic oligonucleotide
aucuggcauuaaaaggaca

SEQ ID NO: 161447 - RNA, 19 nt, Artificial Sequence
  Description of Artificial Sequence: Synthetic oligonucleotide
ggcucuaauuuuaaugcaa

SEQ ID NO: 161448 - RNA, 19 nt, Artificial Sequence
  Description of Artificial Sequence: Synthetic oligonucleotide
cccauauaaagaaaccaua

SEQ ID NO: 161449 - RNA, 19 nt, Artificial Sequence
  Description of Artificial Sequence: Synthetic oligonucleotide
gguaauccacucucaucca

SEQ ID NO: 161450 - RNA, 19 nt, Artificial Sequence
  Description of Artificial Sequence: Synthetic oligonucleotide
agcagucuacaugcuaaau

SEQ ID NO: 161451 - RNA, 19 nt, Artificial Sequence
  Description of Artificial Sequence: Synthetic oligonucleotide
caugaguaacugcugguau

SEQ ID NO: 161452 - RNA, 19 nt, Artificial Sequence
  Description of Artificial Sequence: Synthetic oligonucleotide
gucaugauccaggcuuaac

SEQ ID NO: 161453 - RNA, 19 nt, Artificial Sequence
  Description of Artificial Sequence: Synthetic oligonucleotide
uuccgcauauaugcaucuc

SEQ ID NO: 161454 - RNA, 19 nt, Artificial Sequence
  Description of Artificial Sequence: Synthetic oligonucleotide
guaauccacucucauccau

SEQ ID NO: 161455 - RNA, 19 nt, Artificial Sequence
  Description of Artificial Sequence: Synthetic oligonucleotide
cauuagaugaggggaacau

SEQ ID NO: 161456 - RNA, 19 nt, Artificial Sequence
  Description of Artificial Sequence: Synthetic oligonucleotide
ggaucagcacuacuucgaa

SEQ ID NO: 161457 - RNA, 19 nt, Artificial Sequence
  Description of Artificial Sequence: Synthetic oligonucleotide
cuuacaaucccugcugcuu

SEQ ID NO: 161458 - RNA, 19 nt, Artificial Sequence
  Description of Artificial Sequence: Synthetic oligonucleotide
gcuaaaucagagggaauua

SEQ ID NO: 161459 - RNA, 19 nt, Artificial Sequence
  Description of Artificial Sequence: Synthetic oligonucleotide
cuaagucaguauccugagu

SEQ ID NO: 161460 - RNA, 19 nt, Artificial Sequence
  Description of Artificial Sequence: Synthetic oligonucleotide
auaucgcuauccacaucaa

SEQ ID NO: 161461 - RNA, 19 nt, Artificial Sequence
  Description of Artificial Sequence: Synthetic oligonucleotide
augcuaaaucagagggaau

SEQ ID NO: 161462 - RNA, 19 nt, Artificial Sequence
  Description of Artificial Sequence: Synthetic oligonucleotide
cugcaauaauguuccacuu

SEQ ID NO: 161463 - RNA, 19 nt, Artificial Sequence
  Description of Artificial Sequence: Synthetic oligonucleotide
gacguaguaggagcacggu

SEQ ID NO: 161464 - RNA, 19 nt, Artificial Sequence
  Description of Artificial Sequence: Synthetic oligonucleotide
ggagcgcaacuggaaauca

SEQ ID NO: 161465 - RNA, 19 nt, Artificial Sequence
  Description of Artificial Sequence: Synthetic oligonucleotide
gcaugaguaacugcuggua

SEQ ID NO: 161466 - RNA, 19 nt, Artificial Sequence
  Description of Artificial Sequence: Synthetic oligonucleotide
cuucuauauuguccuucgu

SEQ ID NO: 161467 - RNA, 19 nt, Artificial Sequence
  Description of Artificial Sequence: Synthetic oligonucleotide
cacuacuucgaaguggcuu

SEQ ID NO: 161468 - RNA, 19 nt, Artificial Sequence
  Description of Artificial Sequence: Synthetic oligonucleotide
ccaagaaagugacguagua

SEQ ID NO: 161469 - RNA, 19 nt, Artificial Sequence
  Description of Artificial Sequence: Synthetic oligonucleotide
ccaggcuuaacaauuucau

SEQ ID NO: 161470 - RNA, 19 nt, Artificial Sequence
  Description of Artificial Sequence: Synthetic oligonucleotide
gguggcaguaaugguaggu

SEQ ID NO: 161471 - RNA, 19 nt, Artificial Sequence
  Description of Artificial Sequence: Synthetic oligonucleotide
cgugucaucgcugccaaaa

SEQ ID NO: 161472 - RNA, 19 nt, Artificial Sequence
  Description of Artificial Sequence: Synthetic oligonucleotide
gagcgcaacuggaaaucau

SEQ ID NO: 161473 - RNA, 19 nt, Artificial Sequence
  Description of Artificial Sequence: Synthetic oligonucleotide
gucguuucuugagguacau

SEQ ID NO: 161474 - RNA, 19 nt, Artificial Sequence
  Description of Artificial Sequence: Synthetic oligonucleotide
ccuuguaccggagcauuaa

SEQ ID NO: 161475 - RNA, 19 nt, Artificial Sequence
  Description of Artificial Sequence: Synthetic oligonucleotide
cagcuuguaucgucugauu

SEQ ID NO: 161476 - RNA, 19 nt, Artificial Sequence
  Description of Artificial Sequence: Synthetic oligonucleotide
cgcaacuggaaaucaucau

SEQ ID NO: 161477 - RNA, 19 nt, Artificial Sequence
  Description of Artificial Sequence: Synthetic oligonucleotide
cgaccaguuccaacuugaa

SEQ ID NO: 161478 - RNA, 19 nt, Artificial Sequence
  Description of Artificial Sequence: Synthetic oligonucleotide
ccgugucaucgcugccaaa

SEQ ID NO: 161479 - RNA, 19 nt, Artificial Sequence
  Description of Artificial Sequence: Synthetic oligonucleotide
aauaagauaaaccuacguc

SEQ ID NO: 161480 - RNA, 19 nt, Artificial Sequence
  Description of Artificial Sequence: Synthetic oligonucleotide
uuuaucaucaauuuggacc

SEQ ID NO: 161481 - RNA, 19 nt, Artificial Sequence
  Description of Artificial Sequence: Synthetic oligonucleotide
uuauaugucgaacugaaug

SEQ ID NO: 161482 - RNA, 19 nt, Artificial Sequence
  Description of Artificial Sequence: Synthetic oligonucleotide
aaaguuacaaaugaaagcu

SEQ ID NO: 161483 - RNA, 19 nt, Artificial Sequence
  Description of Artificial Sequence: Synthetic oligonucleotide
uuuauuugaggguagagac

SEQ ID NO: 161484 - RNA, 19 nt, Artificial Sequence
  Description of Artificial Sequence: Synthetic oligonucleotide
auaagauaaaccuacgucu

SEQ ID NO: 161485 - RNA, 19 nt, Artificial Sequence
  Description of Artificial Sequence: Synthetic oligonucleotide
uaagacguugucaagggcg

SEQ ID NO: 161486 - RNA, 19 nt, Artificial Sequence
  Description of Artificial Sequence: Synthetic oligonucleotide
aaaucucagauuuagugca

SEQ ID NO: 161487 - RNA, 19 nt, Artificial Sequence
  Description of Artificial Sequence: Synthetic oligonucleotide
uuaucaucaauuuggacca

SEQ ID NO: 161488 - RNA, 19 nt, Artificial Sequence
  Description of Artificial Sequence: Synthetic oligonucleotide
caaaguuugaagucuacgg

SEQ ID NO: 161489 - RNA, 19 nt, Artificial Sequence
  Description of Artificial Sequence: Synthetic oligonucleotide
uccugauggaguuuaaugg

SEQ ID NO: 161490 - RNA, 19 nt, Artificial Sequence
  Description of Artificial Sequence: Synthetic oligonucleotide
gaggauacgguguaguggg

SEQ ID NO: 161491 - RNA, 19 nt, Artificial Sequence
  Description of Artificial Sequence: Synthetic oligonucleotide
uucaugggcuauuacaagg

SEQ ID NO: 161492 - RNA, 19 nt, Artificial Sequence
  Description of Artificial Sequence: Synthetic oligonucleotide
uauaugucgaacugaaugu

SEQ ID NO: 161493 - RNA, 19 nt, Artificial Sequence
  Description of Artificial Sequence: Synthetic oligonucleotide
aaucuggacucuguaaacc

SEQ ID NO: 161494 - RNA, 19 nt, Artificial Sequence
  Description of Artificial Sequence: Synthetic oligonucleotide
gacucuguaaaccaccucc

SEQ ID NO: 161495 - RNA, 19 nt, Artificial Sequence
  Description of Artificial Sequence: Synthetic oligonucleotide
aauuuuacuugagaaacca

SEQ ID NO: 161496 - RNA, 19 nt, Artificial Sequence
  Description of Artificial Sequence: Synthetic oligonucleotide
aauaacuucaagagcuagg

SEQ ID NO: 161497 - RNA, 19 nt, Artificial Sequence
  Description of Artificial Sequence: Synthetic oligonucleotide
aguaagacguugucaaggg

SEQ ID NO: 161498 - RNA, 19 nt, Artificial Sequence
  Description of Artificial Sequence: Synthetic oligonucleotide
guaauagagaaagaacacg

SEQ ID NO: 161499 - RNA, 19 nt, Artificial Sequence
  Description of Artificial Sequence: Synthetic oligonucleotide
uuaaugacccugaaacuca

SEQ ID NO: 161500 - RNA, 19 nt, Artificial Sequence
  Description of Artificial Sequence: Synthetic oligonucleotide
uggacauacgaauuccagg

SEQ ID NO: 161501 - RNA, 19 nt, Artificial Sequence
  Description of Artificial Sequence: Synthetic oligonucleotide
auggaucuuauuuucuacg

SEQ ID NO: 161502 - RNA, 19 nt, Artificial Sequence
  Description of Artificial Sequence: Synthetic oligonucleotide
gacggcaaguuucuaagcg

SEQ ID NO: 161503 - RNA, 19 nt, Artificial Sequence
  Description of Artificial Sequence: Synthetic oligonucleotide
uuaauggacauacgaauuc

SEQ ID NO: 161504 - RNA, 19 nt, Artificial Sequence
  Description of Artificial Sequence: Synthetic oligonucleotide
aucggugaaucacauggcc

SEQ ID NO: 161505 - RNA, 19 nt, Artificial Sequence
  Description of Artificial Sequence: Synthetic oligonucleotide
uggaguuuaauggacauac

SEQ ID NO: 161506 - RNA, 19 nt, Artificial Sequence
  Description of Artificial Sequence: Synthetic oligonucleotide
agcgauauuuggcuggugg

SEQ ID NO: 161507 - RNA, 19 nt, Artificial Sequence
  Description of Artificial Sequence: Synthetic oligonucleotide
uuucaugcagcuaacuuaa

SEQ ID NO: 161508 - RNA, 19 nt, Artificial Sequence
  Description of Artificial Sequence: Synthetic oligonucleotide
aaguuugaagucuacggaa

SEQ ID NO: 161509 - RNA, 19 nt, Artificial Sequence
  Description of Artificial Sequence: Synthetic oligonucleotide
uguaaagguucaauaaguc

SEQ ID NO: 161510 - RNA, 19 nt, Artificial Sequence
  Description of Artificial Sequence: Synthetic oligonucleotide
cuuaaccugugccaggugg

SEQ ID NO: 161511 - RNA, 19 nt, Artificial Sequence
  Description of Artificial Sequence: Synthetic oligonucleotide
uucuaagcgauauuuggcu

SEQ ID NO: 161512 - RNA, 19 nt, Artificial Sequence
  Description of Artificial Sequence: Synthetic oligonucleotide
cuaagcgauauuuggcugg

SEQ ID NO: 161513 - RNA, 19 nt, Artificial Sequence
  Description of Artificial Sequence: Synthetic oligonucleotide
gaguaagacguugucaagg

SEQ ID NO: 161514 - RNA, 19 nt, Artificial Sequence
  Description of Artificial Sequence: Synthetic oligonucleotide
aaaccuacgucuauucauc

SEQ ID NO: 161515 - RNA, 19 nt, Artificial Sequence
  Description of Artificial Sequence: Synthetic oligonucleotide
aaccuuacuucucuccgag

SEQ ID NO: 161516 - RNA, 19 nt, Artificial Sequence
  Description of Artificial Sequence: Synthetic oligonucleotide
ucaugugaauaacuucaag

SEQ ID NO: 161517 - RNA, 19 nt, Artificial Sequence
  Description of Artificial Sequence: Synthetic oligonucleotide
uaaaccuacgucuauucau

SEQ ID NO: 161518 - RNA, 19 nt, Artificial Sequence
  Description of Artificial Sequence: Synthetic oligonucleotide
uauacuguuauaugucgaa

SEQ ID NO: 161519 - RNA, 19 nt, Artificial Sequence
  Description of Artificial Sequence: Synthetic oligonucleotide
agacaacaugaauuaaguc

SEQ ID NO: 161520 - RNA, 19 nt, Artificial Sequence
  Description of Artificial Sequence: Synthetic oligonucleotide
guagccaauaggcugauca

SEQ ID NO: 161521 - RNA, 19 nt, Artificial Sequence
  Description of Artificial Sequence: Synthetic oligonucleotide
gauaaaccuacgucuauuc

SEQ ID NO: 161522 - RNA, 19 nt, Artificial Sequence
  Description of Artificial Sequence: Synthetic oligonucleotide
uugaagucuacggaaaugu

SEQ ID NO: 161523 - RNA, 19 nt, Artificial Sequence
  Description of Artificial Sequence: Synthetic oligonucleotide
gaucggguagccaauaggc

SEQ ID NO: 161524 - RNA, 19 nt, Artificial Sequence
  Description of Artificial Sequence: Synthetic oligonucleotide
ugacagguauacaucauaa

SEQ ID NO: 161525 - RNA, 19 nt, Artificial Sequence
  Description of Artificial Sequence: Synthetic oligonucleotide
uuauuugaggguagagaca

SEQ ID NO: 161526 - RNA, 19 nt, Artificial Sequence
  Description of Artificial Sequence: Synthetic oligonucleotide
agaacugcgccacgcagac

SEQ ID NO: 161527 - RNA, 19 nt, Artificial Sequence
  Description of Artificial Sequence: Synthetic oligonucleotide
ucaucaauuuggaccagga

SEQ ID NO: 161528 - RNA, 19 nt, Artificial Sequence
  Description of Artificial Sequence: Synthetic oligonucleotide
uuuagugcauugcuguaaa

SEQ ID NO: 161529 - RNA, 19 nt, Artificial Sequence
  Description of Artificial Sequence: Synthetic oligonucleotide
agaucggguagccaauagg

SEQ ID NO: 161530 - RNA, 19 nt, Artificial Sequence
  Description of Artificial Sequence: Synthetic oligonucleotide
acuaugaaguuccggauau

SEQ ID NO: 161531 - RNA, 19 nt, Artificial Sequence
  Description of Artificial Sequence: Synthetic oligonucleotide
uaauggacauacgaauucc

SEQ ID NO: 161532 - RNA, 19 nt, Artificial Sequence
  Description of Artificial Sequence: Synthetic oligonucleotide
ucuaagcgauauuuggcug

SEQ ID NO: 161533 - RNA, 19 nt, Artificial Sequence
  Description of Artificial Sequence: Synthetic oligonucleotide
ucggguagccaauaggcug

SEQ ID NO: 161534 - RNA, 19 nt, Artificial Sequence
  Description of Artificial Sequence: Synthetic oligonucleotide
aggcggaucuucugaaacc

SEQ ID NO: 161535 - RNA, 19 nt, Artificial Sequence
  Description of Artificial Sequence: Synthetic oligonucleotide
uacauagagagccuuucau

SEQ ID NO: 161536 - RNA, 19 nt, Artificial Sequence
  Description of Artificial Sequence: Synthetic oligonucleotide
acaacaagagaaaacacaa

SEQ ID NO: 161537 - RNA, 19 nt, Artificial Sequence
  Description of Artificial Sequence: Synthetic oligonucleotide
guacauauuucccugaaua

SEQ ID NO: 161538 - RNA, 19 nt, Artificial Sequence
  Description of Artificial Sequence: Synthetic oligonucleotide
gaagcaagugcagagccgc

SEQ ID NO: 161539 - RNA, 19 nt, Artificial Sequence
  Description of Artificial Sequence: Synthetic oligonucleotide
gacgaguuuaucauguuuc

SEQ ID NO: 161540 - RNA, 19 nt, Artificial Sequence
  Description of Artificial Sequence: Synthetic oligonucleotide
ugaaacucagguggcgucg

SEQ ID NO: 161541 - RNA, 19 nt, Artificial Sequence
  Description of Artificial Sequence: Synthetic oligonucleotide
gacacaaagaucggguagc

SEQ ID NO: 161542 - RNA, 19 nt, Artificial Sequence
  Description of Artificial Sequence: Synthetic oligonucleotide
ucaugagacacgauggcuu

SEQ ID NO: 161543 - RNA, 19 nt, Artificial Sequence
  Description of Artificial Sequence: Synthetic oligonucleotide
aaaccuuacuucucuccga

SEQ ID NO: 161544 - RNA, 19 nt, Artificial Sequence
  Description of Artificial Sequence: Synthetic oligonucleotide
uuccggauauuucccaagc

SEQ ID NO: 161545 - RNA, 19 nt, Artificial Sequence
  Description of Artificial Sequence: Synthetic oligonucleotide
auacuguuauaugucgaac

SEQ ID NO: 161546 - RNA, 19 nt, Artificial Sequence
  Description of Artificial Sequence: Synthetic oligonucleotide
uuaaccgaauuccuucauc

SEQ ID NO: 161547 - RNA, 19 nt, Artificial Sequence
  Description of Artificial Sequence: Synthetic oligonucleotide
uaaugacccugaaacucag

SEQ ID NO: 161548 - RNA, 19 nt, Artificial Sequence
  Description of Artificial Sequence: Synthetic oligonucleotide
auaaaccuacgucuauuca

SEQ ID NO: 161549 - RNA, 19 nt, Artificial Sequence
  Description of Artificial Sequence: Synthetic oligonucleotide
agguuaaucccuuccagaa

SEQ ID NO: 161550 - RNA, 19 nt, Artificial Sequence
  Description of Artificial Sequence: Synthetic oligonucleotide
acaagacgaguuuaucaug

SEQ ID NO: 161551 - RNA, 19 nt, Artificial Sequence
  Description of Artificial Sequence: Synthetic oligonucleotide
uagcuauuugagaaaugcu

SEQ ID NO: 161552 - RNA, 19 nt, Artificial Sequence
  Description of Artificial Sequence: Synthetic oligonucleotide
ucgaugugggaccuuguac

SEQ ID NO: 161553 - RNA, 19 nt, Artificial Sequence
  Description of Artificial Sequence: Synthetic oligonucleotide
aagguacauauuucccuga

SEQ ID NO: 161554 - RNA, 19 nt, Artificial Sequence
  Description of Artificial Sequence: Synthetic oligonucleotide
aggcgcuuaaccaagccac

SEQ ID NO: 161555 - RNA, 19 nt, Artificial Sequence
  Description of Artificial Sequence: Synthetic oligonucleotide
ucugaacgaccacugauuu

SEQ ID NO: 161556 - RNA, 19 nt, Artificial Sequence
  Description of Artificial Sequence: Synthetic oligonucleotide
ugcaaggcacccaucggug

SEQ ID NO: 161557 - RNA, 19 nt, Artificial Sequence
  Description of Artificial Sequence: Synthetic oligonucleotide
ucggugaaucacauggccu

SEQ ID NO: 161558 - RNA, 19 nt, Artificial Sequence
  Description of Artificial Sequence: Synthetic oligonucleotide
uuaaucccuuccagaaucu

SEQ ID NO: 161559 - RNA, 19 nt, Artificial Sequence
  Description of Artificial Sequence: Synthetic oligonucleotide
ucgguugagcauaaugauc

SEQ ID NO: 161560 - RNA, 19 nt, Artificial Sequence
  Description of Artificial Sequence: Synthetic oligonucleotide
uucaugugaauaacuucaa

SEQ ID NO: 161561 - RNA, 19 nt, Artificial Sequence
  Description of Artificial Sequence: Synthetic oligonucleotide
uguggcuagugccuagugu

SEQ ID NO: 161562 - RNA, 19 nt, Artificial Sequence
  Description of Artificial Sequence: Synthetic oligonucleotide
uucugaacgaccacugauu

SEQ ID NO: 161563 - RNA, 19 nt, Artificial Sequence
  Description of Artificial Sequence: Synthetic oligonucleotide
gccgacauggcacaaaccc

SEQ ID NO: 161564 - RNA, 19 nt, Artificial Sequence
  Description of Artificial Sequence: Synthetic oligonucleotide
agaguaagacguugucaag

SEQ ID NO: 161565 - RNA, 19 nt, Artificial Sequence
  Description of Artificial Sequence: Synthetic oligonucleotide
acgcagacaauuuuguuuu

SEQ ID NO: 161566 - RNA, 19 nt, Artificial Sequence
  Description of Artificial Sequence: Synthetic oligonucleotide
aauuuggaccaggagcacu

SEQ ID NO: 161567 - RNA, 19 nt, Artificial Sequence
  Description of Artificial Sequence: Synthetic oligonucleotide
uaugaaguuccggauauuu

SEQ ID NO: 161568 - RNA, 19 nt, Artificial Sequence
  Description of Artificial Sequence: Synthetic oligonucleotide
gaaguuccggauauuuccc

SEQ ID NO: 161569 - RNA, 19 nt, Artificial Sequence
  Description of Artificial Sequence: Synthetic oligonucleotide
gugggugcagucccgaucc

SEQ ID NO: 161570 - RNA, 19 nt, Artificial Sequence
  Description of Artificial Sequence: Synthetic oligonucleotide
aauggacauacgaauucca

SEQ ID NO: 161571 - RNA, 19 nt, Artificial Sequence
  Description of Artificial Sequence: Synthetic oligonucleotide
augucgaacugaauguuuc

SEQ ID NO: 161572 - RNA, 19 nt, Artificial Sequence
  Description of Artificial Sequence: Synthetic oligonucleotide
aaccuacgucuauucauca

SEQ ID NO: 161573 - RNA, 19 nt, Artificial Sequence
  Description of Artificial Sequence: Synthetic oligonucleotide
gacuguacugagugggcgc

SEQ ID NO: 161574 - RNA, 19 nt, Artificial Sequence
  Description of Artificial Sequence: Synthetic oligonucleotide
aggaucgccgacauggcac

SEQ ID NO: 161575 - RNA, 19 nt, Artificial Sequence
  Description of Artificial Sequence: Synthetic oligonucleotide
uaugucgaacugaauguuu

SEQ ID NO: 161576 - RNA, 19 nt, Artificial Sequence
  Description of Artificial Sequence: Synthetic oligonucleotide
acggaaaugucaauacaag

SEQ ID NO: 161577 - RNA, 19 nt, Artificial Sequence
  Description of Artificial Sequence: Synthetic oligonucleotide
caucaauuuggaccaggag

SEQ ID NO: 161578 - RNA, 19 nt, Artificial Sequence
  Description of Artificial Sequence: Synthetic oligonucleotide
aaucccuuccagaaucuga

SEQ ID NO: 161579 - RNA, 19 nt, Artificial Sequence
  Description of Artificial Sequence: Synthetic oligonucleotide
uuuaaccgaauuccuucau

SEQ ID NO: 161580 - RNA, 19 nt, Artificial Sequence
  Description of Artificial Sequence: Synthetic oligonucleotide
ccgaauuccuucaucaggc

SEQ ID NO: 161581 - RNA, 19 nt, Artificial Sequence
  Description of Artificial Sequence: Synthetic oligonucleotide
agcuauuugagaaaugcuu

SEQ ID NO: 161582 - RNA, 19 nt, Artificial Sequence
  Description of Artificial Sequence: Synthetic oligonucleotide
ugcacuccgccacgcaggg

SEQ ID NO: 161583 - RNA, 19 nt, Artificial Sequence
  Description of Artificial Sequence: Synthetic oligonucleotide
acgucuauucaucaucuuu

SEQ ID NO: 161584 - RNA, 19 nt, Artificial Sequence
  Description of Artificial Sequence: Synthetic oligonucleotide
cuuaaccaagccacuguuc

SEQ ID NO: 161585 - RNA, 19 nt, Artificial Sequence
  Description of Artificial Sequence: Synthetic oligonucleotide
ucgaacugaauguuuccau

SEQ ID NO: 161586 - RNA, 19 nt, Artificial Sequence
  Description of Artificial Sequence: Synthetic oligonucleotide
cauccggagggaugaaugc

SEQ ID NO: 161587 - RNA, 19 nt, Artificial Sequence
  Description of Artificial Sequence: Synthetic oligonucleotide
agcuaggaacucuucaaau

SEQ ID NO: 161588 - RNA, 19 nt, Artificial Sequence
  Description of Artificial Sequence: Synthetic oligonucleotide
agagccgcuagagacaaca

SEQ ID NO: 161589 - RNA, 19 nt, Artificial Sequence
  Description of Artificial Sequence: Synthetic oligonucleotide
uggacuguacugagugggc

SEQ ID NO: 161590 - RNA, 19 nt, Artificial Sequence
  Description of Artificial Sequence: Synthetic oligonucleotide
acguugucaagggcgacac

SEQ ID NO: 161591 - RNA, 19 nt, Artificial Sequence
  Description of Artificial Sequence: Synthetic oligonucleotide
ggaauaagauaaaccuacg

SEQ ID NO: 161592 - RNA, 19 nt, Artificial Sequence
  Description of Artificial Sequence: Synthetic oligonucleotide
uuucgguuccggaggaaaa

SEQ ID NO: 161593 - RNA, 19 nt, Artificial Sequence
  Description of Artificial Sequence: Synthetic oligonucleotide
caugagacacgauggcuuc

SEQ ID NO: 161594 - RNA, 19 nt, Artificial Sequence
  Description of Artificial Sequence: Synthetic oligonucleotide
caucggugaaucacauggc

SEQ ID NO: 161595 - RNA, 19 nt, Artificial Sequence
  Description of Artificial Sequence: Synthetic oligonucleotide
auuuggaccaggagcacug

SEQ ID NO: 161596 - RNA, 19 nt, Artificial Sequence
  Description of Artificial Sequence: Synthetic oligonucleotide
ggaggauacgguguagugg

SEQ ID NO: 161597 - RNA, 19 nt, Artificial Sequence
  Description of Artificial Sequence: Synthetic oligonucleotide
guugucaagggcgacacaa

SEQ ID NO: 161598 - RNA, 19 nt, Artificial Sequence
  Description of Artificial Sequence: Synthetic oligonucleotide
agaccucggacacauuccu

SEQ ID NO: 161599 - RNA, 19 nt, Artificial Sequence
  Description of Artificial Sequence: Synthetic oligonucleotide
ucgccgacauggcacaaac

SEQ ID NO: 161600 - RNA, 19 nt, Artificial Sequence
  Description of Artificial Sequence: Synthetic oligonucleotide
gacauacgaauuccaggca

SEQ ID NO: 161601 - RNA, 19 nt, Artificial Sequence
  Description of Artificial Sequence: Synthetic oligonucleotide
gguugcuaauccugaaggc

SEQ ID NO: 161602 - RNA, 19 nt, Artificial Sequence
  Description of Artificial Sequence: Synthetic oligonucleotide
gaggcgcuuaaccaagcca

SEQ ID NO: 161603 - RNA, 19 nt, Artificial Sequence
  Description of Artificial Sequence: Synthetic oligonucleotide
cugcacuccgccacgcagg

SEQ ID NO: 161604 - RNA, 19 nt, Artificial Sequence
  Description of Artificial Sequence: Synthetic oligonucleotide
ugagcauaaugaucuugua

SEQ ID NO: 161605 - RNA, 19 nt, Artificial Sequence
  Description of Artificial Sequence: Synthetic oligonucleotide
acauccggagggaugaaug

SEQ ID NO: 161606 - RNA, 19 nt, Artificial Sequence
  Description of Artificial Sequence: Synthetic oligonucleotide
accucggacacauuccuua

SEQ ID NO: 161607 - RNA, 19 nt, Artificial Sequence
  Description of Artificial Sequence: Synthetic oligonucleotide
cugaaacucagguggcguc

SEQ ID NO: 161608 - RNA, 19 nt, Artificial Sequence
  Description of Artificial Sequence: Synthetic oligonucleotide
cauuguuaccaggacagga

SEQ ID NO: 161609 - RNA, 19 nt, Artificial Sequence
  Description of Artificial Sequence: Synthetic oligonucleotide
uaagcgauauuuggcuggu

SEQ ID NO: 161610 - RNA, 19 nt, Artificial Sequence
  Description of Artificial Sequence: Synthetic oligonucleotide
aguuugaagucuacggaaa

SEQ ID NO: 161611 - RNA, 19 nt, Artificial Sequence
  Description of Artificial Sequence: Synthetic oligonucleotide
ugcuaauccugaaggcaau

SEQ ID NO: 161612 - RNA, 19 nt, Artificial Sequence
  Description of Artificial Sequence: Synthetic oligonucleotide
cagguuaaucccuuccaga

SEQ ID NO: 161613 - RNA, 19 nt, Artificial Sequence
  Description of Artificial Sequence: Synthetic oligonucleotide
agggcuccuuuuguaaagg

SEQ ID NO: 161614 - RNA, 19 nt, Artificial Sequence
  Description of Artificial Sequence: Synthetic oligonucleotide
agguacauauuucccugaa

SEQ ID NO: 161615 - RNA, 19 nt, Artificial Sequence
  Description of Artificial Sequence: Synthetic oligonucleotide
uucgguuccggaggaaaac

SEQ ID NO: 161616 - RNA, 19 nt, Artificial Sequence
  Description of Artificial Sequence: Synthetic oligonucleotide
caauggaucuuauuuucua

SEQ ID NO: 161617 - RNA, 19 nt, Artificial Sequence
  Description of Artificial Sequence: Synthetic oligonucleotide
auacucaucuggagaagug

SEQ ID NO: 161618 - RNA, 19 nt, Artificial Sequence
  Description of Artificial Sequence: Synthetic oligonucleotide
uuggguucugaacgaccac

SEQ ID NO: 161619 - RNA, 19 nt, Artificial Sequence
  Description of Artificial Sequence: Synthetic oligonucleotide
acaauacauagagagccuu

SEQ ID NO: 161620 - RNA, 19 nt, Artificial Sequence
  Description of Artificial Sequence: Synthetic oligonucleotide
uuagugcauugcuguaaaa

SEQ ID NO: 161621 - RNA, 19 nt, Artificial Sequence
  Description of Artificial Sequence: Synthetic oligonucleotide
augccgcucuggcuggugg

SEQ ID NO: 161622 - RNA, 19 nt, Artificial Sequence
  Description of Artificial Sequence: Synthetic oligonucleotide
gcucuaguaccccaguuuc

SEQ ID NO: 161623 - RNA, 19 nt, Artificial Sequence
  Description of Artificial Sequence: Synthetic oligonucleotide
auaugucgaacugaauguu

SEQ ID NO: 161624 - RNA, 19 nt, Artificial Sequence
  Description of Artificial Sequence: Synthetic oligonucleotide
cacaagacgaguuuaucau

SEQ ID NO: 161625 - RNA, 19 nt, Artificial Sequence
  Description of Artificial Sequence: Synthetic oligonucleotide
aggcugaucacaagacgag

SEQ ID NO: 161626 - RNA, 19 nt, Artificial Sequence
  Description of Artificial Sequence: Synthetic oligonucleotide
augugaacuguuggcagga

SEQ ID NO: 161627 - RNA, 19 nt, Artificial Sequence
  Description of Artificial Sequence: Synthetic oligonucleotide
ccagcauaccaacagaaga

SEQ ID NO: 161628 - RNA, 19 nt, Artificial Sequence
  Description of Artificial Sequence: Synthetic oligonucleotide
agccgcuagagacaacaaa

SEQ ID NO: 161629 - RNA, 19 nt, Artificial Sequence
  Description of Artificial Sequence: Synthetic oligonucleotide
cacaaucuggacucuguaa

SEQ ID NO: 161630 - RNA, 19 nt, Artificial Sequence
  Description of Artificial Sequence: Synthetic oligonucleotide
uaucaucaauuuggaccag

SEQ ID NO: 161631 - RNA, 19 nt, Artificial Sequence
  Description of Artificial Sequence: Synthetic oligonucleotide
ggacuguacugagugggcg

SEQ ID NO: 161632 - RNA, 19 nt, Artificial Sequence
  Description of Artificial Sequence: Synthetic oligonucleotide
ugcgccacgcagacaauuu

SEQ ID NO: 161633 - RNA, 19 nt, Artificial Sequence
  Description of Artificial Sequence: Synthetic oligonucleotide
gcagucccgauccugcugc

SEQ ID NO: 161634 - RNA, 19 nt, Artificial Sequence
  Description of Artificial Sequence: Synthetic oligonucleotide
ucagguggcgucgguugag

SEQ ID NO: 161635 - RNA, 19 nt, Artificial Sequence
  Description of Artificial Sequence: Synthetic oligonucleotide
gaggaucgccgacauggca

SEQ ID NO: 161636 - RNA, 19 nt, Artificial Sequence
  Description of Artificial Sequence: Synthetic oligonucleotide
agucuguggguuggagcac

SEQ ID NO: 161637 - RNA, 19 nt, Artificial Sequence
  Description of Artificial Sequence: Synthetic oligonucleotide
ccugauggaguuuaaugga

SEQ ID NO: 161638 - RNA, 19 nt, Artificial Sequence
  Description of Artificial Sequence: Synthetic oligonucleotide
ugucgaugugggaccuugu

SEQ ID NO: 161639 - RNA, 19 nt, Artificial Sequence
  Description of Artificial Sequence: Synthetic oligonucleotide
gcuauuugagaaaugcuua

SEQ ID NO: 161640 - RNA, 19 nt, Artificial Sequence
  Description of Artificial Sequence: Synthetic oligonucleotide
accuacgucuauucaucau

SEQ ID NO: 161641 - RNA, 19 nt, Artificial Sequence
  Description of Artificial Sequence: Synthetic oligonucleotide
gggguggaggcgcuuaacc

SEQ ID NO: 161642 - RNA, 19 nt, Artificial Sequence
  Description of Artificial Sequence: Synthetic oligonucleotide
gucuacggaaaugucaaua

SEQ ID NO: 161643 - RNA, 19 nt, Artificial Sequence
  Description of Artificial Sequence: Synthetic oligonucleotide
guggcuagugccuaguguu

SEQ ID NO: 161644 - RNA, 19 nt, Artificial Sequence
  Description of Artificial Sequence: Synthetic oligonucleotide
ggcuagugccuaguguugg

SEQ ID NO: 161645 - RNA, 19 nt, Artificial Sequence
  Description of Artificial Sequence: Synthetic oligonucleotide
uccuuuuguaaagguucaa

SEQ ID NO: 161646 - RNA, 19 nt, Artificial Sequence
  Description of Artificial Sequence: Synthetic oligonucleotide
ucuguggguuggagcacaa

SEQ ID NO: 161647 - RNA, 19 nt, Artificial Sequence
  Description of Artificial Sequence: Synthetic oligonucleotide
agacguugucaagggcgac

SEQ ID NO: 161648 - RNA, 19 nt, Artificial Sequence
  Description of Artificial Sequence: Synthetic oligonucleotide
aucggguagccaauaggcu

SEQ ID NO: 161649 - RNA, 19 nt, Artificial Sequence
  Description of Artificial Sequence: Synthetic oligonucleotide
augagacaacaugaauuaa

SEQ ID NO: 161650 - RNA, 19 nt, Artificial Sequence
  Description of Artificial Sequence: Synthetic oligonucleotide
agucuacggaaaugucaau

SEQ ID NO: 161651 - RNA, 19 nt, Artificial Sequence
  Description of Artificial Sequence: Synthetic oligonucleotide
cgacauggcacaaacccug

SEQ ID NO: 161652 - RNA, 19 nt, Artificial Sequence
  Description of Artificial Sequence: Synthetic oligonucleotide
uacgucuauucaucaucuu

SEQ ID NO: 161653 - RNA, 19 nt, Artificial Sequence
  Description of Artificial Sequence: Synthetic oligonucleotide
ggauacgguguagugggug

SEQ ID NO: 161654 - RNA, 19 nt, Artificial Sequence
  Description of Artificial Sequence: Synthetic oligonucleotide
guuucgguuccggaggaaa

SEQ ID NO: 161655 - RNA, 19 nt, Artificial Sequence
  Description of Artificial Sequence: Synthetic oligonucleotide
aggcacccaucggugaauc

SEQ ID NO: 161656 - RNA, 19 nt, Artificial Sequence
  Description of Artificial Sequence: Synthetic oligonucleotide
agggcgacacaaagaucgg

SEQ ID NO: 161657 - RNA, 19 nt, Artificial Sequence
  Description of Artificial Sequence: Synthetic oligonucleotide
gcgauauuuggcuggugga

SEQ ID NO: 161658 - RNA, 19 nt, Artificial Sequence
  Description of Artificial Sequence: Synthetic oligonucleotide
cuguggcuagugccuagug

SEQ ID NO: 161659 - RNA, 19 nt, Artificial Sequence
  Description of Artificial Sequence: Synthetic oligonucleotide
gaucacaagacgaguuuau

SEQ ID NO: 161660 - RNA, 19 nt, Artificial Sequence
  Description of Artificial Sequence: Synthetic oligonucleotide
cugagaaaucucagauuua

SEQ ID NO: 161661 - RNA, 19 nt, Artificial Sequence
  Description of Artificial Sequence: Synthetic oligonucleotide
auggaguuuaauggacaua

SEQ ID NO: 161662 - RNA, 19 nt, Artificial Sequence
  Description of Artificial Sequence: Synthetic oligonucleotide
gucgaugugggaccuugua

SEQ ID NO: 161663 - RNA, 19 nt, Artificial Sequence
  Description of Artificial Sequence: Synthetic oligonucleotide
gcacccaucggugaaucac

SEQ ID NO: 161664 - RNA, 19 nt, Artificial Sequence
  Description of Artificial Sequence: Synthetic oligonucleotide
ccuaguguuggaggauacg

SEQ ID NO: 161665 - RNA, 19 nt, Artificial Sequence
  Description of Artificial Sequence: Synthetic oligonucleotide
gggugcauuguuaccagga

SEQ ID NO: 161666 - RNA, 19 nt, Artificial Sequence
  Description of Artificial Sequence: Synthetic oligonucleotide
uacgggcaugugaacuguu

SEQ ID NO: 161667 - RNA, 19 nt, Artificial Sequence
  Description of Artificial Sequence: Synthetic oligonucleotide
gggcgacacaaagaucggg

SEQ ID NO: 161668 - RNA, 19 nt, Artificial Sequence
  Description of Artificial Sequence: Synthetic oligonucleotide
gaaagcccacgagggugug

SEQ ID NO: 161669 - RNA, 19 nt, Artificial Sequence
  Description of Artificial Sequence: Synthetic oligonucleotide
cacaggcggaucuucugaa

SEQ ID NO: 161670 - RNA, 19 nt, Artificial Sequence
  Description of Artificial Sequence: Synthetic oligonucleotide
ucgggguggaggcgcuuaa

SEQ ID NO: 161671 - RNA, 19 nt, Artificial Sequence
  Description of Artificial Sequence: Synthetic oligonucleotide
gcaagacuccuccgggcug

SEQ ID NO: 161672 - RNA, 19 nt, Artificial Sequence
  Description of Artificial Sequence: Synthetic oligonucleotide
ggaucgccgacauggcaca

SEQ ID NO: 161673 - RNA, 19 nt, Artificial Sequence
  Description of Artificial Sequence: Synthetic oligonucleotide
cuuaaggugcugccuggcu

SEQ ID NO: 161674 - RNA, 19 nt, Artificial Sequence
  Description of Artificial Sequence: Synthetic oligonucleotide
cagguggcgucgguugagc

SEQ ID NO: 161675 - RNA, 19 nt, Artificial Sequence
  Description of Artificial Sequence: Synthetic oligonucleotide
gacugcacuccgccacgca

SEQ ID NO: 161676 - RNA, 19 nt, Artificial Sequence
  Description of Artificial Sequence: Synthetic oligonucleotide
guggcgucgguugagcaua

SEQ ID NO: 161677 - RNA, 19 nt, Artificial Sequence
  Description of Artificial Sequence: Synthetic oligonucleotide
caaagaucggguagccaau

SEQ ID NO: 161678 - RNA, 19 nt, Artificial Sequence
  Description of Artificial Sequence: Synthetic oligonucleotide
auaugagcucagaguuaga

SEQ ID NO: 161679 - RNA, 19 nt, Artificial Sequence
  Description of Artificial Sequence: Synthetic oligonucleotide
guguagugggugggugcag

SEQ ID NO: 161680 - RNA, 19 nt, Artificial Sequence
  Description of Artificial Sequence: Synthetic oligonucleotide
uggcgucgguugagcauaa

SEQ ID NO: 161681 - RNA, 19 nt, Artificial Sequence
  Description of Artificial Sequence: Synthetic oligonucleotide
ggcgacacaaagaucgggu

SEQ ID NO: 161682 - RNA, 19 nt, Artificial Sequence
  Description of Artificial Sequence: Synthetic oligonucleotide
gcgcuuaaccaagccacug

SEQ ID NO: 161683 - RNA, 19 nt, Artificial Sequence
  Description of Artificial Sequence: Synthetic oligonucleotide
gcgacacaaagaucgggua

SEQ ID NO: 161684 - RNA, 19 nt, Artificial Sequence
  Description of Artificial Sequence: Synthetic oligonucleotide
ccccuuacgggcaugugaa

SEQ ID NO: 161685 - RNA, 19 nt, Artificial Sequence
  Description of Artificial Sequence: Synthetic oligonucleotide
gguauacaucauaaauuau

SEQ ID NO: 161686 - RNA, 19 nt, Artificial Sequence
  Description of Artificial Sequence: Synthetic oligonucleotide
aucgccgacauggcacaaa

SEQ ID NO: 161687 - RNA, 19 nt, Artificial Sequence
  Description of Artificial Sequence: Synthetic oligonucleotide
gcuuaaccaagccacuguu

SEQ ID NO: 161688 - RNA, 19 nt, Artificial Sequence
  Description of Artificial Sequence: Synthetic oligonucleotide
aggauacgguguagugggu

SEQ ID NO: 161689 - RNA, 19 nt, Artificial Sequence
  Description of Artificial Sequence: Synthetic oligonucleotide
gagccgcuagagacaacaa

SEQ ID NO: 161690 - RNA, 19 nt, Artificial Sequence
  Description of Artificial Sequence: Synthetic oligonucleotide
gccccgagaaagcccacga

SEQ ID NO: 161691 - RNA, 19 nt, Artificial Sequence
  Description of Artificial Sequence: Synthetic oligonucleotide
gacauccggagggaugaau

SEQ ID NO: 161692 - RNA, 19 nt, Artificial Sequence
  Description of Artificial Sequence: Synthetic oligonucleotide
caugggcuauuacaagguu

SEQ ID NO: 161693 - RNA, 19 nt, Artificial Sequence
  Description of Artificial Sequence: Synthetic oligonucleotide
gcagagccgcuagagacaa

SEQ ID NO: 161694 - RNA, 19 nt, Artificial Sequence
  Description of Artificial Sequence: Synthetic oligonucleotide
cagagccgcuagagacaac

SEQ ID NO: 161695 - RNA, 19 nt, Artificial Sequence
  Description of Artificial Sequence: Synthetic oligonucleotide
ggguuggagcacaauacau

SEQ ID NO: 161696 - RNA, 19 nt, Artificial Sequence
  Description of Artificial Sequence: Synthetic oligonucleotide
ggacugcacuccgccacgc

SEQ ID NO: 161697 - RNA, 19 nt, Artificial Sequence
  Description of Artificial Sequence: Synthetic oligonucleotide
gguggcgucgguugagcau

SEQ ID NO: 161698 - RNA, 19 nt, Artificial Sequence
  Description of Artificial Sequence: Synthetic oligonucleotide
cccuuacgggcaugugaac

SEQ ID NO: 161699 - RNA, 19 nt, Artificial Sequence
  Description of Artificial Sequence: Synthetic oligonucleotide
ccuuacgggcaugugaacu

SEQ ID NO: 161700 - RNA, 19 nt, Artificial Sequence
  Description of Artificial Sequence: Synthetic oligonucleotide
gaucgccgacauggcacaa

SEQ ID NO: 161701 - RNA, 19 nt, Artificial Sequence
  Description of Artificial Sequence: Synthetic oligonucleotide
ggcaaguuucuaagcgaua

SEQ ID NO: 161702 - RNA, 19 nt, Artificial Sequence
  Description of Artificial Sequence: Synthetic oligonucleotide
ccgacauggcacaaacccu

SEQ ID NO: 161703 - RNA, 19 nt, Artificial Sequence
  Description of Artificial Sequence: Synthetic oligonucleotide
cucggacacauuccuuauu

SEQ ID NO: 161704 - RNA, 19 nt, Artificial Sequence
  Description of Artificial Sequence: Synthetic oligonucleotide
cgccgacauggcacaaacc

SEQ ID NO: 161705 - RNA, 19 nt, Artificial Sequence
  Description of Artificial Sequence: Synthetic oligonucleotide
ccugaaacucagguggcgu

SEQ ID NO: 161706 - RNA, 19 nt, Artificial Sequence
  Description of Artificial Sequence: Synthetic oligonucleotide
gguagccaauaggcugauc

SEQ ID NO: 161707 - RNA, 19 nt, Artificial Sequence
  Description of Artificial Sequence: Synthetic oligonucleotide
acugcgccacgcagacaau

SEQ ID NO: 161708 - RNA, 19 nt, Artificial Sequence
  Description of Artificial Sequence: Synthetic oligonucleotide
ggcgcuuaaccaagccacu

SEQ ID NO: 161709 - RNA, 19 nt, Artificial Sequence
  Description of Artificial Sequence: Synthetic oligonucleotide
gcuaauccugaaggcaauu

SEQ ID NO: 161710 - RNA, 19 nt, Artificial Sequence
  Description of Artificial Sequence: Synthetic oligonucleotide
cugcgccacgcagacaauu

SEQ ID NO: 161711 - RNA, 19 nt, Artificial Sequence
  Description of Artificial Sequence: Synthetic oligonucleotide
gcgccacgcagacaauuuu

SEQ ID NO: 161712 - RNA, 19 nt, Artificial Sequence
  Description of Artificial Sequence: Synthetic oligonucleotide
ggacauccggagggaugaa

SEQ ID NO: 161713 - RNA, 19 nt, Artificial Sequence
  Description of Artificial Sequence: Synthetic oligonucleotide
cuugucgaugugggaccuu

SEQ ID NO: 161714 - RNA, 19 nt, Artificial Sequence
  Description of Artificial Sequence: Synthetic oligonucleotide
gcugccucucucgggguuu

SEQ ID NO: 161715 - RNA, 19 nt, Artificial Sequence
  Description of Artificial Sequence: Synthetic oligonucleotide
ggcucucgcaggggacugu

SEQ ID NO: 161716 - RNA, 19 nt, Artificial Sequence
  Description of Artificial Sequence: Synthetic oligonucleotide
ggcgucgguugagcauaau

SEQ ID NO: 161717 - RNA, 19 nt, Artificial Sequence
  Description of Artificial Sequence: Synthetic oligonucleotide
aaaacacacacacacacac

SEQ ID NO: 161718 - RNA, 19 nt, Artificial Sequence
  Description of Artificial Sequence: Synthetic oligonucleotide
aacacacacacacacacac

SEQ ID NO: 161719 - RNA, 19 nt, Artificial Sequence
  Description of Artificial Sequence: Synthetic oligonucleotide
aaauuguagaaccaggacu

SEQ ID NO: 161720 - RNA, 19 nt, Artificial Sequence
  Description of Artificial Sequence: Synthetic oligonucleotide
acggauuagacucaaacac

SEQ ID NO: 161721 - RNA, 19 nt, Artificial Sequence
  Description of Artificial Sequence: Synthetic oligonucleotide
aauacagagaacgauagcu

SEQ ID NO: 161722 - RNA, 19 nt, Artificial Sequence
  Description of Artificial Sequence: Synthetic oligonucleotide
aauguagcuacuguugccc

SEQ ID NO: 161723 - RNA, 19 nt, Artificial Sequence
  Description of Artificial Sequence: Synthetic oligonucleotide
aauuguagaaccaggacug

SEQ ID NO: 161724 - RNA, 19 nt, Artificial Sequence
  Description of Artificial Sequence: Synthetic oligonucleotide
agaauaauucacuugggca

SEQ ID NO: 161725 - RNA, 19 nt, Artificial Sequence
  Description of Artificial Sequence: Synthetic oligonucleotide
aagccgagagacuuaauuc

SEQ ID NO: 161726 - RNA, 19 nt, Artificial Sequence
  Description of Artificial Sequence: Synthetic oligonucleotide
aaacgcccgaagcugagcc

SEQ ID NO: 161727 - RNA, 19 nt, Artificial Sequence
  Description of Artificial Sequence: Synthetic oligonucleotide
aacucuucuucccaagccg

SEQ ID NO: 161728 - RNA, 19 nt, Artificial Sequence
  Description of Artificial Sequence: Synthetic oligonucleotide
ucgaguaguauauucaucu

SEQ ID NO: 161729 - RNA, 19 nt, Artificial Sequence
  Description of Artificial Sequence: Synthetic oligonucleotide
auuacguacagaaaagaac

SEQ ID NO: 161730 - RNA, 19 nt, Artificial Sequence
  Description of Artificial Sequence: Synthetic oligonucleotide
acuuacacccgccugcucc

SEQ ID NO: 161731 - RNA, 19 nt, Artificial Sequence
  Description of Artificial Sequence: Synthetic oligonucleotide
agccgagagacuuaauucc

SEQ ID NO: 161732 - RNA, 19 nt, Artificial Sequence
  Description of Artificial Sequence: Synthetic oligonucleotide
auaggagguauccucaggg

SEQ ID NO: 161733 - RNA, 19 nt, Artificial Sequence
  Description of Artificial Sequence: Synthetic oligonucleotide
ugugcggacaucacuacgg

SEQ ID NO: 161734 - RNA, 19 nt, Artificial Sequence
  Description of Artificial Sequence: Synthetic oligonucleotide
aacgaugccaugauagggc

SEQ ID NO: 161735 - RNA, 19 nt, Artificial Sequence
  Description of Artificial Sequence: Synthetic oligonucleotide
aucacuacggacauuggcc

SEQ ID NO: 161736 - RNA, 19 nt, Artificial Sequence
  Description of Artificial Sequence: Synthetic oligonucleotide
uuauaaaauuucccacucc

SEQ ID NO: 161737 - RNA, 19 nt, Artificial Sequence
  Description of Artificial Sequence: Synthetic oligonucleotide
aaucgguguugauucuugc

SEQ ID NO: 161738 - RNA, 19 nt, Artificial Sequence
  Description of Artificial Sequence: Synthetic oligonucleotide
agagacgggaaucccaucg

SEQ ID NO: 161739 - RNA, 19 nt, Artificial Sequence
  Description of Artificial Sequence: Synthetic oligonucleotide
uucggaauuaaccuccugu

SEQ ID NO: 161740 - RNA, 19 nt, Artificial Sequence
  Description of Artificial Sequence: Synthetic oligonucleotide
gaagcaucggccaauguag

SEQ ID NO: 161741 - RNA, 19 nt, Artificial Sequence
  Description of Artificial Sequence: Synthetic oligonucleotide
agaacgauagcuugcuguc

SEQ ID NO: 161742 - RNA, 19 nt, Artificial Sequence
  Description of Artificial Sequence: Synthetic oligonucleotide
aguguacguggcuacaugg

SEQ ID NO: 161743 - RNA, 19 nt, Artificial Sequence
  Description of Artificial Sequence: Synthetic oligonucleotide
gaaucuagcagaguucuag

SEQ ID NO: 161744 - RNA, 19 nt, Artificial Sequence
  Description of Artificial Sequence: Synthetic oligonucleotide
uguacuacggucugugaug

SEQ ID NO: 161745 - RNA, 19 nt, Artificial Sequence
  Description of Artificial Sequence: Synthetic oligonucleotide
cuagcagaguucuaggcgc

SEQ ID NO: 161746 - RNA, 19 nt, Artificial Sequence
  Description of Artificial Sequence: Synthetic oligonucleotide
ucuccaaaggugcugcucc

SEQ ID NO: 161747 - RNA, 19 nt, Artificial Sequence
  Description of Artificial Sequence: Synthetic oligonucleotide
uguccgauaggccauuagc

SEQ ID NO: 161748 - RNA, 19 nt, Artificial Sequence
  Description of Artificial Sequence: Synthetic oligonucleotide
acuugggcaacagugaccg

SEQ ID NO: 161749 - RNA, 19 nt, Artificial Sequence
  Description of Artificial Sequence: Synthetic oligonucleotide
aagaaguccggccacaauu

SEQ ID NO: 161750 - RNA, 19 nt, Artificial Sequence
  Description of Artificial Sequence: Synthetic oligonucleotide
acgggaaucccaucgauag

SEQ ID NO: 161751 - RNA, 19 nt, Artificial Sequence
  Description of Artificial Sequence: Synthetic oligonucleotide
aguucuaggcgccacuggg

SEQ ID NO: 161752 - RNA, 19 nt, Artificial Sequence
  Description of Artificial Sequence: Synthetic oligonucleotide
gaugccacugccugagugg

SEQ ID NO: 161753 - RNA, 19 nt, Artificial Sequence
  Description of Artificial Sequence: Synthetic oligonucleotide
cacacacacacacacaccc

SEQ ID NO: 161754 - RNA, 19 nt, Artificial Sequence
  Description of Artificial Sequence: Synthetic oligonucleotide
acagauaauuccaugcggg

SEQ ID NO: 161755 - RNA, 19 nt, Artificial Sequence
  Description of Artificial Sequence: Synthetic oligonucleotide
aaugcaugacccugguaug

SEQ ID NO: 161756 - RNA, 19 nt, Artificial Sequence
  Description of Artificial Sequence: Synthetic oligonucleotide
uacucgaguaguauauuca

SEQ ID NO: 161757 - RNA, 19 nt, Artificial Sequence
  Description of Artificial Sequence: Synthetic oligonucleotide
ggauagacggauuagacuc

SEQ ID NO: 161758 - RNA, 19 nt, Artificial Sequence
  Description of Artificial Sequence: Synthetic oligonucleotide
aacgauagcuugcuguccu

SEQ ID NO: 161759 - RNA, 19 nt, Artificial Sequence
  Description of Artificial Sequence: Synthetic oligonucleotide
cagaauaauucacuugggc

SEQ ID NO: 161760 - RNA, 19 nt, Artificial Sequence
  Description of Artificial Sequence: Synthetic oligonucleotide
uuccaugcggguuucauac

SEQ ID NO: 161761 - RNA, 19 nt, Artificial Sequence
  Description of Artificial Sequence: Synthetic oligonucleotide
acucaaacacgugaggacg

SEQ ID NO: 161762 - RNA, 19 nt, Artificial Sequence
  Description of Artificial Sequence: Synthetic oligonucleotide
uguuuguguuugcugaucu

SEQ ID NO: 161763 - RNA, 19 nt, Artificial Sequence
  Description of Artificial Sequence: Synthetic oligonucleotide
aagaccgauccauccacuc

SEQ ID NO: 161764 - RNA, 19 nt, Artificial Sequence
  Description of Artificial Sequence: Synthetic oligonucleotide
aauuagccacuggagacuc

SEQ ID NO: 161765 - RNA, 19 nt, Artificial Sequence
  Description of Artificial Sequence: Synthetic oligonucleotide
aaaucugaaguagacuaga

SEQ ID NO: 161766 - RNA, 19 nt, Artificial Sequence
  Description of Artificial Sequence: Synthetic oligonucleotide
uuuaaagccccggacagcu

SEQ ID NO: 161767 - RNA, 19 nt, Artificial Sequence
  Description of Artificial Sequence: Synthetic oligonucleotide
gauuuggcuugucaagaag

SEQ ID NO: 161768 - RNA, 19 nt, Artificial Sequence
  Description of Artificial Sequence: Synthetic oligonucleotide
caccagauagguuugcagc

SEQ ID NO: 161769 - RNA, 19 nt, Artificial Sequence
  Description of Artificial Sequence: Synthetic oligonucleotide
uggugaaucuagcagaguu

SEQ ID NO: 161770 - RNA, 19 nt, Artificial Sequence
  Description of Artificial Sequence: Synthetic oligonucleotide
uguccgagucaucauagga

SEQ ID NO: 161771 - RNA, 19 nt, Artificial Sequence
  Description of Artificial Sequence: Synthetic oligonucleotide
ggaacacggaccuuuaaag

SEQ ID NO: 161772 - RNA, 19 nt, Artificial Sequence
  Description of Artificial Sequence: Synthetic oligonucleotide
uuuaacuaugguccguaau

SEQ ID NO: 161773 - RNA, 19 nt, Artificial Sequence
  Description of Artificial Sequence: Synthetic oligonucleotide
aggugauuccaaaaucugc

SEQ ID NO: 161774 - RNA, 19 nt, Artificial Sequence
  Description of Artificial Sequence: Synthetic oligonucleotide
caaauuguagaaccaggac

SEQ ID NO: 161775 - RNA, 19 nt, Artificial Sequence
  Description of Artificial Sequence: Synthetic oligonucleotide
cacacacacacacacacac

SEQ ID NO: 161776 - RNA, 19 nt, Artificial Sequence
  Description of Artificial Sequence: Synthetic oligonucleotide
uugauugcaccucugcaaa

SEQ ID NO: 161777 - RNA, 19 nt, Artificial Sequence
  Description of Artificial Sequence: Synthetic oligonucleotide
auauucaucuaauguggcu

SEQ ID NO: 161778 - RNA, 19 nt, Artificial Sequence
  Description of Artificial Sequence: Synthetic oligonucleotide
uguacguggcuacauggac

SEQ ID NO: 161779 - RNA, 19 nt, Artificial Sequence
  Description of Artificial Sequence: Synthetic oligonucleotide
uguggaauacuugagcauc

SEQ ID NO: 161780 - RNA, 19 nt, Artificial Sequence
  Description of Artificial Sequence: Synthetic oligonucleotide
gguaugaaugaaaaccagg

SEQ ID NO: 161781 - RNA, 19 nt, Artificial Sequence
  Description of Artificial Sequence: Synthetic oligonucleotide
caguucugaagcaucggcc

SEQ ID NO: 161782 - RNA, 19 nt, Artificial Sequence
  Description of Artificial Sequence: Synthetic oligonucleotide
caaggaguggagauuuggc

SEQ ID NO: 161783 - RNA, 19 nt, Artificial Sequence
  Description of Artificial Sequence: Synthetic oligonucleotide
uucugugcggacaucacua

SEQ ID NO: 161784 - RNA, 19 nt, Artificial Sequence
  Description of Artificial Sequence: Synthetic oligonucleotide
uaucacacuugagggaggg

SEQ ID NO: 161785 - RNA, 19 nt, Artificial Sequence
  Description of Artificial Sequence: Synthetic oligonucleotide
aaacaccacauuaaauaca

SEQ ID NO: 161786 - RNA, 19 nt, Artificial Sequence
  Description of Artificial Sequence: Synthetic oligonucleotide
agguuacuucaccacaaag

SEQ ID NO: 161787 - RNA, 19 nt, Artificial Sequence
  Description of Artificial Sequence: Synthetic oligonucleotide
uuggauaguuucauauaaa

SEQ ID NO: 161788 - RNA, 19 nt, Artificial Sequence
  Description of Artificial Sequence: Synthetic oligonucleotide
auguggcccaguuuuguuc

SEQ ID NO: 161789 - RNA, 19 nt, Artificial Sequence
  Description of Artificial Sequence: Synthetic oligonucleotide
caucacuacggacauuggc

SEQ ID NO: 161790 - RNA, 19 nt, Artificial Sequence
  Description of Artificial Sequence: Synthetic oligonucleotide
uacuuucgcaccacguucu

SEQ ID NO: 161791 - RNA, 19 nt, Artificial Sequence
  Description of Artificial Sequence: Synthetic oligonucleotide
guaccuaccacccacugaa

SEQ ID NO: 161792 - RNA, 19 nt, Artificial Sequence
  Description of Artificial Sequence: Synthetic oligonucleotide
caauguagcuacuguugcc

SEQ ID NO: 161793 - RNA, 19 nt, Artificial Sequence
  Description of Artificial Sequence: Synthetic oligonucleotide
uguaccuaccacccacuga

SEQ ID NO: 161794 - RNA, 19 nt, Artificial Sequence
  Description of Artificial Sequence: Synthetic oligonucleotide
uugagcaucucugggauaa

SEQ ID NO: 161795 - RNA, 19 nt, Artificial Sequence
  Description of Artificial Sequence: Synthetic oligonucleotide
ucgaugguagccauguguu

SEQ ID NO: 161796 - RNA, 19 nt, Artificial Sequence
  Description of Artificial Sequence: Synthetic oligonucleotide
ucggaguuucccaagcaaa

SEQ ID NO: 161797 - RNA, 19 nt, Artificial Sequence
  Description of Artificial Sequence: Synthetic oligonucleotide
caaagaccgauccauccac

SEQ ID NO: 161798 - RNA, 19 nt, Artificial Sequence
  Description of Artificial Sequence: Synthetic oligonucleotide
aaaucgguguugauucuug

SEQ ID NO: 161799 - RNA, 19 nt, Artificial Sequence
  Description of Artificial Sequence: Synthetic oligonucleotide
aaggucuguacuacggucu

SEQ ID NO: 161800 - RNA, 19 nt, Artificial Sequence
  Description of Artificial Sequence: Synthetic oligonucleotide
cagaagaacugaacgcgag

SEQ ID NO: 161801 - RNA, 19 nt, Artificial Sequence
  Description of Artificial Sequence: Synthetic oligonucleotide
agugaaaucgguguugauu

SEQ ID NO: 161802 - RNA, 19 nt, Artificial Sequence
  Description of Artificial Sequence: Synthetic oligonucleotide
gagaacgauagcuugcugu

SEQ ID NO: 161803 - RNA, 19 nt, Artificial Sequence
  Description of Artificial Sequence: Synthetic oligonucleotide
cauaggagguauccucagg

SEQ ID NO: 161804 - RNA, 19 nt, Artificial Sequence
  Description of Artificial Sequence: Synthetic oligonucleotide
guacuacggucugugaugg

SEQ ID NO: 161805 - RNA, 19 nt, Artificial Sequence
  Description of Artificial Sequence: Synthetic oligonucleotide
uauugggagguuacuucac

SEQ ID NO: 161806 - RNA, 19 nt, Artificial Sequence
  Description of Artificial Sequence: Synthetic oligonucleotide
uaugguccguaaugccugg

SEQ ID NO: 161807 - RNA, 19 nt, Artificial Sequence
  Description of Artificial Sequence: Synthetic oligonucleotide
uccccguugccacagcagc

SEQ ID NO: 161808 - RNA, 19 nt, Artificial Sequence
  Description of Artificial Sequence: Synthetic oligonucleotide
guccguaaugccugggucc

SEQ ID NO: 161809 - RNA, 19 nt, Artificial Sequence
  Description of Artificial Sequence: Synthetic oligonucleotide
uccgauaggccauuagcau

SEQ ID NO: 161810 - RNA, 19 nt, Artificial Sequence
  Description of Artificial Sequence: Synthetic oligonucleotide
gauaauuccaugcggguuu

SEQ ID NO: 161811 - RNA, 19 nt, Artificial Sequence
  Description of Artificial Sequence: Synthetic oligonucleotide
uuucccaagcaaacguguc

SEQ ID NO: 161812 - RNA, 19 nt, Artificial Sequence
  Description of Artificial Sequence: Synthetic oligonucleotide
aacuauugggagguuacuu

SEQ ID NO: 161813 - RNA, 19 nt, Artificial Sequence
  Description of Artificial Sequence: Synthetic oligonucleotide
gccagaagaacugaacgcg

SEQ ID NO: 161814 - RNA, 19 nt, Artificial Sequence
  Description of Artificial Sequence: Synthetic oligonucleotide
uacguacagaaaagaacau

SEQ ID NO: 161815 - RNA, 19 nt, Artificial Sequence
  Description of Artificial Sequence: Synthetic oligonucleotide
aggcccuuaacacuccugu

SEQ ID NO: 161816 - RNA, 19 nt, Artificial Sequence
  Description of Artificial Sequence: Synthetic oligonucleotide
cuacggucugugaugguac

SEQ ID NO: 161817 - RNA, 19 nt, Artificial Sequence
  Description of Artificial Sequence: Synthetic oligonucleotide
aucgguguugauucuugcu

SEQ ID NO: 161818 - RNA, 19 nt, Artificial Sequence
  Description of Artificial Sequence: Synthetic oligonucleotide
cuuacacccgccugcuccc

SEQ ID NO: 161819 - RNA, 19 nt, Artificial Sequence
  Description of Artificial Sequence: Synthetic oligonucleotide
caucggccaauguagcuac

SEQ ID NO: 161820 - RNA, 19 nt, Artificial Sequence
  Description of Artificial Sequence: Synthetic oligonucleotide
augggcuauacugugugug

SEQ ID NO: 161821 - RNA, 19 nt, Artificial Sequence
  Description of Artificial Sequence: Synthetic oligonucleotide
uccggauagacggauuaga

SEQ ID NO: 161822 - RNA, 19 nt, Artificial Sequence
  Description of Artificial Sequence: Synthetic oligonucleotide
cucgaguaguauauucauc

SEQ ID NO: 161823 - RNA, 19 nt, Artificial Sequence
  Description of Artificial Sequence: Synthetic oligonucleotide
agauuuggcuugucaagaa

SEQ ID NO: 161824 - RNA, 19 nt, Artificial Sequence
  Description of Artificial Sequence: Synthetic oligonucleotide
acacacacacacacacacc

SEQ ID NO: 161825 - RNA, 19 nt, Artificial Sequence
  Description of Artificial Sequence: Synthetic oligonucleotide
ggguccaugaaacucucug

SEQ ID NO: 161826 - RNA, 19 nt, Artificial Sequence
  Description of Artificial Sequence: Synthetic oligonucleotide
ucugggauaaacgcccgaa

SEQ ID NO: 161827 - RNA, 19 nt, Artificial Sequence
  Description of Artificial Sequence: Synthetic oligonucleotide
uaauguggcucggaguuuc

SEQ ID NO: 161828 - RNA, 19 nt, Artificial Sequence
  Description of Artificial Sequence: Synthetic oligonucleotide
gaaguccggccacaauuug

SEQ ID NO: 161829 - RNA, 19 nt, Artificial Sequence
  Description of Artificial Sequence: Synthetic oligonucleotide
uuaaccuccuguggcgcag

SEQ ID NO: 161830 - RNA, 19 nt, Artificial Sequence
  Description of Artificial Sequence: Synthetic oligonucleotide
aaacacacacacacacaca

SEQ ID NO: 161831 - RNA, 19 nt, Artificial Sequence
  Description of Artificial Sequence: Synthetic oligonucleotide
acgaugccaugauagggcu

SEQ ID NO: 161832 - RNA, 19 nt, Artificial Sequence
  Description of Artificial Sequence: Synthetic oligonucleotide
ggaguuucccaagcaaacg

SEQ ID NO: 161833 - RNA, 19 nt, Artificial Sequence
  Description of Artificial Sequence: Synthetic oligonucleotide
uuuuccccgaccuguggaa

SEQ ID NO: 161834 - RNA, 19 nt, Artificial Sequence
  Description of Artificial Sequence: Synthetic oligonucleotide
acacacacacacacacccc

SEQ ID NO: 161835 - RNA, 19 nt, Artificial Sequence
  Description of Artificial Sequence: Synthetic oligonucleotide
guacguggcuacauggacc

SEQ ID NO: 161836 - RNA, 19 nt, Artificial Sequence
  Description of Artificial Sequence: Synthetic oligonucleotide
ucauuucaccucccuguaa

SEQ ID NO: 161837 - RNA, 19 nt, Artificial Sequence
  Description of Artificial Sequence: Synthetic oligonucleotide
ucuguacuacggucuguga

SEQ ID NO: 161838 - RNA, 19 nt, Artificial Sequence
  Description of Artificial Sequence: Synthetic oligonucleotide
agaaaacgaugccaugaua

SEQ ID NO: 161839 - RNA, 19 nt, Artificial Sequence
  Description of Artificial Sequence: Synthetic oligonucleotide
cugugcggacaucacuacg

SEQ ID NO: 161840 - RNA, 19 nt, Artificial Sequence
  Description of Artificial Sequence: Synthetic oligonucleotide
ggauaaacgcccgaagcug

SEQ ID NO: 161841 - RNA, 19 nt, Artificial Sequence
  Description of Artificial Sequence: Synthetic oligonucleotide
cccauuacguacagaaaag

SEQ ID NO: 161842 - RNA, 19 nt, Artificial Sequence
  Description of Artificial Sequence: Synthetic oligonucleotide
uuaacacuccuguucccuu

SEQ ID NO: 161843 - RNA, 19 nt, Artificial Sequence
  Description of Artificial Sequence: Synthetic oligonucleotide
ugauugcaccucugcaaac

SEQ ID NO: 161844 - RNA, 19 nt, Artificial Sequence
  Description of Artificial Sequence: Synthetic oligonucleotide
gacuuaauuccauuugauu

SEQ ID NO: 161845 - RNA, 19 nt, Artificial Sequence
  Description of Artificial Sequence: Synthetic oligonucleotide
ugguuuuccccgaccugug

SEQ ID NO: 161846 - RNA, 19 nt, Artificial Sequence
  Description of Artificial Sequence: Synthetic oligonucleotide
gucuguacuacggucugug

SEQ ID NO: 161847 - RNA, 19 nt, Artificial Sequence
  Description of Artificial Sequence: Synthetic oligonucleotide
ucaucuaauguggcucgga

SEQ ID NO: 161848 - RNA, 19 nt, Artificial Sequence
  Description of Artificial Sequence: Synthetic oligonucleotide
agguuugggucacuccgug

SEQ ID NO: 161849 - RNA, 19 nt, Artificial Sequence
  Description of Artificial Sequence: Synthetic oligonucleotide
gauagacggauuagacuca

SEQ ID NO: 161850 - RNA, 19 nt, Artificial Sequence
  Description of Artificial Sequence: Synthetic oligonucleotide
cccuuaacacuccuguucc

SEQ ID NO: 161851 - RNA, 19 nt, Artificial Sequence
  Description of Artificial Sequence: Synthetic oligonucleotide
cacggaccuuuaaagcccc

SEQ ID NO: 161852 - RNA, 19 nt, Artificial Sequence
  Description of Artificial Sequence: Synthetic oligonucleotide
uuccggauagacggauuag

SEQ ID NO: 161853 - RNA, 19 nt, Artificial Sequence
  Description of Artificial Sequence: Synthetic oligonucleotide
agagaacgauagcuugcug

SEQ ID NO: 161854 - RNA, 19 nt, Artificial Sequence
  Description of Artificial Sequence: Synthetic oligonucleotide
cggauuagacucaaacacg

SEQ ID NO: 161855 - RNA, 19 nt, Artificial Sequence
  Description of Artificial Sequence: Synthetic oligonucleotide
gcuacuguugccccuguac

SEQ ID NO: 161856 - RNA, 19 nt, Artificial Sequence
  Description of Artificial Sequence: Synthetic oligonucleotide
ucggccaauguagcuacug

SEQ ID NO: 161857 - RNA, 19 nt, Artificial Sequence
  Description of Artificial Sequence: Synthetic oligonucleotide
aaagaccgauccauccacu

SEQ ID NO: 161858 - RNA, 19 nt, Artificial Sequence
  Description of Artificial Sequence: Synthetic oligonucleotide
guuuuccccgaccugugga

SEQ ID NO: 161859 - RNA, 19 nt, Artificial Sequence
  Description of Artificial Sequence: Synthetic oligonucleotide
auggucgacugcgcugucc

SEQ ID NO: 161860 - RNA, 19 nt, Artificial Sequence
  Description of Artificial Sequence: Synthetic oligonucleotide
ucucuuccggauagacgga

SEQ ID NO: 161861 - RNA, 19 nt, Artificial Sequence
  Description of Artificial Sequence: Synthetic oligonucleotide
aacgcccgaagcugagccu

SEQ ID NO: 161862 - RNA, 19 nt, Artificial Sequence
  Description of Artificial Sequence: Synthetic oligonucleotide
agcgacacggugccaucag

SEQ ID NO: 161863 - RNA, 19 nt, Artificial Sequence
  Description of Artificial Sequence: Synthetic oligonucleotide
gccaauguagcuacuguug

SEQ ID NO: 161864 - RNA, 19 nt, Artificial Sequence
  Description of Artificial Sequence: Synthetic oligonucleotide
gugaggacguuuccguuuc

SEQ ID NO: 161865 - RNA, 19 nt, Artificial Sequence
  Description of Artificial Sequence: Synthetic oligonucleotide
uacggucugugaugguaca

SEQ ID NO: 161866 - RNA, 19 nt, Artificial Sequence
  Description of Artificial Sequence: Synthetic oligonucleotide
ggcaguucggaauuaaccu

SEQ ID NO: 161867 - RNA, 19 nt, Artificial Sequence
  Description of Artificial Sequence: Synthetic oligonucleotide
gacugcgcuguccgauagg

SEQ ID NO: 161868 - RNA, 19 nt, Artificial Sequence
  Description of Artificial Sequence: Synthetic oligonucleotide
auuccaugcggguuucaua

SEQ ID NO: 161869 - RNA, 19 nt, Artificial Sequence
  Description of Artificial Sequence: Synthetic oligonucleotide
ugcucaguguacguggcua

SEQ ID NO: 161870 - RNA, 19 nt, Artificial Sequence
  Description of Artificial Sequence: Synthetic oligonucleotide
ugccugaguuugucaguag

SEQ ID NO: 161871 - RNA, 19 nt, Artificial Sequence
  Description of Artificial Sequence: Synthetic oligonucleotide
acccacugaacuggguggg

SEQ ID NO: 161872 - RNA, 19 nt, Artificial Sequence
  Description of Artificial Sequence: Synthetic oligonucleotide
caggugaauuagccacugg

SEQ ID NO: 161873 - RNA, 19 nt, Artificial Sequence
  Description of Artificial Sequence: Synthetic oligonucleotide
ucacagugacaaagaccga

SEQ ID NO: 161874 - RNA, 19 nt, Artificial Sequence
  Description of Artificial Sequence: Synthetic oligonucleotide
auaaacgcccgaagcugag

SEQ ID NO: 161875 - RNA, 19 nt, Artificial Sequence
  Description of Artificial Sequence: Synthetic oligonucleotide
ucaguguacguggcuacau

SEQ ID NO: 161876 - RNA, 19 nt, Artificial Sequence
  Description of Artificial Sequence: Synthetic oligonucleotide
ccauguaccuaccacccac

SEQ ID NO: 161877 - RNA, 19 nt, Artificial Sequence
  Description of Artificial Sequence: Synthetic oligonucleotide
cacuccguguuccuccaug

SEQ ID NO: 161878 - RNA, 19 nt, Artificial Sequence
  Description of Artificial Sequence: Synthetic oligonucleotide
gugacaaagaccgauccau

SEQ ID NO: 161879 - RNA, 19 nt, Artificial Sequence
  Description of Artificial Sequence: Synthetic oligonucleotide
uccaugcggguuucauaca

SEQ ID NO: 161880 - RNA, 19 nt, Artificial Sequence
  Description of Artificial Sequence: Synthetic oligonucleotide
aacgugucugcugucucuu

SEQ ID NO: 161881 - RNA, 19 nt, Artificial Sequence
  Description of Artificial Sequence: Synthetic oligonucleotide
ugaguggccucugaugcuu

SEQ ID NO: 161882 - RNA, 19 nt, Artificial Sequence
  Description of Artificial Sequence: Synthetic oligonucleotide
augcaugacccugguauga

SEQ ID NO: 161883 - RNA, 19 nt, Artificial Sequence
  Description of Artificial Sequence: Synthetic oligonucleotide
uggcccaugggaugucuuc

SEQ ID NO: 161884 - RNA, 19 nt, Artificial Sequence
  Description of Artificial Sequence: Synthetic oligonucleotide
ccggauagacggauuagac

SEQ ID NO: 161885 - RNA, 19 nt, Artificial Sequence
  Description of Artificial Sequence: Synthetic oligonucleotide
agaaguccggccacaauuu

SEQ ID NO: 161886 - RNA, 19 nt, Artificial Sequence
  Description of Artificial Sequence: Synthetic oligonucleotide
ugcaugacccugguaugaa

SEQ ID NO: 161887 - RNA, 19 nt, Artificial Sequence
  Description of Artificial Sequence: Synthetic oligonucleotide
ugcugcgguuuccccagac

SEQ ID NO: 161888 - RNA, 19 nt, Artificial Sequence
  Description of Artificial Sequence: Synthetic oligonucleotide
cggcaguucggaauuaacc

SEQ ID NO: 161889 - RNA, 19 nt, Artificial Sequence
  Description of Artificial Sequence: Synthetic oligonucleotide
cugcacuuacacccgccug

SEQ ID NO: 161890 - RNA, 19 nt, Artificial Sequence
  Description of Artificial Sequence: Synthetic oligonucleotide
cauuucaccucccuguaau

SEQ ID NO: 161891 - RNA, 19 nt, Artificial Sequence
  Description of Artificial Sequence: Synthetic oligonucleotide
acaucacuacggacauugg

SEQ ID NO: 161892 - RNA, 19 nt, Artificial Sequence
  Description of Artificial Sequence: Synthetic oligonucleotide
ggauuagacucaaacacgu

SEQ ID NO: 161893 - RNA, 19 nt, Artificial Sequence
  Description of Artificial Sequence: Synthetic oligonucleotide
ccgauaggccauuagcauc

SEQ ID NO: 161894 - RNA, 19 nt, Artificial Sequence
  Description of Artificial Sequence: Synthetic oligonucleotide
cucggaguuucccaagcaa

SEQ ID NO: 161895 - RNA, 19 nt, Artificial Sequence
  Description of Artificial Sequence: Synthetic oligonucleotide
ggcuugucaagaagucagg

SEQ ID NO: 161896 - RNA, 19 nt, Artificial Sequence
  Description of Artificial Sequence: Synthetic oligonucleotide
acuacggacauuggcccau

SEQ ID NO: 161897 - RNA, 19 nt, Artificial Sequence
  Description of Artificial Sequence: Synthetic oligonucleotide
gaacugaacgcgagggucu

SEQ ID NO: 161898 - RNA, 19 nt, Artificial Sequence
  Description of Artificial Sequence: Synthetic oligonucleotide
caagccgagagacuuaauu

SEQ ID NO: 161899 - RNA, 19 nt, Artificial Sequence
  Description of Artificial Sequence: Synthetic oligonucleotide
ccguccauggucgacugcg

SEQ ID NO: 161900 - RNA, 19 nt, Artificial Sequence
  Description of Artificial Sequence: Synthetic oligonucleotide
ugagcgacacggugccauc

SEQ ID NO: 161901 - RNA, 19 nt, Artificial Sequence
  Description of Artificial Sequence: Synthetic oligonucleotide
uccccgaccuguggaauac

SEQ ID NO: 161902 - RNA, 19 nt, Artificial Sequence
  Description of Artificial Sequence: Synthetic oligonucleotide
uggccguccauggucgacu

SEQ ID NO: 161903 - RNA, 19 nt, Artificial Sequence
  Description of Artificial Sequence: Synthetic oligonucleotide
cuuaacacuccuguucccu

SEQ ID NO: 161904 - RNA, 19 nt, Artificial Sequence
  Description of Artificial Sequence: Synthetic oligonucleotide
ucaaacacgugaggacguu

SEQ ID NO: 161905 - RNA, 19 nt, Artificial Sequence
  Description of Artificial Sequence: Synthetic oligonucleotide
ucgacugcgcuguccgaua

SEQ ID NO: 161906 - RNA, 19 nt, Artificial Sequence
  Description of Artificial Sequence: Synthetic oligonucleotide
aggauugcugaaggucugu

SEQ ID NO: 161907 - RNA, 19 nt, Artificial Sequence
  Description of Artificial Sequence: Synthetic oligonucleotide
guguacguggcuacaugga

SEQ ID NO: 161908 - RNA, 19 nt, Artificial Sequence
  Description of Artificial Sequence: Synthetic oligonucleotide
uggcuacauggaccugcug

SEQ ID NO: 161909 - RNA, 19 nt, Artificial Sequence
  Description of Artificial Sequence: Synthetic oligonucleotide
acacacacacacacacaca

SEQ ID NO: 161910 - RNA, 19 nt, Artificial Sequence
  Description of Artificial Sequence: Synthetic oligonucleotide
uggaccgcaccguguccug

SEQ ID NO: 161911 - RNA, 19 nt, Artificial Sequence
  Description of Artificial Sequence: Synthetic oligonucleotide
ugggucacuccguguuccu

SEQ ID NO: 161912 - RNA, 19 nt, Artificial Sequence
  Description of Artificial Sequence: Synthetic oligonucleotide
cucaaacacgugaggacgu

SEQ ID NO: 161913 - RNA, 19 nt, Artificial Sequence
  Description of Artificial Sequence: Synthetic oligonucleotide
augguccguaaugccuggg

SEQ ID NO: 161914 - RNA, 19 nt, Artificial Sequence
  Description of Artificial Sequence: Synthetic oligonucleotide
uuuccccgaccuguggaau

SEQ ID NO: 161915 - RNA, 19 nt, Artificial Sequence
  Description of Artificial Sequence: Synthetic oligonucleotide
gacgggaaucccaucgaua

SEQ ID NO: 161916 - RNA, 19 nt, Artificial Sequence
  Description of Artificial Sequence: Synthetic oligonucleotide
uucgcaccacguucuccaa

SEQ ID NO: 161917 - RNA, 19 nt, Artificial Sequence
  Description of Artificial Sequence: Synthetic oligonucleotide
cacgugaggacguuuccgu

SEQ ID NO: 161918 - RNA, 19 nt, Artificial Sequence
  Description of Artificial Sequence: Synthetic oligonucleotide
cggaguuucccaagcaaac

SEQ ID NO: 161919 - RNA, 19 nt, Artificial Sequence
  Description of Artificial Sequence: Synthetic oligonucleotide
acgugaggacguuuccguu

SEQ ID NO: 161920 - RNA, 19 nt, Artificial Sequence
  Description of Artificial Sequence: Synthetic oligonucleotide
ggagguuacuucaccacaa

SEQ ID NO: 161921 - RNA, 19 nt, Artificial Sequence
  Description of Artificial Sequence: Synthetic oligonucleotide
cacuacggacauuggccca

SEQ ID NO: 161922 - RNA, 19 nt, Artificial Sequence
  Description of Artificial Sequence: Synthetic oligonucleotide
gcgguuuccccagacaaga

SEQ ID NO: 161923 - RNA, 19 nt, Artificial Sequence
  Description of Artificial Sequence: Synthetic oligonucleotide
ccagaagaacugaacgcga

SEQ ID NO: 161924 - RNA, 19 nt, Artificial Sequence
  Description of Artificial Sequence: Synthetic oligonucleotide
cagagacgggaaucccauc

SEQ ID NO: 161925 - RNA, 19 nt, Artificial Sequence
  Description of Artificial Sequence: Synthetic oligonucleotide
ccgaccuguggaauacuug

SEQ ID NO: 161926 - RNA, 19 nt, Artificial Sequence
  Description of Artificial Sequence: Synthetic oligonucleotide
acgauagcuugcuguccua

SEQ ID NO: 161927 - RNA, 19 nt, Artificial Sequence
  Description of Artificial Sequence: Synthetic oligonucleotide
gaccgugguuggcaguucu

SEQ ID NO: 161928 - RNA, 19 nt, Artificial Sequence
  Description of Artificial Sequence: Synthetic oligonucleotide
ugagugccauggugacagu

SEQ ID NO: 161929 - RNA, 19 nt, Artificial Sequence
  Description of Artificial Sequence: Synthetic oligonucleotide
ccauuacguacagaaaaga

SEQ ID NO: 161930 - RNA, 19 nt, Artificial Sequence
  Description of Artificial Sequence: Synthetic oligonucleotide
cagagaacgauagcuugcu

SEQ ID NO: 161931 - RNA, 19 nt, Artificial Sequence
  Description of Artificial Sequence: Synthetic oligonucleotide
gagcgacacggugccauca

SEQ ID NO: 161932 - RNA, 19 nt, Artificial Sequence
  Description of Artificial Sequence: Synthetic oligonucleotide
gcuucgaugguagccaugu

SEQ ID NO: 161933 - RNA, 19 nt, Artificial Sequence
  Description of Artificial Sequence: Synthetic oligonucleotide
cucaguguacguggcuaca

SEQ ID NO: 161934 - RNA, 19 nt, Artificial Sequence
  Description of Artificial Sequence: Synthetic oligonucleotide
gccgagagacuuaauucca

SEQ ID NO: 161935 - RNA, 19 nt, Artificial Sequence
  Description of Artificial Sequence: Synthetic oligonucleotide
cucugggauaaacgcccga

SEQ ID NO: 161936 - RNA, 19 nt, Artificial Sequence
  Description of Artificial Sequence: Synthetic oligonucleotide
acggucugugaugguacaa

SEQ ID NO: 161937 - RNA, 19 nt, Artificial Sequence
  Description of Artificial Sequence: Synthetic oligonucleotide
acggaccuuuaaagccccg

SEQ ID NO: 161938 - RNA, 19 nt, Artificial Sequence
  Description of Artificial Sequence: Synthetic oligonucleotide
agccccggacagcuucaca

SEQ ID NO: 161939 - RNA, 19 nt, Artificial Sequence
  Description of Artificial Sequence: Synthetic oligonucleotide
uggagggcguggucaccuc

SEQ ID NO: 161940 - RNA, 19 nt, Artificial Sequence
  Description of Artificial Sequence: Synthetic oligonucleotide
cuacggacauuggcccaug

SEQ ID NO: 161941 - RNA, 19 nt, Artificial Sequence
  Description of Artificial Sequence: Synthetic oligonucleotide
uccgacggcugcugcgguu

SEQ ID NO: 161942 - RNA, 19 nt, Artificial Sequence
  Description of Artificial Sequence: Synthetic oligonucleotide
gaugagcgacacggugcca

SEQ ID NO: 161943 - RNA, 19 nt, Artificial Sequence
  Description of Artificial Sequence: Synthetic oligonucleotide
cacuuacacccgccugcuc

SEQ ID NO: 161944 - RNA, 19 nt, Artificial Sequence
  Description of Artificial Sequence: Synthetic oligonucleotide
cuggccguccauggucgac

SEQ ID NO: 161945 - RNA, 19 nt, Artificial Sequence
  Description of Artificial Sequence: Synthetic oligonucleotide
cggucugugaugguacaag

SEQ ID NO: 161946 - RNA, 19 nt, Artificial Sequence
  Description of Artificial Sequence: Synthetic oligonucleotide
gcaucggccaauguagcua

SEQ ID NO: 161947 - RNA, 19 nt, Artificial Sequence
  Description of Artificial Sequence: Synthetic oligonucleotide
uggacuccguaagcacuuu

SEQ ID NO: 161948 - RNA, 19 nt, Artificial Sequence
  Description of Artificial Sequence: Synthetic oligonucleotide
cagauagguuugcagcuuu

SEQ ID NO: 161949 - RNA, 19 nt, Artificial Sequence
  Description of Artificial Sequence: Synthetic oligonucleotide
ggaccgcaccguguccugg

SEQ ID NO: 161950 - RNA, 19 nt, Artificial Sequence
  Description of Artificial Sequence: Synthetic oligonucleotide
ucccucccauguugcuuau

SEQ ID NO: 161951 - RNA, 19 nt, Artificial Sequence
  Description of Artificial Sequence: Synthetic oligonucleotide
cagaguucuaggcgccacu

SEQ ID NO: 161952 - RNA, 19 nt, Artificial Sequence
  Description of Artificial Sequence: Synthetic oligonucleotide
cauggucgacugcgcuguc

SEQ ID NO: 161953 - RNA, 19 nt, Artificial Sequence
  Description of Artificial Sequence: Synthetic oligonucleotide
gcggcaguucggaauuaac

SEQ ID NO: 161954 - RNA, 19 nt, Artificial Sequence
  Description of Artificial Sequence: Synthetic oligonucleotide
ggcuucgaugguagccaug

SEQ ID NO: 161955 - RNA, 19 nt, Artificial Sequence
  Description of Artificial Sequence: Synthetic oligonucleotide
gguuugggucacuccgugu

SEQ ID NO: 161956 - RNA, 19 nt, Artificial Sequence
  Description of Artificial Sequence: Synthetic oligonucleotide
cccagacaagacuaucugu

SEQ ID NO: 161957 - RNA, 19 nt, Artificial Sequence
  Description of Artificial Sequence: Synthetic oligonucleotide
aucggccaauguagcuacu

SEQ ID NO: 161958 - RNA, 19 nt, Artificial Sequence
  Description of Artificial Sequence: Synthetic oligonucleotide
cggauagacggauuagacu

SEQ ID NO: 161959 - RNA, 19 nt, Artificial Sequence
  Description of Artificial Sequence: Synthetic oligonucleotide
cgacugcgcuguccgauag

SEQ ID NO: 161960 - RNA, 19 nt, Artificial Sequence
  Description of Artificial Sequence: Synthetic oligonucleotide
acguggcuacauggaccug

SEQ ID NO: 161961 - RNA, 19 nt, Artificial Sequence
  Description of Artificial Sequence: Synthetic oligonucleotide
cgaugccaugauagggcug

SEQ ID NO: 161962 - RNA, 19 nt, Artificial Sequence
  Description of Artificial Sequence: Synthetic oligonucleotide
cucuuccggauagacggau

SEQ ID NO: 161963 - RNA, 19 nt, Artificial Sequence
  Description of Artificial Sequence: Synthetic oligonucleotide
caaacacgugaggacguuu

SEQ ID NO: 161964 - RNA, 19 nt, Artificial Sequence
  Description of Artificial Sequence: Synthetic oligonucleotide
ggagggcguggucaccucu

SEQ ID NO: 161965 - RNA, 19 nt, Artificial Sequence
  Description of Artificial Sequence: Synthetic oligonucleotide
ccccguugccacagcagca

SEQ ID NO: 161966 - RNA, 19 nt, Artificial Sequence
  Description of Artificial Sequence: Synthetic oligonucleotide
ggcggcaguucggaauuaa

SEQ ID NO: 161967 - RNA, 19 nt, Artificial Sequence
  Description of Artificial Sequence: Synthetic oligonucleotide
ccaagcaaacgugucugcu

SEQ ID NO: 161968 - RNA, 19 nt, Artificial Sequence
  Description of Artificial Sequence: Synthetic oligonucleotide
cgagucaucauaggaggua

SEQ ID NO: 161969 - RNA, 19 nt, Artificial Sequence
  Description of Artificial Sequence: Synthetic oligonucleotide
cccaagccgagagacuuaa

SEQ ID NO: 161970 - RNA, 19 nt, Artificial Sequence
  Description of Artificial Sequence: Synthetic oligonucleotide
ccauggucgacugcgcugu

SEQ ID NO: 161971 - RNA, 19 nt, Artificial Sequence
  Description of Artificial Sequence: Synthetic oligonucleotide
cuugggcaacagugaccgu

SEQ ID NO: 161972 - RNA, 19 nt, Artificial Sequence
  Description of Artificial Sequence: Synthetic oligonucleotide
ggacuccguaagcacuuuu

SEQ ID NO: 161973 - RNA, 19 nt, Artificial Sequence
  Description of Artificial Sequence: Synthetic oligonucleotide
ggcccuuaacacuccuguu

SEQ ID NO: 161974 - RNA, 19 nt, Artificial Sequence
  Description of Artificial Sequence: Synthetic oligonucleotide
ggucuguacuacggucugu

SEQ ID NO: 161975 - RNA, 19 nt, Artificial Sequence
  Description of Artificial Sequence: Synthetic oligonucleotide
gggcuucgaugguagccau

SEQ ID NO: 161976 - RNA, 19 nt, Artificial Sequence
  Description of Artificial Sequence: Synthetic oligonucleotide
cggacaucacuacggacau

SEQ ID NO: 161977 - RNA, 19 nt, Artificial Sequence
  Description of Artificial Sequence: Synthetic oligonucleotide
ccucauccgcugccgugga

SEQ ID NO: 161978 - RNA, 19 nt, Artificial Sequence
  Description of Artificial Sequence: Synthetic oligonucleotide
cccgaccuguggaauacuu

SEQ ID NO: 161979 - RNA, 19 nt, Artificial Sequence
  Description of Artificial Sequence: Synthetic oligonucleotide
gggcugcgugucacuguuc

SEQ ID NO: 161980 - RNA, 19 nt, Artificial Sequence
  Description of Artificial Sequence: Synthetic oligonucleotide
gcgcaggggcgugcucugc

SEQ ID NO: 161981 - RNA, 19 nt, Artificial Sequence
  Description of Artificial Sequence: Synthetic oligonucleotide
gcgcuguccgauaggccau

SEQ ID NO: 161982 - RNA, 19 nt, Artificial Sequence
  Description of Artificial Sequence: Synthetic oligonucleotide
cgggaaucccaucgauagu

SEQ ID NO: 161983 - RNA, 19 nt, Artificial Sequence
  Description of Artificial Sequence: Synthetic oligonucleotide
gcgccacugggaggcagcu

SEQ ID NO: 161984 - RNA, 19 nt, Artificial Sequence
  Description of Artificial Sequence: Synthetic oligonucleotide
ccaagccgagagacuuaau

SEQ ID NO: 161985 - RNA, 19 nt, Artificial Sequence
  Description of Artificial Sequence: Synthetic oligonucleotide
ccacggcaugggcuucgau

SEQ ID NO: 161986 - RNA, 19 nt, Artificial Sequence
  Description of Artificial Sequence: Synthetic oligonucleotide
ccccgaccuguggaauacu

SEQ ID NO: 161987 - RNA, 19 nt, Artificial Sequence
  Description of Artificial Sequence: Synthetic oligonucleotide
ugguuaauaacuuugaccg

SEQ ID NO: 161988 - RNA, 19 nt, Artificial Sequence
  Description of Artificial Sequence: Synthetic oligonucleotide
aauuguaggaagcagcguc

SEQ ID NO: 161989 - RNA, 19 nt, Artificial Sequence
  Description of Artificial Sequence: Synthetic oligonucleotide
uuaaggauagauaaaauuc

SEQ ID NO: 161990 - RNA, 19 nt, Artificial Sequence
  Description of Artificial Sequence: Synthetic oligonucleotide
uuugugaucuuuauugacg

SEQ ID NO: 161991 - RNA, 19 nt, Artificial Sequence
  Description of Artificial Sequence: Synthetic oligonucleotide
ugaauauccaacugcaacg

SEQ ID NO: 161992 - RNA, 19 nt, Artificial Sequence
  Description of Artificial Sequence: Synthetic oligonucleotide
uggcauauuaguaaacucg

SEQ ID NO: 161993 - RNA, 19 nt, Artificial Sequence
  Description of Artificial Sequence: Synthetic oligonucleotide
uccuuuauugaucagcccg

SEQ ID NO: 161994 - RNA, 19 nt, Artificial Sequence
  Description of Artificial Sequence: Synthetic oligonucleotide
uguacaauuagggacacgg

SEQ ID NO: 161995 - RNA, 19 nt, Artificial Sequence
  Description of Artificial Sequence: Synthetic oligonucleotide
uguuugaacgaaaucagcc

SEQ ID NO: 161996 - RNA, 19 nt, Artificial Sequence
  Description of Artificial Sequence: Synthetic oligonucleotide
aguaaacucguucauuagc

SEQ ID NO: 161997 - RNA, 19 nt, Artificial Sequence
  Description of Artificial Sequence: Synthetic oligonucleotide
aauaacuuugaccguuugg

SEQ ID NO: 161998 - RNA, 19 nt, Artificial Sequence
  Description of Artificial Sequence: Synthetic oligonucleotide
acauccguaguauaguggc

SEQ ID NO: 161999 - RNA, 19 nt, Artificial Sequence
  Description of Artificial Sequence: Synthetic oligonucleotide
uguauguggguucaaaggc

SEQ ID NO: 162000 - RNA, 19 nt, Artificial Sequence
  Description of Artificial Sequence: Synthetic oligonucleotide
aauguauguggguucaaag

SEQ ID NO: 162001 - RNA, 19 nt, Artificial Sequence
  Description of Artificial Sequence: Synthetic oligonucleotide
aaaacggcugcaaaguggc

SEQ ID NO: 162002 - RNA, 19 nt, Artificial Sequence
  Description of Artificial Sequence: Synthetic oligonucleotide
uuauugaucagcccgcgag

SEQ ID NO: 162003 - RNA, 19 nt, Artificial Sequence
  Description of Artificial Sequence: Synthetic oligonucleotide
uuauguauuaggguuacag

SEQ ID NO: 162004 - RNA, 19 nt, Artificial Sequence
  Description of Artificial Sequence: Synthetic oligonucleotide
augaaugcgauuugaaauc

SEQ ID NO: 162005 - RNA, 19 nt, Artificial Sequence
  Description of Artificial Sequence: Synthetic oligonucleotide
aaaccuaacuuugugaucu

SEQ ID NO: 162006 - RNA, 19 nt, Artificial Sequence
  Description of Artificial Sequence: Synthetic oligonucleotide
aagaauaaacucaggugcc

SEQ ID NO: 162007 - RNA, 19 nt, Artificial Sequence
  Description of Artificial Sequence: Synthetic oligonucleotide
uguguuuccgucuaggaac

SEQ ID NO: 162008 - RNA, 19 nt, Artificial Sequence
  Description of Artificial Sequence: Synthetic oligonucleotide
guaaguugggaauuguagg

SEQ ID NO: 162009 - RNA, 19 nt, Artificial Sequence
  Description of Artificial Sequence: Synthetic oligonucleotide
ucaugaaauagacuagccc

SEQ ID NO: 162010 - RNA, 19 nt, Artificial Sequence
  Description of Artificial Sequence: Synthetic oligonucleotide
uugugaucuuuauugacgg

SEQ ID NO: 162011 - RNA, 19 nt, Artificial Sequence
  Description of Artificial Sequence: Synthetic oligonucleotide
uuuaaggauagauaaaauu

SEQ ID NO: 162012 - RNA, 19 nt, Artificial Sequence
  Description of Artificial Sequence: Synthetic oligonucleotide
auauuaguaaacucguuca

SEQ ID NO: 162013 - RNA, 19 nt, Artificial Sequence
  Description of Artificial Sequence: Synthetic oligonucleotide
uuugaacgaaaucagccug

SEQ ID NO: 162014 - RNA, 19 nt, Artificial Sequence
  Description of Artificial Sequence: Synthetic oligonucleotide
guaacuguaguacccaggg

SEQ ID NO: 162015 - RNA, 19 nt, Artificial Sequence
  Description of Artificial Sequence: Synthetic oligonucleotide
aacgcuaccccauuagcag

SEQ ID NO: 162016 - RNA, 19 nt, Artificial Sequence
  Description of Artificial Sequence: Synthetic oligonucleotide
uacaauuagggacacggca

SEQ ID NO: 162017 - RNA, 19 nt, Artificial Sequence
  Description of Artificial Sequence: Synthetic oligonucleotide
uuuacgcucccuuugacca

SEQ ID NO: 162018 - RNA, 19 nt, Artificial Sequence
  Description of Artificial Sequence: Synthetic oligonucleotide
caugaaauagacuagccca

SEQ ID NO: 162019 - RNA, 19 nt, Artificial Sequence
  Description of Artificial Sequence: Synthetic oligonucleotide
ucugcgacugacuucaacc

SEQ ID NO: 162020 - RNA, 19 nt, Artificial Sequence
  Description of Artificial Sequence: Synthetic oligonucleotide
acaacuuuauacuccuagg

SEQ ID NO: 162021 - RNA, 19 nt, Artificial Sequence
  Description of Artificial Sequence: Synthetic oligonucleotide
ucaaucaaguggcuucugg

SEQ ID NO: 162022 - RNA, 19 nt, Artificial Sequence
  Description of Artificial Sequence: Synthetic oligonucleotide
ugcugaacuggcauggccg

SEQ ID NO: 162023 - RNA, 19 nt, Artificial Sequence
  Description of Artificial Sequence: Synthetic oligonucleotide
aaucacuacacuguguaca

SEQ ID NO: 162024 - RNA, 19 nt, Artificial Sequence
  Description of Artificial Sequence: Synthetic oligonucleotide
aggaaugaacuucaucagg

SEQ ID NO: 162025 - RNA, 19 nt, Artificial Sequence
  Description of Artificial Sequence: Synthetic oligonucleotide
ugcguaucuugucagacug

SEQ ID NO: 162026 - RNA, 19 nt, Artificial Sequence
  Description of Artificial Sequence: Synthetic oligonucleotide
agccuauagguucuguggc

SEQ ID NO: 162027 - RNA, 19 nt, Artificial Sequence
  Description of Artificial Sequence: Synthetic oligonucleotide
uggcuaaugggaauggccc

SEQ ID NO: 162028 - RNA, 19 nt, Artificial Sequence
  Description of Artificial Sequence: Synthetic oligonucleotide
uauauccuuuugaaguaag

SEQ ID NO: 162029 - RNA, 19 nt, Artificial Sequence
  Description of Artificial Sequence: Synthetic oligonucleotide
uauugaucagcccgcgagg

SEQ ID NO: 162030 - RNA, 19 nt, Artificial Sequence
  Description of Artificial Sequence: Synthetic oligonucleotide
acuuuauacuccuaggaau

SEQ ID NO: 162031 - RNA, 19 nt, Artificial Sequence
  Description of Artificial Sequence: Synthetic oligonucleotide
uuauugacgggugacaacu

SEQ ID NO: 162032 - RNA, 19 nt, Artificial Sequence
  Description of Artificial Sequence: Synthetic oligonucleotide
aaacucguucauuagccga

SEQ ID NO: 162033 - RNA, 19 nt, Artificial Sequence
  Description of Artificial Sequence: Synthetic oligonucleotide
uaaacucguucauuagccg

SEQ ID NO: 162034 - RNA, 19 nt, Artificial Sequence
  Description of Artificial Sequence: Synthetic oligonucleotide
uggucaucaauucgcagcc

SEQ ID NO: 162035 - RNA, 19 nt, Artificial Sequence
  Description of Artificial Sequence: Synthetic oligonucleotide
acgugcaaggccuuuguac

SEQ ID NO: 162036 - RNA, 19 nt, Artificial Sequence
  Description of Artificial Sequence: Synthetic oligonucleotide
aagcgccuuucauucaagc

SEQ ID NO: 162037 - RNA, 19 nt, Artificial Sequence
  Description of Artificial Sequence: Synthetic oligonucleotide
uauguauuaggguuacagu

SEQ ID NO: 162038 - RNA, 19 nt, Artificial Sequence
  Description of Artificial Sequence: Synthetic oligonucleotide
aauguguuuccgucuagga

SEQ ID NO: 162039 - RNA, 19 nt, Artificial Sequence
  Description of Artificial Sequence: Synthetic oligonucleotide
auuaucucacaauuguuaa

SEQ ID NO: 162040 - RNA, 19 nt, Artificial Sequence
  Description of Artificial Sequence: Synthetic oligonucleotide
acuccuaggaaucacuaca

SEQ ID NO: 162041 - RNA, 19 nt, Artificial Sequence
  Description of Artificial Sequence: Synthetic oligonucleotide
guaaacucguucauuagcc

SEQ ID NO: 162042 - RNA, 19 nt, Artificial Sequence
  Description of Artificial Sequence: Synthetic oligonucleotide
agagccacuagaguggugg

SEQ ID NO: 162043 - RNA, 19 nt, Artificial Sequence
  Description of Artificial Sequence: Synthetic oligonucleotide
uguaaauguauguggguuc

SEQ ID NO: 162044 - RNA, 19 nt, Artificial Sequence
  Description of Artificial Sequence: Synthetic oligonucleotide
uuuuacgcucccuuugacc

SEQ ID NO: 162045 - RNA, 19 nt, Artificial Sequence
  Description of Artificial Sequence: Synthetic oligonucleotide
uagaguggugggaaguuag

SEQ ID NO: 162046 - RNA, 19 nt, Artificial Sequence
  Description of Artificial Sequence: Synthetic oligonucleotide
caaucacccaccucuauag

SEQ ID NO: 162047 - RNA, 19 nt, Artificial Sequence
  Description of Artificial Sequence: Synthetic oligonucleotide
auuaauguagcaccaguuu

SEQ ID NO: 162048 - RNA, 19 nt, Artificial Sequence
  Description of Artificial Sequence: Synthetic oligonucleotide
uauggcuacaggauccucu

SEQ ID NO: 162049 - RNA, 19 nt, Artificial Sequence
  Description of Artificial Sequence: Synthetic oligonucleotide
uauuggugccaacguaggg

SEQ ID NO: 162050 - RNA, 19 nt, Artificial Sequence
  Description of Artificial Sequence: Synthetic oligonucleotide
ugcgauuugaaaucuuuuc

SEQ ID NO: 162051 - RNA, 19 nt, Artificial Sequence
  Description of Artificial Sequence: Synthetic oligonucleotide
uucgugacugcugaacugg

SEQ ID NO: 162052 - RNA, 19 nt, Artificial Sequence
  Description of Artificial Sequence: Synthetic oligonucleotide
aguugugcaaccaagaaua

SEQ ID NO: 162053 - RNA, 19 nt, Artificial Sequence
  Description of Artificial Sequence: Synthetic oligonucleotide
ugcaacacgaggacaggag

SEQ ID NO: 162054 - RNA, 19 nt, Artificial Sequence
  Description of Artificial Sequence: Synthetic oligonucleotide
uacgucagcaguuauuauc

SEQ ID NO: 162055 - RNA, 19 nt, Artificial Sequence
  Description of Artificial Sequence: Synthetic oligonucleotide
uguagguagugguucucgg

SEQ ID NO: 162056 - RNA, 19 nt, Artificial Sequence
  Description of Artificial Sequence: Synthetic oligonucleotide
aauauccaacugcaacgug

SEQ ID NO: 162057 - RNA, 19 nt, Artificial Sequence
  Description of Artificial Sequence: Synthetic oligonucleotide
uauacgucagcaguuauua

SEQ ID NO: 162058 - RNA, 19 nt, Artificial Sequence
  Description of Artificial Sequence: Synthetic oligonucleotide
cacuaugcaaucagacugg

SEQ ID NO: 162059 - RNA, 19 nt, Artificial Sequence
  Description of Artificial Sequence: Synthetic oligonucleotide
aucaugggcguugacgugc

SEQ ID NO: 162060 - RNA, 19 nt, Artificial Sequence
  Description of Artificial Sequence: Synthetic oligonucleotide
uguucgugacugcugaacu

SEQ ID NO: 162061 - RNA, 19 nt, Artificial Sequence
  Description of Artificial Sequence: Synthetic oligonucleotide
uauuaguaaacucguucau

SEQ ID NO: 162062 - RNA, 19 nt, Artificial Sequence
  Description of Artificial Sequence: Synthetic oligonucleotide
uuuccgucuaggaaccagc

SEQ ID NO: 162063 - RNA, 19 nt, Artificial Sequence
  Description of Artificial Sequence: Synthetic oligonucleotide
ggugguguaaccuuggaca

SEQ ID NO: 162064 - RNA, 19 nt, Artificial Sequence
  Description of Artificial Sequence: Synthetic oligonucleotide
caggugauacaucggaggg

SEQ ID NO: 162065 - RNA, 19 nt, Artificial Sequence
  Description of Artificial Sequence: Synthetic oligonucleotide
ucaucaggugauacaucgg

SEQ ID NO: 162066 - RNA, 19 nt, Artificial Sequence
  Description of Artificial Sequence: Synthetic oligonucleotide
ugcaacgcuaccccauuag

SEQ ID NO: 162067 - RNA, 19 nt, Artificial Sequence
  Description of Artificial Sequence: Synthetic oligonucleotide
caacacgaggacaggaggg

SEQ ID NO: 162068 - RNA, 19 nt, Artificial Sequence
  Description of Artificial Sequence: Synthetic oligonucleotide
cuuagaaggcuaucugcag

SEQ ID NO: 162069 - RNA, 19 nt, Artificial Sequence
  Description of Artificial Sequence: Synthetic oligonucleotide
augacacugguuuauguau

SEQ ID NO: 162070 - RNA, 19 nt, Artificial Sequence
  Description of Artificial Sequence: Synthetic oligonucleotide
uggacugugcguaucuugu

SEQ ID NO: 162071 - RNA, 19 nt, Artificial Sequence
  Description of Artificial Sequence: Synthetic oligonucleotide
uuccgucuaggaaccagcg

SEQ ID NO: 162072 - RNA, 19 nt, Artificial Sequence
  Description of Artificial Sequence: Synthetic oligonucleotide
auacuguagguagugguuc

SEQ ID NO: 162073 - RNA, 19 nt, Artificial Sequence
  Description of Artificial Sequence: Synthetic oligonucleotide
cuauguuagagcuguuuuc

SEQ ID NO: 162074 - RNA, 19 nt, Artificial Sequence
  Description of Artificial Sequence: Synthetic oligonucleotide
auccguaguauaguggccg

SEQ ID NO: 162075 - RNA, 19 nt, Artificial Sequence
  Description of Artificial Sequence: Synthetic oligonucleotide
acggacgucuuauuccugg

SEQ ID NO: 162076 - RNA, 19 nt, Artificial Sequence
  Description of Artificial Sequence: Synthetic oligonucleotide
ggaauuguaggaagcagcg

SEQ ID NO: 162077 - RNA, 19 nt, Artificial Sequence
  Description of Artificial Sequence: Synthetic oligonucleotide
agccauuaagcccaaucug

SEQ ID NO: 162078 - RNA, 19 nt, Artificial Sequence
  Description of Artificial Sequence: Synthetic oligonucleotide
gacgucugcaccccaaaug

SEQ ID NO: 162079 - RNA, 19 nt, Artificial Sequence
  Description of Artificial Sequence: Synthetic oligonucleotide
gaaaaugccggugauaggu

SEQ ID NO: 162080 - RNA, 19 nt, Artificial Sequence
  Description of Artificial Sequence: Synthetic oligonucleotide
uucucggcaaaacuaucac

SEQ ID NO: 162081 - RNA, 19 nt, Artificial Sequence
  Description of Artificial Sequence: Synthetic oligonucleotide
aguuauuaucucacaauug

SEQ ID NO: 162082 - RNA, 19 nt, Artificial Sequence
  Description of Artificial Sequence: Synthetic oligonucleotide
ucguucauuagccgaacaa

SEQ ID NO: 162083 - RNA, 19 nt, Artificial Sequence
  Description of Artificial Sequence: Synthetic oligonucleotide
gucaucaauucgcagccag

SEQ ID NO: 162084 - RNA, 19 nt, Artificial Sequence
  Description of Artificial Sequence: Synthetic oligonucleotide
acgucugcaccccaaaugu

SEQ ID NO: 162085 - RNA, 19 nt, Artificial Sequence
  Description of Artificial Sequence: Synthetic oligonucleotide
caucaauucgcagccagcc

SEQ ID NO: 162086 - RNA, 19 nt, Artificial Sequence
  Description of Artificial Sequence: Synthetic oligonucleotide
agugguucucggcaaaacu

SEQ ID NO: 162087 - RNA, 19 nt, Artificial Sequence
  Description of Artificial Sequence: Synthetic oligonucleotide
ucaucaauucgcagccagc

SEQ ID NO: 162088 - RNA, 19 nt, Artificial Sequence
  Description of Artificial Sequence: Synthetic oligonucleotide
gugacggacgucuuauucc

SEQ ID NO: 162089 - RNA, 19 nt, Artificial Sequence
  Description of Artificial Sequence: Synthetic oligonucleotide
ugaaauagacuagcccaag

SEQ ID NO: 162090 - RNA, 19 nt, Artificial Sequence
  Description of Artificial Sequence: Synthetic oligonucleotide
acacggcuacagcaggucc

SEQ ID NO: 162091 - RNA, 19 nt, Artificial Sequence
  Description of Artificial Sequence: Synthetic oligonucleotide
aggaguuuacacagcagac

SEQ ID NO: 162092 - RNA, 19 nt, Artificial Sequence
  Description of Artificial Sequence: Synthetic oligonucleotide
uggucaacggagcuguagu

SEQ ID NO: 162093 - RNA, 19 nt, Artificial Sequence
  Description of Artificial Sequence: Synthetic oligonucleotide
uuugcgucacagcuguccu

SEQ ID NO: 162094 - RNA, 19 nt, Artificial Sequence
  Description of Artificial Sequence: Synthetic oligonucleotide
uuaauaacuuugaccguuu

SEQ ID NO: 162095 - RNA, 19 nt, Artificial Sequence
  Description of Artificial Sequence: Synthetic oligonucleotide
uuuauugaucagcccgcga

SEQ ID NO: 162096 - RNA, 19 nt, Artificial Sequence
  Description of Artificial Sequence: Synthetic oligonucleotide
uguccuuagaaggcuaucu

SEQ ID NO: 162097 - RNA, 19 nt, Artificial Sequence
  Description of Artificial Sequence: Synthetic oligonucleotide
aaugcgauuugaaaucuuu

SEQ ID NO: 162098 - RNA, 19 nt, Artificial Sequence
  Description of Artificial Sequence: Synthetic oligonucleotide
aaggauagauaaaauucau

SEQ ID NO: 162099 - RNA, 19 nt, Artificial Sequence
  Description of Artificial Sequence: Synthetic oligonucleotide
uucagaagcgccuuucauu

SEQ ID NO: 162100 - RNA, 19 nt, Artificial Sequence
  Description of Artificial Sequence: Synthetic oligonucleotide
gauacaucggagggcaagc

SEQ ID NO: 162101 - RNA, 19 nt, Artificial Sequence
  Description of Artificial Sequence: Synthetic oligonucleotide
ugaucagcccgcgagguug

SEQ ID NO: 162102 - RNA, 19 nt, Artificial Sequence
  Description of Artificial Sequence: Synthetic oligonucleotide
acgcuaccccauuagcagc

SEQ ID NO: 162103 - RNA, 19 nt, Artificial Sequence
  Description of Artificial Sequence: Synthetic oligonucleotide
ugacggacgucuuauuccu

SEQ ID NO: 162104 - RNA, 19 nt, Artificial Sequence
  Description of Artificial Sequence: Synthetic oligonucleotide
aauacuguagguagugguu

SEQ ID NO: 162105 - RNA, 19 nt, Artificial Sequence
  Description of Artificial Sequence: Synthetic oligonucleotide
gugguguaaccuuggacag

SEQ ID NO: 162106 - RNA, 19 nt, Artificial Sequence
  Description of Artificial Sequence: Synthetic oligonucleotide
acagccuauagguucugug

SEQ ID NO: 162107 - RNA, 19 nt, Artificial Sequence
  Description of Artificial Sequence: Synthetic oligonucleotide
ugaaugcgauuugaaaucu

SEQ ID NO: 162108 - RNA, 19 nt, Artificial Sequence
  Description of Artificial Sequence: Synthetic oligonucleotide
uggugcgggacuuauucca

SEQ ID NO: 162109 - RNA, 19 nt, Artificial Sequence
  Description of Artificial Sequence: Synthetic oligonucleotide
ccacuaugcaaucagacug

SEQ ID NO: 162110 - RNA, 19 nt, Artificial Sequence
  Description of Artificial Sequence: Synthetic oligonucleotide
auuggugccaacguagggu

SEQ ID NO: 162111 - RNA, 19 nt, Artificial Sequence
  Description of Artificial Sequence: Synthetic oligonucleotide
uggcauuaauguagcacca

SEQ ID NO: 162112 - RNA, 19 nt, Artificial Sequence
  Description of Artificial Sequence: Synthetic oligonucleotide
aaauguauguggguucaaa

SEQ ID NO: 162113 - RNA, 19 nt, Artificial Sequence
  Description of Artificial Sequence: Synthetic oligonucleotide
auagacuagcccaagacuu

SEQ ID NO: 162114 - RNA, 19 nt, Artificial Sequence
  Description of Artificial Sequence: Synthetic oligonucleotide
uauagccugacgucugcac

SEQ ID NO: 162115 - RNA, 19 nt, Artificial Sequence
  Description of Artificial Sequence: Synthetic oligonucleotide
uacaucggagggcaagcca

SEQ ID NO: 162116 - RNA, 19 nt, Artificial Sequence
  Description of Artificial Sequence: Synthetic oligonucleotide
ucggcaaaacuaucacuug

SEQ ID NO: 162117 - RNA, 19 nt, Artificial Sequence
  Description of Artificial Sequence: Synthetic oligonucleotide
guaguauaguggccgcccg

SEQ ID NO: 162118 - RNA, 19 nt, Artificial Sequence
  Description of Artificial Sequence: Synthetic oligonucleotide
uaguaaguugggaauugua

SEQ ID NO: 162119 - RNA, 19 nt, Artificial Sequence
  Description of Artificial Sequence: Synthetic oligonucleotide
cuccuaggaaucacuacac

SEQ ID NO: 162120 - RNA, 19 nt, Artificial Sequence
  Description of Artificial Sequence: Synthetic oligonucleotide
aacguaggguuugcgucac

SEQ ID NO: 162121 - RNA, 19 nt, Artificial Sequence
  Description of Artificial Sequence: Synthetic oligonucleotide
uagguguuugaacgaaauc

SEQ ID NO: 162122 - RNA, 19 nt, Artificial Sequence
  Description of Artificial Sequence: Synthetic oligonucleotide
cucgacuugauaacuguca

SEQ ID NO: 162123 - RNA, 19 nt, Artificial Sequence
  Description of Artificial Sequence: Synthetic oligonucleotide
auacaucggagggcaagcc

SEQ ID NO: 162124 - RNA, 19 nt, Artificial Sequence
  Description of Artificial Sequence: Synthetic oligonucleotide
gcaaccaagaauaaacuca

SEQ ID NO: 162125 - RNA, 19 nt, Artificial Sequence
  Description of Artificial Sequence: Synthetic oligonucleotide
ugaccguuuggucaucaau

SEQ ID NO: 162126 - RNA, 19 nt, Artificial Sequence
  Description of Artificial Sequence: Synthetic oligonucleotide
uuauauccuuuugaaguaa

SEQ ID NO: 162127 - RNA, 19 nt, Artificial Sequence
  Description of Artificial Sequence: Synthetic oligonucleotide
aaaaugccggugauaggug

SEQ ID NO: 162128 - RNA, 19 nt, Artificial Sequence
  Description of Artificial Sequence: Synthetic oligonucleotide
cuuuauugaucagcccgcg

SEQ ID NO: 162129 - RNA, 19 nt, Artificial Sequence
  Description of Artificial Sequence: Synthetic oligonucleotide
guuugcgucacagcugucc

SEQ ID NO: 162130 - RNA, 19 nt, Artificial Sequence
  Description of Artificial Sequence: Synthetic oligonucleotide
acgucagcaguuauuaucu

SEQ ID NO: 162131 - RNA, 19 nt, Artificial Sequence
  Description of Artificial Sequence: Synthetic oligonucleotide
uguauacgucagcaguuau

SEQ ID NO: 162132 - RNA, 19 nt, Artificial Sequence
  Description of Artificial Sequence: Synthetic oligonucleotide
auaacugucaggagucugu

SEQ ID NO: 162133 - RNA, 19 nt, Artificial Sequence
  Description of Artificial Sequence: Synthetic oligonucleotide
uccuaggaaucacuacacu

SEQ ID NO: 162134 - RNA, 19 nt, Artificial Sequence
  Description of Artificial Sequence: Synthetic oligonucleotide
caucaggugauacaucgga

SEQ ID NO: 162135 - RNA, 19 nt, Artificial Sequence
  Description of Artificial Sequence: Synthetic oligonucleotide
cagugugcaacgcuacccc

SEQ ID NO: 162136 - RNA, 19 nt, Artificial Sequence
  Description of Artificial Sequence: Synthetic oligonucleotide
cuagguauuccucggcguc

SEQ ID NO: 162137 - RNA, 19 nt, Artificial Sequence
  Description of Artificial Sequence: Synthetic oligonucleotide
uugacgggugacaacuuua

SEQ ID NO: 162138 - RNA, 19 nt, Artificial Sequence
  Description of Artificial Sequence: Synthetic oligonucleotide
auuagccgaacaaagcuau

SEQ ID NO: 162139 - RNA, 19 nt, Artificial Sequence
  Description of Artificial Sequence: Synthetic oligonucleotide
agacucucuugccaccaag

SEQ ID NO: 162140 - RNA, 19 nt, Artificial Sequence
  Description of Artificial Sequence: Synthetic oligonucleotide
acaauuagggacacggcau

SEQ ID NO: 162141 - RNA, 19 nt, Artificial Sequence
  Description of Artificial Sequence: Synthetic oligonucleotide
acaaucacccaccucuaua

SEQ ID NO: 162142 - RNA, 19 nt, Artificial Sequence
  Description of Artificial Sequence: Synthetic oligonucleotide
agcgacauguuuuguguau

SEQ ID NO: 162143 - RNA, 19 nt, Artificial Sequence
  Description of Artificial Sequence: Synthetic oligonucleotide
aguauaguggccgcccgug

SEQ ID NO: 162144 - RNA, 19 nt, Artificial Sequence
  Description of Artificial Sequence: Synthetic oligonucleotide
caauuagggacacggcauc

SEQ ID NO: 162145 - RNA, 19 nt, Artificial Sequence
  Description of Artificial Sequence: Synthetic oligonucleotide
cauccguaguauaguggcc

SEQ ID NO: 162146 - RNA, 19 nt, Artificial Sequence
  Description of Artificial Sequence: Synthetic oligonucleotide
uccguaguauaguggccgc

SEQ ID NO: 162147 - RNA, 19 nt, Artificial Sequence
  Description of Artificial Sequence: Synthetic oligonucleotide
ccgaaaaugccggugauag

SEQ ID NO: 162148 - RNA, 19 nt, Artificial Sequence
  Description of Artificial Sequence: Synthetic oligonucleotide
aguuaguaaguugggaauu

SEQ ID NO: 162149 - RNA, 19 nt, Artificial Sequence
  Description of Artificial Sequence: Synthetic oligonucleotide
uggggaaccccucuccauc

SEQ ID NO: 162150 - RNA, 19 nt, Artificial Sequence
  Description of Artificial Sequence: Synthetic oligonucleotide
uuggugccaacguaggguu

SEQ ID NO: 162151 - RNA, 19 nt, Artificial Sequence
  Description of Artificial Sequence: Synthetic oligonucleotide
uaucaugggcguugacgug

SEQ ID NO: 162152 - RNA, 19 nt, Artificial Sequence
  Description of Artificial Sequence: Synthetic oligonucleotide
caacgcuaccccauuagca

SEQ ID NO: 162153 - RNA, 19 nt, Artificial Sequence
  Description of Artificial Sequence: Synthetic oligonucleotide
agcuaucuaucaugggcgu

SEQ ID NO: 162154 - RNA, 19 nt, Artificial Sequence
  Description of Artificial Sequence: Synthetic oligonucleotide
uccgucuaggaaccagcga

SEQ ID NO: 162155 - RNA, 19 nt, Artificial Sequence
  Description of Artificial Sequence: Synthetic oligonucleotide
gguguaaccuuggacagac

SEQ ID NO: 162156 - RNA, 19 nt, Artificial Sequence
  Description of Artificial Sequence: Synthetic oligonucleotide
auugaucagcccgcgaggu

SEQ ID NO: 162157 - RNA, 19 nt, Artificial Sequence
  Description of Artificial Sequence: Synthetic oligonucleotide
uguguacaauuagggacac

SEQ ID NO: 162158 - RNA, 19 nt, Artificial Sequence
  Description of Artificial Sequence: Synthetic oligonucleotide
ucgcccaaggauucaagua

SEQ ID NO: 162159 - RNA, 19 nt, Artificial Sequence
  Description of Artificial Sequence: Synthetic oligonucleotide
guaggguuugcgucacagc

SEQ ID NO: 162160 - RNA, 19 nt, Artificial Sequence
  Description of Artificial Sequence: Synthetic oligonucleotide
gagccacuagagugguggg

SEQ ID NO: 162161 - RNA, 19 nt, Artificial Sequence
  Description of Artificial Sequence: Synthetic oligonucleotide
guuuccgucuaggaaccag

SEQ ID NO: 162162 - RNA, 19 nt, Artificial Sequence
  Description of Artificial Sequence: Synthetic oligonucleotide
auugacgggugacaacuuu

SEQ ID NO: 162163 - RNA, 19 nt, Artificial Sequence
  Description of Artificial Sequence: Synthetic oligonucleotide
augaaauagacuagcccaa

SEQ ID NO: 162164 - RNA, 19 nt, Artificial Sequence
  Description of Artificial Sequence: Synthetic oligonucleotide
acacccacgcuguucguga

SEQ ID NO: 162165 - RNA, 19 nt, Artificial Sequence
  Description of Artificial Sequence: Synthetic oligonucleotide
guucucggcaaaacuauca

SEQ ID NO: 162166 - RNA, 19 nt, Artificial Sequence
  Description of Artificial Sequence: Synthetic oligonucleotide
ggugauacaucggagggca

SEQ ID NO: 162167 - RNA, 19 nt, Artificial Sequence
  Description of Artificial Sequence: Synthetic oligonucleotide
gaauauccaacugcaacgu

SEQ ID NO: 162168 - RNA, 19 nt, Artificial Sequence
  Description of Artificial Sequence: Synthetic oligonucleotide
ccgucuaggaaccagcgac

SEQ ID NO: 162169 - RNA, 19 nt, Artificial Sequence
  Description of Artificial Sequence: Synthetic oligonucleotide
auauccuuuugaaguaaga

SEQ ID NO: 162170 - RNA, 19 nt, Artificial Sequence
  Description of Artificial Sequence: Synthetic oligonucleotide
guuaauaacuuugaccguu

SEQ ID NO: 162171 - RNA, 19 nt, Artificial Sequence
  Description of Artificial Sequence: Synthetic oligonucleotide
uacgcucccuuugaccaag

SEQ ID NO: 162172 - RNA, 19 nt, Artificial Sequence
  Description of Artificial Sequence: Synthetic oligonucleotide
guaguauuggugccaacgu

SEQ ID NO: 162173 - RNA, 19 nt, Artificial Sequence
  Description of Artificial Sequence: Synthetic oligonucleotide
guacaauuagggacacggc

SEQ ID NO: 162174 - RNA, 19 nt, Artificial Sequence
  Description of Artificial Sequence: Synthetic oligonucleotide
uuagccgaacaaagcuauc

SEQ ID NO: 162175 - RNA, 19 nt, Artificial Sequence
  Description of Artificial Sequence: Synthetic oligonucleotide
ucaugggcguugacgugca

SEQ ID NO: 162176 - RNA, 19 nt, Artificial Sequence
  Description of Artificial Sequence: Synthetic oligonucleotide
ggcguugacgugcaaggcc

SEQ ID NO: 162177 - RNA, 19 nt, Artificial Sequence
  Description of Artificial Sequence: Synthetic oligonucleotide
cugcaaucuuuauggcuac

SEQ ID NO: 162178 - RNA, 19 nt, Artificial Sequence
  Description of Artificial Sequence: Synthetic oligonucleotide
caacguaggguuugcguca

SEQ ID NO: 162179 - RNA, 19 nt, Artificial Sequence
  Description of Artificial Sequence: Synthetic oligonucleotide
uccugucggcccuuuucag

SEQ ID NO: 162180 - RNA, 19 nt, Artificial Sequence
  Description of Artificial Sequence: Synthetic oligonucleotide
guguuuccgucuaggaacc

SEQ ID NO: 162181 - RNA, 19 nt, Artificial Sequence
  Description of Artificial Sequence: Synthetic oligonucleotide
ccaacguaggguuugcguc

SEQ ID NO: 162182 - RNA, 19 nt, Artificial Sequence
  Description of Artificial Sequence: Synthetic oligonucleotide
gcuggugcgggacuuauuc

SEQ ID NO: 162183 - RNA, 19 nt, Artificial Sequence
  Description of Artificial Sequence: Synthetic oligonucleotide
cuguucgugacugcugaac

SEQ ID NO: 162184 - RNA, 19 nt, Artificial Sequence
  Description of Artificial Sequence: Synthetic oligonucleotide
gggaaguuaguaaguuggg

SEQ ID NO: 162185 - RNA, 19 nt, Artificial Sequence
  Description of Artificial Sequence: Synthetic oligonucleotide
cucauagacgaagcgcuuc

SEQ ID NO: 162186 - RNA, 19 nt, Artificial Sequence
  Description of Artificial Sequence: Synthetic oligonucleotide
ggugacggacgucuuauuc

SEQ ID NO: 162187 - RNA, 19 nt, Artificial Sequence
  Description of Artificial Sequence: Synthetic oligonucleotide
ccgaacaaagcuaucuauc

SEQ ID NO: 162188 - RNA, 19 nt, Artificial Sequence
  Description of Artificial Sequence: Synthetic oligonucleotide
ugcgggacuuauuccacua

SEQ ID NO: 162189 - RNA, 19 nt, Artificial Sequence
  Description of Artificial Sequence: Synthetic oligonucleotide
aggauagauaaaauucauu

SEQ ID NO: 162190 - RNA, 19 nt, Artificial Sequence
  Description of Artificial Sequence: Synthetic oligonucleotide
aaucagacugggacacagu

SEQ ID NO: 162191 - RNA, 19 nt, Artificial Sequence
  Description of Artificial Sequence: Synthetic oligonucleotide
acggcaucagaagggcgcg

SEQ ID NO: 162192 - RNA, 19 nt, Artificial Sequence
  Description of Artificial Sequence: Synthetic oligonucleotide
ugacgucugcaccccaaau

SEQ ID NO: 162193 - RNA, 19 nt, Artificial Sequence
  Description of Artificial Sequence: Synthetic oligonucleotide
ccuuagaaggcuaucugca

SEQ ID NO: 162194 - RNA, 19 nt, Artificial Sequence
  Description of Artificial Sequence: Synthetic oligonucleotide
caguuauuaucucacaauu

SEQ ID NO: 162195 - RNA, 19 nt, Artificial Sequence
  Description of Artificial Sequence: Synthetic oligonucleotide
gaagcgccuuucauucaag

SEQ ID NO: 162196 - RNA, 19 nt, Artificial Sequence
  Description of Artificial Sequence: Synthetic oligonucleotide
uauugacgggugacaacuu

SEQ ID NO: 162197 - RNA, 19 nt, Artificial Sequence
  Description of Artificial Sequence: Synthetic oligonucleotide
cuggucaacggagcuguag

SEQ ID NO: 162198 - RNA, 19 nt, Artificial Sequence
  Description of Artificial Sequence: Synthetic oligonucleotide
uucugacacccacccgucu

SEQ ID NO: 162199 - RNA, 19 nt, Artificial Sequence
  Description of Artificial Sequence: Synthetic oligonucleotide
gcaacgcuaccccauuagc

SEQ ID NO: 162200 - RNA, 19 nt, Artificial Sequence
  Description of Artificial Sequence: Synthetic oligonucleotide
cauagacgaagcgcuucag

SEQ ID NO: 162201 - RNA, 19 nt, Artificial Sequence
  Description of Artificial Sequence: Synthetic oligonucleotide
aaccuaacuuugugaucuu

SEQ ID NO: 162202 - RNA, 19 nt, Artificial Sequence
  Description of Artificial Sequence: Synthetic oligonucleotide
auacgucagcaguuauuau

SEQ ID NO: 162203 - RNA, 19 nt, Artificial Sequence
  Description of Artificial Sequence: Synthetic oligonucleotide
cggcaaaacuaucacuugg

SEQ ID NO: 162204 - RNA, 19 nt, Artificial Sequence
  Description of Artificial Sequence: Synthetic oligonucleotide
aauucgcagccagccauua

SEQ ID NO: 162205 - RNA, 19 nt, Artificial Sequence
  Description of Artificial Sequence: Synthetic oligonucleotide
ggcauuaauguagcaccag

SEQ ID NO: 162206 - RNA, 19 nt, Artificial Sequence
  Description of Artificial Sequence: Synthetic oligonucleotide
uaaauguauguggguucaa

SEQ ID NO: 162207 - RNA, 19 nt, Artificial Sequence
  Description of Artificial Sequence: Synthetic oligonucleotide
gugguucucggcaaaacua

SEQ ID NO: 162208 - RNA, 19 nt, Artificial Sequence
  Description of Artificial Sequence: Synthetic oligonucleotide
uggcuacaggauccucuga

SEQ ID NO: 162209 - RNA, 19 nt, Artificial Sequence
  Description of Artificial Sequence: Synthetic oligonucleotide
ugccaacguaggguuugcg

SEQ ID NO: 162210 - RNA, 19 nt, Artificial Sequence
  Description of Artificial Sequence: Synthetic oligonucleotide
ugcaaucuuuauggcuaca

SEQ ID NO: 162211 - RNA, 19 nt, Artificial Sequence
  Description of Artificial Sequence: Synthetic oligonucleotide
ccuuuguacuuuugaguac

SEQ ID NO: 162212 - RNA, 19 nt, Artificial Sequence
  Description of Artificial Sequence: Synthetic oligonucleotide
uuacgcucccuuugaccaa

SEQ ID NO: 162213 - RNA, 19 nt, Artificial Sequence
  Description of Artificial Sequence: Synthetic oligonucleotide
cgcgagguugcaaugacac

SEQ ID NO: 162214 - RNA, 19 nt, Artificial Sequence
  Description of Artificial Sequence: Synthetic oligonucleotide
uugaccguuuggucaucaa

SEQ ID NO: 162215 - RNA, 19 nt, Artificial Sequence
  Description of Artificial Sequence: Synthetic oligonucleotide
cacggcuacagcaggucca

SEQ ID NO: 162216 - RNA, 19 nt, Artificial Sequence
  Description of Artificial Sequence: Synthetic oligonucleotide
gacacggcuacagcagguc

SEQ ID NO: 162217 - RNA, 19 nt, Artificial Sequence
  Description of Artificial Sequence: Synthetic oligonucleotide
ggugccaacguaggguuug

SEQ ID NO: 162218 - RNA, 19 nt, Artificial Sequence
  Description of Artificial Sequence: Synthetic oligonucleotide
aagggcgcggacaggaguu

SEQ ID NO: 162219 - RNA, 19 nt, Artificial Sequence
  Description of Artificial Sequence: Synthetic oligonucleotide
ugucggcccuuuucagaca

SEQ ID NO: 162220 - RNA, 19 nt, Artificial Sequence
  Description of Artificial Sequence: Synthetic oligonucleotide
auacuccuaggaaucacua

SEQ ID NO: 162221 - RNA, 19 nt, Artificial Sequence
  Description of Artificial Sequence: Synthetic oligonucleotide
ggaaagugugaugaauuaa

SEQ ID NO: 162222 - RNA, 19 nt, Artificial Sequence
  Description of Artificial Sequence: Synthetic oligonucleotide
gguuuauguauuaggguua

SEQ ID NO: 162223 - RNA, 19 nt, Artificial Sequence
  Description of Artificial Sequence: Synthetic oligonucleotide
gcuugaaauacuguaggua

SEQ ID NO: 162224 - RNA, 19 nt, Artificial Sequence
  Description of Artificial Sequence: Synthetic oligonucleotide
gccauaggcgaggaggaag

SEQ ID NO: 162225 - RNA, 19 nt, Artificial Sequence
  Description of Artificial Sequence: Synthetic oligonucleotide
ggcauauuaguaaacucgu

SEQ ID NO: 162226 - RNA, 19 nt, Artificial Sequence
  Description of Artificial Sequence: Synthetic oligonucleotide
cauaggcgaggaggaagag

SEQ ID NO: 162227 - RNA, 19 nt, Artificial Sequence
  Description of Artificial Sequence: Synthetic oligonucleotide
gcauuaauguagcaccagu

SEQ ID NO: 162228 - RNA, 19 nt, Artificial Sequence
  Description of Artificial Sequence: Synthetic oligonucleotide
aggcucgacuugauaacug

SEQ ID NO: 162229 - RNA, 19 nt, Artificial Sequence
  Description of Artificial Sequence: Synthetic oligonucleotide
agaguggugggaaguuagu

SEQ ID NO: 162230 - RNA, 19 nt, Artificial Sequence
  Description of Artificial Sequence: Synthetic oligonucleotide
aaccagcgacauguuuugu

SEQ ID NO: 162231 - RNA, 19 nt, Artificial Sequence
  Description of Artificial Sequence: Synthetic oligonucleotide
gucacucugcgacugacuu

SEQ ID NO: 162232 - RNA, 19 nt, Artificial Sequence
  Description of Artificial Sequence: Synthetic oligonucleotide
ugccggugauagguguuug

SEQ ID NO: 162233 - RNA, 19 nt, Artificial Sequence
  Description of Artificial Sequence: Synthetic oligonucleotide
auucgcagccagccauuaa

SEQ ID NO: 162234 - RNA, 19 nt, Artificial Sequence
  Description of Artificial Sequence: Synthetic oligonucleotide
cugcgacugacuucaaccu

SEQ ID NO: 162235 - RNA, 19 nt, Artificial Sequence
  Description of Artificial Sequence: Synthetic oligonucleotide
caguaguauuggugccaac

SEQ ID NO: 162236 - RNA, 19 nt, Artificial Sequence
  Description of Artificial Sequence: Synthetic oligonucleotide
guguauacgucagcaguua

SEQ ID NO: 162237 - RNA, 19 nt, Artificial Sequence
  Description of Artificial Sequence: Synthetic oligonucleotide
gguuaauaacuuugaccgu

SEQ ID NO: 162238 - RNA, 19 nt, Artificial Sequence
  Description of Artificial Sequence: Synthetic oligonucleotide
gacggacgucuuauuccug

SEQ ID NO: 162239 - RNA, 19 nt, Artificial Sequence
  Description of Artificial Sequence: Synthetic oligonucleotide
ggguuugcgucacagcugu

SEQ ID NO: 162240 - RNA, 19 nt, Artificial Sequence
  Description of Artificial Sequence: Synthetic oligonucleotide
agcccgcgagguugcaaug

SEQ ID NO: 162241 - RNA, 19 nt, Artificial Sequence
  Description of Artificial Sequence: Synthetic oligonucleotide
acccacgcuguucgugacu

SEQ ID NO: 162242 - RNA, 19 nt, Artificial Sequence
  Description of Artificial Sequence: Synthetic oligonucleotide
gacgugcaaggccuuugua

SEQ ID NO: 162243 - RNA, 19 nt, Artificial Sequence
  Description of Artificial Sequence: Synthetic oligonucleotide
gcuaaugggaauggcccca

SEQ ID NO: 162244 - RNA, 19 nt, Artificial Sequence
  Description of Artificial Sequence: Synthetic oligonucleotide
gugcguaucuugucagacu

SEQ ID NO: 162245 - RNA, 19 nt, Artificial Sequence
  Description of Artificial Sequence: Synthetic oligonucleotide
cucgcccaaggauucaagu

SEQ ID NO: 162246 - RNA, 19 nt, Artificial Sequence
  Description of Artificial Sequence: Synthetic oligonucleotide
uugcgucacagcuguccuu

SEQ ID NO: 162247 - RNA, 19 nt, Artificial Sequence
  Description of Artificial Sequence: Synthetic oligonucleotide
cuauagccugacgucugca

SEQ ID NO: 162248 - RNA, 19 nt, Artificial Sequence
  Description of Artificial Sequence: Synthetic oligonucleotide
gacacccacccgucuucuc

SEQ ID NO: 162249 - RNA, 19 nt, Artificial Sequence
  Description of Artificial Sequence: Synthetic oligonucleotide
uggugccaacguaggguuu

SEQ ID NO: 162250 - RNA, 19 nt, Artificial Sequence
  Description of Artificial Sequence: Synthetic oligonucleotide
ggacugugcguaucuuguc

SEQ ID NO: 162251 - RNA, 19 nt, Artificial Sequence
  Description of Artificial Sequence: Synthetic oligonucleotide
cacccacgcuguucgugac

SEQ ID NO: 162252 - RNA, 19 nt, Artificial Sequence
  Description of Artificial Sequence: Synthetic oligonucleotide
ggcucgacuugauaacugu

SEQ ID NO: 162253 - RNA, 19 nt, Artificial Sequence
  Description of Artificial Sequence: Synthetic oligonucleotide
ggugcgggacuuauuccac

SEQ ID NO: 162254 - RNA, 19 nt, Artificial Sequence
  Description of Artificial Sequence: Synthetic oligonucleotide
acgcuguucgugacugcug

SEQ ID NO: 162255 - RNA, 19 nt, Artificial Sequence
  Description of Artificial Sequence: Synthetic oligonucleotide
guauacgucagcaguuauu

SEQ ID NO: 162256 - RNA, 19 nt, Artificial Sequence
  Description of Artificial Sequence: Synthetic oligonucleotide
ugcuggugcgggacuuauu

SEQ ID NO: 162257 - RNA, 19 nt, Artificial Sequence
  Description of Artificial Sequence: Synthetic oligonucleotide
gguucucggcaaaacuauc

SEQ ID NO: 162258 - RNA, 19 nt, Artificial Sequence
  Description of Artificial Sequence: Synthetic oligonucleotide
ccacuagaguggugggaag

SEQ ID NO: 162259 - RNA, 19 nt, Artificial Sequence
  Description of Artificial Sequence: Synthetic oligonucleotide
gugccaacguaggguuugc

SEQ ID NO: 162260 - RNA, 19 nt, Artificial Sequence
  Description of Artificial Sequence: Synthetic oligonucleotide
augccggugauagguguuu

SEQ ID NO: 162261 - RNA, 19 nt, Artificial Sequence
  Description of Artificial Sequence: Synthetic oligonucleotide
gccgaacaaagcuaucuau

SEQ ID NO: 162262 - RNA, 19 nt, Artificial Sequence
  Description of Artificial Sequence: Synthetic oligonucleotide
gccaacguaggguuugcgu

SEQ ID NO: 162263 - RNA, 19 nt, Artificial Sequence
  Description of Artificial Sequence: Synthetic oligonucleotide
cuuugaccguuuggucauc

SEQ ID NO: 162264 - RNA, 19 nt, Artificial Sequence
  Description of Artificial Sequence: Synthetic oligonucleotide
gcucgacuugauaacuguc

SEQ ID NO: 162265 - RNA, 19 nt, Artificial Sequence
  Description of Artificial Sequence: Synthetic oligonucleotide
cgucuuauuccugggcccc

SEQ ID NO: 162266 - RNA, 19 nt, Artificial Sequence
  Description of Artificial Sequence: Synthetic oligonucleotide
cucuauguuagagcuguuu

SEQ ID NO: 162267 - RNA, 19 nt, Artificial Sequence
  Description of Artificial Sequence: Synthetic oligonucleotide
gaaugcgauuugaaaucuu

SEQ ID NO: 162268 - RNA, 19 nt, Artificial Sequence
  Description of Artificial Sequence: Synthetic oligonucleotide
acguaggguuugcgucaca

SEQ ID NO: 162269 - RNA, 19 nt, Artificial Sequence
  Description of Artificial Sequence: Synthetic oligonucleotide
gccggugauagguguuuga

SEQ ID NO: 162270 - RNA, 19 nt, Artificial Sequence
  Description of Artificial Sequence: Synthetic oligonucleotide
gugcgggacuuauuccacu

SEQ ID NO: 162271 - RNA, 19 nt, Artificial Sequence
  Description of Artificial Sequence: Synthetic oligonucleotide
cgcggacaggaguuuacac

SEQ ID NO: 162272 - RNA, 19 nt, Artificial Sequence
  Description of Artificial Sequence: Synthetic oligonucleotide
caggcucgacuugauaacu

SEQ ID NO: 162273 - RNA, 19 nt, Artificial Sequence
  Description of Artificial Sequence: Synthetic oligonucleotide
cacgcuguucgugacugcu

SEQ ID NO: 162274 - RNA, 19 nt, Artificial Sequence
  Description of Artificial Sequence: Synthetic oligonucleotide
cgggugacaacuuuauacu

SEQ ID NO: 162275 - RNA, 19 nt, Artificial Sequence
  Description of Artificial Sequence: Synthetic oligonucleotide
cccgcgagguugcaaugac

SEQ ID NO: 162276 - RNA, 19 nt, Artificial Sequence
  Description of Artificial Sequence: Synthetic oligonucleotide
cuuauuccugggccccacu

SEQ ID NO: 162277 - RNA, 19 nt, Artificial Sequence
  Description of Artificial Sequence: Synthetic oligonucleotide
ccguaguauaguggccgcc

SEQ ID NO: 162278 - RNA, 19 nt, Artificial Sequence
  Description of Artificial Sequence: Synthetic oligonucleotide
gcguugacgugcaaggccu

SEQ ID NO: 162279 - RNA, 19 nt, Artificial Sequence
  Description of Artificial Sequence: Synthetic oligonucleotide
gucugaccugcaguguaua

SEQ ID NO: 162280 - RNA, 19 nt, Artificial Sequence
  Description of Artificial Sequence: Synthetic oligonucleotide
cguaucuugucagacugaa

SEQ ID NO: 162281 - RNA, 19 nt, Artificial Sequence
  Description of Artificial Sequence: Synthetic oligonucleotide
gcgucacagcuguccuuag

SEQ ID NO: 162282 - RNA, 19 nt, Artificial Sequence
  Description of Artificial Sequence: Synthetic oligonucleotide
caauucgcagccagccauu

SEQ ID NO: 162283 - RNA, 19 nt, Artificial Sequence
  Description of Artificial Sequence: Synthetic oligonucleotide
ggcgcggacaggaguuuac

SEQ ID NO: 162284 - RNA, 19 nt, Artificial Sequence
  Description of Artificial Sequence: Synthetic oligonucleotide
ccuagguauuccucggcgu

SEQ ID NO: 162285 - RNA, 19 nt, Artificial Sequence
  Description of Artificial Sequence: Synthetic oligonucleotide
ccguugaccauggcagcug

SEQ ID NO: 162286 - RNA, 19 nt, Artificial Sequence
  Description of Artificial Sequence: Synthetic oligonucleotide
cagccugccgggugacgga

SEQ ID NO: 162287 - RNA, 19 nt, Artificial Sequence
  Description of Artificial Sequence: Synthetic oligonucleotide
ggucaacggagcuguaguu

SEQ ID NO: 162288 - RNA, 19 nt, Artificial Sequence
  Description of Artificial Sequence: Synthetic oligonucleotide
cagcccgcgagguugcaau

SEQ ID NO: 162289 - RNA, 19 nt, Artificial Sequence
  Description of Artificial Sequence: Synthetic oligonucleotide
ccggugauagguguuugaa

SEQ ID NO: 162290 - RNA, 19 nt, Artificial Sequence
  Description of Artificial Sequence: Synthetic oligonucleotide
gcguaucuugucagacuga

SEQ ID NO: 162291 - RNA, 19 nt, Artificial Sequence
  Description of Artificial Sequence: Synthetic oligonucleotide
gugauacaucggagggcaa

SEQ ID NO: 162292 - RNA, 19 nt, Artificial Sequence
  Description of Artificial Sequence: Synthetic oligonucleotide
cauccuggacugugcguau

SEQ ID NO: 162293 - RNA, 19 nt, Artificial Sequence
  Description of Artificial Sequence: Synthetic oligonucleotide
aucagcccgcgagguugca

SEQ ID NO: 162294 - RNA, 19 nt, Artificial Sequence
  Description of Artificial Sequence: Synthetic oligonucleotide
gcauauuaguaaacucguu

SEQ ID NO: 162295 - RNA, 19 nt, Artificial Sequence
  Description of Artificial Sequence: Synthetic oligonucleotide
gcgagguugcaaugacacu

SEQ ID NO: 162296 - RNA, 19 nt, Artificial Sequence
  Description of Artificial Sequence: Synthetic oligonucleotide
cacccacccgucuucucau

SEQ ID NO: 162297 - RNA, 19 nt, Artificial Sequence
  Description of Artificial Sequence: Synthetic oligonucleotide
ccucggcgucuuccugucg

SEQ ID NO: 162298 - RNA, 19 nt, Artificial Sequence
  Description of Artificial Sequence: Synthetic oligonucleotide
agggcgcggacaggaguuu

SEQ ID NO: 162299 - RNA, 19 nt, Artificial Sequence
  Description of Artificial Sequence: Synthetic oligonucleotide
gcgcggacaggaguuuaca

SEQ ID NO: 162300 - RNA, 19 nt, Artificial Sequence
  Description of Artificial Sequence: Synthetic oligonucleotide
gccugccgggugacggacg

SEQ ID NO: 162301 - RNA, 19 nt, Artificial Sequence
  Description of Artificial Sequence: Synthetic oligonucleotide
gcccgcgagguugcaauga

SEQ ID NO: 162302 - RNA, 19 nt, Artificial Sequence
  Description of Artificial Sequence: Synthetic oligonucleotide
ccgcgagguugcaaugaca

SEQ ID NO: 162303 - RNA, 19 nt, Artificial Sequence
  Description of Artificial Sequence: Synthetic oligonucleotide
acgcucccuuugaccaaga

SEQ ID NO: 162304 - RNA, 19 nt, Artificial Sequence
  Description of Artificial Sequence: Synthetic oligonucleotide
gccguugaccauggcagcu

SEQ ID NO: 162305 - RNA, 19 nt, Artificial Sequence
  Description of Artificial Sequence: Synthetic oligonucleotide
gcgggacuuauuccacuau

SEQ ID NO: 162306 - RNA, 19 nt, Artificial Sequence
  Description of Artificial Sequence: Synthetic oligonucleotide
gcgacauguuuuguguauu

SEQ ID NO: 162307 - RNA, 19 nt, Artificial Sequence
  Description of Artificial Sequence: Synthetic oligonucleotide
guguaaccuuggacagacu

SEQ ID NO: 162308 - RNA, 19 nt, Artificial Sequence
  Description of Artificial Sequence: Synthetic oligonucleotide
cgucacagcuguccuuaga

SEQ ID NO: 162309 - RNA, 19 nt, Artificial Sequence
  Description of Artificial Sequence: Synthetic oligonucleotide
cugccgggugacggacguc

SEQ ID NO: 162310 - RNA, 19 nt, Artificial Sequence
  Description of Artificial Sequence: Synthetic oligonucleotide
gccugacgucugcacccca

SEQ ID NO: 162311 - RNA, 19 nt, Artificial Sequence
  Description of Artificial Sequence: Synthetic oligonucleotide
ccacucguccucacucccu

SEQ ID NO: 162312 - RNA, 19 nt, Artificial Sequence
  Description of Artificial Sequence: Synthetic oligonucleotide
ccugccgggugacggacgu

SEQ ID NO: 162313 - RNA, 19 nt, Artificial Sequence
  Description of Artificial Sequence: Synthetic oligonucleotide
gggugacggacgucuuauu

SEQ ID NO: 162314 - RNA, 19 nt, Artificial Sequence
  Description of Artificial Sequence: Synthetic oligonucleotide
ccgggugacggacgucuua

SEQ ID NO: 162315 - RNA, 19 nt, Artificial Sequence
  Description of Artificial Sequence: Synthetic oligonucleotide
gggcgcggacaggaguuua

SEQ ID NO: 162316 - RNA, 19 nt, Artificial Sequence
  Description of Artificial Sequence: Synthetic oligonucleotide
cgaaaucagccugccgggu

SEQ ID NO: 162317 - RNA, 19 nt, Artificial Sequence
  Description of Artificial Sequence: Synthetic oligonucleotide
ccucuauguuagagcuguu

SEQ ID NO: 162318 - RNA, 19 nt, Artificial Sequence
  Description of Artificial Sequence: Synthetic oligonucleotide
cguugacgugcaaggccuu

SEQ ID NO: 162319 - RNA, 19 nt, Artificial Sequence
  Description of Artificial Sequence: Synthetic oligonucleotide
gccgggugacggacgucuu

SEQ ID NO: 162320 - RNA, 19 nt, Artificial Sequence
  Description of Artificial Sequence: Synthetic oligonucleotide
aaagaguuaaacuauauac

SEQ ID NO: 162321 - RNA, 19 nt, Artificial Sequence
  Description of Artificial Sequence: Synthetic oligonucleotide
aacaaaaggaucuaagggg

SEQ ID NO: 162322 - RNA, 19 nt, Artificial Sequence
  Description of Artificial Sequence: Synthetic oligonucleotide
aaucucagaguauccaucc

SEQ ID NO: 162323 - RNA, 19 nt, Artificial Sequence
  Description of Artificial Sequence: Synthetic oligonucleotide
aaccauuuccuauuggcgc

SEQ ID NO: 162324 - RNA, 19 nt, Artificial Sequence
  Description of Artificial Sequence: Synthetic oligonucleotide
aacaggaaaacuucucggc

SEQ ID NO: 162325 - RNA, 19 nt, Artificial Sequence
  Description of Artificial Sequence: Synthetic oligonucleotide
aagagaaucacggaggcac

SEQ ID NO: 162326 - RNA, 19 nt, Artificial Sequence
  Description of Artificial Sequence: Synthetic oligonucleotide
cuuuccacgaguucuaugg

SEQ ID NO: 162327 - RNA, 19 nt, Artificial Sequence
  Description of Artificial Sequence: Synthetic oligonucleotide
auauuaauggggugguacc

SEQ ID NO: 162328 - RNA, 19 nt, Artificial Sequence
  Description of Artificial Sequence: Synthetic oligonucleotide
cuuaugaucaacuucauaa

SEQ ID NO: 162329 - RNA, 19 nt, Artificial Sequence
  Description of Artificial Sequence: Synthetic oligonucleotide
aaguugggcaaguauuagc

SEQ ID NO: 162330 - RNA, 19 nt, Artificial Sequence
  Description of Artificial Sequence: Synthetic oligonucleotide
uuaggauguaguaauagaa

SEQ ID NO: 162331 - RNA, 19 nt, Artificial Sequence
  Description of Artificial Sequence: Synthetic oligonucleotide
aaguuguuucccgagaacg

SEQ ID NO: 162332 - RNA, 19 nt, Artificial Sequence
  Description of Artificial Sequence: Synthetic oligonucleotide
ggugucaccauauuuaccg

SEQ ID NO: 162333 - RNA, 19 nt, Artificial Sequence
  Description of Artificial Sequence: Synthetic oligonucleotide
uuuaauuuaggauguagua

SEQ ID NO: 162334 - RNA, 19 nt, Artificial Sequence
  Description of Artificial Sequence: Synthetic oligonucleotide
uuacuguuccaccacgacg

SEQ ID NO: 162335 - RNA, 19 nt, Artificial Sequence
  Description of Artificial Sequence: Synthetic oligonucleotide
uuaagagaaucacggaggc

SEQ ID NO: 162336 - RNA, 19 nt, Artificial Sequence
  Description of Artificial Sequence: Synthetic oligonucleotide
uuuaggauguaguaauaga

SEQ ID NO: 162337 - RNA, 19 nt, Artificial Sequence
  Description of Artificial Sequence: Synthetic oligonucleotide
gaggcucccacacauauag

SEQ ID NO: 162338 - RNA, 19 nt, Artificial Sequence
  Description of Artificial Sequence: Synthetic oligonucleotide
ggugagaucaggcagacgc

SEQ ID NO: 162339 - RNA, 19 nt, Artificial Sequence
  Description of Artificial Sequence: Synthetic oligonucleotide
ucuggcuaucauuagaacu

SEQ ID NO: 162340 - RNA, 19 nt, Artificial Sequence
  Description of Artificial Sequence: Synthetic oligonucleotide
guccuauuagccuugaaug

SEQ ID NO: 162341 - RNA, 19 nt, Artificial Sequence
  Description of Artificial Sequence: Synthetic oligonucleotide
ucucaauuuaauuuaggau

SEQ ID NO: 162342 - RNA, 19 nt, Artificial Sequence
  Description of Artificial Sequence: Synthetic oligonucleotide
cauuagaacuaacaagagc

SEQ ID NO: 162343 - RNA, 19 nt, Artificial Sequence
  Description of Artificial Sequence: Synthetic oligonucleotide
guggcuuacaauuuagagc

SEQ ID NO: 162344 - RNA, 19 nt, Artificial Sequence
  Description of Artificial Sequence: Synthetic oligonucleotide
ugaagucuggcuaucauua

SEQ ID NO: 162345 - RNA, 19 nt, Artificial Sequence
  Description of Artificial Sequence: Synthetic oligonucleotide
acaaggacgugccuccucc

SEQ ID NO: 162346 - RNA, 19 nt, Artificial Sequence
  Description of Artificial Sequence: Synthetic oligonucleotide
ucuauaccaaccauuuccu

SEQ ID NO: 162347 - RNA, 19 nt, Artificial Sequence
  Description of Artificial Sequence: Synthetic oligonucleotide
aguuauugcuagcaaagcu

SEQ ID NO: 162348 - RNA, 19 nt, Artificial Sequence
  Description of Artificial Sequence: Synthetic oligonucleotide
uguccuauuagccuugaau

SEQ ID NO: 162349 - RNA, 19 nt, Artificial Sequence
  Description of Artificial Sequence: Synthetic oligonucleotide
acaaccacgggcucuaaag

SEQ ID NO: 162350 - RNA, 19 nt, Artificial Sequence
  Description of Artificial Sequence: Synthetic oligonucleotide
uccggauugcugaagagca

SEQ ID NO: 162351 - RNA, 19 nt, Artificial Sequence
  Description of Artificial Sequence: Synthetic oligonucleotide
uccucuacgagccacccug

SEQ ID NO: 162352 - RNA, 19 nt, Artificial Sequence
  Description of Artificial Sequence: Synthetic oligonucleotide
uauuaauggggugguaccg

SEQ ID NO: 162353 - RNA, 19 nt, Artificial Sequence
  Description of Artificial Sequence: Synthetic oligonucleotide
uauaccaaccauuuccuau

SEQ ID NO: 162354 - RNA, 19 nt, Artificial Sequence
  Description of Artificial Sequence: Synthetic oligonucleotide
agaacuuacuguuccacca

SEQ ID NO: 162355 - RNA, 19 nt, Artificial Sequence
  Description of Artificial Sequence: Synthetic oligonucleotide
caacaggaaaacuucucgg

SEQ ID NO: 162356 - RNA, 19 nt, Artificial Sequence
  Description of Artificial Sequence: Synthetic oligonucleotide
ucuaucuacucaaggggug

SEQ ID NO: 162357 - RNA, 19 nt, Artificial Sequence
  Description of Artificial Sequence: Synthetic oligonucleotide
ucucuugacuugcagaaaa

SEQ ID NO: 162358 - RNA, 19 nt, Artificial Sequence
  Description of Artificial Sequence: Synthetic oligonucleotide
ucggacaacugacaguacc

SEQ ID NO: 162359 - RNA, 19 nt, Artificial Sequence
  Description of Artificial Sequence: Synthetic oligonucleotide
cuugggaguguuaugcacc

SEQ ID NO: 162360 - RNA, 19 nt, Artificial Sequence
  Description of Artificial Sequence: Synthetic oligonucleotide
aaagugaauucugugcuga

SEQ ID NO: 162361 - RNA, 19 nt, Artificial Sequence
  Description of Artificial Sequence: Synthetic oligonucleotide
ugacaguuaaugcuccuac

SEQ ID NO: 162362 - RNA, 19 nt, Artificial Sequence
  Description of Artificial Sequence: Synthetic oligonucleotide
gaagaacgggcuuuauugc

SEQ ID NO: 162363 - RNA, 19 nt, Artificial Sequence
  Description of Artificial Sequence: Synthetic oligonucleotide
uuaccggugaacuggcugc

SEQ ID NO: 162364 - RNA, 19 nt, Artificial Sequence
  Description of Artificial Sequence: Synthetic oligonucleotide
aaaaggaucuaaggggcug

SEQ ID NO: 162365 - RNA, 19 nt, Artificial Sequence
  Description of Artificial Sequence: Synthetic oligonucleotide
cauguaagcuccauaaaga

SEQ ID NO: 162366 - RNA, 19 nt, Artificial Sequence
  Description of Artificial Sequence: Synthetic oligonucleotide
uagaacuaacaagagcaag

SEQ ID NO: 162367 - RNA, 19 nt, Artificial Sequence
  Description of Artificial Sequence: Synthetic oligonucleotide
uaaagugaauucugugcug

SEQ ID NO: 162368 - RNA, 19 nt, Artificial Sequence
  Description of Artificial Sequence: Synthetic oligonucleotide
aaaaggcuauugguuuggc

SEQ ID NO: 162369 - RNA, 19 nt, Artificial Sequence
  Description of Artificial Sequence: Synthetic oligonucleotide
uccuauuagccuugaaugu

SEQ ID NO: 162370 - RNA, 19 nt, Artificial Sequence
  Description of Artificial Sequence: Synthetic oligonucleotide
caauuuagagccaacuaga

SEQ ID NO: 162371 - RNA, 19 nt, Artificial Sequence
  Description of Artificial Sequence: Synthetic oligonucleotide
uauuuaccggugaacuggc

SEQ ID NO: 162372 - RNA, 19 nt, Artificial Sequence
  Description of Artificial Sequence: Synthetic oligonucleotide
uuagaacuaacaagagcaa

SEQ ID NO: 162373 - RNA, 19 nt, Artificial Sequence
  Description of Artificial Sequence: Synthetic oligonucleotide
agaacuaacaagagcaaga

SEQ ID NO: 162374 - RNA, 19 nt, Artificial Sequence
  Description of Artificial Sequence: Synthetic oligonucleotide
gacgcuggagccaugauac

SEQ ID NO: 162375 - RNA, 19 nt, Artificial Sequence
  Description of Artificial Sequence: Synthetic oligonucleotide
cuacgagccacccugugcc

SEQ ID NO: 162376 - RNA, 19 nt, Artificial Sequence
  Description of Artificial Sequence: Synthetic oligonucleotide
ugcuccuacccuuugaguc

SEQ ID NO: 162377 - RNA, 19 nt, Artificial Sequence
  Description of Artificial Sequence: Synthetic oligonucleotide
cugacaguacccgagggcg

SEQ ID NO: 162378 - RNA, 19 nt, Artificial Sequence
  Description of Artificial Sequence: Synthetic oligonucleotide
caguuuacaucagacauug

SEQ ID NO: 162379 - RNA, 19 nt, Artificial Sequence
  Description of Artificial Sequence: Synthetic oligonucleotide
guuauugcuagcaaagcuc

SEQ ID NO: 162380 - RNA, 19 nt, Artificial Sequence
  Description of Artificial Sequence: Synthetic oligonucleotide
ucuaugcuugggcagacau

SEQ ID NO: 162381 - RNA, 19 nt, Artificial Sequence
  Description of Artificial Sequence: Synthetic oligonucleotide
aaauaucuaucuacucaag

SEQ ID NO: 162382 - RNA, 19 nt, Artificial Sequence
  Description of Artificial Sequence: Synthetic oligonucleotide
ugggcaaguauuagcauuc

SEQ ID NO: 162383 - RNA, 19 nt, Artificial Sequence
  Description of Artificial Sequence: Synthetic oligonucleotide
cacacauauagaguggagc

SEQ ID NO: 162384 - RNA, 19 nt, Artificial Sequence
  Description of Artificial Sequence: Synthetic oligonucleotide
guguuaugcacccagaaua

SEQ ID NO: 162385 - RNA, 19 nt, Artificial Sequence
  Description of Artificial Sequence: Synthetic oligonucleotide
aaggccuauccucuacgag

SEQ ID NO: 162386 - RNA, 19 nt, Artificial Sequence
  Description of Artificial Sequence: Synthetic oligonucleotide
cacuguuacugcuaccacc

SEQ ID NO: 162387 - RNA, 19 nt, Artificial Sequence
  Description of Artificial Sequence: Synthetic oligonucleotide
augcacccagaauagcugg

SEQ ID NO: 162388 - RNA, 19 nt, Artificial Sequence
  Description of Artificial Sequence: Synthetic oligonucleotide
cacgacguuuucuuugagg

SEQ ID NO: 162389 - RNA, 19 nt, Artificial Sequence
  Description of Artificial Sequence: Synthetic oligonucleotide
aguugggcaaguauuagca

SEQ ID NO: 162390 - RNA, 19 nt, Artificial Sequence
  Description of Artificial Sequence: Synthetic oligonucleotide
ucggccaacauguaagcuc

SEQ ID NO: 162391 - RNA, 19 nt, Artificial Sequence
  Description of Artificial Sequence: Synthetic oligonucleotide
uauuagccuugaauguucu

SEQ ID NO: 162392 - RNA, 19 nt, Artificial Sequence
  Description of Artificial Sequence: Synthetic oligonucleotide
ucuuuaacacuagcaggag

SEQ ID NO: 162393 - RNA, 19 nt, Artificial Sequence
  Description of Artificial Sequence: Synthetic oligonucleotide
aauuuagagccaacuagau

SEQ ID NO: 162394 - RNA, 19 nt, Artificial Sequence
  Description of Artificial Sequence: Synthetic oligonucleotide
aaccacgggcucuaaagau

SEQ ID NO: 162395 - RNA, 19 nt, Artificial Sequence
  Description of Artificial Sequence: Synthetic oligonucleotide
uuaacacuagcaggagucc

SEQ ID NO: 162396 - RNA, 19 nt, Artificial Sequence
  Description of Artificial Sequence: Synthetic oligonucleotide
ucgagaaguaugaguaguc

SEQ ID NO: 162397 - RNA, 19 nt, Artificial Sequence
  Description of Artificial Sequence: Synthetic oligonucleotide
acauauagaguggagcaga

SEQ ID NO: 162398 - RNA, 19 nt, Artificial Sequence
  Description of Artificial Sequence: Synthetic oligonucleotide
gaagucuggcuaucauuag

SEQ ID NO: 162399 - RNA, 19 nt, Artificial Sequence
  Description of Artificial Sequence: Synthetic oligonucleotide
aguguuaugcacccagaau

SEQ ID NO: 162400 - RNA, 19 nt, Artificial Sequence
  Description of Artificial Sequence: Synthetic oligonucleotide
aguugugcggagguggagg

SEQ ID NO: 162401 - RNA, 19 nt, Artificial Sequence
  Description of Artificial Sequence: Synthetic oligonucleotide
uggucugggcguaaccucc

SEQ ID NO: 162402 - RNA, 19 nt, Artificial Sequence
  Description of Artificial Sequence: Synthetic oligonucleotide
ugucaccauauuuaccggu

SEQ ID NO: 162403 - RNA, 19 nt, Artificial Sequence
  Description of Artificial Sequence: Synthetic oligonucleotide
ugcgcuccaacaaggacgu

SEQ ID NO: 162404 - RNA, 19 nt, Artificial Sequence
  Description of Artificial Sequence: Synthetic oligonucleotide
uuaaugcuccuacccuuug

SEQ ID NO: 162405 - RNA, 19 nt, Artificial Sequence
  Description of Artificial Sequence: Synthetic oligonucleotide
gaucggacaacugacagua

SEQ ID NO: 162406 - RNA, 19 nt, Artificial Sequence
  Description of Artificial Sequence: Synthetic oligonucleotide
aaggugcaggcaaaaucac

SEQ ID NO: 162407 - RNA, 19 nt, Artificial Sequence
  Description of Artificial Sequence: Synthetic oligonucleotide
cuacauugcagucaaaagu

SEQ ID NO: 162408 - RNA, 19 nt, Artificial Sequence
  Description of Artificial Sequence: Synthetic oligonucleotide
ccaaccauuuccuauuggc

SEQ ID NO: 162409 - RNA, 19 nt, Artificial Sequence
  Description of Artificial Sequence: Synthetic oligonucleotide
gaaucacggaggcacuggc

SEQ ID NO: 162410 - RNA, 19 nt, Artificial Sequence
  Description of Artificial Sequence: Synthetic oligonucleotide
auaccaaccauuuccuauu

SEQ ID NO: 162411 - RNA, 19 nt, Artificial Sequence
  Description of Artificial Sequence: Synthetic oligonucleotide
cuggcuaucauuagaacua

SEQ ID NO: 162412 - RNA, 19 nt, Artificial Sequence
  Description of Artificial Sequence: Synthetic oligonucleotide
agaacaguuggugaacaga

SEQ ID NO: 162413 - RNA, 19 nt, Artificial Sequence
  Description of Artificial Sequence: Synthetic oligonucleotide
gauggacugugucuggcca

SEQ ID NO: 162414 - RNA, 19 nt, Artificial Sequence
  Description of Artificial Sequence: Synthetic oligonucleotide
caauguaaggugcaggcaa

SEQ ID NO: 162415 - RNA, 19 nt, Artificial Sequence
  Description of Artificial Sequence: Synthetic oligonucleotide
uuaggcagugggaacugaa

SEQ ID NO: 162416 - RNA, 19 nt, Artificial Sequence
  Description of Artificial Sequence: Synthetic oligonucleotide
aaagacgcuggagccauga

SEQ ID NO: 162417 - RNA, 19 nt, Artificial Sequence
  Description of Artificial Sequence: Synthetic oligonucleotide
uccacgaguucuauggguu

SEQ ID NO: 162418 - RNA, 19 nt, Artificial Sequence
  Description of Artificial Sequence: Synthetic oligonucleotide
ucaauguaaggugcaggca

SEQ ID NO: 162419 - RNA, 19 nt, Artificial Sequence
  Description of Artificial Sequence: Synthetic oligonucleotide
ucugggcguaaccuccucc

SEQ ID NO: 162420 - RNA, 19 nt, Artificial Sequence
  Description of Artificial Sequence: Synthetic oligonucleotide
cuagaacuuacuguuccac

SEQ ID NO: 162421 - RNA, 19 nt, Artificial Sequence
  Description of Artificial Sequence: Synthetic oligonucleotide
uuccacgaguucuaugggu

SEQ ID NO: 162422 - RNA, 19 nt, Artificial Sequence
  Description of Artificial Sequence: Synthetic oligonucleotide
agaaucacggaggcacugg

SEQ ID NO: 162423 - RNA, 19 nt, Artificial Sequence
  Description of Artificial Sequence: Synthetic oligonucleotide
uccaccacgacguuuucuu

SEQ ID NO: 162424 - RNA, 19 nt, Artificial Sequence
  Description of Artificial Sequence: Synthetic oligonucleotide
uugcuagcaaagcuccagu

SEQ ID NO: 162425 - RNA, 19 nt, Artificial Sequence
  Description of Artificial Sequence: Synthetic oligonucleotide
uaccacgucacugccuccg

SEQ ID NO: 162426 - RNA, 19 nt, Artificial Sequence
  Description of Artificial Sequence: Synthetic oligonucleotide
agaucggacaacugacagu

SEQ ID NO: 162427 - RNA, 19 nt, Artificial Sequence
  Description of Artificial Sequence: Synthetic oligonucleotide
uauugcuagcaaagcucca

SEQ ID NO: 162428 - RNA, 19 nt, Artificial Sequence
  Description of Artificial Sequence: Synthetic oligonucleotide
guagcggcagguugaguag

SEQ ID NO: 162429 - RNA, 19 nt, Artificial Sequence
  Description of Artificial Sequence: Synthetic oligonucleotide
acgucacugccuccgagag

SEQ ID NO: 162430 - RNA, 19 nt, Artificial Sequence
  Description of Artificial Sequence: Synthetic oligonucleotide
cugggcguaaccuccuccc

SEQ ID NO: 162431 - RNA, 19 nt, Artificial Sequence
  Description of Artificial Sequence: Synthetic oligonucleotide
gugaacagacauggggugg

SEQ ID NO: 162432 - RNA, 19 nt, Artificial Sequence
  Description of Artificial Sequence: Synthetic oligonucleotide
cucuugacuugcagaaaac

SEQ ID NO: 162433 - RNA, 19 nt, Artificial Sequence
  Description of Artificial Sequence: Synthetic oligonucleotide
auaaagacgcuggagccau

SEQ ID NO: 162434 - RNA, 19 nt, Artificial Sequence
  Description of Artificial Sequence: Synthetic oligonucleotide
ggugaacagacauggggug

SEQ ID NO: 162435 - RNA, 19 nt, Artificial Sequence
  Description of Artificial Sequence: Synthetic oligonucleotide
acuuuccacgaguucuaug

SEQ ID NO: 162436 - RNA, 19 nt, Artificial Sequence
  Description of Artificial Sequence: Synthetic oligonucleotide
acuuaugaucaacuucaua

SEQ ID NO: 162437 - RNA, 19 nt, Artificial Sequence
  Description of Artificial Sequence: Synthetic oligonucleotide
gaguguuaugcacccagaa

SEQ ID NO: 162438 - RNA, 19 nt, Artificial Sequence
  Description of Artificial Sequence: Synthetic oligonucleotide
gaaggccuauccucuacga

SEQ ID NO: 162439 - RNA, 19 nt, Artificial Sequence
  Description of Artificial Sequence: Synthetic oligonucleotide
guaaccuccucccauuucu

SEQ ID NO: 162440 - RNA, 19 nt, Artificial Sequence
  Description of Artificial Sequence: Synthetic oligonucleotide
agagucauugugagucagg

SEQ ID NO: 162441 - RNA, 19 nt, Artificial Sequence
  Description of Artificial Sequence: Synthetic oligonucleotide
caaguugggcaaguauuag

SEQ ID NO: 162442 - RNA, 19 nt, Artificial Sequence
  Description of Artificial Sequence: Synthetic oligonucleotide
aaguaugaguagucacaua

SEQ ID NO: 162443 - RNA, 19 nt, Artificial Sequence
  Description of Artificial Sequence: Synthetic oligonucleotide
agucuggcuaucauuagaa

SEQ ID NO: 162444 - RNA, 19 nt, Artificial Sequence
  Description of Artificial Sequence: Synthetic oligonucleotide
ccaaugcgcuccaacaagg

SEQ ID NO: 162445 - RNA, 19 nt, Artificial Sequence
  Description of Artificial Sequence: Synthetic oligonucleotide
aaacuccaauaugccugac

SEQ ID NO: 162446 - RNA, 19 nt, Artificial Sequence
  Description of Artificial Sequence: Synthetic oligonucleotide
gguaggguuccugagaaca

SEQ ID NO: 162447 - RNA, 19 nt, Artificial Sequence
  Description of Artificial Sequence: Synthetic oligonucleotide
uuaauggggugguaccguu

SEQ ID NO: 162448 - RNA, 19 nt, Artificial Sequence
  Description of Artificial Sequence: Synthetic oligonucleotide
agaucaggcagacgccaca

SEQ ID NO: 162449 - RNA, 19 nt, Artificial Sequence
  Description of Artificial Sequence: Synthetic oligonucleotide
uacaucagacauugauuuu

SEQ ID NO: 162450 - RNA, 19 nt, Artificial Sequence
  Description of Artificial Sequence: Synthetic oligonucleotide
acucucauucaaacuaacu

SEQ ID NO: 162451 - RNA, 19 nt, Artificial Sequence
  Description of Artificial Sequence: Synthetic oligonucleotide
ggggcaauuuaccacguca

SEQ ID NO: 162452 - RNA, 19 nt, Artificial Sequence
  Description of Artificial Sequence: Synthetic oligonucleotide
uauccucuacgagccaccc

SEQ ID NO: 162453 - RNA, 19 nt, Artificial Sequence
  Description of Artificial Sequence: Synthetic oligonucleotide
uuguuucccgagaacgcuu

SEQ ID NO: 162454 - RNA, 19 nt, Artificial Sequence
  Description of Artificial Sequence: Synthetic oligonucleotide
guaucuaugcuugggcaga

SEQ ID NO: 162455 - RNA, 19 nt, Artificial Sequence
  Description of Artificial Sequence: Synthetic oligonucleotide
agacgcuggagccaugaua

SEQ ID NO: 162456 - RNA, 19 nt, Artificial Sequence
  Description of Artificial Sequence: Synthetic oligonucleotide
gaaguaugaguagucacau

SEQ ID NO: 162457 - RNA, 19 nt, Artificial Sequence
  Description of Artificial Sequence: Synthetic oligonucleotide
ccacugaauacucauucug

SEQ ID NO: 162458 - RNA, 19 nt, Artificial Sequence
  Description of Artificial Sequence: Synthetic oligonucleotide
agaauagcuggggcaaacu

SEQ ID NO: 162459 - RNA, 19 nt, Artificial Sequence
  Description of Artificial Sequence: Synthetic oligonucleotide
gccaaugcgcuccaacaag

SEQ ID NO: 162460 - RNA, 19 nt, Artificial Sequence
  Description of Artificial Sequence: Synthetic oligonucleotide
agcuaacuggcagaugccu

SEQ ID NO: 162461 - RNA, 19 nt, Artificial Sequence
  Description of Artificial Sequence: Synthetic oligonucleotide
gaacuuuggagcacgggua

SEQ ID NO: 162462 - RNA, 19 nt, Artificial Sequence
  Description of Artificial Sequence: Synthetic oligonucleotide
gguagcggcagguugagua

SEQ ID NO: 162463 - RNA, 19 nt, Artificial Sequence
  Description of Artificial Sequence: Synthetic oligonucleotide
cagcgacuugggcaaaacc

SEQ ID NO: 162464 - RNA, 19 nt, Artificial Sequence
  Description of Artificial Sequence: Synthetic oligonucleotide
gugguaccguuuaugguug

SEQ ID NO: 162465 - RNA, 19 nt, Artificial Sequence
  Description of Artificial Sequence: Synthetic oligonucleotide
gacguuuucuuugaggauu

SEQ ID NO: 162466 - RNA, 19 nt, Artificial Sequence
  Description of Artificial Sequence: Synthetic oligonucleotide
cugggaggaucccuggauc

SEQ ID NO: 162467 - RNA, 19 nt, Artificial Sequence
  Description of Artificial Sequence: Synthetic oligonucleotide
auauagaguggagcagaga

SEQ ID NO: 162468 - RNA, 19 nt, Artificial Sequence
  Description of Artificial Sequence: Synthetic oligonucleotide
aacuuaugaucaacuucau

SEQ ID NO: 162469 - RNA, 19 nt, Artificial Sequence
  Description of Artificial Sequence: Synthetic oligonucleotide
ugggcguaaccuccuccca

SEQ ID NO: 162470 - RNA, 19 nt, Artificial Sequence
  Description of Artificial Sequence: Synthetic oligonucleotide
cuauuggcgcaguuucuga

SEQ ID NO: 162471 - RNA, 19 nt, Artificial Sequence
  Description of Artificial Sequence: Synthetic oligonucleotide
uggcuaucauuagaacuaa

SEQ ID NO: 162472 - RNA, 19 nt, Artificial Sequence
  Description of Artificial Sequence: Synthetic oligonucleotide
uaucuaugcuugggcagac

SEQ ID NO: 162473 - RNA, 19 nt, Artificial Sequence
  Description of Artificial Sequence: Synthetic oligonucleotide
gcaacagcgacuugggcaa

SEQ ID NO: 162474 - RNA, 19 nt, Artificial Sequence
  Description of Artificial Sequence: Synthetic oligonucleotide
ggugguaccguuuaugguu

SEQ ID NO: 162475 - RNA, 19 nt, Artificial Sequence
  Description of Artificial Sequence: Synthetic oligonucleotide
caccaagguuuauggggag

SEQ ID NO: 162476 - RNA, 19 nt, Artificial Sequence
  Description of Artificial Sequence: Synthetic oligonucleotide
aagacgcuggagccaugau

SEQ ID NO: 162477 - RNA, 19 nt, Artificial Sequence
  Description of Artificial Sequence: Synthetic oligonucleotide
gugagaucaggcagacgcc

SEQ ID NO: 162478 - RNA, 19 nt, Artificial Sequence
  Description of Artificial Sequence: Synthetic oligonucleotide
gaauagcuggggcaaacuu

SEQ ID NO: 162479 - RNA, 19 nt, Artificial Sequence
  Description of Artificial Sequence: Synthetic oligonucleotide
uaaagacgcuggagccaug

SEQ ID NO: 162480 - RNA, 19 nt, Artificial Sequence
  Description of Artificial Sequence: Synthetic oligonucleotide
uccuacaaguugggcaagu

SEQ ID NO: 162481 - RNA, 19 nt, Artificial Sequence
  Description of Artificial Sequence: Synthetic oligonucleotide
ggccuauccucuacgagcc

SEQ ID NO: 162482 - RNA, 19 nt, Artificial Sequence
  Description of Artificial Sequence: Synthetic oligonucleotide
acgcuucuggguuugucua

SEQ ID NO: 162483 - RNA, 19 nt, Artificial Sequence
  Description of Artificial Sequence: Synthetic oligonucleotide
uuaccacgucacugccucc

SEQ ID NO: 162484 - RNA, 19 nt, Artificial Sequence
  Description of Artificial Sequence: Synthetic oligonucleotide
cggacaacugacaguaccc

SEQ ID NO: 162485 - RNA, 19 nt, Artificial Sequence
  Description of Artificial Sequence: Synthetic oligonucleotide
guguggcagucacaauagc

SEQ ID NO: 162486 - RNA, 19 nt, Artificial Sequence
  Description of Artificial Sequence: Synthetic oligonucleotide
ggguuugucuagaacuuac

SEQ ID NO: 162487 - RNA, 19 nt, Artificial Sequence
  Description of Artificial Sequence: Synthetic oligonucleotide
uggguuugucuagaacuua

SEQ ID NO: 162488 - RNA, 19 nt, Artificial Sequence
  Description of Artificial Sequence: Synthetic oligonucleotide
uggugagaucaggcagacg

SEQ ID NO: 162489 - RNA, 19 nt, Artificial Sequence
  Description of Artificial Sequence: Synthetic oligonucleotide
gggcaauuuaccacgucac

SEQ ID NO: 162490 - RNA, 19 nt, Artificial Sequence
  Description of Artificial Sequence: Synthetic oligonucleotide
auuaggcagugggaacuga

SEQ ID NO: 162491 - RNA, 19 nt, Artificial Sequence
  Description of Artificial Sequence: Synthetic oligonucleotide
auauauuaaugggguggua

SEQ ID NO: 162492 - RNA, 19 nt, Artificial Sequence
  Description of Artificial Sequence: Synthetic oligonucleotide
agacguggccacauucugu

SEQ ID NO: 162493 - RNA, 19 nt, Artificial Sequence
  Description of Artificial Sequence: Synthetic oligonucleotide
ugguaccguuuaugguuga

SEQ ID NO: 162494 - RNA, 19 nt, Artificial Sequence
  Description of Artificial Sequence: Synthetic oligonucleotide
cucuacgagccacccugug

SEQ ID NO: 162495 - RNA, 19 nt, Artificial Sequence
  Description of Artificial Sequence: Synthetic oligonucleotide
aucggacaacugacaguac

SEQ ID NO: 162496 - RNA, 19 nt, Artificial Sequence
  Description of Artificial Sequence: Synthetic oligonucleotide
agccaacuagauguccagu

SEQ ID NO: 162497 - RNA, 19 nt, Artificial Sequence
  Description of Artificial Sequence: Synthetic oligonucleotide
gaacgcuucuggguuuguc

SEQ ID NO: 162498 - RNA, 19 nt, Artificial Sequence
  Description of Artificial Sequence: Synthetic oligonucleotide
gcugauaaggccacuguua

SEQ ID NO: 162499 - RNA, 19 nt, Artificial Sequence
  Description of Artificial Sequence: Synthetic oligonucleotide
ccacacauauagaguggag

SEQ ID NO: 162500 - RNA, 19 nt, Artificial Sequence
  Description of Artificial Sequence: Synthetic oligonucleotide
uaccggugaacuggcugca

SEQ ID NO: 162501 - RNA, 19 nt, Artificial Sequence
  Description of Artificial Sequence: Synthetic oligonucleotide
acacuagcaggaguccaaa

SEQ ID NO: 162502 - RNA, 19 nt, Artificial Sequence
  Description of Artificial Sequence: Synthetic oligonucleotide
cucaaucucucaggcccac

SEQ ID NO: 162503 - RNA, 19 nt, Artificial Sequence
  Description of Artificial Sequence: Synthetic oligonucleotide
cauggucugggcguaaccu

SEQ ID NO: 162504 - RNA, 19 nt, Artificial Sequence
  Description of Artificial Sequence: Synthetic oligonucleotide
cuaucuacucaaggggugu

SEQ ID NO: 162505 - RNA, 19 nt, Artificial Sequence
  Description of Artificial Sequence: Synthetic oligonucleotide
guugggcaaguauuagcau

SEQ ID NO: 162506 - RNA, 19 nt, Artificial Sequence
  Description of Artificial Sequence: Synthetic oligonucleotide
gcagucacaauagcuaacu

SEQ ID NO: 162507 - RNA, 19 nt, Artificial Sequence
  Description of Artificial Sequence: Synthetic oligonucleotide
aucuaugcuugggcagaca

SEQ ID NO: 162508 - RNA, 19 nt, Artificial Sequence
  Description of Artificial Sequence: Synthetic oligonucleotide
ccauauuuaccggugaacu

SEQ ID NO: 162509 - RNA, 19 nt, Artificial Sequence
  Description of Artificial Sequence: Synthetic oligonucleotide
auuuaccggugaacuggcu

SEQ ID NO: 162510 - RNA, 19 nt, Artificial Sequence
  Description of Artificial Sequence: Synthetic oligonucleotide
uacccgagggcguccugua

SEQ ID NO: 162511 - RNA, 19 nt, Artificial Sequence
  Description of Artificial Sequence: Synthetic oligonucleotide
ggcaauuuaccacgucacu

SEQ ID NO: 162512 - RNA, 19 nt, Artificial Sequence
  Description of Artificial Sequence: Synthetic oligonucleotide
caauuuaauuuaggaugua

SEQ ID NO: 162513 - RNA, 19 nt, Artificial Sequence
  Description of Artificial Sequence: Synthetic oligonucleotide
cuauggguucugcuuccaa

SEQ ID NO: 162514 - RNA, 19 nt, Artificial Sequence
  Description of Artificial Sequence: Synthetic oligonucleotide
gcgcccauucugcacaauc

SEQ ID NO: 162515 - RNA, 19 nt, Artificial Sequence
  Description of Artificial Sequence: Synthetic oligonucleotide
aggugaagaacgggcuuua

SEQ ID NO: 162516 - RNA, 19 nt, Artificial Sequence
  Description of Artificial Sequence: Synthetic oligonucleotide
ccggauugcugaagagcag

SEQ ID NO: 162517 - RNA, 19 nt, Artificial Sequence
  Description of Artificial Sequence: Synthetic oligonucleotide
ggaguguuaugcacccaga

SEQ ID NO: 162518 - RNA, 19 nt, Artificial Sequence
  Description of Artificial Sequence: Synthetic oligonucleotide
gucucuugacuugcagaaa

SEQ ID NO: 162519 - RNA, 19 nt, Artificial Sequence
  Description of Artificial Sequence: Synthetic oligonucleotide
ccacuguuacugcuaccac

SEQ ID NO: 162520 - RNA, 19 nt, Artificial Sequence
  Description of Artificial Sequence: Synthetic oligonucleotide
ccggugaacuggcugcaug

SEQ ID NO: 162521 - RNA, 19 nt, Artificial Sequence
  Description of Artificial Sequence: Synthetic oligonucleotide
ccauuuccuauuggcgcag

SEQ ID NO: 162522 - RNA, 19 nt, Artificial Sequence
  Description of Artificial Sequence: Synthetic oligonucleotide
cacgggcucuaaagauuca

SEQ ID NO: 162523 - RNA, 19 nt, Artificial Sequence
  Description of Artificial Sequence: Synthetic oligonucleotide
gucugggcguaaccuccuc

SEQ ID NO: 162524 - RNA, 19 nt, Artificial Sequence
  Description of Artificial Sequence: Synthetic oligonucleotide
cuaugcuugggcagacauu

SEQ ID NO: 162525 - RNA, 19 nt, Artificial Sequence
  Description of Artificial Sequence: Synthetic oligonucleotide
guuucccgagaacgcuucu

SEQ ID NO: 162526 - RNA, 19 nt, Artificial Sequence
  Description of Artificial Sequence: Synthetic oligonucleotide
ggcuauugguuuggcuuga

SEQ ID NO: 162527 - RNA, 19 nt, Artificial Sequence
  Description of Artificial Sequence: Synthetic oligonucleotide
ccacgucacugccuccgag

SEQ ID NO: 162528 - RNA, 19 nt, Artificial Sequence
  Description of Artificial Sequence: Synthetic oligonucleotide
guacccgagggcguccugu

SEQ ID NO: 162529 - RNA, 19 nt, Artificial Sequence
  Description of Artificial Sequence: Synthetic oligonucleotide
cuguccuauuagccuugaa

SEQ ID NO: 162530 - RNA, 19 nt, Artificial Sequence
  Description of Artificial Sequence: Synthetic oligonucleotide
ccacgacguuuucuuugag

SEQ ID NO: 162531 - RNA, 19 nt, Artificial Sequence
  Description of Artificial Sequence: Synthetic oligonucleotide
gcgacuugggcaaaaccau

SEQ ID NO: 162532 - RNA, 19 nt, Artificial Sequence
  Description of Artificial Sequence: Synthetic oligonucleotide
ccuacccuuugaguccaug

SEQ ID NO: 162533 - RNA, 19 nt, Artificial Sequence
  Description of Artificial Sequence: Synthetic oligonucleotide
cggguaggguuccugagaa

SEQ ID NO: 162534 - RNA, 19 nt, Artificial Sequence
  Description of Artificial Sequence: Synthetic oligonucleotide
ggcguaaccuccucccauu

SEQ ID NO: 162535 - RNA, 19 nt, Artificial Sequence
  Description of Artificial Sequence: Synthetic oligonucleotide
cauuuccuauuggcgcagu

SEQ ID NO: 162536 - RNA, 19 nt, Artificial Sequence
  Description of Artificial Sequence: Synthetic oligonucleotide
ccuacaaguugggcaagua

SEQ ID NO: 162537 - RNA, 19 nt, Artificial Sequence
  Description of Artificial Sequence: Synthetic oligonucleotide
gguaccguuuaugguugau

SEQ ID NO: 162538 - RNA, 19 nt, Artificial Sequence
  Description of Artificial Sequence: Synthetic oligonucleotide
caguacccgagggcguccu

SEQ ID NO: 162539 - RNA, 19 nt, Artificial Sequence
  Description of Artificial Sequence: Synthetic oligonucleotide
ggcccacugaauacucauu

SEQ ID NO: 162540 - RNA, 19 nt, Artificial Sequence
  Description of Artificial Sequence: Synthetic oligonucleotide
ccucuacgagccacccugu

SEQ ID NO: 162541 - RNA, 19 nt, Artificial Sequence
  Description of Artificial Sequence: Synthetic oligonucleotide
cgagaacgcuucuggguuu

SEQ ID NO: 162542 - RNA, 19 nt, Artificial Sequence
  Description of Artificial Sequence: Synthetic oligonucleotide
gcgcuccaacaaggacgug

SEQ ID NO: 162543 - RNA, 19 nt, Artificial Sequence
  Description of Artificial Sequence: Synthetic oligonucleotide
cgagggcguccuguagcuc

SEQ ID NO: 162544 - RNA, 19 nt, Artificial Sequence
  Description of Artificial Sequence: Synthetic oligonucleotide
ggguagcggcagguugagu

SEQ ID NO: 162545 - RNA, 19 nt, Artificial Sequence
  Description of Artificial Sequence: Synthetic oligonucleotide
aauuauuucugguaagugc

SEQ ID NO: 162546 - RNA, 19 nt, Artificial Sequence
  Description of Artificial Sequence: Synthetic oligonucleotide
aaacuugacagcucgaucg

SEQ ID NO: 162547 - RNA, 19 nt, Artificial Sequence
  Description of Artificial Sequence: Synthetic oligonucleotide
uguaccaucauuaaauaag

SEQ ID NO: 162548 - RNA, 19 nt, Artificial Sequence
  Description of Artificial Sequence: Synthetic oligonucleotide
auauugagcgguuugaggc

SEQ ID NO: 162549 - RNA, 19 nt, Artificial Sequence
  Description of Artificial Sequence: Synthetic oligonucleotide
aaauauguauucuugccuc

SEQ ID NO: 162550 - RNA, 19 nt, Artificial Sequence
  Description of Artificial Sequence: Synthetic oligonucleotide
ucuccauuaaucuugagag

SEQ ID NO: 162551 - RNA, 19 nt, Artificial Sequence
  Description of Artificial Sequence: Synthetic oligonucleotide
aaacuuauuggcuuggcuc

SEQ ID NO: 162552 - RNA, 19 nt, Artificial Sequence
  Description of Artificial Sequence: Synthetic oligonucleotide
gauaauaacaccugcacug

SEQ ID NO: 162553 - RNA, 19 nt, Artificial Sequence
  Description of Artificial Sequence: Synthetic oligonucleotide
auauaaaguauacagagca

SEQ ID NO: 162554 - RNA, 19 nt, Artificial Sequence
  Description of Artificial Sequence: Synthetic oligonucleotide
aaauagcuuacucauugac

SEQ ID NO: 162555 - RNA, 19 nt, Artificial Sequence
  Description of Artificial Sequence: Synthetic oligonucleotide
gaugauucuaauuaacagc

SEQ ID NO: 162556 - RNA, 19 nt, Artificial Sequence
  Description of Artificial Sequence: Synthetic oligonucleotide
uugacuaagauuuuaauau

SEQ ID NO: 162557 - RNA, 19 nt, Artificial Sequence
  Description of Artificial Sequence: Synthetic oligonucleotide
agcacuacacaauaauucc

SEQ ID NO: 162558 - RNA, 19 nt, Artificial Sequence
  Description of Artificial Sequence: Synthetic oligonucleotide
auuauuucugguaagugcc

SEQ ID NO: 162559 - RNA, 19 nt, Artificial Sequence
  Description of Artificial Sequence: Synthetic oligonucleotide
uuucguguuaucuaaaugu

SEQ ID NO: 162560 - RNA, 19 nt, Artificial Sequence
  Description of Artificial Sequence: Synthetic oligonucleotide
uauuccugaaacaagggga

SEQ ID NO: 162561 - RNA, 19 nt, Artificial Sequence
  Description of Artificial Sequence: Synthetic oligonucleotide
ucaaauauagcuucaugca

SEQ ID NO: 162562 - RNA, 19 nt, Artificial Sequence
  Description of Artificial Sequence: Synthetic oligonucleotide
uuguguauaucacuucugg

SEQ ID NO: 162563 - RNA, 19 nt, Artificial Sequence
  Description of Artificial Sequence: Synthetic oligonucleotide
acagcuauuaaaccauagc

SEQ ID NO: 162564 - RNA, 19 nt, Artificial Sequence
  Description of Artificial Sequence: Synthetic oligonucleotide
uuuguaagaaggcauauua

SEQ ID NO: 162565 - RNA, 19 nt, Artificial Sequence
  Description of Artificial Sequence: Synthetic oligonucleotide
uuaucaaacaggcugucca

SEQ ID NO: 162566 - RNA, 19 nt, Artificial Sequence
  Description of Artificial Sequence: Synthetic oligonucleotide
uccauuaucgcuacaagcu

SEQ ID NO: 162567 - RNA, 19 nt, Artificial Sequence
  Description of Artificial Sequence: Synthetic oligonucleotide
uauuucagcuauaugguca

SEQ ID NO: 162568 - RNA, 19 nt, Artificial Sequence
  Description of Artificial Sequence: Synthetic oligonucleotide
uuccuuauaaucaaucuuc

SEQ ID NO: 162569 - RNA, 19 nt, Artificial Sequence
  Description of Artificial Sequence: Synthetic oligonucleotide
agucuuaaaauauguagug

SEQ ID NO: 162570 - RNA, 19 nt, Artificial Sequence
  Description of Artificial Sequence: Synthetic oligonucleotide
ucuaauuaacagcaagaca

SEQ ID NO: 162571 - RNA, 19 nt, Artificial Sequence
  Description of Artificial Sequence: Synthetic oligonucleotide
uucauagguacuuuuauaa

SEQ ID NO: 162572 - RNA, 19 nt, Artificial Sequence
  Description of Artificial Sequence: Synthetic oligonucleotide
ugaaacaaggggaagggac

SEQ ID NO: 162573 - RNA, 19 nt, Artificial Sequence
  Description of Artificial Sequence: Synthetic oligonucleotide
ugcacaaucaacugcaaac

SEQ ID NO: 162574 - RNA, 19 nt, Artificial Sequence
  Description of Artificial Sequence: Synthetic oligonucleotide
uauauugagcgguuugagg

SEQ ID NO: 162575 - RNA, 19 nt, Artificial Sequence
  Description of Artificial Sequence: Synthetic oligonucleotide
uugcuauuaaguccaaugc

SEQ ID NO: 162576 - RNA, 19 nt, Artificial Sequence
  Description of Artificial Sequence: Synthetic oligonucleotide
uagauaauaacaccugcac

SEQ ID NO: 162577 - RNA, 19 nt, Artificial Sequence
  Description of Artificial Sequence: Synthetic oligonucleotide
uauaucugaagcacuacac

SEQ ID NO: 162578 - RNA, 19 nt, Artificial Sequence
  Description of Artificial Sequence: Synthetic oligonucleotide
aaaucugucagacgaguga

SEQ ID NO: 162579 - RNA, 19 nt, Artificial Sequence
  Description of Artificial Sequence: Synthetic oligonucleotide
ucuaaauguuaaaaugaga

SEQ ID NO: 162580 - RNA, 19 nt, Artificial Sequence
  Description of Artificial Sequence: Synthetic oligonucleotide
ucgaucguggcauauaucu

SEQ ID NO: 162581 - RNA, 19 nt, Artificial Sequence
  Description of Artificial Sequence: Synthetic oligonucleotide
uugcuuacaaauauuccug

SEQ ID NO: 162582 - RNA, 19 nt, Artificial Sequence
  Description of Artificial Sequence: Synthetic oligonucleotide
uguauaucacuucuggaaa

SEQ ID NO: 162583 - RNA, 19 nt, Artificial Sequence
  Description of Artificial Sequence: Synthetic oligonucleotide
uuaugaauucuguagaauu

SEQ ID NO: 162584 - RNA, 19 nt, Artificial Sequence
  Description of Artificial Sequence: Synthetic oligonucleotide
cuauuaaguccaaugcucc

SEQ ID NO: 162585 - RNA, 19 nt, Artificial Sequence
  Description of Artificial Sequence: Synthetic oligonucleotide
ucgagcuucaaagugagcc

SEQ ID NO: 162586 - RNA, 19 nt, Artificial Sequence
  Description of Artificial Sequence: Synthetic oligonucleotide
aacagcauacugguguccc

SEQ ID NO: 162587 - RNA, 19 nt, Artificial Sequence
  Description of Artificial Sequence: Synthetic oligonucleotide
accguaugaauuucauugc

SEQ ID NO: 162588 - RNA, 19 nt, Artificial Sequence
  Description of Artificial Sequence: Synthetic oligonucleotide
uuauaaucaaucuuccaua

SEQ ID NO: 162589 - RNA, 19 nt, Artificial Sequence
  Description of Artificial Sequence: Synthetic oligonucleotide
ugacaugagaaacuugaca

SEQ ID NO: 162590 - RNA, 19 nt, Artificial Sequence
  Description of Artificial Sequence: Synthetic oligonucleotide
ucuuccauauauugagcgg

SEQ ID NO: 162591 - RNA, 19 nt, Artificial Sequence
  Description of Artificial Sequence: Synthetic oligonucleotide
uauuccuuauaaucaaucu

SEQ ID NO: 162592 - RNA, 19 nt, Artificial Sequence
  Description of Artificial Sequence: Synthetic oligonucleotide
uguagaucccacugaaucc

SEQ ID NO: 162593 - RNA, 19 nt, Artificial Sequence
  Description of Artificial Sequence: Synthetic oligonucleotide
uaaaguauacagagcauuc

SEQ ID NO: 162594 - RNA, 19 nt, Artificial Sequence
  Description of Artificial Sequence: Synthetic oligonucleotide
cugaguuugguguacagug

SEQ ID NO: 162595 - RNA, 19 nt, Artificial Sequence
  Description of Artificial Sequence: Synthetic oligonucleotide
ugggauguuauccacacau

SEQ ID NO: 162596 - RNA, 19 nt, Artificial Sequence
  Description of Artificial Sequence: Synthetic oligonucleotide
uucagcuauauggucaugg

SEQ ID NO: 162597 - RNA, 19 nt, Artificial Sequence
  Description of Artificial Sequence: Synthetic oligonucleotide
aagagggccauauuucgug

SEQ ID NO: 162598 - RNA, 19 nt, Artificial Sequence
  Description of Artificial Sequence: Synthetic oligonucleotide
agguuaaagcaaucuuucc

SEQ ID NO: 162599 - RNA, 19 nt, Artificial Sequence
  Description of Artificial Sequence: Synthetic oligonucleotide
gaucaguuacuccuuacug

SEQ ID NO: 162600 - RNA, 19 nt, Artificial Sequence
  Description of Artificial Sequence: Synthetic oligonucleotide
uguuaucuaaauguuaaaa

SEQ ID NO: 162601 - RNA, 19 nt, Artificial Sequence
  Description of Artificial Sequence: Synthetic oligonucleotide
auauuucagcuauaugguc

SEQ ID NO: 162602 - RNA, 19 nt, Artificial Sequence
  Description of Artificial Sequence: Synthetic oligonucleotide
uguugcuugcuaauuuucc

SEQ ID NO: 162603 - RNA, 19 nt, Artificial Sequence
  Description of Artificial Sequence: Synthetic oligonucleotide
uuaaucuugagaguguuau

SEQ ID NO: 162604 - RNA, 19 nt, Artificial Sequence
  Description of Artificial Sequence: Synthetic oligonucleotide
aauauguauucuugccucu

SEQ ID NO: 162605 - RNA, 19 nt, Artificial Sequence
  Description of Artificial Sequence: Synthetic oligonucleotide
uagguuaaagcaaucuuuc

SEQ ID NO: 162606 - RNA, 19 nt, Artificial Sequence
  Description of Artificial Sequence: Synthetic oligonucleotide
aauaaggugggacaccgua

SEQ ID NO: 162607 - RNA, 19 nt, Artificial Sequence
  Description of Artificial Sequence: Synthetic oligonucleotide
auaacaccugcacuguagg

SEQ ID NO: 162608 - RNA, 19 nt, Artificial Sequence
  Description of Artificial Sequence: Synthetic oligonucleotide
gaaccaaugacauaccucu

SEQ ID NO: 162609 - RNA, 19 nt, Artificial Sequence
  Description of Artificial Sequence: Synthetic oligonucleotide
ugacauaccucuguaauga

SEQ ID NO: 162610 - RNA, 19 nt, Artificial Sequence
  Description of Artificial Sequence: Synthetic oligonucleotide
uggucagaugacuaccugg

SEQ ID NO: 162611 - RNA, 19 nt, Artificial Sequence
  Description of Artificial Sequence: Synthetic oligonucleotide
acuacacaauaauuccugg

SEQ ID NO: 162612 - RNA, 19 nt, Artificial Sequence
  Description of Artificial Sequence: Synthetic oligonucleotide
uaucaaccugcaaucauca

SEQ ID NO: 162613 - RNA, 19 nt, Artificial Sequence
  Description of Artificial Sequence: Synthetic oligonucleotide
guaccaucauuaaauaagg

SEQ ID NO: 162614 - RNA, 19 nt, Artificial Sequence
  Description of Artificial Sequence: Synthetic oligonucleotide
ucauuaaauaaggugggac

SEQ ID NO: 162615 - RNA, 19 nt, Artificial Sequence
  Description of Artificial Sequence: Synthetic oligonucleotide
auauguagugauccuucac

SEQ ID NO: 162616 - RNA, 19 nt, Artificial Sequence
  Description of Artificial Sequence: Synthetic oligonucleotide
aaacacauccuguggucag

SEQ ID NO: 162617 - RNA, 19 nt, Artificial Sequence
  Description of Artificial Sequence: Synthetic oligonucleotide
uguagugcacaaucaacug

SEQ ID NO: 162618 - RNA, 19 nt, Artificial Sequence
  Description of Artificial Sequence: Synthetic oligonucleotide
auauaucugaagcacuaca

SEQ ID NO: 162619 - RNA, 19 nt, Artificial Sequence
  Description of Artificial Sequence: Synthetic oligonucleotide
uuaaucucaugucuucacu

SEQ ID NO: 162620 - RNA, 19 nt, Artificial Sequence
  Description of Artificial Sequence: Synthetic oligonucleotide
ggaugauucuaauuaacag

SEQ ID NO: 162621 - RNA, 19 nt, Artificial Sequence
  Description of Artificial Sequence: Synthetic oligonucleotide
ucacuuauauacauaucaa

SEQ ID NO: 162622 - RNA, 19 nt, Artificial Sequence
  Description of Artificial Sequence: Synthetic oligonucleotide
agauaauaacaccugcacu

SEQ ID NO: 162623 - RNA, 19 nt, Artificial Sequence
  Description of Artificial Sequence: Synthetic oligonucleotide
acgcucauugucuaagagg

SEQ ID NO: 162624 - RNA, 19 nt, Artificial Sequence
  Description of Artificial Sequence: Synthetic oligonucleotide
uucagguggaguuuguaac

SEQ ID NO: 162625 - RNA, 19 nt, Artificial Sequence
  Description of Artificial Sequence: Synthetic oligonucleotide
uacagcuauuaaaccauag

SEQ ID NO: 162626 - RNA, 19 nt, Artificial Sequence
  Description of Artificial Sequence: Synthetic oligonucleotide
uauuaaaccauagcuuugu

SEQ ID NO: 162627 - RNA, 19 nt, Artificial Sequence
  Description of Artificial Sequence: Synthetic oligonucleotide
ucaguuacuccuuacugaa

SEQ ID NO: 162628 - RNA, 19 nt, Artificial Sequence
  Description of Artificial Sequence: Synthetic oligonucleotide
cauuaaauaaggugggaca

SEQ ID NO: 162629 - RNA, 19 nt, Artificial Sequence
  Description of Artificial Sequence: Synthetic oligonucleotide
agaaucaguacacucuggu

SEQ ID NO: 162630 - RNA, 19 nt, Artificial Sequence
  Description of Artificial Sequence: Synthetic oligonucleotide
auuucguguuaucuaaaug

SEQ ID NO: 162631 - RNA, 19 nt, Artificial Sequence
  Description of Artificial Sequence: Synthetic oligonucleotide
guaagugccagucuuaaaa

SEQ ID NO: 162632 - RNA, 19 nt, Artificial Sequence
  Description of Artificial Sequence: Synthetic oligonucleotide
uugaguuguugcuauuaag

SEQ ID NO: 162633 - RNA, 19 nt, Artificial Sequence
  Description of Artificial Sequence: Synthetic oligonucleotide
gagguaguccugcaauucg

SEQ ID NO: 162634 - RNA, 19 nt, Artificial Sequence
  Description of Artificial Sequence: Synthetic oligonucleotide
aguugcauaaguaaaugca

SEQ ID NO: 162635 - RNA, 19 nt, Artificial Sequence
  Description of Artificial Sequence: Synthetic oligonucleotide
aaguauacagagcauucua

SEQ ID NO: 162636 - RNA, 19 nt, Artificial Sequence
  Description of Artificial Sequence: Synthetic oligonucleotide
guaguaucaaccugcaauc

SEQ ID NO: 162637 - RNA, 19 nt, Artificial Sequence
  Description of Artificial Sequence: Synthetic oligonucleotide
gugaucaaaaugccuaagc

SEQ ID NO: 162638 - RNA, 19 nt, Artificial Sequence
  Description of Artificial Sequence: Synthetic oligonucleotide
uaaggugggacaccguaug

SEQ ID NO: 162639 - RNA, 19 nt, Artificial Sequence
  Description of Artificial Sequence: Synthetic oligonucleotide
guauaucacuucuggaaag

SEQ ID NO: 162640 - RNA, 19 nt, Artificial Sequence
  Description of Artificial Sequence: Synthetic oligonucleotide
uguuaugaauucuguagaa

SEQ ID NO: 162641 - RNA, 19 nt, Artificial Sequence
  Description of Artificial Sequence: Synthetic oligonucleotide
guugugaccccaaaugccg

SEQ ID NO: 162642 - RNA, 19 nt, Artificial Sequence
  Description of Artificial Sequence: Synthetic oligonucleotide
aucaguuacuccuuacuga

SEQ ID NO: 162643 - RNA, 19 nt, Artificial Sequence
  Description of Artificial Sequence: Synthetic oligonucleotide
uuuagauccaggucuuuaa

SEQ ID NO: 162644 - RNA, 19 nt, Artificial Sequence
  Description of Artificial Sequence: Synthetic oligonucleotide
gaucguggcauauaucuga

SEQ ID NO: 162645 - RNA, 19 nt, Artificial Sequence
  Description of Artificial Sequence: Synthetic oligonucleotide
acuccuuacugaaggaugc

SEQ ID NO: 162646 - RNA, 19 nt, Artificial Sequence
  Description of Artificial Sequence: Synthetic oligonucleotide
uugcauaaguaaaugcaaa

SEQ ID NO: 162647 - RNA, 19 nt, Artificial Sequence
  Description of Artificial Sequence: Synthetic oligonucleotide
ugcauaaguaaaugcaaau

SEQ ID NO: 162648 - RNA, 19 nt, Artificial Sequence
  Description of Artificial Sequence: Synthetic oligonucleotide
acuuuaucaaucugugcga

SEQ ID NO: 162649 - RNA, 19 nt, Artificial Sequence
  Description of Artificial Sequence: Synthetic oligonucleotide
uagucgagcuucaaaguga

SEQ ID NO: 162650 - RNA, 19 nt, Artificial Sequence
  Description of Artificial Sequence: Synthetic oligonucleotide
uguguauaucacuucugga

SEQ ID NO: 162651 - RNA, 19 nt, Artificial Sequence
  Description of Artificial Sequence: Synthetic oligonucleotide
aauucgugcugagagguca

SEQ ID NO: 162652 - RNA, 19 nt, Artificial Sequence
  Description of Artificial Sequence: Synthetic oligonucleotide
acauuggucacuaaaacaa

SEQ ID NO: 162653 - RNA, 19 nt, Artificial Sequence
  Description of Artificial Sequence: Synthetic oligonucleotide
uguuauccacacauuggca

SEQ ID NO: 162654 - RNA, 19 nt, Artificial Sequence
  Description of Artificial Sequence: Synthetic oligonucleotide
uacauaucaaaaguaacuu

SEQ ID NO: 162655 - RNA, 19 nt, Artificial Sequence
  Description of Artificial Sequence: Synthetic oligonucleotide
guagucgagcuucaaagug

SEQ ID NO: 162656 - RNA, 19 nt, Artificial Sequence
  Description of Artificial Sequence: Synthetic oligonucleotide
uuaucaaucugugcgauuu

SEQ ID NO: 162657 - RNA, 19 nt, Artificial Sequence
  Description of Artificial Sequence: Synthetic oligonucleotide
uuuauuccuuauaaucaau

SEQ ID NO: 162658 - RNA, 19 nt, Artificial Sequence
  Description of Artificial Sequence: Synthetic oligonucleotide
augacuaccugguuuccag

SEQ ID NO: 162659 - RNA, 19 nt, Artificial Sequence
  Description of Artificial Sequence: Synthetic oligonucleotide
auuguauacuuuaacacaa

SEQ ID NO: 162660 - RNA, 19 nt, Artificial Sequence
  Description of Artificial Sequence: Synthetic oligonucleotide
ucaguuaaucucaugucuu

SEQ ID NO: 162661 - RNA, 19 nt, Artificial Sequence
  Description of Artificial Sequence: Synthetic oligonucleotide
aaaaccugaaacugacauu

SEQ ID NO: 162662 - RNA, 19 nt, Artificial Sequence
  Description of Artificial Sequence: Synthetic oligonucleotide
guccauuaucgcuacaagc

SEQ ID NO: 162663 - RNA, 19 nt, Artificial Sequence
  Description of Artificial Sequence: Synthetic oligonucleotide
guagugcacaaucaacugc

SEQ ID NO: 162664 - RNA, 19 nt, Artificial Sequence
  Description of Artificial Sequence: Synthetic oligonucleotide
augacauaccucuguaaug

SEQ ID NO: 162665 - RNA, 19 nt, Artificial Sequence
  Description of Artificial Sequence: Synthetic oligonucleotide
uucaccucguacuuugaca

SEQ ID NO: 162666 - RNA, 19 nt, Artificial Sequence
  Description of Artificial Sequence: Synthetic oligonucleotide
ucaccucguacuuugacaa

SEQ ID NO: 162667 - RNA, 19 nt, Artificial Sequence
  Description of Artificial Sequence: Synthetic oligonucleotide
gagaguguuaugaauucug

SEQ ID NO: 162668 - RNA, 19 nt, Artificial Sequence
  Description of Artificial Sequence: Synthetic oligonucleotide
uuucuacagagguugacua

SEQ ID NO: 162669 - RNA, 19 nt, Artificial Sequence
  Description of Artificial Sequence: Synthetic oligonucleotide
aguauacagagcauucuag

SEQ ID NO: 162670 - RNA, 19 nt, Artificial Sequence
  Description of Artificial Sequence: Synthetic oligonucleotide
agcuauauggucaugguaa

SEQ ID NO: 162671 - RNA, 19 nt, Artificial Sequence
  Description of Artificial Sequence: Synthetic oligonucleotide
uuguaagaaggcauauuau

SEQ ID NO: 162672 - RNA, 19 nt, Artificial Sequence
  Description of Artificial Sequence: Synthetic oligonucleotide
ugcuuacaaauauuccuga

SEQ ID NO: 162673 - RNA, 19 nt, Artificial Sequence
  Description of Artificial Sequence: Synthetic oligonucleotide
accauaacgucuaugccuc

SEQ ID NO: 162674 - RNA, 19 nt, Artificial Sequence
  Description of Artificial Sequence: Synthetic oligonucleotide
cauuuaagugugacaacug

SEQ ID NO: 162675 - RNA, 19 nt, Artificial Sequence
  Description of Artificial Sequence: Synthetic oligonucleotide
agaaccaaugacauaccuc

SEQ ID NO: 162676 - RNA, 19 nt, Artificial Sequence
  Description of Artificial Sequence: Synthetic oligonucleotide
uauuucguguuaucuaaau

SEQ ID NO: 162677 - RNA, 19 nt, Artificial Sequence
  Description of Artificial Sequence: Synthetic oligonucleotide
ugcuaauuuuccuuagcuc

SEQ ID NO: 162678 - RNA, 19 nt, Artificial Sequence
  Description of Artificial Sequence: Synthetic oligonucleotide
auaaaguauacagagcauu

SEQ ID NO: 162679 - RNA, 19 nt, Artificial Sequence
  Description of Artificial Sequence: Synthetic oligonucleotide
uaaugaacgucuccauuaa

SEQ ID NO: 162680 - RNA, 19 nt, Artificial Sequence
  Description of Artificial Sequence: Synthetic oligonucleotide
aaugcaccggcuccaagaa

SEQ ID NO: 162681 - RNA, 19 nt, Artificial Sequence
  Description of Artificial Sequence: Synthetic oligonucleotide
ugucgcauguucauuuccu

SEQ ID NO: 162682 - RNA, 19 nt, Artificial Sequence
  Description of Artificial Sequence: Synthetic oligonucleotide
ucugaccguagagagaucu

SEQ ID NO: 162683 - RNA, 19 nt, Artificial Sequence
  Description of Artificial Sequence: Synthetic oligonucleotide
ggguagucgagcuucaaag

SEQ ID NO: 162684 - RNA, 19 nt, Artificial Sequence
  Description of Artificial Sequence: Synthetic oligonucleotide
caaugcucccaacaaauuc

SEQ ID NO: 162685 - RNA, 19 nt, Artificial Sequence
  Description of Artificial Sequence: Synthetic oligonucleotide
accaaugacauaccucugu

SEQ ID NO: 162686 - RNA, 19 nt, Artificial Sequence
  Description of Artificial Sequence: Synthetic oligonucleotide
uggaguuuguaacuugcau

SEQ ID NO: 162687 - RNA, 19 nt, Artificial Sequence
  Description of Artificial Sequence: Synthetic oligonucleotide
uuaaggcuugaagauuucc

SEQ ID NO: 162688 - RNA, 19 nt, Artificial Sequence
  Description of Artificial Sequence: Synthetic oligonucleotide
uucguguuaucuaaauguu

SEQ ID NO: 162689 - RNA, 19 nt, Artificial Sequence
  Description of Artificial Sequence: Synthetic oligonucleotide
aaaccauagcuuuguguau

SEQ ID NO: 162690 - RNA, 19 nt, Artificial Sequence
  Description of Artificial Sequence: Synthetic oligonucleotide
acuauuuggagauguguuu

SEQ ID NO: 162691 - RNA, 19 nt, Artificial Sequence
  Description of Artificial Sequence: Synthetic oligonucleotide
agugauccuucacacauaa

SEQ ID NO: 162692 - RNA, 19 nt, Artificial Sequence
  Description of Artificial Sequence: Synthetic oligonucleotide
auauauugagcgguuugag

SEQ ID NO: 162693 - RNA, 19 nt, Artificial Sequence
  Description of Artificial Sequence: Synthetic oligonucleotide
acauaucaaaaguaacuua

SEQ ID NO: 162694 - RNA, 19 nt, Artificial Sequence
  Description of Artificial Sequence: Synthetic oligonucleotide
aacuugacagcucgaucgu

SEQ ID NO: 162695 - RNA, 19 nt, Artificial Sequence
  Description of Artificial Sequence: Synthetic oligonucleotide
aacaaaucugucagacgag

SEQ ID NO: 162696 - RNA, 19 nt, Artificial Sequence
  Description of Artificial Sequence: Synthetic oligonucleotide
uauaucacuucuggaaagu

SEQ ID NO: 162697 - RNA, 19 nt, Artificial Sequence
  Description of Artificial Sequence: Synthetic oligonucleotide
auuaaaccauagcuuugug

SEQ ID NO: 162698 - RNA, 19 nt, Artificial Sequence
  Description of Artificial Sequence: Synthetic oligonucleotide
caauaauuccuggauguug

SEQ ID NO: 162699 - RNA, 19 nt, Artificial Sequence
  Description of Artificial Sequence: Synthetic oligonucleotide
uuguaccaucauuaaauaa

SEQ ID NO: 162700 - RNA, 19 nt, Artificial Sequence
  Description of Artificial Sequence: Synthetic oligonucleotide
ugaaacugacauuggucac

SEQ ID NO: 162701 - RNA, 19 nt, Artificial Sequence
  Description of Artificial Sequence: Synthetic oligonucleotide
gaccauaacgucuaugccu

SEQ ID NO: 162702 - RNA, 19 nt, Artificial Sequence
  Description of Artificial Sequence: Synthetic oligonucleotide
uauugagcgguuugaggcu

SEQ ID NO: 162703 - RNA, 19 nt, Artificial Sequence
  Description of Artificial Sequence: Synthetic oligonucleotide
aaugccggaagcugugaau

SEQ ID NO: 162704 - RNA, 19 nt, Artificial Sequence
  Description of Artificial Sequence: Synthetic oligonucleotide
acaaacuuauuggcuuggc

SEQ ID NO: 162705 - RNA, 19 nt, Artificial Sequence
  Description of Artificial Sequence: Synthetic oligonucleotide
ugacuaagauuuuaauauu

SEQ ID NO: 162706 - RNA, 19 nt, Artificial Sequence
  Description of Artificial Sequence: Synthetic oligonucleotide
ucagcuauauggucauggu

SEQ ID NO: 162707 - RNA, 19 nt, Artificial Sequence
  Description of Artificial Sequence: Synthetic oligonucleotide
aguaucaaccugcaaucau

SEQ ID NO: 162708 - RNA, 19 nt, Artificial Sequence
  Description of Artificial Sequence: Synthetic oligonucleotide
agacgagugagcaugucag

SEQ ID NO: 162709 - RNA, 19 nt, Artificial Sequence
  Description of Artificial Sequence: Synthetic oligonucleotide
cagagguugacuaagauuu

SEQ ID NO: 162710 - RNA, 19 nt, Artificial Sequence
  Description of Artificial Sequence: Synthetic oligonucleotide
ugguaauccuuggugaugu

SEQ ID NO: 162711 - RNA, 19 nt, Artificial Sequence
  Description of Artificial Sequence: Synthetic oligonucleotide
auuccuaaauccaagcaau

SEQ ID NO: 162712 - RNA, 19 nt, Artificial Sequence
  Description of Artificial Sequence: Synthetic oligonucleotide
caucauuuaucaaucagcu

SEQ ID NO: 162713 - RNA, 19 nt, Artificial Sequence
  Description of Artificial Sequence: Synthetic oligonucleotide
guagauaauaacaccugca

SEQ ID NO: 162714 - RNA, 19 nt, Artificial Sequence
  Description of Artificial Sequence: Synthetic oligonucleotide
ugguguagcagaugcagau

SEQ ID NO: 162715 - RNA, 19 nt, Artificial Sequence
  Description of Artificial Sequence: Synthetic oligonucleotide
agugacauacagugguagu

SEQ ID NO: 162716 - RNA, 19 nt, Artificial Sequence
  Description of Artificial Sequence: Synthetic oligonucleotide
ucauugcacuggaagaaau

SEQ ID NO: 162717 - RNA, 19 nt, Artificial Sequence
  Description of Artificial Sequence: Synthetic oligonucleotide
aggaugauucuaauuaaca

SEQ ID NO: 162718 - RNA, 19 nt, Artificial Sequence
  Description of Artificial Sequence: Synthetic oligonucleotide
gugaccagcccauuuugag

SEQ ID NO: 162719 - RNA, 19 nt, Artificial Sequence
  Description of Artificial Sequence: Synthetic oligonucleotide
uaccaucauuaaauaaggu

SEQ ID NO: 162720 - RNA, 19 nt, Artificial Sequence
  Description of Artificial Sequence: Synthetic oligonucleotide
ucacugaccauaacgucua

SEQ ID NO: 162721 - RNA, 19 nt, Artificial Sequence
  Description of Artificial Sequence: Synthetic oligonucleotide
aaugaacgucuccauuaau

SEQ ID NO: 162722 - RNA, 19 nt, Artificial Sequence
  Description of Artificial Sequence: Synthetic oligonucleotide
gcaagaauccaagagggcc

SEQ ID NO: 162723 - RNA, 19 nt, Artificial Sequence
  Description of Artificial Sequence: Synthetic oligonucleotide
aacgucuaugccuccuggu

SEQ ID NO: 162724 - RNA, 19 nt, Artificial Sequence
  Description of Artificial Sequence: Synthetic oligonucleotide
acugucgcauguucauuuc

SEQ ID NO: 162725 - RNA, 19 nt, Artificial Sequence
  Description of Artificial Sequence: Synthetic oligonucleotide
gugaaugcccugaagcucc

SEQ ID NO: 162726 - RNA, 19 nt, Artificial Sequence
  Description of Artificial Sequence: Synthetic oligonucleotide
ucguguuaucuaaauguua

SEQ ID NO: 162727 - RNA, 19 nt, Artificial Sequence
  Description of Artificial Sequence: Synthetic oligonucleotide
uauagacaccugaucaguu

SEQ ID NO: 162728 - RNA, 19 nt, Artificial Sequence
  Description of Artificial Sequence: Synthetic oligonucleotide
auuaguaguugcauaagua

SEQ ID NO: 162729 - RNA, 19 nt, Artificial Sequence
  Description of Artificial Sequence: Synthetic oligonucleotide
gguaguaucaaccugcaau

SEQ ID NO: 162730 - RNA, 19 nt, Artificial Sequence
  Description of Artificial Sequence: Synthetic oligonucleotide
acgucuaugccuccuggug

SEQ ID NO: 162731 - RNA, 19 nt, Artificial Sequence
  Description of Artificial Sequence: Synthetic oligonucleotide
guaguccugcaauucgugc

SEQ ID NO: 162732 - RNA, 19 nt, Artificial Sequence
  Description of Artificial Sequence: Synthetic oligonucleotide
uaugccuccugguguagca

SEQ ID NO: 162733 - RNA, 19 nt, Artificial Sequence
  Description of Artificial Sequence: Synthetic oligonucleotide
aaaugccggaagcugugaa

SEQ ID NO: 162734 - RNA, 19 nt, Artificial Sequence
  Description of Artificial Sequence: Synthetic oligonucleotide
auuccuuguagaucccacu

SEQ ID NO: 162735 - RNA, 19 nt, Artificial Sequence
  Description of Artificial Sequence: Synthetic oligonucleotide
cuaauucacaaaguuguga

SEQ ID NO: 162736 - RNA, 19 nt, Artificial Sequence
  Description of Artificial Sequence: Synthetic oligonucleotide
cuuacugaaggaugcacaa

SEQ ID NO: 162737 - RNA, 19 nt, Artificial Sequence
  Description of Artificial Sequence: Synthetic oligonucleotide
ucugugcgauuuucuggcg

SEQ ID NO: 162738 - RNA, 19 nt, Artificial Sequence
  Description of Artificial Sequence: Synthetic oligonucleotide
uuccuaaauccaagcaauc

SEQ ID NO: 162739 - RNA, 19 nt, Artificial Sequence
  Description of Artificial Sequence: Synthetic oligonucleotide
acagaucugcucagugucc

SEQ ID NO: 162740 - RNA, 19 nt, Artificial Sequence
  Description of Artificial Sequence: Synthetic oligonucleotide
guguacaguggccauuagc

SEQ ID NO: 162741 - RNA, 19 nt, Artificial Sequence
  Description of Artificial Sequence: Synthetic oligonucleotide
cagcuauuaaaccauagcu

SEQ ID NO: 162742 - RNA, 19 nt, Artificial Sequence
  Description of Artificial Sequence: Synthetic oligonucleotide
uuguauacuuuaacacaau

SEQ ID NO: 162743 - RNA, 19 nt, Artificial Sequence
  Description of Artificial Sequence: Synthetic oligonucleotide
cagucuuaaaauauguagu

SEQ ID NO: 162744 - RNA, 19 nt, Artificial Sequence
  Description of Artificial Sequence: Synthetic oligonucleotide
guugcauaaguaaaugcaa

SEQ ID NO: 162745 - RNA, 19 nt, Artificial Sequence
  Description of Artificial Sequence: Synthetic oligonucleotide
aagugagcccggaucacag

SEQ ID NO: 162746 - RNA, 19 nt, Artificial Sequence
  Description of Artificial Sequence: Synthetic oligonucleotide
agcuauuaaaccauagcuu

SEQ ID NO: 162747 - RNA, 19 nt, Artificial Sequence
  Description of Artificial Sequence: Synthetic oligonucleotide
guacuucuggccccgacac

SEQ ID NO: 162748 - RNA, 19 nt, Artificial Sequence
  Description of Artificial Sequence: Synthetic oligonucleotide
ugagaguguuaugaauucu

SEQ ID NO: 162749 - RNA, 19 nt, Artificial Sequence
  Description of Artificial Sequence: Synthetic oligonucleotide
aaggugggacaccguauga

SEQ ID NO: 162750 - RNA, 19 nt, Artificial Sequence
  Description of Artificial Sequence: Synthetic oligonucleotide
uucuacagagguugacuaa

SEQ ID NO: 162751 - RNA, 19 nt, Artificial Sequence
  Description of Artificial Sequence: Synthetic oligonucleotide
auaccucuguaaugaaagu

SEQ ID NO: 162752 - RNA, 19 nt, Artificial Sequence
  Description of Artificial Sequence: Synthetic oligonucleotide
gcuauuaaguccaaugcuc

SEQ ID NO: 162753 - RNA, 19 nt, Artificial Sequence
  Description of Artificial Sequence: Synthetic oligonucleotide
auagacaccugaucaguua

SEQ ID NO: 162754 - RNA, 19 nt, Artificial Sequence
  Description of Artificial Sequence: Synthetic oligonucleotide
ugacagaugggauguuauc

SEQ ID NO: 162755 - RNA, 19 nt, Artificial Sequence
  Description of Artificial Sequence: Synthetic oligonucleotide
cauauauugagcgguuuga

SEQ ID NO: 162756 - RNA, 19 nt, Artificial Sequence
  Description of Artificial Sequence: Synthetic oligonucleotide
gcgguuugaggcuuuaccc

SEQ ID NO: 162757 - RNA, 19 nt, Artificial Sequence
  Description of Artificial Sequence: Synthetic oligonucleotide
cauauaucugaagcacuac

SEQ ID NO: 162758 - RNA, 19 nt, Artificial Sequence
  Description of Artificial Sequence: Synthetic oligonucleotide
ugcacuguaggcugaguuu

SEQ ID NO: 162759 - RNA, 19 nt, Artificial Sequence
  Description of Artificial Sequence: Synthetic oligonucleotide
auauguauucuugccucug

SEQ ID NO: 162760 - RNA, 19 nt, Artificial Sequence
  Description of Artificial Sequence: Synthetic oligonucleotide
guagaucccacugaaucca

SEQ ID NO: 162761 - RNA, 19 nt, Artificial Sequence
  Description of Artificial Sequence: Synthetic oligonucleotide
aaccugaaacugacauugg

SEQ ID NO: 162762 - RNA, 19 nt, Artificial Sequence
  Description of Artificial Sequence: Synthetic oligonucleotide
agaugacuaccugguuucc

SEQ ID NO: 162763 - RNA, 19 nt, Artificial Sequence
  Description of Artificial Sequence: Synthetic oligonucleotide
ugcagaugucugcuccuug

SEQ ID NO: 162764 - RNA, 19 nt, Artificial Sequence
  Description of Artificial Sequence: Synthetic oligonucleotide
accggcuccaagaacuaac

SEQ ID NO: 162765 - RNA, 19 nt, Artificial Sequence
  Description of Artificial Sequence: Synthetic oligonucleotide
auaaucaaucuuccauaua

SEQ ID NO: 162766 - RNA, 19 nt, Artificial Sequence
  Description of Artificial Sequence: Synthetic oligonucleotide
ucgaagacagggccaaauu

SEQ ID NO: 162767 - RNA, 19 nt, Artificial Sequence
  Description of Artificial Sequence: Synthetic oligonucleotide
caaugcaccggcuccaaga

SEQ ID NO: 162768 - RNA, 19 nt, Artificial Sequence
  Description of Artificial Sequence: Synthetic oligonucleotide
augccggaagcugugaaug

SEQ ID NO: 162769 - RNA, 19 nt, Artificial Sequence
  Description of Artificial Sequence: Synthetic oligonucleotide
uuuacagccugggaaguuu

SEQ ID NO: 162770 - RNA, 19 nt, Artificial Sequence
  Description of Artificial Sequence: Synthetic oligonucleotide
agucgagcuucaaagugag

SEQ ID NO: 162771 - RNA, 19 nt, Artificial Sequence
  Description of Artificial Sequence: Synthetic oligonucleotide
agaguguuaugaauucugu

SEQ ID NO: 162772 - RNA, 19 nt, Artificial Sequence
  Description of Artificial Sequence: Synthetic oligonucleotide
ucuguuuaucccuggucuu

SEQ ID NO: 162773 - RNA, 19 nt, Artificial Sequence
  Description of Artificial Sequence: Synthetic oligonucleotide
accucguacuuugacaaca

SEQ ID NO: 162774 - RNA, 19 nt, Artificial Sequence
  Description of Artificial Sequence: Synthetic oligonucleotide
guaagaaggcauauuauau

SEQ ID NO: 162775 - RNA, 19 nt, Artificial Sequence
  Description of Artificial Sequence: Synthetic oligonucleotide
cugucgcauguucauuucc

SEQ ID NO: 162776 - RNA, 19 nt, Artificial Sequence
  Description of Artificial Sequence: Synthetic oligonucleotide
gaguguuaugaauucugua

SEQ ID NO: 162777 - RNA, 19 nt, Artificial Sequence
  Description of Artificial Sequence: Synthetic oligonucleotide
aucauuuaucaaucagcuu

SEQ ID NO: 162778 - RNA, 19 nt, Artificial Sequence
  Description of Artificial Sequence: Synthetic oligonucleotide
agguggaguuuguaacuug

SEQ ID NO: 162779 - RNA, 19 nt, Artificial Sequence
  Description of Artificial Sequence: Synthetic oligonucleotide
auuccugaaacaaggggaa

SEQ ID NO: 162780 - RNA, 19 nt, Artificial Sequence
  Description of Artificial Sequence: Synthetic oligonucleotide
cuguggucagaugacuacc

SEQ ID NO: 162781 - RNA, 19 nt, Artificial Sequence
  Description of Artificial Sequence: Synthetic oligonucleotide
uggccauuagcuucaguuu

SEQ ID NO: 162782 - RNA, 19 nt, Artificial Sequence
  Description of Artificial Sequence: Synthetic oligonucleotide
uccuguggucagaugacua

SEQ ID NO: 162783 - RNA, 19 nt, Artificial Sequence
  Description of Artificial Sequence: Synthetic oligonucleotide
gcuuccaacgcucauuguc

SEQ ID NO: 162784 - RNA, 19 nt, Artificial Sequence
  Description of Artificial Sequence: Synthetic oligonucleotide
ccuaaaacaccaggcaucc

SEQ ID NO: 162785 - RNA, 19 nt, Artificial Sequence
  Description of Artificial Sequence: Synthetic oligonucleotide
gcuauuaaaccauagcuuu

SEQ ID NO: 162786 - RNA, 19 nt, Artificial Sequence
  Description of Artificial Sequence: Synthetic oligonucleotide
uuccauauauugagcgguu

SEQ ID NO: 162787 - RNA, 19 nt, Artificial Sequence
  Description of Artificial Sequence: Synthetic oligonucleotide
ucguggcauauaucugaag

SEQ ID NO: 162788 - RNA, 19 nt, Artificial Sequence
  Description of Artificial Sequence: Synthetic oligonucleotide
auuuagauccaggucuuua

SEQ ID NO: 162789 - RNA, 19 nt, Artificial Sequence
  Description of Artificial Sequence: Synthetic oligonucleotide
ugccuaagcaugcuccauu

SEQ ID NO: 162790 - RNA, 19 nt, Artificial Sequence
  Description of Artificial Sequence: Synthetic oligonucleotide
augguaauccuuggugaug

SEQ ID NO: 162791 - RNA, 19 nt, Artificial Sequence
  Description of Artificial Sequence: Synthetic oligonucleotide
caguuacuccuuacugaag

SEQ ID NO: 162792 - RNA, 19 nt, Artificial Sequence
  Description of Artificial Sequence: Synthetic oligonucleotide
auuuguaagaaggcauauu

SEQ ID NO: 162793 - RNA, 19 nt, Artificial Sequence
  Description of Artificial Sequence: Synthetic oligonucleotide
ugacuaccugguuuccagu

SEQ ID NO: 162794 - RNA, 19 nt, Artificial Sequence
  Description of Artificial Sequence: Synthetic oligonucleotide
gaaacugacauuggucacu

SEQ ID NO: 162795 - RNA, 19 nt, Artificial Sequence
  Description of Artificial Sequence: Synthetic oligonucleotide
ugguaagugccagucuuaa

SEQ ID NO: 162796 - RNA, 19 nt, Artificial Sequence
  Description of Artificial Sequence: Synthetic oligonucleotide
gacuaagauuuuaauauuu

SEQ ID NO: 162797 - RNA, 19 nt, Artificial Sequence
  Description of Artificial Sequence: Synthetic oligonucleotide
cuuccaacgcucauugucu

SEQ ID NO: 162798 - RNA, 19 nt, Artificial Sequence
  Description of Artificial Sequence: Synthetic oligonucleotide
ccauauauugagcgguuug

SEQ ID NO: 162799 - RNA, 19 nt, Artificial Sequence
  Description of Artificial Sequence: Synthetic oligonucleotide
aggcuuuacccagugacau

SEQ ID NO: 162800 - RNA, 19 nt, Artificial Sequence
  Description of Artificial Sequence: Synthetic oligonucleotide
aaccaaugacauaccucug

SEQ ID NO: 162801 - RNA, 19 nt, Artificial Sequence
  Description of Artificial Sequence: Synthetic oligonucleotide
cagacgagugagcauguca

SEQ ID NO: 162802 - RNA, 19 nt, Artificial Sequence
  Description of Artificial Sequence: Synthetic oligonucleotide
guggucagaugacuaccug

SEQ ID NO: 162803 - RNA, 19 nt, Artificial Sequence
  Description of Artificial Sequence: Synthetic oligonucleotide
ucgcuacaagcuuggcuga

SEQ ID NO: 162804 - RNA, 19 nt, Artificial Sequence
  Description of Artificial Sequence: Synthetic oligonucleotide
guguuaucuaaauguuaaa

SEQ ID NO: 162805 - RNA, 19 nt, Artificial Sequence
  Description of Artificial Sequence: Synthetic oligonucleotide
gagugagcaugucaguggu

SEQ ID NO: 162806 - RNA, 19 nt, Artificial Sequence
  Description of Artificial Sequence: Synthetic oligonucleotide
acaccguaugaauuucauu

SEQ ID NO: 162807 - RNA, 19 nt, Artificial Sequence
  Description of Artificial Sequence: Synthetic oligonucleotide
uagugauccuucacacaua

SEQ ID NO: 162808 - RNA, 19 nt, Artificial Sequence
  Description of Artificial Sequence: Synthetic oligonucleotide
cguaugaauuucauugcac

SEQ ID NO: 162809 - RNA, 19 nt, Artificial Sequence
  Description of Artificial Sequence: Synthetic oligonucleotide
ugguguacaguggccauua

SEQ ID NO: 162810 - RNA, 19 nt, Artificial Sequence
  Description of Artificial Sequence: Synthetic oligonucleotide
cugaccguagagagaucug

SEQ ID NO: 162811 - RNA, 19 nt, Artificial Sequence
  Description of Artificial Sequence: Synthetic oligonucleotide
agguugacuaagauuuuaa

SEQ ID NO: 162812 - RNA, 19 nt, Artificial Sequence
  Description of Artificial Sequence: Synthetic oligonucleotide
cuauguguucuuuuggauu

SEQ ID NO: 162813 - RNA, 19 nt, Artificial Sequence
  Description of Artificial Sequence: Synthetic oligonucleotide
cguguuaucuaaauguuaa

SEQ ID NO: 162814 - RNA, 19 nt, Artificial Sequence
  Description of Artificial Sequence: Synthetic oligonucleotide
ccaagcaaucaaaagaugu

SEQ ID NO: 162815 - RNA, 19 nt, Artificial Sequence
  Description of Artificial Sequence: Synthetic oligonucleotide
uccaacgcucauugucuaa

SEQ ID NO: 162816 - RNA, 19 nt, Artificial Sequence
  Description of Artificial Sequence: Synthetic oligonucleotide
ccggaucacaggaauguag

SEQ ID NO: 162817 - RNA, 19 nt, Artificial Sequence
  Description of Artificial Sequence: Synthetic oligonucleotide
gccuaagcaugcuccauug

SEQ ID NO: 162818 - RNA, 19 nt, Artificial Sequence
  Description of Artificial Sequence: Synthetic oligonucleotide
agggccauauuucguguua

SEQ ID NO: 162819 - RNA, 19 nt, Artificial Sequence
  Description of Artificial Sequence: Synthetic oligonucleotide
gauccuucacacauaacuu

SEQ ID NO: 162820 - RNA, 19 nt, Artificial Sequence
  Description of Artificial Sequence: Synthetic oligonucleotide
aucccuggucuucacuuau

SEQ ID NO: 162821 - RNA, 19 nt, Artificial Sequence
  Description of Artificial Sequence: Synthetic oligonucleotide
cuugagguaguccugcaau

SEQ ID NO: 162822 - RNA, 19 nt, Artificial Sequence
  Description of Artificial Sequence: Synthetic oligonucleotide
uuaucgcuacaagcuuggc

SEQ ID NO: 162823 - RNA, 19 nt, Artificial Sequence
  Description of Artificial Sequence: Synthetic oligonucleotide
gacauaccucuguaaugaa

SEQ ID NO: 162824 - RNA, 19 nt, Artificial Sequence
  Description of Artificial Sequence: Synthetic oligonucleotide
gacgugcucuuccucccac

SEQ ID NO: 162825 - RNA, 19 nt, Artificial Sequence
  Description of Artificial Sequence: Synthetic oligonucleotide
cucgaucguggcauauauc

SEQ ID NO: 162826 - RNA, 19 nt, Artificial Sequence
  Description of Artificial Sequence: Synthetic oligonucleotide
uuccaacgcucauugucua

SEQ ID NO: 162827 - RNA, 19 nt, Artificial Sequence
  Description of Artificial Sequence: Synthetic oligonucleotide
auaucacuucuggaaagua

SEQ ID NO: 162828 - RNA, 19 nt, Artificial Sequence
  Description of Artificial Sequence: Synthetic oligonucleotide
gagguugacuaagauuuua

SEQ ID NO: 162829 - RNA, 19 nt, Artificial Sequence
  Description of Artificial Sequence: Synthetic oligonucleotide
uccauauauugagcgguuu

SEQ ID NO: 162830 - RNA, 19 nt, Artificial Sequence
  Description of Artificial Sequence: Synthetic oligonucleotide
auaaggugggacaccguau

SEQ ID NO: 162831 - RNA, 19 nt, Artificial Sequence
  Description of Artificial Sequence: Synthetic oligonucleotide
caauucgugcugagagguc

SEQ ID NO: 162832 - RNA, 19 nt, Artificial Sequence
  Description of Artificial Sequence: Synthetic oligonucleotide
cuguccauuaucgcuacaa

SEQ ID NO: 162833 - RNA, 19 nt, Artificial Sequence
  Description of Artificial Sequence: Synthetic oligonucleotide
uggcaacuucuugaauuga

SEQ ID NO: 162834 - RNA, 19 nt, Artificial Sequence
  Description of Artificial Sequence: Synthetic oligonucleotide
auauuucguguuaucuaaa

SEQ ID NO: 162835 - RNA, 19 nt, Artificial Sequence
  Description of Artificial Sequence: Synthetic oligonucleotide
guuaugaauucuguagaau

SEQ ID NO: 162836 - RNA, 19 nt, Artificial Sequence
  Description of Artificial Sequence: Synthetic oligonucleotide
agguaguccugcaauucgu

SEQ ID NO: 162837 - RNA, 19 nt, Artificial Sequence
  Description of Artificial Sequence: Synthetic oligonucleotide
cacuauuuggagauguguu

SEQ ID NO: 162838 - RNA, 19 nt, Artificial Sequence
  Description of Artificial Sequence: Synthetic oligonucleotide
caaacuuauuggcuuggcu

SEQ ID NO: 162839 - RNA, 19 nt, Artificial Sequence
  Description of Artificial Sequence: Synthetic oligonucleotide
ggaguuuguaacuugcauu

SEQ ID NO: 162840 - RNA, 19 nt, Artificial Sequence
  Description of Artificial Sequence: Synthetic oligonucleotide
aucaaccugcaaucaucau

SEQ ID NO: 162841 - RNA, 19 nt, Artificial Sequence
  Description of Artificial Sequence: Synthetic oligonucleotide
aacauccguguuuguucuu

SEQ ID NO: 162842 - RNA, 19 nt, Artificial Sequence
  Description of Artificial Sequence: Synthetic oligonucleotide
cccgccucaguucacacug

SEQ ID NO: 162843 - RNA, 19 nt, Artificial Sequence
  Description of Artificial Sequence: Synthetic oligonucleotide
uuucagcuauauggucaug

SEQ ID NO: 162844 - RNA, 19 nt, Artificial Sequence
  Description of Artificial Sequence: Synthetic oligonucleotide
gguaguccugcaauucgug

SEQ ID NO: 162845 - RNA, 19 nt, Artificial Sequence
  Description of Artificial Sequence: Synthetic oligonucleotide
uagcuuacucauugaccuu

SEQ ID NO: 162846 - RNA, 19 nt, Artificial Sequence
  Description of Artificial Sequence: Synthetic oligonucleotide
caaagugagcccggaucac

SEQ ID NO: 162847 - RNA, 19 nt, Artificial Sequence
  Description of Artificial Sequence: Synthetic oligonucleotide
aacugacauuggucacuaa

SEQ ID NO: 162848 - RNA, 19 nt, Artificial Sequence
  Description of Artificial Sequence: Synthetic oligonucleotide
guaggcugaguuuggugua

SEQ ID NO: 162849 - RNA, 19 nt, Artificial Sequence
  Description of Artificial Sequence: Synthetic oligonucleotide
ccaaaugccggaagcugug

SEQ ID NO: 162850 - RNA, 19 nt, Artificial Sequence
  Description of Artificial Sequence: Synthetic oligonucleotide
ggccauuagcuucaguuua

SEQ ID NO: 162851 - RNA, 19 nt, Artificial Sequence
  Description of Artificial Sequence: Synthetic oligonucleotide
ggcaacuacagcuguguua

SEQ ID NO: 162852 - RNA, 19 nt, Artificial Sequence
  Description of Artificial Sequence: Synthetic oligonucleotide
caacgcucauugucuaaga

SEQ ID NO: 162853 - RNA, 19 nt, Artificial Sequence
  Description of Artificial Sequence: Synthetic oligonucleotide
caacauccguguuuguucu

SEQ ID NO: 162854 - RNA, 19 nt, Artificial Sequence
  Description of Artificial Sequence: Synthetic oligonucleotide
uauuuagauccaggucuuu

SEQ ID NO: 162855 - RNA, 19 nt, Artificial Sequence
  Description of Artificial Sequence: Synthetic oligonucleotide
cugugcgauuuucuggcga

SEQ ID NO: 162856 - RNA, 19 nt, Artificial Sequence
  Description of Artificial Sequence: Synthetic oligonucleotide
ccaacgcucauugucuaag

SEQ ID NO: 162857 - RNA, 19 nt, Artificial Sequence
  Description of Artificial Sequence: Synthetic oligonucleotide
caccucguacuuugacaac

SEQ ID NO: 162858 - RNA, 19 nt, Artificial Sequence
  Description of Artificial Sequence: Synthetic oligonucleotide
auugagcgguuugaggcuu

SEQ ID NO: 162859 - RNA, 19 nt, Artificial Sequence
  Description of Artificial Sequence: Synthetic oligonucleotide
cauaaugaacgucuccauu

SEQ ID NO: 162860 - RNA, 19 nt, Artificial Sequence
  Description of Artificial Sequence: Synthetic oligonucleotide
caugguaauccuuggugau

SEQ ID NO: 162861 - RNA, 19 nt, Artificial Sequence
  Description of Artificial Sequence: Synthetic oligonucleotide
gguccaaagaaaccugagu

SEQ ID NO: 162862 - RNA, 19 nt, Artificial Sequence
  Description of Artificial Sequence: Synthetic oligonucleotide
agguaguaucaaccugcaa

SEQ ID NO: 162863 - RNA, 19 nt, Artificial Sequence
  Description of Artificial Sequence: Synthetic oligonucleotide
guggaguuuguaacuugca

SEQ ID NO: 162864 - RNA, 19 nt, Artificial Sequence
  Description of Artificial Sequence: Synthetic oligonucleotide
aacuugcaaugcaccggcu

SEQ ID NO: 162865 - RNA, 19 nt, Artificial Sequence
  Description of Artificial Sequence: Synthetic oligonucleotide
gguagucgagcuucaaagu

SEQ ID NO: 162866 - RNA, 19 nt, Artificial Sequence
  Description of Artificial Sequence: Synthetic oligonucleotide
cagcuauauggucauggua

SEQ ID NO: 162867 - RNA, 19 nt, Artificial Sequence
  Description of Artificial Sequence: Synthetic oligonucleotide
cuacaagcuuggcugauau

SEQ ID NO: 162868 - RNA, 19 nt, Artificial Sequence
  Description of Artificial Sequence: Synthetic oligonucleotide
ucccuggucuucacuuaua

SEQ ID NO: 162869 - RNA, 19 nt, Artificial Sequence
  Description of Artificial Sequence: Synthetic oligonucleotide
agccuggauuuuaaaaguu

SEQ ID NO: 162870 - RNA, 19 nt, Artificial Sequence
  Description of Artificial Sequence: Synthetic oligonucleotide
aucguggcauauaucugaa

SEQ ID NO: 162871 - RNA, 19 nt, Artificial Sequence
  Description of Artificial Sequence: Synthetic oligonucleotide
gucgcauguucauuuccua

SEQ ID NO: 162872 - RNA, 19 nt, Artificial Sequence
  Description of Artificial Sequence: Synthetic oligonucleotide
gccuggauuuuaaaaguuc

SEQ ID NO: 162873 - RNA, 19 nt, Artificial Sequence
  Description of Artificial Sequence: Synthetic oligonucleotide
uugguguacaguggccauu

SEQ ID NO: 162874 - RNA, 19 nt, Artificial Sequence
  Description of Artificial Sequence: Synthetic oligonucleotide
acacauccuguggucagau

SEQ ID NO: 162875 - RNA, 19 nt, Artificial Sequence
  Description of Artificial Sequence: Synthetic oligonucleotide
cuuauuggcuuggcucuga

SEQ ID NO: 162876 - RNA, 19 nt, Artificial Sequence
  Description of Artificial Sequence: Synthetic oligonucleotide
caagagggccauauuucgu

SEQ ID NO: 162877 - RNA, 19 nt, Artificial Sequence
  Description of Artificial Sequence: Synthetic oligonucleotide
uucugaccguagagagauc

SEQ ID NO: 162878 - RNA, 19 nt, Artificial Sequence
  Description of Artificial Sequence: Synthetic oligonucleotide
aggcaacuacagcuguguu

SEQ ID NO: 162879 - RNA, 19 nt, Artificial Sequence
  Description of Artificial Sequence: Synthetic oligonucleotide
ccguaugaauuucauugca

SEQ ID NO: 162880 - RNA, 19 nt, Artificial Sequence
  Description of Artificial Sequence: Synthetic oligonucleotide
gacaccguaugaauuucau

SEQ ID NO: 162881 - RNA, 19 nt, Artificial Sequence
  Description of Artificial Sequence: Synthetic oligonucleotide
uugagcgguuugaggcuuu

SEQ ID NO: 162882 - RNA, 19 nt, Artificial Sequence
  Description of Artificial Sequence: Synthetic oligonucleotide
gguguacaguggccauuag

SEQ ID NO: 162883 - RNA, 19 nt, Artificial Sequence
  Description of Artificial Sequence: Synthetic oligonucleotide
gaacaucagcuugcuucca

SEQ ID NO: 162884 - RNA, 19 nt, Artificial Sequence
  Description of Artificial Sequence: Synthetic oligonucleotide
cuuuaucaaucugugcgau

SEQ ID NO: 162885 - RNA, 19 nt, Artificial Sequence
  Description of Artificial Sequence: Synthetic oligonucleotide
gccggaagcugugaaugcc

SEQ ID NO: 162886 - RNA, 19 nt, Artificial Sequence
  Description of Artificial Sequence: Synthetic oligonucleotide
ggccauauuucguguuauc

SEQ ID NO: 162887 - RNA, 19 nt, Artificial Sequence
  Description of Artificial Sequence: Synthetic oligonucleotide
gguccgccucucuucauga

SEQ ID NO: 162888 - RNA, 19 nt, Artificial Sequence
  Description of Artificial Sequence: Synthetic oligonucleotide
cauuaaucuugagaguguu

SEQ ID NO: 162889 - RNA, 19 nt, Artificial Sequence
  Description of Artificial Sequence: Synthetic oligonucleotide
gcagggcucacuauuugga

SEQ ID NO: 162890 - RNA, 19 nt, Artificial Sequence
  Description of Artificial Sequence: Synthetic oligonucleotide
ggauguugcuugcuaauuu

SEQ ID NO: 162891 - RNA, 19 nt, Artificial Sequence
  Description of Artificial Sequence: Synthetic oligonucleotide
gcuauguguucuuuuggau

SEQ ID NO: 162892 - RNA, 19 nt, Artificial Sequence
  Description of Artificial Sequence: Synthetic oligonucleotide
gguaagugccagucuuaaa

SEQ ID NO: 162893 - RNA, 19 nt, Artificial Sequence
  Description of Artificial Sequence: Synthetic oligonucleotide
cuggauguugcuugcuaau

SEQ ID NO: 162894 - RNA, 19 nt, Artificial Sequence
  Description of Artificial Sequence: Synthetic oligonucleotide
augccuaagcaugcuccau

SEQ ID NO: 162895 - RNA, 19 nt, Artificial Sequence
  Description of Artificial Sequence: Synthetic oligonucleotide
gagcccggaucacaggaau

SEQ ID NO: 162896 - RNA, 19 nt, Artificial Sequence
  Description of Artificial Sequence: Synthetic oligonucleotide
gugacagaugggauguuau

SEQ ID NO: 162897 - RNA, 19 nt, Artificial Sequence
  Description of Artificial Sequence: Synthetic oligonucleotide
ccaggcauccauauuuucu

SEQ ID NO: 162898 - RNA, 19 nt, Artificial Sequence
  Description of Artificial Sequence: Synthetic oligonucleotide
gcaaugcaccggcuccaag

SEQ ID NO: 162899 - RNA, 19 nt, Artificial Sequence
  Description of Artificial Sequence: Synthetic oligonucleotide
cauaacgucuaugccuccu

SEQ ID NO: 162900 - RNA, 19 nt, Artificial Sequence
  Description of Artificial Sequence: Synthetic oligonucleotide
acacugucgcauguucauu

SEQ ID NO: 162901 - RNA, 19 nt, Artificial Sequence
  Description of Artificial Sequence: Synthetic oligonucleotide
ggucaugguaauccuuggu

SEQ ID NO: 162902 - RNA, 19 nt, Artificial Sequence
  Description of Artificial Sequence: Synthetic oligonucleotide
gcuauagaaucaacaagau

SEQ ID NO: 162903 - RNA, 19 nt, Artificial Sequence
  Description of Artificial Sequence: Synthetic oligonucleotide
ugagcgguuugaggcuuua

SEQ ID NO: 162904 - RNA, 19 nt, Artificial Sequence
  Description of Artificial Sequence: Synthetic oligonucleotide
cuccuuacugaaggaugca

SEQ ID NO: 162905 - RNA, 19 nt, Artificial Sequence
  Description of Artificial Sequence: Synthetic oligonucleotide
cgaucguggcauauaucug

SEQ ID NO: 162906 - RNA, 19 nt, Artificial Sequence
  Description of Artificial Sequence: Synthetic oligonucleotide
ccaaugacauaccucugua

SEQ ID NO: 162907 - RNA, 19 nt, Artificial Sequence
  Description of Artificial Sequence: Synthetic oligonucleotide
cuaaaacaccaggcaucca

SEQ ID NO: 162908 - RNA, 19 nt, Artificial Sequence
  Description of Artificial Sequence: Synthetic oligonucleotide
gcuauauggucaugguaau

SEQ ID NO: 162909 - RNA, 19 nt, Artificial Sequence
  Description of Artificial Sequence: Synthetic oligonucleotide
gcuuaucaaacaggcuguc

SEQ ID NO: 162910 - RNA, 19 nt, Artificial Sequence
  Description of Artificial Sequence: Synthetic oligonucleotide
agcucgaucguggcauaua

SEQ ID NO: 162911 - RNA, 19 nt, Artificial Sequence
  Description of Artificial Sequence: Synthetic oligonucleotide
gcucacuauuuggagaugu

SEQ ID NO: 162912 - RNA, 19 nt, Artificial Sequence
  Description of Artificial Sequence: Synthetic oligonucleotide
cauugucuaagaggaggcu

SEQ ID NO: 162913 - RNA, 19 nt, Artificial Sequence
  Description of Artificial Sequence: Synthetic oligonucleotide
gggacaccguaugaauuuc

SEQ ID NO: 162914 - RNA, 19 nt, Artificial Sequence
  Description of Artificial Sequence: Synthetic oligonucleotide
uugguccgccucucuucau

SEQ ID NO: 162915 - RNA, 19 nt, Artificial Sequence
  Description of Artificial Sequence: Synthetic oligonucleotide
ccauaacgucuaugccucc

SEQ ID NO: 162916 - RNA, 19 nt, Artificial Sequence
  Description of Artificial Sequence: Synthetic oligonucleotide
cugcacuguaggcugaguu

SEQ ID NO: 162917 - RNA, 19 nt, Artificial Sequence
  Description of Artificial Sequence: Synthetic oligonucleotide
gcacuacacaauaauuccu

SEQ ID NO: 162918 - RNA, 19 nt, Artificial Sequence
  Description of Artificial Sequence: Synthetic oligonucleotide
cgguuugaggcuuuaccca

SEQ ID NO: 162919 - RNA, 19 nt, Artificial Sequence
  Description of Artificial Sequence: Synthetic oligonucleotide
gagggccauauuucguguu

SEQ ID NO: 162920 - RNA, 19 nt, Artificial Sequence
  Description of Artificial Sequence: Synthetic oligonucleotide
agccccgagcagugacgug

SEQ ID NO: 162921 - RNA, 19 nt, Artificial Sequence
  Description of Artificial Sequence: Synthetic oligonucleotide
ccauuaaucuugagagugu

SEQ ID NO: 162922 - RNA, 19 nt, Artificial Sequence
  Description of Artificial Sequence: Synthetic oligonucleotide
gcucgaucguggcauauau

SEQ ID NO: 162923 - RNA, 19 nt, Artificial Sequence
  Description of Artificial Sequence: Synthetic oligonucleotide
gacuucagcuggcuuccuu

SEQ ID NO: 162924 - RNA, 19 nt, Artificial Sequence
  Description of Artificial Sequence: Synthetic oligonucleotide
cucgaagacagggccaaau

SEQ ID NO: 162925 - RNA, 19 nt, Artificial Sequence
  Description of Artificial Sequence: Synthetic oligonucleotide
gucagaugacuaccugguu

SEQ ID NO: 162926 - RNA, 19 nt, Artificial Sequence
  Description of Artificial Sequence: Synthetic oligonucleotide
ggcuuuacccagugacaua

SEQ ID NO: 162927 - RNA, 19 nt, Artificial Sequence
  Description of Artificial Sequence: Synthetic oligonucleotide
ggcucacuauuuggagaug

SEQ ID NO: 162928 - RNA, 19 nt, Artificial Sequence
  Description of Artificial Sequence: Synthetic oligonucleotide
caccaggcauccauauuuu

SEQ ID NO: 162929 - RNA, 19 nt, Artificial Sequence
  Description of Artificial Sequence: Synthetic oligonucleotide
gcuacaagcuuggcugaua

SEQ ID NO: 162930 - RNA, 19 nt, Artificial Sequence
  Description of Artificial Sequence: Synthetic oligonucleotide
gcuuacucauugaccuugu

SEQ ID NO: 162931 - RNA, 19 nt, Artificial Sequence
  Description of Artificial Sequence: Synthetic oligonucleotide
cgucuaugccuccuggugu

SEQ ID NO: 162932 - RNA, 19 nt, Artificial Sequence
  Description of Artificial Sequence: Synthetic oligonucleotide
caggagcuuucaccucgua

SEQ ID NO: 162933 - RNA, 19 nt, Artificial Sequence
  Description of Artificial Sequence: Synthetic oligonucleotide
cccuggucuucacuuauau

SEQ ID NO: 162934 - RNA, 19 nt, Artificial Sequence
  Description of Artificial Sequence: Synthetic oligonucleotide
gcugcagggcucacuauuu

SEQ ID NO: 162935 - RNA, 19 nt, Artificial Sequence
  Description of Artificial Sequence: Synthetic oligonucleotide
ggcugauauuucagcuaua

SEQ ID NO: 162936 - RNA, 19 nt, Artificial Sequence
  Description of Artificial Sequence: Synthetic oligonucleotide
ccccgagcagugacgugcu

SEQ ID NO: 162937 - RNA, 19 nt, Artificial Sequence
  Description of Artificial Sequence: Synthetic oligonucleotide
ccgccucaguucacacugu

SEQ ID NO: 162938 - RNA, 19 nt, Artificial Sequence
  Description of Artificial Sequence: Synthetic oligonucleotide
cgcuacaagcuuggcugau

SEQ ID NO: 162939 - RNA, 19 nt, Artificial Sequence
  Description of Artificial Sequence: Synthetic oligonucleotide
aacaaacuaagcuuggauc

SEQ ID NO: 162940 - RNA, 19 nt, Artificial Sequence
  Description of Artificial Sequence: Synthetic oligonucleotide
agaaucacggaauacguac

SEQ ID NO: 162941 - RNA, 19 nt, Artificial Sequence
  Description of Artificial Sequence: Synthetic oligonucleotide
uguaugaucaugcacguga

SEQ ID NO: 162942 - RNA, 19 nt, Artificial Sequence
  Description of Artificial Sequence: Synthetic oligonucleotide
uguauuauaguauuuacuu

SEQ ID NO: 162943 - RNA, 19 nt, Artificial Sequence
  Description of Artificial Sequence: Synthetic oligonucleotide
uuuacuaguguuuugugca

SEQ ID NO: 162944 - RNA, 19 nt, Artificial Sequence
  Description of Artificial Sequence: Synthetic oligonucleotide
agcgauacauuccugauuc

SEQ ID NO: 162945 - RNA, 19 nt, Artificial Sequence
  Description of Artificial Sequence: Synthetic oligonucleotide
aauacguacauagcaagag

SEQ ID NO: 162946 - RNA, 19 nt, Artificial Sequence
  Description of Artificial Sequence: Synthetic oligonucleotide
auacuuacuccauauuuac

SEQ ID NO: 162947 - RNA, 19 nt, Artificial Sequence
  Description of Artificial Sequence: Synthetic oligonucleotide
ucacggaauacguacauag

SEQ ID NO: 162948 - RNA, 19 nt, Artificial Sequence
  Description of Artificial Sequence: Synthetic oligonucleotide
auugcagaugcuuauaggu

SEQ ID NO: 162949 - RNA, 19 nt, Artificial Sequence
  Description of Artificial Sequence: Synthetic oligonucleotide
uuuguuuacacuccacugu

SEQ ID NO: 162950 - RNA, 19 nt, Artificial Sequence
  Description of Artificial Sequence: Synthetic oligonucleotide
guaagauaacuucucagag

SEQ ID NO: 162951 - RNA, 19 nt, Artificial Sequence
  Description of Artificial Sequence: Synthetic oligonucleotide
guaacaauagggguuaucc

SEQ ID NO: 162952 - RNA, 19 nt, Artificial Sequence
  Description of Artificial Sequence: Synthetic oligonucleotide
ucuaggaggaauuuuguau

SEQ ID NO: 162953 - RNA, 19 nt, Artificial Sequence
  Description of Artificial Sequence: Synthetic oligonucleotide
uugaaaugcacaacaguga

SEQ ID NO: 162954 - RNA, 19 nt, Artificial Sequence
  Description of Artificial Sequence: Synthetic oligonucleotide
aauuugagcauuguugccu

SEQ ID NO: 162955 - RNA, 19 nt, Artificial Sequence
  Description of Artificial Sequence: Synthetic oligonucleotide
aaugcuaggaucacaguug

SEQ ID NO: 162956 - RNA, 19 nt, Artificial Sequence
  Description of Artificial Sequence: Synthetic oligonucleotide
cuuuacuaguguuuugugc

SEQ ID NO: 162957 - RNA, 19 nt, Artificial Sequence
  Description of Artificial Sequence: Synthetic oligonucleotide
ugcacguuugcuaugcacc

SEQ ID NO: 162958 - RNA, 19 nt, Artificial Sequence
  Description of Artificial Sequence: Synthetic oligonucleotide
ugcagaugcuuauaggugc

SEQ ID NO: 162959 - RNA, 19 nt, Artificial Sequence
  Description of Artificial Sequence: Synthetic oligonucleotide
uuccugauuaaauuagcug

SEQ ID NO: 162960 - RNA, 19 nt, Artificial Sequence
  Description of Artificial Sequence: Synthetic oligonucleotide
acauuccugauuccggggc

SEQ ID NO: 162961 - RNA, 19 nt, Artificial Sequence
  Description of Artificial Sequence: Synthetic oligonucleotide
uguauuggguguuugccug

SEQ ID NO: 162962 - RNA, 19 nt, Artificial Sequence
  Description of Artificial Sequence: Synthetic oligonucleotide
uacguacauagcaagagaa

SEQ ID NO: 162963 - RNA, 19 nt, Artificial Sequence
  Description of Artificial Sequence: Synthetic oligonucleotide
gcuuguaugaucaugcacg

SEQ ID NO: 162964 - RNA, 19 nt, Artificial Sequence
  Description of Artificial Sequence: Synthetic oligonucleotide
cuaagcuuggaucaaaaca

SEQ ID NO: 162965 - RNA, 19 nt, Artificial Sequence
  Description of Artificial Sequence: Synthetic oligonucleotide
aaucauuauuuaguuaccu

SEQ ID NO: 162966 - RNA, 19 nt, Artificial Sequence
  Description of Artificial Sequence: Synthetic oligonucleotide
auauacaagugcuucacau

SEQ ID NO: 162967 - RNA, 19 nt, Artificial Sequence
  Description of Artificial Sequence: Synthetic oligonucleotide
acggaauacguacauagca

SEQ ID NO: 162968 - RNA, 19 nt, Artificial Sequence
  Description of Artificial Sequence: Synthetic oligonucleotide
uuaguuaccuaaugggcac

SEQ ID NO: 162969 - RNA, 19 nt, Artificial Sequence
  Description of Artificial Sequence: Synthetic oligonucleotide
agcuuguaugaucaugcac

SEQ ID NO: 162970 - RNA, 19 nt, Artificial Sequence
  Description of Artificial Sequence: Synthetic oligonucleotide
uacaauacuuacuccauau

SEQ ID NO: 162971 - RNA, 19 nt, Artificial Sequence
  Description of Artificial Sequence: Synthetic oligonucleotide
aggaauuuuguauuauagu

SEQ ID NO: 162972 - RNA, 19 nt, Artificial Sequence
  Description of Artificial Sequence: Synthetic oligonucleotide
cuucuuacggguuagcuca

SEQ ID NO: 162973 - RNA, 19 nt, Artificial Sequence
  Description of Artificial Sequence: Synthetic oligonucleotide
uuuccaaccaaaugccagc

SEQ ID NO: 162974 - RNA, 19 nt, Artificial Sequence
  Description of Artificial Sequence: Synthetic oligonucleotide
cuagaggccgaauuagugc

SEQ ID NO: 162975 - RNA, 19 nt, Artificial Sequence
  Description of Artificial Sequence: Synthetic oligonucleotide
uuggguguuugccugcacg

SEQ ID NO: 162976 - RNA, 19 nt, Artificial Sequence
  Description of Artificial Sequence: Synthetic oligonucleotide
agggaugaaccaucaaaac

SEQ ID NO: 162977 - RNA, 19 nt, Artificial Sequence
  Description of Artificial Sequence: Synthetic oligonucleotide
uuugguagggaugugggga

SEQ ID NO: 162978 - RNA, 19 nt, Artificial Sequence
  Description of Artificial Sequence: Synthetic oligonucleotide
aacagugauaaacacucuu

SEQ ID NO: 162979 - RNA, 19 nt, Artificial Sequence
  Description of Artificial Sequence: Synthetic oligonucleotide
agauugggaucuuuucugg

SEQ ID NO: 162980 - RNA, 19 nt, Artificial Sequence
  Description of Artificial Sequence: Synthetic oligonucleotide
aauucccuaaugagauucc

SEQ ID NO: 162981 - RNA, 19 nt, Artificial Sequence
  Description of Artificial Sequence: Synthetic oligonucleotide
aacagguuagaugcuggac

SEQ ID NO: 162982 - RNA, 19 nt, Artificial Sequence
  Description of Artificial Sequence: Synthetic oligonucleotide
augagauugggaucuuuuc

SEQ ID NO: 162983 - RNA, 19 nt, Artificial Sequence
  Description of Artificial Sequence: Synthetic oligonucleotide
ucugguaauuagcucugag

SEQ ID NO: 162984 - RNA, 19 nt, Artificial Sequence
  Description of Artificial Sequence: Synthetic oligonucleotide
aguuguugugucaccaugc

SEQ ID NO: 162985 - RNA, 19 nt, Artificial Sequence
  Description of Artificial Sequence: Synthetic oligonucleotide
auagcaagagaagaaaggu

SEQ ID NO: 162986 - RNA, 19 nt, Artificial Sequence
  Description of Artificial Sequence: Synthetic oligonucleotide
ucuuagggaaugagauugg

SEQ ID NO: 162987 - RNA, 19 nt, Artificial Sequence
  Description of Artificial Sequence: Synthetic oligonucleotide
aauacuuacuccauauuua

SEQ ID NO: 162988 - RNA, 19 nt, Artificial Sequence
  Description of Artificial Sequence: Synthetic oligonucleotide
gauaaacacucuugcuucc

SEQ ID NO: 162989 - RNA, 19 nt, Artificial Sequence
  Description of Artificial Sequence: Synthetic oligonucleotide
caauggguugcuuucuugc

SEQ ID NO: 162990 - RNA, 19 nt, Artificial Sequence
  Description of Artificial Sequence: Synthetic oligonucleotide
gucuauucuagucagguaa

SEQ ID NO: 162991 - RNA, 19 nt, Artificial Sequence
  Description of Artificial Sequence: Synthetic oligonucleotide
cauugcagaugcuuauagg

SEQ ID NO: 162992 - RNA, 19 nt, Artificial Sequence
  Description of Artificial Sequence: Synthetic oligonucleotide
agguauugugguauuuucc

SEQ ID NO: 162993 - RNA, 19 nt, Artificial Sequence
  Description of Artificial Sequence: Synthetic oligonucleotide
guaauuagcucugagcuga

SEQ ID NO: 162994 - RNA, 19 nt, Artificial Sequence
  Description of Artificial Sequence: Synthetic oligonucleotide
auaacgccggacuacugag

SEQ ID NO: 162995 - RNA, 19 nt, Artificial Sequence
  Description of Artificial Sequence: Synthetic oligonucleotide
aacgccggacuacugagca

SEQ ID NO: 162996 - RNA, 19 nt, Artificial Sequence
  Description of Artificial Sequence: Synthetic oligonucleotide
cauuccugauuaaauuagc

SEQ ID NO: 162997 - RNA, 19 nt, Artificial Sequence
  Description of Artificial Sequence: Synthetic oligonucleotide
gccuaaucuacauaguaag

SEQ ID NO: 162998 - RNA, 19 nt, Artificial Sequence
  Description of Artificial Sequence: Synthetic oligonucleotide
ucuagucagguaacagcag

SEQ ID NO: 162999 - RNA, 19 nt, Artificial Sequence
  Description of Artificial Sequence: Synthetic oligonucleotide
ggaauacguacauagcaag

SEQ ID NO: 163000 - RNA, 19 nt, Artificial Sequence
  Description of Artificial Sequence: Synthetic oligonucleotide
aaucacggaauacguacau

SEQ ID NO: 163001 - RNA, 19 nt, Artificial Sequence
  Description of Artificial Sequence: Synthetic oligonucleotide
cuaaugggcacaaggcuac

SEQ ID NO: 163002 - RNA, 19 nt, Artificial Sequence
  Description of Artificial Sequence: Synthetic oligonucleotide
auauuuucaggcaaagcga

SEQ ID NO: 163003 - RNA, 19 nt, Artificial Sequence
  Description of Artificial Sequence: Synthetic oligonucleotide
uugccuagaggucuauucu

SEQ ID NO: 163004 - RNA, 19 nt, Artificial Sequence
  Description of Artificial Sequence: Synthetic oligonucleotide
ugcugcauaacgccggacu

SEQ ID NO: 163005 - RNA, 19 nt, Artificial Sequence
  Description of Artificial Sequence: Synthetic oligonucleotide
ucuggacacuacuguauag

SEQ ID NO: 163006 - RNA, 19 nt, Artificial Sequence
  Description of Artificial Sequence: Synthetic oligonucleotide
guuuccaaccaaaugccag

SEQ ID NO: 163007 - RNA, 19 nt, Artificial Sequence
  Description of Artificial Sequence: Synthetic oligonucleotide
uguuuacacuccacugugc

SEQ ID NO: 163008 - RNA, 19 nt, Artificial Sequence
  Description of Artificial Sequence: Synthetic oligonucleotide
auacguacauagcaagaga

SEQ ID NO: 163009 - RNA, 19 nt, Artificial Sequence
  Description of Artificial Sequence: Synthetic oligonucleotide
agcugaaucauuauuuagu

SEQ ID NO: 163010 - RNA, 19 nt, Artificial Sequence
  Description of Artificial Sequence: Synthetic oligonucleotide
aacuucuuagggaaugaga

SEQ ID NO: 163011 - RNA, 19 nt, Artificial Sequence
  Description of Artificial Sequence: Synthetic oligonucleotide
auguauuggguguuugccu

SEQ ID NO: 163012 - RNA, 19 nt, Artificial Sequence
  Description of Artificial Sequence: Synthetic oligonucleotide
guugccuagaggucuauuc

SEQ ID NO: 163013 - RNA, 19 nt, Artificial Sequence
  Description of Artificial Sequence: Synthetic oligonucleotide
uguucuuuugaguguuaac

SEQ ID NO: 163014 - RNA, 19 nt, Artificial Sequence
  Description of Artificial Sequence: Synthetic oligonucleotide
guuuugugcagaguccagg

SEQ ID NO: 163015 - RNA, 19 nt, Artificial Sequence
  Description of Artificial Sequence: Synthetic oligonucleotide
gaaaguggugucguagagc

SEQ ID NO: 163016 - RNA, 19 nt, Artificial Sequence
  Description of Artificial Sequence: Synthetic oligonucleotide
uggggaguuccuaacuucu

SEQ ID NO: 163017 - RNA, 19 nt, Artificial Sequence
  Description of Artificial Sequence: Synthetic oligonucleotide
uuacaauacuuacuccaua

SEQ ID NO: 163018 - RNA, 19 nt, Artificial Sequence
  Description of Artificial Sequence: Synthetic oligonucleotide
ugcaguccuaaauguaugu

SEQ ID NO: 163019 - RNA, 19 nt, Artificial Sequence
  Description of Artificial Sequence: Synthetic oligonucleotide
uuuggguaauuaugaagau

SEQ ID NO: 163020 - RNA, 19 nt, Artificial Sequence
  Description of Artificial Sequence: Synthetic oligonucleotide
uauaggugcuggguuuugg

SEQ ID NO: 163021 - RNA, 19 nt, Artificial Sequence
  Description of Artificial Sequence: Synthetic oligonucleotide
ucccuaaugagauuccauu

SEQ ID NO: 163022 - RNA, 19 nt, Artificial Sequence
  Description of Artificial Sequence: Synthetic oligonucleotide
uggccuuaucaauggauca

SEQ ID NO: 163023 - RNA, 19 nt, Artificial Sequence
  Description of Artificial Sequence: Synthetic oligonucleotide
cuuagggaaugagauuggg

SEQ ID NO: 163024 - RNA, 19 nt, Artificial Sequence
  Description of Artificial Sequence: Synthetic oligonucleotide
gucuuaugggcacagcuuc

SEQ ID NO: 163025 - RNA, 19 nt, Artificial Sequence
  Description of Artificial Sequence: Synthetic oligonucleotide
gcuaggaucacaguuguug

SEQ ID NO: 163026 - RNA, 19 nt, Artificial Sequence
  Description of Artificial Sequence: Synthetic oligonucleotide
ugcuaugcaccacaugcau

SEQ ID NO: 163027 - RNA, 19 nt, Artificial Sequence
  Description of Artificial Sequence: Synthetic oligonucleotide
gccgaauuagugcagcagg

SEQ ID NO: 163028 - RNA, 19 nt, Artificial Sequence
  Description of Artificial Sequence: Synthetic oligonucleotide
acaguuuaggugaaacuca

SEQ ID NO: 163029 - RNA, 19 nt, Artificial Sequence
  Description of Artificial Sequence: Synthetic oligonucleotide
acggguuagcucaggaggc

SEQ ID NO: 163030 - RNA, 19 nt, Artificial Sequence
  Description of Artificial Sequence: Synthetic oligonucleotide
cacggaauacguacauagc

SEQ ID NO: 163031 - RNA, 19 nt, Artificial Sequence
  Description of Artificial Sequence: Synthetic oligonucleotide
aagcgauacauuccugauu

SEQ ID NO: 163032 - RNA, 19 nt, Artificial Sequence
  Description of Artificial Sequence: Synthetic oligonucleotide
cagguauugugguauuuuc

SEQ ID NO: 163033 - RNA, 19 nt, Artificial Sequence
  Description of Artificial Sequence: Synthetic oligonucleotide
gaauacguacauagcaaga

SEQ ID NO: 163034 - RNA, 19 nt, Artificial Sequence
  Description of Artificial Sequence: Synthetic oligonucleotide
agugcaacagaugcuaaau

SEQ ID NO: 163035 - RNA, 19 nt, Artificial Sequence
  Description of Artificial Sequence: Synthetic oligonucleotide
aaacauuucuagaggccga

SEQ ID NO: 163036 - RNA, 19 nt, Artificial Sequence
  Description of Artificial Sequence: Synthetic oligonucleotide
gguaauuagcucugagcug

SEQ ID NO: 163037 - RNA, 19 nt, Artificial Sequence
  Description of Artificial Sequence: Synthetic oligonucleotide
uucuaggaggaauuuugua

SEQ ID NO: 163038 - RNA, 19 nt, Artificial Sequence
  Description of Artificial Sequence: Synthetic oligonucleotide
uucuaaucuuccugccucu

SEQ ID NO: 163039 - RNA, 19 nt, Artificial Sequence
  Description of Artificial Sequence: Synthetic oligonucleotide
acguuugcuaugcaccaca

SEQ ID NO: 163040 - RNA, 19 nt, Artificial Sequence
  Description of Artificial Sequence: Synthetic oligonucleotide
ugcaaagucugauguucac

SEQ ID NO: 163041 - RNA, 19 nt, Artificial Sequence
  Description of Artificial Sequence: Synthetic oligonucleotide
uggggaaaugcagugucca

SEQ ID NO: 163042 - RNA, 19 nt, Artificial Sequence
  Description of Artificial Sequence: Synthetic oligonucleotide
uggguguuugccugcacgu

SEQ ID NO: 163043 - RNA, 19 nt, Artificial Sequence
  Description of Artificial Sequence: Synthetic oligonucleotide
uuuuaugauucagcuugga

SEQ ID NO: 163044 - RNA, 19 nt, Artificial Sequence
  Description of Artificial Sequence: Synthetic oligonucleotide
uucccuaaugagauuccau

SEQ ID NO: 163045 - RNA, 19 nt, Artificial Sequence
  Description of Artificial Sequence: Synthetic oligonucleotide
caauguguggccuuaucaa

SEQ ID NO: 163046 - RNA, 19 nt, Artificial Sequence
  Description of Artificial Sequence: Synthetic oligonucleotide
ggcacaaggcuacugaaca

SEQ ID NO: 163047 - RNA, 19 nt, Artificial Sequence
  Description of Artificial Sequence: Synthetic oligonucleotide
gauguaagggaagccaaaa

SEQ ID NO: 163048 - RNA, 19 nt, Artificial Sequence
  Description of Artificial Sequence: Synthetic oligonucleotide
auuugagcauuguugccua

SEQ ID NO: 163049 - RNA, 19 nt, Artificial Sequence
  Description of Artificial Sequence: Synthetic oligonucleotide
cuaaugagauuccauuuua

SEQ ID NO: 163050 - RNA, 19 nt, Artificial Sequence
  Description of Artificial Sequence: Synthetic oligonucleotide
uacaauguguggccuuauc

SEQ ID NO: 163051 - RNA, 19 nt, Artificial Sequence
  Description of Artificial Sequence: Synthetic oligonucleotide
ugcauaacgccggacuacu

SEQ ID NO: 163052 - RNA, 19 nt, Artificial Sequence
  Description of Artificial Sequence: Synthetic oligonucleotide
cauaacgccggacuacuga

SEQ ID NO: 163053 - RNA, 19 nt, Artificial Sequence
  Description of Artificial Sequence: Synthetic oligonucleotide
uccaaccaaaugccagcca

SEQ ID NO: 163054 - RNA, 19 nt, Artificial Sequence
  Description of Artificial Sequence: Synthetic oligonucleotide
uaacgccggacuacugagc

SEQ ID NO: 163055 - RNA, 19 nt, Artificial Sequence
  Description of Artificial Sequence: Synthetic oligonucleotide
agcaccauaaguggggaaa

SEQ ID NO: 163056 - RNA, 19 nt, Artificial Sequence
  Description of Artificial Sequence: Synthetic oligonucleotide
gaaucacggaauacguaca

SEQ ID NO: 163057 - RNA, 19 nt, Artificial Sequence
  Description of Artificial Sequence: Synthetic oligonucleotide
auguaaaagaacaccucaa

SEQ ID NO: 163058 - RNA, 19 nt, Artificial Sequence
  Description of Artificial Sequence: Synthetic oligonucleotide
uucuuacggguuagcucag

SEQ ID NO: 163059 - RNA, 19 nt, Artificial Sequence
  Description of Artificial Sequence: Synthetic oligonucleotide
ugccuagaggucuauucua

SEQ ID NO: 163060 - RNA, 19 nt, Artificial Sequence
  Description of Artificial Sequence: Synthetic oligonucleotide
uauguacacccugaauguc

SEQ ID NO: 163061 - RNA, 19 nt, Artificial Sequence
  Description of Artificial Sequence: Synthetic oligonucleotide
cugcacguuugcuaugcac

SEQ ID NO: 163062 - RNA, 19 nt, Artificial Sequence
  Description of Artificial Sequence: Synthetic oligonucleotide
guauuggguguuugccugc

SEQ ID NO: 163063 - RNA, 19 nt, Artificial Sequence
  Description of Artificial Sequence: Synthetic oligonucleotide
guuagcucaggaggcaaug

SEQ ID NO: 163064 - RNA, 19 nt, Artificial Sequence
  Description of Artificial Sequence: Synthetic oligonucleotide
ucuaggccaguuaggggau

SEQ ID NO: 163065 - RNA, 19 nt, Artificial Sequence
  Description of Artificial Sequence: Synthetic oligonucleotide
cagaaaguggugucguaga

SEQ ID NO: 163066 - RNA, 19 nt, Artificial Sequence
  Description of Artificial Sequence: Synthetic oligonucleotide
gugucguagagccccuuug

SEQ ID NO: 163067 - RNA, 19 nt, Artificial Sequence
  Description of Artificial Sequence: Synthetic oligonucleotide
gaauuagugcagcaggcuu

SEQ ID NO: 163068 - RNA, 19 nt, Artificial Sequence
  Description of Artificial Sequence: Synthetic oligonucleotide
ucuuacggguuagcucagg

SEQ ID NO: 163069 - RNA, 19 nt, Artificial Sequence
  Description of Artificial Sequence: Synthetic oligonucleotide
ggaaugggguuagugcugg

SEQ ID NO: 163070 - RNA, 19 nt, Artificial Sequence
  Description of Artificial Sequence: Synthetic oligonucleotide
guaaguucuaggccaguua

SEQ ID NO: 163071 - RNA, 19 nt, Artificial Sequence
  Description of Artificial Sequence: Synthetic oligonucleotide
gagagcugaaucauuauuu

SEQ ID NO: 163072 - RNA, 19 nt, Artificial Sequence
  Description of Artificial Sequence: Synthetic oligonucleotide
aguucuacgcuggucuccu

SEQ ID NO: 163073 - RNA, 19 nt, Artificial Sequence
  Description of Artificial Sequence: Synthetic oligonucleotide
gccuuaucaauggaucagg

SEQ ID NO: 163074 - RNA, 19 nt, Artificial Sequence
  Description of Artificial Sequence: Synthetic oligonucleotide
gaugggcauuggcagucug

SEQ ID NO: 163075 - RNA, 19 nt, Artificial Sequence
  Description of Artificial Sequence: Synthetic oligonucleotide
augcuuauaggugcugggu

SEQ ID NO: 163076 - RNA, 19 nt, Artificial Sequence
  Description of Artificial Sequence: Synthetic oligonucleotide
uauuggguguuugccugca

SEQ ID NO: 163077 - RNA, 19 nt, Artificial Sequence
  Description of Artificial Sequence: Synthetic oligonucleotide
cuaggucuuaugggcacag

SEQ ID NO: 163078 - RNA, 19 nt, Artificial Sequence
  Description of Artificial Sequence: Synthetic oligonucleotide
ccgaauuagugcagcaggc

SEQ ID NO: 163079 - RNA, 19 nt, Artificial Sequence
  Description of Artificial Sequence: Synthetic oligonucleotide
ucccagguuuuauuauaaa

SEQ ID NO: 163080 - RNA, 19 nt, Artificial Sequence
  Description of Artificial Sequence: Synthetic oligonucleotide
uuguaugaucaugcacgug

SEQ ID NO: 163081 - RNA, 19 nt, Artificial Sequence
  Description of Artificial Sequence: Synthetic oligonucleotide
uuaacaccugagccaucuc

SEQ ID NO: 163082 - RNA, 19 nt, Artificial Sequence
  Description of Artificial Sequence: Synthetic oligonucleotide
uccuaacuucuuagggaau

SEQ ID NO: 163083 - RNA, 19 nt, Artificial Sequence
  Description of Artificial Sequence: Synthetic oligonucleotide
uaguuaccuaaugggcaca

SEQ ID NO: 163084 - RNA, 19 nt, Artificial Sequence
  Description of Artificial Sequence: Synthetic oligonucleotide
uauuaacaccugagccauc

SEQ ID NO: 163085 - RNA, 19 nt, Artificial Sequence
  Description of Artificial Sequence: Synthetic oligonucleotide
ggccuuaucaauggaucag

SEQ ID NO: 163086 - RNA, 19 nt, Artificial Sequence
  Description of Artificial Sequence: Synthetic oligonucleotide
ggcaguucuaggucuuaug

SEQ ID NO: 163087 - RNA, 19 nt, Artificial Sequence
  Description of Artificial Sequence: Synthetic oligonucleotide
agaacacgguucucagaaa

SEQ ID NO: 163088 - RNA, 19 nt, Artificial Sequence
  Description of Artificial Sequence: Synthetic oligonucleotide
cuacaggacaacuuagcau

SEQ ID NO: 163089 - RNA, 19 nt, Artificial Sequence
  Description of Artificial Sequence: Synthetic oligonucleotide
aaucggaguuacagagggu

SEQ ID NO: 163090 - RNA, 19 nt, Artificial Sequence
  Description of Artificial Sequence: Synthetic oligonucleotide
cugcauaacgccggacuac

SEQ ID NO: 163091 - RNA, 19 nt, Artificial Sequence
  Description of Artificial Sequence: Synthetic oligonucleotide
cuauucuagucagguaaca

SEQ ID NO: 163092 - RNA, 19 nt, Artificial Sequence
  Description of Artificial Sequence: Synthetic oligonucleotide
ggaggaauuuuguauuaua

SEQ ID NO: 163093 - RNA, 19 nt, Artificial Sequence
  Description of Artificial Sequence: Synthetic oligonucleotide
acaggacaacuuagcauug

SEQ ID NO: 163094 - RNA, 19 nt, Artificial Sequence
  Description of Artificial Sequence: Synthetic oligonucleotide
uucugguaauuagcucuga

SEQ ID NO: 163095 - RNA, 19 nt, Artificial Sequence
  Description of Artificial Sequence: Synthetic oligonucleotide
acgccggacuacugagcac

SEQ ID NO: 163096 - RNA, 19 nt, Artificial Sequence
  Description of Artificial Sequence: Synthetic oligonucleotide
uaggccaguuaggggauac

SEQ ID NO: 163097 - RNA, 19 nt, Artificial Sequence
  Description of Artificial Sequence: Synthetic oligonucleotide
ggauacccaguacauggca

SEQ ID NO: 163098 - RNA, 19 nt, Artificial Sequence
  Description of Artificial Sequence: Synthetic oligonucleotide
aguuaccuaaugggcacaa

SEQ ID NO: 163099 - RNA, 19 nt, Artificial Sequence
  Description of Artificial Sequence: Synthetic oligonucleotide
gccuuaaagaaacagcuuu

SEQ ID NO: 163100 - RNA, 19 nt, Artificial Sequence
  Description of Artificial Sequence: Synthetic oligonucleotide
ggacaacuuagcauuguca

SEQ ID NO: 163101 - RNA, 19 nt, Artificial Sequence
  Description of Artificial Sequence: Synthetic oligonucleotide
cagaaucacggaauacgua

SEQ ID NO: 163102 - RNA, 19 nt, Artificial Sequence
  Description of Artificial Sequence: Synthetic oligonucleotide
caccauaaguggggaaaug

SEQ ID NO: 163103 - RNA, 19 nt, Artificial Sequence
  Description of Artificial Sequence: Synthetic oligonucleotide
uucaagccuuccagguauu

SEQ ID NO: 163104 - RNA, 19 nt, Artificial Sequence
  Description of Artificial Sequence: Synthetic oligonucleotide
ccuaaugggcacaaggcua

SEQ ID NO: 163105 - RNA, 19 nt, Artificial Sequence
  Description of Artificial Sequence: Synthetic oligonucleotide
cagcagaaucacggaauac

SEQ ID NO: 163106 - RNA, 19 nt, Artificial Sequence
  Description of Artificial Sequence: Synthetic oligonucleotide
caugcacgugagguggaug

SEQ ID NO: 163107 - RNA, 19 nt, Artificial Sequence
  Description of Artificial Sequence: Synthetic oligonucleotide
gcacguuugcuaugcacca

SEQ ID NO: 163108 - RNA, 19 nt, Artificial Sequence
  Description of Artificial Sequence: Synthetic oligonucleotide
gguguagggaaauggugcu

SEQ ID NO: 163109 - RNA, 19 nt, Artificial Sequence
  Description of Artificial Sequence: Synthetic oligonucleotide
aguuuaggugaaacucaau

SEQ ID NO: 163110 - RNA, 19 nt, Artificial Sequence
  Description of Artificial Sequence: Synthetic oligonucleotide
aucacggaauacguacaua

SEQ ID NO: 163111 - RNA, 19 nt, Artificial Sequence
  Description of Artificial Sequence: Synthetic oligonucleotide
ggaccuuucagaccccucu

SEQ ID NO: 163112 - RNA, 19 nt, Artificial Sequence
  Description of Artificial Sequence: Synthetic oligonucleotide
ggcuuuacuaguguuuugu

SEQ ID NO: 163113 - RNA, 19 nt, Artificial Sequence
  Description of Artificial Sequence: Synthetic oligonucleotide
aggcaauggguugcuuucu

SEQ ID NO: 163114 - RNA, 19 nt, Artificial Sequence
  Description of Artificial Sequence: Synthetic oligonucleotide
cuggacacuacuguauagu

SEQ ID NO: 163115 - RNA, 19 nt, Artificial Sequence
  Description of Artificial Sequence: Synthetic oligonucleotide
agguuagaugcuggacaca

SEQ ID NO: 163116 - RNA, 19 nt, Artificial Sequence
  Description of Artificial Sequence: Synthetic oligonucleotide
cucguuccuggacuuguaa

SEQ ID NO: 163117 - RNA, 19 nt, Artificial Sequence
  Description of Artificial Sequence: Synthetic oligonucleotide
acacuacuguauaguuaug

SEQ ID NO: 163118 - RNA, 19 nt, Artificial Sequence
  Description of Artificial Sequence: Synthetic oligonucleotide
gagcaccauaaguggggaa

SEQ ID NO: 163119 - RNA, 19 nt, Artificial Sequence
  Description of Artificial Sequence: Synthetic oligonucleotide
cagggccugguaagauaac

SEQ ID NO: 163120 - RNA, 19 nt, Artificial Sequence
  Description of Artificial Sequence: Synthetic oligonucleotide
gcugcauaacgccggacua

SEQ ID NO: 163121 - RNA, 19 nt, Artificial Sequence
  Description of Artificial Sequence: Synthetic oligonucleotide
cccucuuaaugugguaggc

SEQ ID NO: 163122 - RNA, 19 nt, Artificial Sequence
  Description of Artificial Sequence: Synthetic oligonucleotide
ggucuauucuagucaggua

SEQ ID NO: 163123 - RNA, 19 nt, Artificial Sequence
  Description of Artificial Sequence: Synthetic oligonucleotide
cggaauacguacauagcaa

SEQ ID NO: 163124 - RNA, 19 nt, Artificial Sequence
  Description of Artificial Sequence: Synthetic oligonucleotide
ccuagguauucugagagcu

SEQ ID NO: 163125 - RNA, 19 nt, Artificial Sequence
  Description of Artificial Sequence: Synthetic oligonucleotide
aucaugcacgugaggugga

SEQ ID NO: 163126 - RNA, 19 nt, Artificial Sequence
  Description of Artificial Sequence: Synthetic oligonucleotide
caacagugauaaacacucu

SEQ ID NO: 163127 - RNA, 19 nt, Artificial Sequence
  Description of Artificial Sequence: Synthetic oligonucleotide
gcuuauaggugcuggguuu

SEQ ID NO: 163128 - RNA, 19 nt, Artificial Sequence
  Description of Artificial Sequence: Synthetic oligonucleotide
ggugaaacucaauguuaau

SEQ ID NO: 163129 - RNA, 19 nt, Artificial Sequence
  Description of Artificial Sequence: Synthetic oligonucleotide
gggguuauccuuggggcaa

SEQ ID NO: 163130 - RNA, 19 nt, Artificial Sequence
  Description of Artificial Sequence: Synthetic oligonucleotide
cgccggacuacugagcacc

SEQ ID NO: 163131 - RNA, 19 nt, Artificial Sequence
  Description of Artificial Sequence: Synthetic oligonucleotide
gugguacaauguguggccu

SEQ ID NO: 163132 - RNA, 19 nt, Artificial Sequence
  Description of Artificial Sequence: Synthetic oligonucleotide
guucuacgcuggucuccuc

SEQ ID NO: 163133 - RNA, 19 nt, Artificial Sequence
  Description of Artificial Sequence: Synthetic oligonucleotide
cugcugcauaacgccggac

SEQ ID NO: 163134 - RNA, 19 nt, Artificial Sequence
  Description of Artificial Sequence: Synthetic oligonucleotide
gcauaacgccggacuacug

SEQ ID NO: 163135 - RNA, 19 nt, Artificial Sequence
  Description of Artificial Sequence: Synthetic oligonucleotide
caggacaacuuagcauugu

SEQ ID NO: 163136 - RNA, 19 nt, Artificial Sequence
  Description of Artificial Sequence: Synthetic oligonucleotide
cauuggcagucuguggcau

SEQ ID NO: 163137 - RNA, 19 nt, Artificial Sequence
  Description of Artificial Sequence: Synthetic oligonucleotide
uggugucguagagccccuu

SEQ ID NO: 163138 - RNA, 19 nt, Artificial Sequence
  Description of Artificial Sequence: Synthetic oligonucleotide
guacaauguguggccuuau

SEQ ID NO: 163139 - RNA, 19 nt, Artificial Sequence
  Description of Artificial Sequence: Synthetic oligonucleotide
gguuagcucaggaggcaau

SEQ ID NO: 163140 - RNA, 19 nt, Artificial Sequence
  Description of Artificial Sequence: Synthetic oligonucleotide
gcaccauaaguggggaaau

SEQ ID NO: 163141 - RNA, 19 nt, Artificial Sequence
  Description of Artificial Sequence: Synthetic oligonucleotide
cccagcaauuaaauacuuu

SEQ ID NO: 163142 - RNA, 19 nt, Artificial Sequence
  Description of Artificial Sequence: Synthetic oligonucleotide
cuaggccaguuaggggaua

SEQ ID NO: 163143 - RNA, 19 nt, Artificial Sequence
  Description of Artificial Sequence: Synthetic oligonucleotide
gggcuaggccauugcagau

SEQ ID NO: 163144 - RNA, 19 nt, Artificial Sequence
  Description of Artificial Sequence: Synthetic oligonucleotide
cgaauuagugcagcaggcu

SEQ ID NO: 163145 - RNA, 19 nt, Artificial Sequence
  Description of Artificial Sequence: Synthetic oligonucleotide
ccugcacguuugcuaugca

SEQ ID NO: 163146 - RNA, 19 nt, Artificial Sequence
  Description of Artificial Sequence: Synthetic oligonucleotide
gccggacuacugagcacca

SEQ ID NO: 163147 - RNA, 19 nt, Artificial Sequence
  Description of Artificial Sequence: Synthetic oligonucleotide
ggcucuucauagguuuguu

SEQ ID NO: 163148 - RNA, 19 nt, Artificial Sequence
  Description of Artificial Sequence: Synthetic oligonucleotide
ggggaguuccuaacuucuu

SEQ ID NO: 163149 - RNA, 19 nt, Artificial Sequence
  Description of Artificial Sequence: Synthetic oligonucleotide
cguuugcuaugcaccacau

SEQ ID NO: 163150 - RNA, 19 nt, Artificial Sequence
  Description of Artificial Sequence: Synthetic oligonucleotide
ccggacuacugagcaccau

SEQ ID NO: 163151 - RNA, 19 nt, Artificial Sequence
  Description of Artificial Sequence: Synthetic oligonucleotide
aaauaaaccacccuggcuc

SEQ ID NO: 163152 - RNA, 19 nt, Artificial Sequence
  Description of Artificial Sequence: Synthetic oligonucleotide
uaucagacuauccugacgg

SEQ ID NO: 163153 - RNA, 19 nt, Artificial Sequence
  Description of Artificial Sequence: Synthetic oligonucleotide
aaacuuuacaccuaguuaa

SEQ ID NO: 163154 - RNA, 19 nt, Artificial Sequence
  Description of Artificial Sequence: Synthetic oligonucleotide
aaaugaaacgccuuguaca

SEQ ID NO: 163155 - RNA, 19 nt, Artificial Sequence
  Description of Artificial Sequence: Synthetic oligonucleotide
uaaccuauaaccuguaacc

SEQ ID NO: 163156 - RNA, 19 nt, Artificial Sequence
  Description of Artificial Sequence: Synthetic oligonucleotide
uuuuacuuaaucucugucc

SEQ ID NO: 163157 - RNA, 19 nt, Artificial Sequence
  Description of Artificial Sequence: Synthetic oligonucleotide
uugacuaagugacacacag

SEQ ID NO: 163158 - RNA, 19 nt, Artificial Sequence
  Description of Artificial Sequence: Synthetic oligonucleotide
auagaaccgauugugaucc

SEQ ID NO: 163159 - RNA, 19 nt, Artificial Sequence
  Description of Artificial Sequence: Synthetic oligonucleotide
aguguguuccucuuggccc

SEQ ID NO: 163160 - RNA, 19 nt, Artificial Sequence
  Description of Artificial Sequence: Synthetic oligonucleotide
uuuacuuaaucucuguccu

SEQ ID NO: 163161 - RNA, 19 nt, Artificial Sequence
  Description of Artificial Sequence: Synthetic oligonucleotide
acuagcuucagaccagucc

SEQ ID NO: 163162 - RNA, 19 nt, Artificial Sequence
  Description of Artificial Sequence: Synthetic oligonucleotide
uguuauaaccuauaaccug

SEQ ID NO: 163163 - RNA, 19 nt, Artificial Sequence
  Description of Artificial Sequence: Synthetic oligonucleotide
ugaauagacugcaaugugc

SEQ ID NO: 163164 - RNA, 19 nt, Artificial Sequence
  Description of Artificial Sequence: Synthetic oligonucleotide
auagucuucuggcugaaac

SEQ ID NO: 163165 - RNA, 19 nt, Artificial Sequence
  Description of Artificial Sequence: Synthetic oligonucleotide
uuagaacuaaacuaauacu

SEQ ID NO: 163166 - RNA, 19 nt, Artificial Sequence
  Description of Artificial Sequence: Synthetic oligonucleotide
cauuguauuaacugaacac

SEQ ID NO: 163167 - RNA, 19 nt, Artificial Sequence
  Description of Artificial Sequence: Synthetic oligonucleotide
uguaaggcggccugcaucg

SEQ ID NO: 163168 - RNA, 19 nt, Artificial Sequence
  Description of Artificial Sequence: Synthetic oligonucleotide
gacuaagugacacacagga

SEQ ID NO: 163169 - RNA, 19 nt, Artificial Sequence
  Description of Artificial Sequence: Synthetic oligonucleotide
aaccuguaaccauguaacc

SEQ ID NO: 163170 - RNA, 19 nt, Artificial Sequence
  Description of Artificial Sequence: Synthetic oligonucleotide
aaugaaacgccuuguacaa

SEQ ID NO: 163171 - RNA, 19 nt, Artificial Sequence
  Description of Artificial Sequence: Synthetic oligonucleotide
guaauuggucgucugauag

SEQ ID NO: 163172 - RNA, 19 nt, Artificial Sequence
  Description of Artificial Sequence: Synthetic oligonucleotide
aacacagcuaaacaguaaa

SEQ ID NO: 163173 - RNA, 19 nt, Artificial Sequence
  Description of Artificial Sequence: Synthetic oligonucleotide
acuaagcaguaauuggucg

SEQ ID NO: 163174 - RNA, 19 nt, Artificial Sequence
  Description of Artificial Sequence: Synthetic oligonucleotide
aggacuaaugcuuauuaug

SEQ ID NO: 163175 - RNA, 19 nt, Artificial Sequence
  Description of Artificial Sequence: Synthetic oligonucleotide
ccauuauuaaacuagaguc

SEQ ID NO: 163176 - RNA, 19 nt, Artificial Sequence
  Description of Artificial Sequence: Synthetic oligonucleotide
aucggaaccuuccagaaug

SEQ ID NO: 163177 - RNA, 19 nt, Artificial Sequence
  Description of Artificial Sequence: Synthetic oligonucleotide
cuagcuucagaccaguccc

SEQ ID NO: 163178 - RNA, 19 nt, Artificial Sequence
  Description of Artificial Sequence: Synthetic oligonucleotide
uuuacaugcucuacaguca

SEQ ID NO: 163179 - RNA, 19 nt, Artificial Sequence
  Description of Artificial Sequence: Synthetic oligonucleotide
cauguguuaacaaacaaaa

SEQ ID NO: 163180 - RNA, 19 nt, Artificial Sequence
  Description of Artificial Sequence: Synthetic oligonucleotide
uuacaugcucuacagucag

SEQ ID NO: 163181 - RNA, 19 nt, Artificial Sequence
  Description of Artificial Sequence: Synthetic oligonucleotide
  modified_base (3)..(3): a, c, u, g, unknown or other
ucncaaaggacuaaugcuu

SEQ ID NO: 163182 - RNA, 19 nt, Artificial Sequence
  Description of Artificial Sequence: Synthetic oligonucleotide
caauuucuuacauguaccc

SEQ ID NO: 163183 - RNA, 19 nt, Artificial Sequence
  Description of Artificial Sequence: Synthetic oligonucleotide
aacacuugaauagacugca

SEQ ID NO: 163184 - RNA, 19 nt, Artificial Sequence
  Description of Artificial Sequence: Synthetic oligonucleotide
agaaugucuccucagucag

SEQ ID NO: 163185 - RNA, 19 nt, Artificial Sequence
  Description of Artificial Sequence: Synthetic oligonucleotide
aauuggucgucugauagca

SEQ ID NO: 163186 - RNA, 19 nt, Artificial Sequence
  Description of Artificial Sequence: Synthetic oligonucleotide
uacuaucagacuauccuga

SEQ ID NO: 163187 - RNA, 19 nt, Artificial Sequence
  Description of Artificial Sequence: Synthetic oligonucleotide
uaguuaacuaagcaguaau

SEQ ID NO: 163188 - RNA, 19 nt, Artificial Sequence
  Description of Artificial Sequence: Synthetic oligonucleotide
aauaaaccacccuggcuca

SEQ ID NO: 163189 - RNA, 19 nt, Artificial Sequence
  Description of Artificial Sequence: Synthetic oligonucleotide
acauuguauuaacugaaca

SEQ ID NO: 163190 - RNA, 19 nt, Artificial Sequence
  Description of Artificial Sequence: Synthetic oligonucleotide
acgauuuacaaaugguuga

SEQ ID NO: 163191 - RNA, 19 nt, Artificial Sequence
  Description of Artificial Sequence: Synthetic oligonucleotide
aauccaauaggggcuuuac

SEQ ID NO: 163192 - RNA, 19 nt, Artificial Sequence
  Description of Artificial Sequence: Synthetic oligonucleotide
ugaacaggccgccuccugg

SEQ ID NO: 163193 - RNA, 19 nt, Artificial Sequence
  Description of Artificial Sequence: Synthetic oligonucleotide
agcgcgaagguguaaggcg

SEQ ID NO: 163194 - RNA, 19 nt, Artificial Sequence
  Description of Artificial Sequence: Synthetic oligonucleotide
aucagcuagcucuggauag

SEQ ID NO: 163195 - RNA, 19 nt, Artificial Sequence
  Description of Artificial Sequence: Synthetic oligonucleotide
acuaucagacuauccugac

SEQ ID NO: 163196 - RNA, 19 nt, Artificial Sequence
  Description of Artificial Sequence: Synthetic oligonucleotide
cuaccuaagggcauacuug

SEQ ID NO: 163197 - RNA, 19 nt, Artificial Sequence
  Description of Artificial Sequence: Synthetic oligonucleotide
aacuagaguccauuuuaca

SEQ ID NO: 163198 - RNA, 19 nt, Artificial Sequence
  Description of Artificial Sequence: Synthetic oligonucleotide
aaacuggguauccccauga

SEQ ID NO: 163199 - RNA, 19 nt, Artificial Sequence
  Description of Artificial Sequence: Synthetic oligonucleotide
auaggggcuuuacauuuac

SEQ ID NO: 163200 - RNA, 19 nt, Artificial Sequence
  Description of Artificial Sequence: Synthetic oligonucleotide
cuuugacuaagugacacac

SEQ ID NO: 163201 - RNA, 19 nt, Artificial Sequence
  Description of Artificial Sequence: Synthetic oligonucleotide
gauagagggaggaauccag

SEQ ID NO: 163202 - RNA, 19 nt, Artificial Sequence
  Description of Artificial Sequence: Synthetic oligonucleotide
cucagaauggcgugcgacg

SEQ ID NO: 163203 - RNA, 19 nt, Artificial Sequence
  Description of Artificial Sequence: Synthetic oligonucleotide
cuaaugcuuauuauguaca

SEQ ID NO: 163204 - RNA, 19 nt, Artificial Sequence
  Description of Artificial Sequence: Synthetic oligonucleotide
cauagaaccgauugugauc

SEQ ID NO: 163205 - RNA, 19 nt, Artificial Sequence
  Description of Artificial Sequence: Synthetic oligonucleotide
guauuaacugaacacagcu

SEQ ID NO: 163206 - RNA, 19 nt, Artificial Sequence
  Description of Artificial Sequence: Synthetic oligonucleotide
cugugcgccacgaaggugc

SEQ ID NO: 163207 - RNA, 19 nt, Artificial Sequence
  Description of Artificial Sequence: Synthetic oligonucleotide
acaacauagucuucuggcu

SEQ ID NO: 163208 - RNA, 19 nt, Artificial Sequence
  Description of Artificial Sequence: Synthetic oligonucleotide
ucagaauggcgugcgacgg

SEQ ID NO: 163209 - RNA, 19 nt, Artificial Sequence
  Description of Artificial Sequence: Synthetic oligonucleotide
uauuaacugaacacagcua

SEQ ID NO: 163210 - RNA, 19 nt, Artificial Sequence
  Description of Artificial Sequence: Synthetic oligonucleotide
aaugguuauguaaaacuuu

SEQ ID NO: 163211 - RNA, 19 nt, Artificial Sequence
  Description of Artificial Sequence: Synthetic oligonucleotide
uuugacuaagugacacaca

SEQ ID NO: 163212 - RNA, 19 nt, Artificial Sequence
  Description of Artificial Sequence: Synthetic oligonucleotide
aaccuauaaccuguaacca

SEQ ID NO: 163213 - RNA, 19 nt, Artificial Sequence
  Description of Artificial Sequence: Synthetic oligonucleotide
caaugcaucucugaagcgc

SEQ ID NO: 163214 - RNA, 19 nt, Artificial Sequence
  Description of Artificial Sequence: Synthetic oligonucleotide
aacuauugacaugaauggu

SEQ ID NO: 163215 - RNA, 19 nt, Artificial Sequence
  Description of Artificial Sequence: Synthetic oligonucleotide
auauacaguggguacuccu

SEQ ID NO: 163216 - RNA, 19 nt, Artificial Sequence
  Description of Artificial Sequence: Synthetic oligonucleotide
caggcugcgcaccacaacg

SEQ ID NO: 163217 - RNA, 19 nt, Artificial Sequence
  Description of Artificial Sequence: Synthetic oligonucleotide
aaugcaucucugaagcgcu

SEQ ID NO: 163218 - RNA, 19 nt, Artificial Sequence
  Description of Artificial Sequence: Synthetic oligonucleotide
uccccuuagguacucuugc

SEQ ID NO: 163219 - RNA, 19 nt, Artificial Sequence
  Description of Artificial Sequence: Synthetic oligonucleotide
caucacgccccaacgaagg

SEQ ID NO: 163220 - RNA, 19 nt, Artificial Sequence
  Description of Artificial Sequence: Synthetic oligonucleotide
uaaacuggguauccccaug

SEQ ID NO: 163221 - RNA, 19 nt, Artificial Sequence
  Description of Artificial Sequence: Synthetic oligonucleotide
ugucuaaucuuuggcagca

SEQ ID NO: 163222 - RNA, 19 nt, Artificial Sequence
  Description of Artificial Sequence: Synthetic oligonucleotide
aauggcgugcgacggucag

SEQ ID NO: 163223 - RNA, 19 nt, Artificial Sequence
  Description of Artificial Sequence: Synthetic oligonucleotide
gaagguguaaggcggccug

SEQ ID NO: 163224 - RNA, 19 nt, Artificial Sequence
  Description of Artificial Sequence: Synthetic oligonucleotide
ugguuauguaaaacuuuac

SEQ ID NO: 163225 - RNA, 19 nt, Artificial Sequence
  Description of Artificial Sequence: Synthetic oligonucleotide
auguuauaaccuauaaccu

SEQ ID NO: 163226 - RNA, 19 nt, Artificial Sequence
  Description of Artificial Sequence: Synthetic oligonucleotide
uauaaccuauaaccuguaa

SEQ ID NO: 163227 - RNA, 19 nt, Artificial Sequence
  Description of Artificial Sequence: Synthetic oligonucleotide
ucuaaucuuuggcagcaua

SEQ ID NO: 163228 - RNA, 19 nt, Artificial Sequence
  Description of Artificial Sequence: Synthetic oligonucleotide
ugggaucggaaccuuccag

SEQ ID NO: 163229 - RNA, 19 nt, Artificial Sequence
  Description of Artificial Sequence: Synthetic oligonucleotide
aacuggguauccccaugag

SEQ ID NO: 163230 - RNA, 19 nt, Artificial Sequence
  Description of Artificial Sequence: Synthetic oligonucleotide
uaaucuuuggcagcauaga

SEQ ID NO: 163231 - RNA, 19 nt, Artificial Sequence
  Description of Artificial Sequence: Synthetic oligonucleotide
  modified_base (4)..(4): a, c, u, g, unknown or other
gucncaaaggacuaaugcu

SEQ ID NO: 163232 - RNA, 19 nt, Artificial Sequence
  Description of Artificial Sequence: Synthetic oligonucleotide
gacaggacacgauuuacaa

SEQ ID NO: 163233 - RNA, 19 nt, Artificial Sequence
  Description of Artificial Sequence: Synthetic oligonucleotide
accugcauauaacaaaaua

SEQ ID NO: 163234 - RNA, 19 nt, Artificial Sequence
  Description of Artificial Sequence: Synthetic oligonucleotide
acucagaauggcgugcgac

SEQ ID NO: 163235 - RNA, 19 nt, Artificial Sequence
  Description of Artificial Sequence: Synthetic oligonucleotide
gguacugcgagcucggcug

SEQ ID NO: 163236 - RNA, 19 nt, Artificial Sequence
  Description of Artificial Sequence: Synthetic oligonucleotide
  modified_base (18)..(18): a, c, u, g, unknown or other
cauuuaccaugucagucnc

SEQ ID NO: 163237 - RNA, 19 nt, Artificial Sequence
  Description of Artificial Sequence: Synthetic oligonucleotide
ugggguggcuccaauuuca

SEQ ID NO: 163238 - RNA, 19 nt, Artificial Sequence
  Description of Artificial Sequence: Synthetic oligonucleotide
acuauugacaugaaugguu

SEQ ID NO: 163239 - RNA, 19 nt, Artificial Sequence
  Description of Artificial Sequence: Synthetic oligonucleotide
gaaccgauugugauccucc

SEQ ID NO: 163240 - RNA, 19 nt, Artificial Sequence
  Description of Artificial Sequence: Synthetic oligonucleotide
ugguauaaacuggguaucc

SEQ ID NO: 163241 - RNA, 19 nt, Artificial Sequence
  Description of Artificial Sequence: Synthetic oligonucleotide
ucagacuauccugacggug

SEQ ID NO: 163242 - RNA, 19 nt, Artificial Sequence
  Description of Artificial Sequence: Synthetic oligonucleotide
  modified_base (7)..(7): a, c, u, g, unknown or other
ucagucncaaaggacuaau

SEQ ID NO: 163243 - RNA, 19 nt, Artificial Sequence
  Description of Artificial Sequence: Synthetic oligonucleotide
uacuuaaucucuguccuua

SEQ ID NO: 163244 - RNA, 19 nt, Artificial Sequence
  Description of Artificial Sequence: Synthetic oligonucleotide
uccucuugaagcacucagu

SEQ ID NO: 163245 - RNA, 19 nt, Artificial Sequence
  Description of Artificial Sequence: Synthetic oligonucleotide
  modified_base (9)..(9): a, c, u, g, unknown or other
ugucagucncaaaggacua

SEQ ID NO: 163246 - RNA, 19 nt, Artificial Sequence
  Description of Artificial Sequence: Synthetic oligonucleotide
cuauugacaugaaugguua

SEQ ID NO: 163247 - RNA, 19 nt, Artificial Sequence
  Description of Artificial Sequence: Synthetic oligonucleotide
cauugaggauuguugucug

SEQ ID NO: 163248 - RNA, 19 nt, Artificial Sequence
  Description of Artificial Sequence: Synthetic oligonucleotide
uguaaccauguaaccuugu

SEQ ID NO: 163249 - RNA, 19 nt, Artificial Sequence
  Description of Artificial Sequence: Synthetic oligonucleotide
agcguugaguaguuggcgu

SEQ ID NO: 163250 - RNA, 19 nt, Artificial Sequence
  Description of Artificial Sequence: Synthetic oligonucleotide
uuauaaccuauaaccugua

SEQ ID NO: 163251 - RNA, 19 nt, Artificial Sequence
  Description of Artificial Sequence: Synthetic oligonucleotide
aaaccacugucuauguuau

SEQ ID NO: 163252 - RNA, 19 nt, Artificial Sequence
  Description of Artificial Sequence: Synthetic oligonucleotide
ucgucugauagcaccugga

SEQ ID NO: 163253 - RNA, 19 nt, Artificial Sequence
  Description of Artificial Sequence: Synthetic oligonucleotide
agaauggcgugcgacgguc

SEQ ID NO: 163254 - RNA, 19 nt, Artificial Sequence
  Description of Artificial Sequence: Synthetic oligonucleotide
ugcgguacugcgagcucgg

SEQ ID NO: 163255 - RNA, 19 nt, Artificial Sequence
  Description of Artificial Sequence: Synthetic oligonucleotide
gcaaccuaaucuuuucccc

SEQ ID NO: 163256 - RNA, 19 nt, Artificial Sequence
  Description of Artificial Sequence: Synthetic oligonucleotide
agcaguaauuggucgucug

SEQ ID NO: 163257 - RNA, 19 nt, Artificial Sequence
  Description of Artificial Sequence: Synthetic oligonucleotide
caggacacgauuuacaaau

SEQ ID NO: 163258 - RNA, 19 nt, Artificial Sequence
  Description of Artificial Sequence: Synthetic oligonucleotide
uguccguaccauuggacau

SEQ ID NO: 163259 - RNA, 19 nt, Artificial Sequence
  Description of Artificial Sequence: Synthetic oligonucleotide
gauagcaccuggaugaggu

SEQ ID NO: 163260 - RNA, 19 nt, Artificial Sequence
  Description of Artificial Sequence: Synthetic oligonucleotide
aguuggcguucaucugugc

SEQ ID NO: 163261 - RNA, 19 nt, Artificial Sequence
  Description of Artificial Sequence: Synthetic oligonucleotide
gcaauuucuuacauguacc

SEQ ID NO: 163262 - RNA, 19 nt, Artificial Sequence
  Description of Artificial Sequence: Synthetic oligonucleotide
guacacgccaccaccaccc

SEQ ID NO: 163263 - RNA, 19 nt, Artificial Sequence
  Description of Artificial Sequence: Synthetic oligonucleotide
uggacggcgaguccucagc

SEQ ID NO: 163264 - RNA, 19 nt, Artificial Sequence
  Description of Artificial Sequence: Synthetic oligonucleotide
ugcacgacgagcagucauc

SEQ ID NO: 163265 - RNA, 19 nt, Artificial Sequence
  Description of Artificial Sequence: Synthetic oligonucleotide
gucgucugauagcaccugg

SEQ ID NO: 163266 - RNA, 19 nt, Artificial Sequence
  Description of Artificial Sequence: Synthetic oligonucleotide
uggagcgcugguaccacug

SEQ ID NO: 163267 - RNA, 19 nt, Artificial Sequence
  Description of Artificial Sequence: Synthetic oligonucleotide
uggucgucugauagcaccu

SEQ ID NO: 163268 - RNA, 19 nt, Artificial Sequence
  Description of Artificial Sequence: Synthetic oligonucleotide
ugcgccacgaaggugcucu

SEQ ID NO: 163269 - RNA, 19 nt, Artificial Sequence
  Description of Artificial Sequence: Synthetic oligonucleotide
gacggucagaacaggccgg

SEQ ID NO: 163270 - RNA, 19 nt, Artificial Sequence
  Description of Artificial Sequence: Synthetic oligonucleotide
  modified_base (6)..(6): a, c, u, g, unknown or other
cagucncaaaggacuaaug

SEQ ID NO: 163271 - RNA, 19 nt, Artificial Sequence
  Description of Artificial Sequence: Synthetic oligonucleotide
agugccgagggccgaagcu

SEQ ID NO: 163272 - RNA, 19 nt, Artificial Sequence
  Description of Artificial Sequence: Synthetic oligonucleotide
cuguccguaccauuggaca

SEQ ID NO: 163273 - RNA, 19 nt, Artificial Sequence
  Description of Artificial Sequence: Synthetic oligonucleotide
auugcugcuacgaguccuc

SEQ ID NO: 163274 - RNA, 19 nt, Artificial Sequence
  Description of Artificial Sequence: Synthetic oligonucleotide
augcgguacugcgagcucg

SEQ ID NO: 163275 - RNA, 19 nt, Artificial Sequence
  Description of Artificial Sequence: Synthetic oligonucleotide
uccuguccguaccauugga

SEQ ID NO: 163276 - RNA, 19 nt, Artificial Sequence
  Description of Artificial Sequence: Synthetic oligonucleotide
acaggacacgauuuacaaa

SEQ ID NO: 163277 - RNA, 19 nt, Artificial Sequence
  Description of Artificial Sequence: Synthetic oligonucleotide
caugaaugguuauguaaaa

SEQ ID NO: 163278 - RNA, 19 nt, Artificial Sequence
  Description of Artificial Sequence: Synthetic oligonucleotide
uugaacaggccgccuccug

SEQ ID NO: 163279 - RNA, 19 nt, Artificial Sequence
  Description of Artificial Sequence: Synthetic oligonucleotide
acgagcagucauccauggg

SEQ ID NO: 163280 - RNA, 19 nt, Artificial Sequence
  Description of Artificial Sequence: Synthetic oligonucleotide
aguuaacuaagcaguaauu

SEQ ID NO: 163281 - RNA, 19 nt, Artificial Sequence
  Description of Artificial Sequence: Synthetic oligonucleotide
uuacuuaaucucuguccuu

SEQ ID NO: 163282 - RNA, 19 nt, Artificial Sequence
  Description of Artificial Sequence: Synthetic oligonucleotide
ggcgcagcucaucugauac

SEQ ID NO: 163283 - RNA, 19 nt, Artificial Sequence
  Description of Artificial Sequence: Synthetic oligonucleotide
gagcgcgaagguguaaggc

SEQ ID NO: 163284 - RNA, 19 nt, Artificial Sequence
  Description of Artificial Sequence: Synthetic oligonucleotide
uccguaccauuggacauca

SEQ ID NO: 163285 - RNA, 19 nt, Artificial Sequence
  Description of Artificial Sequence: Synthetic oligonucleotide
gguuugcuauauuuuagaa

SEQ ID NO: 163286 - RNA, 19 nt, Artificial Sequence
  Description of Artificial Sequence: Synthetic oligonucleotide
agcauagaaccgauuguga

SEQ ID NO: 163287 - RNA, 19 nt, Artificial Sequence
  Description of Artificial Sequence: Synthetic oligonucleotide
ugugccggguaguaguguu

SEQ ID NO: 163288 - RNA, 19 nt, Artificial Sequence
  Description of Artificial Sequence: Synthetic oligonucleotide
cuaagcaguaauuggucgu

SEQ ID NO: 163289 - RNA, 19 nt, Artificial Sequence
  Description of Artificial Sequence: Synthetic oligonucleotide
ugacucuaacuugggcugc

SEQ ID NO: 163290 - RNA, 19 nt, Artificial Sequence
  Description of Artificial Sequence: Synthetic oligonucleotide
  modified_base (2)..(2): a, c, u, g, unknown or other
cncaaaggacuaaugcuua

SEQ ID NO: 163291 - RNA, 19 nt, Artificial Sequence
  Description of Artificial Sequence: Synthetic oligonucleotide
cagcguugaguaguuggcg

SEQ ID NO: 163292 - RNA, 19 nt, Artificial Sequence
  Description of Artificial Sequence: Synthetic oligonucleotide
uaaaccacccuggcucaca

SEQ ID NO: 163293 - RNA, 19 nt, Artificial Sequence
  Description of Artificial Sequence: Synthetic oligonucleotide
guacucuugcagcugucuc

SEQ ID NO: 163294 - RNA, 19 nt, Artificial Sequence
  Description of Artificial Sequence: Synthetic oligonucleotide
aucagacuauccugacggu

SEQ ID NO: 163295 - RNA, 19 nt, Artificial Sequence
  Description of Artificial Sequence: Synthetic oligonucleotide
guugaaugugucuaaucuu

SEQ ID NO: 163296 - RNA, 19 nt, Artificial Sequence
  Description of Artificial Sequence: Synthetic oligonucleotide
ggacuaaugcuuauuaugu

SEQ ID NO: 163297 - RNA, 19 nt, Artificial Sequence
  Description of Artificial Sequence: Synthetic oligonucleotide
ugccggguaguaguguucu

SEQ ID NO: 163298 - RNA, 19 nt, Artificial Sequence
  Description of Artificial Sequence: Synthetic oligonucleotide
guacugcgagcucggcugg

SEQ ID NO: 163299 - RNA, 19 nt, Artificial Sequence
  Description of Artificial Sequence: Synthetic oligonucleotide
gcuggcgcgccuuggacgg

SEQ ID NO: 163300 - RNA, 19 nt, Artificial Sequence
  Description of Artificial Sequence: Synthetic oligonucleotide
ucacuagcuucagaccagu

SEQ ID NO: 163301 - RNA, 19 nt, Artificial Sequence
  Description of Artificial Sequence: Synthetic oligonucleotide
uggagcguggugugcgaga

SEQ ID NO: 163302 - RNA, 19 nt, Artificial Sequence
  Description of Artificial Sequence: Synthetic oligonucleotide
acggucagaacaggccggg

SEQ ID NO: 163303 - RNA, 19 nt, Artificial Sequence
  Description of Artificial Sequence: Synthetic oligonucleotide
cagacuauccugacggugu

SEQ ID NO: 163304 - RNA, 19 nt, Artificial Sequence
  Description of Artificial Sequence: Synthetic oligonucleotide
uggcgugcgacggucagaa

SEQ ID NO: 163305 - RNA, 19 nt, Artificial Sequence
  Description of Artificial Sequence: Synthetic oligonucleotide
gguaaucaagaucauggau

SEQ ID NO: 163306 - RNA, 19 nt, Artificial Sequence
  Description of Artificial Sequence: Synthetic oligonucleotide
uugcugcuacgaguccucg

SEQ ID NO: 163307 - RNA, 19 nt, Artificial Sequence
  Description of Artificial Sequence: Synthetic oligonucleotide
ggagcgcgaagguguaagg

SEQ ID NO: 163308 - RNA, 19 nt, Artificial Sequence
  Description of Artificial Sequence: Synthetic oligonucleotide
gggaucggaaccuuccaga

SEQ ID NO: 163309 - RNA, 19 nt, Artificial Sequence
  Description of Artificial Sequence: Synthetic oligonucleotide
accuaagggcauacuuggg

SEQ ID NO: 163310 - RNA, 19 nt, Artificial Sequence
  Description of Artificial Sequence: Synthetic oligonucleotide
cucgaguggcuggugcacg

SEQ ID NO: 163311 - RNA, 19 nt, Artificial Sequence
  Description of Artificial Sequence: Synthetic oligonucleotide
ccaacgaaggaguccgcag

SEQ ID NO: 163312 - RNA, 19 nt, Artificial Sequence
  Description of Artificial Sequence: Synthetic oligonucleotide
gcgugcgacggucagaaca

SEQ ID NO: 163313 - RNA, 19 nt, Artificial Sequence
  Description of Artificial Sequence: Synthetic oligonucleotide
ccuggcucacaacauaguc

SEQ ID NO: 163314 - RNA, 19 nt, Artificial Sequence
  Description of Artificial Sequence: Synthetic oligonucleotide
acacagcuaaacaguaaaa

SEQ ID NO: 163315 - RNA, 19 nt, Artificial Sequence
  Description of Artificial Sequence: Synthetic oligonucleotide
cugcuacgaguccucggag

SEQ ID NO: 163316 - RNA, 19 nt, Artificial Sequence
  Description of Artificial Sequence: Synthetic oligonucleotide
ccccauuauuaaacuagag

SEQ ID NO: 163317 - RNA, 19 nt, Artificial Sequence
  Description of Artificial Sequence: Synthetic oligonucleotide
aucacgccccaacgaagga

SEQ ID NO: 163318 - RNA, 19 nt, Artificial Sequence
  Description of Artificial Sequence: Synthetic oligonucleotide
ugugcgccacgaaggugcu

SEQ ID NO: 163319 - RNA, 19 nt, Artificial Sequence
  Description of Artificial Sequence: Synthetic oligonucleotide
aggacacgauuuacaaaug

SEQ ID NO: 163320 - RNA, 19 nt, Artificial Sequence
  Description of Artificial Sequence: Synthetic oligonucleotide
gcgcgaagguguaaggcgg

SEQ ID NO: 163321 - RNA, 19 nt, Artificial Sequence
  Description of Artificial Sequence: Synthetic oligonucleotide
cgugcgacggucagaacag

SEQ ID NO: 163322 - RNA, 19 nt, Artificial Sequence
  Description of Artificial Sequence: Synthetic oligonucleotide
uuccuaccuaagggcauac

SEQ ID NO: 163323 - RNA, 19 nt, Artificial Sequence
  Description of Artificial Sequence: Synthetic oligonucleotide
aggcugcgcaccacaacgg

SEQ ID NO: 163324 - RNA, 19 nt, Artificial Sequence
  Description of Artificial Sequence: Synthetic oligonucleotide
ggaucggaaccuuccagaa

SEQ ID NO: 163325 - RNA, 19 nt, Artificial Sequence
  Description of Artificial Sequence: Synthetic oligonucleotide
cccuccuaucuguuuauug

SEQ ID NO: 163326 - RNA, 19 nt, Artificial Sequence
  Description of Artificial Sequence: Synthetic oligonucleotide
guauccccaugaggcaucc

SEQ ID NO: 163327 - RNA, 19 nt, Artificial Sequence
  Description of Artificial Sequence: Synthetic oligonucleotide
  modified_base (17)..(17): a, c, u, g, unknown or other
auuuaccaugucagucnca

SEQ ID NO: 163328 - RNA, 19 nt, Artificial Sequence
  Description of Artificial Sequence: Synthetic oligonucleotide
uccugacgguguucacagc

SEQ ID NO: 163329 - RNA, 19 nt, Artificial Sequence
  Description of Artificial Sequence: Synthetic oligonucleotide
gccauugaggauuguuguc

SEQ ID NO: 163330 - RNA, 19 nt, Artificial Sequence
  Description of Artificial Sequence: Synthetic oligonucleotide
auguacccaaagaauccaa

SEQ ID NO: 163331 - RNA, 19 nt, Artificial Sequence
  Description of Artificial Sequence: Synthetic oligonucleotide
cacuagcuucagaccaguc

SEQ ID NO: 163332 - RNA, 19 nt, Artificial Sequence
  Description of Artificial Sequence: Synthetic oligonucleotide
ccuguccguaccauuggac

SEQ ID NO: 163333 - RNA, 19 nt, Artificial Sequence
  Description of Artificial Sequence: Synthetic oligonucleotide
gacucagaauggcgugcga

SEQ ID NO: 163334 - RNA, 19 nt, Artificial Sequence
  Description of Artificial Sequence: Synthetic oligonucleotide
gaacaggccgccuccuggu

SEQ ID NO: 163335 - RNA, 19 nt, Artificial Sequence
  Description of Artificial Sequence: Synthetic oligonucleotide
ggacggcgaguccucagcc

SEQ ID NO: 163336 - RNA, 19 nt, Artificial Sequence
  Description of Artificial Sequence: Synthetic oligonucleotide
guccguaccauuggacauc

SEQ ID NO: 163337 - RNA, 19 nt, Artificial Sequence
  Description of Artificial Sequence: Synthetic oligonucleotide
gcgacggucagaacaggcc

SEQ ID NO: 163338 - RNA, 19 nt, Artificial Sequence
  Description of Artificial Sequence: Synthetic oligonucleotide
ggcuuuacauuuaccaugu

SEQ ID NO: 163339 - RNA, 19 nt, Artificial Sequence
  Description of Artificial Sequence: Synthetic oligonucleotide
cguggugugcgagaggcgg

SEQ ID NO: 163340 - RNA, 19 nt, Artificial Sequence
  Description of Artificial Sequence: Synthetic oligonucleotide
uccuaccuaagggcauacu

SEQ ID NO: 163341 - RNA, 19 nt, Artificial Sequence
  Description of Artificial Sequence: Synthetic oligonucleotide
gaucggaaccuuccagaau

SEQ ID NO: 163342 - RNA, 19 nt, Artificial Sequence
  Description of Artificial Sequence: Synthetic oligonucleotide
cacgccagcucucuuugaa

SEQ ID NO: 163343 - RNA, 19 nt, Artificial Sequence
  Description of Artificial Sequence: Synthetic oligonucleotide
cacgacaggacacgauuua

SEQ ID NO: 163344 - RNA, 19 nt, Artificial Sequence
  Description of Artificial Sequence: Synthetic oligonucleotide
ccuccuaucuguuuauugu

SEQ ID NO: 163345 - RNA, 19 nt, Artificial Sequence
  Description of Artificial Sequence: Synthetic oligonucleotide
cacgccccaacgaaggagu

SEQ ID NO: 163346 - RNA, 19 nt, Artificial Sequence
  Description of Artificial Sequence: Synthetic oligonucleotide
gaauggcgugcgacgguca

SEQ ID NO: 163347 - RNA, 19 nt, Artificial Sequence
  Description of Artificial Sequence: Synthetic oligonucleotide
gccaucacgccccaacgaa

SEQ ID NO: 163348 - RNA, 19 nt, Artificial Sequence
  Description of Artificial Sequence: Synthetic oligonucleotide
gcacgacgagcagucaucc

SEQ ID NO: 163349 - RNA, 19 nt, Artificial Sequence
  Description of Artificial Sequence: Synthetic oligonucleotide
  modified_base (8)..(8): a, c, u, g, unknown or other
gucagucncaaaggacuaa

SEQ ID NO: 163350 - RNA, 19 nt, Artificial Sequence
  Description of Artificial Sequence: Synthetic oligonucleotide
uggcagcauagaaccgauu

SEQ ID NO: 163351 - RNA, 19 nt, Artificial Sequence
  Description of Artificial Sequence: Synthetic oligonucleotide
ccggcugguagacacauaa

SEQ ID NO: 163352 - RNA, 19 nt, Artificial Sequence
  Description of Artificial Sequence: Synthetic oligonucleotide
cauugcugcuacgaguccu

SEQ ID NO: 163353 - RNA, 19 nt, Artificial Sequence
  Description of Artificial Sequence: Synthetic oligonucleotide
ccucaauauacagugggua

SEQ ID NO: 163354 - RNA, 19 nt, Artificial Sequence
  Description of Artificial Sequence: Synthetic oligonucleotide
ccuaagggcauacuugggu

SEQ ID NO: 163355 - RNA, 19 nt, Artificial Sequence
  Description of Artificial Sequence: Synthetic oligonucleotide
cuuccuaccuaagggcaua

SEQ ID NO: 163356 - RNA, 19 nt, Artificial Sequence
  Description of Artificial Sequence: Synthetic oligonucleotide
acgaaggaguccgcaggau

SEQ ID NO: 163357 - RNA, 19 nt, Artificial Sequence
  Description of Artificial Sequence: Synthetic oligonucleotide
ccgcuguccgaggaggugg

SEQ ID NO: 163358 - RNA, 19 nt, Artificial Sequence
  Description of Artificial Sequence: Synthetic oligonucleotide
ggucgucugauagcaccug

SEQ ID NO: 163359 - RNA, 19 nt, Artificial Sequence
  Description of Artificial Sequence: Synthetic oligonucleotide
gguauccccaugaggcauc

SEQ ID NO: 163360 - RNA, 19 nt, Artificial Sequence
  Description of Artificial Sequence: Synthetic oligonucleotide
ccauugcugcuacgagucc

SEQ ID NO: 163361 - RNA, 19 nt, Artificial Sequence
  Description of Artificial Sequence: Synthetic oligonucleotide
cacgacgagcagucaucca

SEQ ID NO: 163362 - RNA, 19 nt, Artificial Sequence
  Description of Artificial Sequence: Synthetic oligonucleotide
gugcacgacgagcagucau

SEQ ID NO: 163363 - RNA, 19 nt, Artificial Sequence
  Description of Artificial Sequence: Synthetic oligonucleotide
auggcgugcgacggucaga

SEQ ID NO: 163364 - RNA, 19 nt, Artificial Sequence
  Description of Artificial Sequence: Synthetic oligonucleotide
cgacaggacacgauuuaca

SEQ ID NO: 163365 - RNA, 19 nt, Artificial Sequence
  Description of Artificial Sequence: Synthetic oligonucleotide
guaaggcaacugagaggca

SEQ ID NO: 163366 - RNA, 19 nt, Artificial Sequence
  Description of Artificial Sequence: Synthetic oligonucleotide
cagagccuuugucaugggu

SEQ ID NO: 163367 - RNA, 19 nt, Artificial Sequence
  Description of Artificial Sequence: Synthetic oligonucleotide
cgcugcccucaauauacag

SEQ ID NO: 163368 - RNA, 19 nt, Artificial Sequence
  Description of Artificial Sequence: Synthetic oligonucleotide
ccgauugugauccuccaau

SEQ ID NO: 163369 - RNA, 19 nt, Artificial Sequence
  Description of Artificial Sequence: Synthetic oligonucleotide
gcgaagguguaaggcggcc

SEQ ID NO: 163370 - RNA, 19 nt, Artificial Sequence
  Description of Artificial Sequence: Synthetic oligonucleotide
gugugcgagaggcggcugu

SEQ ID NO: 163371 - RNA, 19 nt, Artificial Sequence
  Description of Artificial Sequence: Synthetic oligonucleotide
ccuaccuaagggcauacuu

SEQ ID NO: 163372 - RNA, 19 nt, Artificial Sequence
  Description of Artificial Sequence: Synthetic oligonucleotide
ccggguaguaguguucuga

SEQ ID NO: 163373 - RNA, 19 nt, Artificial Sequence
  Description of Artificial Sequence: Synthetic oligonucleotide
cgcgaagguguaaggcggc

SEQ ID NO: 163374 - RNA, 19 nt, Artificial Sequence
  Description of Artificial Sequence: Synthetic oligonucleotide
ccagugcgccugcugcccg

SEQ ID NO: 163375 - RNA, 19 nt, Artificial Sequence
  Description of Artificial Sequence: Synthetic oligonucleotide
cugacgguguucacagcuu

SEQ ID NO: 163376 - RNA, 19 nt, Artificial Sequence
  Description of Artificial Sequence: Synthetic oligonucleotide
cguugaguaguuggcguuc

SEQ ID NO: 163377 - RNA, 19 nt, Artificial Sequence
  Description of Artificial Sequence: Synthetic oligonucleotide
cugggagcgcgaaggugua

SEQ ID NO: 163378 - RNA, 19 nt, Artificial Sequence
  Description of Artificial Sequence: Synthetic oligonucleotide
ccauguaaccuugucuugu

SEQ ID NO: 163379 - RNA, 19 nt, Artificial Sequence
  Description of Artificial Sequence: Synthetic oligonucleotide
cagaauggcgugcgacggu

SEQ ID NO: 163380 - RNA, 19 nt, Artificial Sequence
  Description of Artificial Sequence: Synthetic oligonucleotide
agccgcuguccgaggaggu

SEQ ID NO: 163381 - RNA, 19 nt, Artificial Sequence
  Description of Artificial Sequence: Synthetic oligonucleotide
cccucaauauacagugggu

SEQ ID NO: 163382 - RNA, 19 nt, Artificial Sequence
  Description of Artificial Sequence: Synthetic oligonucleotide
gccggguaguaguguucug

SEQ ID NO: 163383 - RNA, 19 nt, Artificial Sequence
  Description of Artificial Sequence: Synthetic oligonucleotide
guggagcgcugguaccacu

SEQ ID NO: 163384 - RNA, 19 nt, Artificial Sequence
  Description of Artificial Sequence: Synthetic oligonucleotide
gccgcuguccgaggaggug

SEQ ID NO: 163385 - RNA, 19 nt, Artificial Sequence
  Description of Artificial Sequence: Synthetic oligonucleotide
gcguugaguaguuggcguu

SEQ ID NO: 163386 - RNA, 19 nt, Artificial Sequence
  Description of Artificial Sequence: Synthetic oligonucleotide
gccuuggacggcgaguccu

SEQ ID NO: 163387 - RNA, 19 nt, Artificial Sequence
  Description of Artificial Sequence: Synthetic oligonucleotide
ggguauccccaugaggcau

SEQ ID NO: 163388 - RNA, 19 nt, Artificial Sequence
  Description of Artificial Sequence: Synthetic oligonucleotide
ccggagcucgcugagccca

SEQ ID NO: 163389 - RNA, 19 nt, Artificial Sequence
  Description of Artificial Sequence: Synthetic oligonucleotide
gcgugcugccagguugggc

SEQ ID NO: 163390 - RNA, 19 nt, Artificial Sequence
  Description of Artificial Sequence: Synthetic oligonucleotide
ggugcacgacgagcaguca

SEQ ID NO: 163391 - RNA, 19 nt, Artificial Sequence
  Description of Artificial Sequence: Synthetic oligonucleotide
ggcgugcgacggucagaac

SEQ ID NO: 163392 - RNA, 19 nt, Artificial Sequence
  Description of Artificial Sequence: Synthetic oligonucleotide
ccguaccauuggacaucag

SEQ ID NO: 163393 - RNA, 19 nt, Artificial Sequence
  Description of Artificial Sequence: Synthetic oligonucleotide
gcgguacugcgagcucggc

SEQ ID NO: 163394 - RNA, 19 nt, Artificial Sequence
  Description of Artificial Sequence: Synthetic oligonucleotide
gcgcugcccucaauauaca

SEQ ID NO: 163395 - RNA, 19 nt, Artificial Sequence
  Description of Artificial Sequence: Synthetic oligonucleotide
cgccuuggacggcgagucc

SEQ ID NO: 163396 - RNA, 19 nt, Artificial Sequence
  Description of Artificial Sequence: Synthetic oligonucleotide
cggucagaacaggccgggc

SEQ ID NO: 163397 - RNA, 19 nt, Artificial Sequence
  Description of Artificial Sequence: Synthetic oligonucleotide
cgguacugcgagcucggcu

SEQ ID NO: 163398 - RNA, 19 nt, Artificial Sequence
  Description of Artificial Sequence: Synthetic oligonucleotide
ccccacgccagcucucuuu

SEQ ID NO: 163399 - RNA, 19 nt, Artificial Sequence
  Description of Artificial Sequence: Synthetic oligonucleotide
cgcgccuuggacggcgagu

SEQ ID NO: 163400 - RNA, 19 nt, Artificial Sequence
  Description of Artificial Sequence: Synthetic oligonucleotide
aaucauuacaguuagaccu

SEQ ID NO: 163401 - RNA, 19 nt, Artificial Sequence
  Description of Artificial Sequence: Synthetic oligonucleotide
acuacuaucgcucuguagc

SEQ ID NO: 163402 - RNA, 19 nt, Artificial Sequence
  Description of Artificial Sequence: Synthetic oligonucleotide
aauuauuaggccaagucac

SEQ ID NO: 163403 - RNA, 19 nt, Artificial Sequence
  Description of Artificial Sequence: Synthetic oligonucleotide
aaauuauuaggccaaguca

SEQ ID NO: 163404 - RNA, 19 nt, Artificial Sequence
  Description of Artificial Sequence: Synthetic oligonucleotide
auagcuaaaucuuaauagg

SEQ ID NO: 163405 - RNA, 19 nt, Artificial Sequence
  Description of Artificial Sequence: Synthetic oligonucleotide
agcaauguaaguuuaauca

SEQ ID NO: 163406 - RNA, 19 nt, Artificial Sequence
  Description of Artificial Sequence: Synthetic oligonucleotide
ucuaacuuuaaauaucagc

SEQ ID NO: 163407 - RNA, 19 nt, Artificial Sequence
  Description of Artificial Sequence: Synthetic oligonucleotide
uuuacacggaaaauggcgg

SEQ ID NO: 163408 - RNA, 19 nt, Artificial Sequence
  Description of Artificial Sequence: Synthetic oligonucleotide
aauuuaccuucauauacuc

SEQ ID NO: 163409 - RNA, 19 nt, Artificial Sequence
  Description of Artificial Sequence: Synthetic oligonucleotide
uuagcuuagagauaaacaa

SEQ ID NO: 163410 - RNA, 19 nt, Artificial Sequence
  Description of Artificial Sequence: Synthetic oligonucleotide
uuacaaagcaaucugcagc

SEQ ID NO: 163411 - RNA, 19 nt, Artificial Sequence
  Description of Artificial Sequence: Synthetic oligonucleotide
aguuaguuagcuuagagau

SEQ ID NO: 163412 - RNA, 19 nt, Artificial Sequence
  Description of Artificial Sequence: Synthetic oligonucleotide
uaaacuauuucugaaacca

SEQ ID NO: 163413 - RNA, 19 nt, Artificial Sequence
  Description of Artificial Sequence: Synthetic oligonucleotide
gacuaaacauaacaugugg

SEQ ID NO: 163414 - RNA, 19 nt, Artificial Sequence
  Description of Artificial Sequence: Synthetic oligonucleotide
aauaugguauggaaagacc

SEQ ID NO: 163415 - RNA, 19 nt, Artificial Sequence
  Description of Artificial Sequence: Synthetic oligonucleotide
uguugcacgguuauuuucg

SEQ ID NO: 163416 - RNA, 19 nt, Artificial Sequence
  Description of Artificial Sequence: Synthetic oligonucleotide
uacuauuucuaauuuaccu

SEQ ID NO: 163417 - RNA, 19 nt, Artificial Sequence
  Description of Artificial Sequence: Synthetic oligonucleotide
ccuuaaaguaacuagagcc

SEQ ID NO: 163418 - RNA, 19 nt, Artificial Sequence
  Description of Artificial Sequence: Synthetic oligonucleotide
aucggaacuacauuccuac

SEQ ID NO: 163419 - RNA, 19 nt, Artificial Sequence
  Description of Artificial Sequence: Synthetic oligonucleotide
uuaugauuuacacggaaaa

SEQ ID NO: 163420 - RNA, 19 nt, Artificial Sequence
  Description of Artificial Sequence: Synthetic oligonucleotide
uuuaugauagggucaucgg

SEQ ID NO: 163421 - RNA, 19 nt, Artificial Sequence
  Description of Artificial Sequence: Synthetic oligonucleotide
ugugcaaguccucagaccu

SEQ ID NO: 163422 - RNA, 19 nt, Artificial Sequence
  Description of Artificial Sequence: Synthetic oligonucleotide
ucguaagccaaacacaugu

SEQ ID NO: 163423 - RNA, 19 nt, Artificial Sequence
  Description of Artificial Sequence: Synthetic oligonucleotide
aaguuaguuagcuuagaga

SEQ ID NO: 163424 - RNA, 19 nt, Artificial Sequence
  Description of Artificial Sequence: Synthetic oligonucleotide
aaucaaggucccuuacuac

SEQ ID NO: 163425 - RNA, 19 nt, Artificial Sequence
  Description of Artificial Sequence: Synthetic oligonucleotide
cuuacguucaacucucugc

SEQ ID NO: 163426 - RNA, 19 nt, Artificial Sequence
  Description of Artificial Sequence: Synthetic oligonucleotide
uaauuuaccuucauauacu

SEQ ID NO: 163427 - RNA, 19 nt, Artificial Sequence
  Description of Artificial Sequence: Synthetic oligonucleotide
uuaguuagcuuagagauaa

SEQ ID NO: 163428 - RNA, 19 nt, Artificial Sequence
  Description of Artificial Sequence: Synthetic oligonucleotide
accuuaaaguaacuagagc

SEQ ID NO: 163429 - RNA, 19 nt, Artificial Sequence
  Description of Artificial Sequence: Synthetic oligonucleotide
uuauuguuuaugauuuaca

SEQ ID NO: 163430 - RNA, 19 nt, Artificial Sequence
  Description of Artificial Sequence: Synthetic oligonucleotide
gaaguuaguuagcuuagag

SEQ ID NO: 163431 - RNA, 19 nt, Artificial Sequence
  Description of Artificial Sequence: Synthetic oligonucleotide
cuuuaugauagggucaucg

SEQ ID NO: 163432 - RNA, 19 nt, Artificial Sequence
  Description of Artificial Sequence: Synthetic oligonucleotide
uuacaguuagaccugggcu

SEQ ID NO: 163433 - RNA, 19 nt, Artificial Sequence
  Description of Artificial Sequence: Synthetic oligonucleotide
acgaccuuaaaguaacuag

SEQ ID NO: 163434 - RNA, 19 nt, Artificial Sequence
  Description of Artificial Sequence: Synthetic oligonucleotide
acaacuaaucaacaguaca

SEQ ID NO: 163435 - RNA, 19 nt, Artificial Sequence
  Description of Artificial Sequence: Synthetic oligonucleotide
uaaaaggauacacaguauu

SEQ ID NO: 163436 - RNA, 19 nt, Artificial Sequence
  Description of Artificial Sequence: Synthetic oligonucleotide
uauacucuuaacuuugcaa

SEQ ID NO: 163437 - RNA, 19 nt, Artificial Sequence
  Description of Artificial Sequence: Synthetic oligonucleotide
uuaugauagggucaucgga

SEQ ID NO: 163438 - RNA, 19 nt, Artificial Sequence
  Description of Artificial Sequence: Synthetic oligonucleotide
aaaucaaggucccuuacua

SEQ ID NO: 163439 - RNA, 19 nt, Artificial Sequence
  Description of Artificial Sequence: Synthetic oligonucleotide
aacaagcguuucuggaagc

SEQ ID NO: 163440 - RNA, 19 nt, Artificial Sequence
  Description of Artificial Sequence: Synthetic oligonucleotide
uuuaugauuuacacggaaa

SEQ ID NO: 163441 - RNA, 19 nt, Artificial Sequence
  Description of Artificial Sequence: Synthetic oligonucleotide
augauuuacacggaaaaug

SEQ ID NO: 163442 - RNA, 19 nt, Artificial Sequence
  Description of Artificial Sequence: Synthetic oligonucleotide
uuacguucaacucucugcu

SEQ ID NO: 163443 - RNA, 19 nt, Artificial Sequence
  Description of Artificial Sequence: Synthetic oligonucleotide
ugcgcaaacucauuggcag

SEQ ID NO: 163444 - RNA, 19 nt, Artificial Sequence
  Description of Artificial Sequence: Synthetic oligonucleotide
uagcgcaacauuaaggccu

SEQ ID NO: 163445 - RNA, 19 nt, Artificial Sequence
  Description of Artificial Sequence: Synthetic oligonucleotide
gcucauauauauuuaacag

SEQ ID NO: 163446 - RNA, 19 nt, Artificial Sequence
  Description of Artificial Sequence: Synthetic oligonucleotide
caaacgaccuuaaaguaac

SEQ ID NO: 163447 - RNA, 19 nt, Artificial Sequence
  Description of Artificial Sequence: Synthetic oligonucleotide
uuagacaguguuucguaag

SEQ ID NO: 163448 - RNA, 19 nt, Artificial Sequence
  Description of Artificial Sequence: Synthetic oligonucleotide
ugacuaaacauaacaugug

SEQ ID NO: 163449 - RNA, 19 nt, Artificial Sequence
  Description of Artificial Sequence: Synthetic oligonucleotide
auagucgucacacuuuaug

SEQ ID NO: 163450 - RNA, 19 nt, Artificial Sequence
  Description of Artificial Sequence: Synthetic oligonucleotide
ucucuuauggggcuucugc

SEQ ID NO: 163451 - RNA, 19 nt, Artificial Sequence
  Description of Artificial Sequence: Synthetic oligonucleotide
guaaccagggaauuucucc

SEQ ID NO: 163452 - RNA, 19 nt, Artificial Sequence
  Description of Artificial Sequence: Synthetic oligonucleotide
aagagacucuaagugugcc

SEQ ID NO: 163453 - RNA, 19 nt, Artificial Sequence
  Description of Artificial Sequence: Synthetic oligonucleotide
uuugucguagaguugguaa

SEQ ID NO: 163454 - RNA, 19 nt, Artificial Sequence
  Description of Artificial Sequence: Synthetic oligonucleotide
agauuaguuuguacaaugc

SEQ ID NO: 163455 - RNA, 19 nt, Artificial Sequence
  Description of Artificial Sequence: Synthetic oligonucleotide
uucgguuucccucugugca

SEQ ID NO: 163456 - RNA, 19 nt, Artificial Sequence
  Description of Artificial Sequence: Synthetic oligonucleotide
uuauuuucgguuucccucu

SEQ ID NO: 163457 - RNA, 19 nt, Artificial Sequence
  Description of Artificial Sequence: Synthetic oligonucleotide
uuccuuauagugaagccuc

SEQ ID NO: 163458 - RNA, 19 nt, Artificial Sequence
  Description of Artificial Sequence: Synthetic oligonucleotide
acuguaaccagggaauuuc

SEQ ID NO: 163459 - RNA, 19 nt, Artificial Sequence
  Description of Artificial Sequence: Synthetic oligonucleotide
auccgcaaaaccaucaaac

SEQ ID NO: 163460 - RNA, 19 nt, Artificial Sequence
  Description of Artificial Sequence: Synthetic oligonucleotide
uuacacggaaaauggcggg

SEQ ID NO: 163461 - RNA, 19 nt, Artificial Sequence
  Description of Artificial Sequence: Synthetic oligonucleotide
auuaucccgagcaucuugc

SEQ ID NO: 163462 - RNA, 19 nt, Artificial Sequence
  Description of Artificial Sequence: Synthetic oligonucleotide
ugcaagagacucuaagugu

SEQ ID NO: 163463 - RNA, 19 nt, Artificial Sequence
  Description of Artificial Sequence: Synthetic oligonucleotide
cuuaacaacuggcagauaa

SEQ ID NO: 163464 - RNA, 19 nt, Artificial Sequence
  Description of Artificial Sequence: Synthetic oligonucleotide
aacaacuggcagauaauag

SEQ ID NO: 163465 - RNA, 19 nt, Artificial Sequence
  Description of Artificial Sequence: Synthetic oligonucleotide
aaucucgugugacuucuug

SEQ ID NO: 163466 - RNA, 19 nt, Artificial Sequence
  Description of Artificial Sequence: Synthetic oligonucleotide
acuaaucaacaguacauaa

SEQ ID NO: 163467 - RNA, 19 nt, Artificial Sequence
  Description of Artificial Sequence: Synthetic oligonucleotide
uaaaguaacuagagccagc

SEQ ID NO: 163468 - RNA, 19 nt, Artificial Sequence
  Description of Artificial Sequence: Synthetic oligonucleotide
auuacuugcaugcaauguu

SEQ ID NO: 163469 - RNA, 19 nt, Artificial Sequence
  Description of Artificial Sequence: Synthetic oligonucleotide
ugggauuguauaacaauaa

SEQ ID NO: 163470 - RNA, 19 nt, Artificial Sequence
  Description of Artificial Sequence: Synthetic oligonucleotide
ucgugugacuucuugacac

SEQ ID NO: 163471 - RNA, 19 nt, Artificial Sequence
  Description of Artificial Sequence: Synthetic oligonucleotide
ugaaggacgguaacagaug

SEQ ID NO: 163472 - RNA, 19 nt, Artificial Sequence
  Description of Artificial Sequence: Synthetic oligonucleotide
agcuaucuuacguucaacu

SEQ ID NO: 163473 - RNA, 19 nt, Artificial Sequence
  Description of Artificial Sequence: Synthetic oligonucleotide
uucuuaaacgaggauguca

SEQ ID NO: 163474 - RNA, 19 nt, Artificial Sequence
  Description of Artificial Sequence: Synthetic oligonucleotide
uuacuacugacuaaacaua

SEQ ID NO: 163475 - RNA, 19 nt, Artificial Sequence
  Description of Artificial Sequence: Synthetic oligonucleotide
cuagaacaagcguuucugg

SEQ ID NO: 163476 - RNA, 19 nt, Artificial Sequence
  Description of Artificial Sequence: Synthetic oligonucleotide
aggcucguuuccuucaucg

SEQ ID NO: 163477 - RNA, 19 nt, Artificial Sequence
  Description of Artificial Sequence: Synthetic oligonucleotide
aagccgaccauuccccauc

SEQ ID NO: 163478 - RNA, 19 nt, Artificial Sequence
  Description of Artificial Sequence: Synthetic oligonucleotide
gaaaugaccaccgaguaua

SEQ ID NO: 163479 - RNA, 19 nt, Artificial Sequence
  Description of Artificial Sequence: Synthetic oligonucleotide
gcuagcgcaacauuaaggc

SEQ ID NO: 163480 - RNA, 19 nt, Artificial Sequence
  Description of Artificial Sequence: Synthetic oligonucleotide
uuaaucaguaagugccaca

SEQ ID NO: 163481 - RNA, 19 nt, Artificial Sequence
  Description of Artificial Sequence: Synthetic oligonucleotide
agcuuagagauaaacaacu

SEQ ID NO: 163482 - RNA, 19 nt, Artificial Sequence
  Description of Artificial Sequence: Synthetic oligonucleotide
uguaagcauccaaagucac

SEQ ID NO: 163483 - RNA, 19 nt, Artificial Sequence
  Description of Artificial Sequence: Synthetic oligonucleotide
gcaauguaaguuuaaucag

SEQ ID NO: 163484 - RNA, 19 nt, Artificial Sequence
  Description of Artificial Sequence: Synthetic oligonucleotide
auaugguauggaaagacca

SEQ ID NO: 163485 - RNA, 19 nt, Artificial Sequence
  Description of Artificial Sequence: Synthetic oligonucleotide
aguguuucguaagccaaac

SEQ ID NO: 163486 - RNA, 19 nt, Artificial Sequence
  Description of Artificial Sequence: Synthetic oligonucleotide
ucucgugugacuucuugac

SEQ ID NO: 163487 - RNA, 19 nt, Artificial Sequence
  Description of Artificial Sequence: Synthetic oligonucleotide
gacugauaagggcuuagac

SEQ ID NO: 163488 - RNA, 19 nt, Artificial Sequence
  Description of Artificial Sequence: Synthetic oligonucleotide
aaaucuuaauaggcaaaga

SEQ ID NO: 163489 - RNA, 19 nt, Artificial Sequence
  Description of Artificial Sequence: Synthetic oligonucleotide
ugccacaacuaaucaacag

SEQ ID NO: 163490 - RNA, 19 nt, Artificial Sequence
  Description of Artificial Sequence: Synthetic oligonucleotide
uguaacugugccgagcacu

SEQ ID NO: 163491 - RNA, 19 nt, Artificial Sequence
  Description of Artificial Sequence: Synthetic oligonucleotide
auguugcacgguuauuuuc

SEQ ID NO: 163492 - RNA, 19 nt, Artificial Sequence
  Description of Artificial Sequence: Synthetic oligonucleotide
uuccuuacuagcuggugga

SEQ ID NO: 163493 - RNA, 19 nt, Artificial Sequence
  Description of Artificial Sequence: Synthetic oligonucleotide
auuccuuauagugaagccu

SEQ ID NO: 163494 - RNA, 19 nt, Artificial Sequence
  Description of Artificial Sequence: Synthetic oligonucleotide
uacaguuagaccugggcuu

SEQ ID NO: 163495 - RNA, 19 nt, Artificial Sequence
  Description of Artificial Sequence: Synthetic oligonucleotide
uuaacaacuggcagauaau

SEQ ID NO: 163496 - RNA, 19 nt, Artificial Sequence
  Description of Artificial Sequence: Synthetic oligonucleotide
cagcaugaaagcuuccggc

SEQ ID NO: 163497 - RNA, 19 nt, Artificial Sequence
  Description of Artificial Sequence: Synthetic oligonucleotide
ucaccuaaaagcugugcaa

SEQ ID NO: 163498 - RNA, 19 nt, Artificial Sequence
  Description of Artificial Sequence: Synthetic oligonucleotide
agcaugaaagcuuccggcu

SEQ ID NO: 163499 - RNA, 19 nt, Artificial Sequence
  Description of Artificial Sequence: Synthetic oligonucleotide
guaagugccacaacuaauc

SEQ ID NO: 163500 - RNA, 19 nt, Artificial Sequence
  Description of Artificial Sequence: Synthetic oligonucleotide
acuaucgcucuguagcuca

SEQ ID NO: 163501 - RNA, 19 nt, Artificial Sequence
  Description of Artificial Sequence: Synthetic oligonucleotide
uaauauauuggggucugaa

SEQ ID NO: 163502 - RNA, 19 nt, Artificial Sequence
  Description of Artificial Sequence: Synthetic oligonucleotide
aacuaaucaacaguacaua

SEQ ID NO: 163503 - RNA, 19 nt, Artificial Sequence
  Description of Artificial Sequence: Synthetic oligonucleotide
cuagcgcaacauuaaggcc

SEQ ID NO: 163504 - RNA, 19 nt, Artificial Sequence
  Description of Artificial Sequence: Synthetic oligonucleotide
auauacucuuaacuuugca

SEQ ID NO: 163505 - RNA, 19 nt, Artificial Sequence
  Description of Artificial Sequence: Synthetic oligonucleotide
uugaguaagguggagucaa

SEQ ID NO: 163506 - RNA, 19 nt, Artificial Sequence
  Description of Artificial Sequence: Synthetic oligonucleotide
auacuggcuuguuaccauc

SEQ ID NO: 163507 - RNA, 19 nt, Artificial Sequence
  Description of Artificial Sequence: Synthetic oligonucleotide
aaggaauuaucccgagcau

SEQ ID NO: 163508 - RNA, 19 nt, Artificial Sequence
  Description of Artificial Sequence: Synthetic oligonucleotide
ugauguugcacgguuauuu

SEQ ID NO: 163509 - RNA, 19 nt, Artificial Sequence
  Description of Artificial Sequence: Synthetic oligonucleotide
guacacaugaggacuaaug

SEQ ID NO: 163510 - RNA, 19 nt, Artificial Sequence
  Description of Artificial Sequence: Synthetic oligonucleotide
gucaagaguguuccggacc

SEQ ID NO: 163511 - RNA, 19 nt, Artificial Sequence
  Description of Artificial Sequence: Synthetic oligonucleotide
aagcccgucgaugcuuucc

SEQ ID NO: 163512 - RNA, 19 nt, Artificial Sequence
  Description of Artificial Sequence: Synthetic oligonucleotide
augcaaguguuauauuccu

SEQ ID NO: 163513 - RNA, 19 nt, Artificial Sequence
  Description of Artificial Sequence: Synthetic oligonucleotide
uagcuagcgcaacauuaag

SEQ ID NO: 163514 - RNA, 19 nt, Artificial Sequence
  Description of Artificial Sequence: Synthetic oligonucleotide
acuacugacuaaacauaac

SEQ ID NO: 163515 - RNA, 19 nt, Artificial Sequence
  Description of Artificial Sequence: Synthetic oligonucleotide
caaaaggaauuaucccgag

SEQ ID NO: 163516 - RNA, 19 nt, Artificial Sequence
  Description of Artificial Sequence: Synthetic oligonucleotide
aucuuagaaguuaguuagc

SEQ ID NO: 163517 - RNA, 19 nt, Artificial Sequence
  Description of Artificial Sequence: Synthetic oligonucleotide
uacuaacuucuaaagccuc

SEQ ID NO: 163518 - RNA, 19 nt, Artificial Sequence
  Description of Artificial Sequence: Synthetic oligonucleotide
caagagacucuaagugugc

SEQ ID NO: 163519 - RNA, 19 nt, Artificial Sequence
  Description of Artificial Sequence: Synthetic oligonucleotide
gaauguaagcauccaaagu

SEQ ID NO: 163520 - RNA, 19 nt, Artificial Sequence
  Description of Artificial Sequence: Synthetic oligonucleotide
cacaacuaaucaacaguac

SEQ ID NO: 163521 - RNA, 19 nt, Artificial Sequence
  Description of Artificial Sequence: Synthetic oligonucleotide
agcuagcgcaacauuaagg

SEQ ID NO: 163522 - RNA, 19 nt, Artificial Sequence
  Description of Artificial Sequence: Synthetic oligonucleotide
ggucaucggaacuacauuc

SEQ ID NO: 163523 - RNA, 19 nt, Artificial Sequence
  Description of Artificial Sequence: Synthetic oligonucleotide
aacauaacauguggcuugu

SEQ ID NO: 163524 - RNA, 19 nt, Artificial Sequence
  Description of Artificial Sequence: Synthetic oligonucleotide
auagggucaucggaacuac

SEQ ID NO: 163525 - RNA, 19 nt, Artificial Sequence
  Description of Artificial Sequence: Synthetic oligonucleotide
ugaccaccgaguauauccu

SEQ ID NO: 163526 - RNA, 19 nt, Artificial Sequence
  Description of Artificial Sequence: Synthetic oligonucleotide
ugggaaaugacggcggcac

SEQ ID NO: 163527 - RNA, 19 nt, Artificial Sequence
  Description of Artificial Sequence: Synthetic oligonucleotide
uaacaacuggcagauaaua

SEQ ID NO: 163528 - RNA, 19 nt, Artificial Sequence
  Description of Artificial Sequence: Synthetic oligonucleotide
ugaguaagguggagucaag

SEQ ID NO: 163529 - RNA, 19 nt, Artificial Sequence
  Description of Artificial Sequence: Synthetic oligonucleotide
cauguaacugugccgagca

SEQ ID NO: 163530 - RNA, 19 nt, Artificial Sequence
  Description of Artificial Sequence: Synthetic oligonucleotide
agaaaugaccaccgaguau

SEQ ID NO: 163531 - RNA, 19 nt, Artificial Sequence
  Description of Artificial Sequence: Synthetic oligonucleotide
aaugaccaccgaguauauc

SEQ ID NO: 163532 - RNA, 19 nt, Artificial Sequence
  Description of Artificial Sequence: Synthetic oligonucleotide
uuauuuggggugacacagu

SEQ ID NO: 163533 - RNA, 19 nt, Artificial Sequence
  Description of Artificial Sequence: Synthetic oligonucleotide
uaucccgagcaucuugccu

SEQ ID NO: 163534 - RNA, 19 nt, Artificial Sequence
  Description of Artificial Sequence: Synthetic oligonucleotide
accgaguauauccuguuua

SEQ ID NO: 163535 - RNA, 19 nt, Artificial Sequence
  Description of Artificial Sequence: Synthetic oligonucleotide
auucguauuacaagaaaua

SEQ ID NO: 163536 - RNA, 19 nt, Artificial Sequence
  Description of Artificial Sequence: Synthetic oligonucleotide
uguguauacguagcuggga

SEQ ID NO: 163537 - RNA, 19 nt, Artificial Sequence
  Description of Artificial Sequence: Synthetic oligonucleotide
cuaucuuacguucaacucu

SEQ ID NO: 163538 - RNA, 19 nt, Artificial Sequence
  Description of Artificial Sequence: Synthetic oligonucleotide
uugucguagaguugguaau

SEQ ID NO: 163539 - RNA, 19 nt, Artificial Sequence
  Description of Artificial Sequence: Synthetic oligonucleotide
gagaagccgaccauucccc

SEQ ID NO: 163540 - RNA, 19 nt, Artificial Sequence
  Description of Artificial Sequence: Synthetic oligonucleotide
uaguuuguacaaugcugac

SEQ ID NO: 163541 - RNA, 19 nt, Artificial Sequence
  Description of Artificial Sequence: Synthetic oligonucleotide
ggaagcaugcuagcuagcg

SEQ ID NO: 163542 - RNA, 19 nt, Artificial Sequence
  Description of Artificial Sequence: Synthetic oligonucleotide
aaauggcgggcugggauug

SEQ ID NO: 163543 - RNA, 19 nt, Artificial Sequence
  Description of Artificial Sequence: Synthetic oligonucleotide
ugucaagaguguuccggac

SEQ ID NO: 163544 - RNA, 19 nt, Artificial Sequence
  Description of Artificial Sequence: Synthetic oligonucleotide
ugcaacucuugaguaaggu

SEQ ID NO: 163545 - RNA, 19 nt, Artificial Sequence
  Description of Artificial Sequence: Synthetic oligonucleotide
ugcuuugcuagccuuucuu

SEQ ID NO: 163546 - RNA, 19 nt, Artificial Sequence
  Description of Artificial Sequence: Synthetic oligonucleotide
gucaucggaacuacauucc

SEQ ID NO: 163547 - RNA, 19 nt, Artificial Sequence
  Description of Artificial Sequence: Synthetic oligonucleotide
agcucucgucacuugagga

SEQ ID NO: 163548 - RNA, 19 nt, Artificial Sequence
  Description of Artificial Sequence: Synthetic oligonucleotide
ugcugacuauauacaucag

SEQ ID NO: 163549 - RNA, 19 nt, Artificial Sequence
  Description of Artificial Sequence: Synthetic oligonucleotide
aucagcauucguauuacaa

SEQ ID NO: 163550 - RNA, 19 nt, Artificial Sequence
  Description of Artificial Sequence: Synthetic oligonucleotide
uuaucccgagcaucuugcc

SEQ ID NO: 163551 - RNA, 19 nt, Artificial Sequence
  Description of Artificial Sequence: Synthetic oligonucleotide
guguguauacguagcuggg

SEQ ID NO: 163552 - RNA, 19 nt, Artificial Sequence
  Description of Artificial Sequence: Synthetic oligonucleotide
auguaacugugccgagcac

SEQ ID NO: 163553 - RNA, 19 nt, Artificial Sequence
  Description of Artificial Sequence: Synthetic oligonucleotide
cauucguauuacaagaaau

SEQ ID NO: 163554 - RNA, 19 nt, Artificial Sequence
  Description of Artificial Sequence: Synthetic oligonucleotide
caacuaaucaacaguacau

SEQ ID NO: 163555 - RNA, 19 nt, Artificial Sequence
  Description of Artificial Sequence: Synthetic oligonucleotide
aucccgagcaucuugccuu

SEQ ID NO: 163556 - RNA, 19 nt, Artificial Sequence
  Description of Artificial Sequence: Synthetic oligonucleotide
agauaauagcuaaaucuua

SEQ ID NO: 163557 - RNA, 19 nt, Artificial Sequence
  Description of Artificial Sequence: Synthetic oligonucleotide
cuuauagugaagccucaaa

SEQ ID NO: 163558 - RNA, 19 nt, Artificial Sequence
  Description of Artificial Sequence: Synthetic oligonucleotide
gauagggucaucggaacua

SEQ ID NO: 163559 - RNA, 19 nt, Artificial Sequence
  Description of Artificial Sequence: Synthetic oligonucleotide
cuagcugguggauuagcca

SEQ ID NO: 163560 - RNA, 19 nt, Artificial Sequence
  Description of Artificial Sequence: Synthetic oligonucleotide
acacuuuaugauaggguca

SEQ ID NO: 163561 - RNA, 19 nt, Artificial Sequence
  Description of Artificial Sequence: Synthetic oligonucleotide
acccauaaaaggauacaca

SEQ ID NO: 163562 - RNA, 19 nt, Artificial Sequence
  Description of Artificial Sequence: Synthetic oligonucleotide
gcuaucuuacguucaacuc

SEQ ID NO: 163563 - RNA, 19 nt, Artificial Sequence
  Description of Artificial Sequence: Synthetic oligonucleotide
cauuaaggccugaauguaa

SEQ ID NO: 163564 - RNA, 19 nt, Artificial Sequence
  Description of Artificial Sequence: Synthetic oligonucleotide
ccgcaaaaccaucaaacag

SEQ ID NO: 163565 - RNA, 19 nt, Artificial Sequence
  Description of Artificial Sequence: Synthetic oligonucleotide
uuacuagcugguggauuag

SEQ ID NO: 163566 - RNA, 19 nt, Artificial Sequence
  Description of Artificial Sequence: Synthetic oligonucleotide
cagcucucgucacuugagg

SEQ ID NO: 163567 - RNA, 19 nt, Artificial Sequence
  Description of Artificial Sequence: Synthetic oligonucleotide
ucuuugucguagaguuggu

SEQ ID NO: 163568 - RNA, 19 nt, Artificial Sequence
  Description of Artificial Sequence: Synthetic oligonucleotide
gggcuaagcguucuucuag

SEQ ID NO: 163569 - RNA, 19 nt, Artificial Sequence
  Description of Artificial Sequence: Synthetic oligonucleotide
agaauacuugccugcucau

SEQ ID NO: 163570 - RNA, 19 nt, Artificial Sequence
  Description of Artificial Sequence: Synthetic oligonucleotide
ugucguagaguugguaaua

SEQ ID NO: 163571 - RNA, 19 nt, Artificial Sequence
  Description of Artificial Sequence: Synthetic oligonucleotide
ugcaugcaauguucacuug

SEQ ID NO: 163572 - RNA, 19 nt, Artificial Sequence
  Description of Artificial Sequence: Synthetic oligonucleotide
gaccaccgaguauauccug

SEQ ID NO: 163573 - RNA, 19 nt, Artificial Sequence
  Description of Artificial Sequence: Synthetic oligonucleotide
uacuagcugguggauuagc

SEQ ID NO: 163574 - RNA, 19 nt, Artificial Sequence
  Description of Artificial Sequence: Synthetic oligonucleotide
acauuaaggccugaaugua

SEQ ID NO: 163575 - RNA, 19 nt, Artificial Sequence
  Description of Artificial Sequence: Synthetic oligonucleotide
cuuuccuuacuagcuggug

SEQ ID NO: 163576 - RNA, 19 nt, Artificial Sequence
  Description of Artificial Sequence: Synthetic oligonucleotide
ucguagaguugguaauaau

SEQ ID NO: 163577 - RNA, 19 nt, Artificial Sequence
  Description of Artificial Sequence: Synthetic oligonucleotide
caugcuagcuagcgcaaca

SEQ ID NO: 163578 - RNA, 19 nt, Artificial Sequence
  Description of Artificial Sequence: Synthetic oligonucleotide
ucggaacuacauuccuacu

SEQ ID NO: 163579 - RNA, 19 nt, Artificial Sequence
  Description of Artificial Sequence: Synthetic oligonucleotide
cuagugccauguaggugag

SEQ ID NO: 163580 - RNA, 19 nt, Artificial Sequence
  Description of Artificial Sequence: Synthetic oligonucleotide
gcaugaaagcuuccggcug

SEQ ID NO: 163581 - RNA, 19 nt, Artificial Sequence
  Description of Artificial Sequence: Synthetic oligonucleotide
caguaagugccacaacuaa

SEQ ID NO: 163582 - RNA, 19 nt, Artificial Sequence
  Description of Artificial Sequence: Synthetic oligonucleotide
gaaaagcggugaggcagag

SEQ ID NO: 163583 - RNA, 19 nt, Artificial Sequence
  Description of Artificial Sequence: Synthetic oligonucleotide
ucgucagggccacuacuau

SEQ ID NO: 163584 - RNA, 19 nt, Artificial Sequence
  Description of Artificial Sequence: Synthetic oligonucleotide
uauacguagcugggagcca

SEQ ID NO: 163585 - RNA, 19 nt, Artificial Sequence
  Description of Artificial Sequence: Synthetic oligonucleotide
agaagccgaccauucccca

SEQ ID NO: 163586 - RNA, 19 nt, Artificial Sequence
  Description of Artificial Sequence: Synthetic oligonucleotide
cuaucgcucuguagcucag

SEQ ID NO: 163587 - RNA, 19 nt, Artificial Sequence
  Description of Artificial Sequence: Synthetic oligonucleotide
aaaugaccaccgaguauau

SEQ ID NO: 163588 - RNA, 19 nt, Artificial Sequence
  Description of Artificial Sequence: Synthetic oligonucleotide
cuuuaaaggcauccagugu

SEQ ID NO: 163589 - RNA, 19 nt, Artificial Sequence
  Description of Artificial Sequence: Synthetic oligonucleotide
cagacugauaagggcuuag

SEQ ID NO: 163590 - RNA, 19 nt, Artificial Sequence
  Description of Artificial Sequence: Synthetic oligonucleotide
agcauucguauuacaagaa

SEQ ID NO: 163591 - RNA, 19 nt, Artificial Sequence
  Description of Artificial Sequence: Synthetic oligonucleotide
aggaagcaugcuagcuagc

SEQ ID NO: 163592 - RNA, 19 nt, Artificial Sequence
  Description of Artificial Sequence: Synthetic oligonucleotide
agggucaucggaacuacau

SEQ ID NO: 163593 - RNA, 19 nt, Artificial Sequence
  Description of Artificial Sequence: Synthetic oligonucleotide
ggaaaugacggcggcacac

SEQ ID NO: 163594 - RNA, 19 nt, Artificial Sequence
  Description of Artificial Sequence: Synthetic oligonucleotide
agccaacaaugaaggacgg

SEQ ID NO: 163595 - RNA, 19 nt, Artificial Sequence
  Description of Artificial Sequence: Synthetic oligonucleotide
gccacaacuaaucaacagu

SEQ ID NO: 163596 - RNA, 19 nt, Artificial Sequence
  Description of Artificial Sequence: Synthetic oligonucleotide
cuugaguaagguggaguca

SEQ ID NO: 163597 - RNA, 19 nt, Artificial Sequence
  Description of Artificial Sequence: Synthetic oligonucleotide
ggucccuuacuacugacua

SEQ ID NO: 163598 - RNA, 19 nt, Artificial Sequence
  Description of Artificial Sequence: Synthetic oligonucleotide
gauguugcacgguuauuuu

SEQ ID NO: 163599 - RNA, 19 nt, Artificial Sequence
  Description of Artificial Sequence: Synthetic oligonucleotide
agcgcaacauuaaggccug

SEQ ID NO: 163600 - RNA, 19 nt, Artificial Sequence
  Description of Artificial Sequence: Synthetic oligonucleotide
acaugaggacuaaugugaa

SEQ ID NO: 163601 - RNA, 19 nt, Artificial Sequence
  Description of Artificial Sequence: Synthetic oligonucleotide
acgaggaugucaagagugu

SEQ ID NO: 163602 - RNA, 19 nt, Artificial Sequence
  Description of Artificial Sequence: Synthetic oligonucleotide
auacguagcugggagccaa

SEQ ID NO: 163603 - RNA, 19 nt, Artificial Sequence
  Description of Artificial Sequence: Synthetic oligonucleotide
aagcguucuucuagugcca

SEQ ID NO: 163604 - RNA, 19 nt, Artificial Sequence
  Description of Artificial Sequence: Synthetic oligonucleotide
cucaugugaucaccuaaaa

SEQ ID NO: 163605 - RNA, 19 nt, Artificial Sequence
  Description of Artificial Sequence: Synthetic oligonucleotide
ccacaacuaaucaacagua

SEQ ID NO: 163606 - RNA, 19 nt, Artificial Sequence
  Description of Artificial Sequence: Synthetic oligonucleotide
gguccccgacuucugaagc

SEQ ID NO: 163607 - RNA, 19 nt, Artificial Sequence
  Description of Artificial Sequence: Synthetic oligonucleotide
guuaguuagcuuagagaua

SEQ ID NO: 163608 - RNA, 19 nt, Artificial Sequence
  Description of Artificial Sequence: Synthetic oligonucleotide
ggugggaaaugacggcggc

SEQ ID NO: 163609 - RNA, 19 nt, Artificial Sequence
  Description of Artificial Sequence: Synthetic oligonucleotide
gcuaagcguucuucuagug

SEQ ID NO: 163610 - RNA, 19 nt, Artificial Sequence
  Description of Artificial Sequence: Synthetic oligonucleotide
gugcaacucuugaguaagg

SEQ ID NO: 163611 - RNA, 19 nt, Artificial Sequence
  Description of Artificial Sequence: Synthetic oligonucleotide
gcgcaaacucauuggcagg

SEQ ID NO: 163612 - RNA, 19 nt, Artificial Sequence
  Description of Artificial Sequence: Synthetic oligonucleotide
acaguuagaccugggcuuu

SEQ ID NO: 163613 - RNA, 19 nt, Artificial Sequence
  Description of Artificial Sequence: Synthetic oligonucleotide
ccaaacgaccuuaaaguaa

SEQ ID NO: 163614 - RNA, 19 nt, Artificial Sequence
  Description of Artificial Sequence: Synthetic oligonucleotide
gcauucguauuacaagaaa

SEQ ID NO: 163615 - RNA, 19 nt, Artificial Sequence
  Description of Artificial Sequence: Synthetic oligonucleotide
gggcuuagacaguguuucg

SEQ ID NO: 163616 - RNA, 19 nt, Artificial Sequence
  Description of Artificial Sequence: Synthetic oligonucleotide
gucguagaguugguaauaa

SEQ ID NO: 163617 - RNA, 19 nt, Artificial Sequence
  Description of Artificial Sequence: Synthetic oligonucleotide
caaggucccuuacuacuga

SEQ ID NO: 163618 - RNA, 19 nt, Artificial Sequence
  Description of Artificial Sequence: Synthetic oligonucleotide
ugaaagcuuccggcugcgc

SEQ ID NO: 163619 - RNA, 19 nt, Artificial Sequence
  Description of Artificial Sequence: Synthetic oligonucleotide
cgaccuuaaaguaacuaga

SEQ ID NO: 163620 - RNA, 19 nt, Artificial Sequence
  Description of Artificial Sequence: Synthetic oligonucleotide
uguuucucuuauggggcuu

SEQ ID NO: 163621 - RNA, 19 nt, Artificial Sequence
  Description of Artificial Sequence: Synthetic oligonucleotide
cuggcagauaauagcuaaa

SEQ ID NO: 163622 - RNA, 19 nt, Artificial Sequence
  Description of Artificial Sequence: Synthetic oligonucleotide
caguguuucguaagccaaa

SEQ ID NO: 163623 - RNA, 19 nt, Artificial Sequence
  Description of Artificial Sequence: Synthetic oligonucleotide
uugcaggcggggcgaucag

SEQ ID NO: 163624 - RNA, 19 nt, Artificial Sequence
  Description of Artificial Sequence: Synthetic oligonucleotide
agccgaccauuccccauca

SEQ ID NO: 163625 - RNA, 19 nt, Artificial Sequence
  Description of Artificial Sequence: Synthetic oligonucleotide
agaguguuccggaccuuca

SEQ ID NO: 163626 - RNA, 19 nt, Artificial Sequence
  Description of Artificial Sequence: Synthetic oligonucleotide
gcagauuuacugugauaga

SEQ ID NO: 163627 - RNA, 19 nt, Artificial Sequence
  Description of Artificial Sequence: Synthetic oligonucleotide
augcuagcuagcgcaacau

SEQ ID NO: 163628 - RNA, 19 nt, Artificial Sequence
  Description of Artificial Sequence: Synthetic oligonucleotide
caugcaauguucacuuguu

SEQ ID NO: 163629 - RNA, 19 nt, Artificial Sequence
  Description of Artificial Sequence: Synthetic oligonucleotide
cacaugagucuaacuuuaa

SEQ ID NO: 163630 - RNA, 19 nt, Artificial Sequence
  Description of Artificial Sequence: Synthetic oligonucleotide
uccugaccaauagcaguau

SEQ ID NO: 163631 - RNA, 19 nt, Artificial Sequence
  Description of Artificial Sequence: Synthetic oligonucleotide
agcagacugauaagggcuu

SEQ ID NO: 163632 - RNA, 19 nt, Artificial Sequence
  Description of Artificial Sequence: Synthetic oligonucleotide
aggucccuuacuacugacu

SEQ ID NO: 163633 - RNA, 19 nt, Artificial Sequence
  Description of Artificial Sequence: Synthetic oligonucleotide
uggaagcccgucgaugcuu

SEQ ID NO: 163634 - RNA, 19 nt, Artificial Sequence
  Description of Artificial Sequence: Synthetic oligonucleotide
gcugggauuguauaacaau

SEQ ID NO: 163635 - RNA, 19 nt, Artificial Sequence
  Description of Artificial Sequence: Synthetic oligonucleotide
ccccuaaauuacaaauuca

SEQ ID NO: 163636 - RNA, 19 nt, Artificial Sequence
  Description of Artificial Sequence: Synthetic oligonucleotide
aauggcgggcugggauugu

SEQ ID NO: 163637 - RNA, 19 nt, Artificial Sequence
  Description of Artificial Sequence: Synthetic oligonucleotide
acguagcugggagccaaca

SEQ ID NO: 163638 - RNA, 19 nt, Artificial Sequence
  Description of Artificial Sequence: Synthetic oligonucleotide
ggcuuguuacaaagcaauc

SEQ ID NO: 163639 - RNA, 19 nt, Artificial Sequence
  Description of Artificial Sequence: Synthetic oligonucleotide
uaacuagagccagcuucuu

SEQ ID NO: 163640 - RNA, 19 nt, Artificial Sequence
  Description of Artificial Sequence: Synthetic oligonucleotide
gaagccgaccauuccccau

SEQ ID NO: 163641 - RNA, 19 nt, Artificial Sequence
  Description of Artificial Sequence: Synthetic oligonucleotide
gcucaugugaucaccuaaa

SEQ ID NO: 163642 - RNA, 19 nt, Artificial Sequence
  Description of Artificial Sequence: Synthetic oligonucleotide
acugagcacaccagaccau

SEQ ID NO: 163643 - RNA, 19 nt, Artificial Sequence
  Description of Artificial Sequence: Synthetic oligonucleotide
gugggaaaugacggcggca

SEQ ID NO: 163644 - RNA, 19 nt, Artificial Sequence
  Description of Artificial Sequence: Synthetic oligonucleotide
agcguuucuggaagcccgu

SEQ ID NO: 163645 - RNA, 19 nt, Artificial Sequence
  Description of Artificial Sequence: Synthetic oligonucleotide
gaagcccgucgaugcuuuc

SEQ ID NO: 163646 - RNA, 19 nt, Artificial Sequence
  Description of Artificial Sequence: Synthetic oligonucleotide
caaguccucagaccuucua

SEQ ID NO: 163647 - RNA, 19 nt, Artificial Sequence
  Description of Artificial Sequence: Synthetic oligonucleotide
ggacuaaugugaaucucgu

SEQ ID NO: 163648 - RNA, 19 nt, Artificial Sequence
  Description of Artificial Sequence: Synthetic oligonucleotide
ggcuaagcguucuucuagu

SEQ ID NO: 163649 - RNA, 19 nt, Artificial Sequence
  Description of Artificial Sequence: Synthetic oligonucleotide
caugaggacuaaugugaau

SEQ ID NO: 163650 - RNA, 19 nt, Artificial Sequence
  Description of Artificial Sequence: Synthetic oligonucleotide
cagguccccgacuucugaa

SEQ ID NO: 163651 - RNA, 19 nt, Artificial Sequence
  Description of Artificial Sequence: Synthetic oligonucleotide
gcguucuucuagugccaug

SEQ ID NO: 163652 - RNA, 19 nt, Artificial Sequence
  Description of Artificial Sequence: Synthetic oligonucleotide
ggccacuacuaucgcucug

SEQ ID NO: 163653 - RNA, 19 nt, Artificial Sequence
  Description of Artificial Sequence: Synthetic oligonucleotide
ggcggggcgaucaggguca

SEQ ID NO: 163654 - RNA, 19 nt, Artificial Sequence
  Description of Artificial Sequence: Synthetic oligonucleotide
ggcugggauuguauaacaa

SEQ ID NO: 163655 - RNA, 19 nt, Artificial Sequence
  Description of Artificial Sequence: Synthetic oligonucleotide
ggacgguaacagauggaaa

SEQ ID NO: 163656 - RNA, 19 nt, Artificial Sequence
  Description of Artificial Sequence: Synthetic oligonucleotide
acauaacauguggcuuguu

SEQ ID NO: 163657 - RNA, 19 nt, Artificial Sequence
  Description of Artificial Sequence: Synthetic oligonucleotide
cauagucgucacacuuuau

SEQ ID NO: 163658 - RNA, 19 nt, Artificial Sequence
  Description of Artificial Sequence: Synthetic oligonucleotide
ggcgggcugggauuguaua

SEQ ID NO: 163659 - RNA, 19 nt, Artificial Sequence
  Description of Artificial Sequence: Synthetic oligonucleotide
gggucaucggaacuacauu

SEQ ID NO: 163660 - RNA, 19 nt, Artificial Sequence
  Description of Artificial Sequence: Synthetic oligonucleotide
ccgaguauauccuguuuau

SEQ ID NO: 163661 - RNA, 19 nt, Artificial Sequence
  Description of Artificial Sequence: Synthetic oligonucleotide
ccgaccauuccccaucacu

SEQ ID NO: 163662 - RNA, 19 nt, Artificial Sequence
  Description of Artificial Sequence: Synthetic oligonucleotide
cugagcacaccagaccauu

SEQ ID NO: 163663 - RNA, 19 nt, Artificial Sequence
  Description of Artificial Sequence: Synthetic oligonucleotide
gcuuuccuuacuagcuggu

SEQ ID NO: 163664 - RNA, 19 nt, Artificial Sequence
  Description of Artificial Sequence: Synthetic oligonucleotide
gggccacuacuaucgcucu

SEQ ID NO: 163665 - RNA, 19 nt, Artificial Sequence
  Description of Artificial Sequence: Synthetic oligonucleotide
gaaucucgugugacuucuu

SEQ ID NO: 163666 - RNA, 19 nt, Artificial Sequence
  Description of Artificial Sequence: Synthetic oligonucleotide
gcagacugauaagggcuua

SEQ ID NO: 163667 - RNA, 19 nt, Artificial Sequence
  Description of Artificial Sequence: Synthetic oligonucleotide
gccgaccauuccccaucac

SEQ ID NO: 163668 - RNA, 19 nt, Artificial Sequence
  Description of Artificial Sequence: Synthetic oligonucleotide
cugauguugcacgguuauu

SEQ ID NO: 163669 - RNA, 19 nt, Artificial Sequence
  Description of Artificial Sequence: Synthetic oligonucleotide
gccucagauuauacuggcu

SEQ ID NO: 163670 - RNA, 19 nt, Artificial Sequence
  Description of Artificial Sequence: Synthetic oligonucleotide
ggaagcccgucgaugcuuu

SEQ ID NO: 163671 - RNA, 19 nt, Artificial Sequence
  Description of Artificial Sequence: Synthetic oligonucleotide
cauuugcaggcggggcgau

SEQ ID NO: 163672 - RNA, 19 nt, Artificial Sequence
  Description of Artificial Sequence: Synthetic oligonucleotide
cgaguauauccuguuuauu

SEQ ID NO: 163673 - RNA, 19 nt, Artificial Sequence
  Description of Artificial Sequence: Synthetic oligonucleotide
gcgcaacauuaaggccuga

SEQ ID NO: 163674 - RNA, 19 nt, Artificial Sequence
  Description of Artificial Sequence: Synthetic oligonucleotide
cggggcgaucagggucagg

SEQ ID NO: 163675 - RNA, 19 nt, Artificial Sequence
  Description of Artificial Sequence: Synthetic oligonucleotide
aacuauaugaauuuagugc

SEQ ID NO: 163676 - RNA, 19 nt, Artificial Sequence
  Description of Artificial Sequence: Synthetic oligonucleotide
acuauaugaauuuagugcc

SEQ ID NO: 163677 - RNA, 19 nt, Artificial Sequence
  Description of Artificial Sequence: Synthetic oligonucleotide
aauaggauguuauuauagc

SEQ ID NO: 163678 - RNA, 19 nt, Artificial Sequence
  Description of Artificial Sequence: Synthetic oligonucleotide
aaauauauauauaugauug

SEQ ID NO: 163679 - RNA, 19 nt, Artificial Sequence
  Description of Artificial Sequence: Synthetic oligonucleotide
aauaauuuuagguggaaga

SEQ ID NO: 163680 - RNA, 19 nt, Artificial Sequence
  Description of Artificial Sequence: Synthetic oligonucleotide
acaaaauauauauauauga

SEQ ID NO: 163681 - RNA, 19 nt, Artificial Sequence
  Description of Artificial Sequence: Synthetic oligonucleotide
uaaacuuacgauaugaaaa

SEQ ID NO: 163682 - RNA, 19 nt, Artificial Sequence
  Description of Artificial Sequence: Synthetic oligonucleotide
aaauagugaccacaacucc

SEQ ID NO: 163683 - RNA, 19 nt, Artificial Sequence
  Description of Artificial Sequence: Synthetic oligonucleotide
ugaauuuagugccaaaacc

SEQ ID NO: 163684 - RNA, 19 nt, Artificial Sequence
  Description of Artificial Sequence: Synthetic oligonucleotide
uuacaaaauauauauauau

SEQ ID NO: 163685 - RNA, 19 nt, Artificial Sequence
  Description of Artificial Sequence: Synthetic oligonucleotide
aaaauauauauauaugauu

SEQ ID NO: 163686 - RNA, 19 nt, Artificial Sequence
  Description of Artificial Sequence: Synthetic oligonucleotide
ucuaucaagaauacaguag

SEQ ID NO: 163687 - RNA, 19 nt, Artificial Sequence
  Description of Artificial Sequence: Synthetic oligonucleotide
aauguaacugaacuagcag

SEQ ID NO: 163688 - RNA, 19 nt, Artificial Sequence
  Description of Artificial Sequence: Synthetic oligonucleotide
uaauaggauguuauuauag

SEQ ID NO: 163689 - RNA, 19 nt, Artificial Sequence
  Description of Artificial Sequence: Synthetic oligonucleotide
uguguuuauacacaggccu

SEQ ID NO: 163690 - RNA, 19 nt, Artificial Sequence
  Description of Artificial Sequence: Synthetic oligonucleotide
aauauauauauaugauuga

SEQ ID NO: 163691 - RNA, 19 nt, Artificial Sequence
  Description of Artificial Sequence: Synthetic oligonucleotide
uacaaaauauauauauaug

SEQ ID NO: 163692 - RNA, 19 nt, Artificial Sequence
  Description of Artificial Sequence: Synthetic oligonucleotide
uugaauauaaacuuacgau

SEQ ID NO: 163693 - RNA, 19 nt, Artificial Sequence
  Description of Artificial Sequence: Synthetic oligonucleotide
auauguauauccuuguaug

SEQ ID NO: 163694 - RNA, 19 nt, Artificial Sequence
  Description of Artificial Sequence: Synthetic oligonucleotide
ucucuacucgcuaauauag

SEQ ID NO: 163695 - RNA, 19 nt, Artificial Sequence
  Description of Artificial Sequence: Synthetic oligonucleotide
uguacucggaaucauacug

SEQ ID NO: 163696 - RNA, 19 nt, Artificial Sequence
  Description of Artificial Sequence: Synthetic oligonucleotide
uuaugugggauuuauaaaa

SEQ ID NO: 163697 - RNA, 19 nt, Artificial Sequence
  Description of Artificial Sequence: Synthetic oligonucleotide
uauagccuuaaauauacca

SEQ ID NO: 163698 - RNA, 19 nt, Artificial Sequence
  Description of Artificial Sequence: Synthetic oligonucleotide
uauccuagccauuagauaa

SEQ ID NO: 163699 - RNA, 19 nt, Artificial Sequence
  Description of Artificial Sequence: Synthetic oligonucleotide
aauccuauaguuagcaguc

SEQ ID NO: 163700 - RNA, 19 nt, Artificial Sequence
  Description of Artificial Sequence: Synthetic oligonucleotide
aauugggaaaaguauggcu

SEQ ID NO: 163701 - RNA, 19 nt, Artificial Sequence
  Description of Artificial Sequence: Synthetic oligonucleotide
uguaggaccagacacaaau

SEQ ID NO: 163702 - RNA, 19 nt, Artificial Sequence
  Description of Artificial Sequence: Synthetic oligonucleotide
auugaaaccuacugaguac

SEQ ID NO: 163703 - RNA, 19 nt, Artificial Sequence
  Description of Artificial Sequence: Synthetic oligonucleotide
ucgacauaaaaucaugagu

SEQ ID NO: 163704 - RNA, 19 nt, Artificial Sequence
  Description of Artificial Sequence: Synthetic oligonucleotide
ccuguauuaacuuaugugg

SEQ ID NO: 163705 - RNA, 19 nt, Artificial Sequence
  Description of Artificial Sequence: Synthetic oligonucleotide
guauacucgacauaaaauc

SEQ ID NO: 163706 - RNA, 19 nt, Artificial Sequence
  Description of Artificial Sequence: Synthetic oligonucleotide
ucuaauaggauguuauuau

SEQ ID NO: 163707 - RNA, 19 nt, Artificial Sequence
  Description of Artificial Sequence: Synthetic oligonucleotide
uaauccuauaguuagcagu

SEQ ID NO: 163708 - RNA, 19 nt, Artificial Sequence
  Description of Artificial Sequence: Synthetic oligonucleotide
ugggucauuguuaaaccgg

SEQ ID NO: 163709 - RNA, 19 nt, Artificial Sequence
  Description of Artificial Sequence: Synthetic oligonucleotide
aaaacccauguaucugggc

SEQ ID NO: 163710 - RNA, 19 nt, Artificial Sequence
  Description of Artificial Sequence: Synthetic oligonucleotide
aaugauaaaacugcucccu

SEQ ID NO: 163711 - RNA, 19 nt, Artificial Sequence
  Description of Artificial Sequence: Synthetic oligonucleotide
uaagcuugguuucaguucu

SEQ ID NO: 163712 - RNA, 19 nt, Artificial Sequence
  Description of Artificial Sequence: Synthetic oligonucleotide
uauguauauccuuguaugc

SEQ ID NO: 163713 - RNA, 19 nt, Artificial Sequence
  Description of Artificial Sequence: Synthetic oligonucleotide
ugguauaacuauaugaauu

SEQ ID NO: 163714 - RNA, 19 nt, Artificial Sequence
  Description of Artificial Sequence: Synthetic oligonucleotide
ucuagucucagguaaguga

SEQ ID NO: 163715 - RNA, 19 nt, Artificial Sequence
  Description of Artificial Sequence: Synthetic oligonucleotide
aguuguaaguaaaagaaca

SEQ ID NO: 163716 - RNA, 19 nt, Artificial Sequence
  Description of Artificial Sequence: Synthetic oligonucleotide
augaguuguaaguaaaaga

SEQ ID NO: 163717 - RNA, 19 nt, Artificial Sequence
  Description of Artificial Sequence: Synthetic oligonucleotide
uauauccuagccauuagau

SEQ ID NO: 163718 - RNA, 19 nt, Artificial Sequence
  Description of Artificial Sequence: Synthetic oligonucleotide
agcacuaugcugaauauuc

SEQ ID NO: 163719 - RNA, 19 nt, Artificial Sequence
  Description of Artificial Sequence: Synthetic oligonucleotide
uacaguaauagucuugaau

SEQ ID NO: 163720 - RNA, 19 nt, Artificial Sequence
  Description of Artificial Sequence: Synthetic oligonucleotide
uuauacuuuaaaagugaac

SEQ ID NO: 163721 - RNA, 19 nt, Artificial Sequence
  Description of Artificial Sequence: Synthetic oligonucleotide
cauugaggcuuuuaaauac

SEQ ID NO: 163722 - RNA, 19 nt, Artificial Sequence
  Description of Artificial Sequence: Synthetic oligonucleotide
acacguuucugcccgauac

SEQ ID NO: 163723 - RNA, 19 nt, Artificial Sequence
  Description of Artificial Sequence: Synthetic oligonucleotide
uguauuaacuuauguggga

SEQ ID NO: 163724 - RNA, 19 nt, Artificial Sequence
  Description of Artificial Sequence: Synthetic oligonucleotide
uauaggauggacacuuugu

SEQ ID NO: 163725 - RNA, 19 nt, Artificial Sequence
  Description of Artificial Sequence: Synthetic oligonucleotide
uaugcaucugcuuuaaaua

SEQ ID NO: 163726 - RNA, 19 nt, Artificial Sequence
  Description of Artificial Sequence: Synthetic oligonucleotide
uguaaugccuggaauacau

SEQ ID NO: 163727 - RNA, 19 nt, Artificial Sequence
  Description of Artificial Sequence: Synthetic oligonucleotide
cuaaggaugacuaauguua

SEQ ID NO: 163728 - RNA, 19 nt, Artificial Sequence
  Description of Artificial Sequence: Synthetic oligonucleotide
aaaguauggcucauugagg

SEQ ID NO: 163729 - RNA, 19 nt, Artificial Sequence
  Description of Artificial Sequence: Synthetic oligonucleotide
auaaacuuacgauaugaaa

SEQ ID NO: 163730 - RNA, 19 nt, Artificial Sequence
  Description of Artificial Sequence: Synthetic oligonucleotide
auaucuauauacagcuacc

SEQ ID NO: 163731 - RNA, 19 nt, Artificial Sequence
  Description of Artificial Sequence: Synthetic oligonucleotide
caagucaagaagcugauca

SEQ ID NO: 163732 - RNA, 19 nt, Artificial Sequence
  Description of Artificial Sequence: Synthetic oligonucleotide
cuagguucaguauuacagc

SEQ ID NO: 163733 - RNA, 19 nt, Artificial Sequence
  Description of Artificial Sequence: Synthetic oligonucleotide
auauuugagaauaacuugu

SEQ ID NO: 163734 - RNA, 19 nt, Artificial Sequence
  Description of Artificial Sequence: Synthetic oligonucleotide
aagacacggucucaucaac

SEQ ID NO: 163735 - RNA, 19 nt, Artificial Sequence
  Description of Artificial Sequence: Synthetic oligonucleotide
uacugaguacauauguucu

SEQ ID NO: 163736 - RNA, 19 nt, Artificial Sequence
  Description of Artificial Sequence: Synthetic oligonucleotide
aaggcuacucaagugugac

SEQ ID NO: 163737 - RNA, 19 nt, Artificial Sequence
  Description of Artificial Sequence: Synthetic oligonucleotide
uccccagugaaacaagagc

SEQ ID NO: 163738 - RNA, 19 nt, Artificial Sequence
  Description of Artificial Sequence: Synthetic oligonucleotide
agacacauuggguauagga

SEQ ID NO: 163739 - RNA, 19 nt, Artificial Sequence
  Description of Artificial Sequence: Synthetic oligonucleotide
uccuauaguuagcagucag

SEQ ID NO: 163740 - RNA, 19 nt, Artificial Sequence
  Description of Artificial Sequence: Synthetic oligonucleotide
gauugaaaccuacugagua

SEQ ID NO: 163741 - RNA, 19 nt, Artificial Sequence
  Description of Artificial Sequence: Synthetic oligonucleotide
ucuggcuauauccuagcca

SEQ ID NO: 163742 - RNA, 19 nt, Artificial Sequence
  Description of Artificial Sequence: Synthetic oligonucleotide
aaugcuggaugguugcaca

SEQ ID NO: 163743 - RNA, 19 nt, Artificial Sequence
  Description of Artificial Sequence: Synthetic oligonucleotide
uucaagaaccgauuucaug

SEQ ID NO: 163744 - RNA, 19 nt, Artificial Sequence
  Description of Artificial Sequence: Synthetic oligonucleotide
aacgcaugaaggucucuag

SEQ ID NO: 163745 - RNA, 19 nt, Artificial Sequence
  Description of Artificial Sequence: Synthetic oligonucleotide
uauaguuagcagucaguug

SEQ ID NO: 163746 - RNA, 19 nt, Artificial Sequence
  Description of Artificial Sequence: Synthetic oligonucleotide
guagacauuaaccacacgu

SEQ ID NO: 163747 - RNA, 19 nt, Artificial Sequence
  Description of Artificial Sequence: Synthetic oligonucleotide
uucaaugauaaaacugcuc

SEQ ID NO: 163748 - RNA, 19 nt, Artificial Sequence
  Description of Artificial Sequence: Synthetic oligonucleotide
auauauauauaugauugaa

SEQ ID NO: 163749 - RNA, 19 nt, Artificial Sequence
  Description of Artificial Sequence: Synthetic oligonucleotide
ugacagaagaucaguacuc

SEQ ID NO: 163750 - RNA, 19 nt, Artificial Sequence
  Description of Artificial Sequence: Synthetic oligonucleotide
ggauugguguuccagaaag

SEQ ID NO: 163751 - RNA, 19 nt, Artificial Sequence
  Description of Artificial Sequence: Synthetic oligonucleotide
uggucuacuauauuugaau

SEQ ID NO: 163752 - RNA, 19 nt, Artificial Sequence
  Description of Artificial Sequence: Synthetic oligonucleotide
ucuuguucucgacuugagc

SEQ ID NO: 163753 - RNA, 19 nt, Artificial Sequence
  Description of Artificial Sequence: Synthetic oligonucleotide
uuaagcaguguaaaaucua

SEQ ID NO: 163754 - RNA, 19 nt, Artificial Sequence
  Description of Artificial Sequence: Synthetic oligonucleotide
ugauguuaauaaagauuug

SEQ ID NO: 163755 - RNA, 19 nt, Artificial Sequence
  Description of Artificial Sequence: Synthetic oligonucleotide
acuacaguaaacagccuuc

SEQ ID NO: 163756 - RNA, 19 nt, Artificial Sequence
  Description of Artificial Sequence: Synthetic oligonucleotide
aauauaccaguaccuguau

SEQ ID NO: 163757 - RNA, 19 nt, Artificial Sequence
  Description of Artificial Sequence: Synthetic oligonucleotide
cucggaaucauacugcuca

SEQ ID NO: 163758 - RNA, 19 nt, Artificial Sequence
  Description of Artificial Sequence: Synthetic oligonucleotide
ucauugaggcuuuuaaaua

SEQ ID NO: 163759 - RNA, 19 nt, Artificial Sequence
  Description of Artificial Sequence: Synthetic oligonucleotide
agugaaacaagagccagca

SEQ ID NO: 163760 - RNA, 19 nt, Artificial Sequence
  Description of Artificial Sequence: Synthetic oligonucleotide
agugcaaauauuugagaau

SEQ ID NO: 163761 - RNA, 19 nt, Artificial Sequence
  Description of Artificial Sequence: Synthetic oligonucleotide
uugaaaccuacugaguaca

SEQ ID NO: 163762 - RNA, 19 nt, Artificial Sequence
  Description of Artificial Sequence: Synthetic oligonucleotide
gagaauaacuuguucccca

SEQ ID NO: 163763 - RNA, 19 nt, Artificial Sequence
  Description of Artificial Sequence: Synthetic oligonucleotide
aacccauguaucugggcug

SEQ ID NO: 163764 - RNA, 19 nt, Artificial Sequence
  Description of Artificial Sequence: Synthetic oligonucleotide
cucgagagaacgcaugaag

SEQ ID NO: 163765 - RNA, 19 nt, Artificial Sequence
  Description of Artificial Sequence: Synthetic oligonucleotide
cuagguuguacucggaauc

SEQ ID NO: 163766 - RNA, 19 nt, Artificial Sequence
  Description of Artificial Sequence: Synthetic oligonucleotide
gcuaagaguacaguaauag

SEQ ID NO: 163767 - RNA, 19 nt, Artificial Sequence
  Description of Artificial Sequence: Synthetic oligonucleotide
ugacuaauguuagagucac

SEQ ID NO: 163768 - RNA, 19 nt, Artificial Sequence
  Description of Artificial Sequence: Synthetic oligonucleotide
ucugguuaucagccgguag

SEQ ID NO: 163769 - RNA, 19 nt, Artificial Sequence
  Description of Artificial Sequence: Synthetic oligonucleotide
aucuauauacagcuaccca

SEQ ID NO: 163770 - RNA, 19 nt, Artificial Sequence
  Description of Artificial Sequence: Synthetic oligonucleotide
cuuggcacgagacuuagca

SEQ ID NO: 163771 - RNA, 19 nt, Artificial Sequence
  Description of Artificial Sequence: Synthetic oligonucleotide
ucgacuugagcuucgugca

SEQ ID NO: 163772 - RNA, 19 nt, Artificial Sequence
  Description of Artificial Sequence: Synthetic oligonucleotide
ugacuucggaguuugcuga

SEQ ID NO: 163773 - RNA, 19 nt, Artificial Sequence
  Description of Artificial Sequence: Synthetic oligonucleotide
aucuggcuauauccuagcc

SEQ ID NO: 163774 - RNA, 19 nt, Artificial Sequence
  Description of Artificial Sequence: Synthetic oligonucleotide
uuacucgagagaacgcaug

SEQ ID NO: 163775 - RNA, 19 nt, Artificial Sequence
  Description of Artificial Sequence: Synthetic oligonucleotide
ugagaauaacuuguucccc

SEQ ID NO: 163776 - RNA, 19 nt, Artificial Sequence
  Description of Artificial Sequence: Synthetic oligonucleotide
cacggucucaucaacauca

SEQ ID NO: 163777 - RNA, 19 nt, Artificial Sequence
  Description of Artificial Sequence: Synthetic oligonucleotide
cauaucgagcagcaaacug

SEQ ID NO: 163778 - RNA, 19 nt, Artificial Sequence
  Description of Artificial Sequence: Synthetic oligonucleotide
gagguaugcugccaucuag

SEQ ID NO: 163779 - RNA, 19 nt, Artificial Sequence
  Description of Artificial Sequence: Synthetic oligonucleotide
ucgcuuuuccagaaguaga

SEQ ID NO: 163780 - RNA, 19 nt, Artificial Sequence
  Description of Artificial Sequence: Synthetic oligonucleotide
aaacuggcguucgguaccc

SEQ ID NO: 163781 - RNA, 19 nt, Artificial Sequence
  Description of Artificial Sequence: Synthetic oligonucleotide
guugcauccagcgugcagc

SEQ ID NO: 163782 - RNA, 19 nt, Artificial Sequence
  Description of Artificial Sequence: Synthetic oligonucleotide
gaauguaacugaacuagca

SEQ ID NO: 163783 - RNA, 19 nt, Artificial Sequence
  Description of Artificial Sequence: Synthetic oligonucleotide
ugucaaggcuacucaagug

SEQ ID NO: 163784 - RNA, 19 nt, Artificial Sequence
  Description of Artificial Sequence: Synthetic oligonucleotide
uuauagccuuaaauauacc

SEQ ID NO: 163785 - RNA, 19 nt, Artificial Sequence
  Description of Artificial Sequence: Synthetic oligonucleotide
cauaaagcugaaccuggag

SEQ ID NO: 163786 - RNA, 19 nt, Artificial Sequence
  Description of Artificial Sequence: Synthetic oligonucleotide
uggcacgagacuuagcaaa

SEQ ID NO: 163787 - RNA, 19 nt, Artificial Sequence
  Description of Artificial Sequence: Synthetic oligonucleotide
cucuacucgcuaauauagg

SEQ ID NO: 163788 - RNA, 19 nt, Artificial Sequence
  Description of Artificial Sequence: Synthetic oligonucleotide
cauaggguuccagucaugc

SEQ ID NO: 163789 - RNA, 19 nt, Artificial Sequence
  Description of Artificial Sequence: Synthetic oligonucleotide
caaacuggcguucgguacc

SEQ ID NO: 163790 - RNA, 19 nt, Artificial Sequence
  Description of Artificial Sequence: Synthetic oligonucleotide
cuuguucucgacuugagcu

SEQ ID NO: 163791 - RNA, 19 nt, Artificial Sequence
  Description of Artificial Sequence: Synthetic oligonucleotide
uuguuaaaccgggacacga

SEQ ID NO: 163792 - RNA, 19 nt, Artificial Sequence
  Description of Artificial Sequence: Synthetic oligonucleotide
acagugcaaauauuugaga

SEQ ID NO: 163793 - RNA, 19 nt, Artificial Sequence
  Description of Artificial Sequence: Synthetic oligonucleotide
caaaauauauauauaugau

SEQ ID NO: 163794 - RNA, 19 nt, Artificial Sequence
  Description of Artificial Sequence: Synthetic oligonucleotide
guaccuguauuuagaauag

SEQ ID NO: 163795 - RNA, 19 nt, Artificial Sequence
  Description of Artificial Sequence: Synthetic oligonucleotide
aaccagacacauuggguau

SEQ ID NO: 163796 - RNA, 19 nt, Artificial Sequence
  Description of Artificial Sequence: Synthetic oligonucleotide
aacccuuauuauuguacaa

SEQ ID NO: 163797 - RNA, 19 nt, Artificial Sequence
  Description of Artificial Sequence: Synthetic oligonucleotide
cuugaugccuagguguagg

SEQ ID NO: 163798 - RNA, 19 nt, Artificial Sequence
  Description of Artificial Sequence: Synthetic oligonucleotide
agcccauuaucuucucuuc

SEQ ID NO: 163799 - RNA, 19 nt, Artificial Sequence
  Description of Artificial Sequence: Synthetic oligonucleotide
aguuacucgagagaacgca

SEQ ID NO: 163800 - RNA, 19 nt, Artificial Sequence
  Description of Artificial Sequence: Synthetic oligonucleotide
uuggucuacuauauuugaa

SEQ ID NO: 163801 - RNA, 19 nt, Artificial Sequence
  Description of Artificial Sequence: Synthetic oligonucleotide
auaacgguauuugcuaugu

SEQ ID NO: 163802 - RNA, 19 nt, Artificial Sequence
  Description of Artificial Sequence: Synthetic oligonucleotide
acgagacuuagcaaaaucu

SEQ ID NO: 163803 - RNA, 19 nt, Artificial Sequence
  Description of Artificial Sequence: Synthetic oligonucleotide
uccagcgugcagcaguuac

SEQ ID NO: 163804 - RNA, 19 nt, Artificial Sequence
  Description of Artificial Sequence: Synthetic oligonucleotide
agaucaguacucugugcug

SEQ ID NO: 163805 - RNA, 19 nt, Artificial Sequence
  Description of Artificial Sequence: Synthetic oligonucleotide
aucaguacucugugcuggg

SEQ ID NO: 163806 - RNA, 19 nt, Artificial Sequence
  Description of Artificial Sequence: Synthetic oligonucleotide
ccccagugaaacaagagcc

SEQ ID NO: 163807 - RNA, 19 nt, Artificial Sequence
  Description of Artificial Sequence: Synthetic oligonucleotide
ucaugcucgcuuuuccaga

SEQ ID NO: 163808 - RNA, 19 nt, Artificial Sequence
  Description of Artificial Sequence: Synthetic oligonucleotide
uuauuauugcugucuggua

SEQ ID NO: 163809 - RNA, 19 nt, Artificial Sequence
  Description of Artificial Sequence: Synthetic oligonucleotide
accgauuucaugcucgcuu

SEQ ID NO: 163810 - RNA, 19 nt, Artificial Sequence
  Description of Artificial Sequence: Synthetic oligonucleotide
aguuuacguaaauauugua

SEQ ID NO: 163811 - RNA, 19 nt, Artificial Sequence
  Description of Artificial Sequence: Synthetic oligonucleotide
auauccuagccauuagaua

SEQ ID NO: 163812 - RNA, 19 nt, Artificial Sequence
  Description of Artificial Sequence: Synthetic oligonucleotide
auuggguauaggauggaca

SEQ ID NO: 163813 - RNA, 19 nt, Artificial Sequence
  Description of Artificial Sequence: Synthetic oligonucleotide
augacuaauguuagaguca

SEQ ID NO: 163814 - RNA, 19 nt, Artificial Sequence
  Description of Artificial Sequence: Synthetic oligonucleotide
uuguacucggaaucauacu

SEQ ID NO: 163815 - RNA, 19 nt, Artificial Sequence
  Description of Artificial Sequence: Synthetic oligonucleotide
ucggaaucauacugcucag

SEQ ID NO: 163816 - RNA, 19 nt, Artificial Sequence
  Description of Artificial Sequence: Synthetic oligonucleotide
ucaaaaggaauggcaggac

SEQ ID NO: 163817 - RNA, 19 nt, Artificial Sequence
  Description of Artificial Sequence: Synthetic oligonucleotide
uuuuauguacauggccuuc

SEQ ID NO: 163818 - RNA, 19 nt, Artificial Sequence
  Description of Artificial Sequence: Synthetic oligonucleotide
cugcccgauacgaugggcc

SEQ ID NO: 163819 - RNA, 19 nt, Artificial Sequence
  Description of Artificial Sequence: Synthetic oligonucleotide
cugguuaucagccgguaga

SEQ ID NO: 163820 - RNA, 19 nt, Artificial Sequence
  Description of Artificial Sequence: Synthetic oligonucleotide
cuguauacucgacauaaaa

SEQ ID NO: 163821 - RNA, 19 nt, Artificial Sequence
  Description of Artificial Sequence: Synthetic oligonucleotide
guuaucagccgguagacau

SEQ ID NO: 163822 - RNA, 19 nt, Artificial Sequence
  Description of Artificial Sequence: Synthetic oligonucleotide
auauacagcuacccacccu

SEQ ID NO: 163823 - RNA, 19 nt, Artificial Sequence
  Description of Artificial Sequence: Synthetic oligonucleotide
aucucuacucgcuaauaua

SEQ ID NO: 163824 - RNA, 19 nt, Artificial Sequence
  Description of Artificial Sequence: Synthetic oligonucleotide
gaagcccuauuuguaauca

SEQ ID NO: 163825 - RNA, 19 nt, Artificial Sequence
  Description of Artificial Sequence: Synthetic oligonucleotide
cucauugaggcuuuuaaau

SEQ ID NO: 163826 - RNA, 19 nt, Artificial Sequence
  Description of Artificial Sequence: Synthetic oligonucleotide
agauauguauauccuugua

SEQ ID NO: 163827 - RNA, 19 nt, Artificial Sequence
  Description of Artificial Sequence: Synthetic oligonucleotide
cuauauccuagccauuaga

SEQ ID NO: 163828 - RNA, 19 nt, Artificial Sequence
  Description of Artificial Sequence: Synthetic oligonucleotide
gguugcacaguuuacguaa

SEQ ID NO: 163829 - RNA, 19 nt, Artificial Sequence
  Description of Artificial Sequence: Synthetic oligonucleotide
cacgagacuuagcaaaauc

SEQ ID NO: 163830 - RNA, 19 nt, Artificial Sequence
  Description of Artificial Sequence: Synthetic oligonucleotide
guacucggaaucauacugc

SEQ ID NO: 163831 - RNA, 19 nt, Artificial Sequence
  Description of Artificial Sequence: Synthetic oligonucleotide
cucaaaaggaauggcagga

SEQ ID NO: 163832 - RNA, 19 nt, Artificial Sequence
  Description of Artificial Sequence: Synthetic oligonucleotide
ggaugggucauuguuaaac

SEQ ID NO: 163833 - RNA, 19 nt, Artificial Sequence
  Description of Artificial Sequence: Synthetic oligonucleotide
ucgugcaucucuacucgcu

SEQ ID NO: 163834 - RNA, 19 nt, Artificial Sequence
  Description of Artificial Sequence: Synthetic oligonucleotide
agaguacaguaauagucuu

SEQ ID NO: 163835 - RNA, 19 nt, Artificial Sequence
  Description of Artificial Sequence: Synthetic oligonucleotide
cuguaaacuagaauucucu

SEQ ID NO: 163836 - RNA, 19 nt, Artificial Sequence
  Description of Artificial Sequence: Synthetic oligonucleotide
cuaauaggauguuauuaua

SEQ ID NO: 163837 - RNA, 19 nt, Artificial Sequence
  Description of Artificial Sequence: Synthetic oligonucleotide
uucggaguuugcugaauau

SEQ ID NO: 163838 - RNA, 19 nt, Artificial Sequence
  Description of Artificial Sequence: Synthetic oligonucleotide
uucugcccgauacgauggg

SEQ ID NO: 163839 - RNA, 19 nt, Artificial Sequence
  Description of Artificial Sequence: Synthetic oligonucleotide
ucgcuaauauagguuuacc

SEQ ID NO: 163840 - RNA, 19 nt, Artificial Sequence
  Description of Artificial Sequence: Synthetic oligonucleotide
cacguuucugcccgauacg

SEQ ID NO: 163841 - RNA, 19 nt, Artificial Sequence
  Description of Artificial Sequence: Synthetic oligonucleotide
ugcaucucuacucgcuaau

SEQ ID NO: 163842 - RNA, 19 nt, Artificial Sequence
  Description of Artificial Sequence: Synthetic oligonucleotide
uuguucucgacuugagcuu

SEQ ID NO: 163843 - RNA, 19 nt, Artificial Sequence
  Description of Artificial Sequence: Synthetic oligonucleotide
ugguagcacacggaaaccu

SEQ ID NO: 163844 - RNA, 19 nt, Artificial Sequence
  Description of Artificial Sequence: Synthetic oligonucleotide
ccuacuuuuagaagauaug

SEQ ID NO: 163845 - RNA, 19 nt, Artificial Sequence
  Description of Artificial Sequence: Synthetic oligonucleotide
caguuacucgagagaacgc

SEQ ID NO: 163846 - RNA, 19 nt, Artificial Sequence
  Description of Artificial Sequence: Synthetic oligonucleotide
uugaugccuagguguagga

SEQ ID NO: 163847 - RNA, 19 nt, Artificial Sequence
  Description of Artificial Sequence: Synthetic oligonucleotide
ugcccgauacgaugggccc

SEQ ID NO: 163848 - RNA, 19 nt, Artificial Sequence
  Description of Artificial Sequence: Synthetic oligonucleotide
caguaauagucuugaauaa

SEQ ID NO: 163849 - RNA, 19 nt, Artificial Sequence
  Description of Artificial Sequence: Synthetic oligonucleotide
gaccaaugcuggaugguug

SEQ ID NO: 163850 - RNA, 19 nt, Artificial Sequence
  Description of Artificial Sequence: Synthetic oligonucleotide
gacacgauggaaugucucu

SEQ ID NO: 163851 - RNA, 19 nt, Artificial Sequence
  Description of Artificial Sequence: Synthetic oligonucleotide
cucgcuaauauagguuuac

SEQ ID NO: 163852 - RNA, 19 nt, Artificial Sequence
  Description of Artificial Sequence: Synthetic oligonucleotide
agcuucgugcaucucuacu

SEQ ID NO: 163853 - RNA, 19 nt, Artificial Sequence
  Description of Artificial Sequence: Synthetic oligonucleotide
uuaucagccgguagacauu

SEQ ID NO: 163854 - RNA, 19 nt, Artificial Sequence
  Description of Artificial Sequence: Synthetic oligonucleotide
ucggaguuugcugaauauc

SEQ ID NO: 163855 - RNA, 19 nt, Artificial Sequence
  Description of Artificial Sequence: Synthetic oligonucleotide
uuguaaugccuggaauaca

SEQ ID NO: 163856 - RNA, 19 nt, Artificial Sequence
  Description of Artificial Sequence: Synthetic oligonucleotide
acccuuauuauuguacaau

SEQ ID NO: 163857 - RNA, 19 nt, Artificial Sequence
  Description of Artificial Sequence: Synthetic oligonucleotide
auacucgacauaaaaucau

SEQ ID NO: 163858 - RNA, 19 nt, Artificial Sequence
  Description of Artificial Sequence: Synthetic oligonucleotide
cucuaauaggauguuauua

SEQ ID NO: 163859 - RNA, 19 nt, Artificial Sequence
  Description of Artificial Sequence: Synthetic oligonucleotide
auaggguuccagucaugcu

SEQ ID NO: 163860 - RNA, 19 nt, Artificial Sequence
  Description of Artificial Sequence: Synthetic oligonucleotide
gcaguguaaaaucuauguc

SEQ ID NO: 163861 - RNA, 19 nt, Artificial Sequence
  Description of Artificial Sequence: Synthetic oligonucleotide
aagcccuauuuguaaucaa

SEQ ID NO: 163862 - RNA, 19 nt, Artificial Sequence
  Description of Artificial Sequence: Synthetic oligonucleotide
acucuaugcaucugcuuua

SEQ ID NO: 163863 - RNA, 19 nt, Artificial Sequence
  Description of Artificial Sequence: Synthetic oligonucleotide
augcucuacuacaguaaac

SEQ ID NO: 163864 - RNA, 19 nt, Artificial Sequence
  Description of Artificial Sequence: Synthetic oligonucleotide
guuuaagaccaaugcugga

SEQ ID NO: 163865 - RNA, 19 nt, Artificial Sequence
  Description of Artificial Sequence: Synthetic oligonucleotide
uccuuguaugcuuguguau

SEQ ID NO: 163866 - RNA, 19 nt, Artificial Sequence
  Description of Artificial Sequence: Synthetic oligonucleotide
acacgauggaaugucucug

SEQ ID NO: 163867 - RNA, 19 nt, Artificial Sequence
  Description of Artificial Sequence: Synthetic oligonucleotide
uggcguucgguacccaaaa

SEQ ID NO: 163868 - RNA, 19 nt, Artificial Sequence
  Description of Artificial Sequence: Synthetic oligonucleotide
cuaagaguacaguaauagu

SEQ ID NO: 163869 - RNA, 19 nt, Artificial Sequence
  Description of Artificial Sequence: Synthetic oligonucleotide
aacuugaugccuaggugua

SEQ ID NO: 163870 - RNA, 19 nt, Artificial Sequence
  Description of Artificial Sequence: Synthetic oligonucleotide
gccuuaaauauaccaguac

SEQ ID NO: 163871 - RNA, 19 nt, Artificial Sequence
  Description of Artificial Sequence: Synthetic oligonucleotide
cauuggguauaggauggac

SEQ ID NO: 163872 - RNA, 19 nt, Artificial Sequence
  Description of Artificial Sequence: Synthetic oligonucleotide
ugcucacggacaccacagc

SEQ ID NO: 163873 - RNA, 19 nt, Artificial Sequence
  Description of Artificial Sequence: Synthetic oligonucleotide
ucccgcauaggguuccagu

SEQ ID NO: 163874 - RNA, 19 nt, Artificial Sequence
  Description of Artificial Sequence: Synthetic oligonucleotide
gcuauauccuagccauuag

SEQ ID NO: 163875 - RNA, 19 nt, Artificial Sequence
  Description of Artificial Sequence: Synthetic oligonucleotide
ugguugcacaguuuacgua

SEQ ID NO: 163876 - RNA, 19 nt, Artificial Sequence
  Description of Artificial Sequence: Synthetic oligonucleotide
ccaauuuuaagcaguguaa

SEQ ID NO: 163877 - RNA, 19 nt, Artificial Sequence
  Description of Artificial Sequence: Synthetic oligonucleotide
cuaauguuagagucacucu

SEQ ID NO: 163878 - RNA, 19 nt, Artificial Sequence
  Description of Artificial Sequence: Synthetic oligonucleotide
ggucuacuauauuugaaua

SEQ ID NO: 163879 - RNA, 19 nt, Artificial Sequence
  Description of Artificial Sequence: Synthetic oligonucleotide
agcagucaguuguuuuacu

SEQ ID NO: 163880 - RNA, 19 nt, Artificial Sequence
  Description of Artificial Sequence: Synthetic oligonucleotide
gcuucgugcaucucuacuc

SEQ ID NO: 163881 - RNA, 19 nt, Artificial Sequence
  Description of Artificial Sequence: Synthetic oligonucleotide
acguuucugcccgauacga

SEQ ID NO: 163882 - RNA, 19 nt, Artificial Sequence
  Description of Artificial Sequence: Synthetic oligonucleotide
ggaguuugcugaauaucag

SEQ ID NO: 163883 - RNA, 19 nt, Artificial Sequence
  Description of Artificial Sequence: Synthetic oligonucleotide
agcacacuguauacucgac

SEQ ID NO: 163884 - RNA, 19 nt, Artificial Sequence
  Description of Artificial Sequence: Synthetic oligonucleotide
gacuugagcuucgugcauc

SEQ ID NO: 163885 - RNA, 19 nt, Artificial Sequence
  Description of Artificial Sequence: Synthetic oligonucleotide
uugcacaguuuacguaaau

SEQ ID NO: 163886 - RNA, 19 nt, Artificial Sequence
  Description of Artificial Sequence: Synthetic oligonucleotide
guagaucccgcauaggguu

SEQ ID NO: 163887 - RNA, 19 nt, Artificial Sequence
  Description of Artificial Sequence: Synthetic oligonucleotide
caguuuacguaaauauugu

SEQ ID NO: 163888 - RNA, 19 nt, Artificial Sequence
  Description of Artificial Sequence: Synthetic oligonucleotide
ccuuguaugcuuguguaug

SEQ ID NO: 163889 - RNA, 19 nt, Artificial Sequence
  Description of Artificial Sequence: Synthetic oligonucleotide
cagguuuucaagaaccgau

SEQ ID NO: 163890 - RNA, 19 nt, Artificial Sequence
  Description of Artificial Sequence: Synthetic oligonucleotide
gcaaacuggcguucgguac

SEQ ID NO: 163891 - RNA, 19 nt, Artificial Sequence
  Description of Artificial Sequence: Synthetic oligonucleotide
cuggauugguguuccagaa

SEQ ID NO: 163892 - RNA, 19 nt, Artificial Sequence
  Description of Artificial Sequence: Synthetic oligonucleotide
cugguagcacacggaaacc

SEQ ID NO: 163893 - RNA, 19 nt, Artificial Sequence
  Description of Artificial Sequence: Synthetic oligonucleotide
gcagcuauucagcauguaa

SEQ ID NO: 163894 - RNA, 19 nt, Artificial Sequence
  Description of Artificial Sequence: Synthetic oligonucleotide
guauuaacuuaugugggau

SEQ ID NO: 163895 - RNA, 19 nt, Artificial Sequence
  Description of Artificial Sequence: Synthetic oligonucleotide
agcccuauuuguaaucaau

SEQ ID NO: 163896 - RNA, 19 nt, Artificial Sequence
  Description of Artificial Sequence: Synthetic oligonucleotide
uuguacaauugaggucuga

SEQ ID NO: 163897 - RNA, 19 nt, Artificial Sequence
  Description of Artificial Sequence: Synthetic oligonucleotide
uccuagccauuagauaaau

SEQ ID NO: 163898 - RNA, 19 nt, Artificial Sequence
  Description of Artificial Sequence: Synthetic oligonucleotide
caaggcuacucaaguguga

SEQ ID NO: 163899 - RNA, 19 nt, Artificial Sequence
  Description of Artificial Sequence: Synthetic oligonucleotide
gccgguagacauuaaccac

SEQ ID NO: 163900 - RNA, 19 nt, Artificial Sequence
  Description of Artificial Sequence: Synthetic oligonucleotide
agagggcuaagaguacagu

SEQ ID NO: 163901 - RNA, 19 nt, Artificial Sequence
  Description of Artificial Sequence: Synthetic oligonucleotide
gaacgcaugaaggucucua

SEQ ID NO: 163902 - RNA, 19 nt, Artificial Sequence
  Description of Artificial Sequence: Synthetic oligonucleotide
guaugcugccaucuagucu

SEQ ID NO: 163903 - RNA, 19 nt, Artificial Sequence
  Description of Artificial Sequence: Synthetic oligonucleotide
cuauaguuagcagucaguu

SEQ ID NO: 163904 - RNA, 19 nt, Artificial Sequence
  Description of Artificial Sequence: Synthetic oligonucleotide
ccauagcaagaacaccugc

SEQ ID NO: 163905 - RNA, 19 nt, Artificial Sequence
  Description of Artificial Sequence: Synthetic oligonucleotide
ggaagauccugcaagacau

SEQ ID NO: 163906 - RNA, 19 nt, Artificial Sequence
  Description of Artificial Sequence: Synthetic oligonucleotide
uucuagugucccucugguu

SEQ ID NO: 163907 - RNA, 19 nt, Artificial Sequence
  Description of Artificial Sequence: Synthetic oligonucleotide
caugcucgcuuuuccagaa

SEQ ID NO: 163908 - RNA, 19 nt, Artificial Sequence
  Description of Artificial Sequence: Synthetic oligonucleotide
cuggaauacaugaccugua

SEQ ID NO: 163909 - RNA, 19 nt, Artificial Sequence
  Description of Artificial Sequence: Synthetic oligonucleotide
gggguuuaagaccaaugcu

SEQ ID NO: 163910 - RNA, 19 nt, Artificial Sequence
  Description of Artificial Sequence: Synthetic oligonucleotide
cggaguuugcugaauauca

SEQ ID NO: 163911 - RNA, 19 nt, Artificial Sequence
  Description of Artificial Sequence: Synthetic oligonucleotide
gcucaguuauuauugcugu

SEQ ID NO: 163912 - RNA, 19 nt, Artificial Sequence
  Description of Artificial Sequence: Synthetic oligonucleotide
gacuucggaguuugcugaa

SEQ ID NO: 163913 - RNA, 19 nt, Artificial Sequence
  Description of Artificial Sequence: Synthetic oligonucleotide
ggaccagacacaaaucuua

SEQ ID NO: 163914 - RNA, 19 nt, Artificial Sequence
  Description of Artificial Sequence: Synthetic oligonucleotide
aucgagcagcaaacuggcg

SEQ ID NO: 163915 - RNA, 19 nt, Artificial Sequence
  Description of Artificial Sequence: Synthetic oligonucleotide
gcucacggacaccacagca

SEQ ID NO: 163916 - RNA, 19 nt, Artificial Sequence
  Description of Artificial Sequence: Synthetic oligonucleotide
gugcaucucuacucgcuaa

SEQ ID NO: 163917 - RNA, 19 nt, Artificial Sequence
  Description of Artificial Sequence: Synthetic oligonucleotide
caucucuacucgcuaauau

SEQ ID NO: 163918 - RNA, 19 nt, Artificial Sequence
  Description of Artificial Sequence: Synthetic oligonucleotide
aggccuguauuaacuuaug

SEQ ID NO: 163919 - RNA, 19 nt, Artificial Sequence
  Description of Artificial Sequence: Synthetic oligonucleotide
uucucgacuugagcuucgu

SEQ ID NO: 163920 - RNA, 19 nt, Artificial Sequence
  Description of Artificial Sequence: Synthetic oligonucleotide
auccuagccauuagauaaa

SEQ ID NO: 163921 - RNA, 19 nt, Artificial Sequence
  Description of Artificial Sequence: Synthetic oligonucleotide
guauggcucauugaggcuu

SEQ ID NO: 163922 - RNA, 19 nt, Artificial Sequence
  Description of Artificial Sequence: Synthetic oligonucleotide
cuggcguucgguacccaaa

SEQ ID NO: 163923 - RNA, 19 nt, Artificial Sequence
  Description of Artificial Sequence: Synthetic oligonucleotide
cacgauggaaugucucugu

SEQ ID NO: 163924 - RNA, 19 nt, Artificial Sequence
  Description of Artificial Sequence: Synthetic oligonucleotide
caaucaauggaugggucau

SEQ ID NO: 163925 - RNA, 19 nt, Artificial Sequence
  Description of Artificial Sequence: Synthetic oligonucleotide
guugcacaguuuacguaaa

SEQ ID NO: 163926 - RNA, 19 nt, Artificial Sequence
  Description of Artificial Sequence: Synthetic oligonucleotide
agaacgcaugaaggucucu

SEQ ID NO: 163927 - RNA, 19 nt, Artificial Sequence
  Description of Artificial Sequence: Synthetic oligonucleotide
ccaacaugaguuguaagua

SEQ ID NO: 163928 - RNA, 19 nt, Artificial Sequence
  Description of Artificial Sequence: Synthetic oligonucleotide
ggaugguugcacaguuuac

SEQ ID NO: 163929 - RNA, 19 nt, Artificial Sequence
  Description of Artificial Sequence: Synthetic oligonucleotide
guuacucgagagaacgcau

SEQ ID NO: 163930 - RNA, 19 nt, Artificial Sequence
  Description of Artificial Sequence: Synthetic oligonucleotide
ggacacgauggaaugucuc

SEQ ID NO: 163931 - RNA, 19 nt, Artificial Sequence
  Description of Artificial Sequence: Synthetic oligonucleotide
acucgcuaauauagguuua

SEQ ID NO: 163932 - RNA, 19 nt, Artificial Sequence
  Description of Artificial Sequence: Synthetic oligonucleotide
cccuacuuuuagaagauau

SEQ ID NO: 163933 - RNA, 19 nt, Artificial Sequence
  Description of Artificial Sequence: Synthetic oligonucleotide
acccucuaauaggauguua

SEQ ID NO: 163934 - RNA, 19 nt, Artificial Sequence
  Description of Artificial Sequence: Synthetic oligonucleotide
gguuaucagccgguagaca

SEQ ID NO: 163935 - RNA, 19 nt, Artificial Sequence
  Description of Artificial Sequence: Synthetic oligonucleotide
ccuauaguuagcagucagu

SEQ ID NO: 163936 - RNA, 19 nt, Artificial Sequence
  Description of Artificial Sequence: Synthetic oligonucleotide
cccgauacgaugggcccgg

SEQ ID NO: 163937 - RNA, 19 nt, Artificial Sequence
  Description of Artificial Sequence: Synthetic oligonucleotide
ggcacgagacuuagcaaaa

SEQ ID NO: 163938 - RNA, 19 nt, Artificial Sequence
  Description of Artificial Sequence: Synthetic oligonucleotide
gcccgauacgaugggcccg

SEQ ID NO: 163939 - RNA, 19 nt, Artificial Sequence
  Description of Artificial Sequence: Synthetic oligonucleotide
aacuggcguucgguaccca

SEQ ID NO: 163940 - RNA, 19 nt, Artificial Sequence
  Description of Artificial Sequence: Synthetic oligonucleotide
cuacuacaguaaacagccu

SEQ ID NO: 163941 - RNA, 19 nt, Artificial Sequence
  Description of Artificial Sequence: Synthetic oligonucleotide
cuccaugcucaguuauuau

SEQ ID NO: 163942 - RNA, 19 nt, Artificial Sequence
  Description of Artificial Sequence: Synthetic oligonucleotide
ccgcauaggguuccaguca

SEQ ID NO: 163943 - RNA, 19 nt, Artificial Sequence
  Description of Artificial Sequence: Synthetic oligonucleotide
cacacguuucugcccgaua

SEQ ID NO: 163944 - RNA, 19 nt, Artificial Sequence
  Description of Artificial Sequence: Synthetic oligonucleotide
cagcaaacuggcguucggu

SEQ ID NO: 163945 - RNA, 19 nt, Artificial Sequence
  Description of Artificial Sequence: Synthetic oligonucleotide
cgagacuuagcaaaaucuu

SEQ ID NO: 163946 - RNA, 19 nt, Artificial Sequence
  Description of Artificial Sequence: Synthetic oligonucleotide
gcaucucuacucgcuaaua

SEQ ID NO: 163947 - RNA, 19 nt, Artificial Sequence
  Description of Artificial Sequence: Synthetic oligonucleotide
ggaaaccuggccgcuuccu

SEQ ID NO: 163948 - RNA, 19 nt, Artificial Sequence
  Description of Artificial Sequence: Synthetic oligonucleotide
gggacacgauggaaugucu

SEQ ID NO: 163949 - RNA, 19 nt, Artificial Sequence
  Description of Artificial Sequence: Synthetic oligonucleotide
ccgauuucaugcucgcuuu

SEQ ID NO: 163950 - RNA, 19 nt, Artificial Sequence
  Description of Artificial Sequence: Synthetic oligonucleotide
auccagcgugcagcaguua

SEQ ID NO: 163951 - RNA, 19 nt, Artificial Sequence
  Description of Artificial Sequence: Synthetic oligonucleotide
cgugcaucucuacucgcua

SEQ ID NO: 163952 - RNA, 19 nt, Artificial Sequence
  Description of Artificial Sequence: Synthetic oligonucleotide
cgauacgaugggcccgguc

SEQ ID NO: 163953 - RNA, 19 nt, Artificial Sequence
  Description of Artificial Sequence: Synthetic oligonucleotide
gcgggagcaccuccuggua

SEQ ID NO: 163954 - RNA, 19 nt, Artificial Sequence
  Description of Artificial Sequence: Synthetic oligonucleotide
ccuagccauuagauaaauu

SEQ ID NO: 163955 - RNA, 19 nt, Artificial Sequence
  Description of Artificial Sequence: Synthetic oligonucleotide
gcacgagacuuagcaaaau

SEQ ID NO: 163956 - RNA, 19 nt, Artificial Sequence
  Description of Artificial Sequence: Synthetic oligonucleotide
cacccucuaauaggauguu

SEQ ID NO: 163957 - RNA, 19 nt, Artificial Sequence
  Description of Artificial Sequence: Synthetic oligonucleotide
ccacacguuucugcccgau

SEQ ID NO: 163958 - RNA, 19 nt, Artificial Sequence
  Description of Artificial Sequence: Synthetic oligonucleotide
ccgauacgaugggcccggu

SEQ ID NO: 163959 - RNA, 19 nt, Artificial Sequence
  Description of Artificial Sequence: Synthetic oligonucleotide
auuagagaaaaccucaugc

SEQ ID NO: 163960 - RNA, 19 nt, Artificial Sequence
  Description of Artificial Sequence: Synthetic oligonucleotide
ugugcuagcagcaaaaugc

SEQ ID NO: 163961 - RNA, 19 nt, Artificial Sequence
  Description of Artificial Sequence: Synthetic oligonucleotide
uuuaaguucagaaggaagc

SEQ ID NO: 163962 - RNA, 19 nt, Artificial Sequence
  Description of Artificial Sequence: Synthetic oligonucleotide
gagauuaauacaaagaagc

SEQ ID NO: 163963 - RNA, 19 nt, Artificial Sequence
  Description of Artificial Sequence: Synthetic oligonucleotide
auauaaggaggcuugagag

SEQ ID NO: 163964 - RNA, 19 nt, Artificial Sequence
  Description of Artificial Sequence: Synthetic oligonucleotide
aauuaacaaacuguaauug

SEQ ID NO: 163965 - RNA, 19 nt, Artificial Sequence
  Description of Artificial Sequence: Synthetic oligonucleotide
ucaaaaggaguuuaugaag

SEQ ID NO: 163966 - RNA, 19 nt, Artificial Sequence
  Description of Artificial Sequence: Synthetic oligonucleotide
uguaggcagaauuagagca

SEQ ID NO: 163967 - RNA, 19 nt, Artificial Sequence
  Description of Artificial Sequence: Synthetic oligonucleotide
ucuuagaucaccuaaugaa

SEQ ID NO: 163968 - RNA, 19 nt, Artificial Sequence
  Description of Artificial Sequence: Synthetic oligonucleotide
aaaggagaaguuaaguagg

SEQ ID NO: 163969 - RNA, 19 nt, Artificial Sequence
  Description of Artificial Sequence: Synthetic oligonucleotide
aaggguuccagcaaggugg

SEQ ID NO: 163970 - RNA, 19 nt, Artificial Sequence
  Description of Artificial Sequence: Synthetic oligonucleotide
uguauuagcaccccuaauc

SEQ ID NO: 163971 - RNA, 19 nt, Artificial Sequence
  Description of Artificial Sequence: Synthetic oligonucleotide
gacucuauggaauaggcac

SEQ ID NO: 163972 - RNA, 19 nt, Artificial Sequence
  Description of Artificial Sequence: Synthetic oligonucleotide
uacauuauacagaggacag

SEQ ID NO: 163973 - RNA, 19 nt, Artificial Sequence
  Description of Artificial Sequence: Synthetic oligonucleotide
aguucgacugcauaguuuc

SEQ ID NO: 163974 - RNA, 19 nt, Artificial Sequence
  Description of Artificial Sequence: Synthetic oligonucleotide
uuauaagaaugccugcuag

SEQ ID NO: 163975 - RNA, 19 nt, Artificial Sequence
  Description of Artificial Sequence: Synthetic oligonucleotide
ucauucacgaguucgacug

SEQ ID NO: 163976 - RNA, 19 nt, Artificial Sequence
  Description of Artificial Sequence: Synthetic oligonucleotide
uuagaucaccuaaugaagc

SEQ ID NO: 163977 - RNA, 19 nt, Artificial Sequence
  Description of Artificial Sequence: Synthetic oligonucleotide
aacacaaucuacaugucag

SEQ ID NO: 163978 - RNA, 19 nt, Artificial Sequence
  Description of Artificial Sequence: Synthetic oligonucleotide
augaucacggacucuaugg

SEQ ID NO: 163979 - RNA, 19 nt, Artificial Sequence
  Description of Artificial Sequence: Synthetic oligonucleotide
uguaauuguuuucccaaag

SEQ ID NO: 163980 - RNA, 19 nt, Artificial Sequence
  Description of Artificial Sequence: Synthetic oligonucleotide
cuuagaucaccuaaugaag

SEQ ID NO: 163981 - RNA, 19 nt, Artificial Sequence
  Description of Artificial Sequence: Synthetic oligonucleotide
cugugaucgguauauaucc

SEQ ID NO: 163982 - RNA, 19 nt, Artificial Sequence
  Description of Artificial Sequence: Synthetic oligonucleotide
gagaaaaccucaugcaucc

SEQ ID NO: 163983 - RNA, 19 nt, Artificial Sequence
  Description of Artificial Sequence: Synthetic oligonucleotide
agauuaauacaaagaagcc

SEQ ID NO: 163984 - RNA, 19 nt, Artificial Sequence
  Description of Artificial Sequence: Synthetic oligonucleotide
gagaucguugugcaaagcg

SEQ ID NO: 163985 - RNA, 19 nt, Artificial Sequence
  Description of Artificial Sequence: Synthetic oligonucleotide
uuagcguuuagaauagcca

SEQ ID NO: 163986 - RNA, 19 nt, Artificial Sequence
  Description of Artificial Sequence: Synthetic oligonucleotide
uuuguuggcuccaaacugc

SEQ ID NO: 163987 - RNA, 19 nt, Artificial Sequence
  Description of Artificial Sequence: Synthetic oligonucleotide
agagcuaucacguccagga

SEQ ID NO: 163988 - RNA, 19 nt, Artificial Sequence
  Description of Artificial Sequence: Synthetic oligonucleotide
caaguuagggucaucagac

SEQ ID NO: 163989 - RNA, 19 nt, Artificial Sequence
  Description of Artificial Sequence: Synthetic oligonucleotide
uuuuccuuagcguuuagaa

SEQ ID NO: 163990 - RNA, 19 nt, Artificial Sequence
  Description of Artificial Sequence: Synthetic oligonucleotide
aaacacaaucuacauguca

SEQ ID NO: 163991 - RNA, 19 nt, Artificial Sequence
  Description of Artificial Sequence: Synthetic oligonucleotide
gaacucgcagcucagcucg

SEQ ID NO: 163992 - RNA, 19 nt, Artificial Sequence
  Description of Artificial Sequence: Synthetic oligonucleotide
aagacauucaaaucccuaa

SEQ ID NO: 163993 - RNA, 19 nt, Artificial Sequence
  Description of Artificial Sequence: Synthetic oligonucleotide
aucccuaaaagaaaggagg

SEQ ID NO: 163994 - RNA, 19 nt, Artificial Sequence
  Description of Artificial Sequence: Synthetic oligonucleotide
cuuagcguuuagaauagcc

SEQ ID NO: 163995 - RNA, 19 nt, Artificial Sequence
  Description of Artificial Sequence: Synthetic oligonucleotide
augaaaggugagcagagag

SEQ ID NO: 163996 - RNA, 19 nt, Artificial Sequence
  Description of Artificial Sequence: Synthetic oligonucleotide
cuuuaaguucagaaggaag

SEQ ID NO: 163997 - RNA, 19 nt, Artificial Sequence
  Description of Artificial Sequence: Synthetic oligonucleotide
uuccuuagcguuuagaaua

SEQ ID NO: 163998 - RNA, 19 nt, Artificial Sequence
  Description of Artificial Sequence: Synthetic oligonucleotide
aaagguaauugguccagug

SEQ ID NO: 163999 - RNA, 19 nt, Artificial Sequence
  Description of Artificial Sequence: Synthetic oligonucleotide
aaauggcuagaaagaaucc

SEQ ID NO: 164000 - RNA, 19 nt, Artificial Sequence
  Description of Artificial Sequence: Synthetic oligonucleotide
ugggaaauggcuagaaaga

SEQ ID NO: 164001 - RNA, 19 nt, Artificial Sequence
  Description of Artificial Sequence: Synthetic oligonucleotide
uucuuuuccgaugccaucg

SEQ ID NO: 164002 - RNA, 19 nt, Artificial Sequence
  Description of Artificial Sequence: Synthetic oligonucleotide
uguauccucaggcaucucc

SEQ ID NO: 164003 - RNA, 19 nt, Artificial Sequence
  Description of Artificial Sequence: Synthetic oligonucleotide
gggaaguuaucuuuaaagg

SEQ ID NO: 164004 - RNA, 19 nt, Artificial Sequence
  Description of Artificial Sequence: Synthetic oligonucleotide
guuacaguaggacagcaac

SEQ ID NO: 164005 - RNA, 19 nt, Artificial Sequence
  Description of Artificial Sequence: Synthetic oligonucleotide
uugauucauccuuugguag

SEQ ID NO: 164006 - RNA, 19 nt, Artificial Sequence
  Description of Artificial Sequence: Synthetic oligonucleotide
ucuagucuggagcacagcu

SEQ ID NO: 164007 - RNA, 19 nt, Artificial Sequence
  Description of Artificial Sequence: Synthetic oligonucleotide
uauaagaaugccugcuagc

SEQ ID NO: 164008 - RNA, 19 nt, Artificial Sequence
  Description of Artificial Sequence: Synthetic oligonucleotide
gccguuaucaaucagguug

SEQ ID NO: 164009 - RNA, 19 nt, Artificial Sequence
  Description of Artificial Sequence: Synthetic oligonucleotide
aaguuaaguaggaugaagu

SEQ ID NO: 164010 - RNA, 19 nt, Artificial Sequence
  Description of Artificial Sequence: Synthetic oligonucleotide
aggaguuugacauuccagu

SEQ ID NO: 164011 - RNA, 19 nt, Artificial Sequence
  Description of Artificial Sequence: Synthetic oligonucleotide
agcucguccaggcaggcgc

SEQ ID NO: 164012 - RNA, 19 nt, Artificial Sequence
  Description of Artificial Sequence: Synthetic oligonucleotide
uuuaugaagcggcuacuca

SEQ ID NO: 164013 - RNA, 19 nt, Artificial Sequence
  Description of Artificial Sequence: Synthetic oligonucleotide
ucugugaucgguauauauc

SEQ ID NO: 164014 - RNA, 19 nt, Artificial Sequence
  Description of Artificial Sequence: Synthetic oligonucleotide
uucuuagaucaccuaauga

SEQ ID NO: 164015 - RNA, 19 nt, Artificial Sequence
  Description of Artificial Sequence: Synthetic oligonucleotide
uagaauagccaucauuguc

SEQ ID NO: 164016 - RNA, 19 nt, Artificial Sequence
  Description of Artificial Sequence: Synthetic oligonucleotide
auacauuauacagaggaca

SEQ ID NO: 164017 - RNA, 19 nt, Artificial Sequence
  Description of Artificial Sequence: Synthetic oligonucleotide
gagaaguuaaguaggauga

SEQ ID NO: 164018 - RNA, 19 nt, Artificial Sequence
  Description of Artificial Sequence: Synthetic oligonucleotide
agcaagacauucaaauccc

SEQ ID NO: 164019 - RNA, 19 nt, Artificial Sequence
  Description of Artificial Sequence: Synthetic oligonucleotide
uagaguuuacacaggucag

SEQ ID NO: 164020 - RNA, 19 nt, Artificial Sequence
  Description of Artificial Sequence: Synthetic oligonucleotide
uuuuccgaugccaucgucu

SEQ ID NO: 164021 - RNA, 19 nt, Artificial Sequence
  Description of Artificial Sequence: Synthetic oligonucleotide
auaguuuccgccuuugaaa

SEQ ID NO: 164022 - RNA, 19 nt, Artificial Sequence
  Description of Artificial Sequence: Synthetic oligonucleotide
auuguccugcaauaggcag

SEQ ID NO: 164023 - RNA, 19 nt, Artificial Sequence
  Description of Artificial Sequence: Synthetic oligonucleotide
gacacaacccugacgaacg

SEQ ID NO: 164024 - RNA, 19 nt, Artificial Sequence
  Description of Artificial Sequence: Synthetic oligonucleotide
ggagaaguuaaguaggaug

SEQ ID NO: 164025 - RNA, 19 nt, Artificial Sequence
  Description of Artificial Sequence: Synthetic oligonucleotide
caccuaaugaagcagauga

SEQ ID NO: 164026 - RNA, 19 nt, Artificial Sequence
  Description of Artificial Sequence: Synthetic oligonucleotide
gaguuuaugaagcggcuac

SEQ ID NO: 164027 - RNA, 19 nt, Artificial Sequence
  Description of Artificial Sequence: Synthetic oligonucleotide
ucccuaaaagaaaggagga

SEQ ID NO: 164028 - RNA, 19 nt, Artificial Sequence
  Description of Artificial Sequence: Synthetic oligonucleotide
cuuuauguccaccagccuc

SEQ ID NO: 164029 - RNA, 19 nt, Artificial Sequence
  Description of Artificial Sequence: Synthetic oligonucleotide
accaacguggcgcugaucu

SEQ ID NO: 164030 - RNA, 19 nt, Artificial Sequence
  Description of Artificial Sequence: Synthetic oligonucleotide
agcaccccuaaucuggugg

SEQ ID NO: 164031 - RNA, 19 nt, Artificial Sequence
  Description of Artificial Sequence: Synthetic oligonucleotide
agaucguugugcaaagcgc

SEQ ID NO: 164032 - RNA, 19 nt, Artificial Sequence
  Description of Artificial Sequence: Synthetic oligonucleotide
uuugaaacucugugaucgg

SEQ ID NO: 164033 - RNA, 19 nt, Artificial Sequence
  Description of Artificial Sequence: Synthetic oligonucleotide
caaaucccuaaaagaaagg

SEQ ID NO: 164034 - RNA, 19 nt, Artificial Sequence
  Description of Artificial Sequence: Synthetic oligonucleotide
ugauucauccuuugguaga

SEQ ID NO: 164035 - RNA, 19 nt, Artificial Sequence
  Description of Artificial Sequence: Synthetic oligonucleotide
guaaggaggcucuagucug

SEQ ID NO: 164036 - RNA, 19 nt, Artificial Sequence
  Description of Artificial Sequence: Synthetic oligonucleotide
agcauuuccacaucgggau

SEQ ID NO: 164037 - RNA, 19 nt, Artificial Sequence
  Description of Artificial Sequence: Synthetic oligonucleotide
uagaucaccuaaugaagca

SEQ ID NO: 164038 - RNA, 19 nt, Artificial Sequence
  Description of Artificial Sequence: Synthetic oligonucleotide
ugaucgguauauaucccug

SEQ ID NO: 164039 - RNA, 19 nt, Artificial Sequence
  Description of Artificial Sequence: Synthetic oligonucleotide
auagagacugucauucacg

SEQ ID NO: 164040 - RNA, 19 nt, Artificial Sequence
  Description of Artificial Sequence: Synthetic oligonucleotide
uauaaggaggcuugagagu

SEQ ID NO: 164041 - RNA, 19 nt, Artificial Sequence
  Description of Artificial Sequence: Synthetic oligonucleotide
uuagaauagccaucauugu

SEQ ID NO: 164042 - RNA, 19 nt, Artificial Sequence
  Description of Artificial Sequence: Synthetic oligonucleotide
auaagaaugccugcuagca

SEQ ID NO: 164043 - RNA, 19 nt, Artificial Sequence
  Description of Artificial Sequence: Synthetic oligonucleotide
uucgacugcauaguuuccg

SEQ ID NO: 164044 - RNA, 19 nt, Artificial Sequence
  Description of Artificial Sequence: Synthetic oligonucleotide
gagacugucauucacgagu

SEQ ID NO: 164045 - RNA, 19 nt, Artificial Sequence
  Description of Artificial Sequence: Synthetic oligonucleotide
cagcgugagauccaaauac

SEQ ID NO: 164046 - RNA, 19 nt, Artificial Sequence
  Description of Artificial Sequence: Synthetic oligonucleotide
agccucacuguguauuagc

SEQ ID NO: 164047 - RNA, 19 nt, Artificial Sequence
  Description of Artificial Sequence: Synthetic oligonucleotide
cacgaguucgacugcauag

SEQ ID NO: 164048 - RNA, 19 nt, Artificial Sequence
  Description of Artificial Sequence: Synthetic oligonucleotide
ucgguauauaucccugagc

SEQ ID NO: 164049 - RNA, 19 nt, Artificial Sequence
  Description of Artificial Sequence: Synthetic oligonucleotide
aacucugugaucgguauau

SEQ ID NO: 164050 - RNA, 19 nt, Artificial Sequence
  Description of Artificial Sequence: Synthetic oligonucleotide
agugaucuaggucuucugu

SEQ ID NO: 164051 - RNA, 19 nt, Artificial Sequence
  Description of Artificial Sequence: Synthetic oligonucleotide
ucuugugcuagcagcaaaa

SEQ ID NO: 164052 - RNA, 19 nt, Artificial Sequence
  Description of Artificial Sequence: Synthetic oligonucleotide
aucgguauauaucccugag

SEQ ID NO: 164053 - RNA, 19 nt, Artificial Sequence
  Description of Artificial Sequence: Synthetic oligonucleotide
uagcguuuagaauagccau

SEQ ID NO: 164054 - RNA, 19 nt, Artificial Sequence
  Description of Artificial Sequence: Synthetic oligonucleotide
agcaauauaaggaggcuug

SEQ ID NO: 164055 - RNA, 19 nt, Artificial Sequence
  Description of Artificial Sequence: Synthetic oligonucleotide
aagaagccguuaucaauca

SEQ ID NO: 164056 - RNA, 19 nt, Artificial Sequence
  Description of Artificial Sequence: Synthetic oligonucleotide
uucagaaggaagccacaca

SEQ ID NO: 164057 - RNA, 19 nt, Artificial Sequence
  Description of Artificial Sequence: Synthetic oligonucleotide
cucaaaaggaguuuaugaa

SEQ ID NO: 164058 - RNA, 19 nt, Artificial Sequence
  Description of Artificial Sequence: Synthetic oligonucleotide
uuuccuuagcguuuagaau

SEQ ID NO: 164059 - RNA, 19 nt, Artificial Sequence
  Description of Artificial Sequence: Synthetic oligonucleotide
caacuugggaaauggcuag

SEQ ID NO: 164060 - RNA, 19 nt, Artificial Sequence
  Description of Artificial Sequence: Synthetic oligonucleotide
acuguaguucagcaggcca

SEQ ID NO: 164061 - RNA, 19 nt, Artificial Sequence
  Description of Artificial Sequence: Synthetic oligonucleotide
ucaaguaggacuggugaac

SEQ ID NO: 164062 - RNA, 19 nt, Artificial Sequence
  Description of Artificial Sequence: Synthetic oligonucleotide
ggagauuaauacaaagaag

SEQ ID NO: 164063 - RNA, 19 nt, Artificial Sequence
  Description of Artificial Sequence: Synthetic oligonucleotide
aaaaugagggagggaacca

SEQ ID NO: 164064 - RNA, 19 nt, Artificial Sequence
  Description of Artificial Sequence: Synthetic oligonucleotide
cacaaucuacaugucagcc

SEQ ID NO: 164065 - RNA, 19 nt, Artificial Sequence
  Description of Artificial Sequence: Synthetic oligonucleotide
cuugagaguuucuuuauaa

SEQ ID NO: 164066 - RNA, 19 nt, Artificial Sequence
  Description of Artificial Sequence: Synthetic oligonucleotide
caguguacaugaaauaaga

SEQ ID NO: 164067 - RNA, 19 nt, Artificial Sequence
  Description of Artificial Sequence: Synthetic oligonucleotide
gcuaccaaagcaugguggg

SEQ ID NO: 164068 - RNA, 19 nt, Artificial Sequence
  Description of Artificial Sequence: Synthetic oligonucleotide
uggucuguagucagucuug

SEQ ID NO: 164069 - RNA, 19 nt, Artificial Sequence
  Description of Artificial Sequence: Synthetic oligonucleotide
guaauugguccaguggugc

SEQ ID NO: 164070 - RNA, 19 nt, Artificial Sequence
  Description of Artificial Sequence: Synthetic oligonucleotide
uaauugguccaguggugcc

SEQ ID NO: 164071 - RNA, 19 nt, Artificial Sequence
  Description of Artificial Sequence: Synthetic oligonucleotide
gacauucaaaucccuaaaa

SEQ ID NO: 164072 - RNA, 19 nt, Artificial Sequence
  Description of Artificial Sequence: Synthetic oligonucleotide
agcaguguacaugaaauaa

SEQ ID NO: 164073 - RNA, 19 nt, Artificial Sequence
  Description of Artificial Sequence: Synthetic oligonucleotide
aauccaaaguucaugucuu

SEQ ID NO: 164074 - RNA, 19 nt, Artificial Sequence
  Description of Artificial Sequence: Synthetic oligonucleotide
caucaaguaggacugguga

SEQ ID NO: 164075 - RNA, 19 nt, Artificial Sequence
  Description of Artificial Sequence: Synthetic oligonucleotide
ggcuagaaagaauccaaag

SEQ ID NO: 164076 - RNA, 19 nt, Artificial Sequence
  Description of Artificial Sequence: Synthetic oligonucleotide
uccgaugccaucgucuuca

SEQ ID NO: 164077 - RNA, 19 nt, Artificial Sequence
  Description of Artificial Sequence: Synthetic oligonucleotide
guguaggcagaauuagagc

SEQ ID NO: 164078 - RNA, 19 nt, Artificial Sequence
  Description of Artificial Sequence: Synthetic oligonucleotide
uaaguaggaugaagucugc

SEQ ID NO: 164079 - RNA, 19 nt, Artificial Sequence
  Description of Artificial Sequence: Synthetic oligonucleotide
uggagaucguugugcaaag

SEQ ID NO: 164080 - RNA, 19 nt, Artificial Sequence
  Description of Artificial Sequence: Synthetic oligonucleotide
agaucaccuaaugaagcag

SEQ ID NO: 164081 - RNA, 19 nt, Artificial Sequence
  Description of Artificial Sequence: Synthetic oligonucleotide
agacauucaaaucccuaaa

SEQ ID NO: 164082 - RNA, 19 nt, Artificial Sequence
  Description of Artificial Sequence: Synthetic oligonucleotide
ucaugcauccuggagccug

SEQ ID NO: 164083 - RNA, 19 nt, Artificial Sequence
  Description of Artificial Sequence: Synthetic oligonucleotide
agcaaaaugcagccucucu

SEQ ID NO: 164084 - RNA, 19 nt, Artificial Sequence
  Description of Artificial Sequence: Synthetic oligonucleotide
gcaaccuagggucacauca

SEQ ID NO: 164085 - RNA, 19 nt, Artificial Sequence
  Description of Artificial Sequence: Synthetic oligonucleotide
uccucgcuaccaaagcaug

SEQ ID NO: 164086 - RNA, 19 nt, Artificial Sequence
  Description of Artificial Sequence: Synthetic oligonucleotide
ucuacaugucagccagggc

SEQ ID NO: 164087 - RNA, 19 nt, Artificial Sequence
  Description of Artificial Sequence: Synthetic oligonucleotide
gguguacagccacucagcg

SEQ ID NO: 164088 - RNA, 19 nt, Artificial Sequence
  Description of Artificial Sequence: Synthetic oligonucleotide
uuaauacaaagaagccguu

SEQ ID NO: 164089 - RNA, 19 nt, Artificial Sequence
  Description of Artificial Sequence: Synthetic oligonucleotide
ugggaaccaagguguacag

SEQ ID NO: 164090 - RNA, 19 nt, Artificial Sequence
  Description of Artificial Sequence: Synthetic oligonucleotide
aucaaguaggacuggugaa

SEQ ID NO: 164091 - RNA, 19 nt, Artificial Sequence
  Description of Artificial Sequence: Synthetic oligonucleotide
caaccuagggucacaucag

SEQ ID NO: 164092 - RNA, 19 nt, Artificial Sequence
  Description of Artificial Sequence: Synthetic oligonucleotide
aaggggaaguuaucuuuaa

SEQ ID NO: 164093 - RNA, 19 nt, Artificial Sequence
  Description of Artificial Sequence: Synthetic oligonucleotide
cuaagcagcaagacauuca

SEQ ID NO: 164094 - RNA, 19 nt, Artificial Sequence
  Description of Artificial Sequence: Synthetic oligonucleotide
caauauaaggaggcuugag

SEQ ID NO: 164095 - RNA, 19 nt, Artificial Sequence
  Description of Artificial Sequence: Synthetic oligonucleotide
agcguuuagaauagccauc

SEQ ID NO: 164096 - RNA, 19 nt, Artificial Sequence
  Description of Artificial Sequence: Synthetic oligonucleotide
gaucaccuaaugaagcaga

SEQ ID NO: 164097 - RNA, 19 nt, Artificial Sequence
  Description of Artificial Sequence: Synthetic oligonucleotide
acgaacggugggucaaagg

SEQ ID NO: 164098 - RNA, 19 nt, Artificial Sequence
  Description of Artificial Sequence: Synthetic oligonucleotide
ugauccucuucagaugcug

SEQ ID NO: 164099 - RNA, 19 nt, Artificial Sequence
  Description of Artificial Sequence: Synthetic oligonucleotide
guguacagccacucagcgg

SEQ ID NO: 164100 - RNA, 19 nt, Artificial Sequence
  Description of Artificial Sequence: Synthetic oligonucleotide
gaucgguauauaucccuga

SEQ ID NO: 164101 - RNA, 19 nt, Artificial Sequence
  Description of Artificial Sequence: Synthetic oligonucleotide
cuaaucugguggguguagg

SEQ ID NO: 164102 - RNA, 19 nt, Artificial Sequence
  Description of Artificial Sequence: Synthetic oligonucleotide
agagcaaaguauucccuuu

SEQ ID NO: 164103 - RNA, 19 nt, Artificial Sequence
  Description of Artificial Sequence: Synthetic oligonucleotide
aguuuacacaggucagaga

SEQ ID NO: 164104 - RNA, 19 nt, Artificial Sequence
  Description of Artificial Sequence: Synthetic oligonucleotide
gacuuguaggacugcugug

SEQ ID NO: 164105 - RNA, 19 nt, Artificial Sequence
  Description of Artificial Sequence: Synthetic oligonucleotide
cauuauacagaggacagcu

SEQ ID NO: 164106 - RNA, 19 nt, Artificial Sequence
  Description of Artificial Sequence: Synthetic oligonucleotide
acaacccugacgaacggug

SEQ ID NO: 164107 - RNA, 19 nt, Artificial Sequence
  Description of Artificial Sequence: Synthetic oligonucleotide
caggaucuggagaucguug

SEQ ID NO: 164108 - RNA, 19 nt, Artificial Sequence
  Description of Artificial Sequence: Synthetic oligonucleotide
acggacucuauggaauagg

SEQ ID NO: 164109 - RNA, 19 nt, Artificial Sequence
  Description of Artificial Sequence: Synthetic oligonucleotide
agaagccguuaucaaucag

SEQ ID NO: 164110 - RNA, 19 nt, Artificial Sequence
  Description of Artificial Sequence: Synthetic oligonucleotide
aacccauagcauagguaag

SEQ ID NO: 164111 - RNA, 19 nt, Artificial Sequence
  Description of Artificial Sequence: Synthetic oligonucleotide
caugcauccuggagccugg

SEQ ID NO: 164112 - RNA, 19 nt, Artificial Sequence
  Description of Artificial Sequence: Synthetic oligonucleotide
uuuccgaugccaucgucuu

SEQ ID NO: 164113 - RNA, 19 nt, Artificial Sequence
  Description of Artificial Sequence: Synthetic oligonucleotide
agggaggauggccaaauua

SEQ ID NO: 164114 - RNA, 19 nt, Artificial Sequence
  Description of Artificial Sequence: Synthetic oligonucleotide
cauaguuuccgccuuugaa

SEQ ID NO: 164115 - RNA, 19 nt, Artificial Sequence
  Description of Artificial Sequence: Synthetic oligonucleotide
aguggaugcggaccggggu

SEQ ID NO: 164116 - RNA, 19 nt, Artificial Sequence
  Description of Artificial Sequence: Synthetic oligonucleotide
agccaaguuagggucauca

SEQ ID NO: 164117 - RNA, 19 nt, Artificial Sequence
  Description of Artificial Sequence: Synthetic oligonucleotide
uccgccuuugaaacucugu

SEQ ID NO: 164118 - RNA, 19 nt, Artificial Sequence
  Description of Artificial Sequence: Synthetic oligonucleotide
aaagcgcuguccuggucaa

SEQ ID NO: 164119 - RNA, 19 nt, Artificial Sequence
  Description of Artificial Sequence: Synthetic oligonucleotide
gaucacggacucuauggaa

SEQ ID NO: 164120 - RNA, 19 nt, Artificial Sequence
  Description of Artificial Sequence: Synthetic oligonucleotide
ugccaucgucuucagauuu

SEQ ID NO: 164121 - RNA, 19 nt, Artificial Sequence
  Description of Artificial Sequence: Synthetic oligonucleotide
cuucagauuucuugcccuc

SEQ ID NO: 164122 - RNA, 19 nt, Artificial Sequence
  Description of Artificial Sequence: Synthetic oligonucleotide
acacaacccugacgaacgg

SEQ ID NO: 164123 - RNA, 19 nt, Artificial Sequence
  Description of Artificial Sequence: Synthetic oligonucleotide
caucgggaugcugagggag

SEQ ID NO: 164124 - RNA, 19 nt, Artificial Sequence
  Description of Artificial Sequence: Synthetic oligonucleotide
gcaguguacaugaaauaag

SEQ ID NO: 164125 - RNA, 19 nt, Artificial Sequence
  Description of Artificial Sequence: Synthetic oligonucleotide
aagcggcuacucaagucuc

SEQ ID NO: 164126 - RNA, 19 nt, Artificial Sequence
  Description of Artificial Sequence: Synthetic oligonucleotide
ccaaagacuuguaggacug

SEQ ID NO: 164127 - RNA, 19 nt, Artificial Sequence
  Description of Artificial Sequence: Synthetic oligonucleotide
uccuuugguagaugagaaa

SEQ ID NO: 164128 - RNA, 19 nt, Artificial Sequence
  Description of Artificial Sequence: Synthetic oligonucleotide
augaagcggcuacucaagu

SEQ ID NO: 164129 - RNA, 19 nt, Artificial Sequence
  Description of Artificial Sequence: Synthetic oligonucleotide
aaugcccauuggcucugca

SEQ ID NO: 164130 - RNA, 19 nt, Artificial Sequence
  Description of Artificial Sequence: Synthetic oligonucleotide
ugcaauaggcagagcuauc

SEQ ID NO: 164131 - RNA, 19 nt, Artificial Sequence
  Description of Artificial Sequence: Synthetic oligonucleotide
cucgccucaggcagggccc

SEQ ID NO: 164132 - RNA, 19 nt, Artificial Sequence
  Description of Artificial Sequence: Synthetic oligonucleotide
agcaaccuagggucacauc

SEQ ID NO: 164133 - RNA, 19 nt, Artificial Sequence
  Description of Artificial Sequence: Synthetic oligonucleotide
ggcauuucucuugugcuag

SEQ ID NO: 164134 - RNA, 19 nt, Artificial Sequence
  Description of Artificial Sequence: Synthetic oligonucleotide
gaaggggaugauacuccag

SEQ ID NO: 164135 - RNA, 19 nt, Artificial Sequence
  Description of Artificial Sequence: Synthetic oligonucleotide
ucacgaguucgacugcaua

SEQ ID NO: 164136 - RNA, 19 nt, Artificial Sequence
  Description of Artificial Sequence: Synthetic oligonucleotide
acucuauggaauaggcacu

SEQ ID NO: 164137 - RNA, 19 nt, Artificial Sequence
  Description of Artificial Sequence: Synthetic oligonucleotide
cugcaagagcaaaguauuc

SEQ ID NO: 164138 - RNA, 19 nt, Artificial Sequence
  Description of Artificial Sequence: Synthetic oligonucleotide
aguucaguguguguuguuu

SEQ ID NO: 164139 - RNA, 19 nt, Artificial Sequence
  Description of Artificial Sequence: Synthetic oligonucleotide
acauugcugguuacaguag

SEQ ID NO: 164140 - RNA, 19 nt, Artificial Sequence
  Description of Artificial Sequence: Synthetic oligonucleotide
aucacggacucuauggaau

SEQ ID NO: 164141 - RNA, 19 nt, Artificial Sequence
  Description of Artificial Sequence: Synthetic oligonucleotide
caacuuugaggaguuugac

SEQ ID NO: 164142 - RNA, 19 nt, Artificial Sequence
  Description of Artificial Sequence: Synthetic oligonucleotide
cauucacgaguucgacugc

SEQ ID NO: 164143 - RNA, 19 nt, Artificial Sequence
  Description of Artificial Sequence: Synthetic oligonucleotide
ggcuacucaagucucaucu

SEQ ID NO: 164144 - RNA, 19 nt, Artificial Sequence
  Description of Artificial Sequence: Synthetic oligonucleotide
aacuugggaaauggcuaga

SEQ ID NO: 164145 - RNA, 19 nt, Artificial Sequence
  Description of Artificial Sequence: Synthetic oligonucleotide
ggcaaugcggaagcgcucg

SEQ ID NO: 164146 - RNA, 19 nt, Artificial Sequence
  Description of Artificial Sequence: Synthetic oligonucleotide
gugaucuaggucuucugua

SEQ ID NO: 164147 - RNA, 19 nt, Artificial Sequence
  Description of Artificial Sequence: Synthetic oligonucleotide
gucacaucaggcaagugcu

SEQ ID NO: 164148 - RNA, 19 nt, Artificial Sequence
  Description of Artificial Sequence: Synthetic oligonucleotide
cuaccaaagcauggugggc

SEQ ID NO: 164149 - RNA, 19 nt, Artificial Sequence
  Description of Artificial Sequence: Synthetic oligonucleotide
aggagcaaccuagggucac

SEQ ID NO: 164150 - RNA, 19 nt, Artificial Sequence
  Description of Artificial Sequence: Synthetic oligonucleotide
caagacauucaaaucccua

SEQ ID NO: 164151 - RNA, 19 nt, Artificial Sequence
  Description of Artificial Sequence: Synthetic oligonucleotide
auucacgaguucgacugca

SEQ ID NO: 164152 - RNA, 19 nt, Artificial Sequence
  Description of Artificial Sequence: Synthetic oligonucleotide
acgaguucgacugcauagu

SEQ ID NO: 164153 - RNA, 19 nt, Artificial Sequence
  Description of Artificial Sequence: Synthetic oligonucleotide
ucguugugcaaagcgcugu

SEQ ID NO: 164154 - RNA, 19 nt, Artificial Sequence
  Description of Artificial Sequence: Synthetic oligonucleotide
acaguucaguguguguugu

SEQ ID NO: 164155 - RNA, 19 nt, Artificial Sequence
  Description of Artificial Sequence: Synthetic oligonucleotide
auugcugguuacaguagga

SEQ ID NO: 164156 - RNA, 19 nt, Artificial Sequence
  Description of Artificial Sequence: Synthetic oligonucleotide
ccaucauacacuguaacca

SEQ ID NO: 164157 - RNA, 19 nt, Artificial Sequence
  Description of Artificial Sequence: Synthetic oligonucleotide
guugugcaaagcgcugucc

SEQ ID NO: 164158 - RNA, 19 nt, Artificial Sequence
  Description of Artificial Sequence: Synthetic oligonucleotide
agcgugagauccaaauaca

SEQ ID NO: 164159 - RNA, 19 nt, Artificial Sequence
  Description of Artificial Sequence: Synthetic oligonucleotide
agcugaggacccaccacac

SEQ ID NO: 164160 - RNA, 19 nt, Artificial Sequence
  Description of Artificial Sequence: Synthetic oligonucleotide
agcgcuguccuggucaacu

SEQ ID NO: 164161 - RNA, 19 nt, Artificial Sequence
  Description of Artificial Sequence: Synthetic oligonucleotide
gguaauugguccaguggug

SEQ ID NO: 164162 - RNA, 19 nt, Artificial Sequence
  Description of Artificial Sequence: Synthetic oligonucleotide
uucacgaguucgacugcau

SEQ ID NO: 164163 - RNA, 19 nt, Artificial Sequence
  Description of Artificial Sequence: Synthetic oligonucleotide
ugguuggucuguagucagu

SEQ ID NO: 164164 - RNA, 19 nt, Artificial Sequence
  Description of Artificial Sequence: Synthetic oligonucleotide
cuguaauuguuuucccaaa

SEQ ID NO: 164165 - RNA, 19 nt, Artificial Sequence
  Description of Artificial Sequence: Synthetic oligonucleotide
guauccucucgugucucag

SEQ ID NO: 164166 - RNA, 19 nt, Artificial Sequence
  Description of Artificial Sequence: Synthetic oligonucleotide
cuccagagaggacuggaga

SEQ ID NO: 164167 - RNA, 19 nt, Artificial Sequence
  Description of Artificial Sequence: Synthetic oligonucleotide
guucucgccucaggcaggg

SEQ ID NO: 164168 - RNA, 19 nt, Artificial Sequence
  Description of Artificial Sequence: Synthetic oligonucleotide
cuauggaauaggcacugcu

SEQ ID NO: 164169 - RNA, 19 nt, Artificial Sequence
  Description of Artificial Sequence: Synthetic oligonucleotide
cagagcuaucacguccagg

SEQ ID NO: 164170 - RNA, 19 nt, Artificial Sequence
  Description of Artificial Sequence: Synthetic oligonucleotide
cgcuaccaaagcauggugg

SEQ ID NO: 164171 - RNA, 19 nt, Artificial Sequence
  Description of Artificial Sequence: Synthetic oligonucleotide
uuguaggacugcugugcuc

SEQ ID NO: 164172 - RNA, 19 nt, Artificial Sequence
  Description of Artificial Sequence: Synthetic oligonucleotide
ccauagcauagguaaggag

SEQ ID NO: 164173 - RNA, 19 nt, Artificial Sequence
  Description of Artificial Sequence: Synthetic oligonucleotide
caaaggggaaguuaucuuu

SEQ ID NO: 164174 - RNA, 19 nt, Artificial Sequence
  Description of Artificial Sequence: Synthetic oligonucleotide
gacgaacggugggucaaag

SEQ ID NO: 164175 - RNA, 19 nt, Artificial Sequence
  Description of Artificial Sequence: Synthetic oligonucleotide
gcaccccuaaucugguggg

SEQ ID NO: 164176 - RNA, 19 nt, Artificial Sequence
  Description of Artificial Sequence: Synthetic oligonucleotide
aggcuaugagauagauuuc

SEQ ID NO: 164177 - RNA, 19 nt, Artificial Sequence
  Description of Artificial Sequence: Synthetic oligonucleotide
cauccaucauacacuguaa

SEQ ID NO: 164178 - RNA, 19 nt, Artificial Sequence
  Description of Artificial Sequence: Synthetic oligonucleotide
ugcacccgugccuuucccu

SEQ ID NO: 164179 - RNA, 19 nt, Artificial Sequence
  Description of Artificial Sequence: Synthetic oligonucleotide
cuuuuccgaugccaucguc

SEQ ID NO: 164180 - RNA, 19 nt, Artificial Sequence
  Description of Artificial Sequence: Synthetic oligonucleotide
gcaauaggcagagcuauca

SEQ ID NO: 164181 - RNA, 19 nt, Artificial Sequence
  Description of Artificial Sequence: Synthetic oligonucleotide
ugccugcuagcaaggguuc

SEQ ID NO: 164182 - RNA, 19 nt, Artificial Sequence
  Description of Artificial Sequence: Synthetic oligonucleotide
aaaggugagcagagaggau

SEQ ID NO: 164183 - RNA, 19 nt, Artificial Sequence
  Description of Artificial Sequence: Synthetic oligonucleotide
acuccaccgaccagauggg

SEQ ID NO: 164184 - RNA, 19 nt, Artificial Sequence
  Description of Artificial Sequence: Synthetic oligonucleotide
gcguuuagaauagccauca

SEQ ID NO: 164185 - RNA, 19 nt, Artificial Sequence
  Description of Artificial Sequence: Synthetic oligonucleotide
aguucucgccucaggcagg

SEQ ID NO: 164186 - RNA, 19 nt, Artificial Sequence
  Description of Artificial Sequence: Synthetic oligonucleotide
gcgugagauccaaauacag

SEQ ID NO: 164187 - RNA, 19 nt, Artificial Sequence
  Description of Artificial Sequence: Synthetic oligonucleotide
cacuguguauuagcacccc

SEQ ID NO: 164188 - RNA, 19 nt, Artificial Sequence
  Description of Artificial Sequence: Synthetic oligonucleotide
accccuaaucuggugggug

SEQ ID NO: 164189 - RNA, 19 nt, Artificial Sequence
  Description of Artificial Sequence: Synthetic oligonucleotide
aggagaaguuaaguaggau

SEQ ID NO: 164190 - RNA, 19 nt, Artificial Sequence
  Description of Artificial Sequence: Synthetic oligonucleotide
uccugcgugcacugcucug

SEQ ID NO: 164191 - RNA, 19 nt, Artificial Sequence
  Description of Artificial Sequence: Synthetic oligonucleotide
ccucgcuaccaaagcaugg

SEQ ID NO: 164192 - RNA, 19 nt, Artificial Sequence
  Description of Artificial Sequence: Synthetic oligonucleotide
ucucgugucucagccucac

SEQ ID NO: 164193 - RNA, 19 nt, Artificial Sequence
  Description of Artificial Sequence: Synthetic oligonucleotide
uggcaaugcggaagcgcuc

SEQ ID NO: 164194 - RNA, 19 nt, Artificial Sequence
  Description of Artificial Sequence: Synthetic oligonucleotide
ccgccuuugaaacucugug

SEQ ID NO: 164195 - RNA, 19 nt, Artificial Sequence
  Description of Artificial Sequence: Synthetic oligonucleotide
uaggacugcugugcucuug

SEQ ID NO: 164196 - RNA, 19 nt, Artificial Sequence
  Description of Artificial Sequence: Synthetic oligonucleotide
gcuaucacguccaggaaaa

SEQ ID NO: 164197 - RNA, 19 nt, Artificial Sequence
  Description of Artificial Sequence: Synthetic oligonucleotide
cagcaaggugguuggucug

SEQ ID NO: 164198 - RNA, 19 nt, Artificial Sequence
  Description of Artificial Sequence: Synthetic oligonucleotide
gguuggucuguagucaguc

SEQ ID NO: 164199 - RNA, 19 nt, Artificial Sequence
  Description of Artificial Sequence: Synthetic oligonucleotide
uagcaccccuaaucuggug

SEQ ID NO: 164200 - RNA, 19 nt, Artificial Sequence
  Description of Artificial Sequence: Synthetic oligonucleotide
guucgacugcauaguuucc

SEQ ID NO: 164201 - RNA, 19 nt, Artificial Sequence
  Description of Artificial Sequence: Synthetic oligonucleotide
ccguucgaggggaggaugg

SEQ ID NO: 164202 - RNA, 19 nt, Artificial Sequence
  Description of Artificial Sequence: Synthetic oligonucleotide
aggcuguacugagauuugu

SEQ ID NO: 164203 - RNA, 19 nt, Artificial Sequence
  Description of Artificial Sequence: Synthetic oligonucleotide
cucuagucuggagcacagc

SEQ ID NO: 164204 - RNA, 19 nt, Artificial Sequence
  Description of Artificial Sequence: Synthetic oligonucleotide
agaaaaccucaugcauccu

SEQ ID NO: 164205 - RNA, 19 nt, Artificial Sequence
  Description of Artificial Sequence: Synthetic oligonucleotide
agcagccaaguuaggguca

SEQ ID NO: 164206 - RNA, 19 nt, Artificial Sequence
  Description of Artificial Sequence: Synthetic oligonucleotide
cuacucaagucucaucuuu

SEQ ID NO: 164207 - RNA, 19 nt, Artificial Sequence
  Description of Artificial Sequence: Synthetic oligonucleotide
caaugcggaagcgcucgug

SEQ ID NO: 164208 - RNA, 19 nt, Artificial Sequence
  Description of Artificial Sequence: Synthetic oligonucleotide
gcggaagcgcucguggccg

SEQ ID NO: 164209 - RNA, 19 nt, Artificial Sequence
  Description of Artificial Sequence: Synthetic oligonucleotide
gcaggguaugauuccguga

SEQ ID NO: 164210 - RNA, 19 nt, Artificial Sequence
  Description of Artificial Sequence: Synthetic oligonucleotide
cagcaucaaguaggacugg

SEQ ID NO: 164211 - RNA, 19 nt, Artificial Sequence
  Description of Artificial Sequence: Synthetic oligonucleotide
accaagguguacagccacu

SEQ ID NO: 164212 - RNA, 19 nt, Artificial Sequence
  Description of Artificial Sequence: Synthetic oligonucleotide
agccguuaucaaucagguu

SEQ ID NO: 164213 - RNA, 19 nt, Artificial Sequence
  Description of Artificial Sequence: Synthetic oligonucleotide
acccugacgaacggugggu

SEQ ID NO: 164214 - RNA, 19 nt, Artificial Sequence
  Description of Artificial Sequence: Synthetic oligonucleotide
acaggcuaugagauagauu

SEQ ID NO: 164215 - RNA, 19 nt, Artificial Sequence
  Description of Artificial Sequence: Synthetic oligonucleotide
caggagcaaccuaggguca

SEQ ID NO: 164216 - RNA, 19 nt, Artificial Sequence
  Description of Artificial Sequence: Synthetic oligonucleotide
guacugagauuuguuggcu

SEQ ID NO: 164217 - RNA, 19 nt, Artificial Sequence
  Description of Artificial Sequence: Synthetic oligonucleotide
ggacucuauggaauaggca

SEQ ID NO: 164218 - RNA, 19 nt, Artificial Sequence
  Description of Artificial Sequence: Synthetic oligonucleotide
ugacgaacggugggucaaa

SEQ ID NO: 164219 - RNA, 19 nt, Artificial Sequence
  Description of Artificial Sequence: Synthetic oligonucleotide
ccggucaguggccugcacc

SEQ ID NO: 164220 - RNA, 19 nt, Artificial Sequence
  Description of Artificial Sequence: Synthetic oligonucleotide
cugcaccauuuaaguaauc

SEQ ID NO: 164221 - RNA, 19 nt, Artificial Sequence
  Description of Artificial Sequence: Synthetic oligonucleotide
cugcacccgugccuuuccc

SEQ ID NO: 164222 - RNA, 19 nt, Artificial Sequence
  Description of Artificial Sequence: Synthetic oligonucleotide
guuaucaaucagguuguuu

SEQ ID NO: 164223 - RNA, 19 nt, Artificial Sequence
  Description of Artificial Sequence: Synthetic oligonucleotide
gaaugacauuuccccuugu

SEQ ID NO: 164224 - RNA, 19 nt, Artificial Sequence
  Description of Artificial Sequence: Synthetic oligonucleotide
gcaauauaaggaggcuuga

SEQ ID NO: 164225 - RNA, 19 nt, Artificial Sequence
  Description of Artificial Sequence: Synthetic oligonucleotide
gaggcagcgugagauccaa

SEQ ID NO: 164226 - RNA, 19 nt, Artificial Sequence
  Description of Artificial Sequence: Synthetic oligonucleotide
ucguggccgcgguggaaga

SEQ ID NO: 164227 - RNA, 19 nt, Artificial Sequence
  Description of Artificial Sequence: Synthetic oligonucleotide
ccugcgugcacugcucugc

SEQ ID NO: 164228 - RNA, 19 nt, Artificial Sequence
  Description of Artificial Sequence: Synthetic oligonucleotide
ccuaaucugguggguguag

SEQ ID NO: 164229 - RNA, 19 nt, Artificial Sequence
  Description of Artificial Sequence: Synthetic oligonucleotide
cucgcuaccaaagcauggu

SEQ ID NO: 164230 - RNA, 19 nt, Artificial Sequence
  Description of Artificial Sequence: Synthetic oligonucleotide
ggaugauacuccaggguua

SEQ ID NO: 164231 - RNA, 19 nt, Artificial Sequence
  Description of Artificial Sequence: Synthetic oligonucleotide
ggcuccggccagcaggaac

SEQ ID NO: 164232 - RNA, 19 nt, Artificial Sequence
  Description of Artificial Sequence: Synthetic oligonucleotide
agcggcuacucaagucuca

SEQ ID NO: 164233 - RNA, 19 nt, Artificial Sequence
  Description of Artificial Sequence: Synthetic oligonucleotide
agcggguugcugggauuag

SEQ ID NO: 164234 - RNA, 19 nt, Artificial Sequence
  Description of Artificial Sequence: Synthetic oligonucleotide
gcagcgugagauccaaaua

SEQ ID NO: 164235 - RNA, 19 nt, Artificial Sequence
  Description of Artificial Sequence: Synthetic oligonucleotide
cgacugcauaguuuccgcc

SEQ ID NO: 164236 - RNA, 19 nt, Artificial Sequence
  Description of Artificial Sequence: Synthetic oligonucleotide
ccaagguguacagccacuc

SEQ ID NO: 164237 - RNA, 19 nt, Artificial Sequence
  Description of Artificial Sequence: Synthetic oligonucleotide
gcauaguuuccgccuuuga

SEQ ID NO: 164238 - RNA, 19 nt, Artificial Sequence
  Description of Artificial Sequence: Synthetic oligonucleotide
guguauuagcaccccuaau

SEQ ID NO: 164239 - RNA, 19 nt, Artificial Sequence
  Description of Artificial Sequence: Synthetic oligonucleotide
ccugcaauaggcagagcua

SEQ ID NO: 164240 - RNA, 19 nt, Artificial Sequence
  Description of Artificial Sequence: Synthetic oligonucleotide
gaguucgacugcauaguuu

SEQ ID NO: 164241 - RNA, 19 nt, Artificial Sequence
  Description of Artificial Sequence: Synthetic oligonucleotide
cucucgugucucagccuca

SEQ ID NO: 164242 - RNA, 19 nt, Artificial Sequence
  Description of Artificial Sequence: Synthetic oligonucleotide
cagcucguccaggcaggcg

SEQ ID NO: 164243 - RNA, 19 nt, Artificial Sequence
  Description of Artificial Sequence: Synthetic oligonucleotide
ccccuuguauccucucgug

SEQ ID NO: 164244 - RNA, 19 nt, Artificial Sequence
  Description of Artificial Sequence: Synthetic oligonucleotide
uacagccacucagcggguu

SEQ ID NO: 164245 - RNA, 19 nt, Artificial Sequence
  Description of Artificial Sequence: Synthetic oligonucleotide
ccguuaucaaucagguugu

SEQ ID NO: 164246 - RNA, 19 nt, Artificial Sequence
  Description of Artificial Sequence: Synthetic oligonucleotide
gcugaggacccaccacaca

SEQ ID NO: 164247 - RNA, 19 nt, Artificial Sequence
  Description of Artificial Sequence: Synthetic oligonucleotide
cagcaauauaaggaggcuu

SEQ ID NO: 164248 - RNA, 19 nt, Artificial Sequence
  Description of Artificial Sequence: Synthetic oligonucleotide
caaagguaauugguccagu

SEQ ID NO: 164249 - RNA, 19 nt, Artificial Sequence
  Description of Artificial Sequence: Synthetic oligonucleotide
guuaggcuguacugagauu

SEQ ID NO: 164250 - RNA, 19 nt, Artificial Sequence
  Description of Artificial Sequence: Synthetic oligonucleotide
gcauagguaaggaggcucu

SEQ ID NO: 164251 - RNA, 19 nt, Artificial Sequence
  Description of Artificial Sequence: Synthetic oligonucleotide
cauagguaaggaggcucua

SEQ ID NO: 164252 - RNA, 19 nt, Artificial Sequence
  Description of Artificial Sequence: Synthetic oligonucleotide
cgccuuugaaacucuguga

SEQ ID NO: 164253 - RNA, 19 nt, Artificial Sequence
  Description of Artificial Sequence: Synthetic oligonucleotide
ggggaggauggggucccgg

SEQ ID NO: 164254 - RNA, 19 nt, Artificial Sequence
  Description of Artificial Sequence: Synthetic oligonucleotide
ccuuagcguuuagaauagc

SEQ ID NO: 164255 - RNA, 19 nt, Artificial Sequence
  Description of Artificial Sequence: Synthetic oligonucleotide
ccugacgaacgguggguca

SEQ ID NO: 164256 - RNA, 19 nt, Artificial Sequence
  Description of Artificial Sequence: Synthetic oligonucleotide
gagcaaccuagggucacau

SEQ ID NO: 164257 - RNA, 19 nt, Artificial Sequence
  Description of Artificial Sequence: Synthetic oligonucleotide
cacaggcuaugagauagau

SEQ ID NO: 164258 - RNA, 19 nt, Artificial Sequence
  Description of Artificial Sequence: Synthetic oligonucleotide
ggagcaaccuagggucaca

SEQ ID NO: 164259 - RNA, 19 nt, Artificial Sequence
  Description of Artificial Sequence: Synthetic oligonucleotide
gcaaagcgcuguccugguc

SEQ ID NO: 164260 - RNA, 19 nt, Artificial Sequence
  Description of Artificial Sequence: Synthetic oligonucleotide
gccugcuagcaaggguucc

SEQ ID NO: 164261 - RNA, 19 nt, Artificial Sequence
  Description of Artificial Sequence: Synthetic oligonucleotide
cacauccaucauacacugu

SEQ ID NO: 164262 - RNA, 19 nt, Artificial Sequence
  Description of Artificial Sequence: Synthetic oligonucleotide
ccgugccuuucccuucacc

SEQ ID NO: 164263 - RNA, 19 nt, Artificial Sequence
  Description of Artificial Sequence: Synthetic oligonucleotide
gcugaguuuccagcaauau

SEQ ID NO: 164264 - RNA, 19 nt, Artificial Sequence
  Description of Artificial Sequence: Synthetic oligonucleotide
cucagcggguugcugggau

SEQ ID NO: 164265 - RNA, 19 nt, Artificial Sequence
  Description of Artificial Sequence: Synthetic oligonucleotide
cggugggucaaaggggaag

SEQ ID NO: 164266 - RNA, 19 nt, Artificial Sequence
  Description of Artificial Sequence: Synthetic oligonucleotide
cacaacccugacgaacggu

SEQ ID NO: 164267 - RNA, 19 nt, Artificial Sequence
  Description of Artificial Sequence: Synthetic oligonucleotide
cuccggcuccggccagcag

SEQ ID NO: 164268 - RNA, 19 nt, Artificial Sequence
  Description of Artificial Sequence: Synthetic oligonucleotide
acggugggucaaaggggaa

SEQ ID NO: 164269 - RNA, 19 nt, Artificial Sequence
  Description of Artificial Sequence: Synthetic oligonucleotide
cccguucgaggggaggaug

SEQ ID NO: 164270 - RNA, 19 nt, Artificial Sequence
  Description of Artificial Sequence: Synthetic oligonucleotide
cccugacgaacgguggguc

SEQ ID NO: 164271 - RNA, 19 nt, Artificial Sequence
  Description of Artificial Sequence: Synthetic oligonucleotide
cagccaaguuagggucauc

SEQ ID NO: 164272 - RNA, 19 nt, Artificial Sequence
  Description of Artificial Sequence: Synthetic oligonucleotide
ggcuguacugagauuuguu

SEQ ID NO: 164273 - RNA, 19 nt, Artificial Sequence
  Description of Artificial Sequence: Synthetic oligonucleotide
gcggguugcugggauuaga

SEQ ID NO: 164274 - RNA, 19 nt, Artificial Sequence
  Description of Artificial Sequence: Synthetic oligonucleotide
cugcauaguuuccgccuuu

SEQ ID NO: 164275 - RNA, 19 nt, Artificial Sequence
  Description of Artificial Sequence: Synthetic oligonucleotide
ccccuaaucuggugggugu

SEQ ID NO: 164276 - RNA, 19 nt, Artificial Sequence
  Description of Artificial Sequence: Synthetic oligonucleotide
cggcuacucaagucucauc

SEQ ID NO: 164277 - RNA, 19 nt, Artificial Sequence
  Description of Artificial Sequence: Synthetic oligonucleotide
ccagccuugcuuggugaga

SEQ ID NO: 164278 - RNA, 19 nt, Artificial Sequence
  Description of Artificial Sequence: Synthetic oligonucleotide
cgguggaagauggacucga

SEQ ID NO: 164279 - RNA, 19 nt, Artificial Sequence
  Description of Artificial Sequence: Synthetic oligonucleotide
cugcaccgagccagacacu

SEQ ID NO: 164280 - RNA, 19 nt, Artificial Sequence
  Description of Artificial Sequence: Synthetic oligonucleotide
gccggucaguggccugcac

SEQ ID NO: 164281 - RNA, 19 nt, Artificial Sequence
  Description of Artificial Sequence: Synthetic oligonucleotide
gcaaugcggaagcgcucgu

SEQ ID NO: 164282 - RNA, 19 nt, Artificial Sequence
  Description of Artificial Sequence: Synthetic oligonucleotide
caccccuaaucuggugggu

SEQ ID NO: 164283 - RNA, 19 nt, Artificial Sequence
  Description of Artificial Sequence: Synthetic oligonucleotide
gcggcuacucaagucucau

SEQ ID NO: 164284 - RNA, 19 nt, Artificial Sequence
  Description of Artificial Sequence: Synthetic oligonucleotide
ggugggccuggcaccccuc

SEQ ID NO: 164285 - RNA, 19 nt, Artificial Sequence
  Description of Artificial Sequence: Synthetic oligonucleotide
gcaugaucacggacucuau

SEQ ID NO: 164286 - RNA, 19 nt, Artificial Sequence
  Description of Artificial Sequence: Synthetic oligonucleotide
cccuaaucuggugggugua

SEQ ID NO: 164287 - RNA, 19 nt, Artificial Sequence
  Description of Artificial Sequence: Synthetic oligonucleotide
cgaguucgacugcauaguu

SEQ ID NO: 164288 - RNA, 19 nt, Artificial Sequence
  Description of Artificial Sequence: Synthetic oligonucleotide
cguuuagaauagccaucau

SEQ ID NO: 164289 - RNA, 19 nt, Artificial Sequence
  Description of Artificial Sequence: Synthetic oligonucleotide
cguuaucaaucagguuguu

SEQ ID NO: 164290 - RNA, 19 nt, Artificial Sequence
  Description of Artificial Sequence: Synthetic oligonucleotide
ggguuccagcaaggugguu

SEQ ID NO: 164291 - RNA, 19 nt, Artificial Sequence
  Description of Artificial Sequence: Synthetic oligonucleotide
ccccguucgaggggaggau

SEQ ID NO: 164292 - RNA, 19 nt, Artificial Sequence
  Description of Artificial Sequence: Synthetic oligonucleotide
aguaauuuagcuugguccc

SEQ ID NO: 164293 - RNA, 19 nt, Artificial Sequence
  Description of Artificial Sequence: Synthetic oligonucleotide
uuaaauaugcauuaugcgu

SEQ ID NO: 164294 - RNA, 19 nt, Artificial Sequence
  Description of Artificial Sequence: Synthetic oligonucleotide
uuuaagaugcuacauaguc

SEQ ID NO: 164295 - RNA, 19 nt, Artificial Sequence
  Description of Artificial Sequence: Synthetic oligonucleotide
uuaagaugcuacauagucg

SEQ ID NO: 164296 - RNA, 19 nt, Artificial Sequence
  Description of Artificial Sequence: Synthetic oligonucleotide
aagaucauuauauuaugcu

SEQ ID NO: 164297 - RNA, 19 nt, Artificial Sequence
  Description of Artificial Sequence: Synthetic oligonucleotide
uauaaugacaccaacgaua

SEQ ID NO: 164298 - RNA, 19 nt, Artificial Sequence
  Description of Artificial Sequence: Synthetic oligonucleotide
aauuccgaccuuugaaggc

SEQ ID NO: 164299 - RNA, 19 nt, Artificial Sequence
  Description of Artificial Sequence: Synthetic oligonucleotide
agaggggugaucuaggaac

SEQ ID NO: 164300 - RNA, 19 nt, Artificial Sequence
  Description of Artificial Sequence: Synthetic oligonucleotide
aaauuccgaccuuugaagg

SEQ ID NO: 164301 - RNA, 19 nt, Artificial Sequence
  Description of Artificial Sequence: Synthetic oligonucleotide
uaaauaugcauuaugcguc

SEQ ID NO: 164302 - RNA, 19 nt, Artificial Sequence
  Description of Artificial Sequence: Synthetic oligonucleotide
aaaauaaaauaaaauaaau

SEQ ID NO: 164303 - RNA, 19 nt, Artificial Sequence
  Description of Artificial Sequence: Synthetic oligonucleotide
uaagaugcuacauagucga

SEQ ID NO: 164304 - RNA, 19 nt, Artificial Sequence
  Description of Artificial Sequence: Synthetic oligonucleotide
ugguuaaucacgauguccc

SEQ ID NO: 164305 - RNA, 19 nt, Artificial Sequence
  Description of Artificial Sequence: Synthetic oligonucleotide
uuacgcaugguuaugauaa

SEQ ID NO: 164306 - RNA, 19 nt, Artificial Sequence
  Description of Artificial Sequence: Synthetic oligonucleotide
ugcacuaacaggcuagcgg

SEQ ID NO: 164307 - RNA, 19 nt, Artificial Sequence
  Description of Artificial Sequence: Synthetic oligonucleotide
cauguaagagacucaaugg

SEQ ID NO: 164308 - RNA, 19 nt, Artificial Sequence
  Description of Artificial Sequence: Synthetic oligonucleotide
uucuaaagcgcccaguuca

SEQ ID NO: 164309 - RNA, 19 nt, Artificial Sequence
  Description of Artificial Sequence: Synthetic oligonucleotide
aacccuaccucaccgagac

SEQ ID NO: 164310 - RNA, 19 nt, Artificial Sequence
  Description of Artificial Sequence: Synthetic oligonucleotide
uguuaaaagaucugauuug

SEQ ID NO: 164311 - RNA, 19 nt, Artificial Sequence
  Description of Artificial Sequence: Synthetic oligonucleotide
auuagcgagaugauuaagc

SEQ ID NO: 164312 - RNA, 19 nt, Artificial Sequence
  Description of Artificial Sequence: Synthetic oligonucleotide
ugaccuacaacaaaacacu

SEQ ID NO: 164313 - RNA, 19 nt, Artificial Sequence
  Description of Artificial Sequence: Synthetic oligonucleotide
aaagcgcccaguucauucc

SEQ ID NO: 164314 - RNA, 19 nt, Artificial Sequence
  Description of Artificial Sequence: Synthetic oligonucleotide
cuaacgaugauuaauagua

SEQ ID NO: 164315 - RNA, 19 nt, Artificial Sequence
  Description of Artificial Sequence: Synthetic oligonucleotide
acagacguggccuauguuc

SEQ ID NO: 164316 - RNA, 19 nt, Artificial Sequence
  Description of Artificial Sequence: Synthetic oligonucleotide
ugagauuguguuaaaagau

SEQ ID NO: 164317 - RNA, 19 nt, Artificial Sequence
  Description of Artificial Sequence: Synthetic oligonucleotide
uguaagagacucaauggga

SEQ ID NO: 164318 - RNA, 19 nt, Artificial Sequence
  Description of Artificial Sequence: Synthetic oligonucleotide
uuagcgagaugauuaagcc

SEQ ID NO: 164319 - RNA, 19 nt, Artificial Sequence
  Description of Artificial Sequence: Synthetic oligonucleotide
uacaucgugugguuuagcg

SEQ ID NO: 164320 - RNA, 19 nt, Artificial Sequence
  Description of Artificial Sequence: Synthetic oligonucleotide
uuuaagaggggugaucuag

SEQ ID NO: 164321 - RNA, 19 nt, Artificial Sequence
  Description of Artificial Sequence: Synthetic oligonucleotide
uccauuagcgagaugauua

SEQ ID NO: 164322 - RNA, 19 nt, Artificial Sequence
  Description of Artificial Sequence: Synthetic oligonucleotide
uuaagaggggugaucuagg

SEQ ID NO: 164323 - RNA, 19 nt, Artificial Sequence
  Description of Artificial Sequence: Synthetic oligonucleotide
auaaagaagacggaggccu

SEQ ID NO: 164324 - RNA, 19 nt, Artificial Sequence
  Description of Artificial Sequence: Synthetic oligonucleotide
uucauuacccggaugugug

SEQ ID NO: 164325 - RNA, 19 nt, Artificial Sequence
  Description of Artificial Sequence: Synthetic oligonucleotide
uaaguguugggucggucgg

SEQ ID NO: 164326 - RNA, 19 nt, Artificial Sequence
  Description of Artificial Sequence: Synthetic oligonucleotide
uuucaagccucaauaggcc

SEQ ID NO: 164327 - RNA, 19 nt, Artificial Sequence
  Description of Artificial Sequence: Synthetic oligonucleotide
uugauuucuaaguguuggg

SEQ ID NO: 164328 - RNA, 19 nt, Artificial Sequence
  Description of Artificial Sequence: Synthetic oligonucleotide
aacgaugauuaauaguaau

SEQ ID NO: 164329 - RNA, 19 nt, Artificial Sequence
  Description of Artificial Sequence: Synthetic oligonucleotide
ucaugucucucacucauga

SEQ ID NO: 164330 - RNA, 19 nt, Artificial Sequence
  Description of Artificial Sequence: Synthetic oligonucleotide
uucuuguuagcaaggggcc

SEQ ID NO: 164331 - RNA, 19 nt, Artificial Sequence
  Description of Artificial Sequence: Synthetic oligonucleotide
acuaacgaugauuaauagu

SEQ ID NO: 164332 - RNA, 19 nt, Artificial Sequence
  Description of Artificial Sequence: Synthetic oligonucleotide
uuaugcgucucuguaacag

SEQ ID NO: 164333 - RNA, 19 nt, Artificial Sequence
  Description of Artificial Sequence: Synthetic oligonucleotide
uacggcaugaaauuacuuc

SEQ ID NO: 164334 - RNA, 19 nt, Artificial Sequence
  Description of Artificial Sequence: Synthetic oligonucleotide
cuuccauagcacacuaacg

SEQ ID NO: 164335 - RNA, 19 nt, Artificial Sequence
  Description of Artificial Sequence: Synthetic oligonucleotide
ugucacuacaugaaccaac

SEQ ID NO: 164336 - RNA, 19 nt, Artificial Sequence
  Description of Artificial Sequence: Synthetic oligonucleotide
acuucggcgucaucgaggg

SEQ ID NO: 164337 - RNA, 19 nt, Artificial Sequence
  Description of Artificial Sequence: Synthetic oligonucleotide
uuuagguuggugguaacga

SEQ ID NO: 164338 - RNA, 19 nt, Artificial Sequence
  Description of Artificial Sequence: Synthetic oligonucleotide
agaucauuauauuaugcua

SEQ ID NO: 164339 - RNA, 19 nt, Artificial Sequence
  Description of Artificial Sequence: Synthetic oligonucleotide
ucuagaaggacgaguagua

SEQ ID NO: 164340 - RNA, 19 nt, Artificial Sequence
  Description of Artificial Sequence: Synthetic oligonucleotide
agcgagaugauuaagccug

SEQ ID NO: 164341 - RNA, 19 nt, Artificial Sequence
  Description of Artificial Sequence: Synthetic oligonucleotide
cuuuaagagaacagagcac

SEQ ID NO: 164342 - RNA, 19 nt, Artificial Sequence
  Description of Artificial Sequence: Synthetic oligonucleotide
uccugaaauaaguuaaaua

SEQ ID NO: 164343 - RNA, 19 nt, Artificial Sequence
  Description of Artificial Sequence: Synthetic oligonucleotide
acuacaugaaccaacagua

SEQ ID NO: 164344 - RNA, 19 nt, Artificial Sequence
  Description of Artificial Sequence: Synthetic oligonucleotide
caacgauaaagaacaaaac

SEQ ID NO: 164345 - RNA, 19 nt, Artificial Sequence
  Description of Artificial Sequence: Synthetic oligonucleotide
caagacucuucauuacccg

SEQ ID NO: 164346 - RNA, 19 nt, Artificial Sequence
  Description of Artificial Sequence: Synthetic oligonucleotide
acuguuaggccgcacgcag

SEQ ID NO: 164347 - RNA, 19 nt, Artificial Sequence
  Description of Artificial Sequence: Synthetic oligonucleotide
auuucggucuguuggguug

SEQ ID NO: 164348 - RNA, 19 nt, Artificial Sequence
  Description of Artificial Sequence: Synthetic oligonucleotide
aucaauccaaucugccauc

SEQ ID NO: 164349 - RNA, 19 nt, Artificial Sequence
  Description of Artificial Sequence: Synthetic oligonucleotide
agacuugauuucuaagugu

SEQ ID NO: 164350 - RNA, 19 nt, Artificial Sequence
  Description of Artificial Sequence: Synthetic oligonucleotide
cacgaugucccucaguaac

SEQ ID NO: 164351 - RNA, 19 nt, Artificial Sequence
  Description of Artificial Sequence: Synthetic oligonucleotide
uaaagcgcccaguucauuc

SEQ ID NO: 164352 - RNA, 19 nt, Artificial Sequence
  Description of Artificial Sequence: Synthetic oligonucleotide
cauagcacacuaacgauga

SEQ ID NO: 164353 - RNA, 19 nt, Artificial Sequence
  Description of Artificial Sequence: Synthetic oligonucleotide
auuaugcuauauuggugug

SEQ ID NO: 164354 - RNA, 19 nt, Artificial Sequence
  Description of Artificial Sequence: Synthetic oligonucleotide
gaagcgacagcacacccuc

SEQ ID NO: 164355 - RNA, 19 nt, Artificial Sequence
  Description of Artificial Sequence: Synthetic oligonucleotide
ucauuacccggaugugugg

SEQ ID NO: 164356 - RNA, 19 nt, Artificial Sequence
  Description of Artificial Sequence: Synthetic oligonucleotide
uuucuaaguguugggucgg

SEQ ID NO: 164357 - RNA, 19 nt, Artificial Sequence
  Description of Artificial Sequence: Synthetic oligonucleotide
auaaugacaccaacgauaa

SEQ ID NO: 164358 - RNA, 19 nt, Artificial Sequence
  Description of Artificial Sequence: Synthetic oligonucleotide
uaacgaugauuaauaguaa

SEQ ID NO: 164359 - RNA, 19 nt, Artificial Sequence
  Description of Artificial Sequence: Synthetic oligonucleotide
cuuuagguuggugguaacg

SEQ ID NO: 164360 - RNA, 19 nt, Artificial Sequence
  Description of Artificial Sequence: Synthetic oligonucleotide
ucaucgagggacgacguca

SEQ ID NO: 164361 - RNA, 19 nt, Artificial Sequence
  Description of Artificial Sequence: Synthetic oligonucleotide
uuaaugugacagcugcaau

SEQ ID NO: 164362 - RNA, 19 nt, Artificial Sequence
  Description of Artificial Sequence: Synthetic oligonucleotide
caauaggccacuucuauaa

SEQ ID NO: 164363 - RNA, 19 nt, Artificial Sequence
  Description of Artificial Sequence: Synthetic oligonucleotide
guaacagaccauucucccc

SEQ ID NO: 164364 - RNA, 19 nt, Artificial Sequence
  Description of Artificial Sequence: Synthetic oligonucleotide
uggauuggucuuuuacggc

SEQ ID NO: 164365 - RNA, 19 nt, Artificial Sequence
  Description of Artificial Sequence: Synthetic oligonucleotide
uucccuauaaugacaccaa

SEQ ID NO: 164366 - RNA, 19 nt, Artificial Sequence
  Description of Artificial Sequence: Synthetic oligonucleotide
uuucuaaagcgcccaguuc

SEQ ID NO: 164367 - RNA, 19 nt, Artificial Sequence
  Description of Artificial Sequence: Synthetic oligonucleotide
uuuacgcaugguuaugaua

SEQ ID NO: 164368 - RNA, 19 nt, Artificial Sequence
  Description of Artificial Sequence: Synthetic oligonucleotide
ugagucgaugugcggagug

SEQ ID NO: 164369 - RNA, 19 nt, Artificial Sequence
  Description of Artificial Sequence: Synthetic oligonucleotide
gggagggguauuuaaaggc

SEQ ID NO: 164370 - RNA, 19 nt, Artificial Sequence
  Description of Artificial Sequence: Synthetic oligonucleotide
gaacucuuaauuuggggcu

SEQ ID NO: 164371 - RNA, 19 nt, Artificial Sequence
  Description of Artificial Sequence: Synthetic oligonucleotide
aauaugcauuaugcgucuc

SEQ ID NO: 164372 - RNA, 19 nt, Artificial Sequence
  Description of Artificial Sequence: Synthetic oligonucleotide
gucgagcagaacuggauug

SEQ ID NO: 164373 - RNA, 19 nt, Artificial Sequence
  Description of Artificial Sequence: Synthetic oligonucleotide
gugguuaaucacgaugucc

SEQ ID NO: 164374 - RNA, 19 nt, Artificial Sequence
  Description of Artificial Sequence: Synthetic oligonucleotide
ucgucugucacuugcucgu

SEQ ID NO: 164375 - RNA, 19 nt, Artificial Sequence
  Description of Artificial Sequence: Synthetic oligonucleotide
ugugcacaugguuucagua

SEQ ID NO: 164376 - RNA, 19 nt, Artificial Sequence
  Description of Artificial Sequence: Synthetic oligonucleotide
cccuauaaugacaccaacg

SEQ ID NO: 164377 - RNA, 19 nt, Artificial Sequence
  Description of Artificial Sequence: Synthetic oligonucleotide
uaugccacugugguuaauc

SEQ ID NO: 164378 - RNA, 19 nt, Artificial Sequence
  Description of Artificial Sequence: Synthetic oligonucleotide
caggcggccguccauaaag

SEQ ID NO: 164379 - RNA, 19 nt, Artificial Sequence
  Description of Artificial Sequence: Synthetic oligonucleotide
ucaauccaaucugccaucc

SEQ ID NO: 164380 - RNA, 19 nt, Artificial Sequence
  Description of Artificial Sequence: Synthetic oligonucleotide
guuacugaccuacaacaaa

SEQ ID NO: 164381 - RNA, 19 nt, Artificial Sequence
  Description of Artificial Sequence: Synthetic oligonucleotide
ccuauaaugacaccaacga

SEQ ID NO: 164382 - RNA, 19 nt, Artificial Sequence
  Description of Artificial Sequence: Synthetic oligonucleotide
cacuucggcgucaucgagg

SEQ ID NO: 164383 - RNA, 19 nt, Artificial Sequence
  Description of Artificial Sequence: Synthetic oligonucleotide
aagaggggugaucuaggaa

SEQ ID NO: 164384 - RNA, 19 nt, Artificial Sequence
  Description of Artificial Sequence: Synthetic oligonucleotide
uuaugcuauauuggugugu

SEQ ID NO: 164385 - RNA, 19 nt, Artificial Sequence
  Description of Artificial Sequence: Synthetic oligonucleotide
guggccuauguucuagaag

SEQ ID NO: 164386 - RNA, 19 nt, Artificial Sequence
  Description of Artificial Sequence: Synthetic oligonucleotide
uguuaggccgcacgcagua

SEQ ID NO: 164387 - RNA, 19 nt, Artificial Sequence
  Description of Artificial Sequence: Synthetic oligonucleotide
auuacccggauguguggag

SEQ ID NO: 164388 - RNA, 19 nt, Artificial Sequence
  Description of Artificial Sequence: Synthetic oligonucleotide
uuuuacgcaugguuaugau

SEQ ID NO: 164389 - RNA, 19 nt, Artificial Sequence
  Description of Artificial Sequence: Synthetic oligonucleotide
ugugguuaaucacgauguc

SEQ ID NO: 164390 - RNA, 19 nt, Artificial Sequence
  Description of Artificial Sequence: Synthetic oligonucleotide
caagguguuaaggagccuc

SEQ ID NO: 164391 - RNA, 19 nt, Artificial Sequence
  Description of Artificial Sequence: Synthetic oligonucleotide
  modified_base (7)..(7): a, c, u, g, unknown or other
ggaaacnccggcuggguca

SEQ ID NO: 164392 - RNA, 19 nt, Artificial Sequence
  Description of Artificial Sequence: Synthetic oligonucleotide
gacggaaaguagcauguaa

SEQ ID NO: 164393 - RNA, 19 nt, Artificial Sequence
  Description of Artificial Sequence: Synthetic oligonucleotide
uggugagucgaugugcgga

SEQ ID NO: 164394 - RNA, 19 nt, Artificial Sequence
  Description of Artificial Sequence: Synthetic oligonucleotide
accgcuugcacucuuccau

SEQ ID NO: 164395 - RNA, 19 nt, Artificial Sequence
  Description of Artificial Sequence: Synthetic oligonucleotide
augugcggagugugugugc

SEQ ID NO: 164396 - RNA, 19 nt, Artificial Sequence
  Description of Artificial Sequence: Synthetic oligonucleotide
ucuaaagcgcccaguucau

SEQ ID NO: 164397 - RNA, 19 nt, Artificial Sequence
  Description of Artificial Sequence: Synthetic oligonucleotide
ucggcgucaucgagggacg

SEQ ID NO: 164398 - RNA, 19 nt, Artificial Sequence
  Description of Artificial Sequence: Synthetic oligonucleotide
auuccgaccuuugaaggca

SEQ ID NO: 164399 - RNA, 19 nt, Artificial Sequence
  Description of Artificial Sequence: Synthetic oligonucleotide
aagacaccgcuggugagcu

SEQ ID NO: 164400 - RNA, 19 nt, Artificial Sequence
  Description of Artificial Sequence: Synthetic oligonucleotide
cauucguccugagaagggc

SEQ ID NO: 164401 - RNA, 19 nt, Artificial Sequence
  Description of Artificial Sequence: Synthetic oligonucleotide
ggauuggucuuuuacggca

SEQ ID NO: 164402 - RNA, 19 nt, Artificial Sequence
  Description of Artificial Sequence: Synthetic oligonucleotide
guaagagacucaaugggaa

SEQ ID NO: 164403 - RNA, 19 nt, Artificial Sequence
  Description of Artificial Sequence: Synthetic oligonucleotide
  modified_base (6)..(6): a, c, u, g, unknown or other
gaaacnccggcugggucag

SEQ ID NO: 164404 - RNA, 19 nt, Artificial Sequence
  Description of Artificial Sequence: Synthetic oligonucleotide
uuauuucggcccacaucca

SEQ ID NO: 164405 - RNA, 19 nt, Artificial Sequence
  Description of Artificial Sequence: Synthetic oligonucleotide
ucuuucuaaagcgcccagu

SEQ ID NO: 164406 - RNA, 19 nt, Artificial Sequence
  Description of Artificial Sequence: Synthetic oligonucleotide
ucucucacucaugaccuac

SEQ ID NO: 164407 - RNA, 19 nt, Artificial Sequence
  Description of Artificial Sequence: Synthetic oligonucleotide
acaagacaccgcuggugag

SEQ ID NO: 164408 - RNA, 19 nt, Artificial Sequence
  Description of Artificial Sequence: Synthetic oligonucleotide
cccuuuaagagaacagagc

SEQ ID NO: 164409 - RNA, 19 nt, Artificial Sequence
  Description of Artificial Sequence: Synthetic oligonucleotide
ucgaugugcggagugugug

SEQ ID NO: 164410 - RNA, 19 nt, Artificial Sequence
  Description of Artificial Sequence: Synthetic oligonucleotide
ucggucgguccacucaugu

SEQ ID NO: 164411 - RNA, 19 nt, Artificial Sequence
  Description of Artificial Sequence: Synthetic oligonucleotide
cacuacaugaaccaacagu

SEQ ID NO: 164412 - RNA, 19 nt, Artificial Sequence
  Description of Artificial Sequence: Synthetic oligonucleotide
cccgaguuuaaugugacag

SEQ ID NO: 164413 - RNA, 19 nt, Artificial Sequence
  Description of Artificial Sequence: Synthetic oligonucleotide
caucgagggacgacgucag

SEQ ID NO: 164414 - RNA, 19 nt, Artificial Sequence
  Description of Artificial Sequence: Synthetic oligonucleotide
agcguuuucugcugguaau

SEQ ID NO: 164415 - RNA, 19 nt, Artificial Sequence
  Description of Artificial Sequence: Synthetic oligonucleotide
ucuuguuagcaaggggccu

SEQ ID NO: 164416 - RNA, 19 nt, Artificial Sequence
  Description of Artificial Sequence: Synthetic oligonucleotide
caugccggagcccuggcuc

SEQ ID NO: 164417 - RNA, 19 nt, Artificial Sequence
  Description of Artificial Sequence: Synthetic oligonucleotide
guuaaucacgaugucccuc

SEQ ID NO: 164418 - RNA, 19 nt, Artificial Sequence
  Description of Artificial Sequence: Synthetic oligonucleotide
cauuagcgagaugauuaag

SEQ ID NO: 164419 - RNA, 19 nt, Artificial Sequence
  Description of Artificial Sequence: Synthetic oligonucleotide
caccgacacguugagagag

SEQ ID NO: 164420 - RNA, 19 nt, Artificial Sequence
  Description of Artificial Sequence: Synthetic oligonucleotide
uuacggcaugaaauuacuu

SEQ ID NO: 164421 - RNA, 19 nt, Artificial Sequence
  Description of Artificial Sequence: Synthetic oligonucleotide
ugugcggagugugugugcu

SEQ ID NO: 164422 - RNA, 19 nt, Artificial Sequence
  Description of Artificial Sequence: Synthetic oligonucleotide
guagcauguaaucuguuuu

SEQ ID NO: 164423 - RNA, 19 nt, Artificial Sequence
  Description of Artificial Sequence: Synthetic oligonucleotide
augcauuaugcgucucugu

SEQ ID NO: 164424 - RNA, 19 nt, Artificial Sequence
  Description of Artificial Sequence: Synthetic oligonucleotide
aacucuuaauuuggggcuu

SEQ ID NO: 164425 - RNA, 19 nt, Artificial Sequence
  Description of Artificial Sequence: Synthetic oligonucleotide
ugccauccuucgcaugcag

SEQ ID NO: 164426 - RNA, 19 nt, Artificial Sequence
  Description of Artificial Sequence: Synthetic oligonucleotide
gacaccgcuggugagcuga

SEQ ID NO: 164427 - RNA, 19 nt, Artificial Sequence
  Description of Artificial Sequence: Synthetic oligonucleotide
accaacgauaaagaacaaa

SEQ ID NO: 164428 - RNA, 19 nt, Artificial Sequence
  Description of Artificial Sequence: Synthetic oligonucleotide
aaggcauguaagagacuca

SEQ ID NO: 164429 - RNA, 19 nt, Artificial Sequence
  Description of Artificial Sequence: Synthetic oligonucleotide
guauauguguguacacaga

SEQ ID NO: 164430 - RNA, 19 nt, Artificial Sequence
  Description of Artificial Sequence: Synthetic oligonucleotide
agagugaggggagaacuau

SEQ ID NO: 164431 - RNA, 19 nt, Artificial Sequence
  Description of Artificial Sequence: Synthetic oligonucleotide
cuugggugcacuuguaggu

SEQ ID NO: 164432 - RNA, 19 nt, Artificial Sequence
  Description of Artificial Sequence: Synthetic oligonucleotide
cuagaagacuggguaacca

SEQ ID NO: 164433 - RNA, 19 nt, Artificial Sequence
  Description of Artificial Sequence: Synthetic oligonucleotide
ugcggagugugugugcuaa

SEQ ID NO: 164434 - RNA, 19 nt, Artificial Sequence
  Description of Artificial Sequence: Synthetic oligonucleotide
gagacggaaaguagcaugu

SEQ ID NO: 164435 - RNA, 19 nt, Artificial Sequence
  Description of Artificial Sequence: Synthetic oligonucleotide
agucgaugugcggagugug

SEQ ID NO: 164436 - RNA, 19 nt, Artificial Sequence
  Description of Artificial Sequence: Synthetic oligonucleotide
ugcgucucuguaacagcuc

SEQ ID NO: 164437 - RNA, 19 nt, Artificial Sequence
  Description of Artificial Sequence: Synthetic oligonucleotide
augcgucucuguaacagcu

SEQ ID NO: 164438 - RNA, 19 nt, Artificial Sequence
  Description of Artificial Sequence: Synthetic oligonucleotide
aggcgccauaauaaaagug

SEQ ID NO: 164439 - RNA, 19 nt, Artificial Sequence
  Description of Artificial Sequence: Synthetic oligonucleotide
augaaccaacaguaauuua

SEQ ID NO: 164440 - RNA, 19 nt, Artificial Sequence
  Description of Artificial Sequence: Synthetic oligonucleotide
agcaacccuaccucaccga

SEQ ID NO: 164441 - RNA, 19 nt, Artificial Sequence
  Description of Artificial Sequence: Synthetic oligonucleotide
gcaacccuaccucaccgag

SEQ ID NO: 164442 - RNA, 19 nt, Artificial Sequence
  Description of Artificial Sequence: Synthetic oligonucleotide
uucggcccacauccauuag

SEQ ID NO: 164443 - RNA, 19 nt, Artificial Sequence
  Description of Artificial Sequence: Synthetic oligonucleotide
cacguugagagaggccccg

SEQ ID NO: 164444 - RNA, 19 nt, Artificial Sequence
  Description of Artificial Sequence: Synthetic oligonucleotide
acgacgucagggacuuggc

SEQ ID NO: 164445 - RNA, 19 nt, Artificial Sequence
  Description of Artificial Sequence: Synthetic oligonucleotide
gagcugaggcgccauaaua

SEQ ID NO: 164446 - RNA, 19 nt, Artificial Sequence
  Description of Artificial Sequence: Synthetic oligonucleotide
uuagcguuuucugcuggua

SEQ ID NO: 164447 - RNA, 19 nt, Artificial Sequence
  Description of Artificial Sequence: Synthetic oligonucleotide
ggucuguuggguugccaag

SEQ ID NO: 164448 - RNA, 19 nt, Artificial Sequence
  Description of Artificial Sequence: Synthetic oligonucleotide
gaggccccggcaucaauga

SEQ ID NO: 164449 - RNA, 19 nt, Artificial Sequence
  Description of Artificial Sequence: Synthetic oligonucleotide
ucuaaguguugggucgguc

SEQ ID NO: 164450 - RNA, 19 nt, Artificial Sequence
  Description of Artificial Sequence: Synthetic oligonucleotide
cauggggagggguauuuaa

SEQ ID NO: 164451 - RNA, 19 nt, Artificial Sequence
  Description of Artificial Sequence: Synthetic oligonucleotide
ucaaugggaaaaggcuuuu

SEQ ID NO: 164452 - RNA, 19 nt, Artificial Sequence
  Description of Artificial Sequence: Synthetic oligonucleotide
gaaguaucagguggagcaa

SEQ ID NO: 164453 - RNA, 19 nt, Artificial Sequence
  Description of Artificial Sequence: Synthetic oligonucleotide
aaguguugggucggucggu

SEQ ID NO: 164454 - RNA, 19 nt, Artificial Sequence
  Description of Artificial Sequence: Synthetic oligonucleotide
cugcacuaacaggcuagcg

SEQ ID NO: 164455 - RNA, 19 nt, Artificial Sequence
  Description of Artificial Sequence: Synthetic oligonucleotide
gcgucaucgagggacgacg

SEQ ID NO: 164456 - RNA, 19 nt, Artificial Sequence
  Description of Artificial Sequence: Synthetic oligonucleotide
  modified_base (2)..(2): a, c, u, g, unknown or other
cnccggcugggucagggug

SEQ ID NO: 164457 - RNA, 19 nt, Artificial Sequence
  Description of Artificial Sequence: Synthetic oligonucleotide
uccgaccuuugaaggcaug

SEQ ID NO: 164458 - RNA, 19 nt, Artificial Sequence
  Description of Artificial Sequence: Synthetic oligonucleotide
ggucgguccacucaugucu

SEQ ID NO: 164459 - RNA, 19 nt, Artificial Sequence
  Description of Artificial Sequence: Synthetic oligonucleotide
ggagaacuaucuagaagac

SEQ ID NO: 164460 - RNA, 19 nt, Artificial Sequence
  Description of Artificial Sequence: Synthetic oligonucleotide
cuuucuaaagcgcccaguu

SEQ ID NO: 164461 - RNA, 19 nt, Artificial Sequence
  Description of Artificial Sequence: Synthetic oligonucleotide
cccuaccucaccgagacac

SEQ ID NO: 164462 - RNA, 19 nt, Artificial Sequence
  Description of Artificial Sequence: Synthetic oligonucleotide
ucaccgagacacaguggua

SEQ ID NO: 164463 - RNA, 19 nt, Artificial Sequence
  Description of Artificial Sequence: Synthetic oligonucleotide
gaaugcaggcggccgucca

SEQ ID NO: 164464 - RNA, 19 nt, Artificial Sequence
  Description of Artificial Sequence: Synthetic oligonucleotide
ccuacccgaguuuaaugug

SEQ ID NO: 164465 - RNA, 19 nt, Artificial Sequence
  Description of Artificial Sequence: Synthetic oligonucleotide
gccgucgucugucacuugc

SEQ ID NO: 164466 - RNA, 19 nt, Artificial Sequence
  Description of Artificial Sequence: Synthetic oligonucleotide
cuuuuacggcaugaaauua

SEQ ID NO: 164467 - RNA, 19 nt, Artificial Sequence
  Description of Artificial Sequence: Synthetic oligonucleotide
  modified_base (9)..(9): a, c, u, g, unknown or other
ugggaaacnccggcugggu

SEQ ID NO: 164468 - RNA, 19 nt, Artificial Sequence
  Description of Artificial Sequence: Synthetic oligonucleotide
cucaauaggccacuucuau

SEQ ID NO: 164469 - RNA, 19 nt, Artificial Sequence
  Description of Artificial Sequence: Synthetic oligonucleotide
aggccccggcaucaaugac

SEQ ID NO: 164470 - RNA, 19 nt, Artificial Sequence
  Description of Artificial Sequence: Synthetic oligonucleotide
acgcaugguuaugauaaau

SEQ ID NO: 164471 - RNA, 19 nt, Artificial Sequence
  Description of Artificial Sequence: Synthetic oligonucleotide
cacacuaacgaugauuaau

SEQ ID NO: 164472 - RNA, 19 nt, Artificial Sequence
  Description of Artificial Sequence: Synthetic oligonucleotide
guaucagguggagcaaaca

SEQ ID NO: 164473 - RNA, 19 nt, Artificial Sequence
  Description of Artificial Sequence: Synthetic oligonucleotide
cugaggcgccauaauaaaa

SEQ ID NO: 164474 - RNA, 19 nt, Artificial Sequence
  Description of Artificial Sequence: Synthetic oligonucleotide
cggaaaguagcauguaauc

SEQ ID NO: 164475 - RNA, 19 nt, Artificial Sequence
  Description of Artificial Sequence: Synthetic oligonucleotide
accgacacguugagagagg

SEQ ID NO: 164476 - RNA, 19 nt, Artificial Sequence
  Description of Artificial Sequence: Synthetic oligonucleotide
cagacguggccuauguucu

SEQ ID NO: 164477 - RNA, 19 nt, Artificial Sequence
  Description of Artificial Sequence: Synthetic oligonucleotide
acccgaguuuaaugugaca

SEQ ID NO: 164478 - RNA, 19 nt, Artificial Sequence
  Description of Artificial Sequence: Synthetic oligonucleotide
auagcacacuaacgaugau

SEQ ID NO: 164479 - RNA, 19 nt, Artificial Sequence
  Description of Artificial Sequence: Synthetic oligonucleotide
gccccaacaugugagggag

SEQ ID NO: 164480 - RNA, 19 nt, Artificial Sequence
  Description of Artificial Sequence: Synthetic oligonucleotide
aggcaagaccugugagaug

SEQ ID NO: 164481 - RNA, 19 nt, Artificial Sequence
  Description of Artificial Sequence: Synthetic oligonucleotide
ggccuacccgaguuuaaug

SEQ ID NO: 164482 - RNA, 19 nt, Artificial Sequence
  Description of Artificial Sequence: Synthetic oligonucleotide
gcaugguuaugauaaauuu

SEQ ID NO: 164483 - RNA, 19 nt, Artificial Sequence
  Description of Artificial Sequence: Synthetic oligonucleotide
cauuacccggaugugugga

SEQ ID NO: 164484 - RNA, 19 nt, Artificial Sequence
  Description of Artificial Sequence: Synthetic oligonucleotide
cgaugauuaauaguaauaa

SEQ ID NO: 164485 - RNA, 19 nt, Artificial Sequence
  Description of Artificial Sequence: Synthetic oligonucleotide
cuacaucgugugguuuagc

SEQ ID NO: 164486 - RNA, 19 nt, Artificial Sequence
  Description of Artificial Sequence: Synthetic oligonucleotide
aaguagcauguaaucuguu

SEQ ID NO: 164487 - RNA, 19 nt, Artificial Sequence
  Description of Artificial Sequence: Synthetic oligonucleotide
ccguguaagcucugcauuc

SEQ ID NO: 164488 - RNA, 19 nt, Artificial Sequence
  Description of Artificial Sequence: Synthetic oligonucleotide
acguggccuauguucuaga

SEQ ID NO: 164489 - RNA, 19 nt, Artificial Sequence
  Description of Artificial Sequence: Synthetic oligonucleotide
cuuuaagaggggugaucua

SEQ ID NO: 164490 - RNA, 19 nt, Artificial Sequence
  Description of Artificial Sequence: Synthetic oligonucleotide
ccacuguuaggccgcacgc

SEQ ID NO: 164491 - RNA, 19 nt, Artificial Sequence
  Description of Artificial Sequence: Synthetic oligonucleotide
agggacgacgucagggacu

SEQ ID NO: 164492 - RNA, 19 nt, Artificial Sequence
  Description of Artificial Sequence: Synthetic oligonucleotide
gagaacccagacacuagcu

SEQ ID NO: 164493 - RNA, 19 nt, Artificial Sequence
  Description of Artificial Sequence: Synthetic oligonucleotide
cugccuccauaucagaagu

SEQ ID NO: 164494 - RNA, 19 nt, Artificial Sequence
  Description of Artificial Sequence: Synthetic oligonucleotide
gacucuucauuacccggau

SEQ ID NO: 164495 - RNA, 19 nt, Artificial Sequence
  Description of Artificial Sequence: Synthetic oligonucleotide
auuucggcccacauccauu

SEQ ID NO: 164496 - RNA, 19 nt, Artificial Sequence
  Description of Artificial Sequence: Synthetic oligonucleotide
cuguaacagcucaguguca

SEQ ID NO: 164497 - RNA, 19 nt, Artificial Sequence
  Description of Artificial Sequence: Synthetic oligonucleotide
gccuauguucuagaaggac

SEQ ID NO: 164498 - RNA, 19 nt, Artificial Sequence
  Description of Artificial Sequence: Synthetic oligonucleotide
aacaugugagggagagcuu

SEQ ID NO: 164499 - RNA, 19 nt, Artificial Sequence
  Description of Artificial Sequence: Synthetic oligonucleotide
caacccuaccucaccgaga

SEQ ID NO: 164500 - RNA, 19 nt, Artificial Sequence
  Description of Artificial Sequence: Synthetic oligonucleotide
aggacagacguggccuaug

SEQ ID NO: 164501 - RNA, 19 nt, Artificial Sequence
  Description of Artificial Sequence: Synthetic oligonucleotide
cacuacaaagacugucccu

SEQ ID NO: 164502 - RNA, 19 nt, Artificial Sequence
  Description of Artificial Sequence: Synthetic oligonucleotide
gucaucgagggacgacguc

SEQ ID NO: 164503 - RNA, 19 nt, Artificial Sequence
  Description of Artificial Sequence: Synthetic oligonucleotide
aggcuagcggcugaauuua

SEQ ID NO: 164504 - RNA, 19 nt, Artificial Sequence
  Description of Artificial Sequence: Synthetic oligonucleotide
ggggugaucuaggaacaug

SEQ ID NO: 164505 - RNA, 19 nt, Artificial Sequence
  Description of Artificial Sequence: Synthetic oligonucleotide
gcugaggcgccauaauaaa

SEQ ID NO: 164506 - RNA, 19 nt, Artificial Sequence
  Description of Artificial Sequence: Synthetic oligonucleotide
  modified_base (5)..(5): a, c, u, g, unknown or other
aaacnccggcugggucagg

SEQ ID NO: 164507 - RNA, 19 nt, Artificial Sequence
  Description of Artificial Sequence: Synthetic oligonucleotide
ggccgcacgcaguaccugc

SEQ ID NO: 164508 - RNA, 19 nt, Artificial Sequence
  Description of Artificial Sequence: Synthetic oligonucleotide
gccuacccgaguuuaaugu

SEQ ID NO: 164509 - RNA, 19 nt, Artificial Sequence
  Description of Artificial Sequence: Synthetic oligonucleotide
aaggccuacccgaguuuaa

SEQ ID NO: 164510 - RNA, 19 nt, Artificial Sequence
  Description of Artificial Sequence: Synthetic oligonucleotide
aggugugauuuuauuuauu

SEQ ID NO: 164511 - RNA, 19 nt, Artificial Sequence
  Description of Artificial Sequence: Synthetic oligonucleotide
  modified_base (8)..(8): a, c, u, g, unknown or other
gggaaacnccggcuggguc

SEQ ID NO: 164512 - RNA, 19 nt, Artificial Sequence
  Description of Artificial Sequence: Synthetic oligonucleotide
caggcuagcggcugaauuu

SEQ ID NO: 164513 - RNA, 19 nt, Artificial Sequence
  Description of Artificial Sequence: Synthetic oligonucleotide
ucggucuguuggguugcca

SEQ ID NO: 164514 - RNA, 19 nt, Artificial Sequence
  Description of Artificial Sequence: Synthetic oligonucleotide
gugagcugaggcgccauaa

SEQ ID NO: 164515 - RNA, 19 nt, Artificial Sequence
  Description of Artificial Sequence: Synthetic oligonucleotide
gcugcacuaacaggcuagc

SEQ ID NO: 164516 - RNA, 19 nt, Artificial Sequence
  Description of Artificial Sequence: Synthetic oligonucleotide
ccgucuucuuccuugagcu

SEQ ID NO: 164517 - RNA, 19 nt, Artificial Sequence
  Description of Artificial Sequence: Synthetic oligonucleotide
guaacagcucagugucacu

SEQ ID NO: 164518 - RNA, 19 nt, Artificial Sequence
  Description of Artificial Sequence: Synthetic oligonucleotide
ccucaccgagacacagugg

SEQ ID NO: 164519 - RNA, 19 nt, Artificial Sequence
  Description of Artificial Sequence: Synthetic oligonucleotide
gguaaccagagcugacugu

SEQ ID NO: 164520 - RNA, 19 nt, Artificial Sequence
  Description of Artificial Sequence: Synthetic oligonucleotide
agacguggccuauguucua

SEQ ID NO: 164521 - RNA, 19 nt, Artificial Sequence
  Description of Artificial Sequence: Synthetic oligonucleotide
gugucacuacaugaaccaa

SEQ ID NO: 164522 - RNA, 19 nt, Artificial Sequence
  Description of Artificial Sequence: Synthetic oligonucleotide
guuaggccgcacgcaguac

SEQ ID NO: 164523 - RNA, 19 nt, Artificial Sequence
  Description of Artificial Sequence: Synthetic oligonucleotide
ugggucggucgguccacuc

SEQ ID NO: 164524 - RNA, 19 nt, Artificial Sequence
  Description of Artificial Sequence: Synthetic oligonucleotide
acgcaguaccugcgcggug

SEQ ID NO: 164525 - RNA, 19 nt, Artificial Sequence
  Description of Artificial Sequence: Synthetic oligonucleotide
gguuaaucacgaugucccu

SEQ ID NO: 164526 - RNA, 19 nt, Artificial Sequence
  Description of Artificial Sequence: Synthetic oligonucleotide
ccauuagcgagaugauuaa

SEQ ID NO: 164527 - RNA, 19 nt, Artificial Sequence
  Description of Artificial Sequence: Synthetic oligonucleotide
ccgacacguugagagaggc

SEQ ID NO: 164528 - RNA, 19 nt, Artificial Sequence
  Description of Artificial Sequence: Synthetic oligonucleotide
gcuuuagguuggugguaac

SEQ ID NO: 164529 - RNA, 19 nt, Artificial Sequence
  Description of Artificial Sequence: Synthetic oligonucleotide
caaggccuacccgaguuua

SEQ ID NO: 164530 - RNA, 19 nt, Artificial Sequence
  Description of Artificial Sequence: Synthetic oligonucleotide
guaagccguguaagcucug

SEQ ID NO: 164531 - RNA, 19 nt, Artificial Sequence
  Description of Artificial Sequence: Synthetic oligonucleotide
gagucgaugugcggagugu

SEQ ID NO: 164532 - RNA, 19 nt, Artificial Sequence
  Description of Artificial Sequence: Synthetic oligonucleotide
gggucggucgguccacuca

SEQ ID NO: 164533 - RNA, 19 nt, Artificial Sequence
  Description of Artificial Sequence: Synthetic oligonucleotide
cgauggcuuggacagaaca

SEQ ID NO: 164534 - RNA, 19 nt, Artificial Sequence
  Description of Artificial Sequence: Synthetic oligonucleotide
ugccaagcuuuagguuggu

SEQ ID NO: 164535 - RNA, 19 nt, Artificial Sequence
  Description of Artificial Sequence: Synthetic oligonucleotide
uugggucggucgguccacu

SEQ ID NO: 164536 - RNA, 19 nt, Artificial Sequence
  Description of Artificial Sequence: Synthetic oligonucleotide
cuuguuagcaaggggccuu

SEQ ID NO: 164537 - RNA, 19 nt, Artificial Sequence
  Description of Artificial Sequence: Synthetic oligonucleotide
gcgagaugauuaagccugc

SEQ ID NO: 164538 - RNA, 19 nt, Artificial Sequence
  Description of Artificial Sequence: Synthetic oligonucleotide
cgcaguaccugcgcggugc

SEQ ID NO: 164539 - RNA, 19 nt, Artificial Sequence
  Description of Artificial Sequence: Synthetic oligonucleotide
aggcggccguccauaaaga

SEQ ID NO: 164540 - RNA, 19 nt, Artificial Sequence
  Description of Artificial Sequence: Synthetic oligonucleotide
ggacgaguaguagcagaga

SEQ ID NO: 164541 - RNA, 19 nt, Artificial Sequence
  Description of Artificial Sequence: Synthetic oligonucleotide
ggcuagcggcugaauuuag

SEQ ID NO: 164542 - RNA, 19 nt, Artificial Sequence
  Description of Artificial Sequence: Synthetic oligonucleotide
cgcacgcaguaccugcgcg

SEQ ID NO: 164543 - RNA, 19 nt, Artificial Sequence
  Description of Artificial Sequence: Synthetic oligonucleotide
acccuaccucaccgagaca

SEQ ID NO: 164544 - RNA, 19 nt, Artificial Sequence
  Description of Artificial Sequence: Synthetic oligonucleotide
gcggcugaauuuaguuuac

SEQ ID NO: 164545 - RNA, 19 nt, Artificial Sequence
  Description of Artificial Sequence: Synthetic oligonucleotide
caagccucaauaggccacu

SEQ ID NO: 164546 - RNA, 19 nt, Artificial Sequence
  Description of Artificial Sequence: Synthetic oligonucleotide
cgaguuuaaugugacagcu

SEQ ID NO: 164547 - RNA, 19 nt, Artificial Sequence
  Description of Artificial Sequence: Synthetic oligonucleotide
ggccuauguucuagaagga

SEQ ID NO: 164548 - RNA, 19 nt, Artificial Sequence
  Description of Artificial Sequence: Synthetic oligonucleotide
gucggucgguccacucaug

SEQ ID NO: 164549 - RNA, 19 nt, Artificial Sequence
  Description of Artificial Sequence: Synthetic oligonucleotide
cuguuaggccgcacgcagu

SEQ ID NO: 164550 - RNA, 19 nt, Artificial Sequence
  Description of Artificial Sequence: Synthetic oligonucleotide
cgacacguugagagaggcc

SEQ ID NO: 164551 - RNA, 19 nt, Artificial Sequence
  Description of Artificial Sequence: Synthetic oligonucleotide
agccgucgucugucacuug

SEQ ID NO: 164552 - RNA, 19 nt, Artificial Sequence
  Description of Artificial Sequence: Synthetic oligonucleotide
gucgaugugcggagugugu

SEQ ID NO: 164553 - RNA, 19 nt, Artificial Sequence
  Description of Artificial Sequence: Synthetic oligonucleotide
ccucaauaggccacuucua

SEQ ID NO: 164554 - RNA, 19 nt, Artificial Sequence
  Description of Artificial Sequence: Synthetic oligonucleotide
ggcgucaucgagggacgac

SEQ ID NO: 164555 - RNA, 19 nt, Artificial Sequence
  Description of Artificial Sequence: Synthetic oligonucleotide
gccguguaagcucugcauu

SEQ ID NO: 164556 - RNA, 19 nt, Artificial Sequence
  Description of Artificial Sequence: Synthetic oligonucleotide
ggucggucgguccacucau

SEQ ID NO: 164557 - RNA, 19 nt, Artificial Sequence
  Description of Artificial Sequence: Synthetic oligonucleotide
ccuaccucaccgagacaca

SEQ ID NO: 164558 - RNA, 19 nt, Artificial Sequence
  Description of Artificial Sequence: Synthetic oligonucleotide
gggaauguguucaggccau

SEQ ID NO: 164559 - RNA, 19 nt, Artificial Sequence
  Description of Artificial Sequence: Synthetic oligonucleotide
cgccauaauaaaagugaua

SEQ ID NO: 164560 - RNA, 19 nt, Artificial Sequence
  Description of Artificial Sequence: Synthetic oligonucleotide
cacugugguuaaucacgau

SEQ ID NO: 164561 - RNA, 19 nt, Artificial Sequence
  Description of Artificial Sequence: Synthetic oligonucleotide
gugcggagugugugugcua

SEQ ID NO: 164562 - RNA, 19 nt, Artificial Sequence
  Description of Artificial Sequence: Synthetic oligonucleotide
gugagucgaugugcggagu

SEQ ID NO: 164563 - RNA, 19 nt, Artificial Sequence
  Description of Artificial Sequence: Synthetic oligonucleotide
gcuagcggcugaauuuagu

SEQ ID NO: 164564 - RNA, 19 nt, Artificial Sequence
  Description of Artificial Sequence: Synthetic oligonucleotide
cugcgcggugcuguggucu

SEQ ID NO: 164565 - RNA, 19 nt, Artificial Sequence
  Description of Artificial Sequence: Synthetic oligonucleotide
cuucggcgucaucgaggga

SEQ ID NO: 164566 - RNA, 19 nt, Artificial Sequence
  Description of Artificial Sequence: Synthetic oligonucleotide
cguggccuauguucuagaa

SEQ ID NO: 164567 - RNA, 19 nt, Artificial Sequence
  Description of Artificial Sequence: Synthetic oligonucleotide
cuaaagcgcccaguucauu

SEQ ID NO: 164568 - RNA, 19 nt, Artificial Sequence
  Description of Artificial Sequence: Synthetic oligonucleotide
ggcauguaagagacucaau

SEQ ID NO: 164569 - RNA, 19 nt, Artificial Sequence
  Description of Artificial Sequence: Synthetic oligonucleotide
cucacccggagcccgucuu

SEQ ID NO: 164570 - RNA, 19 nt, Artificial Sequence
  Description of Artificial Sequence: Synthetic oligonucleotide
ccgaccuuugaaggcaugu

SEQ ID NO: 164571 - RNA, 19 nt, Artificial Sequence
  Description of Artificial Sequence: Synthetic oligonucleotide
cgaugugcggagugugugu

SEQ ID NO: 164572 - RNA, 19 nt, Artificial Sequence
  Description of Artificial Sequence: Synthetic oligonucleotide
cgucaucgagggacgacgu

SEQ ID NO: 164573 - RNA, 19 nt, Artificial Sequence
  Description of Artificial Sequence: Synthetic oligonucleotide
ccucggaacuugagcucgu

SEQ ID NO: 164574 - RNA, 19 nt, Artificial Sequence
  Description of Artificial Sequence: Synthetic oligonucleotide
gcggagugugugugcuaau

SEQ ID NO: 164575 - RNA, 19 nt, Artificial Sequence
  Description of Artificial Sequence: Synthetic oligonucleotide
ccaugccggagcccuggcu

SEQ ID NO: 164576 - RNA, 19 nt, Artificial Sequence
  Description of Artificial Sequence: Synthetic oligonucleotide
ccgagacacagugguaauu

SEQ ID NO: 164577 - RNA, 19 nt, Artificial Sequence
  Description of Artificial Sequence: Synthetic oligonucleotide
ccgacugauagagcucauu

SEQ ID NO: 164578 - RNA, 19 nt, Artificial Sequence
  Description of Artificial Sequence: Synthetic oligonucleotide
gccgggcgcugaggccuuc

SEQ ID NO: 164579 - RNA, 19 nt, Artificial Sequence
  Description of Artificial Sequence: Synthetic oligonucleotide
cggcgucaucgagggacga

SEQ ID NO: 164580 - RNA, 19 nt, Artificial Sequence
  Description of Artificial Sequence: Synthetic oligonucleotide
aaaccauugaaauccagcc

SEQ ID NO: 164581 - RNA, 19 nt, Artificial Sequence
  Description of Artificial Sequence: Synthetic oligonucleotide
aagaaugauauuuaagaag

SEQ ID NO: 164582 - RNA, 19 nt, Artificial Sequence
  Description of Artificial Sequence: Synthetic oligonucleotide
auaccugccauccacaccc

SEQ ID NO: 164583 - RNA, 19 nt, Artificial Sequence
  Description of Artificial Sequence: Synthetic oligonucleotide
uuugacaacagguauacca

SEQ ID NO: 164584 - RNA, 19 nt, Artificial Sequence
  Description of Artificial Sequence: Synthetic oligonucleotide
ucaaaguuauugauggugg

SEQ ID NO: 164585 - RNA, 19 nt, Artificial Sequence
  Description of Artificial Sequence: Synthetic oligonucleotide
caauugguaaacaugacgc

SEQ ID NO: 164586 - RNA, 19 nt, Artificial Sequence
  Description of Artificial Sequence: Synthetic oligonucleotide
auugacaucauggugaauc

SEQ ID NO: 164587 - RNA, 19 nt, Artificial Sequence
  Description of Artificial Sequence: Synthetic oligonucleotide
auagcuggcagccacaggg

SEQ ID NO: 164588 - RNA, 19 nt, Artificial Sequence
  Description of Artificial Sequence: Synthetic oligonucleotide
agugauauaccugccaucc

SEQ ID NO: 164589 - RNA, 19 nt, Artificial Sequence
  Description of Artificial Sequence: Synthetic oligonucleotide
uuccuauugauaaucagug

SEQ ID NO: 164590 - RNA, 19 nt, Artificial Sequence
  Description of Artificial Sequence: Synthetic oligonucleotide
uuagauauuuuccugugcu

SEQ ID NO: 164591 - RNA, 19 nt, Artificial Sequence
  Description of Artificial Sequence: Synthetic oligonucleotide
aauucacucauaguuuagc

SEQ ID NO: 164592 - RNA, 19 nt, Artificial Sequence
  Description of Artificial Sequence: Synthetic oligonucleotide
aguagaauagcuggcagcc

SEQ ID NO: 164593 - RNA, 19 nt, Artificial Sequence
  Description of Artificial Sequence: Synthetic oligonucleotide
uguaguacugaauauucug

SEQ ID NO: 164594 - RNA, 19 nt, Artificial Sequence
  Description of Artificial Sequence: Synthetic oligonucleotide
cauaguuuagcucugggac

SEQ ID NO: 164595 - RNA, 19 nt, Artificial Sequence
  Description of Artificial Sequence: Synthetic oligonucleotide
auauuuaagaagugagcuc

SEQ ID NO: 164596 - RNA, 19 nt, Artificial Sequence
  Description of Artificial Sequence: Synthetic oligonucleotide
uguugauccgccuacacac

SEQ ID NO: 164597 - RNA, 19 nt, Artificial Sequence
  Description of Artificial Sequence: Synthetic oligonucleotide
aggcguucggcauagaaac

SEQ ID NO: 164598 - RNA, 19 nt, Artificial Sequence
  Description of Artificial Sequence: Synthetic oligonucleotide
uucuggacgaaguugagca

SEQ ID NO: 164599 - RNA, 19 nt, Artificial Sequence
  Description of Artificial Sequence: Synthetic oligonucleotide
ugcaguagaacauguggcg

SEQ ID NO: 164600 - RNA, 19 nt, Artificial Sequence
  Description of Artificial Sequence: Synthetic oligonucleotide
ggaagaaugauauuuaaga

SEQ ID NO: 164601 - RNA, 19 nt, Artificial Sequence
  Description of Artificial Sequence: Synthetic oligonucleotide
uucgaaugaagacuucucc

SEQ ID NO: 164602 - RNA, 19 nt, Artificial Sequence
  Description of Artificial Sequence: Synthetic oligonucleotide
aagugcacgaagaaauccc

SEQ ID NO: 164603 - RNA, 19 nt, Artificial Sequence
  Description of Artificial Sequence: Synthetic oligonucleotide
gauaaucagugacaggggc

SEQ ID NO: 164604 - RNA, 19 nt, Artificial Sequence
  Description of Artificial Sequence: Synthetic oligonucleotide
cacaguauagcgcuggucc

SEQ ID NO: 164605 - RNA, 19 nt, Artificial Sequence
  Description of Artificial Sequence: Synthetic oligonucleotide
accauugaaauccagccug

SEQ ID NO: 164606 - RNA, 19 nt, Artificial Sequence
  Description of Artificial Sequence: Synthetic oligonucleotide
ugaauauucuggacgaagu

SEQ ID NO: 164607 - RNA, 19 nt, Artificial Sequence
  Description of Artificial Sequence: Synthetic oligonucleotide
aguacgagaaaauucugca

SEQ ID NO: 164608 - RNA, 19 nt, Artificial Sequence
  Description of Artificial Sequence: Synthetic oligonucleotide
gucguuguaauccuccugg

SEQ ID NO: 164609 - RNA, 19 nt, Artificial Sequence
  Description of Artificial Sequence: Synthetic oligonucleotide
uuggcuacaggacauguga

SEQ ID NO: 164610 - RNA, 19 nt, Artificial Sequence
  Description of Artificial Sequence: Synthetic oligonucleotide
auugguaaacaugacgcac

SEQ ID NO: 164611 - RNA, 19 nt, Artificial Sequence
  Description of Artificial Sequence: Synthetic oligonucleotide
ugauaaucagugacagggg

SEQ ID NO: 164612 - RNA, 19 nt, Artificial Sequence
  Description of Artificial Sequence: Synthetic oligonucleotide
gaggucaugaggcaucagg

SEQ ID NO: 164613 - RNA, 19 nt, Artificial Sequence
  Description of Artificial Sequence: Synthetic oligonucleotide
uuuaaccuuggcacugugg

SEQ ID NO: 164614 - RNA, 19 nt, Artificial Sequence
  Description of Artificial Sequence: Synthetic oligonucleotide
aauugguaaacaugacgca

SEQ ID NO: 164615 - RNA, 19 nt, Artificial Sequence
  Description of Artificial Sequence: Synthetic oligonucleotide
ugauauaccugccauccac

SEQ ID NO: 164616 - RNA, 19 nt, Artificial Sequence
  Description of Artificial Sequence: Synthetic oligonucleotide
uacgagaaaauucugcaau

SEQ ID NO: 164617 - RNA, 19 nt, Artificial Sequence
  Description of Artificial Sequence: Synthetic oligonucleotide
caucaggucaaucuugagg

SEQ ID NO: 164618 - RNA, 19 nt, Artificial Sequence
  Description of Artificial Sequence: Synthetic oligonucleotide
uugcaguagaacauguggc

SEQ ID NO: 164619 - RNA, 19 nt, Artificial Sequence
  Description of Artificial Sequence: Synthetic oligonucleotide
uaagcccgaaccaaucagg

SEQ ID NO: 164620 - RNA, 19 nt, Artificial Sequence
  Description of Artificial Sequence: Synthetic oligonucleotide
cucauauuacccacgcugg

SEQ ID NO: 164621 - RNA, 19 nt, Artificial Sequence
  Description of Artificial Sequence: Synthetic oligonucleotide
ugaugguggccucaaaacc

SEQ ID NO: 164622 - RNA, 19 nt, Artificial Sequence
  Description of Artificial Sequence: Synthetic oligonucleotide
uuaagcccgaaccaaucag

SEQ ID NO: 164623 - RNA, 19 nt, Artificial Sequence
  Description of Artificial Sequence: Synthetic oligonucleotide
aaugaaccugguuacagua

SEQ ID NO: 164624 - RNA, 19 nt, Artificial Sequence
  Description of Artificial Sequence: Synthetic oligonucleotide
ugugguuguaacauaugga

SEQ ID NO: 164625 - RNA, 19 nt, Artificial Sequence
  Description of Artificial Sequence: Synthetic oligonucleotide
uguaacauauggaguccgg

SEQ ID NO: 164626 - RNA, 19 nt, Artificial Sequence
  Description of Artificial Sequence: Synthetic oligonucleotide
gaggauucuguuuaccagc

SEQ ID NO: 164627 - RNA, 19 nt, Artificial Sequence
  Description of Artificial Sequence: Synthetic oligonucleotide
ugagcuuaagcccgaacca

SEQ ID NO: 164628 - RNA, 19 nt, Artificial Sequence
  Description of Artificial Sequence: Synthetic oligonucleotide
uagaugaucucuuuggcua

SEQ ID NO: 164629 - RNA, 19 nt, Artificial Sequence
  Description of Artificial Sequence: Synthetic oligonucleotide
aacauauggaguccgguuu

SEQ ID NO: 164630 - RNA, 19 nt, Artificial Sequence
  Description of Artificial Sequence: Synthetic oligonucleotide
ucauauuacccacgcuggg

SEQ ID NO: 164631 - RNA, 19 nt, Artificial Sequence
  Description of Artificial Sequence: Synthetic oligonucleotide
acaugugacaucaugacca

SEQ ID NO: 164632 - RNA, 19 nt, Artificial Sequence
  Description of Artificial Sequence: Synthetic oligonucleotide
auaaucagugacaggggcc

SEQ ID NO: 164633 - RNA, 19 nt, Artificial Sequence
  Description of Artificial Sequence: Synthetic oligonucleotide
ucugguagcggguaagcgc

SEQ ID NO: 164634 - RNA, 19 nt, Artificial Sequence
  Description of Artificial Sequence: Synthetic oligonucleotide
acaguauagcgcugguccc

SEQ ID NO: 164635 - RNA, 19 nt, Artificial Sequence
  Description of Artificial Sequence: Synthetic oligonucleotide
ggaguauccacauacucag

SEQ ID NO: 164636 - RNA, 19 nt, Artificial Sequence
  Description of Artificial Sequence: Synthetic oligonucleotide
cuugucguuguaauccucc

SEQ ID NO: 164637 - RNA, 19 nt, Artificial Sequence
  Description of Artificial Sequence: Synthetic oligonucleotide
uaacucacuguccaguuuc

SEQ ID NO: 164638 - RNA, 19 nt, Artificial Sequence
  Description of Artificial Sequence: Synthetic oligonucleotide
gaagguacgguucugccuc

SEQ ID NO: 164639 - RNA, 19 nt, Artificial Sequence
  Description of Artificial Sequence: Synthetic oligonucleotide
ucaaugaaccugguuacag

SEQ ID NO: 164640 - RNA, 19 nt, Artificial Sequence
  Description of Artificial Sequence: Synthetic oligonucleotide
aaccauugaaauccagccu

SEQ ID NO: 164641 - RNA, 19 nt, Artificial Sequence
  Description of Artificial Sequence: Synthetic oligonucleotide
aguugugugaccaggauca

SEQ ID NO: 164642 - RNA, 19 nt, Artificial Sequence
  Description of Artificial Sequence: Synthetic oligonucleotide
auauaccugccauccacac

SEQ ID NO: 164643 - RNA, 19 nt, Artificial Sequence
  Description of Artificial Sequence: Synthetic oligonucleotide
gacaugugacaucaugacc

SEQ ID NO: 164644 - RNA, 19 nt, Artificial Sequence
  Description of Artificial Sequence: Synthetic oligonucleotide
ucgaaugaagacuucuccu

SEQ ID NO: 164645 - RNA, 19 nt, Artificial Sequence
  Description of Artificial Sequence: Synthetic oligonucleotide
uugaugguggccucaaaac

SEQ ID NO: 164646 - RNA, 19 nt, Artificial Sequence
  Description of Artificial Sequence: Synthetic oligonucleotide
uaugcccgcucuuugagug

SEQ ID NO: 164647 - RNA, 19 nt, Artificial Sequence
  Description of Artificial Sequence: Synthetic oligonucleotide
cuggauauagaaccagagc

SEQ ID NO: 164648 - RNA, 19 nt, Artificial Sequence
  Description of Artificial Sequence: Synthetic oligonucleotide
aggaagguacgguucugcc

SEQ ID NO: 164649 - RNA, 19 nt, Artificial Sequence
  Description of Artificial Sequence: Synthetic oligonucleotide
uucgcugccgcaaagugaa

SEQ ID NO: 164650 - RNA, 19 nt, Artificial Sequence
  Description of Artificial Sequence: Synthetic oligonucleotide
gauauagaaccagagcuuc

SEQ ID NO: 164651 - RNA, 19 nt, Artificial Sequence
  Description of Artificial Sequence: Synthetic oligonucleotide
guggcagcacaguauagcg

SEQ ID NO: 164652 - RNA, 19 nt, Artificial Sequence
  Description of Artificial Sequence: Synthetic oligonucleotide
gucagcgugagucauugcc

SEQ ID NO: 164653 - RNA, 19 nt, Artificial Sequence
  Description of Artificial Sequence: Synthetic oligonucleotide
accaugaacucacuguaug

SEQ ID NO: 164654 - RNA, 19 nt, Artificial Sequence
  Description of Artificial Sequence: Synthetic oligonucleotide
ugugcuguagacacuuagu

SEQ ID NO: 164655 - RNA, 19 nt, Artificial Sequence
  Description of Artificial Sequence: Synthetic oligonucleotide
auaguuuagcucugggaca

SEQ ID NO: 164656 - RNA, 19 nt, Artificial Sequence
  Description of Artificial Sequence: Synthetic oligonucleotide
gugaauccgaaauucacuc

SEQ ID NO: 164657 - RNA, 19 nt, Artificial Sequence
  Description of Artificial Sequence: Synthetic oligonucleotide
uggugaauccgaaauucac

SEQ ID NO: 164658 - RNA, 19 nt, Artificial Sequence
  Description of Artificial Sequence: Synthetic oligonucleotide
cugguagcggguaagcgcc

SEQ ID NO: 164659 - RNA, 19 nt, Artificial Sequence
  Description of Artificial Sequence: Synthetic oligonucleotide
aguguugauccgccuacac

SEQ ID NO: 164660 - RNA, 19 nt, Artificial Sequence
  Description of Artificial Sequence: Synthetic oligonucleotide
ucaguguugauccgccuac

SEQ ID NO: 164661 - RNA, 19 nt, Artificial Sequence
  Description of Artificial Sequence: Synthetic oligonucleotide
acaugacgcacacagacau

SEQ ID NO: 164662 - RNA, 19 nt, Artificial Sequence
  Description of Artificial Sequence: Synthetic oligonucleotide
uauaccagugggucaaggu

SEQ ID NO: 164663 - RNA, 19 nt, Artificial Sequence
  Description of Artificial Sequence: Synthetic oligonucleotide
agcgccuuccuauugauaa

SEQ ID NO: 164664 - RNA, 19 nt, Artificial Sequence
  Description of Artificial Sequence: Synthetic oligonucleotide
aggaguacgagaaaauucu

SEQ ID NO: 164665 - RNA, 19 nt, Artificial Sequence
  Description of Artificial Sequence: Synthetic oligonucleotide
aaccauauuuaaccaguaa

SEQ ID NO: 164666 - RNA, 19 nt, Artificial Sequence
  Description of Artificial Sequence: Synthetic oligonucleotide
gaaccaaucaggaaaucuc

SEQ ID NO: 164667 - RNA, 19 nt, Artificial Sequence
  Description of Artificial Sequence: Synthetic oligonucleotide
ccaguaauaacacacaaca

SEQ ID NO: 164668 - RNA, 19 nt, Artificial Sequence
  Description of Artificial Sequence: Synthetic oligonucleotide
gaguacgagaaaauucugc

SEQ ID NO: 164669 - RNA, 19 nt, Artificial Sequence
  Description of Artificial Sequence: Synthetic oligonucleotide
cucgccuuuauccacugag

SEQ ID NO: 164670 - RNA, 19 nt, Artificial Sequence
  Description of Artificial Sequence: Synthetic oligonucleotide
uccucuacuggcuuccuga

SEQ ID NO: 164671 - RNA, 19 nt, Artificial Sequence
  Description of Artificial Sequence: Synthetic oligonucleotide
agugcacgaagaaaucccc

SEQ ID NO: 164672 - RNA, 19 nt, Artificial Sequence
  Description of Artificial Sequence: Synthetic oligonucleotide
uucucugaccacauuuaga

SEQ ID NO: 164673 - RNA, 19 nt, Artificial Sequence
  Description of Artificial Sequence: Synthetic oligonucleotide
ugauccgccuacacacucg

SEQ ID NO: 164674 - RNA, 19 nt, Artificial Sequence
  Description of Artificial Sequence: Synthetic oligonucleotide
uagagcagaucuuccacca

SEQ ID NO: 164675 - RNA, 19 nt, Artificial Sequence
  Description of Artificial Sequence: Synthetic oligonucleotide
auucuggacgaaguugagc

SEQ ID NO: 164676 - RNA, 19 nt, Artificial Sequence
  Description of Artificial Sequence: Synthetic oligonucleotide
uuuggcuacaggacaugug

SEQ ID NO: 164677 - RNA, 19 nt, Artificial Sequence
  Description of Artificial Sequence: Synthetic oligonucleotide
ucaagcaguugucaaggaa

SEQ ID NO: 164678 - RNA, 19 nt, Artificial Sequence
  Description of Artificial Sequence: Synthetic oligonucleotide
accaguaauaacacacaac

SEQ ID NO: 164679 - RNA, 19 nt, Artificial Sequence
  Description of Artificial Sequence: Synthetic oligonucleotide
uauaccugccauccacacc

SEQ ID NO: 164680 - RNA, 19 nt, Artificial Sequence
  Description of Artificial Sequence: Synthetic oligonucleotide
aaauucacucauaguuuag

SEQ ID NO: 164681 - RNA, 19 nt, Artificial Sequence
  Description of Artificial Sequence: Synthetic oligonucleotide
ucagcgugagucauugccu

SEQ ID NO: 164682 - RNA, 19 nt, Artificial Sequence
  Description of Artificial Sequence: Synthetic oligonucleotide
ugaauccgaaauucacuca

SEQ ID NO: 164683 - RNA, 19 nt, Artificial Sequence
  Description of Artificial Sequence: Synthetic oligonucleotide
uccgccuacacacucgccu

SEQ ID NO: 164684 - RNA, 19 nt, Artificial Sequence
  Description of Artificial Sequence: Synthetic oligonucleotide
acauagagcagaucuucca

SEQ ID NO: 164685 - RNA, 19 nt, Artificial Sequence
  Description of Artificial Sequence: Synthetic oligonucleotide
cuauaggcaaagcuguguc

SEQ ID NO: 164686 - RNA, 19 nt, Artificial Sequence
  Description of Artificial Sequence: Synthetic oligonucleotide
cauggugaauccgaaauuc

SEQ ID NO: 164687 - RNA, 19 nt, Artificial Sequence
  Description of Artificial Sequence: Synthetic oligonucleotide
uagacacuuagucgggcca

SEQ ID NO: 164688 - RNA, 19 nt, Artificial Sequence
  Description of Artificial Sequence: Synthetic oligonucleotide
gugucugagcuuaagcccg

SEQ ID NO: 164689 - RNA, 19 nt, Artificial Sequence
  Description of Artificial Sequence: Synthetic oligonucleotide
caguaauaacacacaacac

SEQ ID NO: 164690 - RNA, 19 nt, Artificial Sequence
  Description of Artificial Sequence: Synthetic oligonucleotide
aggaagaaugauauuuaag

SEQ ID NO: 164691 - RNA, 19 nt, Artificial Sequence
  Description of Artificial Sequence: Synthetic oligonucleotide
ucauugugcagggauggcc

SEQ ID NO: 164692 - RNA, 19 nt, Artificial Sequence
  Description of Artificial Sequence: Synthetic oligonucleotide
agcauuagcugcaagcuca

SEQ ID NO: 164693 - RNA, 19 nt, Artificial Sequence
  Description of Artificial Sequence: Synthetic oligonucleotide
uccuauugauaaucaguga

SEQ ID NO: 164694 - RNA, 19 nt, Artificial Sequence
  Description of Artificial Sequence: Synthetic oligonucleotide
gaggaguauccacauacuc

SEQ ID NO: 164695 - RNA, 19 nt, Artificial Sequence
  Description of Artificial Sequence: Synthetic oligonucleotide
auucgaaugaagacuucuc

SEQ ID NO: 164696 - RNA, 19 nt, Artificial Sequence
  Description of Artificial Sequence: Synthetic oligonucleotide
ucauguaguacugaauauu

SEQ ID NO: 164697 - RNA, 19 nt, Artificial Sequence
  Description of Artificial Sequence: Synthetic oligonucleotide
uaguugaaugccuucucaa

SEQ ID NO: 164698 - RNA, 19 nt, Artificial Sequence
  Description of Artificial Sequence: Synthetic oligonucleotide
agaccacucagugugagcu

SEQ ID NO: 164699 - RNA, 19 nt, Artificial Sequence
  Description of Artificial Sequence: Synthetic oligonucleotide
ugaggaguauccacauacu

SEQ ID NO: 164700 - RNA, 19 nt, Artificial Sequence
  Description of Artificial Sequence: Synthetic oligonucleotide
uccccgguguaguugaagc

SEQ ID NO: 164701 - RNA, 19 nt, Artificial Sequence
  Description of Artificial Sequence: Synthetic oligonucleotide
uuccacauaugcccgcucu

SEQ ID NO: 164702 - RNA, 19 nt, Artificial Sequence
  Description of Artificial Sequence: Synthetic oligonucleotide
guagacacuuagucgggcc

SEQ ID NO: 164703 - RNA, 19 nt, Artificial Sequence
  Description of Artificial Sequence: Synthetic oligonucleotide
guuggccucucauauuacc

SEQ ID NO: 164704 - RNA, 19 nt, Artificial Sequence
  Description of Artificial Sequence: Synthetic oligonucleotide
uacuagggucuucauggca

SEQ ID NO: 164705 - RNA, 19 nt, Artificial Sequence
  Description of Artificial Sequence: Synthetic oligonucleotide
ggaggauucuguuuaccag

SEQ ID NO: 164706 - RNA, 19 nt, Artificial Sequence
  Description of Artificial Sequence: Synthetic oligonucleotide
cauaugcccgcucuuugag

SEQ ID NO: 164707 - RNA, 19 nt, Artificial Sequence
  Description of Artificial Sequence: Synthetic oligonucleotide
uccgaaauucacucauagu

SEQ ID NO: 164708 - RNA, 19 nt, Artificial Sequence
  Description of Artificial Sequence: Synthetic oligonucleotide
auaccagugggucaagguu

SEQ ID NO: 164709 - RNA, 19 nt, Artificial Sequence
  Description of Artificial Sequence: Synthetic oligonucleotide
gugcuguagacacuuaguc

SEQ ID NO: 164710 - RNA, 19 nt, Artificial Sequence
  Description of Artificial Sequence: Synthetic oligonucleotide
gagguagcaagagaggcca

SEQ ID NO: 164711 - RNA, 19 nt, Artificial Sequence
  Description of Artificial Sequence: Synthetic oligonucleotide
gaaguagcgcuugauggac

SEQ ID NO: 164712 - RNA, 19 nt, Artificial Sequence
  Description of Artificial Sequence: Synthetic oligonucleotide
uuacuagggucuucauggc

SEQ ID NO: 164713 - RNA, 19 nt, Artificial Sequence
  Description of Artificial Sequence: Synthetic oligonucleotide
cuaucauggagaaggcuca

SEQ ID NO: 164714 - RNA, 19 nt, Artificial Sequence
  Description of Artificial Sequence: Synthetic oligonucleotide
uccagugucagucggccua

SEQ ID NO: 164715 - RNA, 19 nt, Artificial Sequence
  Description of Artificial Sequence: Synthetic oligonucleotide
gugucagucggccuaacuc

SEQ ID NO: 164716 - RNA, 19 nt, Artificial Sequence
  Description of Artificial Sequence: Synthetic oligonucleotide
uggccucucauauuaccca

SEQ ID NO: 164717 - RNA, 19 nt, Artificial Sequence
  Description of Artificial Sequence: Synthetic oligonucleotide
agcagugauauaccugcca

SEQ ID NO: 164718 - RNA, 19 nt, Artificial Sequence
  Description of Artificial Sequence: Synthetic oligonucleotide
cuguagacacuuagucggg

SEQ ID NO: 164719 - RNA, 19 nt, Artificial Sequence
  Description of Artificial Sequence: Synthetic oligonucleotide
uacgguucugccuccccag

SEQ ID NO: 164720 - RNA, 19 nt, Artificial Sequence
  Description of Artificial Sequence: Synthetic oligonucleotide
ugccgcaaagugaaagcac

SEQ ID NO: 164721 - RNA, 19 nt, Artificial Sequence
  Description of Artificial Sequence: Synthetic oligonucleotide
acgauccucaauccgcuca

SEQ ID NO: 164722 - RNA, 19 nt, Artificial Sequence
  Description of Artificial Sequence: Synthetic oligonucleotide
agcaaaccacuucgcagag

SEQ ID NO: 164723 - RNA, 19 nt, Artificial Sequence
  Description of Artificial Sequence: Synthetic oligonucleotide
uccgcucagucuccguggg

SEQ ID NO: 164724 - RNA, 19 nt, Artificial Sequence
  Description of Artificial Sequence: Synthetic oligonucleotide
aacaugacgcacacagaca

SEQ ID NO: 164725 - RNA, 19 nt, Artificial Sequence
  Description of Artificial Sequence: Synthetic oligonucleotide
uccacaaggaagguacggu

SEQ ID NO: 164726 - RNA, 19 nt, Artificial Sequence
  Description of Artificial Sequence: Synthetic oligonucleotide
cacuucgcagagugcagcg

SEQ ID NO: 164727 - RNA, 19 nt, Artificial Sequence
  Description of Artificial Sequence: Synthetic oligonucleotide
ucggccuaacucacugucc

SEQ ID NO: 164728 - RNA, 19 nt, Artificial Sequence
  Description of Artificial Sequence: Synthetic oligonucleotide
uggacaucuuagagguggc

SEQ ID NO: 164729 - RNA, 19 nt, Artificial Sequence
  Description of Artificial Sequence: Synthetic oligonucleotide
cagcaaaccacuucgcaga

SEQ ID NO: 164730 - RNA, 19 nt, Artificial Sequence
  Description of Artificial Sequence: Synthetic oligonucleotide
ccuuagaugggccaccagc

SEQ ID NO: 164731 - RNA, 19 nt, Artificial Sequence
  Description of Artificial Sequence: Synthetic oligonucleotide
cauucgcugccgcaaagug

SEQ ID NO: 164732 - RNA, 19 nt, Artificial Sequence
  Description of Artificial Sequence: Synthetic oligonucleotide
ugcucauucgcagggccag

SEQ ID NO: 164733 - RNA, 19 nt, Artificial Sequence
  Description of Artificial Sequence: Synthetic oligonucleotide
cuuuauccacugagguagc

SEQ ID NO: 164734 - RNA, 19 nt, Artificial Sequence
  Description of Artificial Sequence: Synthetic oligonucleotide
ugguaggcuccuuccgggg

SEQ ID NO: 164735 - RNA, 19 nt, Artificial Sequence
  Description of Artificial Sequence: Synthetic oligonucleotide
ugaguaguucauugacauc

SEQ ID NO: 164736 - RNA, 19 nt, Artificial Sequence
  Description of Artificial Sequence: Synthetic oligonucleotide
aggcgugugggugugaugu

SEQ ID NO: 164737 - RNA, 19 nt, Artificial Sequence
  Description of Artificial Sequence: Synthetic oligonucleotide
aaccugguuacaguagaau

SEQ ID NO: 164738 - RNA, 19 nt, Artificial Sequence
  Description of Artificial Sequence: Synthetic oligonucleotide
cuuaagcccgaaccaauca

SEQ ID NO: 164739 - RNA, 19 nt, Artificial Sequence
  Description of Artificial Sequence: Synthetic oligonucleotide
gggcaggguaccuauaggc

SEQ ID NO: 164740 - RNA, 19 nt, Artificial Sequence
  Description of Artificial Sequence: Synthetic oligonucleotide
agugugagcuccguggggu

SEQ ID NO: 164741 - RNA, 19 nt, Artificial Sequence
  Description of Artificial Sequence: Synthetic oligonucleotide
cauggcuggcuggauauag

SEQ ID NO: 164742 - RNA, 19 nt, Artificial Sequence
  Description of Artificial Sequence: Synthetic oligonucleotide
uugagcauucgcugccgca

SEQ ID NO: 164743 - RNA, 19 nt, Artificial Sequence
  Description of Artificial Sequence: Synthetic oligonucleotide
aucugguagcggguaagcg

SEQ ID NO: 164744 - RNA, 19 nt, Artificial Sequence
  Description of Artificial Sequence: Synthetic oligonucleotide
aucaagaagaugggcagaa

SEQ ID NO: 164745 - RNA, 19 nt, Artificial Sequence
  Description of Artificial Sequence: Synthetic oligonucleotide
auuacccacgcugggaaga

SEQ ID NO: 164746 - RNA, 19 nt, Artificial Sequence
  Description of Artificial Sequence: Synthetic oligonucleotide
gauggaccuuagaugggcc

SEQ ID NO: 164747 - RNA, 19 nt, Artificial Sequence
  Description of Artificial Sequence: Synthetic oligonucleotide
guaagcgccuuccuauuga

SEQ ID NO: 164748 - RNA, 19 nt, Artificial Sequence
  Description of Artificial Sequence: Synthetic oligonucleotide
aguugagcauucgcugccg

SEQ ID NO: 164749 - RNA, 19 nt, Artificial Sequence
  Description of Artificial Sequence: Synthetic oligonucleotide
cacacucgccuuuauccac

SEQ ID NO: 164750 - RNA, 19 nt, Artificial Sequence
  Description of Artificial Sequence: Synthetic oligonucleotide
cacauaugcccgcucuuug

SEQ ID NO: 164751 - RNA, 19 nt, Artificial Sequence
  Description of Artificial Sequence: Synthetic oligonucleotide
cuuagaugggccaccagcu

SEQ ID NO: 164752 - RNA, 19 nt, Artificial Sequence
  Description of Artificial Sequence: Synthetic oligonucleotide
aagcccgaaccaaucagga

SEQ ID NO: 164753 - RNA, 19 nt, Artificial Sequence
  Description of Artificial Sequence: Synthetic oligonucleotide
guacgagaaaauucugcaa

SEQ ID NO: 164754 - RNA, 19 nt, Artificial Sequence
  Description of Artificial Sequence: Synthetic oligonucleotide
aggucgguuccaucacuuc

SEQ ID NO: 164755 - RNA, 19 nt, Artificial Sequence
  Description of Artificial Sequence: Synthetic oligonucleotide
uaucauggagaaggcucag

SEQ ID NO: 164756 - RNA, 19 nt, Artificial Sequence
  Description of Artificial Sequence: Synthetic oligonucleotide
ucguuguaauccuccugga

SEQ ID NO: 164757 - RNA, 19 nt, Artificial Sequence
  Description of Artificial Sequence: Synthetic oligonucleotide
agcgugagucauugccuuc

SEQ ID NO: 164758 - RNA, 19 nt, Artificial Sequence
  Description of Artificial Sequence: Synthetic oligonucleotide
uguuggccucucauauuac

SEQ ID NO: 164759 - RNA, 19 nt, Artificial Sequence
  Description of Artificial Sequence: Synthetic oligonucleotide
aguauagcgcuggucccag

SEQ ID NO: 164760 - RNA, 19 nt, Artificial Sequence
  Description of Artificial Sequence: Synthetic oligonucleotide
agugucagucggccuaacu

SEQ ID NO: 164761 - RNA, 19 nt, Artificial Sequence
  Description of Artificial Sequence: Synthetic oligonucleotide
aaacuccucaggaguacga

SEQ ID NO: 164762 - RNA, 19 nt, Artificial Sequence
  Description of Artificial Sequence: Synthetic oligonucleotide
agaaaccauugaaauccag

SEQ ID NO: 164763 - RNA, 19 nt, Artificial Sequence
  Description of Artificial Sequence: Synthetic oligonucleotide
aucgucaauguuggaagca

SEQ ID NO: 164764 - RNA, 19 nt, Artificial Sequence
  Description of Artificial Sequence: Synthetic oligonucleotide
agcauucgcugccgcaaag

SEQ ID NO: 164765 - RNA, 19 nt, Artificial Sequence
  Description of Artificial Sequence: Synthetic oligonucleotide
guguuggccucucauauua

SEQ ID NO: 164766 - RNA, 19 nt, Artificial Sequence
  Description of Artificial Sequence: Synthetic oligonucleotide
gcuuugacaacagguauac

SEQ ID NO: 164767 - RNA, 19 nt, Artificial Sequence
  Description of Artificial Sequence: Synthetic oligonucleotide
auuuuaaccuuggcacugu

SEQ ID NO: 164768 - RNA, 19 nt, Artificial Sequence
  Description of Artificial Sequence: Synthetic oligonucleotide
ucaauguuggaagcagauu

SEQ ID NO: 164769 - RNA, 19 nt, Artificial Sequence
  Description of Artificial Sequence: Synthetic oligonucleotide
auauucgaaugaagacuuc

SEQ ID NO: 164770 - RNA, 19 nt, Artificial Sequence
  Description of Artificial Sequence: Synthetic oligonucleotide
uggcauaguugaaugccuu

SEQ ID NO: 164771 - RNA, 19 nt, Artificial Sequence
  Description of Artificial Sequence: Synthetic oligonucleotide
guguugauccgccuacaca

SEQ ID NO: 164772 - RNA, 19 nt, Artificial Sequence
  Description of Artificial Sequence: Synthetic oligonucleotide
agacacuuagucgggccag

SEQ ID NO: 164773 - RNA, 19 nt, Artificial Sequence
  Description of Artificial Sequence: Synthetic oligonucleotide
cagugauauaccugccauc

SEQ ID NO: 164774 - RNA, 19 nt, Artificial Sequence
  Description of Artificial Sequence: Synthetic oligonucleotide
auaugcccgcucuuugagu

SEQ ID NO: 164775 - RNA, 19 nt, Artificial Sequence
  Description of Artificial Sequence: Synthetic oligonucleotide
guagugcugcuugaagcag

SEQ ID NO: 164776 - RNA, 19 nt, Artificial Sequence
  Description of Artificial Sequence: Synthetic oligonucleotide
gaucagguauuccuuuacu

SEQ ID NO: 164777 - RNA, 19 nt, Artificial Sequence
  Description of Artificial Sequence: Synthetic oligonucleotide
uuuaagaagugagcucauu

SEQ ID NO: 164778 - RNA, 19 nt, Artificial Sequence
  Description of Artificial Sequence: Synthetic oligonucleotide
accugcccauauucgaaug

SEQ ID NO: 164779 - RNA, 19 nt, Artificial Sequence
  Description of Artificial Sequence: Synthetic oligonucleotide
ucuccguggguuguccuug

SEQ ID NO: 164780 - RNA, 19 nt, Artificial Sequence
  Description of Artificial Sequence: Synthetic oligonucleotide
agggauggccacccuaggu

SEQ ID NO: 164781 - RNA, 19 nt, Artificial Sequence
  Description of Artificial Sequence: Synthetic oligonucleotide
ugucugagcuuaagcccga

SEQ ID NO: 164782 - RNA, 19 nt, Artificial Sequence
  Description of Artificial Sequence: Synthetic oligonucleotide
uggaccuuagaugggccac

SEQ ID NO: 164783 - RNA, 19 nt, Artificial Sequence
  Description of Artificial Sequence: Synthetic oligonucleotide
uaagcgccuuccuauugau

SEQ ID NO: 164784 - RNA, 19 nt, Artificial Sequence
  Description of Artificial Sequence: Synthetic oligonucleotide
gucggccuaacucacuguc

SEQ ID NO: 164785 - RNA, 19 nt, Artificial Sequence
  Description of Artificial Sequence: Synthetic oligonucleotide
cagcacaguauagcgcugg

SEQ ID NO: 164786 - RNA, 19 nt, Artificial Sequence
  Description of Artificial Sequence: Synthetic oligonucleotide
guggccaaggacaucguca

SEQ ID NO: 164787 - RNA, 19 nt, Artificial Sequence
  Description of Artificial Sequence: Synthetic oligonucleotide
cauauuacccacgcuggga

SEQ ID NO: 164788 - RNA, 19 nt, Artificial Sequence
  Description of Artificial Sequence: Synthetic oligonucleotide
cacucauaguuuagcucug

SEQ ID NO: 164789 - RNA, 19 nt, Artificial Sequence
  Description of Artificial Sequence: Synthetic oligonucleotide
agaugggcagaaaaguuuu

SEQ ID NO: 164790 - RNA, 19 nt, Artificial Sequence
  Description of Artificial Sequence: Synthetic oligonucleotide
guagaccucagccccaucu

SEQ ID NO: 164791 - RNA, 19 nt, Artificial Sequence
  Description of Artificial Sequence: Synthetic oligonucleotide
ccauugaaauccagccugg

SEQ ID NO: 164792 - RNA, 19 nt, Artificial Sequence
  Description of Artificial Sequence: Synthetic oligonucleotide
gggaggauucuguuuacca

SEQ ID NO: 164793 - RNA, 19 nt, Artificial Sequence
  Description of Artificial Sequence: Synthetic oligonucleotide
acaugagcuuggagaaaac

SEQ ID NO: 164794 - RNA, 19 nt, Artificial Sequence
  Description of Artificial Sequence: Synthetic oligonucleotide
gggacgauccucaauccgc

SEQ ID NO: 164795 - RNA, 19 nt, Artificial Sequence
  Description of Artificial Sequence: Synthetic oligonucleotide
ucggauggacagguccagg

SEQ ID NO: 164796 - RNA, 19 nt, Artificial Sequence
  Description of Artificial Sequence: Synthetic oligonucleotide
ggggacgauccucaauccg

SEQ ID NO: 164797 - RNA, 19 nt, Artificial Sequence
  Description of Artificial Sequence: Synthetic oligonucleotide
gggcugagcagugauauac

SEQ ID NO: 164798 - RNA, 19 nt, Artificial Sequence
  Description of Artificial Sequence: Synthetic oligonucleotide
caugacgcacacagacaug

SEQ ID NO: 164799 - RNA, 19 nt, Artificial Sequence
  Description of Artificial Sequence: Synthetic oligonucleotide
uuggucagguagagacaca

SEQ ID NO: 164800 - RNA, 19 nt, Artificial Sequence
  Description of Artificial Sequence: Synthetic oligonucleotide
augaucucuuuggcuacag

SEQ ID NO: 164801 - RNA, 19 nt, Artificial Sequence
  Description of Artificial Sequence: Synthetic oligonucleotide
ccuuccuauugauaaucag

SEQ ID NO: 164802 - RNA, 19 nt, Artificial Sequence
  Description of Artificial Sequence: Synthetic oligonucleotide
aggaucagguauuccuuua

SEQ ID NO: 164803 - RNA, 19 nt, Artificial Sequence
  Description of Artificial Sequence: Synthetic oligonucleotide
acuugucguuguaauccuc

SEQ ID NO: 164804 - RNA, 19 nt, Artificial Sequence
  Description of Artificial Sequence: Synthetic oligonucleotide
guuauugaugguggccuca

SEQ ID NO: 164805 - RNA, 19 nt, Artificial Sequence
  Description of Artificial Sequence: Synthetic oligonucleotide
aacuugugugguggccaag

SEQ ID NO: 164806 - RNA, 19 nt, Artificial Sequence
  Description of Artificial Sequence: Synthetic oligonucleotide
ccucucauauuacccacgc

SEQ ID NO: 164807 - RNA, 19 nt, Artificial Sequence
  Description of Artificial Sequence: Synthetic oligonucleotide
caacagggauguuaaagcu

SEQ ID NO: 164808 - RNA, 19 nt, Artificial Sequence
  Description of Artificial Sequence: Synthetic oligonucleotide
ccacccuagguguuggugc

SEQ ID NO: 164809 - RNA, 19 nt, Artificial Sequence
  Description of Artificial Sequence: Synthetic oligonucleotide
cagaacccgcaaaagcuga

SEQ ID NO: 164810 - RNA, 19 nt, Artificial Sequence
  Description of Artificial Sequence: Synthetic oligonucleotide
gguaagcgccuuccuauug

SEQ ID NO: 164811 - RNA, 19 nt, Artificial Sequence
  Description of Artificial Sequence: Synthetic oligonucleotide
gccgcaaagugaaagcacc

SEQ ID NO: 164812 - RNA, 19 nt, Artificial Sequence
  Description of Artificial Sequence: Synthetic oligonucleotide
uccacauaugcccgcucuu

SEQ ID NO: 164813 - RNA, 19 nt, Artificial Sequence
  Description of Artificial Sequence: Synthetic oligonucleotide
caucuuagagguggcaaca

SEQ ID NO: 164814 - RNA, 19 nt, Artificial Sequence
  Description of Artificial Sequence: Synthetic oligonucleotide
ugggugugauguccucuac

SEQ ID NO: 164815 - RNA, 19 nt, Artificial Sequence
  Description of Artificial Sequence: Synthetic oligonucleotide
gcccgaaccaaucaggaaa

SEQ ID NO: 164816 - RNA, 19 nt, Artificial Sequence
  Description of Artificial Sequence: Synthetic oligonucleotide
gcuugaagcagcauuagcu

SEQ ID NO: 164817 - RNA, 19 nt, Artificial Sequence
  Description of Artificial Sequence: Synthetic oligonucleotide
cuuugacaacagguauacc

SEQ ID NO: 164818 - RNA, 19 nt, Artificial Sequence
  Description of Artificial Sequence: Synthetic oligonucleotide
aguguuggccucucauauu

SEQ ID NO: 164819 - RNA, 19 nt, Artificial Sequence
  Description of Artificial Sequence: Synthetic oligonucleotide
cgaaugaagacuucuccuc

SEQ ID NO: 164820 - RNA, 19 nt, Artificial Sequence
  Description of Artificial Sequence: Synthetic oligonucleotide
ugaccacauuuagauauuu

SEQ ID NO: 164821 - RNA, 19 nt, Artificial Sequence
  Description of Artificial Sequence: Synthetic oligonucleotide
auucgcugccgcaaaguga

SEQ ID NO: 164822 - RNA, 19 nt, Artificial Sequence
  Description of Artificial Sequence: Synthetic oligonucleotide
ggucgguuccaucacuuca

SEQ ID NO: 164823 - RNA, 19 nt, Artificial Sequence
  Description of Artificial Sequence: Synthetic oligonucleotide
uagcggguaagcgccuucc

SEQ ID NO: 164824 - RNA, 19 nt, Artificial Sequence
  Description of Artificial Sequence: Synthetic oligonucleotide
ggauguuaaagcugguagu

SEQ ID NO: 164825 - RNA, 19 nt, Artificial Sequence
  Description of Artificial Sequence: Synthetic oligonucleotide
uguggcggaagagcaucug

SEQ ID NO: 164826 - RNA, 19 nt, Artificial Sequence
  Description of Artificial Sequence: Synthetic oligonucleotide
ccugguaggcuccuuccgg

SEQ ID NO: 164827 - RNA, 19 nt, Artificial Sequence
  Description of Artificial Sequence: Synthetic oligonucleotide
guagggugcacuggcugcc

SEQ ID NO: 164828 - RNA, 19 nt, Artificial Sequence
  Description of Artificial Sequence: Synthetic oligonucleotide
caggcguucggcauagaaa

SEQ ID NO: 164829 - RNA, 19 nt, Artificial Sequence
  Description of Artificial Sequence: Synthetic oligonucleotide
gacacuuagucgggccagc

SEQ ID NO: 164830 - RNA, 19 nt, Artificial Sequence
  Description of Artificial Sequence: Synthetic oligonucleotide
ccgaaauucacucauaguu

SEQ ID NO: 164831 - RNA, 19 nt, Artificial Sequence
  Description of Artificial Sequence: Synthetic oligonucleotide
uagcgcuugauggaccuua

SEQ ID NO: 164832 - RNA, 19 nt, Artificial Sequence
  Description of Artificial Sequence: Synthetic oligonucleotide
agaacccgcaaaagcugag

SEQ ID NO: 164833 - RNA, 19 nt, Artificial Sequence
  Description of Artificial Sequence: Synthetic oligonucleotide
guacgguucugccucccca

SEQ ID NO: 164834 - RNA, 19 nt, Artificial Sequence
  Description of Artificial Sequence: Synthetic oligonucleotide
uugugcagggauggccacc

SEQ ID NO: 164835 - RNA, 19 nt, Artificial Sequence
  Description of Artificial Sequence: Synthetic oligonucleotide
ugggugcguagcaggcuga

SEQ ID NO: 164836 - RNA, 19 nt, Artificial Sequence
  Description of Artificial Sequence: Synthetic oligonucleotide
auuuaagaagugagcucau

SEQ ID NO: 164837 - RNA, 19 nt, Artificial Sequence
  Description of Artificial Sequence: Synthetic oligonucleotide
acguuccaggcguucggca

SEQ ID NO: 164838 - RNA, 19 nt, Artificial Sequence
  Description of Artificial Sequence: Synthetic oligonucleotide
ugccccuguagauccacuu

SEQ ID NO: 164839 - RNA, 19 nt, Artificial Sequence
  Description of Artificial Sequence: Synthetic oligonucleotide
uggccacccuagguguugg

SEQ ID NO: 164840 - RNA, 19 nt, Artificial Sequence
  Description of Artificial Sequence: Synthetic oligonucleotide
ggaguacgagaaaauucug

SEQ ID NO: 164841 - RNA, 19 nt, Artificial Sequence
  Description of Artificial Sequence: Synthetic oligonucleotide
guaacauauggaguccggu

SEQ ID NO: 164842 - RNA, 19 nt, Artificial Sequence
  Description of Artificial Sequence: Synthetic oligonucleotide
ccggggacgauccucaauc

SEQ ID NO: 164843 - RNA, 19 nt, Artificial Sequence
  Description of Artificial Sequence: Synthetic oligonucleotide
aggguuggucagcaugcaa

SEQ ID NO: 164844 - RNA, 19 nt, Artificial Sequence
  Description of Artificial Sequence: Synthetic oligonucleotide
cucggauggacagguccag

SEQ ID NO: 164845 - RNA, 19 nt, Artificial Sequence
  Description of Artificial Sequence: Synthetic oligonucleotide
cucaguguugauccgccua

SEQ ID NO: 164846 - RNA, 19 nt, Artificial Sequence
  Description of Artificial Sequence: Synthetic oligonucleotide
gacgauccucaauccgcuc

SEQ ID NO: 164847 - RNA, 19 nt, Artificial Sequence
  Description of Artificial Sequence: Synthetic oligonucleotide
agucuccguggguuguccu

SEQ ID NO: 164848 - RNA, 19 nt, Artificial Sequence
  Description of Artificial Sequence: Synthetic oligonucleotide
agcccgaaccaaucaggaa

SEQ ID NO: 164849 - RNA, 19 nt, Artificial Sequence
  Description of Artificial Sequence: Synthetic oligonucleotide
agcuuaagcccgaaccaau

SEQ ID NO: 164850 - RNA, 19 nt, Artificial Sequence
  Description of Artificial Sequence: Synthetic oligonucleotide
gaaccugguuacaguagaa

SEQ ID NO: 164851 - RNA, 19 nt, Artificial Sequence
  Description of Artificial Sequence: Synthetic oligonucleotide
uccggggacgauccucaau

SEQ ID NO: 164852 - RNA, 19 nt, Artificial Sequence
  Description of Artificial Sequence: Synthetic oligonucleotide
ugaggucaugaggcaucag

SEQ ID NO: 164853 - RNA, 19 nt, Artificial Sequence
  Description of Artificial Sequence: Synthetic oligonucleotide
uccguggguuguccuugca

SEQ ID NO: 164854 - RNA, 19 nt, Artificial Sequence
  Description of Artificial Sequence: Synthetic oligonucleotide
acacucgccuuuauccacu

SEQ ID NO: 164855 - RNA, 19 nt, Artificial Sequence
  Description of Artificial Sequence: Synthetic oligonucleotide
ucgcagagugcagcgcaug

SEQ ID NO: 164856 - RNA, 19 nt, Artificial Sequence
  Description of Artificial Sequence: Synthetic oligonucleotide
guccucuacuggcuuccug

SEQ ID NO: 164857 - RNA, 19 nt, Artificial Sequence
  Description of Artificial Sequence: Synthetic oligonucleotide
cacucgccuuuauccacug

SEQ ID NO: 164858 - RNA, 19 nt, Artificial Sequence
  Description of Artificial Sequence: Synthetic oligonucleotide
gggucagcgugagucauug

SEQ ID NO: 164859 - RNA, 19 nt, Artificial Sequence
  Description of Artificial Sequence: Synthetic oligonucleotide
agcggguaagcgccuuccu

SEQ ID NO: 164860 - RNA, 19 nt, Artificial Sequence
  Description of Artificial Sequence: Synthetic oligonucleotide
cuccguggguuguccuugc

SEQ ID NO: 164861 - RNA, 19 nt, Artificial Sequence
  Description of Artificial Sequence: Synthetic oligonucleotide
gaccuuagaugggccacca

SEQ ID NO: 164862 - RNA, 19 nt, Artificial Sequence
  Description of Artificial Sequence: Synthetic oligonucleotide
gucaauguuggaagcagau

SEQ ID NO: 164863 - RNA, 19 nt, Artificial Sequence
  Description of Artificial Sequence: Synthetic oligonucleotide
acacuuagucgggccagca

SEQ ID NO: 164864 - RNA, 19 nt, Artificial Sequence
  Description of Artificial Sequence: Synthetic oligonucleotide
cacgcugggaagaccggga

SEQ ID NO: 164865 - RNA, 19 nt, Artificial Sequence
  Description of Artificial Sequence: Synthetic oligonucleotide
uccguggggucagcgugag

SEQ ID NO: 164866 - RNA, 19 nt, Artificial Sequence
  Description of Artificial Sequence: Synthetic oligonucleotide
uguagaccucagccccauc

SEQ ID NO: 164867 - RNA, 19 nt, Artificial Sequence
  Description of Artificial Sequence: Synthetic oligonucleotide
ccauauucgaaugaagacu

SEQ ID NO: 164868 - RNA, 19 nt, Artificial Sequence
  Description of Artificial Sequence: Synthetic oligonucleotide
gaugguccgcauggcuggc

SEQ ID NO: 164869 - RNA, 19 nt, Artificial Sequence
  Description of Artificial Sequence: Synthetic oligonucleotide
cacgugcuugcaguagaac

SEQ ID NO: 164870 - RNA, 19 nt, Artificial Sequence
  Description of Artificial Sequence: Synthetic oligonucleotide
aggugcuuccugguaggcu

SEQ ID NO: 164871 - RNA, 19 nt, Artificial Sequence
  Description of Artificial Sequence: Synthetic oligonucleotide
agcgcuugauggaccuuag

SEQ ID NO: 164872 - RNA, 19 nt, Artificial Sequence
  Description of Artificial Sequence: Synthetic oligonucleotide
cauugaaauccagccugga

SEQ ID NO: 164873 - RNA, 19 nt, Artificial Sequence
  Description of Artificial Sequence: Synthetic oligonucleotide
gagcuccguggggucagcg

SEQ ID NO: 164874 - RNA, 19 nt, Artificial Sequence
  Description of Artificial Sequence: Synthetic oligonucleotide
uaccugccauccacaccca

SEQ ID NO: 164875 - RNA, 19 nt, Artificial Sequence
  Description of Artificial Sequence: Synthetic oligonucleotide
augcccgcucuuugagugu

SEQ ID NO: 164876 - RNA, 19 nt, Artificial Sequence
  Description of Artificial Sequence: Synthetic oligonucleotide
ucgaagcaucuuucuugua

SEQ ID NO: 164877 - RNA, 19 nt, Artificial Sequence
  Description of Artificial Sequence: Synthetic oligonucleotide
gagcauucgcugccgcaaa

SEQ ID NO: 164878 - RNA, 19 nt, Artificial Sequence
  Description of Artificial Sequence: Synthetic oligonucleotide
auccgccuacacacucgcc

SEQ ID NO: 164879 - RNA, 19 nt, Artificial Sequence
  Description of Artificial Sequence: Synthetic oligonucleotide
guagcggguaagcgccuuc

SEQ ID NO: 164880 - RNA, 19 nt, Artificial Sequence
  Description of Artificial Sequence: Synthetic oligonucleotide
ggcaggguaccuauaggca

SEQ ID NO: 164881 - RNA, 19 nt, Artificial Sequence
  Description of Artificial Sequence: Synthetic oligonucleotide
caguauagcgcugguccca

SEQ ID NO: 164882 - RNA, 19 nt, Artificial Sequence
  Description of Artificial Sequence: Synthetic oligonucleotide
ggccuaacucacuguccag

SEQ ID NO: 164883 - RNA, 19 nt, Artificial Sequence
  Description of Artificial Sequence: Synthetic oligonucleotide
ggaagguacgguucugccu

SEQ ID NO: 164884 - RNA, 19 nt, Artificial Sequence
  Description of Artificial Sequence: Synthetic oligonucleotide
ucagucuccguggguuguc

SEQ ID NO: 164885 - RNA, 19 nt, Artificial Sequence
  Description of Artificial Sequence: Synthetic oligonucleotide
gcuuaagcccgaaccaauc

SEQ ID NO: 164886 - RNA, 19 nt, Artificial Sequence
  Description of Artificial Sequence: Synthetic oligonucleotide
ggaccuuagaugggccacc

SEQ ID NO: 164887 - RNA, 19 nt, Artificial Sequence
  Description of Artificial Sequence: Synthetic oligonucleotide
guccccgguguaguugaag

SEQ ID NO: 164888 - RNA, 19 nt, Artificial Sequence
  Description of Artificial Sequence: Synthetic oligonucleotide
gaacccgcaaaagcugagu

SEQ ID NO: 164889 - RNA, 19 nt, Artificial Sequence
  Description of Artificial Sequence: Synthetic oligonucleotide
gcgugugggugugaugucc

SEQ ID NO: 164890 - RNA, 19 nt, Artificial Sequence
  Description of Artificial Sequence: Synthetic oligonucleotide
gacgcuggccaugccaugu

SEQ ID NO: 164891 - RNA, 19 nt, Artificial Sequence
  Description of Artificial Sequence: Synthetic oligonucleotide
auguggcggaagagcaucu

SEQ ID NO: 164892 - RNA, 19 nt, Artificial Sequence
  Description of Artificial Sequence: Synthetic oligonucleotide
caggcgugugggugugaug

SEQ ID NO: 164893 - RNA, 19 nt, Artificial Sequence
  Description of Artificial Sequence: Synthetic oligonucleotide
cccgguguaguugaagcuc

SEQ ID NO: 164894 - RNA, 19 nt, Artificial Sequence
  Description of Artificial Sequence: Synthetic oligonucleotide
cacuuagucgggccagcaa

SEQ ID NO: 164895 - RNA, 19 nt, Artificial Sequence
  Description of Artificial Sequence: Synthetic oligonucleotide
ccacuucgcagagugcagc

SEQ ID NO: 164896 - RNA, 19 nt, Artificial Sequence
  Description of Artificial Sequence: Synthetic oligonucleotide
gguaaacaugacgcacaca

SEQ ID NO: 164897 - RNA, 19 nt, Artificial Sequence
  Description of Artificial Sequence: Synthetic oligonucleotide
uguccccgguguaguugaa

SEQ ID NO: 164898 - RNA, 19 nt, Artificial Sequence
  Description of Artificial Sequence: Synthetic oligonucleotide
gccccuguagauccacuuc

SEQ ID NO: 164899 - RNA, 19 nt, Artificial Sequence
  Description of Artificial Sequence: Synthetic oligonucleotide
ggcguucggcauagaaacc

SEQ ID NO: 164900 - RNA, 19 nt, Artificial Sequence
  Description of Artificial Sequence: Synthetic oligonucleotide
gccuuccuauugauaauca

SEQ ID NO: 164901 - RNA, 19 nt, Artificial Sequence
  Description of Artificial Sequence: Synthetic oligonucleotide
ccguggguuguccuugcac

SEQ ID NO: 164902 - RNA, 19 nt, Artificial Sequence
  Description of Artificial Sequence: Synthetic oligonucleotide
gucaagggcaggguaccua

SEQ ID NO: 164903 - RNA, 19 nt, Artificial Sequence
  Description of Artificial Sequence: Synthetic oligonucleotide
cucucauauuacccacgcu

SEQ ID NO: 164904 - RNA, 19 nt, Artificial Sequence
  Description of Artificial Sequence: Synthetic oligonucleotide
cuaacucacuguccaguuu

SEQ ID NO: 164905 - RNA, 19 nt, Artificial Sequence
  Description of Artificial Sequence: Synthetic oligonucleotide
gcuggccaugccauguuca

SEQ ID NO: 164906 - RNA, 19 nt, Artificial Sequence
  Description of Artificial Sequence: Synthetic oligonucleotide
guugauccgccuacacacu

SEQ ID NO: 164907 - RNA, 19 nt, Artificial Sequence
  Description of Artificial Sequence: Synthetic oligonucleotide
ggucagcgugagucauugc

SEQ ID NO: 164908 - RNA, 19 nt, Artificial Sequence
  Description of Artificial Sequence: Synthetic oligonucleotide
ccacgcugggaagaccggg

SEQ ID NO: 164909 - RNA, 19 nt, Artificial Sequence
  Description of Artificial Sequence: Synthetic oligonucleotide
ggaagaccgggaggggcug

SEQ ID NO: 164910 - RNA, 19 nt, Artificial Sequence
  Description of Artificial Sequence: Synthetic oligonucleotide
ggacaucuuagagguggca

SEQ ID NO: 164911 - RNA, 19 nt, Artificial Sequence
  Description of Artificial Sequence: Synthetic oligonucleotide
caccaugaacucacuguau

SEQ ID NO: 164912 - RNA, 19 nt, Artificial Sequence
  Description of Artificial Sequence: Synthetic oligonucleotide
caugguucaccugcccaua

SEQ ID NO: 164913 - RNA, 19 nt, Artificial Sequence
  Description of Artificial Sequence: Synthetic oligonucleotide
acgcuggccaugccauguu

SEQ ID NO: 164914 - RNA, 19 nt, Artificial Sequence
  Description of Artificial Sequence: Synthetic oligonucleotide
ggguaccuauaggcaaagc

SEQ ID NO: 164915 - RNA, 19 nt, Artificial Sequence
  Description of Artificial Sequence: Synthetic oligonucleotide
ccgcaaagugaaagcacca

SEQ ID NO: 164916 - RNA, 19 nt, Artificial Sequence
  Description of Artificial Sequence: Synthetic oligonucleotide
cuggacgaaguugagcauu

SEQ ID NO: 164917 - RNA, 19 nt, Artificial Sequence
  Description of Artificial Sequence: Synthetic oligonucleotide
caguguugauccgccuaca

SEQ ID NO: 164918 - RNA, 19 nt, Artificial Sequence
  Description of Artificial Sequence: Synthetic oligonucleotide
caauggccagaacccgcaa

SEQ ID NO: 164919 - RNA, 19 nt, Artificial Sequence
  Description of Artificial Sequence: Synthetic oligonucleotide
ccgcaaaagcugagugaug

SEQ ID NO: 164920 - RNA, 19 nt, Artificial Sequence
  Description of Artificial Sequence: Synthetic oligonucleotide
cggggacgauccucaaucc

SEQ ID NO: 164921 - RNA, 19 nt, Artificial Sequence
  Description of Artificial Sequence: Synthetic oligonucleotide
caccugcccauauucgaau

SEQ ID NO: 164922 - RNA, 19 nt, Artificial Sequence
  Description of Artificial Sequence: Synthetic oligonucleotide
caggucgguuccaucacuu

SEQ ID NO: 164923 - RNA, 19 nt, Artificial Sequence
  Description of Artificial Sequence: Synthetic oligonucleotide
gguguaguugaagcuccua

SEQ ID NO: 164924 - RNA, 19 nt, Artificial Sequence
  Description of Artificial Sequence: Synthetic oligonucleotide
caagggcaggguaccuaua

SEQ ID NO: 164925 - RNA, 19 nt, Artificial Sequence
  Description of Artificial Sequence: Synthetic oligonucleotide
cggccuaacucacugucca

SEQ ID NO: 164926 - RNA, 19 nt, Artificial Sequence
  Description of Artificial Sequence: Synthetic oligonucleotide
ggacgauccucaauccgcu

SEQ ID NO: 164927 - RNA, 19 nt, Artificial Sequence
  Description of Artificial Sequence: Synthetic oligonucleotide
gcggguaagcgccuuccua

SEQ ID NO: 164928 - RNA, 19 nt, Artificial Sequence
  Description of Artificial Sequence: Synthetic oligonucleotide
gucuccguggguuguccuu

SEQ ID NO: 164929 - RNA, 19 nt, Artificial Sequence
  Description of Artificial Sequence: Synthetic oligonucleotide
ggucccaguacuugucguu

SEQ ID NO: 164930 - RNA, 19 nt, Artificial Sequence
  Description of Artificial Sequence: Synthetic oligonucleotide
cagugucagucggccuaac

SEQ ID NO: 164931 - RNA, 19 nt, Artificial Sequence
  Description of Artificial Sequence: Synthetic oligonucleotide
caugggugcguagcaggcu

SEQ ID NO: 164932 - RNA, 19 nt, Artificial Sequence
  Description of Artificial Sequence: Synthetic oligonucleotide
cccgcaaaagcugagugau

SEQ ID NO: 164933 - RNA, 19 nt, Artificial Sequence
  Description of Artificial Sequence: Synthetic oligonucleotide
gcgugagucauugccuucu

SEQ ID NO: 164934 - RNA, 19 nt, Artificial Sequence
  Description of Artificial Sequence: Synthetic oligonucleotide
gucgcuccacgugcuugca

SEQ ID NO: 164935 - RNA, 19 nt, Artificial Sequence
  Description of Artificial Sequence: Synthetic oligonucleotide
cccgaaccaaucaggaaau

SEQ ID NO: 164936 - RNA, 19 nt, Artificial Sequence
  Description of Artificial Sequence: Synthetic oligonucleotide
caauccgcucagucuccgu

SEQ ID NO: 164937 - RNA, 19 nt, Artificial Sequence
  Description of Artificial Sequence: Synthetic oligonucleotide
guauagcgcuggucccagu

SEQ ID NO: 164938 - RNA, 19 nt, Artificial Sequence
  Description of Artificial Sequence: Synthetic oligonucleotide
gcauucgcugccgcaaagu

SEQ ID NO: 164939 - RNA, 19 nt, Artificial Sequence
  Description of Artificial Sequence: Synthetic oligonucleotide
cgccuuuauccacugaggu

SEQ ID NO: 164940 - RNA, 19 nt, Artificial Sequence
  Description of Artificial Sequence: Synthetic oligonucleotide
cgugagucauugccuucuc

SEQ ID NO: 164941 - RNA, 19 nt, Artificial Sequence
  Description of Artificial Sequence: Synthetic oligonucleotide
ggguaagcgccuuccuauu

SEQ ID NO: 164942 - RNA, 19 nt, Artificial Sequence
  Description of Artificial Sequence: Synthetic oligonucleotide
ccaagggcugagcagugau

SEQ ID NO: 164943 - RNA, 19 nt, Artificial Sequence
  Description of Artificial Sequence: Synthetic oligonucleotide
gcucaguguugauccgccu

SEQ ID NO: 164944 - RNA, 19 nt, Artificial Sequence
  Description of Artificial Sequence: Synthetic oligonucleotide
cacucagugugagcuccgu

SEQ ID NO: 164945 - RNA, 19 nt, Artificial Sequence
  Description of Artificial Sequence: Synthetic oligonucleotide
cggguaagcgccuuccuau

SEQ ID NO: 164946 - RNA, 19 nt, Artificial Sequence
  Description of Artificial Sequence: Synthetic oligonucleotide
ccaguugugugaccaggau

SEQ ID NO: 164947 - RNA, 19 nt, Artificial Sequence
  Description of Artificial Sequence: Synthetic oligonucleotide
ccccgguguaguugaagcu

SEQ ID NO: 164948 - RNA, 19 nt, Artificial Sequence
  Description of Artificial Sequence: Synthetic oligonucleotide
gcgccuuccuauugauaau

SEQ ID NO: 164949 - RNA, 19 nt, Artificial Sequence
  Description of Artificial Sequence: Synthetic oligonucleotide
cgugugggugugauguccu

SEQ ID NO: 164950 - RNA, 19 nt, Artificial Sequence
  Description of Artificial Sequence: Synthetic oligonucleotide
ggugcguagcaggcugagu

SEQ ID NO: 164951 - RNA, 19 nt, Artificial Sequence
  Description of Artificial Sequence: Synthetic oligonucleotide
ccacauaugcccgcucuuu

SEQ ID NO: 164952 - RNA, 19 nt, Artificial Sequence
  Description of Artificial Sequence: Synthetic oligonucleotide
cguagcaggcugaguaguu

SEQ ID NO: 164953 - RNA, 19 nt, Artificial Sequence
  Description of Artificial Sequence: Synthetic oligonucleotide
ccgccuacacacucgccuu

SEQ ID NO: 164954 - RNA, 19 nt, Artificial Sequence
  Description of Artificial Sequence: Synthetic oligonucleotide
ggggucagcgugagucauu

SEQ ID NO: 164955 - RNA, 19 nt, Artificial Sequence
  Description of Artificial Sequence: Synthetic oligonucleotide
cgguguaguugaagcuccu

SEQ ID NO: 164956 - RNA, 19 nt, Artificial Sequence
  Description of Artificial Sequence: Synthetic oligonucleotide
gcgcagccuucugacuccu

SEQ ID NO: 164957 - RNA, 19 nt, Artificial Sequence
  Description of Artificial Sequence: Synthetic oligonucleotide
ccguggggucagcgugagu

SEQ ID NO: 164958 - RNA, 19 nt, Artificial Sequence
  Description of Artificial Sequence: Synthetic oligonucleotide
aacucaaccacuuuggagg

SEQ ID NO: 164959 - RNA, 19 nt, Artificial Sequence
  Description of Artificial Sequence: Synthetic oligonucleotide
agaucaaucugauagagag

SEQ ID NO: 164960 - RNA, 19 nt, Artificial Sequence
  Description of Artificial Sequence: Synthetic oligonucleotide
ucacaauaaccccagaugg

SEQ ID NO: 164961 - RNA, 19 nt, Artificial Sequence
  Description of Artificial Sequence: Synthetic oligonucleotide
aacaguacaaacgaugcac

SEQ ID NO: 164962 - RNA, 19 nt, Artificial Sequence
  Description of Artificial Sequence: Synthetic oligonucleotide
agaaagacaaguuaccauc

SEQ ID NO: 164963 - RNA, 19 nt, Artificial Sequence
  Description of Artificial Sequence: Synthetic oligonucleotide
cuguagaucaaucugauag

SEQ ID NO: 164964 - RNA, 19 nt, Artificial Sequence
  Description of Artificial Sequence: Synthetic oligonucleotide
uguacuuuaggaaaauggc

SEQ ID NO: 164965 - RNA, 19 nt, Artificial Sequence
  Description of Artificial Sequence: Synthetic oligonucleotide
uauauauaggaacagccug

SEQ ID NO: 164966 - RNA, 19 nt, Artificial Sequence
  Description of Artificial Sequence: Synthetic oligonucleotide
acgaauaucuuguagccgc

SEQ ID NO: 164967 - RNA, 19 nt, Artificial Sequence
  Description of Artificial Sequence: Synthetic oligonucleotide
ugcaaugaagcagagaugg

SEQ ID NO: 164968 - RNA, 19 nt, Artificial Sequence
  Description of Artificial Sequence: Synthetic oligonucleotide
aguaaaacgacuggcagcc

SEQ ID NO: 164969 - RNA, 19 nt, Artificial Sequence
  Description of Artificial Sequence: Synthetic oligonucleotide
auauagaugggucaggcag

SEQ ID NO: 164970 - RNA, 19 nt, Artificial Sequence
  Description of Artificial Sequence: Synthetic oligonucleotide
aaagcuggccagcuaaacc

SEQ ID NO: 164971 - RNA, 19 nt, Artificial Sequence
  Description of Artificial Sequence: Synthetic oligonucleotide
cauguugcaaacucgaggg

SEQ ID NO: 164972 - RNA, 19 nt, Artificial Sequence
  Description of Artificial Sequence: Synthetic oligonucleotide
guacaaacgaugcacaggg

SEQ ID NO: 164973 - RNA, 19 nt, Artificial Sequence
  Description of Artificial Sequence: Synthetic oligonucleotide
ugguuaugcauaaaagagg

SEQ ID NO: 164974 - RNA, 19 nt, Artificial Sequence
  Description of Artificial Sequence: Synthetic oligonucleotide
aaaagaggcauauuaaaua

SEQ ID NO: 164975 - RNA, 19 nt, Artificial Sequence
  Description of Artificial Sequence: Synthetic oligonucleotide
ugauggauuucacugagcc

SEQ ID NO: 164976 - RNA, 19 nt, Artificial Sequence
  Description of Artificial Sequence: Synthetic oligonucleotide
gagaguagagaccaggcgg

SEQ ID NO: 164977 - RNA, 19 nt, Artificial Sequence
  Description of Artificial Sequence: Synthetic oligonucleotide
gaucuuaucagcuggggcc

SEQ ID NO: 164978 - RNA, 19 nt, Artificial Sequence
  Description of Artificial Sequence: Synthetic oligonucleotide
uacauagugccacagagcu

SEQ ID NO: 164979 - RNA, 19 nt, Artificial Sequence
  Description of Artificial Sequence: Synthetic oligonucleotide
aagauuuuagagcucuuug

SEQ ID NO: 164980 - RNA, 19 nt, Artificial Sequence
  Description of Artificial Sequence: Synthetic oligonucleotide
ugugguuaugcauaaaaga

SEQ ID NO: 164981 - RNA, 19 nt, Artificial Sequence
  Description of Artificial Sequence: Synthetic oligonucleotide
acacgaauaucuuguagcc

SEQ ID NO: 164982 - RNA, 19 nt, Artificial Sequence
  Description of Artificial Sequence: Synthetic oligonucleotide
uaaucaggaacccauaauc

SEQ ID NO: 164983 - RNA, 19 nt, Artificial Sequence
  Description of Artificial Sequence: Synthetic oligonucleotide
ugggucaacaguacaaacg

SEQ ID NO: 164984 - RNA, 19 nt, Artificial Sequence
  Description of Artificial Sequence: Synthetic oligonucleotide
cagaaauucgaaccgaugg

SEQ ID NO: 164985 - RNA, 19 nt, Artificial Sequence
  Description of Artificial Sequence: Synthetic oligonucleotide
aauggucuguggcuggacc

SEQ ID NO: 164986 - RNA, 19 nt, Artificial Sequence
  Description of Artificial Sequence: Synthetic oligonucleotide
uacaacucaaccacuuugg

SEQ ID NO: 164987 - RNA, 19 nt, Artificial Sequence
  Description of Artificial Sequence: Synthetic oligonucleotide
agaaucuagagcuucaggu

SEQ ID NO: 164988 - RNA, 19 nt, Artificial Sequence
  Description of Artificial Sequence: Synthetic oligonucleotide
uguacggaugccuucaucc

SEQ ID NO: 164989 - RNA, 19 nt, Artificial Sequence
  Description of Artificial Sequence: Synthetic oligonucleotide
aaaacgaacagguacgcuu

SEQ ID NO: 164990 - RNA, 19 nt, Artificial Sequence
  Description of Artificial Sequence: Synthetic oligonucleotide
ugcuaggugaauuaggcca

SEQ ID NO: 164991 - RNA, 19 nt, Artificial Sequence
  Description of Artificial Sequence: Synthetic oligonucleotide
agaaauucgaaccgauggg

SEQ ID NO: 164992 - RNA, 19 nt, Artificial Sequence
  Description of Artificial Sequence: Synthetic oligonucleotide
uguagcaaggauaucagau

SEQ ID NO: 164993 - RNA, 19 nt, Artificial Sequence
  Description of Artificial Sequence: Synthetic oligonucleotide
cacgaaaacauuauguaac

SEQ ID NO: 164994 - RNA, 19 nt, Artificial Sequence
  Description of Artificial Sequence: Synthetic oligonucleotide
uacuuuaggaaaauggcaa

SEQ ID NO: 164995 - RNA, 19 nt, Artificial Sequence
  Description of Artificial Sequence: Synthetic oligonucleotide
uuaaaugccagcccuggug

SEQ ID NO: 164996 - RNA, 19 nt, Artificial Sequence
  Description of Artificial Sequence: Synthetic oligonucleotide
caaguuaccaucugucugg

SEQ ID NO: 164997 - RNA, 19 nt, Artificial Sequence
  Description of Artificial Sequence: Synthetic oligonucleotide
gagauaucccaugaaaacg

SEQ ID NO: 164998 - RNA, 19 nt, Artificial Sequence
  Description of Artificial Sequence: Synthetic oligonucleotide
acauguugcaaacucgagg

SEQ ID NO: 164999 - RNA, 19 nt, Artificial Sequence
  Description of Artificial Sequence: Synthetic oligonucleotide
acaaacgaugcacaggguc

SEQ ID NO: 165000 - RNA, 19 nt, Artificial Sequence
  Description of Artificial Sequence: Synthetic oligonucleotide
aaacucgagggcuacaacu

SEQ ID NO: 165001 - RNA, 19 nt, Artificial Sequence
  Description of Artificial Sequence: Synthetic oligonucleotide
auaucaauggcugucgcac

SEQ ID NO: 165002 - RNA, 19 nt, Artificial Sequence
  Description of Artificial Sequence: Synthetic oligonucleotide
uucggaauacaaaugguac

SEQ ID NO: 165003 - RNA, 19 nt, Artificial Sequence
  Description of Artificial Sequence: Synthetic oligonucleotide
uucauugauaaucagcuuu

SEQ ID NO: 165004 - RNA, 19 nt, Artificial Sequence
  Description of Artificial Sequence: Synthetic oligonucleotide
uccauuguggccuugcuca

SEQ ID NO: 165005 - RNA, 19 nt, Artificial Sequence
  Description of Artificial Sequence: Synthetic oligonucleotide
aacgggaucauuacuguac

SEQ ID NO: 165006 - RNA, 19 nt, Artificial Sequence
  Description of Artificial Sequence: Synthetic oligonucleotide
aaagggcuuaguauguagc

SEQ ID NO: 165007 - RNA, 19 nt, Artificial Sequence
  Description of Artificial Sequence: Synthetic oligonucleotide
aaagaugcuaggaauggag

SEQ ID NO: 165008 - RNA, 19 nt, Artificial Sequence
  Description of Artificial Sequence: Synthetic oligonucleotide
aagucggugagauaugccu

SEQ ID NO: 165009 - RNA, 19 nt, Artificial Sequence
  Description of Artificial Sequence: Synthetic oligonucleotide
uggguaucaauguuucugg

SEQ ID NO: 165010 - RNA, 19 nt, Artificial Sequence
  Description of Artificial Sequence: Synthetic oligonucleotide
aauaaucaggaacccauaa

SEQ ID NO: 165011 - RNA, 19 nt, Artificial Sequence
  Description of Artificial Sequence: Synthetic oligonucleotide
aacccauaauccuucuggg

SEQ ID NO: 165012 - RNA, 19 nt, Artificial Sequence
  Description of Artificial Sequence: Synthetic oligonucleotide
gaaauucgaaccgaugggg

SEQ ID NO: 165013 - RNA, 19 nt, Artificial Sequence
  Description of Artificial Sequence: Synthetic oligonucleotide
uuguauuucgaacuacugu

SEQ ID NO: 165014 - RNA, 19 nt, Artificial Sequence
  Description of Artificial Sequence: Synthetic oligonucleotide
gacauuggagaguucauug

SEQ ID NO: 165015 - RNA, 19 nt, Artificial Sequence
  Description of Artificial Sequence: Synthetic oligonucleotide
ucugugguuaugcauaaaa

SEQ ID NO: 165016 - RNA, 19 nt, Artificial Sequence
  Description of Artificial Sequence: Synthetic oligonucleotide
gaaucuagagcuucaggug

SEQ ID NO: 165017 - RNA, 19 nt, Artificial Sequence
  Description of Artificial Sequence: Synthetic oligonucleotide
agaggcauauuaaauauag

SEQ ID NO: 165018 - RNA, 19 nt, Artificial Sequence
  Description of Artificial Sequence: Synthetic oligonucleotide
aagacaaguuaccaucugu

SEQ ID NO: 165019 - RNA, 19 nt, Artificial Sequence
  Description of Artificial Sequence: Synthetic oligonucleotide
ucuaagauuuuagagcucu

SEQ ID NO: 165020 - RNA, 19 nt, Artificial Sequence
  Description of Artificial Sequence: Synthetic oligonucleotide
uugaucacaauaaccccag

SEQ ID NO: 165021 - RNA, 19 nt, Artificial Sequence
  Description of Artificial Sequence: Synthetic oligonucleotide
uguaggaacuguugaauca

SEQ ID NO: 165022 - RNA, 19 nt, Artificial Sequence
  Description of Artificial Sequence: Synthetic oligonucleotide
ucuggccaacaaaagaugc

SEQ ID NO: 165023 - RNA, 19 nt, Artificial Sequence
  Description of Artificial Sequence: Synthetic oligonucleotide
aauaaccccagauggcucu

SEQ ID NO: 165024 - RNA, 19 nt, Artificial Sequence
  Description of Artificial Sequence: Synthetic oligonucleotide
ugcaucacauaccauaguc

SEQ ID NO: 165025 - RNA, 19 nt, Artificial Sequence
  Description of Artificial Sequence: Synthetic oligonucleotide
gcugaagcaguuuacauag

SEQ ID NO: 165026 - RNA, 19 nt, Artificial Sequence
  Description of Artificial Sequence: Synthetic oligonucleotide
augaaaacgaacagguacg

SEQ ID NO: 165027 - RNA, 19 nt, Artificial Sequence
  Description of Artificial Sequence: Synthetic oligonucleotide
ugacuuagagcguguacgg

SEQ ID NO: 165028 - RNA, 19 nt, Artificial Sequence
  Description of Artificial Sequence: Synthetic oligonucleotide
uuuuagagcucuuugccaa

SEQ ID NO: 165029 - RNA, 19 nt, Artificial Sequence
  Description of Artificial Sequence: Synthetic oligonucleotide
ucucacagcagaaauucga

SEQ ID NO: 165030 - RNA, 19 nt, Artificial Sequence
  Description of Artificial Sequence: Synthetic oligonucleotide
acaaguuaccaucugucug

SEQ ID NO: 165031 - RNA, 19 nt, Artificial Sequence
  Description of Artificial Sequence: Synthetic oligonucleotide
gaugagaguagagaccagg

SEQ ID NO: 165032 - RNA, 19 nt, Artificial Sequence
  Description of Artificial Sequence: Synthetic oligonucleotide
acuuguagcaaggauauca

SEQ ID NO: 165033 - RNA, 19 nt, Artificial Sequence
  Description of Artificial Sequence: Synthetic oligonucleotide
uacucucugaaacuuucag

SEQ ID NO: 165034 - RNA, 19 nt, Artificial Sequence
  Description of Artificial Sequence: Synthetic oligonucleotide
uguagaucaaucugauaga

SEQ ID NO: 165035 - RNA, 19 nt, Artificial Sequence
  Description of Artificial Sequence: Synthetic oligonucleotide
uaaaugccagcccugguga

SEQ ID NO: 165036 - RNA, 19 nt, Artificial Sequence
  Description of Artificial Sequence: Synthetic oligonucleotide
uacgcuucggaauacaaau

SEQ ID NO: 165037 - RNA, 19 nt, Artificial Sequence
  Description of Artificial Sequence: Synthetic oligonucleotide
uggcacgaaaacauuaugu

SEQ ID NO: 165038 - RNA, 19 nt, Artificial Sequence
  Description of Artificial Sequence: Synthetic oligonucleotide
acuaacuguugccuguagg

SEQ ID NO: 165039 - RNA, 19 nt, Artificial Sequence
  Description of Artificial Sequence: Synthetic oligonucleotide
ggaaaggagaugcugacag

SEQ ID NO: 165040 - RNA, 19 nt, Artificial Sequence
  Description of Artificial Sequence: Synthetic oligonucleotide
uuacauagugccacagagc

SEQ ID NO: 165041 - RNA, 19 nt, Artificial Sequence
  Description of Artificial Sequence: Synthetic oligonucleotide
ucuugaccaacaaaggaau

SEQ ID NO: 165042 - RNA, 19 nt, Artificial Sequence
  Description of Artificial Sequence: Synthetic oligonucleotide
ugacuaucaggcucugugg

SEQ ID NO: 165043 - RNA, 19 nt, Artificial Sequence
  Description of Artificial Sequence: Synthetic oligonucleotide
auaguaugcagacuaaauu

SEQ ID NO: 165044 - RNA, 19 nt, Artificial Sequence
  Description of Artificial Sequence: Synthetic oligonucleotide
aaacgaacagguacgcuuc

SEQ ID NO: 165045 - RNA, 19 nt, Artificial Sequence
  Description of Artificial Sequence: Synthetic oligonucleotide
aagaugcuaggaauggagg

SEQ ID NO: 165046 - RNA, 19 nt, Artificial Sequence
  Description of Artificial Sequence: Synthetic oligonucleotide
gaaagggcuuaguauguag

SEQ ID NO: 165047 - RNA, 19 nt, Artificial Sequence
  Description of Artificial Sequence: Synthetic oligonucleotide
cauuauguaacagggcugc

SEQ ID NO: 165048 - RNA, 19 nt, Artificial Sequence
  Description of Artificial Sequence: Synthetic oligonucleotide
aaaagcuggccagcuaaac

SEQ ID NO: 165049 - RNA, 19 nt, Artificial Sequence
  Description of Artificial Sequence: Synthetic oligonucleotide
gaggcuuuguauuucgaac

SEQ ID NO: 165050 - RNA, 19 nt, Artificial Sequence
  Description of Artificial Sequence: Synthetic oligonucleotide
aaagugcccgucccaagag

SEQ ID NO: 165051 - RNA, 19 nt, Artificial Sequence
  Description of Artificial Sequence: Synthetic oligonucleotide
uauuucgaacuacuguggu

SEQ ID NO: 165052 - RNA, 19 nt, Artificial Sequence
  Description of Artificial Sequence: Synthetic oligonucleotide
aacagguacgcuucggaau

SEQ ID NO: 165053 - RNA, 19 nt, Artificial Sequence
  Description of Artificial Sequence: Synthetic oligonucleotide
ugccuguagaucaaucuga

SEQ ID NO: 165054 - RNA, 19 nt, Artificial Sequence
  Description of Artificial Sequence: Synthetic oligonucleotide
agaguagagaccaggcggc

SEQ ID NO: 165055 - RNA, 19 nt, Artificial Sequence
  Description of Artificial Sequence: Synthetic oligonucleotide
uguccacucagccauuaca

SEQ ID NO: 165056 - RNA, 19 nt, Artificial Sequence
  Description of Artificial Sequence: Synthetic oligonucleotide
acgaaaacauuauguaaca

SEQ ID NO: 165057 - RNA, 19 nt, Artificial Sequence
  Description of Artificial Sequence: Synthetic oligonucleotide
caaggauaucagauaaaag

SEQ ID NO: 165058 - RNA, 19 nt, Artificial Sequence
  Description of Artificial Sequence: Synthetic oligonucleotide
uguugcacgaggaaagcau

SEQ ID NO: 165059 - RNA, 19 nt, Artificial Sequence
  Description of Artificial Sequence: Synthetic oligonucleotide
cugugguuaugcauaaaag

SEQ ID NO: 165060 - RNA, 19 nt, Artificial Sequence
  Description of Artificial Sequence: Synthetic oligonucleotide
cuacaacucaaccacuuug

SEQ ID NO: 165061 - RNA, 19 nt, Artificial Sequence
  Description of Artificial Sequence: Synthetic oligonucleotide
ucggaauacaaaugguacu

SEQ ID NO: 165062 - RNA, 19 nt, Artificial Sequence
  Description of Artificial Sequence: Synthetic oligonucleotide
aacucgagggcuacaacuc

SEQ ID NO: 165063 - RNA, 19 nt, Artificial Sequence
  Description of Artificial Sequence: Synthetic oligonucleotide
ucccacauaucauuggagu

SEQ ID NO: 165064 - RNA, 19 nt, Artificial Sequence
  Description of Artificial Sequence: Synthetic oligonucleotide
ugucaaaauggauccuacc

SEQ ID NO: 165065 - RNA, 19 nt, Artificial Sequence
  Description of Artificial Sequence: Synthetic oligonucleotide
auaucagauaaaagcuggc

SEQ ID NO: 165066 - RNA, 19 nt, Artificial Sequence
  Description of Artificial Sequence: Synthetic oligonucleotide
uugaccaacaaaggaaugu

SEQ ID NO: 165067 - RNA, 19 nt, Artificial Sequence
  Description of Artificial Sequence: Synthetic oligonucleotide
aaguucguggguccaggag

SEQ ID NO: 165068 - RNA, 19 nt, Artificial Sequence
  Description of Artificial Sequence: Synthetic oligonucleotide
gucaacaguacaaacgaug

SEQ ID NO: 165069 - RNA, 19 nt, Artificial Sequence
  Description of Artificial Sequence: Synthetic oligonucleotide
guaucaauguuucuggucu

SEQ ID NO: 165070 - RNA, 19 nt, Artificial Sequence
  Description of Artificial Sequence: Synthetic oligonucleotide
agacaaguuaccaucuguc

SEQ ID NO: 165071 - RNA, 19 nt, Artificial Sequence
  Description of Artificial Sequence: Synthetic oligonucleotide
aacgaacagguacgcuucg

SEQ ID NO: 165072 - RNA, 19 nt, Artificial Sequence
  Description of Artificial Sequence: Synthetic oligonucleotide
uuaguauguagcuguucca

SEQ ID NO: 165073 - RNA, 19 nt, Artificial Sequence
  Description of Artificial Sequence: Synthetic oligonucleotide
caucacauaccauagucca

SEQ ID NO: 165074 - RNA, 19 nt, Artificial Sequence
  Description of Artificial Sequence: Synthetic oligonucleotide
agaugcuaggaauggaggu

SEQ ID NO: 165075 - RNA, 19 nt, Artificial Sequence
  Description of Artificial Sequence: Synthetic oligonucleotide
cacaauaaccccagauggc

SEQ ID NO: 165076 - RNA, 19 nt, Artificial Sequence
  Description of Artificial Sequence: Synthetic oligonucleotide
gaucaaucugauagagagg

SEQ ID NO: 165077 - RNA, 19 nt, Artificial Sequence
  Description of Artificial Sequence: Synthetic oligonucleotide
cuaccgagaaucuagagcu

SEQ ID NO: 165078 - RNA, 19 nt, Artificial Sequence
  Description of Artificial Sequence: Synthetic oligonucleotide
uuuagaugccgauggucug

SEQ ID NO: 165079 - RNA, 19 nt, Artificial Sequence
  Description of Artificial Sequence: Synthetic oligonucleotide
guauuucgaacuacugugg

SEQ ID NO: 165080 - RNA, 19 nt, Artificial Sequence
  Description of Artificial Sequence: Synthetic oligonucleotide
uagaucaaucugauagaga

SEQ ID NO: 165081 - RNA, 19 nt, Artificial Sequence
  Description of Artificial Sequence: Synthetic oligonucleotide
ggagccuuaguguugcacg

SEQ ID NO: 165082 - RNA, 19 nt, Artificial Sequence
  Description of Artificial Sequence: Synthetic oligonucleotide
acaauaaccccagauggcu

SEQ ID NO: 165083 - RNA, 19 nt, Artificial Sequence
  Description of Artificial Sequence: Synthetic oligonucleotide
ccuucuaaagggaauaaac

SEQ ID NO: 165084 - RNA, 19 nt, Artificial Sequence
  Description of Artificial Sequence: Synthetic oligonucleotide
aaacgaugcacagggucuc

SEQ ID NO: 165085 - RNA, 19 nt, Artificial Sequence
  Description of Artificial Sequence: Synthetic oligonucleotide
aaauagaugcugccggcuu

SEQ ID NO: 165086 - RNA, 19 nt, Artificial Sequence
  Description of Artificial Sequence: Synthetic oligonucleotide
auaaucaggaacccauaau

SEQ ID NO: 165087 - RNA, 19 nt, Artificial Sequence
  Description of Artificial Sequence: Synthetic oligonucleotide
acccaugcaugucaaaaug

SEQ ID NO: 165088 - RNA, 19 nt, Artificial Sequence
  Description of Artificial Sequence: Synthetic oligonucleotide
uuagagcguguacggaugc

SEQ ID NO: 165089 - RNA, 19 nt, Artificial Sequence
  Description of Artificial Sequence: Synthetic oligonucleotide
caccacuugcaucacauac

SEQ ID NO: 165090 - RNA, 19 nt, Artificial Sequence
  Description of Artificial Sequence: Synthetic oligonucleotide
aacccaugcaugucaaaau

SEQ ID NO: 165091 - RNA, 19 nt, Artificial Sequence
  Description of Artificial Sequence: Synthetic oligonucleotide
aguaugcagacuaaauuca

SEQ ID NO: 165092 - RNA, 19 nt, Artificial Sequence
  Description of Artificial Sequence: Synthetic oligonucleotide
ugaaaacgaacagguacgc

SEQ ID NO: 165093 - RNA, 19 nt, Artificial Sequence
  Description of Artificial Sequence: Synthetic oligonucleotide
agauaucccaugaaaacga

SEQ ID NO: 165094 - RNA, 19 nt, Artificial Sequence
  Description of Artificial Sequence: Synthetic oligonucleotide
aggauaucaauggcugucg

SEQ ID NO: 165095 - RNA, 19 nt, Artificial Sequence
  Description of Artificial Sequence: Synthetic oligonucleotide
acuuagagcguguacggau

SEQ ID NO: 165096 - RNA, 19 nt, Artificial Sequence
  Description of Artificial Sequence: Synthetic oligonucleotide
cuuagagcguguacggaug

SEQ ID NO: 165097 - RNA, 19 nt, Artificial Sequence
  Description of Artificial Sequence: Synthetic oligonucleotide
aguguugcacgaggaaagc

SEQ ID NO: 165098 - RNA, 19 nt, Artificial Sequence
  Description of Artificial Sequence: Synthetic oligonucleotide
aaagcauagugaucucuuu

SEQ ID NO: 165099 - RNA, 19 nt, Artificial Sequence
  Description of Artificial Sequence: Synthetic oligonucleotide
aggaccucugagcugaacu

SEQ ID NO: 165100 - RNA, 19 nt, Artificial Sequence
  Description of Artificial Sequence: Synthetic oligonucleotide
acucagaaguucguggguc

SEQ ID NO: 165101 - RNA, 19 nt, Artificial Sequence
  Description of Artificial Sequence: Synthetic oligonucleotide
aacgacuggcagcccaaag

SEQ ID NO: 165102 - RNA, 19 nt, Artificial Sequence
  Description of Artificial Sequence: Synthetic oligonucleotide
ucaggggacauagcaacag

SEQ ID NO: 165103 - RNA, 19 nt, Artificial Sequence
  Description of Artificial Sequence: Synthetic oligonucleotide
uccugguccucccacauau

SEQ ID NO: 165104 - RNA, 19 nt, Artificial Sequence
  Description of Artificial Sequence: Synthetic oligonucleotide
caugagauaucccaugaaa

SEQ ID NO: 165105 - RNA, 19 nt, Artificial Sequence
  Description of Artificial Sequence: Synthetic oligonucleotide
gugcugagacaccuuauag

SEQ ID NO: 165106 - RNA, 19 nt, Artificial Sequence
  Description of Artificial Sequence: Synthetic oligonucleotide
augucaaaauggauccuac

SEQ ID NO: 165107 - RNA, 19 nt, Artificial Sequence
  Description of Artificial Sequence: Synthetic oligonucleotide
aauguuuguccagcgcucu

SEQ ID NO: 165108 - RNA, 19 nt, Artificial Sequence
  Description of Artificial Sequence: Synthetic oligonucleotide
uaggaucuugaccaacaaa

SEQ ID NO: 165109 - RNA, 19 nt, Artificial Sequence
  Description of Artificial Sequence: Synthetic oligonucleotide
guacuuuaggaaaauggca

SEQ ID NO: 165110 - RNA, 19 nt, Artificial Sequence
  Description of Artificial Sequence: Synthetic oligonucleotide
cucagaaguucgugggucc

SEQ ID NO: 165111 - RNA, 19 nt, Artificial Sequence
  Description of Artificial Sequence: Synthetic oligonucleotide
agccucaucugcauugggc

SEQ ID NO: 165112 - RNA, 19 nt, Artificial Sequence
  Description of Artificial Sequence: Synthetic oligonucleotide
ugcgugugcaccagaugag

SEQ ID NO: 165113 - RNA, 19 nt, Artificial Sequence
  Description of Artificial Sequence: Synthetic oligonucleotide
ugucauuaagguggcacga

SEQ ID NO: 165114 - RNA, 19 nt, Artificial Sequence
  Description of Artificial Sequence: Synthetic oligonucleotide
acaacgggaucauuacugu

SEQ ID NO: 165115 - RNA, 19 nt, Artificial Sequence
  Description of Artificial Sequence: Synthetic oligonucleotide
uauuuacuuguagcaagga

SEQ ID NO: 165116 - RNA, 19 nt, Artificial Sequence
  Description of Artificial Sequence: Synthetic oligonucleotide
auaucccaugaaaacgaac

SEQ ID NO: 165117 - RNA, 19 nt, Artificial Sequence
  Description of Artificial Sequence: Synthetic oligonucleotide
acgacuggcagcccaaagu

SEQ ID NO: 165118 - RNA, 19 nt, Artificial Sequence
  Description of Artificial Sequence: Synthetic oligonucleotide
auacuguccauaaaauaga

SEQ ID NO: 165119 - RNA, 19 nt, Artificial Sequence
  Description of Artificial Sequence: Synthetic oligonucleotide
aaaauggauccuaccauuu

SEQ ID NO: 165120 - RNA, 19 nt, Artificial Sequence
  Description of Artificial Sequence: Synthetic oligonucleotide
accgagaaucuagagcuuc

SEQ ID NO: 165121 - RNA, 19 nt, Artificial Sequence
  Description of Artificial Sequence: Synthetic oligonucleotide
agcacauguguacucucug

SEQ ID NO: 165122 - RNA, 19 nt, Artificial Sequence
  Description of Artificial Sequence: Synthetic oligonucleotide
ggugacauuugacuaucag

SEQ ID NO: 165123 - RNA, 19 nt, Artificial Sequence
  Description of Artificial Sequence: Synthetic oligonucleotide
aucucaagaccggcgaggg

SEQ ID NO: 165124 - RNA, 19 nt, Artificial Sequence
  Description of Artificial Sequence: Synthetic oligonucleotide
augagauaucccaugaaaa

SEQ ID NO: 165125 - RNA, 19 nt, Artificial Sequence
  Description of Artificial Sequence: Synthetic oligonucleotide
agauuuugcuuuccacgcu

SEQ ID NO: 165126 - RNA, 19 nt, Artificial Sequence
  Description of Artificial Sequence: Synthetic oligonucleotide
aggucugcaaggaugacgu

SEQ ID NO: 165127 - RNA, 19 nt, Artificial Sequence
  Description of Artificial Sequence: Synthetic oligonucleotide
ggauaucagauaaaagcug

SEQ ID NO: 165128 - RNA, 19 nt, Artificial Sequence
  Description of Artificial Sequence: Synthetic oligonucleotide
acagguacgcuucggaaua

SEQ ID NO: 165129 - RNA, 19 nt, Artificial Sequence
  Description of Artificial Sequence: Synthetic oligonucleotide
ugcauugggccuugacaag

SEQ ID NO: 165130 - RNA, 19 nt, Artificial Sequence
  Description of Artificial Sequence: Synthetic oligonucleotide
uccuaccgagaaucuagag

SEQ ID NO: 165131 - RNA, 19 nt, Artificial Sequence
  Description of Artificial Sequence: Synthetic oligonucleotide
ccuaccgagaaucuagagc

SEQ ID NO: 165132 - RNA, 19 nt, Artificial Sequence
  Description of Artificial Sequence: Synthetic oligonucleotide
gggucaacaguacaaacga

SEQ ID NO: 165133 - RNA, 19 nt, Artificial Sequence
  Description of Artificial Sequence: Synthetic oligonucleotide
cacgaauaucuuguagccg

SEQ ID NO: 165134 - RNA, 19 nt, Artificial Sequence
  Description of Artificial Sequence: Synthetic oligonucleotide
acauuauguaacagggcug

SEQ ID NO: 165135 - RNA, 19 nt, Artificial Sequence
  Description of Artificial Sequence: Synthetic oligonucleotide
uaucaauggcugucgcaca

SEQ ID NO: 165136 - RNA, 19 nt, Artificial Sequence
  Description of Artificial Sequence: Synthetic oligonucleotide
cugcuaggugaauuaggcc

SEQ ID NO: 165137 - RNA, 19 nt, Artificial Sequence
  Description of Artificial Sequence: Synthetic oligonucleotide
ccucucguugucauuaagg

SEQ ID NO: 165138 - RNA, 19 nt, Artificial Sequence
  Description of Artificial Sequence: Synthetic oligonucleotide
agaaguucguggguccagg

SEQ ID NO: 165139 - RNA, 19 nt, Artificial Sequence
  Description of Artificial Sequence: Synthetic oligonucleotide
ugcuaggaauggagguggg

SEQ ID NO: 165140 - RNA, 19 nt, Artificial Sequence
  Description of Artificial Sequence: Synthetic oligonucleotide
caucucaagaccggcgagg

SEQ ID NO: 165141 - RNA, 19 nt, Artificial Sequence
  Description of Artificial Sequence: Synthetic oligonucleotide
aaaucacaguaggaugcca

SEQ ID NO: 165142 - RNA, 19 nt, Artificial Sequence
  Description of Artificial Sequence: Synthetic oligonucleotide
cagguuugccagucggucc

SEQ ID NO: 165143 - RNA, 19 nt, Artificial Sequence
  Description of Artificial Sequence: Synthetic oligonucleotide
cauaucauuggagucaucu

SEQ ID NO: 165144 - RNA, 19 nt, Artificial Sequence
  Description of Artificial Sequence: Synthetic oligonucleotide
gacaaguuaccaucugucu

SEQ ID NO: 165145 - RNA, 19 nt, Artificial Sequence
  Description of Artificial Sequence: Synthetic oligonucleotide
ggaucuuaucagcuggggc

SEQ ID NO: 165146 - RNA, 19 nt, Artificial Sequence
  Description of Artificial Sequence: Synthetic oligonucleotide
acauguguacucucugaaa

SEQ ID NO: 165147 - RNA, 19 nt, Artificial Sequence
  Description of Artificial Sequence: Synthetic oligonucleotide
ggaauaaacagaagguaga

SEQ ID NO: 165148 - RNA, 19 nt, Artificial Sequence
  Description of Artificial Sequence: Synthetic oligonucleotide
gguggcauuaucauccgug

SEQ ID NO: 165149 - RNA, 19 nt, Artificial Sequence
  Description of Artificial Sequence: Synthetic oligonucleotide
ugaccaacaaaggaauguu

SEQ ID NO: 165150 - RNA, 19 nt, Artificial Sequence
  Description of Artificial Sequence: Synthetic oligonucleotide
uucgaacuacuguggucag

SEQ ID NO: 165151 - RNA, 19 nt, Artificial Sequence
  Description of Artificial Sequence: Synthetic oligonucleotide
uuuggcugacuuagagcgu

SEQ ID NO: 165152 - RNA, 19 nt, Artificial Sequence
  Description of Artificial Sequence: Synthetic oligonucleotide
ugugcaccagaugagcaaa

SEQ ID NO: 165153 - RNA, 19 nt, Artificial Sequence
  Description of Artificial Sequence: Synthetic oligonucleotide
guggcacgaaaacauuaug

SEQ ID NO: 165154 - RNA, 19 nt, Artificial Sequence
  Description of Artificial Sequence: Synthetic oligonucleotide
ucaagaccggcgagggcug

SEQ ID NO: 165155 - RNA, 19 nt, Artificial Sequence
  Description of Artificial Sequence: Synthetic oligonucleotide
ugaugccaugcugaagcag

SEQ ID NO: 165156 - RNA, 19 nt, Artificial Sequence
  Description of Artificial Sequence: Synthetic oligonucleotide
uggccaacaaaagaugcua

SEQ ID NO: 165157 - RNA, 19 nt, Artificial Sequence
  Description of Artificial Sequence: Synthetic oligonucleotide
cacgaagaaucugauccag

SEQ ID NO: 165158 - RNA, 19 nt, Artificial Sequence
  Description of Artificial Sequence: Synthetic oligonucleotide
acccauaauccuucugggu

SEQ ID NO: 165159 - RNA, 19 nt, Artificial Sequence
  Description of Artificial Sequence: Synthetic oligonucleotide
agaccacuaacuguugccu

SEQ ID NO: 165160 - RNA, 19 nt, Artificial Sequence
  Description of Artificial Sequence: Synthetic oligonucleotide
acaguacaaacgaugcaca

SEQ ID NO: 165161 - RNA, 19 nt, Artificial Sequence
  Description of Artificial Sequence: Synthetic oligonucleotide
caauaaccccagauggcuc

SEQ ID NO: 165162 - RNA, 19 nt, Artificial Sequence
  Description of Artificial Sequence: Synthetic oligonucleotide
guauauauaggaacagccu

SEQ ID NO: 165163 - RNA, 19 nt, Artificial Sequence
  Description of Artificial Sequence: Synthetic oligonucleotide
acaugagauaucccaugaa

SEQ ID NO: 165164 - RNA, 19 nt, Artificial Sequence
  Description of Artificial Sequence: Synthetic oligonucleotide
gaagucggugagauaugcc

SEQ ID NO: 165165 - RNA, 19 nt, Artificial Sequence
  Description of Artificial Sequence: Synthetic oligonucleotide
aagcacauguguacucucu

SEQ ID NO: 165166 - RNA, 19 nt, Artificial Sequence
  Description of Artificial Sequence: Synthetic oligonucleotide
ucgagggcuacaacucaac

SEQ ID NO: 165167 - RNA, 19 nt, Artificial Sequence
  Description of Artificial Sequence: Synthetic oligonucleotide
cacaugagauaucccauga

SEQ ID NO: 165168 - RNA, 19 nt, Artificial Sequence
  Description of Artificial Sequence: Synthetic oligonucleotide
guugcacgaggaaagcaug

SEQ ID NO: 165169 - RNA, 19 nt, Artificial Sequence
  Description of Artificial Sequence: Synthetic oligonucleotide
gcaacaacgggaucauuac

SEQ ID NO: 165170 - RNA, 19 nt, Artificial Sequence
  Description of Artificial Sequence: Synthetic oligonucleotide
caugaagaccacuaacugu

SEQ ID NO: 165171 - RNA, 19 nt, Artificial Sequence
  Description of Artificial Sequence: Synthetic oligonucleotide
agguugaagacuccccuuu

SEQ ID NO: 165172 - RNA, 19 nt, Artificial Sequence
  Description of Artificial Sequence: Synthetic oligonucleotide
ugggucaggcagauuuaga

SEQ ID NO: 165173 - RNA, 19 nt, Artificial Sequence
  Description of Artificial Sequence: Synthetic oligonucleotide
ucgaacuacuguggucagg

SEQ ID NO: 165174 - RNA, 19 nt, Artificial Sequence
  Description of Artificial Sequence: Synthetic oligonucleotide
gggagguuacuggaaaggg

SEQ ID NO: 165175 - RNA, 19 nt, Artificial Sequence
  Description of Artificial Sequence: Synthetic oligonucleotide
uaucauccgugugaagggu

SEQ ID NO: 165176 - RNA, 19 nt, Artificial Sequence
  Description of Artificial Sequence: Synthetic oligonucleotide
aacuuucaguugaucacaa

SEQ ID NO: 165177 - RNA, 19 nt, Artificial Sequence
  Description of Artificial Sequence: Synthetic oligonucleotide
uucacacgaauaucuugua

SEQ ID NO: 165178 - RNA, 19 nt, Artificial Sequence
  Description of Artificial Sequence: Synthetic oligonucleotide
ugcacgaggaaagcaugga

SEQ ID NO: 165179 - RNA, 19 nt, Artificial Sequence
  Description of Artificial Sequence: Synthetic oligonucleotide
uacaaacgaugcacagggu

SEQ ID NO: 165180 - RNA, 19 nt, Artificial Sequence
  Description of Artificial Sequence: Synthetic oligonucleotide
ggcacgaaaacauuaugua

SEQ ID NO: 165181 - RNA, 19 nt, Artificial Sequence
  Description of Artificial Sequence: Synthetic oligonucleotide
aaaggaagucggugagaua

SEQ ID NO: 165182 - RNA, 19 nt, Artificial Sequence
  Description of Artificial Sequence: Synthetic oligonucleotide
gacuaucaggcucuguggu

SEQ ID NO: 165183 - RNA, 19 nt, Artificial Sequence
  Description of Artificial Sequence: Synthetic oligonucleotide
gaaaggggaggcuuuguau

SEQ ID NO: 165184 - RNA, 19 nt, Artificial Sequence
  Description of Artificial Sequence: Synthetic oligonucleotide
gcuccuaccgagaaucuag

SEQ ID NO: 165185 - RNA, 19 nt, Artificial Sequence
  Description of Artificial Sequence: Synthetic oligonucleotide
gacauuugacuaucaggcu

SEQ ID NO: 165186 - RNA, 19 nt, Artificial Sequence
  Description of Artificial Sequence: Synthetic oligonucleotide
ugacguuggucaggaaccc

SEQ ID NO: 165187 - RNA, 19 nt, Artificial Sequence
  Description of Artificial Sequence: Synthetic oligonucleotide
caaagugcccgucccaaga

SEQ ID NO: 165188 - RNA, 19 nt, Artificial Sequence
  Description of Artificial Sequence: Synthetic oligonucleotide
uuguagccgcuugucaucu

SEQ ID NO: 165189 - RNA, 19 nt, Artificial Sequence
  Description of Artificial Sequence: Synthetic oligonucleotide
guugcgugugcaccagaug

SEQ ID NO: 165190 - RNA, 19 nt, Artificial Sequence
  Description of Artificial Sequence: Synthetic oligonucleotide
acauaggcccgcaagcacu

SEQ ID NO: 165191 - RNA, 19 nt, Artificial Sequence
  Description of Artificial Sequence: Synthetic oligonucleotide
agucggugagauaugccug

SEQ ID NO: 165192 - RNA, 19 nt, Artificial Sequence
  Description of Artificial Sequence: Synthetic oligonucleotide
ucucaagaccggcgagggc

SEQ ID NO: 165193 - RNA, 19 nt, Artificial Sequence
  Description of Artificial Sequence: Synthetic oligonucleotide
cuuacugaguauggcacga

SEQ ID NO: 165194 - RNA, 19 nt, Artificial Sequence
  Description of Artificial Sequence: Synthetic oligonucleotide
gccagcuaaaccauccucc

SEQ ID NO: 165195 - RNA, 19 nt, Artificial Sequence
  Description of Artificial Sequence: Synthetic oligonucleotide
caaacucgagggcuacaac

SEQ ID NO: 165196 - RNA, 19 nt, Artificial Sequence
  Description of Artificial Sequence: Synthetic oligonucleotide
uccacgcuugcugugaauu

SEQ ID NO: 165197 - RNA, 19 nt, Artificial Sequence
  Description of Artificial Sequence: Synthetic oligonucleotide
cucuaagauuuuagagcuc

SEQ ID NO: 165198 - RNA, 19 nt, Artificial Sequence
  Description of Artificial Sequence: Synthetic oligonucleotide
gaaguucguggguccagga

SEQ ID NO: 165199 - RNA, 19 nt, Artificial Sequence
  Description of Artificial Sequence: Synthetic oligonucleotide
aggugaauuaggccaucaa

SEQ ID NO: 165200 - RNA, 19 nt, Artificial Sequence
  Description of Artificial Sequence: Synthetic oligonucleotide
gcacgaaaacauuauguaa

SEQ ID NO: 165201 - RNA, 19 nt, Artificial Sequence
  Description of Artificial Sequence: Synthetic oligonucleotide
gugcaucucaagaccggcg

SEQ ID NO: 165202 - RNA, 19 nt, Artificial Sequence
  Description of Artificial Sequence: Synthetic oligonucleotide
cauaggcccgcaagcacuc

SEQ ID NO: 165203 - RNA, 19 nt, Artificial Sequence
  Description of Artificial Sequence: Synthetic oligonucleotide
uuccuucuaaagggaauaa

SEQ ID NO: 165204 - RNA, 19 nt, Artificial Sequence
  Description of Artificial Sequence: Synthetic oligonucleotide
ugccggcuuguccacucag

SEQ ID NO: 165205 - RNA, 19 nt, Artificial Sequence
  Description of Artificial Sequence: Synthetic oligonucleotide
ccuucacacgaauaucuug

SEQ ID NO: 165206 - RNA, 19 nt, Artificial Sequence
  Description of Artificial Sequence: Synthetic oligonucleotide
agccagcgaggcaacaacg

SEQ ID NO: 165207 - RNA, 19 nt, Artificial Sequence
  Description of Artificial Sequence: Synthetic oligonucleotide
ucuagagcuucaggugcug

SEQ ID NO: 165208 - RNA, 19 nt, Artificial Sequence
  Description of Artificial Sequence: Synthetic oligonucleotide
cacagagcuaacuuugccu

SEQ ID NO: 165209 - RNA, 19 nt, Artificial Sequence
  Description of Artificial Sequence: Synthetic oligonucleotide
ggaagucggugagauaugc

SEQ ID NO: 165210 - RNA, 19 nt, Artificial Sequence
  Description of Artificial Sequence: Synthetic oligonucleotide
gccgauggucugcagaacc

SEQ ID NO: 165211 - RNA, 19 nt, Artificial Sequence
  Description of Artificial Sequence: Synthetic oligonucleotide
guacggaugccuucaucca

SEQ ID NO: 165212 - RNA, 19 nt, Artificial Sequence
  Description of Artificial Sequence: Synthetic oligonucleotide
cacauguguacucucugaa

SEQ ID NO: 165213 - RNA, 19 nt, Artificial Sequence
  Description of Artificial Sequence: Synthetic oligonucleotide
agaacccgccucucguugu

SEQ ID NO: 165214 - RNA, 19 nt, Artificial Sequence
  Description of Artificial Sequence: Synthetic oligonucleotide
gacaggggugacauuugac

SEQ ID NO: 165215 - RNA, 19 nt, Artificial Sequence
  Description of Artificial Sequence: Synthetic oligonucleotide
gguacugacuuccugugcu

SEQ ID NO: 165216 - RNA, 19 nt, Artificial Sequence
  Description of Artificial Sequence: Synthetic oligonucleotide
cagcgaggcaacaacggga

SEQ ID NO: 165217 - RNA, 19 nt, Artificial Sequence
  Description of Artificial Sequence: Synthetic oligonucleotide
ggacauagcaacaguaaaa

SEQ ID NO: 165218 - RNA, 19 nt, Artificial Sequence
  Description of Artificial Sequence: Synthetic oligonucleotide
cagaacccgccucucguug

SEQ ID NO: 165219 - RNA, 19 nt, Artificial Sequence
  Description of Artificial Sequence: Synthetic oligonucleotide
uugcuccuaccgagaaucu

SEQ ID NO: 165220 - RNA, 19 nt, Artificial Sequence
  Description of Artificial Sequence: Synthetic oligonucleotide
gggacauagcaacaguaaa

SEQ ID NO: 165221 - RNA, 19 nt, Artificial Sequence
  Description of Artificial Sequence: Synthetic oligonucleotide
agugcccgucccaagagga

SEQ ID NO: 165222 - RNA, 19 nt, Artificial Sequence
  Description of Artificial Sequence: Synthetic oligonucleotide
uuugacuaucaggcucugu

SEQ ID NO: 165223 - RNA, 19 nt, Artificial Sequence
  Description of Artificial Sequence: Synthetic oligonucleotide
cacuaacuguugccuguag

SEQ ID NO: 165224 - RNA, 19 nt, Artificial Sequence
  Description of Artificial Sequence: Synthetic oligonucleotide
gaaagcauagugaucucuu

SEQ ID NO: 165225 - RNA, 19 nt, Artificial Sequence
  Description of Artificial Sequence: Synthetic oligonucleotide
cuuaucagcuggggccugc

SEQ ID NO: 165226 - RNA, 19 nt, Artificial Sequence
  Description of Artificial Sequence: Synthetic oligonucleotide
agcagaaauucgaaccgau

SEQ ID NO: 165227 - RNA, 19 nt, Artificial Sequence
  Description of Artificial Sequence: Synthetic oligonucleotide
auaaccccagauggcucuc

SEQ ID NO: 165228 - RNA, 19 nt, Artificial Sequence
  Description of Artificial Sequence: Synthetic oligonucleotide
aucauccgugugaagggug

SEQ ID NO: 165229 - RNA, 19 nt, Artificial Sequence
  Description of Artificial Sequence: Synthetic oligonucleotide
ggguagaaagcauagugau

SEQ ID NO: 165230 - RNA, 19 nt, Artificial Sequence
  Description of Artificial Sequence: Synthetic oligonucleotide
uggcugucgcacagagccc

SEQ ID NO: 165231 - RNA, 19 nt, Artificial Sequence
  Description of Artificial Sequence: Synthetic oligonucleotide
gaguagagaccaggcggcc

SEQ ID NO: 165232 - RNA, 19 nt, Artificial Sequence
  Description of Artificial Sequence: Synthetic oligonucleotide
uuacuggaaagggcuuagu

SEQ ID NO: 165233 - RNA, 19 nt, Artificial Sequence
  Description of Artificial Sequence: Synthetic oligonucleotide
gccaucaaguacacugggg

SEQ ID NO: 165234 - RNA, 19 nt, Artificial Sequence
  Description of Artificial Sequence: Synthetic oligonucleotide
ggccaacaaaagaugcuag

SEQ ID NO: 165235 - RNA, 19 nt, Artificial Sequence
  Description of Artificial Sequence: Synthetic oligonucleotide
gguagaaagcauagugauc

SEQ ID NO: 165236 - RNA, 19 nt, Artificial Sequence
  Description of Artificial Sequence: Synthetic oligonucleotide
gacuuagagcguguacgga

SEQ ID NO: 165237 - RNA, 19 nt, Artificial Sequence
  Description of Artificial Sequence: Synthetic oligonucleotide
cggaauacaaaugguacug

SEQ ID NO: 165238 - RNA, 19 nt, Artificial Sequence
  Description of Artificial Sequence: Synthetic oligonucleotide
gcaucuuacugaguauggc

SEQ ID NO: 165239 - RNA, 19 nt, Artificial Sequence
  Description of Artificial Sequence: Synthetic oligonucleotide
aguuaccaucugucuggcu

SEQ ID NO: 165240 - RNA, 19 nt, Artificial Sequence
  Description of Artificial Sequence: Synthetic oligonucleotide
ggguggggcaaaauaauca

SEQ ID NO: 165241 - RNA, 19 nt, Artificial Sequence
  Description of Artificial Sequence: Synthetic oligonucleotide
agcgaggcaacaacgggau

SEQ ID NO: 165242 - RNA, 19 nt, Artificial Sequence
  Description of Artificial Sequence: Synthetic oligonucleotide
caccaugaucagagacugc

SEQ ID NO: 165243 - RNA, 19 nt, Artificial Sequence
  Description of Artificial Sequence: Synthetic oligonucleotide
acgcuucggaauacaaaug

SEQ ID NO: 165244 - RNA, 19 nt, Artificial Sequence
  Description of Artificial Sequence: Synthetic oligonucleotide
gcagaaauucgaaccgaug

SEQ ID NO: 165245 - RNA, 19 nt, Artificial Sequence
  Description of Artificial Sequence: Synthetic oligonucleotide
ggaauacaaaugguacuga

SEQ ID NO: 165246 - RNA, 19 nt, Artificial Sequence
  Description of Artificial Sequence: Synthetic oligonucleotide
gggcuuaguauguagcugu

SEQ ID NO: 165247 - RNA, 19 nt, Artificial Sequence
  Description of Artificial Sequence: Synthetic oligonucleotide
gcugagcaaacuggcaaag

SEQ ID NO: 165248 - RNA, 19 nt, Artificial Sequence
  Description of Artificial Sequence: Synthetic oligonucleotide
aguugcgugugcaccagau

SEQ ID NO: 165249 - RNA, 19 nt, Artificial Sequence
  Description of Artificial Sequence: Synthetic oligonucleotide
ugcccgucccaagaggaaa

SEQ ID NO: 165250 - RNA, 19 nt, Artificial Sequence
  Description of Artificial Sequence: Synthetic oligonucleotide
gcaaugaagcagagauggg

SEQ ID NO: 165251 - RNA, 19 nt, Artificial Sequence
  Description of Artificial Sequence: Synthetic oligonucleotide
guagaggugcugagacacc

SEQ ID NO: 165252 - RNA, 19 nt, Artificial Sequence
  Description of Artificial Sequence: Synthetic oligonucleotide
cuccuaccgagaaucuaga

SEQ ID NO: 165253 - RNA, 19 nt, Artificial Sequence
  Description of Artificial Sequence: Synthetic oligonucleotide
ccgauggucugcagaaccc

SEQ ID NO: 165254 - RNA, 19 nt, Artificial Sequence
  Description of Artificial Sequence: Synthetic oligonucleotide
gcaucucaagaccggcgag

SEQ ID NO: 165255 - RNA, 19 nt, Artificial Sequence
  Description of Artificial Sequence: Synthetic oligonucleotide
agcuaacuuugccuucaua

SEQ ID NO: 165256 - RNA, 19 nt, Artificial Sequence
  Description of Artificial Sequence: Synthetic oligonucleotide
agcaaggacugagcuguca

SEQ ID NO: 165257 - RNA, 19 nt, Artificial Sequence
  Description of Artificial Sequence: Synthetic oligonucleotide
acguuggucaggaacccau

SEQ ID NO: 165258 - RNA, 19 nt, Artificial Sequence
  Description of Artificial Sequence: Synthetic oligonucleotide
guacgcuucggaauacaaa

SEQ ID NO: 165259 - RNA, 19 nt, Artificial Sequence
  Description of Artificial Sequence: Synthetic oligonucleotide
ccggcuuguccacucagcc

SEQ ID NO: 165260 - RNA, 19 nt, Artificial Sequence
  Description of Artificial Sequence: Synthetic oligonucleotide
aucacauaccauaguccau

SEQ ID NO: 165261 - RNA, 19 nt, Artificial Sequence
  Description of Artificial Sequence: Synthetic oligonucleotide
cuguggagaccaugggcca

SEQ ID NO: 165262 - RNA, 19 nt, Artificial Sequence
  Description of Artificial Sequence: Synthetic oligonucleotide
uuaggccaucaaguacacu

SEQ ID NO: 165263 - RNA, 19 nt, Artificial Sequence
  Description of Artificial Sequence: Synthetic oligonucleotide
uccgugugaagggugcauu

SEQ ID NO: 165264 - RNA, 19 nt, Artificial Sequence
  Description of Artificial Sequence: Synthetic oligonucleotide
ggaaagcuugacagaugag

SEQ ID NO: 165265 - RNA, 19 nt, Artificial Sequence
  Description of Artificial Sequence: Synthetic oligonucleotide
gcacgaagaaucugaucca

SEQ ID NO: 165266 - RNA, 19 nt, Artificial Sequence
  Description of Artificial Sequence: Synthetic oligonucleotide
aaacgacuggcagcccaaa

SEQ ID NO: 165267 - RNA, 19 nt, Artificial Sequence
  Description of Artificial Sequence: Synthetic oligonucleotide
gaacccgccucucguuguc

SEQ ID NO: 165268 - RNA, 19 nt, Artificial Sequence
  Description of Artificial Sequence: Synthetic oligonucleotide
accggcgagggcugcagaa

SEQ ID NO: 165269 - RNA, 19 nt, Artificial Sequence
  Description of Artificial Sequence: Synthetic oligonucleotide
guguugcacgaggaaagca

SEQ ID NO: 165270 - RNA, 19 nt, Artificial Sequence
  Description of Artificial Sequence: Synthetic oligonucleotide
ugcuccuaccgagaaucua

SEQ ID NO: 165271 - RNA, 19 nt, Artificial Sequence
  Description of Artificial Sequence: Synthetic oligonucleotide
cgaaaacauuauguaacag

SEQ ID NO: 165272 - RNA, 19 nt, Artificial Sequence
  Description of Artificial Sequence: Synthetic oligonucleotide
uccgugguaguggccuggc

SEQ ID NO: 165273 - RNA, 19 nt, Artificial Sequence
  Description of Artificial Sequence: Synthetic oligonucleotide
aggaagucggugagauaug

SEQ ID NO: 165274 - RNA, 19 nt, Artificial Sequence
  Description of Artificial Sequence: Synthetic oligonucleotide
ggggcaaaauaaucaggaa

SEQ ID NO: 165275 - RNA, 19 nt, Artificial Sequence
  Description of Artificial Sequence: Synthetic oligonucleotide
ggcuuuguauuucgaacua

SEQ ID NO: 165276 - RNA, 19 nt, Artificial Sequence
  Description of Artificial Sequence: Synthetic oligonucleotide
cuaggugaauuaggccauc

SEQ ID NO: 165277 - RNA, 19 nt, Artificial Sequence
  Description of Artificial Sequence: Synthetic oligonucleotide
guaguggccuggcgagcug

SEQ ID NO: 165278 - RNA, 19 nt, Artificial Sequence
  Description of Artificial Sequence: Synthetic oligonucleotide
gacguuggucaggaaccca

SEQ ID NO: 165279 - RNA, 19 nt, Artificial Sequence
  Description of Artificial Sequence: Synthetic oligonucleotide
auggcacgaagaaucugau

SEQ ID NO: 165280 - RNA, 19 nt, Artificial Sequence
  Description of Artificial Sequence: Synthetic oligonucleotide
cagcagaaauucgaaccga

SEQ ID NO: 165281 - RNA, 19 nt, Artificial Sequence
  Description of Artificial Sequence: Synthetic oligonucleotide
uccaugccguagaucucuu

SEQ ID NO: 165282 - RNA, 19 nt, Artificial Sequence
  Description of Artificial Sequence: Synthetic oligonucleotide
agguacgcuucggaauaca

SEQ ID NO: 165283 - RNA, 19 nt, Artificial Sequence
  Description of Artificial Sequence: Synthetic oligonucleotide
cauuguggccuugcucauc

SEQ ID NO: 165284 - RNA, 19 nt, Artificial Sequence
  Description of Artificial Sequence: Synthetic oligonucleotide
ggggacauagcaacaguaa

SEQ ID NO: 165285 - RNA, 19 nt, Artificial Sequence
  Description of Artificial Sequence: Synthetic oligonucleotide
aacccgccucucguuguca

SEQ ID NO: 165286 - RNA, 19 nt, Artificial Sequence
  Description of Artificial Sequence: Synthetic oligonucleotide
gcagguuugccagucgguc

SEQ ID NO: 165287 - RNA, 19 nt, Artificial Sequence
  Description of Artificial Sequence: Synthetic oligonucleotide
gggacagauuuugcuuucc

SEQ ID NO: 165288 - RNA, 19 nt, Artificial Sequence
  Description of Artificial Sequence: Synthetic oligonucleotide
cacugacacauaggcccgc

SEQ ID NO: 165289 - RNA, 19 nt, Artificial Sequence
  Description of Artificial Sequence: Synthetic oligonucleotide
caacaacgggaucauuacu

SEQ ID NO: 165290 - RNA, 19 nt, Artificial Sequence
  Description of Artificial Sequence: Synthetic oligonucleotide
ccgugugaagggugcauug

SEQ ID NO: 165291 - RNA, 19 nt, Artificial Sequence
  Description of Artificial Sequence: Synthetic oligonucleotide
ccaaagugcccgucccaag

SEQ ID NO: 165292 - RNA, 19 nt, Artificial Sequence
  Description of Artificial Sequence: Synthetic oligonucleotide
cugagacaccuuauaguau

SEQ ID NO: 165293 - RNA, 19 nt, Artificial Sequence
  Description of Artificial Sequence: Synthetic oligonucleotide
ggggugacauuugacuauc

SEQ ID NO: 165294 - RNA, 19 nt, Artificial Sequence
  Description of Artificial Sequence: Synthetic oligonucleotide
gccucucguugucauuaag

SEQ ID NO: 165295 - RNA, 19 nt, Artificial Sequence
  Description of Artificial Sequence: Synthetic oligonucleotide
ucaugccacugggcuaccu

SEQ ID NO: 165296 - RNA, 19 nt, Artificial Sequence
  Description of Artificial Sequence: Synthetic oligonucleotide
guucguggguccaggagcu

SEQ ID NO: 165297 - RNA, 19 nt, Artificial Sequence
  Description of Artificial Sequence: Synthetic oligonucleotide
caucuugacuccacuccgu

SEQ ID NO: 165298 - RNA, 19 nt, Artificial Sequence
  Description of Artificial Sequence: Synthetic oligonucleotide
cagguacgcuucggaauac

SEQ ID NO: 165299 - RNA, 19 nt, Artificial Sequence
  Description of Artificial Sequence: Synthetic oligonucleotide
auccgugugaagggugcau

SEQ ID NO: 165300 - RNA, 19 nt, Artificial Sequence
  Description of Artificial Sequence: Synthetic oligonucleotide
cgaacuacuguggucagga

SEQ ID NO: 165301 - RNA, 19 nt, Artificial Sequence
  Description of Artificial Sequence: Synthetic oligonucleotide
uucguggguccaggagcug

SEQ ID NO: 165302 - RNA, 19 nt, Artificial Sequence
  Description of Artificial Sequence: Synthetic oligonucleotide
acccgccucucguugucau

SEQ ID NO: 165303 - RNA, 19 nt, Artificial Sequence
  Description of Artificial Sequence: Synthetic oligonucleotide
cacgcuugcugugaauucu

SEQ ID NO: 165304 - RNA, 19 nt, Artificial Sequence
  Description of Artificial Sequence: Synthetic oligonucleotide
ccacgcuugcugugaauuc

SEQ ID NO: 165305 - RNA, 19 nt, Artificial Sequence
  Description of Artificial Sequence: Synthetic oligonucleotide
cgugguaguggccuggcga

SEQ ID NO: 165306 - RNA, 19 nt, Artificial Sequence
  Description of Artificial Sequence: Synthetic oligonucleotide
gaauaucuuguagccgcuu

SEQ ID NO: 165307 - RNA, 19 nt, Artificial Sequence
  Description of Artificial Sequence: Synthetic oligonucleotide
guugccuguaggaacuguu

SEQ ID NO: 165308 - RNA, 19 nt, Artificial Sequence
  Description of Artificial Sequence: Synthetic oligonucleotide
gaugggaagauggcuccuu

SEQ ID NO: 165309 - RNA, 19 nt, Artificial Sequence
  Description of Artificial Sequence: Synthetic oligonucleotide
ccgagaaucuagagcuuca

SEQ ID NO: 165310 - RNA, 19 nt, Artificial Sequence
  Description of Artificial Sequence: Synthetic oligonucleotide
gggguaucuucacaggauu

SEQ ID NO: 165311 - RNA, 19 nt, Artificial Sequence
  Description of Artificial Sequence: Synthetic oligonucleotide
cuacuguggucaggauauc

SEQ ID NO: 165312 - RNA, 19 nt, Artificial Sequence
  Description of Artificial Sequence: Synthetic oligonucleotide
gcuaccuguuccaguguca

SEQ ID NO: 165313 - RNA, 19 nt, Artificial Sequence
  Description of Artificial Sequence: Synthetic oligonucleotide
ucgguccugggaggcuaca

SEQ ID NO: 165314 - RNA, 19 nt, Artificial Sequence
  Description of Artificial Sequence: Synthetic oligonucleotide
auaggcccgcaagcacucu

SEQ ID NO: 165315 - RNA, 19 nt, Artificial Sequence
  Description of Artificial Sequence: Synthetic oligonucleotide
gcugccggcuuguccacuc

SEQ ID NO: 165316 - RNA, 19 nt, Artificial Sequence
  Description of Artificial Sequence: Synthetic oligonucleotide
caagcucccgcccugccuu

SEQ ID NO: 165317 - RNA, 19 nt, Artificial Sequence
  Description of Artificial Sequence: Synthetic oligonucleotide
ugcugccggcuuguccacu

SEQ ID NO: 165318 - RNA, 19 nt, Artificial Sequence
  Description of Artificial Sequence: Synthetic oligonucleotide
cagguugaagacuccccuu

SEQ ID NO: 165319 - RNA, 19 nt, Artificial Sequence
  Description of Artificial Sequence: Synthetic oligonucleotide
gguaguggccuggcgagcu

SEQ ID NO: 165320 - RNA, 19 nt, Artificial Sequence
  Description of Artificial Sequence: Synthetic oligonucleotide
cccgucccaagaggaaagg

SEQ ID NO: 165321 - RNA, 19 nt, Artificial Sequence
  Description of Artificial Sequence: Synthetic oligonucleotide
gagcaaggacugagcuguc

SEQ ID NO: 165322 - RNA, 19 nt, Artificial Sequence
  Description of Artificial Sequence: Synthetic oligonucleotide
ccaguugcgugugcaccag

SEQ ID NO: 165323 - RNA, 19 nt, Artificial Sequence
  Description of Artificial Sequence: Synthetic oligonucleotide
gccggcuuguccacucagc

SEQ ID NO: 165324 - RNA, 19 nt, Artificial Sequence
  Description of Artificial Sequence: Synthetic oligonucleotide
caguugcgugugcaccaga

SEQ ID NO: 165325 - RNA, 19 nt, Artificial Sequence
  Description of Artificial Sequence: Synthetic oligonucleotide
gucgguccugggaggcuac

SEQ ID NO: 165326 - RNA, 19 nt, Artificial Sequence
  Description of Artificial Sequence: Synthetic oligonucleotide
gcugugaauucugggucaa

SEQ ID NO: 165327 - RNA, 19 nt, Artificial Sequence
  Description of Artificial Sequence: Synthetic oligonucleotide
gcuaggugaauuaggccau

SEQ ID NO: 165328 - RNA, 19 nt, Artificial Sequence
  Description of Artificial Sequence: Synthetic oligonucleotide
ccaugccguagaucucuuc

SEQ ID NO: 165329 - RNA, 19 nt, Artificial Sequence
  Description of Artificial Sequence: Synthetic oligonucleotide
ccgcaagcacucuccacca

SEQ ID NO: 165330 - RNA, 19 nt, Artificial Sequence
  Description of Artificial Sequence: Synthetic oligonucleotide
gguuugccagucgguccug

SEQ ID NO: 165331 - RNA, 19 nt, Artificial Sequence
  Description of Artificial Sequence: Synthetic oligonucleotide
gagcguguacggaugccuu

SEQ ID NO: 165332 - RNA, 19 nt, Artificial Sequence
  Description of Artificial Sequence: Synthetic oligonucleotide
ccgugguaguggccuggcg

SEQ ID NO: 165333 - RNA, 19 nt, Artificial Sequence
  Description of Artificial Sequence: Synthetic oligonucleotide
gcccgcaagcacucuccac

SEQ ID NO: 165334 - RNA, 19 nt, Artificial Sequence
  Description of Artificial Sequence: Synthetic oligonucleotide
ggcuacaacucaaccacuu

SEQ ID NO: 165335 - RNA, 19 nt, Artificial Sequence
  Description of Artificial Sequence: Synthetic oligonucleotide
cugccggcuuguccacuca

SEQ ID NO: 165336 - RNA, 19 nt, Artificial Sequence
  Description of Artificial Sequence: Synthetic oligonucleotide
ccguagaucucuucucccu

SEQ ID NO: 165337 - RNA, 19 nt, Artificial Sequence
  Description of Artificial Sequence: Synthetic oligonucleotide
ggucaacaguacaaacgau

SEQ ID NO: 165338 - RNA, 19 nt, Artificial Sequence
  Description of Artificial Sequence: Synthetic oligonucleotide
ggguaucuucacaggauuu

SEQ ID NO: 165339 - RNA, 19 nt, Artificial Sequence
  Description of Artificial Sequence: Synthetic oligonucleotide
cccaaagugcccgucccaa

SEQ ID NO: 165340 - RNA, 19 nt, Artificial Sequence
  Description of Artificial Sequence: Synthetic oligonucleotide
ccgucccaagaggaaagga

SEQ ID NO: 165341 - RNA, 19 nt, Artificial Sequence
  Description of Artificial Sequence: Synthetic oligonucleotide
cgaauaucuuguagccgcu

SEQ ID NO: 165342 - RNA, 19 nt, Artificial Sequence
  Description of Artificial Sequence: Synthetic oligonucleotide
ccgccucucguugucauua

SEQ ID NO: 165343 - RNA, 19 nt, Artificial Sequence
  Description of Artificial Sequence: Synthetic oligonucleotide
gggcuacaacucaaccacu

SEQ ID NO: 165344 - RNA, 19 nt, Artificial Sequence
  Description of Artificial Sequence: Synthetic oligonucleotide
cucaaccacuuuggaggau

SEQ ID NO: 165345 - RNA, 19 nt, Artificial Sequence
  Description of Artificial Sequence: Synthetic oligonucleotide
ccacuaacuguugccugua

SEQ ID NO: 165346 - RNA, 19 nt, Artificial Sequence
  Description of Artificial Sequence: Synthetic oligonucleotide
ggcuuaguauguagcuguu

SEQ ID NO: 165347 - RNA, 19 nt, Artificial Sequence
  Description of Artificial Sequence: Synthetic oligonucleotide
gggccuugacaagcuucaa

SEQ ID NO: 165348 - RNA, 19 nt, Artificial Sequence
  Description of Artificial Sequence: Synthetic oligonucleotide
ggucugcaaggaugacguu

SEQ ID NO: 165349 - RNA, 19 nt, Artificial Sequence
  Description of Artificial Sequence: Synthetic oligonucleotide
ccgcccugccuuggagaug

SEQ ID NO: 165350 - RNA, 19 nt, Artificial Sequence
  Description of Artificial Sequence: Synthetic oligonucleotide
cccgccucucguugucauu

SEQ ID NO: 165351 - RNA, 19 nt, Artificial Sequence
  Description of Artificial Sequence: Synthetic oligonucleotide
ugaauaaagguuaugaucc

SEQ ID NO: 165352 - RNA, 19 nt, Artificial Sequence
  Description of Artificial Sequence: Synthetic oligonucleotide
uguugaaugauaaaacucu

SEQ ID NO: 165353 - RNA, 19 nt, Artificial Sequence
  Description of Artificial Sequence: Synthetic oligonucleotide
aaacccuaucccuuaaagc

SEQ ID NO: 165354 - RNA, 19 nt, Artificial Sequence
  Description of Artificial Sequence: Synthetic oligonucleotide
uuuaaaagguuccuacagg

SEQ ID NO: 165355 - RNA, 19 nt, Artificial Sequence
  Description of Artificial Sequence: Synthetic oligonucleotide
aacccuaucccuuaaagca

SEQ ID NO: 165356 - RNA, 19 nt, Artificial Sequence
  Description of Artificial Sequence: Synthetic oligonucleotide
gauaccuaauaauaaauga

SEQ ID NO: 165357 - RNA, 19 nt, Artificial Sequence
  Description of Artificial Sequence: Synthetic oligonucleotide
ugauaccuaauaauaaaug

SEQ ID NO: 165358 - RNA, 19 nt, Artificial Sequence
  Description of Artificial Sequence: Synthetic oligonucleotide
uucuauugagcuuuccggg

SEQ ID NO: 165359 - RNA, 19 nt, Artificial Sequence
  Description of Artificial Sequence: Synthetic oligonucleotide
  modified_base (11)..(11): a, c, u, g, unknown or other
gauacgucacnccaaacug

SEQ ID NO: 165360 - RNA, 19 nt, Artificial Sequence
  Description of Artificial Sequence: Synthetic oligonucleotide
cuucuauugagcuuuccgg

SEQ ID NO: 165361 - RNA, 19 nt, Artificial Sequence
  Description of Artificial Sequence: Synthetic oligonucleotide
cugaauaaagguuaugauc

SEQ ID NO: 165362 - RNA, 19 nt, Artificial Sequence
  Description of Artificial Sequence: Synthetic oligonucleotide
cugagaaucacuugcaaug

SEQ ID NO: 165363 - RNA, 19 nt, Artificial Sequence
  Description of Artificial Sequence: Synthetic oligonucleotide
ucacucuacagaaucgggg

SEQ ID NO: 165364 - RNA, 19 nt, Artificial Sequence
  Description of Artificial Sequence: Synthetic oligonucleotide
ugucauuacguaaugcaca

SEQ ID NO: 165365 - RNA, 19 nt, Artificial Sequence
  Description of Artificial Sequence: Synthetic oligonucleotide
agcacgaguaccuugcagg

SEQ ID NO: 165366 - RNA, 19 nt, Artificial Sequence
  Description of Artificial Sequence: Synthetic oligonucleotide
uguaaauguccacucagcu

SEQ ID NO: 165367 - RNA, 19 nt, Artificial Sequence
  Description of Artificial Sequence: Synthetic oligonucleotide
uuacguaaugcacaaggca

SEQ ID NO: 165368 - RNA, 19 nt, Artificial Sequence
  Description of Artificial Sequence: Synthetic oligonucleotide
cauuuguugcagcaaaacg

SEQ ID NO: 165369 - RNA, 19 nt, Artificial Sequence
  Description of Artificial Sequence: Synthetic oligonucleotide
uacgagaaagugcaacagg

SEQ ID NO: 165370 - RNA, 19 nt, Artificial Sequence
  Description of Artificial Sequence: Synthetic oligonucleotide
acuagcuagagugagugcg

SEQ ID NO: 165371 - RNA, 19 nt, Artificial Sequence
  Description of Artificial Sequence: Synthetic oligonucleotide
agacuaaagacaguacccc

SEQ ID NO: 165372 - RNA, 19 nt, Artificial Sequence
  Description of Artificial Sequence: Synthetic oligonucleotide
acgaguaccuugcaggugg

SEQ ID NO: 165373 - RNA, 19 nt, Artificial Sequence
  Description of Artificial Sequence: Synthetic oligonucleotide
aguuagaagaguuguucuc

SEQ ID NO: 165374 - RNA, 19 nt, Artificial Sequence
  Description of Artificial Sequence: Synthetic oligonucleotide
ugaugaugccccaaugucc

SEQ ID NO: 165375 - RNA, 19 nt, Artificial Sequence
  Description of Artificial Sequence: Synthetic oligonucleotide
aguaguuaaaaguauuuua

SEQ ID NO: 165376 - RNA, 19 nt, Artificial Sequence
  Description of Artificial Sequence: Synthetic oligonucleotide
aagaggucuccucuugaac

SEQ ID NO: 165377 - RNA, 19 nt, Artificial Sequence
  Description of Artificial Sequence: Synthetic oligonucleotide
acucuuacccuuccgaauc

SEQ ID NO: 165378 - RNA, 19 nt, Artificial Sequence
  Description of Artificial Sequence: Synthetic oligonucleotide
uggucggucacccugcggg

SEQ ID NO: 165379 - RNA, 19 nt, Artificial Sequence
  Description of Artificial Sequence: Synthetic oligonucleotide
uccgaaucuagcaggagcc

SEQ ID NO: 165380 - RNA, 19 nt, Artificial Sequence
  Description of Artificial Sequence: Synthetic oligonucleotide
cauuuaguggguagaagcc

SEQ ID NO: 165381 - RNA, 19 nt, Artificial Sequence
  Description of Artificial Sequence: Synthetic oligonucleotide
ucuuauuccauccgcuggc

SEQ ID NO: 165382 - RNA, 19 nt, Artificial Sequence
  Description of Artificial Sequence: Synthetic oligonucleotide
guuaugauccaauuuguuc

SEQ ID NO: 165383 - RNA, 19 nt, Artificial Sequence
  Description of Artificial Sequence: Synthetic oligonucleotide
  modified_base (12)..(12): a, c, u, g, unknown or other
agauacgucacnccaaacu

SEQ ID NO: 165384 - RNA, 19 nt, Artificial Sequence
  Description of Artificial Sequence: Synthetic oligonucleotide
aaguucaccuguuacgaga

SEQ ID NO: 165385 - RNA, 19 nt, Artificial Sequence
  Description of Artificial Sequence: Synthetic oligonucleotide
auuacguaaugcacaaggc

SEQ ID NO: 165386 - RNA, 19 nt, Artificial Sequence
  Description of Artificial Sequence: Synthetic oligonucleotide
ucggacucaagacuaaaga

SEQ ID NO: 165387 - RNA, 19 nt, Artificial Sequence
  Description of Artificial Sequence: Synthetic oligonucleotide
auagaaagcccaauucccc

SEQ ID NO: 165388 - RNA, 19 nt, Artificial Sequence
  Description of Artificial Sequence: Synthetic oligonucleotide
ugcgcuggcaaucagacua

SEQ ID NO: 165389 - RNA, 19 nt, Artificial Sequence
  Description of Artificial Sequence: Synthetic oligonucleotide
  modified_base (4)..(4): a, c, u, g, unknown or other
acunaggggcucuugacca

SEQ ID NO: 165390 - RNA, 19 nt, Artificial Sequence
  Description of Artificial Sequence: Synthetic oligonucleotide
  modified_base (5)..(5): a, c, u, g, unknown or other
uacunaggggcucuugacc

SEQ ID NO: 165391 - RNA, 19 nt, Artificial Sequence
  Description of Artificial Sequence: Synthetic oligonucleotide
ucagguacugggaagcaca

SEQ ID NO: 165392 - RNA, 19 nt, Artificial Sequence
  Description of Artificial Sequence: Synthetic oligonucleotide
uuccgaaucuagcaggagc

SEQ ID NO: 165393 - RNA, 19 nt, Artificial Sequence
  Description of Artificial Sequence: Synthetic oligonucleotide
gugauaaucgccuugccuc

SEQ ID NO: 165394 - RNA, 19 nt, Artificial Sequence
  Description of Artificial Sequence: Synthetic oligonucleotide
uuagagccaacgcaacucc

SEQ ID NO: 165395 - RNA, 19 nt, Artificial Sequence
  Description of Artificial Sequence: Synthetic oligonucleotide
  modified_base (10)..(10): a, c, u, g, unknown or other
auacgucacnccaaacugc

SEQ ID NO: 165396 - RNA, 19 nt, Artificial Sequence
  Description of Artificial Sequence: Synthetic oligonucleotide
aguaauguuacaugacuaa

SEQ ID NO: 165397 - RNA, 19 nt, Artificial Sequence
  Description of Artificial Sequence: Synthetic oligonucleotide
agguguguagaccaccuuc

SEQ ID NO: 165398 - RNA, 19 nt, Artificial Sequence
  Description of Artificial Sequence: Synthetic oligonucleotide
cuaagucauaggcacgugg

SEQ ID NO: 165399 - RNA, 19 nt, Artificial Sequence
  Description of Artificial Sequence: Synthetic oligonucleotide
aagaccaaaccagugccuc

SEQ ID NO: 165400 - RNA, 19 nt, Artificial Sequence
  Description of Artificial Sequence: Synthetic oligonucleotide
uccuacagagaauuacugc

SEQ ID NO: 165401 - RNA, 19 nt, Artificial Sequence
  Description of Artificial Sequence: Synthetic oligonucleotide
ugaauacaacuaaagccgu

SEQ ID NO: 165402 - RNA, 19 nt, Artificial Sequence
  Description of Artificial Sequence: Synthetic oligonucleotide
ucagacuaggaaacccuag

SEQ ID NO: 165403 - RNA, 19 nt, Artificial Sequence
  Description of Artificial Sequence: Synthetic oligonucleotide
gaugagacgcacugcugcg

SEQ ID NO: 165404 - RNA, 19 nt, Artificial Sequence
  Description of Artificial Sequence: Synthetic oligonucleotide
  modified_base (9)..(9): a, c, u, g, unknown or other
uacgucacnccaaacugca

SEQ ID NO: 165405 - RNA, 19 nt, Artificial Sequence
  Description of Artificial Sequence: Synthetic oligonucleotide
ucuaagaaguaauguuaca

SEQ ID NO: 165406 - RNA, 19 nt, Artificial Sequence
  Description of Artificial Sequence: Synthetic oligonucleotide
uacagagaauuacugccca

SEQ ID NO: 165407 - RNA, 19 nt, Artificial Sequence
  Description of Artificial Sequence: Synthetic oligonucleotide
gaaguaauguuacaugacu

SEQ ID NO: 165408 - RNA, 19 nt, Artificial Sequence
  Description of Artificial Sequence: Synthetic oligonucleotide
aguauguacaccaggcuag

SEQ ID NO: 165409 - RNA, 19 nt, Artificial Sequence
  Description of Artificial Sequence: Synthetic oligonucleotide
acaaucuaucucaagccac

SEQ ID NO: 165410 - RNA, 19 nt, Artificial Sequence
  Description of Artificial Sequence: Synthetic oligonucleotide
ucaagacuaaagacaguac

SEQ ID NO: 165411 - RNA, 19 nt, Artificial Sequence
  Description of Artificial Sequence: Synthetic oligonucleotide
cuugugauaaucgccuugc

SEQ ID NO: 165412 - RNA, 19 nt, Artificial Sequence
  Description of Artificial Sequence: Synthetic oligonucleotide
aaaucuuauuccauccgcu

SEQ ID NO: 165413 - RNA, 19 nt, Artificial Sequence
  Description of Artificial Sequence: Synthetic oligonucleotide
augggaucagccaagugac

SEQ ID NO: 165414 - RNA, 19 nt, Artificial Sequence
  Description of Artificial Sequence: Synthetic oligonucleotide
auucucuuaauuaaacccu

SEQ ID NO: 165415 - RNA, 19 nt, Artificial Sequence
  Description of Artificial Sequence: Synthetic oligonucleotide
ugauaaucgccuugccucc

SEQ ID NO: 165416 - RNA, 19 nt, Artificial Sequence
  Description of Artificial Sequence: Synthetic oligonucleotide
uuacgagaaagugcaacag

SEQ ID NO: 165417 - RNA, 19 nt, Artificial Sequence
  Description of Artificial Sequence: Synthetic oligonucleotide
uguuacgagaaagugcaac

SEQ ID NO: 165418 - RNA, 19 nt, Artificial Sequence
  Description of Artificial Sequence: Synthetic oligonucleotide
uuaaaucugaggagacuuc

SEQ ID NO: 165419 - RNA, 19 nt, Artificial Sequence
  Description of Artificial Sequence: Synthetic oligonucleotide
ucuauugagcuuuccgggu

SEQ ID NO: 165420 - RNA, 19 nt, Artificial Sequence
  Description of Artificial Sequence: Synthetic oligonucleotide
uagaguaguuaaaaguauu

SEQ ID NO: 165421 - RNA, 19 nt, Artificial Sequence
  Description of Artificial Sequence: Synthetic oligonucleotide
ggacauuuggcaauguagg

SEQ ID NO: 165422 - RNA, 19 nt, Artificial Sequence
  Description of Artificial Sequence: Synthetic oligonucleotide
aaucagacuaggaaacccu

SEQ ID NO: 165423 - RNA, 19 nt, Artificial Sequence
  Description of Artificial Sequence: Synthetic oligonucleotide
ugccaagauguugucaccg

SEQ ID NO: 165424 - RNA, 19 nt, Artificial Sequence
  Description of Artificial Sequence: Synthetic oligonucleotide
uacccuuccgaaucuagca

SEQ ID NO: 165425 - RNA, 19 nt, Artificial Sequence
  Description of Artificial Sequence: Synthetic oligonucleotide
uucucuuaauuaaacccua

SEQ ID NO: 165426 - RNA, 19 nt, Artificial Sequence
  Description of Artificial Sequence: Synthetic oligonucleotide
aagcacgaguaccuugcag

SEQ ID NO: 165427 - RNA, 19 nt, Artificial Sequence
  Description of Artificial Sequence: Synthetic oligonucleotide
agaaucggggaccaggaaa

SEQ ID NO: 165428 - RNA, 19 nt, Artificial Sequence
  Description of Artificial Sequence: Synthetic oligonucleotide
ugagcuuuccggguuagca

SEQ ID NO: 165429 - RNA, 19 nt, Artificial Sequence
  Description of Artificial Sequence: Synthetic oligonucleotide
uaaagguuaugauccaauu

SEQ ID NO: 165430 - RNA, 19 nt, Artificial Sequence
  Description of Artificial Sequence: Synthetic oligonucleotide
uagaugggaacuucacucu

SEQ ID NO: 165431 - RNA, 19 nt, Artificial Sequence
  Description of Artificial Sequence: Synthetic oligonucleotide
acguaaugcacaaggcagc

SEQ ID NO: 165432 - RNA, 19 nt, Artificial Sequence
  Description of Artificial Sequence: Synthetic oligonucleotide
agacuaggaaacccuaggu

SEQ ID NO: 165433 - RNA, 19 nt, Artificial Sequence
  Description of Artificial Sequence: Synthetic oligonucleotide
agaccaagaggucuccucu

SEQ ID NO: 165434 - RNA, 19 nt, Artificial Sequence
  Description of Artificial Sequence: Synthetic oligonucleotide
ugugaacaaucuaucucaa

SEQ ID NO: 165435 - RNA, 19 nt, Artificial Sequence
  Description of Artificial Sequence: Synthetic oligonucleotide
ucauuaagugauaccuaau

SEQ ID NO: 165436 - RNA, 19 nt, Artificial Sequence
  Description of Artificial Sequence: Synthetic oligonucleotide
cacugaauaaagguuauga

SEQ ID NO: 165437 - RNA, 19 nt, Artificial Sequence
  Description of Artificial Sequence: Synthetic oligonucleotide
uacugggaagcacacuaac

SEQ ID NO: 165438 - RNA, 19 nt, Artificial Sequence
  Description of Artificial Sequence: Synthetic oligonucleotide
cuuacccuuccgaaucuag

SEQ ID NO: 165439 - RNA, 19 nt, Artificial Sequence
  Description of Artificial Sequence: Synthetic oligonucleotide
ugagugcgugcauggaucc

SEQ ID NO: 165440 - RNA, 19 nt, Artificial Sequence
  Description of Artificial Sequence: Synthetic oligonucleotide
cuuagagccaacgcaacuc

SEQ ID NO: 165441 - RNA, 19 nt, Artificial Sequence
  Description of Artificial Sequence: Synthetic oligonucleotide
augccugauaugucacugg

SEQ ID NO: 165442 - RNA, 19 nt, Artificial Sequence
  Description of Artificial Sequence: Synthetic oligonucleotide
cauuaagugauaccuaaua

SEQ ID NO: 165443 - RNA, 19 nt, Artificial Sequence
  Description of Artificial Sequence: Synthetic oligonucleotide
ugcuaagucauaggcacgu

SEQ ID NO: 165444 - RNA, 19 nt, Artificial Sequence
  Description of Artificial Sequence: Synthetic oligonucleotide
cuugacagguguguagacc

SEQ ID NO: 165445 - RNA, 19 nt, Artificial Sequence
  Description of Artificial Sequence: Synthetic oligonucleotide
augucauuacuaucuucug

SEQ ID NO: 165446 - RNA, 19 nt, Artificial Sequence
  Description of Artificial Sequence: Synthetic oligonucleotide
auuacugcccaaguugaca

SEQ ID NO: 165447 - RNA, 19 nt, Artificial Sequence
  Description of Artificial Sequence: Synthetic oligonucleotide
ggaacaucuaguugaacuc

SEQ ID NO: 165448 - RNA, 19 nt, Artificial Sequence
  Description of Artificial Sequence: Synthetic oligonucleotide
ccuguuacgagaaagugca

SEQ ID NO: 165449 - RNA, 19 nt, Artificial Sequence
  Description of Artificial Sequence: Synthetic oligonucleotide
guuagcagggcuaaacaca

SEQ ID NO: 165450 - RNA, 19 nt, Artificial Sequence
  Description of Artificial Sequence: Synthetic oligonucleotide
guaagccaaaggaugacac

SEQ ID NO: 165451 - RNA, 19 nt, Artificial Sequence
  Description of Artificial Sequence: Synthetic oligonucleotide
auuuaguggguagaagcca

SEQ ID NO: 165452 - RNA, 19 nt, Artificial Sequence
  Description of Artificial Sequence: Synthetic oligonucleotide
  modified_base (2)..(2): a, c, u, g, unknown or other
unaggggcucuugaccacg

SEQ ID NO: 165453 - RNA, 19 nt, Artificial Sequence
  Description of Artificial Sequence: Synthetic oligonucleotide
gucauuacguaaugcacaa

SEQ ID NO: 165454 - RNA, 19 nt, Artificial Sequence
  Description of Artificial Sequence: Synthetic oligonucleotide
uugugauaaucgccuugcc

SEQ ID NO: 165455 - RNA, 19 nt, Artificial Sequence
  Description of Artificial Sequence: Synthetic oligonucleotide
  modified_base (6)..(6): a, c, u, g, unknown or other
gucacnccaaacugcagca

SEQ ID NO: 165456 - RNA, 19 nt, Artificial Sequence
  Description of Artificial Sequence: Synthetic oligonucleotide
  modified_base (7)..(7): a, c, u, g, unknown or other
gguacunaggggcucuuga

SEQ ID NO: 165457 - RNA, 19 nt, Artificial Sequence
  Description of Artificial Sequence: Synthetic oligonucleotide
cacacuaacccaggguucc

SEQ ID NO: 165458 - RNA, 19 nt, Artificial Sequence
  Description of Artificial Sequence: Synthetic oligonucleotide
gaucccgggauacucuuuc

SEQ ID NO: 165459 - RNA, 19 nt, Artificial Sequence
  Description of Artificial Sequence: Synthetic oligonucleotide
agugagugcgugcauggau

SEQ ID NO: 165460 - RNA, 19 nt, Artificial Sequence
  Description of Artificial Sequence: Synthetic oligonucleotide
aacuaaagccguagguccu

SEQ ID NO: 165461 - RNA, 19 nt, Artificial Sequence
  Description of Artificial Sequence: Synthetic oligonucleotide
agaggcaccaaaaucuuau

SEQ ID NO: 165462 - RNA, 19 nt, Artificial Sequence
  Description of Artificial Sequence: Synthetic oligonucleotide
gguuagcagggcuaaacac

SEQ ID NO: 165463 - RNA, 19 nt, Artificial Sequence
  Description of Artificial Sequence: Synthetic oligonucleotide
uaaucugcgcuggcaauca

SEQ ID NO: 165464 - RNA, 19 nt, Artificial Sequence
  Description of Artificial Sequence: Synthetic oligonucleotide
agacgcacugcugcgguac

SEQ ID NO: 165465 - RNA, 19 nt, Artificial Sequence
  Description of Artificial Sequence: Synthetic oligonucleotide
accaagcacgaguaccuug

SEQ ID NO: 165466 - RNA, 19 nt, Artificial Sequence
  Description of Artificial Sequence: Synthetic oligonucleotide
accaagaggucuccucuug

SEQ ID NO: 165467 - RNA, 19 nt, Artificial Sequence
  Description of Artificial Sequence: Synthetic oligonucleotide
aaucugcgcuggcaaucag

SEQ ID NO: 165468 - RNA, 19 nt, Artificial Sequence
  Description of Artificial Sequence: Synthetic oligonucleotide
aggugucacugcuaaguca

SEQ ID NO: 165469 - RNA, 19 nt, Artificial Sequence
  Description of Artificial Sequence: Synthetic oligonucleotide
  modified_base (6)..(6): a, c, u, g, unknown or other
guacunaggggcucuugac

SEQ ID NO: 165470 - RNA, 19 nt, Artificial Sequence
  Description of Artificial Sequence: Synthetic oligonucleotide
ugcuccgccccuccaaggc

SEQ ID NO: 165471 - RNA, 19 nt, Artificial Sequence
  Description of Artificial Sequence: Synthetic oligonucleotide
gguuccuacaggcaguauc

SEQ ID NO: 165472 - RNA, 19 nt, Artificial Sequence
  Description of Artificial Sequence: Synthetic oligonucleotide
aacuugugauaaucgccuu

SEQ ID NO: 165473 - RNA, 19 nt, Artificial Sequence
  Description of Artificial Sequence: Synthetic oligonucleotide
gaggugucacugcuaaguc

SEQ ID NO: 165474 - RNA, 19 nt, Artificial Sequence
  Description of Artificial Sequence: Synthetic oligonucleotide
guugccugucauuacguaa

SEQ ID NO: 165475 - RNA, 19 nt, Artificial Sequence
  Description of Artificial Sequence: Synthetic oligonucleotide
cagccuguaaucugcgcug

SEQ ID NO: 165476 - RNA, 19 nt, Artificial Sequence
  Description of Artificial Sequence: Synthetic oligonucleotide
ccaagcacgaguaccuugc

SEQ ID NO: 165477 - RNA, 19 nt, Artificial Sequence
  Description of Artificial Sequence: Synthetic oligonucleotide
aaucgccuugccuccacuu

SEQ ID NO: 165478 - RNA, 19 nt, Artificial Sequence
  Description of Artificial Sequence: Synthetic oligonucleotide
gccgugucaauuccaaaag

SEQ ID NO: 165479 - RNA, 19 nt, Artificial Sequence
  Description of Artificial Sequence: Synthetic oligonucleotide
agccaacgcaacuccaacu

SEQ ID NO: 165480 - RNA, 19 nt, Artificial Sequence
  Description of Artificial Sequence: Synthetic oligonucleotide
ucauuacguaaugcacaag

SEQ ID NO: 165481 - RNA, 19 nt, Artificial Sequence
  Description of Artificial Sequence: Synthetic oligonucleotide
  modified_base (5)..(5): a, c, u, g, unknown or other
ucacnccaaacugcagcag

SEQ ID NO: 165482 - RNA, 19 nt, Artificial Sequence
  Description of Artificial Sequence: Synthetic oligonucleotide
ccaaugugaacaaucuauc

SEQ ID NO: 165483 - RNA, 19 nt, Artificial Sequence
  Description of Artificial Sequence: Synthetic oligonucleotide
ugugccaacucuggcuagc

SEQ ID NO: 165484 - RNA, 19 nt, Artificial Sequence
  Description of Artificial Sequence: Synthetic oligonucleotide
guuaaaucugaggagacuu

SEQ ID NO: 165485 - RNA, 19 nt, Artificial Sequence
  Description of Artificial Sequence: Synthetic oligonucleotide
gaaagugcaacaggaugaa

SEQ ID NO: 165486 - RNA, 19 nt, Artificial Sequence
  Description of Artificial Sequence: Synthetic oligonucleotide
ugccaacucuggcuagcag

SEQ ID NO: 165487 - RNA, 19 nt, Artificial Sequence
  Description of Artificial Sequence: Synthetic oligonucleotide
acugccacgcugaauagaa

SEQ ID NO: 165488 - RNA, 19 nt, Artificial Sequence
  Description of Artificial Sequence: Synthetic oligonucleotide
  modified_base (7)..(7): a, c, u, g, unknown or other
cgucacnccaaacugcagc

SEQ ID NO: 165489 - RNA, 19 nt, Artificial Sequence
  Description of Artificial Sequence: Synthetic oligonucleotide
ucacgguaugccugauaug

SEQ ID NO: 165490 - RNA, 19 nt, Artificial Sequence
  Description of Artificial Sequence: Synthetic oligonucleotide
gaagcgaccuugacaggug

SEQ ID NO: 165491 - RNA, 19 nt, Artificial Sequence
  Description of Artificial Sequence: Synthetic oligonucleotide
caaugugaacaaucuaucu

SEQ ID NO: 165492 - RNA, 19 nt, Artificial Sequence
  Description of Artificial Sequence: Synthetic oligonucleotide
cacuagcuagagugagugc

SEQ ID NO: 165493 - RNA, 19 nt, Artificial Sequence
  Description of Artificial Sequence: Synthetic oligonucleotide
caaugauuccaggguauuc

SEQ ID NO: 165494 - RNA, 19 nt, Artificial Sequence
  Description of Artificial Sequence: Synthetic oligonucleotide
cacgguaugccugauaugu

SEQ ID NO: 165495 - RNA, 19 nt, Artificial Sequence
  Description of Artificial Sequence: Synthetic oligonucleotide
gacuucacaccaagcacga

SEQ ID NO: 165496 - RNA, 19 nt, Artificial Sequence
  Description of Artificial Sequence: Synthetic oligonucleotide
uaaucgccuugccuccacu

SEQ ID NO: 165497 - RNA, 19 nt, Artificial Sequence
  Description of Artificial Sequence: Synthetic oligonucleotide
  modified_base (13)..(13): a, c, u, g, unknown or other
cagauacgucacnccaaac

SEQ ID NO: 165498 - RNA, 19 nt, Artificial Sequence
  Description of Artificial Sequence: Synthetic oligonucleotide
ugguaguggggugccacug

SEQ ID NO: 165499 - RNA, 19 nt, Artificial Sequence
  Description of Artificial Sequence: Synthetic oligonucleotide
acacugaauaaagguuaug

SEQ ID NO: 165500 - RNA, 19 nt, Artificial Sequence
  Description of Artificial Sequence: Synthetic oligonucleotide
uggacggccugcuccgccc

SEQ ID NO: 165501 - RNA, 19 nt, Artificial Sequence
  Description of Artificial Sequence: Synthetic oligonucleotide
gugagugcgugcauggauc

SEQ ID NO: 165502 - RNA, 19 nt, Artificial Sequence
  Description of Artificial Sequence: Synthetic oligonucleotide
cccuuccgaaucuagcagg

SEQ ID NO: 165503 - RNA, 19 nt, Artificial Sequence
  Description of Artificial Sequence: Synthetic oligonucleotide
ggagacauuucuggcugcg

SEQ ID NO: 165504 - RNA, 19 nt, Artificial Sequence
  Description of Artificial Sequence: Synthetic oligonucleotide
uuucagaucccgggauacu

SEQ ID NO: 165505 - RNA, 19 nt, Artificial Sequence
  Description of Artificial Sequence: Synthetic oligonucleotide
cccgggauacucuuucucc

SEQ ID NO: 165506 - RNA, 19 nt, Artificial Sequence
  Description of Artificial Sequence: Synthetic oligonucleotide
ggucgaagcgaccuugaca

SEQ ID NO: 165507 - RNA, 19 nt, Artificial Sequence
  Description of Artificial Sequence: Synthetic oligonucleotide
ccacgcugaauagaaagcc

SEQ ID NO: 165508 - RNA, 19 nt, Artificial Sequence
  Description of Artificial Sequence: Synthetic oligonucleotide
cuuggucggucacccugcg

SEQ ID NO: 165509 - RNA, 19 nt, Artificial Sequence
  Description of Artificial Sequence: Synthetic oligonucleotide
cuguaaucugcgcuggcaa

SEQ ID NO: 165510 - RNA, 19 nt, Artificial Sequence
  Description of Artificial Sequence: Synthetic oligonucleotide
uggcccucaacaggggaug

SEQ ID NO: 165511 - RNA, 19 nt, Artificial Sequence
  Description of Artificial Sequence: Synthetic oligonucleotide
ggugaggugugacagucaa

SEQ ID NO: 165512 - RNA, 19 nt, Artificial Sequence
  Description of Artificial Sequence: Synthetic oligonucleotide
acgguaugccugauauguc

SEQ ID NO: 165513 - RNA, 19 nt, Artificial Sequence
  Description of Artificial Sequence: Synthetic oligonucleotide
ggguuagcagggcuaaaca

SEQ ID NO: 165514 - RNA, 19 nt, Artificial Sequence
  Description of Artificial Sequence: Synthetic oligonucleotide
ggcuacaccuguaagaggu

SEQ ID NO: 165515 - RNA, 19 nt, Artificial Sequence
  Description of Artificial Sequence: Synthetic oligonucleotide
ugcggguuggggugaguuc

SEQ ID NO: 165516 - RNA, 19 nt, Artificial Sequence
  Description of Artificial Sequence: Synthetic oligonucleotide
ccgugucaauuccaaaagc

SEQ ID NO: 165517 - RNA, 19 nt, Artificial Sequence
  Description of Artificial Sequence: Synthetic oligonucleotide
gguaugccugauaugucac

SEQ ID NO: 165518 - RNA, 19 nt, Artificial Sequence
  Description of Artificial Sequence: Synthetic oligonucleotide
gauaaucgccuugccucca

SEQ ID NO: 165519 - RNA, 19 nt, Artificial Sequence
  Description of Artificial Sequence: Synthetic oligonucleotide
guaagaggucgaagcgacc

SEQ ID NO: 165520 - RNA, 19 nt, Artificial Sequence
  Description of Artificial Sequence: Synthetic oligonucleotide
cuggcauuuaguggguaga

SEQ ID NO: 165521 - RNA, 19 nt, Artificial Sequence
  Description of Artificial Sequence: Synthetic oligonucleotide
cacuaacccaggguuccag

SEQ ID NO: 165522 - RNA, 19 nt, Artificial Sequence
  Description of Artificial Sequence: Synthetic oligonucleotide
agagccaacgcaacuccaa

SEQ ID NO: 165523 - RNA, 19 nt, Artificial Sequence
  Description of Artificial Sequence: Synthetic oligonucleotide
gugggacugccuuucucca

SEQ ID NO: 165524 - RNA, 19 nt, Artificial Sequence
  Description of Artificial Sequence: Synthetic oligonucleotide
uccggguuagcagggcuaa

SEQ ID NO: 165525 - RNA, 19 nt, Artificial Sequence
  Description of Artificial Sequence: Synthetic oligonucleotide
cagcuguuggcagucuaug

SEQ ID NO: 165526 - RNA, 19 nt, Artificial Sequence
  Description of Artificial Sequence: Synthetic oligonucleotide
cauuacuaucuucugcaau

SEQ ID NO: 165527 - RNA, 19 nt, Artificial Sequence
  Description of Artificial Sequence: Synthetic oligonucleotide
gugugccaacucuggcuag

SEQ ID NO: 165528 - RNA, 19 nt, Artificial Sequence
  Description of Artificial Sequence: Synthetic oligonucleotide
aucagacuaggaaacccua

SEQ ID NO: 165529 - RNA, 19 nt, Artificial Sequence
  Description of Artificial Sequence: Synthetic oligonucleotide
gccacgcugaauagaaagc

SEQ ID NO: 165530 - RNA, 19 nt, Artificial Sequence
  Description of Artificial Sequence: Synthetic oligonucleotide
gcgugcauggauccucuug

SEQ ID NO: 165531 - RNA, 19 nt, Artificial Sequence
  Description of Artificial Sequence: Synthetic oligonucleotide
gccuccuacagagaauuac

SEQ ID NO: 165532 - RNA, 19 nt, Artificial Sequence
  Description of Artificial Sequence: Synthetic oligonucleotide
guaccuugcagguggcacu

SEQ ID NO: 165533 - RNA, 19 nt, Artificial Sequence
  Description of Artificial Sequence: Synthetic oligonucleotide
aucugcgcuggcaaucaga

SEQ ID NO: 165534 - RNA, 19 nt, Artificial Sequence
  Description of Artificial Sequence: Synthetic oligonucleotide
  modified_base (14)..(14): a, c, u, g, unknown or other
ccagauacgucacnccaaa

SEQ ID NO: 165535 - RNA, 19 nt, Artificial Sequence
  Description of Artificial Sequence: Synthetic oligonucleotide
gaagaccaaaccagugccu

SEQ ID NO: 165536 - RNA, 19 nt, Artificial Sequence
  Description of Artificial Sequence: Synthetic oligonucleotide
cuggacggccugcuccgcc

SEQ ID NO: 165537 - RNA, 19 nt, Artificial Sequence
  Description of Artificial Sequence: Synthetic oligonucleotide
acuaaagccguagguccuu

SEQ ID NO: 165538 - RNA, 19 nt, Artificial Sequence
  Description of Artificial Sequence: Synthetic oligonucleotide
cacgaguaccuugcaggug

SEQ ID NO: 165539 - RNA, 19 nt, Artificial Sequence
  Description of Artificial Sequence: Synthetic oligonucleotide
guaugccugauaugucacu

SEQ ID NO: 165540 - RNA, 19 nt, Artificial Sequence
  Description of Artificial Sequence: Synthetic oligonucleotide
cacgccgugucaauuccaa

SEQ ID NO: 165541 - RNA, 19 nt, Artificial Sequence
  Description of Artificial Sequence: Synthetic oligonucleotide
cuaacccaggguuccagau

SEQ ID NO: 165542 - RNA, 19 nt, Artificial Sequence
  Description of Artificial Sequence: Synthetic oligonucleotide
caccccuccuugagggaug

SEQ ID NO: 165543 - RNA, 19 nt, Artificial Sequence
  Description of Artificial Sequence: Synthetic oligonucleotide
gcugcgguaccugagaggu

SEQ ID NO: 165544 - RNA, 19 nt, Artificial Sequence
  Description of Artificial Sequence: Synthetic oligonucleotide
uaccugagagguggugcaa

SEQ ID NO: 165545 - RNA, 19 nt, Artificial Sequence
  Description of Artificial Sequence: Synthetic oligonucleotide
  modified_base (8)..(8): a, c, u, g, unknown or other
acgucacnccaaacugcag

SEQ ID NO: 165546 - RNA, 19 nt, Artificial Sequence
  Description of Artificial Sequence: Synthetic oligonucleotide
gucucacggccgcugcuuc

SEQ ID NO: 165547 - RNA, 19 nt, Artificial Sequence
  Description of Artificial Sequence: Synthetic oligonucleotide
cuauugagcuuuccggguu

SEQ ID NO: 165548 - RNA, 19 nt, Artificial Sequence
  Description of Artificial Sequence: Synthetic oligonucleotide
ccuuccgaaucuagcagga

SEQ ID NO: 165549 - RNA, 19 nt, Artificial Sequence
  Description of Artificial Sequence: Synthetic oligonucleotide
cuggcaugaacugcagucu

SEQ ID NO: 165550 - RNA, 19 nt, Artificial Sequence
  Description of Artificial Sequence: Synthetic oligonucleotide
cgguaugccugauauguca

SEQ ID NO: 165551 - RNA, 19 nt, Artificial Sequence
  Description of Artificial Sequence: Synthetic oligonucleotide
gucccacuagcuagaguga

SEQ ID NO: 165552 - RNA, 19 nt, Artificial Sequence
  Description of Artificial Sequence: Synthetic oligonucleotide
ggcaggauauaaaugucau

SEQ ID NO: 165553 - RNA, 19 nt, Artificial Sequence
  Description of Artificial Sequence: Synthetic oligonucleotide
cagaguuagaagaguuguu

SEQ ID NO: 165554 - RNA, 19 nt, Artificial Sequence
  Description of Artificial Sequence: Synthetic oligonucleotide
gcuaagucauaggcacgug

SEQ ID NO: 165555 - RNA, 19 nt, Artificial Sequence
  Description of Artificial Sequence: Synthetic oligonucleotide
ccgggauacucuuucucca

SEQ ID NO: 165556 - RNA, 19 nt, Artificial Sequence
  Description of Artificial Sequence: Synthetic oligonucleotide
caugguccuccagauacgu

SEQ ID NO: 165557 - RNA, 19 nt, Artificial Sequence
  Description of Artificial Sequence: Synthetic oligonucleotide
cuuguccggaguugucacu

SEQ ID NO: 165558 - RNA, 19 nt, Artificial Sequence
  Description of Artificial Sequence: Synthetic oligonucleotide
cuguuacgagaaagugcaa

SEQ ID NO: 165559 - RNA, 19 nt, Artificial Sequence
  Description of Artificial Sequence: Synthetic oligonucleotide
cucuuacccuuccgaaucu

SEQ ID NO: 165560 - RNA, 19 nt, Artificial Sequence
  Description of Artificial Sequence: Synthetic oligonucleotide
gugccaacucuggcuagca

SEQ ID NO: 165561 - RNA, 19 nt, Artificial Sequence
  Description of Artificial Sequence: Synthetic oligonucleotide
gcacacuaacccaggguuc

SEQ ID NO: 165562 - RNA, 19 nt, Artificial Sequence
  Description of Artificial Sequence: Synthetic oligonucleotide
gagacgcacugcugcggua

SEQ ID NO: 165563 - RNA, 19 nt, Artificial Sequence
  Description of Artificial Sequence: Synthetic oligonucleotide
gugcauggauccucuuggu

SEQ ID NO: 165564 - RNA, 19 nt, Artificial Sequence
  Description of Artificial Sequence: Synthetic oligonucleotide
gccuguaaucugcgcuggc

SEQ ID NO: 165565 - RNA, 19 nt, Artificial Sequence
  Description of Artificial Sequence: Synthetic oligonucleotide
  modified_base (8)..(8): a, c, u, g, unknown or other
ggguacunaggggcucuug

SEQ ID NO: 165566 - RNA, 19 nt, Artificial Sequence
  Description of Artificial Sequence: Synthetic oligonucleotide
  modified_base (10)..(10): a, c, u, g, unknown or other
caggguacunaggggcucu

SEQ ID NO: 165567 - RNA, 19 nt, Artificial Sequence
  Description of Artificial Sequence: Synthetic oligonucleotide
ugcgugcauggauccucuu

SEQ ID NO: 165568 - RNA, 19 nt, Artificial Sequence
  Description of Artificial Sequence: Synthetic oligonucleotide
cggguuagcagggcuaaac

SEQ ID NO: 165569 - RNA, 19 nt, Artificial Sequence
  Description of Artificial Sequence: Synthetic oligonucleotide
cugguaguggggugccacu

SEQ ID NO: 165570 - RNA, 19 nt, Artificial Sequence
  Description of Artificial Sequence: Synthetic oligonucleotide
cugccacgcugaauagaaa

SEQ ID NO: 165571 - RNA, 19 nt, Artificial Sequence
  Description of Artificial Sequence: Synthetic oligonucleotide
agaucccgggauacucuuu

SEQ ID NO: 165572 - RNA, 19 nt, Artificial Sequence
  Description of Artificial Sequence: Synthetic oligonucleotide
gggugaguucagaccaaga

SEQ ID NO: 165573 - RNA, 19 nt, Artificial Sequence
  Description of Artificial Sequence: Synthetic oligonucleotide
  modified_base (2)..(2): a, c, u, g, unknown or other
cnccaaacugcagcagggu

SEQ ID NO: 165574 - RNA, 19 nt, Artificial Sequence
  Description of Artificial Sequence: Synthetic oligonucleotide
ugucaccguuggggacucc

SEQ ID NO: 165575 - RNA, 19 nt, Artificial Sequence
  Description of Artificial Sequence: Synthetic oligonucleotide
  modified_base (9)..(9): a, c, u, g, unknown or other
aggguacunaggggcucuu

SEQ ID NO: 165576 - RNA, 19 nt, Artificial Sequence
  Description of Artificial Sequence: Synthetic oligonucleotide
ccgagucccacuagcuaga

SEQ ID NO: 165577 - RNA, 19 nt, Artificial Sequence
  Description of Artificial Sequence: Synthetic oligonucleotide
cacgugggguggcuggcua

SEQ ID NO: 165578 - RNA, 19 nt, Artificial Sequence
  Description of Artificial Sequence: Synthetic oligonucleotide
acccugcggguugggguga

SEQ ID NO: 165579 - RNA, 19 nt, Artificial Sequence
  Description of Artificial Sequence: Synthetic oligonucleotide
gugcgugcauggauccucu

SEQ ID NO: 165580 - RNA, 19 nt, Artificial Sequence
  Description of Artificial Sequence: Synthetic oligonucleotide
ccgcuggcaugaacugcag

SEQ ID NO: 165581 - RNA, 19 nt, Artificial Sequence
  Description of Artificial Sequence: Synthetic oligonucleotide
agccuccuacagagaauua

SEQ ID NO: 165582 - RNA, 19 nt, Artificial Sequence
  Description of Artificial Sequence: Synthetic oligonucleotide
cgagucccacuagcuagag

SEQ ID NO: 165583 - RNA, 19 nt, Artificial Sequence
  Description of Artificial Sequence: Synthetic oligonucleotide
cgaagcgaccuugacaggu

SEQ ID NO: 165584 - RNA, 19 nt, Artificial Sequence
  Description of Artificial Sequence: Synthetic oligonucleotide
cuaaagccguagguccuuu

SEQ ID NO: 165585 - RNA, 19 nt, Artificial Sequence
  Description of Artificial Sequence: Synthetic oligonucleotide
ccacgccgugucaauucca

SEQ ID NO: 165586 - RNA, 19 nt, Artificial Sequence
  Description of Artificial Sequence: Synthetic oligonucleotide
cccacuagcuagagugagu

SEQ ID NO: 165587 - RNA, 19 nt, Artificial Sequence
  Description of Artificial Sequence: Synthetic oligonucleotide
cauucacgguaugccugau

SEQ ID NO: 165588 - RNA, 19 nt, Artificial Sequence
  Description of Artificial Sequence: Synthetic oligonucleotide
gucggucacccugcggguu

SEQ ID NO: 165589 - RNA, 19 nt, Artificial Sequence
  Description of Artificial Sequence: Synthetic oligonucleotide
ggcaugagaggggcugguu

SEQ ID NO: 165590 - RNA, 19 nt, Artificial Sequence
  Description of Artificial Sequence: Synthetic oligonucleotide
ccggguuagcagggcuaaa

SEQ ID NO: 165591 - RNA, 19 nt, Artificial Sequence
  Description of Artificial Sequence: Synthetic oligonucleotide
aauagauugaaccacuaau

SEQ ID NO: 165592 - RNA, 19 nt, Artificial Sequence
  Description of Artificial Sequence: Synthetic oligonucleotide
  modified_base (7)..(7): a, c, u, g, unknown or other
aguuucngagaauaccugc

SEQ ID NO: 165593 - RNA, 19 nt, Artificial Sequence
  Description of Artificial Sequence: Synthetic oligonucleotide
uuagaaugugcagagaagg

SEQ ID NO: 165594 - RNA, 19 nt, Artificial Sequence
  Description of Artificial Sequence: Synthetic oligonucleotide
aguagauacuaauuuguac

SEQ ID NO: 165595 - RNA, 19 nt, Artificial Sequence
  Description of Artificial Sequence: Synthetic oligonucleotide
caauauuucauuguggagg

SEQ ID NO: 165596 - RNA, 19 nt, Artificial Sequence
  Description of Artificial Sequence: Synthetic oligonucleotide
ugaguaacuguuaacagac

SEQ ID NO: 165597 - RNA, 19 nt, Artificial Sequence
  Description of Artificial Sequence: Synthetic oligonucleotide
gauacuaauuuguacauca

SEQ ID NO: 165598 - RNA, 19 nt, Artificial Sequence
  Description of Artificial Sequence: Synthetic oligonucleotide
aauggauaugaugauuggc

SEQ ID NO: 165599 - RNA, 19 nt, Artificial Sequence
  Description of Artificial Sequence: Synthetic oligonucleotide
gauaaccucguuuuaaagc

SEQ ID NO: 165600 - RNA, 19 nt, Artificial Sequence
  Description of Artificial Sequence: Synthetic oligonucleotide
auuggaacgaucugugggc

SEQ ID NO: 165601 - RNA, 19 nt, Artificial Sequence
  Description of Artificial Sequence: Synthetic oligonucleotide
ugauaguuaaagaauagau

SEQ ID NO: 165602 - RNA, 19 nt, Artificial Sequence
  Description of Artificial Sequence: Synthetic oligonucleotide
cuucaaacgacauuaggcc

SEQ ID NO: 165603 - RNA, 19 nt, Artificial Sequence
  Description of Artificial Sequence: Synthetic oligonucleotide
auaggaacuaauuugagua

SEQ ID NO: 165604 - RNA, 19 nt, Artificial Sequence
  Description of Artificial Sequence: Synthetic oligonucleotide
uagauugaaccacuaaugc

SEQ ID NO: 165605 - RNA, 19 nt, Artificial Sequence
  Description of Artificial Sequence: Synthetic oligonucleotide
uguuaacagaccuuacagg

SEQ ID NO: 165606 - RNA, 19 nt, Artificial Sequence
  Description of Artificial Sequence: Synthetic oligonucleotide
agcuguuuaaaaucuguac

SEQ ID NO: 165607 - RNA, 19 nt, Artificial Sequence
  Description of Artificial Sequence: Synthetic oligonucleotide
auaaccucguuuuaaagcu

SEQ ID NO: 165608 - RNA, 19 nt, Artificial Sequence
  Description of Artificial Sequence: Synthetic oligonucleotide
uuugaguaacuguuaacag

SEQ ID NO: 165609 - RNA, 19 nt, Artificial Sequence
  Description of Artificial Sequence: Synthetic oligonucleotide
aaaaugaugaggcuucuua

SEQ ID NO: 165610 - RNA, 19 nt, Artificial Sequence
  Description of Artificial Sequence: Synthetic oligonucleotide
ugcaccgugacucugugag

SEQ ID NO: 165611 - RNA, 19 nt, Artificial Sequence
  Description of Artificial Sequence: Synthetic oligonucleotide
auaaaucuaccuuaaacau

SEQ ID NO: 165612 - RNA, 19 nt, Artificial Sequence
  Description of Artificial Sequence: Synthetic oligonucleotide
uuaucucauguucaaaugu

SEQ ID NO: 165613 - RNA, 19 nt, Artificial Sequence
  Description of Artificial Sequence: Synthetic oligonucleotide
guaguugagggcuacaagc

SEQ ID NO: 165614 - RNA, 19 nt, Artificial Sequence
  Description of Artificial Sequence: Synthetic oligonucleotide
auagcaauaucaagaaagc

SEQ ID NO: 165615 - RNA, 19 nt, Artificial Sequence
  Description of Artificial Sequence: Synthetic oligonucleotide
aguguuucgauggaugggc

SEQ ID NO: 165616 - RNA, 19 nt, Artificial Sequence
  Description of Artificial Sequence: Synthetic oligonucleotide
uucucauucaaccuaugac

SEQ ID NO: 165617 - RNA, 19 nt, Artificial Sequence
  Description of Artificial Sequence: Synthetic oligonucleotide
uuaaauguaaaggaagauc

SEQ ID NO: 165618 - RNA, 19 nt, Artificial Sequence
  Description of Artificial Sequence: Synthetic oligonucleotide
aaauuggaacgaucugugg

SEQ ID NO: 165619 - RNA, 19 nt, Artificial Sequence
  Description of Artificial Sequence: Synthetic oligonucleotide
guucagaguguuucgaugg

SEQ ID NO: 165620 - RNA, 19 nt, Artificial Sequence
  Description of Artificial Sequence: Synthetic oligonucleotide
aguaacuguuaacagaccu

SEQ ID NO: 165621 - RNA, 19 nt, Artificial Sequence
  Description of Artificial Sequence: Synthetic oligonucleotide
aggcacuucgaucaauugc

SEQ ID NO: 165622 - RNA, 19 nt, Artificial Sequence
  Description of Artificial Sequence: Synthetic oligonucleotide
guuuuaaagcuuugagugg

SEQ ID NO: 165623 - RNA, 19 nt, Artificial Sequence
  Description of Artificial Sequence: Synthetic oligonucleotide
ucuucaccuuacuauauag

SEQ ID NO: 165624 - RNA, 19 nt, Artificial Sequence
  Description of Artificial Sequence: Synthetic oligonucleotide
uaacagaccuuacaggaca

SEQ ID NO: 165625 - RNA, 19 nt, Artificial Sequence
  Description of Artificial Sequence: Synthetic oligonucleotide
ugugugaagacucaaugua

SEQ ID NO: 165626 - RNA, 19 nt, Artificial Sequence
  Description of Artificial Sequence: Synthetic oligonucleotide
ugaaauuggaacgaucugu

SEQ ID NO: 165627 - RNA, 19 nt, Artificial Sequence
  Description of Artificial Sequence: Synthetic oligonucleotide
uauaggaacuaauuugagu

SEQ ID NO: 165628 - RNA, 19 nt, Artificial Sequence
  Description of Artificial Sequence: Synthetic oligonucleotide
uuuauagugaagacagcaa

SEQ ID NO: 165629 - RNA, 19 nt, Artificial Sequence
  Description of Artificial Sequence: Synthetic oligonucleotide
cuguuaacagaccuuacag

SEQ ID NO: 165630 - RNA, 19 nt, Artificial Sequence
  Description of Artificial Sequence: Synthetic oligonucleotide
ucaauguaguaguaggaga

SEQ ID NO: 165631 - RNA, 19 nt, Artificial Sequence
  Description of Artificial Sequence: Synthetic oligonucleotide
cuuugugcggaaauggcag

SEQ ID NO: 165632 - RNA, 19 nt, Artificial Sequence
  Description of Artificial Sequence: Synthetic oligonucleotide
uaaaucuaccuuaaacauc

SEQ ID NO: 165633 - RNA, 19 nt, Artificial Sequence
  Description of Artificial Sequence: Synthetic oligonucleotide
aguuaaagaauagauggca

SEQ ID NO: 165634 - RNA, 19 nt, Artificial Sequence
  Description of Artificial Sequence: Synthetic oligonucleotide
aaaugaugaggcuucuuau

SEQ ID NO: 165635 - RNA, 19 nt, Artificial Sequence
  Description of Artificial Sequence: Synthetic oligonucleotide
uuaggaugucuugaaauag

SEQ ID NO: 165636 - RNA, 19 nt, Artificial Sequence
  Description of Artificial Sequence: Synthetic oligonucleotide
uucaaacgacauuaggccc

SEQ ID NO: 165637 - RNA, 19 nt, Artificial Sequence
  Description of Artificial Sequence: Synthetic oligonucleotide
aaauagauugaaccacuaa

SEQ ID NO: 165638 - RNA, 19 nt, Artificial Sequence
  Description of Artificial Sequence: Synthetic oligonucleotide
ugcgacacagcguuuggcg

SEQ ID NO: 165639 - RNA, 19 nt, Artificial Sequence
  Description of Artificial Sequence: Synthetic oligonucleotide
ucaaacgacauuaggcccu

SEQ ID NO: 165640 - RNA, 19 nt, Artificial Sequence
  Description of Artificial Sequence: Synthetic oligonucleotide
uuuaggaugucuugaaaua

SEQ ID NO: 165641 - RNA, 19 nt, Artificial Sequence
  Description of Artificial Sequence: Synthetic oligonucleotide
cucaguagauacuaauuug

SEQ ID NO: 165642 - RNA, 19 nt, Artificial Sequence
  Description of Artificial Sequence: Synthetic oligonucleotide
aucuaccuuaaacaucaac

SEQ ID NO: 165643 - RNA, 19 nt, Artificial Sequence
  Description of Artificial Sequence: Synthetic oligonucleotide
auagauugaaccacuaaug

SEQ ID NO: 165644 - RNA, 19 nt, Artificial Sequence
  Description of Artificial Sequence: Synthetic oligonucleotide
  modified_base (3)..(3): a, c, u, g, unknown or other
ucngagaauaccugcgaca

SEQ ID NO: 165645 - RNA, 19 nt, Artificial Sequence
  Description of Artificial Sequence: Synthetic oligonucleotide
agauugaaccacuaaugcu

SEQ ID NO: 165646 - RNA, 19 nt, Artificial Sequence
  Description of Artificial Sequence: Synthetic oligonucleotide
  modified_base (5)..(5): a, c, u, g, unknown or other
uuucngagaauaccugcga

SEQ ID NO: 165647 - RNA, 19 nt, Artificial Sequence
  Description of Artificial Sequence: Synthetic oligonucleotide
acuguuaacagaccuuaca

SEQ ID NO: 165648 - RNA, 19 nt, Artificial Sequence
  Description of Artificial Sequence: Synthetic oligonucleotide
gcuuaguggacuuagugag

SEQ ID NO: 165649 - RNA, 19 nt, Artificial Sequence
  Description of Artificial Sequence: Synthetic oligonucleotide
ggggcuucaaaacauaacc

SEQ ID NO: 165650 - RNA, 19 nt, Artificial Sequence
  Description of Artificial Sequence: Synthetic oligonucleotide
uugaguggaaugauucucu

SEQ ID NO: 165651 - RNA, 19 nt, Artificial Sequence
  Description of Artificial Sequence: Synthetic oligonucleotide
ccuucaaacgacauuaggc

SEQ ID NO: 165652 - RNA, 19 nt, Artificial Sequence
  Description of Artificial Sequence: Synthetic oligonucleotide
uuuaucuucucgugaugcc

SEQ ID NO: 165653 - RNA, 19 nt, Artificial Sequence
  Description of Artificial Sequence: Synthetic oligonucleotide
aggaacuaauuugaguaac

SEQ ID NO: 165654 - RNA, 19 nt, Artificial Sequence
  Description of Artificial Sequence: Synthetic oligonucleotide
uuaacagaccuuacaggac

SEQ ID NO: 165655 - RNA, 19 nt, Artificial Sequence
  Description of Artificial Sequence: Synthetic oligonucleotide
aacuuuuagugcuguacaa

SEQ ID NO: 165656 - RNA, 19 nt, Artificial Sequence
  Description of Artificial Sequence: Synthetic oligonucleotide
uggaguagaagacuucuua

SEQ ID NO: 165657 - RNA, 19 nt, Artificial Sequence
  Description of Artificial Sequence: Synthetic oligonucleotide
cuuugaugacaguucgggg

SEQ ID NO: 165658 - RNA, 19 nt, Artificial Sequence
  Description of Artificial Sequence: Synthetic oligonucleotide
ucauccgucugguaguuga

SEQ ID NO: 165659 - RNA, 19 nt, Artificial Sequence
  Description of Artificial Sequence: Synthetic oligonucleotide
caaccuaugaccaguuuuc

SEQ ID NO: 165660 - RNA, 19 nt, Artificial Sequence
  Description of Artificial Sequence: Synthetic oligonucleotide
aacugaaauuggaacgauc

SEQ ID NO: 165661 - RNA, 19 nt, Artificial Sequence
  Description of Artificial Sequence: Synthetic oligonucleotide
agucgauucgggucgcugg

SEQ ID NO: 165662 - RNA, 19 nt, Artificial Sequence
  Description of Artificial Sequence: Synthetic oligonucleotide
caguggagaaaacuucugg

SEQ ID NO: 165663 - RNA, 19 nt, Artificial Sequence
  Description of Artificial Sequence: Synthetic oligonucleotide
agaaagcuaugucuaauaa

SEQ ID NO: 165664 - RNA, 19 nt, Artificial Sequence
  Description of Artificial Sequence: Synthetic oligonucleotide
gaaucuguuggagaagcug

SEQ ID NO: 165665 - RNA, 19 nt, Artificial Sequence
  Description of Artificial Sequence: Synthetic oligonucleotide
uggucgucaguguaugucc

SEQ ID NO: 165666 - RNA, 19 nt, Artificial Sequence
  Description of Artificial Sequence: Synthetic oligonucleotide
ucucuugcgacucaucauu

SEQ ID NO: 165667 - RNA, 19 nt, Artificial Sequence
  Description of Artificial Sequence: Synthetic oligonucleotide
gcaucguacugccagaggg

SEQ ID NO: 165668 - RNA, 19 nt, Artificial Sequence
  Description of Artificial Sequence: Synthetic oligonucleotide
uaugaauaggcuagagauu

SEQ ID NO: 165669 - RNA, 19 nt, Artificial Sequence
  Description of Artificial Sequence: Synthetic oligonucleotide
gaggcuucuuauuaagaca

SEQ ID NO: 165670 - RNA, 19 nt, Artificial Sequence
  Description of Artificial Sequence: Synthetic oligonucleotide
gacaucaaccucaaugcac

SEQ ID NO: 165671 - RNA, 19 nt, Artificial Sequence
  Description of Artificial Sequence: Synthetic oligonucleotide
aaggaagaucauccgucug

SEQ ID NO: 165672 - RNA, 19 nt, Artificial Sequence
  Description of Artificial Sequence: Synthetic oligonucleotide
ugugguguauuuugacaug

SEQ ID NO: 165673 - RNA, 19 nt, Artificial Sequence
  Description of Artificial Sequence: Synthetic oligonucleotide
gauaugaugauuggcaggu

SEQ ID NO: 165674 - RNA, 19 nt, Artificial Sequence
  Description of Artificial Sequence: Synthetic oligonucleotide
auaccugcgacacagcguu

SEQ ID NO: 165675 - RNA, 19 nt, Artificial Sequence
  Description of Artificial Sequence: Synthetic oligonucleotide
ucauucaaccuaugaccag

SEQ ID NO: 165676 - RNA, 19 nt, Artificial Sequence
  Description of Artificial Sequence: Synthetic oligonucleotide
uaacuguuaacagaccuua

SEQ ID NO: 165677 - RNA, 19 nt, Artificial Sequence
  Description of Artificial Sequence: Synthetic oligonucleotide
acuacuuccuugaagggga

SEQ ID NO: 165678 - RNA, 19 nt, Artificial Sequence
  Description of Artificial Sequence: Synthetic oligonucleotide
agauacuaauuuguacauc

SEQ ID NO: 165679 - RNA, 19 nt, Artificial Sequence
  Description of Artificial Sequence: Synthetic oligonucleotide
aaugggcaugccaucaucu

SEQ ID NO: 165680 - RNA, 19 nt, Artificial Sequence
  Description of Artificial Sequence: Synthetic oligonucleotide
augagaauagucugaguuu

SEQ ID NO: 165681 - RNA, 19 nt, Artificial Sequence
  Description of Artificial Sequence: Synthetic oligonucleotide
agaucauccgucugguagu

SEQ ID NO: 165682 - RNA, 19 nt, Artificial Sequence
  Description of Artificial Sequence: Synthetic oligonucleotide
cugaugugaaagcugugug

SEQ ID NO: 165683 - RNA, 19 nt, Artificial Sequence
  Description of Artificial Sequence: Synthetic oligonucleotide
ucgauaaccucguuuuaaa

SEQ ID NO: 165684 - RNA, 19 nt, Artificial Sequence
  Description of Artificial Sequence: Synthetic oligonucleotide
uaggaacuaauuugaguaa

SEQ ID NO: 165685 - RNA, 19 nt, Artificial Sequence
  Description of Artificial Sequence: Synthetic oligonucleotide
ugaguggaaugauucucug

SEQ ID NO: 165686 - RNA, 19 nt, Artificial Sequence
  Description of Artificial Sequence: Synthetic oligonucleotide
cauaaggucugcugaauga

SEQ ID NO: 165687 - RNA, 19 nt, Artificial Sequence
  Description of Artificial Sequence: Synthetic oligonucleotide
cauuuauagugaagacagc

SEQ ID NO: 165688 - RNA, 19 nt, Artificial Sequence
  Description of Artificial Sequence: Synthetic oligonucleotide
acaagcggugugcuggauc

SEQ ID NO: 165689 - RNA, 19 nt, Artificial Sequence
  Description of Artificial Sequence: Synthetic oligonucleotide
guuggauuggaugagucga

SEQ ID NO: 165690 - RNA, 19 nt, Artificial Sequence
  Description of Artificial Sequence: Synthetic oligonucleotide
aacgacauuaggcccugau

SEQ ID NO: 165691 - RNA, 19 nt, Artificial Sequence
  Description of Artificial Sequence: Synthetic oligonucleotide
uuugugcggaaauggcagc

SEQ ID NO: 165692 - RNA, 19 nt, Artificial Sequence
  Description of Artificial Sequence: Synthetic oligonucleotide
ugagccauuauugccgaac

SEQ ID NO: 165693 - RNA, 19 nt, Artificial Sequence
  Description of Artificial Sequence: Synthetic oligonucleotide
ucgaucaauugcuuccacu

SEQ ID NO: 165694 - RNA, 19 nt, Artificial Sequence
  Description of Artificial Sequence: Synthetic oligonucleotide
ugaguuucguuggcaagag

SEQ ID NO: 165695 - RNA, 19 nt, Artificial Sequence
  Description of Artificial Sequence: Synthetic oligonucleotide
acgacauuaggcccugaug

SEQ ID NO: 165696 - RNA, 19 nt, Artificial Sequence
  Description of Artificial Sequence: Synthetic oligonucleotide
aauaccugcgacacagcgu

SEQ ID NO: 165697 - RNA, 19 nt, Artificial Sequence
  Description of Artificial Sequence: Synthetic oligonucleotide
uuagguccuagcugacaag

SEQ ID NO: 165698 - RNA, 19 nt, Artificial Sequence
  Description of Artificial Sequence: Synthetic oligonucleotide
uucuuguucucuugcgacu

SEQ ID NO: 165699 - RNA, 19 nt, Artificial Sequence
  Description of Artificial Sequence: Synthetic oligonucleotide
ucucgugaugccugaaccu

SEQ ID NO: 165700 - RNA, 19 nt, Artificial Sequence
  Description of Artificial Sequence: Synthetic oligonucleotide
aaccucaaugcacggacuu

SEQ ID NO: 165701 - RNA, 19 nt, Artificial Sequence
  Description of Artificial Sequence: Synthetic oligonucleotide
ucguuuucauucagucagc

SEQ ID NO: 165702 - RNA, 19 nt, Artificial Sequence
  Description of Artificial Sequence: Synthetic oligonucleotide
cugaaauuggaacgaucug

SEQ ID NO: 165703 - RNA, 19 nt, Artificial Sequence
  Description of Artificial Sequence: Synthetic oligonucleotide
uacaggacauauuuacauu

SEQ ID NO: 165704 - RNA, 19 nt, Artificial Sequence
  Description of Artificial Sequence: Synthetic oligonucleotide
gcuauuuaugaauaggcua

SEQ ID NO: 165705 - RNA, 19 nt, Artificial Sequence
  Description of Artificial Sequence: Synthetic oligonucleotide
guuagguccuagcugacaa

SEQ ID NO: 165706 - RNA, 19 nt, Artificial Sequence
  Description of Artificial Sequence: Synthetic oligonucleotide
ugaacccggaagagaaacu

SEQ ID NO: 165707 - RNA, 19 nt, Artificial Sequence
  Description of Artificial Sequence: Synthetic oligonucleotide
agacaucaaccucaaugca

SEQ ID NO: 165708 - RNA, 19 nt, Artificial Sequence
  Description of Artificial Sequence: Synthetic oligonucleotide
  modified_base (8)..(8): a, c, u, g, unknown or other
caguuucngagaauaccug

SEQ ID NO: 165709 - RNA, 19 nt, Artificial Sequence
  Description of Artificial Sequence: Synthetic oligonucleotide
uuguucagggaugcuguag

SEQ ID NO: 165710 - RNA, 19 nt, Artificial Sequence
  Description of Artificial Sequence: Synthetic oligonucleotide
uauugggugcgucuuucau

SEQ ID NO: 165711 - RNA, 19 nt, Artificial Sequence
  Description of Artificial Sequence: Synthetic oligonucleotide
ucuuggucgucaguguaug

SEQ ID NO: 165712 - RNA, 19 nt, Artificial Sequence
  Description of Artificial Sequence: Synthetic oligonucleotide
aacugccaaaugagaauag

SEQ ID NO: 165713 - RNA, 19 nt, Artificial Sequence
  Description of Artificial Sequence: Synthetic oligonucleotide
cucaaugcacggacuuccg

SEQ ID NO: 165714 - RNA, 19 nt, Artificial Sequence
  Description of Artificial Sequence: Synthetic oligonucleotide
gaugugaaagcuguguggu

SEQ ID NO: 165715 - RNA, 19 nt, Artificial Sequence
  Description of Artificial Sequence: Synthetic oligonucleotide
gaaccacuaaugcuuguaa

SEQ ID NO: 165716 - RNA, 19 nt, Artificial Sequence
  Description of Artificial Sequence: Synthetic oligonucleotide
uggaugagucgauucgggu

SEQ ID NO: 165717 - RNA, 19 nt, Artificial Sequence
  Description of Artificial Sequence: Synthetic oligonucleotide
gguucagaguguuucgaug

SEQ ID NO: 165718 - RNA, 19 nt, Artificial Sequence
  Description of Artificial Sequence: Synthetic oligonucleotide
uugaggcgaauuaucuuua

SEQ ID NO: 165719 - RNA, 19 nt, Artificial Sequence
  Description of Artificial Sequence: Synthetic oligonucleotide
uuauugggugcgucuuuca

SEQ ID NO: 165720 - RNA, 19 nt, Artificial Sequence
  Description of Artificial Sequence: Synthetic oligonucleotide
gauucgggucgcuggccgg

SEQ ID NO: 165721 - RNA, 19 nt, Artificial Sequence
  Description of Artificial Sequence: Synthetic oligonucleotide
uuggucgucaguguauguc

SEQ ID NO: 165722 - RNA, 19 nt, Artificial Sequence
  Description of Artificial Sequence: Synthetic oligonucleotide
uuggauuggaugagucgau

SEQ ID NO: 165723 - RNA, 19 nt, Artificial Sequence
  Description of Artificial Sequence: Synthetic oligonucleotide
aggcuagagauuuccaaua

SEQ ID NO: 165724 - RNA, 19 nt, Artificial Sequence
  Description of Artificial Sequence: Synthetic oligonucleotide
ggcgaauuaucuuuaucca

SEQ ID NO: 165725 - RNA, 19 nt, Artificial Sequence
  Description of Artificial Sequence: Synthetic oligonucleotide
uucgaucaauugcuuccac

SEQ ID NO: 165726 - RNA, 19 nt, Artificial Sequence
  Description of Artificial Sequence: Synthetic oligonucleotide
cuucucgugaugccugaac

SEQ ID NO: 165727 - RNA, 19 nt, Artificial Sequence
  Description of Artificial Sequence: Synthetic oligonucleotide
cuuauugggugcgucuuuc

SEQ ID NO: 165728 - RNA, 19 nt, Artificial Sequence
  Description of Artificial Sequence: Synthetic oligonucleotide
gagaagggguuguuuaucu

SEQ ID NO: 165729 - RNA, 19 nt, Artificial Sequence
  Description of Artificial Sequence: Synthetic oligonucleotide
uucguugcugaggcaauga

SEQ ID NO: 165730 - RNA, 19 nt, Artificial Sequence
  Description of Artificial Sequence: Synthetic oligonucleotide
ugguguauuuugacauguc

SEQ ID NO: 165731 - RNA, 19 nt, Artificial Sequence
  Description of Artificial Sequence: Synthetic oligonucleotide
ucuuauugggugcgucuuu

SEQ ID NO: 165732 - RNA, 19 nt, Artificial Sequence
  Description of Artificial Sequence: Synthetic oligonucleotide
gaugucgauaaccucguuu

SEQ ID NO: 165733 - RNA, 19 nt, Artificial Sequence
  Description of Artificial Sequence: Synthetic oligonucleotide
cucgugaugccugaaccug

SEQ ID NO: 165734 - RNA, 19 nt, Artificial Sequence
  Description of Artificial Sequence: Synthetic oligonucleotide
ccaaacacgcucuugaaaa

SEQ ID NO: 165735 - RNA, 19 nt, Artificial Sequence
  Description of Artificial Sequence: Synthetic oligonucleotide
ucguugcugaggcaaugaa

SEQ ID NO: 165736 - RNA, 19 nt, Artificial Sequence
  Description of Artificial Sequence: Synthetic oligonucleotide
gaguaacuguuaacagacc

SEQ ID NO: 165737 - RNA, 19 nt, Artificial Sequence
  Description of Artificial Sequence: Synthetic oligonucleotide
auugcagcauuuaaaugua

SEQ ID NO: 165738 - RNA, 19 nt, Artificial Sequence
  Description of Artificial Sequence: Synthetic oligonucleotide
gucgauucgggucgcuggc

SEQ ID NO: 165739 - RNA, 19 nt, Artificial Sequence
  Description of Artificial Sequence: Synthetic oligonucleotide
ugucgauaaccucguuuua

SEQ ID NO: 165740 - RNA, 19 nt, Artificial Sequence
  Description of Artificial Sequence: Synthetic oligonucleotide
auccgucugguaguugagg

SEQ ID NO: 165741 - RNA, 19 nt, Artificial Sequence
  Description of Artificial Sequence: Synthetic oligonucleotide
uaaccucguuuuaaagcuu

SEQ ID NO: 165742 - RNA, 19 nt, Artificial Sequence
  Description of Artificial Sequence: Synthetic oligonucleotide
cacuaaugcuuguaaccca

SEQ ID NO: 165743 - RNA, 19 nt, Artificial Sequence
  Description of Artificial Sequence: Synthetic oligonucleotide
acauccugugcagugcuga

SEQ ID NO: 165744 - RNA, 19 nt, Artificial Sequence
  Description of Artificial Sequence: Synthetic oligonucleotide
ugaggcgaauuaucuuuau

SEQ ID NO: 165745 - RNA, 19 nt, Artificial Sequence
  Description of Artificial Sequence: Synthetic oligonucleotide
uauugccgaacuguuguuu

SEQ ID NO: 165746 - RNA, 19 nt, Artificial Sequence
  Description of Artificial Sequence: Synthetic oligonucleotide
uuauugccgaacuguuguu

SEQ ID NO: 165747 - RNA, 19 nt, Artificial Sequence
  Description of Artificial Sequence: Synthetic oligonucleotide
uggaugggcuuugugcgga

SEQ ID NO: 165748 - RNA, 19 nt, Artificial Sequence
  Description of Artificial Sequence: Synthetic oligonucleotide
uugagggcuacaagcugua

SEQ ID NO: 165749 - RNA, 19 nt, Artificial Sequence
  Description of Artificial Sequence: Synthetic oligonucleotide
cucggggcugcuuagugga

SEQ ID NO: 165750 - RNA, 19 nt, Artificial Sequence
  Description of Artificial Sequence: Synthetic oligonucleotide
ucguuggcaagagaauaau

SEQ ID NO: 165751 - RNA, 19 nt, Artificial Sequence
  Description of Artificial Sequence: Synthetic oligonucleotide
cauccgucugguaguugag

SEQ ID NO: 165752 - RNA, 19 nt, Artificial Sequence
  Description of Artificial Sequence: Synthetic oligonucleotide
ucuugcgacucaucauuuu

SEQ ID NO: 165753 - RNA, 19 nt, Artificial Sequence
  Description of Artificial Sequence: Synthetic oligonucleotide
agguccuagcugacaagcg

SEQ ID NO: 165754 - RNA, 19 nt, Artificial Sequence
  Description of Artificial Sequence: Synthetic oligonucleotide
gucgauaaccucguuuuaa

SEQ ID NO: 165755 - RNA, 19 nt, Artificial Sequence
  Description of Artificial Sequence: Synthetic oligonucleotide
  modified_base (12)..(12): a, c, u, g, unknown or other
ggaucaguuucngagaaua

SEQ ID NO: 165756 - RNA, 19 nt, Artificial Sequence
  Description of Artificial Sequence: Synthetic oligonucleotide
augagucgauucgggucgc

SEQ ID NO: 165757 - RNA, 19 nt, Artificial Sequence
  Description of Artificial Sequence: Synthetic oligonucleotide
agggguuguuuaucucaug

SEQ ID NO: 165758 - RNA, 19 nt, Artificial Sequence
  Description of Artificial Sequence: Synthetic oligonucleotide
gggugcgucuuucaucacc

SEQ ID NO: 165759 - RNA, 19 nt, Artificial Sequence
  Description of Artificial Sequence: Synthetic oligonucleotide
uuuggcggucguuuucauu

SEQ ID NO: 165760 - RNA, 19 nt, Artificial Sequence
  Description of Artificial Sequence: Synthetic oligonucleotide
gacuuuggaguagaagacu

SEQ ID NO: 165761 - RNA, 19 nt, Artificial Sequence
  Description of Artificial Sequence: Synthetic oligonucleotide
aguucgggguugcucugga

SEQ ID NO: 165762 - RNA, 19 nt, Artificial Sequence
  Description of Artificial Sequence: Synthetic oligonucleotide
caccagaaucuguuggaga

SEQ ID NO: 165763 - RNA, 19 nt, Artificial Sequence
  Description of Artificial Sequence: Synthetic oligonucleotide
caaugcacggacuuccggu

SEQ ID NO: 165764 - RNA, 19 nt, Artificial Sequence
  Description of Artificial Sequence: Synthetic oligonucleotide
gagucgauucgggucgcug

SEQ ID NO: 165765 - RNA, 19 nt, Artificial Sequence
  Description of Artificial Sequence: Synthetic oligonucleotide
ugggucaaacaugcugccu

SEQ ID NO: 165766 - RNA, 19 nt, Artificial Sequence
  Description of Artificial Sequence: Synthetic oligonucleotide
gcaaaacgaagaaauacua

SEQ ID NO: 165767 - RNA, 19 nt, Artificial Sequence
  Description of Artificial Sequence: Synthetic oligonucleotide
caaacgacauuaggcccug

SEQ ID NO: 165768 - RNA, 19 nt, Artificial Sequence
  Description of Artificial Sequence: Synthetic oligonucleotide
caagagaauaauggugcaa

SEQ ID NO: 165769 - RNA, 19 nt, Artificial Sequence
  Description of Artificial Sequence: Synthetic oligonucleotide
gcggaaauggcagcugucc

SEQ ID NO: 165770 - RNA, 19 nt, Artificial Sequence
  Description of Artificial Sequence: Synthetic oligonucleotide
gggguuguuuaucucaugu

SEQ ID NO: 165771 - RNA, 19 nt, Artificial Sequence
  Description of Artificial Sequence: Synthetic oligonucleotide
ucgauucgggucgcuggcc

SEQ ID NO: 165772 - RNA, 19 nt, Artificial Sequence
  Description of Artificial Sequence: Synthetic oligonucleotide
uggaacgaucugugggcau

SEQ ID NO: 165773 - RNA, 19 nt, Artificial Sequence
  Description of Artificial Sequence: Synthetic oligonucleotide
gaguuucguuggcaagaga

SEQ ID NO: 165774 - RNA, 19 nt, Artificial Sequence
  Description of Artificial Sequence: Synthetic oligonucleotide
guauugugugaagacucaa

SEQ ID NO: 165775 - RNA, 19 nt, Artificial Sequence
  Description of Artificial Sequence: Synthetic oligonucleotide
cuuaguggacuuagugagu

SEQ ID NO: 165776 - RNA, 19 nt, Artificial Sequence
  Description of Artificial Sequence: Synthetic oligonucleotide
acccuucaaacgacauuag

SEQ ID NO: 165777 - RNA, 19 nt, Artificial Sequence
  Description of Artificial Sequence: Synthetic oligonucleotide
cugcgacacagcguuuggc

SEQ ID NO: 165778 - RNA, 19 nt, Artificial Sequence
  Description of Artificial Sequence: Synthetic oligonucleotide
agcguuuggcggucguuuu

SEQ ID NO: 165779 - RNA, 19 nt, Artificial Sequence
  Description of Artificial Sequence: Synthetic oligonucleotide
uaguggacuuagugaguuu

SEQ ID NO: 165780 - RNA, 19 nt, Artificial Sequence
  Description of Artificial Sequence: Synthetic oligonucleotide
cuccuccgagcucaagauc

SEQ ID NO: 165781 - RNA, 19 nt, Artificial Sequence
  Description of Artificial Sequence: Synthetic oligonucleotide
gccauuauugccgaacugu

SEQ ID NO: 165782 - RNA, 19 nt, Artificial Sequence
  Description of Artificial Sequence: Synthetic oligonucleotide
ucguacugccagagggauu

SEQ ID NO: 165783 - RNA, 19 nt, Artificial Sequence
  Description of Artificial Sequence: Synthetic oligonucleotide
ggaacuaauuugaguaacu

SEQ ID NO: 165784 - RNA, 19 nt, Artificial Sequence
  Description of Artificial Sequence: Synthetic oligonucleotide
gcugacaagcggugugcug

SEQ ID NO: 165785 - RNA, 19 nt, Artificial Sequence
  Description of Artificial Sequence: Synthetic oligonucleotide
ucggggcugcuuaguggac

SEQ ID NO: 165786 - RNA, 19 nt, Artificial Sequence
  Description of Artificial Sequence: Synthetic oligonucleotide
ccgucugguaguugagggc

SEQ ID NO: 165787 - RNA, 19 nt, Artificial Sequence
  Description of Artificial Sequence: Synthetic oligonucleotide
gaacugaaauuggaacgau

SEQ ID NO: 165788 - RNA, 19 nt, Artificial Sequence
  Description of Artificial Sequence: Synthetic oligonucleotide
accuuacaggacauauuua

SEQ ID NO: 165789 - RNA, 19 nt, Artificial Sequence
  Description of Artificial Sequence: Synthetic oligonucleotide
ucgcuggaauggugguuuc

SEQ ID NO: 165790 - RNA, 19 nt, Artificial Sequence
  Description of Artificial Sequence: Synthetic oligonucleotide
agugaacccggaagagaaa

SEQ ID NO: 165791 - RNA, 19 nt, Artificial Sequence
  Description of Artificial Sequence: Synthetic oligonucleotide
aaacgacauuaggcccuga

SEQ ID NO: 165792 - RNA, 19 nt, Artificial Sequence
  Description of Artificial Sequence: Synthetic oligonucleotide
cgauucgggucgcuggccg

SEQ ID NO: 165793 - RNA, 19 nt, Artificial Sequence
  Description of Artificial Sequence: Synthetic oligonucleotide
ugagucgauucgggucgcu

SEQ ID NO: 165794 - RNA, 19 nt, Artificial Sequence
  Description of Artificial Sequence: Synthetic oligonucleotide
ucccugcaccuuuccacuu

SEQ ID NO: 165795 - RNA, 19 nt, Artificial Sequence
  Description of Artificial Sequence: Synthetic oligonucleotide
ggcuagagauuuccaauau

SEQ ID NO: 165796 - RNA, 19 nt, Artificial Sequence
  Description of Artificial Sequence: Synthetic oligonucleotide
gguacacauauaggaacua

SEQ ID NO: 165797 - RNA, 19 nt, Artificial Sequence
  Description of Artificial Sequence: Synthetic oligonucleotide
acagaccuuacaggacaua

SEQ ID NO: 165798 - RNA, 19 nt, Artificial Sequence
  Description of Artificial Sequence: Synthetic oligonucleotide
ggucgucaguguaugucca

SEQ ID NO: 165799 - RNA, 19 nt, Artificial Sequence
  Description of Artificial Sequence: Synthetic oligonucleotide
gccaaggaucuucaccuua

SEQ ID NO: 165800 - RNA, 19 nt, Artificial Sequence
  Description of Artificial Sequence: Synthetic oligonucleotide
gaacgaucugugggcauau

SEQ ID NO: 165801 - RNA, 19 nt, Artificial Sequence
  Description of Artificial Sequence: Synthetic oligonucleotide
gugcgucuuucaucaccuc

SEQ ID NO: 165802 - RNA, 19 nt, Artificial Sequence
  Description of Artificial Sequence: Synthetic oligonucleotide
ggccggguuagguccuagc

SEQ ID NO: 165803 - RNA, 19 nt, Artificial Sequence
  Description of Artificial Sequence: Synthetic oligonucleotide
acagcguuuggcggucguu

SEQ ID NO: 165804 - RNA, 19 nt, Artificial Sequence
  Description of Artificial Sequence: Synthetic oligonucleotide
gauggccugugagguaggu

SEQ ID NO: 165805 - RNA, 19 nt, Artificial Sequence
  Description of Artificial Sequence: Synthetic oligonucleotide
cucuugcgacucaucauuu

SEQ ID NO: 165806 - RNA, 19 nt, Artificial Sequence
  Description of Artificial Sequence: Synthetic oligonucleotide
gccggguuagguccuagcu

SEQ ID NO: 165807 - RNA, 19 nt, Artificial Sequence
  Description of Artificial Sequence: Synthetic oligonucleotide
gaucauccgucugguaguu

SEQ ID NO: 165808 - RNA, 19 nt, Artificial Sequence
  Description of Artificial Sequence: Synthetic oligonucleotide
uaccugcgacacagcguuu

SEQ ID NO: 165809 - RNA, 19 nt, Artificial Sequence
  Description of Artificial Sequence: Synthetic oligonucleotide
gucgucaguguauguccau

SEQ ID NO: 165810 - RNA, 19 nt, Artificial Sequence
  Description of Artificial Sequence: Synthetic oligonucleotide
gucgcuggccggguuaggu

SEQ ID NO: 165811 - RNA, 19 nt, Artificial Sequence
  Description of Artificial Sequence: Synthetic oligonucleotide
cugagccauuauugccgaa

SEQ ID NO: 165812 - RNA, 19 nt, Artificial Sequence
  Description of Artificial Sequence: Synthetic oligonucleotide
guuuggcggucguuuucau

SEQ ID NO: 165813 - RNA, 19 nt, Artificial Sequence
  Description of Artificial Sequence: Synthetic oligonucleotide
cuacuuccuugaaggggau

SEQ ID NO: 165814 - RNA, 19 nt, Artificial Sequence
  Description of Artificial Sequence: Synthetic oligonucleotide
cagcucuaugcuccugcau

SEQ ID NO: 165815 - RNA, 19 nt, Artificial Sequence
  Description of Artificial Sequence: Synthetic oligonucleotide
cagcguuuggcggucguuu

SEQ ID NO: 165816 - RNA, 19 nt, Artificial Sequence
  Description of Artificial Sequence: Synthetic oligonucleotide
gcugcuuaguggacuuagu

SEQ ID NO: 165817 - RNA, 19 nt, Artificial Sequence
  Description of Artificial Sequence: Synthetic oligonucleotide
gcggucguuuucauucagu

SEQ ID NO: 165818 - RNA, 19 nt, Artificial Sequence
  Description of Artificial Sequence: Synthetic oligonucleotide
ccgugacucugugagugaa

SEQ ID NO: 165819 - RNA, 19 nt, Artificial Sequence
  Description of Artificial Sequence: Synthetic oligonucleotide
gcucgcuggaauggugguu

SEQ ID NO: 165820 - RNA, 19 nt, Artificial Sequence
  Description of Artificial Sequence: Synthetic oligonucleotide
aauuuuaacacuuugggug

SEQ ID NO: 165821 - RNA, 19 nt, Artificial Sequence
  Description of Artificial Sequence: Synthetic oligonucleotide
aacaagaucacucagcuuc

SEQ ID NO: 165822 - RNA, 19 nt, Artificial Sequence
  Description of Artificial Sequence: Synthetic oligonucleotide
ugaaguaucccauugcugg

SEQ ID NO: 165823 - RNA, 19 nt, Artificial Sequence
  Description of Artificial Sequence: Synthetic oligonucleotide
aaacuuaugcaguucauag

SEQ ID NO: 165824 - RNA, 19 nt, Artificial Sequence
  Description of Artificial Sequence: Synthetic oligonucleotide
auagguauggcuccugucc

SEQ ID NO: 165825 - RNA, 19 nt, Artificial Sequence
  Description of Artificial Sequence: Synthetic oligonucleotide
aauaacauauagcaccugu

SEQ ID NO: 165826 - RNA, 19 nt, Artificial Sequence
  Description of Artificial Sequence: Synthetic oligonucleotide
aagguuauggccaugaucu

SEQ ID NO: 165827 - RNA, 19 nt, Artificial Sequence
  Description of Artificial Sequence: Synthetic oligonucleotide
ugugaaacugucauuacga

SEQ ID NO: 165828 - RNA, 19 nt, Artificial Sequence
  Description of Artificial Sequence: Synthetic oligonucleotide
uuugauaccuugaugauua

SEQ ID NO: 165829 - RNA, 19 nt, Artificial Sequence
  Description of Artificial Sequence: Synthetic oligonucleotide
uaauaaaugacuugagggu

SEQ ID NO: 165830 - RNA, 19 nt, Artificial Sequence
  Description of Artificial Sequence: Synthetic oligonucleotide
aacuuaugcaguucauagg

SEQ ID NO: 165831 - RNA, 19 nt, Artificial Sequence
  Description of Artificial Sequence: Synthetic oligonucleotide
uugugaaacugucauuacg

SEQ ID NO: 165832 - RNA, 19 nt, Artificial Sequence
  Description of Artificial Sequence: Synthetic oligonucleotide
auuaaacgcaaacaaacgu

SEQ ID NO: 165833 - RNA, 19 nt, Artificial Sequence
  Description of Artificial Sequence: Synthetic oligonucleotide
agacuuauuggguuuguac

SEQ ID NO: 165834 - RNA, 19 nt, Artificial Sequence
  Description of Artificial Sequence: Synthetic oligonucleotide
uguagcagagaauuguacc

SEQ ID NO: 165835 - RNA, 19 nt, Artificial Sequence
  Description of Artificial Sequence: Synthetic oligonucleotide
aacuaacccguggagagcc

SEQ ID NO: 165836 - RNA, 19 nt, Artificial Sequence
  Description of Artificial Sequence: Synthetic oligonucleotide
aaugacugcaggcacaaau

SEQ ID NO: 165837 - RNA, 19 nt, Artificial Sequence
  Description of Artificial Sequence: Synthetic oligonucleotide
aauaaccuaguagugaacu

SEQ ID NO: 165838 - RNA, 19 nt, Artificial Sequence
  Description of Artificial Sequence: Synthetic oligonucleotide
ucuuguaacaucgugacau

SEQ ID NO: 165839 - RNA, 19 nt, Artificial Sequence
  Description of Artificial Sequence: Synthetic oligonucleotide
acgcaaacaaacgugaaac

SEQ ID NO: 165840 - RNA, 19 nt, Artificial Sequence
  Description of Artificial Sequence: Synthetic oligonucleotide
aauuguacccuguuaguau

SEQ ID NO: 165841 - RNA, 19 nt, Artificial Sequence
  Description of Artificial Sequence: Synthetic oligonucleotide
acgguagugagcuucacag

SEQ ID NO: 165842 - RNA, 19 nt, Artificial Sequence
  Description of Artificial Sequence: Synthetic oligonucleotide
uuugagagcgguaacuaac

SEQ ID NO: 165843 - RNA, 19 nt, Artificial Sequence
  Description of Artificial Sequence: Synthetic oligonucleotide
acucaugggacccugcgac

SEQ ID NO: 165844 - RNA, 19 nt, Artificial Sequence
  Description of Artificial Sequence: Synthetic oligonucleotide
uguccgucugcuauuaaag

SEQ ID NO: 165845 - RNA, 19 nt, Artificial Sequence
  Description of Artificial Sequence: Synthetic oligonucleotide
uguucgagcuggaauagcc

SEQ ID NO: 165846 - RNA, 19 nt, Artificial Sequence
  Description of Artificial Sequence: Synthetic oligonucleotide
ucuuagaacauuugggguc

SEQ ID NO: 165847 - RNA, 19 nt, Artificial Sequence
  Description of Artificial Sequence: Synthetic oligonucleotide
ugaguaugcugcuuugagg

SEQ ID NO: 165848 - RNA, 19 nt, Artificial Sequence
  Description of Artificial Sequence: Synthetic oligonucleotide
aguagugaacuucuccuuc

SEQ ID NO: 165849 - RNA, 19 nt, Artificial Sequence
  Description of Artificial Sequence: Synthetic oligonucleotide
uuuugguacauuugagagc

SEQ ID NO: 165850 - RNA, 19 nt, Artificial Sequence
  Description of Artificial Sequence: Synthetic oligonucleotide
ugaaacugucauuacgagc

SEQ ID NO: 165851 - RNA, 19 nt, Artificial Sequence
  Description of Artificial Sequence: Synthetic oligonucleotide
auagguuaauaauacuugu

SEQ ID NO: 165852 - RNA, 19 nt, Artificial Sequence
  Description of Artificial Sequence: Synthetic oligonucleotide
auuuuaacacuuuggguga

SEQ ID NO: 165853 - RNA, 19 nt, Artificial Sequence
  Description of Artificial Sequence: Synthetic oligonucleotide
ucguccaagcuccucaggg

SEQ ID NO: 165854 - RNA, 19 nt, Artificial Sequence
  Description of Artificial Sequence: Synthetic oligonucleotide
auuacgagcaucaauuuca

SEQ ID NO: 165855 - RNA, 19 nt, Artificial Sequence
  Description of Artificial Sequence: Synthetic oligonucleotide
gacuuauuggguuuguaca

SEQ ID NO: 165856 - RNA, 19 nt, Artificial Sequence
  Description of Artificial Sequence: Synthetic oligonucleotide
gagagcgguaacuaacccg

SEQ ID NO: 165857 - RNA, 19 nt, Artificial Sequence
  Description of Artificial Sequence: Synthetic oligonucleotide
acucuggccaauuucgcgg

SEQ ID NO: 165858 - RNA, 19 nt, Artificial Sequence
  Description of Artificial Sequence: Synthetic oligonucleotide
gaggucacgaaccaugcug

SEQ ID NO: 165859 - RNA, 19 nt, Artificial Sequence
  Description of Artificial Sequence: Synthetic oligonucleotide
uucaaaugccucgugacgc

SEQ ID NO: 165860 - RNA, 19 nt, Artificial Sequence
  Description of Artificial Sequence: Synthetic oligonucleotide
uguaacaucgugacaugcu

SEQ ID NO: 165861 - RNA, 19 nt, Artificial Sequence
  Description of Artificial Sequence: Synthetic oligonucleotide
uagccuguaacauggagac

SEQ ID NO: 165862 - RNA, 19 nt, Artificial Sequence
  Description of Artificial Sequence: Synthetic oligonucleotide
uugagagcgguaacuaacc

SEQ ID NO: 165863 - RNA, 19 nt, Artificial Sequence
  Description of Artificial Sequence: Synthetic oligonucleotide
caucauguacaauuccugc

SEQ ID NO: 165864 - RNA, 19 nt, Artificial Sequence
  Description of Artificial Sequence: Synthetic oligonucleotide
caucgugacaugcucauag

SEQ ID NO: 165865 - RNA, 19 nt, Artificial Sequence
  Description of Artificial Sequence: Synthetic oligonucleotide
gacacugaccaagacagag

SEQ ID NO: 165866 - RNA, 19 nt, Artificial Sequence
  Description of Artificial Sequence: Synthetic oligonucleotide
uugaaguaucccauugcug

SEQ ID NO: 165867 - RNA, 19 nt, Artificial Sequence
  Description of Artificial Sequence: Synthetic oligonucleotide
aacgcaaacaaacgugaaa

SEQ ID NO: 165868 - RNA, 19 nt, Artificial Sequence
  Description of Artificial Sequence: Synthetic oligonucleotide
aaccuucgugcuuggcucc

SEQ ID NO: 165869 - RNA, 19 nt, Artificial Sequence
  Description of Artificial Sequence: Synthetic oligonucleotide
gaaacguucuuguaacauc

SEQ ID NO: 165870 - RNA, 19 nt, Artificial Sequence
  Description of Artificial Sequence: Synthetic oligonucleotide
ugauugacuguauccacac

SEQ ID NO: 165871 - RNA, 19 nt, Artificial Sequence
  Description of Artificial Sequence: Synthetic oligonucleotide
uguucucgugucaaugagc

SEQ ID NO: 165872 - RNA, 19 nt, Artificial Sequence
  Description of Artificial Sequence: Synthetic oligonucleotide
ugucccgagcaaauucucg

SEQ ID NO: 165873 - RNA, 19 nt, Artificial Sequence
  Description of Artificial Sequence: Synthetic oligonucleotide
cuuagaacauuuggggucc

SEQ ID NO: 165874 - RNA, 19 nt, Artificial Sequence
  Description of Artificial Sequence: Synthetic oligonucleotide
gaugcggccaaagaucucc

SEQ ID NO: 165875 - RNA, 19 nt, Artificial Sequence
  Description of Artificial Sequence: Synthetic oligonucleotide
uacccuguuaguauaacuu

SEQ ID NO: 165876 - RNA, 19 nt, Artificial Sequence
  Description of Artificial Sequence: Synthetic oligonucleotide
acaacucaacagaugacac

SEQ ID NO: 165877 - RNA, 19 nt, Artificial Sequence
  Description of Artificial Sequence: Synthetic oligonucleotide
ugugucccgagcaaauucu

SEQ ID NO: 165878 - RNA, 19 nt, Artificial Sequence
  Description of Artificial Sequence: Synthetic oligonucleotide
ucaaugcaaguugugaaac

SEQ ID NO: 165879 - RNA, 19 nt, Artificial Sequence
  Description of Artificial Sequence: Synthetic oligonucleotide
aacaucgugacaugcucau

SEQ ID NO: 165880 - RNA, 19 nt, Artificial Sequence
  Description of Artificial Sequence: Synthetic oligonucleotide
uugcuagccucucccaggg

SEQ ID NO: 165881 - RNA, 19 nt, Artificial Sequence
  Description of Artificial Sequence: Synthetic oligonucleotide
uucgagcuggaauagccug

SEQ ID NO: 165882 - RNA, 19 nt, Artificial Sequence
  Description of Artificial Sequence: Synthetic oligonucleotide
ugagaacugauggaccucc

SEQ ID NO: 165883 - RNA, 19 nt, Artificial Sequence
  Description of Artificial Sequence: Synthetic oligonucleotide
aacaaacgugaaaccaagg

SEQ ID NO: 165884 - RNA, 19 nt, Artificial Sequence
  Description of Artificial Sequence: Synthetic oligonucleotide
ugaucuguggaaguugcca

SEQ ID NO: 165885 - RNA, 19 nt, Artificial Sequence
  Description of Artificial Sequence: Synthetic oligonucleotide
uguguguugcacagaggcc

SEQ ID NO: 165886 - RNA, 19 nt, Artificial Sequence
  Description of Artificial Sequence: Synthetic oligonucleotide
caauuucgcggcuggauag

SEQ ID NO: 165887 - RNA, 19 nt, Artificial Sequence
  Description of Artificial Sequence: Synthetic oligonucleotide
agcgguaacuaacccgugg

SEQ ID NO: 165888 - RNA, 19 nt, Artificial Sequence
  Description of Artificial Sequence: Synthetic oligonucleotide
aacgcauucuccauggaau

SEQ ID NO: 165889 - RNA, 19 nt, Artificial Sequence
  Description of Artificial Sequence: Synthetic oligonucleotide
uaaccuaguagugaacuuc

SEQ ID NO: 165890 - RNA, 19 nt, Artificial Sequence
  Description of Artificial Sequence: Synthetic oligonucleotide
aacgguagugagcuucaca

SEQ ID NO: 165891 - RNA, 19 nt, Artificial Sequence
  Description of Artificial Sequence: Synthetic oligonucleotide
gcaaugagcauccaaauaa

SEQ ID NO: 165892 - RNA, 19 nt, Artificial Sequence
  Description of Artificial Sequence: Synthetic oligonucleotide
gaugugccguaccuguuag

SEQ ID NO: 165893 - RNA, 19 nt, Artificial Sequence
  Description of Artificial Sequence: Synthetic oligonucleotide
gucccgagcaaauucucgg

SEQ ID NO: 165894 - RNA, 19 nt, Artificial Sequence
  Description of Artificial Sequence: Synthetic oligonucleotide
ucuuaaccauucccaucgg

SEQ ID NO: 165895 - RNA, 19 nt, Artificial Sequence
  Description of Artificial Sequence: Synthetic oligonucleotide
ugagagcgguaacuaaccc

SEQ ID NO: 165896 - RNA, 19 nt, Artificial Sequence
  Description of Artificial Sequence: Synthetic oligonucleotide
accuguuagaaucuaguuu

SEQ ID NO: 165897 - RNA, 19 nt, Artificial Sequence
  Description of Artificial Sequence: Synthetic oligonucleotide
ugccauaugauugacugua

SEQ ID NO: 165898 - RNA, 19 nt, Artificial Sequence
  Description of Artificial Sequence: Synthetic oligonucleotide
guaacauggagacagcacu

SEQ ID NO: 165899 - RNA, 19 nt, Artificial Sequence
  Description of Artificial Sequence: Synthetic oligonucleotide
guaacaucgugacaugcuc

SEQ ID NO: 165900 - RNA, 19 nt, Artificial Sequence
  Description of Artificial Sequence: Synthetic oligonucleotide
aaguaguauugcugggccu

SEQ ID NO: 165901 - RNA, 19 nt, Artificial Sequence
  Description of Artificial Sequence: Synthetic oligonucleotide
ggauuucccaaguucaaug

SEQ ID NO: 165902 - RNA, 19 nt, Artificial Sequence
  Description of Artificial Sequence: Synthetic oligonucleotide
cuggaugcggccaaagauc

SEQ ID NO: 165903 - RNA, 19 nt, Artificial Sequence
  Description of Artificial Sequence: Synthetic oligonucleotide
cauuacgagcaucaauuuc

SEQ ID NO: 165904 - RNA, 19 nt, Artificial Sequence
  Description of Artificial Sequence: Synthetic oligonucleotide
cgaaccaugcugaagaagc

SEQ ID NO: 165905 - RNA, 19 nt, Artificial Sequence
  Description of Artificial Sequence: Synthetic oligonucleotide
ucuauggcguuucuccguc

SEQ ID NO: 165906 - RNA, 19 nt, Artificial Sequence
  Description of Artificial Sequence: Synthetic oligonucleotide
uuguaacaucgugacaugc

SEQ ID NO: 165907 - RNA, 19 nt, Artificial Sequence
  Description of Artificial Sequence: Synthetic oligonucleotide
cagaugacacaucccgugg

SEQ ID NO: 165908 - RNA, 19 nt, Artificial Sequence
  Description of Artificial Sequence: Synthetic oligonucleotide
guuauggccaugaucugug

SEQ ID NO: 165909 - RNA, 19 nt, Artificial Sequence
  Description of Artificial Sequence: Synthetic oligonucleotide
agagcgguaacuaacccgu

SEQ ID NO: 165910 - RNA, 19 nt, Artificial Sequence
  Description of Artificial Sequence: Synthetic oligonucleotide
caucccuugagaacugaug

SEQ ID NO: 165911 - RNA, 19 nt, Artificial Sequence
  Description of Artificial Sequence: Synthetic oligonucleotide
uuauggccaugaucugugg

SEQ ID NO: 165912 - RNA, 19 nt, Artificial Sequence
  Description of Artificial Sequence: Synthetic oligonucleotide
acuuggaugugccguaccu

SEQ ID NO: 165913 - RNA, 19 nt, Artificial Sequence
  Description of Artificial Sequence: Synthetic oligonucleotide
uggccaauuucgcggcugg

SEQ ID NO: 165914 - RNA, 19 nt, Artificial Sequence
  Description of Artificial Sequence: Synthetic oligonucleotide
accagccgcacccugcgac

SEQ ID NO: 165915 - RNA, 19 nt, Artificial Sequence
  Description of Artificial Sequence: Synthetic oligonucleotide
uccgucugcuauuaaaguu

SEQ ID NO: 165916 - RNA, 19 nt, Artificial Sequence
  Description of Artificial Sequence: Synthetic oligonucleotide
ccaaguucaaugcaaguug

SEQ ID NO: 165917 - RNA, 19 nt, Artificial Sequence
  Description of Artificial Sequence: Synthetic oligonucleotide
aauucuagguugaggacuu

SEQ ID NO: 165918 - RNA, 19 nt, Artificial Sequence
  Description of Artificial Sequence: Synthetic oligonucleotide
ucgugcuuggcuccggaga

SEQ ID NO: 165919 - RNA, 19 nt, Artificial Sequence
  Description of Artificial Sequence: Synthetic oligonucleotide
aggccuacaauucuagguu

SEQ ID NO: 165920 - RNA, 19 nt, Artificial Sequence
  Description of Artificial Sequence: Synthetic oligonucleotide
ugcccaauguuuccugugu

SEQ ID NO: 165921 - RNA, 19 nt, Artificial Sequence
  Description of Artificial Sequence: Synthetic oligonucleotide
cuaguagugaacuucuccu

SEQ ID NO: 165922 - RNA, 19 nt, Artificial Sequence
  Description of Artificial Sequence: Synthetic oligonucleotide
uucgcggcuggauagguau

SEQ ID NO: 165923 - RNA, 19 nt, Artificial Sequence
  Description of Artificial Sequence: Synthetic oligonucleotide
gcaggcacaaauaaccuag

SEQ ID NO: 165924 - RNA, 19 nt, Artificial Sequence
  Description of Artificial Sequence: Synthetic oligonucleotide
gaaaccuucgugcuuggcu

SEQ ID NO: 165925 - RNA, 19 nt, Artificial Sequence
  Description of Artificial Sequence: Synthetic oligonucleotide
auuugagagcgguaacuaa

SEQ ID NO: 165926 - RNA, 19 nt, Artificial Sequence
  Description of Artificial Sequence: Synthetic oligonucleotide
gaucuguggaaguugccaa

SEQ ID NO: 165927 - RNA, 19 nt, Artificial Sequence
  Description of Artificial Sequence: Synthetic oligonucleotide
ugacgcuugaugaguuucu

SEQ ID NO: 165928 - RNA, 19 nt, Artificial Sequence
  Description of Artificial Sequence: Synthetic oligonucleotide
acgcauucuccauggaaug

SEQ ID NO: 165929 - RNA, 19 nt, Artificial Sequence
  Description of Artificial Sequence: Synthetic oligonucleotide
ugguacauuugagagcggu

SEQ ID NO: 165930 - RNA, 19 nt, Artificial Sequence
  Description of Artificial Sequence: Synthetic oligonucleotide
ccuaguagugaacuucucc

SEQ ID NO: 165931 - RNA, 19 nt, Artificial Sequence
  Description of Artificial Sequence: Synthetic oligonucleotide
agaugacacaucccguggu

SEQ ID NO: 165932 - RNA, 19 nt, Artificial Sequence
  Description of Artificial Sequence: Synthetic oligonucleotide
ugauagccucagcauugag

SEQ ID NO: 165933 - RNA, 19 nt, Artificial Sequence
  Description of Artificial Sequence: Synthetic oligonucleotide
gaacgcauucuccauggaa

SEQ ID NO: 165934 - RNA, 19 nt, Artificial Sequence
  Description of Artificial Sequence: Synthetic oligonucleotide
ucgagcuggaauagccugu

SEQ ID NO: 165935 - RNA, 19 nt, Artificial Sequence
  Description of Artificial Sequence: Synthetic oligonucleotide
gaauuguacccuguuagua

SEQ ID NO: 165936 - RNA, 19 nt, Artificial Sequence
  Description of Artificial Sequence: Synthetic oligonucleotide
uguuuccugugucccgagc

SEQ ID NO: 165937 - RNA, 19 nt, Artificial Sequence
  Description of Artificial Sequence: Synthetic oligonucleotide
auaaccuaguagugaacuu

SEQ ID NO: 165938 - RNA, 19 nt, Artificial Sequence
  Description of Artificial Sequence: Synthetic oligonucleotide
uuuaacacuuugggugaca

SEQ ID NO: 165939 - RNA, 19 nt, Artificial Sequence
  Description of Artificial Sequence: Synthetic oligonucleotide
caggucgucaaccucccug

SEQ ID NO: 165940 - RNA, 19 nt, Artificial Sequence
  Description of Artificial Sequence: Synthetic oligonucleotide
aggucgucaaccucccugu

SEQ ID NO: 165941 - RNA, 19 nt, Artificial Sequence
  Description of Artificial Sequence: Synthetic oligonucleotide
guacauuugagagcgguaa

SEQ ID NO: 165942 - RNA, 19 nt, Artificial Sequence
  Description of Artificial Sequence: Synthetic oligonucleotide
cucggaaacguucuuguaa

SEQ ID NO: 165943 - RNA, 19 nt, Artificial Sequence
  Description of Artificial Sequence: Synthetic oligonucleotide
aguaugcugcuuugaggca

SEQ ID NO: 165944 - RNA, 19 nt, Artificial Sequence
  Description of Artificial Sequence: Synthetic oligonucleotide
ccgucuauggcguuucucc

SEQ ID NO: 165945 - RNA, 19 nt, Artificial Sequence
  Description of Artificial Sequence: Synthetic oligonucleotide
aaacgguagugagcuucac

SEQ ID NO: 165946 - RNA, 19 nt, Artificial Sequence
  Description of Artificial Sequence: Synthetic oligonucleotide
aaacugucauuacgagcau

SEQ ID NO: 165947 - RNA, 19 nt, Artificial Sequence
  Description of Artificial Sequence: Synthetic oligonucleotide
  modified_base (11)..(11): a, c, u, g, unknown or other
aagucccgccnggaacugc

SEQ ID NO: 165948 - RNA, 19 nt, Artificial Sequence
  Description of Artificial Sequence: Synthetic oligonucleotide
uguccgcuugcccgaggcg

SEQ ID NO: 165949 - RNA, 19 nt, Artificial Sequence
  Description of Artificial Sequence: Synthetic oligonucleotide
ucccgagcaaauucucgga

SEQ ID NO: 165950 - RNA, 19 nt, Artificial Sequence
  Description of Artificial Sequence: Synthetic oligonucleotide
aguaguauugcugggccuu

SEQ ID NO: 165951 - RNA, 19 nt, Artificial Sequence
  Description of Artificial Sequence: Synthetic oligonucleotide
cugugucccgagcaaauuc

SEQ ID NO: 165952 - RNA, 19 nt, Artificial Sequence
  Description of Artificial Sequence: Synthetic oligonucleotide
cucuggccaauuucgcggc

SEQ ID NO: 165953 - RNA, 19 nt, Artificial Sequence
  Description of Artificial Sequence: Synthetic oligonucleotide
augaucuguggaaguugcc

SEQ ID NO: 165954 - RNA, 19 nt, Artificial Sequence
  Description of Artificial Sequence: Synthetic oligonucleotide
uuuuaacacuuugggugac

SEQ ID NO: 165955 - RNA, 19 nt, Artificial Sequence
  Description of Artificial Sequence: Synthetic oligonucleotide
auaacauauagcaccugua

SEQ ID NO: 165956 - RNA, 19 nt, Artificial Sequence
  Description of Artificial Sequence: Synthetic oligonucleotide
ggugugcauucucuguagg

SEQ ID NO: 165957 - RNA, 19 nt, Artificial Sequence
  Description of Artificial Sequence: Synthetic oligonucleotide
uucgugcuuggcuccggag

SEQ ID NO: 165958 - RNA, 19 nt, Artificial Sequence
  Description of Artificial Sequence: Synthetic oligonucleotide
aaacgcaaacaaacgugaa

SEQ ID NO: 165959 - RNA, 19 nt, Artificial Sequence
  Description of Artificial Sequence: Synthetic oligonucleotide
uguacccuguuaguauaac

SEQ ID NO: 165960 - RNA, 19 nt, Artificial Sequence
  Description of Artificial Sequence: Synthetic oligonucleotide
caucccgugguuucuccug

SEQ ID NO: 165961 - RNA, 19 nt, Artificial Sequence
  Description of Artificial Sequence: Synthetic oligonucleotide
gacccugcgaccacuuccc

SEQ ID NO: 165962 - RNA, 19 nt, Artificial Sequence
  Description of Artificial Sequence: Synthetic oligonucleotide
gcgauagcagucugggucc

SEQ ID NO: 165963 - RNA, 19 nt, Artificial Sequence
  Description of Artificial Sequence: Synthetic oligonucleotide
  modified_base (8)..(8): a, c, u, g, unknown or other
ucccgccnggaacugcugc

SEQ ID NO: 165964 - RNA, 19 nt, Artificial Sequence
  Description of Artificial Sequence: Synthetic oligonucleotide
auuacucauguaaaaucuu

SEQ ID NO: 165965 - RNA, 19 nt, Artificial Sequence
  Description of Artificial Sequence: Synthetic oligonucleotide
uguuagaaucuaguuucuu

SEQ ID NO: 165966 - RNA, 19 nt, Artificial Sequence
  Description of Artificial Sequence: Synthetic oligonucleotide
uccugcccaauguuuccug

SEQ ID NO: 165967 - RNA, 19 nt, Artificial Sequence
  Description of Artificial Sequence: Synthetic oligonucleotide
uguguugcacagaggccua

SEQ ID NO: 165968 - RNA, 19 nt, Artificial Sequence
  Description of Artificial Sequence: Synthetic oligonucleotide
aggcuaugaauuaacugaa

SEQ ID NO: 165969 - RNA, 19 nt, Artificial Sequence
  Description of Artificial Sequence: Synthetic oligonucleotide
gguaacuaacccguggaga

SEQ ID NO: 165970 - RNA, 19 nt, Artificial Sequence
  Description of Artificial Sequence: Synthetic oligonucleotide
caaacgguagugagcuuca

SEQ ID NO: 165971 - RNA, 19 nt, Artificial Sequence
  Description of Artificial Sequence: Synthetic oligonucleotide
ggccuacaauucuagguug

SEQ ID NO: 165972 - RNA, 19 nt, Artificial Sequence
  Description of Artificial Sequence: Synthetic oligonucleotide
ggacccugcgaccacuucc

SEQ ID NO: 165973 - RNA, 19 nt, Artificial Sequence
  Description of Artificial Sequence: Synthetic oligonucleotide
cacaucccgugguuucucc

SEQ ID NO: 165974 - RNA, 19 nt, Artificial Sequence
  Description of Artificial Sequence: Synthetic oligonucleotide
aggcacaaauaaccuagua

SEQ ID NO: 165975 - RNA, 19 nt, Artificial Sequence
  Description of Artificial Sequence: Synthetic oligonucleotide
ucucggaaacguucuugua

SEQ ID NO: 165976 - RNA, 19 nt, Artificial Sequence
  Description of Artificial Sequence: Synthetic oligonucleotide
augacugcaggcacaaaua

SEQ ID NO: 165977 - RNA, 19 nt, Artificial Sequence
  Description of Artificial Sequence: Synthetic oligonucleotide
ucgugacgcuugaugaguu

SEQ ID NO: 165978 - RNA, 19 nt, Artificial Sequence
  Description of Artificial Sequence: Synthetic oligonucleotide
acaucccgugguuucuccu

SEQ ID NO: 165979 - RNA, 19 nt, Artificial Sequence
  Description of Artificial Sequence: Synthetic oligonucleotide
uccuuacacgccagccuuc

SEQ ID NO: 165980 - RNA, 19 nt, Artificial Sequence
  Description of Artificial Sequence: Synthetic oligonucleotide
ggcuggauagguauggcuc

SEQ ID NO: 165981 - RNA, 19 nt, Artificial Sequence
  Description of Artificial Sequence: Synthetic oligonucleotide
cuguccgucugcuauuaaa

SEQ ID NO: 165982 - RNA, 19 nt, Artificial Sequence
  Description of Artificial Sequence: Synthetic oligonucleotide
ggcaucaugguaaaacuua

SEQ ID NO: 165983 - RNA, 19 nt, Artificial Sequence
  Description of Artificial Sequence: Synthetic oligonucleotide
guacccuguuaguauaacu

SEQ ID NO: 165984 - RNA, 19 nt, Artificial Sequence
  Description of Artificial Sequence: Synthetic oligonucleotide
ccaaaaggucaucaccaac

SEQ ID NO: 165985 - RNA, 19 nt, Artificial Sequence
  Description of Artificial Sequence: Synthetic oligonucleotide
uggauagguauggcuccug

SEQ ID NO: 165986 - RNA, 19 nt, Artificial Sequence
  Description of Artificial Sequence: Synthetic oligonucleotide
acuaacccguggagagccc

SEQ ID NO: 165987 - RNA, 19 nt, Artificial Sequence
  Description of Artificial Sequence: Synthetic oligonucleotide
guaccuguuagaaucuagu

SEQ ID NO: 165988 - RNA, 19 nt, Artificial Sequence
  Description of Artificial Sequence: Synthetic oligonucleotide
cauuugagagcgguaacua

SEQ ID NO: 165989 - RNA, 19 nt, Artificial Sequence
  Description of Artificial Sequence: Synthetic oligonucleotide
caagaaucuguguucucgu

SEQ ID NO: 165990 - RNA, 19 nt, Artificial Sequence
  Description of Artificial Sequence: Synthetic oligonucleotide
ugcgaccacuucccucuca

SEQ ID NO: 165991 - RNA, 19 nt, Artificial Sequence
  Description of Artificial Sequence: Synthetic oligonucleotide
uuucgcggcuggauaggua

SEQ ID NO: 165992 - RNA, 19 nt, Artificial Sequence
  Description of Artificial Sequence: Synthetic oligonucleotide
auuucgcggcuggauaggu

SEQ ID NO: 165993 - RNA, 19 nt, Artificial Sequence
  Description of Artificial Sequence: Synthetic oligonucleotide
cuguucgagcuggaauagc

SEQ ID NO: 165994 - RNA, 19 nt, Artificial Sequence
  Description of Artificial Sequence: Synthetic oligonucleotide
ucgcggcuggauagguaug

SEQ ID NO: 165995 - RNA, 19 nt, Artificial Sequence
  Description of Artificial Sequence: Synthetic oligonucleotide
gaugacacaucccgugguu

SEQ ID NO: 165996 - RNA, 19 nt, Artificial Sequence
  Description of Artificial Sequence: Synthetic oligonucleotide
gcgguaacuaacccgugga

SEQ ID NO: 165997 - RNA, 19 nt, Artificial Sequence
  Description of Artificial Sequence: Synthetic oligonucleotide
caggucgcucagcuuugcc

SEQ ID NO: 165998 - RNA, 19 nt, Artificial Sequence
  Description of Artificial Sequence: Synthetic oligonucleotide
uucgcacuuccaguagcuc

SEQ ID NO: 165999 - RNA, 19 nt, Artificial Sequence
  Description of Artificial Sequence: Synthetic oligonucleotide
accuucgugcuuggcuccg

SEQ ID NO: 166000 - RNA, 19 nt, Artificial Sequence
  Description of Artificial Sequence: Synthetic oligonucleotide
cuuaaccauucccaucggu

SEQ ID NO: 166001 - RNA, 19 nt, Artificial Sequence
  Description of Artificial Sequence: Synthetic oligonucleotide
cgucuauggcguuucuccg

SEQ ID NO: 166002 - RNA, 19 nt, Artificial Sequence
  Description of Artificial Sequence: Synthetic oligonucleotide
augacacaucccgugguuu

SEQ ID NO: 166003 - RNA, 19 nt, Artificial Sequence
  Description of Artificial Sequence: Synthetic oligonucleotide
guccgucugcuauuaaagu

SEQ ID NO: 166004 - RNA, 19 nt, Artificial Sequence
  Description of Artificial Sequence: Synthetic oligonucleotide
cuguuaguauaacuuggau

SEQ ID NO: 166005 - RNA, 19 nt, Artificial Sequence
  Description of Artificial Sequence: Synthetic oligonucleotide
ccucgugacgcuugaugag

SEQ ID NO: 166006 - RNA, 19 nt, Artificial Sequence
  Description of Artificial Sequence: Synthetic oligonucleotide
augugccguaccuguuaga

SEQ ID NO: 166007 - RNA, 19 nt, Artificial Sequence
  Description of Artificial Sequence: Synthetic oligonucleotide
ugcuagccucucccaggga

SEQ ID NO: 166008 - RNA, 19 nt, Artificial Sequence
  Description of Artificial Sequence: Synthetic oligonucleotide
  modified_base (16)..(16): a, c, u, g, unknown or other
cauccaagucccgccngga

SEQ ID NO: 166009 - RNA, 19 nt, Artificial Sequence
  Description of Artificial Sequence: Synthetic oligonucleotide
ucccaucggucuucccacu

SEQ ID NO: 166010 - RNA, 19 nt, Artificial Sequence
  Description of Artificial Sequence: Synthetic oligonucleotide
guccgcuugcccgaggcga

SEQ ID NO: 166011 - RNA, 19 nt, Artificial Sequence
  Description of Artificial Sequence: Synthetic oligonucleotide
cuggcuguccgucugcuau

SEQ ID NO: 166012 - RNA, 19 nt, Artificial Sequence
  Description of Artificial Sequence: Synthetic oligonucleotide
cacgaaccaugcugaagaa

SEQ ID NO: 166013 - RNA, 19 nt, Artificial Sequence
  Description of Artificial Sequence: Synthetic oligonucleotide
ccuguucgagcuggaauag

SEQ ID NO: 166014 - RNA, 19 nt, Artificial Sequence
  Description of Artificial Sequence: Synthetic oligonucleotide
gagcgguaacuaacccgug

SEQ ID NO: 166015 - RNA, 19 nt, Artificial Sequence
  Description of Artificial Sequence: Synthetic oligonucleotide
gugguucuugacaaacggu

SEQ ID NO: 166016 - RNA, 19 nt, Artificial Sequence
  Description of Artificial Sequence: Synthetic oligonucleotide
ggaaacguucuuguaacau

SEQ ID NO: 166017 - RNA, 19 nt, Artificial Sequence
  Description of Artificial Sequence: Synthetic oligonucleotide
gguuauggccaugaucugu

SEQ ID NO: 166018 - RNA, 19 nt, Artificial Sequence
  Description of Artificial Sequence: Synthetic oligonucleotide
  modified_base (12)..(12): a, c, u, g, unknown or other
caagucccgccnggaacug

SEQ ID NO: 166019 - RNA, 19 nt, Artificial Sequence
  Description of Artificial Sequence: Synthetic oligonucleotide
accugccaugcaugaccug

SEQ ID NO: 166020 - RNA, 19 nt, Artificial Sequence
  Description of Artificial Sequence: Synthetic oligonucleotide
cuucgugcuuggcuccgga

SEQ ID NO: 166021 - RNA, 19 nt, Artificial Sequence
  Description of Artificial Sequence: Synthetic oligonucleotide
guucgagcuggaauagccu

SEQ ID NO: 166022 - RNA, 19 nt, Artificial Sequence
  Description of Artificial Sequence: Synthetic oligonucleotide
caucggucuucccacuugu

SEQ ID NO: 166023 - RNA, 19 nt, Artificial Sequence
  Description of Artificial Sequence: Synthetic oligonucleotide
aucuguccgcuugcccgag

SEQ ID NO: 166024 - RNA, 19 nt, Artificial Sequence
  Description of Artificial Sequence: Synthetic oligonucleotide
cuugagggucuuagaacau

SEQ ID NO: 166025 - RNA, 19 nt, Artificial Sequence
  Description of Artificial Sequence: Synthetic oligonucleotide
cucgugacgcuugaugagu

SEQ ID NO: 166026 - RNA, 19 nt, Artificial Sequence
  Description of Artificial Sequence: Synthetic oligonucleotide
gguacauuugagagcggua

SEQ ID NO: 166027 - RNA, 19 nt, Artificial Sequence
  Description of Artificial Sequence: Synthetic oligonucleotide
cucgagccgucuauggcgu

SEQ ID NO: 166028 - RNA, 19 nt, Artificial Sequence
  Description of Artificial Sequence: Synthetic oligonucleotide
gcccaauguuuccuguguc

SEQ ID NO: 166029 - RNA, 19 nt, Artificial Sequence
  Description of Artificial Sequence: Synthetic oligonucleotide
ggauagguauggcuccugu

SEQ ID NO: 166030 - RNA, 19 nt, Artificial Sequence
  Description of Artificial Sequence: Synthetic oligonucleotide
agccuguaacauggagaca

SEQ ID NO: 166031 - RNA, 19 nt, Artificial Sequence
  Description of Artificial Sequence: Synthetic oligonucleotide
gccuacaauucuagguuga

SEQ ID NO: 166032 - RNA, 19 nt, Artificial Sequence
  Description of Artificial Sequence: Synthetic oligonucleotide
cugccauaugauugacugu

SEQ ID NO: 166033 - RNA, 19 nt, Artificial Sequence
  Description of Artificial Sequence: Synthetic oligonucleotide
ccaauuucgcggcuggaua

SEQ ID NO: 166034 - RNA, 19 nt, Artificial Sequence
  Description of Artificial Sequence: Synthetic oligonucleotide
caccugccaugcaugaccu

SEQ ID NO: 166035 - RNA, 19 nt, Artificial Sequence
  Description of Artificial Sequence: Synthetic oligonucleotide
caggcacaaauaaccuagu

SEQ ID NO: 166036 - RNA, 19 nt, Artificial Sequence
  Description of Artificial Sequence: Synthetic oligonucleotide
  modified_base (13)..(13): a, c, u, g, unknown or other
ccaagucccgccnggaacu

SEQ ID NO: 166037 - RNA, 19 nt, Artificial Sequence
  Description of Artificial Sequence: Synthetic oligonucleotide
ccgagcaaauucucggaaa

SEQ ID NO: 166038 - RNA, 19 nt, Artificial Sequence
  Description of Artificial Sequence: Synthetic oligonucleotide
acccugcgaccacuucccu

SEQ ID NO: 166039 - RNA, 19 nt, Artificial Sequence
  Description of Artificial Sequence: Synthetic oligonucleotide
cugucauuacgagcaucaa

SEQ ID NO: 166040 - RNA, 19 nt, Artificial Sequence
  Description of Artificial Sequence: Synthetic oligonucleotide
ccgucugcuauuaaaguuu

SEQ ID NO: 166041 - RNA, 19 nt, Artificial Sequence
  Description of Artificial Sequence: Synthetic oligonucleotide
ggucacgaaccaugcugaa

SEQ ID NO: 166042 - RNA, 19 nt, Artificial Sequence
  Description of Artificial Sequence: Synthetic oligonucleotide
cuaacccguggagagcccu

SEQ ID NO: 166043 - RNA, 19 nt, Artificial Sequence
  Description of Artificial Sequence: Synthetic oligonucleotide
  modified_base (7)..(7): a, c, u, g, unknown or other
cccgccnggaacugcugca

SEQ ID NO: 166044 - RNA, 19 nt, Artificial Sequence
  Description of Artificial Sequence: Synthetic oligonucleotide
ccucugaaaccuucgugcu

SEQ ID NO: 166045 - RNA, 19 nt, Artificial Sequence
  Description of Artificial Sequence: Synthetic oligonucleotide
ucgagccgucuauggcguu

SEQ ID NO: 166046 - RNA, 19 nt, Artificial Sequence
  Description of Artificial Sequence: Synthetic oligonucleotide
  modified_base (9)..(9): a, c, u, g, unknown or other
gucccgccnggaacugcug

SEQ ID NO: 166047 - RNA, 19 nt, Artificial Sequence
  Description of Artificial Sequence: Synthetic oligonucleotide
gcgacccucacaagcaucu

SEQ ID NO: 166048 - RNA, 19 nt, Artificial Sequence
  Description of Artificial Sequence: Synthetic oligonucleotide
cuggauagguauggcuccu

SEQ ID NO: 166049 - RNA, 19 nt, Artificial Sequence
  Description of Artificial Sequence: Synthetic oligonucleotide
cccgagcaaauucucggaa

SEQ ID NO: 166050 - RNA, 19 nt, Artificial Sequence
  Description of Artificial Sequence: Synthetic oligonucleotide
cccguggagagcccugcuc

SEQ ID NO: 166051 - RNA, 19 nt, Artificial Sequence
  Description of Artificial Sequence: Synthetic oligonucleotide
  modified_base (6)..(6): a, c, u, g, unknown or other
ccgccnggaacugcugcag

SEQ ID NO: 166052 - RNA, 19 nt, Artificial Sequence
  Description of Artificial Sequence: Synthetic oligonucleotide
cuuacacgccagccuuccu

SEQ ID NO: 166053 - RNA, 19 nt, Artificial Sequence
  Description of Artificial Sequence: Synthetic oligonucleotide
cacgcuccugcccaauguu

SEQ ID NO: 166054 - RNA, 19 nt, Artificial Sequence
  Description of Artificial Sequence: Synthetic oligonucleotide
ccauggaauguuacagaau

SEQ ID NO: 166055 - RNA, 19 nt, Artificial Sequence
  Description of Artificial Sequence: Synthetic oligonucleotide
ccuucgugcuuggcuccgg

SEQ ID NO: 166056 - RNA, 19 nt, Artificial Sequence
  Description of Artificial Sequence: Synthetic oligonucleotide
ccgaggcgauagcagucug

SEQ ID NO: 166057 - RNA, 19 nt, Artificial Sequence
  Description of Artificial Sequence: Synthetic oligonucleotide
gccaauuucgcggcuggau

SEQ ID NO: 166058 - RNA, 19 nt, Artificial Sequence
  Description of Artificial Sequence: Synthetic oligonucleotide
ccagagcaugaggucacga

SEQ ID NO: 166059 - RNA, 19 nt, Artificial Sequence
  Description of Artificial Sequence: Synthetic oligonucleotide
ggcuguccgucugcuauua

SEQ ID NO: 166060 - RNA, 19 nt, Artificial Sequence
  Description of Artificial Sequence: Synthetic oligonucleotide
gccguaccuguuagaaucu

SEQ ID NO: 166061 - RNA, 19 nt, Artificial Sequence
  Description of Artificial Sequence: Synthetic oligonucleotide
ggccaauuucgcggcugga

SEQ ID NO: 166062 - RNA, 19 nt, Artificial Sequence
  Description of Artificial Sequence: Synthetic oligonucleotide
gccuccucgagccgucuau

SEQ ID NO: 166063 - RNA, 19 nt, Artificial Sequence
  Description of Artificial Sequence: Synthetic oligonucleotide
gccauaugauugacuguau

SEQ ID NO: 166064 - RNA, 19 nt, Artificial Sequence
  Description of Artificial Sequence: Synthetic oligonucleotide
ccccugcguaggcugccug

SEQ ID NO: 166065 - RNA, 19 nt, Artificial Sequence
  Description of Artificial Sequence: Synthetic oligonucleotide
ggucgucaaccucccuguu

SEQ ID NO: 166066 - RNA, 19 nt, Artificial Sequence
  Description of Artificial Sequence: Synthetic oligonucleotide
cccgaggcgauagcagucu

SEQ ID NO: 166067 - RNA, 19 nt, Artificial Sequence
  Description of Artificial Sequence: Synthetic oligonucleotide
ccgagacaggauggcuuga

SEQ ID NO: 166068 - RNA, 19 nt, Artificial Sequence
  Description of Artificial Sequence: Synthetic oligonucleotide
cgcacccugcgacccucac

SEQ ID NO: 166069 - RNA, 19 nt, Artificial Sequence
  Description of Artificial Sequence: Synthetic oligonucleotide
ccguaccuguuagaaucua

SEQ ID NO: 166070 - RNA, 19 nt, Artificial Sequence
  Description of Artificial Sequence: Synthetic oligonucleotide
cccaucggucuucccacuu

SEQ ID NO: 166071 - RNA, 19 nt, Artificial Sequence
  Description of Artificial Sequence: Synthetic oligonucleotide
cgagccgucuauggcguuu

SEQ ID NO: 166072 - RNA, 19 nt, Artificial Sequence
  Description of Artificial Sequence: Synthetic oligonucleotide
ucuacuagcaucaugcucc

SEQ ID NO: 166073 - RNA, 19 nt, Artificial Sequence
  Description of Artificial Sequence: Synthetic oligonucleotide
uuaaguauaauguucugug

SEQ ID NO: 166074 - RNA, 19 nt, Artificial Sequence
  Description of Artificial Sequence: Synthetic oligonucleotide
aauuauagacgguugaagu

SEQ ID NO: 166075 - RNA, 19 nt, Artificial Sequence
  Description of Artificial Sequence: Synthetic oligonucleotide
aaucgaauauuucucaucu

SEQ ID NO: 166076 - RNA, 19 nt, Artificial Sequence
  Description of Artificial Sequence: Synthetic oligonucleotide
uuggccauaaccaaauuag

SEQ ID NO: 166077 - RNA, 19 nt, Artificial Sequence
  Description of Artificial Sequence: Synthetic oligonucleotide
agagcaacaacccucuggc

SEQ ID NO: 166078 - RNA, 19 nt, Artificial Sequence
  Description of Artificial Sequence: Synthetic oligonucleotide
ucuauaauggauuucugac

SEQ ID NO: 166079 - RNA, 19 nt, Artificial Sequence
  Description of Artificial Sequence: Synthetic oligonucleotide
agggcaaauauccauuugc

SEQ ID NO: 166080 - RNA, 19 nt, Artificial Sequence
  Description of Artificial Sequence: Synthetic oligonucleotide
uacuauaacagcaauuccu

SEQ ID NO: 166081 - RNA, 19 nt, Artificial Sequence
  Description of Artificial Sequence: Synthetic oligonucleotide
auucaauuggcuucuaguc

SEQ ID NO: 166082 - RNA, 19 nt, Artificial Sequence
  Description of Artificial Sequence: Synthetic oligonucleotide
ucgucuacuagcaucaugc

SEQ ID NO: 166083 - RNA, 19 nt, Artificial Sequence
  Description of Artificial Sequence: Synthetic oligonucleotide
uauccuguuacacuguaag

SEQ ID NO: 166084 - RNA, 19 nt, Artificial Sequence
  Description of Artificial Sequence: Synthetic oligonucleotide
uucauuaugagguucgcca

SEQ ID NO: 166085 - RNA, 19 nt, Artificial Sequence
  Description of Artificial Sequence: Synthetic oligonucleotide
aaucaguaaguucaccgag

SEQ ID NO: 166086 - RNA, 19 nt, Artificial Sequence
  Description of Artificial Sequence: Synthetic oligonucleotide
guaguaagcaauaagcuag

SEQ ID NO: 166087 - RNA, 19 nt, Artificial Sequence
  Description of Artificial Sequence: Synthetic oligonucleotide
ucgaauauuucucaucuca

SEQ ID NO: 166088 - RNA, 19 nt, Artificial Sequence
  Description of Artificial Sequence: Synthetic oligonucleotide
ugauaauuuacacugcauc

SEQ ID NO: 166089 - RNA, 19 nt, Artificial Sequence
  Description of Artificial Sequence: Synthetic oligonucleotide
aaagcuuuguagccuuagc

SEQ ID NO: 166090 - RNA, 19 nt, Artificial Sequence
  Description of Artificial Sequence: Synthetic oligonucleotide
ucaaauuuaacagcugucc

SEQ ID NO: 166091 - RNA, 19 nt, Artificial Sequence
  Description of Artificial Sequence: Synthetic oligonucleotide
guuaguacugucauuauag

SEQ ID NO: 166092 - RNA, 19 nt, Artificial Sequence
  Description of Artificial Sequence: Synthetic oligonucleotide
ucaauuuuguggaagggac

SEQ ID NO: 166093 - RNA, 19 nt, Artificial Sequence
  Description of Artificial Sequence: Synthetic oligonucleotide
aaguuaaauuuugugggac

SEQ ID NO: 166094 - RNA, 19 nt, Artificial Sequence
  Description of Artificial Sequence: Synthetic oligonucleotide
uuugaggacucacacugcg

SEQ ID NO: 166095 - RNA, 19 nt, Artificial Sequence
  Description of Artificial Sequence: Synthetic oligonucleotide
ugaauuacuagcauguguu

SEQ ID NO: 166096 - RNA, 19 nt, Artificial Sequence
  Description of Artificial Sequence: Synthetic oligonucleotide
aaauauaugccguguagaa

SEQ ID NO: 166097 - RNA, 19 nt, Artificial Sequence
  Description of Artificial Sequence: Synthetic oligonucleotide
uguguacgaagucugagug

SEQ ID NO: 166098 - RNA, 19 nt, Artificial Sequence
  Description of Artificial Sequence: Synthetic oligonucleotide
uuuaaugaaacgccugaga

SEQ ID NO: 166099 - RNA, 19 nt, Artificial Sequence
  Description of Artificial Sequence: Synthetic oligonucleotide
auauaugccguguagaaaa

SEQ ID NO: 166100 - RNA, 19 nt, Artificial Sequence
  Description of Artificial Sequence: Synthetic oligonucleotide
uuuuaaccaguaaacuaag

SEQ ID NO: 166101 - RNA, 19 nt, Artificial Sequence
  Description of Artificial Sequence: Synthetic oligonucleotide
aguaaguucaccgagcaug

SEQ ID NO: 166102 - RNA, 19 nt, Artificial Sequence
  Description of Artificial Sequence: Synthetic oligonucleotide
aagucuauaauggauuucu

SEQ ID NO: 166103 - RNA, 19 nt, Artificial Sequence
  Description of Artificial Sequence: Synthetic oligonucleotide
aaaauauaugccguguaga

SEQ ID NO: 166104 - RNA, 19 nt, Artificial Sequence
  Description of Artificial Sequence: Synthetic oligonucleotide
uucgauaccuuucuuguac

SEQ ID NO: 166105 - RNA, 19 nt, Artificial Sequence
  Description of Artificial Sequence: Synthetic oligonucleotide
uggcauuagauucugcagc

SEQ ID NO: 166106 - RNA, 19 nt, Artificial Sequence
  Description of Artificial Sequence: Synthetic oligonucleotide
aaugaauuucagcuggaau

SEQ ID NO: 166107 - RNA, 19 nt, Artificial Sequence
  Description of Artificial Sequence: Synthetic oligonucleotide
uuuacgaacagccguugug

SEQ ID NO: 166108 - RNA, 19 nt, Artificial Sequence
  Description of Artificial Sequence: Synthetic oligonucleotide
aagcuuuguagccuuagca

SEQ ID NO: 166109 - RNA, 19 nt, Artificial Sequence
  Description of Artificial Sequence: Synthetic oligonucleotide
aguugcacccauuacaagu

SEQ ID NO: 166110 - RNA, 19 nt, Artificial Sequence
  Description of Artificial Sequence: Synthetic oligonucleotide
uuauagcaguugaaagugg

SEQ ID NO: 166111 - RNA, 19 nt, Artificial Sequence
  Description of Artificial Sequence: Synthetic oligonucleotide
agauaaucgaauauuucuc

SEQ ID NO: 166112 - RNA, 19 nt, Artificial Sequence
  Description of Artificial Sequence: Synthetic oligonucleotide
ugguguuacuaccacaaca

SEQ ID NO: 166113 - RNA, 19 nt, Artificial Sequence
  Description of Artificial Sequence: Synthetic oligonucleotide
uucaauuggcuucuagucu

SEQ ID NO: 166114 - RNA, 19 nt, Artificial Sequence
  Description of Artificial Sequence: Synthetic oligonucleotide
uuacuauaacagcaauucc

SEQ ID NO: 166115 - RNA, 19 nt, Artificial Sequence
  Description of Artificial Sequence: Synthetic oligonucleotide
uuacgaacagccguugugg

SEQ ID NO: 166116 - RNA, 19 nt, Artificial Sequence
  Description of Artificial Sequence: Synthetic oligonucleotide
gagcauaccaauccuuggg

SEQ ID NO: 166117 - RNA, 19 nt, Artificial Sequence
  Description of Artificial Sequence: Synthetic oligonucleotide
aaguggcucucuaaaauac

SEQ ID NO: 166118 - RNA, 19 nt, Artificial Sequence
  Description of Artificial Sequence: Synthetic oligonucleotide
uguuccagcguauguaugc

SEQ ID NO: 166119 - RNA, 19 nt, Artificial Sequence
  Description of Artificial Sequence: Synthetic oligonucleotide
aggguuugaggacucacac

SEQ ID NO: 166120 - RNA, 19 nt, Artificial Sequence
  Description of Artificial Sequence: Synthetic oligonucleotide
uaaucaguaaguucaccga

SEQ ID NO: 166121 - RNA, 19 nt, Artificial Sequence
  Description of Artificial Sequence: Synthetic oligonucleotide
ucggauagggcccagggcu

SEQ ID NO: 166122 - RNA, 19 nt, Artificial Sequence
  Description of Artificial Sequence: Synthetic oligonucleotide
guaaagacacauauacccg

SEQ ID NO: 166123 - RNA, 19 nt, Artificial Sequence
  Description of Artificial Sequence: Synthetic oligonucleotide
uuuugaucgaggcaaugaa

SEQ ID NO: 166124 - RNA, 19 nt, Artificial Sequence
  Description of Artificial Sequence: Synthetic oligonucleotide
gguuugaggacucacacug

SEQ ID NO: 166125 - RNA, 19 nt, Artificial Sequence
  Description of Artificial Sequence: Synthetic oligonucleotide
ucucccacauauuuugaag

SEQ ID NO: 166126 - RNA, 19 nt, Artificial Sequence
  Description of Artificial Sequence: Synthetic oligonucleotide
ucaauuggcuucuagucuc

SEQ ID NO: 166127 - RNA, 19 nt, Artificial Sequence
  Description of Artificial Sequence: Synthetic oligonucleotide
uaaaaguuacuguguacga

SEQ ID NO: 166128 - RNA, 19 nt, Artificial Sequence
  Description of Artificial Sequence: Synthetic oligonucleotide
uuagucgucuacuagcauc

SEQ ID NO: 166129 - RNA, 19 nt, Artificial Sequence
  Description of Artificial Sequence: Synthetic oligonucleotide
ugucauuauagacuuccgu

SEQ ID NO: 166130 - RNA, 19 nt, Artificial Sequence
  Description of Artificial Sequence: Synthetic oligonucleotide
ugcaaaacggguugcagcu

SEQ ID NO: 166131 - RNA, 19 nt, Artificial Sequence
  Description of Artificial Sequence: Synthetic oligonucleotide
aagucagauaaucgaauau

SEQ ID NO: 166132 - RNA, 19 nt, Artificial Sequence
  Description of Artificial Sequence: Synthetic oligonucleotide
ucauuaugagguucgccag

SEQ ID NO: 166133 - RNA, 19 nt, Artificial Sequence
  Description of Artificial Sequence: Synthetic oligonucleotide
auuucggcaagucagguua

SEQ ID NO: 166134 - RNA, 19 nt, Artificial Sequence
  Description of Artificial Sequence: Synthetic oligonucleotide
aaaguggcucucuaaaaua

SEQ ID NO: 166135 - RNA, 19 nt, Artificial Sequence
  Description of Artificial Sequence: Synthetic oligonucleotide
uugaucgaggcaaugaauu

SEQ ID NO: 166136 - RNA, 19 nt, Artificial Sequence
  Description of Artificial Sequence: Synthetic oligonucleotide
aucuacauguuacaugaca

SEQ ID NO: 166137 - RNA, 19 nt, Artificial Sequence
  Description of Artificial Sequence: Synthetic oligonucleotide
uuauagacgguugaaguuc

SEQ ID NO: 166138 - RNA, 19 nt, Artificial Sequence
  Description of Artificial Sequence: Synthetic oligonucleotide
uagucgucuacuagcauca

SEQ ID NO: 166139 - RNA, 19 nt, Artificial Sequence
  Description of Artificial Sequence: Synthetic oligonucleotide
ugcuuucuaagcuguuugg

SEQ ID NO: 166140 - RNA, 19 nt, Artificial Sequence
  Description of Artificial Sequence: Synthetic oligonucleotide
ucuuguuaaguauaauguu

SEQ ID NO: 166141 - RNA, 19 nt, Artificial Sequence
  Description of Artificial Sequence: Synthetic oligonucleotide
uugcaaaacggguugcagc

SEQ ID NO: 166142 - RNA, 19 nt, Artificial Sequence
  Description of Artificial Sequence: Synthetic oligonucleotide
ucuacccaugauaauuuac

SEQ ID NO: 166143 - RNA, 19 nt, Artificial Sequence
  Description of Artificial Sequence: Synthetic oligonucleotide
uaaucgaauauuucucauc

SEQ ID NO: 166144 - RNA, 19 nt, Artificial Sequence
  Description of Artificial Sequence: Synthetic oligonucleotide
caguuagguaaucaguaag

SEQ ID NO: 166145 - RNA, 19 nt, Artificial Sequence
  Description of Artificial Sequence: Synthetic oligonucleotide
auuauagacgguugaaguu

SEQ ID NO: 166146 - RNA, 19 nt, Artificial Sequence
  Description of Artificial Sequence: Synthetic oligonucleotide
ucuguuuauccuguuacac

SEQ ID NO: 166147 - RNA, 19 nt, Artificial Sequence
  Description of Artificial Sequence: Synthetic oligonucleotide
aagagcauaccaauccuug

SEQ ID NO: 166148 - RNA, 19 nt, Artificial Sequence
  Description of Artificial Sequence: Synthetic oligonucleotide
uauuaguugcacccauuac

SEQ ID NO: 166149 - RNA, 19 nt, Artificial Sequence
  Description of Artificial Sequence: Synthetic oligonucleotide
auacccguuuaaugaaacg

SEQ ID NO: 166150 - RNA, 19 nt, Artificial Sequence
  Description of Artificial Sequence: Synthetic oligonucleotide
uauagacgguugaaguucu

SEQ ID NO: 166151 - RNA, 19 nt, Artificial Sequence
  Description of Artificial Sequence: Synthetic oligonucleotide
uuugaucgaggcaaugaau

SEQ ID NO: 166152 - RNA, 19 nt, Artificial Sequence
  Description of Artificial Sequence: Synthetic oligonucleotide
ucgguauuuucaauuuugu

SEQ ID NO: 166153 - RNA, 19 nt, Artificial Sequence
  Description of Artificial Sequence: Synthetic oligonucleotide
uguuaggggaucuuuucuc

SEQ ID NO: 166154 - RNA, 19 nt, Artificial Sequence
  Description of Artificial Sequence: Synthetic oligonucleotide
auaaaauauaugccgugua

SEQ ID NO: 166155 - RNA, 19 nt, Artificial Sequence
  Description of Artificial Sequence: Synthetic oligonucleotide
uggaccaaagagcaacaac

SEQ ID NO: 166156 - RNA, 19 nt, Artificial Sequence
  Description of Artificial Sequence: Synthetic oligonucleotide
uagacgguugaaguucucg

SEQ ID NO: 166157 - RNA, 19 nt, Artificial Sequence
  Description of Artificial Sequence: Synthetic oligonucleotide
aaaaguuacuguguacgaa

SEQ ID NO: 166158 - RNA, 19 nt, Artificial Sequence
  Description of Artificial Sequence: Synthetic oligonucleotide
cagacaaggacugaucuac

SEQ ID NO: 166159 - RNA, 19 nt, Artificial Sequence
  Description of Artificial Sequence: Synthetic oligonucleotide
aauauaugccguguagaaa

SEQ ID NO: 166160 - RNA, 19 nt, Artificial Sequence
  Description of Artificial Sequence: Synthetic oligonucleotide
guagccuuagcagaucuag

SEQ ID NO: 166161 - RNA, 19 nt, Artificial Sequence
  Description of Artificial Sequence: Synthetic oligonucleotide
guuaaauuuugugggacac

SEQ ID NO: 166162 - RNA, 19 nt, Artificial Sequence
  Description of Artificial Sequence: Synthetic oligonucleotide
uucuaagcuguuugguggc

SEQ ID NO: 166163 - RNA, 19 nt, Artificial Sequence
  Description of Artificial Sequence: Synthetic oligonucleotide
cugaaaggcccguggaucc

SEQ ID NO: 166164 - RNA, 19 nt, Artificial Sequence
  Description of Artificial Sequence: Synthetic oligonucleotide
caugauaauuuacacugca

SEQ ID NO: 166165 - RNA, 19 nt, Artificial Sequence
  Description of Artificial Sequence: Synthetic oligonucleotide
uccguuugugacuuggaaa

SEQ ID NO: 166166 - RNA, 19 nt, Artificial Sequence
  Description of Artificial Sequence: Synthetic oligonucleotide
ugacagagugacucaaaac

SEQ ID NO: 166167 - RNA, 19 nt, Artificial Sequence
  Description of Artificial Sequence: Synthetic oligonucleotide
agcguauguaugcuucuag

SEQ ID NO: 166168 - RNA, 19 nt, Artificial Sequence
  Description of Artificial Sequence: Synthetic oligonucleotide
uggaagggacaguaauuag

SEQ ID NO: 166169 - RNA, 19 nt, Artificial Sequence
  Description of Artificial Sequence: Synthetic oligonucleotide
cauuaucaacagagaaugc

SEQ ID NO: 166170 - RNA, 19 nt, Artificial Sequence
  Description of Artificial Sequence: Synthetic oligonucleotide
aucgaauauuucucaucuc

SEQ ID NO: 166171 - RNA, 19 nt, Artificial Sequence
  Description of Artificial Sequence: Synthetic oligonucleotide
cuaauaugucccuucucuc

SEQ ID NO: 166172 - RNA, 19 nt, Artificial Sequence
  Description of Artificial Sequence: Synthetic oligonucleotide
uccagcguauguaugcuuc

SEQ ID NO: 166173 - RNA, 19 nt, Artificial Sequence
  Description of Artificial Sequence: Synthetic oligonucleotide
uaagcuguuugguggcaag

SEQ ID NO: 166174 - RNA, 19 nt, Artificial Sequence
  Description of Artificial Sequence: Synthetic oligonucleotide
uguacgaagucugaguguu

SEQ ID NO: 166175 - RNA, 19 nt, Artificial Sequence
  Description of Artificial Sequence: Synthetic oligonucleotide
gaucgaggcaaugaauuac

SEQ ID NO: 166176 - RNA, 19 nt, Artificial Sequence
  Description of Artificial Sequence: Synthetic oligonucleotide
agcauaccaauccuuggga

SEQ ID NO: 166177 - RNA, 19 nt, Artificial Sequence
  Description of Artificial Sequence: Synthetic oligonucleotide
aauugcaaaacggguugca

SEQ ID NO: 166178 - RNA, 19 nt, Artificial Sequence
  Description of Artificial Sequence: Synthetic oligonucleotide
aguacccuuaugugcagca

SEQ ID NO: 166179 - RNA, 19 nt, Artificial Sequence
  Description of Artificial Sequence: Synthetic oligonucleotide
gcuauauuuuauuuagguc

SEQ ID NO: 166180 - RNA, 19 nt, Artificial Sequence
  Description of Artificial Sequence: Synthetic oligonucleotide
acuuccguuugugacuugg

SEQ ID NO: 166181 - RNA, 19 nt, Artificial Sequence
  Description of Artificial Sequence: Synthetic oligonucleotide
uuuggcucaguuagguaau

SEQ ID NO: 166182 - RNA, 19 nt, Artificial Sequence
  Description of Artificial Sequence: Synthetic oligonucleotide
guaagcaauaagcuagaaa

SEQ ID NO: 166183 - RNA, 19 nt, Artificial Sequence
  Description of Artificial Sequence: Synthetic oligonucleotide
aacuaacagugcccacuag

SEQ ID NO: 166184 - RNA, 19 nt, Artificial Sequence
  Description of Artificial Sequence: Synthetic oligonucleotide
agguagaucaacagacuag

SEQ ID NO: 166185 - RNA, 19 nt, Artificial Sequence
  Description of Artificial Sequence: Synthetic oligonucleotide
guaaacuaagggcaaauau

SEQ ID NO: 166186 - RNA, 19 nt, Artificial Sequence
  Description of Artificial Sequence: Synthetic oligonucleotide
ugaaacgccugagaacggc

SEQ ID NO: 166187 - RNA, 19 nt, Artificial Sequence
  Description of Artificial Sequence: Synthetic oligonucleotide
agacgguugaaguucucga

SEQ ID NO: 166188 - RNA, 19 nt, Artificial Sequence
  Description of Artificial Sequence: Synthetic oligonucleotide
guaugaggcuuuccuuugg

SEQ ID NO: 166189 - RNA, 19 nt, Artificial Sequence
  Description of Artificial Sequence: Synthetic oligonucleotide
agucagauaaucgaauauu

SEQ ID NO: 166190 - RNA, 19 nt, Artificial Sequence
  Description of Artificial Sequence: Synthetic oligonucleotide
guaaguucaccgagcaugc

SEQ ID NO: 166191 - RNA, 19 nt, Artificial Sequence
  Description of Artificial Sequence: Synthetic oligonucleotide
uaccuuucuuguaccauuc

SEQ ID NO: 166192 - RNA, 19 nt, Artificial Sequence
  Description of Artificial Sequence: Synthetic oligonucleotide
cuggaauaaguuaagucua

SEQ ID NO: 166193 - RNA, 19 nt, Artificial Sequence
  Description of Artificial Sequence: Synthetic oligonucleotide
uuccguuugugacuuggaa

SEQ ID NO: 166194 - RNA, 19 nt, Artificial Sequence
  Description of Artificial Sequence: Synthetic oligonucleotide
acuauaacagcaauuccuu

SEQ ID NO: 166195 - RNA, 19 nt, Artificial Sequence
  Description of Artificial Sequence: Synthetic oligonucleotide
aauucaggccguagagaag

SEQ ID NO: 166196 - RNA, 19 nt, Artificial Sequence
  Description of Artificial Sequence: Synthetic oligonucleotide
acuaggagcccugugguga

SEQ ID NO: 166197 - RNA, 19 nt, Artificial Sequence
  Description of Artificial Sequence: Synthetic oligonucleotide
aagaugguaugaggcuuuc

SEQ ID NO: 166198 - RNA, 19 nt, Artificial Sequence
  Description of Artificial Sequence: Synthetic oligonucleotide
cauauacccguuuaaugaa

SEQ ID NO: 166199 - RNA, 19 nt, Artificial Sequence
  Description of Artificial Sequence: Synthetic oligonucleotide
ugaucgaggcaaugaauua

SEQ ID NO: 166200 - RNA, 19 nt, Artificial Sequence
  Description of Artificial Sequence: Synthetic oligonucleotide
ugggcuuacaaaggcauuc

SEQ ID NO: 166201 - RNA, 19 nt, Artificial Sequence
  Description of Artificial Sequence: Synthetic oligonucleotide
guugguguuacuaccacaa

SEQ ID NO: 166202 - RNA, 19 nt, Artificial Sequence
  Description of Artificial Sequence: Synthetic oligonucleotide
caaaacggguugcagcuuc

SEQ ID NO: 166203 - RNA, 19 nt, Artificial Sequence
  Description of Artificial Sequence: Synthetic oligonucleotide
ggcucaguuagguaaucag

SEQ ID NO: 166204 - RNA, 19 nt, Artificial Sequence
  Description of Artificial Sequence: Synthetic oligonucleotide
ucuaacuaacagugcccac

SEQ ID NO: 166205 - RNA, 19 nt, Artificial Sequence
  Description of Artificial Sequence: Synthetic oligonucleotide
ugcaaggacucuugucaug

SEQ ID NO: 166206 - RNA, 19 nt, Artificial Sequence
  Description of Artificial Sequence: Synthetic oligonucleotide
aaccauggauaaaccacug

SEQ ID NO: 166207 - RNA, 19 nt, Artificial Sequence
  Description of Artificial Sequence: Synthetic oligonucleotide
uaguugcacccauuacaag

SEQ ID NO: 166208 - RNA, 19 nt, Artificial Sequence
  Description of Artificial Sequence: Synthetic oligonucleotide
ucuuacaagaaggguuggu

SEQ ID NO: 166209 - RNA, 19 nt, Artificial Sequence
  Description of Artificial Sequence: Synthetic oligonucleotide
aacuaagggcaaauaucca

SEQ ID NO: 166210 - RNA, 19 nt, Artificial Sequence
  Description of Artificial Sequence: Synthetic oligonucleotide
acugaucuacauguuacau

SEQ ID NO: 166211 - RNA, 19 nt, Artificial Sequence
  Description of Artificial Sequence: Synthetic oligonucleotide
aggacugaucuacauguua

SEQ ID NO: 166212 - RNA, 19 nt, Artificial Sequence
  Description of Artificial Sequence: Synthetic oligonucleotide
uugaggacucacacugcgu

SEQ ID NO: 166213 - RNA, 19 nt, Artificial Sequence
  Description of Artificial Sequence: Synthetic oligonucleotide
uccuaauaugucccuucuc

SEQ ID NO: 166214 - RNA, 19 nt, Artificial Sequence
  Description of Artificial Sequence: Synthetic oligonucleotide
uugguguuacuaccacaac

SEQ ID NO: 166215 - RNA, 19 nt, Artificial Sequence
  Description of Artificial Sequence: Synthetic oligonucleotide
gaauuacuagcauguguua

SEQ ID NO: 166216 - RNA, 19 nt, Artificial Sequence
  Description of Artificial Sequence: Synthetic oligonucleotide
gguagaucaacagacuaga

SEQ ID NO: 166217 - RNA, 19 nt, Artificial Sequence
  Description of Artificial Sequence: Synthetic oligonucleotide
cuacuagcaucaugcuccc

SEQ ID NO: 166218 - RNA, 19 nt, Artificial Sequence
  Description of Artificial Sequence: Synthetic oligonucleotide
cuauuaguugcacccauua

SEQ ID NO: 166219 - RNA, 19 nt, Artificial Sequence
  Description of Artificial Sequence: Synthetic oligonucleotide
acaauucaggccguagaga

SEQ ID NO: 166220 - RNA, 19 nt, Artificial Sequence
  Description of Artificial Sequence: Synthetic oligonucleotide
ucaguggacuuccuugcuu

SEQ ID NO: 166221 - RNA, 19 nt, Artificial Sequence
  Description of Artificial Sequence: Synthetic oligonucleotide
ucucucauauuggugcaaa

SEQ ID NO: 166222 - RNA, 19 nt, Artificial Sequence
  Description of Artificial Sequence: Synthetic oligonucleotide
guagaucaacagacuagag

SEQ ID NO: 166223 - RNA, 19 nt, Artificial Sequence
  Description of Artificial Sequence: Synthetic oligonucleotide
uugcacccauuacaaguac

SEQ ID NO: 166224 - RNA, 19 nt, Artificial Sequence
  Description of Artificial Sequence: Synthetic oligonucleotide
cauaaugauuacuaucaau

SEQ ID NO: 166225 - RNA, 19 nt, Artificial Sequence
  Description of Artificial Sequence: Synthetic oligonucleotide
aucaacagacuagagcuuu

SEQ ID NO: 166226 - RNA, 19 nt, Artificial Sequence
  Description of Artificial Sequence: Synthetic oligonucleotide
ucuuucuacccaugauaau

SEQ ID NO: 166227 - RNA, 19 nt, Artificial Sequence
  Description of Artificial Sequence: Synthetic oligonucleotide
aucgaggcaaugaauuacu

SEQ ID NO: 166228 - RNA, 19 nt, Artificial Sequence
  Description of Artificial Sequence: Synthetic oligonucleotide
ggacugaucuacauguuac

SEQ ID NO: 166229 - RNA, 19 nt, Artificial Sequence
  Description of Artificial Sequence: Synthetic oligonucleotide
ccucuacuuccuauaaugc

SEQ ID NO: 166230 - RNA, 19 nt, Artificial Sequence
  Description of Artificial Sequence: Synthetic oligonucleotide
gucgucuacuagcaucaug

SEQ ID NO: 166231 - RNA, 19 nt, Artificial Sequence
  Description of Artificial Sequence: Synthetic oligonucleotide
aggugauaacuucucugaa

SEQ ID NO: 166232 - RNA, 19 nt, Artificial Sequence
  Description of Artificial Sequence: Synthetic oligonucleotide
cuccagaaaccauggauaa

SEQ ID NO: 166233 - RNA, 19 nt, Artificial Sequence
  Description of Artificial Sequence: Synthetic oligonucleotide
agcaugcaaggacucuugu

SEQ ID NO: 166234 - RNA, 19 nt, Artificial Sequence
  Description of Artificial Sequence: Synthetic oligonucleotide
cucggauagggcccagggc

SEQ ID NO: 166235 - RNA, 19 nt, Artificial Sequence
  Description of Artificial Sequence: Synthetic oligonucleotide
ucgaggcaaugaauuacua

SEQ ID NO: 166236 - RNA, 19 nt, Artificial Sequence
  Description of Artificial Sequence: Synthetic oligonucleotide
acgaacagccguugugggu

SEQ ID NO: 166237 - RNA, 19 nt, Artificial Sequence
  Description of Artificial Sequence: Synthetic oligonucleotide
agucuauaauggauuucug

SEQ ID NO: 166238 - RNA, 19 nt, Artificial Sequence
  Description of Artificial Sequence: Synthetic oligonucleotide
uguaugcuucuaggguuug

SEQ ID NO: 166239 - RNA, 19 nt, Artificial Sequence
  Description of Artificial Sequence: Synthetic oligonucleotide
aaguccagccauauuuaua

SEQ ID NO: 166240 - RNA, 19 nt, Artificial Sequence
  Description of Artificial Sequence: Synthetic oligonucleotide
cuaacuaacagugcccacu

SEQ ID NO: 166241 - RNA, 19 nt, Artificial Sequence
  Description of Artificial Sequence: Synthetic oligonucleotide
ggccauaaccaaauuaguc

SEQ ID NO: 166242 - RNA, 19 nt, Artificial Sequence
  Description of Artificial Sequence: Synthetic oligonucleotide
aguauccaucagucauucu

SEQ ID NO: 166243 - RNA, 19 nt, Artificial Sequence
  Description of Artificial Sequence: Synthetic oligonucleotide
uucucggauagggcccagg

SEQ ID NO: 166244 - RNA, 19 nt, Artificial Sequence
  Description of Artificial Sequence: Synthetic oligonucleotide
guugcacccauuacaagua

SEQ ID NO: 166245 - RNA, 19 nt, Artificial Sequence
  Description of Artificial Sequence: Synthetic oligonucleotide
ccuaauaugucccuucucu

SEQ ID NO: 166246 - RNA, 19 nt, Artificial Sequence
  Description of Artificial Sequence: Synthetic oligonucleotide
ccguuugugacuuggaaaa

SEQ ID NO: 166247 - RNA, 19 nt, Artificial Sequence
  Description of Artificial Sequence: Synthetic oligonucleotide
agaguauccaucagucauu

SEQ ID NO: 166248 - RNA, 19 nt, Artificial Sequence
  Description of Artificial Sequence: Synthetic oligonucleotide
aguaagcaauaagcuagaa

SEQ ID NO: 166249 - RNA, 19 nt, Artificial Sequence
  Description of Artificial Sequence: Synthetic oligonucleotide
gcaauaagcuagaaauguc

SEQ ID NO: 166250 - RNA, 19 nt, Artificial Sequence
  Description of Artificial Sequence: Synthetic oligonucleotide
aguaagcacaggaaaccua

SEQ ID NO: 166251 - RNA, 19 nt, Artificial Sequence
  Description of Artificial Sequence: Synthetic oligonucleotide
cuuguuccagcguauguau

SEQ ID NO: 166252 - RNA, 19 nt, Artificial Sequence
  Description of Artificial Sequence: Synthetic oligonucleotide
gguuaguacugucauuaua

SEQ ID NO: 166253 - RNA, 19 nt, Artificial Sequence
  Description of Artificial Sequence: Synthetic oligonucleotide
guguuaggggaucuuuucu

SEQ ID NO: 166254 - RNA, 19 nt, Artificial Sequence
  Description of Artificial Sequence: Synthetic oligonucleotide
gggacacauaaacaguuua

SEQ ID NO: 166255 - RNA, 19 nt, Artificial Sequence
  Description of Artificial Sequence: Synthetic oligonucleotide
uucucucauauuggugcaa

SEQ ID NO: 166256 - RNA, 19 nt, Artificial Sequence
  Description of Artificial Sequence: Synthetic oligonucleotide
cuguguacgaagucugagu

SEQ ID NO: 166257 - RNA, 19 nt, Artificial Sequence
  Description of Artificial Sequence: Synthetic oligonucleotide
caauuggcuucuagucuca

SEQ ID NO: 166258 - RNA, 19 nt, Artificial Sequence
  Description of Artificial Sequence: Synthetic oligonucleotide
aucagucauucuagcaagu

SEQ ID NO: 166259 - RNA, 19 nt, Artificial Sequence
  Description of Artificial Sequence: Synthetic oligonucleotide
ucggcaagucagguuagua

SEQ ID NO: 166260 - RNA, 19 nt, Artificial Sequence
  Description of Artificial Sequence: Synthetic oligonucleotide
ccguagagaaggaagaaua

SEQ ID NO: 166261 - RNA, 19 nt, Artificial Sequence
  Description of Artificial Sequence: Synthetic oligonucleotide
uuccagcguauguaugcuu

SEQ ID NO: 166262 - RNA, 19 nt, Artificial Sequence
  Description of Artificial Sequence: Synthetic oligonucleotide
cuuccguuugugacuugga

SEQ ID NO: 166263 - RNA, 19 nt, Artificial Sequence
  Description of Artificial Sequence: Synthetic oligonucleotide
auagacgguugaaguucuc

SEQ ID NO: 166264 - RNA, 19 nt, Artificial Sequence
  Description of Artificial Sequence: Synthetic oligonucleotide
gcacccauuacaaguacuc

SEQ ID NO: 166265 - RNA, 19 nt, Artificial Sequence
  Description of Artificial Sequence: Synthetic oligonucleotide
ggaagggacaguaauuagu

SEQ ID NO: 166266 - RNA, 19 nt, Artificial Sequence
  Description of Artificial Sequence: Synthetic oligonucleotide
gcagauugcacaccaucaa

SEQ ID NO: 166267 - RNA, 19 nt, Artificial Sequence
  Description of Artificial Sequence: Synthetic oligonucleotide
cguuuaaugaaacgccuga

SEQ ID NO: 166268 - RNA, 19 nt, Artificial Sequence
  Description of Artificial Sequence: Synthetic oligonucleotide
cuucgauaccuuucuugua

SEQ ID NO: 166269 - RNA, 19 nt, Artificial Sequence
  Description of Artificial Sequence: Synthetic oligonucleotide
ggguugguguuacuaccac

SEQ ID NO: 166270 - RNA, 19 nt, Artificial Sequence
  Description of Artificial Sequence: Synthetic oligonucleotide
gaaacgccugagaacggcu

SEQ ID NO: 166271 - RNA, 19 nt, Artificial Sequence
  Description of Artificial Sequence: Synthetic oligonucleotide
cagcugucccauugucaac

SEQ ID NO: 166272 - RNA, 19 nt, Artificial Sequence
  Description of Artificial Sequence: Synthetic oligonucleotide
caaacgauccuuggccaua

SEQ ID NO: 166273 - RNA, 19 nt, Artificial Sequence
  Description of Artificial Sequence: Synthetic oligonucleotide
gcucaguuagguaaucagu

SEQ ID NO: 166274 - RNA, 19 nt, Artificial Sequence
  Description of Artificial Sequence: Synthetic oligonucleotide
gucaguggacuuccuugcu

SEQ ID NO: 166275 - RNA, 19 nt, Artificial Sequence
  Description of Artificial Sequence: Synthetic oligonucleotide
gcauaccaauccuugggau

SEQ ID NO: 166276 - RNA, 19 nt, Artificial Sequence
  Description of Artificial Sequence: Synthetic oligonucleotide
agucgucuacuagcaucau

SEQ ID NO: 166277 - RNA, 19 nt, Artificial Sequence
  Description of Artificial Sequence: Synthetic oligonucleotide
caugagccucuacuuccua

SEQ ID NO: 166278 - RNA, 19 nt, Artificial Sequence
  Description of Artificial Sequence: Synthetic oligonucleotide
cugagcccugugaacaauu

SEQ ID NO: 166279 - RNA, 19 nt, Artificial Sequence
  Description of Artificial Sequence: Synthetic oligonucleotide
caugaccaccaggcaagaa

SEQ ID NO: 166280 - RNA, 19 nt, Artificial Sequence
  Description of Artificial Sequence: Synthetic oligonucleotide
cagcguauguaugcuucua

SEQ ID NO: 166281 - RNA, 19 nt, Artificial Sequence
  Description of Artificial Sequence: Synthetic oligonucleotide
gccugagaacggcuucauc

SEQ ID NO: 166282 - RNA, 19 nt, Artificial Sequence
  Description of Artificial Sequence: Synthetic oligonucleotide
gacucacacugcguuugau

SEQ ID NO: 166283 - RNA, 19 nt, Artificial Sequence
  Description of Artificial Sequence: Synthetic oligonucleotide
caguaaguucaccgagcau

SEQ ID NO: 166284 - RNA, 19 nt, Artificial Sequence
  Description of Artificial Sequence: Synthetic oligonucleotide
gcauuagauucugcagcua

SEQ ID NO: 166285 - RNA, 19 nt, Artificial Sequence
  Description of Artificial Sequence: Synthetic oligonucleotide
acacugcguuugaucuuuu

SEQ ID NO: 166286 - RNA, 19 nt, Artificial Sequence
  Description of Artificial Sequence: Synthetic oligonucleotide
cugcuuuagccagcaucgu

SEQ ID NO: 166287 - RNA, 19 nt, Artificial Sequence
  Description of Artificial Sequence: Synthetic oligonucleotide
ccacugcaacuaggagccc

SEQ ID NO: 166288 - RNA, 19 nt, Artificial Sequence
  Description of Artificial Sequence: Synthetic oligonucleotide
ccguuuccagguggaccaa

SEQ ID NO: 166289 - RNA, 19 nt, Artificial Sequence
  Description of Artificial Sequence: Synthetic oligonucleotide
aaugauuaauccaauaccc

SEQ ID NO: 166290 - RNA, 19 nt, Artificial Sequence
  Description of Artificial Sequence: Synthetic oligonucleotide
auuaauccaauacccaugc

SEQ ID NO: 166291 - RNA, 19 nt, Artificial Sequence
  Description of Artificial Sequence: Synthetic oligonucleotide
uuuaauaguggauagugga

SEQ ID NO: 166292 - RNA, 19 nt, Artificial Sequence
  Description of Artificial Sequence: Synthetic oligonucleotide
aauacaauaggguaugcaa

SEQ ID NO: 166293 - RNA, 19 nt, Artificial Sequence
  Description of Artificial Sequence: Synthetic oligonucleotide
aauaauacaauaggguaug

SEQ ID NO: 166294 - RNA, 19 nt, Artificial Sequence
  Description of Artificial Sequence: Synthetic oligonucleotide
ucuuuuaaccaaagggacg

SEQ ID NO: 166295 - RNA, 19 nt, Artificial Sequence
  Description of Artificial Sequence: Synthetic oligonucleotide
aggaguuagugacagcugc

SEQ ID NO: 166296 - RNA, 19 nt, Artificial Sequence
  Description of Artificial Sequence: Synthetic oligonucleotide
uaauccaauacccaugcaa

SEQ ID NO: 166297 - RNA, 19 nt, Artificial Sequence
  Description of Artificial Sequence: Synthetic oligonucleotide
cauacgauggagacgauac

SEQ ID NO: 166298 - RNA, 19 nt, Artificial Sequence
  Description of Artificial Sequence: Synthetic oligonucleotide
guaggugguauuaagagcc

SEQ ID NO: 166299 - RNA, 19 nt, Artificial Sequence
  Description of Artificial Sequence: Synthetic oligonucleotide
ugguuaauaccuaggacug

SEQ ID NO: 166300 - RNA, 19 nt, Artificial Sequence
  Description of Artificial Sequence: Synthetic oligonucleotide
uucccuuuagcaaauuuca

SEQ ID NO: 166301 - RNA, 19 nt, Artificial Sequence
  Description of Artificial Sequence: Synthetic oligonucleotide
aaagguuaacggaacacuc

SEQ ID NO: 166302 - RNA, 19 nt, Artificial Sequence
  Description of Artificial Sequence: Synthetic oligonucleotide
acuaaaguugcgcaugcag

SEQ ID NO: 166303 - RNA, 19 nt, Artificial Sequence
  Description of Artificial Sequence: Synthetic oligonucleotide
gguauuaagagccuuuaag

SEQ ID NO: 166304 - RNA, 19 nt, Artificial Sequence
  Description of Artificial Sequence: Synthetic oligonucleotide
uguccgaaagcccaguuga

SEQ ID NO: 166305 - RNA, 19 nt, Artificial Sequence
  Description of Artificial Sequence: Synthetic oligonucleotide
aaccgaguaguuuggcugg

SEQ ID NO: 166306 - RNA, 19 nt, Artificial Sequence
  Description of Artificial Sequence: Synthetic oligonucleotide
gaggaaaggagccgaacgg

SEQ ID NO: 166307 - RNA, 19 nt, Artificial Sequence
  Description of Artificial Sequence: Synthetic oligonucleotide
ugauuaauccaauacccau

SEQ ID NO: 166308 - RNA, 19 nt, Artificial Sequence
  Description of Artificial Sequence: Synthetic oligonucleotide
caaauaauacaauagggua

SEQ ID NO: 166309 - RNA, 19 nt, Artificial Sequence
  Description of Artificial Sequence: Synthetic oligonucleotide
guaaaugggacugcugucg

SEQ ID NO: 166310 - RNA, 19 nt, Artificial Sequence
  Description of Artificial Sequence: Synthetic oligonucleotide
aguaaaugggacugcuguc

SEQ ID NO: 166311 - RNA, 19 nt, Artificial Sequence
  Description of Artificial Sequence: Synthetic oligonucleotide
gauuaauccaauacccaug

SEQ ID NO: 166312 - RNA, 19 nt, Artificial Sequence
  Description of Artificial Sequence: Synthetic oligonucleotide
acugaaaugauuaauccaa

SEQ ID NO: 166313 - RNA, 19 nt, Artificial Sequence
  Description of Artificial Sequence: Synthetic oligonucleotide
auaguggaguaagugaagg

SEQ ID NO: 166314 - RNA, 19 nt, Artificial Sequence
  Description of Artificial Sequence: Synthetic oligonucleotide
gucacugcgacuaaaguug

SEQ ID NO: 166315 - RNA, 19 nt, Artificial Sequence
  Description of Artificial Sequence: Synthetic oligonucleotide
guagguaacuacaacauuc

SEQ ID NO: 166316 - RNA, 19 nt, Artificial Sequence
  Description of Artificial Sequence: Synthetic oligonucleotide
ggcauaaggacguucgugg

SEQ ID NO: 166317 - RNA, 19 nt, Artificial Sequence
  Description of Artificial Sequence: Synthetic oligonucleotide
cacuccuaccccuuuaagg

SEQ ID NO: 166318 - RNA, 19 nt, Artificial Sequence
  Description of Artificial Sequence: Synthetic oligonucleotide
ugguaagguggucacugcg

SEQ ID NO: 166319 - RNA, 19 nt, Artificial Sequence
  Description of Artificial Sequence: Synthetic oligonucleotide
uuuaaguccugggaucccg

SEQ ID NO: 166320 - RNA, 19 nt, Artificial Sequence
  Description of Artificial Sequence: Synthetic oligonucleotide
ugaaacucuuuuaaccaaa

SEQ ID NO: 166321 - RNA, 19 nt, Artificial Sequence
  Description of Artificial Sequence: Synthetic oligonucleotide
aagggucaggcauacgaug

SEQ ID NO: 166322 - RNA, 19 nt, Artificial Sequence
  Description of Artificial Sequence: Synthetic oligonucleotide
caaaauaagagggucacca

SEQ ID NO: 166323 - RNA, 19 nt, Artificial Sequence
  Description of Artificial Sequence: Synthetic oligonucleotide
acagucgagcaguauuuac

SEQ ID NO: 166324 - RNA, 19 nt, Artificial Sequence
  Description of Artificial Sequence: Synthetic oligonucleotide
gacaucaacugcaucucgg

SEQ ID NO: 166325 - RNA, 19 nt, Artificial Sequence
  Description of Artificial Sequence: Synthetic oligonucleotide
gacgauacugaaaugauua

SEQ ID NO: 166326 - RNA, 19 nt, Artificial Sequence
  Description of Artificial Sequence: Synthetic oligonucleotide
gguacgguucuccagaccc

SEQ ID NO: 166327 - RNA, 19 nt, Artificial Sequence
  Description of Artificial Sequence: Synthetic oligonucleotide
agguuaacggaacacucug

SEQ ID NO: 166328 - RNA, 19 nt, Artificial Sequence
  Description of Artificial Sequence: Synthetic oligonucleotide
ugcgcaugcagauucgaca

SEQ ID NO: 166329 - RNA, 19 nt, Artificial Sequence
  Description of Artificial Sequence: Synthetic oligonucleotide
gguacuguagggcagugcc

SEQ ID NO: 166330 - RNA, 19 nt, Artificial Sequence
  Description of Artificial Sequence: Synthetic oligonucleotide
agauucgacacuggaacgg

SEQ ID NO: 166331 - RNA, 19 nt, Artificial Sequence
  Description of Artificial Sequence: Synthetic oligonucleotide
uuuaaccaaagggacgggc

SEQ ID NO: 166332 - RNA, 19 nt, Artificial Sequence
  Description of Artificial Sequence: Synthetic oligonucleotide
aauaggguaugcaaauuau

SEQ ID NO: 166333 - RNA, 19 nt, Artificial Sequence
  Description of Artificial Sequence: Synthetic oligonucleotide
cauaaggacguucgugggg

SEQ ID NO: 166334 - RNA, 19 nt, Artificial Sequence
  Description of Artificial Sequence: Synthetic oligonucleotide
ugagccgggaaaagccugg

SEQ ID NO: 166335 - RNA, 19 nt, Artificial Sequence
  Description of Artificial Sequence: Synthetic oligonucleotide
aaaccauacuuugucacau

SEQ ID NO: 166336 - RNA, 19 nt, Artificial Sequence
  Description of Artificial Sequence: Synthetic oligonucleotide
ugcucugguuaauaccuag

SEQ ID NO: 166337 - RNA, 19 nt, Artificial Sequence
  Description of Artificial Sequence: Synthetic oligonucleotide
caauugcacaugucaagcc

SEQ ID NO: 166338 - RNA, 19 nt, Artificial Sequence
  Description of Artificial Sequence: Synthetic oligonucleotide
uuaauaccuaggacugcug

SEQ ID NO: 166339 - RNA, 19 nt, Artificial Sequence
  Description of Artificial Sequence: Synthetic oligonucleotide
ucguaaguggauuuuggua

SEQ ID NO: 166340 - RNA, 19 nt, Artificial Sequence
  Description of Artificial Sequence: Synthetic oligonucleotide
uuaggguacuugcgcaugc

SEQ ID NO: 166341 - RNA, 19 nt, Artificial Sequence
  Description of Artificial Sequence: Synthetic oligonucleotide
gcagauucgacacuggaac

SEQ ID NO: 166342 - RNA, 19 nt, Artificial Sequence
  Description of Artificial Sequence: Synthetic oligonucleotide
ucagagcgaugucagaaaa

SEQ ID NO: 166343 - RNA, 19 nt, Artificial Sequence
  Description of Artificial Sequence: Synthetic oligonucleotide
uccggcggcaccaaggaac

SEQ ID NO: 166344 - RNA, 19 nt, Artificial Sequence
  Description of Artificial Sequence: Synthetic oligonucleotide
gaguaaaugggacugcugu

SEQ ID NO: 166345 - RNA, 19 nt, Artificial Sequence
  Description of Artificial Sequence: Synthetic oligonucleotide
cugacuuaagaggagcccc

SEQ ID NO: 166346 - RNA, 19 nt, Artificial Sequence
  Description of Artificial Sequence: Synthetic oligonucleotide
agccgaacgggucagagau

SEQ ID NO: 166347 - RNA, 19 nt, Artificial Sequence
  Description of Artificial Sequence: Synthetic oligonucleotide
auaggguaugcaaauuauc

SEQ ID NO: 166348 - RNA, 19 nt, Artificial Sequence
  Description of Artificial Sequence: Synthetic oligonucleotide
agucgagcaguauuuacaa

SEQ ID NO: 166349 - RNA, 19 nt, Artificial Sequence
  Description of Artificial Sequence: Synthetic oligonucleotide
cagauucgacacuggaacg

SEQ ID NO: 166350 - RNA, 19 nt, Artificial Sequence
  Description of Artificial Sequence: Synthetic oligonucleotide
gaaccgaccaguguaggug

SEQ ID NO: 166351 - RNA, 19 nt, Artificial Sequence
  Description of Artificial Sequence: Synthetic oligonucleotide
acuuaagaggagccccuuc

SEQ ID NO: 166352 - RNA, 19 nt, Artificial Sequence
  Description of Artificial Sequence: Synthetic oligonucleotide
ucccggacgagcgagcugg

SEQ ID NO: 166353 - RNA, 19 nt, Artificial Sequence
  Description of Artificial Sequence: Synthetic oligonucleotide
  modified_base (2)..(2): a, c, u, g, unknown or other
ancggggacaucaacugca

SEQ ID NO: 166354 - RNA, 19 nt, Artificial Sequence
  Description of Artificial Sequence: Synthetic oligonucleotide
gaaggaguuagugacagcu

SEQ ID NO: 166355 - RNA, 19 nt, Artificial Sequence
  Description of Artificial Sequence: Synthetic oligonucleotide
aagguuaacggaacacucu

SEQ ID NO: 166356 - RNA, 19 nt, Artificial Sequence
  Description of Artificial Sequence: Synthetic oligonucleotide
aacggaacacucugacaca

SEQ ID NO: 166357 - RNA, 19 nt, Artificial Sequence
  Description of Artificial Sequence: Synthetic oligonucleotide
gacgguaaaaggacuguug

SEQ ID NO: 166358 - RNA, 19 nt, Artificial Sequence
  Description of Artificial Sequence: Synthetic oligonucleotide
cuacugagggcacacucgc

SEQ ID NO: 166359 - RNA, 19 nt, Artificial Sequence
  Description of Artificial Sequence: Synthetic oligonucleotide
uuugaugaguugggauugg

SEQ ID NO: 166360 - RNA, 19 nt, Artificial Sequence
  Description of Artificial Sequence: Synthetic oligonucleotide
aggacggaacuccaaauaa

SEQ ID NO: 166361 - RNA, 19 nt, Artificial Sequence
  Description of Artificial Sequence: Synthetic oligonucleotide
ugacuuaagaggagccccu

SEQ ID NO: 166362 - RNA, 19 nt, Artificial Sequence
  Description of Artificial Sequence: Synthetic oligonucleotide
uacuguagggcagugccug

SEQ ID NO: 166363 - RNA, 19 nt, Artificial Sequence
  Description of Artificial Sequence: Synthetic oligonucleotide
ugacacaugcucugguuaa

SEQ ID NO: 166364 - RNA, 19 nt, Artificial Sequence
  Description of Artificial Sequence: Synthetic oligonucleotide
caugugagaguacagucga

SEQ ID NO: 166365 - RNA, 19 nt, Artificial Sequence
  Description of Artificial Sequence: Synthetic oligonucleotide
auacccaugcaaaucaagu

SEQ ID NO: 166366 - RNA, 19 nt, Artificial Sequence
  Description of Artificial Sequence: Synthetic oligonucleotide
uuaauccaauacccaugca

SEQ ID NO: 166367 - RNA, 19 nt, Artificial Sequence
  Description of Artificial Sequence: Synthetic oligonucleotide
cucauuauucagagcgaug

SEQ ID NO: 166368 - RNA, 19 nt, Artificial Sequence
  Description of Artificial Sequence: Synthetic oligonucleotide
cacgaggccacugacuagg

SEQ ID NO: 166369 - RNA, 19 nt, Artificial Sequence
  Description of Artificial Sequence: Synthetic oligonucleotide
  modified_base (8)..(8): a, c, u, g, unknown or other
aucugcancggggacauca

SEQ ID NO: 166370 - RNA, 19 nt, Artificial Sequence
  Description of Artificial Sequence: Synthetic oligonucleotide
uucagagcgaugucagaaa

SEQ ID NO: 166371 - RNA, 19 nt, Artificial Sequence
  Description of Artificial Sequence: Synthetic oligonucleotide
aaaacggcgaucgcaggau

SEQ ID NO: 166372 - RNA, 19 nt, Artificial Sequence
  Description of Artificial Sequence: Synthetic oligonucleotide
augauuaauccaauaccca

SEQ ID NO: 166373 - RNA, 19 nt, Artificial Sequence
  Description of Artificial Sequence: Synthetic oligonucleotide
auguccgaaagcccaguug

SEQ ID NO: 166374 - RNA, 19 nt, Artificial Sequence
  Description of Artificial Sequence: Synthetic oligonucleotide
ugguauuaagagccuuuaa

SEQ ID NO: 166375 - RNA, 19 nt, Artificial Sequence
  Description of Artificial Sequence: Synthetic oligonucleotide
aaggguaccccaaggaaaa

SEQ ID NO: 166376 - RNA, 19 nt, Artificial Sequence
  Description of Artificial Sequence: Synthetic oligonucleotide
  modified_base (7)..(7): a, c, u, g, unknown or other
ucugcancggggacaucaa

SEQ ID NO: 166377 - RNA, 19 nt, Artificial Sequence
  Description of Artificial Sequence: Synthetic oligonucleotide
caaaccauacuuugucaca

SEQ ID NO: 166378 - RNA, 19 nt, Artificial Sequence
  Description of Artificial Sequence: Synthetic oligonucleotide
gacguugaagcugcuggag

SEQ ID NO: 166379 - RNA, 19 nt, Artificial Sequence
  Description of Artificial Sequence: Synthetic oligonucleotide
cucugguuaauaccuagga

SEQ ID NO: 166380 - RNA, 19 nt, Artificial Sequence
  Description of Artificial Sequence: Synthetic oligonucleotide
aacggcgaucgcaggauuc

SEQ ID NO: 166381 - RNA, 19 nt, Artificial Sequence
  Description of Artificial Sequence: Synthetic oligonucleotide
acggcgaucgcaggauucc

SEQ ID NO: 166382 - RNA, 19 nt, Artificial Sequence
  Description of Artificial Sequence: Synthetic oligonucleotide
uacuugcgcaugcggcugg

SEQ ID NO: 166383 - RNA, 19 nt, Artificial Sequence
  Description of Artificial Sequence: Synthetic oligonucleotide
ggacgagcgagcuggagag

SEQ ID NO: 166384 - RNA, 19 nt, Artificial Sequence
  Description of Artificial Sequence: Synthetic oligonucleotide
ugaugggaggcaaccgagu

SEQ ID NO: 166385 - RNA, 19 nt, Artificial Sequence
  Description of Artificial Sequence: Synthetic oligonucleotide
  modified_base (4)..(4): a, c, u, g, unknown or other
gcancggggacaucaacug

SEQ ID NO: 166386 - RNA, 19 nt, Artificial Sequence
  Description of Artificial Sequence: Synthetic oligonucleotide
ugcgacuaaaguugcgcau

SEQ ID NO: 166387 - RNA, 19 nt, Artificial Sequence
  Description of Artificial Sequence: Synthetic oligonucleotide
gaacuggggagccccguug

SEQ ID NO: 166388 - RNA, 19 nt, Artificial Sequence
  Description of Artificial Sequence: Synthetic oligonucleotide
acgauacugaaaugauuaa

SEQ ID NO: 166389 - RNA, 19 nt, Artificial Sequence
  Description of Artificial Sequence: Synthetic oligonucleotide
aggaggcggguacuguagg

SEQ ID NO: 166390 - RNA, 19 nt, Artificial Sequence
  Description of Artificial Sequence: Synthetic oligonucleotide
ugaaggaguuagugacagc

SEQ ID NO: 166391 - RNA, 19 nt, Artificial Sequence
  Description of Artificial Sequence: Synthetic oligonucleotide
gugaaacucuuuuaaccaa

SEQ ID NO: 166392 - RNA, 19 nt, Artificial Sequence
  Description of Artificial Sequence: Synthetic oligonucleotide
gguaagagguagccacugg

SEQ ID NO: 166393 - RNA, 19 nt, Artificial Sequence
  Description of Artificial Sequence: Synthetic oligonucleotide
aaagcccaguugaagugcu

SEQ ID NO: 166394 - RNA, 19 nt, Artificial Sequence
  Description of Artificial Sequence: Synthetic oligonucleotide
uucgacacuggaacggcuu

SEQ ID NO: 166395 - RNA, 19 nt, Artificial Sequence
  Description of Artificial Sequence: Synthetic oligonucleotide
gggauaacuugucuccacc

SEQ ID NO: 166396 - RNA, 19 nt, Artificial Sequence
  Description of Artificial Sequence: Synthetic oligonucleotide
uugcgcaugcagauucgac

SEQ ID NO: 166397 - RNA, 19 nt, Artificial Sequence
  Description of Artificial Sequence: Synthetic oligonucleotide
aggcauaaggacguucgug

SEQ ID NO: 166398 - RNA, 19 nt, Artificial Sequence
  Description of Artificial Sequence: Synthetic oligonucleotide
gaccaguguaggugauggg

SEQ ID NO: 166399 - RNA, 19 nt, Artificial Sequence
  Description of Artificial Sequence: Synthetic oligonucleotide
auacgauggagacgauacu

SEQ ID NO: 166400 - RNA, 19 nt, Artificial Sequence
  Description of Artificial Sequence: Synthetic oligonucleotide
gagaaccgaccaguguagg

SEQ ID NO: 166401 - RNA, 19 nt, Artificial Sequence
  Description of Artificial Sequence: Synthetic oligonucleotide
gaugggaggcaaccgagua

SEQ ID NO: 166402 - RNA, 19 nt, Artificial Sequence
  Description of Artificial Sequence: Synthetic oligonucleotide
caaggcgugucacacaaaa

SEQ ID NO: 166403 - RNA, 19 nt, Artificial Sequence
  Description of Artificial Sequence: Synthetic oligonucleotide
guuaauaccuaggacugcu

SEQ ID NO: 166404 - RNA, 19 nt, Artificial Sequence
  Description of Artificial Sequence: Synthetic oligonucleotide
gcauaaggacguucguggg

SEQ ID NO: 166405 - RNA, 19 nt, Artificial Sequence
  Description of Artificial Sequence: Synthetic oligonucleotide
aucacuccuaccccuuuaa

SEQ ID NO: 166406 - RNA, 19 nt, Artificial Sequence
  Description of Artificial Sequence: Synthetic oligonucleotide
ggcgaaggcuuuaauagug

SEQ ID NO: 166407 - RNA, 19 nt, Artificial Sequence
  Description of Artificial Sequence: Synthetic oligonucleotide
gugaugggaggcaaccgag

SEQ ID NO: 166408 - RNA, 19 nt, Artificial Sequence
  Description of Artificial Sequence: Synthetic oligonucleotide
caggaggcggguacuguag

SEQ ID NO: 166409 - RNA, 19 nt, Artificial Sequence
  Description of Artificial Sequence: Synthetic oligonucleotide
gcuacugagggcacacucg

SEQ ID NO: 166410 - RNA, 19 nt, Artificial Sequence
  Description of Artificial Sequence: Synthetic oligonucleotide
gauaacuugucuccaccau

SEQ ID NO: 166411 - RNA, 19 nt, Artificial Sequence
  Description of Artificial Sequence: Synthetic oligonucleotide
cuggccgggucacaugcgg

SEQ ID NO: 166412 - RNA, 19 nt, Artificial Sequence
  Description of Artificial Sequence: Synthetic oligonucleotide
gcggaugugagugguaagg

SEQ ID NO: 166413 - RNA, 19 nt, Artificial Sequence
  Description of Artificial Sequence: Synthetic oligonucleotide
gaggucguggcucugacuu

SEQ ID NO: 166414 - RNA, 19 nt, Artificial Sequence
  Description of Artificial Sequence: Synthetic oligonucleotide
caggcauacgauggagacg

SEQ ID NO: 166415 - RNA, 19 nt, Artificial Sequence
  Description of Artificial Sequence: Synthetic oligonucleotide
cagaugggaagcugcugac

SEQ ID NO: 166416 - RNA, 19 nt, Artificial Sequence
  Description of Artificial Sequence: Synthetic oligonucleotide
acaugucaagccaucggca

SEQ ID NO: 166417 - RNA, 19 nt, Artificial Sequence
  Description of Artificial Sequence: Synthetic oligonucleotide
agggagaaccgaccagugu

SEQ ID NO: 166418 - RNA, 19 nt, Artificial Sequence
  Description of Artificial Sequence: Synthetic oligonucleotide
aggcggguacuguagggca

SEQ ID NO: 166419 - RNA, 19 nt, Artificial Sequence
  Description of Artificial Sequence: Synthetic oligonucleotide
uaccuaggacugcugcuuc

SEQ ID NO: 166420 - RNA, 19 nt, Artificial Sequence
  Description of Artificial Sequence: Synthetic oligonucleotide
acagaccuucucuuggcua

SEQ ID NO: 166421 - RNA, 19 nt, Artificial Sequence
  Description of Artificial Sequence: Synthetic oligonucleotide
acgauggagacgauacuga

SEQ ID NO: 166422 - RNA, 19 nt, Artificial Sequence
  Description of Artificial Sequence: Synthetic oligonucleotide
ucugucguaaguggauuuu

SEQ ID NO: 166423 - RNA, 19 nt, Artificial Sequence
  Description of Artificial Sequence: Synthetic oligonucleotide
cacugcgacuaaaguugcg

SEQ ID NO: 166424 - RNA, 19 nt, Artificial Sequence
  Description of Artificial Sequence: Synthetic oligonucleotide
cugucguaaguggauuuug

SEQ ID NO: 166425 - RNA, 19 nt, Artificial Sequence
  Description of Artificial Sequence: Synthetic oligonucleotide
ggcggcaccaaggaacugg

SEQ ID NO: 166426 - RNA, 19 nt, Artificial Sequence
  Description of Artificial Sequence: Synthetic oligonucleotide
caucacaaaauaagagggu

SEQ ID NO: 166427 - RNA, 19 nt, Artificial Sequence
  Description of Artificial Sequence: Synthetic oligonucleotide
aguugcgcaugcagauucg

SEQ ID NO: 166428 - RNA, 19 nt, Artificial Sequence
  Description of Artificial Sequence: Synthetic oligonucleotide
cgugaaacucuuuuaacca

SEQ ID NO: 166429 - RNA, 19 nt, Artificial Sequence
  Description of Artificial Sequence: Synthetic oligonucleotide
gggagaaccgaccagugua

SEQ ID NO: 166430 - RNA, 19 nt, Artificial Sequence
  Description of Artificial Sequence: Synthetic oligonucleotide
gagaggucguggcucugac

SEQ ID NO: 166431 - RNA, 19 nt, Artificial Sequence
  Description of Artificial Sequence: Synthetic oligonucleotide
acgagcgagcuggagagcu

SEQ ID NO: 166432 - RNA, 19 nt, Artificial Sequence
  Description of Artificial Sequence: Synthetic oligonucleotide
ugcgcaugcggcuggguuu

SEQ ID NO: 166433 - RNA, 19 nt, Artificial Sequence
  Description of Artificial Sequence: Synthetic oligonucleotide
aaacggcgaucgcaggauu

SEQ ID NO: 166434 - RNA, 19 nt, Artificial Sequence
  Description of Artificial Sequence: Synthetic oligonucleotide
uggguacgguucuccagac

SEQ ID NO: 166435 - RNA, 19 nt, Artificial Sequence
  Description of Artificial Sequence: Synthetic oligonucleotide
cagggagaaccgaccagug

SEQ ID NO: 166436 - RNA, 19 nt, Artificial Sequence
  Description of Artificial Sequence: Synthetic oligonucleotide
gcgcaugcagauucgacac

SEQ ID NO: 166437 - RNA, 19 nt, Artificial Sequence
  Description of Artificial Sequence: Synthetic oligonucleotide
ggagaaccgaccaguguag

SEQ ID NO: 166438 - RNA, 19 nt, Artificial Sequence
  Description of Artificial Sequence: Synthetic oligonucleotide
ccaugggcaauaaagcgca

SEQ ID NO: 166439 - RNA, 19 nt, Artificial Sequence
  Description of Artificial Sequence: Synthetic oligonucleotide
agagcugauguugggcggu

SEQ ID NO: 166440 - RNA, 19 nt, Artificial Sequence
  Description of Artificial Sequence: Synthetic oligonucleotide
gucguaaguggauuuuggu

SEQ ID NO: 166441 - RNA, 19 nt, Artificial Sequence
  Description of Artificial Sequence: Synthetic oligonucleotide
ugagggcccaaacccguuu

SEQ ID NO: 166442 - RNA, 19 nt, Artificial Sequence
  Description of Artificial Sequence: Synthetic oligonucleotide
ugaguggcgaaggcuuuaa

SEQ ID NO: 166443 - RNA, 19 nt, Artificial Sequence
  Description of Artificial Sequence: Synthetic oligonucleotide
ucauguccgaaagcccagu

SEQ ID NO: 166444 - RNA, 19 nt, Artificial Sequence
  Description of Artificial Sequence: Synthetic oligonucleotide
agaggucguggcucugacu

SEQ ID NO: 166445 - RNA, 19 nt, Artificial Sequence
  Description of Artificial Sequence: Synthetic oligonucleotide
gaucccgacugaguggcga

SEQ ID NO: 166446 - RNA, 19 nt, Artificial Sequence
  Description of Artificial Sequence: Synthetic oligonucleotide
ggccgguuaggguacuugc

SEQ ID NO: 166447 - RNA, 19 nt, Artificial Sequence
  Description of Artificial Sequence: Synthetic oligonucleotide
guacuugcgcaugcggcug

SEQ ID NO: 166448 - RNA, 19 nt, Artificial Sequence
  Description of Artificial Sequence: Synthetic oligonucleotide
agacgauacugaaaugauu

SEQ ID NO: 166449 - RNA, 19 nt, Artificial Sequence
  Description of Artificial Sequence: Synthetic oligonucleotide
gguuaauaccuaggacugc

SEQ ID NO: 166450 - RNA, 19 nt, Artificial Sequence
  Description of Artificial Sequence: Synthetic oligonucleotide
aagggacgggcaaaauuua

SEQ ID NO: 166451 - RNA, 19 nt, Artificial Sequence
  Description of Artificial Sequence: Synthetic oligonucleotide
gagacgauacugaaaugau

SEQ ID NO: 166452 - RNA, 19 nt, Artificial Sequence
  Description of Artificial Sequence: Synthetic oligonucleotide
aggcaaccgaguaguuugg

SEQ ID NO: 166453 - RNA, 19 nt, Artificial Sequence
  Description of Artificial Sequence: Synthetic oligonucleotide
ggcaaggcgugucacacaa

SEQ ID NO: 166454 - RNA, 19 nt, Artificial Sequence
  Description of Artificial Sequence: Synthetic oligonucleotide
gguggaacggaggcauagg

SEQ ID NO: 166455 - RNA, 19 nt, Artificial Sequence
  Description of Artificial Sequence: Synthetic oligonucleotide
accgaguaguuuggcuggg

SEQ ID NO: 166456 - RNA, 19 nt, Artificial Sequence
  Description of Artificial Sequence: Synthetic oligonucleotide
  modified_base (19)..(19): a, c, u, g, unknown or other
acgggucagagaucugcan

SEQ ID NO: 166457 - RNA, 19 nt, Artificial Sequence
  Description of Artificial Sequence: Synthetic oligonucleotide
  modified_base (6)..(6): a, c, u, g, unknown or other
cugcancggggacaucaac

SEQ ID NO: 166458 - RNA, 19 nt, Artificial Sequence
  Description of Artificial Sequence: Synthetic oligonucleotide
gagccgaacgggucagaga

SEQ ID NO: 166459 - RNA, 19 nt, Artificial Sequence
  Description of Artificial Sequence: Synthetic oligonucleotide
guggaacggaggcauaggu

SEQ ID NO: 166460 - RNA, 19 nt, Artificial Sequence
  Description of Artificial Sequence: Synthetic oligonucleotide
gacuaaaguugcgcaugca

SEQ ID NO: 166461 - RNA, 19 nt, Artificial Sequence
  Description of Artificial Sequence: Synthetic oligonucleotide
cgaccaguguaggugaugg

SEQ ID NO: 166462 - RNA, 19 nt, Artificial Sequence
  Description of Artificial Sequence: Synthetic oligonucleotide
ucccgacugaguggcgaag

SEQ ID NO: 166463 - RNA, 19 nt, Artificial Sequence
  Description of Artificial Sequence: Synthetic oligonucleotide
ugagcucgucagagcgaga

SEQ ID NO: 166464 - RNA, 19 nt, Artificial Sequence
  Description of Artificial Sequence: Synthetic oligonucleotide
uguugggcggugggcgcag

SEQ ID NO: 166465 - RNA, 19 nt, Artificial Sequence
  Description of Artificial Sequence: Synthetic oligonucleotide
aggcugcuggguacgguuc

SEQ ID NO: 166466 - RNA, 19 nt, Artificial Sequence
  Description of Artificial Sequence: Synthetic oligonucleotide
ggguaagagguagccacug

SEQ ID NO: 166467 - RNA, 19 nt, Artificial Sequence
  Description of Artificial Sequence: Synthetic oligonucleotide
gccgguuaggguacuugcg

SEQ ID NO: 166468 - RNA, 19 nt, Artificial Sequence
  Description of Artificial Sequence: Synthetic oligonucleotide
auucgacacuggaacggcu

SEQ ID NO: 166469 - RNA, 19 nt, Artificial Sequence
  Description of Artificial Sequence: Synthetic oligonucleotide
cguaaguggauuuugguau

SEQ ID NO: 166470 - RNA, 19 nt, Artificial Sequence
  Description of Artificial Sequence: Synthetic oligonucleotide
ggagccgaacgggucagag

SEQ ID NO: 166471 - RNA, 19 nt, Artificial Sequence
  Description of Artificial Sequence: Synthetic oligonucleotide
gcucgucagagcgagaaaa

SEQ ID NO: 166472 - RNA, 19 nt, Artificial Sequence
  Description of Artificial Sequence: Synthetic oligonucleotide
guugcgcaugcagauucga

SEQ ID NO: 166473 - RNA, 19 nt, Artificial Sequence
  Description of Artificial Sequence: Synthetic oligonucleotide
uuccggcggcaccaaggaa

SEQ ID NO: 166474 - RNA, 19 nt, Artificial Sequence
  Description of Artificial Sequence: Synthetic oligonucleotide
gguuaacggaacacucuga

SEQ ID NO: 166475 - RNA, 19 nt, Artificial Sequence
  Description of Artificial Sequence: Synthetic oligonucleotide
guuuaggguaguuguccau

SEQ ID NO: 166476 - RNA, 19 nt, Artificial Sequence
  Description of Artificial Sequence: Synthetic oligonucleotide
aucccggacgagcgagcug

SEQ ID NO: 166477 - RNA, 19 nt, Artificial Sequence
  Description of Artificial Sequence: Synthetic oligonucleotide
caucggcaaggcgugucac

SEQ ID NO: 166478 - RNA, 19 nt, Artificial Sequence
  Description of Artificial Sequence: Synthetic oligonucleotide
guacagucgagcaguauuu

SEQ ID NO: 166479 - RNA, 19 nt, Artificial Sequence
  Description of Artificial Sequence: Synthetic oligonucleotide
gucaggugcucguaggguu

SEQ ID NO: 166480 - RNA, 19 nt, Artificial Sequence
  Description of Artificial Sequence: Synthetic oligonucleotide
cagcugaguaaaugggacu

SEQ ID NO: 166481 - RNA, 19 nt, Artificial Sequence
  Description of Artificial Sequence: Synthetic oligonucleotide
gacgagcgagcuggagagc

SEQ ID NO: 166482 - RNA, 19 nt, Artificial Sequence
  Description of Artificial Sequence: Synthetic oligonucleotide
agccggaggauuggucaug

SEQ ID NO: 166483 - RNA, 19 nt, Artificial Sequence
  Description of Artificial Sequence: Synthetic oligonucleotide
ggguacgguucuccagacc

SEQ ID NO: 166484 - RNA, 19 nt, Artificial Sequence
  Description of Artificial Sequence: Synthetic oligonucleotide
ccccuuuaaggccagaggu

SEQ ID NO: 166485 - RNA, 19 nt, Artificial Sequence
  Description of Artificial Sequence: Synthetic oligonucleotide
gggcaauaaagcgcauuca

SEQ ID NO: 166486 - RNA, 19 nt, Artificial Sequence
  Description of Artificial Sequence: Synthetic oligonucleotide
caucacuccuaccccuuua

SEQ ID NO: 166487 - RNA, 19 nt, Artificial Sequence
  Description of Artificial Sequence: Synthetic oligonucleotide
cccgacugaguggcgaagg

SEQ ID NO: 166488 - RNA, 19 nt, Artificial Sequence
  Description of Artificial Sequence: Synthetic oligonucleotide
gcaauaaagcgcauucaau

SEQ ID NO: 166489 - RNA, 19 nt, Artificial Sequence
  Description of Artificial Sequence: Synthetic oligonucleotide
gccggaggauuggucaugc

SEQ ID NO: 166490 - RNA, 19 nt, Artificial Sequence
  Description of Artificial Sequence: Synthetic oligonucleotide
agaguacagucgagcagua

SEQ ID NO: 166491 - RNA, 19 nt, Artificial Sequence
  Description of Artificial Sequence: Synthetic oligonucleotide
cgaucgcaggauuccacug

SEQ ID NO: 166492 - RNA, 19 nt, Artificial Sequence
  Description of Artificial Sequence: Synthetic oligonucleotide
ggugcucguaggguuguuc

SEQ ID NO: 166493 - RNA, 19 nt, Artificial Sequence
  Description of Artificial Sequence: Synthetic oligonucleotide
ggcgaucgcaggauuccac

SEQ ID NO: 166494 - RNA, 19 nt, Artificial Sequence
  Description of Artificial Sequence: Synthetic oligonucleotide
ccgccuacucaguagguaa

SEQ ID NO: 166495 - RNA, 19 nt, Artificial Sequence
  Description of Artificial Sequence: Synthetic oligonucleotide
guacuguagggcagugccu

SEQ ID NO: 166496 - RNA, 19 nt, Artificial Sequence
  Description of Artificial Sequence: Synthetic oligonucleotide
gcgaucgcaggauuccacu

SEQ ID NO: 166497 - RNA, 19 nt, Artificial Sequence
  Description of Artificial Sequence: Synthetic oligonucleotide
gcauacgauggagacgaua

SEQ ID NO: 166498 - RNA, 19 nt, Artificial Sequence
  Description of Artificial Sequence: Synthetic oligonucleotide
ccaucccggacgagcgagc

SEQ ID NO: 166499 - RNA, 19 nt, Artificial Sequence
  Description of Artificial Sequence: Synthetic oligonucleotide
ggacggaacuccaaauaau

SEQ ID NO: 166500 - RNA, 19 nt, Artificial Sequence
  Description of Artificial Sequence: Synthetic oligonucleotide
gacuuaagaggagccccuu

SEQ ID NO: 166501 - RNA, 19 nt, Artificial Sequence
  Description of Artificial Sequence: Synthetic oligonucleotide
ccgaagcuacugagggcac

SEQ ID NO: 166502 - RNA, 19 nt, Artificial Sequence
  Description of Artificial Sequence: Synthetic oligonucleotide
gaguacagucgagcaguau

SEQ ID NO: 166503 - RNA, 19 nt, Artificial Sequence
  Description of Artificial Sequence: Synthetic oligonucleotide
cauguccgaaagcccaguu

SEQ ID NO: 166504 - RNA, 19 nt, Artificial Sequence
  Description of Artificial Sequence: Synthetic oligonucleotide
cugaguggcgaaggcuuua

SEQ ID NO: 166505 - RNA, 19 nt, Artificial Sequence
  Description of Artificial Sequence: Synthetic oligonucleotide
ccaucggcaaggcguguca

SEQ ID NO: 166506 - RNA, 19 nt, Artificial Sequence
  Description of Artificial Sequence: Synthetic oligonucleotide
ccgaacgggucagagaucu

SEQ ID NO: 166507 - RNA, 19 nt, Artificial Sequence
  Description of Artificial Sequence: Synthetic oligonucleotide
cacauaucccaugggcaau

SEQ ID NO: 166508 - RNA, 19 nt, Artificial Sequence
  Description of Artificial Sequence: Synthetic oligonucleotide
accgaccaguguaggugau

SEQ ID NO: 166509 - RNA, 19 nt, Artificial Sequence
  Description of Artificial Sequence: Synthetic oligonucleotide
gccaucggcaaggcguguc

SEQ ID NO: 166510 - RNA, 19 nt, Artificial Sequence
  Description of Artificial Sequence: Synthetic oligonucleotide
  modified_base (9)..(9): a, c, u, g, unknown or other
gaucugcancggggacauc

SEQ ID NO: 166511 - RNA, 19 nt, Artificial Sequence
  Description of Artificial Sequence: Synthetic oligonucleotide
caucccggacgagcgagcu

SEQ ID NO: 166512 - RNA, 19 nt, Artificial Sequence
  Description of Artificial Sequence: Synthetic oligonucleotide
ggaggcaaccgaguaguuu

SEQ ID NO: 166513 - RNA, 19 nt, Artificial Sequence
  Description of Artificial Sequence: Synthetic oligonucleotide
ccgaccaguguaggugaug

SEQ ID NO: 166514 - RNA, 19 nt, Artificial Sequence
  Description of Artificial Sequence: Synthetic oligonucleotide
ggacgguaaaaggacuguu

SEQ ID NO: 166515 - RNA, 19 nt, Artificial Sequence
  Description of Artificial Sequence: Synthetic oligonucleotide
gccgccuacucaguaggua

SEQ ID NO: 166516 - RNA, 19 nt, Artificial Sequence
  Description of Artificial Sequence: Synthetic oligonucleotide
cuaccccuuuaaggccaga

SEQ ID NO: 166517 - RNA, 19 nt, Artificial Sequence
  Description of Artificial Sequence: Synthetic oligonucleotide
ccgggaaaagccuggcuuu

SEQ ID NO: 166518 - RNA, 19 nt, Artificial Sequence
  Description of Artificial Sequence: Synthetic oligonucleotide
ggugcggaugugaguggua

SEQ ID NO: 166519 - RNA, 19 nt, Artificial Sequence
  Description of Artificial Sequence: Synthetic oligonucleotide
caggugcucguaggguugu

SEQ ID NO: 166520 - RNA, 19 nt, Artificial Sequence
  Description of Artificial Sequence: Synthetic oligonucleotide
cgaacgggucagagaucug

SEQ ID NO: 166521 - RNA, 19 nt, Artificial Sequence
  Description of Artificial Sequence: Synthetic oligonucleotide
gccgaacgggucagagauc

SEQ ID NO: 166522 - RNA, 19 nt, Artificial Sequence
  Description of Artificial Sequence: Synthetic oligonucleotide
ccggacgagcgagcuggag

SEQ ID NO: 166523 - RNA, 19 nt, Artificial Sequence
  Description of Artificial Sequence: Synthetic oligonucleotide
ccgaguaguuuggcuggga

SEQ ID NO: 166524 - RNA, 19 nt, Artificial Sequence
  Description of Artificial Sequence: Synthetic oligonucleotide
gcaaggcgugucacacaaa

SEQ ID NO: 166525 - RNA, 19 nt, Artificial Sequence
  Description of Artificial Sequence: Synthetic oligonucleotide
ggccacugacuaggcugaa

SEQ ID NO: 166526 - RNA, 19 nt, Artificial Sequence
  Description of Artificial Sequence: Synthetic oligonucleotide
cccggacgagcgagcugga

SEQ ID NO: 166527 - RNA, 19 nt, Artificial Sequence
  Description of Artificial Sequence: Synthetic oligonucleotide
ccggaggauuggucaugcu

SEQ ID NO: 166528 - RNA, 19 nt, Artificial Sequence
  Description of Artificial Sequence: Synthetic oligonucleotide
cggcgaucgcaggauucca

SEQ ID NO: 166529 - RNA, 19 nt, Artificial Sequence
  Description of Artificial Sequence: Synthetic oligonucleotide
gggaggcaaccgaguaguu

SEQ ID NO: 166530 - RNA, 19 nt, Artificial Sequence
  Description of Artificial Sequence: Synthetic oligonucleotide
ccgcuguugcugccggguu

SEQ ID NO: 166531 - RNA, 19 nt, Artificial Sequence
  Description of Artificial Sequence: Synthetic oligonucleotide
aaagcuaucauuuacaagg

SEQ ID NO: 166532 - RNA, 19 nt, Artificial Sequence
  Description of Artificial Sequence: Synthetic oligonucleotide
agaucuacaucauaaacgc

SEQ ID NO: 166533 - RNA, 19 nt, Artificial Sequence
  Description of Artificial Sequence: Synthetic oligonucleotide
aaacugucgacucuguccg

SEQ ID NO: 166534 - RNA, 19 nt, Artificial Sequence
  Description of Artificial Sequence: Synthetic oligonucleotide
uggaaagcaauccaagacg

SEQ ID NO: 166535 - RNA, 19 nt, Artificial Sequence
  Description of Artificial Sequence: Synthetic oligonucleotide
aaagacccgaaacccaacc

SEQ ID NO: 166536 - RNA, 19 nt, Artificial Sequence
  Description of Artificial Sequence: Synthetic oligonucleotide
cagaucuacaucauaaacg

SEQ ID NO: 166537 - RNA, 19 nt, Artificial Sequence
  Description of Artificial Sequence: Synthetic oligonucleotide
aaaucuacggugugugugg

SEQ ID NO: 166538 - RNA, 19 nt, Artificial Sequence
  Description of Artificial Sequence: Synthetic oligonucleotide
ugcauugauaaucaguuga

SEQ ID NO: 166539 - RNA, 19 nt, Artificial Sequence
  Description of Artificial Sequence: Synthetic oligonucleotide
uuuguagaagcaaagcaca

SEQ ID NO: 166540 - RNA, 19 nt, Artificial Sequence
  Description of Artificial Sequence: Synthetic oligonucleotide
uugauaaucaguugaauaa

SEQ ID NO: 166541 - RNA, 19 nt, Artificial Sequence
  Description of Artificial Sequence: Synthetic oligonucleotide
auagcuccacuuuagaccg

SEQ ID NO: 166542 - RNA, 19 nt, Artificial Sequence
  Description of Artificial Sequence: Synthetic oligonucleotide
uauaccuucaacaggcgcc

SEQ ID NO: 166543 - RNA, 19 nt, Artificial Sequence
  Description of Artificial Sequence: Synthetic oligonucleotide
aagguguauaccuucaaca

SEQ ID NO: 166544 - RNA, 19 nt, Artificial Sequence
  Description of Artificial Sequence: Synthetic oligonucleotide
uucgucacagcgaagauga

SEQ ID NO: 166545 - RNA, 19 nt, Artificial Sequence
  Description of Artificial Sequence: Synthetic oligonucleotide
gaaacugucgacucugucc

SEQ ID NO: 166546 - RNA, 19 nt, Artificial Sequence
  Description of Artificial Sequence: Synthetic oligonucleotide
uugaaggcgaaaucuacgg

SEQ ID NO: 166547 - RNA, 19 nt, Artificial Sequence
  Description of Artificial Sequence: Synthetic oligonucleotide
cuagauaccgucuugucug

SEQ ID NO: 166548 - RNA, 19 nt, Artificial Sequence
  Description of Artificial Sequence: Synthetic oligonucleotide
guugauauuguucuccgcc

SEQ ID NO: 166549 - RNA, 19 nt, Artificial Sequence
  Description of Artificial Sequence: Synthetic oligonucleotide
guuacaauuguccccaaug

SEQ ID NO: 166550 - RNA, 19 nt, Artificial Sequence
  Description of Artificial Sequence: Synthetic oligonucleotide
acaucauaaacgcgugacc

SEQ ID NO: 166551 - RNA, 19 nt, Artificial Sequence
  Description of Artificial Sequence: Synthetic oligonucleotide
gaaggcgaaaucuacggug

SEQ ID NO: 166552 - RNA, 19 nt, Artificial Sequence
  Description of Artificial Sequence: Synthetic oligonucleotide
cauaggacgcccuuguucc

SEQ ID NO: 166553 - RNA, 19 nt, Artificial Sequence
  Description of Artificial Sequence: Synthetic oligonucleotide
auguccguugaacaguuac

SEQ ID NO: 166554 - RNA, 19 nt, Artificial Sequence
  Description of Artificial Sequence: Synthetic oligonucleotide
uuacaauuguccccaaugu

SEQ ID NO: 166555 - RNA, 19 nt, Artificial Sequence
  Description of Artificial Sequence: Synthetic oligonucleotide
uccguugugaacaccagca

SEQ ID NO: 166556 - RNA, 19 nt, Artificial Sequence
  Description of Artificial Sequence: Synthetic oligonucleotide
aagacccgaaacccaaccg

SEQ ID NO: 166557 - RNA, 19 nt, Artificial Sequence
  Description of Artificial Sequence: Synthetic oligonucleotide
agacgugucagucuuuguc

SEQ ID NO: 166558 - RNA, 19 nt, Artificial Sequence
  Description of Artificial Sequence: Synthetic oligonucleotide
ucuacaucauaaacgcgug

SEQ ID NO: 166559 - RNA, 19 nt, Artificial Sequence
  Description of Artificial Sequence: Synthetic oligonucleotide
ucauccguugugaacacca

SEQ ID NO: 166560 - RNA, 19 nt, Artificial Sequence
  Description of Artificial Sequence: Synthetic oligonucleotide
gaagagauuaaggucuucc

SEQ ID NO: 166561 - RNA, 19 nt, Artificial Sequence
  Description of Artificial Sequence: Synthetic oligonucleotide
aaacucucggcggucaugg

SEQ ID NO: 166562 - RNA, 19 nt, Artificial Sequence
  Description of Artificial Sequence: Synthetic oligonucleotide
aaacccaaccggaaguuac

SEQ ID NO: 166563 - RNA, 19 nt, Artificial Sequence
  Description of Artificial Sequence: Synthetic oligonucleotide
agcauauagugguucuucg

SEQ ID NO: 166564 - RNA, 19 nt, Artificial Sequence
  Description of Artificial Sequence: Synthetic oligonucleotide
ugcaaagcaucuuuucgcc

SEQ ID NO: 166565 - RNA, 19 nt, Artificial Sequence
  Description of Artificial Sequence: Synthetic oligonucleotide
ucaccgaaaucuccugugg

SEQ ID NO: 166566 - RNA, 19 nt, Artificial Sequence
  Description of Artificial Sequence: Synthetic oligonucleotide
agacccgaaacccaaccgg

SEQ ID NO: 166567 - RNA, 19 nt, Artificial Sequence
  Description of Artificial Sequence: Synthetic oligonucleotide
aauguaaccugcauggcau

SEQ ID NO: 166568 - RNA, 19 nt, Artificial Sequence
  Description of Artificial Sequence: Synthetic oligonucleotide
uguauaccuucaacaggcg

SEQ ID NO: 166569 - RNA, 19 nt, Artificial Sequence
  Description of Artificial Sequence: Synthetic oligonucleotide
aucuacaucauaaacgcgu

SEQ ID NO: 166570 - RNA, 19 nt, Artificial Sequence
  Description of Artificial Sequence: Synthetic oligonucleotide
cccaauguaaccugcaugg

SEQ ID NO: 166571 - RNA, 19 nt, Artificial Sequence
  Description of Artificial Sequence: Synthetic oligonucleotide
uacaucauaaacgcgugac

SEQ ID NO: 166572 - RNA, 19 nt, Artificial Sequence
  Description of Artificial Sequence: Synthetic oligonucleotide
uuuacaagguguauaccuu

SEQ ID NO: 166573 - RNA, 19 nt, Artificial Sequence
  Description of Artificial Sequence: Synthetic oligonucleotide
accggaugcuacuguaugc

SEQ ID NO: 166574 - RNA, 19 nt, Artificial Sequence
  Description of Artificial Sequence: Synthetic oligonucleotide
gacucuucuagauaccguc

SEQ ID NO: 166575 - RNA, 19 nt, Artificial Sequence
  Description of Artificial Sequence: Synthetic oligonucleotide
caaucucaccuccacagcc

SEQ ID NO: 166576 - RNA, 19 nt, Artificial Sequence
  Description of Artificial Sequence: Synthetic oligonucleotide
aggagugccaucccaauca

SEQ ID NO: 166577 - RNA, 19 nt, Artificial Sequence
  Description of Artificial Sequence: Synthetic oligonucleotide
caaggcaagcgauggauag

SEQ ID NO: 166578 - RNA, 19 nt, Artificial Sequence
  Description of Artificial Sequence: Synthetic oligonucleotide
ucuucuagauaccgucuug

SEQ ID NO: 166579 - RNA, 19 nt, Artificial Sequence
  Description of Artificial Sequence: Synthetic oligonucleotide
acgguuacgggacacccuc

SEQ ID NO: 166580 - RNA, 19 nt, Artificial Sequence
  Description of Artificial Sequence: Synthetic oligonucleotide
ucguugcuugccuagcuag

SEQ ID NO: 166581 - RNA, 19 nt, Artificial Sequence
  Description of Artificial Sequence: Synthetic oligonucleotide
aggggcaucacgguuacgg

SEQ ID NO: 166582 - RNA, 19 nt, Artificial Sequence
  Description of Artificial Sequence: Synthetic oligonucleotide
gauaccgucuugucuggcc

SEQ ID NO: 166583 - RNA, 19 nt, Artificial Sequence
  Description of Artificial Sequence: Synthetic oligonucleotide
uguccguugaacaguuaca

SEQ ID NO: 166584 - RNA, 19 nt, Artificial Sequence
  Description of Artificial Sequence: Synthetic oligonucleotide
ucugaccaggguaggauac

SEQ ID NO: 166585 - RNA, 19 nt, Artificial Sequence
  Description of Artificial Sequence: Synthetic oligonucleotide
uuacaagguguauaccuuc

SEQ ID NO: 166586 - RNA, 19 nt, Artificial Sequence
  Description of Artificial Sequence: Synthetic oligonucleotide
ugauaaucaguugaauaau

SEQ ID NO: 166587 - RNA, 19 nt, Artificial Sequence
  Description of Artificial Sequence: Synthetic oligonucleotide
aaccggaaguuacuaguga

SEQ ID NO: 166588 - RNA, 19 nt, Artificial Sequence
  Description of Artificial Sequence: Synthetic oligonucleotide
aaaguacuaaacagacaug

SEQ ID NO: 166589 - RNA, 19 nt, Artificial Sequence
  Description of Artificial Sequence: Synthetic oligonucleotide
uuggucucguaucucggug

SEQ ID NO: 166590 - RNA, 19 nt, Artificial Sequence
  Description of Artificial Sequence: Synthetic oligonucleotide
gagauuaaggucuuccggu

SEQ ID NO: 166591 - RNA, 19 nt, Artificial Sequence
  Description of Artificial Sequence: Synthetic oligonucleotide
acauggauuggucucguau

SEQ ID NO: 166592 - RNA, 19 nt, Artificial Sequence
  Description of Artificial Sequence: Synthetic oligonucleotide
auggauuggucucguaucu

SEQ ID NO: 166593 - RNA, 19 nt, Artificial Sequence
  Description of Artificial Sequence: Synthetic oligonucleotide
acuuuagaccggaugcuac

SEQ ID NO: 166594 - RNA, 19 nt, Artificial Sequence
  Description of Artificial Sequence: Synthetic oligonucleotide
uagagcauauagugguucu

SEQ ID NO: 166595 - RNA, 19 nt, Artificial Sequence
  Description of Artificial Sequence: Synthetic oligonucleotide
uacgggguaguccuccacc

SEQ ID NO: 166596 - RNA, 19 nt, Artificial Sequence
  Description of Artificial Sequence: Synthetic oligonucleotide
gaucuacaucauaaacgcg

SEQ ID NO: 166597 - RNA, 19 nt, Artificial Sequence
  Description of Artificial Sequence: Synthetic oligonucleotide
guauaccuucaacaggcgc

SEQ ID NO: 166598 - RNA, 19 nt, Artificial Sequence
  Description of Artificial Sequence: Synthetic oligonucleotide
ugaaggcgaaaucuacggu

SEQ ID NO: 166599 - RNA, 19 nt, Artificial Sequence
  Description of Artificial Sequence: Synthetic oligonucleotide
uggcggaacccgaaggaag

SEQ ID NO: 166600 - RNA, 19 nt, Artificial Sequence
  Description of Artificial Sequence: Synthetic oligonucleotide
caagguguauaccuucaac

SEQ ID NO: 166601 - RNA, 19 nt, Artificial Sequence
  Description of Artificial Sequence: Synthetic oligonucleotide
uagauaccgucuugucugg

SEQ ID NO: 166602 - RNA, 19 nt, Artificial Sequence
  Description of Artificial Sequence: Synthetic oligonucleotide
ucuuuucgccaaccaaucu

SEQ ID NO: 166603 - RNA, 19 nt, Artificial Sequence
  Description of Artificial Sequence: Synthetic oligonucleotide
aggcaagcgauggauaguc

SEQ ID NO: 166604 - RNA, 19 nt, Artificial Sequence
  Description of Artificial Sequence: Synthetic oligonucleotide
gauuggucucguaucucgg

SEQ ID NO: 166605 - RNA, 19 nt, Artificial Sequence
  Description of Artificial Sequence: Synthetic oligonucleotide
uuuagaccggaugcuacug

SEQ ID NO: 166606 - RNA, 19 nt, Artificial Sequence
  Description of Artificial Sequence: Synthetic oligonucleotide
ugccuagcuagcgugagca

SEQ ID NO: 166607 - RNA, 19 nt, Artificial Sequence
  Description of Artificial Sequence: Synthetic oligonucleotide
uaucucggugccguguagg

SEQ ID NO: 166608 - RNA, 19 nt, Artificial Sequence
  Description of Artificial Sequence: Synthetic oligonucleotide
uuagaccggaugcuacugu

SEQ ID NO: 166609 - RNA, 19 nt, Artificial Sequence
  Description of Artificial Sequence: Synthetic oligonucleotide
gaccggaugcuacuguaug

SEQ ID NO: 166610 - RNA, 19 nt, Artificial Sequence
  Description of Artificial Sequence: Synthetic oligonucleotide
cucaccgaaaucuccugug

SEQ ID NO: 166611 - RNA, 19 nt, Artificial Sequence
  Description of Artificial Sequence: Synthetic oligonucleotide
caaccggaaguuacuagug

SEQ ID NO: 166612 - RNA, 19 nt, Artificial Sequence
  Description of Artificial Sequence: Synthetic oligonucleotide
gauggcggaacccgaagga

SEQ ID NO: 166613 - RNA, 19 nt, Artificial Sequence
  Description of Artificial Sequence: Synthetic oligonucleotide
uacuguaugcauugauaau

SEQ ID NO: 166614 - RNA, 19 nt, Artificial Sequence
  Description of Artificial Sequence: Synthetic oligonucleotide
aagcuaucauuuacaaggu

SEQ ID NO: 166615 - RNA, 19 nt, Artificial Sequence
  Description of Artificial Sequence: Synthetic oligonucleotide
cagggugaaagauugagcu

SEQ ID NO: 166616 - RNA, 19 nt, Artificial Sequence
  Description of Artificial Sequence: Synthetic oligonucleotide
ugucuggucgccuggccug

SEQ ID NO: 166617 - RNA, 19 nt, Artificial Sequence
  Description of Artificial Sequence: Synthetic oligonucleotide
acaggcgccuccccaaauc

SEQ ID NO: 166618 - RNA, 19 nt, Artificial Sequence
  Description of Artificial Sequence: Synthetic oligonucleotide
ucguugaaacugucgacuc

SEQ ID NO: 166619 - RNA, 19 nt, Artificial Sequence
  Description of Artificial Sequence: Synthetic oligonucleotide
ucauaaacgcgugaccuuu

SEQ ID NO: 166620 - RNA, 19 nt, Artificial Sequence
  Description of Artificial Sequence: Synthetic oligonucleotide
agcaauccaagacguguca

SEQ ID NO: 166621 - RNA, 19 nt, Artificial Sequence
  Description of Artificial Sequence: Synthetic oligonucleotide
auaccgucuugucuggcca

SEQ ID NO: 166622 - RNA, 19 nt, Artificial Sequence
  Description of Artificial Sequence: Synthetic oligonucleotide
auuggucucguaucucggu

SEQ ID NO: 166623 - RNA, 19 nt, Artificial Sequence
  Description of Artificial Sequence: Synthetic oligonucleotide
agauuaaggucuuccgguu

SEQ ID NO: 166624 - RNA, 19 nt, Artificial Sequence
  Description of Artificial Sequence: Synthetic oligonucleotide
ucucguaucucggugccgu

SEQ ID NO: 166625 - RNA, 19 nt, Artificial Sequence
  Description of Artificial Sequence: Synthetic oligonucleotide
ugauguccguugaacaguu

SEQ ID NO: 166626 - RNA, 19 nt, Artificial Sequence
  Description of Artificial Sequence: Synthetic oligonucleotide
uucuagauaccgucuuguc

SEQ ID NO: 166627 - RNA, 19 nt, Artificial Sequence
  Description of Artificial Sequence: Synthetic oligonucleotide
agcgauggauaguccaucu

SEQ ID NO: 166628 - RNA, 19 nt, Artificial Sequence
  Description of Artificial Sequence: Synthetic oligonucleotide
caucucguugcuugccuag

SEQ ID NO: 166629 - RNA, 19 nt, Artificial Sequence
  Description of Artificial Sequence: Synthetic oligonucleotide
aagucacaccgagagguga

SEQ ID NO: 166630 - RNA, 19 nt, Artificial Sequence
  Description of Artificial Sequence: Synthetic oligonucleotide
aauucuuguagagcauaua

SEQ ID NO: 166631 - RNA, 19 nt, Artificial Sequence
  Description of Artificial Sequence: Synthetic oligonucleotide
ucacgguuacgggacaccc

SEQ ID NO: 166632 - RNA, 19 nt, Artificial Sequence
  Description of Artificial Sequence: Synthetic oligonucleotide
ucagcaagcuuggugccca

SEQ ID NO: 166633 - RNA, 19 nt, Artificial Sequence
  Description of Artificial Sequence: Synthetic oligonucleotide
acggacacuucaaaggaug

SEQ ID NO: 166634 - RNA, 19 nt, Artificial Sequence
  Description of Artificial Sequence: Synthetic oligonucleotide
uggggcacaucauccguug

SEQ ID NO: 166635 - RNA, 19 nt, Artificial Sequence
  Description of Artificial Sequence: Synthetic oligonucleotide
ucggcggucauggauggug

SEQ ID NO: 166636 - RNA, 19 nt, Artificial Sequence
  Description of Artificial Sequence: Synthetic oligonucleotide
agcuagcgugagcaagugg

SEQ ID NO: 166637 - RNA, 19 nt, Artificial Sequence
  Description of Artificial Sequence: Synthetic oligonucleotide
gcaguuguaggugacuucc

SEQ ID NO: 166638 - RNA, 19 nt, Artificial Sequence
  Description of Artificial Sequence: Synthetic oligonucleotide
agagcccgcagauguaugu

SEQ ID NO: 166639 - RNA, 19 nt, Artificial Sequence
  Description of Artificial Sequence: Synthetic oligonucleotide
uccauccagcgcgaugugg

SEQ ID NO: 166640 - RNA, 19 nt, Artificial Sequence
  Description of Artificial Sequence: Synthetic oligonucleotide
agacugauagcuccacuuu

SEQ ID NO: 166641 - RNA, 19 nt, Artificial Sequence
  Description of Artificial Sequence: Synthetic oligonucleotide
agucacaccgagaggugac

SEQ ID NO: 166642 - RNA, 19 nt, Artificial Sequence
  Description of Artificial Sequence: Synthetic oligonucleotide
cacuugcacacucuggcuc

SEQ ID NO: 166643 - RNA, 19 nt, Artificial Sequence
  Description of Artificial Sequence: Synthetic oligonucleotide
aagacgugucagucuuugu

SEQ ID NO: 166644 - RNA, 19 nt, Artificial Sequence
  Description of Artificial Sequence: Synthetic oligonucleotide
uccuuccgaacucacucuc

SEQ ID NO: 166645 - RNA, 19 nt, Artificial Sequence
  Description of Artificial Sequence: Synthetic oligonucleotide
aguacuaaacagacaugga

SEQ ID NO: 166646 - RNA, 19 nt, Artificial Sequence
  Description of Artificial Sequence: Synthetic oligonucleotide
ggguuuuggaacuuggcaa

SEQ ID NO: 166647 - RNA, 19 nt, Artificial Sequence
  Description of Artificial Sequence: Synthetic oligonucleotide
ugacggaccguggauugcc

SEQ ID NO: 166648 - RNA, 19 nt, Artificial Sequence
  Description of Artificial Sequence: Synthetic oligonucleotide
aucauaaacgcgugaccuu

SEQ ID NO: 166649 - RNA, 19 nt, Artificial Sequence
  Description of Artificial Sequence: Synthetic oligonucleotide
acgugucagucuuuguccu

SEQ ID NO: 166650 - RNA, 19 nt, Artificial Sequence
  Description of Artificial Sequence: Synthetic oligonucleotide
cucggugccguguaggaga

SEQ ID NO: 166651 - RNA, 19 nt, Artificial Sequence
  Description of Artificial Sequence: Synthetic oligonucleotide
uacccacgugaccaccucc

SEQ ID NO: 166652 - RNA, 19 nt, Artificial Sequence
  Description of Artificial Sequence: Synthetic oligonucleotide
ugucaacaaaagacccgaa

SEQ ID NO: 166653 - RNA, 19 nt, Artificial Sequence
  Description of Artificial Sequence: Synthetic oligonucleotide
aguuacaauuguccccaau

SEQ ID NO: 166654 - RNA, 19 nt, Artificial Sequence
  Description of Artificial Sequence: Synthetic oligonucleotide
aaggcaagcgauggauagu

SEQ ID NO: 166655 - RNA, 19 nt, Artificial Sequence
  Description of Artificial Sequence: Synthetic oligonucleotide
guuacgggacacccucugc

SEQ ID NO: 166656 - RNA, 19 nt, Artificial Sequence
  Description of Artificial Sequence: Synthetic oligonucleotide
auaccuucaacaggcgccu

SEQ ID NO: 166657 - RNA, 19 nt, Artificial Sequence
  Description of Artificial Sequence: Synthetic oligonucleotide
gguucuucgucacagcgaa

SEQ ID NO: 166658 - RNA, 19 nt, Artificial Sequence
  Description of Artificial Sequence: Synthetic oligonucleotide
aaucuacggugugugugga

SEQ ID NO: 166659 - RNA, 19 nt, Artificial Sequence
  Description of Artificial Sequence: Synthetic oligonucleotide
gggguuuuggaacuuggca

SEQ ID NO: 166660 - RNA, 19 nt, Artificial Sequence
  Description of Artificial Sequence: Synthetic oligonucleotide
auagugguucuucgucaca

SEQ ID NO: 166661 - RNA, 19 nt, Artificial Sequence
  Description of Artificial Sequence: Synthetic oligonucleotide
uugccuagcuagcgugagc

SEQ ID NO: 166662 - RNA, 19 nt, Artificial Sequence
  Description of Artificial Sequence: Synthetic oligonucleotide
cauccguugugaacaccag

SEQ ID NO: 166663 - RNA, 19 nt, Artificial Sequence
  Description of Artificial Sequence: Synthetic oligonucleotide
gccaucguguggcugaacc

SEQ ID NO: 166664 - RNA, 19 nt, Artificial Sequence
  Description of Artificial Sequence: Synthetic oligonucleotide
acaagguguauaccuucaa

SEQ ID NO: 166665 - RNA, 19 nt, Artificial Sequence
  Description of Artificial Sequence: Synthetic oligonucleotide
gcuagcgugagcaagugga

SEQ ID NO: 166666 - RNA, 19 nt, Artificial Sequence
  Description of Artificial Sequence: Synthetic oligonucleotide
ugacgucagagcccaugac

SEQ ID NO: 166667 - RNA, 19 nt, Artificial Sequence
  Description of Artificial Sequence: Synthetic oligonucleotide
ccgaacucacucucgaagc

SEQ ID NO: 166668 - RNA, 19 nt, Artificial Sequence
  Description of Artificial Sequence: Synthetic oligonucleotide
caucauaaacgcgugaccu

SEQ ID NO: 166669 - RNA, 19 nt, Artificial Sequence
  Description of Artificial Sequence: Synthetic oligonucleotide
uaccgucuugucuggccag

SEQ ID NO: 166670 - RNA, 19 nt, Artificial Sequence
  Description of Artificial Sequence: Synthetic oligonucleotide
caggcgccuccccaaaucc

SEQ ID NO: 166671 - RNA, 19 nt, Artificial Sequence
  Description of Artificial Sequence: Synthetic oligonucleotide
agauaccgucuugucuggc

SEQ ID NO: 166672 - RNA, 19 nt, Artificial Sequence
  Description of Artificial Sequence: Synthetic oligonucleotide
ccguggauugccaaaguac

SEQ ID NO: 166673 - RNA, 19 nt, Artificial Sequence
  Description of Artificial Sequence: Synthetic oligonucleotide
acagggcgcagggugaaag

SEQ ID NO: 166674 - RNA, 19 nt, Artificial Sequence
  Description of Artificial Sequence: Synthetic oligonucleotide
guacaggucuacgggguag

SEQ ID NO: 166675 - RNA, 19 nt, Artificial Sequence
  Description of Artificial Sequence: Synthetic oligonucleotide
gugccaucccaaucagaag

SEQ ID NO: 166676 - RNA, 19 nt, Artificial Sequence
  Description of Artificial Sequence: Synthetic oligonucleotide
aacccaaccggaaguuacu

SEQ ID NO: 166677 - RNA, 19 nt, Artificial Sequence
  Description of Artificial Sequence: Synthetic oligonucleotide
ucuacgggguaguccucca

SEQ ID NO: 166678 - RNA, 19 nt, Artificial Sequence
  Description of Artificial Sequence: Synthetic oligonucleotide
gccuucaagucacaccgag

SEQ ID NO: 166679 - RNA, 19 nt, Artificial Sequence
  Description of Artificial Sequence: Synthetic oligonucleotide
aucuacgguguguguggag

SEQ ID NO: 166680 - RNA, 19 nt, Artificial Sequence
  Description of Artificial Sequence: Synthetic oligonucleotide
gguugauauuguucuccgc

SEQ ID NO: 166681 - RNA, 19 nt, Artificial Sequence
  Description of Artificial Sequence: Synthetic oligonucleotide
cuugccuagcuagcgugag

SEQ ID NO: 166682 - RNA, 19 nt, Artificial Sequence
  Description of Artificial Sequence: Synthetic oligonucleotide
ggugacggaccguggauug

SEQ ID NO: 166683 - RNA, 19 nt, Artificial Sequence
  Description of Artificial Sequence: Synthetic oligonucleotide
accguggauugccaaagua

SEQ ID NO: 166684 - RNA, 19 nt, Artificial Sequence
  Description of Artificial Sequence: Synthetic oligonucleotide
acgcuggcuuugugcacgc

SEQ ID NO: 166685 - RNA, 19 nt, Artificial Sequence
  Description of Artificial Sequence: Synthetic oligonucleotide
cuuccgaacucacucucga

SEQ ID NO: 166686 - RNA, 19 nt, Artificial Sequence
  Description of Artificial Sequence: Synthetic oligonucleotide
agccauuucggaugagguu

SEQ ID NO: 166687 - RNA, 19 nt, Artificial Sequence
  Description of Artificial Sequence: Synthetic oligonucleotide
gcaagcgauggauagucca

SEQ ID NO: 166688 - RNA, 19 nt, Artificial Sequence
  Description of Artificial Sequence: Synthetic oligonucleotide
acugagccguuguaggauu

SEQ ID NO: 166689 - RNA, 19 nt, Artificial Sequence
  Description of Artificial Sequence: Synthetic oligonucleotide
caccgagaggugacggacc

SEQ ID NO: 166690 - RNA, 19 nt, Artificial Sequence
  Description of Artificial Sequence: Synthetic oligonucleotide
acucuucuagauaccgucu

SEQ ID NO: 166691 - RNA, 19 nt, Artificial Sequence
  Description of Artificial Sequence: Synthetic oligonucleotide
guagcagggcccuaaggcu

SEQ ID NO: 166692 - RNA, 19 nt, Artificial Sequence
  Description of Artificial Sequence: Synthetic oligonucleotide
ggcggaacccgaaggaagg

SEQ ID NO: 166693 - RNA, 19 nt, Artificial Sequence
  Description of Artificial Sequence: Synthetic oligonucleotide
aucguguggcugaaccagg

SEQ ID NO: 166694 - RNA, 19 nt, Artificial Sequence
  Description of Artificial Sequence: Synthetic oligonucleotide
auaguccaucugguuggac

SEQ ID NO: 166695 - RNA, 19 nt, Artificial Sequence
  Description of Artificial Sequence: Synthetic oligonucleotide
guccguugaacaguuacaa

SEQ ID NO: 166696 - RNA, 19 nt, Artificial Sequence
  Description of Artificial Sequence: Synthetic oligonucleotide
gucacaccgagaggugacg

SEQ ID NO: 166697 - RNA, 19 nt, Artificial Sequence
  Description of Artificial Sequence: Synthetic oligonucleotide
guaucucggugccguguag

SEQ ID NO: 166698 - RNA, 19 nt, Artificial Sequence
  Description of Artificial Sequence: Synthetic oligonucleotide
gucgcggugaagaagagau

SEQ ID NO: 166699 - RNA, 19 nt, Artificial Sequence
  Description of Artificial Sequence: Synthetic oligonucleotide
aacaggcgccuccccaaau

SEQ ID NO: 166700 - RNA, 19 nt, Artificial Sequence
  Description of Artificial Sequence: Synthetic oligonucleotide
caccaucuuggcaggucgc

SEQ ID NO: 166701 - RNA, 19 nt, Artificial Sequence
  Description of Artificial Sequence: Synthetic oligonucleotide
aacugucgacucuguccgu

SEQ ID NO: 166702 - RNA, 19 nt, Artificial Sequence
  Description of Artificial Sequence: Synthetic oligonucleotide
gagaggugacggaccgugg

SEQ ID NO: 166703 - RNA, 19 nt, Artificial Sequence
  Description of Artificial Sequence: Synthetic oligonucleotide
uaggacgcccuuguuccug

SEQ ID NO: 166704 - RNA, 19 nt, Artificial Sequence
  Description of Artificial Sequence: Synthetic oligonucleotide
gcgaaaucuacggugugug

SEQ ID NO: 166705 - RNA, 19 nt, Artificial Sequence
  Description of Artificial Sequence: Synthetic oligonucleotide
uuccgaacucacucucgaa

SEQ ID NO: 166706 - RNA, 19 nt, Artificial Sequence
  Description of Artificial Sequence: Synthetic oligonucleotide
cugauagcuccacuuuaga

SEQ ID NO: 166707 - RNA, 19 nt, Artificial Sequence
  Description of Artificial Sequence: Synthetic oligonucleotide
uacaggucuacgggguagu

SEQ ID NO: 166708 - RNA, 19 nt, Artificial Sequence
  Description of Artificial Sequence: Synthetic oligonucleotide
gguuacgggacacccucug

SEQ ID NO: 166709 - RNA, 19 nt, Artificial Sequence
  Description of Artificial Sequence: Synthetic oligonucleotide
cuacaucauaaacgcguga

SEQ ID NO: 166710 - RNA, 19 nt, Artificial Sequence
  Description of Artificial Sequence: Synthetic oligonucleotide
ucuguccgugagaggcagc

SEQ ID NO: 166711 - RNA, 19 nt, Artificial Sequence
  Description of Artificial Sequence: Synthetic oligonucleotide
gucuacgggguaguccucc

SEQ ID NO: 166712 - RNA, 19 nt, Artificial Sequence
  Description of Artificial Sequence: Synthetic oligonucleotide
ucguaucucggugccgugu

SEQ ID NO: 166713 - RNA, 19 nt, Artificial Sequence
  Description of Artificial Sequence: Synthetic oligonucleotide
uagcuagcgugagcaagug

SEQ ID NO: 166714 - RNA, 19 nt, Artificial Sequence
  Description of Artificial Sequence: Synthetic oligonucleotide
ggcaucacgguuacgggac

SEQ ID NO: 166715 - RNA, 19 nt, Artificial Sequence
  Description of Artificial Sequence: Synthetic oligonucleotide
caggagugccaucccaauc

SEQ ID NO: 166716 - RNA, 19 nt, Artificial Sequence
  Description of Artificial Sequence: Synthetic oligonucleotide
cuuuagaccggaugcuacu

SEQ ID NO: 166717 - RNA, 19 nt, Artificial Sequence
  Description of Artificial Sequence: Synthetic oligonucleotide
cucguugaaacugucgacu

SEQ ID NO: 166718 - RNA, 19 nt, Artificial Sequence
  Description of Artificial Sequence: Synthetic oligonucleotide
ggaccguggauugccaaag

SEQ ID NO: 166719 - RNA, 19 nt, Artificial Sequence
  Description of Artificial Sequence: Synthetic oligonucleotide
gagcauaggacgcccuugu

SEQ ID NO: 166720 - RNA, 19 nt, Artificial Sequence
  Description of Artificial Sequence: Synthetic oligonucleotide
accgucuugucuggccagg

SEQ ID NO: 166721 - RNA, 19 nt, Artificial Sequence
  Description of Artificial Sequence: Synthetic oligonucleotide
cuuuucgccaaccaaucuu

SEQ ID NO: 166722 - RNA, 19 nt, Artificial Sequence
  Description of Artificial Sequence: Synthetic oligonucleotide
auaggacgcccuuguuccu

SEQ ID NO: 166723 - RNA, 19 nt, Artificial Sequence
  Description of Artificial Sequence: Synthetic oligonucleotide
ugguuggacgcaguguauu

SEQ ID NO: 166724 - RNA, 19 nt, Artificial Sequence
  Description of Artificial Sequence: Synthetic oligonucleotide
aagggcccguagauccuuc

SEQ ID NO: 166725 - RNA, 19 nt, Artificial Sequence
  Description of Artificial Sequence: Synthetic oligonucleotide
uggauuggucucguaucuc

SEQ ID NO: 166726 - RNA, 19 nt, Artificial Sequence
  Description of Artificial Sequence: Synthetic oligonucleotide
acaggucuacgggguaguc

SEQ ID NO: 166727 - RNA, 19 nt, Artificial Sequence
  Description of Artificial Sequence: Synthetic oligonucleotide
ugguacccgcucugguucu

SEQ ID NO: 166728 - RNA, 19 nt, Artificial Sequence
  Description of Artificial Sequence: Synthetic oligonucleotide
gguaucagggcuguaaaau

SEQ ID NO: 166729 - RNA, 19 nt, Artificial Sequence
  Description of Artificial Sequence: Synthetic oligonucleotide
cuagcgugagcaaguggaa

SEQ ID NO: 166730 - RNA, 19 nt, Artificial Sequence
  Description of Artificial Sequence: Synthetic oligonucleotide
cauuucggaugagguuugc

SEQ ID NO: 166731 - RNA, 19 nt, Artificial Sequence
  Description of Artificial Sequence: Synthetic oligonucleotide
ccguuguaggauuuguuga

SEQ ID NO: 166732 - RNA, 19 nt, Artificial Sequence
  Description of Artificial Sequence: Synthetic oligonucleotide
ccccaauguaaccugcaug

SEQ ID NO: 166733 - RNA, 19 nt, Artificial Sequence
  Description of Artificial Sequence: Synthetic oligonucleotide
uccgaaggacaugggugcu

SEQ ID NO: 166734 - RNA, 19 nt, Artificial Sequence
  Description of Artificial Sequence: Synthetic oligonucleotide
cccgaaacccaaccggaag

SEQ ID NO: 166735 - RNA, 19 nt, Artificial Sequence
  Description of Artificial Sequence: Synthetic oligonucleotide
cuucuagauaccgucuugu

SEQ ID NO: 166736 - RNA, 19 nt, Artificial Sequence
  Description of Artificial Sequence: Synthetic oligonucleotide
cagagcccgcagauguaug

SEQ ID NO: 166737 - RNA, 19 nt, Artificial Sequence
  Description of Artificial Sequence: Synthetic oligonucleotide
gccguguaggagaaaggag

SEQ ID NO: 166738 - RNA, 19 nt, Artificial Sequence
  Description of Artificial Sequence: Synthetic oligonucleotide
gcauugauaaucaguugaa

SEQ ID NO: 166739 - RNA, 19 nt, Artificial Sequence
  Description of Artificial Sequence: Synthetic oligonucleotide
cagacugauagcuccacuu

SEQ ID NO: 166740 - RNA, 19 nt, Artificial Sequence
  Description of Artificial Sequence: Synthetic oligonucleotide
caucacgguuacgggacac

SEQ ID NO: 166741 - RNA, 19 nt, Artificial Sequence
  Description of Artificial Sequence: Synthetic oligonucleotide
ccucguugaaacugucgac

SEQ ID NO: 166742 - RNA, 19 nt, Artificial Sequence
  Description of Artificial Sequence: Synthetic oligonucleotide
cuacgggguaguccuccac

SEQ ID NO: 166743 - RNA, 19 nt, Artificial Sequence
  Description of Artificial Sequence: Synthetic oligonucleotide
gucucguaucucggugccg

SEQ ID NO: 166744 - RNA, 19 nt, Artificial Sequence
  Description of Artificial Sequence: Synthetic oligonucleotide
gcgcaccugaagcuggaag

SEQ ID NO: 166745 - RNA, 19 nt, Artificial Sequence
  Description of Artificial Sequence: Synthetic oligonucleotide
cccaaccggaaguuacuag

SEQ ID NO: 166746 - RNA, 19 nt, Artificial Sequence
  Description of Artificial Sequence: Synthetic oligonucleotide
cugucagguuggaccuccc

SEQ ID NO: 166747 - RNA, 19 nt, Artificial Sequence
  Description of Artificial Sequence: Synthetic oligonucleotide
cuacccacgugaccaccuc

SEQ ID NO: 166748 - RNA, 19 nt, Artificial Sequence
  Description of Artificial Sequence: Synthetic oligonucleotide
gucagguuggaccucccau

SEQ ID NO: 166749 - RNA, 19 nt, Artificial Sequence
  Description of Artificial Sequence: Synthetic oligonucleotide
ggcucaccgaaaucuccug

SEQ ID NO: 166750 - RNA, 19 nt, Artificial Sequence
  Description of Artificial Sequence: Synthetic oligonucleotide
cucguaucucggugccgug

SEQ ID NO: 166751 - RNA, 19 nt, Artificial Sequence
  Description of Artificial Sequence: Synthetic oligonucleotide
gcgauggauaguccaucug

SEQ ID NO: 166752 - RNA, 19 nt, Artificial Sequence
  Description of Artificial Sequence: Synthetic oligonucleotide
ccauuucggaugagguuug

SEQ ID NO: 166753 - RNA, 19 nt, Artificial Sequence
  Description of Artificial Sequence: Synthetic oligonucleotide
gagccaguaaucagaucua

SEQ ID NO: 166754 - RNA, 19 nt, Artificial Sequence
  Description of Artificial Sequence: Synthetic oligonucleotide
caagcgauggauaguccau

SEQ ID NO: 166755 - RNA, 19 nt, Artificial Sequence
  Description of Artificial Sequence: Synthetic oligonucleotide
agcauaggacgcccuuguu

SEQ ID NO: 166756 - RNA, 19 nt, Artificial Sequence
  Description of Artificial Sequence: Synthetic oligonucleotide
uuggcaggucgcggugaag

SEQ ID NO: 166757 - RNA, 19 nt, Artificial Sequence
  Description of Artificial Sequence: Synthetic oligonucleotide
acggaccguggauugccaa

SEQ ID NO: 166758 - RNA, 19 nt, Artificial Sequence
  Description of Artificial Sequence: Synthetic oligonucleotide
cauugauaaucaguugaau

SEQ ID NO: 166759 - RNA, 19 nt, Artificial Sequence
  Description of Artificial Sequence: Synthetic oligonucleotide
guucuucgucacagcgaag

SEQ ID NO: 166760 - RNA, 19 nt, Artificial Sequence
  Description of Artificial Sequence: Synthetic oligonucleotide
cgcgauguggggcacauca

SEQ ID NO: 166761 - RNA, 19 nt, Artificial Sequence
  Description of Artificial Sequence: Synthetic oligonucleotide
gaggugacggaccguggau

SEQ ID NO: 166762 - RNA, 19 nt, Artificial Sequence
  Description of Artificial Sequence: Synthetic oligonucleotide
ccaaccggaaguuacuagu

SEQ ID NO: 166763 - RNA, 19 nt, Artificial Sequence
  Description of Artificial Sequence: Synthetic oligonucleotide
gcccgcagauguauguucc

SEQ ID NO: 166764 - RNA, 19 nt, Artificial Sequence
  Description of Artificial Sequence: Synthetic oligonucleotide
cacuuuagaccggaugcua

SEQ ID NO: 166765 - RNA, 19 nt, Artificial Sequence
  Description of Artificial Sequence: Synthetic oligonucleotide
gguugcagcugcacucccc

SEQ ID NO: 166766 - RNA, 19 nt, Artificial Sequence
  Description of Artificial Sequence: Synthetic oligonucleotide
gcccaugacacuggagccc

SEQ ID NO: 166767 - RNA, 19 nt, Artificial Sequence
  Description of Artificial Sequence: Synthetic oligonucleotide
augcuacuguaugcauuga

SEQ ID NO: 166768 - RNA, 19 nt, Artificial Sequence
  Description of Artificial Sequence: Synthetic oligonucleotide
acccaaccggaaguuacua

SEQ ID NO: 166769 - RNA, 19 nt, Artificial Sequence
  Description of Artificial Sequence: Synthetic oligonucleotide
cagggcgcagggugaaaga

SEQ ID NO: 166770 - RNA, 19 nt, Artificial Sequence
  Description of Artificial Sequence: Synthetic oligonucleotide
ccggaagcccacagggcgc

SEQ ID NO: 166771 - RNA, 19 nt, Artificial Sequence
  Description of Artificial Sequence: Synthetic oligonucleotide
gaccguggauugccaaagu

SEQ ID NO: 166772 - RNA, 19 nt, Artificial Sequence
  Description of Artificial Sequence: Synthetic oligonucleotide
ggcaagcgauggauagucc

SEQ ID NO: 166773 - RNA, 19 nt, Artificial Sequence
  Description of Artificial Sequence: Synthetic oligonucleotide
agcgcgauguggggcacau

SEQ ID NO: 166774 - RNA, 19 nt, Artificial Sequence
  Description of Artificial Sequence: Synthetic oligonucleotide
gacggaccguggauugcca

SEQ ID NO: 166775 - RNA, 19 nt, Artificial Sequence
  Description of Artificial Sequence: Synthetic oligonucleotide
ggcgcaggaaaagcuguca

SEQ ID NO: 166776 - RNA, 19 nt, Artificial Sequence
  Description of Artificial Sequence: Synthetic oligonucleotide
cccguagauccuuccgaac

SEQ ID NO: 166777 - RNA, 19 nt, Artificial Sequence
  Description of Artificial Sequence: Synthetic oligonucleotide
agccguuguaggauuuguu

SEQ ID NO: 166778 - RNA, 19 nt, Artificial Sequence
  Description of Artificial Sequence: Synthetic oligonucleotide
uggcccggcaugugcugau

SEQ ID NO: 166779 - RNA, 19 nt, Artificial Sequence
  Description of Artificial Sequence: Synthetic oligonucleotide
acccgaaacccaaccggaa

SEQ ID NO: 166780 - RNA, 19 nt, Artificial Sequence
  Description of Artificial Sequence: Synthetic oligonucleotide
cugucuggucgccuggccu

SEQ ID NO: 166781 - RNA, 19 nt, Artificial Sequence
  Description of Artificial Sequence: Synthetic oligonucleotide
ccccgcguccacugcauag

SEQ ID NO: 166782 - RNA, 19 nt, Artificial Sequence
  Description of Artificial Sequence: Synthetic oligonucleotide
aggaugccguguccccaau

SEQ ID NO: 166783 - RNA, 19 nt, Artificial Sequence
  Description of Artificial Sequence: Synthetic oligonucleotide
gugcacgcagacucuucua

SEQ ID NO: 166784 - RNA, 19 nt, Artificial Sequence
  Description of Artificial Sequence: Synthetic oligonucleotide
caauggugucuacccacgu

SEQ ID NO: 166785 - RNA, 19 nt, Artificial Sequence
  Description of Artificial Sequence: Synthetic oligonucleotide
gcccguagauccuuccgaa

SEQ ID NO: 166786 - RNA, 19 nt, Artificial Sequence
  Description of Artificial Sequence: Synthetic oligonucleotide
ccggaugcuacuguaugca

SEQ ID NO: 166787 - RNA, 19 nt, Artificial Sequence
  Description of Artificial Sequence: Synthetic oligonucleotide
acgugaccaccuccucuuu

SEQ ID NO: 166788 - RNA, 19 nt, Artificial Sequence
  Description of Artificial Sequence: Synthetic oligonucleotide
ggaugccguguccccaauc

SEQ ID NO: 166789 - RNA, 19 nt, Artificial Sequence
  Description of Artificial Sequence: Synthetic oligonucleotide
cagguaacuggggucacau

SEQ ID NO: 166790 - RNA, 19 nt, Artificial Sequence
  Description of Artificial Sequence: Synthetic oligonucleotide
uggccaucguguggcugaa

SEQ ID NO: 166791 - RNA, 19 nt, Artificial Sequence
  Description of Artificial Sequence: Synthetic oligonucleotide
ggcgaaaucuacggugugu

SEQ ID NO: 166792 - RNA, 19 nt, Artificial Sequence
  Description of Artificial Sequence: Synthetic oligonucleotide
cacgguuacgggacacccu

SEQ ID NO: 166793 - RNA, 19 nt, Artificial Sequence
  Description of Artificial Sequence: Synthetic oligonucleotide
cauccuuggcccggcaugu

SEQ ID NO: 166794 - RNA, 19 nt, Artificial Sequence
  Description of Artificial Sequence: Synthetic oligonucleotide
caacaggcgccuccccaaa

SEQ ID NO: 166795 - RNA, 19 nt, Artificial Sequence
  Description of Artificial Sequence: Synthetic oligonucleotide
gcucaccgaaaucuccugu

SEQ ID NO: 166796 - RNA, 19 nt, Artificial Sequence
  Description of Artificial Sequence: Synthetic oligonucleotide
ggucgcggugaagaagaga

SEQ ID NO: 166797 - RNA, 19 nt, Artificial Sequence
  Description of Artificial Sequence: Synthetic oligonucleotide
acucgcagaagggcccgua

SEQ ID NO: 166798 - RNA, 19 nt, Artificial Sequence
  Description of Artificial Sequence: Synthetic oligonucleotide
cgcggugaagaagagauua

SEQ ID NO: 166799 - RNA, 19 nt, Artificial Sequence
  Description of Artificial Sequence: Synthetic oligonucleotide
gcacuugcacacucuggcu

SEQ ID NO: 166800 - RNA, 19 nt, Artificial Sequence
  Description of Artificial Sequence: Synthetic oligonucleotide
ccgaaacccaaccggaagu

SEQ ID NO: 166801 - RNA, 19 nt, Artificial Sequence
  Description of Artificial Sequence: Synthetic oligonucleotide
cccggcaugugcugauguc

SEQ ID NO: 166802 - RNA, 19 nt, Artificial Sequence
  Description of Artificial Sequence: Synthetic oligonucleotide
cguguccccaaucuucaga

SEQ ID NO: 166803 - RNA, 19 nt, Artificial Sequence
  Description of Artificial Sequence: Synthetic oligonucleotide
cugguuggacgcaguguau

SEQ ID NO: 166804 - RNA, 19 nt, Artificial Sequence
  Description of Artificial Sequence: Synthetic oligonucleotide
gcggugaagaagagauuaa

SEQ ID NO: 166805 - RNA, 19 nt, Artificial Sequence
  Description of Artificial Sequence: Synthetic oligonucleotide
gguugaucccagacugaua

SEQ ID NO: 166806 - RNA, 19 nt, Artificial Sequence
  Description of Artificial Sequence: Synthetic oligonucleotide
ccgaaaucuccuguggugu

SEQ ID NO: 166807 - RNA, 19 nt, Artificial Sequence
  Description of Artificial Sequence: Synthetic oligonucleotide
gcacucgcaucuggugccc

SEQ ID NO: 166808 - RNA, 19 nt, Artificial Sequence
  Description of Artificial Sequence: Synthetic oligonucleotide
gcagauggcggaacccgaa

SEQ ID NO: 166809 - RNA, 19 nt, Artificial Sequence
  Description of Artificial Sequence: Synthetic oligonucleotide
cugagccguuguaggauuu

SEQ ID NO: 166810 - RNA, 19 nt, Artificial Sequence
  Description of Artificial Sequence: Synthetic oligonucleotide
ccgugagaggcagcagaug

SEQ ID NO: 166811 - RNA, 19 nt, Artificial Sequence
  Description of Artificial Sequence: Synthetic oligonucleotide
guggggcacaucauccguu

SEQ ID NO: 166812 - RNA, 19 nt, Artificial Sequence
  Description of Artificial Sequence: Synthetic oligonucleotide
gguacccgcucugguucuc

SEQ ID NO: 166813 - RNA, 19 nt, Artificial Sequence
  Description of Artificial Sequence: Synthetic oligonucleotide
cguugaaacugucgacucu

SEQ ID NO: 166814 - RNA, 19 nt, Artificial Sequence
  Description of Artificial Sequence: Synthetic oligonucleotide
gcuaagggguaggcuccga

SEQ ID NO: 166815 - RNA, 19 nt, Artificial Sequence
  Description of Artificial Sequence: Synthetic oligonucleotide
ggucuacgggguaguccuc

SEQ ID NO: 166816 - RNA, 19 nt, Artificial Sequence
  Description of Artificial Sequence: Synthetic oligonucleotide
cguaucucggugccgugua

SEQ ID NO: 166817 - RNA, 19 nt, Artificial Sequence
  Description of Artificial Sequence: Synthetic oligonucleotide
ggggcacaucauccguugu

SEQ ID NO: 166818 - RNA, 19 nt, Artificial Sequence
  Description of Artificial Sequence: Synthetic oligonucleotide
ccacuuuagaccggaugcu

SEQ ID NO: 166819 - RNA, 19 nt, Artificial Sequence
  Description of Artificial Sequence: Synthetic oligonucleotide
cggaccguggauugccaaa

SEQ ID NO: 166820 - RNA, 19 nt, Artificial Sequence
  Description of Artificial Sequence: Synthetic oligonucleotide
ccucugaccaggguaggau

SEQ ID NO: 166821 - RNA, 19 nt, Artificial Sequence
  Description of Artificial Sequence: Synthetic oligonucleotide
ggccacggucacugcagau

SEQ ID NO: 166822 - RNA, 19 nt, Artificial Sequence
  Description of Artificial Sequence: Synthetic oligonucleotide
ggccaucguguggcugaac

SEQ ID NO: 166823 - RNA, 19 nt, Artificial Sequence
  Description of Artificial Sequence: Synthetic oligonucleotide
ggcgcaccugaagcuggaa

SEQ ID NO: 166824 - RNA, 19 nt, Artificial Sequence
  Description of Artificial Sequence: Synthetic oligonucleotide
cccuugcugcuaaggggua

SEQ ID NO: 166825 - RNA, 19 nt, Artificial Sequence
  Description of Artificial Sequence: Synthetic oligonucleotide
gcgauguggggcacaucau

SEQ ID NO: 166826 - RNA, 19 nt, Artificial Sequence
  Description of Artificial Sequence: Synthetic oligonucleotide
cgguugaucccagacugau

SEQ ID NO: 166827 - RNA, 19 nt, Artificial Sequence
  Description of Artificial Sequence: Synthetic oligonucleotide
gcuccacuuuagaccggau

SEQ ID NO: 166828 - RNA, 19 nt, Artificial Sequence
  Description of Artificial Sequence: Synthetic oligonucleotide
gcgcgauguggggcacauc

SEQ ID NO: 166829 - RNA, 19 nt, Artificial Sequence
  Description of Artificial Sequence: Synthetic oligonucleotide
cgguuacgggacacccucu

SEQ ID NO: 166830 - RNA, 19 nt, Artificial Sequence
  Description of Artificial Sequence: Synthetic oligonucleotide
aauauuguuacacugauuc

SEQ ID NO: 166831 - RNA, 19 nt, Artificial Sequence
  Description of Artificial Sequence: Synthetic oligonucleotide
aaauguaccaccaacaugg

SEQ ID NO: 166832 - RNA, 19 nt, Artificial Sequence
  Description of Artificial Sequence: Synthetic oligonucleotide
ugcaauuugacauuaagcc

SEQ ID NO: 166833 - RNA, 19 nt, Artificial Sequence
  Description of Artificial Sequence: Synthetic oligonucleotide
aaaguagauacuuucauca

SEQ ID NO: 166834 - RNA, 19 nt, Artificial Sequence
  Description of Artificial Sequence: Synthetic oligonucleotide
uauauguagagauggaugg

SEQ ID NO: 166835 - RNA, 19 nt, Artificial Sequence
  Description of Artificial Sequence: Synthetic oligonucleotide
aagacuaaucuucaucacc

SEQ ID NO: 166836 - RNA, 19 nt, Artificial Sequence
  Description of Artificial Sequence: Synthetic oligonucleotide
uaugcuguuacauauaaga

SEQ ID NO: 166837 - RNA, 19 nt, Artificial Sequence
  Description of Artificial Sequence: Synthetic oligonucleotide
auuauuacuggcuacaugu

SEQ ID NO: 166838 - RNA, 19 nt, Artificial Sequence
  Description of Artificial Sequence: Synthetic oligonucleotide
cuugaaacagauuugagac

SEQ ID NO: 166839 - RNA, 19 nt, Artificial Sequence
  Description of Artificial Sequence: Synthetic oligonucleotide
aauaaugccauuuuaugau

SEQ ID NO: 166840 - RNA, 19 nt, Artificial Sequence
  Description of Artificial Sequence: Synthetic oligonucleotide
uuaguauuuaaaaggauac

SEQ ID NO: 166841 - RNA, 19 nt, Artificial Sequence
  Description of Artificial Sequence: Synthetic oligonucleotide
aauuuaauaccaugugauc

SEQ ID NO: 166842 - RNA, 19 nt, Artificial Sequence
  Description of Artificial Sequence: Synthetic oligonucleotide
uugauacuaauuuaaaaug

SEQ ID NO: 166843 - RNA, 19 nt, Artificial Sequence
  Description of Artificial Sequence: Synthetic oligonucleotide
aaugacaugaacuuuuaaa

SEQ ID NO: 166844 - RNA, 19 nt, Artificial Sequence
  Description of Artificial Sequence: Synthetic oligonucleotide
uacucaguuauacaaagcc

SEQ ID NO: 166845 - RNA, 19 nt, Artificial Sequence
  Description of Artificial Sequence: Synthetic oligonucleotide
aagcuauauaaccaacucg

SEQ ID NO: 166846 - RNA, 19 nt, Artificial Sequence
  Description of Artificial Sequence: Synthetic oligonucleotide
ucuaagucgacauauuccc

SEQ ID NO: 166847 - RNA, 19 nt, Artificial Sequence
  Description of Artificial Sequence: Synthetic oligonucleotide
aauugcaccaauaacuuag

SEQ ID NO: 166848 - RNA, 19 nt, Artificial Sequence
  Description of Artificial Sequence: Synthetic oligonucleotide
agaacauuaucaccuaugg

SEQ ID NO: 166849 - RNA, 19 nt, Artificial Sequence
  Description of Artificial Sequence: Synthetic oligonucleotide
uaauuauagugcaaaacca

SEQ ID NO: 166850 - RNA, 19 nt, Artificial Sequence
  Description of Artificial Sequence: Synthetic oligonucleotide
caaagaacgcuuaucaagg

SEQ ID NO: 166851 - RNA, 19 nt, Artificial Sequence
  Description of Artificial Sequence: Synthetic oligonucleotide
aaagcgaucuccgaacggc

SEQ ID NO: 166852 - RNA, 19 nt, Artificial Sequence
  Description of Artificial Sequence: Synthetic oligonucleotide
ggguuuauaaucuuaaugc

SEQ ID NO: 166853 - RNA, 19 nt, Artificial Sequence
  Description of Artificial Sequence: Synthetic oligonucleotide
ugccaaaugacuuagcacu

SEQ ID NO: 166854 - RNA, 19 nt, Artificial Sequence
  Description of Artificial Sequence: Synthetic oligonucleotide
uuaauaugcuguuacauau

SEQ ID NO: 166855 - RNA, 19 nt, Artificial Sequence
  Description of Artificial Sequence: Synthetic oligonucleotide
uaugaaauugcaccaauaa

SEQ ID NO: 166856 - RNA, 19 nt, Artificial Sequence
  Description of Artificial Sequence: Synthetic oligonucleotide
cuuaaucucacacucgcgg

SEQ ID NO: 166857 - RNA, 19 nt, Artificial Sequence
  Description of Artificial Sequence: Synthetic oligonucleotide
auuaacgaagccuugagau

SEQ ID NO: 166858 - RNA, 19 nt, Artificial Sequence
  Description of Artificial Sequence: Synthetic oligonucleotide
cagguauuaauuauagugc

SEQ ID NO: 166859 - RNA, 19 nt, Artificial Sequence
  Description of Artificial Sequence: Synthetic oligonucleotide
aaaauugauacuaauuuaa

SEQ ID NO: 166860 - RNA, 19 nt, Artificial Sequence
  Description of Artificial Sequence: Synthetic oligonucleotide
acaagauaagcuugcauag

SEQ ID NO: 166861 - RNA, 19 nt, Artificial Sequence
  Description of Artificial Sequence: Synthetic oligonucleotide
aauaugcuguuacauauaa

SEQ ID NO: 166862 - RNA, 19 nt, Artificial Sequence
  Description of Artificial Sequence: Synthetic oligonucleotide
gcagguauuaauuauagug

SEQ ID NO: 166863 - RNA, 19 nt, Artificial Sequence
  Description of Artificial Sequence: Synthetic oligonucleotide
gagaguguaaacaugugag

SEQ ID NO: 166864 - RNA, 19 nt, Artificial Sequence
  Description of Artificial Sequence: Synthetic oligonucleotide
ucuaagacuaaucuucauc

SEQ ID NO: 166865 - RNA, 19 nt, Artificial Sequence
  Description of Artificial Sequence: Synthetic oligonucleotide
aauuauuacuggcuacaug

SEQ ID NO: 166866 - RNA, 19 nt, Artificial Sequence
  Description of Artificial Sequence: Synthetic oligonucleotide
auaguacucaguuauacaa

SEQ ID NO: 166867 - RNA, 19 nt, Artificial Sequence
  Description of Artificial Sequence: Synthetic oligonucleotide
uaugaccaagaaaaguaag

SEQ ID NO: 166868 - RNA, 19 nt, Artificial Sequence
  Description of Artificial Sequence: Synthetic oligonucleotide
aagauaagcuugcauagaa

SEQ ID NO: 166869 - RNA, 19 nt, Artificial Sequence
  Description of Artificial Sequence: Synthetic oligonucleotide
aagaacgcuuaucaaggag

SEQ ID NO: 166870 - RNA, 19 nt, Artificial Sequence
  Description of Artificial Sequence: Synthetic oligonucleotide
ugugccaaaugacuuagca

SEQ ID NO: 166871 - RNA, 19 nt, Artificial Sequence
  Description of Artificial Sequence: Synthetic oligonucleotide
cuaagacuaaucuucauca

SEQ ID NO: 166872 - RNA, 19 nt, Artificial Sequence
  Description of Artificial Sequence: Synthetic oligonucleotide
uagaacauuaucaccuaug

SEQ ID NO: 166873 - RNA, 19 nt, Artificial Sequence
  Description of Artificial Sequence: Synthetic oligonucleotide
ucauucauaguacucaguu

SEQ ID NO: 166874 - RNA, 19 nt, Artificial Sequence
  Description of Artificial Sequence: Synthetic oligonucleotide
guaagcaugugccaaauga

SEQ ID NO: 166875 - RNA, 19 nt, Artificial Sequence
  Description of Artificial Sequence: Synthetic oligonucleotide
aauuagaagcaguguauau

SEQ ID NO: 166876 - RNA, 19 nt, Artificial Sequence
  Description of Artificial Sequence: Synthetic oligonucleotide
uaaugaauaugaccaagaa

SEQ ID NO: 166877 - RNA, 19 nt, Artificial Sequence
  Description of Artificial Sequence: Synthetic oligonucleotide
uuuaccaugcacgacuuca

SEQ ID NO: 166878 - RNA, 19 nt, Artificial Sequence
  Description of Artificial Sequence: Synthetic oligonucleotide
auaccauccaaucugugga

SEQ ID NO: 166879 - RNA, 19 nt, Artificial Sequence
  Description of Artificial Sequence: Synthetic oligonucleotide
agguauuaauuauagugca

SEQ ID NO: 166880 - RNA, 19 nt, Artificial Sequence
  Description of Artificial Sequence: Synthetic oligonucleotide
acgacuucaaauauauaac

SEQ ID NO: 166881 - RNA, 19 nt, Artificial Sequence
  Description of Artificial Sequence: Synthetic oligonucleotide
uaacgaagccuugagauca

SEQ ID NO: 166882 - RNA, 19 nt, Artificial Sequence
  Description of Artificial Sequence: Synthetic oligonucleotide
ugaguuauguauaccaauu

SEQ ID NO: 166883 - RNA, 19 nt, Artificial Sequence
  Description of Artificial Sequence: Synthetic oligonucleotide
auucauucauaguacucag

SEQ ID NO: 166884 - RNA, 19 nt, Artificial Sequence
  Description of Artificial Sequence: Synthetic oligonucleotide
aagaaaggguauuaguauu

SEQ ID NO: 166885 - RNA, 19 nt, Artificial Sequence
  Description of Artificial Sequence: Synthetic oligonucleotide
agaacgcuuaucaaggagg

SEQ ID NO: 166886 - RNA, 19 nt, Artificial Sequence
  Description of Artificial Sequence: Synthetic oligonucleotide
uauuaacgaagccuugaga

SEQ ID NO: 166887 - RNA, 19 nt, Artificial Sequence
  Description of Artificial Sequence: Synthetic oligonucleotide
auucacgaguucuucuucg

SEQ ID NO: 166888 - RNA, 19 nt, Artificial Sequence
  Description of Artificial Sequence: Synthetic oligonucleotide
aauuauagugcaaaaccau

SEQ ID NO: 166889 - RNA, 19 nt, Artificial Sequence
  Description of Artificial Sequence: Synthetic oligonucleotide
caaccugguagcuuaaggc

SEQ ID NO: 166890 - RNA, 19 nt, Artificial Sequence
  Description of Artificial Sequence: Synthetic oligonucleotide
ugcacgacuucaaauauau

SEQ ID NO: 166891 - RNA, 19 nt, Artificial Sequence
  Description of Artificial Sequence: Synthetic oligonucleotide
aaaaguaagcaugugccaa

SEQ ID NO: 166892 - RNA, 19 nt, Artificial Sequence
  Description of Artificial Sequence: Synthetic oligonucleotide
aaagccuacacuaccggag

SEQ ID NO: 166893 - RNA, 19 nt, Artificial Sequence
  Description of Artificial Sequence: Synthetic oligonucleotide
ucuacccaaacucaugauc

SEQ ID NO: 166894 - RNA, 19 nt, Artificial Sequence
  Description of Artificial Sequence: Synthetic oligonucleotide
cacgacuucaaauauauaa

SEQ ID NO: 166895 - RNA, 19 nt, Artificial Sequence
  Description of Artificial Sequence: Synthetic oligonucleotide
uggagaauaccucuaccca

SEQ ID NO: 166896 - RNA, 19 nt, Artificial Sequence
  Description of Artificial Sequence: Synthetic oligonucleotide
agcuauauaaccaacucgu

SEQ ID NO: 166897 - RNA, 19 nt, Artificial Sequence
  Description of Artificial Sequence: Synthetic oligonucleotide
auuggaaccaggacuaggg

SEQ ID NO: 166898 - RNA, 19 nt, Artificial Sequence
  Description of Artificial Sequence: Synthetic oligonucleotide
uuaaucucacacucgcggc

SEQ ID NO: 166899 - RNA, 19 nt, Artificial Sequence
  Description of Artificial Sequence: Synthetic oligonucleotide
aaauucacgaguucuucuu

SEQ ID NO: 166900 - RNA, 19 nt, Artificial Sequence
  Description of Artificial Sequence: Synthetic oligonucleotide
uuauguuucaaaggucaag

SEQ ID NO: 166901 - RNA, 19 nt, Artificial Sequence
  Description of Artificial Sequence: Synthetic oligonucleotide
ucucuggucggguacgacg

SEQ ID NO: 166902 - RNA, 19 nt, Artificial Sequence
  Description of Artificial Sequence: Synthetic oligonucleotide
agauacaggauauuuguuu

SEQ ID NO: 166903 - RNA, 19 nt, Artificial Sequence
  Description of Artificial Sequence: Synthetic oligonucleotide
ucaucacccaauauuguuc

SEQ ID NO: 166904 - RNA, 19 nt, Artificial Sequence
  Description of Artificial Sequence: Synthetic oligonucleotide
ucuucgagccucuucgaag

SEQ ID NO: 166905 - RNA, 19 nt, Artificial Sequence
  Description of Artificial Sequence: Synthetic oligonucleotide
cuucgagccucuucgaagg

SEQ ID NO: 166906 - RNA, 19 nt, Artificial Sequence
  Description of Artificial Sequence: Synthetic oligonucleotide
ucuuucuaagucgacauau

SEQ ID NO: 166907 - RNA, 19 nt, Artificial Sequence
  Description of Artificial Sequence: Synthetic oligonucleotide
guauuaacgaagccuugag

SEQ ID NO: 166908 - RNA, 19 nt, Artificial Sequence
  Description of Artificial Sequence: Synthetic oligonucleotide
ugagcuguacaucaccaaa

SEQ ID NO: 166909 - RNA, 19 nt, Artificial Sequence
  Description of Artificial Sequence: Synthetic oligonucleotide
ccugaauaaaacagaagcc

SEQ ID NO: 166910 - RNA, 19 nt, Artificial Sequence
  Description of Artificial Sequence: Synthetic oligonucleotide
aaucccugaauaaaacaga

SEQ ID NO: 166911 - RNA, 19 nt, Artificial Sequence
  Description of Artificial Sequence: Synthetic oligonucleotide
aaguagauacuuucaucaa

SEQ ID NO: 166912 - RNA, 19 nt, Artificial Sequence
  Description of Artificial Sequence: Synthetic oligonucleotide
caaaagcgaucuccgaacg

SEQ ID NO: 166913 - RNA, 19 nt, Artificial Sequence
  Description of Artificial Sequence: Synthetic oligonucleotide
acuaaccaaauucauucau

SEQ ID NO: 166914 - RNA, 19 nt, Artificial Sequence
  Description of Artificial Sequence: Synthetic oligonucleotide
cuaagucgacauauucccg

SEQ ID NO: 166915 - RNA, 19 nt, Artificial Sequence
  Description of Artificial Sequence: Synthetic oligonucleotide
aacuuaguuuucaaagccu

SEQ ID NO: 166916 - RNA, 19 nt, Artificial Sequence
  Description of Artificial Sequence: Synthetic oligonucleotide
cacgaguucuucuucgagc

SEQ ID NO: 166917 - RNA, 19 nt, Artificial Sequence
  Description of Artificial Sequence: Synthetic oligonucleotide
auauaagaaguuccaguau

SEQ ID NO: 166918 - RNA, 19 nt, Artificial Sequence
  Description of Artificial Sequence: Synthetic oligonucleotide
cauuaagccuauuuuaaaa

SEQ ID NO: 166919 - RNA, 19 nt, Artificial Sequence
  Description of Artificial Sequence: Synthetic oligonucleotide
caccaccuaaauuggaacc

SEQ ID NO: 166920 - RNA, 19 nt, Artificial Sequence
  Description of Artificial Sequence: Synthetic oligonucleotide
augaguuauguauaccaau

SEQ ID NO: 166921 - RNA, 19 nt, Artificial Sequence
  Description of Artificial Sequence: Synthetic oligonucleotide
uaagacuaaucuucaucac

SEQ ID NO: 166922 - RNA, 19 nt, Artificial Sequence
  Description of Artificial Sequence: Synthetic oligonucleotide
auuuccucccggugagacc

SEQ ID NO: 166923 - RNA, 19 nt, Artificial Sequence
  Description of Artificial Sequence: Synthetic oligonucleotide
uaauuuaagcaacccugau

SEQ ID NO: 166924 - RNA, 19 nt, Artificial Sequence
  Description of Artificial Sequence: Synthetic oligonucleotide
auaauuuaagcaacccuga

SEQ ID NO: 166925 - RNA, 19 nt, Artificial Sequence
  Description of Artificial Sequence: Synthetic oligonucleotide
ugaauugaccaugucaguu

SEQ ID NO: 166926 - RNA, 19 nt, Artificial Sequence
  Description of Artificial Sequence: Synthetic oligonucleotide
gacauuaagccuauuuuaa

SEQ ID NO: 166927 - RNA, 19 nt, Artificial Sequence
  Description of Artificial Sequence: Synthetic oligonucleotide
uguuacacugauucaucuc

SEQ ID NO: 166928 - RNA, 19 nt, Artificial Sequence
  Description of Artificial Sequence: Synthetic oligonucleotide
acauuaagccuauuuuaaa

SEQ ID NO: 166929 - RNA, 19 nt, Artificial Sequence
  Description of Artificial Sequence: Synthetic oligonucleotide
caugaaauauacuguagua

SEQ ID NO: 166930 - RNA, 19 nt, Artificial Sequence
  Description of Artificial Sequence: Synthetic oligonucleotide
aucuucgcgcccucaggcc

SEQ ID NO: 166931 - RNA, 19 nt, Artificial Sequence
  Description of Artificial Sequence: Synthetic oligonucleotide
aagcgaucuccgaacggcc

SEQ ID NO: 166932 - RNA, 19 nt, Artificial Sequence
  Description of Artificial Sequence: Synthetic oligonucleotide
cacuaccggagaaaagggg

SEQ ID NO: 166933 - RNA, 19 nt, Artificial Sequence
  Description of Artificial Sequence: Synthetic oligonucleotide
ucuccgaacggccgucgcg

SEQ ID NO: 166934 - RNA, 19 nt, Artificial Sequence
  Description of Artificial Sequence: Synthetic oligonucleotide
cucuggucggguacgacgc

SEQ ID NO: 166935 - RNA, 19 nt, Artificial Sequence
  Description of Artificial Sequence: Synthetic oligonucleotide
aagaugaugcaaugaugua

SEQ ID NO: 166936 - RNA, 19 nt, Artificial Sequence
  Description of Artificial Sequence: Synthetic oligonucleotide
agacagauugguuccugug

SEQ ID NO: 166937 - RNA, 19 nt, Artificial Sequence
  Description of Artificial Sequence: Synthetic oligonucleotide
gaacauuaucaccuaugga

SEQ ID NO: 166938 - RNA, 19 nt, Artificial Sequence
  Description of Artificial Sequence: Synthetic oligonucleotide
augcagguauuaauuauag

SEQ ID NO: 166939 - RNA, 19 nt, Artificial Sequence
  Description of Artificial Sequence: Synthetic oligonucleotide
guacuuaaucucacacucg

SEQ ID NO: 166940 - RNA, 19 nt, Artificial Sequence
  Description of Artificial Sequence: Synthetic oligonucleotide
uaccauccaaucuguggag

SEQ ID NO: 166941 - RNA, 19 nt, Artificial Sequence
  Description of Artificial Sequence: Synthetic oligonucleotide
ugcucguauuaacgaagcc

SEQ ID NO: 166942 - RNA, 19 nt, Artificial Sequence
  Description of Artificial Sequence: Synthetic oligonucleotide
ggcugugacagcucuaugc

SEQ ID NO: 166943 - RNA, 19 nt, Artificial Sequence
  Description of Artificial Sequence: Synthetic oligonucleotide
caucuucgcgcccucaggc

SEQ ID NO: 166944 - RNA, 19 nt, Artificial Sequence
  Description of Artificial Sequence: Synthetic oligonucleotide
ucguauuaacgaagccuug

SEQ ID NO: 166945 - RNA, 19 nt, Artificial Sequence
  Description of Artificial Sequence: Synthetic oligonucleotide
ugagaccugucucuauccu

SEQ ID NO: 166946 - RNA, 19 nt, Artificial Sequence
  Description of Artificial Sequence: Synthetic oligonucleotide
cagacaaaauguaccacca

SEQ ID NO: 166947 - RNA, 19 nt, Artificial Sequence
  Description of Artificial Sequence: Synthetic oligonucleotide
auaaccaacucgucugaaa

SEQ ID NO: 166948 - RNA, 19 nt, Artificial Sequence
  Description of Artificial Sequence: Synthetic oligonucleotide
accagacaaaauguaccac

SEQ ID NO: 166949 - RNA, 19 nt, Artificial Sequence
  Description of Artificial Sequence: Synthetic oligonucleotide
uuacacugauucaucucaa

SEQ ID NO: 166950 - RNA, 19 nt, Artificial Sequence
  Description of Artificial Sequence: Synthetic oligonucleotide
auuuugagauacaggauau

SEQ ID NO: 166951 - RNA, 19 nt, Artificial Sequence
  Description of Artificial Sequence: Synthetic oligonucleotide
ugcagguauuaauuauagu

SEQ ID NO: 166952 - RNA, 19 nt, Artificial Sequence
  Description of Artificial Sequence: Synthetic oligonucleotide
acgcuuaucaaggaggaaa

SEQ ID NO: 166953 - RNA, 19 nt, Artificial Sequence
  Description of Artificial Sequence: Synthetic oligonucleotide
aucacuuuuaaaagguaau

SEQ ID NO: 166954 - RNA, 19 nt, Artificial Sequence
  Description of Artificial Sequence: Synthetic oligonucleotide
aaagggguuuauaaucuua

SEQ ID NO: 166955 - RNA, 19 nt, Artificial Sequence
  Description of Artificial Sequence: Synthetic oligonucleotide
uggucggguacgacgcgcg

SEQ ID NO: 166956 - RNA, 19 nt, Artificial Sequence
  Description of Artificial Sequence: Synthetic oligonucleotide
acuuaaucucacacucgcg

SEQ ID NO: 166957 - RNA, 19 nt, Artificial Sequence
  Description of Artificial Sequence: Synthetic oligonucleotide
cccaaacucaugaucacag

SEQ ID NO: 166958 - RNA, 19 nt, Artificial Sequence
  Description of Artificial Sequence: Synthetic oligonucleotide
ugucuggcgcuccucguga

SEQ ID NO: 166959 - RNA, 19 nt, Artificial Sequence
  Description of Artificial Sequence: Synthetic oligonucleotide
aauuugacauuaagccuau

SEQ ID NO: 166960 - RNA, 19 nt, Artificial Sequence
  Description of Artificial Sequence: Synthetic oligonucleotide
ucggguacgacgcgcggca

SEQ ID NO: 166961 - RNA, 19 nt, Artificial Sequence
  Description of Artificial Sequence: Synthetic oligonucleotide
uagauacuuucaucaacua

SEQ ID NO: 166962 - RNA, 19 nt, Artificial Sequence
  Description of Artificial Sequence: Synthetic oligonucleotide
cuacacuaccggagaaaag

SEQ ID NO: 166963 - RNA, 19 nt, Artificial Sequence
  Description of Artificial Sequence: Synthetic oligonucleotide
ucuggucggguacgacgcg

SEQ ID NO: 166964 - RNA, 19 nt, Artificial Sequence
  Description of Artificial Sequence: Synthetic oligonucleotide
agauugguuccuguggcca

SEQ ID NO: 166965 - RNA, 19 nt, Artificial Sequence
  Description of Artificial Sequence: Synthetic oligonucleotide
gaagcccguguacuuaauc

SEQ ID NO: 166966 - RNA, 19 nt, Artificial Sequence
  Description of Artificial Sequence: Synthetic oligonucleotide
guacucaguuauacaaagc

SEQ ID NO: 166967 - RNA, 19 nt, Artificial Sequence
  Description of Artificial Sequence: Synthetic oligonucleotide
ugaccgcccacccgcggcg

SEQ ID NO: 166968 - RNA, 19 nt, Artificial Sequence
  Description of Artificial Sequence: Synthetic oligonucleotide
uaccucuacccaaacucau

SEQ ID NO: 166969 - RNA, 19 nt, Artificial Sequence
  Description of Artificial Sequence: Synthetic oligonucleotide
cauuaucaccuauggagaa

SEQ ID NO: 166970 - RNA, 19 nt, Artificial Sequence
  Description of Artificial Sequence: Synthetic oligonucleotide
acugguggacugaaagcuc

SEQ ID NO: 166971 - RNA, 19 nt, Artificial Sequence
  Description of Artificial Sequence: Synthetic oligonucleotide
accaacucgucugaaagua

SEQ ID NO: 166972 - RNA, 19 nt, Artificial Sequence
  Description of Artificial Sequence: Synthetic oligonucleotide
cauuuccucccggugagac

SEQ ID NO: 166973 - RNA, 19 nt, Artificial Sequence
  Description of Artificial Sequence: Synthetic oligonucleotide
uggucgcacaaugaguuau

SEQ ID NO: 166974 - RNA, 19 nt, Artificial Sequence
  Description of Artificial Sequence: Synthetic oligonucleotide
aauugcaauuugacauuaa

SEQ ID NO: 166975 - RNA, 19 nt, Artificial Sequence
  Description of Artificial Sequence: Synthetic oligonucleotide
cucguauuaacgaagccuu

SEQ ID NO: 166976 - RNA, 19 nt, Artificial Sequence
  Description of Artificial Sequence: Synthetic oligonucleotide
uauaaccaacucgucugaa

SEQ ID NO: 166977 - RNA, 19 nt, Artificial Sequence
  Description of Artificial Sequence: Synthetic oligonucleotide
uccucgugaggccgguccc

SEQ ID NO: 166978 - RNA, 19 nt, Artificial Sequence
  Description of Artificial Sequence: Synthetic oligonucleotide
cuccgaacggccgucgcgg

SEQ ID NO: 166979 - RNA, 19 nt, Artificial Sequence
  Description of Artificial Sequence: Synthetic oligonucleotide
caaagccuacacuaccgga

SEQ ID NO: 166980 - RNA, 19 nt, Artificial Sequence
  Description of Artificial Sequence: Synthetic oligonucleotide
auaugaaauugcaccaaua

SEQ ID NO: 166981 - RNA, 19 nt, Artificial Sequence
  Description of Artificial Sequence: Synthetic oligonucleotide
aauguaccaccaacauggu

SEQ ID NO: 166982 - RNA, 19 nt, Artificial Sequence
  Description of Artificial Sequence: Synthetic oligonucleotide
ucgagccucuucgaaggcc

SEQ ID NO: 166983 - RNA, 19 nt, Artificial Sequence
  Description of Artificial Sequence: Synthetic oligonucleotide
agucgacauauucccggcu

SEQ ID NO: 166984 - RNA, 19 nt, Artificial Sequence
  Description of Artificial Sequence: Synthetic oligonucleotide
auguuuugcccagaauuaa

SEQ ID NO: 166985 - RNA, 19 nt, Artificial Sequence
  Description of Artificial Sequence: Synthetic oligonucleotide
acuuuuguuuuaggaggcu

SEQ ID NO: 166986 - RNA, 19 nt, Artificial Sequence
  Description of Artificial Sequence: Synthetic oligonucleotide
ggugagaccugucucuauc

SEQ ID NO: 166987 - RNA, 19 nt, Artificial Sequence
  Description of Artificial Sequence: Synthetic oligonucleotide
agcgaucuccgaacggccg

SEQ ID NO: 166988 - RNA, 19 nt, Artificial Sequence
  Description of Artificial Sequence: Synthetic oligonucleotide
gaucuccgaacggccgucg

SEQ ID NO: 166989 - RNA, 19 nt, Artificial Sequence
  Description of Artificial Sequence: Synthetic oligonucleotide
uagggcacugagaguguaa

SEQ ID NO: 166990 - RNA, 19 nt, Artificial Sequence
  Description of Artificial Sequence: Synthetic oligonucleotide
augaauuauaagacuuaua

SEQ ID NO: 166991 - RNA, 19 nt, Artificial Sequence
  Description of Artificial Sequence: Synthetic oligonucleotide
guuucuggucgcacaauga

SEQ ID NO: 166992 - RNA, 19 nt, Artificial Sequence
  Description of Artificial Sequence: Synthetic oligonucleotide
caagauaagcuugcauaga

SEQ ID NO: 166993 - RNA, 19 nt, Artificial Sequence
  Description of Artificial Sequence: Synthetic oligonucleotide
ugcugaccggcugaccgcc

SEQ ID NO: 166994 - RNA, 19 nt, Artificial Sequence
  Description of Artificial Sequence: Synthetic oligonucleotide
gucgacauauucccggcua

SEQ ID NO: 166995 - RNA, 19 nt, Artificial Sequence
  Description of Artificial Sequence: Synthetic oligonucleotide
gugucuggcgcuccucgug

SEQ ID NO: 166996 - RNA, 19 nt, Artificial Sequence
  Description of Artificial Sequence: Synthetic oligonucleotide
aucacccaauauuguuccu

SEQ ID NO: 166997 - RNA, 19 nt, Artificial Sequence
  Description of Artificial Sequence: Synthetic oligonucleotide
cgcuuaucaaggaggaaag

SEQ ID NO: 166998 - RNA, 19 nt, Artificial Sequence
  Description of Artificial Sequence: Synthetic oligonucleotide
agaagcagugcaaggcuaa

SEQ ID NO: 166999 - RNA, 19 nt, Artificial Sequence
  Description of Artificial Sequence: Synthetic oligonucleotide
aacgcuuaucaaggaggaa

SEQ ID NO: 167000 - RNA, 19 nt, Artificial Sequence
  Description of Artificial Sequence: Synthetic oligonucleotide
gguagcuuaaggcaaguuu

SEQ ID NO: 167001 - RNA, 19 nt, Artificial Sequence
  Description of Artificial Sequence: Synthetic oligonucleotide
cugaccgcccacccgcggc

SEQ ID NO: 167002 - RNA, 19 nt, Artificial Sequence
  Description of Artificial Sequence: Synthetic oligonucleotide
gacauauucccggcuaggu

SEQ ID NO: 167003 - RNA, 19 nt, Artificial Sequence
  Description of Artificial Sequence: Synthetic oligonucleotide
ccaccaccuaaauuggaac

SEQ ID NO: 167004 - RNA, 19 nt, Artificial Sequence
  Description of Artificial Sequence: Synthetic oligonucleotide
accucuacccaaacucaug

SEQ ID NO: 167005 - RNA, 19 nt, Artificial Sequence
  Description of Artificial Sequence: Synthetic oligonucleotide
gagacagauugguuccugu

SEQ ID NO: 167006 - RNA, 19 nt, Artificial Sequence
  Description of Artificial Sequence: Synthetic oligonucleotide
gguauuaauuauagugcaa

SEQ ID NO: 167007 - RNA, 19 nt, Artificial Sequence
  Description of Artificial Sequence: Synthetic oligonucleotide
auucccggcuagguguuug

SEQ ID NO: 167008 - RNA, 19 nt, Artificial Sequence
  Description of Artificial Sequence: Synthetic oligonucleotide
cuucgcgcccucaggccgc

SEQ ID NO: 167009 - RNA, 19 nt, Artificial Sequence
  Description of Artificial Sequence: Synthetic oligonucleotide
ggacugaaagcucuuggcu

SEQ ID NO: 167010 - RNA, 19 nt, Artificial Sequence
  Description of Artificial Sequence: Synthetic oligonucleotide
cugguggacugaaagcucu

SEQ ID NO: 167011 - RNA, 19 nt, Artificial Sequence
  Description of Artificial Sequence: Synthetic oligonucleotide
cccggcuagguguuugacg

SEQ ID NO: 167012 - RNA, 19 nt, Artificial Sequence
  Description of Artificial Sequence: Synthetic oligonucleotide
guagaacauuaucaccuau

SEQ ID NO: 167013 - RNA, 19 nt, Artificial Sequence
  Description of Artificial Sequence: Synthetic oligonucleotide
aacggccgucgcggcaggc

SEQ ID NO: 167014 - RNA, 19 nt, Artificial Sequence
  Description of Artificial Sequence: Synthetic oligonucleotide
uaccggagaaaagggguuu

SEQ ID NO: 167015 - RNA, 19 nt, Artificial Sequence
  Description of Artificial Sequence: Synthetic oligonucleotide
cuggucggguacgacgcgc

SEQ ID NO: 167016 - RNA, 19 nt, Artificial Sequence
  Description of Artificial Sequence: Synthetic oligonucleotide
ccaugcacgacuucaaaua

SEQ ID NO: 167017 - RNA, 19 nt, Artificial Sequence
  Description of Artificial Sequence: Synthetic oligonucleotide
ggcuagguguuugacgcug

SEQ ID NO: 167018 - RNA, 19 nt, Artificial Sequence
  Description of Artificial Sequence: Synthetic oligonucleotide
caugcacgacuucaaauau

SEQ ID NO: 167019 - RNA, 19 nt, Artificial Sequence
  Description of Artificial Sequence: Synthetic oligonucleotide
gcucguauuaacgaagccu

SEQ ID NO: 167020 - RNA, 19 nt, Artificial Sequence
  Description of Artificial Sequence: Synthetic oligonucleotide
ccucuacccaaacucauga

SEQ ID NO: 167021 - RNA, 19 nt, Artificial Sequence
  Description of Artificial Sequence: Synthetic oligonucleotide
uccgaacggccgucgcggc

SEQ ID NO: 167022 - RNA, 19 nt, Artificial Sequence
  Description of Artificial Sequence: Synthetic oligonucleotide
gcuauauaaccaacucguc

SEQ ID NO: 167023 - RNA, 19 nt, Artificial Sequence
  Description of Artificial Sequence: Synthetic oligonucleotide
ccaacucgucugaaaguac

SEQ ID NO: 167024 - RNA, 19 nt, Artificial Sequence
  Description of Artificial Sequence: Synthetic oligonucleotide
aacgaagccuugagaucau

SEQ ID NO: 167025 - RNA, 19 nt, Artificial Sequence
  Description of Artificial Sequence: Synthetic oligonucleotide
gucggguacgacgcgcggc

SEQ ID NO: 167026 - RNA, 19 nt, Artificial Sequence
  Description of Artificial Sequence: Synthetic oligonucleotide
gaacggccgucgcggcagg

SEQ ID NO: 167027 - RNA, 19 nt, Artificial Sequence
  Description of Artificial Sequence: Synthetic oligonucleotide
ugguagcuuaaggcaaguu

SEQ ID NO: 167028 - RNA, 19 nt, Artificial Sequence
  Description of Artificial Sequence: Synthetic oligonucleotide
cccguguacuuaaucucac

SEQ ID NO: 167029 - RNA, 19 nt, Artificial Sequence
  Description of Artificial Sequence: Synthetic oligonucleotide
ucggugcugaccggcugac

SEQ ID NO: 167030 - RNA, 19 nt, Artificial Sequence
  Description of Artificial Sequence: Synthetic oligonucleotide
ggucggguacgacgcgcgg

SEQ ID NO: 167031 - RNA, 19 nt, Artificial Sequence
  Description of Artificial Sequence: Synthetic oligonucleotide
ucgcggcaggcguucugga

SEQ ID NO: 167032 - RNA, 19 nt, Artificial Sequence
  Description of Artificial Sequence: Synthetic oligonucleotide
guaccaccaacaugguuuu

SEQ ID NO: 167033 - RNA, 19 nt, Artificial Sequence
  Description of Artificial Sequence: Synthetic oligonucleotide
auuuaccuuuguagcugau

SEQ ID NO: 167034 - RNA, 19 nt, Artificial Sequence
  Description of Artificial Sequence: Synthetic oligonucleotide
ucccggcuagguguuugac

SEQ ID NO: 167035 - RNA, 19 nt, Artificial Sequence
  Description of Artificial Sequence: Synthetic oligonucleotide
cuuuacugccucaggucau

SEQ ID NO: 167036 - RNA, 19 nt, Artificial Sequence
  Description of Artificial Sequence: Synthetic oligonucleotide
ccuacacuaccggagaaaa

SEQ ID NO: 167037 - RNA, 19 nt, Artificial Sequence
  Description of Artificial Sequence: Synthetic oligonucleotide
gcccguguacuuaaucuca

SEQ ID NO: 167038 - RNA, 19 nt, Artificial Sequence
  Description of Artificial Sequence: Synthetic oligonucleotide
cuaccggagaaaagggguu

SEQ ID NO: 167039 - RNA, 19 nt, Artificial Sequence
  Description of Artificial Sequence: Synthetic oligonucleotide
cguauuaacgaagccuuga

SEQ ID NO: 167040 - RNA, 19 nt, Artificial Sequence
  Description of Artificial Sequence: Synthetic oligonucleotide
cccugauacaaauuucagu

SEQ ID NO: 167041 - RNA, 19 nt, Artificial Sequence
  Description of Artificial Sequence: Synthetic oligonucleotide
ggcuagcgcgggcagccgc

SEQ ID NO: 167042 - RNA, 19 nt, Artificial Sequence
  Description of Artificial Sequence: Synthetic oligonucleotide
ggcaacccauaccauccaa

SEQ ID NO: 167043 - RNA, 19 nt, Artificial Sequence
  Description of Artificial Sequence: Synthetic oligonucleotide
accgcccacccgcggcguc

SEQ ID NO: 167044 - RNA, 19 nt, Artificial Sequence
  Description of Artificial Sequence: Synthetic oligonucleotide
cuggucgcacaaugaguua

SEQ ID NO: 167045 - RNA, 19 nt, Artificial Sequence
  Description of Artificial Sequence: Synthetic oligonucleotide
gcggcgucuggacucccgc

SEQ ID NO: 167046 - RNA, 19 nt, Artificial Sequence
  Description of Artificial Sequence: Synthetic oligonucleotide
ccacaaaagcgaucuccga

SEQ ID NO: 167047 - RNA, 19 nt, Artificial Sequence
  Description of Artificial Sequence: Synthetic oligonucleotide
gguacgacgcgcggcaucu

SEQ ID NO: 167048 - RNA, 19 nt, Artificial Sequence
  Description of Artificial Sequence: Synthetic oligonucleotide
cagaagccaguaugugacu

SEQ ID NO: 167049 - RNA, 19 nt, Artificial Sequence
  Description of Artificial Sequence: Synthetic oligonucleotide
cuucucuggucggguacga

SEQ ID NO: 167050 - RNA, 19 nt, Artificial Sequence
  Description of Artificial Sequence: Synthetic oligonucleotide
ccguguacuuaaucucaca

SEQ ID NO: 167051 - RNA, 19 nt, Artificial Sequence
  Description of Artificial Sequence: Synthetic oligonucleotide
ccggcugaccgcccacccg

SEQ ID NO: 167052 - RNA, 19 nt, Artificial Sequence
  Description of Artificial Sequence: Synthetic oligonucleotide
cgcgcggcaucuucgcgcc

SEQ ID NO: 167053 - RNA, 19 nt, Artificial Sequence
  Description of Artificial Sequence: Synthetic oligonucleotide
gcuucgggcuagcgcgggc

SEQ ID NO: 167054 - RNA, 19 nt, Artificial Sequence
  Description of Artificial Sequence: Synthetic oligonucleotide
cgaacggccgucgcggcag

SEQ ID NO: 167055 - RNA, 19 nt, Artificial Sequence
  Description of Artificial Sequence: Synthetic oligonucleotide
caugugcugugcucguauu

SEQ ID NO: 167056 - RNA, 19 nt, Artificial Sequence
  Description of Artificial Sequence: Synthetic oligonucleotide
gccuacacuaccggagaaa

SEQ ID NO: 167057 - RNA, 19 nt, Artificial Sequence
  Description of Artificial Sequence: Synthetic oligonucleotide
ggcugaccgcccacccgcg

SEQ ID NO: 167058 - RNA, 19 nt, Artificial Sequence
  Description of Artificial Sequence: Synthetic oligonucleotide
ggcuagaaccagacaaaau

SEQ ID NO: 167059 - RNA, 19 nt, Artificial Sequence
  Description of Artificial Sequence: Synthetic oligonucleotide
cccggugagaccugucucu

SEQ ID NO: 167060 - RNA, 19 nt, Artificial Sequence
  Description of Artificial Sequence: Synthetic oligonucleotide
cacaugugcugugcucgua

SEQ ID NO: 167061 - RNA, 19 nt, Artificial Sequence
  Description of Artificial Sequence: Synthetic oligonucleotide
gcgcuucgggcuagcgcgg

SEQ ID NO: 167062 - RNA, 19 nt, Artificial Sequence
  Description of Artificial Sequence: Synthetic oligonucleotide
ccugaagcccguguacuua

SEQ ID NO: 167063 - RNA, 19 nt, Artificial Sequence
  Description of Artificial Sequence: Synthetic oligonucleotide
gccgcgcuucgggcuagcg

SEQ ID NO: 167064 - RNA, 19 nt, Artificial Sequence
  Description of Artificial Sequence: Synthetic oligonucleotide
gcacgacuucaaauauaua

SEQ ID NO: 167065 - RNA, 19 nt, Artificial Sequence
  Description of Artificial Sequence: Synthetic oligonucleotide
cccgcggcgucuggacucc

SEQ ID NO: 167066 - RNA, 19 nt, Artificial Sequence
  Description of Artificial Sequence: Synthetic oligonucleotide
cacccgcggcgucuggacu

SEQ ID NO: 167067 - RNA, 19 nt, Artificial Sequence
  Description of Artificial Sequence: Synthetic oligonucleotide
cgcuucgggcuagcgcggg

SEQ ID NO: 167068 - RNA, 19 nt, Artificial Sequence
  Description of Artificial Sequence: Synthetic oligonucleotide
ccgaacggccgucgcggca

SEQ ID NO: 167069 - RNA, 19 nt, Artificial Sequence
  Description of Artificial Sequence: Synthetic oligonucleotide
gcccacccgcggcgucugg

SEQ ID NO: 167070 - RNA, 19 nt, Artificial Sequence
  Description of Artificial Sequence: Synthetic oligonucleotide
ccggugagaccugucucua

SEQ ID NO: 167071 - RNA, 19 nt, Artificial Sequence
  Description of Artificial Sequence: Synthetic oligonucleotide
gcgcggcaucuucgcgccc

SEQ ID NO: 167072 - RNA, 19 nt, Artificial Sequence
  Description of Artificial Sequence: Synthetic oligonucleotide
cccacccgcggcgucugga

SEQ ID NO: 167073 - RNA, 19 nt, Artificial Sequence
  Description of Artificial Sequence: Synthetic oligonucleotide
ccucgugaggccggucccu

SEQ ID NO: 167074 - RNA, 19 nt, Artificial Sequence
  Description of Artificial Sequence: Synthetic oligonucleotide
ccgcggcgucuggacuccc

SEQ ID NO: 167075 - RNA, 19 nt, Artificial Sequence
  Description of Artificial Sequence: Synthetic oligonucleotide
cggccgucgcggcaggcgu

SEQ ID NO: 167076 - RNA, 19 nt, Artificial Sequence
  Description of Artificial Sequence: Synthetic oligonucleotide
uguauuaugagcaauacag

SEQ ID NO: 167077 - RNA, 19 nt, Artificial Sequence
  Description of Artificial Sequence: Synthetic oligonucleotide
aauuguucaaauuccauug

SEQ ID NO: 167078 - RNA, 19 nt, Artificial Sequence
  Description of Artificial Sequence: Synthetic oligonucleotide
auaagaaaugggcaaagcc

SEQ ID NO: 167079 - RNA, 19 nt, Artificial Sequence
  Description of Artificial Sequence: Synthetic oligonucleotide
aaagauauaaaugggugac

SEQ ID NO: 167080 - RNA, 19 nt, Artificial Sequence
  Description of Artificial Sequence: Synthetic oligonucleotide
aaacgucuaaauuaauuuc

SEQ ID NO: 167081 - RNA, 19 nt, Artificial Sequence
  Description of Artificial Sequence: Synthetic oligonucleotide
ugcuuaguaacccagguag

SEQ ID NO: 167082 - RNA, 19 nt, Artificial Sequence
  Description of Artificial Sequence: Synthetic oligonucleotide
uuagugaccagccaauccg

SEQ ID NO: 167083 - RNA, 19 nt, Artificial Sequence
  Description of Artificial Sequence: Synthetic oligonucleotide
aucuuuuguguacaaaugc

SEQ ID NO: 167084 - RNA, 19 nt, Artificial Sequence
  Description of Artificial Sequence: Synthetic oligonucleotide
aacuacgacagcuuuucgc

SEQ ID NO: 167085 - RNA, 19 nt, Artificial Sequence
  Description of Artificial Sequence: Synthetic oligonucleotide
uuacgauucacuuuaaaac

SEQ ID NO: 167086 - RNA, 19 nt, Artificial Sequence
  Description of Artificial Sequence: Synthetic oligonucleotide
uagcuuacaaagauggugg

SEQ ID NO: 167087 - RNA, 19 nt, Artificial Sequence
  Description of Artificial Sequence: Synthetic oligonucleotide
agacuuugccuuuugauac

SEQ ID NO: 167088 - RNA, 19 nt, Artificial Sequence
  Description of Artificial Sequence: Synthetic oligonucleotide
uguucgaguaaccaccucg

SEQ ID NO: 167089 - RNA, 19 nt, Artificial Sequence
  Description of Artificial Sequence: Synthetic oligonucleotide
uuaacuacuacaagcacac

SEQ ID NO: 167090 - RNA, 19 nt, Artificial Sequence
  Description of Artificial Sequence: Synthetic oligonucleotide
ucucuuaucgugcacaaug

SEQ ID NO: 167091 - RNA, 19 nt, Artificial Sequence
  Description of Artificial Sequence: Synthetic oligonucleotide
aaaguuagccuacuaaaga

SEQ ID NO: 167092 - RNA, 19 nt, Artificial Sequence
  Description of Artificial Sequence: Synthetic oligonucleotide
uuuacagagaggauggagu

SEQ ID NO: 167093 - RNA, 19 nt, Artificial Sequence
  Description of Artificial Sequence: Synthetic oligonucleotide
ugugucaucgaaguguucg

SEQ ID NO: 167094 - RNA, 19 nt, Artificial Sequence
  Description of Artificial Sequence: Synthetic oligonucleotide
cauuuuaaggacagcaugc

SEQ ID NO: 167095 - RNA, 19 nt, Artificial Sequence
  Description of Artificial Sequence: Synthetic oligonucleotide
aguuauacaguauuuugug

SEQ ID NO: 167096 - RNA, 19 nt, Artificial Sequence
  Description of Artificial Sequence: Synthetic oligonucleotide
uugauacaccguaagaugc

SEQ ID NO: 167097 - RNA, 19 nt, Artificial Sequence
  Description of Artificial Sequence: Synthetic oligonucleotide
auauaaaugggugacucac

SEQ ID NO: 167098 - RNA, 19 nt, Artificial Sequence
  Description of Artificial Sequence: Synthetic oligonucleotide
uacgauucacuuuaaaacu

SEQ ID NO: 167099 - RNA, 19 nt, Artificial Sequence
  Description of Artificial Sequence: Synthetic oligonucleotide
cauagcuaacuucauauag

SEQ ID NO: 167100 - RNA, 19 nt, Artificial Sequence
  Description of Artificial Sequence: Synthetic oligonucleotide
ucauauagaucccauuaga

SEQ ID NO: 167101 - RNA, 19 nt, Artificial Sequence
  Description of Artificial Sequence: Synthetic oligonucleotide
aauacccguaagaaaauuc

SEQ ID NO: 167102 - RNA, 19 nt, Artificial Sequence
  Description of Artificial Sequence: Synthetic oligonucleotide
gauaaaauguagaacccug

SEQ ID NO: 167103 - RNA, 19 nt, Artificial Sequence
  Description of Artificial Sequence: Synthetic oligonucleotide
uauuauauccgccacgauu

SEQ ID NO: 167104 - RNA, 19 nt, Artificial Sequence
  Description of Artificial Sequence: Synthetic oligonucleotide
ucagagaauacccguaaga

SEQ ID NO: 167105 - RNA, 19 nt, Artificial Sequence
  Description of Artificial Sequence: Synthetic oligonucleotide
acugacaugauuaaaagau

SEQ ID NO: 167106 - RNA, 19 nt, Artificial Sequence
  Description of Artificial Sequence: Synthetic oligonucleotide
aauuccgcuucuugcgggc

SEQ ID NO: 167107 - RNA, 19 nt, Artificial Sequence
  Description of Artificial Sequence: Synthetic oligonucleotide
aguuaacuacuacaagcac

SEQ ID NO: 167108 - RNA, 19 nt, Artificial Sequence
  Description of Artificial Sequence: Synthetic oligonucleotide
auugccaccucgcauauug

SEQ ID NO: 167109 - RNA, 19 nt, Artificial Sequence
  Description of Artificial Sequence: Synthetic oligonucleotide
ucuaaggggacauuuugga

SEQ ID NO: 167110 - RNA, 19 nt, Artificial Sequence
  Description of Artificial Sequence: Synthetic oligonucleotide
ucccaauuguucaaauucc

SEQ ID NO: 167111 - RNA, 19 nt, Artificial Sequence
  Description of Artificial Sequence: Synthetic oligonucleotide
cucuguucgaguaaccacc

SEQ ID NO: 167112 - RNA, 19 nt, Artificial Sequence
  Description of Artificial Sequence: Synthetic oligonucleotide
acaagcacacuaguuauac

SEQ ID NO: 167113 - RNA, 19 nt, Artificial Sequence
  Description of Artificial Sequence: Synthetic oligonucleotide
uccuauuauauccgccacg

SEQ ID NO: 167114 - RNA, 19 nt, Artificial Sequence
  Description of Artificial Sequence: Synthetic oligonucleotide
acuacgacagcuuuucgcu

SEQ ID NO: 167115 - RNA, 19 nt, Artificial Sequence
  Description of Artificial Sequence: Synthetic oligonucleotide
gagaauacccguaagaaaa

SEQ ID NO: 167116 - RNA, 19 nt, Artificial Sequence
  Description of Artificial Sequence: Synthetic oligonucleotide
ucaacauagguuauuucau

SEQ ID NO: 167117 - RNA, 19 nt, Artificial Sequence
  Description of Artificial Sequence: Synthetic oligonucleotide
uauaaguaucaagacaaac

SEQ ID NO: 167118 - RNA, 19 nt, Artificial Sequence
  Description of Artificial Sequence: Synthetic oligonucleotide
agguauuggaaaauauggc

SEQ ID NO: 167119 - RNA, 19 nt, Artificial Sequence
  Description of Artificial Sequence: Synthetic oligonucleotide
ucgugcacaaugcugaggu

SEQ ID NO: 167120 - RNA, 19 nt, Artificial Sequence
  Description of Artificial Sequence: Synthetic oligonucleotide
aguaucaagacaaaccacu

SEQ ID NO: 167121 - RNA, 19 nt, Artificial Sequence
  Description of Artificial Sequence: Synthetic oligonucleotide
ucgaguaaccaccucggcc

SEQ ID NO: 167122 - RNA, 19 nt, Artificial Sequence
  Description of Artificial Sequence: Synthetic oligonucleotide
cuuaucgugcacaaugcug

SEQ ID NO: 167123 - RNA, 19 nt, Artificial Sequence
  Description of Artificial Sequence: Synthetic oligonucleotide
uggagaaauauguaucagu

SEQ ID NO: 167124 - RNA, 19 nt, Artificial Sequence
  Description of Artificial Sequence: Synthetic oligonucleotide
aaguaucaagacaaaccac

SEQ ID NO: 167125 - RNA, 19 nt, Artificial Sequence
  Description of Artificial Sequence: Synthetic oligonucleotide
uagccuacuaaagaaaaca

SEQ ID NO: 167126 - RNA, 19 nt, Artificial Sequence
  Description of Artificial Sequence: Synthetic oligonucleotide
uauuuaaccuucacaaguu

SEQ ID NO: 167127 - RNA, 19 nt, Artificial Sequence
  Description of Artificial Sequence: Synthetic oligonucleotide
uacgacagcuuuucgcugg

SEQ ID NO: 167128 - RNA, 19 nt, Artificial Sequence
  Description of Artificial Sequence: Synthetic oligonucleotide
ucuguuaccuucaucucaa

SEQ ID NO: 167129 - RNA, 19 nt, Artificial Sequence
  Description of Artificial Sequence: Synthetic oligonucleotide
ugcaugcuuaguaacccag

SEQ ID NO: 167130 - RNA, 19 nt, Artificial Sequence
  Description of Artificial Sequence: Synthetic oligonucleotide
gagauacccauucaagaac

SEQ ID NO: 167131 - RNA, 19 nt, Artificial Sequence
  Description of Artificial Sequence: Synthetic oligonucleotide
uucauuuuaaggacagcau

SEQ ID NO: 167132 - RNA, 19 nt, Artificial Sequence
  Description of Artificial Sequence: Synthetic oligonucleotide
ucugaccccagaauugacc

SEQ ID NO: 167133 - RNA, 19 nt, Artificial Sequence
  Description of Artificial Sequence: Synthetic oligonucleotide
auauccucggccaugaucu

SEQ ID NO: 167134 - RNA, 19 nt, Artificial Sequence
  Description of Artificial Sequence: Synthetic oligonucleotide
cucuaaggggacauuuugg

SEQ ID NO: 167135 - RNA, 19 nt, Artificial Sequence
  Description of Artificial Sequence: Synthetic oligonucleotide
aaggagauacccauucaag

SEQ ID NO: 167136 - RNA, 19 nt, Artificial Sequence
  Description of Artificial Sequence: Synthetic oligonucleotide
uauggcagagcacgugcgg

SEQ ID NO: 167137 - RNA, 19 nt, Artificial Sequence
  Description of Artificial Sequence: Synthetic oligonucleotide
guuauggcagagcacgugc

SEQ ID NO: 167138 - RNA, 19 nt, Artificial Sequence
  Description of Artificial Sequence: Synthetic oligonucleotide
guauuuaaccuucacaagu

SEQ ID NO: 167139 - RNA, 19 nt, Artificial Sequence
  Description of Artificial Sequence: Synthetic oligonucleotide
gcauauugaauccuccacg

SEQ ID NO: 167140 - RNA, 19 nt, Artificial Sequence
  Description of Artificial Sequence: Synthetic oligonucleotide
ugauaaugcugacuccaug

SEQ ID NO: 167141 - RNA, 19 nt, Artificial Sequence
  Description of Artificial Sequence: Synthetic oligonucleotide
uuagccuacuaaagaaaac

SEQ ID NO: 167142 - RNA, 19 nt, Artificial Sequence
  Description of Artificial Sequence: Synthetic oligonucleotide
uagcuaacuucauauagau

SEQ ID NO: 167143 - RNA, 19 nt, Artificial Sequence
  Description of Artificial Sequence: Synthetic oligonucleotide
aaacuacgacagcuuuucg

SEQ ID NO: 167144 - RNA, 19 nt, Artificial Sequence
  Description of Artificial Sequence: Synthetic oligonucleotide
guuagugaccagccaaucc

SEQ ID NO: 167145 - RNA, 19 nt, Artificial Sequence
  Description of Artificial Sequence: Synthetic oligonucleotide
gauauaaaugggugacuca

SEQ ID NO: 167146 - RNA, 19 nt, Artificial Sequence
  Description of Artificial Sequence: Synthetic oligonucleotide
cuacauacacuccaucuuc

SEQ ID NO: 167147 - RNA, 19 nt, Artificial Sequence
  Description of Artificial Sequence: Synthetic oligonucleotide
uaacagcccuucuacauac

SEQ ID NO: 167148 - RNA, 19 nt, Artificial Sequence
  Description of Artificial Sequence: Synthetic oligonucleotide
ugauacaccguaagaugcu

SEQ ID NO: 167149 - RNA, 19 nt, Artificial Sequence
  Description of Artificial Sequence: Synthetic oligonucleotide
agagaauacccguaagaaa

SEQ ID NO: 167150 - RNA, 19 nt, Artificial Sequence
  Description of Artificial Sequence: Synthetic oligonucleotide
uuaacagcccuucuacaua

SEQ ID NO: 167151 - RNA, 19 nt, Artificial Sequence
  Description of Artificial Sequence: Synthetic oligonucleotide
uguuaccuucaucucaaaa

SEQ ID NO: 167152 - RNA, 19 nt, Artificial Sequence
  Description of Artificial Sequence: Synthetic oligonucleotide
caaaguuagcaaaacaugu

SEQ ID NO: 167153 - RNA, 19 nt, Artificial Sequence
  Description of Artificial Sequence: Synthetic oligonucleotide
aacagucgacuucuuguga

SEQ ID NO: 167154 - RNA, 19 nt, Artificial Sequence
  Description of Artificial Sequence: Synthetic oligonucleotide
uccccaagcaacauuccac

SEQ ID NO: 167155 - RNA, 19 nt, Artificial Sequence
  Description of Artificial Sequence: Synthetic oligonucleotide
acauuccacuuguaguuag

SEQ ID NO: 167156 - RNA, 19 nt, Artificial Sequence
  Description of Artificial Sequence: Synthetic oligonucleotide
uuauugugacaaugacucc

SEQ ID NO: 167157 - RNA, 19 nt, Artificial Sequence
  Description of Artificial Sequence: Synthetic oligonucleotide
acccguaagaaaauucuuc

SEQ ID NO: 167158 - RNA, 19 nt, Artificial Sequence
  Description of Artificial Sequence: Synthetic oligonucleotide
caaacuacgacagcuuuuc

SEQ ID NO: 167159 - RNA, 19 nt, Artificial Sequence
  Description of Artificial Sequence: Synthetic oligonucleotide
gguauggguagccaauucc

SEQ ID NO: 167160 - RNA, 19 nt, Artificial Sequence
  Description of Artificial Sequence: Synthetic oligonucleotide
auuagacaacuggauuuac

SEQ ID NO: 167161 - RNA, 19 nt, Artificial Sequence
  Description of Artificial Sequence: Synthetic oligonucleotide
aagggcauacagacauagc

SEQ ID NO: 167162 - RNA, 19 nt, Artificial Sequence
  Description of Artificial Sequence: Synthetic oligonucleotide
auauccgccacgauuacca

SEQ ID NO: 167163 - RNA, 19 nt, Artificial Sequence
  Description of Artificial Sequence: Synthetic oligonucleotide
gacucacaauuucauuagc

SEQ ID NO: 167164 - RNA, 19 nt, Artificial Sequence
  Description of Artificial Sequence: Synthetic oligonucleotide
uucaguuuuccaguaucug

SEQ ID NO: 167165 - RNA, 19 nt, Artificial Sequence
  Description of Artificial Sequence: Synthetic oligonucleotide
auagaucccauuagacaac

SEQ ID NO: 167166 - RNA, 19 nt, Artificial Sequence
  Description of Artificial Sequence: Synthetic oligonucleotide
auacccguaagaaaauucu

SEQ ID NO: 167167 - RNA, 19 nt, Artificial Sequence
  Description of Artificial Sequence: Synthetic oligonucleotide
ucgcauauugaauccucca

SEQ ID NO: 167168 - RNA, 19 nt, Artificial Sequence
  Description of Artificial Sequence: Synthetic oligonucleotide
ucuuacgauucacuuuaaa

SEQ ID NO: 167169 - RNA, 19 nt, Artificial Sequence
  Description of Artificial Sequence: Synthetic oligonucleotide
agucgacuucuugugaagg

SEQ ID NO: 167170 - RNA, 19 nt, Artificial Sequence
  Description of Artificial Sequence: Synthetic oligonucleotide
uacuacaagcacacuaguu

SEQ ID NO: 167171 - RNA, 19 nt, Artificial Sequence
  Description of Artificial Sequence: Synthetic oligonucleotide
uccucuuguggaauguuua

SEQ ID NO: 167172 - RNA, 19 nt, Artificial Sequence
  Description of Artificial Sequence: Synthetic oligonucleotide
cucaaaacagacuuugccu

SEQ ID NO: 167173 - RNA, 19 nt, Artificial Sequence
  Description of Artificial Sequence: Synthetic oligonucleotide
uucucgcggucuuuuaaca

SEQ ID NO: 167174 - RNA, 19 nt, Artificial Sequence
  Description of Artificial Sequence: Synthetic oligonucleotide
ucuucucgcggucuuuuaa

SEQ ID NO: 167175 - RNA, 19 nt, Artificial Sequence
  Description of Artificial Sequence: Synthetic oligonucleotide
agccacgauuguuuccucg

SEQ ID NO: 167176 - RNA, 19 nt, Artificial Sequence
  Description of Artificial Sequence: Synthetic oligonucleotide
gggaguaaaugcuuaauaa

SEQ ID NO: 167177 - RNA, 19 nt, Artificial Sequence
  Description of Artificial Sequence: Synthetic oligonucleotide
cuucucgcggucuuuuaac

SEQ ID NO: 167178 - RNA, 19 nt, Artificial Sequence
  Description of Artificial Sequence: Synthetic oligonucleotide
uccaaaagcuuuugggcuu

SEQ ID NO: 167179 - RNA, 19 nt, Artificial Sequence
  Description of Artificial Sequence: Synthetic oligonucleotide
uucgaguaaccaccucggc

SEQ ID NO: 167180 - RNA, 19 nt, Artificial Sequence
  Description of Artificial Sequence: Synthetic oligonucleotide
ucgcggucuuuuaacaccu

SEQ ID NO: 167181 - RNA, 19 nt, Artificial Sequence
  Description of Artificial Sequence: Synthetic oligonucleotide
aguuagugaccagccaauc

SEQ ID NO: 167182 - RNA, 19 nt, Artificial Sequence
  Description of Artificial Sequence: Synthetic oligonucleotide
cauagguuauuucaucaaa

SEQ ID NO: 167183 - RNA, 19 nt, Artificial Sequence
  Description of Artificial Sequence: Synthetic oligonucleotide
cuuuuguguacaaaugccu

SEQ ID NO: 167184 - RNA, 19 nt, Artificial Sequence
  Description of Artificial Sequence: Synthetic oligonucleotide
auugccucuccuauuauau

SEQ ID NO: 167185 - RNA, 19 nt, Artificial Sequence
  Description of Artificial Sequence: Synthetic oligonucleotide
gagaggauggaguguauua

SEQ ID NO: 167186 - RNA, 19 nt, Artificial Sequence
  Description of Artificial Sequence: Synthetic oligonucleotide
guuagccuacuaaagaaaa

SEQ ID NO: 167187 - RNA, 19 nt, Artificial Sequence
  Description of Artificial Sequence: Synthetic oligonucleotide
ugaacugguucuugccacu

SEQ ID NO: 167188 - RNA, 19 nt, Artificial Sequence
  Description of Artificial Sequence: Synthetic oligonucleotide
auugaauccuccacguccu

SEQ ID NO: 167189 - RNA, 19 nt, Artificial Sequence
  Description of Artificial Sequence: Synthetic oligonucleotide
gcuaaggagauacccauuc

SEQ ID NO: 167190 - RNA, 19 nt, Artificial Sequence
  Description of Artificial Sequence: Synthetic oligonucleotide
uauauccgccacgauuacc

SEQ ID NO: 167191 - RNA, 19 nt, Artificial Sequence
  Description of Artificial Sequence: Synthetic oligonucleotide
guauuaugagcaauacaga

SEQ ID NO: 167192 - RNA, 19 nt, Artificial Sequence
  Description of Artificial Sequence: Synthetic oligonucleotide
acuucauauagaucccauu

SEQ ID NO: 167193 - RNA, 19 nt, Artificial Sequence
  Description of Artificial Sequence: Synthetic oligonucleotide
ucucgcggucuuuuaacac

SEQ ID NO: 167194 - RNA, 19 nt, Artificial Sequence
  Description of Artificial Sequence: Synthetic oligonucleotide
cuucgcauaggagaguuca

SEQ ID NO: 167195 - RNA, 19 nt, Artificial Sequence
  Description of Artificial Sequence: Synthetic oligonucleotide
caccucgcauauugaaucc

SEQ ID NO: 167196 - RNA, 19 nt, Artificial Sequence
  Description of Artificial Sequence: Synthetic oligonucleotide
uuaguaacccagguaguuu

SEQ ID NO: 167197 - RNA, 19 nt, Artificial Sequence
  Description of Artificial Sequence: Synthetic oligonucleotide
cauauugaauccuccacgu

SEQ ID NO: 167198 - RNA, 19 nt, Artificial Sequence
  Description of Artificial Sequence: Synthetic oligonucleotide
cauguaaucacaucauuuu

SEQ ID NO: 167199 - RNA, 19 nt, Artificial Sequence
  Description of Artificial Sequence: Synthetic oligonucleotide
guauggguagccaauucca

SEQ ID NO: 167200 - RNA, 19 nt, Artificial Sequence
  Description of Artificial Sequence: Synthetic oligonucleotide
acauagcuaacuucauaua

SEQ ID NO: 167201 - RNA, 19 nt, Artificial Sequence
  Description of Artificial Sequence: Synthetic oligonucleotide
uacccguaagaaaauucuu

SEQ ID NO: 167202 - RNA, 19 nt, Artificial Sequence
  Description of Artificial Sequence: Synthetic oligonucleotide
auggcagagcacgugcggg

SEQ ID NO: 167203 - RNA, 19 nt, Artificial Sequence
  Description of Artificial Sequence: Synthetic oligonucleotide
cacaguuauggcagagcac

SEQ ID NO: 167204 - RNA, 19 nt, Artificial Sequence
  Description of Artificial Sequence: Synthetic oligonucleotide
uaaaugggugacucacaau

SEQ ID NO: 167205 - RNA, 19 nt, Artificial Sequence
  Description of Artificial Sequence: Synthetic oligonucleotide
ggugauaaugcugacucca

SEQ ID NO: 167206 - RNA, 19 nt, Artificial Sequence
  Description of Artificial Sequence: Synthetic oligonucleotide
gauacaccguaagaugcuc

SEQ ID NO: 167207 - RNA, 19 nt, Artificial Sequence
  Description of Artificial Sequence: Synthetic oligonucleotide
agguucucuuacgauucac

SEQ ID NO: 167208 - RNA, 19 nt, Artificial Sequence
  Description of Artificial Sequence: Synthetic oligonucleotide
gacuuugccuuuugauaca

SEQ ID NO: 167209 - RNA, 19 nt, Artificial Sequence
  Description of Artificial Sequence: Synthetic oligonucleotide
agcuaacuucauauagauc

SEQ ID NO: 167210 - RNA, 19 nt, Artificial Sequence
  Description of Artificial Sequence: Synthetic oligonucleotide
auccgaacuucauguauau

SEQ ID NO: 167211 - RNA, 19 nt, Artificial Sequence
  Description of Artificial Sequence: Synthetic oligonucleotide
cauucucuuaucgugcaca

SEQ ID NO: 167212 - RNA, 19 nt, Artificial Sequence
  Description of Artificial Sequence: Synthetic oligonucleotide
gauacccauucaagaacug

SEQ ID NO: 167213 - RNA, 19 nt, Artificial Sequence
  Description of Artificial Sequence: Synthetic oligonucleotide
uacugaucuugaaggcaac

SEQ ID NO: 167214 - RNA, 19 nt, Artificial Sequence
  Description of Artificial Sequence: Synthetic oligonucleotide
aguuagccuacuaaagaaa

SEQ ID NO: 167215 - RNA, 19 nt, Artificial Sequence
  Description of Artificial Sequence: Synthetic oligonucleotide
augagcaauacagaaucuu

SEQ ID NO: 167216 - RNA, 19 nt, Artificial Sequence
  Description of Artificial Sequence: Synthetic oligonucleotide
uacaccguaagaugcucuu

SEQ ID NO: 167217 - RNA, 19 nt, Artificial Sequence
  Description of Artificial Sequence: Synthetic oligonucleotide
cagagaauacccguaagaa

SEQ ID NO: 167218 - RNA, 19 nt, Artificial Sequence
  Description of Artificial Sequence: Synthetic oligonucleotide
ucucgcaguugcauguuuu

SEQ ID NO: 167219 - RNA, 19 nt, Artificial Sequence
  Description of Artificial Sequence: Synthetic oligonucleotide
gacaccagguacaaagcaa

SEQ ID NO: 167220 - RNA, 19 nt, Artificial Sequence
  Description of Artificial Sequence: Synthetic oligonucleotide
uucugaccccagaauugac

SEQ ID NO: 167221 - RNA, 19 nt, Artificial Sequence
  Description of Artificial Sequence: Synthetic oligonucleotide
guaguucccucuguugggc

SEQ ID NO: 167222 - RNA, 19 nt, Artificial Sequence
  Description of Artificial Sequence: Synthetic oligonucleotide
ugguuguaguucccucugu

SEQ ID NO: 167223 - RNA, 19 nt, Artificial Sequence
  Description of Artificial Sequence: Synthetic oligonucleotide
auuagcuuacaaagauggu

SEQ ID NO: 167224 - RNA, 19 nt, Artificial Sequence
  Description of Artificial Sequence: Synthetic oligonucleotide
accguaagaugcucuuccu

SEQ ID NO: 167225 - RNA, 19 nt, Artificial Sequence
  Description of Artificial Sequence: Synthetic oligonucleotide
cuacgacagcuuuucgcug

SEQ ID NO: 167226 - RNA, 19 nt, Artificial Sequence
  Description of Artificial Sequence: Synthetic oligonucleotide
acaccguaagaugcucuuc

SEQ ID NO: 167227 - RNA, 19 nt, Artificial Sequence
  Description of Artificial Sequence: Synthetic oligonucleotide
ccauucaagaacugacaug

SEQ ID NO: 167228 - RNA, 19 nt, Artificial Sequence
  Description of Artificial Sequence: Synthetic oligonucleotide
ccaccucgcauauugaauc

SEQ ID NO: 167229 - RNA, 19 nt, Artificial Sequence
  Description of Artificial Sequence: Synthetic oligonucleotide
cacgugcgggaacaguggc

SEQ ID NO: 167230 - RNA, 19 nt, Artificial Sequence
  Description of Artificial Sequence: Synthetic oligonucleotide
uguagcccugagauugauu

SEQ ID NO: 167231 - RNA, 19 nt, Artificial Sequence
  Description of Artificial Sequence: Synthetic oligonucleotide
ugggccgcagcagacacau

SEQ ID NO: 167232 - RNA, 19 nt, Artificial Sequence
  Description of Artificial Sequence: Synthetic oligonucleotide
acgauuaccaggagcucca

SEQ ID NO: 167233 - RNA, 19 nt, Artificial Sequence
  Description of Artificial Sequence: Synthetic oligonucleotide
ccucuaaggggacauuuug

SEQ ID NO: 167234 - RNA, 19 nt, Artificial Sequence
  Description of Artificial Sequence: Synthetic oligonucleotide
guauuuguuccaagaaugu

SEQ ID NO: 167235 - RNA, 19 nt, Artificial Sequence
  Description of Artificial Sequence: Synthetic oligonucleotide
ugcaauucaugaggaccac

SEQ ID NO: 167236 - RNA, 19 nt, Artificial Sequence
  Description of Artificial Sequence: Synthetic oligonucleotide
ccuggcaagccaaucauca

SEQ ID NO: 167237 - RNA, 19 nt, Artificial Sequence
  Description of Artificial Sequence: Synthetic oligonucleotide
cauuagacaacuggauuua

SEQ ID NO: 167238 - RNA, 19 nt, Artificial Sequence
  Description of Artificial Sequence: Synthetic oligonucleotide
gagguucucuuacgauuca

SEQ ID NO: 167239 - RNA, 19 nt, Artificial Sequence
  Description of Artificial Sequence: Synthetic oligonucleotide
auacaccguaagaugcucu

SEQ ID NO: 167240 - RNA, 19 nt, Artificial Sequence
  Description of Artificial Sequence: Synthetic oligonucleotide
ggggaguaaaugcuuaaua

SEQ ID NO: 167241 - RNA, 19 nt, Artificial Sequence
  Description of Artificial Sequence: Synthetic oligonucleotide
ccucuguucgaguaaccac

SEQ ID NO: 167242 - RNA, 19 nt, Artificial Sequence
  Description of Artificial Sequence: Synthetic oligonucleotide
ccuauuauauccgccacga

SEQ ID NO: 167243 - RNA, 19 nt, Artificial Sequence
  Description of Artificial Sequence: Synthetic oligonucleotide
cuguugggcauuccaccuc

SEQ ID NO: 167244 - RNA, 19 nt, Artificial Sequence
  Description of Artificial Sequence: Synthetic oligonucleotide
acgacagcuuuucgcugga

SEQ ID NO: 167245 - RNA, 19 nt, Artificial Sequence
  Description of Artificial Sequence: Synthetic oligonucleotide
accucgcauauugaauccu

SEQ ID NO: 167246 - RNA, 19 nt, Artificial Sequence
  Description of Artificial Sequence: Synthetic oligonucleotide
cgcauauugaauccuccac

SEQ ID NO: 167247 - RNA, 19 nt, Artificial Sequence
  Description of Artificial Sequence: Synthetic oligonucleotide
auucuucgcauaggagagu

SEQ ID NO: 167248 - RNA, 19 nt, Artificial Sequence
  Description of Artificial Sequence: Synthetic oligonucleotide
auguaucaguucguuuuau

SEQ ID NO: 167249 - RNA, 19 nt, Artificial Sequence
  Description of Artificial Sequence: Synthetic oligonucleotide
ccucgcauauugaauccuc

SEQ ID NO: 167250 - RNA, 19 nt, Artificial Sequence
  Description of Artificial Sequence: Synthetic oligonucleotide
caguucguuuuauuugggu

SEQ ID NO: 167251 - RNA, 19 nt, Artificial Sequence
  Description of Artificial Sequence: Synthetic oligonucleotide
cccguaagaaaauucuucu

SEQ ID NO: 167252 - RNA, 19 nt, Artificial Sequence
  Description of Artificial Sequence: Synthetic oligonucleotide
cacuuaguccuuccaugaa

SEQ ID NO: 167253 - RNA, 19 nt, Artificial Sequence
  Description of Artificial Sequence: Synthetic oligonucleotide
ccauuagacaacuggauuu

SEQ ID NO: 167254 - RNA, 19 nt, Artificial Sequence
  Description of Artificial Sequence: Synthetic oligonucleotide
gugucaucgaaguguucgu

SEQ ID NO: 167255 - RNA, 19 nt, Artificial Sequence
  Description of Artificial Sequence: Synthetic oligonucleotide
uuguagcccugagauugau

SEQ ID NO: 167256 - RNA, 19 nt, Artificial Sequence
  Description of Artificial Sequence: Synthetic oligonucleotide
ugaggaccacuuaguccuu

SEQ ID NO: 167257 - RNA, 19 nt, Artificial Sequence
  Description of Artificial Sequence: Synthetic oligonucleotide
agaucccauuagacaacug

SEQ ID NO: 167258 - RNA, 19 nt, Artificial Sequence
  Description of Artificial Sequence: Synthetic oligonucleotide
ggguauggguagccaauuc

SEQ ID NO: 167259 - RNA, 19 nt, Artificial Sequence
  Description of Artificial Sequence: Synthetic oligonucleotide
gcacgugcgggaacagugg

SEQ ID NO: 167260 - RNA, 19 nt, Artificial Sequence
  Description of Artificial Sequence: Synthetic oligonucleotide
cugugucaucgaaguguuc

SEQ ID NO: 167261 - RNA, 19 nt, Artificial Sequence
  Description of Artificial Sequence: Synthetic oligonucleotide
uagccacgauuguuuccuc

SEQ ID NO: 167262 - RNA, 19 nt, Artificial Sequence
  Description of Artificial Sequence: Synthetic oligonucleotide
augguggaguuaacuacua

SEQ ID NO: 167263 - RNA, 19 nt, Artificial Sequence
  Description of Artificial Sequence: Synthetic oligonucleotide
cuuugggccgcagcagaca

SEQ ID NO: 167264 - RNA, 19 nt, Artificial Sequence
  Description of Artificial Sequence: Synthetic oligonucleotide
aggcggucucucgauauuu

SEQ ID NO: 167265 - RNA, 19 nt, Artificial Sequence
  Description of Artificial Sequence: Synthetic oligonucleotide
ccgguuugucagaaauuuc

SEQ ID NO: 167266 - RNA, 19 nt, Artificial Sequence
  Description of Artificial Sequence: Synthetic oligonucleotide
caaugacucccgacuguua

SEQ ID NO: 167267 - RNA, 19 nt, Artificial Sequence
  Description of Artificial Sequence: Synthetic oligonucleotide
gccgcagcagacacauuug

SEQ ID NO: 167268 - RNA, 19 nt, Artificial Sequence
  Description of Artificial Sequence: Synthetic oligonucleotide
gccacgauuguuuccucgu

SEQ ID NO: 167269 - RNA, 19 nt, Artificial Sequence
  Description of Artificial Sequence: Synthetic oligonucleotide
gguuguaguucccucuguu

SEQ ID NO: 167270 - RNA, 19 nt, Artificial Sequence
  Description of Artificial Sequence: Synthetic oligonucleotide
gugauaaugcugacuccau

SEQ ID NO: 167271 - RNA, 19 nt, Artificial Sequence
  Description of Artificial Sequence: Synthetic oligonucleotide
caguuauggcagagcacgu

SEQ ID NO: 167272 - RNA, 19 nt, Artificial Sequence
  Description of Artificial Sequence: Synthetic oligonucleotide
cuguuaccuucaucucaaa

SEQ ID NO: 167273 - RNA, 19 nt, Artificial Sequence
  Description of Artificial Sequence: Synthetic oligonucleotide
cuauuauauccgccacgau

SEQ ID NO: 167274 - RNA, 19 nt, Artificial Sequence
  Description of Artificial Sequence: Synthetic oligonucleotide
gaacccgcaggcacuuccu

SEQ ID NO: 167275 - RNA, 19 nt, Artificial Sequence
  Description of Artificial Sequence: Synthetic oligonucleotide
gcggucucucgauauuuua

SEQ ID NO: 167276 - RNA, 19 nt, Artificial Sequence
  Description of Artificial Sequence: Synthetic oligonucleotide
caacagcguguucaguuuu

SEQ ID NO: 167277 - RNA, 19 nt, Artificial Sequence
  Description of Artificial Sequence: Synthetic oligonucleotide
ccccaagcaacauuccacu

SEQ ID NO: 167278 - RNA, 19 nt, Artificial Sequence
  Description of Artificial Sequence: Synthetic oligonucleotide
gccuuuugauacaccguaa

SEQ ID NO: 167279 - RNA, 19 nt, Artificial Sequence
  Description of Artificial Sequence: Synthetic oligonucleotide
ccaauccgaacuucaugua

SEQ ID NO: 167280 - RNA, 19 nt, Artificial Sequence
  Description of Artificial Sequence: Synthetic oligonucleotide
cccauuagacaacuggauu

SEQ ID NO: 167281 - RNA, 19 nt, Artificial Sequence
  Description of Artificial Sequence: Synthetic oligonucleotide
gcuuaguaacccagguagu

SEQ ID NO: 167282 - RNA, 19 nt, Artificial Sequence
  Description of Artificial Sequence: Synthetic oligonucleotide
gcauauugccucuccuauu

SEQ ID NO: 167283 - RNA, 19 nt, Artificial Sequence
  Description of Artificial Sequence: Synthetic oligonucleotide
gucucgcaguugcauguuu

SEQ ID NO: 167284 - RNA, 19 nt, Artificial Sequence
  Description of Artificial Sequence: Synthetic oligonucleotide
cccgguuugucagaaauuu

SEQ ID NO: 167285 - RNA, 19 nt, Artificial Sequence
  Description of Artificial Sequence: Synthetic oligonucleotide
gccaccucgcauauugaau

SEQ ID NO: 167286 - RNA, 19 nt, Artificial Sequence
  Description of Artificial Sequence: Synthetic oligonucleotide
ggcuaaggagauacccauu

SEQ ID NO: 167287 - RNA, 19 nt, Artificial Sequence
  Description of Artificial Sequence: Synthetic oligonucleotide
ccgccacgauuaccaggag

SEQ ID NO: 167288 - RNA, 19 nt, Artificial Sequence
  Description of Artificial Sequence: Synthetic oligonucleotide
cccgacuguuauucucugu

SEQ ID NO: 167289 - RNA, 19 nt, Artificial Sequence
  Description of Artificial Sequence: Synthetic oligonucleotide
ggcggucucucgauauuuu

SEQ ID NO: 167290 - RNA, 19 nt, Artificial Sequence
  Description of Artificial Sequence: Synthetic oligonucleotide
cgacagcuuuucgcuggaa

SEQ ID NO: 167291 - RNA, 19 nt, Artificial Sequence
  Description of Artificial Sequence: Synthetic oligonucleotide
aaugaaaugggucucgguc

SEQ ID NO: 167292 - RNA, 19 nt, Artificial Sequence
  Description of Artificial Sequence: Synthetic oligonucleotide
aauaagguauuauacauga

SEQ ID NO: 167293 - RNA, 19 nt, Artificial Sequence
  Description of Artificial Sequence: Synthetic oligonucleotide
agagcuacacauuugaugg

SEQ ID NO: 167294 - RNA, 19 nt, Artificial Sequence
  Description of Artificial Sequence: Synthetic oligonucleotide
uuauaauuaaggaagcaug

SEQ ID NO: 167295 - RNA, 19 nt, Artificial Sequence
  Description of Artificial Sequence: Synthetic oligonucleotide
aauauaucgcaagagcuac

SEQ ID NO: 167296 - RNA, 19 nt, Artificial Sequence
  Description of Artificial Sequence: Synthetic oligonucleotide
uggauuauuagacuucagg

SEQ ID NO: 167297 - RNA, 19 nt, Artificial Sequence
  Description of Artificial Sequence: Synthetic oligonucleotide
aguacuauuuauuuggaug

SEQ ID NO: 167298 - RNA, 19 nt, Artificial Sequence
  Description of Artificial Sequence: Synthetic oligonucleotide
aggaauauugugcuggccc

SEQ ID NO: 167299 - RNA, 19 nt, Artificial Sequence
  Description of Artificial Sequence: Synthetic oligonucleotide
uugaugugguaauauaucg

SEQ ID NO: 167300 - RNA, 19 nt, Artificial Sequence
  Description of Artificial Sequence: Synthetic oligonucleotide
agaacaaauuaucagaggu

SEQ ID NO: 167301 - RNA, 19 nt, Artificial Sequence
  Description of Artificial Sequence: Synthetic oligonucleotide
aaugucuuggauuauuaga

SEQ ID NO: 167302 - RNA, 19 nt, Artificial Sequence
  Description of Artificial Sequence: Synthetic oligonucleotide
aaaucucccauucaaauaa

SEQ ID NO: 167303 - RNA, 19 nt, Artificial Sequence
  Description of Artificial Sequence: Synthetic oligonucleotide
uuugucauaaucugguggc

SEQ ID NO: 167304 - RNA, 19 nt, Artificial Sequence
  Description of Artificial Sequence: Synthetic oligonucleotide
ucuuuuggcaaacuuagga

SEQ ID NO: 167305 - RNA, 19 nt, Artificial Sequence
  Description of Artificial Sequence: Synthetic oligonucleotide
aacuguagcaauucuagga

SEQ ID NO: 167306 - RNA, 19 nt, Artificial Sequence
  Description of Artificial Sequence: Synthetic oligonucleotide
uuccauauucaaaucgucg

SEQ ID NO: 167307 - RNA, 19 nt, Artificial Sequence
  Description of Artificial Sequence: Synthetic oligonucleotide
uguguuugucauaaucugg

SEQ ID NO: 167308 - RNA, 19 nt, Artificial Sequence
  Description of Artificial Sequence: Synthetic oligonucleotide
aacaaauuaucagaggugu

SEQ ID NO: 167309 - RNA, 19 nt, Artificial Sequence
  Description of Artificial Sequence: Synthetic oligonucleotide
gguaucuauaaccagacag

SEQ ID NO: 167310 - RNA, 19 nt, Artificial Sequence
  Description of Artificial Sequence: Synthetic oligonucleotide
aguaucaaguacucucugc

SEQ ID NO: 167311 - RNA, 19 nt, Artificial Sequence
  Description of Artificial Sequence: Synthetic oligonucleotide
aacaguguccgaacgaacc

SEQ ID NO: 167312 - RNA, 19 nt, Artificial Sequence
  Description of Artificial Sequence: Synthetic oligonucleotide
acgagagauagccucaagc

SEQ ID NO: 167313 - RNA, 19 nt, Artificial Sequence
  Description of Artificial Sequence: Synthetic oligonucleotide
agagacgagagauagccuc

SEQ ID NO: 167314 - RNA, 19 nt, Artificial Sequence
  Description of Artificial Sequence: Synthetic oligonucleotide
aaacuuaggacaaccagag

SEQ ID NO: 167315 - RNA, 19 nt, Artificial Sequence
  Description of Artificial Sequence: Synthetic oligonucleotide
guuugucauaaucuggugg

SEQ ID NO: 167316 - RNA, 19 nt, Artificial Sequence
  Description of Artificial Sequence: Synthetic oligonucleotide
ugcauugaaauauuuacau

SEQ ID NO: 167317 - RNA, 19 nt, Artificial Sequence
  Description of Artificial Sequence: Synthetic oligonucleotide
auaucuaagagcauccuuc

SEQ ID NO: 167318 - RNA, 19 nt, Artificial Sequence
  Description of Artificial Sequence: Synthetic oligonucleotide
uacgcuggaaggaacauug

SEQ ID NO: 167319 - RNA, 19 nt, Artificial Sequence
  Description of Artificial Sequence: Synthetic oligonucleotide
uuugaugugguaauauauc

SEQ ID NO: 167320 - RNA, 19 nt, Artificial Sequence
  Description of Artificial Sequence: Synthetic oligonucleotide
uuggcauauacgcuggaag

SEQ ID NO: 167321 - RNA, 19 nt, Artificial Sequence
  Description of Artificial Sequence: Synthetic oligonucleotide
uccauauucaaaucgucga

SEQ ID NO: 167322 - RNA, 19 nt, Artificial Sequence
  Description of Artificial Sequence: Synthetic oligonucleotide
guaucuauaaccagacagg

SEQ ID NO: 167323 - RNA, 19 nt, Artificial Sequence
  Description of Artificial Sequence: Synthetic oligonucleotide
uaucgcaagagcuacacau

SEQ ID NO: 167324 - RNA, 19 nt, Artificial Sequence
  Description of Artificial Sequence: Synthetic oligonucleotide
uguaaggagucacuguuga

SEQ ID NO: 167325 - RNA, 19 nt, Artificial Sequence
  Description of Artificial Sequence: Synthetic oligonucleotide
augccuagugacucaagcc

SEQ ID NO: 167326 - RNA, 19 nt, Artificial Sequence
  Description of Artificial Sequence: Synthetic oligonucleotide
gguaauauaucgcaagagc

SEQ ID NO: 167327 - RNA, 19 nt, Artificial Sequence
  Description of Artificial Sequence: Synthetic oligonucleotide
gagcauacccauuccaagg

SEQ ID NO: 167328 - RNA, 19 nt, Artificial Sequence
  Description of Artificial Sequence: Synthetic oligonucleotide
auauucaaaucgucgaugu

SEQ ID NO: 167329 - RNA, 19 nt, Artificial Sequence
  Description of Artificial Sequence: Synthetic oligonucleotide
aaauaagguauuauacaug

SEQ ID NO: 167330 - RNA, 19 nt, Artificial Sequence
  Description of Artificial Sequence: Synthetic oligonucleotide
agguauuauacaugagagg

SEQ ID NO: 167331 - RNA, 19 nt, Artificial Sequence
  Description of Artificial Sequence: Synthetic oligonucleotide
ucaucuaagagguauucau

SEQ ID NO: 167332 - RNA, 19 nt, Artificial Sequence
  Description of Artificial Sequence: Synthetic oligonucleotide
agaacacugauuucacguc

SEQ ID NO: 167333 - RNA, 19 nt, Artificial Sequence
  Description of Artificial Sequence: Synthetic oligonucleotide
auaucagacuguguguacc

SEQ ID NO: 167334 - RNA, 19 nt, Artificial Sequence
  Description of Artificial Sequence: Synthetic oligonucleotide
ugaacaaacaacuccccuc

SEQ ID NO: 167335 - RNA, 19 nt, Artificial Sequence
  Description of Artificial Sequence: Synthetic oligonucleotide
aaagcagcgagaaggaaug

SEQ ID NO: 167336 - RNA, 19 nt, Artificial Sequence
  Description of Artificial Sequence: Synthetic oligonucleotide
uccuccaugaaagaagugc

SEQ ID NO: 167337 - RNA, 19 nt, Artificial Sequence
  Description of Artificial Sequence: Synthetic oligonucleotide
ugccuagugacucaagcca

SEQ ID NO: 167338 - RNA, 19 nt, Artificial Sequence
  Description of Artificial Sequence: Synthetic oligonucleotide
ugguuauaauuaaggaagc

SEQ ID NO: 167339 - RNA, 19 nt, Artificial Sequence
  Description of Artificial Sequence: Synthetic oligonucleotide
aacuauauucucugcucug

SEQ ID NO: 167340 - RNA, 19 nt, Artificial Sequence
  Description of Artificial Sequence: Synthetic oligonucleotide
aauaccucaggaaauagua

SEQ ID NO: 167341 - RNA, 19 nt, Artificial Sequence
  Description of Artificial Sequence: Synthetic oligonucleotide
auaaucugguggcacuucg

SEQ ID NO: 167342 - RNA, 19 nt, Artificial Sequence
  Description of Artificial Sequence: Synthetic oligonucleotide
gguauuauacaugagagga

SEQ ID NO: 167343 - RNA, 19 nt, Artificial Sequence
  Description of Artificial Sequence: Synthetic oligonucleotide
caggaagucuuucuuauag

SEQ ID NO: 167344 - RNA, 19 nt, Artificial Sequence
  Description of Artificial Sequence: Synthetic oligonucleotide
uuuccuccaugaaagaagu

SEQ ID NO: 167345 - RNA, 19 nt, Artificial Sequence
  Description of Artificial Sequence: Synthetic oligonucleotide
agaacaaugcgcuuccagu

SEQ ID NO: 167346 - RNA, 19 nt, Artificial Sequence
  Description of Artificial Sequence: Synthetic oligonucleotide
uaucuaagagcauccuucc

SEQ ID NO: 167347 - RNA, 19 nt, Artificial Sequence
  Description of Artificial Sequence: Synthetic oligonucleotide
acuacacaaaccucgguca

SEQ ID NO: 167348 - RNA, 19 nt, Artificial Sequence
  Description of Artificial Sequence: Synthetic oligonucleotide
gaaccgguaaaucuguuuc

SEQ ID NO: 167349 - RNA, 19 nt, Artificial Sequence
  Description of Artificial Sequence: Synthetic oligonucleotide
uauagagaugagagaauac

SEQ ID NO: 167350 - RNA, 19 nt, Artificial Sequence
  Description of Artificial Sequence: Synthetic oligonucleotide
ucacagagacgagagauag

SEQ ID NO: 167351 - RNA, 19 nt, Artificial Sequence
  Description of Artificial Sequence: Synthetic oligonucleotide
uauagagcauacccauucc

SEQ ID NO: 167352 - RNA, 19 nt, Artificial Sequence
  Description of Artificial Sequence: Synthetic oligonucleotide
aauacuuggcauauacgcu

SEQ ID NO: 167353 - RNA, 19 nt, Artificial Sequence
  Description of Artificial Sequence: Synthetic oligonucleotide
gaacauugauauugaacug

SEQ ID NO: 167354 - RNA, 19 nt, Artificial Sequence
  Description of Artificial Sequence: Synthetic oligonucleotide
gaacuguagcaauucuagg

SEQ ID NO: 167355 - RNA, 19 nt, Artificial Sequence
  Description of Artificial Sequence: Synthetic oligonucleotide
auaauuaaggaagcaugag

SEQ ID NO: 167356 - RNA, 19 nt, Artificial Sequence
  Description of Artificial Sequence: Synthetic oligonucleotide
gguucuugaagcgagaagc

SEQ ID NO: 167357 - RNA, 19 nt, Artificial Sequence
  Description of Artificial Sequence: Synthetic oligonucleotide
agaacggagaucaaaauaa

SEQ ID NO: 167358 - RNA, 19 nt, Artificial Sequence
  Description of Artificial Sequence: Synthetic oligonucleotide
cuucggauuucgaaagagg

SEQ ID NO: 167359 - RNA, 19 nt, Artificial Sequence
  Description of Artificial Sequence: Synthetic oligonucleotide
aggcuugaacacaauagcc

SEQ ID NO: 167360 - RNA, 19 nt, Artificial Sequence
  Description of Artificial Sequence: Synthetic oligonucleotide
augaaaugggucucggucu

SEQ ID NO: 167361 - RNA, 19 nt, Artificial Sequence
  Description of Artificial Sequence: Synthetic oligonucleotide
caucucccgacuuggaugg

SEQ ID NO: 167362 - RNA, 19 nt, Artificial Sequence
  Description of Artificial Sequence: Synthetic oligonucleotide
uagaguuauagagaugaga

SEQ ID NO: 167363 - RNA, 19 nt, Artificial Sequence
  Description of Artificial Sequence: Synthetic oligonucleotide
uuauagagaugagagaaua

SEQ ID NO: 167364 - RNA, 19 nt, Artificial Sequence
  Description of Artificial Sequence: Synthetic oligonucleotide
ucacugcaaccuaagaaga

SEQ ID NO: 167365 - RNA, 19 nt, Artificial Sequence
  Description of Artificial Sequence: Synthetic oligonucleotide
gaaggauugaauuccauau

SEQ ID NO: 167366 - RNA, 19 nt, Artificial Sequence
  Description of Artificial Sequence: Synthetic oligonucleotide
acaguguccgaacgaaccg

SEQ ID NO: 167367 - RNA, 19 nt, Artificial Sequence
  Description of Artificial Sequence: Synthetic oligonucleotide
agagauagccucaagcuug

SEQ ID NO: 167368 - RNA, 19 nt, Artificial Sequence
  Description of Artificial Sequence: Synthetic oligonucleotide
uuagaguuauagagaugag

SEQ ID NO: 167369 - RNA, 19 nt, Artificial Sequence
  Description of Artificial Sequence: Synthetic oligonucleotide
cccaaagcaaaucagaaac

SEQ ID NO: 167370 - RNA, 19 nt, Artificial Sequence
  Description of Artificial Sequence: Synthetic oligonucleotide
cuggacgacacgcagcacg

SEQ ID NO: 167371 - RNA, 19 nt, Artificial Sequence
  Description of Artificial Sequence: Synthetic oligonucleotide
ugaaggauugaauuccaua

SEQ ID NO: 167372 - RNA, 19 nt, Artificial Sequence
  Description of Artificial Sequence: Synthetic oligonucleotide
gacucaagccaaaagguac

SEQ ID NO: 167373 - RNA, 19 nt, Artificial Sequence
  Description of Artificial Sequence: Synthetic oligonucleotide
cugguaucuauaaccagac

SEQ ID NO: 167374 - RNA, 19 nt, Artificial Sequence
  Description of Artificial Sequence: Synthetic oligonucleotide
uucgaaagaggguggaggu

SEQ ID NO: 167375 - RNA, 19 nt, Artificial Sequence
  Description of Artificial Sequence: Synthetic oligonucleotide
caugccuagugacucaagc

SEQ ID NO: 167376 - RNA, 19 nt, Artificial Sequence
  Description of Artificial Sequence: Synthetic oligonucleotide
uauaucgcaagagcuacac

SEQ ID NO: 167377 - RNA, 19 nt, Artificial Sequence
  Description of Artificial Sequence: Synthetic oligonucleotide
gacgacacgcagcacgagg

SEQ ID NO: 167378 - RNA, 19 nt, Artificial Sequence
  Description of Artificial Sequence: Synthetic oligonucleotide
agcaauucuaggaacuguc

SEQ ID NO: 167379 - RNA, 19 nt, Artificial Sequence
  Description of Artificial Sequence: Synthetic oligonucleotide
uacaacugaaauccucagu

SEQ ID NO: 167380 - RNA, 19 nt, Artificial Sequence
  Description of Artificial Sequence: Synthetic oligonucleotide
ucuacaugccuagugacuc

SEQ ID NO: 167381 - RNA, 19 nt, Artificial Sequence
  Description of Artificial Sequence: Synthetic oligonucleotide
gaacgaaccgguaaaucug

SEQ ID NO: 167382 - RNA, 19 nt, Artificial Sequence
  Description of Artificial Sequence: Synthetic oligonucleotide
ggaauauugugcuggcccg

SEQ ID NO: 167383 - RNA, 19 nt, Artificial Sequence
  Description of Artificial Sequence: Synthetic oligonucleotide
aaagcaaaucagaaacagu

SEQ ID NO: 167384 - RNA, 19 nt, Artificial Sequence
  Description of Artificial Sequence: Synthetic oligonucleotide
acagauuaacacucauuga

SEQ ID NO: 167385 - RNA, 19 nt, Artificial Sequence
  Description of Artificial Sequence: Synthetic oligonucleotide
auacuggguuuccagaaca

SEQ ID NO: 167386 - RNA, 19 nt, Artificial Sequence
  Description of Artificial Sequence: Synthetic oligonucleotide
ucggucuacaugccuagug

SEQ ID NO: 167387 - RNA, 19 nt, Artificial Sequence
  Description of Artificial Sequence: Synthetic oligonucleotide
auagagcauacccauucca

SEQ ID NO: 167388 - RNA, 19 nt, Artificial Sequence
  Description of Artificial Sequence: Synthetic oligonucleotide
cauauucaaaucgucgaug

SEQ ID NO: 167389 - RNA, 19 nt, Artificial Sequence
  Description of Artificial Sequence: Synthetic oligonucleotide
acugguaucuauaaccaga

SEQ ID NO: 167390 - RNA, 19 nt, Artificial Sequence
  Description of Artificial Sequence: Synthetic oligonucleotide
aaccgguaaaucuguuucu

SEQ ID NO: 167391 - RNA, 19 nt, Artificial Sequence
  Description of Artificial Sequence: Synthetic oligonucleotide
agauuaacacucauugaug

SEQ ID NO: 167392 - RNA, 19 nt, Artificial Sequence
  Description of Artificial Sequence: Synthetic oligonucleotide
gguuguuugccucugccag

SEQ ID NO: 167393 - RNA, 19 nt, Artificial Sequence
  Description of Artificial Sequence: Synthetic oligonucleotide
gauuauuagacuucagguu

SEQ ID NO: 167394 - RNA, 19 nt, Artificial Sequence
  Description of Artificial Sequence: Synthetic oligonucleotide
acaaaccucggucacugca

SEQ ID NO: 167395 - RNA, 19 nt, Artificial Sequence
  Description of Artificial Sequence: Synthetic oligonucleotide
aaacuacacaaaccucggu

SEQ ID NO: 167396 - RNA, 19 nt, Artificial Sequence
  Description of Artificial Sequence: Synthetic oligonucleotide
ugcguagggaaaaguuucc

SEQ ID NO: 167397 - RNA, 19 nt, Artificial Sequence
  Description of Artificial Sequence: Synthetic oligonucleotide
ugacucaagccaaaaggua

SEQ ID NO: 167398 - RNA, 19 nt, Artificial Sequence
  Description of Artificial Sequence: Synthetic oligonucleotide
gagaacggagaucaaaaua

SEQ ID NO: 167399 - RNA, 19 nt, Artificial Sequence
  Description of Artificial Sequence: Synthetic oligonucleotide
uaauugaaggguaguuaau

SEQ ID NO: 167400 - RNA, 19 nt, Artificial Sequence
  Description of Artificial Sequence: Synthetic oligonucleotide
aguaagucuuuaucauugu

SEQ ID NO: 167401 - RNA, 19 nt, Artificial Sequence
  Description of Artificial Sequence: Synthetic oligonucleotide
acgaaauggcauuucuaca

SEQ ID NO: 167402 - RNA, 19 nt, Artificial Sequence
  Description of Artificial Sequence: Synthetic oligonucleotide
aaggcuugauacuggguuu

SEQ ID NO: 167403 - RNA, 19 nt, Artificial Sequence
  Description of Artificial Sequence: Synthetic oligonucleotide
agagccuuucaagguauac

SEQ ID NO: 167404 - RNA, 19 nt, Artificial Sequence
  Description of Artificial Sequence: Synthetic oligonucleotide
auaagauuucugcuaucaa

SEQ ID NO: 167405 - RNA, 19 nt, Artificial Sequence
  Description of Artificial Sequence: Synthetic oligonucleotide
ucgugugcccggcugguag

SEQ ID NO: 167406 - RNA, 19 nt, Artificial Sequence
  Description of Artificial Sequence: Synthetic oligonucleotide
agcaggauugcucccagaa

SEQ ID NO: 167407 - RNA, 19 nt, Artificial Sequence
  Description of Artificial Sequence: Synthetic oligonucleotide
ggccaagaaggcuugauac

SEQ ID NO: 167408 - RNA, 19 nt, Artificial Sequence
  Description of Artificial Sequence: Synthetic oligonucleotide
cucucugcguacagaacgc

SEQ ID NO: 167409 - RNA, 19 nt, Artificial Sequence
  Description of Artificial Sequence: Synthetic oligonucleotide
acuauauucucugcucugu

SEQ ID NO: 167410 - RNA, 19 nt, Artificial Sequence
  Description of Artificial Sequence: Synthetic oligonucleotide
ugucauaaucugguggcac

SEQ ID NO: 167411 - RNA, 19 nt, Artificial Sequence
  Description of Artificial Sequence: Synthetic oligonucleotide
uaagguucuugaagcgaga

SEQ ID NO: 167412 - RNA, 19 nt, Artificial Sequence
  Description of Artificial Sequence: Synthetic oligonucleotide
ucggucacugcaaccuaag

SEQ ID NO: 167413 - RNA, 19 nt, Artificial Sequence
  Description of Artificial Sequence: Synthetic oligonucleotide
aacuuaggacaaccagaga

SEQ ID NO: 167414 - RNA, 19 nt, Artificial Sequence
  Description of Artificial Sequence: Synthetic oligonucleotide
aucgucgauguuuucccug

SEQ ID NO: 167415 - RNA, 19 nt, Artificial Sequence
  Description of Artificial Sequence: Synthetic oligonucleotide
ucgaccucuguuuaagguu

SEQ ID NO: 167416 - RNA, 19 nt, Artificial Sequence
  Description of Artificial Sequence: Synthetic oligonucleotide
agagaacggagaucaaaau

SEQ ID NO: 167417 - RNA, 19 nt, Artificial Sequence
  Description of Artificial Sequence: Synthetic oligonucleotide
cagauuaacacucauugau

SEQ ID NO: 167418 - RNA, 19 nt, Artificial Sequence
  Description of Artificial Sequence: Synthetic oligonucleotide
ucuacacuuuucgaccucu

SEQ ID NO: 167419 - RNA, 19 nt, Artificial Sequence
  Description of Artificial Sequence: Synthetic oligonucleotide
uggacgacacgcagcacga

SEQ ID NO: 167420 - RNA, 19 nt, Artificial Sequence
  Description of Artificial Sequence: Synthetic oligonucleotide
uuggaugggcauucaacuc

SEQ ID NO: 167421 - RNA, 19 nt, Artificial Sequence
  Description of Artificial Sequence: Synthetic oligonucleotide
ugagguccgugucgggccg

SEQ ID NO: 167422 - RNA, 19 nt, Artificial Sequence
  Description of Artificial Sequence: Synthetic oligonucleotide
aacgaaccgguaaaucugu

SEQ ID NO: 167423 - RNA, 19 nt, Artificial Sequence
  Description of Artificial Sequence: Synthetic oligonucleotide
guuauaauuaaggaagcau

SEQ ID NO: 167424 - RNA, 19 nt, Artificial Sequence
  Description of Artificial Sequence: Synthetic oligonucleotide
auacccauuccaagggcac

SEQ ID NO: 167425 - RNA, 19 nt, Artificial Sequence
  Description of Artificial Sequence: Synthetic oligonucleotide
cuuaaagccucucugcgua

SEQ ID NO: 167426 - RNA, 19 nt, Artificial Sequence
  Description of Artificial Sequence: Synthetic oligonucleotide
ugguaucuauaaccagaca

SEQ ID NO: 167427 - RNA, 19 nt, Artificial Sequence
  Description of Artificial Sequence: Synthetic oligonucleotide
acaauagccaacagucuga

SEQ ID NO: 167428 - RNA, 19 nt, Artificial Sequence
  Description of Artificial Sequence: Synthetic oligonucleotide
aacggagaucaaaauaaua

SEQ ID NO: 167429 - RNA, 19 nt, Artificial Sequence
  Description of Artificial Sequence: Synthetic oligonucleotide
cagaacacugauuucacgu

SEQ ID NO: 167430 - RNA, 19 nt, Artificial Sequence
  Description of Artificial Sequence: Synthetic oligonucleotide
uauucaaaucgucgauguu

SEQ ID NO: 167431 - RNA, 19 nt, Artificial Sequence
  Description of Artificial Sequence: Synthetic oligonucleotide
cagugcacaaggcuugaac

SEQ ID NO: 167432 - RNA, 19 nt, Artificial Sequence
  Description of Artificial Sequence: Synthetic oligonucleotide
gcacuucggauuucgaaag

SEQ ID NO: 167433 - RNA, 19 nt, Artificial Sequence
  Description of Artificial Sequence: Synthetic oligonucleotide
auuucgaaagaggguggag

SEQ ID NO: 167434 - RNA, 19 nt, Artificial Sequence
  Description of Artificial Sequence: Synthetic oligonucleotide
cacaacuaauuaauacaga

SEQ ID NO: 167435 - RNA, 19 nt, Artificial Sequence
  Description of Artificial Sequence: Synthetic oligonucleotide
accaccguggcagaaucag

SEQ ID NO: 167436 - RNA, 19 nt, Artificial Sequence
  Description of Artificial Sequence: Synthetic oligonucleotide
gcaagagcuacacauuuga

SEQ ID NO: 167437 - RNA, 19 nt, Artificial Sequence
  Description of Artificial Sequence: Synthetic oligonucleotide
uggcacuucggauuucgaa

SEQ ID NO: 167438 - RNA, 19 nt, Artificial Sequence
  Description of Artificial Sequence: Synthetic oligonucleotide
auauacgcuggaaggaaca

SEQ ID NO: 167439 - RNA, 19 nt, Artificial Sequence
  Description of Artificial Sequence: Synthetic oligonucleotide
ucacgucccuuaaagccuc

SEQ ID NO: 167440 - RNA, 19 nt, Artificial Sequence
  Description of Artificial Sequence: Synthetic oligonucleotide
ugucgggccgguaggacuc

SEQ ID NO: 167441 - RNA, 19 nt, Artificial Sequence
  Description of Artificial Sequence: Synthetic oligonucleotide
gcaauucuaggaacugucg

SEQ ID NO: 167442 - RNA, 19 nt, Artificial Sequence
  Description of Artificial Sequence: Synthetic oligonucleotide
uacuauuuauuuggauguc

SEQ ID NO: 167443 - RNA, 19 nt, Artificial Sequence
  Description of Artificial Sequence: Synthetic oligonucleotide
gacacgcagcacgagguug

SEQ ID NO: 167444 - RNA, 19 nt, Artificial Sequence
  Description of Artificial Sequence: Synthetic oligonucleotide
auuugaugguguacuugag

SEQ ID NO: 167445 - RNA, 19 nt, Artificial Sequence
  Description of Artificial Sequence: Synthetic oligonucleotide
cauacgucaagagccuuuc

SEQ ID NO: 167446 - RNA, 19 nt, Artificial Sequence
  Description of Artificial Sequence: Synthetic oligonucleotide
uugaugcguagggaaaagu

SEQ ID NO: 167447 - RNA, 19 nt, Artificial Sequence
  Description of Artificial Sequence: Synthetic oligonucleotide
gcaucucccgacuuggaug

SEQ ID NO: 167448 - RNA, 19 nt, Artificial Sequence
  Description of Artificial Sequence: Synthetic oligonucleotide
cacagagacgagagauagc

SEQ ID NO: 167449 - RNA, 19 nt, Artificial Sequence
  Description of Artificial Sequence: Synthetic oligonucleotide
auaucgcaagagcuacaca

SEQ ID NO: 167450 - RNA, 19 nt, Artificial Sequence
  Description of Artificial Sequence: Synthetic oligonucleotide
uaaagccucucugcguaca

SEQ ID NO: 167451 - RNA, 19 nt, Artificial Sequence
  Description of Artificial Sequence: Synthetic oligonucleotide
accucaggaaauaguaaca

SEQ ID NO: 167452 - RNA, 19 nt, Artificial Sequence
  Description of Artificial Sequence: Synthetic oligonucleotide
uucuacacuuuucgaccuc

SEQ ID NO: 167453 - RNA, 19 nt, Artificial Sequence
  Description of Artificial Sequence: Synthetic oligonucleotide
uuccuccaugaaagaagug

SEQ ID NO: 167454 - RNA, 19 nt, Artificial Sequence
  Description of Artificial Sequence: Synthetic oligonucleotide
agaauacgaaauggcauuu

SEQ ID NO: 167455 - RNA, 19 nt, Artificial Sequence
  Description of Artificial Sequence: Synthetic oligonucleotide
uauacgcuggaaggaacau

SEQ ID NO: 167456 - RNA, 19 nt, Artificial Sequence
  Description of Artificial Sequence: Synthetic oligonucleotide
guauuauacaugagaggaa

SEQ ID NO: 167457 - RNA, 19 nt, Artificial Sequence
  Description of Artificial Sequence: Synthetic oligonucleotide
aaggaagcaugagccuuca

SEQ ID NO: 167458 - RNA, 19 nt, Artificial Sequence
  Description of Artificial Sequence: Synthetic oligonucleotide
gguacaaacuauauucucu

SEQ ID NO: 167459 - RNA, 19 nt, Artificial Sequence
  Description of Artificial Sequence: Synthetic oligonucleotide
aucuauaaccagacaggga

SEQ ID NO: 167460 - RNA, 19 nt, Artificial Sequence
  Description of Artificial Sequence: Synthetic oligonucleotide
gguuauaauuaaggaagca

SEQ ID NO: 167461 - RNA, 19 nt, Artificial Sequence
  Description of Artificial Sequence: Synthetic oligonucleotide
gaacaguguccgaacgaac

SEQ ID NO: 167462 - RNA, 19 nt, Artificial Sequence
  Description of Artificial Sequence: Synthetic oligonucleotide
agugcgcauuccuccggag

SEQ ID NO: 167463 - RNA, 19 nt, Artificial Sequence
  Description of Artificial Sequence: Synthetic oligonucleotide
gugacucaagccaaaaggu

SEQ ID NO: 167464 - RNA, 19 nt, Artificial Sequence
  Description of Artificial Sequence: Synthetic oligonucleotide
acacugauuucacgucccu

SEQ ID NO: 167465 - RNA, 19 nt, Artificial Sequence
  Description of Artificial Sequence: Synthetic oligonucleotide
ucaaaucgucgauguuuuc

SEQ ID NO: 167466 - RNA, 19 nt, Artificial Sequence
  Description of Artificial Sequence: Synthetic oligonucleotide
uacaugccuagugacucaa

SEQ ID NO: 167467 - RNA, 19 nt, Artificial Sequence
  Description of Artificial Sequence: Synthetic oligonucleotide
gaauauugugcuggcccga

SEQ ID NO: 167468 - RNA, 19 nt, Artificial Sequence
  Description of Artificial Sequence: Synthetic oligonucleotide
gagagauagccucaagcuu

SEQ ID NO: 167469 - RNA, 19 nt, Artificial Sequence
  Description of Artificial Sequence: Synthetic oligonucleotide
ggauugaauuccauauuca

SEQ ID NO: 167470 - RNA, 19 nt, Artificial Sequence
  Description of Artificial Sequence: Synthetic oligonucleotide
ucucugcguacagaacgca

SEQ ID NO: 167471 - RNA, 19 nt, Artificial Sequence
  Description of Artificial Sequence: Synthetic oligonucleotide
acgacacgcagcacgaggu

SEQ ID NO: 167472 - RNA, 19 nt, Artificial Sequence
  Description of Artificial Sequence: Synthetic oligonucleotide
cggauuucgaaagagggug

SEQ ID NO: 167473 - RNA, 19 nt, Artificial Sequence
  Description of Artificial Sequence: Synthetic oligonucleotide
agcauccuuccaucugggu

SEQ ID NO: 167474 - RNA, 19 nt, Artificial Sequence
  Description of Artificial Sequence: Synthetic oligonucleotide
auauaucgcaagagcuaca

SEQ ID NO: 167475 - RNA, 19 nt, Artificial Sequence
  Description of Artificial Sequence: Synthetic oligonucleotide
guccgaacgaaccgguaaa

SEQ ID NO: 167476 - RNA, 19 nt, Artificial Sequence
  Description of Artificial Sequence: Synthetic oligonucleotide
ugcccggcugguagccccg

SEQ ID NO: 167477 - RNA, 19 nt, Artificial Sequence
  Description of Artificial Sequence: Synthetic oligonucleotide
gagugcgcauuccuccgga

SEQ ID NO: 167478 - RNA, 19 nt, Artificial Sequence
  Description of Artificial Sequence: Synthetic oligonucleotide
ugauggggcuagguguuaa

SEQ ID NO: 167479 - RNA, 19 nt, Artificial Sequence
  Description of Artificial Sequence: Synthetic oligonucleotide
uccgaacgaaccgguaaau

SEQ ID NO: 167480 - RNA, 19 nt, Artificial Sequence
  Description of Artificial Sequence: Synthetic oligonucleotide
gauggggcuagguguuaaa

SEQ ID NO: 167481 - RNA, 19 nt, Artificial Sequence
  Description of Artificial Sequence: Synthetic oligonucleotide
cacgagguuguguucccca

SEQ ID NO: 167482 - RNA, 19 nt, Artificial Sequence
  Description of Artificial Sequence: Synthetic oligonucleotide
gcgagugcgcauuccuccg

SEQ ID NO: 167483 - RNA, 19 nt, Artificial Sequence
  Description of Artificial Sequence: Synthetic oligonucleotide
cccauucaaauaaaaggaa

SEQ ID NO: 167484 - RNA, 19 nt, Artificial Sequence
  Description of Artificial Sequence: Synthetic oligonucleotide
cacaccuuagaggccagca

SEQ ID NO: 167485 - RNA, 19 nt, Artificial Sequence
  Description of Artificial Sequence: Synthetic oligonucleotide
auggggcuagguguuaaaa

SEQ ID NO: 167486 - RNA, 19 nt, Artificial Sequence
  Description of Artificial Sequence: Synthetic oligonucleotide
acacgcagcacgagguugu

SEQ ID NO: 167487 - RNA, 19 nt, Artificial Sequence
  Description of Artificial Sequence: Synthetic oligonucleotide
guuauagagaugagagaau

SEQ ID NO: 167488 - RNA, 19 nt, Artificial Sequence
  Description of Artificial Sequence: Synthetic oligonucleotide
ggaugggcauucaacucug

SEQ ID NO: 167489 - RNA, 19 nt, Artificial Sequence
  Description of Artificial Sequence: Synthetic oligonucleotide
ccguggcagaaucagguug

SEQ ID NO: 167490 - RNA, 19 nt, Artificial Sequence
  Description of Artificial Sequence: Synthetic oligonucleotide
ucgaaagaggguggagguu

SEQ ID NO: 167491 - RNA, 19 nt, Artificial Sequence
  Description of Artificial Sequence: Synthetic oligonucleotide
auaaccagacagggaccca

SEQ ID NO: 167492 - RNA, 19 nt, Artificial Sequence
  Description of Artificial Sequence: Synthetic oligonucleotide
accguggcagaaucagguu

SEQ ID NO: 167493 - RNA, 19 nt, Artificial Sequence
  Description of Artificial Sequence: Synthetic oligonucleotide
aucgcaagagcuacacauu

SEQ ID NO: 167494 - RNA, 19 nt, Artificial Sequence
  Description of Artificial Sequence: Synthetic oligonucleotide
auacgcuggaaggaacauu

SEQ ID NO: 167495 - RNA, 19 nt, Artificial Sequence
  Description of Artificial Sequence: Synthetic oligonucleotide
cucggucacugcaaccuaa

SEQ ID NO: 167496 - RNA, 19 nt, Artificial Sequence
  Description of Artificial Sequence: Synthetic oligonucleotide
gaacggagaucaaaauaau

SEQ ID NO: 167497 - RNA, 19 nt, Artificial Sequence
  Description of Artificial Sequence: Synthetic oligonucleotide
cuagugacucaagccaaaa

SEQ ID NO: 167498 - RNA, 19 nt, Artificial Sequence
  Description of Artificial Sequence: Synthetic oligonucleotide
ugcguacagaacgcagcau

SEQ ID NO: 167499 - RNA, 19 nt, Artificial Sequence
  Description of Artificial Sequence: Synthetic oligonucleotide
cgcgagugcgcauuccucc

SEQ ID NO: 167500 - RNA, 19 nt, Artificial Sequence
  Description of Artificial Sequence: Synthetic oligonucleotide
ugcauacgucaagagccuu

SEQ ID NO: 167501 - RNA, 19 nt, Artificial Sequence
  Description of Artificial Sequence: Synthetic oligonucleotide
ccaccguggcagaaucagg

SEQ ID NO: 167502 - RNA, 19 nt, Artificial Sequence
  Description of Artificial Sequence: Synthetic oligonucleotide
gguggguacaaacuauauu

SEQ ID NO: 167503 - RNA, 19 nt, Artificial Sequence
  Description of Artificial Sequence: Synthetic oligonucleotide
ucccgacuuggaugggcau

SEQ ID NO: 167504 - RNA, 19 nt, Artificial Sequence
  Description of Artificial Sequence: Synthetic oligonucleotide
cgaacgaaccgguaaaucu

SEQ ID NO: 167505 - RNA, 19 nt, Artificial Sequence
  Description of Artificial Sequence: Synthetic oligonucleotide
cugcauacgucaagagccu

SEQ ID NO: 167506 - RNA, 19 nt, Artificial Sequence
  Description of Artificial Sequence: Synthetic oligonucleotide
caagagcuacacauuugau

SEQ ID NO: 167507 - RNA, 19 nt, Artificial Sequence
  Description of Artificial Sequence: Synthetic oligonucleotide
gagcuuggggcuggacgac

SEQ ID NO: 167508 - RNA, 19 nt, Artificial Sequence
  Description of Artificial Sequence: Synthetic oligonucleotide
cucguggguuuucucaggu

SEQ ID NO: 167509 - RNA, 19 nt, Artificial Sequence
  Description of Artificial Sequence: Synthetic oligonucleotide
guaaggagucacuguugau

SEQ ID NO: 167510 - RNA, 19 nt, Artificial Sequence
  Description of Artificial Sequence: Synthetic oligonucleotide
agauucugauguagcccaa

SEQ ID NO: 167511 - RNA, 19 nt, Artificial Sequence
  Description of Artificial Sequence: Synthetic oligonucleotide
cgcaagagcuacacauuug

SEQ ID NO: 167512 - RNA, 19 nt, Artificial Sequence
  Description of Artificial Sequence: Synthetic oligonucleotide
gugucgggccgguaggacu

SEQ ID NO: 167513 - RNA, 19 nt, Artificial Sequence
  Description of Artificial Sequence: Synthetic oligonucleotide
gaggauggucugaaggauu

SEQ ID NO: 167514 - RNA, 19 nt, Artificial Sequence
  Description of Artificial Sequence: Synthetic oligonucleotide
ggcuguaaggagucacugu

SEQ ID NO: 167515 - RNA, 19 nt, Artificial Sequence
  Description of Artificial Sequence: Synthetic oligonucleotide
uuccugaaaugggcuggua

SEQ ID NO: 167516 - RNA, 19 nt, Artificial Sequence
  Description of Artificial Sequence: Synthetic oligonucleotide
gcuguacuuccuugauguc

SEQ ID NO: 167517 - RNA, 19 nt, Artificial Sequence
  Description of Artificial Sequence: Synthetic oligonucleotide
ccgacuuggaugggcauuc

SEQ ID NO: 167518 - RNA, 19 nt, Artificial Sequence
  Description of Artificial Sequence: Synthetic oligonucleotide
gcagcacgagguuguguuc

SEQ ID NO: 167519 - RNA, 19 nt, Artificial Sequence
  Description of Artificial Sequence: Synthetic oligonucleotide
acgcuggaaggaacauuga

SEQ ID NO: 167520 - RNA, 19 nt, Artificial Sequence
  Description of Artificial Sequence: Synthetic oligonucleotide
cccacucagaacaaauuau

SEQ ID NO: 167521 - RNA, 19 nt, Artificial Sequence
  Description of Artificial Sequence: Synthetic oligonucleotide
ccgaacgaaccgguaaauc

SEQ ID NO: 167522 - RNA, 19 nt, Artificial Sequence
  Description of Artificial Sequence: Synthetic oligonucleotide
acgcagcacgagguugugu

SEQ ID NO: 167523 - RNA, 19 nt, Artificial Sequence
  Description of Artificial Sequence: Synthetic oligonucleotide
cacgcagcacgagguugug

SEQ ID NO: 167524 - RNA, 19 nt, Artificial Sequence
  Description of Artificial Sequence: Synthetic oligonucleotide
uccagccgcgagugcgcau

SEQ ID NO: 167525 - RNA, 19 nt, Artificial Sequence
  Description of Artificial Sequence: Synthetic oligonucleotide
guggcacuucggauuucga

SEQ ID NO: 167526 - RNA, 19 nt, Artificial Sequence
  Description of Artificial Sequence: Synthetic oligonucleotide
ggcacgcucccugcuuaag

SEQ ID NO: 167527 - RNA, 19 nt, Artificial Sequence
  Description of Artificial Sequence: Synthetic oligonucleotide
acgaaccgguaaaucuguu

SEQ ID NO: 167528 - RNA, 19 nt, Artificial Sequence
  Description of Artificial Sequence: Synthetic oligonucleotide
ggacgacacgcagcacgag

SEQ ID NO: 167529 - RNA, 19 nt, Artificial Sequence
  Description of Artificial Sequence: Synthetic oligonucleotide
cgugugcccggcugguagc

SEQ ID NO: 167530 - RNA, 19 nt, Artificial Sequence
  Description of Artificial Sequence: Synthetic oligonucleotide
ucgggccgguaggacucca

SEQ ID NO: 167531 - RNA, 19 nt, Artificial Sequence
  Description of Artificial Sequence: Synthetic oligonucleotide
gucgggccgguaggacucc

SEQ ID NO: 167532 - RNA, 19 nt, Artificial Sequence
  Description of Artificial Sequence: Synthetic oligonucleotide
ccgcgagugcgcauuccuc

SEQ ID NO: 167533 - RNA, 19 nt, Artificial Sequence
  Description of Artificial Sequence: Synthetic oligonucleotide
gcguagggaaaaguuuccu

SEQ ID NO: 167534 - RNA, 19 nt, Artificial Sequence
  Description of Artificial Sequence: Synthetic oligonucleotide
gccgcgagugcgcauuccu

SEQ ID NO: 167535 - RNA, 19 nt, Artificial Sequence
  Description of Artificial Sequence: Synthetic oligonucleotide
ccccaucgucgugugcccg

SEQ ID NO: 167536 - RNA, 19 nt, Artificial Sequence
  Description of Artificial Sequence: Synthetic oligonucleotide
gcauacgucaagagccuuu

SEQ ID NO: 167537 - RNA, 19 nt, Artificial Sequence
  Description of Artificial Sequence: Synthetic oligonucleotide
cacgucccuuaaagccucu

SEQ ID NO: 167538 - RNA, 19 nt, Artificial Sequence
  Description of Artificial Sequence: Synthetic oligonucleotide
gucgugugcccggcuggua

SEQ ID NO: 167539 - RNA, 19 nt, Artificial Sequence
  Description of Artificial Sequence: Synthetic oligonucleotide
cgugucgggccgguaggac

SEQ ID NO: 167540 - RNA, 19 nt, Artificial Sequence
  Description of Artificial Sequence: Synthetic oligonucleotide
cgcuggaaggaacauugau

SEQ ID NO: 167541 - RNA, 19 nt, Artificial Sequence
  Description of Artificial Sequence: Synthetic oligonucleotide
ccgugucgggccgguagga

SEQ ID NO: 167542 - RNA, 19 nt, Artificial Sequence
  Description of Artificial Sequence: Synthetic oligonucleotide
cccgacuuggaugggcauu

SEQ ID NO: 167543 - RNA, 19 nt, Artificial Sequence
  Description of Artificial Sequence: Synthetic oligonucleotide
aaucuaaugaaauggaugg

SEQ ID NO: 167544 - RNA, 19 nt, Artificial Sequence
  Description of Artificial Sequence: Synthetic oligonucleotide
aauacaauauaucaacggg

SEQ ID NO: 167545 - RNA, 19 nt, Artificial Sequence
  Description of Artificial Sequence: Synthetic oligonucleotide
uagaauacuaaaaugagcu

SEQ ID NO: 167546 - RNA, 19 nt, Artificial Sequence
  Description of Artificial Sequence: Synthetic oligonucleotide
auuagagcgacauugacag

SEQ ID NO: 167547 - RNA, 19 nt, Artificial Sequence
  Description of Artificial Sequence: Synthetic oligonucleotide
gguaucucgaauuagagcg

SEQ ID NO: 167548 - RNA, 19 nt, Artificial Sequence
  Description of Artificial Sequence: Synthetic oligonucleotide
ugagcuauggguuacaucu

SEQ ID NO: 167549 - RNA, 19 nt, Artificial Sequence
  Description of Artificial Sequence: Synthetic oligonucleotide
auacacaugcuauaaauuc

SEQ ID NO: 167550 - RNA, 19 nt, Artificial Sequence
  Description of Artificial Sequence: Synthetic oligonucleotide
aagcuuacccauuaugugg

SEQ ID NO: 167551 - RNA, 19 nt, Artificial Sequence
  Description of Artificial Sequence: Synthetic oligonucleotide
auuucuagccaacuggccc

SEQ ID NO: 167552 - RNA, 19 nt, Artificial Sequence
  Description of Artificial Sequence: Synthetic oligonucleotide
uucacuuauagccaggggc

SEQ ID NO: 167553 - RNA, 19 nt, Artificial Sequence
  Description of Artificial Sequence: Synthetic oligonucleotide
uugguuauugcuuaagugc

SEQ ID NO: 167554 - RNA, 19 nt, Artificial Sequence
  Description of Artificial Sequence: Synthetic oligonucleotide
guaauuucuagccaacugg

SEQ ID NO: 167555 - RNA, 19 nt, Artificial Sequence
  Description of Artificial Sequence: Synthetic oligonucleotide
uuuaauguugguaauucac

SEQ ID NO: 167556 - RNA, 19 nt, Artificial Sequence
  Description of Artificial Sequence: Synthetic oligonucleotide
aguuaauaccaauugaugu

SEQ ID NO: 167557 - RNA, 19 nt, Artificial Sequence
  Description of Artificial Sequence: Synthetic oligonucleotide
uaauauauugacugcacca

SEQ ID NO: 167558 - RNA, 19 nt, Artificial Sequence
  Description of Artificial Sequence: Synthetic oligonucleotide
uaucccuacuaauuuaugg

SEQ ID NO: 167559 - RNA, 19 nt, Artificial Sequence
  Description of Artificial Sequence: Synthetic oligonucleotide
uacaucuaaggcuugcugg

SEQ ID NO: 167560 - RNA, 19 nt, Artificial Sequence
  Description of Artificial Sequence: Synthetic oligonucleotide
aaggaacuuauuuugaaaa

SEQ ID NO: 167561 - RNA, 19 nt, Artificial Sequence
  Description of Artificial Sequence: Synthetic oligonucleotide
uaucaacgggguaaaaugg

SEQ ID NO: 167562 - RNA, 19 nt, Artificial Sequence
  Description of Artificial Sequence: Synthetic oligonucleotide
cuuauaguuguguugguag

SEQ ID NO: 167563 - RNA, 19 nt, Artificial Sequence
  Description of Artificial Sequence: Synthetic oligonucleotide
auaucaacgggguaaaaug

SEQ ID NO: 167564 - RNA, 19 nt, Artificial Sequence
  Description of Artificial Sequence: Synthetic oligonucleotide
uucuacaucaauccaacac

SEQ ID NO: 167565 - RNA, 19 nt, Artificial Sequence
  Description of Artificial Sequence: Synthetic oligonucleotide
uaucugaauggacacauug

SEQ ID NO: 167566 - RNA, 19 nt, Artificial Sequence
  Description of Artificial Sequence: Synthetic oligonucleotide
aguucucucgaguacaccg

SEQ ID NO: 167567 - RNA, 19 nt, Artificial Sequence
  Description of Artificial Sequence: Synthetic oligonucleotide
ucgaauuagagcgacauug

SEQ ID NO: 167568 - RNA, 19 nt, Artificial Sequence
  Description of Artificial Sequence: Synthetic oligonucleotide
uuauaacuaaagcaauagc

SEQ ID NO: 167569 - RNA, 19 nt, Artificial Sequence
  Description of Artificial Sequence: Synthetic oligonucleotide
uuauaguuaauucuccauc

SEQ ID NO: 167570 - RNA, 19 nt, Artificial Sequence
  Description of Artificial Sequence: Synthetic oligonucleotide
auggucauaucauucacuc

SEQ ID NO: 167571 - RNA, 19 nt, Artificial Sequence
  Description of Artificial Sequence: Synthetic oligonucleotide
acuugcacagcacacaaag

SEQ ID NO: 167572 - RNA, 19 nt, Artificial Sequence
  Description of Artificial Sequence: Synthetic oligonucleotide
auucguuacauucuacauc

SEQ ID NO: 167573 - RNA, 19 nt, Artificial Sequence
  Description of Artificial Sequence: Synthetic oligonucleotide
uuuggacuaguuuacacac

SEQ ID NO: 167574 - RNA, 19 nt, Artificial Sequence
  Description of Artificial Sequence: Synthetic oligonucleotide
gaauacuaaaaugagcuac

SEQ ID NO: 167575 - RNA, 19 nt, Artificial Sequence
  Description of Artificial Sequence: Synthetic oligonucleotide
agcggaaugguucaucugg

SEQ ID NO: 167576 - RNA, 19 nt, Artificial Sequence
  Description of Artificial Sequence: Synthetic oligonucleotide
ucauagaaacauccguagg

SEQ ID NO: 167577 - RNA, 19 nt, Artificial Sequence
  Description of Artificial Sequence: Synthetic oligonucleotide
aaacucuuggcggaugggc

SEQ ID NO: 167578 - RNA, 19 nt, Artificial Sequence
  Description of Artificial Sequence: Synthetic oligonucleotide
cuauggguuacaucuaagg

SEQ ID NO: 167579 - RNA, 19 nt, Artificial Sequence
  Description of Artificial Sequence: Synthetic oligonucleotide
aauaccaauugaugucauc

SEQ ID NO: 167580 - RNA, 19 nt, Artificial Sequence
  Description of Artificial Sequence: Synthetic oligonucleotide
uguuguaugugcuuuaaua

SEQ ID NO: 167581 - RNA, 19 nt, Artificial Sequence
  Description of Artificial Sequence: Synthetic oligonucleotide
aacauuugcaguugaggga

SEQ ID NO: 167582 - RNA, 19 nt, Artificial Sequence
  Description of Artificial Sequence: Synthetic oligonucleotide
aacauugggauuaaagacu

SEQ ID NO: 167583 - RNA, 19 nt, Artificial Sequence
  Description of Artificial Sequence: Synthetic oligonucleotide
acguauaaacaacaaaaca

SEQ ID NO: 167584 - RNA, 19 nt, Artificial Sequence
  Description of Artificial Sequence: Synthetic oligonucleotide
ugcaccaugcuuauaguug

SEQ ID NO: 167585 - RNA, 19 nt, Artificial Sequence
  Description of Artificial Sequence: Synthetic oligonucleotide
ucauucacucaacugcuag

SEQ ID NO: 167586 - RNA, 19 nt, Artificial Sequence
  Description of Artificial Sequence: Synthetic oligonucleotide
ugguuauugcuuaagugcu

SEQ ID NO: 167587 - RNA, 19 nt, Artificial Sequence
  Description of Artificial Sequence: Synthetic oligonucleotide
agcaccgugcaucaugggc

SEQ ID NO: 167588 - RNA, 19 nt, Artificial Sequence
  Description of Artificial Sequence: Synthetic oligonucleotide
guaauucacuuauagccag

SEQ ID NO: 167589 - RNA, 19 nt, Artificial Sequence
  Description of Artificial Sequence: Synthetic oligonucleotide
uuuagucauaugcauuugu

SEQ ID NO: 167590 - RNA, 19 nt, Artificial Sequence
  Description of Artificial Sequence: Synthetic oligonucleotide
aaaggccauaacaaguuuc

SEQ ID NO: 167591 - RNA, 19 nt, Artificial Sequence
  Description of Artificial Sequence: Synthetic oligonucleotide
aauacuaaaaugagcuaca

SEQ ID NO: 167592 - RNA, 19 nt, Artificial Sequence
  Description of Artificial Sequence: Synthetic oligonucleotide
ucuaugacagauagucuca

SEQ ID NO: 167593 - RNA, 19 nt, Artificial Sequence
  Description of Artificial Sequence: Synthetic oligonucleotide
gaagcuuacccauuaugug

SEQ ID NO: 167594 - RNA, 19 nt, Artificial Sequence
  Description of Artificial Sequence: Synthetic oligonucleotide
uguuggaacgaagggaacg

SEQ ID NO: 167595 - RNA, 19 nt, Artificial Sequence
  Description of Artificial Sequence: Synthetic oligonucleotide
agauugucacacuauuauc

SEQ ID NO: 167596 - RNA, 19 nt, Artificial Sequence
  Description of Artificial Sequence: Synthetic oligonucleotide
aaguuaauaccaauugaug

SEQ ID NO: 167597 - RNA, 19 nt, Artificial Sequence
  Description of Artificial Sequence: Synthetic oligonucleotide
ugcugcucgaccuacaaac

SEQ ID NO: 167598 - RNA, 19 nt, Artificial Sequence
  Description of Artificial Sequence: Synthetic oligonucleotide
aauuagagcgacauugaca

SEQ ID NO: 167599 - RNA, 19 nt, Artificial Sequence
  Description of Artificial Sequence: Synthetic oligonucleotide
agauagaggggcuauaaau

SEQ ID NO: 167600 - RNA, 19 nt, Artificial Sequence
  Description of Artificial Sequence: Synthetic oligonucleotide
aaacauaacuggagcauuc

SEQ ID NO: 167601 - RNA, 19 nt, Artificial Sequence
  Description of Artificial Sequence: Synthetic oligonucleotide
uguagcaccgugcaucaug

SEQ ID NO: 167602 - RNA, 19 nt, Artificial Sequence
  Description of Artificial Sequence: Synthetic oligonucleotide
ucggccuuuaauguaaucc

SEQ ID NO: 167603 - RNA, 19 nt, Artificial Sequence
  Description of Artificial Sequence: Synthetic oligonucleotide
uacgggaauauguauaaaa

SEQ ID NO: 167604 - RNA, 19 nt, Artificial Sequence
  Description of Artificial Sequence: Synthetic oligonucleotide
acuaguuuacacacuauag

SEQ ID NO: 167605 - RNA, 19 nt, Artificial Sequence
  Description of Artificial Sequence: Synthetic oligonucleotide
uuuugacuguuguaugugc

SEQ ID NO: 167606 - RNA, 19 nt, Artificial Sequence
  Description of Artificial Sequence: Synthetic oligonucleotide
uuacaucuaaggcuugcug

SEQ ID NO: 167607 - RNA, 19 nt, Artificial Sequence
  Description of Artificial Sequence: Synthetic oligonucleotide
uacaguaagccuacaguac

SEQ ID NO: 167608 - RNA, 19 nt, Artificial Sequence
  Description of Artificial Sequence: Synthetic oligonucleotide
aggggcuauaaauuaugac

SEQ ID NO: 167609 - RNA, 19 nt, Artificial Sequence
  Description of Artificial Sequence: Synthetic oligonucleotide
uguugcacagugcuaagaa

SEQ ID NO: 167610 - RNA, 19 nt, Artificial Sequence
  Description of Artificial Sequence: Synthetic oligonucleotide
uugagggaaugaauuacug

SEQ ID NO: 167611 - RNA, 19 nt, Artificial Sequence
  Description of Artificial Sequence: Synthetic oligonucleotide
guagaauacuaaaaugagc

SEQ ID NO: 167612 - RNA, 19 nt, Artificial Sequence
  Description of Artificial Sequence: Synthetic oligonucleotide
cacggguacaauuuccacg

SEQ ID NO: 167613 - RNA, 19 nt, Artificial Sequence
  Description of Artificial Sequence: Synthetic oligonucleotide
aacgggguaaaaugguacu

SEQ ID NO: 167614 - RNA, 19 nt, Artificial Sequence
  Description of Artificial Sequence: Synthetic oligonucleotide
acacuauagugagugagac

SEQ ID NO: 167615 - RNA, 19 nt, Artificial Sequence
  Description of Artificial Sequence: Synthetic oligonucleotide
uggguuacaucuaaggcuu

SEQ ID NO: 167616 - RNA, 19 nt, Artificial Sequence
  Description of Artificial Sequence: Synthetic oligonucleotide
acaguaagccuacaguaca

SEQ ID NO: 167617 - RNA, 19 nt, Artificial Sequence
  Description of Artificial Sequence: Synthetic oligonucleotide
uuauaguuguguugguaga

SEQ ID NO: 167618 - RNA, 19 nt, Artificial Sequence
  Description of Artificial Sequence: Synthetic oligonucleotide
aucccuacuaauuuauggu

SEQ ID NO: 167619 - RNA, 19 nt, Artificial Sequence
  Description of Artificial Sequence: Synthetic oligonucleotide
uagagcgacauugacagcu

SEQ ID NO: 167620 - RNA, 19 nt, Artificial Sequence
  Description of Artificial Sequence: Synthetic oligonucleotide
agugcuuaauuguugcaca

SEQ ID NO: 167621 - RNA, 19 nt, Artificial Sequence
  Description of Artificial Sequence: Synthetic oligonucleotide
aauggauggucauaucauu

SEQ ID NO: 167622 - RNA, 19 nt, Artificial Sequence
  Description of Artificial Sequence: Synthetic oligonucleotide
aaucauagaaacauccgua

SEQ ID NO: 167623 - RNA, 19 nt, Artificial Sequence
  Description of Artificial Sequence: Synthetic oligonucleotide
ggcauguagggauugaaag

SEQ ID NO: 167624 - RNA, 19 nt, Artificial Sequence
  Description of Artificial Sequence: Synthetic oligonucleotide
uggacuaguuuacacacua

SEQ ID NO: 167625 - RNA, 19 nt, Artificial Sequence
  Description of Artificial Sequence: Synthetic oligonucleotide
auguugguaauucacuuau

SEQ ID NO: 167626 - RNA, 19 nt, Artificial Sequence
  Description of Artificial Sequence: Synthetic oligonucleotide
auauauugacugcaccaug

SEQ ID NO: 167627 - RNA, 19 nt, Artificial Sequence
  Description of Artificial Sequence: Synthetic oligonucleotide
uuuuaggucuugcuacaga

SEQ ID NO: 167628 - RNA, 19 nt, Artificial Sequence
  Description of Artificial Sequence: Synthetic oligonucleotide
acauauaccucugguuccc

SEQ ID NO: 167629 - RNA, 19 nt, Artificial Sequence
  Description of Artificial Sequence: Synthetic oligonucleotide
aacuggagcauucgguaga

SEQ ID NO: 167630 - RNA, 19 nt, Artificial Sequence
  Description of Artificial Sequence: Synthetic oligonucleotide
gaauuagagcgacauugac

SEQ ID NO: 167631 - RNA, 19 nt, Artificial Sequence
  Description of Artificial Sequence: Synthetic oligonucleotide
uuucuagccaacuggcccu

SEQ ID NO: 167632 - RNA, 19 nt, Artificial Sequence
  Description of Artificial Sequence: Synthetic oligonucleotide
ggagcaucggccuuuaaug

SEQ ID NO: 167633 - RNA, 19 nt, Artificial Sequence
  Description of Artificial Sequence: Synthetic oligonucleotide
cagcucgagagcaaguucc

SEQ ID NO: 167634 - RNA, 19 nt, Artificial Sequence
  Description of Artificial Sequence: Synthetic oligonucleotide
auaacuggagcauucggua

SEQ ID NO: 167635 - RNA, 19 nt, Artificial Sequence
  Description of Artificial Sequence: Synthetic oligonucleotide
ugcauuuaacugaaaucaa

SEQ ID NO: 167636 - RNA, 19 nt, Artificial Sequence
  Description of Artificial Sequence: Synthetic oligonucleotide
auaacuaaagcaauagcua

SEQ ID NO: 167637 - RNA, 19 nt, Artificial Sequence
  Description of Artificial Sequence: Synthetic oligonucleotide
accauguaguucuaugaca

SEQ ID NO: 167638 - RNA, 19 nt, Artificial Sequence
  Description of Artificial Sequence: Synthetic oligonucleotide
aguacaccgacccuuuaga

SEQ ID NO: 167639 - RNA, 19 nt, Artificial Sequence
  Description of Artificial Sequence: Synthetic oligonucleotide
uagaaacauccguagggug

SEQ ID NO: 167640 - RNA, 19 nt, Artificial Sequence
  Description of Artificial Sequence: Synthetic oligonucleotide
ucuaaggcuugcugggaag

SEQ ID NO: 167641 - RNA, 19 nt, Artificial Sequence
  Description of Artificial Sequence: Synthetic oligonucleotide
agguguagcaccgugcauc

SEQ ID NO: 167642 - RNA, 19 nt, Artificial Sequence
  Description of Artificial Sequence: Synthetic oligonucleotide
acacacuauagugagugag

SEQ ID NO: 167643 - RNA, 19 nt, Artificial Sequence
  Description of Artificial Sequence: Synthetic oligonucleotide
uuaucccuacuaauuuaug

SEQ ID NO: 167644 - RNA, 19 nt, Artificial Sequence
  Description of Artificial Sequence: Synthetic oligonucleotide
auagaggggcuauaaauua

SEQ ID NO: 167645 - RNA, 19 nt, Artificial Sequence
  Description of Artificial Sequence: Synthetic oligonucleotide
ugcucgaccuacaaacaga

SEQ ID NO: 167646 - RNA, 19 nt, Artificial Sequence
  Description of Artificial Sequence: Synthetic oligonucleotide
gcuuaauuguugcacagug

SEQ ID NO: 167647 - RNA, 19 nt, Artificial Sequence
  Description of Artificial Sequence: Synthetic oligonucleotide
ugcgacuuuaaguggggug

SEQ ID NO: 167648 - RNA, 19 nt, Artificial Sequence
  Description of Artificial Sequence: Synthetic oligonucleotide
auagucucaagguuguguu

SEQ ID NO: 167649 - RNA, 19 nt, Artificial Sequence
  Description of Artificial Sequence: Synthetic oligonucleotide
ugugugugugugugugucg

SEQ ID NO: 167650 - RNA, 19 nt, Artificial Sequence
  Description of Artificial Sequence: Synthetic oligonucleotide
ucccagaaucuaaugaaau

SEQ ID NO: 167651 - RNA, 19 nt, Artificial Sequence
  Description of Artificial Sequence: Synthetic oligonucleotide
ggucauaucauucacucaa

SEQ ID NO: 167652 - RNA, 19 nt, Artificial Sequence
  Description of Artificial Sequence: Synthetic oligonucleotide
agaauguacaguaagccua

SEQ ID NO: 167653 - RNA, 19 nt, Artificial Sequence
  Description of Artificial Sequence: Synthetic oligonucleotide
ucucgaauuagagcgacau

SEQ ID NO: 167654 - RNA, 19 nt, Artificial Sequence
  Description of Artificial Sequence: Synthetic oligonucleotide
agagugcauauuaacauga

SEQ ID NO: 167655 - RNA, 19 nt, Artificial Sequence
  Description of Artificial Sequence: Synthetic oligonucleotide
uuuggguacucuguaacuc

SEQ ID NO: 167656 - RNA, 19 nt, Artificial Sequence
  Description of Artificial Sequence: Synthetic oligonucleotide
gacuaguuuacacacuaua

SEQ ID NO: 167657 - RNA, 19 nt, Artificial Sequence
  Description of Artificial Sequence: Synthetic oligonucleotide
caacgggguaaaaugguac

SEQ ID NO: 167658 - RNA, 19 nt, Artificial Sequence
  Description of Artificial Sequence: Synthetic oligonucleotide
gaauguacaguaagccuac

SEQ ID NO: 167659 - RNA, 19 nt, Artificial Sequence
  Description of Artificial Sequence: Synthetic oligonucleotide
ugagugagaccucaccuuu

SEQ ID NO: 167660 - RNA, 19 nt, Artificial Sequence
  Description of Artificial Sequence: Synthetic oligonucleotide
uauaccucugguuccccac

SEQ ID NO: 167661 - RNA, 19 nt, Artificial Sequence
  Description of Artificial Sequence: Synthetic oligonucleotide
guagcaccgugcaucaugg

SEQ ID NO: 167662 - RNA, 19 nt, Artificial Sequence
  Description of Artificial Sequence: Synthetic oligonucleotide
acauauucguuacauucua

SEQ ID NO: 167663 - RNA, 19 nt, Artificial Sequence
  Description of Artificial Sequence: Synthetic oligonucleotide
uagaguacuugcacagcac

SEQ ID NO: 167664 - RNA, 19 nt, Artificial Sequence
  Description of Artificial Sequence: Synthetic oligonucleotide
accacguauaaacaacaaa

SEQ ID NO: 167665 - RNA, 19 nt, Artificial Sequence
  Description of Artificial Sequence: Synthetic oligonucleotide
ggggcuauaaauuaugacu

SEQ ID NO: 167666 - RNA, 19 nt, Artificial Sequence
  Description of Artificial Sequence: Synthetic oligonucleotide
ucaacgggguaaaauggua

SEQ ID NO: 167667 - RNA, 19 nt, Artificial Sequence
  Description of Artificial Sequence: Synthetic oligonucleotide
cacgcugaaauucacggca

SEQ ID NO: 167668 - RNA, 19 nt, Artificial Sequence
  Description of Artificial Sequence: Synthetic oligonucleotide
gugcuuaauuguugcacag

SEQ ID NO: 167669 - RNA, 19 nt, Artificial Sequence
  Description of Artificial Sequence: Synthetic oligonucleotide
auugacugcaccaugcuua

SEQ ID NO: 167670 - RNA, 19 nt, Artificial Sequence
  Description of Artificial Sequence: Synthetic oligonucleotide
guuggaacgaagggaacgc

SEQ ID NO: 167671 - RNA, 19 nt, Artificial Sequence
  Description of Artificial Sequence: Synthetic oligonucleotide
ucaaggcuuaucccuacua

SEQ ID NO: 167672 - RNA, 19 nt, Artificial Sequence
  Description of Artificial Sequence: Synthetic oligonucleotide
aacgaagggaacgcuggug

SEQ ID NO: 167673 - RNA, 19 nt, Artificial Sequence
  Description of Artificial Sequence: Synthetic oligonucleotide
cauacgggaauauguauaa

SEQ ID NO: 167674 - RNA, 19 nt, Artificial Sequence
  Description of Artificial Sequence: Synthetic oligonucleotide
cacuauagugagugagacc

SEQ ID NO: 167675 - RNA, 19 nt, Artificial Sequence
  Description of Artificial Sequence: Synthetic oligonucleotide
ggaaccauguaguucuaug

SEQ ID NO: 167676 - RNA, 19 nt, Artificial Sequence
  Description of Artificial Sequence: Synthetic oligonucleotide
ugcggcagucuucuguuga

SEQ ID NO: 167677 - RNA, 19 nt, Artificial Sequence
  Description of Artificial Sequence: Synthetic oligonucleotide
caaguggcuguaagcauac

SEQ ID NO: 167678 - RNA, 19 nt, Artificial Sequence
  Description of Artificial Sequence: Synthetic oligonucleotide
ugugugugugucgugugug

SEQ ID NO: 167679 - RNA, 19 nt, Artificial Sequence
  Description of Artificial Sequence: Synthetic oligonucleotide
agagauuuggguacucugu

SEQ ID NO: 167680 - RNA, 19 nt, Artificial Sequence
  Description of Artificial Sequence: Synthetic oligonucleotide
guacaccgacccuuuagag

SEQ ID NO: 167681 - RNA, 19 nt, Artificial Sequence
  Description of Artificial Sequence: Synthetic oligonucleotide
gcgacuuuaaguggggugg

SEQ ID NO: 167682 - RNA, 19 nt, Artificial Sequence
  Description of Artificial Sequence: Synthetic oligonucleotide
agcugcgacuuuaaguggg

SEQ ID NO: 167683 - RNA, 19 nt, Artificial Sequence
  Description of Artificial Sequence: Synthetic oligonucleotide
uaucucgaauuagagcgac

SEQ ID NO: 167684 - RNA, 19 nt, Artificial Sequence
  Description of Artificial Sequence: Synthetic oligonucleotide
uuggacuaguuuacacacu

SEQ ID NO: 167685 - RNA, 19 nt, Artificial Sequence
  Description of Artificial Sequence: Synthetic oligonucleotide
ugugugugugugucgugug

SEQ ID NO: 167686 - RNA, 19 nt, Artificial Sequence
  Description of Artificial Sequence: Synthetic oligonucleotide
uggucauaucauucacuca

SEQ ID NO: 167687 - RNA, 19 nt, Artificial Sequence
  Description of Artificial Sequence: Synthetic oligonucleotide
gagugugugugugugugug

SEQ ID NO: 167688 - RNA, 19 nt, Artificial Sequence
  Description of Artificial Sequence: Synthetic oligonucleotide
uaauaccaauugaugucau

SEQ ID NO: 167689 - RNA, 19 nt, Artificial Sequence
  Description of Artificial Sequence: Synthetic oligonucleotide
cugcucgaccuacaaacag

SEQ ID NO: 167690 - RNA, 19 nt, Artificial Sequence
  Description of Artificial Sequence: Synthetic oligonucleotide
gguaauucacuuauagcca

SEQ ID NO: 167691 - RNA, 19 nt, Artificial Sequence
  Description of Artificial Sequence: Synthetic oligonucleotide
acuugguaucucgaauuag

SEQ ID NO: 167692 - RNA, 19 nt, Artificial Sequence
  Description of Artificial Sequence: Synthetic oligonucleotide
caguaagccuacaguacac

SEQ ID NO: 167693 - RNA, 19 nt, Artificial Sequence
  Description of Artificial Sequence: Synthetic oligonucleotide
ugagagauuuggguacucu

SEQ ID NO: 167694 - RNA, 19 nt, Artificial Sequence
  Description of Artificial Sequence: Synthetic oligonucleotide
guuauaguuaauucuccau

SEQ ID NO: 167695 - RNA, 19 nt, Artificial Sequence
  Description of Artificial Sequence: Synthetic oligonucleotide
cauugggauuaaagacugg

SEQ ID NO: 167696 - RNA, 19 nt, Artificial Sequence
  Description of Artificial Sequence: Synthetic oligonucleotide
aacucuuggcggaugggca

SEQ ID NO: 167697 - RNA, 19 nt, Artificial Sequence
  Description of Artificial Sequence: Synthetic oligonucleotide
gagcauucgguagaaguuc

SEQ ID NO: 167698 - RNA, 19 nt, Artificial Sequence
  Description of Artificial Sequence: Synthetic oligonucleotide
agaggggcuauaaauuaug

SEQ ID NO: 167699 - RNA, 19 nt, Artificial Sequence
  Description of Artificial Sequence: Synthetic oligonucleotide
gaaugguucaucuggugau

SEQ ID NO: 167700 - RNA, 19 nt, Artificial Sequence
  Description of Artificial Sequence: Synthetic oligonucleotide
caaucauagaaacauccgu

SEQ ID NO: 167701 - RNA, 19 nt, Artificial Sequence
  Description of Artificial Sequence: Synthetic oligonucleotide
aaacauccguagggugagc

SEQ ID NO: 167702 - RNA, 19 nt, Artificial Sequence
  Description of Artificial Sequence: Synthetic oligonucleotide
cacacuauagugagugaga

SEQ ID NO: 167703 - RNA, 19 nt, Artificial Sequence
  Description of Artificial Sequence: Synthetic oligonucleotide
aggagugugugugugugug

SEQ ID NO: 167704 - RNA, 19 nt, Artificial Sequence
  Description of Artificial Sequence: Synthetic oligonucleotide
uugacuguuguaugugcuu

SEQ ID NO: 167705 - RNA, 19 nt, Artificial Sequence
  Description of Artificial Sequence: Synthetic oligonucleotide
acccuuuagagaaucaaaa

SEQ ID NO: 167706 - RNA, 19 nt, Artificial Sequence
  Description of Artificial Sequence: Synthetic oligonucleotide
aagaggacauacgggaaua

SEQ ID NO: 167707 - RNA, 19 nt, Artificial Sequence
  Description of Artificial Sequence: Synthetic oligonucleotide
gaggacauacgggaauaug

SEQ ID NO: 167708 - RNA, 19 nt, Artificial Sequence
  Description of Artificial Sequence: Synthetic oligonucleotide
uacacacuauagugaguga

SEQ ID NO: 167709 - RNA, 19 nt, Artificial Sequence
  Description of Artificial Sequence: Synthetic oligonucleotide
uguuggcaguggaaaacau

SEQ ID NO: 167710 - RNA, 19 nt, Artificial Sequence
  Description of Artificial Sequence: Synthetic oligonucleotide
guuagaguacuugcacagc

SEQ ID NO: 167711 - RNA, 19 nt, Artificial Sequence
  Description of Artificial Sequence: Synthetic oligonucleotide
auauaccucugguucccca

SEQ ID NO: 167712 - RNA, 19 nt, Artificial Sequence
  Description of Artificial Sequence: Synthetic oligonucleotide
agccaugccaggauuagcu

SEQ ID NO: 167713 - RNA, 19 nt, Artificial Sequence
  Description of Artificial Sequence: Synthetic oligonucleotide
aguaagccuacaguacacu

SEQ ID NO: 167714 - RNA, 19 nt, Artificial Sequence
  Description of Artificial Sequence: Synthetic oligonucleotide
cuuuagucauaugcauuug

SEQ ID NO: 167715 - RNA, 19 nt, Artificial Sequence
  Description of Artificial Sequence: Synthetic oligonucleotide
agcuuacccauuauguggu

SEQ ID NO: 167716 - RNA, 19 nt, Artificial Sequence
  Description of Artificial Sequence: Synthetic oligonucleotide
ugugugugugugugugugu

SEQ ID NO: 167717 - RNA, 19 nt, Artificial Sequence
  Description of Artificial Sequence: Synthetic oligonucleotide
gguacaauuuccacgcuga

SEQ ID NO: 167718 - RNA, 19 nt, Artificial Sequence
  Description of Artificial Sequence: Synthetic oligonucleotide
acauacgggaauauguaua

SEQ ID NO: 167719 - RNA, 19 nt, Artificial Sequence
  Description of Artificial Sequence: Synthetic oligonucleotide
cauucacucaacugcuaga

SEQ ID NO: 167720 - RNA, 19 nt, Artificial Sequence
  Description of Artificial Sequence: Synthetic oligonucleotide
aucuaaugaaauggauggu

SEQ ID NO: 167721 - RNA, 19 nt, Artificial Sequence
  Description of Artificial Sequence: Synthetic oligonucleotide
aucaacgggguaaaauggu

SEQ ID NO: 167722 - RNA, 19 nt, Artificial Sequence
  Description of Artificial Sequence: Synthetic oligonucleotide
uccaacacacuauccugua

SEQ ID NO: 167723 - RNA, 19 nt, Artificial Sequence
  Description of Artificial Sequence: Synthetic oligonucleotide
cccagaaucuaaugaaaug

SEQ ID NO: 167724 - RNA, 19 nt, Artificial Sequence
  Description of Artificial Sequence: Synthetic oligonucleotide
ugacuguuguaugugcuuu

SEQ ID NO: 167725 - RNA, 19 nt, Artificial Sequence
  Description of Artificial Sequence: Synthetic oligonucleotide
acagggaauacaacacugu

SEQ ID NO: 167726 - RNA, 19 nt, Artificial Sequence
  Description of Artificial Sequence: Synthetic oligonucleotide
uuagagcgacauugacagc

SEQ ID NO: 167727 - RNA, 19 nt, Artificial Sequence
  Description of Artificial Sequence: Synthetic oligonucleotide
caggauuagcugcaaguga

SEQ ID NO: 167728 - RNA, 19 nt, Artificial Sequence
  Description of Artificial Sequence: Synthetic oligonucleotide
uacuugcauuucucccggg

SEQ ID NO: 167729 - RNA, 19 nt, Artificial Sequence
  Description of Artificial Sequence: Synthetic oligonucleotide
cuuaucccuacuaauuuau

SEQ ID NO: 167730 - RNA, 19 nt, Artificial Sequence
  Description of Artificial Sequence: Synthetic oligonucleotide
gugugugugugugugugug

SEQ ID NO: 167731 - RNA, 19 nt, Artificial Sequence
  Description of Artificial Sequence: Synthetic oligonucleotide
ugugugugugugugucgug

SEQ ID NO: 167732 - RNA, 19 nt, Artificial Sequence
  Description of Artificial Sequence: Synthetic oligonucleotide
agugugugugugugugugu

SEQ ID NO: 167733 - RNA, 19 nt, Artificial Sequence
  Description of Artificial Sequence: Synthetic oligonucleotide
auaccucugguuccccacu

SEQ ID NO: 167734 - RNA, 19 nt, Artificial Sequence
  Description of Artificial Sequence: Synthetic oligonucleotide
guaacaggguucuguaaua

SEQ ID NO: 167735 - RNA, 19 nt, Artificial Sequence
  Description of Artificial Sequence: Synthetic oligonucleotide
gacccuuuagagaaucaaa

SEQ ID NO: 167736 - RNA, 19 nt, Artificial Sequence
  Description of Artificial Sequence: Synthetic oligonucleotide
gcuauaaauuaugacuguc

SEQ ID NO: 167737 - RNA, 19 nt, Artificial Sequence
  Description of Artificial Sequence: Synthetic oligonucleotide
agcaucggccuuuaaugua

SEQ ID NO: 167738 - RNA, 19 nt, Artificial Sequence
  Description of Artificial Sequence: Synthetic oligonucleotide
acgggguaaaaugguacug

SEQ ID NO: 167739 - RNA, 19 nt, Artificial Sequence
  Description of Artificial Sequence: Synthetic oligonucleotide
gaggggcuauaaauuauga

SEQ ID NO: 167740 - RNA, 19 nt, Artificial Sequence
  Description of Artificial Sequence: Synthetic oligonucleotide
cugagcuauggguuacauc

SEQ ID NO: 167741 - RNA, 19 nt, Artificial Sequence
  Description of Artificial Sequence: Synthetic oligonucleotide
ugcaggagugugugugugu

SEQ ID NO: 167742 - RNA, 19 nt, Artificial Sequence
  Description of Artificial Sequence: Synthetic oligonucleotide
guagggauugaaagccaug

SEQ ID NO: 167743 - RNA, 19 nt, Artificial Sequence
  Description of Artificial Sequence: Synthetic oligonucleotide
gucauaucauucacucaac

SEQ ID NO: 167744 - RNA, 19 nt, Artificial Sequence
  Description of Artificial Sequence: Synthetic oligonucleotide
cugggcgaacaugacugcg

SEQ ID NO: 167745 - RNA, 19 nt, Artificial Sequence
  Description of Artificial Sequence: Synthetic oligonucleotide
ccaaacauuugcaguugag

SEQ ID NO: 167746 - RNA, 19 nt, Artificial Sequence
  Description of Artificial Sequence: Synthetic oligonucleotide
cauacacaugcuauaaauu

SEQ ID NO: 167747 - RNA, 19 nt, Artificial Sequence
  Description of Artificial Sequence: Synthetic oligonucleotide
ugugugugucguguguguc

SEQ ID NO: 167748 - RNA, 19 nt, Artificial Sequence
  Description of Artificial Sequence: Synthetic oligonucleotide
uuggaacgaagggaacgcu

SEQ ID NO: 167749 - RNA, 19 nt, Artificial Sequence
  Description of Artificial Sequence: Synthetic oligonucleotide
gguuacaucuaaggcuugc

SEQ ID NO: 167750 - RNA, 19 nt, Artificial Sequence
  Description of Artificial Sequence: Synthetic oligonucleotide
cauguaguucuaugacaga

SEQ ID NO: 167751 - RNA, 19 nt, Artificial Sequence
  Description of Artificial Sequence: Synthetic oligonucleotide
agggaaugaauuacugcau

SEQ ID NO: 167752 - RNA, 19 nt, Artificial Sequence
  Description of Artificial Sequence: Synthetic oligonucleotide
gagcaucggccuuuaaugu

SEQ ID NO: 167753 - RNA, 19 nt, Artificial Sequence
  Description of Artificial Sequence: Synthetic oligonucleotide
guguguguguguguguguc

SEQ ID NO: 167754 - RNA, 19 nt, Artificial Sequence
  Description of Artificial Sequence: Synthetic oligonucleotide
cauauaccucugguucccc

SEQ ID NO: 167755 - RNA, 19 nt, Artificial Sequence
  Description of Artificial Sequence: Synthetic oligonucleotide
caagguuguguuugggaua

SEQ ID NO: 167756 - RNA, 19 nt, Artificial Sequence
  Description of Artificial Sequence: Synthetic oligonucleotide
gacugcggcagucuucugu

SEQ ID NO: 167757 - RNA, 19 nt, Artificial Sequence
  Description of Artificial Sequence: Synthetic oligonucleotide
guaucucgaauuagagcga

SEQ ID NO: 167758 - RNA, 19 nt, Artificial Sequence
  Description of Artificial Sequence: Synthetic oligonucleotide
uucuagccaacuggcccug

SEQ ID NO: 167759 - RNA, 19 nt, Artificial Sequence
  Description of Artificial Sequence: Synthetic oligonucleotide
agagcgacauugacagcug

SEQ ID NO: 167760 - RNA, 19 nt, Artificial Sequence
  Description of Artificial Sequence: Synthetic oligonucleotide
ccguagggugagcauagcg

SEQ ID NO: 167761 - RNA, 19 nt, Artificial Sequence
  Description of Artificial Sequence: Synthetic oligonucleotide
gggcgaacaugacugcggc

SEQ ID NO: 167762 - RNA, 19 nt, Artificial Sequence
  Description of Artificial Sequence: Synthetic oligonucleotide
caauaguucuggacuuaaa

SEQ ID NO: 167763 - RNA, 19 nt, Artificial Sequence
  Description of Artificial Sequence: Synthetic oligonucleotide
aucaaacaccacguauaaa

SEQ ID NO: 167764 - RNA, 19 nt, Artificial Sequence
  Description of Artificial Sequence: Synthetic oligonucleotide
uugagagauuuggguacuc

SEQ ID NO: 167765 - RNA, 19 nt, Artificial Sequence
  Description of Artificial Sequence: Synthetic oligonucleotide
guacaauuuccacgcugaa

SEQ ID NO: 167766 - RNA, 19 nt, Artificial Sequence
  Description of Artificial Sequence: Synthetic oligonucleotide
caguaagguaacacuucaa

SEQ ID NO: 167767 - RNA, 19 nt, Artificial Sequence
  Description of Artificial Sequence: Synthetic oligonucleotide
cuuggcggaugggcaaacc

SEQ ID NO: 167768 - RNA, 19 nt, Artificial Sequence
  Description of Artificial Sequence: Synthetic oligonucleotide
gcuuaucccuacuaauuua

SEQ ID NO: 167769 - RNA, 19 nt, Artificial Sequence
  Description of Artificial Sequence: Synthetic oligonucleotide
gcaggagugugugugugug

SEQ ID NO: 167770 - RNA, 19 nt, Artificial Sequence
  Description of Artificial Sequence: Synthetic oligonucleotide
guuacaucuaaggcuugcu

SEQ ID NO: 167771 - RNA, 19 nt, Artificial Sequence
  Description of Artificial Sequence: Synthetic oligonucleotide
agaggacauacgggaauau

SEQ ID NO: 167772 - RNA, 19 nt, Artificial Sequence
  Description of Artificial Sequence: Synthetic oligonucleotide
caaugcaacagguggguuu

SEQ ID NO: 167773 - RNA, 19 nt, Artificial Sequence
  Description of Artificial Sequence: Synthetic oligonucleotide
gcggaaucugcauguuagc

SEQ ID NO: 167774 - RNA, 19 nt, Artificial Sequence
  Description of Artificial Sequence: Synthetic oligonucleotide
gcugcgacuuuaagugggg

SEQ ID NO: 167775 - RNA, 19 nt, Artificial Sequence
  Description of Artificial Sequence: Synthetic oligonucleotide
gguaucagcugaagugcac

SEQ ID NO: 167776 - RNA, 19 nt, Artificial Sequence
  Description of Artificial Sequence: Synthetic oligonucleotide
gugugugucgugugugucu

SEQ ID NO: 167777 - RNA, 19 nt, Artificial Sequence
  Description of Artificial Sequence: Synthetic oligonucleotide
guucuaugacagauagucu

SEQ ID NO: 167778 - RNA, 19 nt, Artificial Sequence
  Description of Artificial Sequence: Synthetic oligonucleotide
ggcuauaaauuaugacugu

SEQ ID NO: 167779 - RNA, 19 nt, Artificial Sequence
  Description of Artificial Sequence: Synthetic oligonucleotide
uccguagggugagcauagc

SEQ ID NO: 167780 - RNA, 19 nt, Artificial Sequence
  Description of Artificial Sequence: Synthetic oligonucleotide
gucaauaguucuggacuua

SEQ ID NO: 167781 - RNA, 19 nt, Artificial Sequence
  Description of Artificial Sequence: Synthetic oligonucleotide
cuuacccauuauguggugu

SEQ ID NO: 167782 - RNA, 19 nt, Artificial Sequence
  Description of Artificial Sequence: Synthetic oligonucleotide
ggucaauaguucuggacuu

SEQ ID NO: 167783 - RNA, 19 nt, Artificial Sequence
  Description of Artificial Sequence: Synthetic oligonucleotide
ggcuuaucccuacuaauuu

SEQ ID NO: 167784 - RNA, 19 nt, Artificial Sequence
  Description of Artificial Sequence: Synthetic oligonucleotide
ccaaguggcuguaagcaua

SEQ ID NO: 167785 - RNA, 19 nt, Artificial Sequence
  Description of Artificial Sequence: Synthetic oligonucleotide
gcugggcgaacaugacugc

SEQ ID NO: 167786 - RNA, 19 nt, Artificial Sequence
  Description of Artificial Sequence: Synthetic oligonucleotide
cugcggcagucuucuguug

SEQ ID NO: 167787 - RNA, 19 nt, Artificial Sequence
  Description of Artificial Sequence: Synthetic oligonucleotide
gacuaucuuuugugaugcu

SEQ ID NO: 167788 - RNA, 19 nt, Artificial Sequence
  Description of Artificial Sequence: Synthetic oligonucleotide
gcaucggccuuuaauguaa

SEQ ID NO: 167789 - RNA, 19 nt, Artificial Sequence
  Description of Artificial Sequence: Synthetic oligonucleotide
gugugugugugugucgugu

SEQ ID NO: 167790 - RNA, 19 nt, Artificial Sequence
  Description of Artificial Sequence: Synthetic oligonucleotide
ucuagccaacuggcccuga

SEQ ID NO: 167791 - RNA, 19 nt, Artificial Sequence
  Description of Artificial Sequence: Synthetic oligonucleotide
gugugugugugucgugugu

SEQ ID NO: 167792 - RNA, 19 nt, Artificial Sequence
  Description of Artificial Sequence: Synthetic oligonucleotide
acgcugaaauucacggcaa

SEQ ID NO: 167793 - RNA, 19 nt, Artificial Sequence
  Description of Artificial Sequence: Synthetic oligonucleotide
gugugugugugugugucgu

SEQ ID NO: 167794 - RNA, 19 nt, Artificial Sequence
  Description of Artificial Sequence: Synthetic oligonucleotide
gugugugugucgugugugu

SEQ ID NO: 167795 - RNA, 19 nt, Artificial Sequence
  Description of Artificial Sequence: Synthetic oligonucleotide
gcuuauaguuguguuggua

SEQ ID NO: 167796 - RNA, 19 nt, Artificial Sequence
  Description of Artificial Sequence: Synthetic oligonucleotide
cugcaccaugcuuauaguu

SEQ ID NO: 167797 - RNA, 19 nt, Artificial Sequence
  Description of Artificial Sequence: Synthetic oligonucleotide
cacggcaaaccuccagucu

SEQ ID NO: 167798 - RNA, 19 nt, Artificial Sequence
  Description of Artificial Sequence: Synthetic oligonucleotide
gcugcucgaccuacaaaca

SEQ ID NO: 167799 - RNA, 19 nt, Artificial Sequence
  Description of Artificial Sequence: Synthetic oligonucleotide
ggcaaugcaacaggugggu

SEQ ID NO: 167800 - RNA, 19 nt, Artificial Sequence
  Description of Artificial Sequence: Synthetic oligonucleotide
ggcgaacaugacugcggca

SEQ ID NO: 167801 - RNA, 19 nt, Artificial Sequence
  Description of Artificial Sequence: Synthetic oligonucleotide
cuguuguaugugcuuuaau

SEQ ID NO: 167802 - RNA, 19 nt, Artificial Sequence
  Description of Artificial Sequence: Synthetic oligonucleotide
cucgaauuagagcgacauu

SEQ ID NO: 167803 - RNA, 19 nt, Artificial Sequence
  Description of Artificial Sequence: Synthetic oligonucleotide
cucuuggcggaugggcaaa

SEQ ID NO: 167804 - RNA, 19 nt, Artificial Sequence
  Description of Artificial Sequence: Synthetic oligonucleotide
ggcuuuagucauaugcauu

SEQ ID NO: 167805 - RNA, 19 nt, Artificial Sequence
  Description of Artificial Sequence: Synthetic oligonucleotide
ggagugugugugugugugu

SEQ ID NO: 167806 - RNA, 19 nt, Artificial Sequence
  Description of Artificial Sequence: Synthetic oligonucleotide
ccaacacacuauccuguaa

SEQ ID NO: 167807 - RNA, 19 nt, Artificial Sequence
  Description of Artificial Sequence: Synthetic oligonucleotide
caggagugugugugugugu

SEQ ID NO: 167808 - RNA, 19 nt, Artificial Sequence
  Description of Artificial Sequence: Synthetic oligonucleotide
gcaaccaagugcacccucu

SEQ ID NO: 167809 - RNA, 19 nt, Artificial Sequence
  Description of Artificial Sequence: Synthetic oligonucleotide
caucggccuuuaauguaau

SEQ ID NO: 167810 - RNA, 19 nt, Artificial Sequence
  Description of Artificial Sequence: Synthetic oligonucleotide
caaccaagugcacccucuu

SEQ ID NO: 167811 - RNA, 19 nt, Artificial Sequence
  Description of Artificial Sequence: Synthetic oligonucleotide
gguuauugcuuaagugcuu

SEQ ID NO: 167812 - RNA, 19 nt, Artificial Sequence
  Description of Artificial Sequence: Synthetic oligonucleotide
gcggaaugguucaucuggu

SEQ ID NO: 167813 - RNA, 19 nt, Artificial Sequence
  Description of Artificial Sequence: Synthetic oligonucleotide
cugcgacuuuaaguggggu

SEQ ID NO: 167814 - RNA, 19 nt, Artificial Sequence
  Description of Artificial Sequence: Synthetic oligonucleotide
cgacuuuaaguggggugga

SEQ ID NO: 167815 - RNA, 19 nt, Artificial Sequence
  Description of Artificial Sequence: Synthetic oligonucleotide
cccugagcuauggguuaca

SEQ ID NO: 167816 - RNA, 19 nt, Artificial Sequence
  Description of Artificial Sequence: Synthetic oligonucleotide
cgaacaugacugcggcagu

SEQ ID NO: 167817 - RNA, 19 nt, Artificial Sequence
  Description of Artificial Sequence: Synthetic oligonucleotide
ccgggagcaucggccuuua

SEQ ID NO: 167818 - RNA, 19 nt, Artificial Sequence
  Description of Artificial Sequence: Synthetic oligonucleotide
cgggagcaucggccuuuaa

SEQ ID NO: 167819 - RNA, 19 nt, Artificial Sequence
  Description of Artificial Sequence: Synthetic oligonucleotide
uguggauagacuuuggccg

SEQ ID NO: 167820 - RNA, 19 nt, Artificial Sequence
  Description of Artificial Sequence: Synthetic oligonucleotide
aauauaaaggccucccgag

SEQ ID NO: 167821 - RNA, 19 nt, Artificial Sequence
  Description of Artificial Sequence: Synthetic oligonucleotide
auaaacaauaugucucucc

SEQ ID NO: 167822 - RNA, 19 nt, Artificial Sequence
  Description of Artificial Sequence: Synthetic oligonucleotide
uaaaaugugaaauucccca

SEQ ID NO: 167823 - RNA, 19 nt, Artificial Sequence
  Description of Artificial Sequence: Synthetic oligonucleotide
uaccauuaaaacauagagg

SEQ ID NO: 167824 - RNA, 19 nt, Artificial Sequence
  Description of Artificial Sequence: Synthetic oligonucleotide
ucaauuagagaaauguaca

SEQ ID NO: 167825 - RNA, 19 nt, Artificial Sequence
  Description of Artificial Sequence: Synthetic oligonucleotide
aacccagaugcacugauac

SEQ ID NO: 167826 - RNA, 19 nt, Artificial Sequence
  Description of Artificial Sequence: Synthetic oligonucleotide
uggauuaugugcuuauugg

SEQ ID NO: 167827 - RNA, 19 nt, Artificial Sequence
  Description of Artificial Sequence: Synthetic oligonucleotide
aguuauaaacaauaugucu

SEQ ID NO: 167828 - RNA, 19 nt, Artificial Sequence
  Description of Artificial Sequence: Synthetic oligonucleotide
ugugugaauaauaaauaga

SEQ ID NO: 167829 - RNA, 19 nt, Artificial Sequence
  Description of Artificial Sequence: Synthetic oligonucleotide
cagauaaaguuuuagcagg

SEQ ID NO: 167830 - RNA, 19 nt, Artificial Sequence
  Description of Artificial Sequence: Synthetic oligonucleotide
aucacuuggccuuaucacc

SEQ ID NO: 167831 - RNA, 19 nt, Artificial Sequence
  Description of Artificial Sequence: Synthetic oligonucleotide
ucuauaucaguuauaaaua

SEQ ID NO: 167832 - RNA, 19 nt, Artificial Sequence
  Description of Artificial Sequence: Synthetic oligonucleotide
aacggcacugauuuaauca

SEQ ID NO: 167833 - RNA, 19 nt, Artificial Sequence
  Description of Artificial Sequence: Synthetic oligonucleotide
uguuaaaaguacaaucuaa

SEQ ID NO: 167834 - RNA, 19 nt, Artificial Sequence
  Description of Artificial Sequence: Synthetic oligonucleotide
aagugacguacuuuaaaag

SEQ ID NO: 167835 - RNA, 19 nt, Artificial Sequence
  Description of Artificial Sequence: Synthetic oligonucleotide
uaauuuaagaagagagaca

SEQ ID NO: 167836 - RNA, 19 nt, Artificial Sequence
  Description of Artificial Sequence: Synthetic oligonucleotide
auagcaggaguugacaggc

SEQ ID NO: 167837 - RNA, 19 nt, Artificial Sequence
  Description of Artificial Sequence: Synthetic oligonucleotide
uacuugcuaaagaacaaag

SEQ ID NO: 167838 - RNA, 19 nt, Artificial Sequence
  Description of Artificial Sequence: Synthetic oligonucleotide
acauaacacuaguucaagc

SEQ ID NO: 167839 - RNA, 19 nt, Artificial Sequence
  Description of Artificial Sequence: Synthetic oligonucleotide
uccccaacuaaccuuaacc

SEQ ID NO: 167840 - RNA, 19 nt, Artificial Sequence
  Description of Artificial Sequence: Synthetic oligonucleotide
accuaggagaaucuucugc

SEQ ID NO: 167841 - RNA, 19 nt, Artificial Sequence
  Description of Artificial Sequence: Synthetic oligonucleotide
agugaagacucucauuguc

SEQ ID NO: 167842 - RNA, 19 nt, Artificial Sequence
  Description of Artificial Sequence: Synthetic oligonucleotide
ucucuaaacaacucaauua

SEQ ID NO: 167843 - RNA, 19 nt, Artificial Sequence
  Description of Artificial Sequence: Synthetic oligonucleotide
uguuacucacuucugccag

SEQ ID NO: 167844 - RNA, 19 nt, Artificial Sequence
  Description of Artificial Sequence: Synthetic oligonucleotide
gaauagcaggaguugacag

SEQ ID NO: 167845 - RNA, 19 nt, Artificial Sequence
  Description of Artificial Sequence: Synthetic oligonucleotide
uguguccuaaccuacgcug

SEQ ID NO: 167846 - RNA, 19 nt, Artificial Sequence
  Description of Artificial Sequence: Synthetic oligonucleotide
uuuuggguguaacuggucu

SEQ ID NO: 167847 - RNA, 19 nt, Artificial Sequence
  Description of Artificial Sequence: Synthetic oligonucleotide
uuauucugaaguuggccag

SEQ ID NO: 167848 - RNA, 19 nt, Artificial Sequence
  Description of Artificial Sequence: Synthetic oligonucleotide
auaacacuaguucaagccu

SEQ ID NO: 167849 - RNA, 19 nt, Artificial Sequence
  Description of Artificial Sequence: Synthetic oligonucleotide
agaguuaagguccaguuuu

SEQ ID NO: 167850 - RNA, 19 nt, Artificial Sequence
  Description of Artificial Sequence: Synthetic oligonucleotide
cuuguaaagucccucaauc

SEQ ID NO: 167851 - RNA, 19 nt, Artificial Sequence
  Description of Artificial Sequence: Synthetic oligonucleotide
acuagucuuagccuaagga

SEQ ID NO: 167852 - RNA, 19 nt, Artificial Sequence
  Description of Artificial Sequence: Synthetic oligonucleotide
uagcagauaaaguuuuagc

SEQ ID NO: 167853 - RNA, 19 nt, Artificial Sequence
  Description of Artificial Sequence: Synthetic oligonucleotide
accuuuagacacuagacau

SEQ ID NO: 167854 - RNA, 19 nt, Artificial Sequence
  Description of Artificial Sequence: Synthetic oligonucleotide
ugagcuagcgcauucugga

SEQ ID NO: 167855 - RNA, 19 nt, Artificial Sequence
  Description of Artificial Sequence: Synthetic oligonucleotide
cuaccuuuagacacuagac

SEQ ID NO: 167856 - RNA, 19 nt, Artificial Sequence
  Description of Artificial Sequence: Synthetic oligonucleotide
aacuagucuuagccuaagg

SEQ ID NO: 167857 - RNA, 19 nt, Artificial Sequence
  Description of Artificial Sequence: Synthetic oligonucleotide
aaacggcacugauuuaauc

SEQ ID NO: 167858 - RNA, 19 nt, Artificial Sequence
  Description of Artificial Sequence: Synthetic oligonucleotide
auaccuagaggccuuauaa

SEQ ID NO: 167859 - RNA, 19 nt, Artificial Sequence
  Description of Artificial Sequence: Synthetic oligonucleotide
guauacuugcuaaagaaca

SEQ ID NO: 167860 - RNA, 19 nt, Artificial Sequence
  Description of Artificial Sequence: Synthetic oligonucleotide
aauugcauccacacuagca

SEQ ID NO: 167861 - RNA, 19 nt, Artificial Sequence
  Description of Artificial Sequence: Synthetic oligonucleotide
uaccaugacaaggauuugg

SEQ ID NO: 167862 - RNA, 19 nt, Artificial Sequence
  Description of Artificial Sequence: Synthetic oligonucleotide
uuacaugcaagcagcagau

SEQ ID NO: 167863 - RNA, 19 nt, Artificial Sequence
  Description of Artificial Sequence: Synthetic oligonucleotide
uguuucaguaagacugaug

SEQ ID NO: 167864 - RNA, 19 nt, Artificial Sequence
  Description of Artificial Sequence: Synthetic oligonucleotide
ucaguaagacugauggaaa

SEQ ID NO: 167865 - RNA, 19 nt, Artificial Sequence
  Description of Artificial Sequence: Synthetic oligonucleotide
agggacaucccauuccguc

SEQ ID NO: 167866 - RNA, 19 nt, Artificial Sequence
  Description of Artificial Sequence: Synthetic oligonucleotide
gauuacuguauccaugucu

SEQ ID NO: 167867 - RNA, 19 nt, Artificial Sequence
  Description of Artificial Sequence: Synthetic oligonucleotide
ggccuuaucaccuaggaga

SEQ ID NO: 167868 - RNA, 19 nt, Artificial Sequence
  Description of Artificial Sequence: Synthetic oligonucleotide
agaguuacauagccugguc

SEQ ID NO: 167869 - RNA, 19 nt, Artificial Sequence
  Description of Artificial Sequence: Synthetic oligonucleotide
ugacguacuuuaaaagaaa

SEQ ID NO: 167870 - RNA, 19 nt, Artificial Sequence
  Description of Artificial Sequence: Synthetic oligonucleotide
auguuuaguaauauaaaau

SEQ ID NO: 167871 - RNA, 19 nt, Artificial Sequence
  Description of Artificial Sequence: Synthetic oligonucleotide
uacaugagacaugaguucu

SEQ ID NO: 167872 - RNA, 19 nt, Artificial Sequence
  Description of Artificial Sequence: Synthetic oligonucleotide
uuuguuguuguuguuguua

SEQ ID NO: 167873 - RNA, 19 nt, Artificial Sequence
  Description of Artificial Sequence: Synthetic oligonucleotide
uggucucuuacaugcaagc

SEQ ID NO: 167874 - RNA, 19 nt, Artificial Sequence
  Description of Artificial Sequence: Synthetic oligonucleotide
ugaauagcaggaguugaca

SEQ ID NO: 167875 - RNA, 19 nt, Artificial Sequence
  Description of Artificial Sequence: Synthetic oligonucleotide
auagagaagguaaauacuu

SEQ ID NO: 167876 - RNA, 19 nt, Artificial Sequence
  Description of Artificial Sequence: Synthetic oligonucleotide
uaaacuagucuuagccuaa

SEQ ID NO: 167877 - RNA, 19 nt, Artificial Sequence
  Description of Artificial Sequence: Synthetic oligonucleotide
ugguuaguguucauuaguu

SEQ ID NO: 167878 - RNA, 19 nt, Artificial Sequence
  Description of Artificial Sequence: Synthetic oligonucleotide
uaacacuaguucaagccua

SEQ ID NO: 167879 - RNA, 19 nt, Artificial Sequence
  Description of Artificial Sequence: Synthetic oligonucleotide
uuaucaccuaggagaaucu

SEQ ID NO: 167880 - RNA, 19 nt, Artificial Sequence
  Description of Artificial Sequence: Synthetic oligonucleotide
agguaaauacuuaggauga

SEQ ID NO: 167881 - RNA, 19 nt, Artificial Sequence
  Description of Artificial Sequence: Synthetic oligonucleotide
auagucacacccuaccuuu

SEQ ID NO: 167882 - RNA, 19 nt, Artificial Sequence
  Description of Artificial Sequence: Synthetic oligonucleotide
uuccugucagaauuguacu

SEQ ID NO: 167883 - RNA, 19 nt, Artificial Sequence
  Description of Artificial Sequence: Synthetic oligonucleotide
uuguuguuguuguuguuaa

SEQ ID NO: 167884 - RNA, 19 nt, Artificial Sequence
  Description of Artificial Sequence: Synthetic oligonucleotide
uguggcuaaacuguuuccu

SEQ ID NO: 167885 - RNA, 19 nt, Artificial Sequence
  Description of Artificial Sequence: Synthetic oligonucleotide
cucucaguuauaaacaaua

SEQ ID NO: 167886 - RNA, 19 nt, Artificial Sequence
  Description of Artificial Sequence: Synthetic oligonucleotide
gaggccuuauaauaaagua

SEQ ID NO: 167887 - RNA, 19 nt, Artificial Sequence
  Description of Artificial Sequence: Synthetic oligonucleotide
uccaaacuuuauggaaugg

SEQ ID NO: 167888 - RNA, 19 nt, Artificial Sequence
  Description of Artificial Sequence: Synthetic oligonucleotide
cuacgcuuuaguagguaag

SEQ ID NO: 167889 - RNA, 19 nt, Artificial Sequence
  Description of Artificial Sequence: Synthetic oligonucleotide
gcgacuuggagauaagaag

SEQ ID NO: 167890 - RNA, 19 nt, Artificial Sequence
  Description of Artificial Sequence: Synthetic oligonucleotide
ucagucgcuggauauaauu

SEQ ID NO: 167891 - RNA, 19 nt, Artificial Sequence
  Description of Artificial Sequence: Synthetic oligonucleotide
agucguugaugcguuuucc

SEQ ID NO: 167892 - RNA, 19 nt, Artificial Sequence
  Description of Artificial Sequence: Synthetic oligonucleotide
uuucgacugccacagcgac

SEQ ID NO: 167893 - RNA, 19 nt, Artificial Sequence
  Description of Artificial Sequence: Synthetic oligonucleotide
auuacuguauccaugucuu

SEQ ID NO: 167894 - RNA, 19 nt, Artificial Sequence
  Description of Artificial Sequence: Synthetic oligonucleotide
gagucagugcuucaagguc

SEQ ID NO: 167895 - RNA, 19 nt, Artificial Sequence
  Description of Artificial Sequence: Synthetic oligonucleotide
ccuccuacgcuuuaguagg

SEQ ID NO: 167896 - RNA, 19 nt, Artificial Sequence
  Description of Artificial Sequence: Synthetic oligonucleotide
auacaaaccucuguuugug

SEQ ID NO: 167897 - RNA, 19 nt, Artificial Sequence
  Description of Artificial Sequence: Synthetic oligonucleotide
uagccuaaggauauuuguu

SEQ ID NO: 167898 - RNA, 19 nt, Artificial Sequence
  Description of Artificial Sequence: Synthetic oligonucleotide
agguauguggcuaaacugu

SEQ ID NO: 167899 - RNA, 19 nt, Artificial Sequence
  Description of Artificial Sequence: Synthetic oligonucleotide
uggcuaaacuguuuccugu

SEQ ID NO: 167900 - RNA, 19 nt, Artificial Sequence
  Description of Artificial Sequence: Synthetic oligonucleotide
aucaucguuggcaucugac

SEQ ID NO: 167901 - RNA, 19 nt, Artificial Sequence
  Description of Artificial Sequence: Synthetic oligonucleotide
agccuaaggauauuuguuu

SEQ ID NO: 167902 - RNA, 19 nt, Artificial Sequence
  Description of Artificial Sequence: Synthetic oligonucleotide
aggauauuuguuugacccu

SEQ ID NO: 167903 - RNA, 19 nt, Artificial Sequence
  Description of Artificial Sequence: Synthetic oligonucleotide
uuuagacacuagacauuca

SEQ ID NO: 167904 - RNA, 19 nt, Artificial Sequence
  Description of Artificial Sequence: Synthetic oligonucleotide
ggauuuggcacucgguucc

SEQ ID NO: 167905 - RNA, 19 nt, Artificial Sequence
  Description of Artificial Sequence: Synthetic oligonucleotide
uucguggcgauagucacac

SEQ ID NO: 167906 - RNA, 19 nt, Artificial Sequence
  Description of Artificial Sequence: Synthetic oligonucleotide
aaacuagucuuagccuaag

SEQ ID NO: 167907 - RNA, 19 nt, Artificial Sequence
  Description of Artificial Sequence: Synthetic oligonucleotide
ucucucuaaacaacucaau

SEQ ID NO: 167908 - RNA, 19 nt, Artificial Sequence
  Description of Artificial Sequence: Synthetic oligonucleotide
caaagacaguauagagggg

SEQ ID NO: 167909 - RNA, 19 nt, Artificial Sequence
  Description of Artificial Sequence: Synthetic oligonucleotide
aaggcaacacucaaguguu

SEQ ID NO: 167910 - RNA, 19 nt, Artificial Sequence
  Description of Artificial Sequence: Synthetic oligonucleotide
auacuugugugaauaauaa

SEQ ID NO: 167911 - RNA, 19 nt, Artificial Sequence
  Description of Artificial Sequence: Synthetic oligonucleotide
aauauucagaugacagcaa

SEQ ID NO: 167912 - RNA, 19 nt, Artificial Sequence
  Description of Artificial Sequence: Synthetic oligonucleotide
ggccuuauaauaaaguaca

SEQ ID NO: 167913 - RNA, 19 nt, Artificial Sequence
  Description of Artificial Sequence: Synthetic oligonucleotide
uuagcagguauguggcuaa

SEQ ID NO: 167914 - RNA, 19 nt, Artificial Sequence
  Description of Artificial Sequence: Synthetic oligonucleotide
cuaggagaaucuucugcac

SEQ ID NO: 167915 - RNA, 19 nt, Artificial Sequence
  Description of Artificial Sequence: Synthetic oligonucleotide
ccaacuaaccuuaacccug

SEQ ID NO: 167916 - RNA, 19 nt, Artificial Sequence
  Description of Artificial Sequence: Synthetic oligonucleotide
uaguuuucagcuacacaua

SEQ ID NO: 167917 - RNA, 19 nt, Artificial Sequence
  Description of Artificial Sequence: Synthetic oligonucleotide
gaggcuugauuacuguauc

SEQ ID NO: 167918 - RNA, 19 nt, Artificial Sequence
  Description of Artificial Sequence: Synthetic oligonucleotide
auaaguggcuaugaauggu

SEQ ID NO: 167919 - RNA, 19 nt, Artificial Sequence
  Description of Artificial Sequence: Synthetic oligonucleotide
agucgcuggauauaauuua

SEQ ID NO: 167920 - RNA, 19 nt, Artificial Sequence
  Description of Artificial Sequence: Synthetic oligonucleotide
agcaagaagacugcuuuga

SEQ ID NO: 167921 - RNA, 19 nt, Artificial Sequence
  Description of Artificial Sequence: Synthetic oligonucleotide
guggcuaaacuguuuccug

SEQ ID NO: 167922 - RNA, 19 nt, Artificial Sequence
  Description of Artificial Sequence: Synthetic oligonucleotide
cuaaccuacgcugucccac

SEQ ID NO: 167923 - RNA, 19 nt, Artificial Sequence
  Description of Artificial Sequence: Synthetic oligonucleotide
uuuuagcagguauguggcu

SEQ ID NO: 167924 - RNA, 19 nt, Artificial Sequence
  Description of Artificial Sequence: Synthetic oligonucleotide
ugaugcguuuucccagucu

SEQ ID NO: 167925 - RNA, 19 nt, Artificial Sequence
  Description of Artificial Sequence: Synthetic oligonucleotide
ggauuaugugcuuauugga

SEQ ID NO: 167926 - RNA, 19 nt, Artificial Sequence
  Description of Artificial Sequence: Synthetic oligonucleotide
ucaccguuucgacugccac

SEQ ID NO: 167927 - RNA, 19 nt, Artificial Sequence
  Description of Artificial Sequence: Synthetic oligonucleotide
ccuucuacagacuccgacc

SEQ ID NO: 167928 - RNA, 19 nt, Artificial Sequence
  Description of Artificial Sequence: Synthetic oligonucleotide
uuaccacaaagguucugaa

SEQ ID NO: 167929 - RNA, 19 nt, Artificial Sequence
  Description of Artificial Sequence: Synthetic oligonucleotide
cacucgguuccuuguagag

SEQ ID NO: 167930 - RNA, 19 nt, Artificial Sequence
  Description of Artificial Sequence: Synthetic oligonucleotide
ggcuaugaaugguaauugc

SEQ ID NO: 167931 - RNA, 19 nt, Artificial Sequence
  Description of Artificial Sequence: Synthetic oligonucleotide
ucgacugccacagcgacuu

SEQ ID NO: 167932 - RNA, 19 nt, Artificial Sequence
  Description of Artificial Sequence: Synthetic oligonucleotide
gccuccuacgcuuuaguag

SEQ ID NO: 167933 - RNA, 19 nt, Artificial Sequence
  Description of Artificial Sequence: Synthetic oligonucleotide
ugauuacuguauccauguc

SEQ ID NO: 167934 - RNA, 19 nt, Artificial Sequence
  Description of Artificial Sequence: Synthetic oligonucleotide
guguuacucacuucugcca

SEQ ID NO: 167935 - RNA, 19 nt, Artificial Sequence
  Description of Artificial Sequence: Synthetic oligonucleotide
uugauuaguuuuguucaua

SEQ ID NO: 167936 - RNA, 19 nt, Artificial Sequence
  Description of Artificial Sequence: Synthetic oligonucleotide
uguccuaaccuacgcuguc

SEQ ID NO: 167937 - RNA, 19 nt, Artificial Sequence
  Description of Artificial Sequence: Synthetic oligonucleotide
cagcagaucacaaauaguu

SEQ ID NO: 167938 - RNA, 19 nt, Artificial Sequence
  Description of Artificial Sequence: Synthetic oligonucleotide
uaaccuacgcugucccacu

SEQ ID NO: 167939 - RNA, 19 nt, Artificial Sequence
  Description of Artificial Sequence: Synthetic oligonucleotide
ugacccuuuccuucuaauu

SEQ ID NO: 167940 - RNA, 19 nt, Artificial Sequence
  Description of Artificial Sequence: Synthetic oligonucleotide
acuaaccuuaacccuggua

SEQ ID NO: 167941 - RNA, 19 nt, Artificial Sequence
  Description of Artificial Sequence: Synthetic oligonucleotide
agcagguauguggcuaaac

SEQ ID NO: 167942 - RNA, 19 nt, Artificial Sequence
  Description of Artificial Sequence: Synthetic oligonucleotide
agguuuucuauaggcagga

SEQ ID NO: 167943 - RNA, 19 nt, Artificial Sequence
  Description of Artificial Sequence: Synthetic oligonucleotide
aaaacggcacugauuuaau

SEQ ID NO: 167944 - RNA, 19 nt, Artificial Sequence
  Description of Artificial Sequence: Synthetic oligonucleotide
ucugaccuucauuuacuuu

SEQ ID NO: 167945 - RNA, 19 nt, Artificial Sequence
  Description of Artificial Sequence: Synthetic oligonucleotide
gauaccuagaggccuuaua

SEQ ID NO: 167946 - RNA, 19 nt, Artificial Sequence
  Description of Artificial Sequence: Synthetic oligonucleotide
acgcuuuaguagguaagag

SEQ ID NO: 167947 - RNA, 19 nt, Artificial Sequence
  Description of Artificial Sequence: Synthetic oligonucleotide
aaccuacgcugucccacug

SEQ ID NO: 167948 - RNA, 19 nt, Artificial Sequence
  Description of Artificial Sequence: Synthetic oligonucleotide
acccugguauacuugcuaa

SEQ ID NO: 167949 - RNA, 19 nt, Artificial Sequence
  Description of Artificial Sequence: Synthetic oligonucleotide
auguguguccuaaccuacg

SEQ ID NO: 167950 - RNA, 19 nt, Artificial Sequence
  Description of Artificial Sequence: Synthetic oligonucleotide
cuuuugguuugccauaagu

SEQ ID NO: 167951 - RNA, 19 nt, Artificial Sequence
  Description of Artificial Sequence: Synthetic oligonucleotide
uuccccaacuaaccuuaac

SEQ ID NO: 167952 - RNA, 19 nt, Artificial Sequence
  Description of Artificial Sequence: Synthetic oligonucleotide
acucaauuagagaaaugua

SEQ ID NO: 167953 - RNA, 19 nt, Artificial Sequence
  Description of Artificial Sequence: Synthetic oligonucleotide
gggacaucccauuccgucc

SEQ ID NO: 167954 - RNA, 19 nt, Artificial Sequence
  Description of Artificial Sequence: Synthetic oligonucleotide
uucugaccuucauuuacuu

SEQ ID NO: 167955 - RNA, 19 nt, Artificial Sequence
  Description of Artificial Sequence: Synthetic oligonucleotide
gcuaugaaugguaauugca

SEQ ID NO: 167956 - RNA, 19 nt, Artificial Sequence
  Description of Artificial Sequence: Synthetic oligonucleotide
cuaugucccacugugucca

SEQ ID NO: 167957 - RNA, 19 nt, Artificial Sequence
  Description of Artificial Sequence: Synthetic oligonucleotide
uuuuguuguuguuguuguu

SEQ ID NO: 167958 - RNA, 19 nt, Artificial Sequence
  Description of Artificial Sequence: Synthetic oligonucleotide
gaugcguuuucccagucuu

SEQ ID NO: 167959 - RNA, 19 nt, Artificial Sequence
  Description of Artificial Sequence: Synthetic oligonucleotide
uucgacugccacagcgacu

SEQ ID NO: 167960 - RNA, 19 nt, Artificial Sequence
  Description of Artificial Sequence: Synthetic oligonucleotide
uucucaccguuucgacugc

SEQ ID NO: 167961 - RNA, 19 nt, Artificial Sequence
  Description of Artificial Sequence: Synthetic oligonucleotide
uuacuguauccaugucuuc

SEQ ID NO: 167962 - RNA, 19 nt, Artificial Sequence
  Description of Artificial Sequence: Synthetic oligonucleotide
ccuaggagaaucuucugca

SEQ ID NO: 167963 - RNA, 19 nt, Artificial Sequence
  Description of Artificial Sequence: Synthetic oligonucleotide
cguuucgacugccacagcg

SEQ ID NO: 167964 - RNA, 19 nt, Artificial Sequence
  Description of Artificial Sequence: Synthetic oligonucleotide
gaccauguuuaguaauaua

SEQ ID NO: 167965 - RNA, 19 nt, Artificial Sequence
  Description of Artificial Sequence: Synthetic oligonucleotide
gugguuaguguucauuagu

SEQ ID NO: 167966 - RNA, 19 nt, Artificial Sequence
  Description of Artificial Sequence: Synthetic oligonucleotide
agaccauguuuaguaauau

SEQ ID NO: 167967 - RNA, 19 nt, Artificial Sequence
  Description of Artificial Sequence: Synthetic oligonucleotide
aggacgaggcuugauuacu

SEQ ID NO: 167968 - RNA, 19 nt, Artificial Sequence
  Description of Artificial Sequence: Synthetic oligonucleotide
ugguguuuuggggauucaa

SEQ ID NO: 167969 - RNA, 19 nt, Artificial Sequence
  Description of Artificial Sequence: Synthetic oligonucleotide
cacuaguucaagccuaugu

SEQ ID NO: 167970 - RNA, 19 nt, Artificial Sequence
  Description of Artificial Sequence: Synthetic oligonucleotide
ccuaccuuuagacacuaga

SEQ ID NO: 167971 - RNA, 19 nt, Artificial Sequence
  Description of Artificial Sequence: Synthetic oligonucleotide
guuaagguccaguuuuaau

SEQ ID NO: 167972 - RNA, 19 nt, Artificial Sequence
  Description of Artificial Sequence: Synthetic oligonucleotide
ggcacugauuuaaucagca

SEQ ID NO: 167973 - RNA, 19 nt, Artificial Sequence
  Description of Artificial Sequence: Synthetic oligonucleotide
ggcuugauuacuguaucca

SEQ ID NO: 167974 - RNA, 19 nt, Artificial Sequence
  Description of Artificial Sequence: Synthetic oligonucleotide
guuucgacugccacagcga

SEQ ID NO: 167975 - RNA, 19 nt, Artificial Sequence
  Description of Artificial Sequence: Synthetic oligonucleotide
guccuaaccuacgcugucc

SEQ ID NO: 167976 - RNA, 19 nt, Artificial Sequence
  Description of Artificial Sequence: Synthetic oligonucleotide
ggcuaaacuguuuccuguc

SEQ ID NO: 167977 - RNA, 19 nt, Artificial Sequence
  Description of Artificial Sequence: Synthetic oligonucleotide
guucagucgcuggauauaa

SEQ ID NO: 167978 - RNA, 19 nt, Artificial Sequence
  Description of Artificial Sequence: Synthetic oligonucleotide
uguauuccucuugcauuaa

SEQ ID NO: 167979 - RNA, 19 nt, Artificial Sequence
  Description of Artificial Sequence: Synthetic oligonucleotide
gucgcuggauauaauuuaa

SEQ ID NO: 167980 - RNA, 19 nt, Artificial Sequence
  Description of Artificial Sequence: Synthetic oligonucleotide
gagugaagacucucauugu

SEQ ID NO: 167981 - RNA, 19 nt, Artificial Sequence
  Description of Artificial Sequence: Synthetic oligonucleotide
guaauaccauuaaaacaua

SEQ ID NO: 167982 - RNA, 19 nt, Artificial Sequence
  Description of Artificial Sequence: Synthetic oligonucleotide
acaucccauuccguccuuc

SEQ ID NO: 167983 - RNA, 19 nt, Artificial Sequence
  Description of Artificial Sequence: Synthetic oligonucleotide
gucacacccuaccuuuaga

SEQ ID NO: 167984 - RNA, 19 nt, Artificial Sequence
  Description of Artificial Sequence: Synthetic oligonucleotide
uaucaccuaggagaaucuu

SEQ ID NO: 167985 - RNA, 19 nt, Artificial Sequence
  Description of Artificial Sequence: Synthetic oligonucleotide
gacuccgaccuuggugucc

SEQ ID NO: 167986 - RNA, 19 nt, Artificial Sequence
  Description of Artificial Sequence: Synthetic oligonucleotide
gccuucuacagacuccgac

SEQ ID NO: 167987 - RNA, 19 nt, Artificial Sequence
  Description of Artificial Sequence: Synthetic oligonucleotide
accuacgcugucccacuga

SEQ ID NO: 167988 - RNA, 19 nt, Artificial Sequence
  Description of Artificial Sequence: Synthetic oligonucleotide
cacagcgacuuggagauaa

SEQ ID NO: 167989 - RNA, 19 nt, Artificial Sequence
  Description of Artificial Sequence: Synthetic oligonucleotide
ggcgagccuggucacauac

SEQ ID NO: 167990 - RNA, 19 nt, Artificial Sequence
  Description of Artificial Sequence: Synthetic oligonucleotide
gcgcauucuggauuaugug

SEQ ID NO: 167991 - RNA, 19 nt, Artificial Sequence
  Description of Artificial Sequence: Synthetic oligonucleotide
ggcuauuguaaaacauaac

SEQ ID NO: 167992 - RNA, 19 nt, Artificial Sequence
  Description of Artificial Sequence: Synthetic oligonucleotide
ggcuagagacuggagggcc

SEQ ID NO: 167993 - RNA, 19 nt, Artificial Sequence
  Description of Artificial Sequence: Synthetic oligonucleotide
guggauagacuuuggccgu

SEQ ID NO: 167994 - RNA, 19 nt, Artificial Sequence
  Description of Artificial Sequence: Synthetic oligonucleotide
ucucaccguuucgacugcc

SEQ ID NO: 167995 - RNA, 19 nt, Artificial Sequence
  Description of Artificial Sequence: Synthetic oligonucleotide
cgagaacugcccaggaagc

SEQ ID NO: 167996 - RNA, 19 nt, Artificial Sequence
  Description of Artificial Sequence: Synthetic oligonucleotide
caccguuucgacugccaca

SEQ ID NO: 167997 - RNA, 19 nt, Artificial Sequence
  Description of Artificial Sequence: Synthetic oligonucleotide
acugauaccuagaggccuu

SEQ ID NO: 167998 - RNA, 19 nt, Artificial Sequence
  Description of Artificial Sequence: Synthetic oligonucleotide
gagcuucguggcgauaguc

SEQ ID NO: 167999 - RNA, 19 nt, Artificial Sequence
  Description of Artificial Sequence: Synthetic oligonucleotide
ggucacauacaaaccucug

SEQ ID NO: 168000 - RNA, 19 nt, Artificial Sequence
  Description of Artificial Sequence: Synthetic oligonucleotide
cacuagcagauaaaguuuu

SEQ ID NO: 168001 - RNA, 19 nt, Artificial Sequence
  Description of Artificial Sequence: Synthetic oligonucleotide
gcuagcgcauucuggauua

SEQ ID NO: 168002 - RNA, 19 nt, Artificial Sequence
  Description of Artificial Sequence: Synthetic oligonucleotide
cuuuaguagguaagaguuu

SEQ ID NO: 168003 - RNA, 19 nt, Artificial Sequence
  Description of Artificial Sequence: Synthetic oligonucleotide
gaguuaagguccaguuuua

SEQ ID NO: 168004 - RNA, 19 nt, Artificial Sequence
  Description of Artificial Sequence: Synthetic oligonucleotide
acacuaguucaagccuaug

SEQ ID NO: 168005 - RNA, 19 nt, Artificial Sequence
  Description of Artificial Sequence: Synthetic oligonucleotide
uugguguuuuggggauuca

SEQ ID NO: 168006 - RNA, 19 nt, Artificial Sequence
  Description of Artificial Sequence: Synthetic oligonucleotide
acuagcagauaaaguuuua

SEQ ID NO: 168007 - RNA, 19 nt, Artificial Sequence
  Description of Artificial Sequence: Synthetic oligonucleotide
cucaccguuucgacugcca

SEQ ID NO: 168008 - RNA, 19 nt, Artificial Sequence
  Description of Artificial Sequence: Synthetic oligonucleotide
uccuacgcuuuaguaggua

SEQ ID NO: 168009 - RNA, 19 nt, Artificial Sequence
  Description of Artificial Sequence: Synthetic oligonucleotide
ggacgaggcuugauuacug

SEQ ID NO: 168010 - RNA, 19 nt, Artificial Sequence
  Description of Artificial Sequence: Synthetic oligonucleotide
ccacaaagguucugaagca

SEQ ID NO: 168011 - RNA, 19 nt, Artificial Sequence
  Description of Artificial Sequence: Synthetic oligonucleotide
aaugagcuucguggcgaua

SEQ ID NO: 168012 - RNA, 19 nt, Artificial Sequence
  Description of Artificial Sequence: Synthetic oligonucleotide
guguguccuaaccuacgcu

SEQ ID NO: 168013 - RNA, 19 nt, Artificial Sequence
  Description of Artificial Sequence: Synthetic oligonucleotide
caauaugaucucuguggau

SEQ ID NO: 168014 - RNA, 19 nt, Artificial Sequence
  Description of Artificial Sequence: Synthetic oligonucleotide
ggauagacuuuggccguug

SEQ ID NO: 168015 - RNA, 19 nt, Artificial Sequence
  Description of Artificial Sequence: Synthetic oligonucleotide
ugagagcaaugagcuucgu

SEQ ID NO: 168016 - RNA, 19 nt, Artificial Sequence
  Description of Artificial Sequence: Synthetic oligonucleotide
ccuacgcuuuaguagguaa

SEQ ID NO: 168017 - RNA, 19 nt, Artificial Sequence
  Description of Artificial Sequence: Synthetic oligonucleotide
ggauauuuguuugacccuu

SEQ ID NO: 168018 - RNA, 19 nt, Artificial Sequence
  Description of Artificial Sequence: Synthetic oligonucleotide
cagcgacuuggagauaaga

SEQ ID NO: 168019 - RNA, 19 nt, Artificial Sequence
  Description of Artificial Sequence: Synthetic oligonucleotide
ggcgauagucacacccuac

SEQ ID NO: 168020 - RNA, 19 nt, Artificial Sequence
  Description of Artificial Sequence: Synthetic oligonucleotide
ucguggcgauagucacacc

SEQ ID NO: 168021 - RNA, 19 nt, Artificial Sequence
  Description of Artificial Sequence: Synthetic oligonucleotide
gcacucgguuccuuguaga

SEQ ID NO: 168022 - RNA, 19 nt, Artificial Sequence
  Description of Artificial Sequence: Synthetic oligonucleotide
agccuaugucccacugugu

SEQ ID NO: 168023 - RNA, 19 nt, Artificial Sequence
  Description of Artificial Sequence: Synthetic oligonucleotide
gcaggaguugacaggccac

SEQ ID NO: 168024 - RNA, 19 nt, Artificial Sequence
  Description of Artificial Sequence: Synthetic oligonucleotide
caucccauuccguccuucu

SEQ ID NO: 168025 - RNA, 19 nt, Artificial Sequence
  Description of Artificial Sequence: Synthetic oligonucleotide
gguguuuuggggauucaau

SEQ ID NO: 168026 - RNA, 19 nt, Artificial Sequence
  Description of Artificial Sequence: Synthetic oligonucleotide
gcaacacucaaguguuacu

SEQ ID NO: 168027 - RNA, 19 nt, Artificial Sequence
  Description of Artificial Sequence: Synthetic oligonucleotide
gagcuagcgcauucuggau

SEQ ID NO: 168028 - RNA, 19 nt, Artificial Sequence
  Description of Artificial Sequence: Synthetic oligonucleotide
guguccuaaccuacgcugu

SEQ ID NO: 168029 - RNA, 19 nt, Artificial Sequence
  Description of Artificial Sequence: Synthetic oligonucleotide
ccgaguguacacaguuguc

SEQ ID NO: 168030 - RNA, 19 nt, Artificial Sequence
  Description of Artificial Sequence: Synthetic oligonucleotide
cccaacuaaccuuaacccu

SEQ ID NO: 168031 - RNA, 19 nt, Artificial Sequence
  Description of Artificial Sequence: Synthetic oligonucleotide
cacccuaccuuuagacacu

SEQ ID NO: 168032 - RNA, 19 nt, Artificial Sequence
  Description of Artificial Sequence: Synthetic oligonucleotide
aggugugguuaguguucau

SEQ ID NO: 168033 - RNA, 19 nt, Artificial Sequence
  Description of Artificial Sequence: Synthetic oligonucleotide
acccuaccuuuagacacua

SEQ ID NO: 168034 - RNA, 19 nt, Artificial Sequence
  Description of Artificial Sequence: Synthetic oligonucleotide
ccccgaguguacacaguug

SEQ ID NO: 168035 - RNA, 19 nt, Artificial Sequence
  Description of Artificial Sequence: Synthetic oligonucleotide
cccgaguguacacaguugu

SEQ ID NO: 168036 - RNA, 19 nt, Artificial Sequence
  Description of Artificial Sequence: Synthetic oligonucleotide
gguaaauacuuaggaugau

SEQ ID NO: 168037 - RNA, 19 nt, Artificial Sequence
  Description of Artificial Sequence: Synthetic oligonucleotide
ccuacgcugucccacugaa

SEQ ID NO: 168038 - RNA, 19 nt, Artificial Sequence
  Description of Artificial Sequence: Synthetic oligonucleotide
ccuaaccuacgcuguccca

SEQ ID NO: 168039 - RNA, 19 nt, Artificial Sequence
  Description of Artificial Sequence: Synthetic oligonucleotide
gcuuaccaugacaaggauu

SEQ ID NO: 168040 - RNA, 19 nt, Artificial Sequence
  Description of Artificial Sequence: Synthetic oligonucleotide
cgaggcuugauuacuguau

SEQ ID NO: 168041 - RNA, 19 nt, Artificial Sequence
  Description of Artificial Sequence: Synthetic oligonucleotide
cugauaccuagaggccuua

SEQ ID NO: 168042 - RNA, 19 nt, Artificial Sequence
  Description of Artificial Sequence: Synthetic oligonucleotide
gcgagccuggucacauaca

SEQ ID NO: 168043 - RNA, 19 nt, Artificial Sequence
  Description of Artificial Sequence: Synthetic oligonucleotide
ccguuucgacugccacagc

SEQ ID NO: 168044 - RNA, 19 nt, Artificial Sequence
  Description of Artificial Sequence: Synthetic oligonucleotide
gucuuagccuaaggauauu

SEQ ID NO: 168045 - RNA, 19 nt, Artificial Sequence
  Description of Artificial Sequence: Synthetic oligonucleotide
cuagcgcauucuggauuau

SEQ ID NO: 168046 - RNA, 19 nt, Artificial Sequence
  Description of Artificial Sequence: Synthetic oligonucleotide
cgccuccuacgcuuuagua

SEQ ID NO: 168047 - RNA, 19 nt, Artificial Sequence
  Description of Artificial Sequence: Synthetic oligonucleotide
ccgaccuugguguccucuu

SEQ ID NO: 168048 - RNA, 19 nt, Artificial Sequence
  Description of Artificial Sequence: Synthetic oligonucleotide
ucaaggaugacacuugagg

SEQ ID NO: 168049 - RNA, 19 nt, Artificial Sequence
  Description of Artificial Sequence: Synthetic oligonucleotide
agaaugaggaggcagagcg

SEQ ID NO: 168050 - RNA, 19 nt, Artificial Sequence
  Description of Artificial Sequence: Synthetic oligonucleotide
aaucuuagcuuccucuccc

SEQ ID NO: 168051 - RNA, 19 nt, Artificial Sequence
  Description of Artificial Sequence: Synthetic oligonucleotide
auggucauaguacacuucc

SEQ ID NO: 168052 - RNA, 19 nt, Artificial Sequence
  Description of Artificial Sequence: Synthetic oligonucleotide
ucaauguccugcaacgugg

SEQ ID NO: 168053 - RNA, 19 nt, Artificial Sequence
  Description of Artificial Sequence: Synthetic oligonucleotide
gacaaugacauccauccag

SEQ ID NO: 168054 - RNA, 19 nt, Artificial Sequence
  Description of Artificial Sequence: Synthetic oligonucleotide
uacaaauacugcaaaacac

SEQ ID NO: 168055 - RNA, 19 nt, Artificial Sequence
  Description of Artificial Sequence: Synthetic oligonucleotide
uuuacauagucaaaaugcu

SEQ ID NO: 168056 - RNA, 19 nt, Artificial Sequence
  Description of Artificial Sequence: Synthetic oligonucleotide
agcgguaaaccucaguagc

SEQ ID NO: 168057 - RNA, 19 nt, Artificial Sequence
  Description of Artificial Sequence: Synthetic oligonucleotide
agagcuuugucucagucuc

SEQ ID NO: 168058 - RNA, 19 nt, Artificial Sequence
  Description of Artificial Sequence: Synthetic oligonucleotide
aaggcgcaaaggcugaagc

SEQ ID NO: 168059 - RNA, 19 nt, Artificial Sequence
  Description of Artificial Sequence: Synthetic oligonucleotide
uguuaaggcgcaaaggcug

SEQ ID NO: 168060 - RNA, 19 nt, Artificial Sequence
  Description of Artificial Sequence: Synthetic oligonucleotide
  modified_base (9)..(9): a, c, u, g, unknown or other
uccuguacnguuuugggcc

SEQ ID NO: 168061 - RNA, 19 nt, Artificial Sequence
  Description of Artificial Sequence: Synthetic oligonucleotide
caugacuuaaucuugccac

SEQ ID NO: 168062 - RNA, 19 nt, Artificial Sequence
  Description of Artificial Sequence: Synthetic oligonucleotide
cuaagcaccacauguaggc

SEQ ID NO: 168063 - RNA, 19 nt, Artificial Sequence
  Description of Artificial Sequence: Synthetic oligonucleotide
ugaucaaguagccacggca

SEQ ID NO: 168064 - RNA, 19 nt, Artificial Sequence
  Description of Artificial Sequence: Synthetic oligonucleotide
uuaguguguaaccauggug

SEQ ID NO: 168065 - RNA, 19 nt, Artificial Sequence
  Description of Artificial Sequence: Synthetic oligonucleotide
uggacuacgacccagggua

SEQ ID NO: 168066 - RNA, 19 nt, Artificial Sequence
  Description of Artificial Sequence: Synthetic oligonucleotide
uuaacuuggcccacagccg

SEQ ID NO: 168067 - RNA, 19 nt, Artificial Sequence
  Description of Artificial Sequence: Synthetic oligonucleotide
uuaaucuugccacccaucu

SEQ ID NO: 168068 - RNA, 19 nt, Artificial Sequence
  Description of Artificial Sequence: Synthetic oligonucleotide
ucuaugugggucuuuaagu

SEQ ID NO: 168069 - RNA, 19 nt, Artificial Sequence
  Description of Artificial Sequence: Synthetic oligonucleotide
aauuaguguguaaccaugg

SEQ ID NO: 168070 - RNA, 19 nt, Artificial Sequence
  Description of Artificial Sequence: Synthetic oligonucleotide
uacugcaaaacacccagcc

SEQ ID NO: 168071 - RNA, 19 nt, Artificial Sequence
  Description of Artificial Sequence: Synthetic oligonucleotide
acguaccuuaacuuggccc

SEQ ID NO: 168072 - RNA, 19 nt, Artificial Sequence
  Description of Artificial Sequence: Synthetic oligonucleotide
aagcccaacccucaagcac

SEQ ID NO: 168073 - RNA, 19 nt, Artificial Sequence
  Description of Artificial Sequence: Synthetic oligonucleotide
gauagcgugugagaggucg

SEQ ID NO: 168074 - RNA, 19 nt, Artificial Sequence
  Description of Artificial Sequence: Synthetic oligonucleotide
aagccgagcagugaguggc

SEQ ID NO: 168075 - RNA, 19 nt, Artificial Sequence
  Description of Artificial Sequence: Synthetic oligonucleotide
auggcaauuaguguguaac

SEQ ID NO: 168076 - RNA, 19 nt, Artificial Sequence
  Description of Artificial Sequence: Synthetic oligonucleotide
cauaauaggaaagggugcg

SEQ ID NO: 168077 - RNA, 19 nt, Artificial Sequence
  Description of Artificial Sequence: Synthetic oligonucleotide
uuauaacaggaggauaggg

SEQ ID NO: 168078 - RNA, 19 nt, Artificial Sequence
  Description of Artificial Sequence: Synthetic oligonucleotide
agaauugagagcccagcuc

SEQ ID NO: 168079 - RNA, 19 nt, Artificial Sequence
  Description of Artificial Sequence: Synthetic oligonucleotide
agcaccuaacucuucauag

SEQ ID NO: 168080 - RNA, 19 nt, Artificial Sequence
  Description of Artificial Sequence: Synthetic oligonucleotide
ucugcgacaccuuuuccgg

SEQ ID NO: 168081 - RNA, 19 nt, Artificial Sequence
  Description of Artificial Sequence: Synthetic oligonucleotide
  modified_base (3)..(3): a, c, u, g, unknown or other
acnguuuugggcccggauc

SEQ ID NO: 168082 - RNA, 19 nt, Artificial Sequence
  Description of Artificial Sequence: Synthetic oligonucleotide
acauaauaggaaagggugc

SEQ ID NO: 168083 - RNA, 19 nt, Artificial Sequence
  Description of Artificial Sequence: Synthetic oligonucleotide
uguugucaggggaacaugc

SEQ ID NO: 168084 - RNA, 19 nt, Artificial Sequence
  Description of Artificial Sequence: Synthetic oligonucleotide
uuuauaacaggaggauagg

SEQ ID NO: 168085 - RNA, 19 nt, Artificial Sequence
  Description of Artificial Sequence: Synthetic oligonucleotide
uggcuuaguguuaaggcgc

SEQ ID NO: 168086 - RNA, 19 nt, Artificial Sequence
  Description of Artificial Sequence: Synthetic oligonucleotide
ugcuaagcaccacauguag

SEQ ID NO: 168087 - RNA, 19 nt, Artificial Sequence
  Description of Artificial Sequence: Synthetic oligonucleotide
ucaagcaccuaacucuuca

SEQ ID NO: 168088 - RNA, 19 nt, Artificial Sequence
  Description of Artificial Sequence: Synthetic oligonucleotide
agaccuugcugcuaagcac

SEQ ID NO: 168089 - RNA, 19 nt, Artificial Sequence
  Description of Artificial Sequence: Synthetic oligonucleotide
uccuugagcaaaguagugg

SEQ ID NO: 168090 - RNA, 19 nt, Artificial Sequence
  Description of Artificial Sequence: Synthetic oligonucleotide
cagguuacgaggaaggcug

SEQ ID NO: 168091 - RNA, 19 nt, Artificial Sequence
  Description of Artificial Sequence: Synthetic oligonucleotide
aaagggugcugcaccaugc

SEQ ID NO: 168092 - RNA, 19 nt, Artificial Sequence
  Description of Artificial Sequence: Synthetic oligonucleotide
aagagcuuugucucagucu

SEQ ID NO: 168093 - RNA, 19 nt, Artificial Sequence
  Description of Artificial Sequence: Synthetic oligonucleotide
uaguucaugaacugagugu

SEQ ID NO: 168094 - RNA, 19 nt, Artificial Sequence
  Description of Artificial Sequence: Synthetic oligonucleotide
ucauaguacacuuccucga

SEQ ID NO: 168095 - RNA, 19 nt, Artificial Sequence
  Description of Artificial Sequence: Synthetic oligonucleotide
ucaugaacugaguguagcc

SEQ ID NO: 168096 - RNA, 19 nt, Artificial Sequence
  Description of Artificial Sequence: Synthetic oligonucleotide
cagggugucauaagcaugc

SEQ ID NO: 168097 - RNA, 19 nt, Artificial Sequence
  Description of Artificial Sequence: Synthetic oligonucleotide
uccgguugggcagauagcg

SEQ ID NO: 168098 - RNA, 19 nt, Artificial Sequence
  Description of Artificial Sequence: Synthetic oligonucleotide
acagaauugagagcccagc

SEQ ID NO: 168099 - RNA, 19 nt, Artificial Sequence
  Description of Artificial Sequence: Synthetic oligonucleotide
uuuccggccugcuacaccc

SEQ ID NO: 168100 - RNA, 19 nt, Artificial Sequence
  Description of Artificial Sequence: Synthetic oligonucleotide
aagagaaaacaagcugggg

SEQ ID NO: 168101 - RNA, 19 nt, Artificial Sequence
  Description of Artificial Sequence: Synthetic oligonucleotide
caauuaguguguaaccaug

SEQ ID NO: 168102 - RNA, 19 nt, Artificial Sequence
  Description of Artificial Sequence: Synthetic oligonucleotide
ugauggacuacgacccagg

SEQ ID NO: 168103 - RNA, 19 nt, Artificial Sequence
  Description of Artificial Sequence: Synthetic oligonucleotide
uaugugggucuuuaaguca

SEQ ID NO: 168104 - RNA, 19 nt, Artificial Sequence
  Description of Artificial Sequence: Synthetic oligonucleotide
cuaugugggucuuuaaguc

SEQ ID NO: 168105 - RNA, 19 nt, Artificial Sequence
  Description of Artificial Sequence: Synthetic oligonucleotide
aaguccuccuuccgguugg

SEQ ID NO: 168106 - RNA, 19 nt, Artificial Sequence
  Description of Artificial Sequence: Synthetic oligonucleotide
gaucaaguagccacggcag

SEQ ID NO: 168107 - RNA, 19 nt, Artificial Sequence
  Description of Artificial Sequence: Synthetic oligonucleotide
ucuugcacaaaagcccugg

SEQ ID NO: 168108 - RNA, 19 nt, Artificial Sequence
  Description of Artificial Sequence: Synthetic oligonucleotide
cuugcuucguagcagcccc

SEQ ID NO: 168109 - RNA, 19 nt, Artificial Sequence
  Description of Artificial Sequence: Synthetic oligonucleotide
ggaaguauagaccugagcu

SEQ ID NO: 168110 - RNA, 19 nt, Artificial Sequence
  Description of Artificial Sequence: Synthetic oligonucleotide
gagccgaucaaagacaaac

SEQ ID NO: 168111 - RNA, 19 nt, Artificial Sequence
  Description of Artificial Sequence: Synthetic oligonucleotide
uguuccccaacuuuauaca

SEQ ID NO: 168112 - RNA, 19 nt, Artificial Sequence
  Description of Artificial Sequence: Synthetic oligonucleotide
auaagcaugcucgcccucc

SEQ ID NO: 168113 - RNA, 19 nt, Artificial Sequence
  Description of Artificial Sequence: Synthetic oligonucleotide
auaauaggaaagggugcgc

SEQ ID NO: 168114 - RNA, 19 nt, Artificial Sequence
  Description of Artificial Sequence: Synthetic oligonucleotide
cucuaugugggucuuuaag

SEQ ID NO: 168115 - RNA, 19 nt, Artificial Sequence
  Description of Artificial Sequence: Synthetic oligonucleotide
uucugguaccauaauuugu

SEQ ID NO: 168116 - RNA, 19 nt, Artificial Sequence
  Description of Artificial Sequence: Synthetic oligonucleotide
ugaguggcagggcauaggu

SEQ ID NO: 168117 - RNA, 19 nt, Artificial Sequence
  Description of Artificial Sequence: Synthetic oligonucleotide
aacaccgucccuucuggcu

SEQ ID NO: 168118 - RNA, 19 nt, Artificial Sequence
  Description of Artificial Sequence: Synthetic oligonucleotide
accacauguaggcaggugu

SEQ ID NO: 168119 - RNA, 19 nt, Artificial Sequence
  Description of Artificial Sequence: Synthetic oligonucleotide
gauucggacucuuggcugc

SEQ ID NO: 168120 - RNA, 19 nt, Artificial Sequence
  Description of Artificial Sequence: Synthetic oligonucleotide
uggauucggacucuuggcu

SEQ ID NO: 168121 - RNA, 19 nt, Artificial Sequence
  Description of Artificial Sequence: Synthetic oligonucleotide
uccaguacagccaggcgcu

SEQ ID NO: 168122 - RNA, 19 nt, Artificial Sequence
  Description of Artificial Sequence: Synthetic oligonucleotide
ucagggugucauaagcaug

SEQ ID NO: 168123 - RNA, 19 nt, Artificial Sequence
  Description of Artificial Sequence: Synthetic oligonucleotide
gaauugagagcccagcucu

SEQ ID NO: 168124 - RNA, 19 nt, Artificial Sequence
  Description of Artificial Sequence: Synthetic oligonucleotide
gauggacuacgacccaggg

SEQ ID NO: 168125 - RNA, 19 nt, Artificial Sequence
  Description of Artificial Sequence: Synthetic oligonucleotide
agaggcaacaaagucucuc

SEQ ID NO: 168126 - RNA, 19 nt, Artificial Sequence
  Description of Artificial Sequence: Synthetic oligonucleotide
uguuucauguuuguccaca

SEQ ID NO: 168127 - RNA, 19 nt, Artificial Sequence
  Description of Artificial Sequence: Synthetic oligonucleotide
agcucugcgacaccuuuuc

SEQ ID NO: 168128 - RNA, 19 nt, Artificial Sequence
  Description of Artificial Sequence: Synthetic oligonucleotide
aaauacugcaaaacaccca

SEQ ID NO: 168129 - RNA, 19 nt, Artificial Sequence
  Description of Artificial Sequence: Synthetic oligonucleotide
gguggcuuaguguuaaggc

SEQ ID NO: 168130 - RNA, 19 nt, Artificial Sequence
  Description of Artificial Sequence: Synthetic oligonucleotide
uggacuuggacacccgaac

SEQ ID NO: 168131 - RNA, 19 nt, Artificial Sequence
  Description of Artificial Sequence: Synthetic oligonucleotide
auuaguguguaaccauggu

SEQ ID NO: 168132 - RNA, 19 nt, Artificial Sequence
  Description of Artificial Sequence: Synthetic oligonucleotide
gagcgguaaaccucaguag

SEQ ID NO: 168133 - RNA, 19 nt, Artificial Sequence
  Description of Artificial Sequence: Synthetic oligonucleotide
agcccaacccucaagcacc

SEQ ID NO: 168134 - RNA, 19 nt, Artificial Sequence
  Description of Artificial Sequence: Synthetic oligonucleotide
ugggucuuuaagucaaagu

SEQ ID NO: 168135 - RNA, 19 nt, Artificial Sequence
  Description of Artificial Sequence: Synthetic oligonucleotide
ugagcuacccuccuucuuu

SEQ ID NO: 168136 - RNA, 19 nt, Artificial Sequence
  Description of Artificial Sequence: Synthetic oligonucleotide
ggucuuuaagucaaagucc

SEQ ID NO: 168137 - RNA, 19 nt, Artificial Sequence
  Description of Artificial Sequence: Synthetic oligonucleotide
ugcgcagauggucauagua

SEQ ID NO: 168138 - RNA, 19 nt, Artificial Sequence
  Description of Artificial Sequence: Synthetic oligonucleotide
acuacgacccaggguagcc

SEQ ID NO: 168139 - RNA, 19 nt, Artificial Sequence
  Description of Artificial Sequence: Synthetic oligonucleotide
uugggaaguauagaccuga

SEQ ID NO: 168140 - RNA, 19 nt, Artificial Sequence
  Description of Artificial Sequence: Synthetic oligonucleotide
uggcacguaccuuaacuug

SEQ ID NO: 168141 - RNA, 19 nt, Artificial Sequence
  Description of Artificial Sequence: Synthetic oligonucleotide
uucguagcagccccuggcc

SEQ ID NO: 168142 - RNA, 19 nt, Artificial Sequence
  Description of Artificial Sequence: Synthetic oligonucleotide
uugagccgaucaaagacaa

SEQ ID NO: 168143 - RNA, 19 nt, Artificial Sequence
  Description of Artificial Sequence: Synthetic oligonucleotide
uugagcaaaguaguggaaa

SEQ ID NO: 168144 - RNA, 19 nt, Artificial Sequence
  Description of Artificial Sequence: Synthetic oligonucleotide
gggguacucgacuacaucc

SEQ ID NO: 168145 - RNA, 19 nt, Artificial Sequence
  Description of Artificial Sequence: Synthetic oligonucleotide
ugacuuaaucuugccaccc

SEQ ID NO: 168146 - RNA, 19 nt, Artificial Sequence
  Description of Artificial Sequence: Synthetic oligonucleotide
gacuuggacacccgaacac

SEQ ID NO: 168147 - RNA, 19 nt, Artificial Sequence
  Description of Artificial Sequence: Synthetic oligonucleotide
aggaaagguggcuuagugu

SEQ ID NO: 168148 - RNA, 19 nt, Artificial Sequence
  Description of Artificial Sequence: Synthetic oligonucleotide
gugauggguuuauaacagg

SEQ ID NO: 168149 - RNA, 19 nt, Artificial Sequence
  Description of Artificial Sequence: Synthetic oligonucleotide
cuggauucggacucuuggc

SEQ ID NO: 168150 - RNA, 19 nt, Artificial Sequence
  Description of Artificial Sequence: Synthetic oligonucleotide
gggaaaacuguuucucccg

SEQ ID NO: 168151 - RNA, 19 nt, Artificial Sequence
  Description of Artificial Sequence: Synthetic oligonucleotide
aacguggccgccagguuac

SEQ ID NO: 168152 - RNA, 19 nt, Artificial Sequence
  Description of Artificial Sequence: Synthetic oligonucleotide
cuugaucaaguagccacgg

SEQ ID NO: 168153 - RNA, 19 nt, Artificial Sequence
  Description of Artificial Sequence: Synthetic oligonucleotide
caugagcuuccuuuagcag

SEQ ID NO: 168154 - RNA, 19 nt, Artificial Sequence
  Description of Artificial Sequence: Synthetic oligonucleotide
ugcgacaccuuuuccggcc

SEQ ID NO: 168155 - RNA, 19 nt, Artificial Sequence
  Description of Artificial Sequence: Synthetic oligonucleotide
uaaccauggugaugaagca

SEQ ID NO: 168156 - RNA, 19 nt, Artificial Sequence
  Description of Artificial Sequence: Synthetic oligonucleotide
caugcaaggcaucccacug

SEQ ID NO: 168157 - RNA, 19 nt, Artificial Sequence
  Description of Artificial Sequence: Synthetic oligonucleotide
ucgacuacauccugauccu

SEQ ID NO: 168158 - RNA, 19 nt, Artificial Sequence
  Description of Artificial Sequence: Synthetic oligonucleotide
uucucccgaaguuugacuu

SEQ ID NO: 168159 - RNA, 19 nt, Artificial Sequence
  Description of Artificial Sequence: Synthetic oligonucleotide
cuucguagcagccccuggc

SEQ ID NO: 168160 - RNA, 19 nt, Artificial Sequence
  Description of Artificial Sequence: Synthetic oligonucleotide
uccugucaggacaggagga

SEQ ID NO: 168161 - RNA, 19 nt, Artificial Sequence
  Description of Artificial Sequence: Synthetic oligonucleotide
ucaaguagccacggcagac

SEQ ID NO: 168162 - RNA, 19 nt, Artificial Sequence
  Description of Artificial Sequence: Synthetic oligonucleotide
ucucccuaucacccuuggg

SEQ ID NO: 168163 - RNA, 19 nt, Artificial Sequence
  Description of Artificial Sequence: Synthetic oligonucleotide
agguggcuuaguguuaagg

SEQ ID NO: 168164 - RNA, 19 nt, Artificial Sequence
  Description of Artificial Sequence: Synthetic oligonucleotide
gauagggcuggaccucaag

SEQ ID NO: 168165 - RNA, 19 nt, Artificial Sequence
  Description of Artificial Sequence: Synthetic oligonucleotide
ugcagggcggcauucuugu

SEQ ID NO: 168166 - RNA, 19 nt, Artificial Sequence
  Description of Artificial Sequence: Synthetic oligonucleotide
cucaaggaugacacuugag

SEQ ID NO: 168167 - RNA, 19 nt, Artificial Sequence
  Description of Artificial Sequence: Synthetic oligonucleotide
gugcgugguaguuaguuca

SEQ ID NO: 168168 - RNA, 19 nt, Artificial Sequence
  Description of Artificial Sequence: Synthetic oligonucleotide
guagccacggcagaccuug

SEQ ID NO: 168169 - RNA, 19 nt, Artificial Sequence
  Description of Artificial Sequence: Synthetic oligonucleotide
acaaugacauccauccaga

SEQ ID NO: 168170 - RNA, 19 nt, Artificial Sequence
  Description of Artificial Sequence: Synthetic oligonucleotide
uacucgacuacauccugau

SEQ ID NO: 168171 - RNA, 19 nt, Artificial Sequence
  Description of Artificial Sequence: Synthetic oligonucleotide
ggaggugcgugguaguuag

SEQ ID NO: 168172 - RNA, 19 nt, Artificial Sequence
  Description of Artificial Sequence: Synthetic oligonucleotide
ccugacgacucuauguggg

SEQ ID NO: 168173 - RNA, 19 nt, Artificial Sequence
  Description of Artificial Sequence: Synthetic oligonucleotide
aagggugcugcaccaugca

SEQ ID NO: 168174 - RNA, 19 nt, Artificial Sequence
  Description of Artificial Sequence: Synthetic oligonucleotide
acccugaacuucugggcuc

SEQ ID NO: 168175 - RNA, 19 nt, Artificial Sequence
  Description of Artificial Sequence: Synthetic oligonucleotide
  modified_base (4)..(4): a, c, u, g, unknown or other
uacnguuuugggcccggau

SEQ ID NO: 168176 - RNA, 19 nt, Artificial Sequence
  Description of Artificial Sequence: Synthetic oligonucleotide
  modified_base (6)..(6): a, c, u, g, unknown or other
uguacnguuuugggcccgg

SEQ ID NO: 168177 - RNA, 19 nt, Artificial Sequence
  Description of Artificial Sequence: Synthetic oligonucleotide
agggagagggccacuacgg

SEQ ID NO: 168178 - RNA, 19 nt, Artificial Sequence
  Description of Artificial Sequence: Synthetic oligonucleotide
acacccaggaggggaaccc

SEQ ID NO: 168179 - RNA, 19 nt, Artificial Sequence
  Description of Artificial Sequence: Synthetic oligonucleotide
aaggacaagccgagcagug

SEQ ID NO: 168180 - RNA, 19 nt, Artificial Sequence
  Description of Artificial Sequence: Synthetic oligonucleotide
gacacccgaacaccguccc

SEQ ID NO: 168181 - RNA, 19 nt, Artificial Sequence
  Description of Artificial Sequence: Synthetic oligonucleotide
uuggucacgcugcgcacgc

SEQ ID NO: 168182 - RNA, 19 nt, Artificial Sequence
  Description of Artificial Sequence: Synthetic oligonucleotide
cauuauuguucugcugaag

SEQ ID NO: 168183 - RNA, 19 nt, Artificial Sequence
  Description of Artificial Sequence: Synthetic oligonucleotide
ggacaagccgagcagugag

SEQ ID NO: 168184 - RNA, 19 nt, Artificial Sequence
  Description of Artificial Sequence: Synthetic oligonucleotide
ggcacguaccuuaacuugg

SEQ ID NO: 168185 - RNA, 19 nt, Artificial Sequence
  Description of Artificial Sequence: Synthetic oligonucleotide
agccacgcugagcugugac

SEQ ID NO: 168186 - RNA, 19 nt, Artificial Sequence
  Description of Artificial Sequence: Synthetic oligonucleotide
ucaaucaccuggugucccu

SEQ ID NO: 168187 - RNA, 19 nt, Artificial Sequence
  Description of Artificial Sequence: Synthetic oligonucleotide
uggccgccagguuacgagg

SEQ ID NO: 168188 - RNA, 19 nt, Artificial Sequence
  Description of Artificial Sequence: Synthetic oligonucleotide
uucuugcacaaaagcccug

SEQ ID NO: 168189 - RNA, 19 nt, Artificial Sequence
  Description of Artificial Sequence: Synthetic oligonucleotide
aucaaguagccacggcaga

SEQ ID NO: 168190 - RNA, 19 nt, Artificial Sequence
  Description of Artificial Sequence: Synthetic oligonucleotide
gacuuaaucuugccaccca

SEQ ID NO: 168191 - RNA, 19 nt, Artificial Sequence
  Description of Artificial Sequence: Synthetic oligonucleotide
caacccucaagcaccuaac

SEQ ID NO: 168192 - RNA, 19 nt, Artificial Sequence
  Description of Artificial Sequence: Synthetic oligonucleotide
caaguagccacggcagacc

SEQ ID NO: 168193 - RNA, 19 nt, Artificial Sequence
  Description of Artificial Sequence: Synthetic oligonucleotide
auggacuacgacccagggu

SEQ ID NO: 168194 - RNA, 19 nt, Artificial Sequence
  Description of Artificial Sequence: Synthetic oligonucleotide
gacccgauccuccacucuc

SEQ ID NO: 168195 - RNA, 19 nt, Artificial Sequence
  Description of Artificial Sequence: Synthetic oligonucleotide
guuacgaggaaggcugcug

SEQ ID NO: 168196 - RNA, 19 nt, Artificial Sequence
  Description of Artificial Sequence: Synthetic oligonucleotide
ucgugccugggaaaacugu

SEQ ID NO: 168197 - RNA, 19 nt, Artificial Sequence
  Description of Artificial Sequence: Synthetic oligonucleotide
gcuagcagggcacucuuug

SEQ ID NO: 168198 - RNA, 19 nt, Artificial Sequence
  Description of Artificial Sequence: Synthetic oligonucleotide
acucgacuacauccugauc

SEQ ID NO: 168199 - RNA, 19 nt, Artificial Sequence
  Description of Artificial Sequence: Synthetic oligonucleotide
guggccgccagguuacgag

SEQ ID NO: 168200 - RNA, 19 nt, Artificial Sequence
  Description of Artificial Sequence: Synthetic oligonucleotide
ggagcgguaaaccucagua

SEQ ID NO: 168201 - RNA, 19 nt, Artificial Sequence
  Description of Artificial Sequence: Synthetic oligonucleotide
uaaucuugccacccaucuu

SEQ ID NO: 168202 - RNA, 19 nt, Artificial Sequence
  Description of Artificial Sequence: Synthetic oligonucleotide
cauguaguacagccgguca

SEQ ID NO: 168203 - RNA, 19 nt, Artificial Sequence
  Description of Artificial Sequence: Synthetic oligonucleotide
ggauucggacucuuggcug

SEQ ID NO: 168204 - RNA, 19 nt, Artificial Sequence
  Description of Artificial Sequence: Synthetic oligonucleotide
uacgacccaggguagccac

SEQ ID NO: 168205 - RNA, 19 nt, Artificial Sequence
  Description of Artificial Sequence: Synthetic oligonucleotide
agcggguugggaaguauag

SEQ ID NO: 168206 - RNA, 19 nt, Artificial Sequence
  Description of Artificial Sequence: Synthetic oligonucleotide
ugcgcuugagccgaucaaa

SEQ ID NO: 168207 - RNA, 19 nt, Artificial Sequence
  Description of Artificial Sequence: Synthetic oligonucleotide
gauggucauaguacacuuc

SEQ ID NO: 168208 - RNA, 19 nt, Artificial Sequence
  Description of Artificial Sequence: Synthetic oligonucleotide
  modified_base (13)..(13): a, c, u, g, unknown or other
ugacuccuguacnguuuug

SEQ ID NO: 168209 - RNA, 19 nt, Artificial Sequence
  Description of Artificial Sequence: Synthetic oligonucleotide
gagaggucgugccugggaa

SEQ ID NO: 168210 - RNA, 19 nt, Artificial Sequence
  Description of Artificial Sequence: Synthetic oligonucleotide
ucugcagacggggccacca

SEQ ID NO: 168211 - RNA, 19 nt, Artificial Sequence
  Description of Artificial Sequence: Synthetic oligonucleotide
gggaaguauagaccugagc

SEQ ID NO: 168212 - RNA, 19 nt, Artificial Sequence
  Description of Artificial Sequence: Synthetic oligonucleotide
ggcaauuaguguguaacca

SEQ ID NO: 168213 - RNA, 19 nt, Artificial Sequence
  Description of Artificial Sequence: Synthetic oligonucleotide
ggagagggccacuacgggc

SEQ ID NO: 168214 - RNA, 19 nt, Artificial Sequence
  Description of Artificial Sequence: Synthetic oligonucleotide
caccuggugucccuucugc

SEQ ID NO: 168215 - RNA, 19 nt, Artificial Sequence
  Description of Artificial Sequence: Synthetic oligonucleotide
ucggacucuuggcugcacu

SEQ ID NO: 168216 - RNA, 19 nt, Artificial Sequence
  Description of Artificial Sequence: Synthetic oligonucleotide
uauugggauccaguccugu

SEQ ID NO: 168217 - RNA, 19 nt, Artificial Sequence
  Description of Artificial Sequence: Synthetic oligonucleotide
uccggccugcuacacccag

SEQ ID NO: 168218 - RNA, 19 nt, Artificial Sequence
  Description of Artificial Sequence: Synthetic oligonucleotide
ggaaagguggcuuaguguu

SEQ ID NO: 168219 - RNA, 19 nt, Artificial Sequence
  Description of Artificial Sequence: Synthetic oligonucleotide
ugcgugguaguuaguucau

SEQ ID NO: 168220 - RNA, 19 nt, Artificial Sequence
  Description of Artificial Sequence: Synthetic oligonucleotide
gugggucuuuaagucaaag

SEQ ID NO: 168221 - RNA, 19 nt, Artificial Sequence
  Description of Artificial Sequence: Synthetic oligonucleotide
gacgacucuaugugggucu

SEQ ID NO: 168222 - RNA, 19 nt, Artificial Sequence
  Description of Artificial Sequence: Synthetic oligonucleotide
cacguaccuuaacuuggcc

SEQ ID NO: 168223 - RNA, 19 nt, Artificial Sequence
  Description of Artificial Sequence: Synthetic oligonucleotide
ccuugagcaaaguagugga

SEQ ID NO: 168224 - RNA, 19 nt, Artificial Sequence
  Description of Artificial Sequence: Synthetic oligonucleotide
  modified_base (7)..(7): a, c, u, g, unknown or other
cuguacnguuuugggcccg

SEQ ID NO: 168225 - RNA, 19 nt, Artificial Sequence
  Description of Artificial Sequence: Synthetic oligonucleotide
ugauggcacguaccuuaac

SEQ ID NO: 168226 - RNA, 19 nt, Artificial Sequence
  Description of Artificial Sequence: Synthetic oligonucleotide
ugacgacucuauguggguc

SEQ ID NO: 168227 - RNA, 19 nt, Artificial Sequence
  Description of Artificial Sequence: Synthetic oligonucleotide
uaucacccuugggaaacug

SEQ ID NO: 168228 - RNA, 19 nt, Artificial Sequence
  Description of Artificial Sequence: Synthetic oligonucleotide
agguuacgaggaaggcugc

SEQ ID NO: 168229 - RNA, 19 nt, Artificial Sequence
  Description of Artificial Sequence: Synthetic oligonucleotide
gccacuacgggcccggggc

SEQ ID NO: 168230 - RNA, 19 nt, Artificial Sequence
  Description of Artificial Sequence: Synthetic oligonucleotide
cauagguccuggugcugac

SEQ ID NO: 168231 - RNA, 19 nt, Artificial Sequence
  Description of Artificial Sequence: Synthetic oligonucleotide
caccccauggccugacgac

SEQ ID NO: 168232 - RNA, 19 nt, Artificial Sequence
  Description of Artificial Sequence: Synthetic oligonucleotide
cucucccuaucacccuugg

SEQ ID NO: 168233 - RNA, 19 nt, Artificial Sequence
  Description of Artificial Sequence: Synthetic oligonucleotide
ggggcuagcaggugccagg

SEQ ID NO: 168234 - RNA, 19 nt, Artificial Sequence
  Description of Artificial Sequence: Synthetic oligonucleotide
guuaaggcgcaaaggcuga

SEQ ID NO: 168235 - RNA, 19 nt, Artificial Sequence
  Description of Artificial Sequence: Synthetic oligonucleotide
guauagaccugagcuguuc

SEQ ID NO: 168236 - RNA, 19 nt, Artificial Sequence
  Description of Artificial Sequence: Synthetic oligonucleotide
gguuggagagaugauggca

SEQ ID NO: 168237 - RNA, 19 nt, Artificial Sequence
  Description of Artificial Sequence: Synthetic oligonucleotide
uacagccggucaugggucu

SEQ ID NO: 168238 - RNA, 19 nt, Artificial Sequence
  Description of Artificial Sequence: Synthetic oligonucleotide
cuugagcaaaguaguggaa

SEQ ID NO: 168239 - RNA, 19 nt, Artificial Sequence
  Description of Artificial Sequence: Synthetic oligonucleotide
aggggaacccugaacuucu

SEQ ID NO: 168240 - RNA, 19 nt, Artificial Sequence
  Description of Artificial Sequence: Synthetic oligonucleotide
ccaaggacaagccgagcag

SEQ ID NO: 168241 - RNA, 19 nt, Artificial Sequence
  Description of Artificial Sequence: Synthetic oligonucleotide
  modified_base (2)..(2): a, c, u, g, unknown or other
cnguuuugggcccggaucu

SEQ ID NO: 168242 - RNA, 19 nt, Artificial Sequence
  Description of Artificial Sequence: Synthetic oligonucleotide
uuagggacccaagcccaac

SEQ ID NO: 168243 - RNA, 19 nt, Artificial Sequence
  Description of Artificial Sequence: Synthetic oligonucleotide
gagacccgauccuccacuc

SEQ ID NO: 168244 - RNA, 19 nt, Artificial Sequence
  Description of Artificial Sequence: Synthetic oligonucleotide
cugcgacaccuuuuccggc

SEQ ID NO: 168245 - RNA, 19 nt, Artificial Sequence
  Description of Artificial Sequence: Synthetic oligonucleotide
gacucuaugugggucuuua

SEQ ID NO: 168246 - RNA, 19 nt, Artificial Sequence
  Description of Artificial Sequence: Synthetic oligonucleotide
gccugacgacucuaugugg

SEQ ID NO: 168247 - RNA, 19 nt, Artificial Sequence
  Description of Artificial Sequence: Synthetic oligonucleotide
ugagccgaucaaagacaaa

SEQ ID NO: 168248 - RNA, 19 nt, Artificial Sequence
  Description of Artificial Sequence: Synthetic oligonucleotide
guccuugagcaaaguagug

SEQ ID NO: 168249 - RNA, 19 nt, Artificial Sequence
  Description of Artificial Sequence: Synthetic oligonucleotide
gggagagggccacuacggg

SEQ ID NO: 168250 - RNA, 19 nt, Artificial Sequence
  Description of Artificial Sequence: Synthetic oligonucleotide
caccgucccuucuggcucg

SEQ ID NO: 168251 - RNA, 19 nt, Artificial Sequence
  Description of Artificial Sequence: Synthetic oligonucleotide
ccuaucacccuugggaaac

SEQ ID NO: 168252 - RNA, 19 nt, Artificial Sequence
  Description of Artificial Sequence: Synthetic oligonucleotide
acucuaugugggucuuuaa

SEQ ID NO: 168253 - RNA, 19 nt, Artificial Sequence
  Description of Artificial Sequence: Synthetic oligonucleotide
augagccggcucuucucug

SEQ ID NO: 168254 - RNA, 19 nt, Artificial Sequence
  Description of Artificial Sequence: Synthetic oligonucleotide
cguaccuuaacuuggccca

SEQ ID NO: 168255 - RNA, 19 nt, Artificial Sequence
  Description of Artificial Sequence: Synthetic oligonucleotide
uccgggcgcucucacucug

SEQ ID NO: 168256 - RNA, 19 nt, Artificial Sequence
  Description of Artificial Sequence: Synthetic oligonucleotide
gguaccauaauuuguccuu

SEQ ID NO: 168257 - RNA, 19 nt, Artificial Sequence
  Description of Artificial Sequence: Synthetic oligonucleotide
uuguggcccagugcccagg

SEQ ID NO: 168258 - RNA, 19 nt, Artificial Sequence
  Description of Artificial Sequence: Synthetic oligonucleotide
agaggucgugccugggaaa

SEQ ID NO: 168259 - RNA, 19 nt, Artificial Sequence
  Description of Artificial Sequence: Synthetic oligonucleotide
ccacggcagaccuugcugc

SEQ ID NO: 168260 - RNA, 19 nt, Artificial Sequence
  Description of Artificial Sequence: Synthetic oligonucleotide
cucaagcaccuaacucuuc

SEQ ID NO: 168261 - RNA, 19 nt, Artificial Sequence
  Description of Artificial Sequence: Synthetic oligonucleotide
  modified_base (8)..(8): a, c, u, g, unknown or other
ccuguacnguuuugggccc

SEQ ID NO: 168262 - RNA, 19 nt, Artificial Sequence
  Description of Artificial Sequence: Synthetic oligonucleotide
gacggggccaccauguagu

SEQ ID NO: 168263 - RNA, 19 nt, Artificial Sequence
  Description of Artificial Sequence: Synthetic oligonucleotide
cuuggcugcacugcgcaga

SEQ ID NO: 168264 - RNA, 19 nt, Artificial Sequence
  Description of Artificial Sequence: Synthetic oligonucleotide
aggugcgugguaguuaguu

SEQ ID NO: 168265 - RNA, 19 nt, Artificial Sequence
  Description of Artificial Sequence: Synthetic oligonucleotide
cauaagcaugcucgcccuc

SEQ ID NO: 168266 - RNA, 19 nt, Artificial Sequence
  Description of Artificial Sequence: Synthetic oligonucleotide
aguagcugcagggcggcau

SEQ ID NO: 168267 - RNA, 19 nt, Artificial Sequence
  Description of Artificial Sequence: Synthetic oligonucleotide
caagcuggggcuagcaggu

SEQ ID NO: 168268 - RNA, 19 nt, Artificial Sequence
  Description of Artificial Sequence: Synthetic oligonucleotide
ucccgugcuggggagggca

SEQ ID NO: 168269 - RNA, 19 nt, Artificial Sequence
  Description of Artificial Sequence: Synthetic oligonucleotide
gcgugugagaggucgugcc

SEQ ID NO: 168270 - RNA, 19 nt, Artificial Sequence
  Description of Artificial Sequence: Synthetic oligonucleotide
gcaccuaacucuucauaga

SEQ ID NO: 168271 - RNA, 19 nt, Artificial Sequence
  Description of Artificial Sequence: Synthetic oligonucleotide
cagaauugagagcccagcu

SEQ ID NO: 168272 - RNA, 19 nt, Artificial Sequence
  Description of Artificial Sequence: Synthetic oligonucleotide
ggguaagaugagaagggga

SEQ ID NO: 168273 - RNA, 19 nt, Artificial Sequence
  Description of Artificial Sequence: Synthetic oligonucleotide
guacagccggucauggguc

SEQ ID NO: 168274 - RNA, 19 nt, Artificial Sequence
  Description of Artificial Sequence: Synthetic oligonucleotide
uugcuucguagcagccccu

SEQ ID NO: 168275 - RNA, 19 nt, Artificial Sequence
  Description of Artificial Sequence: Synthetic oligonucleotide
gaggucgugccugggaaaa

SEQ ID NO: 168276 - RNA, 19 nt, Artificial Sequence
  Description of Artificial Sequence: Synthetic oligonucleotide
gaacugaguguagcccuca

SEQ ID NO: 168277 - RNA, 19 nt, Artificial Sequence
  Description of Artificial Sequence: Synthetic oligonucleotide
gcgcagauggucauaguac

SEQ ID NO: 168278 - RNA, 19 nt, Artificial Sequence
  Description of Artificial Sequence: Synthetic oligonucleotide
agccacggcagaccuugcu

SEQ ID NO: 168279 - RNA, 19 nt, Artificial Sequence
  Description of Artificial Sequence: Synthetic oligonucleotide
gucgugccugggaaaacug

SEQ ID NO: 168280 - RNA, 19 nt, Artificial Sequence
  Description of Artificial Sequence: Synthetic oligonucleotide
uuaaggcgcaaaggcugaa

SEQ ID NO: 168281 - RNA, 19 nt, Artificial Sequence
  Description of Artificial Sequence: Synthetic oligonucleotide
gaaagguggcuuaguguua

SEQ ID NO: 168282 - RNA, 19 nt, Artificial Sequence
  Description of Artificial Sequence: Synthetic oligonucleotide
aggucgugccugggaaaac

SEQ ID NO: 168283 - RNA, 19 nt, Artificial Sequence
  Description of Artificial Sequence: Synthetic oligonucleotide
guguuaaggcgcaaaggcu

SEQ ID NO: 168284 - RNA, 19 nt, Artificial Sequence
  Description of Artificial Sequence: Synthetic oligonucleotide
cauaguacacuuccucgau

SEQ ID NO: 168285 - RNA, 19 nt, Artificial Sequence
  Description of Artificial Sequence: Synthetic oligonucleotide
gcaauuaguguguaaccau

SEQ ID NO: 168286 - RNA, 19 nt, Artificial Sequence
  Description of Artificial Sequence: Synthetic oligonucleotide
ccguaguuccaucucccgc

SEQ ID NO: 168287 - RNA, 19 nt, Artificial Sequence
  Description of Artificial Sequence: Synthetic oligonucleotide
gcuucguagcagccccugg

SEQ ID NO: 168288 - RNA, 19 nt, Artificial Sequence
  Description of Artificial Sequence: Synthetic oligonucleotide
caacguggccgccagguua

SEQ ID NO: 168289 - RNA, 19 nt, Artificial Sequence
  Description of Artificial Sequence: Synthetic oligonucleotide
ggugcgcuugagccgauca

SEQ ID NO: 168290 - RNA, 19 nt, Artificial Sequence
  Description of Artificial Sequence: Synthetic oligonucleotide
cccucaagcaccuaacucu

SEQ ID NO: 168291 - RNA, 19 nt, Artificial Sequence
  Description of Artificial Sequence: Synthetic oligonucleotide
cgccagguuacgaggaagg

SEQ ID NO: 168292 - RNA, 19 nt, Artificial Sequence
  Description of Artificial Sequence: Synthetic oligonucleotide
gcaaaacacccagccaggc

SEQ ID NO: 168293 - RNA, 19 nt, Artificial Sequence
  Description of Artificial Sequence: Synthetic oligonucleotide
gacccaagcccaacccuca

SEQ ID NO: 168294 - RNA, 19 nt, Artificial Sequence
  Description of Artificial Sequence: Synthetic oligonucleotide
guaccuuaacuuggcccac

SEQ ID NO: 168295 - RNA, 19 nt, Artificial Sequence
  Description of Artificial Sequence: Synthetic oligonucleotide
ggucacgcugcgcacgcac

SEQ ID NO: 168296 - RNA, 19 nt, Artificial Sequence
  Description of Artificial Sequence: Synthetic oligonucleotide
cgaacaccgucccuucugg

SEQ ID NO: 168297 - RNA, 19 nt, Artificial Sequence
  Description of Artificial Sequence: Synthetic oligonucleotide
gggugucauaagcaugcuc

SEQ ID NO: 168298 - RNA, 19 nt, Artificial Sequence
  Description of Artificial Sequence: Synthetic oligonucleotide
  modified_base (18)..(18): a, c, u, g, unknown or other
cgcucugacuccuguacng

SEQ ID NO: 168299 - RNA, 19 nt, Artificial Sequence
  Description of Artificial Sequence: Synthetic oligonucleotide
auagcgugugagaggucgu

SEQ ID NO: 168300 - RNA, 19 nt, Artificial Sequence
  Description of Artificial Sequence: Synthetic oligonucleotide
uuccggccugcuacaccca

SEQ ID NO: 168301 - RNA, 19 nt, Artificial Sequence
  Description of Artificial Sequence: Synthetic oligonucleotide
acacccgaacaccgucccu

SEQ ID NO: 168302 - RNA, 19 nt, Artificial Sequence
  Description of Artificial Sequence: Synthetic oligonucleotide
gaugacacuugaggucucu

SEQ ID NO: 168303 - RNA, 19 nt, Artificial Sequence
  Description of Artificial Sequence: Synthetic oligonucleotide
gcgcuugagccgaucaaag

SEQ ID NO: 168304 - RNA, 19 nt, Artificial Sequence
  Description of Artificial Sequence: Synthetic oligonucleotide
ggucccgugcuggggaggg

SEQ ID NO: 168305 - RNA, 19 nt, Artificial Sequence
  Description of Artificial Sequence: Synthetic oligonucleotide
ggacacccgaacaccgucc

SEQ ID NO: 168306 - RNA, 19 nt, Artificial Sequence
  Description of Artificial Sequence: Synthetic oligonucleotide
gcacguaccuuaacuuggc

SEQ ID NO: 168307 - RNA, 19 nt, Artificial Sequence
  Description of Artificial Sequence: Synthetic oligonucleotide
gcgcaaaggcugaagccag

SEQ ID NO: 168308 - RNA, 19 nt, Artificial Sequence
  Description of Artificial Sequence: Synthetic oligonucleotide
  modified_base (14)..(14): a, c, u, g, unknown or other
cugacuccuguacnguuuu

SEQ ID NO: 168309 - RNA, 19 nt, Artificial Sequence
  Description of Artificial Sequence: Synthetic oligonucleotide
agauagcgugugagagguc

SEQ ID NO: 168310 - RNA, 19 nt, Artificial Sequence
  Description of Artificial Sequence: Synthetic oligonucleotide
uggcagauucugguaccau

SEQ ID NO: 168311 - RNA, 19 nt, Artificial Sequence
  Description of Artificial Sequence: Synthetic oligonucleotide
uggugccauucugggcuag

SEQ ID NO: 168312 - RNA, 19 nt, Artificial Sequence
  Description of Artificial Sequence: Synthetic oligonucleotide
guugucaggggaacaugcu

SEQ ID NO: 168313 - RNA, 19 nt, Artificial Sequence
  Description of Artificial Sequence: Synthetic oligonucleotide
ccugcaacguggccgccag

SEQ ID NO: 168314 - RNA, 19 nt, Artificial Sequence
  Description of Artificial Sequence: Synthetic oligonucleotide
agggugucauaagcaugcu

SEQ ID NO: 168315 - RNA, 19 nt, Artificial Sequence
  Description of Artificial Sequence: Synthetic oligonucleotide
ccgagcagugaguggcagg

SEQ ID NO: 168316 - RNA, 19 nt, Artificial Sequence
  Description of Artificial Sequence: Synthetic oligonucleotide
aggaggugcgugguaguua

SEQ ID NO: 168317 - RNA, 19 nt, Artificial Sequence
  Description of Artificial Sequence: Synthetic oligonucleotide
cugccuccguaguuccauc

SEQ ID NO: 168318 - RNA, 19 nt, Artificial Sequence
  Description of Artificial Sequence: Synthetic oligonucleotide
  modified_base (16)..(16): a, c, u, g, unknown or other
cucugacuccuguacnguu

SEQ ID NO: 168319 - RNA, 19 nt, Artificial Sequence
  Description of Artificial Sequence: Synthetic oligonucleotide
uucggacucuuggcugcac

SEQ ID NO: 168320 - RNA, 19 nt, Artificial Sequence
  Description of Artificial Sequence: Synthetic oligonucleotide
caaggacaagccgagcagu

SEQ ID NO: 168321 - RNA, 19 nt, Artificial Sequence
  Description of Artificial Sequence: Synthetic oligonucleotide
gccagguuacgaggaaggc

SEQ ID NO: 168322 - RNA, 19 nt, Artificial Sequence
  Description of Artificial Sequence: Synthetic oligonucleotide
gagcggguugggaaguaua

SEQ ID NO: 168323 - RNA, 19 nt, Artificial Sequence
  Description of Artificial Sequence: Synthetic oligonucleotide
gugcgcuugagccgaucaa

SEQ ID NO: 168324 - RNA, 19 nt, Artificial Sequence
  Description of Artificial Sequence: Synthetic oligonucleotide
ccaacccucaagcaccuaa

SEQ ID NO: 168325 - RNA, 19 nt, Artificial Sequence
  Description of Artificial Sequence: Synthetic oligonucleotide
cugacgacucuaugugggu

SEQ ID NO: 168326 - RNA, 19 nt, Artificial Sequence
  Description of Artificial Sequence: Synthetic oligonucleotide
cacuacgggcccggggcag

SEQ ID NO: 168327 - RNA, 19 nt, Artificial Sequence
  Description of Artificial Sequence: Synthetic oligonucleotide
gacaagccgagcagugagu

SEQ ID NO: 168328 - RNA, 19 nt, Artificial Sequence
  Description of Artificial Sequence: Synthetic oligonucleotide
ugccgucuccaaggacaag

SEQ ID NO: 168329 - RNA, 19 nt, Artificial Sequence
  Description of Artificial Sequence: Synthetic oligonucleotide
ggacuacgacccaggguag

SEQ ID NO: 168330 - RNA, 19 nt, Artificial Sequence
  Description of Artificial Sequence: Synthetic oligonucleotide
caaagagcuuugucucagu

SEQ ID NO: 168331 - RNA, 19 nt, Artificial Sequence
  Description of Artificial Sequence: Synthetic oligonucleotide
agggcuggauucggacucu

SEQ ID NO: 168332 - RNA, 19 nt, Artificial Sequence
  Description of Artificial Sequence: Synthetic oligonucleotide
uacgggcccggggcagagg

SEQ ID NO: 168333 - RNA, 19 nt, Artificial Sequence
  Description of Artificial Sequence: Synthetic oligonucleotide
cuacgacccaggguagcca

SEQ ID NO: 168334 - RNA, 19 nt, Artificial Sequence
  Description of Artificial Sequence: Synthetic oligonucleotide
cugcaacguggccgccagg

SEQ ID NO: 168335 - RNA, 19 nt, Artificial Sequence
  Description of Artificial Sequence: Synthetic oligonucleotide
ggagacccgauccuccacu

SEQ ID NO: 168336 - RNA, 19 nt, Artificial Sequence
  Description of Artificial Sequence: Synthetic oligonucleotide
gugcugcaccaugcaaggc

SEQ ID NO: 168337 - RNA, 19 nt, Artificial Sequence
  Description of Artificial Sequence: Synthetic oligonucleotide
caaugacauccauccagau

SEQ ID NO: 168338 - RNA, 19 nt, Artificial Sequence
  Description of Artificial Sequence: Synthetic oligonucleotide
acuacgggcccggggcaga

SEQ ID NO: 168339 - RNA, 19 nt, Artificial Sequence
  Description of Artificial Sequence: Synthetic oligonucleotide
ccuccacgcgacucucccg

SEQ ID NO: 168340 - RNA, 19 nt, Artificial Sequence
  Description of Artificial Sequence: Synthetic oligonucleotide
ggcagaccuugcugcuaag

SEQ ID NO: 168341 - RNA, 19 nt, Artificial Sequence
  Description of Artificial Sequence: Synthetic oligonucleotide
ggugccauucugggcuagc

SEQ ID NO: 168342 - RNA, 19 nt, Artificial Sequence
  Description of Artificial Sequence: Synthetic oligonucleotide
cugcgcacgcacgcucagc

SEQ ID NO: 168343 - RNA, 19 nt, Artificial Sequence
  Description of Artificial Sequence: Synthetic oligonucleotide
gccuccguaguuccaucuc

SEQ ID NO: 168344 - RNA, 19 nt, Artificial Sequence
  Description of Artificial Sequence: Synthetic oligonucleotide
acgacucuaugugggucuu

SEQ ID NO: 168345 - RNA, 19 nt, Artificial Sequence
  Description of Artificial Sequence: Synthetic oligonucleotide
gucucagucuccagagcgu

SEQ ID NO: 168346 - RNA, 19 nt, Artificial Sequence
  Description of Artificial Sequence: Synthetic oligonucleotide
cacgcacgcucagccuugc

SEQ ID NO: 168347 - RNA, 19 nt, Artificial Sequence
  Description of Artificial Sequence: Synthetic oligonucleotide
agccggucaugggucuuca

SEQ ID NO: 168348 - RNA, 19 nt, Artificial Sequence
  Description of Artificial Sequence: Synthetic oligonucleotide
  modified_base (5)..(5): a, c, u, g, unknown or other
guacnguuuugggcccgga

SEQ ID NO: 168349 - RNA, 19 nt, Artificial Sequence
  Description of Artificial Sequence: Synthetic oligonucleotide
cauggccugacgacucuau

SEQ ID NO: 168350 - RNA, 19 nt, Artificial Sequence
  Description of Artificial Sequence: Synthetic oligonucleotide
gcugcgcacgcacgcucag

SEQ ID NO: 168351 - RNA, 19 nt, Artificial Sequence
  Description of Artificial Sequence: Synthetic oligonucleotide
uagccacgcugagcuguga

SEQ ID NO: 168352 - RNA, 19 nt, Artificial Sequence
  Description of Artificial Sequence: Synthetic oligonucleotide
agccgagcagugaguggca

SEQ ID NO: 168353 - RNA, 19 nt, Artificial Sequence
  Description of Artificial Sequence: Synthetic oligonucleotide
uggucacgcugcgcacgca

SEQ ID NO: 168354 - RNA, 19 nt, Artificial Sequence
  Description of Artificial Sequence: Synthetic oligonucleotide
ccuuuuccggccugcuaca

SEQ ID NO: 168355 - RNA, 19 nt, Artificial Sequence
  Description of Artificial Sequence: Synthetic oligonucleotide
acgcacgcucagccuugcu

SEQ ID NO: 168356 - RNA, 19 nt, Artificial Sequence
  Description of Artificial Sequence: Synthetic oligonucleotide
gcgcucucacucugcaguc

SEQ ID NO: 168357 - RNA, 19 nt, Artificial Sequence
  Description of Artificial Sequence: Synthetic oligonucleotide
ggucgugccugggaaaacu

SEQ ID NO: 168358 - RNA, 19 nt, Artificial Sequence
  Description of Artificial Sequence: Synthetic oligonucleotide
gcgguaaaccucaguagcu

SEQ ID NO: 168359 - RNA, 19 nt, Artificial Sequence
  Description of Artificial Sequence: Synthetic oligonucleotide
acggcagaccuugcugcua

SEQ ID NO: 168360 - RNA, 19 nt, Artificial Sequence
  Description of Artificial Sequence: Synthetic oligonucleotide
aguagccacggcagaccuu

SEQ ID NO: 168361 - RNA, 19 nt, Artificial Sequence
  Description of Artificial Sequence: Synthetic oligonucleotide
gcggguugggaaguauaga

SEQ ID NO: 168362 - RNA, 19 nt, Artificial Sequence
  Description of Artificial Sequence: Synthetic oligonucleotide
cacggcagaccuugcugcu

SEQ ID NO: 168363 - RNA, 19 nt, Artificial Sequence
  Description of Artificial Sequence: Synthetic oligonucleotide
ccgccagguuacgaggaag

SEQ ID NO: 168364 - RNA, 19 nt, Artificial Sequence
  Description of Artificial Sequence: Synthetic oligonucleotide
gcagacggggccaccaugu

SEQ ID NO: 168365 - RNA, 19 nt, Artificial Sequence
  Description of Artificial Sequence: Synthetic oligonucleotide
gcacgcacgcucagccuug

SEQ ID NO: 168366 - RNA, 19 nt, Artificial Sequence
  Description of Artificial Sequence: Synthetic oligonucleotide
cgcuugagccgaucaaaga

SEQ ID NO: 168367 - RNA, 19 nt, Artificial Sequence
  Description of Artificial Sequence: Synthetic oligonucleotide
ccagguuacgaggaaggcu

SEQ ID NO: 168368 - RNA, 19 nt, Artificial Sequence
  Description of Artificial Sequence: Synthetic oligonucleotide
cuaucacccuugggaaacu

SEQ ID NO: 168369 - RNA, 19 nt, Artificial Sequence
  Description of Artificial Sequence: Synthetic oligonucleotide
gcuacccuccuucuuuauu

SEQ ID NO: 168370 - RNA, 19 nt, Artificial Sequence
  Description of Artificial Sequence: Synthetic oligonucleotide
cccuaucacccuugggaaa

SEQ ID NO: 168371 - RNA, 19 nt, Artificial Sequence
  Description of Artificial Sequence: Synthetic oligonucleotide
ggccgccagguuacgagga

SEQ ID NO: 168372 - RNA, 19 nt, Artificial Sequence
  Description of Artificial Sequence: Synthetic oligonucleotide
cacccgaacaccgucccuu

SEQ ID NO: 168373 - RNA, 19 nt, Artificial Sequence
  Description of Artificial Sequence: Synthetic oligonucleotide
ggaccucaaggaugacacu

SEQ ID NO: 168374 - RNA, 19 nt, Artificial Sequence
  Description of Artificial Sequence: Synthetic oligonucleotide
cugagcuacccuccuucuu

SEQ ID NO: 168375 - RNA, 19 nt, Artificial Sequence
  Description of Artificial Sequence: Synthetic oligonucleotide
ccgggcgcucucacucugc

SEQ ID NO: 168376 - RNA, 19 nt, Artificial Sequence
  Description of Artificial Sequence: Synthetic oligonucleotide
gguuacgaggaaggcugcu

SEQ ID NO: 168377 - RNA, 19 nt, Artificial Sequence
  Description of Artificial Sequence: Synthetic oligonucleotide
ccgggccagacgcucugac

SEQ ID NO: 168378 - RNA, 19 nt, Artificial Sequence
  Description of Artificial Sequence: Synthetic oligonucleotide
gucccgugcuggggagggc

SEQ ID NO: 168379 - RNA, 19 nt, Artificial Sequence
  Description of Artificial Sequence: Synthetic oligonucleotide
gccggucaugggucuucac

SEQ ID NO: 168380 - RNA, 19 nt, Artificial Sequence
  Description of Artificial Sequence: Synthetic oligonucleotide
cugccuccgggcgcucuca

SEQ ID NO: 168381 - RNA, 19 nt, Artificial Sequence
  Description of Artificial Sequence: Synthetic oligonucleotide
gcuuaguguuaaggcgcaa

SEQ ID NO: 168382 - RNA, 19 nt, Artificial Sequence
  Description of Artificial Sequence: Synthetic oligonucleotide
ggauagggcuggaccucaa

SEQ ID NO: 168383 - RNA, 19 nt, Artificial Sequence
  Description of Artificial Sequence: Synthetic oligonucleotide
caggaggugcgugguaguu

SEQ ID NO: 168384 - RNA, 19 nt, Artificial Sequence
  Description of Artificial Sequence: Synthetic oligonucleotide
ccacuacgggcccggggca

SEQ ID NO: 168385 - RNA, 19 nt, Artificial Sequence
  Description of Artificial Sequence: Synthetic oligonucleotide
ggcgcuccuuccucuuggu

SEQ ID NO: 168386 - RNA, 19 nt, Artificial Sequence
  Description of Artificial Sequence: Synthetic oligonucleotide
cacgcugcgcacgcacgcu

SEQ ID NO: 168387 - RNA, 19 nt, Artificial Sequence
  Description of Artificial Sequence: Synthetic oligonucleotide
cugcagacggggccaccau

SEQ ID NO: 168388 - RNA, 19 nt, Artificial Sequence
  Description of Artificial Sequence: Synthetic oligonucleotide
cgugccugggaaaacuguu

SEQ ID NO: 168389 - RNA, 19 nt, Artificial Sequence
  Description of Artificial Sequence: Synthetic oligonucleotide
ccgguugggcagauagcgu

SEQ ID NO: 168390 - RNA, 19 nt, Artificial Sequence
  Description of Artificial Sequence: Synthetic oligonucleotide
cgcugcgcacgcacgcuca

SEQ ID NO: 168391 - RNA, 19 nt, Artificial Sequence
  Description of Artificial Sequence: Synthetic oligonucleotide
gggugcgcuugagccgauc

SEQ ID NO: 168392 - RNA, 19 nt, Artificial Sequence
  Description of Artificial Sequence: Synthetic oligonucleotide
cccgaacaccgucccuucu

SEQ ID NO: 168393 - RNA, 19 nt, Artificial Sequence
  Description of Artificial Sequence: Synthetic oligonucleotide
cgcacgcacgcucagccuu

SEQ ID NO: 168394 - RNA, 19 nt, Artificial Sequence
  Description of Artificial Sequence: Synthetic oligonucleotide
ccgucccuucuggcucgaa

SEQ ID NO: 168395 - RNA, 19 nt, Artificial Sequence
  Description of Artificial Sequence: Synthetic oligonucleotide
cgacucuaugugggucuuu

SEQ ID NO: 168396 - RNA, 19 nt, Artificial Sequence
  Description of Artificial Sequence: Synthetic oligonucleotide
uggacuuacagucaaaacg

SEQ ID NO: 168397 - RNA, 19 nt, Artificial Sequence
  Description of Artificial Sequence: Synthetic oligonucleotide
aagauaucaagccaccggc

SEQ ID NO: 168398 - RNA, 19 nt, Artificial Sequence
  Description of Artificial Sequence: Synthetic oligonucleotide
  modified_base (2)..(2): a, c, u, g, unknown or other
anaccggagagucagaggg

SEQ ID NO: 168399 - RNA, 19 nt, Artificial Sequence
  Description of Artificial Sequence: Synthetic oligonucleotide
uuuaaagugcccuaaaugu

SEQ ID NO: 168400 - RNA, 19 nt, Artificial Sequence
  Description of Artificial Sequence: Synthetic oligonucleotide
uuugaaaugguuuaggauc

SEQ ID NO: 168401 - RNA, 19 nt, Artificial Sequence
  Description of Artificial Sequence: Synthetic oligonucleotide
uagaauaagauaucaagcc

SEQ ID NO: 168402 - RNA, 19 nt, Artificial Sequence
  Description of Artificial Sequence: Synthetic oligonucleotide
uuaaagagaacacugcccc

SEQ ID NO: 168403 - RNA, 19 nt, Artificial Sequence
  Description of Artificial Sequence: Synthetic oligonucleotide
aaugguuuaggaucugagg

SEQ ID NO: 168404 - RNA, 19 nt, Artificial Sequence
  Description of Artificial Sequence: Synthetic oligonucleotide
ucaagcauugauaaaggag

SEQ ID NO: 168405 - RNA, 19 nt, Artificial Sequence
  Description of Artificial Sequence: Synthetic oligonucleotide
uaagauaucaagccaccgg

SEQ ID NO: 168406 - RNA, 19 nt, Artificial Sequence
  Description of Artificial Sequence: Synthetic oligonucleotide
uuuaaagagaacacugccc

SEQ ID NO: 168407 - RNA, 19 nt, Artificial Sequence
  Description of Artificial Sequence: Synthetic oligonucleotide
gagaacugaaguuagggag

SEQ ID NO: 168408 - RNA, 19 nt, Artificial Sequence
  Description of Artificial Sequence: Synthetic oligonucleotide
uguacuguguaaacgaagc

SEQ ID NO: 168409 - RNA, 19 nt, Artificial Sequence
  Description of Artificial Sequence: Synthetic oligonucleotide
ugaaaugggaagauuuuag

SEQ ID NO: 168410 - RNA, 19 nt, Artificial Sequence
  Description of Artificial Sequence: Synthetic oligonucleotide
  modified_base (3)..(3): a, c, u, g, unknown or other
aanaggggcacugcaaggc

SEQ ID NO: 168411 - RNA, 19 nt, Artificial Sequence
  Description of Artificial Sequence: Synthetic oligonucleotide
gagaacacgacugauaccc

SEQ ID NO: 168412 - RNA, 19 nt, Artificial Sequence
  Description of Artificial Sequence: Synthetic oligonucleotide
uguggaagcuuugaaaugg

SEQ ID NO: 168413 - RNA, 19 nt, Artificial Sequence
  Description of Artificial Sequence: Synthetic oligonucleotide
  modified_base (16)..(16): a, c, u, g, unknown or other
aaggguugcgggcaanagg

SEQ ID NO: 168414 - RNA, 19 nt, Artificial Sequence
  Description of Artificial Sequence: Synthetic oligonucleotide
aguguucuuguucucgucc

SEQ ID NO: 168415 - RNA, 19 nt, Artificial Sequence
  Description of Artificial Sequence: Synthetic oligonucleotide
auugauaaggccaaggucu

SEQ ID NO: 168416 - RNA, 19 nt, Artificial Sequence
  Description of Artificial Sequence: Synthetic oligonucleotide
aacacaugucuacaugggg

SEQ ID NO: 168417 - RNA, 19 nt, Artificial Sequence
  Description of Artificial Sequence: Synthetic oligonucleotide
uugauugucguauagggaa

SEQ ID NO: 168418 - RNA, 19 nt, Artificial Sequence
  Description of Artificial Sequence: Synthetic oligonucleotide
agaaaucucaucuagcaaa

SEQ ID NO: 168419 - RNA, 19 nt, Artificial Sequence
  Description of Artificial Sequence: Synthetic oligonucleotide
  modified_base (2)..(2): a, c, u, g, unknown or other
anaggggcacugcaaggcc

SEQ ID NO: 168420 - RNA, 19 nt, Artificial Sequence
  Description of Artificial Sequence: Synthetic oligonucleotide
ugucguauagggaaggaga

SEQ ID NO: 168421 - RNA, 19 nt, Artificial Sequence
  Description of Artificial Sequence: Synthetic oligonucleotide
uuaguagcauugauaaggc

SEQ ID NO: 168422 - RNA, 19 nt, Artificial Sequence
  Description of Artificial Sequence: Synthetic oligonucleotide
agucaaaacggauaggggu

SEQ ID NO: 168423 - RNA, 19 nt, Artificial Sequence
  Description of Artificial Sequence: Synthetic oligonucleotide
ucagagggaagauuagggg

SEQ ID NO: 168424 - RNA, 19 nt, Artificial Sequence
  Description of Artificial Sequence: Synthetic oligonucleotide
agaauaagauaucaagcca

SEQ ID NO: 168425 - RNA, 19 nt, Artificial Sequence
  Description of Artificial Sequence: Synthetic oligonucleotide
aggaccucuauucaaguuc

SEQ ID NO: 168426 - RNA, 19 nt, Artificial Sequence
  Description of Artificial Sequence: Synthetic oligonucleotide
uuuagcaaucauuuuggga

SEQ ID NO: 168427 - RNA, 19 nt, Artificial Sequence
  Description of Artificial Sequence: Synthetic oligonucleotide
aagucaaacaccccaggcu

SEQ ID NO: 168428 - RNA, 19 nt, Artificial Sequence
  Description of Artificial Sequence: Synthetic oligonucleotide
aacccuacaauagccaccg

SEQ ID NO: 168429 - RNA, 19 nt, Artificial Sequence
  Description of Artificial Sequence: Synthetic oligonucleotide
cauucagugguuuuagcag

SEQ ID NO: 168430 - RNA, 19 nt, Artificial Sequence
  Description of Artificial Sequence: Synthetic oligonucleotide
uugaaaugguuuaggaucu

SEQ ID NO: 168431 - RNA, 19 nt, Artificial Sequence
  Description of Artificial Sequence: Synthetic oligonucleotide
gauaucaagccaccggcag

SEQ ID NO: 168432 - RNA, 19 nt, Artificial Sequence
  Description of Artificial Sequence: Synthetic oligonucleotide
aaaacggguaaugagagua

SEQ ID NO: 168433 - RNA, 19 nt, Artificial Sequence
  Description of Artificial Sequence: Synthetic oligonucleotide
gauuuuaggagagagaacu

SEQ ID NO: 168434 - RNA, 19 nt, Artificial Sequence
  Description of Artificial Sequence: Synthetic oligonucleotide
aaggaugguacacaacccu

SEQ ID NO: 168435 - RNA, 19 nt, Artificial Sequence
  Description of Artificial Sequence: Synthetic oligonucleotide
aggaaagucaaacacccca

SEQ ID NO: 168436 - RNA, 19 nt, Artificial Sequence
  Description of Artificial Sequence: Synthetic oligonucleotide
agaacugaaguuagggagc

SEQ ID NO: 168437 - RNA, 19 nt, Artificial Sequence
  Description of Artificial Sequence: Synthetic oligonucleotide
acagacaaccaccagaaau

SEQ ID NO: 168438 - RNA, 19 nt, Artificial Sequence
  Description of Artificial Sequence: Synthetic oligonucleotide
ucagguacauuccaggaau

SEQ ID NO: 168439 - RNA, 19 nt, Artificial Sequence
  Description of Artificial Sequence: Synthetic oligonucleotide
uagggagcaagcuaugcag

SEQ ID NO: 168440 - RNA, 19 nt, Artificial Sequence
  Description of Artificial Sequence: Synthetic oligonucleotide
gauaaggccaaggucuugg

SEQ ID NO: 168441 - RNA, 19 nt, Artificial Sequence
  Description of Artificial Sequence: Synthetic oligonucleotide
ugagguauugcgugugagg

SEQ ID NO: 168442 - RNA, 19 nt, Artificial Sequence
  Description of Artificial Sequence: Synthetic oligonucleotide
ucucaccaaauaaugguca

SEQ ID NO: 168443 - RNA, 19 nt, Artificial Sequence
  Description of Artificial Sequence: Synthetic oligonucleotide
gacaacagggaacagacaa

SEQ ID NO: 168444 - RNA, 19 nt, Artificial Sequence
  Description of Artificial Sequence: Synthetic oligonucleotide
acgacugauaccccaaguc

SEQ ID NO: 168445 - RNA, 19 nt, Artificial Sequence
  Description of Artificial Sequence: Synthetic oligonucleotide
guaaacgaagcccauccag

SEQ ID NO: 168446 - RNA, 19 nt, Artificial Sequence
  Description of Artificial Sequence: Synthetic oligonucleotide
gucguguucuccuuuaaag

SEQ ID NO: 168447 - RNA, 19 nt, Artificial Sequence
  Description of Artificial Sequence: Synthetic oligonucleotide
aguagcauugauaaggcca

SEQ ID NO: 168448 - RNA, 19 nt, Artificial Sequence
  Description of Artificial Sequence: Synthetic oligonucleotide
ugucaauauucccagcacu

SEQ ID NO: 168449 - RNA, 19 nt, Artificial Sequence
  Description of Artificial Sequence: Synthetic oligonucleotide
aggacaacagggaacagac

SEQ ID NO: 168450 - RNA, 19 nt, Artificial Sequence
  Description of Artificial Sequence: Synthetic oligonucleotide
uaaacgaagcccauccagu

SEQ ID NO: 168451 - RNA, 19 nt, Artificial Sequence
  Description of Artificial Sequence: Synthetic oligonucleotide
agucggauuccucugucac

SEQ ID NO: 168452 - RNA, 19 nt, Artificial Sequence
  Description of Artificial Sequence: Synthetic oligonucleotide
aacgaagcccauccaguuc

SEQ ID NO: 168453 - RNA, 19 nt, Artificial Sequence
  Description of Artificial Sequence: Synthetic oligonucleotide
cauuccaggaaucuaucag

SEQ ID NO: 168454 - RNA, 19 nt, Artificial Sequence
  Description of Artificial Sequence: Synthetic oligonucleotide
uaucaagccaccggcaggg

SEQ ID NO: 168455 - RNA, 19 nt, Artificial Sequence
  Description of Artificial Sequence: Synthetic oligonucleotide
ucggauuccucugucacgg

SEQ ID NO: 168456 - RNA, 19 nt, Artificial Sequence
  Description of Artificial Sequence: Synthetic oligonucleotide
uuggcauaaggaguggagg

SEQ ID NO: 168457 - RNA, 19 nt, Artificial Sequence
  Description of Artificial Sequence: Synthetic oligonucleotide
guaaugagaguagagcgag

SEQ ID NO: 168458 - RNA, 19 nt, Artificial Sequence
  Description of Artificial Sequence: Synthetic oligonucleotide
uuuaggaucugagggguag

SEQ ID NO: 168459 - RNA, 19 nt, Artificial Sequence
  Description of Artificial Sequence: Synthetic oligonucleotide
cagacaaccaccagaaauc

SEQ ID NO: 168460 - RNA, 19 nt, Artificial Sequence
  Description of Artificial Sequence: Synthetic oligonucleotide
ugauugucguauagggaag

SEQ ID NO: 168461 - RNA, 19 nt, Artificial Sequence
  Description of Artificial Sequence: Synthetic oligonucleotide
aguagagcgagcuugggua

SEQ ID NO: 168462 - RNA, 19 nt, Artificial Sequence
  Description of Artificial Sequence: Synthetic oligonucleotide
aauaggccuuuucacaaaa

SEQ ID NO: 168463 - RNA, 19 nt, Artificial Sequence
  Description of Artificial Sequence: Synthetic oligonucleotide
uugcgugugaggaagggac

SEQ ID NO: 168464 - RNA, 19 nt, Artificial Sequence
  Description of Artificial Sequence: Synthetic oligonucleotide
aaacggauaggggugagga

SEQ ID NO: 168465 - RNA, 19 nt, Artificial Sequence
  Description of Artificial Sequence: Synthetic oligonucleotide
ucauuuugggacacuuggc

SEQ ID NO: 168466 - RNA, 19 nt, Artificial Sequence
  Description of Artificial Sequence: Synthetic oligonucleotide
uuaaagugcccuaaauguu

SEQ ID NO: 168467 - RNA, 19 nt, Artificial Sequence
  Description of Artificial Sequence: Synthetic oligonucleotide
auaucaagccaccggcagg

SEQ ID NO: 168468 - RNA, 19 nt, Artificial Sequence
  Description of Artificial Sequence: Synthetic oligonucleotide
uggcauaaggaguggaggc

SEQ ID NO: 168469 - RNA, 19 nt, Artificial Sequence
  Description of Artificial Sequence: Synthetic oligonucleotide
auacugauggcagccaaac

SEQ ID NO: 168470 - RNA, 19 nt, Artificial Sequence
  Description of Artificial Sequence: Synthetic oligonucleotide
  modified_base (3)..(3): a, c, u, g, unknown or other
ganaccggagagucagagg

SEQ ID NO: 168471 - RNA, 19 nt, Artificial Sequence
  Description of Artificial Sequence: Synthetic oligonucleotide
aaccagacauugauugucg

SEQ ID NO: 168472 - RNA, 19 nt, Artificial Sequence
  Description of Artificial Sequence: Synthetic oligonucleotide
auaagauaucaagccaccg

SEQ ID NO: 168473 - RNA, 19 nt, Artificial Sequence
  Description of Artificial Sequence: Synthetic oligonucleotide
aagacugcacaauccuucu

SEQ ID NO: 168474 - RNA, 19 nt, Artificial Sequence
  Description of Artificial Sequence: Synthetic oligonucleotide
  modified_base (15)..(15): a, c, u, g, unknown or other
aggguugcgggcaanaggg

SEQ ID NO: 168475 - RNA, 19 nt, Artificial Sequence
  Description of Artificial Sequence: Synthetic oligonucleotide
agauuaggggagcuggcag

SEQ ID NO: 168476 - RNA, 19 nt, Artificial Sequence
  Description of Artificial Sequence: Synthetic oligonucleotide
  modified_base (4)..(4): a, c, u, g, unknown or other
caanaggggcacugcaagg

SEQ ID NO: 168477 - RNA, 19 nt, Artificial Sequence
  Description of Artificial Sequence: Synthetic oligonucleotide
ucguguucuccuuuaaagu

SEQ ID NO: 168478 - RNA, 19 nt, Artificial Sequence
  Description of Artificial Sequence: Synthetic oligonucleotide
cauugauaaggccaagguc

SEQ ID NO: 168479 - RNA, 19 nt, Artificial Sequence
  Description of Artificial Sequence: Synthetic oligonucleotide
gauugucguauagggaagg

SEQ ID NO: 168480 - RNA, 19 nt, Artificial Sequence
  Description of Artificial Sequence: Synthetic oligonucleotide
uuugggacugaguccaacu

SEQ ID NO: 168481 - RNA, 19 nt, Artificial Sequence
  Description of Artificial Sequence: Synthetic oligonucleotide
agugcuacccuccccaccu

SEQ ID NO: 168482 - RNA, 19 nt, Artificial Sequence
  Description of Artificial Sequence: Synthetic oligonucleotide
ggaagauuuuaggagagag

SEQ ID NO: 168483 - RNA, 19 nt, Artificial Sequence
  Description of Artificial Sequence: Synthetic oligonucleotide
aaaacggauaggggugagg

SEQ ID NO: 168484 - RNA, 19 nt, Artificial Sequence
  Description of Artificial Sequence: Synthetic oligonucleotide
cagucaaaacggauagggg

SEQ ID NO: 168485 - RNA, 19 nt, Artificial Sequence
  Description of Artificial Sequence: Synthetic oligonucleotide
uguaaacgaagcccaucca

SEQ ID NO: 168486 - RNA, 19 nt, Artificial Sequence
  Description of Artificial Sequence: Synthetic oligonucleotide
gucucaguuggacaguggc

SEQ ID NO: 168487 - RNA, 19 nt, Artificial Sequence
  Description of Artificial Sequence: Synthetic oligonucleotide
ggaagauuaggggagcugg

SEQ ID NO: 168488 - RNA, 19 nt, Artificial Sequence
  Description of Artificial Sequence: Synthetic oligonucleotide
acggauaggggugaggaag

SEQ ID NO: 168489 - RNA, 19 nt, Artificial Sequence
  Description of Artificial Sequence: Synthetic oligonucleotide
cugggcuguacauucagug

SEQ ID NO: 168490 - RNA, 19 nt, Artificial Sequence
  Description of Artificial Sequence: Synthetic oligonucleotide
caucuaacccaauggcacc

SEQ ID NO: 168491 - RNA, 19 nt, Artificial Sequence
  Description of Artificial Sequence: Synthetic oligonucleotide
ucucaguuggacaguggca

SEQ ID NO: 168492 - RNA, 19 nt, Artificial Sequence
  Description of Artificial Sequence: Synthetic oligonucleotide
agauaaacaggaccacaga

SEQ ID NO: 168493 - RNA, 19 nt, Artificial Sequence
  Description of Artificial Sequence: Synthetic oligonucleotide
ugcgggauuuccuuuggca

SEQ ID NO: 168494 - RNA, 19 nt, Artificial Sequence
  Description of Artificial Sequence: Synthetic oligonucleotide
aaauaggccuuuucacaaa

SEQ ID NO: 168495 - RNA, 19 nt, Artificial Sequence
  Description of Artificial Sequence: Synthetic oligonucleotide
ugcaaugccgcaguucuug

SEQ ID NO: 168496 - RNA, 19 nt, Artificial Sequence
  Description of Artificial Sequence: Synthetic oligonucleotide
cauuuugggacacuuggca

SEQ ID NO: 168497 - RNA, 19 nt, Artificial Sequence
  Description of Artificial Sequence: Synthetic oligonucleotide
gucaaaacggauaggggug

SEQ ID NO: 168498 - RNA, 19 nt, Artificial Sequence
  Description of Artificial Sequence: Synthetic oligonucleotide
cacaugucuacauggggug

SEQ ID NO: 168499 - RNA, 19 nt, Artificial Sequence
  Description of Artificial Sequence: Synthetic oligonucleotide
cuaauucccagcaccaaga

SEQ ID NO: 168500 - RNA, 19 nt, Artificial Sequence
  Description of Artificial Sequence: Synthetic oligonucleotide
uguacauucagugguuuua

SEQ ID NO: 168501 - RNA, 19 nt, Artificial Sequence
  Description of Artificial Sequence: Synthetic oligonucleotide
gcauugauaaaggagaaca

SEQ ID NO: 168502 - RNA, 19 nt, Artificial Sequence
  Description of Artificial Sequence: Synthetic oligonucleotide
uauugcgugugaggaaggg

SEQ ID NO: 168503 - RNA, 19 nt, Artificial Sequence
  Description of Artificial Sequence: Synthetic oligonucleotide
gaaggaugguacacaaccc

SEQ ID NO: 168504 - RNA, 19 nt, Artificial Sequence
  Description of Artificial Sequence: Synthetic oligonucleotide
agaagcuaggccguuccgg

SEQ ID NO: 168505 - RNA, 19 nt, Artificial Sequence
  Description of Artificial Sequence: Synthetic oligonucleotide
ccuacaauagccaccgccc

SEQ ID NO: 168506 - RNA, 19 nt, Artificial Sequence
  Description of Artificial Sequence: Synthetic oligonucleotide
gugcccuaaauguuuagac

SEQ ID NO: 168507 - RNA, 19 nt, Artificial Sequence
  Description of Artificial Sequence: Synthetic oligonucleotide
acaaaagugcuuauuacuu

SEQ ID NO: 168508 - RNA, 19 nt, Artificial Sequence
  Description of Artificial Sequence: Synthetic oligonucleotide
gaaguuagggagcaagcua

SEQ ID NO: 168509 - RNA, 19 nt, Artificial Sequence
  Description of Artificial Sequence: Synthetic oligonucleotide
ucugggaaccagcgugagg

SEQ ID NO: 168510 - RNA, 19 nt, Artificial Sequence
  Description of Artificial Sequence: Synthetic oligonucleotide
aaacggguaaugagaguag

SEQ ID NO: 168511 - RNA, 19 nt, Artificial Sequence
  Description of Artificial Sequence: Synthetic oligonucleotide
uuucucguggcccuugcua

SEQ ID NO: 168512 - RNA, 19 nt, Artificial Sequence
  Description of Artificial Sequence: Synthetic oligonucleotide
aagauuaggggagcuggca

SEQ ID NO: 168513 - RNA, 19 nt, Artificial Sequence
  Description of Artificial Sequence: Synthetic oligonucleotide
guccuaacuugaaauaggc

SEQ ID NO: 168514 - RNA, 19 nt, Artificial Sequence
  Description of Artificial Sequence: Synthetic oligonucleotide
guacuguguaaacgaagcc

SEQ ID NO: 168515 - RNA, 19 nt, Artificial Sequence
  Description of Artificial Sequence: Synthetic oligonucleotide
caacccuacaauagccacc

SEQ ID NO: 168516 - RNA, 19 nt, Artificial Sequence
  Description of Artificial Sequence: Synthetic oligonucleotide
caagcuaugcagaaccaga

SEQ ID NO: 168517 - RNA, 19 nt, Artificial Sequence
  Description of Artificial Sequence: Synthetic oligonucleotide
gguauugcgugugaggaag

SEQ ID NO: 168518 - RNA, 19 nt, Artificial Sequence
  Description of Artificial Sequence: Synthetic oligonucleotide
  modified_base (5)..(5): a, c, u, g, unknown or other
gcaanaggggcacugcaag

SEQ ID NO: 168519 - RNA, 19 nt, Artificial Sequence
  Description of Artificial Sequence: Synthetic oligonucleotide
acauuccaggaaucuauca

SEQ ID NO: 168520 - RNA, 19 nt, Artificial Sequence
  Description of Artificial Sequence: Synthetic oligonucleotide
uaggaucugagggguaggg

SEQ ID NO: 168521 - RNA, 19 nt, Artificial Sequence
  Description of Artificial Sequence: Synthetic oligonucleotide
ucacggucaagcauugaua

SEQ ID NO: 168522 - RNA, 19 nt, Artificial Sequence
  Description of Artificial Sequence: Synthetic oligonucleotide
uaaugagaguagagcgagc

SEQ ID NO: 168523 - RNA, 19 nt, Artificial Sequence
  Description of Artificial Sequence: Synthetic oligonucleotide
cauaaggaguggaggcugc

SEQ ID NO: 168524 - RNA, 19 nt, Artificial Sequence
  Description of Artificial Sequence: Synthetic oligonucleotide
ccuucucaccaaauaaugg

SEQ ID NO: 168525 - RNA, 19 nt, Artificial Sequence
  Description of Artificial Sequence: Synthetic oligonucleotide
ucaaaacggauagggguga

SEQ ID NO: 168526 - RNA, 19 nt, Artificial Sequence
  Description of Artificial Sequence: Synthetic oligonucleotide
guacauucagugguuuuag

SEQ ID NO: 168527 - RNA, 19 nt, Artificial Sequence
  Description of Artificial Sequence: Synthetic oligonucleotide
cuccucauagccacaugag

SEQ ID NO: 168528 - RNA, 19 nt, Artificial Sequence
  Description of Artificial Sequence: Synthetic oligonucleotide
cugacggcguccuugggug

SEQ ID NO: 168529 - RNA, 19 nt, Artificial Sequence
  Description of Artificial Sequence: Synthetic oligonucleotide
agcaaucauuuugggacac

SEQ ID NO: 168530 - RNA, 19 nt, Artificial Sequence
  Description of Artificial Sequence: Synthetic oligonucleotide
caaccugggcuguacauuc

SEQ ID NO: 168531 - RNA, 19 nt, Artificial Sequence
  Description of Artificial Sequence: Synthetic oligonucleotide
uggggcaaccauuucccug

SEQ ID NO: 168532 - RNA, 19 nt, Artificial Sequence
  Description of Artificial Sequence: Synthetic oligonucleotide
cugucaauauucccagcac

SEQ ID NO: 168533 - RNA, 19 nt, Artificial Sequence
  Description of Artificial Sequence: Synthetic oligonucleotide
aacggguaaugagaguaga

SEQ ID NO: 168534 - RNA, 19 nt, Artificial Sequence
  Description of Artificial Sequence: Synthetic oligonucleotide
guagagcgagcuuggguag

SEQ ID NO: 168535 - RNA, 19 nt, Artificial Sequence
  Description of Artificial Sequence: Synthetic oligonucleotide
cuucucaccaaauaauggu

SEQ ID NO: 168536 - RNA, 19 nt, Artificial Sequence
  Description of Artificial Sequence: Synthetic oligonucleotide
ggcgaugaaggguugcggg

SEQ ID NO: 168537 - RNA, 19 nt, Artificial Sequence
  Description of Artificial Sequence: Synthetic oligonucleotide
ugauaccccaagucauccc

SEQ ID NO: 168538 - RNA, 19 nt, Artificial Sequence
  Description of Artificial Sequence: Synthetic oligonucleotide
ggaaucuaucagugcaggg

SEQ ID NO: 168539 - RNA, 19 nt, Artificial Sequence
  Description of Artificial Sequence: Synthetic oligonucleotide
gguccuaacuugaaauagg

SEQ ID NO: 168540 - RNA, 19 nt, Artificial Sequence
  Description of Artificial Sequence: Synthetic oligonucleotide
cacaaaagugcuuauuacu

SEQ ID NO: 168541 - RNA, 19 nt, Artificial Sequence
  Description of Artificial Sequence: Synthetic oligonucleotide
gucuguugguccauccugg

SEQ ID NO: 168542 - RNA, 19 nt, Artificial Sequence
  Description of Artificial Sequence: Synthetic oligonucleotide
aaugugccccaggacaaca

SEQ ID NO: 168543 - RNA, 19 nt, Artificial Sequence
  Description of Artificial Sequence: Synthetic oligonucleotide
cguauagggaaggagaggg

SEQ ID NO: 168544 - RNA, 19 nt, Artificial Sequence
  Description of Artificial Sequence: Synthetic oligonucleotide
gaaccagcgugagguaugg

SEQ ID NO: 168545 - RNA, 19 nt, Artificial Sequence
  Description of Artificial Sequence: Synthetic oligonucleotide
cugauaccccaagucaucc

SEQ ID NO: 168546 - RNA, 19 nt, Artificial Sequence
  Description of Artificial Sequence: Synthetic oligonucleotide
ggucaagcauugauaaagg

SEQ ID NO: 168547 - RNA, 19 nt, Artificial Sequence
  Description of Artificial Sequence: Synthetic oligonucleotide
gucaagcauugauaaagga

SEQ ID NO: 168548 - RNA, 19 nt, Artificial Sequence
  Description of Artificial Sequence: Synthetic oligonucleotide
gaaaugguuuaggaucuga

SEQ ID NO: 168549 - RNA, 19 nt, Artificial Sequence
  Description of Artificial Sequence: Synthetic oligonucleotide
cacuccaacccaguuuugg

SEQ ID NO: 168550 - RNA, 19 nt, Artificial Sequence
  Description of Artificial Sequence: Synthetic oligonucleotide
cacggucaagcauugauaa

SEQ ID NO: 168551 - RNA, 19 nt, Artificial Sequence
  Description of Artificial Sequence: Synthetic oligonucleotide
acaugucuacauggggugg

SEQ ID NO: 168552 - RNA, 19 nt, Artificial Sequence
  Description of Artificial Sequence: Synthetic oligonucleotide
guuagggagcaagcuaugc

SEQ ID NO: 168553 - RNA, 19 nt, Artificial Sequence
  Description of Artificial Sequence: Synthetic oligonucleotide
ggaaagucaaacaccccag

SEQ ID NO: 168554 - RNA, 19 nt, Artificial Sequence
  Description of Artificial Sequence: Synthetic oligonucleotide
ugcgugugaggaagggaca

SEQ ID NO: 168555 - RNA, 19 nt, Artificial Sequence
  Description of Artificial Sequence: Synthetic oligonucleotide
caguccuauggcucagggg

SEQ ID NO: 168556 - RNA, 19 nt, Artificial Sequence
  Description of Artificial Sequence: Synthetic oligonucleotide
gguuuugggacugagucca

SEQ ID NO: 168557 - RNA, 19 nt, Artificial Sequence
  Description of Artificial Sequence: Synthetic oligonucleotide
ccgacaaacgcugagucgg

SEQ ID NO: 168558 - RNA, 19 nt, Artificial Sequence
  Description of Artificial Sequence: Synthetic oligonucleotide
uacugauggcagccaaacu

SEQ ID NO: 168559 - RNA, 19 nt, Artificial Sequence
  Description of Artificial Sequence: Synthetic oligonucleotide
cucuauucaaguucugugu

SEQ ID NO: 168560 - RNA, 19 nt, Artificial Sequence
  Description of Artificial Sequence: Synthetic oligonucleotide
ccucuauucaaguucugug

SEQ ID NO: 168561 - RNA, 19 nt, Artificial Sequence
  Description of Artificial Sequence: Synthetic oligonucleotide
aacggauaggggugaggaa

SEQ ID NO: 168562 - RNA, 19 nt, Artificial Sequence
  Description of Artificial Sequence: Synthetic oligonucleotide
agugcccuaaauguuuaga

SEQ ID NO: 168563 - RNA, 19 nt, Artificial Sequence
  Description of Artificial Sequence: Synthetic oligonucleotide
uaauggucauguggaagcu

SEQ ID NO: 168564 - RNA, 19 nt, Artificial Sequence
  Description of Artificial Sequence: Synthetic oligonucleotide
  modified_base (6)..(6): a, c, u, g, unknown or other
gggganaccggagagucag

SEQ ID NO: 168565 - RNA, 19 nt, Artificial Sequence
  Description of Artificial Sequence: Synthetic oligonucleotide
augccgcaguucuugagca

SEQ ID NO: 168566 - RNA, 19 nt, Artificial Sequence
  Description of Artificial Sequence: Synthetic oligonucleotide
ggucuguugguccauccug

SEQ ID NO: 168567 - RNA, 19 nt, Artificial Sequence
  Description of Artificial Sequence: Synthetic oligonucleotide
ccagaaaucucaucuagca

SEQ ID NO: 168568 - RNA, 19 nt, Artificial Sequence
  Description of Artificial Sequence: Synthetic oligonucleotide
ccagcgugagguauggugc

SEQ ID NO: 168569 - RNA, 19 nt, Artificial Sequence
  Description of Artificial Sequence: Synthetic oligonucleotide
acacgacugauaccccaag

SEQ ID NO: 168570 - RNA, 19 nt, Artificial Sequence
  Description of Artificial Sequence: Synthetic oligonucleotide
ggguccuaacuugaaauag

SEQ ID NO: 168571 - RNA, 19 nt, Artificial Sequence
  Description of Artificial Sequence: Synthetic oligonucleotide
  modified_base (4)..(4): a, c, u, g, unknown or other
gganaccggagagucagag

SEQ ID NO: 168572 - RNA, 19 nt, Artificial Sequence
  Description of Artificial Sequence: Synthetic oligonucleotide
ggguuagagagggaggcgg

SEQ ID NO: 168573 - RNA, 19 nt, Artificial Sequence
  Description of Artificial Sequence: Synthetic oligonucleotide
ccuaauucccagcaccaag

SEQ ID NO: 168574 - RNA, 19 nt, Artificial Sequence
  Description of Artificial Sequence: Synthetic oligonucleotide
accgcccaaucagaaacac

SEQ ID NO: 168575 - RNA, 19 nt, Artificial Sequence
  Description of Artificial Sequence: Synthetic oligonucleotide
gaccugggucuguuggucc

SEQ ID NO: 168576 - RNA, 19 nt, Artificial Sequence
  Description of Artificial Sequence: Synthetic oligonucleotide
ugggucuguugguccaucc

SEQ ID NO: 168577 - RNA, 19 nt, Artificial Sequence
  Description of Artificial Sequence: Synthetic oligonucleotide
aacagggaacagacaacca

SEQ ID NO: 168578 - RNA, 19 nt, Artificial Sequence
  Description of Artificial Sequence: Synthetic oligonucleotide
gucuacauggggugggcca

SEQ ID NO: 168579 - RNA, 19 nt, Artificial Sequence
  Description of Artificial Sequence: Synthetic oligonucleotide
agucguguucuccuuuaaa

SEQ ID NO: 168580 - RNA, 19 nt, Artificial Sequence
  Description of Artificial Sequence: Synthetic oligonucleotide
aggguccuaacuugaaaua

SEQ ID NO: 168581 - RNA, 19 nt, Artificial Sequence
  Description of Artificial Sequence: Synthetic oligonucleotide
gagucucaguuggacagug

SEQ ID NO: 168582 - RNA, 19 nt, Artificial Sequence
  Description of Artificial Sequence: Synthetic oligonucleotide
ucaguuggacaguggcagu

SEQ ID NO: 168583 - RNA, 19 nt, Artificial Sequence
  Description of Artificial Sequence: Synthetic oligonucleotide
gguuacauauugaaggcaa

SEQ ID NO: 168584 - RNA, 19 nt, Artificial Sequence
  Description of Artificial Sequence: Synthetic oligonucleotide
gggaaacagagauggaguc

SEQ ID NO: 168585 - RNA, 19 nt, Artificial Sequence
  Description of Artificial Sequence: Synthetic oligonucleotide
agggcgaugaaggguugcg

SEQ ID NO: 168586 - RNA, 19 nt, Artificial Sequence
  Description of Artificial Sequence: Synthetic oligonucleotide
cccuacaauagccaccgcc

SEQ ID NO: 168587 - RNA, 19 nt, Artificial Sequence
  Description of Artificial Sequence: Synthetic oligonucleotide
uagagcgagcuuggguagg

SEQ ID NO: 168588 - RNA, 19 nt, Artificial Sequence
  Description of Artificial Sequence: Synthetic oligonucleotide
ggacagggcgucugaaggg

SEQ ID NO: 168589 - RNA, 19 nt, Artificial Sequence
  Description of Artificial Sequence: Synthetic oligonucleotide
aggguggcgagacauucaa

SEQ ID NO: 168590 - RNA, 19 nt, Artificial Sequence
  Description of Artificial Sequence: Synthetic oligonucleotide
gguacacaacccuacaaua

SEQ ID NO: 168591 - RNA, 19 nt, Artificial Sequence
  Description of Artificial Sequence: Synthetic oligonucleotide
caaugccgcaguucuugag

SEQ ID NO: 168592 - RNA, 19 nt, Artificial Sequence
  Description of Artificial Sequence: Synthetic oligonucleotide
gcuacucagaguagcagcc

SEQ ID NO: 168593 - RNA, 19 nt, Artificial Sequence
  Description of Artificial Sequence: Synthetic oligonucleotide
aacacgacugauaccccaa

SEQ ID NO: 168594 - RNA, 19 nt, Artificial Sequence
  Description of Artificial Sequence: Synthetic oligonucleotide
ccuggggcaaccauuuccc

SEQ ID NO: 168595 - RNA, 19 nt, Artificial Sequence
  Description of Artificial Sequence: Synthetic oligonucleotide
acggguaaugagaguagag

SEQ ID NO: 168596 - RNA, 19 nt, Artificial Sequence
  Description of Artificial Sequence: Synthetic oligonucleotide
gguaaugagaguagagcga

SEQ ID NO: 168597 - RNA, 19 nt, Artificial Sequence
  Description of Artificial Sequence: Synthetic oligonucleotide
aaagggcugacggcguccu

SEQ ID NO: 168598 - RNA, 19 nt, Artificial Sequence
  Description of Artificial Sequence: Synthetic oligonucleotide
uuuugggacugaguccaac

SEQ ID NO: 168599 - RNA, 19 nt, Artificial Sequence
  Description of Artificial Sequence: Synthetic oligonucleotide
guaucuguggggaggaaaa

SEQ ID NO: 168600 - RNA, 19 nt, Artificial Sequence
  Description of Artificial Sequence: Synthetic oligonucleotide
cugagguauugcgugugag

SEQ ID NO: 168601 - RNA, 19 nt, Artificial Sequence
  Description of Artificial Sequence: Synthetic oligonucleotide
auugucguauagggaagga

SEQ ID NO: 168602 - RNA, 19 nt, Artificial Sequence
  Description of Artificial Sequence: Synthetic oligonucleotide
guauugcgugugaggaagg

SEQ ID NO: 168603 - RNA, 19 nt, Artificial Sequence
  Description of Artificial Sequence: Synthetic oligonucleotide
auaggccuuuucacaaaag

SEQ ID NO: 168604 - RNA, 19 nt, Artificial Sequence
  Description of Artificial Sequence: Synthetic oligonucleotide
cagugcacuguuaguagca

SEQ ID NO: 168605 - RNA, 19 nt, Artificial Sequence
  Description of Artificial Sequence: Synthetic oligonucleotide
cuaacccaauggcaccaug

SEQ ID NO: 168606 - RNA, 19 nt, Artificial Sequence
  Description of Artificial Sequence: Synthetic oligonucleotide
cagccaaacugggcgaggg

SEQ ID NO: 168607 - RNA, 19 nt, Artificial Sequence
  Description of Artificial Sequence: Synthetic oligonucleotide
agauaucaagccaccggca

SEQ ID NO: 168608 - RNA, 19 nt, Artificial Sequence
  Description of Artificial Sequence: Synthetic oligonucleotide
cagaagcuaggccguuccg

SEQ ID NO: 168609 - RNA, 19 nt, Artificial Sequence
  Description of Artificial Sequence: Synthetic oligonucleotide
  modified_base (18)..(18): a, c, u, g, unknown or other
ugaaggguugcgggcaana

SEQ ID NO: 168610 - RNA, 19 nt, Artificial Sequence
  Description of Artificial Sequence: Synthetic oligonucleotide
uagccaccgcccaaucaga

SEQ ID NO: 168611 - RNA, 19 nt, Artificial Sequence
  Description of Artificial Sequence: Synthetic oligonucleotide
gagucggauuccucuguca

SEQ ID NO: 168612 - RNA, 19 nt, Artificial Sequence
  Description of Artificial Sequence: Synthetic oligonucleotide
ucucguggcccuugcuaca

SEQ ID NO: 168613 - RNA, 19 nt, Artificial Sequence
  Description of Artificial Sequence: Synthetic oligonucleotide
  modified_base (12)..(12): a, c, u, g, unknown or other
guugcgggcaanaggggca

SEQ ID NO: 168614 - RNA, 19 nt, Artificial Sequence
  Description of Artificial Sequence: Synthetic oligonucleotide
cagaaaucucaucuagcaa

SEQ ID NO: 168615 - RNA, 19 nt, Artificial Sequence
  Description of Artificial Sequence: Synthetic oligonucleotide
cugggaaccagcgugaggu

SEQ ID NO: 168616 - RNA, 19 nt, Artificial Sequence
  Description of Artificial Sequence: Synthetic oligonucleotide
agacauugauugucguaua

SEQ ID NO: 168617 - RNA, 19 nt, Artificial Sequence
  Description of Artificial Sequence: Synthetic oligonucleotide
ugacggcguccuugggugg

SEQ ID NO: 168618 - RNA, 19 nt, Artificial Sequence
  Description of Artificial Sequence: Synthetic oligonucleotide
gacuuacagucaaaacgga

SEQ ID NO: 168619 - RNA, 19 nt, Artificial Sequence
  Description of Artificial Sequence: Synthetic oligonucleotide
ggcgagggugcacuguggg

SEQ ID NO: 168620 - RNA, 19 nt, Artificial Sequence
  Description of Artificial Sequence: Synthetic oligonucleotide
ccaccgcccaaucagaaac

SEQ ID NO: 168621 - RNA, 19 nt, Artificial Sequence
  Description of Artificial Sequence: Synthetic oligonucleotide
gcaguccuauggcucaggg

SEQ ID NO: 168622 - RNA, 19 nt, Artificial Sequence
  Description of Artificial Sequence: Synthetic oligonucleotide
ggcaggaccucuauucaag

SEQ ID NO: 168623 - RNA, 19 nt, Artificial Sequence
  Description of Artificial Sequence: Synthetic oligonucleotide
auuucucguggcccuugcu

SEQ ID NO: 168624 - RNA, 19 nt, Artificial Sequence
  Description of Artificial Sequence: Synthetic oligonucleotide
ucagcucacccugggcaag

SEQ ID NO: 168625 - RNA, 19 nt, Artificial Sequence
  Description of Artificial Sequence: Synthetic oligonucleotide
uucugggaaccagcgugag

SEQ ID NO: 168626 - RNA, 19 nt, Artificial Sequence
  Description of Artificial Sequence: Synthetic oligonucleotide
cagucuuagagucucaguu

SEQ ID NO: 168627 - RNA, 19 nt, Artificial Sequence
  Description of Artificial Sequence: Synthetic oligonucleotide
agguauugcgugugaggaa

SEQ ID NO: 168628 - RNA, 19 nt, Artificial Sequence
  Description of Artificial Sequence: Synthetic oligonucleotide
ccugucaauauucccagca

SEQ ID NO: 168629 - RNA, 19 nt, Artificial Sequence
  Description of Artificial Sequence: Synthetic oligonucleotide
gucuccuauguagcccucg

SEQ ID NO: 168630 - RNA, 19 nt, Artificial Sequence
  Description of Artificial Sequence: Synthetic oligonucleotide
ggagaacacgacugauacc

SEQ ID NO: 168631 - RNA, 19 nt, Artificial Sequence
  Description of Artificial Sequence: Synthetic oligonucleotide
gacagggcgucugaaggga

SEQ ID NO: 168632 - RNA, 19 nt, Artificial Sequence
  Description of Artificial Sequence: Synthetic oligonucleotide
gacggcguccuuggguggg

SEQ ID NO: 168633 - RNA, 19 nt, Artificial Sequence
  Description of Artificial Sequence: Synthetic oligonucleotide
ucacuccaacccaguuuug

SEQ ID NO: 168634 - RNA, 19 nt, Artificial Sequence
  Description of Artificial Sequence: Synthetic oligonucleotide
ugccgcaguucuugagcag

SEQ ID NO: 168635 - RNA, 19 nt, Artificial Sequence
  Description of Artificial Sequence: Synthetic oligonucleotide
  modified_base (13)..(13): a, c, u, g, unknown or other
gguugcgggcaanaggggc

SEQ ID NO: 168636 - RNA, 19 nt, Artificial Sequence
  Description of Artificial Sequence: Synthetic oligonucleotide
gaguagagcgagcuugggu

SEQ ID NO: 168637 - RNA, 19 nt, Artificial Sequence
  Description of Artificial Sequence: Synthetic oligonucleotide
agggcugacggcguccuug

SEQ ID NO: 168638 - RNA, 19 nt, Artificial Sequence
  Description of Artificial Sequence: Synthetic oligonucleotide
gcaagcuaugcagaaccag

SEQ ID NO: 168639 - RNA, 19 nt, Artificial Sequence
  Description of Artificial Sequence: Synthetic oligonucleotide
guuacauauugaaggcaaa

SEQ ID NO: 168640 - RNA, 19 nt, Artificial Sequence
  Description of Artificial Sequence: Synthetic oligonucleotide
gcugcaaugccgcaguucu

SEQ ID NO: 168641 - RNA, 19 nt, Artificial Sequence
  Description of Artificial Sequence: Synthetic oligonucleotide
ccuugcuacaagccaagug

SEQ ID NO: 168642 - RNA, 19 nt, Artificial Sequence
  Description of Artificial Sequence: Synthetic oligonucleotide
gucacggucaagcauugau

SEQ ID NO: 168643 - RNA, 19 nt, Artificial Sequence
  Description of Artificial Sequence: Synthetic oligonucleotide
aaggguggcgagacauuca

SEQ ID NO: 168644 - RNA, 19 nt, Artificial Sequence
  Description of Artificial Sequence: Synthetic oligonucleotide
uggggugcgggauuuccuu

SEQ ID NO: 168645 - RNA, 19 nt, Artificial Sequence
  Description of Artificial Sequence: Synthetic oligonucleotide
gcauaaggaguggaggcug

SEQ ID NO: 168646 - RNA, 19 nt, Artificial Sequence
  Description of Artificial Sequence: Synthetic oligonucleotide
gcuuauuacuugaagcaaa

SEQ ID NO: 168647 - RNA, 19 nt, Artificial Sequence
  Description of Artificial Sequence: Synthetic oligonucleotide
gcgaugaaggguugcgggc

SEQ ID NO: 168648 - RNA, 19 nt, Artificial Sequence
  Description of Artificial Sequence: Synthetic oligonucleotide
aguuagggagcaagcuaug

SEQ ID NO: 168649 - RNA, 19 nt, Artificial Sequence
  Description of Artificial Sequence: Synthetic oligonucleotide
gacugauaccccaagucau

SEQ ID NO: 168650 - RNA, 19 nt, Artificial Sequence
  Description of Artificial Sequence: Synthetic oligonucleotide
acggucaagcauugauaaa

SEQ ID NO: 168651 - RNA, 19 nt, Artificial Sequence
  Description of Artificial Sequence: Synthetic oligonucleotide
agccaggcauuuagcaauc

SEQ ID NO: 168652 - RNA, 19 nt, Artificial Sequence
  Description of Artificial Sequence: Synthetic oligonucleotide
gccgcaguucuugagcagg

SEQ ID NO: 168653 - RNA, 19 nt, Artificial Sequence
  Description of Artificial Sequence: Synthetic oligonucleotide
caaaacggauaggggugag

SEQ ID NO: 168654 - RNA, 19 nt, Artificial Sequence
  Description of Artificial Sequence: Synthetic oligonucleotide
ggaaacagagauggaguca

SEQ ID NO: 168655 - RNA, 19 nt, Artificial Sequence
  Description of Artificial Sequence: Synthetic oligonucleotide
cccuguacuguguaaacga

SEQ ID NO: 168656 - RNA, 19 nt, Artificial Sequence
  Description of Artificial Sequence: Synthetic oligonucleotide
caggguccuaacuugaaau

SEQ ID NO: 168657 - RNA, 19 nt, Artificial Sequence
  Description of Artificial Sequence: Synthetic oligonucleotide
cccgacaaacgcugagucg

SEQ ID NO: 168658 - RNA, 19 nt, Artificial Sequence
  Description of Artificial Sequence: Synthetic oligonucleotide
auaaggaguggaggcugcu

SEQ ID NO: 168659 - RNA, 19 nt, Artificial Sequence
  Description of Artificial Sequence: Synthetic oligonucleotide
agagucucaguuggacagu

SEQ ID NO: 168660 - RNA, 19 nt, Artificial Sequence
  Description of Artificial Sequence: Synthetic oligonucleotide
agggagcaagcuaugcaga

SEQ ID NO: 168661 - RNA, 19 nt, Artificial Sequence
  Description of Artificial Sequence: Synthetic oligonucleotide
ucguggcccuugcuacaag

SEQ ID NO: 168662 - RNA, 19 nt, Artificial Sequence
  Description of Artificial Sequence: Synthetic oligonucleotide
acagggcgucugaagggac

SEQ ID NO: 168663 - RNA, 19 nt, Artificial Sequence
  Description of Artificial Sequence: Synthetic oligonucleotide
cuuuggcauaaggagugga

SEQ ID NO: 168664 - RNA, 19 nt, Artificial Sequence
  Description of Artificial Sequence: Synthetic oligonucleotide
  modified_base (11)..(11): a, c, u, g, unknown or other
uugcgggcaanaggggcac

SEQ ID NO: 168665 - RNA, 19 nt, Artificial Sequence
  Description of Artificial Sequence: Synthetic oligonucleotide
gagggcgaugaaggguugc

SEQ ID NO: 168666 - RNA, 19 nt, Artificial Sequence
  Description of Artificial Sequence: Synthetic oligonucleotide
agcaagcuaugcagaacca

SEQ ID NO: 168667 - RNA, 19 nt, Artificial Sequence
  Description of Artificial Sequence: Synthetic oligonucleotide
  modified_base (7)..(7): a, c, u, g, unknown or other
gggcaanaggggcacugca

SEQ ID NO: 168668 - RNA, 19 nt, Artificial Sequence
  Description of Artificial Sequence: Synthetic oligonucleotide
gcgagugaugggauggaag

SEQ ID NO: 168669 - RNA, 19 nt, Artificial Sequence
  Description of Artificial Sequence: Synthetic oligonucleotide
aggaugguacacaacccua

SEQ ID NO: 168670 - RNA, 19 nt, Artificial Sequence
  Description of Artificial Sequence: Synthetic oligonucleotide
ggaaccagcgugagguaug

SEQ ID NO: 168671 - RNA, 19 nt, Artificial Sequence
  Description of Artificial Sequence: Synthetic oligonucleotide
auaccccaagucaucccug

SEQ ID NO: 168672 - RNA, 19 nt, Artificial Sequence
  Description of Artificial Sequence: Synthetic oligonucleotide
caggggcuacuccccaccc

SEQ ID NO: 168673 - RNA, 19 nt, Artificial Sequence
  Description of Artificial Sequence: Synthetic oligonucleotide
ccuccucauagccacauga

SEQ ID NO: 168674 - RNA, 19 nt, Artificial Sequence
  Description of Artificial Sequence: Synthetic oligonucleotide
agcgugagguauggugcag

SEQ ID NO: 168675 - RNA, 19 nt, Artificial Sequence
  Description of Artificial Sequence: Synthetic oligonucleotide
ugucuccuauguagcccuc

SEQ ID NO: 168676 - RNA, 19 nt, Artificial Sequence
  Description of Artificial Sequence: Synthetic oligonucleotide
gggagggaccccuguacug

SEQ ID NO: 168677 - RNA, 19 nt, Artificial Sequence
  Description of Artificial Sequence: Synthetic oligonucleotide
guuuuagcagcaguccuau

SEQ ID NO: 168678 - RNA, 19 nt, Artificial Sequence
  Description of Artificial Sequence: Synthetic oligonucleotide
gugcgggauuuccuuuggc

SEQ ID NO: 168679 - RNA, 19 nt, Artificial Sequence
  Description of Artificial Sequence: Synthetic oligonucleotide
gagagggcgaugaaggguu

SEQ ID NO: 168680 - RNA, 19 nt, Artificial Sequence
  Description of Artificial Sequence: Synthetic oligonucleotide
ccugucuccuauguagccc

SEQ ID NO: 168681 - RNA, 19 nt, Artificial Sequence
  Description of Artificial Sequence: Synthetic oligonucleotide
  modified_base (14)..(14): a, c, u, g, unknown or other
ggguugcgggcaanagggg

SEQ ID NO: 168682 - RNA, 19 nt, Artificial Sequence
  Description of Artificial Sequence: Synthetic oligonucleotide
agagggcaggaccucuauu

SEQ ID NO: 168683 - RNA, 19 nt, Artificial Sequence
  Description of Artificial Sequence: Synthetic oligonucleotide
gcguccuugggugggaaag

SEQ ID NO: 168684 - RNA, 19 nt, Artificial Sequence
  Description of Artificial Sequence: Synthetic oligonucleotide
cucagcucacccugggcaa

SEQ ID NO: 168685 - RNA, 19 nt, Artificial Sequence
  Description of Artificial Sequence: Synthetic oligonucleotide
gcgagggugcacugugggg

SEQ ID NO: 168686 - RNA, 19 nt, Artificial Sequence
  Description of Artificial Sequence: Synthetic oligonucleotide
cacccaccgucuuggcggc

SEQ ID NO: 168687 - RNA, 19 nt, Artificial Sequence
  Description of Artificial Sequence: Synthetic oligonucleotide
gccaugagaauggucaaaa

SEQ ID NO: 168688 - RNA, 19 nt, Artificial Sequence
  Description of Artificial Sequence: Synthetic oligonucleotide
cagcgugagguauggugca

SEQ ID NO: 168689 - RNA, 19 nt, Artificial Sequence
  Description of Artificial Sequence: Synthetic oligonucleotide
cacgacucagcagggccug

SEQ ID NO: 168690 - RNA, 19 nt, Artificial Sequence
  Description of Artificial Sequence: Synthetic oligonucleotide
caaugugccccaggacaac

SEQ ID NO: 168691 - RNA, 19 nt, Artificial Sequence
  Description of Artificial Sequence: Synthetic oligonucleotide
cccugucuccuauguagcc

SEQ ID NO: 168692 - RNA, 19 nt, Artificial Sequence
  Description of Artificial Sequence: Synthetic oligonucleotide
guagagagggcaggaccuc

SEQ ID NO: 168693 - RNA, 19 nt, Artificial Sequence
  Description of Artificial Sequence: Synthetic oligonucleotide
ccccuguacuguguaaacg

SEQ ID NO: 168694 - RNA, 19 nt, Artificial Sequence
  Description of Artificial Sequence: Synthetic oligonucleotide
gggcuacucagaguagcag

SEQ ID NO: 168695 - RNA, 19 nt, Artificial Sequence
  Description of Artificial Sequence: Synthetic oligonucleotide
gguuucugccaggaucaug

SEQ ID NO: 168696 - RNA, 19 nt, Artificial Sequence
  Description of Artificial Sequence: Synthetic oligonucleotide
gguaucuguggggaggaaa

SEQ ID NO: 168697 - RNA, 19 nt, Artificial Sequence
  Description of Artificial Sequence: Synthetic oligonucleotide
gcgugagguauggugcagg

SEQ ID NO: 168698 - RNA, 19 nt, Artificial Sequence
  Description of Artificial Sequence: Synthetic oligonucleotide
gggccagaugcaaugcuac

SEQ ID NO: 168699 - RNA, 19 nt, Artificial Sequence
  Description of Artificial Sequence: Synthetic oligonucleotide
ugggaaccagcgugaggua

SEQ ID NO: 168700 - RNA, 19 nt, Artificial Sequence
  Description of Artificial Sequence: Synthetic oligonucleotide
gagggugcacuguggggua

SEQ ID NO: 168701 - RNA, 19 nt, Artificial Sequence
  Description of Artificial Sequence: Synthetic oligonucleotide
caccgcccaaucagaaaca

SEQ ID NO: 168702 - RNA, 19 nt, Artificial Sequence
  Description of Artificial Sequence: Synthetic oligonucleotide
ggcagcaaacaggggaaac

SEQ ID NO: 168703 - RNA, 19 nt, Artificial Sequence
  Description of Artificial Sequence: Synthetic oligonucleotide
ggacugaguccaacugugc

SEQ ID NO: 168704 - RNA, 19 nt, Artificial Sequence
  Description of Artificial Sequence: Synthetic oligonucleotide
ggggaggcgagugauggga

SEQ ID NO: 168705 - RNA, 19 nt, Artificial Sequence
  Description of Artificial Sequence: Synthetic oligonucleotide
caagcggggaggcgaguga

SEQ ID NO: 168706 - RNA, 19 nt, Artificial Sequence
  Description of Artificial Sequence: Synthetic oligonucleotide
  modified_base (6)..(6): a, c, u, g, unknown or other
ggcaanaggggcacugcaa

SEQ ID NO: 168707 - RNA, 19 nt, Artificial Sequence
  Description of Artificial Sequence: Synthetic oligonucleotide
cccuaaaaucagaaacuaa

SEQ ID NO: 168708 - RNA, 19 nt, Artificial Sequence
  Description of Artificial Sequence: Synthetic oligonucleotide
agggugcacugugggguag

SEQ ID NO: 168709 - RNA, 19 nt, Artificial Sequence
  Description of Artificial Sequence: Synthetic oligonucleotide
cgagacauucaagggacac

SEQ ID NO: 168710 - RNA, 19 nt, Artificial Sequence
  Description of Artificial Sequence: Synthetic oligonucleotide
ccccgacaaacgcugaguc

SEQ ID NO: 168711 - RNA, 19 nt, Artificial Sequence
  Description of Artificial Sequence: Synthetic oligonucleotide
aaccagcgugagguauggu

SEQ ID NO: 168712 - RNA, 19 nt, Artificial Sequence
  Description of Artificial Sequence: Synthetic oligonucleotide
ccgcaguucuugagcaggc

SEQ ID NO: 168713 - RNA, 19 nt, Artificial Sequence
  Description of Artificial Sequence: Synthetic oligonucleotide
ccgcccaaucagaaacacc

SEQ ID NO: 168714 - RNA, 19 nt, Artificial Sequence
  Description of Artificial Sequence: Synthetic oligonucleotide
ggccagaugcaaugcuaca

SEQ ID NO: 168715 - RNA, 19 nt, Artificial Sequence
  Description of Artificial Sequence: Synthetic oligonucleotide
gcaauguggaguggcaucu

SEQ ID NO: 168716 - RNA, 19 nt, Artificial Sequence
  Description of Artificial Sequence: Synthetic oligonucleotide
  modified_base (10)..(10): a, c, u, g, unknown or other
ugcgggcaanaggggcacu

SEQ ID NO: 168717 - RNA, 19 nt, Artificial Sequence
  Description of Artificial Sequence: Synthetic oligonucleotide
cuucuccccucagcucacc

SEQ ID NO: 168718 - RNA, 19 nt, Artificial Sequence
  Description of Artificial Sequence: Synthetic oligonucleotide
gcuaggccguuccgggcag

SEQ ID NO: 168719 - RNA, 19 nt, Artificial Sequence
  Description of Artificial Sequence: Synthetic oligonucleotide
gcgugugaggaagggacac

SEQ ID NO: 168720 - RNA, 19 nt, Artificial Sequence
  Description of Artificial Sequence: Synthetic oligonucleotide
gcccaaucagaaacacccc

SEQ ID NO: 168721 - RNA, 19 nt, Artificial Sequence
  Description of Artificial Sequence: Synthetic oligonucleotide
cacgacugauaccccaagu

SEQ ID NO: 168722 - RNA, 19 nt, Artificial Sequence
  Description of Artificial Sequence: Synthetic oligonucleotide
gcagccaaacugggcgagg

SEQ ID NO: 168723 - RNA, 19 nt, Artificial Sequence
  Description of Artificial Sequence: Synthetic oligonucleotide
cugagucggauuccucugu

SEQ ID NO: 168724 - RNA, 19 nt, Artificial Sequence
  Description of Artificial Sequence: Synthetic oligonucleotide
ugggugggaaaggcuucau

SEQ ID NO: 168725 - RNA, 19 nt, Artificial Sequence
  Description of Artificial Sequence: Synthetic oligonucleotide
  modified_base (9)..(9): a, c, u, g, unknown or other
gcgggcaanaggggcacug

SEQ ID NO: 168726 - RNA, 19 nt, Artificial Sequence
  Description of Artificial Sequence: Synthetic oligonucleotide
gcgggauuuccuuuggcau

SEQ ID NO: 168727 - RNA, 19 nt, Artificial Sequence
  Description of Artificial Sequence: Synthetic oligonucleotide
gcccuugcuacaagccaag

SEQ ID NO: 168728 - RNA, 19 nt, Artificial Sequence
  Description of Artificial Sequence: Synthetic oligonucleotide
ggagagggcgaugaagggu

SEQ ID NO: 168729 - RNA, 19 nt, Artificial Sequence
  Description of Artificial Sequence: Synthetic oligonucleotide
gaucaaggccaggcagucu

SEQ ID NO: 168730 - RNA, 19 nt, Artificial Sequence
  Description of Artificial Sequence: Synthetic oligonucleotide
ugcgggccccagaccucug

SEQ ID NO: 168731 - RNA, 19 nt, Artificial Sequence
  Description of Artificial Sequence: Synthetic oligonucleotide
cagucguguucuccuuuaa

SEQ ID NO: 168732 - RNA, 19 nt, Artificial Sequence
  Description of Artificial Sequence: Synthetic oligonucleotide
agccaccgcccaaucagaa

SEQ ID NO: 168733 - RNA, 19 nt, Artificial Sequence
  Description of Artificial Sequence: Synthetic oligonucleotide
ccggagagucagagggaag

SEQ ID NO: 168734 - RNA, 19 nt, Artificial Sequence
  Description of Artificial Sequence: Synthetic oligonucleotide
ggguggcgagacauucaag

SEQ ID NO: 168735 - RNA, 19 nt, Artificial Sequence
  Description of Artificial Sequence: Synthetic oligonucleotide
caggaccucuauucaaguu

SEQ ID NO: 168736 - RNA, 19 nt, Artificial Sequence
  Description of Artificial Sequence: Synthetic oligonucleotide
ggauaggggugaggaagga

SEQ ID NO: 168737 - RNA, 19 nt, Artificial Sequence
  Description of Artificial Sequence: Synthetic oligonucleotide
gggcgccacagccacccac

SEQ ID NO: 168738 - RNA, 19 nt, Artificial Sequence
  Description of Artificial Sequence: Synthetic oligonucleotide
gucguccucugauucccau

SEQ ID NO: 168739 - RNA, 19 nt, Artificial Sequence
  Description of Artificial Sequence: Synthetic oligonucleotide
gccguuccgggcagcaaug

SEQ ID NO: 168740 - RNA, 19 nt, Artificial Sequence
  Description of Artificial Sequence: Synthetic oligonucleotide
gcgagcuuggguaggggaa

SEQ ID NO: 168741 - RNA, 19 nt, Artificial Sequence
  Description of Artificial Sequence: Synthetic oligonucleotide
ggcaaccauuucccugcuc

SEQ ID NO: 168742 - RNA, 19 nt, Artificial Sequence
  Description of Artificial Sequence: Synthetic oligonucleotide
gugcuacccuccccaccuc

SEQ ID NO: 168743 - RNA, 19 nt, Artificial Sequence
  Description of Artificial Sequence: Synthetic oligonucleotide
ggaccccuguacuguguaa

SEQ ID NO: 168744 - RNA, 19 nt, Artificial Sequence
  Description of Artificial Sequence: Synthetic oligonucleotide
cuggggcaaccauuucccu

SEQ ID NO: 168745 - RNA, 19 nt, Artificial Sequence
  Description of Artificial Sequence: Synthetic oligonucleotide
acggcguccuuggguggga

SEQ ID NO: 168746 - RNA, 19 nt, Artificial Sequence
  Description of Artificial Sequence: Synthetic oligonucleotide
  modified_base (8)..(8): a, c, u, g, unknown or other
cgggcaanaggggcacugc

SEQ ID NO: 168747 - RNA, 19 nt, Artificial Sequence
  Description of Artificial Sequence: Synthetic oligonucleotide
ggcgagugaugggauggaa

SEQ ID NO: 168748 - RNA, 19 nt, Artificial Sequence
  Description of Artificial Sequence: Synthetic oligonucleotide
guggggugcgggauuuccu

SEQ ID NO: 168749 - RNA, 19 nt, Artificial Sequence
  Description of Artificial Sequence: Synthetic oligonucleotide
  modified_base (5)..(5): a, c, u, g, unknown or other
ggganaccggagagucaga

SEQ ID NO: 168750 - RNA, 19 nt, Artificial Sequence
  Description of Artificial Sequence: Synthetic oligonucleotide
gggaaccagcgugagguau

SEQ ID NO: 168751 - RNA, 19 nt, Artificial Sequence
  Description of Artificial Sequence: Synthetic oligonucleotide
gcgagacauucaagggaca

SEQ ID NO: 168752 - RNA, 19 nt, Artificial Sequence
  Description of Artificial Sequence: Synthetic oligonucleotide
cgcugagucggauuccucu

SEQ ID NO: 168753 - RNA, 19 nt, Artificial Sequence
  Description of Artificial Sequence: Synthetic oligonucleotide
ggcguccuugggugggaaa

SEQ ID NO: 168754 - RNA, 19 nt, Artificial Sequence
  Description of Artificial Sequence: Synthetic oligonucleotide
ccugcgggccccagaccuc

SEQ ID NO: 168755 - RNA, 19 nt, Artificial Sequence
  Description of Artificial Sequence: Synthetic oligonucleotide
gggugcacugugggguaga

SEQ ID NO: 168756 - RNA, 19 nt, Artificial Sequence
  Description of Artificial Sequence: Synthetic oligonucleotide
gccccgugcggcagggcgc

SEQ ID NO: 168757 - RNA, 19 nt, Artificial Sequence
  Description of Artificial Sequence: Synthetic oligonucleotide
cgacaaacgcugagucgga

SEQ ID NO: 168758 - RNA, 19 nt, Artificial Sequence
  Description of Artificial Sequence: Synthetic oligonucleotide
caugccgcuccuggcugua

SEQ ID NO: 168759 - RNA, 19 nt, Artificial Sequence
  Description of Artificial Sequence: Synthetic oligonucleotide
ccugggcuguacauucagu

SEQ ID NO: 168760 - RNA, 19 nt, Artificial Sequence
  Description of Artificial Sequence: Synthetic oligonucleotide
ccccgugcggcagggcgcc

SEQ ID NO: 168761 - RNA, 19 nt, Artificial Sequence
  Description of Artificial Sequence: Synthetic oligonucleotide
cugcaaugccgcaguucuu

SEQ ID NO: 168762 - RNA, 19 nt, Artificial Sequence
  Description of Artificial Sequence: Synthetic oligonucleotide
cccaaccugggcuguacau

SEQ ID NO: 168763 - RNA, 19 nt, Artificial Sequence
  Description of Artificial Sequence: Synthetic oligonucleotide
ggggugcgggauuuccuuu

SEQ ID NO: 168764 - RNA, 19 nt, Artificial Sequence
  Description of Artificial Sequence: Synthetic oligonucleotide
gggcuucccugucaauauu

SEQ ID NO: 168765 - RNA, 19 nt, Artificial Sequence
  Description of Artificial Sequence: Synthetic oligonucleotide
ccccaaccugggcuguaca

SEQ ID NO: 168766 - RNA, 19 nt, Artificial Sequence
  Description of Artificial Sequence: Synthetic oligonucleotide
ggguaucuguggggaggaa

SEQ ID NO: 168767 - RNA, 19 nt, Artificial Sequence
  Description of Artificial Sequence: Synthetic oligonucleotide
ccaaccugggcuguacauu

SEQ ID NO: 168768 - RNA, 19 nt, Artificial Sequence
  Description of Artificial Sequence: Synthetic oligonucleotide
ccgugcggcagggcgccac

SEQ ID NO: 168769 - RNA, 19 nt, Artificial Sequence
  Description of Artificial Sequence: Synthetic oligonucleotide
gcaaggguggcgagacauu

SEQ ID NO: 168770 - RNA, 19 nt, Artificial Sequence
  Description of Artificial Sequence: Synthetic oligonucleotide
ccauuucccugcuccccau

SEQ ID NO: 168771 - RNA, 19 nt, Artificial Sequence
  Description of Artificial Sequence: Synthetic oligonucleotide
ccgucuuggcggcugcaau

SEQ ID NO: 168772 - RNA, 19 nt, Artificial Sequence
  Description of Artificial Sequence: Synthetic oligonucleotide
ccguuccgggcagcaaugu

SEQ ID NO: 168773 - RNA, 19 nt, Artificial Sequence
  Description of Artificial Sequence: Synthetic oligonucleotide
gccaagcggggaggcgagu

SEQ ID NO: 168774 - RNA, 19 nt, Artificial Sequence
  Description of Artificial Sequence: Synthetic oligonucleotide
  modified_base (1)..(1): a, c, u, g, unknown or other
naccggagagucagaggga

SEQ ID NO: 168775 - RNA, 19 nt, Artificial Sequence
  Description of Artificial Sequence: Synthetic oligonucleotide
aagacauaaauguauacac

SEQ ID NO: 168776 - RNA, 19 nt, Artificial Sequence
  Description of Artificial Sequence: Synthetic oligonucleotide
aucaguaacgccuuuaucc

SEQ ID NO: 168777 - RNA, 19 nt, Artificial Sequence
  Description of Artificial Sequence: Synthetic oligonucleotide
uguauauacagccuaaacc

SEQ ID NO: 168778 - RNA, 19 nt, Artificial Sequence
  Description of Artificial Sequence: Synthetic oligonucleotide
aaaagcgucagucacuuug

SEQ ID NO: 168779 - RNA, 19 nt, Artificial Sequence
  Description of Artificial Sequence: Synthetic oligonucleotide
accgcuuucagcuaaggcc

SEQ ID NO: 168780 - RNA, 19 nt, Artificial Sequence
  Description of Artificial Sequence: Synthetic oligonucleotide
uaaauuacagcagauaugu

SEQ ID NO: 168781 - RNA, 19 nt, Artificial Sequence
  Description of Artificial Sequence: Synthetic oligonucleotide
uguuugucaacacugaaac

SEQ ID NO: 168782 - RNA, 19 nt, Artificial Sequence
  Description of Artificial Sequence: Synthetic oligonucleotide
acagcaauaugccagauug

SEQ ID NO: 168783 - RNA, 19 nt, Artificial Sequence
  Description of Artificial Sequence: Synthetic oligonucleotide
aaagcauuccaaucuacag

SEQ ID NO: 168784 - RNA, 19 nt, Artificial Sequence
  Description of Artificial Sequence: Synthetic oligonucleotide
gguaugauagaacagaaag

SEQ ID NO: 168785 - RNA, 19 nt, Artificial Sequence
  Description of Artificial Sequence: Synthetic oligonucleotide
uaaaggguuaguaaggcca

SEQ ID NO: 168786 - RNA, 19 nt, Artificial Sequence
  Description of Artificial Sequence: Synthetic oligonucleotide
uugaguacuaguaacaaaa

SEQ ID NO: 168787 - RNA, 19 nt, Artificial Sequence
  Description of Artificial Sequence: Synthetic oligonucleotide
aauaaugguaugauagaac

SEQ ID NO: 168788 - RNA, 19 nt, Artificial Sequence
  Description of Artificial Sequence: Synthetic oligonucleotide
aaauuuaggacuucaguau

SEQ ID NO: 168789 - RNA, 19 nt, Artificial Sequence
  Description of Artificial Sequence: Synthetic oligonucleotide
uaaaccauagcaaucuaug

SEQ ID NO: 168790 - RNA, 19 nt, Artificial Sequence
  Description of Artificial Sequence: Synthetic oligonucleotide
aaaauaaugguaugauaga

SEQ ID NO: 168791 - RNA, 19 nt, Artificial Sequence
  Description of Artificial Sequence: Synthetic oligonucleotide
uuuggaaguugcuaaagag

SEQ ID NO: 168792 - RNA, 19 nt, Artificial Sequence
  Description of Artificial Sequence: Synthetic oligonucleotide
aacuaaagucugcaaaauc

SEQ ID NO: 168793 - RNA, 19 nt, Artificial Sequence
  Description of Artificial Sequence: Synthetic oligonucleotide
uuaccgacaaaucagcuga

SEQ ID NO: 168794 - RNA, 19 nt, Artificial Sequence
  Description of Artificial Sequence: Synthetic oligonucleotide
ucuacccaaagacacaucc

SEQ ID NO: 168795 - RNA, 19 nt, Artificial Sequence
  Description of Artificial Sequence: Synthetic oligonucleotide
aacugaaaaucagacaggg

SEQ ID NO: 168796 - RNA, 19 nt, Artificial Sequence
  Description of Artificial Sequence: Synthetic oligonucleotide
uuauuauuguguaagcuaa

SEQ ID NO: 168797 - RNA, 19 nt, Artificial Sequence
  Description of Artificial Sequence: Synthetic oligonucleotide
aacagguugcuucuuauug

SEQ ID NO: 168798 - RNA, 19 nt, Artificial Sequence
  Description of Artificial Sequence: Synthetic oligonucleotide
caaauucugacagugaucc

SEQ ID NO: 168799 - RNA, 19 nt, Artificial Sequence
  Description of Artificial Sequence: Synthetic oligonucleotide
acuauguauaccuuucuag

SEQ ID NO: 168800 - RNA, 19 nt, Artificial Sequence
  Description of Artificial Sequence: Synthetic oligonucleotide
cucugauaaacuaucagag

SEQ ID NO: 168801 - RNA, 19 nt, Artificial Sequence
  Description of Artificial Sequence: Synthetic oligonucleotide
uaugauagaacagaaagau

SEQ ID NO: 168802 - RNA, 19 nt, Artificial Sequence
  Description of Artificial Sequence: Synthetic oligonucleotide
aguugagucuaccaaacuc

SEQ ID NO: 168803 - RNA, 19 nt, Artificial Sequence
  Description of Artificial Sequence: Synthetic oligonucleotide
gagucuaccaaacuccacg

SEQ ID NO: 168804 - RNA, 19 nt, Artificial Sequence
  Description of Artificial Sequence: Synthetic oligonucleotide
uuuauuauuguguaagcua

SEQ ID NO: 168805 - RNA, 19 nt, Artificial Sequence
  Description of Artificial Sequence: Synthetic oligonucleotide
aguucauugacccugcuga

SEQ ID NO: 168806 - RNA, 19 nt, Artificial Sequence
  Description of Artificial Sequence: Synthetic oligonucleotide
uauacauuacuauguauac

SEQ ID NO: 168807 - RNA, 19 nt, Artificial Sequence
  Description of Artificial Sequence: Synthetic oligonucleotide
ugcuacuccagucaaacug

SEQ ID NO: 168808 - RNA, 19 nt, Artificial Sequence
  Description of Artificial Sequence: Synthetic oligonucleotide
uuagguuggauucaguaaa

SEQ ID NO: 168809 - RNA, 19 nt, Artificial Sequence
  Description of Artificial Sequence: Synthetic oligonucleotide
aagucguuaccacugucac

SEQ ID NO: 168810 - RNA, 19 nt, Artificial Sequence
  Description of Artificial Sequence: Synthetic oligonucleotide
uguagaaaaugcuccgagg

SEQ ID NO: 168811 - RNA, 19 nt, Artificial Sequence
  Description of Artificial Sequence: Synthetic oligonucleotide
uaugcuugcagccgaauca

SEQ ID NO: 168812 - RNA, 19 nt, Artificial Sequence
  Description of Artificial Sequence: Synthetic oligonucleotide
gaagguuaagucaggaagg

SEQ ID NO: 168813 - RNA, 19 nt, Artificial Sequence
  Description of Artificial Sequence: Synthetic oligonucleotide
uguguaagcuaaaaggaaa

SEQ ID NO: 168814 - RNA, 19 nt, Artificial Sequence
  Description of Artificial Sequence: Synthetic oligonucleotide
ugucuauucccaaagcaca

SEQ ID NO: 168815 - RNA, 19 nt, Artificial Sequence
  Description of Artificial Sequence: Synthetic oligonucleotide
ugaaucuugaguacuagua

SEQ ID NO: 168816 - RNA, 19 nt, Artificial Sequence
  Description of Artificial Sequence: Synthetic oligonucleotide
aaaacccuugggcaugcac

SEQ ID NO: 168817 - RNA, 19 nt, Artificial Sequence
  Description of Artificial Sequence: Synthetic oligonucleotide
ucgaaaauucucuccaacc

SEQ ID NO: 168818 - RNA, 19 nt, Artificial Sequence
  Description of Artificial Sequence: Synthetic oligonucleotide
uguccuaugugacugccag

SEQ ID NO: 168819 - RNA, 19 nt, Artificial Sequence
  Description of Artificial Sequence: Synthetic oligonucleotide
gauauguuuugaugguagg

SEQ ID NO: 168820 - RNA, 19 nt, Artificial Sequence
  Description of Artificial Sequence: Synthetic oligonucleotide
cauuaaccuuguuagaggc

SEQ ID NO: 168821 - RNA, 19 nt, Artificial Sequence
  Description of Artificial Sequence: Synthetic oligonucleotide
ugauagaaggacaccacca

SEQ ID NO: 168822 - RNA, 19 nt, Artificial Sequence
  Description of Artificial Sequence: Synthetic oligonucleotide
uacauguauucauuucugg

SEQ ID NO: 168823 - RNA, 19 nt, Artificial Sequence
  Description of Artificial Sequence: Synthetic oligonucleotide
gcuaaaaggaaauuuacac

SEQ ID NO: 168824 - RNA, 19 nt, Artificial Sequence
  Description of Artificial Sequence: Synthetic oligonucleotide
aguaaauaucauuuccucu

SEQ ID NO: 168825 - RNA, 19 nt, Artificial Sequence
  Description of Artificial Sequence: Synthetic oligonucleotide
uguaccaaagucaccaaaa

SEQ ID NO: 168826 - RNA, 19 nt, Artificial Sequence
  Description of Artificial Sequence: Synthetic oligonucleotide
aaaccauagcaaucuauga

SEQ ID NO: 168827 - RNA, 19 nt, Artificial Sequence
  Description of Artificial Sequence: Synthetic oligonucleotide
uccaaauucacugucuuga

SEQ ID NO: 168828 - RNA, 19 nt, Artificial Sequence
  Description of Artificial Sequence: Synthetic oligonucleotide
uugguaggcucuaacauac

SEQ ID NO: 168829 - RNA, 19 nt, Artificial Sequence
  Description of Artificial Sequence: Synthetic oligonucleotide
ucuucuguggaaucaaggu

SEQ ID NO: 168830 - RNA, 19 nt, Artificial Sequence
  Description of Artificial Sequence: Synthetic oligonucleotide
agacauaaauguauacacc

SEQ ID NO: 168831 - RNA, 19 nt, Artificial Sequence
  Description of Artificial Sequence: Synthetic oligonucleotide
cacuauaacagguugcuuc

SEQ ID NO: 168832 - RNA, 19 nt, Artificial Sequence
  Description of Artificial Sequence: Synthetic oligonucleotide
uuggaaagcacuaccgcug

SEQ ID NO: 168833 - RNA, 19 nt, Artificial Sequence
  Description of Artificial Sequence: Synthetic oligonucleotide
acgccuuuauccucaaagc

SEQ ID NO: 168834 - RNA, 19 nt, Artificial Sequence
  Description of Artificial Sequence: Synthetic oligonucleotide
guuaacaaaagccaggccu

SEQ ID NO: 168835 - RNA, 19 nt, Artificial Sequence
  Description of Artificial Sequence: Synthetic oligonucleotide
uggcuuaccgacaaaucag

SEQ ID NO: 168836 - RNA, 19 nt, Artificial Sequence
  Description of Artificial Sequence: Synthetic oligonucleotide
ugaaaccucugucaguuac

SEQ ID NO: 168837 - RNA, 19 nt, Artificial Sequence
  Description of Artificial Sequence: Synthetic oligonucleotide
uuuagguuggauucaguaa

SEQ ID NO: 168838 - RNA, 19 nt, Artificial Sequence
  Description of Artificial Sequence: Synthetic oligonucleotide
uuuuagguuggauucagua

SEQ ID NO: 168839 - RNA, 19 nt, Artificial Sequence
  Description of Artificial Sequence: Synthetic oligonucleotide
auuguguaagcuaaaagga

SEQ ID NO: 168840 - RNA, 19 nt, Artificial Sequence
  Description of Artificial Sequence: Synthetic oligonucleotide
uccucugauaaacuaucag

SEQ ID NO: 168841 - RNA, 19 nt, Artificial Sequence
  Description of Artificial Sequence: Synthetic oligonucleotide
auggaucagauguacaugu

SEQ ID NO: 168842 - RNA, 19 nt, Artificial Sequence
  Description of Artificial Sequence: Synthetic oligonucleotide
accucugucaguuacuaca

SEQ ID NO: 168843 - RNA, 19 nt, Artificial Sequence
  Description of Artificial Sequence: Synthetic oligonucleotide
ugaagugccugaauccugc

SEQ ID NO: 168844 - RNA, 19 nt, Artificial Sequence
  Description of Artificial Sequence: Synthetic oligonucleotide
caugcaugaagguuaaguc

SEQ ID NO: 168845 - RNA, 19 nt, Artificial Sequence
  Description of Artificial Sequence: Synthetic oligonucleotide
gguaucucaagccaugugc

SEQ ID NO: 168846 - RNA, 19 nt, Artificial Sequence
  Description of Artificial Sequence: Synthetic oligonucleotide
ugcuaaagagacacugugc

SEQ ID NO: 168847 - RNA, 19 nt, Artificial Sequence
  Description of Artificial Sequence: Synthetic oligonucleotide
gaugggauucaguagccug

SEQ ID NO: 168848 - RNA, 19 nt, Artificial Sequence
  Description of Artificial Sequence: Synthetic oligonucleotide
ucuaaaggguuaguaaggc

SEQ ID NO: 168849 - RNA, 19 nt, Artificial Sequence
  Description of Artificial Sequence: Synthetic oligonucleotide
cuacaugcacuucugaaac

SEQ ID NO: 168850 - RNA, 19 nt, Artificial Sequence
  Description of Artificial Sequence: Synthetic oligonucleotide
acugcuacuccagucaaac

SEQ ID NO: 168851 - RNA, 19 nt, Artificial Sequence
  Description of Artificial Sequence: Synthetic oligonucleotide
agaaagauuucuaacaaau

SEQ ID NO: 168852 - RNA, 19 nt, Artificial Sequence
  Description of Artificial Sequence: Synthetic oligonucleotide
aauggaucagauguacaug

SEQ ID NO: 168853 - RNA, 19 nt, Artificial Sequence
  Description of Artificial Sequence: Synthetic oligonucleotide
ucaguaacgccuuuauccu

SEQ ID NO: 168854 - RNA, 19 nt, Artificial Sequence
  Description of Artificial Sequence: Synthetic oligonucleotide
agaauccaugcauagguca

SEQ ID NO: 168855 - RNA, 19 nt, Artificial Sequence
  Description of Artificial Sequence: Synthetic oligonucleotide
uucacuuagguguuccucu

SEQ ID NO: 168856 - RNA, 19 nt, Artificial Sequence
  Description of Artificial Sequence: Synthetic oligonucleotide
agacaugucauuugguccu

SEQ ID NO: 168857 - RNA, 19 nt, Artificial Sequence
  Description of Artificial Sequence: Synthetic oligonucleotide
gaaguaacuuccucaucag

SEQ ID NO: 168858 - RNA, 19 nt, Artificial Sequence
  Description of Artificial Sequence: Synthetic oligonucleotide
gcgucagucacuuugaggc

SEQ ID NO: 168859 - RNA, 19 nt, Artificial Sequence
  Description of Artificial Sequence: Synthetic oligonucleotide
uguucauccucaaaagcau

SEQ ID NO: 168860 - RNA, 19 nt, Artificial Sequence
  Description of Artificial Sequence: Synthetic oligonucleotide
uucgaaaauucucuccaac

SEQ ID NO: 168861 - RNA, 19 nt, Artificial Sequence
  Description of Artificial Sequence: Synthetic oligonucleotide
aaaauucucuccaaccggu

SEQ ID NO: 168862 - RNA, 19 nt, Artificial Sequence
  Description of Artificial Sequence: Synthetic oligonucleotide
ugucuugaccauuuuccag

SEQ ID NO: 168863 - RNA, 19 nt, Artificial Sequence
  Description of Artificial Sequence: Synthetic oligonucleotide
augcaugaagguuaaguca

SEQ ID NO: 168864 - RNA, 19 nt, Artificial Sequence
  Description of Artificial Sequence: Synthetic oligonucleotide
aguaacuuccucaucagca

SEQ ID NO: 168865 - RNA, 19 nt, Artificial Sequence
  Description of Artificial Sequence: Synthetic oligonucleotide
caagucacaaagucguuac

SEQ ID NO: 168866 - RNA, 19 nt, Artificial Sequence
  Description of Artificial Sequence: Synthetic oligonucleotide
ugucaguuacuacaugcac

SEQ ID NO: 168867 - RNA, 19 nt, Artificial Sequence
  Description of Artificial Sequence: Synthetic oligonucleotide
ugaauccugcaaauggcca

SEQ ID NO: 168868 - RNA, 19 nt, Artificial Sequence
  Description of Artificial Sequence: Synthetic oligonucleotide
aaagguggaguggugccac

SEQ ID NO: 168869 - RNA, 19 nt, Artificial Sequence
  Description of Artificial Sequence: Synthetic oligonucleotide
uuucgagugucuauuccca

SEQ ID NO: 168870 - RNA, 19 nt, Artificial Sequence
  Description of Artificial Sequence: Synthetic oligonucleotide
ucucaagccaugugcauca

SEQ ID NO: 168871 - RNA, 19 nt, Artificial Sequence
  Description of Artificial Sequence: Synthetic oligonucleotide
agacuaaacacagagccca

SEQ ID NO: 168872 - RNA, 19 nt, Artificial Sequence
  Description of Artificial Sequence: Synthetic oligonucleotide
cuuaccgacaaaucagcug

SEQ ID NO: 168873 - RNA, 19 nt, Artificial Sequence
  Description of Artificial Sequence: Synthetic oligonucleotide
acuacaugcacuucugaaa

SEQ ID NO: 168874 - RNA, 19 nt, Artificial Sequence
  Description of Artificial Sequence: Synthetic oligonucleotide
aaagucguuaccacuguca

SEQ ID NO: 168875 - RNA, 19 nt, Artificial Sequence
  Description of Artificial Sequence: Synthetic oligonucleotide
aauguuucgagugucuauu

SEQ ID NO: 168876 - RNA, 19 nt, Artificial Sequence
  Description of Artificial Sequence: Synthetic oligonucleotide
aaggcgucaguguggcugg

SEQ ID NO: 168877 - RNA, 19 nt, Artificial Sequence
  Description of Artificial Sequence: Synthetic oligonucleotide
acacugaaaccucugucag

SEQ ID NO: 168878 - RNA, 19 nt, Artificial Sequence
  Description of Artificial Sequence: Synthetic oligonucleotide
cuaaaggguuaguaaggcc

SEQ ID NO: 168879 - RNA, 19 nt, Artificial Sequence
  Description of Artificial Sequence: Synthetic oligonucleotide
cauaaauguauacacccca

SEQ ID NO: 168880 - RNA, 19 nt, Artificial Sequence
  Description of Artificial Sequence: Synthetic oligonucleotide
ugugcaucaugaauauccu

SEQ ID NO: 168881 - RNA, 19 nt, Artificial Sequence
  Description of Artificial Sequence: Synthetic oligonucleotide
ugggcacuauaacagguug

SEQ ID NO: 168882 - RNA, 19 nt, Artificial Sequence
  Description of Artificial Sequence: Synthetic oligonucleotide
agaaaaugcuccgaggacu

SEQ ID NO: 168883 - RNA, 19 nt, Artificial Sequence
  Description of Artificial Sequence: Synthetic oligonucleotide
uggaauuaguaaacuuucu

SEQ ID NO: 168884 - RNA, 19 nt, Artificial Sequence
  Description of Artificial Sequence: Synthetic oligonucleotide
ucagaaguuuuaauagaau

SEQ ID NO: 168885 - RNA, 19 nt, Artificial Sequence
  Description of Artificial Sequence: Synthetic oligonucleotide
ucacucauugaaucuugag

SEQ ID NO: 168886 - RNA, 19 nt, Artificial Sequence
  Description of Artificial Sequence: Synthetic oligonucleotide
agucguuaccacugucacc

SEQ ID NO: 168887 - RNA, 19 nt, Artificial Sequence
  Description of Artificial Sequence: Synthetic oligonucleotide
caguaaauaucauuuccuc

SEQ ID NO: 168888 - RNA, 19 nt, Artificial Sequence
  Description of Artificial Sequence: Synthetic oligonucleotide
ucguucaagccuccaauca

SEQ ID NO: 168889 - RNA, 19 nt, Artificial Sequence
  Description of Artificial Sequence: Synthetic oligonucleotide
uuaagacaugucauuuggu

SEQ ID NO: 168890 - RNA, 19 nt, Artificial Sequence
  Description of Artificial Sequence: Synthetic oligonucleotide
guuaagucaggaaggcugg

SEQ ID NO: 168891 - RNA, 19 nt, Artificial Sequence
  Description of Artificial Sequence: Synthetic oligonucleotide
uucgcaaaagcgucaguca

SEQ ID NO: 168892 - RNA, 19 nt, Artificial Sequence
  Description of Artificial Sequence: Synthetic oligonucleotide
gcaacuguuccuuuggaag

SEQ ID NO: 168893 - RNA, 19 nt, Artificial Sequence
  Description of Artificial Sequence: Synthetic oligonucleotide
uugagucuaccaaacucca

SEQ ID NO: 168894 - RNA, 19 nt, Artificial Sequence
  Description of Artificial Sequence: Synthetic oligonucleotide
uguuuuagguuggauucag

SEQ ID NO: 168895 - RNA, 19 nt, Artificial Sequence
  Description of Artificial Sequence: Synthetic oligonucleotide
acaugggcacuauaacagg

SEQ ID NO: 168896 - RNA, 19 nt, Artificial Sequence
  Description of Artificial Sequence: Synthetic oligonucleotide
aaccgguugaguaaagcug

SEQ ID NO: 168897 - RNA, 19 nt, Artificial Sequence
  Description of Artificial Sequence: Synthetic oligonucleotide
ucaugaauauccugcaguu

SEQ ID NO: 168898 - RNA, 19 nt, Artificial Sequence
  Description of Artificial Sequence: Synthetic oligonucleotide
acaaucucguucaagccuc

SEQ ID NO: 168899 - RNA, 19 nt, Artificial Sequence
  Description of Artificial Sequence: Synthetic oligonucleotide
uuuuacacuggucccuccu

SEQ ID NO: 168900 - RNA, 19 nt, Artificial Sequence
  Description of Artificial Sequence: Synthetic oligonucleotide
ucgcaaaagcgucagucac

SEQ ID NO: 168901 - RNA, 19 nt, Artificial Sequence
  Description of Artificial Sequence: Synthetic oligonucleotide
caguuguuaauucauacaa

SEQ ID NO: 168902 - RNA, 19 nt, Artificial Sequence
  Description of Artificial Sequence: Synthetic oligonucleotide
cuaguaacaaaagguggag

SEQ ID NO: 168903 - RNA, 19 nt, Artificial Sequence
  Description of Artificial Sequence: Synthetic oligonucleotide
aaccucugucaguuacuac

SEQ ID NO: 168904 - RNA, 19 nt, Artificial Sequence
  Description of Artificial Sequence: Synthetic oligonucleotide
gguuaagucaggaaggcug

SEQ ID NO: 168905 - RNA, 19 nt, Artificial Sequence
  Description of Artificial Sequence: Synthetic oligonucleotide
uuaugcuugcagccgaauc

SEQ ID NO: 168906 - RNA, 19 nt, Artificial Sequence
  Description of Artificial Sequence: Synthetic oligonucleotide
uaucagaggucuguuuuag

SEQ ID NO: 168907 - RNA, 19 nt, Artificial Sequence
  Description of Artificial Sequence: Synthetic oligonucleotide
uucuuguugcuaugggagc

SEQ ID NO: 168908 - RNA, 19 nt, Artificial Sequence
  Description of Artificial Sequence: Synthetic oligonucleotide
cugaaaaucagacagggau

SEQ ID NO: 168909 - RNA, 19 nt, Artificial Sequence
  Description of Artificial Sequence: Synthetic oligonucleotide
caaccagagagcaucgaug

SEQ ID NO: 168910 - RNA, 19 nt, Artificial Sequence
  Description of Artificial Sequence: Synthetic oligonucleotide
cuacagcuugaguaggacc

SEQ ID NO: 168911 - RNA, 19 nt, Artificial Sequence
  Description of Artificial Sequence: Synthetic oligonucleotide
agcgucagucacuuugagg

SEQ ID NO: 168912 - RNA, 19 nt, Artificial Sequence
  Description of Artificial Sequence: Synthetic oligonucleotide
uugaguaggaccugcugaa

SEQ ID NO: 168913 - RNA, 19 nt, Artificial Sequence
  Description of Artificial Sequence: Synthetic oligonucleotide
aggucagcacauuuagaag

SEQ ID NO: 168914 - RNA, 19 nt, Artificial Sequence
  Description of Artificial Sequence: Synthetic oligonucleotide
agucacaaagucguuacca

SEQ ID NO: 168915 - RNA, 19 nt, Artificial Sequence
  Description of Artificial Sequence: Synthetic oligonucleotide
aaaggucacacagcaauau

SEQ ID NO: 168916 - RNA, 19 nt, Artificial Sequence
  Description of Artificial Sequence: Synthetic oligonucleotide
aucggugagguguugauuu

SEQ ID NO: 168917 - RNA, 19 nt, Artificial Sequence
  Description of Artificial Sequence: Synthetic oligonucleotide
gcuaaagagacacugugca

SEQ ID NO: 168918 - RNA, 19 nt, Artificial Sequence
  Description of Artificial Sequence: Synthetic oligonucleotide
ucucguucaagccuccaau

SEQ ID NO: 168919 - RNA, 19 nt, Artificial Sequence
  Description of Artificial Sequence: Synthetic oligonucleotide
uauacaccccagcaacaca

SEQ ID NO: 168920 - RNA, 19 nt, Artificial Sequence
  Description of Artificial Sequence: Synthetic oligonucleotide
uugguuuccuggucgaagu

SEQ ID NO: 168921 - RNA, 19 nt, Artificial Sequence
  Description of Artificial Sequence: Synthetic oligonucleotide
uauuauuguguaagcuaaa

SEQ ID NO: 168922 - RNA, 19 nt, Artificial Sequence
  Description of Artificial Sequence: Synthetic oligonucleotide
auagaccugauguucucca

SEQ ID NO: 168923 - RNA, 19 nt, Artificial Sequence
  Description of Artificial Sequence: Synthetic oligonucleotide
ucauuaacaucagaaguuu

SEQ ID NO: 168924 - RNA, 19 nt, Artificial Sequence
  Description of Artificial Sequence: Synthetic oligonucleotide
guggcuuaccgacaaauca

SEQ ID NO: 168925 - RNA, 19 nt, Artificial Sequence
  Description of Artificial Sequence: Synthetic oligonucleotide
acauagaccugauguucuc

SEQ ID NO: 168926 - RNA, 19 nt, Artificial Sequence
  Description of Artificial Sequence: Synthetic oligonucleotide
uguucuccaucaguaacgc

SEQ ID NO: 168927 - RNA, 19 nt, Artificial Sequence
  Description of Artificial Sequence: Synthetic oligonucleotide
auacagccuaaaccauagc

SEQ ID NO: 168928 - RNA, 19 nt, Artificial Sequence
  Description of Artificial Sequence: Synthetic oligonucleotide
auguuucgagugucuauuc

SEQ ID NO: 168929 - RNA, 19 nt, Artificial Sequence
  Description of Artificial Sequence: Synthetic oligonucleotide
uuacuacaugcacuucuga

SEQ ID NO: 168930 - RNA, 19 nt, Artificial Sequence
  Description of Artificial Sequence: Synthetic oligonucleotide
gauaaacuaucagaggucu

SEQ ID NO: 168931 - RNA, 19 nt, Artificial Sequence
  Description of Artificial Sequence: Synthetic oligonucleotide
aggucuuguuugucaacac

SEQ ID NO: 168932 - RNA, 19 nt, Artificial Sequence
  Description of Artificial Sequence: Synthetic oligonucleotide
ugccaacugaucuuccucu

SEQ ID NO: 168933 - RNA, 19 nt, Artificial Sequence
  Description of Artificial Sequence: Synthetic oligonucleotide
auuauuguguaagcuaaaa

SEQ ID NO: 168934 - RNA, 19 nt, Artificial Sequence
  Description of Artificial Sequence: Synthetic oligonucleotide
gaauggaucagauguacau

SEQ ID NO: 168935 - RNA, 19 nt, Artificial Sequence
  Description of Artificial Sequence: Synthetic oligonucleotide
ugguaugauagaacagaaa

SEQ ID NO: 168936 - RNA, 19 nt, Artificial Sequence
  Description of Artificial Sequence: Synthetic oligonucleotide
agucuaccaaacuccacgu

SEQ ID NO: 168937 - RNA, 19 nt, Artificial Sequence
  Description of Artificial Sequence: Synthetic oligonucleotide
aucucaagccaugugcauc

SEQ ID NO: 168938 - RNA, 19 nt, Artificial Sequence
  Description of Artificial Sequence: Synthetic oligonucleotide
guaugauagaacagaaaga

SEQ ID NO: 168939 - RNA, 19 nt, Artificial Sequence
  Description of Artificial Sequence: Synthetic oligonucleotide
cuucgcaaaagcgucaguc

SEQ ID NO: 168940 - RNA, 19 nt, Artificial Sequence
  Description of Artificial Sequence: Synthetic oligonucleotide
aucagaaguuuuaauagaa

SEQ ID NO: 168941 - RNA, 19 nt, Artificial Sequence
  Description of Artificial Sequence: Synthetic oligonucleotide
cuuaaaacccuugggcaug

SEQ ID NO: 168942 - RNA, 19 nt, Artificial Sequence
  Description of Artificial Sequence: Synthetic oligonucleotide
agcaauaugccagauugaa

SEQ ID NO: 168943 - RNA, 19 nt, Artificial Sequence
  Description of Artificial Sequence: Synthetic oligonucleotide
agcacuaccgcugucuuga

SEQ ID NO: 168944 - RNA, 19 nt, Artificial Sequence
  Description of Artificial Sequence: Synthetic oligonucleotide
aggaaagggaaaguauuug

SEQ ID NO: 168945 - RNA, 19 nt, Artificial Sequence
  Description of Artificial Sequence: Synthetic oligonucleotide
agcccagaaaaguuaacaa

SEQ ID NO: 168946 - RNA, 19 nt, Artificial Sequence
  Description of Artificial Sequence: Synthetic oligonucleotide
aauucacugucuugaccau

SEQ ID NO: 168947 - RNA, 19 nt, Artificial Sequence
  Description of Artificial Sequence: Synthetic oligonucleotide
uguagacaugagcuucgca

SEQ ID NO: 168948 - RNA, 19 nt, Artificial Sequence
  Description of Artificial Sequence: Synthetic oligonucleotide
acuguagacaugagcuucg

SEQ ID NO: 168949 - RNA, 19 nt, Artificial Sequence
  Description of Artificial Sequence: Synthetic oligonucleotide
gguaggcucuaacauaccc

SEQ ID NO: 168950 - RNA, 19 nt, Artificial Sequence
  Description of Artificial Sequence: Synthetic oligonucleotide
guuacuacaugcacuucug

SEQ ID NO: 168951 - RNA, 19 nt, Artificial Sequence
  Description of Artificial Sequence: Synthetic oligonucleotide
agggaaguaacuuccucau

SEQ ID NO: 168952 - RNA, 19 nt, Artificial Sequence
  Description of Artificial Sequence: Synthetic oligonucleotide
uggaaagcacuaccgcugu

SEQ ID NO: 168953 - RNA, 19 nt, Artificial Sequence
  Description of Artificial Sequence: Synthetic oligonucleotide
ucagggaaguaacuuccuc

SEQ ID NO: 168954 - RNA, 19 nt, Artificial Sequence
  Description of Artificial Sequence: Synthetic oligonucleotide
guacauguauucauuucug

SEQ ID NO: 168955 - RNA, 19 nt, Artificial Sequence
  Description of Artificial Sequence: Synthetic oligonucleotide
ucuccaaaucacacuaauu

SEQ ID NO: 168956 - RNA, 19 nt, Artificial Sequence
  Description of Artificial Sequence: Synthetic oligonucleotide
aacuaucagaggucuguuu

SEQ ID NO: 168957 - RNA, 19 nt, Artificial Sequence
  Description of Artificial Sequence: Synthetic oligonucleotide
aaacuggacgggugggaga

SEQ ID NO: 168958 - RNA, 19 nt, Artificial Sequence
  Description of Artificial Sequence: Synthetic oligonucleotide
aaagcgucagucacuuuga

SEQ ID NO: 168959 - RNA, 19 nt, Artificial Sequence
  Description of Artificial Sequence: Synthetic oligonucleotide
aggcagcccaagaacaacc

SEQ ID NO: 168960 - RNA, 19 nt, Artificial Sequence
  Description of Artificial Sequence: Synthetic oligonucleotide
aaagcacuaccgcugucuu

SEQ ID NO: 168961 - RNA, 19 nt, Artificial Sequence
  Description of Artificial Sequence: Synthetic oligonucleotide
aagcgucagucacuuugag

SEQ ID NO: 168962 - RNA, 19 nt, Artificial Sequence
  Description of Artificial Sequence: Synthetic oligonucleotide
uuacacuggucccuccuaa

SEQ ID NO: 168963 - RNA, 19 nt, Artificial Sequence
  Description of Artificial Sequence: Synthetic oligonucleotide
uaucauggcaagucacaaa

SEQ ID NO: 168964 - RNA, 19 nt, Artificial Sequence
  Description of Artificial Sequence: Synthetic oligonucleotide
gggauuugagcuuuuguga

SEQ ID NO: 168965 - RNA, 19 nt, Artificial Sequence
  Description of Artificial Sequence: Synthetic oligonucleotide
ucuauucccaaagcacaca

SEQ ID NO: 168966 - RNA, 19 nt, Artificial Sequence
  Description of Artificial Sequence: Synthetic oligonucleotide
augaagguuaagucaggaa

SEQ ID NO: 168967 - RNA, 19 nt, Artificial Sequence
  Description of Artificial Sequence: Synthetic oligonucleotide
uuuacacuggucccuccua

SEQ ID NO: 168968 - RNA, 19 nt, Artificial Sequence
  Description of Artificial Sequence: Synthetic oligonucleotide
cacgucucagacugaauuc

SEQ ID NO: 168969 - RNA, 19 nt, Artificial Sequence
  Description of Artificial Sequence: Synthetic oligonucleotide
ugagucuaccaaacuccac

SEQ ID NO: 168970 - RNA, 19 nt, Artificial Sequence
  Description of Artificial Sequence: Synthetic oligonucleotide
aacuguauauacagccuaa

SEQ ID NO: 168971 - RNA, 19 nt, Artificial Sequence
  Description of Artificial Sequence: Synthetic oligonucleotide
gacaucacucauugaaucu

SEQ ID NO: 168972 - RNA, 19 nt, Artificial Sequence
  Description of Artificial Sequence: Synthetic oligonucleotide
gacagugauccacacccca

SEQ ID NO: 168973 - RNA, 19 nt, Artificial Sequence
  Description of Artificial Sequence: Synthetic oligonucleotide
auuuaggacuucaguaugu

SEQ ID NO: 168974 - RNA, 19 nt, Artificial Sequence
  Description of Artificial Sequence: Synthetic oligonucleotide
uguaagcuaaaaggaaauu

SEQ ID NO: 168975 - RNA, 19 nt, Artificial Sequence
  Description of Artificial Sequence: Synthetic oligonucleotide
aacaaaagguggaguggug

SEQ ID NO: 168976 - RNA, 19 nt, Artificial Sequence
  Description of Artificial Sequence: Synthetic oligonucleotide
aagcacuaccgcugucuug

SEQ ID NO: 168977 - RNA, 19 nt, Artificial Sequence
  Description of Artificial Sequence: Synthetic oligonucleotide
cauagaccugauguucucc

SEQ ID NO: 168978 - RNA, 19 nt, Artificial Sequence
  Description of Artificial Sequence: Synthetic oligonucleotide
acagugauccacaccccac
